United States Patent Application Publication US 2007/0042381 A1 - sequence listing, part 46

SEQ ID NO: 2060259 - RNA, 13 nt, Human
uucucucaccucc

SEQ ID NO: 2060260 - RNA, 22 nt, Human
uucuccuuucacaaccuucugu

SEQ ID NO: 2060261 - RNA, 18 nt, Human
uucuccuuucacaaccuu

SEQ ID NO: 2060262 - RNA, 23 nt, Human
uucucuaaaugaggggccucagg

SEQ ID NO: 2060263 - RNA, 16 nt, Human
uucuccuuuuuacccc

SEQ ID NO: 2060264 - RNA, 16 nt, Human
aucauaaacugugugc

SEQ ID NO: 2060265 - RNA, 15 nt, Human
aucacuaugcauuuu

SEQ ID NO: 2060266 - RNA, 20 nt, Human
aucauauauauacauacaug

SEQ ID NO: 2060267 - RNA, 15 nt, Human
aucauaaaacuugau

SEQ ID NO: 2060268 - RNA, 19 nt, Human
aucaguugcgcguucugaa

SEQ ID NO: 2060269 - RNA, 20 nt, Human
aucaguugcgcguucugaaa

SEQ ID NO: 2060270 - RNA, 22 nt, Human
aucaguugaggccaggaguuua

SEQ ID NO: 2060271 - RNA, 14 nt, Human
aucauaaacugugu

SEQ ID NO: 2060272 - RNA, 13 nt, Human
aucauaaaauaaa

SEQ ID NO: 2060273 - RNA, 22 nt, Human
aucaguuugcuagcagaaaucu

SEQ ID NO: 2060274 - RNA, 12 nt, Human
aucauaaaauaa

SEQ ID NO: 2060275 - RNA, 23 nt, Human
aucauccacugugccaugugcca

SEQ ID NO: 2060276 - RNA, 17 nt, Human
aucauuaaauuuuuccu

SEQ ID NO: 2060277 - RNA, 23 nt, Human
aucauuaaauuuuuccuuagcau

SEQ ID NO: 2060278 - RNA, 15 nt, Human
aucauuaagacaacu

SEQ ID NO: 2060279 - RNA, 21 nt, Human
aucauccacugugccaugugc

SEQ ID NO: 2060280 - RNA, 16 nt, Human
aucauuauaaacguga

SEQ ID NO: 2060281 - RNA, 23 nt, Human
aucauuauaaacgugaugaucag

SEQ ID NO: 2060282 - RNA, 20 nt, Human
aucauuauaacugaaggaga

SEQ ID NO: 2060283 - RNA, 22 nt, Human
aucauuauaacugaaggagaag

SEQ ID NO: 2060284 - RNA, 19 nt, Human
aucagucugauucccaagc

SEQ ID NO: 2060285 - RNA, 14 nt, Human
aucaggugcugcca

SEQ ID NO: 2060286 - RNA, 12 nt, Human
aucaguguuaaa

SEQ ID NO: 2060287 - RNA, 13 nt, Human
aucaguguuaaaa

SEQ ID NO: 2060288 - RNA, 14 nt, Human
aucaguguuaaaaa

SEQ ID NO: 2060289 - RNA, 19 nt, Human
aucaguguuaaaaaauuuu

SEQ ID NO: 2060290 - RNA, 15 nt, Human
aucaguuacucagcc

SEQ ID NO: 2060291 - RNA, 16 nt, Human
aucaguuacucagccc

SEQ ID NO: 2060292 - RNA, 17 nt, Human
aucaguuacucagcccu

SEQ ID NO: 2060293 - RNA, 18 nt, Human
aucaguuacucagcccug

SEQ ID NO: 2060294 - RNA, 19 nt, Human
aucaguuacucagcccugg

SEQ ID NO: 2060295 - RNA, 21 nt, Human
aucaguuacucagcccugggc

SEQ ID NO: 2060296 - RNA, 18 nt, Human
aucaguuacucugaaggg

SEQ ID NO: 2060297 - RNA, 15 nt, Human
aucaggugcugccau

SEQ ID NO: 2060298 - RNA, 19 nt, Human
aucaggugcugccauccag

SEQ ID NO: 2060299 - RNA, 17 nt, Human
aucaggugcugccaucc

SEQ ID NO: 2060300 - RNA, 19 nt, Human
auccugcuucugauaugca

SEQ ID NO: 2060301 - RNA, 21 nt, Human
auccugcuucugauaugcagu

SEQ ID NO: 2060302 - RNA, 21 nt, Human
auccuggcacccggccccugc

SEQ ID NO: 2060303 - RNA, 20 nt, Human
auccuggcacccggccccug

SEQ ID NO: 2060304 - RNA, 19 nt, Human
auccuggcacccggccccu

SEQ ID NO: 2060305 - RNA, 17 nt, Human
auccuggcacccggccc

SEQ ID NO: 2060306 - RNA, 20 nt, Human
auccuggggcauuaaaaaaa

SEQ ID NO: 2060307 - RNA, 22 nt, Human
auccuggguggucugcaggcag

SEQ ID NO: 2060308 - RNA, 23 nt, Human
auccuggguggucugcaggcagg

SEQ ID NO: 2060309 - RNA, 22 nt, Human
auccugguugguguugcagaag

SEQ ID NO: 2060310 - RNA, 15 nt, Human
auccuggcuuugccc

SEQ ID NO: 2060311 - RNA, 16 nt, Human
auccuggcuuugccca

SEQ ID NO: 2060312 - RNA, 18 nt, Human
auccuggcuuugcccaac

SEQ ID NO: 2060313 - RNA, 19 nt, Human
auccuggcucuguggcuug

SEQ ID NO: 2060314 - RNA, 22 nt, Human
auccuggcucuguggcuugcua

SEQ ID NO: 2060315 - RNA, 18 nt, Human
auccuggcucuguggcuu

SEQ ID NO: 2060316 - RNA, 23 nt, Human
auccuggcacccggccccugcug

SEQ ID NO: 2060317 - RNA, 22 nt, Human
auccuggcacccggccccugcu

SEQ ID NO: 2060318 - RNA, 14 nt, Human
auccuguccucagc

SEQ ID NO: 2060319 - RNA, 21 nt, Human
auccugucuuuaaggaaaaaa

SEQ ID NO: 2060320 - RNA, 23 nt, Human
auccugucuuuaaggaaaaaaag

SEQ ID NO: 2060321 - RNA, 17 nt, Human
auccugucuguucaugg

SEQ ID NO: 2060322 - RNA, 19 nt, Human
auccugucuuuaaggaaaa

SEQ ID NO: 2060323 - RNA, 17 nt, Human
auccuguccucagcuuc

SEQ ID NO: 2060324 - RNA, 18 nt, Human
auccuguccucagcuucu

SEQ ID NO: 2060325 - RNA, 15 nt, Human
auccugugugguuua

SEQ ID NO: 2060326 - RNA, 20 nt, Human
auccugugugguuuagugua

SEQ ID NO: 2060327 - RNA, 21 nt, Human
auccugugugguuuaguguaa

SEQ ID NO: 2060328 - RNA, 14 nt, Human
auccuguguuucua

SEQ ID NO: 2060329 - RNA, 18 nt, Human
auccuuaaguaucagaaa

SEQ ID NO: 2060330 - RNA, 19 nt, Human
auccuuaaguaucagaaag

SEQ ID NO: 2060331 - RNA, 18 nt, Human
auccuguguuucuaggga

SEQ ID NO: 2060332 - RNA, 12 nt, Human
auccuguugaaa

SEQ ID NO: 2060333 - RNA, 13 nt, Human
auccuguugaaaa

SEQ ID NO: 2060334 - RNA, 14 nt, Human
auccuguugaaaag

SEQ ID NO: 2060335 - RNA, 15 nt, Human
auccuguugaaaagc

SEQ ID NO: 2060336 - RNA, 17 nt, Human
auccuguugaaaagcca

SEQ ID NO: 2060337 - RNA, 18 nt, Human
auccuguugaaaagccau

SEQ ID NO: 2060338 - RNA, 19 nt, Human
auccuguugaaaagccaug

SEQ ID NO: 2060339 - RNA, 13 nt, Human
auccuguggguga

SEQ ID NO: 2060340 - RNA, 15 nt, Human
aucgggaacaguguu

SEQ ID NO: 2060341 - RNA, 16 nt, Human
aucgggaacaguguuu

SEQ ID NO: 2060342 - RNA, 17 nt, Human
aucgggaacaguguuuc

SEQ ID NO: 2060343 - RNA, 21 nt, Human
aucgggaacaguguuucccau

SEQ ID NO: 2060344 - RNA, 16 nt, Human
aucgggagcagugucu

SEQ ID NO: 2060345 - RNA, 17 nt, Human
aucgggagcagugucuu

SEQ ID NO: 2060346 - RNA, 18 nt, Human
aucgggagcagugucuuc

SEQ ID NO: 2060347 - RNA, 21 nt, Human
aucgggagcagugucuuccau

SEQ ID NO: 2060348 - RNA, 14 nt, Human
aucggggccagagg

SEQ ID NO: 2060349 - RNA, 15 nt, Human
aucgggggcuggggc

SEQ ID NO: 2060350 - RNA, 14 nt, Human
aucgguccugucuc

SEQ ID NO: 2060351 - RNA, 18 nt, Human
aucggugaaacuaacaga

SEQ ID NO: 2060352 - RNA, 19 nt, Human
aucggugaaacuaacagau

SEQ ID NO: 2060353 - RNA, 21 nt, Human
aucggugaaacuaacagauaa

SEQ ID NO: 2060354 - RNA, 15 nt, Human
aucgguguccauuua

SEQ ID NO: 2060355 - RNA, 17 nt, Human
aucgguguccauuuaua

SEQ ID NO: 2060356 - RNA, 23 nt, Human
aucgguguccauuuauagaauaa

SEQ ID NO: 2060357 - RNA, 14 nt, Human
uucuuuugccauga

SEQ ID NO: 2060358 - RNA, 21 nt, Human
uucuuuugcccuucacagugu

SEQ ID NO: 2060359 - RNA, 22 nt, Human
uucuuuugcccuucacaguguu

SEQ ID NO: 2060360 - RNA, 23 nt, Human
uucuuuugcccuucacaguguuu

SEQ ID NO: 2060361 - RNA, 12 nt, Human
uucuuuuguaaa

SEQ ID NO: 2060362 - RNA, 16 nt, Human
uucuguuuugccugaa

SEQ ID NO: 2060363 - RNA, 14 nt, Human
auccugcccagugu

SEQ ID NO: 2060364 - RNA, 15 nt, Human
auccugcccaguguu

SEQ ID NO: 2060365 - RNA, 21 nt, Human
auccugcccaguguuguuugu

SEQ ID NO: 2060366 - RNA, 22 nt, Human
auccugcccaguguuguuugua

SEQ ID NO: 2060367 - RNA, 13 nt, Human
auccugcuaaguu

SEQ ID NO: 2060368 - RNA, 24 nt, Human
auccugagccaucggugaaacuaa

SEQ ID NO: 2060369 - RNA, 12 nt, Human
auccugagccau

SEQ ID NO: 2060370 - RNA, 17 nt, Human
uugagaagcguauguuu

SEQ ID NO: 2060371 - RNA, 15 nt, Human
uugagaaaugaauaa

SEQ ID NO: 2060372 - RNA, 16 nt, Human
uugagaaaugaauaau

SEQ ID NO: 2060373 - RNA, 22 nt, Human
uugagaaaugaauaauuuccca

SEQ ID NO: 2060374 - RNA, 19 nt, Human
uugagaacugcauauguuu

SEQ ID NO: 2060375 - RNA, 21 nt, Human
uugagaacugcauauguuucg

SEQ ID NO: 2060376 - RNA, 20 nt, Human
uugacauaacacuauaaagg

SEQ ID NO: 2060377 - RNA, 19 nt, Human
uugacagggcacaccgggc

SEQ ID NO: 2060378 - RNA, 16 nt, Human
uugacaguaacuuggu

SEQ ID NO: 2060379 - RNA, 19 nt, Human
uugacaguaacuugguuau

SEQ ID NO: 2060380 - RNA, 22 nt, Human
uugacaguaacuugguuauaca

SEQ ID NO: 2060381 - RNA, 23 nt, Human
uugacaguaacuugguuauacau

SEQ ID NO: 2060382 - RNA, 12 nt, Human
uugauaaaguaa

SEQ ID NO: 2060383 - RNA, 21 nt, Human
uugagguggucugaauguucu

SEQ ID NO: 2060384 - RNA, 21 nt, Human
uugaguuuuguuuuaaaauua

SEQ ID NO: 2060385 - RNA, 12 nt, Human
uugaguuuuguu

SEQ ID NO: 2060386 - RNA, 17 nt, Human
uugagauagaagaacug

SEQ ID NO: 2060387 - RNA, 18 nt, Human
uugagauagaagaacugc

SEQ ID NO: 2060388 - RNA, 17 nt, Human
uugaggucuuuugacau

SEQ ID NO: 2060389 - RNA, 18 nt, Human
uugaggucuuuugacaug

SEQ ID NO: 2060390 - RNA, 19 nt, Human
uugaggucuuuugacaugu

SEQ ID NO: 2060391 - RNA, 22 nt, Human
uugaggucuuuugacaugugga

SEQ ID NO: 2060392 - RNA, 23 nt, Human
uugaggucuuuugacauguggaa

SEQ ID NO: 2060393 - RNA, 19 nt, Human
uugagguggaagcccuccu

SEQ ID NO: 2060394 - RNA, 22 nt, Human
uugagguggaagcccuccuucc

SEQ ID NO: 2060395 - RNA, 12 nt, Human
uugauaacagcu

SEQ ID NO: 2060396 - RNA, 13 nt, Human
uugauaacagcua

SEQ ID NO: 2060397 - RNA, 18 nt, Human
uugauaaauuccacugga

SEQ ID NO: 2060398 - RNA, 11 nt, Human
uugauaacagc

SEQ ID NO: 2060399 - RNA, 19 nt, Human
uugauaaauuccacuggac

SEQ ID NO: 2060400 - RNA, 21 nt, Human
uugauaaauuccacuggacuu

SEQ ID NO: 2060401 - RNA, 11 nt, Human
uugauaauaaa

SEQ ID NO: 2060402 - RNA, 16 nt, Human
aucuaagccuuuccau

SEQ ID NO: 2060403 - RNA, 18 nt, Human
aucuaagccuuuccauaa

SEQ ID NO: 2060404 - RNA, 17 nt, Human
aucuaagccuuuccaua

SEQ ID NO: 2060405 - RNA, 13 nt, Human
uugaauauauuau

SEQ ID NO: 2060406 - RNA, 19 nt, Human
uugaauauauuauaaucuu

SEQ ID NO: 2060407 - RNA, 15 nt, Human
uugaauauaaacacu

SEQ ID NO: 2060408 - RNA, 16 nt, Human
uugaauauaaacacua

SEQ ID NO: 2060409 - RNA, 18 nt, Human
uugaauauaaacacuaua

SEQ ID NO: 2060410 - RNA, 15 nt, Human
uugaagucacccggc

SEQ ID NO: 2060411 - RNA, 12 nt, Human
uugaaguaauga

SEQ ID NO: 2060412 - RNA, 16 nt, Human
uugaaguaaugaauuu

SEQ ID NO: 2060413 - RNA, 17 nt, Human
uugaaguaaugaauuuu

SEQ ID NO: 2060414 - RNA, 19 nt, Human
uugaaggucuugauuuguu

SEQ ID NO: 2060415 - RNA, 17 nt, Human
uugaaggaaagauuugu

SEQ ID NO: 2060416 - RNA, 16 nt, Human
uugaaggaugcugucu

SEQ ID NO: 2060417 - RNA, 14 nt, Human
uugaaggaugcugu

SEQ ID NO: 2060418 - RNA, 21 nt, Human
uugaaggaugcugucuucgua

SEQ ID NO: 2060419 - RNA, 15 nt, Human
uugaaggaucuguuu

SEQ ID NO: 2060420 - RNA, 15 nt, Human
aucuaaauguugaaa

SEQ ID NO: 2060421 - RNA, 15 nt, Human
aucuaacaauggaag

SEQ ID NO: 2060422 - RNA, 16 nt, Human
aucuaacaauggaaga

SEQ ID NO: 2060423 - RNA, 16 nt, Human
aucuaaacuuuaauau

SEQ ID NO: 2060424 - RNA, 18 nt, Human
aucuaaacuuuaauaugu

SEQ ID NO: 2060425 - RNA, 21 nt, Human
aucuaaacuuuaauauguauu

SEQ ID NO: 2060426 - RNA, 22 nt, Human
aucuaaacuuuaauauguauuu

SEQ ID NO: 2060427 - RNA, 15 nt, Human
aucgugacaacacuu

SEQ ID NO: 2060428 - RNA, 14 nt, Human
aucgugacaacacu

SEQ ID NO: 2060429 - RNA, 23 nt, Human
aucgucucucccucccuuugaaa

SEQ ID NO: 2060430 - RNA, 18 nt, Human
aucgugccguuacucucc

SEQ ID NO: 2060431 - RNA, 13 nt, Human
auauuguacaguu

SEQ ID NO: 2060432 - RNA, 14 nt, Human
auauuguacaguuu

SEQ ID NO: 2060433 - RNA, 12 nt, Human
auauugucagau

SEQ ID NO: 2060434 - RNA, 15 nt, Human
auauugucagauauu

SEQ ID NO: 2060435 - RNA, 17 nt, Human
auauugucagauauuuu

SEQ ID NO: 2060436 - RNA, 16 nt, Human
auauugucagauauuu

SEQ ID NO: 2060437 - RNA, 13 nt, Human
auauugugaagua

SEQ ID NO: 2060438 - RNA, 13 nt, Human
auauuguuuucag

SEQ ID NO: 2060439 - RNA, 17 nt, Human
auauuguuuucagugua

SEQ ID NO: 2060440 - RNA, 12 nt, Human
auauuguuucua

SEQ ID NO: 2060441 - RNA, 19 nt, Human
auauuuaaauguaaagaca

SEQ ID NO: 2060442 - RNA, 21 nt, Human
auauuuaaauguaaagacaaa

SEQ ID NO: 2060443 - RNA, 14 nt, Human
auauuuaagaaaau

SEQ ID NO: 2060444 - RNA, 16 nt, Human
auauuuaagaaaauac

SEQ ID NO: 2060445 - RNA, 18 nt, Human
auauuuaagaaaauacaa

SEQ ID NO: 2060446 - RNA, 19 nt, Human
auauuuaagaaaauacaau

SEQ ID NO: 2060447 - RNA, 20 nt, Human
auauuuaagaaaauacaaua

SEQ ID NO: 2060448 - RNA, 22 nt, Human
auauuuaagaaaauacaauaaa

SEQ ID NO: 2060449 - RNA, 23 nt, Human
auauuuaagaaaauacaauaaac

SEQ ID NO: 2060450 - RNA, 15 nt, Human
auauuuaaguauuca

SEQ ID NO: 2060451 - RNA, 19 nt, Human
auauuuaaguauucaagaa

SEQ ID NO: 2060452 - RNA, 20 nt, Human
auauuuaaguauucaagaaa

SEQ ID NO: 2060453 - RNA, 14 nt, Human
auauuuaaggagau

SEQ ID NO: 2060454 - RNA, 23 nt, Human
auauuuaaggagauguaagagcu

SEQ ID NO: 2060455 - RNA, 12 nt, Human
auauuguacagu

SEQ ID NO: 2060456 - RNA, 15 nt, Human
auauugauaugcuua

SEQ ID NO: 2060457 - RNA, 15 nt, Human
auauugagacaaaaa

SEQ ID NO: 2060458 - RNA, 16 nt, Human
auauugagacaaaaau

SEQ ID NO: 2060459 - RNA, 20 nt, Human
auauugagacaaaaauuauc

SEQ ID NO: 2060460 - RNA, 21 nt, Human
auauuccugcauuugugaaau

SEQ ID NO: 2060461 - RNA, 16 nt, Human
auauguucaacuggag

SEQ ID NO: 2060462 - RNA, 18 nt, Human
auauguucuuuaaaaaua

SEQ ID NO: 2060463 - RNA, 17 nt, Human
auauguguuuuucacau

SEQ ID NO: 2060464 - RNA, 19 nt, Human
auauguguuuuucacauuu

SEQ ID NO: 2060465 - RNA, 22 nt, Human
auauguguuuuucacauuugcg

SEQ ID NO: 2060466 - RNA, 20 nt, Human
auauguuaaccucaguguca

SEQ ID NO: 2060467 - RNA, 12 nt, Human
auauguucaacu

SEQ ID NO: 2060468 - RNA, 15 nt, Human
auauguucaacugga

SEQ ID NO: 2060469 - RNA, 23 nt, Human
uucccagugacacuucagagagc

SEQ ID NO: 2060470 - RNA, 23 nt, Human
uucccagcucucccucuggcccu

SEQ ID NO: 2060471 - RNA, 14 nt, Human
uucccagcucuccc

SEQ ID NO: 2060472 - RNA, 21 nt, Human
uuccagugagcuuaucaugcu

SEQ ID NO: 2060473 - RNA, 16 nt, Human
uucccagcucucccuc

SEQ ID NO: 2060474 - RNA, 17 nt, Human
uucccagcucucccucu

SEQ ID NO: 2060475 - RNA, 18 nt, Human
uucccagcucucccucug

SEQ ID NO: 2060476 - RNA, 19 nt, Human
uucccagcucucccucugg

SEQ ID NO: 2060477 - RNA, 20 nt, Human
uucccagcucucccucuggc

SEQ ID NO: 2060478 - RNA, 15 nt, Human
uucccagcugccccu

SEQ ID NO: 2060479 - RNA, 19 nt, Human
uucccagcugccccucccu

SEQ ID NO: 2060480 - RNA, 20 nt, Human
uucccagcugccccucccug

SEQ ID NO: 2060481 - RNA, 13 nt, Human
uucccagcugucu

SEQ ID NO: 2060482 - RNA, 18 nt, Human
uucccagcuucugccaca

SEQ ID NO: 2060483 - RNA, 16 nt, Human
auauuaagaaagacua

SEQ ID NO: 2060484 - RNA, 15 nt, Human
auauuaagaaagacu

SEQ ID NO: 2060485 - RNA, 17 nt, Human
auauuaagaaagacuau

SEQ ID NO: 2060486 - RNA, 22 nt, Human
auauuaagaaagacuaucuaaa

SEQ ID NO: 2060487 - RNA, 20 nt, Human
auauuacacaaauacuuauu

SEQ ID NO: 2060488 - RNA, 22 nt, Human
auauuacacaaauacuuauuca

SEQ ID NO: 2060489 - RNA, 23 nt, Human
auauuacacaaauacuuauucau

SEQ ID NO: 2060490 - RNA, 14 nt, Human
auauuaaaaauggu

SEQ ID NO: 2060491 - RNA, 15 nt, Human
auauuaaaaauggua

SEQ ID NO: 2060492 - RNA, 16 nt, Human
auauuaaaaaugguaa

SEQ ID NO: 2060493 - RNA, 19 nt, Human
auauuaaaaaugguaaaau

SEQ ID NO: 2060494 - RNA, 20 nt, Human
auauuaaaaaugguaaaauu

SEQ ID NO: 2060495 - RNA, 21 nt, Human
auauuaaaaaugguaaaauug

SEQ ID NO: 2060496 - RNA, 23 nt, Human
auauuaaaaaugguaaaauugca

SEQ ID NO: 2060497 - RNA, 14 nt, Human
auauuaaaaauugg

SEQ ID NO: 2060498 - RNA, 14 nt, Human
auauguugaugaaa

SEQ ID NO: 2060499 - RNA, 22 nt, Human
auauguugaugaaaaauagcaa

SEQ ID NO: 2060500 - RNA, 16 nt, Human
aucaauucauaucuau

SEQ ID NO: 2060501 - RNA, 18 nt, Human
aucaauguucauuguaau

SEQ ID NO: 2060502 - RNA, 13 nt, Human
aucaauuaaaugu

SEQ ID NO: 2060503 - RNA, 14 nt, Human
aucaauguucauug

SEQ ID NO: 2060504 - RNA, 15 nt, Human
aucaauguucauugu

SEQ ID NO: 2060505 - RNA, 16 nt, Human
aucaauguucauugua

SEQ ID NO: 2060506 - RNA, 17 nt, Human
aucaauguucauuguaa

SEQ ID NO: 2060507 - RNA, 15 nt, Human
aucaauuaaauguag

SEQ ID NO: 2060508 - RNA, 14 nt, Human
aucaauuaaaugua

SEQ ID NO: 2060509 - RNA, 15 nt, Human
aucaaggucguuuuu

SEQ ID NO: 2060510 - RNA, 23 nt, Human
aucaacugaaaguguuuccuuca

SEQ ID NO: 2060511 - RNA, 13 nt, Human
aucaauguucauu

SEQ ID NO: 2060512 - RNA, 13 nt, Human
aucaacucuaaua

SEQ ID NO: 2060513 - RNA, 14 nt, Human
aucaaggucguuuu

SEQ ID NO: 2060514 - RNA, 17 nt, Human
aucacgccacugcacua

SEQ ID NO: 2060515 - RNA, 15 nt, Human
aucacgccacugcac

SEQ ID NO: 2060516 - RNA, 14 nt, Human
aucaauuugucauu

SEQ ID NO: 2060517 - RNA, 18 nt, Human
aucaauuugucauuuuga

SEQ ID NO: 2060518 - RNA, 19 nt, Human
aucaauuugucauuuugaa

SEQ ID NO: 2060519 - RNA, 20 nt, Human
aucaauuugucauuuugaag

SEQ ID NO: 2060520 - RNA, 22 nt, Human
aucaauuugucauuuugaagcu

SEQ ID NO: 2060521 - RNA, 17 nt, Human
aucacgccacugcacuc

SEQ ID NO: 2060522 - RNA, 20 nt, Human
aucacgccacugcacuccag

SEQ ID NO: 2060523 - RNA, 23 nt, Human
aucacgccacugcacuccagccu

SEQ ID NO: 2060524 - RNA, 21 nt, Human
aucacucucagugcuucuuac

SEQ ID NO: 2060525 - RNA, 13 nt, Human
uuccuuaaacugu

SEQ ID NO: 2060526 - RNA, 15 nt, Human
uuccuuaaacugugu

SEQ ID NO: 2060527 - RNA, 16 nt, Human
uuccuuaaacugugug

SEQ ID NO: 2060528 - RNA, 17 nt, Human
uuccuuaaacugugugg

SEQ ID NO: 2060529 - RNA, 16 nt, Human
uuccuuacugcagaau

SEQ ID NO: 2060530 - RNA, 15 nt, Human
auauuuuuguuuguu

SEQ ID NO: 2060531 - RNA, 16 nt, Human
auauuuuuguuuguuu

SEQ ID NO: 2060532 - RNA, 19 nt, Human
auauuuuuguuuguuuugu

SEQ ID NO: 2060533 - RNA, 20 nt, Human
auauuuuuguuuguuuugug

SEQ ID NO: 2060534 - RNA, 20 nt, Human
uuccgacaaccgaugcucca

SEQ ID NO: 2060535 - RNA, 22 nt, Human
uuccgacaaccgaugcuccagc

SEQ ID NO: 2060536 - RNA, 23 nt, Human
uuccgacaaccgaugcuccagcc

SEQ ID NO: 2060537 - RNA, 15 nt, Human
uucccuaccucaggc

SEQ ID NO: 2060538 - RNA, 13 nt, Human
uucccuaccucag

SEQ ID NO: 2060539 - RNA, 14 nt, Human
uucccuaccucagg

SEQ ID NO: 2060540 - RNA, 19 nt, Human
uucccuaagccaagggccu

SEQ ID NO: 2060541 - RNA, 15 nt, Human
uucccuaagccaagg

SEQ ID NO: 2060542 - RNA, 12 nt, Human
uucccgcucagc

SEQ ID NO: 2060543 - RNA, 15 nt, Human
uucccgcucagcccu

SEQ ID NO: 2060544 - RNA, 14 nt, Human
uucccgcucagccc

SEQ ID NO: 2060545 - RNA, 23 nt, Human
uucccgaaccccaaggagggaga

SEQ ID NO: 2060546 - RNA, 14 nt, Human
uuccccuuucccca

SEQ ID NO: 2060547 - RNA, 17 nt, Human
uuccccuuuccccacuc

SEQ ID NO: 2060548 - RNA, 15 nt, Human
auauuuacauaugaa

SEQ ID NO: 2060549 - RNA, 22 nt, Human
uuccuguuguuauggaaacugu

SEQ ID NO: 2060550 - RNA, 14 nt, Human
uuccuggcuucuua

SEQ ID NO: 2060551 - RNA, 22 nt, Human
uuccucuuuuuauuuaguuccu

SEQ ID NO: 2060552 - RNA, 12 nt, Human
uuccugaaagaa

SEQ ID NO: 2060553 - RNA, 15 nt, Human
uuccugaaaugcagu

SEQ ID NO: 2060554 - RNA, 17 nt, Human
uuccugaaagaaacagu

SEQ ID NO: 2060555 - RNA, 18 nt, Human
uuccugaaagaaacaguu

SEQ ID NO: 2060556 - RNA, 18 nt, Human
uuccucuccacugccuuc

SEQ ID NO: 2060557 - RNA, 16 nt, Human
uuccucuccacugccu

SEQ ID NO: 2060558 - RNA, 19 nt, Human
uuccucuccacugccuucg

SEQ ID NO: 2060559 - RNA, 14 nt, Human
uuccuaaaugcagu

SEQ ID NO: 2060560 - RNA, 13 nt, Human
uuccuaaaugcag

SEQ ID NO: 2060561 - RNA, 21 nt, Human
uuccggaauccuguccucagc

SEQ ID NO: 2060562 - RNA, 17 nt, Human
uuccuaaggcacccaca

SEQ ID NO: 2060563 - RNA, 19 nt, Human
uuccuaacaggauuagaca

SEQ ID NO: 2060564 - RNA, 16 nt, Human
uuccuaaaugcaguga

SEQ ID NO: 2060565 - RNA, 14 nt, Human
uuccuaacacagca

SEQ ID NO: 2060566 - RNA, 18 nt, Human
uuccuaacacagcaugug

SEQ ID NO: 2060567 - RNA, 19 nt, Human
uuccuaacacagcaugugu

SEQ ID NO: 2060568 - RNA, 20 nt, Human
uucauaucuauuuauuaaau

SEQ ID NO: 2060569 - RNA, 13 nt, Human
uucagucuuucau

SEQ ID NO: 2060570 - RNA, 13 nt, Human
uucagucuuuucc

SEQ ID NO: 2060571 - RNA, 14 nt, Human
uucagucuuuuccu

SEQ ID NO: 2060572 - RNA, 20 nt, Human
uucagugagggucuucuuac

SEQ ID NO: 2060573 - RNA, 16 nt, Human
uucagugaaagcauca

SEQ ID NO: 2060574 - RNA, 14 nt, Human
uucaguaagccgug

SEQ ID NO: 2060575 - RNA, 15 nt, Human
uucagguuuuguaaa

SEQ ID NO: 2060576 - RNA, 19 nt, Human
uucagguuuuguaaagaug

SEQ ID NO: 2060577 - RNA, 15 nt, Human
uucaguaaaaaacaa

SEQ ID NO: 2060578 - RNA, 16 nt, Human
uucaguaauaaaacau

SEQ ID NO: 2060579 - RNA, 18 nt, Human
uucaguaauaaaacaucu

SEQ ID NO: 2060580 - RNA, 20 nt, Human
uucaguaauaaacuguguuu

SEQ ID NO: 2060581 - RNA, 19 nt, Human
uucagguagcugccccugg

SEQ ID NO: 2060582 - RNA, 14 nt, Human
uucagguacuaaau

SEQ ID NO: 2060583 - RNA, 17 nt, Human
uucagguaacaggcaga

SEQ ID NO: 2060584 - RNA, 20 nt, Human
uucagguguuuaguugcaga

SEQ ID NO: 2060585 - RNA, 13 nt, Human
auauauguguuuu

SEQ ID NO: 2060586 - RNA, 15 nt, Human
auauauguguuuuuc

SEQ ID NO: 2060587 - RNA, 21 nt, Human
auauauguguuuuucacauuu

SEQ ID NO: 2060588 - RNA, 23 nt, Human
auauauguguuuuucacauuugc

SEQ ID NO: 2060589 - RNA, 15 nt, Human
uucaucaguguuaaa

SEQ ID NO: 2060590 - RNA, 16 nt, Human
uucaucaguguuaaaa

SEQ ID NO: 2060591 - RNA, 10 nt, Human
auauauuuau

SEQ ID NO: 2060592 - RNA, 12 nt, Human
auauauuuauaa

SEQ ID NO: 2060593 - RNA, 13 nt, Human
auauauuuauaac

SEQ ID NO: 2060594 - RNA, 16 nt, Human
auauauguugauuucu

SEQ ID NO: 2060595 - RNA, 20 nt, Human
auauauguugauuucuugua

SEQ ID NO: 2060596 - RNA, 22 nt, Human
auauauguuuuaagaggcaggg

SEQ ID NO: 2060597 - RNA, 21 nt, Human
auauauguuuuaagaggcagg

SEQ ID NO: 2060598 - RNA, 13 nt, Human
auauauuuuaauu

SEQ ID NO: 2060599 - RNA, 23 nt, Human
auauauuuauaacucaucauaaa

SEQ ID NO: 2060600 - RNA, 14 nt, Human
auauauuucagaua

SEQ ID NO: 2060601 - RNA, 14 nt, Human
auauauuuauaacu

SEQ ID NO: 2060602 - RNA, 15 nt, Human
auauauuuauaacuc

SEQ ID NO: 2060603 - RNA, 16 nt, Human
auauauuuauaacuca

SEQ ID NO: 2060604 - RNA, 21 nt, Human
auauauuuauaacucaucaua

SEQ ID NO: 2060605 - RNA, 22 nt, Human
uucagauauaaaagacugacca

SEQ ID NO: 2060606 - RNA, 16 nt, Human
uucagaaccucuuccc

SEQ ID NO: 2060607 - RNA, 17 nt, Human
uucagaaccucuucccc

SEQ ID NO: 2060608 - RNA, 18 nt, Human
uucagaaccucuucccca

SEQ ID NO: 2060609 - RNA, 19 nt, Human
uucagaaccucuuccccag

SEQ ID NO: 2060610 - RNA, 16 nt, Human
uucagaagacacugca

SEQ ID NO: 2060611 - RNA, 16 nt, Human
uucagauauauuuuuc

SEQ ID NO: 2060612 - RNA, 19 nt, Human
uucacuuucacauagaugu

SEQ ID NO: 2060613 - RNA, 20 nt, Human
uucagaacaccaagacuuga

SEQ ID NO: 2060614 - RNA, 12 nt, Human
uucagaaccucu

SEQ ID NO: 2060615 - RNA, 15 nt, Human
uucagaaccucuucc

SEQ ID NO: 2060616 - RNA, 12 nt, Human
uucagaaaacag

SEQ ID NO: 2060617 - RNA, 17 nt, Human
uucagaaaacagaaaaa

SEQ ID NO: 2060618 - RNA, 18 nt, Human
uucagaaaacagaaaaaa

SEQ ID NO: 2060619 - RNA, 19 nt, Human
uucagaaaacagaaaaaaa

SEQ ID NO: 2060620 - RNA, 22 nt, Human
uucagaaaacagaaaaaaaaca

SEQ ID NO: 2060621 - RNA, 23 nt, Human
uucagaaaacagaaaaaaaacac

SEQ ID NO: 2060622 - RNA, 23 nt, Human
uucagaaaacccuuuucuacagu

SEQ ID NO: 2060623 - RNA, 16 nt, Human
uucagcauauuuauag

SEQ ID NO: 2060624 - RNA, 13 nt, Human
uucagcauucuua

SEQ ID NO: 2060625 - RNA, 19 nt, Human
uucagcauucuuagccugu

SEQ ID NO: 2060626 - RNA, 20 nt, Human
uucagcauucuuagccugug

SEQ ID NO: 2060627 - RNA, 16 nt, Human
uucagguaacaggcag

SEQ ID NO: 2060628 - RNA, 15 nt, Human
uucagguaacaggca

SEQ ID NO: 2060629 - RNA, 22 nt, Human
uucaggguuggccccugcccgg

SEQ ID NO: 2060630 - RNA, 19 nt, Human
uucaggguuggccccugcc

SEQ ID NO: 2060631 - RNA, 17 nt, Human
uucaggguuggccccug

SEQ ID NO: 2060632 - RNA, 16 nt, Human
uucaggguuggccccu

SEQ ID NO: 2060633 - RNA, 18 nt, Human
uucagcucacacaugaga

SEQ ID NO: 2060634 - RNA, 14 nt, Human
uucaggguuggccc

SEQ ID NO: 2060635 - RNA, 13 nt, Human
auauauguuuuaa

SEQ ID NO: 2060636 - RNA, 14 nt, Human
auaugaaauuuaau

SEQ ID NO: 2060637 - RNA, 14 nt, Human
auaugacagcuguc

SEQ ID NO: 2060638 - RNA, 15 nt, Human
auaugacagcugucc

SEQ ID NO: 2060639 - RNA, 21 nt, Human
auaugacagcugucccuguca

SEQ ID NO: 2060640 - RNA, 22 nt, Human
auaugaauacagggcaugcauu

SEQ ID NO: 2060641 - RNA, 16 nt, Human
auaugacggaagaaca

SEQ ID NO: 2060642 - RNA, 13 nt, Human
auaugacucacau

SEQ ID NO: 2060643 - RNA, 18 nt, Human
auaugacggaagaacaua

SEQ ID NO: 2060644 - RNA, 20 nt, Human
auaugacggaagaacauaga

SEQ ID NO: 2060645 - RNA, 20 nt, Human
auaugacucacaugaugcau

SEQ ID NO: 2060646 - RNA, 23 nt, Human
auaugacggaagaacauagaacu

SEQ ID NO: 2060647 - RNA, 12 nt, Human
auaugaacauag

SEQ ID NO: 2060648 - RNA, 18 nt, Human
auaugcaaacauaacaaa

SEQ ID NO: 2060649 - RNA, 21 nt, Human
auaugcaaacauaacaaaauc

SEQ ID NO: 2060650 - RNA, 22 nt, Human
auaugcaaacauaacaaaauca

SEQ ID NO: 2060651 - RNA, 18 nt, Human
auauguaguauaaagaaa

SEQ ID NO: 2060652 - RNA, 19 nt, Human
auauguaguauaaagaaaa

SEQ ID NO: 2060653 - RNA, 16 nt, Human
auauguagaaggcaca

SEQ ID NO: 2060654 - RNA, 23 nt, Human
auauggggggccaacaccaggga

SEQ ID NO: 2060655 - RNA, 18 nt, Human
auauggggggccaacacc

SEQ ID NO: 2060656 - RNA, 16 nt, Human
auauggggaugcagca

SEQ ID NO: 2060657 - RNA, 20 nt, Human
auauggggaugcagcauuau

SEQ ID NO: 2060658 - RNA, 17 nt, Human
auauggggggccaacac

SEQ ID NO: 2060659 - RNA, 16 nt, Human
auauguguguguaugu

SEQ ID NO: 2060660 - RNA, 20 nt, Human
auauguguguguauguuugc

SEQ ID NO: 2060661 - RNA, 15 nt, Human
uucauuaaagcauuu

SEQ ID NO: 2060662 - RNA, 13 nt, Human
uucauuaaagcau

SEQ ID NO: 2060663 - RNA, 21 nt, Human
uucauugccuuaacuggagcc

SEQ ID NO: 2060664 - RNA, 15 nt, Human
uucauugccaguguc

SEQ ID NO: 2060665 - RNA, 16 nt, Human
uucauugccagugucu

SEQ ID NO: 2060666 - RNA, 17 nt, Human
uucauugccagugucuu

SEQ ID NO: 2060667 - RNA, 19 nt, Human
uucauugccagugucuuuc

SEQ ID NO: 2060668 - RNA, 13 nt, Human
uuccaacugcugc

SEQ ID NO: 2060669 - RNA, 15 nt, Human
uuccaacugcugccc

SEQ ID NO: 2060670 - RNA, 16 nt, Human
uuccaacugcugcccc

SEQ ID NO: 2060671 - RNA, 22 nt, Human
uuccaacugcugccccaaagga

SEQ ID NO: 2060672 - RNA, 12 nt, Human
uuccaagacauu

SEQ ID NO: 2060673 - RNA, 13 nt, Human
uuccaagacauug

SEQ ID NO: 2060674 - RNA, 14 nt, Human
uuccaagacauugu

SEQ ID NO: 2060675 - RNA, 13 nt, Human
uucauugggcugu

SEQ ID NO: 2060676 - RNA, 17 nt, Human
uucauuguaauguuacu

SEQ ID NO: 2060677 - RNA, 11 nt, Human
uuccacaaaau

SEQ ID NO: 2060678 - RNA, 18 nt, Human
uuccacaaaaucugucca

SEQ ID NO: 2060679 - RNA, 13 nt, Human
uuccaauuuggaa

SEQ ID NO: 2060680 - RNA, 22 nt, Human
uuccaauuuacauacucugcuu

SEQ ID NO: 2060681 - RNA, 16 nt, Human
uuccaagaccugacuc

SEQ ID NO: 2060682 - RNA, 18 nt, Human
uuccaagacuccagcccu

SEQ ID NO: 2060683 - RNA, 16 nt, Human
uuccaagacauuguca

SEQ ID NO: 2060684 - RNA, 17 nt, Human
uuccaagacauugucaa

SEQ ID NO: 2060685 - RNA, 19 nt, Human
uuccaagacauugucaaua

SEQ ID NO: 2060686 - RNA, 20 nt, Human
uuccaagacauugucaauaa

SEQ ID NO: 2060687 - RNA, 16 nt, Human
uucauugacuaucaaa

SEQ ID NO: 2060688 - RNA, 19 nt, Human
uucauucuugaaagcugug

SEQ ID NO: 2060689 - RNA, 13 nt, Human
uucauucuugaaa

SEQ ID NO: 2060690 - RNA, 18 nt, Human
uucauugauaugaaaaau

SEQ ID NO: 2060691 - RNA, 20 nt, Human
uucauuauuggaauuaaccu

SEQ ID NO: 2060692 - RNA, 14 nt, Human
uucauucuggucuc

SEQ ID NO: 2060693 - RNA, 13 nt, Human
uucauuauuggaa

SEQ ID NO: 2060694 - RNA, 17 nt, Human
uucauuauuggaauuaa

SEQ ID NO: 2060695 - RNA, 18 nt, Human
uucauuauuggaauuaac

SEQ ID NO: 2060696 - RNA, 17 nt, Human
uuccacaggucucagaa

SEQ ID NO: 2060697 - RNA, 20 nt, Human
uuccacauccggaggagaag

SEQ ID NO: 2060698 - RNA, 14 nt, Human
uuccacgaugaaaa

SEQ ID NO: 2060699 - RNA, 19 nt, Human
uuccacgaugaaaaacuuc

SEQ ID NO: 2060700 - RNA, 15 nt, Human
uuccacgcugucucc

SEQ ID NO: 2060701 - RNA, 15 nt, Human
uuccaccuucccaug

SEQ ID NO: 2060702 - RNA, 18 nt, Human
uuccacgcugucuccaga

SEQ ID NO: 2060703 - RNA, 19 nt, Human
uuccacgcugucuccagac

SEQ ID NO: 2060704 - RNA, 13 nt, Human
uuccaccuggaag

SEQ ID NO: 2060705 - RNA, 13 nt, Human
uuccaccuuaaau

SEQ ID NO: 2060706 - RNA, 14 nt, Human
uuccaccuuaaauu

SEQ ID NO: 2060707 - RNA, 16 nt, Human
uuccaccuuaaauuaa

SEQ ID NO: 2060708 - RNA, 17 nt, Human
uuccaccuuaaauuaaa

SEQ ID NO: 2060709 - RNA, 18 nt, Human
uuccaccuuaaauuaaac

SEQ ID NO: 2060710 - RNA, 20 nt, Human
uuccaccuuaaauuaaacaa

SEQ ID NO: 2060711 - RNA, 12 nt, Human
uuccaccagccu

SEQ ID NO: 2060712 - RNA, 11 nt, Human
uuccaccagcc

SEQ ID NO: 2060713 - RNA, 19 nt, Human
uuccacguacugcagccuc

SEQ ID NO: 2060714 - RNA, 18 nt, Human
uuccagguuuaagcuguu

SEQ ID NO: 2060715 - RNA, 17 nt, Human
uuccagguuuaagcugu

SEQ ID NO: 2060716 - RNA, 19 nt, Human
uuccaguaccuuugucaca

SEQ ID NO: 2060717 - RNA, 17 nt, Human
uuccaguaccuuuguca

SEQ ID NO: 2060718 - RNA, 18 nt, Human
uuccaguaccuuugucac

SEQ ID NO: 2060719 - RNA, 15 nt, Human
uuucaguuuucagga

SEQ ID NO: 2060720 - RNA, 12 nt, Human
uuucagaaaaca

SEQ ID NO: 2060721 - RNA, 13 nt, Human
uuucagaaaacag

SEQ ID NO: 2060722 - RNA, 16 nt, Human
uuucagaaaacagaaa

SEQ ID NO: 2060723 - RNA, 19 nt, Human
uuucagaaaacagaaaaaa

SEQ ID NO: 2060724 - RNA, 21 nt, Human
uuucaguugaucacuggcaau

SEQ ID NO: 2060725 - RNA, 21 nt, Human
uuucacuuucacauagauguc

SEQ ID NO: 2060726 - RNA, 24 nt, Human
uuucacugcuggcugccuuagaac

SEQ ID NO: 2060727 - RNA, 24 nt, Human
uuucacucuuauugcccacgcugg

SEQ ID NO: 2060728 - RNA, 14 nt, Human
uuuauuuuuuucua

SEQ ID NO: 2060729 - RNA, 15 nt, Human
uuuauuuuuuauaca

SEQ ID NO: 2060730 - RNA, 16 nt, Human
uuuauuuuuuauacag

SEQ ID NO: 2060731 - RNA, 16 nt, Human
uuucaccuacuuugua

SEQ ID NO: 2060732 - RNA, 17 nt, Human
uuucaccuacuuuguaa

SEQ ID NO: 2060733 - RNA, 20 nt, Human
uuucaccuacuuuguaagug

SEQ ID NO: 2060734 - RNA, 15 nt, Human
uuucacccacagaaa

SEQ ID NO: 2060735 - RNA, 17 nt, Human
uuucacccacagaaaga

SEQ ID NO: 2060736 - RNA, 18 nt, Human
uuucacccacagaaagag

SEQ ID NO: 2060737 - RNA, 19 nt, Human
uuucacccacagaaagaga

SEQ ID NO: 2060738 - RNA, 20 nt, Human
uuucacccacagaaagagag

SEQ ID NO: 2060739 - RNA, 22 nt, Human
uuucaccccacccuuccccucc

SEQ ID NO: 2060740 - RNA, 19 nt, Human
uuuccagguuuaagcuguu

SEQ ID NO: 2060741 - RNA, 14 nt, Human
uuucauaaauuuga

SEQ ID NO: 2060742 - RNA, 15 nt, Human
uuuccauaaggaaug

SEQ ID NO: 2060743 - RNA, 15 nt, Human
uuuccaguaccuuug

SEQ ID NO: 2060744 - RNA, 19 nt, Human
uuuccagugagcuuaucau

SEQ ID NO: 2060745 - RNA, 12 nt, Human
uuuccagugcaa

SEQ ID NO: 2060746 - RNA, 22 nt, Human
uuuccaguggccuggcuccgcu

SEQ ID NO: 2060747 - RNA, 12 nt, Human
uuucccauaauu

SEQ ID NO: 2060748 - RNA, 14 nt, Human
uuucccauaauuuu

SEQ ID NO: 2060749 - RNA, 21 nt, Human
augcuuauuuuaaaauuuuau

SEQ ID NO: 2060750 - RNA, 23 nt, Human
auggaacccuuuuggcccccgag

SEQ ID NO: 2060751 - RNA, 17 nt, Human
auggaaccgcaggaagc

SEQ ID NO: 2060752 - RNA, 14 nt, Human
augcuuauuuuaaa

SEQ ID NO: 2060753 - RNA, 16 nt, Human
augcuuauuuuaaaau

SEQ ID NO: 2060754 - RNA, 19 nt, Human
augcuuaucaucuaaagau

SEQ ID NO: 2060755 - RNA, 14 nt, Human
uuuauuuuuuaagu

SEQ ID NO: 2060756 - RNA, 15 nt, Human
uuuauuuuuuacauu

SEQ ID NO: 2060757 - RNA, 17 nt, Human
uuuauuuuuuaaguauu

SEQ ID NO: 2060758 - RNA, 21 nt, Human
uuuauuuucuuuuguaaaugu

SEQ ID NO: 2060759 - RNA, 16 nt, Human
uuuauuuuccucccca

SEQ ID NO: 2060760 - RNA, 22 nt, Human
uuuauuuucugguagauagaaa

SEQ ID NO: 2060761 - RNA, 15 nt, Human
uuuauuuuagcaguu

SEQ ID NO: 2060762 - RNA, 19 nt, Human
uuuauuuuagcaguucugc

SEQ ID NO: 2060763 - RNA, 23 nt, Human
uuuauuuuagcaguucugcaaau

SEQ ID NO: 2060764 - RNA, 11 nt, Human
uuuauuuuaua

SEQ ID NO: 2060765 - RNA, 21 nt, Human
uuuauuuuauauaauaaagua

SEQ ID NO: 2060766 - RNA, 14 nt, Human
auggaauaacaugu

SEQ ID NO: 2060767 - RNA, 15 nt, Human
auggaauaacaugua

SEQ ID NO: 2060768 - RNA, 16 nt, Human
auggaauaacucugug

SEQ ID NO: 2060769 - RNA, 16 nt, Human
auggaaccgcaggaag

SEQ ID NO: 2060770 - RNA, 17 nt, Human
auggaagguuuguauau

SEQ ID NO: 2060771 - RNA, 22 nt, Human
auggaagguuuguauauuguca

SEQ ID NO: 2060772 - RNA, 12 nt, Human
uuuauuaagaug

SEQ ID NO: 2060773 - RNA, 14 nt, Human
uuuauuacuuauuu

SEQ ID NO: 2060774 - RNA, 22 nt, Human
augcuggcuguuggcugggggc

SEQ ID NO: 2060775 - RNA, 17 nt, Human
uuuauuaugcauaacug

SEQ ID NO: 2060776 - RNA, 20 nt, Human
uuuauuaugcauaacugaca

SEQ ID NO: 2060777 - RNA, 14 nt, Human
augcuggugagcca

SEQ ID NO: 2060778 - RNA, 21 nt, Human
augcugguuuuccuaaaugca

SEQ ID NO: 2060779 - RNA, 22 nt, Human
augcuggggcaagucccugacu

SEQ ID NO: 2060780 - RNA, 14 nt, Human
uuuauaugaacaua

SEQ ID NO: 2060781 - RNA, 19 nt, Human
augcuguauucuucuuugg

SEQ ID NO: 2060782 - RNA, 14 nt, Human
augcuguauauguu

SEQ ID NO: 2060783 - RNA, 19 nt, Human
uuuauuaaauguagaaagu

SEQ ID NO: 2060784 - RNA, 18 nt, Human
uuuauuaacaaauuaugu

SEQ ID NO: 2060785 - RNA, 12 nt, Human
uuuauuaacaaa

SEQ ID NO: 2060786 - RNA, 15 nt, Human
uuuauuaagauggau

SEQ ID NO: 2060787 - RNA, 16 nt, Human
uuuaugguuucuccag

SEQ ID NO: 2060788 - RNA, 16 nt, Human
uuuauguauguuuaca

SEQ ID NO: 2060789 - RNA, 20 nt, Human
uuuauguauguuuacacugu

SEQ ID NO: 2060790 - RNA, 21 nt, Human
uuuauguauguuuacacuguc

SEQ ID NO: 2060791 - RNA, 22 nt, Human
uuuauguauguuuacacuguca

SEQ ID NO: 2060792 - RNA, 17 nt, Human
uuuauaucccauuuuua

SEQ ID NO: 2060793 - RNA, 15 nt, Human
uuuauauauuuauaa

SEQ ID NO: 2060794 - RNA, 16 nt, Human
uuuauauauuuauaac

SEQ ID NO: 2060795 - RNA, 12 nt, Human
uuuauauauuua

SEQ ID NO: 2060796 - RNA, 19 nt, Human
uuuauguaaaauuuugccu

SEQ ID NO: 2060797 - RNA, 22 nt, Human
uuuauguaaacugcauuagaaa

SEQ ID NO: 2060798 - RNA, 22 nt, Human
uuuaggucaagaagaagaugga

SEQ ID NO: 2060799 - RNA, 19 nt, Human
uuuaguacccaccugagcu

SEQ ID NO: 2060800 - RNA, 16 nt, Human
uuuauauagcuugaaa

SEQ ID NO: 2060801 - RNA, 19 nt, Human
uuuauauagcuugaaacau

SEQ ID NO: 2060802 - RNA, 15 nt, Human
uuuagccuaguucau

SEQ ID NO: 2060803 - RNA, 23 nt, Human
uuuacuacuguggaaaaauauuu

SEQ ID NO: 2060804 - RNA, 21 nt, Human
uuuacuacuguggaaaaauau

SEQ ID NO: 2060805 - RNA, 12 nt, Human
uuuagcaugugu

SEQ ID NO: 2060806 - RNA, 18 nt, Human
uuuagcaguucugcaaau

SEQ ID NO: 2060807 - RNA, 21 nt, Human
uuuagcaguucugcaaauaga

SEQ ID NO: 2060808 - RNA, 23 nt, Human
uuuagcaguucugcaaauagaaa

SEQ ID NO: 2060809 - RNA, 16 nt, Human
uuuagcauaaaauuuu

SEQ ID NO: 2060810 - RNA, 20 nt, Human
uuuagcaugacaagccccag

SEQ ID NO: 2060811 - RNA, 23 nt, Human
uuuagcaugacaagccccaggca

SEQ ID NO: 2060812 - RNA, 13 nt, Human
uuuacucauuauc

SEQ ID NO: 2060813 - RNA, 13 nt, Human
uuuacuauuuuac

SEQ ID NO: 2060814 - RNA, 13 nt, Human
uuuaaagaaaagu

SEQ ID NO: 2060815 - RNA, 15 nt, Human
uuuaaagaaaaguuu

SEQ ID NO: 2060816 - RNA, 17 nt, Human
uuuaaagaaaaguuuug

SEQ ID NO: 2060817 - RNA, 21 nt, Human
uuuaaagaaaaguuuuguaaa

SEQ ID NO: 2060818 - RNA, 22 nt, Human
augccgcugcauccgugagcag

SEQ ID NO: 2060819 - RNA, 20 nt, Human
augcggcccaggauggcuuu

SEQ ID NO: 2060820 - RNA, 16 nt, Human
augcggcccaggaugg

SEQ ID NO: 2060821 - RNA, 18 nt, Human
augcggcaagaaggaauu

SEQ ID NO: 2060822 - RNA, 15 nt, Human
augccuaagaagaug

SEQ ID NO: 2060823 - RNA, 16 nt, Human
augccuaagaagauga

SEQ ID NO: 2060824 - RNA, 20 nt, Human
augccuaagaagaugacuuc

SEQ ID NO: 2060825 - RNA, 21 nt, Human
augccuaagaagaugacuucc

SEQ ID NO: 2060826 - RNA, 19 nt, Human
augcggccgcauucccuga

SEQ ID NO: 2060827 - RNA, 21 nt, Human
uuuaccugugcguuacuaauu

SEQ ID NO: 2060828 - RNA, 15 nt, Human
uuuaccugugaaaua

SEQ ID NO: 2060829 - RNA, 16 nt, Human
uuuaccugugaaauag

SEQ ID NO: 2060830 - RNA, 13 nt, Human
uuuacguagugua

SEQ ID NO: 2060831 - RNA, 19 nt, Human
uuuccuuaaauuaucuaaa

SEQ ID NO: 2060832 - RNA, 23 nt, Human
uuuccuuaaacuguguggacugu

SEQ ID NO: 2060833 - RNA, 21 nt, Human
uuuccuguuuuuguuaacuuu

SEQ ID NO: 2060834 - RNA, 16 nt, Human
uuuccuuaaacugugu

SEQ ID NO: 2060835 - RNA, 13 nt, Human
uuuccuguucagc

SEQ ID NO: 2060836 - RNA, 15 nt, Human
uuuccuguucagcau

SEQ ID NO: 2060837 - RNA, 16 nt, Human
uuuccuguucagcauu

SEQ ID NO: 2060838 - RNA, 18 nt, Human
uuuccuguucagcauucu

SEQ ID NO: 2060839 - RNA, 12 nt, Human
uuuccugugucu

SEQ ID NO: 2060840 - RNA, 17 nt, Human
augggccuccugugugu

SEQ ID NO: 2060841 - RNA, 19 nt, Human
uuuccuuccaucccuaccc

SEQ ID NO: 2060842 - RNA, 14 nt, Human
uuuccuuccauccc

SEQ ID NO: 2060843 - RNA, 15 nt, Human
uuuccuuccaucccu

SEQ ID NO: 2060844 - RNA, 16 nt, Human
uuuccuucccucaaag

SEQ ID NO: 2060845 - RNA, 16 nt, Human
uuuccuuccuucccug

SEQ ID NO: 2060846 - RNA, 15 nt, Human
uuuccuucucaucug

SEQ ID NO: 2060847 - RNA, 13 nt, Human
uuuccuucagugc

SEQ ID NO: 2060848 - RNA, 23 nt, Human
uuuccuucauucaacccaccugc

SEQ ID NO: 2060849 - RNA, 21 nt, Human
uuuccuucauucaacccaccu

SEQ ID NO: 2060850 - RNA, 21 nt, Human
uuuccuuuuaaaacacuucca

SEQ ID NO: 2060851 - RNA, 18 nt, Human
uuuccuuggggcaggcag

SEQ ID NO: 2060852 - RNA, 19 nt, Human
uuuccuuggggcaggcagu

SEQ ID NO: 2060853 - RNA, 18 nt, Human
uuuccuucucaucuguga

SEQ ID NO: 2060854 - RNA, 18 nt, Human
uuuccuuccuucccuggc

SEQ ID NO: 2060855 - RNA, 18 nt, Human
uuucgcaggauucuuccu

SEQ ID NO: 2060856 - RNA, 22 nt, Human
uuucgcaggauucuuccucccu

SEQ ID NO: 2060857 - RNA, 19 nt, Human
uuucgccguugaagaggaa

SEQ ID NO: 2060858 - RNA, 13 nt, Human
uuucguuaacauu

SEQ ID NO: 2060859 - RNA, 15 nt, Human
uuucguuaacauuga

SEQ ID NO: 2060860 - RNA, 18 nt, Human
uuucguuaacauugacca

SEQ ID NO: 2060861 - RNA, 19 nt, Human
uuucguuaacauugaccaa

SEQ ID NO: 2060862 - RNA, 12 nt, Human
uuucguuuguuu

SEQ ID NO: 2060863 - RNA, 14 nt, Human
uuucuaaaaaacag

SEQ ID NO: 2060864 - RNA, 21 nt, Human
augggacuggagucccuguga

SEQ ID NO: 2060865 - RNA, 15 nt, Human
augggccuccugugu

SEQ ID NO: 2060866 - RNA, 21 nt, Human
augggcaacccccagccugcu

SEQ ID NO: 2060867 - RNA, 19 nt, Human
augggcaacccccagccug

SEQ ID NO: 2060868 - RNA, 18 nt, Human
augggcaacccccagccu

SEQ ID NO: 2060869 - RNA, 22 nt, Human
augggagccccagggucuuccc

SEQ ID NO: 2060870 - RNA, 13 nt, Human
augggagccccag

SEQ ID NO: 2060871 - RNA, 13 nt, Human
augggacugggag

SEQ ID NO: 2060872 - RNA, 21 nt, Human
auggacccaauauuuaccaga

SEQ ID NO: 2060873 - RNA, 12 nt, Human
auggaccuaaca

SEQ ID NO: 2060874 - RNA, 13 nt, Human
auggaccuaacau

SEQ ID NO: 2060875 - RNA, 14 nt, Human
auggaccuaacauu

SEQ ID NO: 2060876 - RNA, 15 nt, Human
auggaccuaacauuc

SEQ ID NO: 2060877 - RNA, 21 nt, Human
auggccucagcugccucacuu

SEQ ID NO: 2060878 - RNA, 18 nt, Human
auggccucagcugccuca

SEQ ID NO: 2060879 - RNA, 19 nt, Human
auggccucagcugccucac

SEQ ID NO: 2060880 - RNA, 16 nt, Human
auggccucagcugccu

SEQ ID NO: 2060881 - RNA, 17 nt, Human
auggccucagcugccuc

SEQ ID NO: 2060882 - RNA, 19 nt, Human
auggacaugaucuucuuua

SEQ ID NO: 2060883 - RNA, 17 nt, Human
auggaauugcuuaccaa

SEQ ID NO: 2060884 - RNA, 21 nt, Human
uuucuuuaguuuuugugaagu

SEQ ID NO: 2060885 - RNA, 13 nt, Human
uuucuuuguggcu

SEQ ID NO: 2060886 - RNA, 22 nt, Human
uuucuuuugcccuucacagugu

SEQ ID NO: 2060887 - RNA, 16 nt, Human
uuucuuuuguaaaugu

SEQ ID NO: 2060888 - RNA, 21 nt, Human
uuucuggacugaagccugcag

SEQ ID NO: 2060889 - RNA, 23 nt, Human
uuucuggacugaagccugcagga

SEQ ID NO: 2060890 - RNA, 16 nt, Human
uuucuggccugccuuc

SEQ ID NO: 2060891 - RNA, 23 nt, Human
uuucuuguuuaucagcaguuguu

SEQ ID NO: 2060892 - RNA, 13 nt, Human
uuucugcccugcc

SEQ ID NO: 2060893 - RNA, 24 nt, Human
uuugaaacaacuuucucuuguaaa

SEQ ID NO: 2060894 - RNA, 14 nt, Human
uuugaaauaauaaa

SEQ ID NO: 2060895 - RNA, 19 nt, Human
uuugaaauagucuguguga

SEQ ID NO: 2060896 - RNA, 20 nt, Human
uuugaaauagucugugugaa

SEQ ID NO: 2060897 - RNA, 20 nt, Human
uuugaaaaggcgguacuagu

SEQ ID NO: 2060898 - RNA, 15 nt, Human
auggggagaaaagac

SEQ ID NO: 2060899 - RNA, 18 nt, Human
augggcuuguuuucuugc

SEQ ID NO: 2060900 - RNA, 20 nt, Human
auggggagaucggggccaga

SEQ ID NO: 2060901 - RNA, 23 nt, Human
auggggagaucggggccagaggc

SEQ ID NO: 2060902 - RNA, 16 nt, Human
auggggaaggaggcug

SEQ ID NO: 2060903 - RNA, 23 nt, Human
augggcuuguuuucuugccaaug

SEQ ID NO: 2060904 - RNA, 14 nt, Human
uuucucaaagaaau

SEQ ID NO: 2060905 - RNA, 15 nt, Human
uuucucaaagaaauu

SEQ ID NO: 2060906 - RNA, 16 nt, Human
uuucucaaagaaauuu

SEQ ID NO: 2060907 - RNA, 23 nt, Human
uuucucagccgcuucugacugcu

SEQ ID NO: 2060908 - RNA, 12 nt, Human
uuucucccagcu

SEQ ID NO: 2060909 - RNA, 20 nt, Human
uuucucccaggccaggcucc

SEQ ID NO: 2060910 - RNA, 12 nt, Human
uuucugcccugc

SEQ ID NO: 2060911 - RNA, 16 nt, Human
uuucugccagggagcu

SEQ ID NO: 2060912 - RNA, 14 nt, Human
uuucuaguugagga

SEQ ID NO: 2060913 - RNA, 16 nt, Human
uuucuaguugaggagu

SEQ ID NO: 2060914 - RNA, 14 nt, Human
uuucuagggaaaug

SEQ ID NO: 2060915 - RNA, 23 nt, Human
uuucuaggucaaggccugucccu

SEQ ID NO: 2060916 - RNA, 15 nt, Human
uuucuagggaaauga

SEQ ID NO: 2060917 - RNA, 18 nt, Human
uuucuagggaaaugaaag

SEQ ID NO: 2060918 - RNA, 18 nt, Human
augagccaccgcgcccag

SEQ ID NO: 2060919 - RNA, 21 nt, Human
augagccaccgcgcccagccu

SEQ ID NO: 2060920 - RNA, 14 nt, Human
augagccagacaaa

SEQ ID NO: 2060921 - RNA, 15 nt, Human
augagcagaagcucu

SEQ ID NO: 2060922 - RNA, 16 nt, Human
augagccucagcaucc

SEQ ID NO: 2060923 - RNA, 15 nt, Human
augagccucagcauc

SEQ ID NO: 2060924 - RNA, 12 nt, Human
augagccucagc

SEQ ID NO: 2060925 - RNA, 11 nt, Human
augagccagac

SEQ ID NO: 2060926 - RNA, 22 nt, Human
augagaucuaggugaggauuga

SEQ ID NO: 2060927 - RNA, 13 nt, Human
augagauccuuua

SEQ ID NO: 2060928 - RNA, 22 nt, Human
augagaucuaagccuuuccaua

SEQ ID NO: 2060929 - RNA, 23 nt, Human
augagaucuaagccuuuccauaa

SEQ ID NO: 2060930 - RNA, 15 nt, Human
augagauagaagaug

SEQ ID NO: 2060931 - RNA, 21 nt, Human
augagauagaagauguuugcu

SEQ ID NO: 2060932 - RNA, 19 nt, Human
augagaucccgccucuucu

SEQ ID NO: 2060933 - RNA, 13 nt, Human
augacauguguca

SEQ ID NO: 2060934 - RNA, 24 nt, Human
augacaucuucaaagcuugaagau

SEQ ID NO: 2060935 - RNA, 22 nt, Human
augacaguuauacugucgguuu

SEQ ID NO: 2060936 - RNA, 20 nt, Human
uuguccgguggaaggccuuc

SEQ ID NO: 2060937 - RNA, 21 nt, Human
uuguccgguggaaggccuucu

SEQ ID NO: 2060938 - RNA, 18 nt, Human
uugucccgauuguaacuc

SEQ ID NO: 2060939 - RNA, 13 nt, Human
uugucauuuugaa

SEQ ID NO: 2060940 - RNA, 15 nt, Human
uugucauuuugaagc

SEQ ID NO: 2060941 - RNA, 16 nt, Human
uugucauuuugaagcu

SEQ ID NO: 2060942 - RNA, 19 nt, Human
uugucauuuugaagcuaau

SEQ ID NO: 2060943 - RNA, 21 nt, Human
uugucauuuugaagcuaauua

SEQ ID NO: 2060944 - RNA, 13 nt, Human
uugucauugcuuu

SEQ ID NO: 2060945 - RNA, 15 nt, Human
uugucauugcuuuac

SEQ ID NO: 2060946 - RNA, 18 nt, Human
uugucauugcuuuacugg

SEQ ID NO: 2060947 - RNA, 22 nt, Human
uugucacucaacaaaagugcuu

SEQ ID NO: 2060948 - RNA, 21 nt, Human
uugucaucuuucuucuauuuu

SEQ ID NO: 2060949 - RNA, 19 nt, Human
uugucaucuuucuucuauu

SEQ ID NO: 2060950 - RNA, 18 nt, Human
uugucacacacuuuggcu

SEQ ID NO: 2060951 - RNA, 15 nt, Human
augauaaaacacaaa

SEQ ID NO: 2060952 - RNA, 21 nt, Human
augaguuuuugauagcuuuau

SEQ ID NO: 2060953 - RNA, 15 nt, Human
augauaaaaaauuuu

SEQ ID NO: 2060954 - RNA, 17 nt, Human
augauaaaaaauuuugu

SEQ ID NO: 2060955 - RNA, 21 nt, Human
augauaaaaaauuuuguaauu

SEQ ID NO: 2060956 - RNA, 22 nt, Human
augauaaaaaauuuuguaauuu

SEQ ID NO: 2060957 - RNA, 13 nt, Human
augaguuuuugau

SEQ ID NO: 2060958 - RNA, 19 nt, Human
augaguuuuugauagcuuu

SEQ ID NO: 2060959 - RNA, 20 nt, Human
augaguuuuugauagcuuua

SEQ ID NO: 2060960 - RNA, 16 nt, Human
augaguguaacaagaa

SEQ ID NO: 2060961 - RNA, 17 nt, Human
augaguguaacaagaaa

SEQ ID NO: 2060962 - RNA, 19 nt, Human
augaguguaacaagaaagg

SEQ ID NO: 2060963 - RNA, 20 nt, Human
augaguguaacaagaaagga

SEQ ID NO: 2060964 - RNA, 21 nt, Human
augaguguaacaagaaaggag

SEQ ID NO: 2060965 - RNA, 22 nt, Human
augaguguaacaagaaaggaga

SEQ ID NO: 2060966 - RNA, 23 nt, Human
augaguguaacaagaaaggagag

SEQ ID NO: 2060967 - RNA, 18 nt, Human
augagccucagcauccug

SEQ ID NO: 2060968 - RNA, 17 nt, Human
augagccucagcauccu

SEQ ID NO: 2060969 - RNA, 14 nt, Human
augaggucccaggc

SEQ ID NO: 2060970 - RNA, 15 nt, Human
augaggucccaggca

SEQ ID NO: 2060971 - RNA, 16 nt, Human
augaggucccaggcag

SEQ ID NO: 2060972 - RNA, 17 nt, Human
augaggucccaggcaga

SEQ ID NO: 2060973 - RNA, 18 nt, Human
augaggucccaggcagag

SEQ ID NO: 2060974 - RNA, 19 nt, Human
augaggucccaggcagaga

SEQ ID NO: 2060975 - RNA, 20 nt, Human
augaggucccaggcagagaa

SEQ ID NO: 2060976 - RNA, 14 nt, Human
augaggucugaaau

SEQ ID NO: 2060977 - RNA, 17 nt, Human
augaggucugaaaugga

SEQ ID NO: 2060978 - RNA, 15 nt, Human
augaggucugaaaug

SEQ ID NO: 2060979 - RNA, 14 nt, Human
augaggugcuggga

SEQ ID NO: 2060980 - RNA, 15 nt, Human
augaggugcugggag

SEQ ID NO: 2060981 - RNA, 16 nt, Human
augaggugcugggagg

SEQ ID NO: 2060982 - RNA, 17 nt, Human
augaggugcugggaggg

SEQ ID NO: 2060983 - RNA, 18 nt, Human
augaggugcugggaggga

SEQ ID NO: 2060984 - RNA, 19 nt, Human
augaggugcugggagggau

SEQ ID NO: 2060985 - RNA, 19 nt, Human
uuguuuuuuuuuuccacuu

SEQ ID NO: 2060986 - RNA, 22 nt, Human
uuuaaaaaaaauccuucuaauc

SEQ ID NO: 2060987 - RNA, 13 nt, Human
uuuaaaaaaguuu

SEQ ID NO: 2060988 - RNA, 14 nt, Human
uuuaaaaaaguuua

SEQ ID NO: 2060989 - RNA, 16 nt, Human
uuuaaaaaaguuuaaa

SEQ ID NO: 2060990 - RNA, 18 nt, Human
uuuaaaaaaguuuaaaau

SEQ ID NO: 2060991 - RNA, 21 nt, Human
uuuaaaaaaguuuaaaaugua

SEQ ID NO: 2060992 - RNA, 12 nt, Human
uuguuuuuauga

SEQ ID NO: 2060993 - RNA, 13 nt, Human
uuguuuuuccuug

SEQ ID NO: 2060994 - RNA, 21 nt, Human
uuguuuuuccuuguauuuaaa

SEQ ID NO: 2060995 - RNA, 22 nt, Human
uuguuuuuccuuguauuuaaau

SEQ ID NO: 2060996 - RNA, 16 nt, Human
uuguuuuuuaaagucu

SEQ ID NO: 2060997 - RNA, 21 nt, Human
uuguuuuuuaaagucuugcug

SEQ ID NO: 2060998 - RNA, 14 nt, Human
uuguuuuuuaguuc

SEQ ID NO: 2060999 - RNA, 12 nt, Human
uuguuuuuuauc

SEQ ID NO: 2061000 - RNA, 14 nt, Human
uuguuuuuuaucuu

SEQ ID NO: 2061001 - RNA, 18 nt, Human
uuguuuuuuuuuuccacu

SEQ ID NO: 2061002 - RNA, 16 nt, Human
uuguuuugugcagaga

SEQ ID NO: 2061003 - RNA, 14 nt, Human
uuguuuuguuuuaa

SEQ ID NO: 2061004 - RNA, 21 nt, Human
augcaaggcacuguacuaggc

SEQ ID NO: 2061005 - RNA, 15 nt, Human
augcaaagaaaauca

SEQ ID NO: 2061006 - RNA, 15 nt, Human
augaucuucuuuaua

SEQ ID NO: 2061007 - RNA, 18 nt, Human
augaucuucuuuauaauu

SEQ ID NO: 2061008 - RNA, 19 nt, Human
uuguugcaaguacugcugu

SEQ ID NO: 2061009 - RNA, 22 nt, Human
uuguugagguggucugaauguu

SEQ ID NO: 2061010 - RNA, 21 nt, Human
uuguugauaaauuccacugga

SEQ ID NO: 2061011 - RNA, 20 nt, Human
uuguugcucagcaaggggcu

SEQ ID NO: 2061012 - RNA, 21 nt, Human
uuguuggaaaagaauacagaa

SEQ ID NO: 2061013 - RNA, 20 nt, Human
augauauuuuuuuaagucuu

SEQ ID NO: 2061014 - RNA, 21 nt, Human
augauauuuuuuuaagucuuu

SEQ ID NO: 2061015 - RNA, 19 nt, Human
augauauuccauaguauau

SEQ ID NO: 2061016 - RNA, 13 nt, Human
augauauugcaua

SEQ ID NO: 2061017 - RNA, 18 nt, Human
augauauugcauaugcau

SEQ ID NO: 2061018 - RNA, 15 nt, Human
augaucacggcucac

SEQ ID NO: 2061019 - RNA, 19 nt, Human
augaucacggcucacugca

SEQ ID NO: 2061020 - RNA, 18 nt, Human
augaucacggcucacugc

SEQ ID NO: 2061021 - RNA, 23 nt, Human
augaucacggcucacugcagccu

SEQ ID NO: 2061022 - RNA, 18 nt, Human
augaucagcuguuuguca

SEQ ID NO: 2061023 - RNA, 19 nt, Human
augaucagcuguuugucau

SEQ ID NO: 2061024 - RNA, 16 nt, Human
augauccuaggcauuu

SEQ ID NO: 2061025 - RNA, 20 nt, Human
augaucagcuguuugucaua

SEQ ID NO: 2061026 - RNA, 15 nt, Human
augauccuaaugaau

SEQ ID NO: 2061027 - RNA, 14 nt, Human
augaucuucuuuau

SEQ ID NO: 2061028 - RNA, 14 nt, Human
augaucucugauga

SEQ ID NO: 2061029 - RNA, 19 nt, Human
uugugaagaaaaauaaagu

SEQ ID NO: 2061030 - RNA, 17 nt, Human
uugugaagauguuugca

SEQ ID NO: 2061031 - RNA, 14 nt, Human
uugugaaguacaua

SEQ ID NO: 2061032 - RNA, 19 nt, Human
uugugugugggcugugagu

SEQ ID NO: 2061033 - RNA, 20 nt, Human
uuguuccuaaguucuuagau

SEQ ID NO: 2061034 - RNA, 14 nt, Human
uuguucccucuccc

SEQ ID NO: 2061035 - RNA, 17 nt, Human
uuguucucucuauggua

SEQ ID NO: 2061036 - RNA, 18 nt, Human
uuguucucucuaugguaa

SEQ ID NO: 2061037 - RNA, 14 nt, Human
uuguugaggugguc

SEQ ID NO: 2061038 - RNA, 21 nt, Human
uuguugagguggucugaaugu

SEQ ID NO: 2061039 - RNA, 20 nt, Human
uuguugauaaauuccacugg

SEQ ID NO: 2061040 - RNA, 13 nt, Human
aucuuuccuuccu

SEQ ID NO: 2061041 - RNA, 15 nt, Human
aucuuuccuuccucu

SEQ ID NO: 2061042 - RNA, 11 nt, Human
aucuuuuacau

SEQ ID NO: 2061043 - RNA, 17 nt, Human
aucuuucacacuuccac

SEQ ID NO: 2061044 - RNA, 22 nt, Human
aucuuucacacuuccaccagcc

SEQ ID NO: 2061045 - RNA, 12 nt, Human
aucuuucaggaa

SEQ ID NO: 2061046 - RNA, 18 nt, Human
aucuuucacccacagaaa

SEQ ID NO: 2061047 - RNA, 19 nt, Human
aucuuucacccacagaaag

SEQ ID NO: 2061048 - RNA, 20 nt, Human
aucuuucacccacagaaaga

SEQ ID NO: 2061049 - RNA, 20 nt, Human
augaaagacuguacaaagua

SEQ ID NO: 2061050 - RNA, 23 nt, Human
augaaagauggcugugccucugc

SEQ ID NO: 2061051 - RNA, 20 nt, Human
augaaagauggcugugccuc

SEQ ID NO: 2061052 - RNA, 19 nt, Human
augaaagauggcugugccu

SEQ ID NO: 2061053 - RNA, 14 nt, Human
augaaaugagguca

SEQ ID NO: 2061054 - RNA, 14 nt, Human
uuggcugcagggag

SEQ ID NO: 2061055 - RNA, 22 nt, Human
uuggcuaggaccccuccaugug

SEQ ID NO: 2061056 - RNA, 22 nt, Human
uuggccugucucauccccaggg

SEQ ID NO: 2061057 - RNA, 17 nt, Human
uuggaccucgugcuuua

SEQ ID NO: 2061058 - RNA, 18 nt, Human
uuggaccucgugcuuuaa

SEQ ID NO: 2061059 - RNA, 21 nt, Human
uuggacggccugaugcucccu

SEQ ID NO: 2061060 - RNA, 13 nt, Human
uuggacuauuaua

SEQ ID NO: 2061061 - RNA, 15 nt, Human
uuggacgcacacagc

SEQ ID NO: 2061062 - RNA, 16 nt, Human
uuggacgcacacagcu

SEQ ID NO: 2061063 - RNA, 17 nt, Human
uuggacgcacacagcuu

SEQ ID NO: 2061064 - RNA, 13 nt, Human
uuggacggccuga

SEQ ID NO: 2061065 - RNA, 16 nt, Human
uuggccugucucaucc

SEQ ID NO: 2061066 - RNA, 23 nt, Human
uuggccugucucauccccagggg

SEQ ID NO: 2061067 - RNA, 22 nt, Human
uugcuacuuccugccuggucuc

SEQ ID NO: 2061068 - RNA, 19 nt, Human
uugcuagcuaugugaccuu

SEQ ID NO: 2061069 - RNA, 16 nt, Human
uugcuagcuaugugac

SEQ ID NO: 2061070 - RNA, 21 nt, Human
uugcuaucaaaauaaauugaa

SEQ ID NO: 2061071 - RNA, 14 nt, Human
uugaguaaucugau

SEQ ID NO: 2061072 - RNA, 18 nt, Human
uugcuaaucggguuguca

SEQ ID NO: 2061073 - RNA, 12 nt, Human
uugcuccacccc

SEQ ID NO: 2061074 - RNA, 16 nt, Human
uugcuccaccccacuc

SEQ ID NO: 2061075 - RNA, 17 nt, Human
uugcuccaccccacuca

SEQ ID NO: 2061076 - RNA, 20 nt, Human
uugcuccaccccacucacag

SEQ ID NO: 2061077 - RNA, 16 nt, Human
uugcuccccagugaag

SEQ ID NO: 2061078 - RNA, 13 nt, Human
uugcuccgccucu

SEQ ID NO: 2061079 - RNA, 19 nt, Human
uugcugaauacagaggcaa

SEQ ID NO: 2061080 - RNA, 11 nt, Human
uugcugagagc

SEQ ID NO: 2061081 - RNA, 23 nt, Human
uugcucaugcauagucccagcua

SEQ ID NO: 2061082 - RNA, 22 nt, Human
uugcugaaucggaaucucuggg

SEQ ID NO: 2061083 - RNA, 16 nt, Human
uugcuuggacuauuau

SEQ ID NO: 2061084 - RNA, 14 nt, Human
uugcuuuuuuaugg

SEQ ID NO: 2061085 - RNA, 16 nt, Human
uugcuuuaauuguuaa

SEQ ID NO: 2061086 - RNA, 18 nt, Human
uugcuuuaauuguuaaga

SEQ ID NO: 2061087 - RNA, 12 nt, Human
uugcuuuacugg

SEQ ID NO: 2061088 - RNA, 16 nt, Human
augacacugagaacag

SEQ ID NO: 2061089 - RNA, 21 nt, Human
augacacugagaacagaucuc

SEQ ID NO: 2061090 - RNA, 13 nt, Human
augacagagccag

SEQ ID NO: 2061091 - RNA, 16 nt, Human
augacagauguugaau

SEQ ID NO: 2061092 - RNA, 15 nt, Human
augacagcugucccu

SEQ ID NO: 2061093 - RNA, 16 nt, Human
augacagcugucccug

SEQ ID NO: 2061094 - RNA, 17 nt, Human
augacaggauguuugcu

SEQ ID NO: 2061095 - RNA, 17 nt, Human
augacagcugucccugu

SEQ ID NO: 2061096 - RNA, 19 nt, Human
augacagcugucccuguca

SEQ ID NO: 2061097 - RNA, 21 nt, Human
augacagcugucccugucacc

SEQ ID NO: 2061098 - RNA, 19 nt, Human
augacaagugagacaaaaa

SEQ ID NO: 2061099 - RNA, 18 nt, Human
augacaagccccaggcag

SEQ ID NO: 2061100 - RNA, 20 nt, Human
augacaagccccaggcaggc

SEQ ID NO: 2061101 - RNA, 19 nt, Human
augacacucguauaagcau

SEQ ID NO: 2061102 - RNA, 14 nt, Human
augacacugaaaug

SEQ ID NO: 2061103 - RNA, 15 nt, Human
augacacugaaaugc

SEQ ID NO: 2061104 - RNA, 16 nt, Human
augacacugaaaugcc

SEQ ID NO: 2061105 - RNA, 17 nt, Human
augacacugaaaugccu

SEQ ID NO: 2061106 - RNA, 15 nt, Human
augacaagccccagg

SEQ ID NO: 2061107 - RNA, 16 nt, Human
augacaagccccaggc

SEQ ID NO: 2061108 - RNA, 18 nt, Human
augacaacuucuaauugc

SEQ ID NO: 2061109 - RNA, 19 nt, Human
augacaacuucuaauugcc

SEQ ID NO: 2061110 - RNA, 20 nt, Human
augacaacuucuaauugcca

SEQ ID NO: 2061111 - RNA, 17 nt, Human
augacaaauaaguggaa

SEQ ID NO: 2061112 - RNA, 14 nt, Human
augacaacuucuaa

SEQ ID NO: 2061113 - RNA, 16 nt, Human
augacaacuucuaauu

SEQ ID NO: 2061114 - RNA, 23 nt, Human
augaauuuuuuucaucuucucug

SEQ ID NO: 2061115 - RNA, 21 nt, Human
uuguauauuauggaagauuuu

SEQ ID NO: 2061116 - RNA, 18 nt, Human
uuguauauuauggaagau

SEQ ID NO: 2061117 - RNA, 20 nt, Human
uuguauauuauggaagauuu

SEQ ID NO: 2061118 - RNA, 12 nt, Human
uuguauaaaaau

SEQ ID NO: 2061119 - RNA, 20 nt, Human
uuguauaaaaauagaagaau

SEQ ID NO: 2061120 - RNA, 14 nt, Human
uuguaaugucacca

SEQ ID NO: 2061121 - RNA, 15 nt, Human
uuguaauguuacuga

SEQ ID NO: 2061122 - RNA, 21 nt, Human
uuguaagugagagagacaaga

SEQ ID NO: 2061123 - RNA, 19 nt, Human
uuguaaguaaacugcccug

SEQ ID NO: 2061124 - RNA, 22 nt, Human
uugggguacccacugcucuggu

SEQ ID NO: 2061125 - RNA, 21 nt, Human
uugggguagcuagaggaacca

SEQ ID NO: 2061126 - RNA, 13 nt, Human
uugguuauacaug

SEQ ID NO: 2061127 - RNA, 14 nt, Human
uugguuauacauga

SEQ ID NO: 2061128 - RNA, 16 nt, Human
uugguuauacaugaca

SEQ ID NO: 2061129 - RNA, 18 nt, Human
uugguuauacaugacacu

SEQ ID NO: 2061130 - RNA, 21 nt, Human
uugguuauacaugacacugaa

SEQ ID NO: 2061131 - RNA, 23 nt, Human
uugguuauacaugacacugaaau

SEQ ID NO: 2061132 - RNA, 17 nt, Human
uugguucaucaguguua

SEQ ID NO: 2061133 - RNA, 18 nt, Human
uugguucaucaguguuaa

SEQ ID NO: 2061134 - RNA, 20 nt, Human
uugguucaucaguguuaaaa

SEQ ID NO: 2061135 - RNA, 14 nt, Human
uuguaacuccacca

SEQ ID NO: 2061136 - RNA, 20 nt, Human
uuguaagaaaccaaucaaga

SEQ ID NO: 2061137 - RNA, 23 nt, Human
uuguaagaaaccaaucaagauaa

SEQ ID NO: 2061138 - RNA, 21 nt, Human
uuguaaaaacagcauugcuuu

SEQ ID NO: 2061139 - RNA, 19 nt, Human
uuguaaaaacagcauugcu

SEQ ID NO: 2061140 - RNA, 20 nt, Human
uuguaaaaacagcauugcuu

SEQ ID NO: 2061141 - RNA, 23 nt, Human
uuguaaaaacagcauugcuuucu

SEQ ID NO: 2061142 - RNA, 21 nt, Human
augaacauagacuagagaaac

SEQ ID NO: 2061143 - RNA, 13 nt, Human
augaaccacaucu

SEQ ID NO: 2061144 - RNA, 20 nt, Human
augaaccacaucuugcucug

SEQ ID NO: 2061145 - RNA, 13 nt, Human
uugggcugagacu

SEQ ID NO: 2061146 - RNA, 15 nt, Human
uugggcugagacugg

SEQ ID NO: 2061147 - RNA, 17 nt, Human
uugggguacccacugcu

SEQ ID NO: 2061148 - RNA, 17 nt, Human
auuuuacuuuuuccugg

SEQ ID NO: 2061149 - RNA, 16 nt, Human
auuuuacuuuuuccug

SEQ ID NO: 2061150 - RNA, 13 nt, Human
auuuuaccaaguu

SEQ ID NO: 2061151 - RNA, 17 nt, Human
auuuuaccaaguuauau

SEQ ID NO: 2061152 - RNA, 18 nt, Human
auuuuaccaaguuauaua

SEQ ID NO: 2061153 - RNA, 19 nt, Human
auuuuaccaaguuauauaa

SEQ ID NO: 2061154 - RNA, 20 nt, Human
auuuuaccaaguuauauaaa

SEQ ID NO: 2061155 - RNA, 22 nt, Human
auuuuaccaaguuauauaaaga

SEQ ID NO: 2061156 - RNA, 23 nt, Human
auuuuaccaaguuauauaaagag

SEQ ID NO: 2061157 - RNA, 17 nt, Human
auuuuaccacugcugug

SEQ ID NO: 2061158 - RNA, 12 nt, Human
auuuuaauuuau

SEQ ID NO: 2061159 - RNA, 15 nt, Human
auuuuaauuagguua

SEQ ID NO: 2061160 - RNA, 18 nt, Human
auuuuaauuagguuaacu

SEQ ID NO: 2061161 - RNA, 20 nt, Human
auuuuaauuagguuaacuau

SEQ ID NO: 2061162 - RNA, 23 nt, Human
auuuuaauuagguuaacuaugua

SEQ ID NO: 2061163 - RNA, 17 nt, Human
auuuuaaaauuuuaucu

SEQ ID NO: 2061164 - RNA, 18 nt, Human
auuuuaaaauuuuaucuc

SEQ ID NO: 2061165 - RNA, 23 nt, Human
auuugaagcugcagugagcugug

SEQ ID NO: 2061166 - RNA, 20 nt, Human
auuugaagacaaaaauacuc

SEQ ID NO: 2061167 - RNA, 21 nt, Human
auuugaagacaaaaauacucu

SEQ ID NO: 2061168 - RNA, 14 nt, Human
auuugaaucagccu

SEQ ID NO: 2061169 - RNA, 17 nt, Human
auuugaaggucuugauu

SEQ ID NO: 2061170 - RNA, 11 nt, Human
auuugaaugaa

SEQ ID NO: 2061171 - RNA, 23 nt, Human
auuugaaucagccuacaggccuc

SEQ ID NO: 2061172 - RNA, 16 nt, Human
auuugaaucucaauuu

SEQ ID NO: 2061173 - RNA, 18 nt, Human
auuugaaucucaauuuga

SEQ ID NO: 2061174 - RNA, 13 nt, Human
auuugaaugaaaa

SEQ ID NO: 2061175 - RNA, 14 nt, Human
auuugaaugaaaaa

SEQ ID NO: 2061176 - RNA, 15 nt, Human
auuugaaugaaaaau

SEQ ID NO: 2061177 - RNA, 16 nt, Human
auuugaaugaaaaauu

SEQ ID NO: 2061178 - RNA, 21 nt, Human
auuuguuuuguguuguuugaa

SEQ ID NO: 2061179 - RNA, 12 nt, Human
auuuucagaauc

SEQ ID NO: 2061180 - RNA, 14 nt, Human
auuuucagaaucug

SEQ ID NO: 2061181 - RNA, 15 nt, Human
auuuucagaaucuga

SEQ ID NO: 2061182 - RNA, 17 nt, Human
auuuucagaaucugaau

SEQ ID NO: 2061183 - RNA, 20 nt, Human
auuuucagaaucugaaugua

SEQ ID NO: 2061184 - RNA, 21 nt, Human
auuuucagaaucugaauguaa

SEQ ID NO: 2061185 - RNA, 22 nt, Human
auuuucagaaucugaauguaau

SEQ ID NO: 2061186 - RNA, 12 nt, Human
auuuucagaccc

SEQ ID NO: 2061187 - RNA, 21 nt, Human
auuuucaguagggcuacaaaa

SEQ ID NO: 2061188 - RNA, 22 nt, Human
auuuucaguagggcuacaaaac

SEQ ID NO: 2061189 - RNA, 11 nt, Human
auuuucaguau

SEQ ID NO: 2061190 - RNA, 19 nt, Human
auuuucaguauaauuuaac

SEQ ID NO: 2061191 - RNA, 18 nt, Human
auuuucauguauaugugu

SEQ ID NO: 2061192 - RNA, 17 nt, Human
auuuucauguauaugug

SEQ ID NO: 2061193 - RNA, 12 nt, Human
auuuuccucccc

SEQ ID NO: 2061194 - RNA, 23 nt, Human
auuuuccacaagauucccagaga

SEQ ID NO: 2061195 - RNA, 20 nt, Human
auuuuccacaagauucccag

SEQ ID NO: 2061196 - RNA, 21 nt, Human
auuuuccacaagauucccaga

SEQ ID NO: 2061197 - RNA, 13 nt, Human
auuuuccucccca

SEQ ID NO: 2061198 - RNA, 14 nt, Human
auuuuccuccccag

SEQ ID NO: 2061199 - RNA, 15 nt, Human
auuuuccuccccagc

SEQ ID NO: 2061200 - RNA, 16 nt, Human
auuuuccuccccagca

SEQ ID NO: 2061201 - RNA, 14 nt, Human
auuuuauucaaggu

SEQ ID NO: 2061202 - RNA, 16 nt, Human
auuuuauucaagguaa

SEQ ID NO: 2061203 - RNA, 23 nt, Human
auuuuauucaagguaaaauucua

SEQ ID NO: 2061204 - RNA, 12 nt, Human
auuuuauucaag

SEQ ID NO: 2061205 - RNA, 17 nt, Human
auuuuauuuuuuucuac

SEQ ID NO: 2061206 - RNA, 20 nt, Human
auuuuauuuuuuucucucug

SEQ ID NO: 2061207 - RNA, 14 nt, Human
auuuuagcaguucu

SEQ ID NO: 2061208 - RNA, 19 nt, Human
auuuuagcaguucugcaaa

SEQ ID NO: 2061209 - RNA, 20 nt, Human
auuuuagcaguucugcaaau

SEQ ID NO: 2061210 - RNA, 21 nt, Human
auuuuagcaguucugcaaaua

SEQ ID NO: 2061211 - RNA, 12 nt, Human
auuuuagacaaa

SEQ ID NO: 2061212 - RNA, 16 nt, Human
auuuuagacaaaucua

SEQ ID NO: 2061213 - RNA, 20 nt, Human
auuuuagacaaaucuaaggg

SEQ ID NO: 2061214 - RNA, 22 nt, Human
auuuucaagcaucuccugagga

SEQ ID NO: 2061215 - RNA, 20 nt, Human
auuuucaacgcagcccugcu

SEQ ID NO: 2061216 - RNA, 17 nt, Human
auuuucaaaguacauaa

SEQ ID NO: 2061217 - RNA, 18 nt, Human
auuuucaaauuguaucua

SEQ ID NO: 2061218 - RNA, 18 nt, Human
auuuucaacgcagcccug

SEQ ID NO: 2061219 - RNA, 14 nt, Human
auuuucaauucaaa

SEQ ID NO: 2061220 - RNA, 20 nt, Human
auuuucaauucaaaaaugua

SEQ ID NO: 2061221 - RNA, 22 nt, Human
auuuucaauucaaaaauguaca

SEQ ID NO: 2061222 - RNA, 20 nt, Human
auuuucacacaauacaauaa

SEQ ID NO: 2061223 - RNA, 15 nt, Human
auuuucacauaaaau

SEQ ID NO: 2061224 - RNA, 19 nt, Human
auuuucaaguaauugugaa

SEQ ID NO: 2061225 - RNA, 12 nt, Human
auuuucaaguaa

SEQ ID NO: 2061226 - RNA, 16 nt, Human
auuuucaaguaauugu

SEQ ID NO: 2061227 - RNA, 21 nt, Human
auuuucaccuguuuuuaagcu

SEQ ID NO: 2061228 - RNA, 22 nt, Human
auuuucaccccacccuuccccu

SEQ ID NO: 2061229 - RNA, 15 nt, Human
auuuucaccccaccc

SEQ ID NO: 2061230 - RNA, 16 nt, Human
auuuucaccccacccu

SEQ ID NO: 2061231 - RNA, 22 nt, Human
auuuccacucaggucuguuuuc

SEQ ID NO: 2061232 - RNA, 13 nt, Human
auuuccaguaccu

SEQ ID NO: 2061233 - RNA, 17 nt, Human
auuuccaguaccuuugu

SEQ ID NO: 2061234 - RNA, 20 nt, Human
auuuccaguaccuuugucac

SEQ ID NO: 2061235 - RNA, 17 nt, Human
auuuccagccaaagccu

SEQ ID NO: 2061236 - RNA, 23 nt, Human
auuuccccagaccugagcucccc

SEQ ID NO: 2061237 - RNA, 15 nt, Human
auuuccccagaccug

SEQ ID NO: 2061238 - RNA, 13 nt, Human
auuucaaaauaua

SEQ ID NO: 2061239 - RNA, 15 nt, Human
auuugaaauuuagcu

SEQ ID NO: 2061240 - RNA, 15 nt, Human
auuugaaccaaaaca

SEQ ID NO: 2061241 - RNA, 17 nt, Human
auuugaaccaaaacauu

SEQ ID NO: 2061242 - RNA, 20 nt, Human
auuugaaccaaaacauuccg

SEQ ID NO: 2061243 - RNA, 11 nt, Human
auuugaaauuu

SEQ ID NO: 2061244 - RNA, 21 nt, Human
auuucuagaacaucccugcca

SEQ ID NO: 2061245 - RNA, 23 nt, Human
auuucuagaacaucccugccagc

SEQ ID NO: 2061246 - RNA, 12 nt, Human
auuucccuucuu

SEQ ID NO: 2061247 - RNA, 15 nt, Human
auuucccuucuucug

SEQ ID NO: 2061248 - RNA, 18 nt, Human
auuucccuucuucuguca

SEQ ID NO: 2061249 - RNA, 15 nt, Human
auuuauuuaauguua

SEQ ID NO: 2061250 - RNA, 17 nt, Human
auuuauuuaauguuaug

SEQ ID NO: 2061251 - RNA, 13 nt, Human
auuuauucugcuc

SEQ ID NO: 2061252 - RNA, 19 nt, Human
auuuauucaauuccucugg

SEQ ID NO: 2061253 - RNA, 18 nt, Human
auuuauucaauuccucug

SEQ ID NO: 2061254 - RNA, 14 nt, Human
auuuauuuauuuaa

SEQ ID NO: 2061255 - RNA, 17 nt, Human
auuuauuuauuaagaug

SEQ ID NO: 2061256 - RNA, 24 nt, Human
auuuauuuacugagcuucucugug

SEQ ID NO: 2061257 - RNA, 14 nt, Human
auuuauuuauuaag

SEQ ID NO: 2061258 - RNA, 16 nt, Human
auuuauuuauuaagau

SEQ ID NO: 2061259 - RNA, 21 nt, Human
auuuauuauuuucaccuguuu

SEQ ID NO: 2061260 - RNA, 12 nt, Human
auuuauucaaga

SEQ ID NO: 2061261 - RNA, 14 nt, Human
auuuauucaagaaa

SEQ ID NO: 2061262 - RNA, 14 nt, Human
auuuauuauuuuca

SEQ ID NO: 2061263 - RNA, 15 nt, Human
auuuauuaagaugga

SEQ ID NO: 2061264 - RNA, 16 nt, Human
auuuauuaagauggau

SEQ ID NO: 2061265 - RNA, 21 nt, Human
auuuauuaagauggauucuca

SEQ ID NO: 2061266 - RNA, 22 nt, Human
auuuauuaagauggauucucag

SEQ ID NO: 2061267 - RNA, 23 nt, Human
auuuauuaagauggauucucaga

SEQ ID NO: 2061268 - RNA, 19 nt, Human
auuuaguuuuuguaauuua

SEQ ID NO: 2061269 - RNA, 20 nt, Human
auuuaguuuuuguaauuuau

SEQ ID NO: 2061270 - RNA, 20 nt, Human
auuuagugaaagcuagagau

SEQ ID NO: 2061271 - RNA, 19 nt, Human
auuuagagcuagucuuuca

SEQ ID NO: 2061272 - RNA, 22 nt, Human
auuuagagaugaauuaaauuua

SEQ ID NO: 2061273 - RNA, 18 nt, Human
auuuagauuguuaaaaua

SEQ ID NO: 2061274 - RNA, 13 nt, Human
auuuagcacaaaa

SEQ ID NO: 2061275 - RNA, 23 nt, Human
auuuagcacauacuacacauuca

SEQ ID NO: 2061276 - RNA, 22 nt, Human
auuuagcaugacaagccccagg

SEQ ID NO: 2061277 - RNA, 17 nt, Human
auuuagagaugaauuaa

SEQ ID NO: 2061278 - RNA, 23 nt, Human
auuuagagaugaauuaaauuuaa

SEQ ID NO: 2061279 - RNA, 15 nt, Human
auuuaacaaugcgaa

SEQ ID NO: 2061280 - RNA, 20 nt, Human
auuuaacaaugcgaauggua

SEQ ID NO: 2061281 - RNA, 21 nt, Human
auuuaacaaugcgaaugguag

SEQ ID NO: 2061282 - RNA, 21 nt, Human
auuuacugagcuucucuguga

SEQ ID NO: 2061283 - RNA, 11 nt, Human
auuuaaaacaa

SEQ ID NO: 2061284 - RNA, 12 nt, Human
auuuaaaacaaa

SEQ ID NO: 2061285 - RNA, 14 nt, Human
auuuaaaacaaaca

SEQ ID NO: 2061286 - RNA, 14 nt, Human
auuuaaauucuuuu

SEQ ID NO: 2061287 - RNA, 16 nt, Human
auuuaaauucuuuuuu

SEQ ID NO: 2061288 - RNA, 19 nt, Human
auuuaaauucuuuuuuaaa

SEQ ID NO: 2061289 - RNA, 17 nt, Human
auuuacuucuuauacau

SEQ ID NO: 2061290 - RNA, 14 nt, Human
auuuacuucuuaua

SEQ ID NO: 2061291 - RNA, 16 nt, Human
auuuacuucuuauaca

SEQ ID NO: 2061292 - RNA, 15 nt, Human
auuuagaaauauaau

SEQ ID NO: 2061293 - RNA, 22 nt, Human
auuuagaaagaagcccaauauu

SEQ ID NO: 2061294 - RNA, 14 nt, Human
auuuauucugcuca

SEQ ID NO: 2061295 - RNA, 16 nt, Human
auugugaccaaguuau

SEQ ID NO: 2061296 - RNA, 14 nt, Human
auugugaauugaua

SEQ ID NO: 2061297 - RNA, 19 nt, Human
auugugaauugauaauaaa

SEQ ID NO: 2061298 - RNA, 15 nt, Human
auugugaccaaguua

SEQ ID NO: 2061299 - RNA, 14 nt, Human
auugugaaguacau

SEQ ID NO: 2061300 - RNA, 15 nt, Human
auugugaaguacaua

SEQ ID NO: 2061301 - RNA, 16 nt, Human
auugugagccaccacg

SEQ ID NO: 2061302 - RNA, 17 nt, Human
auugugaccaaguuaua

SEQ ID NO: 2061303 - RNA, 14 nt, Human
auuguauuuuagua

SEQ ID NO: 2061304 - RNA, 15 nt, Human
auuguauuuuaguau

SEQ ID NO: 2061305 - RNA, 23 nt, Human
auuguauuaggugucauuuccau

SEQ ID NO: 2061306 - RNA, 21 nt, Human
auugguggcagauuuuacaaa

SEQ ID NO: 2061307 - RNA, 15 nt, Human
auuguguauauucau

SEQ ID NO: 2061308 - RNA, 20 nt, Human
auugugguuauuuuuauaca

SEQ ID NO: 2061309 - RNA, 22 nt, Human
auugugguuauuuuuauacagu

SEQ ID NO: 2061310 - RNA, 23 nt, Human
auugugguuauuuuuauacagua

SEQ ID NO: 2061311 - RNA, 19 nt, Human
auugugcacauacuugaga

SEQ ID NO: 2061312 - RNA, 13 nt, Human
auucugcagcaug

SEQ ID NO: 2061313 - RNA, 15 nt, Human
auucugcagcaugac

SEQ ID NO: 2061314 - RNA, 19 nt, Human
auucugcaagcacaucugc

SEQ ID NO: 2061315 - RNA, 22 nt, Human
auucugcaagcacaucugcauu

SEQ ID NO: 2061316 - RNA, 22 nt, Human
auucugcagcaugaccugugac

SEQ ID NO: 2061317 - RNA, 14 nt, Human
auucugccaggccc

SEQ ID NO: 2061318 - RNA, 23 nt, Human
auucugccaggcccccaagccug

SEQ ID NO: 2061319 - RNA, 18 nt, Human
auucuggcugauaaaaga

SEQ ID NO: 2061320 - RNA, 19 nt, Human
auucuggcugauaaaagau

SEQ ID NO: 2061321 - RNA, 17 nt, Human
auucuguguguuuucau

SEQ ID NO: 2061322 - RNA, 21 nt, Human
auucuguguguuuucauaaua

SEQ ID NO: 2061323 - RNA, 15 nt, Human
auucuggucucucua

SEQ ID NO: 2061324 - RNA, 12 nt, Human
auucuguuucuu

SEQ ID NO: 2061325 - RNA, 22 nt, Human
auucuguguguuuucauaauaa

SEQ ID NO: 2061326 - RNA, 23 nt, Human
auucuguguguuuucauaauaaa

SEQ ID NO: 2061327 - RNA, 20 nt, Human
auucuuaaaauauauuucag

SEQ ID NO: 2061328 - RNA, 23 nt, Human
auucuuaaaauauauuucagaua

SEQ ID NO: 2061329 - RNA, 22 nt, Human
auucuuccucccucccucuuuc

SEQ ID NO: 2061330 - RNA, 13 nt, Human
auucuuccucccu

SEQ ID NO: 2061331 - RNA, 19 nt, Human
auucuuugggcguugguca

SEQ ID NO: 2061332 - RNA, 19 nt, Human
auucuuugcuugaacacag

SEQ ID NO: 2061333 - RNA, 20 nt, Human
auucuuugcuugaacacagu

SEQ ID NO: 2061334 - RNA, 23 nt, Human
auucuuugcuugaacacaguauu

SEQ ID NO: 2061335 - RNA, 13 nt, Human
auucuuauuuaau

SEQ ID NO: 2061336 - RNA, 15 nt, Human
auucuuacauguuuu

SEQ ID NO: 2061337 - RNA, 17 nt, Human
auucuuacauguuuucu

SEQ ID NO: 2061338 - RNA, 17 nt, Human
auucuuagccuguggca

SEQ ID NO: 2061339 - RNA, 18 nt, Human
auucuuagccuguggcag

SEQ ID NO: 2061340 - RNA, 20 nt, Human
auucuuagccuguggcagua

SEQ ID NO: 2061341 - RNA, 14 nt, Human
auucuuauuuaaug

SEQ ID NO: 2061342 - RNA, 18 nt, Human
auucuuauuuaaugaaag

SEQ ID NO: 2061343 - RNA, 14 nt, Human
auugaaaaggaaga

SEQ ID NO: 2061344 - RNA, 15 nt, Human
auugaaaaggaagau

SEQ ID NO: 2061345 - RNA, 17 nt, Human
auugaaaaggaagauca

SEQ ID NO: 2061346 - RNA, 13 nt, Human
auugaaaaggaca

SEQ ID NO: 2061347 - RNA, 16 nt, Human
auugaaaauguaagua

SEQ ID NO: 2061348 - RNA, 20 nt, Human
auugaaaauguaaguaaaug

SEQ ID NO: 2061349 - RNA, 22 nt, Human
auugaaaauaggagagagauca

SEQ ID NO: 2061350 - RNA, 15 nt, Human
auugaaagagaacca

SEQ ID NO: 2061351 - RNA, 18 nt, Human
auugaaagagaaccaguu

SEQ ID NO: 2061352 - RNA, 18 nt, Human
auugaaaggcauucucug

SEQ ID NO: 2061353 - RNA, 15 nt, Human
auugacaguaacuug

SEQ ID NO: 2061354 - RNA, 20 nt, Human
auugacaguaacuugguuau

SEQ ID NO: 2061355 - RNA, 23 nt, Human
auugacaguaacuugguuauaca

SEQ ID NO: 2061356 - RNA, 17 nt, Human
auugacaucagcaucac

SEQ ID NO: 2061357 - RNA, 18 nt, Human
auugacaucagcaucacc

SEQ ID NO: 2061358 - RNA, 22 nt, Human
auugacaucagcaucaccuaga

SEQ ID NO: 2061359 - RNA, 14 nt, Human
auugaccaagaacu

SEQ ID NO: 2061360 - RNA, 15 nt, Human
auugaccaagaacug

SEQ ID NO: 2061361 - RNA, 16 nt, Human
auugaccaagaacugc

SEQ ID NO: 2061362 - RNA, 17 nt, Human
auugaccaagaacugca

SEQ ID NO: 2061363 - RNA, 18 nt, Human
auugaccaagaacugcau

SEQ ID NO: 2061364 - RNA, 20 nt, Human
auugaccaagaacugcaugg

SEQ ID NO: 2061365 - RNA, 12 nt, Human
auugggguuauu

SEQ ID NO: 2061366 - RNA, 15 nt, Human
auuggguaucaccac

SEQ ID NO: 2061367 - RNA, 14 nt, Human
auugggguuauuuu

SEQ ID NO: 2061368 - RNA, 20 nt, Human
auugaaauauaaugcaaacc

SEQ ID NO: 2061369 - RNA, 19 nt, Human
auuggggaagacuguggcu

SEQ ID NO: 2061370 - RNA, 16 nt, Human
auugggauuuucuaca

SEQ ID NO: 2061371 - RNA, 18 nt, Human
auucuccugccucagccu

SEQ ID NO: 2061372 - RNA, 17 nt, Human
auucuccugccucagcc

SEQ ID NO: 2061373 - RNA, 15 nt, Human
auucuccugccucag

SEQ ID NO: 2061374 - RNA, 19 nt, Human
auucuccugccucagccuc

SEQ ID NO: 2061375 - RNA, 20 nt, Human
auucuccugccucagccucc

SEQ ID NO: 2061376 - RNA, 13 nt, Human
auucuccugccuc

SEQ ID NO: 2061377 - RNA, 14 nt, Human
auucuccugccuca

SEQ ID NO: 2061378 - RNA, 11 nt, Human
auucuccugcc

SEQ ID NO: 2061379 - RNA, 16 nt, Human
auucuaucucucuuua

SEQ ID NO: 2061380 - RNA, 17 nt, Human
auucuaguuuugucaaa

SEQ ID NO: 2061381 - RNA, 16 nt, Human
auucuaaauaaaauau

SEQ ID NO: 2061382 - RNA, 19 nt, Human
auucuaaauaaaauauaau

SEQ ID NO: 2061383 - RNA, 20 nt, Human
auucuaaauaaaauauaauu

SEQ ID NO: 2061384 - RNA, 21 nt, Human
auucuaaauaaaauauaauug

SEQ ID NO: 2061385 - RNA, 16 nt, Human
auucucaagcccugca

SEQ ID NO: 2061386 - RNA, 19 nt, Human
auucucaagccgcauccca

SEQ ID NO: 2061387 - RNA, 20 nt, Human
auucucaagccgcaucccag

SEQ ID NO: 2061388 - RNA, 21 nt, Human
auucucaagccgcaucccaga

SEQ ID NO: 2061389 - RNA, 23 nt, Human
auucucaagccgcaucccagacu

SEQ ID NO: 2061390 - RNA, 15 nt, Human
auucucaagcccugc

SEQ ID NO: 2061391 - RNA, 13 nt, Human
auucucaaagcag

SEQ ID NO: 2061392 - RNA, 14 nt, Human
auucucaaagcagg

SEQ ID NO: 2061393 - RNA, 21 nt, Human
auucccuccugcuacucuguu

SEQ ID NO: 2061394 - RNA, 14 nt, Human
auucccuccugcua

SEQ ID NO: 2061395 - RNA, 19 nt, Human
auucccugagucaccagga

SEQ ID NO: 2061396 - RNA, 20 nt, Human
auucccugagucaccaggaa

SEQ ID NO: 2061397 - RNA, 14 nt, Human
auucccuggaccag

SEQ ID NO: 2061398 - RNA, 19 nt, Human
auucccuggaccagaugcu

SEQ ID NO: 2061399 - RNA, 15 nt, Human
auucccaagcucugc

SEQ ID NO: 2061400 - RNA, 14 nt, Human
auucccaagcucug

SEQ ID NO: 2061401 - RNA, 16 nt, Human
auucccaagcucugcu

SEQ ID NO: 2061402 - RNA, 22 nt, Human
auucccuaucuuuuaguuuuag

SEQ ID NO: 2061403 - RNA, 12 nt, Human
auuccaggcucc

SEQ ID NO: 2061404 - RNA, 15 nt, Human
auuccaguuuguuua

SEQ ID NO: 2061405 - RNA, 23 nt, Human
auuccaguuuguuuauuacuuau

SEQ ID NO: 2061406 - RNA, 20 nt, Human
auuccauaauuccauaugcu

SEQ ID NO: 2061407 - RNA, 14 nt, Human
auuccauaguauau

SEQ ID NO: 2061408 - RNA, 16 nt, Human
auuccauaguauauua

SEQ ID NO: 2061409 - RNA, 18 nt, Human
auuccauaguauauuaaa

SEQ ID NO: 2061410 - RNA, 19 nt, Human
auuccauaguauauuaaaa

SEQ ID NO: 2061411 - RNA, 21 nt, Human
auuccauaguauauuaaaaau

SEQ ID NO: 2061412 - RNA, 22 nt, Human
auuccauaguauauuaaaaaug

SEQ ID NO: 2061413 - RNA, 23 nt, Human
auuccauaguauauuaaaaaugg

SEQ ID NO: 2061414 - RNA, 11 nt, Human
auuccaucucc

SEQ ID NO: 2061415 - RNA, 12 nt, Human
auuccaucuccu

SEQ ID NO: 2061416 - RNA, 13 nt, Human
auuccaugaaugu

SEQ ID NO: 2061417 - RNA, 14 nt, Human
auuccaacagcuca

SEQ ID NO: 2061418 - RNA, 20 nt, Human
auuccaacagcucaagucuu

SEQ ID NO: 2061419 - RNA, 15 nt, Human
auucaguaauaacuc

SEQ ID NO: 2061420 - RNA, 19 nt, Human
auucaguaauaacucuacc

SEQ ID NO: 2061421 - RNA, 15 nt, Human
auucagugagggucu

SEQ ID NO: 2061422 - RNA, 19 nt, Human
auucaguauuaaagggggg

SEQ ID NO: 2061423 - RNA, 18 nt, Human
auucagauauauuuuuca

SEQ ID NO: 2061424 - RNA, 21 nt, Human
auucagauauauuuuucacag

SEQ ID NO: 2061425 - RNA, 14 nt, Human
uuuucaguuuucag

SEQ ID NO: 2061426 - RNA, 12 nt, Human
uuuucaguuuuc

SEQ ID NO: 2061427 - RNA, 20 nt, Human
uuuucaguuucaauucagug

SEQ ID NO: 2061428 - RNA, 18 nt, Human
uuuucauacuuuuaccuu

SEQ ID NO: 2061429 - RNA, 12 nt, Human
uuuucauaauaa

SEQ ID NO: 2061430 - RNA, 11 nt, Human
uuuuauuuuau

SEQ ID NO: 2061431 - RNA, 20 nt, Human
uuuuaggccaaaaaaaugua

SEQ ID NO: 2061432 - RNA, 12 nt, Human
uuuuauuaugca

SEQ ID NO: 2061433 - RNA, 14 nt, Human
uuuuauuaugcaua

SEQ ID NO: 2061434 - RNA, 19 nt, Human
uuuuauuaugcauaacuga

SEQ ID NO: 2061435 - RNA, 23 nt, Human
uuuuauuaugcauaacugacaaa

SEQ ID NO: 2061436 - RNA, 13 nt, Human
uuuuauuaugcau

SEQ ID NO: 2061437 - RNA, 13 nt, Human
uuuucugaaacua

SEQ ID NO: 2061438 - RNA, 15 nt, Human
uuuucugaaacuaau

SEQ ID NO: 2061439 - RNA, 17 nt, Human
uuuucucuaacucagaa

SEQ ID NO: 2061440 - RNA, 21 nt, Human
uuuucaucuucucuggcgaca

SEQ ID NO: 2061441 - RNA, 17 nt, Human
uuuucauugauaugaaa

SEQ ID NO: 2061442 - RNA, 14 nt, Human
auguuuaugagcca

SEQ ID NO: 2061443 - RNA, 15 nt, Human
auguuuaugagccag

SEQ ID NO: 2061444 - RNA, 16 nt, Human
auguuuaugagccaga

SEQ ID NO: 2061445 - RNA, 20 nt, Human
auguuuaugagccagacaaa

SEQ ID NO: 2061446 - RNA, 21 nt, Human
auguuuaugagccagacaaau

SEQ ID NO: 2061447 - RNA, 22 nt, Human
auguuuaugcaaggaaggaaag

SEQ ID NO: 2061448 - RNA, 18 nt, Human
auguuuaugcaaggaagg

SEQ ID NO: 2061449 - RNA, 20 nt, Human
auguuuaugcaaggaaggaa

SEQ ID NO: 2061450 - RNA, 11 nt, Human
uuuucuccuga

SEQ ID NO: 2061451 - RNA, 16 nt, Human
auguuuaaaaaaguuu

SEQ ID NO: 2061452 - RNA, 17 nt, Human
auguuuaaaaaaguuua

SEQ ID NO: 2061453 - RNA, 21 nt, Human
auguuuaaaaaaguuuaaaau

SEQ ID NO: 2061454 - RNA, 16 nt, Human
uuuucugguagauaga

SEQ ID NO: 2061455 - RNA, 19 nt, Human
uuuucugguagauagaaau

SEQ ID NO: 2061456 - RNA, 20 nt, Human
uuuucugguagauagaaaua

SEQ ID NO: 2061457 - RNA, 14 nt, Human
auguuuuguuucug

SEQ ID NO: 2061458 - RNA, 16 nt, Human
auguuuuguuucugaa

SEQ ID NO: 2061459 - RNA, 19 nt, Human
auguuuuguuucugaaaau

SEQ ID NO: 2061460 - RNA, 20 nt, Human
auguuuuguuucugaaaauu

SEQ ID NO: 2061461 - RNA, 21 nt, Human
auguuuuguuucugaaaauuc

SEQ ID NO: 2061462 - RNA, 13 nt, Human
auguuuuguaaga

SEQ ID NO: 2061463 - RNA, 22 nt, Human
auuaaaacuuaaccgcaucaga

SEQ ID NO: 2061464 - RNA, 14 nt, Human
auuaaacccuggau

SEQ ID NO: 2061465 - RNA, 21 nt, Human
auguuaaacuuacuuaguguu

SEQ ID NO: 2061466 - RNA, 23 nt, Human
auguguguuuugcuaaaggaaaa

SEQ ID NO: 2061467 - RNA, 14 nt, Human
auguguugaaaaaa

SEQ ID NO: 2061468 - RNA, 13 nt, Human
auguuacugacca

SEQ ID NO: 2061469 - RNA, 14 nt, Human
auguuacugaccag

SEQ ID NO: 2061470 - RNA, 13 nt, Human
auguuacugauca

SEQ ID NO: 2061471 - RNA, 16 nt, Human
auguuacugaucaugc

SEQ ID NO: 2061472 - RNA, 18 nt, Human
auguuaauccuagcugug

SEQ ID NO: 2061473 - RNA, 19 nt, Human
auguuaggaaaauuucaca

SEQ ID NO: 2061474 - RNA, 15 nt, Human
auguuaggcugggcc

SEQ ID NO: 2061475 - RNA, 20 nt, Human
auguuaggcugggcccagag

SEQ ID NO: 2061476 - RNA, 16 nt, Human
auguuagggugcucug

SEQ ID NO: 2061477 - RNA, 22 nt, Human
auguuacugaucaugcauuguu

SEQ ID NO: 2061478 - RNA, 18 nt, Human
auguuacugaucaugcau

SEQ ID NO: 2061479 - RNA, 19 nt, Human
auguuacugaucaugcauu

SEQ ID NO: 2061480 - RNA, 20 nt, Human
auguuacugaucaugcauug

SEQ ID NO: 2061481 - RNA, 21 nt, Human
auguuacugaucaugcauugu

SEQ ID NO: 2061482 - RNA, 18 nt, Human
auguuaggaaaauuucac

SEQ ID NO: 2061483 - RNA, 15 nt, Human
auguuagcaaagagu

SEQ ID NO: 2061484 - RNA, 12 nt, Human
auguugcccagg

SEQ ID NO: 2061485 - RNA, 16 nt, Human
auguugcccaggcagg

SEQ ID NO: 2061486 - RNA, 17 nt, Human
auguugcccaggcaggu

SEQ ID NO: 2061487 - RNA, 12 nt, Human
uuuuagaaacuu

SEQ ID NO: 2061488 - RNA, 14 nt, Human
uuuuagaacagaaa

SEQ ID NO: 2061489 - RNA, 17 nt, Human
uuuuagaacagaaaaca

SEQ ID NO: 2061490 - RNA, 18 nt, Human
uuuuagaacagaaaacaa

SEQ ID NO: 2061491 - RNA, 14 nt, Human
uuuuagaaaacagc

SEQ ID NO: 2061492 - RNA, 20 nt, Human
auguugcccaggcaggucuu

SEQ ID NO: 2061493 - RNA, 22 nt, Human
augugccagguuuuuggucuga

SEQ ID NO: 2061494 - RNA, 19 nt, Human
augugcccaguuaaucuug

SEQ ID NO: 2061495 - RNA, 12 nt, Human
augugcccccag

SEQ ID NO: 2061496 - RNA, 14 nt, Human
augugcccccagac

SEQ ID NO: 2061497 - RNA, 15 nt, Human
augugccugcaccag

SEQ ID NO: 2061498 - RNA, 17 nt, Human
augugccugcaccagga

SEQ ID NO: 2061499 - RNA, 19 nt, Human
augugccugcaccaggaga

SEQ ID NO: 2061500 - RNA, 22 nt, Human
augugccugcaccaggagacag

SEQ ID NO: 2061501 - RNA, 21 nt, Human
augugccguguuauuguauua

SEQ ID NO: 2061502 - RNA, 14 nt, Human
augugcgugugugc

SEQ ID NO: 2061503 - RNA, 15 nt, Human
augugcgugugugca

SEQ ID NO: 2061504 - RNA, 18 nt, Human
augugcgugugugcaagu

SEQ ID NO: 2061505 - RNA, 20 nt, Human
augugcgugugugcaagugu

SEQ ID NO: 2061506 - RNA, 19 nt, Human
auggggcugaacggggaga

SEQ ID NO: 2061507 - RNA, 22 nt, Human
auggggcugaacggggagaaaa

SEQ ID NO: 2061508 - RNA, 11 nt, Human
augugugugca

SEQ ID NO: 2061509 - RNA, 16 nt, Human
augugugugcaagugu

SEQ ID NO: 2061510 - RNA, 19 nt, Human
augugugugcaagugugug

SEQ ID NO: 2061511 - RNA, 22 nt, Human
auguggcuguaucuuguuuuuc

SEQ ID NO: 2061512 - RNA, 19 nt, Human
uuugaaagaaggaagacuu

SEQ ID NO: 2061513 - RNA, 16 nt, Human
auguggcagcugucuc

SEQ ID NO: 2061514 - RNA, 13 nt, Human
auguggcccuggc

SEQ ID NO: 2061515 - RNA, 14 nt, Human
auguggcccuggcc

SEQ ID NO: 2061516 - RNA, 15 nt, Human
auguggcccuggccu

SEQ ID NO: 2061517 - RNA, 16 nt, Human
auguggcccuggccug

SEQ ID NO: 2061518 - RNA, 19 nt, Human
auguggcccuggccugcug

SEQ ID NO: 2061519 - RNA, 20 nt, Human
auguggcccuggccugcugg

SEQ ID NO: 2061520 - RNA, 19 nt, Human
auguggccuaaaaaugcaa

SEQ ID NO: 2061521 - RNA, 15 nt, Human
auguguguguaugcu

SEQ ID NO: 2061522 - RNA, 16 nt, Human
auguguguguaugcua

SEQ ID NO: 2061523 - RNA, 19 nt, Human
auguguguguaugcuacua

SEQ ID NO: 2061524 - RNA, 21 nt, Human
auguguguguaugcuacuaca

SEQ ID NO: 2061525 - RNA, 15 nt, Human
augugugugcucagg

SEQ ID NO: 2061526 - RNA, 12 nt, Human
auguguguguau

SEQ ID NO: 2061527 - RNA, 13 nt, Human
auguguguguaug

SEQ ID NO: 2061528 - RNA, 16 nt, Human
auguguguuuugcuaa

SEQ ID NO: 2061529 - RNA, 15 nt, Human
auguguguguauguu

SEQ ID NO: 2061530 - RNA, 21 nt, Human
auguguguguauguuugcaca

SEQ ID NO: 2061531 - RNA, 16 nt, Human
auguggcauuugugau

SEQ ID NO: 2061532 - RNA, 23 nt, Human
auguggagcacaaaagccucuca

SEQ ID NO: 2061533 - RNA, 19 nt, Human
auguggagaaacuguaguc

SEQ ID NO: 2061534 - RNA, 20 nt, Human
augugcuacugauuguuuca

SEQ ID NO: 2061535 - RNA, 14 nt, Human
augugcuacugauu

SEQ ID NO: 2061536 - RNA, 15 nt, Human
auguggaauauaaag

SEQ ID NO: 2061537 - RNA, 17 nt, Human
auguggaauauaaagau

SEQ ID NO: 2061538 - RNA, 14 nt, Human
auuaaguuguuaau

SEQ ID NO: 2061539 - RNA, 16 nt, Human
auuaaguacuauguau

SEQ ID NO: 2061540 - RNA, 14 nt, Human
auuaaguacuaugu

SEQ ID NO: 2061541 - RNA, 19 nt, Human
auuaaguuguuaauaaaag

SEQ ID NO: 2061542 - RNA, 20 nt, Human
auuaaguuguuaauaaaagu

SEQ ID NO: 2061543 - RNA, 13 nt, Human
auuaaguuguuaa

SEQ ID NO: 2061544 - RNA, 15 nt, Human
auuacagugggugcc

SEQ ID NO: 2061545 - RNA, 14 nt, Human
auuacauaaauaaa

SEQ ID NO: 2061546 - RNA, 22 nt, Human
auuacauaaauaaauuaaauaa

SEQ ID NO: 2061547 - RNA, 14 nt, Human
auuacauccuugug

SEQ ID NO: 2061548 - RNA, 15 nt, Human
auuacauccuugugg

SEQ ID NO: 2061549 - RNA, 17 nt, Human
auuacauccuuguggca

SEQ ID NO: 2061550 - RNA, 18 nt, Human
auuacauccuuguggcac

SEQ ID NO: 2061551 - RNA, 15 nt, Human
auuacaucuuucaca

SEQ ID NO: 2061552 - RNA, 21 nt, Human
auuacauauuugcauauguau

SEQ ID NO: 2061553 - RNA, 16 nt, Human
auuacaucuuucacau

SEQ ID NO: 2061554 - RNA, 18 nt, Human
auuacaucuuucacauug

SEQ ID NO: 2061555 - RNA, 22 nt, Human
auuacaucuuucacauuggcua

SEQ ID NO: 2061556 - RNA, 22 nt, Human
auuacccccucauuguuuauua

SEQ ID NO: 2061557 - RNA, 13 nt, Human
auuaccauggaga

SEQ ID NO: 2061558 - RNA, 15 nt, Human
auuaccauggagaca

SEQ ID NO: 2061559 - RNA, 21 nt, Human
auuaccaguaaaguguaacau

SEQ ID NO: 2061560 - RNA, 23 nt, Human
auuaccaguaaaguguaacauau

SEQ ID NO: 2061561 - RNA, 19 nt, Human
auuacauguaaaacauuau

SEQ ID NO: 2061562 - RNA, 16 nt, Human
auuacauguaaaacau

SEQ ID NO: 2061563 - RNA, 17 nt, Human
auuacauuccuugauaa

SEQ ID NO: 2061564 - RNA, 21 nt, Human
auuacauuccuugauaauguu

SEQ ID NO: 2061565 - RNA, 22 nt, Human
auuacauuccuugauaauguug

SEQ ID NO: 2061566 - RNA, 14 nt, Human
uuuuuguuaacuuu

SEQ ID NO: 2061567 - RNA, 20 nt, Human
uuuuuguagagccagggucu

SEQ ID NO: 2061568 - RNA, 19 nt, Human
uuuuuguagagccaggguc

SEQ ID NO: 2061569 - RNA, 15 nt, Human
uuuuuguguauuugu

SEQ ID NO: 2061570 - RNA, 22 nt, Human
uuuuuguguuuuguucuuuaaa

SEQ ID NO: 2061571 - RNA, 13 nt, Human
uuuuugucuuuuc

SEQ ID NO: 2061572 - RNA, 13 nt, Human
uuuuuaucuuuuc

SEQ ID NO: 2061573 - RNA, 17 nt, Human
uuuuuaucuuuucuaca

SEQ ID NO: 2061574 - RNA, 21 nt, Human
uuuuuaucuuuucuacagcaa

SEQ ID NO: 2061575 - RNA, 11 nt, Human
uuuuuaucuuu

SEQ ID NO: 2061576 - RNA, 14 nt, Human
uuuuuauuaugcau

SEQ ID NO: 2061577 - RNA, 15 nt, Human
uuuuuauuaugcaua

SEQ ID NO: 2061578 - RNA, 11 nt, Human
uuuuuauucuu

SEQ ID NO: 2061579 - RNA, 14 nt, Human
uuuuuauucuugug

SEQ ID NO: 2061580 - RNA, 13 nt, Human
uuuuuauuaugca

SEQ ID NO: 2061581 - RNA, 12 nt, Human
uuuuuauugaug

SEQ ID NO: 2061582 - RNA, 13 nt, Human
uuuuuauugaugu

SEQ ID NO: 2061583 - RNA, 15 nt, Human
uuuuuauugaugugc

SEQ ID NO: 2061584 - RNA, 18 nt, Human
uuuuuauugaugugcaaa

SEQ ID NO: 2061585 - RNA, 13 nt, Human
uuuuuguaauuua

SEQ ID NO: 2061586 - RNA, 18 nt, Human
auuaguauuuauuuaaug

SEQ ID NO: 2061587 - RNA, 23 nt, Human
auuaguauuuauuuaauguuaug

SEQ ID NO: 2061588 - RNA, 13 nt, Human
auuagucauagaa

SEQ ID NO: 2061589 - RNA, 17 nt, Human
auuagucauagaagaac

SEQ ID NO: 2061590 - RNA, 19 nt, Human
auuagucauagaagaacua

SEQ ID NO: 2061591 - RNA, 20 nt, Human
auuacuacaaaauuugaaau

SEQ ID NO: 2061592 - RNA, 21 nt, Human
auuacuacaaaauuugaaauu

SEQ ID NO: 2061593 - RNA, 15 nt, Human
auuacuacaaaauuu

SEQ ID NO: 2061594 - RNA, 15 nt, Human
auuacggcuccucuc

SEQ ID NO: 2061595 - RNA, 16 nt, Human
auuacggcuccucucu

SEQ ID NO: 2061596 - RNA, 15 nt, Human
auuacccuucuuucc

SEQ ID NO: 2061597 - RNA, 16 nt, Human
auuacccuucuuucca

SEQ ID NO: 2061598 - RNA, 12 nt, Human
uuuuguuucaua

SEQ ID NO: 2061599 - RNA, 19 nt, Human
uuuuguuucauauugaugu

SEQ ID NO: 2061600 - RNA, 16 nt, Human
uuuuguuucauccugu

SEQ ID NO: 2061601 - RNA, 15 nt, Human
uuuuguuucuuccaa

SEQ ID NO: 2061602 - RNA, 15 nt, Human
uuuuguuccacaagu

SEQ ID NO: 2061603 - RNA, 21 nt, Human
uuuuguuccacaaguuaaaua

SEQ ID NO: 2061604 - RNA, 13 nt, Human
uuuugcuguagaa

SEQ ID NO: 2061605 - RNA, 14 nt, Human
uuuugcuguagaag

SEQ ID NO: 2061606 - RNA, 21 nt, Human
uuuugugaugucccaacuugu

SEQ ID NO: 2061607 - RNA, 14 nt, Human
uuuuuagaacagaa

SEQ ID NO: 2061608 - RNA, 17 nt, Human
uuuuuagaacagaaaac

SEQ ID NO: 2061609 - RNA, 17 nt, Human
uuuuuagaugguuacac

SEQ ID NO: 2061610 - RNA, 20 nt, Human
uuuuuagaugguuacacugu

SEQ ID NO: 2061611 - RNA, 22 nt, Human
uuuuuagacagagucucacugu

SEQ ID NO: 2061612 - RNA, 16 nt, Human
uuuuuacuacaguugu

SEQ ID NO: 2061613 - RNA, 22 nt, Human
uuuuuaccuaccacagugucug

SEQ ID NO: 2061614 - RNA, 17 nt, Human
uuuuuauacaggggaau

SEQ ID NO: 2061615 - RNA, 12 nt, Human
uuuuuauacagu

SEQ ID NO: 2061616 - RNA, 23 nt, Human
uuuuuaucuccccuucacaugca

SEQ ID NO: 2061617 - RNA, 13 nt, Human
uuuugcauuuaug

SEQ ID NO: 2061618 - RNA, 19 nt, Human
uuuugcauuugaauaaagc

SEQ ID NO: 2061619 - RNA, 23 nt, Human
uuuugccauguuggccaggcugg

SEQ ID NO: 2061620 - RNA, 18 nt, Human
uuuugcccuucacagugu

SEQ ID NO: 2061621 - RNA, 23 nt, Human
uuuugccuaauacauuaaagcag

SEQ ID NO: 2061622 - RNA, 21 nt, Human
uuuugcagcccagacaaaugu

SEQ ID NO: 2061623 - RNA, 14 nt, Human
uuuugcagcaguga

SEQ ID NO: 2061624 - RNA, 22 nt, Human
uuuugcaguagagucaucucca

SEQ ID NO: 2061625 - RNA, 13 nt, Human
uuuugcaaaauuu

SEQ ID NO: 2061626 - RNA, 15 nt, Human
uuuugauguuugugg

SEQ ID NO: 2061627 - RNA, 20 nt, Human
uuuugauguuuguggccuca

SEQ ID NO: 2061628 - RNA, 22 nt, Human
uuuugauguuuguggccucaga

SEQ ID NO: 2061629 - RNA, 22 nt, Human
uuuugauuuaauaacauaacaa

SEQ ID NO: 2061630 - RNA, 15 nt, Human
auuaagcaguaaaaa

SEQ ID NO: 2061631 - RNA, 19 nt, Human
auuaagcaguaaaaacugu

SEQ ID NO: 2061632 - RNA, 14 nt, Human
auuaagcaucacaa

SEQ ID NO: 2061633 - RNA, 18 nt, Human
auuaagcaucacaaauga

SEQ ID NO: 2061634 - RNA, 13 nt, Human
auuaaagaaaaua

SEQ ID NO: 2061635 - RNA, 18 nt, Human
auuaaagaaaauaaaauu

SEQ ID NO: 2061636 - RNA, 20 nt, Human
auuaaagcauuuacuuugaa

SEQ ID NO: 2061637 - RNA, 13 nt, Human
auuaaagacagag

SEQ ID NO: 2061638 - RNA, 23 nt, Human
auuaaagcagucacuuuuccugu

SEQ ID NO: 2061639 - RNA, 15 nt, Human
auuaaagcauuuacu

SEQ ID NO: 2061640 - RNA, 15 nt, Human
uuuugauagcuuuau

SEQ ID NO: 2061641 - RNA, 17 nt, Human
uuuugauccaagcuggu

SEQ ID NO: 2061642 - RNA, 18 nt, Human
uuuugaguggaugauguu

SEQ ID NO: 2061643 - RNA, 14 nt, Human
caauauuguacagu

SEQ ID NO: 2061644 - RNA, 20 nt, Human
caaucugaagauacaugucu

SEQ ID NO: 2061645 - RNA, 17 nt, Human
caauauucgcuguguca

SEQ ID NO: 2061646 - RNA, 12 nt, Human
caauauagcaag

SEQ ID NO: 2061647 - RNA, 13 nt, Human
caauauagcaaga

SEQ ID NO: 2061648 - RNA, 18 nt, Human
caauacaguacaggcagc

SEQ ID NO: 2061649 - RNA, 17 nt, Human
caauacaguacaggcag

SEQ ID NO: 2061650 - RNA, 19 nt, Human
caauacaguacaggcagca

SEQ ID NO: 2061651 - RNA, 18 nt, Human
caauagcuuuacccucag

SEQ ID NO: 2061652 - RNA, 21 nt, Human
caauagcuuuacccucaggca

SEQ ID NO: 2061653 - RNA, 23 nt, Human
caauagcuuuacccucaggcaua

SEQ ID NO: 2061654 - RNA, 18 nt, Human
caauauaaccaauguuua

SEQ ID NO: 2061655 - RNA, 19 nt, Human
caauauaaccaauguuuaa

SEQ ID NO: 2061656 - RNA, 20 nt, Human
caauauaaccaauguuuaaa

SEQ ID NO: 2061657 - RNA, 21 nt, Human
caauauaaccaauguuuaaaa

SEQ ID NO: 2061658 - RNA, 16 nt, Human
caaguuauaaaucaau

SEQ ID NO: 2061659 - RNA, 13 nt, Human
caaguuauuaauu

SEQ ID NO: 2061660 - RNA, 20 nt, Human
caaguuauaaaucaauguca

SEQ ID NO: 2061661 - RNA, 19 nt, Human
caaguuauauaaagagaaa

SEQ ID NO: 2061662 - RNA, 21 nt, Human
caaguuauauaaagagaaaau

SEQ ID NO: 2061663 - RNA, 14 nt, Human
caaguuagcucagg

SEQ ID NO: 2061664 - RNA, 16 nt, Human
caaguuagcucaggag

SEQ ID NO: 2061665 - RNA, 17 nt, Human
caaguuagcucaggagg

SEQ ID NO: 2061666 - RNA, 19 nt, Human
caaguuagcucaggaggcu

SEQ ID NO: 2061667 - RNA, 13 nt, Human
caaguuagcucag

SEQ ID NO: 2061668 - RNA, 22 nt, Human
caauaauuucagguuuuguaaa

SEQ ID NO: 2061669 - RNA, 14 nt, Human
caauaauuucaggu

SEQ ID NO: 2061670 - RNA, 16 nt, Human
caaugucaggaacaga

SEQ ID NO: 2061671 - RNA, 15 nt, Human
caaugucaaggugcu

SEQ ID NO: 2061672 - RNA, 15 nt, Human
caaugugauaaaacc

SEQ ID NO: 2061673 - RNA, 17 nt, Human
caaugugauaaaacccc

SEQ ID NO: 2061674 - RNA, 12 nt, Human
caauguucauug

SEQ ID NO: 2061675 - RNA, 13 nt, Human
caauguucauugu

SEQ ID NO: 2061676 - RNA, 14 nt, Human
caauguucauugua

SEQ ID NO: 2061677 - RNA, 15 nt, Human
caauguucauuguaa

SEQ ID NO: 2061678 - RNA, 18 nt, Human
caauguucauuguaaugu

SEQ ID NO: 2061679 - RNA, 22 nt, Human
caauguucauuguaauguuacu

SEQ ID NO: 2061680 - RNA, 23 nt, Human
caauguucauuguaauguuacug

SEQ ID NO: 2061681 - RNA, 23 nt, Human
caauucucauuugucacacacuu

SEQ ID NO: 2061682 - RNA, 17 nt, Human
caaugaggucugaaaug

SEQ ID NO: 2061683 - RNA, 19 nt, Human
caaugagauagaagauguu

SEQ ID NO: 2061684 - RNA, 22 nt, Human
caaugagauagaagauguuugc

SEQ ID NO: 2061685 - RNA, 18 nt, Human
caaugaggucugaaaugg

SEQ ID NO: 2061686 - RNA, 14 nt, Human
caaugucacuuaaa

SEQ ID NO: 2061687 - RNA, 14 nt, Human
caaugucaggaaca

SEQ ID NO: 2061688 - RNA, 19 nt, Human
caaugucaggaacagaagg

SEQ ID NO: 2061689 - RNA, 17 nt, Human
caauguagaaagcuuug

SEQ ID NO: 2061690 - RNA, 14 nt, Human
caauguucucucuu

SEQ ID NO: 2061691 - RNA, 17 nt, Human
caagccguggcuucccg

SEQ ID NO: 2061692 - RNA, 17 nt, Human
caagcaggaagcucaga

SEQ ID NO: 2061693 - RNA, 21 nt, Human
caagcaggaagcucagacugg

SEQ ID NO: 2061694 - RNA, 15 nt, Human
caagcaggaagcuca

SEQ ID NO: 2061695 - RNA, 16 nt, Human
caagcaggaagcucag

SEQ ID NO: 2061696 - RNA, 22 nt, Human
caagcgauucuucugcuucagc

SEQ ID NO: 2061697 - RNA, 20 nt, Human
caagcgauucuucugcuuca

SEQ ID NO: 2061698 - RNA, 19 nt, Human
caagcgauucuucugcuuc

SEQ ID NO: 2061699 - RNA, 22 nt, Human
caagccugcagucaucuugacc

SEQ ID NO: 2061700 - RNA, 14 nt, Human
caagccugccuagg

SEQ ID NO: 2061701 - RNA, 18 nt, Human
caagccguggcuucccgc

SEQ ID NO: 2061702 - RNA, 21 nt, Human
caagccugaccacgcuuucua

SEQ ID NO: 2061703 - RNA, 12 nt, Human
caaggagggaga

SEQ ID NO: 2061704 - RNA, 12 nt, Human
caaggaggaaaa

SEQ ID NO: 2061705 - RNA, 13 nt, Human
caaggaggaaaaa

SEQ ID NO: 2061706 - RNA, 14 nt, Human
caaggaggaaaaac

SEQ ID NO: 2061707 - RNA, 20 nt, Human
caaggaggaaaaacagacaa

SEQ ID NO: 2061708 - RNA, 20 nt, Human
caaggcugaccaagagagaa

SEQ ID NO: 2061709 - RNA, 21 nt, Human
caaggcugaccaagagagaaa

SEQ ID NO: 2061710 - RNA, 13 nt, Human
caaggagcugaga

SEQ ID NO: 2061711 - RNA, 14 nt, Human
caaggagcugagaa

SEQ ID NO: 2061712 - RNA, 18 nt, Human
caaggagcugagaauaga

SEQ ID NO: 2061713 - RNA, 20 nt, Human
caaggagcugagaauagaag

SEQ ID NO: 2061714 - RNA, 22 nt, Human
caaggagcugagaauagaagga

SEQ ID NO: 2061715 - RNA, 23 nt, Human
caaggagcugagaauagaaggaa

SEQ ID NO: 2061716 - RNA, 16 nt, Human
caaggacuugaaagca

SEQ ID NO: 2061717 - RNA, 18 nt, Human
caaggacuugaaagcauc

SEQ ID NO: 2061718 - RNA, 20 nt, Human
caaggacuugaaagcaucca

SEQ ID NO: 2061719 - RNA, 22 nt, Human
caaggacugcagggacugccag

SEQ ID NO: 2061720 - RNA, 14 nt, Human
caaggacugccgac

SEQ ID NO: 2061721 - RNA, 11 nt, Human
caaggacaaag

SEQ ID NO: 2061722 - RNA, 17 nt, Human
caaggacaaagucucca

SEQ ID NO: 2061723 - RNA, 18 nt, Human
caaggacaaagucuccag

SEQ ID NO: 2061724 - RNA, 19 nt, Human
caaggacaaagucuccagc

SEQ ID NO: 2061725 - RNA, 22 nt, Human
caaggacaaagucuccagccca

SEQ ID NO: 2061726 - RNA, 23 nt, Human
caaggacaaagucuccagcccac

SEQ ID NO: 2061727 - RNA, 15 nt, Human
caaggacugcaggga

SEQ ID NO: 2061728 - RNA, 18 nt, Human
caaggaaggaaagaaaga

SEQ ID NO: 2061729 - RNA, 23 nt, Human
caaggaaggaaagaaagaaggaa

SEQ ID NO: 2061730 - RNA, 19 nt, Human
caagcuggucccacucagu

SEQ ID NO: 2061731 - RNA, 12 nt, Human
caaggaaggaaa

SEQ ID NO: 2061732 - RNA, 13 nt, Human
caaggaaggaaag

SEQ ID NO: 2061733 - RNA, 16 nt, Human
caaggaaggaaagaaa

SEQ ID NO: 2061734 - RNA, 17 nt, Human
caaggaaggaaagaaag

SEQ ID NO: 2061735 - RNA, 17 nt, Human
caagcuggucccacuca

SEQ ID NO: 2061736 - RNA, 17 nt, Human
caagugagagcugggug

SEQ ID NO: 2061737 - RNA, 15 nt, Human
caagugagagcuggg

SEQ ID NO: 2061738 - RNA, 14 nt, Human
caagugagagcugg

SEQ ID NO: 2061739 - RNA, 21 nt, Human
caaguccucuuuucugagagg

SEQ ID NO: 2061740 - RNA, 18 nt, Human
caagugagagcugggugu

SEQ ID NO: 2061741 - RNA, 16 nt, Human
caagugagcaaaccug

SEQ ID NO: 2061742 - RNA, 19 nt, Human
caagugagcaaaccugccc

SEQ ID NO: 2061743 - RNA, 20 nt, Human
caagugagcaaaccugcccc

SEQ ID NO: 2061744 - RNA, 21 nt, Human
caagugagcaaaccugcccca

SEQ ID NO: 2061745 - RNA, 19 nt, Human
caaguggcucccacacccu

SEQ ID NO: 2061746 - RNA, 19 nt, Human
caaguggaccuugagacca

SEQ ID NO: 2061747 - RNA, 14 nt, Human
caaguuaaauaaau

SEQ ID NO: 2061748 - RNA, 22 nt, Human
caaguguaugcacgugugcaca

SEQ ID NO: 2061749 - RNA, 17 nt, Human
caagugucucaguccac

SEQ ID NO: 2061750 - RNA, 20 nt, Human
caagugucucaguccaccug

SEQ ID NO: 2061751 - RNA, 17 nt, Human
caaguggcaugugcugu

SEQ ID NO: 2061752 - RNA, 19 nt, Human
caaguggcaugugcuguga

SEQ ID NO: 2061753 - RNA, 14 nt, Human
caaguccucuuuuc

SEQ ID NO: 2061754 - RNA, 19 nt, Human
caaggucguuuuuuucauu

SEQ ID NO: 2061755 - RNA, 21 nt, Human
caaggucuagguggagguggg

SEQ ID NO: 2061756 - RNA, 16 nt, Human
caaggucgguaaguug

SEQ ID NO: 2061757 - RNA, 14 nt, Human
caaggggugccugg

SEQ ID NO: 2061758 - RNA, 15 nt, Human
caaggggugccuggg

SEQ ID NO: 2061759 - RNA, 18 nt, Human
caaggggugccugggaac

SEQ ID NO: 2061760 - RNA, 17 nt, Human
caagggguuucuguuuc

SEQ ID NO: 2061761 - RNA, 15 nt, Human
caagggggacugucu

SEQ ID NO: 2061762 - RNA, 18 nt, Human
caaggggcccaaauucuu

SEQ ID NO: 2061763 - RNA, 17 nt, Human
caaggggcccaaauucu

SEQ ID NO: 2061764 - RNA, 12 nt, Human
caaggcugcagu

SEQ ID NO: 2061765 - RNA, 15 nt, Human
caaggcugcagugag

SEQ ID NO: 2061766 - RNA, 23 nt, Human
caaggcugaccaagagagaaaga

SEQ ID NO: 2061767 - RNA, 17 nt, Human
caagcaccuccugccuc

SEQ ID NO: 2061768 - RNA, 16 nt, Human
caagcaccuccugccu

SEQ ID NO: 2061769 - RNA, 15 nt, Human
caagagggcacuggu

SEQ ID NO: 2061770 - RNA, 14 nt, Human
caagagggcacugg

SEQ ID NO: 2061771 - RNA, 15 nt, Human
caagcaccuccugcc

SEQ ID NO: 2061772 - RNA, 13 nt, Human
caagagggcacug

SEQ ID NO: 2061773 - RNA, 20 nt, Human
caagaggcuguucccaccag

SEQ ID NO: 2061774 - RNA, 15 nt, Human
caagacucugucuca

SEQ ID NO: 2061775 - RNA, 18 nt, Human
caagacucuuuggacacu

SEQ ID NO: 2061776 - RNA, 13 nt, Human
caagaacagcagg

SEQ ID NO: 2061777 - RNA, 14 nt, Human
caagaacagcaggc

SEQ ID NO: 2061778 - RNA, 17 nt, Human
caagaacagcaggccca

SEQ ID NO: 2061779 - RNA, 21 nt, Human
caagaacagcaggcccaccua

SEQ ID NO: 2061780 - RNA, 15 nt, Human
caagaacugaaaaca

SEQ ID NO: 2061781 - RNA, 16 nt, Human
caagaacugaaaacau

SEQ ID NO: 2061782 - RNA, 17 nt, Human
caagaacugaaaacaua

SEQ ID NO: 2061783 - RNA, 21 nt, Human
caagaacugaaaacauaaaaa

SEQ ID NO: 2061784 - RNA, 12 nt, Human
caagaacugcau

SEQ ID NO: 2061785 - RNA, 13 nt, Human
caagaacugcaug

SEQ ID NO: 2061786 - RNA, 16 nt, Human
caagaacugcauggac

SEQ ID NO: 2061787 - RNA, 18 nt, Human
caagaacugcauggaccu

SEQ ID NO: 2061788 - RNA, 19 nt, Human
caagaacugcauggaccua

SEQ ID NO: 2061789 - RNA, 23 nt, Human
caagaacugcauggaccuaacau

SEQ ID NO: 2061790 - RNA, 13 nt, Human
caacuuuucuauu

SEQ ID NO: 2061791 - RNA, 22 nt, Human
caacugaggcagacagcagcuc

SEQ ID NO: 2061792 - RNA, 19 nt, Human
caacugaccagccuccaug

SEQ ID NO: 2061793 - RNA, 13 nt, Human
caacugaggcaga

SEQ ID NO: 2061794 - RNA, 14 nt, Human
caacugaggcagac

SEQ ID NO: 2061795 - RNA, 16 nt, Human
caacugaggcagacag

SEQ ID NO: 2061796 - RNA, 17 nt, Human
caacugaggcagacagc

SEQ ID NO: 2061797 - RNA, 20 nt, Human
caacugaggcagacagcagc

SEQ ID NO: 2061798 - RNA, 21 nt, Human
caacugaggcagacagcagcu

SEQ ID NO: 2061799 - RNA, 14 nt, Human
caagaacucugggc

SEQ ID NO: 2061800 - RNA, 13 nt, Human
caacccucagagc

SEQ ID NO: 2061801 - RNA, 16 nt, Human
caacccgaggcccgca

SEQ ID NO: 2061802 - RNA, 23 nt, Human
caacccugccccugccccgucac

SEQ ID NO: 2061803 - RNA, 22 nt, Human
caacccugccccugccccguca

SEQ ID NO: 2061804 - RNA, 14 nt, Human
caaccgaugcucca

SEQ ID NO: 2061805 - RNA, 17 nt, Human
caaccgaugcuccagcc

SEQ ID NO: 2061806 - RNA, 18 nt, Human
caaccgaugcuccagcca

SEQ ID NO: 2061807 - RNA, 21 nt, Human
caaccgaugcuccagccaacc

SEQ ID NO: 2061808 - RNA, 15 nt, Human
caacccuccuaucac

SEQ ID NO: 2061809 - RNA, 19 nt, Human
caacccuccuaucaccucc

SEQ ID NO: 2061810 - RNA, 22 nt, Human
caacccuccuaucaccuccccu

SEQ ID NO: 2061811 - RNA, 19 nt, Human
caacccucccucagccccu

SEQ ID NO: 2061812 - RNA, 20 nt, Human
caacccucccucagccccuc

SEQ ID NO: 2061813 - RNA, 21 nt, Human
caacccucccucagccccucu

SEQ ID NO: 2061814 - RNA, 22 nt, Human
caacccucccucagccccucuu

SEQ ID NO: 2061815 - RNA, 11 nt, Human
caacccugcaa

SEQ ID NO: 2061816 - RNA, 12 nt, Human
caacccugcaaa

SEQ ID NO: 2061817 - RNA, 22 nt, Human
caacccugcaaaggacuguuuu

SEQ ID NO: 2061818 - RNA, 11 nt, Human
caacccugccc

SEQ ID NO: 2061819 - RNA, 13 nt, Human
caacccugccccu

SEQ ID NO: 2061820 - RNA, 14 nt, Human
caacccugccccug

SEQ ID NO: 2061821 - RNA, 15 nt, Human
caacccugccccugc

SEQ ID NO: 2061822 - RNA, 16 nt, Human
caacccugccccugcc

SEQ ID NO: 2061823 - RNA, 22 nt, Human
caacacucacauuuauucugcu

SEQ ID NO: 2061824 - RNA, 22 nt, Human
caaccccuucgcuccugugucu

SEQ ID NO: 2061825 - RNA, 11 nt, Human
caaauuucaca

SEQ ID NO: 2061826 - RNA, 14 nt, Human
caaccuuacuuaca

SEQ ID NO: 2061827 - RNA, 23 nt, Human
caaccuuacuuacagcauaaggg

SEQ ID NO: 2061828 - RNA, 14 nt, Human
caacggcaagacag

SEQ ID NO: 2061829 - RNA, 21 nt, Human
caacggagagcgccugccccu

SEQ ID NO: 2061830 - RNA, 14 nt, Human
caaccugugaucaa

SEQ ID NO: 2061831 - RNA, 18 nt, Human
caaccugugaucaagcaa

SEQ ID NO: 2061832 - RNA, 17 nt, Human
caacugaccagccucca

SEQ ID NO: 2061833 - RNA, 15 nt, Human
caacugaccagccuc

SEQ ID NO: 2061834 - RNA, 22 nt, Human
caaccgaugcuccagccaaccc

SEQ ID NO: 2061835 - RNA, 19 nt, Human
caaccggggagcccccgcc

SEQ ID NO: 2061836 - RNA, 20 nt, Human
caaccggggagcccccgccc

SEQ ID NO: 2061837 - RNA, 14 nt, Human
caaccuccugggcu

SEQ ID NO: 2061838 - RNA, 18 nt, Human
caaccguuggaaacauaa

SEQ ID NO: 2061839 - RNA, 12 nt, Human
caaccuguaaau

SEQ ID NO: 2061840 - RNA, 13 nt, Human
caaccuguaaauu

SEQ ID NO: 2061841 - RNA, 16 nt, Human
caaccuguaaauuauu

SEQ ID NO: 2061842 - RNA, 21 nt, Human
caaccuguaaauuauuuuaaa

SEQ ID NO: 2061843 - RNA, 15 nt, Human
caaccuguaagacug

SEQ ID NO: 2061844 - RNA, 17 nt, Human
caaccucggcuccugga

SEQ ID NO: 2061845 - RNA, 18 nt, Human
caaccucggcuccuggac

SEQ ID NO: 2061846 - RNA, 20 nt, Human
caaccucggcuccuggacuc

SEQ ID NO: 2061847 - RNA, 15 nt, Human
caaccuccugggcua

SEQ ID NO: 2061848 - RNA, 19 nt, Human
caaagugcugggauuacag

SEQ ID NO: 2061849 - RNA, 19 nt, Human
caaaggguaucaggugcug

SEQ ID NO: 2061850 - RNA, 20 nt, Human
caaagugcugggauuacagg

SEQ ID NO: 2061851 - RNA, 23 nt, Human
caaagugcugggauuacaggugu

SEQ ID NO: 2061852 - RNA, 24 nt, Human
caaaggguacuuccacugauggaa

SEQ ID NO: 2061853 - RNA, 14 nt, Human
caaauacucuuagg

SEQ ID NO: 2061854 - RNA, 20 nt, Human
caaauggugguuguuucuuc

SEQ ID NO: 2061855 - RNA, 21 nt, Human
caaauggugguuguuucuucc

SEQ ID NO: 2061856 - RNA, 22 nt, Human
caaauggugguuguuucuucca

SEQ ID NO: 2061857 - RNA, 23 nt, Human
caaauggugguuguuucuuccaa

SEQ ID NO: 2061858 - RNA, 16 nt, Human
caaauuaucaagcuaa

SEQ ID NO: 2061859 - RNA, 17 nt, Human
caaauuaucaagcuaau

SEQ ID NO: 2061860 - RNA, 21 nt, Human
caaauuaucaagcuaauaaaa

SEQ ID NO: 2061861 - RNA, 18 nt, Human
caaauuaucaagcuaaua

SEQ ID NO: 2061862 - RNA, 20 nt, Human
caaauuaucaagcuaauaaa

SEQ ID NO: 2061863 - RNA, 14 nt, Human
caaauuaucuuaaa

SEQ ID NO: 2061864 - RNA, 18 nt, Human
caaauguccuccagaagc

SEQ ID NO: 2061865 - RNA, 19 nt, Human
caaauguccuccagaagcc

SEQ ID NO: 2061866 - RNA, 18 nt, Human
caaauguaauugaauaaa

SEQ ID NO: 2061867 - RNA, 21 nt, Human
caaauguaauugaauaaaguu

SEQ ID NO: 2061868 - RNA, 13 nt, Human
caaauuuauaauu

SEQ ID NO: 2061869 - RNA, 14 nt, Human
caaauuuauaauuu

SEQ ID NO: 2061870 - RNA, 15 nt, Human
caaauuuauaauuuu

SEQ ID NO: 2061871 - RNA, 16 nt, Human
caaauuuauaauuuua

SEQ ID NO: 2061872 - RNA, 22 nt, Human
caaauuguaucuagugcagcug

SEQ ID NO: 2061873 - RNA, 18 nt, Human
caaauuguaucuagugca

SEQ ID NO: 2061874 - RNA, 19 nt, Human
caaauuguaucuagugcag

SEQ ID NO: 2061875 - RNA, 14 nt, Human
caaaguggaaggaa

SEQ ID NO: 2061876 - RNA, 15 nt, Human
caaaguggaaggaaa

SEQ ID NO: 2061877 - RNA, 16 nt, Human
caaaguggaaggaaag

SEQ ID NO: 2061878 - RNA, 22 nt, Human
caaaaugucuguagcuccucaa

SEQ ID NO: 2061879 - RNA, 13 nt, Human
caaaaugucugua

SEQ ID NO: 2061880 - RNA, 15 nt, Human
caaaauguaggguua

SEQ ID NO: 2061881 - RNA, 18 nt, Human
caaaauggaauucauucu

SEQ ID NO: 2061882 - RNA, 15 nt, Human
caaaauuauuucaga

SEQ ID NO: 2061883 - RNA, 21 nt, Human
caaaauuauagaaguuuagau

SEQ ID NO: 2061884 - RNA, 17 nt, Human
caaaauuauuucagaaa

SEQ ID NO: 2061885 - RNA, 16 nt, Human
caaaauuauuucagaa

SEQ ID NO: 2061886 - RNA, 15 nt, Human
caaacacauacagga

SEQ ID NO: 2061887 - RNA, 23 nt, Human
caaacacauuaagccuuccacac

SEQ ID NO: 2061888 - RNA, 23 nt, Human
caaaauugggaaaggaguagaaa

SEQ ID NO: 2061889 - RNA, 13 nt, Human
caaacacauuaag

SEQ ID NO: 2061890 - RNA, 18 nt, Human
caaaccuccaaaagcccu

SEQ ID NO: 2061891 - RNA, 19 nt, Human
caaagcuaggccuggccag

SEQ ID NO: 2061892 - RNA, 14 nt, Human
caaagcuaggccug

SEQ ID NO: 2061893 - RNA, 13 nt, Human
caaagcuaggccu

SEQ ID NO: 2061894 - RNA, 22 nt, Human
caaagcugaagccgccaggacc

SEQ ID NO: 2061895 - RNA, 18 nt, Human
caaagcugacgaggcugg

SEQ ID NO: 2061896 - RNA, 20 nt, Human
caaagcugacgaggcugggc

SEQ ID NO: 2061897 - RNA, 22 nt, Human
caaagcugacgaggcugggcca

SEQ ID NO: 2061898 - RNA, 21 nt, Human
caaagcuaggguggcccuugc

SEQ ID NO: 2061899 - RNA, 22 nt, Human
caaagcuaggguggcccuugca

SEQ ID NO: 2061900 - RNA, 13 nt, Human
caaagcgggggga

SEQ ID NO: 2061901 - RNA, 16 nt, Human
caaagcggggggaggg

SEQ ID NO: 2061902 - RNA, 17 nt, Human
caaagcggggggagggu

SEQ ID NO: 2061903 - RNA, 18 nt, Human
caaaggguaucaggugcu

SEQ ID NO: 2061904 - RNA, 16 nt, Human
caaaggguaucaggug

SEQ ID NO: 2061905 - RNA, 23 nt, Human
caaaggcgcagugcuucucuaca

SEQ ID NO: 2061906 - RNA, 20 nt, Human
caaaggaagcuuucucugcu

SEQ ID NO: 2061907 - RNA, 23 nt, Human
caaaggaagcuuucucugcuuca

SEQ ID NO: 2061908 - RNA, 20 nt, Human
caaaggcacagugaaggcug

SEQ ID NO: 2061909 - RNA, 22 nt, Human
caaaggaaucuccaguuuucag

SEQ ID NO: 2061910 - RNA, 21 nt, Human
caaaggaauggaggcucuaau

SEQ ID NO: 2061911 - RNA, 19 nt, Human
caaaggaaucuccaguuuu

SEQ ID NO: 2061912 - RNA, 16 nt, Human
caaaggaagucuagga

SEQ ID NO: 2061913 - RNA, 14 nt, Human
caaacgguacacag

SEQ ID NO: 2061914 - RNA, 15 nt, Human
caaacuguguaacug

SEQ ID NO: 2061915 - RNA, 20 nt, Human
caaacuguguaacugcccaa

SEQ ID NO: 2061916 - RNA, 13 nt, Human
caaacuguugauu

SEQ ID NO: 2061917 - RNA, 17 nt, Human
caaacuuaagaaacacu

SEQ ID NO: 2061918 - RNA, 19 nt, Human
caaacuuaagaaacacuga

SEQ ID NO: 2061919 - RNA, 17 nt, Human
caaagccuccuccagcc

SEQ ID NO: 2061920 - RNA, 18 nt, Human
caaagccuccuccagccg

SEQ ID NO: 2061921 - RNA, 18 nt, Human
caaagcccuuccaugucg

SEQ ID NO: 2061922 - RNA, 18 nt, Human
caaacuguguaacugccc

SEQ ID NO: 2061923 - RNA, 22 nt, Human
caaagccaacagucaaaacaga

SEQ ID NO: 2061924 - RNA, 22 nt, Human
caaagccaaagcuaggccuggc

SEQ ID NO: 2061925 - RNA, 13 nt, Human
caaagccagaagc

SEQ ID NO: 2061926 - RNA, 14 nt, Human
caaagccagaagcu

SEQ ID NO: 2061927 - RNA, 16 nt, Human
caaagccagaagcuga

SEQ ID NO: 2061928 - RNA, 18 nt, Human
caaagccagaagcugagc

SEQ ID NO: 2061929 - RNA, 14 nt, Human
caaagccagacagc

SEQ ID NO: 2061930 - RNA, 15 nt, Human
caaagccagacagca

SEQ ID NO: 2061931 - RNA, 19 nt, Human
auuuuggguuuugggucuu

SEQ ID NO: 2061932 - RNA, 23 nt, Human
auuuugggguacccacugcucug

SEQ ID NO: 2061933 - RNA, 22 nt, Human
auuuugggguacccacugcucu

SEQ ID NO: 2061934 - RNA, 21 nt, Human
auuuugggguacccacugcuc

SEQ ID NO: 2061935 - RNA, 14 nt, Human
auuuucuacaagua

SEQ ID NO: 2061936 - RNA, 13 nt, Human
caaaaacagccuc

SEQ ID NO: 2061937 - RNA, 14 nt, Human
caaaaacagccuca

SEQ ID NO: 2061938 - RNA, 18 nt, Human
caaaaaauuagccgggcg

SEQ ID NO: 2061939 - RNA, 16 nt, Human
caaaaaauuagccggg

SEQ ID NO: 2061940 - RNA, 21 nt, Human
caaaaagacacuugauacuug

SEQ ID NO: 2061941 - RNA, 18 nt, Human
caaaaagaaucugcauuu

SEQ ID NO: 2061942 - RNA, 19 nt, Human
caaaaagaaucugcauuua

SEQ ID NO: 2061943 - RNA, 22 nt, Human
caaaaagaaucugcauuuagca

SEQ ID NO: 2061944 - RNA, 23 nt, Human
caaaaagaaucugcauuuagcac

SEQ ID NO: 2061945 - RNA, 13 nt, Human
caaaaaggcagga

SEQ ID NO: 2061946 - RNA, 17 nt, Human
caaaaaccucacccgag

SEQ ID NO: 2061947 - RNA, 17 nt, Human
caaaaacgaaagcuggg

SEQ ID NO: 2061948 - RNA, 16 nt, Human
caaaaacuacacauau

SEQ ID NO: 2061949 - RNA, 22 nt, Human
caaaaacagccucacagaagaa

SEQ ID NO: 2061950 - RNA, 15 nt, Human
caaaaacagccucac

SEQ ID NO: 2061951 - RNA, 16 nt, Human
caaaaacagccucaca

SEQ ID NO: 2061952 - RNA, 19 nt, Human
caaaagaacaagaauuucu

SEQ ID NO: 2061953 - RNA, 17 nt, Human
caaaauaaaaaugaggu

SEQ ID NO: 2061954 - RNA, 21 nt, Human
caaaagaaaaaaaaaagcacc

SEQ ID NO: 2061955 - RNA, 13 nt, Human
caaaaccacagcc

SEQ ID NO: 2061956 - RNA, 21 nt, Human
caaaacaguauugacuuguau

SEQ ID NO: 2061957 - RNA, 22 nt, Human
caaaacaugcuaccugauccca

SEQ ID NO: 2061958 - RNA, 20 nt, Human
caaaaauuuggaauucuguu

SEQ ID NO: 2061959 - RNA, 15 nt, Human
caaaacauuccguuu

SEQ ID NO: 2061960 - RNA, 16 nt, Human
caaaacacuuguaauu

SEQ ID NO: 2061961 - RNA, 18 nt, Human
caaaacacuuguaauuuu

SEQ ID NO: 2061962 - RNA, 19 nt, Human
caaaacagagaugugauaa

SEQ ID NO: 2061963 - RNA, 18 nt, Human
caaaaccugauguuaaaa

SEQ ID NO: 2061964 - RNA, 21 nt, Human
caaaaccugauguuaaaauuc

SEQ ID NO: 2061965 - RNA, 15 nt, Human
caaaaccauugcuuc

SEQ ID NO: 2061966 - RNA, 16 nt, Human
caaaaccauugcuuca

SEQ ID NO: 2061967 - RNA, 17 nt, Human
caaaaccauugcuucac

SEQ ID NO: 2061968 - RNA, 16 nt, Human
caaaaccacagcccug

SEQ ID NO: 2061969 - RNA, 18 nt, Human
caaaaccacagcccuguc

SEQ ID NO: 2061970 - RNA, 19 nt, Human
caaaaccacagcccuguca

SEQ ID NO: 2061971 - RNA, 21 nt, Human
caaaaccacagcccugucagu

SEQ ID NO: 2061972 - RNA, 17 nt, Human
caaaaauucacaagcug

SEQ ID NO: 2061973 - RNA, 20 nt, Human
caaaaauucacaagcugccu

SEQ ID NO: 2061974 - RNA, 23 nt, Human
caaaaauucacaagcugccuccc

SEQ ID NO: 2061975 - RNA, 11 nt, Human
caaaaauuauc

SEQ ID NO: 2061976 - RNA, 13 nt, Human
caaaaauuugaac

SEQ ID NO: 2061977 - RNA, 22 nt, Human
caaaaauuugaaccaaaacauu

SEQ ID NO: 2061978 - RNA, 11 nt, Human
caaaaauuuuu

SEQ ID NO: 2061979 - RNA, 13 nt, Human
caaaaauuuuugg

SEQ ID NO: 2061980 - RNA, 15 nt, Human
caaaaauuuuuggau

SEQ ID NO: 2061981 - RNA, 18 nt, Human
caaaaauuuuuggauuga

SEQ ID NO: 2061982 - RNA, 21 nt, Human
caaaaauuuuuggauugacag

SEQ ID NO: 2061983 - RNA, 22 nt, Human
caaaaauuuuuggauugacagu

SEQ ID NO: 2061984 - RNA, 14 nt, Human
caaaaauguacaaa

SEQ ID NO: 2061985 - RNA, 19 nt, Human
caaaaauguacaaaauaaa

SEQ ID NO: 2061986 - RNA, 21 nt, Human
caaaaauguacaaaauaaagu

SEQ ID NO: 2061987 - RNA, 22 nt, Human
caaaaauguacaaaauaaaguu

SEQ ID NO: 2061988 - RNA, 19 nt, Human
caaaaaugaaagcaugucu

SEQ ID NO: 2061989 - RNA, 17 nt, Human
caaaaauuagccgggca

SEQ ID NO: 2061990 - RNA, 15 nt, Human
caaaaauuagccggg

SEQ ID NO: 2061991 - RNA, 17 nt, Human
caaaaauuagccgggcg

SEQ ID NO: 2061992 - RNA, 20 nt, Human
caaaaauuagccgggcgugg

SEQ ID NO: 2061993 - RNA, 19 nt, Human
caaaaauuaucuauuugua

SEQ ID NO: 2061994 - RNA, 20 nt, Human
caaaaauuaucuauuuguau

SEQ ID NO: 2061995 - RNA, 21 nt, Human
caaaaauuaucuauuuguaua

SEQ ID NO: 2061996 - RNA, 23 nt, Human
caaaaauuaucuauuuguauaua

SEQ ID NO: 2061997 - RNA, 13 nt, Human
caaaaagcuuccc

SEQ ID NO: 2061998 - RNA, 14 nt, Human
caaaaagcuucccc

SEQ ID NO: 2061999 - RNA, 20 nt, Human
caaaaagggaaacuauuguc

SEQ ID NO: 2062000 - RNA, 14 nt, Human
caaaaauacucuaa

SEQ ID NO: 2062001 - RNA, 15 nt, Human
caaaaauacucuaau

SEQ ID NO: 2062002 - RNA, 17 nt, Human
caaaaauacucuaauuc

SEQ ID NO: 2062003 - RNA, 18 nt, Human
caaaaauacucuaauucu

SEQ ID NO: 2062004 - RNA, 19 nt, Human
caaaaauacucuaauucua

SEQ ID NO: 2062005 - RNA, 20 nt, Human
caaaaauacucuaauucuaa

SEQ ID NO: 2062006 - RNA, 23 nt, Human
caaacucauaacagucuuacugc

SEQ ID NO: 2062007 - RNA, 14 nt, Human
cacauagauucacc

SEQ ID NO: 2062008 - RNA, 16 nt, Human
cacauagauucaccug

SEQ ID NO: 2062009 - RNA, 17 nt, Human
cacauagauucaccugu

SEQ ID NO: 2062010 - RNA, 19 nt, Human
cacauagauucaccuguaa

SEQ ID NO: 2062011 - RNA, 22 nt, Human
cacauagauucaccuguaaaac

SEQ ID NO: 2062012 - RNA, 18 nt, Human
cacauagcauguaauggu

SEQ ID NO: 2062013 - RNA, 16 nt, Human
cacauacuugagacug

SEQ ID NO: 2062014 - RNA, 22 nt, Human
cacaguuccucgcccugggucu

SEQ ID NO: 2062015 - RNA, 22 nt, Human
cacagcuucauuuccugugucu

SEQ ID NO: 2062016 - RNA, 21 nt, Human
cacagcuucauuuccuguguc

SEQ ID NO: 2062017 - RNA, 12 nt, Human
cacagcuguggu

SEQ ID NO: 2062018 - RNA, 22 nt, Human
cacagcuguggugagguugggc

SEQ ID NO: 2062019 - RNA, 17 nt, Human
cacagcuucagccagga

SEQ ID NO: 2062020 - RNA, 14 nt, Human
cacagcuucagcca

SEQ ID NO: 2062021 - RNA, 19 nt, Human
caauuuguaaaaacagcau

SEQ ID NO: 2062022 - RNA, 16 nt, Human
caauuuguauaaaaug

SEQ ID NO: 2062023 - RNA, 16 nt, Human
caauuugucauuuuga

SEQ ID NO: 2062024 - RNA, 17 nt, Human
caauuugucauuuugaa

SEQ ID NO: 2062025 - RNA, 18 nt, Human
caauuugucauuuugaag

SEQ ID NO: 2062026 - RNA, 22 nt, Human
caauuugucauuuugaagcuaa

SEQ ID NO: 2062027 - RNA, 23 nt, Human
caauuugucauuuugaagcuaau

SEQ ID NO: 2062028 - RNA, 23 nt, Human
caauuuguucagucuuucauuua

SEQ ID NO: 2062029 - RNA, 23 nt, Human
caauuuguaaaaacagcauugcu

SEQ ID NO: 2062030 - RNA, 15 nt, Human
cacagcuuccccucu

SEQ ID NO: 2062031 - RNA, 19 nt, Human
cacagcuucagccaggagc

SEQ ID NO: 2062032 - RNA, 18 nt, Human
cacagcuucagccaggag

SEQ ID NO: 2062033 - RNA, 22 nt, Human
cacagcuucagccaggagcugg

SEQ ID NO: 2062034 - RNA, 14 nt, Human
cacagcuuccccuc

SEQ ID NO: 2062035 - RNA, 22 nt, Human
cacaggaggagaaaucucacuu

SEQ ID NO: 2062036 - RNA, 15 nt, Human
cacaggcagguccag

SEQ ID NO: 2062037 - RNA, 14 nt, Human
cacaggcaggucca

SEQ ID NO: 2062038 - RNA, 11 nt, Human
cacaggcaggu

SEQ ID NO: 2062039 - RNA, 16 nt, Human
cacaguuccucgcccu

SEQ ID NO: 2062040 - RNA, 19 nt, Human
cacaguuccucgcccuggg

SEQ ID NO: 2062041 - RNA, 20 nt, Human
cacaguuccucgcccugggu

SEQ ID NO: 2062042 - RNA, 19 nt, Human
cacagugggagccagggcu

SEQ ID NO: 2062043 - RNA, 18 nt, Human
cacagugggagccagggc

SEQ ID NO: 2062044 - RNA, 14 nt, Human
cacagugggagcca

SEQ ID NO: 2062045 - RNA, 18 nt, Human
cacagugucuguaucgga

SEQ ID NO: 2062046 - RNA, 21 nt, Human
cacagugagucgaggacaggg

SEQ ID NO: 2062047 - RNA, 22 nt, Human
cacagugagucgaggacaggga

SEQ ID NO: 2062048 - RNA, 14 nt, Human
cacagugcaucuca

SEQ ID NO: 2062049 - RNA, 16 nt, Human
cacugcaacuucugcc

SEQ ID NO: 2062050 - RNA, 17 nt, Human
cacugcaacuucugccu

SEQ ID NO: 2062051 - RNA, 13 nt, Human
cacugcaagagcc

SEQ ID NO: 2062052 - RNA, 15 nt, Human
cacugcaagagccuu

SEQ ID NO: 2062053 - RNA, 16 nt, Human
cacugcaagagccuug

SEQ ID NO: 2062054 - RNA, 20 nt, Human
cacugcaagagccuuggugu

SEQ ID NO: 2062055 - RNA, 17 nt, Human
cacugcaagagccuugg

SEQ ID NO: 2062056 - RNA, 18 nt, Human
cacugcaagagccuuggu

SEQ ID NO: 2062057 - RNA, 19 nt, Human
cacugcaagagccuuggug

SEQ ID NO: 2062058 - RNA, 14 nt, Human
cacugacuccugug

SEQ ID NO: 2062059 - RNA, 22 nt, Human
cacugcacagugcaucucagcc

SEQ ID NO: 2062060 - RNA, 21 nt, Human
cacugcacagugcaucucagc

SEQ ID NO: 2062061 - RNA, 19 nt, Human
cacugcacagugcaucuca

SEQ ID NO: 2062062 - RNA, 18 nt, Human
cacugcacagugcaucuc

SEQ ID NO: 2062063 - RNA, 13 nt, Human
cacugcaaccucc

SEQ ID NO: 2062064 - RNA, 16 nt, Human
cacugauuuggagaua

SEQ ID NO: 2062065 - RNA, 14 nt, Human
cacugauuuggaga

SEQ ID NO: 2062066 - RNA, 15 nt, Human
cacugcaacaggaac

SEQ ID NO: 2062067 - RNA, 16 nt, Human
cacugcaaccuccgcc

SEQ ID NO: 2062068 - RNA, 14 nt, Human
cacugcaaccuccg

SEQ ID NO: 2062069 - RNA, 23 nt, Human
cacugcaaccuccgccucuuggg

SEQ ID NO: 2062070 - RNA, 14 nt, Human
cacugagcaaagca

SEQ ID NO: 2062071 - RNA, 13 nt, Human
cacugaggcaggg

SEQ ID NO: 2062072 - RNA, 14 nt, Human
cacugaggcaggga

SEQ ID NO: 2062073 - RNA, 16 nt, Human
cacugaggcagggaag

SEQ ID NO: 2062074 - RNA, 17 nt, Human
cacugaggcagggaagu

SEQ ID NO: 2062075 - RNA, 19 nt, Human
cacugaggcagggaagucc

SEQ ID NO: 2062076 - RNA, 24 nt, Human
cacugaugggcaacccccagccug

SEQ ID NO: 2062077 - RNA, 18 nt, Human
cacugaugggcaaccccc

SEQ ID NO: 2062078 - RNA, 14 nt, Human
cacugaugggcaac

SEQ ID NO: 2062079 - RNA, 19 nt, Human
cacugauggaaacaaagug

SEQ ID NO: 2062080 - RNA, 20 nt, Human
cacugauggaaacaaagugg

SEQ ID NO: 2062081 - RNA, 18 nt, Human
cacugaggcagggaaguc

SEQ ID NO: 2062082 - RNA, 23 nt, Human
cacugaccauccacucuacccuc

SEQ ID NO: 2062083 - RNA, 14 nt, Human
cacugacccacagc

SEQ ID NO: 2062084 - RNA, 19 nt, Human
cacugacccacagccucug

SEQ ID NO: 2062085 - RNA, 22 nt, Human
cacugacccacagccucugccu

SEQ ID NO: 2062086 - RNA, 16 nt, Human
cacugaccauccacuc

SEQ ID NO: 2062087 - RNA, 17 nt, Human
cacugaccauccacucu

SEQ ID NO: 2062088 - RNA, 20 nt, Human
cacugacagccucccacccc

SEQ ID NO: 2062089 - RNA, 16 nt, Human
cacugacagccuccca

SEQ ID NO: 2062090 - RNA, 17 nt, Human
cacugacagccucccac

SEQ ID NO: 2062091 - RNA, 13 nt, Human
cacugacagccuc

SEQ ID NO: 2062092 - RNA, 14 nt, Human
cacugacagccucc

SEQ ID NO: 2062093 - RNA, 15 nt, Human
cacugacagccuccc

SEQ ID NO: 2062094 - RNA, 23 nt, Human
cacugacauuguuggccaaagcc

SEQ ID NO: 2062095 - RNA, 19 nt, Human
cacucugucgcccagucug

SEQ ID NO: 2062096 - RNA, 16 nt, Human
cacucugucgcccagu

SEQ ID NO: 2062097 - RNA, 15 nt, Human
cacucugucgcccag

SEQ ID NO: 2062098 - RNA, 13 nt, Human
cacuggcagcccc

SEQ ID NO: 2062099 - RNA, 14 nt, Human
cacuggcagcccca

SEQ ID NO: 2062100 - RNA, 15 nt, Human
cacuggcagccccag

SEQ ID NO: 2062101 - RNA, 17 nt, Human
cacuggcagccccagca

SEQ ID NO: 2062102 - RNA, 19 nt, Human
cacuggcagccccagcacc

SEQ ID NO: 2062103 - RNA, 16 nt, Human
cacuggcaucuuugcu

SEQ ID NO: 2062104 - RNA, 16 nt, Human
cacuggcaaugaaaaa

SEQ ID NO: 2062105 - RNA, 15 nt, Human
cacuggaugcagaaa

SEQ ID NO: 2062106 - RNA, 23 nt, Human
cacuggaugcaaagaaaaucaga

SEQ ID NO: 2062107 - RNA, 19 nt, Human
cacuggaugcaaagaaaau

SEQ ID NO: 2062108 - RNA, 16 nt, Human
cacuggaguccagucu

SEQ ID NO: 2062109 - RNA, 15 nt, Human
cacuggagcccagga

SEQ ID NO: 2062110 - RNA, 11 nt, Human
cacuggagccc

SEQ ID NO: 2062111 - RNA, 12 nt, Human
cacuggagccca

SEQ ID NO: 2062112 - RNA, 13 nt, Human
cacuggagcccag

SEQ ID NO: 2062113 - RNA, 14 nt, Human
cacuggagcccagg

SEQ ID NO: 2062114 - RNA, 16 nt, Human
cacuggagcaccaggc

SEQ ID NO: 2062115 - RNA, 17 nt, Human
cacuggagcaccaggca

SEQ ID NO: 2062116 - RNA, 21 nt, Human
cacuggagcaccaggcacgaa

SEQ ID NO: 2062117 - RNA, 21 nt, Human
cacugcuuuuggucuguguga

SEQ ID NO: 2062118 - RNA, 20 nt, Human
cacugcuuuuggucugugug

SEQ ID NO: 2062119 - RNA, 17 nt, Human
cacugcuuccauuuaau

SEQ ID NO: 2062120 - RNA, 11 nt, Human
cacugcuguga

SEQ ID NO: 2062121 - RNA, 17 nt, Human
cacugcugugaacaagu

SEQ ID NO: 2062122 - RNA, 21 nt, Human
cacugcuggcugccuuagaac

SEQ ID NO: 2062123 - RNA, 16 nt, Human
cacugcuggcugccuu

SEQ ID NO: 2062124 - RNA, 15 nt, Human
cacugcuggcugccu

SEQ ID NO: 2062125 - RNA, 14 nt, Human
cacugcuggcugcc

SEQ ID NO: 2062126 - RNA, 13 nt, Human
cacugcuggcugc

SEQ ID NO: 2062127 - RNA, 12 nt, Human
cacugcuggcug

SEQ ID NO: 2062128 - RNA, 13 nt, Human
cacugcucacacu

SEQ ID NO: 2062129 - RNA, 23 nt, Human
cacugcuaggugggccagccccu

SEQ ID NO: 2062130 - RNA, 16 nt, Human
cacugcuaggugggcc

SEQ ID NO: 2062131 - RNA, 17 nt, Human
cacugcuaggugggcca

SEQ ID NO: 2062132 - RNA, 22 nt, Human
cacugcuaggugggccagcccc

SEQ ID NO: 2062133 - RNA, 17 nt, Human
cacugcugcccagccuc

SEQ ID NO: 2062134 - RNA, 16 nt, Human
cacugcugcugccuuu

SEQ ID NO: 2062135 - RNA, 15 nt, Human
cacugcugcccagcc

SEQ ID NO: 2062136 - RNA, 12 nt, Human
cacugcucuggu

SEQ ID NO: 2062137 - RNA, 14 nt, Human
cacugccugcccac

SEQ ID NO: 2062138 - RNA, 15 nt, Human
cacugccugcccacc

SEQ ID NO: 2062139 - RNA, 18 nt, Human
cacugccucucccuggcc

SEQ ID NO: 2062140 - RNA, 19 nt, Human
cacugccucucccuggccc

SEQ ID NO: 2062141 - RNA, 15 nt, Human
cacugccucuggaau

SEQ ID NO: 2062142 - RNA, 10 nt, Human
cacugccugc

SEQ ID NO: 2062143 - RNA, 22 nt, Human
cacugccuucgauacaccgggc

SEQ ID NO: 2062144 - RNA, 20 nt, Human
cacugccuucgauacaccgg

SEQ ID NO: 2062145 - RNA, 18 nt, Human
cacugcacuauagccuag

SEQ ID NO: 2062146 - RNA, 19 nt, Human
cacugcaccgggccacaga

SEQ ID NO: 2062147 - RNA, 18 nt, Human
cacugcaccgggccacag

SEQ ID NO: 2062148 - RNA, 16 nt, Human
cacugcaccgggccac

SEQ ID NO: 2062149 - RNA, 23 nt, Human
cacugcacagugcaucucagccc

SEQ ID NO: 2062150 - RNA, 15 nt, Human
cacugcaccgggcca

SEQ ID NO: 2062151 - RNA, 14 nt, Human
cacugcaccgggcc

SEQ ID NO: 2062152 - RNA, 13 nt, Human
cacugcccuucuc

SEQ ID NO: 2062153 - RNA, 12 nt, Human
cacugcccucug

SEQ ID NO: 2062154 - RNA, 17 nt, Human
cacugcccucuguucag

SEQ ID NO: 2062155 - RNA, 21 nt, Human
cacugcccgagcuggugcauu

SEQ ID NO: 2062156 - RNA, 16 nt, Human
cacugccucuuccucc

SEQ ID NO: 2062157 - RNA, 20 nt, Human
cacugccucucccuggcccu

SEQ ID NO: 2062158 - RNA, 16 nt, Human
cacugccucucccugg

SEQ ID NO: 2062159 - RNA, 17 nt, Human
cacugccauggaggcac

SEQ ID NO: 2062160 - RNA, 19 nt, Human
cacugccauggaggcacac

SEQ ID NO: 2062161 - RNA, 22 nt, Human
cacugccauggaggcacacagc

SEQ ID NO: 2062162 - RNA, 15 nt, Human
cacugcccgagcugg

SEQ ID NO: 2062163 - RNA, 16 nt, Human
cacugcccgagcuggu

SEQ ID NO: 2062164 - RNA, 17 nt, Human
cacugcccgagcuggug

SEQ ID NO: 2062165 - RNA, 18 nt, Human
cacugcccgagcuggugc

SEQ ID NO: 2062166 - RNA, 19 nt, Human
cacugcccgagcuggugca

SEQ ID NO: 2062167 - RNA, 22 nt, Human
cacuguaguaaauggcaauucu

SEQ ID NO: 2062168 - RNA, 16 nt, Human
cacuguaugcuggacg

SEQ ID NO: 2062169 - RNA, 18 nt, Human
cacuguaugcuggacggc

SEQ ID NO: 2062170 - RNA, 15 nt, Human
cacuguauaccccgu

SEQ ID NO: 2062171 - RNA, 22 nt, Human
cacuguauaccccgugaagcau

SEQ ID NO: 2062172 - RNA, 18 nt, Human
cacuguaaaaugaaauua

SEQ ID NO: 2062173 - RNA, 21 nt, Human
cacuguagcauuacagugggu

SEQ ID NO: 2062174 - RNA, 22 nt, Human
cacuggccccuagaaucagccu

SEQ ID NO: 2062175 - RNA, 16 nt, Human
cacuguaaaaugaaau

SEQ ID NO: 2062176 - RNA, 17 nt, Human
cacuguaaaaugaaauu

SEQ ID NO: 2062177 - RNA, 13 nt, Human
cacuguaaaauga

SEQ ID NO: 2062178 - RNA, 14 nt, Human
cacuguaaaaugaa

SEQ ID NO: 2062179 - RNA, 14 nt, Human
cacugugccaugug

SEQ ID NO: 2062180 - RNA, 16 nt, Human
cacugugaccuugacu

SEQ ID NO: 2062181 - RNA, 13 nt, Human
cacugugaagaga

SEQ ID NO: 2062182 - RNA, 14 nt, Human
cacugucuugaaga

SEQ ID NO: 2062183 - RNA, 12 nt, Human
cacugucucagu

SEQ ID NO: 2062184 - RNA, 18 nt, Human
cacuguauuacauaaaua

SEQ ID NO: 2062185 - RNA, 23 nt, Human
cacuguauuacauaaauaaauua

SEQ ID NO: 2062186 - RNA, 16 nt, Human
cacugucacuguuucu

SEQ ID NO: 2062187 - RNA, 18 nt, Human
cacugucacuguuucucu

SEQ ID NO: 2062188 - RNA, 19 nt, Human
cacugucacuguuucucug

SEQ ID NO: 2062189 - RNA, 22 nt, Human
cacugucacuguuucucugcug

SEQ ID NO: 2062190 - RNA, 16 nt, Human
cacugugggacucuuc

SEQ ID NO: 2062191 - RNA, 13 nt, Human
cacuguuagaaca

SEQ ID NO: 2062192 - RNA, 14 nt, Human
cacuguuagaacac

SEQ ID NO: 2062193 - RNA, 15 nt, Human
cacuguuagaacacu

SEQ ID NO: 2062194 - RNA, 16 nt, Human
cacuguuagaacacua

SEQ ID NO: 2062195 - RNA, 17 nt, Human
cacuguuagaacacuau

SEQ ID NO: 2062196 - RNA, 18 nt, Human
cacuguuagaacacuauu

SEQ ID NO: 2062197 - RNA, 19 nt, Human
cacuguuagaacacuauuu

SEQ ID NO: 2062198 - RNA, 20 nt, Human
cacuguuagaacacuauuuu

SEQ ID NO: 2062199 - RNA, 21 nt, Human
cacuguuagaacacuauuuuc

SEQ ID NO: 2062200 - RNA, 23 nt, Human
cacuguuagaacacuauuuucag

SEQ ID NO: 2062201 - RNA, 18 nt, Human
cacugugccaugugccag

SEQ ID NO: 2062202 - RNA, 16 nt, Human
cacugugccaugugcc

SEQ ID NO: 2062203 - RNA, 15 nt, Human
cacugugccaugugc

SEQ ID NO: 2062204 - RNA, 12 nt, Human
cacuguggccuu

SEQ ID NO: 2062205 - RNA, 20 nt, Human
cacuuauuuaugaaccugcc

SEQ ID NO: 2062206 - RNA, 17 nt, Human
cacuguugaauuuucuc

SEQ ID NO: 2062207 - RNA, 19 nt, Human
cacuguucugaaagugacu

SEQ ID NO: 2062208 - RNA, 13 nt, Human
cacuguugaauuu

SEQ ID NO: 2062209 - RNA, 18 nt, Human
cacuucacuccagccugg

SEQ ID NO: 2062210 - RNA, 13 nt, Human
cacuucagagagc

SEQ ID NO: 2062211 - RNA, 15 nt, Human
cacuucagagagcug

SEQ ID NO: 2062212 - RNA, 16 nt, Human
cacuucagagagcugg

SEQ ID NO: 2062213 - RNA, 17 nt, Human
cacuucagagagcuggu

SEQ ID NO: 2062214 - RNA, 14 nt, Human
cacuucacccugga

SEQ ID NO: 2062215 - RNA, 18 nt, Human
cacuucacacacaggcaa

SEQ ID NO: 2062216 - RNA, 22 nt, Human
cacuucaggguucuccucuccc

SEQ ID NO: 2062217 - RNA, 18 nt, Human
cacuucagagagcuggua

SEQ ID NO: 2062218 - RNA, 23 nt, Human
cacuucaggcucuucuccuuuca

SEQ ID NO: 2062219 - RNA, 22 nt, Human
cacuucauucuugaaagcugug

SEQ ID NO: 2062220 - RNA, 18 nt, Human
cacuucaggucaggaguu

SEQ ID NO: 2062221 - RNA, 20 nt, Human
cacuucaggcucuucuccuu

SEQ ID NO: 2062222 - RNA, 16 nt, Human
cacuucaggcucuucu

SEQ ID NO: 2062223 - RNA, 15 nt, Human
cacuucaggcucuuc

SEQ ID NO: 2062224 - RNA, 14 nt, Human
cacuucaggcucuu

SEQ ID NO: 2062225 - RNA, 12 nt, Human
cacuucagcuga

SEQ ID NO: 2062226 - RNA, 21 nt, Human
cacuucagcugacuuuucugu

SEQ ID NO: 2062227 - RNA, 17 nt, Human
cacuucuaaaugaagug

SEQ ID NO: 2062228 - RNA, 18 nt, Human
cacuucuaaaugaagugc

SEQ ID NO: 2062229 - RNA, 17 nt, Human
cacuucuaaauagcaau

SEQ ID NO: 2062230 - RNA, 21 nt, Human
cacuucgggaggucgaggcag

SEQ ID NO: 2062231 - RNA, 23 nt, Human
cacuucgggaggucgaggcagga

SEQ ID NO: 2062232 - RNA, 22 nt, Human
cacuucugccauauucuguugg

SEQ ID NO: 2062233 - RNA, 19 nt, Human
cacuucugaccacacuucc

SEQ ID NO: 2062234 - RNA, 16 nt, Human
cacuucugaccacacu

SEQ ID NO: 2062235 - RNA, 13 nt, Human
cacuucugaccac

SEQ ID NO: 2062236 - RNA, 17 nt, Human
cacuuccuacaagagca

SEQ ID NO: 2062237 - RNA, 23 nt, Human
cacuuccuacaagagcagccugu

SEQ ID NO: 2062238 - RNA, 12 nt, Human
cacuuccugucc

SEQ ID NO: 2062239 - RNA, 13 nt, Human
cacuuccugucca

SEQ ID NO: 2062240 - RNA, 14 nt, Human
cacuuccuguccag

SEQ ID NO: 2062241 - RNA, 17 nt, Human
cacuuccuguccagaga

SEQ ID NO: 2062242 - RNA, 18 nt, Human
cacuuccuguccagagag

SEQ ID NO: 2062243 - RNA, 20 nt, Human
cacuuccaccagccugcacu

SEQ ID NO: 2062244 - RNA, 20 nt, Human
cacuuccauaaucuggacuc

SEQ ID NO: 2062245 - RNA, 14 nt, Human
cacuuccaccagcc

SEQ ID NO: 2062246 - RNA, 15 nt, Human
cacuuccaccagccu

SEQ ID NO: 2062247 - RNA, 16 nt, Human
cacuuccaccagccug

SEQ ID NO: 2062248 - RNA, 17 nt, Human
cacuuccaccagccugc

SEQ ID NO: 2062249 - RNA, 18 nt, Human
cacuuccaccagccugca

SEQ ID NO: 2062250 - RNA, 19 nt, Human
cacuuccaccagccugcac

SEQ ID NO: 2062251 - RNA, 16 nt, Human
cacuucccuacaugga

SEQ ID NO: 2062252 - RNA, 22 nt, Human
cacuugcagacucuacagaggc

SEQ ID NO: 2062253 - RNA, 19 nt, Human
cacuugcagacucuacaga

SEQ ID NO: 2062254 - RNA, 18 nt, Human
cacuugcagacucuacag

SEQ ID NO: 2062255 - RNA, 14 nt, Human
cacuugcagacucu

SEQ ID NO: 2062256 - RNA, 24 nt, Human
cacuugcagacucuacagaggcca

SEQ ID NO: 2062257 - RNA, 12 nt, Human
cacuugcauuuc

SEQ ID NO: 2062258 - RNA, 18 nt, Human
cacuugcaguggaagaua

SEQ ID NO: 2062259 - RNA, 18 nt, Human
cacuugccccuguuaccu

SEQ ID NO: 2062260 - RNA, 22 nt, Human
cacuugcggauauucuggacug

SEQ ID NO: 2062261 - RNA, 12 nt, Human
cacuuggagcca

SEQ ID NO: 2062262 - RNA, 16 nt, Human
cacuuggccucuggau

SEQ ID NO: 2062263 - RNA, 13 nt, Human
cacuugcagacuc

SEQ ID NO: 2062264 - RNA, 22 nt, Human
cacuugaggucaggaguuccua

SEQ ID NO: 2062265 - RNA, 23 nt, Human
cacuugcacgcccaugugugagu

SEQ ID NO: 2062266 - RNA, 19 nt, Human
cacuugaugacccccaacc

SEQ ID NO: 2062267 - RNA, 18 nt, Human
cacuugaggucaggaguu

SEQ ID NO: 2062268 - RNA, 13 nt, Human
cacuugaguccag

SEQ ID NO: 2062269 - RNA, 17 nt, Human
cacuugagaauuacccu

SEQ ID NO: 2062270 - RNA, 15 nt, Human
cacuucuuuuauaac

SEQ ID NO: 2062271 - RNA, 20 nt, Human
cacuugagaauuacccuuuu

SEQ ID NO: 2062272 - RNA, 18 nt, Human
cacuucuuguuccccacu

SEQ ID NO: 2062273 - RNA, 23 nt, Human
cacuucuucuuggucuuauuuau

SEQ ID NO: 2062274 - RNA, 22 nt, Human
cacuucugugagacccccacac

SEQ ID NO: 2062275 - RNA, 20 nt, Human
cacuucugugagacccccac

SEQ ID NO: 2062276 - RNA, 21 nt, Human
cacuucugugagacccccaca

SEQ ID NO: 2062277 - RNA, 16 nt, Human
cacucaggucuguuuu

SEQ ID NO: 2062278 - RNA, 21 nt, Human
cacucaggaggcugaggcagg

SEQ ID NO: 2062279 - RNA, 16 nt, Human
cacucaguccauagca

SEQ ID NO: 2062280 - RNA, 19 nt, Human
cacucaggaggcugaggca

SEQ ID NO: 2062281 - RNA, 20 nt, Human
cacucaggaggcugaggcag

SEQ ID NO: 2062282 - RNA, 19 nt, Human
cacucaggccaacaagcca

SEQ ID NO: 2062283 - RNA, 17 nt, Human
cacuccuaggacauguu

SEQ ID NO: 2062284 - RNA, 15 nt, Human
cacuccuccaaagga

SEQ ID NO: 2062285 - RNA, 17 nt, Human
cacuccucccugaugua

SEQ ID NO: 2062286 - RNA, 18 nt, Human
cacuccucccugauguac

SEQ ID NO: 2062287 - RNA, 14 nt, Human
cacuccuaccuggu

SEQ ID NO: 2062288 - RNA, 13 nt, Human
cacuccuaccugg

SEQ ID NO: 2062289 - RNA, 22 nt, Human
cacuccggugugccugcagccc

SEQ ID NO: 2062290 - RNA, 17 nt, Human
cacuccggugugccugc

SEQ ID NO: 2062291 - RNA, 19 nt, Human
cacuccggugugccugcag

SEQ ID NO: 2062292 - RNA, 20 nt, Human
cacuccggugugccugcagc

SEQ ID NO: 2062293 - RNA, 21 nt, Human
cacuccggugugccugcagcc

SEQ ID NO: 2062294 - RNA, 19 nt, Human
cacucccuucccauaagcu

SEQ ID NO: 2062295 - RNA, 14 nt, Human
cacucccuucuccu

SEQ ID NO: 2062296 - RNA, 15 nt, Human
cacucccuucuccuu

SEQ ID NO: 2062297 - RNA, 14 nt, Human
cacucuacuuagca

SEQ ID NO: 2062298 - RNA, 18 nt, Human
cacucuacccucccaccc

SEQ ID NO: 2062299 - RNA, 19 nt, Human
cacucuacccucccacccc

SEQ ID NO: 2062300 - RNA, 17 nt, Human
cacucuacccuauacaa

SEQ ID NO: 2062301 - RNA, 15 nt, Human
cacucuacccuccca

SEQ ID NO: 2062302 - RNA, 16 nt, Human
cacucuacccucccac

SEQ ID NO: 2062303 - RNA, 17 nt, Human
cacucuacccucccacc

SEQ ID NO: 2062304 - RNA, 21 nt, Human
cacucuacccucccacccccu

SEQ ID NO: 2062305 - RNA, 17 nt, Human
cacucucauuccccagg

SEQ ID NO: 2062306 - RNA, 21 nt, Human
cacucuccccacacuaaccug

SEQ ID NO: 2062307 - RNA, 18 nt, Human
cacucucauuccccaggu

SEQ ID NO: 2062308 - RNA, 12 nt, Human
cacucuccccac

SEQ ID NO: 2062309 - RNA, 14 nt, Human
cacucuccccacac

SEQ ID NO: 2062310 - RNA, 15 nt, Human
cacucuccccacacu

SEQ ID NO: 2062311 - RNA, 20 nt, Human
cacucgugugcaacagacaa

SEQ ID NO: 2062312 - RNA, 22 nt, Human
cacucgugugcaacagacaagu

SEQ ID NO: 2062313 - RNA, 16 nt, Human
cacucgcuucccccau

SEQ ID NO: 2062314 - RNA, 20 nt, Human
cacucgcuucccccauagcc

SEQ ID NO: 2062315 - RNA, 10 nt, Human
cacuccuggg

SEQ ID NO: 2062316 - RNA, 11 nt, Human
cacuccugggg

SEQ ID NO: 2062317 - RNA, 12 nt, Human
cacuccuggggc

SEQ ID NO: 2062318 - RNA, 19 nt, Human
cacuccuggggccucuugg

SEQ ID NO: 2062319 - RNA, 13 nt, Human
cacuccuguacac

SEQ ID NO: 2062320 - RNA, 11 nt, Human
cacuccuuccu

SEQ ID NO: 2062321 - RNA, 15 nt, Human
cacuccuuccugcca

SEQ ID NO: 2062322 - RNA, 17 nt, Human
cacuccuuccugccacc

SEQ ID NO: 2062323 - RNA, 18 nt, Human
cacuccuuccugccaccu

SEQ ID NO: 2062324 - RNA, 21 nt, Human
cacuccuuccugccaccugcu

SEQ ID NO: 2062325 - RNA, 24 nt, Human
cacuccuuccugccaccugcugcu

SEQ ID NO: 2062326 - RNA, 13 nt, Human
cacucgcuucccc

SEQ ID NO: 2062327 - RNA, 19 nt, Human
cacucugcuuugacugagc

SEQ ID NO: 2062328 - RNA, 21 nt, Human
cacucugcuuugacugagcag

SEQ ID NO: 2062329 - RNA, 23 nt, Human
cacucugaguuuaccauuuguaa

SEQ ID NO: 2062330 - RNA, 19 nt, Human
cacucugacuggcacaguc

SEQ ID NO: 2062331 - RNA, 20 nt, Human
cacucugccucugccugcau

SEQ ID NO: 2062332 - RNA, 15 nt, Human
cacucugccucugcc

SEQ ID NO: 2062333 - RNA, 17 nt, Human
cacucugccucugccug

SEQ ID NO: 2062334 - RNA, 19 nt, Human
cacucugccucugccugca

SEQ ID NO: 2062335 - RNA, 11 nt, Human
cacucuccugg

SEQ ID NO: 2062336 - RNA, 12 nt, Human
cacucuccuggg

SEQ ID NO: 2062337 - RNA, 13 nt, Human
cacucuccugggc

SEQ ID NO: 2062338 - RNA, 14 nt, Human
cacucuccugggcc

SEQ ID NO: 2062339 - RNA, 15 nt, Human
cacucuccugggccc

SEQ ID NO: 2062340 - RNA, 16 nt, Human
cacucuccugggcccc

SEQ ID NO: 2062341 - RNA, 18 nt, Human
cacucuccugggccccuc

SEQ ID NO: 2062342 - RNA, 19 nt, Human
cacucuccugggccccucc

SEQ ID NO: 2062343 - RNA, 20 nt, Human
cacucuccugggccccuccc

SEQ ID NO: 2062344 - RNA, 21 nt, Human
cacucuccugggccccucccu

SEQ ID NO: 2062345 - RNA, 23 nt, Human
cacucuccugggccccucccuac

SEQ ID NO: 2062346 - RNA, 18 nt, Human
cacuaaccacgcuggacc

SEQ ID NO: 2062347 - RNA, 19 nt, Human
cacuaacgacuucagggca

SEQ ID NO: 2062348 - RNA, 18 nt, Human
cacuaaggugugcucuga

SEQ ID NO: 2062349 - RNA, 17 nt, Human
cacuaaggugugcucug

SEQ ID NO: 2062350 - RNA, 16 nt, Human
cacuaaccacgcugga

SEQ ID NO: 2062351 - RNA, 15 nt, Human
cacuaaccacgcugg

SEQ ID NO: 2062352 - RNA, 18 nt, Human
cacuaacauuauauugca

SEQ ID NO: 2062353 - RNA, 20 nt, Human
cacuaacauuauauugcaau

SEQ ID NO: 2062354 - RNA, 14 nt, Human
cacuaaccacgcug

SEQ ID NO: 2062355 - RNA, 13 nt, Human
cacuaaagcagug

SEQ ID NO: 2062356 - RNA, 19 nt, Human
cacuauaaaugguguuuuu

SEQ ID NO: 2062357 - RNA, 21 nt, Human
cacuauagccuaggugacaga

SEQ ID NO: 2062358 - RNA, 14 nt, Human
cacuauagccuagg

SEQ ID NO: 2062359 - RNA, 18 nt, Human
cacuauaauguaagcucu

SEQ ID NO: 2062360 - RNA, 14 nt, Human
cacuauaauguaag

SEQ ID NO: 2062361 - RNA, 15 nt, Human
cacuagucugugugc

SEQ ID NO: 2062362 - RNA, 20 nt, Human
cacuagucugugugcugugg

SEQ ID NO: 2062363 - RNA, 21 nt, Human
cacuagucugugugcuguggu

SEQ ID NO: 2062364 - RNA, 12 nt, Human
cacuauaaaugg

SEQ ID NO: 2062365 - RNA, 19 nt, Human
cacuauguugcccaggcag

SEQ ID NO: 2062366 - RNA, 18 nt, Human
cacuauguugcccaggca

SEQ ID NO: 2062367 - RNA, 17 nt, Human
cacuauguugcccaggc

SEQ ID NO: 2062368 - RNA, 16 nt, Human
cacuauguugcccagg

SEQ ID NO: 2062369 - RNA, 14 nt, Human
cacuaugaagaugu

SEQ ID NO: 2062370 - RNA, 21 nt, Human
cacuaugaagauguuucaaaa

SEQ ID NO: 2062371 - RNA, 15 nt, Human
cacuauguugcccag

SEQ ID NO: 2062372 - RNA, 17 nt, Human
cacuaugguauuugagu

SEQ ID NO: 2062373 - RNA, 12 nt, Human
cacuaugcauuu

SEQ ID NO: 2062374 - RNA, 14 nt, Human
cacuaugcauuuua

SEQ ID NO: 2062375 - RNA, 15 nt, Human
cacuaugcauuuuaa

SEQ ID NO: 2062376 - RNA, 17 nt, Human
cacuaugaagcuaccuc

SEQ ID NO: 2062377 - RNA, 21 nt, Human
cacuauguugcccaggcaggu

SEQ ID NO: 2062378 - RNA, 20 nt, Human
cacuauguugcccaggcagg

SEQ ID NO: 2062379 - RNA, 19 nt, Human
cacuauuuaucugugcaaa

SEQ ID NO: 2062380 - RNA, 12 nt, Human
cacuauuuucag

SEQ ID NO: 2062381 - RNA, 13 nt, Human
cacuauuuucaga

SEQ ID NO: 2062382 - RNA, 14 nt, Human
cacuauuuucagaa

SEQ ID NO: 2062383 - RNA, 16 nt, Human
cacuauuuucagaauc

SEQ ID NO: 2062384 - RNA, 17 nt, Human
cacuauuuucagaaucu

SEQ ID NO: 2062385 - RNA, 18 nt, Human
cacuauuuucagaaucug

SEQ ID NO: 2062386 - RNA, 20 nt, Human
cacuauuuucagaaucugaa

SEQ ID NO: 2062387 - RNA, 21 nt, Human
cacuauuuucagaaucugaau

SEQ ID NO: 2062388 - RNA, 17 nt, Human
cacuauuuuuauuuaua

SEQ ID NO: 2062389 - RNA, 22 nt, Human
cacuauuuuuauuuauauuuuu

SEQ ID NO: 2062390 - RNA, 15 nt, Human
cacucaaaagcuggg

SEQ ID NO: 2062391 - RNA, 17 nt, Human
cacucaaaagcugggca

SEQ ID NO: 2062392 - RNA, 18 nt, Human
cacucaaaagcugggcag

SEQ ID NO: 2062393 - RNA, 19 nt, Human
cacucaaaagcugggcagg

SEQ ID NO: 2062394 - RNA, 12 nt, Human
cacucaagccaa

SEQ ID NO: 2062395 - RNA, 16 nt, Human
cacucaaguucaagga

SEQ ID NO: 2062396 - RNA, 18 nt, Human
cacucaaguucaaggacc

SEQ ID NO: 2062397 - RNA, 19 nt, Human
cacucaaguucaaggacca

SEQ ID NO: 2062398 - RNA, 16 nt, Human
cacucaagccaagcag

SEQ ID NO: 2062399 - RNA, 18 nt, Human
cacucaagccaagcagcc

SEQ ID NO: 2062400 - RNA, 17 nt, Human
cacucacaacagcugcc

SEQ ID NO: 2062401 - RNA, 20 nt, Human
cacucaaaagcugggcaggu

SEQ ID NO: 2062402 - RNA, 22 nt, Human
cacucaacaaaagugcuuugga

SEQ ID NO: 2062403 - RNA, 23 nt, Human
cacuauuuuuauuuauauuuuug

SEQ ID NO: 2062404 - RNA, 17 nt, Human
cacucagaagacacuga

SEQ ID NO: 2062405 - RNA, 16 nt, Human
cacucagaagacacug

SEQ ID NO: 2062406 - RNA, 12 nt, Human
cacucagaagac

SEQ ID NO: 2062407 - RNA, 20 nt, Human
cacucacauuuauucugcuc

SEQ ID NO: 2062408 - RNA, 19 nt, Human
cacucacauuuauucugcu

SEQ ID NO: 2062409 - RNA, 17 nt, Human
cacucacagagacacag

SEQ ID NO: 2062410 - RNA, 18 nt, Human
cacucacagagacacagg

SEQ ID NO: 2062411 - RNA, 12 nt, Human
cacucacaugcu

SEQ ID NO: 2062412 - RNA, 14 nt, Human
cacucacaugcugg

SEQ ID NO: 2062413 - RNA, 23 nt, Human
cacucacaugcuggacaggucug

SEQ ID NO: 2062414 - RNA, 19 nt, Human
cacucagaagacacugaug

SEQ ID NO: 2062415 - RNA, 18 nt, Human
cacucagaagacacugau

SEQ ID NO: 2062416 - RNA, 15 nt, Human
cacucacuggcaucu

SEQ ID NO: 2062417 - RNA, 22 nt, Human
cacucagaagacacugaugggc

SEQ ID NO: 2062418 - RNA, 14 nt, Human
cacucagcaccccc

SEQ ID NO: 2062419 - RNA, 21 nt, Human
cacucagcacccccuucucug

SEQ ID NO: 2062420 - RNA, 13 nt, Human
cacgccacugcac

SEQ ID NO: 2062421 - RNA, 15 nt, Human
cacgccacugcacua

SEQ ID NO: 2062422 - RNA, 14 nt, Human
cacgcccaugugug

SEQ ID NO: 2062423 - RNA, 15 nt, Human
cacgcccauguguga

SEQ ID NO: 2062424 - RNA, 23 nt, Human
cacgcccaugugugagugugugc

SEQ ID NO: 2062425 - RNA, 14 nt, Human
cacgccacugcacu

SEQ ID NO: 2062426 - RNA, 22 nt, Human
cacgccacugcacuccagccug

SEQ ID NO: 2062427 - RNA, 20 nt, Human
cacgcccucauuacggcucc

SEQ ID NO: 2062428 - RNA, 23 nt, Human
cacgagcaaagugaagacacugg

SEQ ID NO: 2062429 - RNA, 12 nt, Human
cacgaugaaaaa

SEQ ID NO: 2062430 - RNA, 20 nt, Human
cacgauaaauaaucggccca

SEQ ID NO: 2062431 - RNA, 15 nt, Human
cacgaugaaaaacuu

SEQ ID NO: 2062432 - RNA, 14 nt, Human
cacgauguggcccu

SEQ ID NO: 2062433 - RNA, 15 nt, Human
cacgauguggcccug

SEQ ID NO: 2062434 - RNA, 16 nt, Human
cacgauguggcccugg

SEQ ID NO: 2062435 - RNA, 17 nt, Human
cacgauguggcccuggc

SEQ ID NO: 2062436 - RNA, 18 nt, Human
cacgauguggcccuggcc

SEQ ID NO: 2062437 - RNA, 22 nt, Human
cacgauguggcccuggccugcu

SEQ ID NO: 2062438 - RNA, 18 nt, Human
caccuugaacaccacgcu

SEQ ID NO: 2062439 - RNA, 17 nt, Human
cacgcacuucgggaggu

SEQ ID NO: 2062440 - RNA, 22 nt, Human
cacgcacacacacacacaggag

SEQ ID NO: 2062441 - RNA, 14 nt, Human
cacgcaccucccau

SEQ ID NO: 2062442 - RNA, 15 nt, Human
cacgcaccucccauc

SEQ ID NO: 2062443 - RNA, 19 nt, Human
cacgcaccucccauccuaa

SEQ ID NO: 2062444 - RNA, 12 nt, Human
cacgcaccuccc

SEQ ID NO: 2062445 - RNA, 15 nt, Human
cacgcacacacacac

SEQ ID NO: 2062446 - RNA, 20 nt, Human
cacgcacacacacacacagg

SEQ ID NO: 2062447 - RNA, 15 nt, Human
cacgcacacugucug

SEQ ID NO: 2062448 - RNA, 21 nt, Human
cacgauguggcccuggccugc

SEQ ID NO: 2062449 - RNA, 14 nt, Human
cacgcacacacaca

SEQ ID NO: 2062450 - RNA, 22 nt, Human
caccuugaagaaccucucacuu

SEQ ID NO: 2062451 - RNA, 18 nt, Human
caccuugacagggcacac

SEQ ID NO: 2062452 - RNA, 16 nt, Human
caccuugacagggcac

SEQ ID NO: 2062453 - RNA, 15 nt, Human
caccuugacagggca

SEQ ID NO: 2062454 - RNA, 14 nt, Human
caccuucccaugcc

SEQ ID NO: 2062455 - RNA, 13 nt, Human
caccuucccaugc

SEQ ID NO: 2062456 - RNA, 17 nt, Human
caccuucccagcucucc

SEQ ID NO: 2062457 - RNA, 19 nt, Human
caccuucccagcucucccu

SEQ ID NO: 2062458 - RNA, 21 nt, Human
caccuucccagcucucccucu

SEQ ID NO: 2062459 - RNA, 22 nt, Human
caccuucccagcucucccucug

SEQ ID NO: 2062460 - RNA, 13 nt, Human
caccuugacaggg

SEQ ID NO: 2062461 - RNA, 17 nt, Human
cacgacugcccggcagg

SEQ ID NO: 2062462 - RNA, 16 nt, Human
cacgacugcccggcag

SEQ ID NO: 2062463 - RNA, 14 nt, Human
cacgaacccaccug

SEQ ID NO: 2062464 - RNA, 16 nt, Human
cacgaacccaccugcu

SEQ ID NO: 2062465 - RNA, 18 nt, Human
cacgaacccaccugcuga

SEQ ID NO: 2062466 - RNA, 22 nt, Human
cacgaacccaccugcugagaga

SEQ ID NO: 2062467 - RNA, 12 nt, Human
caccuucccagc

SEQ ID NO: 2062468 - RNA, 13 nt, Human
caccuucccagcu

SEQ ID NO: 2062469 - RNA, 15 nt, Human
caccuucccagcucu

SEQ ID NO: 2062470 - RNA, 20 nt, Human
caccuucagaggcugaggug

SEQ ID NO: 2062471 - RNA, 19 nt, Human
caccuucaauuccugggcc

SEQ ID NO: 2062472 - RNA, 15 nt, Human
caccuuaucuuaaag

SEQ ID NO: 2062473 - RNA, 19 nt, Human
caccuuaucuuaaagcacu

SEQ ID NO: 2062474 - RNA, 17 nt, Human
caccuucaauuccuggg

SEQ ID NO: 2062475 - RNA, 18 nt, Human
caccuucaauuccugggc

SEQ ID NO: 2062476 - RNA, 15 nt, Human
caccuuauauuuacg

SEQ ID NO: 2062477 - RNA, 18 nt, Human
caccuuaggcagggaagu

SEQ ID NO: 2062478 - RNA, 13 nt, Human
caccuuaggcagg

SEQ ID NO: 2062479 - RNA, 14 nt, Human
caccuuaggcaggg

SEQ ID NO: 2062480 - RNA, 17 nt, Human
caccuuaggcagggaag

SEQ ID NO: 2062481 - RNA, 20 nt, Human
caccuguuuuuaagcuguuu

SEQ ID NO: 2062482 - RNA, 13 nt, Human
caccuuaaauuaa

SEQ ID NO: 2062483 - RNA, 14 nt, Human
caccuuaaauuaaa

SEQ ID NO: 2062484 - RNA, 15 nt, Human
caccuuaaauuaaac

SEQ ID NO: 2062485 - RNA, 16 nt, Human
caccuuaaauuaaaca

SEQ ID NO: 2062486 - RNA, 18 nt, Human
caccuuaaauuaaacaau

SEQ ID NO: 2062487 - RNA, 22 nt, Human
caccuuaaauuaaacaauuuau

SEQ ID NO: 2062488 - RNA, 19 nt, Human
caccuguuuuuaagcuguu

SEQ ID NO: 2062489 - RNA, 20 nt, Human
caccugugaguuuaaagcaa

SEQ ID NO: 2062490 - RNA, 19 nt, Human
caccugugaguuuaaagca

SEQ ID NO: 2062491 - RNA, 15 nt, Human
cacgggagauuucuu

SEQ ID NO: 2062492 - RNA, 20 nt, Human
cacggcucacugcagccuca

SEQ ID NO: 2062493 - RNA, 19 nt, Human
cacggcucacugcagccuc

SEQ ID NO: 2062494 - RNA, 17 nt, Human
cacggcucacugcagcc

SEQ ID NO: 2062495 - RNA, 16 nt, Human
cacggcucacugcagc

SEQ ID NO: 2062496 - RNA, 17 nt, Human
cacgcuggaccuugaac

SEQ ID NO: 2062497 - RNA, 20 nt, Human
cacgcuggaccuugaacugg

SEQ ID NO: 2062498 - RNA, 21 nt, Human
cacgcgugcacacaccagagc

SEQ ID NO: 2062499 - RNA, 16 nt, Human
cacgcgugcacacacc

SEQ ID NO: 2062500 - RNA, 15 nt, Human
cacgcgugcacacac

SEQ ID NO: 2062501 - RNA, 20 nt, Human
cacgccuguaaucccagcac

SEQ ID NO: 2062502 - RNA, 21 nt, Human
cacgccuguaaucccagcacu

SEQ ID NO: 2062503 - RNA, 12 nt, Human
cacgccugugca

SEQ ID NO: 2062504 - RNA, 23 nt, Human
cacgcgugcacacaccagagccc

SEQ ID NO: 2062505 - RNA, 22 nt, Human
cacgcuaaucccgauucacccu

SEQ ID NO: 2062506 - RNA, 20 nt, Human
cacgccuguaaucccagcag

SEQ ID NO: 2062507 - RNA, 21 nt, Human
cacgccuguaaucccagcagu

SEQ ID NO: 2062508 - RNA, 18 nt, Human
cacgccuguaaucccagc

SEQ ID NO: 2062509 - RNA, 19 nt, Human
cacgccuguaaucccagca

SEQ ID NO: 2062510 - RNA, 16 nt, Human
cacgccuguaauccca

SEQ ID NO: 2062511 - RNA, 14 nt, Human
cacgccuguaaucc

SEQ ID NO: 2062512 - RNA, 19 nt, Human
cacgccuguaauccuagca

SEQ ID NO: 2062513 - RNA, 20 nt, Human
cacgccuguaauccuagcac

SEQ ID NO: 2062514 - RNA, 18 nt, Human
cacgccuaugaucccagc

SEQ ID NO: 2062515 - RNA, 19 nt, Human
cacgccuaugaucccagca

SEQ ID NO: 2062516 - RNA, 21 nt, Human
cacgccuaugaucccagcacu

SEQ ID NO: 2062517 - RNA, 22 nt, Human
cacgccuaugaucccagcacuu

SEQ ID NO: 2062518 - RNA, 18 nt, Human
cacgugguaaaacacuug

SEQ ID NO: 2062519 - RNA, 13 nt, Human
cacguucaccccu

SEQ ID NO: 2062520 - RNA, 19 nt, Human
cacguuccuuacugcagaa

SEQ ID NO: 2062521 - RNA, 20 nt, Human
cacguuccuucccccgcaau

SEQ ID NO: 2062522 - RNA, 21 nt, Human
cacgugcagcagcaacacaau

SEQ ID NO: 2062523 - RNA, 11 nt, Human
cacguguguga

SEQ ID NO: 2062524 - RNA, 12 nt, Human
cacgugugugac

SEQ ID NO: 2062525 - RNA, 16 nt, Human
cacgugugugacucag

SEQ ID NO: 2062526 - RNA, 12 nt, Human
cacuaaagcagu

SEQ ID NO: 2062527 - RNA, 21 nt, Human
cacuaaagcaggccuuuugau

SEQ ID NO: 2062528 - RNA, 15 nt, Human
cacguucucucugcc

SEQ ID NO: 2062529 - RNA, 16 nt, Human
cacgucugacccucuc

SEQ ID NO: 2062530 - RNA, 17 nt, Human
cacgucugacccucucc

SEQ ID NO: 2062531 - RNA, 18 nt, Human
cacgucugacccucucca

SEQ ID NO: 2062532 - RNA, 14 nt, Human
cacgucugucuuca

SEQ ID NO: 2062533 - RNA, 15 nt, Human
cacgucugucuucac

SEQ ID NO: 2062534 - RNA, 18 nt, Human
cacgugacagugccuggg

SEQ ID NO: 2062535 - RNA, 13 nt, Human
cacgugccaggcc

SEQ ID NO: 2062536 - RNA, 14 nt, Human
cacgugccaggccc

SEQ ID NO: 2062537 - RNA, 15 nt, Human
cacgugccaggcccg

SEQ ID NO: 2062538 - RNA, 15 nt, Human
cacguggcuucugau

SEQ ID NO: 2062539 - RNA, 16 nt, Human
cacguggcuucugaug

SEQ ID NO: 2062540 - RNA, 21 nt, Human
cacguggcuucugaugaaucu

SEQ ID NO: 2062541 - RNA, 16 nt, Human
cacgugccaggcccgg

SEQ ID NO: 2062542 - RNA, 13 nt, Human
cacguggagagcu

SEQ ID NO: 2062543 - RNA, 15 nt, Human
cacguggagagcugg

SEQ ID NO: 2062544 - RNA, 23 nt, Human
cacguggagagcuggugcccgga

SEQ ID NO: 2062545 - RNA, 20 nt, Human
cacguggaggaaugcucccc

SEQ ID NO: 2062546 - RNA, 17 nt, Human
cacgucauguuucuuca

SEQ ID NO: 2062547 - RNA, 16 nt, Human
cacguacuuaaaugaa

SEQ ID NO: 2062548 - RNA, 23 nt, Human
cacguagcccccaggcugcugga

SEQ ID NO: 2062549 - RNA, 17 nt, Human
cacguaguagggucagg

SEQ ID NO: 2062550 - RNA, 19 nt, Human
cacguaguagggucaggcc

SEQ ID NO: 2062551 - RNA, 20 nt, Human
cacguaguagggucaggcca

SEQ ID NO: 2062552 - RNA, 21 nt, Human
cacguaguagggucaggccac

SEQ ID NO: 2062553 - RNA, 23 nt, Human
cacguaguagggucaggccacgg

SEQ ID NO: 2062554 - RNA, 14 nt, Human
cacguacacacaca

SEQ ID NO: 2062555 - RNA, 19 nt, Human
cacguacacacacauacac

SEQ ID NO: 2062556 - RNA, 18 nt, Human
cacguacacacacauaca

SEQ ID NO: 2062557 - RNA, 20 nt, Human
caccccucaacaccucugca

SEQ ID NO: 2062558 - RNA, 15 nt, Human
caccccuccccugcc

SEQ ID NO: 2062559 - RNA, 22 nt, Human
caccccuccccugcccuagagc

SEQ ID NO: 2062560 - RNA, 12 nt, Human
caccccuccuuc

SEQ ID NO: 2062561 - RNA, 14 nt, Human
caccccuccuuccu

SEQ ID NO: 2062562 - RNA, 23 nt, Human
caccccuccuuccuugaccagca

SEQ ID NO: 2062563 - RNA, 15 nt, Human
caccccugcccuggg

SEQ ID NO: 2062564 - RNA, 16 nt, Human
caccccugcccuggga

SEQ ID NO: 2062565 - RNA, 24 nt, Human
caccccugcccugggauguccaca

SEQ ID NO: 2062566 - RNA, 14 nt, Human
cacccgacuccuca

SEQ ID NO: 2062567 - RNA, 15 nt, Human
cacccgacuccucaa

SEQ ID NO: 2062568 - RNA, 16 nt, Human
cacccgacuccucaaa

SEQ ID NO: 2062569 - RNA, 12 nt, Human
cacccgaggcug

SEQ ID NO: 2062570 - RNA, 15 nt, Human
cacccgaggcugccc

SEQ ID NO: 2062571 - RNA, 16 nt, Human
cacccgaggcugccca

SEQ ID NO: 2062572 - RNA, 17 nt, Human
cacccgaggcugcccac

SEQ ID NO: 2062573 - RNA, 18 nt, Human
cacccgaggcugcccacu

SEQ ID NO: 2062574 - RNA, 14 nt, Human
caccccuuccccac

SEQ ID NO: 2062575 - RNA, 15 nt, Human
caccccuuccccacu

SEQ ID NO: 2062576 - RNA, 18 nt, Human
caccccuuccccacugcc

SEQ ID NO: 2062577 - RNA, 11 nt, Human
caccccuuccc

SEQ ID NO: 2062578 - RNA, 12 nt, Human
caccccuucccc

SEQ ID NO: 2062579 - RNA, 13 nt, Human
caccccuucccca

SEQ ID NO: 2062580 - RNA, 21 nt, Human
cacccggccccugcugguuca

SEQ ID NO: 2062581 - RNA, 18 nt, Human
cacccggccccugcuggu

SEQ ID NO: 2062582 - RNA, 17 nt, Human
cacccggccccugcugg

SEQ ID NO: 2062583 - RNA, 16 nt, Human
cacccggccccugcug

SEQ ID NO: 2062584 - RNA, 14 nt, Human
cacccggccccugc

SEQ ID NO: 2062585 - RNA, 13 nt, Human
cacccggccccug

SEQ ID NO: 2062586 - RNA, 12 nt, Human
cacccggccccu

SEQ ID NO: 2062587 - RNA, 16 nt, Human
cacccguggagauggg

SEQ ID NO: 2062588 - RNA, 17 nt, Human
cacccguggagauggga

SEQ ID NO: 2062589 - RNA, 20 nt, Human
cacccuaauguggcagcugu

SEQ ID NO: 2062590 - RNA, 16 nt, Human
cacccuagucccuucc

SEQ ID NO: 2062591 - RNA, 17 nt, Human
cacccuagucccuuccc

SEQ ID NO: 2062592 - RNA, 18 nt, Human
cacccuagucccuucccc

SEQ ID NO: 2062593 - RNA, 20 nt, Human
cacccuagucccuuccccuc

SEQ ID NO: 2062594 - RNA, 20 nt, Human
cacccucagaugcacaugag

SEQ ID NO: 2062595 - RNA, 22 nt, Human
cacccuuggaggcugucuucuc

SEQ ID NO: 2062596 - RNA, 21 nt, Human
cacccuuggccugucucaucc

SEQ ID NO: 2062597 - RNA, 23 nt, Human
cacccuuggccugucucaucccc

SEQ ID NO: 2062598 - RNA, 13 nt, Human
caccgagaauguu

SEQ ID NO: 2062599 - RNA, 18 nt, Human
caccgagaguagccgaga

SEQ ID NO: 2062600 - RNA, 17 nt, Human
cacccuuggaggcuguc

SEQ ID NO: 2062601 - RNA, 19 nt, Human
cacccuuggaggcugucuu

SEQ ID NO: 2062602 - RNA, 20 nt, Human
cacccuuggaggcugucuuc

SEQ ID NO: 2062603 - RNA, 21 nt, Human
cacccuuggaggcugucuucu

SEQ ID NO: 2062604 - RNA, 12 nt, Human
cacccuuggccu

SEQ ID NO: 2062605 - RNA, 13 nt, Human
cacccuuggccug

SEQ ID NO: 2062606 - RNA, 15 nt, Human
cacccuuggccuguc

SEQ ID NO: 2062607 - RNA, 18 nt, Human
cacccuuggccugucuca

SEQ ID NO: 2062608 - RNA, 13 nt, Human
cacccuuccccuc

SEQ ID NO: 2062609 - RNA, 14 nt, Human
cacccuuccccucc

SEQ ID NO: 2062610 - RNA, 22 nt, Human
cacccuuccccuccuucucccu

SEQ ID NO: 2062611 - RNA, 23 nt, Human
cacccuuccccuccuucucccuu

SEQ ID NO: 2062612 - RNA, 22 nt, Human
caccugcaccuccccccacugc

SEQ ID NO: 2062613 - RNA, 17 nt, Human
caccugcaccucccccc

SEQ ID NO: 2062614 - RNA, 19 nt, Human
caccugcaccuccccccac

SEQ ID NO: 2062615 - RNA, 11 nt, Human
caccugcaccu

SEQ ID NO: 2062616 - RNA, 13 nt, Human
caccugcaccucc

SEQ ID NO: 2062617 - RNA, 14 nt, Human
caccugcaccuccc

SEQ ID NO: 2062618 - RNA, 15 nt, Human
caccugcaccucccc

SEQ ID NO: 2062619 - RNA, 10 nt, Human
caccugagcu

SEQ ID NO: 2062620 - RNA, 14 nt, Human
caccugagcuuugg

SEQ ID NO: 2062621 - RNA, 16 nt, Human
caccugagcuuuggac

SEQ ID NO: 2062622 - RNA, 18 nt, Human
caccugagcuuuggacac

SEQ ID NO: 2062623 - RNA, 20 nt, Human
caccugagcuuuggacgcac

SEQ ID NO: 2062624 - RNA, 21 nt, Human
caccugagcccggaugcuucu

SEQ ID NO: 2062625 - RNA, 23 nt, Human
caccugagcccggaugcuucucc

SEQ ID NO: 2062626 - RNA, 18 nt, Human
caccugagguuaggaguu

SEQ ID NO: 2062627 - RNA, 14 nt, Human
caccugcaggucac

SEQ ID NO: 2062628 - RNA, 22 nt, Human
caccugcauccguaguucccug

SEQ ID NO: 2062629 - RNA, 22 nt, Human
caccugcuggccccucaccugg

SEQ ID NO: 2062630 - RNA, 22 nt, Human
caccuggaagcccucucuggcu

SEQ ID NO: 2062631 - RNA, 13 nt, Human
caccugcuggccc

SEQ ID NO: 2062632 - RNA, 14 nt, Human
caccugcuggcccc

SEQ ID NO: 2062633 - RNA, 15 nt, Human
caccugcuggccccu

SEQ ID NO: 2062634 - RNA, 16 nt, Human
caccugcuggccccuc

SEQ ID NO: 2062635 - RNA, 17 nt, Human
caccugcuggccccuca

SEQ ID NO: 2062636 - RNA, 18 nt, Human
caccugcuggccccucac

SEQ ID NO: 2062637 - RNA, 20 nt, Human
caccugcuggccccucaccu

SEQ ID NO: 2062638 - RNA, 17 nt, Human
caccugcugauguggca

SEQ ID NO: 2062639 - RNA, 13 nt, Human
caccugcugcugc

SEQ ID NO: 2062640 - RNA, 18 nt, Human
caccugcugagagaccca

SEQ ID NO: 2062641 - RNA, 19 nt, Human
caccugcugagagacccaa

SEQ ID NO: 2062642 - RNA, 22 nt, Human
caccugcugagagacccaagga

SEQ ID NO: 2062643 - RNA, 15 nt, Human
caccugaagacucau

SEQ ID NO: 2062644 - RNA, 14 nt, Human
caccugaagacuca

SEQ ID NO: 2062645 - RNA, 23 nt, Human
caccugaagacucauucuucugu

SEQ ID NO: 2062646 - RNA, 18 nt, Human
caccucuuaugcacaccu

SEQ ID NO: 2062647 - RNA, 13 nt, Human
caccucuggacug

SEQ ID NO: 2062648 - RNA, 17 nt, Human
caccucuggacuggcua

SEQ ID NO: 2062649 - RNA, 18 nt, Human
caccucuggacuggcuag

SEQ ID NO: 2062650 - RNA, 19 nt, Human
caccucuggacuggcuaga

SEQ ID NO: 2062651 - RNA, 18 nt, Human
caccucugcacaagcugc

SEQ ID NO: 2062652 - RNA, 19 nt, Human
caccucugcacaagcugca

SEQ ID NO: 2062653 - RNA, 14 nt, Human
caccucugccucaa

SEQ ID NO: 2062654 - RNA, 13 nt, Human
caccucugccuca

SEQ ID NO: 2062655 - RNA, 11 nt, Human
caccugggcac

SEQ ID NO: 2062656 - RNA, 13 nt, Human
caccuggcccugg

SEQ ID NO: 2062657 - RNA, 14 nt, Human
caccuggcccuggg

SEQ ID NO: 2062658 - RNA, 16 nt, Human
caccuggcccuggggc

SEQ ID NO: 2062659 - RNA, 17 nt, Human
caccuggcccuggggcc

SEQ ID NO: 2062660 - RNA, 19 nt, Human
caccuggcccuggggccug

SEQ ID NO: 2062661 - RNA, 20 nt, Human
caccuggccccaugucucuc

SEQ ID NO: 2062662 - RNA, 22 nt, Human
caccuggccccaugucucucag

SEQ ID NO: 2062663 - RNA, 11 nt, Human
caccuggcccc

SEQ ID NO: 2062664 - RNA, 14 nt, Human
caccuggccccaug

SEQ ID NO: 2062665 - RNA, 15 nt, Human
caccuggccccaugu

SEQ ID NO: 2062666 - RNA, 16 nt, Human
caccuggccccauguc

SEQ ID NO: 2062667 - RNA, 19 nt, Human
caccugucucagccuccca

SEQ ID NO: 2062668 - RNA, 15 nt, Human
caccugucgcccagu

SEQ ID NO: 2062669 - RNA, 17 nt, Human
caccugucgcccagugc

SEQ ID NO: 2062670 - RNA, 18 nt, Human
caccugucgcccagugcc

SEQ ID NO: 2062671 - RNA, 15 nt, Human
caccugucucagccu

SEQ ID NO: 2062672 - RNA, 17 nt, Human
caccugucucagccucc

SEQ ID NO: 2062673 - RNA, 18 nt, Human
caccugucucagccuccc

SEQ ID NO: 2062674 - RNA, 23 nt, Human
caccugucaaacaaagccagaag

SEQ ID NO: 2062675 - RNA, 13 nt, Human
caccugucccacc

SEQ ID NO: 2062676 - RNA, 14 nt, Human
caccugucccaccu

SEQ ID NO: 2062677 - RNA, 15 nt, Human
caccugucccaccuc

SEQ ID NO: 2062678 - RNA, 16 nt, Human
caccugucccaccuca

SEQ ID NO: 2062679 - RNA, 14 nt, Human
caccuguacuggag

SEQ ID NO: 2062680 - RNA, 15 nt, Human
caccuguacuggaga

SEQ ID NO: 2062681 - RNA, 16 nt, Human
caccuguacuggagag

SEQ ID NO: 2062682 - RNA, 17 nt, Human
caccuguacuggagagc

SEQ ID NO: 2062683 - RNA, 23 nt, Human
caccuguacucaggaggcugagg

SEQ ID NO: 2062684 - RNA, 11 nt, Human
caccuggcccu

SEQ ID NO: 2062685 - RNA, 15 nt, Human
caccuguacucagga

SEQ ID NO: 2062686 - RNA, 16 nt, Human
caccuguacucaggag

SEQ ID NO: 2062687 - RNA, 22 nt, Human
caccuguacucaggaggcugag

SEQ ID NO: 2062688 - RNA, 15 nt, Human
caccuguagucccag

SEQ ID NO: 2062689 - RNA, 16 nt, Human
caccuguagucccagc

SEQ ID NO: 2062690 - RNA, 18 nt, Human
caccuguagucccagcua

SEQ ID NO: 2062691 - RNA, 20 nt, Human
caccuguagucccagcuacu

SEQ ID NO: 2062692 - RNA, 19 nt, Human
caccuguagucccagcuac

SEQ ID NO: 2062693 - RNA, 13 nt, Human
caccugucaaaca

SEQ ID NO: 2062694 - RNA, 20 nt, Human
caccugucaaacaaagccag

SEQ ID NO: 2062695 - RNA, 21 nt, Human
caccugucaaacaaagccaga

SEQ ID NO: 2062696 - RNA, 23 nt, Human
caccuggggcagucaccugccca

SEQ ID NO: 2062697 - RNA, 10 nt, Human
caccuggggu

SEQ ID NO: 2062698 - RNA, 18 nt, Human
caccuggggugugggagg

SEQ ID NO: 2062699 - RNA, 22 nt, Human
caccuggggugugggaggcccg

SEQ ID NO: 2062700 - RNA, 14 nt, Human
caccuggggagugg

SEQ ID NO: 2062701 - RNA, 15 nt, Human
caccuggggaguggg

SEQ ID NO: 2062702 - RNA, 17 nt, Human
caccuggggagugggac

SEQ ID NO: 2062703 - RNA, 22 nt, Human
caccuggggagugggacagagu

SEQ ID NO: 2062704 - RNA, 14 nt, Human
caccuggggcaguc

SEQ ID NO: 2062705 - RNA, 15 nt, Human
caccuggggcaguca

SEQ ID NO: 2062706 - RNA, 19 nt, Human
caccuggggcagucaccug

SEQ ID NO: 2062707 - RNA, 20 nt, Human
caccuggggcagucaccugc

SEQ ID NO: 2062708 - RNA, 12 nt, Human
caccugggcacc

SEQ ID NO: 2062709 - RNA, 15 nt, Human
caccugggcaccugg

SEQ ID NO: 2062710 - RNA, 19 nt, Human
caccugggcaccuggggag

SEQ ID NO: 2062711 - RNA, 21 nt, Human
caccuguaaucccagcuacuu

SEQ ID NO: 2062712 - RNA, 18 nt, Human
caccuguaaucccagcac

SEQ ID NO: 2062713 - RNA, 16 nt, Human
caccuguaaucccagc

SEQ ID NO: 2062714 - RNA, 13 nt, Human
caccuguaaaacu

SEQ ID NO: 2062715 - RNA, 15 nt, Human
caccuguaaaacuuu

SEQ ID NO: 2062716 - RNA, 17 nt, Human
caccuguaaaacuuuau

SEQ ID NO: 2062717 - RNA, 23 nt, Human
caccuguaaaacuuuauuuuaua

SEQ ID NO: 2062718 - RNA, 20 nt, Human
caccuggggugugggaggcc

SEQ ID NO: 2062719 - RNA, 15 nt, Human
caccugguggccucu

SEQ ID NO: 2062720 - RNA, 17 nt, Human
caccugguggccucugc

SEQ ID NO: 2062721 - RNA, 16 nt, Human
caccugguuccggaau

SEQ ID NO: 2062722 - RNA, 20 nt, Human
caccugguuccggaauccug

SEQ ID NO: 2062723 - RNA, 21 nt, Human
caccugguuccggaauccugu

SEQ ID NO: 2062724 - RNA, 23 nt, Human
caccugguuccggaauccugucc

SEQ ID NO: 2062725 - RNA, 13 nt, Human
caccgggccugga

SEQ ID NO: 2062726 - RNA, 18 nt, Human
caccgggccacagagaaa

SEQ ID NO: 2062727 - RNA, 15 nt, Human
caccgggccacagag

SEQ ID NO: 2062728 - RNA, 22 nt, Human
caccgggcacucagaagacacu

SEQ ID NO: 2062729 - RNA, 15 nt, Human
caccgggcacucaga

SEQ ID NO: 2062730 - RNA, 15 nt, Human
caccguggcuaagag

SEQ ID NO: 2062731 - RNA, 15 nt, Human
caccgguugcuucug

SEQ ID NO: 2062732 - RNA, 17 nt, Human
caccgguugcuucuggg

SEQ ID NO: 2062733 - RNA, 18 nt, Human
caccgguugcuucuggga

SEQ ID NO: 2062734 - RNA, 19 nt, Human
caccgguugcuucugggaa

SEQ ID NO: 2062735 - RNA, 21 nt, Human
caccgguugcuucugggaagg

SEQ ID NO: 2062736 - RNA, 19 nt, Human
caccguaaagugagcaugc

SEQ ID NO: 2062737 - RNA, 20 nt, Human
caccguaaagugagcaugcu

SEQ ID NO: 2062738 - RNA, 11 nt, Human
caccucaguuc

SEQ ID NO: 2062739 - RNA, 17 nt, Human
caccucaguucccuugg

SEQ ID NO: 2062740 - RNA, 18 nt, Human
caccucaguucccuuggc

SEQ ID NO: 2062741 - RNA, 19 nt, Human
caccucaguucccuuggcc

SEQ ID NO: 2062742 - RNA, 20 nt, Human
caccucaguucccuuggccu

SEQ ID NO: 2062743 - RNA, 21 nt, Human
caccucaguucccuuggccuc

SEQ ID NO: 2062744 - RNA, 22 nt, Human
caccucaguucccuuggccuca

SEQ ID NO: 2062745 - RNA, 23 nt, Human
caccucaguucccuuggccucag

SEQ ID NO: 2062746 - RNA, 15 nt, Human
caccggauccugggu

SEQ ID NO: 2062747 - RNA, 21 nt, Human
caccggauccuggguggucug

SEQ ID NO: 2062748 - RNA, 22 nt, Human
caccggauccuggguggucugc

SEQ ID NO: 2062749 - RNA, 14 nt, Human
caccgggcacucag

SEQ ID NO: 2062750 - RNA, 21 nt, Human
caccgagaguagccgagagcc

SEQ ID NO: 2062751 - RNA, 13 nt, Human
caccgcuccccag

SEQ ID NO: 2062752 - RNA, 18 nt, Human
caccgccggccagcuggg

SEQ ID NO: 2062753 - RNA, 19 nt, Human
caccgccggccagcuggga

SEQ ID NO: 2062754 - RNA, 22 nt, Human
caccggagcuuucaaagaagga

SEQ ID NO: 2062755 - RNA, 22 nt, Human
caccgcugccuaaguggcugcu

SEQ ID NO: 2062756 - RNA, 19 nt, Human
caccgcugccuaaguggcu

SEQ ID NO: 2062757 - RNA, 14 nt, Human
caccgcuccccagc

SEQ ID NO: 2062758 - RNA, 16 nt, Human
caccgcuccccagccc

SEQ ID NO: 2062759 - RNA, 17 nt, Human
caccgcuccccagccca

SEQ ID NO: 2062760 - RNA, 18 nt, Human
caccgcuccccagcccag

SEQ ID NO: 2062761 - RNA, 20 nt, Human
caccgcuccccagcccaggg

SEQ ID NO: 2062762 - RNA, 21 nt, Human
caccgcuccccagcccagggu

SEQ ID NO: 2062763 - RNA, 12 nt, Human
caccgcugccua

SEQ ID NO: 2062764 - RNA, 13 nt, Human
caccgcugccuaa

SEQ ID NO: 2062765 - RNA, 14 nt, Human
caccuccccccacu

SEQ ID NO: 2062766 - RNA, 15 nt, Human
caccuccccccacug

SEQ ID NO: 2062767 - RNA, 16 nt, Human
caccuccccccacugc

SEQ ID NO: 2062768 - RNA, 17 nt, Human
caccuccccccacugca

SEQ ID NO: 2062769 - RNA, 18 nt, Human
caccuccccccacugcag

SEQ ID NO: 2062770 - RNA, 21 nt, Human
caccuccccccacugcaggcc

SEQ ID NO: 2062771 - RNA, 22 nt, Human
caccuccccccacugcaggccc

SEQ ID NO: 2062772 - RNA, 23 nt, Human
caccuccccccacugcaggcccc

SEQ ID NO: 2062773 - RNA, 13 nt, Human
caccuccccuauc

SEQ ID NO: 2062774 - RNA, 14 nt, Human
caccuccccuaucc

SEQ ID NO: 2062775 - RNA, 18 nt, Human
caccuccccuauccaccc

SEQ ID NO: 2062776 - RNA, 14 nt, Human
caccuccccagccu

SEQ ID NO: 2062777 - RNA, 21 nt, Human
caccuccccaggccguggcug

SEQ ID NO: 2062778 - RNA, 14 nt, Human
caccuccccaggcc

SEQ ID NO: 2062779 - RNA, 15 nt, Human
caccuccccaggccg

SEQ ID NO: 2062780 - RNA, 15 nt, Human
caccuccccuccuug

SEQ ID NO: 2062781 - RNA, 23 nt, Human
caccuccccuccuugccuccugu

SEQ ID NO: 2062782 - RNA, 19 nt, Human
caccuccccuauccaccca

SEQ ID NO: 2062783 - RNA, 20 nt, Human
caccuccccuauccacccag

SEQ ID NO: 2062784 - RNA, 11 nt, Human
caccuccccuc

SEQ ID NO: 2062785 - RNA, 14 nt, Human
caccuccccuccuu

SEQ ID NO: 2062786 - RNA, 13 nt, Human
caccucccagccc

SEQ ID NO: 2062787 - RNA, 14 nt, Human
caccucccagcccc

SEQ ID NO: 2062788 - RNA, 15 nt, Human
caccucccagccccu

SEQ ID NO: 2062789 - RNA, 16 nt, Human
caccucccagccccug

SEQ ID NO: 2062790 - RNA, 18 nt, Human
caccucccagccccugcc

SEQ ID NO: 2062791 - RNA, 13 nt, Human
caccucccauccu

SEQ ID NO: 2062792 - RNA, 16 nt, Human
caccucccauccuaau

SEQ ID NO: 2062793 - RNA, 11 nt, Human
caccuccugcc

SEQ ID NO: 2062794 - RNA, 13 nt, Human
caccuccugccuc

SEQ ID NO: 2062795 - RNA, 14 nt, Human
caccuccugccucg

SEQ ID NO: 2062796 - RNA, 19 nt, Human
caccucccugaaccauccc

SEQ ID NO: 2062797 - RNA, 21 nt, Human
caccucguuagggaagagaaa

SEQ ID NO: 2062798 - RNA, 15 nt, Human
cacucaagccaagca

SEQ ID NO: 2062799 - RNA, 23 nt, Human
cagagucucgcucuguugcccag

SEQ ID NO: 2062800 - RNA, 23 nt, Human
cagagucggaacggagaaaggug

SEQ ID NO: 2062801 - RNA, 15 nt, Human
cagagucggaacgga

SEQ ID NO: 2062802 - RNA, 18 nt, Human
cagagucggaacggagaa

SEQ ID NO: 2062803 - RNA, 23 nt, Human
cagagucucacuguugcccaggc

SEQ ID NO: 2062804 - RNA, 22 nt, Human
cagagucucacuguugcccagg

SEQ ID NO: 2062805 - RNA, 18 nt, Human
cagagugagacucugucu

SEQ ID NO: 2062806 - RNA, 17 nt, Human
cagagugagacucuguc

SEQ ID NO: 2062807 - RNA, 16 nt, Human
cagagugagacucugu

SEQ ID NO: 2062808 - RNA, 15 nt, Human
cagagugagacccug

SEQ ID NO: 2062809 - RNA, 19 nt, Human
cagagugagacccugucuc

SEQ ID NO: 2062810 - RNA, 20 nt, Human
cagagugagacucugucuca

SEQ ID NO: 2062811 - RNA, 19 nt, Human
cagagugagacucugucuc

SEQ ID NO: 2062812 - RNA, 20 nt, Human
cagagugagacccugucucu

SEQ ID NO: 2062813 - RNA, 12 nt, Human
cagagugcccca

SEQ ID NO: 2062814 - RNA, 14 nt, Human
cagagugccccacc

SEQ ID NO: 2062815 - RNA, 15 nt, Human
cagagugccccaccu

SEQ ID NO: 2062816 - RNA, 16 nt, Human
cagagugccccaccug

SEQ ID NO: 2062817 - RNA, 17 nt, Human
cagagugccccaccugc

SEQ ID NO: 2062818 - RNA, 18 nt, Human
cagagugccccaccugcc

SEQ ID NO: 2062819 - RNA, 19 nt, Human
cagagugccccaccugcca

SEQ ID NO: 2062820 - RNA, 20 nt, Human
cagagugccccaccugccac

SEQ ID NO: 2062821 - RNA, 21 nt, Human
cagagugccccaccugccacu

SEQ ID NO: 2062822 - RNA, 23 nt, Human
cagagugccccaccugccacuag

SEQ ID NO: 2062823 - RNA, 15 nt, Human
cagagugcccagaac

SEQ ID NO: 2062824 - RNA, 13 nt, Human
cagagugcccaga

SEQ ID NO: 2062825 - RNA, 14 nt, Human
cagagugcccagaa

SEQ ID NO: 2062826 - RNA, 12 nt, Human
cagaguggccug

SEQ ID NO: 2062827 - RNA, 13 nt, Human
cagaguggccugg

SEQ ID NO: 2062828 - RNA, 15 nt, Human
cagaguggccuggcc

SEQ ID NO: 2062829 - RNA, 16 nt, Human
cagaguggccuggcca

SEQ ID NO: 2062830 - RNA, 17 nt, Human
cagaguggccuggccag

SEQ ID NO: 2062831 - RNA, 18 nt, Human
cagaguggccuggccagg

SEQ ID NO: 2062832 - RNA, 21 nt, Human
cagaguggccuggccaggagc

SEQ ID NO: 2062833 - RNA, 22 nt, Human
cagaguggccuggccaggagcu

SEQ ID NO: 2062834 - RNA, 23 nt, Human
cagaguggccuggccaggagcuc

SEQ ID NO: 2062835 - RNA, 15 nt, Human
cagaguggucuuucu

SEQ ID NO: 2062836 - RNA, 23 nt, Human
cagagggagugacagaggcagcc

SEQ ID NO: 2062837 - RNA, 22 nt, Human
cagagggagugacagaggcagc

SEQ ID NO: 2062838 - RNA, 21 nt, Human
cagagggagugacagaggcag

SEQ ID NO: 2062839 - RNA, 20 nt, Human
cagagggagugacagaggca

SEQ ID NO: 2062840 - RNA, 19 nt, Human
cagagggacuuuguauaga

SEQ ID NO: 2062841 - RNA, 22 nt, Human
cagagggaggaaucgaggaacc

SEQ ID NO: 2062842 - RNA, 23 nt, Human
cagagggaggaaucgaggaacca

SEQ ID NO: 2062843 - RNA, 16 nt, Human
cagagggcagaggcug

SEQ ID NO: 2062844 - RNA, 17 nt, Human
cagagggcagaggcugg

SEQ ID NO: 2062845 - RNA, 18 nt, Human
cagagggcagaggcugga

SEQ ID NO: 2062846 - RNA, 13 nt, Human
cagagggcccagg

SEQ ID NO: 2062847 - RNA, 15 nt, Human
cagagggcccaggca

SEQ ID NO: 2062848 - RNA, 16 nt, Human
cagagggcccaggcag

SEQ ID NO: 2062849 - RNA, 18 nt, Human
cagagggcccaggcaggc

SEQ ID NO: 2062850 - RNA, 21 nt, Human
cagagucucacuguugcccag

SEQ ID NO: 2062851 - RNA, 20 nt, Human
cagagucucacuguugccca

SEQ ID NO: 2062852 - RNA, 19 nt, Human
cagagucucacuguugccc

SEQ ID NO: 2062853 - RNA, 17 nt, Human
cagagucucacuguugc

SEQ ID NO: 2062854 - RNA, 14 nt, Human
cagaguccaggccc

SEQ ID NO: 2062855 - RNA, 15 nt, Human
cagaguccaggcccc

SEQ ID NO: 2062856 - RNA, 16 nt, Human
cagaguccaggcccca

SEQ ID NO: 2062857 - RNA, 22 nt, Human
cagagggcccaggcaggccacc

SEQ ID NO: 2062858 - RNA, 15 nt, Human
cagagucagcagaac

SEQ ID NO: 2062859 - RNA, 13 nt, Human
cagagucucacug

SEQ ID NO: 2062860 - RNA, 22 nt, Human
cagaggcagccccauucugccu

SEQ ID NO: 2062861 - RNA, 20 nt, Human
cagaggcagccccauucugc

SEQ ID NO: 2062862 - RNA, 19 nt, Human
cagaggcagccccauucug

SEQ ID NO: 2062863 - RNA, 18 nt, Human
cagaggcagccccauucu

SEQ ID NO: 2062864 - RNA, 15 nt, Human
cagaggcagccccau

SEQ ID NO: 2062865 - RNA, 14 nt, Human
cagaggcagcccca

SEQ ID NO: 2062866 - RNA, 13 nt, Human
cagaggcagcccc

SEQ ID NO: 2062867 - RNA, 12 nt, Human
cagaggcagccc

SEQ ID NO: 2062868 - RNA, 14 nt, Human
cagaggccauggca

SEQ ID NO: 2062869 - RNA, 21 nt, Human
cagaggccaugggccuccugu

SEQ ID NO: 2062870 - RNA, 20 nt, Human
cagaggccaugggccuccug

SEQ ID NO: 2062871 - RNA, 16 nt, Human
cagaggccaugggccu

SEQ ID NO: 2062872 - RNA, 19 nt, Human
cagaggccaugggccuccu

SEQ ID NO: 2062873 - RNA, 23 nt, Human
cagaggcagccccauucugccug

SEQ ID NO: 2062874 - RNA, 16 nt, Human
cagaggcacagccggg

SEQ ID NO: 2062875 - RNA, 21 nt, Human
cagaggcacagccggggccug

SEQ ID NO: 2062876 - RNA, 13 nt, Human
cagaggcagaacc

SEQ ID NO: 2062877 - RNA, 17 nt, Human
cagaggcagaacccugg

SEQ ID NO: 2062878 - RNA, 18 nt, Human
cagaggcagaacccuggu

SEQ ID NO: 2062879 - RNA, 19 nt, Human
cagagggagugacagaggc

SEQ ID NO: 2062880 - RNA, 18 nt, Human
cagagggagugacagagg

SEQ ID NO: 2062881 - RNA, 16 nt, Human
cagagggagugacaga

SEQ ID NO: 2062882 - RNA, 14 nt, Human
cagagggagugaca

SEQ ID NO: 2062883 - RNA, 23 nt, Human
cagaggcugccucucccaucacu

SEQ ID NO: 2062884 - RNA, 13 nt, Human
cagaggcuggagg

SEQ ID NO: 2062885 - RNA, 13 nt, Human
cagaggcugaggu

SEQ ID NO: 2062886 - RNA, 14 nt, Human
cagaggcuggaggc

SEQ ID NO: 2062887 - RNA, 16 nt, Human
cagaggcuggaggcag

SEQ ID NO: 2062888 - RNA, 17 nt, Human
cagaggcuggaggcagg

SEQ ID NO: 2062889 - RNA, 18 nt, Human
cagaggcuggaggcaggg

SEQ ID NO: 2062890 - RNA, 19 nt, Human
cagaggcuggaggcagggc

SEQ ID NO: 2062891 - RNA, 20 nt, Human
cagaggcuggaggcagggcc

SEQ ID NO: 2062892 - RNA, 14 nt, Human
cagaggcuggccuc

SEQ ID NO: 2062893 - RNA, 15 nt, Human
cagaggcuggccuca

SEQ ID NO: 2062894 - RNA, 16 nt, Human
cagaggcuggccucag

SEQ ID NO: 2062895 - RNA, 17 nt, Human
cagaggcuggccucaga

SEQ ID NO: 2062896 - RNA, 21 nt, Human
cagaggcuggaggcagggccu

SEQ ID NO: 2062897 - RNA, 15 nt, Human
cagaggcuucuucag

SEQ ID NO: 2062898 - RNA, 16 nt, Human
cagaggcuucuucaga

SEQ ID NO: 2062899 - RNA, 20 nt, Human
cagaggcuucuucagaucag

SEQ ID NO: 2062900 - RNA, 23 nt, Human
cagagggaaaguaaauauuucag

SEQ ID NO: 2062901 - RNA, 19 nt, Human
cagagggaagaaaagagcu

SEQ ID NO: 2062902 - RNA, 13 nt, Human
cagaggcugccuc

SEQ ID NO: 2062903 - RNA, 20 nt, Human
cagaggccuagucagccaca

SEQ ID NO: 2062904 - RNA, 23 nt, Human
cagaggccuagucagccacaugg

SEQ ID NO: 2062905 - RNA, 16 nt, Human
cagaugcaccagcccu

SEQ ID NO: 2062906 - RNA, 14 nt, Human
cagaugcaccagcc

SEQ ID NO: 2062907 - RNA, 13 nt, Human
cagaugcaccagc

SEQ ID NO: 2062908 - RNA, 15 nt, Human
cagaugcaaugugcu

SEQ ID NO: 2062909 - RNA, 21 nt, Human
cagaugcaaugugcuacugau

SEQ ID NO: 2062910 - RNA, 17 nt, Human
cagaugcacaugagcug

SEQ ID NO: 2062911 - RNA, 22 nt, Human
cagaugcaccagcccuuagcag

SEQ ID NO: 2062912 - RNA, 17 nt, Human
cagaugcaccagcccuu

SEQ ID NO: 2062913 - RNA, 13 nt, Human
cagaugaccccuc

SEQ ID NO: 2062914 - RNA, 14 nt, Human
cagaugaccccucc

SEQ ID NO: 2062915 - RNA, 18 nt, Human
cagaugaccccuccccua

SEQ ID NO: 2062916 - RNA, 14 nt, Human
cagaugacuagaaa

SEQ ID NO: 2062917 - RNA, 16 nt, Human
cagaugagcagaagcu

SEQ ID NO: 2062918 - RNA, 20 nt, Human
cagaugagcagaagcucucg

SEQ ID NO: 2062919 - RNA, 16 nt, Human
cagaugcaaagaggca

SEQ ID NO: 2062920 - RNA, 14 nt, Human
cagaugauccauga

SEQ ID NO: 2062921 - RNA, 17 nt, Human
cagaugcaaagaggcaa

SEQ ID NO: 2062922 - RNA, 18 nt, Human
cagaugcaaagaggcaag

SEQ ID NO: 2062923 - RNA, 23 nt, Human
cagaugcaaagaggcaagaggcu

SEQ ID NO: 2062924 - RNA, 22 nt, Human
cagaugaacucuuucuggccug

SEQ ID NO: 2062925 - RNA, 23 nt, Human
cagaugaacucuuucuggccugc

SEQ ID NO: 2062926 - RNA, 18 nt, Human
cagaucugugccccaugc

SEQ ID NO: 2062927 - RNA, 20 nt, Human
cagaucugugccccaugccu

SEQ ID NO: 2062928 - RNA, 21 nt, Human
cagaucugugccccaugccug

SEQ ID NO: 2062929 - RNA, 23 nt, Human
cagaucugugccccaugccuguc

SEQ ID NO: 2062930 - RNA, 22 nt, Human
cagauacaggaaaagcugcuga

SEQ ID NO: 2062931 - RNA, 21 nt, Human
cagauacaggaaaagcugcug

SEQ ID NO: 2062932 - RNA, 20 nt, Human
cagauacaggaaaagcugcu

SEQ ID NO: 2062933 - RNA, 14 nt, Human
cagaucuccaaagc

SEQ ID NO: 2062934 - RNA, 16 nt, Human
cagaucuccaaagcuu

SEQ ID NO: 2062935 - RNA, 13 nt, Human
cagaucugcaccg

SEQ ID NO: 2062936 - RNA, 15 nt, Human
cagaucugcaccgcc

SEQ ID NO: 2062937 - RNA, 17 nt, Human
cagaucuggucccuugc

SEQ ID NO: 2062938 - RNA, 18 nt, Human
cagaucuggucccuugca

SEQ ID NO: 2062939 - RNA, 23 nt, Human
cagaucuguauauuuuuuucuaa

SEQ ID NO: 2062940 - RNA, 12 nt, Human
cagaucugugcc

SEQ ID NO: 2062941 - RNA, 13 nt, Human
cagaucugugccc

SEQ ID NO: 2062942 - RNA, 14 nt, Human
cagaucugugcccc

SEQ ID NO: 2062943 - RNA, 15 nt, Human
cagaucugugcccca

SEQ ID NO: 2062944 - RNA, 20 nt, Human
cagauaagcaagagagaugu

SEQ ID NO: 2062945 - RNA, 22 nt, Human
cagauaagcaagagagauguuu

SEQ ID NO: 2062946 - RNA, 19 nt, Human
cagauaagaaugcugguuu

SEQ ID NO: 2062947 - RNA, 21 nt, Human
cagauaagaaugcugguuuuc

SEQ ID NO: 2062948 - RNA, 15 nt, Human
cagauaaucccugua

SEQ ID NO: 2062949 - RNA, 19 nt, Human
cagauaaucagccucuuaa

SEQ ID NO: 2062950 - RNA, 15 nt, Human
cagauaaucagccuc

SEQ ID NO: 2062951 - RNA, 16 nt, Human
cagauaaucagccucu

SEQ ID NO: 2062952 - RNA, 17 nt, Human
cagauaaucagccucuu

SEQ ID NO: 2062953 - RNA, 18 nt, Human
cagauaaucagccucuua

SEQ ID NO: 2062954 - RNA, 23 nt, Human
cagaguuuagaggaaaaaaauga

SEQ ID NO: 2062955 - RNA, 23 nt, Human
cagaguugugcacauggcuuagu

SEQ ID NO: 2062956 - RNA, 12 nt, Human
cagaguucacua

SEQ ID NO: 2062957 - RNA, 14 nt, Human
cagaguucacuaua

SEQ ID NO: 2062958 - RNA, 20 nt, Human
cagaguucacuauaaauggu

SEQ ID NO: 2062959 - RNA, 22 nt, Human
cagaguggucuuucuggagagg

SEQ ID NO: 2062960 - RNA, 21 nt, Human
cagaguggucuuucuggagag

SEQ ID NO: 2062961 - RNA, 23 nt, Human
cagaguguggccuucggacaacu

SEQ ID NO: 2062962 - RNA, 19 nt, Human
cagagugugggaagggaga

SEQ ID NO: 2062963 - RNA, 20 nt, Human
cagagugugggaagggagag

SEQ ID NO: 2062964 - RNA, 11 nt, Human
cagaggcagcc

SEQ ID NO: 2062965 - RNA, 22 nt, Human
cagaggacaccuguacuggaga

SEQ ID NO: 2062966 - RNA, 23 nt, Human
cagaggacaccuguacuggagag

SEQ ID NO: 2062967 - RNA, 16 nt, Human
cagaggaagagcaggc

SEQ ID NO: 2062968 - RNA, 13 nt, Human
cagagccugcagu

SEQ ID NO: 2062969 - RNA, 13 nt, Human
cagaggaaggaga

SEQ ID NO: 2062970 - RNA, 14 nt, Human
cagaggaagagcag

SEQ ID NO: 2062971 - RNA, 15 nt, Human
cagaggaagagcagg

SEQ ID NO: 2062972 - RNA, 12 nt, Human
cagaggaagagc

SEQ ID NO: 2062973 - RNA, 20 nt, Human
cagagccccacccucagaug

SEQ ID NO: 2062974 - RNA, 20 nt, Human
cagagccuccuuucuggcuu

SEQ ID NO: 2062975 - RNA, 12 nt, Human
cagagccugcag

SEQ ID NO: 2062976 - RNA, 13 nt, Human
cagagccccacac

SEQ ID NO: 2062977 - RNA, 16 nt, Human
cagagccccacacgga

SEQ ID NO: 2062978 - RNA, 23 nt, Human
cagagccccacacggaggcaucu

SEQ ID NO: 2062979 - RNA, 20 nt, Human
cagagccccacacggaggca

SEQ ID NO: 2062980 - RNA, 20 nt, Human
cagagcccaccuuggcucaa

SEQ ID NO: 2062981 - RNA, 19 nt, Human
cagagcccaccuuggcuca

SEQ ID NO: 2062982 - RNA, 17 nt, Human
cagagcccaccuuggcu

SEQ ID NO: 2062983 - RNA, 15 nt, Human
cagagcccaccuugg

SEQ ID NO: 2062984 - RNA, 11 nt, Human
cagagccaugg

SEQ ID NO: 2062985 - RNA, 14 nt, Human
cagagccauggacu

SEQ ID NO: 2062986 - RNA, 22 nt, Human
cagagccaccccuaaagagaua

SEQ ID NO: 2062987 - RNA, 14 nt, Human
cagagcaggggcag

SEQ ID NO: 2062988 - RNA, 15 nt, Human
cagagcaggggcagg

SEQ ID NO: 2062989 - RNA, 13 nt, Human
cagagcacuguau

SEQ ID NO: 2062990 - RNA, 16 nt, Human
cagagcacuguauacc

SEQ ID NO: 2062991 - RNA, 13 nt, Human
cagagacaccugc

SEQ ID NO: 2062992 - RNA, 14 nt, Human
cagagacaccugca

SEQ ID NO: 2062993 - RNA, 15 nt, Human
cagagacaccugcac

SEQ ID NO: 2062994 - RNA, 16 nt, Human
cagagacaccugcacc

SEQ ID NO: 2062995 - RNA, 17 nt, Human
cagagacaccugcaccu

SEQ ID NO: 2062996 - RNA, 18 nt, Human
cagagacaccugcaccuc

SEQ ID NO: 2062997 - RNA, 20 nt, Human
cagagacaccugcaccuccc

SEQ ID NO: 2062998 - RNA, 22 nt, Human
cagagacaccugcaccuccccc

SEQ ID NO: 2062999 - RNA, 14 nt, Human
cagagacagagagg

SEQ ID NO: 2063000 - RNA, 16 nt, Human
cagagacagagaggac

SEQ ID NO: 2063001 - RNA, 23 nt, Human
cagagacaggcccaagagaugaa

SEQ ID NO: 2063002 - RNA, 22 nt, Human
cagagacaggaagucuucaggg

SEQ ID NO: 2063003 - RNA, 14 nt, Human
cagagacaggccca

SEQ ID NO: 2063004 - RNA, 19 nt, Human
cagagacaggcccaagaga

SEQ ID NO: 2063005 - RNA, 13 nt, Human
cagagacaggaaa

SEQ ID NO: 2063006 - RNA, 14 nt, Human
cagagacaggaaaa

SEQ ID NO: 2063007 - RNA, 15 nt, Human
cagagacaggaaaau

SEQ ID NO: 2063008 - RNA, 21 nt, Human
cagagacaggaaaauccucug

SEQ ID NO: 2063009 - RNA, 22 nt, Human
cagagacaggaaaauccucugg

SEQ ID NO: 2063010 - RNA, 23 nt, Human
cagagacaggaaaauccucuggc

SEQ ID NO: 2063011 - RNA, 17 nt, Human
cagagaacuaguggugg

SEQ ID NO: 2063012 - RNA, 20 nt, Human
cagagaagccaaaagauugg

SEQ ID NO: 2063013 - RNA, 21 nt, Human
cagagaaugaaagggcccaga

SEQ ID NO: 2063014 - RNA, 20 nt, Human
cagagaaugaaagggcccag

SEQ ID NO: 2063015 - RNA, 11 nt, Human
cagagaaguuc

SEQ ID NO: 2063016 - RNA, 19 nt, Human
cagagaaucauacuuagca

SEQ ID NO: 2063017 - RNA, 21 nt, Human
cagagaauugcugauucuuga

SEQ ID NO: 2063018 - RNA, 15 nt, Human
cagagaauucucuua

SEQ ID NO: 2063019 - RNA, 19 nt, Human
cagagaaugaaagggccca

SEQ ID NO: 2063020 - RNA, 20 nt, Human
cagagaaggcaggaaugugu

SEQ ID NO: 2063021 - RNA, 18 nt, Human
cagagaaggccaggggcu

SEQ ID NO: 2063022 - RNA, 14 nt, Human
cagagaaggaaugu

SEQ ID NO: 2063023 - RNA, 15 nt, Human
cagagaaggcagcag

SEQ ID NO: 2063024 - RNA, 16 nt, Human
cagagaaggcagcagg

SEQ ID NO: 2063025 - RNA, 13 nt, Human
cagagaaggcagg

SEQ ID NO: 2063026 - RNA, 14 nt, Human
cagagaaggcagga

SEQ ID NO: 2063027 - RNA, 17 nt, Human
cagagaaggcaggaaug

SEQ ID NO: 2063028 - RNA, 14 nt, Human
cagagaguggcucc

SEQ ID NO: 2063029 - RNA, 13 nt, Human
cagagaguggcuc

SEQ ID NO: 2063030 - RNA, 18 nt, Human
cagagaguggcuccuccc

SEQ ID NO: 2063031 - RNA, 15 nt, Human
cagagaguggcuccu

SEQ ID NO: 2063032 - RNA, 16 nt, Human
cagagauaaagaccuu

SEQ ID NO: 2063033 - RNA, 15 nt, Human
cagagauaggccugu

SEQ ID NO: 2063034 - RNA, 23 nt, Human
cagagaugggacugggagggccc

SEQ ID NO: 2063035 - RNA, 19 nt, Human
cagagaugggacugggagg

SEQ ID NO: 2063036 - RNA, 22 nt, Human
cagagaugggacugggagggcc

SEQ ID NO: 2063037 - RNA, 21 nt, Human
cagagauggagguucucucgg

SEQ ID NO: 2063038 - RNA, 23 nt, Human
cagagauggagguucucucggag

SEQ ID NO: 2063039 - RNA, 15 nt, Human
cagagaugggacugg

SEQ ID NO: 2063040 - RNA, 18 nt, Human
cagagaugggacugggag

SEQ ID NO: 2063041 - RNA, 13 nt, Human
cagagaugccucc

SEQ ID NO: 2063042 - RNA, 14 nt, Human
cagagaugccucca

SEQ ID NO: 2063043 - RNA, 15 nt, Human
cagagaugccuccac

SEQ ID NO: 2063044 - RNA, 16 nt, Human
cagagaugccuccacc

SEQ ID NO: 2063045 - RNA, 18 nt, Human
cagagaugccuccaccgc

SEQ ID NO: 2063046 - RNA, 19 nt, Human
cagagaugccuccaccgcu

SEQ ID NO: 2063047 - RNA, 21 nt, Human
cagagaugccuccaccgcugc

SEQ ID NO: 2063048 - RNA, 18 nt, Human
cagagcacagcagccccu

SEQ ID NO: 2063049 - RNA, 14 nt, Human
cagagcaagugaga

SEQ ID NO: 2063050 - RNA, 20 nt, Human
cagagcaagugagacccugu

SEQ ID NO: 2063051 - RNA, 16 nt, Human
cagagcaaagggccag

SEQ ID NO: 2063052 - RNA, 17 nt, Human
cagagcaaagggccagg

SEQ ID NO: 2063053 - RNA, 20 nt, Human
cagagcaagacucugucuca

SEQ ID NO: 2063054 - RNA, 18 nt, Human
cagagcaagauccugucu

SEQ ID NO: 2063055 - RNA, 20 nt, Human
cagagcaagauccugucuuu

SEQ ID NO: 2063056 - RNA, 16 nt, Human
cagagcaagcuuuuuu

SEQ ID NO: 2063057 - RNA, 19 nt, Human
cagagcaagcuuuuuuauu

SEQ ID NO: 2063058 - RNA, 20 nt, Human
cagagcaagcuuuuuuauuu

SEQ ID NO: 2063059 - RNA, 19 nt, Human
cagagacucagggccccag

SEQ ID NO: 2063060 - RNA, 20 nt, Human
cagagacucagggccccagc

SEQ ID NO: 2063061 - RNA, 21 nt, Human
cagagacucagggccccagca

SEQ ID NO: 2063062 - RNA, 22 nt, Human
cagagacucagggccccagcac

SEQ ID NO: 2063063 - RNA, 23 nt, Human
cagagacucagggccccagcacu

SEQ ID NO: 2063064 - RNA, 15 nt, Human
cagaugccccagagc

SEQ ID NO: 2063065 - RNA, 13 nt, Human
cagcagcccuccu

SEQ ID NO: 2063066 - RNA, 20 nt, Human
cagaaacaccuagaucagaa

SEQ ID NO: 2063067 - RNA, 19 nt, Human
cagaaaauuguacaaccug

SEQ ID NO: 2063068 - RNA, 23 nt, Human
cagaaacagauuuggugaauuug

SEQ ID NO: 2063069 - RNA, 18 nt, Human
cagaaacaggugcaucug

SEQ ID NO: 2063070 - RNA, 22 nt, Human
cagaaacaggugcaucugggga

SEQ ID NO: 2063071 - RNA, 17 nt, Human
cagaaacaucaguuacu

SEQ ID NO: 2063072 - RNA, 19 nt, Human
cagaaacaucaguuacucu

SEQ ID NO: 2063073 - RNA, 22 nt, Human
cagaaacaucaguuacucugaa

SEQ ID NO: 2063074 - RNA, 20 nt, Human
cagaaagacugagcucaagg

SEQ ID NO: 2063075 - RNA, 11 nt, Human
cagaaagaguu

SEQ ID NO: 2063076 - RNA, 19 nt, Human
cagaaagauggaugugcuu

SEQ ID NO: 2063077 - RNA, 24 nt, Human
cagaaagaaguggggacagagcag

SEQ ID NO: 2063078 - RNA, 20 nt, Human
cagaaacuugugaaguggaa

SEQ ID NO: 2063079 - RNA, 14 nt, Human
cagaaaccaguuau

SEQ ID NO: 2063080 - RNA, 15 nt, Human
cagaaaccaguuaug

SEQ ID NO: 2063081 - RNA, 23 nt, Human
cagaaacaucaguuacucugaag

SEQ ID NO: 2063082 - RNA, 13 nt, Human
cagaaaccaguua

SEQ ID NO: 2063083 - RNA, 18 nt, Human
cagaaagcauaaaauucu

SEQ ID NO: 2063084 - RNA, 21 nt, Human
cagaaagauggaugugcuuug

SEQ ID NO: 2063085 - RNA, 15 nt, Human
cagaaagcagaggcu

SEQ ID NO: 2063086 - RNA, 16 nt, Human
cagaaagcagaggcug

SEQ ID NO: 2063087 - RNA, 17 nt, Human
cagaaagcagaggcugg

SEQ ID NO: 2063088 - RNA, 20 nt, Human
cagaaagcagaggcuggccu

SEQ ID NO: 2063089 - RNA, 22 nt, Human
cagaaagcagaggcuggccuca

SEQ ID NO: 2063090 - RNA, 19 nt, Human
cagaaagccccaagcaauu

SEQ ID NO: 2063091 - RNA, 19 nt, Human
cagaacaguuaagcagccg

SEQ ID NO: 2063092 - RNA, 22 nt, Human
cagaacaguuaagcagccgcca

SEQ ID NO: 2063093 - RNA, 16 nt, Human
cagaacaguuuguaca

SEQ ID NO: 2063094 - RNA, 14 nt, Human
cagaaaagcaccug

SEQ ID NO: 2063095 - RNA, 20 nt, Human
cagaaaacgguuaaaacugu

SEQ ID NO: 2063096 - RNA, 13 nt, Human
cagaaaacuagaa

SEQ ID NO: 2063097 - RNA, 18 nt, Human
cagaaaacuagaauuuca

SEQ ID NO: 2063098 - RNA, 15 nt, Human
cagaaaagcaccugc

SEQ ID NO: 2063099 - RNA, 16 nt, Human
cagaaaagcaccugcc

SEQ ID NO: 2063100 - RNA, 17 nt, Human
cagaaaagcaccugccg

SEQ ID NO: 2063101 - RNA, 19 nt, Human
cagaaaagcaccugccgac

SEQ ID NO: 2063102 - RNA, 12 nt, Human
cacuuuucucca

SEQ ID NO: 2063103 - RNA, 15 nt, Human
cacuuuugagacuuu

SEQ ID NO: 2063104 - RNA, 19 nt, Human
cacuuugggaggccaagga

SEQ ID NO: 2063105 - RNA, 14 nt, Human
cagaaaaacaauaa

SEQ ID NO: 2063106 - RNA, 16 nt, Human
cagaaaaacaauaaga

SEQ ID NO: 2063107 - RNA, 21 nt, Human
cacuuuuuugaguggaugaug

SEQ ID NO: 2063108 - RNA, 21 nt, Human
cagaaaaauaacuucaagcaa

SEQ ID NO: 2063109 - RNA, 16 nt, Human
cagaaaaacucuggga

SEQ ID NO: 2063110 - RNA, 19 nt, Human
cagaaaaacucugggaaau

SEQ ID NO: 2063111 - RNA, 14 nt, Human
cagaaaacaacaaa

SEQ ID NO: 2063112 - RNA, 16 nt, Human
cagaaaacaacaaaaa

SEQ ID NO: 2063113 - RNA, 17 nt, Human
cagaaaacaacaaaaaa

SEQ ID NO: 2063114 - RNA, 18 nt, Human
cagaaaacaacaaaaaau

SEQ ID NO: 2063115 - RNA, 19 nt, Human
cagaaaacaacaaaaaaua

SEQ ID NO: 2063116 - RNA, 20 nt, Human
cagaaaacaacaaaaaauaa

SEQ ID NO: 2063117 - RNA, 10 nt, Human
cagaaaacag

SEQ ID NO: 2063118 - RNA, 11 nt, Human
cagaaaacaga

SEQ ID NO: 2063119 - RNA, 12 nt, Human
cagaaaacagaa

SEQ ID NO: 2063120 - RNA, 13 nt, Human
cagaaaacagaaa

SEQ ID NO: 2063121 - RNA, 14 nt, Human
cagaaaacagaaaa

SEQ ID NO: 2063122 - RNA, 16 nt, Human
cagaaaacagaaaaaa

SEQ ID NO: 2063123 - RNA, 17 nt, Human
cagaaaacagaaaaaaa

SEQ ID NO: 2063124 - RNA, 20 nt, Human
cagaaaacagaaaaaaaaca

SEQ ID NO: 2063125 - RNA, 14 nt, Human
cagaaaaccccagc

SEQ ID NO: 2063126 - RNA, 19 nt, Human
cagaaaacgguuaaaacug

SEQ ID NO: 2063127 - RNA, 20 nt, Human
cacuuuggaaguuuguguuc

SEQ ID NO: 2063128 - RNA, 13 nt, Human
cacuuugcucuga

SEQ ID NO: 2063129 - RNA, 16 nt, Human
cacuuugggaggccaa

SEQ ID NO: 2063130 - RNA, 23 nt, Human
cacuuugggaggccaaggagggc

SEQ ID NO: 2063131 - RNA, 19 nt, Human
cacuuugguacauggccag

SEQ ID NO: 2063132 - RNA, 20 nt, Human
cacuuugguacauggccagu

SEQ ID NO: 2063133 - RNA, 12 nt, Human
cacuuugggagg

SEQ ID NO: 2063134 - RNA, 13 nt, Human
cacuuugggaggc

SEQ ID NO: 2063135 - RNA, 13 nt, Human
cagaagggaaaca

SEQ ID NO: 2063136 - RNA, 14 nt, Human
cagaagggaaacag

SEQ ID NO: 2063137 - RNA, 15 nt, Human
cagaagggaaacagu

SEQ ID NO: 2063138 - RNA, 16 nt, Human
cagaagggaaacaguc

SEQ ID NO: 2063139 - RNA, 15 nt, Human
cagaagguauuccuu

SEQ ID NO: 2063140 - RNA, 23 nt, Human
cagaagguggggguuggcugggu

SEQ ID NO: 2063141 - RNA, 16 nt, Human
cagaagguugugauga

SEQ ID NO: 2063142 - RNA, 15 nt, Human
cagaagggggucucu

SEQ ID NO: 2063143 - RNA, 18 nt, Human
cagaagggggccaugagg

SEQ ID NO: 2063144 - RNA, 14 nt, Human
cagaagggggccau

SEQ ID NO: 2063145 - RNA, 15 nt, Human
cagaagggggccaug

SEQ ID NO: 2063146 - RNA, 16 nt, Human
cagaagggggccauga

SEQ ID NO: 2063147 - RNA, 20 nt, Human
cagaagucacucaauuguuu

SEQ ID NO: 2063148 - RNA, 22 nt, Human
cagaagucacucaauuguuuuu

SEQ ID NO: 2063149 - RNA, 17 nt, Human
cagaaucucaaauaacu

SEQ ID NO: 2063150 - RNA, 18 nt, Human
cagaaucucaaauaacua

SEQ ID NO: 2063151 - RNA, 23 nt, Human
cagaaucgcuccaccuugcagcu

SEQ ID NO: 2063152 - RNA, 16 nt, Human
cagaagucaugaagcc

SEQ ID NO: 2063153 - RNA, 17 nt, Human
cagaagucaugaagccc

SEQ ID NO: 2063154 - RNA, 18 nt, Human
cagaagucaugaagccca

SEQ ID NO: 2063155 - RNA, 18 nt, Human
cagaaggccaagaggcug

SEQ ID NO: 2063156 - RNA, 14 nt, Human
cagaaggccaagag

SEQ ID NO: 2063157 - RNA, 13 nt, Human
cagaaggcaggga

SEQ ID NO: 2063158 - RNA, 13 nt, Human
cagaaggccaaga

SEQ ID NO: 2063159 - RNA, 13 nt, Human
cagaaggaggagg

SEQ ID NO: 2063160 - RNA, 14 nt, Human
cagaaggaggagga

SEQ ID NO: 2063161 - RNA, 17 nt, Human
cagaaggaugaaugagg

SEQ ID NO: 2063162 - RNA, 18 nt, Human
cagaaggagaaggaagga

SEQ ID NO: 2063163 - RNA, 20 nt, Human
cagaaggagaaggaaggaga

SEQ ID NO: 2063164 - RNA, 14 nt, Human
cagaaggaccuccu

SEQ ID NO: 2063165 - RNA, 14 nt, Human
cagaaggagaagga

SEQ ID NO: 2063166 - RNA, 12 nt, Human
cagaagcuucca

SEQ ID NO: 2063167 - RNA, 19 nt, Human
cagaagcugagcaccaggg

SEQ ID NO: 2063168 - RNA, 21 nt, Human
cagaagcugagcaccagggga

SEQ ID NO: 2063169 - RNA, 16 nt, Human
cagaagcugagcacca

SEQ ID NO: 2063170 - RNA, 15 nt, Human
cagaagcucucgaug

SEQ ID NO: 2063171 - RNA, 18 nt, Human
cagaagcgggacgagacc

SEQ ID NO: 2063172 - RNA, 19 nt, Human
cagaagccugaggcuggga

SEQ ID NO: 2063173 - RNA, 14 nt, Human
cagaagccugaggc

SEQ ID NO: 2063174 - RNA, 15 nt, Human
cagaagccugaggcu

SEQ ID NO: 2063175 - RNA, 19 nt, Human
cagaagccucuggcuagag

SEQ ID NO: 2063176 - RNA, 14 nt, Human
cagaagccucuggc

SEQ ID NO: 2063177 - RNA, 15 nt, Human
cagaagccucuggcu

SEQ ID NO: 2063178 - RNA, 22 nt, Human
cagaacccuggugaggaagcuc

SEQ ID NO: 2063179 - RNA, 12 nt, Human
cagaaccucuuc

SEQ ID NO: 2063180 - RNA, 14 nt, Human
cagaaccucuuccc

SEQ ID NO: 2063181 - RNA, 15 nt, Human
cagaaccucuucccc

SEQ ID NO: 2063182 - RNA, 16 nt, Human
cagaaccucuucccca

SEQ ID NO: 2063183 - RNA, 18 nt, Human
cagaaccucuuccccaga

SEQ ID NO: 2063184 - RNA, 22 nt, Human
cagaacccuuggagccaaugga

SEQ ID NO: 2063185 - RNA, 21 nt, Human
cagaaccucuuccccagaaag

SEQ ID NO: 2063186 - RNA, 14 nt, Human
cagaaccuguccuu

SEQ ID NO: 2063187 - RNA, 13 nt, Human
cagaacugagcuc

SEQ ID NO: 2063188 - RNA, 15 nt, Human
cagaacugagcuccu

SEQ ID NO: 2063189 - RNA, 16 nt, Human
cagaacugagcuccuc

SEQ ID NO: 2063190 - RNA, 17 nt, Human
cagaacugagcuccucu

SEQ ID NO: 2063191 - RNA, 20 nt, Human
cagaacugagcuccucuggg

SEQ ID NO: 2063192 - RNA, 23 nt, Human
cagaacugagcuccucugggcag

SEQ ID NO: 2063193 - RNA, 24 nt, Human
cagaacugagcuccucugggcagg

SEQ ID NO: 2063194 - RNA, 13 nt, Human
cagaacugcuuua

SEQ ID NO: 2063195 - RNA, 13 nt, Human
cagaacuggacuc

SEQ ID NO: 2063196 - RNA, 18 nt, Human
cagaacuggacucaggau

SEQ ID NO: 2063197 - RNA, 21 nt, Human
cagaagacacugaugggcaac

SEQ ID NO: 2063198 - RNA, 22 nt, Human
cagaagaauugaacccaggagg

SEQ ID NO: 2063199 - RNA, 20 nt, Human
cagaagagaugggcuuguuu

SEQ ID NO: 2063200 - RNA, 19 nt, Human
cagaagacacugcaaaggc

SEQ ID NO: 2063201 - RNA, 18 nt, Human
cagaagacuucccagcuu

SEQ ID NO: 2063202 - RNA, 21 nt, Human
cagaagagaugggcuuguuuu

SEQ ID NO: 2063203 - RNA, 15 nt, Human
cagaagaaggcagca

SEQ ID NO: 2063204 - RNA, 18 nt, Human
cagaagaauaugacagcu

SEQ ID NO: 2063205 - RNA, 17 nt, Human
cagaagaauugaaccca

SEQ ID NO: 2063206 - RNA, 19 nt, Human
cagaagaauugaacccagg

SEQ ID NO: 2063207 - RNA, 20 nt, Human
cagaagaauugaacccagga

SEQ ID NO: 2063208 - RNA, 21 nt, Human
cagaagaauugaacccaggag

SEQ ID NO: 2063209 - RNA, 14 nt, Human
cagaagaaggcagc

SEQ ID NO: 2063210 - RNA, 14 nt, Human
cagaagcaggauag

SEQ ID NO: 2063211 - RNA, 16 nt, Human
cagaagccuauuguaa

SEQ ID NO: 2063212 - RNA, 17 nt, Human
cagaagccuauuguaaa

SEQ ID NO: 2063213 - RNA, 18 nt, Human
cagaagccuauuguaaau

SEQ ID NO: 2063214 - RNA, 22 nt, Human
cagaagccuauuguaaauacaa

SEQ ID NO: 2063215 - RNA, 20 nt, Human
cagaagccucacugcaagca

SEQ ID NO: 2063216 - RNA, 13 nt, Human
cagaagccucugg

SEQ ID NO: 2063217 - RNA, 12 nt, Human
cagaccagagcu

SEQ ID NO: 2063218 - RNA, 13 nt, Human
cagaccagagcuc

SEQ ID NO: 2063219 - RNA, 15 nt, Human
cagaccagagcucug

SEQ ID NO: 2063220 - RNA, 17 nt, Human
cagaccagagcucugga

SEQ ID NO: 2063221 - RNA, 14 nt, Human
cagaccacaaaacu

SEQ ID NO: 2063222 - RNA, 20 nt, Human
cagaccacaaaacuuuucua

SEQ ID NO: 2063223 - RNA, 18 nt, Human
cagaccccuggcuuuuca

SEQ ID NO: 2063224 - RNA, 16 nt, Human
cagaccccuggcuuuu

SEQ ID NO: 2063225 - RNA, 15 nt, Human
cagaccccuggcuuu

SEQ ID NO: 2063226 - RNA, 14 nt, Human
cagaccccuggcuu

SEQ ID NO: 2063227 - RNA, 13 nt, Human
cagaccccuggcu

SEQ ID NO: 2063228 - RNA, 17 nt, Human
cagaccccucuggccag

SEQ ID NO: 2063229 - RNA, 18 nt, Human
cagaccccucuggccagg

SEQ ID NO: 2063230 - RNA, 20 nt, Human
cagaccccucuggccaggau

SEQ ID NO: 2063231 - RNA, 21 nt, Human
cagaccccucuggccaggaug

SEQ ID NO: 2063232 - RNA, 18 nt, Human
cagacccccagcaacccu

SEQ ID NO: 2063233 - RNA, 13 nt, Human
cagaccccucugg

SEQ ID NO: 2063234 - RNA, 16 nt, Human
cagaccccucuggcca

SEQ ID NO: 2063235 - RNA, 17 nt, Human
cagaccauugucucaga

SEQ ID NO: 2063236 - RNA, 12 nt, Human
cagaccccagcg

SEQ ID NO: 2063237 - RNA, 14 nt, Human
cagaccccagcggc

SEQ ID NO: 2063238 - RNA, 16 nt, Human
cagaccccagcggcug

SEQ ID NO: 2063239 - RNA, 15 nt, Human
cagaccccagcggcu

SEQ ID NO: 2063240 - RNA, 13 nt, Human
cagacccccaccc

SEQ ID NO: 2063241 - RNA, 14 nt, Human
cagacccccacccc

SEQ ID NO: 2063242 - RNA, 15 nt, Human
cagacccccaccccu

SEQ ID NO: 2063243 - RNA, 17 nt, Human
cagacccccaccccuuc

SEQ ID NO: 2063244 - RNA, 18 nt, Human
cagacccccaccccuucc

SEQ ID NO: 2063245 - RNA, 19 nt, Human
cagacccccaccccuuccc

SEQ ID NO: 2063246 - RNA, 20 nt, Human
cagacccccaccccuucccc

SEQ ID NO: 2063247 - RNA, 21 nt, Human
cagacccccaccccuucccca

SEQ ID NO: 2063248 - RNA, 22 nt, Human
cagacccccaccccuuccccac

SEQ ID NO: 2063249 - RNA, 23 nt, Human
cagacccccaccccuuccccacu

SEQ ID NO: 2063250 - RNA, 13 nt, Human
cagacccccacuc

SEQ ID NO: 2063251 - RNA, 14 nt, Human
cagacccccacucu

SEQ ID NO: 2063252 - RNA, 16 nt, Human
cagacccccacucuca

SEQ ID NO: 2063253 - RNA, 13 nt, Human
cagacccccagca

SEQ ID NO: 2063254 - RNA, 17 nt, Human
cagacccccagcaaccc

SEQ ID NO: 2063255 - RNA, 18 nt, Human
cagacccuaccccaccac

SEQ ID NO: 2063256 - RNA, 15 nt, Human
cagacccuaccccac

SEQ ID NO: 2063257 - RNA, 16 nt, Human
cagacccuaccccacc

SEQ ID NO: 2063258 - RNA, 17 nt, Human
cagacccuaccccacca

SEQ ID NO: 2063259 - RNA, 22 nt, Human
cagaccccuggcuuuucacugc

SEQ ID NO: 2063260 - RNA, 21 nt, Human
cagaccccuggcuuuucacug

SEQ ID NO: 2063261 - RNA, 23 nt, Human
cagaccccuggcuuuucacugcu

SEQ ID NO: 2063262 - RNA, 22 nt, Human
cagaccccucuggccaggaugg

SEQ ID NO: 2063263 - RNA, 14 nt, Human
cagacccggcugcg

SEQ ID NO: 2063264 - RNA, 12 nt, Human
cagacccggcug

SEQ ID NO: 2063265 - RNA, 16 nt, Human
cagacccggcugcgug

SEQ ID NO: 2063266 - RNA, 20 nt, Human
cagacuuuuuuuaaauagua

SEQ ID NO: 2063267 - RNA, 23 nt, Human
cagagaaaguacuucuccacccu

SEQ ID NO: 2063268 - RNA, 19 nt, Human
cagagaaaguacuucucca

SEQ ID NO: 2063269 - RNA, 20 nt, Human
cagacuucuccagacccacc

SEQ ID NO: 2063270 - RNA, 15 nt, Human
cagacuuuaaagaau

SEQ ID NO: 2063271 - RNA, 13 nt, Human
cagacuucuccag

SEQ ID NO: 2063272 - RNA, 14 nt, Human
cagacuucuccaga

SEQ ID NO: 2063273 - RNA, 15 nt, Human
cagacuucuccagac

SEQ ID NO: 2063274 - RNA, 16 nt, Human
cagacuucuccagacc

SEQ ID NO: 2063275 - RNA, 13 nt, Human
cagacuugagaac

SEQ ID NO: 2063276 - RNA, 19 nt, Human
cagacuugagaacuugaca

SEQ ID NO: 2063277 - RNA, 21 nt, Human
cagacuucccugaauguauug

SEQ ID NO: 2063278 - RNA, 15 nt, Human
cagacuucacacugc

SEQ ID NO: 2063279 - RNA, 16 nt, Human
cagacucaguuuguca

SEQ ID NO: 2063280 - RNA, 14 nt, Human
cagacucaauaaaa

SEQ ID NO: 2063281 - RNA, 17 nt, Human
cagacucaguuugucag

SEQ ID NO: 2063282 - RNA, 18 nt, Human
cagacucaguuugucaga

SEQ ID NO: 2063283 - RNA, 16 nt, Human
cagacucauacagaag

SEQ ID NO: 2063284 - RNA, 18 nt, Human
cagacucauacagaaggu

SEQ ID NO: 2063285 - RNA, 19 nt, Human
cagacucauacagaaggug

SEQ ID NO: 2063286 - RNA, 20 nt, Human
cagacucauacagaaggugg

SEQ ID NO: 2063287 - RNA, 21 nt, Human
cagacucauacagaagguggg

SEQ ID NO: 2063288 - RNA, 15 nt, Human
cagacgccuuacugg

SEQ ID NO: 2063289 - RNA, 15 nt, Human
cagacggcacccacc

SEQ ID NO: 2063290 - RNA, 16 nt, Human
cagacggcacccaccc

SEQ ID NO: 2063291 - RNA, 17 nt, Human
cagacggcacccaccca

SEQ ID NO: 2063292 - RNA, 17 nt, Human
cagacgguucaccagcc

SEQ ID NO: 2063293 - RNA, 19 nt, Human
cagacgguucaccagccuc

SEQ ID NO: 2063294 - RNA, 20 nt, Human
cagacguaugcuuauuuuaa

SEQ ID NO: 2063295 - RNA, 15 nt, Human
cagacgucccuccac

SEQ ID NO: 2063296 - RNA, 22 nt, Human
cagaccugagcuccccaccacc

SEQ ID NO: 2063297 - RNA, 12 nt, Human
cagaccugagcu

SEQ ID NO: 2063298 - RNA, 17 nt, Human
cagaccugagcucccca

SEQ ID NO: 2063299 - RNA, 17 nt, Human
cagacgcacgugggucu

SEQ ID NO: 2063300 - RNA, 13 nt, Human
cagaccuuuuauc

SEQ ID NO: 2063301 - RNA, 22 nt, Human
cagacaccuugacagggcacac

SEQ ID NO: 2063302 - RNA, 20 nt, Human
cagacaccuugacagggcac

SEQ ID NO: 2063303 - RNA, 19 nt, Human
cagacaccuugacagggca

SEQ ID NO: 2063304 - RNA, 14 nt, Human
cagacacuuuggaa

SEQ ID NO: 2063305 - RNA, 15 nt, Human
cagacacuuuggaag

SEQ ID NO: 2063306 - RNA, 19 nt, Human
cagacacuuuggaaguuug

SEQ ID NO: 2063307 - RNA, 21 nt, Human
cagacacuuuuuugaguggau

SEQ ID NO: 2063308 - RNA, 21 nt, Human
cagacacugaccauccacucu

SEQ ID NO: 2063309 - RNA, 18 nt, Human
cagacauguggugggaca

SEQ ID NO: 2063310 - RNA, 22 nt, Human
cagacauguggugggacaggga

SEQ ID NO: 2063311 - RNA, 16 nt, Human
cagacauuaaauaauc

SEQ ID NO: 2063312 - RNA, 13 nt, Human
cagacauucugcc

SEQ ID NO: 2063313 - RNA, 16 nt, Human
cagacauucugccagg

SEQ ID NO: 2063314 - RNA, 21 nt, Human
cagacauucugccaggccccc

SEQ ID NO: 2063315 - RNA, 23 nt, Human
cagacacaggcccggcuccaggc

SEQ ID NO: 2063316 - RNA, 22 nt, Human
cagacacaggcccggcuccagg

SEQ ID NO: 2063317 - RNA, 21 nt, Human
cagacacaggcccggcuccag

SEQ ID NO: 2063318 - RNA, 18 nt, Human
cagacacaggcccggcuc

SEQ ID NO: 2063319 - RNA, 17 nt, Human
cagacacaggcccggcu

SEQ ID NO: 2063320 - RNA, 15 nt, Human
cagacacaggcccgg

SEQ ID NO: 2063321 - RNA, 14 nt, Human
cagacacaggcccg

SEQ ID NO: 2063322 - RNA, 13 nt, Human
cagacacaggccc

SEQ ID NO: 2063323 - RNA, 18 nt, Human
cagacacacgcacacaca

SEQ ID NO: 2063324 - RNA, 13 nt, Human
cagacacaaacaa

SEQ ID NO: 2063325 - RNA, 14 nt, Human
cagacacacacaca

SEQ ID NO: 2063326 - RNA, 12 nt, Human
cagacacacaca

SEQ ID NO: 2063327 - RNA, 21 nt, Human
cagacaagugacuguaucugu

SEQ ID NO: 2063328 - RNA, 16 nt, Human
cagacaagguagcccu

SEQ ID NO: 2063329 - RNA, 23 nt, Human
cagacaagguagcccuggccaga

SEQ ID NO: 2063330 - RNA, 17 nt, Human
cagacaacagaagucau

SEQ ID NO: 2063331 - RNA, 22 nt, Human
cagacaacagaagucaugaagc

SEQ ID NO: 2063332 - RNA, 22 nt, Human
cagacaaaugugguuacacacu

SEQ ID NO: 2063333 - RNA, 17 nt, Human
cagacaaaccagaagca

SEQ ID NO: 2063334 - RNA, 22 nt, Human
cagacaaaaacagccucacaga

SEQ ID NO: 2063335 - RNA, 17 nt, Human
cagacaacacguuacua

SEQ ID NO: 2063336 - RNA, 13 nt, Human
cagacaacagaag

SEQ ID NO: 2063337 - RNA, 14 nt, Human
cagacaacagaagu

SEQ ID NO: 2063338 - RNA, 15 nt, Human
cagacaacagaaguc

SEQ ID NO: 2063339 - RNA, 16 nt, Human
cagacaacagaaguca

SEQ ID NO: 2063340 - RNA, 18 nt, Human
cagacaaaaacagccuca

SEQ ID NO: 2063341 - RNA, 19 nt, Human
cagacaaaaacagccucac

SEQ ID NO: 2063342 - RNA, 20 nt, Human
cagacaaaaacagccucaca

SEQ ID NO: 2063343 - RNA, 21 nt, Human
cagacaaaaacagccucacag

SEQ ID NO: 2063344 - RNA, 21 nt, Human
cagaaucuuuccuuccucuca

SEQ ID NO: 2063345 - RNA, 14 nt, Human
cagaaucugaaugu

SEQ ID NO: 2063346 - RNA, 15 nt, Human
cagaaucugaaugua

SEQ ID NO: 2063347 - RNA, 16 nt, Human
cagaaucugaauguaa

SEQ ID NO: 2063348 - RNA, 18 nt, Human
cagaaucugaauguaauu

SEQ ID NO: 2063349 - RNA, 12 nt, Human
cagaaugucaga

SEQ ID NO: 2063350 - RNA, 13 nt, Human
cagaaugucagau

SEQ ID NO: 2063351 - RNA, 22 nt, Human
cagaaugucagauuccuuuccc

SEQ ID NO: 2063352 - RNA, 18 nt, Human
cagaauggggugcaugaa

SEQ ID NO: 2063353 - RNA, 21 nt, Human
cagaauucugcuaccucacug

SEQ ID NO: 2063354 - RNA, 23 nt, Human
cagaauucugcuaccucacuggg

SEQ ID NO: 2063355 - RNA, 15 nt, Human
cagaauucccagcug

SEQ ID NO: 2063356 - RNA, 23 nt, Human
cagaauucccagcugucuguguc

SEQ ID NO: 2063357 - RNA, 15 nt, Human
cagaauuccuuuucu

SEQ ID NO: 2063358 - RNA, 13 nt, Human
cagaauucugcua

SEQ ID NO: 2063359 - RNA, 14 nt, Human
cagaauucugcuac

SEQ ID NO: 2063360 - RNA, 11 nt, Human
cagaauucuca

SEQ ID NO: 2063361 - RNA, 11 nt, Human
cagaaaacaac

SEQ ID NO: 2063362 - RNA, 20 nt, Human
cagccuccugaguagcugga

SEQ ID NO: 2063363 - RNA, 17 nt, Human
cagccucgaacuccugg

SEQ ID NO: 2063364 - RNA, 18 nt, Human
cagccucgaacuccuggg

SEQ ID NO: 2063365 - RNA, 20 nt, Human
cagccucgaacuccugggcu

SEQ ID NO: 2063366 - RNA, 21 nt, Human
cagccucgaacuccugggcuc

SEQ ID NO: 2063367 - RNA, 22 nt, Human
cagccucgaacuccugggcuca

SEQ ID NO: 2063368 - RNA, 23 nt, Human
cagccucgaacuccugggcucaa

SEQ ID NO: 2063369 - RNA, 20 nt, Human
cagccugcuccagcuguuca

SEQ ID NO: 2063370 - RNA, 18 nt, Human
cagccuccguauuucaga

SEQ ID NO: 2063371 - RNA, 19 nt, Human
cagccuccguauuucagac

SEQ ID NO: 2063372 - RNA, 13 nt, Human
cagcccugcccuu

SEQ ID NO: 2063373 - RNA, 13 nt, Human
cagccucccucug

SEQ ID NO: 2063374 - RNA, 14 nt, Human
cagccucccucuga

SEQ ID NO: 2063375 - RNA, 15 nt, Human
cagccucccucugac

SEQ ID NO: 2063376 - RNA, 21 nt, Human
cagccucccucugaccugcag

SEQ ID NO: 2063377 - RNA, 22 nt, Human
cagccucccucugaccugcagg

SEQ ID NO: 2063378 - RNA, 23 nt, Human
cagccucccucugaccugcaggc

SEQ ID NO: 2063379 - RNA, 23 nt, Human
cagccucccgaguagcugggacu

SEQ ID NO: 2063380 - RNA, 22 nt, Human
cagccucccgaguagcugggac

SEQ ID NO: 2063381 - RNA, 21 nt, Human
cagccucccgaguagcuggga

SEQ ID NO: 2063382 - RNA, 20 nt, Human
cagccucccgaguagcuggg

SEQ ID NO: 2063383 - RNA, 19 nt, Human
cagccucccgaguagcugg

SEQ ID NO: 2063384 - RNA, 23 nt, Human
cagccucccgaauagcugggacu

SEQ ID NO: 2063385 - RNA, 14 nt, Human
cagccuggcuucug

SEQ ID NO: 2063386 - RNA, 15 nt, Human
cagccuggcuucugg

SEQ ID NO: 2063387 - RNA, 16 nt, Human
cagccuggcuucugga

SEQ ID NO: 2063388 - RNA, 17 nt, Human
cagccuggcuucuggag

SEQ ID NO: 2063389 - RNA, 19 nt, Human
cagccuggcuucuggagcc

SEQ ID NO: 2063390 - RNA, 23 nt, Human
cagccuggcgaaaccccaucucu

SEQ ID NO: 2063391 - RNA, 10 nt, Human
cagccuggca

SEQ ID NO: 2063392 - RNA, 13 nt, Human
cagccuggaggcc

SEQ ID NO: 2063393 - RNA, 12 nt, Human
cagccuggaggc

SEQ ID NO: 2063394 - RNA, 20 nt, Human
cagccuggcacagggcagug

SEQ ID NO: 2063395 - RNA, 13 nt, Human
cagccuggcacag

SEQ ID NO: 2063396 - RNA, 21 nt, Human
cagccuggcacagggcagugg

SEQ ID NO: 2063397 - RNA, 15 nt, Human
cagccuggacccugu

SEQ ID NO: 2063398 - RNA, 19 nt, Human
cagccuggacccuguggau

SEQ ID NO: 2063399 - RNA, 21 nt, Human
cagccuuggauaaugcuguug

SEQ ID NO: 2063400 - RNA, 17 nt, Human
cagccuuucucccaggc

SEQ ID NO: 2063401 - RNA, 18 nt, Human
cagccuuucucccaggcc

SEQ ID NO: 2063402 - RNA, 19 nt, Human
cagccuuucucccaggcca

SEQ ID NO: 2063403 - RNA, 20 nt, Human
cagccuuucucccaggccag

SEQ ID NO: 2063404 - RNA, 23 nt, Human
cagccuuucucccaggccaggcu

SEQ ID NO: 2063405 - RNA, 19 nt, Human
cagccuuugaucagguggg

SEQ ID NO: 2063406 - RNA, 22 nt, Human
cagccuuugaucagguggggag

SEQ ID NO: 2063407 - RNA, 23 nt, Human
cagccuuugaucagguggggagu

SEQ ID NO: 2063408 - RNA, 17 nt, Human
cagccuuugccuccccg

SEQ ID NO: 2063409 - RNA, 21 nt, Human
cagcgaaaggauguaaacagu

SEQ ID NO: 2063410 - RNA, 22 nt, Human
cagccuguggcggugccugggu

SEQ ID NO: 2063411 - RNA, 14 nt, Human
cagccuucccccuc

SEQ ID NO: 2063412 - RNA, 18 nt, Human
cagccuguggcggugccu

SEQ ID NO: 2063413 - RNA, 19 nt, Human
cagccuguggcggugccug

SEQ ID NO: 2063414 - RNA, 20 nt, Human
cagccuguggcggugccugg

SEQ ID NO: 2063415 - RNA, 21 nt, Human
cagccuguggcggugccuggg

SEQ ID NO: 2063416 - RNA, 23 nt, Human
cagccuuccccuugcccagggcu

SEQ ID NO: 2063417 - RNA, 20 nt, Human
cagccuucccccucccaggg

SEQ ID NO: 2063418 - RNA, 21 nt, Human
cagccuucccccucccagggc

SEQ ID NO: 2063419 - RNA, 16 nt, Human
cagccuuccccuugcc

SEQ ID NO: 2063420 - RNA, 21 nt, Human
cagccuuccccuugcccaggg

SEQ ID NO: 2063421 - RNA, 18 nt, Human
cagccuggccaacauggu

SEQ ID NO: 2063422 - RNA, 20 nt, Human
cagccugggcaacacagcga

SEQ ID NO: 2063423 - RNA, 19 nt, Human
cagccugggcaacagagca

SEQ ID NO: 2063424 - RNA, 20 nt, Human
cagccugggcaacagagcaa

SEQ ID NO: 2063425 - RNA, 20 nt, Human
cagccuggcuucuggagccc

SEQ ID NO: 2063426 - RNA, 21 nt, Human
cagccuggcuucuggagcccu

SEQ ID NO: 2063427 - RNA, 16 nt, Human
cagccugggcaaugug

SEQ ID NO: 2063428 - RNA, 19 nt, Human
cagccugggcaaugugaua

SEQ ID NO: 2063429 - RNA, 11 nt, Human
cagccugggcg

SEQ ID NO: 2063430 - RNA, 15 nt, Human
cagccugggcgacag

SEQ ID NO: 2063431 - RNA, 20 nt, Human
cagccugggcagcauagcaa

SEQ ID NO: 2063432 - RNA, 17 nt, Human
cagccugggcagccagg

SEQ ID NO: 2063433 - RNA, 18 nt, Human
cagccugggcagccaggc

SEQ ID NO: 2063434 - RNA, 19 nt, Human
cagccugggcagccaggcu

SEQ ID NO: 2063435 - RNA, 20 nt, Human
cagccugggcagccaggcug

SEQ ID NO: 2063436 - RNA, 21 nt, Human
cagccugggcagccaggcugc

SEQ ID NO: 2063437 - RNA, 20 nt, Human
cagccuggucaacaugguga

SEQ ID NO: 2063438 - RNA, 15 nt, Human
cagccuggugggccu

SEQ ID NO: 2063439 - RNA, 16 nt, Human
cagccuggugggccuc

SEQ ID NO: 2063440 - RNA, 17 nt, Human
cagccuggugggccucc

SEQ ID NO: 2063441 - RNA, 18 nt, Human
cagccuggugggccuccu

SEQ ID NO: 2063442 - RNA, 23 nt, Human
cagccuggugggccuccucuguc

SEQ ID NO: 2063443 - RNA, 14 nt, Human
cagccugugcugcc

SEQ ID NO: 2063444 - RNA, 16 nt, Human
cagccugugcugcccg

SEQ ID NO: 2063445 - RNA, 12 nt, Human
cagccuguggca

SEQ ID NO: 2063446 - RNA, 15 nt, Human
cagccuguggcaucu

SEQ ID NO: 2063447 - RNA, 19 nt, Human
cagccuguggcaucuuugc

SEQ ID NO: 2063448 - RNA, 21 nt, Human
cagccuguggcaucuuugccu

SEQ ID NO: 2063449 - RNA, 12 nt, Human
cagccuguggcg

SEQ ID NO: 2063450 - RNA, 19 nt, Human
cagcuaaucagcauucuca

SEQ ID NO: 2063451 - RNA, 19 nt, Human
cagcuaaggacauuuccca

SEQ ID NO: 2063452 - RNA, 16 nt, Human
cagcuaaugggacacu

SEQ ID NO: 2063453 - RNA, 15 nt, Human
cagcuaaugggacac

SEQ ID NO: 2063454 - RNA, 15 nt, Human
cagcuacuccggagg

SEQ ID NO: 2063455 - RNA, 22 nt, Human
cagcuacucagaagccugaggc

SEQ ID NO: 2063456 - RNA, 23 nt, Human
cagcuacucagaagccugaggcu

SEQ ID NO: 2063457 - RNA, 12 nt, Human
cagcuacucagg

SEQ ID NO: 2063458 - RNA, 13 nt, Human
cagcuacucagga

SEQ ID NO: 2063459 - RNA, 16 nt, Human
cagcuacucaggaggc

SEQ ID NO: 2063460 - RNA, 18 nt, Human
cagcuacucaggaggcug

SEQ ID NO: 2063461 - RNA, 24 nt, Human
cagcuacccaggaggcugaggugg

SEQ ID NO: 2063462 - RNA, 17 nt, Human
cagcuacuaaugauguu

SEQ ID NO: 2063463 - RNA, 18 nt, Human
cagcuaccagguguucua

SEQ ID NO: 2063464 - RNA, 15 nt, Human
cagcuaccaugacaa

SEQ ID NO: 2063465 - RNA, 19 nt, Human
cagcuacuaaugauguuuu

SEQ ID NO: 2063466 - RNA, 19 nt, Human
cagcuacucaagaggcuga

SEQ ID NO: 2063467 - RNA, 20 nt, Human
cagcuacucaagaggcugag

SEQ ID NO: 2063468 - RNA, 23 nt, Human
cagcuacucaagaggcugaggca

SEQ ID NO: 2063469 - RNA, 14 nt, Human
cagcuacucagaag

SEQ ID NO: 2063470 - RNA, 15 nt, Human
cagcuacucagaagc

SEQ ID NO: 2063471 - RNA, 16 nt, Human
cagcuacucagaagcc

SEQ ID NO: 2063472 - RNA, 19 nt, Human
cagcuacucagaagccuga

SEQ ID NO: 2063473 - RNA, 20 nt, Human
cagcuacucagaagccugag

SEQ ID NO: 2063474 - RNA, 21 nt, Human
cagcuacucagaagccugagg

SEQ ID NO: 2063475 - RNA, 20 nt, Human
cagcgagcccugguggcagu

SEQ ID NO: 2063476 - RNA, 19 nt, Human
cagcgagcccugguggcag

SEQ ID NO: 2063477 - RNA, 17 nt, Human
cagcgagcccugguggc

SEQ ID NO: 2063478 - RNA, 16 nt, Human
cagcgagcccuggugg

SEQ ID NO: 2063479 - RNA, 13 nt, Human
cagcgagcccugg

SEQ ID NO: 2063480 - RNA, 22 nt, Human
cagcgaguuguggaaagccucu

SEQ ID NO: 2063481 - RNA, 21 nt, Human
cagcgagcccugguggcagug

SEQ ID NO: 2063482 - RNA, 19 nt, Human
cagcucaccagccccagug

SEQ ID NO: 2063483 - RNA, 17 nt, Human
cagcucaccagccccag

SEQ ID NO: 2063484 - RNA, 16 nt, Human
cagcucaccagcccca

SEQ ID NO: 2063485 - RNA, 15 nt, Human
cagcucaccagcccc

SEQ ID NO: 2063486 - RNA, 13 nt, Human
cagcucaccagcc

SEQ ID NO: 2063487 - RNA, 13 nt, Human
cagcucaagucuu

SEQ ID NO: 2063488 - RNA, 19 nt, Human
cagcucaagucuucccuga

SEQ ID NO: 2063489 - RNA, 13 nt, Human
cagcuauuuuuau

SEQ ID NO: 2063490 - RNA, 19 nt, Human
cagcucaaaggcacaguga

SEQ ID NO: 2063491 - RNA, 15 nt, Human
cagcucaaaggcaca

SEQ ID NO: 2063492 - RNA, 18 nt, Human
cagcuauugauauaaaua

SEQ ID NO: 2063493 - RNA, 18 nt, Human
cagcuaucucucagugaa

SEQ ID NO: 2063494 - RNA, 17 nt, Human
cagcuaucucucaguga

SEQ ID NO: 2063495 - RNA, 13 nt, Human
cagcuaugggagc

SEQ ID NO: 2063496 - RNA, 15 nt, Human
cagcuaugggagccc

SEQ ID NO: 2063497 - RNA, 17 nt, Human
cagcuaugggagcccca

SEQ ID NO: 2063498 - RNA, 18 nt, Human
cagcuaugggagccccag

SEQ ID NO: 2063499 - RNA, 20 nt, Human
cagcuaugggagccccaggg

SEQ ID NO: 2063500 - RNA, 21 nt, Human
cagcuaugggagccccagggu

SEQ ID NO: 2063501 - RNA, 22 nt, Human
cagcuaugggagccccaggguc

SEQ ID NO: 2063502 - RNA, 23 nt, Human
cagcuaugggagccccagggucu

SEQ ID NO: 2063503 - RNA, 13 nt, Human
cagcuagagcuuc

SEQ ID NO: 2063504 - RNA, 15 nt, Human
cagcuagcaaaagaa

SEQ ID NO: 2063505 - RNA, 19 nt, Human
cagcuagcaaaagaaguaa

SEQ ID NO: 2063506 - RNA, 21 nt, Human
cagcuagcaaaagaaguaaca

SEQ ID NO: 2063507 - RNA, 16 nt, Human
cagcuacuugggaggc

SEQ ID NO: 2063508 - RNA, 15 nt, Human
cagcuacuugggagg

SEQ ID NO: 2063509 - RNA, 19 nt, Human
cagcuagguggggccuaga

SEQ ID NO: 2063510 - RNA, 21 nt, Human
cagcucaccagccccagugcc

SEQ ID NO: 2063511 - RNA, 20 nt, Human
cagcucaccagccccagugc

SEQ ID NO: 2063512 - RNA, 22 nt, Human
cagcucaccagccccagugccc

SEQ ID NO: 2063513 - RNA, 22 nt, Human
cagcucaagucuucccugauca

SEQ ID NO: 2063514 - RNA, 17 nt, Human
cagcucacgucacacuu

SEQ ID NO: 2063515 - RNA, 23 nt, Human
cagcccugcuuugggcugcccug

SEQ ID NO: 2063516 - RNA, 22 nt, Human
cagcccugcuuugggcugcccu

SEQ ID NO: 2063517 - RNA, 21 nt, Human
cagcccugcuuugggcugccc

SEQ ID NO: 2063518 - RNA, 20 nt, Human
cagcccugcuuugggcugcc

SEQ ID NO: 2063519 - RNA, 19 nt, Human
cagcccugcuuugggcugc

SEQ ID NO: 2063520 - RNA, 13 nt, Human
cagcccugcuuug

SEQ ID NO: 2063521 - RNA, 11 nt, Human
cagcccugcuu

SEQ ID NO: 2063522 - RNA, 23 nt, Human
cagcccugggccccaccaccuag

SEQ ID NO: 2063523 - RNA, 16 nt, Human
cagccggggccugccu

SEQ ID NO: 2063524 - RNA, 17 nt, Human
cagccggggccugccua

SEQ ID NO: 2063525 - RNA, 18 nt, Human
cagccggggccugccuag

SEQ ID NO: 2063526 - RNA, 19 nt, Human
cagccggggccugccuagc

SEQ ID NO: 2063527 - RNA, 20 nt, Human
cagccggggccugccuagca

SEQ ID NO: 2063528 - RNA, 12 nt, Human
cagcccugggcc

SEQ ID NO: 2063529 - RNA, 13 nt, Human
cagcccugggccc

SEQ ID NO: 2063530 - RNA, 17 nt, Human
cagcccugggccccacc

SEQ ID NO: 2063531 - RNA, 18 nt, Human
cagcccugggccccacca

SEQ ID NO: 2063532 - RNA, 19 nt, Human
cagcccugggccccaccac

SEQ ID NO: 2063533 - RNA, 20 nt, Human
cagcccugggccccaccacc

SEQ ID NO: 2063534 - RNA, 21 nt, Human
cagcccugggccccaccaccu

SEQ ID NO: 2063535 - RNA, 22 nt, Human
cagcccugggccccaccaccua

SEQ ID NO: 2063536 - RNA, 11 nt, Human
cagcccugggc

SEQ ID NO: 2063537 - RNA, 20 nt, Human
cagccgugccuucagcucua

SEQ ID NO: 2063538 - RNA, 18 nt, Human
cagccgugccuucagcuc

SEQ ID NO: 2063539 - RNA, 16 nt, Human
cagccgugccuucagc

SEQ ID NO: 2063540 - RNA, 14 nt, Human
cagccgugccuuca

SEQ ID NO: 2063541 - RNA, 9 nt, Human
cagccgugc

SEQ ID NO: 2063542 - RNA, 18 nt, Human
cagccgucagccaaaugu

SEQ ID NO: 2063543 - RNA, 19 nt, Human
cagccgucagccaaaugua

SEQ ID NO: 2063544 - RNA, 16 nt, Human
cagccuaagaugaaga

SEQ ID NO: 2063545 - RNA, 16 nt, Human
cagccuacaggccuca

SEQ ID NO: 2063546 - RNA, 14 nt, Human
cagccuacaggccu

SEQ ID NO: 2063547 - RNA, 21 nt, Human
cagccguguaaccauggaccc

SEQ ID NO: 2063548 - RNA, 20 nt, Human
cagccuacuagggaccuggg

SEQ ID NO: 2063549 - RNA, 22 nt, Human
cagccuacuagggaccugggga

SEQ ID NO: 2063550 - RNA, 15 nt, Human
cagccuagccgaccu

SEQ ID NO: 2063551 - RNA, 17 nt, Human
cagccuagccgaccuca

SEQ ID NO: 2063552 - RNA, 18 nt, Human
cagccuagccgaccucag

SEQ ID NO: 2063553 - RNA, 19 nt, Human
cagccuagccgaccucagc

SEQ ID NO: 2063554 - RNA, 20 nt, Human
cagccuagccgaccucagcc

SEQ ID NO: 2063555 - RNA, 21 nt, Human
cagccuagccgaccucagccu

SEQ ID NO: 2063556 - RNA, 22 nt, Human
cagccuagccgaccucagccuu

SEQ ID NO: 2063557 - RNA, 22 nt, Human
cagcccucccugccccucccuu

SEQ ID NO: 2063558 - RNA, 18 nt, Human
cagcccucccugccccuc

SEQ ID NO: 2063559 - RNA, 17 nt, Human
cagcccucccugccccu

SEQ ID NO: 2063560 - RNA, 16 nt, Human
cagcccucccugcccc

SEQ ID NO: 2063561 - RNA, 13 nt, Human
cagcccucccugu

SEQ ID NO: 2063562 - RNA, 14 nt, Human
cagcccucccuguc

SEQ ID NO: 2063563 - RNA, 15 nt, Human
cagcccucccugucc

SEQ ID NO: 2063564 - RNA, 16 nt, Human
cagcccucccuguccu

SEQ ID NO: 2063565 - RNA, 18 nt, Human
cagcccucccuguccucc

SEQ ID NO: 2063566 - RNA, 19 nt, Human
cagcccucccuguccuccu

SEQ ID NO: 2063567 - RNA, 20 nt, Human
cagcccucccuguccuccuc

SEQ ID NO: 2063568 - RNA, 21 nt, Human
cagcccucccuguccuccucg

SEQ ID NO: 2063569 - RNA, 22 nt, Human
cagcccucccuguccuccucgg

SEQ ID NO: 2063570 - RNA, 12 nt, Human
cagcccuccuca

SEQ ID NO: 2063571 - RNA, 13 nt, Human
cagcccuccucac

SEQ ID NO: 2063572 - RNA, 14 nt, Human
cagcccuccucacc

SEQ ID NO: 2063573 - RNA, 16 nt, Human
cagcccuccucacccc

SEQ ID NO: 2063574 - RNA, 15 nt, Human
cagcccucucacugu

SEQ ID NO: 2063575 - RNA, 18 nt, Human
cagcccucucacuguguc

SEQ ID NO: 2063576 - RNA, 22 nt, Human
cagcccuccucaccccgucugg

SEQ ID NO: 2063577 - RNA, 12 nt, Human
cagcccugaggu

SEQ ID NO: 2063578 - RNA, 22 nt, Human
cagcccugaggugaaagggagc

SEQ ID NO: 2063579 - RNA, 19 nt, Human
cagccuaggggucagggac

SEQ ID NO: 2063580 - RNA, 18 nt, Human
cagccuaggggucaggga

SEQ ID NO: 2063581 - RNA, 18 nt, Human
cagccucaaccuccuggg

SEQ ID NO: 2063582 - RNA, 17 nt, Human
cagccucaaccuccugg

SEQ ID NO: 2063583 - RNA, 21 nt, Human
cagccucaaccuccugggcua

SEQ ID NO: 2063584 - RNA, 20 nt, Human
cagccucaaccuccugggcu

SEQ ID NO: 2063585 - RNA, 19 nt, Human
cagccucaaccuccugggc

SEQ ID NO: 2063586 - RNA, 20 nt, Human
cagccuccaagcuccaucuc

SEQ ID NO: 2063587 - RNA, 12 nt, Human
cagccuccagag

SEQ ID NO: 2063588 - RNA, 14 nt, Human
cagccuccaagcuc

SEQ ID NO: 2063589 - RNA, 12 nt, Human
cagccucacaga

SEQ ID NO: 2063590 - RNA, 13 nt, Human
cagccucacagaa

SEQ ID NO: 2063591 - RNA, 14 nt, Human
cagccucacagaag

SEQ ID NO: 2063592 - RNA, 22 nt, Human
cagccucccgaauagcugggac

SEQ ID NO: 2063593 - RNA, 21 nt, Human
cagccucccgaauagcuggga

SEQ ID NO: 2063594 - RNA, 20 nt, Human
cagccucccgaauagcuggg

SEQ ID NO: 2063595 - RNA, 14 nt, Human
cagccucccacccc

SEQ ID NO: 2063596 - RNA, 19 nt, Human
cagccucccacccccaucu

SEQ ID NO: 2063597 - RNA, 16 nt, Human
cagccucccaccccca

SEQ ID NO: 2063598 - RNA, 18 nt, Human
cagccucccacccccauc

SEQ ID NO: 2063599 - RNA, 23 nt, Human
cagccucccccuguccccucuau

SEQ ID NO: 2063600 - RNA, 14 nt, Human
cagccuccaugcug

SEQ ID NO: 2063601 - RNA, 20 nt, Human
cagccuccaugcugccucca

SEQ ID NO: 2063602 - RNA, 17 nt, Human
cagccuccaugcugccu

SEQ ID NO: 2063603 - RNA, 15 nt, Human
cagccuccaugcugc

SEQ ID NO: 2063604 - RNA, 23 nt, Human
cagccucccaaagugcugggauu

SEQ ID NO: 2063605 - RNA, 21 nt, Human
cagccucccaaagugcuggga

SEQ ID NO: 2063606 - RNA, 20 nt, Human
cagccucccaaagugcuggg

SEQ ID NO: 2063607 - RNA, 19 nt, Human
cagccucccaaagugcugg

SEQ ID NO: 2063608 - RNA, 14 nt, Human
cagccccauucugc

SEQ ID NO: 2063609 - RNA, 13 nt, Human
cagccccauucug

SEQ ID NO: 2063610 - RNA, 18 nt, Human
cagccccauucugccugc

SEQ ID NO: 2063611 - RNA, 17 nt, Human
cagccccauucugccug

SEQ ID NO: 2063612 - RNA, 16 nt, Human
cagccccauucugccu

SEQ ID NO: 2063613 - RNA, 12 nt, Human
cagccccagccc

SEQ ID NO: 2063614 - RNA, 13 nt, Human
cagccccagccca

SEQ ID NO: 2063615 - RNA, 14 nt, Human
cagccccagcccag

SEQ ID NO: 2063616 - RNA, 15 nt, Human
cagccccagcccagc

SEQ ID NO: 2063617 - RNA, 16 nt, Human
cagccccagcccagcc

SEQ ID NO: 2063618 - RNA, 21 nt, Human
cagccccagcccagcccagcu

SEQ ID NO: 2063619 - RNA, 14 nt, Human
cagccccagcacca

SEQ ID NO: 2063620 - RNA, 11 nt, Human
cagccccaccc

SEQ ID NO: 2063621 - RNA, 12 nt, Human
cagccccaccca

SEQ ID NO: 2063622 - RNA, 13 nt, Human
cagccccacccag

SEQ ID NO: 2063623 - RNA, 14 nt, Human
cagccccacccagg

SEQ ID NO: 2063624 - RNA, 15 nt, Human
cagccccacccagga

SEQ ID NO: 2063625 - RNA, 16 nt, Human
cagccccacccaggag

SEQ ID NO: 2063626 - RNA, 21 nt, Human
cagccccacccaggagggagg

SEQ ID NO: 2063627 - RNA, 22 nt, Human
cagccccacccaggagggaggg

SEQ ID NO: 2063628 - RNA, 18 nt, Human
cagccccagugcccacag

SEQ ID NO: 2063629 - RNA, 17 nt, Human
cagccccagugcccaca

SEQ ID NO: 2063630 - RNA, 16 nt, Human
cagccccagugcccac

SEQ ID NO: 2063631 - RNA, 15 nt, Human
cagccccagugccca

SEQ ID NO: 2063632 - RNA, 14 nt, Human
cagccccagugccc

SEQ ID NO: 2063633 - RNA, 13 nt, Human
cagccccagugcc

SEQ ID NO: 2063634 - RNA, 13 nt, Human
cagcccucagaau

SEQ ID NO: 2063635 - RNA, 15 nt, Human
cagcccucccugccc

SEQ ID NO: 2063636 - RNA, 13 nt, Human
cagcccucccugc

SEQ ID NO: 2063637 - RNA, 17 nt, Human
cagcccguguggccccu

SEQ ID NO: 2063638 - RNA, 18 nt, Human
cagcccguguggccccuu

SEQ ID NO: 2063639 - RNA, 20 nt, Human
cagcccguguggccccuuca

SEQ ID NO: 2063640 - RNA, 21 nt, Human
cagcccguguggccccuucac

SEQ ID NO: 2063641 - RNA, 15 nt, Human
cagcccguguggccc

SEQ ID NO: 2063642 - RNA, 17 nt, Human
cagccccuugagaaacc

SEQ ID NO: 2063643 - RNA, 18 nt, Human
cagccccuugagaaaccu

SEQ ID NO: 2063644 - RNA, 15 nt, Human
cagcccgcaugcagc

SEQ ID NO: 2063645 - RNA, 19 nt, Human
cagcccgcaugcagcagcu

SEQ ID NO: 2063646 - RNA, 21 nt, Human
cagcccgcaugcagcagcuug

SEQ ID NO: 2063647 - RNA, 23 nt, Human
cagcccgcaugcagcagcuugcu

SEQ ID NO: 2063648 - RNA, 18 nt, Human
cagcuggagaaauauggu

SEQ ID NO: 2063649 - RNA, 15 nt, Human
cagcuggcagcagag

SEQ ID NO: 2063650 - RNA, 18 nt, Human
cagcuggcagcagagugu

SEQ ID NO: 2063651 - RNA, 14 nt, Human
cagcuggcagcaga

SEQ ID NO: 2063652 - RNA, 22 nt, Human
cagcugcuuuugucuaugggac

SEQ ID NO: 2063653 - RNA, 11 nt, Human
cagcugcuucu

SEQ ID NO: 2063654 - RNA, 23 nt, Human
cagcugcuuuugucuaugggacu

SEQ ID NO: 2063655 - RNA, 19 nt, Human
cagcugggaucugacugca

SEQ ID NO: 2063656 - RNA, 20 nt, Human
cagcugggaucugacugcac

SEQ ID NO: 2063657 - RNA, 22 nt, Human
cagcugggaucugacugcacgu

SEQ ID NO: 2063658 - RNA, 12 nt, Human
cagcugggagaa

SEQ ID NO: 2063659 - RNA, 15 nt, Human
cagcugggagaaggg

SEQ ID NO: 2063660 - RNA, 17 nt, Human
cagcuggguuggaaaac

SEQ ID NO: 2063661 - RNA, 16 nt, Human
cagcuggguuggaaaa

SEQ ID NO: 2063662 - RNA, 18 nt, Human
cagcugguugagguuuca

SEQ ID NO: 2063663 - RNA, 19 nt, Human
cagcuggugguaucugagu

SEQ ID NO: 2063664 - RNA, 20 nt, Human
cagcuggugggaagcgucug

SEQ ID NO: 2063665 - RNA, 22 nt, Human
cagcuggugggaagcgucuguc

SEQ ID NO: 2063666 - RNA, 19 nt, Human
cagcuguaagaagagacug

SEQ ID NO: 2063667 - RNA, 20 nt, Human
cagcuguaagaagagacugg

SEQ ID NO: 2063668 - RNA, 24 nt, Human
cagcugcgguccacccaggagccc

SEQ ID NO: 2063669 - RNA, 23 nt, Human
cagcugcgguccacccaggagcc

SEQ ID NO: 2063670 - RNA, 22 nt, Human
cagcugcgguccacccaggagc

SEQ ID NO: 2063671 - RNA, 21 nt, Human
cagcugcgguccacccaggag

SEQ ID NO: 2063672 - RNA, 20 nt, Human
cagcugcgguccacccagga

SEQ ID NO: 2063673 - RNA, 19 nt, Human
cagcugcgguccacccagg

SEQ ID NO: 2063674 - RNA, 18 nt, Human
cagcugcgguccacccag

SEQ ID NO: 2063675 - RNA, 16 nt, Human
cagcugaccuuuguca

SEQ ID NO: 2063676 - RNA, 22 nt, Human
cagcucuuugaaauagucugug

SEQ ID NO: 2063677 - RNA, 22 nt, Human
cagcugaacaguguuggcuuuc

SEQ ID NO: 2063678 - RNA, 15 nt, Human
cagcugaaauacuga

SEQ ID NO: 2063679 - RNA, 11 nt, Human
cagcugcucug

SEQ ID NO: 2063680 - RNA, 12 nt, Human
cagcugcucugc

SEQ ID NO: 2063681 - RNA, 14 nt, Human
cagcugcucugccc

SEQ ID NO: 2063682 - RNA, 15 nt, Human
cagcugcucugccca

SEQ ID NO: 2063683 - RNA, 16 nt, Human
cagcugcucugcccag

SEQ ID NO: 2063684 - RNA, 17 nt, Human
cagcugcucugcccaga

SEQ ID NO: 2063685 - RNA, 18 nt, Human
cagcugcucugcccagag

SEQ ID NO: 2063686 - RNA, 19 nt, Human
cagcugcucugcccagagc

SEQ ID NO: 2063687 - RNA, 20 nt, Human
cagcugcucugcccagagcu

SEQ ID NO: 2063688 - RNA, 21 nt, Human
cagcugcucugcccagagcug

SEQ ID NO: 2063689 - RNA, 22 nt, Human
cagcugcucugcccagagcugg

SEQ ID NO: 2063690 - RNA, 23 nt, Human
cagcugcucugcccagagcuggg

SEQ ID NO: 2063691 - RNA, 17 nt, Human
cagcugcuacuacuccu

SEQ ID NO: 2063692 - RNA, 13 nt, Human
cagcugcuccccu

SEQ ID NO: 2063693 - RNA, 15 nt, Human
cagcugcuccccucc

SEQ ID NO: 2063694 - RNA, 16 nt, Human
cagcugcuccccuccc

SEQ ID NO: 2063695 - RNA, 17 nt, Human
cagcugcuccccucccu

SEQ ID NO: 2063696 - RNA, 18 nt, Human
cagcugcuccccucccuc

SEQ ID NO: 2063697 - RNA, 20 nt, Human
cagcugcuccccucccuccu

SEQ ID NO: 2063698 - RNA, 21 nt, Human
cagcugcuccccucccuccuc

SEQ ID NO: 2063699 - RNA, 12 nt, Human
cagcucaggcac

SEQ ID NO: 2063700 - RNA, 21 nt, Human
cagcucaggcacacuucuucu

SEQ ID NO: 2063701 - RNA, 23 nt, Human
cagcuccuucuguccuacucugu

SEQ ID NO: 2063702 - RNA, 21 nt, Human
cagcuccuucuguccuacucu

SEQ ID NO: 2063703 - RNA, 17 nt, Human
cagcuccuucuguccua

SEQ ID NO: 2063704 - RNA, 16 nt, Human
cagcuccuucuguccu

SEQ ID NO: 2063705 - RNA, 23 nt, Human
cagcucaggcacacuucuucuug

SEQ ID NO: 2063706 - RNA, 23 nt, Human
cagcucaggcuguuuuugggugc

SEQ ID NO: 2063707 - RNA, 12 nt, Human
cagcucaguccc

SEQ ID NO: 2063708 - RNA, 18 nt, Human
cagcucagucccaucaga

SEQ ID NO: 2063709 - RNA, 22 nt, Human
cagcucauuauaaugucauuaa

SEQ ID NO: 2063710 - RNA, 16 nt, Human
cagcucagucuucccu

SEQ ID NO: 2063711 - RNA, 15 nt, Human
cagcucugcaagaau

SEQ ID NO: 2063712 - RNA, 16 nt, Human
cagcucugcaagaauu

SEQ ID NO: 2063713 - RNA, 19 nt, Human
cagcucucccucuggcccu

SEQ ID NO: 2063714 - RNA, 20 nt, Human
cagcucucccucuggcccug

SEQ ID NO: 2063715 - RNA, 21 nt, Human
cagcucucccucuggcccugc

SEQ ID NO: 2063716 - RNA, 23 nt, Human
cagcucucccucuggcccugccu

SEQ ID NO: 2063717 - RNA, 21 nt, Human
cagcucugcaagaauugaagc

SEQ ID NO: 2063718 - RNA, 12 nt, Human
cagcucugcuug

SEQ ID NO: 2063719 - RNA, 13 nt, Human
cagcucugcuugc

SEQ ID NO: 2063720 - RNA, 22 nt, Human
cagcucugcuugccgaaacugg

SEQ ID NO: 2063721 - RNA, 23 nt, Human
cagcucugcuugccgaaacugga

SEQ ID NO: 2063722 - RNA, 21 nt, Human
cagcucuagacaacccugcaa

SEQ ID NO: 2063723 - RNA, 13 nt, Human
cagcucucagcca

SEQ ID NO: 2063724 - RNA, 12 nt, Human
cagcucucagcc

SEQ ID NO: 2063725 - RNA, 17 nt, Human
cagcucuagacaacccu

SEQ ID NO: 2063726 - RNA, 20 nt, Human
cagcucuagacaacccugca

SEQ ID NO: 2063727 - RNA, 12 nt, Human
cagcucucccuc

SEQ ID NO: 2063728 - RNA, 14 nt, Human
cagcucucccucug

SEQ ID NO: 2063729 - RNA, 15 nt, Human
cagcucucccucugg

SEQ ID NO: 2063730 - RNA, 16 nt, Human
cagcucucccucuggc

SEQ ID NO: 2063731 - RNA, 17 nt, Human
cagcucucccucuggcc

SEQ ID NO: 2063732 - RNA, 18 nt, Human
cagcucucccucuggccc

SEQ ID NO: 2063733 - RNA, 16 nt, Human
cagcucuccccuucuc

SEQ ID NO: 2063734 - RNA, 23 nt, Human
cagcucuucuccaggcuguaucc

SEQ ID NO: 2063735 - RNA, 13 nt, Human
cagcucuucugcc

SEQ ID NO: 2063736 - RNA, 22 nt, Human
cagcucuucugccggcccuggg

SEQ ID NO: 2063737 - RNA, 23 nt, Human
cagcucuucugccggcccugggg

SEQ ID NO: 2063738 - RNA, 19 nt, Human
cagcucuucuccaggcugu

SEQ ID NO: 2063739 - RNA, 18 nt, Human
cagcucuucuccaggcug

SEQ ID NO: 2063740 - RNA, 17 nt, Human
cagcucuucuccaggcu

SEQ ID NO: 2063741 - RNA, 16 nt, Human
cagcucuucuccaggc

SEQ ID NO: 2063742 - RNA, 15 nt, Human
cagcucuucuccagg

SEQ ID NO: 2063743 - RNA, 14 nt, Human
cagcucuucuccag

SEQ ID NO: 2063744 - RNA, 13 nt, Human
cagcucuucucca

SEQ ID NO: 2063745 - RNA, 23 nt, Human
cagcucuguccugggagugagcu

SEQ ID NO: 2063746 - RNA, 17 nt, Human
cagcucuguguugccau

SEQ ID NO: 2063747 - RNA, 21 nt, Human
cagcucuguguugccaugugu

SEQ ID NO: 2063748 - RNA, 18 nt, Human
cagcucuguccugggagu

SEQ ID NO: 2063749 - RNA, 17 nt, Human
cagcucuguccugggag

SEQ ID NO: 2063750 - RNA, 16 nt, Human
cagcucuguccuggga

SEQ ID NO: 2063751 - RNA, 14 nt, Human
cagcucuguccugg

SEQ ID NO: 2063752 - RNA, 13 nt, Human
cagcucuguccug

SEQ ID NO: 2063753 - RNA, 12 nt, Human
cagcucuguccu

SEQ ID NO: 2063754 - RNA, 13 nt, Human
cagcucuggcuca

SEQ ID NO: 2063755 - RNA, 17 nt, Human
cagcucuggcucacaga

SEQ ID NO: 2063756 - RNA, 20 nt, Human
cagcucuggcucacagacug

SEQ ID NO: 2063757 - RNA, 12 nt, Human
cagcucuggcuu

SEQ ID NO: 2063758 - RNA, 14 nt, Human
cagcucuggcuucc

SEQ ID NO: 2063759 - RNA, 17 nt, Human
caggaccuguggccaag

SEQ ID NO: 2063760 - RNA, 13 nt, Human
caggaccugacua

SEQ ID NO: 2063761 - RNA, 20 nt, Human
caggaauuugaagcugcagu

SEQ ID NO: 2063762 - RNA, 15 nt, Human
caggacaacgaggaa

SEQ ID NO: 2063763 - RNA, 16 nt, Human
caggacaacgaggaag

SEQ ID NO: 2063764 - RNA, 18 nt, Human
caggacaacgaggaagcc

SEQ ID NO: 2063765 - RNA, 19 nt, Human
caggacaacgaggaagccc

SEQ ID NO: 2063766 - RNA, 18 nt, Human
caggaauguuaaagucag

SEQ ID NO: 2063767 - RNA, 19 nt, Human
caggaauguuaaagucagu

SEQ ID NO: 2063768 - RNA, 17 nt, Human
caggaauguguggcaga

SEQ ID NO: 2063769 - RNA, 16 nt, Human
caggaagucuucaggg

SEQ ID NO: 2063770 - RNA, 10 nt, Human
caggaaguga

SEQ ID NO: 2063771 - RNA, 12 nt, Human
caggaauaaggc

SEQ ID NO: 2063772 - RNA, 23 nt, Human
caggaauaaggccuuaauauguu

SEQ ID NO: 2063773 - RNA, 22 nt, Human
caggaagggucaaaacauuuua

SEQ ID NO: 2063774 - RNA, 21 nt, Human
caggaagggcaggaaggagag

SEQ ID NO: 2063775 - RNA, 22 nt, Human
caggaagggccuacagcccauu

SEQ ID NO: 2063776 - RNA, 15 nt, Human
caggaaggggcugga

SEQ ID NO: 2063777 - RNA, 23 nt, Human
caggaaggggcuggacuggcugu

SEQ ID NO: 2063778 - RNA, 19 nt, Human
caggaaggcugagaggaga

SEQ ID NO: 2063779 - RNA, 17 nt, Human
caggaaggagagccugc

SEQ ID NO: 2063780 - RNA, 18 nt, Human
caggaaggagagccugcu

SEQ ID NO: 2063781 - RNA, 18 nt, Human
caggaaggaugagcauuu

SEQ ID NO: 2063782 - RNA, 16 nt, Human
caggaagcaccccaug

SEQ ID NO: 2063783 - RNA, 17 nt, Human
caggaagcaccccaugc

SEQ ID NO: 2063784 - RNA, 14 nt, Human
caggaagcacccca

SEQ ID NO: 2063785 - RNA, 15 nt, Human
caggaagcaccccau

SEQ ID NO: 2063786 - RNA, 19 nt, Human
caggaacuagacugccugg

SEQ ID NO: 2063787 - RNA, 13 nt, Human
caggaaccuggac

SEQ ID NO: 2063788 - RNA, 15 nt, Human
caggaaccuggacca

SEQ ID NO: 2063789 - RNA, 19 nt, Human
caggaaccuggaccaaagc

SEQ ID NO: 2063790 - RNA, 21 nt, Human
caggaaccuggaccaaagcug

SEQ ID NO: 2063791 - RNA, 12 nt, Human
caggaagcucag

SEQ ID NO: 2063792 - RNA, 21 nt, Human
caggaagccgugcccugcccc

SEQ ID NO: 2063793 - RNA, 17 nt, Human
caggaagcucagacugg

SEQ ID NO: 2063794 - RNA, 12 nt, Human
caggaaggagag

SEQ ID NO: 2063795 - RNA, 14 nt, Human
caggaaggaaguca

SEQ ID NO: 2063796 - RNA, 13 nt, Human
caggaaggagagc

SEQ ID NO: 2063797 - RNA, 14 nt, Human
caggaaggagagcc

SEQ ID NO: 2063798 - RNA, 15 nt, Human
caggaaggagagccu

SEQ ID NO: 2063799 - RNA, 16 nt, Human
caggaaggagagccug

SEQ ID NO: 2063800 - RNA, 18 nt, Human
caggaagcugcuccgugc

SEQ ID NO: 2063801 - RNA, 15 nt, Human
caggaagcugcuccg

SEQ ID NO: 2063802 - RNA, 17 nt, Human
caggaagcugcuccgug

SEQ ID NO: 2063803 - RNA, 22 nt, Human
caggaagcugugagagcaguuu

SEQ ID NO: 2063804 - RNA, 14 nt, Human
caggaagcugugag

SEQ ID NO: 2063805 - RNA, 13 nt, Human
caggaagcuguga

SEQ ID NO: 2063806 - RNA, 20 nt, Human
cagcuuguaaauagcucagg

SEQ ID NO: 2063807 - RNA, 19 nt, Human
cagcuuguaaauagcucag

SEQ ID NO: 2063808 - RNA, 18 nt, Human
cagcuuguaaauagcuca

SEQ ID NO: 2063809 - RNA, 22 nt, Human
cagcuuguaaauagcucaggug

SEQ ID NO: 2063810 - RNA, 21 nt, Human
cagcuuguaaauagcucaggu

SEQ ID NO: 2063811 - RNA, 17 nt, Human
cagcuuguuauuuauaa

SEQ ID NO: 2063812 - RNA, 17 nt, Human
cagcuuucaugauuagc

SEQ ID NO: 2063813 - RNA, 20 nt, Human
cagcuuucaugauuagcaag

SEQ ID NO: 2063814 - RNA, 16 nt, Human
cagcuuucaugauuag

SEQ ID NO: 2063815 - RNA, 12 nt, Human
cagcuuuguuug

SEQ ID NO: 2063816 - RNA, 21 nt, Human
cagcuuuguuuguugucagcu

SEQ ID NO: 2063817 - RNA, 22 nt, Human
cagcuuuguuuguugucagcug

SEQ ID NO: 2063818 - RNA, 23 nt, Human
cagcuuuguuuguugucagcuga

SEQ ID NO: 2063819 - RNA, 18 nt, Human
cagcuuugccuuccacgc

SEQ ID NO: 2063820 - RNA, 15 nt, Human
cagcuuugccuucca

SEQ ID NO: 2063821 - RNA, 16 nt, Human
cagcuuugccuuccac

SEQ ID NO: 2063822 - RNA, 17 nt, Human
cagcuuggggccaucgg

SEQ ID NO: 2063823 - RNA, 14 nt, Human
cagcuuugccuucc

SEQ ID NO: 2063824 - RNA, 13 nt, Human
cagcuuuuugucu

SEQ ID NO: 2063825 - RNA, 16 nt, Human
cagcuuuuugucuuuu

SEQ ID NO: 2063826 - RNA, 19 nt, Human
cagcuuuuugucuuuucug

SEQ ID NO: 2063827 - RNA, 18 nt, Human
cagcuuuuaguacccacc

SEQ ID NO: 2063828 - RNA, 19 nt, Human
cagcuuuuaguacccaccu

SEQ ID NO: 2063829 - RNA, 20 nt, Human
cagcuuuuaguacccaccug

SEQ ID NO: 2063830 - RNA, 21 nt, Human
cagcuuuuaguacccaccuga

SEQ ID NO: 2063831 - RNA, 22 nt, Human
cagcuuuuaguacccaccugag

SEQ ID NO: 2063832 - RNA, 23 nt, Human
cagcuuuuaguacccaccugagc

SEQ ID NO: 2063833 - RNA, 14 nt, Human
caggaaaaaggaca

SEQ ID NO: 2063834 - RNA, 16 nt, Human
caggaaaaaggacagg

SEQ ID NO: 2063835 - RNA, 22 nt, Human
caggaaaaaggacaggcagaaa

SEQ ID NO: 2063836 - RNA, 14 nt, Human
caggaaaaaaacuu

SEQ ID NO: 2063837 - RNA, 15 nt, Human
caggaaaaaaacuuu

SEQ ID NO: 2063838 - RNA, 16 nt, Human
caggaaaaaaacuuuu

SEQ ID NO: 2063839 - RNA, 18 nt, Human
caggaaaaaaacuuuuau

SEQ ID NO: 2063840 - RNA, 19 nt, Human
caggaaaacugacagagga

SEQ ID NO: 2063841 - RNA, 20 nt, Human
caggaaaacugacagaggag

SEQ ID NO: 2063842 - RNA, 15 nt, Human
caggaacagaaggau

SEQ ID NO: 2063843 - RNA, 18 nt, Human
caggaacagaaggaugaa

SEQ ID NO: 2063844 - RNA, 14 nt, Human
caggaacagcuaug

SEQ ID NO: 2063845 - RNA, 20 nt, Human
caggaacagcuaugggagcc

SEQ ID NO: 2063846 - RNA, 22 nt, Human
caggaacagcuaugggagcccc

SEQ ID NO: 2063847 - RNA, 23 nt, Human
caggaacagcuaugggagcccca

SEQ ID NO: 2063848 - RNA, 18 nt, Human
cagcuuccccucucuccu

SEQ ID NO: 2063849 - RNA, 22 nt, Human
cagcuuccccucucuccuccug

SEQ ID NO: 2063850 - RNA, 23 nt, Human
cagcuuccccucucuccuccugc

SEQ ID NO: 2063851 - RNA, 21 nt, Human
cagcuucauuuccugugucuu

SEQ ID NO: 2063852 - RNA, 20 nt, Human
cagcuucauuuccugugucu

SEQ ID NO: 2063853 - RNA, 21 nt, Human
cagcuguaagaagagacuggg

SEQ ID NO: 2063854 - RNA, 22 nt, Human
cagcuguaagaagagacuggga

SEQ ID NO: 2063855 - RNA, 19 nt, Human
cagcuucauuuccuguguc

SEQ ID NO: 2063856 - RNA, 19 nt, Human
cagcuucugccacauaaaa

SEQ ID NO: 2063857 - RNA, 21 nt, Human
cagcuucucauccugcaggca

SEQ ID NO: 2063858 - RNA, 19 nt, Human
cagcuucucauccugcagg

SEQ ID NO: 2063859 - RNA, 20 nt, Human
cagcuucucauccugcaggc

SEQ ID NO: 2063860 - RNA, 18 nt, Human
cagcuucucauccugcag

SEQ ID NO: 2063861 - RNA, 22 nt, Human
cagcuucuuaauauaacugccu

SEQ ID NO: 2063862 - RNA, 15 nt, Human
cagcuugaggguugg

SEQ ID NO: 2063863 - RNA, 14 nt, Human
cagcuugaggguug

SEQ ID NO: 2063864 - RNA, 21 nt, Human
cagcuugaggguugggcuggu

SEQ ID NO: 2063865 - RNA, 20 nt, Human
cagcuugaggguugggcugg

SEQ ID NO: 2063866 - RNA, 19 nt, Human
cagcuugaggguugggcug

SEQ ID NO: 2063867 - RNA, 18 nt, Human
cagcuugaggguugggcu

SEQ ID NO: 2063868 - RNA, 17 nt, Human
cagcuugcugcccuagg

SEQ ID NO: 2063869 - RNA, 19 nt, Human
cagcuugcugcccuaggcu

SEQ ID NO: 2063870 - RNA, 15 nt, Human
cagcuugcucuucag

SEQ ID NO: 2063871 - RNA, 23 nt, Human
cagcuugcucuucagugggagaa

SEQ ID NO: 2063872 - RNA, 13 nt, Human
cagcuugcugcac

SEQ ID NO: 2063873 - RNA, 14 nt, Human
cagcuugcugcacc

SEQ ID NO: 2063874 - RNA, 14 nt, Human
cagcuugcugcccu

SEQ ID NO: 2063875 - RNA, 22 nt, Human
cagcuugcguuagaaugaggag

SEQ ID NO: 2063876 - RNA, 14 nt, Human
cagcaagguggagu

SEQ ID NO: 2063877 - RNA, 15 nt, Human
cagcaagguggagug

SEQ ID NO: 2063878 - RNA, 12 nt, Human
cagcaagugaga

SEQ ID NO: 2063879 - RNA, 17 nt, Human
cagcaagugagagcugg

SEQ ID NO: 2063880 - RNA, 16 nt, Human
cagcaagugagagcug

SEQ ID NO: 2063881 - RNA, 15 nt, Human
cagcaagugagagcu

SEQ ID NO: 2063882 - RNA, 14 nt, Human
cagcaagugagagc

SEQ ID NO: 2063883 - RNA, 12 nt, Human
cagcaaggggcu

SEQ ID NO: 2063884 - RNA, 14 nt, Human
cagcaaggggcucu

SEQ ID NO: 2063885 - RNA, 16 nt, Human
cagcaaggggcucugc

SEQ ID NO: 2063886 - RNA, 17 nt, Human
cagcaaggggcucugcc

SEQ ID NO: 2063887 - RNA, 20 nt, Human
cagcaaggggcucugcccuc

SEQ ID NO: 2063888 - RNA, 20 nt, Human
cagcaacuugucuuuuucug

SEQ ID NO: 2063889 - RNA, 21 nt, Human
cagcaagugagagcugggugu

SEQ ID NO: 2063890 - RNA, 19 nt, Human
cagcaagugagagcugggu

SEQ ID NO: 2063891 - RNA, 13 nt, Human
cagcaauauuuaa

SEQ ID NO: 2063892 - RNA, 17 nt, Human
cagcaauauuuaaggag

SEQ ID NO: 2063893 - RNA, 19 nt, Human
cagcaauauuuaaggagau

SEQ ID NO: 2063894 - RNA, 14 nt, Human
cagcacugucucag

SEQ ID NO: 2063895 - RNA, 17 nt, Human
cagcagaucccagcuca

SEQ ID NO: 2063896 - RNA, 18 nt, Human
cagcagaucccagcucac

SEQ ID NO: 2063897 - RNA, 21 nt, Human
cagcagaucccagcucacguc

SEQ ID NO: 2063898 - RNA, 12 nt, Human
cagcagaucugu

SEQ ID NO: 2063899 - RNA, 13 nt, Human
cagcagagugugg

SEQ ID NO: 2063900 - RNA, 15 nt, Human
cagcagaucccagcu

SEQ ID NO: 2063901 - RNA, 16 nt, Human
cagcagaucccagcuc

SEQ ID NO: 2063902 - RNA, 23 nt, Human
cagcagccccugcacaaagcccu

SEQ ID NO: 2063903 - RNA, 16 nt, Human
cagcagccccugcaca

SEQ ID NO: 2063904 - RNA, 13 nt, Human
cagcagccccugc

SEQ ID NO: 2063905 - RNA, 18 nt, Human
cagcagcccuccucaccc

SEQ ID NO: 2063906 - RNA, 13 nt, Human
cagcagccucuga

SEQ ID NO: 2063907 - RNA, 16 nt, Human
cagcagccucugaagu

SEQ ID NO: 2063908 - RNA, 18 nt, Human
cagcagccucugaaguug

SEQ ID NO: 2063909 - RNA, 23 nt, Human
cagcagccucugaaguuggacag

SEQ ID NO: 2063910 - RNA, 11 nt, Human
cagcagcccuc

SEQ ID NO: 2063911 - RNA, 12 nt, Human
cagcagcccucc

SEQ ID NO: 2063912 - RNA, 14 nt, Human
cagcagcccuccuc

SEQ ID NO: 2063913 - RNA, 15 nt, Human
cagcagcccuccuca

SEQ ID NO: 2063914 - RNA, 17 nt, Human
cagcagcccuccucacc

SEQ ID NO: 2063915 - RNA, 19 nt, Human
cagcagcccuccucacccc

SEQ ID NO: 2063916 - RNA, 20 nt, Human
cagcagccagcucucagcca

SEQ ID NO: 2063917 - RNA, 21 nt, Human
cagcagccagcucucagccaa

SEQ ID NO: 2063918 - RNA, 13 nt, Human
cagcagccagcuc

SEQ ID NO: 2063919 - RNA, 14 nt, Human
cagcagccagcucu

SEQ ID NO: 2063920 - RNA, 15 nt, Human
cagcagccagcucuc

SEQ ID NO: 2063921 - RNA, 17 nt, Human
cagcagccagcucucag

SEQ ID NO: 2063922 - RNA, 18 nt, Human
cagcagccagcucucagc

SEQ ID NO: 2063923 - RNA, 19 nt, Human
cagcagccagcucucagcc

SEQ ID NO: 2063924 - RNA, 14 nt, Human
cagcagacuaugaa

SEQ ID NO: 2063925 - RNA, 22 nt, Human
cagcacuuugggaggcugaggu

SEQ ID NO: 2063926 - RNA, 23 nt, Human
cagcacuuugggaggcugaggug

SEQ ID NO: 2063927 - RNA, 20 nt, Human
cagcacuuugggaggccaag

SEQ ID NO: 2063928 - RNA, 22 nt, Human
cagcacuuugggaggccaagga

SEQ ID NO: 2063929 - RNA, 23 nt, Human
cagcacuuugggaggccaaggag

SEQ ID NO: 2063930 - RNA, 18 nt, Human
cagcacuuugggaggcug

SEQ ID NO: 2063931 - RNA, 19 nt, Human
cagcacuuugggaggcuga

SEQ ID NO: 2063932 - RNA, 20 nt, Human
cagcacuuugggaggcugag

SEQ ID NO: 2063933 - RNA, 22 nt, Human
cagcacuuugggaggcugaggc

SEQ ID NO: 2063934 - RNA, 23 nt, Human
cagcacuuugggaggcugaggcg

SEQ ID NO: 2063935 - RNA, 15 nt, Human
cagcacuuugggagg

SEQ ID NO: 2063936 - RNA, 16 nt, Human
cagcacuuugggaggc

SEQ ID NO: 2063937 - RNA, 18 nt, Human
cagcacuuugggaggcca

SEQ ID NO: 2063938 - RNA, 15 nt, Human
cagcacugucucagu

SEQ ID NO: 2063939 - RNA, 23 nt, Human
cagcacugucucaguuucacuuu

SEQ ID NO: 2063940 - RNA, 19 nt, Human
cagauuuuuuacagcugcc

SEQ ID NO: 2063941 - RNA, 22 nt, Human
cagauuuuuuacagcugccugc

SEQ ID NO: 2063942 - RNA, 12 nt, Human
cagauuuuccug

SEQ ID NO: 2063943 - RNA, 14 nt, Human
cagauuuuccugug

SEQ ID NO: 2063944 - RNA, 14 nt, Human
cagauuuuacaaaa

SEQ ID NO: 2063945 - RNA, 16 nt, Human
cagauuuuacaaaaga

SEQ ID NO: 2063946 - RNA, 17 nt, Human
cagauuuuacaaaagau

SEQ ID NO: 2063947 - RNA, 18 nt, Human
cagauuuuacaaaagaug

SEQ ID NO: 2063948 - RNA, 19 nt, Human
cagauuuuacaaaagaugu

SEQ ID NO: 2063949 - RNA, 23 nt, Human
cagauuuuaauuuugaauaaaua

SEQ ID NO: 2063950 - RNA, 15 nt, Human
cagauuuuaauuuug

SEQ ID NO: 2063951 - RNA, 18 nt, Human
cagcaaaagaugcuucuc

SEQ ID NO: 2063952 - RNA, 12 nt, Human
cagcaaaaccau

SEQ ID NO: 2063953 - RNA, 13 nt, Human
cagcaaaaccauu

SEQ ID NO: 2063954 - RNA, 17 nt, Human
cagcaaaaccauugcuu

SEQ ID NO: 2063955 - RNA, 18 nt, Human
cagcaaaaccauugcuuc

SEQ ID NO: 2063956 - RNA, 19 nt, Human
cagcaaaaccauugcuuca

SEQ ID NO: 2063957 - RNA, 20 nt, Human
cagcaaaaccauugcuucac

SEQ ID NO: 2063958 - RNA, 15 nt, Human
cagcaaaacuccauc

SEQ ID NO: 2063959 - RNA, 14 nt, Human
cagcaaauuuauaa

SEQ ID NO: 2063960 - RNA, 16 nt, Human
cagcaaauuuauaauu

SEQ ID NO: 2063961 - RNA, 17 nt, Human
cagcaaauuuauaauuu

SEQ ID NO: 2063962 - RNA, 19 nt, Human
cagcaaauuuauaauuuua

SEQ ID NO: 2063963 - RNA, 20 nt, Human
cagcaacggggaggccaagu

SEQ ID NO: 2063964 - RNA, 14 nt, Human
cagcaacuccaacu

SEQ ID NO: 2063965 - RNA, 15 nt, Human
cagcaacuugucuuu

SEQ ID NO: 2063966 - RNA, 18 nt, Human
cagcaacuugucuuuuuc

SEQ ID NO: 2063967 - RNA, 19 nt, Human
cagcaacuugucuuuuucu

SEQ ID NO: 2063968 - RNA, 22 nt, Human
cagcaacuugucuuuuucugga

SEQ ID NO: 2063969 - RNA, 14 nt, Human
cagcaacacaaugu

SEQ ID NO: 2063970 - RNA, 14 nt, Human
cagcaaccagagca

SEQ ID NO: 2063971 - RNA, 15 nt, Human
cagcaaccagagcac

SEQ ID NO: 2063972 - RNA, 16 nt, Human
cagcaaccagagcacu

SEQ ID NO: 2063973 - RNA, 17 nt, Human
cagcaaccagagcacug

SEQ ID NO: 2063974 - RNA, 18 nt, Human
cagcaaccagagcacugu

SEQ ID NO: 2063975 - RNA, 19 nt, Human
cagcaaccagagcacugua

SEQ ID NO: 2063976 - RNA, 20 nt, Human
cagcaaccagagcacuguau

SEQ ID NO: 2063977 - RNA, 21 nt, Human
cagcaaccagagcacuguaua

SEQ ID NO: 2063978 - RNA, 14 nt, Human
cagcaacccuccua

SEQ ID NO: 2063979 - RNA, 13 nt, Human
cagcaaccuguaa

SEQ ID NO: 2063980 - RNA, 18 nt, Human
cagcaaccuguaagacug

SEQ ID NO: 2063981 - RNA, 19 nt, Human
cagcaaccuguaagacuga

SEQ ID NO: 2063982 - RNA, 23 nt, Human
cagauguugaaugcccacaggca

SEQ ID NO: 2063983 - RNA, 15 nt, Human
cagauucauuuuucu

SEQ ID NO: 2063984 - RNA, 21 nt, Human
cagauuccaggcgaugugcaa

SEQ ID NO: 2063985 - RNA, 23 nt, Human
cagauuccaggcgaugugcaagu

SEQ ID NO: 2063986 - RNA, 14 nt, Human
cagauuccuuuccc

SEQ ID NO: 2063987 - RNA, 16 nt, Human
cagauuccuuucccuu

SEQ ID NO: 2063988 - RNA, 20 nt, Human
cagauuccuuucccuuuagc

SEQ ID NO: 2063989 - RNA, 13 nt, Human
cagauucaauuuu

SEQ ID NO: 2063990 - RNA, 12 nt, Human
cagaugcuucug

SEQ ID NO: 2063991 - RNA, 13 nt, Human
cagaugcuucugg

SEQ ID NO: 2063992 - RNA, 17 nt, Human
cagaugcuucugggaga

SEQ ID NO: 2063993 - RNA, 22 nt, Human
cagaugccuccaccccccagaa

SEQ ID NO: 2063994 - RNA, 14 nt, Human
cagaugccuccacc

SEQ ID NO: 2063995 - RNA, 18 nt, Human
cagaugccccagagcugu

SEQ ID NO: 2063996 - RNA, 13 nt, Human
cagaugccagagc

SEQ ID NO: 2063997 - RNA, 14 nt, Human
cagaugccagagca

SEQ ID NO: 2063998 - RNA, 18 nt, Human
cagaugccagagcaaagg

SEQ ID NO: 2063999 - RNA, 15 nt, Human
cagaugcccagaggg

SEQ ID NO: 2064000 - RNA, 19 nt, Human
cagaugcccagagggccca

SEQ ID NO: 2064001 - RNA, 20 nt, Human
cagaugcccagagggcccag

SEQ ID NO: 2064002 - RNA, 22 nt, Human
cagaugcccagagggcccaggc

SEQ ID NO: 2064003 - RNA, 13 nt, Human
cagaugccccaga

SEQ ID NO: 2064004 - RNA, 16 nt, Human
cagaugccccagagcu

SEQ ID NO: 2064005 - RNA, 22 nt, Human
cagauggauuugccugugccac

SEQ ID NO: 2064006 - RNA, 21 nt, Human
cagauggaaccgcaggaagcu

SEQ ID NO: 2064007 - RNA, 22 nt, Human
cagauggaaccgcaggaagcug

SEQ ID NO: 2064008 - RNA, 15 nt, Human
cagauggauuugccu

SEQ ID NO: 2064009 - RNA, 21 nt, Human
cagauggauuugccugugcca

SEQ ID NO: 2064010 - RNA, 14 nt, Human
cagauggaaccgca

SEQ ID NO: 2064011 - RNA, 18 nt, Human
cagauggaaccgcaggaa

SEQ ID NO: 2064012 - RNA, 19 nt, Human
cagauggaaccgcaggaag

SEQ ID NO: 2064013 - RNA, 20 nt, Human
cagauggaaccgcaggaagc

SEQ ID NO: 2064014 - RNA, 11 nt, Human
cagcccagcug

SEQ ID NO: 2064015 - RNA, 13 nt, Human
cagcccagcugcu

SEQ ID NO: 2064016 - RNA, 16 nt, Human
cagcccagcugcucug

SEQ ID NO: 2064017 - RNA, 17 nt, Human
cagcccagcugcucugc

SEQ ID NO: 2064018 - RNA, 18 nt, Human
cagcccagcugcucugcc

SEQ ID NO: 2064019 - RNA, 19 nt, Human
cagcccagcugcucugccc

SEQ ID NO: 2064020 - RNA, 20 nt, Human
cagcccagcugcucugccca

SEQ ID NO: 2064021 - RNA, 21 nt, Human
cagcccagcugcucugcccag

SEQ ID NO: 2064022 - RNA, 23 nt, Human
cagcccagcugcucugcccagag

SEQ ID NO: 2064023 - RNA, 13 nt, Human
cagcccagcccag

SEQ ID NO: 2064024 - RNA, 14 nt, Human
cagcccagcccagc

SEQ ID NO: 2064025 - RNA, 15 nt, Human
cagcccagcccagcu

SEQ ID NO: 2064026 - RNA, 18 nt, Human
cagcccagcccagcugcu

SEQ ID NO: 2064027 - RNA, 17 nt, Human
cagcccagcccagcugg

SEQ ID NO: 2064028 - RNA, 12 nt, Human
cagcccaggccu

SEQ ID NO: 2064029 - RNA, 13 nt, Human
cagcccaggccuc

SEQ ID NO: 2064030 - RNA, 17 nt, Human
cagcccaggccuccagc

SEQ ID NO: 2064031 - RNA, 20 nt, Human
cagcccaggccuccagcuca

SEQ ID NO: 2064032 - RNA, 18 nt, Human
cagcccacuucugccaua

SEQ ID NO: 2064033 - RNA, 14 nt, Human
cagcccacugagaa

SEQ ID NO: 2064034 - RNA, 16 nt, Human
cagcccacugagaagu

SEQ ID NO: 2064035 - RNA, 15 nt, Human
cagcccacuggauca

SEQ ID NO: 2064036 - RNA, 20 nt, Human
cagcccacuggaucagaaag

SEQ ID NO: 2064037 - RNA, 11 nt, Human
cagcccagggu

SEQ ID NO: 2064038 - RNA, 17 nt, Human
cagcccaggguuccccc

SEQ ID NO: 2064039 - RNA, 18 nt, Human
cagcccaggguuccccca

SEQ ID NO: 2064040 - RNA, 19 nt, Human
cagcccaggguucccccag

SEQ ID NO: 2064041 - RNA, 14 nt, Human
cagcccaucuugcc

SEQ ID NO: 2064042 - RNA, 16 nt, Human
cagcccaucuugccuc

SEQ ID NO: 2064043 - RNA, 17 nt, Human
cagcccaucuugccucc

SEQ ID NO: 2064044 - RNA, 18 nt, Human
cagcccaucuugccucca

SEQ ID NO: 2064045 - RNA, 15 nt, Human
cagcccaugcccacc

SEQ ID NO: 2064046 - RNA, 16 nt, Human
cagcccaugcccaccu

SEQ ID NO: 2064047 - RNA, 17 nt, Human
cagcccaugcccaccug

SEQ ID NO: 2064048 - RNA, 24 nt, Human
cagcccaugcccaccugcccauca

SEQ ID NO: 2064049 - RNA, 19 nt, Human
cagcccaugcccaccugcc

SEQ ID NO: 2064050 - RNA, 21 nt, Human
cagcccaugcccaccugccca

SEQ ID NO: 2064051 - RNA, 18 nt, Human
cagcccauucucucuccu

SEQ ID NO: 2064052 - RNA, 20 nt, Human
cagcccauucucucuccugu

SEQ ID NO: 2064053 - RNA, 21 nt, Human
cagcccauucucucuccuguc

SEQ ID NO: 2064054 - RNA, 22 nt, Human
cagcccauucucucuccugucc

SEQ ID NO: 2064055 - RNA, 15 nt, Human
cagcccacuucugcc

SEQ ID NO: 2064056 - RNA, 11 nt, Human
cagcccacccc

SEQ ID NO: 2064057 - RNA, 12 nt, Human
cagcccaccccc

SEQ ID NO: 2064058 - RNA, 19 nt, Human
cagcccacauagugauggu

SEQ ID NO: 2064059 - RNA, 14 nt, Human
cagcccaccccccu

SEQ ID NO: 2064060 - RNA, 16 nt, Human
cagcccaccccccuca

SEQ ID NO: 2064061 - RNA, 17 nt, Human
cagcccaccccccucau

SEQ ID NO: 2064062 - RNA, 19 nt, Human
cagcccaccccccucauuu

SEQ ID NO: 2064063 - RNA, 15 nt, Human
cagcccaccccucaa

SEQ ID NO: 2064064 - RNA, 18 nt, Human
cagccaugaggaguugcu

SEQ ID NO: 2064065 - RNA, 16 nt, Human
cagccauuaccaugga

SEQ ID NO: 2064066 - RNA, 22 nt, Human
cagccaugaggaguugcuguuu

SEQ ID NO: 2064067 - RNA, 17 nt, Human
cagcccaaagaaggaaa

SEQ ID NO: 2064068 - RNA, 20 nt, Human
cagccauuaccauggagaca

SEQ ID NO: 2064069 - RNA, 15 nt, Human
cagccaccucucuuu

SEQ ID NO: 2064070 - RNA, 16 nt, Human
cagccaccucucuuuu

SEQ ID NO: 2064071 - RNA, 22 nt, Human
cagccaccccgggcucucugcu

SEQ ID NO: 2064072 - RNA, 17 nt, Human
cagccaccccgggcucu

SEQ ID NO: 2064073 - RNA, 20 nt, Human
cagccaccccgggcucucug

SEQ ID NO: 2064074 - RNA, 21 nt, Human
cagccaccccgggcucucugc

SEQ ID NO: 2064075 - RNA, 11 nt, Human
cagccaccccg

SEQ ID NO: 2064076 - RNA, 16 nt, Human
cagcauggugcaugcc

SEQ ID NO: 2064077 - RNA, 22 nt, Human
cagccaagucgguuaguggaag

SEQ ID NO: 2064078 - RNA, 12 nt, Human
cagccacacugu

SEQ ID NO: 2064079 - RNA, 22 nt, Human
cagccacggccaggccagaggg

SEQ ID NO: 2064080 - RNA, 21 nt, Human
cagccacggccaggccagagg

SEQ ID NO: 2064081 - RNA, 19 nt, Human
cagccacggccaggccaga

SEQ ID NO: 2064082 - RNA, 18 nt, Human
cagccacggccaggccag

SEQ ID NO: 2064083 - RNA, 17 nt, Human
cagccacggccaggcca

SEQ ID NO: 2064084 - RNA, 16 nt, Human
cagccacggccaggcc

SEQ ID NO: 2064085 - RNA, 15 nt, Human
cagccacggccaggc

SEQ ID NO: 2064086 - RNA, 14 nt, Human
cagccacggccagg

SEQ ID NO: 2064087 - RNA, 17 nt, Human
cagccagaaccccgagc

SEQ ID NO: 2064088 - RNA, 22 nt, Human
cagccagaaccccgagcccuac

SEQ ID NO: 2064089 - RNA, 15 nt, Human
cagccacaugggaaa

SEQ ID NO: 2064090 - RNA, 23 nt, Human
cagccacggccaggccagaggga

SEQ ID NO: 2064091 - RNA, 16 nt, Human
cagccagugaccugag

SEQ ID NO: 2064092 - RNA, 19 nt, Human
cagccagugaccugaggaa

SEQ ID NO: 2064093 - RNA, 20 nt, Human
cagccagugaccugaggaag

SEQ ID NO: 2064094 - RNA, 21 nt, Human
cagccagugaccugaggaagc

SEQ ID NO: 2064095 - RNA, 22 nt, Human
cagccagugaccugaggaagcg

SEQ ID NO: 2064096 - RNA, 20 nt, Human
cagcauccuggcacccggcc

SEQ ID NO: 2064097 - RNA, 19 nt, Human
cagcauccuggcacccggc

SEQ ID NO: 2064098 - RNA, 21 nt, Human
cagcauccuggcacccggccc

SEQ ID NO: 2064099 - RNA, 22 nt, Human
cagcauccuuaaguaucagaaa

SEQ ID NO: 2064100 - RNA, 23 nt, Human
cagcauccuuuucugcagagggg

SEQ ID NO: 2064101 - RNA, 20 nt, Human
cagcaggguagucugguuuc

SEQ ID NO: 2064102 - RNA, 17 nt, Human
cagcagggccucaaagu

SEQ ID NO: 2064103 - RNA, 13 nt, Human
cagcaucuucuca

SEQ ID NO: 2064104 - RNA, 22 nt, Human
cagcauguguauuuccagugca

SEQ ID NO: 2064105 - RNA, 21 nt, Human
cagcaugaccugugaccagca

SEQ ID NO: 2064106 - RNA, 23 nt, Human
cagcaugaccugugaccagcacu

SEQ ID NO: 2064107 - RNA, 14 nt, Human
cagcauucucacuc

SEQ ID NO: 2064108 - RNA, 15 nt, Human
cagcauucucacucc

SEQ ID NO: 2064109 - RNA, 18 nt, Human
cagcauucuuagccugug

SEQ ID NO: 2064110 - RNA, 21 nt, Human
cagcauucuuagccuguggca

SEQ ID NO: 2064111 - RNA, 19 nt, Human
cagcauucuugucacaaua

SEQ ID NO: 2064112 - RNA, 20 nt, Human
cagcauucuugucacaauaa

SEQ ID NO: 2064113 - RNA, 21 nt, Human
cagcauucuugucacaauaaa

SEQ ID NO: 2064114 - RNA, 22 nt, Human
cagcauucuugucacaauaaau

SEQ ID NO: 2064115 - RNA, 15 nt, Human
cagccaaagccuccu

SEQ ID NO: 2064116 - RNA, 16 nt, Human
cagccaaagccuccuc

SEQ ID NO: 2064117 - RNA, 16 nt, Human
cagccaaacccaugag

SEQ ID NO: 2064118 - RNA, 17 nt, Human
cagccaaacccaugagg

SEQ ID NO: 2064119 - RNA, 19 nt, Human
cagccaaacccaugaggca

SEQ ID NO: 2064120 - RNA, 15 nt, Human
cagccaaacccuguc

SEQ ID NO: 2064121 - RNA, 16 nt, Human
cagccaaacccugucu

SEQ ID NO: 2064122 - RNA, 17 nt, Human
cagccaaacccugucug

SEQ ID NO: 2064123 - RNA, 14 nt, Human
cagcauugcuuucu

SEQ ID NO: 2064124 - RNA, 16 nt, Human
cagcauugcuuucuga

SEQ ID NO: 2064125 - RNA, 12 nt, Human
cagcauugcuuu

SEQ ID NO: 2064126 - RNA, 13 nt, Human
cagcauugcuuuc

SEQ ID NO: 2064127 - RNA, 18 nt, Human
cagccaaagccuccucca

SEQ ID NO: 2064128 - RNA, 21 nt, Human
cagccaaagccuccuccagcc

SEQ ID NO: 2064129 - RNA, 17 nt, Human
cagccaaagauaaucuc

SEQ ID NO: 2064130 - RNA, 20 nt, Human
cagccaaagauaaucucuca

SEQ ID NO: 2064131 - RNA, 22 nt, Human
cagccaaauguaauugaauaaa

SEQ ID NO: 2064132 - RNA, 12 nt, Human
cagccaaccccu

SEQ ID NO: 2064133 - RNA, 14 nt, Human
cagccaaccccugu

SEQ ID NO: 2064134 - RNA, 15 nt, Human
cagccaaccccugug

SEQ ID NO: 2064135 - RNA, 21 nt, Human
cagccaaccccuguggagccc

SEQ ID NO: 2064136 - RNA, 16 nt, Human
cagccaaccccugugg

SEQ ID NO: 2064137 - RNA, 18 nt, Human
cagccaaccccuguggag

SEQ ID NO: 2064138 - RNA, 20 nt, Human
cagccaaccuuacuuacagc

SEQ ID NO: 2064139 - RNA, 21 nt, Human
cagccaacgaguaauuuauug

SEQ ID NO: 2064140 - RNA, 15 nt, Human
cagcagcuugcugca

SEQ ID NO: 2064141 - RNA, 17 nt, Human
cagcagcuuuuaauaca

SEQ ID NO: 2064142 - RNA, 14 nt, Human
cagcagcucaggca

SEQ ID NO: 2064143 - RNA, 15 nt, Human
cagcagcucaggcac

SEQ ID NO: 2064144 - RNA, 16 nt, Human
cagcagcucaggcaca

SEQ ID NO: 2064145 - RNA, 19 nt, Human
cagcagccuggacccugug

SEQ ID NO: 2064146 - RNA, 22 nt, Human
cagcagccuggacccuguggau

SEQ ID NO: 2064147 - RNA, 12 nt, Human
cagcagcucagg

SEQ ID NO: 2064148 - RNA, 13 nt, Human
cagcagcucaggc

SEQ ID NO: 2064149 - RNA, 12 nt, Human
cagcagccugga

SEQ ID NO: 2064150 - RNA, 14 nt, Human
cagcagccuggacc

SEQ ID NO: 2064151 - RNA, 15 nt, Human
cagcagccuggaccc

SEQ ID NO: 2064152 - RNA, 18 nt, Human
cagcagccuggacccugu

SEQ ID NO: 2064153 - RNA, 17 nt, Human
cagcauccuggcacccg

SEQ ID NO: 2064154 - RNA, 16 nt, Human
cagcauccuggcaccc

SEQ ID NO: 2064155 - RNA, 15 nt, Human
cagcauccuggcacc

SEQ ID NO: 2064156 - RNA, 14 nt, Human
cagcauccuggcac

SEQ ID NO: 2064157 - RNA, 20 nt, Human
cagcagggagggcuucugcc

SEQ ID NO: 2064158 - RNA, 14 nt, Human
cagcagggccucaa

SEQ ID NO: 2064159 - RNA, 15 nt, Human
cagcagggccucaaa

SEQ ID NO: 2064160 - RNA, 13 nt, Human
cagcaggcccacc

SEQ ID NO: 2064161 - RNA, 14 nt, Human
cagcaggcccaccu

SEQ ID NO: 2064162 - RNA, 18 nt, Human
cagcaggcccaccuaccu

SEQ ID NO: 2064163 - RNA, 13 nt, Human
cagcaggccuguu

SEQ ID NO: 2064164 - RNA, 21 nt, Human
cagcaggccuguugcuuuuuu

SEQ ID NO: 2064165 - RNA, 23 nt, Human
cagcaggcggccuuuguugcuca

SEQ ID NO: 2064166 - RNA, 18 nt, Human
cagcagggagggcuucug

SEQ ID NO: 2064167 - RNA, 23 nt, Human
cagcccauucucucuccugucca

SEQ ID NO: 2064168 - RNA, 18 nt, Human
cagccuccaugcugccuc

SEQ ID NO: 2064169 - RNA, 14 nt, Human
cagcucaccagccc

SEQ ID NO: 2064170 - RNA, 16 nt, Human
cagucuuggcucacug

SEQ ID NO: 2064171 - RNA, 17 nt, Human
cagucuuguauuaaguu

SEQ ID NO: 2064172 - RNA, 16 nt, Human
cagucuuccaccugga

SEQ ID NO: 2064173 - RNA, 17 nt, Human
cagucuuccaccuggaa

SEQ ID NO: 2064174 - RNA, 18 nt, Human
cagucuuccaccuggaag

SEQ ID NO: 2064175 - RNA, 19 nt, Human
cagucuuccaccuggaagc

SEQ ID NO: 2064176 - RNA, 20 nt, Human
cagucuucccuagggcuggg

SEQ ID NO: 2064177 - RNA, 22 nt, Human
cagucuucccuagggcugggug

SEQ ID NO: 2064178 - RNA, 23 nt, Human
cagucuucccuagggcugggugu

SEQ ID NO: 2064179 - RNA, 15 nt, Human
cagucuugaauuucu

SEQ ID NO: 2064180 - RNA, 22 nt, Human
cagucuugaauuucuaaaaaac

SEQ ID NO: 2064181 - RNA, 23 nt, Human
cagucuugaauuucuaaaaaaca

SEQ ID NO: 2064182 - RNA, 19 nt, Human
cagucuggaaugcaguggu

SEQ ID NO: 2064183 - RNA, 12 nt, Human
cagucuggaggg

SEQ ID NO: 2064184 - RNA, 13 nt, Human
cagucuggagggg

SEQ ID NO: 2064185 - RNA, 16 nt, Human
cagucuggaggggcau

SEQ ID NO: 2064186 - RNA, 18 nt, Human
cagucuggaggggcaugg

SEQ ID NO: 2064187 - RNA, 21 nt, Human
cagucuggaggggcauggcca

SEQ ID NO: 2064188 - RNA, 13 nt, Human
caguccucuuuca

SEQ ID NO: 2064189 - RNA, 17 nt, Human
caguccugccucagccu

SEQ ID NO: 2064190 - RNA, 19 nt, Human
caguccugccucagccucc

SEQ ID NO: 2064191 - RNA, 12 nt, Human
caguccugccug

SEQ ID NO: 2064192 - RNA, 13 nt, Human
caguccugccugg

SEQ ID NO: 2064193 - RNA, 14 nt, Human
caguccugccuggc

SEQ ID NO: 2064194 - RNA, 15 nt, Human
caguccugccuggcc

SEQ ID NO: 2064195 - RNA, 18 nt, Human
caguccugccuggccagg

SEQ ID NO: 2064196 - RNA, 13 nt, Human
caguccugcucuc

SEQ ID NO: 2064197 - RNA, 14 nt, Human
caguccugcucucu

SEQ ID NO: 2064198 - RNA, 17 nt, Human
caguccugcucucuacc

SEQ ID NO: 2064199 - RNA, 18 nt, Human
caguccugcucucuaccc

SEQ ID NO: 2064200 - RNA, 22 nt, Human
caguccugcucucuacccagcc

SEQ ID NO: 2064201 - RNA, 23 nt, Human
caguccugcucucuacccagccc

SEQ ID NO: 2064202 - RNA, 16 nt, Human
caguccugccuggcca

SEQ ID NO: 2064203 - RNA, 17 nt, Human
caguccugccuggccag

SEQ ID NO: 2064204 - RNA, 21 nt, Human
caguccugccuggccaggcag

SEQ ID NO: 2064205 - RNA, 12 nt, Human
caguccugggag

SEQ ID NO: 2064206 - RNA, 13 nt, Human
caguccugggaga

SEQ ID NO: 2064207 - RNA, 21 nt, Human
caguccugggagaaccucagg

SEQ ID NO: 2064208 - RNA, 22 nt, Human
caguccugggagaaccucaggc

SEQ ID NO: 2064209 - RNA, 23 nt, Human
caguccugggagaaccucaggcu

SEQ ID NO: 2064210 - RNA, 18 nt, Human
cagucuggaaugcagugg

SEQ ID NO: 2064211 - RNA, 24 nt, Human
cagugagccgagauugcaccacug

SEQ ID NO: 2064212 - RNA, 13 nt, Human
cagugagccaaga

SEQ ID NO: 2064213 - RNA, 13 nt, Human
cagugagcugaga

SEQ ID NO: 2064214 - RNA, 19 nt, Human
cagugagccgcaucuucuc

SEQ ID NO: 2064215 - RNA, 13 nt, Human
cagugaggcccag

SEQ ID NO: 2064216 - RNA, 22 nt, Human
cagugagcuuggaaaggaccag

SEQ ID NO: 2064217 - RNA, 18 nt, Human
cagugagucgaggacagg

SEQ ID NO: 2064218 - RNA, 17 nt, Human
cagugagucgaggacag

SEQ ID NO: 2064219 - RNA, 21 nt, Human
cagugaggcccagggagaggc

SEQ ID NO: 2064220 - RNA, 23 nt, Human
cagugagggguauaucugggcug

SEQ ID NO: 2064221 - RNA, 16 nt, Human
cagugaggcccaggga

SEQ ID NO: 2064222 - RNA, 17 nt, Human
cagugaggcccagggag

SEQ ID NO: 2064223 - RNA, 16 nt, Human
cagugacgugcaccug

SEQ ID NO: 2064224 - RNA, 17 nt, Human
cagugaccugaggaagc

SEQ ID NO: 2064225 - RNA, 18 nt, Human
cagugaccugaggaagcg

SEQ ID NO: 2064226 - RNA, 19 nt, Human
cagugaccugaggaagcgu

SEQ ID NO: 2064227 - RNA, 15 nt, Human
cagugacaugagacu

SEQ ID NO: 2064228 - RNA, 14 nt, Human
cagugaccugagga

SEQ ID NO: 2064229 - RNA, 16 nt, Human
cagugaccugaggaag

SEQ ID NO: 2064230 - RNA, 17 nt, Human
cagugacgugcaccugu

SEQ ID NO: 2064231 - RNA, 18 nt, Human
cagugacgugcaccugua

SEQ ID NO: 2064232 - RNA, 22 nt, Human
cagugacgugcaccuguacuca

SEQ ID NO: 2064233 - RNA, 20 nt, Human
cagugacuguggccaugguc

SEQ ID NO: 2064234 - RNA, 11 nt, Human
cagucuuccac

SEQ ID NO: 2064235 - RNA, 13 nt, Human
cagugaaaacuag

SEQ ID NO: 2064236 - RNA, 13 nt, Human
cagugaaagcauc

SEQ ID NO: 2064237 - RNA, 14 nt, Human
cagugaaagcauca

SEQ ID NO: 2064238 - RNA, 16 nt, Human
cagugacacuucagag

SEQ ID NO: 2064239 - RNA, 20 nt, Human
cagugaauuguguaggagag

SEQ ID NO: 2064240 - RNA, 17 nt, Human
cagugacacuucagaga

SEQ ID NO: 2064241 - RNA, 18 nt, Human
cagugacacuucagagag

SEQ ID NO: 2064242 - RNA, 19 nt, Human
cagugacacuucagagagc

SEQ ID NO: 2064243 - RNA, 22 nt, Human
cagugacacuucagagagcugg

SEQ ID NO: 2064244 - RNA, 23 nt, Human
cagugacacuucagagagcuggu

SEQ ID NO: 2064245 - RNA, 16 nt, Human
cagugacagaguucac

SEQ ID NO: 2064246 - RNA, 18 nt, Human
cagugacagaguucacua

SEQ ID NO: 2064247 - RNA, 20 nt, Human
cagugacagaguucacuaua

SEQ ID NO: 2064248 - RNA, 23 nt, Human
cagugauguaccaugaaacaaag

SEQ ID NO: 2064249 - RNA, 20 nt, Human
cagugauuaaggucucucuu

SEQ ID NO: 2064250 - RNA, 21 nt, Human
cagugauuaaggucucucuuu

SEQ ID NO: 2064251 - RNA, 23 nt, Human
cagugauuaaggucucucuuugg

SEQ ID NO: 2064252 - RNA, 13 nt, Human
cagugaucuccau

SEQ ID NO: 2064253 - RNA, 15 nt, Human
cagugaucuccauau

SEQ ID NO: 2064254 - RNA, 16 nt, Human
cagugaucuccauaug

SEQ ID NO: 2064255 - RNA, 21 nt, Human
cagugaucuccauauguuaca

SEQ ID NO: 2064256 - RNA, 18 nt, Human
cagugaugcuggaugcuc

SEQ ID NO: 2064257 - RNA, 20 nt, Human
cagugaugcuggaugcuccu

SEQ ID NO: 2064258 - RNA, 15 nt, Human
cagugagguccuggg

SEQ ID NO: 2064259 - RNA, 17 nt, Human
cagugagguccuggggg

SEQ ID NO: 2064260 - RNA, 18 nt, Human
cagugagguccugggggc

SEQ ID NO: 2064261 - RNA, 19 nt, Human
cagugagguccugggggcc

SEQ ID NO: 2064262 - RNA, 20 nt, Human
cagugagguccugggggccu

SEQ ID NO: 2064263 - RNA, 21 nt, Human
cagugagguccugggggccug

SEQ ID NO: 2064264 - RNA, 23 nt, Human
cagugagguccugggggccugac

SEQ ID NO: 2064265 - RNA, 16 nt, Human
cagugagggucuucuu

SEQ ID NO: 2064266 - RNA, 23 nt, Human
cagugagggucuucuuacaugca

SEQ ID NO: 2064267 - RNA, 13 nt, Human
cagugagcugugu

SEQ ID NO: 2064268 - RNA, 15 nt, Human
cagugagucucuuca

SEQ ID NO: 2064269 - RNA, 17 nt, Human
cagugagucucuucaga

SEQ ID NO: 2064270 - RNA, 18 nt, Human
cagugagucucuucagaa

SEQ ID NO: 2064271 - RNA, 23 nt, Human
cagugagucgaggacagggaggu

SEQ ID NO: 2064272 - RNA, 22 nt, Human
cagugagucgaggacagggagg

SEQ ID NO: 2064273 - RNA, 20 nt, Human
cagugagucgaggacaggga

SEQ ID NO: 2064274 - RNA, 19 nt, Human
cagugagucgaggacaggg

SEQ ID NO: 2064275 - RNA, 14 nt, Human
cagugcccuggggc

SEQ ID NO: 2064276 - RNA, 24 nt, Human
cagugcccuggggcugaucucagg

SEQ ID NO: 2064277 - RNA, 15 nt, Human
cagugccgagaagga

SEQ ID NO: 2064278 - RNA, 18 nt, Human
cagugccgagaaggaagc

SEQ ID NO: 2064279 - RNA, 10 nt, Human
cagugccugc

SEQ ID NO: 2064280 - RNA, 11 nt, Human
cagugccugcu

SEQ ID NO: 2064281 - RNA, 13 nt, Human
cagugccugcuga

SEQ ID NO: 2064282 - RNA, 12 nt, Human
cagugccugcug

SEQ ID NO: 2064283 - RNA, 14 nt, Human
cagugccugggaau

SEQ ID NO: 2064284 - RNA, 20 nt, Human
cagugccugggaauguauua

SEQ ID NO: 2064285 - RNA, 18 nt, Human
cagugccugggaauguau

SEQ ID NO: 2064286 - RNA, 17 nt, Human
cagugccuuaccuccug

SEQ ID NO: 2064287 - RNA, 18 nt, Human
cagugccuuaccuccugc

SEQ ID NO: 2064288 - RNA, 19 nt, Human
cagugccuuaccuccugcc

SEQ ID NO: 2064289 - RNA, 20 nt, Human
cagugccuuaccuccugccc

SEQ ID NO: 2064290 - RNA, 21 nt, Human
cagugccuuaccuccugccca

SEQ ID NO: 2064291 - RNA, 22 nt, Human
cagugccuuaccuccugcccag

SEQ ID NO: 2064292 - RNA, 23 nt, Human
cagugccuuaccuccugcccagg

SEQ ID NO: 2064293 - RNA, 17 nt, Human
cagugcuguggccuggg

SEQ ID NO: 2064294 - RNA, 21 nt, Human
cagugcgggaggaauuucuga

SEQ ID NO: 2064295 - RNA, 23 nt, Human
cagugccuuucuucucuccagug

SEQ ID NO: 2064296 - RNA, 24 nt, Human
cagugcgcgugcacguggagagcu

SEQ ID NO: 2064297 - RNA, 14 nt, Human
cagugccuuccaua

SEQ ID NO: 2064298 - RNA, 15 nt, Human
cagugccuuccauaa

SEQ ID NO: 2064299 - RNA, 16 nt, Human
cagugccuuccauaau

SEQ ID NO: 2064300 - RNA, 17 nt, Human
cagugccuuccauaauu

SEQ ID NO: 2064301 - RNA, 23 nt, Human
cagugccuuccauaauuaugaca

SEQ ID NO: 2064302 - RNA, 20 nt, Human
cagucaucguaggugauuug

SEQ ID NO: 2064303 - RNA, 22 nt, Human
cagucaucguaggugauuugaa

SEQ ID NO: 2064304 - RNA, 18 nt, Human
cagucaucuugaccaagc

SEQ ID NO: 2064305 - RNA, 16 nt, Human
cagucaguaauugcca

SEQ ID NO: 2064306 - RNA, 21 nt, Human
cagucaucuugaccaagcagg

SEQ ID NO: 2064307 - RNA, 22 nt, Human
cagucaucuugaccaagcagga

SEQ ID NO: 2064308 - RNA, 24 nt, Human
cagucaucuugaccaagcaggaag

SEQ ID NO: 2064309 - RNA, 21 nt, Human
cagucagguaguugcaauuga

SEQ ID NO: 2064310 - RNA, 19 nt, Human
caguauuacuucugcuaca

SEQ ID NO: 2064311 - RNA, 19 nt, Human
caguauuaaaggggggagg

SEQ ID NO: 2064312 - RNA, 20 nt, Human
caguauuaaaggggggaggg

SEQ ID NO: 2064313 - RNA, 21 nt, Human
caguauuaaaggggggagggg

SEQ ID NO: 2064314 - RNA, 18 nt, Human
caguauuacuucugcuac

SEQ ID NO: 2064315 - RNA, 16 nt, Human
caguauuacuucugcu

SEQ ID NO: 2064316 - RNA, 19 nt, Human
caguauguucaaagucaaa

SEQ ID NO: 2064317 - RNA, 19 nt, Human
cagucccaucagagagcga

SEQ ID NO: 2064318 - RNA, 16 nt, Human
caguccauagcagaga

SEQ ID NO: 2064319 - RNA, 15 nt, Human
caguccaccugagcu

SEQ ID NO: 2064320 - RNA, 16 nt, Human
caguccaccugagcug

SEQ ID NO: 2064321 - RNA, 18 nt, Human
caguccaccugagcugcc

SEQ ID NO: 2064322 - RNA, 20 nt, Human
caguccaccugagcugccau

SEQ ID NO: 2064323 - RNA, 17 nt, Human
caguccaaauguccucc

SEQ ID NO: 2064324 - RNA, 18 nt, Human
caguccaaauguccucca

SEQ ID NO: 2064325 - RNA, 21 nt, Human
caguccaaauguccuccagaa

SEQ ID NO: 2064326 - RNA, 22 nt, Human
caguccaaauguccuccagaag

SEQ ID NO: 2064327 - RNA, 23 nt, Human
caguccaaauguccuccagaagc

SEQ ID NO: 2064328 - RNA, 13 nt, Human
cagucauuaugag

SEQ ID NO: 2064329 - RNA, 23 nt, Human
cagucauuaugagaggcaaugau

SEQ ID NO: 2064330 - RNA, 24 nt, Human
cagucauggcaccaaagccaccag

SEQ ID NO: 2064331 - RNA, 13 nt, Human
caguaucucaggg

SEQ ID NO: 2064332 - RNA, 14 nt, Human
caguauauuuauag

SEQ ID NO: 2064333 - RNA, 15 nt, Human
caguauauuuauagu

SEQ ID NO: 2064334 - RNA, 14 nt, Human
caguaucaggccug

SEQ ID NO: 2064335 - RNA, 17 nt, Human
caguaucaggccugcca

SEQ ID NO: 2064336 - RNA, 20 nt, Human
caguaucaggccugccagac

SEQ ID NO: 2064337 - RNA, 24 nt, Human
caguaucaggccugccagacggca

SEQ ID NO: 2064338 - RNA, 17 nt, Human
caguauacaagauaagc

SEQ ID NO: 2064339 - RNA, 22 nt, Human
caguauacaagauaagcuucca

SEQ ID NO: 2064340 - RNA, 13 nt, Human
caguauauuuaua

SEQ ID NO: 2064341 - RNA, 22 nt, Human
caguauauuuauagucacaaga

SEQ ID NO: 2064342 - RNA, 15 nt, Human
caguaucucagggcc

SEQ ID NO: 2064343 - RNA, 16 nt, Human
caguagugagaagaau

SEQ ID NO: 2064344 - RNA, 22 nt, Human
caguagugagaagaauauuguu

SEQ ID NO: 2064345 - RNA, 22 nt, Human
caguaguagccuccagguuucc

SEQ ID NO: 2064346 - RNA, 17 nt, Human
caguagagucaucucca

SEQ ID NO: 2064347 - RNA, 15 nt, Human
caguagagucaucuc

SEQ ID NO: 2064348 - RNA, 16 nt, Human
caguagagucaucucc

SEQ ID NO: 2064349 - RNA, 18 nt, Human
caguagaaauaauaugca

SEQ ID NO: 2064350 - RNA, 19 nt, Human
caguagaaauaauaugcau

SEQ ID NO: 2064351 - RNA, 20 nt, Human
caguagcuguggugaggugg

SEQ ID NO: 2064352 - RNA, 18 nt, Human
caguagcaguagaugcau

SEQ ID NO: 2064353 - RNA, 17 nt, Human
cagucccccugccccag

SEQ ID NO: 2064354 - RNA, 16 nt, Human
cagucccccugcccca

SEQ ID NO: 2064355 - RNA, 23 nt, Human
caguccccgugaaggagagcccu

SEQ ID NO: 2064356 - RNA, 12 nt, Human
cagucccugggg

SEQ ID NO: 2064357 - RNA, 20 nt, Human
cagucccugggggaagcccu

SEQ ID NO: 2064358 - RNA, 21 nt, Human
cagucccugggggaagcccug

SEQ ID NO: 2064359 - RNA, 22 nt, Human
cagucccugggggaagcccugg

SEQ ID NO: 2064360 - RNA, 14 nt, Human
caggugacagugag

SEQ ID NO: 2064361 - RNA, 16 nt, Human
caggugacagugaggu

SEQ ID NO: 2064362 - RNA, 19 nt, Human
caggugacagugagguccu

SEQ ID NO: 2064363 - RNA, 20 nt, Human
caggugacagugagguccug

SEQ ID NO: 2064364 - RNA, 21 nt, Human
caggugacagugagguccugg

SEQ ID NO: 2064365 - RNA, 17 nt, Human
caggugaccuucuggga

SEQ ID NO: 2064366 - RNA, 22 nt, Human
caggucuccucuuaaaaaauaa

SEQ ID NO: 2064367 - RNA, 21 nt, Human
caggugagaagcagaggaagg

SEQ ID NO: 2064368 - RNA, 18 nt, Human
caggugaccuucugggaa

SEQ ID NO: 2064369 - RNA, 13 nt, Human
caggugagaagca

SEQ ID NO: 2064370 - RNA, 20 nt, Human
caggugagaagcagaggaag

SEQ ID NO: 2064371 - RNA, 15 nt, Human
cagguggccacucca

SEQ ID NO: 2064372 - RNA, 21 nt, Human
cagguggccacuccagacccc

SEQ ID NO: 2064373 - RNA, 19 nt, Human
cagguggccacuccagacc

SEQ ID NO: 2064374 - RNA, 16 nt, Human
cagguggccacuccag

SEQ ID NO: 2064375 - RNA, 14 nt, Human
cagguggcugaccc

SEQ ID NO: 2064376 - RNA, 15 nt, Human
cagguggcugaccca

SEQ ID NO: 2064377 - RNA, 16 nt, Human
cagguggcugacccag

SEQ ID NO: 2064378 - RNA, 19 nt, Human
cagguggcugacccagucc

SEQ ID NO: 2064379 - RNA, 20 nt, Human
cagguggcugacccaguccc

SEQ ID NO: 2064380 - RNA, 23 nt, Human
cagguggcugacccagucccugg

SEQ ID NO: 2064381 - RNA, 23 nt, Human
caggucuugaacuccuggccuca

SEQ ID NO: 2064382 - RNA, 22 nt, Human
caggucuugaacuccuggccuc

SEQ ID NO: 2064383 - RNA, 21 nt, Human
caggucuugaacuccuggccu

SEQ ID NO: 2064384 - RNA, 20 nt, Human
caggucuugaacuccuggcc

SEQ ID NO: 2064385 - RNA, 19 nt, Human
caggucuugaacuccuggc

SEQ ID NO: 2064386 - RNA, 18 nt, Human
caggucuugaacuccugg

SEQ ID NO: 2064387 - RNA, 17 nt, Human
caggucugggagaggca

SEQ ID NO: 2064388 - RNA, 18 nt, Human
caggucugggagaggcag

SEQ ID NO: 2064389 - RNA, 20 nt, Human
caggucugggagaggcagag

SEQ ID NO: 2064390 - RNA, 15 nt, Human
caggucuccucuuaa

SEQ ID NO: 2064391 - RNA, 17 nt, Human
caggucuccucuuaaaa

SEQ ID NO: 2064392 - RNA, 13 nt, Human
caggucuccucuu

SEQ ID NO: 2064393 - RNA, 14 nt, Human
caggucuccucuua

SEQ ID NO: 2064394 - RNA, 20 nt, Human
caggucucagaaucuuuccu

SEQ ID NO: 2064395 - RNA, 13 nt, Human
caggucucccggg

SEQ ID NO: 2064396 - RNA, 11 nt, Human
caggucuccuc

SEQ ID NO: 2064397 - RNA, 13 nt, Human
caggucgggcuca

SEQ ID NO: 2064398 - RNA, 15 nt, Human
caggucgggcucagc

SEQ ID NO: 2064399 - RNA, 16 nt, Human
caggucgggcucagcu

SEQ ID NO: 2064400 - RNA, 17 nt, Human
caggucgggcucagcuc

SEQ ID NO: 2064401 - RNA, 18 nt, Human
caggucgggcucagcucu

SEQ ID NO: 2064402 - RNA, 19 nt, Human
caggucgggcucagcucug

SEQ ID NO: 2064403 - RNA, 22 nt, Human
caggucgggcucagcucuggcu

SEQ ID NO: 2064404 - RNA, 22 nt, Human
caggucaauacaguacaggcag

SEQ ID NO: 2064405 - RNA, 23 nt, Human
caggucaauacaguacaggcagc

SEQ ID NO: 2064406 - RNA, 23 nt, Human
cagguauggaaggguuuguggcu

SEQ ID NO: 2064407 - RNA, 20 nt, Human
caggucaggaguucgagacc

SEQ ID NO: 2064408 - RNA, 19 nt, Human
caggucaucuccuuucauc

SEQ ID NO: 2064409 - RNA, 16 nt, Human
caggucagggugagga

SEQ ID NO: 2064410 - RNA, 15 nt, Human
cagguaccccagcuc

SEQ ID NO: 2064411 - RNA, 20 nt, Human
cagguaccccagcucugcuu

SEQ ID NO: 2064412 - RNA, 13 nt, Human
cagguaaugugaa

SEQ ID NO: 2064413 - RNA, 19 nt, Human
cagguaaugugaauaaauu

SEQ ID NO: 2064414 - RNA, 14 nt, Human
cagguacagagaag

SEQ ID NO: 2064415 - RNA, 16 nt, Human
cagguacagagaagga

SEQ ID NO: 2064416 - RNA, 21 nt, Human
cagguaacaggcagauacagg

SEQ ID NO: 2064417 - RNA, 20 nt, Human
cagguaacaggcagauacag

SEQ ID NO: 2064418 - RNA, 18 nt, Human
cagguaguugcaauugaa

SEQ ID NO: 2064419 - RNA, 23 nt, Human
cagguaguugcaauugaauuaaa

SEQ ID NO: 2064420 - RNA, 20 nt, Human
cagguaugaccuucuaggaa

SEQ ID NO: 2064421 - RNA, 22 nt, Human
cagguagcugccccuggcucug

SEQ ID NO: 2064422 - RNA, 20 nt, Human
cagguagcugccccuggcuc

SEQ ID NO: 2064423 - RNA, 21 nt, Human
cagguagcugccccuggcucu

SEQ ID NO: 2064424 - RNA, 23 nt, Human
cagguagcugccccuggcucuga

SEQ ID NO: 2064425 - RNA, 18 nt, Human
cagguagcugaaagggga

SEQ ID NO: 2064426 - RNA, 14 nt, Human
cagguagcugcccc

SEQ ID NO: 2064427 - RNA, 15 nt, Human
cagguagcugccccu

SEQ ID NO: 2064428 - RNA, 16 nt, Human
cagguagcugccccug

SEQ ID NO: 2064429 - RNA, 18 nt, Human
cagguagcugccccuggc

SEQ ID NO: 2064430 - RNA, 19 nt, Human
cagguagcugccccuggcu

SEQ ID NO: 2064431 - RNA, 19 nt, Human
cagguagaacacaagguca

SEQ ID NO: 2064432 - RNA, 14 nt, Human
cagggucaggagag

SEQ ID NO: 2064433 - RNA, 21 nt, Human
caggguauuccagagugggga

SEQ ID NO: 2064434 - RNA, 20 nt, Human
caggguauuccagagugggg

SEQ ID NO: 2064435 - RNA, 14 nt, Human
caggguaaauuauu

SEQ ID NO: 2064436 - RNA, 14 nt, Human
caggguagaaaaag

SEQ ID NO: 2064437 - RNA, 19 nt, Human
caggguagaaaaaggagcu

SEQ ID NO: 2064438 - RNA, 23 nt, Human
caggguagauaaccuguacuuca

SEQ ID NO: 2064439 - RNA, 13 nt, Human
caggguagcaggu

SEQ ID NO: 2064440 - RNA, 16 nt, Human
caggguagcagguacc

SEQ ID NO: 2064441 - RNA, 15 nt, Human
cagggucucacucug

SEQ ID NO: 2064442 - RNA, 23 nt, Human
cagggucucacuauguugcccag

SEQ ID NO: 2064443 - RNA, 22 nt, Human
cagggucucacuauguugccca

SEQ ID NO: 2064444 - RNA, 21 nt, Human
cagggucucacuauguugccc

SEQ ID NO: 2064445 - RNA, 12 nt, Human
caggguccugcu

SEQ ID NO: 2064446 - RNA, 13 nt, Human
caggguccugcua

SEQ ID NO: 2064447 - RNA, 14 nt, Human
caggguccugcuau

SEQ ID NO: 2064448 - RNA, 20 nt, Human
caggguccugcuauuuccca

SEQ ID NO: 2064449 - RNA, 18 nt, Human
caggguccuguagcccua

SEQ ID NO: 2064450 - RNA, 17 nt, Human
cagguaacaggcagaua

SEQ ID NO: 2064451 - RNA, 16 nt, Human
cagguaacaggcagau

SEQ ID NO: 2064452 - RNA, 15 nt, Human
cagguaacaggcaga

SEQ ID NO: 2064453 - RNA, 14 nt, Human
cagguaacaggcag

SEQ ID NO: 2064454 - RNA, 16 nt, Human
cagggucucacucugu

SEQ ID NO: 2064455 - RNA, 16 nt, Human
caggguuuugccaugu

SEQ ID NO: 2064456 - RNA, 16 nt, Human
caggguuuuaucucug

SEQ ID NO: 2064457 - RNA, 17 nt, Human
caggguuuuaucucugu

SEQ ID NO: 2064458 - RNA, 19 nt, Human
caggguuuuaucucugucu

SEQ ID NO: 2064459 - RNA, 18 nt, Human
caggggucccagccaccc

SEQ ID NO: 2064460 - RNA, 20 nt, Human
caggggucccagccaccccg

SEQ ID NO: 2064461 - RNA, 18 nt, Human
caggggucgucaccaccu

SEQ ID NO: 2064462 - RNA, 21 nt, Human
caggggucgucaccaccucuc

SEQ ID NO: 2064463 - RNA, 13 nt, Human
cagggguggagga

SEQ ID NO: 2064464 - RNA, 17 nt, Human
cagggguggaggagagc

SEQ ID NO: 2064465 - RNA, 18 nt, Human
cagggguggaggagagcc

SEQ ID NO: 2064466 - RNA, 22 nt, Human
cagggguggaggagagccuggu

SEQ ID NO: 2064467 - RNA, 21 nt, Human
caggugucauauauggggggc

SEQ ID NO: 2064468 - RNA, 16 nt, Human
caggugugagucacca

SEQ ID NO: 2064469 - RNA, 21 nt, Human
caggugugagucaccaagccc

SEQ ID NO: 2064470 - RNA, 20 nt, Human
caggugugagucaccaagcc

SEQ ID NO: 2064471 - RNA, 23 nt, Human
caggugugaaccaccacacccag

SEQ ID NO: 2064472 - RNA, 22 nt, Human
caggugugaaccaccacaccca

SEQ ID NO: 2064473 - RNA, 19 nt, Human
caggugugaaccaccacac

SEQ ID NO: 2064474 - RNA, 16 nt, Human
caggugugaaccacca

SEQ ID NO: 2064475 - RNA, 23 nt, Human
caggugugagucaccaagcccag

SEQ ID NO: 2064476 - RNA, 22 nt, Human
caggugugagucaccaagccca

SEQ ID NO: 2064477 - RNA, 12 nt, Human
cagguguuuaua

SEQ ID NO: 2064478 - RNA, 20 nt, Human
cagguguucuacacucaucu

SEQ ID NO: 2064479 - RNA, 16 nt, Human
cagguguuuaguugca

SEQ ID NO: 2064480 - RNA, 12 nt, Human
caggugugaacc

SEQ ID NO: 2064481 - RNA, 19 nt, Human
caggugucccugcacuugc

SEQ ID NO: 2064482 - RNA, 18 nt, Human
caggugucccugcacuug

SEQ ID NO: 2064483 - RNA, 16 nt, Human
caggugucccugcacu

SEQ ID NO: 2064484 - RNA, 15 nt, Human
caggugucccugcac

SEQ ID NO: 2064485 - RNA, 16 nt, Human
caguaagaccggaagc

SEQ ID NO: 2064486 - RNA, 17 nt, Human
caguaagaccggaagcu

SEQ ID NO: 2064487 - RNA, 21 nt, Human
caguaagaccggaagcuccug

SEQ ID NO: 2064488 - RNA, 22 nt, Human
caguaagaccggaagcuccugg

SEQ ID NO: 2064489 - RNA, 23 nt, Human
caguaagaccggaagcuccuggu

SEQ ID NO: 2064490 - RNA, 14 nt, Human
caguaacuugguua

SEQ ID NO: 2064491 - RNA, 16 nt, Human
caguaacuugguuaua

SEQ ID NO: 2064492 - RNA, 18 nt, Human
caguaacuugguuauaca

SEQ ID NO: 2064493 - RNA, 19 nt, Human
caguaacuugguuauacau

SEQ ID NO: 2064494 - RNA, 18 nt, Human
caguaacagggccuugcu

SEQ ID NO: 2064495 - RNA, 20 nt, Human
caguaacagggccuugcuaa

SEQ ID NO: 2064496 - RNA, 13 nt, Human
cagguucagcuug

SEQ ID NO: 2064497 - RNA, 17 nt, Human
cagguuauacuccuccu

SEQ ID NO: 2064498 - RNA, 12 nt, Human
cagguucagcuu

SEQ ID NO: 2064499 - RNA, 17 nt, Human
caguaccuuugucacaa

SEQ ID NO: 2064500 - RNA, 15 nt, Human
caguaccuuugucac

SEQ ID NO: 2064501 - RNA, 16 nt, Human
caguaccuuugucaca

SEQ ID NO: 2064502 - RNA, 16 nt, Human
caguacauuuaauuga

SEQ ID NO: 2064503 - RNA, 13 nt, Human
caguacuggagcu

SEQ ID NO: 2064504 - RNA, 16 nt, Human
caguacagugguucua

SEQ ID NO: 2064505 - RNA, 17 nt, Human
caguacagugguucuac

SEQ ID NO: 2064506 - RNA, 12 nt, Human
caguaccacaug

SEQ ID NO: 2064507 - RNA, 14 nt, Human
caguaccaucugaa

SEQ ID NO: 2064508 - RNA, 12 nt, Human
caguacauuuaa

SEQ ID NO: 2064509 - RNA, 13 nt, Human
caguacccaccug

SEQ ID NO: 2064510 - RNA, 14 nt, Human
caguacccaccuga

SEQ ID NO: 2064511 - RNA, 15 nt, Human
caguacccaccugag

SEQ ID NO: 2064512 - RNA, 16 nt, Human
caguacccaccugagc

SEQ ID NO: 2064513 - RNA, 17 nt, Human
caguacccaccugagcu

SEQ ID NO: 2064514 - RNA, 19 nt, Human
caguacccaccugagcuuu

SEQ ID NO: 2064515 - RNA, 12 nt, Human
caguacaggcag

SEQ ID NO: 2064516 - RNA, 13 nt, Human
caguacaggcagc

SEQ ID NO: 2064517 - RNA, 14 nt, Human
caguacaggcagca

SEQ ID NO: 2064518 - RNA, 16 nt, Human
caguacaggcagcaca

SEQ ID NO: 2064519 - RNA, 19 nt, Human
caguacaggcagcacagag

SEQ ID NO: 2064520 - RNA, 20 nt, Human
caguacaggcagcacagaga

SEQ ID NO: 2064521 - RNA, 15 nt, Human
caguaagccacugcc

SEQ ID NO: 2064522 - RNA, 13 nt, Human
caguaauaaaaca

SEQ ID NO: 2064523 - RNA, 14 nt, Human
caguaauaaaacau

SEQ ID NO: 2064524 - RNA, 15 nt, Human
caguaauaaaacauc

SEQ ID NO: 2064525 - RNA, 17 nt, Human
caguaauaaaacaucuu

SEQ ID NO: 2064526 - RNA, 18 nt, Human
caguaauaaaacaucuuu

SEQ ID NO: 2064527 - RNA, 12 nt, Human
caguaauaacuc

SEQ ID NO: 2064528 - RNA, 13 nt, Human
caguaauaacucu

SEQ ID NO: 2064529 - RNA, 14 nt, Human
caggugucccugca

SEQ ID NO: 2064530 - RNA, 11 nt, Human
caggugucccu

SEQ ID NO: 2064531 - RNA, 20 nt, Human
caggugguuauggagagggu

SEQ ID NO: 2064532 - RNA, 14 nt, Human
cagguguccccagc

SEQ ID NO: 2064533 - RNA, 15 nt, Human
cagguguccccagcc

SEQ ID NO: 2064534 - RNA, 16 nt, Human
cagguguccccagccc

SEQ ID NO: 2064535 - RNA, 17 nt, Human
cagguguccccagccca

SEQ ID NO: 2064536 - RNA, 18 nt, Human
cagguguccccagcccac

SEQ ID NO: 2064537 - RNA, 19 nt, Human
cagguguccccagcccacu

SEQ ID NO: 2064538 - RNA, 20 nt, Human
cagguguccccagcccacug

SEQ ID NO: 2064539 - RNA, 21 nt, Human
cagguguccccagcccacugg

SEQ ID NO: 2064540 - RNA, 18 nt, Human
caggugguuauggagagg

SEQ ID NO: 2064541 - RNA, 15 nt, Human
cagguggggaggggg

SEQ ID NO: 2064542 - RNA, 23 nt, Human
cagguggggagucagggaccccu

SEQ ID NO: 2064543 - RNA, 12 nt, Human
cagguggggagg

SEQ ID NO: 2064544 - RNA, 17 nt, Human
cagguggggcagcuuga

SEQ ID NO: 2064545 - RNA, 16 nt, Human
cagguggggcagcuug

SEQ ID NO: 2064546 - RNA, 15 nt, Human
cagguggggcagcuu

SEQ ID NO: 2064547 - RNA, 14 nt, Human
cagguggggcagcu

SEQ ID NO: 2064548 - RNA, 13 nt, Human
cagguggggcagc

SEQ ID NO: 2064549 - RNA, 22 nt, Human
cagguggcugacccagucccug

SEQ ID NO: 2064550 - RNA, 17 nt, Human
caggaguggguugauuu

SEQ ID NO: 2064551 - RNA, 22 nt, Human
caggaguuagaggccagccugg

SEQ ID NO: 2064552 - RNA, 22 nt, Human
caggaguucaagaccagccugg

SEQ ID NO: 2064553 - RNA, 23 nt, Human
caggaguucaagaccagccuggc

SEQ ID NO: 2064554 - RNA, 21 nt, Human
caggaguucgagaccagccug

SEQ ID NO: 2064555 - RNA, 19 nt, Human
caggaguuaaaaagggcag

SEQ ID NO: 2064556 - RNA, 16 nt, Human
caggaguuagaggcca

SEQ ID NO: 2064557 - RNA, 17 nt, Human
caggaguuagaggccag

SEQ ID NO: 2064558 - RNA, 18 nt, Human
caggaguuagaggccagc

SEQ ID NO: 2064559 - RNA, 19 nt, Human
caggaguuagaggccagcc

SEQ ID NO: 2064560 - RNA, 20 nt, Human
caggaguuagaggccagccu

SEQ ID NO: 2064561 - RNA, 21 nt, Human
caggaguuagaggccagccug

SEQ ID NO: 2064562 - RNA, 16 nt, Human
caggaguuggaagugu

SEQ ID NO: 2064563 - RNA, 21 nt, Human
caggaguuuaagaccagccug

SEQ ID NO: 2064564 - RNA, 22 nt, Human
caggaguuuaagaccagccugg

SEQ ID NO: 2064565 - RNA, 19 nt, Human
caggaguucgaggcugcag

SEQ ID NO: 2064566 - RNA, 23 nt, Human
caggaguucgagaccagccuggc

SEQ ID NO: 2064567 - RNA, 18 nt, Human
caggaguucgaggcugca

SEQ ID NO: 2064568 - RNA, 21 nt, Human
caggaguuugagaccaaccug

SEQ ID NO: 2064569 - RNA, 17 nt, Human
caggauagauaacucuu

SEQ ID NO: 2064570 - RNA, 18 nt, Human
caggauagauaacucuuu

SEQ ID NO: 2064571 - RNA, 19 nt, Human
caggauagauaacucuuug

SEQ ID NO: 2064572 - RNA, 15 nt, Human
caggauaguugcucc

SEQ ID NO: 2064573 - RNA, 23 nt, Human
caggauacucugucagaugggaa

SEQ ID NO: 2064574 - RNA, 18 nt, Human
caggauacucugucagau

SEQ ID NO: 2064575 - RNA, 20 nt, Human
caggauacucugucagaugg

SEQ ID NO: 2064576 - RNA, 17 nt, Human
caggauacucugucaga

SEQ ID NO: 2064577 - RNA, 22 nt, Human
caggaguuugagaccaaccugg

SEQ ID NO: 2064578 - RNA, 23 nt, Human
caggaguuugagaccaaccuggg

SEQ ID NO: 2064579 - RNA, 18 nt, Human
caggaguuugaggcugca

SEQ ID NO: 2064580 - RNA, 20 nt, Human
caggaguuugaggcugcagc

SEQ ID NO: 2064581 - RNA, 21 nt, Human
caggaguuugaggcugcagcg

SEQ ID NO: 2064582 - RNA, 22 nt, Human
caggaguuugaggcugcagcga

SEQ ID NO: 2064583 - RNA, 15 nt, Human
caggagaggggcaga

SEQ ID NO: 2064584 - RNA, 17 nt, Human
caggagaggggcagaac

SEQ ID NO: 2064585 - RNA, 13 nt, Human
caggagagccagc

SEQ ID NO: 2064586 - RNA, 15 nt, Human
caggagagccagccc

SEQ ID NO: 2064587 - RNA, 16 nt, Human
caggagagccagcccu

SEQ ID NO: 2064588 - RNA, 17 nt, Human
caggagagccagcccuc

SEQ ID NO: 2064589 - RNA, 18 nt, Human
caggagagccagcccucc

SEQ ID NO: 2064590 - RNA, 19 nt, Human
caggagagccagcccuccc

SEQ ID NO: 2064591 - RNA, 21 nt, Human
caggagagccagcccucccug

SEQ ID NO: 2064592 - RNA, 23 nt, Human
caggagagccagcccucccuguc

SEQ ID NO: 2064593 - RNA, 12 nt, Human
caggagagggaa

SEQ ID NO: 2064594 - RNA, 20 nt, Human
caggagauggaaguugcagu

SEQ ID NO: 2064595 - RNA, 14 nt, Human
caggagagaaaggg

SEQ ID NO: 2064596 - RNA, 16 nt, Human
caggagacccacaggu

SEQ ID NO: 2064597 - RNA, 12 nt, Human
caggagacaucc

SEQ ID NO: 2064598 - RNA, 17 nt, Human
caggagaaccacuacau

SEQ ID NO: 2064599 - RNA, 23 nt, Human
caggacuuggucugauuucagga

SEQ ID NO: 2064600 - RNA, 20 nt, Human
caggacuuggucugauuuca

SEQ ID NO: 2064601 - RNA, 23 nt, Human
caggagaaaugcauccauuccuc

SEQ ID NO: 2064602 - RNA, 11 nt, Human
caggagaacca

SEQ ID NO: 2064603 - RNA, 16 nt, Human
caggacucugccuccu

SEQ ID NO: 2064604 - RNA, 15 nt, Human
caggacucugccucc

SEQ ID NO: 2064605 - RNA, 13 nt, Human
caggacucugccu

SEQ ID NO: 2064606 - RNA, 12 nt, Human
caggacucugcc

SEQ ID NO: 2064607 - RNA, 22 nt, Human
caggacucccuccucaccucug

SEQ ID NO: 2064608 - RNA, 23 nt, Human
caggacucccuccucaccucugg

SEQ ID NO: 2064609 - RNA, 20 nt, Human
caggacucugcccagaccac

SEQ ID NO: 2064610 - RNA, 18 nt, Human
caggacugaauugucccc

SEQ ID NO: 2064611 - RNA, 19 nt, Human
caggacugaauugucccca

SEQ ID NO: 2064612 - RNA, 20 nt, Human
caggacugaauuguccccag

SEQ ID NO: 2064613 - RNA, 21 nt, Human
caggacugaauuguccccagu

SEQ ID NO: 2064614 - RNA, 12 nt, Human
caggacuccagc

SEQ ID NO: 2064615 - RNA, 13 nt, Human
caggacuccagcc

SEQ ID NO: 2064616 - RNA, 16 nt, Human
caggacuccagcccau

SEQ ID NO: 2064617 - RNA, 17 nt, Human
caggacuccagcccauu

SEQ ID NO: 2064618 - RNA, 13 nt, Human
caggacucccucc

SEQ ID NO: 2064619 - RNA, 14 nt, Human
caggacucccuccu

SEQ ID NO: 2064620 - RNA, 15 nt, Human
caggacucccuccuc

SEQ ID NO: 2064621 - RNA, 16 nt, Human
caggacucccuccuca

SEQ ID NO: 2064622 - RNA, 17 nt, Human
caggacucccuccucac

SEQ ID NO: 2064623 - RNA, 19 nt, Human
caggacucccuccucaccu

SEQ ID NO: 2064624 - RNA, 20 nt, Human
caggacucccuccucaccuc

SEQ ID NO: 2064625 - RNA, 21 nt, Human
caggacucccuccucaccucu

SEQ ID NO: 2064626 - RNA, 15 nt, Human
caggagucccaagga

SEQ ID NO: 2064627 - RNA, 16 nt, Human
caggagucccaaggaa

SEQ ID NO: 2064628 - RNA, 17 nt, Human
caggagucccaaggaaa

SEQ ID NO: 2064629 - RNA, 18 nt, Human
caggagucccaaggaaag

SEQ ID NO: 2064630 - RNA, 12 nt, Human
caggagugagca

SEQ ID NO: 2064631 - RNA, 24 nt, Human
caggagucccaaggaaagccccag

SEQ ID NO: 2064632 - RNA, 13 nt, Human
caggagucccugg

SEQ ID NO: 2064633 - RNA, 14 nt, Human
caggagucccuggu

SEQ ID NO: 2064634 - RNA, 15 nt, Human
caggagucccuggua

SEQ ID NO: 2064635 - RNA, 19 nt, Human
caggagucccaaggaaagc

SEQ ID NO: 2064636 - RNA, 21 nt, Human
caggagucccaaggaaagccc

SEQ ID NO: 2064637 - RNA, 12 nt, Human
caggagcucaga

SEQ ID NO: 2064638 - RNA, 18 nt, Human
caggagccccgaggccuu

SEQ ID NO: 2064639 - RNA, 16 nt, Human
caggagccccgaggcc

SEQ ID NO: 2064640 - RNA, 15 nt, Human
caggagccccgaggc

SEQ ID NO: 2064641 - RNA, 22 nt, Human
caggagccccgaggccuucucu

SEQ ID NO: 2064642 - RNA, 20 nt, Human
caggagccccgaggccuucu

SEQ ID NO: 2064643 - RNA, 23 nt, Human
caggagccccgaggccuucucug

SEQ ID NO: 2064644 - RNA, 12 nt, Human
caggcccaccua

SEQ ID NO: 2064645 - RNA, 23 nt, Human
caggcccaccuaccuucaaagcu

SEQ ID NO: 2064646 - RNA, 18 nt, Human
caggcccaagagaugaag

SEQ ID NO: 2064647 - RNA, 19 nt, Human
caggcccaagagaugaaga

SEQ ID NO: 2064648 - RNA, 23 nt, Human
caggcccaaauuaucaagcuaau

SEQ ID NO: 2064649 - RNA, 17 nt, Human
caggccccaaaaccaca

SEQ ID NO: 2064650 - RNA, 19 nt, Human
caggccccaaaaccacagc

SEQ ID NO: 2064651 - RNA, 22 nt, Human
caggccccaaaaccacagcccu

SEQ ID NO: 2064652 - RNA, 23 nt, Human
caggccccaaaaccacagcccug

SEQ ID NO: 2064653 - RNA, 16 nt, Human
caggccccaggaagcc

SEQ ID NO: 2064654 - RNA, 17 nt, Human
caggccccaggaagccg

SEQ ID NO: 2064655 - RNA, 12 nt, Human
caggccccaagg

SEQ ID NO: 2064656 - RNA, 13 nt, Human
caggccccaggaa

SEQ ID NO: 2064657 - RNA, 14 nt, Human
caggccccaggaag

SEQ ID NO: 2064658 - RNA, 15 nt, Human
caggccccaggaagc

SEQ ID NO: 2064659 - RNA, 13 nt, Human
caggcccccaagc

SEQ ID NO: 2064660 - RNA, 13 nt, Human
caggccccugcca

SEQ ID NO: 2064661 - RNA, 17 nt, Human
caggccccgcuugucca

SEQ ID NO: 2064662 - RNA, 18 nt, Human
caggccccgcuuguccag

SEQ ID NO: 2064663 - RNA, 19 nt, Human
caggccccgcuuguccagc

SEQ ID NO: 2064664 - RNA, 22 nt, Human
caggccccgcuuguccagcgcc

SEQ ID NO: 2064665 - RNA, 23 nt, Human
caggccccgcuuguccagcgccu

SEQ ID NO: 2064666 - RNA, 18 nt, Human
caggcccccaagccugca

SEQ ID NO: 2064667 - RNA, 19 nt, Human
caggcccccaagccugcag

SEQ ID NO: 2064668 - RNA, 15 nt, Human
caggcccccaagccu

SEQ ID NO: 2064669 - RNA, 17 nt, Human
caggcccccaagccugc

SEQ ID NO: 2064670 - RNA, 15 nt, Human
caggcccccaccacu

SEQ ID NO: 2064671 - RNA, 18 nt, Human
caggccaagagcagaggc

SEQ ID NO: 2064672 - RNA, 19 nt, Human
caggccaagagcagaggca

SEQ ID NO: 2064673 - RNA, 21 nt, Human
caggccaagagcagaggcagc

SEQ ID NO: 2064674 - RNA, 23 nt, Human
caggccaagagcagaggcagcga

SEQ ID NO: 2064675 - RNA, 15 nt, Human
caggccaucagaggc

SEQ ID NO: 2064676 - RNA, 23 nt, Human
caggccaccauauucagugcugu

SEQ ID NO: 2064677 - RNA, 15 nt, Human
caggccaggugcagu

SEQ ID NO: 2064678 - RNA, 12 nt, Human
caggccaggcuc

SEQ ID NO: 2064679 - RNA, 18 nt, Human
caggccaggcuccuuccu

SEQ ID NO: 2064680 - RNA, 16 nt, Human
caggccaggugcagug

SEQ ID NO: 2064681 - RNA, 21 nt, Human
caggccaggcuccuuccuguc

SEQ ID NO: 2064682 - RNA, 13 nt, Human
caggccaacccca

SEQ ID NO: 2064683 - RNA, 20 nt, Human
caggccccugccacccuggg

SEQ ID NO: 2064684 - RNA, 19 nt, Human
caggccccugccacccugg

SEQ ID NO: 2064685 - RNA, 17 nt, Human
caggccccugccacccu

SEQ ID NO: 2064686 - RNA, 15 nt, Human
caggccccugccacc

SEQ ID NO: 2064687 - RNA, 15 nt, Human
caggcccggcuccag

SEQ ID NO: 2064688 - RNA, 14 nt, Human
caggcccggcucca

SEQ ID NO: 2064689 - RNA, 13 nt, Human
caggcccggcucc

SEQ ID NO: 2064690 - RNA, 15 nt, Human
caggcaugccugugu

SEQ ID NO: 2064691 - RNA, 16 nt, Human
caggcaugccugugug

SEQ ID NO: 2064692 - RNA, 24 nt, Human
caggcaugcuggcucccagggcca

SEQ ID NO: 2064693 - RNA, 17 nt, Human
caggcaugguggcccac

SEQ ID NO: 2064694 - RNA, 22 nt, Human
caggcaucauuccaccauggcu

SEQ ID NO: 2064695 - RNA, 14 nt, Human
caggcaugccugug

SEQ ID NO: 2064696 - RNA, 20 nt, Human
caggcagugaugcuggaugc

SEQ ID NO: 2064697 - RNA, 22 nt, Human
caggcagugaugcuggaugcuc

SEQ ID NO: 2064698 - RNA, 17 nt, Human
caggcaguuggccagag

SEQ ID NO: 2064699 - RNA, 14 nt, Human
caggcauaggccug

SEQ ID NO: 2064700 - RNA, 15 nt, Human
caggcauaggccugg

SEQ ID NO: 2064701 - RNA, 16 nt, Human
caggcauaggccuggg

SEQ ID NO: 2064702 - RNA, 17 nt, Human
caggcauaggccugggu

SEQ ID NO: 2064703 - RNA, 18 nt, Human
caggcauaggccugggug

SEQ ID NO: 2064704 - RNA, 19 nt, Human
caggcauaggccugggugc

SEQ ID NO: 2064705 - RNA, 23 nt, Human
caggcaggucuugaacuccuggc

SEQ ID NO: 2064706 - RNA, 15 nt, Human
caggcaggugggaug

SEQ ID NO: 2064707 - RNA, 22 nt, Human
caggcaggucuugaacuccugg

SEQ ID NO: 2064708 - RNA, 13 nt, Human
caggcaggucuug

SEQ ID NO: 2064709 - RNA, 12 nt, Human
caggcaggucuu

SEQ ID NO: 2064710 - RNA, 19 nt, Human
caggcagguccaggguuug

SEQ ID NO: 2064711 - RNA, 15 nt, Human
caggcagguccaggg

SEQ ID NO: 2064712 - RNA, 14 nt, Human
caggcagguccagg

SEQ ID NO: 2064713 - RNA, 20 nt, Human
caggcauguucucugaggac

SEQ ID NO: 2064714 - RNA, 19 nt, Human
caggcauguucucugagga

SEQ ID NO: 2064715 - RNA, 18 nt, Human
caggcauguucucugagg

SEQ ID NO: 2064716 - RNA, 15 nt, Human
caggcauguucucug

SEQ ID NO: 2064717 - RNA, 14 nt, Human
caggauucuccuuu

SEQ ID NO: 2064718 - RNA, 22 nt, Human
caggcaacgcacaaaacagaaa

SEQ ID NO: 2064719 - RNA, 15 nt, Human
caggcaacugaggca

SEQ ID NO: 2064720 - RNA, 16 nt, Human
caggcaacugaggcag

SEQ ID NO: 2064721 - RNA, 17 nt, Human
caggcaacugaggcaga

SEQ ID NO: 2064722 - RNA, 18 nt, Human
caggcaacugaggcagac

SEQ ID NO: 2064723 - RNA, 19 nt, Human
caggcaacugaggcagaca

SEQ ID NO: 2064724 - RNA, 20 nt, Human
caggauucuuccucccuccc

SEQ ID NO: 2064725 - RNA, 21 nt, Human
caggcaagcaccuccugccuc

SEQ ID NO: 2064726 - RNA, 16 nt, Human
caggcaagcaccuccu

SEQ ID NO: 2064727 - RNA, 15 nt, Human
caggcaagcaccucc

SEQ ID NO: 2064728 - RNA, 14 nt, Human
caggcaagcaccuc

SEQ ID NO: 2064729 - RNA, 20 nt, Human
caggcaacugaggcagacag

SEQ ID NO: 2064730 - RNA, 22 nt, Human
caggcaacugaggcagacagca

SEQ ID NO: 2064731 - RNA, 23 nt, Human
caggcagggcugacucuaggugc

SEQ ID NO: 2064732 - RNA, 17 nt, Human
caggcagggcugacucu

SEQ ID NO: 2064733 - RNA, 13 nt, Human
caggcagguccag

SEQ ID NO: 2064734 - RNA, 19 nt, Human
caggcaggcugugcgcuga

SEQ ID NO: 2064735 - RNA, 13 nt, Human
caggcaggcugug

SEQ ID NO: 2064736 - RNA, 12 nt, Human
caggcaggcugu

SEQ ID NO: 2064737 - RNA, 19 nt, Human
caggcaggaagggcaggaa

SEQ ID NO: 2064738 - RNA, 20 nt, Human
caggcaggaaggcugagagg

SEQ ID NO: 2064739 - RNA, 18 nt, Human
caggcaggaagggcagga

SEQ ID NO: 2064740 - RNA, 19 nt, Human
caggcagcuuuuucucucc

SEQ ID NO: 2064741 - RNA, 22 nt, Human
caggcagcuuuuucucucccac

SEQ ID NO: 2064742 - RNA, 14 nt, Human
caggaucagucuga

SEQ ID NO: 2064743 - RNA, 13 nt, Human
caggaucagucug

SEQ ID NO: 2064744 - RNA, 15 nt, Human
caggaugacccugcg

SEQ ID NO: 2064745 - RNA, 17 nt, Human
caggaugauuguacaga

SEQ ID NO: 2064746 - RNA, 13 nt, Human
caggaugcccagg

SEQ ID NO: 2064747 - RNA, 14 nt, Human
caggaugcccaggg

SEQ ID NO: 2064748 - RNA, 17 nt, Human
caggaugcccagggcca

SEQ ID NO: 2064749 - RNA, 23 nt, Human
caggauggccgggcgcgguggcu

SEQ ID NO: 2064750 - RNA, 24 nt, Human
caggaugcccagggccacucugcc

SEQ ID NO: 2064751 - RNA, 19 nt, Human
caggaugcccagggccacu

SEQ ID NO: 2064752 - RNA, 22 nt, Human
caggaugcccagggccacucug

SEQ ID NO: 2064753 - RNA, 15 nt, Human
caggauggaggggug

SEQ ID NO: 2064754 - RNA, 21 nt, Human
caggauggaggggugguccug

SEQ ID NO: 2064755 - RNA, 22 nt, Human
caggauggaggggugguccuga

SEQ ID NO: 2064756 - RNA, 23 nt, Human
caggauggaggggugguccugac

SEQ ID NO: 2064757 - RNA, 17 nt, Human
caggauucuuccucccu

SEQ ID NO: 2064758 - RNA, 18 nt, Human
caggauucuuccucccuc

SEQ ID NO: 2064759 - RNA, 21 nt, Human
caggauggcaaccagaccauu

SEQ ID NO: 2064760 - RNA, 23 nt, Human
caggcuggucucaaacuccugac

SEQ ID NO: 2064761 - RNA, 13 nt, Human
caggcuggucuca

SEQ ID NO: 2064762 - RNA, 12 nt, Human
caggcuggucuc

SEQ ID NO: 2064763 - RNA, 19 nt, Human
caggcuggucucaaacucu

SEQ ID NO: 2064764 - RNA, 21 nt, Human
caggcuguaucccaugagccu

SEQ ID NO: 2064765 - RNA, 20 nt, Human
caggcuguaucccaugagcc

SEQ ID NO: 2064766 - RNA, 14 nt, Human
caggcuguauccca

SEQ ID NO: 2064767 - RNA, 19 nt, Human
caggcugugcgcugacaac

SEQ ID NO: 2064768 - RNA, 22 nt, Human
caggcugugcgcugacaaccac

SEQ ID NO: 2064769 - RNA, 16 nt, Human
caggcugugggccuca

SEQ ID NO: 2064770 - RNA, 17 nt, Human
caggcugugggccucaa

SEQ ID NO: 2064771 - RNA, 18 nt, Human
caggcuguuuuugggugc

SEQ ID NO: 2064772 - RNA, 23 nt, Human
caggcuguaucccaugagccuca

SEQ ID NO: 2064773 - RNA, 22 nt, Human
caggcuguaucccaugagccuc

SEQ ID NO: 2064774 - RNA, 15 nt, Human
caggcuugccugcag

SEQ ID NO: 2064775 - RNA, 16 nt, Human
caggcuugccugcagg

SEQ ID NO: 2064776 - RNA, 17 nt, Human
caggcuugccugcaggc

SEQ ID NO: 2064777 - RNA, 18 nt, Human
caggcuugccugcaggca

SEQ ID NO: 2064778 - RNA, 14 nt, Human
caggcuuccuuggc

SEQ ID NO: 2064779 - RNA, 18 nt, Human
caggcugcucagggcugg

SEQ ID NO: 2064780 - RNA, 17 nt, Human
caggcugcucagggcug

SEQ ID NO: 2064781 - RNA, 12 nt, Human
caggcugcugga

SEQ ID NO: 2064782 - RNA, 14 nt, Human
caggcugcuggagg

SEQ ID NO: 2064783 - RNA, 15 nt, Human
caggcugcuggagga

SEQ ID NO: 2064784 - RNA, 16 nt, Human
caggcugcuggaggaa

SEQ ID NO: 2064785 - RNA, 14 nt, Human
caggcuggacgugg

SEQ ID NO: 2064786 - RNA, 12 nt, Human
caggcugcuugg

SEQ ID NO: 2064787 - RNA, 15 nt, Human
caggcugcuugggau

SEQ ID NO: 2064788 - RNA, 20 nt, Human
caggcuggcaccgccuucuc

SEQ ID NO: 2064789 - RNA, 21 nt, Human
caggcuggcaccgccuucucu

SEQ ID NO: 2064790 - RNA, 23 nt, Human
caggcugggcuucaguggcagcu

SEQ ID NO: 2064791 - RNA, 22 nt, Human
caggcugccaaggccagagugg

SEQ ID NO: 2064792 - RNA, 16 nt, Human
caggcugcauagaagg

SEQ ID NO: 2064793 - RNA, 17 nt, Human
caggcugcauagaagga

SEQ ID NO: 2064794 - RNA, 18 nt, Human
caggcugcauagaaggag

SEQ ID NO: 2064795 - RNA, 21 nt, Human
caggcugcauagaaggaggag

SEQ ID NO: 2064796 - RNA, 22 nt, Human
caggcugcauagaaggaggaga

SEQ ID NO: 2064797 - RNA, 21 nt, Human
caggcugccaaggccagagug

SEQ ID NO: 2064798 - RNA, 15 nt, Human
caggcugccugagca

SEQ ID NO: 2064799 - RNA, 20 nt, Human
caggcugccugagcaccucc

SEQ ID NO: 2064800 - RNA, 21 nt, Human
caggcugccugagcaccuccc

SEQ ID NO: 2064801 - RNA, 12 nt, Human
caggcucuucuc

SEQ ID NO: 2064802 - RNA, 15 nt, Human
caggcucuucuccuu

SEQ ID NO: 2064803 - RNA, 14 nt, Human
caggcucuucuccu

SEQ ID NO: 2064804 - RNA, 22 nt, Human
caggcucuucuccuuucacaac

SEQ ID NO: 2064805 - RNA, 18 nt, Human
caggcucuucuccuuuca

SEQ ID NO: 2064806 - RNA, 22 nt, Human
caggcucauagggaagaccugc

SEQ ID NO: 2064807 - RNA, 13 nt, Human
caggcuccucccu

SEQ ID NO: 2064808 - RNA, 14 nt, Human
caggcuccucccuc

SEQ ID NO: 2064809 - RNA, 21 nt, Human
caggcuccucccucccucugc

SEQ ID NO: 2064810 - RNA, 20 nt, Human
caggcuccuuuagcgcccag

SEQ ID NO: 2064811 - RNA, 19 nt, Human
caggcuccuuuagcgccca

SEQ ID NO: 2064812 - RNA, 12 nt, Human
caggcuccuucc

SEQ ID NO: 2064813 - RNA, 13 nt, Human
caggcuccuuccu

SEQ ID NO: 2064814 - RNA, 14 nt, Human
caggcuccuuccug

SEQ ID NO: 2064815 - RNA, 17 nt, Human
caggcuccuuccugucu

SEQ ID NO: 2064816 - RNA, 14 nt, Human
caggcuccuuuagc

SEQ ID NO: 2064817 - RNA, 23 nt, Human
caggccgccccagccucugagcc

SEQ ID NO: 2064818 - RNA, 21 nt, Human
caggcuccuuuagcgcccagu

SEQ ID NO: 2064819 - RNA, 21 nt, Human
caggcuccuuccugucuuccu

SEQ ID NO: 2064820 - RNA, 18 nt, Human
caggcuccuuccugucuu

SEQ ID NO: 2064821 - RNA, 20 nt, Human
caggcuccuuccugucuucc

SEQ ID NO: 2064822 - RNA, 14 nt, Human
caggcucugcccug

SEQ ID NO: 2064823 - RNA, 13 nt, Human
caggcucugcccu

SEQ ID NO: 2064824 - RNA, 15 nt, Human
caggcucugcccugc

SEQ ID NO: 2064825 - RNA, 21 nt, Human
caggcucugcccugcccuagc

SEQ ID NO: 2064826 - RNA, 22 nt, Human
caggcucugcccugcccuagcu

SEQ ID NO: 2064827 - RNA, 23 nt, Human
caggcucugcccugcccuagcuc

SEQ ID NO: 2064828 - RNA, 19 nt, Human
caggcccggcuccaggcuc

SEQ ID NO: 2064829 - RNA, 18 nt, Human
caggcccggcuccaggcu

SEQ ID NO: 2064830 - RNA, 16 nt, Human
caggcccggcuccagg

SEQ ID NO: 2064831 - RNA, 17 nt, Human
caggcccggcuccaggc

SEQ ID NO: 2064832 - RNA, 21 nt, Human
caggcccggcuccaggcuccu

SEQ ID NO: 2064833 - RNA, 20 nt, Human
caggcccggcuccaggcucc

SEQ ID NO: 2064834 - RNA, 18 nt, Human
caggcccggcgcgguggc

SEQ ID NO: 2064835 - RNA, 16 nt, Human
caggcccggggcuggc

SEQ ID NO: 2064836 - RNA, 22 nt, Human
caggcccggcuccaggcuccuu

SEQ ID NO: 2064837 - RNA, 15 nt, Human
caggcccggggcugg

SEQ ID NO: 2064838 - RNA, 19 nt, Human
caggcccggcgcgguggcu

SEQ ID NO: 2064839 - RNA, 14 nt, Human
caggcccggggcug

SEQ ID NO: 2064840 - RNA, 15 nt, Human
caggcccuuccucuc

SEQ ID NO: 2064841 - RNA, 17 nt, Human
caggcccuuccucucca

SEQ ID NO: 2064842 - RNA, 16 nt, Human
caggcccuuccucucc

SEQ ID NO: 2064843 - RNA, 23 nt, Human
caggcccuuccucuccacugccu

SEQ ID NO: 2064844 - RNA, 21 nt, Human
caggcccuuccucuccacugc

SEQ ID NO: 2064845 - RNA, 20 nt, Human
caggcccuuccucuccacug

SEQ ID NO: 2064846 - RNA, 19 nt, Human
caggcccuuccucuccacu

SEQ ID NO: 2064847 - RNA, 14 nt, Human
caggccgccccagc

SEQ ID NO: 2064848 - RNA, 16 nt, Human
caggccgccccagccu

SEQ ID NO: 2064849 - RNA, 18 nt, Human
caggccgccccagccucu

SEQ ID NO: 2064850 - RNA, 20 nt, Human
caggccgccccagccucuga

SEQ ID NO: 2064851 - RNA, 21 nt, Human
caggccgccccagccucugag

SEQ ID NO: 2064852 - RNA, 13 nt, Human
cagggcagcagau

SEQ ID NO: 2064853 - RNA, 15 nt, Human
cagggcagcagaucu

SEQ ID NO: 2064854 - RNA, 16 nt, Human
cagggcagagccggga

SEQ ID NO: 2064855 - RNA, 12 nt, Human
cagggcagagcc

SEQ ID NO: 2064856 - RNA, 15 nt, Human
cagggcagagccggg

SEQ ID NO: 2064857 - RNA, 16 nt, Human
cagggcaccaagccca

SEQ ID NO: 2064858 - RNA, 18 nt, Human
cagggcaccaagcccaca

SEQ ID NO: 2064859 - RNA, 19 nt, Human
cagggcaccaagcccacag

SEQ ID NO: 2064860 - RNA, 21 nt, Human
cagggcaccaagcccacaggu

SEQ ID NO: 2064861 - RNA, 11 nt, Human
cagggcacugc

SEQ ID NO: 2064862 - RNA, 15 nt, Human
cagggcacugcugcu

SEQ ID NO: 2064863 - RNA, 17 nt, Human
cagggcagccugccugg

SEQ ID NO: 2064864 - RNA, 19 nt, Human
cagggcagccugccuggag

SEQ ID NO: 2064865 - RNA, 21 nt, Human
cagggcacaccgggcacucag

SEQ ID NO: 2064866 - RNA, 19 nt, Human
cagggcacaccgggcacuc

SEQ ID NO: 2064867 - RNA, 17 nt, Human
cagggcacaccgggcac

SEQ ID NO: 2064868 - RNA, 15 nt, Human
cagggcacaccgggc

SEQ ID NO: 2064869 - RNA, 23 nt, Human
cagggcacaccgggcacucagaa

SEQ ID NO: 2064870 - RNA, 22 nt, Human
cagggcacaccgggcacucaga

SEQ ID NO: 2064871 - RNA, 14 nt, Human
cagggcacaccggg

SEQ ID NO: 2064872 - RNA, 15 nt, Human
cagggcaaggccauu

SEQ ID NO: 2064873 - RNA, 20 nt, Human
cagggauuuguccuugggga

SEQ ID NO: 2064874 - RNA, 14 nt, Human
cagggaccaaggac

SEQ ID NO: 2064875 - RNA, 15 nt, Human
cagggaccaaggacc

SEQ ID NO: 2064876 - RNA, 18 nt, Human
cagggaccaaggaccccu

SEQ ID NO: 2064877 - RNA, 14 nt, Human
cagggaccccugcc

SEQ ID NO: 2064878 - RNA, 15 nt, Human
cagggaccccugccc

SEQ ID NO: 2064879 - RNA, 16 nt, Human
cagggaccccugcccu

SEQ ID NO: 2064880 - RNA, 22 nt, Human
cagggacccacuucacacacag

SEQ ID NO: 2064881 - RNA, 19 nt, Human
cagggaccaaggaccccuc

SEQ ID NO: 2064882 - RNA, 15 nt, Human
cagggcccugcagag

SEQ ID NO: 2064883 - RNA, 18 nt, Human
cagggcccugcagagggg

SEQ ID NO: 2064884 - RNA, 15 nt, Human
cagggcccugagcuc

SEQ ID NO: 2064885 - RNA, 21 nt, Human
cagggcccugagcucggugga

SEQ ID NO: 2064886 - RNA, 13 nt, Human
cagggcccugcag

SEQ ID NO: 2064887 - RNA, 14 nt, Human
cagggcccugcaga

SEQ ID NO: 2064888 - RNA, 23 nt, Human
cagggccuccagcccucucacug

SEQ ID NO: 2064889 - RNA, 16 nt, Human
cagggccccagcacua

SEQ ID NO: 2064890 - RNA, 22 nt, Human
cagggccccagcacuaaagcag

SEQ ID NO: 2064891 - RNA, 13 nt, Human
cagggccccagaa

SEQ ID NO: 2064892 - RNA, 15 nt, Human
cagggccccagaagg

SEQ ID NO: 2064893 - RNA, 17 nt, Human
cagggccccagaaggca

SEQ ID NO: 2064894 - RNA, 14 nt, Human
cagggccccagcac

SEQ ID NO: 2064895 - RNA, 15 nt, Human
cagggccccagcacu

SEQ ID NO: 2064896 - RNA, 21 nt, Human
cagggccccagaaggcaggga

SEQ ID NO: 2064897 - RNA, 19 nt, Human
cagggcaugcauuuugcag

SEQ ID NO: 2064898 - RNA, 20 nt, Human
cagggcauggccagguggcc

SEQ ID NO: 2064899 - RNA, 15 nt, Human
cagggcagggcucug

SEQ ID NO: 2064900 - RNA, 16 nt, Human
cagggcagggcucuga

SEQ ID NO: 2064901 - RNA, 19 nt, Human
cagggcagggcucugauau

SEQ ID NO: 2064902 - RNA, 17 nt, Human
cagggcagggcucugau

SEQ ID NO: 2064903 - RNA, 15 nt, Human
cagggcaucuccugu

SEQ ID NO: 2064904 - RNA, 13 nt, Human
cagggcaucuccu

SEQ ID NO: 2064905 - RNA, 14 nt, Human
cagggcaucuccug

SEQ ID NO: 2064906 - RNA, 18 nt, Human
cagggccacucugccucu

SEQ ID NO: 2064907 - RNA, 20 nt, Human
cagggccacucugccucugc

SEQ ID NO: 2064908 - RNA, 18 nt, Human
cagggccacgugccaggc

SEQ ID NO: 2064909 - RNA, 20 nt, Human
cagggccacgugccaggccc

SEQ ID NO: 2064910 - RNA, 21 nt, Human
cagggccacgugccaggcccg

SEQ ID NO: 2064911 - RNA, 12 nt, Human
cagggccacucu

SEQ ID NO: 2064912 - RNA, 16 nt, Human
cagggccacucugccu

SEQ ID NO: 2064913 - RNA, 17 nt, Human
cagggccacucugccuc

SEQ ID NO: 2064914 - RNA, 15 nt, Human
cagggccacgugcca

SEQ ID NO: 2064915 - RNA, 16 nt, Human
cagggccacgugccag

SEQ ID NO: 2064916 - RNA, 17 nt, Human
cagggccacgugccagg

SEQ ID NO: 2064917 - RNA, 12 nt, Human
cagggccagggc

SEQ ID NO: 2064918 - RNA, 13 nt, Human
cagggccagggcc

SEQ ID NO: 2064919 - RNA, 15 nt, Human
cagggccagggcccu

SEQ ID NO: 2064920 - RNA, 16 nt, Human
cagggccagggcccug

SEQ ID NO: 2064921 - RNA, 18 nt, Human
cagggccagggcccugca

SEQ ID NO: 2064922 - RNA, 19 nt, Human
cagggccagggcccugcag

SEQ ID NO: 2064923 - RNA, 18 nt, Human
caggggcguguggcucac

SEQ ID NO: 2064924 - RNA, 15 nt, Human
caggggcuggugggc

SEQ ID NO: 2064925 - RNA, 20 nt, Human
cagggcgagacucugucuca

SEQ ID NO: 2064926 - RNA, 17 nt, Human
caggggcaaacaccugc

SEQ ID NO: 2064927 - RNA, 18 nt, Human
caggggcaaacaccugcu

SEQ ID NO: 2064928 - RNA, 18 nt, Human
caggggagucccgucagg

SEQ ID NO: 2064929 - RNA, 17 nt, Human
caggggagagggucugg

SEQ ID NO: 2064930 - RNA, 23 nt, Human
caggggacucagcccugagguga

SEQ ID NO: 2064931 - RNA, 20 nt, Human
caggggagagggucuggaga

SEQ ID NO: 2064932 - RNA, 21 nt, Human
caggggagagggucuggagaa

SEQ ID NO: 2064933 - RNA, 15 nt, Human
caggggaccacaccu

SEQ ID NO: 2064934 - RNA, 17 nt, Human
caggggaccacaccucc

SEQ ID NO: 2064935 - RNA, 15 nt, Human
caggggacucagccc

SEQ ID NO: 2064936 - RNA, 17 nt, Human
caggggacucagcccug

SEQ ID NO: 2064937 - RNA, 18 nt, Human
caggggacucagcccuga

SEQ ID NO: 2064938 - RNA, 20 nt, Human
caggggacucagcccugagg

SEQ ID NO: 2064939 - RNA, 21 nt, Human
caggggacucagcccugaggu

SEQ ID NO: 2064940 - RNA, 15 nt, Human
cagggccuugcccag

SEQ ID NO: 2064941 - RNA, 16 nt, Human
cagggccuugcccaga

SEQ ID NO: 2064942 - RNA, 17 nt, Human
cagggccuugcccagag

SEQ ID NO: 2064943 - RNA, 18 nt, Human
cagggccuugcccagaga

SEQ ID NO: 2064944 - RNA, 19 nt, Human
cagggccuugcccagagau

SEQ ID NO: 2064945 - RNA, 20 nt, Human
cagggccuugcccagagaug

SEQ ID NO: 2064946 - RNA, 24 nt, Human
cagggccuugcccagagaugccuc

SEQ ID NO: 2064947 - RNA, 15 nt, Human
cagggccuugcuaau

SEQ ID NO: 2064948 - RNA, 13 nt, Human
cagggccuugccc

SEQ ID NO: 2064949 - RNA, 22 nt, Human
cagggccagaugagcagaagcu

SEQ ID NO: 2064950 - RNA, 14 nt, Human
cagggccuugccca

SEQ ID NO: 2064951 - RNA, 13 nt, Human
cagggggccaggu

SEQ ID NO: 2064952 - RNA, 16 nt, Human
cagggggccaggugca

SEQ ID NO: 2064953 - RNA, 11 nt, Human
cagggggccag

SEQ ID NO: 2064954 - RNA, 19 nt, Human
cagggggccaggugcacag

SEQ ID NO: 2064955 - RNA, 19 nt, Human
cagggaaggggaggcagcc

SEQ ID NO: 2064956 - RNA, 14 nt, Human
cagggaagucccca

SEQ ID NO: 2064957 - RNA, 16 nt, Human
cagggaaguccccagg

SEQ ID NO: 2064958 - RNA, 17 nt, Human
cagggaaguccccaggc

SEQ ID NO: 2064959 - RNA, 18 nt, Human
cagggaaguccccaggcc

SEQ ID NO: 2064960 - RNA, 21 nt, Human
cagggaaguguaagaaacaca

SEQ ID NO: 2064961 - RNA, 23 nt, Human
cagggaaguccccaggccccagg

SEQ ID NO: 2064962 - RNA, 14 nt, Human
cagggaagcuggcc

SEQ ID NO: 2064963 - RNA, 17 nt, Human
cagggaagcuggccgag

SEQ ID NO: 2064964 - RNA, 13 nt, Human
cagggaagcuggc

SEQ ID NO: 2064965 - RNA, 23 nt, Human
cagggaauuucaggaacuagaga

SEQ ID NO: 2064966 - RNA, 14 nt, Human
cagggacagagaca

SEQ ID NO: 2064967 - RNA, 17 nt, Human
cagggacagagacaccu

SEQ ID NO: 2064968 - RNA, 18 nt, Human
cagggacagagacaccug

SEQ ID NO: 2064969 - RNA, 19 nt, Human
cagggacagagacaccugc

SEQ ID NO: 2064970 - RNA, 20 nt, Human
cagggacagagacaccugca

SEQ ID NO: 2064971 - RNA, 21 nt, Human
cagggacagagacaccugcac

SEQ ID NO: 2064972 - RNA, 22 nt, Human
cagggacagagacaccugcacc

SEQ ID NO: 2064973 - RNA, 23 nt, Human
cagggacagagacaccugcaccu

SEQ ID NO: 2064974 - RNA, 22 nt, Human
cagggaaacagcuaaugggaca

SEQ ID NO: 2064975 - RNA, 16 nt, Human
cagggaaacagcuaau

SEQ ID NO: 2064976 - RNA, 12 nt, Human
cagggaagccca

SEQ ID NO: 2064977 - RNA, 13 nt, Human
cagggaagcccag

SEQ ID NO: 2064978 - RNA, 14 nt, Human
cagggaagcccagc

SEQ ID NO: 2064979 - RNA, 15 nt, Human
cagggaagcccagcu

SEQ ID NO: 2064980 - RNA, 16 nt, Human
cagggaagcccagcuc

SEQ ID NO: 2064981 - RNA, 18 nt, Human
cagggaagcccagcucca

SEQ ID NO: 2064982 - RNA, 19 nt, Human
cagggaagcccagcuccag

SEQ ID NO: 2064983 - RNA, 21 nt, Human
cagggaagcccagcuccaggg

SEQ ID NO: 2064984 - RNA, 23 nt, Human
cagggaagcccagcuccagggcc

SEQ ID NO: 2064985 - RNA, 14 nt, Human
cagggaaaggcucu

SEQ ID NO: 2064986 - RNA, 23 nt, Human
cagggaaaggcucugaaagccag

SEQ ID NO: 2064987 - RNA, 14 nt, Human
cauguguuccaagg

SEQ ID NO: 2064988 - RNA, 17 nt, Human
caugugugagugugugc

SEQ ID NO: 2064989 - RNA, 15 nt, Human
caugugugagugugu

SEQ ID NO: 2064990 - RNA, 19 nt, Human
cauguguuugguucugggg

SEQ ID NO: 2064991 - RNA, 14 nt, Human
cauguguugaaaaa

SEQ ID NO: 2064992 - RNA, 10 nt, Human
cauguuucuu

SEQ ID NO: 2064993 - RNA, 22 nt, Human
caugugccuauagucccagcua

SEQ ID NO: 2064994 - RNA, 14 nt, Human
caugugcccaguua

SEQ ID NO: 2064995 - RNA, 15 nt, Human
caugugccugcacca

SEQ ID NO: 2064996 - RNA, 16 nt, Human
caugugccugcaccag

SEQ ID NO: 2064997 - RNA, 17 nt, Human
caugugccugcaccagg

SEQ ID NO: 2064998 - RNA, 18 nt, Human
caugugccugcaccagga

SEQ ID NO: 2064999 - RNA, 20 nt, Human
caugugccugcaccaggaga

SEQ ID NO: 2065000 - RNA, 21 nt, Human
caugugccugcaccaggagac

SEQ ID NO: 2065001 - RNA, 22 nt, Human
caugugccugcaccaggagaca

SEQ ID NO: 2065002 - RNA, 23 nt, Human
caugugccugcaccaggagacag

SEQ ID NO: 2065003 - RNA, 14 nt, Human
caugugcacaugca

SEQ ID NO: 2065004 - RNA, 22 nt, Human
caugugccagguuuuuggucug

SEQ ID NO: 2065005 - RNA, 17 nt, Human
cauguguccaucccagc

SEQ ID NO: 2065006 - RNA, 18 nt, Human
cauguguccaucccagcg

SEQ ID NO: 2065007 - RNA, 21 nt, Human
cauguguccaucccagcggcu

SEQ ID NO: 2065008 - RNA, 12 nt, Human
caugucuggcua

SEQ ID NO: 2065009 - RNA, 17 nt, Human
caugucucucagaauuc

SEQ ID NO: 2065010 - RNA, 22 nt, Human
cauguacuguaguuuuucuuca

SEQ ID NO: 2065011 - RNA, 14 nt, Human
cauguacuguaguu

SEQ ID NO: 2065012 - RNA, 13 nt, Human
cauguacuguagu

SEQ ID NO: 2065013 - RNA, 14 nt, Human
cauguaaaagaguc

SEQ ID NO: 2065014 - RNA, 16 nt, Human
cauguaaaagagucau

SEQ ID NO: 2065015 - RNA, 19 nt, Human
cauguacccuaaggucauu

SEQ ID NO: 2065016 - RNA, 14 nt, Human
cauguaaauaaaua

SEQ ID NO: 2065017 - RNA, 12 nt, Human
cauguaaaacaa

SEQ ID NO: 2065018 - RNA, 13 nt, Human
cauguaaaacaaa

SEQ ID NO: 2065019 - RNA, 14 nt, Human
cauguaaaacaaaa

SEQ ID NO: 2065020 - RNA, 15 nt, Human
cauguaaaacaaaaa

SEQ ID NO: 2065021 - RNA, 16 nt, Human
cauguaaaacaaaaaa

SEQ ID NO: 2065022 - RNA, 18 nt, Human
cauguaaaacaaaaaaca

SEQ ID NO: 2065023 - RNA, 19 nt, Human
cauguaaaacaaaaaacaa

SEQ ID NO: 2065024 - RNA, 22 nt, Human
cauguaaaacaaaaaacaauau

SEQ ID NO: 2065025 - RNA, 20 nt, Human
caugguggcgcaagccugua

SEQ ID NO: 2065026 - RNA, 12 nt, Human
caugguggcgca

SEQ ID NO: 2065027 - RNA, 17 nt, Human
caugguggcgcaagccu

SEQ ID NO: 2065028 - RNA, 18 nt, Human
caugguggcgcaagccug

SEQ ID NO: 2065029 - RNA, 19 nt, Human
caugguggguucaggggac

SEQ ID NO: 2065030 - RNA, 22 nt, Human
cauuaaaaaaaaaaaaaaaagu

SEQ ID NO: 2065031 - RNA, 19 nt, Human
cauguuuuucuucucccuc

SEQ ID NO: 2065032 - RNA, 20 nt, Human
cauguuuuucuucucccuca

SEQ ID NO: 2065033 - RNA, 13 nt, Human
cauguuucuucau

SEQ ID NO: 2065034 - RNA, 21 nt, Human
caugugugagugugugcaagu

SEQ ID NO: 2065035 - RNA, 12 nt, Human
cauuaaaacaau

SEQ ID NO: 2065036 - RNA, 21 nt, Human
cauuaaaacaauauuguuucu

SEQ ID NO: 2065037 - RNA, 22 nt, Human
cauuaaaacaauauuguuucua

SEQ ID NO: 2065038 - RNA, 16 nt, Human
caugcagcccaugccc

SEQ ID NO: 2065039 - RNA, 19 nt, Human
caugcagcccaugcccacc

SEQ ID NO: 2065040 - RNA, 20 nt, Human
caugcagcccaugcccaccu

SEQ ID NO: 2065041 - RNA, 12 nt, Human
caugcagcagcu

SEQ ID NO: 2065042 - RNA, 13 nt, Human
caugcagcagcuu

SEQ ID NO: 2065043 - RNA, 14 nt, Human
caugcagcagcuug

SEQ ID NO: 2065044 - RNA, 16 nt, Human
caugcagcagcuugcu

SEQ ID NO: 2065045 - RNA, 17 nt, Human
caugcagcagcuugcug

SEQ ID NO: 2065046 - RNA, 14 nt, Human
caugcagcaucuaa

SEQ ID NO: 2065047 - RNA, 22 nt, Human
caugcagcccaugcccaccugc

SEQ ID NO: 2065048 - RNA, 23 nt, Human
caugcagcccaugcccaccugcc

SEQ ID NO: 2065049 - RNA, 18 nt, Human
caugcagaaagggagcag

SEQ ID NO: 2065050 - RNA, 21 nt, Human
caugcgggcugggcagcuguu

SEQ ID NO: 2065051 - RNA, 16 nt, Human
caugcggcccaggaug

SEQ ID NO: 2065052 - RNA, 15 nt, Human
caugcgggcugggca

SEQ ID NO: 2065053 - RNA, 18 nt, Human
caugcgggcugggcagcu

SEQ ID NO: 2065054 - RNA, 19 nt, Human
caugcgggcugggcagcug

SEQ ID NO: 2065055 - RNA, 20 nt, Human
caugcgggcugggcagcugu

SEQ ID NO: 2065056 - RNA, 12 nt, Human
cauggacccgga

SEQ ID NO: 2065057 - RNA, 15 nt, Human
cauggaccuaacauu

SEQ ID NO: 2065058 - RNA, 16 nt, Human
cauggaccuaacauuc

SEQ ID NO: 2065059 - RNA, 19 nt, Human
cauggacguucggggcaug

SEQ ID NO: 2065060 - RNA, 15 nt, Human
cauggacccggagcu

SEQ ID NO: 2065061 - RNA, 21 nt, Human
cauggacucuacacugugaac

SEQ ID NO: 2065062 - RNA, 15 nt, Human
cauggacuuccacug

SEQ ID NO: 2065063 - RNA, 14 nt, Human
cauggaggagcuug

SEQ ID NO: 2065064 - RNA, 13 nt, Human
cauggaggcacac

SEQ ID NO: 2065065 - RNA, 14 nt, Human
caugcuugaugguu

SEQ ID NO: 2065066 - RNA, 17 nt, Human
caugcuugaugguuuau

SEQ ID NO: 2065067 - RNA, 13 nt, Human
cauggaaauauua

SEQ ID NO: 2065068 - RNA, 14 nt, Human
cauggaaauauuau

SEQ ID NO: 2065069 - RNA, 16 nt, Human
cauggaaauauuaugc

SEQ ID NO: 2065070 - RNA, 17 nt, Human
cauggaaauauuaugca

SEQ ID NO: 2065071 - RNA, 19 nt, Human
cauggaaauauuaugcaaa

SEQ ID NO: 2065072 - RNA, 22 nt, Human
cauggaaauauuaugcaaauuc

SEQ ID NO: 2065073 - RNA, 18 nt, Human
caugggccuccugugugu

SEQ ID NO: 2065074 - RNA, 22 nt, Human
cauggaggagcuugggggauga

SEQ ID NO: 2065075 - RNA, 16 nt, Human
cauggaggcacacagc

SEQ ID NO: 2065076 - RNA, 19 nt, Human
cauggaggcacacagcugc

SEQ ID NO: 2065077 - RNA, 20 nt, Human
cauggaggcacacagcugca

SEQ ID NO: 2065078 - RNA, 19 nt, Human
caugggugaagggagagcc

SEQ ID NO: 2065079 - RNA, 22 nt, Human
caugggugaagggagagccagc

SEQ ID NO: 2065080 - RNA, 23 nt, Human
caugggugaagggagagccagcu

SEQ ID NO: 2065081 - RNA, 15 nt, Human
cauggguuaugugua

SEQ ID NO: 2065082 - RNA, 23 nt, Human
cauggguuauguguaugugccau

SEQ ID NO: 2065083 - RNA, 16 nt, Human
cauggguuuuguaggu

SEQ ID NO: 2065084 - RNA, 21 nt, Human
cauggguuuuguagguacuuu

SEQ ID NO: 2065085 - RNA, 23 nt, Human
cauggguuuuguagguacuuuug

SEQ ID NO: 2065086 - RNA, 13 nt, Human
caugguaauuuau

SEQ ID NO: 2065087 - RNA, 23 nt, Human
caugguaauuuauaguuuauaca

SEQ ID NO: 2065088 - RNA, 14 nt, Human
caugguauuugaga

SEQ ID NO: 2065089 - RNA, 16 nt, Human
caugguauuugagaca

SEQ ID NO: 2065090 - RNA, 15 nt, Human
cauggguagcuucug

SEQ ID NO: 2065091 - RNA, 16 nt, Human
cauggguagcuucuga

SEQ ID NO: 2065092 - RNA, 19 nt, Human
cauggguagcuucugaccu

SEQ ID NO: 2065093 - RNA, 22 nt, Human
cauggguagcuucugaccucag

SEQ ID NO: 2065094 - RNA, 23 nt, Human
cauggguagcuucugaccucagc

SEQ ID NO: 2065095 - RNA, 20 nt, Human
caugggguuggcugggccca

SEQ ID NO: 2065096 - RNA, 22 nt, Human
caugggguuggcugggcccaga

SEQ ID NO: 2065097 - RNA, 19 nt, Human
caugggguuggcugggccc

SEQ ID NO: 2065098 - RNA, 22 nt, Human
cauuuacccuucuuuucugacu

SEQ ID NO: 2065099 - RNA, 12 nt, Human
cauuuacacuuu

SEQ ID NO: 2065100 - RNA, 19 nt, Human
cauuuacacuuuugagacu

SEQ ID NO: 2065101 - RNA, 14 nt, Human
cauuuaauugagaa

SEQ ID NO: 2065102 - RNA, 14 nt, Human
cauuucuugggccc

SEQ ID NO: 2065103 - RNA, 15 nt, Human
cauuucuugggcccu

SEQ ID NO: 2065104 - RNA, 16 nt, Human
cauuucuugggcccuc

SEQ ID NO: 2065105 - RNA, 15 nt, Human
cauuuaaaaaaaauc

SEQ ID NO: 2065106 - RNA, 21 nt, Human
cauuguaauguuacugaucau

SEQ ID NO: 2065107 - RNA, 17 nt, Human
cauuguaauguuacuga

SEQ ID NO: 2065108 - RNA, 18 nt, Human
cauuguaauguuacugau

SEQ ID NO: 2065109 - RNA, 15 nt, Human
cauuguaauguuacu

SEQ ID NO: 2065110 - RNA, 16 nt, Human
cauuguaauguuacug

SEQ ID NO: 2065111 - RNA, 19 nt, Human
cauugauggggaaggaggc

SEQ ID NO: 2065112 - RNA, 15 nt, Human
cauugauugcugugu

SEQ ID NO: 2065113 - RNA, 16 nt, Human
cauugauugcuguguc

SEQ ID NO: 2065114 - RNA, 23 nt, Human
cauugauugcuguguccaacucc

SEQ ID NO: 2065115 - RNA, 16 nt, Human
cauugauugucagcua

SEQ ID NO: 2065116 - RNA, 16 nt, Human
cauugauggggaagga

SEQ ID NO: 2065117 - RNA, 17 nt, Human
cauugauugucagcuac

SEQ ID NO: 2065118 - RNA, 18 nt, Human
cauugauugucagcuacu

SEQ ID NO: 2065119 - RNA, 17 nt, Human
cauugugguuauuuuua

SEQ ID NO: 2065120 - RNA, 18 nt, Human
cauugugguuauuuuuau

SEQ ID NO: 2065121 - RNA, 20 nt, Human
cauugugguuauuuuuauac

SEQ ID NO: 2065122 - RNA, 21 nt, Human
cauugugguuauuuuuauaca

SEQ ID NO: 2065123 - RNA, 22 nt, Human
cauugugguuauuuuuauacag

SEQ ID NO: 2065124 - RNA, 23 nt, Human
cauugugguuauuuuuauacagu

SEQ ID NO: 2065125 - RNA, 17 nt, Human
cauugauaugaaaaaua

SEQ ID NO: 2065126 - RNA, 18 nt, Human
cauugauaugaaaaauau

SEQ ID NO: 2065127 - RNA, 19 nt, Human
cauugauaugaaaaauaug

SEQ ID NO: 2065128 - RNA, 14 nt, Human
cauugauggggaag

SEQ ID NO: 2065129 - RNA, 22 nt, Human
cauugauaugaaaaauaugaua

SEQ ID NO: 2065130 - RNA, 18 nt, Human
cauugaaguaaugaauuu

SEQ ID NO: 2065131 - RNA, 19 nt, Human
cauugaaguaaugaauuuu

SEQ ID NO: 2065132 - RNA, 14 nt, Human
cauugaagagagag

SEQ ID NO: 2065133 - RNA, 15 nt, Human
cauugaagagagagc

SEQ ID NO: 2065134 - RNA, 16 nt, Human
cauugaagagagagcu

SEQ ID NO: 2065135 - RNA, 17 nt, Human
cauuuuacuuuuuccug

SEQ ID NO: 2065136 - RNA, 20 nt, Human
cauuuuacuuuuuccuggcu

SEQ ID NO: 2065137 - RNA, 22 nt, Human
cauuuuacuuuuuccuggcuca

SEQ ID NO: 2065138 - RNA, 16 nt, Human
cauuuuacuguacaga

SEQ ID NO: 2065139 - RNA, 22 nt, Human
cauuuuacuguacagauugcug

SEQ ID NO: 2065140 - RNA, 16 nt, Human
cauuuucaccccaccc

SEQ ID NO: 2065141 - RNA, 17 nt, Human
cauuucuugggcccucc

SEQ ID NO: 2065142 - RNA, 18 nt, Human
cauuucuugggcccuccu

SEQ ID NO: 2065143 - RNA, 14 nt, Human
cauuugaugcuaaa

SEQ ID NO: 2065144 - RNA, 15 nt, Human
cauuugaugcuaaau

SEQ ID NO: 2065145 - RNA, 16 nt, Human
cauuugaugcuaaaua

SEQ ID NO: 2065146 - RNA, 15 nt, Human
cauuugauucugugu

SEQ ID NO: 2065147 - RNA, 15 nt, Human
cauuugcacccuccg

SEQ ID NO: 2065148 - RNA, 17 nt, Human
cauuugcacccuccgcc

SEQ ID NO: 2065149 - RNA, 15 nt, Human
cauuuucugaaacua

SEQ ID NO: 2065150 - RNA, 17 nt, Human
cauuuucugaaacuaau

SEQ ID NO: 2065151 - RNA, 20 nt, Human
cauuuucugaaacuaaugaa

SEQ ID NO: 2065152 - RNA, 12 nt, Human
cauuuucccaga

SEQ ID NO: 2065153 - RNA, 14 nt, Human
cauuuuccccccac

SEQ ID NO: 2065154 - RNA, 15 nt, Human
cauuuuccccccacu

SEQ ID NO: 2065155 - RNA, 17 nt, Human
cauuuucaccccacccu

SEQ ID NO: 2065156 - RNA, 14 nt, Human
cauuuucagacugc

SEQ ID NO: 2065157 - RNA, 19 nt, Human
cauuuucagacugcuuuaa

SEQ ID NO: 2065158 - RNA, 17 nt, Human
cauuuuccccccacucu

SEQ ID NO: 2065159 - RNA, 20 nt, Human
cauuuuccccccacucuccc

SEQ ID NO: 2065160 - RNA, 21 nt, Human
cauuuuccccccacucucccc

SEQ ID NO: 2065161 - RNA, 22 nt, Human
cauuuuccccccacucucccca

SEQ ID NO: 2065162 - RNA, 17 nt, Human
cauuuuuaguagagaca

SEQ ID NO: 2065163 - RNA, 16 nt, Human
ccaaaauuauuucaga

SEQ ID NO: 2065164 - RNA, 16 nt, Human
ccaaacaaauaugcaa

SEQ ID NO: 2065165 - RNA, 13 nt, Human
cauucaucucauu

SEQ ID NO: 2065166 - RNA, 15 nt, Human
cauucauaacuuuca

SEQ ID NO: 2065167 - RNA, 13 nt, Human
cauucaggaaaac

SEQ ID NO: 2065168 - RNA, 20 nt, Human
cauucaggaaaacugacaga

SEQ ID NO: 2065169 - RNA, 23 nt, Human
cauucaggaaaacugacagagga

SEQ ID NO: 2065170 - RNA, 12 nt, Human
cauucaggaacc

SEQ ID NO: 2065171 - RNA, 15 nt, Human
cauucaggaaccugg

SEQ ID NO: 2065172 - RNA, 19 nt, Human
cauucaggaaccuggacca

SEQ ID NO: 2065173 - RNA, 20 nt, Human
cauucacccagacagcuccc

SEQ ID NO: 2065174 - RNA, 18 nt, Human
cauucacuugcauuucuu

SEQ ID NO: 2065175 - RNA, 13 nt, Human
cauucagaacacc

SEQ ID NO: 2065176 - RNA, 21 nt, Human
cauucagaacaccaagacuug

SEQ ID NO: 2065177 - RNA, 15 nt, Human
cauucacuugcauuu

SEQ ID NO: 2065178 - RNA, 15 nt, Human
cauuccaaaacgaag

SEQ ID NO: 2065179 - RNA, 17 nt, Human
cauuccaccuucccaug

SEQ ID NO: 2065180 - RNA, 22 nt, Human
cauuccaccuucccaugcccug

SEQ ID NO: 2065181 - RNA, 23 nt, Human
cauuccaacagcucaagucuucc

SEQ ID NO: 2065182 - RNA, 21 nt, Human
cauuccaugugcccaguuaau

SEQ ID NO: 2065183 - RNA, 12 nt, Human
cauuccaggcuc

SEQ ID NO: 2065184 - RNA, 13 nt, Human
cauuccaggcucc

SEQ ID NO: 2065185 - RNA, 17 nt, Human
cauuccaggcuccuccc

SEQ ID NO: 2065186 - RNA, 15 nt, Human
cauuccaugugccca

SEQ ID NO: 2065187 - RNA, 16 nt, Human
cauuccaugugcccag

SEQ ID NO: 2065188 - RNA, 17 nt, Human
cauuccaugugcccagu

SEQ ID NO: 2065189 - RNA, 18 nt, Human
cauuccaugugcccaguu

SEQ ID NO: 2065190 - RNA, 14 nt, Human
cauuccaagccuga

SEQ ID NO: 2065191 - RNA, 11 nt, Human
cauucccugag

SEQ ID NO: 2065192 - RNA, 17 nt, Human
cauucccugagucacca

SEQ ID NO: 2065193 - RNA, 22 nt, Human
cauuccgacaaccgaugcucca

SEQ ID NO: 2065194 - RNA, 18 nt, Human
cauucccugagucaccag

SEQ ID NO: 2065195 - RNA, 20 nt, Human
cauucccugagucaccagga

SEQ ID NO: 2065196 - RNA, 21 nt, Human
cauucccugagucaccaggaa

SEQ ID NO: 2065197 - RNA, 20 nt, Human
cauuccuaacacagcaugug

SEQ ID NO: 2065198 - RNA, 21 nt, Human
cauuccuaacacagcaugugu

SEQ ID NO: 2065199 - RNA, 13 nt, Human
cauuccuauuucu

SEQ ID NO: 2065200 - RNA, 23 nt, Human
cauuccuaacacagcauguguau

SEQ ID NO: 2065201 - RNA, 13 nt, Human
cauuccccauggg

SEQ ID NO: 2065202 - RNA, 15 nt, Human
cauuccccagccucu

SEQ ID NO: 2065203 - RNA, 13 nt, Human
cauuccccaggug

SEQ ID NO: 2065204 - RNA, 17 nt, Human
cauuccccagguggcug

SEQ ID NO: 2065205 - RNA, 23 nt, Human
cauuccccagguggcugacccag

SEQ ID NO: 2065206 - RNA, 18 nt, Human
cauuaccagacgguucac

SEQ ID NO: 2065207 - RNA, 14 nt, Human
cauuacucuuguaa

SEQ ID NO: 2065208 - RNA, 16 nt, Human
cauuacucuuguaaga

SEQ ID NO: 2065209 - RNA, 17 nt, Human
cauuacucuuguaagau

SEQ ID NO: 2065210 - RNA, 18 nt, Human
cauuacucuuguaagauu

SEQ ID NO: 2065211 - RNA, 19 nt, Human
cauuacucuuguaagauuu

SEQ ID NO: 2065212 - RNA, 20 nt, Human
cauuacucuuguaagauuuu

SEQ ID NO: 2065213 - RNA, 22 nt, Human
cauuacucuuguaagauuuuga

SEQ ID NO: 2065214 - RNA, 23 nt, Human
cauuacucuuguaagauuuugaa

SEQ ID NO: 2065215 - RNA, 17 nt, Human
cauuagaaauagacagu

SEQ ID NO: 2065216 - RNA, 18 nt, Human
cauuagaaauuagcugug

SEQ ID NO: 2065217 - RNA, 17 nt, Human
cauuauuggaauuaacc

SEQ ID NO: 2065218 - RNA, 18 nt, Human
cauuauuggaauuaaccu

SEQ ID NO: 2065219 - RNA, 20 nt, Human
cauuauuggaauuaaccugg

SEQ ID NO: 2065220 - RNA, 22 nt, Human
cauuauuggaauuaaccuggug

SEQ ID NO: 2065221 - RNA, 14 nt, Human
cauuauuggaauua

SEQ ID NO: 2065222 - RNA, 12 nt, Human
cauuauuggaau

SEQ ID NO: 2065223 - RNA, 16 nt, Human
cauucaaaaguugaaa

SEQ ID NO: 2065224 - RNA, 17 nt, Human
cauucaaaaguugaaau

SEQ ID NO: 2065225 - RNA, 23 nt, Human
cauuauuggaauuaaccuggugc

SEQ ID NO: 2065226 - RNA, 18 nt, Human
cauucaaaaguugaaauu

SEQ ID NO: 2065227 - RNA, 17 nt, Human
cauucaagucagcucuu

SEQ ID NO: 2065228 - RNA, 16 nt, Human
cauucaagucagcucu

SEQ ID NO: 2065229 - RNA, 21 nt, Human
cauucaauuuauucaagaaaa

SEQ ID NO: 2065230 - RNA, 13 nt, Human
cauucaauguuua

SEQ ID NO: 2065231 - RNA, 22 nt, Human
cauucaauaagcaucaaacucu

SEQ ID NO: 2065232 - RNA, 20 nt, Human
cauucaauuuauucaagaaa

SEQ ID NO: 2065233 - RNA, 13 nt, Human
cauucacccagac

SEQ ID NO: 2065234 - RNA, 14 nt, Human
cauucacccagaca

SEQ ID NO: 2065235 - RNA, 21 nt, Human
cauucaauaagcaucaaacuc

SEQ ID NO: 2065236 - RNA, 16 nt, Human
cauucaauacaagugu

SEQ ID NO: 2065237 - RNA, 21 nt, Human
cauuaacaguuuuccaugaaa

SEQ ID NO: 2065238 - RNA, 22 nt, Human
cauuaacaguuuuccaugaaaa

SEQ ID NO: 2065239 - RNA, 16 nt, Human
cauuaacuaaucuauu

SEQ ID NO: 2065240 - RNA, 18 nt, Human
cauuaacuaaucuauugg

SEQ ID NO: 2065241 - RNA, 23 nt, Human
cauuaacaguuuuccaugaaaac

SEQ ID NO: 2065242 - RNA, 16 nt, Human
cauuaagccuuccaca

SEQ ID NO: 2065243 - RNA, 13 nt, Human
cauuaagcaucac

SEQ ID NO: 2065244 - RNA, 15 nt, Human
cauuaagcaucacaa

SEQ ID NO: 2065245 - RNA, 19 nt, Human
cauuaagcaucacaaauga

SEQ ID NO: 2065246 - RNA, 17 nt, Human
cauuaacuuagcaugug

SEQ ID NO: 2065247 - RNA, 13 nt, Human
cauuacagagagg

SEQ ID NO: 2065248 - RNA, 15 nt, Human
cauuacagagaggag

SEQ ID NO: 2065249 - RNA, 18 nt, Human
cauuacagagaggagaaa

SEQ ID NO: 2065250 - RNA, 20 nt, Human
cauuacagagaggagaaaca

SEQ ID NO: 2065251 - RNA, 23 nt, Human
cauuaaaacuuaaccgcaucaga

SEQ ID NO: 2065252 - RNA, 22 nt, Human
cauuacagagaggagaaacaca

SEQ ID NO: 2065253 - RNA, 21 nt, Human
cauuacagagaggagaaacac

SEQ ID NO: 2065254 - RNA, 21 nt, Human
cauuacagugggugccccccu

SEQ ID NO: 2065255 - RNA, 20 nt, Human
cauuacauuccuugauaaug

SEQ ID NO: 2065256 - RNA, 21 nt, Human
cauuacauuccuugauaaugu

SEQ ID NO: 2065257 - RNA, 22 nt, Human
cauuacauuccuugauaauguu

SEQ ID NO: 2065258 - RNA, 16 nt, Human
cauucuggucucucua

SEQ ID NO: 2065259 - RNA, 18 nt, Human
cauucuggucucucuauu

SEQ ID NO: 2065260 - RNA, 12 nt, Human
cauucuggucuc

SEQ ID NO: 2065261 - RNA, 20 nt, Human
cauucugcuuucaucuuggu

SEQ ID NO: 2065262 - RNA, 15 nt, Human
cauucuuagccugug

SEQ ID NO: 2065263 - RNA, 21 nt, Human
cauucuuagccuguggcagua

SEQ ID NO: 2065264 - RNA, 22 nt, Human
cauucuuagccuguggcaguaa

SEQ ID NO: 2065265 - RNA, 20 nt, Human
cauucugccugcccaggccc

SEQ ID NO: 2065266 - RNA, 19 nt, Human
cauucugccugcccaggcc

SEQ ID NO: 2065267 - RNA, 18 nt, Human
cauucugccugcccaggc

SEQ ID NO: 2065268 - RNA, 17 nt, Human
cauucugccugcccagg

SEQ ID NO: 2065269 - RNA, 16 nt, Human
cauucugccugcccag

SEQ ID NO: 2065270 - RNA, 15 nt, Human
cauucugccugccca

SEQ ID NO: 2065271 - RNA, 13 nt, Human
cauucugccugcc

SEQ ID NO: 2065272 - RNA, 12 nt, Human
cauucugccugc

SEQ ID NO: 2065273 - RNA, 16 nt, Human
cauucugaccauuuca

SEQ ID NO: 2065274 - RNA, 17 nt, Human
cauucugaccauuucag

SEQ ID NO: 2065275 - RNA, 22 nt, Human
cauucugccaggcccccaagcc

SEQ ID NO: 2065276 - RNA, 13 nt, Human
cauuccugccugu

SEQ ID NO: 2065277 - RNA, 14 nt, Human
cauuccugccuguc

SEQ ID NO: 2065278 - RNA, 15 nt, Human
cauuccugccugucu

SEQ ID NO: 2065279 - RNA, 16 nt, Human
cauuccugccugucuc

SEQ ID NO: 2065280 - RNA, 15 nt, Human
cauuccuggagcccg

SEQ ID NO: 2065281 - RNA, 16 nt, Human
cauuccuggagcccga

SEQ ID NO: 2065282 - RNA, 17 nt, Human
cauuccuggagcccgag

SEQ ID NO: 2065283 - RNA, 18 nt, Human
cauuccuggagcccgagg

SEQ ID NO: 2065284 - RNA, 19 nt, Human
cauuccugaaagaaacagu

SEQ ID NO: 2065285 - RNA, 13 nt, Human
cauuccugaaaga

SEQ ID NO: 2065286 - RNA, 13 nt, Human
cauuccucaggga

SEQ ID NO: 2065287 - RNA, 16 nt, Human
cauuccucagggacag

SEQ ID NO: 2065288 - RNA, 23 nt, Human
cauuccucagggacagagacacc

SEQ ID NO: 2065289 - RNA, 23 nt, Human
cauucuucuguacgucugacagg

SEQ ID NO: 2065290 - RNA, 17 nt, Human
cauucuugaaagcugug

SEQ ID NO: 2065291 - RNA, 18 nt, Human
cauucuugucacaauaaa

SEQ ID NO: 2065292 - RNA, 19 nt, Human
cauucuugucacaauaaau

SEQ ID NO: 2065293 - RNA, 12 nt, Human
cauucuuugcuu

SEQ ID NO: 2065294 - RNA, 13 nt, Human
cauucuuugcuug

SEQ ID NO: 2065295 - RNA, 15 nt, Human
cauucuuugcuugaa

SEQ ID NO: 2065296 - RNA, 19 nt, Human
cauucuuugcuugaacaca

SEQ ID NO: 2065297 - RNA, 20 nt, Human
cauucuuugcuugaacacag

SEQ ID NO: 2065298 - RNA, 21 nt, Human
cauucuuugcuugaacacagu

SEQ ID NO: 2065299 - RNA, 18 nt, Human
caucugccccucccccaa

SEQ ID NO: 2065300 - RNA, 17 nt, Human
caucuugcucugcugac

SEQ ID NO: 2065301 - RNA, 16 nt, Human
caucuugcucugcuga

SEQ ID NO: 2065302 - RNA, 15 nt, Human
caucuugcucugcug

SEQ ID NO: 2065303 - RNA, 19 nt, Human
caucuugcucugcugacag

SEQ ID NO: 2065304 - RNA, 23 nt, Human
caucuuucuucuauuuuauuccc

SEQ ID NO: 2065305 - RNA, 20 nt, Human
caucucucccuccccugcca

SEQ ID NO: 2065306 - RNA, 23 nt, Human
caucucucccuccccugccauuu

SEQ ID NO: 2065307 - RNA, 21 nt, Human
caucucucuacuccuaccuca

SEQ ID NO: 2065308 - RNA, 22 nt, Human
caucucucuacuccuaccucag

SEQ ID NO: 2065309 - RNA, 22 nt, Human
caucucuacuaaaaauacaaac

SEQ ID NO: 2065310 - RNA, 12 nt, Human
caucucucccuc

SEQ ID NO: 2065311 - RNA, 15 nt, Human
caucucucccucccc

SEQ ID NO: 2065312 - RNA, 16 nt, Human
caucucucccuccccu

SEQ ID NO: 2065313 - RNA, 18 nt, Human
caucucugaacuucagcu

SEQ ID NO: 2065314 - RNA, 23 nt, Human
caucucucuacuccuaccucagc

SEQ ID NO: 2065315 - RNA, 14 nt, Human
caucucucuuuaau

SEQ ID NO: 2065316 - RNA, 14 nt, Human
caucugacacaaaa

SEQ ID NO: 2065317 - RNA, 15 nt, Human
caucugacacaaaaa

SEQ ID NO: 2065318 - RNA, 16 nt, Human
caucugacacaaaaaa

SEQ ID NO: 2065319 - RNA, 15 nt, Human
caucugaagagcaga

SEQ ID NO: 2065320 - RNA, 12 nt, Human
caucugaaagcc

SEQ ID NO: 2065321 - RNA, 13 nt, Human
caucugaaagcca

SEQ ID NO: 2065322 - RNA, 16 nt, Human
caucugaaagccacgu

SEQ ID NO: 2065323 - RNA, 14 nt, Human
caucugaaagccac

SEQ ID NO: 2065324 - RNA, 22 nt, Human
caucuccugaggaucagaaagu

SEQ ID NO: 2065325 - RNA, 23 nt, Human
caucugcacccucgaugaagccc

SEQ ID NO: 2065326 - RNA, 19 nt, Human
caucugcauuuucacccca

SEQ ID NO: 2065327 - RNA, 20 nt, Human
caucugcauuuucaccccac

SEQ ID NO: 2065328 - RNA, 11 nt, Human
caucugccccu

SEQ ID NO: 2065329 - RNA, 13 nt, Human
caucugccccucc

SEQ ID NO: 2065330 - RNA, 14 nt, Human
caucugccccuccc

SEQ ID NO: 2065331 - RNA, 15 nt, Human
caucugccccucccc

SEQ ID NO: 2065332 - RNA, 16 nt, Human
caucugccccuccccc

SEQ ID NO: 2065333 - RNA, 17 nt, Human
caucugccccuccccca

SEQ ID NO: 2065334 - RNA, 21 nt, Human
cauccuaccacaaugcagugc

SEQ ID NO: 2065335 - RNA, 23 nt, Human
cauccggaggagaagaaggaaau

SEQ ID NO: 2065336 - RNA, 15 nt, Human
cauccggcagccugg

SEQ ID NO: 2065337 - RNA, 16 nt, Human
cauccggcagccugga

SEQ ID NO: 2065338 - RNA, 20 nt, Human
caucuccuccauacucagga

SEQ ID NO: 2065339 - RNA, 22 nt, Human
caucucccucgaacccacacug

SEQ ID NO: 2065340 - RNA, 23 nt, Human
caucucccucgaacccacacugc

SEQ ID NO: 2065341 - RNA, 24 nt, Human
caucucccucgaacccacacugca

SEQ ID NO: 2065342 - RNA, 23 nt, Human
cauccuaccacaaugcagugccu

SEQ ID NO: 2065343 - RNA, 20 nt, Human
caucuccugugcauggguga

SEQ ID NO: 2065344 - RNA, 21 nt, Human
caucucgccaccccuccuucc

SEQ ID NO: 2065345 - RNA, 22 nt, Human
caucucgccaccccuccuuccu

SEQ ID NO: 2065346 - RNA, 13 nt, Human
caucuccugugca

SEQ ID NO: 2065347 - RNA, 15 nt, Human
caucuccugugcaug

SEQ ID NO: 2065348 - RNA, 19 nt, Human
caucuccugugcaugggug

SEQ ID NO: 2065349 - RNA, 16 nt, Human
caucucuacaaaaagc

SEQ ID NO: 2065350 - RNA, 14 nt, Human
caugauaugucagg

SEQ ID NO: 2065351 - RNA, 15 nt, Human
caugaguuugcccug

SEQ ID NO: 2065352 - RNA, 16 nt, Human
caugaguuugcccugg

SEQ ID NO: 2065353 - RNA, 22 nt, Human
caugaguuugcccugguuucac

SEQ ID NO: 2065354 - RNA, 19 nt, Human
caugaguuuuuucucuugg

SEQ ID NO: 2065355 - RNA, 22 nt, Human
caugaguuuuuucucuugggcu

SEQ ID NO: 2065356 - RNA, 21 nt, Human
caugaucuugugacauauuau

SEQ ID NO: 2065357 - RNA, 15 nt, Human
caugaugagcuccuc

SEQ ID NO: 2065358 - RNA, 18 nt, Human
caugaugagcuccucuuc

SEQ ID NO: 2065359 - RNA, 19 nt, Human
caugaugagcuccucuucc

SEQ ID NO: 2065360 - RNA, 15 nt, Human
caugaucucccugcc

SEQ ID NO: 2065361 - RNA, 13 nt, Human
caugauccugagu

SEQ ID NO: 2065362 - RNA, 13 nt, Human
caugaucucccug

SEQ ID NO: 2065363 - RNA, 16 nt, Human
caugaucucccugccg

SEQ ID NO: 2065364 - RNA, 17 nt, Human
caugaucucccugccgc

SEQ ID NO: 2065365 - RNA, 18 nt, Human
caugaucucccugccgcc

SEQ ID NO: 2065366 - RNA, 19 nt, Human
caugaucucccugccgccu

SEQ ID NO: 2065367 - RNA, 20 nt, Human
caugaucucccugccgccuc

SEQ ID NO: 2065368 - RNA, 21 nt, Human
caugaucucccugccgccuca

SEQ ID NO: 2065369 - RNA, 20 nt, Human
caugaggggcccgagcagaa

SEQ ID NO: 2065370 - RNA, 21 nt, Human
caugaggccucaguggacuuu

SEQ ID NO: 2065371 - RNA, 24 nt, Human
caugaggcaaugucaggaacagaa

SEQ ID NO: 2065372 - RNA, 16 nt, Human
caugaggaguugcugu

SEQ ID NO: 2065373 - RNA, 15 nt, Human
caugaggaguugcug

SEQ ID NO: 2065374 - RNA, 22 nt, Human
caugaggcaaugucaggaacag

SEQ ID NO: 2065375 - RNA, 23 nt, Human
caugaggcaaugucaggaacaga

SEQ ID NO: 2065376 - RNA, 17 nt, Human
caugagggaucacaggg

SEQ ID NO: 2065377 - RNA, 18 nt, Human
caugagggaucacagggc

SEQ ID NO: 2065378 - RNA, 16 nt, Human
caugaggggcccgagc

SEQ ID NO: 2065379 - RNA, 19 nt, Human
caugagggaucacagggcc

SEQ ID NO: 2065380 - RNA, 20 nt, Human
caugagggaucacagggccc

SEQ ID NO: 2065381 - RNA, 20 nt, Human
caugaggacaugauggagcg

SEQ ID NO: 2065382 - RNA, 21 nt, Human
caugaggacaugauggagcgc

SEQ ID NO: 2065383 - RNA, 22 nt, Human
caugaggacaugauggagcgca

SEQ ID NO: 2065384 - RNA, 14 nt, Human
caugaggaggcaga

SEQ ID NO: 2065385 - RNA, 23 nt, Human
caugagccucagcauccuggcac

SEQ ID NO: 2065386 - RNA, 22 nt, Human
caugagccucagcauccuggca

SEQ ID NO: 2065387 - RNA, 13 nt, Human
caugagcuccaga

SEQ ID NO: 2065388 - RNA, 14 nt, Human
caugagcuccagac

SEQ ID NO: 2065389 - RNA, 15 nt, Human
caugagcuccagacc

SEQ ID NO: 2065390 - RNA, 16 nt, Human
caugagcuccagaccc

SEQ ID NO: 2065391 - RNA, 17 nt, Human
caugagcuccagacccc

SEQ ID NO: 2065392 - RNA, 19 nt, Human
caugagcuccagaccccca

SEQ ID NO: 2065393 - RNA, 21 nt, Human
caugagcuccagacccccagc

SEQ ID NO: 2065394 - RNA, 23 nt, Human
caugagcuccagacccccagcaa

SEQ ID NO: 2065395 - RNA, 23 nt, Human
caugagagaauuguaucauuuga

SEQ ID NO: 2065396 - RNA, 20 nt, Human
caugagaucuaggugaggau

SEQ ID NO: 2065397 - RNA, 14 nt, Human
caugagacacaucu

SEQ ID NO: 2065398 - RNA, 19 nt, Human
caugagacacaucuccucc

SEQ ID NO: 2065399 - RNA, 12 nt, Human
caugagaacaga

SEQ ID NO: 2065400 - RNA, 15 nt, Human
caugagaacagacug

SEQ ID NO: 2065401 - RNA, 20 nt, Human
caugagaacagacuggccug

SEQ ID NO: 2065402 - RNA, 23 nt, Human
caugagaacagacuggccugagg

SEQ ID NO: 2065403 - RNA, 22 nt, Human
caugacuugagaaacaaauaau

SEQ ID NO: 2065404 - RNA, 20 nt, Human
caugacucguauaugucuca

SEQ ID NO: 2065405 - RNA, 19 nt, Human
caugacgacaaagcugcua

SEQ ID NO: 2065406 - RNA, 23 nt, Human
caugacgacaaagcugcuaaauc

SEQ ID NO: 2065407 - RNA, 13 nt, Human
caugacugcauuu

SEQ ID NO: 2065408 - RNA, 16 nt, Human
caugacugcauuuuac

SEQ ID NO: 2065409 - RNA, 23 nt, Human
caugacugcauuuuacuguacag

SEQ ID NO: 2065410 - RNA, 23 nt, Human
caugacucguauaugucucaggu

SEQ ID NO: 2065411 - RNA, 14 nt, Human
caugaccugugacc

SEQ ID NO: 2065412 - RNA, 16 nt, Human
caugaccugugaccag

SEQ ID NO: 2065413 - RNA, 17 nt, Human
caugaccugugaccagc

SEQ ID NO: 2065414 - RNA, 18 nt, Human
caugaccugugaccagca

SEQ ID NO: 2065415 - RNA, 17 nt, Human
caugaagccacagccca

SEQ ID NO: 2065416 - RNA, 21 nt, Human
caugaagccacagcccaggcc

SEQ ID NO: 2065417 - RNA, 22 nt, Human
caugaagccacagcccaggccu

SEQ ID NO: 2065418 - RNA, 24 nt, Human
caugaagccacagcccaggccucc

SEQ ID NO: 2065419 - RNA, 21 nt, Human
caugagccucagcauccuggc

SEQ ID NO: 2065420 - RNA, 20 nt, Human
caugagccucagcauccugg

SEQ ID NO: 2065421 - RNA, 19 nt, Human
caugagccucagcauccug

SEQ ID NO: 2065422 - RNA, 18 nt, Human
caugagccucagcauccu

SEQ ID NO: 2065423 - RNA, 17 nt, Human
caugagccucagcaucc

SEQ ID NO: 2065424 - RNA, 15 nt, Human
caugagccucagcau

SEQ ID NO: 2065425 - RNA, 12 nt, Human
caugagccucag

SEQ ID NO: 2065426 - RNA, 15 nt, Human
caugaaauaugcauc

SEQ ID NO: 2065427 - RNA, 14 nt, Human
caugaaauaugcau

SEQ ID NO: 2065428 - RNA, 13 nt, Human
caugaaauaugca

SEQ ID NO: 2065429 - RNA, 19 nt, Human
caugaacacaucagcuagc

SEQ ID NO: 2065430 - RNA, 24 nt, Human
caugaaauugucuagcagagcagg

SEQ ID NO: 2065431 - RNA, 14 nt, Human
caugaagacaggac

SEQ ID NO: 2065432 - RNA, 15 nt, Human
caugaagacaggaca

SEQ ID NO: 2065433 - RNA, 16 nt, Human
caugaagacaggacag

SEQ ID NO: 2065434 - RNA, 17 nt, Human
caugaagacaggacagu

SEQ ID NO: 2065435 - RNA, 21 nt, Human
caugaaaacguuuuauugugu

SEQ ID NO: 2065436 - RNA, 22 nt, Human
caugaaaacguuuuauuguguu

SEQ ID NO: 2065437 - RNA, 23 nt, Human
caugaaaaagcagcuaccaggug

SEQ ID NO: 2065438 - RNA, 16 nt, Human
caugaaaacguuuuau

SEQ ID NO: 2065439 - RNA, 17 nt, Human
caugaaaacguuuuauu

SEQ ID NO: 2065440 - RNA, 19 nt, Human
caugaaaacguuuuauugu

SEQ ID NO: 2065441 - RNA, 12 nt, Human
caugaaaaagca

SEQ ID NO: 2065442 - RNA, 13 nt, Human
caugaaaaagcag

SEQ ID NO: 2065443 - RNA, 15 nt, Human
caugaaaaagcagcu

SEQ ID NO: 2065444 - RNA, 18 nt, Human
caugaaaaagcagcuacc

SEQ ID NO: 2065445 - RNA, 19 nt, Human
caugaaaaagcagcuacca

SEQ ID NO: 2065446 - RNA, 21 nt, Human
caugaaaaccauuaccugacu

SEQ ID NO: 2065447 - RNA, 22 nt, Human
caugaaaaccauuaccugacuu

SEQ ID NO: 2065448 - RNA, 13 nt, Human
caugaaaacguuu

SEQ ID NO: 2065449 - RNA, 16 nt, Human
caugaaaauccuacca

SEQ ID NO: 2065450 - RNA, 21 nt, Human
caugaaaauccuaccaaccuc

SEQ ID NO: 2065451 - RNA, 22 nt, Human
caugaaaauccuaccaaccucu

SEQ ID NO: 2065452 - RNA, 13 nt, Human
caugaaaaugcaa

SEQ ID NO: 2065453 - RNA, 15 nt, Human
caugaaaaugcaaca

SEQ ID NO: 2065454 - RNA, 22 nt, Human
caugaaaaugcaacaacaugua

SEQ ID NO: 2065455 - RNA, 13 nt, Human
caugaaacaaagc

SEQ ID NO: 2065456 - RNA, 13 nt, Human
caucuuuuacauu

SEQ ID NO: 2065457 - RNA, 16 nt, Human
caucuuucuucuauuu

SEQ ID NO: 2065458 - RNA, 21 nt, Human
caucuuucuucuauuuuauuc

SEQ ID NO: 2065459 - RNA, 15 nt, Human
caucuuugccuuggg

SEQ ID NO: 2065460 - RNA, 17 nt, Human
caucuuugccuugggcu

SEQ ID NO: 2065461 - RNA, 22 nt, Human
caucuuugccuugggcugcucc

SEQ ID NO: 2065462 - RNA, 23 nt, Human
caucuuugccuugggcugcuccu

SEQ ID NO: 2065463 - RNA, 12 nt, Human
caucuuucacau

SEQ ID NO: 2065464 - RNA, 13 nt, Human
caucuuucacauu

SEQ ID NO: 2065465 - RNA, 14 nt, Human
caucuuucacacuu

SEQ ID NO: 2065466 - RNA, 18 nt, Human
cauaguauuccauugugu

SEQ ID NO: 2065467 - RNA, 17 nt, Human
cauaguauauuaaaaau

SEQ ID NO: 2065468 - RNA, 19 nt, Human
cauaguauauuaaaaaugg

SEQ ID NO: 2065469 - RNA, 23 nt, Human
cauaguauauuaaaaaugguaaa

SEQ ID NO: 2065470 - RNA, 21 nt, Human
cauaguauuccauugugugag

SEQ ID NO: 2065471 - RNA, 13 nt, Human
cauagucccagcu

SEQ ID NO: 2065472 - RNA, 17 nt, Human
cauaguaugguggcugg

SEQ ID NO: 2065473 - RNA, 16 nt, Human
cauaguaugguggcug

SEQ ID NO: 2065474 - RNA, 15 nt, Human
cauaguaugguggcu

SEQ ID NO: 2065475 - RNA, 21 nt, Human
cauaguacucuuuguagcaaa

SEQ ID NO: 2065476 - RNA, 23 nt, Human
cagugcugaccagacagccuccc

SEQ ID NO: 2065477 - RNA, 15 nt, Human
cagugcuguacuuga

SEQ ID NO: 2065478 - RNA, 12 nt, Human
cagugcuguggc

SEQ ID NO: 2065479 - RNA, 13 nt, Human
cagugcuguggcc

SEQ ID NO: 2065480 - RNA, 15 nt, Human
cagugcuguggccug

SEQ ID NO: 2065481 - RNA, 18 nt, Human
cagugcuguggccugggc

SEQ ID NO: 2065482 - RNA, 20 nt, Human
cagugcuguggccugggcaa

SEQ ID NO: 2065483 - RNA, 19 nt, Human
cagugcuugauugcgugga

SEQ ID NO: 2065484 - RNA, 20 nt, Human
cagugcuugaguuuggggaa

SEQ ID NO: 2065485 - RNA, 17 nt, Human
cagugcuucucuacaga

SEQ ID NO: 2065486 - RNA, 19 nt, Human
cagugcuguggccugggca

SEQ ID NO: 2065487 - RNA, 14 nt, Human
cagugcuucagccu

SEQ ID NO: 2065488 - RNA, 15 nt, Human
cagugcuucagccug

SEQ ID NO: 2065489 - RNA, 16 nt, Human
cagugcuucagccuga

SEQ ID NO: 2065490 - RNA, 17 nt, Human
cagugcuucagccugag

SEQ ID NO: 2065491 - RNA, 18 nt, Human
cagugcuucagccugagg

SEQ ID NO: 2065492 - RNA, 19 nt, Human
cagugcuucagccugaggc

SEQ ID NO: 2065493 - RNA, 20 nt, Human
cagugcuucagccugaggcu

SEQ ID NO: 2065494 - RNA, 20 nt, Human
cauagugagaccccugucuc

SEQ ID NO: 2065495 - RNA, 21 nt, Human
cauagugagaccccugucucc

SEQ ID NO: 2065496 - RNA, 22 nt, Human
cauagugaccggcugcuuuucc

SEQ ID NO: 2065497 - RNA, 18 nt, Human
cauagugaccggcugcuu

SEQ ID NO: 2065498 - RNA, 19 nt, Human
cauagugaugguuccccug

SEQ ID NO: 2065499 - RNA, 18 nt, Human
cauagugaugguuccccu

SEQ ID NO: 2065500 - RNA, 23 nt, Human
cauauaagauucauauuuacuuc

SEQ ID NO: 2065501 - RNA, 22 nt, Human
cauauauggggggccaacacca

SEQ ID NO: 2065502 - RNA, 21 nt, Human
cauauauggggggccaacacc

SEQ ID NO: 2065503 - RNA, 23 nt, Human
cauauauauguuuuaagaggcag

SEQ ID NO: 2065504 - RNA, 11 nt, Human
cauaucuaacc

SEQ ID NO: 2065505 - RNA, 18 nt, Human
cauaucuaaccagugauu

SEQ ID NO: 2065506 - RNA, 17 nt, Human
cauaugaaauuuaauau

SEQ ID NO: 2065507 - RNA, 22 nt, Human
cauauucuguuggccaguguga

SEQ ID NO: 2065508 - RNA, 18 nt, Human
cauaugaaaauacaacuu

SEQ ID NO: 2065509 - RNA, 13 nt, Human
cauaucuaucaga

SEQ ID NO: 2065510 - RNA, 17 nt, Human
cauaucuaucagaguau

SEQ ID NO: 2065511 - RNA, 14 nt, Human
cauauuuguuaaau

SEQ ID NO: 2065512 - RNA, 19 nt, Human
cauauuuguuaaauauuua

SEQ ID NO: 2065513 - RNA, 20 nt, Human
cauauuuguuaaauauuuac

SEQ ID NO: 2065514 - RNA, 14 nt, Human
cauauuguuauuau

SEQ ID NO: 2065515 - RNA, 19 nt, Human
cauauuugcauauguauga

SEQ ID NO: 2065516 - RNA, 15 nt, Human
cauauuugcauaugu

SEQ ID NO: 2065517 - RNA, 17 nt, Human
cauauuugcauauguau

SEQ ID NO: 2065518 - RNA, 21 nt, Human
cauauuuguuaaauauuuaca

SEQ ID NO: 2065519 - RNA, 14 nt, Human
caucaacaucuugg

SEQ ID NO: 2065520 - RNA, 23 nt, Human
cauccagucucccaacuuguauu

SEQ ID NO: 2065521 - RNA, 22 nt, Human
cauccacucuacccucccaccc

SEQ ID NO: 2065522 - RNA, 18 nt, Human
cauccacucuacccuccc

SEQ ID NO: 2065523 - RNA, 19 nt, Human
cauccacucuacccuccca

SEQ ID NO: 2065524 - RNA, 17 nt, Human
cauccagguucagcuug

SEQ ID NO: 2065525 - RNA, 23 nt, Human
cauccacugugccaugugccagg

SEQ ID NO: 2065526 - RNA, 17 nt, Human
cauccacugugccaugu

SEQ ID NO: 2065527 - RNA, 14 nt, Human
cauccacugugcca

SEQ ID NO: 2065528 - RNA, 17 nt, Human
cauccacucuacccucc

SEQ ID NO: 2065529 - RNA, 17 nt, Human
caucauuccuugagaaa

SEQ ID NO: 2065530 - RNA, 22 nt, Human
caucauuccuugagaaaaacaa

SEQ ID NO: 2065531 - RNA, 21 nt, Human
caucauuauuugcagagacag

SEQ ID NO: 2065532 - RNA, 17 nt, Human
caucauuauaaacguga

SEQ ID NO: 2065533 - RNA, 15 nt, Human
caucauuaaauuuuu

SEQ ID NO: 2065534 - RNA, 13 nt, Human
cauccgaggcagg

SEQ ID NO: 2065535 - RNA, 14 nt, Human
cauccgaggcaggg

SEQ ID NO: 2065536 - RNA, 15 nt, Human
cauccgaggcagggu

SEQ ID NO: 2065537 - RNA, 23 nt, Human
cauccgaggcagggucaggagag

SEQ ID NO: 2065538 - RNA, 16 nt, Human
cauccgaggcaggguc

SEQ ID NO: 2065539 - RNA, 22 nt, Human
cauccgaggcagggucaggaga

SEQ ID NO: 2065540 - RNA, 19 nt, Human
caucccugaggcuggacuc

SEQ ID NO: 2065541 - RNA, 22 nt, Human
caucccugaggcuggacuccag

SEQ ID NO: 2065542 - RNA, 19 nt, Human
caucccugauuccuguugu

SEQ ID NO: 2065543 - RNA, 15 nt, Human
caucccugccagcuc

SEQ ID NO: 2065544 - RNA, 21 nt, Human
caucccugccagcucuucugc

SEQ ID NO: 2065545 - RNA, 16 nt, Human
caucaguggcauggcu

SEQ ID NO: 2065546 - RNA, 18 nt, Human
caucaguggcauggcucc

SEQ ID NO: 2065547 - RNA, 22 nt, Human
caucaguggcauggcuccaguc

SEQ ID NO: 2065548 - RNA, 15 nt, Human
caucaguguuaaaaa

SEQ ID NO: 2065549 - RNA, 17 nt, Human
caucaguguuaaaaaau

SEQ ID NO: 2065550 - RNA, 18 nt, Human
caucaguguuaaaaaauu

SEQ ID NO: 2065551 - RNA, 22 nt, Human
caucaguguuaaaaaauuuuug

SEQ ID NO: 2065552 - RNA, 22 nt, Human
caucaguuacucugaagggcau

SEQ ID NO: 2065553 - RNA, 12 nt, Human
caucauaaaaua

SEQ ID NO: 2065554 - RNA, 16 nt, Human
caucaccuuaggcagg

SEQ ID NO: 2065555 - RNA, 17 nt, Human
caucaccuuaggcaggg

SEQ ID NO: 2065556 - RNA, 18 nt, Human
caucaccuuaggcaggga

SEQ ID NO: 2065557 - RNA, 19 nt, Human
caucaccuuaggcagggaa

SEQ ID NO: 2065558 - RNA, 20 nt, Human
caucaccuuaggcagggaag

SEQ ID NO: 2065559 - RNA, 22 nt, Human
caucaccuuaggcagggaagug

SEQ ID NO: 2065560 - RNA, 23 nt, Human
caucaccuuaggcagggaagugu

SEQ ID NO: 2065561 - RNA, 14 nt, Human
caucacgccugugc

SEQ ID NO: 2065562 - RNA, 15 nt, Human
caucacgccugugca

SEQ ID NO: 2065563 - RNA, 12 nt, Human
caucaccucagg

SEQ ID NO: 2065564 - RNA, 13 nt, Human
caucaccucaggc

SEQ ID NO: 2065565 - RNA, 15 nt, Human
caucaccucaggcca

SEQ ID NO: 2065566 - RNA, 18 nt, Human
caucaccucaggccaggu

SEQ ID NO: 2065567 - RNA, 15 nt, Human
caucaugucuggcua

SEQ ID NO: 2065568 - RNA, 14 nt, Human
caucaugucuggcu

SEQ ID NO: 2065569 - RNA, 20 nt, Human
caucauguaaauuaccagua

SEQ ID NO: 2065570 - RNA, 13 nt, Human
caucaugucuggc

SEQ ID NO: 2065571 - RNA, 16 nt, Human
caucaugcaucuuacu

SEQ ID NO: 2065572 - RNA, 22 nt, Human
caucauaaaauaaaguauauau

SEQ ID NO: 2065573 - RNA, 23 nt, Human
caucauaaaauaaaguauauaua

SEQ ID NO: 2065574 - RNA, 13 nt, Human
caucauaaaauaa

SEQ ID NO: 2065575 - RNA, 14 nt, Human
caucauaaaauaaa

SEQ ID NO: 2065576 - RNA, 18 nt, Human
caucauaaaauaaaguau

SEQ ID NO: 2065577 - RNA, 20 nt, Human
caucauaaaauaaaguauau

SEQ ID NO: 2065578 - RNA, 16 nt, Human
caucauccuaagcuau

SEQ ID NO: 2065579 - RNA, 13 nt, Human
caucaucuguaga

SEQ ID NO: 2065580 - RNA, 18 nt, Human
caucaucuguagauacua

SEQ ID NO: 2065581 - RNA, 23 nt, Human
caucaugacacucguauaagcau

SEQ ID NO: 2065582 - RNA, 20 nt, Human
cccaaagugguauagaaaug

SEQ ID NO: 2065583 - RNA, 16 nt, Human
cccaaagugcugggau

SEQ ID NO: 2065584 - RNA, 21 nt, Human
cccaaagugguauagaaaugc

SEQ ID NO: 2065585 - RNA, 10 nt, Human
cccaaagugg

SEQ ID NO: 2065586 - RNA, 13 nt, Human
cccaacccugccc

SEQ ID NO: 2065587 - RNA, 14 nt, Human
cccaacccugcccc

SEQ ID NO: 2065588 - RNA, 15 nt, Human
cccaacccugccccu

SEQ ID NO: 2065589 - RNA, 22 nt, Human
cccaaggaggaaaaacagacaa

SEQ ID NO: 2065590 - RNA, 21 nt, Human
cccaaggcaaggggugccugg

SEQ ID NO: 2065591 - RNA, 22 nt, Human
cccaaggcaaggggugccuggg

SEQ ID NO: 2065592 - RNA, 23 nt, Human
cccaaggcaaggggugccuggga

SEQ ID NO: 2065593 - RNA, 17 nt, Human
cccaaggcucugagcaa

SEQ ID NO: 2065594 - RNA, 16 nt, Human
cccaaccuccugaccu

SEQ ID NO: 2065595 - RNA, 14 nt, Human
cccaaggaggaaaa

SEQ ID NO: 2065596 - RNA, 15 nt, Human
cccaaggaggaaaaa

SEQ ID NO: 2065597 - RNA, 16 nt, Human
cccaacccugccccug

SEQ ID NO: 2065598 - RNA, 14 nt, Human
cccaaaucugccua

SEQ ID NO: 2065599 - RNA, 22 nt, Human
cccaaccggggagcccccgccc

SEQ ID NO: 2065600 - RNA, 12 nt, Human
cccaaccucagc

SEQ ID NO: 2065601 - RNA, 13 nt, Human
cccaaccucagca

SEQ ID NO: 2065602 - RNA, 12 nt, Human
ccauuuguaaua

SEQ ID NO: 2065603 - RNA, 13 nt, Human
ccauuuguaauaa

SEQ ID NO: 2065604 - RNA, 15 nt, Human
ccauuuguaauaaag

SEQ ID NO: 2065605 - RNA, 18 nt, Human
ccauuuguaauaaaguau

SEQ ID NO: 2065606 - RNA, 20 nt, Human
ccauuuguaauaaaguauau

SEQ ID NO: 2065607 - RNA, 14 nt, Human
ccauuugugugugu

SEQ ID NO: 2065608 - RNA, 15 nt, Human
cccaaagugcuggga

SEQ ID NO: 2065609 - RNA, 13 nt, Human
cccaaagugcugg

SEQ ID NO: 2065610 - RNA, 21 nt, Human
cccaaaggaagcuuucucugc

SEQ ID NO: 2065611 - RNA, 23 nt, Human
cccaaaggaagcuuucucugcuu

SEQ ID NO: 2065612 - RNA, 21 nt, Human
cccaaaaccacagcccuguca

SEQ ID NO: 2065613 - RNA, 14 nt, Human
cccaaaaccacagc

SEQ ID NO: 2065614 - RNA, 15 nt, Human
cccaaaaccacagcc

SEQ ID NO: 2065615 - RNA, 14 nt, Human
cccaaagccagaca

SEQ ID NO: 2065616 - RNA, 22 nt, Human
ccauucagcccauuucacaccu

SEQ ID NO: 2065617 - RNA, 12 nt, Human
ccauucaggaac

SEQ ID NO: 2065618 - RNA, 15 nt, Human
ccauucaggaaccug

SEQ ID NO: 2065619 - RNA, 17 nt, Human
ccauucaggaaccugga

SEQ ID NO: 2065620 - RNA, 21 nt, Human
ccauucaggaaccuggaccaa

SEQ ID NO: 2065621 - RNA, 11 nt, Human
ccauucaguca

SEQ ID NO: 2065622 - RNA, 14 nt, Human
ccauguuuaagauu

SEQ ID NO: 2065623 - RNA, 15 nt, Human
ccauguuuaagauuu

SEQ ID NO: 2065624 - RNA, 16 nt, Human
ccauguuuaagauuua

SEQ ID NO: 2065625 - RNA, 17 nt, Human
ccauguuuaagauuuaa

SEQ ID NO: 2065626 - RNA, 16 nt, Human
ccauguuugagcucag

SEQ ID NO: 2065627 - RNA, 17 nt, Human
ccauguuugagcucaga

SEQ ID NO: 2065628 - RNA, 21 nt, Human
ccauguuugagcucagacccc

SEQ ID NO: 2065629 - RNA, 13 nt, Human
ccauguuggcuag

SEQ ID NO: 2065630 - RNA, 16 nt, Human
ccauguuggccaggcu

SEQ ID NO: 2065631 - RNA, 17 nt, Human
ccauguuggccaggcug

SEQ ID NO: 2065632 - RNA, 14 nt, Human
ccaucuaccccugg

SEQ ID NO: 2065633 - RNA, 15 nt, Human
ccaucuaccccugga

SEQ ID NO: 2065634 - RNA, 18 nt, Human
ccaucuaccccuggauga

SEQ ID NO: 2065635 - RNA, 19 nt, Human
ccaucugcaccccccuggg

SEQ ID NO: 2065636 - RNA, 20 nt, Human
ccaucugcaccccccugggc

SEQ ID NO: 2065637 - RNA, 19 nt, Human
ccauggcgugucccucucg

SEQ ID NO: 2065638 - RNA, 21 nt, Human
ccauggcgugucccucucgga

SEQ ID NO: 2065639 - RNA, 21 nt, Human
ccaugggaaaugucaacaagu

SEQ ID NO: 2065640 - RNA, 20 nt, Human
ccauggcuaaggcaccagcc

SEQ ID NO: 2065641 - RNA, 16 nt, Human
ccaucgguccugucuc

SEQ ID NO: 2065642 - RNA, 18 nt, Human
ccaucgguccugucuccc

SEQ ID NO: 2065643 - RNA, 20 nt, Human
ccaucgguccugucuccccu

SEQ ID NO: 2065644 - RNA, 22 nt, Human
ccaucgguguccauuuauagaa

SEQ ID NO: 2065645 - RNA, 14 nt, Human
ccauccuccccuuc

SEQ ID NO: 2065646 - RNA, 13 nt, Human
ccauccuccccuu

SEQ ID NO: 2065647 - RNA, 19 nt, Human
ccauauucuguuggccagu

SEQ ID NO: 2065648 - RNA, 14 nt, Human
ccagggagaggcca

SEQ ID NO: 2065649 - RNA, 17 nt, Human
ccagggagaggccauga

SEQ ID NO: 2065650 - RNA, 21 nt, Human
ccaggcugugggccucaagga

SEQ ID NO: 2065651 - RNA, 22 nt, Human
ccaggcugugggccucaaggac

SEQ ID NO: 2065652 - RNA, 17 nt, Human
ccaggcugugggccuca

SEQ ID NO: 2065653 - RNA, 14 nt, Human
ccaggguuccccca

SEQ ID NO: 2065654 - RNA, 15 nt, Human
ccaggguucccccag

SEQ ID NO: 2065655 - RNA, 20 nt, Human
ccaggguucccccagcccug

SEQ ID NO: 2065656 - RNA, 21 nt, Human
ccaggguucccccagcccugu

SEQ ID NO: 2065657 - RNA, 22 nt, Human
ccaggguucccccagcccugug

SEQ ID NO: 2065658 - RNA, 18 nt, Human
ccagggccaugaacuuug

SEQ ID NO: 2065659 - RNA, 21 nt, Human
ccagggccacucugccucugc

SEQ ID NO: 2065660 - RNA, 14 nt, Human
ccagggccagggcc

SEQ ID NO: 2065661 - RNA, 16 nt, Human
ccagggccagggcccu

SEQ ID NO: 2065662 - RNA, 17 nt, Human
ccagggccagggcccug

SEQ ID NO: 2065663 - RNA, 20 nt, Human
ccagucuggaaugcaguggu

SEQ ID NO: 2065664 - RNA, 19 nt, Human
ccagucuggaaugcagugg

SEQ ID NO: 2065665 - RNA, 16 nt, Human
ccagucugcugcccuc

SEQ ID NO: 2065666 - RNA, 17 nt, Human
ccagucugcugcccucc

SEQ ID NO: 2065667 - RNA, 18 nt, Human
ccagucugcugcccucca

SEQ ID NO: 2065668 - RNA, 22 nt, Human
ccagucugcugcccuccauccc

SEQ ID NO: 2065669 - RNA, 23 nt, Human
ccagucugcugcccuccaucccg

SEQ ID NO: 2065670 - RNA, 18 nt, Human
ccagucuggaaugcagug

SEQ ID NO: 2065671 - RNA, 12 nt, Human
ccagucugaagu

SEQ ID NO: 2065672 - RNA, 14 nt, Human
ccagucugaaguuu

SEQ ID NO: 2065673 - RNA, 17 nt, Human
ccagucugaaguuucau

SEQ ID NO: 2065674 - RNA, 20 nt, Human
ccagucugaaguuucauuua

SEQ ID NO: 2065675 - RNA, 21 nt, Human
ccagucugaaguuucauuuau

SEQ ID NO: 2065676 - RNA, 12 nt, Human
ccagucucuucu

SEQ ID NO: 2065677 - RNA, 17 nt, Human
ccagguuuuuggucuga

SEQ ID NO: 2065678 - RNA, 16 nt, Human
ccagguugaaagaccu

SEQ ID NO: 2065679 - RNA, 15 nt, Human
ccagguucagcuugu

SEQ ID NO: 2065680 - RNA, 15 nt, Human
ccaggccccaggaag

SEQ ID NO: 2065681 - RNA, 21 nt, Human
ccagguucugguuagcucagc

SEQ ID NO: 2065682 - RNA, 22 nt, Human
ccagguucugguuagcucagcc

SEQ ID NO: 2065683 - RNA, 23 nt, Human
ccagguucugguuagcucagccc

SEQ ID NO: 2065684 - RNA, 13 nt, Human
ccagguugaaaga

SEQ ID NO: 2065685 - RNA, 24 nt, Human
ccaggcuguaucccaugagccuca

SEQ ID NO: 2065686 - RNA, 18 nt, Human
ccaggccguggcugccca

SEQ ID NO: 2065687 - RNA, 18 nt, Human
ccaggcgccccuuccccc

SEQ ID NO: 2065688 - RNA, 19 nt, Human
ccaggcgccccuucccccu

SEQ ID NO: 2065689 - RNA, 15 nt, Human
ccaggccgccccagc

SEQ ID NO: 2065690 - RNA, 16 nt, Human
ccaggccgccccagcc

SEQ ID NO: 2065691 - RNA, 18 nt, Human
ccaggccgccccagccuc

SEQ ID NO: 2065692 - RNA, 22 nt, Human
ccaggccggugugggcuguguc

SEQ ID NO: 2065693 - RNA, 14 nt, Human
ccaggccguggcug

SEQ ID NO: 2065694 - RNA, 16 nt, Human
ccaggccguggcugcc

SEQ ID NO: 2065695 - RNA, 20 nt, Human
ccaggccccaaaaccacagc

SEQ ID NO: 2065696 - RNA, 21 nt, Human
ccaggccccaaaaccacagcc

SEQ ID NO: 2065697 - RNA, 21 nt, Human
ccaggccgccccagccucuga

SEQ ID NO: 2065698 - RNA, 14 nt, Human
ccaggccaucagag

SEQ ID NO: 2065699 - RNA, 20 nt, Human
ccaggagccccgaggccuuc

SEQ ID NO: 2065700 - RNA, 23 nt, Human
ccaggagagccagcccucccugu

SEQ ID NO: 2065701 - RNA, 20 nt, Human
ccaggagagccagcccuccc

SEQ ID NO: 2065702 - RNA, 19 nt, Human
ccaggagccccgaggccuu

SEQ ID NO: 2065703 - RNA, 16 nt, Human
ccaggagccccgaggc

SEQ ID NO: 2065704 - RNA, 16 nt, Human
ccaggagacagacaga

SEQ ID NO: 2065705 - RNA, 13 nt, Human
ccaggagagccag

SEQ ID NO: 2065706 - RNA, 16 nt, Human
ccaggagagccagccc

SEQ ID NO: 2065707 - RNA, 17 nt, Human
ccaggagagccagcccu

SEQ ID NO: 2065708 - RNA, 18 nt, Human
ccaggagagccagcccuc

SEQ ID NO: 2065709 - RNA, 19 nt, Human
ccaggagagccagcccucc

SEQ ID NO: 2065710 - RNA, 21 nt, Human
ccaggagcugggcagaaggcc

SEQ ID NO: 2065711 - RNA, 16 nt, Human
ccaggagcugggcaga

SEQ ID NO: 2065712 - RNA, 13 nt, Human
ccaggagcucuuc

SEQ ID NO: 2065713 - RNA, 18 nt, Human
ccaggagcucuucaggcc

SEQ ID NO: 2065714 - RNA, 21 nt, Human
ccaggagcucuucaggccucc

SEQ ID NO: 2065715 - RNA, 23 nt, Human
ccaggagcucuucaggccucccu

SEQ ID NO: 2065716 - RNA, 23 nt, Human
ccaggagcugggcagaaggccaa

SEQ ID NO: 2065717 - RNA, 16 nt, Human
ccagccuccaugcugc

SEQ ID NO: 2065718 - RNA, 15 nt, Human
ccagccuccaugcug

SEQ ID NO: 2065719 - RNA, 19 nt, Human
ccagccuccguauuucaga

SEQ ID NO: 2065720 - RNA, 19 nt, Human
ccaguuaaucuugcuuucu

SEQ ID NO: 2065721 - RNA, 17 nt, Human
ccaguuaaucuugcuuu

SEQ ID NO: 2065722 - RNA, 17 nt, Human
ccaguguccuccccuca

SEQ ID NO: 2065723 - RNA, 22 nt, Human
ccaguuagccucugcaggaugu

SEQ ID NO: 2065724 - RNA, 17 nt, Human
ccaguuagccucugcag

SEQ ID NO: 2065725 - RNA, 15 nt, Human
ccauaguauauuaaa

SEQ ID NO: 2065726 - RNA, 17 nt, Human
ccauaguauauuaaaaa

SEQ ID NO: 2065727 - RNA, 20 nt, Human
ccauaguauauuaaaaaugg

SEQ ID NO: 2065728 - RNA, 22 nt, Human
ccauaguauauuaaaaauggua

SEQ ID NO: 2065729 - RNA, 23 nt, Human
ccauauucuguuggccaguguga

SEQ ID NO: 2065730 - RNA, 15 nt, Human
ccauagcuuccauga

SEQ ID NO: 2065731 - RNA, 23 nt, Human
ccaguguguggcuuucagagccu

SEQ ID NO: 2065732 - RNA, 22 nt, Human
ccaguguguggcuuucagagcc

SEQ ID NO: 2065733 - RNA, 21 nt, Human
ccaguguguggcuuucagagc

SEQ ID NO: 2065734 - RNA, 19 nt, Human
ccaguguuuuaggagcaug

SEQ ID NO: 2065735 - RNA, 15 nt, Human
ccaguguuguuugua

SEQ ID NO: 2065736 - RNA, 17 nt, Human
ccaguguuguuuguaaa

SEQ ID NO: 2065737 - RNA, 18 nt, Human
ccaguguuguuuguaaau

SEQ ID NO: 2065738 - RNA, 20 nt, Human
ccaguguuguuuguaaauaa

SEQ ID NO: 2065739 - RNA, 21 nt, Human
ccaguguuguuuguaaauaag

SEQ ID NO: 2065740 - RNA, 22 nt, Human
ccaguguuguuuguaaauaaga

SEQ ID NO: 2065741 - RNA, 23 nt, Human
ccaguguuguuuguaaauaagag

SEQ ID NO: 2065742 - RNA, 15 nt, Human
ccagugcccuggggc

SEQ ID NO: 2065743 - RNA, 22 nt, Human
ccagugcccuggggcugaucuc

SEQ ID NO: 2065744 - RNA, 14 nt, Human
ccaguguagccuug

SEQ ID NO: 2065745 - RNA, 15 nt, Human
ccaguguagccuugc

SEQ ID NO: 2065746 - RNA, 18 nt, Human
ccaguguguggcuuucag

SEQ ID NO: 2065747 - RNA, 16 nt, Human
ccaguguguggcuuuc

SEQ ID NO: 2065748 - RNA, 20 nt, Human
ccagugccgagaaggaagcc

SEQ ID NO: 2065749 - RNA, 13 nt, Human
ccaucuacccucc

SEQ ID NO: 2065750 - RNA, 19 nt, Human
ccagccucaucucuuuguu

SEQ ID NO: 2065751 - RNA, 21 nt, Human
ccagccuccaagcuccaucuc

SEQ ID NO: 2065752 - RNA, 14 nt, Human
ccagccgccaugcu

SEQ ID NO: 2065753 - RNA, 20 nt, Human
ccagcccuuugggaggcuga

SEQ ID NO: 2065754 - RNA, 18 nt, Human
ccagccgccaugcuccug

SEQ ID NO: 2065755 - RNA, 19 nt, Human
ccagccgccaugcuccugg

SEQ ID NO: 2065756 - RNA, 17 nt, Human
ccagccccacccaggag

SEQ ID NO: 2065757 - RNA, 18 nt, Human
ccagccccacccaggagg

SEQ ID NO: 2065758 - RNA, 15 nt, Human
ccagccccagugccc

SEQ ID NO: 2065759 - RNA, 13 nt, Human
ccagccccagugc

SEQ ID NO: 2065760 - RNA, 19 nt, Human
ccagccagugaccugagga

SEQ ID NO: 2065761 - RNA, 20 nt, Human
ccagccagugaccugaggaa

SEQ ID NO: 2065762 - RNA, 22 nt, Human
ccagccagugaccugaggaagc

SEQ ID NO: 2065763 - RNA, 23 nt, Human
ccagccagugaccugaggaagcg

SEQ ID NO: 2065764 - RNA, 14 nt, Human
ccagccccacccag

SEQ ID NO: 2065765 - RNA, 15 nt, Human
ccagccccacccagg

SEQ ID NO: 2065766 - RNA, 16 nt, Human
ccagccccacccagga

SEQ ID NO: 2065767 - RNA, 16 nt, Human
ccagcccuugaaguca

SEQ ID NO: 2065768 - RNA, 20 nt, Human
ccagcccuugagcuccccaa

SEQ ID NO: 2065769 - RNA, 13 nt, Human
ccagcccuguucu

SEQ ID NO: 2065770 - RNA, 15 nt, Human
ccagcccuguggaag

SEQ ID NO: 2065771 - RNA, 18 nt, Human
ccagcccuguggaaggga

SEQ ID NO: 2065772 - RNA, 17 nt, Human
ccagcccuuagcaggga

SEQ ID NO: 2065773 - RNA, 21 nt, Human
ccagcccucccuguccuccuc

SEQ ID NO: 2065774 - RNA, 22 nt, Human
ccagcccucccuguccuccucg

SEQ ID NO: 2065775 - RNA, 20 nt, Human
ccagcccucucacugugucc

SEQ ID NO: 2065776 - RNA, 14 nt, Human
ccagcccuguggaa

SEQ ID NO: 2065777 - RNA, 16 nt, Human
ccagcccuuagcaggg

SEQ ID NO: 2065778 - RNA, 16 nt, Human
ccagccccagugccca

SEQ ID NO: 2065779 - RNA, 13 nt, Human
ccagcccucccug

SEQ ID NO: 2065780 - RNA, 14 nt, Human
ccagcccucccugu

SEQ ID NO: 2065781 - RNA, 15 nt, Human
ccagcccucccuguc

SEQ ID NO: 2065782 - RNA, 16 nt, Human
ccagcccucccugucc

SEQ ID NO: 2065783 - RNA, 17 nt, Human
ccagcccucccuguccu

SEQ ID NO: 2065784 - RNA, 18 nt, Human
ccagcccucccuguccuc

SEQ ID NO: 2065785 - RNA, 19 nt, Human
ccagcccucccuguccucc

SEQ ID NO: 2065786 - RNA, 20 nt, Human
ccagcccucccuguccuccu

SEQ ID NO: 2065787 - RNA, 21 nt, Human
ccagccaccccgggcucucug

SEQ ID NO: 2065788 - RNA, 22 nt, Human
ccagccaccccgggcucucugc

SEQ ID NO: 2065789 - RNA, 13 nt, Human
ccagccagcagcc

SEQ ID NO: 2065790 - RNA, 15 nt, Human
ccagccagcagccag

SEQ ID NO: 2065791 - RNA, 16 nt, Human
ccagccagcagccagc

SEQ ID NO: 2065792 - RNA, 19 nt, Human
ccagccagcagccagcucu

SEQ ID NO: 2065793 - RNA, 23 nt, Human
ccagccagcagccagcucucagc

SEQ ID NO: 2065794 - RNA, 15 nt, Human
ccagccaaagccucc

SEQ ID NO: 2065795 - RNA, 18 nt, Human
ccagccaaagccuccucc

SEQ ID NO: 2065796 - RNA, 19 nt, Human
ccagccaaagccuccucca

SEQ ID NO: 2065797 - RNA, 13 nt, Human
ccagccaccccgg

SEQ ID NO: 2065798 - RNA, 19 nt, Human
ccagccaaccccuguggag

SEQ ID NO: 2065799 - RNA, 22 nt, Human
ccagccaacuuuugcauguuuu

SEQ ID NO: 2065800 - RNA, 17 nt, Human
ccagccaaacccugucu

SEQ ID NO: 2065801 - RNA, 18 nt, Human
ccagccaaacccugucug

SEQ ID NO: 2065802 - RNA, 19 nt, Human
ccagccaaacccugucuga

SEQ ID NO: 2065803 - RNA, 13 nt, Human
ccagccaaccccu

SEQ ID NO: 2065804 - RNA, 18 nt, Human
ccagccaaccccugugga

SEQ ID NO: 2065805 - RNA, 15 nt, Human
ccagcaguuugggag

SEQ ID NO: 2065806 - RNA, 21 nt, Human
ccagcauccuuuucugcagag

SEQ ID NO: 2065807 - RNA, 19 nt, Human
ccagcauccuuuucugcag

SEQ ID NO: 2065808 - RNA, 15 nt, Human
ccagcagguggggag

SEQ ID NO: 2065809 - RNA, 24 nt, Human
ccagcacuaaagcaguggacacca

SEQ ID NO: 2065810 - RNA, 12 nt, Human
ccagcacuaacg

SEQ ID NO: 2065811 - RNA, 15 nt, Human
ccagcacugucucag

SEQ ID NO: 2065812 - RNA, 15 nt, Human
ccagcaagugagagc

SEQ ID NO: 2065813 - RNA, 18 nt, Human
ccagcaacuugucuuuuu

SEQ ID NO: 2065814 - RNA, 16 nt, Human
ccagcaagguggagug

SEQ ID NO: 2065815 - RNA, 18 nt, Human
ccagcaagguggagugga

SEQ ID NO: 2065816 - RNA, 21 nt, Human
ccagcaacuugucuuuuucug

SEQ ID NO: 2065817 - RNA, 15 nt, Human
ccagcaacuccaacu

SEQ ID NO: 2065818 - RNA, 18 nt, Human
ccagcacuaaagcagugg

SEQ ID NO: 2065819 - RNA, 22 nt, Human
ccagcaagugagagcugggugu

SEQ ID NO: 2065820 - RNA, 21 nt, Human
ccagcaagugagagcugggug

SEQ ID NO: 2065821 - RNA, 20 nt, Human
ccagcaagugagagcugggu

SEQ ID NO: 2065822 - RNA, 16 nt, Human
ccagcaagugagagcu

SEQ ID NO: 2065823 - RNA, 17 nt, Human
ccagaggcagaacccug

SEQ ID NO: 2065824 - RNA, 18 nt, Human
ccagaggcagaacccugg

SEQ ID NO: 2065825 - RNA, 13 nt, Human
ccagaggcacagc

SEQ ID NO: 2065826 - RNA, 14 nt, Human
ccagaggcacagcc

SEQ ID NO: 2065827 - RNA, 15 nt, Human
ccagaggcacagccg

SEQ ID NO: 2065828 - RNA, 17 nt, Human
ccagaggcacagccggg

SEQ ID NO: 2065829 - RNA, 21 nt, Human
ccagaggcacagccggggccu

SEQ ID NO: 2065830 - RNA, 21 nt, Human
ccagagggagugacagaggca

SEQ ID NO: 2065831 - RNA, 20 nt, Human
ccagagggagugacagaggc

SEQ ID NO: 2065832 - RNA, 19 nt, Human
ccagagggagugacagagg

SEQ ID NO: 2065833 - RNA, 18 nt, Human
ccagagggagugacagag

SEQ ID NO: 2065834 - RNA, 17 nt, Human
ccagagggagugacaga

SEQ ID NO: 2065835 - RNA, 16 nt, Human
ccagagggagugacag

SEQ ID NO: 2065836 - RNA, 14 nt, Human
ccagagcuggguga

SEQ ID NO: 2065837 - RNA, 15 nt, Human
ccagagcugggugag

SEQ ID NO: 2065838 - RNA, 20 nt, Human
ccagagcugggugagugggg

SEQ ID NO: 2065839 - RNA, 21 nt, Human
ccagagcugggugagugggga

SEQ ID NO: 2065840 - RNA, 19 nt, Human
ccagagcuguuuauggccu

SEQ ID NO: 2065841 - RNA, 20 nt, Human
ccagagcuguuuauggccuc

SEQ ID NO: 2065842 - RNA, 21 nt, Human
ccagagcuguuuauggccuca

SEQ ID NO: 2065843 - RNA, 22 nt, Human
ccagagcuguuuauggccucag

SEQ ID NO: 2065844 - RNA, 23 nt, Human
ccagagcuguuuauggccucagc

SEQ ID NO: 2065845 - RNA, 24 nt, Human
ccagagcuguuuauggccucagcu

SEQ ID NO: 2065846 - RNA, 12 nt, Human
ccagagcuccuc

SEQ ID NO: 2065847 - RNA, 15 nt, Human
ccagagcuccuccuu

SEQ ID NO: 2065848 - RNA, 12 nt, Human
ccagagcucugg

SEQ ID NO: 2065849 - RNA, 13 nt, Human
ccagagcucugga

SEQ ID NO: 2065850 - RNA, 16 nt, Human
ccagagcucuggagcc

SEQ ID NO: 2065851 - RNA, 21 nt, Human
ccagagcucuggagccaccug

SEQ ID NO: 2065852 - RNA, 22 nt, Human
ccagagcucuggagccaccugu

SEQ ID NO: 2065853 - RNA, 22 nt, Human
ccagacccccagcaacccuccu

SEQ ID NO: 2065854 - RNA, 17 nt, Human
ccagaccccucuggcca

SEQ ID NO: 2065855 - RNA, 14 nt, Human
ccagagaugccucc

SEQ ID NO: 2065856 - RNA, 15 nt, Human
ccagagaugccucca

SEQ ID NO: 2065857 - RNA, 16 nt, Human
ccagagaugccuccac

SEQ ID NO: 2065858 - RNA, 17 nt, Human
ccagagaugccuccacc

SEQ ID NO: 2065859 - RNA, 18 nt, Human
ccagagaugccuccaccg

SEQ ID NO: 2065860 - RNA, 20 nt, Human
ccagagaugccuccaccgcu

SEQ ID NO: 2065861 - RNA, 23 nt, Human
ccagagaugccuccaccgcugcc

SEQ ID NO: 2065862 - RNA, 22 nt, Human
ccagagauggagguucucucgg

SEQ ID NO: 2065863 - RNA, 16 nt, Human
ccagagaugggacugg

SEQ ID NO: 2065864 - RNA, 21 nt, Human
ccagagaugggacugggaggg

SEQ ID NO: 2065865 - RNA, 22 nt, Human
ccagagaugggacugggagggc

SEQ ID NO: 2065866 - RNA, 11 nt, Human
ccagagcacug

SEQ ID NO: 2065867 - RNA, 23 nt, Human
ccagagaugggacugggagggcc

SEQ ID NO: 2065868 - RNA, 18 nt, Human
ccagagcaaagggccagg

SEQ ID NO: 2065869 - RNA, 16 nt, Human
ccagagcaagcuuuuu

SEQ ID NO: 2065870 - RNA, 20 nt, Human
ccagagcaagcuuuuuuauu

SEQ ID NO: 2065871 - RNA, 11 nt, Human
ccacuggggaa

SEQ ID NO: 2065872 - RNA, 22 nt, Human
ccacuggggaaauaacagcugu

SEQ ID NO: 2065873 - RNA, 19 nt, Human
ccagacaccuugacagggc

SEQ ID NO: 2065874 - RNA, 17 nt, Human
ccagacaccuugacagg

SEQ ID NO: 2065875 - RNA, 12 nt, Human
ccacuggggaaa

SEQ ID NO: 2065876 - RNA, 18 nt, Human
ccacuguaaaaugaaauu

SEQ ID NO: 2065877 - RNA, 14 nt, Human
ccagagaggguggu

SEQ ID NO: 2065878 - RNA, 18 nt, Human
ccagaccccucuggccag

SEQ ID NO: 2065879 - RNA, 23 nt, Human
ccagagaggguggugaccucugc

SEQ ID NO: 2065880 - RNA, 21 nt, Human
ccagagaggguggugaccucu

SEQ ID NO: 2065881 - RNA, 20 nt, Human
ccagacaccuugacagggca

SEQ ID NO: 2065882 - RNA, 18 nt, Human
ccagaccauugucucaga

SEQ ID NO: 2065883 - RNA, 12 nt, Human
ccagacccccac

SEQ ID NO: 2065884 - RNA, 21 nt, Human
ccagaccauugucucagagca

SEQ ID NO: 2065885 - RNA, 14 nt, Human
ccagacccccaccc

SEQ ID NO: 2065886 - RNA, 15 nt, Human
ccagacccccacccc

SEQ ID NO: 2065887 - RNA, 16 nt, Human
ccagacccccaccccu

SEQ ID NO: 2065888 - RNA, 19 nt, Human
ccagacccccaccccuucc

SEQ ID NO: 2065889 - RNA, 21 nt, Human
ccagacccccaccccuucccc

SEQ ID NO: 2065890 - RNA, 22 nt, Human
ccagacccccaccccuucccca

SEQ ID NO: 2065891 - RNA, 14 nt, Human
ccagacccccagca

SEQ ID NO: 2065892 - RNA, 19 nt, Human
ccagacccccagcaacccu

SEQ ID NO: 2065893 - RNA, 23 nt, Human
ccagagggagugacagaggcagc

SEQ ID NO: 2065894 - RNA, 22 nt, Human
ccagagggagugacagaggcag

SEQ ID NO: 2065895 - RNA, 13 nt, Human
ccagagggcccag

SEQ ID NO: 2065896 - RNA, 15 nt, Human
ccagagggcccaggc

SEQ ID NO: 2065897 - RNA, 17 nt, Human
ccagagggcccaggcag

SEQ ID NO: 2065898 - RNA, 23 nt, Human
ccagaugcaccagcccuuagcag

SEQ ID NO: 2065899 - RNA, 18 nt, Human
ccagagggcccaggcagg

SEQ ID NO: 2065900 - RNA, 18 nt, Human
ccagaugccuucuccaga

SEQ ID NO: 2065901 - RNA, 20 nt, Human
ccagauugcaacaggcuggg

SEQ ID NO: 2065902 - RNA, 19 nt, Human
ccagauugcaacaggcugg

SEQ ID NO: 2065903 - RNA, 21 nt, Human
ccagauugcaacaggcugggc

SEQ ID NO: 2065904 - RNA, 16 nt, Human
ccacaccucccugaac

SEQ ID NO: 2065905 - RNA, 17 nt, Human
ccacaccucccugaacc

SEQ ID NO: 2065906 - RNA, 22 nt, Human
ccacaccucaguucccuuggcc

SEQ ID NO: 2065907 - RNA, 14 nt, Human
ccacaccucccuga

SEQ ID NO: 2065908 - RNA, 14 nt, Human
ccacacccagccca

SEQ ID NO: 2065909 - RNA, 13 nt, Human
ccacacccagccc

SEQ ID NO: 2065910 - RNA, 14 nt, Human
ccacaccgcagaag

SEQ ID NO: 2065911 - RNA, 15 nt, Human
ccacaccgcagaagc

SEQ ID NO: 2065912 - RNA, 18 nt, Human
ccacaccucaguucccuu

SEQ ID NO: 2065913 - RNA, 19 nt, Human
ccacaccucaguucccuug

SEQ ID NO: 2065914 - RNA, 12 nt, Human
ccacacccagcc

SEQ ID NO: 2065915 - RNA, 13 nt, Human
ccacacaccccaa

SEQ ID NO: 2065916 - RNA, 12 nt, Human
ccacacacagag

SEQ ID NO: 2065917 - RNA, 16 nt, Human
ccacacacagaggaag

SEQ ID NO: 2065918 - RNA, 17 nt, Human
ccacacacagaggaaga

SEQ ID NO: 2065919 - RNA, 18 nt, Human
ccacacacagaggaagag

SEQ ID NO: 2065920 - RNA, 22 nt, Human
ccacacacagaggaagagcagg

SEQ ID NO: 2065921 - RNA, 12 nt, Human
ccacacacccca

SEQ ID NO: 2065922 - RNA, 14 nt, Human
ccaaacccugucug

SEQ ID NO: 2065923 - RNA, 15 nt, Human
ccaaaccccggggcu

SEQ ID NO: 2065924 - RNA, 16 nt, Human
ccaaacccaugaggca

SEQ ID NO: 2065925 - RNA, 23 nt, Human
ccacaucuugcucugcugacaga

SEQ ID NO: 2065926 - RNA, 22 nt, Human
ccacaucuugcucugcugacag

SEQ ID NO: 2065927 - RNA, 16 nt, Human
ccacaucuugcucugc

SEQ ID NO: 2065928 - RNA, 14 nt, Human
ccacaucuugcucu

SEQ ID NO: 2065929 - RNA, 23 nt, Human
ccacauagugaugguuccccugu

SEQ ID NO: 2065930 - RNA, 14 nt, Human
ccacacugcaacag

SEQ ID NO: 2065931 - RNA, 22 nt, Human
ccacauagugaugguuccccug

SEQ ID NO: 2065932 - RNA, 21 nt, Human
ccacauagugaugguuccccu

SEQ ID NO: 2065933 - RNA, 19 nt, Human
ccacauagugaugguuccc

SEQ ID NO: 2065934 - RNA, 23 nt, Human
ccacacugcuaggugggccagcc

SEQ ID NO: 2065935 - RNA, 13 nt, Human
ccacccaccucag

SEQ ID NO: 2065936 - RNA, 15 nt, Human
ccacccaccucagcc

SEQ ID NO: 2065937 - RNA, 14 nt, Human
ccacccaccucagc

SEQ ID NO: 2065938 - RNA, 16 nt, Human
ccacccaccucagccu

SEQ ID NO: 2065939 - RNA, 15 nt, Human
ccacccaccagggcg

SEQ ID NO: 2065940 - RNA, 16 nt, Human
ccaccacacccagccc

SEQ ID NO: 2065941 - RNA, 14 nt, Human
ccaccacacccagc

SEQ ID NO: 2065942 - RNA, 20 nt, Human
ccacggaaaaugccaaucuc

SEQ ID NO: 2065943 - RNA, 14 nt, Human
ccacgcugucucca

SEQ ID NO: 2065944 - RNA, 15 nt, Human
ccacgcugucuccag

SEQ ID NO: 2065945 - RNA, 18 nt, Human
ccacgcugucuccagacc

SEQ ID NO: 2065946 - RNA, 19 nt, Human
ccacgcugucuccagaccc

SEQ ID NO: 2065947 - RNA, 21 nt, Human
ccacgcugucuccagaccccc

SEQ ID NO: 2065948 - RNA, 20 nt, Human
ccacgcugucuccagacccc

SEQ ID NO: 2065949 - RNA, 23 nt, Human
ccaccugcccccuucucccacac

SEQ ID NO: 2065950 - RNA, 21 nt, Human
ccaccugcccccuucucccac

SEQ ID NO: 2065951 - RNA, 22 nt, Human
ccaccugcccccuucucccaca

SEQ ID NO: 2065952 - RNA, 17 nt, Human
ccacgucugucuucaca

SEQ ID NO: 2065953 - RNA, 15 nt, Human
ccacggccaggccag

SEQ ID NO: 2065954 - RNA, 20 nt, Human
ccacgucugcuaacuuggag

SEQ ID NO: 2065955 - RNA, 17 nt, Human
ccacgugacagugccug

SEQ ID NO: 2065956 - RNA, 14 nt, Human
ccacgugccaggcc

SEQ ID NO: 2065957 - RNA, 15 nt, Human
ccacgugccaggccc

SEQ ID NO: 2065958 - RNA, 16 nt, Human
ccacgugccaggcccg

SEQ ID NO: 2065959 - RNA, 23 nt, Human
ccacgugccaggcccggggcugg

SEQ ID NO: 2065960 - RNA, 14 nt, Human
ccacguucaccccu

SEQ ID NO: 2065961 - RNA, 15 nt, Human
ccacguucaccccuc

SEQ ID NO: 2065962 - RNA, 17 nt, Human
ccacguucaccccucca

SEQ ID NO: 2065963 - RNA, 14 nt, Human
ccacggccaggcca

SEQ ID NO: 2065964 - RNA, 13 nt, Human
ccacggccaggcc

SEQ ID NO: 2065965 - RNA, 12 nt, Human
ccacggccaggc

SEQ ID NO: 2065966 - RNA, 20 nt, Human
ccaccugcccaucacagggu

SEQ ID NO: 2065967 - RNA, 23 nt, Human
ccaccugcccaucacaggguugg

SEQ ID NO: 2065968 - RNA, 14 nt, Human
ccaccugccacuag

SEQ ID NO: 2065969 - RNA, 20 nt, Human
ccaccugccacuaggcuggg

SEQ ID NO: 2065970 - RNA, 23 nt, Human
ccaccugccacuaggcugggugc

SEQ ID NO: 2065971 - RNA, 12 nt, Human
ccaccugccccc

SEQ ID NO: 2065972 - RNA, 18 nt, Human
ccaccugcccccuucucc

SEQ ID NO: 2065973 - RNA, 20 nt, Human
ccaccugcccccuucuccca

SEQ ID NO: 2065974 - RNA, 14 nt, Human
ccaccugcccaacc

SEQ ID NO: 2065975 - RNA, 14 nt, Human
ccaccugcccauca

SEQ ID NO: 2065976 - RNA, 15 nt, Human
ccaccugcccaucac

SEQ ID NO: 2065977 - RNA, 16 nt, Human
ccaccugcccaucaca

SEQ ID NO: 2065978 - RNA, 12 nt, Human
ccaccugagcuu

SEQ ID NO: 2065979 - RNA, 20 nt, Human
ccaccugagcuuuggacaca

SEQ ID NO: 2065980 - RNA, 22 nt, Human
ccaccugagcuuuggacgcaca

SEQ ID NO: 2065981 - RNA, 19 nt, Human
ccaccuccccuauccaccc

SEQ ID NO: 2065982 - RNA, 22 nt, Human
ccaccuccccuauccacccagc

SEQ ID NO: 2065983 - RNA, 17 nt, Human
ccaccuccccuauccac

SEQ ID NO: 2065984 - RNA, 15 nt, Human
ccaccuccccagccu

SEQ ID NO: 2065985 - RNA, 13 nt, Human
ccaccuccccagg

SEQ ID NO: 2065986 - RNA, 16 nt, Human
ccaccuccccaggccg

SEQ ID NO: 2065987 - RNA, 23 nt, Human
ccaccuccccaggccguggcugc

SEQ ID NO: 2065988 - RNA, 17 nt, Human
ccaccucccacaaagga

SEQ ID NO: 2065989 - RNA, 16 nt, Human
ccaccucagccuugga

SEQ ID NO: 2065990 - RNA, 14 nt, Human
ccacccaggagccc

SEQ ID NO: 2065991 - RNA, 20 nt, Human
ccacccccuucucugcucca

SEQ ID NO: 2065992 - RNA, 23 nt, Human
ccacccccuucucugcuccacca

SEQ ID NO: 2065993 - RNA, 12 nt, Human
ccacccaggagc

SEQ ID NO: 2065994 - RNA, 11 nt, Human
ccacccagccc

SEQ ID NO: 2065995 - RNA, 12 nt, Human
ccacccagccca

SEQ ID NO: 2065996 - RNA, 13 nt, Human
ccacccagcccau

SEQ ID NO: 2065997 - RNA, 22 nt, Human
ccacccagcccauucucucucc

SEQ ID NO: 2065998 - RNA, 15 nt, Human
ccaccucagccuccc

SEQ ID NO: 2065999 - RNA, 16 nt, Human
ccaccucagccuccug

SEQ ID NO: 2066000 - RNA, 14 nt, Human
ccaccucagccuug

SEQ ID NO: 2066001 - RNA, 15 nt, Human
ccaccucagccuugg

SEQ ID NO: 2066002 - RNA, 14 nt, Human
ccaccucagccucc

SEQ ID NO: 2066003 - RNA, 13 nt, Human
ccaccucagccuc

SEQ ID NO: 2066004 - RNA, 12 nt, Human
ccaccucagccu

SEQ ID NO: 2066005 - RNA, 18 nt, Human
ccacccugaaagcccuga

SEQ ID NO: 2066006 - RNA, 16 nt, Human
ccacccugaaagcccu

SEQ ID NO: 2066007 - RNA, 17 nt, Human
ccacccugaaagcccug

SEQ ID NO: 2066008 - RNA, 15 nt, Human
ccacccguggagaug

SEQ ID NO: 2066009 - RNA, 19 nt, Human
ccaccccucaacaccucug

SEQ ID NO: 2066010 - RNA, 14 nt, Human
ccaccccgggcucu

SEQ ID NO: 2066011 - RNA, 17 nt, Human
ccaccccgggcucucug

SEQ ID NO: 2066012 - RNA, 18 nt, Human
ccaccccgggcucucugc

SEQ ID NO: 2066013 - RNA, 20 nt, Human
ccaccccgggcucucugcug

SEQ ID NO: 2066014 - RNA, 15 nt, Human
ccacccucccagcuc

SEQ ID NO: 2066015 - RNA, 11 nt, Human
ccacugccucu

SEQ ID NO: 2066016 - RNA, 16 nt, Human
ccacuggacuugagcu

SEQ ID NO: 2066017 - RNA, 20 nt, Human
ccacugcacuccagccuggc

SEQ ID NO: 2066018 - RNA, 22 nt, Human
ccacuggacuugagcuuggcag

SEQ ID NO: 2066019 - RNA, 20 nt, Human
ccacuggacuugagcuuggc

SEQ ID NO: 2066020 - RNA, 21 nt, Human
ccacuggacuugagcuuggca

SEQ ID NO: 2066021 - RNA, 11 nt, Human
ccacuggcugu

SEQ ID NO: 2066022 - RNA, 14 nt, Human
ccacuggcuguggg

SEQ ID NO: 2066023 - RNA, 15 nt, Human
ccacuggcugugggc

SEQ ID NO: 2066024 - RNA, 16 nt, Human
ccacuggcugugggcu

SEQ ID NO: 2066025 - RNA, 17 nt, Human
ccacuggcugugggcuc

SEQ ID NO: 2066026 - RNA, 18 nt, Human
ccacuggcugugggcucc

SEQ ID NO: 2066027 - RNA, 19 nt, Human
ccacuggcugugggcuccc

SEQ ID NO: 2066028 - RNA, 20 nt, Human
ccacuggcugugggcucccu

SEQ ID NO: 2066029 - RNA, 21 nt, Human
ccacuggcugugggcucccuu

SEQ ID NO: 2066030 - RNA, 22 nt, Human
ccacuggcugugggcucccuuc

SEQ ID NO: 2066031 - RNA, 17 nt, Human
ccacuggaucagaaaga

SEQ ID NO: 2066032 - RNA, 21 nt, Human
ccacugcacuccagccugggc

SEQ ID NO: 2066033 - RNA, 15 nt, Human
ccacugcccgagcug

SEQ ID NO: 2066034 - RNA, 16 nt, Human
ccacugcccgagcugg

SEQ ID NO: 2066035 - RNA, 17 nt, Human
ccacugcccgagcuggu

SEQ ID NO: 2066036 - RNA, 18 nt, Human
ccacugcccgagcuggug

SEQ ID NO: 2066037 - RNA, 20 nt, Human
ccacugcccgagcuggugca

SEQ ID NO: 2066038 - RNA, 22 nt, Human
ccacugcccgagcuggugcauu

SEQ ID NO: 2066039 - RNA, 23 nt, Human
ccacugcccgagcuggugcauua

SEQ ID NO: 2066040 - RNA, 13 nt, Human
ccacugcccucug

SEQ ID NO: 2066041 - RNA, 14 nt, Human
ccacugcccucugu

SEQ ID NO: 2066042 - RNA, 16 nt, Human
ccacugcccuucucau

SEQ ID NO: 2066043 - RNA, 17 nt, Human
ccacugcccuucucauu

SEQ ID NO: 2066044 - RNA, 18 nt, Human
ccacugcacuccagccug

SEQ ID NO: 2066045 - RNA, 19 nt, Human
ccacugcacuccagccugg

SEQ ID NO: 2066046 - RNA, 20 nt, Human
ccacugcacuccagccuggg

SEQ ID NO: 2066047 - RNA, 22 nt, Human
ccacuacggaauaguuggcuag

SEQ ID NO: 2066048 - RNA, 23 nt, Human
ccacuacggaauaguuggcuagg

SEQ ID NO: 2066049 - RNA, 12 nt, Human
ccacucaagcca

SEQ ID NO: 2066050 - RNA, 16 nt, Human
ccacucaagccaagca

SEQ ID NO: 2066051 - RNA, 17 nt, Human
ccacucaagccaagcag

SEQ ID NO: 2066052 - RNA, 20 nt, Human
ccacucacaacagcugccug

SEQ ID NO: 2066053 - RNA, 14 nt, Human
ccacucacaacagc

SEQ ID NO: 2066054 - RNA, 21 nt, Human
ccacuagaacucuccaucuua

SEQ ID NO: 2066055 - RNA, 18 nt, Human
ccacucaagccaagcagc

SEQ ID NO: 2066056 - RNA, 19 nt, Human
ccacuccagaccccuggcu

SEQ ID NO: 2066057 - RNA, 17 nt, Human
ccacuccagaccccugg

SEQ ID NO: 2066058 - RNA, 14 nt, Human
ccacguucucucug

SEQ ID NO: 2066059 - RNA, 23 nt, Human
ccacguucucucugccugugagc

SEQ ID NO: 2066060 - RNA, 22 nt, Human
ccacuaaaagaucgcaguuugc

SEQ ID NO: 2066061 - RNA, 15 nt, Human
ccacguuccuuacug

SEQ ID NO: 2066062 - RNA, 20 nt, Human
ccacguuccuuacugcagaa

SEQ ID NO: 2066063 - RNA, 21 nt, Human
ccacguuccuuacugcagaau

SEQ ID NO: 2066064 - RNA, 14 nt, Human
ccuuagaaguggaa

SEQ ID NO: 2066065 - RNA, 18 nt, Human
ccuuagaagucacacagu

SEQ ID NO: 2066066 - RNA, 12 nt, Human
ccuuacugcaga

SEQ ID NO: 2066067 - RNA, 20 nt, Human
ccuuacuuacagcauaaggg

SEQ ID NO: 2066068 - RNA, 14 nt, Human
ccuuacuuagcaug

SEQ ID NO: 2066069 - RNA, 17 nt, Human
ccuuagaagucacacag

SEQ ID NO: 2066070 - RNA, 18 nt, Human
ccuuacaccucguuaggg

SEQ ID NO: 2066071 - RNA, 22 nt, Human
ccuuacaccucguuagggaaga

SEQ ID NO: 2066072 - RNA, 14 nt, Human
ccuuacccaucugc

SEQ ID NO: 2066073 - RNA, 15 nt, Human
ccuuaccccuuagcc

SEQ ID NO: 2066074 - RNA, 16 nt, Human
ccuuaccccuuagccu

SEQ ID NO: 2066075 - RNA, 14 nt, Human
ccuuaaaagccauc

SEQ ID NO: 2066076 - RNA, 19 nt, Human
ccuuaaaagccaucaugua

SEQ ID NO: 2066077 - RNA, 23 nt, Human
ccuuaaaacuuuaaucccacuug

SEQ ID NO: 2066078 - RNA, 15 nt, Human
ccuuaaacugugugg

SEQ ID NO: 2066079 - RNA, 13 nt, Human
ccuuaaauuaaac

SEQ ID NO: 2066080 - RNA, 18 nt, Human
ccuuaaauuaaacaauuu

SEQ ID NO: 2066081 - RNA, 21 nt, Human
ccuuaaauuaaacaauuuauu

SEQ ID NO: 2066082 - RNA, 16 nt, Human
ccuguuuuuguuaacu

SEQ ID NO: 2066083 - RNA, 17 nt, Human
ccuguuuuuaagcuguu

SEQ ID NO: 2066084 - RNA, 18 nt, Human
ccuguuuuuaagcuguuu

SEQ ID NO: 2066085 - RNA, 19 nt, Human
ccuguuuuuaagcuguuuc

SEQ ID NO: 2066086 - RNA, 14 nt, Human
ccuuaacuggagcc

SEQ ID NO: 2066087 - RNA, 23 nt, Human
ccuuaacuggagccccaucagcu

SEQ ID NO: 2066088 - RNA, 17 nt, Human
ccuuaacuggagcccca

SEQ ID NO: 2066089 - RNA, 19 nt, Human
ccuuaagaacacaaagcgg

SEQ ID NO: 2066090 - RNA, 16 nt, Human
ccuuaaguaucagaaa

SEQ ID NO: 2066091 - RNA, 13 nt, Human
ccuguguuucuag

SEQ ID NO: 2066092 - RNA, 19 nt, Human
ccuguuuuauacuguacuu

SEQ ID NO: 2066093 - RNA, 12 nt, Human
ccuguuucuucc

SEQ ID NO: 2066094 - RNA, 21 nt, Human
ccugguauggguuucucccag

SEQ ID NO: 2066095 - RNA, 9 nt, Human
ccuggugcu

SEQ ID NO: 2066096 - RNA, 13 nt, Human
ccuguguagcugg

SEQ ID NO: 2066097 - RNA, 21 nt, Human
ccugugucuugcaauggcagc

SEQ ID NO: 2066098 - RNA, 19 nt, Human
ccugugucuugcaauggca

SEQ ID NO: 2066099 - RNA, 17 nt, Human
ccugugucuugcaaugg

SEQ ID NO: 2066100 - RNA, 22 nt, Human
ccugugucuugcaauggcagcc

SEQ ID NO: 2066101 - RNA, 21 nt, Human
ccugugugugcgccuacagga

SEQ ID NO: 2066102 - RNA, 20 nt, Human
ccugugugugcgccuacagg

SEQ ID NO: 2066103 - RNA, 19 nt, Human
ccugugugguuuaguguaa

SEQ ID NO: 2066104 - RNA, 20 nt, Human
ccugugugguuuaguguaaa

SEQ ID NO: 2066105 - RNA, 21 nt, Human
ccugugugguuuaguguaaaa

SEQ ID NO: 2066106 - RNA, 22 nt, Human
ccugugugguuuaguguaaaaa

SEQ ID NO: 2066107 - RNA, 21 nt, Human
ccuugaaagucaugaacacau

SEQ ID NO: 2066108 - RNA, 13 nt, Human
ccuugaacacugg

SEQ ID NO: 2066109 - RNA, 19 nt, Human
ccuucuuuccauuucucuc

SEQ ID NO: 2066110 - RNA, 17 nt, Human
ccuugaagaaccucuca

SEQ ID NO: 2066111 - RNA, 18 nt, Human
ccuugaagaaccucucac

SEQ ID NO: 2066112 - RNA, 20 nt, Human
ccuugaacacugggggaggg

SEQ ID NO: 2066113 - RNA, 14 nt, Human
ccuugaacuccugg

SEQ ID NO: 2066114 - RNA, 13 nt, Human
ccuugaagauauc

SEQ ID NO: 2066115 - RNA, 14 nt, Human
ccuugaagccacug

SEQ ID NO: 2066116 - RNA, 19 nt, Human
ccuugaagccacugaagcu

SEQ ID NO: 2066117 - RNA, 22 nt, Human
ccuugaagccacugaagcuggg

SEQ ID NO: 2066118 - RNA, 17 nt, Human
ccuugaagucacccggc

SEQ ID NO: 2066119 - RNA, 23 nt, Human
ccuugaagauaucuugaaaugaa

SEQ ID NO: 2066120 - RNA, 17 nt, Human
ccuugagggcaagagcc

SEQ ID NO: 2066121 - RNA, 20 nt, Human
ccuugacgucaagucuccuu

SEQ ID NO: 2066122 - RNA, 20 nt, Human
ccuugaguugauucagcucu

SEQ ID NO: 2066123 - RNA, 23 nt, Human
ccuugaggucuuuugacaugugg

SEQ ID NO: 2066124 - RNA, 13 nt, Human
ccuugaggucuuu

SEQ ID NO: 2066125 - RNA, 12 nt, Human
ccuugaggucuu

SEQ ID NO: 2066126 - RNA, 21 nt, Human
ccuugagggugcuuguucccu

SEQ ID NO: 2066127 - RNA, 15 nt, Human
ccuucuacacucucc

SEQ ID NO: 2066128 - RNA, 16 nt, Human
ccuucuacacucuccu

SEQ ID NO: 2066129 - RNA, 17 nt, Human
ccuucuacacucuccug

SEQ ID NO: 2066130 - RNA, 18 nt, Human
ccuucuacacucuccugg

SEQ ID NO: 2066131 - RNA, 19 nt, Human
ccuucuacacucuccuggg

SEQ ID NO: 2066132 - RNA, 20 nt, Human
ccuucuacacucuccugggc

SEQ ID NO: 2066133 - RNA, 21 nt, Human
ccuucuacacucuccugggcc

SEQ ID NO: 2066134 - RNA, 22 nt, Human
ccuucuacacucuccugggccc

SEQ ID NO: 2066135 - RNA, 20 nt, Human
ccuucggacaacucaguccc

SEQ ID NO: 2066136 - RNA, 14 nt, Human
ccuucuaggaagcu

SEQ ID NO: 2066137 - RNA, 15 nt, Human
ccuucuacugagccu

SEQ ID NO: 2066138 - RNA, 14 nt, Human
ccuucuacugagcc

SEQ ID NO: 2066139 - RNA, 14 nt, Human
ccuucuacugcuuc

SEQ ID NO: 2066140 - RNA, 22 nt, Human
ccuucuacuuacacaucuucca

SEQ ID NO: 2066141 - RNA, 23 nt, Human
ccuucuacuuacacaucuuccac

SEQ ID NO: 2066142 - RNA, 17 nt, Human
ccuucuuauucucacuc

SEQ ID NO: 2066143 - RNA, 18 nt, Human
ccuucuuauucucacucc

SEQ ID NO: 2066144 - RNA, 21 nt, Human
ccuucuguggcucacagaacc

SEQ ID NO: 2066145 - RNA, 19 nt, Human
ccuucuuauucucacucca

SEQ ID NO: 2066146 - RNA, 20 nt, Human
ccuucuuauucucacuccac

SEQ ID NO: 2066147 - RNA, 22 nt, Human
ccuucuuauucucacuccacca

SEQ ID NO: 2066148 - RNA, 21 nt, Human
ccuucuucggggaacuccugg

SEQ ID NO: 2066149 - RNA, 22 nt, Human
ccuucuucggggaacuccugga

SEQ ID NO: 2066150 - RNA, 14 nt, Human
ccuucuguggcuca

SEQ ID NO: 2066151 - RNA, 13 nt, Human
ccuucugugccca

SEQ ID NO: 2066152 - RNA, 14 nt, Human
ccuucugugcccag

SEQ ID NO: 2066153 - RNA, 15 nt, Human
ccuucugugcccagc

SEQ ID NO: 2066154 - RNA, 16 nt, Human
ccuucugugcccagcu

SEQ ID NO: 2066155 - RNA, 17 nt, Human
ccuucugugcccagcuc

SEQ ID NO: 2066156 - RNA, 18 nt, Human
ccuucugugcccagcuca

SEQ ID NO: 2066157 - RNA, 19 nt, Human
ccuucugugcccagcucag

SEQ ID NO: 2066158 - RNA, 20 nt, Human
ccuucugugcccagcucagu

SEQ ID NO: 2066159 - RNA, 21 nt, Human
ccuucugugcccagcucaguc

SEQ ID NO: 2066160 - RNA, 19 nt, Human
ccuucucucaccuccuaaa

SEQ ID NO: 2066161 - RNA, 17 nt, Human
ccuucucucaccuccua

SEQ ID NO: 2066162 - RNA, 18 nt, Human
ccuucucucaccuccuaa

SEQ ID NO: 2066163 - RNA, 17 nt, Human
ccuucuccuuccaacug

SEQ ID NO: 2066164 - RNA, 18 nt, Human
ccuucuccuuccaacugc

SEQ ID NO: 2066165 - RNA, 19 nt, Human
ccuucuccuuccaacugcu

SEQ ID NO: 2066166 - RNA, 19 nt, Human
ccuucuccuugauaacagc

SEQ ID NO: 2066167 - RNA, 20 nt, Human
ccuucuccuugauaacagcu

SEQ ID NO: 2066168 - RNA, 21 nt, Human
ccuucuccuugauaacagcua

SEQ ID NO: 2066169 - RNA, 16 nt, Human
ccuucucucaccuccu

SEQ ID NO: 2066170 - RNA, 17 nt, Human
ccuuucucccaggccag

SEQ ID NO: 2066171 - RNA, 19 nt, Human
ccuuucgcccacagucuga

SEQ ID NO: 2066172 - RNA, 14 nt, Human
ccuuucucccaggc

SEQ ID NO: 2066173 - RNA, 17 nt, Human
ccuugguucaucagugu

SEQ ID NO: 2066174 - RNA, 22 nt, Human
ccuuguuugauuuuagcugcag

SEQ ID NO: 2066175 - RNA, 19 nt, Human
ccuugggaggccccacugg

SEQ ID NO: 2066176 - RNA, 20 nt, Human
ccuugggaggccccacuggg

SEQ ID NO: 2066177 - RNA, 15 nt, Human
ccuugggaggcccca

SEQ ID NO: 2066178 - RNA, 18 nt, Human
ccuugcaacacacagaca

SEQ ID NO: 2066179 - RNA, 22 nt, Human
ccuugcaacacacagacacacg

SEQ ID NO: 2066180 - RNA, 16 nt, Human
ccuugcaacacacaga

SEQ ID NO: 2066181 - RNA, 17 nt, Human
ccuugcaacacacagac

SEQ ID NO: 2066182 - RNA, 21 nt, Human
ccuugauuuaucacacaaagc

SEQ ID NO: 2066183 - RNA, 14 nt, Human
ccuuggucuaacuu

SEQ ID NO: 2066184 - RNA, 23 nt, Human
ccuuggucuaacuuuugugugaa

SEQ ID NO: 2066185 - RNA, 14 nt, Human
ccuuggggcaggca

SEQ ID NO: 2066186 - RNA, 15 nt, Human
ccuuggggcaggcag

SEQ ID NO: 2066187 - RNA, 16 nt, Human
ccuuggggcaggcagu

SEQ ID NO: 2066188 - RNA, 15 nt, Human
ccuuccuucccuggc

SEQ ID NO: 2066189 - RNA, 16 nt, Human
ccuuccuucccuggcu

SEQ ID NO: 2066190 - RNA, 14 nt, Human
ccuuccuucuugcu

SEQ ID NO: 2066191 - RNA, 16 nt, Human
ccuuccuugaccagca

SEQ ID NO: 2066192 - RNA, 21 nt, Human
ccuuccucuccacugccuucg

SEQ ID NO: 2066193 - RNA, 22 nt, Human
ccuucauuuggcauuccccacu

SEQ ID NO: 2066194 - RNA, 12 nt, Human
ccuucagugccc

SEQ ID NO: 2066195 - RNA, 14 nt, Human
ccuucagugcccac

SEQ ID NO: 2066196 - RNA, 15 nt, Human
ccuucagugcccacc

SEQ ID NO: 2066197 - RNA, 16 nt, Human
ccuucagugcccacca

SEQ ID NO: 2066198 - RNA, 18 nt, Human
ccuucagugcccaccaac

SEQ ID NO: 2066199 - RNA, 16 nt, Human
ccuuccaacaggagcu

SEQ ID NO: 2066200 - RNA, 19 nt, Human
ccuuccaacaggagcuggg

SEQ ID NO: 2066201 - RNA, 16 nt, Human
ccuuccaacugcugcc

SEQ ID NO: 2066202 - RNA, 17 nt, Human
ccuuccaacugcugccc

SEQ ID NO: 2066203 - RNA, 19 nt, Human
ccuuccaacugcugcccca

SEQ ID NO: 2066204 - RNA, 23 nt, Human
ccuuccuugaccagcagauccca

SEQ ID NO: 2066205 - RNA, 20 nt, Human
ccuuccuugcuguccuaggc

SEQ ID NO: 2066206 - RNA, 23 nt, Human
ccuucacuccggugugccugcag

SEQ ID NO: 2066207 - RNA, 20 nt, Human
ccuucacuucugaccacacu

SEQ ID NO: 2066208 - RNA, 22 nt, Human
ccuucacuucugaccacacuuc

SEQ ID NO: 2066209 - RNA, 14 nt, Human
ccuucacuccggug

SEQ ID NO: 2066210 - RNA, 20 nt, Human
ccuucacuccggugugccug

SEQ ID NO: 2066211 - RNA, 12 nt, Human
ccuucacagugu

SEQ ID NO: 2066212 - RNA, 20 nt, Human
ccuucacauccuguguuucu

SEQ ID NO: 2066213 - RNA, 11 nt, Human
ccuucagugcc

SEQ ID NO: 2066214 - RNA, 19 nt, Human
ccuucauuuggcauucccc

SEQ ID NO: 2066215 - RNA, 21 nt, Human
ccuucagcauccucaguuccu

SEQ ID NO: 2066216 - RNA, 11 nt, Human
ccuucagaggc

SEQ ID NO: 2066217 - RNA, 18 nt, Human
ccuucagagguggcucug

SEQ ID NO: 2066218 - RNA, 13 nt, Human
ccuucagauccua

SEQ ID NO: 2066219 - RNA, 14 nt, Human
ccuucagauccuac

SEQ ID NO: 2066220 - RNA, 16 nt, Human
ccuucagauccuaccc

SEQ ID NO: 2066221 - RNA, 20 nt, Human
ccuucagauccuaccccuga

SEQ ID NO: 2066222 - RNA, 22 nt, Human
cgccaggggaaaaucagccugc

SEQ ID NO: 2066223 - RNA, 10 nt, Human
cgcagcccug

SEQ ID NO: 2066224 - RNA, 15 nt, Human
cgcacccccacccuu

SEQ ID NO: 2066225 - RNA, 19 nt, Human
cgcacccccacccuuuggg

SEQ ID NO: 2066226 - RNA, 16 nt, Human
cgagcccugguggcag

SEQ ID NO: 2066227 - RNA, 15 nt, Human
cgagcccugguggca

SEQ ID NO: 2066228 - RNA, 16 nt, Human
cgagcccuacuuccag

SEQ ID NO: 2066229 - RNA, 21 nt, Human
cgauucacccuguccaaacug

SEQ ID NO: 2066230 - RNA, 16 nt, Human
cgauucacccugucca

SEQ ID NO: 2066231 - RNA, 22 nt, Human
cgauguggcccuggccugcugg

SEQ ID NO: 2066232 - RNA, 17 nt, Human
cgauguggcccuggccu

SEQ ID NO: 2066233 - RNA, 18 nt, Human
cgauguggcccuggccug

SEQ ID NO: 2066234 - RNA, 11 nt, Human
cgauguggccc

SEQ ID NO: 2066235 - RNA, 13 nt, Human
cgauguggcccug

SEQ ID NO: 2066236 - RNA, 15 nt, Human
cgauguggcccuggc

SEQ ID NO: 2066237 - RNA, 16 nt, Human
cgauguggcccuggcc

SEQ ID NO: 2066238 - RNA, 14 nt, Human
cgcaccccagagug

SEQ ID NO: 2066239 - RNA, 13 nt, Human
cgcacccccaccc

SEQ ID NO: 2066240 - RNA, 14 nt, Human
cgcacccccacccu

SEQ ID NO: 2066241 - RNA, 20 nt, Human
cgcacacacacacacaggag

SEQ ID NO: 2066242 - RNA, 12 nt, Human
cgcacacagcuu

SEQ ID NO: 2066243 - RNA, 17 nt, Human
cgccaugcuccuggccc

SEQ ID NO: 2066244 - RNA, 19 nt, Human
cgaaagcugggcaacaugc

SEQ ID NO: 2066245 - RNA, 12 nt, Human
cgaacuccuggg

SEQ ID NO: 2066246 - RNA, 16 nt, Human
cgaacuccugggcuca

SEQ ID NO: 2066247 - RNA, 18 nt, Human
cgaagaaggguccuuccc

SEQ ID NO: 2066248 - RNA, 18 nt, Human
cgaagaaaaaaaauaaca

SEQ ID NO: 2066249 - RNA, 19 nt, Human
cgaagaaaaaaaauaacac

SEQ ID NO: 2066250 - RNA, 16 nt, Human
cgaacgacaauagcuu

SEQ ID NO: 2066251 - RNA, 23 nt, Human
cgaacccaccugcugagagaccc

SEQ ID NO: 2066252 - RNA, 16 nt, Human
cgaacccaccugcuga

SEQ ID NO: 2066253 - RNA, 13 nt, Human
cgaaccccaagga

SEQ ID NO: 2066254 - RNA, 14 nt, Human
cgaacuggcugcaa

SEQ ID NO: 2066255 - RNA, 12 nt, Human
cgaacuggcugc

SEQ ID NO: 2066256 - RNA, 19 nt, Human
cgaaagggacuuggaagcu

SEQ ID NO: 2066257 - RNA, 20 nt, Human
cgaaaggaugaaagugacca

SEQ ID NO: 2066258 - RNA, 22 nt, Human
cgaaagggacuuggaagcuccg

SEQ ID NO: 2066259 - RNA, 22 nt, Human
cgaaaggauguaaacagugccu

SEQ ID NO: 2066260 - RNA, 23 nt, Human
cgaaaggauguaaacagugccug

SEQ ID NO: 2066261 - RNA, 14 nt, Human
cgaaccaauauuug

SEQ ID NO: 2066262 - RNA, 18 nt, Human
cgaacccacacugcaaca

SEQ ID NO: 2066263 - RNA, 20 nt, Human
cgaacccacacugcaacagg

SEQ ID NO: 2066264 - RNA, 14 nt, Human
cgaacccaccugcu

SEQ ID NO: 2066265 - RNA, 17 nt, Human
ccuuuuacauacugcug

SEQ ID NO: 2066266 - RNA, 15 nt, Human
ccuuuucacuacacc

SEQ ID NO: 2066267 - RNA, 21 nt, Human
ccuuuuagccuaguucaucca

SEQ ID NO: 2066268 - RNA, 18 nt, Human
ccuuuuacauacugcugu

SEQ ID NO: 2066269 - RNA, 22 nt, Human
cgaaaaucauauaaucuuacaa

SEQ ID NO: 2066270 - RNA, 14 nt, Human
cgaaaccccaucuc

SEQ ID NO: 2066271 - RNA, 13 nt, Human
cgaaacagcgcug

SEQ ID NO: 2066272 - RNA, 13 nt, Human
cgaaacugcucua

SEQ ID NO: 2066273 - RNA, 13 nt, Human
cgaaacuggaagu

SEQ ID NO: 2066274 - RNA, 15 nt, Human
cgaaacuggaaguua

SEQ ID NO: 2066275 - RNA, 16 nt, Human
cgaaacuggaaguuau

SEQ ID NO: 2066276 - RNA, 18 nt, Human
cgaaacuggaaguuauuu

SEQ ID NO: 2066277 - RNA, 13 nt, Human
cgacuuuauuuuc

SEQ ID NO: 2066278 - RNA, 14 nt, Human
cgaauagcugggac

SEQ ID NO: 2066279 - RNA, 13 nt, Human
cgaauagcuggga

SEQ ID NO: 2066280 - RNA, 17 nt, Human
cgacugugaccuguggg

SEQ ID NO: 2066281 - RNA, 19 nt, Human
cgacugugaccugugggga

SEQ ID NO: 2066282 - RNA, 17 nt, Human
cgagaucacgccacugc

SEQ ID NO: 2066283 - RNA, 19 nt, Human
cgagaguagccgagagccu

SEQ ID NO: 2066284 - RNA, 20 nt, Human
cgagaguagccgagagccug

SEQ ID NO: 2066285 - RNA, 14 nt, Human
cgagagucugucuc

SEQ ID NO: 2066286 - RNA, 15 nt, Human
cgagagucugucuca

SEQ ID NO: 2066287 - RNA, 16 nt, Human
cgagaccagccuggcc

SEQ ID NO: 2066288 - RNA, 15 nt, Human
cgagaccagccuggc

SEQ ID NO: 2066289 - RNA, 14 nt, Human
cgagaccagccugg

SEQ ID NO: 2066290 - RNA, 13 nt, Human
cgagaccagccug

SEQ ID NO: 2066291 - RNA, 17 nt, Human
cgagaccaaccugacca

SEQ ID NO: 2066292 - RNA, 13 nt, Human
cgagaagcaagaa

SEQ ID NO: 2066293 - RNA, 15 nt, Human
cgagaagcaagaaag

SEQ ID NO: 2066294 - RNA, 17 nt, Human
cgagaccagccuggcca

SEQ ID NO: 2066295 - RNA, 20 nt, Human
cgagauugcaccacugcacu

SEQ ID NO: 2066296 - RNA, 20 nt, Human
cgagaucacgccacugcacu

SEQ ID NO: 2066297 - RNA, 18 nt, Human
cgagaucacgccacugca

SEQ ID NO: 2066298 - RNA, 16 nt, Human
cgagaucacgccacug

SEQ ID NO: 2066299 - RNA, 15 nt, Human
cgagcaguccugccu

SEQ ID NO: 2066300 - RNA, 17 nt, Human
cgagcaguccugccuca

SEQ ID NO: 2066301 - RNA, 21 nt, Human
cgagcaguccugccucagccu

SEQ ID NO: 2066302 - RNA, 23 nt, Human
cgagcaguccugccucagccucc

SEQ ID NO: 2066303 - RNA, 17 nt, Human
ccuggagagucucacuc

SEQ ID NO: 2066304 - RNA, 21 nt, Human
ccuggaagcuguguccuugca

SEQ ID NO: 2066305 - RNA, 22 nt, Human
ccuggaaggacauccauguucc

SEQ ID NO: 2066306 - RNA, 23 nt, Human
ccuggcacccggccccugcuggu

SEQ ID NO: 2066307 - RNA, 22 nt, Human
ccuggcacuauaauguaagcuc

SEQ ID NO: 2066308 - RNA, 18 nt, Human
ccuggcacgguggcucag

SEQ ID NO: 2066309 - RNA, 22 nt, Human
ccuggcacgguggcucaggccu

SEQ ID NO: 2066310 - RNA, 22 nt, Human
ccuggcacccggccccugcugg

SEQ ID NO: 2066311 - RNA, 17 nt, Human
ccuggcagaacugagcu

SEQ ID NO: 2066312 - RNA, 18 nt, Human
ccuggcagaacugagcuc

SEQ ID NO: 2066313 - RNA, 20 nt, Human
ccuggcagaacugagcuccu

SEQ ID NO: 2066314 - RNA, 23 nt, Human
ccuggcagaacugagcuccucug

SEQ ID NO: 2066315 - RNA, 22 nt, Human
ccuggcagccgugccuucagcu

SEQ ID NO: 2066316 - RNA, 21 nt, Human
ccuggcagccgugccuucagc

SEQ ID NO: 2066317 - RNA, 17 nt, Human
ccuggcaggaugacccu

SEQ ID NO: 2066318 - RNA, 15 nt, Human
ccuggccagaugcac

SEQ ID NO: 2066319 - RNA, 12 nt, Human
ccuggccagagg

SEQ ID NO: 2066320 - RNA, 13 nt, Human
ccuggccagaggc

SEQ ID NO: 2066321 - RNA, 14 nt, Human
ccuggccagaggcu

SEQ ID NO: 2066322 - RNA, 17 nt, Human
ccuggcucccacaggcc

SEQ ID NO: 2066323 - RNA, 23 nt, Human
ccuggcucccacaggcccuuccu

SEQ ID NO: 2066324 - RNA, 21 nt, Human
ccuggucacaggacucugccu

SEQ ID NO: 2066325 - RNA, 23 nt, Human
ccuggucacaggacucugccucc

SEQ ID NO: 2066326 - RNA, 22 nt, Human
ccuggucacaggacucugccuc

SEQ ID NO: 2066327 - RNA, 20 nt, Human
ccuggugaggaagcuccagu

SEQ ID NO: 2066328 - RNA, 21 nt, Human
ccuggugaggaagcuccaguc

SEQ ID NO: 2066329 - RNA, 23 nt, Human
ccuggugaggaagcuccaguccu

SEQ ID NO: 2066330 - RNA, 22 nt, Human
ccugguccagggaagcuggccg

SEQ ID NO: 2066331 - RNA, 14 nt, Human
ccugguccagggaa

SEQ ID NO: 2066332 - RNA, 21 nt, Human
ccugguccagggaagcuggcc

SEQ ID NO: 2066333 - RNA, 17 nt, Human
ccuggguucccuuuccu

SEQ ID NO: 2066334 - RNA, 16 nt, Human
ccugggugcuggcugc

SEQ ID NO: 2066335 - RNA, 15 nt, Human
ccuggguggggcugc

SEQ ID NO: 2066336 - RNA, 16 nt, Human
ccuggguggggcugcu

SEQ ID NO: 2066337 - RNA, 17 nt, Human
ccuggguggggcugcuc

SEQ ID NO: 2066338 - RNA, 23 nt, Human
ccuggggguucuuucuuccucug

SEQ ID NO: 2066339 - RNA, 22 nt, Human
ccuggggguucuuucuuccucu

SEQ ID NO: 2066340 - RNA, 21 nt, Human
ccuggggguucuuucuuccuc

SEQ ID NO: 2066341 - RNA, 18 nt, Human
ccugggucuaagggguug

SEQ ID NO: 2066342 - RNA, 14 nt, Human
ccugggucuguguc

SEQ ID NO: 2066343 - RNA, 15 nt, Human
ccugggucugugucu

SEQ ID NO: 2066344 - RNA, 16 nt, Human
ccugggucugugucuc

SEQ ID NO: 2066345 - RNA, 17 nt, Human
ccugggucugugucucu

SEQ ID NO: 2066346 - RNA, 21 nt, Human
ccugggucugugucucuuuuc

SEQ ID NO: 2066347 - RNA, 23 nt, Human
ccugggugcuggcugcccagacc

SEQ ID NO: 2066348 - RNA, 18 nt, Human
ccuggggguucuuucuuc

SEQ ID NO: 2066349 - RNA, 15 nt, Human
ccugggccccaccac

SEQ ID NO: 2066350 - RNA, 16 nt, Human
ccugggcauugcuuuc

SEQ ID NO: 2066351 - RNA, 17 nt, Human
ccugggcauugcuuucc

SEQ ID NO: 2066352 - RNA, 13 nt, Human
ccugggccccacc

SEQ ID NO: 2066353 - RNA, 14 nt, Human
ccugggccccacca

SEQ ID NO: 2066354 - RNA, 17 nt, Human
ccuggcuucuggagccc

SEQ ID NO: 2066355 - RNA, 13 nt, Human
ccuggacaaaccc

SEQ ID NO: 2066356 - RNA, 14 nt, Human
ccugggcauugcuu

SEQ ID NO: 2066357 - RNA, 15 nt, Human
ccugggcauugcuuu

SEQ ID NO: 2066358 - RNA, 24 nt, Human
ccuggcuuuucacugcuggcugcc

SEQ ID NO: 2066359 - RNA, 23 nt, Human
ccuggcuuuucacugcuggcugc

SEQ ID NO: 2066360 - RNA, 22 nt, Human
ccuggcuuuucacugcuggcug

SEQ ID NO: 2066361 - RNA, 21 nt, Human
ccuggcuuuucacugcuggcu

SEQ ID NO: 2066362 - RNA, 18 nt, Human
ccuggcuuuucacugcug

SEQ ID NO: 2066363 - RNA, 20 nt, Human
ccuggcuuuucacugcuggc

SEQ ID NO: 2066364 - RNA, 13 nt, Human
ccuggcuucugga

SEQ ID NO: 2066365 - RNA, 14 nt, Human
ccuggcuucuggag

SEQ ID NO: 2066366 - RNA, 15 nt, Human
ccuggcuucuggagc

SEQ ID NO: 2066367 - RNA, 16 nt, Human
ccuggcuucuggagcc

SEQ ID NO: 2066368 - RNA, 22 nt, Human
ccuggcugguaagggccaaguc

SEQ ID NO: 2066369 - RNA, 14 nt, Human
ccuggucccuggga

SEQ ID NO: 2066370 - RNA, 16 nt, Human
ccugcggccugcugga

SEQ ID NO: 2066371 - RNA, 17 nt, Human
ccugcggccugcuggag

SEQ ID NO: 2066372 - RNA, 12 nt, Human
ccugcgggcugc

SEQ ID NO: 2066373 - RNA, 22 nt, Human
ccugcgggcugccccgcuuugc

SEQ ID NO: 2066374 - RNA, 19 nt, Human
ccugcgggcuuuuccccgg

SEQ ID NO: 2066375 - RNA, 14 nt, Human
ccugcggucaaggc

SEQ ID NO: 2066376 - RNA, 16 nt, Human
ccugcggucaaggcca

SEQ ID NO: 2066377 - RNA, 17 nt, Human
ccugcggucaaggccag

SEQ ID NO: 2066378 - RNA, 18 nt, Human
ccugcggucaaggccagc

SEQ ID NO: 2066379 - RNA, 21 nt, Human
ccugcgggcuuuuccccgguc

SEQ ID NO: 2066380 - RNA, 22 nt, Human
ccugccuuggggaaggucuccc

SEQ ID NO: 2066381 - RNA, 22 nt, Human
ccugccuugaagccacugaagc

SEQ ID NO: 2066382 - RNA, 23 nt, Human
ccugccuugaagccacugaagcu

SEQ ID NO: 2066383 - RNA, 16 nt, Human
ccugccuugaagccac

SEQ ID NO: 2066384 - RNA, 17 nt, Human
ccugccuugaagccacu

SEQ ID NO: 2066385 - RNA, 19 nt, Human
ccugccuugaagccacuga

SEQ ID NO: 2066386 - RNA, 21 nt, Human
ccugccuugaagccacugaag

SEQ ID NO: 2066387 - RNA, 13 nt, Human
ccugccuugaagc

SEQ ID NO: 2066388 - RNA, 18 nt, Human
ccugccuucuucggggaa

SEQ ID NO: 2066389 - RNA, 14 nt, Human
ccugccuucguuaa

SEQ ID NO: 2066390 - RNA, 19 nt, Human
ccugcgaaggggcccuggu

SEQ ID NO: 2066391 - RNA, 20 nt, Human
ccugcgaaggggcccugguc

SEQ ID NO: 2066392 - RNA, 15 nt, Human
ccugcgaaggggccc

SEQ ID NO: 2066393 - RNA, 17 nt, Human
ccugcgaaggggcccug

SEQ ID NO: 2066394 - RNA, 14 nt, Human
ccugccccucccag

SEQ ID NO: 2066395 - RNA, 15 nt, Human
ccugccccucccaga

SEQ ID NO: 2066396 - RNA, 15 nt, Human
ccugccuagcacuca

SEQ ID NO: 2066397 - RNA, 20 nt, Human
ccugccuagcacucacaugc

SEQ ID NO: 2066398 - RNA, 21 nt, Human
ccugccuagcacucacaugcu

SEQ ID NO: 2066399 - RNA, 21 nt, Human
ccugccuaggaauucccagcc

SEQ ID NO: 2066400 - RNA, 17 nt, Human
ccugcccccuucuccca

SEQ ID NO: 2066401 - RNA, 18 nt, Human
ccugcccccuucucccac

SEQ ID NO: 2066402 - RNA, 19 nt, Human
ccugcccccuucucccaca

SEQ ID NO: 2066403 - RNA, 20 nt, Human
ccugcccccuucucccacac

SEQ ID NO: 2066404 - RNA, 21 nt, Human
ccugcccccuucucccacacu

SEQ ID NO: 2066405 - RNA, 22 nt, Human
ccugcccccuucucccacacug

SEQ ID NO: 2066406 - RNA, 23 nt, Human
ccugcccccuucucccacacugc

SEQ ID NO: 2066407 - RNA, 16 nt, Human
ccugccccgcccagcu

SEQ ID NO: 2066408 - RNA, 22 nt, Human
ccugccccgcccagcugcaccu

SEQ ID NO: 2066409 - RNA, 22 nt, Human
ccugccccgucaccaucucagg

SEQ ID NO: 2066410 - RNA, 23 nt, Human
ccugccccgucaccaucucaggc

SEQ ID NO: 2066411 - RNA, 11 nt, Human
ccugccucagc

SEQ ID NO: 2066412 - RNA, 11 nt, Human
ccugccuggcc

SEQ ID NO: 2066413 - RNA, 12 nt, Human
ccugccuggcca

SEQ ID NO: 2066414 - RNA, 13 nt, Human
ccugccuggccag

SEQ ID NO: 2066415 - RNA, 14 nt, Human
ccugccuggccagg

SEQ ID NO: 2066416 - RNA, 14 nt, Human
ccugccuggucucc

SEQ ID NO: 2066417 - RNA, 23 nt, Human
ccugccuggccaggcagaucugu

SEQ ID NO: 2066418 - RNA, 18 nt, Human
ccugccuggccaggcaga

SEQ ID NO: 2066419 - RNA, 22 nt, Human
ccugccuggccaggcagaucug

SEQ ID NO: 2066420 - RNA, 23 nt, Human
ccugcuuugggcugcccuggugc

SEQ ID NO: 2066421 - RNA, 22 nt, Human
ccugcuuugggcugcccuggug

SEQ ID NO: 2066422 - RNA, 21 nt, Human
ccugcuuugggcugcccuggu

SEQ ID NO: 2066423 - RNA, 19 nt, Human
ccugcuuugggcugcccug

SEQ ID NO: 2066424 - RNA, 20 nt, Human
ccugcuuugggcugcccugg

SEQ ID NO: 2066425 - RNA, 17 nt, Human
ccugcugagggaccagc

SEQ ID NO: 2066426 - RNA, 19 nt, Human
ccugcugagggaccagcca

SEQ ID NO: 2066427 - RNA, 21 nt, Human
ccugcugagggaccagccaag

SEQ ID NO: 2066428 - RNA, 14 nt, Human
ccugcuucaaauau

SEQ ID NO: 2066429 - RNA, 20 nt, Human
ccuggaagcccucucuggcu

SEQ ID NO: 2066430 - RNA, 13 nt, Human
ccuggaagcugug

SEQ ID NO: 2066431 - RNA, 20 nt, Human
ccuggaaggacauccauguu

SEQ ID NO: 2066432 - RNA, 23 nt, Human
ccuggaagcuguguccuugcacc

SEQ ID NO: 2066433 - RNA, 17 nt, Human
ccuggaagcuguguccu

SEQ ID NO: 2066434 - RNA, 18 nt, Human
ccuggaagcuguguccuu

SEQ ID NO: 2066435 - RNA, 20 nt, Human
ccuggaagcuguguccuugc

SEQ ID NO: 2066436 - RNA, 17 nt, Human
ccuggaagagcagcccu

SEQ ID NO: 2066437 - RNA, 16 nt, Human
ccuggaagagcagccc

SEQ ID NO: 2066438 - RNA, 22 nt, Human
ccuggaaauaucaguuacucag

SEQ ID NO: 2066439 - RNA, 23 nt, Human
ccugcugaaugauuuccaaagag

SEQ ID NO: 2066440 - RNA, 14 nt, Human
ccugcucucuaccc

SEQ ID NO: 2066441 - RNA, 15 nt, Human
ccugcucucuaccca

SEQ ID NO: 2066442 - RNA, 16 nt, Human
ccugcucucuacccag

SEQ ID NO: 2066443 - RNA, 17 nt, Human
ccugcucucuacccagc

SEQ ID NO: 2066444 - RNA, 19 nt, Human
ccugcucucuacccagccc

SEQ ID NO: 2066445 - RNA, 20 nt, Human
ccugcucucuacccagccca

SEQ ID NO: 2066446 - RNA, 21 nt, Human
ccugcucucuacccagcccau

SEQ ID NO: 2066447 - RNA, 22 nt, Human
ccugcucuccucuugccacugc

SEQ ID NO: 2066448 - RNA, 17 nt, Human
ccugcugagagacccaa

SEQ ID NO: 2066449 - RNA, 21 nt, Human
ccugcugagagacccaaggag

SEQ ID NO: 2066450 - RNA, 20 nt, Human
ccugcugagagacccaagga

SEQ ID NO: 2066451 - RNA, 21 nt, Human
ccugcucuccucuugccacug

SEQ ID NO: 2066452 - RNA, 19 nt, Human
ccugcucuccucuugccac

SEQ ID NO: 2066453 - RNA, 18 nt, Human
ccugcucuccucuugcca

SEQ ID NO: 2066454 - RNA, 16 nt, Human
ccugcucuccucuugc

SEQ ID NO: 2066455 - RNA, 22 nt, Human
ccugcucuccgaccagacaccu

SEQ ID NO: 2066456 - RNA, 21 nt, Human
ccugcucuccgaccagacacc

SEQ ID NO: 2066457 - RNA, 14 nt, Human
ccugcuauuuccca

SEQ ID NO: 2066458 - RNA, 18 nt, Human
ccugcuauuucccaagcu

SEQ ID NO: 2066459 - RNA, 20 nt, Human
ccugcuauuucccaagcugg

SEQ ID NO: 2066460 - RNA, 21 nt, Human
ccugcuauuucccaagcugga

SEQ ID NO: 2066461 - RNA, 22 nt, Human
ccuggcaggaugacccugcgaa

SEQ ID NO: 2066462 - RNA, 16 nt, Human
ccugacagaaggacuc

SEQ ID NO: 2066463 - RNA, 20 nt, Human
ccugaccaacaguuccuuca

SEQ ID NO: 2066464 - RNA, 16 nt, Human
ccugagcuuucugcua

SEQ ID NO: 2066465 - RNA, 17 nt, Human
ccugagcuuggccagaa

SEQ ID NO: 2066466 - RNA, 21 nt, Human
ccugagcuuggccagaagggg

SEQ ID NO: 2066467 - RNA, 15 nt, Human
ccugagcuuuggaca

SEQ ID NO: 2066468 - RNA, 16 nt, Human
ccugagcuuuggacac

SEQ ID NO: 2066469 - RNA, 17 nt, Human
ccugagcuuuggacaca

SEQ ID NO: 2066470 - RNA, 18 nt, Human
ccugagcuuuggacacac

SEQ ID NO: 2066471 - RNA, 22 nt, Human
ccugagcuuuggacacacacag

SEQ ID NO: 2066472 - RNA, 23 nt, Human
ccugagcuuuggacacacacagc

SEQ ID NO: 2066473 - RNA, 15 nt, Human
ccugagcuuuggacg

SEQ ID NO: 2066474 - RNA, 18 nt, Human
ccugagcuuuggacgcac

SEQ ID NO: 2066475 - RNA, 22 nt, Human
ccugagcuuuggacgcacacag

SEQ ID NO: 2066476 - RNA, 23 nt, Human
ccugagcuuuggacgcacacagc

SEQ ID NO: 2066477 - RNA, 18 nt, Human
ccugagcuuggccagaag

SEQ ID NO: 2066478 - RNA, 12 nt, Human
ccugaggaagcg

SEQ ID NO: 2066479 - RNA, 23 nt, Human
ccugaggaagcgugaaggccgag

SEQ ID NO: 2066480 - RNA, 14 nt, Human
ccugaggaucagaa

SEQ ID NO: 2066481 - RNA, 15 nt, Human
ccugaggaucagaaa

SEQ ID NO: 2066482 - RNA, 16 nt, Human
ccugaggaucagaaag

SEQ ID NO: 2066483 - RNA, 17 nt, Human
ccugaggaucagaaagu

SEQ ID NO: 2066484 - RNA, 18 nt, Human
ccugaggaucagaaagua

SEQ ID NO: 2066485 - RNA, 16 nt, Human
ccugagcaccucccag

SEQ ID NO: 2066486 - RNA, 17 nt, Human
ccugagcaccucccagc

SEQ ID NO: 2066487 - RNA, 18 nt, Human
ccugagcaccucccagcc

SEQ ID NO: 2066488 - RNA, 19 nt, Human
ccugagcaccucccagccc

SEQ ID NO: 2066489 - RNA, 21 nt, Human
ccugagcaccucccagccccu

SEQ ID NO: 2066490 - RNA, 22 nt, Human
ccugagcaccucccagccccug

SEQ ID NO: 2066491 - RNA, 23 nt, Human
ccugagcaccucccagccccugc

SEQ ID NO: 2066492 - RNA, 14 nt, Human
ccugagcuuucugc

SEQ ID NO: 2066493 - RNA, 16 nt, Human
ccugagcuuggccaga

SEQ ID NO: 2066494 - RNA, 20 nt, Human
ccugauuguguauauucaua

SEQ ID NO: 2066495 - RNA, 16 nt, Human
ccucuauauuugcucu

SEQ ID NO: 2066496 - RNA, 18 nt, Human
ccugcaaaaugagacccu

SEQ ID NO: 2066497 - RNA, 14 nt, Human
ccugcaaaauuuua

SEQ ID NO: 2066498 - RNA, 20 nt, Human
ccugcaguacuuuaccuccu

SEQ ID NO: 2066499 - RNA, 15 nt, Human
ccugcagucacagcu

SEQ ID NO: 2066500 - RNA, 15 nt, Human
ccugcagucaucuug

SEQ ID NO: 2066501 - RNA, 18 nt, Human
ccugcaguacuuuaccuc

SEQ ID NO: 2066502 - RNA, 15 nt, Human
ccugcagggccaagc

SEQ ID NO: 2066503 - RNA, 22 nt, Human
ccugcaggccaagagcagaggc

SEQ ID NO: 2066504 - RNA, 20 nt, Human
ccugcacugacccacagccu

SEQ ID NO: 2066505 - RNA, 16 nt, Human
ccugcaggccaagagc

SEQ ID NO: 2066506 - RNA, 21 nt, Human
ccugcaggccaagagcagagg

SEQ ID NO: 2066507 - RNA, 21 nt, Human
ccugcacuaauuugauguuua

SEQ ID NO: 2066508 - RNA, 22 nt, Human
ccugcaccuccccccacugcag

SEQ ID NO: 2066509 - RNA, 21 nt, Human
ccugcaccuccccccacugca

SEQ ID NO: 2066510 - RNA, 21 nt, Human
ccugccagccuggcuucugga

SEQ ID NO: 2066511 - RNA, 13 nt, Human
ccugccagccugg

SEQ ID NO: 2066512 - RNA, 19 nt, Human
ccugccagacggcacccac

SEQ ID NO: 2066513 - RNA, 13 nt, Human
ccugccagcaccc

SEQ ID NO: 2066514 - RNA, 14 nt, Human
ccugccagcacccc

SEQ ID NO: 2066515 - RNA, 14 nt, Human
ccugccagccuggc

SEQ ID NO: 2066516 - RNA, 15 nt, Human
ccugccagccuggcu

SEQ ID NO: 2066517 - RNA, 16 nt, Human
ccugccagccuggcuu

SEQ ID NO: 2066518 - RNA, 17 nt, Human
ccugccagccuggcuuc

SEQ ID NO: 2066519 - RNA, 15 nt, Human
ccugcauucacccag

SEQ ID NO: 2066520 - RNA, 16 nt, Human
ccugcauucacccaga

SEQ ID NO: 2066521 - RNA, 17 nt, Human
ccugcauucacccagac

SEQ ID NO: 2066522 - RNA, 19 nt, Human
ccugcauucacccagacag

SEQ ID NO: 2066523 - RNA, 22 nt, Human
ccugcauucugccgugugcccu

SEQ ID NO: 2066524 - RNA, 23 nt, Human
ccugccacuuugguacauggcca

SEQ ID NO: 2066525 - RNA, 19 nt, Human
ccugcauccguaguucccu

SEQ ID NO: 2066526 - RNA, 22 nt, Human
ccugcauccguaguucccugaa

SEQ ID NO: 2066527 - RNA, 12 nt, Human
ccugcaugcaga

SEQ ID NO: 2066528 - RNA, 22 nt, Human
ccugcccccagaccuuuuaucc

SEQ ID NO: 2066529 - RNA, 16 nt, Human
ccugccaggcauggug

SEQ ID NO: 2066530 - RNA, 17 nt, Human
cccgucgacguagaacc

SEQ ID NO: 2066531 - RNA, 19 nt, Human
cccgucaggacguugagga

SEQ ID NO: 2066532 - RNA, 18 nt, Human
cccgucauguuccucaaa

SEQ ID NO: 2066533 - RNA, 23 nt, Human
cccgucugggguucagccccucc

SEQ ID NO: 2066534 - RNA, 20 nt, Human
cccgucugggguucagcccc

SEQ ID NO: 2066535 - RNA, 21 nt, Human
cccgucugggguucagccccu

SEQ ID NO: 2066536 - RNA, 12 nt, Human
cccgucuucagc

SEQ ID NO: 2066537 - RNA, 18 nt, Human
cccggugcccaagaauag

SEQ ID NO: 2066538 - RNA, 22 nt, Human
cccggguuuggcgggccaagga

SEQ ID NO: 2066539 - RNA, 22 nt, Human
cccggucccuugagaccucagc

SEQ ID NO: 2066540 - RNA, 17 nt, Human
cccgucaccaucucagg

SEQ ID NO: 2066541 - RNA, 18 nt, Human
cccgucaccaucucaggc

SEQ ID NO: 2066542 - RNA, 21 nt, Human
cccggggcagcugccagagaa

SEQ ID NO: 2066543 - RNA, 20 nt, Human
cccggguuuggcgggccaag

SEQ ID NO: 2066544 - RNA, 16 nt, Human
cccgggcucucugcug

SEQ ID NO: 2066545 - RNA, 17 nt, Human
cccgggcucucugcugu

SEQ ID NO: 2066546 - RNA, 12 nt, Human
cccggggcagcu

SEQ ID NO: 2066547 - RNA, 14 nt, Human
cccggggcagcugc

SEQ ID NO: 2066548 - RNA, 19 nt, Human
cccggggcagcugccagag

SEQ ID NO: 2066549 - RNA, 20 nt, Human
cccggggcagcugccagaga

SEQ ID NO: 2066550 - RNA, 18 nt, Human
cccuaccgagucucuucu

SEQ ID NO: 2066551 - RNA, 14 nt, Human
cccuaccccaccac

SEQ ID NO: 2066552 - RNA, 21 nt, Human
cccuaccgagucucuucucca

SEQ ID NO: 2066553 - RNA, 10 nt, Human
cccuaccuca

SEQ ID NO: 2066554 - RNA, 15 nt, Human
cccuaccucaaccug

SEQ ID NO: 2066555 - RNA, 18 nt, Human
cccuaccucaaccuguaa

SEQ ID NO: 2066556 - RNA, 19 nt, Human
cccuaccucaaccuguaaa

SEQ ID NO: 2066557 - RNA, 20 nt, Human
cccuaccucaaccuguaaau

SEQ ID NO: 2066558 - RNA, 22 nt, Human
cccuaccucaaccuguaaauua

SEQ ID NO: 2066559 - RNA, 13 nt, Human
cccuaccucaggc

SEQ ID NO: 2066560 - RNA, 16 nt, Human
cccuaccucaggcagg

SEQ ID NO: 2066561 - RNA, 22 nt, Human
cccuaccugauuggugcaaccc

SEQ ID NO: 2066562 - RNA, 23 nt, Human
cccuaccugauuggugcaacccu

SEQ ID NO: 2066563 - RNA, 20 nt, Human
cccuagcuccacacccucuc

SEQ ID NO: 2066564 - RNA, 14 nt, Human
cccuaggagaccaa

SEQ ID NO: 2066565 - RNA, 13 nt, Human
cccuagggcuggg

SEQ ID NO: 2066566 - RNA, 15 nt, Human
cccuagggcugggug

SEQ ID NO: 2066567 - RNA, 16 nt, Human
cccuagggcugggugu

SEQ ID NO: 2066568 - RNA, 17 nt, Human
cccuagggcugggugua

SEQ ID NO: 2066569 - RNA, 21 nt, Human
cccuaggucagcuugcugccc

SEQ ID NO: 2066570 - RNA, 14 nt, Human
cccguguggccccu

SEQ ID NO: 2066571 - RNA, 17 nt, Human
cccguguggccccuuca

SEQ ID NO: 2066572 - RNA, 22 nt, Human
cccguguggccccuucacuucu

SEQ ID NO: 2066573 - RNA, 18 nt, Human
cccguguggccccuucac

SEQ ID NO: 2066574 - RNA, 12 nt, Human
cccuaaugccug

SEQ ID NO: 2066575 - RNA, 18 nt, Human
cccuacaccccuccccug

SEQ ID NO: 2066576 - RNA, 20 nt, Human
cccuacaguugaaaaacagc

SEQ ID NO: 2066577 - RNA, 19 nt, Human
cccuaauuuaacccagcuc

SEQ ID NO: 2066578 - RNA, 17 nt, Human
cccuaccaccuccccag

SEQ ID NO: 2066579 - RNA, 19 nt, Human
cccuaccaccuccccagcc

SEQ ID NO: 2066580 - RNA, 20 nt, Human
cccuaccaccuccccagccu

SEQ ID NO: 2066581 - RNA, 21 nt, Human
cccgggcaagacuuuucuuug

SEQ ID NO: 2066582 - RNA, 13 nt, Human
cccgcuggcuggg

SEQ ID NO: 2066583 - RNA, 22 nt, Human
cccgcuggcugggggccucacu

SEQ ID NO: 2066584 - RNA, 22 nt, Human
cccgaguagcugggacuacagg

SEQ ID NO: 2066585 - RNA, 17 nt, Human
cccgagguggcugccug

SEQ ID NO: 2066586 - RNA, 22 nt, Human
cccgagguggcugccuggagcc

SEQ ID NO: 2066587 - RNA, 15 nt, Human
cccgccccacauucc

SEQ ID NO: 2066588 - RNA, 19 nt, Human
cccgccccacauuccgaca

SEQ ID NO: 2066589 - RNA, 18 nt, Human
cccgccucccuccccugc

SEQ ID NO: 2066590 - RNA, 21 nt, Human
cccgaguagcugggacuacag

SEQ ID NO: 2066591 - RNA, 18 nt, Human
cccgaguagcugggacua

SEQ ID NO: 2066592 - RNA, 17 nt, Human
cccgaguagcugggacu

SEQ ID NO: 2066593 - RNA, 16 nt, Human
cccgaguagcugggac

SEQ ID NO: 2066594 - RNA, 15 nt, Human
cccgaguagcuggga

SEQ ID NO: 2066595 - RNA, 14 nt, Human
cccgaguagcuggg

SEQ ID NO: 2066596 - RNA, 13 nt, Human
cccgaguagcugg

SEQ ID NO: 2066597 - RNA, 14 nt, Human
cccgaggcugccca

SEQ ID NO: 2066598 - RNA, 19 nt, Human
cccgaggcugcccacuaug

SEQ ID NO: 2066599 - RNA, 22 nt, Human
cccagagggcccaggcaggcca

SEQ ID NO: 2066600 - RNA, 23 nt, Human
cccagagggcccaggcaggccac

SEQ ID NO: 2066601 - RNA, 20 nt, Human
cccagaacuggacucaggau

SEQ ID NO: 2066602 - RNA, 19 nt, Human
cccagaaccuguccuugca

SEQ ID NO: 2066603 - RNA, 15 nt, Human
cccagaaccuguccu

SEQ ID NO: 2066604 - RNA, 17 nt, Human
cccagaaccuguccuug

SEQ ID NO: 2066605 - RNA, 19 nt, Human
cccagaacuggacucagga

SEQ ID NO: 2066606 - RNA, 19 nt, Human
cccagaaggaccuccugag

SEQ ID NO: 2066607 - RNA, 13 nt, Human
cccagaaggcagg

SEQ ID NO: 2066608 - RNA, 23 nt, Human
cccagaaggcagggaaaggcucu

SEQ ID NO: 2066609 - RNA, 13 nt, Human
cccagagggccca

SEQ ID NO: 2066610 - RNA, 14 nt, Human
cccagaaaggagac

SEQ ID NO: 2066611 - RNA, 15 nt, Human
cccagaaaggagacu

SEQ ID NO: 2066612 - RNA, 17 nt, Human
cccagaaaggagacuag

SEQ ID NO: 2066613 - RNA, 14 nt, Human
cccagaacacacuc

SEQ ID NO: 2066614 - RNA, 18 nt, Human
cccagaacacacuccauc

SEQ ID NO: 2066615 - RNA, 22 nt, Human
cccagaacacacuccaucagcu

SEQ ID NO: 2066616 - RNA, 14 nt, Human
cccagaaccugucc

SEQ ID NO: 2066617 - RNA, 21 nt, Human
cccgaggccuucucugaagga

SEQ ID NO: 2066618 - RNA, 14 nt, Human
cccagagggcccag

SEQ ID NO: 2066619 - RNA, 15 nt, Human
cccagagggcccagg

SEQ ID NO: 2066620 - RNA, 16 nt, Human
cccagagggcccaggc

SEQ ID NO: 2066621 - RNA, 18 nt, Human
cccagagggcccaggcag

SEQ ID NO: 2066622 - RNA, 16 nt, Human
cccugagucaccagga

SEQ ID NO: 2066623 - RNA, 17 nt, Human
cccugagucaccaggaa

SEQ ID NO: 2066624 - RNA, 16 nt, Human
cccugaggcuggacuc

SEQ ID NO: 2066625 - RNA, 23 nt, Human
cccugaggcuggacuccagaucu

SEQ ID NO: 2066626 - RNA, 18 nt, Human
cccugaggugaaagggag

SEQ ID NO: 2066627 - RNA, 20 nt, Human
cccugaggugaaagggagcu

SEQ ID NO: 2066628 - RNA, 23 nt, Human
cccugcacaaagcccuuccaugu

SEQ ID NO: 2066629 - RNA, 15 nt, Human
cccugcaaaggacug

SEQ ID NO: 2066630 - RNA, 16 nt, Human
cccugcaaaggacugu

SEQ ID NO: 2066631 - RNA, 23 nt, Human
cccugcacuggaguccagucucu

SEQ ID NO: 2066632 - RNA, 13 nt, Human
cccugcacuggag

SEQ ID NO: 2066633 - RNA, 22 nt, Human
cccugcacuggaguccagucuc

SEQ ID NO: 2066634 - RNA, 12 nt, Human
cccugcacuugc

SEQ ID NO: 2066635 - RNA, 19 nt, Human
cccugcacuugcagacucu

SEQ ID NO: 2066636 - RNA, 16 nt, Human
cccucuggcccugccu

SEQ ID NO: 2066637 - RNA, 16 nt, Human
cccugaaaacccagag

SEQ ID NO: 2066638 - RNA, 17 nt, Human
cccugaaaacccagaga

SEQ ID NO: 2066639 - RNA, 18 nt, Human
cccugaaaacccagagag

SEQ ID NO: 2066640 - RNA, 15 nt, Human
cccugaaagcccuga

SEQ ID NO: 2066641 - RNA, 17 nt, Human
cccugaaaaccucacau

SEQ ID NO: 2066642 - RNA, 22 nt, Human
cccugaaaauguuuuucugcca

SEQ ID NO: 2066643 - RNA, 23 nt, Human
cccugaaaauguuuuucugccag

SEQ ID NO: 2066644 - RNA, 24 nt, Human
cccugaaaauguuuuucugccagg

SEQ ID NO: 2066645 - RNA, 16 nt, Human
cccugaaagcccugag

SEQ ID NO: 2066646 - RNA, 18 nt, Human
cccucuggccaggaugga

SEQ ID NO: 2066647 - RNA, 22 nt, Human
cccucuggccaggauggagggg

SEQ ID NO: 2066648 - RNA, 13 nt, Human
cccucuggcccug

SEQ ID NO: 2066649 - RNA, 14 nt, Human
cccucuggcccugc

SEQ ID NO: 2066650 - RNA, 14 nt, Human
cccucugcuggccg

SEQ ID NO: 2066651 - RNA, 23 nt, Human
cccucugcuggccgggcacagcu

SEQ ID NO: 2066652 - RNA, 12 nt, Human
cccucuggccag

SEQ ID NO: 2066653 - RNA, 13 nt, Human
cccucuggccagg

SEQ ID NO: 2066654 - RNA, 15 nt, Human
cccucugccuguccc

SEQ ID NO: 2066655 - RNA, 16 nt, Human
cccucugccugucccu

SEQ ID NO: 2066656 - RNA, 23 nt, Human
cccucugccugucccucucaggc

SEQ ID NO: 2066657 - RNA, 22 nt, Human
cccucucuggcuaaggacaggc

SEQ ID NO: 2066658 - RNA, 14 nt, Human
cccucugccugucc

SEQ ID NO: 2066659 - RNA, 18 nt, Human
cccucucucuucugcucc

SEQ ID NO: 2066660 - RNA, 19 nt, Human
cccucucucuucugcucca

SEQ ID NO: 2066661 - RNA, 22 nt, Human
cccucucucuucugcuccaccc

SEQ ID NO: 2066662 - RNA, 23 nt, Human
cccucucucuucugcuccacccu

SEQ ID NO: 2066663 - RNA, 13 nt, Human
cccucucuccucc

SEQ ID NO: 2066664 - RNA, 11 nt, Human
cccucucucug

SEQ ID NO: 2066665 - RNA, 13 nt, Human
cccucucucuucu

SEQ ID NO: 2066666 - RNA, 14 nt, Human
cccucucucuucug

SEQ ID NO: 2066667 - RNA, 15 nt, Human
cccucucucuucugc

SEQ ID NO: 2066668 - RNA, 17 nt, Human
cccucucucuucugcuc

SEQ ID NO: 2066669 - RNA, 17 nt, Human
cccucuccugccuacuc

SEQ ID NO: 2066670 - RNA, 12 nt, Human
cccucuccugcc

SEQ ID NO: 2066671 - RNA, 13 nt, Human
cccucuccugccu

SEQ ID NO: 2066672 - RNA, 22 nt, Human
cccucccagggccagggcccug

SEQ ID NO: 2066673 - RNA, 14 nt, Human
cccuccccagggga

SEQ ID NO: 2066674 - RNA, 16 nt, Human
cccucccccaaccccc

SEQ ID NO: 2066675 - RNA, 12 nt, Human
cccuccccaggg

SEQ ID NO: 2066676 - RNA, 13 nt, Human
cccuccccagggg

SEQ ID NO: 2066677 - RNA, 13 nt, Human
cccuccacugccc

SEQ ID NO: 2066678 - RNA, 14 nt, Human
cccuccacugcccu

SEQ ID NO: 2066679 - RNA, 15 nt, Human
cccuccacugcccuc

SEQ ID NO: 2066680 - RNA, 18 nt, Human
cccuccacguucaccccu

SEQ ID NO: 2066681 - RNA, 12 nt, Human
cccuccacuccu

SEQ ID NO: 2066682 - RNA, 17 nt, Human
cccuccacuccuuccug

SEQ ID NO: 2066683 - RNA, 23 nt, Human
cccuauauguaguauaaagaaaa

SEQ ID NO: 2066684 - RNA, 18 nt, Human
cccuauaaugcuggagcg

SEQ ID NO: 2066685 - RNA, 17 nt, Human
cccuagucccuuccccu

SEQ ID NO: 2066686 - RNA, 22 nt, Human
cccuagucccuuccccucccug

SEQ ID NO: 2066687 - RNA, 15 nt, Human
cccuaguaaaaauac

SEQ ID NO: 2066688 - RNA, 16 nt, Human
cccuagucccuucccc

SEQ ID NO: 2066689 - RNA, 22 nt, Human
cccuaggucagcuugcugcccu

SEQ ID NO: 2066690 - RNA, 14 nt, Human
cccuauccacccag

SEQ ID NO: 2066691 - RNA, 16 nt, Human
cccuauccacccagcc

SEQ ID NO: 2066692 - RNA, 18 nt, Human
cccuauccacccagccca

SEQ ID NO: 2066693 - RNA, 19 nt, Human
cccuauccacccagcccau

SEQ ID NO: 2066694 - RNA, 15 nt, Human
cccuccacaucccug

SEQ ID NO: 2066695 - RNA, 17 nt, Human
cccuggaccagaugcug

SEQ ID NO: 2066696 - RNA, 20 nt, Human
cccugcuuugggcugcccug

SEQ ID NO: 2066697 - RNA, 21 nt, Human
cccuggaaggacauccauguu

SEQ ID NO: 2066698 - RNA, 17 nt, Human
cccugcuuugggcugcc

SEQ ID NO: 2066699 - RNA, 19 nt, Human
cccugcuuugggcugcccu

SEQ ID NO: 2066700 - RNA, 18 nt, Human
cccugcuuugggcugccc

SEQ ID NO: 2066701 - RNA, 13 nt, Human
cccugccagcucu

SEQ ID NO: 2066702 - RNA, 14 nt, Human
cccugccagcaccc

SEQ ID NO: 2066703 - RNA, 17 nt, Human
cccugccagcaccccca

SEQ ID NO: 2066704 - RNA, 23 nt, Human
cccugccagcacccccacgcccu

SEQ ID NO: 2066705 - RNA, 12 nt, Human
cccugccagcuc

SEQ ID NO: 2066706 - RNA, 22 nt, Human
cccuggcuuuucacugcuggcu

SEQ ID NO: 2066707 - RNA, 19 nt, Human
cccuggcuuuucacugcug

SEQ ID NO: 2066708 - RNA, 17 nt, Human
cccuggcuuuucacugc

SEQ ID NO: 2066709 - RNA, 18 nt, Human
cccuggcuuuucacugcu

SEQ ID NO: 2066710 - RNA, 23 nt, Human
cccuggacugguggccccugccu

SEQ ID NO: 2066711 - RNA, 16 nt, Human
cccugggccccaccac

SEQ ID NO: 2066712 - RNA, 18 nt, Human
cccugggccccaccaccu

SEQ ID NO: 2066713 - RNA, 20 nt, Human
cccugggccccaccaccuag

SEQ ID NO: 2066714 - RNA, 22 nt, Human
cccugggccccaccaccuaggc

SEQ ID NO: 2066715 - RNA, 23 nt, Human
cccugguaauaaguacuguguac

SEQ ID NO: 2066716 - RNA, 16 nt, Human
cccugggcucugcccc

SEQ ID NO: 2066717 - RNA, 13 nt, Human
cccugggcucugc

SEQ ID NO: 2066718 - RNA, 15 nt, Human
cccugggcucugccc

SEQ ID NO: 2066719 - RNA, 16 nt, Human
cccugguccagggaag

SEQ ID NO: 2066720 - RNA, 18 nt, Human
cccugguccagggaagcu

SEQ ID NO: 2066721 - RNA, 13 nt, Human
cccugguccuucc

SEQ ID NO: 2066722 - RNA, 16 nt, Human
cccugguccuuccagg

SEQ ID NO: 2066723 - RNA, 17 nt, Human
cccugguccuuccaggc

SEQ ID NO: 2066724 - RNA, 21 nt, Human
cccaccaacaucccauugccc

SEQ ID NO: 2066725 - RNA, 14 nt, Human
cccacauuccgaca

SEQ ID NO: 2066726 - RNA, 13 nt, Human
cccacagcuuggg

SEQ ID NO: 2066727 - RNA, 17 nt, Human
cccacauguguccaucc

SEQ ID NO: 2066728 - RNA, 18 nt, Human
cccacauguguccauccc

SEQ ID NO: 2066729 - RNA, 14 nt, Human
cccacauuggaccc

SEQ ID NO: 2066730 - RNA, 19 nt, Human
cccacagcucccaccccac

SEQ ID NO: 2066731 - RNA, 20 nt, Human
cccacagcucccaccccacc

SEQ ID NO: 2066732 - RNA, 13 nt, Human
cccacacacccca

SEQ ID NO: 2066733 - RNA, 12 nt, Human
cccacagcuccc

SEQ ID NO: 2066734 - RNA, 14 nt, Human
cccacagcucccac

SEQ ID NO: 2066735 - RNA, 15 nt, Human
cccacagcucccacc

SEQ ID NO: 2066736 - RNA, 17 nt, Human
cccacagcucccacccc

SEQ ID NO: 2066737 - RNA, 21 nt, Human
cccaccugccacuaggcuggg

SEQ ID NO: 2066738 - RNA, 23 nt, Human
cccaccugccacuaggcugggug

SEQ ID NO: 2066739 - RNA, 13 nt, Human
cccaccugcccau

SEQ ID NO: 2066740 - RNA, 20 nt, Human
cccaccugcccaucacaggg

SEQ ID NO: 2066741 - RNA, 23 nt, Human
cccaccugcccaucacaggguug

SEQ ID NO: 2066742 - RNA, 20 nt, Human
cccacgacugcccggcaggg

SEQ ID NO: 2066743 - RNA, 21 nt, Human
cccacgacugcccggcagggu

SEQ ID NO: 2066744 - RNA, 21 nt, Human
cccaccuuuauuaaaaucuua

SEQ ID NO: 2066745 - RNA, 12 nt, Human
cccaccuuuggu

SEQ ID NO: 2066746 - RNA, 12 nt, Human
cccacuucugcc

SEQ ID NO: 2066747 - RNA, 23 nt, Human
cccacuugagaauuacccuuuug

SEQ ID NO: 2066748 - RNA, 21 nt, Human
cccacgcuggagugcagugag

SEQ ID NO: 2066749 - RNA, 20 nt, Human
cccacgcuggagugcaguga

SEQ ID NO: 2066750 - RNA, 19 nt, Human
cccacgcuggagugcagug

SEQ ID NO: 2066751 - RNA, 12 nt, Human
cccaccacagca

SEQ ID NO: 2066752 - RNA, 13 nt, Human
cccaccacagcag

SEQ ID NO: 2066753 - RNA, 15 nt, Human
cccaccaccccagcu

SEQ ID NO: 2066754 - RNA, 18 nt, Human
cccaccaccccagcugcu

SEQ ID NO: 2066755 - RNA, 13 nt, Human
cccaccaccuagg

SEQ ID NO: 2066756 - RNA, 16 nt, Human
cccaccaccuaggcca

SEQ ID NO: 2066757 - RNA, 19 nt, Human
cccaccaccuaggccacuc

SEQ ID NO: 2066758 - RNA, 20 nt, Human
cccaccaccuaggccacucc

SEQ ID NO: 2066759 - RNA, 21 nt, Human
cccaccaccuaggccacuccu

SEQ ID NO: 2066760 - RNA, 22 nt, Human
cccaccaccuaggccacuccuc

SEQ ID NO: 2066761 - RNA, 22 nt, Human
cccaccaggcugcucagggcug

SEQ ID NO: 2066762 - RNA, 17 nt, Human
cccaccaggcugcucag

SEQ ID NO: 2066763 - RNA, 16 nt, Human
cccaccaggcugcuca

SEQ ID NO: 2066764 - RNA, 13 nt, Human
cccaccaggcugc

SEQ ID NO: 2066765 - RNA, 19 nt, Human
cccaccacgauguggcccu

SEQ ID NO: 2066766 - RNA, 20 nt, Human
cccaccacgauguggcccug

SEQ ID NO: 2066767 - RNA, 24 nt, Human
cccaccacgauguggcccuggccu

SEQ ID NO: 2066768 - RNA, 23 nt, Human
cccaccacuaggacucugaggcu

SEQ ID NO: 2066769 - RNA, 23 nt, Human
cccaccgggcugggagcucugca

SEQ ID NO: 2066770 - RNA, 17 nt, Human
cccaccucagccucccg

SEQ ID NO: 2066771 - RNA, 17 nt, Human
cccaccucagccuccug

SEQ ID NO: 2066772 - RNA, 12 nt, Human
cccaccugagcu

SEQ ID NO: 2066773 - RNA, 13 nt, Human
cccaccugagcuu

SEQ ID NO: 2066774 - RNA, 15 nt, Human
cccaccugagcuuug

SEQ ID NO: 2066775 - RNA, 17 nt, Human
cccaccugagcuuugga

SEQ ID NO: 2066776 - RNA, 13 nt, Human
cccaccuccugca

SEQ ID NO: 2066777 - RNA, 19 nt, Human
ccucagucuggcccuuccu

SEQ ID NO: 2066778 - RNA, 20 nt, Human
ccuaugcugccuaggcugac

SEQ ID NO: 2066779 - RNA, 11 nt, Human
ccucagugcca

SEQ ID NO: 2066780 - RNA, 20 nt, Human
ccucagucuggcccuuccuu

SEQ ID NO: 2066781 - RNA, 22 nt, Human
ccucauaguaugguggcugggu

SEQ ID NO: 2066782 - RNA, 21 nt, Human
ccucauaguaugguggcuggg

SEQ ID NO: 2066783 - RNA, 20 nt, Human
ccucauaguaugguggcugg

SEQ ID NO: 2066784 - RNA, 14 nt, Human
ccucauccgaggca

SEQ ID NO: 2066785 - RNA, 15 nt, Human
ccucauccgaggcag

SEQ ID NO: 2066786 - RNA, 17 nt, Human
ccucauccgaggcaggg

SEQ ID NO: 2066787 - RNA, 20 nt, Human
ccucauccgaggcaggguca

SEQ ID NO: 2066788 - RNA, 16 nt, Human
ccucaguggacuuucc

SEQ ID NO: 2066789 - RNA, 18 nt, Human
ccucaguggacuuuccac

SEQ ID NO: 2066790 - RNA, 20 nt, Human
ccucaguggacuuuccaccc

SEQ ID NO: 2066791 - RNA, 23 nt, Human
ccuccaaucccaccaacccucag

SEQ ID NO: 2066792 - RNA, 14 nt, Human
ccucaucugucugg

SEQ ID NO: 2066793 - RNA, 15 nt, Human
ccuccacagccgcag

SEQ ID NO: 2066794 - RNA, 16 nt, Human
ccuccacagccgcagc

SEQ ID NO: 2066795 - RNA, 17 nt, Human
ccuccacagccgcagcc

SEQ ID NO: 2066796 - RNA, 11 nt, Human
ccuccacagcu

SEQ ID NO: 2066797 - RNA, 12 nt, Human
ccuccacagcuu

SEQ ID NO: 2066798 - RNA, 16 nt, Human
ccucccaaagugcugg

SEQ ID NO: 2066799 - RNA, 20 nt, Human
ccuccccauuagagucagcc

SEQ ID NO: 2066800 - RNA, 15 nt, Human
ccuccauucugacca

SEQ ID NO: 2066801 - RNA, 21 nt, Human
ccuccccauuagagucagccu

SEQ ID NO: 2066802 - RNA, 13 nt, Human
ccucccccaaccc

SEQ ID NO: 2066803 - RNA, 18 nt, Human
ccucccccaacccccacc

SEQ ID NO: 2066804 - RNA, 19 nt, Human
ccucccccaacccccaccc

SEQ ID NO: 2066805 - RNA, 22 nt, Human
ccucccccaacccccaccccac

SEQ ID NO: 2066806 - RNA, 15 nt, Human
ccuccaugcugccuc

SEQ ID NO: 2066807 - RNA, 20 nt, Human
ccuccauuccuggagcccga

SEQ ID NO: 2066808 - RNA, 15 nt, Human
ccucccaaagugcug

SEQ ID NO: 2066809 - RNA, 14 nt, Human
ccuccaugcugccu

SEQ ID NO: 2066810 - RNA, 23 nt, Human
ccuccaugugggcuaguugggcu

SEQ ID NO: 2066811 - RNA, 21 nt, Human
ccuccagggccacgugccagg

SEQ ID NO: 2066812 - RNA, 22 nt, Human
ccuccagggccacgugccaggc

SEQ ID NO: 2066813 - RNA, 22 nt, Human
ccuccagcccucucacuguguc

SEQ ID NO: 2066814 - RNA, 12 nt, Human
ccuccagggcca

SEQ ID NO: 2066815 - RNA, 14 nt, Human
ccuccagggccacg

SEQ ID NO: 2066816 - RNA, 16 nt, Human
ccuccagggccacgug

SEQ ID NO: 2066817 - RNA, 17 nt, Human
ccuccagggccacgugc

SEQ ID NO: 2066818 - RNA, 18 nt, Human
ccuccagggccacgugcc

SEQ ID NO: 2066819 - RNA, 19 nt, Human
ccuccagggccacgugcca

SEQ ID NO: 2066820 - RNA, 20 nt, Human
ccuccagggccacgugccag

SEQ ID NO: 2066821 - RNA, 11 nt, Human
ccuccacuccu

SEQ ID NO: 2066822 - RNA, 18 nt, Human
ccuccagaagccucuggc

SEQ ID NO: 2066823 - RNA, 15 nt, Human
ccuccacuccuuccu

SEQ ID NO: 2066824 - RNA, 19 nt, Human
ccuccagaagccucuggcu

SEQ ID NO: 2066825 - RNA, 20 nt, Human
ccuccagaagccucuggcua

SEQ ID NO: 2066826 - RNA, 21 nt, Human
ccuccagaagccucuggcuag

SEQ ID NO: 2066827 - RNA, 22 nt, Human
ccuccagaagccucuggcuaga

SEQ ID NO: 2066828 - RNA, 17 nt, Human
ccuccacguucaccccu

SEQ ID NO: 2066829 - RNA, 18 nt, Human
ccuccacguucaccccuc

SEQ ID NO: 2066830 - RNA, 13 nt, Human
ccuccaccgcugc

SEQ ID NO: 2066831 - RNA, 14 nt, Human
ccuccaccgcugcc

SEQ ID NO: 2066832 - RNA, 15 nt, Human
ccuccaccgcugccu

SEQ ID NO: 2066833 - RNA, 17 nt, Human
ccuccaccccccagaac

SEQ ID NO: 2066834 - RNA, 17 nt, Human
ccuccccuucccugcaa

SEQ ID NO: 2066835 - RNA, 13 nt, Human
ccuccccccacug

SEQ ID NO: 2066836 - RNA, 14 nt, Human
ccuccccccacugc

SEQ ID NO: 2066837 - RNA, 15 nt, Human
ccucccccagagggg

SEQ ID NO: 2066838 - RNA, 16 nt, Human
ccuccccccacugcag

SEQ ID NO: 2066839 - RNA, 15 nt, Human
ccuccccccacugca

SEQ ID NO: 2066840 - RNA, 21 nt, Human
ccucccgaguagcugggacua

SEQ ID NO: 2066841 - RNA, 20 nt, Human
ccucccgaguagcugggacu

SEQ ID NO: 2066842 - RNA, 11 nt, Human
ccucccucagc

SEQ ID NO: 2066843 - RNA, 12 nt, Human
ccucccucagcc

SEQ ID NO: 2066844 - RNA, 19 nt, Human
ccucccgaguagcugggac

SEQ ID NO: 2066845 - RNA, 24 nt, Human
ccucccugccccucccuucaacca

SEQ ID NO: 2066846 - RNA, 22 nt, Human
ccucccugccccucccuucaac

SEQ ID NO: 2066847 - RNA, 13 nt, Human
ccucccugccccu

SEQ ID NO: 2066848 - RNA, 21 nt, Human
ccucccugccccucccuucaa

SEQ ID NO: 2066849 - RNA, 18 nt, Human
ccucccugccccucccuu

SEQ ID NO: 2066850 - RNA, 14 nt, Human
ccucccucagcccc

SEQ ID NO: 2066851 - RNA, 15 nt, Human
ccucccucagccccu

SEQ ID NO: 2066852 - RNA, 16 nt, Human
ccucccucagccccuc

SEQ ID NO: 2066853 - RNA, 17 nt, Human
ccucccuccccugcccu

SEQ ID NO: 2066854 - RNA, 18 nt, Human
ccucccuccccugcccuc

SEQ ID NO: 2066855 - RNA, 10 nt, Human
ccucccuccc

SEQ ID NO: 2066856 - RNA, 20 nt, Human
ccucccucagccccucuugc

SEQ ID NO: 2066857 - RNA, 20 nt, Human
ccuccugaaacuuacacaca

SEQ ID NO: 2066858 - RNA, 21 nt, Human
ccuccugaaacuuacacacaa

SEQ ID NO: 2066859 - RNA, 18 nt, Human
ccuccucuguccagggcc

SEQ ID NO: 2066860 - RNA, 14 nt, Human
ccuccucugucccu

SEQ ID NO: 2066861 - RNA, 12 nt, Human
ccuccucugucc

SEQ ID NO: 2066862 - RNA, 15 nt, Human
ccuccucuguccagg

SEQ ID NO: 2066863 - RNA, 16 nt, Human
ccuccucuguccaggg

SEQ ID NO: 2066864 - RNA, 15 nt, Human
ccuccuccacaccag

SEQ ID NO: 2066865 - RNA, 14 nt, Human
ccuccugggcuaag

SEQ ID NO: 2066866 - RNA, 23 nt, Human
ccuccugccucgaacuggcugca

SEQ ID NO: 2066867 - RNA, 15 nt, Human
ccuccugaccuguca

SEQ ID NO: 2066868 - RNA, 15 nt, Human
ccuccugcuacucug

SEQ ID NO: 2066869 - RNA, 19 nt, Human
ccucuagaaauuuuucaga

SEQ ID NO: 2066870 - RNA, 14 nt, Human
ccucuagaggcaag

SEQ ID NO: 2066871 - RNA, 17 nt, Human
ccucuaacaggggcugg

SEQ ID NO: 2066872 - RNA, 18 nt, Human
ccucuaacaggggcuggu

SEQ ID NO: 2066873 - RNA, 21 nt, Human
ccucuaacaggggcugguggg

SEQ ID NO: 2066874 - RNA, 23 nt, Human
ccucuaacaggggcuggugggca

SEQ ID NO: 2066875 - RNA, 18 nt, Human
ccucgguguggagaagcg

SEQ ID NO: 2066876 - RNA, 18 nt, Human
ccucguggccuuccccag

SEQ ID NO: 2066877 - RNA, 19 nt, Human
ccucguggccuuccccagc

SEQ ID NO: 2066878 - RNA, 22 nt, Human
ccucguggccuuccccagccuc

SEQ ID NO: 2066879 - RNA, 23 nt, Human
ccucguggccuuccccagccucu

SEQ ID NO: 2066880 - RNA, 22 nt, Human
ccucguuagggaagagaaacag

SEQ ID NO: 2066881 - RNA, 23 nt, Human
ccucguuagggaagagaaacagg

SEQ ID NO: 2066882 - RNA, 16 nt, Human
ccucggugccuuccuc

SEQ ID NO: 2066883 - RNA, 14 nt, Human
ccucgguguggaga

SEQ ID NO: 2066884 - RNA, 14 nt, Human
ccuccuuccuugac

SEQ ID NO: 2066885 - RNA, 15 nt, Human
ccuccuuccuugacc

SEQ ID NO: 2066886 - RNA, 18 nt, Human
ccuccuuccuugaccagc

SEQ ID NO: 2066887 - RNA, 20 nt, Human
ccuccuuccuugaccagcag

SEQ ID NO: 2066888 - RNA, 20 nt, Human
ccuccuuccuugcuguccua

SEQ ID NO: 2066889 - RNA, 15 nt, Human
ccuccuucucccuuu

SEQ ID NO: 2066890 - RNA, 16 nt, Human
ccuccuucucccuuuu

SEQ ID NO: 2066891 - RNA, 17 nt, Human
ccuccuucucccuuuuu

SEQ ID NO: 2066892 - RNA, 22 nt, Human
ccucgggcgagucacugccucu

SEQ ID NO: 2066893 - RNA, 14 nt, Human
ccuccuucccagcu

SEQ ID NO: 2066894 - RNA, 16 nt, Human
ccuccuucccagcugc

SEQ ID NO: 2066895 - RNA, 18 nt, Human
ccuccuucccagcugccc

SEQ ID NO: 2066896 - RNA, 21 nt, Human
ccuccuucccagcugccccuc

SEQ ID NO: 2066897 - RNA, 13 nt, Human
ccucuagugcccu

SEQ ID NO: 2066898 - RNA, 14 nt, Human
ccucuagugcccuc

SEQ ID NO: 2066899 - RNA, 15 nt, Human
ccucuagugcccucc

SEQ ID NO: 2066900 - RNA, 16 nt, Human
ccucuauuuagcauga

SEQ ID NO: 2066901 - RNA, 17 nt, Human
ccucccgaauagcuggg

SEQ ID NO: 2066902 - RNA, 16 nt, Human
ccgcacccccacccuu

SEQ ID NO: 2066903 - RNA, 11 nt, Human
ccgcaccccag

SEQ ID NO: 2066904 - RNA, 13 nt, Human
ccgcaccccagag

SEQ ID NO: 2066905 - RNA, 17 nt, Human
ccgcaccccagagugug

SEQ ID NO: 2066906 - RNA, 15 nt, Human
ccgcacccccacccu

SEQ ID NO: 2066907 - RNA, 21 nt, Human
ccgcaaugugcccccagacgc

SEQ ID NO: 2066908 - RNA, 16 nt, Human
ccgcgccuccuuccuu

SEQ ID NO: 2066909 - RNA, 17 nt, Human
ccgcaaaacccacugac

SEQ ID NO: 2066910 - RNA, 23 nt, Human
ccgccuucacuccggugugccug

SEQ ID NO: 2066911 - RNA, 17 nt, Human
ccgcgucuggugacaac

SEQ ID NO: 2066912 - RNA, 13 nt, Human
ccgcucagcccuc

SEQ ID NO: 2066913 - RNA, 12 nt, Human
ccgcucagcccu

SEQ ID NO: 2066914 - RNA, 11 nt, Human
ccgcucagccc

SEQ ID NO: 2066915 - RNA, 17 nt, Human
ccgaguagcugggacua

SEQ ID NO: 2066916 - RNA, 20 nt, Human
ccgaguagcugggacuacag

SEQ ID NO: 2066917 - RNA, 16 nt, Human
ccgauuguaacucaaa

SEQ ID NO: 2066918 - RNA, 13 nt, Human
ccgauuguaacuc

SEQ ID NO: 2066919 - RNA, 13 nt, Human
ccgauucacccug

SEQ ID NO: 2066920 - RNA, 14 nt, Human
ccgaggccuucucu

SEQ ID NO: 2066921 - RNA, 19 nt, Human
ccgaggcaccaguguccuc

SEQ ID NO: 2066922 - RNA, 14 nt, Human
ccgaggcaggguca

SEQ ID NO: 2066923 - RNA, 20 nt, Human
ccgaggcagggucaggagag

SEQ ID NO: 2066924 - RNA, 15 nt, Human
cccugguuucacugg

SEQ ID NO: 2066925 - RNA, 20 nt, Human
cccugguuucacuggcccaa

SEQ ID NO: 2066926 - RNA, 20 nt, Human
ccgggcgcgguggcucacgc

SEQ ID NO: 2066927 - RNA, 22 nt, Human
ccgggcuccccuuucgcccaca

SEQ ID NO: 2066928 - RNA, 13 nt, Human
ccgggcucucugc

SEQ ID NO: 2066929 - RNA, 19 nt, Human
ccgggcugggagcucugca

SEQ ID NO: 2066930 - RNA, 18 nt, Human
ccgggcugggagcucugc

SEQ ID NO: 2066931 - RNA, 13 nt, Human
ccgggcugggagc

SEQ ID NO: 2066932 - RNA, 14 nt, Human
ccgggcucucugcu

SEQ ID NO: 2066933 - RNA, 16 nt, Human
ccgggcucucugcugu

SEQ ID NO: 2066934 - RNA, 21 nt, Human
ccggguuuggcgggccaagga

SEQ ID NO: 2066935 - RNA, 22 nt, Human
ccggguuuggcgggccaaggac

SEQ ID NO: 2066936 - RNA, 19 nt, Human
ccggguuuggcgggccaag

SEQ ID NO: 2066937 - RNA, 20 nt, Human
ccggguuuggcgggccaagg

SEQ ID NO: 2066938 - RNA, 20 nt, Human
ccgcucaggcugaccacuuu

SEQ ID NO: 2066939 - RNA, 22 nt, Human
ccgcucagcccucccugccccu

SEQ ID NO: 2066940 - RNA, 21 nt, Human
ccgcucagcccucccugcccc

SEQ ID NO: 2066941 - RNA, 19 nt, Human
ccgcucagcccucccugcc

SEQ ID NO: 2066942 - RNA, 15 nt, Human
ccgcucagcccuccc

SEQ ID NO: 2066943 - RNA, 12 nt, Human
ccgcuuucuacc

SEQ ID NO: 2066944 - RNA, 16 nt, Human
ccgcuuguccagcgcc

SEQ ID NO: 2066945 - RNA, 17 nt, Human
ccgcuuguccagcgccu

SEQ ID NO: 2066946 - RNA, 19 nt, Human
ccgcuuucuacccagcgag

SEQ ID NO: 2066947 - RNA, 18 nt, Human
ccgcuuguccagcgccua

SEQ ID NO: 2066948 - RNA, 19 nt, Human
ccgcuuguccagcgccuag

SEQ ID NO: 2066949 - RNA, 13 nt, Human
ccuaccaccuccc

SEQ ID NO: 2066950 - RNA, 18 nt, Human
ccuaccaccuccccagcc

SEQ ID NO: 2066951 - RNA, 13 nt, Human
ccuaccacagugu

SEQ ID NO: 2066952 - RNA, 14 nt, Human
ccuaccacaguguc

SEQ ID NO: 2066953 - RNA, 15 nt, Human
ccuaccacagugucu

SEQ ID NO: 2066954 - RNA, 16 nt, Human
ccuaccacagugucug

SEQ ID NO: 2066955 - RNA, 23 nt, Human
ccuaccgagucucuucuccacug

SEQ ID NO: 2066956 - RNA, 22 nt, Human
ccuaccgagucucuucuccacu

SEQ ID NO: 2066957 - RNA, 20 nt, Human
ccuaccggcaauuuccggcc

SEQ ID NO: 2066958 - RNA, 17 nt, Human
ccuaccucaaccuguaa

SEQ ID NO: 2066959 - RNA, 18 nt, Human
ccuaccucaaccuguaaa

SEQ ID NO: 2066960 - RNA, 20 nt, Human
ccuaccucaaccuguaaauu

SEQ ID NO: 2066961 - RNA, 22 nt, Human
ccuaccucaaccuguaaauuau

SEQ ID NO: 2066962 - RNA, 12 nt, Human
ccuaccucagcc

SEQ ID NO: 2066963 - RNA, 21 nt, Human
ccuaccggcaauuuccggcca

SEQ ID NO: 2066964 - RNA, 13 nt, Human
ccuaccucagccu

SEQ ID NO: 2066965 - RNA, 14 nt, Human
ccuaccucagccua

SEQ ID NO: 2066966 - RNA, 16 nt, Human
ccuaccucagccuaga

SEQ ID NO: 2066967 - RNA, 14 nt, Human
ccuacuuuuccuuc

SEQ ID NO: 2066968 - RNA, 16 nt, Human
ccuacuuuuccuuccc

SEQ ID NO: 2066969 - RNA, 17 nt, Human
ccuaggcugaccuugaa

SEQ ID NO: 2066970 - RNA, 20 nt, Human
ccuagggauguucuggcccu

SEQ ID NO: 2066971 - RNA, 14 nt, Human
ccuagggaaaaguu

SEQ ID NO: 2066972 - RNA, 14 nt, Human
ccuagggccugguc

SEQ ID NO: 2066973 - RNA, 16 nt, Human
ccuagggccuggucca

SEQ ID NO: 2066974 - RNA, 13 nt, Human
ccuagggcugggu

SEQ ID NO: 2066975 - RNA, 14 nt, Human
ccuagggcugggug

SEQ ID NO: 2066976 - RNA, 15 nt, Human
ccuagggcugggugu

SEQ ID NO: 2066977 - RNA, 15 nt, Human
ccuacuuccugugac

SEQ ID NO: 2066978 - RNA, 15 nt, Human
ccuaccucaggcagg

SEQ ID NO: 2066979 - RNA, 18 nt, Human
ccuaccucagccuagacc

SEQ ID NO: 2066980 - RNA, 21 nt, Human
ccuaccucagccuagacccuc

SEQ ID NO: 2066981 - RNA, 13 nt, Human
ccuacuuccugug

SEQ ID NO: 2066982 - RNA, 18 nt, Human
ccuauauuguuuucagug

SEQ ID NO: 2066983 - RNA, 16 nt, Human
ccuauauaguuuauug

SEQ ID NO: 2066984 - RNA, 14 nt, Human
ccuauauguaguau

SEQ ID NO: 2066985 - RNA, 22 nt, Human
ccuauauuguuuucaguguaca

SEQ ID NO: 2066986 - RNA, 13 nt, Human
ccuauaaugcugg

SEQ ID NO: 2066987 - RNA, 20 nt, Human
ccuauaccccuuacuuagca

SEQ ID NO: 2066988 - RNA, 23 nt, Human
ccuauaccccuuacuuagcaugc

SEQ ID NO: 2066989 - RNA, 13 nt, Human
ccuauagucccag

SEQ ID NO: 2066990 - RNA, 15 nt, Human
ccuauagucccagcu

SEQ ID NO: 2066991 - RNA, 18 nt, Human
ccuauagucccagcuacu

SEQ ID NO: 2066992 - RNA, 20 nt, Human
ccuauaaaacaggucaauac

SEQ ID NO: 2066993 - RNA, 23 nt, Human
ccuauaaaacaggucaauacagu

SEQ ID NO: 2066994 - RNA, 12 nt, Human
ccuauaaaacag

SEQ ID NO: 2066995 - RNA, 13 nt, Human
ccuaguucuucau

SEQ ID NO: 2066996 - RNA, 21 nt, Human
ccuaguucauccaauccucac

SEQ ID NO: 2066997 - RNA, 24 nt, Human
ccuaguggggucucccucuccugc

SEQ ID NO: 2066998 - RNA, 18 nt, Human
ccuaggggucagggacca

SEQ ID NO: 2066999 - RNA, 15 nt, Human
ccuaggggucaggga

SEQ ID NO: 2067000 - RNA, 23 nt, Human
ccuaguggggucucccucuccug

SEQ ID NO: 2067001 - RNA, 21 nt, Human
ccuacaccauuaucuuggaaa

SEQ ID NO: 2067002 - RNA, 19 nt, Human
ccuaaauaaacacauagau

SEQ ID NO: 2067003 - RNA, 23 nt, Human
ccuaaauaaacacauagauucac

SEQ ID NO: 2067004 - RNA, 19 nt, Human
ccuacaagagcagccugug

SEQ ID NO: 2067005 - RNA, 17 nt, Human
ccuacaagagcagccug

SEQ ID NO: 2067006 - RNA, 18 nt, Human
ccuacaagagcagccugu

SEQ ID NO: 2067007 - RNA, 21 nt, Human
ccuacaagagcagccuguggc

SEQ ID NO: 2067008 - RNA, 15 nt, Human
ccuaaaauucagugg

SEQ ID NO: 2067009 - RNA, 22 nt, Human
ccgugcuuguuugcucaccugg

SEQ ID NO: 2067010 - RNA, 20 nt, Human
ccgugcuuguuugcucaccu

SEQ ID NO: 2067011 - RNA, 23 nt, Human
ccgugcuuguuugcucaccuggg

SEQ ID NO: 2067012 - RNA, 13 nt, Human
ccgugugcccucg

SEQ ID NO: 2067013 - RNA, 16 nt, Human
ccguguggccccuuca

SEQ ID NO: 2067014 - RNA, 22 nt, Human
ccuaaaaggaaaucucacccca

SEQ ID NO: 2067015 - RNA, 16 nt, Human
ccgugugcccucgggc

SEQ ID NO: 2067016 - RNA, 13 nt, Human
ccguguggccccu

SEQ ID NO: 2067017 - RNA, 14 nt, Human
ccguguggccccuu

SEQ ID NO: 2067018 - RNA, 15 nt, Human
ccguguggccccuuc

SEQ ID NO: 2067019 - RNA, 23 nt, Human
ccuaaaaggaaaucucaccccau

SEQ ID NO: 2067020 - RNA, 22 nt, Human
ccuaaaaguucauaacagugcc

SEQ ID NO: 2067021 - RNA, 23 nt, Human
ccuaaaaguucauaacagugcca

SEQ ID NO: 2067022 - RNA, 14 nt, Human
ccuauagucccagc

SEQ ID NO: 2067023 - RNA, 16 nt, Human
cuuagaaguggaagua

SEQ ID NO: 2067024 - RNA, 16 nt, Human
cuuagaaauugcauuu

SEQ ID NO: 2067025 - RNA, 17 nt, Human
cuuagaaguggaccagg

SEQ ID NO: 2067026 - RNA, 18 nt, Human
cuuagaaguggaccagga

SEQ ID NO: 2067027 - RNA, 20 nt, Human
cuuagaaguggaccaggaca

SEQ ID NO: 2067028 - RNA, 21 nt, Human
cuuagaaguggaccaggacag

SEQ ID NO: 2067029 - RNA, 22 nt, Human
cuuagaaguggaccaggacagg

SEQ ID NO: 2067030 - RNA, 23 nt, Human
cuuagaaguggaccaggacagga

SEQ ID NO: 2067031 - RNA, 20 nt, Human
cuuagaagucacacaguauu

SEQ ID NO: 2067032 - RNA, 17 nt, Human
cuuagaagucacacagu

SEQ ID NO: 2067033 - RNA, 11 nt, Human
cuuacugcuug

SEQ ID NO: 2067034 - RNA, 20 nt, Human
cuuagaaaaaccaccaccau

SEQ ID NO: 2067035 - RNA, 13 nt, Human
cuuacugcagaau

SEQ ID NO: 2067036 - RNA, 22 nt, Human
cuuaccuucaauaaaguaucua

SEQ ID NO: 2067037 - RNA, 12 nt, Human
cuuacugaaggu

SEQ ID NO: 2067038 - RNA, 14 nt, Human
cuuaauuuucagua

SEQ ID NO: 2067039 - RNA, 18 nt, Human
cuuaauuuucaguauaau

SEQ ID NO: 2067040 - RNA, 15 nt, Human
cuuaccuucaauaaa

SEQ ID NO: 2067041 - RNA, 16 nt, Human
cuuaccuucaauaaag

SEQ ID NO: 2067042 - RNA, 17 nt, Human
cuuaccuucaauaaagu

SEQ ID NO: 2067043 - RNA, 18 nt, Human
cuuaccuucaauaaagua

SEQ ID NO: 2067044 - RNA, 21 nt, Human
cuuaccuucaauaaaguaucu

SEQ ID NO: 2067045 - RNA, 23 nt, Human
cuuagguuggcaaaaaggcagga

SEQ ID NO: 2067046 - RNA, 21 nt, Human
cuuagguuggcaaaaaggcag

SEQ ID NO: 2067047 - RNA, 17 nt, Human
cuuagacuugaaauacu

SEQ ID NO: 2067048 - RNA, 20 nt, Human
cuuagaccucagccugugcu

SEQ ID NO: 2067049 - RNA, 17 nt, Human
cuuagaccucagccugu

SEQ ID NO: 2067050 - RNA, 18 nt, Human
cuuagaccucagccugug

SEQ ID NO: 2067051 - RNA, 16 nt, Human
cuuagacuugaaauac

SEQ ID NO: 2067052 - RNA, 12 nt, Human
cuuagaccucag

SEQ ID NO: 2067053 - RNA, 13 nt, Human
cuuagaccucagc

SEQ ID NO: 2067054 - RNA, 14 nt, Human
cuuagaccucagcc

SEQ ID NO: 2067055 - RNA, 15 nt, Human
cuuagaccucagccu

SEQ ID NO: 2067056 - RNA, 16 nt, Human
cuuagaccucagccug

SEQ ID NO: 2067057 - RNA, 14 nt, Human
cuuaauauguuaac

SEQ ID NO: 2067058 - RNA, 13 nt, Human
cuuaauuaaguaa

SEQ ID NO: 2067059 - RNA, 15 nt, Human
cuuaauuaaguaaac

SEQ ID NO: 2067060 - RNA, 19 nt, Human
cuuaauuaaguaaacuaau

SEQ ID NO: 2067061 - RNA, 21 nt, Human
cuuaauuaaguaaacuaauga

SEQ ID NO: 2067062 - RNA, 18 nt, Human
cuuaagaauuuugagcag

SEQ ID NO: 2067063 - RNA, 14 nt, Human
cuuaacauucugua

SEQ ID NO: 2067064 - RNA, 17 nt, Human
cuuaacauucuguaaaa

SEQ ID NO: 2067065 - RNA, 20 nt, Human
cuuaacauuucuaacucuga

SEQ ID NO: 2067066 - RNA, 24 nt, Human
cuuaacauuucuaacucugaugua

SEQ ID NO: 2067067 - RNA, 20 nt, Human
cuuaaaaaucauugauuguc

SEQ ID NO: 2067068 - RNA, 19 nt, Human
cuuaacaaacccucguuuc

SEQ ID NO: 2067069 - RNA, 23 nt, Human
cuuaacaaacccucguuucugau

SEQ ID NO: 2067070 - RNA, 12 nt, Human
cuuaaaaaguua

SEQ ID NO: 2067071 - RNA, 18 nt, Human
cuuaaaaagucugcauua

SEQ ID NO: 2067072 - RNA, 22 nt, Human
cuuaaaaagucugcauuacauu

SEQ ID NO: 2067073 - RNA, 14 nt, Human
cuuaaaaaguuaua

SEQ ID NO: 2067074 - RNA, 18 nt, Human
cuuaaauuuuaauuuauu

SEQ ID NO: 2067075 - RNA, 12 nt, Human
cuuaagcuuccg

SEQ ID NO: 2067076 - RNA, 19 nt, Human
cuuaagaccaccucaaauu

SEQ ID NO: 2067077 - RNA, 20 nt, Human
cuuaagaccaccucaaauuu

SEQ ID NO: 2067078 - RNA, 21 nt, Human
cuuaagaccaccucaaauuua

SEQ ID NO: 2067079 - RNA, 23 nt, Human
cuuaagaccaccucaaauuuaaa

SEQ ID NO: 2067080 - RNA, 23 nt, Human
cuuaagcuaggauguugcucaga

SEQ ID NO: 2067081 - RNA, 20 nt, Human
cuuaaggauugugauauuuu

SEQ ID NO: 2067082 - RNA, 22 nt, Human
cuguuuuguuuuguuuuuuaaa

SEQ ID NO: 2067083 - RNA, 16 nt, Human
cuuaauaguauuuaug

SEQ ID NO: 2067084 - RNA, 17 nt, Human
cuuaauaguauuuauga

SEQ ID NO: 2067085 - RNA, 18 nt, Human
cuguucuuaagacgugau

SEQ ID NO: 2067086 - RNA, 17 nt, Human
cuguucuguuuugccug

SEQ ID NO: 2067087 - RNA, 16 nt, Human
cuguuaagugguuuca

SEQ ID NO: 2067088 - RNA, 16 nt, Human
cuguuaauaguucagg

SEQ ID NO: 2067089 - RNA, 14 nt, Human
cuguuaagagagga

SEQ ID NO: 2067090 - RNA, 16 nt, Human
cuguugcccaggcugg

SEQ ID NO: 2067091 - RNA, 15 nt, Human
cuguugcccaggcug

SEQ ID NO: 2067092 - RNA, 14 nt, Human
cuguugcccaggcu

SEQ ID NO: 2067093 - RNA, 13 nt, Human
cuguugcccaggc

SEQ ID NO: 2067094 - RNA, 12 nt, Human
cuguugcccagg

SEQ ID NO: 2067095 - RNA, 13 nt, Human
cuguugccacaac

SEQ ID NO: 2067096 - RNA, 22 nt, Human
cuguugaaaagccauguuuaag

SEQ ID NO: 2067097 - RNA, 20 nt, Human
cuguugacauccaagcuucc

SEQ ID NO: 2067098 - RNA, 17 nt, Human
cuguugaauuucccaca

SEQ ID NO: 2067099 - RNA, 15 nt, Human
cuguugauugcagga

SEQ ID NO: 2067100 - RNA, 15 nt, Human
cuguugagcuguuuu

SEQ ID NO: 2067101 - RNA, 20 nt, Human
cuguugagcuguuuucccug

SEQ ID NO: 2067102 - RNA, 23 nt, Human
cuguugacauccaagcuuccuuu

SEQ ID NO: 2067103 - RNA, 17 nt, Human
cuguuucaacacagacc

SEQ ID NO: 2067104 - RNA, 17 nt, Human
cuguugcccaggcuggc

SEQ ID NO: 2067105 - RNA, 18 nt, Human
cuguugcccaggcuggcg

SEQ ID NO: 2067106 - RNA, 13 nt, Human
cuguugccagaga

SEQ ID NO: 2067107 - RNA, 17 nt, Human
cuguugccagagaugga

SEQ ID NO: 2067108 - RNA, 11 nt, Human
cuguuugucau

SEQ ID NO: 2067109 - RNA, 14 nt, Human
cuguuuguuaaaac

SEQ ID NO: 2067110 - RNA, 12 nt, Human
cuguuuguuaug

SEQ ID NO: 2067111 - RNA, 22 nt, Human
cuguuuuacaaaaaagaaaaga

SEQ ID NO: 2067112 - RNA, 13 nt, Human
cuguuuucccuga

SEQ ID NO: 2067113 - RNA, 12 nt, Human
cuguuuuacugc

SEQ ID NO: 2067114 - RNA, 13 nt, Human
cuguuuuacugcu

SEQ ID NO: 2067115 - RNA, 15 nt, Human
cuguuuuacugcuuu

SEQ ID NO: 2067116 - RNA, 17 nt, Human
cuguuuuacugcuuuua

SEQ ID NO: 2067117 - RNA, 17 nt, Human
cuguuuuucagggaggu

SEQ ID NO: 2067118 - RNA, 16 nt, Human
cuuaaaaaguggaaaa

SEQ ID NO: 2067119 - RNA, 17 nt, Human
cuuaaaaaguggaaaaa

SEQ ID NO: 2067120 - RNA, 17 nt, Human
cuguuuuuaaaaaucau

SEQ ID NO: 2067121 - RNA, 15 nt, Human
cuguuuuuaagcugu

SEQ ID NO: 2067122 - RNA, 23 nt, Human
cuguuuuuaagcuguuuccauag

SEQ ID NO: 2067123 - RNA, 19 nt, Human
cuguuuuuaagcuguuucc

SEQ ID NO: 2067124 - RNA, 18 nt, Human
cuguuuuuaagcuguuuc

SEQ ID NO: 2067125 - RNA, 17 nt, Human
cuguuuuuaagcuguuu

SEQ ID NO: 2067126 - RNA, 16 nt, Human
cuguuuuuaagcuguu

SEQ ID NO: 2067127 - RNA, 10 nt, Human
cuucccuggc

SEQ ID NO: 2067128 - RNA, 11 nt, Human
cuucccuggcu

SEQ ID NO: 2067129 - RNA, 12 nt, Human
cuucccuggcuu

SEQ ID NO: 2067130 - RNA, 15 nt, Human
cuuccucacccugau

SEQ ID NO: 2067131 - RNA, 12 nt, Human
cuuccuauccca

SEQ ID NO: 2067132 - RNA, 14 nt, Human
cuuccuaucccauc

SEQ ID NO: 2067133 - RNA, 16 nt, Human
cuuccuaucccauccc

SEQ ID NO: 2067134 - RNA, 17 nt, Human
cuuccuaucccauccca

SEQ ID NO: 2067135 - RNA, 18 nt, Human
cuuccuaucccaucccau

SEQ ID NO: 2067136 - RNA, 15 nt, Human
cuuccugccuggucu

SEQ ID NO: 2067137 - RNA, 16 nt, Human
cuuccugccuggucuc

SEQ ID NO: 2067138 - RNA, 17 nt, Human
cuuccugccuggucucc

SEQ ID NO: 2067139 - RNA, 18 nt, Human
cuuccugccuggucuccu

SEQ ID NO: 2067140 - RNA, 13 nt, Human
cuuccugugacuu

SEQ ID NO: 2067141 - RNA, 14 nt, Human
cuuccuguccgccc

SEQ ID NO: 2067142 - RNA, 15 nt, Human
cuuccuguccgcccu

SEQ ID NO: 2067143 - RNA, 17 nt, Human
cuuccuguccgcccucu

SEQ ID NO: 2067144 - RNA, 22 nt, Human
cuuccuguccgcccucuucccc

SEQ ID NO: 2067145 - RNA, 20 nt, Human
cuuccugucuuccugcauuc

SEQ ID NO: 2067146 - RNA, 16 nt, Human
cuuccugugacuucag

SEQ ID NO: 2067147 - RNA, 11 nt, Human
cuuccccacug

SEQ ID NO: 2067148 - RNA, 14 nt, Human
cuuccccacugccu

SEQ ID NO: 2067149 - RNA, 16 nt, Human
cuuccccacugccugc

SEQ ID NO: 2067150 - RNA, 19 nt, Human
cuuccccacugccugccca

SEQ ID NO: 2067151 - RNA, 20 nt, Human
cuuccccacugccugcccac

SEQ ID NO: 2067152 - RNA, 22 nt, Human
cuuccccacugccugcccaccc

SEQ ID NO: 2067153 - RNA, 19 nt, Human
cuuccccagaaaggagacu

SEQ ID NO: 2067154 - RNA, 17 nt, Human
cuuccacugauggaaac

SEQ ID NO: 2067155 - RNA, 15 nt, Human
cuucccccuccaauc

SEQ ID NO: 2067156 - RNA, 16 nt, Human
cuucccccucccaggg

SEQ ID NO: 2067157 - RNA, 20 nt, Human
cuucccccgcaaugugcccc

SEQ ID NO: 2067158 - RNA, 13 nt, Human
cuucccuaccuca

SEQ ID NO: 2067159 - RNA, 15 nt, Human
cuucccuaccucagg

SEQ ID NO: 2067160 - RNA, 16 nt, Human
cuucccuaccucaggc

SEQ ID NO: 2067161 - RNA, 16 nt, Human
cuucccuagggcuggg

SEQ ID NO: 2067162 - RNA, 17 nt, Human
cuucccuagggcugggu

SEQ ID NO: 2067163 - RNA, 18 nt, Human
cuucccuagggcugggug

SEQ ID NO: 2067164 - RNA, 19 nt, Human
cuucccuagggcugggugu

SEQ ID NO: 2067165 - RNA, 17 nt, Human
cuucccuaccucaggca

SEQ ID NO: 2067166 - RNA, 20 nt, Human
cuucccuaccucaggcagga

SEQ ID NO: 2067167 - RNA, 20 nt, Human
cuucccuagaggguuccugu

SEQ ID NO: 2067168 - RNA, 23 nt, Human
cuucccuagaggguuccuguaga

SEQ ID NO: 2067169 - RNA, 12 nt, Human
cuucccccucca

SEQ ID NO: 2067170 - RNA, 18 nt, Human
cuucccccauagccaccc

SEQ ID NO: 2067171 - RNA, 14 nt, Human
cuucccccauagcc

SEQ ID NO: 2067172 - RNA, 15 nt, Human
cuucccccauagcca

SEQ ID NO: 2067173 - RNA, 16 nt, Human
cuucccccauagccac

SEQ ID NO: 2067174 - RNA, 13 nt, Human
cuuccccagccuc

SEQ ID NO: 2067175 - RNA, 14 nt, Human
cuuccccagccucu

SEQ ID NO: 2067176 - RNA, 23 nt, Human
cuuccccaacgaaaagcacaucc

SEQ ID NO: 2067177 - RNA, 16 nt, Human
cuucucacugccaugc

SEQ ID NO: 2067178 - RNA, 16 nt, Human
cuucucacucccuucu

SEQ ID NO: 2067179 - RNA, 20 nt, Human
cuucucacucccuucuccuu

SEQ ID NO: 2067180 - RNA, 17 nt, Human
cuucguuaacuguguau

SEQ ID NO: 2067181 - RNA, 20 nt, Human
cuucguuaacuguguaugua

SEQ ID NO: 2067182 - RNA, 21 nt, Human
cuucucacugccaugccagcu

SEQ ID NO: 2067183 - RNA, 15 nt, Human
cuucucauccugcag

SEQ ID NO: 2067184 - RNA, 16 nt, Human
cuucucauccugcagg

SEQ ID NO: 2067185 - RNA, 17 nt, Human
cuucucauccugcaggc

SEQ ID NO: 2067186 - RNA, 12 nt, Human
cuucucaucugu

SEQ ID NO: 2067187 - RNA, 19 nt, Human
cuucgggaggucgaggcag

SEQ ID NO: 2067188 - RNA, 21 nt, Human
cuucggcauugguucccuuug

SEQ ID NO: 2067189 - RNA, 19 nt, Human
cuucggggaacuccuggaa

SEQ ID NO: 2067190 - RNA, 18 nt, Human
cuucggggaacuccugga

SEQ ID NO: 2067191 - RNA, 22 nt, Human
cuuccuuuguuuuuuuuuccug

SEQ ID NO: 2067192 - RNA, 21 nt, Human
cuuccuuuuagccuaguucau

SEQ ID NO: 2067193 - RNA, 16 nt, Human
cuucgauacaccgggc

SEQ ID NO: 2067194 - RNA, 21 nt, Human
cuucgauacaccgggccugga

SEQ ID NO: 2067195 - RNA, 16 nt, Human
cuuccuuaccgugggc

SEQ ID NO: 2067196 - RNA, 19 nt, Human
cuucgcguauuucaggauu

SEQ ID NO: 2067197 - RNA, 17 nt, Human
cuucgcuccugugucuu

SEQ ID NO: 2067198 - RNA, 16 nt, Human
cuucgcuccugugucu

SEQ ID NO: 2067199 - RNA, 19 nt, Human
cuuccuuggcaucacaggg

SEQ ID NO: 2067200 - RNA, 15 nt, Human
cuucaguaagccgug

SEQ ID NO: 2067201 - RNA, 15 nt, Human
cuucagguucuuagu

SEQ ID NO: 2067202 - RNA, 19 nt, Human
cuucagguucuuaguguca

SEQ ID NO: 2067203 - RNA, 15 nt, Human
cuucagugcccacca

SEQ ID NO: 2067204 - RNA, 17 nt, Human
cuucagugcccaccaac

SEQ ID NO: 2067205 - RNA, 11 nt, Human
cuucagugccc

SEQ ID NO: 2067206 - RNA, 13 nt, Human
cuucagugcccac

SEQ ID NO: 2067207 - RNA, 19 nt, Human
cuucagugcaucugggaag

SEQ ID NO: 2067208 - RNA, 13 nt, Human
cuuccaaagcaca

SEQ ID NO: 2067209 - RNA, 12 nt, Human
cuucauuuuccc

SEQ ID NO: 2067210 - RNA, 13 nt, Human
cuucauuuuuccu

SEQ ID NO: 2067211 - RNA, 14 nt, Human
cuucauuuuuccua

SEQ ID NO: 2067212 - RNA, 16 nt, Human
cuucauuuuuccuaac

SEQ ID NO: 2067213 - RNA, 17 nt, Human
cuucauuuuuccuaaca

SEQ ID NO: 2067214 - RNA, 18 nt, Human
cuucagcauauuuauagc

SEQ ID NO: 2067215 - RNA, 15 nt, Human
cuucagcauccucag

SEQ ID NO: 2067216 - RNA, 14 nt, Human
cuucagccucccga

SEQ ID NO: 2067217 - RNA, 20 nt, Human
cuucagccuccccaccuucu

SEQ ID NO: 2067218 - RNA, 14 nt, Human
cuucagccugaggc

SEQ ID NO: 2067219 - RNA, 20 nt, Human
cuucagccucccgaguagcu

SEQ ID NO: 2067220 - RNA, 16 nt, Human
cuucagccucccgagu

SEQ ID NO: 2067221 - RNA, 14 nt, Human
cuucagcuugcuuc

SEQ ID NO: 2067222 - RNA, 10 nt, Human
cuucagaggc

SEQ ID NO: 2067223 - RNA, 19 nt, Human
cuucaggacacucacuaca

SEQ ID NO: 2067224 - RNA, 16 nt, Human
cuucaggacacucacu

SEQ ID NO: 2067225 - RNA, 14 nt, Human
cuucaguaagccgu

SEQ ID NO: 2067226 - RNA, 16 nt, Human
cuucagguggaaaaac

SEQ ID NO: 2067227 - RNA, 15 nt, Human
cuucagcugacuuuu

SEQ ID NO: 2067228 - RNA, 19 nt, Human
cuucagcugacuuuucugu

SEQ ID NO: 2067229 - RNA, 15 nt, Human
cuucagccugaggcu

SEQ ID NO: 2067230 - RNA, 16 nt, Human
cuucagccugaggcug

SEQ ID NO: 2067231 - RNA, 20 nt, Human
cuucagccugaggcugagac

SEQ ID NO: 2067232 - RNA, 22 nt, Human
cuucagccugaggcugagacug

SEQ ID NO: 2067233 - RNA, 11 nt, Human
cuucagagagc

SEQ ID NO: 2067234 - RNA, 21 nt, Human
cuucacauccuguguuucuag

SEQ ID NO: 2067235 - RNA, 14 nt, Human
cuucacaguguuuc

SEQ ID NO: 2067236 - RNA, 20 nt, Human
cuucacauccuguguuucua

SEQ ID NO: 2067237 - RNA, 14 nt, Human
cuucagagagcugg

SEQ ID NO: 2067238 - RNA, 15 nt, Human
cuucagagagcuggu

SEQ ID NO: 2067239 - RNA, 16 nt, Human
cuucagagagcuggua

SEQ ID NO: 2067240 - RNA, 22 nt, Human
cuucagagagcugguaguuagu

SEQ ID NO: 2067241 - RNA, 18 nt, Human
cuucagagauaggccugu

SEQ ID NO: 2067242 - RNA, 14 nt, Human
cuucagauccuacc

SEQ ID NO: 2067243 - RNA, 15 nt, Human
cuucagauccuaccc

SEQ ID NO: 2067244 - RNA, 16 nt, Human
cuucagauccuacccc

SEQ ID NO: 2067245 - RNA, 20 nt, Human
cuucagaucagugcuugagu

SEQ ID NO: 2067246 - RNA, 13 nt, Human
cuucagaggcuga

SEQ ID NO: 2067247 - RNA, 16 nt, Human
cuucagaggcugaggu

SEQ ID NO: 2067248 - RNA, 21 nt, Human
cuucagagguggcucuggaau

SEQ ID NO: 2067249 - RNA, 15 nt, Human
cuucagaucagugcu

SEQ ID NO: 2067250 - RNA, 17 nt, Human
cuucagaucagugcuug

SEQ ID NO: 2067251 - RNA, 18 nt, Human
cuucaauuuauugcacaa

SEQ ID NO: 2067252 - RNA, 19 nt, Human
cuucaauuuauugcacaaa

SEQ ID NO: 2067253 - RNA, 10 nt, Human
cuucaauuug

SEQ ID NO: 2067254 - RNA, 19 nt, Human
cuucaauuuguauaaaaug

SEQ ID NO: 2067255 - RNA, 12 nt, Human
cuucacaguguu

SEQ ID NO: 2067256 - RNA, 13 nt, Human
cuucacaguguuu

SEQ ID NO: 2067257 - RNA, 21 nt, Human
cuucacaauggugcucauuuc

SEQ ID NO: 2067258 - RNA, 16 nt, Human
cuucacacacaggcaa

SEQ ID NO: 2067259 - RNA, 17 nt, Human
cuucacacacaggcaac

SEQ ID NO: 2067260 - RNA, 15 nt, Human
cuucaaauauuuccc

SEQ ID NO: 2067261 - RNA, 24 nt, Human
cuucaacagacccccucuagaaau

SEQ ID NO: 2067262 - RNA, 18 nt, Human
cuucaagaacucugggcu

SEQ ID NO: 2067263 - RNA, 18 nt, Human
cuucaagcaccagggaag

SEQ ID NO: 2067264 - RNA, 23 nt, Human
cuucaacagacccccucuagaaa

SEQ ID NO: 2067265 - RNA, 17 nt, Human
cuucaacugaccagccu

SEQ ID NO: 2067266 - RNA, 23 nt, Human
cuucaacugaccagccuccaugc

SEQ ID NO: 2067267 - RNA, 20 nt, Human
cuucaacugaccagccucca

SEQ ID NO: 2067268 - RNA, 21 nt, Human
cuguacuccucccaggcgccc

SEQ ID NO: 2067269 - RNA, 19 nt, Human
cuguacuccucccaggcgc

SEQ ID NO: 2067270 - RNA, 16 nt, Human
cuguacuccucccagg

SEQ ID NO: 2067271 - RNA, 15 nt, Human
cuguacuccucccag

SEQ ID NO: 2067272 - RNA, 20 nt, Human
cuguacucaggaggcugagg

SEQ ID NO: 2067273 - RNA, 21 nt, Human
cuguaguuaggaaauaaaacc

SEQ ID NO: 2067274 - RNA, 22 nt, Human
cuguaguuaggaaauaaaaccu

SEQ ID NO: 2067275 - RNA, 20 nt, Human
cuguacgucugacaggcaau

SEQ ID NO: 2067276 - RNA, 19 nt, Human
cuguacgucugacaggcaa

SEQ ID NO: 2067277 - RNA, 14 nt, Human
cuguacuccuccca

SEQ ID NO: 2067278 - RNA, 22 nt, Human
cuguacuagucugugugggacu

SEQ ID NO: 2067279 - RNA, 13 nt, Human
cuguacucaggag

SEQ ID NO: 2067280 - RNA, 20 nt, Human
cuguacauauuugagacuag

SEQ ID NO: 2067281 - RNA, 18 nt, Human
cuguacgucugacaggca

SEQ ID NO: 2067282 - RNA, 16 nt, Human
cuguacgucugacagg

SEQ ID NO: 2067283 - RNA, 15 nt, Human
cuguacgucugacag

SEQ ID NO: 2067284 - RNA, 14 nt, Human
cuguacgucugaca

SEQ ID NO: 2067285 - RNA, 17 nt, Human
cuguauuuaugugugag

SEQ ID NO: 2067286 - RNA, 20 nt, Human
cuguauuuuguuuuugucuu

SEQ ID NO: 2067287 - RNA, 16 nt, Human
cuguauuuucuuuuua

SEQ ID NO: 2067288 - RNA, 21 nt, Human
cuguauuuuuaccuuuuuccu

SEQ ID NO: 2067289 - RNA, 14 nt, Human
cugucaaacaaagc

SEQ ID NO: 2067290 - RNA, 17 nt, Human
cugucaaacaaagccag

SEQ ID NO: 2067291 - RNA, 20 nt, Human
cuguaucccaugagccucag

SEQ ID NO: 2067292 - RNA, 19 nt, Human
cuguauuagucacagagau

SEQ ID NO: 2067293 - RNA, 17 nt, Human
cuguauuagucacagag

SEQ ID NO: 2067294 - RNA, 22 nt, Human
cuguaucccaugagccucagca

SEQ ID NO: 2067295 - RNA, 21 nt, Human
cuguaucccaugagccucagc

SEQ ID NO: 2067296 - RNA, 19 nt, Human
cuguaauccuagcacuuug

SEQ ID NO: 2067297 - RNA, 20 nt, Human
cuguaaucccagcacuuugg

SEQ ID NO: 2067298 - RNA, 16 nt, Human
cuguaaucccagcacu

SEQ ID NO: 2067299 - RNA, 14 nt, Human
cuguaaucccagcu

SEQ ID NO: 2067300 - RNA, 17 nt, Human
cuguaaucccagcacuu

SEQ ID NO: 2067301 - RNA, 13 nt, Human
cuguaaucccagc

SEQ ID NO: 2067302 - RNA, 14 nt, Human
cuguaaucccagca

SEQ ID NO: 2067303 - RNA, 14 nt, Human
cugguuagcucagc

SEQ ID NO: 2067304 - RNA, 15 nt, Human
cugguuagcucagcc

SEQ ID NO: 2067305 - RNA, 16 nt, Human
cugguuagcucagccc

SEQ ID NO: 2067306 - RNA, 20 nt, Human
cugguuagcucagccccagc

SEQ ID NO: 2067307 - RNA, 21 nt, Human
cugguuagcucagccccagcc

SEQ ID NO: 2067308 - RNA, 22 nt, Human
cugguuagcucagccccagccc

SEQ ID NO: 2067309 - RNA, 23 nt, Human
cugguuagcucagccccagccca

SEQ ID NO: 2067310 - RNA, 13 nt, Human
cugguuagcagag

SEQ ID NO: 2067311 - RNA, 22 nt, Human
cuguaaucccagcuacucggga

SEQ ID NO: 2067312 - RNA, 15 nt, Human
cuguaaucccagcag

SEQ ID NO: 2067313 - RNA, 19 nt, Human
cuguaaucccagcuacuca

SEQ ID NO: 2067314 - RNA, 19 nt, Human
cuguaaucccagcuacucg

SEQ ID NO: 2067315 - RNA, 18 nt, Human
cugguggcagugggagcu

SEQ ID NO: 2067316 - RNA, 14 nt, Human
cugguggcaguggg

SEQ ID NO: 2067317 - RNA, 15 nt, Human
cugguggcagcugcg

SEQ ID NO: 2067318 - RNA, 19 nt, Human
cugguauggguuucuccca

SEQ ID NO: 2067319 - RNA, 23 nt, Human
cugguauggguuucucccaguuc

SEQ ID NO: 2067320 - RNA, 14 nt, Human
cugguguccagcug

SEQ ID NO: 2067321 - RNA, 16 nt, Human
cugguguccagcugag

SEQ ID NO: 2067322 - RNA, 13 nt, Human
cugggcugagaga

SEQ ID NO: 2067323 - RNA, 15 nt, Human
cugggcucuccaccu

SEQ ID NO: 2067324 - RNA, 16 nt, Human
cugggcucuccaccuc

SEQ ID NO: 2067325 - RNA, 17 nt, Human
cugggcucuccaccuca

SEQ ID NO: 2067326 - RNA, 18 nt, Human
cugggcucuccaccucag

SEQ ID NO: 2067327 - RNA, 19 nt, Human
cugggcucuccaccucagc

SEQ ID NO: 2067328 - RNA, 20 nt, Human
cugggcucuccaccucagcc

SEQ ID NO: 2067329 - RNA, 21 nt, Human
cugggcucuccaccucagccu

SEQ ID NO: 2067330 - RNA, 13 nt, Human
cugggcucugccc

SEQ ID NO: 2067331 - RNA, 17 nt, Human
cugggcucugccccagc

SEQ ID NO: 2067332 - RNA, 18 nt, Human
cugggcucugccccagcu

SEQ ID NO: 2067333 - RNA, 23 nt, Human
cugggcucugccccagcucuggc

SEQ ID NO: 2067334 - RNA, 16 nt, Human
cugggccuccucuaac

SEQ ID NO: 2067335 - RNA, 23 nt, Human
cugggccuccucuaacaggggcu

SEQ ID NO: 2067336 - RNA, 24 nt, Human
cugggccuccucuaacaggggcug

SEQ ID NO: 2067337 - RNA, 12 nt, Human
cugggcucucca

SEQ ID NO: 2067338 - RNA, 13 nt, Human
cugggcucuccac

SEQ ID NO: 2067339 - RNA, 14 nt, Human
cugggcucuccacc

SEQ ID NO: 2067340 - RNA, 17 nt, Human
cugggccuguugcccuu

SEQ ID NO: 2067341 - RNA, 21 nt, Human
cugggauuacaagcgugagcc

SEQ ID NO: 2067342 - RNA, 19 nt, Human
cugggauguuucugucaca

SEQ ID NO: 2067343 - RNA, 14 nt, Human
cugggauguuucug

SEQ ID NO: 2067344 - RNA, 14 nt, Human
cugggauguccaca

SEQ ID NO: 2067345 - RNA, 21 nt, Human
cugggauguccacagaugccu

SEQ ID NO: 2067346 - RNA, 20 nt, Human
cugcuccacccuuggccugu

SEQ ID NO: 2067347 - RNA, 21 nt, Human
cugcuccacccuuggccuguc

SEQ ID NO: 2067348 - RNA, 11 nt, Human
cugcuccacca

SEQ ID NO: 2067349 - RNA, 13 nt, Human
cugcuccaccaca

SEQ ID NO: 2067350 - RNA, 16 nt, Human
cugcuccaccacaucc

SEQ ID NO: 2067351 - RNA, 11 nt, Human
cugcuccaccc

SEQ ID NO: 2067352 - RNA, 12 nt, Human
cugcuccacccu

SEQ ID NO: 2067353 - RNA, 13 nt, Human
cugcuccacccuu

SEQ ID NO: 2067354 - RNA, 14 nt, Human
cugcuccacccuug

SEQ ID NO: 2067355 - RNA, 15 nt, Human
cugcuccacccuugg

SEQ ID NO: 2067356 - RNA, 16 nt, Human
cugcuccacccuuggc

SEQ ID NO: 2067357 - RNA, 17 nt, Human
cugcuccacccuuggcc

SEQ ID NO: 2067358 - RNA, 18 nt, Human
cugcuccacccuuggccu

SEQ ID NO: 2067359 - RNA, 19 nt, Human
cugcuccacccuuggccug

SEQ ID NO: 2067360 - RNA, 15 nt, Human
cugggcaacagagca

SEQ ID NO: 2067361 - RNA, 18 nt, Human
cugggcaacagagcaaga

SEQ ID NO: 2067362 - RNA, 11 nt, Human
cugggauuagg

SEQ ID NO: 2067363 - RNA, 14 nt, Human
cugggauuccuccc

SEQ ID NO: 2067364 - RNA, 21 nt, Human
cuggguccaggggaugggagg

SEQ ID NO: 2067365 - RNA, 22 nt, Human
cuggguccaggggaugggaggu

SEQ ID NO: 2067366 - RNA, 17 nt, Human
cugggguucagccccuc

SEQ ID NO: 2067367 - RNA, 19 nt, Human
cugggguucagccccuccu

SEQ ID NO: 2067368 - RNA, 20 nt, Human
cugggguucagccccuccuc

SEQ ID NO: 2067369 - RNA, 21 nt, Human
cugggguucagccccuccucu

SEQ ID NO: 2067370 - RNA, 23 nt, Human
cugggguucagccccuccucugc

SEQ ID NO: 2067371 - RNA, 22 nt, Human
cugggguucagccccuccucug

SEQ ID NO: 2067372 - RNA, 23 nt, Human
cuggggguucuuucuuccucugc

SEQ ID NO: 2067373 - RNA, 20 nt, Human
cuggggguucuuucuuccuc

SEQ ID NO: 2067374 - RNA, 16 nt, Human
cuggggugugggaggc

SEQ ID NO: 2067375 - RNA, 19 nt, Human
cuggggugugggaggcccg

SEQ ID NO: 2067376 - RNA, 13 nt, Human
cugggguucagcc

SEQ ID NO: 2067377 - RNA, 15 nt, Human
cugggguucagcccc

SEQ ID NO: 2067378 - RNA, 15 nt, Human
cugguaagggccaag

SEQ ID NO: 2067379 - RNA, 15 nt, Human
cugggcuggccaguu

SEQ ID NO: 2067380 - RNA, 22 nt, Human
cugggcuggccaguuggaacca

SEQ ID NO: 2067381 - RNA, 17 nt, Human
cugggcugccaugugaa

SEQ ID NO: 2067382 - RNA, 20 nt, Human
cugggcugccaugugaagag

SEQ ID NO: 2067383 - RNA, 19 nt, Human
cugggcugcuacccagaaa

SEQ ID NO: 2067384 - RNA, 12 nt, Human
cugggcugugug

SEQ ID NO: 2067385 - RNA, 15 nt, Human
cugggcuucaguggc

SEQ ID NO: 2067386 - RNA, 18 nt, Human
cugggcuugucuguagau

SEQ ID NO: 2067387 - RNA, 16 nt, Human
cugggggucaggaggc

SEQ ID NO: 2067388 - RNA, 12 nt, Human
cugggggccuga

SEQ ID NO: 2067389 - RNA, 15 nt, Human
cugggggccugaccu

SEQ ID NO: 2067390 - RNA, 16 nt, Human
cugggggccugaccuc

SEQ ID NO: 2067391 - RNA, 22 nt, Human
cugggggccugaccucccccuc

SEQ ID NO: 2067392 - RNA, 20 nt, Human
cugggcuuugauuccaucuc

SEQ ID NO: 2067393 - RNA, 21 nt, Human
cugggcuuugauuccaucucc

SEQ ID NO: 2067394 - RNA, 20 nt, Human
cugggcuuggggcuuccuaa

SEQ ID NO: 2067395 - RNA, 19 nt, Human
cugggcuuggggcuuccua

SEQ ID NO: 2067396 - RNA, 11 nt, Human
cuguggccugg

SEQ ID NO: 2067397 - RNA, 22 nt, Human
cugugggcacgcugugggcagg

SEQ ID NO: 2067398 - RNA, 20 nt, Human
cugugggcaggugggagcuu

SEQ ID NO: 2067399 - RNA, 22 nt, Human
cugugggugaagacagagggaa

SEQ ID NO: 2067400 - RNA, 15 nt, Human
cugugggccagauug

SEQ ID NO: 2067401 - RNA, 23 nt, Human
cugugguaguacuccugcaaaau

SEQ ID NO: 2067402 - RNA, 15 nt, Human
cugugguuccugggg

SEQ ID NO: 2067403 - RNA, 21 nt, Human
cugugguuccuggggugcccu

SEQ ID NO: 2067404 - RNA, 19 nt, Human
cuguggugagguugggcag

SEQ ID NO: 2067405 - RNA, 13 nt, Human
cuguggaagggac

SEQ ID NO: 2067406 - RNA, 14 nt, Human
cuguggaagggacu

SEQ ID NO: 2067407 - RNA, 16 nt, Human
cuguggaagggacuag

SEQ ID NO: 2067408 - RNA, 17 nt, Human
cugugccucugccuguc

SEQ ID NO: 2067409 - RNA, 16 nt, Human
cugugccucugccugu

SEQ ID NO: 2067410 - RNA, 15 nt, Human
cugugccucugccug

SEQ ID NO: 2067411 - RNA, 14 nt, Human
cugugccucugccu

SEQ ID NO: 2067412 - RNA, 13 nt, Human
cugugccucugcc

SEQ ID NO: 2067413 - RNA, 12 nt, Human
cugugccucugc

SEQ ID NO: 2067414 - RNA, 15 nt, Human
cuguggagcccgcac

SEQ ID NO: 2067415 - RNA, 22 nt, Human
cuguggagcccgcacccccacc

SEQ ID NO: 2067416 - RNA, 23 nt, Human
cuguggagcccgcacccccaccc

SEQ ID NO: 2067417 - RNA, 22 nt, Human
cuguggagguacacucuuauag

SEQ ID NO: 2067418 - RNA, 22 nt, Human
cuguggccaugguccccaagac

SEQ ID NO: 2067419 - RNA, 23 nt, Human
cuguggccaugguccccaagacc

SEQ ID NO: 2067420 - RNA, 13 nt, Human
cuguguuccuggc

SEQ ID NO: 2067421 - RNA, 12 nt, Human
cuguguuccugg

SEQ ID NO: 2067422 - RNA, 22 nt, Human
cuguguucuugccacugcacuc

SEQ ID NO: 2067423 - RNA, 16 nt, Human
cuguguguuuucauaa

SEQ ID NO: 2067424 - RNA, 18 nt, Human
cuguguguuuucauaaua

SEQ ID NO: 2067425 - RNA, 19 nt, Human
cuguguguuuucauaauaa

SEQ ID NO: 2067426 - RNA, 14 nt, Human
cuguguugccaugu

SEQ ID NO: 2067427 - RNA, 18 nt, Human
cuguguugcgugucgugg

SEQ ID NO: 2067428 - RNA, 20 nt, Human
cuguguugcgugucgugggu

SEQ ID NO: 2067429 - RNA, 15 nt, Human
cuguguuuuugaaau

SEQ ID NO: 2067430 - RNA, 19 nt, Human
cugugguuuccaaggagcu

SEQ ID NO: 2067431 - RNA, 20 nt, Human
cugugguuuccaaggagcug

SEQ ID NO: 2067432 - RNA, 21 nt, Human
cugugguuuccaaggagcuga

SEQ ID NO: 2067433 - RNA, 22 nt, Human
cugugguuuucuuuugccauga

SEQ ID NO: 2067434 - RNA, 21 nt, Human
cugugguuuucuuuugccaug

SEQ ID NO: 2067435 - RNA, 20 nt, Human
cugugucuuuuuucacuaca

SEQ ID NO: 2067436 - RNA, 12 nt, Human
cugugugaaaua

SEQ ID NO: 2067437 - RNA, 19 nt, Human
cugugugaaauaccagugu

SEQ ID NO: 2067438 - RNA, 21 nt, Human
cugugugaaauaccagugugg

SEQ ID NO: 2067439 - RNA, 15 nt, Human
cuguguaacacuguu

SEQ ID NO: 2067440 - RNA, 18 nt, Human
cugugugcagucucucuu

SEQ ID NO: 2067441 - RNA, 18 nt, Human
cugugugcaagugugugc

SEQ ID NO: 2067442 - RNA, 19 nt, Human
cugugugacaucaguggca

SEQ ID NO: 2067443 - RNA, 17 nt, Human
cugugaugccacacaga

SEQ ID NO: 2067444 - RNA, 14 nt, Human
cugugaugccacac

SEQ ID NO: 2067445 - RNA, 16 nt, Human
cugugaugccacacag

SEQ ID NO: 2067446 - RNA, 16 nt, Human
cugugauugugccuac

SEQ ID NO: 2067447 - RNA, 13 nt, Human
cugugaggcaggg

SEQ ID NO: 2067448 - RNA, 14 nt, Human
cugugaggcagggg

SEQ ID NO: 2067449 - RNA, 18 nt, Human
cugugaggcaggggcgga

SEQ ID NO: 2067450 - RNA, 16 nt, Human
cugugaacgauuuaga

SEQ ID NO: 2067451 - RNA, 16 nt, Human
cugugaaaugcuggca

SEQ ID NO: 2067452 - RNA, 12 nt, Human
cugugaaauagu

SEQ ID NO: 2067453 - RNA, 15 nt, Human
cugugccaugugcca

SEQ ID NO: 2067454 - RNA, 11 nt, Human
cugugcccagc

SEQ ID NO: 2067455 - RNA, 12 nt, Human
cugugcccagcu

SEQ ID NO: 2067456 - RNA, 13 nt, Human
cugugcccagcuc

SEQ ID NO: 2067457 - RNA, 14 nt, Human
cugugcccagcuca

SEQ ID NO: 2067458 - RNA, 15 nt, Human
cugugcccagcucag

SEQ ID NO: 2067459 - RNA, 16 nt, Human
cugugcccagcucagu

SEQ ID NO: 2067460 - RNA, 19 nt, Human
cugugcccagcucagucuu

SEQ ID NO: 2067461 - RNA, 21 nt, Human
cugugccccaugccuguccag

SEQ ID NO: 2067462 - RNA, 17 nt, Human
cugugcccagagauggg

SEQ ID NO: 2067463 - RNA, 17 nt, Human
cugugccccaugccugu

SEQ ID NO: 2067464 - RNA, 14 nt, Human
cugugccaugugcc

SEQ ID NO: 2067465 - RNA, 15 nt, Human
cugugcagggaggag

SEQ ID NO: 2067466 - RNA, 22 nt, Human
cugugcagggaggagguggcag

SEQ ID NO: 2067467 - RNA, 13 nt, Human
cugugcagggagg

SEQ ID NO: 2067468 - RNA, 16 nt, Human
cugugcaaauccuuga

SEQ ID NO: 2067469 - RNA, 17 nt, Human
cugugcacggccagcug

SEQ ID NO: 2067470 - RNA, 21 nt, Human
cugugcacggccagcugcauc

SEQ ID NO: 2067471 - RNA, 14 nt, Human
cugucuuccugcau

SEQ ID NO: 2067472 - RNA, 16 nt, Human
cugucuuccugcauuc

SEQ ID NO: 2067473 - RNA, 17 nt, Human
cugucuucucaggcucu

SEQ ID NO: 2067474 - RNA, 18 nt, Human
cugucuuccugcauucac

SEQ ID NO: 2067475 - RNA, 17 nt, Human
cugucuucauccuuagc

SEQ ID NO: 2067476 - RNA, 22 nt, Human
cugucuucauagcagauuuuaa

SEQ ID NO: 2067477 - RNA, 19 nt, Human
cugucuucauagcagauuu

SEQ ID NO: 2067478 - RNA, 15 nt, Human
cugucuucaagggcu

SEQ ID NO: 2067479 - RNA, 23 nt, Human
cugucuucacagcucuguguugc

SEQ ID NO: 2067480 - RNA, 15 nt, Human
cugucuuaauuaagu

SEQ ID NO: 2067481 - RNA, 23 nt, Human
cugucuuaauuaaguaaacuaau

SEQ ID NO: 2067482 - RNA, 14 nt, Human
cugucuucaagggc

SEQ ID NO: 2067483 - RNA, 19 nt, Human
cugucuucacagcucugug

SEQ ID NO: 2067484 - RNA, 18 nt, Human
cugucuucaguaagccgu

SEQ ID NO: 2067485 - RNA, 16 nt, Human
cugucuuucagauaca

SEQ ID NO: 2067486 - RNA, 20 nt, Human
cugucuuucagauacauggu

SEQ ID NO: 2067487 - RNA, 15 nt, Human
cugucuuucagauac

SEQ ID NO: 2067488 - RNA, 16 nt, Human
cugucuuuaaggaaaa

SEQ ID NO: 2067489 - RNA, 22 nt, Human
cugucauuugagcagggcucag

SEQ ID NO: 2067490 - RNA, 21 nt, Human
cugucauuugagcagggcuca

SEQ ID NO: 2067491 - RNA, 14 nt, Human
cugucugccagcca

SEQ ID NO: 2067492 - RNA, 23 nt, Human
cugucauuugagcagggcucagc

SEQ ID NO: 2067493 - RNA, 21 nt, Human
cugucugccagccagcagcca

SEQ ID NO: 2067494 - RNA, 15 nt, Human
cugucugccagccag

SEQ ID NO: 2067495 - RNA, 16 nt, Human
cugucugccagccagc

SEQ ID NO: 2067496 - RNA, 17 nt, Human
cugucugccagccagca

SEQ ID NO: 2067497 - RNA, 20 nt, Human
cugucugccagccagcagcc

SEQ ID NO: 2067498 - RNA, 20 nt, Human
cugucuggcugaggauuuca

SEQ ID NO: 2067499 - RNA, 19 nt, Human
cugucuggaggggagcucu

SEQ ID NO: 2067500 - RNA, 20 nt, Human
cugucuggaggggagcucug

SEQ ID NO: 2067501 - RNA, 17 nt, Human
cuuuauuaaauguagaa

SEQ ID NO: 2067502 - RNA, 18 nt, Human
cuuuauuaaaaucuuaaa

SEQ ID NO: 2067503 - RNA, 13 nt, Human
cuuuauuaaaauc

SEQ ID NO: 2067504 - RNA, 13 nt, Human
cuuuaguuuuugu

SEQ ID NO: 2067505 - RNA, 15 nt, Human
cuuuaguuuuuguga

SEQ ID NO: 2067506 - RNA, 12 nt, Human
cuuuauaaacuu

SEQ ID NO: 2067507 - RNA, 13 nt, Human
cuuuauaaacuuu

SEQ ID NO: 2067508 - RNA, 16 nt, Human
cuuuauuuuauauaau

SEQ ID NO: 2067509 - RNA, 20 nt, Human
cuuuauuuuauauaauaaag

SEQ ID NO: 2067510 - RNA, 22 nt, Human
cuuuauuuuauauaauaaagua

SEQ ID NO: 2067511 - RNA, 23 nt, Human
cuuuauuuuauauaauaaaguau

SEQ ID NO: 2067512 - RNA, 11 nt, Human
cuuuauuuucu

SEQ ID NO: 2067513 - RNA, 13 nt, Human
cuuucagggccuc

SEQ ID NO: 2067514 - RNA, 15 nt, Human
cuuucagggccucca

SEQ ID NO: 2067515 - RNA, 12 nt, Human
cuuucagguacu

SEQ ID NO: 2067516 - RNA, 22 nt, Human
cuuuauuuacuucguuuugguu

SEQ ID NO: 2067517 - RNA, 18 nt, Human
cuuuauuccuucauuuca

SEQ ID NO: 2067518 - RNA, 15 nt, Human
cuuucagugaaagca

SEQ ID NO: 2067519 - RNA, 17 nt, Human
cuuucagugaaagcauc

SEQ ID NO: 2067520 - RNA, 18 nt, Human
cuuuccaaaugcccagcu

SEQ ID NO: 2067521 - RNA, 19 nt, Human
cuuuccaaaugcccagcuu

SEQ ID NO: 2067522 - RNA, 22 nt, Human
cuuuccaaaugcccagcuuaaa

SEQ ID NO: 2067523 - RNA, 17 nt, Human
cuuuccacccccucccu

SEQ ID NO: 2067524 - RNA, 20 nt, Human
cuuuccacccccucccuggc

SEQ ID NO: 2067525 - RNA, 14 nt, Human
cuuuccacccccuc

SEQ ID NO: 2067526 - RNA, 15 nt, Human
cuuuccacccccucc

SEQ ID NO: 2067527 - RNA, 16 nt, Human
cuuuccacccccuccc

SEQ ID NO: 2067528 - RNA, 21 nt, Human
cuuuccacccccucccuggcc

SEQ ID NO: 2067529 - RNA, 23 nt, Human
cuuguuggauuuuugucuugugu

SEQ ID NO: 2067530 - RNA, 14 nt, Human
cuuguuuucaguuu

SEQ ID NO: 2067531 - RNA, 21 nt, Human
cuuguguuucuuuaguuuuug

SEQ ID NO: 2067532 - RNA, 13 nt, Human
cuuguguuggcug

SEQ ID NO: 2067533 - RNA, 14 nt, Human
cuuguguuggcugu

SEQ ID NO: 2067534 - RNA, 21 nt, Human
cuuguuggauuuuugucuugu

SEQ ID NO: 2067535 - RNA, 17 nt, Human
cuuguguuggcuguggc

SEQ ID NO: 2067536 - RNA, 14 nt, Human
cuuguggccuggga

SEQ ID NO: 2067537 - RNA, 13 nt, Human
cuuguggcacauu

SEQ ID NO: 2067538 - RNA, 24 nt, Human
cuugggggaugacuagaggcaggg

SEQ ID NO: 2067539 - RNA, 21 nt, Human
cuuguuuuuuuuuuccacuua

SEQ ID NO: 2067540 - RNA, 20 nt, Human
cuuguuuuuuuuuuccacuu

SEQ ID NO: 2067541 - RNA, 19 nt, Human
cuuguuuuuuuuuuccacu

SEQ ID NO: 2067542 - RNA, 18 nt, Human
cuuguuuuuccacuacug

SEQ ID NO: 2067543 - RNA, 14 nt, Human
cuuguuuucuugcc

SEQ ID NO: 2067544 - RNA, 17 nt, Human
cuuguuuucuugccaau

SEQ ID NO: 2067545 - RNA, 18 nt, Human
cuuguuuucuugccaaug

SEQ ID NO: 2067546 - RNA, 14 nt, Human
cuuuacuuagcuua

SEQ ID NO: 2067547 - RNA, 15 nt, Human
cuuuacuuagcuuau

SEQ ID NO: 2067548 - RNA, 18 nt, Human
cuuuacuuagcuuaucaa

SEQ ID NO: 2067549 - RNA, 14 nt, Human
cuuuacuguuuguu

SEQ ID NO: 2067550 - RNA, 15 nt, Human
cuuuacuguuuguua

SEQ ID NO: 2067551 - RNA, 15 nt, Human
cuuuagaaauaaaug

SEQ ID NO: 2067552 - RNA, 16 nt, Human
cuuuagaaauaaaugu

SEQ ID NO: 2067553 - RNA, 13 nt, Human
cuuggaagcuccg

SEQ ID NO: 2067554 - RNA, 21 nt, Human
cuuggaaagaaacaaccguug

SEQ ID NO: 2067555 - RNA, 23 nt, Human
cuuggaaagcaucaccucaggcc

SEQ ID NO: 2067556 - RNA, 15 nt, Human
cuuggaaaggaccag

SEQ ID NO: 2067557 - RNA, 21 nt, Human
cuuggaaacuggaugagguca

SEQ ID NO: 2067558 - RNA, 20 nt, Human
cuuggaaagcaucaccucag

SEQ ID NO: 2067559 - RNA, 21 nt, Human
cuuggaaagcaucaccucagg

SEQ ID NO: 2067560 - RNA, 22 nt, Human
cuuggaaagcaucaccucaggc

SEQ ID NO: 2067561 - RNA, 17 nt, Human
cuugcuguccuaggcca

SEQ ID NO: 2067562 - RNA, 20 nt, Human
cuugcuguccuaggccacac

SEQ ID NO: 2067563 - RNA, 16 nt, Human
cuugcuguccuaggcc

SEQ ID NO: 2067564 - RNA, 17 nt, Human
cuugcucugcugacaga

SEQ ID NO: 2067565 - RNA, 16 nt, Human
cuugcucugcugacag

SEQ ID NO: 2067566 - RNA, 13 nt, Human
cuugcuguggucu

SEQ ID NO: 2067567 - RNA, 16 nt, Human
cuugcuguggucucuu

SEQ ID NO: 2067568 - RNA, 18 nt, Human
cuugcuguggucucuuug

SEQ ID NO: 2067569 - RNA, 20 nt, Human
cuuggaaaaauccagaaaga

SEQ ID NO: 2067570 - RNA, 22 nt, Human
cuuggaaaaauccagaaagaaa

SEQ ID NO: 2067571 - RNA, 23 nt, Human
cuuggaaaaguggcaagaccaaa

SEQ ID NO: 2067572 - RNA, 15 nt, Human
cuugccacugccucu

SEQ ID NO: 2067573 - RNA, 14 nt, Human
cuugccacugccuc

SEQ ID NO: 2067574 - RNA, 16 nt, Human
cuugccagacaugugg

SEQ ID NO: 2067575 - RNA, 13 nt, Human
cuugccacugccu

SEQ ID NO: 2067576 - RNA, 21 nt, Human
cuucuccacccugcucuccga

SEQ ID NO: 2067577 - RNA, 18 nt, Human
cuucuccacccugcucuc

SEQ ID NO: 2067578 - RNA, 17 nt, Human
cuucuccacccugcucu

SEQ ID NO: 2067579 - RNA, 13 nt, Human
cuugcccagagau

SEQ ID NO: 2067580 - RNA, 19 nt, Human
cuugcccagagaugccucc

SEQ ID NO: 2067581 - RNA, 21 nt, Human
cuugcccagagaugccuccac

SEQ ID NO: 2067582 - RNA, 19 nt, Human
cuugccccccaccccagcc

SEQ ID NO: 2067583 - RNA, 13 nt, Human
cuugccccccacc

SEQ ID NO: 2067584 - RNA, 14 nt, Human
cuugccccccaccc

SEQ ID NO: 2067585 - RNA, 15 nt, Human
cuugccccccacccc

SEQ ID NO: 2067586 - RNA, 16 nt, Human
cuugccccccacccca

SEQ ID NO: 2067587 - RNA, 23 nt, Human
cuugcccagagaugccuccaccg

SEQ ID NO: 2067588 - RNA, 22 nt, Human
cuugcccagagaugccuccacc

SEQ ID NO: 2067589 - RNA, 14 nt, Human
cuugcucugcugac

SEQ ID NO: 2067590 - RNA, 13 nt, Human
cuugcucugcuga

SEQ ID NO: 2067591 - RNA, 17 nt, Human
cuugcccgcucaggcug

SEQ ID NO: 2067592 - RNA, 17 nt, Human
cuugcccggauucuggg

SEQ ID NO: 2067593 - RNA, 18 nt, Human
cuugcccggauucuggga

SEQ ID NO: 2067594 - RNA, 20 nt, Human
cuugcccggauucugggagg

SEQ ID NO: 2067595 - RNA, 15 nt, Human
cuugcccuagaugag

SEQ ID NO: 2067596 - RNA, 16 nt, Human
cuuggggggcugaggu

SEQ ID NO: 2067597 - RNA, 22 nt, Human
cuuggggggcugaggugggagg

SEQ ID NO: 2067598 - RNA, 15 nt, Human
cuuggggggcugagg

SEQ ID NO: 2067599 - RNA, 14 nt, Human
cuugggccacugug

SEQ ID NO: 2067600 - RNA, 19 nt, Human
cuugggcuuccauuugugu

SEQ ID NO: 2067601 - RNA, 23 nt, Human
cuugggcuuccauuugugugugu

SEQ ID NO: 2067602 - RNA, 18 nt, Human
cuuggggaacaagggugg

SEQ ID NO: 2067603 - RNA, 20 nt, Human
cuugggacuaaaugcccugc

SEQ ID NO: 2067604 - RNA, 19 nt, Human
cuugggacuaaaugcccug

SEQ ID NO: 2067605 - RNA, 17 nt, Human
cuuggcugcagggaguc

SEQ ID NO: 2067606 - RNA, 14 nt, Human
cuuggcugcaggga

SEQ ID NO: 2067607 - RNA, 12 nt, Human
cuuggcuuuguu

SEQ ID NO: 2067608 - RNA, 13 nt, Human
cuuggcuuuguuu

SEQ ID NO: 2067609 - RNA, 16 nt, Human
cuuggcugcagggagu

SEQ ID NO: 2067610 - RNA, 15 nt, Human
cuuggaggcugucuu

SEQ ID NO: 2067611 - RNA, 15 nt, Human
cuuggagggauaagc

SEQ ID NO: 2067612 - RNA, 19 nt, Human
cuuggagggcccacuugua

SEQ ID NO: 2067613 - RNA, 20 nt, Human
cuuggagggcccacuuguau

SEQ ID NO: 2067614 - RNA, 17 nt, Human
cuuggaggagaugggga

SEQ ID NO: 2067615 - RNA, 15 nt, Human
cuuggaggccagcca

SEQ ID NO: 2067616 - RNA, 18 nt, Human
cuuuguucuaaagaugga

SEQ ID NO: 2067617 - RNA, 13 nt, Human
cuuugggaggcca

SEQ ID NO: 2067618 - RNA, 15 nt, Human
cuuugggaaaggaga

SEQ ID NO: 2067619 - RNA, 22 nt, Human
cuuugggaaaggagaaguuaag

SEQ ID NO: 2067620 - RNA, 15 nt, Human
cuuugucccggggcu

SEQ ID NO: 2067621 - RNA, 17 nt, Human
cuuuguccuuuuuguua

SEQ ID NO: 2067622 - RNA, 11 nt, Human
cuuugcucuga

SEQ ID NO: 2067623 - RNA, 14 nt, Human
cuuugcucuuucuu

SEQ ID NO: 2067624 - RNA, 19 nt, Human
cuuugcuccaccccacuca

SEQ ID NO: 2067625 - RNA, 19 nt, Human
cuuucccaacacuucagac

SEQ ID NO: 2067626 - RNA, 21 nt, Human
cuuucccaacacuucagacug

SEQ ID NO: 2067627 - RNA, 22 nt, Human
cuuucccaacacuucagacugc

SEQ ID NO: 2067628 - RNA, 16 nt, Human
cuuucccaucuuccaa

SEQ ID NO: 2067629 - RNA, 14 nt, Human
cuuugcugagagcu

SEQ ID NO: 2067630 - RNA, 11 nt, Human
cuuugcugcca

SEQ ID NO: 2067631 - RNA, 19 nt, Human
cuuugcuuaugaauauuua

SEQ ID NO: 2067632 - RNA, 20 nt, Human
cuuugcuuaugaauauuuau

SEQ ID NO: 2067633 - RNA, 17 nt, Human
cuuuggaaguuuguguu

SEQ ID NO: 2067634 - RNA, 17 nt, Human
cuuuggacacacacagc

SEQ ID NO: 2067635 - RNA, 18 nt, Human
cuuuggacacacacagcu

SEQ ID NO: 2067636 - RNA, 19 nt, Human
cuuuggacacacacagcuu

SEQ ID NO: 2067637 - RNA, 21 nt, Human
cuuuggacacacacagcuucu

SEQ ID NO: 2067638 - RNA, 18 nt, Human
cuuuucuguccgagcuuu

SEQ ID NO: 2067639 - RNA, 23 nt, Human
cuuuucuguccgagcuuugaaaa

SEQ ID NO: 2067640 - RNA, 17 nt, Human
cuuuucccccaaagugg

SEQ ID NO: 2067641 - RNA, 19 nt, Human
cuuuucccccaaagugguu

SEQ ID NO: 2067642 - RNA, 14 nt, Human
cuuuuccccggucc

SEQ ID NO: 2067643 - RNA, 14 nt, Human
cuuuucccaaccau

SEQ ID NO: 2067644 - RNA, 18 nt, Human
cuuuucuacagcaaauuu

SEQ ID NO: 2067645 - RNA, 19 nt, Human
cuuuucuacagcaaauuua

SEQ ID NO: 2067646 - RNA, 20 nt, Human
cuuuucuacagcaaauuuau

SEQ ID NO: 2067647 - RNA, 23 nt, Human
cuuuucuacagcaaauuuauaau

SEQ ID NO: 2067648 - RNA, 18 nt, Human
cuuuucuccuaucuucau

SEQ ID NO: 2067649 - RNA, 15 nt, Human
cuuuucuccaugagu

SEQ ID NO: 2067650 - RNA, 13 nt, Human
cuuuucucuuucu

SEQ ID NO: 2067651 - RNA, 14 nt, Human
cuuuucucuuucuc

SEQ ID NO: 2067652 - RNA, 20 nt, Human
cuuuucauaaccuagccuua

SEQ ID NO: 2067653 - RNA, 20 nt, Human
cuuuucacugcuggcugccu

SEQ ID NO: 2067654 - RNA, 18 nt, Human
cuuuucacugcuggcugc

SEQ ID NO: 2067655 - RNA, 17 nt, Human
cuuuucacugcuggcug

SEQ ID NO: 2067656 - RNA, 23 nt, Human
cuuuuacucaugaucuugugaca

SEQ ID NO: 2067657 - RNA, 22 nt, Human
cuuuucauaaccuagccuuaga

SEQ ID NO: 2067658 - RNA, 18 nt, Human
cuuuucaugcgugugugu

SEQ ID NO: 2067659 - RNA, 18 nt, Human
cuuuguuuguugucagcu

SEQ ID NO: 2067660 - RNA, 20 nt, Human
cuuuguuuguugucagcuga

SEQ ID NO: 2067661 - RNA, 15 nt, Human
cuuuguuuggcuggg

SEQ ID NO: 2067662 - RNA, 17 nt, Human
cuuuguuucaaccaagu

SEQ ID NO: 2067663 - RNA, 13 nt, Human
cuuuuacauacug

SEQ ID NO: 2067664 - RNA, 14 nt, Human
cuuuuacauacugc

SEQ ID NO: 2067665 - RNA, 17 nt, Human
cuuuuacauacugcugu

SEQ ID NO: 2067666 - RNA, 18 nt, Human
gaaacaccuagaucagaa

SEQ ID NO: 2067667 - RNA, 22 nt, Human
gaaacacugggcuucuagaacc

SEQ ID NO: 2067668 - RNA, 17 nt, Human
gaaacacugacuccugu

SEQ ID NO: 2067669 - RNA, 18 nt, Human
gaaacagcuaaugggaca

SEQ ID NO: 2067670 - RNA, 14 nt, Human
gaaacagauuuggu

SEQ ID NO: 2067671 - RNA, 21 nt, Human
gaaaauauuaucuuuguaauu

SEQ ID NO: 2067672 - RNA, 14 nt, Human
gaaacagagacagg

SEQ ID NO: 2067673 - RNA, 16 nt, Human
gaaacagagacaggcc

SEQ ID NO: 2067674 - RNA, 17 nt, Human
gaaacagagacaggccc

SEQ ID NO: 2067675 - RNA, 19 nt, Human
gaaacagagacaggcccaa

SEQ ID NO: 2067676 - RNA, 17 nt, Human
gaaaagcugcugacagu

SEQ ID NO: 2067677 - RNA, 13 nt, Human
gaaaagcugcuga

SEQ ID NO: 2067678 - RNA, 16 nt, Human
gaaaaucagccugcuc

SEQ ID NO: 2067679 - RNA, 18 nt, Human
gaaaaucagccugcucca

SEQ ID NO: 2067680 - RNA, 23 nt, Human
gaaaauauguccauaucuaacca

SEQ ID NO: 2067681 - RNA, 14 nt, Human
gaaaaucagccugc

SEQ ID NO: 2067682 - RNA, 12 nt, Human
gaaaauaugcau

SEQ ID NO: 2067683 - RNA, 15 nt, Human
gaaaauaugcaucua

SEQ ID NO: 2067684 - RNA, 19 nt, Human
gaaaaauaacuucaagcaa

SEQ ID NO: 2067685 - RNA, 19 nt, Human
gaaaaccaagccguggcuu

SEQ ID NO: 2067686 - RNA, 18 nt, Human
gaaaaccaagccguggcu

SEQ ID NO: 2067687 - RNA, 21 nt, Human
gaaaaccaagccguggcuucc

SEQ ID NO: 2067688 - RNA, 13 nt, Human
gaaaacccagaga

SEQ ID NO: 2067689 - RNA, 12 nt, Human
gaaaacccagag

SEQ ID NO: 2067690 - RNA, 15 nt, Human
cuuuuuucacuacau

SEQ ID NO: 2067691 - RNA, 18 nt, Human
cuuuugagaacuuuuggu

SEQ ID NO: 2067692 - RNA, 15 nt, Human
cuuuugagacuuuuu

SEQ ID NO: 2067693 - RNA, 18 nt, Human
cuuuugagacuuuuuggu

SEQ ID NO: 2067694 - RNA, 20 nt, Human
cuuuugagacuuuuuggugg

SEQ ID NO: 2067695 - RNA, 19 nt, Human
cuuuucuuguuuaucagca

SEQ ID NO: 2067696 - RNA, 21 nt, Human
cuuuucuuguuuaucagcagu

SEQ ID NO: 2067697 - RNA, 13 nt, Human
cuuuugacaugug

SEQ ID NO: 2067698 - RNA, 14 nt, Human
cuuuugacaugugg

SEQ ID NO: 2067699 - RNA, 23 nt, Human
cuuuugacggaaggaccuauguu

SEQ ID NO: 2067700 - RNA, 18 nt, Human
cuuuugacuuaaagcaga

SEQ ID NO: 2067701 - RNA, 19 nt, Human
gaaaaaguuaaacauugaa

SEQ ID NO: 2067702 - RNA, 18 nt, Human
gaaaaaguaucauggaaa

SEQ ID NO: 2067703 - RNA, 22 nt, Human
gaaaaaguaucauggaaauauu

SEQ ID NO: 2067704 - RNA, 16 nt, Human
cuuuuuucuuauuuaa

SEQ ID NO: 2067705 - RNA, 20 nt, Human
cuuuuuugaaauaauaaauc

SEQ ID NO: 2067706 - RNA, 18 nt, Human
gaaguuuaauugacuuau

SEQ ID NO: 2067707 - RNA, 13 nt, Human
gaaguuucauuua

SEQ ID NO: 2067708 - RNA, 14 nt, Human
gaaguuucauuuau

SEQ ID NO: 2067709 - RNA, 15 nt, Human
gaaguuucauuuaug

SEQ ID NO: 2067710 - RNA, 21 nt, Human
gaaguuucauuuaugauacaa

SEQ ID NO: 2067711 - RNA, 12 nt, Human
gaagguuguaag

SEQ ID NO: 2067712 - RNA, 15 nt, Human
gaagguugugaugaa

SEQ ID NO: 2067713 - RNA, 20 nt, Human
gaagguuuacucuguggcca

SEQ ID NO: 2067714 - RNA, 16 nt, Human
gaagguuuguauauug

SEQ ID NO: 2067715 - RNA, 15 nt, Human
gaagguuuguauauu

SEQ ID NO: 2067716 - RNA, 14 nt, Human
gaauaaagacaccu

SEQ ID NO: 2067717 - RNA, 17 nt, Human
gaauaaagccugcuuuu

SEQ ID NO: 2067718 - RNA, 13 nt, Human
gaauaaaguucug

SEQ ID NO: 2067719 - RNA, 14 nt, Human
gaauaaaguucuga

SEQ ID NO: 2067720 - RNA, 20 nt, Human
gaauaaaguucugaguguuu

SEQ ID NO: 2067721 - RNA, 22 nt, Human
gaauaaauaaauguaucuuauu

SEQ ID NO: 2067722 - RNA, 14 nt, Human
gaauaaaguugaag

SEQ ID NO: 2067723 - RNA, 16 nt, Human
gaauaaaguugaagcu

SEQ ID NO: 2067724 - RNA, 17 nt, Human
gaauaaugugggaagaa

SEQ ID NO: 2067725 - RNA, 20 nt, Human
gaauaaugugggaagaaaca

SEQ ID NO: 2067726 - RNA, 21 nt, Human
gaauaaugugggaagaaacaa

SEQ ID NO: 2067727 - RNA, 15 nt, Human
gaauaauucuuugau

SEQ ID NO: 2067728 - RNA, 16 nt, Human
gaauaauucuuugauu

SEQ ID NO: 2067729 - RNA, 22 nt, Human
gaauaaucuuuggguaacuuca

SEQ ID NO: 2067730 - RNA, 14 nt, Human
gaauaaugaaugga

SEQ ID NO: 2067731 - RNA, 15 nt, Human
gaauaaucuuugggu

SEQ ID NO: 2067732 - RNA, 15 nt, Human
gaauaaauugcuccu

SEQ ID NO: 2067733 - RNA, 12 nt, Human
gaauaaggccuu

SEQ ID NO: 2067734 - RNA, 14 nt, Human
gaauaacauguaau

SEQ ID NO: 2067735 - RNA, 16 nt, Human
gaaucucaaauaacua

SEQ ID NO: 2067736 - RNA, 19 nt, Human
gaauccgggcuccccuuuc

SEQ ID NO: 2067737 - RNA, 22 nt, Human
gaauccuguccucagcuucuua

SEQ ID NO: 2067738 - RNA, 19 nt, Human
gaaugaaagggcccagaga

SEQ ID NO: 2067739 - RNA, 13 nt, Human
gaaugccuccucc

SEQ ID NO: 2067740 - RNA, 23 nt, Human
gaaugcggcaagaaggaauugac

SEQ ID NO: 2067741 - RNA, 16 nt, Human
gaaugcuaacaguuca

SEQ ID NO: 2067742 - RNA, 21 nt, Human
gaaugcuaacaguucacuugc

SEQ ID NO: 2067743 - RNA, 14 nt, Human
gaaugaaagggccc

SEQ ID NO: 2067744 - RNA, 11 nt, Human
gaauagaagga

SEQ ID NO: 2067745 - RNA, 12 nt, Human
gaauagaaggaa

SEQ ID NO: 2067746 - RNA, 13 nt, Human
gaauagaaggaaa

SEQ ID NO: 2067747 - RNA, 14 nt, Human
gaauagaaggaaac

SEQ ID NO: 2067748 - RNA, 18 nt, Human
gaauagaaggaaacuagc

SEQ ID NO: 2067749 - RNA, 20 nt, Human
gaauagaaggaaacuagcuu

SEQ ID NO: 2067750 - RNA, 15 nt, Human
gaauagaugcugacu

SEQ ID NO: 2067751 - RNA, 15 nt, Human
gaauagcaugucacu

SEQ ID NO: 2067752 - RNA, 14 nt, Human
gaauagcugggacu

SEQ ID NO: 2067753 - RNA, 13 nt, Human
gaaucagaaacag

SEQ ID NO: 2067754 - RNA, 15 nt, Human
gaauagcugggacua

SEQ ID NO: 2067755 - RNA, 14 nt, Human
gaaucccuguucau

SEQ ID NO: 2067756 - RNA, 17 nt, Human
gaaucccuguucauugu

SEQ ID NO: 2067757 - RNA, 18 nt, Human
gaaucccuguucauugua

SEQ ID NO: 2067758 - RNA, 16 nt, Human
gaauccaagcgagguc

SEQ ID NO: 2067759 - RNA, 14 nt, Human
gaaucauugcuuau

SEQ ID NO: 2067760 - RNA, 20 nt, Human
gaaucauuguaaacauuagu

SEQ ID NO: 2067761 - RNA, 18 nt, Human
gaaucagccuacaggccu

SEQ ID NO: 2067762 - RNA, 19 nt, Human
gaaucagaucauuucaaaa

SEQ ID NO: 2067763 - RNA, 18 nt, Human
gaaucagacccuacccca

SEQ ID NO: 2067764 - RNA, 22 nt, Human
gaaucagacccuaccccaccac

SEQ ID NO: 2067765 - RNA, 23 nt, Human
gaaucagacccuaccccaccacg

SEQ ID NO: 2067766 - RNA, 19 nt, Human
gaaucagacuucacacugc

SEQ ID NO: 2067767 - RNA, 13 nt, Human
gaaggccaccugc

SEQ ID NO: 2067768 - RNA, 14 nt, Human
gaaggccaccugca

SEQ ID NO: 2067769 - RNA, 16 nt, Human
gaaggccaccugcagg

SEQ ID NO: 2067770 - RNA, 17 nt, Human
gaaggccaccugcaggu

SEQ ID NO: 2067771 - RNA, 13 nt, Human
gaaggcagggaaa

SEQ ID NO: 2067772 - RNA, 17 nt, Human
gaaggcagcagguggca

SEQ ID NO: 2067773 - RNA, 20 nt, Human
gaaggguuuuccacccugga

SEQ ID NO: 2067774 - RNA, 13 nt, Human
gaagguaaaauug

SEQ ID NO: 2067775 - RNA, 14 nt, Human
gaaggguccuuccc

SEQ ID NO: 2067776 - RNA, 21 nt, Human
gaaggguccuucccucucccc

SEQ ID NO: 2067777 - RNA, 15 nt, Human
gaaggguuuguggcu

SEQ ID NO: 2067778 - RNA, 21 nt, Human
gaaggguuuguggcugggggc

SEQ ID NO: 2067779 - RNA, 20 nt, Human
gaaggaaaaggcagggagcg

SEQ ID NO: 2067780 - RNA, 21 nt, Human
gaaggacccuucagagguggc

SEQ ID NO: 2067781 - RNA, 17 nt, Human
gaaggaccuauguuugc

SEQ ID NO: 2067782 - RNA, 15 nt, Human
gaaggaccuccugag

SEQ ID NO: 2067783 - RNA, 16 nt, Human
gaaggagaaggaagga

SEQ ID NO: 2067784 - RNA, 15 nt, Human
gaaggagacucaccu

SEQ ID NO: 2067785 - RNA, 17 nt, Human
gaaggagacucaccucu

SEQ ID NO: 2067786 - RNA, 20 nt, Human
gaaggagacucaccucugcc

SEQ ID NO: 2067787 - RNA, 22 nt, Human
gaaggagacucaccucugccuc

SEQ ID NO: 2067788 - RNA, 15 nt, Human
gaaggagacagagcu

SEQ ID NO: 2067789 - RNA, 18 nt, Human
gaaggagacagagcuggu

SEQ ID NO: 2067790 - RNA, 17 nt, Human
gaaggagaaggaaggag

SEQ ID NO: 2067791 - RNA, 23 nt, Human
gaaggacccggaggggccuggca

SEQ ID NO: 2067792 - RNA, 23 nt, Human
gaaggagacucaccucugccuca

SEQ ID NO: 2067793 - RNA, 15 nt, Human
gaaggagagaagggg

SEQ ID NO: 2067794 - RNA, 16 nt, Human
gaaggagagaagggga

SEQ ID NO: 2067795 - RNA, 18 nt, Human
gaaggagagaaggggagg

SEQ ID NO: 2067796 - RNA, 20 nt, Human
gaaggagagaaggggaggag

SEQ ID NO: 2067797 - RNA, 13 nt, Human
gaaggagagccug

SEQ ID NO: 2067798 - RNA, 15 nt, Human
gaaggagagccugcu

SEQ ID NO: 2067799 - RNA, 16 nt, Human
gaaggagagccugcug

SEQ ID NO: 2067800 - RNA, 21 nt, Human
gaagacucauucuucuguacg

SEQ ID NO: 2067801 - RNA, 19 nt, Human
gaagacucauucuucugua

SEQ ID NO: 2067802 - RNA, 15 nt, Human
gaagccacugaagcu

SEQ ID NO: 2067803 - RNA, 18 nt, Human
gaagccacugaagcuggg

SEQ ID NO: 2067804 - RNA, 15 nt, Human
gaagcccaagugaaa

SEQ ID NO: 2067805 - RNA, 16 nt, Human
gaagcccaagugaaau

SEQ ID NO: 2067806 - RNA, 14 nt, Human
gaagcccaauaaac

SEQ ID NO: 2067807 - RNA, 16 nt, Human
gaagcgagcacugacc

SEQ ID NO: 2067808 - RNA, 17 nt, Human
gaagccucuggcuagag

SEQ ID NO: 2067809 - RNA, 13 nt, Human
gaagccucuggcu

SEQ ID NO: 2067810 - RNA, 14 nt, Human
gaagccucuggcua

SEQ ID NO: 2067811 - RNA, 18 nt, Human
gaaggaaaaggcagggag

SEQ ID NO: 2067812 - RNA, 23 nt, Human
gaagcuucuuaaaugagaaggaa

SEQ ID NO: 2067813 - RNA, 22 nt, Human
gaagcgcgccacucgcuucccc

SEQ ID NO: 2067814 - RNA, 15 nt, Human
gaagcuuucucugcu

SEQ ID NO: 2067815 - RNA, 20 nt, Human
gaagcuuucucugcuucagc

SEQ ID NO: 2067816 - RNA, 21 nt, Human
gaagcuuucucugcuucagcu

SEQ ID NO: 2067817 - RNA, 12 nt, Human
gaagcccagcuc

SEQ ID NO: 2067818 - RNA, 13 nt, Human
gaagcccagcucc

SEQ ID NO: 2067819 - RNA, 14 nt, Human
gaagcccagcucca

SEQ ID NO: 2067820 - RNA, 16 nt, Human
gaagcccagcuccagg

SEQ ID NO: 2067821 - RNA, 17 nt, Human
gaagcccagcuccaggg

SEQ ID NO: 2067822 - RNA, 18 nt, Human
gaagcccaauaaaccucu

SEQ ID NO: 2067823 - RNA, 19 nt, Human
gaagcccaauaaaccucuu

SEQ ID NO: 2067824 - RNA, 16 nt, Human
gaagccgggaacagac

SEQ ID NO: 2067825 - RNA, 14 nt, Human
gaagccuauuguaa

SEQ ID NO: 2067826 - RNA, 16 nt, Human
gaagccuauuguaaau

SEQ ID NO: 2067827 - RNA, 16 nt, Human
gaagccgugcccugcc

SEQ ID NO: 2067828 - RNA, 17 nt, Human
gaagccgugcccugccc

SEQ ID NO: 2067829 - RNA, 19 nt, Human
gaagccgugcccugccccc

SEQ ID NO: 2067830 - RNA, 12 nt, Human
gaagccucuggc

SEQ ID NO: 2067831 - RNA, 23 nt, Human
gaaaugcugguuuuucaguuuuc

SEQ ID NO: 2067832 - RNA, 19 nt, Human
gaaauauuaaacccuggau

SEQ ID NO: 2067833 - RNA, 17 nt, Human
gaaauggcuugaagcca

SEQ ID NO: 2067834 - RNA, 18 nt, Human
gaaauggcuugaagccaa

SEQ ID NO: 2067835 - RNA, 15 nt, Human
gaaauguuuuaaggc

SEQ ID NO: 2067836 - RNA, 15 nt, Human
gaaauauaaugcaaa

SEQ ID NO: 2067837 - RNA, 15 nt, Human
gaaauuggcuggaug

SEQ ID NO: 2067838 - RNA, 16 nt, Human
gaaauuggaagagcac

SEQ ID NO: 2067839 - RNA, 14 nt, Human
gaaauuggcuggau

SEQ ID NO: 2067840 - RNA, 19 nt, Human
gaaauugcauuuccugaca

SEQ ID NO: 2067841 - RNA, 22 nt, Human
gaaauuguuuaaguguuguaaa

SEQ ID NO: 2067842 - RNA, 19 nt, Human
gaaauuuaaaagacacugu

SEQ ID NO: 2067843 - RNA, 20 nt, Human
gaaauugucuagcagagcag

SEQ ID NO: 2067844 - RNA, 21 nt, Human
gaaauugucuagcagagcagg

SEQ ID NO: 2067845 - RNA, 13 nt, Human
gaaauuuaaaaga

SEQ ID NO: 2067846 - RNA, 22 nt, Human
gaaauuuaauauagcuauuuuu

SEQ ID NO: 2067847 - RNA, 16 nt, Human
gaaauuuaauucaugu

SEQ ID NO: 2067848 - RNA, 20 nt, Human
gaaauuuaauucauguuucu

SEQ ID NO: 2067849 - RNA, 21 nt, Human
gaaauuuaauucauguuucuu

SEQ ID NO: 2067850 - RNA, 23 nt, Human
gaaauuuaauucauguuucuuaa

SEQ ID NO: 2067851 - RNA, 17 nt, Human
gaaauuuguuauaauga

SEQ ID NO: 2067852 - RNA, 15 nt, Human
gaaauuuuacaauag

SEQ ID NO: 2067853 - RNA, 12 nt, Human
gaaauuuuacca

SEQ ID NO: 2067854 - RNA, 13 nt, Human
gaaauuuuaccaa

SEQ ID NO: 2067855 - RNA, 14 nt, Human
gaaauuuuaccaag

SEQ ID NO: 2067856 - RNA, 16 nt, Human
gaaauuuuaccaaguu

SEQ ID NO: 2067857 - RNA, 21 nt, Human
gaaauuuuaccaaguuauaua

SEQ ID NO: 2067858 - RNA, 16 nt, Human
gaacacugggggaggg

SEQ ID NO: 2067859 - RNA, 17 nt, Human
gaacacugggggagggg

SEQ ID NO: 2067860 - RNA, 13 nt, Human
gaaauauuaugca

SEQ ID NO: 2067861 - RNA, 15 nt, Human
gaaauauuaugcaaa

SEQ ID NO: 2067862 - RNA, 16 nt, Human
gaaauauuaugcaaau

SEQ ID NO: 2067863 - RNA, 17 nt, Human
gaaauauuaugcaaauu

SEQ ID NO: 2067864 - RNA, 18 nt, Human
gaaauauuaugcaaauuc

SEQ ID NO: 2067865 - RNA, 19 nt, Human
gaaauauuaugcaaauucc

SEQ ID NO: 2067866 - RNA, 21 nt, Human
gaaauauuaugcaaauuccca

SEQ ID NO: 2067867 - RNA, 22 nt, Human
gaaauauuaugcaaauucccag

SEQ ID NO: 2067868 - RNA, 23 nt, Human
gaaauauuaugcaaauucccaga

SEQ ID NO: 2067869 - RNA, 13 nt, Human
gaaauaugcaucu

SEQ ID NO: 2067870 - RNA, 21 nt, Human
gaaauaucugaaaauguaugu

SEQ ID NO: 2067871 - RNA, 17 nt, Human
gaaauagucugugugaa

SEQ ID NO: 2067872 - RNA, 15 nt, Human
gaaauagucugugug

SEQ ID NO: 2067873 - RNA, 13 nt, Human
gaaauauaauuga

SEQ ID NO: 2067874 - RNA, 17 nt, Human
gaaauauacacacagca

SEQ ID NO: 2067875 - RNA, 18 nt, Human
gaaauaguucaaagccaa

SEQ ID NO: 2067876 - RNA, 15 nt, Human
gaaauauacacacag

SEQ ID NO: 2067877 - RNA, 16 nt, Human
gaaauacuacuuacca

SEQ ID NO: 2067878 - RNA, 21 nt, Human
gaaauacuacuuaccauaugu

SEQ ID NO: 2067879 - RNA, 19 nt, Human
gaaauacgccagaacugcu

SEQ ID NO: 2067880 - RNA, 20 nt, Human
gaaauacgccagaacugcuu

SEQ ID NO: 2067881 - RNA, 21 nt, Human
gaaauacaauucuacauuguc

SEQ ID NO: 2067882 - RNA, 18 nt, Human
gaaauagacaguauauuu

SEQ ID NO: 2067883 - RNA, 19 nt, Human
gaaauagacaguauauuua

SEQ ID NO: 2067884 - RNA, 14 nt, Human
gaaauaaauagcua

SEQ ID NO: 2067885 - RNA, 15 nt, Human
gaaauaaauagcuau

SEQ ID NO: 2067886 - RNA, 17 nt, Human
gaaauaaauagcuauau

SEQ ID NO: 2067887 - RNA, 21 nt, Human
gaaauaaauagcuauauccau

SEQ ID NO: 2067888 - RNA, 23 nt, Human
gaaauaaauagcuauauccaugu

SEQ ID NO: 2067889 - RNA, 15 nt, Human
gaaauaaaugcccca

SEQ ID NO: 2067890 - RNA, 12 nt, Human
gaaauaaaugua

SEQ ID NO: 2067891 - RNA, 20 nt, Human
gaaauaaauguaccugaugu

SEQ ID NO: 2067892 - RNA, 11 nt, Human
gaaauaauaaa

SEQ ID NO: 2067893 - RNA, 14 nt, Human
gaaauaauaugcau

SEQ ID NO: 2067894 - RNA, 13 nt, Human
gaaauaauaugca

SEQ ID NO: 2067895 - RNA, 13 nt, Human
gaaauaauaaauc

SEQ ID NO: 2067896 - RNA, 14 nt, Human
gaaauaauaaaucu

SEQ ID NO: 2067897 - RNA, 17 nt, Human
gaaauaauaaaucuggu

SEQ ID NO: 2067898 - RNA, 15 nt, Human
gaaauaauaugcauu

SEQ ID NO: 2067899 - RNA, 19 nt, Human
gaaauaauguacaucuggc

SEQ ID NO: 2067900 - RNA, 23 nt, Human
gaaacaucaguuacucugaaggg

SEQ ID NO: 2067901 - RNA, 19 nt, Human
gaaacaucaguuacucuga

SEQ ID NO: 2067902 - RNA, 20 nt, Human
gaaacaucaguuacucugaa

SEQ ID NO: 2067903 - RNA, 22 nt, Human
gaaacaggaccacaaaaaugaa

SEQ ID NO: 2067904 - RNA, 13 nt, Human
gaaacaggagaga

SEQ ID NO: 2067905 - RNA, 17 nt, Human
gaaacaggagagaaagg

SEQ ID NO: 2067906 - RNA, 20 nt, Human
gaaacaugacucguauaugu

SEQ ID NO: 2067907 - RNA, 18 nt, Human
gaaauaaaguuggugaca

SEQ ID NO: 2067908 - RNA, 17 nt, Human
gaaccaccacacccagc

SEQ ID NO: 2067909 - RNA, 16 nt, Human
gaaccaccacacccag

SEQ ID NO: 2067910 - RNA, 14 nt, Human
gaaccgcaggaagc

SEQ ID NO: 2067911 - RNA, 15 nt, Human
gaaccgcaggaagcu

SEQ ID NO: 2067912 - RNA, 16 nt, Human
gaaccgcaggaagcug

SEQ ID NO: 2067913 - RNA, 18 nt, Human
gaacagacaggagaaaug

SEQ ID NO: 2067914 - RNA, 17 nt, Human
gaacagacaggagaaau

SEQ ID NO: 2067915 - RNA, 13 nt, Human
gaaccgcaggaag

SEQ ID NO: 2067916 - RNA, 20 nt, Human
gaaccgcaggaagcugcucc

SEQ ID NO: 2067917 - RNA, 21 nt, Human
gaaccacaucuugcucugcug

SEQ ID NO: 2067918 - RNA, 16 nt, Human
gaacagacuggaagca

SEQ ID NO: 2067919 - RNA, 15 nt, Human
gaacagacuggaagc

SEQ ID NO: 2067920 - RNA, 16 nt, Human
gaacacuuauugcuuu

SEQ ID NO: 2067921 - RNA, 12 nt, Human
gaacagaaggau

SEQ ID NO: 2067922 - RNA, 18 nt, Human
gaacacugggggagggga

SEQ ID NO: 2067923 - RNA, 20 nt, Human
gaacacugggggaggggaca

SEQ ID NO: 2067924 - RNA, 11 nt, Human
gaacagaaaac

SEQ ID NO: 2067925 - RNA, 12 nt, Human
gaacagaaaaca

SEQ ID NO: 2067926 - RNA, 13 nt, Human
gaacagaaaacaa

SEQ ID NO: 2067927 - RNA, 14 nt, Human
gaacagaaaacaac

SEQ ID NO: 2067928 - RNA, 17 nt, Human
gaacagaaaacaacaaa

SEQ ID NO: 2067929 - RNA, 19 nt, Human
gaacagaaaacaacaaaaa

SEQ ID NO: 2067930 - RNA, 20 nt, Human
gaacagaaaacaacaaaaaa

SEQ ID NO: 2067931 - RNA, 23 nt, Human
gaacagaaaacaacaaaaaauaa

SEQ ID NO: 2067932 - RNA, 13 nt, Human
gaacagaaauacc

SEQ ID NO: 2067933 - RNA, 14 nt, Human
gaacagaaggauga

SEQ ID NO: 2067934 - RNA, 19 nt, Human
gaacagaaggaugaaugag

SEQ ID NO: 2067935 - RNA, 17 nt, Human
gaacagacaacagaagu

SEQ ID NO: 2067936 - RNA, 18 nt, Human
gaacagacaacagaaguc

SEQ ID NO: 2067937 - RNA, 19 nt, Human
gaacagacaacagaaguca

SEQ ID NO: 2067938 - RNA, 15 nt, Human
gaacagacaggagaa

SEQ ID NO: 2067939 - RNA, 16 nt, Human
gaacagacaggagaaa

SEQ ID NO: 2067940 - RNA, 19 nt, Human
gaacggaacguuggacuuu

SEQ ID NO: 2067941 - RNA, 23 nt, Human
gaacggacgagauaaugugaacu

SEQ ID NO: 2067942 - RNA, 14 nt, Human
gaacggggagaaaa

SEQ ID NO: 2067943 - RNA, 20 nt, Human
gaaccuguccuugcacacuc

SEQ ID NO: 2067944 - RNA, 12 nt, Human
gaaccuguccuu

SEQ ID NO: 2067945 - RNA, 12 nt, Human
gaaccuggacca

SEQ ID NO: 2067946 - RNA, 16 nt, Human
gaaccuggaccaaagc

SEQ ID NO: 2067947 - RNA, 17 nt, Human
gaaccuggaccaaagcu

SEQ ID NO: 2067948 - RNA, 18 nt, Human
gaaccuggaccaaagcug

SEQ ID NO: 2067949 - RNA, 22 nt, Human
gaacgugacugccccaacuccu

SEQ ID NO: 2067950 - RNA, 15 nt, Human
gaacgucuuaucuaa

SEQ ID NO: 2067951 - RNA, 14 nt, Human
gaacgugacugccc

SEQ ID NO: 2067952 - RNA, 23 nt, Human
gaacgugggaguucagcugcuuc

SEQ ID NO: 2067953 - RNA, 16 nt, Human
gaacgggguccuucaa

SEQ ID NO: 2067954 - RNA, 15 nt, Human
gaacgguaaauuucu

SEQ ID NO: 2067955 - RNA, 17 nt, Human
gaacgguaaauuucugu

SEQ ID NO: 2067956 - RNA, 15 nt, Human
gaacggggagaaaag

SEQ ID NO: 2067957 - RNA, 17 nt, Human
gaacuagugguggcucu

SEQ ID NO: 2067958 - RNA, 19 nt, Human
gaacuagugguggcucuga

SEQ ID NO: 2067959 - RNA, 15 nt, Human
gaacuauaaagaagu

SEQ ID NO: 2067960 - RNA, 13 nt, Human
gaacuagcuggaa

SEQ ID NO: 2067961 - RNA, 19 nt, Human
gaacuagcuggaauuuuuu

SEQ ID NO: 2067962 - RNA, 15 nt, Human
gaacuauuggagggu

SEQ ID NO: 2067963 - RNA, 22 nt, Human
gaacuauuggagggugggagag

SEQ ID NO: 2067964 - RNA, 13 nt, Human
gaacucauuccug

SEQ ID NO: 2067965 - RNA, 14 nt, Human
gaacucauuccugc

SEQ ID NO: 2067966 - RNA, 22 nt, Human
gaacucauuccugccugucucc

SEQ ID NO: 2067967 - RNA, 22 nt, Human
gaacuggguacuuguggacaca

SEQ ID NO: 2067968 - RNA, 14 nt, Human
gaacucccaagaac

SEQ ID NO: 2067969 - RNA, 20 nt, Human
gaacucccaagaacagcagg

SEQ ID NO: 2067970 - RNA, 21 nt, Human
gaacucccaagaacagcaggc

SEQ ID NO: 2067971 - RNA, 16 nt, Human
gaacucauuccugccu

SEQ ID NO: 2067972 - RNA, 22 nt, Human
gaacugugaggguaaaggcuau

SEQ ID NO: 2067973 - RNA, 20 nt, Human
gaacuuauccuaaaacaaau

SEQ ID NO: 2067974 - RNA, 20 nt, Human
gaagaaaagugggccagugu

SEQ ID NO: 2067975 - RNA, 13 nt, Human
gaagaagaaaaca

SEQ ID NO: 2067976 - RNA, 19 nt, Human
gaacuuggaaagaaaugcc

SEQ ID NO: 2067977 - RNA, 20 nt, Human
cucuguugcccaggcuggag

SEQ ID NO: 2067978 - RNA, 22 nt, Human
cucuguugcccaggcuggagug

SEQ ID NO: 2067979 - RNA, 22 nt, Human
cucuguuguguucguucuuguu

SEQ ID NO: 2067980 - RNA, 16 nt, Human
cucuuaaaaaauaaaa

SEQ ID NO: 2067981 - RNA, 17 nt, Human
cucuuaaaaaauaaaaa

SEQ ID NO: 2067982 - RNA, 18 nt, Human
cucuuaaaaaauaaaaac

SEQ ID NO: 2067983 - RNA, 19 nt, Human
cucuuaaaaaauaaaaacu

SEQ ID NO: 2067984 - RNA, 23 nt, Human
cucugugucagguggggcagcuu

SEQ ID NO: 2067985 - RNA, 22 nt, Human
cucugugucagguggggcagcu

SEQ ID NO: 2067986 - RNA, 21 nt, Human
cucugugucagguggggcagc

SEQ ID NO: 2067987 - RNA, 20 nt, Human
cucugugucagguggggcag

SEQ ID NO: 2067988 - RNA, 21 nt, Human
cucugugaacgauuuagaaag

SEQ ID NO: 2067989 - RNA, 18 nt, Human
cucugugaacgauuuaga

SEQ ID NO: 2067990 - RNA, 23 nt, Human
cucugugaacgauuuagaaagaa

SEQ ID NO: 2067991 - RNA, 15 nt, Human
cucugugaccugccc

SEQ ID NO: 2067992 - RNA, 23 nt, Human
cucugugaccugccccgcccagc

SEQ ID NO: 2067993 - RNA, 17 nt, Human
cucuucccccucuccca

SEQ ID NO: 2067994 - RNA, 18 nt, Human
cucuucccccucucccag

SEQ ID NO: 2067995 - RNA, 20 nt, Human
cucuucccccucucccaguu

SEQ ID NO: 2067996 - RNA, 19 nt, Human
cucuucccccucucccagu

SEQ ID NO: 2067997 - RNA, 24 nt, Human
cucuuccccucuaaugcucacgcu

SEQ ID NO: 2067998 - RNA, 15 nt, Human
cucuucccccucucc

SEQ ID NO: 2067999 - RNA, 16 nt, Human
cucuucccccucuccc

SEQ ID NO: 2068000 - RNA, 12 nt, Human
cucuuccccaga

SEQ ID NO: 2068001 - RNA, 21 nt, Human
cucuuccccagaaaggagacu

SEQ ID NO: 2068002 - RNA, 15 nt, Human
cucuuacccuucugu

SEQ ID NO: 2068003 - RNA, 16 nt, Human
cucuuacccuucugug

SEQ ID NO: 2068004 - RNA, 22 nt, Human
cucuuaagcuuccgccgucuca

SEQ ID NO: 2068005 - RNA, 13 nt, Human
cucuucuccaggc

SEQ ID NO: 2068006 - RNA, 15 nt, Human
cucuucuccaggcug

SEQ ID NO: 2068007 - RNA, 13 nt, Human
cucuucuccacug

SEQ ID NO: 2068008 - RNA, 12 nt, Human
cucuucuccacu

SEQ ID NO: 2068009 - RNA, 18 nt, Human
cucuuccuugcuguguca

SEQ ID NO: 2068010 - RNA, 15 nt, Human
cucuucuagagccgu

SEQ ID NO: 2068011 - RNA, 20 nt, Human
cucugccucugacacacagc

SEQ ID NO: 2068012 - RNA, 19 nt, Human
cucugccucugacacacag

SEQ ID NO: 2068013 - RNA, 16 nt, Human
cucugccucugacaca

SEQ ID NO: 2068014 - RNA, 10 nt, Human
cucugccuga

SEQ ID NO: 2068015 - RNA, 17 nt, Human
cucugccucugccugca

SEQ ID NO: 2068016 - RNA, 18 nt, Human
cucuggauugugggaauu

SEQ ID NO: 2068017 - RNA, 13 nt, Human
cucuggcccugcc

SEQ ID NO: 2068018 - RNA, 14 nt, Human
cucuggcccugccu

SEQ ID NO: 2068019 - RNA, 10 nt, Human
cucuggccag

SEQ ID NO: 2068020 - RNA, 15 nt, Human
cucuggccaggaugg

SEQ ID NO: 2068021 - RNA, 19 nt, Human
cucuggccaggauggaggg

SEQ ID NO: 2068022 - RNA, 22 nt, Human
cucuguccugggagugagcugg

SEQ ID NO: 2068023 - RNA, 15 nt, Human
cucuguccugggagu

SEQ ID NO: 2068024 - RNA, 13 nt, Human
cucuguccuggga

SEQ ID NO: 2068025 - RNA, 14 nt, Human
cucuguccugggag

SEQ ID NO: 2068026 - RNA, 15 nt, Human
cucugggcaggaccu

SEQ ID NO: 2068027 - RNA, 14 nt, Human
cucuggcguguggg

SEQ ID NO: 2068028 - RNA, 16 nt, Human
cucuggcuagaggcca

SEQ ID NO: 2068029 - RNA, 16 nt, Human
cucuggcgacaguuuu

SEQ ID NO: 2068030 - RNA, 14 nt, Human
cucuggcuagaggc

SEQ ID NO: 2068031 - RNA, 23 nt, Human
cucugggcaggaccucagagucc

SEQ ID NO: 2068032 - RNA, 23 nt, Human
cucugggccaagucaaagacauu

SEQ ID NO: 2068033 - RNA, 17 nt, Human
cucugggcugccaugug

SEQ ID NO: 2068034 - RNA, 10 nt, Human
cucugggcuu

SEQ ID NO: 2068035 - RNA, 22 nt, Human
cucugggcuuugauuccaucuc

SEQ ID NO: 2068036 - RNA, 23 nt, Human
cucugggcuuugauuccaucucc

SEQ ID NO: 2068037 - RNA, 13 nt, Human
cucugucgcccag

SEQ ID NO: 2068038 - RNA, 17 nt, Human
cucugucgcccagucug

SEQ ID NO: 2068039 - RNA, 15 nt, Human
cucugucuaccaucu

SEQ ID NO: 2068040 - RNA, 16 nt, Human
cucugucuaccaucuc

SEQ ID NO: 2068041 - RNA, 17 nt, Human
cucugucuaccaucucc

SEQ ID NO: 2068042 - RNA, 20 nt, Human
cucugucuaccaucucccuc

SEQ ID NO: 2068043 - RNA, 21 nt, Human
cucugucuaccaucucccucg

SEQ ID NO: 2068044 - RNA, 22 nt, Human
cucugucuaccaucucccucga

SEQ ID NO: 2068045 - RNA, 19 nt, Human
cucugucgcccagucugga

SEQ ID NO: 2068046 - RNA, 18 nt, Human
cucugucgcccagucugg

SEQ ID NO: 2068047 - RNA, 17 nt, Human
cucugaguaucuccucg

SEQ ID NO: 2068048 - RNA, 16 nt, Human
cucugaguuuaccauu

SEQ ID NO: 2068049 - RNA, 17 nt, Human
cucugaguuuaccauuu

SEQ ID NO: 2068050 - RNA, 18 nt, Human
cucugaguuuaccauuug

SEQ ID NO: 2068051 - RNA, 20 nt, Human
cucugaguuuaccauuugua

SEQ ID NO: 2068052 - RNA, 21 nt, Human
cucugaguuuaccauuuguaa

SEQ ID NO: 2068053 - RNA, 22 nt, Human
cucugaguuuaccauuuguaau

SEQ ID NO: 2068054 - RNA, 13 nt, Human
cucugcacaagcu

SEQ ID NO: 2068055 - RNA, 14 nt, Human
cucugcacaagcug

SEQ ID NO: 2068056 - RNA, 15 nt, Human
cucugcacaagcugc

SEQ ID NO: 2068057 - RNA, 19 nt, Human
cucugccaugaacuggagg

SEQ ID NO: 2068058 - RNA, 20 nt, Human
cucugccaugaacuggaggc

SEQ ID NO: 2068059 - RNA, 13 nt, Human
cucugccggcucu

SEQ ID NO: 2068060 - RNA, 17 nt, Human
cucugaagggcaucaug

SEQ ID NO: 2068061 - RNA, 19 nt, Human
cucugaagggcaucaugca

SEQ ID NO: 2068062 - RNA, 22 nt, Human
cucugaagggcaucaugcaucu

SEQ ID NO: 2068063 - RNA, 22 nt, Human
cucugaaggacauugcggacag

SEQ ID NO: 2068064 - RNA, 18 nt, Human
cucgcugcacaaauacuc

SEQ ID NO: 2068065 - RNA, 19 nt, Human
cucugaaggacccuucaga

SEQ ID NO: 2068066 - RNA, 12 nt, Human
cucugaauucca

SEQ ID NO: 2068067 - RNA, 18 nt, Human
cucugaauuccaaguaga

SEQ ID NO: 2068068 - RNA, 16 nt, Human
cucugaaguuggacag

SEQ ID NO: 2068069 - RNA, 17 nt, Human
cucugaaguuggacagc

SEQ ID NO: 2068070 - RNA, 18 nt, Human
cucugaaguuggacagca

SEQ ID NO: 2068071 - RNA, 23 nt, Human
cucugaagucacaucacaggaca

SEQ ID NO: 2068072 - RNA, 23 nt, Human
cucugaagggcaucaugcaucuu

SEQ ID NO: 2068073 - RNA, 13 nt, Human
cucugaagucaca

SEQ ID NO: 2068074 - RNA, 19 nt, Human
cucugacacacagcucugu

SEQ ID NO: 2068075 - RNA, 23 nt, Human
cucugacagaagaaccccagggu

SEQ ID NO: 2068076 - RNA, 18 nt, Human
cucugacacacagcucug

SEQ ID NO: 2068077 - RNA, 17 nt, Human
cucugacacacagcucu

SEQ ID NO: 2068078 - RNA, 16 nt, Human
cucugacacacagcuc

SEQ ID NO: 2068079 - RNA, 15 nt, Human
cucugacacacagcu

SEQ ID NO: 2068080 - RNA, 14 nt, Human
cucugacacacagc

SEQ ID NO: 2068081 - RNA, 17 nt, Human
cucugaccgaaacagcg

SEQ ID NO: 2068082 - RNA, 19 nt, Human
cucugaccgaaacagcgcu

SEQ ID NO: 2068083 - RNA, 22 nt, Human
cucugaccgaaacagcgcuggg

SEQ ID NO: 2068084 - RNA, 23 nt, Human
cucugaccgaaacagcgcugggu

SEQ ID NO: 2068085 - RNA, 13 nt, Human
cucugacucccaa

SEQ ID NO: 2068086 - RNA, 18 nt, Human
cucugacucccaaagagc

SEQ ID NO: 2068087 - RNA, 21 nt, Human
cucugacucccaaagagcugc

SEQ ID NO: 2068088 - RNA, 22 nt, Human
cucugacucccaaagagcugcc

SEQ ID NO: 2068089 - RNA, 23 nt, Human
cucugacucccaaagagcugccu

SEQ ID NO: 2068090 - RNA, 16 nt, Human
cucugaccugcaggcc

SEQ ID NO: 2068091 - RNA, 13 nt, Human
cucugaccugcag

SEQ ID NO: 2068092 - RNA, 14 nt, Human
cucugaccugcagg

SEQ ID NO: 2068093 - RNA, 15 nt, Human
cucugaccugcaggc

SEQ ID NO: 2068094 - RNA, 14 nt, Human
cucugaggacacua

SEQ ID NO: 2068095 - RNA, 12 nt, Human
cucugaggacac

SEQ ID NO: 2068096 - RNA, 16 nt, Human
cucugaguaucuccuc

SEQ ID NO: 2068097 - RNA, 16 nt, Human
cucugaggacacuaac

SEQ ID NO: 2068098 - RNA, 18 nt, Human
cucugacuggcacagucu

SEQ ID NO: 2068099 - RNA, 20 nt, Human
cucuuuguucuaaagaugga

SEQ ID NO: 2068100 - RNA, 21 nt, Human
cucuucugccggcccuggggc

SEQ ID NO: 2068101 - RNA, 15 nt, Human
cucuuuuagucauuu

SEQ ID NO: 2068102 - RNA, 20 nt, Human
cucuuuguggcagaaguguu

SEQ ID NO: 2068103 - RNA, 19 nt, Human
cucuuuuacccaauaagau

SEQ ID NO: 2068104 - RNA, 14 nt, Human
cucuuuucaaaaca

SEQ ID NO: 2068105 - RNA, 18 nt, Human
cugaaaguguuuccuuca

SEQ ID NO: 2068106 - RNA, 22 nt, Human
cugaaaguguuuccuucauuuc

SEQ ID NO: 2068107 - RNA, 16 nt, Human
cucuucuccaggcugu

SEQ ID NO: 2068108 - RNA, 20 nt, Human
cucuucugccggcccugggg

SEQ ID NO: 2068109 - RNA, 12 nt, Human
cucuucugcucc

SEQ ID NO: 2068110 - RNA, 13 nt, Human
cucuucugcucca

SEQ ID NO: 2068111 - RNA, 15 nt, Human
cugaacauuccagag

SEQ ID NO: 2068112 - RNA, 14 nt, Human
cugaaccaucccug

SEQ ID NO: 2068113 - RNA, 16 nt, Human
cugaaccaucccugau

SEQ ID NO: 2068114 - RNA, 13 nt, Human
cugaagaacagua

SEQ ID NO: 2068115 - RNA, 11 nt, Human
cugaacaaaaa

SEQ ID NO: 2068116 - RNA, 13 nt, Human
cugaacaaaaaaa

SEQ ID NO: 2068117 - RNA, 16 nt, Human
cugaacaaaaaauaaa

SEQ ID NO: 2068118 - RNA, 22 nt, Human
cugaauggaagguuuguauauu

SEQ ID NO: 2068119 - RNA, 17 nt, Human
cugaaugcucugugcga

SEQ ID NO: 2068120 - RNA, 12 nt, Human
cugaaugcucug

SEQ ID NO: 2068121 - RNA, 19 nt, Human
cugaaugguuuucaaaaua

SEQ ID NO: 2068122 - RNA, 20 nt, Human
cugaaugguuuucaaaauaa

SEQ ID NO: 2068123 - RNA, 11 nt, Human
cugaauguucu

SEQ ID NO: 2068124 - RNA, 12 nt, Human
cugaauguucug

SEQ ID NO: 2068125 - RNA, 13 nt, Human
cugaauguucuga

SEQ ID NO: 2068126 - RNA, 14 nt, Human
cugaauguucugac

SEQ ID NO: 2068127 - RNA, 16 nt, Human
cugaauguucugacau

SEQ ID NO: 2068128 - RNA, 13 nt, Human
cugaauguaauuu

SEQ ID NO: 2068129 - RNA, 14 nt, Human
cugaauguaauuug

SEQ ID NO: 2068130 - RNA, 15 nt, Human
cugaauguaauuugu

SEQ ID NO: 2068131 - RNA, 16 nt, Human
cugaauguaauuugug

SEQ ID NO: 2068132 - RNA, 17 nt, Human
cugaauguaauuugugu

SEQ ID NO: 2068133 - RNA, 18 nt, Human
cugaauguaauuugugua

SEQ ID NO: 2068134 - RNA, 22 nt, Human
cugaauguaauuuguguaauaa

SEQ ID NO: 2068135 - RNA, 11 nt, Human
cugaauguauu

SEQ ID NO: 2068136 - RNA, 22 nt, Human
cugaauguucugacauuaacag

SEQ ID NO: 2068137 - RNA, 23 nt, Human
cugaauguucugacauuaacagu

SEQ ID NO: 2068138 - RNA, 17 nt, Human
cugaauguucugacauu

SEQ ID NO: 2068139 - RNA, 18 nt, Human
cugaauguucugacauua

SEQ ID NO: 2068140 - RNA, 19 nt, Human
cugaauguucugacauuaa

SEQ ID NO: 2068141 - RNA, 20 nt, Human
cugaauguucugacauuaac

SEQ ID NO: 2068142 - RNA, 20 nt, Human
cugaauuaaugacagagcca

SEQ ID NO: 2068143 - RNA, 22 nt, Human
cugaauuaaugacagagccagu

SEQ ID NO: 2068144 - RNA, 21 nt, Human
cugaauuaaugacagagccag

SEQ ID NO: 2068145 - RNA, 17 nt, Human
cugaagucacacaguga

SEQ ID NO: 2068146 - RNA, 19 nt, Human
cugaagucacacagugagu

SEQ ID NO: 2068147 - RNA, 18 nt, Human
cugaagucacacagugag

SEQ ID NO: 2068148 - RNA, 15 nt, Human
cugaagucacugcac

SEQ ID NO: 2068149 - RNA, 14 nt, Human
cugaagucacugca

SEQ ID NO: 2068150 - RNA, 13 nt, Human
cugaagucacugc

SEQ ID NO: 2068151 - RNA, 21 nt, Human
cugaagucacaucacaggaca

SEQ ID NO: 2068152 - RNA, 22 nt, Human
cugaagucacaucacaggacac

SEQ ID NO: 2068153 - RNA, 21 nt, Human
cugaagucacacagugagucg

SEQ ID NO: 2068154 - RNA, 19 nt, Human
cugaagucacaucacagga

SEQ ID NO: 2068155 - RNA, 16 nt, Human
cugaaguuaacagaga

SEQ ID NO: 2068156 - RNA, 15 nt, Human
cugaaguuucauuua

SEQ ID NO: 2068157 - RNA, 17 nt, Human
cugaaguuucauuuaug

SEQ ID NO: 2068158 - RNA, 14 nt, Human
cugaaguuggacag

SEQ ID NO: 2068159 - RNA, 15 nt, Human
cugaaguuggacagc

SEQ ID NO: 2068160 - RNA, 22 nt, Human
cugaaguuggagugaguguggc

SEQ ID NO: 2068161 - RNA, 22 nt, Human
cugaagucccagauacuugggg

SEQ ID NO: 2068162 - RNA, 15 nt, Human
cugagccaaagagaa

SEQ ID NO: 2068163 - RNA, 13 nt, Human
cugagcagggaga

SEQ ID NO: 2068164 - RNA, 13 nt, Human
cugagcaccuccc

SEQ ID NO: 2068165 - RNA, 15 nt, Human
cugagcaccucccag

SEQ ID NO: 2068166 - RNA, 16 nt, Human
cugagcaccucccagc

SEQ ID NO: 2068167 - RNA, 17 nt, Human
cugagcaccucccagcc

SEQ ID NO: 2068168 - RNA, 18 nt, Human
cugagcaccucccagccc

SEQ ID NO: 2068169 - RNA, 21 nt, Human
cugagcaccucccagccccug

SEQ ID NO: 2068170 - RNA, 22 nt, Human
cugagcaccucccagccccugc

SEQ ID NO: 2068171 - RNA, 13 nt, Human
cugagcaccaggg

SEQ ID NO: 2068172 - RNA, 21 nt, Human
cugagcagacuggugagcaga

SEQ ID NO: 2068173 - RNA, 22 nt, Human
cugagcagacuggugagcagac

SEQ ID NO: 2068174 - RNA, 16 nt, Human
cugagcagacugguga

SEQ ID NO: 2068175 - RNA, 17 nt, Human
cugagcagacuggugag

SEQ ID NO: 2068176 - RNA, 19 nt, Human
cugagauuauuuuaaucua

SEQ ID NO: 2068177 - RNA, 21 nt, Human
cugagcaaauguggcuccugg

SEQ ID NO: 2068178 - RNA, 20 nt, Human
cugagcaaauguggcuccug

SEQ ID NO: 2068179 - RNA, 17 nt, Human
cugagcaaauguggcuc

SEQ ID NO: 2068180 - RNA, 15 nt, Human
cugagcaaauguggc

SEQ ID NO: 2068181 - RNA, 18 nt, Human
cugagcaagacccugucu

SEQ ID NO: 2068182 - RNA, 20 nt, Human
cugagcaagacccugucucu

SEQ ID NO: 2068183 - RNA, 12 nt, Human
cugagcaaagca

SEQ ID NO: 2068184 - RNA, 16 nt, Human
cugagcaacagaguga

SEQ ID NO: 2068185 - RNA, 23 nt, Human
cugagcaacagagugagacccug

SEQ ID NO: 2068186 - RNA, 24 nt, Human
cugagcaacagagugagacccugu

SEQ ID NO: 2068187 - RNA, 13 nt, Human
cugacuccuuaga

SEQ ID NO: 2068188 - RNA, 15 nt, Human
cugacuccuuagaga

SEQ ID NO: 2068189 - RNA, 19 nt, Human
cugacugauguugagggaa

SEQ ID NO: 2068190 - RNA, 18 nt, Human
cugacucccaaagagcug

SEQ ID NO: 2068191 - RNA, 19 nt, Human
cugacucccaaagagcugc

SEQ ID NO: 2068192 - RNA, 20 nt, Human
cugacucccaaagagcugcc

SEQ ID NO: 2068193 - RNA, 21 nt, Human
cugacucccaaagagcugccu

SEQ ID NO: 2068194 - RNA, 22 nt, Human
cugacucccaaagagcugccua

SEQ ID NO: 2068195 - RNA, 23 nt, Human
cugacucccaaagagcugccuaa

SEQ ID NO: 2068196 - RNA, 17 nt, Human
cugacuguacuccuccc

SEQ ID NO: 2068197 - RNA, 18 nt, Human
cugacuuugcucuuucuu

SEQ ID NO: 2068198 - RNA, 23 nt, Human
cugagaaaaugagugacuagacg

SEQ ID NO: 2068199 - RNA, 19 nt, Human
cugagaaaacgaaacugcu

SEQ ID NO: 2068200 - RNA, 21 nt, Human
cugagaaaacgaaacugcucu

SEQ ID NO: 2068201 - RNA, 22 nt, Human
cugagaaaacgaaacugcucua

SEQ ID NO: 2068202 - RNA, 18 nt, Human
cugacagacacaggcccg

SEQ ID NO: 2068203 - RNA, 17 nt, Human
cugacagacacaggccc

SEQ ID NO: 2068204 - RNA, 17 nt, Human
cugaccagccuccaugc

SEQ ID NO: 2068205 - RNA, 16 nt, Human
cugacagacacaggcc

SEQ ID NO: 2068206 - RNA, 21 nt, Human
cugaauuuggccugcacuaau

SEQ ID NO: 2068207 - RNA, 23 nt, Human
cugaccagccuccaugcugccuc

SEQ ID NO: 2068208 - RNA, 21 nt, Human
cugaccagccuccaugcugcc

SEQ ID NO: 2068209 - RNA, 23 nt, Human
cugaccuuugucaucuuucuucu

SEQ ID NO: 2068210 - RNA, 21 nt, Human
cugaccuuugucaucuuucuu

SEQ ID NO: 2068211 - RNA, 23 nt, Human
cugacgacuugagugcucaguag

SEQ ID NO: 2068212 - RNA, 13 nt, Human
cugacgaggcugg

SEQ ID NO: 2068213 - RNA, 14 nt, Human
cugacgaggcuggg

SEQ ID NO: 2068214 - RNA, 15 nt, Human
cugacgaggcugggc

SEQ ID NO: 2068215 - RNA, 16 nt, Human
cugacgaggcugggcc

SEQ ID NO: 2068216 - RNA, 17 nt, Human
cugacgaggcugggcca

SEQ ID NO: 2068217 - RNA, 19 nt, Human
cugacgaggcugggccaag

SEQ ID NO: 2068218 - RNA, 20 nt, Human
cugacgaggcugggccaagc

SEQ ID NO: 2068219 - RNA, 21 nt, Human
cugacgaggcugggccaagcc

SEQ ID NO: 2068220 - RNA, 14 nt, Human
cugacggcgccccc

SEQ ID NO: 2068221 - RNA, 19 nt, Human
cugacggcgcccccagugu

SEQ ID NO: 2068222 - RNA, 20 nt, Human
cugacggcgcccccagugug

SEQ ID NO: 2068223 - RNA, 22 nt, Human
cugacggcgcccccagugugca

SEQ ID NO: 2068224 - RNA, 14 nt, Human
cugaggcuggacuc

SEQ ID NO: 2068225 - RNA, 17 nt, Human
cugaggcuggacuccag

SEQ ID NO: 2068226 - RNA, 18 nt, Human
cugaggcuggacuccaga

SEQ ID NO: 2068227 - RNA, 24 nt, Human
cugaggcuggacuccagaucugca

SEQ ID NO: 2068228 - RNA, 15 nt, Human
cugaggcugagacug

SEQ ID NO: 2068229 - RNA, 18 nt, Human
cugaggcucuuucugggc

SEQ ID NO: 2068230 - RNA, 20 nt, Human
cugaggcucuuucugggcca

SEQ ID NO: 2068231 - RNA, 18 nt, Human
cugagggaccagccaaga

SEQ ID NO: 2068232 - RNA, 22 nt, Human
cugagucacccaugaagacagg

SEQ ID NO: 2068233 - RNA, 18 nt, Human
cugagucaugaucucccu

SEQ ID NO: 2068234 - RNA, 19 nt, Human
cugagucaugaucucccug

SEQ ID NO: 2068235 - RNA, 22 nt, Human
cugagccccugggacugcugcu

SEQ ID NO: 2068236 - RNA, 16 nt, Human
cugagccccugggacu

SEQ ID NO: 2068237 - RNA, 19 nt, Human
cugagccccugggacugcu

SEQ ID NO: 2068238 - RNA, 15 nt, Human
cugaggcucuuucug

SEQ ID NO: 2068239 - RNA, 16 nt, Human
cugaggcucuuucugg

SEQ ID NO: 2068240 - RNA, 18 nt, Human
cugaggcggguggaucac

SEQ ID NO: 2068241 - RNA, 13 nt, Human
cugaucagucuaa

SEQ ID NO: 2068242 - RNA, 20 nt, Human
cugaucacuaugcauuuuaa

SEQ ID NO: 2068243 - RNA, 19 nt, Human
cugauauuccaugaaugua

SEQ ID NO: 2068244 - RNA, 18 nt, Human
cugauauuccaugaaugu

SEQ ID NO: 2068245 - RNA, 17 nt, Human
cugaguucaagggcugu

SEQ ID NO: 2068246 - RNA, 18 nt, Human
cugaucaagucaccggag

SEQ ID NO: 2068247 - RNA, 22 nt, Human
cugaucaagucaccggagcuuu

SEQ ID NO: 2068248 - RNA, 22 nt, Human
cugauauauguguuuuucacau

SEQ ID NO: 2068249 - RNA, 12 nt, Human
cugauauagaau

SEQ ID NO: 2068250 - RNA, 15 nt, Human
cugauauagaauugc

SEQ ID NO: 2068251 - RNA, 22 nt, Human
cugauauagaucacauaacaga

SEQ ID NO: 2068252 - RNA, 15 nt, Human
cugauauauguguuu

SEQ ID NO: 2068253 - RNA, 21 nt, Human
cugauauauguguuuuucaca

SEQ ID NO: 2068254 - RNA, 20 nt, Human
cugagucaugaucucccugc

SEQ ID NO: 2068255 - RNA, 21 nt, Human
cugagucaugaucucccugcc

SEQ ID NO: 2068256 - RNA, 22 nt, Human
cugagucaugaucucccugccg

SEQ ID NO: 2068257 - RNA, 21 nt, Human
cugaguugguguugacaugug

SEQ ID NO: 2068258 - RNA, 15 nt, Human
cugaguuuaccauuu

SEQ ID NO: 2068259 - RNA, 17 nt, Human
cugaguuuaccauuugu

SEQ ID NO: 2068260 - RNA, 18 nt, Human
cugaguuuaccauuugua

SEQ ID NO: 2068261 - RNA, 19 nt, Human
cugaguuuaccauuuguaa

SEQ ID NO: 2068262 - RNA, 20 nt, Human
cugaguuuaccauuuguaau

SEQ ID NO: 2068263 - RNA, 21 nt, Human
cugaguuuaccauuuguaaua

SEQ ID NO: 2068264 - RNA, 22 nt, Human
cugaguuuaccauuuguaauaa

SEQ ID NO: 2068265 - RNA, 23 nt, Human
cugaguuuaccauuuguaauaaa

SEQ ID NO: 2068266 - RNA, 20 nt, Human
cugaguugacuugacagaac

SEQ ID NO: 2068267 - RNA, 22 nt, Human
cugcacagugcaucucagccca

SEQ ID NO: 2068268 - RNA, 23 nt, Human
cugcacagauggauuugccugug

SEQ ID NO: 2068269 - RNA, 20 nt, Human
cugcacagauggauuugccu

SEQ ID NO: 2068270 - RNA, 12 nt, Human
cugcacagaugg

SEQ ID NO: 2068271 - RNA, 13 nt, Human
cugcacagaugga

SEQ ID NO: 2068272 - RNA, 19 nt, Human
cugcaagugagcaaaccug

SEQ ID NO: 2068273 - RNA, 22 nt, Human
cugcaagugagcaaaccugccc

SEQ ID NO: 2068274 - RNA, 19 nt, Human
cugcaagugacaucucuuu

SEQ ID NO: 2068275 - RNA, 22 nt, Human
cugcacaagcugcacccucagg

SEQ ID NO: 2068276 - RNA, 12 nt, Human
cugcaauagaga

SEQ ID NO: 2068277 - RNA, 14 nt, Human
cugcaauagagacu

SEQ ID NO: 2068278 - RNA, 15 nt, Human
cugcaauagagacug

SEQ ID NO: 2068279 - RNA, 12 nt, Human
cugcaccgggcc

SEQ ID NO: 2068280 - RNA, 13 nt, Human
cugcacccucagg

SEQ ID NO: 2068281 - RNA, 14 nt, Human
cugcacccucaggc

SEQ ID NO: 2068282 - RNA, 16 nt, Human
cugcacccucaggcag

SEQ ID NO: 2068283 - RNA, 19 nt, Human
cugcacugacccacagccu

SEQ ID NO: 2068284 - RNA, 20 nt, Human
cugcacugacccacagccuc

SEQ ID NO: 2068285 - RNA, 19 nt, Human
cugcacucuuaagcuuccg

SEQ ID NO: 2068286 - RNA, 18 nt, Human
cugcacuugcagacucua

SEQ ID NO: 2068287 - RNA, 17 nt, Human
cugauuguuucauugcg

SEQ ID NO: 2068288 - RNA, 12 nt, Human
cugauuucagga

SEQ ID NO: 2068289 - RNA, 13 nt, Human
cugauuucuugcu

SEQ ID NO: 2068290 - RNA, 14 nt, Human
cugauuucuugcuu

SEQ ID NO: 2068291 - RNA, 17 nt, Human
cugauuggugcaacccu

SEQ ID NO: 2068292 - RNA, 15 nt, Human
cugauguaaaugaag

SEQ ID NO: 2068293 - RNA, 16 nt, Human
cugauguaaaugaagu

SEQ ID NO: 2068294 - RNA, 17 nt, Human
cugauguaaaugaagua

SEQ ID NO: 2068295 - RNA, 12 nt, Human
cugauuuuaaca

SEQ ID NO: 2068296 - RNA, 13 nt, Human
cugauuuuaacaa

SEQ ID NO: 2068297 - RNA, 14 nt, Human
cugauuuuaacaau

SEQ ID NO: 2068298 - RNA, 17 nt, Human
cugauuuuaacaauaac

SEQ ID NO: 2068299 - RNA, 22 nt, Human
cugauuuuaacaauaacuacug

SEQ ID NO: 2068300 - RNA, 11 nt, Human
cugccaggcau

SEQ ID NO: 2068301 - RNA, 13 nt, Human
cugccaggcaugg

SEQ ID NO: 2068302 - RNA, 19 nt, Human
cugccacuuugguacaugg

SEQ ID NO: 2068303 - RNA, 15 nt, Human
cugccacuaggcugg

SEQ ID NO: 2068304 - RNA, 16 nt, Human
cugccacuaggcuggg

SEQ ID NO: 2068305 - RNA, 18 nt, Human
cugccacuaggcugggug

SEQ ID NO: 2068306 - RNA, 19 nt, Human
cugccacuaggcugggugc

SEQ ID NO: 2068307 - RNA, 22 nt, Human
cugccacuaggcugggugccca

SEQ ID NO: 2068308 - RNA, 23 nt, Human
cugccacuaggcugggugcccac

SEQ ID NO: 2068309 - RNA, 14 nt, Human
cugccaugccagcu

SEQ ID NO: 2068310 - RNA, 23 nt, Human
cugccacuuugguacauggccag

SEQ ID NO: 2068311 - RNA, 15 nt, Human
cugccaugccagcuu

SEQ ID NO: 2068312 - RNA, 15 nt, Human
cugccaugaacugga

SEQ ID NO: 2068313 - RNA, 18 nt, Human
cugccaugaacuggaggc

SEQ ID NO: 2068314 - RNA, 23 nt, Human
cugccaugaacuggaggccagga

SEQ ID NO: 2068315 - RNA, 17 nt, Human
cugcccagccuccaagc

SEQ ID NO: 2068316 - RNA, 20 nt, Human
cugcccagaauucccagcug

SEQ ID NO: 2068317 - RNA, 21 nt, Human
cugcccagaauucccagcugu

SEQ ID NO: 2068318 - RNA, 22 nt, Human
cugcccagaauucccagcuguc

SEQ ID NO: 2068319 - RNA, 18 nt, Human
cugcccagaccccucugg

SEQ ID NO: 2068320 - RNA, 21 nt, Human
cugcccagaccccucuggcca

SEQ ID NO: 2068321 - RNA, 22 nt, Human
cugcccagaccccucuggccag

SEQ ID NO: 2068322 - RNA, 23 nt, Human
cugcccagaccccucuggccagg

SEQ ID NO: 2068323 - RNA, 13 nt, Human
cugcccagagcug

SEQ ID NO: 2068324 - RNA, 14 nt, Human
cugcccagagcugg

SEQ ID NO: 2068325 - RNA, 15 nt, Human
cugcccagagcuggg

SEQ ID NO: 2068326 - RNA, 17 nt, Human
cugcccagagcugggug

SEQ ID NO: 2068327 - RNA, 18 nt, Human
cugcccagagcuggguga

SEQ ID NO: 2068328 - RNA, 12 nt, Human
cugcccaccugu

SEQ ID NO: 2068329 - RNA, 11 nt, Human
cugcccagugu

SEQ ID NO: 2068330 - RNA, 12 nt, Human
cugcccaguguu

SEQ ID NO: 2068331 - RNA, 20 nt, Human
cugcccaguguuguuuguaa

SEQ ID NO: 2068332 - RNA, 21 nt, Human
cugcccaguguuguuuguaaa

SEQ ID NO: 2068333 - RNA, 22 nt, Human
cugcccaguguuguuuguaaau

SEQ ID NO: 2068334 - RNA, 23 nt, Human
cugcccaguguuguuuguaaaua

SEQ ID NO: 2068335 - RNA, 18 nt, Human
cugcccagaucccagaag

SEQ ID NO: 2068336 - RNA, 15 nt, Human
cugcccaucacaggg

SEQ ID NO: 2068337 - RNA, 18 nt, Human
cugcccaucacaggguug

SEQ ID NO: 2068338 - RNA, 22 nt, Human
cugcccaucacaggguugggcc

SEQ ID NO: 2068339 - RNA, 15 nt, Human
cugccccaaacaaau

SEQ ID NO: 2068340 - RNA, 15 nt, Human
cugcccauuccccag

SEQ ID NO: 2068341 - RNA, 16 nt, Human
cugcacuggaguccag

SEQ ID NO: 2068342 - RNA, 23 nt, Human
cugcacuugcagacucuacagag

SEQ ID NO: 2068343 - RNA, 16 nt, Human
cugcacucuagccgga

SEQ ID NO: 2068344 - RNA, 13 nt, Human
cugcaucaucugu

SEQ ID NO: 2068345 - RNA, 14 nt, Human
cugcaucaucugua

SEQ ID NO: 2068346 - RNA, 17 nt, Human
cugcaucaucuguagau

SEQ ID NO: 2068347 - RNA, 18 nt, Human
cugcaucaucuguagaua

SEQ ID NO: 2068348 - RNA, 22 nt, Human
cugcaucguuucaucuuccaac

SEQ ID NO: 2068349 - RNA, 14 nt, Human
cugcaucuacucag

SEQ ID NO: 2068350 - RNA, 17 nt, Human
cugcaucuacucaggcc

SEQ ID NO: 2068351 - RNA, 20 nt, Human
cugcauccguaguucccuga

SEQ ID NO: 2068352 - RNA, 21 nt, Human
cugcauccguaguucccugaa

SEQ ID NO: 2068353 - RNA, 19 nt, Human
cugcauccguaguucccug

SEQ ID NO: 2068354 - RNA, 16 nt, Human
cugcaucguuucaucu

SEQ ID NO: 2068355 - RNA, 12 nt, Human
cugcauggaccu

SEQ ID NO: 2068356 - RNA, 13 nt, Human
cugcauggaccua

SEQ ID NO: 2068357 - RNA, 16 nt, Human
cugcauggaccuaaca

SEQ ID NO: 2068358 - RNA, 17 nt, Human
cugcauggaccuaacau

SEQ ID NO: 2068359 - RNA, 18 nt, Human
cugcauggaccuaacauu

SEQ ID NO: 2068360 - RNA, 19 nt, Human
cugcauggaccuaacauuc

SEQ ID NO: 2068361 - RNA, 22 nt, Human
cugcauggaccuaacauucgau

SEQ ID NO: 2068362 - RNA, 11 nt, Human
cugcaugcaga

SEQ ID NO: 2068363 - RNA, 15 nt, Human
cugcaugcagaaagg

SEQ ID NO: 2068364 - RNA, 22 nt, Human
cugccacacgucugacccucuc

SEQ ID NO: 2068365 - RNA, 23 nt, Human
cugccacacgucugacccucucc

SEQ ID NO: 2068366 - RNA, 24 nt, Human
cugccacacgucugacccucucca

SEQ ID NO: 2068367 - RNA, 15 nt, Human
cugccaccugcugcu

SEQ ID NO: 2068368 - RNA, 14 nt, Human
cugccaccuggggc

SEQ ID NO: 2068369 - RNA, 15 nt, Human
cugccaccuggggca

SEQ ID NO: 2068370 - RNA, 16 nt, Human
cugccaccuggggcag

SEQ ID NO: 2068371 - RNA, 18 nt, Human
cugccaccuggggcaguc

SEQ ID NO: 2068372 - RNA, 15 nt, Human
cugcaugguaauuua

SEQ ID NO: 2068373 - RNA, 16 nt, Human
cugcaugguaauuuau

SEQ ID NO: 2068374 - RNA, 17 nt, Human
cugcaugguaauuuaua

SEQ ID NO: 2068375 - RNA, 19 nt, Human
cugcaugguaauuuauagu

SEQ ID NO: 2068376 - RNA, 20 nt, Human
cugcaugguaauuuauaguu

SEQ ID NO: 2068377 - RNA, 18 nt, Human
cugcgguccacccaggag

SEQ ID NO: 2068378 - RNA, 20 nt, Human
cugcgggaugguccuggggc

SEQ ID NO: 2068379 - RNA, 22 nt, Human
cugcgggaugguccuggggcuc

SEQ ID NO: 2068380 - RNA, 20 nt, Human
cugcgguccacccaggagcc

SEQ ID NO: 2068381 - RNA, 19 nt, Human
cugcgguccacccaggagc

SEQ ID NO: 2068382 - RNA, 13 nt, Human
cugcguggcugac

SEQ ID NO: 2068383 - RNA, 15 nt, Human
cugcguggcugaccc

SEQ ID NO: 2068384 - RNA, 16 nt, Human
cugcguggcugacccc

SEQ ID NO: 2068385 - RNA, 17 nt, Human
cugcguggcugaccccc

SEQ ID NO: 2068386 - RNA, 20 nt, Human
cugcguggcugaccccccuc

SEQ ID NO: 2068387 - RNA, 23 nt, Human
cugcguggcugaccccccucagg

SEQ ID NO: 2068388 - RNA, 13 nt, Human
cugcgucuguguu

SEQ ID NO: 2068389 - RNA, 17 nt, Human
cugcgaaggggcccugg

SEQ ID NO: 2068390 - RNA, 22 nt, Human
cugccuugaagccacugaagcu

SEQ ID NO: 2068391 - RNA, 18 nt, Human
cugccuuugcagaaacag

SEQ ID NO: 2068392 - RNA, 19 nt, Human
cugccuuugcagaaacaga

SEQ ID NO: 2068393 - RNA, 21 nt, Human
cugccuuugcagaaacagauu

SEQ ID NO: 2068394 - RNA, 18 nt, Human
cugcgaaggggcccuggu

SEQ ID NO: 2068395 - RNA, 19 nt, Human
cugcgaaggggcccugguc

SEQ ID NO: 2068396 - RNA, 15 nt, Human
cugcggccugcugga

SEQ ID NO: 2068397 - RNA, 21 nt, Human
cugcggcacccuugcgcuuuu

SEQ ID NO: 2068398 - RNA, 14 nt, Human
cugcggcaucagau

SEQ ID NO: 2068399 - RNA, 17 nt, Human
cugcgggaugguccugg

SEQ ID NO: 2068400 - RNA, 18 nt, Human
cugcgggaugguccuggg

SEQ ID NO: 2068401 - RNA, 19 nt, Human
cugcgggaugguccugggg

SEQ ID NO: 2068402 - RNA, 22 nt, Human
cugccugcccaggccccugcca

SEQ ID NO: 2068403 - RNA, 21 nt, Human
cugccugcccaggccccugcc

SEQ ID NO: 2068404 - RNA, 20 nt, Human
cugccuggaagagcagcccu

SEQ ID NO: 2068405 - RNA, 21 nt, Human
cugccucugacacacagcucu

SEQ ID NO: 2068406 - RNA, 18 nt, Human
cugccucugacacacagc

SEQ ID NO: 2068407 - RNA, 17 nt, Human
cugccucugacacacag

SEQ ID NO: 2068408 - RNA, 13 nt, Human
cugccuucguuaa

SEQ ID NO: 2068409 - RNA, 19 nt, Human
cugccuucguuaacugugu

SEQ ID NO: 2068410 - RNA, 20 nt, Human
cugccuucguuaacugugua

SEQ ID NO: 2068411 - RNA, 21 nt, Human
cugccuucguuaacuguguau

SEQ ID NO: 2068412 - RNA, 24 nt, Human
cugccuucuucggggaacuccugg

SEQ ID NO: 2068413 - RNA, 16 nt, Human
cugccuugaagccacu

SEQ ID NO: 2068414 - RNA, 20 nt, Human
cugccuugaagccacugaag

SEQ ID NO: 2068415 - RNA, 21 nt, Human
cugccuugaagccacugaagc

SEQ ID NO: 2068416 - RNA, 12 nt, Human
cugccuggagcc

SEQ ID NO: 2068417 - RNA, 13 nt, Human
cugccuggagccc

SEQ ID NO: 2068418 - RNA, 15 nt, Human
cugccuggagcccca

SEQ ID NO: 2068419 - RNA, 16 nt, Human
cugccuggagccccac

SEQ ID NO: 2068420 - RNA, 19 nt, Human
cugccuggagccccacugc

SEQ ID NO: 2068421 - RNA, 21 nt, Human
cugccuggagccccacugccc

SEQ ID NO: 2068422 - RNA, 13 nt, Human
cugccccugcccc

SEQ ID NO: 2068423 - RNA, 11 nt, Human
cugccccugcc

SEQ ID NO: 2068424 - RNA, 14 nt, Human
cugccccugccccg

SEQ ID NO: 2068425 - RNA, 10 nt, Human
cugccccugc

SEQ ID NO: 2068426 - RNA, 21 nt, Human
cugccccaaacaaauaugcaa

SEQ ID NO: 2068427 - RNA, 19 nt, Human
cugccccaaaggaagcuuu

SEQ ID NO: 2068428 - RNA, 15 nt, Human
cugccgcaccccaga

SEQ ID NO: 2068429 - RNA, 14 nt, Human
cugccgcaccccag

SEQ ID NO: 2068430 - RNA, 16 nt, Human
cugccccugccccguc

SEQ ID NO: 2068431 - RNA, 17 nt, Human
cugccccugccccguca

SEQ ID NO: 2068432 - RNA, 16 nt, Human
cugccgcaccccagag

SEQ ID NO: 2068433 - RNA, 17 nt, Human
cugccgcaccccagagu

SEQ ID NO: 2068434 - RNA, 14 nt, Human
cugccgccucccag

SEQ ID NO: 2068435 - RNA, 15 nt, Human
cugccgccucccagc

SEQ ID NO: 2068436 - RNA, 16 nt, Human
cugccgccucccagcc

SEQ ID NO: 2068437 - RNA, 18 nt, Human
cugccgccucccagccug

SEQ ID NO: 2068438 - RNA, 19 nt, Human
cugccgccucccagccugg

SEQ ID NO: 2068439 - RNA, 19 nt, Human
cugccuaggaauucccagc

SEQ ID NO: 2068440 - RNA, 17 nt, Human
cugccuagcacucacau

SEQ ID NO: 2068441 - RNA, 19 nt, Human
cugccuagcacucacaugc

SEQ ID NO: 2068442 - RNA, 20 nt, Human
cugccuagcacucacaugcu

SEQ ID NO: 2068443 - RNA, 22 nt, Human
cugccuagcacucacaugcugg

SEQ ID NO: 2068444 - RNA, 23 nt, Human
cugccuagcacucacaugcugga

SEQ ID NO: 2068445 - RNA, 19 nt, Human
cugccuaaguggcugcuga

SEQ ID NO: 2068446 - RNA, 15 nt, Human
cugccggcccugggg

SEQ ID NO: 2068447 - RNA, 16 nt, Human
cugccggcccuggggc

SEQ ID NO: 2068448 - RNA, 21 nt, Human
cugccggcccuggggcuaggc

SEQ ID NO: 2068449 - RNA, 20 nt, Human
cugccuaaguggcugcugac

SEQ ID NO: 2068450 - RNA, 13 nt, Human
cugccuacucacg

SEQ ID NO: 2068451 - RNA, 14 nt, Human
cugccuacucacga

SEQ ID NO: 2068452 - RNA, 19 nt, Human
cugccucagccucccaaag

SEQ ID NO: 2068453 - RNA, 15 nt, Human
cugccucagccuccc

SEQ ID NO: 2068454 - RNA, 16 nt, Human
cugccuaggcugaccu

SEQ ID NO: 2068455 - RNA, 22 nt, Human
cugccgcccgagguggcugccu

SEQ ID NO: 2068456 - RNA, 14 nt, Human
cugccuccagaaug

SEQ ID NO: 2068457 - RNA, 15 nt, Human
cugccuauugcagcu

SEQ ID NO: 2068458 - RNA, 21 nt, Human
cugccuauugcagcugggaga

SEQ ID NO: 2068459 - RNA, 22 nt, Human
cugccuauugcagcugggagaa

SEQ ID NO: 2068460 - RNA, 22 nt, Human
cugccuccagaauggucuuucu

SEQ ID NO: 2068461 - RNA, 21 nt, Human
cuccugccucagccuccugag

SEQ ID NO: 2068462 - RNA, 18 nt, Human
cuccugccucgaacuggc

SEQ ID NO: 2068463 - RNA, 21 nt, Human
cuccugccucgaacuggcugc

SEQ ID NO: 2068464 - RNA, 20 nt, Human
cuccugccucgaacuggcug

SEQ ID NO: 2068465 - RNA, 22 nt, Human
cuccugccucgaacuggcugca

SEQ ID NO: 2068466 - RNA, 15 nt, Human
cuccucuccccagca

SEQ ID NO: 2068467 - RNA, 13 nt, Human
cuccucuccccag

SEQ ID NO: 2068468 - RNA, 14 nt, Human
cuccugccuacuca

SEQ ID NO: 2068469 - RNA, 16 nt, Human
cuccugccuacucacg

SEQ ID NO: 2068470 - RNA, 13 nt, Human
cuccugccuacuc

SEQ ID NO: 2068471 - RNA, 11 nt, Human
cuccugccuca

SEQ ID NO: 2068472 - RNA, 12 nt, Human
cuccugccucag

SEQ ID NO: 2068473 - RNA, 16 nt, Human
cuccugccucagccuc

SEQ ID NO: 2068474 - RNA, 17 nt, Human
cuccugccucagccucc

SEQ ID NO: 2068475 - RNA, 13 nt, Human
cuccuuagaagug

SEQ ID NO: 2068476 - RNA, 17 nt, Human
cuccuuagaaguggaag

SEQ ID NO: 2068477 - RNA, 20 nt, Human
cuccuuagaaguggaaguag

SEQ ID NO: 2068478 - RNA, 16 nt, Human
cuccuuagucuucuca

SEQ ID NO: 2068479 - RNA, 14 nt, Human
cuccuuagcugcca

SEQ ID NO: 2068480 - RNA, 15 nt, Human
cuccuuagcugccaa

SEQ ID NO: 2068481 - RNA, 22 nt, Human
cuccuuagcugccaagccccau

SEQ ID NO: 2068482 - RNA, 20 nt, Human
cuccuuagagacaucaaaau

SEQ ID NO: 2068483 - RNA, 21 nt, Human
cuccuuagagacaucaaaauc

SEQ ID NO: 2068484 - RNA, 17 nt, Human
cuccuuagucuucucau

SEQ ID NO: 2068485 - RNA, 19 nt, Human
cuccuuagucuucucauag

SEQ ID NO: 2068486 - RNA, 13 nt, Human
cuccuucccagcu

SEQ ID NO: 2068487 - RNA, 14 nt, Human
cuccuucccagcug

SEQ ID NO: 2068488 - RNA, 15 nt, Human
cuccuucccagcugc

SEQ ID NO: 2068489 - RNA, 16 nt, Human
cuccuucccagcugcc

SEQ ID NO: 2068490 - RNA, 17 nt, Human
cuccuucccagcugccc

SEQ ID NO: 2068491 - RNA, 18 nt, Human
cuccuucccagcugcccc

SEQ ID NO: 2068492 - RNA, 19 nt, Human
cuccuucccagcugccccu

SEQ ID NO: 2068493 - RNA, 20 nt, Human
cuccuucccagcugccccuc

SEQ ID NO: 2068494 - RNA, 22 nt, Human
cuccuucccagcugccccuccc

SEQ ID NO: 2068495 - RNA, 24 nt, Human
cuccugugugugcgccuacaggag

SEQ ID NO: 2068496 - RNA, 23 nt, Human
cuccugugugugcgccuacagga

SEQ ID NO: 2068497 - RNA, 20 nt, Human
cuccuggaagcuguguccuu

SEQ ID NO: 2068498 - RNA, 23 nt, Human
cuccuggaagcuguguccuugca

SEQ ID NO: 2068499 - RNA, 21 nt, Human
cuccugugugugcgccuacag

SEQ ID NO: 2068500 - RNA, 14 nt, Human
cuccuggaaauauu

SEQ ID NO: 2068501 - RNA, 11 nt, Human
cuccuggaaau

SEQ ID NO: 2068502 - RNA, 15 nt, Human
cuccuggaagcugug

SEQ ID NO: 2068503 - RNA, 17 nt, Human
cuccuggaagcuguguc

SEQ ID NO: 2068504 - RNA, 17 nt, Human
cuccuggaaaggcucag

SEQ ID NO: 2068505 - RNA, 18 nt, Human
cuccuggaaaggcucagu

SEQ ID NO: 2068506 - RNA, 19 nt, Human
cuccuggaaaggcucaguc

SEQ ID NO: 2068507 - RNA, 20 nt, Human
cuccuggaaaggcucagucu

SEQ ID NO: 2068508 - RNA, 22 nt, Human
cuccuggaaaggcucagucuca

SEQ ID NO: 2068509 - RNA, 23 nt, Human
cuccuggaaaggcucagucucag

SEQ ID NO: 2068510 - RNA, 24 nt, Human
cuccuggaaaggcucagucucagg

SEQ ID NO: 2068511 - RNA, 17 nt, Human
cucgagcaguccugccu

SEQ ID NO: 2068512 - RNA, 14 nt, Human
cuccuuccuugacc

SEQ ID NO: 2068513 - RNA, 17 nt, Human
cuccuuccuugaccagc

SEQ ID NO: 2068514 - RNA, 18 nt, Human
cuccuuccuugaccagca

SEQ ID NO: 2068515 - RNA, 22 nt, Human
cuccuuccuugcuguccuaggc

SEQ ID NO: 2068516 - RNA, 21 nt, Human
cuccuuccugccaccugcugc

SEQ ID NO: 2068517 - RNA, 16 nt, Human
cuccuuccugccaccu

SEQ ID NO: 2068518 - RNA, 14 nt, Human
cuccuuccugucuu

SEQ ID NO: 2068519 - RNA, 15 nt, Human
cuccuuccugucuuc

SEQ ID NO: 2068520 - RNA, 16 nt, Human
cuccuuccugucuucc

SEQ ID NO: 2068521 - RNA, 17 nt, Human
cuccuuccugucuuccu

SEQ ID NO: 2068522 - RNA, 13 nt, Human
cuccuuccugucu

SEQ ID NO: 2068523 - RNA, 12 nt, Human
cuccuuccuguc

SEQ ID NO: 2068524 - RNA, 22 nt, Human
cucgacuggaggaccacacuca

SEQ ID NO: 2068525 - RNA, 16 nt, Human
cucgccgucugugaau

SEQ ID NO: 2068526 - RNA, 15 nt, Human
cucgccgucugugaa

SEQ ID NO: 2068527 - RNA, 12 nt, Human
cucgcccugggu

SEQ ID NO: 2068528 - RNA, 13 nt, Human
cucgcccuggguc

SEQ ID NO: 2068529 - RNA, 15 nt, Human
cucgcccugggucua

SEQ ID NO: 2068530 - RNA, 23 nt, Human
cucgagcaguccugccucagccu

SEQ ID NO: 2068531 - RNA, 13 nt, Human
cucgcaagcuggg

SEQ ID NO: 2068532 - RNA, 14 nt, Human
cucgcaagcugggu

SEQ ID NO: 2068533 - RNA, 21 nt, Human
cucccggugcccaagaauaga

SEQ ID NO: 2068534 - RNA, 15 nt, Human
cucccggugcccaag

SEQ ID NO: 2068535 - RNA, 20 nt, Human
cucccgaguagcugggacua

SEQ ID NO: 2068536 - RNA, 19 nt, Human
cucccgaguagcugggacu

SEQ ID NO: 2068537 - RNA, 14 nt, Human
cucccugccccucc

SEQ ID NO: 2068538 - RNA, 13 nt, Human
cucccugccccuc

SEQ ID NO: 2068539 - RNA, 16 nt, Human
cucccugccagcaccc

SEQ ID NO: 2068540 - RNA, 18 nt, Human
cucccugccagcaccccc

SEQ ID NO: 2068541 - RNA, 21 nt, Human
cucccugccccucccuucaac

SEQ ID NO: 2068542 - RNA, 20 nt, Human
cucccugccccucccuucaa

SEQ ID NO: 2068543 - RNA, 18 nt, Human
cucccugccccucccuuc

SEQ ID NO: 2068544 - RNA, 17 nt, Human
cucccugccccucccuu

SEQ ID NO: 2068545 - RNA, 18 nt, Human
cucccugccgccucaaug

SEQ ID NO: 2068546 - RNA, 19 nt, Human
cucccugccgccucaaugu

SEQ ID NO: 2068547 - RNA, 10 nt, Human
cucccugccg

SEQ ID NO: 2068548 - RNA, 15 nt, Human
cucccugccgccuca

SEQ ID NO: 2068549 - RNA, 16 nt, Human
cucccugccgccucaa

SEQ ID NO: 2068550 - RNA, 13 nt, Human
cucccuaccaccu

SEQ ID NO: 2068551 - RNA, 21 nt, Human
cuccccagcaagugagagcug

SEQ ID NO: 2068552 - RNA, 15 nt, Human
cuccccagcaggugg

SEQ ID NO: 2068553 - RNA, 16 nt, Human
cuccccagcagguggg

SEQ ID NO: 2068554 - RNA, 19 nt, Human
cuccccagcagguggggag

SEQ ID NO: 2068555 - RNA, 23 nt, Human
cuccccagcaagugagagcuggg

SEQ ID NO: 2068556 - RNA, 22 nt, Human
cuccccagcaagugagagcugg

SEQ ID NO: 2068557 - RNA, 11 nt, Human
cuccccuuccc

SEQ ID NO: 2068558 - RNA, 14 nt, Human
cuccccuugagcug

SEQ ID NO: 2068559 - RNA, 16 nt, Human
cuccccuugagcugag

SEQ ID NO: 2068560 - RNA, 15 nt, Human
cuccccuucccugca

SEQ ID NO: 2068561 - RNA, 16 nt, Human
cuccccuucccugcaa

SEQ ID NO: 2068562 - RNA, 23 nt, Human
cuccccuucgcguauuucaggau

SEQ ID NO: 2068563 - RNA, 14 nt, Human
cuccccugcccugc

SEQ ID NO: 2068564 - RNA, 12 nt, Human
cuccccugcccu

SEQ ID NO: 2068565 - RNA, 13 nt, Human
cuccccugcccuc

SEQ ID NO: 2068566 - RNA, 13 nt, Human
cuccccugcccug

SEQ ID NO: 2068567 - RNA, 14 nt, Human
cuccccugccauuu

SEQ ID NO: 2068568 - RNA, 15 nt, Human
cuccccuccuugccu

SEQ ID NO: 2068569 - RNA, 16 nt, Human
cuccccuccuugccuc

SEQ ID NO: 2068570 - RNA, 18 nt, Human
cucccuguccuccucgga

SEQ ID NO: 2068571 - RNA, 14 nt, Human
cucccuguccaccc

SEQ ID NO: 2068572 - RNA, 11 nt, Human
cucccuguccu

SEQ ID NO: 2068573 - RNA, 13 nt, Human
cucccuguccucc

SEQ ID NO: 2068574 - RNA, 14 nt, Human
cucccuguccuccu

SEQ ID NO: 2068575 - RNA, 15 nt, Human
cucccuguccuccuc

SEQ ID NO: 2068576 - RNA, 16 nt, Human
cucccuguccuccucg

SEQ ID NO: 2068577 - RNA, 22 nt, Human
cuccuaucagaaguuucucagc

SEQ ID NO: 2068578 - RNA, 15 nt, Human
cuccgcaguuccugu

SEQ ID NO: 2068579 - RNA, 14 nt, Human
cuccuaucuucaua

SEQ ID NO: 2068580 - RNA, 17 nt, Human
cuccuaucuucauaucu

SEQ ID NO: 2068581 - RNA, 14 nt, Human
cuccucaacucacc

SEQ ID NO: 2068582 - RNA, 16 nt, Human
cuccuauuuuuuuaaa

SEQ ID NO: 2068583 - RNA, 18 nt, Human
cuccuauuuuuuuaaaau

SEQ ID NO: 2068584 - RNA, 17 nt, Human
cuccucccaggcgcccc

SEQ ID NO: 2068585 - RNA, 23 nt, Human
cuccucccaggcgccccuucccc

SEQ ID NO: 2068586 - RNA, 22 nt, Human
cuccucccaggcgccccuuccc

SEQ ID NO: 2068587 - RNA, 14 nt, Human
cuccuccuccccca

SEQ ID NO: 2068588 - RNA, 15 nt, Human
cuccuccucccccag

SEQ ID NO: 2068589 - RNA, 15 nt, Human
cuccuccagccgcca

SEQ ID NO: 2068590 - RNA, 13 nt, Human
cucauuaaaaaaa

SEQ ID NO: 2068591 - RNA, 14 nt, Human
cucauuucuagcag

SEQ ID NO: 2068592 - RNA, 17 nt, Human
cucauuugucacacacu

SEQ ID NO: 2068593 - RNA, 16 nt, Human
cucauuacggcuccuc

SEQ ID NO: 2068594 - RNA, 17 nt, Human
cucauuacggcuccucu

SEQ ID NO: 2068595 - RNA, 18 nt, Human
cucauuacggcuccucuc

SEQ ID NO: 2068596 - RNA, 18 nt, Human
cucauuugucacacacuu

SEQ ID NO: 2068597 - RNA, 17 nt, Human
cucauuugggguagcua

SEQ ID NO: 2068598 - RNA, 20 nt, Human
cucauuugggguagcuagag

SEQ ID NO: 2068599 - RNA, 23 nt, Human
cuccaaguccacaguggaaccag

SEQ ID NO: 2068600 - RNA, 11 nt, Human
cuccaaagcuu

SEQ ID NO: 2068601 - RNA, 22 nt, Human
cuccaaaggaagucuaggagcu

SEQ ID NO: 2068602 - RNA, 22 nt, Human
cuccaaucccaccaacccucag

SEQ ID NO: 2068603 - RNA, 17 nt, Human
cuccacacccucuccca

SEQ ID NO: 2068604 - RNA, 13 nt, Human
cuccacccugcuc

SEQ ID NO: 2068605 - RNA, 12 nt, Human
cuccaccaaccc

SEQ ID NO: 2068606 - RNA, 20 nt, Human
cuccacacccucucccagga

SEQ ID NO: 2068607 - RNA, 15 nt, Human
cuccacccugcucuc

SEQ ID NO: 2068608 - RNA, 13 nt, Human
cuccaccaaccca

SEQ ID NO: 2068609 - RNA, 20 nt, Human
cuccaccaacccaucagaag

SEQ ID NO: 2068610 - RNA, 13 nt, Human
cuccaccacaucc

SEQ ID NO: 2068611 - RNA, 12 nt, Human
cuccacccuugg

SEQ ID NO: 2068612 - RNA, 13 nt, Human
cuccacccuuggc

SEQ ID NO: 2068613 - RNA, 15 nt, Human
cuccaucagcuguaa

SEQ ID NO: 2068614 - RNA, 15 nt, Human
cuccaggaaggggcu

SEQ ID NO: 2068615 - RNA, 16 nt, Human
cuccaggaaggggcug

SEQ ID NO: 2068616 - RNA, 18 nt, Human
cuccaggaaggggcugga

SEQ ID NO: 2068617 - RNA, 20 nt, Human
cuccaggaaggggcuggacu

SEQ ID NO: 2068618 - RNA, 21 nt, Human
cuccaggaaggggcuggacug

SEQ ID NO: 2068619 - RNA, 20 nt, Human
cuccaggaaugccuccuccc

SEQ ID NO: 2068620 - RNA, 14 nt, Human
cuccagcucaccag

SEQ ID NO: 2068621 - RNA, 12 nt, Human
cuccagccuggg

SEQ ID NO: 2068622 - RNA, 13 nt, Human
cuccagccugggc

SEQ ID NO: 2068623 - RNA, 14 nt, Human
cuccagccugggca

SEQ ID NO: 2068624 - RNA, 20 nt, Human
cuccagccugggcaacacag

SEQ ID NO: 2068625 - RNA, 20 nt, Human
cuccacguucaccccuccac

SEQ ID NO: 2068626 - RNA, 17 nt, Human
cuccaccuugcagcucu

SEQ ID NO: 2068627 - RNA, 16 nt, Human
cuccacguucaccccu

SEQ ID NO: 2068628 - RNA, 18 nt, Human
cuccacguucaccccucc

SEQ ID NO: 2068629 - RNA, 16 nt, Human
cucagggcugacacgu

SEQ ID NO: 2068630 - RNA, 16 nt, Human
cucaggugagaagcag

SEQ ID NO: 2068631 - RNA, 19 nt, Human
cucaggugagaagcagagg

SEQ ID NO: 2068632 - RNA, 20 nt, Human
cucaggugagaagcagagga

SEQ ID NO: 2068633 - RNA, 15 nt, Human
cucagggccuggucg

SEQ ID NO: 2068634 - RNA, 18 nt, Human
cucagcauccuggcaccc

SEQ ID NO: 2068635 - RNA, 21 nt, Human
cucagcccacauagugauggu

SEQ ID NO: 2068636 - RNA, 19 nt, Human
cucagcccacauagugaug

SEQ ID NO: 2068637 - RNA, 15 nt, Human
cucagccaugaggag

SEQ ID NO: 2068638 - RNA, 21 nt, Human
cucagccaugaggaguugcug

SEQ ID NO: 2068639 - RNA, 20 nt, Human
cucaggaggcugaggcagaa

SEQ ID NO: 2068640 - RNA, 20 nt, Human
cucaggaggcugaggcagga

SEQ ID NO: 2068641 - RNA, 22 nt, Human
cucaggaggcugaggcaggagg

SEQ ID NO: 2068642 - RNA, 18 nt, Human
cucaggaguuugagacca

SEQ ID NO: 2068643 - RNA, 23 nt, Human
cucaggaguuugagaccaaccug

SEQ ID NO: 2068644 - RNA, 21 nt, Human
cucagggacagagacaccugc

SEQ ID NO: 2068645 - RNA, 22 nt, Human
cucagggacagagacaccugca

SEQ ID NO: 2068646 - RNA, 23 nt, Human
cucagggacagagacaccugcac

SEQ ID NO: 2068647 - RNA, 15 nt, Human
cucaggaugcccagg

SEQ ID NO: 2068648 - RNA, 14 nt, Human
cucaggaugcccag

SEQ ID NO: 2068649 - RNA, 23 nt, Human
cucaggaggcugaggcagaagaa

SEQ ID NO: 2068650 - RNA, 23 nt, Human
cucaggaggcugaggcaggagga

SEQ ID NO: 2068651 - RNA, 16 nt, Human
cucaggaggcugaggg

SEQ ID NO: 2068652 - RNA, 16 nt, Human
cucaggaugcccaggg

SEQ ID NO: 2068653 - RNA, 19 nt, Human
cucaggaugcccagggcca

SEQ ID NO: 2068654 - RNA, 22 nt, Human
cucaggaugcccagggccacuc

SEQ ID NO: 2068655 - RNA, 17 nt, Human
cucauccgaggcagggu

SEQ ID NO: 2068656 - RNA, 14 nt, Human
cucauccgaggcag

SEQ ID NO: 2068657 - RNA, 15 nt, Human
cucauccgaggcagg

SEQ ID NO: 2068658 - RNA, 16 nt, Human
cucaucauaaaauaaa

SEQ ID NO: 2068659 - RNA, 23 nt, Human
cucauaguaugguggcuggguug

SEQ ID NO: 2068660 - RNA, 15 nt, Human
cucauaucaguuugc

SEQ ID NO: 2068661 - RNA, 19 nt, Human
cucauauauaucuaucuua

SEQ ID NO: 2068662 - RNA, 12 nt, Human
cucaucauaaaa

SEQ ID NO: 2068663 - RNA, 14 nt, Human
cucaucauaaaaua

SEQ ID NO: 2068664 - RNA, 15 nt, Human
cucaucauaaaauaa

SEQ ID NO: 2068665 - RNA, 19 nt, Human
cucaggugauccacccacc

SEQ ID NO: 2068666 - RNA, 18 nt, Human
cucaggugauccacccac

SEQ ID NO: 2068667 - RNA, 20 nt, Human
cucaggugauccacccaccu

SEQ ID NO: 2068668 - RNA, 12 nt, Human
cucauagcauua

SEQ ID NO: 2068669 - RNA, 14 nt, Human
cucauagcauuaac

SEQ ID NO: 2068670 - RNA, 16 nt, Human
cucauagcauuaacua

SEQ ID NO: 2068671 - RNA, 18 nt, Human
cucauagcauuaacuaau

SEQ ID NO: 2068672 - RNA, 20 nt, Human
cucauagccccggugugcgg

SEQ ID NO: 2068673 - RNA, 21 nt, Human
cucauaguaugguggcugggu

SEQ ID NO: 2068674 - RNA, 22 nt, Human
cucauacucaccucaccccacu

SEQ ID NO: 2068675 - RNA, 14 nt, Human
cucauacucaccuc

SEQ ID NO: 2068676 - RNA, 14 nt, Human
cucaagacuuccag

SEQ ID NO: 2068677 - RNA, 23 nt, Human
cucaagacccuuuuggguuucug

SEQ ID NO: 2068678 - RNA, 16 nt, Human
cucaagacuuccagag

SEQ ID NO: 2068679 - RNA, 21 nt, Human
cucaaguccucuuuucugaga

SEQ ID NO: 2068680 - RNA, 17 nt, Human
cucaagugauucuccug

SEQ ID NO: 2068681 - RNA, 16 nt, Human
cucaagucuucccuga

SEQ ID NO: 2068682 - RNA, 17 nt, Human
cucaagucuucccugau

SEQ ID NO: 2068683 - RNA, 18 nt, Human
cucaagucuucccugauc

SEQ ID NO: 2068684 - RNA, 23 nt, Human
cucacaccaggcuugccugcagg

SEQ ID NO: 2068685 - RNA, 19 nt, Human
cucacaccgcgucugguga

SEQ ID NO: 2068686 - RNA, 22 nt, Human
cucacauuuauucugcucacau

SEQ ID NO: 2068687 - RNA, 19 nt, Human
cucacauuuauucugcuca

SEQ ID NO: 2068688 - RNA, 15 nt, Human
cucacauuuauucug

SEQ ID NO: 2068689 - RNA, 15 nt, Human
cucaccagccccagu

SEQ ID NO: 2068690 - RNA, 14 nt, Human
cucaccagccccag

SEQ ID NO: 2068691 - RNA, 16 nt, Human
cucacagcuguaauaa

SEQ ID NO: 2068692 - RNA, 13 nt, Human
cucaccagcccca

SEQ ID NO: 2068693 - RNA, 18 nt, Human
cucaccagccccagugcc

SEQ ID NO: 2068694 - RNA, 17 nt, Human
cucaccagccccagugc

SEQ ID NO: 2068695 - RNA, 17 nt, Human
cucaaccuccugggcua

SEQ ID NO: 2068696 - RNA, 15 nt, Human
cucaaccuccugggc

SEQ ID NO: 2068697 - RNA, 13 nt, Human
cucaaccuccugg

SEQ ID NO: 2068698 - RNA, 21 nt, Human
cucaacaccucugcacaagcu

SEQ ID NO: 2068699 - RNA, 20 nt, Human
cucaacaaaagugcuuugga

SEQ ID NO: 2068700 - RNA, 22 nt, Human
cucaaaugcaguauuuuuguug

SEQ ID NO: 2068701 - RNA, 15 nt, Human
cuauuucccaagcug

SEQ ID NO: 2068702 - RNA, 17 nt, Human
cuauuucccaagcugga

SEQ ID NO: 2068703 - RNA, 13 nt, Human
cuauuuagcauga

SEQ ID NO: 2068704 - RNA, 18 nt, Human
cuauuuagcaugacaagc

SEQ ID NO: 2068705 - RNA, 17 nt, Human
cuauuuaguuuuuguaa

SEQ ID NO: 2068706 - RNA, 20 nt, Human
cuauuuaguuuuuguaauuu

SEQ ID NO: 2068707 - RNA, 22 nt, Human
cuauuuaguuuuuguaauuuau

SEQ ID NO: 2068708 - RNA, 23 nt, Human
cuauuuaguuuuuguaauuuauu

SEQ ID NO: 2068709 - RNA, 11 nt, Human
cuauuuaugaa

SEQ ID NO: 2068710 - RNA, 22 nt, Human
cuauuuaucuguguuuuugaaa

SEQ ID NO: 2068711 - RNA, 16 nt, Human
cuauuuaucuguguuu

SEQ ID NO: 2068712 - RNA, 19 nt, Human
cuauuuaucuguguuuuug

SEQ ID NO: 2068713 - RNA, 23 nt, Human
cuauuuagcaugacaagccccag

SEQ ID NO: 2068714 - RNA, 21 nt, Human
cuauuuaucuguaguaaacua

SEQ ID NO: 2068715 - RNA, 12 nt, Human
cuauuguaagau

SEQ ID NO: 2068716 - RNA, 15 nt, Human
cuauuguaagauaaa

SEQ ID NO: 2068717 - RNA, 16 nt, Human
cuauuguaagauaaaa

SEQ ID NO: 2068718 - RNA, 18 nt, Human
cuauuguaagauaaaaaa

SEQ ID NO: 2068719 - RNA, 20 nt, Human
cuauuguaagauaaaaaagc

SEQ ID NO: 2068720 - RNA, 22 nt, Human
cuauuguccccuagcaaggcau

SEQ ID NO: 2068721 - RNA, 12 nt, Human
cucacuccacca

SEQ ID NO: 2068722 - RNA, 14 nt, Human
cucacuccaccacc

SEQ ID NO: 2068723 - RNA, 16 nt, Human
cucacuccaccaccca

SEQ ID NO: 2068724 - RNA, 17 nt, Human
cucacuccaccacccaa

SEQ ID NO: 2068725 - RNA, 20 nt, Human
cucacuccaccacccaaaag

SEQ ID NO: 2068726 - RNA, 15 nt, Human
cucacuccuaccugg

SEQ ID NO: 2068727 - RNA, 13 nt, Human
cucacuccuaccu

SEQ ID NO: 2068728 - RNA, 15 nt, Human
cucacucccagucca

SEQ ID NO: 2068729 - RNA, 12 nt, Human
cucacuccccuc

SEQ ID NO: 2068730 - RNA, 20 nt, Human
cucacuccccuccuuuccca

SEQ ID NO: 2068731 - RNA, 22 nt, Human
cucacuccccuccuuucccaac

SEQ ID NO: 2068732 - RNA, 15 nt, Human
cucacucccuuccca

SEQ ID NO: 2068733 - RNA, 21 nt, Human
cucacucccuucccauaagcu

SEQ ID NO: 2068734 - RNA, 17 nt, Human
cucacucaaguucaagg

SEQ ID NO: 2068735 - RNA, 18 nt, Human
cucacucaaguucaagga

SEQ ID NO: 2068736 - RNA, 19 nt, Human
cucacucaaguucaaggac

SEQ ID NO: 2068737 - RNA, 21 nt, Human
cucacucaaguucaaggacca

SEQ ID NO: 2068738 - RNA, 23 nt, Human
cucacuauguugcccaggcaggu

SEQ ID NO: 2068739 - RNA, 22 nt, Human
cucacuauguugcccaggcagg

SEQ ID NO: 2068740 - RNA, 21 nt, Human
cucacuauguugcccaggcag

SEQ ID NO: 2068741 - RNA, 20 nt, Human
cucacuauguugcccaggca

SEQ ID NO: 2068742 - RNA, 19 nt, Human
cucacuauguugcccaggc

SEQ ID NO: 2068743 - RNA, 21 nt, Human
cucacccccaaggggcagucu

SEQ ID NO: 2068744 - RNA, 22 nt, Human
cucacccccaaggggcagucug

SEQ ID NO: 2068745 - RNA, 19 nt, Human
cucaccccaucccacaccc

SEQ ID NO: 2068746 - RNA, 21 nt, Human
cucaccccaucccacacccug

SEQ ID NO: 2068747 - RNA, 22 nt, Human
cucaccccaucccacacccugg

SEQ ID NO: 2068748 - RNA, 17 nt, Human
cucacccccaaggggca

SEQ ID NO: 2068749 - RNA, 14 nt, Human
cucaccauguaaaa

SEQ ID NO: 2068750 - RNA, 12 nt, Human
cucaccccaucc

SEQ ID NO: 2068751 - RNA, 13 nt, Human
cucaccccauccc

SEQ ID NO: 2068752 - RNA, 13 nt, Human
cucacugcagccu

SEQ ID NO: 2068753 - RNA, 12 nt, Human
cucacugcagcc

SEQ ID NO: 2068754 - RNA, 21 nt, Human
cucacucugucgcccagucug

SEQ ID NO: 2068755 - RNA, 13 nt, Human
cucacucugucgc

SEQ ID NO: 2068756 - RNA, 22 nt, Human
cucacucugucgcccagucugg

SEQ ID NO: 2068757 - RNA, 12 nt, Human
cucacucugucg

SEQ ID NO: 2068758 - RNA, 11 nt, Human
cucacucuguc

SEQ ID NO: 2068759 - RNA, 19 nt, Human
cucacuccuaccugguaau

SEQ ID NO: 2068760 - RNA, 21 nt, Human
cucacuccaggaaggggcugg

SEQ ID NO: 2068761 - RNA, 17 nt, Human
cucacucccuucuccuu

SEQ ID NO: 2068762 - RNA, 17 nt, Human
cucacuccuaccuggua

SEQ ID NO: 2068763 - RNA, 16 nt, Human
cucacuccuaccuggu

SEQ ID NO: 2068764 - RNA, 18 nt, Human
cucagcacccccuucucu

SEQ ID NO: 2068765 - RNA, 20 nt, Human
cucagcacccccuucucugc

SEQ ID NO: 2068766 - RNA, 12 nt, Human
cucagcacuugg

SEQ ID NO: 2068767 - RNA, 17 nt, Human
cucagcauccuggcacc

SEQ ID NO: 2068768 - RNA, 16 nt, Human
cucagcauccuggcac

SEQ ID NO: 2068769 - RNA, 12 nt, Human
cucagcagcccu

SEQ ID NO: 2068770 - RNA, 13 nt, Human
cucagcagcccuc

SEQ ID NO: 2068771 - RNA, 14 nt, Human
cucagcagcccucc

SEQ ID NO: 2068772 - RNA, 15 nt, Human
cucagcagcccuccu

SEQ ID NO: 2068773 - RNA, 16 nt, Human
cucagcagcccuccuc

SEQ ID NO: 2068774 - RNA, 17 nt, Human
cucagcagcccuccuca

SEQ ID NO: 2068775 - RNA, 18 nt, Human
cucagcagcccuccucac

SEQ ID NO: 2068776 - RNA, 21 nt, Human
cucagcagcccuccucacccc

SEQ ID NO: 2068777 - RNA, 19 nt, Human
cucagcagcccuccucacc

SEQ ID NO: 2068778 - RNA, 15 nt, Human
cucagcaaccuguaa

SEQ ID NO: 2068779 - RNA, 16 nt, Human
cucagcaaggggcucu

SEQ ID NO: 2068780 - RNA, 18 nt, Human
cucagcaaggggcucugc

SEQ ID NO: 2068781 - RNA, 20 nt, Human
cucagcaaggggcucugccc

SEQ ID NO: 2068782 - RNA, 20 nt, Human
cucacuguugcccaggcugg

SEQ ID NO: 2068783 - RNA, 19 nt, Human
cucacugccaugccagcuu

SEQ ID NO: 2068784 - RNA, 22 nt, Human
cucacugccaugccagcuuauc

SEQ ID NO: 2068785 - RNA, 21 nt, Human
cucacuuaucccaagagaaug

SEQ ID NO: 2068786 - RNA, 22 nt, Human
cucacuguugcccaggcuggcg

SEQ ID NO: 2068787 - RNA, 21 nt, Human
cucacuguugcccaggcuggc

SEQ ID NO: 2068788 - RNA, 15 nt, Human
cucagaguccaggcc

SEQ ID NO: 2068789 - RNA, 18 nt, Human
cucagaguccaggcccca

SEQ ID NO: 2068790 - RNA, 17 nt, Human
cucagagucggaacgga

SEQ ID NO: 2068791 - RNA, 14 nt, Human
cucagauauuuaua

SEQ ID NO: 2068792 - RNA, 18 nt, Human
cucagagucggaacggag

SEQ ID NO: 2068793 - RNA, 17 nt, Human
cucagauauuuauauuu

SEQ ID NO: 2068794 - RNA, 21 nt, Human
cuaugaucccagcacuuuggg

SEQ ID NO: 2068795 - RNA, 20 nt, Human
cuaugcauaucaguugagcu

SEQ ID NO: 2068796 - RNA, 20 nt, Human
cuaugauaugguaaaaguua

SEQ ID NO: 2068797 - RNA, 17 nt, Human
cuauggaagcauauugu

SEQ ID NO: 2068798 - RNA, 19 nt, Human
cuaugcugccuaggcugac

SEQ ID NO: 2068799 - RNA, 22 nt, Human
cuaugaucccagcacuuuggga

SEQ ID NO: 2068800 - RNA, 14 nt, Human
cuaugcugccuagg

SEQ ID NO: 2068801 - RNA, 14 nt, Human
cuauggauggcuuc

SEQ ID NO: 2068802 - RNA, 15 nt, Human
cuauggauggcuucu

SEQ ID NO: 2068803 - RNA, 16 nt, Human
cuauggauggcuucua

SEQ ID NO: 2068804 - RNA, 20 nt, Human
cuauggauuuucuaaggaag

SEQ ID NO: 2068805 - RNA, 12 nt, Human
cuauuagacuuu

SEQ ID NO: 2068806 - RNA, 18 nt, Human
cuauuagacuuuagaaau

SEQ ID NO: 2068807 - RNA, 20 nt, Human
cuauuagacuuuagaaauaa

SEQ ID NO: 2068808 - RNA, 21 nt, Human
cuauuagacuuuagaaauaaa

SEQ ID NO: 2068809 - RNA, 22 nt, Human
cuauuagacuuuagaaauaaau

SEQ ID NO: 2068810 - RNA, 16 nt, Human
cuauuagccacaaaau

SEQ ID NO: 2068811 - RNA, 16 nt, Human
cuauuaccacugaaga

SEQ ID NO: 2068812 - RNA, 20 nt, Human
cuauuaccacugaagauaga

SEQ ID NO: 2068813 - RNA, 21 nt, Human
cuauuaccacugaagauagaa

SEQ ID NO: 2068814 - RNA, 15 nt, Human
cuauuagagaagaga

SEQ ID NO: 2068815 - RNA, 11 nt, Human
cuauucacaac

SEQ ID NO: 2068816 - RNA, 12 nt, Human
cuaugguaaaga

SEQ ID NO: 2068817 - RNA, 13 nt, Human
cuaugguaaagau

SEQ ID NO: 2068818 - RNA, 16 nt, Human
cuaugguaaagauauu

SEQ ID NO: 2068819 - RNA, 21 nt, Human
cuaugguaaagauauuauuca

SEQ ID NO: 2068820 - RNA, 22 nt, Human
cuaugguaaagauauuauucac

SEQ ID NO: 2068821 - RNA, 12 nt, Human
cuauggucaucu

SEQ ID NO: 2068822 - RNA, 16 nt, Human
cuaugggagccccagg

SEQ ID NO: 2068823 - RNA, 19 nt, Human
cuaugggggcacugaggac

SEQ ID NO: 2068824 - RNA, 17 nt, Human
cuaugggagccccaggg

SEQ ID NO: 2068825 - RNA, 22 nt, Human
cuauggguaucaaacagcucag

SEQ ID NO: 2068826 - RNA, 23 nt, Human
cuauggguaucaaacagcucagg

SEQ ID NO: 2068827 - RNA, 23 nt, Human
cuaugggacucaaugcacugaca

SEQ ID NO: 2068828 - RNA, 13 nt, Human
cuaugggagcccc

SEQ ID NO: 2068829 - RNA, 14 nt, Human
cuaugggagcccca

SEQ ID NO: 2068830 - RNA, 15 nt, Human
cuaugggagccccag

SEQ ID NO: 2068831 - RNA, 22 nt, Human
cuaugggacucaaugcacugac

SEQ ID NO: 2068832 - RNA, 18 nt, Human
cuaugggacucaaugcac

SEQ ID NO: 2068833 - RNA, 17 nt, Human
cuauagccuaggugaca

SEQ ID NO: 2068834 - RNA, 13 nt, Human
cuauauuguacac

SEQ ID NO: 2068835 - RNA, 10 nt, Human
cuauauguau

SEQ ID NO: 2068836 - RNA, 21 nt, Human
cuauauguaguauaaagaaaa

SEQ ID NO: 2068837 - RNA, 16 nt, Human
cuauauggaauugcuu

SEQ ID NO: 2068838 - RNA, 22 nt, Human
cuauauuuagauuguuaaaaua

SEQ ID NO: 2068839 - RNA, 23 nt, Human
cuauauuuagauuguuaaaauaa

SEQ ID NO: 2068840 - RNA, 14 nt, Human
cuauauuguacaca

SEQ ID NO: 2068841 - RNA, 15 nt, Human
cuauauuguacacac

SEQ ID NO: 2068842 - RNA, 13 nt, Human
cuauauuuaagua

SEQ ID NO: 2068843 - RNA, 14 nt, Human
cuauauuuaaguau

SEQ ID NO: 2068844 - RNA, 16 nt, Human
cuauauuuaaguauuc

SEQ ID NO: 2068845 - RNA, 18 nt, Human
cuauauuuaaguauucaa

SEQ ID NO: 2068846 - RNA, 21 nt, Human
cuauauuuaaguauucaagaa

SEQ ID NO: 2068847 - RNA, 22 nt, Human
cuauauuuaaguauucaagaaa

SEQ ID NO: 2068848 - RNA, 13 nt, Human
cuauauuuagauu

SEQ ID NO: 2068849 - RNA, 15 nt, Human
cuagugauggucaga

SEQ ID NO: 2068850 - RNA, 17 nt, Human
cuagugauuucuggggc

SEQ ID NO: 2068851 - RNA, 23 nt, Human
cuagugauuucuggggccccacc

SEQ ID NO: 2068852 - RNA, 13 nt, Human
cuagugcagcuga

SEQ ID NO: 2068853 - RNA, 17 nt, Human
cuauaauaccagcuacu

SEQ ID NO: 2068854 - RNA, 17 nt, Human
cuaguggggucucccuc

SEQ ID NO: 2068855 - RNA, 18 nt, Human
cuaguggggucucccucu

SEQ ID NO: 2068856 - RNA, 19 nt, Human
cuaguggggucucccucuc

SEQ ID NO: 2068857 - RNA, 20 nt, Human
cuaguggggucucccucucc

SEQ ID NO: 2068858 - RNA, 21 nt, Human
cuaguggggucucccucuccu

SEQ ID NO: 2068859 - RNA, 22 nt, Human
cuaguggggucucccucuccug

SEQ ID NO: 2068860 - RNA, 23 nt, Human
cuaguggggucucccucuccugc

SEQ ID NO: 2068861 - RNA, 16 nt, Human
cuauaauguaagcucu

SEQ ID NO: 2068862 - RNA, 21 nt, Human
cuauaauguaagcucuacuga

SEQ ID NO: 2068863 - RNA, 19 nt, Human
cuauagacccgaggaaacu

SEQ ID NO: 2068864 - RNA, 12 nt, Human
cuauagacucua

SEQ ID NO: 2068865 - RNA, 15 nt, Human
cuauacaacuggaca

SEQ ID NO: 2068866 - RNA, 16 nt, Human
cuaguaaaaauacaaa

SEQ ID NO: 2068867 - RNA, 13 nt, Human
cuagucagagaga

SEQ ID NO: 2068868 - RNA, 16 nt, Human
cuagucagagagagug

SEQ ID NO: 2068869 - RNA, 15 nt, Human
cuagucccuuccccu

SEQ ID NO: 2068870 - RNA, 17 nt, Human
cuagucccuuccccucc

SEQ ID NO: 2068871 - RNA, 18 nt, Human
cuagucagagagaguguu

SEQ ID NO: 2068872 - RNA, 14 nt, Human
cuagucagccacau

SEQ ID NO: 2068873 - RNA, 16 nt, Human
cuagucagccacaugg

SEQ ID NO: 2068874 - RNA, 14 nt, Human
cuagucccuucccc

SEQ ID NO: 2068875 - RNA, 19 nt, Human
cgcccagugcccuggggcu

SEQ ID NO: 2068876 - RNA, 22 nt, Human
cgcccaguuggguggaugccug

SEQ ID NO: 2068877 - RNA, 15 nt, Human
cgccaugcuccuggc

SEQ ID NO: 2068878 - RNA, 23 nt, Human
cgcccaguuggguggaugccugg

SEQ ID NO: 2068879 - RNA, 13 nt, Human
cgcccauguguga

SEQ ID NO: 2068880 - RNA, 20 nt, Human
cuagguaauuuuuacagaau

SEQ ID NO: 2068881 - RNA, 12 nt, Human
cgccccagccuc

SEQ ID NO: 2068882 - RNA, 17 nt, Human
cuaggucaguacccacc

SEQ ID NO: 2068883 - RNA, 19 nt, Human
cuaggucaguacccaccug

SEQ ID NO: 2068884 - RNA, 20 nt, Human
cuaggucaguacccaccuga

SEQ ID NO: 2068885 - RNA, 21 nt, Human
cuaggucaguacccaccugag

SEQ ID NO: 2068886 - RNA, 22 nt, Human
cuaggucaguacccaccugagc

SEQ ID NO: 2068887 - RNA, 24 nt, Human
cuaggugacagagugagacucugu

SEQ ID NO: 2068888 - RNA, 22 nt, Human
cuaggugcccuuggaggccagc

SEQ ID NO: 2068889 - RNA, 18 nt, Human
cuaggugcccuuggaggc

SEQ ID NO: 2068890 - RNA, 13 nt, Human
cuaggugggccag

SEQ ID NO: 2068891 - RNA, 15 nt, Human
cuaggugggccagcc

SEQ ID NO: 2068892 - RNA, 17 nt, Human
cuaggugggccagcccc

SEQ ID NO: 2068893 - RNA, 18 nt, Human
cuaggugggccagccccu

SEQ ID NO: 2068894 - RNA, 19 nt, Human
cuaggugggccagccccuc

SEQ ID NO: 2068895 - RNA, 21 nt, Human
cuaggugggccagccccuccc

SEQ ID NO: 2068896 - RNA, 23 nt, Human
cuaggugggccagccccucccac

SEQ ID NO: 2068897 - RNA, 15 nt, Human
cuaggucaaggccug

SEQ ID NO: 2068898 - RNA, 16 nt, Human
cuaggucaaggccugu

SEQ ID NO: 2068899 - RNA, 19 nt, Human
cuaggucaaggccuguccc

SEQ ID NO: 2068900 - RNA, 20 nt, Human
cuaggucaaggccugucccu

SEQ ID NO: 2068901 - RNA, 22 nt, Human
cuaggucaaggccugucccugg

SEQ ID NO: 2068902 - RNA, 17 nt, Human
cuaggucagcuugcugc

SEQ ID NO: 2068903 - RNA, 18 nt, Human
cuaggugacagagugaga

SEQ ID NO: 2068904 - RNA, 14 nt, Human
cuaggugacagagu

SEQ ID NO: 2068905 - RNA, 20 nt, Human
gaggcggccccggccggggu

SEQ ID NO: 2068906 - RNA, 12 nt, Human
gaggcgggugga

SEQ ID NO: 2068907 - RNA, 19 nt, Human
gaggcggguggaucaccug

SEQ ID NO: 2068908 - RNA, 14 nt, Human
gaggccuucucuga

SEQ ID NO: 2068909 - RNA, 20 nt, Human
gaggcggagcuugcagugag

SEQ ID NO: 2068910 - RNA, 19 nt, Human
gaggcggguggaucacuug

SEQ ID NO: 2068911 - RNA, 15 nt, Human
gaggcuuaacaaugu

SEQ ID NO: 2068912 - RNA, 17 nt, Human
gaggcuguucccaccag

SEQ ID NO: 2068913 - RNA, 15 nt, Human
gaggcugggccaagc

SEQ ID NO: 2068914 - RNA, 17 nt, Human
gaggcugggccaagcca

SEQ ID NO: 2068915 - RNA, 21 nt, Human
gaggcugggccaagccaggga

SEQ ID NO: 2068916 - RNA, 23 nt, Human
gaggcugggccaagccagggaug

SEQ ID NO: 2068917 - RNA, 20 nt, Human
gaggcccgcaugcggcccag

SEQ ID NO: 2068918 - RNA, 19 nt, Human
gaggccgggugcucagggc

SEQ ID NO: 2068919 - RNA, 16 nt, Human
gagggaccagccaaga

SEQ ID NO: 2068920 - RNA, 12 nt, Human
gagggaccagcc

SEQ ID NO: 2068921 - RNA, 17 nt, Human
gagggaccaacugggcc

SEQ ID NO: 2068922 - RNA, 18 nt, Human
gagggaccaacugggccc

SEQ ID NO: 2068923 - RNA, 19 nt, Human
gagggaccaacugggccca

SEQ ID NO: 2068924 - RNA, 21 nt, Human
gagggacaaauuuaaaacaaa

SEQ ID NO: 2068925 - RNA, 15 nt, Human
gagggaacagacagg

SEQ ID NO: 2068926 - RNA, 18 nt, Human
gagggaacagacaggaga

SEQ ID NO: 2068927 - RNA, 19 nt, Human
gagggaacagacaggagaa

SEQ ID NO: 2068928 - RNA, 18 nt, Human
gagggaauugaggucugc

SEQ ID NO: 2068929 - RNA, 19 nt, Human
gaggcuugucagagcuggg

SEQ ID NO: 2068930 - RNA, 21 nt, Human
gaggcuugucagagcugggag

SEQ ID NO: 2068931 - RNA, 17 nt, Human
gaggcuugucagagcug

SEQ ID NO: 2068932 - RNA, 18 nt, Human
gaggcuugucagagcugg

SEQ ID NO: 2068933 - RNA, 15 nt, Human
gaggcuuggaaagca

SEQ ID NO: 2068934 - RNA, 16 nt, Human
gaggcuucuucagauc

SEQ ID NO: 2068935 - RNA, 22 nt, Human
gaggcuucuucagaucagugcu

SEQ ID NO: 2068936 - RNA, 16 nt, Human
gagggagugacagagg

SEQ ID NO: 2068937 - RNA, 14 nt, Human
gagggagugacaga

SEQ ID NO: 2068938 - RNA, 13 nt, Human
gagggagugacag

SEQ ID NO: 2068939 - RNA, 12 nt, Human
gagggcacuggu

SEQ ID NO: 2068940 - RNA, 20 nt, Human
gaggggccuggcagccgugc

SEQ ID NO: 2068941 - RNA, 18 nt, Human
gaggggccuggcagccgu

SEQ ID NO: 2068942 - RNA, 14 nt, Human
gaggggccuggcag

SEQ ID NO: 2068943 - RNA, 13 nt, Human
gaggggccuggca

SEQ ID NO: 2068944 - RNA, 16 nt, Human
gagggcagaggcugga

SEQ ID NO: 2068945 - RNA, 18 nt, Human
gagggcacugguggcccg

SEQ ID NO: 2068946 - RNA, 16 nt, Human
gagggcacugguggcc

SEQ ID NO: 2068947 - RNA, 15 nt, Human
gagggcagaggcugg

SEQ ID NO: 2068948 - RNA, 14 nt, Human
gagggcagaggcug

SEQ ID NO: 2068949 - RNA, 19 nt, Human
gaggagggaugcugccuga

SEQ ID NO: 2068950 - RNA, 20 nt, Human
gaggagggcgugacucaccc

SEQ ID NO: 2068951 - RNA, 18 nt, Human
gaggagcucaggacacua

SEQ ID NO: 2068952 - RNA, 11 nt, Human
gaggagcugcu

SEQ ID NO: 2068953 - RNA, 12 nt, Human
gaggagcugcug

SEQ ID NO: 2068954 - RNA, 13 nt, Human
gaggagcugcugg

SEQ ID NO: 2068955 - RNA, 15 nt, Human
gaggagcugcuggcu

SEQ ID NO: 2068956 - RNA, 15 nt, Human
gaggagcuuggggga

SEQ ID NO: 2068957 - RNA, 21 nt, Human
gaggagcuugggggaugacua

SEQ ID NO: 2068958 - RNA, 19 nt, Human
gaggaggaaggagagaagg

SEQ ID NO: 2068959 - RNA, 14 nt, Human
gaggaggaggaggu

SEQ ID NO: 2068960 - RNA, 18 nt, Human
gaggaggcaauugggaug

SEQ ID NO: 2068961 - RNA, 13 nt, Human
gaggaauuucuga

SEQ ID NO: 2068962 - RNA, 23 nt, Human
gaggacagggaggugaccccagg

SEQ ID NO: 2068963 - RNA, 22 nt, Human
gaggacagggaggugaccccag

SEQ ID NO: 2068964 - RNA, 13 nt, Human
gaggacagggagg

SEQ ID NO: 2068965 - RNA, 21 nt, Human
gaggaaggcaugccuggacaa

SEQ ID NO: 2068966 - RNA, 20 nt, Human
gaggacaccuguacuggaga

SEQ ID NO: 2068967 - RNA, 21 nt, Human
gaggacaccuguacuggagag

SEQ ID NO: 2068968 - RNA, 15 nt, Human
gaggaaugcuccccc

SEQ ID NO: 2068969 - RNA, 21 nt, Human
gaggaaugcucccccauccuc

SEQ ID NO: 2068970 - RNA, 17 nt, Human
gaggaaugaugaagcuu

SEQ ID NO: 2068971 - RNA, 13 nt, Human
gaggaaugcuccc

SEQ ID NO: 2068972 - RNA, 15 nt, Human
gaggaauccagaccc

SEQ ID NO: 2068973 - RNA, 20 nt, Human
gaggaaucgaggaaccagag

SEQ ID NO: 2068974 - RNA, 14 nt, Human
gaggaauccagacc

SEQ ID NO: 2068975 - RNA, 23 nt, Human
gaggaauaugacggaagaacaua

SEQ ID NO: 2068976 - RNA, 20 nt, Human
gaggaaucaacagggcagca

SEQ ID NO: 2068977 - RNA, 13 nt, Human
gaggaaggggggu

SEQ ID NO: 2068978 - RNA, 16 nt, Human
gaggaaggagagaagg

SEQ ID NO: 2068979 - RNA, 14 nt, Human
gaggaaggagagaa

SEQ ID NO: 2068980 - RNA, 22 nt, Human
gagcuucugggaagacaacuag

SEQ ID NO: 2068981 - RNA, 12 nt, Human
gaggccaggagu

SEQ ID NO: 2068982 - RNA, 22 nt, Human
gaggccaggaguuugagaccag

SEQ ID NO: 2068983 - RNA, 14 nt, Human
gaggcaggcuccag

SEQ ID NO: 2068984 - RNA, 23 nt, Human
gaggcaggaggauugcuugagcc

SEQ ID NO: 2068985 - RNA, 22 nt, Human
gaggcagccccauucugccugc

SEQ ID NO: 2068986 - RNA, 23 nt, Human
gaggcagccccauucugccugcc

SEQ ID NO: 2068987 - RNA, 13 nt, Human
gaggcagccccau

SEQ ID NO: 2068988 - RNA, 19 nt, Human
gaggcagacagcagcucag

SEQ ID NO: 2068989 - RNA, 12 nt, Human
gaggcagacagc

SEQ ID NO: 2068990 - RNA, 15 nt, Human
gaggcagacagcagc

SEQ ID NO: 2068991 - RNA, 16 nt, Human
gaggcagacagcagcu

SEQ ID NO: 2068992 - RNA, 14 nt, Human
gaggcagagugccc

SEQ ID NO: 2068993 - RNA, 16 nt, Human
gaggcagagugcccca

SEQ ID NO: 2068994 - RNA, 22 nt, Human
gaggcagagugccccaccugcc

SEQ ID NO: 2068995 - RNA, 17 nt, Human
gaggcacaugucagcaa

SEQ ID NO: 2068996 - RNA, 19 nt, Human
gaggcaccaguguccuccc

SEQ ID NO: 2068997 - RNA, 18 nt, Human
gaggcaccauucaggaac

SEQ ID NO: 2068998 - RNA, 21 nt, Human
gaggcaccauucaggaaccug

SEQ ID NO: 2068999 - RNA, 18 nt, Human
gaggcagaaagcagaggc

SEQ ID NO: 2069000 - RNA, 19 nt, Human
gaggcagaaagcagaggcu

SEQ ID NO: 2069001 - RNA, 20 nt, Human
gaggcagaaagcagaggcug

SEQ ID NO: 2069002 - RNA, 21 nt, Human
gaggcagaaagcagaggcugg

SEQ ID NO: 2069003 - RNA, 23 nt, Human
gaggcagaaagcagaggcuggcc

SEQ ID NO: 2069004 - RNA, 23 nt, Human
gaggcagaacccuggugaggaag

SEQ ID NO: 2069005 - RNA, 23 nt, Human
gaggcagaagaauugaacccagg

SEQ ID NO: 2069006 - RNA, 23 nt, Human
gaggcaaugucaggaacagaagg

SEQ ID NO: 2069007 - RNA, 20 nt, Human
gaggcacacagcugcagaga

SEQ ID NO: 2069008 - RNA, 24 nt, Human
gaggcacacagcugcagagacaga

SEQ ID NO: 2069009 - RNA, 18 nt, Human
gaggauugcuugagccca

SEQ ID NO: 2069010 - RNA, 19 nt, Human
gaggauugcuugagcccag

SEQ ID NO: 2069011 - RNA, 22 nt, Human
gaggauugcuugagcccaggag

SEQ ID NO: 2069012 - RNA, 21 nt, Human
gaggcaaugucaggaacagaa

SEQ ID NO: 2069013 - RNA, 12 nt, Human
gaggaguuuccu

SEQ ID NO: 2069014 - RNA, 18 nt, Human
gaggaguuuccuaaaagu

SEQ ID NO: 2069015 - RNA, 20 nt, Human
gaggaguuuccuaaaaguuc

SEQ ID NO: 2069016 - RNA, 15 nt, Human
gaggagguggcagcc

SEQ ID NO: 2069017 - RNA, 18 nt, Human
gaggagguggcagcccug

SEQ ID NO: 2069018 - RNA, 17 nt, Human
gaggagggcggggggca

SEQ ID NO: 2069019 - RNA, 20 nt, Human
gaggagguggcagcccugua

SEQ ID NO: 2069020 - RNA, 22 nt, Human
gaggagguggcagcccuguagg

SEQ ID NO: 2069021 - RNA, 17 nt, Human
gaggagguuuaggucaa

SEQ ID NO: 2069022 - RNA, 16 nt, Human
gaggauucuaugaggc

SEQ ID NO: 2069023 - RNA, 17 nt, Human
gaggauucuaugaggca

SEQ ID NO: 2069024 - RNA, 16 nt, Human
gaggauugcuugagcu

SEQ ID NO: 2069025 - RNA, 20 nt, Human
gaggauguucugggacacag

SEQ ID NO: 2069026 - RNA, 17 nt, Human
gaggauguucugggaca

SEQ ID NO: 2069027 - RNA, 20 nt, Human
gaggauggccucugcuaagc

SEQ ID NO: 2069028 - RNA, 15 nt, Human
gaggaugggaaggag

SEQ ID NO: 2069029 - RNA, 19 nt, Human
gaggaugggaaggagggag

SEQ ID NO: 2069030 - RNA, 17 nt, Human
gaggaucacuggagccc

SEQ ID NO: 2069031 - RNA, 19 nt, Human
gaggaucacuggagcccag

SEQ ID NO: 2069032 - RNA, 16 nt, Human
gaggaucacuggagcc

SEQ ID NO: 2069033 - RNA, 12 nt, Human
gaggauguucug

SEQ ID NO: 2069034 - RNA, 20 nt, Human
gaggaugucacucagaugga

SEQ ID NO: 2069035 - RNA, 18 nt, Human
gagccaccgcgcccagcc

SEQ ID NO: 2069036 - RNA, 14 nt, Human
gagccaccaugccc

SEQ ID NO: 2069037 - RNA, 13 nt, Human
gagccaccugucc

SEQ ID NO: 2069038 - RNA, 19 nt, Human
gagccaccugucccaccuc

SEQ ID NO: 2069039 - RNA, 20 nt, Human
gagccaccugucccaccuca

SEQ ID NO: 2069040 - RNA, 15 nt, Human
gagcaggcacaugga

SEQ ID NO: 2069041 - RNA, 19 nt, Human
gagcaggcacauggaggag

SEQ ID NO: 2069042 - RNA, 15 nt, Human
gagcacuguauaccc

SEQ ID NO: 2069043 - RNA, 16 nt, Human
gagcacuguauacccc

SEQ ID NO: 2069044 - RNA, 17 nt, Human
gagcacuggguugacuu

SEQ ID NO: 2069045 - RNA, 13 nt, Human
gagcacuggguug

SEQ ID NO: 2069046 - RNA, 22 nt, Human
gagccacugcaccgggccacag

SEQ ID NO: 2069047 - RNA, 19 nt, Human
gagccaccaugcccagcuc

SEQ ID NO: 2069048 - RNA, 12 nt, Human
gagccacucugu

SEQ ID NO: 2069049 - RNA, 22 nt, Human
gagccaucggugaaacuaacag

SEQ ID NO: 2069050 - RNA, 22 nt, Human
gagccauggaccacgcaggaag

SEQ ID NO: 2069051 - RNA, 12 nt, Human
gagcaccuccca

SEQ ID NO: 2069052 - RNA, 15 nt, Human
gagcaccucccagcc

SEQ ID NO: 2069053 - RNA, 16 nt, Human
gagcaccucccagccc

SEQ ID NO: 2069054 - RNA, 22 nt, Human
gagcaccgccugugaaauacca

SEQ ID NO: 2069055 - RNA, 13 nt, Human
gagcaccagggga

SEQ ID NO: 2069056 - RNA, 13 nt, Human
gagcacacuguag

SEQ ID NO: 2069057 - RNA, 15 nt, Human
gagcacacuguagca

SEQ ID NO: 2069058 - RNA, 22 nt, Human
gagcacaagaggagauccaggg

SEQ ID NO: 2069059 - RNA, 13 nt, Human
gagcaccaggcac

SEQ ID NO: 2069060 - RNA, 15 nt, Human
gagcaccaggcacga

SEQ ID NO: 2069061 - RNA, 23 nt, Human
gagcaccaggcacgaacccaccu

SEQ ID NO: 2069062 - RNA, 13 nt, Human
gagcaaaccugcc

SEQ ID NO: 2069063 - RNA, 14 nt, Human
gagcaaaccugccc

SEQ ID NO: 2069064 - RNA, 15 nt, Human
gagcaaaccugcccc

SEQ ID NO: 2069065 - RNA, 22 nt, Human
gagaucuccuugcccuagauga

SEQ ID NO: 2069066 - RNA, 21 nt, Human
gagaugaagagugagagggca

SEQ ID NO: 2069067 - RNA, 19 nt, Human
gagcaaaaucgaugcagug

SEQ ID NO: 2069068 - RNA, 20 nt, Human
gagaucaaccccuucgcucc

SEQ ID NO: 2069069 - RNA, 22 nt, Human
gagauauuuauggggggagaac

SEQ ID NO: 2069070 - RNA, 16 nt, Human
gagauauggcagcgaa

SEQ ID NO: 2069071 - RNA, 17 nt, Human
gagauauggcagcgaaa

SEQ ID NO: 2069072 - RNA, 22 nt, Human
gaaugcugguuuuccuaaaugc

SEQ ID NO: 2069073 - RNA, 21 nt, Human
gaaugcggccgcauucccuga

SEQ ID NO: 2069074 - RNA, 11 nt, Human
gaaugcucccc

SEQ ID NO: 2069075 - RNA, 13 nt, Human
gaaugcuccccca

SEQ ID NO: 2069076 - RNA, 19 nt, Human
gaaugcucccccauccucc

SEQ ID NO: 2069077 - RNA, 20 nt, Human
gaaugcucccccauccuccc

SEQ ID NO: 2069078 - RNA, 21 nt, Human
gaaugcucccccauccucccc

SEQ ID NO: 2069079 - RNA, 22 nt, Human
gaaugcucccccauccuccccu

SEQ ID NO: 2069080 - RNA, 23 nt, Human
gaaugcucccccauccuccccuu

SEQ ID NO: 2069081 - RNA, 17 nt, Human
gaaugcugguuuuccua

SEQ ID NO: 2069082 - RNA, 18 nt, Human
gaaugcugguuuuccuaa

SEQ ID NO: 2069083 - RNA, 21 nt, Human
gagaucgugccguuacucucc

SEQ ID NO: 2069084 - RNA, 22 nt, Human
gagaucgugccguuacucucca

SEQ ID NO: 2069085 - RNA, 19 nt, Human
gagaucuaagccuuuccau

SEQ ID NO: 2069086 - RNA, 20 nt, Human
gagaucuaagccuuuccaua

SEQ ID NO: 2069087 - RNA, 21 nt, Human
gagaucuaagccuuuccauaa

SEQ ID NO: 2069088 - RNA, 20 nt, Human
gagaucgcgccacugcacuc

SEQ ID NO: 2069089 - RNA, 16 nt, Human
gagaucggggccagag

SEQ ID NO: 2069090 - RNA, 18 nt, Human
gagaucggggccagaggc

SEQ ID NO: 2069091 - RNA, 15 nt, Human
gagauccuuaucgaa

SEQ ID NO: 2069092 - RNA, 13 nt, Human
gagaucagccugg

SEQ ID NO: 2069093 - RNA, 21 nt, Human
gagaucacgccacugcacucc

SEQ ID NO: 2069094 - RNA, 12 nt, Human
gagaucagaguc

SEQ ID NO: 2069095 - RNA, 14 nt, Human
gagaucagccuggg

SEQ ID NO: 2069096 - RNA, 16 nt, Human
gagaucagccugggca

SEQ ID NO: 2069097 - RNA, 13 nt, Human
gagccugggaggu

SEQ ID NO: 2069098 - RNA, 21 nt, Human
gagccugggaggucaaggcug

SEQ ID NO: 2069099 - RNA, 16 nt, Human
gagccuggugcugcug

SEQ ID NO: 2069100 - RNA, 17 nt, Human
gagccuggugcugcugc

SEQ ID NO: 2069101 - RNA, 15 nt, Human
gagccuggcaagaau

SEQ ID NO: 2069102 - RNA, 10 nt, Human
gagccuggca

SEQ ID NO: 2069103 - RNA, 16 nt, Human
gagcgugaaucuguau

SEQ ID NO: 2069104 - RNA, 17 nt, Human
gagccugcucccccacc

SEQ ID NO: 2069105 - RNA, 18 nt, Human
gagccugcucccccaccc

SEQ ID NO: 2069106 - RNA, 19 nt, Human
gagccugcucccccacccc

SEQ ID NO: 2069107 - RNA, 19 nt, Human
gagccugcggccugcugga

SEQ ID NO: 2069108 - RNA, 13 nt, Human
gagccugcucccc

SEQ ID NO: 2069109 - RNA, 17 nt, Human
gagcccugguggcagug

SEQ ID NO: 2069110 - RNA, 19 nt, Human
gagccucagcauccuggca

SEQ ID NO: 2069111 - RNA, 16 nt, Human
gagcccugguggcagu

SEQ ID NO: 2069112 - RNA, 15 nt, Human
gagcccugguggcag

SEQ ID NO: 2069113 - RNA, 21 nt, Human
gagccucagcauccuggcacc

SEQ ID NO: 2069114 - RNA, 20 nt, Human
gagccucagcauccuggcac

SEQ ID NO: 2069115 - RNA, 20 nt, Human
gagcuguuuauggccucagc

SEQ ID NO: 2069116 - RNA, 22 nt, Human
gagcuguuuauggccucagcug

SEQ ID NO: 2069117 - RNA, 13 nt, Human
gagcuuaccuccc

SEQ ID NO: 2069118 - RNA, 16 nt, Human
gagcuuaccucccacc

SEQ ID NO: 2069119 - RNA, 17 nt, Human
gagcuuagccaaugugg

SEQ ID NO: 2069120 - RNA, 18 nt, Human
gagcuuagugaaauuacu

SEQ ID NO: 2069121 - RNA, 20 nt, Human
gagcuucaagucugugccug

SEQ ID NO: 2069122 - RNA, 22 nt, Human
gagcuucaagucugugccugga

SEQ ID NO: 2069123 - RNA, 14 nt, Human
gagcuucuggcacu

SEQ ID NO: 2069124 - RNA, 16 nt, Human
gagcuucucugugaac

SEQ ID NO: 2069125 - RNA, 17 nt, Human
gagcuucucuuuaacuc

SEQ ID NO: 2069126 - RNA, 19 nt, Human
gagcuucucuuuaacucag

SEQ ID NO: 2069127 - RNA, 21 nt, Human
gagcuucucuuuaacucagga

SEQ ID NO: 2069128 - RNA, 22 nt, Human
gagcuucucuuuaacucaggac

SEQ ID NO: 2069129 - RNA, 23 nt, Human
gagcuucucuuuaacucaggacu

SEQ ID NO: 2069130 - RNA, 14 nt, Human
gagcuucucuguga

SEQ ID NO: 2069131 - RNA, 10 nt, Human
gagcuucucu

SEQ ID NO: 2069132 - RNA, 16 nt, Human
gagcucugcagagcag

SEQ ID NO: 2069133 - RNA, 13 nt, Human
gagcucuggagcc

SEQ ID NO: 2069134 - RNA, 17 nt, Human
gagcucuggagccaccu

SEQ ID NO: 2069135 - RNA, 19 nt, Human
gagcucuggagccaccugu

SEQ ID NO: 2069136 - RNA, 20 nt, Human
gagcucuggagccaccuguc

SEQ ID NO: 2069137 - RNA, 15 nt, Human
gagcucugucugucc

SEQ ID NO: 2069138 - RNA, 16 nt, Human
gagcucuucaggccuc

SEQ ID NO: 2069139 - RNA, 17 nt, Human
gagcucuucaggccucc

SEQ ID NO: 2069140 - RNA, 19 nt, Human
gagcucuucaggccucccu

SEQ ID NO: 2069141 - RNA, 22 nt, Human
gagcucuucaggccucccucuc

SEQ ID NO: 2069142 - RNA, 20 nt, Human
gagcugccauccagggaugc

SEQ ID NO: 2069143 - RNA, 20 nt, Human
gagcuccccaccaccccagc

SEQ ID NO: 2069144 - RNA, 22 nt, Human
gagcuccccaccaccccagcug

SEQ ID NO: 2069145 - RNA, 19 nt, Human
gagcuccccaccaccccag

SEQ ID NO: 2069146 - RNA, 21 nt, Human
gagcuccuccuugucuuggca

SEQ ID NO: 2069147 - RNA, 15 nt, Human
gagcucauguagcaa

SEQ ID NO: 2069148 - RNA, 13 nt, Human
gagcuccugggaa

SEQ ID NO: 2069149 - RNA, 22 nt, Human
gagcuccucugggcaggaccuc

SEQ ID NO: 2069150 - RNA, 14 nt, Human
gagcuccucugggc

SEQ ID NO: 2069151 - RNA, 15 nt, Human
gagcuccucugggca

SEQ ID NO: 2069152 - RNA, 16 nt, Human
gagcuccucugggcag

SEQ ID NO: 2069153 - RNA, 18 nt, Human
gagcuccucugggcagga

SEQ ID NO: 2069154 - RNA, 19 nt, Human
gagcuaacacuggccccua

SEQ ID NO: 2069155 - RNA, 14 nt, Human
gagcuaacacuggc

SEQ ID NO: 2069156 - RNA, 15 nt, Human
gagcuaacacuggcc

SEQ ID NO: 2069157 - RNA, 17 nt, Human
gagcucaggacacuaau

SEQ ID NO: 2069158 - RNA, 14 nt, Human
gagcucaggacacu

SEQ ID NO: 2069159 - RNA, 12 nt, Human
gaguagcuggau

SEQ ID NO: 2069160 - RNA, 19 nt, Human
gaguagccgagagccugcu

SEQ ID NO: 2069161 - RNA, 21 nt, Human
gaguagccgagagccugcucc

SEQ ID NO: 2069162 - RNA, 19 nt, Human
gagguuuuaaaaaaauccc

SEQ ID NO: 2069163 - RNA, 13 nt, Human
gagguuauagguc

SEQ ID NO: 2069164 - RNA, 22 nt, Human
gagguuaggaguucgagaccag

SEQ ID NO: 2069165 - RNA, 15 nt, Human
gagguuaaggcugag

SEQ ID NO: 2069166 - RNA, 19 nt, Human
gagguuaaggcugaggaaa

SEQ ID NO: 2069167 - RNA, 17 nt, Human
gagguucauuucaaaua

SEQ ID NO: 2069168 - RNA, 19 nt, Human
gagguuauaggucacuccu

SEQ ID NO: 2069169 - RNA, 22 nt, Human
gagguuauaggucacuccuggg

SEQ ID NO: 2069170 - RNA, 13 nt, Human
gaggucaggaguu

SEQ ID NO: 2069171 - RNA, 22 nt, Human
gaggucaggaguuagaggccag

SEQ ID NO: 2069172 - RNA, 14 nt, Human
gaggggcuccugga

SEQ ID NO: 2069173 - RNA, 15 nt, Human
gaggggcuccuggaa

SEQ ID NO: 2069174 - RNA, 21 nt, Human
gaggggcggcaggagggaggu

SEQ ID NO: 2069175 - RNA, 12 nt, Human
gaggggcuccug

SEQ ID NO: 2069176 - RNA, 13 nt, Human
gaggggcuccugg

SEQ ID NO: 2069177 - RNA, 13 nt, Human
gagguccuggggg

SEQ ID NO: 2069178 - RNA, 14 nt, Human
gagguccugggggc

SEQ ID NO: 2069179 - RNA, 16 nt, Human
gagguccugggggccu

SEQ ID NO: 2069180 - RNA, 18 nt, Human
gagguccugggggccuga

SEQ ID NO: 2069181 - RNA, 12 nt, Human
gaggucccaggc

SEQ ID NO: 2069182 - RNA, 14 nt, Human
gaggucccaggcag

SEQ ID NO: 2069183 - RNA, 14 nt, Human
gaguagcugggacu

SEQ ID NO: 2069184 - RNA, 12 nt, Human
gaguagcuggga

SEQ ID NO: 2069185 - RNA, 20 nt, Human
gaguauuuaggcagauugaa

SEQ ID NO: 2069186 - RNA, 14 nt, Human
gagucaaaacacuu

SEQ ID NO: 2069187 - RNA, 17 nt, Human
gagucaaaacacuugua

SEQ ID NO: 2069188 - RNA, 20 nt, Human
gagucaaaacacuuguaauu

SEQ ID NO: 2069189 - RNA, 17 nt, Human
gagucgaggacagggag

SEQ ID NO: 2069190 - RNA, 14 nt, Human
gagucccgucagga

SEQ ID NO: 2069191 - RNA, 21 nt, Human
gagucucacuguugcccaggc

SEQ ID NO: 2069192 - RNA, 20 nt, Human
gagucucacuguugcccagg

SEQ ID NO: 2069193 - RNA, 19 nt, Human
gagucucacuguugcccag

SEQ ID NO: 2069194 - RNA, 12 nt, Human
gagucucuucuc

SEQ ID NO: 2069195 - RNA, 23 nt, Human
gagucucacuguugcccaggcug

SEQ ID NO: 2069196 - RNA, 22 nt, Human
gagucucacuguugcccaggcu

SEQ ID NO: 2069197 - RNA, 17 nt, Human
gagucucuucuccacug

SEQ ID NO: 2069198 - RNA, 16 nt, Human
gagucucuucuccacu

SEQ ID NO: 2069199 - RNA, 15 nt, Human
gagucucuucuccac

SEQ ID NO: 2069200 - RNA, 14 nt, Human
gagucucuucucca

SEQ ID NO: 2069201 - RNA, 18 nt, Human
gagucucuucuccacugg

SEQ ID NO: 2069202 - RNA, 14 nt, Human
gagucugaagcaga

SEQ ID NO: 2069203 - RNA, 21 nt, Human
gaguucuuaaggauugugaua

SEQ ID NO: 2069204 - RNA, 21 nt, Human
gaguuccuugaucuguauaua

SEQ ID NO: 2069205 - RNA, 17 nt, Human
gaguucgagaccagccu

SEQ ID NO: 2069206 - RNA, 22 nt, Human
gaguugaaagaguuaagaaugu

SEQ ID NO: 2069207 - RNA, 14 nt, Human
gaguuuucuuccuu

SEQ ID NO: 2069208 - RNA, 17 nt, Human
gagugugccugaagucc

SEQ ID NO: 2069209 - RNA, 14 nt, Human
gaguuagaggccag

SEQ ID NO: 2069210 - RNA, 16 nt, Human
gaguuagaggccagcc

SEQ ID NO: 2069211 - RNA, 18 nt, Human
gaguuagaggccagccug

SEQ ID NO: 2069212 - RNA, 20 nt, Human
gaguuagaggccagccuggc

SEQ ID NO: 2069213 - RNA, 17 nt, Human
gaguuaggcuauucaca

SEQ ID NO: 2069214 - RNA, 18 nt, Human
gaguuaggcuauucacaa

SEQ ID NO: 2069215 - RNA, 19 nt, Human
gaguuagguuuaacauaaa

SEQ ID NO: 2069216 - RNA, 18 nt, Human
gaguuaguuucuuuggga

SEQ ID NO: 2069217 - RNA, 10 nt, Human
gaguggccug

SEQ ID NO: 2069218 - RNA, 12 nt, Human
gaguggccuggc

SEQ ID NO: 2069219 - RNA, 16 nt, Human
gagguuuuaugauauu

SEQ ID NO: 2069220 - RNA, 15 nt, Human
gagucugaagcagau

SEQ ID NO: 2069221 - RNA, 23 nt, Human
gagugggggaucacagccucuga

SEQ ID NO: 2069222 - RNA, 18 nt, Human
gagugggacagagucugg

SEQ ID NO: 2069223 - RNA, 20 nt, Human
gaguggggagacaccucaga

SEQ ID NO: 2069224 - RNA, 13 nt, Human
gaguggcuccucc

SEQ ID NO: 2069225 - RNA, 19 nt, Human
gaguggccuggccaggagc

SEQ ID NO: 2069226 - RNA, 20 nt, Human
gaguggccuggccaggagcu

SEQ ID NO: 2069227 - RNA, 13 nt, Human
gaguggccuggcc

SEQ ID NO: 2069228 - RNA, 14 nt, Human
gaguggccuggcca

SEQ ID NO: 2069229 - RNA, 15 nt, Human
gaguggccuggccag

SEQ ID NO: 2069230 - RNA, 18 nt, Human
gaguggccuggccaggag

SEQ ID NO: 2069231 - RNA, 15 nt, Human
gaguggcuccucccg

SEQ ID NO: 2069232 - RNA, 17 nt, Human
gagugggaaggacuugg

SEQ ID NO: 2069233 - RNA, 17 nt, Human
gagugggacagagucug

SEQ ID NO: 2069234 - RNA, 12 nt, Human
gauagagggggg

SEQ ID NO: 2069235 - RNA, 21 nt, Human
gauacacccaaaguaucagga

SEQ ID NO: 2069236 - RNA, 19 nt, Human
gauacacccaaaguaucag

SEQ ID NO: 2069237 - RNA, 20 nt, Human
gauacaacuucaagugcaug

SEQ ID NO: 2069238 - RNA, 18 nt, Human
gauaaucuuagcugccaa

SEQ ID NO: 2069239 - RNA, 21 nt, Human
gauaauguugugguuuguugc

SEQ ID NO: 2069240 - RNA, 15 nt, Human
gauaaugcuguugcc

SEQ ID NO: 2069241 - RNA, 19 nt, Human
gauaaugcuguugccucau

SEQ ID NO: 2069242 - RNA, 13 nt, Human
gaguuuuguuuua

SEQ ID NO: 2069243 - RNA, 19 nt, Human
gaguuuuguuuuaaaauua

SEQ ID NO: 2069244 - RNA, 18 nt, Human
gaguuuuuauggggcuga

SEQ ID NO: 2069245 - RNA, 19 nt, Human
gaguuuuuauggggcugaa

SEQ ID NO: 2069246 - RNA, 13 nt, Human
gauaaaaaauuuu

SEQ ID NO: 2069247 - RNA, 14 nt, Human
gauaaaaaauuuug

SEQ ID NO: 2069248 - RNA, 18 nt, Human
gauaaaaaauuuuguaau

SEQ ID NO: 2069249 - RNA, 19 nt, Human
gauaaaaaauuuuguaauu

SEQ ID NO: 2069250 - RNA, 23 nt, Human
gauaaaaaauuuuguaauuuucu

SEQ ID NO: 2069251 - RNA, 14 nt, Human
gauaaaaagauggc

SEQ ID NO: 2069252 - RNA, 16 nt, Human
gauaaaagauacauuu

SEQ ID NO: 2069253 - RNA, 23 nt, Human
gauaaaagauacauuuguauguu

SEQ ID NO: 2069254 - RNA, 13 nt, Human
gauaaucagccuc

SEQ ID NO: 2069255 - RNA, 14 nt, Human
gauaaucagccucu

SEQ ID NO: 2069256 - RNA, 15 nt, Human
gauaaucagccucuu

SEQ ID NO: 2069257 - RNA, 16 nt, Human
gauaaucagccucuua

SEQ ID NO: 2069258 - RNA, 22 nt, Human
gaucaaccccuucgcuccugug

SEQ ID NO: 2069259 - RNA, 21 nt, Human
gaucaaccccuucgcuccugu

SEQ ID NO: 2069260 - RNA, 22 nt, Human
gauauauguguuuuucacauuu

SEQ ID NO: 2069261 - RNA, 20 nt, Human
gauauauguguuuuucacau

SEQ ID NO: 2069262 - RNA, 23 nt, Human
gauauaugcucugcauguuacau

SEQ ID NO: 2069263 - RNA, 15 nt, Human
gauauagaauugcaa

SEQ ID NO: 2069264 - RNA, 18 nt, Human
gauauacuuuuuucuuau

SEQ ID NO: 2069265 - RNA, 18 nt, Human
gauauacacggaugacuu

SEQ ID NO: 2069266 - RNA, 14 nt, Human
gauagcaugucuuu

SEQ ID NO: 2069267 - RNA, 14 nt, Human
gauagauaacucuu

SEQ ID NO: 2069268 - RNA, 15 nt, Human
gauagauaacucuuu

SEQ ID NO: 2069269 - RNA, 17 nt, Human
gauagauaacucuuugg

SEQ ID NO: 2069270 - RNA, 18 nt, Human
gauagauaacucuuugga

SEQ ID NO: 2069271 - RNA, 21 nt, Human
gauggcacuuauaaccaaagc

SEQ ID NO: 2069272 - RNA, 18 nt, Human
gauggcaaccagaccauu

SEQ ID NO: 2069273 - RNA, 22 nt, Human
gaugggcaacccccagccugcu

SEQ ID NO: 2069274 - RNA, 14 nt, Human
gaugggacugggag

SEQ ID NO: 2069275 - RNA, 15 nt, Human
gaugggacugggagg

SEQ ID NO: 2069276 - RNA, 17 nt, Human
gaugggacugggagggc

SEQ ID NO: 2069277 - RNA, 18 nt, Human
gaugcuauggucagguua

SEQ ID NO: 2069278 - RNA, 21 nt, Human
gaugggaacgcagaugaucca

SEQ ID NO: 2069279 - RNA, 21 nt, Human
gauggcuuugaaugcggccca

SEQ ID NO: 2069280 - RNA, 18 nt, Human
gaugggaaggagggaggu

SEQ ID NO: 2069281 - RNA, 12 nt, Human
gaugccucagaa

SEQ ID NO: 2069282 - RNA, 23 nt, Human
gaugccucaugauaugucagggc

SEQ ID NO: 2069283 - RNA, 12 nt, Human
gaugccuccacc

SEQ ID NO: 2069284 - RNA, 13 nt, Human
gaugccuccaccg

SEQ ID NO: 2069285 - RNA, 16 nt, Human
gaugccuccaccgcug

SEQ ID NO: 2069286 - RNA, 17 nt, Human
gaugccuccaccgcugc

SEQ ID NO: 2069287 - RNA, 14 nt, Human
gaugccugaacuug

SEQ ID NO: 2069288 - RNA, 20 nt, Human
gaugccuccaccgcugccua

SEQ ID NO: 2069289 - RNA, 18 nt, Human
gaugccucccugacccug

SEQ ID NO: 2069290 - RNA, 19 nt, Human
gaugccucccugacccugc

SEQ ID NO: 2069291 - RNA, 22 nt, Human
gaugccucccugacccugcaga

SEQ ID NO: 2069292 - RNA, 12 nt, Human
gaugcccugcua

SEQ ID NO: 2069293 - RNA, 19 nt, Human
gaugcucagguacagagaa

SEQ ID NO: 2069294 - RNA, 20 nt, Human
gaugcucagguacagagaag

SEQ ID NO: 2069295 - RNA, 23 nt, Human
gaugcucagguacagagaaggaa

SEQ ID NO: 2069296 - RNA, 12 nt, Human
gaugcuccagcc

SEQ ID NO: 2069297 - RNA, 13 nt, Human
gaugcuccagcca

SEQ ID NO: 2069298 - RNA, 16 nt, Human
gaugcuccagccaacc

SEQ ID NO: 2069299 - RNA, 17 nt, Human
gaugcuccagccaaccc

SEQ ID NO: 2069300 - RNA, 22 nt, Human
gaugcuccagccaaccccugug

SEQ ID NO: 2069301 - RNA, 23 nt, Human
gaugcuccagccaaccccugugg

SEQ ID NO: 2069302 - RNA, 13 nt, Human
gaugcucccuccc

SEQ ID NO: 2069303 - RNA, 15 nt, Human
gaugcucccuccccu

SEQ ID NO: 2069304 - RNA, 20 nt, Human
gaugcucccuccccugcccu

SEQ ID NO: 2069305 - RNA, 21 nt, Human
gaugcucccuccccugcccug

SEQ ID NO: 2069306 - RNA, 23 nt, Human
gaugcucccuccccugcccuggu

SEQ ID NO: 2069307 - RNA, 22 nt, Human
gaugagaaagguugaagcacca

SEQ ID NO: 2069308 - RNA, 17 nt, Human
gaugacugaguccucgu

SEQ ID NO: 2069309 - RNA, 11 nt, Human
gaugagaaagg

SEQ ID NO: 2069310 - RNA, 12 nt, Human
gaugacugaguc

SEQ ID NO: 2069311 - RNA, 14 nt, Human
gaugacugaguccu

SEQ ID NO: 2069312 - RNA, 13 nt, Human
gaugacuggaauu

SEQ ID NO: 2069313 - RNA, 17 nt, Human
gaugacuggaauuuuua

SEQ ID NO: 2069314 - RNA, 22 nt, Human
gaugacuggaauuuuuauuaug

SEQ ID NO: 2069315 - RNA, 15 nt, Human
gaugacuagaggcag

SEQ ID NO: 2069316 - RNA, 21 nt, Human
gaugacgacgacaacgaugau

SEQ ID NO: 2069317 - RNA, 16 nt, Human
gaugacuagaggcagg

SEQ ID NO: 2069318 - RNA, 18 nt, Human
gaugcaaggaccaggacu

SEQ ID NO: 2069319 - RNA, 19 nt, Human
gaugcaaggaccaggacuc

SEQ ID NO: 2069320 - RNA, 18 nt, Human
gaugcaaugugcuacuga

SEQ ID NO: 2069321 - RNA, 14 nt, Human
gaugcaaagaaaau

SEQ ID NO: 2069322 - RNA, 21 nt, Human
gaugacuucccaacugcaagu

SEQ ID NO: 2069323 - RNA, 17 nt, Human
gaugcaaagaggcaaga

SEQ ID NO: 2069324 - RNA, 14 nt, Human
gaugcaaagaggca

SEQ ID NO: 2069325 - RNA, 15 nt, Human
gaugcaaagaggcaa

SEQ ID NO: 2069326 - RNA, 16 nt, Human
gaugcaaagaggcaag

SEQ ID NO: 2069327 - RNA, 14 nt, Human
gaugcaaggaccag

SEQ ID NO: 2069328 - RNA, 17 nt, Human
gaugcaaggaccaggac

SEQ ID NO: 2069329 - RNA, 16 nt, Human
gaucuuugcagacagg

SEQ ID NO: 2069330 - RNA, 19 nt, Human
gaucuuucacccacagaaa

SEQ ID NO: 2069331 - RNA, 20 nt, Human
gaucuuucacccacagaaag

SEQ ID NO: 2069332 - RNA, 21 nt, Human
gaucuuucacccacagaaaga

SEQ ID NO: 2069333 - RNA, 22 nt, Human
gaucuuucacccacagaaagag

SEQ ID NO: 2069334 - RNA, 23 nt, Human
gaucuuucacccacagaaagaga

SEQ ID NO: 2069335 - RNA, 11 nt, Human
gaucuuucagg

SEQ ID NO: 2069336 - RNA, 12 nt, Human
gaucuuucagga

SEQ ID NO: 2069337 - RNA, 15 nt, Human
gaucuuucaggaaag

SEQ ID NO: 2069338 - RNA, 14 nt, Human
gaugaaaaauagca

SEQ ID NO: 2069339 - RNA, 16 nt, Human
gaucuuuucaaguuaa

SEQ ID NO: 2069340 - RNA, 18 nt, Human
gauccucccaccucagcc

SEQ ID NO: 2069341 - RNA, 13 nt, Human
gaucgcaguuugc

SEQ ID NO: 2069342 - RNA, 18 nt, Human
gaucgcaguuugccuggu

SEQ ID NO: 2069343 - RNA, 19 nt, Human
gaucuguuuuuaaaaauca

SEQ ID NO: 2069344 - RNA, 21 nt, Human
gaucuguuuuuaaaaaucaua

SEQ ID NO: 2069345 - RNA, 23 nt, Human
gaucuguuuuuaaaaaucauaaa

SEQ ID NO: 2069346 - RNA, 21 nt, Human
gauccucccaccucagccucc

SEQ ID NO: 2069347 - RNA, 20 nt, Human
gauccucccaccucagccuc

SEQ ID NO: 2069348 - RNA, 19 nt, Human
gauccucccaccucagccu

SEQ ID NO: 2069349 - RNA, 14 nt, Human
gaucacgccacugc

SEQ ID NO: 2069350 - RNA, 13 nt, Human
gaucacgccacug

SEQ ID NO: 2069351 - RNA, 23 nt, Human
gaucaaccccuucgcuccugugu

SEQ ID NO: 2069352 - RNA, 14 nt, Human
gaucaagaaagugu

SEQ ID NO: 2069353 - RNA, 20 nt, Human
gaucaagcaauaauaauuuu

SEQ ID NO: 2069354 - RNA, 15 nt, Human
gaucacgccacugca

SEQ ID NO: 2069355 - RNA, 23 nt, Human
gauugugggaauuaaggaaguga

SEQ ID NO: 2069356 - RNA, 11 nt, Human
gauuguaacuc

SEQ ID NO: 2069357 - RNA, 21 nt, Human
gauuguacagaaucauugcuu

SEQ ID NO: 2069358 - RNA, 22 nt, Human
gauuguacagaaucauugcuua

SEQ ID NO: 2069359 - RNA, 22 nt, Human
gauuggauacgcaucagacaga

SEQ ID NO: 2069360 - RNA, 16 nt, Human
gauuggacggccugau

SEQ ID NO: 2069361 - RNA, 23 nt, Human
gauuggacggccugaugcucccu

SEQ ID NO: 2069362 - RNA, 18 nt, Human
gauugcuugagcucagga

SEQ ID NO: 2069363 - RNA, 15 nt, Human
gauugacaguaacuu

SEQ ID NO: 2069364 - RNA, 18 nt, Human
gauugacaguaacuuggu

SEQ ID NO: 2069365 - RNA, 19 nt, Human
gauugacaguaacuugguu

SEQ ID NO: 2069366 - RNA, 20 nt, Human
gauugacaguaacuugguua

SEQ ID NO: 2069367 - RNA, 14 nt, Human
gauucacaucugca

SEQ ID NO: 2069368 - RNA, 22 nt, Human
gauucccaagcucugcuccucu

SEQ ID NO: 2069369 - RNA, 21 nt, Human
gauucacccuguccaaacugc

SEQ ID NO: 2069370 - RNA, 13 nt, Human
gauucaccuguaa

SEQ ID NO: 2069371 - RNA, 14 nt, Human
gauucaccuguaaa

SEQ ID NO: 2069372 - RNA, 15 nt, Human
gauucaccuguaaaa

SEQ ID NO: 2069373 - RNA, 16 nt, Human
gauucaccuguaaaac

SEQ ID NO: 2069374 - RNA, 18 nt, Human
gauucaccuguaaaacuu

SEQ ID NO: 2069375 - RNA, 19 nt, Human
gauucaccuguaaaacuuu

SEQ ID NO: 2069376 - RNA, 20 nt, Human
gauucaccuguaaaacuuua

SEQ ID NO: 2069377 - RNA, 22 nt, Human
gauucaccuguaaaacuuuauu

SEQ ID NO: 2069378 - RNA, 21 nt, Human
gauuccccuaaccucauuccc

SEQ ID NO: 2069379 - RNA, 21 nt, Human
gauucccuccugcuacucugu

SEQ ID NO: 2069380 - RNA, 13 nt, Human
gauucccauugaa

SEQ ID NO: 2069381 - RNA, 14 nt, Human
gauucccauugaaa

SEQ ID NO: 2069382 - RNA, 16 nt, Human
gauucccauugaaaau

SEQ ID NO: 2069383 - RNA, 23 nt, Human
gauucccauugaaaauguaagua

SEQ ID NO: 2069384 - RNA, 19 nt, Human
gauucccagagacaggaaa

SEQ ID NO: 2069385 - RNA, 21 nt, Human
gauucccagagacaggaaaau

SEQ ID NO: 2069386 - RNA, 13 nt, Human
gauucccagagac

SEQ ID NO: 2069387 - RNA, 14 nt, Human
gauucccagagaca

SEQ ID NO: 2069388 - RNA, 15 nt, Human
gauuccugagccagu

SEQ ID NO: 2069389 - RNA, 19 nt, Human
gauucuaauuuuuaagcaa

SEQ ID NO: 2069390 - RNA, 23 nt, Human
gauucuaccacacagcagcaguu

SEQ ID NO: 2069391 - RNA, 16 nt, Human
gauguucugggacaca

SEQ ID NO: 2069392 - RNA, 14 nt, Human
gauguucugggaca

SEQ ID NO: 2069393 - RNA, 17 nt, Human
gaugugucuucaauuug

SEQ ID NO: 2069394 - RNA, 12 nt, Human
gauguggagcac

SEQ ID NO: 2069395 - RNA, 24 nt, Human
gauguggagcacaaaagccucuca

SEQ ID NO: 2069396 - RNA, 21 nt, Human
gaugugcuuugcauuccuaca

SEQ ID NO: 2069397 - RNA, 14 nt, Human
gauggggaaggagg

SEQ ID NO: 2069398 - RNA, 18 nt, Human
gaugggcuuguuuucuug

SEQ ID NO: 2069399 - RNA, 13 nt, Human
gauggggaaggag

SEQ ID NO: 2069400 - RNA, 16 nt, Human
gaugggcccaauucuu

SEQ ID NO: 2069401 - RNA, 22 nt, Human
gauuaagagauggguuugacaa

SEQ ID NO: 2069402 - RNA, 18 nt, Human
gauuaaccacuucagcug

SEQ ID NO: 2069403 - RNA, 19 nt, Human
gauuaaccacuucagcuga

SEQ ID NO: 2069404 - RNA, 21 nt, Human
gauuaaccacuucagcugacu

SEQ ID NO: 2069405 - RNA, 17 nt, Human
gccaccgcgcccagccu

SEQ ID NO: 2069406 - RNA, 17 nt, Human
gccacauccccgcuggc

SEQ ID NO: 2069407 - RNA, 18 nt, Human
gccacauccccgcuggcu

SEQ ID NO: 2069408 - RNA, 20 nt, Human
gccacauccccgcuggcugg

SEQ ID NO: 2069409 - RNA, 11 nt, Human
gccaccucccc

SEQ ID NO: 2069410 - RNA, 15 nt, Human
gccaccuccccaggc

SEQ ID NO: 2069411 - RNA, 17 nt, Human
gccaccuccccaggccg

SEQ ID NO: 2069412 - RNA, 12 nt, Human
gccaccuccccu

SEQ ID NO: 2069413 - RNA, 13 nt, Human
gccaccuccccua

SEQ ID NO: 2069414 - RNA, 15 nt, Human
gccaccuccccuauc

SEQ ID NO: 2069415 - RNA, 17 nt, Human
gccaccuccccuaucca

SEQ ID NO: 2069416 - RNA, 20 nt, Human
gccaccuccccuauccaccc

SEQ ID NO: 2069417 - RNA, 21 nt, Human
gccaccuccccuauccaccca

SEQ ID NO: 2069418 - RNA, 22 nt, Human
gccaccuccccuauccacccag

SEQ ID NO: 2069419 - RNA, 13 nt, Human
gccaccugccccc

SEQ ID NO: 2069420 - RNA, 12 nt, Human
gccaccugcagg

SEQ ID NO: 2069421 - RNA, 16 nt, Human
gccaccugcaggucac

SEQ ID NO: 2069422 - RNA, 14 nt, Human
gccaccugcccccu

SEQ ID NO: 2069423 - RNA, 16 nt, Human
gccaccugcccccuuc

SEQ ID NO: 2069424 - RNA, 17 nt, Human
gccaccugcccccuucu

SEQ ID NO: 2069425 - RNA, 19 nt, Human
gccacggccaggccagagg

SEQ ID NO: 2069426 - RNA, 13 nt, Human
gccacggcagccu

SEQ ID NO: 2069427 - RNA, 13 nt, Human
gccacgugccagg

SEQ ID NO: 2069428 - RNA, 14 nt, Human
gccacgugccaggc

SEQ ID NO: 2069429 - RNA, 17 nt, Human
gccacuacacuccagcc

SEQ ID NO: 2069430 - RNA, 18 nt, Human
gccacuacacuccagccu

SEQ ID NO: 2069431 - RNA, 19 nt, Human
gccacuacacuccagccug

SEQ ID NO: 2069432 - RNA, 21 nt, Human
gccacgcgguacaaaggaaaa

SEQ ID NO: 2069433 - RNA, 17 nt, Human
gccacggccaggccaga

SEQ ID NO: 2069434 - RNA, 18 nt, Human
gccacggccaggccagag

SEQ ID NO: 2069435 - RNA, 14 nt, Human
gccaccuggggcag

SEQ ID NO: 2069436 - RNA, 16 nt, Human
gccaccuggggcaguc

SEQ ID NO: 2069437 - RNA, 17 nt, Human
gccaccuggggcaguca

SEQ ID NO: 2069438 - RNA, 12 nt, Human
gccaccuggggc

SEQ ID NO: 2069439 - RNA, 13 nt, Human
gccaccuguccca

SEQ ID NO: 2069440 - RNA, 18 nt, Human
gccaccugucccaccuca

SEQ ID NO: 2069441 - RNA, 19 nt, Human
gccaccugucccaccucaa

SEQ ID NO: 2069442 - RNA, 21 nt, Human
gccaccugcccccuucuccca

SEQ ID NO: 2069443 - RNA, 18 nt, Human
gccaccugcccccuucuc

SEQ ID NO: 2069444 - RNA, 20 nt, Human
gccaccugcccccuucuccc

SEQ ID NO: 2069445 - RNA, 23 nt, Human
gccaccugcccccuucucccaca

SEQ ID NO: 2069446 - RNA, 22 nt, Human
gccacucugccucugccugcau

SEQ ID NO: 2069447 - RNA, 13 nt, Human
gccacuaggcugg

SEQ ID NO: 2069448 - RNA, 14 nt, Human
gccacuaggcuggg

SEQ ID NO: 2069449 - RNA, 15 nt, Human
gccacuaggcugggu

SEQ ID NO: 2069450 - RNA, 16 nt, Human
gccacuaggcugggug

SEQ ID NO: 2069451 - RNA, 17 nt, Human
gccacuaggcugggugc

SEQ ID NO: 2069452 - RNA, 20 nt, Human
gccacuaggcugggugccca

SEQ ID NO: 2069453 - RNA, 21 nt, Human
gccacuaggcugggugcccac

SEQ ID NO: 2069454 - RNA, 22 nt, Human
gccacuaggcugggugcccaca

SEQ ID NO: 2069455 - RNA, 20 nt, Human
gccacuacacuccagccuga

SEQ ID NO: 2069456 - RNA, 21 nt, Human
gccacuacacuccagccugag

SEQ ID NO: 2069457 - RNA, 22 nt, Human
gccacuacacuccagccugagc

SEQ ID NO: 2069458 - RNA, 23 nt, Human
gccacuacacuccagccugagca

SEQ ID NO: 2069459 - RNA, 14 nt, Human
gccacggcagccua

SEQ ID NO: 2069460 - RNA, 14 nt, Human
gccacucgcuuccc

SEQ ID NO: 2069461 - RNA, 18 nt, Human
gccacucgcuucccccau

SEQ ID NO: 2069462 - RNA, 12 nt, Human
gccacucugccu

SEQ ID NO: 2069463 - RNA, 13 nt, Human
gccacucugccuc

SEQ ID NO: 2069464 - RNA, 14 nt, Human
gccacucugccucu

SEQ ID NO: 2069465 - RNA, 15 nt, Human
gccacucugccucug

SEQ ID NO: 2069466 - RNA, 17 nt, Human
gccacucugccucugcc

SEQ ID NO: 2069467 - RNA, 13 nt, Human
gccacucuguucc

SEQ ID NO: 2069468 - RNA, 23 nt, Human
gccacucuguuccuggcucagcc

SEQ ID NO: 2069469 - RNA, 19 nt, Human
gccacucugccucugccug

SEQ ID NO: 2069470 - RNA, 21 nt, Human
gccacucugccucugccugca

SEQ ID NO: 2069471 - RNA, 14 nt, Human
gccacugaagcugg

SEQ ID NO: 2069472 - RNA, 15 nt, Human
gccacugaagcuggg

SEQ ID NO: 2069473 - RNA, 17 nt, Human
gccacugaagcugggau

SEQ ID NO: 2069474 - RNA, 18 nt, Human
gccagaugcaccagcccu

SEQ ID NO: 2069475 - RNA, 17 nt, Human
gccagaugcaccagccc

SEQ ID NO: 2069476 - RNA, 16 nt, Human
gccagaugcaccagcc

SEQ ID NO: 2069477 - RNA, 23 nt, Human
gccagaguggccuggccaggagc

SEQ ID NO: 2069478 - RNA, 24 nt, Human
gccagaguggccuggccaggagcu

SEQ ID NO: 2069479 - RNA, 23 nt, Human
gccagagggagugacagaggcag

SEQ ID NO: 2069480 - RNA, 13 nt, Human
gccagaguggccu

SEQ ID NO: 2069481 - RNA, 14 nt, Human
gccagaguggccug

SEQ ID NO: 2069482 - RNA, 15 nt, Human
gccagaguggccugg

SEQ ID NO: 2069483 - RNA, 17 nt, Human
gccagaguggccuggcc

SEQ ID NO: 2069484 - RNA, 18 nt, Human
gccagaguggccuggcca

SEQ ID NO: 2069485 - RNA, 19 nt, Human
gccagaguggccuggccag

SEQ ID NO: 2069486 - RNA, 22 nt, Human
gccagaguggccuggccaggag

SEQ ID NO: 2069487 - RNA, 22 nt, Human
gccagagggagugacagaggca

SEQ ID NO: 2069488 - RNA, 21 nt, Human
gccagagggagugacagaggc

SEQ ID NO: 2069489 - RNA, 12 nt, Human
gccaaguucuua

SEQ ID NO: 2069490 - RNA, 15 nt, Human
gccaaguuccucuag

SEQ ID NO: 2069491 - RNA, 21 nt, Human
gccaaguuccucuagugcccu

SEQ ID NO: 2069492 - RNA, 15 nt, Human
gccaagugcaggcug

SEQ ID NO: 2069493 - RNA, 16 nt, Human
gccaagugcaggcugg

SEQ ID NO: 2069494 - RNA, 23 nt, Human
gccaagucccaccgguugcuucu

SEQ ID NO: 2069495 - RNA, 20 nt, Human
gccaagugcaggcuggcacc

SEQ ID NO: 2069496 - RNA, 22 nt, Human
gccaagucagcuuugccuucca

SEQ ID NO: 2069497 - RNA, 15 nt, Human
gccaaguuuauauac

SEQ ID NO: 2069498 - RNA, 17 nt, Human
gccaaguuuauauacaa

SEQ ID NO: 2069499 - RNA, 21 nt, Human
gccaauggagacugucucaag

SEQ ID NO: 2069500 - RNA, 19 nt, Human
gccaauggagacugucuca

SEQ ID NO: 2069501 - RNA, 16 nt, Human
gccaauggagacuguc

SEQ ID NO: 2069502 - RNA, 12 nt, Human
gccaaugagguc

SEQ ID NO: 2069503 - RNA, 19 nt, Human
gccaaugaggucugaaaug

SEQ ID NO: 2069504 - RNA, 22 nt, Human
gccaaugaggucugaaauggag

SEQ ID NO: 2069505 - RNA, 18 nt, Human
gccaaugccccacuggca

SEQ ID NO: 2069506 - RNA, 20 nt, Human
gccaaguuuauauacaauua

SEQ ID NO: 2069507 - RNA, 14 nt, Human
gccaaggugggagg

SEQ ID NO: 2069508 - RNA, 15 nt, Human
gccaaggugggagga

SEQ ID NO: 2069509 - RNA, 23 nt, Human
gccaaggugggaggauugcuuga

SEQ ID NO: 2069510 - RNA, 16 nt, Human
gccaaggugggcugag

SEQ ID NO: 2069511 - RNA, 18 nt, Human
gccaaggugggcugagcc

SEQ ID NO: 2069512 - RNA, 19 nt, Human
gccaaggugggcugagccc

SEQ ID NO: 2069513 - RNA, 21 nt, Human
gccaaggugggcugagcccug

SEQ ID NO: 2069514 - RNA, 22 nt, Human
gccaaggugggcugagcccugg

SEQ ID NO: 2069515 - RNA, 23 nt, Human
gccaaggugggcugagcccuggc

SEQ ID NO: 2069516 - RNA, 16 nt, Human
gccaaguaagaaagug

SEQ ID NO: 2069517 - RNA, 12 nt, Human
gcauuugugaaa

SEQ ID NO: 2069518 - RNA, 21 nt, Human
gccaaggcugggggaagaagc

SEQ ID NO: 2069519 - RNA, 13 nt, Human
gcauuugucaaug

SEQ ID NO: 2069520 - RNA, 18 nt, Human
gcauuugucaaugacagu

SEQ ID NO: 2069521 - RNA, 23 nt, Human
gccacagagaaaguacuucucca

SEQ ID NO: 2069522 - RNA, 16 nt, Human
gccacagcccaggccu

SEQ ID NO: 2069523 - RNA, 22 nt, Human
gccacagcccaggccuccagcu

SEQ ID NO: 2069524 - RNA, 23 nt, Human
gccacagcccaggccuccagcuc

SEQ ID NO: 2069525 - RNA, 16 nt, Human
gccacagcagccucug

SEQ ID NO: 2069526 - RNA, 17 nt, Human
gccacagcagccucuga

SEQ ID NO: 2069527 - RNA, 20 nt, Human
gccacagcagccucugaagu

SEQ ID NO: 2069528 - RNA, 14 nt, Human
gccacagccagaac

SEQ ID NO: 2069529 - RNA, 16 nt, Human
gccacagccagaaccc

SEQ ID NO: 2069530 - RNA, 11 nt, Human
gccacagcucu

SEQ ID NO: 2069531 - RNA, 20 nt, Human
gccacagagaaaguacuucu

SEQ ID NO: 2069532 - RNA, 14 nt, Human
gccacagagaaagu

SEQ ID NO: 2069533 - RNA, 23 nt, Human
gccacacuucaggcucuucuccu

SEQ ID NO: 2069534 - RNA, 13 nt, Human
gccacagagaaag

SEQ ID NO: 2069535 - RNA, 22 nt, Human
gccacacuucaggcucuucucc

SEQ ID NO: 2069536 - RNA, 20 nt, Human
gccacacuucaggcucuucu

SEQ ID NO: 2069537 - RNA, 21 nt, Human
gccacacgucugacccucucc

SEQ ID NO: 2069538 - RNA, 21 nt, Human
gccacaacccuguuuuauacu

SEQ ID NO: 2069539 - RNA, 23 nt, Human
gccaaucucuucuaaaaaaaaac

SEQ ID NO: 2069540 - RNA, 19 nt, Human
gccaauugaauaggaucaa

SEQ ID NO: 2069541 - RNA, 19 nt, Human
gccacaccaucuccuuuca

SEQ ID NO: 2069542 - RNA, 14 nt, Human
gcccagaggcacag

SEQ ID NO: 2069543 - RNA, 19 nt, Human
gcccagaggcacagccggg

SEQ ID NO: 2069544 - RNA, 12 nt, Human
gcccagagcugg

SEQ ID NO: 2069545 - RNA, 13 nt, Human
gcccagagcuggg

SEQ ID NO: 2069546 - RNA, 15 nt, Human
gcccagagcugggug

SEQ ID NO: 2069547 - RNA, 16 nt, Human
gcccagagcuggguga

SEQ ID NO: 2069548 - RNA, 19 nt, Human
gcccagagcugggugagug

SEQ ID NO: 2069549 - RNA, 13 nt, Human
gcccagagggccc

SEQ ID NO: 2069550 - RNA, 15 nt, Human
gcccagagggcccag

SEQ ID NO: 2069551 - RNA, 16 nt, Human
gcccagagggcccagg

SEQ ID NO: 2069552 - RNA, 20 nt, Human
gcccagagggcccaggcagg

SEQ ID NO: 2069553 - RNA, 15 nt, Human
gcccagagaagccaa

SEQ ID NO: 2069554 - RNA, 13 nt, Human
gcccagagaagcc

SEQ ID NO: 2069555 - RNA, 18 nt, Human
gcccaauauuauaauuuu

SEQ ID NO: 2069556 - RNA, 12 nt, Human
gcccaauauuau

SEQ ID NO: 2069557 - RNA, 16 nt, Human
gcccagaccccucugg

SEQ ID NO: 2069558 - RNA, 19 nt, Human
gcccagaccccucuggcca

SEQ ID NO: 2069559 - RNA, 20 nt, Human
gcccagaccccucuggccag

SEQ ID NO: 2069560 - RNA, 21 nt, Human
gcccagaccccucuggccagg

SEQ ID NO: 2069561 - RNA, 22 nt, Human
gcccaauucuuacaaacaugug

SEQ ID NO: 2069562 - RNA, 20 nt, Human
gcccagccauuaccauggag

SEQ ID NO: 2069563 - RNA, 21 nt, Human
gcccagccauuaccauggaga

SEQ ID NO: 2069564 - RNA, 22 nt, Human
gcccagccauuaccauggagac

SEQ ID NO: 2069565 - RNA, 23 nt, Human
gcccagccauuaccauggagaca

SEQ ID NO: 2069566 - RNA, 20 nt, Human
gcccagccaaacccugucug

SEQ ID NO: 2069567 - RNA, 21 nt, Human
gcccagccaaacccugucuga

SEQ ID NO: 2069568 - RNA, 16 nt, Human
gcccagcccagcuggu

SEQ ID NO: 2069569 - RNA, 12 nt, Human
gcccagcccagc

SEQ ID NO: 2069570 - RNA, 13 nt, Human
gcccagcccagcu

SEQ ID NO: 2069571 - RNA, 14 nt, Human
gcccagcccagcug

SEQ ID NO: 2069572 - RNA, 16 nt, Human
gcccagcccagcugcu

SEQ ID NO: 2069573 - RNA, 15 nt, Human
gcccagcccagcugg

SEQ ID NO: 2069574 - RNA, 21 nt, Human
gcccagagggcccaggcaggc

SEQ ID NO: 2069575 - RNA, 17 nt, Human
gcccagccaaacccugu

SEQ ID NO: 2069576 - RNA, 15 nt, Human
gcccagaucccagaa

SEQ ID NO: 2069577 - RNA, 15 nt, Human
gcccaguugggugga

SEQ ID NO: 2069578 - RNA, 20 nt, Human
gcccagucuggaaugcagug

SEQ ID NO: 2069579 - RNA, 19 nt, Human
gcccagucuggaaugcagu

SEQ ID NO: 2069580 - RNA, 20 nt, Human
gcccaggcuggcgugcagug

SEQ ID NO: 2069581 - RNA, 19 nt, Human
gcccaggcuggcgugcagu

SEQ ID NO: 2069582 - RNA, 22 nt, Human
gcccaggcuggcgugcaguggu

SEQ ID NO: 2069583 - RNA, 17 nt, Human
gcccagcuggugggaag

SEQ ID NO: 2069584 - RNA, 16 nt, Human
gcccagcugcucugcc

SEQ ID NO: 2069585 - RNA, 18 nt, Human
gcccagcugcucugccca

SEQ ID NO: 2069586 - RNA, 19 nt, Human
gcccagcugcucugcccag

SEQ ID NO: 2069587 - RNA, 20 nt, Human
gcccagcugcucugcccaga

SEQ ID NO: 2069588 - RNA, 21 nt, Human
gcccagcugcucugcccagag

SEQ ID NO: 2069589 - RNA, 22 nt, Human
gcccagcugcucugcccagagc

SEQ ID NO: 2069590 - RNA, 23 nt, Human
gcccagcugcucugcccagagcu

SEQ ID NO: 2069591 - RNA, 15 nt, Human
gcccagcccuguucu

SEQ ID NO: 2069592 - RNA, 16 nt, Human
gcccagcccuguucug

SEQ ID NO: 2069593 - RNA, 16 nt, Human
gccaggggcuuuugcu

SEQ ID NO: 2069594 - RNA, 15 nt, Human
gccagggauggggcc

SEQ ID NO: 2069595 - RNA, 19 nt, Human
gccagggauggggccacag

SEQ ID NO: 2069596 - RNA, 20 nt, Human
gccagggauggggccacagc

SEQ ID NO: 2069597 - RNA, 21 nt, Human
gccagggauggggccacagcc

SEQ ID NO: 2069598 - RNA, 11 nt, Human
gccagggagcu

SEQ ID NO: 2069599 - RNA, 18 nt, Human
gccagguggccacuccag

SEQ ID NO: 2069600 - RNA, 17 nt, Human
gccagguuuuuggucug

SEQ ID NO: 2069601 - RNA, 22 nt, Human
gccagguuucugcccacauugg

SEQ ID NO: 2069602 - RNA, 14 nt, Human
gccaggcugccaag

SEQ ID NO: 2069603 - RNA, 19 nt, Human
gccagugccuuaccuccug

SEQ ID NO: 2069604 - RNA, 17 nt, Human
gccaucgguccugucuc

SEQ ID NO: 2069605 - RNA, 18 nt, Human
gccaucgguccugucucc

SEQ ID NO: 2069606 - RNA, 19 nt, Human
gccagugaugcuaaagguu

SEQ ID NO: 2069607 - RNA, 20 nt, Human
gccagugaugcuaaagguug

SEQ ID NO: 2069608 - RNA, 17 nt, Human
gccagugaccaaccuuu

SEQ ID NO: 2069609 - RNA, 17 nt, Human
gccagugaccugaggaa

SEQ ID NO: 2069610 - RNA, 18 nt, Human
gccagugaccugaggaag

SEQ ID NO: 2069611 - RNA, 20 nt, Human
gccagugaccugaggaagcg

SEQ ID NO: 2069612 - RNA, 10 nt, Human
gccagugccu

SEQ ID NO: 2069613 - RNA, 11 nt, Human
gccagugccuu

SEQ ID NO: 2069614 - RNA, 15 nt, Human
gccagugccuuaccu

SEQ ID NO: 2069615 - RNA, 17 nt, Human
gccagugccuuaccucc

SEQ ID NO: 2069616 - RNA, 14 nt, Human
gccaugccacccug

SEQ ID NO: 2069617 - RNA, 19 nt, Human
gccaugccagcuuaucuca

SEQ ID NO: 2069618 - RNA, 13 nt, Human
gccaugccagcuu

SEQ ID NO: 2069619 - RNA, 18 nt, Human
gccaugccagcuuaucuc

SEQ ID NO: 2069620 - RNA, 18 nt, Human
gccaugagcuccagaccc

SEQ ID NO: 2069621 - RNA, 19 nt, Human
gccaugagcuccagacccc

SEQ ID NO: 2069622 - RNA, 22 nt, Human
gccaugagcuccagacccccag

SEQ ID NO: 2069623 - RNA, 23 nt, Human
gccaugagcuccagacccccagc

SEQ ID NO: 2069624 - RNA, 14 nt, Human
gccaugagcuccag

SEQ ID NO: 2069625 - RNA, 15 nt, Human
gccaugagcuccaga

SEQ ID NO: 2069626 - RNA, 16 nt, Human
gccaugagcuccagac

SEQ ID NO: 2069627 - RNA, 17 nt, Human
gccaugagcuccagacc

SEQ ID NO: 2069628 - RNA, 21 nt, Human
gcccaaauuaucaagcuaaua

SEQ ID NO: 2069629 - RNA, 22 nt, Human
gcccaaauuaucaagcuaauaa

SEQ ID NO: 2069630 - RNA, 23 nt, Human
gcccaaauuaucaagcuaauaaa

SEQ ID NO: 2069631 - RNA, 14 nt, Human
gcccaaccuccuga

SEQ ID NO: 2069632 - RNA, 13 nt, Human
gcccaaccucagc

SEQ ID NO: 2069633 - RNA, 14 nt, Human
gcccaaccucagca

SEQ ID NO: 2069634 - RNA, 17 nt, Human
gcccaaccucagcaacc

SEQ ID NO: 2069635 - RNA, 13 nt, Human
gcccaaccuccug

SEQ ID NO: 2069636 - RNA, 14 nt, Human
gcccaaccugcucu

SEQ ID NO: 2069637 - RNA, 23 nt, Human
gcccaaccggggagcccccgccc

SEQ ID NO: 2069638 - RNA, 18 nt, Human
gccauggacagaagaagg

SEQ ID NO: 2069639 - RNA, 18 nt, Human
gccauggacucuacacug

SEQ ID NO: 2069640 - RNA, 20 nt, Human
gccauggacucuacacugug

SEQ ID NO: 2069641 - RNA, 22 nt, Human
gccauggacucuacacugugaa

SEQ ID NO: 2069642 - RNA, 23 nt, Human
gccauggacucuacacugugaac

SEQ ID NO: 2069643 - RNA, 15 nt, Human
gcaggaaggagagcc

SEQ ID NO: 2069644 - RNA, 12 nt, Human
gcaggaaggaga

SEQ ID NO: 2069645 - RNA, 13 nt, Human
gcaggaaggagag

SEQ ID NO: 2069646 - RNA, 16 nt, Human
gcaggaagcugugaga

SEQ ID NO: 2069647 - RNA, 14 nt, Human
gcaggaagcucaga

SEQ ID NO: 2069648 - RNA, 17 nt, Human
gcaggaagcucagacug

SEQ ID NO: 2069649 - RNA, 18 nt, Human
gcaggaagcucagacugg

SEQ ID NO: 2069650 - RNA, 13 nt, Human
gcaggaagcugcu

SEQ ID NO: 2069651 - RNA, 15 nt, Human
gcaggaagcugcucc

SEQ ID NO: 2069652 - RNA, 16 nt, Human
gcaggaagcugcuccg

SEQ ID NO: 2069653 - RNA, 18 nt, Human
gcaggaagcaacgaaggg

SEQ ID NO: 2069654 - RNA, 23 nt, Human
gcagccucccucugaccugcagg

SEQ ID NO: 2069655 - RNA, 18 nt, Human
gcagccucgaacuccugg

SEQ ID NO: 2069656 - RNA, 19 nt, Human
gcagccucgaacuccuggg

SEQ ID NO: 2069657 - RNA, 21 nt, Human
gcagccucgaacuccugggcu

SEQ ID NO: 2069658 - RNA, 14 nt, Human
gcagccucugaagu

SEQ ID NO: 2069659 - RNA, 22 nt, Human
gcagccucugaaguuggacagc

SEQ ID NO: 2069660 - RNA, 14 nt, Human
gcagccucccucug

SEQ ID NO: 2069661 - RNA, 16 nt, Human
gcagccucccucugac

SEQ ID NO: 2069662 - RNA, 22 nt, Human
gcagccucccucugaccugcag

SEQ ID NO: 2069663 - RNA, 24 nt, Human
gcagcccugcuuugggcugcccug

SEQ ID NO: 2069664 - RNA, 14 nt, Human
gcagcaggccuguu

SEQ ID NO: 2069665 - RNA, 20 nt, Human
gcagcaggccuguugcuuuu

SEQ ID NO: 2069666 - RNA, 14 nt, Human
gcagcccugcuuug

SEQ ID NO: 2069667 - RNA, 20 nt, Human
gcagcagggagggcuucugc

SEQ ID NO: 2069668 - RNA, 18 nt, Human
gcagcagggagggcuucu

SEQ ID NO: 2069669 - RNA, 19 nt, Human
gcagcagggagggcuucug

SEQ ID NO: 2069670 - RNA, 12 nt, Human
gcagcagcuugc

SEQ ID NO: 2069671 - RNA, 13 nt, Human
gcagcagcuugcu

SEQ ID NO: 2069672 - RNA, 23 nt, Human
gcagcagcuuuuaauacagggua

SEQ ID NO: 2069673 - RNA, 17 nt, Human
gcagacuggugagcaga

SEQ ID NO: 2069674 - RNA, 13 nt, Human
gcagacugguggg

SEQ ID NO: 2069675 - RNA, 12 nt, Human
gcagacuggagg

SEQ ID NO: 2069676 - RNA, 13 nt, Human
gcagacuggaggg

SEQ ID NO: 2069677 - RNA, 14 nt, Human
gcagacuggagggg

SEQ ID NO: 2069678 - RNA, 15 nt, Human
gcagacuggagggga

SEQ ID NO: 2069679 - RNA, 14 nt, Human
gcagagaagccuug

SEQ ID NO: 2069680 - RNA, 16 nt, Human
gcagagaagccuuggu

SEQ ID NO: 2069681 - RNA, 16 nt, Human
gcacuugcagacucua

SEQ ID NO: 2069682 - RNA, 14 nt, Human
gcacuugcagacuc

SEQ ID NO: 2069683 - RNA, 22 nt, Human
gcacuugcacgcccauguguga

SEQ ID NO: 2069684 - RNA, 21 nt, Human
gcacuugcacgcccaugugug

SEQ ID NO: 2069685 - RNA, 22 nt, Human
gcacuucgggaggucgaggcag

SEQ ID NO: 2069686 - RNA, 22 nt, Human
gcagacucuacagaggccaugg

SEQ ID NO: 2069687 - RNA, 19 nt, Human
gcagacucuacagaggcca

SEQ ID NO: 2069688 - RNA, 18 nt, Human
gcagacucuacagaggcc

SEQ ID NO: 2069689 - RNA, 17 nt, Human
gcagacucuacagaggc

SEQ ID NO: 2069690 - RNA, 16 nt, Human
gcagaugaccccuccc

SEQ ID NO: 2069691 - RNA, 15 nt, Human
gcagaugaccccucc

SEQ ID NO: 2069692 - RNA, 13 nt, Human
gcagaugauccau

SEQ ID NO: 2069693 - RNA, 14 nt, Human
gcagaugauccaug

SEQ ID NO: 2069694 - RNA, 15 nt, Human
gcagaugcaaagagg

SEQ ID NO: 2069695 - RNA, 16 nt, Human
gcagaugcaaagaggc

SEQ ID NO: 2069696 - RNA, 17 nt, Human
gcagaugcaaagaggca

SEQ ID NO: 2069697 - RNA, 18 nt, Human
gcagauguccuugaugcu

SEQ ID NO: 2069698 - RNA, 13 nt, Human
gcagcagagccug

SEQ ID NO: 2069699 - RNA, 18 nt, Human
gcagcagagccuggaaga

SEQ ID NO: 2069700 - RNA, 12 nt, Human
gcagaggggcuu

SEQ ID NO: 2069701 - RNA, 16 nt, Human
gcagaggggcuuucug

SEQ ID NO: 2069702 - RNA, 18 nt, Human
gcagaggggcuuucugga

SEQ ID NO: 2069703 - RNA, 19 nt, Human
gcagaggggcuuucuggag

SEQ ID NO: 2069704 - RNA, 20 nt, Human
gcagaggggcuuucuggaga

SEQ ID NO: 2069705 - RNA, 21 nt, Human
gcagaggggcuuucuggagag

SEQ ID NO: 2069706 - RNA, 21 nt, Human
gcagagguugcagugagcuga

SEQ ID NO: 2069707 - RNA, 15 nt, Human
gcagaucccagcuca

SEQ ID NO: 2069708 - RNA, 12 nt, Human
gcagaucccagc

SEQ ID NO: 2069709 - RNA, 14 nt, Human
gcagaucccagcuc

SEQ ID NO: 2069710 - RNA, 13 nt, Human
gcagaucugugcc

SEQ ID NO: 2069711 - RNA, 14 nt, Human
gcagaucugugccc

SEQ ID NO: 2069712 - RNA, 20 nt, Human
gcagaucugugccccaugcc

SEQ ID NO: 2069713 - RNA, 22 nt, Human
gcagaucugugccccaugccug

SEQ ID NO: 2069714 - RNA, 22 nt, Human
gcacuauaauguaagcucuacu

SEQ ID NO: 2069715 - RNA, 20 nt, Human
gcacuauaauguaagcucua

SEQ ID NO: 2069716 - RNA, 14 nt, Human
gcacuauaauguaa

SEQ ID NO: 2069717 - RNA, 15 nt, Human
gcacuauaauguaag

SEQ ID NO: 2069718 - RNA, 19 nt, Human
gcacuaauuugauguuuac

SEQ ID NO: 2069719 - RNA, 20 nt, Human
gcacuaaggugugcucugau

SEQ ID NO: 2069720 - RNA, 14 nt, Human
gcacgugugugcac

SEQ ID NO: 2069721 - RNA, 12 nt, Human
gcacgcuguggg

SEQ ID NO: 2069722 - RNA, 16 nt, Human
gcacgcugugggcagg

SEQ ID NO: 2069723 - RNA, 20 nt, Human
gcacgcugugggcagguggg

SEQ ID NO: 2069724 - RNA, 18 nt, Human
gcacgugguaaaacacuu

SEQ ID NO: 2069725 - RNA, 15 nt, Human
gcacguuuaaaguuc

SEQ ID NO: 2069726 - RNA, 17 nt, Human
gcacguuuaaaguucug

SEQ ID NO: 2069727 - RNA, 19 nt, Human
gcacguuuaaaguucugug

SEQ ID NO: 2069728 - RNA, 14 nt, Human
gcacuaaagcagug

SEQ ID NO: 2069729 - RNA, 20 nt, Human
gcacuaaagcaguggacacc

SEQ ID NO: 2069730 - RNA, 16 nt, Human
gcacccucaggcaggu

SEQ ID NO: 2069731 - RNA, 19 nt, Human
gcacccucaggcagguggg

SEQ ID NO: 2069732 - RNA, 22 nt, Human
gcacgcccaugugugagugugu

SEQ ID NO: 2069733 - RNA, 15 nt, Human
gcacgcccaugugug

SEQ ID NO: 2069734 - RNA, 17 nt, Human
gcacgcccaugugugag

SEQ ID NO: 2069735 - RNA, 18 nt, Human
gcacgcccaugugugagu

SEQ ID NO: 2069736 - RNA, 16 nt, Human
gcacgcacacugucug

SEQ ID NO: 2069737 - RNA, 15 nt, Human
gcacgcacacugucu

SEQ ID NO: 2069738 - RNA, 20 nt, Human
gcacccucauacacagaaac

SEQ ID NO: 2069739 - RNA, 17 nt, Human
gcacccucauacacaga

SEQ ID NO: 2069740 - RNA, 21 nt, Human
gcacagcuucauuuccugugu

SEQ ID NO: 2069741 - RNA, 23 nt, Human
gcacagcuucauuuccugugucu

SEQ ID NO: 2069742 - RNA, 16 nt, Human
gcacagggcaguggga

SEQ ID NO: 2069743 - RNA, 16 nt, Human
gcacagccggggccug

SEQ ID NO: 2069744 - RNA, 23 nt, Human
gcacagccggggccugccuagca

SEQ ID NO: 2069745 - RNA, 14 nt, Human
gauugaaaaggaag

SEQ ID NO: 2069746 - RNA, 16 nt, Human
gauuguuaaaauaacu

SEQ ID NO: 2069747 - RNA, 14 nt, Human
gauuguuaaaauaa

SEQ ID NO: 2069748 - RNA, 17 nt, Human
gcacagcccaaagaagg

SEQ ID NO: 2069749 - RNA, 14 nt, Human
gcaccagcagccug

SEQ ID NO: 2069750 - RNA, 17 nt, Human
gcaccaagagccaaugg

SEQ ID NO: 2069751 - RNA, 13 nt, Human
gcaccagcagccu

SEQ ID NO: 2069752 - RNA, 13 nt, Human
gcaccaagcccac

SEQ ID NO: 2069753 - RNA, 14 nt, Human
gcaccaagcccaca

SEQ ID NO: 2069754 - RNA, 16 nt, Human
gcaccaagcccacagg

SEQ ID NO: 2069755 - RNA, 17 nt, Human
gcaccaagcccacaggu

SEQ ID NO: 2069756 - RNA, 20 nt, Human
gcaggccaagagcagaggca

SEQ ID NO: 2069757 - RNA, 22 nt, Human
gcaggccaagagcagaggcagc

SEQ ID NO: 2069758 - RNA, 24 nt, Human
gcaggccaagagcagaggcagcga

SEQ ID NO: 2069759 - RNA, 22 nt, Human
gcaggccagcugugguuuucuu

SEQ ID NO: 2069760 - RNA, 22 nt, Human
gcaggcccaaauuaucaagcua

SEQ ID NO: 2069761 - RNA, 12 nt, Human
gcaggcccaccu

SEQ ID NO: 2069762 - RNA, 9 nt, Human
gcaggcagu

SEQ ID NO: 2069763 - RNA, 13 nt, Human
gcaggcagggcug

SEQ ID NO: 2069764 - RNA, 22 nt, Human
gcaggagaaucacuugcacucc

SEQ ID NO: 2069765 - RNA, 15 nt, Human
gcagggaggggacua

SEQ ID NO: 2069766 - RNA, 12 nt, Human
gcagggcucuga

SEQ ID NO: 2069767 - RNA, 22 nt, Human
gcaggcggccuuuguugcucag

SEQ ID NO: 2069768 - RNA, 14 nt, Human
gcagggucaggaga

SEQ ID NO: 2069769 - RNA, 15 nt, Human
gcagggucaggagag

SEQ ID NO: 2069770 - RNA, 16 nt, Human
gcagggucaggagagg

SEQ ID NO: 2069771 - RNA, 16 nt, Human
gcagggucucacucug

SEQ ID NO: 2069772 - RNA, 19 nt, Human
gcaggguccuagaaauucc

SEQ ID NO: 2069773 - RNA, 21 nt, Human
gcaguggugcgaucuggguuc

SEQ ID NO: 2069774 - RNA, 20 nt, Human
gcaguggugcgaucuggguu

SEQ ID NO: 2069775 - RNA, 22 nt, Human
gcaguggugcgaucuggguuca

SEQ ID NO: 2069776 - RNA, 17 nt, Human
gcaguucagcaccaccc

SEQ ID NO: 2069777 - RNA, 19 nt, Human
gcaguucagcaccacccua

SEQ ID NO: 2069778 - RNA, 19 nt, Human
gcaguggugcgaucugggu

SEQ ID NO: 2069779 - RNA, 18 nt, Human
gcaguggugcgaucuggg

SEQ ID NO: 2069780 - RNA, 15 nt, Human
gcaguggggcugggg

SEQ ID NO: 2069781 - RNA, 21 nt, Human
gcaguggugcgaucauggcuc

SEQ ID NO: 2069782 - RNA, 21 nt, Human
gcagugggacagggcauggcc

SEQ ID NO: 2069783 - RNA, 11 nt, Human
gcagugggagc

SEQ ID NO: 2069784 - RNA, 16 nt, Human
gcaguggcucacgccu

SEQ ID NO: 2069785 - RNA, 17 nt, Human
gcagggucaggagaggg

SEQ ID NO: 2069786 - RNA, 22 nt, Human
gcaucauuauuugcagagacag

SEQ ID NO: 2069787 - RNA, 14 nt, Human
gcaucaucuguaga

SEQ ID NO: 2069788 - RNA, 20 nt, Human
gcaucaucuguagauacuag

SEQ ID NO: 2069789 - RNA, 12 nt, Human
gcaucucagccc

SEQ ID NO: 2069790 - RNA, 18 nt, Human
gcaucauuccaccauggc

SEQ ID NO: 2069791 - RNA, 14 nt, Human
gcaucucagcccac

SEQ ID NO: 2069792 - RNA, 13 nt, Human
gcaucucagccca

SEQ ID NO: 2069793 - RNA, 12 nt, Human
gcauccaacuga

SEQ ID NO: 2069794 - RNA, 18 nt, Human
gcaucugcuaauaaaacc

SEQ ID NO: 2069795 - RNA, 18 nt, Human
gcaucugccccuccccca

SEQ ID NO: 2069796 - RNA, 11 nt, Human
gcaucuggccu

SEQ ID NO: 2069797 - RNA, 12 nt, Human
gcaucuggccuu

SEQ ID NO: 2069798 - RNA, 14 nt, Human
gcaucucuugaggc

SEQ ID NO: 2069799 - RNA, 14 nt, Human
gcaucugccccucc

SEQ ID NO: 2069800 - RNA, 15 nt, Human
gcaucugccccuccc

SEQ ID NO: 2069801 - RNA, 17 nt, Human
gcaucugccccuccccc

SEQ ID NO: 2069802 - RNA, 15 nt, Human
gcaucucagcccaca

SEQ ID NO: 2069803 - RNA, 16 nt, Human
gcaucuccugugcaug

SEQ ID NO: 2069804 - RNA, 14 nt, Human
gcaucuccugagga

SEQ ID NO: 2069805 - RNA, 22 nt, Human
gcaucuccugaggaucagaaag

SEQ ID NO: 2069806 - RNA, 23 nt, Human
gcaucuccugaggaucagaaagu

SEQ ID NO: 2069807 - RNA, 15 nt, Human
gcaucuccugugcau

SEQ ID NO: 2069808 - RNA, 16 nt, Human
gcaugaccugugacca

SEQ ID NO: 2069809 - RNA, 14 nt, Human
gcauguucucugag

SEQ ID NO: 2069810 - RNA, 18 nt, Human
gcauguuaccuccuauaa

SEQ ID NO: 2069811 - RNA, 13 nt, Human
gcauguuacauaa

SEQ ID NO: 2069812 - RNA, 14 nt, Human
gcaugccuggacaa

SEQ ID NO: 2069813 - RNA, 19 nt, Human
gcaugugugcgagugugug

SEQ ID NO: 2069814 - RNA, 11 nt, Human
gcaugugugug

SEQ ID NO: 2069815 - RNA, 16 nt, Human
gcaugugugugcucag

SEQ ID NO: 2069816 - RNA, 14 nt, Human
gcaugugugugcuc

SEQ ID NO: 2069817 - RNA, 19 nt, Human
gcauguguuugguucuggg

SEQ ID NO: 2069818 - RNA, 19 nt, Human
gcauuacagagaggagaaa

SEQ ID NO: 2069819 - RNA, 13 nt, Human
gcauuacauuccu

SEQ ID NO: 2069820 - RNA, 14 nt, Human
gcauuaacuaaucu

SEQ ID NO: 2069821 - RNA, 18 nt, Human
gcauuaacuaaucuauug

SEQ ID NO: 2069822 - RNA, 22 nt, Human
gcauuaacuaaucuauuggguu

SEQ ID NO: 2069823 - RNA, 14 nt, Human
gcauuacagagagg

SEQ ID NO: 2069824 - RNA, 19 nt, Human
gcauuaaauauaauaugca

SEQ ID NO: 2069825 - RNA, 20 nt, Human
gcauguguuugguucugggg

SEQ ID NO: 2069826 - RNA, 22 nt, Human
gcauguguuugguucuggggcc

SEQ ID NO: 2069827 - RNA, 22 nt, Human
gcauugagaacugcauauguuu

SEQ ID NO: 2069828 - RNA, 16 nt, Human
gcauugaauauauuau

SEQ ID NO: 2069829 - RNA, 12 nt, Human
gcauugagaacu

SEQ ID NO: 2069830 - RNA, 21 nt, Human
gcauugagaacugcauauguu

SEQ ID NO: 2069831 - RNA, 13 nt, Human
gcauucccugagu

SEQ ID NO: 2069832 - RNA, 14 nt, Human
gcauucccugaguc

SEQ ID NO: 2069833 - RNA, 21 nt, Human
gcauucccugagucaccagga

SEQ ID NO: 2069834 - RNA, 22 nt, Human
gcauucccugagucaccaggaa

SEQ ID NO: 2069835 - RNA, 16 nt, Human
gcauuccuacaaagau

SEQ ID NO: 2069836 - RNA, 19 nt, Human
gcauuccuacaaagauguu

SEQ ID NO: 2069837 - RNA, 14 nt, Human
gcuuguuggauuuu

SEQ ID NO: 2069838 - RNA, 18 nt, Human
gcuuguucccucucccug

SEQ ID NO: 2069839 - RNA, 15 nt, Human
gcuuguuauuuauaa

SEQ ID NO: 2069840 - RNA, 23 nt, Human
gcuuggaccucgugcuuuaagug

SEQ ID NO: 2069841 - RNA, 16 nt, Human
gcuugugaucugggaa

SEQ ID NO: 2069842 - RNA, 17 nt, Human
gcuugugaucugggaac

SEQ ID NO: 2069843 - RNA, 14 nt, Human
gcuucuguuucuag

SEQ ID NO: 2069844 - RNA, 15 nt, Human
gcuucuguuucuagu

SEQ ID NO: 2069845 - RNA, 15 nt, Human
gcuucuuaaagaguu

SEQ ID NO: 2069846 - RNA, 14 nt, Human
gcuucuuaaaugag

SEQ ID NO: 2069847 - RNA, 19 nt, Human
gcuucuuaauauaacugcc

SEQ ID NO: 2069848 - RNA, 16 nt, Human
gcuugccgaaacugga

SEQ ID NO: 2069849 - RNA, 17 nt, Human
gcuugccgaaacuggaa

SEQ ID NO: 2069850 - RNA, 18 nt, Human
gcuugccgaaacuggaag

SEQ ID NO: 2069851 - RNA, 19 nt, Human
gcuugccgaaacuggaagu

SEQ ID NO: 2069852 - RNA, 20 nt, Human
gcuugccgaaacuggaaguu

SEQ ID NO: 2069853 - RNA, 13 nt, Human
gcuugccuagggc

SEQ ID NO: 2069854 - RNA, 17 nt, Human
gcuugccuagggccugg

SEQ ID NO: 2069855 - RNA, 21 nt, Human
gcuugccuagggccuggucca

SEQ ID NO: 2069856 - RNA, 22 nt, Human
gcuugccuagggccugguccau

SEQ ID NO: 2069857 - RNA, 13 nt, Human
gcuugccugcagg

SEQ ID NO: 2069858 - RNA, 14 nt, Human
gcuugccugcaggc

SEQ ID NO: 2069859 - RNA, 18 nt, Human
gcuuggaaacuggaugag

SEQ ID NO: 2069860 - RNA, 12 nt, Human
gcuugcugcacc

SEQ ID NO: 2069861 - RNA, 21 nt, Human
gcuugcugcaccccaagucca

SEQ ID NO: 2069862 - RNA, 19 nt, Human
gcuuggaaagcaucaccuc

SEQ ID NO: 2069863 - RNA, 21 nt, Human
gcuuggaaagcaucaccucag

SEQ ID NO: 2069864 - RNA, 23 nt, Human
gcuugcucuucagugggagaaaa

SEQ ID NO: 2069865 - RNA, 16 nt, Human
gcuugcuagcuaugug

SEQ ID NO: 2069866 - RNA, 22 nt, Human
gcuugcuagcuaugugaccuug

SEQ ID NO: 2069867 - RNA, 22 nt, Human
gcuugcguuagaaugaggagga

SEQ ID NO: 2069868 - RNA, 19 nt, Human
gcuuugggcugcccuggug

SEQ ID NO: 2069869 - RNA, 18 nt, Human
gcuuugggcugcccuggu

SEQ ID NO: 2069870 - RNA, 16 nt, Human
gcuuugguuuaaaaga

SEQ ID NO: 2069871 - RNA, 14 nt, Human
gcuuuuaguaccca

SEQ ID NO: 2069872 - RNA, 19 nt, Human
gcuuuuaguacccaccuga

SEQ ID NO: 2069873 - RNA, 22 nt, Human
gcuuuuaguacccaccugagcu

SEQ ID NO: 2069874 - RNA, 23 nt, Human
gcuuuuaguacccaccugagcuu

SEQ ID NO: 2069875 - RNA, 17 nt, Human
gcuuuggucucuugcuu

SEQ ID NO: 2069876 - RNA, 21 nt, Human
gcuuguuugcucaccuggggu

SEQ ID NO: 2069877 - RNA, 23 nt, Human
gcuuguuuucuugccaaugaggu

SEQ ID NO: 2069878 - RNA, 19 nt, Human
gcuuguuugcucaccuggg

SEQ ID NO: 2069879 - RNA, 18 nt, Human
gcuuucaugauuagcaag

SEQ ID NO: 2069880 - RNA, 14 nt, Human
gcuuucagggccuc

SEQ ID NO: 2069881 - RNA, 18 nt, Human
gcuuucagggccuccagc

SEQ ID NO: 2069882 - RNA, 12 nt, Human
gcuuucaugauu

SEQ ID NO: 2069883 - RNA, 20 nt, Human
gcuucaguggcagcugcuuu

SEQ ID NO: 2069884 - RNA, 13 nt, Human
gcuuaucucaggg

SEQ ID NO: 2069885 - RNA, 19 nt, Human
gcuucaguggcagcugcuu

SEQ ID NO: 2069886 - RNA, 17 nt, Human
gcuuaucaauaaaccug

SEQ ID NO: 2069887 - RNA, 17 nt, Human
gcuuauccuuccacgga

SEQ ID NO: 2069888 - RNA, 13 nt, Human
gcuuaucaauuug

SEQ ID NO: 2069889 - RNA, 16 nt, Human
gcuuaucaauuuguca

SEQ ID NO: 2069890 - RNA, 20 nt, Human
gcuuaucaauuugucauuuu

SEQ ID NO: 2069891 - RNA, 22 nt, Human
gcuuaucaauuugucauuuuga

SEQ ID NO: 2069892 - RNA, 23 nt, Human
gcuuaucaauuugucauuuugaa

SEQ ID NO: 2069893 - RNA, 23 nt, Human
gcuuaucaugcugucuuuacaug

SEQ ID NO: 2069894 - RNA, 13 nt, Human
gcuucaugccuuu

SEQ ID NO: 2069895 - RNA, 15 nt, Human
gcuucaugccuuugu

SEQ ID NO: 2069896 - RNA, 16 nt, Human
gcuucaugccuuugua

SEQ ID NO: 2069897 - RNA, 17 nt, Human
gcuucaugccuuuguaa

SEQ ID NO: 2069898 - RNA, 18 nt, Human
gcuucaugaaaauccuac

SEQ ID NO: 2069899 - RNA, 20 nt, Human
gcuucaugaaaauccuacca

SEQ ID NO: 2069900 - RNA, 13 nt, Human
gcuuagaccucag

SEQ ID NO: 2069901 - RNA, 14 nt, Human
gcuuagaccucagc

SEQ ID NO: 2069902 - RNA, 15 nt, Human
gcuuagaccucagcc

SEQ ID NO: 2069903 - RNA, 16 nt, Human
gcuuagaccucagccu

SEQ ID NO: 2069904 - RNA, 17 nt, Human
gcuuagaccucagccug

SEQ ID NO: 2069905 - RNA, 18 nt, Human
gcuuagaccucagccugu

SEQ ID NO: 2069906 - RNA, 21 nt, Human
gcuuacuacaugugggagcuu

SEQ ID NO: 2069907 - RNA, 14 nt, Human
gcuuacucauuaaa

SEQ ID NO: 2069908 - RNA, 22 nt, Human
gcuucucacugccaugccagcu

SEQ ID NO: 2069909 - RNA, 16 nt, Human
gcuucucauccugcag

SEQ ID NO: 2069910 - RNA, 21 nt, Human
gcuuccacguacugcagccuc

SEQ ID NO: 2069911 - RNA, 19 nt, Human
gcuuccagaaaaccccagc

SEQ ID NO: 2069912 - RNA, 18 nt, Human
gcuucauuuccugugucu

SEQ ID NO: 2069913 - RNA, 22 nt, Human
gcuucauucaagucagcucuuc

SEQ ID NO: 2069914 - RNA, 13 nt, Human
gcuucuggagccc

SEQ ID NO: 2069915 - RNA, 14 nt, Human
gcuucuggagcccu

SEQ ID NO: 2069916 - RNA, 17 nt, Human
gcuucuggagcccuugg

SEQ ID NO: 2069917 - RNA, 18 nt, Human
gcuucuggagcccuuggg

SEQ ID NO: 2069918 - RNA, 17 nt, Human
gcuucucauccugcagg

SEQ ID NO: 2069919 - RNA, 18 nt, Human
gcuucucauccugcaggc

SEQ ID NO: 2069920 - RNA, 12 nt, Human
gcuucuggagcc

SEQ ID NO: 2069921 - RNA, 20 nt, Human
gcuggucucaaacuccugac

SEQ ID NO: 2069922 - RNA, 19 nt, Human
gcuggucucaaacuccuga

SEQ ID NO: 2069923 - RNA, 14 nt, Human
gcuggucccacuca

SEQ ID NO: 2069924 - RNA, 15 nt, Human
gcuggugcagggccu

SEQ ID NO: 2069925 - RNA, 13 nt, Human
gcuggugcauuac

SEQ ID NO: 2069926 - RNA, 17 nt, Human
gcuggugcauuacagag

SEQ ID NO: 2069927 - RNA, 18 nt, Human
gcuggugcauuacagaga

SEQ ID NO: 2069928 - RNA, 20 nt, Human
gcuggugcauuacagagagg

SEQ ID NO: 2069929 - RNA, 22 nt, Human
gcuggugcauuacagagaggag

SEQ ID NO: 2069930 - RNA, 13 nt, Human
gcuggugcccgga

SEQ ID NO: 2069931 - RNA, 14 nt, Human
gcugggggccucac

SEQ ID NO: 2069932 - RNA, 20 nt, Human
gcugggggccucacuccagg

SEQ ID NO: 2069933 - RNA, 17 nt, Human
gcuggggcaagucccug

SEQ ID NO: 2069934 - RNA, 18 nt, Human
gcugggggccucagugcc

SEQ ID NO: 2069935 - RNA, 13 nt, Human
gcuggucacugcc

SEQ ID NO: 2069936 - RNA, 15 nt, Human
gcuggucacugccau

SEQ ID NO: 2069937 - RNA, 18 nt, Human
gcuggucacugccaugga

SEQ ID NO: 2069938 - RNA, 15 nt, Human
gcugggggccucagu

SEQ ID NO: 2069939 - RNA, 14 nt, Human
gcugggggccucag

SEQ ID NO: 2069940 - RNA, 20 nt, Human
gcugggcuucaguggcagcu

SEQ ID NO: 2069941 - RNA, 18 nt, Human
gcugggauagagggguca

SEQ ID NO: 2069942 - RNA, 17 nt, Human
gcugggaucugacugca

SEQ ID NO: 2069943 - RNA, 18 nt, Human
gcugggaucugacugcac

SEQ ID NO: 2069944 - RNA, 20 nt, Human
gcugggaucugacugcacgu

SEQ ID NO: 2069945 - RNA, 22 nt, Human
gcugggaucugacugcacgugg

SEQ ID NO: 2069946 - RNA, 21 nt, Human
gcugggagggauagagggggg

SEQ ID NO: 2069947 - RNA, 13 nt, Human
gcugggcucucca

SEQ ID NO: 2069948 - RNA, 14 nt, Human
gcugggcucuccac

SEQ ID NO: 2069949 - RNA, 15 nt, Human
gcugggcucuccacc

SEQ ID NO: 2069950 - RNA, 19 nt, Human
gcugggcucuccaccucag

SEQ ID NO: 2069951 - RNA, 20 nt, Human
gcugggcucuccaccucagc

SEQ ID NO: 2069952 - RNA, 21 nt, Human
gcugggcucuccaccucagcc

SEQ ID NO: 2069953 - RNA, 22 nt, Human
gcugggcucuccaccucagccu

SEQ ID NO: 2069954 - RNA, 22 nt, Human
gcugggcuucaguggcagcugc

SEQ ID NO: 2069955 - RNA, 21 nt, Human
gcugggcuucaguggcagcug

SEQ ID NO: 2069956 - RNA, 14 nt, Human
gcugggcugggcgc

SEQ ID NO: 2069957 - RNA, 19 nt, Human
gcugggagggauagagggg

SEQ ID NO: 2069958 - RNA, 15 nt, Human
gcuggugucaccuga

SEQ ID NO: 2069959 - RNA, 14 nt, Human
gcuggugucaccug

SEQ ID NO: 2069960 - RNA, 14 nt, Human
gcuggugcccggag

SEQ ID NO: 2069961 - RNA, 18 nt, Human
gcugucauaagaaugaau

SEQ ID NO: 2069962 - RNA, 13 nt, Human
gcugucaucucag

SEQ ID NO: 2069963 - RNA, 13 nt, Human
gcugucccucacu

SEQ ID NO: 2069964 - RNA, 13 nt, Human
gcuguccuaggcc

SEQ ID NO: 2069965 - RNA, 14 nt, Human
gcuguccuaggcca

SEQ ID NO: 2069966 - RNA, 16 nt, Human
gcuguccuaggccaca

SEQ ID NO: 2069967 - RNA, 13 nt, Human
gcugugugcaguc

SEQ ID NO: 2069968 - RNA, 13 nt, Human
gcuguuagagucc

SEQ ID NO: 2069969 - RNA, 18 nt, Human
gcuguuauuucuauuuuu

SEQ ID NO: 2069970 - RNA, 18 nt, Human
gcuuacaugagaacagac

SEQ ID NO: 2069971 - RNA, 14 nt, Human
gcuuaccucccacc

SEQ ID NO: 2069972 - RNA, 15 nt, Human
gcuuaccucccaccu

SEQ ID NO: 2069973 - RNA, 13 nt, Human
gcugugggcaggu

SEQ ID NO: 2069974 - RNA, 14 nt, Human
gcugugggcaggug

SEQ ID NO: 2069975 - RNA, 17 nt, Human
gcugugggcagguggga

SEQ ID NO: 2069976 - RNA, 15 nt, Human
gcuguggccugggca

SEQ ID NO: 2069977 - RNA, 14 nt, Human
gcuguggccugggc

SEQ ID NO: 2069978 - RNA, 20 nt, Human
gcuggccgaggguccuggcu

SEQ ID NO: 2069979 - RNA, 24 nt, Human
gcuggccgaggguccuggcuccug

SEQ ID NO: 2069980 - RNA, 19 nt, Human
gcuggcccuggcucccaca

SEQ ID NO: 2069981 - RNA, 15 nt, Human
gcuggccgagggucc

SEQ ID NO: 2069982 - RNA, 19 nt, Human
gcuggccgaggguccuggc

SEQ ID NO: 2069983 - RNA, 14 nt, Human
gcuggcccagccaa

SEQ ID NO: 2069984 - RNA, 15 nt, Human
gcuggaccuugaacu

SEQ ID NO: 2069985 - RNA, 20 nt, Human
gcuggaccaguggugccuug

SEQ ID NO: 2069986 - RNA, 14 nt, Human
gcuggacaggucug

SEQ ID NO: 2069987 - RNA, 15 nt, Human
gcuggacaggucugg

SEQ ID NO: 2069988 - RNA, 16 nt, Human
gcuggcauuugcaccu

SEQ ID NO: 2069989 - RNA, 17 nt, Human
gcuggaccucaccaagc

SEQ ID NO: 2069990 - RNA, 18 nt, Human
gcuggcaccgccuucucu

SEQ ID NO: 2069991 - RNA, 17 nt, Human
gcuggcaccgccuucuc

SEQ ID NO: 2069992 - RNA, 13 nt, Human
gcuggcagcagag

SEQ ID NO: 2069993 - RNA, 15 nt, Human
gcuggcagcagagug

SEQ ID NO: 2069994 - RNA, 16 nt, Human
gcuggaauuuuuuauu

SEQ ID NO: 2069995 - RNA, 18 nt, Human
gcuggaauuuuuuauucu

SEQ ID NO: 2069996 - RNA, 20 nt, Human
gcuggaauuuuuuauucuug

SEQ ID NO: 2069997 - RNA, 13 nt, Human
gcuggaaggguca

SEQ ID NO: 2069998 - RNA, 12 nt, Human
gcugcuuuuccu

SEQ ID NO: 2069999 - RNA, 22 nt, Human
gcugcuuuuccuuggggcaggc

SEQ ID NO: 2070000 - RNA, 23 nt, Human
gcugcuuuuccuuggggcaggca

SEQ ID NO: 2070001 - RNA, 20 nt, Human
gcugcuaaucuucagggcac

SEQ ID NO: 2070002 - RNA, 15 nt, Human
gcugcuaaucuucag

SEQ ID NO: 2070003 - RNA, 18 nt, Human
gcugcuaaucuucagggc

SEQ ID NO: 2070004 - RNA, 18 nt, Human
gcugcuaaaucuccuauu

SEQ ID NO: 2070005 - RNA, 21 nt, Human
gcugcuaaaucuccuauuuuu

SEQ ID NO: 2070006 - RNA, 13 nt, Human
gcugcgucuccca

SEQ ID NO: 2070007 - RNA, 12 nt, Human
gcugcuacccag

SEQ ID NO: 2070008 - RNA, 14 nt, Human
gcugcuacccagaa

SEQ ID NO: 2070009 - RNA, 22 nt, Human
gcugcuuuucccuaagccaagg

SEQ ID NO: 2070010 - RNA, 22 nt, Human
gcugcuuuugucuaugggacuc

SEQ ID NO: 2070011 - RNA, 23 nt, Human
gcugcuuuaauugugaauugaua

SEQ ID NO: 2070012 - RNA, 21 nt, Human
gcugcgguccacccaggagcc

SEQ ID NO: 2070013 - RNA, 22 nt, Human
gcugcgguccacccaggagccc

SEQ ID NO: 2070014 - RNA, 14 nt, Human
gcugcggcacccuu

SEQ ID NO: 2070015 - RNA, 15 nt, Human
gcugcggcacccuug

SEQ ID NO: 2070016 - RNA, 15 nt, Human
gcugcgguccaccca

SEQ ID NO: 2070017 - RNA, 14 nt, Human
gcugcgguccaccc

SEQ ID NO: 2070018 - RNA, 15 nt, Human
gcugcccuggugcug

SEQ ID NO: 2070019 - RNA, 14 nt, Human
gcugcccuggugcu

SEQ ID NO: 2070020 - RNA, 13 nt, Human
gcugcccuggugc

SEQ ID NO: 2070021 - RNA, 12 nt, Human
gcugcccuggug

SEQ ID NO: 2070022 - RNA, 19 nt, Human
gcugccuguucagcuccag

SEQ ID NO: 2070023 - RNA, 18 nt, Human
gcugccuguucagcucca

SEQ ID NO: 2070024 - RNA, 15 nt, Human
gcugccuuagaaccu

SEQ ID NO: 2070025 - RNA, 17 nt, Human
gcugcccuggugcugcc

SEQ ID NO: 2070026 - RNA, 20 nt, Human
gcugccuuagaaccuuucuu

SEQ ID NO: 2070027 - RNA, 22 nt, Human
gcugccuguucagcuccagcuc

SEQ ID NO: 2070028 - RNA, 20 nt, Human
gcugccuguucagcuccagc

SEQ ID NO: 2070029 - RNA, 15 nt, Human
gcugcccugccacuu

SEQ ID NO: 2070030 - RNA, 21 nt, Human
gcugcccuggaggaaccgaaa

SEQ ID NO: 2070031 - RNA, 23 nt, Human
gcugcaaaggguaucaggugcug

SEQ ID NO: 2070032 - RNA, 22 nt, Human
gcugcaaaggguaucaggugcu

SEQ ID NO: 2070033 - RNA, 15 nt, Human
gcugauuuuaacaau

SEQ ID NO: 2070034 - RNA, 14 nt, Human
gcugauuuuaacaa

SEQ ID NO: 2070035 - RNA, 20 nt, Human
gcugauuuuaacaauaacua

SEQ ID NO: 2070036 - RNA, 12 nt, Human
gcugaucucagg

SEQ ID NO: 2070037 - RNA, 13 nt, Human
gcugaucucaggg

SEQ ID NO: 2070038 - RNA, 14 nt, Human
gcugaucucaggga

SEQ ID NO: 2070039 - RNA, 16 nt, Human
gcugaucucagggaag

SEQ ID NO: 2070040 - RNA, 17 nt, Human
gcugaucucagggaagc

SEQ ID NO: 2070041 - RNA, 21 nt, Human
gcugaucucagggaagcccag

SEQ ID NO: 2070042 - RNA, 22 nt, Human
gcugaucucagggaagcccagc

SEQ ID NO: 2070043 - RNA, 16 nt, Human
gcugaucgugcuaaau

SEQ ID NO: 2070044 - RNA, 14 nt, Human
gcugauuacuguca

SEQ ID NO: 2070045 - RNA, 20 nt, Human
gcugauuacugucaauaaac

SEQ ID NO: 2070046 - RNA, 21 nt, Human
gcugauuacugucaauaaaca

SEQ ID NO: 2070047 - RNA, 22 nt, Human
gcugauuacugucaauaaacag

SEQ ID NO: 2070048 - RNA, 14 nt, Human
gcugagacugcggg

SEQ ID NO: 2070049 - RNA, 19 nt, Human
gcugagacuggauacugcc

SEQ ID NO: 2070050 - RNA, 20 nt, Human
gcugagacuggauacugccc

SEQ ID NO: 2070051 - RNA, 14 nt, Human
gcugagagaaccuc

SEQ ID NO: 2070052 - RNA, 14 nt, Human
gcugagagacccaa

SEQ ID NO: 2070053 - RNA, 15 nt, Human
gcugagagacccaag

SEQ ID NO: 2070054 - RNA, 17 nt, Human
gcugagagacccaagga

SEQ ID NO: 2070055 - RNA, 18 nt, Human
gcugacuuugcucuuucu

SEQ ID NO: 2070056 - RNA, 13 nt, Human
gcugagaauagaa

SEQ ID NO: 2070057 - RNA, 15 nt, Human
gcugagaauagaagg

SEQ ID NO: 2070058 - RNA, 16 nt, Human
gcugagaauagaagga

SEQ ID NO: 2070059 - RNA, 17 nt, Human
gcugagaauagaaggaa

SEQ ID NO: 2070060 - RNA, 18 nt, Human
gcugagaauagaaggaaa

SEQ ID NO: 2070061 - RNA, 19 nt, Human
gcugagaauagaaggaaac

SEQ ID NO: 2070062 - RNA, 20 nt, Human
gcugagagacccaaggagga

SEQ ID NO: 2070063 - RNA, 22 nt, Human
gcugagagacccaaggaggaaa

SEQ ID NO: 2070064 - RNA, 17 nt, Human
gcugauauauguguuuu

SEQ ID NO: 2070065 - RNA, 18 nt, Human
gcugauauauguguuuuu

SEQ ID NO: 2070066 - RNA, 20 nt, Human
gcugauauauguguuuuuca

SEQ ID NO: 2070067 - RNA, 15 nt, Human
gcugccaaauuuugg

SEQ ID NO: 2070068 - RNA, 17 nt, Human
gcugccaaauuuuggcc

SEQ ID NO: 2070069 - RNA, 14 nt, Human
gcugccaagcccca

SEQ ID NO: 2070070 - RNA, 15 nt, Human
gcugccaagccccau

SEQ ID NO: 2070071 - RNA, 15 nt, Human
gcugccaaggccaga

SEQ ID NO: 2070072 - RNA, 17 nt, Human
gcugcaaaagugagggc

SEQ ID NO: 2070073 - RNA, 20 nt, Human
gcugcagugacgugcaccug

SEQ ID NO: 2070074 - RNA, 23 nt, Human
gcugccacacuucaggcucuucu

SEQ ID NO: 2070075 - RNA, 22 nt, Human
gcugccacacuucaggcucuuc

SEQ ID NO: 2070076 - RNA, 21 nt, Human
gcugccacacuucaggcucuu

SEQ ID NO: 2070077 - RNA, 18 nt, Human
gcugccacacuucaggcu

SEQ ID NO: 2070078 - RNA, 17 nt, Human
gcugccacacuucaggc

SEQ ID NO: 2070079 - RNA, 15 nt, Human
gcugccacacuucag

SEQ ID NO: 2070080 - RNA, 16 nt, Human
gcugccaaggccagag

SEQ ID NO: 2070081 - RNA, 17 nt, Human
gcugccaaggccagagu

SEQ ID NO: 2070082 - RNA, 18 nt, Human
gcugccaaggccagagug

SEQ ID NO: 2070083 - RNA, 19 nt, Human
gcugacagacacaggcccg

SEQ ID NO: 2070084 - RNA, 18 nt, Human
gcugacagacacaggccc

SEQ ID NO: 2070085 - RNA, 17 nt, Human
gcugacagacacaggcc

SEQ ID NO: 2070086 - RNA, 20 nt, Human
gcugacagacacaggcccgg

SEQ ID NO: 2070087 - RNA, 15 nt, Human
gcugaccaagagaga

SEQ ID NO: 2070088 - RNA, 16 nt, Human
gcugaccaagagagaa

SEQ ID NO: 2070089 - RNA, 20 nt, Human
gcugaccaagagagaaagaa

SEQ ID NO: 2070090 - RNA, 13 nt, Human
gcugaccaagaga

SEQ ID NO: 2070091 - RNA, 14 nt, Human
gcugaccaagagag

SEQ ID NO: 2070092 - RNA, 22 nt, Human
gcugacuguuuucucuugagag

SEQ ID NO: 2070093 - RNA, 14 nt, Human
gcugacgaggcugg

SEQ ID NO: 2070094 - RNA, 15 nt, Human
gcugacgaggcuggg

SEQ ID NO: 2070095 - RNA, 17 nt, Human
gcugacgaggcugggcc

SEQ ID NO: 2070096 - RNA, 18 nt, Human
gcugacgaggcugggcca

SEQ ID NO: 2070097 - RNA, 12 nt, Human
gcugaccagaca

SEQ ID NO: 2070098 - RNA, 21 nt, Human
gcugaccuugaacuccugggc

SEQ ID NO: 2070099 - RNA, 20 nt, Human
gcugaccuugaacuccuggg

SEQ ID NO: 2070100 - RNA, 23 nt, Human
gcugaccuugaacuccugggcuc

SEQ ID NO: 2070101 - RNA, 15 nt, Human
gcucuugcagagaag

SEQ ID NO: 2070102 - RNA, 18 nt, Human
gcucuugcagagaagccu

SEQ ID NO: 2070103 - RNA, 19 nt, Human
gcucuuggcagguacucag

SEQ ID NO: 2070104 - RNA, 21 nt, Human
gcucuucugccggcccugggg

SEQ ID NO: 2070105 - RNA, 23 nt, Human
gcucuuugaaauagucuguguga

SEQ ID NO: 2070106 - RNA, 13 nt, Human
gcucuuucugggc

SEQ ID NO: 2070107 - RNA, 14 nt, Human
gcucuuucugggcc

SEQ ID NO: 2070108 - RNA, 18 nt, Human
gcucuuucugggccaagu

SEQ ID NO: 2070109 - RNA, 17 nt, Human
gcucuuugaaacaacuu

SEQ ID NO: 2070110 - RNA, 21 nt, Human
gcucuuugaaauagucugugu

SEQ ID NO: 2070111 - RNA, 14 nt, Human
gcucuucugccggc

SEQ ID NO: 2070112 - RNA, 18 nt, Human
gcgcagugcuucucuaca

SEQ ID NO: 2070113 - RNA, 22 nt, Human
gcgcagugcuucucuacagacu

SEQ ID NO: 2070114 - RNA, 21 nt, Human
gcgccacuacacuccagccug

SEQ ID NO: 2070115 - RNA, 22 nt, Human
gcgccacuacacuccagccuga

SEQ ID NO: 2070116 - RNA, 24 nt, Human
gcgccacuacacuccagccugagc

SEQ ID NO: 2070117 - RNA, 16 nt, Human
gcgccacucgcuuccc

SEQ ID NO: 2070118 - RNA, 18 nt, Human
gcgccacucgcuuccccc

SEQ ID NO: 2070119 - RNA, 13 nt, Human
gcgccccuucccc

SEQ ID NO: 2070120 - RNA, 23 nt, Human
gcgcccaguuggguggaugccug

SEQ ID NO: 2070121 - RNA, 23 nt, Human
gcgccacucgcuucccccauagc

SEQ ID NO: 2070122 - RNA, 13 nt, Human
gcgcccccagugu

SEQ ID NO: 2070123 - RNA, 16 nt, Human
gcgccugccccuccca

SEQ ID NO: 2070124 - RNA, 17 nt, Human
gcgccugccccucccag

SEQ ID NO: 2070125 - RNA, 18 nt, Human
gcgccugccccucccaga

SEQ ID NO: 2070126 - RNA, 15 nt, Human
gcgccuccuuccuug

SEQ ID NO: 2070127 - RNA, 22 nt, Human
gcgccuccuuccuugcuguccu

SEQ ID NO: 2070128 - RNA, 14 nt, Human
gcgguccacccagg

SEQ ID NO: 2070129 - RNA, 13 nt, Human
gcgguccacccag

SEQ ID NO: 2070130 - RNA, 19 nt, Human
gcggugagaggggaacaga

SEQ ID NO: 2070131 - RNA, 17 nt, Human
gcggggacagcuccuuc

SEQ ID NO: 2070132 - RNA, 15 nt, Human
gcggggacagcuccu

SEQ ID NO: 2070133 - RNA, 14 nt, Human
gcggggacagcucc

SEQ ID NO: 2070134 - RNA, 19 nt, Human
gcggagacggagucccacc

SEQ ID NO: 2070135 - RNA, 14 nt, Human
gcggacgggcuguc

SEQ ID NO: 2070136 - RNA, 16 nt, Human
gcgcugccgcacccca

SEQ ID NO: 2070137 - RNA, 17 nt, Human
gcgcugccgcaccccag

SEQ ID NO: 2070138 - RNA, 19 nt, Human
gcgcugccgcaccccagag

SEQ ID NO: 2070139 - RNA, 21 nt, Human
gcgcugccgcaccccagagug

SEQ ID NO: 2070140 - RNA, 23 nt, Human
gcgcugcucuuaugccauuuguu

SEQ ID NO: 2070141 - RNA, 18 nt, Human
gccuuggucuaacuuuug

SEQ ID NO: 2070142 - RNA, 16 nt, Human
gccuugguguccaccu

SEQ ID NO: 2070143 - RNA, 22 nt, Human
gccuugguguccaccuggcccc

SEQ ID NO: 2070144 - RNA, 19 nt, Human
gccuugguucaucaguguu

SEQ ID NO: 2070145 - RNA, 18 nt, Human
gccuugguucccuugugu

SEQ ID NO: 2070146 - RNA, 17 nt, Human
gccuugguguccaccug

SEQ ID NO: 2070147 - RNA, 18 nt, Human
gccuugguguccaccugg

SEQ ID NO: 2070148 - RNA, 19 nt, Human
gccuugguguccaccuggc

SEQ ID NO: 2070149 - RNA, 21 nt, Human
gccuugguguccaccuggccc

SEQ ID NO: 2070150 - RNA, 17 nt, Human
gccuuaauuuucaguau

SEQ ID NO: 2070151 - RNA, 18 nt, Human
gccuuccccuugcccagg

SEQ ID NO: 2070152 - RNA, 16 nt, Human
gccuuaaaacuuuaau

SEQ ID NO: 2070153 - RNA, 19 nt, Human
gccuuaaaagccaucaugu

SEQ ID NO: 2070154 - RNA, 11 nt, Human
gcgaaugguag

SEQ ID NO: 2070155 - RNA, 20 nt, Human
gcgaaugguagucuaaccaa

SEQ ID NO: 2070156 - RNA, 22 nt, Human
gcgaaugguagucuaaccaaau

SEQ ID NO: 2070157 - RNA, 21 nt, Human
gccuuuccauaaggaauguag

SEQ ID NO: 2070158 - RNA, 22 nt, Human
gccuuuccauaaggaauguagc

SEQ ID NO: 2070159 - RNA, 13 nt, Human
gccuuuccuguuc

SEQ ID NO: 2070160 - RNA, 15 nt, Human
gccuuuccuguucag

SEQ ID NO: 2070161 - RNA, 16 nt, Human
gccuuuccuguucagc

SEQ ID NO: 2070162 - RNA, 18 nt, Human
gccuuuccuguucagcau

SEQ ID NO: 2070163 - RNA, 19 nt, Human
gccuuuccuguucagcauu

SEQ ID NO: 2070164 - RNA, 20 nt, Human
gccuuuccuguucagcauuc

SEQ ID NO: 2070165 - RNA, 22 nt, Human
gccuuucucccaggccaggcuc

SEQ ID NO: 2070166 - RNA, 18 nt, Human
gccuuucucccaggccag

SEQ ID NO: 2070167 - RNA, 23 nt, Human
gccuuucucccaggccaggcucc

SEQ ID NO: 2070168 - RNA, 17 nt, Human
gccuuucuucucuccag

SEQ ID NO: 2070169 - RNA, 14 nt, Human
gcgaaggggcccug

SEQ ID NO: 2070170 - RNA, 15 nt, Human
gcgaaggggcccugg

SEQ ID NO: 2070171 - RNA, 16 nt, Human
gcgaaggggcccuggu

SEQ ID NO: 2070172 - RNA, 20 nt, Human
gcgaaguauauaaauuggcu

SEQ ID NO: 2070173 - RNA, 21 nt, Human
gccuggcagccgugccuucag

SEQ ID NO: 2070174 - RNA, 20 nt, Human
gccuggcagccgugccuuca

SEQ ID NO: 2070175 - RNA, 12 nt, Human
gccuggcagccg

SEQ ID NO: 2070176 - RNA, 13 nt, Human
gccuggcagaacu

SEQ ID NO: 2070177 - RNA, 18 nt, Human
gccuggcagaacugagcu

SEQ ID NO: 2070178 - RNA, 19 nt, Human
gccuggcagaacugagcuc

SEQ ID NO: 2070179 - RNA, 19 nt, Human
gccuggcacagggcagugg

SEQ ID NO: 2070180 - RNA, 18 nt, Human
gccuggcacagggcagug

SEQ ID NO: 2070181 - RNA, 22 nt, Human
gccuggccagaugcaccagccc

SEQ ID NO: 2070182 - RNA, 21 nt, Human
gccuggccagaugcaccagcc

SEQ ID NO: 2070183 - RNA, 16 nt, Human
gccuggccagaugcac

SEQ ID NO: 2070184 - RNA, 22 nt, Human
gccuggcagccgugccuucagc

SEQ ID NO: 2070185 - RNA, 20 nt, Human
gccuggccagaugcaccagc

SEQ ID NO: 2070186 - RNA, 22 nt, Human
gccuggcagaacugagcuccuc

SEQ ID NO: 2070187 - RNA, 15 nt, Human
gccuggcccccagcu

SEQ ID NO: 2070188 - RNA, 18 nt, Human
gccuggcccccagcugug

SEQ ID NO: 2070189 - RNA, 13 nt, Human
gccugggcagcau

SEQ ID NO: 2070190 - RNA, 19 nt, Human
gccugggcagcauagcaag

SEQ ID NO: 2070191 - RNA, 17 nt, Human
gccugggcagccaggcu

SEQ ID NO: 2070192 - RNA, 18 nt, Human
gccugggcagccaggcug

SEQ ID NO: 2070193 - RNA, 20 nt, Human
gccugggcagccaggcugcc

SEQ ID NO: 2070194 - RNA, 23 nt, Human
gccugggcagccaggcugccaag

SEQ ID NO: 2070195 - RNA, 19 nt, Human
gccugucucauccccaggg

SEQ ID NO: 2070196 - RNA, 22 nt, Human
gccugucucauccccagggguc

SEQ ID NO: 2070197 - RNA, 13 nt, Human
gccugucuccuuu

SEQ ID NO: 2070198 - RNA, 21 nt, Human
gccugucuccuuugcaggcuc

SEQ ID NO: 2070199 - RNA, 22 nt, Human
gccugucuccuuugcaggcuca

SEQ ID NO: 2070200 - RNA, 17 nt, Human
gccuguaaucccagcua

SEQ ID NO: 2070201 - RNA, 18 nt, Human
gccuguaaucccagcuac

SEQ ID NO: 2070202 - RNA, 19 nt, Human
gccuguaaucccagcuacu

SEQ ID NO: 2070203 - RNA, 17 nt, Human
gccugucucauccccag

SEQ ID NO: 2070204 - RNA, 18 nt, Human
gccugucucauccccagg

SEQ ID NO: 2070205 - RNA, 20 nt, Human
gccuguaauccuagcacuuu

SEQ ID NO: 2070206 - RNA, 16 nt, Human
gccuggucccugggag

SEQ ID NO: 2070207 - RNA, 15 nt, Human
gccuggucccuggga

SEQ ID NO: 2070208 - RNA, 15 nt, Human
gccuguaauccuagc

SEQ ID NO: 2070209 - RNA, 14 nt, Human
gccuggucccuggg

SEQ ID NO: 2070210 - RNA, 22 nt, Human
gccugguccaugauggagucag

SEQ ID NO: 2070211 - RNA, 20 nt, Human
gccugggcgacagagcgaga

SEQ ID NO: 2070212 - RNA, 23 nt, Human
gccugggcucccuugugcguggg

SEQ ID NO: 2070213 - RNA, 24 nt, Human
gccuggguggggcugcuccuccag

SEQ ID NO: 2070214 - RNA, 23 nt, Human
gccuggguggggcugcuccucca

SEQ ID NO: 2070215 - RNA, 17 nt, Human
gccuggaagagcagccc

SEQ ID NO: 2070216 - RNA, 15 nt, Human
gccuggaagagcagc

SEQ ID NO: 2070217 - RNA, 10 nt, Human
gccugcugca

SEQ ID NO: 2070218 - RNA, 11 nt, Human
gccugcugcau

SEQ ID NO: 2070219 - RNA, 18 nt, Human
gccugcugcauggggugg

SEQ ID NO: 2070220 - RNA, 23 nt, Human
gccugcugaaugauuuccaaaga

SEQ ID NO: 2070221 - RNA, 11 nt, Human
gccugcucccc

SEQ ID NO: 2070222 - RNA, 13 nt, Human
gccugcuccccca

SEQ ID NO: 2070223 - RNA, 15 nt, Human
gccugcucccccacc

SEQ ID NO: 2070224 - RNA, 16 nt, Human
gccugcucccccaccc

SEQ ID NO: 2070225 - RNA, 17 nt, Human
gccugcucccccacccc

SEQ ID NO: 2070226 - RNA, 19 nt, Human
gccugcucccccacccccu

SEQ ID NO: 2070227 - RNA, 13 nt, Human
gccugcauucugc

SEQ ID NO: 2070228 - RNA, 14 nt, Human
gccuggcacagggc

SEQ ID NO: 2070229 - RNA, 13 nt, Human
gccuggcacaggg

SEQ ID NO: 2070230 - RNA, 14 nt, Human
gccuggacaaaccc

SEQ ID NO: 2070231 - RNA, 16 nt, Human
gccuggacaaacccuu

SEQ ID NO: 2070232 - RNA, 18 nt, Human
gccugaagucacacagug

SEQ ID NO: 2070233 - RNA, 17 nt, Human
gccugaagucacacagu

SEQ ID NO: 2070234 - RNA, 16 nt, Human
gccugaagucacacag

SEQ ID NO: 2070235 - RNA, 22 nt, Human
gcccaguuggguggaugccugg

SEQ ID NO: 2070236 - RNA, 21 nt, Human
gcccaguuggguggaugccug

SEQ ID NO: 2070237 - RNA, 19 nt, Human
gcccaguuggguggaugcc

SEQ ID NO: 2070238 - RNA, 13 nt, Human
gccugaggcugag

SEQ ID NO: 2070239 - RNA, 14 nt, Human
gccugaggcugaga

SEQ ID NO: 2070240 - RNA, 13 nt, Human
gccugaggagcag

SEQ ID NO: 2070241 - RNA, 16 nt, Human
gccugaggagcagcag

SEQ ID NO: 2070242 - RNA, 14 nt, Human
gccugaggcuggga

SEQ ID NO: 2070243 - RNA, 15 nt, Human
gccugaggcugagac

SEQ ID NO: 2070244 - RNA, 17 nt, Human
gccugaggcugagacug

SEQ ID NO: 2070245 - RNA, 18 nt, Human
gccugaggcugagacugc

SEQ ID NO: 2070246 - RNA, 13 nt, Human
gccugaggcuggg

SEQ ID NO: 2070247 - RNA, 16 nt, Human
gcgguacaaaggaaaa

SEQ ID NO: 2070248 - RNA, 21 nt, Human
gcuaguugggcuuccucauag

SEQ ID NO: 2070249 - RNA, 20 nt, Human
gcuagaguccucacucccag

SEQ ID NO: 2070250 - RNA, 22 nt, Human
gcuagaugagaauucagcugcc

SEQ ID NO: 2070251 - RNA, 23 nt, Human
gcuagaugagaauucagcugccc

SEQ ID NO: 2070252 - RNA, 20 nt, Human
gcuauaacuauguugauaaa

SEQ ID NO: 2070253 - RNA, 19 nt, Human
gcuauccagcuauuuuuau

SEQ ID NO: 2070254 - RNA, 15 nt, Human
gcuauauuuaaguau

SEQ ID NO: 2070255 - RNA, 21 nt, Human
gcuauauuuaaguauucaaga

SEQ ID NO: 2070256 - RNA, 22 nt, Human
gcuauauuuaaguauucaagaa

SEQ ID NO: 2070257 - RNA, 20 nt, Human
gcuauccugccaaaaucauu

SEQ ID NO: 2070258 - RNA, 20 nt, Human
gcuaucaaaauaaauugaaa

SEQ ID NO: 2070259 - RNA, 22 nt, Human
gcuaucaaaauaaauugaaaua

SEQ ID NO: 2070260 - RNA, 23 nt, Human
gcuaucaaaauaaauugaaauau

SEQ ID NO: 2070261 - RNA, 14 nt, Human
gcuauauccaugua

SEQ ID NO: 2070262 - RNA, 15 nt, Human
gcuauauccauguac

SEQ ID NO: 2070263 - RNA, 17 nt, Human
gcuauauccauguacug

SEQ ID NO: 2070264 - RNA, 18 nt, Human
gcuauauccauguacugu

SEQ ID NO: 2070265 - RNA, 19 nt, Human
gcuauauccauguacugua

SEQ ID NO: 2070266 - RNA, 21 nt, Human
gcuauauccauguacuguagu

SEQ ID NO: 2070267 - RNA, 23 nt, Human
gcuauauccauguacuguaguuu

SEQ ID NO: 2070268 - RNA, 22 nt, Human
gcucaaguccucuuuucugaga

SEQ ID NO: 2070269 - RNA, 19 nt, Human
gcucaaguccucuuuucug

SEQ ID NO: 2070270 - RNA, 16 nt, Human
gcucaaucaagaaaau

SEQ ID NO: 2070271 - RNA, 19 nt, Human
gcucaauauuccugaauga

SEQ ID NO: 2070272 - RNA, 21 nt, Human
gcucaauauuccugaaugaaa

SEQ ID NO: 2070273 - RNA, 20 nt, Human
gcucaagucuucccugauca

SEQ ID NO: 2070274 - RNA, 12 nt, Human
gcucaaguucau

SEQ ID NO: 2070275 - RNA, 17 nt, Human
gcucaaggcgugaggau

SEQ ID NO: 2070276 - RNA, 17 nt, Human
gcucaagucuucccuga

SEQ ID NO: 2070277 - RNA, 14 nt, Human
gcucacaccuguaa

SEQ ID NO: 2070278 - RNA, 14 nt, Human
gcucacacaugaga

SEQ ID NO: 2070279 - RNA, 15 nt, Human
gcucacacaugagau

SEQ ID NO: 2070280 - RNA, 22 nt, Human
gcucaauauuccugaaugaaau

SEQ ID NO: 2070281 - RNA, 14 nt, Human
gcucaauccucuaa

SEQ ID NO: 2070282 - RNA, 16 nt, Human
gcucaauccucuaagc

SEQ ID NO: 2070283 - RNA, 18 nt, Human
gcucaaguccucuuuucu

SEQ ID NO: 2070284 - RNA, 22 nt, Human
gcucaagcagucuacccaccuc

SEQ ID NO: 2070285 - RNA, 17 nt, Human
gcucaugcauaguccca

SEQ ID NO: 2070286 - RNA, 18 nt, Human
gcucaugcauagucccag

SEQ ID NO: 2070287 - RNA, 22 nt, Human
gcucauauuccugcagccugga

SEQ ID NO: 2070288 - RNA, 20 nt, Human
gcucauauuccugcagccug

SEQ ID NO: 2070289 - RNA, 21 nt, Human
gcucagcuuuuugucuuuucu

SEQ ID NO: 2070290 - RNA, 12 nt, Human
gcucagcucugg

SEQ ID NO: 2070291 - RNA, 13 nt, Human
gcucagcucuggc

SEQ ID NO: 2070292 - RNA, 14 nt, Human
gcucagcucuggcu

SEQ ID NO: 2070293 - RNA, 15 nt, Human
gcucagcucuggcuc

SEQ ID NO: 2070294 - RNA, 16 nt, Human
gcucagcucuggcuca

SEQ ID NO: 2070295 - RNA, 18 nt, Human
gcucagcucuggcucaca

SEQ ID NO: 2070296 - RNA, 20 nt, Human
gcucagcucuggcucacaga

SEQ ID NO: 2070297 - RNA, 21 nt, Human
gcucagcucuggcucacagac

SEQ ID NO: 2070298 - RNA, 23 nt, Human
gcucagcggggacagcuccuucu

SEQ ID NO: 2070299 - RNA, 19 nt, Human
gcucagcggggacagcucc

SEQ ID NO: 2070300 - RNA, 18 nt, Human
gcucagcggggacagcuc

SEQ ID NO: 2070301 - RNA, 17 nt, Human
gcucagcggggacagcu

SEQ ID NO: 2070302 - RNA, 21 nt, Human
gcucagcccucccugccccuc

SEQ ID NO: 2070303 - RNA, 19 nt, Human
gcucagcccucccugcccc

SEQ ID NO: 2070304 - RNA, 18 nt, Human
gcucagcccucccugccc

SEQ ID NO: 2070305 - RNA, 17 nt, Human
gcucagcccucccugcc

SEQ ID NO: 2070306 - RNA, 16 nt, Human
gcucagcggggacagc

SEQ ID NO: 2070307 - RNA, 15 nt, Human
gcucaccagccccag

SEQ ID NO: 2070308 - RNA, 16 nt, Human
gcucacaguuccucgc

SEQ ID NO: 2070309 - RNA, 17 nt, Human
gcucacaguuccucgcc

SEQ ID NO: 2070310 - RNA, 19 nt, Human
gcucacaguuccucgcccu

SEQ ID NO: 2070311 - RNA, 21 nt, Human
gcucacaguuccucgcccugg

SEQ ID NO: 2070312 - RNA, 14 nt, Human
gcucaccagcccca

SEQ ID NO: 2070313 - RNA, 13 nt, Human
gcucaccagcccc

SEQ ID NO: 2070314 - RNA, 12 nt, Human
gcucaccagccc

SEQ ID NO: 2070315 - RNA, 16 nt, Human
gcucacauaucuguca

SEQ ID NO: 2070316 - RNA, 22 nt, Human
gcucacagaacccuuggagcca

SEQ ID NO: 2070317 - RNA, 12 nt, Human
gcucacagacug

SEQ ID NO: 2070318 - RNA, 17 nt, Human
gcucacagacuggagac

SEQ ID NO: 2070319 - RNA, 13 nt, Human
gcucacaguuccu

SEQ ID NO: 2070320 - RNA, 15 nt, Human
gcucacaguuccucg

SEQ ID NO: 2070321 - RNA, 12 nt, Human
gcucagcccucc

SEQ ID NO: 2070322 - RNA, 12 nt, Human
gcucagccccag

SEQ ID NO: 2070323 - RNA, 16 nt, Human
gcucagccccagccca

SEQ ID NO: 2070324 - RNA, 17 nt, Human
gcucagccccagcccag

SEQ ID NO: 2070325 - RNA, 18 nt, Human
gcucagccccagcccagc

SEQ ID NO: 2070326 - RNA, 16 nt, Human
gcucagcccucccugc

SEQ ID NO: 2070327 - RNA, 15 nt, Human
gcucagcccucccug

SEQ ID NO: 2070328 - RNA, 22 nt, Human
gcucacaguuccucgcccuggg

SEQ ID NO: 2070329 - RNA, 23 nt, Human
gcucacaguuccucgcccugggu

SEQ ID NO: 2070330 - RNA, 11 nt, Human
gcucagcccac

SEQ ID NO: 2070331 - RNA, 11 nt, Human
gcucaccuggg

SEQ ID NO: 2070332 - RNA, 18 nt, Human
gcucagcccaccccccuc

SEQ ID NO: 2070333 - RNA, 14 nt, Human
gcucagcccacccc

SEQ ID NO: 2070334 - RNA, 15 nt, Human
gcucagcccaccccc

SEQ ID NO: 2070335 - RNA, 16 nt, Human
gcucagcccacccccc

SEQ ID NO: 2070336 - RNA, 17 nt, Human
gcucagcccaccccccu

SEQ ID NO: 2070337 - RNA, 18 nt, Human
gcuccagucugcugcccu

SEQ ID NO: 2070338 - RNA, 20 nt, Human
gcuccagucugcugcccucc

SEQ ID NO: 2070339 - RNA, 21 nt, Human
gcuccagucugcugcccucca

SEQ ID NO: 2070340 - RNA, 14 nt, Human
gcuccaguccugcu

SEQ ID NO: 2070341 - RNA, 17 nt, Human
gcuccaguccugcucuc

SEQ ID NO: 2070342 - RNA, 18 nt, Human
gcuccaguccugcucucu

SEQ ID NO: 2070343 - RNA, 21 nt, Human
gcuccaguccugcucucuacc

SEQ ID NO: 2070344 - RNA, 23 nt, Human
gcuccaguccugcucucuaccca

SEQ ID NO: 2070345 - RNA, 17 nt, Human
gcuccagucugcugccc

SEQ ID NO: 2070346 - RNA, 13 nt, Human
gcuccagggccag

SEQ ID NO: 2070347 - RNA, 15 nt, Human
gcuccagggccagau

SEQ ID NO: 2070348 - RNA, 15 nt, Human
gcucccacaggcccu

SEQ ID NO: 2070349 - RNA, 13 nt, Human
gcucccacagaac

SEQ ID NO: 2070350 - RNA, 12 nt, Human
gcuccaguggaa

SEQ ID NO: 2070351 - RNA, 21 nt, Human
gcuccaguggaagaagaaaac

SEQ ID NO: 2070352 - RNA, 23 nt, Human
gcucccaacacaaggugggcagg

SEQ ID NO: 2070353 - RNA, 23 nt, Human
gcuccgcuuucuacccagcgagc

SEQ ID NO: 2070354 - RNA, 22 nt, Human
gcuccgcuuucuacccagcgag

SEQ ID NO: 2070355 - RNA, 21 nt, Human
gcuccgcuuucuacccagcga

SEQ ID NO: 2070356 - RNA, 18 nt, Human
gcuccgcuuucuacccag

SEQ ID NO: 2070357 - RNA, 15 nt, Human
gcucccuugugcgug

SEQ ID NO: 2070358 - RNA, 13 nt, Human
gcuccgccucugc

SEQ ID NO: 2070359 - RNA, 14 nt, Human
gcuccgccucugcu

SEQ ID NO: 2070360 - RNA, 17 nt, Human
gcuccgccucugcuggc

SEQ ID NO: 2070361 - RNA, 19 nt, Human
gcucccacagaacacagca

SEQ ID NO: 2070362 - RNA, 12 nt, Human
gcuccaggcucc

SEQ ID NO: 2070363 - RNA, 21 nt, Human
gcuccagcuguucagcugguu

SEQ ID NO: 2070364 - RNA, 21 nt, Human
gcucauuauaaugucauuaaa

SEQ ID NO: 2070365 - RNA, 16 nt, Human
gcucaugggccccucu

SEQ ID NO: 2070366 - RNA, 20 nt, Human
gcucaugggccccucugacu

SEQ ID NO: 2070367 - RNA, 21 nt, Human
gcucaugggccccucugacuc

SEQ ID NO: 2070368 - RNA, 22 nt, Human
gcucaugggccccucugacucc

SEQ ID NO: 2070369 - RNA, 15 nt, Human
gcucaugguccccau

SEQ ID NO: 2070370 - RNA, 18 nt, Human
gcucaugguccccauggc

SEQ ID NO: 2070371 - RNA, 15 nt, Human
gcucauguagcaauc

SEQ ID NO: 2070372 - RNA, 17 nt, Human
gcuccuuuagcgcccag

SEQ ID NO: 2070373 - RNA, 13 nt, Human
gcuccuucugucc

SEQ ID NO: 2070374 - RNA, 13 nt, Human
gcuccuuccuguc

SEQ ID NO: 2070375 - RNA, 19 nt, Human
gcuccuuccugucuuccug

SEQ ID NO: 2070376 - RNA, 13 nt, Human
gcuccugugucuu

SEQ ID NO: 2070377 - RNA, 12 nt, Human
gcuccugugucu

SEQ ID NO: 2070378 - RNA, 13 nt, Human
gcuccuuagcugc

SEQ ID NO: 2070379 - RNA, 15 nt, Human
gcuccuuagcugcca

SEQ ID NO: 2070380 - RNA, 16 nt, Human
gcuccuuagcugccaa

SEQ ID NO: 2070381 - RNA, 18 nt, Human
gcuccuuagcugccaagc

SEQ ID NO: 2070382 - RNA, 19 nt, Human
gcuccuuagcugccaagcc

SEQ ID NO: 2070383 - RNA, 22 nt, Human
gcuccgugagugaaccaucauu

SEQ ID NO: 2070384 - RNA, 13 nt, Human
gcuccgcugugug

SEQ ID NO: 2070385 - RNA, 14 nt, Human
gcuccgcugugugg

SEQ ID NO: 2070386 - RNA, 24 nt, Human
gcuccgcuuucuacccagcgagcc

SEQ ID NO: 2070387 - RNA, 18 nt, Human
gcuccucaacucaccuaa

SEQ ID NO: 2070388 - RNA, 19 nt, Human
gcuccucaugguggguuca

SEQ ID NO: 2070389 - RNA, 14 nt, Human
gcuccuccagggcc

SEQ ID NO: 2070390 - RNA, 14 nt, Human
gcuccucccggugc

SEQ ID NO: 2070391 - RNA, 23 nt, Human
gcuccuggggguucuuucuuccu

SEQ ID NO: 2070392 - RNA, 19 nt, Human
gcuccuggucuugagaugu

SEQ ID NO: 2070393 - RNA, 14 nt, Human
gcucccuuccuccc

SEQ ID NO: 2070394 - RNA, 22 nt, Human
gcuccugguauggguuucuccc

SEQ ID NO: 2070395 - RNA, 15 nt, Human
gcuccuccagggcca

SEQ ID NO: 2070396 - RNA, 18 nt, Human
gcuccuccagggccacgu

SEQ ID NO: 2070397 - RNA, 22 nt, Human
gcuccuccagggccacgugcca

SEQ ID NO: 2070398 - RNA, 23 nt, Human
gcuccuccagggccacgugccag

SEQ ID NO: 2070399 - RNA, 14 nt, Human
gcuccugucugcca

SEQ ID NO: 2070400 - RNA, 16 nt, Human
gcuccugucugccagc

SEQ ID NO: 2070401 - RNA, 17 nt, Human
gcuccugucugccagcc

SEQ ID NO: 2070402 - RNA, 18 nt, Human
gcuccugucugccagcca

SEQ ID NO: 2070403 - RNA, 19 nt, Human
gcuccugucugccagccag

SEQ ID NO: 2070404 - RNA, 20 nt, Human
gcuccugucugccagccagc

SEQ ID NO: 2070405 - RNA, 21 nt, Human
gcuccugucugccagccagca

SEQ ID NO: 2070406 - RNA, 14 nt, Human
ggaccauccuauuu

SEQ ID NO: 2070407 - RNA, 18 nt, Human
ggaccuugaacuggguac

SEQ ID NO: 2070408 - RNA, 16 nt, Human
ggacugaagccugcag

SEQ ID NO: 2070409 - RNA, 17 nt, Human
ggacugaagccugcagg

SEQ ID NO: 2070410 - RNA, 19 nt, Human
ggacugaagccugcaggag

SEQ ID NO: 2070411 - RNA, 19 nt, Human
ggacugaauuguccccagu

SEQ ID NO: 2070412 - RNA, 14 nt, Human
ggacugaagccugc

SEQ ID NO: 2070413 - RNA, 16 nt, Human
ggagaauaauucuuug

SEQ ID NO: 2070414 - RNA, 17 nt, Human
ggagaauaauucuuuga

SEQ ID NO: 2070415 - RNA, 22 nt, Human
ggagaagucuuagacuugaaau

SEQ ID NO: 2070416 - RNA, 21 nt, Human
ggagaagggauggaggucaca

SEQ ID NO: 2070417 - RNA, 14 nt, Human
ggagaagggaugga

SEQ ID NO: 2070418 - RNA, 18 nt, Human
ggagaagcaugaaaaagc

SEQ ID NO: 2070419 - RNA, 17 nt, Human
ggagaaggaaggagacu

SEQ ID NO: 2070420 - RNA, 22 nt, Human
ggagaaggaaggagacucaccu

SEQ ID NO: 2070421 - RNA, 19 nt, Human
ggagaagcagugagccgca

SEQ ID NO: 2070422 - RNA, 13 nt, Human
ggagaagcaugaa

SEQ ID NO: 2070423 - RNA, 15 nt, Human
ggagaagcagugagc

SEQ ID NO: 2070424 - RNA, 16 nt, Human
ggagaagcagugagcc

SEQ ID NO: 2070425 - RNA, 21 nt, Human
ggagaacuccuaggguggcug

SEQ ID NO: 2070426 - RNA, 22 nt, Human
ggagaagaauuuucagacccca

SEQ ID NO: 2070427 - RNA, 12 nt, Human
ggaccagaugcu

SEQ ID NO: 2070428 - RNA, 14 nt, Human
ggaccagaugcuga

SEQ ID NO: 2070429 - RNA, 16 nt, Human
ggaccaaaaaaauaag

SEQ ID NO: 2070430 - RNA, 22 nt, Human
ggacagccuguggcggugccug

SEQ ID NO: 2070431 - RNA, 23 nt, Human
ggacagccuguggcggugccugg

SEQ ID NO: 2070432 - RNA, 21 nt, Human
ggacagccuguggcggugccu

SEQ ID NO: 2070433 - RNA, 17 nt, Human
ggacagcuccuucuguc

SEQ ID NO: 2070434 - RNA, 16 nt, Human
ggacagcuccuucugu

SEQ ID NO: 2070435 - RNA, 15 nt, Human
ggacagcuccuucug

SEQ ID NO: 2070436 - RNA, 11 nt, Human
ggacagcuccu

SEQ ID NO: 2070437 - RNA, 14 nt, Human
ggacagcccacuga

SEQ ID NO: 2070438 - RNA, 22 nt, Human
ggacagccacggccaggccaga

SEQ ID NO: 2070439 - RNA, 12 nt, Human
gcuuuucacugc

SEQ ID NO: 2070440 - RNA, 18 nt, Human
ggacacuuaacagaugca

SEQ ID NO: 2070441 - RNA, 14 nt, Human
ggacagaagaaggc

SEQ ID NO: 2070442 - RNA, 20 nt, Human
ggacagagacaccugcaccu

SEQ ID NO: 2070443 - RNA, 21 nt, Human
ggacagagacaccugcaccuc

SEQ ID NO: 2070444 - RNA, 14 nt, Human
ggacagagacaccu

SEQ ID NO: 2070445 - RNA, 17 nt, Human
ggacagagacaccugca

SEQ ID NO: 2070446 - RNA, 18 nt, Human
ggacagagacaccugcac

SEQ ID NO: 2070447 - RNA, 19 nt, Human
ggacagagacaccugcacc

SEQ ID NO: 2070448 - RNA, 22 nt, Human
ggagcuaucaggaacagcuaug

SEQ ID NO: 2070449 - RNA, 15 nt, Human
ggagcuaucaggaac

SEQ ID NO: 2070450 - RNA, 19 nt, Human
ggagcggccgccugcgggc

SEQ ID NO: 2070451 - RNA, 16 nt, Human
ggagcggaaagcagcu

SEQ ID NO: 2070452 - RNA, 19 nt, Human
ggagcgcaccugcccccug

SEQ ID NO: 2070453 - RNA, 21 nt, Human
ggagcgcaccugcccccuggu

SEQ ID NO: 2070454 - RNA, 23 nt, Human
ggagcgcaccugcccccuggugg

SEQ ID NO: 2070455 - RNA, 14 nt, Human
ggagcggaaagcag

SEQ ID NO: 2070456 - RNA, 15 nt, Human
ggagcggaaagcagc

SEQ ID NO: 2070457 - RNA, 16 nt, Human
ggagcuaacacuggcc

SEQ ID NO: 2070458 - RNA, 17 nt, Human
ggagcuaacacuggccc

SEQ ID NO: 2070459 - RNA, 18 nt, Human
ggagcuaacacuggcccc

SEQ ID NO: 2070460 - RNA, 19 nt, Human
ggagcuaacacuggccccu

SEQ ID NO: 2070461 - RNA, 15 nt, Human
ggagcgcaccugccc

SEQ ID NO: 2070462 - RNA, 17 nt, Human
ggagcaccaggcacgaa

SEQ ID NO: 2070463 - RNA, 13 nt, Human
ggagacagugauc

SEQ ID NO: 2070464 - RNA, 22 nt, Human
ggagacauaaccacugcuucca

SEQ ID NO: 2070465 - RNA, 18 nt, Human
ggagacagugaucuccau

SEQ ID NO: 2070466 - RNA, 17 nt, Human
ggagaccaaggcgggag

SEQ ID NO: 2070467 - RNA, 20 nt, Human
ggagccuccacugccucugg

SEQ ID NO: 2070468 - RNA, 21 nt, Human
ggagccucauccgaggcaggg

SEQ ID NO: 2070469 - RNA, 19 nt, Human
ggagccucauccgaggcag

SEQ ID NO: 2070470 - RNA, 20 nt, Human
ggagccucauccgaggcagg

SEQ ID NO: 2070471 - RNA, 18 nt, Human
ggagcccugucuccucuc

SEQ ID NO: 2070472 - RNA, 18 nt, Human
ggagcacaaaagccucuc

SEQ ID NO: 2070473 - RNA, 23 nt, Human
ggagcccugucuccucucucugu

SEQ ID NO: 2070474 - RNA, 21 nt, Human
ggaggauguucugggacacag

SEQ ID NO: 2070475 - RNA, 18 nt, Human
ggaggauguucugggaca

SEQ ID NO: 2070476 - RNA, 16 nt, Human
ggaggcacacagcugc

SEQ ID NO: 2070477 - RNA, 12 nt, Human
ggaggaccuuau

SEQ ID NO: 2070478 - RNA, 17 nt, Human
ggaggauucuaugaggc

SEQ ID NO: 2070479 - RNA, 20 nt, Human
ggaggauugcuugagcccag

SEQ ID NO: 2070480 - RNA, 22 nt, Human
ggaggauugcuugagcccagga

SEQ ID NO: 2070481 - RNA, 14 nt, Human
ggaggaccucuggg

SEQ ID NO: 2070482 - RNA, 15 nt, Human
ggaggaccucugggc

SEQ ID NO: 2070483 - RNA, 21 nt, Human
ggaggcagaaagcagaggcug

SEQ ID NO: 2070484 - RNA, 17 nt, Human
ggaggcacacagcugca

SEQ ID NO: 2070485 - RNA, 13 nt, Human
ggaggcagggccu

SEQ ID NO: 2070486 - RNA, 18 nt, Human
ggaggcagggccuugccc

SEQ ID NO: 2070487 - RNA, 19 nt, Human
ggaggcagggccuugccca

SEQ ID NO: 2070488 - RNA, 21 nt, Human
ggaggcagggccuugcccaga

SEQ ID NO: 2070489 - RNA, 21 nt, Human
ggagggaugcugccugaguca

SEQ ID NO: 2070490 - RNA, 16 nt, Human
ggagggcccuaccuga

SEQ ID NO: 2070491 - RNA, 20 nt, Human
ggagggauagaggggggcug

SEQ ID NO: 2070492 - RNA, 17 nt, Human
ggagggcgugacucacc

SEQ ID NO: 2070493 - RNA, 13 nt, Human
ggaggggccuggc

SEQ ID NO: 2070494 - RNA, 11 nt, Human
ggaggggagcu

SEQ ID NO: 2070495 - RNA, 12 nt, Human
ggaggggagcuc

SEQ ID NO: 2070496 - RNA, 14 nt, Human
ggaggggagcucug

SEQ ID NO: 2070497 - RNA, 20 nt, Human
ggaggggcauggccagcagc

SEQ ID NO: 2070498 - RNA, 13 nt, Human
ggaguaucuggga

SEQ ID NO: 2070499 - RNA, 17 nt, Human
ggaguaccauguggcaa

SEQ ID NO: 2070500 - RNA, 20 nt, Human
ggaguagaccccuggcuggu

SEQ ID NO: 2070501 - RNA, 22 nt, Human
ggaguagagauggggaaagaau

SEQ ID NO: 2070502 - RNA, 14 nt, Human
ggaguaucugggaa

SEQ ID NO: 2070503 - RNA, 15 nt, Human
ggaguaucugggaac

SEQ ID NO: 2070504 - RNA, 22 nt, Human
ggagucccaccuuggcugcagg

SEQ ID NO: 2070505 - RNA, 14 nt, Human
ggagucagagagaa

SEQ ID NO: 2070506 - RNA, 21 nt, Human
ggaggggccuggcagccgugc

SEQ ID NO: 2070507 - RNA, 18 nt, Human
ggaggggccuggcagccg

SEQ ID NO: 2070508 - RNA, 14 nt, Human
ggaggggccuggca

SEQ ID NO: 2070509 - RNA, 17 nt, Human
ggaggggcggcaggagg

SEQ ID NO: 2070510 - RNA, 20 nt, Human
ggagguuuaggucaagaaga

SEQ ID NO: 2070511 - RNA, 12 nt, Human
ggaguacaaggc

SEQ ID NO: 2070512 - RNA, 22 nt, Human
ggcaugguggcgcaagccugua

SEQ ID NO: 2070513 - RNA, 21 nt, Human
ggcaugguggcgcaagccugu

SEQ ID NO: 2070514 - RNA, 13 nt, Human
ggcaugugaaggg

SEQ ID NO: 2070515 - RNA, 15 nt, Human
ggcaugcacagcugu

SEQ ID NO: 2070516 - RNA, 14 nt, Human
ggcaugagggauca

SEQ ID NO: 2070517 - RNA, 19 nt, Human
ggcaugagggaucacaggg

SEQ ID NO: 2070518 - RNA, 19 nt, Human
ggcaugguggcgcaagccu

SEQ ID NO: 2070519 - RNA, 19 nt, Human
ggcaugguacggagauguu

SEQ ID NO: 2070520 - RNA, 15 nt, Human
ggcaugccuggacaa

SEQ ID NO: 2070521 - RNA, 19 nt, Human
ggcaugggggccucagggc

SEQ ID NO: 2070522 - RNA, 23 nt, Human
ggcaugggggccucagggcagcc

SEQ ID NO: 2070523 - RNA, 11 nt, Human
ggcaguggagg

SEQ ID NO: 2070524 - RNA, 19 nt, Human
ggcagucaccugcccagau

SEQ ID NO: 2070525 - RNA, 23 nt, Human
ggcaguagcuguggugagguggg

SEQ ID NO: 2070526 - RNA, 21 nt, Human
ggcagcugcgguccacccagg

SEQ ID NO: 2070527 - RNA, 11 nt, Human
ggcagcugcca

SEQ ID NO: 2070528 - RNA, 14 nt, Human
ggcagcugccagag

SEQ ID NO: 2070529 - RNA, 15 nt, Human
ggcagcugccagaga

SEQ ID NO: 2070530 - RNA, 16 nt, Human
ggcagcugccagagaa

SEQ ID NO: 2070531 - RNA, 17 nt, Human
ggcagcugccagagaag

SEQ ID NO: 2070532 - RNA, 24 nt, Human
ggcagcugcgguccacccaggagc

SEQ ID NO: 2070533 - RNA, 23 nt, Human
ggcagcugcgguccacccaggag

SEQ ID NO: 2070534 - RNA, 12 nt, Human
ggcaggguccua

SEQ ID NO: 2070535 - RNA, 18 nt, Human
ggcagggucucacucugu

SEQ ID NO: 2070536 - RNA, 17 nt, Human
ggcagggucucacucug

SEQ ID NO: 2070537 - RNA, 17 nt, Human
ggcagguuggugggggc

SEQ ID NO: 2070538 - RNA, 15 nt, Human
ggcaguaaagagaaa

SEQ ID NO: 2070539 - RNA, 16 nt, Human
ggcaguaaagagaaac

SEQ ID NO: 2070540 - RNA, 19 nt, Human
ggcaguaaagagaaacuuu

SEQ ID NO: 2070541 - RNA, 15 nt, Human
ggcagggucaggaga

SEQ ID NO: 2070542 - RNA, 17 nt, Human
ggcagggucaggagagg

SEQ ID NO: 2070543 - RNA, 20 nt, Human
ggcauguucucugaggacac

SEQ ID NO: 2070544 - RNA, 21 nt, Human
ggcaugugccuauagucccag

SEQ ID NO: 2070545 - RNA, 12 nt, Human
ggccacagccag

SEQ ID NO: 2070546 - RNA, 13 nt, Human
ggccacagccaga

SEQ ID NO: 2070547 - RNA, 17 nt, Human
ggccacagccagaaccc

SEQ ID NO: 2070548 - RNA, 20 nt, Human
ggccacugugaagagaacca

SEQ ID NO: 2070549 - RNA, 13 nt, Human
ggccaccugcccc

SEQ ID NO: 2070550 - RNA, 10 nt, Human
ggccaccugc

SEQ ID NO: 2070551 - RNA, 11 nt, Human
ggccaccugca

SEQ ID NO: 2070552 - RNA, 12 nt, Human
ggccaccugcag

SEQ ID NO: 2070553 - RNA, 13 nt, Human
ggccaccugcagg

SEQ ID NO: 2070554 - RNA, 14 nt, Human
ggccaccugcaggu

SEQ ID NO: 2070555 - RNA, 15 nt, Human
ggccacuuuugacua

SEQ ID NO: 2070556 - RNA, 23 nt, Human
ggccaggacagagcugacaaaau

SEQ ID NO: 2070557 - RNA, 15 nt, Human
ggccaggacaggccc

SEQ ID NO: 2070558 - RNA, 16 nt, Human
ggccaggacaggcccg

SEQ ID NO: 2070559 - RNA, 21 nt, Human
ggcccaccuaccuucaaagcu

SEQ ID NO: 2070560 - RNA, 22 nt, Human
ggcccaccuaccuucaaagcug

SEQ ID NO: 2070561 - RNA, 20 nt, Human
ggcccacagcucccacccca

SEQ ID NO: 2070562 - RNA, 15 nt, Human
ggcccacagcuccca

SEQ ID NO: 2070563 - RNA, 17 nt, Human
ggcccacagcucccacc

SEQ ID NO: 2070564 - RNA, 18 nt, Human
ggcccacagcucccaccc

SEQ ID NO: 2070565 - RNA, 19 nt, Human
ggcccacagcucccacccc

SEQ ID NO: 2070566 - RNA, 13 nt, Human
ggcccacagcucc

SEQ ID NO: 2070567 - RNA, 14 nt, Human
ggcccacagcuccc

SEQ ID NO: 2070568 - RNA, 19 nt, Human
ggcaccauucaggaaccug

SEQ ID NO: 2070569 - RNA, 16 nt, Human
ggcagagccgggaagc

SEQ ID NO: 2070570 - RNA, 21 nt, Human
ggcagagguugcagugagccg

SEQ ID NO: 2070571 - RNA, 16 nt, Human
ggcagagugccccacc

SEQ ID NO: 2070572 - RNA, 21 nt, Human
ggcagagugccccaccugcca

SEQ ID NO: 2070573 - RNA, 22 nt, Human
ggcagagugccccaccugccac

SEQ ID NO: 2070574 - RNA, 20 nt, Human
ggcagagguugcagugagcu

SEQ ID NO: 2070575 - RNA, 18 nt, Human
ggcagagguucauuucaa

SEQ ID NO: 2070576 - RNA, 21 nt, Human
ggcagaggcuggaggcagggc

SEQ ID NO: 2070577 - RNA, 19 nt, Human
ggcagagggcagaggcugg

SEQ ID NO: 2070578 - RNA, 20 nt, Human
ggcagagggcagaggcugga

SEQ ID NO: 2070579 - RNA, 22 nt, Human
ggcagaggcuggaggcagggcc

SEQ ID NO: 2070580 - RNA, 23 nt, Human
ggcagaggcuggaggcagggccu

SEQ ID NO: 2070581 - RNA, 14 nt, Human
ggcagagggcagag

SEQ ID NO: 2070582 - RNA, 16 nt, Human
ggcagagggcagaggc

SEQ ID NO: 2070583 - RNA, 20 nt, Human
ggcacucagaagacacugau

SEQ ID NO: 2070584 - RNA, 19 nt, Human
ggcacucagaagacacuga

SEQ ID NO: 2070585 - RNA, 18 nt, Human
ggcacucagaagacacug

SEQ ID NO: 2070586 - RNA, 16 nt, Human
ggcacccacaaauaaa

SEQ ID NO: 2070587 - RNA, 20 nt, Human
ggcacccacaagugccacug

SEQ ID NO: 2070588 - RNA, 20 nt, Human
ggcacccggccccugcuggu

SEQ ID NO: 2070589 - RNA, 19 nt, Human
ggcacccggccccugcugg

SEQ ID NO: 2070590 - RNA, 18 nt, Human
ggcacccggccccugcug

SEQ ID NO: 2070591 - RNA, 20 nt, Human
ggcacccaccaucaugucug

SEQ ID NO: 2070592 - RNA, 18 nt, Human
ggcaccagccggggaaga

SEQ ID NO: 2070593 - RNA, 21 nt, Human
ggcaccaguguccuccccuca

SEQ ID NO: 2070594 - RNA, 17 nt, Human
ggcaccagcagccugga

SEQ ID NO: 2070595 - RNA, 22 nt, Human
ggcaagcuuggcuguagaagga

SEQ ID NO: 2070596 - RNA, 19 nt, Human
ggcaagcaccuccugccuc

SEQ ID NO: 2070597 - RNA, 18 nt, Human
ggcaagcaccuccugccu

SEQ ID NO: 2070598 - RNA, 18 nt, Human
ggcaagaaggaauugacu

SEQ ID NO: 2070599 - RNA, 13 nt, Human
ggauugacaguaa

SEQ ID NO: 2070600 - RNA, 16 nt, Human
ggauugacaguaacuu

SEQ ID NO: 2070601 - RNA, 19 nt, Human
ggauugaaggaugcugucu

SEQ ID NO: 2070602 - RNA, 17 nt, Human
ggcaagcaccuccugcc

SEQ ID NO: 2070603 - RNA, 17 nt, Human
ggcaagacuuuucuuug

SEQ ID NO: 2070604 - RNA, 18 nt, Human
ggauucuuuccauuauga

SEQ ID NO: 2070605 - RNA, 21 nt, Human
ggauucuuccucccucccucu

SEQ ID NO: 2070606 - RNA, 19 nt, Human
ggauucugggaggaagcag

SEQ ID NO: 2070607 - RNA, 23 nt, Human
ggagucccaccuuggcugcaggg

SEQ ID NO: 2070608 - RNA, 15 nt, Human
ggagucccgucagga

SEQ ID NO: 2070609 - RNA, 13 nt, Human
ggaugagcauuua

SEQ ID NO: 2070610 - RNA, 16 nt, Human
ggaugaggugcuggga

SEQ ID NO: 2070611 - RNA, 18 nt, Human
ggaugaggugcugggagg

SEQ ID NO: 2070612 - RNA, 17 nt, Human
ggaugccugguggcagc

SEQ ID NO: 2070613 - RNA, 13 nt, Human
ggaugccuggugg

SEQ ID NO: 2070614 - RNA, 18 nt, Human
ggaugccaucugugggca

SEQ ID NO: 2070615 - RNA, 19 nt, Human
ggaugccaucugugggcac

SEQ ID NO: 2070616 - RNA, 22 nt, Human
ggaugcccagggccacucugcc

SEQ ID NO: 2070617 - RNA, 17 nt, Human
ggaugaggugcugggag

SEQ ID NO: 2070618 - RNA, 15 nt, Human
ggaugaugccucaug

SEQ ID NO: 2070619 - RNA, 21 nt, Human
ggaugccugguggcagcugcg

SEQ ID NO: 2070620 - RNA, 20 nt, Human
ggaugccugguggcagcugc

SEQ ID NO: 2070621 - RNA, 19 nt, Human
ggaugccugguggcagcug

SEQ ID NO: 2070622 - RNA, 18 nt, Human
ggaugccugguggcagcu

SEQ ID NO: 2070623 - RNA, 23 nt, Human
ggaugcccagggccacucugccu

SEQ ID NO: 2070624 - RNA, 18 nt, Human
ggauucuccuuuuuaccc

SEQ ID NO: 2070625 - RNA, 13 nt, Human
ggauucugggagg

SEQ ID NO: 2070626 - RNA, 13 nt, Human
ggauucaggcugc

SEQ ID NO: 2070627 - RNA, 14 nt, Human
ggauucaggcugcu

SEQ ID NO: 2070628 - RNA, 15 nt, Human
ggauucaggcugcuu

SEQ ID NO: 2070629 - RNA, 12 nt, Human
ggcccagaggca

SEQ ID NO: 2070630 - RNA, 14 nt, Human
ggcccagaggcaca

SEQ ID NO: 2070631 - RNA, 16 nt, Human
ggcccagaggcacagc

SEQ ID NO: 2070632 - RNA, 17 nt, Human
ggcccagaggcacagcc

SEQ ID NO: 2070633 - RNA, 22 nt, Human
ggcccagaucuggucccuugca

SEQ ID NO: 2070634 - RNA, 13 nt, Human
ggccguggcugcc

SEQ ID NO: 2070635 - RNA, 16 nt, Human
ggccguggcugcccac

SEQ ID NO: 2070636 - RNA, 14 nt, Human
ggccuaaacuucag

SEQ ID NO: 2070637 - RNA, 19 nt, Human
ggcaugguauuugagacau

SEQ ID NO: 2070638 - RNA, 12 nt, Human
ggccgggcacag

SEQ ID NO: 2070639 - RNA, 14 nt, Human
ggccgggcacagcu

SEQ ID NO: 2070640 - RNA, 15 nt, Human
ggccgggcacagcug

SEQ ID NO: 2070641 - RNA, 22 nt, Human
ggccucaagugauucuccugcc

SEQ ID NO: 2070642 - RNA, 14 nt, Human
ggccucaagugauu

SEQ ID NO: 2070643 - RNA, 22 nt, Human
ggccucaacccucccucagccc

SEQ ID NO: 2070644 - RNA, 23 nt, Human
ggccucaacccucccucagcccc

SEQ ID NO: 2070645 - RNA, 15 nt, Human
ggccucaaggacuug

SEQ ID NO: 2070646 - RNA, 15 nt, Human
ggccuccucuaacag

SEQ ID NO: 2070647 - RNA, 21 nt, Human
ggccuccucuaacaggggcug

SEQ ID NO: 2070648 - RNA, 23 nt, Human
ggccuccucuaacaggggcuggu

SEQ ID NO: 2070649 - RNA, 18 nt, Human
ggccuccucuguccaggg

SEQ ID NO: 2070650 - RNA, 17 nt, Human
ggccuagauccacacac

SEQ ID NO: 2070651 - RNA, 23 nt, Human
ggccuagauccacacacagagga

SEQ ID NO: 2070652 - RNA, 14 nt, Human
ggccuccugugugu

SEQ ID NO: 2070653 - RNA, 19 nt, Human
ggccuccucuguccagggc

SEQ ID NO: 2070654 - RNA, 19 nt, Human
ggccuguacaaaagggaca

SEQ ID NO: 2070655 - RNA, 14 nt, Human
ggccugggucugug

SEQ ID NO: 2070656 - RNA, 21 nt, Human
ggccugggugcuggcugccca

SEQ ID NO: 2070657 - RNA, 21 nt, Human
ggccugguccaugauggaguc

SEQ ID NO: 2070658 - RNA, 19 nt, Human
ggccugggucugugucucu

SEQ ID NO: 2070659 - RNA, 16 nt, Human
ggccugaccucccccu

SEQ ID NO: 2070660 - RNA, 19 nt, Human
ggccugaccucccccuccu

SEQ ID NO: 2070661 - RNA, 20 nt, Human
ggccugaccucccccuccuu

SEQ ID NO: 2070662 - RNA, 23 nt, Human
ggccucugccccgucucaugagg

SEQ ID NO: 2070663 - RNA, 19 nt, Human
ggcucccaugaccauacug

SEQ ID NO: 2070664 - RNA, 14 nt, Human
ggcuccaggcuccu

SEQ ID NO: 2070665 - RNA, 12 nt, Human
ggcuccccucua

SEQ ID NO: 2070666 - RNA, 11 nt, Human
ggcuccccucu

SEQ ID NO: 2070667 - RNA, 12 nt, Human
ggcucuccaccu

SEQ ID NO: 2070668 - RNA, 13 nt, Human
ggcucuccaccuc

SEQ ID NO: 2070669 - RNA, 14 nt, Human
ggcucuccaccuca

SEQ ID NO: 2070670 - RNA, 15 nt, Human
ggcucuccaccucag

SEQ ID NO: 2070671 - RNA, 16 nt, Human
ggcucuccaccucagc

SEQ ID NO: 2070672 - RNA, 17 nt, Human
ggcucuccaccucagcc

SEQ ID NO: 2070673 - RNA, 18 nt, Human
ggcucuccaccucagccu

SEQ ID NO: 2070674 - RNA, 19 nt, Human
ggcucuccaccucagccuu

SEQ ID NO: 2070675 - RNA, 20 nt, Human
ggcucuccaccucagccuug

SEQ ID NO: 2070676 - RNA, 21 nt, Human
ggcucuccaccucagccuugg

SEQ ID NO: 2070677 - RNA, 22 nt, Human
ggcucuccaccucagccuugga

SEQ ID NO: 2070678 - RNA, 14 nt, Human
ggcucugaaagcca

SEQ ID NO: 2070679 - RNA, 13 nt, Human
ggcucugagaagg

SEQ ID NO: 2070680 - RNA, 18 nt, Human
ggcucugagaaggggagg

SEQ ID NO: 2070681 - RNA, 14 nt, Human
ggcucugccccagc

SEQ ID NO: 2070682 - RNA, 20 nt, Human
ggcucugccccagcucuggc

SEQ ID NO: 2070683 - RNA, 21 nt, Human
ggcucugccccagcucuggcu

SEQ ID NO: 2070684 - RNA, 12 nt, Human
ggcucugcacag

SEQ ID NO: 2070685 - RNA, 12 nt, Human
ggcucugcccca

SEQ ID NO: 2070686 - RNA, 20 nt, Human
ggcucacgccuaugauccca

SEQ ID NO: 2070687 - RNA, 21 nt, Human
ggcucacgccuaugaucccag

SEQ ID NO: 2070688 - RNA, 23 nt, Human
ggcucacgccuaugaucccagca

SEQ ID NO: 2070689 - RNA, 14 nt, Human
ggcucacagacugg

SEQ ID NO: 2070690 - RNA, 13 nt, Human
ggcuccaggcucc

SEQ ID NO: 2070691 - RNA, 12 nt, Human
ggcuccaggcuc

SEQ ID NO: 2070692 - RNA, 22 nt, Human
ggcucacgccuguaaucccagc

SEQ ID NO: 2070693 - RNA, 24 nt, Human
ggcucacgccuguaaucccagcag

SEQ ID NO: 2070694 - RNA, 13 nt, Human
ggcucacgugugu

SEQ ID NO: 2070695 - RNA, 16 nt, Human
ggcgggagcaucucuu

SEQ ID NO: 2070696 - RNA, 15 nt, Human
ggcgcgguggcucac

SEQ ID NO: 2070697 - RNA, 19 nt, Human
ggcgcgguggcucacgccu

SEQ ID NO: 2070698 - RNA, 14 nt, Human
ggcgcccccagugu

SEQ ID NO: 2070699 - RNA, 15 nt, Human
ggcgcccccagugug

SEQ ID NO: 2070700 - RNA, 22 nt, Human
ggcgggcaccuauagucccagc

SEQ ID NO: 2070701 - RNA, 17 nt, Human
ggcgggccaaggacugc

SEQ ID NO: 2070702 - RNA, 20 nt, Human
ggcgggcgaaucacgagguc

SEQ ID NO: 2070703 - RNA, 13 nt, Human
ggcuagucagaga

SEQ ID NO: 2070704 - RNA, 18 nt, Human
ggcuagucagagagagug

SEQ ID NO: 2070705 - RNA, 14 nt, Human
ggcuagucagagag

SEQ ID NO: 2070706 - RNA, 15 nt, Human
ggcuagucagagaga

SEQ ID NO: 2070707 - RNA, 16 nt, Human
gggagcccccgccccg

SEQ ID NO: 2070708 - RNA, 22 nt, Human
gggagcccccgccccgccccac

SEQ ID NO: 2070709 - RNA, 12 nt, Human
gggagcccccgc

SEQ ID NO: 2070710 - RNA, 12 nt, Human
gggagcucugca

SEQ ID NO: 2070711 - RNA, 16 nt, Human
gggagcguagaaucug

SEQ ID NO: 2070712 - RNA, 16 nt, Human
gggaggaaaagaaaag

SEQ ID NO: 2070713 - RNA, 24 nt, Human
gggaggaaauuugaauggguccau

SEQ ID NO: 2070714 - RNA, 23 nt, Human
gggaggaagcagguugaggggcu

SEQ ID NO: 2070715 - RNA, 19 nt, Human
gggaggaaucgaggaacca

SEQ ID NO: 2070716 - RNA, 15 nt, Human
gggaggaccucuggg

SEQ ID NO: 2070717 - RNA, 22 nt, Human
gggagcugccuguucagcucca

SEQ ID NO: 2070718 - RNA, 21 nt, Human
gggagcugccuguucagcucc

SEQ ID NO: 2070719 - RNA, 13 nt, Human
gggagcugccugu

SEQ ID NO: 2070720 - RNA, 14 nt, Human
gggagcucugucug

SEQ ID NO: 2070721 - RNA, 22 nt, Human
gggaggauguucugggacacag

SEQ ID NO: 2070722 - RNA, 21 nt, Human
gggaggauugcuugagcucag

SEQ ID NO: 2070723 - RNA, 23 nt, Human
gggaggaucucuugagccuggga

SEQ ID NO: 2070724 - RNA, 20 nt, Human
gggaggagguggcagcccug

SEQ ID NO: 2070725 - RNA, 17 nt, Human
gggaggaucacuggagc

SEQ ID NO: 2070726 - RNA, 17 nt, Human
gggagugacagaggcag

SEQ ID NO: 2070727 - RNA, 21 nt, Human
gggagucaucucaaccauccc

SEQ ID NO: 2070728 - RNA, 15 nt, Human
gggagucccgucagg

SEQ ID NO: 2070729 - RNA, 17 nt, Human
gggagucugaagcagau

SEQ ID NO: 2070730 - RNA, 23 nt, Human
gggagucugaagcagaugcaaag

SEQ ID NO: 2070731 - RNA, 23 nt, Human
gggaggauugcuugagcucagga

SEQ ID NO: 2070732 - RNA, 19 nt, Human
gggaggaucacuggagccc

SEQ ID NO: 2070733 - RNA, 22 nt, Human
gggaggaucacuggagcccagg

SEQ ID NO: 2070734 - RNA, 23 nt, Human
gggaggaucacuggagcccagga

SEQ ID NO: 2070735 - RNA, 21 nt, Human
gggaagugacaaggccccaga

SEQ ID NO: 2070736 - RNA, 14 nt, Human
gggaauauuuuauu

SEQ ID NO: 2070737 - RNA, 15 nt, Human
ggcuuugucccacag

SEQ ID NO: 2070738 - RNA, 16 nt, Human
ggcuuugucccacagc

SEQ ID NO: 2070739 - RNA, 18 nt, Human
ggcuuugucccacagcuu

SEQ ID NO: 2070740 - RNA, 18 nt, Human
ggcuuugauuccaucucc

SEQ ID NO: 2070741 - RNA, 24 nt, Human
ggcuuugauuccaucuccuugucu

SEQ ID NO: 2070742 - RNA, 19 nt, Human
ggcuuugcccaaccucagc

SEQ ID NO: 2070743 - RNA, 20 nt, Human
ggcuuugcccaaccucagca

SEQ ID NO: 2070744 - RNA, 21 nt, Human
gggaauguuugccucugccuc

SEQ ID NO: 2070745 - RNA, 19 nt, Human
gggaauguuugccucugcc

SEQ ID NO: 2070746 - RNA, 12 nt, Human
gggaauucucuu

SEQ ID NO: 2070747 - RNA, 14 nt, Human
gggaauucucuugg

SEQ ID NO: 2070748 - RNA, 23 nt, Human
gggacucaaugcacugacauugu

SEQ ID NO: 2070749 - RNA, 23 nt, Human
gggacugccagucccccugcccc

SEQ ID NO: 2070750 - RNA, 12 nt, Human
gggagccccagg

SEQ ID NO: 2070751 - RNA, 13 nt, Human
gggagccccaggg

SEQ ID NO: 2070752 - RNA, 21 nt, Human
gggagccccagggucuucccu

SEQ ID NO: 2070753 - RNA, 14 nt, Human
gggagccccagggu

SEQ ID NO: 2070754 - RNA, 16 nt, Human
gggagccccagggucu

SEQ ID NO: 2070755 - RNA, 19 nt, Human
gggacucaaugcacugaca

SEQ ID NO: 2070756 - RNA, 17 nt, Human
gggacucaaugcacuga

SEQ ID NO: 2070757 - RNA, 23 nt, Human
gggacguccugccaccuggggca

SEQ ID NO: 2070758 - RNA, 21 nt, Human
ggcugugggccucaaggacuu

SEQ ID NO: 2070759 - RNA, 14 nt, Human
ggcugugggcuccc

SEQ ID NO: 2070760 - RNA, 15 nt, Human
ggcugugggcucccu

SEQ ID NO: 2070761 - RNA, 16 nt, Human
ggcugugggcucccuu

SEQ ID NO: 2070762 - RNA, 18 nt, Human
ggcugugggcucccuucc

SEQ ID NO: 2070763 - RNA, 22 nt, Human
ggcugugggcucccuuccuccc

SEQ ID NO: 2070764 - RNA, 11 nt, Human
ggcugugagug

SEQ ID NO: 2070765 - RNA, 19 nt, Human
ggcugugcgcugacaacca

SEQ ID NO: 2070766 - RNA, 18 nt, Human
ggcugucuucucaggcuc

SEQ ID NO: 2070767 - RNA, 19 nt, Human
ggcugucuucucaggcucu

SEQ ID NO: 2070768 - RNA, 22 nt, Human
ggcugucuucucaggcucugcc

SEQ ID NO: 2070769 - RNA, 23 nt, Human
ggcugucuucucaggcucugccc

SEQ ID NO: 2070770 - RNA, 16 nt, Human
ggcugugccucugccu

SEQ ID NO: 2070771 - RNA, 13 nt, Human
ggcugugccucug

SEQ ID NO: 2070772 - RNA, 13 nt, Human
ggcuguccuuucc

SEQ ID NO: 2070773 - RNA, 19 nt, Human
ggcuguccuuuccaguggc

SEQ ID NO: 2070774 - RNA, 22 nt, Human
ggcuguccuuuccaguggccug

SEQ ID NO: 2070775 - RNA, 18 nt, Human
ggcugggggcaggagggc

SEQ ID NO: 2070776 - RNA, 16 nt, Human
ggcugggggcaggagg

SEQ ID NO: 2070777 - RNA, 17 nt, Human
ggcugggggcaggaggg

SEQ ID NO: 2070778 - RNA, 15 nt, Human
ggcuuaaaacaacac

SEQ ID NO: 2070779 - RNA, 20 nt, Human
ggcuguuggcugggggccuc

SEQ ID NO: 2070780 - RNA, 16 nt, Human
ggcuguuggcuggggg

SEQ ID NO: 2070781 - RNA, 15 nt, Human
ggcuguuggcugggg

SEQ ID NO: 2070782 - RNA, 14 nt, Human
ggcuguuggcuggg

SEQ ID NO: 2070783 - RNA, 22 nt, Human
ggcugugggccucaaggacuug

SEQ ID NO: 2070784 - RNA, 11 nt, Human
ggcuugcugcc

SEQ ID NO: 2070785 - RNA, 14 nt, Human
ggcuugccugcagg

SEQ ID NO: 2070786 - RNA, 15 nt, Human
ggcuugccugcaggc

SEQ ID NO: 2070787 - RNA, 23 nt, Human
ggcuugggcuuccauuugugugu

SEQ ID NO: 2070788 - RNA, 13 nt, Human
ggcuuucuggaga

SEQ ID NO: 2070789 - RNA, 14 nt, Human
ggcuuucuggagag

SEQ ID NO: 2070790 - RNA, 16 nt, Human
ggcuguuuuugggugc

SEQ ID NO: 2070791 - RNA, 22 nt, Human
ggcuguuuuugggugcaagagg

SEQ ID NO: 2070792 - RNA, 20 nt, Human
ggcuucacggaagagccuug

SEQ ID NO: 2070793 - RNA, 21 nt, Human
ggcuucacggaagagccuugc

SEQ ID NO: 2070794 - RNA, 12 nt, Human
ggcuucacagau

SEQ ID NO: 2070795 - RNA, 17 nt, Human
ggcuucagcauauuuau

SEQ ID NO: 2070796 - RNA, 13 nt, Human
ggcuugccugcag

SEQ ID NO: 2070797 - RNA, 16 nt, Human
ggcuugccacagcucu

SEQ ID NO: 2070798 - RNA, 15 nt, Human
ggcuggacuccagau

SEQ ID NO: 2070799 - RNA, 19 nt, Human
ggcuggacuccagaucugc

SEQ ID NO: 2070800 - RNA, 20 nt, Human
ggcuggacuccagaucugca

SEQ ID NO: 2070801 - RNA, 23 nt, Human
ggcuggacuccagaucugcaccg

SEQ ID NO: 2070802 - RNA, 13 nt, Human
ggcuggagcuggc

SEQ ID NO: 2070803 - RNA, 14 nt, Human
ggcuggacuggcug

SEQ ID NO: 2070804 - RNA, 23 nt, Human
ggcuggagcccagggagcggaaa

SEQ ID NO: 2070805 - RNA, 13 nt, Human
ggcuggaggcagg

SEQ ID NO: 2070806 - RNA, 15 nt, Human
ggcuggaggcagggc

SEQ ID NO: 2070807 - RNA, 23 nt, Human
ggcuggaggcagggccuugccca

SEQ ID NO: 2070808 - RNA, 17 nt, Human
ggcuggaggcagggccu

SEQ ID NO: 2070809 - RNA, 19 nt, Human
ggcuggaggcagggccuug

SEQ ID NO: 2070810 - RNA, 23 nt, Human
ggcucugggauagcugacccagc

SEQ ID NO: 2070811 - RNA, 23 nt, Human
ggcucugccccagcucuggcuuc

SEQ ID NO: 2070812 - RNA, 21 nt, Human
ggcucugcccucccuccuucc

SEQ ID NO: 2070813 - RNA, 13 nt, Human
ggcucugcccugc

SEQ ID NO: 2070814 - RNA, 17 nt, Human
ggcugaggaaaggccag

SEQ ID NO: 2070815 - RNA, 22 nt, Human
ggcugaggaaaggccagcuggc

SEQ ID NO: 2070816 - RNA, 17 nt, Human
ggcucuggcucucccca

SEQ ID NO: 2070817 - RNA, 21 nt, Human
ggcugaggauuucaagccugc

SEQ ID NO: 2070818 - RNA, 13 nt, Human
ggcugaggcagaa

SEQ ID NO: 2070819 - RNA, 14 nt, Human
ggcugaggcagaag

SEQ ID NO: 2070820 - RNA, 18 nt, Human
ggcugaggcaggagaauc

SEQ ID NO: 2070821 - RNA, 14 nt, Human
ggcugaggcaggag

SEQ ID NO: 2070822 - RNA, 17 nt, Human
ggcugaggcagaagaau

SEQ ID NO: 2070823 - RNA, 14 nt, Human
ggcugggggcagga

SEQ ID NO: 2070824 - RNA, 14 nt, Human
ggcugggggccuca

SEQ ID NO: 2070825 - RNA, 16 nt, Human
ggcuggggcaggaggg

SEQ ID NO: 2070826 - RNA, 16 nt, Human
ggcugggggaagaagc

SEQ ID NO: 2070827 - RNA, 18 nt, Human
ggcugggcuucaguggca

SEQ ID NO: 2070828 - RNA, 22 nt, Human
ggcugggcuucaguggcagcug

SEQ ID NO: 2070829 - RNA, 21 nt, Human
ggcugggcuucaguggcagcu

SEQ ID NO: 2070830 - RNA, 11 nt, Human
ggcugggcuuc

SEQ ID NO: 2070831 - RNA, 15 nt, Human
ggcugggagcucugc

SEQ ID NO: 2070832 - RNA, 19 nt, Human
ggcuggaguggaguggcgu

SEQ ID NO: 2070833 - RNA, 21 nt, Human
ucagggagugggcuaagcacg

SEQ ID NO: 2070834 - RNA, 22 nt, Human
ucagggcacugcugcugccuuu

SEQ ID NO: 2070835 - RNA, 20 nt, Human
ucagggauuuuuuuuuuaaa

SEQ ID NO: 2070836 - RNA, 23 nt, Human
ucagggauagcacugagcaaagc

SEQ ID NO: 2070837 - RNA, 15 nt, Human
ucagggcagccugcc

SEQ ID NO: 2070838 - RNA, 18 nt, Human
ucagggcagccugccugg

SEQ ID NO: 2070839 - RNA, 16 nt, Human
ucagggcagggcucug

SEQ ID NO: 2070840 - RNA, 15 nt, Human
ucaggugagaagcag

SEQ ID NO: 2070841 - RNA, 16 nt, Human
ucaggugagaagcaga

SEQ ID NO: 2070842 - RNA, 14 nt, Human
ucagggccccagca

SEQ ID NO: 2070843 - RNA, 16 nt, Human
ucagggccccagcacu

SEQ ID NO: 2070844 - RNA, 23 nt, Human
ucagggccccagcacuaaagcag

SEQ ID NO: 2070845 - RNA, 13 nt, Human
ucaggcucugccc

SEQ ID NO: 2070846 - RNA, 14 nt, Human
ucaggcucugcccu

SEQ ID NO: 2070847 - RNA, 19 nt, Human
ucaggcucugcccugcccu

SEQ ID NO: 2070848 - RNA, 15 nt, Human
ucaggcugcuuggga

SEQ ID NO: 2070849 - RNA, 14 nt, Human
ucaggcuuccuugg

SEQ ID NO: 2070850 - RNA, 15 nt, Human
ucaggcuuccuuggc

SEQ ID NO: 2070851 - RNA, 23 nt, Human
ucaggcuuccuuggcaucacagg

SEQ ID NO: 2070852 - RNA, 12 nt, Human
ucagcugccccc

SEQ ID NO: 2070853 - RNA, 22 nt, Human
ucaggaugcccagggccacucu

SEQ ID NO: 2070854 - RNA, 23 nt, Human
ucaggauucuccuuuuuaccccu

SEQ ID NO: 2070855 - RNA, 13 nt, Human
ucaggaugcccag

SEQ ID NO: 2070856 - RNA, 14 nt, Human
ucaggaugcccagg

SEQ ID NO: 2070857 - RNA, 15 nt, Human
ucaggaugcccaggg

SEQ ID NO: 2070858 - RNA, 16 nt, Human
ucaggaugcccagggc

SEQ ID NO: 2070859 - RNA, 20 nt, Human
ucagccuccugaguagcugg

SEQ ID NO: 2070860 - RNA, 20 nt, Human
ucagccuccggaguagcugg

SEQ ID NO: 2070861 - RNA, 22 nt, Human
ucagccucccgaguagcuggga

SEQ ID NO: 2070862 - RNA, 21 nt, Human
ucagccucccgaguagcuggg

SEQ ID NO: 2070863 - RNA, 13 nt, Human
ucagccuccugag

SEQ ID NO: 2070864 - RNA, 21 nt, Human
ucagccuccugaguagcugga

SEQ ID NO: 2070865 - RNA, 13 nt, Human
ucagccuccugug

SEQ ID NO: 2070866 - RNA, 14 nt, Human
ucagccuccugugu

SEQ ID NO: 2070867 - RNA, 16 nt, Human
ucagccuccuguguag

SEQ ID NO: 2070868 - RNA, 18 nt, Human
ucagccugcuccagcugu

SEQ ID NO: 2070869 - RNA, 19 nt, Human
ucagccugcuccagcuguu

SEQ ID NO: 2070870 - RNA, 15 nt, Human
ucagcugaaccuggg

SEQ ID NO: 2070871 - RNA, 16 nt, Human
ucagcugaaccugggu

SEQ ID NO: 2070872 - RNA, 20 nt, Human
ucagccuccuguguagcugg

SEQ ID NO: 2070873 - RNA, 18 nt, Human
ucagauauaaaagacuga

SEQ ID NO: 2070874 - RNA, 20 nt, Human
ucagauauaaaagacugacc

SEQ ID NO: 2070875 - RNA, 18 nt, Human
ucagauauauuuuucaca

SEQ ID NO: 2070876 - RNA, 23 nt, Human
ucagauauauuuuucacaguuuu

SEQ ID NO: 2070877 - RNA, 15 nt, Human
ucagacugcuuuaaa

SEQ ID NO: 2070878 - RNA, 16 nt, Human
ucagauauauuuuuca

SEQ ID NO: 2070879 - RNA, 14 nt, Human
ucagauauaaaaga

SEQ ID NO: 2070880 - RNA, 17 nt, Human
ucagauauaaaagacug

SEQ ID NO: 2070881 - RNA, 18 nt, Human
ucagagguagggcugcca

SEQ ID NO: 2070882 - RNA, 17 nt, Human
ucagagguggcucugga

SEQ ID NO: 2070883 - RNA, 18 nt, Human
ucagaguaagcugcuuuu

SEQ ID NO: 2070884 - RNA, 19 nt, Human
ucagaguaagcugcuuuug

SEQ ID NO: 2070885 - RNA, 20 nt, Human
ucagcauucucacuccuacc

SEQ ID NO: 2070886 - RNA, 17 nt, Human
ucagcauucucacuccu

SEQ ID NO: 2070887 - RNA, 13 nt, Human
ucagaguccaggc

SEQ ID NO: 2070888 - RNA, 21 nt, Human
ucagccucccaaagugcuggg

SEQ ID NO: 2070889 - RNA, 19 nt, Human
ucagccucccaaagugcug

SEQ ID NO: 2070890 - RNA, 23 nt, Human
ucagcauucucacuccuaccugg

SEQ ID NO: 2070891 - RNA, 14 nt, Human
ucagccucccaaag

SEQ ID NO: 2070892 - RNA, 22 nt, Human
ucagccucccgaauagcuggga

SEQ ID NO: 2070893 - RNA, 21 nt, Human
ucagccucccgaauagcuggg

SEQ ID NO: 2070894 - RNA, 18 nt, Human
ucagccucccgaguagcu

SEQ ID NO: 2070895 - RNA, 20 nt, Human
ucagccucccgaguagcugg

SEQ ID NO: 2070896 - RNA, 18 nt, Human
ucacugccaugccagcuu

SEQ ID NO: 2070897 - RNA, 11 nt, Human
ucacugccucu

SEQ ID NO: 2070898 - RNA, 12 nt, Human
ucacugccucuc

SEQ ID NO: 2070899 - RNA, 19 nt, Human
ucacugccucucccuggcc

SEQ ID NO: 2070900 - RNA, 21 nt, Human
ucacugccucucccuggcccu

SEQ ID NO: 2070901 - RNA, 20 nt, Human
ucacucuuauugcccacgcu

SEQ ID NO: 2070902 - RNA, 16 nt, Human
ucaccagccccagugc

SEQ ID NO: 2070903 - RNA, 13 nt, Human
ucaccagccccag

SEQ ID NO: 2070904 - RNA, 12 nt, Human
ucaccccuccac

SEQ ID NO: 2070905 - RNA, 17 nt, Human
ucaccccuccacccuug

SEQ ID NO: 2070906 - RNA, 14 nt, Human
ucaccccgucuggg

SEQ ID NO: 2070907 - RNA, 17 nt, Human
ucacucuuauugcccac

SEQ ID NO: 2070908 - RNA, 13 nt, Human
ucaccccugcccu

SEQ ID NO: 2070909 - RNA, 14 nt, Human
ucaccccugcccug

SEQ ID NO: 2070910 - RNA, 16 nt, Human
ucaccccugcccuggg

SEQ ID NO: 2070911 - RNA, 17 nt, Human
ucaccccugcccuggga

SEQ ID NO: 2070912 - RNA, 12 nt, Human
ucacugcuggcu

SEQ ID NO: 2070913 - RNA, 14 nt, Human
ucacugcucacacu

SEQ ID NO: 2070914 - RNA, 16 nt, Human
ucacugcuggcugccu

SEQ ID NO: 2070915 - RNA, 15 nt, Human
ucacugcuggcugcc

SEQ ID NO: 2070916 - RNA, 14 nt, Human
ucacugcuggcugc

SEQ ID NO: 2070917 - RNA, 13 nt, Human
ucacugcuggcug

SEQ ID NO: 2070918 - RNA, 22 nt, Human
ucacugcuggcugccuuagaac

SEQ ID NO: 2070919 - RNA, 18 nt, Human
ucacugcuggcugccuua

SEQ ID NO: 2070920 - RNA, 17 nt, Human
ucacugcuggcugccuu

SEQ ID NO: 2070921 - RNA, 17 nt, Human
ucacuggagcaccaggc

SEQ ID NO: 2070922 - RNA, 17 nt, Human
ucacuggagcccaggag

SEQ ID NO: 2070923 - RNA, 14 nt, Human
ucacuggagcccag

SEQ ID NO: 2070924 - RNA, 15 nt, Human
ucacuggagcccagg

SEQ ID NO: 2070925 - RNA, 18 nt, Human
ucacuggagcaccaggca

SEQ ID NO: 2070926 - RNA, 22 nt, Human
ucacuggagcaccaggcacgaa

SEQ ID NO: 2070927 - RNA, 11 nt, Human
ucacuggagcc

SEQ ID NO: 2070928 - RNA, 12 nt, Human
ucacuggagccc

SEQ ID NO: 2070929 - RNA, 13 nt, Human
ucacuggagccca

SEQ ID NO: 2070930 - RNA, 18 nt, Human
ucacuggguggggugagg

SEQ ID NO: 2070931 - RNA, 16 nt, Human
ucacugggguccuggg

SEQ ID NO: 2070932 - RNA, 17 nt, Human
ucacugggguccugggg

SEQ ID NO: 2070933 - RNA, 19 nt, Human
ucacugggguccuggggcc

SEQ ID NO: 2070934 - RNA, 20 nt, Human
ucacugggguccuggggccu

SEQ ID NO: 2070935 - RNA, 21 nt, Human
ucacugggguccuggggccuc

SEQ ID NO: 2070936 - RNA, 11 nt, Human
ucacugggugg

SEQ ID NO: 2070937 - RNA, 20 nt, Human
ucacuggguggggugaggac

SEQ ID NO: 2070938 - RNA, 22 nt, Human
ucagaaaccaguuaugugaaug

SEQ ID NO: 2070939 - RNA, 13 nt, Human
ucagaaaccaguu

SEQ ID NO: 2070940 - RNA, 18 nt, Human
ucagaaacaucaguuacu

SEQ ID NO: 2070941 - RNA, 22 nt, Human
ucagaaacaucaguuacucuga

SEQ ID NO: 2070942 - RNA, 15 nt, Human
ucagaaacuugugaa

SEQ ID NO: 2070943 - RNA, 16 nt, Human
ucagaaacuugugaag

SEQ ID NO: 2070944 - RNA, 17 nt, Human
ucagaaacuugugaagu

SEQ ID NO: 2070945 - RNA, 18 nt, Human
ucagaaacuugugaagug

SEQ ID NO: 2070946 - RNA, 17 nt, Human
ucacuuucacauagaug

SEQ ID NO: 2070947 - RNA, 18 nt, Human
ucacuuucacauagaugu

SEQ ID NO: 2070948 - RNA, 19 nt, Human
ucacuuucacauagauguc

SEQ ID NO: 2070949 - RNA, 21 nt, Human
ucagaauugaucauuuucccc

SEQ ID NO: 2070950 - RNA, 13 nt, Human
ucagacacaaaca

SEQ ID NO: 2070951 - RNA, 19 nt, Human
ucagacacaaacaaacaag

SEQ ID NO: 2070952 - RNA, 14 nt, Human
ucagaaauuuaauu

SEQ ID NO: 2070953 - RNA, 21 nt, Human
ucagaaauuuaauucauguuu

SEQ ID NO: 2070954 - RNA, 23 nt, Human
ucagaaauuuaauucauguuucu

SEQ ID NO: 2070955 - RNA, 18 nt, Human
ucagaaauguacaacuuu

SEQ ID NO: 2070956 - RNA, 15 nt, Human
ucagaaaugucugga

SEQ ID NO: 2070957 - RNA, 21 nt, Human
ucagaaaugucuggagaauaa

SEQ ID NO: 2070958 - RNA, 12 nt, Human
ucagaccccagc

SEQ ID NO: 2070959 - RNA, 13 nt, Human
ucagaccccagcg

SEQ ID NO: 2070960 - RNA, 17 nt, Human
ucagaccccagcggcug

SEQ ID NO: 2070961 - RNA, 12 nt, Human
ucagacccccac

SEQ ID NO: 2070962 - RNA, 14 nt, Human
ucagacccccacuc

SEQ ID NO: 2070963 - RNA, 18 nt, Human
ucagacccccacucucau

SEQ ID NO: 2070964 - RNA, 22 nt, Human
ucagacccccacucucauuccc

SEQ ID NO: 2070965 - RNA, 14 nt, Human
ucagacacuuugga

SEQ ID NO: 2070966 - RNA, 13 nt, Human
ucagacccuaccc

SEQ ID NO: 2070967 - RNA, 14 nt, Human
ucagacccuacccc

SEQ ID NO: 2070968 - RNA, 16 nt, Human
ucagacccuaccccac

SEQ ID NO: 2070969 - RNA, 18 nt, Human
ucagacccuaccccacca

SEQ ID NO: 2070970 - RNA, 23 nt, Human
ucagacugcugggacuggccagg

SEQ ID NO: 2070971 - RNA, 13 nt, Human
ucagacuggcugg

SEQ ID NO: 2070972 - RNA, 14 nt, Human
ucagacuggcuggc

SEQ ID NO: 2070973 - RNA, 20 nt, Human
ucagacuggcuggcugcagu

SEQ ID NO: 2070974 - RNA, 21 nt, Human
ucagacuggcuggcugcagug

SEQ ID NO: 2070975 - RNA, 16 nt, Human
ucagacuuuaaagaau

SEQ ID NO: 2070976 - RNA, 17 nt, Human
ucagacuuuaaagaaua

SEQ ID NO: 2070977 - RNA, 23 nt, Human
ucagacuuuaaagaauaauaugc

SEQ ID NO: 2070978 - RNA, 13 nt, Human
ucauuauaaacgu

SEQ ID NO: 2070979 - RNA, 15 nt, Human
ucauuauaaacguga

SEQ ID NO: 2070980 - RNA, 23 nt, Human
ucauuauaaacgugaugaucagc

SEQ ID NO: 2070981 - RNA, 22 nt, Human
ucauuauaaugucauuaaacau

SEQ ID NO: 2070982 - RNA, 23 nt, Human
ucauuccaccuucccaugcccug

SEQ ID NO: 2070983 - RNA, 16 nt, Human
ucauucaauacaagug

SEQ ID NO: 2070984 - RNA, 11 nt, Human
ucauuauuuau

SEQ ID NO: 2070985 - RNA, 16 nt, Human
ucauuccaugugccca

SEQ ID NO: 2070986 - RNA, 21 nt, Human
ucauuccaacuucccaguuca

SEQ ID NO: 2070987 - RNA, 17 nt, Human
ucauuccaugugcccag

SEQ ID NO: 2070988 - RNA, 18 nt, Human
ucauuccaugugcccagu

SEQ ID NO: 2070989 - RNA, 19 nt, Human
ucauuccaugugcccaguu

SEQ ID NO: 2070990 - RNA, 20 nt, Human
ucauuccaugugcccaguua

SEQ ID NO: 2070991 - RNA, 21 nt, Human
ucauucaacccaccugcgucu

SEQ ID NO: 2070992 - RNA, 22 nt, Human
ucauucaaaaguugaaauuaac

SEQ ID NO: 2070993 - RNA, 16 nt, Human
ucauucaaaaguugaa

SEQ ID NO: 2070994 - RNA, 18 nt, Human
ucauucaaaaguugaaau

SEQ ID NO: 2070995 - RNA, 19 nt, Human
ucauuauuggaauuaaccu

SEQ ID NO: 2070996 - RNA, 21 nt, Human
ucauuauuggaauuaaccugg

SEQ ID NO: 2070997 - RNA, 14 nt, Human
ucauuauuggaauu

SEQ ID NO: 2070998 - RNA, 17 nt, Human
ucauuauuggaauuaac

SEQ ID NO: 2070999 - RNA, 18 nt, Human
ucauuauuggaauuaacc

SEQ ID NO: 2071000 - RNA, 16 nt, Human
ucauuucauuccuaac

SEQ ID NO: 2071001 - RNA, 16 nt, Human
ucauuuccugugucuu

SEQ ID NO: 2071002 - RNA, 13 nt, Human
ucauuuccugugu

SEQ ID NO: 2071003 - RNA, 22 nt, Human
ucauuuccuauguaacugcauu

SEQ ID NO: 2071004 - RNA, 13 nt, Human
ucauugugguuau

SEQ ID NO: 2071005 - RNA, 22 nt, Human
ucauugugguuauuuuuauaca

SEQ ID NO: 2071006 - RNA, 23 nt, Human
ucauugugguuauuuuuauacag

SEQ ID NO: 2071007 - RNA, 12 nt, Human
ucauuucaucua

SEQ ID NO: 2071008 - RNA, 23 nt, Human
ucaucuuagguuggcaaaaaggc

SEQ ID NO: 2071009 - RNA, 13 nt, Human
ucaucuucucugg

SEQ ID NO: 2071010 - RNA, 19 nt, Human
ucauagggaagaccugcug

SEQ ID NO: 2071011 - RNA, 15 nt, Human
ucaggugcugccauc

SEQ ID NO: 2071012 - RNA, 14 nt, Human
ucaggugcugccau

SEQ ID NO: 2071013 - RNA, 13 nt, Human
ucaggugcugcca

SEQ ID NO: 2071014 - RNA, 21 nt, Human
ucaggugagaagcagaggaag

SEQ ID NO: 2071015 - RNA, 19 nt, Human
ucauagcauuaacuaaucu

SEQ ID NO: 2071016 - RNA, 15 nt, Human
ucauacucaccucac

SEQ ID NO: 2071017 - RNA, 14 nt, Human
ucauagcauuaacu

SEQ ID NO: 2071018 - RNA, 21 nt, Human
ucauagcauuaacuaaucuau

SEQ ID NO: 2071019 - RNA, 21 nt, Human
ucauagcugguuccugcuaga

SEQ ID NO: 2071020 - RNA, 12 nt, Human
ucauagcugaga

SEQ ID NO: 2071021 - RNA, 17 nt, Human
ucauagcugagauuccu

SEQ ID NO: 2071022 - RNA, 22 nt, Human
uccaauuuguaaaaacagcauu

SEQ ID NO: 2071023 - RNA, 17 nt, Human
uccaauuuacauacucu

SEQ ID NO: 2071024 - RNA, 18 nt, Human
uccaauuuacauacucug

SEQ ID NO: 2071025 - RNA, 17 nt, Human
uccacaaguuaaauaaa

SEQ ID NO: 2071026 - RNA, 18 nt, Human
uccacaaguuaaauaaau

SEQ ID NO: 2071027 - RNA, 12 nt, Human
uccacacacaga

SEQ ID NO: 2071028 - RNA, 13 nt, Human
uccacacacagag

SEQ ID NO: 2071029 - RNA, 23 nt, Human
uccacacacagaggaagagcagg

SEQ ID NO: 2071030 - RNA, 14 nt, Human
uccacacacagagg

SEQ ID NO: 2071031 - RNA, 15 nt, Human
uccacacacagagga

SEQ ID NO: 2071032 - RNA, 19 nt, Human
uccacacacagaggaagag

SEQ ID NO: 2071033 - RNA, 22 nt, Human
uccacacacagaggaagagcag

SEQ ID NO: 2071034 - RNA, 12 nt, Human
uccacccugcuc

SEQ ID NO: 2071035 - RNA, 21 nt, Human
uccacccccucccuggccugu

SEQ ID NO: 2071036 - RNA, 19 nt, Human
uccacccccucccuggccu

SEQ ID NO: 2071037 - RNA, 20 nt, Human
uccacccccucccuggccug

SEQ ID NO: 2071038 - RNA, 23 nt, Human
uccaccccccagaaccuguccuu

SEQ ID NO: 2071039 - RNA, 13 nt, Human
uccacccccuccc

SEQ ID NO: 2071040 - RNA, 15 nt, Human
uccacccccucccug

SEQ ID NO: 2071041 - RNA, 18 nt, Human
uccacccccucccuggcc

SEQ ID NO: 2071042 - RNA, 17 nt, Human
uccacagaugccuccac

SEQ ID NO: 2071043 - RNA, 22 nt, Human
uccaccccccagaaccuguccu

SEQ ID NO: 2071044 - RNA, 18 nt, Human
uccacccccgccucccuc

SEQ ID NO: 2071045 - RNA, 23 nt, Human
uccacccccgccucccuccccug

SEQ ID NO: 2071046 - RNA, 12 nt, Human
uccacccccucc

SEQ ID NO: 2071047 - RNA, 17 nt, Human
uccaccuggccccaugu

SEQ ID NO: 2071048 - RNA, 13 nt, Human
uccaccuggaagc

SEQ ID NO: 2071049 - RNA, 13 nt, Human
uccaccuggcccc

SEQ ID NO: 2071050 - RNA, 15 nt, Human
uccaccuucccaugc

SEQ ID NO: 2071051 - RNA, 13 nt, Human
uccaccugucuca

SEQ ID NO: 2071052 - RNA, 16 nt, Human
uccaccugucucagcc

SEQ ID NO: 2071053 - RNA, 17 nt, Human
uccaccugucucagccu

SEQ ID NO: 2071054 - RNA, 20 nt, Human
uccaccugucucagccuccc

SEQ ID NO: 2071055 - RNA, 23 nt, Human
uccagccaaccccuguggagccc

SEQ ID NO: 2071056 - RNA, 14 nt, Human
uccaccuuaaauua

SEQ ID NO: 2071057 - RNA, 17 nt, Human
uccaccuuaaauuaaac

SEQ ID NO: 2071058 - RNA, 18 nt, Human
uccaccuuaaauuaaaca

SEQ ID NO: 2071059 - RNA, 22 nt, Human
uccaccuuaaauuaaacaauuu

SEQ ID NO: 2071060 - RNA, 13 nt, Human
uccagccaacccc

SEQ ID NO: 2071061 - RNA, 14 nt, Human
uccagccaaccccu

SEQ ID NO: 2071062 - RNA, 16 nt, Human
uccagccaaccccugu

SEQ ID NO: 2071063 - RNA, 20 nt, Human
uccagccaaccccuguggag

SEQ ID NO: 2071064 - RNA, 17 nt, Human
uccagcuguucagcugg

SEQ ID NO: 2071065 - RNA, 20 nt, Human
uccagcuguugagccccucc

SEQ ID NO: 2071066 - RNA, 15 nt, Human
uccagcuugcucuuc

SEQ ID NO: 2071067 - RNA, 16 nt, Human
uccagcuugcucuuca

SEQ ID NO: 2071068 - RNA, 17 nt, Human
uccagcuugcucuucag

SEQ ID NO: 2071069 - RNA, 19 nt, Human
uccagcuugcucuucagug

SEQ ID NO: 2071070 - RNA, 17 nt, Human
uccagcucaccagcccc

SEQ ID NO: 2071071 - RNA, 16 nt, Human
uccagcucaccagccc

SEQ ID NO: 2071072 - RNA, 18 nt, Human
uccagcucaccagcccca

SEQ ID NO: 2071073 - RNA, 12 nt, Human
uccagcccauug

SEQ ID NO: 2071074 - RNA, 16 nt, Human
uccagguucagcuugu

SEQ ID NO: 2071075 - RNA, 15 nt, Human
uccagguucagcuug

SEQ ID NO: 2071076 - RNA, 19 nt, Human
uauugcuuguuggauuuuu

SEQ ID NO: 2071077 - RNA, 21 nt, Human
uauugcuugcacaaaccaauu

SEQ ID NO: 2071078 - RNA, 22 nt, Human
uauuggaaauuuguuauaauga

SEQ ID NO: 2071079 - RNA, 14 nt, Human
uauuggcaaagaug

SEQ ID NO: 2071080 - RNA, 23 nt, Human
uauuggaggaccaaaaaaauaag

SEQ ID NO: 2071081 - RNA, 21 nt, Human
uauuggaauuaaccuggugcu

SEQ ID NO: 2071082 - RNA, 23 nt, Human
uauuggaauuaaccuggugcugg

SEQ ID NO: 2071083 - RNA, 15 nt, Human
uauuggaauuaaccu

SEQ ID NO: 2071084 - RNA, 16 nt, Human
uauuggaauuaaccug

SEQ ID NO: 2071085 - RNA, 14 nt, Human
uauugaugugcaaa

SEQ ID NO: 2071086 - RNA, 19 nt, Human
uauugaugugcaaaaauuu

SEQ ID NO: 2071087 - RNA, 20 nt, Human
uauugaugugcaaaaauuuu

SEQ ID NO: 2071088 - RNA, 14 nt, Human
uauugcgucuuagc

SEQ ID NO: 2071089 - RNA, 13 nt, Human
uauugcuacuucc

SEQ ID NO: 2071090 - RNA, 18 nt, Human
uauugcuacuuccugccu

SEQ ID NO: 2071091 - RNA, 16 nt, Human
uauucucacuccacca

SEQ ID NO: 2071092 - RNA, 19 nt, Human
uauucucacuccaccaccc

SEQ ID NO: 2071093 - RNA, 16 nt, Human
uauucucuccucagac

SEQ ID NO: 2071094 - RNA, 17 nt, Human
uauucucuccucagacu

SEQ ID NO: 2071095 - RNA, 21 nt, Human
uauugauaugcuuauacacuu

SEQ ID NO: 2071096 - RNA, 19 nt, Human
uauuuaaaauuuauugcuu

SEQ ID NO: 2071097 - RNA, 23 nt, Human
uauuuaaaagaaagccucagaga

SEQ ID NO: 2071098 - RNA, 22 nt, Human
uauuguuuucaguguacaugga

SEQ ID NO: 2071099 - RNA, 22 nt, Human
uauuguuuuuccuuguauuuaa

SEQ ID NO: 2071100 - RNA, 18 nt, Human
uauuguuuucaguguaca

SEQ ID NO: 2071101 - RNA, 20 nt, Human
uauuguuuucaguguacaug

SEQ ID NO: 2071102 - RNA, 12 nt, Human
uauuguuuucag

SEQ ID NO: 2071103 - RNA, 13 nt, Human
uauuguuccaaga

SEQ ID NO: 2071104 - RNA, 17 nt, Human
uauuguuccaagacauu

SEQ ID NO: 2071105 - RNA, 18 nt, Human
uauuguuccaagacauug

SEQ ID NO: 2071106 - RNA, 19 nt, Human
uauuguuccaagacauugu

SEQ ID NO: 2071107 - RNA, 20 nt, Human
uauuguuccaagacauuguc

SEQ ID NO: 2071108 - RNA, 21 nt, Human
uauuguuccaagacauuguca

SEQ ID NO: 2071109 - RNA, 23 nt, Human
uauuguuccaagacauugucaau

SEQ ID NO: 2071110 - RNA, 18 nt, Human
uauuauucaccauguaaa

SEQ ID NO: 2071111 - RNA, 19 nt, Human
uauuauucaccauguaaaa

SEQ ID NO: 2071112 - RNA, 22 nt, Human
uauuauucaccauguaaaacaa

SEQ ID NO: 2071113 - RNA, 15 nt, Human
uauuaaugcuaaggg

SEQ ID NO: 2071114 - RNA, 21 nt, Human
uauuacacaaauacuuauuca

SEQ ID NO: 2071115 - RNA, 23 nt, Human
uauuacacaaauacuuauucauu

SEQ ID NO: 2071116 - RNA, 21 nt, Human
uauuccaguuuguuuauuacu

SEQ ID NO: 2071117 - RNA, 16 nt, Human
uauuccauaguauauu

SEQ ID NO: 2071118 - RNA, 18 nt, Human
uauuccauaguauauuaa

SEQ ID NO: 2071119 - RNA, 19 nt, Human
uauuccauaguauauuaaa

SEQ ID NO: 2071120 - RNA, 23 nt, Human
uauuccauaguauauuaaaaaug

SEQ ID NO: 2071121 - RNA, 14 nt, Human
uauuccauauauua

SEQ ID NO: 2071122 - RNA, 14 nt, Human
uauuccaccuuaaa

SEQ ID NO: 2071123 - RNA, 15 nt, Human
uauuccaccuuaaau

SEQ ID NO: 2071124 - RNA, 18 nt, Human
uauuccaccuuaaauuaa

SEQ ID NO: 2071125 - RNA, 19 nt, Human
uauuccaccuuaaauuaaa

SEQ ID NO: 2071126 - RNA, 20 nt, Human
uauuccaccuuaaauuaaac

SEQ ID NO: 2071127 - RNA, 22 nt, Human
uauuccaccuuaaauuaaacaa

SEQ ID NO: 2071128 - RNA, 13 nt, Human
uauuauucugcag

SEQ ID NO: 2071129 - RNA, 15 nt, Human
uauuauucugcagca

SEQ ID NO: 2071130 - RNA, 18 nt, Human
uauuccauauauuagcau

SEQ ID NO: 2071131 - RNA, 23 nt, Human
uauuccaugaauguaucaggaaa

SEQ ID NO: 2071132 - RNA, 16 nt, Human
uauuccaugaauguau

SEQ ID NO: 2071133 - RNA, 17 nt, Human
uauuccaugaauguauc

SEQ ID NO: 2071134 - RNA, 22 nt, Human
uauuccaugaauguaucaggaa

SEQ ID NO: 2071135 - RNA, 20 nt, Human
uauuccccuaucucuagaau

SEQ ID NO: 2071136 - RNA, 22 nt, Human
uauuccccuaucucuagaauuu

SEQ ID NO: 2071137 - RNA, 14 nt, Human
uauucucaaagcag

SEQ ID NO: 2071138 - RNA, 16 nt, Human
uauucucaaagcagga

SEQ ID NO: 2071139 - RNA, 13 nt, Human
uauucucacucca

SEQ ID NO: 2071140 - RNA, 14 nt, Human
uauucucacuccac

SEQ ID NO: 2071141 - RNA, 15 nt, Human
uauucucacuccacc

SEQ ID NO: 2071142 - RNA, 22 nt, Human
uauucucacuccaccacccaaa

SEQ ID NO: 2071143 - RNA, 14 nt, Human
uauucuacauuuca

SEQ ID NO: 2071144 - RNA, 15 nt, Human
uauucuacauuucac

SEQ ID NO: 2071145 - RNA, 22 nt, Human
uauuccuauauaguuuauugac

SEQ ID NO: 2071146 - RNA, 21 nt, Human
uauucccuguacaauauuuaa

SEQ ID NO: 2071147 - RNA, 20 nt, Human
uauuccuauauaguuuauug

SEQ ID NO: 2071148 - RNA, 21 nt, Human
uauuccuauauaguuuauuga

SEQ ID NO: 2071149 - RNA, 21 nt, Human
uauuccugcauuugugaaaug

SEQ ID NO: 2071150 - RNA, 20 nt, Human
uauuccugcauuugugaaau

SEQ ID NO: 2071151 - RNA, 19 nt, Human
uauuccugcauuugugaaa

SEQ ID NO: 2071152 - RNA, 17 nt, Human
uauuccugcauuuguga

SEQ ID NO: 2071153 - RNA, 14 nt, Human
uauuccugaaugaa

SEQ ID NO: 2071154 - RNA, 20 nt, Human
uauuccugaaugaaauauca

SEQ ID NO: 2071155 - RNA, 20 nt, Human
uauuccuuuuguguacagug

SEQ ID NO: 2071156 - RNA, 19 nt, Human
uauuccuuuuguguacagu

SEQ ID NO: 2071157 - RNA, 21 nt, Human
uauuccuuuuguguacagugu

SEQ ID NO: 2071158 - RNA, 12 nt, Human
uauuaaugcuaa

SEQ ID NO: 2071159 - RNA, 13 nt, Human
uauuaaugcuaag

SEQ ID NO: 2071160 - RNA, 14 nt, Human
uauuaaugcuaagg

SEQ ID NO: 2071161 - RNA, 15 nt, Human
uauuaauauuuuaau

SEQ ID NO: 2071162 - RNA, 17 nt, Human
uauuaauauucauugua

SEQ ID NO: 2071163 - RNA, 20 nt, Human
uauuaauauucauuguauaa

SEQ ID NO: 2071164 - RNA, 21 nt, Human
uauuaagauggauucucagau

SEQ ID NO: 2071165 - RNA, 16 nt, Human
uauuaagauggauucu

SEQ ID NO: 2071166 - RNA, 18 nt, Human
uauuaagauggauucuca

SEQ ID NO: 2071167 - RNA, 19 nt, Human
uauuaagauggauucucag

SEQ ID NO: 2071168 - RNA, 20 nt, Human
uauuaagauggauucucaga

SEQ ID NO: 2071169 - RNA, 24 nt, Human
uauuaagaaagacuaucuaaaugu

SEQ ID NO: 2071170 - RNA, 13 nt, Human
uauuaagauggau

SEQ ID NO: 2071171 - RNA, 15 nt, Human
uauuaagauggauuc

SEQ ID NO: 2071172 - RNA, 20 nt, Human
uauuaaauuuuuuaaaaagc

SEQ ID NO: 2071173 - RNA, 22 nt, Human
uauuaaauuuuuuaaaaagcaa

SEQ ID NO: 2071174 - RNA, 12 nt, Human
uauuaaauuaug

SEQ ID NO: 2071175 - RNA, 23 nt, Human
uauguuugcucagaacacauucu

SEQ ID NO: 2071176 - RNA, 14 nt, Human
uauguuugcacacu

SEQ ID NO: 2071177 - RNA, 19 nt, Human
uauguuugcacacuugugu

SEQ ID NO: 2071178 - RNA, 18 nt, Human
uauguauguuuacacugu

SEQ ID NO: 2071179 - RNA, 22 nt, Human
uauguauguuuacacugucaaa

SEQ ID NO: 2071180 - RNA, 19 nt, Human
uauguauuaauauucauug

SEQ ID NO: 2071181 - RNA, 17 nt, Human
uaugucaacuuuaugca

SEQ ID NO: 2071182 - RNA, 14 nt, Human
uauguauuuuaugu

SEQ ID NO: 2071183 - RNA, 16 nt, Human
uauguauuuuauguau

SEQ ID NO: 2071184 - RNA, 19 nt, Human
uauguauuuuauguauguu

SEQ ID NO: 2071185 - RNA, 14 nt, Human
uauguugauaaaag

SEQ ID NO: 2071186 - RNA, 18 nt, Human
uauguugaccuaagauuu

SEQ ID NO: 2071187 - RNA, 20 nt, Human
uauguugcccaggcaggucu

SEQ ID NO: 2071188 - RNA, 15 nt, Human
uauguugaugaaaaa

SEQ ID NO: 2071189 - RNA, 13 nt, Human
uauguuuacacug

SEQ ID NO: 2071190 - RNA, 15 nt, Human
uauguuuacacuguc

SEQ ID NO: 2071191 - RNA, 16 nt, Human
uauguuuacacuguca

SEQ ID NO: 2071192 - RNA, 18 nt, Human
uauguuuacacugucaaa

SEQ ID NO: 2071193 - RNA, 19 nt, Human
uauguugcccaggcagguc

SEQ ID NO: 2071194 - RNA, 16 nt, Human
uauguugcccaggcag

SEQ ID NO: 2071195 - RNA, 13 nt, Human
uauguugcccagg

SEQ ID NO: 2071196 - RNA, 18 nt, Human
uauguacaauauuuuaag

SEQ ID NO: 2071197 - RNA, 20 nt, Human
uauguacaauauuuuaagca

SEQ ID NO: 2071198 - RNA, 21 nt, Human
uauguacaauauuuuaagcau

SEQ ID NO: 2071199 - RNA, 23 nt, Human
uauguacaauauuuuaagcauua

SEQ ID NO: 2071200 - RNA, 14 nt, Human
uauguacauauaua

SEQ ID NO: 2071201 - RNA, 14 nt, Human
uauguaacugcauu

SEQ ID NO: 2071202 - RNA, 24 nt, Human
uauguaacugcauugagaacugca

SEQ ID NO: 2071203 - RNA, 15 nt, Human
uauguaauaauguga

SEQ ID NO: 2071204 - RNA, 16 nt, Human
uauguaauaaugugaa

SEQ ID NO: 2071205 - RNA, 14 nt, Human
uauguaccucuuuu

SEQ ID NO: 2071206 - RNA, 16 nt, Human
uauguaccucuuuuag

SEQ ID NO: 2071207 - RNA, 20 nt, Human
uauguacuccucuuuacacu

SEQ ID NO: 2071208 - RNA, 21 nt, Human
uauguacuccucuuuacacug

SEQ ID NO: 2071209 - RNA, 17 nt, Human
uauguagaugugcauuu

SEQ ID NO: 2071210 - RNA, 12 nt, Human
uauguagaugug

SEQ ID NO: 2071211 - RNA, 16 nt, Human
uauguagaugugcauu

SEQ ID NO: 2071212 - RNA, 13 nt, Human
uauguaugugugu

SEQ ID NO: 2071213 - RNA, 14 nt, Human
uauguaugugugua

SEQ ID NO: 2071214 - RNA, 17 nt, Human
uauguauguguguaugg

SEQ ID NO: 2071215 - RNA, 14 nt, Human
uauguauguaaaaa

SEQ ID NO: 2071216 - RNA, 16 nt, Human
uauguauguaaaaaug

SEQ ID NO: 2071217 - RNA, 16 nt, Human
uauguaugugaaaguu

SEQ ID NO: 2071218 - RNA, 20 nt, Human
uauguauggaauacaguguu

SEQ ID NO: 2071219 - RNA, 19 nt, Human
uauguauauuuaaaagaaa

SEQ ID NO: 2071220 - RNA, 18 nt, Human
uauguaaacauaauucuu

SEQ ID NO: 2071221 - RNA, 19 nt, Human
uauguaaacugcauuagaa

SEQ ID NO: 2071222 - RNA, 23 nt, Human
uauguaaacugcauuagaaauua

SEQ ID NO: 2071223 - RNA, 14 nt, Human
uauguaaacauaau

SEQ ID NO: 2071224 - RNA, 12 nt, Human
uauguaaaauaa

SEQ ID NO: 2071225 - RNA, 19 nt, Human
uauguaaaauaaaauuaug

SEQ ID NO: 2071226 - RNA, 14 nt, Human
uauguaaaauuuug

SEQ ID NO: 2071227 - RNA, 19 nt, Human
gggagugaggcaggugaca

SEQ ID NO: 2071228 - RNA, 10 nt, Human
uauguaaaaa

SEQ ID NO: 2071229 - RNA, 15 nt, Human
uauggauuuucuaag

SEQ ID NO: 2071230 - RNA, 19 nt, Human
uauggauuuucuaaggaag

SEQ ID NO: 2071231 - RNA, 20 nt, Human
gggagugggacagagucugg

SEQ ID NO: 2071232 - RNA, 18 nt, Human
gggagugggacagagucu

SEQ ID NO: 2071233 - RNA, 19 nt, Human
ucaagugauucuccugccu

SEQ ID NO: 2071234 - RNA, 21 nt, Human
ucaagugauucuccugccuca

SEQ ID NO: 2071235 - RNA, 18 nt, Human
ucaagugauucuccugcc

SEQ ID NO: 2071236 - RNA, 20 nt, Human
ucaagugauucuccugccuc

SEQ ID NO: 2071237 - RNA, 18 nt, Human
ucaacgcagcccugcuuu

SEQ ID NO: 2071238 - RNA, 15 nt, Human
ucaacgcagcccugc

SEQ ID NO: 2071239 - RNA, 14 nt, Human
ucaacgcagcccug

SEQ ID NO: 2071240 - RNA, 12 nt, Human
ucaaccuguaaa

SEQ ID NO: 2071241 - RNA, 13 nt, Human
ucaaccuguaaau

SEQ ID NO: 2071242 - RNA, 15 nt, Human
ucaaccuguaaauua

SEQ ID NO: 2071243 - RNA, 16 nt, Human
ucaaccuguaaauuau

SEQ ID NO: 2071244 - RNA, 17 nt, Human
ucaaccuguaaauuauu

SEQ ID NO: 2071245 - RNA, 18 nt, Human
ucaaccuguaaauuauuu

SEQ ID NO: 2071246 - RNA, 19 nt, Human
ucaaccuguaaauuauuuu

SEQ ID NO: 2071247 - RNA, 15 nt, Human
ucaaccugugaugag

SEQ ID NO: 2071248 - RNA, 20 nt, Human
ucaaccugugaugaggggag

SEQ ID NO: 2071249 - RNA, 13 nt, Human
ucaaguucaagga

SEQ ID NO: 2071250 - RNA, 16 nt, Human
ucaaguucaaggacca

SEQ ID NO: 2071251 - RNA, 16 nt, Human
ucaaguugcacacuca

SEQ ID NO: 2071252 - RNA, 20 nt, Human
ucaaguugcacacucacugg

SEQ ID NO: 2071253 - RNA, 21 nt, Human
ucaaguugggagccugaaaua

SEQ ID NO: 2071254 - RNA, 18 nt, Human
ucaaguuuccaagcaaau

SEQ ID NO: 2071255 - RNA, 19 nt, Human
ucaaguuuccaagcaaaug

SEQ ID NO: 2071256 - RNA, 23 nt, Human
ucaaguuuccaagcaaauguuac

SEQ ID NO: 2071257 - RNA, 13 nt, Human
ucaauaaaaugug

SEQ ID NO: 2071258 - RNA, 23 nt, Human
ucaauaaaaugugauuuuucuga

SEQ ID NO: 2071259 - RNA, 19 nt, Human
ucaauaaaaugugauuuuu

SEQ ID NO: 2071260 - RNA, 22 nt, Human
ucaauaaaaugugauuuuucug

SEQ ID NO: 2071261 - RNA, 14 nt, Human
ucaauaaaauguga

SEQ ID NO: 2071262 - RNA, 15 nt, Human
ucaauaaaaugugau

SEQ ID NO: 2071263 - RNA, 16 nt, Human
ucaauaaaaugugauu

SEQ ID NO: 2071264 - RNA, 18 nt, Human
ucaauaaaaugugauuuu

SEQ ID NO: 2071265 - RNA, 14 nt, Human
ucaauaaacagcuu

SEQ ID NO: 2071266 - RNA, 21 nt, Human
ucaauaaacagcuucaugccu

SEQ ID NO: 2071267 - RNA, 23 nt, Human
ucaauaaacagcuucaugccuuu

SEQ ID NO: 2071268 - RNA, 12 nt, Human
ucaauaaacagc

SEQ ID NO: 2071269 - RNA, 17 nt, Human
ucaauaaaguaucuaca

SEQ ID NO: 2071270 - RNA, 12 nt, Human
ucaauaaaguau

SEQ ID NO: 2071271 - RNA, 13 nt, Human
ucaauaaaguauc

SEQ ID NO: 2071272 - RNA, 22 nt, Human
ucaauaagccucagcuuucuaa

SEQ ID NO: 2071273 - RNA, 14 nt, Human
ucaauaacgaaguu

SEQ ID NO: 2071274 - RNA, 22 nt, Human
ucaauaacgaaguugggcaaua

SEQ ID NO: 2071275 - RNA, 20 nt, Human
ucaauaagcaucaaacucuu

SEQ ID NO: 2071276 - RNA, 11 nt, Human
ucaauguucau

SEQ ID NO: 2071277 - RNA, 12 nt, Human
ucaauguucauu

SEQ ID NO: 2071278 - RNA, 13 nt, Human
ucaauguucauug

SEQ ID NO: 2071279 - RNA, 14 nt, Human
ucaauguucauugu

SEQ ID NO: 2071280 - RNA, 16 nt, Human
ucaauguucauuguaa

SEQ ID NO: 2071281 - RNA, 15 nt, Human
ucaaugugaaucaga

SEQ ID NO: 2071282 - RNA, 11 nt, Human
ucaaugucacu

SEQ ID NO: 2071283 - RNA, 18 nt, Human
ucaaugguuugcaaggaa

SEQ ID NO: 2071284 - RNA, 19 nt, Human
ucaaugguuugcaaggaag

SEQ ID NO: 2071285 - RNA, 19 nt, Human
ucacaggcagguccagggu

SEQ ID NO: 2071286 - RNA, 18 nt, Human
ucacaccauaacuaggua

SEQ ID NO: 2071287 - RNA, 21 nt, Human
ucacaccugaaaauguuagug

SEQ ID NO: 2071288 - RNA, 18 nt, Human
ucacaggcagguccaggg

SEQ ID NO: 2071289 - RNA, 17 nt, Human
ucacaggcagguccagg

SEQ ID NO: 2071290 - RNA, 16 nt, Human
ucacaggcagguccag

SEQ ID NO: 2071291 - RNA, 13 nt, Human
ucaauuaccacac

SEQ ID NO: 2071292 - RNA, 13 nt, Human
ucacaguguguuu

SEQ ID NO: 2071293 - RNA, 19 nt, Human
ucaccaaaucagcugcuac

SEQ ID NO: 2071294 - RNA, 20 nt, Human
ucaccaaaucagcugcuacu

SEQ ID NO: 2071295 - RNA, 12 nt, Human
ucaccaagcuca

SEQ ID NO: 2071296 - RNA, 16 nt, Human
ucaccaagcucacagu

SEQ ID NO: 2071297 - RNA, 20 nt, Human
ucaccaagcucacaguuccu

SEQ ID NO: 2071298 - RNA, 21 nt, Human
ucaccaagcucacaguuccuc

SEQ ID NO: 2071299 - RNA, 22 nt, Human
ucaccaagcucacaguuccucg

SEQ ID NO: 2071300 - RNA, 17 nt, Human
ucacauuuauucugcuc

SEQ ID NO: 2071301 - RNA, 18 nt, Human
ucacagucucuuuaaucu

SEQ ID NO: 2071302 - RNA, 19 nt, Human
ucacagucucuuuaaucuu

SEQ ID NO: 2071303 - RNA, 21 nt, Human
ucacagucucuuuaaucuuca

SEQ ID NO: 2071304 - RNA, 23 nt, Human
ucacagucucuuuaaucuucagu

SEQ ID NO: 2071305 - RNA, 18 nt, Human
ucacagugggagccaggg

SEQ ID NO: 2071306 - RNA, 17 nt, Human
ucacagugggagccagg

SEQ ID NO: 2071307 - RNA, 19 nt, Human
ucacauuuauucugcucac

SEQ ID NO: 2071308 - RNA, 18 nt, Human
ucacauuuauucugcuca

SEQ ID NO: 2071309 - RNA, 13 nt, Human
uauuuauauaaau

SEQ ID NO: 2071310 - RNA, 17 nt, Human
uauuuauaauacauuuc

SEQ ID NO: 2071311 - RNA, 18 nt, Human
uauuuauagcaauccaug

SEQ ID NO: 2071312 - RNA, 14 nt, Human
uauuuauaagcaga

SEQ ID NO: 2071313 - RNA, 17 nt, Human
uauuuauaagcagauuu

SEQ ID NO: 2071314 - RNA, 23 nt, Human
uauuuauaacucaucauaaaaua

SEQ ID NO: 2071315 - RNA, 21 nt, Human
uauuuauaacucaucauaaaa

SEQ ID NO: 2071316 - RNA, 22 nt, Human
uauuuauaacucaucauaaaau

SEQ ID NO: 2071317 - RNA, 20 nt, Human
uauuuauaacaaccuaaauu

SEQ ID NO: 2071318 - RNA, 19 nt, Human
uauuuauaacaaccuaaau

SEQ ID NO: 2071319 - RNA, 14 nt, Human
uauuuauaacagca

SEQ ID NO: 2071320 - RNA, 18 nt, Human
uauuuauaacagcauucu

SEQ ID NO: 2071321 - RNA, 13 nt, Human
uauuuauaacuca

SEQ ID NO: 2071322 - RNA, 20 nt, Human
uauuuauaacucaucauaaa

SEQ ID NO: 2071323 - RNA, 13 nt, Human
uauuuauauaauu

SEQ ID NO: 2071324 - RNA, 17 nt, Human
uauuuauauaauuaugu

SEQ ID NO: 2071325 - RNA, 18 nt, Human
uauuuauauaauuauguu

SEQ ID NO: 2071326 - RNA, 23 nt, Human
uauuuauauaauuauguuauuga

SEQ ID NO: 2071327 - RNA, 13 nt, Human
uauuuauauauuu

SEQ ID NO: 2071328 - RNA, 21 nt, Human
uauuuuauuacaucuuucaca

SEQ ID NO: 2071329 - RNA, 19 nt, Human
uauuuucaacgcagcccug

SEQ ID NO: 2071330 - RNA, 17 nt, Human
uauuuuauuuuuuucua

SEQ ID NO: 2071331 - RNA, 22 nt, Human
uauuuucaaauuguaucuagug

SEQ ID NO: 2071332 - RNA, 20 nt, Human
uauuuuccaugaaaaugcaa

SEQ ID NO: 2071333 - RNA, 18 nt, Human
uauuuucccaauagcacu

SEQ ID NO: 2071334 - RNA, 23 nt, Human
uauuuucccaauagcacuuucau

SEQ ID NO: 2071335 - RNA, 16 nt, Human
uauuuuccaugaaaau

SEQ ID NO: 2071336 - RNA, 11 nt, Human
uauuuuauuca

SEQ ID NO: 2071337 - RNA, 15 nt, Human
uauuuuauucaaggu

SEQ ID NO: 2071338 - RNA, 16 nt, Human
uauuuuauucaaggua

SEQ ID NO: 2071339 - RNA, 13 nt, Human
uauuuuauucccu

SEQ ID NO: 2071340 - RNA, 19 nt, Human
uauuuuauucccuuucaca

SEQ ID NO: 2071341 - RNA, 22 nt, Human
uauuuucugguagauagaaaua

SEQ ID NO: 2071342 - RNA, 17 nt, Human
uauuuuuuuaaaaucac

SEQ ID NO: 2071343 - RNA, 18 nt, Human
uauuuuuuuaaaaucacu

SEQ ID NO: 2071344 - RNA, 19 nt, Human
uauuuuuuuaaaaucacua

SEQ ID NO: 2071345 - RNA, 23 nt, Human
uauuuuuuuaaaaucacuaacau

SEQ ID NO: 2071346 - RNA, 20 nt, Human
uauuuucugguagauagaaa

SEQ ID NO: 2071347 - RNA, 15 nt, Human
uauuuuccuccccag

SEQ ID NO: 2071348 - RNA, 16 nt, Human
uauuuuccuccccagc

SEQ ID NO: 2071349 - RNA, 12 nt, Human
uauuuuccuccc

SEQ ID NO: 2071350 - RNA, 22 nt, Human
uauuuucccuauuagagaagag

SEQ ID NO: 2071351 - RNA, 14 nt, Human
ucaaaaaaagaaaa

SEQ ID NO: 2071352 - RNA, 15 nt, Human
ucaaaaaaagaaaaa

SEQ ID NO: 2071353 - RNA, 15 nt, Human
ucaaaugagaaaaug

SEQ ID NO: 2071354 - RNA, 18 nt, Human
ucaaaugggcugcugcuu

SEQ ID NO: 2071355 - RNA, 16 nt, Human
ucaaauugagagaaug

SEQ ID NO: 2071356 - RNA, 12 nt, Human
ucaaauuguauc

SEQ ID NO: 2071357 - RNA, 14 nt, Human
ucaaauuguaucua

SEQ ID NO: 2071358 - RNA, 23 nt, Human
ucaaccccuucgcuccugugucu

SEQ ID NO: 2071359 - RNA, 23 nt, Human
ucaacccuaaaaagcagagcuuu

SEQ ID NO: 2071360 - RNA, 22 nt, Human
ucaacccuaaaaagcagagcuu

SEQ ID NO: 2071361 - RNA, 18 nt, Human
ucaacccuaaaaagcaga

SEQ ID NO: 2071362 - RNA, 13 nt, Human
ucaaauuguaucu

SEQ ID NO: 2071363 - RNA, 14 nt, Human
ucaacccucccuca

SEQ ID NO: 2071364 - RNA, 15 nt, Human
ucaacccucccucag

SEQ ID NO: 2071365 - RNA, 17 nt, Human
ucaacccucccucagcc

SEQ ID NO: 2071366 - RNA, 18 nt, Human
ucaacccucccucagccc

SEQ ID NO: 2071367 - RNA, 19 nt, Human
ucaacccucccucagcccc

SEQ ID NO: 2071368 - RNA, 20 nt, Human
ucaacccucccucagccccu

SEQ ID NO: 2071369 - RNA, 21 nt, Human
ucaacccucccucagccccuc

SEQ ID NO: 2071370 - RNA, 23 nt, Human
ucaacccucccucagccccucuu

SEQ ID NO: 2071371 - RNA, 12 nt, Human
ucaaagaaauuu

SEQ ID NO: 2071372 - RNA, 13 nt, Human
ucaaagaaauuuc

SEQ ID NO: 2071373 - RNA, 19 nt, Human
ucaaagaaauuuccacuca

SEQ ID NO: 2071374 - RNA, 20 nt, Human
ucaaagaaauuuccacucag

SEQ ID NO: 2071375 - RNA, 14 nt, Human
ucaaaacacuugua

SEQ ID NO: 2071376 - RNA, 17 nt, Human
ucaaaacacuuguaauu

SEQ ID NO: 2071377 - RNA, 24 nt, Human
ucaaaacacuuguaauuuuguauc

SEQ ID NO: 2071378 - RNA, 15 nt, Human
ucaaaacagagaugu

SEQ ID NO: 2071379 - RNA, 23 nt, Human
ucaaaaauguacaaaauaaaguu

SEQ ID NO: 2071380 - RNA, 17 nt, Human
ucaaagacauucugaca

SEQ ID NO: 2071381 - RNA, 12 nt, Human
ucaaagaaggaa

SEQ ID NO: 2071382 - RNA, 19 nt, Human
ucuucuuuuugcuucaaaa

SEQ ID NO: 2071383 - RNA, 16 nt, Human
ucuucuuuuuuuguga

SEQ ID NO: 2071384 - RNA, 18 nt, Human
ucuucuuuuuuugugaug

SEQ ID NO: 2071385 - RNA, 17 nt, Human
ucuucuuuuuuugugau

SEQ ID NO: 2071386 - RNA, 13 nt, Human
ucuucuccuuuca

SEQ ID NO: 2071387 - RNA, 14 nt, Human
ucuucuccuuucac

SEQ ID NO: 2071388 - RNA, 12 nt, Human
ucuugaacuccu

SEQ ID NO: 2071389 - RNA, 19 nt, Human
ucuucuccauccuaccaca

SEQ ID NO: 2071390 - RNA, 12 nt, Human
ucuucuccaucu

SEQ ID NO: 2071391 - RNA, 14 nt, Human
ucuucuccaucugg

SEQ ID NO: 2071392 - RNA, 16 nt, Human
ucuucucccaauucau

SEQ ID NO: 2071393 - RNA, 12 nt, Human
ucuucuccacug

SEQ ID NO: 2071394 - RNA, 17 nt, Human
ucuucucauagcauuaa

SEQ ID NO: 2071395 - RNA, 18 nt, Human
ucuucucauagcauuaac

SEQ ID NO: 2071396 - RNA, 19 nt, Human
ucuucucauagcauuaacu

SEQ ID NO: 2071397 - RNA, 20 nt, Human
ucuucucauagcauuaacua

SEQ ID NO: 2071398 - RNA, 15 nt, Human
ucuuccuuaaacucc

SEQ ID NO: 2071399 - RNA, 14 nt, Human
ucuucucaggcucu

SEQ ID NO: 2071400 - RNA, 20 nt, Human
ucuucucaggcucugcccug

SEQ ID NO: 2071401 - RNA, 21 nt, Human
ucuucucaggcucugcccugc

SEQ ID NO: 2071402 - RNA, 16 nt, Human
ucuucucauagcauua

SEQ ID NO: 2071403 - RNA, 17 nt, Human
ucuucaugcaaugacau

SEQ ID NO: 2071404 - RNA, 14 nt, Human
ucuucaugcaauga

SEQ ID NO: 2071405 - RNA, 20 nt, Human
ucuucauccggcagccugga

SEQ ID NO: 2071406 - RNA, 15 nt, Human
ucuucauccuuagca

SEQ ID NO: 2071407 - RNA, 16 nt, Human
ucuucauccuuagcaa

SEQ ID NO: 2071408 - RNA, 21 nt, Human
ucuucauccuuagcaacagcc

SEQ ID NO: 2071409 - RNA, 23 nt, Human
ucuucagccuagccgaccucagc

SEQ ID NO: 2071410 - RNA, 21 nt, Human
ucuucagccuagccgaccuca

SEQ ID NO: 2071411 - RNA, 22 nt, Human
ucuucagccuagccgaccucag

SEQ ID NO: 2071412 - RNA, 13 nt, Human
ucuucaggccucc

SEQ ID NO: 2071413 - RNA, 14 nt, Human
ucuucaggccuccc

SEQ ID NO: 2071414 - RNA, 15 nt, Human
ucuucaggccucccu

SEQ ID NO: 2071415 - RNA, 18 nt, Human
ucuucaggccucccucuc

SEQ ID NO: 2071416 - RNA, 15 nt, Human
ucuucaucccacucc

SEQ ID NO: 2071417 - RNA, 18 nt, Human
ucuucauccggcagccug

SEQ ID NO: 2071418 - RNA, 19 nt, Human
ucuucauccggcagccugg

SEQ ID NO: 2071419 - RNA, 17 nt, Human
ucuuaggggagagcuuu

SEQ ID NO: 2071420 - RNA, 19 nt, Human
ucuuaggggagagcuuucu

SEQ ID NO: 2071421 - RNA, 16 nt, Human
ucuuaggcaaucacau

SEQ ID NO: 2071422 - RNA, 19 nt, Human
ucuuaggcaaucacauagu

SEQ ID NO: 2071423 - RNA, 14 nt, Human
ucuuagcugccaag

SEQ ID NO: 2071424 - RNA, 16 nt, Human
ucuucagccaccucuc

SEQ ID NO: 2071425 - RNA, 19 nt, Human
ucuucagccaccucucuuu

SEQ ID NO: 2071426 - RNA, 11 nt, Human
ucuucagccua

SEQ ID NO: 2071427 - RNA, 12 nt, Human
ucuucagccuag

SEQ ID NO: 2071428 - RNA, 19 nt, Human
ucuuaggaagagaaaccag

SEQ ID NO: 2071429 - RNA, 15 nt, Human
ucuuaggaagagaaa

SEQ ID NO: 2071430 - RNA, 13 nt, Human
ucuuaaaaagugg

SEQ ID NO: 2071431 - RNA, 17 nt, Human
ucuuaaacaaauguaug

SEQ ID NO: 2071432 - RNA, 16 nt, Human
ucuguuuuuaaaaauc

SEQ ID NO: 2071433 - RNA, 18 nt, Human
ucuuaaaaaauaaaaacu

SEQ ID NO: 2071434 - RNA, 23 nt, Human
ucuuaaagcugccuguaguuagg

SEQ ID NO: 2071435 - RNA, 20 nt, Human
ucuuaaagcugccuguaguu

SEQ ID NO: 2071436 - RNA, 21 nt, Human
ucuuaaagcugccuguaguua

SEQ ID NO: 2071437 - RNA, 16 nt, Human
ucuuaaagcugccugu

SEQ ID NO: 2071438 - RNA, 19 nt, Human
ucuuaaagcugccuguagu

SEQ ID NO: 2071439 - RNA, 17 nt, Human
ucugucuucaagggcuu

SEQ ID NO: 2071440 - RNA, 16 nt, Human
ucuguuuugccugaag

SEQ ID NO: 2071441 - RNA, 12 nt, Human
ucugucuucaca

SEQ ID NO: 2071442 - RNA, 14 nt, Human
ucugucuucacagc

SEQ ID NO: 2071443 - RNA, 15 nt, Human
ucugucuucacagcu

SEQ ID NO: 2071444 - RNA, 22 nt, Human
ucugucuucacagcucuguguu

SEQ ID NO: 2071445 - RNA, 12 nt, Human
ucuuaacucuuu

SEQ ID NO: 2071446 - RNA, 12 nt, Human
ucuuaagcuucc

SEQ ID NO: 2071447 - RNA, 22 nt, Human
ucuuaagaccaccucaaauuua

SEQ ID NO: 2071448 - RNA, 23 nt, Human
ucuuaagaccaccucaaauuuaa

SEQ ID NO: 2071449 - RNA, 23 nt, Human
ucuggcugauaaaagauacauuu

SEQ ID NO: 2071450 - RNA, 15 nt, Human
ucuuaaauaaaccuu

SEQ ID NO: 2071451 - RNA, 13 nt, Human
ucuuaaauaaaag

SEQ ID NO: 2071452 - RNA, 15 nt, Human
ucuuaaauaaaagaa

SEQ ID NO: 2071453 - RNA, 19 nt, Human
ucuuaaauaaaagaaaugc

SEQ ID NO: 2071454 - RNA, 22 nt, Human
ucuuaaauaaaagaaaugcaca

SEQ ID NO: 2071455 - RNA, 14 nt, Human
ucuguccuacucug

SEQ ID NO: 2071456 - RNA, 16 nt, Human
ucugguggucucugcu

SEQ ID NO: 2071457 - RNA, 15 nt, Human
ucugguuagcucagc

SEQ ID NO: 2071458 - RNA, 16 nt, Human
ucugguuagcucagcc

SEQ ID NO: 2071459 - RNA, 17 nt, Human
ucugguuagcucagccc

SEQ ID NO: 2071460 - RNA, 18 nt, Human
ucugguuagcucagcccc

SEQ ID NO: 2071461 - RNA, 22 nt, Human
ucugguuagcucagccccagcc

SEQ ID NO: 2071462 - RNA, 19 nt, Human
ucuguccuacucuguguca

SEQ ID NO: 2071463 - RNA, 15 nt, Human
ucuguccuacucugu

SEQ ID NO: 2071464 - RNA, 20 nt, Human
ucuguccuacucugugucag

SEQ ID NO: 2071465 - RNA, 21 nt, Human
ucuguccugggagugagcugg

SEQ ID NO: 2071466 - RNA, 14 nt, Human
ucugucgcccaguc

SEQ ID NO: 2071467 - RNA, 16 nt, Human
ucugucgcccagucug

SEQ ID NO: 2071468 - RNA, 19 nt, Human
ucuguccuuuuggcacuga

SEQ ID NO: 2071469 - RNA, 21 nt, Human
ucuguccuuuuggcacugaga

SEQ ID NO: 2071470 - RNA, 19 nt, Human
ucugggacccuuuccuucc

SEQ ID NO: 2071471 - RNA, 14 nt, Human
ucugggacacaguu

SEQ ID NO: 2071472 - RNA, 15 nt, Human
ucugggacccuuucc

SEQ ID NO: 2071473 - RNA, 16 nt, Human
ucugggacccuuuccu

SEQ ID NO: 2071474 - RNA, 18 nt, Human
ucuggcugaacacuggca

SEQ ID NO: 2071475 - RNA, 21 nt, Human
ucugcuggccgggcacagcug

SEQ ID NO: 2071476 - RNA, 23 nt, Human
ucugcuggccgggcacagcugug

SEQ ID NO: 2071477 - RNA, 20 nt, Human
ucugcuggcccagccaaacc

SEQ ID NO: 2071478 - RNA, 16 nt, Human
ucugcuggauaaaaug

SEQ ID NO: 2071479 - RNA, 18 nt, Human
ucugcuggauaaaaugag

SEQ ID NO: 2071480 - RNA, 22 nt, Human
ucugcuggauaaaaugagguuc

SEQ ID NO: 2071481 - RNA, 12 nt, Human
ucugcuggccca

SEQ ID NO: 2071482 - RNA, 14 nt, Human
ucugcuggcccagc

SEQ ID NO: 2071483 - RNA, 22 nt, Human
ucugcugacagacacaggcccg

SEQ ID NO: 2071484 - RNA, 21 nt, Human
ucugcugacagacacaggccc

SEQ ID NO: 2071485 - RNA, 20 nt, Human
ucugcugacagacacaggcc

SEQ ID NO: 2071486 - RNA, 19 nt, Human
ucugcugacagacacaggc

SEQ ID NO: 2071487 - RNA, 15 nt, Human
ucugcuggucuucaa

SEQ ID NO: 2071488 - RNA, 17 nt, Human
ucugcuggucuucaauu

SEQ ID NO: 2071489 - RNA, 15 nt, Human
ucuggaaugcagugg

SEQ ID NO: 2071490 - RNA, 14 nt, Human
ucuggacaggcaug

SEQ ID NO: 2071491 - RNA, 16 nt, Human
ucuggaaugcaguggu

SEQ ID NO: 2071492 - RNA, 21 nt, Human
ucuggacaggcauguucucug

SEQ ID NO: 2071493 - RNA, 17 nt, Human
ucugcugacagacacag

SEQ ID NO: 2071494 - RNA, 18 nt, Human
ucugcugacagacacagg

SEQ ID NO: 2071495 - RNA, 21 nt, Human
ucugcuccucuccccagcaag

SEQ ID NO: 2071496 - RNA, 18 nt, Human
ucugcuccucuccccagc

SEQ ID NO: 2071497 - RNA, 16 nt, Human
ucugccugcccaggcc

SEQ ID NO: 2071498 - RNA, 15 nt, Human
ucugccugcccaggc

SEQ ID NO: 2071499 - RNA, 13 nt, Human
ucugccagccaca

SEQ ID NO: 2071500 - RNA, 13 nt, Human
ucugccagccagc

SEQ ID NO: 2071501 - RNA, 15 nt, Human
ucugccagccagcag

SEQ ID NO: 2071502 - RNA, 16 nt, Human
ucugccagccagcagc

SEQ ID NO: 2071503 - RNA, 17 nt, Human
ucugccagccagcagcc

SEQ ID NO: 2071504 - RNA, 14 nt, Human
ucugccaggccccc

SEQ ID NO: 2071505 - RNA, 19 nt, Human
ucugccagccagcagccag

SEQ ID NO: 2071506 - RNA, 23 nt, Human
ucugccaggcccccaagccugca

SEQ ID NO: 2071507 - RNA, 12 nt, Human
ucugccagggag

SEQ ID NO: 2071508 - RNA, 13 nt, Human
ucugccagggagc

SEQ ID NO: 2071509 - RNA, 14 nt, Human
ucugccagggagcu

SEQ ID NO: 2071510 - RNA, 19 nt, Human
ucugccagggagcuugaaa

SEQ ID NO: 2071511 - RNA, 13 nt, Human
ucugccugcccag

SEQ ID NO: 2071512 - RNA, 14 nt, Human
ucugccugcccagg

SEQ ID NO: 2071513 - RNA, 21 nt, Human
ucucgugguaggacuguagaa

SEQ ID NO: 2071514 - RNA, 19 nt, Human
ucucgugguaggacuguag

SEQ ID NO: 2071515 - RNA, 14 nt, Human
ucucuaaccuccuu

SEQ ID NO: 2071516 - RNA, 15 nt, Human
ucucuaaccuccuuu

SEQ ID NO: 2071517 - RNA, 18 nt, Human
ucucuaacucagaaacau

SEQ ID NO: 2071518 - RNA, 20 nt, Human
ucucuaacucagaaacauca

SEQ ID NO: 2071519 - RNA, 21 nt, Human
ucucuaacucagaaacaucag

SEQ ID NO: 2071520 - RNA, 23 nt, Human
ucucuaaaugaggggccucaggu

SEQ ID NO: 2071521 - RNA, 22 nt, Human
ucucuaacucagaaacaucagu

SEQ ID NO: 2071522 - RNA, 22 nt, Human
ucucuaacuucaaggcccauau

SEQ ID NO: 2071523 - RNA, 18 nt, Human
ucucaagagggcacuggu

SEQ ID NO: 2071524 - RNA, 17 nt, Human
ucucaagagggcacugg

SEQ ID NO: 2071525 - RNA, 19 nt, Human
ucucaagagggcacuggug

SEQ ID NO: 2071526 - RNA, 20 nt, Human
ucucaagccgcaucccagac

SEQ ID NO: 2071527 - RNA, 21 nt, Human
ucucaagccgcaucccagacu

SEQ ID NO: 2071528 - RNA, 22 nt, Human
ucucaagccgcaucccagacuu

SEQ ID NO: 2071529 - RNA, 13 nt, Human
ucucaagcccugc

SEQ ID NO: 2071530 - RNA, 20 nt, Human
ucucaaggugggccuugcua

SEQ ID NO: 2071531 - RNA, 15 nt, Human
ucuccugccucagcc

SEQ ID NO: 2071532 - RNA, 17 nt, Human
ucuccugccucagccuc

SEQ ID NO: 2071533 - RNA, 19 nt, Human
ucuccugccucagccuccc

SEQ ID NO: 2071534 - RNA, 18 nt, Human
ucucaaaggguacuucca

SEQ ID NO: 2071535 - RNA, 21 nt, Human
ucuccuggaaauauuaagaaa

SEQ ID NO: 2071536 - RNA, 21 nt, Human
ucucugggcuuggggcuuccu

SEQ ID NO: 2071537 - RNA, 16 nt, Human
ucucuggcgacaguuu

SEQ ID NO: 2071538 - RNA, 17 nt, Human
ucucuggcgacaguuuu

SEQ ID NO: 2071539 - RNA, 22 nt, Human
ucucuggcgacaguuuuccuuc

SEQ ID NO: 2071540 - RNA, 17 nt, Human
ucucuggcuaaggacag

SEQ ID NO: 2071541 - RNA, 22 nt, Human
ucucuguaauaaacucauuucu

SEQ ID NO: 2071542 - RNA, 18 nt, Human
ucucuguaauaaacucau

SEQ ID NO: 2071543 - RNA, 15 nt, Human
ucucugucuaccauc

SEQ ID NO: 2071544 - RNA, 17 nt, Human
ucucugucuaccaucuc

SEQ ID NO: 2071545 - RNA, 18 nt, Human
ucucugucuaccaucucc

SEQ ID NO: 2071546 - RNA, 23 nt, Human
ucucugugaacgauuuagaaaga

SEQ ID NO: 2071547 - RNA, 22 nt, Human
ucucugugaacgauuuagaaag

SEQ ID NO: 2071548 - RNA, 18 nt, Human
ucucugugaccugccccg

SEQ ID NO: 2071549 - RNA, 16 nt, Human
ucucugugaacgauuu

SEQ ID NO: 2071550 - RNA, 14 nt, Human
ucucugaggacacu

SEQ ID NO: 2071551 - RNA, 14 nt, Human
ucucugaauccuaa

SEQ ID NO: 2071552 - RNA, 17 nt, Human
ucucugaggacacuaac

SEQ ID NO: 2071553 - RNA, 16 nt, Human
ucucuagggaaggcca

SEQ ID NO: 2071554 - RNA, 19 nt, Human
ucucuagggaaggccaccu

SEQ ID NO: 2071555 - RNA, 20 nt, Human
ucucuagggaaggccaccug

SEQ ID NO: 2071556 - RNA, 21 nt, Human
ucucuagggaaggccaccugc

SEQ ID NO: 2071557 - RNA, 22 nt, Human
ucucuagggaaggccaccugca

SEQ ID NO: 2071558 - RNA, 14 nt, Human
ucucucuccagucu

SEQ ID NO: 2071559 - RNA, 11 nt, Human
ucucucuccug

SEQ ID NO: 2071560 - RNA, 22 nt, Human
ucucucuccuguacuuuuucca

SEQ ID NO: 2071561 - RNA, 15 nt, Human
ucucugaacuucagc

SEQ ID NO: 2071562 - RNA, 16 nt, Human
ucucugaacuucagcu

SEQ ID NO: 2071563 - RNA, 22 nt, Human
ucucugaagaguggguuucaca

SEQ ID NO: 2071564 - RNA, 23 nt, Human
ucucugaagaguggguuucacaa

SEQ ID NO: 2071565 - RNA, 13 nt, Human
ucucucugccugu

SEQ ID NO: 2071566 - RNA, 15 nt, Human
ucucucugccuguga

SEQ ID NO: 2071567 - RNA, 17 nt, Human
ucucucugccugugagc

SEQ ID NO: 2071568 - RNA, 12 nt, Human
ucucucuggaaa

SEQ ID NO: 2071569 - RNA, 14 nt, Human
ucucucucuguugu

SEQ ID NO: 2071570 - RNA, 12 nt, Human
ucucucuccugu

SEQ ID NO: 2071571 - RNA, 13 nt, Human
ucucucuccuguc

SEQ ID NO: 2071572 - RNA, 13 nt, Human
ucugaaaauguau

SEQ ID NO: 2071573 - RNA, 13 nt, Human
ucugaaacuaaug

SEQ ID NO: 2071574 - RNA, 15 nt, Human
ucugaaacuaaugaa

SEQ ID NO: 2071575 - RNA, 17 nt, Human
ucugaaacuaaugaaag

SEQ ID NO: 2071576 - RNA, 23 nt, Human
ucugaaaauuccagaaaggauau

SEQ ID NO: 2071577 - RNA, 18 nt, Human
ucucuuaauuuaaucuuu

SEQ ID NO: 2071578 - RNA, 15 nt, Human
ucucuuacccuucug

SEQ ID NO: 2071579 - RNA, 18 nt, Human
ucucuuacccuucugugc

SEQ ID NO: 2071580 - RNA, 21 nt, Human
ucucuuacccuucugugccca

SEQ ID NO: 2071581 - RNA, 23 nt, Human
ucucuuacccuucugugcccagc

SEQ ID NO: 2071582 - RNA, 15 nt, Human
ucucuuauagaauau

SEQ ID NO: 2071583 - RNA, 21 nt, Human
ucucuuauagaauauuuauua

SEQ ID NO: 2071584 - RNA, 20 nt, Human
ucucuuauagaauauuuauu

SEQ ID NO: 2071585 - RNA, 18 nt, Human
ucucuuauagaauauuua

SEQ ID NO: 2071586 - RNA, 17 nt, Human
ucucuuauagaauauuu

SEQ ID NO: 2071587 - RNA, 13 nt, Human
ucugacccacugc

SEQ ID NO: 2071588 - RNA, 22 nt, Human
ucugacaggcaaugcuggcugu

SEQ ID NO: 2071589 - RNA, 21 nt, Human
ucugacaggcaaugcuggcug

SEQ ID NO: 2071590 - RNA, 12 nt, Human
ucugacaggcaa

SEQ ID NO: 2071591 - RNA, 13 nt, Human
ucugacaccuauu

SEQ ID NO: 2071592 - RNA, 20 nt, Human
ucugacaccuauuuuagaca

SEQ ID NO: 2071593 - RNA, 21 nt, Human
ucugacaccuauuuuagacaa

SEQ ID NO: 2071594 - RNA, 19 nt, Human
ucugacacacagcucuguc

SEQ ID NO: 2071595 - RNA, 18 nt, Human
ucugacacacagcucugu

SEQ ID NO: 2071596 - RNA, 17 nt, Human
ucugacacacagcucug

SEQ ID NO: 2071597 - RNA, 16 nt, Human
ucugacacacagcucu

SEQ ID NO: 2071598 - RNA, 12 nt, Human
ucugaaagccac

SEQ ID NO: 2071599 - RNA, 15 nt, Human
ucugaacacgaagcu

SEQ ID NO: 2071600 - RNA, 10 nt, Human
ucugcacaga

SEQ ID NO: 2071601 - RNA, 13 nt, Human
ucugcacagaugg

SEQ ID NO: 2071602 - RNA, 15 nt, Human
ucugcacagauggau

SEQ ID NO: 2071603 - RNA, 20 nt, Human
ucugcaagaauugaagcagg

SEQ ID NO: 2071604 - RNA, 21 nt, Human
ucugcaagaauugaagcagga

SEQ ID NO: 2071605 - RNA, 19 nt, Human
ucugaggcucuuucugggc

SEQ ID NO: 2071606 - RNA, 23 nt, Human
ucugaggccuccucucucaguuu

SEQ ID NO: 2071607 - RNA, 21 nt, Human
ucugcaaauagaaaacaggaa

SEQ ID NO: 2071608 - RNA, 21 nt, Human
ucugaggcucuuucugggcca

SEQ ID NO: 2071609 - RNA, 22 nt, Human
ucugaggagaaacaaauaagac

SEQ ID NO: 2071610 - RNA, 18 nt, Human
ucugaccauuucaggggu

SEQ ID NO: 2071611 - RNA, 14 nt, Human
ucugaccauuucag

SEQ ID NO: 2071612 - RNA, 23 nt, Human
ucugaggaauccagacccggcug

SEQ ID NO: 2071613 - RNA, 15 nt, Human
ucugacccacugcuu

SEQ ID NO: 2071614 - RNA, 14 nt, Human
ucugacccacugcu

SEQ ID NO: 2071615 - RNA, 16 nt, Human
ucugcaucaucuguag

SEQ ID NO: 2071616 - RNA, 18 nt, Human
ucugcaucaucuguagau

SEQ ID NO: 2071617 - RNA, 19 nt, Human
ucugcaucaucuguagaua

SEQ ID NO: 2071618 - RNA, 21 nt, Human
ucugcaucaucuguagauacu

SEQ ID NO: 2071619 - RNA, 14 nt, Human
ucugccaccucccc

SEQ ID NO: 2071620 - RNA, 15 nt, Human
ucugccaccuccccu

SEQ ID NO: 2071621 - RNA, 20 nt, Human
ucugccaccuccccuaucca

SEQ ID NO: 2071622 - RNA, 23 nt, Human
ucugccaccuccccuauccaccc

SEQ ID NO: 2071623 - RNA, 17 nt, Human
ucugcauucaggaucaa

SEQ ID NO: 2071624 - RNA, 10 nt, Human
ucugcauuua

SEQ ID NO: 2071625 - RNA, 13 nt, Human
ucugcauuuagca

SEQ ID NO: 2071626 - RNA, 14 nt, Human
ucugcauuuagcac

SEQ ID NO: 2071627 - RNA, 15 nt, Human
ucugcauuuagcaca

SEQ ID NO: 2071628 - RNA, 17 nt, Human
ucugcauuuucacccca

SEQ ID NO: 2071629 - RNA, 21 nt, Human
ucugcauuuucaccccacccu

SEQ ID NO: 2071630 - RNA, 19 nt, Human
ucugcauuuucugaaacua

SEQ ID NO: 2071631 - RNA, 20 nt, Human
ucugcauuuucugaaacuaa

SEQ ID NO: 2071632 - RNA, 21 nt, Human
ucugcauuuucugaaacuaau

SEQ ID NO: 2071633 - RNA, 16 nt, Human
ucugcauuuucugggu

SEQ ID NO: 2071634 - RNA, 16 nt, Human
ucgagguuucucaaag

SEQ ID NO: 2071635 - RNA, 22 nt, Human
ucgagguuucucaaagaaauuu

SEQ ID NO: 2071636 - RNA, 23 nt, Human
ucgagguagguggaucaccugag

SEQ ID NO: 2071637 - RNA, 16 nt, Human
ucgaacuccugggcuc

SEQ ID NO: 2071638 - RNA, 19 nt, Human
ucgugcagcauaugaggau

SEQ ID NO: 2071639 - RNA, 20 nt, Human
ucgugccguuacucuccaac

SEQ ID NO: 2071640 - RNA, 18 nt, Human
ucgugcuaaauuuucagu

SEQ ID NO: 2071641 - RNA, 23 nt, Human
ucgugccguuacucuccaaccug

SEQ ID NO: 2071642 - RNA, 22 nt, Human
ucguggcagauaaucagccucu

SEQ ID NO: 2071643 - RNA, 23 nt, Human
ucguggcagauaaucagccucuu

SEQ ID NO: 2071644 - RNA, 14 nt, Human
ucgugcuuuaagug

SEQ ID NO: 2071645 - RNA, 23 nt, Human
ucguggaaagggugcugcuuccc

SEQ ID NO: 2071646 - RNA, 24 nt, Human
ucguggaaagggugcugcuucccu

SEQ ID NO: 2071647 - RNA, 20 nt, Human
ucguggccuuccccagccuc

SEQ ID NO: 2071648 - RNA, 13 nt, Human
ucuaauagugcuu

SEQ ID NO: 2071649 - RNA, 18 nt, Human
ucuaaccagagcaagcuu

SEQ ID NO: 2071650 - RNA, 19 nt, Human
ucuaaccagagcaagcuuu

SEQ ID NO: 2071651 - RNA, 16 nt, Human
ucuaaccacacagccu

SEQ ID NO: 2071652 - RNA, 18 nt, Human
ucuaaccacacagccuac

SEQ ID NO: 2071653 - RNA, 22 nt, Human
ucuaauagaacucaguuuuaac

SEQ ID NO: 2071654 - RNA, 20 nt, Human
ucuaauagcgaggcucuaac

SEQ ID NO: 2071655 - RNA, 22 nt, Human
ucuaauagcgaggcucuaacca

SEQ ID NO: 2071656 - RNA, 16 nt, Human
ucuaacaggggcuggu

SEQ ID NO: 2071657 - RNA, 18 nt, Human
ucuaacaggggcuggugg

SEQ ID NO: 2071658 - RNA, 24 nt, Human
ucuaacaggggcuggugggcacca

SEQ ID NO: 2071659 - RNA, 23 nt, Human
ucuaacauuugagucccuuccag

SEQ ID NO: 2071660 - RNA, 14 nt, Human
ucuaaccaaaugca

SEQ ID NO: 2071661 - RNA, 15 nt, Human
ucuaaccaaaugcau

SEQ ID NO: 2071662 - RNA, 16 nt, Human
ucuaaccaaaugcauc

SEQ ID NO: 2071663 - RNA, 20 nt, Human
ucuaacacuagucugugugc

SEQ ID NO: 2071664 - RNA, 13 nt, Human
ucuaaauauuucc

SEQ ID NO: 2071665 - RNA, 12 nt, Human
ucguuaacauug

SEQ ID NO: 2071666 - RNA, 14 nt, Human
ucguuaacauugac

SEQ ID NO: 2071667 - RNA, 17 nt, Human
ucguuaacauugaccaa

SEQ ID NO: 2071668 - RNA, 14 nt, Human
ucguuaacugugua

SEQ ID NO: 2071669 - RNA, 15 nt, Human
ucguuaacuguguau

SEQ ID NO: 2071670 - RNA, 21 nt, Human
ucguuaacuguguauguacau

SEQ ID NO: 2071671 - RNA, 22 nt, Human
ucguuaacuguguauguacaua

SEQ ID NO: 2071672 - RNA, 15 nt, Human
ucuaaauaaaauaua

SEQ ID NO: 2071673 - RNA, 17 nt, Human
ucuaaauaaaauauaau

SEQ ID NO: 2071674 - RNA, 17 nt, Human
ucguuagggaagagaaa

SEQ ID NO: 2071675 - RNA, 20 nt, Human
ucguuagggaagagaaacag

SEQ ID NO: 2071676 - RNA, 21 nt, Human
ucguuagggaagagaaacagg

SEQ ID NO: 2071677 - RNA, 23 nt, Human
ucuaaauauuuccuuaaacugug

SEQ ID NO: 2071678 - RNA, 17 nt, Human
ucgugugcaacagacaa

SEQ ID NO: 2071679 - RNA, 19 nt, Human
ucgugugcaacagacaagu

SEQ ID NO: 2071680 - RNA, 19 nt, Human
ucguggccuuccccagccu

SEQ ID NO: 2071681 - RNA, 19 nt, Human
ucucaaagaaauuuccacu

SEQ ID NO: 2071682 - RNA, 21 nt, Human
ucucaaagaaauuuccacuca

SEQ ID NO: 2071683 - RNA, 22 nt, Human
ucucaaagaaauuuccacucag

SEQ ID NO: 2071684 - RNA, 17 nt, Human
ucucaaauaacuaaaag

SEQ ID NO: 2071685 - RNA, 15 nt, Human
ucuaugcucauaacu

SEQ ID NO: 2071686 - RNA, 18 nt, Human
ucuaugcucauaacugug

SEQ ID NO: 2071687 - RNA, 14 nt, Human
ucuaugccagcuca

SEQ ID NO: 2071688 - RNA, 19 nt, Human
ucuagugcagcugauuuua

SEQ ID NO: 2071689 - RNA, 16 nt, Human
ucuagugcagcugauu

SEQ ID NO: 2071690 - RNA, 14 nt, Human
ucuaaugugugaau

SEQ ID NO: 2071691 - RNA, 14 nt, Human
ucuaauauguaaca

SEQ ID NO: 2071692 - RNA, 22 nt, Human
ucuacuuuagaaugagagugug

SEQ ID NO: 2071693 - RNA, 11 nt, Human
ucuaauucuaa

SEQ ID NO: 2071694 - RNA, 12 nt, Human
ucuaauucuaac

SEQ ID NO: 2071695 - RNA, 13 nt, Human
ucuaauucuaacc

SEQ ID NO: 2071696 - RNA, 21 nt, Human
ucuaauucuaaccagagcaag

SEQ ID NO: 2071697 - RNA, 20 nt, Human
ucuaauucuaaggaauauga

SEQ ID NO: 2071698 - RNA, 18 nt, Human
ucuaauucccauuuugca

SEQ ID NO: 2071699 - RNA, 19 nt, Human
ucuaauucccauuuugcaa

SEQ ID NO: 2071700 - RNA, 21 nt, Human
ucuaauucccauuuugcaaaa

SEQ ID NO: 2071701 - RNA, 22 nt, Human
ucuaauucccauuuugcaaaau

SEQ ID NO: 2071702 - RNA, 14 nt, Human
ucuagugcagcuga

SEQ ID NO: 2071703 - RNA, 17 nt, Human
ucuaggagcugggagga

SEQ ID NO: 2071704 - RNA, 18 nt, Human
ucuaggagcugggaggaa

SEQ ID NO: 2071705 - RNA, 20 nt, Human
ucuaggagcugggaggaaaa

SEQ ID NO: 2071706 - RNA, 21 nt, Human
ucuaggagcugggaggaaaag

SEQ ID NO: 2071707 - RNA, 16 nt, Human
ucuaggagcugggagg

SEQ ID NO: 2071708 - RNA, 14 nt, Human
uccugccucagccu

SEQ ID NO: 2071709 - RNA, 19 nt, Human
uccuggcacccggccccug

SEQ ID NO: 2071710 - RNA, 16 nt, Human
uccuggcacccggccc

SEQ ID NO: 2071711 - RNA, 14 nt, Human
uccuggcacccggc

SEQ ID NO: 2071712 - RNA, 15 nt, Human
uccugccucagccuc

SEQ ID NO: 2071713 - RNA, 13 nt, Human
uccugccucagcc

SEQ ID NO: 2071714 - RNA, 16 nt, Human
uccugccucagccucc

SEQ ID NO: 2071715 - RNA, 17 nt, Human
uccugccucagccuccc

SEQ ID NO: 2071716 - RNA, 22 nt, Human
uccuggcacccggccccugcug

SEQ ID NO: 2071717 - RNA, 21 nt, Human
uccuggcacccggccccugcu

SEQ ID NO: 2071718 - RNA, 20 nt, Human
uccuggcacccggccccugc

SEQ ID NO: 2071719 - RNA, 23 nt, Human
uccuggcaauaguguguucugau

SEQ ID NO: 2071720 - RNA, 21 nt, Human
uccuggcaauaguguguucug

SEQ ID NO: 2071721 - RNA, 22 nt, Human
uccuggcaauaguguguucuga

SEQ ID NO: 2071722 - RNA, 11 nt, Human
uccugccuacu

SEQ ID NO: 2071723 - RNA, 20 nt, Human
uccuggcaauaguguguucu

SEQ ID NO: 2071724 - RNA, 13 nt, Human
uccuguccgcccu

SEQ ID NO: 2071725 - RNA, 15 nt, Human
uccuguccgcccucu

SEQ ID NO: 2071726 - RNA, 19 nt, Human
uccuguccgcccucuuccc

SEQ ID NO: 2071727 - RNA, 22 nt, Human
uccuguccgcccucuuccccuc

SEQ ID NO: 2071728 - RNA, 16 nt, Human
uccuguacacugaaua

SEQ ID NO: 2071729 - RNA, 17 nt, Human
uccuguacacugaauau

SEQ ID NO: 2071730 - RNA, 16 nt, Human
uccuguccucagcuuc

SEQ ID NO: 2071731 - RNA, 21 nt, Human
uccuguacacugaauauuuau

SEQ ID NO: 2071732 - RNA, 22 nt, Human
uccuguccuucucucaccuccu

SEQ ID NO: 2071733 - RNA, 19 nt, Human
uccugucggagcccugucu

SEQ ID NO: 2071734 - RNA, 22 nt, Human
uccugucggagcccugucuccu

SEQ ID NO: 2071735 - RNA, 13 nt, Human
uccuugauaacag

SEQ ID NO: 2071736 - RNA, 14 nt, Human
uccuugauaacagc

SEQ ID NO: 2071737 - RNA, 15 nt, Human
uccuugauaacagcu

SEQ ID NO: 2071738 - RNA, 12 nt, Human
uccuugauaaug

SEQ ID NO: 2071739 - RNA, 22 nt, Human
uccuugauaauguugugguuug

SEQ ID NO: 2071740 - RNA, 13 nt, Human
uccuugaccagca

SEQ ID NO: 2071741 - RNA, 21 nt, Human
uccuugaccagcagaucccag

SEQ ID NO: 2071742 - RNA, 14 nt, Human
uccuucacauccug

SEQ ID NO: 2071743 - RNA, 20 nt, Human
uccuucacauccuguguuuc

SEQ ID NO: 2071744 - RNA, 20 nt, Human
uccuuggcaucacagggcag

SEQ ID NO: 2071745 - RNA, 15 nt, Human
uccuuggcaugccuu

SEQ ID NO: 2071746 - RNA, 17 nt, Human
uccuuggcaugccuucc

SEQ ID NO: 2071747 - RNA, 18 nt, Human
uccuuggcaugccuucca

SEQ ID NO: 2071748 - RNA, 20 nt, Human
uccuuggcaugccuuccagc

SEQ ID NO: 2071749 - RNA, 19 nt, Human
uccuuuuaaaacacuucca

SEQ ID NO: 2071750 - RNA, 19 nt, Human
uccuuuguuuuuuuuuccu

SEQ ID NO: 2071751 - RNA, 23 nt, Human
uccuuuguuuuuuuuuccugucc

SEQ ID NO: 2071752 - RNA, 15 nt, Human
uccuuuguuuuuaug

SEQ ID NO: 2071753 - RNA, 13 nt, Human
uccuuuuagccua

SEQ ID NO: 2071754 - RNA, 16 nt, Human
ucgaggcugcagucag

SEQ ID NO: 2071755 - RNA, 20 nt, Human
ucgaggcugcagucagucau

SEQ ID NO: 2071756 - RNA, 13 nt, Human
ucgaacccacacu

SEQ ID NO: 2071757 - RNA, 17 nt, Human
ucgaacccacacugcaa

SEQ ID NO: 2071758 - RNA, 19 nt, Human
ucgaacccacacugcaaca

SEQ ID NO: 2071759 - RNA, 18 nt, Human
uccuuuucgcaggauucu

SEQ ID NO: 2071760 - RNA, 15 nt, Human
uccuuuuagccuagu

SEQ ID NO: 2071761 - RNA, 14 nt, Human
uccuuuuagccuag

SEQ ID NO: 2071762 - RNA, 16 nt, Human
ucccguggaacguuuu

SEQ ID NO: 2071763 - RNA, 22 nt, Human
ucccguggaacguuuuuccugu

SEQ ID NO: 2071764 - RNA, 23 nt, Human
ucccguggaacguuuuuccuguu

SEQ ID NO: 2071765 - RNA, 22 nt, Human
ucccgugcaaaacaugcuaccu

SEQ ID NO: 2071766 - RNA, 14 nt, Human
ucccggggcuccac

SEQ ID NO: 2071767 - RNA, 13 nt, Human
uccccuucacucc

SEQ ID NO: 2071768 - RNA, 21 nt, Human
ucccgggacucacuggcagcc

SEQ ID NO: 2071769 - RNA, 22 nt, Human
ucccgggacucacuggcagccc

SEQ ID NO: 2071770 - RNA, 17 nt, Human
uccagguuuaagcuguu

SEQ ID NO: 2071771 - RNA, 18 nt, Human
uccagguuuaagcuguua

SEQ ID NO: 2071772 - RNA, 15 nt, Human
ucccuccucuguccc

SEQ ID NO: 2071773 - RNA, 14 nt, Human
ucccuccugcuacu

SEQ ID NO: 2071774 - RNA, 16 nt, Human
ucccucuaauuuaucu

SEQ ID NO: 2071775 - RNA, 14 nt, Human
ucccucuaauuuau

SEQ ID NO: 2071776 - RNA, 22 nt, Human
ucccucgcugcacaaauacucc

SEQ ID NO: 2071777 - RNA, 19 nt, Human
ucccucgcugcacaaauac

SEQ ID NO: 2071778 - RNA, 17 nt, Human
ucccucgaacccacacu

SEQ ID NO: 2071779 - RNA, 20 nt, Human
ucccucgaacccacacugca

SEQ ID NO: 2071780 - RNA, 16 nt, Human
ucccuauuagagaaga

SEQ ID NO: 2071781 - RNA, 14 nt, Human
ucccuccucaccuc

SEQ ID NO: 2071782 - RNA, 16 nt, Human
ucccuccucaccucug

SEQ ID NO: 2071783 - RNA, 17 nt, Human
ucccuccucaccucugg

SEQ ID NO: 2071784 - RNA, 18 nt, Human
ucccuccucaccucugga

SEQ ID NO: 2071785 - RNA, 18 nt, Human
ucccuagucuucaagcag

SEQ ID NO: 2071786 - RNA, 20 nt, Human
ucccuaucacugaagcuuuu

SEQ ID NO: 2071787 - RNA, 21 nt, Human
ucccuaucacugaagcuuuuu

SEQ ID NO: 2071788 - RNA, 18 nt, Human
ucccuaaaaacacagaca

SEQ ID NO: 2071789 - RNA, 16 nt, Human
ucccuaguaaaaauac

SEQ ID NO: 2071790 - RNA, 14 nt, Human
ucccuagggcuggg

SEQ ID NO: 2071791 - RNA, 15 nt, Human
ucccuagggcugggu

SEQ ID NO: 2071792 - RNA, 13 nt, Human
ucccuaccaccuc

SEQ ID NO: 2071793 - RNA, 15 nt, Human
ucccuaggagaccaa

SEQ ID NO: 2071794 - RNA, 20 nt, Human
ucccuaauuuaacccagcuc

SEQ ID NO: 2071795 - RNA, 13 nt, Human
ucccugcacuugc

SEQ ID NO: 2071796 - RNA, 19 nt, Human
ucccugccccucccuucaa

SEQ ID NO: 2071797 - RNA, 14 nt, Human
ucccugcacuugca

SEQ ID NO: 2071798 - RNA, 12 nt, Human
ucccucucucug

SEQ ID NO: 2071799 - RNA, 22 nt, Human
ucccucucggaaggcuggcugg

SEQ ID NO: 2071800 - RNA, 23 nt, Human
ucccucucggaaggcuggcuggg

SEQ ID NO: 2071801 - RNA, 12 nt, Human
ucccucucccug

SEQ ID NO: 2071802 - RNA, 16 nt, Human
ucccuauaaugcugga

SEQ ID NO: 2071803 - RNA, 13 nt, Human
ucccucuccugcc

SEQ ID NO: 2071804 - RNA, 14 nt, Human
ucccucuccugccu

SEQ ID NO: 2071805 - RNA, 15 nt, Human
ucccucuccugccua

SEQ ID NO: 2071806 - RNA, 12 nt, Human
ucccucucggaa

SEQ ID NO: 2071807 - RNA, 16 nt, Human
ucccucuccugccuac

SEQ ID NO: 2071808 - RNA, 14 nt, Human
ucccucucucugga

SEQ ID NO: 2071809 - RNA, 16 nt, Human
ucccucucucuggaaa

SEQ ID NO: 2071810 - RNA, 12 nt, Human
ucccucucucuu

SEQ ID NO: 2071811 - RNA, 16 nt, Human
ucccucucucuucugc

SEQ ID NO: 2071812 - RNA, 18 nt, Human
ucccucucucuucugcuc

SEQ ID NO: 2071813 - RNA, 19 nt, Human
ucccucucucuucugcucc

SEQ ID NO: 2071814 - RNA, 20 nt, Human
ucccucucucuucugcucca

SEQ ID NO: 2071815 - RNA, 18 nt, Human
ucccuggaaggacaucca

SEQ ID NO: 2071816 - RNA, 11 nt, Human
ucccuggacca

SEQ ID NO: 2071817 - RNA, 17 nt, Human
ucccuggaccagaugcu

SEQ ID NO: 2071818 - RNA, 18 nt, Human
ucccuggaccagaugcug

SEQ ID NO: 2071819 - RNA, 19 nt, Human
ucccuggaccagaugcuga

SEQ ID NO: 2071820 - RNA, 20 nt, Human
ucccugccccucccuucaac

SEQ ID NO: 2071821 - RNA, 14 nt, Human
ucccugccgccuca

SEQ ID NO: 2071822 - RNA, 14 nt, Human
ucccuggccuguuc

SEQ ID NO: 2071823 - RNA, 18 nt, Human
ucccuggccuguucuguu

SEQ ID NO: 2071824 - RNA, 13 nt, Human
ucccuggccuguu

SEQ ID NO: 2071825 - RNA, 14 nt, Human
ucccuggccaucuc

SEQ ID NO: 2071826 - RNA, 15 nt, Human
ucccuggccaucucu

SEQ ID NO: 2071827 - RNA, 16 nt, Human
ucccuggccaucucug

SEQ ID NO: 2071828 - RNA, 21 nt, Human
ucccuggagccuccacugccu

SEQ ID NO: 2071829 - RNA, 20 nt, Human
uccgaccacuaauugccaag

SEQ ID NO: 2071830 - RNA, 21 nt, Human
uccgacaaccgaugcuccagc

SEQ ID NO: 2071831 - RNA, 22 nt, Human
uccgacaaccgaugcuccagcc

SEQ ID NO: 2071832 - RNA, 23 nt, Human
uccgacaaccgaugcuccagcca

SEQ ID NO: 2071833 - RNA, 20 nt, Human
uccgacaaccgaugcuccag

SEQ ID NO: 2071834 - RNA, 21 nt, Human
uccgaaguaugagggaaaaug

SEQ ID NO: 2071835 - RNA, 19 nt, Human
ucccuugagaccucagcca

SEQ ID NO: 2071836 - RNA, 14 nt, Human
ucccuugagcccuc

SEQ ID NO: 2071837 - RNA, 16 nt, Human
ucccuucuacugcuuc

SEQ ID NO: 2071838 - RNA, 17 nt, Human
ucccuucuacugcuucu

SEQ ID NO: 2071839 - RNA, 19 nt, Human
ucccuucuacugcuucuac

SEQ ID NO: 2071840 - RNA, 13 nt, Human
ucccuucuccuuc

SEQ ID NO: 2071841 - RNA, 20 nt, Human
ucccuucuccuugauaacag

SEQ ID NO: 2071842 - RNA, 21 nt, Human
ucccuucuccuugauaacagc

SEQ ID NO: 2071843 - RNA, 23 nt, Human
ucccugccucaccucugccauuu

SEQ ID NO: 2071844 - RNA, 18 nt, Human
ucccuugagaccucagcc

SEQ ID NO: 2071845 - RNA, 21 nt, Human
uccuauauuguuuucagugua

SEQ ID NO: 2071846 - RNA, 18 nt, Human
uccuauauaguuuauuga

SEQ ID NO: 2071847 - RNA, 17 nt, Human
uccucauuagcauuuug

SEQ ID NO: 2071848 - RNA, 20 nt, Human
uccuauaauucccuaucuuu

SEQ ID NO: 2071849 - RNA, 20 nt, Human
uccuauaauauaauaaauau

SEQ ID NO: 2071850 - RNA, 15 nt, Human
uccuauauaguuuau

SEQ ID NO: 2071851 - RNA, 18 nt, Human
uccuauauuguuuucagu

SEQ ID NO: 2071852 - RNA, 16 nt, Human
uccuaguucuucaucc

SEQ ID NO: 2071853 - RNA, 14 nt, Human
uccuaaucauccaa

SEQ ID NO: 2071854 - RNA, 15 nt, Human
uccuaaucauccaau

SEQ ID NO: 2071855 - RNA, 22 nt, Human
uccuaaugaaugcauaaaaugu

SEQ ID NO: 2071856 - RNA, 15 nt, Human
uccuacaaagauguu

SEQ ID NO: 2071857 - RNA, 14 nt, Human
uccuaccaaccucu

SEQ ID NO: 2071858 - RNA, 14 nt, Human
uccuacaaagaugu

SEQ ID NO: 2071859 - RNA, 18 nt, Human
uccuacaagagcagccug

SEQ ID NO: 2071860 - RNA, 18 nt, Human
uccuacccacccuccuuu

SEQ ID NO: 2071861 - RNA, 17 nt, Human
uccgaccagacaccuug

SEQ ID NO: 2071862 - RNA, 13 nt, Human
uccgaccagacac

SEQ ID NO: 2071863 - RNA, 20 nt, Human
uccuaaguucuuagauaucu

SEQ ID NO: 2071864 - RNA, 22 nt, Human
uccuaaguucuuagauaucuuu

SEQ ID NO: 2071865 - RNA, 14 nt, Human
uccuccagaagccu

SEQ ID NO: 2071866 - RNA, 16 nt, Human
uccuccagaagccucu

SEQ ID NO: 2071867 - RNA, 18 nt, Human
uccuccagaagccucugg

SEQ ID NO: 2071868 - RNA, 19 nt, Human
uccuccagaagccucuggc

SEQ ID NO: 2071869 - RNA, 20 nt, Human
uccuccagaagccucuggcu

SEQ ID NO: 2071870 - RNA, 21 nt, Human
uccuccagaagccucuggcua

SEQ ID NO: 2071871 - RNA, 22 nt, Human
uccuccagaagccucuggcuag

SEQ ID NO: 2071872 - RNA, 18 nt, Human
uccucuacuuaaugagau

SEQ ID NO: 2071873 - RNA, 19 nt, Human
uccucuacuuaaugagaua

SEQ ID NO: 2071874 - RNA, 21 nt, Human
uccucuaacaggggcuggugg

SEQ ID NO: 2071875 - RNA, 22 nt, Human
uccucuaacaggggcugguggg

SEQ ID NO: 2071876 - RNA, 16 nt, Human
uccucggaucaccgag

SEQ ID NO: 2071877 - RNA, 19 nt, Human
uccucggaucaccgagagu

SEQ ID NO: 2071878 - RNA, 19 nt, Human
uccuccuugucuuggcagc

SEQ ID NO: 2071879 - RNA, 13 nt, Human
uccucgcccuggg

SEQ ID NO: 2071880 - RNA, 14 nt, Human
uccucgcccugggu

SEQ ID NO: 2071881 - RNA, 16 nt, Human
ugguuuuucaguuuuc

SEQ ID NO: 2071882 - RNA, 23 nt, Human
ugguuuuuaaaaaacugcugacu

SEQ ID NO: 2071883 - RNA, 23 nt, Human
ugguugucauuuuugcaguagag

SEQ ID NO: 2071884 - RNA, 21 nt, Human
ugguuuuuaaaaaacugcuga

SEQ ID NO: 2071885 - RNA, 18 nt, Human
ugguuuucuuuugccaug

SEQ ID NO: 2071886 - RNA, 19 nt, Human
ugguuuucuuuugccauga

SEQ ID NO: 2071887 - RNA, 22 nt, Human
ugguugaguucagguagcugcc

SEQ ID NO: 2071888 - RNA, 15 nt, Human
ugguuggguccucac

SEQ ID NO: 2071889 - RNA, 14 nt, Human
uguaaaaugaaauu

SEQ ID NO: 2071890 - RNA, 15 nt, Human
uguaaaaugaaauua

SEQ ID NO: 2071891 - RNA, 22 nt, Human
uguaaaaucuuggcacagaaac

SEQ ID NO: 2071892 - RNA, 21 nt, Human
uguaaaaucuuggcacagaaa

SEQ ID NO: 2071893 - RNA, 18 nt, Human
uguaaacugcauuagaaa

SEQ ID NO: 2071894 - RNA, 14 nt, Human
uguaaaauaaaauu

SEQ ID NO: 2071895 - RNA, 15 nt, Human
uguaaaacugaggca

SEQ ID NO: 2071896 - RNA, 16 nt, Human
uguaaaacugaggcac

SEQ ID NO: 2071897 - RNA, 11 nt, Human
uguaaaaauga

SEQ ID NO: 2071898 - RNA, 14 nt, Human
uguaaaaaugagaa

SEQ ID NO: 2071899 - RNA, 17 nt, Human
uguaaaaaugagaacau

SEQ ID NO: 2071900 - RNA, 11 nt, Human
uguaaaacaaa

SEQ ID NO: 2071901 - RNA, 13 nt, Human
uguaaaacaaaaa

SEQ ID NO: 2071902 - RNA, 15 nt, Human
uguaaaacaaaaaac

SEQ ID NO: 2071903 - RNA, 16 nt, Human
uguaaaacaaaaaaca

SEQ ID NO: 2071904 - RNA, 19 nt, Human
uguaaaaacagcauugcuu

SEQ ID NO: 2071905 - RNA, 20 nt, Human
uguaaaaacagcauugcuuu

SEQ ID NO: 2071906 - RNA, 22 nt, Human
uguaaaaacagcauugcuuucu

SEQ ID NO: 2071907 - RNA, 23 nt, Human
uguaaaaacagcauugcuuucug

SEQ ID NO: 2071908 - RNA, 24 nt, Human
uguaaaaacagcauugcuuucuga

SEQ ID NO: 2071909 - RNA, 14 nt, Human
uguaaaaacugugg

SEQ ID NO: 2071910 - RNA, 12 nt, Human
uguaaaacuuua

SEQ ID NO: 2071911 - RNA, 13 nt, Human
uguaaaacuuuau

SEQ ID NO: 2071912 - RNA, 14 nt, Human
uguaaaacuuuauu

SEQ ID NO: 2071913 - RNA, 16 nt, Human
uguaaaacuuuauuuu

SEQ ID NO: 2071914 - RNA, 18 nt, Human
uguaaaacuuuauuuuau

SEQ ID NO: 2071915 - RNA, 23 nt, Human
uguaaaacuuuauuuuauauaau

SEQ ID NO: 2071916 - RNA, 17 nt, Human
uguacagaaucauugcu

SEQ ID NO: 2071917 - RNA, 18 nt, Human
uguacagaauucugcuac

SEQ ID NO: 2071918 - RNA, 21 nt, Human
uguacagaauucugcuaccuc

SEQ ID NO: 2071919 - RNA, 17 nt, Human
uguacagacguaugcuu

SEQ ID NO: 2071920 - RNA, 18 nt, Human
uguacagacguaugcuua

SEQ ID NO: 2071921 - RNA, 19 nt, Human
uguacagacguaugcuuau

SEQ ID NO: 2071922 - RNA, 20 nt, Human
uguacagacguaugcuuauu

SEQ ID NO: 2071923 - RNA, 22 nt, Human
uguacacaugggaguuuagugu

SEQ ID NO: 2071924 - RNA, 17 nt, Human
uguacaaccugugauca

SEQ ID NO: 2071925 - RNA, 12 nt, Human
uguacacugaau

SEQ ID NO: 2071926 - RNA, 14 nt, Human
uguacacugaauau

SEQ ID NO: 2071927 - RNA, 15 nt, Human
uguacacugaauauu

SEQ ID NO: 2071928 - RNA, 16 nt, Human
uguacacugaauauuu

SEQ ID NO: 2071929 - RNA, 17 nt, Human
uguacacugaauauuua

SEQ ID NO: 2071930 - RNA, 19 nt, Human
uguacacugaauauuuaua

SEQ ID NO: 2071931 - RNA, 21 nt, Human
uguacacugaauauuuauauu

SEQ ID NO: 2071932 - RNA, 20 nt, Human
uguacacugaauauuuauau

SEQ ID NO: 2071933 - RNA, 20 nt, Human
uguaacauccaauaggaaug

SEQ ID NO: 2071934 - RNA, 13 nt, Human
uguaauaauguga

SEQ ID NO: 2071935 - RNA, 14 nt, Human
uguaacauaugcaa

SEQ ID NO: 2071936 - RNA, 15 nt, Human
uguaacauaugcaaa

SEQ ID NO: 2071937 - RNA, 16 nt, Human
uguaacauaugcaaac

SEQ ID NO: 2071938 - RNA, 22 nt, Human
uguaacaggucuccucuuaaaa

SEQ ID NO: 2071939 - RNA, 11 nt, Human
uguaacagcug

SEQ ID NO: 2071940 - RNA, 14 nt, Human
uguaacagcugagg

SEQ ID NO: 2071941 - RNA, 15 nt, Human
uguaacagcugaggu

SEQ ID NO: 2071942 - RNA, 18 nt, Human
uguaacaggucuccucuu

SEQ ID NO: 2071943 - RNA, 20 nt, Human
uguaacaggucuccucuuaa

SEQ ID NO: 2071944 - RNA, 21 nt, Human
uguaacaggucuccucuuaaa

SEQ ID NO: 2071945 - RNA, 11 nt, Human
uguaacacugu

SEQ ID NO: 2071946 - RNA, 13 nt, Human
uguaacaagaaag

SEQ ID NO: 2071947 - RNA, 14 nt, Human
uguaacaagaaagg

SEQ ID NO: 2071948 - RNA, 15 nt, Human
uguaacaagaaagga

SEQ ID NO: 2071949 - RNA, 17 nt, Human
uguaacaagaaaggaga

SEQ ID NO: 2071950 - RNA, 18 nt, Human
uguaacaagaaaggagag

SEQ ID NO: 2071951 - RNA, 17 nt, Human
uguaacaagccacccca

SEQ ID NO: 2071952 - RNA, 11 nt, Human
uguaacacaag

SEQ ID NO: 2071953 - RNA, 15 nt, Human
uguaacaagaaaaca

SEQ ID NO: 2071954 - RNA, 14 nt, Human
uguaacaagccacc

SEQ ID NO: 2071955 - RNA, 18 nt, Human
uguaaacuguacuagucu

SEQ ID NO: 2071956 - RNA, 19 nt, Human
uguaaacuguacuagucug

SEQ ID NO: 2071957 - RNA, 21 nt, Human
uguaaacuguacuagucugug

SEQ ID NO: 2071958 - RNA, 22 nt, Human
uguaaacuguacuagucugugu

SEQ ID NO: 2071959 - RNA, 23 nt, Human
uguaaacuguacuagucugugug

SEQ ID NO: 2071960 - RNA, 20 nt, Human
ugguggggcugccaggggag

SEQ ID NO: 2071961 - RNA, 15 nt, Human
uggugggugaaagaa

SEQ ID NO: 2071962 - RNA, 21 nt, Human
uggugggugaaagaaaucaug

SEQ ID NO: 2071963 - RNA, 19 nt, Human
ugguggguucaggggacuc

SEQ ID NO: 2071964 - RNA, 21 nt, Human
ugguggguucaggggacucag

SEQ ID NO: 2071965 - RNA, 15 nt, Human
uggugguaucugagu

SEQ ID NO: 2071966 - RNA, 17 nt, Human
uggugggcaccaagagc

SEQ ID NO: 2071967 - RNA, 23 nt, Human
ugguguaaccugagauggcccuc

SEQ ID NO: 2071968 - RNA, 21 nt, Human
ugguggcccgacagccuggca

SEQ ID NO: 2071969 - RNA, 21 nt, Human
ugguggccucugccccgucuc

SEQ ID NO: 2071970 - RNA, 16 nt, Human
ugguggcgcaagccug

SEQ ID NO: 2071971 - RNA, 13 nt, Human
ugguggcuggguu

SEQ ID NO: 2071972 - RNA, 17 nt, Human
ugguggcgcaagccugu

SEQ ID NO: 2071973 - RNA, 21 nt, Human
uggugggaagcgucuguccgu

SEQ ID NO: 2071974 - RNA, 16 nt, Human
uggugggggccucggu

SEQ ID NO: 2071975 - RNA, 18 nt, Human
uggugggggccucggugu

SEQ ID NO: 2071976 - RNA, 23 nt, Human
uggguacuuguggacacagcucu

SEQ ID NO: 2071977 - RNA, 20 nt, Human
uggguacuuguggacacagc

SEQ ID NO: 2071978 - RNA, 21 nt, Human
uggguagaaagagauacagag

SEQ ID NO: 2071979 - RNA, 19 nt, Human
ugggguugcaucagaaaug

SEQ ID NO: 2071980 - RNA, 18 nt, Human
ugggguuggcugggccca

SEQ ID NO: 2071981 - RNA, 21 nt, Human
ugggguuggcugggcccagaa

SEQ ID NO: 2071982 - RNA, 22 nt, Human
uggugagaacuacucagggaau

SEQ ID NO: 2071983 - RNA, 23 nt, Human
uggugagaacuacucagggaaug

SEQ ID NO: 2071984 - RNA, 18 nt, Human
ugguggcagugggagcug

SEQ ID NO: 2071985 - RNA, 13 nt, Human
ugguggcaguggg

SEQ ID NO: 2071986 - RNA, 19 nt, Human
ugguggcccgacagccugg

SEQ ID NO: 2071987 - RNA, 20 nt, Human
ugguggcagugggagcugcc

SEQ ID NO: 2071988 - RNA, 14 nt, Human
uggugcaaauccua

SEQ ID NO: 2071989 - RNA, 19 nt, Human
ugguucuuguguuggcugu

SEQ ID NO: 2071990 - RNA, 22 nt, Human
ugguugagguggaagcccuccu

SEQ ID NO: 2071991 - RNA, 17 nt, Human
ugguugagaaaugaaua

SEQ ID NO: 2071992 - RNA, 15 nt, Human
ugguugagguggaag

SEQ ID NO: 2071993 - RNA, 15 nt, Human
ugguugacuggguuu

SEQ ID NO: 2071994 - RNA, 18 nt, Human
ugguugaugaucuuugca

SEQ ID NO: 2071995 - RNA, 12 nt, Human
ugguucuggggc

SEQ ID NO: 2071996 - RNA, 15 nt, Human
ugguucuucauuuau

SEQ ID NO: 2071997 - RNA, 23 nt, Human
ugguuccccuguucacucuacuu

SEQ ID NO: 2071998 - RNA, 21 nt, Human
ugguucccuuugcuccacccc

SEQ ID NO: 2071999 - RNA, 23 nt, Human
ugguucccuuugcuccaccccac

SEQ ID NO: 2072000 - RNA, 20 nt, Human
ugguuccggaauccuguccu

SEQ ID NO: 2072001 - RNA, 23 nt, Human
ugguuccuggggugcccuccacu

SEQ ID NO: 2072002 - RNA, 17 nt, Human
ugguuccuuucucagcc

SEQ ID NO: 2072003 - RNA, 19 nt, Human
ugguuccugcuagaaaugg

SEQ ID NO: 2072004 - RNA, 12 nt, Human
ugguuccugggg

SEQ ID NO: 2072005 - RNA, 15 nt, Human
ugguucuaauagaac

SEQ ID NO: 2072006 - RNA, 14 nt, Human
ugguucuacaaucu

SEQ ID NO: 2072007 - RNA, 16 nt, Human
uggugucaccugaaga

SEQ ID NO: 2072008 - RNA, 14 nt, Human
ugguguacaaaaug

SEQ ID NO: 2072009 - RNA, 18 nt, Human
ugguguccaccuggcccc

SEQ ID NO: 2072010 - RNA, 13 nt, Human
ugguguccagcug

SEQ ID NO: 2072011 - RNA, 17 nt, Human
ugguguccagcugaguu

SEQ ID NO: 2072012 - RNA, 13 nt, Human
ugguguccaccug

SEQ ID NO: 2072013 - RNA, 14 nt, Human
ugguguccaccugg

SEQ ID NO: 2072014 - RNA, 15 nt, Human
ugguguccaccuggc

SEQ ID NO: 2072015 - RNA, 17 nt, Human
ugguguccaccuggccc

SEQ ID NO: 2072016 - RNA, 19 nt, Human
ugguguccuuucccuccac

SEQ ID NO: 2072017 - RNA, 20 nt, Human
ugguuccccuguucacucua

SEQ ID NO: 2072018 - RNA, 19 nt, Human
ugguuccccuguucacucu

SEQ ID NO: 2072019 - RNA, 18 nt, Human
ugguuccccuguucacuc

SEQ ID NO: 2072020 - RNA, 11 nt, Human
ugguuccccug

SEQ ID NO: 2072021 - RNA, 16 nt, Human
ugguucaucaguguua

SEQ ID NO: 2072022 - RNA, 18 nt, Human
ugguucaucaguguuaaa

SEQ ID NO: 2072023 - RNA, 23 nt, Human
ugguucaucaguguuaaaaaauu

SEQ ID NO: 2072024 - RNA, 17 nt, Human
ugucuaggcaggaccug

SEQ ID NO: 2072025 - RNA, 19 nt, Human
ugucuaggcaggaccugug

SEQ ID NO: 2072026 - RNA, 14 nt, Human
ugucuaccaucucc

SEQ ID NO: 2072027 - RNA, 16 nt, Human
ugucuaccaucucccu

SEQ ID NO: 2072028 - RNA, 16 nt, Human
ugucuaugggacucaa

SEQ ID NO: 2072029 - RNA, 15 nt, Human
ugucuaugggacuca

SEQ ID NO: 2072030 - RNA, 14 nt, Human
ugucuaugggacuc

SEQ ID NO: 2072031 - RNA, 18 nt, Human
ugucuaggucaguaccca

SEQ ID NO: 2072032 - RNA, 21 nt, Human
ugucuaggucaguacccaccu

SEQ ID NO: 2072033 - RNA, 18 nt, Human
ugucucaagagggcacug

SEQ ID NO: 2072034 - RNA, 17 nt, Human
ugucucaagagggcacu

SEQ ID NO: 2072035 - RNA, 21 nt, Human
ugucucaaaaaaagaaaaaga

SEQ ID NO: 2072036 - RNA, 12 nt, Human
ugucucaaaaaa

SEQ ID NO: 2072037 - RNA, 13 nt, Human
ugucucagccucc

SEQ ID NO: 2072038 - RNA, 14 nt, Human
ugucucagccuccc

SEQ ID NO: 2072039 - RNA, 15 nt, Human
ugucucagccuccca

SEQ ID NO: 2072040 - RNA, 21 nt, Human
ugucugugugcaagugugugc

SEQ ID NO: 2072041 - RNA, 15 nt, Human
ugucugugucagccu

SEQ ID NO: 2072042 - RNA, 12 nt, Human
ugucugugugca

SEQ ID NO: 2072043 - RNA, 20 nt, Human
ugucugaagucacugcacag

SEQ ID NO: 2072044 - RNA, 14 nt, Human
ugucuuaaauaaaa

SEQ ID NO: 2072045 - RNA, 19 nt, Human
ugucuuaaauaaaagaaau

SEQ ID NO: 2072046 - RNA, 20 nt, Human
ugucuuaaauaaaagaaaug

SEQ ID NO: 2072047 - RNA, 19 nt, Human
ugucuuuguuggaaaagaa

SEQ ID NO: 2072048 - RNA, 10 nt, Human
ugucuuuggu

SEQ ID NO: 2072049 - RNA, 15 nt, Human
ugucuuugguccucu

SEQ ID NO: 2072050 - RNA, 20 nt, Human
ugucuuugguccucuugcca

SEQ ID NO: 2072051 - RNA, 16 nt, Human
uguccuccagaagccu

SEQ ID NO: 2072052 - RNA, 17 nt, Human
uguccuccagaagccuc

SEQ ID NO: 2072053 - RNA, 18 nt, Human
uguccuccagaagccucu

SEQ ID NO: 2072054 - RNA, 19 nt, Human
uguccuccagaagccucug

SEQ ID NO: 2072055 - RNA, 20 nt, Human
uguccuccagaagccucugg

SEQ ID NO: 2072056 - RNA, 21 nt, Human
uguccuccagaagccucuggc

SEQ ID NO: 2072057 - RNA, 22 nt, Human
uguccuccagaagccucuggcu

SEQ ID NO: 2072058 - RNA, 23 nt, Human
uguccuccagaagccucuggcua

SEQ ID NO: 2072059 - RNA, 17 nt, Human
uguccuccccucaagga

SEQ ID NO: 2072060 - RNA, 18 nt, Human
uguccuccccucaaggac

SEQ ID NO: 2072061 - RNA, 17 nt, Human
uguccugaccugucuca

SEQ ID NO: 2072062 - RNA, 20 nt, Human
uguccuaggaguauccucau

SEQ ID NO: 2072063 - RNA, 16 nt, Human
ugucaucccauugucu

SEQ ID NO: 2072064 - RNA, 17 nt, Human
ugucaucccauugucuu

SEQ ID NO: 2072065 - RNA, 20 nt, Human
ugucaucuaccuuuucucuu

SEQ ID NO: 2072066 - RNA, 15 nt, Human
ugucaucucagugcu

SEQ ID NO: 2072067 - RNA, 23 nt, Human
uguccccuauggggaugguccac

SEQ ID NO: 2072068 - RNA, 13 nt, Human
ugucaucucagcu

SEQ ID NO: 2072069 - RNA, 20 nt, Human
uguccugggagugagcuggu

SEQ ID NO: 2072070 - RNA, 19 nt, Human
uguccugggagugagcugg

SEQ ID NO: 2072071 - RNA, 12 nt, Human
uguccugggagu

SEQ ID NO: 2072072 - RNA, 23 nt, Human
ugucuacacagauguucacccaa

SEQ ID NO: 2072073 - RNA, 20 nt, Human
uguacagauugcugcuucug

SEQ ID NO: 2072074 - RNA, 13 nt, Human
uguauaaagaaca

SEQ ID NO: 2072075 - RNA, 23 nt, Human
uguauaaaugaaguuuauacagu

SEQ ID NO: 2072076 - RNA, 15 nt, Human
uguauaguacuggca

SEQ ID NO: 2072077 - RNA, 23 nt, Human
uguauaguaaagugauaauuucu

SEQ ID NO: 2072078 - RNA, 22 nt, Human
uguauagauuagauuauauuga

SEQ ID NO: 2072079 - RNA, 23 nt, Human
uguauagauuagauuauauugag

SEQ ID NO: 2072080 - RNA, 14 nt, Human
uguaugacuaaaga

SEQ ID NO: 2072081 - RNA, 15 nt, Human
uguaugacuaaagag

SEQ ID NO: 2072082 - RNA, 16 nt, Human
uguaugacuaaagaga

SEQ ID NO: 2072083 - RNA, 20 nt, Human
uguaugacuaaagagagaau

SEQ ID NO: 2072084 - RNA, 21 nt, Human
uguaugacuaaagagagaaug

SEQ ID NO: 2072085 - RNA, 16 nt, Human
uguaugauauuccaua

SEQ ID NO: 2072086 - RNA, 21 nt, Human
uguaugauauuccauaguaua

SEQ ID NO: 2072087 - RNA, 22 nt, Human
uguaugauauuccauaguauau

SEQ ID NO: 2072088 - RNA, 22 nt, Human
uguaugaaagauggcugugccu

SEQ ID NO: 2072089 - RNA, 11 nt, Human
uguaucugugu

SEQ ID NO: 2072090 - RNA, 12 nt, Human
uguaucugugua

SEQ ID NO: 2072091 - RNA, 16 nt, Human
uguaucuguguagacu

SEQ ID NO: 2072092 - RNA, 13 nt, Human
uguaucuguguag

SEQ ID NO: 2072093 - RNA, 13 nt, Human
uguaucugagcag

SEQ ID NO: 2072094 - RNA, 21 nt, Human
uguauaguacuggcaugguac

SEQ ID NO: 2072095 - RNA, 13 nt, Human
uguauguacauau

SEQ ID NO: 2072096 - RNA, 14 nt, Human
ugucacaggcaggu

SEQ ID NO: 2072097 - RNA, 13 nt, Human
ugucacacacuuu

SEQ ID NO: 2072098 - RNA, 13 nt, Human
ugucacaauaaau

SEQ ID NO: 2072099 - RNA, 16 nt, Human
ugucacaauaaaugua

SEQ ID NO: 2072100 - RNA, 14 nt, Human
ugucacaauccuaa

SEQ ID NO: 2072101 - RNA, 19 nt, Human
ugucacaauccuaacacau

SEQ ID NO: 2072102 - RNA, 21 nt, Human
ugucacaauccuaacacauua

SEQ ID NO: 2072103 - RNA, 16 nt, Human
uguaugccaagugaga

SEQ ID NO: 2072104 - RNA, 18 nt, Human
uguaugccaagugagaag

SEQ ID NO: 2072105 - RNA, 20 nt, Human
uguaugccaagugagaagau

SEQ ID NO: 2072106 - RNA, 23 nt, Human
uguauggguguguguuuguguga

SEQ ID NO: 2072107 - RNA, 12 nt, Human
uguauguaaaaa

SEQ ID NO: 2072108 - RNA, 18 nt, Human
uguauggaauacaguguu

SEQ ID NO: 2072109 - RNA, 19 nt, Human
uguauggaauacaguguua

SEQ ID NO: 2072110 - RNA, 16 nt, Human
uguauggaauacagug

SEQ ID NO: 2072111 - RNA, 17 nt, Human
uguauggaauacagugu

SEQ ID NO: 2072112 - RNA, 12 nt, Human
uguaugcuggac

SEQ ID NO: 2072113 - RNA, 21 nt, Human
ugucacaggcagguccagggu

SEQ ID NO: 2072114 - RNA, 17 nt, Human
ugucacaggcaggucca

SEQ ID NO: 2072115 - RNA, 16 nt, Human
ugucacaggcaggucc

SEQ ID NO: 2072116 - RNA, 15 nt, Human
ugucacaggcagguc

SEQ ID NO: 2072117 - RNA, 13 nt, Human
ugucacaggcagg

SEQ ID NO: 2072118 - RNA, 13 nt, Human
ugucacuguuucu

SEQ ID NO: 2072119 - RNA, 17 nt, Human
ugucacuguuucucugc

SEQ ID NO: 2072120 - RNA, 18 nt, Human
ugucacuguuucucugcu

SEQ ID NO: 2072121 - RNA, 13 nt, Human
uggccuccaaguc

SEQ ID NO: 2072122 - RNA, 23 nt, Human
uggccuccaaguccacaguggaa

SEQ ID NO: 2072123 - RNA, 23 nt, Human
uggccucaacccucccucagccc

SEQ ID NO: 2072124 - RNA, 17 nt, Human
uggccucagaauucaca

SEQ ID NO: 2072125 - RNA, 21 nt, Human
uggccucaacccucccucagc

SEQ ID NO: 2072126 - RNA, 22 nt, Human
uggccucaacccucccucagcc

SEQ ID NO: 2072127 - RNA, 23 nt, Human
uggccucaagugauucuccugcc

SEQ ID NO: 2072128 - RNA, 18 nt, Human
uggccucaagugauucuc

SEQ ID NO: 2072129 - RNA, 19 nt, Human
uggcagcugcgguccaccc

SEQ ID NO: 2072130 - RNA, 17 nt, Human
uggcagcugcgguccac

SEQ ID NO: 2072131 - RNA, 23 nt, Human
uggccccaugucucucagaauuc

SEQ ID NO: 2072132 - RNA, 19 nt, Human
uggccccaugucucucaga

SEQ ID NO: 2072133 - RNA, 21 nt, Human
uggccccaugucucucagaau

SEQ ID NO: 2072134 - RNA, 16 nt, Human
uggccccucaccuggg

SEQ ID NO: 2072135 - RNA, 21 nt, Human
uggccccucaccugggcaccu

SEQ ID NO: 2072136 - RNA, 21 nt, Human
uggcuccccucuauuuagcau

SEQ ID NO: 2072137 - RNA, 19 nt, Human
uggcuccgaacacccucga

SEQ ID NO: 2072138 - RNA, 16 nt, Human
uggcuccgcugugugg

SEQ ID NO: 2072139 - RNA, 13 nt, Human
uggcuccccucua

SEQ ID NO: 2072140 - RNA, 14 nt, Human
uggcuccccucuau

SEQ ID NO: 2072141 - RNA, 23 nt, Human
uggcucccaugaccauacugagg

SEQ ID NO: 2072142 - RNA, 23 nt, Human
uggcuccccucuauuuagcauga

SEQ ID NO: 2072143 - RNA, 19 nt, Human
uggcuccagucugcugccc

SEQ ID NO: 2072144 - RNA, 20 nt, Human
uggcuccagucugcugcccu

SEQ ID NO: 2072145 - RNA, 23 nt, Human
uggcuccagucugcugcccucca

SEQ ID NO: 2072146 - RNA, 15 nt, Human
uggcuccagucugcu

SEQ ID NO: 2072147 - RNA, 18 nt, Human
uggccuugaaaccaccuu

SEQ ID NO: 2072148 - RNA, 21 nt, Human
uggcuucccgcucagcccucc

SEQ ID NO: 2072149 - RNA, 20 nt, Human
uggcuucccgcucagcccuc

SEQ ID NO: 2072150 - RNA, 19 nt, Human
uggcuucccgcucagcccu

SEQ ID NO: 2072151 - RNA, 18 nt, Human
uggcuucccgcucagccc

SEQ ID NO: 2072152 - RNA, 15 nt, Human
uggcugggcccagaa

SEQ ID NO: 2072153 - RNA, 17 nt, Human
uggcuugccacagcucu

SEQ ID NO: 2072154 - RNA, 22 nt, Human
uggcuucccgcucagcccuccc

SEQ ID NO: 2072155 - RNA, 22 nt, Human
uggcuuccuaaaauucagugga

SEQ ID NO: 2072156 - RNA, 12 nt, Human
uggcugggccca

SEQ ID NO: 2072157 - RNA, 12 nt, Human
uggcugggcaug

SEQ ID NO: 2072158 - RNA, 22 nt, Human
uggcuggcuaacuggaagcaug

SEQ ID NO: 2072159 - RNA, 17 nt, Human
uggcuggcccgucaugu

SEQ ID NO: 2072160 - RNA, 13 nt, Human
uggcuggcugcag

SEQ ID NO: 2072161 - RNA, 14 nt, Human
uggcuggcugcagu

SEQ ID NO: 2072162 - RNA, 18 nt, Human
uggcuugggacuaaaugc

SEQ ID NO: 2072163 - RNA, 23 nt, Human
uggcuugggacuaaaugcccugc

SEQ ID NO: 2072164 - RNA, 17 nt, Human
uggcuuguaacuccacc

SEQ ID NO: 2072165 - RNA, 16 nt, Human
uggcuuuucacugcug

SEQ ID NO: 2072166 - RNA, 18 nt, Human
uggcuugugaucugggaa

SEQ ID NO: 2072167 - RNA, 22 nt, Human
uggcuuuucacugcuggcugcc

SEQ ID NO: 2072168 - RNA, 21 nt, Human
uggcuuuucacugcuggcugc

SEQ ID NO: 2072169 - RNA, 19 nt, Human
uggcuuuucacugcuggcu

SEQ ID NO: 2072170 - RNA, 18 nt, Human
uggcuuuucacugcuggc

SEQ ID NO: 2072171 - RNA, 21 nt, Human
uggcuuuucaugcgugugugu

SEQ ID NO: 2072172 - RNA, 20 nt, Human
ugggauaaaggcccagacuc

SEQ ID NO: 2072173 - RNA, 14 nt, Human
ugggaugcuugccu

SEQ ID NO: 2072174 - RNA, 19 nt, Human
ugggaugcuugccuagggc

SEQ ID NO: 2072175 - RNA, 17 nt, Human
ugggaguucagcugcuu

SEQ ID NO: 2072176 - RNA, 19 nt, Human
ugggaguucagcugcuucu

SEQ ID NO: 2072177 - RNA, 23 nt, Human
ugggauaaagaugcaaggaccag

SEQ ID NO: 2072178 - RNA, 16 nt, Human
ugggaggaucucuuga

SEQ ID NO: 2072179 - RNA, 20 nt, Human
ugggaugcuugccuagggcc

SEQ ID NO: 2072180 - RNA, 13 nt, Human
ugggauggaggag

SEQ ID NO: 2072181 - RNA, 16 nt, Human
ugggauggaggagaag

SEQ ID NO: 2072182 - RNA, 14 nt, Human
ugggauggaggaga

SEQ ID NO: 2072183 - RNA, 16 nt, Human
ugggcagcauagcaag

SEQ ID NO: 2072184 - RNA, 18 nt, Human
ugggcagcauagcaagac

SEQ ID NO: 2072185 - RNA, 14 nt, Human
ugggcagccaggcu

SEQ ID NO: 2072186 - RNA, 15 nt, Human
ugggcagccaggcug

SEQ ID NO: 2072187 - RNA, 16 nt, Human
ugggcagccaggcugc

SEQ ID NO: 2072188 - RNA, 16 nt, Human
ugggccucaaggacuu

SEQ ID NO: 2072189 - RNA, 17 nt, Human
ugggcagcugaacagug

SEQ ID NO: 2072190 - RNA, 23 nt, Human
ugggcaggaagugaagagauccu

SEQ ID NO: 2072191 - RNA, 13 nt, Human
ugggcaggaccuc

SEQ ID NO: 2072192 - RNA, 16 nt, Human
ugggcaggaccucaga

SEQ ID NO: 2072193 - RNA, 21 nt, Human
uggggggccaacaccagggau

SEQ ID NO: 2072194 - RNA, 15 nt, Human
uggggugugggaggc

SEQ ID NO: 2072195 - RNA, 14 nt, Human
ugggguucagcccc

SEQ ID NO: 2072196 - RNA, 15 nt, Human
ugggguucagccccu

SEQ ID NO: 2072197 - RNA, 17 nt, Human
ugggguucagccccucc

SEQ ID NO: 2072198 - RNA, 19 nt, Human
ugggguucagccccuccuc

SEQ ID NO: 2072199 - RNA, 21 nt, Human
ugggguucagccccuccucug

SEQ ID NO: 2072200 - RNA, 22 nt, Human
ugggguucagccccuccucugc

SEQ ID NO: 2072201 - RNA, 14 nt, Human
ugggguucguggaa

SEQ ID NO: 2072202 - RNA, 20 nt, Human
ugggguucguggaaagggug

SEQ ID NO: 2072203 - RNA, 19 nt, Human
uggggggcugaggugggag

SEQ ID NO: 2072204 - RNA, 19 nt, Human
ugggggccugaccuccccc

SEQ ID NO: 2072205 - RNA, 15 nt, Human
uggggggccaacacc

SEQ ID NO: 2072206 - RNA, 17 nt, Human
uggggggccaacaccag

SEQ ID NO: 2072207 - RNA, 21 nt, Human
ugggggccucacuccaggaag

SEQ ID NO: 2072208 - RNA, 16 nt, Human
ugggggccucagugcc

SEQ ID NO: 2072209 - RNA, 13 nt, Human
ugggggccaugag

SEQ ID NO: 2072210 - RNA, 16 nt, Human
ugggggccaugagcuc

SEQ ID NO: 2072211 - RNA, 18 nt, Human
ugggggcagagggcagag

SEQ ID NO: 2072212 - RNA, 17 nt, Human
ugggggcagggcaugac

SEQ ID NO: 2072213 - RNA, 17 nt, Human
ugggggcagccugcgug

SEQ ID NO: 2072214 - RNA, 19 nt, Human
ugggggcagccugcguggc

SEQ ID NO: 2072215 - RNA, 22 nt, Human
ugggggcagccugcguggcuga

SEQ ID NO: 2072216 - RNA, 22 nt, Human
ugggggcaggagggcccuaccu

SEQ ID NO: 2072217 - RNA, 12 nt, Human
uggggccacagc

SEQ ID NO: 2072218 - RNA, 13 nt, Human
uggggccacagcc

SEQ ID NO: 2072219 - RNA, 14 nt, Human
uggggccacagcca

SEQ ID NO: 2072220 - RNA, 15 nt, Human
uggggccacagccag

SEQ ID NO: 2072221 - RNA, 16 nt, Human
uggggccacagccaga

SEQ ID NO: 2072222 - RNA, 13 nt, Human
uggggcagcacag

SEQ ID NO: 2072223 - RNA, 14 nt, Human
uggggcagcacaga

SEQ ID NO: 2072224 - RNA, 19 nt, Human
uggggcaagucccugacuc

SEQ ID NO: 2072225 - RNA, 13 nt, Human
uggggcagcuuga

SEQ ID NO: 2072226 - RNA, 22 nt, Human
uggggcagcacagagagggggc

SEQ ID NO: 2072227 - RNA, 16 nt, Human
uggggcagcacagaga

SEQ ID NO: 2072228 - RNA, 18 nt, Human
uggggcagcacagagagg

SEQ ID NO: 2072229 - RNA, 17 nt, Human
ugggcuugucuguagau

SEQ ID NO: 2072230 - RNA, 21 nt, Human
ugggcuugucuguagauuuua

SEQ ID NO: 2072231 - RNA, 17 nt, Human
uggggauuucucccagc

SEQ ID NO: 2072232 - RNA, 21 nt, Human
ugggcuucaguggcagcugcu

SEQ ID NO: 2072233 - RNA, 22 nt, Human
ugggcuucaguggcagcugcuu

SEQ ID NO: 2072234 - RNA, 23 nt, Human
ugggccucaaggacuugaaagca

SEQ ID NO: 2072235 - RNA, 19 nt, Human
uggcacugacugggcauag

SEQ ID NO: 2072236 - RNA, 22 nt, Human
uggcacugagauauuuauuguu

SEQ ID NO: 2072237 - RNA, 22 nt, Human
uggcacuauaauguaagcucua

SEQ ID NO: 2072238 - RNA, 13 nt, Human
uggcacuggaugc

SEQ ID NO: 2072239 - RNA, 15 nt, Human
uggcacuggaugcag

SEQ ID NO: 2072240 - RNA, 18 nt, Human
uggcacuggaugcagaaa

SEQ ID NO: 2072241 - RNA, 16 nt, Human
uggcaaccagaccauu

SEQ ID NO: 2072242 - RNA, 21 nt, Human
uggcacuauaauguaagcucu

SEQ ID NO: 2072243 - RNA, 22 nt, Human
uggcaaccuugucucuaugcca

SEQ ID NO: 2072244 - RNA, 17 nt, Human
uggaugauguuucguga

SEQ ID NO: 2072245 - RNA, 15 nt, Human
uggauauuagucaua

SEQ ID NO: 2072246 - RNA, 13 nt, Human
uggauauuuucaa

SEQ ID NO: 2072247 - RNA, 23 nt, Human
uggaucacagaggcuucuucaga

SEQ ID NO: 2072248 - RNA, 18 nt, Human
uggauauuuucaaauugu

SEQ ID NO: 2072249 - RNA, 22 nt, Human
uggauauuuucaaauuguaucu

SEQ ID NO: 2072250 - RNA, 23 nt, Human
uggauauuuucaaauuguaucua

SEQ ID NO: 2072251 - RNA, 22 nt, Human
uggaucaaaaucuguagagcag

SEQ ID NO: 2072252 - RNA, 23 nt, Human
uggaucaaaaucuguagagcagg

SEQ ID NO: 2072253 - RNA, 24 nt, Human
uggaucaaaaucuguagagcaggg

SEQ ID NO: 2072254 - RNA, 20 nt, Human
uggaggggcauggccagcag

SEQ ID NO: 2072255 - RNA, 15 nt, Human
uggaggggagcucug

SEQ ID NO: 2072256 - RNA, 21 nt, Human
uggagaggagggaugcugccu

SEQ ID NO: 2072257 - RNA, 19 nt, Human
uggagauauuuaugggggg

SEQ ID NO: 2072258 - RNA, 23 nt, Human
uggagauauuuauggggggagaa

SEQ ID NO: 2072259 - RNA, 20 nt, Human
uggagauaaagauuucuuga

SEQ ID NO: 2072260 - RNA, 23 nt, Human
uggagaucaccaguguguggcuu

SEQ ID NO: 2072261 - RNA, 14 nt, Human
uggagagcuggugc

SEQ ID NO: 2072262 - RNA, 16 nt, Human
uggagagcuggugccc

SEQ ID NO: 2072263 - RNA, 19 nt, Human
uggagagcuggugcccgga

SEQ ID NO: 2072264 - RNA, 11 nt, Human
uggagagcugg

SEQ ID NO: 2072265 - RNA, 15 nt, Human
uggacugaagccugc

SEQ ID NO: 2072266 - RNA, 15 nt, Human
uggacugugaugcca

SEQ ID NO: 2072267 - RNA, 21 nt, Human
uggacuggguugcguccugac

SEQ ID NO: 2072268 - RNA, 16 nt, Human
uggacugguggccccu

SEQ ID NO: 2072269 - RNA, 17 nt, Human
uggacugguggccccug

SEQ ID NO: 2072270 - RNA, 21 nt, Human
uggacugugaugccacacaga

SEQ ID NO: 2072271 - RNA, 20 nt, Human
uggacugugaugccacacag

SEQ ID NO: 2072272 - RNA, 13 nt, Human
uggacuggcuaga

SEQ ID NO: 2072273 - RNA, 19 nt, Human
uggacuggcuagaguccuc

SEQ ID NO: 2072274 - RNA, 20 nt, Human
uggacuggcuagaguccuca

SEQ ID NO: 2072275 - RNA, 22 nt, Human
uggacuggcuagaguccucacu

SEQ ID NO: 2072276 - RNA, 23 nt, Human
uggacuggcuguccuuuccagug

SEQ ID NO: 2072277 - RNA, 23 nt, Human
uggacaggcauguucucugagga

SEQ ID NO: 2072278 - RNA, 17 nt, Human
uggacaggcauguucuc

SEQ ID NO: 2072279 - RNA, 20 nt, Human
uggacauuaagcaucacaaa

SEQ ID NO: 2072280 - RNA, 23 nt, Human
uggacauuaagcaucacaaauga

SEQ ID NO: 2072281 - RNA, 15 nt, Human
uggacauucagaaca

SEQ ID NO: 2072282 - RNA, 15 nt, Human
uggacauugucugcg

SEQ ID NO: 2072283 - RNA, 22 nt, Human
uggacaggcauguucucugagg

SEQ ID NO: 2072284 - RNA, 18 nt, Human
uggacaggcauguucucu

SEQ ID NO: 2072285 - RNA, 17 nt, Human
uggacguucggggcaug

SEQ ID NO: 2072286 - RNA, 21 nt, Human
ugcuucccucugccugucccu

SEQ ID NO: 2072287 - RNA, 19 nt, Human
ugcuucucauagccccggu

SEQ ID NO: 2072288 - RNA, 17 nt, Human
ugcuucuccaugagaca

SEQ ID NO: 2072289 - RNA, 14 nt, Human
ugcuucucuacaga

SEQ ID NO: 2072290 - RNA, 16 nt, Human
ugcuucucuacagacu

SEQ ID NO: 2072291 - RNA, 13 nt, Human
ugcuucccucugc

SEQ ID NO: 2072292 - RNA, 15 nt, Human
ugcuucccucugccu

SEQ ID NO: 2072293 - RNA, 20 nt, Human
ugcuucccucugccuguccc

SEQ ID NO: 2072294 - RNA, 14 nt, Human
ugcuuaaugaaaag

SEQ ID NO: 2072295 - RNA, 12 nt, Human
ugcuuaaugaaa

SEQ ID NO: 2072296 - RNA, 18 nt, Human
ugcuuaaaaaucauugau

SEQ ID NO: 2072297 - RNA, 17 nt, Human
ugcuuaaaaaucauuga

SEQ ID NO: 2072298 - RNA, 19 nt, Human
ugcuuaaaaaucauugauu

SEQ ID NO: 2072299 - RNA, 19 nt, Human
ugcuguuuguuugacaaag

SEQ ID NO: 2072300 - RNA, 14 nt, Human
ugccugucccucuc

SEQ ID NO: 2072301 - RNA, 11 nt, Human
ugccugucccu

SEQ ID NO: 2072302 - RNA, 11 nt, Human
ugccugucucc

SEQ ID NO: 2072303 - RNA, 19 nt, Human
ugccuguccagccugggca

SEQ ID NO: 2072304 - RNA, 20 nt, Human
ugccuguccagccugggcag

SEQ ID NO: 2072305 - RNA, 23 nt, Human
ugccuguaguuaggaaauaaaac

SEQ ID NO: 2072306 - RNA, 15 nt, Human
ugccuguccagccug

SEQ ID NO: 2072307 - RNA, 16 nt, Human
ugccuguccagccugg

SEQ ID NO: 2072308 - RNA, 18 nt, Human
ugccuguccagccugggc

SEQ ID NO: 2072309 - RNA, 13 nt, Human
ugcuuuggaaauc

SEQ ID NO: 2072310 - RNA, 14 nt, Human
uggaaaagaauaca

SEQ ID NO: 2072311 - RNA, 19 nt, Human
uggaaaagaauacagaaag

SEQ ID NO: 2072312 - RNA, 20 nt, Human
ugcuuugacugagcagacug

SEQ ID NO: 2072313 - RNA, 22 nt, Human
ugcuuugacugagcagacuggu

SEQ ID NO: 2072314 - RNA, 15 nt, Human
ugcuuugccccugag

SEQ ID NO: 2072315 - RNA, 12 nt, Human
ugcuuucugaaa

SEQ ID NO: 2072316 - RNA, 13 nt, Human
ugcuuucugaaau

SEQ ID NO: 2072317 - RNA, 14 nt, Human
ugcuuucugaacuc

SEQ ID NO: 2072318 - RNA, 20 nt, Human
ugcuuucugaacucgcuucu

SEQ ID NO: 2072319 - RNA, 20 nt, Human
ugcuuuccguggcacugcau

SEQ ID NO: 2072320 - RNA, 21 nt, Human
ugcuuuccguggcacugcaua

SEQ ID NO: 2072321 - RNA, 17 nt, Human
ugcuuuccguggcacug

SEQ ID NO: 2072322 - RNA, 19 nt, Human
ugcuucuuaaccccaguaa

SEQ ID NO: 2072323 - RNA, 17 nt, Human
ugcuucuuaaccccagu

SEQ ID NO: 2072324 - RNA, 20 nt, Human
uggaaaaggaagacuagagg

SEQ ID NO: 2072325 - RNA, 22 nt, Human
uggaaaaggaagacuagaggcu

SEQ ID NO: 2072326 - RNA, 15 nt, Human
uggaaaaggaagacu

SEQ ID NO: 2072327 - RNA, 16 nt, Human
uggaaaaggaagacua

SEQ ID NO: 2072328 - RNA, 18 nt, Human
uggaaaaggaagacuaga

SEQ ID NO: 2072329 - RNA, 15 nt, Human
uggaaacuaaaacuu

SEQ ID NO: 2072330 - RNA, 21 nt, Human
uggaaacuggaugaggucaua

SEQ ID NO: 2072331 - RNA, 19 nt, Human
ugauaugcaguuuuccuua

SEQ ID NO: 2072332 - RNA, 16 nt, Human
ugauaugcauuuccug

SEQ ID NO: 2072333 - RNA, 19 nt, Human
ugauaugcauuuccugcug

SEQ ID NO: 2072334 - RNA, 19 nt, Human
ugauaugaaaaauaugaua

SEQ ID NO: 2072335 - RNA, 12 nt, Human
ugauaugaaaaa

SEQ ID NO: 2072336 - RNA, 15 nt, Human
ugauaugaaaaauau

SEQ ID NO: 2072337 - RNA, 11 nt, Human
ugauaugaaaa

SEQ ID NO: 2072338 - RNA, 21 nt, Human
ugauaucaugccccuguacuc

SEQ ID NO: 2072339 - RNA, 18 nt, Human
ugaucacuggcaaugaaa

SEQ ID NO: 2072340 - RNA, 22 nt, Human
ugaucacggcucacugcagccu

SEQ ID NO: 2072341 - RNA, 14 nt, Human
ugauauaaauaaaa

SEQ ID NO: 2072342 - RNA, 13 nt, Human
ugauauauguguu

SEQ ID NO: 2072343 - RNA, 21 nt, Human
ugauauauguguuuuucacau

SEQ ID NO: 2072344 - RNA, 18 nt, Human
ugauauaauuuccauagu

SEQ ID NO: 2072345 - RNA, 22 nt, Human
ugauauacuuuuuucuuauuua

SEQ ID NO: 2072346 - RNA, 20 nt, Human
ugauccacccaccucagccu

SEQ ID NO: 2072347 - RNA, 16 nt, Human
ugauccacccaccuca

SEQ ID NO: 2072348 - RNA, 15 nt, Human
ugauccacccaccuc

SEQ ID NO: 2072349 - RNA, 21 nt, Human
ugauccaagcuggucccacuc

SEQ ID NO: 2072350 - RNA, 17 nt, Human
ugauccaagcugguccc

SEQ ID NO: 2072351 - RNA, 24 nt, Human
ugaucauccacugugccaugugcc

SEQ ID NO: 2072352 - RNA, 13 nt, Human
ugaucauccacug

SEQ ID NO: 2072353 - RNA, 22 nt, Human
ugauccacccaccucagccucc

SEQ ID NO: 2072354 - RNA, 21 nt, Human
ugauccacccaccucagccuc

SEQ ID NO: 2072355 - RNA, 20 nt, Human
ugaucugaugcaagcaagaa

SEQ ID NO: 2072356 - RNA, 13 nt, Human
ugaugcucauggu

SEQ ID NO: 2072357 - RNA, 14 nt, Human
ugaugcucccuccc

SEQ ID NO: 2072358 - RNA, 15 nt, Human
ugaugcucccucccc

SEQ ID NO: 2072359 - RNA, 16 nt, Human
ugaugcucccuccccu

SEQ ID NO: 2072360 - RNA, 23 nt, Human
ugaugcucccuccccugcccugg

SEQ ID NO: 2072361 - RNA, 17 nt, Human
ugaugcucccuccccug

SEQ ID NO: 2072362 - RNA, 20 nt, Human
ugaugcucccuccccugccc

SEQ ID NO: 2072363 - RNA, 21 nt, Human
ugaugcucccuccccugcccu

SEQ ID NO: 2072364 - RNA, 22 nt, Human
ugaugcucccuccccugcccug

SEQ ID NO: 2072365 - RNA, 20 nt, Human
ugaugcuggaugcuccuucc

SEQ ID NO: 2072366 - RNA, 20 nt, Human
ugauguaggguaaggugccu

SEQ ID NO: 2072367 - RNA, 15 nt, Human
ugauguacaguuggg

SEQ ID NO: 2072368 - RNA, 15 nt, Human
ugauguaccugaugc

SEQ ID NO: 2072369 - RNA, 20 nt, Human
ugauguaccaugaaacaaag

SEQ ID NO: 2072370 - RNA, 18 nt, Human
ugauguaccaugaaacaa

SEQ ID NO: 2072371 - RNA, 15 nt, Human
ugaugucccuaugga

SEQ ID NO: 2072372 - RNA, 18 nt, Human
ugaugguuuauguugacc

SEQ ID NO: 2072373 - RNA, 15 nt, Human
ugaugcuggaugcuc

SEQ ID NO: 2072374 - RNA, 15 nt, Human
ugauguaaaugaagu

SEQ ID NO: 2072375 - RNA, 17 nt, Human
ugauguaaaugaaguaa

SEQ ID NO: 2072376 - RNA, 19 nt, Human
ugauguaaaugaaguaacu

SEQ ID NO: 2072377 - RNA, 21 nt, Human
ugauguaaaugaaguaacuug

SEQ ID NO: 2072378 - RNA, 20 nt, Human
ugaugaugaaaugaggucag

SEQ ID NO: 2072379 - RNA, 23 nt, Human
ugaugaucuuugcagacaggcaa

SEQ ID NO: 2072380 - RNA, 22 nt, Human
ugaugaucuuugcagacaggca

SEQ ID NO: 2072381 - RNA, 18 nt, Human
ugaugccacacagagugg

SEQ ID NO: 2072382 - RNA, 15 nt, Human
ugaugaugauaauga

SEQ ID NO: 2072383 - RNA, 20 nt, Human
ugaucuuugcagacaggcaa

SEQ ID NO: 2072384 - RNA, 19 nt, Human
ugaucuuugcagacaggca

SEQ ID NO: 2072385 - RNA, 21 nt, Human
ugaucugaugcaagcaagaaa

SEQ ID NO: 2072386 - RNA, 23 nt, Human
ugaucuuugcagacaggcaagca

SEQ ID NO: 2072387 - RNA, 21 nt, Human
ugaucuuugcagacaggcaag

SEQ ID NO: 2072388 - RNA, 15 nt, Human
ugaugaaaaauagca

SEQ ID NO: 2072389 - RNA, 21 nt, Human
ugagguuuccuucagacagau

SEQ ID NO: 2072390 - RNA, 14 nt, Human
ugagucccuuccag

SEQ ID NO: 2072391 - RNA, 16 nt, Human
ugagucccuuccaggc

SEQ ID NO: 2072392 - RNA, 18 nt, Human
ugagucccuuccaggcca

SEQ ID NO: 2072393 - RNA, 21 nt, Human
ugagucccuuccaggccauca

SEQ ID NO: 2072394 - RNA, 14 nt, Human
ugagucgaggacag

SEQ ID NO: 2072395 - RNA, 19 nt, Human
ugagguuucaaaccucccu

SEQ ID NO: 2072396 - RNA, 12 nt, Human
ugagguuaggag

SEQ ID NO: 2072397 - RNA, 16 nt, Human
ugaggugcuauguucu

SEQ ID NO: 2072398 - RNA, 15 nt, Human
ugaggugcuauguuc

SEQ ID NO: 2072399 - RNA, 20 nt, Human
ugaggucuuuugacaugugg

SEQ ID NO: 2072400 - RNA, 15 nt, Human
ugaggugcugggagg

SEQ ID NO: 2072401 - RNA, 16 nt, Human
ugaggugcugggaggg

SEQ ID NO: 2072402 - RNA, 17 nt, Human
ugaggugcugggaggga

SEQ ID NO: 2072403 - RNA, 15 nt, Human
ugagguggaagcccu

SEQ ID NO: 2072404 - RNA, 16 nt, Human
ugagguggaagcccuc

SEQ ID NO: 2072405 - RNA, 17 nt, Human
ugagguggaagcccucc

SEQ ID NO: 2072406 - RNA, 20 nt, Human
ugagguggaagcccuccuuc

SEQ ID NO: 2072407 - RNA, 21 nt, Human
ugagguggaagcccuccuucc

SEQ ID NO: 2072408 - RNA, 22 nt, Human
ugagguggaagcccuccuucca

SEQ ID NO: 2072409 - RNA, 23 nt, Human
ugaggacuuaaaauauuccugca

SEQ ID NO: 2072410 - RNA, 11 nt, Human
ugaggagcugc

SEQ ID NO: 2072411 - RNA, 12 nt, Human
ugaggagcugcu

SEQ ID NO: 2072412 - RNA, 13 nt, Human
ugaggcugcagcg

SEQ ID NO: 2072413 - RNA, 12 nt, Human
ugaggcugggaa

SEQ ID NO: 2072414 - RNA, 13 nt, Human
ugaggcuggacuc

SEQ ID NO: 2072415 - RNA, 16 nt, Human
ugaggcuggacuccag

SEQ ID NO: 2072416 - RNA, 21 nt, Human
ugaggcuggacuccagaucug

SEQ ID NO: 2072417 - RNA, 22 nt, Human
ugaggcuggacuccagaucugc

SEQ ID NO: 2072418 - RNA, 16 nt, Human
ugagggaacagacagg

SEQ ID NO: 2072419 - RNA, 17 nt, Human
ugagggaacagacagga

SEQ ID NO: 2072420 - RNA, 17 nt, Human
ugaggucuuuugacaug

SEQ ID NO: 2072421 - RNA, 19 nt, Human
ugaggucuuuugacaugug

SEQ ID NO: 2072422 - RNA, 16 nt, Human
ugaggcuuaacaaugu

SEQ ID NO: 2072423 - RNA, 20 nt, Human
ugaggcuuaacaaugucuug

SEQ ID NO: 2072424 - RNA, 16 nt, Human
ugauaaaagauacauu

SEQ ID NO: 2072425 - RNA, 17 nt, Human
ugauaaaagauacauuu

SEQ ID NO: 2072426 - RNA, 17 nt, Human
ugauaaagaaaagaauc

SEQ ID NO: 2072427 - RNA, 21 nt, Human
ugaguuuagugaucugaacag

SEQ ID NO: 2072428 - RNA, 22 nt, Human
ugaguuuccucaggcugcugga

SEQ ID NO: 2072429 - RNA, 16 nt, Human
ugaguuuccucaggcu

SEQ ID NO: 2072430 - RNA, 17 nt, Human
ugaguuuccucaggcug

SEQ ID NO: 2072431 - RNA, 19 nt, Human
ugaguuuccucaggcugcu

SEQ ID NO: 2072432 - RNA, 15 nt, Human
ugaguuuaccauuug

SEQ ID NO: 2072433 - RNA, 18 nt, Human
ugaguuuaccauuuguaa

SEQ ID NO: 2072434 - RNA, 19 nt, Human
ugaguuuaccauuuguaau

SEQ ID NO: 2072435 - RNA, 20 nt, Human
ugaguuuaccauuuguaaua

SEQ ID NO: 2072436 - RNA, 23 nt, Human
ugaguuguuuucagacucagacu

SEQ ID NO: 2072437 - RNA, 14 nt, Human
ugaguuuaaagcaa

SEQ ID NO: 2072438 - RNA, 20 nt, Human
ugaguugguguugacaugug

SEQ ID NO: 2072439 - RNA, 18 nt, Human
ugagucgaggacagggag

SEQ ID NO: 2072440 - RNA, 16 nt, Human
ugaguugauucagcuc

SEQ ID NO: 2072441 - RNA, 19 nt, Human
ugaguugauucagcucugc

SEQ ID NO: 2072442 - RNA, 16 nt, Human
ugagucgaggacaggg

SEQ ID NO: 2072443 - RNA, 15 nt, Human
ugagucgaggacagg

SEQ ID NO: 2072444 - RNA, 19 nt, Human
ugauaaauuccacuggacu

SEQ ID NO: 2072445 - RNA, 11 nt, Human
ugauagcuuua

SEQ ID NO: 2072446 - RNA, 13 nt, Human
ugauagcuuuauu

SEQ ID NO: 2072447 - RNA, 14 nt, Human
ugauagcuuuauuu

SEQ ID NO: 2072448 - RNA, 23 nt, Human
ugauagcuuuauuuuuuaaguau

SEQ ID NO: 2072449 - RNA, 15 nt, Human
ugauagcguuggaau

SEQ ID NO: 2072450 - RNA, 16 nt, Human
ugauagcguuggaauu

SEQ ID NO: 2072451 - RNA, 20 nt, Human
ugauagcguuggaauuaaaa

SEQ ID NO: 2072452 - RNA, 21 nt, Human
ugagcuccagacccccagcaa

SEQ ID NO: 2072453 - RNA, 18 nt, Human
ugagcuccagacccccag

SEQ ID NO: 2072454 - RNA, 19 nt, Human
ugagcuccagacccccagc

SEQ ID NO: 2072455 - RNA, 20 nt, Human
ugagcuccagacccccagca

SEQ ID NO: 2072456 - RNA, 16 nt, Human
ugagcuccucugggca

SEQ ID NO: 2072457 - RNA, 18 nt, Human
ugagcuccucugggcagg

SEQ ID NO: 2072458 - RNA, 23 nt, Human
ugagcuccccaccaccccagcug

SEQ ID NO: 2072459 - RNA, 13 nt, Human
ugagcuccucugg

SEQ ID NO: 2072460 - RNA, 14 nt, Human
ugagcuccucuggg

SEQ ID NO: 2072461 - RNA, 15 nt, Human
ugagcuccucugggc

SEQ ID NO: 2072462 - RNA, 15 nt, Human
ugagcuccccaaaaa

SEQ ID NO: 2072463 - RNA, 16 nt, Human
ugagcuccccaaaaac

SEQ ID NO: 2072464 - RNA, 21 nt, Human
ugagcuccccaaaaaccucac

SEQ ID NO: 2072465 - RNA, 15 nt, Human
ugagcuccccaccac

SEQ ID NO: 2072466 - RNA, 20 nt, Human
ugagcuccccaccaccccag

SEQ ID NO: 2072467 - RNA, 22 nt, Human
ugagcuccccaccaccccagcu

SEQ ID NO: 2072468 - RNA, 16 nt, Human
ugagccuacagaugaa

SEQ ID NO: 2072469 - RNA, 15 nt, Human
ugagccucagcaucc

SEQ ID NO: 2072470 - RNA, 13 nt, Human
ugagccucagcau

SEQ ID NO: 2072471 - RNA, 13 nt, Human
ugagccccuggga

SEQ ID NO: 2072472 - RNA, 14 nt, Human
ugagccccugggac

SEQ ID NO: 2072473 - RNA, 15 nt, Human
ugagccccugggacu

SEQ ID NO: 2072474 - RNA, 17 nt, Human
ugagcccggaugcuucu

SEQ ID NO: 2072475 - RNA, 18 nt, Human
ugagcccagcccuguucu

SEQ ID NO: 2072476 - RNA, 12 nt, Human
ugagcccaggag

SEQ ID NO: 2072477 - RNA, 13 nt, Human
ugagcccaggagu

SEQ ID NO: 2072478 - RNA, 19 nt, Human
ugagaggggaacagacugg

SEQ ID NO: 2072479 - RNA, 23 nt, Human
ugagaucuaagccuuuccauaag

SEQ ID NO: 2072480 - RNA, 16 nt, Human
ugagaucuaagccuuu

SEQ ID NO: 2072481 - RNA, 20 nt, Human
ugagaucuaagccuuuccau

SEQ ID NO: 2072482 - RNA, 21 nt, Human
ugagaucuaagccuuuccaua

SEQ ID NO: 2072483 - RNA, 22 nt, Human
ugagaucuaagccuuuccauaa

SEQ ID NO: 2072484 - RNA, 23 nt, Human
ugagaguauuuaggcagauugaa

SEQ ID NO: 2072485 - RNA, 14 nt, Human
ugagacucugucuc

SEQ ID NO: 2072486 - RNA, 13 nt, Human
ugagacucugucu

SEQ ID NO: 2072487 - RNA, 12 nt, Human
ugagaccucagc

SEQ ID NO: 2072488 - RNA, 13 nt, Human
ugagaccucagcc

SEQ ID NO: 2072489 - RNA, 12 nt, Human
ugagacucuguc

SEQ ID NO: 2072490 - RNA, 14 nt, Human
ugagaccucagcca

SEQ ID NO: 2072491 - RNA, 18 nt, Human
ugagaggcagacuucccu

SEQ ID NO: 2072492 - RNA, 22 nt, Human
ugacuguacuccucccaggcgc

SEQ ID NO: 2072493 - RNA, 18 nt, Human
ugacuguacuccucccag

SEQ ID NO: 2072494 - RNA, 17 nt, Human
ugacuguacuccuccca

SEQ ID NO: 2072495 - RNA, 16 nt, Human
ugacuguacuccuccc

SEQ ID NO: 2072496 - RNA, 15 nt, Human
ugacuguaucugugu

SEQ ID NO: 2072497 - RNA, 23 nt, Human
ugacuggguuucucuguauagua

SEQ ID NO: 2072498 - RNA, 12 nt, Human
ugagacccuguc

SEQ ID NO: 2072499 - RNA, 15 nt, Human
ugagaccccugucuc

SEQ ID NO: 2072500 - RNA, 16 nt, Human
ugagaccccugucucc

SEQ ID NO: 2072501 - RNA, 14 nt, Human
ugagacccugucuc

SEQ ID NO: 2072502 - RNA, 15 nt, Human
ugagacccugucucu

SEQ ID NO: 2072503 - RNA, 22 nt, Human
ugagacccccacaccucaguuc

SEQ ID NO: 2072504 - RNA, 15 nt, Human
ugagaaaugaauaau

SEQ ID NO: 2072505 - RNA, 20 nt, Human
ugagaaaugaauaauuuccc

SEQ ID NO: 2072506 - RNA, 22 nt, Human
ugagaaaugaauaauuucccaa

SEQ ID NO: 2072507 - RNA, 17 nt, Human
ugaccucaaccugugau

SEQ ID NO: 2072508 - RNA, 18 nt, Human
ugaccucaaccugugaug

SEQ ID NO: 2072509 - RNA, 21 nt, Human
ugaccucaagauguccuccuu

SEQ ID NO: 2072510 - RNA, 21 nt, Human
ugaccuaagauuuauuuuguu

SEQ ID NO: 2072511 - RNA, 13 nt, Human
ugaccuacucuca

SEQ ID NO: 2072512 - RNA, 20 nt, Human
ugacccugcgaaggggcccu

SEQ ID NO: 2072513 - RNA, 21 nt, Human
ugacccugcgaaggggcccug

SEQ ID NO: 2072514 - RNA, 12 nt, Human
ugacccugcaga

SEQ ID NO: 2072515 - RNA, 16 nt, Human
ugacccugcagagaug

SEQ ID NO: 2072516 - RNA, 16 nt, Human
ugacccugaucagucu

SEQ ID NO: 2072517 - RNA, 15 nt, Human
ugacccucuccaccc

SEQ ID NO: 2072518 - RNA, 18 nt, Human
ugacccucuccaccccau

SEQ ID NO: 2072519 - RNA, 12 nt, Human
ugacccucccuu

SEQ ID NO: 2072520 - RNA, 13 nt, Human
ugacccucccuuc

SEQ ID NO: 2072521 - RNA, 16 nt, Human
ugacccucccuuccug

SEQ ID NO: 2072522 - RNA, 15 nt, Human
ucuugaacuccuggc

SEQ ID NO: 2072523 - RNA, 12 nt, Human
ugaccucugccu

SEQ ID NO: 2072524 - RNA, 21 nt, Human
ugaccucuauaauugccacug

SEQ ID NO: 2072525 - RNA, 14 nt, Human
ugaccucacuguga

SEQ ID NO: 2072526 - RNA, 22 nt, Human
ugaccucaggugauccacccac

SEQ ID NO: 2072527 - RNA, 17 nt, Human
ugaccuccacagcuucc

SEQ ID NO: 2072528 - RNA, 14 nt, Human
ugaccuccacagcu

SEQ ID NO: 2072529 - RNA, 15 nt, Human
ugaccuccacagcuu

SEQ ID NO: 2072530 - RNA, 14 nt, Human
ugaccucccucuaa

SEQ ID NO: 2072531 - RNA, 13 nt, Human
ugaccucccucua

SEQ ID NO: 2072532 - RNA, 13 nt, Human
ugaccucccccuc

SEQ ID NO: 2072533 - RNA, 16 nt, Human
ugaccucccccuccuu

SEQ ID NO: 2072534 - RNA, 17 nt, Human
ugaccucccccuccuuc

SEQ ID NO: 2072535 - RNA, 18 nt, Human
ugaccucccccuccuucc

SEQ ID NO: 2072536 - RNA, 19 nt, Human
ugaccucccccuccuuccc

SEQ ID NO: 2072537 - RNA, 22 nt, Human
ugaccucccucuaauuuaucuu

SEQ ID NO: 2072538 - RNA, 20 nt, Human
ugacugauguuaggcugggc

SEQ ID NO: 2072539 - RNA, 19 nt, Human
ugacugagcagacugguga

SEQ ID NO: 2072540 - RNA, 19 nt, Human
ugacugagcaagacccugu

SEQ ID NO: 2072541 - RNA, 22 nt, Human
ugacugagcaagacccugucuc

SEQ ID NO: 2072542 - RNA, 15 nt, Human
ugacugagcagacug

SEQ ID NO: 2072543 - RNA, 18 nt, Human
ugacugcacguggcuucu

SEQ ID NO: 2072544 - RNA, 22 nt, Human
ugacugcacguggcuucugaug

SEQ ID NO: 2072545 - RNA, 21 nt, Human
ugacugcauuuuacuguacag

SEQ ID NO: 2072546 - RNA, 19 nt, Human
ugacgucaagucuccuucc

SEQ ID NO: 2072547 - RNA, 23 nt, Human
ugacgugcaccuguacucaggag

SEQ ID NO: 2072548 - RNA, 18 nt, Human
ugacgugcaccuguacuc

SEQ ID NO: 2072549 - RNA, 19 nt, Human
ugacgugcaccuguacuca

SEQ ID NO: 2072550 - RNA, 18 nt, Human
ugacggaagaacauagaa

SEQ ID NO: 2072551 - RNA, 21 nt, Human
ugacggaaggaccuauguuug

SEQ ID NO: 2072552 - RNA, 22 nt, Human
ugacggaaggaccuauguuugc

SEQ ID NO: 2072553 - RNA, 23 nt, Human
ugacggaaggaccuauguuugcu

SEQ ID NO: 2072554 - RNA, 15 nt, Human
ugacggcgcccccag

SEQ ID NO: 2072555 - RNA, 18 nt, Human
ugacggcgcccccagugu

SEQ ID NO: 2072556 - RNA, 19 nt, Human
ugacggcgcccccagugug

SEQ ID NO: 2072557 - RNA, 20 nt, Human
ugacggcgcccccagugugc

SEQ ID NO: 2072558 - RNA, 14 nt, Human
ugacgaggcugggc

SEQ ID NO: 2072559 - RNA, 15 nt, Human
ugacgaggcugggcc

SEQ ID NO: 2072560 - RNA, 14 nt, Human
ugacggaagaacau

SEQ ID NO: 2072561 - RNA, 20 nt, Human
ugaccuuuugacuuaaagca

SEQ ID NO: 2072562 - RNA, 20 nt, Human
ugacgacaaagcugcuaaau

SEQ ID NO: 2072563 - RNA, 21 nt, Human
ugcaaugacacagucuuggcu

SEQ ID NO: 2072564 - RNA, 16 nt, Human
ugcaauggcagccuug

SEQ ID NO: 2072565 - RNA, 15 nt, Human
ugcaauggcagccuu

SEQ ID NO: 2072566 - RNA, 14 nt, Human
ugcaauggcagccu

SEQ ID NO: 2072567 - RNA, 13 nt, Human
ugcaauggcagcc

SEQ ID NO: 2072568 - RNA, 17 nt, Human
ugcaaugguuaacaucu

SEQ ID NO: 2072569 - RNA, 16 nt, Human
ugcaaugacaucuuca

SEQ ID NO: 2072570 - RNA, 17 nt, Human
ugcaaugacaucuucaa

SEQ ID NO: 2072571 - RNA, 15 nt, Human
ugcaaugaaggaaau

SEQ ID NO: 2072572 - RNA, 16 nt, Human
ugcaaugugcuacuga

SEQ ID NO: 2072573 - RNA, 17 nt, Human
ugcaauuuuaacacaca

SEQ ID NO: 2072574 - RNA, 18 nt, Human
ugcaauuuuaacacacau

SEQ ID NO: 2072575 - RNA, 21 nt, Human
ugcaauuguaggggugugugu

SEQ ID NO: 2072576 - RNA, 22 nt, Human
ugcaauuguaggggugugugug

SEQ ID NO: 2072577 - RNA, 17 nt, Human
ugcacaaagcccuucca

SEQ ID NO: 2072578 - RNA, 15 nt, Human
ugcacaaagcccuuc

SEQ ID NO: 2072579 - RNA, 16 nt, Human
ugcaccuguacucagg

SEQ ID NO: 2072580 - RNA, 17 nt, Human
ugcaccuguacucagga

SEQ ID NO: 2072581 - RNA, 20 nt, Human
ugcaccuguacucaggaggc

SEQ ID NO: 2072582 - RNA, 14 nt, Human
ugcaccuuaucuua

SEQ ID NO: 2072583 - RNA, 22 nt, Human
ugcaccuuaucuuaaagcacuu

SEQ ID NO: 2072584 - RNA, 16 nt, Human
ugcacgcacacugucu

SEQ ID NO: 2072585 - RNA, 15 nt, Human
ugcacagugcaucuc

SEQ ID NO: 2072586 - RNA, 17 nt, Human
ugcacagugcaucucag

SEQ ID NO: 2072587 - RNA, 16 nt, Human
ugcacagugcaucuca

SEQ ID NO: 2072588 - RNA, 21 nt, Human
ugcagaggggcuuucuggaga

SEQ ID NO: 2072589 - RNA, 22 nt, Human
ugcagaggggcuuucuggagag

SEQ ID NO: 2072590 - RNA, 19 nt, Human
ugcagaggguacuuuaaga

SEQ ID NO: 2072591 - RNA, 22 nt, Human
ugcacuuauuuaugaaccugcc

SEQ ID NO: 2072592 - RNA, 20 nt, Human
ugcagaggggcuuucuggag

SEQ ID NO: 2072593 - RNA, 16 nt, Human
ugcacuuaaauaucaa

SEQ ID NO: 2072594 - RNA, 17 nt, Human
ugcacuuaaauaucaau

SEQ ID NO: 2072595 - RNA, 21 nt, Human
ugcacugacauuguuggccaa

SEQ ID NO: 2072596 - RNA, 18 nt, Human
ugcacugacauuguuggc

SEQ ID NO: 2072597 - RNA, 17 nt, Human
ugcacgcacacugucug

SEQ ID NO: 2072598 - RNA, 18 nt, Human
ugcacugacccacagccu

SEQ ID NO: 2072599 - RNA, 22 nt, Human
ugcacugacccacagccucugc

SEQ ID NO: 2072600 - RNA, 19 nt, Human
ugauuuuuaaagaaaaguu

SEQ ID NO: 2072601 - RNA, 17 nt, Human
ugauuuugcuguagaag

SEQ ID NO: 2072602 - RNA, 19 nt, Human
ugauuuugcuguagaagau

SEQ ID NO: 2072603 - RNA, 14 nt, Human
ugauuuugcuguag

SEQ ID NO: 2072604 - RNA, 16 nt, Human
ugauuuugcuguagaa

SEQ ID NO: 2072605 - RNA, 15 nt, Human
ugauuuucauugcug

SEQ ID NO: 2072606 - RNA, 13 nt, Human
ugauuuucauugc

SEQ ID NO: 2072607 - RNA, 12 nt, Human
ugauuuuaacaa

SEQ ID NO: 2072608 - RNA, 14 nt, Human
ugauguggcaacug

SEQ ID NO: 2072609 - RNA, 16 nt, Human
ugauguggcaacugcu

SEQ ID NO: 2072610 - RNA, 22 nt, Human
ugauuuuaacaauaacuacugu

SEQ ID NO: 2072611 - RNA, 18 nt, Human
ugauuuuaacaauaacua

SEQ ID NO: 2072612 - RNA, 19 nt, Human
ugauuuuaacaauaacuac

SEQ ID NO: 2072613 - RNA, 13 nt, Human
ugauuuuaacaau

SEQ ID NO: 2072614 - RNA, 14 nt, Human
ugauuuuaacaaua

SEQ ID NO: 2072615 - RNA, 16 nt, Human
ugauuuuaacaauaac

SEQ ID NO: 2072616 - RNA, 17 nt, Human
ugauuuuaacaauaacu

SEQ ID NO: 2072617 - RNA, 19 nt, Human
ugauuuuaagaauccaaac

SEQ ID NO: 2072618 - RNA, 18 nt, Human
ugauuuuagcugcagaac

SEQ ID NO: 2072619 - RNA, 19 nt, Human
ugauuuuacaauugaaaug

SEQ ID NO: 2072620 - RNA, 14 nt, Human
ugaugugcaaaaau

SEQ ID NO: 2072621 - RNA, 16 nt, Human
ugaugugcaaaaauuu

SEQ ID NO: 2072622 - RNA, 17 nt, Human
ugaugugcaaaaauuuu

SEQ ID NO: 2072623 - RNA, 18 nt, Human
ugaugugcaaaaauuuuu

SEQ ID NO: 2072624 - RNA, 21 nt, Human
ugaugugcaaaaauuuuugga

SEQ ID NO: 2072625 - RNA, 22 nt, Human
ugaugugcaaaaauuuuuggau

SEQ ID NO: 2072626 - RNA, 16 nt, Human
ugaugucccuauggaa

SEQ ID NO: 2072627 - RNA, 23 nt, Human
ugaugucuuuguuaagacugcug

SEQ ID NO: 2072628 - RNA, 22 nt, Human
ugauuuuuuuuuagaacagaaa

SEQ ID NO: 2072629 - RNA, 23 nt, Human
ugauuuuuuuuuagaacagaaaa

SEQ ID NO: 2072630 - RNA, 16 nt, Human
ugauuuuuuuuuuuca

SEQ ID NO: 2072631 - RNA, 17 nt, Human
ugcaaaaauuuuuggau

SEQ ID NO: 2072632 - RNA, 20 nt, Human
ugcaaaaauuuuuggauuga

SEQ ID NO: 2072633 - RNA, 18 nt, Human
ugcaaaacaugcuaccug

SEQ ID NO: 2072634 - RNA, 13 nt, Human
ugauuuuuaucca

SEQ ID NO: 2072635 - RNA, 14 nt, Human
ugauuuuuauccaa

SEQ ID NO: 2072636 - RNA, 13 nt, Human
ugauuuuuuucca

SEQ ID NO: 2072637 - RNA, 13 nt, Human
ugcaacuucugcc

SEQ ID NO: 2072638 - RNA, 14 nt, Human
ugcaacuucugccu

SEQ ID NO: 2072639 - RNA, 16 nt, Human
ugcaacuuguaaaugu

SEQ ID NO: 2072640 - RNA, 17 nt, Human
ugcaacuucuuuuuauu

SEQ ID NO: 2072641 - RNA, 21 nt, Human
ugcaacuucuuuuuauuuucu

SEQ ID NO: 2072642 - RNA, 18 nt, Human
ugcaacuuguaaaugugg

SEQ ID NO: 2072643 - RNA, 14 nt, Human
ugcaaccuguugau

SEQ ID NO: 2072644 - RNA, 21 nt, Human
ugcaaccuccgccucuugggu

SEQ ID NO: 2072645 - RNA, 20 nt, Human
ugcaaccuccgccucuuggg

SEQ ID NO: 2072646 - RNA, 18 nt, Human
ugcaaccuccgccucuug

SEQ ID NO: 2072647 - RNA, 20 nt, Human
ugcaaacauaacaaaaucac

SEQ ID NO: 2072648 - RNA, 22 nt, Human
ugcaaacaugggguuggcuggg

SEQ ID NO: 2072649 - RNA, 23 nt, Human
ugcaaacacacaaagguauaauu

SEQ ID NO: 2072650 - RNA, 14 nt, Human
ugcaaaauuuccag

SEQ ID NO: 2072651 - RNA, 15 nt, Human
ugcaaaauuuccagu

SEQ ID NO: 2072652 - RNA, 16 nt, Human
ugcaaaauuuccagua

SEQ ID NO: 2072653 - RNA, 21 nt, Human
ugcaaaauuuccaguaccuuu

SEQ ID NO: 2072654 - RNA, 17 nt, Human
ugcaaaaugagacccuc

SEQ ID NO: 2072655 - RNA, 23 nt, Human
ugcaaaagguucacuaaagcagu

SEQ ID NO: 2072656 - RNA, 22 nt, Human
ugcaaaagguucacuaaagcag

SEQ ID NO: 2072657 - RNA, 17 nt, Human
ugcaacaggcugggcuu

SEQ ID NO: 2072658 - RNA, 16 nt, Human
ugcaacaggcugggcu

SEQ ID NO: 2072659 - RNA, 15 nt, Human
ugcaacaggcugggc

SEQ ID NO: 2072660 - RNA, 14 nt, Human
ugcaacaggcuggg

SEQ ID NO: 2072661 - RNA, 13 nt, Human
ugcaacaguagca

SEQ ID NO: 2072662 - RNA, 14 nt, Human
ugcaacaguagcau

SEQ ID NO: 2072663 - RNA, 20 nt, Human
ugcaacaggcugggcuucag

SEQ ID NO: 2072664 - RNA, 19 nt, Human
ugcaacaggcugggcuuca

SEQ ID NO: 2072665 - RNA, 14 nt, Human
ugcaaccuccgccu

SEQ ID NO: 2072666 - RNA, 13 nt, Human
ugcaaccuccgcc

SEQ ID NO: 2072667 - RNA, 15 nt, Human
ugcaacccuuacccc

SEQ ID NO: 2072668 - RNA, 17 nt, Human
ugcaacccuuaccccuu

SEQ ID NO: 2072669 - RNA, 13 nt, Human
ugccucccugucc

SEQ ID NO: 2072670 - RNA, 15 nt, Human
ugccucccuguccac

SEQ ID NO: 2072671 - RNA, 16 nt, Human
ugccucccuguccacc

SEQ ID NO: 2072672 - RNA, 17 nt, Human
ugccucccuguccaccc

SEQ ID NO: 2072673 - RNA, 19 nt, Human
ugccucccugacccugcag

SEQ ID NO: 2072674 - RNA, 20 nt, Human
ugccucccugacccugcaga

SEQ ID NO: 2072675 - RNA, 13 nt, Human
ugccuaagcccuc

SEQ ID NO: 2072676 - RNA, 20 nt, Human
ugccgugugcccucgggcga

SEQ ID NO: 2072677 - RNA, 16 nt, Human
ugccguuacucuccaa

SEQ ID NO: 2072678 - RNA, 19 nt, Human
ugccguuacucuccaaccu

SEQ ID NO: 2072679 - RNA, 22 nt, Human
ugccguuacucuccaaccugga

SEQ ID NO: 2072680 - RNA, 14 nt, Human
ugccucugccuguc

SEQ ID NO: 2072681 - RNA, 13 nt, Human
ugccucugccugu

SEQ ID NO: 2072682 - RNA, 18 nt, Human
ugccucugccugucuccc

SEQ ID NO: 2072683 - RNA, 16 nt, Human
ugccucugccugcauu

SEQ ID NO: 2072684 - RNA, 17 nt, Human
ugccucuggaggccucu

SEQ ID NO: 2072685 - RNA, 20 nt, Human
ugccucuggaggccucuggg

SEQ ID NO: 2072686 - RNA, 13 nt, Human
ugccucugggacu

SEQ ID NO: 2072687 - RNA, 19 nt, Human
ugccugguggcagcugcgg

SEQ ID NO: 2072688 - RNA, 13 nt, Human
ugccuguaaacau

SEQ ID NO: 2072689 - RNA, 16 nt, Human
ugccuguaguuaggaa

SEQ ID NO: 2072690 - RNA, 17 nt, Human
ugccuguaguuaggaaa

SEQ ID NO: 2072691 - RNA, 18 nt, Human
ugccuguaguuaggaaau

SEQ ID NO: 2072692 - RNA, 19 nt, Human
ugccuguaguuaggaaaua

SEQ ID NO: 2072693 - RNA, 20 nt, Human
ugccuguaguuaggaaauaa

SEQ ID NO: 2072694 - RNA, 21 nt, Human
ugccuguaguuaggaaauaaa

SEQ ID NO: 2072695 - RNA, 22 nt, Human
ugccuguaguuaggaaauaaaa

SEQ ID NO: 2072696 - RNA, 18 nt, Human
ugccugguggcagcugcg

SEQ ID NO: 2072697 - RNA, 17 nt, Human
ugccugguggcagcugc

SEQ ID NO: 2072698 - RNA, 22 nt, Human
ugccuggguuccaauccuggcu

SEQ ID NO: 2072699 - RNA, 16 nt, Human
ugccuggguggggcug

SEQ ID NO: 2072700 - RNA, 17 nt, Human
ugccuggguggggcugc

SEQ ID NO: 2072701 - RNA, 19 nt, Human
ugccuggguggggcugcuc

SEQ ID NO: 2072702 - RNA, 21 nt, Human
ugccuggguggggcugcuccu

SEQ ID NO: 2072703 - RNA, 22 nt, Human
ugccuggguggggcugcuccuc

SEQ ID NO: 2072704 - RNA, 23 nt, Human
ugccuggguggggcugcuccucc

SEQ ID NO: 2072705 - RNA, 24 nt, Human
ugccuggguggggcugcuccucca

SEQ ID NO: 2072706 - RNA, 13 nt, Human
ugccugcccaccc

SEQ ID NO: 2072707 - RNA, 14 nt, Human
ugccugcccacccg

SEQ ID NO: 2072708 - RNA, 15 nt, Human
ugccugcccacccgu

SEQ ID NO: 2072709 - RNA, 16 nt, Human
ugccugcccacccgug

SEQ ID NO: 2072710 - RNA, 13 nt, Human
ugccugcauucug

SEQ ID NO: 2072711 - RNA, 15 nt, Human
ugccugcauguauuu

SEQ ID NO: 2072712 - RNA, 15 nt, Human
ugccugcagccccgc

SEQ ID NO: 2072713 - RNA, 22 nt, Human
ugccugcagccccgcgccuccu

SEQ ID NO: 2072714 - RNA, 13 nt, Human
ugccucuuccucc

SEQ ID NO: 2072715 - RNA, 21 nt, Human
ugccucuucucuacucuaggg

SEQ ID NO: 2072716 - RNA, 11 nt, Human
ugccugcagcc

SEQ ID NO: 2072717 - RNA, 23 nt, Human
ugcccugcugccgccucccagcc

SEQ ID NO: 2072718 - RNA, 21 nt, Human
ugcccugcugccgccucccag

SEQ ID NO: 2072719 - RNA, 11 nt, Human
ugcccugcugc

SEQ ID NO: 2072720 - RNA, 19 nt, Human
ugcccuggaggaaccgaaa

SEQ ID NO: 2072721 - RNA, 18 nt, Human
ugcccuggauccaucagg

SEQ ID NO: 2072722 - RNA, 21 nt, Human
ugcccuggugcugccacacuu

SEQ ID NO: 2072723 - RNA, 15 nt, Human
ugcccugguuucacu

SEQ ID NO: 2072724 - RNA, 17 nt, Human
ugcccugguuucacugg

SEQ ID NO: 2072725 - RNA, 18 nt, Human
ugcccuggugcugccaca

SEQ ID NO: 2072726 - RNA, 20 nt, Human
ugcccuggugcugccacacu

SEQ ID NO: 2072727 - RNA, 22 nt, Human
ugcccugguuucacuggcccaa

SEQ ID NO: 2072728 - RNA, 14 nt, Human
ugccggguuuuaua

SEQ ID NO: 2072729 - RNA, 18 nt, Human
ugccggguuuuauauuuu

SEQ ID NO: 2072730 - RNA, 11 nt, Human
ugcccugcccc

SEQ ID NO: 2072731 - RNA, 16 nt, Human
ugcccugcccuagcuc

SEQ ID NO: 2072732 - RNA, 18 nt, Human
ugcccggggcagcugcca

SEQ ID NO: 2072733 - RNA, 20 nt, Human
ugcccggggcagcugccaga

SEQ ID NO: 2072734 - RNA, 23 nt, Human
ugcccggggcagcugccagagaa

SEQ ID NO: 2072735 - RNA, 13 nt, Human
ugcccgucuucag

SEQ ID NO: 2072736 - RNA, 16 nt, Human
ugcccgucuucagccu

SEQ ID NO: 2072737 - RNA, 17 nt, Human
ugcccgucuucagccua

SEQ ID NO: 2072738 - RNA, 18 nt, Human
ugcccgucuucagccuag

SEQ ID NO: 2072739 - RNA, 19 nt, Human
ugcccgucuucagccuagc

SEQ ID NO: 2072740 - RNA, 20 nt, Human
ugccacugagagaucugcug

SEQ ID NO: 2072741 - RNA, 13 nt, Human
ugccacugcacuc

SEQ ID NO: 2072742 - RNA, 14 nt, Human
ugccacugcacucc

SEQ ID NO: 2072743 - RNA, 17 nt, Human
ugccacugcccgagcug

SEQ ID NO: 2072744 - RNA, 12 nt, Human
ugccauccaggu

SEQ ID NO: 2072745 - RNA, 15 nt, Human
ugccauccagguuca

SEQ ID NO: 2072746 - RNA, 17 nt, Human
ugccagguuuuuggucu

SEQ ID NO: 2072747 - RNA, 18 nt, Human
ugccacugcccgagcugg

SEQ ID NO: 2072748 - RNA, 19 nt, Human
ugccacugcccgagcuggu

SEQ ID NO: 2072749 - RNA, 16 nt, Human
ugccauguuggccagg

SEQ ID NO: 2072750 - RNA, 15 nt, Human
ugccauguuggccag

SEQ ID NO: 2072751 - RNA, 12 nt, Human
ugccauguuggc

SEQ ID NO: 2072752 - RNA, 18 nt, Human
ugcccacgcuggagugca

SEQ ID NO: 2072753 - RNA, 11 nt, Human
ugcccaccugu

SEQ ID NO: 2072754 - RNA, 21 nt, Human
ugcccagaacuggacucagga

SEQ ID NO: 2072755 - RNA, 17 nt, Human
ugccaugugugcugaac

SEQ ID NO: 2072756 - RNA, 15 nt, Human
ugccaugugaagagg

SEQ ID NO: 2072757 - RNA, 16 nt, Human
ugccaugugaagaggg

SEQ ID NO: 2072758 - RNA, 15 nt, Human
ugccaugugccaggu

SEQ ID NO: 2072759 - RNA, 14 nt, Human
ugccaugugccagg

SEQ ID NO: 2072760 - RNA, 18 nt, Human
ugccauguacaguauguu

SEQ ID NO: 2072761 - RNA, 20 nt, Human
ugccaugacaacuucuaauu

SEQ ID NO: 2072762 - RNA, 16 nt, Human
ugccaugaacuggagg

SEQ ID NO: 2072763 - RNA, 19 nt, Human
ugccaugaacuggaggcca

SEQ ID NO: 2072764 - RNA, 22 nt, Human
ugccaugaacuggaggccagga

SEQ ID NO: 2072765 - RNA, 15 nt, Human
ugcauguauaaauga

SEQ ID NO: 2072766 - RNA, 17 nt, Human
ugcauguauaaaugaag

SEQ ID NO: 2072767 - RNA, 22 nt, Human
ugcauguuaggaaaauuucaca

SEQ ID NO: 2072768 - RNA, 15 nt, Human
ugcagaugccagagc

SEQ ID NO: 2072769 - RNA, 16 nt, Human
ugcagaugccagagca

SEQ ID NO: 2072770 - RNA, 11 nt, Human
ugcagaugcca

SEQ ID NO: 2072771 - RNA, 19 nt, Human
ugcauccguaguucccuga

SEQ ID NO: 2072772 - RNA, 20 nt, Human
ugcauccguaguucccugaa

SEQ ID NO: 2072773 - RNA, 16 nt, Human
ugcauccgugagcagu

SEQ ID NO: 2072774 - RNA, 23 nt, Human
ugcauccgugagcagugugucuc

SEQ ID NO: 2072775 - RNA, 21 nt, Human
ugcauccauuccucagggaca

SEQ ID NO: 2072776 - RNA, 20 nt, Human
ugcauccauuccucagggac

SEQ ID NO: 2072777 - RNA, 13 nt, Human
ugcagauucauuu

SEQ ID NO: 2072778 - RNA, 17 nt, Human
ugccaccaacuggcccu

SEQ ID NO: 2072779 - RNA, 18 nt, Human
ugccaccaacuggcccuc

SEQ ID NO: 2072780 - RNA, 19 nt, Human
ugccaccaacuggcccucu

SEQ ID NO: 2072781 - RNA, 20 nt, Human
ugccaccaacuggcccucuu

SEQ ID NO: 2072782 - RNA, 21 nt, Human
ugccaccaacuggcccucuuc

SEQ ID NO: 2072783 - RNA, 21 nt, Human
ugcauuuuaaaguuaaacauu

SEQ ID NO: 2072784 - RNA, 17 nt, Human
ugcauuuucaccccacc

SEQ ID NO: 2072785 - RNA, 16 nt, Human
ugcauuuucugaaacu

SEQ ID NO: 2072786 - RNA, 19 nt, Human
ugcauuuucugaaacuaau

SEQ ID NO: 2072787 - RNA, 20 nt, Human
ugcauuuucugaaacuaaug

SEQ ID NO: 2072788 - RNA, 22 nt, Human
ugcauuuucugaaacuaaugaa

SEQ ID NO: 2072789 - RNA, 23 nt, Human
ugcauuuucugaaacuaaugaaa

SEQ ID NO: 2072790 - RNA, 16 nt, Human
ugcauuuucuggguuc

SEQ ID NO: 2072791 - RNA, 23 nt, Human
ugcauuuucuggguucugggugg

SEQ ID NO: 2072792 - RNA, 18 nt, Human
ugcauuuugcagcaguga

SEQ ID NO: 2072793 - RNA, 23 nt, Human
ugcauuacagagaggagaaacac

SEQ ID NO: 2072794 - RNA, 14 nt, Human
ugcauuacauuccu

SEQ ID NO: 2072795 - RNA, 19 nt, Human
ugcauuagaaauagacagu

SEQ ID NO: 2072796 - RNA, 20 nt, Human
ugcauuagaaauagacagua

SEQ ID NO: 2072797 - RNA, 22 nt, Human
ugcauuagaaauagacaguaua

SEQ ID NO: 2072798 - RNA, 13 nt, Human
ugcauuagaaauu

SEQ ID NO: 2072799 - RNA, 14 nt, Human
ugcauuagaaauua

SEQ ID NO: 2072800 - RNA, 23 nt, Human
ugcauuagaaauuagcuguguga

SEQ ID NO: 2072801 - RNA, 15 nt, Human
uuuucagauauaaaa

SEQ ID NO: 2072802 - RNA, 14 nt, Human
uuuucagacucaga

SEQ ID NO: 2072803 - RNA, 14 nt, Human
uuuucagacugcuu

SEQ ID NO: 2072804 - RNA, 18 nt, Human
uuuucagacugcuuuaaa

SEQ ID NO: 2072805 - RNA, 20 nt, Human
uuuucccagauacuucccau

SEQ ID NO: 2072806 - RNA, 16 nt, Human
uuuucagacucagacu

SEQ ID NO: 2072807 - RNA, 17 nt, Human
uuuucagaaccucuucc

SEQ ID NO: 2072808 - RNA, 18 nt, Human
uuuucagaaccucuuccc

SEQ ID NO: 2072809 - RNA, 11 nt, Human
uuuucagaauc

SEQ ID NO: 2072810 - RNA, 13 nt, Human
uuuucagaaucug

SEQ ID NO: 2072811 - RNA, 16 nt, Human
uuuucagaaucugaau

SEQ ID NO: 2072812 - RNA, 17 nt, Human
uuuucagaaucugaaug

SEQ ID NO: 2072813 - RNA, 20 nt, Human
uuuucagaaucugaauguaa

SEQ ID NO: 2072814 - RNA, 21 nt, Human
uuuucagaaucugaauguaau

SEQ ID NO: 2072815 - RNA, 22 nt, Human
uuuucagaaucugaauguaauu

SEQ ID NO: 2072816 - RNA, 23 nt, Human
uuuucagaaucugaauguaauuu

SEQ ID NO: 2072817 - RNA, 11 nt, Human
uuuucagaccc

SEQ ID NO: 2072818 - RNA, 22 nt, Human
uuuucagaaccucuuccccaga

SEQ ID NO: 2072819 - RNA, 15 nt, Human
uuuucagaaauaugu

SEQ ID NO: 2072820 - RNA, 18 nt, Human
uuuucccuauuagagaag

SEQ ID NO: 2072821 - RNA, 22 nt, Human
uuuucccuauuagagaagagau

SEQ ID NO: 2072822 - RNA, 16 nt, Human
uuuucccccaaagugg

SEQ ID NO: 2072823 - RNA, 18 nt, Human
uuuuccccccacucuccc

SEQ ID NO: 2072824 - RNA, 19 nt, Human
uuuuccccccacucucccc

SEQ ID NO: 2072825 - RNA, 19 nt, Human
uuuuccccggucccuugag

SEQ ID NO: 2072826 - RNA, 23 nt, Human
uuuuccccggucccuugagaccu

SEQ ID NO: 2072827 - RNA, 14 nt, Human
uuuucaaauuguau

SEQ ID NO: 2072828 - RNA, 19 nt, Human
uuuucaaauuguaucuagu

SEQ ID NO: 2072829 - RNA, 21 nt, Human
uuuucaaaccaguauacaaga

SEQ ID NO: 2072830 - RNA, 22 nt, Human
uuuucaaaccaguauacaagau

SEQ ID NO: 2072831 - RNA, 23 nt, Human
uuuucaccuguuuuuaagcuguu

SEQ ID NO: 2072832 - RNA, 13 nt, Human
uuuucaccccacc

SEQ ID NO: 2072833 - RNA, 20 nt, Human
uuuucaccccacccuucccc

SEQ ID NO: 2072834 - RNA, 14 nt, Human
uuuuccuaaaugca

SEQ ID NO: 2072835 - RNA, 15 nt, Human
uuuuccuaaauguau

SEQ ID NO: 2072836 - RNA, 20 nt, Human
uuuugaacuaauaaaagcau

SEQ ID NO: 2072837 - RNA, 21 nt, Human
uuuugaacuaauaaaagcaua

SEQ ID NO: 2072838 - RNA, 16 nt, Human
uuuucuucaugcaaug

SEQ ID NO: 2072839 - RNA, 11 nt, Human
uuuucuuccuu

SEQ ID NO: 2072840 - RNA, 15 nt, Human
uuuucuuguuuauca

SEQ ID NO: 2072841 - RNA, 18 nt, Human
uuuucuuguuuaucagca

SEQ ID NO: 2072842 - RNA, 19 nt, Human
uuuucuuguuuaucagcag

SEQ ID NO: 2072843 - RNA, 13 nt, Human
uuuucuucucccu

SEQ ID NO: 2072844 - RNA, 21 nt, Human
uuuucuucaacaucaauguuc

SEQ ID NO: 2072845 - RNA, 22 nt, Human
uuuucuucaacaucaauguuca

SEQ ID NO: 2072846 - RNA, 23 nt, Human
uuuuacaaauuggagcagggaca

SEQ ID NO: 2072847 - RNA, 17 nt, Human
uuuuacaauaaaaucuu

SEQ ID NO: 2072848 - RNA, 14 nt, Human
uuuuacaauugaaa

SEQ ID NO: 2072849 - RNA, 17 nt, Human
uuuuaaauaaaagcagc

SEQ ID NO: 2072850 - RNA, 19 nt, Human
uuuuacaaaaaagaaaaga

SEQ ID NO: 2072851 - RNA, 15 nt, Human
uuuuaaauaaaagca

SEQ ID NO: 2072852 - RNA, 17 nt, Human
uuuuaaauaaaagugau

SEQ ID NO: 2072853 - RNA, 16 nt, Human
uuuuaaaguauauauu

SEQ ID NO: 2072854 - RNA, 21 nt, Human
uuuuaaagucuugcugugguc

SEQ ID NO: 2072855 - RNA, 18 nt, Human
uuuuaccuaccacagugu

SEQ ID NO: 2072856 - RNA, 19 nt, Human
uuuuaccuaccacaguguc

SEQ ID NO: 2072857 - RNA, 20 nt, Human
uuuuaccuaccacagugucu

SEQ ID NO: 2072858 - RNA, 16 nt, Human
uuuuacaauugaaaug

SEQ ID NO: 2072859 - RNA, 21 nt, Human
uuuuaccuaccacagugucug

SEQ ID NO: 2072860 - RNA, 14 nt, Human
uuuuacuacugugg

SEQ ID NO: 2072861 - RNA, 15 nt, Human
uuuuauacaggggaa

SEQ ID NO: 2072862 - RNA, 14 nt, Human
uuuuauacaguagu

SEQ ID NO: 2072863 - RNA, 17 nt, Human
uuuuauacaguagugag

SEQ ID NO: 2072864 - RNA, 23 nt, Human
uuuuauacaguagugagaagaau

SEQ ID NO: 2072865 - RNA, 13 nt, Human
uuuuaucuuuucu

SEQ ID NO: 2072866 - RNA, 16 nt, Human
uuuuaucuuuucuaca

SEQ ID NO: 2072867 - RNA, 17 nt, Human
uuuuaucuuuucuacag

SEQ ID NO: 2072868 - RNA, 23 nt, Human
uuuuaugaagaaaaaauacauuu

SEQ ID NO: 2072869 - RNA, 23 nt, Human
uuuuaucuccccuucacaugcau

SEQ ID NO: 2072870 - RNA, 18 nt, Human
uuuuauuuuuagacagag

SEQ ID NO: 2072871 - RNA, 16 nt, Human
uuuuauuuuuuauaca

SEQ ID NO: 2072872 - RNA, 17 nt, Human
uuuuauuuuuuucuacc

SEQ ID NO: 2072873 - RNA, 17 nt, Human
uuuucaaaauaaaaaug

SEQ ID NO: 2072874 - RNA, 17 nt, Human
uuuuauauaauaaagua

SEQ ID NO: 2072875 - RNA, 22 nt, Human
uuuuauauaauaaaguauucca

SEQ ID NO: 2072876 - RNA, 12 nt, Human
uuuuauacugua

SEQ ID NO: 2072877 - RNA, 15 nt, Human
uuuuauacuguacuu

SEQ ID NO: 2072878 - RNA, 16 nt, Human
uuuccguggcacugca

SEQ ID NO: 2072879 - RNA, 14 nt, Human
uuugaguguuuuaa

SEQ ID NO: 2072880 - RNA, 21 nt, Human
uuugaguggaugauguuucgu

SEQ ID NO: 2072881 - RNA, 16 nt, Human
uuugaguggaugaugu

SEQ ID NO: 2072882 - RNA, 20 nt, Human
uuugaguggaugauguuucg

SEQ ID NO: 2072883 - RNA, 14 nt, Human
uuuccuaaaaguuc

SEQ ID NO: 2072884 - RNA, 22 nt, Human
uuuccacaagauucccagagac

SEQ ID NO: 2072885 - RNA, 19 nt, Human
uuuccacaaaaucugucca

SEQ ID NO: 2072886 - RNA, 20 nt, Human
uuuccacaagauucccagag

SEQ ID NO: 2072887 - RNA, 12 nt, Human
uuuggaaaauaa

SEQ ID NO: 2072888 - RNA, 16 nt, Human
uuuggacacacacagc

SEQ ID NO: 2072889 - RNA, 17 nt, Human
uuuggacacacacagcu

SEQ ID NO: 2072890 - RNA, 21 nt, Human
uuugcaguagagucaucucca

SEQ ID NO: 2072891 - RNA, 12 nt, Human
uuugcaggcuca

SEQ ID NO: 2072892 - RNA, 14 nt, Human
uuugcauuccuaca

SEQ ID NO: 2072893 - RNA, 21 nt, Human
uuugguccuucaaaggcuugu

SEQ ID NO: 2072894 - RNA, 22 nt, Human
uuugguccuaagucccugcccc

SEQ ID NO: 2072895 - RNA, 23 nt, Human
uuuguauuuuauuuuuuucucuc

SEQ ID NO: 2072896 - RNA, 12 nt, Human
uuugugugagag

SEQ ID NO: 2072897 - RNA, 14 nt, Human
uuugugugagagac

SEQ ID NO: 2072898 - RNA, 14 nt, Human
uuugucaaacugua

SEQ ID NO: 2072899 - RNA, 15 nt, Human
uuugugugaaauaau

SEQ ID NO: 2072900 - RNA, 15 nt, Human
uuuguugucagcuga

SEQ ID NO: 2072901 - RNA, 13 nt, Human
uuuguuaccuuua

SEQ ID NO: 2072902 - RNA, 13 nt, Human
uuuguuauucuua

SEQ ID NO: 2072903 - RNA, 16 nt, Human
uuuguuauucuuaaga

SEQ ID NO: 2072904 - RNA, 20 nt, Human
uuuuaaacccuauugguaaa

SEQ ID NO: 2072905 - RNA, 12 nt, Human
uuuguuguaaaa

SEQ ID NO: 2072906 - RNA, 15 nt, Human
uuuguuguaaagagu

SEQ ID NO: 2072907 - RNA, 16 nt, Human
uuuguuguaaagaguu

SEQ ID NO: 2072908 - RNA, 17 nt, Human
uuuguuguaaagaguug

SEQ ID NO: 2072909 - RNA, 19 nt, Human
uuuuaaaaucacuaacauu

SEQ ID NO: 2072910 - RNA, 20 nt, Human
uuuuaaaaucacuaacauua

SEQ ID NO: 2072911 - RNA, 12 nt, Human
uuuuucaguuuu

SEQ ID NO: 2072912 - RNA, 15 nt, Human
uuuuucaguuuucag

SEQ ID NO: 2072913 - RNA, 21 nt, Human
uuuuucauugauaugaaaaau

SEQ ID NO: 2072914 - RNA, 18 nt, Human
uuuuuaaguuacacauuu

SEQ ID NO: 2072915 - RNA, 18 nt, Human
uuuuuaauaaaaaggcac

SEQ ID NO: 2072916 - RNA, 17 nt, Human
uuuuuaauaaagacagg

SEQ ID NO: 2072917 - RNA, 20 nt, Human
uuuuuaauaaagacaggguu

SEQ ID NO: 2072918 - RNA, 21 nt, Human
uuuuuaauauguaaggaaugc

SEQ ID NO: 2072919 - RNA, 14 nt, Human
uuuuucagaaauau

SEQ ID NO: 2072920 - RNA, 21 nt, Human
uuuuucagcagacuaugaaua

SEQ ID NO: 2072921 - RNA, 22 nt, Human
uuuuuaacucaauauuuuccau

SEQ ID NO: 2072922 - RNA, 21 nt, Human
uuuugaagcuaauuauuuuaa

SEQ ID NO: 2072923 - RNA, 22 nt, Human
uuuugaagcuaauuauuuuaau

SEQ ID NO: 2072924 - RNA, 17 nt, Human
uuuugacuuaaagcaga

SEQ ID NO: 2072925 - RNA, 22 nt, Human
uuuugacuagggauucaggcug

SEQ ID NO: 2072926 - RNA, 20 nt, Human
uuuuuaaauuuucuucaguu

SEQ ID NO: 2072927 - RNA, 13 nt, Human
uuuuuuuaaaauc

SEQ ID NO: 2072928 - RNA, 13 nt, Human
uuuuuuccacuua

SEQ ID NO: 2072929 - RNA, 18 nt, Human
uuuuucccuaucacugaa

SEQ ID NO: 2072930 - RNA, 17 nt, Human
uuuuuuaaguauuuaua

SEQ ID NO: 2072931 - RNA, 21 nt, Human
uuuuuccaucauaauucuaau

SEQ ID NO: 2072932 - RNA, 12 nt, Human
uuuuuuaauuga

SEQ ID NO: 2072933 - RNA, 23 nt, Human
uuuuuuacaaauuggagcaggga

SEQ ID NO: 2072934 - RNA, 18 nt, Human
uuuuuucaauauuuauua

SEQ ID NO: 2072935 - RNA, 12 nt, Human
uuuuuucaucuu

SEQ ID NO: 2072936 - RNA, 19 nt, Human
uugcacguauuuuaauagc

SEQ ID NO: 2072937 - RNA, 17 nt, Human
uugcacgcccaugugug

SEQ ID NO: 2072938 - RNA, 18 nt, Human
uugcacgcccauguguga

SEQ ID NO: 2072939 - RNA, 20 nt, Human
uugcacgcccaugugugagu

SEQ ID NO: 2072940 - RNA, 14 nt, Human
uugcacuccagccu

SEQ ID NO: 2072941 - RNA, 15 nt, Human
uugcacuccagccug

SEQ ID NO: 2072942 - RNA, 21 nt, Human
uuggguguaacaggucuccuc

SEQ ID NO: 2072943 - RNA, 23 nt, Human
uuggguguaacaggucuccucuu

SEQ ID NO: 2072944 - RNA, 20 nt, Human
uuggguuaggagaagucaag

SEQ ID NO: 2072945 - RNA, 22 nt, Human
uuggguucaagcgauucuucug

SEQ ID NO: 2072946 - RNA, 20 nt, Human
uugauuuguuuuagaaugau

SEQ ID NO: 2072947 - RNA, 21 nt, Human
uuggguuaaaaaaaaaaaaag

SEQ ID NO: 2072948 - RNA, 21 nt, Human
uuggugaacauugcaauagaa

SEQ ID NO: 2072949 - RNA, 22 nt, Human
uuguaaaaauuaaaaguuaugg

SEQ ID NO: 2072950 - RNA, 15 nt, Human
uuggucuuauuuauu

SEQ ID NO: 2072951 - RNA, 19 nt, Human
uuggucuuauuuauuauug

SEQ ID NO: 2072952 - RNA, 13 nt, Human
uuggucuguguga

SEQ ID NO: 2072953 - RNA, 20 nt, Human
uuggucagaguaagcugcuu

SEQ ID NO: 2072954 - RNA, 22 nt, Human
uuggucagaguaagcugcuuuu

SEQ ID NO: 2072955 - RNA, 16 nt, Human
uugguauuuaucuauu

SEQ ID NO: 2072956 - RNA, 22 nt, Human
uugguauuuaucuauuguaaga

SEQ ID NO: 2072957 - RNA, 23 nt, Human
uugguauuuaucuauuguaagau

SEQ ID NO: 2072958 - RNA, 22 nt, Human
uugguacuacuagaugucuuua

SEQ ID NO: 2072959 - RNA, 21 nt, Human
uuguaaaugugguaaagaguu

SEQ ID NO: 2072960 - RNA, 16 nt, Human
uuguaaaugugguaaa

SEQ ID NO: 2072961 - RNA, 17 nt, Human
uuguaaauagcucaggu

SEQ ID NO: 2072962 - RNA, 21 nt, Human
uuguaaauaagagauuuggag

SEQ ID NO: 2072963 - RNA, 22 nt, Human
uuguaaauacaaguucuauuua

SEQ ID NO: 2072964 - RNA, 23 nt, Human
uuguaaauacaaguucuauuuaa

SEQ ID NO: 2072965 - RNA, 14 nt, Human
uuguaaauacacau

SEQ ID NO: 2072966 - RNA, 15 nt, Human
uuguacguuuaaagu

SEQ ID NO: 2072967 - RNA, 16 nt, Human
uuguacguuuaaagug

SEQ ID NO: 2072968 - RNA, 17 nt, Human
uuguacguuuaaagugu

SEQ ID NO: 2072969 - RNA, 18 nt, Human
uuguacguuuaaagugua

SEQ ID NO: 2072970 - RNA, 18 nt, Human
uuguacauauguaaaaua

SEQ ID NO: 2072971 - RNA, 14 nt, Human
uuguauuaaagaca

SEQ ID NO: 2072972 - RNA, 18 nt, Human
uuguacuacaguucuuuu

SEQ ID NO: 2072973 - RNA, 16 nt, Human
uuguauuaaagacaga

SEQ ID NO: 2072974 - RNA, 20 nt, Human
uugucugaagucacugcaca

SEQ ID NO: 2072975 - RNA, 21 nt, Human
uugucugaagucacugcacag

SEQ ID NO: 2072976 - RNA, 15 nt, Human
uugucuuaaaaagug

SEQ ID NO: 2072977 - RNA, 13 nt, Human
uugucucagagca

SEQ ID NO: 2072978 - RNA, 14 nt, Human
uugugaaaugaugg

SEQ ID NO: 2072979 - RNA, 17 nt, Human
uugugaaaugaaaacau

SEQ ID NO: 2072980 - RNA, 20 nt, Human
uugucuuuguucuucuacca

SEQ ID NO: 2072981 - RNA, 19 nt, Human
uuguguuucuuuaguuuuu

SEQ ID NO: 2072982 - RNA, 17 nt, Human
uuguguuuuuaauuuau

SEQ ID NO: 2072983 - RNA, 21 nt, Human
uuguguuuuuaauuuauuuau

SEQ ID NO: 2072984 - RNA, 14 nt, Human
uuguuaaaacuggc

SEQ ID NO: 2072985 - RNA, 20 nt, Human
uuguuaaaacuggcaucuga

SEQ ID NO: 2072986 - RNA, 16 nt, Human
uuguuaaaauaacuag

SEQ ID NO: 2072987 - RNA, 21 nt, Human
uuguuaauaaaaguacauguu

SEQ ID NO: 2072988 - RNA, 22 nt, Human
uuguuaagucuaaauauuuccu

SEQ ID NO: 2072989 - RNA, 18 nt, Human
uuguuaaugaaaauguca

SEQ ID NO: 2072990 - RNA, 13 nt, Human
uuguuaauauucu

SEQ ID NO: 2072991 - RNA, 14 nt, Human
uuguuaauauucuu

SEQ ID NO: 2072992 - RNA, 15 nt, Human
uuguuaauauucuuu

SEQ ID NO: 2072993 - RNA, 17 nt, Human
uuguuaaugaaaauguc

SEQ ID NO: 2072994 - RNA, 14 nt, Human
uuguuaauaaaagu

SEQ ID NO: 2072995 - RNA, 19 nt, Human
uuguuaauaaaaguacaug

SEQ ID NO: 2072996 - RNA, 18 nt, Human
uuguguuuuuaauuuauu

SEQ ID NO: 2072997 - RNA, 14 nt, Human
uuguuaaauauuua

SEQ ID NO: 2072998 - RNA, 11 nt, Human
uuguuaacuuu

SEQ ID NO: 2072999 - RNA, 14 nt, Human
uuguuaacuuuggg

SEQ ID NO: 2073000 - RNA, 17 nt, Human
uuguuaagauaugaugu

SEQ ID NO: 2073001 - RNA, 21 nt, Human
uuguuacaggcaccgagaaug

SEQ ID NO: 2073002 - RNA, 12 nt, Human
uuguuaccuuua

SEQ ID NO: 2073003 - RNA, 19 nt, Human
uuguuaaugguuugaauau

SEQ ID NO: 2073004 - RNA, 19 nt, Human
uuguuaaugaaaaugucag

SEQ ID NO: 2073005 - RNA, 17 nt, Human
uuguuaauggugcaaau

SEQ ID NO: 2073006 - RNA, 20 nt, Human
uuguuucauugacuaucaaa

SEQ ID NO: 2073007 - RNA, 20 nt, Human
uuguuuauuuaucagugaca

SEQ ID NO: 2073008 - RNA, 17 nt, Human
uuguuuauuuuuauaua

SEQ ID NO: 2073009 - RNA, 16 nt, Human
uuguuugaaaauauua

SEQ ID NO: 2073010 - RNA, 19 nt, Human
uuguuugcucaccuggggu

SEQ ID NO: 2073011 - RNA, 13 nt, Human
uuguuugcuuauu

SEQ ID NO: 2073012 - RNA, 16 nt, Human
uuguuucucccccugg

SEQ ID NO: 2073013 - RNA, 21 nt, Human
uuguuguuaaugaaaauguca

SEQ ID NO: 2073014 - RNA, 19 nt, Human
uuguuauggcuuaaugaca

SEQ ID NO: 2073015 - RNA, 14 nt, Human
uuguuauggcuuaa

SEQ ID NO: 2073016 - RNA, 23 nt, Human
uugugcuacaugacgacaaagcu

SEQ ID NO: 2073017 - RNA, 14 nt, Human
uugugcugaugaga

SEQ ID NO: 2073018 - RNA, 22 nt, Human
uugugcugaucgugcuaaauuu

SEQ ID NO: 2073019 - RNA, 11 nt, Human
uugugcagaga

SEQ ID NO: 2073020 - RNA, 23 nt, Human
uugugaaaugaaaacauguaaua

SEQ ID NO: 2073021 - RNA, 13 nt, Human
uuguguuguuuga

SEQ ID NO: 2073022 - RNA, 21 nt, Human
uuguguuguuugaaaauauua

SEQ ID NO: 2073023 - RNA, 13 nt, Human
uuguguucuaaua

SEQ ID NO: 2073024 - RNA, 20 nt, Human
uuguguucuguuuguuaaaa

SEQ ID NO: 2073025 - RNA, 22 nt, Human
uuguguucuguuuguuaaaacu

SEQ ID NO: 2073026 - RNA, 19 nt, Human
uuguggcagaaguguuuca

SEQ ID NO: 2073027 - RNA, 22 nt, Human
uuguggaggagcucaggacacu

SEQ ID NO: 2073028 - RNA, 21 nt, Human
uuguggaaaaugaaaauuagg

SEQ ID NO: 2073029 - RNA, 18 nt, Human
uuguggaaagccucugcu

SEQ ID NO: 2073030 - RNA, 16 nt, Human
uuguggacacagcucu

SEQ ID NO: 2073031 - RNA, 17 nt, Human
uuguggacacagcucuu

SEQ ID NO: 2073032 - RNA, 18 nt, Human
uuuaaguuacacauuuuu

SEQ ID NO: 2073033 - RNA, 22 nt, Human
uuuaaguguaacuggcaguuuu

SEQ ID NO: 2073034 - RNA, 18 nt, Human
uuuaagugcuuuguaaug

SEQ ID NO: 2073035 - RNA, 14 nt, Human
uuuaaguguaacug

SEQ ID NO: 2073036 - RNA, 20 nt, Human
uuuaauaaaaaggcaccuau

SEQ ID NO: 2073037 - RNA, 11 nt, Human
uuuaauaaaag

SEQ ID NO: 2073038 - RNA, 19 nt, Human
uuuaauaacauaacaaaua

SEQ ID NO: 2073039 - RNA, 22 nt, Human
uuuaagacagucccaucaaaac

SEQ ID NO: 2073040 - RNA, 16 nt, Human
uuuaagaccagccugg

SEQ ID NO: 2073041 - RNA, 11 nt, Human
uuuaagaaaau

SEQ ID NO: 2073042 - RNA, 12 nt, Human
uuuaagaaaaua

SEQ ID NO: 2073043 - RNA, 13 nt, Human
uuuaagaaaauac

SEQ ID NO: 2073044 - RNA, 16 nt, Human
uuuaagaaaauacaau

SEQ ID NO: 2073045 - RNA, 20 nt, Human
uuuaagaaaauacaauaaac

SEQ ID NO: 2073046 - RNA, 21 nt, Human
uuuaagaaaauacaauaaacu

SEQ ID NO: 2073047 - RNA, 22 nt, Human
uuuaagaaaauacaauaaacua

SEQ ID NO: 2073048 - RNA, 22 nt, Human
uuuaagaaaaaauaacacacau

SEQ ID NO: 2073049 - RNA, 18 nt, Human
uuuaagaaaaaauaacac

SEQ ID NO: 2073050 - RNA, 19 nt, Human
uuuaacuuuaucacauuau

SEQ ID NO: 2073051 - RNA, 15 nt, Human
uuuaacuagaauuua

SEQ ID NO: 2073052 - RNA, 22 nt, Human
uuuaacgaaugaagaugucuaa

SEQ ID NO: 2073053 - RNA, 17 nt, Human
uuuaacuagaauuuauu

SEQ ID NO: 2073054 - RNA, 24 nt, Human
uuuaacucaauauuuuccaugaaa

SEQ ID NO: 2073055 - RNA, 18 nt, Human
uuuaacucaggacuccag

SEQ ID NO: 2073056 - RNA, 19 nt, Human
uuuaacucaggacuccagc

SEQ ID NO: 2073057 - RNA, 17 nt, Human
uuuaaauuuucuucagu

SEQ ID NO: 2073058 - RNA, 21 nt, Human
uuuaaauuuucuucaguuggu

SEQ ID NO: 2073059 - RNA, 22 nt, Human
uuuaaauuuucuucaguuggug

SEQ ID NO: 2073060 - RNA, 15 nt, Human
uuguuugcuuauugu

SEQ ID NO: 2073061 - RNA, 23 nt, Human
uuguuuggaucaaaaucuguaga

SEQ ID NO: 2073062 - RNA, 23 nt, Human
uuuaacaacuaugauuuggaaaa

SEQ ID NO: 2073063 - RNA, 18 nt, Human
uuuaacaauaacuacugu

SEQ ID NO: 2073064 - RNA, 20 nt, Human
uuuaacaauaacuacugugu

SEQ ID NO: 2073065 - RNA, 21 nt, Human
uuuaacaauaacuacuguguu

SEQ ID NO: 2073066 - RNA, 22 nt, Human
uuuaacaauaacuacuguguuc

SEQ ID NO: 2073067 - RNA, 23 nt, Human
uuuaacaauaacuacuguguucc

SEQ ID NO: 2073068 - RNA, 11 nt, Human
uuuaacaaugc

SEQ ID NO: 2073069 - RNA, 14 nt, Human
uuuaacaaugcgaa

SEQ ID NO: 2073070 - RNA, 18 nt, Human
uuuaacaaugcgaauggu

SEQ ID NO: 2073071 - RNA, 20 nt, Human
uuuaacaaugcgaaugguag

SEQ ID NO: 2073072 - RNA, 14 nt, Human
uuuaacauaaaggu

SEQ ID NO: 2073073 - RNA, 22 nt, Human
uuuaacauaaagguuauuuucu

SEQ ID NO: 2073074 - RNA, 22 nt, Human
uuuaauagcgucauaacuagaa

SEQ ID NO: 2073075 - RNA, 21 nt, Human
uuuaauagcgucauaacuaga

SEQ ID NO: 2073076 - RNA, 14 nt, Human
uuuaauacagggua

SEQ ID NO: 2073077 - RNA, 19 nt, Human
uuuaauagaauauaauuau

SEQ ID NO: 2073078 - RNA, 21 nt, Human
uuuaauagaauauaauuaucg

SEQ ID NO: 2073079 - RNA, 21 nt, Human
uuuacaccaguuccuuucaau

SEQ ID NO: 2073080 - RNA, 15 nt, Human
uuuacacuuuugaga

SEQ ID NO: 2073081 - RNA, 19 nt, Human
uuuacacuuuugagacuuu

SEQ ID NO: 2073082 - RNA, 16 nt, Human
uuuacagcugccugca

SEQ ID NO: 2073083 - RNA, 15 nt, Human
uuuacagcugccugc

SEQ ID NO: 2073084 - RNA, 14 nt, Human
uuuacagaauugcu

SEQ ID NO: 2073085 - RNA, 19 nt, Human
uuuacagaauugcuuguuu

SEQ ID NO: 2073086 - RNA, 20 nt, Human
uuuacagcuuucaugauuag

SEQ ID NO: 2073087 - RNA, 23 nt, Human
uuuacagcuuucaugauuagcaa

SEQ ID NO: 2073088 - RNA, 17 nt, Human
uuuaccaaguuauauaa

SEQ ID NO: 2073089 - RNA, 20 nt, Human
uuuaccaaguuauauaaaga

SEQ ID NO: 2073090 - RNA, 21 nt, Human
uuuaccaaguuauauaaagag

SEQ ID NO: 2073091 - RNA, 14 nt, Human
uuuagaaauauaau

SEQ ID NO: 2073092 - RNA, 23 nt, Human
uuuagaaagaagcccaauauuau

SEQ ID NO: 2073093 - RNA, 22 nt, Human
uuuagaaacuuaucuuacaaag

SEQ ID NO: 2073094 - RNA, 19 nt, Human
uuuacuucuuauacauuug

SEQ ID NO: 2073095 - RNA, 22 nt, Human
uuuacuucuuauacauuugaua

SEQ ID NO: 2073096 - RNA, 15 nt, Human
uuuacuuguuucaga

SEQ ID NO: 2073097 - RNA, 17 nt, Human
uuuacuuguuucagagu

SEQ ID NO: 2073098 - RNA, 22 nt, Human
uuuaccacugcugugaacaagu

SEQ ID NO: 2073099 - RNA, 18 nt, Human
uuuacuugcauugaauau

SEQ ID NO: 2073100 - RNA, 21 nt, Human
uuuacuugcauugaauauauu

SEQ ID NO: 2073101 - RNA, 12 nt, Human
uuuagacagagu

SEQ ID NO: 2073102 - RNA, 16 nt, Human
uuuagacaaaucuaag

SEQ ID NO: 2073103 - RNA, 21 nt, Human
uuuagacaaaucuaagggaaa

SEQ ID NO: 2073104 - RNA, 17 nt, Human
uuuauaaaaaaaaugaa

SEQ ID NO: 2073105 - RNA, 18 nt, Human
uuuauaaaaaaaaugaaa

SEQ ID NO: 2073106 - RNA, 19 nt, Human
uuuauaaaaaaaaugaaau

SEQ ID NO: 2073107 - RNA, 20 nt, Human
uuuauaaaaaaaaugaaaug

SEQ ID NO: 2073108 - RNA, 21 nt, Human
uuuauaaaaaaaaugaaaugu

SEQ ID NO: 2073109 - RNA, 14 nt, Human
uuucagauauaaaa

SEQ ID NO: 2073110 - RNA, 16 nt, Human
uuucagauauaaaaga

SEQ ID NO: 2073111 - RNA, 18 nt, Human
uuucagauauaaaagacu

SEQ ID NO: 2073112 - RNA, 12 nt, Human
uuucagaugcuu

SEQ ID NO: 2073113 - RNA, 14 nt, Human
uuucagaugcuucu

SEQ ID NO: 2073114 - RNA, 16 nt, Human
uuucagaugcuucugg

SEQ ID NO: 2073115 - RNA, 15 nt, Human
uuucagaugcuuuag

SEQ ID NO: 2073116 - RNA, 20 nt, Human
uuucagaugcuucugggaga

SEQ ID NO: 2073117 - RNA, 16 nt, Human
uuucacaaccuucugu

SEQ ID NO: 2073118 - RNA, 22 nt, Human
uuucacaaccuucuguggcuca

SEQ ID NO: 2073119 - RNA, 17 nt, Human
uuucaauuuugcaugcu

SEQ ID NO: 2073120 - RNA, 19 nt, Human
uuucaauuuccaagagcug

SEQ ID NO: 2073121 - RNA, 18 nt, Human
uuucaauaacgaaguugg

SEQ ID NO: 2073122 - RNA, 21 nt, Human
uuucaauaacgaaguugggca

SEQ ID NO: 2073123 - RNA, 22 nt, Human
uuucaauaacgaaguugggcaa

SEQ ID NO: 2073124 - RNA, 21 nt, Human
uuucaagugaaucuaaaagcu

SEQ ID NO: 2073125 - RNA, 23 nt, Human
uuucagcaccuacaguguacagu

SEQ ID NO: 2073126 - RNA, 21 nt, Human
uuucagcaauauuuaaggaga

SEQ ID NO: 2073127 - RNA, 14 nt, Human
uuucagcagacuau

SEQ ID NO: 2073128 - RNA, 21 nt, Human
uuucagcagacuaugaauauu

SEQ ID NO: 2073129 - RNA, 13 nt, Human
uuucaguguacau

SEQ ID NO: 2073130 - RNA, 14 nt, Human
uuucaguguacaug

SEQ ID NO: 2073131 - RNA, 13 nt, Human
uuuccaagagcug

SEQ ID NO: 2073132 - RNA, 14 nt, Human
uuuccaagagcuga

SEQ ID NO: 2073133 - RNA, 16 nt, Human
uuuccaagagcugagg

SEQ ID NO: 2073134 - RNA, 13 nt, Human
uuuccaaggagcu

SEQ ID NO: 2073135 - RNA, 18 nt, Human
uuuccaaggagcugagaa

SEQ ID NO: 2073136 - RNA, 19 nt, Human
uuuccaaggagcugagaau

SEQ ID NO: 2073137 - RNA, 22 nt, Human
uuuccaaggagcugagaauaga

SEQ ID NO: 2073138 - RNA, 12 nt, Human
uuuccaagcaaa

SEQ ID NO: 2073139 - RNA, 13 nt, Human
uuuccaagcaaau

SEQ ID NO: 2073140 - RNA, 14 nt, Human
uuuccaagcaaaug

SEQ ID NO: 2073141 - RNA, 18 nt, Human
uuuccaagcaaauguuac

SEQ ID NO: 2073142 - RNA, 20 nt, Human
uuuccaagcaaauguuacau

SEQ ID NO: 2073143 - RNA, 21 nt, Human
uuuccaagcaaauguuacaua

SEQ ID NO: 2073144 - RNA, 22 nt, Human
uuuccaagcaaauguuacauag

SEQ ID NO: 2073145 - RNA, 23 nt, Human
uuuccaaauucacaaguuguguu

SEQ ID NO: 2073146 - RNA, 22 nt, Human
uuuauggccucagcugccucac

SEQ ID NO: 2073147 - RNA, 12 nt, Human
uuuauggccuca

SEQ ID NO: 2073148 - RNA, 13 nt, Human
uuuauggccucag

SEQ ID NO: 2073149 - RNA, 15 nt, Human
uuuauaauuuuaaga

SEQ ID NO: 2073150 - RNA, 18 nt, Human
uuuauaauuuuaagauuc

SEQ ID NO: 2073151 - RNA, 21 nt, Human
uuuauaauuuuaagauuccuu

SEQ ID NO: 2073152 - RNA, 22 nt, Human
uuuauaauuuuaagauuccuuu

SEQ ID NO: 2073153 - RNA, 21 nt, Human
uuuauaacucaucauaaaaua

SEQ ID NO: 2073154 - RNA, 20 nt, Human
uuuauaagcagauuuaacaa

SEQ ID NO: 2073155 - RNA, 19 nt, Human
uuuauaacuaguccuuuac

SEQ ID NO: 2073156 - RNA, 16 nt, Human
uuuauaacucaucaua

SEQ ID NO: 2073157 - RNA, 18 nt, Human
uuuauaacucaucauaaa

SEQ ID NO: 2073158 - RNA, 19 nt, Human
uuuauaacucaucauaaaa

SEQ ID NO: 2073159 - RNA, 20 nt, Human
uuuauaacucaucauaaaau

SEQ ID NO: 2073160 - RNA, 22 nt, Human
uuuauaacucaucauaaaauaa

SEQ ID NO: 2073161 - RNA, 13 nt, Human
uuucaagcaucuc

SEQ ID NO: 2073162 - RNA, 14 nt, Human
uuucaagcaucucc

SEQ ID NO: 2073163 - RNA, 17 nt, Human
uuucaagcaucuccuga

SEQ ID NO: 2073164 - RNA, 20 nt, Human
uuucaagcaucuccugagga

SEQ ID NO: 2073165 - RNA, 22 nt, Human
uuucaagccugccuaggaauuc

SEQ ID NO: 2073166 - RNA, 18 nt, Human
uuucaagaccccugucuu

SEQ ID NO: 2073167 - RNA, 20 nt, Human
uuucaacgcagcccugcuuu

SEQ ID NO: 2073168 - RNA, 16 nt, Human
uuucaacgcagcccug

SEQ ID NO: 2073169 - RNA, 12 nt, Human
uuuauuuacuuc

SEQ ID NO: 2073170 - RNA, 15 nt, Human
uuucaacgcagcccu

SEQ ID NO: 2073171 - RNA, 21 nt, Human
uuucaacgcagcccugcuuug

SEQ ID NO: 2073172 - RNA, 15 nt, Human
uuuauugaugugcaa

SEQ ID NO: 2073173 - RNA, 16 nt, Human
uuuauugaugugcaaa

SEQ ID NO: 2073174 - RNA, 18 nt, Human
uuuauugaugugcaaaaa

SEQ ID NO: 2073175 - RNA, 19 nt, Human
uuuauugaugugcaaaaau

SEQ ID NO: 2073176 - RNA, 13 nt, Human
uuuauugcacaaa

SEQ ID NO: 2073177 - RNA, 17 nt, Human
uuuauugcacaaaauau

SEQ ID NO: 2073178 - RNA, 21 nt, Human
uuuauugcacaaaauauaaag

SEQ ID NO: 2073179 - RNA, 19 nt, Human
uuuauuuaguuccuugagu

SEQ ID NO: 2073180 - RNA, 17 nt, Human
uuuauuuaauguuaugu

SEQ ID NO: 2073181 - RNA, 14 nt, Human
uuuauuccuuguga

SEQ ID NO: 2073182 - RNA, 22 nt, Human
uuuauuccuauauaguuuauug

SEQ ID NO: 2073183 - RNA, 18 nt, Human
uuuauuaugcuguauuuu

SEQ ID NO: 2073184 - RNA, 14 nt, Human
uuuauugagaauuu

SEQ ID NO: 2073185 - RNA, 12 nt, Human
uuuauugacaau

SEQ ID NO: 2073186 - RNA, 13 nt, Human
uuuauucuuguga

SEQ ID NO: 2073187 - RNA, 17 nt, Human
uuuauucuugugaauau

SEQ ID NO: 2073188 - RNA, 22 nt, Human
uucugauaugcaguuuuccuua

SEQ ID NO: 2073189 - RNA, 13 nt, Human
uucugaugaaucu

SEQ ID NO: 2073190 - RNA, 15 nt, Human
uucugaugaaucuug

SEQ ID NO: 2073191 - RNA, 17 nt, Human
uucugauuagaaaugac

SEQ ID NO: 2073192 - RNA, 14 nt, Human
uucugauuagaaau

SEQ ID NO: 2073193 - RNA, 15 nt, Human
uucugauuagaaaug

SEQ ID NO: 2073194 - RNA, 15 nt, Human
uucugcaaauagaaa

SEQ ID NO: 2073195 - RNA, 17 nt, Human
uucugcaaauagaaaac

SEQ ID NO: 2073196 - RNA, 19 nt, Human
uucugcaaauagaaaacag

SEQ ID NO: 2073197 - RNA, 23 nt, Human
uucugcaaauagaaaacaggaaa

SEQ ID NO: 2073198 - RNA, 14 nt, Human
uucugauuuuaugu

SEQ ID NO: 2073199 - RNA, 16 nt, Human
uucugauuuuauguaa

SEQ ID NO: 2073200 - RNA, 23 nt, Human
uucugauuuuauguaaaauuuug

SEQ ID NO: 2073201 - RNA, 19 nt, Human
uucugccuuugcagaaaca

SEQ ID NO: 2073202 - RNA, 20 nt, Human
uucugccuuugcagaaacag

SEQ ID NO: 2073203 - RNA, 21 nt, Human
uucugcaagcacaucugcauu

SEQ ID NO: 2073204 - RNA, 22 nt, Human
uucugcaagcacaucugcauuu

SEQ ID NO: 2073205 - RNA, 15 nt, Human
uucugcuaccucacu

SEQ ID NO: 2073206 - RNA, 19 nt, Human
uucugcucacauaucuguc

SEQ ID NO: 2073207 - RNA, 16 nt, Human
uucugcuaccucacug

SEQ ID NO: 2073208 - RNA, 21 nt, Human
uucugcuaccucacugggguc

SEQ ID NO: 2073209 - RNA, 20 nt, Human
uucugcuccacccuuggccu

SEQ ID NO: 2073210 - RNA, 17 nt, Human
uucugcuccacccuugg

SEQ ID NO: 2073211 - RNA, 18 nt, Human
uucugcuccacccuuggc

SEQ ID NO: 2073212 - RNA, 9 nt, Human
uucugcucc

SEQ ID NO: 2073213 - RNA, 13 nt, Human
uucugcuccaccc

SEQ ID NO: 2073214 - RNA, 15 nt, Human
uucugcuccacccuu

SEQ ID NO: 2073215 - RNA, 16 nt, Human
uucugcuccacccuug

SEQ ID NO: 2073216 - RNA, 18 nt, Human
uucugacccugcuucaaa

SEQ ID NO: 2073217 - RNA, 21 nt, Human
uucugacccugcuucaaauau

SEQ ID NO: 2073218 - RNA, 14 nt, Human
uucugaguguuuuu

SEQ ID NO: 2073219 - RNA, 18 nt, Human
uucugagaagguccuuaa

SEQ ID NO: 2073220 - RNA, 16 nt, Human
uucucugcccauuccc

SEQ ID NO: 2073221 - RNA, 21 nt, Human
uucucugcccauuccccagcc

SEQ ID NO: 2073222 - RNA, 14 nt, Human
uucugauauagaau

SEQ ID NO: 2073223 - RNA, 18 nt, Human
uucugauauagaauugca

SEQ ID NO: 2073224 - RNA, 20 nt, Human
uucugaguguuuuuacuaca

SEQ ID NO: 2073225 - RNA, 20 nt, Human
uucuacuaaaaauacaaaaa

SEQ ID NO: 2073226 - RNA, 14 nt, Human
uucuaucccaaacu

SEQ ID NO: 2073227 - RNA, 23 nt, Human
uucuaucccaaacuaagcuaugu

SEQ ID NO: 2073228 - RNA, 16 nt, Human
uucuccacccugcucu

SEQ ID NO: 2073229 - RNA, 12 nt, Human
uucuccacugga

SEQ ID NO: 2073230 - RNA, 21 nt, Human
uucuccaccucccacaaagga

SEQ ID NO: 2073231 - RNA, 20 nt, Human
uucucugaggacacuaacca

SEQ ID NO: 2073232 - RNA, 14 nt, Human
uucucugaggacac

SEQ ID NO: 2073233 - RNA, 20 nt, Human
uucucuccugauuauuuauc

SEQ ID NO: 2073234 - RNA, 19 nt, Human
uucuccagacccaccacac

SEQ ID NO: 2073235 - RNA, 17 nt, Human
uucggggaacuccugga

SEQ ID NO: 2073236 - RNA, 15 nt, Human
uuccuuguauuuaaa

SEQ ID NO: 2073237 - RNA, 18 nt, Human
uuccuuguauuuaaauau

SEQ ID NO: 2073238 - RNA, 18 nt, Human
uuccuugcuguccuaggc

SEQ ID NO: 2073239 - RNA, 20 nt, Human
uuccuugcuguccuaggcca

SEQ ID NO: 2073240 - RNA, 16 nt, Human
uuccugcuagaaaugg

SEQ ID NO: 2073241 - RNA, 22 nt, Human
uuccugccuggucuccugcccc

SEQ ID NO: 2073242 - RNA, 15 nt, Human
uuccugccugucucc

SEQ ID NO: 2073243 - RNA, 18 nt, Human
uuccugcagccuggaggc

SEQ ID NO: 2073244 - RNA, 18 nt, Human
uuccugcauucacccaga

SEQ ID NO: 2073245 - RNA, 16 nt, Human
uuccugccugucuccu

SEQ ID NO: 2073246 - RNA, 18 nt, Human
uuccugccugucuccuuu

SEQ ID NO: 2073247 - RNA, 21 nt, Human
uuccugcgggcuuuuccccgg

SEQ ID NO: 2073248 - RNA, 15 nt, Human
uuccuugauaauguu

SEQ ID NO: 2073249 - RNA, 21 nt, Human
uuccuugaguugauucagcuc

SEQ ID NO: 2073250 - RNA, 14 nt, Human
uuccugaaugaaau

SEQ ID NO: 2073251 - RNA, 16 nt, Human
uuccugaaugaaauau

SEQ ID NO: 2073252 - RNA, 14 nt, Human
uuccauggauuuug

SEQ ID NO: 2073253 - RNA, 16 nt, Human
uuccugagcuuggcca

SEQ ID NO: 2073254 - RNA, 11 nt, Human
uuccugagcuu

SEQ ID NO: 2073255 - RNA, 13 nt, Human
uuccugagcuugg

SEQ ID NO: 2073256 - RNA, 20 nt, Human
uuccugagcuuggccagaag

SEQ ID NO: 2073257 - RNA, 15 nt, Human
uuccugcagccugga

SEQ ID NO: 2073258 - RNA, 21 nt, Human
uuccugcagcagagccuggaa

SEQ ID NO: 2073259 - RNA, 14 nt, Human
uuccugcagccugg

SEQ ID NO: 2073260 - RNA, 19 nt, Human
uucuacccagcgagcccug

SEQ ID NO: 2073261 - RNA, 12 nt, Human
uucuacccagcg

SEQ ID NO: 2073262 - RNA, 14 nt, Human
uucuacauuucacc

SEQ ID NO: 2073263 - RNA, 22 nt, Human
uucuacauuucaccuacuuugu

SEQ ID NO: 2073264 - RNA, 18 nt, Human
uucuaccaacuggaagca

SEQ ID NO: 2073265 - RNA, 21 nt, Human
uucuaccacacagcagcaguu

SEQ ID NO: 2073266 - RNA, 16 nt, Human
uucuacaaucuauuua

SEQ ID NO: 2073267 - RNA, 17 nt, Human
uucuacaaucuauuuau

SEQ ID NO: 2073268 - RNA, 15 nt, Human
uucuacagcaaauuu

SEQ ID NO: 2073269 - RNA, 16 nt, Human
uucuacagcaaauuua

SEQ ID NO: 2073270 - RNA, 17 nt, Human
uucuacagcaaauuuau

SEQ ID NO: 2073271 - RNA, 19 nt, Human
uucuacagcaaauuuauaa

SEQ ID NO: 2073272 - RNA, 20 nt, Human
uucuacagcaaauuuauaau

SEQ ID NO: 2073273 - RNA, 21 nt, Human
uucuacagcaaauuuauaauu

SEQ ID NO: 2073274 - RNA, 11 nt, Human
uucuacacucu

SEQ ID NO: 2073275 - RNA, 14 nt, Human
uucuacacucuccu

SEQ ID NO: 2073276 - RNA, 17 nt, Human
uucuacacucuccuggg

SEQ ID NO: 2073277 - RNA, 14 nt, Human
uucuaauugccaug

SEQ ID NO: 2073278 - RNA, 15 nt, Human
uucuaauugccaugu

SEQ ID NO: 2073279 - RNA, 17 nt, Human
uucguggugaucaauua

SEQ ID NO: 2073280 - RNA, 22 nt, Human
uucguggugaucaauuaaaugu

SEQ ID NO: 2073281 - RNA, 23 nt, Human
uucuaaugugugaaucagagcac

SEQ ID NO: 2073282 - RNA, 19 nt, Human
uucguuaacuguguaugua

SEQ ID NO: 2073283 - RNA, 21 nt, Human
uucgugaaguauacuguauuu

SEQ ID NO: 2073284 - RNA, 17 nt, Human
uucgugaaguauacugu

SEQ ID NO: 2073285 - RNA, 18 nt, Human
uucgugaaguauacugua

SEQ ID NO: 2073286 - RNA, 21 nt, Human
uucuacccagcgagcccuggu

SEQ ID NO: 2073287 - RNA, 20 nt, Human
uucuacccagcgagcccugg

SEQ ID NO: 2073288 - RNA, 15 nt, Human
uucuacucauauaua

SEQ ID NO: 2073289 - RNA, 18 nt, Human
uucuaccuugaggucuuu

SEQ ID NO: 2073290 - RNA, 19 nt, Human
uucuaccuugaggucuuuu

SEQ ID NO: 2073291 - RNA, 13 nt, Human
uucuacgccaggg

SEQ ID NO: 2073292 - RNA, 20 nt, Human
uucuauaggaacauaugaaa

SEQ ID NO: 2073293 - RNA, 13 nt, Human
uucuacugcuucu

SEQ ID NO: 2073294 - RNA, 18 nt, Human
uucuacucauauauaucu

SEQ ID NO: 2073295 - RNA, 14 nt, Human
uucuuaguugcugu

SEQ ID NO: 2073296 - RNA, 15 nt, Human
uucuuaguugcugua

SEQ ID NO: 2073297 - RNA, 23 nt, Human
uucuuaguugcuguaugucucgu

SEQ ID NO: 2073298 - RNA, 20 nt, Human
uucuguguguuuucauaaua

SEQ ID NO: 2073299 - RNA, 13 nt, Human
uucugugugaaga

SEQ ID NO: 2073300 - RNA, 13 nt, Human
uucuguguauuua

SEQ ID NO: 2073301 - RNA, 16 nt, Human
uucuguguauuuaauu

SEQ ID NO: 2073302 - RNA, 17 nt, Human
uucuguguauuuaauug

SEQ ID NO: 2073303 - RNA, 20 nt, Human
uucuguguauuuaauuguaa

SEQ ID NO: 2073304 - RNA, 21 nt, Human
uucuguguauuuaauuguaaa

SEQ ID NO: 2073305 - RNA, 22 nt, Human
uucuguguauuuaauuguaaac

SEQ ID NO: 2073306 - RNA, 23 nt, Human
uucuguguauuuaauuguaaacu

SEQ ID NO: 2073307 - RNA, 19 nt, Human
uucuguccuacucuguguc

SEQ ID NO: 2073308 - RNA, 22 nt, Human
uucugucaucuaccuuuucucu

SEQ ID NO: 2073309 - RNA, 16 nt, Human
uucugucucauaugau

SEQ ID NO: 2073310 - RNA, 22 nt, Human
uucuguccuuuuggcacugaga

SEQ ID NO: 2073311 - RNA, 23 nt, Human
uucuguccuuuuggcacugagau

SEQ ID NO: 2073312 - RNA, 18 nt, Human
uucuguauuuuguuuuug

SEQ ID NO: 2073313 - RNA, 15 nt, Human
uucugcuuucaucuu

SEQ ID NO: 2073314 - RNA, 10 nt, Human
uucuggagcc

SEQ ID NO: 2073315 - RNA, 13 nt, Human
uucuggagcccuu

SEQ ID NO: 2073316 - RNA, 15 nt, Human
uucuggagcccuugg

SEQ ID NO: 2073317 - RNA, 19 nt, Human
uucugcuucagccucccga

SEQ ID NO: 2073318 - RNA, 16 nt, Human
uucugcuucagccucc

SEQ ID NO: 2073319 - RNA, 15 nt, Human
uucugcuucagccuc

SEQ ID NO: 2073320 - RNA, 14 nt, Human
uucugcuucagccu

SEQ ID NO: 2073321 - RNA, 13 nt, Human
uucugcuggauaa

SEQ ID NO: 2073322 - RNA, 21 nt, Human
uucugcuggauaaaaugaggu

SEQ ID NO: 2073323 - RNA, 21 nt, Human
uucuucauucaauacaagugu

SEQ ID NO: 2073324 - RNA, 21 nt, Human
uucuuauacauuugauaaagu

SEQ ID NO: 2073325 - RNA, 22 nt, Human
uucuucccuuuuacauacugcu

SEQ ID NO: 2073326 - RNA, 18 nt, Human
uucuucccuuaaaauuua

SEQ ID NO: 2073327 - RNA, 19 nt, Human
uucuucccaucacuggagc

SEQ ID NO: 2073328 - RNA, 20 nt, Human
uucuucccuuuuacauacug

SEQ ID NO: 2073329 - RNA, 21 nt, Human
uucuucccuuuuacauacugc

SEQ ID NO: 2073330 - RNA, 13 nt, Human
uucuuguuuauca

SEQ ID NO: 2073331 - RNA, 23 nt, Human
uucuuguuaguacuauaucuguu

SEQ ID NO: 2073332 - RNA, 13 nt, Human
uucuuguucuguu

SEQ ID NO: 2073333 - RNA, 14 nt, Human
uucuuguucuguuu

SEQ ID NO: 2073334 - RNA, 16 nt, Human
uucuuguucuguuuug

SEQ ID NO: 2073335 - RNA, 13 nt, Human
uucuuccucccuc

SEQ ID NO: 2073336 - RNA, 16 nt, Human
uugaacuccuggccuc

SEQ ID NO: 2073337 - RNA, 15 nt, Human
uugaacuccuggccu

SEQ ID NO: 2073338 - RNA, 14 nt, Human
uugaaaacuacauu

SEQ ID NO: 2073339 - RNA, 15 nt, Human
uugaaaacuacauuu

SEQ ID NO: 2073340 - RNA, 16 nt, Human
uugaaaacuacauuuu

SEQ ID NO: 2073341 - RNA, 20 nt, Human
uugaaaacuacauuuuaaca

SEQ ID NO: 2073342 - RNA, 21 nt, Human
uugaaaacuacauuuuaacau

SEQ ID NO: 2073343 - RNA, 22 nt, Human
uugaaaacuacauuuuaacaug

SEQ ID NO: 2073344 - RNA, 13 nt, Human
uugaaaagacauc

SEQ ID NO: 2073345 - RNA, 13 nt, Human
uugaaaagccaug

SEQ ID NO: 2073346 - RNA, 16 nt, Human
uugaaaagccauguuu

SEQ ID NO: 2073347 - RNA, 19 nt, Human
uugaaaagccauguuuaag

SEQ ID NO: 2073348 - RNA, 20 nt, Human
uugaaaagccauguuuaaga

SEQ ID NO: 2073349 - RNA, 21 nt, Human
uugaaaagccauguuuaagau

SEQ ID NO: 2073350 - RNA, 22 nt, Human
uugaaaagccauguuuaagauu

SEQ ID NO: 2073351 - RNA, 23 nt, Human
uugaaaagccauguuuaagauuu

SEQ ID NO: 2073352 - RNA, 14 nt, Human
uugaaaaaaauugg

SEQ ID NO: 2073353 - RNA, 22 nt, Human
uugaaaaaagaaauucccugga

SEQ ID NO: 2073354 - RNA, 18 nt, Human
uucuuuuuuuucauuaua

SEQ ID NO: 2073355 - RNA, 16 nt, Human
uugaaaaccugacaaa

SEQ ID NO: 2073356 - RNA, 12 nt, Human
uugaaaaagcag

SEQ ID NO: 2073357 - RNA, 22 nt, Human
uugacaagucauuuuaacuuua

SEQ ID NO: 2073358 - RNA, 18 nt, Human
uugacaauaaaugugcuu

SEQ ID NO: 2073359 - RNA, 21 nt, Human
uugaccucaggugauccaccc

SEQ ID NO: 2073360 - RNA, 21 nt, Human
uugacaaguugcgacggagag

SEQ ID NO: 2073361 - RNA, 13 nt, Human
uugacaaacucuc

SEQ ID NO: 2073362 - RNA, 14 nt, Human
uugacaacaaauua

SEQ ID NO: 2073363 - RNA, 16 nt, Human
uugaauuuucaagcau

SEQ ID NO: 2073364 - RNA, 18 nt, Human
uugaauuuucaagcaucu

SEQ ID NO: 2073365 - RNA, 19 nt, Human
uugaauuuucaagcaucuc

SEQ ID NO: 2073366 - RNA, 22 nt, Human
uugaauuuucaagcaucuccug

SEQ ID NO: 2073367 - RNA, 23 nt, Human
uugaauuuucaagcaucuccuga

SEQ ID NO: 2073368 - RNA, 15 nt, Human
uugaacuccugggcu

SEQ ID NO: 2073369 - RNA, 18 nt, Human
uugaacuggguacuugug

SEQ ID NO: 2073370 - RNA, 18 nt, Human
uugaacuuaaauaaaugu

SEQ ID NO: 2073371 - RNA, 22 nt, Human
uugaacuuaaauaaaugucauu

SEQ ID NO: 2073372 - RNA, 12 nt, Human
uugaauuuaaca

SEQ ID NO: 2073373 - RNA, 13 nt, Human
uugaauuuaacaa

SEQ ID NO: 2073374 - RNA, 14 nt, Human
uugaauuuaacaau

SEQ ID NO: 2073375 - RNA, 15 nt, Human
uugaauuuaacaaug

SEQ ID NO: 2073376 - RNA, 16 nt, Human
uugaauuuaacaaugc

SEQ ID NO: 2073377 - RNA, 19 nt, Human
uugaauuuaacaaugcgaa

SEQ ID NO: 2073378 - RNA, 20 nt, Human
uugaauuuaacaaugcgaau

SEQ ID NO: 2073379 - RNA, 19 nt, Human
uugauagcuuuauuuuuua

SEQ ID NO: 2073380 - RNA, 14 nt, Human
uugauagcuuuauu

SEQ ID NO: 2073381 - RNA, 17 nt, Human
uugaggucugcucggcc

SEQ ID NO: 2073382 - RNA, 18 nt, Human
uugauauaaauaaaacau

SEQ ID NO: 2073383 - RNA, 21 nt, Human
uugauauaauuuccauagugu

SEQ ID NO: 2073384 - RNA, 20 nt, Human
uugauauacuuuuuucuuau

SEQ ID NO: 2073385 - RNA, 21 nt, Human
uugauauacuuuuuucuuauu

SEQ ID NO: 2073386 - RNA, 17 nt, Human
uugacuggguuucucug

SEQ ID NO: 2073387 - RNA, 23 nt, Human
uugacuggguuucucuguauagu

SEQ ID NO: 2073388 - RNA, 13 nt, Human
uugagccaggccu

SEQ ID NO: 2073389 - RNA, 17 nt, Human
uugagccaggccugggu

SEQ ID NO: 2073390 - RNA, 22 nt, Human
uugagccaggccugggucugug

SEQ ID NO: 2073391 - RNA, 13 nt, Human
uugagcccaggag

SEQ ID NO: 2073392 - RNA, 11 nt, Human
uugagccuggg

SEQ ID NO: 2073393 - RNA, 13 nt, Human
uugaggguugggc

SEQ ID NO: 2073394 - RNA, 16 nt, Human
uugaggguugggcugg

SEQ ID NO: 2073395 - RNA, 16 nt, Human
uugaggucaaguaaga

SEQ ID NO: 2073396 - RNA, 22 nt, Human
uugaggucaaguaagaagacau

SEQ ID NO: 2073397 - RNA, 21 nt, Human
uugagguaggagaauugcuug

SEQ ID NO: 2073398 - RNA, 18 nt, Human
uugaugaguguaacaaga

SEQ ID NO: 2073399 - RNA, 19 nt, Human
uugaugaguguaacaagaa

SEQ ID NO: 2073400 - RNA, 21 nt, Human
uugaugaguguaacaagaaag

SEQ ID NO: 2073401 - RNA, 22 nt, Human
uugaugaguguaacaagaaagg

SEQ ID NO: 2073402 - RNA, 17 nt, Human
uugaugacccccaacca

SEQ ID NO: 2073403 - RNA, 13 nt, Human
uugaugacuggaa

SEQ ID NO: 2073404 - RNA, 15 nt, Human
uugaugacuggaauu

SEQ ID NO: 2073405 - RNA, 18 nt, Human
uugaugacuggaauuuuu

SEQ ID NO: 2073406 - RNA, 20 nt, Human
uugaugacuggaauuuuuau

SEQ ID NO: 2073407 - RNA, 16 nt, Human
uugaugaucuuugcag

SEQ ID NO: 2073408 - RNA, 13 nt, Human
uugauugcugugu

SEQ ID NO: 2073409 - RNA, 15 nt, Human
uugauugcugugucc

SEQ ID NO: 2073410 - RNA, 12 nt, Human
uugcaaauaguc

SEQ ID NO: 2073411 - RNA, 13 nt, Human
uugauuuuacaau

SEQ ID NO: 2073412 - RNA, 23 nt, Human
uugauuuuacaauugaaaugacu

SEQ ID NO: 2073413 - RNA, 19 nt, Human
uucagauauaaaagacuga

SEQ ID NO: 2073414 - RNA, 14 nt, Human
uucagauauaaaag

SEQ ID NO: 2073415 - RNA, 15 nt, Human
uucagauauaaaaga

SEQ ID NO: 2073416 - RNA, 12 nt, Human
uucagauauaaa

SEQ ID NO: 2073417 - RNA, 12 nt, Human
uucagauacaug

SEQ ID NO: 2073418 - RNA, 13 nt, Human
uucacggaagagc

SEQ ID NO: 2073419 - RNA, 21 nt, Human
uucacgccuguaaucccagca

SEQ ID NO: 2073420 - RNA, 23 nt, Human
uucacgccuguaaucccagcacu

SEQ ID NO: 2073421 - RNA, 18 nt, Human
uucaccuauuucaaaaau

SEQ ID NO: 2073422 - RNA, 17 nt, Human
uucacggaagagccuug

SEQ ID NO: 2073423 - RNA, 14 nt, Human
uucacaacccaucu

SEQ ID NO: 2073424 - RNA, 11 nt, Human
uucaauauuua

SEQ ID NO: 2073425 - RNA, 20 nt, Human
uucaauaagcaucaaacucu

SEQ ID NO: 2073426 - RNA, 22 nt, Human
uucacccuguccaaacugccua

SEQ ID NO: 2073427 - RNA, 21 nt, Human
uucaccuaagucucugugaau

SEQ ID NO: 2073428 - RNA, 17 nt, Human
uucaccuaagucucugu

SEQ ID NO: 2073429 - RNA, 19 nt, Human
uucaccuaagucucuguga

SEQ ID NO: 2073430 - RNA, 21 nt, Human
uucacaaccuucuguggcuca

SEQ ID NO: 2073431 - RNA, 15 nt, Human
uucaaccauucccca

SEQ ID NO: 2073432 - RNA, 19 nt, Human
uucaaccacuguaaaauga

SEQ ID NO: 2073433 - RNA, 21 nt, Human
uucaacaucaauguucauugu

SEQ ID NO: 2073434 - RNA, 14 nt, Human
uucaacaucaaugu

SEQ ID NO: 2073435 - RNA, 15 nt, Human
uucaacaucaauguu

SEQ ID NO: 2073436 - RNA, 16 nt, Human
uucaacaucaauguuc

SEQ ID NO: 2073437 - RNA, 19 nt, Human
uucaacaucaauguucauu

SEQ ID NO: 2073438 - RNA, 22 nt, Human
uucaacaucaauguucauugua

SEQ ID NO: 2073439 - RNA, 18 nt, Human
uucaaauugagagaaugg

SEQ ID NO: 2073440 - RNA, 18 nt, Human
uuauuuuauuuuagcagu

SEQ ID NO: 2073441 - RNA, 22 nt, Human
uuauuuuggaaaauaaauuauu

SEQ ID NO: 2073442 - RNA, 14 nt, Human
uuauuuucaccugu

SEQ ID NO: 2073443 - RNA, 19 nt, Human
uucaaaugggcugcugcuu

SEQ ID NO: 2073444 - RNA, 18 nt, Human
uuauuacccuucuuucca

SEQ ID NO: 2073445 - RNA, 22 nt, Human
uuauuagccagguaaugugaau

SEQ ID NO: 2073446 - RNA, 20 nt, Human
uuauuaguaagaaaacauca

SEQ ID NO: 2073447 - RNA, 19 nt, Human
uuauuucuuaaacaaaugu

SEQ ID NO: 2073448 - RNA, 20 nt, Human
uuauuaguaaaugcuuauca

SEQ ID NO: 2073449 - RNA, 19 nt, Human
uuauuugggguugcaucag

SEQ ID NO: 2073450 - RNA, 21 nt, Human
uuauuugggguugcaucagaa

SEQ ID NO: 2073451 - RNA, 15 nt, Human
uuauuugcagagaca

SEQ ID NO: 2073452 - RNA, 18 nt, Human
uuauuugcagagacagga

SEQ ID NO: 2073453 - RNA, 13 nt, Human
uuccagagccuca

SEQ ID NO: 2073454 - RNA, 20 nt, Human
uuccaucauaauucuaaucu

SEQ ID NO: 2073455 - RNA, 18 nt, Human
uuccauauauuagcauuu

SEQ ID NO: 2073456 - RNA, 14 nt, Human
uuccauaugcuguu

SEQ ID NO: 2073457 - RNA, 20 nt, Human
uuccaaagcacauugaaaga

SEQ ID NO: 2073458 - RNA, 19 nt, Human
uuccaaagcacauugaaag

SEQ ID NO: 2073459 - RNA, 23 nt, Human
uuccaacagcucaagucuucccu

SEQ ID NO: 2073460 - RNA, 19 nt, Human
uucaugccaccauggccag

SEQ ID NO: 2073461 - RNA, 15 nt, Human
uucauuuuuccuaac

SEQ ID NO: 2073462 - RNA, 13 nt, Human
uucauuuuuccua

SEQ ID NO: 2073463 - RNA, 22 nt, Human
uucaugccaccauggccagcca

SEQ ID NO: 2073464 - RNA, 14 nt, Human
uucaugccuuugua

SEQ ID NO: 2073465 - RNA, 15 nt, Human
uucaugccuuuguaa

SEQ ID NO: 2073466 - RNA, 17 nt, Human
uucaugccuuuguaagu

SEQ ID NO: 2073467 - RNA, 18 nt, Human
uucaugccuuuguaaguu

SEQ ID NO: 2073468 - RNA, 21 nt, Human
uucaugccuuuguaaguuauu

SEQ ID NO: 2073469 - RNA, 14 nt, Human
uucaguuaagaaaa

SEQ ID NO: 2073470 - RNA, 15 nt, Human
uucaguuaagaaaaa

SEQ ID NO: 2073471 - RNA, 16 nt, Human
uucaguuaagaaaaaa

SEQ ID NO: 2073472 - RNA, 17 nt, Human
uucaguuaagaaaaaaa

SEQ ID NO: 2073473 - RNA, 18 nt, Human
uucaguuaagaaaaaaau

SEQ ID NO: 2073474 - RNA, 21 nt, Human
uucaguuaagaaaaaaauaau

SEQ ID NO: 2073475 - RNA, 16 nt, Human
uucaguugaucacugg

SEQ ID NO: 2073476 - RNA, 18 nt, Human
uucaguugaucacuggca

SEQ ID NO: 2073477 - RNA, 15 nt, Human
uucauaaccuagccu

SEQ ID NO: 2073478 - RNA, 15 nt, Human
uucauaacagugcca

SEQ ID NO: 2073479 - RNA, 17 nt, Human
uucauaacagugccauu

SEQ ID NO: 2073480 - RNA, 18 nt, Human
uucauaacagugccauug

SEQ ID NO: 2073481 - RNA, 21 nt, Human
uucauaacagugccauugucu

SEQ ID NO: 2073482 - RNA, 22 nt, Human
uucauaacagugccauugucuu

SEQ ID NO: 2073483 - RNA, 14 nt, Human
uucauaacuuucau

SEQ ID NO: 2073484 - RNA, 18 nt, Human
uucauccggcagccugga

SEQ ID NO: 2073485 - RNA, 17 nt, Human
uucauaacuuucauuaa

SEQ ID NO: 2073486 - RNA, 13 nt, Human
uucauccuuagca

SEQ ID NO: 2073487 - RNA, 16 nt, Human
uucaguggcagcugcu

SEQ ID NO: 2073488 - RNA, 15 nt, Human
uucaguggcagcugc

SEQ ID NO: 2073489 - RNA, 17 nt, Human
uucaguggcagcugcuu

SEQ ID NO: 2073490 - RNA, 14 nt, Human
uucagugggagaaa

SEQ ID NO: 2073491 - RNA, 12 nt, Human
uucaguguacau

SEQ ID NO: 2073492 - RNA, 13 nt, Human
uucaguguacaug

SEQ ID NO: 2073493 - RNA, 15 nt, Human
uucagcuccagcuca

SEQ ID NO: 2073494 - RNA, 12 nt, Human
uucagcuccagc

SEQ ID NO: 2073495 - RNA, 22 nt, Human
uucagcuccagcucaccagccc

SEQ ID NO: 2073496 - RNA, 14 nt, Human
uucaguggcagcug

SEQ ID NO: 2073497 - RNA, 22 nt, Human
uucagcuuguaaauagcucagg

SEQ ID NO: 2073498 - RNA, 16 nt, Human
uuaugauuuuuaaaga

SEQ ID NO: 2073499 - RNA, 19 nt, Human
uuaugauuuuuaaagaaaa

SEQ ID NO: 2073500 - RNA, 19 nt, Human
uuauggaagauuuuaaauu

SEQ ID NO: 2073501 - RNA, 22 nt, Human
uuauggaagauuuuaaauucac

SEQ ID NO: 2073502 - RNA, 17 nt, Human
uuauguuguauagauua

SEQ ID NO: 2073503 - RNA, 19 nt, Human
uuauuaacaaauuauguua

SEQ ID NO: 2073504 - RNA, 15 nt, Human
uuauguuuuguuucu

SEQ ID NO: 2073505 - RNA, 16 nt, Human
uuauguuuuguuucug

SEQ ID NO: 2073506 - RNA, 19 nt, Human
uuauguuuuguuucugaaa

SEQ ID NO: 2073507 - RNA, 23 nt, Human
uuauuaagauggauucucagaua

SEQ ID NO: 2073508 - RNA, 17 nt, Human
uuauuaagauggauucu

SEQ ID NO: 2073509 - RNA, 19 nt, Human
uuauuaagauggauucuca

SEQ ID NO: 2073510 - RNA, 20 nt, Human
uuauuaagauggauucucag

SEQ ID NO: 2073511 - RNA, 21 nt, Human
uuauuaagauggauucucaga

SEQ ID NO: 2073512 - RNA, 15 nt, Human
uuauuacauccuugu

SEQ ID NO: 2073513 - RNA, 17 nt, Human
uuauuacauccuugugg

SEQ ID NO: 2073514 - RNA, 18 nt, Human
uuauuacauccuuguggc

SEQ ID NO: 2073515 - RNA, 19 nt, Human
uuauuacauccuuguggca

SEQ ID NO: 2073516 - RNA, 20 nt, Human
uuauuacauccuuguggcac

SEQ ID NO: 2073517 - RNA, 21 nt, Human
uuauuacauccuuguggcaca

SEQ ID NO: 2073518 - RNA, 12 nt, Human
uuauuacaucuu

SEQ ID NO: 2073519 - RNA, 18 nt, Human
uuauuacaucuuucacau

SEQ ID NO: 2073520 - RNA, 13 nt, Human
uuauuaccucuga

SEQ ID NO: 2073521 - RNA, 12 nt, Human
uuauuaccucug

SEQ ID NO: 2073522 - RNA, 15 nt, Human
uuauuaccucugaua

SEQ ID NO: 2073523 - RNA, 14 nt, Human
uuauuacuuauuug

SEQ ID NO: 2073524 - RNA, 13 nt, Human
uuauauugcaaug

SEQ ID NO: 2073525 - RNA, 14 nt, Human
uuauauugagacaa

SEQ ID NO: 2073526 - RNA, 15 nt, Human
uuauauugagacaaa

SEQ ID NO: 2073527 - RNA, 18 nt, Human
uuauauugagacaaaaau

SEQ ID NO: 2073528 - RNA, 19 nt, Human
uuauccuaaaacaaauagu

SEQ ID NO: 2073529 - RNA, 23 nt, Human
uuaucccuuccuuuuagccuagu

SEQ ID NO: 2073530 - RNA, 14 nt, Human
uuaucgaaacucau

SEQ ID NO: 2073531 - RNA, 15 nt, Human
uuaucggaagcagug

SEQ ID NO: 2073532 - RNA, 21 nt, Human
uuaucgccuuuugacagcugu

SEQ ID NO: 2073533 - RNA, 14 nt, Human
uuaucggaagcagu

SEQ ID NO: 2073534 - RNA, 16 nt, Human
uuaucggaagcagugc

SEQ ID NO: 2073535 - RNA, 14 nt, Human
uuaucgggaacagu

SEQ ID NO: 2073536 - RNA, 16 nt, Human
uuaucgggaacagugu

SEQ ID NO: 2073537 - RNA, 17 nt, Human
uuaucgggaacaguguu

SEQ ID NO: 2073538 - RNA, 23 nt, Human
uuaucgggaacaguguuucccau

SEQ ID NO: 2073539 - RNA, 16 nt, Human
uuaucgggagcagugu

SEQ ID NO: 2073540 - RNA, 18 nt, Human
uuaucgggagcagugucu

SEQ ID NO: 2073541 - RNA, 19 nt, Human
uuaucgggagcagugucuu

SEQ ID NO: 2073542 - RNA, 21 nt, Human
uuaucgggagcagugucuucc

SEQ ID NO: 2073543 - RNA, 23 nt, Human
uuaucgggagcagugucuuccau

SEQ ID NO: 2073544 - RNA, 22 nt, Human
uuaucuaaucaugaaacucccu

SEQ ID NO: 2073545 - RNA, 18 nt, Human
uuaucuaaucaugaaacu

SEQ ID NO: 2073546 - RNA, 15 nt, Human
uuaucuauuguaaga

SEQ ID NO: 2073547 - RNA, 16 nt, Human
uuaucuauuguaagau

SEQ ID NO: 2073548 - RNA, 17 nt, Human
uuaucuauuguaagaua

SEQ ID NO: 2073549 - RNA, 18 nt, Human
uuaucuauuguaagauaa

SEQ ID NO: 2073550 - RNA, 21 nt, Human
uuaucuauuguaagauaaaaa

SEQ ID NO: 2073551 - RNA, 13 nt, Human
uuaucuauuugua

SEQ ID NO: 2073552 - RNA, 21 nt, Human
uuaucuauuuguauauauaca

SEQ ID NO: 2073553 - RNA, 22 nt, Human
uuaucuauuuguauauauacau

SEQ ID NO: 2073554 - RNA, 21 nt, Human
uuaucuccccuucacaugcau

SEQ ID NO: 2073555 - RNA, 16 nt, Human
uuaucuuaaaacuccu

SEQ ID NO: 2073556 - RNA, 15 nt, Human
uuaucuuaaagcacu

SEQ ID NO: 2073557 - RNA, 16 nt, Human
uuaucuuacaaagugu

SEQ ID NO: 2073558 - RNA, 20 nt, Human
uuaucuucaggacacucacu

SEQ ID NO: 2073559 - RNA, 18 nt, Human
uuauaauaauguuaacau

SEQ ID NO: 2073560 - RNA, 15 nt, Human
uuauaauaauguuaa

SEQ ID NO: 2073561 - RNA, 20 nt, Human
uuauaaucuuccauacuucu

SEQ ID NO: 2073562 - RNA, 15 nt, Human
uuauaaugaaugaaa

SEQ ID NO: 2073563 - RNA, 14 nt, Human
uuauaagcagauuu

SEQ ID NO: 2073564 - RNA, 16 nt, Human
uuauaagcagauuuaa

SEQ ID NO: 2073565 - RNA, 11 nt, Human
uuauaaggacu

SEQ ID NO: 2073566 - RNA, 13 nt, Human
uuauaaggacugc

SEQ ID NO: 2073567 - RNA, 15 nt, Human
uuauaaggacugcau

SEQ ID NO: 2073568 - RNA, 16 nt, Human
uuauaaggacugcaug

SEQ ID NO: 2073569 - RNA, 17 nt, Human
uuauaaggacugcaugg

SEQ ID NO: 2073570 - RNA, 22 nt, Human
uuauaaggacugcaugguaauu

SEQ ID NO: 2073571 - RNA, 13 nt, Human
uuaguguaaaaau

SEQ ID NO: 2073572 - RNA, 14 nt, Human
uuaguguaaaaaug

SEQ ID NO: 2073573 - RNA, 15 nt, Human
uuaguguaaaaauga

SEQ ID NO: 2073574 - RNA, 17 nt, Human
uuaguguaaaaaugaga

SEQ ID NO: 2073575 - RNA, 18 nt, Human
uuaguguaaaaaugagaa

SEQ ID NO: 2073576 - RNA, 14 nt, Human
uuagugucacuuac

SEQ ID NO: 2073577 - RNA, 23 nt, Human
uuagugucacuuaccuagauuua

SEQ ID NO: 2073578 - RNA, 17 nt, Human
uuagugcggacaaguuu

SEQ ID NO: 2073579 - RNA, 19 nt, Human
uuagugcggacaaguuuua

SEQ ID NO: 2073580 - RNA, 18 nt, Human
uuagucuucucauagcau

SEQ ID NO: 2073581 - RNA, 13 nt, Human
uuagucuucucau

SEQ ID NO: 2073582 - RNA, 14 nt, Human
uuagucuucucaua

SEQ ID NO: 2073583 - RNA, 21 nt, Human
ugugaaaagaaaaaugagccu

SEQ ID NO: 2073584 - RNA, 17 nt, Human
ugugaaaagaaaaauga

SEQ ID NO: 2073585 - RNA, 13 nt, Human
ugugaaaagaaaa

SEQ ID NO: 2073586 - RNA, 15 nt, Human
ugugaaaagaaaaau

SEQ ID NO: 2073587 - RNA, 14 nt, Human
uuauauuccauaua

SEQ ID NO: 2073588 - RNA, 16 nt, Human
uuauauuccauauauu

SEQ ID NO: 2073589 - RNA, 21 nt, Human
uuauauuccauauauuagcau

SEQ ID NO: 2073590 - RNA, 15 nt, Human
uuauauguauccagu

SEQ ID NO: 2073591 - RNA, 20 nt, Human
uuauauguauccaguacauu

SEQ ID NO: 2073592 - RNA, 21 nt, Human
uuauauguauccaguacauuu

SEQ ID NO: 2073593 - RNA, 22 nt, Human
uuauauguauccaguacauuua

SEQ ID NO: 2073594 - RNA, 23 nt, Human
uuauauguauccaguacauuuaa

SEQ ID NO: 2073595 - RNA, 13 nt, Human
uuauaugaacaua

SEQ ID NO: 2073596 - RNA, 21 nt, Human
uuauacaggggaauauuuuau

SEQ ID NO: 2073597 - RNA, 15 nt, Human
uuauacaguuuuaaa

SEQ ID NO: 2073598 - RNA, 16 nt, Human
uuauacaguuuuaaag

SEQ ID NO: 2073599 - RNA, 18 nt, Human
uuauacaguuuuaaagaa

SEQ ID NO: 2073600 - RNA, 19 nt, Human
uuauacaguuuuaaagaau

SEQ ID NO: 2073601 - RNA, 21 nt, Human
uuauacaguuuuaaagaauca

SEQ ID NO: 2073602 - RNA, 12 nt, Human
uuauacaguaca

SEQ ID NO: 2073603 - RNA, 17 nt, Human
uuauacaguagugagaa

SEQ ID NO: 2073604 - RNA, 21 nt, Human
uuauacaguagugagaagaau

SEQ ID NO: 2073605 - RNA, 23 nt, Human
uuauauauuuauaacucaucaua

SEQ ID NO: 2073606 - RNA, 13 nt, Human
uuauauauuuaua

SEQ ID NO: 2073607 - RNA, 14 nt, Human
uuauauauuuauaa

SEQ ID NO: 2073608 - RNA, 15 nt, Human
uuauauauuuauaac

SEQ ID NO: 2073609 - RNA, 20 nt, Human
uuauauauuuauaacucauc

SEQ ID NO: 2073610 - RNA, 19 nt, Human
uuauaucaguccucuuuca

SEQ ID NO: 2073611 - RNA, 18 nt, Human
uuauacagcucagcuuuu

SEQ ID NO: 2073612 - RNA, 15 nt, Human
uuauacaauaucauc

SEQ ID NO: 2073613 - RNA, 16 nt, Human
uuauaauuuuuuucaa

SEQ ID NO: 2073614 - RNA, 15 nt, Human
uuauaauuuuaagau

SEQ ID NO: 2073615 - RNA, 18 nt, Human
uuauaauuuuaagauucc

SEQ ID NO: 2073616 - RNA, 21 nt, Human
uuauaauuuuaagauuccuuu

SEQ ID NO: 2073617 - RNA, 15 nt, Human
aaaaaauauuuuccu

SEQ ID NO: 2073618 - RNA, 11 nt, Human
aaaaaaugucc

SEQ ID NO: 2073619 - RNA, 19 nt, Human
aaaaaaugaaauguuuuaa

SEQ ID NO: 2073620 - RNA, 14 nt, Human
aaaaaaugcucaca

SEQ ID NO: 2073621 - RNA, 22 nt, Human
aaaaaauuagaaauuggcugga

SEQ ID NO: 2073622 - RNA, 13 nt, Human
aaaaacuacacau

SEQ ID NO: 2073623 - RNA, 14 nt, Human
aaaaacagaggcca

SEQ ID NO: 2073624 - RNA, 15 nt, Human
aaaaacagcauugcu

SEQ ID NO: 2073625 - RNA, 17 nt, Human
aaaaacagcauugcuuu

SEQ ID NO: 2073626 - RNA, 14 nt, Human
acuauuuuucagaa

SEQ ID NO: 2073627 - RNA, 15 nt, Human
acuauuuaucugugu

SEQ ID NO: 2073628 - RNA, 18 nt, Human
acuauuuuucagaaucuc

SEQ ID NO: 2073629 - RNA, 13 nt, Human
acucaaaagcugg

SEQ ID NO: 2073630 - RNA, 20 nt, Human
acuauuuaguuuuuguaauu

SEQ ID NO: 2073631 - RNA, 21 nt, Human
acuauuuaguuuuuguaauuu

SEQ ID NO: 2073632 - RNA, 23 nt, Human
acuauuuaguuuuuguaauuuau

SEQ ID NO: 2073633 - RNA, 12 nt, Human
acuauuuaucug

SEQ ID NO: 2073634 - RNA, 14 nt, Human
acuagugcugaagc

SEQ ID NO: 2073635 - RNA, 15 nt, Human
acuagugcugaagcu

SEQ ID NO: 2073636 - RNA, 16 nt, Human
acuagugcugaagcuu

SEQ ID NO: 2073637 - RNA, 14 nt, Human
acuagucugugugc

SEQ ID NO: 2073638 - RNA, 15 nt, Human
acuagucugugugcu

SEQ ID NO: 2073639 - RNA, 23 nt, Human
acuagugacaagcuccuggucuu

SEQ ID NO: 2073640 - RNA, 17 nt, Human
acuagugcugaagcuua

SEQ ID NO: 2073641 - RNA, 18 nt, Human
acuagugcugaagcuuau

SEQ ID NO: 2073642 - RNA, 13 nt, Human
acuaguuacacau

SEQ ID NO: 2073643 - RNA, 19 nt, Human
acuagugcugaagcuuauu

SEQ ID NO: 2073644 - RNA, 15 nt, Human
acuaguguugcuugg

SEQ ID NO: 2073645 - RNA, 19 nt, Human
acucaguccauagcagaga

SEQ ID NO: 2073646 - RNA, 18 nt, Human
acucagggccccagcacu

SEQ ID NO: 2073647 - RNA, 22 nt, Human
acucagggccccagcacuaaag

SEQ ID NO: 2073648 - RNA, 17 nt, Human
acucaggaugcccaggg

SEQ ID NO: 2073649 - RNA, 20 nt, Human
acucagguuguaguaaagaa

SEQ ID NO: 2073650 - RNA, 21 nt, Human
acucagguuguaguaaagaaa

SEQ ID NO: 2073651 - RNA, 22 nt, Human
acucagguuguaguaaagaaau

SEQ ID NO: 2073652 - RNA, 23 nt, Human
acucagguuguaguaaagaaauu

SEQ ID NO: 2073653 - RNA, 15 nt, Human
acucagggccccagc

SEQ ID NO: 2073654 - RNA, 15 nt, Human
acucaggaugcccag

SEQ ID NO: 2073655 - RNA, 16 nt, Human
acucaggaugcccagg

SEQ ID NO: 2073656 - RNA, 18 nt, Human
acucaggaugcccagggc

SEQ ID NO: 2073657 - RNA, 20 nt, Human
acucaggaggcugaggcaga

SEQ ID NO: 2073658 - RNA, 17 nt, Human
acucaggaggcugaggg

SEQ ID NO: 2073659 - RNA, 18 nt, Human
acucaggaggcugagggg

SEQ ID NO: 2073660 - RNA, 14 nt, Human
acucaggaugccca

SEQ ID NO: 2073661 - RNA, 12 nt, Human
acucaggacucc

SEQ ID NO: 2073662 - RNA, 14 nt, Human
acucaggacuccag

SEQ ID NO: 2073663 - RNA, 15 nt, Human
acucaggacuccagc

SEQ ID NO: 2073664 - RNA, 16 nt, Human
acucaggacuccagcc

SEQ ID NO: 2073665 - RNA, 17 nt, Human
acucaggacuccagccc

SEQ ID NO: 2073666 - RNA, 13 nt, Human
acucaggaggcug

SEQ ID NO: 2073667 - RNA, 14 nt, Human
acucaggaggcuga

SEQ ID NO: 2073668 - RNA, 16 nt, Human
acucaggaggcugagg

SEQ ID NO: 2073669 - RNA, 17 nt, Human
acucaggaggcugaggc

SEQ ID NO: 2073670 - RNA, 18 nt, Human
acucaggaggcugaggca

SEQ ID NO: 2073671 - RNA, 19 nt, Human
acucaggaggcugaggcag

SEQ ID NO: 2073672 - RNA, 11 nt, Human
acucagcccug

SEQ ID NO: 2073673 - RNA, 14 nt, Human
acucagcccugagg

SEQ ID NO: 2073674 - RNA, 20 nt, Human
acucagccaaccuuacuuac

SEQ ID NO: 2073675 - RNA, 22 nt, Human
acucagcagcccuccucacccc

SEQ ID NO: 2073676 - RNA, 23 nt, Human
acucagcagcccuccucaccccg

SEQ ID NO: 2073677 - RNA, 18 nt, Human
acucagcagcccuccuca

SEQ ID NO: 2073678 - RNA, 19 nt, Human
acucagcagcccuccucac

SEQ ID NO: 2073679 - RNA, 20 nt, Human
acucagcagcccuccucacc

SEQ ID NO: 2073680 - RNA, 21 nt, Human
acucagcagcccuccucaccc

SEQ ID NO: 2073681 - RNA, 23 nt, Human
acucuauggguaucaaacagcuc

SEQ ID NO: 2073682 - RNA, 19 nt, Human
acucugucgcccagucugg

SEQ ID NO: 2073683 - RNA, 14 nt, Human
acucugucagaugg

SEQ ID NO: 2073684 - RNA, 16 nt, Human
acucugucagauggga

SEQ ID NO: 2073685 - RNA, 17 nt, Human
acucuaggugcccuugg

SEQ ID NO: 2073686 - RNA, 15 nt, Human
acucuagggaaaaac

SEQ ID NO: 2073687 - RNA, 17 nt, Human
acucuagggaaaaacca

SEQ ID NO: 2073688 - RNA, 22 nt, Human
acgcauggaguguguauuguuc

SEQ ID NO: 2073689 - RNA, 19 nt, Human
acgucgucuucuguauacu

SEQ ID NO: 2073690 - RNA, 14 nt, Human
acgucugacaggca

SEQ ID NO: 2073691 - RNA, 13 nt, Human
acgucugacaggc

SEQ ID NO: 2073692 - RNA, 20 nt, Human
acguccugccaccuggggca

SEQ ID NO: 2073693 - RNA, 17 nt, Human
acgcuuucuagcuguug

SEQ ID NO: 2073694 - RNA, 23 nt, Human
acgcugucuccagacccccaccc

SEQ ID NO: 2073695 - RNA, 20 nt, Human
acgcugucuccagaccccca

SEQ ID NO: 2073696 - RNA, 21 nt, Human
acgcugucuccagacccccac

SEQ ID NO: 2073697 - RNA, 22 nt, Human
acgcugucuccagacccccacc

SEQ ID NO: 2073698 - RNA, 15 nt, Human
acggaaaaugccaau

SEQ ID NO: 2073699 - RNA, 18 nt, Human
acggaaaaugccaaucuc

SEQ ID NO: 2073700 - RNA, 19 nt, Human
acggaaaaugccaaucucu

SEQ ID NO: 2073701 - RNA, 17 nt, Human
acggaacguuggacuuu

SEQ ID NO: 2073702 - RNA, 16 nt, Human
acgugacagugccugg

SEQ ID NO: 2073703 - RNA, 19 nt, Human
acgugacagugccugggaa

SEQ ID NO: 2073704 - RNA, 17 nt, Human
acgugacagugccuggg

SEQ ID NO: 2073705 - RNA, 14 nt, Human
acgugacugcccca

SEQ ID NO: 2073706 - RNA, 18 nt, Human
acgugacugccccaacuc

SEQ ID NO: 2073707 - RNA, 20 nt, Human
acgugacugccccaacuccu

SEQ ID NO: 2073708 - RNA, 21 nt, Human
acgugacuguggcacacgccu

SEQ ID NO: 2073709 - RNA, 14 nt, Human
acgugagagugucu

SEQ ID NO: 2073710 - RNA, 15 nt, Human
acgugagagugucuu

SEQ ID NO: 2073711 - RNA, 23 nt, Human
acgugagagugucuucacggcag

SEQ ID NO: 2073712 - RNA, 14 nt, Human
acuaagaaaagaua

SEQ ID NO: 2073713 - RNA, 17 nt, Human
acuaacuugacuuuuaa

SEQ ID NO: 2073714 - RNA, 20 nt, Human
acuaauuggccucuuuaaga

SEQ ID NO: 2073715 - RNA, 10 nt, Human
accucugggc

SEQ ID NO: 2073716 - RNA, 18 nt, Human
accuuggcugcagggagu

SEQ ID NO: 2073717 - RNA, 17 nt, Human
accuuggcugcagggag

SEQ ID NO: 2073718 - RNA, 13 nt, Human
accuuucccaucu

SEQ ID NO: 2073719 - RNA, 18 nt, Human
accuuucccaucuuccaa

SEQ ID NO: 2073720 - RNA, 15 nt, Human
accuuucccuaaaga

SEQ ID NO: 2073721 - RNA, 18 nt, Human
accuuuauuaaaaucuua

SEQ ID NO: 2073722 - RNA, 20 nt, Human
accuuuauuaaaaucuuaaa

SEQ ID NO: 2073723 - RNA, 15 nt, Human
accuuuaugguuucu

SEQ ID NO: 2073724 - RNA, 14 nt, Human
accuuuauuaaaau

SEQ ID NO: 2073725 - RNA, 15 nt, Human
accuuuauuaaaauc

SEQ ID NO: 2073726 - RNA, 16 nt, Human
accuuuauuaaaaucu

SEQ ID NO: 2073727 - RNA, 17 nt, Human
accuuuauuaaaaucuu

SEQ ID NO: 2073728 - RNA, 11 nt, Human
accuguccaau

SEQ ID NO: 2073729 - RNA, 13 nt, Human
accugucccaccu

SEQ ID NO: 2073730 - RNA, 14 nt, Human
accugucccaccuc

SEQ ID NO: 2073731 - RNA, 15 nt, Human
accugucccaccuca

SEQ ID NO: 2073732 - RNA, 12 nt, Human
accugucgccca

SEQ ID NO: 2073733 - RNA, 14 nt, Human
accugucgcccagu

SEQ ID NO: 2073734 - RNA, 16 nt, Human
accugucgcccagugc

SEQ ID NO: 2073735 - RNA, 13 nt, Human
accugucucacca

SEQ ID NO: 2073736 - RNA, 14 nt, Human
accuguccuugcac

SEQ ID NO: 2073737 - RNA, 14 nt, Human
accugucucagccu

SEQ ID NO: 2073738 - RNA, 23 nt, Human
accucuggacuggcuagaguccu

SEQ ID NO: 2073739 - RNA, 14 nt, Human
accucuggacuggc

SEQ ID NO: 2073740 - RNA, 15 nt, Human
accucuggacuggcu

SEQ ID NO: 2073741 - RNA, 16 nt, Human
accucuggacuggcua

SEQ ID NO: 2073742 - RNA, 19 nt, Human
accucuggacuggcuagag

SEQ ID NO: 2073743 - RNA, 18 nt, Human
accugucaccgugagcag

SEQ ID NO: 2073744 - RNA, 19 nt, Human
accugucaccgugagcagc

SEQ ID NO: 2073745 - RNA, 12 nt, Human
accugccgaccu

SEQ ID NO: 2073746 - RNA, 13 nt, Human
accugccgaccuc

SEQ ID NO: 2073747 - RNA, 17 nt, Human
accugccgaccucgucc

SEQ ID NO: 2073748 - RNA, 18 nt, Human
accugccgaccucguccu

SEQ ID NO: 2073749 - RNA, 20 nt, Human
accugccgaccucguccucc

SEQ ID NO: 2073750 - RNA, 23 nt, Human
acugugccuuugaguuuccucag

SEQ ID NO: 2073751 - RNA, 11 nt, Human
acugugccuuu

SEQ ID NO: 2073752 - RNA, 12 nt, Human
acugugaccugu

SEQ ID NO: 2073753 - RNA, 23 nt, Human
acugucucaagagggcacuggug

SEQ ID NO: 2073754 - RNA, 18 nt, Human
acugucucaguuucacuu

SEQ ID NO: 2073755 - RNA, 21 nt, Human
acugucucaagagggcacugg

SEQ ID NO: 2073756 - RNA, 20 nt, Human
acugucucaagagggcacug

SEQ ID NO: 2073757 - RNA, 19 nt, Human
acugucucaagagggcacu

SEQ ID NO: 2073758 - RNA, 22 nt, Human
acugguuuguugcagccaaaga

SEQ ID NO: 2073759 - RNA, 20 nt, Human
acugguuguugccaaacagc

SEQ ID NO: 2073760 - RNA, 17 nt, Human
acuggaagcacagcuuc

SEQ ID NO: 2073761 - RNA, 19 nt, Human
acuggaagcacagcuucau

SEQ ID NO: 2073762 - RNA, 19 nt, Human
acuggaagcauguaggaga

SEQ ID NO: 2073763 - RNA, 20 nt, Human
acuggaagcauguaggagaa

SEQ ID NO: 2073764 - RNA, 18 nt, Human
acugccccaacuccugga

SEQ ID NO: 2073765 - RNA, 21 nt, Human
acugccccaacuccuggaagc

SEQ ID NO: 2073766 - RNA, 15 nt, Human
acugccccaacuccu

SEQ ID NO: 2073767 - RNA, 17 nt, Human
acugccccaacuccugg

SEQ ID NO: 2073768 - RNA, 16 nt, Human
acuggagcccaggagu

SEQ ID NO: 2073769 - RNA, 13 nt, Human
acuggagcccagg

SEQ ID NO: 2073770 - RNA, 14 nt, Human
acuggagcccagga

SEQ ID NO: 2073771 - RNA, 18 nt, Human
acuggagacaaugcagau

SEQ ID NO: 2073772 - RNA, 21 nt, Human
acuggagacaaugcagaugcc

SEQ ID NO: 2073773 - RNA, 21 nt, Human
acuggaagcauguaggagaau

SEQ ID NO: 2073774 - RNA, 17 nt, Human
acuggagaagucuuaga

SEQ ID NO: 2073775 - RNA, 12 nt, Human
acuggagcccag

SEQ ID NO: 2073776 - RNA, 19 nt, Human
acuggagcaccaggcacga

SEQ ID NO: 2073777 - RNA, 14 nt, Human
acuggagagcaaca

SEQ ID NO: 2073778 - RNA, 13 nt, Human
acuggagcaccag

SEQ ID NO: 2073779 - RNA, 15 nt, Human
acuggagcaccaggc

SEQ ID NO: 2073780 - RNA, 16 nt, Human
acuggagcaccaggca

SEQ ID NO: 2073781 - RNA, 17 nt, Human
acuuauuuaugaaccug

SEQ ID NO: 2073782 - RNA, 13 nt, Human
acuuauuuggggu

SEQ ID NO: 2073783 - RNA, 15 nt, Human
acuguuucucugcug

SEQ ID NO: 2073784 - RNA, 13 nt, Human
acuguuucucugc

SEQ ID NO: 2073785 - RNA, 14 nt, Human
acuguuucucugcu

SEQ ID NO: 2073786 - RNA, 16 nt, Human
acuucaaaaacuguca

SEQ ID NO: 2073787 - RNA, 21 nt, Human
acuucaaaaacugucaaagaa

SEQ ID NO: 2073788 - RNA, 15 nt, Human
acuugggccacugug

SEQ ID NO: 2073789 - RNA, 14 nt, Human
acuugggccacugu

SEQ ID NO: 2073790 - RNA, 16 nt, Human
acuugguuuuuaaaaa

SEQ ID NO: 2073791 - RNA, 21 nt, Human
acuugguguccuuucccucca

SEQ ID NO: 2073792 - RNA, 22 nt, Human
acuugguguccuuucccuccac

SEQ ID NO: 2073793 - RNA, 13 nt, Human
acuugguuauaca

SEQ ID NO: 2073794 - RNA, 14 nt, Human
acuugguuauacau

SEQ ID NO: 2073795 - RNA, 15 nt, Human
acuugguuauacaug

SEQ ID NO: 2073796 - RNA, 20 nt, Human
acuugguuauacaugacacu

SEQ ID NO: 2073797 - RNA, 18 nt, Human
acuugguuggguccucac

SEQ ID NO: 2073798 - RNA, 13 nt, Human
acuuuaucacauu

SEQ ID NO: 2073799 - RNA, 14 nt, Human
acuuuaucacauua

SEQ ID NO: 2073800 - RNA, 21 nt, Human
acuuuaucacauuauuugcau

SEQ ID NO: 2073801 - RNA, 19 nt, Human
acuuuaugcagcuuccuuu

SEQ ID NO: 2073802 - RNA, 12 nt, Human
acuuuauuuacu

SEQ ID NO: 2073803 - RNA, 13 nt, Human
acuuuauuuacuu

SEQ ID NO: 2073804 - RNA, 14 nt, Human
acuuuuaaggcagu

SEQ ID NO: 2073805 - RNA, 24 nt, Human
acuuuauuuucugguagauagaaa

SEQ ID NO: 2073806 - RNA, 20 nt, Human
acuuuauuuuauauaauaaa

SEQ ID NO: 2073807 - RNA, 21 nt, Human
acuuuauuuuauauaauaaag

SEQ ID NO: 2073808 - RNA, 23 nt, Human
acuuuauuuuauauaauaaagua

SEQ ID NO: 2073809 - RNA, 13 nt, Human
acuuuauuuucug

SEQ ID NO: 2073810 - RNA, 13 nt, Human
acuuuuagaaacu

SEQ ID NO: 2073811 - RNA, 14 nt, Human
acuuuucuuugugg

SEQ ID NO: 2073812 - RNA, 14 nt, Human
acuuuucuuugaag

SEQ ID NO: 2073813 - RNA, 16 nt, Human
acuuuugagacuuuuu

SEQ ID NO: 2073814 - RNA, 15 nt, Human
agaaaauacaauaaa

SEQ ID NO: 2073815 - RNA, 16 nt, Human
agaaaauacaauaaac

SEQ ID NO: 2073816 - RNA, 17 nt, Human
agaaaauacaauaaacu

SEQ ID NO: 2073817 - RNA, 20 nt, Human
acuuuucauaaccuagccuu

SEQ ID NO: 2073818 - RNA, 14 nt, Human
agaaaggauauuua

SEQ ID NO: 2073819 - RNA, 16 nt, Human
agaaaggauauuuaag

SEQ ID NO: 2073820 - RNA, 18 nt, Human
agaaaggauauuuaagaa

SEQ ID NO: 2073821 - RNA, 19 nt, Human
agaaaggauauuuaagaaa

SEQ ID NO: 2073822 - RNA, 21 nt, Human
agaaaggauauuuaagaaaau

SEQ ID NO: 2073823 - RNA, 18 nt, Human
agaaagggagcagagaag

SEQ ID NO: 2073824 - RNA, 22 nt, Human
agaaaguacuucuccacccugc

SEQ ID NO: 2073825 - RNA, 17 nt, Human
agaaaggggcaggagcu

SEQ ID NO: 2073826 - RNA, 21 nt, Human
agaaaggggcaggagcucaga

SEQ ID NO: 2073827 - RNA, 22 nt, Human
agaaaggggcaggagcucagau

SEQ ID NO: 2073828 - RNA, 23 nt, Human
agaaaggggcaggagcucagaug

SEQ ID NO: 2073829 - RNA, 23 nt, Human
agaaaguacuucuccacccugcu

SEQ ID NO: 2073830 - RNA, 20 nt, Human
agaaagguggacuggaaggg

SEQ ID NO: 2073831 - RNA, 21 nt, Human
agaaaguggccaugccacccu

SEQ ID NO: 2073832 - RNA, 23 nt, Human
agaaagugaagcaaaucagaaac

SEQ ID NO: 2073833 - RNA, 15 nt, Human
agaaagugaauaaaa

SEQ ID NO: 2073834 - RNA, 16 nt, Human
agaaagugaauaaaaa

SEQ ID NO: 2073835 - RNA, 20 nt, Human
agaaagugaauaaaaauuaa

SEQ ID NO: 2073836 - RNA, 21 nt, Human
agaaagugaauaaaaauuaag

SEQ ID NO: 2073837 - RNA, 15 nt, Human
agaaagugaagcaaa

SEQ ID NO: 2073838 - RNA, 14 nt, Human
agaaauaauaugca

SEQ ID NO: 2073839 - RNA, 16 nt, Human
agaaauaauaugcauu

SEQ ID NO: 2073840 - RNA, 15 nt, Human
agaaauaauaugcau

SEQ ID NO: 2073841 - RNA, 19 nt, Human
agaaauaaauagcuauauc

SEQ ID NO: 2073842 - RNA, 22 nt, Human
agaaauaaauagcuauauccau

SEQ ID NO: 2073843 - RNA, 15 nt, Human
agaaauaaauagcua

SEQ ID NO: 2073844 - RNA, 18 nt, Human
agaaauaaauagcuauau

SEQ ID NO: 2073845 - RNA, 20 nt, Human
agaaaguuuccccaccagug

SEQ ID NO: 2073846 - RNA, 12 nt, Human
agaaaguuuccc

SEQ ID NO: 2073847 - RNA, 12 nt, Human
agaaaguugauu

SEQ ID NO: 2073848 - RNA, 17 nt, Human
agaaagugugagcaaac

SEQ ID NO: 2073849 - RNA, 23 nt, Human
agaaagugugagcaaacuaacuu

SEQ ID NO: 2073850 - RNA, 15 nt, Human
agaaaguaauuucuu

SEQ ID NO: 2073851 - RNA, 16 nt, Human
agaaagugugagcaaa

SEQ ID NO: 2073852 - RNA, 14 nt, Human
acacauuuuucaga

SEQ ID NO: 2073853 - RNA, 13 nt, Human
acacagcucuucu

SEQ ID NO: 2073854 - RNA, 11 nt, Human
acacagcucuu

SEQ ID NO: 2073855 - RNA, 14 nt, Human
acacagcagcaguu

SEQ ID NO: 2073856 - RNA, 19 nt, Human
acacagaggcugccucucc

SEQ ID NO: 2073857 - RNA, 19 nt, Human
acacagaguggucuuucug

SEQ ID NO: 2073858 - RNA, 21 nt, Human
acacagaguggucuuucugga

SEQ ID NO: 2073859 - RNA, 23 nt, Human
acacagaguggucuuucuggaga

SEQ ID NO: 2073860 - RNA, 14 nt, Human
acacagcucugucc

SEQ ID NO: 2073861 - RNA, 20 nt, Human
acacagcucuguccugggag

SEQ ID NO: 2073862 - RNA, 12 nt, Human
acacagaggaag

SEQ ID NO: 2073863 - RNA, 13 nt, Human
acacagaggaaga

SEQ ID NO: 2073864 - RNA, 17 nt, Human
acacagaggaagagcag

SEQ ID NO: 2073865 - RNA, 21 nt, Human
acacagaggaagagcaggcac

SEQ ID NO: 2073866 - RNA, 20 nt, Human
acaauuguaaaacugaggca

SEQ ID NO: 2073867 - RNA, 21 nt, Human
acaauugcuuacucauuaaaa

SEQ ID NO: 2073868 - RNA, 19 nt, Human
acaauugaacuuaaauaaa

SEQ ID NO: 2073869 - RNA, 17 nt, Human
acaauugaacuuaaaua

SEQ ID NO: 2073870 - RNA, 12 nt, Human
acaauugaaaug

SEQ ID NO: 2073871 - RNA, 20 nt, Human
acacgcucccucccccugcc

SEQ ID NO: 2073872 - RNA, 14 nt, Human
acaccaaauaaaua

SEQ ID NO: 2073873 - RNA, 17 nt, Human
acacgcgugcacacacc

SEQ ID NO: 2073874 - RNA, 15 nt, Human
acacgcgugcacaca

SEQ ID NO: 2073875 - RNA, 22 nt, Human
acacgagguaugaggucuagga

SEQ ID NO: 2073876 - RNA, 13 nt, Human
acacgcacacaca

SEQ ID NO: 2073877 - RNA, 14 nt, Human
acacgcacacacac

SEQ ID NO: 2073878 - RNA, 20 nt, Human
acacgcacacacacacacag

SEQ ID NO: 2073879 - RNA, 23 nt, Human
acacgcacacacacacacaggag

SEQ ID NO: 2073880 - RNA, 14 nt, Human
aauuuucuucaguu

SEQ ID NO: 2073881 - RNA, 17 nt, Human
aauuuucuucaguuggu

SEQ ID NO: 2073882 - RNA, 13 nt, Human
aauuuucuucaug

SEQ ID NO: 2073883 - RNA, 14 nt, Human
aauuuucuucaugc

SEQ ID NO: 2073884 - RNA, 14 nt, Human
aauuuuguacaaau

SEQ ID NO: 2073885 - RNA, 17 nt, Human
aauuuuguaaaggugaa

SEQ ID NO: 2073886 - RNA, 12 nt, Human
aauuuuguaauu

SEQ ID NO: 2073887 - RNA, 13 nt, Human
aauuuuguaauuu

SEQ ID NO: 2073888 - RNA, 16 nt, Human
aauuuuguaauuuucu

SEQ ID NO: 2073889 - RNA, 17 nt, Human
aauuuuguaauuuucuu

SEQ ID NO: 2073890 - RNA, 13 nt, Human
aauuuuguacaaa

SEQ ID NO: 2073891 - RNA, 19 nt, Human
aauuuucuucaugcaauga

SEQ ID NO: 2073892 - RNA, 22 nt, Human
aauuuucuucaugcaaugacau

SEQ ID NO: 2073893 - RNA, 12 nt, Human
aauuuucuugau

SEQ ID NO: 2073894 - RNA, 13 nt, Human
aauuuucuugaug

SEQ ID NO: 2073895 - RNA, 19 nt, Human
aauuuucuugaugacugga

SEQ ID NO: 2073896 - RNA, 21 nt, Human
aauuuucuugaugacuggaau

SEQ ID NO: 2073897 - RNA, 23 nt, Human
aauuuucuuuaaccagucugaag

SEQ ID NO: 2073898 - RNA, 12 nt, Human
acaagaaaacau

SEQ ID NO: 2073899 - RNA, 15 nt, Human
acaagaaaguuuccc

SEQ ID NO: 2073900 - RNA, 17 nt, Human
acaagaaaguuucccca

SEQ ID NO: 2073901 - RNA, 12 nt, Human
acaagaaaggag

SEQ ID NO: 2073902 - RNA, 13 nt, Human
acaagaaaggaga

SEQ ID NO: 2073903 - RNA, 17 nt, Human
acaagaaaggagagucu

SEQ ID NO: 2073904 - RNA, 18 nt, Human
acaagaaaggagagucuu

SEQ ID NO: 2073905 - RNA, 21 nt, Human
acaagaaaggagagucuugca

SEQ ID NO: 2073906 - RNA, 16 nt, Human
acaagaaaaaaugaau

SEQ ID NO: 2073907 - RNA, 16 nt, Human
acaacuaggcuucagc

SEQ ID NO: 2073908 - RNA, 14 nt, Human
acaacgaggaagcc

SEQ ID NO: 2073909 - RNA, 21 nt, Human
acaagaaaguuuccccaccag

SEQ ID NO: 2073910 - RNA, 17 nt, Human
acaaggauugcuacugu

SEQ ID NO: 2073911 - RNA, 22 nt, Human
acaaaauguaggguuauaauaa

SEQ ID NO: 2073912 - RNA, 18 nt, Human
acaaccuucuguggcuca

SEQ ID NO: 2073913 - RNA, 15 nt, Human
acaacgaggaagccc

SEQ ID NO: 2073914 - RNA, 22 nt, Human
acaaggcugaccaagagagaaa

SEQ ID NO: 2073915 - RNA, 11 nt, Human
acaaggcccca

SEQ ID NO: 2073916 - RNA, 13 nt, Human
acaaggccccaga

SEQ ID NO: 2073917 - RNA, 17 nt, Human
acaaggcauucaagugu

SEQ ID NO: 2073918 - RNA, 23 nt, Human
acaaggcauucaaguguacagug

SEQ ID NO: 2073919 - RNA, 15 nt, Human
acaaggccccagaga

SEQ ID NO: 2073920 - RNA, 16 nt, Human
acaaggccccagagac

SEQ ID NO: 2073921 - RNA, 17 nt, Human
acaaggccccagagacu

SEQ ID NO: 2073922 - RNA, 18 nt, Human
acaaggccccagagacuc

SEQ ID NO: 2073923 - RNA, 17 nt, Human
acaaggcuagaucauga

SEQ ID NO: 2073924 - RNA, 13 nt, Human
acaaggcugacca

SEQ ID NO: 2073925 - RNA, 18 nt, Human
acaaggcugaccaagaga

SEQ ID NO: 2073926 - RNA, 20 nt, Human
acaaggcugaccaagagaga

SEQ ID NO: 2073927 - RNA, 19 nt, Human
acagagugagacucugucu

SEQ ID NO: 2073928 - RNA, 23 nt, Human
acagagucucacuguugcccagg

SEQ ID NO: 2073929 - RNA, 15 nt, Human
acagagggaagaaaa

SEQ ID NO: 2073930 - RNA, 20 nt, Human
acagagggaagaaaagagcu

SEQ ID NO: 2073931 - RNA, 15 nt, Human
acagagugagacucu

SEQ ID NO: 2073932 - RNA, 16 nt, Human
acagagggaagaaaag

SEQ ID NO: 2073933 - RNA, 13 nt, Human
acagagucugggu

SEQ ID NO: 2073934 - RNA, 15 nt, Human
acagaggcagcccca

SEQ ID NO: 2073935 - RNA, 14 nt, Human
acagaggcagcccc

SEQ ID NO: 2073936 - RNA, 14 nt, Human
acagacacaggccc

SEQ ID NO: 2073937 - RNA, 13 nt, Human
acagacacaggcc

SEQ ID NO: 2073938 - RNA, 23 nt, Human
acagaggcagccccauucugccu

SEQ ID NO: 2073939 - RNA, 19 nt, Human
acagaggcagccccauucu

SEQ ID NO: 2073940 - RNA, 15 nt, Human
acagacacaggcccg

SEQ ID NO: 2073941 - RNA, 11 nt, Human
acagacacagg

SEQ ID NO: 2073942 - RNA, 18 nt, Human
acagacaaaaacagccuc

SEQ ID NO: 2073943 - RNA, 19 nt, Human
acagacaaaaacagccuca

SEQ ID NO: 2073944 - RNA, 20 nt, Human
acagacaaaaacagccucac

SEQ ID NO: 2073945 - RNA, 16 nt, Human
acagaauugcuuguuu

SEQ ID NO: 2073946 - RNA, 17 nt, Human
acagaauucugcuaccu

SEQ ID NO: 2073947 - RNA, 15 nt, Human
acagaauucugcuac

SEQ ID NO: 2073948 - RNA, 16 nt, Human
acagaaucauugcuua

SEQ ID NO: 2073949 - RNA, 19 nt, Human
acacugcuuguguuuuuaa

SEQ ID NO: 2073950 - RNA, 23 nt, Human
acacugcuuguguuuuuaacuca

SEQ ID NO: 2073951 - RNA, 12 nt, Human
acacuggccccu

SEQ ID NO: 2073952 - RNA, 13 nt, Human
acacuggccccua

SEQ ID NO: 2073953 - RNA, 16 nt, Human
acacuggccccuagaa

SEQ ID NO: 2073954 - RNA, 21 nt, Human
acacuggcucauauuccugca

SEQ ID NO: 2073955 - RNA, 22 nt, Human
acacugcacucuuaagcuuccg

SEQ ID NO: 2073956 - RNA, 18 nt, Human
acacugcaagagccuugg

SEQ ID NO: 2073957 - RNA, 17 nt, Human
acagccacggccaggcc

SEQ ID NO: 2073958 - RNA, 16 nt, Human
acagccacggccaggc

SEQ ID NO: 2073959 - RNA, 15 nt, Human
acagccacggccagg

SEQ ID NO: 2073960 - RNA, 18 nt, Human
acagccacggccaggcca

SEQ ID NO: 2073961 - RNA, 18 nt, Human
acagcucuucuccaggcu

SEQ ID NO: 2073962 - RNA, 17 nt, Human
acagcucuguguugcca

SEQ ID NO: 2073963 - RNA, 19 nt, Human
acagcucuguguugccaug

SEQ ID NO: 2073964 - RNA, 15 nt, Human
acaggaucagucuga

SEQ ID NO: 2073965 - RNA, 17 nt, Human
acagcucuucuccaggc

SEQ ID NO: 2073966 - RNA, 16 nt, Human
acagcucuucuccagg

SEQ ID NO: 2073967 - RNA, 14 nt, Human
acaggcaaaugcau

SEQ ID NO: 2073968 - RNA, 16 nt, Human
acaggcaacugaggca

SEQ ID NO: 2073969 - RNA, 18 nt, Human
acaggcaacugaggcaga

SEQ ID NO: 2073970 - RNA, 19 nt, Human
acaggcaacugaggcagac

SEQ ID NO: 2073971 - RNA, 16 nt, Human
acaggauggucucugc

SEQ ID NO: 2073972 - RNA, 17 nt, Human
acaggauggucucugcc

SEQ ID NO: 2073973 - RNA, 12 nt, Human
acaggcaagcac

SEQ ID NO: 2073974 - RNA, 18 nt, Human
acaggcaaugcuggcugu

SEQ ID NO: 2073975 - RNA, 20 nt, Human
acagcucuguguugccaugu

SEQ ID NO: 2073976 - RNA, 14 nt, Human
acaggauuauugga

SEQ ID NO: 2073977 - RNA, 15 nt, Human
accagcccagacccu

SEQ ID NO: 2073978 - RNA, 16 nt, Human
accagcacugucucag

SEQ ID NO: 2073979 - RNA, 17 nt, Human
accagcaauauaucuga

SEQ ID NO: 2073980 - RNA, 20 nt, Human
accagaugcugaaagagaaa

SEQ ID NO: 2073981 - RNA, 23 nt, Human
accagcaacuugucuuuuucugg

SEQ ID NO: 2073982 - RNA, 15 nt, Human
accagcacugucuca

SEQ ID NO: 2073983 - RNA, 20 nt, Human
accagauaagaaugcugguu

SEQ ID NO: 2073984 - RNA, 21 nt, Human
accagauaagaaugcugguuu

SEQ ID NO: 2073985 - RNA, 20 nt, Human
accaccuaggccacuccucc

SEQ ID NO: 2073986 - RNA, 21 nt, Human
accaccuaggccacuccucca

SEQ ID NO: 2073987 - RNA, 17 nt, Human
accaccucaaauuuaaa

SEQ ID NO: 2073988 - RNA, 13 nt, Human
accaccgcucccc

SEQ ID NO: 2073989 - RNA, 14 nt, Human
accaccgcucccca

SEQ ID NO: 2073990 - RNA, 15 nt, Human
accaccgcuccccag

SEQ ID NO: 2073991 - RNA, 17 nt, Human
accaccgcuccccagcc

SEQ ID NO: 2073992 - RNA, 18 nt, Human
accaccgcuccccagccc

SEQ ID NO: 2073993 - RNA, 19 nt, Human
accaccgcuccccagccca

SEQ ID NO: 2073994 - RNA, 21 nt, Human
accaccgcuccccagcccagg

SEQ ID NO: 2073995 - RNA, 23 nt, Human
accaccgcuccccagcccagggu

SEQ ID NO: 2073996 - RNA, 16 nt, Human
accaccuaggccacuc

SEQ ID NO: 2073997 - RNA, 17 nt, Human
accaccuaggccacucc

SEQ ID NO: 2073998 - RNA, 18 nt, Human
accaccuaggccacuccu

SEQ ID NO: 2073999 - RNA, 20 nt, Human
acauuuguauguugugaaga

SEQ ID NO: 2074000 - RNA, 21 nt, Human
acauuuccccagaccugagcu

SEQ ID NO: 2074001 - RNA, 16 nt, Human
acauuucauguauucc

SEQ ID NO: 2074002 - RNA, 13 nt, Human
acauuucccaggg

SEQ ID NO: 2074003 - RNA, 14 nt, Human
acauuucaaaguuu

SEQ ID NO: 2074004 - RNA, 20 nt, Human
acauuucaccuacuuuguaa

SEQ ID NO: 2074005 - RNA, 24 nt, Human
acauuucaccuacuuuguaaguga

SEQ ID NO: 2074006 - RNA, 15 nt, Human
acauuuauucugcuc

SEQ ID NO: 2074007 - RNA, 22 nt, Human
accaagaugccaucuguguccu

SEQ ID NO: 2074008 - RNA, 16 nt, Human
accaaguggaccuuga

SEQ ID NO: 2074009 - RNA, 23 nt, Human
accaaguuauaaaucaaugucac

SEQ ID NO: 2074010 - RNA, 23 nt, Human
accaaguuggaacauccuuggaa

SEQ ID NO: 2074011 - RNA, 13 nt, Human
accaaguuauaua

SEQ ID NO: 2074012 - RNA, 15 nt, Human
accaaguuauauaaa

SEQ ID NO: 2074013 - RNA, 21 nt, Human
accaaguuauauaaagagaaa

SEQ ID NO: 2074014 - RNA, 22 nt, Human
accaaguuauauaaagagaaaa

SEQ ID NO: 2074015 - RNA, 20 nt, Human
accaauauuauacuaagaaa

SEQ ID NO: 2074016 - RNA, 17 nt, Human
accaagcaggaagcuca

SEQ ID NO: 2074017 - RNA, 12 nt, Human
accaagcccagu

SEQ ID NO: 2074018 - RNA, 24 nt, Human
accaagcaggaagcucagacuggu

SEQ ID NO: 2074019 - RNA, 13 nt, Human
accaagcaggaag

SEQ ID NO: 2074020 - RNA, 14 nt, Human
accaagcaggaagc

SEQ ID NO: 2074021 - RNA, 15 nt, Human
accaagcaggaagcu

SEQ ID NO: 2074022 - RNA, 16 nt, Human
accaagcaggaagcuc

SEQ ID NO: 2074023 - RNA, 14 nt, Human
acauuuauucugcu

SEQ ID NO: 2074024 - RNA, 18 nt, Human
acaugugcacaugcacgu

SEQ ID NO: 2074025 - RNA, 16 nt, Human
acaugugcacaugcac

SEQ ID NO: 2074026 - RNA, 21 nt, Human
acaugcauuugaggucaagua

SEQ ID NO: 2074027 - RNA, 12 nt, Human
acaugcauuuga

SEQ ID NO: 2074028 - RNA, 22 nt, Human
acaugcagcccaugcccaccug

SEQ ID NO: 2074029 - RNA, 16 nt, Human
acaugcauacauacac

SEQ ID NO: 2074030 - RNA, 19 nt, Human
acaugaucuucuuuauaau

SEQ ID NO: 2074031 - RNA, 17 nt, Human
acaugcauuugagguca

SEQ ID NO: 2074032 - RNA, 19 nt, Human
acaggguuuugccauguug

SEQ ID NO: 2074033 - RNA, 14 nt, Human
acaggguugggccc

SEQ ID NO: 2074034 - RNA, 16 nt, Human
acaggguguugucagc

SEQ ID NO: 2074035 - RNA, 21 nt, Human
acaggguguugucagcaucuu

SEQ ID NO: 2074036 - RNA, 16 nt, Human
acaggguucaaaaugu

SEQ ID NO: 2074037 - RNA, 23 nt, Human
acaggcaaugcuggcuguuggcu

SEQ ID NO: 2074038 - RNA, 19 nt, Human
acaggcaaugcuggcuguu

SEQ ID NO: 2074039 - RNA, 22 nt, Human
acaggcaacugaggcagacagc

SEQ ID NO: 2074040 - RNA, 13 nt, Human
acccauuccuauu

SEQ ID NO: 2074041 - RNA, 17 nt, Human
acccauuccuauuucuu

SEQ ID NO: 2074042 - RNA, 22 nt, Human
acccauucguggugaucaauua

SEQ ID NO: 2074043 - RNA, 22 nt, Human
acccaguguuuuaggagcauga

SEQ ID NO: 2074044 - RNA, 19 nt, Human
acccaguguuuuaggagca

SEQ ID NO: 2074045 - RNA, 16 nt, Human
acccaccucagccucc

SEQ ID NO: 2074046 - RNA, 13 nt, Human
acccaccugcuga

SEQ ID NO: 2074047 - RNA, 12 nt, Human
acccaccugagc

SEQ ID NO: 2074048 - RNA, 13 nt, Human
acccaccugagcu

SEQ ID NO: 2074049 - RNA, 14 nt, Human
acccaccugagcuu

SEQ ID NO: 2074050 - RNA, 16 nt, Human
acccaccugagcuuug

SEQ ID NO: 2074051 - RNA, 18 nt, Human
acccaccugagcuuugga

SEQ ID NO: 2074052 - RNA, 11 nt, Human
acccaccugcu

SEQ ID NO: 2074053 - RNA, 17 nt, Human
acccaccugcugagaga

SEQ ID NO: 2074054 - RNA, 22 nt, Human
acccaccugcugagagacccaa

SEQ ID NO: 2074055 - RNA, 19 nt, Human
acccaccugguggccucug

SEQ ID NO: 2074056 - RNA, 15 nt, Human
acccaccucagccuc

SEQ ID NO: 2074057 - RNA, 14 nt, Human
acccaccucagccu

SEQ ID NO: 2074058 - RNA, 13 nt, Human
acccaccucagcc

SEQ ID NO: 2074059 - RNA, 17 nt, Human
acccacaagugccacug

SEQ ID NO: 2074060 - RNA, 13 nt, Human
acccacaagugcc

SEQ ID NO: 2074061 - RNA, 19 nt, Human
accauauucagugcugugg

SEQ ID NO: 2074062 - RNA, 20 nt, Human
accauauggauauuagucau

SEQ ID NO: 2074063 - RNA, 19 nt, Human
accauccuggccaacauga

SEQ ID NO: 2074064 - RNA, 13 nt, Human
accauccuauuua

SEQ ID NO: 2074065 - RNA, 16 nt, Human
accauccuauuuaacu

SEQ ID NO: 2074066 - RNA, 13 nt, Human
accaucucaggcc

SEQ ID NO: 2074067 - RNA, 14 nt, Human
accaucucaggcca

SEQ ID NO: 2074068 - RNA, 15 nt, Human
accaucucaggccac

SEQ ID NO: 2074069 - RNA, 16 nt, Human
accaucucaggccacc

SEQ ID NO: 2074070 - RNA, 17 nt, Human
accaucucaggccaccu

SEQ ID NO: 2074071 - RNA, 21 nt, Human
accaucucaggccaccugccc

SEQ ID NO: 2074072 - RNA, 15 nt, Human
accccucaccuugca

SEQ ID NO: 2074073 - RNA, 16 nt, Human
accccucaccuugcaa

SEQ ID NO: 2074074 - RNA, 19 nt, Human
accccucaccuugcaacac

SEQ ID NO: 2074075 - RNA, 22 nt, Human
accccucaccuugcaacacaca

SEQ ID NO: 2074076 - RNA, 23 nt, Human
accccucaccuugcaacacacag

SEQ ID NO: 2074077 - RNA, 19 nt, Human
accccuccaugugggcuag

SEQ ID NO: 2074078 - RNA, 16 nt, Human
accccuccaugugggc

SEQ ID NO: 2074079 - RNA, 18 nt, Human
acccccuucuacugagcc

SEQ ID NO: 2074080 - RNA, 19 nt, Human
acccccuucuacugagccu

SEQ ID NO: 2074081 - RNA, 14 nt, Human
acccccuucucugc

SEQ ID NO: 2074082 - RNA, 13 nt, Human
acccccuucucug

SEQ ID NO: 2074083 - RNA, 20 nt, Human
accccucacaggagcuuacu

SEQ ID NO: 2074084 - RNA, 16 nt, Human
acccccuucagugccc

SEQ ID NO: 2074085 - RNA, 18 nt, Human
acccccuucagugcccac

SEQ ID NO: 2074086 - RNA, 20 nt, Human
acccccuucagugcccacca

SEQ ID NO: 2074087 - RNA, 18 nt, Human
accccuccccuaaugccu

SEQ ID NO: 2074088 - RNA, 17 nt, Human
aaauuuuuuuuguuuca

SEQ ID NO: 2074089 - RNA, 18 nt, Human
aaauuuuuuuuguuucau

SEQ ID NO: 2074090 - RNA, 15 nt, Human
aacaaaaaacaauau

SEQ ID NO: 2074091 - RNA, 20 nt, Human
aacaaauuauguuacaucug

SEQ ID NO: 2074092 - RNA, 13 nt, Human
aacaacauguaua

SEQ ID NO: 2074093 - RNA, 13 nt, Human
aacaacaaaaaau

SEQ ID NO: 2074094 - RNA, 18 nt, Human
aacaaccucggcuccugg

SEQ ID NO: 2074095 - RNA, 18 nt, Human
aacacauuugauucugug

SEQ ID NO: 2074096 - RNA, 20 nt, Human
aacacauuugauucugugug

SEQ ID NO: 2074097 - RNA, 21 nt, Human
aacacauuaagccuuccacac

SEQ ID NO: 2074098 - RNA, 21 nt, Human
aacacauuaucgggagcagug

SEQ ID NO: 2074099 - RNA, 18 nt, Human
aacaaccccccaucacaa

SEQ ID NO: 2074100 - RNA, 19 nt, Human
aacaaccccccaucacaaa

SEQ ID NO: 2074101 - RNA, 22 nt, Human
aacaaccccccaucacaaacuu

SEQ ID NO: 2074102 - RNA, 22 nt, Human
aacacaucagcuagcaaaagaa

SEQ ID NO: 2074103 - RNA, 21 nt, Human
aaaucuuauauuccauauauu

SEQ ID NO: 2074104 - RNA, 19 nt, Human
aaaucuuauauuccauaua

SEQ ID NO: 2074105 - RNA, 15 nt, Human
aaaugccuuacuuug

SEQ ID NO: 2074106 - RNA, 16 nt, Human
aaaugccuuacuuugu

SEQ ID NO: 2074107 - RNA, 17 nt, Human
aaaugccuuacuuugua

SEQ ID NO: 2074108 - RNA, 18 nt, Human
aaaugccuuacuuuguau

SEQ ID NO: 2074109 - RNA, 19 nt, Human
aaaugccuuacuuuguaug

SEQ ID NO: 2074110 - RNA, 20 nt, Human
aaaugccuuacuuuguauga

SEQ ID NO: 2074111 - RNA, 22 nt, Human
aaaugccuuacuuuguaugaua

SEQ ID NO: 2074112 - RNA, 14 nt, Human
aaauugcuccuuga

SEQ ID NO: 2074113 - RNA, 13 nt, Human
aaauugcuccuug

SEQ ID NO: 2074114 - RNA, 13 nt, Human
aaauugaauuuaa

SEQ ID NO: 2074115 - RNA, 15 nt, Human
aaauugaauuuaaca

SEQ ID NO: 2074116 - RNA, 16 nt, Human
aaauugaauuuaacaa

SEQ ID NO: 2074117 - RNA, 17 nt, Human
aaauugaauuuaacaau

SEQ ID NO: 2074118 - RNA, 18 nt, Human
aaauugaauuuaacaaug

SEQ ID NO: 2074119 - RNA, 17 nt, Human
aaauuaaagcugaaaac

SEQ ID NO: 2074120 - RNA, 13 nt, Human
aaauuaaagcuga

SEQ ID NO: 2074121 - RNA, 15 nt, Human
aaauuaaacaauuua

SEQ ID NO: 2074122 - RNA, 13 nt, Human
aaauuaaagaaaa

SEQ ID NO: 2074123 - RNA, 14 nt, Human
aaauuaaagaaaau

SEQ ID NO: 2074124 - RNA, 12 nt, Human
aaauuaacacug

SEQ ID NO: 2074125 - RNA, 13 nt, Human
aaauuaacacugc

SEQ ID NO: 2074126 - RNA, 15 nt, Human
aaauuaaauaaaaua

SEQ ID NO: 2074127 - RNA, 12 nt, Human
aaauuaaauaua

SEQ ID NO: 2074128 - RNA, 16 nt, Human
aaauuaaauauaugua

SEQ ID NO: 2074129 - RNA, 19 nt, Human
aaauuaaauauauguaugu

SEQ ID NO: 2074130 - RNA, 20 nt, Human
aaauuaaauauauguaugua

SEQ ID NO: 2074131 - RNA, 23 nt, Human
aaauuaaauauauguauguaaaa

SEQ ID NO: 2074132 - RNA, 21 nt, Human
aaauuaacacugcuuguguuu

SEQ ID NO: 2074133 - RNA, 20 nt, Human
aaauugaaaggcauucucug

SEQ ID NO: 2074134 - RNA, 22 nt, Human
aaauugaaaggcauucucugaa

SEQ ID NO: 2074135 - RNA, 23 nt, Human
aaauugaaaggcauucucugaag

SEQ ID NO: 2074136 - RNA, 21 nt, Human
aaauucuuuuuuaaauuuucu

SEQ ID NO: 2074137 - RNA, 23 nt, Human
aaauucuuuuuuaaauuuucuuc

SEQ ID NO: 2074138 - RNA, 16 nt, Human
aacagcagagguucuu

SEQ ID NO: 2074139 - RNA, 17 nt, Human
aacagcagagguucuuu

SEQ ID NO: 2074140 - RNA, 21 nt, Human
aacagcagagguucuuuuaaa

SEQ ID NO: 2074141 - RNA, 13 nt, Human
aacagcaggccca

SEQ ID NO: 2074142 - RNA, 17 nt, Human
aacagcaggcccaccua

SEQ ID NO: 2074143 - RNA, 21 nt, Human
aacagcaggguagucugguuu

SEQ ID NO: 2074144 - RNA, 23 nt, Human
aacagcauucuugucacaauaaa

SEQ ID NO: 2074145 - RNA, 12 nt, Human
aacagcauugcu

SEQ ID NO: 2074146 - RNA, 14 nt, Human
aacagcauugcuuu

SEQ ID NO: 2074147 - RNA, 15 nt, Human
aacagcauugcuuuc

SEQ ID NO: 2074148 - RNA, 16 nt, Human
aacagcauugcuuucu

SEQ ID NO: 2074149 - RNA, 16 nt, Human
aaccagagcaagcuuu

SEQ ID NO: 2074150 - RNA, 19 nt, Human
aaccagagcaagcuuuuuu

SEQ ID NO: 2074151 - RNA, 13 nt, Human
aaccagagcacug

SEQ ID NO: 2074152 - RNA, 14 nt, Human
aaccagagcacugu

SEQ ID NO: 2074153 - RNA, 18 nt, Human
aaccagagcacuguauac

SEQ ID NO: 2074154 - RNA, 18 nt, Human
aaccagagccauggacuc

SEQ ID NO: 2074155 - RNA, 17 nt, Human
aaccagaagcaacagaa

SEQ ID NO: 2074156 - RNA, 21 nt, Human
aaccagaagcaacagaaaaaa

SEQ ID NO: 2074157 - RNA, 22 nt, Human
aaccagaagcaacagaaaaaau

SEQ ID NO: 2074158 - RNA, 18 nt, Human
aaccagaauaaaguucug

SEQ ID NO: 2074159 - RNA, 14 nt, Human
aaccacggaaaaga

SEQ ID NO: 2074160 - RNA, 19 nt, Human
aaccaccgcuccccagccc

SEQ ID NO: 2074161 - RNA, 20 nt, Human
aaccaccgcuccccagccca

SEQ ID NO: 2074162 - RNA, 15 nt, Human
aaccacuucagcuga

SEQ ID NO: 2074163 - RNA, 18 nt, Human
aaccacgucugucuucac

SEQ ID NO: 2074164 - RNA, 15 nt, Human
aaccacuguaaaaug

SEQ ID NO: 2074165 - RNA, 20 nt, Human
aaccacuguaaaaugaaauu

SEQ ID NO: 2074166 - RNA, 16 nt, Human
aaccacuguaaaauga

SEQ ID NO: 2074167 - RNA, 13 nt, Human
aaccacuuaaaaa

SEQ ID NO: 2074168 - RNA, 19 nt, Human
aaccacuuaaaaaaugucc

SEQ ID NO: 2074169 - RNA, 13 nt, Human
aaccacgcuggac

SEQ ID NO: 2074170 - RNA, 18 nt, Human
aacaucccauugcccugg

SEQ ID NO: 2074171 - RNA, 19 nt, Human
aacaucccauugcccuggu

SEQ ID NO: 2074172 - RNA, 15 nt, Human
aaccaccgcucccca

SEQ ID NO: 2074173 - RNA, 16 nt, Human
aaccaccgcuccccag

SEQ ID NO: 2074174 - RNA, 17 nt, Human
aaccaccgcuccccagc

SEQ ID NO: 2074175 - RNA, 18 nt, Human
aaccaccgcuccccagcc

SEQ ID NO: 2074176 - RNA, 16 nt, Human
aacaucccauugcccu

SEQ ID NO: 2074177 - RNA, 20 nt, Human
aacagcuucaugccuuugua

SEQ ID NO: 2074178 - RNA, 21 nt, Human
aacagcuucaugccuuuguaa

SEQ ID NO: 2074179 - RNA, 22 nt, Human
aacagcuucaugccuuuguaag

SEQ ID NO: 2074180 - RNA, 13 nt, Human
aacagcuguggcu

SEQ ID NO: 2074181 - RNA, 15 nt, Human
aacaggaaaaaaacu

SEQ ID NO: 2074182 - RNA, 22 nt, Human
aacauccaaggagaaacagaga

SEQ ID NO: 2074183 - RNA, 15 nt, Human
aacauccaauaggaa

SEQ ID NO: 2074184 - RNA, 21 nt, Human
aacauccaauaggaaugcuaa

SEQ ID NO: 2074185 - RNA, 22 nt, Human
aacauccaauaggaaugcuaac

SEQ ID NO: 2074186 - RNA, 19 nt, Human
aacauccaaggagaaacag

SEQ ID NO: 2074187 - RNA, 15 nt, Human
aacccuauugguaaa

SEQ ID NO: 2074188 - RNA, 21 nt, Human
aacccuuggagccaauggaga

SEQ ID NO: 2074189 - RNA, 13 nt, Human
aacccuucuuuua

SEQ ID NO: 2074190 - RNA, 14 nt, Human
aacccuucuuuuaa

SEQ ID NO: 2074191 - RNA, 14 nt, Human
aacccuugaaaaga

SEQ ID NO: 2074192 - RNA, 15 nt, Human
aacccuugaaaagac

SEQ ID NO: 2074193 - RNA, 21 nt, Human
aacccuaaaaagcagagcuuu

SEQ ID NO: 2074194 - RNA, 18 nt, Human
aaccuaccuguaacuuuu

SEQ ID NO: 2074195 - RNA, 13 nt, Human
aaccuaagcaaaa

SEQ ID NO: 2074196 - RNA, 16 nt, Human
aacccuuuuggccccc

SEQ ID NO: 2074197 - RNA, 22 nt, Human
aacccuuuuggcccccgagcug

SEQ ID NO: 2074198 - RNA, 15 nt, Human
aaccuaaccccuuuc

SEQ ID NO: 2074199 - RNA, 15 nt, Human
aacuauuggaaagua

SEQ ID NO: 2074200 - RNA, 13 nt, Human
aacuauuuaucug

SEQ ID NO: 2074201 - RNA, 20 nt, Human
aacuauuuaucuguguuuuu

SEQ ID NO: 2074202 - RNA, 15 nt, Human
aacgggcugcccugc

SEQ ID NO: 2074203 - RNA, 21 nt, Human
aacucagaaacaucaguuacu

SEQ ID NO: 2074204 - RNA, 23 nt, Human
aacuauuuaucuguguuuuugaa

SEQ ID NO: 2074205 - RNA, 11 nt, Human
aacgcagcccu

SEQ ID NO: 2074206 - RNA, 18 nt, Human
aacgcagaugauccauga

SEQ ID NO: 2074207 - RNA, 17 nt, Human
aacggaacguuggacuu

SEQ ID NO: 2074208 - RNA, 21 nt, Human
aacggacgagauaaugugaac

SEQ ID NO: 2074209 - RNA, 14 nt, Human
aacggagaaaggug

SEQ ID NO: 2074210 - RNA, 19 nt, Human
aacggagagcgccugcccc

SEQ ID NO: 2074211 - RNA, 12 nt, Human
aacgauuuagaa

SEQ ID NO: 2074212 - RNA, 17 nt, Human
aacgaugaugcuuguaa

SEQ ID NO: 2074213 - RNA, 22 nt, Human
aacgaugaugcuuguaacaaga

SEQ ID NO: 2074214 - RNA, 13 nt, Human
aacgauuuagaaa

SEQ ID NO: 2074215 - RNA, 12 nt, Human
aacugaggcaga

SEQ ID NO: 2074216 - RNA, 20 nt, Human
aacugaggcagacagcagcu

SEQ ID NO: 2074217 - RNA, 16 nt, Human
aacuuaacauucugua

SEQ ID NO: 2074218 - RNA, 17 nt, Human
aacuuaacauucuguaa

SEQ ID NO: 2074219 - RNA, 18 nt, Human
aacuuaaccgcaucagaa

SEQ ID NO: 2074220 - RNA, 22 nt, Human
aacuuaaccgcaucagaagccu

SEQ ID NO: 2074221 - RNA, 21 nt, Human
aacuuaacauucuguaaaaug

SEQ ID NO: 2074222 - RNA, 15 nt, Human
aacuuaagaaacacu

SEQ ID NO: 2074223 - RNA, 16 nt, Human
aacuuaaauuuuaauu

SEQ ID NO: 2074224 - RNA, 19 nt, Human
aacuuaaauuuuaauuuau

SEQ ID NO: 2074225 - RNA, 15 nt, Human
aacugacccucccuu

SEQ ID NO: 2074226 - RNA, 22 nt, Human
aacugacccucccuuccugucc

SEQ ID NO: 2074227 - RNA, 18 nt, Human
aacuuaauaguauuuaug

SEQ ID NO: 2074228 - RNA, 12 nt, Human
aacuuacacaca

SEQ ID NO: 2074229 - RNA, 21 nt, Human
aacuuuaucacauuauuugca

SEQ ID NO: 2074230 - RNA, 19 nt, Human
aaagcccuuaggaagaauu

SEQ ID NO: 2074231 - RNA, 13 nt, Human
aaagccagucuua

SEQ ID NO: 2074232 - RNA, 14 nt, Human
aaagccagucuuaa

SEQ ID NO: 2074233 - RNA, 14 nt, Human
aaagccagaagcug

SEQ ID NO: 2074234 - RNA, 19 nt, Human
aaagccagcugccgaccag

SEQ ID NO: 2074235 - RNA, 18 nt, Human
aaagccacguuccuuacu

SEQ ID NO: 2074236 - RNA, 23 nt, Human
aaagcccuuccaugucgccucug

SEQ ID NO: 2074237 - RNA, 22 nt, Human
aaagcccuuccaugucgccucu

SEQ ID NO: 2074238 - RNA, 16 nt, Human
aaagccuccuccagcc

SEQ ID NO: 2074239 - RNA, 12 nt, Human
aaaggcacagug

SEQ ID NO: 2074240 - RNA, 17 nt, Human
aaaggcaccuauaaaac

SEQ ID NO: 2074241 - RNA, 20 nt, Human
aaaggcaccuauaaaacagg

SEQ ID NO: 2074242 - RNA, 20 nt, Human
aaaggccagcuggcagcaga

SEQ ID NO: 2074243 - RNA, 12 nt, Human
aaaggccagcug

SEQ ID NO: 2074244 - RNA, 14 nt, Human
aaaggccagcuggc

SEQ ID NO: 2074245 - RNA, 18 nt, Human
aaaggccagcuggcagca

SEQ ID NO: 2074246 - RNA, 21 nt, Human
aaaggcaccuauaaaacaggu

SEQ ID NO: 2074247 - RNA, 14 nt, Human
aaaggccucuuccu

SEQ ID NO: 2074248 - RNA, 11 nt, Human
aaaggccucuu

SEQ ID NO: 2074249 - RNA, 23 nt, Human
aaagccaaguuuauauacaauua

SEQ ID NO: 2074250 - RNA, 13 nt, Human
aaauaaaugcaau

SEQ ID NO: 2074251 - RNA, 15 nt, Human
aaauaaaguuacauu

SEQ ID NO: 2074252 - RNA, 12 nt, Human
aaauaaauguac

SEQ ID NO: 2074253 - RNA, 20 nt, Human
aaauaaauagcuauauccau

SEQ ID NO: 2074254 - RNA, 16 nt, Human
aaauaaauagcuauau

SEQ ID NO: 2074255 - RNA, 17 nt, Human
aaaguggccaugccacc

SEQ ID NO: 2074256 - RNA, 17 nt, Human
aaaguggcaagaccaaa

SEQ ID NO: 2074257 - RNA, 19 nt, Human
aaaguggcaagaccaaaau

SEQ ID NO: 2074258 - RNA, 13 nt, Human
aaaguggaaggaa

SEQ ID NO: 2074259 - RNA, 14 nt, Human
aaaguggaaggaaa

SEQ ID NO: 2074260 - RNA, 16 nt, Human
aaaguggaaggaaaga

SEQ ID NO: 2074261 - RNA, 13 nt, Human
aaauaaaagcagc

SEQ ID NO: 2074262 - RNA, 19 nt, Human
aaauaaaagcagcaucugc

SEQ ID NO: 2074263 - RNA, 17 nt, Human
aaauaaaaccuuucaaa

SEQ ID NO: 2074264 - RNA, 20 nt, Human
aaauaaaagaaaugcacaau

SEQ ID NO: 2074265 - RNA, 11 nt, Human
aaauaaaagca

SEQ ID NO: 2074266 - RNA, 16 nt, Human
aaauaaaguauauaua

SEQ ID NO: 2074267 - RNA, 20 nt, Human
aaauaaaguauauauagaau

SEQ ID NO: 2074268 - RNA, 18 nt, Human
aaauaaaguuggugacag

SEQ ID NO: 2074269 - RNA, 13 nt, Human
aaaguggaaaaau

SEQ ID NO: 2074270 - RNA, 12 nt, Human
aaagucuccagc

SEQ ID NO: 2074271 - RNA, 21 nt, Human
aaaggcgcagugcuucucuac

SEQ ID NO: 2074272 - RNA, 17 nt, Human
aaaggcuaccuuauugu

SEQ ID NO: 2074273 - RNA, 19 nt, Human
aaauagugguucuuggaaa

SEQ ID NO: 2074274 - RNA, 21 nt, Human
aaauagugguucuuggaaaaa

SEQ ID NO: 2074275 - RNA, 12 nt, Human
aaauagcuauau

SEQ ID NO: 2074276 - RNA, 16 nt, Human
aaauagcuauauccau

SEQ ID NO: 2074277 - RNA, 19 nt, Human
aaauagcuauauccaugua

SEQ ID NO: 2074278 - RNA, 24 nt, Human
aaauagcucaggugucccugcacu

SEQ ID NO: 2074279 - RNA, 21 nt, Human
aaauagccacuuaccuucaau

SEQ ID NO: 2074280 - RNA, 23 nt, Human
aaauagccacuuaccuucaauaa

SEQ ID NO: 2074281 - RNA, 21 nt, Human
aaauagccgggcaugguggcg

SEQ ID NO: 2074282 - RNA, 22 nt, Human
aaaucuguccaaaggaggcugg

SEQ ID NO: 2074283 - RNA, 17 nt, Human
aaaucuguaagcucuuu

SEQ ID NO: 2074284 - RNA, 19 nt, Human
aaaucuguaagcucuuuga

SEQ ID NO: 2074285 - RNA, 21 nt, Human
aaaucuguaagcucuuugaaa

SEQ ID NO: 2074286 - RNA, 23 nt, Human
aaaucuguaagcucuuugaaaca

SEQ ID NO: 2074287 - RNA, 21 nt, Human
aaaucuguccaaaggaggcug

SEQ ID NO: 2074288 - RNA, 13 nt, Human
aaaucaaugucac

SEQ ID NO: 2074289 - RNA, 19 nt, Human
aaaucaaugcuauaacuau

SEQ ID NO: 2074290 - RNA, 14 nt, Human
aaaucaaguuucca

SEQ ID NO: 2074291 - RNA, 16 nt, Human
aaaucaaguuuccaag

SEQ ID NO: 2074292 - RNA, 20 nt, Human
aaaucaaguuuccaagcaaa

SEQ ID NO: 2074293 - RNA, 16 nt, Human
aaacccuauugguaaa

SEQ ID NO: 2074294 - RNA, 19 nt, Human
aaacccgacagagggaaga

SEQ ID NO: 2074295 - RNA, 18 nt, Human
aaacccgacagagggaag

SEQ ID NO: 2074296 - RNA, 16 nt, Human
aaacccgacagaggga

SEQ ID NO: 2074297 - RNA, 15 nt, Human
aaaccccggggcucc

SEQ ID NO: 2074298 - RNA, 20 nt, Human
aaaccauuaugaagaagaga

SEQ ID NO: 2074299 - RNA, 21 nt, Human
aaacccguuuuaugauuuacu

SEQ ID NO: 2074300 - RNA, 23 nt, Human
aaacccucguuucugauuaaugc

SEQ ID NO: 2074301 - RNA, 23 nt, Human
aaacugagacucagacaggaaag

SEQ ID NO: 2074302 - RNA, 13 nt, Human
aaagaaaucaugu

SEQ ID NO: 2074303 - RNA, 14 nt, Human
aaagaaaucauguu

SEQ ID NO: 2074304 - RNA, 16 nt, Human
aaagaaaucauguuau

SEQ ID NO: 2074305 - RNA, 18 nt, Human
aaagaaaucauguuauga

SEQ ID NO: 2074306 - RNA, 14 nt, Human
aaacucugccagcc

SEQ ID NO: 2074307 - RNA, 14 nt, Human
aaacucugggaaau

SEQ ID NO: 2074308 - RNA, 22 nt, Human
aaacucugggaaauaagagaga

SEQ ID NO: 2074309 - RNA, 21 nt, Human
aaacugagacucagacaggaa

SEQ ID NO: 2074310 - RNA, 13 nt, Human
aaagaguuaagaa

SEQ ID NO: 2074311 - RNA, 21 nt, Human
aaagaaguaacaagagugauu

SEQ ID NO: 2074312 - RNA, 20 nt, Human
aaagaagguuucagaaagaa

SEQ ID NO: 2074313 - RNA, 12 nt, Human
aaagaaggaagu

SEQ ID NO: 2074314 - RNA, 15 nt, Human
aaagaaaugcacaau

SEQ ID NO: 2074315 - RNA, 17 nt, Human
aaagaaaugcacaaugu

SEQ ID NO: 2074316 - RNA, 20 nt, Human
aaagaagcccaauauuauaa

SEQ ID NO: 2074317 - RNA, 16 nt, Human
aaagaguucuuaagga

SEQ ID NO: 2074318 - RNA, 18 nt, Human
aaagaguuugagaccuga

SEQ ID NO: 2074319 - RNA, 19 nt, Human
aaagaguuugagaccugaa

SEQ ID NO: 2074320 - RNA, 12 nt, Human
aaagauauuauu

SEQ ID NO: 2074321 - RNA, 22 nt, Human
aaagauauuauucaccauguaa

SEQ ID NO: 2074322 - RNA, 23 nt, Human
aaaauugauauacuuuuuucuua

SEQ ID NO: 2074323 - RNA, 14 nt, Human
aaaauugaauuuaa

SEQ ID NO: 2074324 - RNA, 15 nt, Human
aaaauugaauuuaac

SEQ ID NO: 2074325 - RNA, 16 nt, Human
aaaauugaauuuaaca

SEQ ID NO: 2074326 - RNA, 17 nt, Human
aaaauugaauuuaacaa

SEQ ID NO: 2074327 - RNA, 19 nt, Human
aaaauugaauuuaacaaug

SEQ ID NO: 2074328 - RNA, 20 nt, Human
aaaauugaauuuaacaaugc

SEQ ID NO: 2074329 - RNA, 21 nt, Human
aaaauugaauuuaacaaugcg

SEQ ID NO: 2074330 - RNA, 12 nt, Human
aaacacuuguaa

SEQ ID NO: 2074331 - RNA, 23 nt, Human
aaacacuaguaccuucagauccu

SEQ ID NO: 2074332 - RNA, 23 nt, Human
aaacacuauuuuuuuuucuuuug

SEQ ID NO: 2074333 - RNA, 12 nt, Human
aaacagaaaaaa

SEQ ID NO: 2074334 - RNA, 13 nt, Human
aaacagaaaaaaa

SEQ ID NO: 2074335 - RNA, 15 nt, Human
aaacagaaaaaaaac

SEQ ID NO: 2074336 - RNA, 17 nt, Human
aaacagaaaaaaaacac

SEQ ID NO: 2074337 - RNA, 22 nt, Human
aaacagacaaaaacagccucac

SEQ ID NO: 2074338 - RNA, 14 nt, Human
aaacagacucaggu

SEQ ID NO: 2074339 - RNA, 18 nt, Human
aaaaacuuuuauaaauua

SEQ ID NO: 2074340 - RNA, 23 nt, Human
aaaaacuuuuauaaauuaaauau

SEQ ID NO: 2074341 - RNA, 20 nt, Human
aaaaacucugggaaauaaga

SEQ ID NO: 2074342 - RNA, 15 nt, Human
aaaaagaaaggaggg

SEQ ID NO: 2074343 - RNA, 13 nt, Human
aaaaaauuggcau

SEQ ID NO: 2074344 - RNA, 21 nt, Human
aaaagugggccagugugggaa

SEQ ID NO: 2074345 - RNA, 19 nt, Human
aaaaguggcaagaccaaaa

SEQ ID NO: 2074346 - RNA, 23 nt, Human
aaaagugaucaauaaaaugugau

SEQ ID NO: 2074347 - RNA, 16 nt, Human
aaaauaaaauuaagaa

SEQ ID NO: 2074348 - RNA, 13 nt, Human
aaaaucauaaacu

SEQ ID NO: 2074349 - RNA, 22 nt, Human
aaaaucauaaacugugugcaga

SEQ ID NO: 2074350 - RNA, 12 nt, Human
aaaaucaugaga

SEQ ID NO: 2074351 - RNA, 15 nt, Human
aaaaucauguacauu

SEQ ID NO: 2074352 - RNA, 14 nt, Human
aaaauccuucuaau

SEQ ID NO: 2074353 - RNA, 15 nt, Human
aaaauccuucuaauc

SEQ ID NO: 2074354 - RNA, 16 nt, Human
aaaauccuucuaaucu

SEQ ID NO: 2074355 - RNA, 22 nt, Human
aaaaucccuuaccucggugccu

SEQ ID NO: 2074356 - RNA, 16 nt, Human
aaaaucauguacauuu

SEQ ID NO: 2074357 - RNA, 17 nt, Human
aaaaucauguacauuuc

SEQ ID NO: 2074358 - RNA, 18 nt, Human
aaaaucauguacauuucu

SEQ ID NO: 2074359 - RNA, 12 nt, Human
aaaaucauugau

SEQ ID NO: 2074360 - RNA, 22 nt, Human
aaaaucauugauugucagcuac

SEQ ID NO: 2074361 - RNA, 12 nt, Human
aaaauccuacca

SEQ ID NO: 2074362 - RNA, 18 nt, Human
aaaauccuaccaaccucu

SEQ ID NO: 2074363 - RNA, 22 nt, Human
aaaaguucauaacagugccauu

SEQ ID NO: 2074364 - RNA, 15 nt, Human
aaaauaaaaggucua

SEQ ID NO: 2074365 - RNA, 12 nt, Human
aaaauaaaauua

SEQ ID NO: 2074366 - RNA, 13 nt, Human
aaaauaaaauuaa

SEQ ID NO: 2074367 - RNA, 14 nt, Human
aaaaguugaaauua

SEQ ID NO: 2074368 - RNA, 19 nt, Human
aaaauaaaauuaaagcuga

SEQ ID NO: 2074369 - RNA, 12 nt, Human
aaaaguuauaac

SEQ ID NO: 2074370 - RNA, 12 nt, Human
aaaaguuauuaa

SEQ ID NO: 2074371 - RNA, 16 nt, Human
aaaaguuaaaaaaaau

SEQ ID NO: 2074372 - RNA, 18 nt, Human
aaaaguuaaaaaaaauaa

SEQ ID NO: 2074373 - RNA, 22 nt, Human
aaaaguuaaaaaaaauaauaaa

SEQ ID NO: 2074374 - RNA, 12 nt, Human
aaaaguugaaau

SEQ ID NO: 2074375 - RNA, 17 nt, Human
aaaaguuauuaauauuu

SEQ ID NO: 2074376 - RNA, 14 nt, Human
aaguccacagugga

SEQ ID NO: 2074377 - RNA, 19 nt, Human
aaguccacaguggaaccag

SEQ ID NO: 2074378 - RNA, 11 nt, Human
aagucccugcc

SEQ ID NO: 2074379 - RNA, 13 nt, Human
aagucccugcccc

SEQ ID NO: 2074380 - RNA, 14 nt, Human
aagucccugccccc

SEQ ID NO: 2074381 - RNA, 17 nt, Human
aagucccugcccccucc

SEQ ID NO: 2074382 - RNA, 18 nt, Human
aaguccucuuuucugaga

SEQ ID NO: 2074383 - RNA, 18 nt, Human
aaguauccugcuucugau

SEQ ID NO: 2074384 - RNA, 17 nt, Human
aaguaguguaucacagu

SEQ ID NO: 2074385 - RNA, 21 nt, Human
aaguaucgggggcuggggcag

SEQ ID NO: 2074386 - RNA, 17 nt, Human
aaguaucuacaugcggu

SEQ ID NO: 2074387 - RNA, 22 nt, Human
aaguccucuuuucugagaggac

SEQ ID NO: 2074388 - RNA, 18 nt, Human
aaguccuuaccucuuccg

SEQ ID NO: 2074389 - RNA, 14 nt, Human
aagucgguuagugg

SEQ ID NO: 2074390 - RNA, 17 nt, Human
aagucuaaauauuuccu

SEQ ID NO: 2074391 - RNA, 21 nt, Human
aagucucacuggcugucagua

SEQ ID NO: 2074392 - RNA, 19 nt, Human
aagucuaggagcugggagg

SEQ ID NO: 2074393 - RNA, 22 nt, Human
aagucuaggagcugggaggaaa

SEQ ID NO: 2074394 - RNA, 16 nt, Human
aagucuaaauauuucc

SEQ ID NO: 2074395 - RNA, 15 nt, Human
aaguaguggagcccc

SEQ ID NO: 2074396 - RNA, 19 nt, Human
aaguagggguuguggguga

SEQ ID NO: 2074397 - RNA, 15 nt, Human
aaguaggcaugaggg

SEQ ID NO: 2074398 - RNA, 21 nt, Human
aaguagaagucuuagauguau

SEQ ID NO: 2074399 - RNA, 18 nt, Human
aaggugccugugaggcag

SEQ ID NO: 2074400 - RNA, 11 nt, Human
aaggugccugu

SEQ ID NO: 2074401 - RNA, 20 nt, Human
aaggugccugugaggcaggg

SEQ ID NO: 2074402 - RNA, 19 nt, Human
aaguagaagucuuagaugu

SEQ ID NO: 2074403 - RNA, 20 nt, Human
aaguagaagucuuagaugua

SEQ ID NO: 2074404 - RNA, 20 nt, Human
aaggucguuuuuuucauucc

SEQ ID NO: 2074405 - RNA, 19 nt, Human
aaggucuagguggaggugg

SEQ ID NO: 2074406 - RNA, 18 nt, Human
aaggucguuuuuuucauu

SEQ ID NO: 2074407 - RNA, 12 nt, Human
aaggucucucuu

SEQ ID NO: 2074408 - RNA, 14 nt, Human
aaggucucucuuug

SEQ ID NO: 2074409 - RNA, 16 nt, Human
aaggucucucuuugga

SEQ ID NO: 2074410 - RNA, 14 nt, Human
aagggaaugcauua

SEQ ID NO: 2074411 - RNA, 12 nt, Human
aagggacaugaa

SEQ ID NO: 2074412 - RNA, 23 nt, Human
aagggaaggccccacagacaagg

SEQ ID NO: 2074413 - RNA, 16 nt, Human
aagggaaauaucauuu

SEQ ID NO: 2074414 - RNA, 16 nt, Human
aagggaacaggaaaag

SEQ ID NO: 2074415 - RNA, 15 nt, Human
aagggaaauaucauu

SEQ ID NO: 2074416 - RNA, 14 nt, Human
aagggaaauaucau

SEQ ID NO: 2074417 - RNA, 13 nt, Human
aagggaaauauca

SEQ ID NO: 2074418 - RNA, 18 nt, Human
aagggagcuaucaggaac

SEQ ID NO: 2074419 - RNA, 16 nt, Human
aagggagcagagaagg

SEQ ID NO: 2074420 - RNA, 16 nt, Human
aagggagagagagagg

SEQ ID NO: 2074421 - RNA, 24 nt, Human
aagggagcacuggguugacuuuca

SEQ ID NO: 2074422 - RNA, 17 nt, Human
aagggagagcggggcag

SEQ ID NO: 2074423 - RNA, 14 nt, Human
aagggccaguccug

SEQ ID NO: 2074424 - RNA, 16 nt, Human
aagggccaguccugcc

SEQ ID NO: 2074425 - RNA, 22 nt, Human
aagggccaguccugccuggcca

SEQ ID NO: 2074426 - RNA, 14 nt, Human
aagggaaacaguca

SEQ ID NO: 2074427 - RNA, 18 nt, Human
aagggaaacagucauuug

SEQ ID NO: 2074428 - RNA, 16 nt, Human
aagucugcauuacauu

SEQ ID NO: 2074429 - RNA, 18 nt, Human
aagucuggaucugggacc

SEQ ID NO: 2074430 - RNA, 15 nt, Human
aagucugugccugga

SEQ ID NO: 2074431 - RNA, 18 nt, Human
aagucugugccuggagcu

SEQ ID NO: 2074432 - RNA, 22 nt, Human
aagucugugccuggagcuccug

SEQ ID NO: 2074433 - RNA, 23 nt, Human
aagucugugccuggagcuccugg

SEQ ID NO: 2074434 - RNA, 12 nt, Human
aagucuccagcc

SEQ ID NO: 2074435 - RNA, 13 nt, Human
aagucuccagccc

SEQ ID NO: 2074436 - RNA, 15 nt, Human
aagucuccagcccac

SEQ ID NO: 2074437 - RNA, 21 nt, Human
aaguggaaaaauagccugccu

SEQ ID NO: 2074438 - RNA, 13 nt, Human
aagugcuuucuuc

SEQ ID NO: 2074439 - RNA, 13 nt, Human
aaguggaaauguu

SEQ ID NO: 2074440 - RNA, 16 nt, Human
aaguggaccaggacag

SEQ ID NO: 2074441 - RNA, 12 nt, Human
aaguggaaggaa

SEQ ID NO: 2074442 - RNA, 13 nt, Human
aaguggaaggaaa

SEQ ID NO: 2074443 - RNA, 14 nt, Human
aaguggaaggaaag

SEQ ID NO: 2074444 - RNA, 15 nt, Human
aaguggaaggaaaga

SEQ ID NO: 2074445 - RNA, 17 nt, Human
aaguggaaggaaagaug

SEQ ID NO: 2074446 - RNA, 19 nt, Human
aaguggaccaggacaggac

SEQ ID NO: 2074447 - RNA, 14 nt, Human
aaguguaacagcug

SEQ ID NO: 2074448 - RNA, 15 nt, Human
aaguguaacagcuga

SEQ ID NO: 2074449 - RNA, 16 nt, Human
aaguguaacagcugag

SEQ ID NO: 2074450 - RNA, 17 nt, Human
aaguguaacagcugagg

SEQ ID NO: 2074451 - RNA, 19 nt, Human
aaguggaaaaauagccugc

SEQ ID NO: 2074452 - RNA, 14 nt, Human
aaguguacuaauua

SEQ ID NO: 2074453 - RNA, 17 nt, Human
aaguguacuaauuaaca

SEQ ID NO: 2074454 - RNA, 21 nt, Human
aaguguaacagcugaggucuc

SEQ ID NO: 2074455 - RNA, 21 nt, Human
aaguguaacauaugcaaacau

SEQ ID NO: 2074456 - RNA, 11 nt, Human
aaguguaacug

SEQ ID NO: 2074457 - RNA, 12 nt, Human
aaguguaacugg

SEQ ID NO: 2074458 - RNA, 19 nt, Human
aaguguaagaaacacacug

SEQ ID NO: 2074459 - RNA, 14 nt, Human
aaguugaggcauuu

SEQ ID NO: 2074460 - RNA, 16 nt, Human
aaguugaggcauuugg

SEQ ID NO: 2074461 - RNA, 22 nt, Human
aaguugcagugagcugauauca

SEQ ID NO: 2074462 - RNA, 19 nt, Human
aagcagaugcaaagaggca

SEQ ID NO: 2074463 - RNA, 21 nt, Human
aagcagaugcaaagaggcaag

SEQ ID NO: 2074464 - RNA, 23 nt, Human
aagcagaugcaaagaggcaagag

SEQ ID NO: 2074465 - RNA, 14 nt, Human
aagcagccaagcuc

SEQ ID NO: 2074466 - RNA, 16 nt, Human
aagcagccaagcuccu

SEQ ID NO: 2074467 - RNA, 16 nt, Human
aagcagcacuuauaaa

SEQ ID NO: 2074468 - RNA, 21 nt, Human
aagcagccaagcuccuuggga

SEQ ID NO: 2074469 - RNA, 13 nt, Human
aagcagcucaaag

SEQ ID NO: 2074470 - RNA, 16 nt, Human
aagcagcucaaaggca

SEQ ID NO: 2074471 - RNA, 18 nt, Human
aagcagcucaaaggcaca

SEQ ID NO: 2074472 - RNA, 19 nt, Human
aagcagcucaaaggcacag

SEQ ID NO: 2074473 - RNA, 14 nt, Human
aagccacagcuggu

SEQ ID NO: 2074474 - RNA, 14 nt, Human
aagccacagcccag

SEQ ID NO: 2074475 - RNA, 18 nt, Human
aagccacagcccaggccu

SEQ ID NO: 2074476 - RNA, 24 nt, Human
aagccacagcccaggccuccagcu

SEQ ID NO: 2074477 - RNA, 16 nt, Human
aagagugauucuugcu

SEQ ID NO: 2074478 - RNA, 17 nt, Human
aagagugcaaaacauug

SEQ ID NO: 2074479 - RNA, 18 nt, Human
aagagugcaaaacauuga

SEQ ID NO: 2074480 - RNA, 14 nt, Human
aagagugcauuuuc

SEQ ID NO: 2074481 - RNA, 22 nt, Human
aagagugacaguggauugcauu

SEQ ID NO: 2074482 - RNA, 12 nt, Human
aagauaaaugug

SEQ ID NO: 2074483 - RNA, 13 nt, Human
aagauaaaugugc

SEQ ID NO: 2074484 - RNA, 11 nt, Human
aagauaaagga

SEQ ID NO: 2074485 - RNA, 14 nt, Human
aagauaaaggacag

SEQ ID NO: 2074486 - RNA, 13 nt, Human
aagauacaucaca

SEQ ID NO: 2074487 - RNA, 15 nt, Human
aagauacaucacagu

SEQ ID NO: 2074488 - RNA, 14 nt, Human
aagauacauuugua

SEQ ID NO: 2074489 - RNA, 15 nt, Human
aagauaccaucagca

SEQ ID NO: 2074490 - RNA, 17 nt, Human
aagauaccaucagcaaa

SEQ ID NO: 2074491 - RNA, 18 nt, Human
aagauaccaucagcaaag

SEQ ID NO: 2074492 - RNA, 14 nt, Human
aagauacgacuuua

SEQ ID NO: 2074493 - RNA, 15 nt, Human
aagauacgacuuuau

SEQ ID NO: 2074494 - RNA, 18 nt, Human
aagauacgacuuuauuuu

SEQ ID NO: 2074495 - RNA, 21 nt, Human
aagauacgacuuuauuuucug

SEQ ID NO: 2074496 - RNA, 15 nt, Human
aagauguuauacaac

SEQ ID NO: 2074497 - RNA, 15 nt, Human
aagaugugucuucaa

SEQ ID NO: 2074498 - RNA, 17 nt, Human
aagaugugucuucaauu

SEQ ID NO: 2074499 - RNA, 19 nt, Human
aagaugugucuucaauuug

SEQ ID NO: 2074500 - RNA, 11 nt, Human
aagauguuugc

SEQ ID NO: 2074501 - RNA, 16 nt, Human
aagauguuugucagau

SEQ ID NO: 2074502 - RNA, 15 nt, Human
aagauguugugucuu

SEQ ID NO: 2074503 - RNA, 18 nt, Human
aagauguugugucuugug

SEQ ID NO: 2074504 - RNA, 20 nt, Human
aagauucccagagacaggaa

SEQ ID NO: 2074505 - RNA, 18 nt, Human
aagauuccuuuucuuguu

SEQ ID NO: 2074506 - RNA, 22 nt, Human
aagauuccuuuucuuguuuauc

SEQ ID NO: 2074507 - RNA, 21 nt, Human
aagcuggucccacucagucca

SEQ ID NO: 2074508 - RNA, 18 nt, Human
aagcuggucccacucagu

SEQ ID NO: 2074509 - RNA, 15 nt, Human
aagcugggcagguug

SEQ ID NO: 2074510 - RNA, 19 nt, Human
aagcuaccucaaacuucca

SEQ ID NO: 2074511 - RNA, 13 nt, Human
aagcuguggccag

SEQ ID NO: 2074512 - RNA, 12 nt, Human
aagcuguguccu

SEQ ID NO: 2074513 - RNA, 22 nt, Human
aagcuguguccuugcaccugca

SEQ ID NO: 2074514 - RNA, 17 nt, Human
aagcuggugggugaaag

SEQ ID NO: 2074515 - RNA, 21 nt, Human
aagcuggugggugaaagaaau

SEQ ID NO: 2074516 - RNA, 23 nt, Human
aagcuggugggugaaagaaauca

SEQ ID NO: 2074517 - RNA, 17 nt, Human
aagcugugacccucaau

SEQ ID NO: 2074518 - RNA, 15 nt, Human
aaggacaggcagaaa

SEQ ID NO: 2074519 - RNA, 17 nt, Human
aaggacaggcagaaaga

SEQ ID NO: 2074520 - RNA, 18 nt, Human
aaggacaggcagaaagag

SEQ ID NO: 2074521 - RNA, 20 nt, Human
aaggacaggcagaaagaguu

SEQ ID NO: 2074522 - RNA, 13 nt, Human
aaggacaggcagg

SEQ ID NO: 2074523 - RNA, 13 nt, Human
aaggacacuagaa

SEQ ID NO: 2074524 - RNA, 20 nt, Human
aagcuguguccuugcaccug

SEQ ID NO: 2074525 - RNA, 23 nt, Human
aaggacuguuuuuuccugagcuu

SEQ ID NO: 2074526 - RNA, 15 nt, Human
aaggauugcuacugu

SEQ ID NO: 2074527 - RNA, 16 nt, Human
aaggauucauguggaa

SEQ ID NO: 2074528 - RNA, 14 nt, Human
aaggauugugauau

SEQ ID NO: 2074529 - RNA, 20 nt, Human
aaggcagggagcgagggaga

SEQ ID NO: 2074530 - RNA, 18 nt, Human
aaggcagggaaaggcucu

SEQ ID NO: 2074531 - RNA, 16 nt, Human
aaggcaggaaugugug

SEQ ID NO: 2074532 - RNA, 19 nt, Human
aaggcaggaauguguggca

SEQ ID NO: 2074533 - RNA, 21 nt, Human
aagcgauucuucugcuucagc

SEQ ID NO: 2074534 - RNA, 22 nt, Human
aagcgcuagaggaagcagccaa

SEQ ID NO: 2074535 - RNA, 21 nt, Human
aagcuaauaaaauaucauuca

SEQ ID NO: 2074536 - RNA, 18 nt, Human
aagcuaauaauucuucac

SEQ ID NO: 2074537 - RNA, 21 nt, Human
aagcggagguugcagggagcc

SEQ ID NO: 2074538 - RNA, 15 nt, Human
aagcuaauuauuuua

SEQ ID NO: 2074539 - RNA, 16 nt, Human
aagcuaauuauuuuaa

SEQ ID NO: 2074540 - RNA, 17 nt, Human
aagcuaauuauuuuaau

SEQ ID NO: 2074541 - RNA, 13 nt, Human
aauguuuccuuua

SEQ ID NO: 2074542 - RNA, 16 nt, Human
aauguuugccucugcc

SEQ ID NO: 2074543 - RNA, 15 nt, Human
aauguuugccucugc

SEQ ID NO: 2074544 - RNA, 12 nt, Human
aauguuuccuuu

SEQ ID NO: 2074545 - RNA, 23 nt, Human
aauguuuaugcaaggaaggaaag

SEQ ID NO: 2074546 - RNA, 22 nt, Human
aauguuuaugagccagacaaau

SEQ ID NO: 2074547 - RNA, 15 nt, Human
aauguuuaugagcca

SEQ ID NO: 2074548 - RNA, 16 nt, Human
aauguuuaugagccag

SEQ ID NO: 2074549 - RNA, 17 nt, Human
aauguuuaugagccaga

SEQ ID NO: 2074550 - RNA, 18 nt, Human
aauguuuaugagccagac

SEQ ID NO: 2074551 - RNA, 21 nt, Human
aauguuuaugcaaggaaggaa

SEQ ID NO: 2074552 - RNA, 22 nt, Human
aauguuuaugcaaggaaggaaa

SEQ ID NO: 2074553 - RNA, 18 nt, Human
aauguccaugauggaaua

SEQ ID NO: 2074554 - RNA, 17 nt, Human
aauguccuccagaagcc

SEQ ID NO: 2074555 - RNA, 18 nt, Human
aauguccuccagaagccu

SEQ ID NO: 2074556 - RNA, 21 nt, Human
aauguccuccagaagccucug

SEQ ID NO: 2074557 - RNA, 23 nt, Human
aauguccuccagaagccucuggc

SEQ ID NO: 2074558 - RNA, 18 nt, Human
aaugucuuuguuggaaaa

SEQ ID NO: 2074559 - RNA, 22 nt, Human
aaugucuuuguuggaaaagaau

SEQ ID NO: 2074560 - RNA, 16 nt, Human
aaugucuuguuaauau

SEQ ID NO: 2074561 - RNA, 17 nt, Human
aaugucuuguuaauauu

SEQ ID NO: 2074562 - RNA, 18 nt, Human
aaugucuuguuaauauuc

SEQ ID NO: 2074563 - RNA, 20 nt, Human
aaugucuuguuaauauucuu

SEQ ID NO: 2074564 - RNA, 21 nt, Human
aaugucuuguuaauauucuuu

SEQ ID NO: 2074565 - RNA, 17 nt, Human
aaugucuuugguccucu

SEQ ID NO: 2074566 - RNA, 14 nt, Human
aauguuuaaugcug

SEQ ID NO: 2074567 - RNA, 17 nt, Human
aaugugaaaagaaaaau

SEQ ID NO: 2074568 - RNA, 15 nt, Human
aaugugaaaagaaaa

SEQ ID NO: 2074569 - RNA, 12 nt, Human
aaugcuggagcg

SEQ ID NO: 2074570 - RNA, 17 nt, Human
aaugguguuuuuuuaau

SEQ ID NO: 2074571 - RNA, 19 nt, Human
aaugcugcgcccuucccca

SEQ ID NO: 2074572 - RNA, 23 nt, Human
aaugcuauaacuauguugauaaa

SEQ ID NO: 2074573 - RNA, 21 nt, Human
aauguccaccaauagaaugag

SEQ ID NO: 2074574 - RNA, 19 nt, Human
aaugucauuaaaauaaaua

SEQ ID NO: 2074575 - RNA, 16 nt, Human
aaugucagauuccuuu

SEQ ID NO: 2074576 - RNA, 20 nt, Human
aaugucagauuccuuucccu

SEQ ID NO: 2074577 - RNA, 18 nt, Human
aaugucaggaacagaagg

SEQ ID NO: 2074578 - RNA, 20 nt, Human
aaugucaggaacagaaggau

SEQ ID NO: 2074579 - RNA, 17 nt, Human
aaugucacuuaaaggcu

SEQ ID NO: 2074580 - RNA, 13 nt, Human
aaugucagaaaaa

SEQ ID NO: 2074581 - RNA, 17 nt, Human
aaugucagaaaaacaau

SEQ ID NO: 2074582 - RNA, 18 nt, Human
aaugucagaaaaacaaua

SEQ ID NO: 2074583 - RNA, 21 nt, Human
aaugucagaaaaacaauaaga

SEQ ID NO: 2074584 - RNA, 22 nt, Human
aaugucagaaaaacaauaagag

SEQ ID NO: 2074585 - RNA, 19 nt, Human
aaugucagaaaccaguuau

SEQ ID NO: 2074586 - RNA, 17 nt, Human
aaugguugacuggguuu

SEQ ID NO: 2074587 - RNA, 19 nt, Human
aaugcgaaugguagucuaa

SEQ ID NO: 2074588 - RNA, 20 nt, Human
aaugcgaaugguagucuaac

SEQ ID NO: 2074589 - RNA, 15 nt, Human
aaugccuuacuuugu

SEQ ID NO: 2074590 - RNA, 16 nt, Human
aaugccuuacuuugua

SEQ ID NO: 2074591 - RNA, 17 nt, Human
aaugccuuacuuuguau

SEQ ID NO: 2074592 - RNA, 18 nt, Human
aaugccuuacuuuguaug

SEQ ID NO: 2074593 - RNA, 19 nt, Human
aaugccuuacuuuguauga

SEQ ID NO: 2074594 - RNA, 21 nt, Human
aaugccuuacuuuguaugaua

SEQ ID NO: 2074595 - RNA, 20 nt, Human
aaugcggccgcauucccuga

SEQ ID NO: 2074596 - RNA, 16 nt, Human
aaugauccccagcugu

SEQ ID NO: 2074597 - RNA, 14 nt, Human
aaugaaguuuauac

SEQ ID NO: 2074598 - RNA, 15 nt, Human
aaugaaguuuauaca

SEQ ID NO: 2074599 - RNA, 17 nt, Human
aaugaaguuuauacagu

SEQ ID NO: 2074600 - RNA, 21 nt, Human
aaugaaguaacuugucuuaaa

SEQ ID NO: 2074601 - RNA, 17 nt, Human
aaugaaguuguagguaa

SEQ ID NO: 2074602 - RNA, 22 nt, Human
aaugaaggugucagaauaauaa

SEQ ID NO: 2074603 - RNA, 19 nt, Human
aaugaaaugcucuccuuuc

SEQ ID NO: 2074604 - RNA, 22 nt, Human
aaugaaggaaauaaaaaagucu

SEQ ID NO: 2074605 - RNA, 23 nt, Human
aaugaaggaaauaaaaaagucuc

SEQ ID NO: 2074606 - RNA, 17 nt, Human
aaugaaaugcucuccuu

SEQ ID NO: 2074607 - RNA, 18 nt, Human
aaugaaaugcucuccuuu

SEQ ID NO: 2074608 - RNA, 20 nt, Human
aaugaaagucuugugacuag

SEQ ID NO: 2074609 - RNA, 21 nt, Human
aaugaaagucuugugacuagu

SEQ ID NO: 2074610 - RNA, 23 nt, Human
aaugaaagucuugugacuagugc

SEQ ID NO: 2074611 - RNA, 15 nt, Human
aaugaaaguuugcac

SEQ ID NO: 2074612 - RNA, 21 nt, Human
aaugaaauaauguacaucugg

SEQ ID NO: 2074613 - RNA, 22 nt, Human
aaugauccccagcuguuuaugc

SEQ ID NO: 2074614 - RNA, 19 nt, Human
aaugauccccagcuguuua

SEQ ID NO: 2074615 - RNA, 20 nt, Human
aaugauccccagcuguuuau

SEQ ID NO: 2074616 - RNA, 22 nt, Human
aaugaucucucugaauccuaag

SEQ ID NO: 2074617 - RNA, 16 nt, Human
aaucucuccauucccg

SEQ ID NO: 2074618 - RNA, 21 nt, Human
aaucucuucuaaaaaaaaaca

SEQ ID NO: 2074619 - RNA, 19 nt, Human
aaugaaagucuugugacua

SEQ ID NO: 2074620 - RNA, 19 nt, Human
aaugaaaguauaacugagu

SEQ ID NO: 2074621 - RNA, 17 nt, Human
aaugaaaguauaacuga

SEQ ID NO: 2074622 - RNA, 14 nt, Human
aaucucucucuguu

SEQ ID NO: 2074623 - RNA, 18 nt, Human
aaucucucucuguugugu

SEQ ID NO: 2074624 - RNA, 17 nt, Human
aauccagacccggcugc

SEQ ID NO: 2074625 - RNA, 19 nt, Human
aauccagacccggcugcgu

SEQ ID NO: 2074626 - RNA, 16 nt, Human
aauccagcgguucuca

SEQ ID NO: 2074627 - RNA, 18 nt, Human
aauccagcgguucucaaa

SEQ ID NO: 2074628 - RNA, 23 nt, Human
aauccaagcgaggucaacagaga

SEQ ID NO: 2074629 - RNA, 17 nt, Human
aauauuaaacccuggau

SEQ ID NO: 2074630 - RNA, 19 nt, Human
aauauuagcuuuacuguuu

SEQ ID NO: 2074631 - RNA, 21 nt, Human
aauauuagcuuuacuguuugu

SEQ ID NO: 2074632 - RNA, 15 nt, Human
aauauuagcuuuacu

SEQ ID NO: 2074633 - RNA, 18 nt, Human
aauauuagcuuuacuguu

SEQ ID NO: 2074634 - RNA, 11 nt, Human
aauauuaucuu

SEQ ID NO: 2074635 - RNA, 15 nt, Human
aauauuaucuuugua

SEQ ID NO: 2074636 - RNA, 22 nt, Human
aauauuauacuaagaaaagaua

SEQ ID NO: 2074637 - RNA, 15 nt, Human
aauauuauacuaaga

SEQ ID NO: 2074638 - RNA, 16 nt, Human
aauauuauacuaagaa

SEQ ID NO: 2074639 - RNA, 11 nt, Human
aaucaagauaa

SEQ ID NO: 2074640 - RNA, 12 nt, Human
aaucaagauaaa

SEQ ID NO: 2074641 - RNA, 15 nt, Human
aaucaagauaaagga

SEQ ID NO: 2074642 - RNA, 17 nt, Human
aaucaagauaaaggaca

SEQ ID NO: 2074643 - RNA, 19 nt, Human
aaucacauucgaguguuuc

SEQ ID NO: 2074644 - RNA, 18 nt, Human
aauauacauucaaacuua

SEQ ID NO: 2074645 - RNA, 19 nt, Human
aauauacauucaaacuuaa

SEQ ID NO: 2074646 - RNA, 20 nt, Human
aauagaauauaauuaucgga

SEQ ID NO: 2074647 - RNA, 17 nt, Human
aauagaauauaauuauc

SEQ ID NO: 2074648 - RNA, 22 nt, Human
aauagaaggauguacauuucca

SEQ ID NO: 2074649 - RNA, 13 nt, Human
aauagaaggaaac

SEQ ID NO: 2074650 - RNA, 14 nt, Human
aauagaaggaaacu

SEQ ID NO: 2074651 - RNA, 19 nt, Human
aauagaaggaaacuagcuu

SEQ ID NO: 2074652 - RNA, 19 nt, Human
aauagaaggauguacauuu

SEQ ID NO: 2074653 - RNA, 20 nt, Human
aauagaaggauguacauuuc

SEQ ID NO: 2074654 - RNA, 19 nt, Human
aauauaccccuuaguguuu

SEQ ID NO: 2074655 - RNA, 18 nt, Human
aauauauauguugauuuc

SEQ ID NO: 2074656 - RNA, 22 nt, Human
aauauauauguugauuucuugu

SEQ ID NO: 2074657 - RNA, 13 nt, Human
aauauauauucug

SEQ ID NO: 2074658 - RNA, 14 nt, Human
aauauauauucugg

SEQ ID NO: 2074659 - RNA, 14 nt, Human
aaguugcgacggag

SEQ ID NO: 2074660 - RNA, 20 nt, Human
aaguugcgacggagagaaaa

SEQ ID NO: 2074661 - RNA, 22 nt, Human
aaguugcgacggagagaaaaaa

SEQ ID NO: 2074662 - RNA, 23 nt, Human
aaguugcgacggagagaaaaaag

SEQ ID NO: 2074663 - RNA, 20 nt, Human
aauacucuacccucuuagaa

SEQ ID NO: 2074664 - RNA, 22 nt, Human
aauacucuacccucuuagaaaa

SEQ ID NO: 2074665 - RNA, 13 nt, Human
aauacucuaauuc

SEQ ID NO: 2074666 - RNA, 15 nt, Human
aauacucuaauucua

SEQ ID NO: 2074667 - RNA, 16 nt, Human
aauacucuaauucuaa

SEQ ID NO: 2074668 - RNA, 17 nt, Human
aauacucuaauucuaac

SEQ ID NO: 2074669 - RNA, 23 nt, Human
aauacucuuaggaagagaaacca

SEQ ID NO: 2074670 - RNA, 13 nt, Human
aauacuagccaga

SEQ ID NO: 2074671 - RNA, 14 nt, Human
aauacuagccagag

SEQ ID NO: 2074672 - RNA, 17 nt, Human
aauagaaaacaggaaaa

SEQ ID NO: 2074673 - RNA, 17 nt, Human
agacgugauuuugcugu

SEQ ID NO: 2074674 - RNA, 18 nt, Human
agacguaugcuuauuuua

SEQ ID NO: 2074675 - RNA, 19 nt, Human
agacguaugcuuauuuuaa

SEQ ID NO: 2074676 - RNA, 14 nt, Human
agacgucccuccac

SEQ ID NO: 2074677 - RNA, 22 nt, Human
agacgugcacgcacacugucug

SEQ ID NO: 2074678 - RNA, 21 nt, Human
agacgugcacgcacacugucu

SEQ ID NO: 2074679 - RNA, 18 nt, Human
agacggagucccaccuug

SEQ ID NO: 2074680 - RNA, 19 nt, Human
agacgguucaccagccucu

SEQ ID NO: 2074681 - RNA, 16 nt, Human
agacguaugcuuauuu

SEQ ID NO: 2074682 - RNA, 13 nt, Human
agacccccacucu

SEQ ID NO: 2074683 - RNA, 20 nt, Human
agacccccagcaacccuccu

SEQ ID NO: 2074684 - RNA, 13 nt, Human
agacccccacccc

SEQ ID NO: 2074685 - RNA, 14 nt, Human
agacccccaccccu

SEQ ID NO: 2074686 - RNA, 16 nt, Human
agacccccaccccuuc

SEQ ID NO: 2074687 - RNA, 17 nt, Human
agacccccaccccuucc

SEQ ID NO: 2074688 - RNA, 19 nt, Human
agacccccaccccuucccc

SEQ ID NO: 2074689 - RNA, 20 nt, Human
agacccccaccccuucccca

SEQ ID NO: 2074690 - RNA, 21 nt, Human
agacccccaccccuuccccac

SEQ ID NO: 2074691 - RNA, 12 nt, Human
agacccccacuc

SEQ ID NO: 2074692 - RNA, 13 nt, Human
agacccccacacc

SEQ ID NO: 2074693 - RNA, 14 nt, Human
agacccccacaccu

SEQ ID NO: 2074694 - RNA, 15 nt, Human
agacccccacaccuc

SEQ ID NO: 2074695 - RNA, 11 nt, Human
agacccccacc

SEQ ID NO: 2074696 - RNA, 12 nt, Human
agacccccaccc

SEQ ID NO: 2074697 - RNA, 16 nt, Human
agacccauuccuauuu

SEQ ID NO: 2074698 - RNA, 20 nt, Human
agacagcucccucugccuga

SEQ ID NO: 2074699 - RNA, 15 nt, Human
agacccauuccuauu

SEQ ID NO: 2074700 - RNA, 15 nt, Human
agacagcucccucug

SEQ ID NO: 2074701 - RNA, 18 nt, Human
agacagcucccucugccu

SEQ ID NO: 2074702 - RNA, 19 nt, Human
agacagcucccucugccug

SEQ ID NO: 2074703 - RNA, 14 nt, Human
agacaacccugcaa

SEQ ID NO: 2074704 - RNA, 20 nt, Human
agacaacccugcaaaggacu

SEQ ID NO: 2074705 - RNA, 21 nt, Human
agacaacccugcaaaggacug

SEQ ID NO: 2074706 - RNA, 15 nt, Human
agacaacagaaguca

SEQ ID NO: 2074707 - RNA, 13 nt, Human
agacaacagaagu

SEQ ID NO: 2074708 - RNA, 14 nt, Human
agacaacagaaguc

SEQ ID NO: 2074709 - RNA, 23 nt, Human
agacagagucucacuguugccca

SEQ ID NO: 2074710 - RNA, 15 nt, Human
agacaagaagcaaau

SEQ ID NO: 2074711 - RNA, 17 nt, Human
agacaaauucuguuucu

SEQ ID NO: 2074712 - RNA, 18 nt, Human
agacaaauucuguuucuu

SEQ ID NO: 2074713 - RNA, 19 nt, Human
agacaaauucuguuucuug

SEQ ID NO: 2074714 - RNA, 21 nt, Human
agacaaauucuguuucuugag

SEQ ID NO: 2074715 - RNA, 23 nt, Human
agacugcgggaugguccuggggc

SEQ ID NO: 2074716 - RNA, 20 nt, Human
agacugcgggaugguccugg

SEQ ID NO: 2074717 - RNA, 22 nt, Human
agacugcgggaugguccugggg

SEQ ID NO: 2074718 - RNA, 16 nt, Human
agacuggaagcacagc

SEQ ID NO: 2074719 - RNA, 17 nt, Human
agacuggaagcacagcu

SEQ ID NO: 2074720 - RNA, 19 nt, Human
agacuggaagcacagcuuc

SEQ ID NO: 2074721 - RNA, 14 nt, Human
agacugcugggacu

SEQ ID NO: 2074722 - RNA, 15 nt, Human
agacugcugggacug

SEQ ID NO: 2074723 - RNA, 19 nt, Human
agagagcugagugagcuga

SEQ ID NO: 2074724 - RNA, 23 nt, Human
agagagccuugguucaucagugu

SEQ ID NO: 2074725 - RNA, 18 nt, Human
agagagcgagcgcuaccc

SEQ ID NO: 2074726 - RNA, 13 nt, Human
agagaacuagugg

SEQ ID NO: 2074727 - RNA, 21 nt, Human
agagaggguggugaccucugc

SEQ ID NO: 2074728 - RNA, 20 nt, Human
agagaggguggugaccucug

SEQ ID NO: 2074729 - RNA, 22 nt, Human
agagaggguggugaccucugcc

SEQ ID NO: 2074730 - RNA, 17 nt, Human
agagagcuguucccaaa

SEQ ID NO: 2074731 - RNA, 23 nt, Human
agagagcugguaguuaguagcau

SEQ ID NO: 2074732 - RNA, 11 nt, Human
agagagcuggu

SEQ ID NO: 2074733 - RNA, 12 nt, Human
agagagcuggua

SEQ ID NO: 2074734 - RNA, 19 nt, Human
agagcccaccuuggcucaa

SEQ ID NO: 2074735 - RNA, 16 nt, Human
agaguucacuauaaau

SEQ ID NO: 2074736 - RNA, 13 nt, Human
agaguucaguaag

SEQ ID NO: 2074737 - RNA, 22 nt, Human
agaguucaguaagaccggaagc

SEQ ID NO: 2074738 - RNA, 16 nt, Human
agaguuagguuuaaca

SEQ ID NO: 2074739 - RNA, 18 nt, Human
agaguuagguuuaacaua

SEQ ID NO: 2074740 - RNA, 20 nt, Human
agaguuagguuuaacauaaa

SEQ ID NO: 2074741 - RNA, 21 nt, Human
agaguuagguuuaacauaaag

SEQ ID NO: 2074742 - RNA, 23 nt, Human
agaguuagguuuaacauaaaggu

SEQ ID NO: 2074743 - RNA, 19 nt, Human
agaguuaguuucuuuggga

SEQ ID NO: 2074744 - RNA, 16 nt, Human
agauauauuuuucaca

SEQ ID NO: 2074745 - RNA, 14 nt, Human
agauauauuuuuca

SEQ ID NO: 2074746 - RNA, 15 nt, Human
agauauauuuuucac

SEQ ID NO: 2074747 - RNA, 19 nt, Human
agauauaugcucugcaugu

SEQ ID NO: 2074748 - RNA, 12 nt, Human
agaucuuucagg

SEQ ID NO: 2074749 - RNA, 13 nt, Human
agaucuuucagga

SEQ ID NO: 2074750 - RNA, 21 nt, Human
agaucuuucaggaaagacgga

SEQ ID NO: 2074751 - RNA, 16 nt, Human
agaugggaugcuugcc

SEQ ID NO: 2074752 - RNA, 16 nt, Human
agaugggcuuguuuuc

SEQ ID NO: 2074753 - RNA, 17 nt, Human
agaugggcuuguuuucu

SEQ ID NO: 2074754 - RNA, 14 nt, Human
agauggcugugccu

SEQ ID NO: 2074755 - RNA, 22 nt, Human
agauggcugacuuugcucuuuc

SEQ ID NO: 2074756 - RNA, 14 nt, Human
agauggccuuugcu

SEQ ID NO: 2074757 - RNA, 15 nt, Human
agauggccuuugcuu

SEQ ID NO: 2074758 - RNA, 23 nt, Human
agauggccuuugcuuaugaauau

SEQ ID NO: 2074759 - RNA, 15 nt, Human
agauggcccucuggu

SEQ ID NO: 2074760 - RNA, 19 nt, Human
agagugugggaagggagag

SEQ ID NO: 2074761 - RNA, 20 nt, Human
agagugugggaagggagagc

SEQ ID NO: 2074762 - RNA, 17 nt, Human
agaguguggccuucgga

SEQ ID NO: 2074763 - RNA, 14 nt, Human
agagugugccugaa

SEQ ID NO: 2074764 - RNA, 22 nt, Human
agagugucuucacggcaggaca

SEQ ID NO: 2074765 - RNA, 19 nt, Human
agagugugaaauagacauu

SEQ ID NO: 2074766 - RNA, 19 nt, Human
agaguggcuccucccggug

SEQ ID NO: 2074767 - RNA, 11 nt, Human
agagugggagc

SEQ ID NO: 2074768 - RNA, 23 nt, Human
agaguggcuccucccggugccca

SEQ ID NO: 2074769 - RNA, 20 nt, Human
agagugucuucacggcagga

SEQ ID NO: 2074770 - RNA, 19 nt, Human
agaguggggauaugauuua

SEQ ID NO: 2074771 - RNA, 19 nt, Human
agaggguggugaccucugc

SEQ ID NO: 2074772 - RNA, 21 nt, Human
agagggcccaggcaggccacc

SEQ ID NO: 2074773 - RNA, 22 nt, Human
agaggguggugaccucugccug

SEQ ID NO: 2074774 - RNA, 20 nt, Human
agaggguggugaccucugcc

SEQ ID NO: 2074775 - RNA, 23 nt, Human
agagggcaugcgcacaaggcuga

SEQ ID NO: 2074776 - RNA, 14 nt, Human
agagggcccaggca

SEQ ID NO: 2074777 - RNA, 16 nt, Human
agagggcccaggcagg

SEQ ID NO: 2074778 - RNA, 17 nt, Human
agagggcccaggcaggc

SEQ ID NO: 2074779 - RNA, 14 nt, Human
agagggcagaggcu

SEQ ID NO: 2074780 - RNA, 15 nt, Human
agaggagaaacacau

SEQ ID NO: 2074781 - RNA, 14 nt, Human
agaggagaaacaca

SEQ ID NO: 2074782 - RNA, 21 nt, Human
agaggacaccuguacuggaga

SEQ ID NO: 2074783 - RNA, 23 nt, Human
agaggacaccuguacuggagagc

SEQ ID NO: 2074784 - RNA, 13 nt, Human
agaggaagagcag

SEQ ID NO: 2074785 - RNA, 17 nt, Human
agaggaagagugcaaaa

SEQ ID NO: 2074786 - RNA, 14 nt, Human
agaggacgugggcg

SEQ ID NO: 2074787 - RNA, 16 nt, Human
agaggacgugggcggc

SEQ ID NO: 2074788 - RNA, 13 nt, Human
agaggaacugggc

SEQ ID NO: 2074789 - RNA, 16 nt, Human
agaggaaggagaggag

SEQ ID NO: 2074790 - RNA, 14 nt, Human
agaggaaccaaccc

SEQ ID NO: 2074791 - RNA, 14 nt, Human
agagccccacacgg

SEQ ID NO: 2074792 - RNA, 14 nt, Human
agccgcuccugucu

SEQ ID NO: 2074793 - RNA, 20 nt, Human
agccgccauugccaccagga

SEQ ID NO: 2074794 - RNA, 21 nt, Human
agccgccauugccaccaggag

SEQ ID NO: 2074795 - RNA, 22 nt, Human
agccgccauugccaccaggaga

SEQ ID NO: 2074796 - RNA, 22 nt, Human
agccgcuccugucugccagcca

SEQ ID NO: 2074797 - RNA, 16 nt, Human
agccgcuccugucugc

SEQ ID NO: 2074798 - RNA, 17 nt, Human
agccgcuccugucugcc

SEQ ID NO: 2074799 - RNA, 19 nt, Human
agccgcuccugucugccag

SEQ ID NO: 2074800 - RNA, 21 nt, Human
agccgcuccugucugccagcc

SEQ ID NO: 2074801 - RNA, 12 nt, Human
agccgcugcugg

SEQ ID NO: 2074802 - RNA, 23 nt, Human
agccgggaacagacaacagaagu

SEQ ID NO: 2074803 - RNA, 21 nt, Human
agccgccaugcuccuggccca

SEQ ID NO: 2074804 - RNA, 13 nt, Human
agccgccacaucc

SEQ ID NO: 2074805 - RNA, 14 nt, Human
agccgccaggaccg

SEQ ID NO: 2074806 - RNA, 21 nt, Human
agccgccaggaccgccaaaga

SEQ ID NO: 2074807 - RNA, 17 nt, Human
agccgccauugccacca

SEQ ID NO: 2074808 - RNA, 18 nt, Human
agccgccauugccaccag

SEQ ID NO: 2074809 - RNA, 19 nt, Human
agccgccauugccaccagg

SEQ ID NO: 2074810 - RNA, 17 nt, Human
agcccuccuuccacgga

SEQ ID NO: 2074811 - RNA, 12 nt, Human
agcccuccuucc

SEQ ID NO: 2074812 - RNA, 13 nt, Human
agcccuccuucca

SEQ ID NO: 2074813 - RNA, 14 nt, Human
agcccuccucaccc

SEQ ID NO: 2074814 - RNA, 11 nt, Human
agcccuccuuc

SEQ ID NO: 2074815 - RNA, 16 nt, Human
agcccucucacugugu

SEQ ID NO: 2074816 - RNA, 17 nt, Human
agcccucucacuguguc

SEQ ID NO: 2074817 - RNA, 18 nt, Human
agcccucucacugugucc

SEQ ID NO: 2074818 - RNA, 19 nt, Human
agcccucucacuguguccc

SEQ ID NO: 2074819 - RNA, 23 nt, Human
agcccucucuggcuaaggacagg

SEQ ID NO: 2074820 - RNA, 21 nt, Human
agccgcaucuucuccaucugg

SEQ ID NO: 2074821 - RNA, 24 nt, Human
agcccuccgccauucucaagcccu

SEQ ID NO: 2074822 - RNA, 12 nt, Human
agcccuccucac

SEQ ID NO: 2074823 - RNA, 13 nt, Human
agcccuccucacc

SEQ ID NO: 2074824 - RNA, 23 nt, Human
agcccuccgccauucucaagccc

SEQ ID NO: 2074825 - RNA, 21 nt, Human
agcccucccuguccuccucgg

SEQ ID NO: 2074826 - RNA, 22 nt, Human
agcccucccuguccuccucgga

SEQ ID NO: 2074827 - RNA, 15 nt, Human
agcccucccuguccu

SEQ ID NO: 2074828 - RNA, 16 nt, Human
agcccucccuguccuc

SEQ ID NO: 2074829 - RNA, 17 nt, Human
agcccucccuguccucc

SEQ ID NO: 2074830 - RNA, 19 nt, Human
agcccucccuguccuccuc

SEQ ID NO: 2074831 - RNA, 20 nt, Human
agcccucccuguccuccucg

SEQ ID NO: 2074832 - RNA, 20 nt, Human
agccgucagccaaauguaau

SEQ ID NO: 2074833 - RNA, 22 nt, Human
agccgggcgugguggcgggcac

SEQ ID NO: 2074834 - RNA, 16 nt, Human
agccgugccuucagcu

SEQ ID NO: 2074835 - RNA, 15 nt, Human
agccgugccuucagc

SEQ ID NO: 2074836 - RNA, 17 nt, Human
agccgugccuucagcuc

SEQ ID NO: 2074837 - RNA, 21 nt, Human
agccucccaaagugcugggau

SEQ ID NO: 2074838 - RNA, 22 nt, Human
agccucccacgacugcccggca

SEQ ID NO: 2074839 - RNA, 16 nt, Human
agccgugcccugcccc

SEQ ID NO: 2074840 - RNA, 19 nt, Human
agccucccgaguagcuggg

SEQ ID NO: 2074841 - RNA, 18 nt, Human
agccucccgaguagcugg

SEQ ID NO: 2074842 - RNA, 20 nt, Human
agccucccgaguagcuggga

SEQ ID NO: 2074843 - RNA, 13 nt, Human
agccucccacccc

SEQ ID NO: 2074844 - RNA, 23 nt, Human
agccuccggaguagcugggacca

SEQ ID NO: 2074845 - RNA, 17 nt, Human
agccuccguauuucaga

SEQ ID NO: 2074846 - RNA, 18 nt, Human
agccuccguauuucagac

SEQ ID NO: 2074847 - RNA, 14 nt, Human
agccuccuccagcc

SEQ ID NO: 2074848 - RNA, 16 nt, Human
agccccauucugccug

SEQ ID NO: 2074849 - RNA, 13 nt, Human
agccccauucugc

SEQ ID NO: 2074850 - RNA, 17 nt, Human
agcccguguggccccuu

SEQ ID NO: 2074851 - RNA, 18 nt, Human
agcccguguggccccuuc

SEQ ID NO: 2074852 - RNA, 19 nt, Human
agcccguguggccccuuca

SEQ ID NO: 2074853 - RNA, 15 nt, Human
agcccguguggcccc

SEQ ID NO: 2074854 - RNA, 16 nt, Human
agcccguguggccccu

SEQ ID NO: 2074855 - RNA, 20 nt, Human
agccccagugccaagcacag

SEQ ID NO: 2074856 - RNA, 23 nt, Human
agccccagugccaagcacagugc

SEQ ID NO: 2074857 - RNA, 15 nt, Human
agccccagugcccac

SEQ ID NO: 2074858 - RNA, 14 nt, Human
agccccagugccca

SEQ ID NO: 2074859 - RNA, 13 nt, Human
agccccagugccc

SEQ ID NO: 2074860 - RNA, 13 nt, Human
agccccagugcca

SEQ ID NO: 2074861 - RNA, 23 nt, Human
agcauccuggcacccggccccug

SEQ ID NO: 2074862 - RNA, 22 nt, Human
agcauccuggcacccggccccu

SEQ ID NO: 2074863 - RNA, 18 nt, Human
agcauccuggcacccggc

SEQ ID NO: 2074864 - RNA, 20 nt, Human
agcauccuuaaguaucagaa

SEQ ID NO: 2074865 - RNA, 19 nt, Human
agcauccuuuucugcagag

SEQ ID NO: 2074866 - RNA, 21 nt, Human
agcauccuuuucugcagaggg

SEQ ID NO: 2074867 - RNA, 20 nt, Human
agcaugaauuuuuuucaucu

SEQ ID NO: 2074868 - RNA, 22 nt, Human
agcaugaaugguauggaacucu

SEQ ID NO: 2074869 - RNA, 22 nt, Human
agcaugacaagccccaggcagg

SEQ ID NO: 2074870 - RNA, 20 nt, Human
agcaugacaagccccaggca

SEQ ID NO: 2074871 - RNA, 21 nt, Human
agcaugacaagccccaggcag

SEQ ID NO: 2074872 - RNA, 17 nt, Human
agcaugacaagccccag

SEQ ID NO: 2074873 - RNA, 18 nt, Human
agcaugacaagccccagg

SEQ ID NO: 2074874 - RNA, 19 nt, Human
agcaugacaagccccaggc

SEQ ID NO: 2074875 - RNA, 18 nt, Human
agcaugaccugugaccag

SEQ ID NO: 2074876 - RNA, 23 nt, Human
agccaagugugguagagugugcc

SEQ ID NO: 2074877 - RNA, 21 nt, Human
agccaagucagcuuugccuuc

SEQ ID NO: 2074878 - RNA, 19 nt, Human
agccaaccuuacuuacagc

SEQ ID NO: 2074879 - RNA, 23 nt, Human
agccaaccuuacuuacagcauaa

SEQ ID NO: 2074880 - RNA, 23 nt, Human
agccaagucagcuuugccuucca

SEQ ID NO: 2074881 - RNA, 14 nt, Human
agccaaccccugug

SEQ ID NO: 2074882 - RNA, 16 nt, Human
agccaaccccugugga

SEQ ID NO: 2074883 - RNA, 19 nt, Human
agcaugagagaauuguauc

SEQ ID NO: 2074884 - RNA, 22 nt, Human
agcaugaccugugaccagcacu

SEQ ID NO: 2074885 - RNA, 23 nt, Human
agcaugaccugugaccagcacug

SEQ ID NO: 2074886 - RNA, 21 nt, Human
agcaugcugugauugugccua

SEQ ID NO: 2074887 - RNA, 13 nt, Human
agcaugcuuucug

SEQ ID NO: 2074888 - RNA, 21 nt, Human
agccaacagucaaaacagaga

SEQ ID NO: 2074889 - RNA, 18 nt, Human
agccaacagaagcuucca

SEQ ID NO: 2074890 - RNA, 20 nt, Human
agccaaauguaauugaauaa

SEQ ID NO: 2074891 - RNA, 23 nt, Human
agccaaauguggcauuugugauc

SEQ ID NO: 2074892 - RNA, 16 nt, Human
agcauggagaacagug

SEQ ID NO: 2074893 - RNA, 17 nt, Human
agccaaaucaaaauaug

SEQ ID NO: 2074894 - RNA, 13 nt, Human
agcaguucugcaa

SEQ ID NO: 2074895 - RNA, 16 nt, Human
agcaguucugcaaaua

SEQ ID NO: 2074896 - RNA, 23 nt, Human
agcaguucugcaaauagaaaaca

SEQ ID NO: 2074897 - RNA, 20 nt, Human
agcaguucaccuauuucaaa

SEQ ID NO: 2074898 - RNA, 22 nt, Human
agcaguucaccuauuucaaaaa

SEQ ID NO: 2074899 - RNA, 21 nt, Human
agcaguuacaaaaaccuuccc

SEQ ID NO: 2074900 - RNA, 20 nt, Human
agcagugucuuccauaaugu

SEQ ID NO: 2074901 - RNA, 15 nt, Human
agcagugugucuccu

SEQ ID NO: 2074902 - RNA, 16 nt, Human
agcagugugucuccug

SEQ ID NO: 2074903 - RNA, 17 nt, Human
agcagugugucuccugc

SEQ ID NO: 2074904 - RNA, 21 nt, Human
agcagugugucuccugcaugc

SEQ ID NO: 2074905 - RNA, 22 nt, Human
agcagugugucuccugcaugca

SEQ ID NO: 2074906 - RNA, 19 nt, Human
agcagugccuuccauaauu

SEQ ID NO: 2074907 - RNA, 12 nt, Human
agcacuguauac

SEQ ID NO: 2074908 - RNA, 15 nt, Human
agcagugucuuccau

SEQ ID NO: 2074909 - RNA, 16 nt, Human
agcagugucuuccaua

SEQ ID NO: 2074910 - RNA, 17 nt, Human
agcagugucuuccauaa

SEQ ID NO: 2074911 - RNA, 22 nt, Human
agcagugucuuccauaauguau

SEQ ID NO: 2074912 - RNA, 16 nt, Human
agcagugccuuccaua

SEQ ID NO: 2074913 - RNA, 17 nt, Human
agcagugccuuccauaa

SEQ ID NO: 2074914 - RNA, 20 nt, Human
agcagugccuuccauaauua

SEQ ID NO: 2074915 - RNA, 22 nt, Human
agcagcgguuuggggagcagag

SEQ ID NO: 2074916 - RNA, 23 nt, Human
agcagcgguuuggggagcagaga

SEQ ID NO: 2074917 - RNA, 15 nt, Human
agcagcggacuucaa

SEQ ID NO: 2074918 - RNA, 17 nt, Human
agcagcgguuuggggag

SEQ ID NO: 2074919 - RNA, 14 nt, Human
agcacugucucagu

SEQ ID NO: 2074920 - RNA, 20 nt, Human
agcacugucucaguuucacu

SEQ ID NO: 2074921 - RNA, 17 nt, Human
agcacuggguugacuuu

SEQ ID NO: 2074922 - RNA, 16 nt, Human
agcacagaaggaggag

SEQ ID NO: 2074923 - RNA, 14 nt, Human
agcacucgugugca

SEQ ID NO: 2074924 - RNA, 19 nt, Human
agcacucugaguuuaccau

SEQ ID NO: 2074925 - RNA, 23 nt, Human
agcacucugaguuuaccauuugu

SEQ ID NO: 2074926 - RNA, 14 nt, Human
agcacacuguagca

SEQ ID NO: 2074927 - RNA, 19 nt, Human
agcacacuguagcauuaca

SEQ ID NO: 2074928 - RNA, 15 nt, Human
agcacagaaaacuag

SEQ ID NO: 2074929 - RNA, 16 nt, Human
agcacagaaaacuaga

SEQ ID NO: 2074930 - RNA, 13 nt, Human
agcacagaaggag

SEQ ID NO: 2074931 - RNA, 18 nt, Human
agaugggcuuguuuucuu

SEQ ID NO: 2074932 - RNA, 19 nt, Human
agaugggcuuguuuucuug

SEQ ID NO: 2074933 - RNA, 18 nt, Human
aggaguggguugauuuca

SEQ ID NO: 2074934 - RNA, 12 nt, Human
aggagucccugg

SEQ ID NO: 2074935 - RNA, 16 nt, Human
aggagucccaaggaaa

SEQ ID NO: 2074936 - RNA, 17 nt, Human
aggagucccaaggaaag

SEQ ID NO: 2074937 - RNA, 20 nt, Human
aggaguuagaggccagccug

SEQ ID NO: 2074938 - RNA, 21 nt, Human
aggaguucaagaccagccugg

SEQ ID NO: 2074939 - RNA, 22 nt, Human
aggaguucaagaccagccuggc

SEQ ID NO: 2074940 - RNA, 17 nt, Human
aggaguuagaggccagc

SEQ ID NO: 2074941 - RNA, 16 nt, Human
aggaguguggccacgu

SEQ ID NO: 2074942 - RNA, 16 nt, Human
aggagugugagaauca

SEQ ID NO: 2074943 - RNA, 16 nt, Human
aggagaauccaagcga

SEQ ID NO: 2074944 - RNA, 18 nt, Human
aggagaauccaagcgagg

SEQ ID NO: 2074945 - RNA, 13 nt, Human
aggagaauugcuu

SEQ ID NO: 2074946 - RNA, 20 nt, Human
aggagaauugcuugaaccug

SEQ ID NO: 2074947 - RNA, 20 nt, Human
aggagaauggcgugaacccg

SEQ ID NO: 2074948 - RNA, 20 nt, Human
aggagaaucgcuugaaccca

SEQ ID NO: 2074949 - RNA, 14 nt, Human
aggagucccaagga

SEQ ID NO: 2074950 - RNA, 14 nt, Human
aggagucagagaga

SEQ ID NO: 2074951 - RNA, 12 nt, Human
aggagaaggaag

SEQ ID NO: 2074952 - RNA, 16 nt, Human
aggagaaggaaggaga

SEQ ID NO: 2074953 - RNA, 19 nt, Human
aggaccuagggauguucug

SEQ ID NO: 2074954 - RNA, 16 nt, Human
aggaccuauguuugcu

SEQ ID NO: 2074955 - RNA, 21 nt, Human
aggaccuauguuugcucagaa

SEQ ID NO: 2074956 - RNA, 22 nt, Human
aggaccuagggauguucuggcc

SEQ ID NO: 2074957 - RNA, 13 nt, Human
aggaccucaggug

SEQ ID NO: 2074958 - RNA, 16 nt, Human
aggaccgccaaagaau

SEQ ID NO: 2074959 - RNA, 22 nt, Human
aggacccuucccuugagcccuc

SEQ ID NO: 2074960 - RNA, 16 nt, Human
aggauguucugggaca

SEQ ID NO: 2074961 - RNA, 15 nt, Human
aggauguucugggac

SEQ ID NO: 2074962 - RNA, 13 nt, Human
aggauggagagag

SEQ ID NO: 2074963 - RNA, 14 nt, Human
aggauggagagagg

SEQ ID NO: 2074964 - RNA, 15 nt, Human
aggauggagagaggg

SEQ ID NO: 2074965 - RNA, 16 nt, Human
aggauggagagagggg

SEQ ID NO: 2074966 - RNA, 17 nt, Human
aggauggagagagggga

SEQ ID NO: 2074967 - RNA, 19 nt, Human
aggauggagagaggggaau

SEQ ID NO: 2074968 - RNA, 18 nt, Human
aggauguaaacagugccu

SEQ ID NO: 2074969 - RNA, 19 nt, Human
aggauguaaacagugccug

SEQ ID NO: 2074970 - RNA, 22 nt, Human
aggauguaaacagugccugcug

SEQ ID NO: 2074971 - RNA, 20 nt, Human
aggauguaaacagugccugc

SEQ ID NO: 2074972 - RNA, 21 nt, Human
aggauguaaacagugccugcu

SEQ ID NO: 2074973 - RNA, 18 nt, Human
aggauguucugggacaca

SEQ ID NO: 2074974 - RNA, 16 nt, Human
aggauuacaugcaugu

SEQ ID NO: 2074975 - RNA, 14 nt, Human
aggauuauuggaaa

SEQ ID NO: 2074976 - RNA, 20 nt, Human
aggacccaucacgccugugc

SEQ ID NO: 2074977 - RNA, 18 nt, Human
aggacccaucacgccugu

SEQ ID NO: 2074978 - RNA, 20 nt, Human
aggacccuucccuugagccc

SEQ ID NO: 2074979 - RNA, 13 nt, Human
aggacccuucccu

SEQ ID NO: 2074980 - RNA, 12 nt, Human
aggacccuuccc

SEQ ID NO: 2074981 - RNA, 19 nt, Human
aggacccuucagagguggc

SEQ ID NO: 2074982 - RNA, 17 nt, Human
aggaauccagacccggc

SEQ ID NO: 2074983 - RNA, 20 nt, Human
aggaauccagacccggcugc

SEQ ID NO: 2074984 - RNA, 13 nt, Human
agcuuuuugucuu

SEQ ID NO: 2074985 - RNA, 13 nt, Human
agcuuuugcuuuu

SEQ ID NO: 2074986 - RNA, 17 nt, Human
agcuuccccucucuccu

SEQ ID NO: 2074987 - RNA, 23 nt, Human
agcuuccauuccaagccugacca

SEQ ID NO: 2074988 - RNA, 14 nt, Human
agcuuccaggaaaa

SEQ ID NO: 2074989 - RNA, 21 nt, Human
agcuuccaggaaaaaggacag

SEQ ID NO: 2074990 - RNA, 22 nt, Human
agcuuccaggaaaaaggacagg

SEQ ID NO: 2074991 - RNA, 20 nt, Human
agcuuccaggcugcauagaa

SEQ ID NO: 2074992 - RNA, 21 nt, Human
agcuuccaggcugcauagaag

SEQ ID NO: 2074993 - RNA, 13 nt, Human
agcugcuaaaucu

SEQ ID NO: 2074994 - RNA, 14 nt, Human
agcugcuaaaucuc

SEQ ID NO: 2074995 - RNA, 15 nt, Human
agcugcuaaaucucc

SEQ ID NO: 2074996 - RNA, 22 nt, Human
agcugcuaaaucuccuauuuuu

SEQ ID NO: 2074997 - RNA, 23 nt, Human
agcugcgguccacccaggagccc

SEQ ID NO: 2074998 - RNA, 17 nt, Human
agcucccuaggagacca

SEQ ID NO: 2074999 - RNA, 15 nt, Human
agcucccuaggagac

SEQ ID NO: 2075000 - RNA, 13 nt, Human
agcucccucugcc

SEQ ID NO: 2075001 - RNA, 14 nt, Human
agcucccucugccu

SEQ ID NO: 2075002 - RNA, 23 nt, Human
agcuccgcuuucuacccagcgag

SEQ ID NO: 2075003 - RNA, 21 nt, Human
agcuccgcuuucuacccagcg

SEQ ID NO: 2075004 - RNA, 20 nt, Human
agcuccgcuuucuacccagc

SEQ ID NO: 2075005 - RNA, 13 nt, Human
agcuccuucuguc

SEQ ID NO: 2075006 - RNA, 12 nt, Human
agcuccuucugu

SEQ ID NO: 2075007 - RNA, 14 nt, Human
agcugagaauagaa

SEQ ID NO: 2075008 - RNA, 15 nt, Human
agcugagaauagaag

SEQ ID NO: 2075009 - RNA, 16 nt, Human
agcugagaauagaagg

SEQ ID NO: 2075010 - RNA, 17 nt, Human
agcugagaauagaagga

SEQ ID NO: 2075011 - RNA, 18 nt, Human
agcugagaauagaaggaa

SEQ ID NO: 2075012 - RNA, 20 nt, Human
agcugagaauagaaggaaac

SEQ ID NO: 2075013 - RNA, 23 nt, Human
agcugagaauagaaggaaacuag

SEQ ID NO: 2075014 - RNA, 21 nt, Human
agcugcgguccacccaggagc

SEQ ID NO: 2075015 - RNA, 15 nt, Human
agcugagcaccaggg

SEQ ID NO: 2075016 - RNA, 13 nt, Human
agcugagcaggga

SEQ ID NO: 2075017 - RNA, 15 nt, Human
agcugagcagggaga

SEQ ID NO: 2075018 - RNA, 12 nt, Human
agcugaaauacu

SEQ ID NO: 2075019 - RNA, 18 nt, Human
aggcuguaucccaugagc

SEQ ID NO: 2075020 - RNA, 13 nt, Human
aggcuguauccca

SEQ ID NO: 2075021 - RNA, 13 nt, Human
aggcuacucaccu

SEQ ID NO: 2075022 - RNA, 15 nt, Human
aggcuagaucaugaa

SEQ ID NO: 2075023 - RNA, 19 nt, Human
aggcuguccuuacccaucu

SEQ ID NO: 2075024 - RNA, 21 nt, Human
aggcuguccuuacccaucugc

SEQ ID NO: 2075025 - RNA, 20 nt, Human
agggacagcccacugagaag

SEQ ID NO: 2075026 - RNA, 21 nt, Human
agggacagcccacugagaagu

SEQ ID NO: 2075027 - RNA, 12 nt, Human
agggaccugggg

SEQ ID NO: 2075028 - RNA, 13 nt, Human
agggaccugggga

SEQ ID NO: 2075029 - RNA, 14 nt, Human
agggaccuggggaa

SEQ ID NO: 2075030 - RNA, 16 nt, Human
agggaccuggggaagc

SEQ ID NO: 2075031 - RNA, 18 nt, Human
aggcguucuucgaggugg

SEQ ID NO: 2075032 - RNA, 19 nt, Human
aggcguucuucgaggugga

SEQ ID NO: 2075033 - RNA, 14 nt, Human
aggcgugaggaugg

SEQ ID NO: 2075034 - RNA, 13 nt, Human
aggcgugaggaug

SEQ ID NO: 2075035 - RNA, 17 nt, Human
aggccgaagaagggucc

SEQ ID NO: 2075036 - RNA, 18 nt, Human
aggccgaagaaggguccu

SEQ ID NO: 2075037 - RNA, 22 nt, Human
aggccgaagaaggguccuuccc

SEQ ID NO: 2075038 - RNA, 15 nt, Human
aggccgagaagcaag

SEQ ID NO: 2075039 - RNA, 19 nt, Human
aggccgagaagcaagaaag

SEQ ID NO: 2075040 - RNA, 18 nt, Human
aggcccuuccucuccacu

SEQ ID NO: 2075041 - RNA, 17 nt, Human
aggcccuuccucuccac

SEQ ID NO: 2075042 - RNA, 15 nt, Human
aggcccuuccucucc

SEQ ID NO: 2075043 - RNA, 13 nt, Human
aggcccuuccucu

SEQ ID NO: 2075044 - RNA, 21 nt, Human
aggguaucaggugcugccauc

SEQ ID NO: 2075045 - RNA, 19 nt, Human
aggguaucaggugcugcca

SEQ ID NO: 2075046 - RNA, 13 nt, Human
agggucaggaagg

SEQ ID NO: 2075047 - RNA, 21 nt, Human
agggucaggaaggaugagcau

SEQ ID NO: 2075048 - RNA, 22 nt, Human
agggucaggaaggaugagcauu

SEQ ID NO: 2075049 - RNA, 20 nt, Human
aggguauccaaguuggacug

SEQ ID NO: 2075050 - RNA, 21 nt, Human
aggguauccaaguuggacugg

SEQ ID NO: 2075051 - RNA, 22 nt, Human
aggguauccaaguuggacuggg

SEQ ID NO: 2075052 - RNA, 13 nt, Human
agggucagagagg

SEQ ID NO: 2075053 - RNA, 21 nt, Human
agggucagagaggagucagag

SEQ ID NO: 2075054 - RNA, 18 nt, Human
agggucaggagaggggca

SEQ ID NO: 2075055 - RNA, 14 nt, Human
agggucaggagagg

SEQ ID NO: 2075056 - RNA, 15 nt, Human
agggucaggagaggg

SEQ ID NO: 2075057 - RNA, 14 nt, Human
aggguccuucccuc

SEQ ID NO: 2075058 - RNA, 21 nt, Human
aggguccuggcuccugagggg

SEQ ID NO: 2075059 - RNA, 22 nt, Human
aggguccuucccucuccccaag

SEQ ID NO: 2075060 - RNA, 16 nt, Human
aggguccuucccucuc

SEQ ID NO: 2075061 - RNA, 17 nt, Human
aggguccuucccucucc

SEQ ID NO: 2075062 - RNA, 17 nt, Human
aggguccuggcuccuga

SEQ ID NO: 2075063 - RNA, 19 nt, Human
aggguccuggcuccugagg

SEQ ID NO: 2075064 - RNA, 20 nt, Human
aggguccuggcuccugaggg

SEQ ID NO: 2075065 - RNA, 13 nt, Human
agguaaaauucua

SEQ ID NO: 2075066 - RNA, 14 nt, Human
agguaaaauucuaa

SEQ ID NO: 2075067 - RNA, 15 nt, Human
agguaaaauucuaaa

SEQ ID NO: 2075068 - RNA, 16 nt, Human
agguaaaauucuaaau

SEQ ID NO: 2075069 - RNA, 19 nt, Human
agguaaaauucuaaauaaa

SEQ ID NO: 2075070 - RNA, 19 nt, Human
agguaaaauugaaaggcau

SEQ ID NO: 2075071 - RNA, 16 nt, Human
agguaaugugaauaaa

SEQ ID NO: 2075072 - RNA, 12 nt, Human
agguacacucuu

SEQ ID NO: 2075073 - RNA, 20 nt, Human
aggucugacacgucugccua

SEQ ID NO: 2075074 - RNA, 15 nt, Human
aggucucucuuugga

SEQ ID NO: 2075075 - RNA, 16 nt, Human
aggucucucuuuggac

SEQ ID NO: 2075076 - RNA, 23 nt, Human
aggucucucuuuggacucucccc

SEQ ID NO: 2075077 - RNA, 15 nt, Human
aggucucuugaggga

SEQ ID NO: 2075078 - RNA, 16 nt, Human
aggucucuugagggag

SEQ ID NO: 2075079 - RNA, 13 nt, Human
aggucugaaaugg

SEQ ID NO: 2075080 - RNA, 15 nt, Human
aggucugaaauggag

SEQ ID NO: 2075081 - RNA, 21 nt, Human
aggucugaaauggagguccuu

SEQ ID NO: 2075082 - RNA, 14 nt, Human
aggucugcucggcc

SEQ ID NO: 2075083 - RNA, 21 nt, Human
agguuaggaguucgagaccag

SEQ ID NO: 2075084 - RNA, 21 nt, Human
agguuacccuguaacaugcaa

SEQ ID NO: 2075085 - RNA, 17 nt, Human
agguuacccuguaacau

SEQ ID NO: 2075086 - RNA, 14 nt, Human
agguuauaggucac

SEQ ID NO: 2075087 - RNA, 17 nt, Human
agguuauaggucacucc

SEQ ID NO: 2075088 - RNA, 19 nt, Human
agguuauaggucacuccug

SEQ ID NO: 2075089 - RNA, 16 nt, Human
agguuauuuucuccug

SEQ ID NO: 2075090 - RNA, 17 nt, Human
agguggaagcccuccuu

SEQ ID NO: 2075091 - RNA, 19 nt, Human
agguggaagcccuccuucc

SEQ ID NO: 2075092 - RNA, 20 nt, Human
agguggaagcccuccuucca

SEQ ID NO: 2075093 - RNA, 21 nt, Human
agguggaagcccuccuuccac

SEQ ID NO: 2075094 - RNA, 16 nt, Human
agguuaacuauguaca

SEQ ID NO: 2075095 - RNA, 22 nt, Human
agguuaacuauguacaauauuu

SEQ ID NO: 2075096 - RNA, 16 nt, Human
agguuaaggcugagga

SEQ ID NO: 2075097 - RNA, 17 nt, Human
agguuaaggcugaggaa

SEQ ID NO: 2075098 - RNA, 24 nt, Human
agguuaaggcugaggaaaggccag

SEQ ID NO: 2075099 - RNA, 14 nt, Human
agguguuuauacag

SEQ ID NO: 2075100 - RNA, 11 nt, Human
agguguuuaua

SEQ ID NO: 2075101 - RNA, 12 nt, Human
agguguuuauac

SEQ ID NO: 2075102 - RNA, 16 nt, Human
agguggacuggaaggg

SEQ ID NO: 2075103 - RNA, 14 nt, Human
agguggacacacaa

SEQ ID NO: 2075104 - RNA, 20 nt, Human
agguggagguugcagugagc

SEQ ID NO: 2075105 - RNA, 20 nt, Human
agguggaggcugcagugagc

SEQ ID NO: 2075106 - RNA, 15 nt, Human
agguggaguggaugc

SEQ ID NO: 2075107 - RNA, 16 nt, Human
agguggaucacagagg

SEQ ID NO: 2075108 - RNA, 13 nt, Human
agguggagguggg

SEQ ID NO: 2075109 - RNA, 17 nt, Human
agguggaucaccugagg

SEQ ID NO: 2075110 - RNA, 19 nt, Human
auaaauuuuuuuuguuuca

SEQ ID NO: 2075111 - RNA, 22 nt, Human
auaaauuuuuuuuguuucauau

SEQ ID NO: 2075112 - RNA, 14 nt, Human
auaaaggauaaacu

SEQ ID NO: 2075113 - RNA, 21 nt, Human
auaaaggauaaacuuuuagaa

SEQ ID NO: 2075114 - RNA, 21 nt, Human
auaacaaaaucacuuccauag

SEQ ID NO: 2075115 - RNA, 16 nt, Human
auaacaaauaaccaac

SEQ ID NO: 2075116 - RNA, 14 nt, Human
auaacaagaucuuu

SEQ ID NO: 2075117 - RNA, 16 nt, Human
auaacaagaucuuuca

SEQ ID NO: 2075118 - RNA, 19 nt, Human
auaacagucuuacugcagg

SEQ ID NO: 2075119 - RNA, 15 nt, Human
auaacauaacaaaua

SEQ ID NO: 2075120 - RNA, 14 nt, Human
auaacagugccauu

SEQ ID NO: 2075121 - RNA, 15 nt, Human
auaacagugccauug

SEQ ID NO: 2075122 - RNA, 21 nt, Human
auaacagugccauugucuuua

SEQ ID NO: 2075123 - RNA, 23 nt, Human
auaacagugccauugucuuuaua

SEQ ID NO: 2075124 - RNA, 19 nt, Human
auaacagugugguaguuaa

SEQ ID NO: 2075125 - RNA, 11 nt, Human
auaaagacagg

SEQ ID NO: 2075126 - RNA, 21 nt, Human
auaaagaacaagguaguuuuu

SEQ ID NO: 2075127 - RNA, 15 nt, Human
auaaagaacaaggua

SEQ ID NO: 2075128 - RNA, 12 nt, Human
auaaagacaccu

SEQ ID NO: 2075129 - RNA, 15 nt, Human
auaaagcaucuaaac

SEQ ID NO: 2075130 - RNA, 17 nt, Human
auaaagcaucuaaacuu

SEQ ID NO: 2075131 - RNA, 20 nt, Human
auaaagccuguuuugucuuu

SEQ ID NO: 2075132 - RNA, 14 nt, Human
auaaagccugcuuu

SEQ ID NO: 2075133 - RNA, 20 nt, Human
auaaagccuuggauguauau

SEQ ID NO: 2075134 - RNA, 13 nt, Human
auaaaaauaaauu

SEQ ID NO: 2075135 - RNA, 22 nt, Human
auaaaaauaaauuugguucuaa

SEQ ID NO: 2075136 - RNA, 17 nt, Human
auaaaagaaaugcacaa

SEQ ID NO: 2075137 - RNA, 18 nt, Human
auaaaagaaaugcacaau

SEQ ID NO: 2075138 - RNA, 21 nt, Human
auaaaagaaaugcacaauguc

SEQ ID NO: 2075139 - RNA, 22 nt, Human
auaaaagaaaugcacaaugucu

SEQ ID NO: 2075140 - RNA, 12 nt, Human
auaaaagacaca

SEQ ID NO: 2075141 - RNA, 14 nt, Human
auaaaagacacaga

SEQ ID NO: 2075142 - RNA, 14 nt, Human
auaaacuuuuagaa

SEQ ID NO: 2075143 - RNA, 15 nt, Human
auaaacuuuuagaaa

SEQ ID NO: 2075144 - RNA, 18 nt, Human
auaaacuuuuagaaacuu

SEQ ID NO: 2075145 - RNA, 15 nt, Human
auaccucaaccuaug

SEQ ID NO: 2075146 - RNA, 18 nt, Human
auaccucaaccuauggua

SEQ ID NO: 2075147 - RNA, 22 nt, Human
auaauguauaaagaacaaggua

SEQ ID NO: 2075148 - RNA, 15 nt, Human
auaauguaagcucua

SEQ ID NO: 2075149 - RNA, 15 nt, Human
auaaugucccuucac

SEQ ID NO: 2075150 - RNA, 13 nt, Human
auaauguuugcua

SEQ ID NO: 2075151 - RNA, 14 nt, Human
auaauguuugcuau

SEQ ID NO: 2075152 - RNA, 17 nt, Human
auaaggccuuaauaugu

SEQ ID NO: 2075153 - RNA, 16 nt, Human
auaaggccuuaauaug

SEQ ID NO: 2075154 - RNA, 14 nt, Human
auaauguaagcucu

SEQ ID NO: 2075155 - RNA, 18 nt, Human
auaaugcuguugccucau

SEQ ID NO: 2075156 - RNA, 10 nt, Human
auaaggacug

SEQ ID NO: 2075157 - RNA, 11 nt, Human
auaaggacugc

SEQ ID NO: 2075158 - RNA, 12 nt, Human
auaaggacugca

SEQ ID NO: 2075159 - RNA, 14 nt, Human
auaaggacugcaug

SEQ ID NO: 2075160 - RNA, 15 nt, Human
auaaggacugcaugg

SEQ ID NO: 2075161 - RNA, 14 nt, Human
auaaggaucagaac

SEQ ID NO: 2075162 - RNA, 20 nt, Human
auaaggaucagaacagcaga

SEQ ID NO: 2075163 - RNA, 22 nt, Human
auaaggaucagaacagcagagg

SEQ ID NO: 2075164 - RNA, 18 nt, Human
auaaggaaagcaauaaau

SEQ ID NO: 2075165 - RNA, 13 nt, Human
auaucauucagca

SEQ ID NO: 2075166 - RNA, 14 nt, Human
auaucauucagcaa

SEQ ID NO: 2075167 - RNA, 23 nt, Human
auaucauuauaacugaaggagaa

SEQ ID NO: 2075168 - RNA, 15 nt, Human
auaucauucagcaac

SEQ ID NO: 2075169 - RNA, 23 nt, Human
auaucauuuauuuuuuacauuau

SEQ ID NO: 2075170 - RNA, 21 nt, Human
auaucauuuauuuuuuacauu

SEQ ID NO: 2075171 - RNA, 21 nt, Human
auaugcuuauacacuuacacu

SEQ ID NO: 2075172 - RNA, 20 nt, Human
auaugcucugauuuaucuga

SEQ ID NO: 2075173 - RNA, 13 nt, Human
auauuaucuuugu

SEQ ID NO: 2075174 - RNA, 19 nt, Human
auauuuacuucuuauacau

SEQ ID NO: 2075175 - RNA, 23 nt, Human
auauuuauuauuuucaccuguuu

SEQ ID NO: 2075176 - RNA, 14 nt, Human
auauuuacguauga

SEQ ID NO: 2075177 - RNA, 16 nt, Human
auauuuacauaugaaa

SEQ ID NO: 2075178 - RNA, 18 nt, Human
auauuuacauaugaaauu

SEQ ID NO: 2075179 - RNA, 19 nt, Human
auauuuacauaugaaauuu

SEQ ID NO: 2075180 - RNA, 20 nt, Human
auauuuacauaugaaauuua

SEQ ID NO: 2075181 - RNA, 17 nt, Human
auaucaaucauuuuccu

SEQ ID NO: 2075182 - RNA, 14 nt, Human
auauuagaaguguu

SEQ ID NO: 2075183 - RNA, 19 nt, Human
auauuaucaugcaaaugcu

SEQ ID NO: 2075184 - RNA, 21 nt, Human
auauuaucaugcaaaugcugu

SEQ ID NO: 2075185 - RNA, 15 nt, Human
auauuaugcaaauuc

SEQ ID NO: 2075186 - RNA, 17 nt, Human
auauuaugcaaauuccc

SEQ ID NO: 2075187 - RNA, 19 nt, Human
auauuaugcaaauucccag

SEQ ID NO: 2075188 - RNA, 16 nt, Human
auauuauggaagauuu

SEQ ID NO: 2075189 - RNA, 20 nt, Human
auauuauucaccauguaaaa

SEQ ID NO: 2075190 - RNA, 23 nt, Human
auauuauucaccauguaaaacaa

SEQ ID NO: 2075191 - RNA, 16 nt, Human
auagccaccccagaaa

SEQ ID NO: 2075192 - RNA, 19 nt, Human
auagccacuuaccuucaau

SEQ ID NO: 2075193 - RNA, 21 nt, Human
auagccacuuaccuucaauaa

SEQ ID NO: 2075194 - RNA, 23 nt, Human
auagccacuuaccuucaauaaag

SEQ ID NO: 2075195 - RNA, 22 nt, Human
auaggugcuuauucucaaagca

SEQ ID NO: 2075196 - RNA, 23 nt, Human
auaggucagugaggcccagggag

SEQ ID NO: 2075197 - RNA, 15 nt, Human
auaggucacuccugg

SEQ ID NO: 2075198 - RNA, 16 nt, Human
auaggucacuccuggg

SEQ ID NO: 2075199 - RNA, 18 nt, Human
auagguuguaaauguguu

SEQ ID NO: 2075200 - RNA, 12 nt, Human
auagguuuagag

SEQ ID NO: 2075201 - RNA, 21 nt, Human
auaguauuccauugugugagu

SEQ ID NO: 2075202 - RNA, 22 nt, Human
auaguauuccauugugugagug

SEQ ID NO: 2075203 - RNA, 18 nt, Human
auaguaugguggcugggu

SEQ ID NO: 2075204 - RNA, 17 nt, Human
auaguaugguggcuggg

SEQ ID NO: 2075205 - RNA, 18 nt, Human
auaguauuuuuauauuua

SEQ ID NO: 2075206 - RNA, 14 nt, Human
auauagaucacaua

SEQ ID NO: 2075207 - RNA, 20 nt, Human
auauagaucacauaacagaa

SEQ ID NO: 2075208 - RNA, 22 nt, Human
auauacuuuuuucuuauuuaac

SEQ ID NO: 2075209 - RNA, 12 nt, Human
auauagaauugc

SEQ ID NO: 2075210 - RNA, 21 nt, Human
auauagaauugcaauuuuaac

SEQ ID NO: 2075211 - RNA, 16 nt, Human
aguuguuaauaaaagu

SEQ ID NO: 2075212 - RNA, 16 nt, Human
aguuguuucauugacu

SEQ ID NO: 2075213 - RNA, 19 nt, Human
aguuguuucauugacuauc

SEQ ID NO: 2075214 - RNA, 13 nt, Human
aguuguuucauug

SEQ ID NO: 2075215 - RNA, 15 nt, Human
aguuguuucauugac

SEQ ID NO: 2075216 - RNA, 18 nt, Human
aguuguggaaagccucug

SEQ ID NO: 2075217 - RNA, 19 nt, Human
aguuguggaaagccucugc

SEQ ID NO: 2075218 - RNA, 20 nt, Human
aguuguggaaagccucugcu

SEQ ID NO: 2075219 - RNA, 21 nt, Human
aguuguggaaagccucugcug

SEQ ID NO: 2075220 - RNA, 14 nt, Human
aguuguguuguucu

SEQ ID NO: 2075221 - RNA, 15 nt, Human
aguuguguuguucuu

SEQ ID NO: 2075222 - RNA, 20 nt, Human
aguuguggagagugcaacag

SEQ ID NO: 2075223 - RNA, 16 nt, Human
aguuguguacucuggc

SEQ ID NO: 2075224 - RNA, 18 nt, Human
aguuguguacucuggccu

SEQ ID NO: 2075225 - RNA, 19 nt, Human
aguuguguacucuggccuc

SEQ ID NO: 2075226 - RNA, 20 nt, Human
aguuguguacucuggccucu

SEQ ID NO: 2075227 - RNA, 21 nt, Human
aguuguguacucuggccucug

SEQ ID NO: 2075228 - RNA, 19 nt, Human
aguucagguaacaggcaga

SEQ ID NO: 2075229 - RNA, 20 nt, Human
aguucagguaacaggcagau

SEQ ID NO: 2075230 - RNA, 19 nt, Human
aguucagguagcugccccu

SEQ ID NO: 2075231 - RNA, 20 nt, Human
aguucagguagcugccccug

SEQ ID NO: 2075232 - RNA, 21 nt, Human
aguucagguagcugccccugg

SEQ ID NO: 2075233 - RNA, 16 nt, Human
aguucauaacagugcc

SEQ ID NO: 2075234 - RNA, 17 nt, Human
aguucauaacagugcca

SEQ ID NO: 2075235 - RNA, 18 nt, Human
aguucauaacagugccau

SEQ ID NO: 2075236 - RNA, 19 nt, Human
aguucauaacagugccauu

SEQ ID NO: 2075237 - RNA, 20 nt, Human
aguucauaacagugccauug

SEQ ID NO: 2075238 - RNA, 22 nt, Human
aguucauaacagugccauuguc

SEQ ID NO: 2075239 - RNA, 20 nt, Human
aguucaguaagaccggaagc

SEQ ID NO: 2075240 - RNA, 13 nt, Human
aguuaaaaaaaau

SEQ ID NO: 2075241 - RNA, 14 nt, Human
aguuaaaaaaaaua

SEQ ID NO: 2075242 - RNA, 15 nt, Human
aguuaaaaaaaauaa

SEQ ID NO: 2075243 - RNA, 16 nt, Human
aguuaaaaaaaauaau

SEQ ID NO: 2075244 - RNA, 18 nt, Human
aguuaaaaaaaauaauaa

SEQ ID NO: 2075245 - RNA, 19 nt, Human
aguuaaaaaaaauaauaaa

SEQ ID NO: 2075246 - RNA, 20 nt, Human
aguuaaaaaaaauaauaaau

SEQ ID NO: 2075247 - RNA, 15 nt, Human
aguuaauauugugaa

SEQ ID NO: 2075248 - RNA, 21 nt, Human
aguuaaauagaguauaugcac

SEQ ID NO: 2075249 - RNA, 16 nt, Human
aguuaaagugaauaac

SEQ ID NO: 2075250 - RNA, 12 nt, Human
aguuaaauaaau

SEQ ID NO: 2075251 - RNA, 14 nt, Human
aguuaaucaacuga

SEQ ID NO: 2075252 - RNA, 16 nt, Human
aguuaaucaacugaaa

SEQ ID NO: 2075253 - RNA, 14 nt, Human
aguuaaucuugcuu

SEQ ID NO: 2075254 - RNA, 15 nt, Human
aguuaaucuugcuuu

SEQ ID NO: 2075255 - RNA, 16 nt, Human
aguuaaucuugcuuuc

SEQ ID NO: 2075256 - RNA, 18 nt, Human
aguuacacuaaaagguga

SEQ ID NO: 2075257 - RNA, 18 nt, Human
aguuaaucuugcuuucuu

SEQ ID NO: 2075258 - RNA, 15 nt, Human
aguguauuauaacag

SEQ ID NO: 2075259 - RNA, 17 nt, Human
aguguaugcacgugugc

SEQ ID NO: 2075260 - RNA, 14 nt, Human
agugggagcugccu

SEQ ID NO: 2075261 - RNA, 13 nt, Human
agugggagaaaac

SEQ ID NO: 2075262 - RNA, 17 nt, Human
agugggagaaaacacuu

SEQ ID NO: 2075263 - RNA, 15 nt, Human
agugggagcugccug

SEQ ID NO: 2075264 - RNA, 16 nt, Human
agugggagcugccugu

SEQ ID NO: 2075265 - RNA, 14 nt, Human
agugggagccaggg

SEQ ID NO: 2075266 - RNA, 14 nt, Human
agugggagaaaaca

SEQ ID NO: 2075267 - RNA, 18 nt, Human
aguguauuuuauaaaauu

SEQ ID NO: 2075268 - RNA, 22 nt, Human
aguguauuuuauaaaauuaaag

SEQ ID NO: 2075269 - RNA, 21 nt, Human
aguguccuccccucaaggaca

SEQ ID NO: 2075270 - RNA, 16 nt, Human
aguguccgagaacuaa

SEQ ID NO: 2075271 - RNA, 14 nt, Human
aguggcucacgccu

SEQ ID NO: 2075272 - RNA, 23 nt, Human
aguggcuuaaaacaacacucaca

SEQ ID NO: 2075273 - RNA, 16 nt, Human
aguggcugucaucagc

SEQ ID NO: 2075274 - RNA, 17 nt, Human
aguggcugucaucagcc

SEQ ID NO: 2075275 - RNA, 19 nt, Human
aguggcuuacuacaugugg

SEQ ID NO: 2075276 - RNA, 21 nt, Human
aguggcuccucccggugccca

SEQ ID NO: 2075277 - RNA, 11 nt, Human
aguggcugcug

SEQ ID NO: 2075278 - RNA, 14 nt, Human
aguggcugcugacu

SEQ ID NO: 2075279 - RNA, 17 nt, Human
aguggcuccucccggug

SEQ ID NO: 2075280 - RNA, 13 nt, Human
aguggcuccuccc

SEQ ID NO: 2075281 - RNA, 17 nt, Human
agugaaggccacagcaa

SEQ ID NO: 2075282 - RNA, 14 nt, Human
agugaccaaggagg

SEQ ID NO: 2075283 - RNA, 22 nt, Human
agugacaucucuuugaugucau

SEQ ID NO: 2075284 - RNA, 20 nt, Human
agugacaguggauugcauuu

SEQ ID NO: 2075285 - RNA, 19 nt, Human
agugacaguggauugcauu

SEQ ID NO: 2075286 - RNA, 22 nt, Human
aguccugggagaaccucaggcu

SEQ ID NO: 2075287 - RNA, 21 nt, Human
aguccugggagaaccucaggc

SEQ ID NO: 2075288 - RNA, 18 nt, Human
agucuggaaugcaguggu

SEQ ID NO: 2075289 - RNA, 20 nt, Human
agucugcugcccuccauccc

SEQ ID NO: 2075290 - RNA, 18 nt, Human
agucugcugcccuccauc

SEQ ID NO: 2075291 - RNA, 19 nt, Human
agucugcuuauccuuccac

SEQ ID NO: 2075292 - RNA, 14 nt, Human
agucugcuucugca

SEQ ID NO: 2075293 - RNA, 20 nt, Human
agugaacuugggccacugug

SEQ ID NO: 2075294 - RNA, 17 nt, Human
agucuggaaugcagugg

SEQ ID NO: 2075295 - RNA, 13 nt, Human
agucugcugcccu

SEQ ID NO: 2075296 - RNA, 15 nt, Human
agucugcugcccucc

SEQ ID NO: 2075297 - RNA, 16 nt, Human
agucugcugcccucca

SEQ ID NO: 2075298 - RNA, 17 nt, Human
agucugcugcccuccau

SEQ ID NO: 2075299 - RNA, 18 nt, Human
agucugauucccaagcuc

SEQ ID NO: 2075300 - RNA, 16 nt, Human
agucugauucccaagc

SEQ ID NO: 2075301 - RNA, 13 nt, Human
agucugcauuaca

SEQ ID NO: 2075302 - RNA, 18 nt, Human
agucugcauuacauuccu

SEQ ID NO: 2075303 - RNA, 19 nt, Human
agugaagagggagaaggga

SEQ ID NO: 2075304 - RNA, 15 nt, Human
agugaauaaaaauua

SEQ ID NO: 2075305 - RNA, 18 nt, Human
agucaaacauuucaaagu

SEQ ID NO: 2075306 - RNA, 13 nt, Human
agucaaagacauu

SEQ ID NO: 2075307 - RNA, 21 nt, Human
agucaaaaggugccugugagg

SEQ ID NO: 2075308 - RNA, 14 nt, Human
agucaaauaacucc

SEQ ID NO: 2075309 - RNA, 12 nt, Human
agucaaaguaaa

SEQ ID NO: 2075310 - RNA, 21 nt, Human
agucaaaguaaaacuugcugc

SEQ ID NO: 2075311 - RNA, 14 nt, Human
agucaacagugaaa

SEQ ID NO: 2075312 - RNA, 20 nt, Human
aguaugcuuggacugaaggg

SEQ ID NO: 2075313 - RNA, 16 nt, Human
aguaugaauaaagaca

SEQ ID NO: 2075314 - RNA, 14 nt, Human
aguaucugggaacu

SEQ ID NO: 2075315 - RNA, 18 nt, Human
aguaucuccucgcaagcu

SEQ ID NO: 2075316 - RNA, 19 nt, Human
aguaucuccucgcaagcug

SEQ ID NO: 2075317 - RNA, 15 nt, Human
aguaucucagggccu

SEQ ID NO: 2075318 - RNA, 16 nt, Human
aucagcuagcaaaaga

SEQ ID NO: 2075319 - RNA, 21 nt, Human
aucagcuagcaaaagaaguaa

SEQ ID NO: 2075320 - RNA, 23 nt, Human
aucagcuagcaaaagaaguaaca

SEQ ID NO: 2075321 - RNA, 16 nt, Human
aucagcuguuugucau

SEQ ID NO: 2075322 - RNA, 18 nt, Human
aucauguuaauccuagcu

SEQ ID NO: 2075323 - RNA, 19 nt, Human
aucauguuaauccuagcug

SEQ ID NO: 2075324 - RNA, 15 nt, Human
aucauguuaugauaa

SEQ ID NO: 2075325 - RNA, 20 nt, Human
aucagccugcuccagcuguu

SEQ ID NO: 2075326 - RNA, 19 nt, Human
aucagccugcuccagcugu

SEQ ID NO: 2075327 - RNA, 17 nt, Human
aucagccugcuccagcu

SEQ ID NO: 2075328 - RNA, 18 nt, Human
aucagccugcuccagcug

SEQ ID NO: 2075329 - RNA, 15 nt, Human
aucagcuauuuacug

SEQ ID NO: 2075330 - RNA, 14 nt, Human
aucagcuauuuacu

SEQ ID NO: 2075331 - RNA, 18 nt, Human
aucagcuccacuuucagu

SEQ ID NO: 2075332 - RNA, 22 nt, Human
aucacauuauuugcauguuacc

SEQ ID NO: 2075333 - RNA, 15 nt, Human
aucacauuauuugca

SEQ ID NO: 2075334 - RNA, 16 nt, Human
aucacauuauuugcau

SEQ ID NO: 2075335 - RNA, 12 nt, Human
aucacagggcag

SEQ ID NO: 2075336 - RNA, 15 nt, Human
aucacagggcagagc

SEQ ID NO: 2075337 - RNA, 22 nt, Human
aucacagcuucagccaggagcu

SEQ ID NO: 2075338 - RNA, 21 nt, Human
aucacagcuucagccaggagc

SEQ ID NO: 2075339 - RNA, 21 nt, Human
aucacagccucugaaaaccaa

SEQ ID NO: 2075340 - RNA, 18 nt, Human
aucacagcuucagccagg

SEQ ID NO: 2075341 - RNA, 14 nt, Human
aucacagcuucagc

SEQ ID NO: 2075342 - RNA, 19 nt, Human
aucacagggcagagccggg

SEQ ID NO: 2075343 - RNA, 20 nt, Human
aucacagggcagagccggga

SEQ ID NO: 2075344 - RNA, 23 nt, Human
auauuuauuguuuauuuaucagu

SEQ ID NO: 2075345 - RNA, 13 nt, Human
auauuuauuguau

SEQ ID NO: 2075346 - RNA, 22 nt, Human
auauuuauuguuuauuuaucag

SEQ ID NO: 2075347 - RNA, 19 nt, Human
auccucccaccucagccuc

SEQ ID NO: 2075348 - RNA, 18 nt, Human
auccucccaccucagccu

SEQ ID NO: 2075349 - RNA, 20 nt, Human
auccucccaccucagccucc

SEQ ID NO: 2075350 - RNA, 19 nt, Human
aucggcccacagcucccac

SEQ ID NO: 2075351 - RNA, 20 nt, Human
aucggcccacagcucccacc

SEQ ID NO: 2075352 - RNA, 23 nt, Human
aucggcccacagcucccacccca

SEQ ID NO: 2075353 - RNA, 21 nt, Human
aucggaucuggggcucuggga

SEQ ID NO: 2075354 - RNA, 23 nt, Human
aucggaggcuugucagagcuggg

SEQ ID NO: 2075355 - RNA, 18 nt, Human
aucggaggcuugucagag

SEQ ID NO: 2075356 - RNA, 20 nt, Human
aucggaggcuugucagagcu

SEQ ID NO: 2075357 - RNA, 21 nt, Human
aucggaggcuugucagagcug

SEQ ID NO: 2075358 - RNA, 22 nt, Human
aucggaggcuugucagagcugg

SEQ ID NO: 2075359 - RNA, 18 nt, Human
aucggaagcagugccuuc

SEQ ID NO: 2075360 - RNA, 13 nt, Human
aucggagacagug

SEQ ID NO: 2075361 - RNA, 14 nt, Human
aucggaagcagugc

SEQ ID NO: 2075362 - RNA, 22 nt, Human
aucggaagcagugccuuccaua

SEQ ID NO: 2075363 - RNA, 15 nt, Human
auccucccaccucag

SEQ ID NO: 2075364 - RNA, 23 nt, Human
auccuccaacuucauuugaugcu

SEQ ID NO: 2075365 - RNA, 23 nt, Human
auccucauuugggguagcuagag

SEQ ID NO: 2075366 - RNA, 21 nt, Human
aucccauugucuucugaccuc

SEQ ID NO: 2075367 - RNA, 23 nt, Human
auccccaaaacaggccaggugug

SEQ ID NO: 2075368 - RNA, 13 nt, Human
auccccgcuggcu

SEQ ID NO: 2075369 - RNA, 16 nt, Human
auccccgcuggcuggg

SEQ ID NO: 2075370 - RNA, 15 nt, Human
auccccuguagagug

SEQ ID NO: 2075371 - RNA, 21 nt, Human
auccuaugguuucuccaucca

SEQ ID NO: 2075372 - RNA, 14 nt, Human
aucccauuuaaaaa

SEQ ID NO: 2075373 - RNA, 21 nt, Human
auccaggcacccaaaccccgg

SEQ ID NO: 2075374 - RNA, 16 nt, Human
aucccauugcccuggu

SEQ ID NO: 2075375 - RNA, 17 nt, Human
aucccauugcccugguu

SEQ ID NO: 2075376 - RNA, 15 nt, Human
aucccauuuaaaaaa

SEQ ID NO: 2075377 - RNA, 13 nt, Human
auccagaaagaaa

SEQ ID NO: 2075378 - RNA, 14 nt, Human
auccagaaagaaaa

SEQ ID NO: 2075379 - RNA, 15 nt, Human
auccagaaagaaaaa

SEQ ID NO: 2075380 - RNA, 20 nt, Human
auccagaauugaccuuuuga

SEQ ID NO: 2075381 - RNA, 15 nt, Human
auccaggcaauggcc

SEQ ID NO: 2075382 - RNA, 15 nt, Human
auccagacccggcug

SEQ ID NO: 2075383 - RNA, 16 nt, Human
aucugggaacucccaa

SEQ ID NO: 2075384 - RNA, 19 nt, Human
aucugggaacucccaagaa

SEQ ID NO: 2075385 - RNA, 20 nt, Human
aucugggaacucccaagaac

SEQ ID NO: 2075386 - RNA, 16 nt, Human
aucugggaagauuucu

SEQ ID NO: 2075387 - RNA, 16 nt, Human
aucugggacccuuucc

SEQ ID NO: 2075388 - RNA, 11 nt, Human
aucuggccuua

SEQ ID NO: 2075389 - RNA, 14 nt, Human
aucuucuuuauaau

SEQ ID NO: 2075390 - RNA, 17 nt, Human
aucucugcuuuggaaau

SEQ ID NO: 2075391 - RNA, 17 nt, Human
aucucugucuaccaucu

SEQ ID NO: 2075392 - RNA, 19 nt, Human
aucucugucuaccaucucc

SEQ ID NO: 2075393 - RNA, 20 nt, Human
aucucugucuaccaucuccc

SEQ ID NO: 2075394 - RNA, 19 nt, Human
aucuccugugcauggguga

SEQ ID NO: 2075395 - RNA, 16 nt, Human
aucuccuugucuuuuu

SEQ ID NO: 2075396 - RNA, 15 nt, Human
aucuccuuucaggga

SEQ ID NO: 2075397 - RNA, 20 nt, Human
aucucgccaccccuccuucc

SEQ ID NO: 2075398 - RNA, 21 nt, Human
aucucgccaccccuccuuccu

SEQ ID NO: 2075399 - RNA, 15 nt, Human
aucuccugugcaugg

SEQ ID NO: 2075400 - RNA, 18 nt, Human
aucuccugugcaugggug

SEQ ID NO: 2075401 - RNA, 19 nt, Human
aucuggacuccucugucca

SEQ ID NO: 2075402 - RNA, 12 nt, Human
aucuggcagggu

SEQ ID NO: 2075403 - RNA, 18 nt, Human
aucuggacuccucugucc

SEQ ID NO: 2075404 - RNA, 17 nt, Human
aucuggacuccucuguc

SEQ ID NO: 2075405 - RNA, 16 nt, Human
aucuggacuccucugu

SEQ ID NO: 2075406 - RNA, 15 nt, Human
aucuggacuccucug

SEQ ID NO: 2075407 - RNA, 22 nt, Human
aucugcuuuuuaaagaaugcuc

SEQ ID NO: 2075408 - RNA, 23 nt, Human
aucuauugcuggcaaagacagaa

SEQ ID NO: 2075409 - RNA, 15 nt, Human
aucucccugccgccu

SEQ ID NO: 2075410 - RNA, 19 nt, Human
aucucccugccgccucaau

SEQ ID NO: 2075411 - RNA, 12 nt, Human
aucucccugccg

SEQ ID NO: 2075412 - RNA, 22 nt, Human
aucucccucgaacccacacugc

SEQ ID NO: 2075413 - RNA, 23 nt, Human
aucucccucgaacccacacugca

SEQ ID NO: 2075414 - RNA, 18 nt, Human
aucuaucuuauauaguuu

SEQ ID NO: 2075415 - RNA, 14 nt, Human
aucuaucagaguau

SEQ ID NO: 2075416 - RNA, 13 nt, Human
augaaagacugua

SEQ ID NO: 2075417 - RNA, 16 nt, Human
augaaagacuguacaa

SEQ ID NO: 2075418 - RNA, 17 nt, Human
augaaagacuguacaaa

SEQ ID NO: 2075419 - RNA, 19 nt, Human
augaaagacuguacaaagu

SEQ ID NO: 2075420 - RNA, 13 nt, Human
augaaaaauagca

SEQ ID NO: 2075421 - RNA, 16 nt, Human
augaaaaauuuaagca

SEQ ID NO: 2075422 - RNA, 17 nt, Human
augaaaaauuuaagcau

SEQ ID NO: 2075423 - RNA, 18 nt, Human
augaaaaauuuaagcauu

SEQ ID NO: 2075424 - RNA, 13 nt, Human
augaaaaauauga

SEQ ID NO: 2075425 - RNA, 13 nt, Human
augaaaaauucuc

SEQ ID NO: 2075426 - RNA, 19 nt, Human
augaaguaacuugucuuaa

SEQ ID NO: 2075427 - RNA, 19 nt, Human
augaaaaauuuaagcauug

SEQ ID NO: 2075428 - RNA, 20 nt, Human
augaaaaauuuaagcauugu

SEQ ID NO: 2075429 - RNA, 21 nt, Human
augaaaaauuuaagcauuguu

SEQ ID NO: 2075430 - RNA, 16 nt, Human
augaaggcaaaaaaau

SEQ ID NO: 2075431 - RNA, 19 nt, Human
augaagguuucugaaaauu

SEQ ID NO: 2075432 - RNA, 17 nt, Human
augaagguuucugaaaa

SEQ ID NO: 2075433 - RNA, 17 nt, Human
augaagggaaaggauau

SEQ ID NO: 2075434 - RNA, 21 nt, Human
augaggcaaugucaggaacag

SEQ ID NO: 2075435 - RNA, 22 nt, Human
augaggaugcagagucagcaga

SEQ ID NO: 2075436 - RNA, 18 nt, Human
augaggcaaugucaggaa

SEQ ID NO: 2075437 - RNA, 18 nt, Human
augaggagugaacauuug

SEQ ID NO: 2075438 - RNA, 14 nt, Human
augaggaguugcug

SEQ ID NO: 2075439 - RNA, 20 nt, Human
augaggaugcagagucagca

SEQ ID NO: 2075440 - RNA, 21 nt, Human
augaggaugcagagucagcag

SEQ ID NO: 2075441 - RNA, 14 nt, Human
augaggaggaagga

SEQ ID NO: 2075442 - RNA, 22 nt, Human
augaggaggcagaaagcagagg

SEQ ID NO: 2075443 - RNA, 21 nt, Human
augagcucgcauuugucaaug

SEQ ID NO: 2075444 - RNA, 22 nt, Human
augagcucgcauuugucaauga

SEQ ID NO: 2075445 - RNA, 21 nt, Human
augagcuccagacccccagca

SEQ ID NO: 2075446 - RNA, 22 nt, Human
augagcuccagacccccagcaa

SEQ ID NO: 2075447 - RNA, 14 nt, Human
augagcuccucuuc

SEQ ID NO: 2075448 - RNA, 22 nt, Human
augagcuccucuuccuggcuuc

SEQ ID NO: 2075449 - RNA, 15 nt, Human
augacggaagaacau

SEQ ID NO: 2075450 - RNA, 16 nt, Human
augacgacaaagcugc

SEQ ID NO: 2075451 - RNA, 21 nt, Human
augacgacaaagcugcuaaau

SEQ ID NO: 2075452 - RNA, 23 nt, Human
augacgacaaagcugcuaaaucu

SEQ ID NO: 2075453 - RNA, 19 nt, Human
augacgacgacaacgauga

SEQ ID NO: 2075454 - RNA, 15 nt, Human
augagcuccagaccc

SEQ ID NO: 2075455 - RNA, 16 nt, Human
augagcuccagacccc

SEQ ID NO: 2075456 - RNA, 17 nt, Human
augagcuccagaccccc

SEQ ID NO: 2075457 - RNA, 20 nt, Human
augagcuccagacccccagc

SEQ ID NO: 2075458 - RNA, 14 nt, Human
augcugccaaauuu

SEQ ID NO: 2075459 - RNA, 16 nt, Human
augcugaaacaggaga

SEQ ID NO: 2075460 - RNA, 18 nt, Human
augcugaaacaggagaga

SEQ ID NO: 2075461 - RNA, 15 nt, Human
augcugaaacaggag

SEQ ID NO: 2075462 - RNA, 16 nt, Human
augcucuuuacuucau

SEQ ID NO: 2075463 - RNA, 14 nt, Human
auggaggaggaggc

SEQ ID NO: 2075464 - RNA, 16 nt, Human
auggaggaggaggcaa

SEQ ID NO: 2075465 - RNA, 15 nt, Human
auggaggaggaggca

SEQ ID NO: 2075466 - RNA, 16 nt, Human
auggaggauggagaga

SEQ ID NO: 2075467 - RNA, 12 nt, Human
auggaggcacac

SEQ ID NO: 2075468 - RNA, 11 nt, Human
auggaggagaa

SEQ ID NO: 2075469 - RNA, 13 nt, Human
auggaggagaaga

SEQ ID NO: 2075470 - RNA, 15 nt, Human
auggaggagaagaau

SEQ ID NO: 2075471 - RNA, 17 nt, Human
auggaggagaagaauuu

SEQ ID NO: 2075472 - RNA, 13 nt, Human
auggaggaauaug

SEQ ID NO: 2075473 - RNA, 22 nt, Human
auggaggaaaaccaagccgugg

SEQ ID NO: 2075474 - RNA, 16 nt, Human
auggaggaaaaccaag

SEQ ID NO: 2075475 - RNA, 18 nt, Human
auggcugugccucugccu

SEQ ID NO: 2075476 - RNA, 15 nt, Human
auggauuuccagcca

SEQ ID NO: 2075477 - RNA, 17 nt, Human
auggauucucagauauu

SEQ ID NO: 2075478 - RNA, 18 nt, Human
auggauucucagauauuu

SEQ ID NO: 2075479 - RNA, 19 nt, Human
auggauucucagauauuua

SEQ ID NO: 2075480 - RNA, 22 nt, Human
auggauucucagauauuuauau

SEQ ID NO: 2075481 - RNA, 14 nt, Human
auggauucucagau

SEQ ID NO: 2075482 - RNA, 16 nt, Human
auggauucucagauau

SEQ ID NO: 2075483 - RNA, 18 nt, Human
auggaggauggagagagg

SEQ ID NO: 2075484 - RNA, 20 nt, Human
augcuuggaauaucugcugu

SEQ ID NO: 2075485 - RNA, 21 nt, Human
augcuuggaauaucugcugua

SEQ ID NO: 2075486 - RNA, 20 nt, Human
auggaaaaggaagacuagag

SEQ ID NO: 2075487 - RNA, 15 nt, Human
auggaaacaaagugg

SEQ ID NO: 2075488 - RNA, 22 nt, Human
auggaaacaaaguggaaggaaa

SEQ ID NO: 2075489 - RNA, 23 nt, Human
auggaaacaaaguggaaggaaag

SEQ ID NO: 2075490 - RNA, 17 nt, Human
augcuuguaacaagaaa

SEQ ID NO: 2075491 - RNA, 18 nt, Human
augcuuguaacaagaaaa

SEQ ID NO: 2075492 - RNA, 20 nt, Human
augcuuguaacaagaaaaca

SEQ ID NO: 2075493 - RNA, 21 nt, Human
augcuuguaacaagaaaacau

SEQ ID NO: 2075494 - RNA, 14 nt, Human
auggaaaaggaaga

SEQ ID NO: 2075495 - RNA, 21 nt, Human
auggaaaagucuucaagggcu

SEQ ID NO: 2075496 - RNA, 22 nt, Human
auggaaaagucuucaagggcug

SEQ ID NO: 2075497 - RNA, 20 nt, Human
auggaaacuguugccagaga

SEQ ID NO: 2075498 - RNA, 22 nt, Human
auggaaacuguugccagagaug

SEQ ID NO: 2075499 - RNA, 20 nt, Human
auggcugugccucugccugu

SEQ ID NO: 2075500 - RNA, 19 nt, Human
auggcugugccucugccug

SEQ ID NO: 2075501 - RNA, 16 nt, Human
auggcuuaguuuucau

SEQ ID NO: 2075502 - RNA, 15 nt, Human
augauggagucaggu

SEQ ID NO: 2075503 - RNA, 21 nt, Human
augaugcuuguaacaagaaaa

SEQ ID NO: 2075504 - RNA, 17 nt, Human
augauggagcgcaccug

SEQ ID NO: 2075505 - RNA, 17 nt, Human
augauguugaauauuug

SEQ ID NO: 2075506 - RNA, 18 nt, Human
augauguugaauauuugu

SEQ ID NO: 2075507 - RNA, 21 nt, Human
augauguuucgugaaguauac

SEQ ID NO: 2075508 - RNA, 20 nt, Human
augcaauuuugcauuugaau

SEQ ID NO: 2075509 - RNA, 18 nt, Human
augcaucuuacugaaggu

SEQ ID NO: 2075510 - RNA, 14 nt, Human
augcaucuuacuga

SEQ ID NO: 2075511 - RNA, 16 nt, Human
augcaucuuacugaag

SEQ ID NO: 2075512 - RNA, 17 nt, Human
augcauauccugagcca

SEQ ID NO: 2075513 - RNA, 18 nt, Human
augcauauccugagccau

SEQ ID NO: 2075514 - RNA, 20 nt, Human
augcacacuagccucuccag

SEQ ID NO: 2075515 - RNA, 22 nt, Human
augcacacuagccucuccagga

SEQ ID NO: 2075516 - RNA, 23 nt, Human
augcauagucccagcuacccagg

SEQ ID NO: 2075517 - RNA, 22 nt, Human
augcauaguucccauguuaaau

SEQ ID NO: 2075518 - RNA, 15 nt, Human
augccugaacuugaa

SEQ ID NO: 2075519 - RNA, 23 nt, Human
auguaauuaaguacuauguauca

SEQ ID NO: 2075520 - RNA, 14 nt, Human
auguauuuuaugua

SEQ ID NO: 2075521 - RNA, 15 nt, Human
auguauuuuauguau

SEQ ID NO: 2075522 - RNA, 17 nt, Human
auguauuuuauguaugu

SEQ ID NO: 2075523 - RNA, 20 nt, Human
auguauuuuauguauguuua

SEQ ID NO: 2075524 - RNA, 14 nt, Human
auguauucaaauac

SEQ ID NO: 2075525 - RNA, 15 nt, Human
auggucgcccaggag

SEQ ID NO: 2075526 - RNA, 16 nt, Human
auggucgcccaggaga

SEQ ID NO: 2075527 - RNA, 20 nt, Human
auguaaggaaugcuuggaau

SEQ ID NO: 2075528 - RNA, 15 nt, Human
auguaauuaaguacu

SEQ ID NO: 2075529 - RNA, 17 nt, Human
auguaauuaaguacuau

SEQ ID NO: 2075530 - RNA, 22 nt, Human
auggucaucuuuuucucuaaaa

SEQ ID NO: 2075531 - RNA, 12 nt, Human
augguccugggg

SEQ ID NO: 2075532 - RNA, 14 nt, Human
augguccuggggcu

SEQ ID NO: 2075533 - RNA, 17 nt, Human
augguccuggggcucug

SEQ ID NO: 2075534 - RNA, 19 nt, Human
augguccuggggcucugug

SEQ ID NO: 2075535 - RNA, 20 nt, Human
augguccuggggcucugugc

SEQ ID NO: 2075536 - RNA, 14 nt, Human
auggucgcccagga

SEQ ID NO: 2075537 - RNA, 19 nt, Human
auggucaccaaaucagcug

SEQ ID NO: 2075538 - RNA, 16 nt, Human
auggucagacacaaac

SEQ ID NO: 2075539 - RNA, 18 nt, Human
auggucagacacaaacaa

SEQ ID NO: 2075540 - RNA, 23 nt, Human
augguaucaauaaauagaccauu

SEQ ID NO: 2075541 - RNA, 21 nt, Human
augguauauuugguacuguau

SEQ ID NO: 2075542 - RNA, 15 nt, Human
augguauuugagaca

SEQ ID NO: 2075543 - RNA, 16 nt, Human
augguauuugagacau

SEQ ID NO: 2075544 - RNA, 20 nt, Human
auggucaacacuuaaggguu

SEQ ID NO: 2075545 - RNA, 19 nt, Human
augguauaaugguugacug

SEQ ID NO: 2075546 - RNA, 23 nt, Human
augugaagggaaggaagaggaag

SEQ ID NO: 2075547 - RNA, 12 nt, Human
augugaaucaga

SEQ ID NO: 2075548 - RNA, 15 nt, Human
augugaaucagaccc

SEQ ID NO: 2075549 - RNA, 16 nt, Human
augugaaucagacccu

SEQ ID NO: 2075550 - RNA, 21 nt, Human
augugaaucagacccuacccc

SEQ ID NO: 2075551 - RNA, 20 nt, Human
augugaaugaucucucugaa

SEQ ID NO: 2075552 - RNA, 11 nt, Human
augucuuauuu

SEQ ID NO: 2075553 - RNA, 12 nt, Human
augucuuauuuu

SEQ ID NO: 2075554 - RNA, 15 nt, Human
augucuuauuuuuag

SEQ ID NO: 2075555 - RNA, 16 nt, Human
augucuuauuuuuaga

SEQ ID NO: 2075556 - RNA, 23 nt, Human
augucuuuguuggaaaagaauac

SEQ ID NO: 2075557 - RNA, 22 nt, Human
augucuuuaggcagcagcuuuu

SEQ ID NO: 2075558 - RNA, 13 nt, Human
augucuuguuaau

SEQ ID NO: 2075559 - RNA, 18 nt, Human
augucuuguuaauauucu

SEQ ID NO: 2075560 - RNA, 20 nt, Human
augucuuguuaauauucuuu

SEQ ID NO: 2075561 - RNA, 21 nt, Human
augucuuguuaauauucuuuc

SEQ ID NO: 2075562 - RNA, 17 nt, Human
augucuuugguccucuu

SEQ ID NO: 2075563 - RNA, 21 nt, Human
augucuuugguccucuugcca

SEQ ID NO: 2075564 - RNA, 20 nt, Human
augucuuuguuggaaaagaa

SEQ ID NO: 2075565 - RNA, 14 nt, Human
augugaacuagcug

SEQ ID NO: 2075566 - RNA, 19 nt, Human
augugaacuagcuggaauu

SEQ ID NO: 2075567 - RNA, 13 nt, Human
augugugagugug

SEQ ID NO: 2075568 - RNA, 22 nt, Human
augugugaggagcugcuggcuu

SEQ ID NO: 2075569 - RNA, 16 nt, Human
augugugagugugugc

SEQ ID NO: 2075570 - RNA, 17 nt, Human
augugugagugugugca

SEQ ID NO: 2075571 - RNA, 15 nt, Human
augugugaggagcug

SEQ ID NO: 2075572 - RNA, 19 nt, Human
augugugaggagcugcugg

SEQ ID NO: 2075573 - RNA, 20 nt, Human
augugggcuaguugggcuuc

SEQ ID NO: 2075574 - RNA, 15 nt, Human
augugugcgagugug

SEQ ID NO: 2075575 - RNA, 18 nt, Human
augugugcgagugugugc

SEQ ID NO: 2075576 - RNA, 19 nt, Human
augugugcgagugugugca

SEQ ID NO: 2075577 - RNA, 12 nt, Human
auguucugggac

SEQ ID NO: 2075578 - RNA, 11 nt, Human
auguucuggga

SEQ ID NO: 2075579 - RNA, 13 nt, Human
auguucuggcccu

SEQ ID NO: 2075580 - RNA, 13 nt, Human
auguucugggaca

SEQ ID NO: 2075581 - RNA, 19 nt, Human
auguuugccucugccucug

SEQ ID NO: 2075582 - RNA, 19 nt, Human
auguuucacgaaguuuguu

SEQ ID NO: 2075583 - RNA, 18 nt, Human
auguuucaggaggcugga

SEQ ID NO: 2075584 - RNA, 16 nt, Human
auguuugcuauugaca

SEQ ID NO: 2075585 - RNA, 22 nt, Human
auguuugccucugccucugaca

SEQ ID NO: 2075586 - RNA, 12 nt, Human
auguuuuagcau

SEQ ID NO: 2075587 - RNA, 16 nt, Human
auguuugcucagaaca

SEQ ID NO: 2075588 - RNA, 19 nt, Human
auguuugcucagaacacau

SEQ ID NO: 2075589 - RNA, 22 nt, Human
auguuugcucagaacacauucu

SEQ ID NO: 2075590 - RNA, 22 nt, Human
auguuugcucagcuucuccaac

SEQ ID NO: 2075591 - RNA, 22 nt, Human
auuaaauauguuagcaaagagu

SEQ ID NO: 2075592 - RNA, 15 nt, Human
auuaaauauaauaug

SEQ ID NO: 2075593 - RNA, 15 nt, Human
auuaaauauauguau

SEQ ID NO: 2075594 - RNA, 16 nt, Human
auuaaauauauguaug

SEQ ID NO: 2075595 - RNA, 17 nt, Human
auuaaauauauguaugu

SEQ ID NO: 2075596 - RNA, 18 nt, Human
auuaaauauauguaugua

SEQ ID NO: 2075597 - RNA, 19 nt, Human
auuaaauauauguauguaa

SEQ ID NO: 2075598 - RNA, 21 nt, Human
auuaaauauauguauguaaaa

SEQ ID NO: 2075599 - RNA, 20 nt, Human
auuaaauauguuagcaaaga

SEQ ID NO: 2075600 - RNA, 15 nt, Human
augugggaagaaaca

SEQ ID NO: 2075601 - RNA, 18 nt, Human
augugggaagaaacaaac

SEQ ID NO: 2075602 - RNA, 20 nt, Human
augugggaagaaacaaaccc

SEQ ID NO: 2075603 - RNA, 15 nt, Human
cucgaacccacacug

SEQ ID NO: 2075604 - RNA, 18 nt, Human
cucgaacccacacugcaa

SEQ ID NO: 2075605 - RNA, 20 nt, Human
cuccuuuacccucaucuguc

SEQ ID NO: 2075606 - RNA, 21 nt, Human
cuccuuuacccucaucugucu

SEQ ID NO: 2075607 - RNA, 22 nt, Human
cuccuuuagcgcccaguugggu

SEQ ID NO: 2075608 - RNA, 14 nt, Human
cuccuuucuggcuu

SEQ ID NO: 2075609 - RNA, 17 nt, Human
cuccuuuagcgcccagu

SEQ ID NO: 2075610 - RNA, 16 nt, Human
cuccuuuagcgcccag

SEQ ID NO: 2075611 - RNA, 22 nt, Human
cuccuagccugugccucuggga

SEQ ID NO: 2075612 - RNA, 16 nt, Human
cuccuuugcaggcuca

SEQ ID NO: 2075613 - RNA, 14 nt, Human
cuccuuucuuucua

SEQ ID NO: 2075614 - RNA, 22 nt, Human
cucgaacauggaacucauuccu

SEQ ID NO: 2075615 - RNA, 23 nt, Human
cucgaacauggaacucauuccug

SEQ ID NO: 2075616 - RNA, 21 nt, Human
cucggguggcuagucagagag

SEQ ID NO: 2075617 - RNA, 19 nt, Human
cucgggcgagucacugccu

SEQ ID NO: 2075618 - RNA, 21 nt, Human
cucgggcgagucacugccucu

SEQ ID NO: 2075619 - RNA, 22 nt, Human
cucgggcgagucacugccucuc

SEQ ID NO: 2075620 - RNA, 20 nt, Human
cucguauaugucucaggucc

SEQ ID NO: 2075621 - RNA, 12 nt, Human
cucguccucccc

SEQ ID NO: 2075622 - RNA, 14 nt, Human
cucguccucccccu

SEQ ID NO: 2075623 - RNA, 15 nt, Human
cucguccucccccug

SEQ ID NO: 2075624 - RNA, 14 nt, Human
cucguggccuuccc

SEQ ID NO: 2075625 - RNA, 18 nt, Human
cucguggccuuccccagc

SEQ ID NO: 2075626 - RNA, 21 nt, Human
cucguggccuuccccagccuc

SEQ ID NO: 2075627 - RNA, 20 nt, Human
cucguggccuuccccagccu

SEQ ID NO: 2075628 - RNA, 14 nt, Human
cucguagccaucuc

SEQ ID NO: 2075629 - RNA, 18 nt, Human
cucguauaugucucaggu

SEQ ID NO: 2075630 - RNA, 14 nt, Human
cucgguggacccag

SEQ ID NO: 2075631 - RNA, 11 nt, Human
cucggugccuu

SEQ ID NO: 2075632 - RNA, 18 nt, Human
cucgguggacccagggau

SEQ ID NO: 2075633 - RNA, 16 nt, Human
cucugcacaagcugca

SEQ ID NO: 2075634 - RNA, 15 nt, Human
cucgugguaggacug

SEQ ID NO: 2075635 - RNA, 16 nt, Human
cucgugguaggacugu

SEQ ID NO: 2075636 - RNA, 17 nt, Human
cucgugguaggacugua

SEQ ID NO: 2075637 - RNA, 12 nt, Human
cucucccuguug

SEQ ID NO: 2075638 - RNA, 12 nt, Human
cucucccuggcc

SEQ ID NO: 2075639 - RNA, 13 nt, Human
cucucccuggccc

SEQ ID NO: 2075640 - RNA, 16 nt, Human
cucuccgaccagacac

SEQ ID NO: 2075641 - RNA, 15 nt, Human
cucuccuccugccca

SEQ ID NO: 2075642 - RNA, 19 nt, Human
cucuccuccugcccaccug

SEQ ID NO: 2075643 - RNA, 20 nt, Human
cucuccuccugcccaccugu

SEQ ID NO: 2075644 - RNA, 17 nt, Human
cucucuucugcuccacc

SEQ ID NO: 2075645 - RNA, 15 nt, Human
cucucuugguuuccu

SEQ ID NO: 2075646 - RNA, 18 nt, Human
cucucuucugcuccaccc

SEQ ID NO: 2075647 - RNA, 15 nt, Human
cucucuuuggacucu

SEQ ID NO: 2075648 - RNA, 16 nt, Human
cucucuuuggacucuc

SEQ ID NO: 2075649 - RNA, 15 nt, Human
cucugaacuucagcu

SEQ ID NO: 2075650 - RNA, 19 nt, Human
cucugaacuucagcuagag

SEQ ID NO: 2075651 - RNA, 14 nt, Human
cuccgggagagggg

SEQ ID NO: 2075652 - RNA, 22 nt, Human
cuccgcuuucuacccagcgagc

SEQ ID NO: 2075653 - RNA, 15 nt, Human
cuccguauuucagac

SEQ ID NO: 2075654 - RNA, 13 nt, Human
cuccguauuucag

SEQ ID NO: 2075655 - RNA, 14 nt, Human
cuccguauuucaga

SEQ ID NO: 2075656 - RNA, 13 nt, Human
cuccggugugccu

SEQ ID NO: 2075657 - RNA, 18 nt, Human
cuccggugugccugcagc

SEQ ID NO: 2075658 - RNA, 19 nt, Human
cuccggugugccugcagcc

SEQ ID NO: 2075659 - RNA, 23 nt, Human
cuccggugugccugcagccccgc

SEQ ID NO: 2075660 - RNA, 15 nt, Human
cuccguccagccgcc

SEQ ID NO: 2075661 - RNA, 20 nt, Human
cuccgcuuucuacccagcga

SEQ ID NO: 2075662 - RNA, 21 nt, Human
cuccgcuuucuacccagcgag

SEQ ID NO: 2075663 - RNA, 11 nt, Human
cucccagccug

SEQ ID NO: 2075664 - RNA, 15 nt, Human
cucccagcucuagac

SEQ ID NO: 2075665 - RNA, 18 nt, Human
cucccagcucuagacaac

SEQ ID NO: 2075666 - RNA, 20 nt, Human
cucccagcucuagacaaccc

SEQ ID NO: 2075667 - RNA, 23 nt, Human
cucccagcucuagacaacccugc

SEQ ID NO: 2075668 - RNA, 11 nt, Human
cuccccagggg

SEQ ID NO: 2075669 - RNA, 21 nt, Human
cuccccaggggagagggucug

SEQ ID NO: 2075670 - RNA, 16 nt, Human
cucccucccucuuucc

SEQ ID NO: 2075671 - RNA, 18 nt, Human
cucccuccccugccauuu

SEQ ID NO: 2075672 - RNA, 15 nt, Human
cucccuccccugccc

SEQ ID NO: 2075673 - RNA, 16 nt, Human
cucccuccccugcccu

SEQ ID NO: 2075674 - RNA, 18 nt, Human
cucccuccccugcccucg

SEQ ID NO: 2075675 - RNA, 18 nt, Human
cucccuccccugcccugg

SEQ ID NO: 2075676 - RNA, 21 nt, Human
cucccuccccugcccuggucc

SEQ ID NO: 2075677 - RNA, 18 nt, Human
cucccucccccugccccu

SEQ ID NO: 2075678 - RNA, 11 nt, Human
cucccuccccu

SEQ ID NO: 2075679 - RNA, 13 nt, Human
cucccuccccugc

SEQ ID NO: 2075680 - RNA, 14 nt, Human
cucccuccccugcc

SEQ ID NO: 2075681 - RNA, 15 nt, Human
cucccuccccugcca

SEQ ID NO: 2075682 - RNA, 15 nt, Human
cucccucuuucccuc

SEQ ID NO: 2075683 - RNA, 18 nt, Human
cucccucuggcccugccu

SEQ ID NO: 2075684 - RNA, 19 nt, Human
cucccucuggcccugccuu

SEQ ID NO: 2075685 - RNA, 20 nt, Human
cucccucuggcccugccuuc

SEQ ID NO: 2075686 - RNA, 21 nt, Human
cucccucugaccugcaggcca

SEQ ID NO: 2075687 - RNA, 17 nt, Human
cucccucuccugccuac

SEQ ID NO: 2075688 - RNA, 14 nt, Human
cucccucugccggc

SEQ ID NO: 2075689 - RNA, 17 nt, Human
cucccucugccggcucu

SEQ ID NO: 2075690 - RNA, 22 nt, Human
cucccucugccugaaccuucca

SEQ ID NO: 2075691 - RNA, 14 nt, Human
cucccucuggcccu

SEQ ID NO: 2075692 - RNA, 15 nt, Human
cucccucuggcccug

SEQ ID NO: 2075693 - RNA, 17 nt, Human
cucccucuggcccugcc

SEQ ID NO: 2075694 - RNA, 23 nt, Human
cucccuccccugcccugguccag

SEQ ID NO: 2075695 - RNA, 13 nt, Human
cucccucuccugc

SEQ ID NO: 2075696 - RNA, 14 nt, Human
cucccucuccugcc

SEQ ID NO: 2075697 - RNA, 15 nt, Human
cucccucuccugccu

SEQ ID NO: 2075698 - RNA, 15 nt, Human
cucccucucucuucu

SEQ ID NO: 2075699 - RNA, 16 nt, Human
cucccucucucuucug

SEQ ID NO: 2075700 - RNA, 17 nt, Human
cucccucucucuucugc

SEQ ID NO: 2075701 - RNA, 20 nt, Human
cucccucucucuucugcucc

SEQ ID NO: 2075702 - RNA, 21 nt, Human
cucccucucucuucugcucca

SEQ ID NO: 2075703 - RNA, 22 nt, Human
cucccucucucuucugcuccac

SEQ ID NO: 2075704 - RNA, 13 nt, Human
cucccucugaccu

SEQ ID NO: 2075705 - RNA, 14 nt, Human
cucccucugaccug

SEQ ID NO: 2075706 - RNA, 17 nt, Human
cucccucugaccugcag

SEQ ID NO: 2075707 - RNA, 18 nt, Human
cucccucugaccugcagg

SEQ ID NO: 2075708 - RNA, 19 nt, Human
cucccucuuucccucccuu

SEQ ID NO: 2075709 - RNA, 22 nt, Human
cucccagauuucagucuuuucc

SEQ ID NO: 2075710 - RNA, 18 nt, Human
cucccagccccugccccu

SEQ ID NO: 2075711 - RNA, 19 nt, Human
cucccagccccugccccuc

SEQ ID NO: 2075712 - RNA, 17 nt, Human
cucccaccucagccucc

SEQ ID NO: 2075713 - RNA, 16 nt, Human
cucccaccucagccuc

SEQ ID NO: 2075714 - RNA, 14 nt, Human
cuccauacucagga

SEQ ID NO: 2075715 - RNA, 14 nt, Human
cucccaccucagcc

SEQ ID NO: 2075716 - RNA, 19 nt, Human
cuccaguggaagaagaaaa

SEQ ID NO: 2075717 - RNA, 11 nt, Human
cuccagggcca

SEQ ID NO: 2075718 - RNA, 16 nt, Human
cuccagggccacgugc

SEQ ID NO: 2075719 - RNA, 17 nt, Human
cuccaguuuucaguuga

SEQ ID NO: 2075720 - RNA, 22 nt, Human
cuccaggcuguaucccaugagc

SEQ ID NO: 2075721 - RNA, 23 nt, Human
cuccaggcuguaucccaugagcc

SEQ ID NO: 2075722 - RNA, 17 nt, Human
cuccaggcugucuuuca

SEQ ID NO: 2075723 - RNA, 22 nt, Human
cucagacaggaaagggaaggcc

SEQ ID NO: 2075724 - RNA, 20 nt, Human
cuccagacaaaccagaagca

SEQ ID NO: 2075725 - RNA, 16 nt, Human
cucagaaucucaaaua

SEQ ID NO: 2075726 - RNA, 17 nt, Human
cucagaaucucaaauaa

SEQ ID NO: 2075727 - RNA, 19 nt, Human
cucagaaucuuuccuuccu

SEQ ID NO: 2075728 - RNA, 19 nt, Human
cucugcacaagcugcaccc

SEQ ID NO: 2075729 - RNA, 17 nt, Human
cucugcacaagcugcac

SEQ ID NO: 2075730 - RNA, 18 nt, Human
cucugcacaagcugcacc

SEQ ID NO: 2075731 - RNA, 13 nt, Human
cucuugagccugg

SEQ ID NO: 2075732 - RNA, 14 nt, Human
cucuugagccuggg

SEQ ID NO: 2075733 - RNA, 15 nt, Human
cucuugagccuggga

SEQ ID NO: 2075734 - RNA, 16 nt, Human
cucuugagccugggag

SEQ ID NO: 2075735 - RNA, 14 nt, Human
cucuugaggccagg

SEQ ID NO: 2075736 - RNA, 16 nt, Human
cucuugaggccaggag

SEQ ID NO: 2075737 - RNA, 17 nt, Human
cucuugaggccaggagu

SEQ ID NO: 2075738 - RNA, 14 nt, Human
cucuugagggagcu

SEQ ID NO: 2075739 - RNA, 15 nt, Human
cucuugagggagcuu

SEQ ID NO: 2075740 - RNA, 22 nt, Human
cucuugccacugccucuuccuc

SEQ ID NO: 2075741 - RNA, 14 nt, Human
cucuugcagagaag

SEQ ID NO: 2075742 - RNA, 15 nt, Human
cucuugcagagaagc

SEQ ID NO: 2075743 - RNA, 17 nt, Human
cucuugcagagaagccu

SEQ ID NO: 2075744 - RNA, 14 nt, Human
cucuuuuuguuuuu

SEQ ID NO: 2075745 - RNA, 12 nt, Human
cucuugcccccc

SEQ ID NO: 2075746 - RNA, 13 nt, Human
cucuugcccccca

SEQ ID NO: 2075747 - RNA, 16 nt, Human
cucuugccccccaccc

SEQ ID NO: 2075748 - RNA, 19 nt, Human
cucuugccccccaccccag

SEQ ID NO: 2075749 - RNA, 20 nt, Human
cucuugccccccaccccagc

SEQ ID NO: 2075750 - RNA, 22 nt, Human
cucuugccccccaccccagccu

SEQ ID NO: 2075751 - RNA, 14 nt, Human
cugaccccccucag

SEQ ID NO: 2075752 - RNA, 15 nt, Human
cugaccccccucagg

SEQ ID NO: 2075753 - RNA, 19 nt, Human
cugaccccccucaggaccc

SEQ ID NO: 2075754 - RNA, 20 nt, Human
cugaccccccucaggacccu

SEQ ID NO: 2075755 - RNA, 23 nt, Human
cugaccccccucaggacccucgc

SEQ ID NO: 2075756 - RNA, 14 nt, Human
cugacacguccacc

SEQ ID NO: 2075757 - RNA, 17 nt, Human
cugacacguccacccca

SEQ ID NO: 2075758 - RNA, 21 nt, Human
cugacacaugcugaacaucac

SEQ ID NO: 2075759 - RNA, 23 nt, Human
cugacacacagcucuguccuggg

SEQ ID NO: 2075760 - RNA, 22 nt, Human
cugacacacagcucuguccugg

SEQ ID NO: 2075761 - RNA, 21 nt, Human
cugacacacagcucuguccug

SEQ ID NO: 2075762 - RNA, 20 nt, Human
cugacacacagcucuguccu

SEQ ID NO: 2075763 - RNA, 19 nt, Human
cugacacacagcucugucc

SEQ ID NO: 2075764 - RNA, 18 nt, Human
cugacacacagcucuguc

SEQ ID NO: 2075765 - RNA, 17 nt, Human
cugacacacagcucugu

SEQ ID NO: 2075766 - RNA, 16 nt, Human
cugacacacagcucug

SEQ ID NO: 2075767 - RNA, 15 nt, Human
cugacacacagcucu

SEQ ID NO: 2075768 - RNA, 13 nt, Human
cugacacacagcu

SEQ ID NO: 2075769 - RNA, 13 nt, Human
cugacaaucaacu

SEQ ID NO: 2075770 - RNA, 21 nt, Human
cugacaaucaacucuaauagu

SEQ ID NO: 2075771 - RNA, 18 nt, Human
cugacacaaaaaaaguug

SEQ ID NO: 2075772 - RNA, 18 nt, Human
cugacacaaaaaguagau

SEQ ID NO: 2075773 - RNA, 11 nt, Human
cugaaagccac

SEQ ID NO: 2075774 - RNA, 12 nt, Human
cugaaagccacg

SEQ ID NO: 2075775 - RNA, 14 nt, Human
cugaagcagaugca

SEQ ID NO: 2075776 - RNA, 14 nt, Human
cugaaaauguaugu

SEQ ID NO: 2075777 - RNA, 14 nt, Human
cugaaagaggccaa

SEQ ID NO: 2075778 - RNA, 22 nt, Human
cugaagcagaugcaaagaggca

SEQ ID NO: 2075779 - RNA, 19 nt, Human
cugaggaaucaacagggca

SEQ ID NO: 2075780 - RNA, 20 nt, Human
cugaggaaucaacagggcag

SEQ ID NO: 2075781 - RNA, 21 nt, Human
cugaggaaucaacagggcagc

SEQ ID NO: 2075782 - RNA, 21 nt, Human
cugaggggaggaucacuggag

SEQ ID NO: 2075783 - RNA, 23 nt, Human
cugaggaauccagacccggcugc

SEQ ID NO: 2075784 - RNA, 16 nt, Human
cugaggggcaucugcc

SEQ ID NO: 2075785 - RNA, 17 nt, Human
cugaggggcaucugccc

SEQ ID NO: 2075786 - RNA, 19 nt, Human
cugaggggcaacgaagaaa

SEQ ID NO: 2075787 - RNA, 21 nt, Human
cugaggggcaacgaagaaaaa

SEQ ID NO: 2075788 - RNA, 22 nt, Human
cugaggggcaacgaagaaaaaa

SEQ ID NO: 2075789 - RNA, 22 nt, Human
cugaggggaggaucacuggagc

SEQ ID NO: 2075790 - RNA, 23 nt, Human
cugaggggaggaucacuggagcc

SEQ ID NO: 2075791 - RNA, 20 nt, Human
cugaggggcaucugccccuc

SEQ ID NO: 2075792 - RNA, 18 nt, Human
cugaggggcaucugcccc

SEQ ID NO: 2075793 - RNA, 19 nt, Human
cugaggggcaucugccccu

SEQ ID NO: 2075794 - RNA, 13 nt, Human
cugaggugggagg

SEQ ID NO: 2075795 - RNA, 22 nt, Human
cugaggugggaggaucucuuga

SEQ ID NO: 2075796 - RNA, 14 nt, Human
cugaggugggcaga

SEQ ID NO: 2075797 - RNA, 20 nt, Human
cugaggugggcagaucacga

SEQ ID NO: 2075798 - RNA, 18 nt, Human
cugagcuuggccagaagg

SEQ ID NO: 2075799 - RNA, 16 nt, Human
cugagcuucucuguga

SEQ ID NO: 2075800 - RNA, 15 nt, Human
cugagcuucucugug

SEQ ID NO: 2075801 - RNA, 12 nt, Human
cugagcuuggcc

SEQ ID NO: 2075802 - RNA, 15 nt, Human
cugagcuuggccaga

SEQ ID NO: 2075803 - RNA, 16 nt, Human
cugagcuuggccagaa

SEQ ID NO: 2075804 - RNA, 17 nt, Human
cugagcuuggccagaag

SEQ ID NO: 2075805 - RNA, 16 nt, Human
cugagcugccauccag

SEQ ID NO: 2075806 - RNA, 15 nt, Human
cugagcugccaucca

SEQ ID NO: 2075807 - RNA, 19 nt, Human
cugacccugcuucaaauau

SEQ ID NO: 2075808 - RNA, 18 nt, Human
cugacccucuccacccca

SEQ ID NO: 2075809 - RNA, 13 nt, Human
cugacccugcaga

SEQ ID NO: 2075810 - RNA, 17 nt, Human
cugacccugcagagaug

SEQ ID NO: 2075811 - RNA, 18 nt, Human
cugacccugcagagaugc

SEQ ID NO: 2075812 - RNA, 14 nt, Human
cuauuuuucagaau

SEQ ID NO: 2075813 - RNA, 15 nt, Human
cuauuuuuauuuaua

SEQ ID NO: 2075814 - RNA, 17 nt, Human
cuauguugcccaggcag

SEQ ID NO: 2075815 - RNA, 16 nt, Human
cuauguugcccaggca

SEQ ID NO: 2075816 - RNA, 18 nt, Human
cucaaaaaaagaaaaaga

SEQ ID NO: 2075817 - RNA, 18 nt, Human
cuauuuuuauuuauauuu

SEQ ID NO: 2075818 - RNA, 16 nt, Human
cuauuuuuauuuauau

SEQ ID NO: 2075819 - RNA, 22 nt, Human
cucaaagaaauuuccacucagg

SEQ ID NO: 2075820 - RNA, 17 nt, Human
cucaaacugccuuggcu

SEQ ID NO: 2075821 - RNA, 11 nt, Human
cucaaaggcac

SEQ ID NO: 2075822 - RNA, 23 nt, Human
cucaaagugacuauucaguuuuc

SEQ ID NO: 2075823 - RNA, 17 nt, Human
cucaaaguuaaccuacc

SEQ ID NO: 2075824 - RNA, 14 nt, Human
cuauguauggaaua

SEQ ID NO: 2075825 - RNA, 22 nt, Human
cuauguauggaauacaguguua

SEQ ID NO: 2075826 - RNA, 14 nt, Human
cuauguugcccagg

SEQ ID NO: 2075827 - RNA, 17 nt, Human
cuauguggcuguaucuu

SEQ ID NO: 2075828 - RNA, 15 nt, Human
cuauguugcccaggc

SEQ ID NO: 2075829 - RNA, 22 nt, Human
cuauguguagggcgggaggaug

SEQ ID NO: 2075830 - RNA, 19 nt, Human
cuauguaucaaugaguaac

SEQ ID NO: 2075831 - RNA, 17 nt, Human
cucacaacagcugccug

SEQ ID NO: 2075832 - RNA, 12 nt, Human
cucaaauaacua

SEQ ID NO: 2075833 - RNA, 14 nt, Human
cucacccgaggcug

SEQ ID NO: 2075834 - RNA, 22 nt, Human
cucaccuugcaacacacagaca

SEQ ID NO: 2075835 - RNA, 14 nt, Human
cucacuucacccug

SEQ ID NO: 2075836 - RNA, 14 nt, Human
cucacuuuucucca

SEQ ID NO: 2075837 - RNA, 19 nt, Human
cucaccuugcaacacacag

SEQ ID NO: 2075838 - RNA, 20 nt, Human
cucaccuugcaacacacaga

SEQ ID NO: 2075839 - RNA, 21 nt, Human
cucaccuugcaacacacagac

SEQ ID NO: 2075840 - RNA, 20 nt, Human
cucaccuugaacaccacgcu

SEQ ID NO: 2075841 - RNA, 22 nt, Human
cucaccuugaacaccacgcuug

SEQ ID NO: 2075842 - RNA, 18 nt, Human
cucaccuugcaacacaca

SEQ ID NO: 2075843 - RNA, 19 nt, Human
cucaccugggcaccugggg

SEQ ID NO: 2075844 - RNA, 21 nt, Human
cucaccugcuggccccucacc

SEQ ID NO: 2075845 - RNA, 20 nt, Human
cucaccugggcaccugggga

SEQ ID NO: 2075846 - RNA, 21 nt, Human
cucaccugggcaccuggggag

SEQ ID NO: 2075847 - RNA, 11 nt, Human
cucaccugggg

SEQ ID NO: 2075848 - RNA, 12 nt, Human
cucaccuggggu

SEQ ID NO: 2075849 - RNA, 21 nt, Human
cucaccuggggugugggaggc

SEQ ID NO: 2075850 - RNA, 15 nt, Human
cucacuuuucuccau

SEQ ID NO: 2075851 - RNA, 16 nt, Human
cucagaagguauuccu

SEQ ID NO: 2075852 - RNA, 19 nt, Human
cucagaagguauuccuuuu

SEQ ID NO: 2075853 - RNA, 13 nt, Human
cucagaagguauu

SEQ ID NO: 2075854 - RNA, 22 nt, Human
cucaccucuggacuggcuagag

SEQ ID NO: 2075855 - RNA, 15 nt, Human
cucaccucuggacug

SEQ ID NO: 2075856 - RNA, 21 nt, Human
cucaccucuggacuggcuaga

SEQ ID NO: 2075857 - RNA, 16 nt, Human
cucaccucuaaaacag

SEQ ID NO: 2075858 - RNA, 12 nt, Human
cucaccucugcc

SEQ ID NO: 2075859 - RNA, 13 nt, Human
cucaccucugccu

SEQ ID NO: 2075860 - RNA, 14 nt, Human
cucaccucugccuc

SEQ ID NO: 2075861 - RNA, 15 nt, Human
cucaccucugccuca

SEQ ID NO: 2075862 - RNA, 16 nt, Human
cucaccucugccucaa

SEQ ID NO: 2075863 - RNA, 18 nt, Human
cucaccucugccucaaug

SEQ ID NO: 2075864 - RNA, 19 nt, Human
cucaccucugccucaaugu

SEQ ID NO: 2075865 - RNA, 14 nt, Human
cucaccucuggacu

SEQ ID NO: 2075866 - RNA, 15 nt, Human
cucaccugcuggccc

SEQ ID NO: 2075867 - RNA, 16 nt, Human
cucaccugcuggcccc

SEQ ID NO: 2075868 - RNA, 18 nt, Human
cucaccugcuggccccuc

SEQ ID NO: 2075869 - RNA, 19 nt, Human
cucaccugcuggccccuca

SEQ ID NO: 2075870 - RNA, 23 nt, Human
cucaccuaauguuuaugagccag

SEQ ID NO: 2075871 - RNA, 21 nt, Human
cucaccguggcuaagaguguc

SEQ ID NO: 2075872 - RNA, 12 nt, Human
cuaggccugggg

SEQ ID NO: 2075873 - RNA, 13 nt, Human
cuaggccugggga

SEQ ID NO: 2075874 - RNA, 19 nt, Human
cuaggccuggcauggcacc

SEQ ID NO: 2075875 - RNA, 20 nt, Human
cuaggccuggcauggcaccu

SEQ ID NO: 2075876 - RNA, 15 nt, Human
cuaggcgugagaagc

SEQ ID NO: 2075877 - RNA, 19 nt, Human
cuaggccuggccagaugca

SEQ ID NO: 2075878 - RNA, 18 nt, Human
cuaggccuggccagaugc

SEQ ID NO: 2075879 - RNA, 15 nt, Human
cuaggccuggccaga

SEQ ID NO: 2075880 - RNA, 14 nt, Human
cuaggccuggccag

SEQ ID NO: 2075881 - RNA, 13 nt, Human
cuaggccuggcca

SEQ ID NO: 2075882 - RNA, 12 nt, Human
cuaggccgggcg

SEQ ID NO: 2075883 - RNA, 13 nt, Human
cuagaauuuauuc

SEQ ID NO: 2075884 - RNA, 12 nt, Human
cuagaauuuauu

SEQ ID NO: 2075885 - RNA, 21 nt, Human
cuagaauuuaucacacuucug

SEQ ID NO: 2075886 - RNA, 22 nt, Human
cuagaaucagccuaggggucag

SEQ ID NO: 2075887 - RNA, 13 nt, Human
cuauaaaacaggu

SEQ ID NO: 2075888 - RNA, 13 nt, Human
cuaggguggcccu

SEQ ID NO: 2075889 - RNA, 17 nt, Human
cuaggguggcccuugca

SEQ ID NO: 2075890 - RNA, 20 nt, Human
cuaguuccugaugacccagg

SEQ ID NO: 2075891 - RNA, 22 nt, Human
cuaguuccugaugacccaggcu

SEQ ID NO: 2075892 - RNA, 14 nt, Human
cuagggaagauaau

SEQ ID NO: 2075893 - RNA, 21 nt, Human
cuaggggucagggaccaagga

SEQ ID NO: 2075894 - RNA, 15 nt, Human
cuagggagagacccu

SEQ ID NO: 2075895 - RNA, 14 nt, Human
cuagggaggaccuu

SEQ ID NO: 2075896 - RNA, 21 nt, Human
cuagggaggaccuuaucugug

SEQ ID NO: 2075897 - RNA, 23 nt, Human
cuagggaggaccuuaucugugcg

SEQ ID NO: 2075898 - RNA, 15 nt, Human
cuaggcuggagccca

SEQ ID NO: 2075899 - RNA, 14 nt, Human
cuagggaaggccac

SEQ ID NO: 2075900 - RNA, 16 nt, Human
cuagggaaggccaccu

SEQ ID NO: 2075901 - RNA, 17 nt, Human
cuagggaaggccaccug

SEQ ID NO: 2075902 - RNA, 18 nt, Human
cuagggaaggccaccugc

SEQ ID NO: 2075903 - RNA, 19 nt, Human
cuagggaaggccaccugca

SEQ ID NO: 2075904 - RNA, 20 nt, Human
cuagggaaggccaccugcag

SEQ ID NO: 2075905 - RNA, 21 nt, Human
cuagggaaggccaccugcagg

SEQ ID NO: 2075906 - RNA, 11 nt, Human
cuagggaagaa

SEQ ID NO: 2075907 - RNA, 20 nt, Human
cuagggaagaaagcagaaca

SEQ ID NO: 2075908 - RNA, 13 nt, Human
cuagggaccuggg

SEQ ID NO: 2075909 - RNA, 14 nt, Human
cuagggaccugggg

SEQ ID NO: 2075910 - RNA, 18 nt, Human
cuagggaccuggggaagc

SEQ ID NO: 2075911 - RNA, 14 nt, Human
cuagggagagaccc

SEQ ID NO: 2075912 - RNA, 18 nt, Human
cuaccuuccaguuccuca

SEQ ID NO: 2075913 - RNA, 15 nt, Human
cuaccugaucccacu

SEQ ID NO: 2075914 - RNA, 16 nt, Human
cuaccugaucccacuc

SEQ ID NO: 2075915 - RNA, 17 nt, Human
cuaccugaucccacucc

SEQ ID NO: 2075916 - RNA, 20 nt, Human
cuaccugauuggugcaaccc

SEQ ID NO: 2075917 - RNA, 15 nt, Human
cuaccuucaaagcug

SEQ ID NO: 2075918 - RNA, 16 nt, Human
cuaccuucaaagcuga

SEQ ID NO: 2075919 - RNA, 23 nt, Human
cuaccuugaggucuuuugacaug

SEQ ID NO: 2075920 - RNA, 22 nt, Human
cuaccuugaggucuuuugacau

SEQ ID NO: 2075921 - RNA, 16 nt, Human
cuacuacaucgcccuc

SEQ ID NO: 2075922 - RNA, 18 nt, Human
cuacuacaucgcccucca

SEQ ID NO: 2075923 - RNA, 13 nt, Human
cuacuaaugaugu

SEQ ID NO: 2075924 - RNA, 14 nt, Human
cuacuaaugauguu

SEQ ID NO: 2075925 - RNA, 15 nt, Human
cuacuaaaaauacaa

SEQ ID NO: 2075926 - RNA, 18 nt, Human
cuacuaaaaauacaaaca

SEQ ID NO: 2075927 - RNA, 19 nt, Human
cuacuaaaaauacaaacaa

SEQ ID NO: 2075928 - RNA, 18 nt, Human
cuacuagggaccugggga

SEQ ID NO: 2075929 - RNA, 20 nt, Human
cuacuagggaccuggggaag

SEQ ID NO: 2075930 - RNA, 21 nt, Human
cuacuagggaccuggggaagc

SEQ ID NO: 2075931 - RNA, 15 nt, Human
cuacuagaugucuuu

SEQ ID NO: 2075932 - RNA, 21 nt, Human
cuacuacaucgcccuccacau

SEQ ID NO: 2075933 - RNA, 18 nt, Human
cuacuaugccagaugccu

SEQ ID NO: 2075934 - RNA, 16 nt, Human
cuacucaagaggcuga

SEQ ID NO: 2075935 - RNA, 20 nt, Human
cuacucaagaggcugaggca

SEQ ID NO: 2075936 - RNA, 15 nt, Human
cuacucacagucucu

SEQ ID NO: 2075937 - RNA, 17 nt, Human
cuacucacagucucuuu

SEQ ID NO: 2075938 - RNA, 18 nt, Human
cuacucacagucucuuua

SEQ ID NO: 2075939 - RNA, 23 nt, Human
cuacucaccuugaacaccacgcu

SEQ ID NO: 2075940 - RNA, 13 nt, Human
cuacucacucaag

SEQ ID NO: 2075941 - RNA, 21 nt, Human
cgagguuucucaaagaaauuu

SEQ ID NO: 2075942 - RNA, 21 nt, Human
cgaggucaacagagaaggcag

SEQ ID NO: 2075943 - RNA, 20 nt, Human
cgagguggaucacagaggcu

SEQ ID NO: 2075944 - RNA, 16 nt, Human
cgagguaugaggucua

SEQ ID NO: 2075945 - RNA, 15 nt, Human
cgaggucaacagaga

SEQ ID NO: 2075946 - RNA, 16 nt, Human
cgaggucaacagagaa

SEQ ID NO: 2075947 - RNA, 17 nt, Human
cgaggucaacagagaag

SEQ ID NO: 2075948 - RNA, 23 nt, Human
cgaggucaacagagaaggcagga

SEQ ID NO: 2075949 - RNA, 21 nt, Human
cgauacaccgggccuggagaa

SEQ ID NO: 2075950 - RNA, 20 nt, Human
cgauacaccgggccuggaga

SEQ ID NO: 2075951 - RNA, 18 nt, Human
cgauacaccgggccugga

SEQ ID NO: 2075952 - RNA, 15 nt, Human
cgagguggcugccug

SEQ ID NO: 2075953 - RNA, 20 nt, Human
cgagguggcugccuggagcc

SEQ ID NO: 2075954 - RNA, 22 nt, Human
cgagguggaucacagaggcuuc

SEQ ID NO: 2075955 - RNA, 23 nt, Human
cgagguggaucacagaggcuucu

SEQ ID NO: 2075956 - RNA, 14 nt, Human
cgcuggcugggggc

SEQ ID NO: 2075957 - RNA, 20 nt, Human
cgcuggcugggggccucacu

SEQ ID NO: 2075958 - RNA, 23 nt, Human
cgccuuagguacuuauuccagau

SEQ ID NO: 2075959 - RNA, 22 nt, Human
cgccuucacuccggugugccug

SEQ ID NO: 2075960 - RNA, 23 nt, Human
cgcuggaccuugaacuggguacu

SEQ ID NO: 2075961 - RNA, 19 nt, Human
cgcuggaccuugaacuggg

SEQ ID NO: 2075962 - RNA, 20 nt, Human
cgcugcucuuaugccauuug

SEQ ID NO: 2075963 - RNA, 20 nt, Human
cgccuguaguccuagccacu

SEQ ID NO: 2075964 - RNA, 13 nt, Human
cgcaugcagcagc

SEQ ID NO: 2075965 - RNA, 14 nt, Human
cgcaugcagcagcu

SEQ ID NO: 2075966 - RNA, 13 nt, Human
cgcaucuucucca

SEQ ID NO: 2075967 - RNA, 14 nt, Human
cgcaucuucuccau

SEQ ID NO: 2075968 - RNA, 15 nt, Human
cgcaucuucuccauc

SEQ ID NO: 2075969 - RNA, 16 nt, Human
cgcaucuucuccaucu

SEQ ID NO: 2075970 - RNA, 21 nt, Human
cgcaucuucuccaucuggcag

SEQ ID NO: 2075971 - RNA, 20 nt, Human
cgccuguagucccagcuacu

SEQ ID NO: 2075972 - RNA, 17 nt, Human
cgccuguaguccuagcc

SEQ ID NO: 2075973 - RNA, 13 nt, Human
cgcaucagacaga

SEQ ID NO: 2075974 - RNA, 15 nt, Human
cgugucccucucgga

SEQ ID NO: 2075975 - RNA, 15 nt, Human
cgugucgugggugug

SEQ ID NO: 2075976 - RNA, 14 nt, Human
cguuaccaggcagg

SEQ ID NO: 2075977 - RNA, 21 nt, Human
cguuacuagcagucacuugau

SEQ ID NO: 2075978 - RNA, 11 nt, Human
cguuaacauug

SEQ ID NO: 2075979 - RNA, 22 nt, Human
cguuaacauugaccaagaacug

SEQ ID NO: 2075980 - RNA, 17 nt, Human
cguuaacuguguaugua

SEQ ID NO: 2075981 - RNA, 19 nt, Human
cguuaacuguguauguaca

SEQ ID NO: 2075982 - RNA, 14 nt, Human
cuaaaggaaaaaac

SEQ ID NO: 2075983 - RNA, 19 nt, Human
cuaaaggaaaaaaccaucc

SEQ ID NO: 2075984 - RNA, 18 nt, Human
cuaaagagagaauguaga

SEQ ID NO: 2075985 - RNA, 19 nt, Human
cuaaagagagaauguagau

SEQ ID NO: 2075986 - RNA, 21 nt, Human
cuaaagaagguuucagaaaga

SEQ ID NO: 2075987 - RNA, 21 nt, Human
cuaaagacccuaaaucugagg

SEQ ID NO: 2075988 - RNA, 16 nt, Human
cuaaagagagaaugua

SEQ ID NO: 2075989 - RNA, 13 nt, Human
cuaaaggccucuu

SEQ ID NO: 2075990 - RNA, 20 nt, Human
cuaacugcuacaaauacucu

SEQ ID NO: 2075991 - RNA, 14 nt, Human
cuaacuccagugaa

SEQ ID NO: 2075992 - RNA, 14 nt, Human
cuaacucugaugua

SEQ ID NO: 2075993 - RNA, 15 nt, Human
cuaacucugauguaa

SEQ ID NO: 2075994 - RNA, 16 nt, Human
cuaacucugauguaaa

SEQ ID NO: 2075995 - RNA, 17 nt, Human
cuaacucugauguaaau

SEQ ID NO: 2075996 - RNA, 21 nt, Human
cuaacucugauguaaaugaag

SEQ ID NO: 2075997 - RNA, 19 nt, Human
cuaacucagaaacaucagu

SEQ ID NO: 2075998 - RNA, 13 nt, Human
cuaacuggaagca

SEQ ID NO: 2075999 - RNA, 13 nt, Human
cgguucaccagcc

SEQ ID NO: 2076000 - RNA, 14 nt, Human
cgguucaccagccu

SEQ ID NO: 2076001 - RNA, 15 nt, Human
cgguucaccagccuc

SEQ ID NO: 2076002 - RNA, 16 nt, Human
cgguucaccagccucu

SEQ ID NO: 2076003 - RNA, 15 nt, Human
cgguugcuucuggga

SEQ ID NO: 2076004 - RNA, 22 nt, Human
cggugguuguuggggcuucuug

SEQ ID NO: 2076005 - RNA, 15 nt, Human
cgguguccauuuaua

SEQ ID NO: 2076006 - RNA, 21 nt, Human
cgguguccauuuauagaauaa

SEQ ID NO: 2076007 - RNA, 15 nt, Human
cggugugccugcagc

SEQ ID NO: 2076008 - RNA, 17 nt, Human
cggugugccugcagccc

SEQ ID NO: 2076009 - RNA, 20 nt, Human
cggugugccugcagccccgc

SEQ ID NO: 2076010 - RNA, 15 nt, Human
cggagacggaguccc

SEQ ID NO: 2076011 - RNA, 15 nt, Human
cggagacagugaucu

SEQ ID NO: 2076012 - RNA, 19 nt, Human
cggugggcauuugugaggc

SEQ ID NO: 2076013 - RNA, 20 nt, Human
cccaggcuggagugcaauga

SEQ ID NO: 2076014 - RNA, 18 nt, Human
cccaggcugccugagcac

SEQ ID NO: 2076015 - RNA, 20 nt, Human
cccaggcugccugagcaccu

SEQ ID NO: 2076016 - RNA, 18 nt, Human
cccaucagcuccagcugc

SEQ ID NO: 2076017 - RNA, 13 nt, Human
cccaucacuggag

SEQ ID NO: 2076018 - RNA, 15 nt, Human
cccaucacuggagca

SEQ ID NO: 2076019 - RNA, 20 nt, Human
cccaucacuggagcaccagg

SEQ ID NO: 2076020 - RNA, 14 nt, Human
cccaucagaaggag

SEQ ID NO: 2076021 - RNA, 15 nt, Human
cccagggaaguuuug

SEQ ID NO: 2076022 - RNA, 14 nt, Human
cccagggagaggcc

SEQ ID NO: 2076023 - RNA, 18 nt, Human
cccagggagaggccauga

SEQ ID NO: 2076024 - RNA, 15 nt, Human
cccagggagcggaaa

SEQ ID NO: 2076025 - RNA, 16 nt, Human
cccaucacgccugugc

SEQ ID NO: 2076026 - RNA, 20 nt, Human
cccagggagcggaaagcagc

SEQ ID NO: 2076027 - RNA, 21 nt, Human
cccaucacaggguugggccca

SEQ ID NO: 2076028 - RNA, 22 nt, Human
cccaucacaggguugggcccag

SEQ ID NO: 2076029 - RNA, 19 nt, Human
cccacuccuaggacauguu

SEQ ID NO: 2076030 - RNA, 21 nt, Human
cccacuggggaaauaacagcu

SEQ ID NO: 2076031 - RNA, 15 nt, Human
cccacuggcagcauc

SEQ ID NO: 2076032 - RNA, 12 nt, Human
cccacuggcugu

SEQ ID NO: 2076033 - RNA, 15 nt, Human
cccacuggcuguggg

SEQ ID NO: 2076034 - RNA, 16 nt, Human
cccacuggcugugggc

SEQ ID NO: 2076035 - RNA, 21 nt, Human
cccacuggcugugggcucccu

SEQ ID NO: 2076036 - RNA, 22 nt, Human
cccacuggcugugggcucccuu

SEQ ID NO: 2076037 - RNA, 23 nt, Human
cccacuggcugugggcucccuuc

SEQ ID NO: 2076038 - RNA, 17 nt, Human
cccagcacuaaagcagu

SEQ ID NO: 2076039 - RNA, 17 nt, Human
cccagcaccaccagguc

SEQ ID NO: 2076040 - RNA, 18 nt, Human
cccagcaccaccaggucu

SEQ ID NO: 2076041 - RNA, 19 nt, Human
cccagcaccaccaggucuc

SEQ ID NO: 2076042 - RNA, 13 nt, Human
cccagcacccagc

SEQ ID NO: 2076043 - RNA, 15 nt, Human
cccagcacccagcaa

SEQ ID NO: 2076044 - RNA, 16 nt, Human
cccagcacuaaagcag

SEQ ID NO: 2076045 - RNA, 10 nt, Human
cccagccauu

SEQ ID NO: 2076046 - RNA, 12 nt, Human
cccagcugcccc

SEQ ID NO: 2076047 - RNA, 14 nt, Human
cccagcugccccuc

SEQ ID NO: 2076048 - RNA, 15 nt, Human
cccagcugccccucc

SEQ ID NO: 2076049 - RNA, 17 nt, Human
cccagcugccccucccu

SEQ ID NO: 2076050 - RNA, 21 nt, Human
cccagcugccccucccugcca

SEQ ID NO: 2076051 - RNA, 14 nt, Human
cccagcugcucccc

SEQ ID NO: 2076052 - RNA, 18 nt, Human
cccagccauuaccaugga

SEQ ID NO: 2076053 - RNA, 15 nt, Human
cccagcugcuccccu

SEQ ID NO: 2076054 - RNA, 21 nt, Human
cccagcugcuccccucccucc

SEQ ID NO: 2076055 - RNA, 12 nt, Human
cccagcugcucu

SEQ ID NO: 2076056 - RNA, 13 nt, Human
cccagcugcucug

SEQ ID NO: 2076057 - RNA, 14 nt, Human
cccagcugcucugc

SEQ ID NO: 2076058 - RNA, 15 nt, Human
cccagcugcucugcc

SEQ ID NO: 2076059 - RNA, 17 nt, Human
cccagcugcucugccca

SEQ ID NO: 2076060 - RNA, 18 nt, Human
cccagcugcucugcccag

SEQ ID NO: 2076061 - RNA, 19 nt, Human
cccagcugcucugcccaga

SEQ ID NO: 2076062 - RNA, 20 nt, Human
cccagcugcucugcccagag

SEQ ID NO: 2076063 - RNA, 23 nt, Human
cccagcugcucugcccagagcug

SEQ ID NO: 2076064 - RNA, 15 nt, Human
cccauucugccugcc

SEQ ID NO: 2076065 - RNA, 14 nt, Human
cccauucugccugc

SEQ ID NO: 2076066 - RNA, 19 nt, Human
cccauucugccugcccagg

SEQ ID NO: 2076067 - RNA, 22 nt, Human
cccauuuuggaaguuuucagga

SEQ ID NO: 2076068 - RNA, 19 nt, Human
cccauuuugcaaaauuucc

SEQ ID NO: 2076069 - RNA, 22 nt, Human
cccauuuugcaaaauuuccagu

SEQ ID NO: 2076070 - RNA, 20 nt, Human
cccauuuuuauaucgaucuc

SEQ ID NO: 2076071 - RNA, 12 nt, Human
cccauuuugcaa

SEQ ID NO: 2076072 - RNA, 15 nt, Human
ccccaugucucucag

SEQ ID NO: 2076073 - RNA, 17 nt, Human
ccccaugucucucagaa

SEQ ID NO: 2076074 - RNA, 14 nt, Human
ccccaugugccugc

SEQ ID NO: 2076075 - RNA, 18 nt, Human
ccccaugugccugcacca

SEQ ID NO: 2076076 - RNA, 23 nt, Human
ccccaugugccugcaccaggaga

SEQ ID NO: 2076077 - RNA, 17 nt, Human
ccccauuagagucagcc

SEQ ID NO: 2076078 - RNA, 18 nt, Human
ccccaugccuguccagcc

SEQ ID NO: 2076079 - RNA, 19 nt, Human
ccccaugccuguccagccu

SEQ ID NO: 2076080 - RNA, 20 nt, Human
ccccaugccuguccagccug

SEQ ID NO: 2076081 - RNA, 21 nt, Human
ccccaugccuguccagccugg

SEQ ID NO: 2076082 - RNA, 22 nt, Human
ccccaugccuguccagccuggg

SEQ ID NO: 2076083 - RNA, 23 nt, Human
ccccaugccuguccagccugggc

SEQ ID NO: 2076084 - RNA, 24 nt, Human
ccccaugccuguccagccugggca

SEQ ID NO: 2076085 - RNA, 20 nt, Human
ccccagauugcaacaggcug

SEQ ID NO: 2076086 - RNA, 18 nt, Human
ccccagcccacuggauca

SEQ ID NO: 2076087 - RNA, 11 nt, Human
ccccagcccag

SEQ ID NO: 2076088 - RNA, 22 nt, Human
ccccagagugugggaagggaga

SEQ ID NO: 2076089 - RNA, 15 nt, Human
ccccagauugcaaca

SEQ ID NO: 2076090 - RNA, 12 nt, Human
ccccagcccagc

SEQ ID NO: 2076091 - RNA, 17 nt, Human
ccccagcccagcccagc

SEQ ID NO: 2076092 - RNA, 18 nt, Human
ccccagcccagcccagcu

SEQ ID NO: 2076093 - RNA, 12 nt, Human
ccccaugccugu

SEQ ID NO: 2076094 - RNA, 21 nt, Human
ccccagcccaggguuccccca

SEQ ID NO: 2076095 - RNA, 13 nt, Human
ccccaugccuguc

SEQ ID NO: 2076096 - RNA, 15 nt, Human
ccccaugccugucca

SEQ ID NO: 2076097 - RNA, 17 nt, Human
ccccaugccuguccagc

SEQ ID NO: 2076098 - RNA, 18 nt, Human
cccccuugccagacaugu

SEQ ID NO: 2076099 - RNA, 16 nt, Human
ccccgcaaaacccacu

SEQ ID NO: 2076100 - RNA, 12 nt, Human
ccccucugcugg

SEQ ID NO: 2076101 - RNA, 13 nt, Human
ccccucugcuggc

SEQ ID NO: 2076102 - RNA, 14 nt, Human
ccccucugcuggcc

SEQ ID NO: 2076103 - RNA, 13 nt, Human
ccccucuggccag

SEQ ID NO: 2076104 - RNA, 16 nt, Human
ccccucuggccaggau

SEQ ID NO: 2076105 - RNA, 16 nt, Human
ccccugccacccuggg

SEQ ID NO: 2076106 - RNA, 14 nt, Human
ccccugccacccug

SEQ ID NO: 2076107 - RNA, 14 nt, Human
ccccugccagugcc

SEQ ID NO: 2076108 - RNA, 15 nt, Human
ccccugccagugccu

SEQ ID NO: 2076109 - RNA, 16 nt, Human
ccccugccagugccuu

SEQ ID NO: 2076110 - RNA, 17 nt, Human
ccccugccagugccuua

SEQ ID NO: 2076111 - RNA, 16 nt, Human
cccggccccugcuggu

SEQ ID NO: 2076112 - RNA, 15 nt, Human
cccggccccugcugg

SEQ ID NO: 2076113 - RNA, 14 nt, Human
cccggcgcgguggc

SEQ ID NO: 2076114 - RNA, 19 nt, Human
cccggcgcgguggcucacg

SEQ ID NO: 2076115 - RNA, 22 nt, Human
cccggcgcgguggcucacgccu

SEQ ID NO: 2076116 - RNA, 18 nt, Human
cccgaauagcugggacua

SEQ ID NO: 2076117 - RNA, 17 nt, Human
cccgaauagcugggacu

SEQ ID NO: 2076118 - RNA, 16 nt, Human
cccgaauagcugggac

SEQ ID NO: 2076119 - RNA, 12 nt, Human
ccccuucucugc

SEQ ID NO: 2076120 - RNA, 18 nt, Human
ccccuucucugcccauuc

SEQ ID NO: 2076121 - RNA, 13 nt, Human
ccccuucucugcu

SEQ ID NO: 2076122 - RNA, 14 nt, Human
ccccuucucugcuc

SEQ ID NO: 2076123 - RNA, 16 nt, Human
ccccuucucugcucca

SEQ ID NO: 2076124 - RNA, 22 nt, Human
ccccuucucugcuccaccacau

SEQ ID NO: 2076125 - RNA, 14 nt, Human
cccucaccugggca

SEQ ID NO: 2076126 - RNA, 15 nt, Human
cccucaccugggcac

SEQ ID NO: 2076127 - RNA, 16 nt, Human
cccucaacaccucugc

SEQ ID NO: 2076128 - RNA, 21 nt, Human
cccucaccuugcaacacacag

SEQ ID NO: 2076129 - RNA, 18 nt, Human
cccucaccuugcaacaca

SEQ ID NO: 2076130 - RNA, 17 nt, Human
cccucaccugggcaccu

SEQ ID NO: 2076131 - RNA, 23 nt, Human
cccucaccugggcaccuggggag

SEQ ID NO: 2076132 - RNA, 23 nt, Human
cccucagccccucuugcccccca

SEQ ID NO: 2076133 - RNA, 17 nt, Human
cccucagccccucuugc

SEQ ID NO: 2076134 - RNA, 21 nt, Human
cccucagccccucuugccccc

SEQ ID NO: 2076135 - RNA, 12 nt, Human
cccucagccccu

SEQ ID NO: 2076136 - RNA, 13 nt, Human
cccucagccccuc

SEQ ID NO: 2076137 - RNA, 14 nt, Human
cccucagccccucu

SEQ ID NO: 2076138 - RNA, 15 nt, Human
cccucaggacccucg

SEQ ID NO: 2076139 - RNA, 17 nt, Human
cccucaggacccucgcu

SEQ ID NO: 2076140 - RNA, 18 nt, Human
cccucaggacccucgcug

SEQ ID NO: 2076141 - RNA, 20 nt, Human
cccucaggacccucgcuggc

SEQ ID NO: 2076142 - RNA, 21 nt, Human
cccucaggacccucgcuggcc

SEQ ID NO: 2076143 - RNA, 22 nt, Human
cccucaggacccucgcuggccc

SEQ ID NO: 2076144 - RNA, 23 nt, Human
cccucaggacccucgcuggcccc

SEQ ID NO: 2076145 - RNA, 18 nt, Human
cccucaggcauaggccug

SEQ ID NO: 2076146 - RNA, 19 nt, Human
cccucaggcauaggccugg

SEQ ID NO: 2076147 - RNA, 20 nt, Human
cccucaggcauaggccuggg

SEQ ID NO: 2076148 - RNA, 21 nt, Human
cccucaggcauaggccugggu

SEQ ID NO: 2076149 - RNA, 22 nt, Human
cccucaggcauaggccugggug

SEQ ID NO: 2076150 - RNA, 23 nt, Human
cccucaggcauaggccugggugc

SEQ ID NO: 2076151 - RNA, 22 nt, Human
cccuccucccuucuacugcuuc

SEQ ID NO: 2076152 - RNA, 11 nt, Human
cccuccucugc

SEQ ID NO: 2076153 - RNA, 12 nt, Human
cccuccucugcc

SEQ ID NO: 2076154 - RNA, 13 nt, Human
cccuccucugcca

SEQ ID NO: 2076155 - RNA, 16 nt, Human
cccuccucugccaccu

SEQ ID NO: 2076156 - RNA, 18 nt, Human
cccuccugaaacuuacac

SEQ ID NO: 2076157 - RNA, 14 nt, Human
cccuccucaccccg

SEQ ID NO: 2076158 - RNA, 16 nt, Human
cccuccucaccucugg

SEQ ID NO: 2076159 - RNA, 17 nt, Human
cccuccucaccucugga

SEQ ID NO: 2076160 - RNA, 18 nt, Human
cccuccucaccucuggac

SEQ ID NO: 2076161 - RNA, 23 nt, Human
cccuccucaccucuggacuggcu

SEQ ID NO: 2076162 - RNA, 13 nt, Human
cccuccucacccc

SEQ ID NO: 2076163 - RNA, 12 nt, Human
cccuccucaccu

SEQ ID NO: 2076164 - RNA, 13 nt, Human
cccuccucaccuc

SEQ ID NO: 2076165 - RNA, 20 nt, Human
ccauucuuuauucuuuuacu

SEQ ID NO: 2076166 - RNA, 18 nt, Human
ccauugcacuccagccug

SEQ ID NO: 2076167 - RNA, 15 nt, Human
ccauugccaccagga

SEQ ID NO: 2076168 - RNA, 16 nt, Human
ccauugccaccaggag

SEQ ID NO: 2076169 - RNA, 17 nt, Human
ccauugccaccaggaga

SEQ ID NO: 2076170 - RNA, 21 nt, Human
ccauugccaccaggagaacca

SEQ ID NO: 2076171 - RNA, 14 nt, Human
ccauugcccugguu

SEQ ID NO: 2076172 - RNA, 20 nt, Human
ccauuuaugugagugugugu

SEQ ID NO: 2076173 - RNA, 16 nt, Human
ccauuucaucuauuuc

SEQ ID NO: 2076174 - RNA, 17 nt, Human
ccauuucaucuauuucu

SEQ ID NO: 2076175 - RNA, 17 nt, Human
ccauuucacaccugaaa

SEQ ID NO: 2076176 - RNA, 22 nt, Human
ccauuucacaccugaaaauguu

SEQ ID NO: 2076177 - RNA, 10 nt, Human
ccauugcuuc

SEQ ID NO: 2076178 - RNA, 12 nt, Human
ccauugcuucac

SEQ ID NO: 2076179 - RNA, 14 nt, Human
ccauugcuucacua

SEQ ID NO: 2076180 - RNA, 11 nt, Human
ccauugcugcu

SEQ ID NO: 2076181 - RNA, 14 nt, Human
ccauugcugcuccu

SEQ ID NO: 2076182 - RNA, 15 nt, Human
ccauugcugcuccuu

SEQ ID NO: 2076183 - RNA, 23 nt, Human
ccauugcugcuccuuagcugcca

SEQ ID NO: 2076184 - RNA, 21 nt, Human
ccauuucaucuauuucugaga

SEQ ID NO: 2076185 - RNA, 13 nt, Human
cccacccaggagg

SEQ ID NO: 2076186 - RNA, 21 nt, Human
cccacccagcacccagcaacu

SEQ ID NO: 2076187 - RNA, 12 nt, Human
cccacccaggag

SEQ ID NO: 2076188 - RNA, 12 nt, Human
cccaccccacac

SEQ ID NO: 2076189 - RNA, 15 nt, Human
cccaagcucugcucc

SEQ ID NO: 2076190 - RNA, 12 nt, Human
cccaagcucugc

SEQ ID NO: 2076191 - RNA, 14 nt, Human
cccaagcucugcuc

SEQ ID NO: 2076192 - RNA, 13 nt, Human
cccaagcucugcu

SEQ ID NO: 2076193 - RNA, 12 nt, Human
cccaacuccugg

SEQ ID NO: 2076194 - RNA, 18 nt, Human
cccaagacagaugcccca

SEQ ID NO: 2076195 - RNA, 13 nt, Human
cccaacuccugga

SEQ ID NO: 2076196 - RNA, 15 nt, Human
cccaacuccuggaag

SEQ ID NO: 2076197 - RNA, 17 nt, Human
cccaacuccuggaagcu

SEQ ID NO: 2076198 - RNA, 23 nt, Human
cccaacuccuggaagcugugucc

SEQ ID NO: 2076199 - RNA, 21 nt, Human
cccaagacagaugccccagag

SEQ ID NO: 2076200 - RNA, 19 nt, Human
cccaagacagaugccccag

SEQ ID NO: 2076201 - RNA, 20 nt, Human
cccaagacagaugccccaga

SEQ ID NO: 2076202 - RNA, 17 nt, Human
cccaagagaugaagagu

SEQ ID NO: 2076203 - RNA, 21 nt, Human
cccaagagaaggggaagcacu

SEQ ID NO: 2076204 - RNA, 15 nt, Human
cccaagagaugaaga

SEQ ID NO: 2076205 - RNA, 22 nt, Human
cccaagacuugguguccuuucc

SEQ ID NO: 2076206 - RNA, 13 nt, Human
cccacucucauuc

SEQ ID NO: 2076207 - RNA, 20 nt, Human
cccacucccuggcucucaga

SEQ ID NO: 2076208 - RNA, 21 nt, Human
cccacucucauuccccaggug

SEQ ID NO: 2076209 - RNA, 17 nt, Human
cccacucuccccacacu

SEQ ID NO: 2076210 - RNA, 14 nt, Human
cccacucucauucc

SEQ ID NO: 2076211 - RNA, 19 nt, Human
cccacucucauuccccagg

SEQ ID NO: 2076212 - RNA, 11 nt, Human
cccacucuccc

SEQ ID NO: 2076213 - RNA, 14 nt, Human
cccacucuccccac

SEQ ID NO: 2076214 - RNA, 15 nt, Human
cccacucuccccaca

SEQ ID NO: 2076215 - RNA, 23 nt, Human
cccacugcuuuuggucuguguga

SEQ ID NO: 2076216 - RNA, 16 nt, Human
cccacugacagccucc

SEQ ID NO: 2076217 - RNA, 21 nt, Human
cccacucugcuuugacugagc

SEQ ID NO: 2076218 - RNA, 13 nt, Human
cccaccccacacu

SEQ ID NO: 2076219 - RNA, 14 nt, Human
cccaccccacacuu

SEQ ID NO: 2076220 - RNA, 15 nt, Human
cccaccccacccccu

SEQ ID NO: 2076221 - RNA, 14 nt, Human
cccaccccagccua

SEQ ID NO: 2076222 - RNA, 12 nt, Human
cccaccccuucc

SEQ ID NO: 2076223 - RNA, 22 nt, Human
cccacucccuggcucucagaag

SEQ ID NO: 2076224 - RNA, 13 nt, Human
cccaccccuuccc

SEQ ID NO: 2076225 - RNA, 15 nt, Human
cccaccccuucccca

SEQ ID NO: 2076226 - RNA, 17 nt, Human
cccaccccuuccccacu

SEQ ID NO: 2076227 - RNA, 22 nt, Human
cccaccccuuccccacugccug

SEQ ID NO: 2076228 - RNA, 19 nt, Human
ccaugucgccucugcauuc

SEQ ID NO: 2076229 - RNA, 17 nt, Human
ccaugucgccucugcau

SEQ ID NO: 2076230 - RNA, 16 nt, Human
ccaugucgccucugca

SEQ ID NO: 2076231 - RNA, 15 nt, Human
ccaugucgccucugc

SEQ ID NO: 2076232 - RNA, 12 nt, Human
ccaugucgccuc

SEQ ID NO: 2076233 - RNA, 16 nt, Human
ccauguagcaggacug

SEQ ID NO: 2076234 - RNA, 13 nt, Human
ccauguacuguag

SEQ ID NO: 2076235 - RNA, 14 nt, Human
ccauguacuguagu

SEQ ID NO: 2076236 - RNA, 15 nt, Human
ccauguacuguaguu

SEQ ID NO: 2076237 - RNA, 22 nt, Human
ccauguacuguaguuuuucuuc

SEQ ID NO: 2076238 - RNA, 17 nt, Human
ccaugaguuugcccugg

SEQ ID NO: 2076239 - RNA, 18 nt, Human
ccaugaguuugcccuggu

SEQ ID NO: 2076240 - RNA, 18 nt, Human
ccaugaggaguugcuguu

SEQ ID NO: 2076241 - RNA, 20 nt, Human
ccaugaggaguugcuguuug

SEQ ID NO: 2076242 - RNA, 15 nt, Human
ccaugaggccucagu

SEQ ID NO: 2076243 - RNA, 23 nt, Human
ccaguuggguggaugccuggugg

SEQ ID NO: 2076244 - RNA, 21 nt, Human
ccaguugcacuuggccucugg

SEQ ID NO: 2076245 - RNA, 14 nt, Human
ccaguugcacuugg

SEQ ID NO: 2076246 - RNA, 20 nt, Human
ccaguugcacuuggccucug

SEQ ID NO: 2076247 - RNA, 19 nt, Human
ccauaauguauaaagaaca

SEQ ID NO: 2076248 - RNA, 20 nt, Human
ccauaauuaugacaguuaua

SEQ ID NO: 2076249 - RNA, 17 nt, Human
ccauaauuuucuucaug

SEQ ID NO: 2076250 - RNA, 21 nt, Human
ccauaauuuucuucaugcaau

SEQ ID NO: 2076251 - RNA, 23 nt, Human
ccauaauuuucuucaugcaauga

SEQ ID NO: 2076252 - RNA, 21 nt, Human
ccauaaucuggacuccucugu

SEQ ID NO: 2076253 - RNA, 14 nt, Human
ccauaaucuggacu

SEQ ID NO: 2076254 - RNA, 19 nt, Human
ccauccagguucagcuugu

SEQ ID NO: 2076255 - RNA, 18 nt, Human
ccauccagguucagcuug

SEQ ID NO: 2076256 - RNA, 15 nt, Human
ccauaaggaauguag

SEQ ID NO: 2076257 - RNA, 17 nt, Human
ccauaagccuccauuua

SEQ ID NO: 2076258 - RNA, 21 nt, Human
ccauaagccuccauuuaguuc

SEQ ID NO: 2076259 - RNA, 12 nt, Human
ccaucccauccc

SEQ ID NO: 2076260 - RNA, 13 nt, Human
ccaucccauccca

SEQ ID NO: 2076261 - RNA, 14 nt, Human
ccaucccaucccau

SEQ ID NO: 2076262 - RNA, 15 nt, Human
ccaucccaucccauc

SEQ ID NO: 2076263 - RNA, 16 nt, Human
ccaucccaucccaucc

SEQ ID NO: 2076264 - RNA, 17 nt, Human
ccaucccaucccauccc

SEQ ID NO: 2076265 - RNA, 18 nt, Human
ccaucccaucccauccca

SEQ ID NO: 2076266 - RNA, 13 nt, Human
ccaucccaucccg

SEQ ID NO: 2076267 - RNA, 18 nt, Human
ccaucccgcucuuuuccu

SEQ ID NO: 2076268 - RNA, 19 nt, Human
ccaucccgcucuuuuccua

SEQ ID NO: 2076269 - RNA, 17 nt, Human
ccaucccgacauggacc

SEQ ID NO: 2076270 - RNA, 22 nt, Human
ccaucccgacauggacccggag

SEQ ID NO: 2076271 - RNA, 13 nt, Human
ccaggaaaaagga

SEQ ID NO: 2076272 - RNA, 15 nt, Human
ccaggaaaaaggaca

SEQ ID NO: 2076273 - RNA, 17 nt, Human
ccagccccagugcccac

SEQ ID NO: 2076274 - RNA, 16 nt, Human
ccacucuacccuccca

SEQ ID NO: 2076275 - RNA, 18 nt, Human
ccacucgcuucccccaua

SEQ ID NO: 2076276 - RNA, 21 nt, Human
ccacucgcuucccccauagcc

SEQ ID NO: 2076277 - RNA, 14 nt, Human
ccacuccuguacac

SEQ ID NO: 2076278 - RNA, 15 nt, Human
ccacuccuguacacu

SEQ ID NO: 2076279 - RNA, 12 nt, Human
ccacuccuuccu

SEQ ID NO: 2076280 - RNA, 13 nt, Human
ccacuccuuccug

SEQ ID NO: 2076281 - RNA, 22 nt, Human
ccacuccuuccugccaccugcu

SEQ ID NO: 2076282 - RNA, 13 nt, Human
ccacucgcuuccc

SEQ ID NO: 2076283 - RNA, 16 nt, Human
ccacucgcuuccccca

SEQ ID NO: 2076284 - RNA, 23 nt, Human
ccagcacuuugggaggccaagga

SEQ ID NO: 2076285 - RNA, 21 nt, Human
ccagcacuuugggaggccaag

SEQ ID NO: 2076286 - RNA, 21 nt, Human
ccagcacuuugggaggcugag

SEQ ID NO: 2076287 - RNA, 14 nt, Human
ccagcacuuuggga

SEQ ID NO: 2076288 - RNA, 16 nt, Human
ccagcacuuugggagg

SEQ ID NO: 2076289 - RNA, 17 nt, Human
ccagcacuuugggaggc

SEQ ID NO: 2076290 - RNA, 11 nt, Human
ccagccccucc

SEQ ID NO: 2076291 - RNA, 12 nt, Human
ccagccccuccc

SEQ ID NO: 2076292 - RNA, 13 nt, Human
ccagccccuccca

SEQ ID NO: 2076293 - RNA, 14 nt, Human
ccagccccucccac

SEQ ID NO: 2076294 - RNA, 15 nt, Human
ccagccccucccacc

SEQ ID NO: 2076295 - RNA, 16 nt, Human
ccagccccucccacca

SEQ ID NO: 2076296 - RNA, 21 nt, Human
ccagccccucccaccacagca

SEQ ID NO: 2076297 - RNA, 14 nt, Human
ccagccccuugaga

SEQ ID NO: 2076298 - RNA, 20 nt, Human
ccagccccucccaccacagc

SEQ ID NO: 2076299 - RNA, 22 nt, Human
ccagcuauugauauaaauaaaa

SEQ ID NO: 2076300 - RNA, 12 nt, Human
ccagcuccaggg

SEQ ID NO: 2076301 - RNA, 13 nt, Human
ccagcuccagggc

SEQ ID NO: 2076302 - RNA, 14 nt, Human
ccagcuccagggcc

SEQ ID NO: 2076303 - RNA, 15 nt, Human
ccagcuccagggcca

SEQ ID NO: 2076304 - RNA, 16 nt, Human
ccagcuccagggccag

SEQ ID NO: 2076305 - RNA, 18 nt, Human
ccagcuccagggccagau

SEQ ID NO: 2076306 - RNA, 14 nt, Human
ccagcucccuagga

SEQ ID NO: 2076307 - RNA, 12 nt, Human
ccaggcuggcgu

SEQ ID NO: 2076308 - RNA, 21 nt, Human
ccaggggaaaaucagccugcu

SEQ ID NO: 2076309 - RNA, 18 nt, Human
ccaggggaccacaccucc

SEQ ID NO: 2076310 - RNA, 13 nt, Human
ccaggggaccaca

SEQ ID NO: 2076311 - RNA, 21 nt, Human
ccaggggagagggucuggaga

SEQ ID NO: 2076312 - RNA, 18 nt, Human
ccaggggagagggucugg

SEQ ID NO: 2076313 - RNA, 20 nt, Human
ccaggggagagggucuggag

SEQ ID NO: 2076314 - RNA, 15 nt, Human
ccaggcugccugagc

SEQ ID NO: 2076315 - RNA, 17 nt, Human
ccaggcugccugagcac

SEQ ID NO: 2076316 - RNA, 14 nt, Human
ccaggcugcuggac

SEQ ID NO: 2076317 - RNA, 19 nt, Human
ccaggcugcucagggcugg

SEQ ID NO: 2076318 - RNA, 17 nt, Human
ccaggcugcucagggcu

SEQ ID NO: 2076319 - RNA, 19 nt, Human
ccaggcugccaaggccaga

SEQ ID NO: 2076320 - RNA, 20 nt, Human
ccaggcugccaaggccagag

SEQ ID NO: 2076321 - RNA, 13 nt, Human
ccaggcugcucag

SEQ ID NO: 2076322 - RNA, 14 nt, Human
ccaggcaggucuug

SEQ ID NO: 2076323 - RNA, 12 nt, Human
ccaggcaggucu

SEQ ID NO: 2076324 - RNA, 23 nt, Human
ccaggcaggucuugaacuccugg

SEQ ID NO: 2076325 - RNA, 22 nt, Human
ccaggauggaggggugguccug

SEQ ID NO: 2076326 - RNA, 14 nt, Human
ccaggauggagggg

SEQ ID NO: 2076327 - RNA, 12 nt, Human
ccagucccuggg

SEQ ID NO: 2076328 - RNA, 13 nt, Human
ccagucccugggg

SEQ ID NO: 2076329 - RNA, 15 nt, Human
ccagucccuggggga

SEQ ID NO: 2076330 - RNA, 19 nt, Human
ccagucccugggggaagcc

SEQ ID NO: 2076331 - RNA, 22 nt, Human
ccagucccugggggaagcccug

SEQ ID NO: 2076332 - RNA, 23 nt, Human
ccagucccugggggaagcccugg

SEQ ID NO: 2076333 - RNA, 18 nt, Human
ccagucccccugccccag

SEQ ID NO: 2076334 - RNA, 19 nt, Human
ccagucagguaguugcaau

SEQ ID NO: 2076335 - RNA, 18 nt, Human
ccaguccaaauguccucc

SEQ ID NO: 2076336 - RNA, 17 nt, Human
ccagucauaccaacuuu

SEQ ID NO: 2076337 - RNA, 19 nt, Human
ccagucauaccaacuuuag

SEQ ID NO: 2076338 - RNA, 21 nt, Human
ccagucaucagcuauucaguu

SEQ ID NO: 2076339 - RNA, 21 nt, Human
ccaguccaaauguccuccaga

SEQ ID NO: 2076340 - RNA, 14 nt, Human
ccaggggucccagc

SEQ ID NO: 2076341 - RNA, 17 nt, Human
ccaggggucccagccac

SEQ ID NO: 2076342 - RNA, 18 nt, Human
ccaggggucccagccacc

SEQ ID NO: 2076343 - RNA, 18 nt, Human
ccaggggaugaguggagg

SEQ ID NO: 2076344 - RNA, 21 nt, Human
ccucgagguuucucaaagaaa

SEQ ID NO: 2076345 - RNA, 15 nt, Human
ccucgaacuccuggg

SEQ ID NO: 2076346 - RNA, 16 nt, Human
ccucgaacuccugggc

SEQ ID NO: 2076347 - RNA, 22 nt, Human
ccucgaacuccugggcucaagc

SEQ ID NO: 2076348 - RNA, 15 nt, Human
ccucgaacccacacu

SEQ ID NO: 2076349 - RNA, 16 nt, Human
ccucgaacccacacug

SEQ ID NO: 2076350 - RNA, 21 nt, Human
ccucgaacccacacugcaaca

SEQ ID NO: 2076351 - RNA, 23 nt, Human
ccucgaacccacacugcaacagg

SEQ ID NO: 2076352 - RNA, 14 nt, Human
ccucgaacuccugg

SEQ ID NO: 2076353 - RNA, 14 nt, Human
ccucgcaagcuggg

SEQ ID NO: 2076354 - RNA, 19 nt, Human
ccuccuaucagaaguuucu

SEQ ID NO: 2076355 - RNA, 20 nt, Human
ccuccuagggaaaaguucau

SEQ ID NO: 2076356 - RNA, 19 nt, Human
ccuccuaucaccuccccuc

SEQ ID NO: 2076357 - RNA, 13 nt, Human
ccuccucaccccg

SEQ ID NO: 2076358 - RNA, 15 nt, Human
ccuccucaccccguc

SEQ ID NO: 2076359 - RNA, 12 nt, Human
ccuccucaccuc

SEQ ID NO: 2076360 - RNA, 12 nt, Human
ccucgcccuggg

SEQ ID NO: 2076361 - RNA, 13 nt, Human
ccucgcccugggu

SEQ ID NO: 2076362 - RNA, 14 nt, Human
ccucgcccuggguc

SEQ ID NO: 2076363 - RNA, 12 nt, Human
ccucgcuggccc

SEQ ID NO: 2076364 - RNA, 13 nt, Human
ccucgcuggcccc

SEQ ID NO: 2076365 - RNA, 14 nt, Human
ccucgcuggccccc

SEQ ID NO: 2076366 - RNA, 15 nt, Human
ccucgcuggccccca

SEQ ID NO: 2076367 - RNA, 16 nt, Human
ccucgcuggcccccac

SEQ ID NO: 2076368 - RNA, 17 nt, Human
ccucgcuggcccccacu

SEQ ID NO: 2076369 - RNA, 18 nt, Human
ccucgcuggcccccacug

SEQ ID NO: 2076370 - RNA, 20 nt, Human
ccucgcuggcccccacuggc

SEQ ID NO: 2076371 - RNA, 22 nt, Human
ccucgcuggcccccacuggcug

SEQ ID NO: 2076372 - RNA, 23 nt, Human
ccucgcuggcccccacuggcugu

SEQ ID NO: 2076373 - RNA, 13 nt, Human
ccuccgccucuug

SEQ ID NO: 2076374 - RNA, 14 nt, Human
ccuccgccucuugg

SEQ ID NO: 2076375 - RNA, 15 nt, Human
ccucccuuggcgugg

SEQ ID NO: 2076376 - RNA, 19 nt, Human
ccuccgccuucacuccggu

SEQ ID NO: 2076377 - RNA, 18 nt, Human
ccuccuaucaccuccccu

SEQ ID NO: 2076378 - RNA, 16 nt, Human
ccucccuucuacugcu

SEQ ID NO: 2076379 - RNA, 17 nt, Human
ccucccuucuacugcuu

SEQ ID NO: 2076380 - RNA, 19 nt, Human
ccucccuucuacugcuucu

SEQ ID NO: 2076381 - RNA, 21 nt, Human
ccucccuucuacugcuucuac

SEQ ID NO: 2076382 - RNA, 14 nt, Human
ccucaaaugagaaa

SEQ ID NO: 2076383 - RNA, 15 nt, Human
ccucaaccuccuggg

SEQ ID NO: 2076384 - RNA, 16 nt, Human
ccucaacaccucugca

SEQ ID NO: 2076385 - RNA, 19 nt, Human
ccucaacccucccucagcc

SEQ ID NO: 2076386 - RNA, 21 nt, Human
ccucaacccucccucagcccc

SEQ ID NO: 2076387 - RNA, 22 nt, Human
ccucaacccucccucagccccu

SEQ ID NO: 2076388 - RNA, 23 nt, Human
ccucaacccucccucagccccuc

SEQ ID NO: 2076389 - RNA, 18 nt, Human
ccucaacccucccucagc

SEQ ID NO: 2076390 - RNA, 16 nt, Human
ccucaacccucccuca

SEQ ID NO: 2076391 - RNA, 19 nt, Human
ccucaaaugggucuggggg

SEQ ID NO: 2076392 - RNA, 14 nt, Human
ccucccagggccag

SEQ ID NO: 2076393 - RNA, 20 nt, Human
ccucauuugggguagcuaga

SEQ ID NO: 2076394 - RNA, 21 nt, Human
ccucauuuuuauaaugucccu

SEQ ID NO: 2076395 - RNA, 17 nt, Human
ccucauuugggguagcu

SEQ ID NO: 2076396 - RNA, 21 nt, Human
ccucccagggccagggcccug

SEQ ID NO: 2076397 - RNA, 16 nt, Human
ccucauuuaucccuca

SEQ ID NO: 2076398 - RNA, 19 nt, Human
ccucauuuaucccucaacc

SEQ ID NO: 2076399 - RNA, 20 nt, Human
ccucauuuaucccucaaccc

SEQ ID NO: 2076400 - RNA, 20 nt, Human
ccucaagugauucuccugcc

SEQ ID NO: 2076401 - RNA, 19 nt, Human
ccucaagggggacugucuu

SEQ ID NO: 2076402 - RNA, 23 nt, Human
ccucaagugauucuccugccuca

SEQ ID NO: 2076403 - RNA, 23 nt, Human
ccucagccuuggauaaugcuguu

SEQ ID NO: 2076404 - RNA, 13 nt, Human
ccucauuccugaa

SEQ ID NO: 2076405 - RNA, 21 nt, Human
ccucauuccaccuucccaugc

SEQ ID NO: 2076406 - RNA, 13 nt, Human
ccucauucaggaa

SEQ ID NO: 2076407 - RNA, 21 nt, Human
ccucaggccaggugcaguggc

SEQ ID NO: 2076408 - RNA, 15 nt, Human
ccucauucaggaaaa

SEQ ID NO: 2076409 - RNA, 16 nt, Human
ccucauucaggaaaac

SEQ ID NO: 2076410 - RNA, 17 nt, Human
ccucauucaggaaaacu

SEQ ID NO: 2076411 - RNA, 22 nt, Human
ccucauucaggaaaacugacag

SEQ ID NO: 2076412 - RNA, 15 nt, Human
ccucaggcaggaagg

SEQ ID NO: 2076413 - RNA, 19 nt, Human
ccucaggcaggaagggcag

SEQ ID NO: 2076414 - RNA, 18 nt, Human
ccucaggcauaggccugg

SEQ ID NO: 2076415 - RNA, 22 nt, Human
ccucaggcauaggccugggugc

SEQ ID NO: 2076416 - RNA, 12 nt, Human
ccucaggcaggu

SEQ ID NO: 2076417 - RNA, 18 nt, Human
ccucaggcaggugggaug

SEQ ID NO: 2076418 - RNA, 13 nt, Human
ccucagcugccuc

SEQ ID NO: 2076419 - RNA, 14 nt, Human
ccucagcugccuca

SEQ ID NO: 2076420 - RNA, 15 nt, Human
ccucagcugccucac

SEQ ID NO: 2076421 - RNA, 16 nt, Human
ccucagcugccucacu

SEQ ID NO: 2076422 - RNA, 17 nt, Human
ccucagcugccucacuu

SEQ ID NO: 2076423 - RNA, 18 nt, Human
ccucagcugccucacuuc

SEQ ID NO: 2076424 - RNA, 12 nt, Human
ccgacagccugg

SEQ ID NO: 2076425 - RNA, 14 nt, Human
ccgacagccuggca

SEQ ID NO: 2076426 - RNA, 13 nt, Human
ccgacagccuggc

SEQ ID NO: 2076427 - RNA, 22 nt, Human
ccgacagccuggcacagggcag

SEQ ID NO: 2076428 - RNA, 15 nt, Human
ccgacagccuggcac

SEQ ID NO: 2076429 - RNA, 15 nt, Human
cccuucuccuuccaa

SEQ ID NO: 2076430 - RNA, 15 nt, Human
ccgaacacccucgaa

SEQ ID NO: 2076431 - RNA, 18 nt, Human
ccgaagaaggguccuucc

SEQ ID NO: 2076432 - RNA, 19 nt, Human
ccgaagaaggguccuuccc

SEQ ID NO: 2076433 - RNA, 20 nt, Human
ccgaagaaggguccuucccu

SEQ ID NO: 2076434 - RNA, 14 nt, Human
cccuucucccacac

SEQ ID NO: 2076435 - RNA, 15 nt, Human
cccuucucccacacu

SEQ ID NO: 2076436 - RNA, 14 nt, Human
cccuccuuucacca

SEQ ID NO: 2076437 - RNA, 21 nt, Human
cccuccuuccuucuugcuucu

SEQ ID NO: 2076438 - RNA, 16 nt, Human
cccuccuuccuugacc

SEQ ID NO: 2076439 - RNA, 15 nt, Human
cccuccuucccagcu

SEQ ID NO: 2076440 - RNA, 16 nt, Human
cccuccuucccagcug

SEQ ID NO: 2076441 - RNA, 17 nt, Human
cccuccuucccagcugc

SEQ ID NO: 2076442 - RNA, 19 nt, Human
cccuccuucccagcugccc

SEQ ID NO: 2076443 - RNA, 18 nt, Human
cccuccuuccuugaccag

SEQ ID NO: 2076444 - RNA, 17 nt, Human
cccuccuugccuccugu

SEQ ID NO: 2076445 - RNA, 18 nt, Human
cccuccuugccuccugug

SEQ ID NO: 2076446 - RNA, 11 nt, Human
cccuccuucca

SEQ ID NO: 2076447 - RNA, 13 nt, Human
cccuccuuuccca

SEQ ID NO: 2076448 - RNA, 20 nt, Human
cccuccuuucccaacacuuc

SEQ ID NO: 2076449 - RNA, 14 nt, Human
cccuguggaaggga

SEQ ID NO: 2076450 - RNA, 18 nt, Human
cccuguggaagggacuag

SEQ ID NO: 2076451 - RNA, 21 nt, Human
cccuguggaagggacuaggag

SEQ ID NO: 2076452 - RNA, 17 nt, Human
cccuguggagcccgcac

SEQ ID NO: 2076453 - RNA, 13 nt, Human
cccuucucccaca

SEQ ID NO: 2076454 - RNA, 13 nt, Human
ccggcagaaggga

SEQ ID NO: 2076455 - RNA, 14 nt, Human
ccggccagcuggga

SEQ ID NO: 2076456 - RNA, 19 nt, Human
ccggccagcugggaucuga

SEQ ID NO: 2076457 - RNA, 18 nt, Human
ccguagaaaucccccuuu

SEQ ID NO: 2076458 - RNA, 20 nt, Human
ccguagaaaucccccuuucu

SEQ ID NO: 2076459 - RNA, 18 nt, Human
ccguacauucaauguuua

SEQ ID NO: 2076460 - RNA, 18 nt, Human
ccguaaagugagcaugcu

SEQ ID NO: 2076461 - RNA, 23 nt, Human
ccguaaagugagcaugcuuucug

SEQ ID NO: 2076462 - RNA, 14 nt, Human
ccgguugcuucugg

SEQ ID NO: 2076463 - RNA, 15 nt, Human
ccgguugcuucuggg

SEQ ID NO: 2076464 - RNA, 16 nt, Human
ccgguugcuucuggga

SEQ ID NO: 2076465 - RNA, 17 nt, Human
ccgguugcuucugggaa

SEQ ID NO: 2076466 - RNA, 19 nt, Human
ccuagccuuagaagucaca

SEQ ID NO: 2076467 - RNA, 23 nt, Human
ccuagccugugccucugggacug

SEQ ID NO: 2076468 - RNA, 22 nt, Human
ccuagccuuagaagucacacag

SEQ ID NO: 2076469 - RNA, 18 nt, Human
ccuaauaaacauccuuca

SEQ ID NO: 2076470 - RNA, 22 nt, Human
ccgucuuagaaguggaccagga

SEQ ID NO: 2076471 - RNA, 13 nt, Human
ccgucugugaauu

SEQ ID NO: 2076472 - RNA, 14 nt, Human
ccgucuucagccua

SEQ ID NO: 2076473 - RNA, 15 nt, Human
ccgucuucagccuag

SEQ ID NO: 2076474 - RNA, 22 nt, Human
ccuaauaaacauccuucaagaa

SEQ ID NO: 2076475 - RNA, 21 nt, Human
ccgugagcagugugucuccug

SEQ ID NO: 2076476 - RNA, 14 nt, Human
ccgugaggauguca

SEQ ID NO: 2076477 - RNA, 18 nt, Human
ccuaauguuuaugagcca

SEQ ID NO: 2076478 - RNA, 14 nt, Human
ccuaauuagagcag

SEQ ID NO: 2076479 - RNA, 17 nt, Human
ccuaauguggcagcugu

SEQ ID NO: 2076480 - RNA, 18 nt, Human
ccuaauguggcagcuguc

SEQ ID NO: 2076481 - RNA, 19 nt, Human
ccuaauguuuaugagccag

SEQ ID NO: 2076482 - RNA, 23 nt, Human
ccuaauuagagcagaugaccccu

SEQ ID NO: 2076483 - RNA, 20 nt, Human
ccugaggugaaagggagcua

SEQ ID NO: 2076484 - RNA, 14 nt, Human
ccugagauggcccu

SEQ ID NO: 2076485 - RNA, 19 nt, Human
ccugagauggcccucuggu

SEQ ID NO: 2076486 - RNA, 20 nt, Human
ccugagauggcccucuggua

SEQ ID NO: 2076487 - RNA, 21 nt, Human
ccugagcaacagagugagacc

SEQ ID NO: 2076488 - RNA, 23 nt, Human
ccugagcaacagagugagacccu

SEQ ID NO: 2076489 - RNA, 21 nt, Human
ccugauauagaucacauaaca

SEQ ID NO: 2076490 - RNA, 19 nt, Human
ccugaguuucaaguauccu

SEQ ID NO: 2076491 - RNA, 14 nt, Human
ccucuugccacugc

SEQ ID NO: 2076492 - RNA, 22 nt, Human
ccucuugccacugccucuuccu

SEQ ID NO: 2076493 - RNA, 23 nt, Human
ccucuugccacugccucuuccuc

SEQ ID NO: 2076494 - RNA, 12 nt, Human
ccucuugccccc

SEQ ID NO: 2076495 - RNA, 16 nt, Human
ccucuugccccccacc

SEQ ID NO: 2076496 - RNA, 21 nt, Human
ccucuugccccccaccccagc

SEQ ID NO: 2076497 - RNA, 23 nt, Human
ccucuugccccccaccccagccu

SEQ ID NO: 2076498 - RNA, 17 nt, Human
ccucuugcggucccuuc

SEQ ID NO: 2076499 - RNA, 16 nt, Human
ccucuuucccucccuu

SEQ ID NO: 2076500 - RNA, 18 nt, Human
ccucuugcggucccuucu

SEQ ID NO: 2076501 - RNA, 19 nt, Human
ccucuuucccucccuuccu

SEQ ID NO: 2076502 - RNA, 15 nt, Human
ccucggaucaccgag

SEQ ID NO: 2076503 - RNA, 17 nt, Human
ccucggaucaccgagag

SEQ ID NO: 2076504 - RNA, 13 nt, Human
ccucggagccuca

SEQ ID NO: 2076505 - RNA, 14 nt, Human
ccucggagccucau

SEQ ID NO: 2076506 - RNA, 16 nt, Human
ccucggagccucaucc

SEQ ID NO: 2076507 - RNA, 23 nt, Human
ccucggagccucauccgaggcag

SEQ ID NO: 2076508 - RNA, 17 nt, Human
ccugccauuugcacccu

SEQ ID NO: 2076509 - RNA, 23 nt, Human
ccugccauuugcacccuccgccu

SEQ ID NO: 2076510 - RNA, 19 nt, Human
ccugcccaggccccugcca

SEQ ID NO: 2076511 - RNA, 18 nt, Human
ccugcccaggccccugcc

SEQ ID NO: 2076512 - RNA, 22 nt, Human
ccugcccaggccccugccaccc

SEQ ID NO: 2076513 - RNA, 21 nt, Human
ccugcccaggccccugccacc

SEQ ID NO: 2076514 - RNA, 15 nt, Human
ccugccucagccucc

SEQ ID NO: 2076515 - RNA, 16 nt, Human
ccugccucagccuccc

SEQ ID NO: 2076516 - RNA, 17 nt, Human
ccugcugauguggcaac

SEQ ID NO: 2076517 - RNA, 21 nt, Human
ccugcugauguggcaacugcu

SEQ ID NO: 2076518 - RNA, 19 nt, Human
ccuggcaauaguguguucu

SEQ ID NO: 2076519 - RNA, 21 nt, Human
ccuggcaauaguguguucuga

SEQ ID NO: 2076520 - RNA, 12 nt, Human
ccuggcaauagu

SEQ ID NO: 2076521 - RNA, 22 nt, Human
ccuggccucaagugauucuccu

SEQ ID NO: 2076522 - RNA, 12 nt, Human
ccuggccugcug

SEQ ID NO: 2076523 - RNA, 13 nt, Human
ccuggccuguucu

SEQ ID NO: 2076524 - RNA, 19 nt, Human
ccuggccuguucuguuuug

SEQ ID NO: 2076525 - RNA, 11 nt, Human
ccuggccuguu

SEQ ID NO: 2076526 - RNA, 13 nt, Human
ccuggccugcugg

SEQ ID NO: 2076527 - RNA, 22 nt, Human
ccugggcucaagcaauccuccu

SEQ ID NO: 2076528 - RNA, 23 nt, Human
ccugggcucaagcaauccuccug

SEQ ID NO: 2076529 - RNA, 12 nt, Human
ccugggcucugc

SEQ ID NO: 2076530 - RNA, 14 nt, Human
ccugggcucugccc

SEQ ID NO: 2076531 - RNA, 20 nt, Human
ccugggcucugccccagcuc

SEQ ID NO: 2076532 - RNA, 22 nt, Human
ccugggcucugccccagcucug

SEQ ID NO: 2076533 - RNA, 24 nt, Human
ccugggcucugccccagcucuggc

SEQ ID NO: 2076534 - RNA, 22 nt, Human
ccugggcugagagaaccucacg

SEQ ID NO: 2076535 - RNA, 18 nt, Human
ccuggggagugggacaga

SEQ ID NO: 2076536 - RNA, 19 nt, Human
ccuggggagugggacagag

SEQ ID NO: 2076537 - RNA, 22 nt, Human
ccuggggagugggacagagucu

SEQ ID NO: 2076538 - RNA, 23 nt, Human
ccuggggagugggacagagucug

SEQ ID NO: 2076539 - RNA, 15 nt, Human
ccuggggagaaagua

SEQ ID NO: 2076540 - RNA, 24 nt, Human
ccuggggagugggacagagucugg

SEQ ID NO: 2076541 - RNA, 19 nt, Human
ccuggggcagucaccugcc

SEQ ID NO: 2076542 - RNA, 20 nt, Human
ccuggggcuaggcuggagcc

SEQ ID NO: 2076543 - RNA, 22 nt, Human
ccuggggcuaggcuggagccca

SEQ ID NO: 2076544 - RNA, 19 nt, Human
ccugguggcagugggagcu

SEQ ID NO: 2076545 - RNA, 18 nt, Human
ccugguggcagugggagc

SEQ ID NO: 2076546 - RNA, 15 nt, Human
ccuggggcucugugc

SEQ ID NO: 2076547 - RNA, 18 nt, Human
ccuggggcucugugcagg

SEQ ID NO: 2076548 - RNA, 15 nt, Human
ccuggggcugaucuc

SEQ ID NO: 2076549 - RNA, 18 nt, Human
ccuggggcugaucucagg

SEQ ID NO: 2076550 - RNA, 20 nt, Human
ccuggggcugaucucaggga

SEQ ID NO: 2076551 - RNA, 22 nt, Human
ccuggggcugaucucagggaag

SEQ ID NO: 2076552 - RNA, 20 nt, Human
ccugguggcagugggagcug

SEQ ID NO: 2076553 - RNA, 21 nt, Human
ccugguuccggaauccugucc

SEQ ID NO: 2076554 - RNA, 20 nt, Human
ccugguuccggaauccuguc

SEQ ID NO: 2076555 - RNA, 13 nt, Human
ccugucuccccuc

SEQ ID NO: 2076556 - RNA, 14 nt, Human
ccugucuccccucu

SEQ ID NO: 2076557 - RNA, 15 nt, Human
ccugucuccccucug

SEQ ID NO: 2076558 - RNA, 17 nt, Human
ccugucuccccucugcu

SEQ ID NO: 2076559 - RNA, 18 nt, Human
ccugucuccccucugcug

SEQ ID NO: 2076560 - RNA, 19 nt, Human
ccugucuccccucugcugg

SEQ ID NO: 2076561 - RNA, 20 nt, Human
ccugucuccccucugcuggc

SEQ ID NO: 2076562 - RNA, 18 nt, Human
ccuguaacuugagaguag

SEQ ID NO: 2076563 - RNA, 20 nt, Human
ccugucucauccccaggggu

SEQ ID NO: 2076564 - RNA, 13 nt, Human
ccuguaaaacuuu

SEQ ID NO: 2076565 - RNA, 14 nt, Human
ccuguaaaacuuua

SEQ ID NO: 2076566 - RNA, 18 nt, Human
ccuguaaaacuuuauuuu

SEQ ID NO: 2076567 - RNA, 20 nt, Human
ccuguaaaacuuuauuuuau

SEQ ID NO: 2076568 - RNA, 12 nt, Human
ccuguaaauuau

SEQ ID NO: 2076569 - RNA, 13 nt, Human
ccuguaaauuauu

SEQ ID NO: 2076570 - RNA, 14 nt, Human
ccuguaaauuauuu

SEQ ID NO: 2076571 - RNA, 15 nt, Human
ccuguaaauuauuuu

SEQ ID NO: 2076572 - RNA, 17 nt, Human
ccuguaaauuauuuuaa

SEQ ID NO: 2076573 - RNA, 18 nt, Human
ccuguaaauuauuuuaaa

SEQ ID NO: 2076574 - RNA, 23 nt, Human
ccuguaaauuauuuuaaauuaua

SEQ ID NO: 2076575 - RNA, 21 nt, Human
ccugucuccuuugcaggcuca

SEQ ID NO: 2076576 - RNA, 22 nt, Human
cauagcuuacaagccagcugga

SEQ ID NO: 2076577 - RNA, 13 nt, Human
cauagcuuccaug

SEQ ID NO: 2076578 - RNA, 19 nt, Human
cauagcugguuccugcuag

SEQ ID NO: 2076579 - RNA, 20 nt, Human
cauagcugguuccugcuaga

SEQ ID NO: 2076580 - RNA, 23 nt, Human
cauagcaagauugcuuaaaauag

SEQ ID NO: 2076581 - RNA, 15 nt, Human
cauagcaagacacau

SEQ ID NO: 2076582 - RNA, 20 nt, Human
cauagcaagacacaucccua

SEQ ID NO: 2076583 - RNA, 14 nt, Human
cauagcaagacaca

SEQ ID NO: 2076584 - RNA, 22 nt, Human
cauagcagagaaugaaagggcc

SEQ ID NO: 2076585 - RNA, 19 nt, Human
cauagcagagaaugaaagg

SEQ ID NO: 2076586 - RNA, 15 nt, Human
cauaauuuguacaua

SEQ ID NO: 2076587 - RNA, 16 nt, Human
cauaauucuuguauau

SEQ ID NO: 2076588 - RNA, 17 nt, Human
cauaauucuuguauauu

SEQ ID NO: 2076589 - RNA, 18 nt, Human
cauaauucuuguauauua

SEQ ID NO: 2076590 - RNA, 13 nt, Human
cagugggagaaaa

SEQ ID NO: 2076591 - RNA, 15 nt, Human
cagugggagcugccu

SEQ ID NO: 2076592 - RNA, 21 nt, Human
cauaauuuguacauauguaaa

SEQ ID NO: 2076593 - RNA, 23 nt, Human
cauaauuuguacauauguaaaau

SEQ ID NO: 2076594 - RNA, 21 nt, Human
cauacacccccaccuccugca

SEQ ID NO: 2076595 - RNA, 22 nt, Human
cauacacccccaccuccugcaa

SEQ ID NO: 2076596 - RNA, 21 nt, Human
cauaauucuaaucuaacaaug

SEQ ID NO: 2076597 - RNA, 21 nt, Human
cauagcuugauaaagggccaa

SEQ ID NO: 2076598 - RNA, 20 nt, Human
cauagcuugauaaagggcca

SEQ ID NO: 2076599 - RNA, 14 nt, Human
cauccccuguagag

SEQ ID NO: 2076600 - RNA, 16 nt, Human
cauccccgcuggcugg

SEQ ID NO: 2076601 - RNA, 15 nt, Human
cauccuguguuucua

SEQ ID NO: 2076602 - RNA, 21 nt, Human
cauccuguguuucuagggaaa

SEQ ID NO: 2076603 - RNA, 22 nt, Human
cauccuguguuucuagggaaau

SEQ ID NO: 2076604 - RNA, 17 nt, Human
cauccuuagcaacagcc

SEQ ID NO: 2076605 - RNA, 21 nt, Human
cauccuucaagaacucugggc

SEQ ID NO: 2076606 - RNA, 13 nt, Human
caucccaggggac

SEQ ID NO: 2076607 - RNA, 14 nt, Human
caucccaggggacc

SEQ ID NO: 2076608 - RNA, 19 nt, Human
caucccaggggaccacacc

SEQ ID NO: 2076609 - RNA, 13 nt, Human
caucccaguggcc

SEQ ID NO: 2076610 - RNA, 20 nt, Human
caucccaguggccucaaccc

SEQ ID NO: 2076611 - RNA, 23 nt, Human
caucccaguggccucaacccucc

SEQ ID NO: 2076612 - RNA, 12 nt, Human
caucccaucauc

SEQ ID NO: 2076613 - RNA, 12 nt, Human
caucccauccca

SEQ ID NO: 2076614 - RNA, 13 nt, Human
caucccaucccau

SEQ ID NO: 2076615 - RNA, 22 nt, Human
cauccuucaagaacucugggcu

SEQ ID NO: 2076616 - RNA, 23 nt, Human
cauccuucaagaacucugggcug

SEQ ID NO: 2076617 - RNA, 18 nt, Human
cauccuuccucacaccag

SEQ ID NO: 2076618 - RNA, 19 nt, Human
caucugccccucccccaac

SEQ ID NO: 2076619 - RNA, 21 nt, Human
caucugggaagauuucuaccu

SEQ ID NO: 2076620 - RNA, 12 nt, Human
caucugcuaaua

SEQ ID NO: 2076621 - RNA, 22 nt, Human
cauccauggccgggcuuggugg

SEQ ID NO: 2076622 - RNA, 16 nt, Human
cauccauguguggacu

SEQ ID NO: 2076623 - RNA, 18 nt, Human
cauccauguuccgagaag

SEQ ID NO: 2076624 - RNA, 17 nt, Human
cauccauguguggacuc

SEQ ID NO: 2076625 - RNA, 18 nt, Human
cauccauguguggacuca

SEQ ID NO: 2076626 - RNA, 19 nt, Human
cauccauguuccgagaaga

SEQ ID NO: 2076627 - RNA, 15 nt, Human
cauccauuccucagg

SEQ ID NO: 2076628 - RNA, 14 nt, Human
cauccauuccucag

SEQ ID NO: 2076629 - RNA, 13 nt, Human
caucccagcggcu

SEQ ID NO: 2076630 - RNA, 14 nt, Human
cauucucacuccua

SEQ ID NO: 2076631 - RNA, 17 nt, Human
cauucucaagcccugca

SEQ ID NO: 2076632 - RNA, 16 nt, Human
cauucucaagcccugc

SEQ ID NO: 2076633 - RNA, 14 nt, Human
cauucucaagcccu

SEQ ID NO: 2076634 - RNA, 13 nt, Human
cauucucacuccu

SEQ ID NO: 2076635 - RNA, 16 nt, Human
cauucgaucucauuca

SEQ ID NO: 2076636 - RNA, 15 nt, Human
cauuccuugauaaug

SEQ ID NO: 2076637 - RNA, 20 nt, Human
cauuccuugauaauguugug

SEQ ID NO: 2076638 - RNA, 21 nt, Human
cauuaugaugugggucaagga

SEQ ID NO: 2076639 - RNA, 22 nt, Human
cauuaugagaggcaaugauugu

SEQ ID NO: 2076640 - RNA, 16 nt, Human
cauuaugagaggcaau

SEQ ID NO: 2076641 - RNA, 19 nt, Human
cauguugagccaggccugg

SEQ ID NO: 2076642 - RNA, 13 nt, Human
cauguuggccagg

SEQ ID NO: 2076643 - RNA, 12 nt, Human
cauguuggccag

SEQ ID NO: 2076644 - RNA, 21 nt, Human
cauguaucccaacuccuauaa

SEQ ID NO: 2076645 - RNA, 20 nt, Human
caugucaccggauccugggu

SEQ ID NO: 2076646 - RNA, 15 nt, Human
cauguauaauauuuu

SEQ ID NO: 2076647 - RNA, 18 nt, Human
cauguauaauauuuuuaa

SEQ ID NO: 2076648 - RNA, 20 nt, Human
cauguauaauauuuuuaauu

SEQ ID NO: 2076649 - RNA, 13 nt, Human
cauguauaaauga

SEQ ID NO: 2076650 - RNA, 14 nt, Human
cauguauaaaugaa

SEQ ID NO: 2076651 - RNA, 18 nt, Human
cauguauaaaugaaguuu

SEQ ID NO: 2076652 - RNA, 21 nt, Human
cauguauaaaugaaguuuaua

SEQ ID NO: 2076653 - RNA, 23 nt, Human
cauguauaaaugaaguuuauaca

SEQ ID NO: 2076654 - RNA, 16 nt, Human
caugcacgugugugca

SEQ ID NO: 2076655 - RNA, 16 nt, Human
caugcacccucauaca

SEQ ID NO: 2076656 - RNA, 20 nt, Human
caugcacccucauacacaga

SEQ ID NO: 2076657 - RNA, 13 nt, Human
caugcuccuggcc

SEQ ID NO: 2076658 - RNA, 22 nt, Human
caugauuaaccacuucagcuga

SEQ ID NO: 2076659 - RNA, 23 nt, Human
caugauuaaccacuucagcugac

SEQ ID NO: 2076660 - RNA, 24 nt, Human
caugauuaaccacuucagcugacu

SEQ ID NO: 2076661 - RNA, 22 nt, Human
caugaagcccaagugaaaucaa

SEQ ID NO: 2076662 - RNA, 15 nt, Human
caugaagguuucuga

SEQ ID NO: 2076663 - RNA, 18 nt, Human
caugaagguuucugaaaa

SEQ ID NO: 2076664 - RNA, 20 nt, Human
caugaaguguguuuccuuca

SEQ ID NO: 2076665 - RNA, 14 nt, Human
caugacacugaaau

SEQ ID NO: 2076666 - RNA, 15 nt, Human
caugacacugaaaug

SEQ ID NO: 2076667 - RNA, 16 nt, Human
caugacacugaaaugc

SEQ ID NO: 2076668 - RNA, 13 nt, Human
cauggccaggugg

SEQ ID NO: 2076669 - RNA, 14 nt, Human
cauggccagguggc

SEQ ID NO: 2076670 - RNA, 14 nt, Human
caugcacagcugua

SEQ ID NO: 2076671 - RNA, 21 nt, Human
cauggcaugggggccucaggg

SEQ ID NO: 2076672 - RNA, 22 nt, Human
cauggcaugggggccucagggc

SEQ ID NO: 2076673 - RNA, 18 nt, Human
ccacgauguggcccuggc

SEQ ID NO: 2076674 - RNA, 17 nt, Human
ccacgauguggcccugg

SEQ ID NO: 2076675 - RNA, 20 nt, Human
ccacgauguggcccuggccu

SEQ ID NO: 2076676 - RNA, 20 nt, Human
ccaccuuuauuaaaaucuua

SEQ ID NO: 2076677 - RNA, 17 nt, Human
ccaccuuuauuaaaauc

SEQ ID NO: 2076678 - RNA, 10 nt, Human
ccaccucagc

SEQ ID NO: 2076679 - RNA, 19 nt, Human
ccaccuuggcugcagggag

SEQ ID NO: 2076680 - RNA, 18 nt, Human
ccaccuuggcugcaggga

SEQ ID NO: 2076681 - RNA, 17 nt, Human
ccacgccuguaauccca

SEQ ID NO: 2076682 - RNA, 18 nt, Human
ccacgcuggaccuugaac

SEQ ID NO: 2076683 - RNA, 13 nt, Human
ccacgcuggagug

SEQ ID NO: 2076684 - RNA, 16 nt, Human
ccaccuuggcugcagg

SEQ ID NO: 2076685 - RNA, 15 nt, Human
ccaccuuggcugcag

SEQ ID NO: 2076686 - RNA, 14 nt, Human
ccaccuuggcugca

SEQ ID NO: 2076687 - RNA, 12 nt, Human
ccaccuuggcug

SEQ ID NO: 2076688 - RNA, 16 nt, Human
ccaccuaggccacucc

SEQ ID NO: 2076689 - RNA, 17 nt, Human
ccaccuaggccacuccu

SEQ ID NO: 2076690 - RNA, 18 nt, Human
ccaccuaggccacuccuc

SEQ ID NO: 2076691 - RNA, 20 nt, Human
ccaccuaggccacuccucca

SEQ ID NO: 2076692 - RNA, 22 nt, Human
ccaccuaggccacuccuccaaa

SEQ ID NO: 2076693 - RNA, 14 nt, Human
ccaccucaaauuua

SEQ ID NO: 2076694 - RNA, 15 nt, Human
ccaccaugcccagcu

SEQ ID NO: 2076695 - RNA, 14 nt, Human
ccaccgcuccccag

SEQ ID NO: 2076696 - RNA, 15 nt, Human
ccaccgcuccccagc

SEQ ID NO: 2076697 - RNA, 17 nt, Human
ccaccgcuccccagccc

SEQ ID NO: 2076698 - RNA, 19 nt, Human
ccaccgggcugggagcucu

SEQ ID NO: 2076699 - RNA, 21 nt, Human
ccaccgcugccuaaguggcug

SEQ ID NO: 2076700 - RNA, 21 nt, Human
ccaccgcuccccagcccaggg

SEQ ID NO: 2076701 - RNA, 13 nt, Human
ccaccgcugccua

SEQ ID NO: 2076702 - RNA, 14 nt, Human
ccaccgcugccuaa

SEQ ID NO: 2076703 - RNA, 15 nt, Human
ccaccgcugccuaag

SEQ ID NO: 2076704 - RNA, 19 nt, Human
ccaccaucaugucuggcua

SEQ ID NO: 2076705 - RNA, 18 nt, Human
ccaccaucaugucuggcu

SEQ ID NO: 2076706 - RNA, 21 nt, Human
ccaccacgauguggcccuggc

SEQ ID NO: 2076707 - RNA, 17 nt, Human
ccaccacuaggacucug

SEQ ID NO: 2076708 - RNA, 20 nt, Human
ccaccacuaggacucugagg

SEQ ID NO: 2076709 - RNA, 22 nt, Human
ccaccaggcugcucagggcugg

SEQ ID NO: 2076710 - RNA, 13 nt, Human
ccaccaggucucc

SEQ ID NO: 2076711 - RNA, 17 nt, Human
ccaccaggucucccggg

SEQ ID NO: 2076712 - RNA, 18 nt, Human
ccaccaggucucccggga

SEQ ID NO: 2076713 - RNA, 23 nt, Human
ccaccaggucucccgggaagcca

SEQ ID NO: 2076714 - RNA, 19 nt, Human
ccaccacgauguggcccug

SEQ ID NO: 2076715 - RNA, 20 nt, Human
ccaccacgauguggcccugg

SEQ ID NO: 2076716 - RNA, 12 nt, Human
ccaccaccuagg

SEQ ID NO: 2076717 - RNA, 18 nt, Human
ccaccaccuaggccacuc

SEQ ID NO: 2076718 - RNA, 20 nt, Human
ccaccaccuaggccacuccu

SEQ ID NO: 2076719 - RNA, 21 nt, Human
ccaccaccuaggccacuccuc

SEQ ID NO: 2076720 - RNA, 22 nt, Human
ccaccaccuaggccacuccucc

SEQ ID NO: 2076721 - RNA, 12 nt, Human
ccacagccgcag

SEQ ID NO: 2076722 - RNA, 15 nt, Human
ccacagccgcagccu

SEQ ID NO: 2076723 - RNA, 18 nt, Human
ccacagccgcagccuccc

SEQ ID NO: 2076724 - RNA, 23 nt, Human
ccacagcccugucagugcagccc

SEQ ID NO: 2076725 - RNA, 21 nt, Human
ccacagcccugucagugcagc

SEQ ID NO: 2076726 - RNA, 20 nt, Human
ccacagcccugucagugcag

SEQ ID NO: 2076727 - RNA, 13 nt, Human
ccacagcccaggc

SEQ ID NO: 2076728 - RNA, 15 nt, Human
ccacagcccaggccu

SEQ ID NO: 2076729 - RNA, 16 nt, Human
ccacagcccaggccuc

SEQ ID NO: 2076730 - RNA, 21 nt, Human
ccacagcccaggccuccagcu

SEQ ID NO: 2076731 - RNA, 19 nt, Human
ccacagcccgcaugcagca

SEQ ID NO: 2076732 - RNA, 13 nt, Human
ccacagcccuguc

SEQ ID NO: 2076733 - RNA, 14 nt, Human
ccacagcccuguca

SEQ ID NO: 2076734 - RNA, 15 nt, Human
ccacagcccugucag

SEQ ID NO: 2076735 - RNA, 22 nt, Human
ccacagagaaaguacuucucca

SEQ ID NO: 2076736 - RNA, 15 nt, Human
ccacagacaagguag

SEQ ID NO: 2076737 - RNA, 16 nt, Human
ccacagaagugcuuuc

SEQ ID NO: 2076738 - RNA, 21 nt, Human
ccacagacaagguagcccugg

SEQ ID NO: 2076739 - RNA, 21 nt, Human
ccacacuucaggcucuucucc

SEQ ID NO: 2076740 - RNA, 20 nt, Human
ccacacuucaggcucuucuc

SEQ ID NO: 2076741 - RNA, 16 nt, Human
ccacacuucaggcucu

SEQ ID NO: 2076742 - RNA, 16 nt, Human
cauuuuuuaaaacaag

SEQ ID NO: 2076743 - RNA, 17 nt, Human
cauuuuuuaaaacaaga

SEQ ID NO: 2076744 - RNA, 14 nt, Human
cauuugugaaauga

SEQ ID NO: 2076745 - RNA, 16 nt, Human
cauuugugaaaugaug

SEQ ID NO: 2076746 - RNA, 14 nt, Human
cauuuuuuaaaaca

SEQ ID NO: 2076747 - RNA, 15 nt, Human
cauuuuuuaaaacaa

SEQ ID NO: 2076748 - RNA, 17 nt, Human
cauuugucacacacuuu

SEQ ID NO: 2076749 - RNA, 15 nt, Human
cauuuggauuggaug

SEQ ID NO: 2076750 - RNA, 18 nt, Human
cauuucauuccuaacaca

SEQ ID NO: 2076751 - RNA, 21 nt, Human
cauuucauuccuaacacagca

SEQ ID NO: 2076752 - RNA, 15 nt, Human
cauuucauuccuaac

SEQ ID NO: 2076753 - RNA, 20 nt, Human
cauuucaucuauuucugaga

SEQ ID NO: 2076754 - RNA, 21 nt, Human
cauuucaucuaccauuuucug

SEQ ID NO: 2076755 - RNA, 14 nt, Human
cauuucaucuauuu

SEQ ID NO: 2076756 - RNA, 15 nt, Human
cauuucaucuauuuc

SEQ ID NO: 2076757 - RNA, 16 nt, Human
cauuucaucuauuucu

SEQ ID NO: 2076758 - RNA, 17 nt, Human
cauuucaucuauuucug

SEQ ID NO: 2076759 - RNA, 18 nt, Human
cauuucaucuauuucuga

SEQ ID NO: 2076760 - RNA, 21 nt, Human
cauuuauggucaacacuuaag

SEQ ID NO: 2076761 - RNA, 20 nt, Human
cauuuauggucaacacuuaa

SEQ ID NO: 2076762 - RNA, 14 nt, Human
cauuuauguuuauu

SEQ ID NO: 2076763 - RNA, 15 nt, Human
cauuuauucugcuca

SEQ ID NO: 2076764 - RNA, 14 nt, Human
cauuuauucugcuc

SEQ ID NO: 2076765 - RNA, 21 nt, Human
cauuuauaauguuugcuauug

SEQ ID NO: 2076766 - RNA, 14 nt, Human
cauuuauaauguuu

SEQ ID NO: 2076767 - RNA, 17 nt, Human
cauuuauaauguuugcu

SEQ ID NO: 2076768 - RNA, 15 nt, Human
cauuguaaacaaacu

SEQ ID NO: 2076769 - RNA, 20 nt, Human
cauugcuucacaacccaucu

SEQ ID NO: 2076770 - RNA, 15 nt, Human
cauugcuucacuacc

SEQ ID NO: 2076771 - RNA, 17 nt, Human
cauugcuucacuaccca

SEQ ID NO: 2076772 - RNA, 11 nt, Human
cauugcuuuac

SEQ ID NO: 2076773 - RNA, 14 nt, Human
cauugcuuuacugg

SEQ ID NO: 2076774 - RNA, 12 nt, Human
cauugcuuucug

SEQ ID NO: 2076775 - RNA, 14 nt, Human
cauugcuuucugaa

SEQ ID NO: 2076776 - RNA, 15 nt, Human
cauugcuuucugaaa

SEQ ID NO: 2076777 - RNA, 15 nt, Human
ccaauccucacuggg

SEQ ID NO: 2076778 - RNA, 17 nt, Human
ccaauccucacugggug

SEQ ID NO: 2076779 - RNA, 18 nt, Human
ccaauccucacugggugg

SEQ ID NO: 2076780 - RNA, 19 nt, Human
ccaaaugcaucaauccugu

SEQ ID NO: 2076781 - RNA, 19 nt, Human
ccaaauauauucucuuugg

SEQ ID NO: 2076782 - RNA, 16 nt, Human
ccaaagugguuucagc

SEQ ID NO: 2076783 - RNA, 22 nt, Human
ccaaagugguauagaaaugcug

SEQ ID NO: 2076784 - RNA, 13 nt, Human
ccaagaaagcagg

SEQ ID NO: 2076785 - RNA, 18 nt, Human
ccaagaacagcaggccca

SEQ ID NO: 2076786 - RNA, 13 nt, Human
ccaagaacugaaa

SEQ ID NO: 2076787 - RNA, 16 nt, Human
ccaagaacugaaaaca

SEQ ID NO: 2076788 - RNA, 17 nt, Human
ccaagaacugaaaacau

SEQ ID NO: 2076789 - RNA, 18 nt, Human
ccaagaacugaaaacaua

SEQ ID NO: 2076790 - RNA, 21 nt, Human
ccaagaacugaaaacauaaaa

SEQ ID NO: 2076791 - RNA, 14 nt, Human
ccaagaacugcaug

SEQ ID NO: 2076792 - RNA, 15 nt, Human
ccaagaacugcaugg

SEQ ID NO: 2076793 - RNA, 22 nt, Human
ccaacggagagcgccugccccu

SEQ ID NO: 2076794 - RNA, 11 nt, Human
ccaacuuuucu

SEQ ID NO: 2076795 - RNA, 14 nt, Human
ccaacuuuucuauu

SEQ ID NO: 2076796 - RNA, 21 nt, Human
ccaacggagagcgccugcccc

SEQ ID NO: 2076797 - RNA, 14 nt, Human
ccaacgaaaagcac

SEQ ID NO: 2076798 - RNA, 15 nt, Human
ccaacgaaaagcaca

SEQ ID NO: 2076799 - RNA, 19 nt, Human
ccaacgaaaagcacaucca

SEQ ID NO: 2076800 - RNA, 19 nt, Human
ccaagcuggucccacucag

SEQ ID NO: 2076801 - RNA, 12 nt, Human
ccaagcuggucc

SEQ ID NO: 2076802 - RNA, 21 nt, Human
ccaaggcaaggggugccuggg

SEQ ID NO: 2076803 - RNA, 22 nt, Human
ccaaggcaaggggugccuggga

SEQ ID NO: 2076804 - RNA, 20 nt, Human
cagcaccuacaguguacagu

SEQ ID NO: 2076805 - RNA, 15 nt, Human
cagcaccuacagugu

SEQ ID NO: 2076806 - RNA, 12 nt, Human
cagcacccugca

SEQ ID NO: 2076807 - RNA, 13 nt, Human
cagcacacucagc

SEQ ID NO: 2076808 - RNA, 12 nt, Human
cagcacagagag

SEQ ID NO: 2076809 - RNA, 13 nt, Human
cagcacagagagg

SEQ ID NO: 2076810 - RNA, 17 nt, Human
cagcacagagagggggc

SEQ ID NO: 2076811 - RNA, 20 nt, Human
cagcacagagagggggccac

SEQ ID NO: 2076812 - RNA, 16 nt, Human
cagcacagagaccccc

SEQ ID NO: 2076813 - RNA, 16 nt, Human
cagccaggagcugggc

SEQ ID NO: 2076814 - RNA, 15 nt, Human
cagccaggagcuggg

SEQ ID NO: 2076815 - RNA, 22 nt, Human
cagccaggagcugggcagaagg

SEQ ID NO: 2076816 - RNA, 11 nt, Human
cagccaggagc

SEQ ID NO: 2076817 - RNA, 14 nt, Human
cagccaggagcugg

SEQ ID NO: 2076818 - RNA, 12 nt, Human
cagccaggagcu

SEQ ID NO: 2076819 - RNA, 19 nt, Human
cagccagcagccagcucuc

SEQ ID NO: 2076820 - RNA, 21 nt, Human
cagccagcagccagcucucag

SEQ ID NO: 2076821 - RNA, 18 nt, Human
cagcauauuuauagcaau

SEQ ID NO: 2076822 - RNA, 17 nt, Human
cagccagcagccagcuc

SEQ ID NO: 2076823 - RNA, 18 nt, Human
cagccagcagccagcucu

SEQ ID NO: 2076824 - RNA, 12 nt, Human
cagcauauuuau

SEQ ID NO: 2076825 - RNA, 14 nt, Human
cagcauauuuauag

SEQ ID NO: 2076826 - RNA, 23 nt, Human
cagaggggaaaccaguguagccu

SEQ ID NO: 2076827 - RNA, 19 nt, Human
cagagcuguuuauggccuc

SEQ ID NO: 2076828 - RNA, 20 nt, Human
cagagcuguuuauggccuca

SEQ ID NO: 2076829 - RNA, 21 nt, Human
cagagcuguuuauggccucag

SEQ ID NO: 2076830 - RNA, 22 nt, Human
cagagcuguuuauggccucagc

SEQ ID NO: 2076831 - RNA, 14 nt, Human
cagagcugggaggg

SEQ ID NO: 2076832 - RNA, 12 nt, Human
cagagcugggug

SEQ ID NO: 2076833 - RNA, 13 nt, Human
cagagcuggguga

SEQ ID NO: 2076834 - RNA, 20 nt, Human
cagaaguuugagaucagccu

SEQ ID NO: 2076835 - RNA, 22 nt, Human
cagaaguuugagaucagccugg

SEQ ID NO: 2076836 - RNA, 23 nt, Human
cagaaguuugagaucagccuggg

SEQ ID NO: 2076837 - RNA, 20 nt, Human
cagagcugggauguuucugu

SEQ ID NO: 2076838 - RNA, 20 nt, Human
cagaguauuugaaaaaugua

SEQ ID NO: 2076839 - RNA, 13 nt, Human
cagagucagcaga

SEQ ID NO: 2076840 - RNA, 15 nt, Human
cagauauuuuuucag

SEQ ID NO: 2076841 - RNA, 20 nt, Human
cagauauuuuuucagaaaua

SEQ ID NO: 2076842 - RNA, 14 nt, Human
cagagucagcagaa

SEQ ID NO: 2076843 - RNA, 11 nt, Human
cagauauuuau

SEQ ID NO: 2076844 - RNA, 12 nt, Human
cagauauuuaua

SEQ ID NO: 2076845 - RNA, 14 nt, Human
cagauauuuauauu

SEQ ID NO: 2076846 - RNA, 16 nt, Human
cagauauuuauauuuu

SEQ ID NO: 2076847 - RNA, 20 nt, Human
cagauauuuauauuuuuauu

SEQ ID NO: 2076848 - RNA, 21 nt, Human
cagauauuuauauuuuuauuu

SEQ ID NO: 2076849 - RNA, 22 nt, Human
cagauauuuauauuuuuauuuu

SEQ ID NO: 2076850 - RNA, 16 nt, Human
cagcugcaccugccag

SEQ ID NO: 2076851 - RNA, 21 nt, Human
cagcugauuuuaacaauaacu

SEQ ID NO: 2076852 - RNA, 17 nt, Human
cagcugcaccugccagc

SEQ ID NO: 2076853 - RNA, 18 nt, Human
cagcugcaccugccagcc

SEQ ID NO: 2076854 - RNA, 20 nt, Human
cagcugcaccugccagccug

SEQ ID NO: 2076855 - RNA, 21 nt, Human
cagcugcaccugccagccugg

SEQ ID NO: 2076856 - RNA, 20 nt, Human
cagcugauuuuaacaauaac

SEQ ID NO: 2076857 - RNA, 12 nt, Human
cagcucccaccc

SEQ ID NO: 2076858 - RNA, 14 nt, Human
cagcucccacccca

SEQ ID NO: 2076859 - RNA, 15 nt, Human
cagcucccaccccac

SEQ ID NO: 2076860 - RNA, 19 nt, Human
cagcucccaccccaccccc

SEQ ID NO: 2076861 - RNA, 20 nt, Human
cagcucccaccccacccccu

SEQ ID NO: 2076862 - RNA, 16 nt, Human
cagcugcagcugggcu

SEQ ID NO: 2076863 - RNA, 16 nt, Human
cagcugcagagacaga

SEQ ID NO: 2076864 - RNA, 13 nt, Human
cagcugccagaga

SEQ ID NO: 2076865 - RNA, 17 nt, Human
cagcugcagcugggcug

SEQ ID NO: 2076866 - RNA, 16 nt, Human
cagcugcaucuacuca

SEQ ID NO: 2076867 - RNA, 17 nt, Human
cagcugcaucuacucag

SEQ ID NO: 2076868 - RNA, 15 nt, Human
cagcugcagagacag

SEQ ID NO: 2076869 - RNA, 22 nt, Human
cagcugcaccugccagccuggc

SEQ ID NO: 2076870 - RNA, 15 nt, Human
cagcugcccccgcuc

SEQ ID NO: 2076871 - RNA, 20 nt, Human
cagcugcccccgcucauggg

SEQ ID NO: 2076872 - RNA, 16 nt, Human
cagcugccagagaagc

SEQ ID NO: 2076873 - RNA, 14 nt, Human
cagcugccagagaa

SEQ ID NO: 2076874 - RNA, 15 nt, Human
cagcugccagagaag

SEQ ID NO: 2076875 - RNA, 19 nt, Human
cagcugccgaccagagccc

SEQ ID NO: 2076876 - RNA, 18 nt, Human
cagcugccgaccagagcc

SEQ ID NO: 2076877 - RNA, 17 nt, Human
cagcugccgaccagagc

SEQ ID NO: 2076878 - RNA, 12 nt, Human
cagcugccccuc

SEQ ID NO: 2076879 - RNA, 13 nt, Human
cagcugccccucc

SEQ ID NO: 2076880 - RNA, 15 nt, Human
cagcugccccucccu

SEQ ID NO: 2076881 - RNA, 16 nt, Human
cagcugccccucccug

SEQ ID NO: 2076882 - RNA, 19 nt, Human
cagcugccccucccugcca

SEQ ID NO: 2076883 - RNA, 22 nt, Human
caggaacacccgacuccucaaa

SEQ ID NO: 2076884 - RNA, 12 nt, Human
caggaacagaag

SEQ ID NO: 2076885 - RNA, 18 nt, Human
cagcuucaugccuuugua

SEQ ID NO: 2076886 - RNA, 19 nt, Human
cagcuucaugccuuuguaa

SEQ ID NO: 2076887 - RNA, 20 nt, Human
cagcuucaugccuuuguaag

SEQ ID NO: 2076888 - RNA, 21 nt, Human
cagcuucaugccuuuguaagu

SEQ ID NO: 2076889 - RNA, 18 nt, Human
cagcuucauuuccugugu

SEQ ID NO: 2076890 - RNA, 17 nt, Human
cagcuucagccaggagc

SEQ ID NO: 2076891 - RNA, 15 nt, Human
cagcuucagccagga

SEQ ID NO: 2076892 - RNA, 15 nt, Human
cagcuucauuuccug

SEQ ID NO: 2076893 - RNA, 18 nt, Human
cagcugugcucuggacag

SEQ ID NO: 2076894 - RNA, 20 nt, Human
cagcugucugugucagccug

SEQ ID NO: 2076895 - RNA, 20 nt, Human
cagcuccagcucaccagccc

SEQ ID NO: 2076896 - RNA, 18 nt, Human
cagcuccagcucaccagc

SEQ ID NO: 2076897 - RNA, 17 nt, Human
cagcuccagcucaccag

SEQ ID NO: 2076898 - RNA, 16 nt, Human
cagcuccagcucacca

SEQ ID NO: 2076899 - RNA, 21 nt, Human
cagcucccaaggcucugagca

SEQ ID NO: 2076900 - RNA, 14 nt, Human
cagcuccagggcca

SEQ ID NO: 2076901 - RNA, 19 nt, Human
cagcuccacucugacuggc

SEQ ID NO: 2076902 - RNA, 22 nt, Human
cagcuccagcucaccagcccca

SEQ ID NO: 2076903 - RNA, 14 nt, Human
cagcuccagcugcu

SEQ ID NO: 2076904 - RNA, 23 nt, Human
cagcuccacucugacuggcacag

SEQ ID NO: 2076905 - RNA, 15 nt, Human
cagcuccagcucacc

SEQ ID NO: 2076906 - RNA, 14 nt, Human
cagcuccagcucac

SEQ ID NO: 2076907 - RNA, 13 nt, Human
cagcuccagcuca

SEQ ID NO: 2076908 - RNA, 18 nt, Human
cagccucuuggccccaga

SEQ ID NO: 2076909 - RNA, 15 nt, Human
cagccucuuaaagcu

SEQ ID NO: 2076910 - RNA, 19 nt, Human
cagccucuuaaagcugccu

SEQ ID NO: 2076911 - RNA, 20 nt, Human
cagccucuuaaagcugccug

SEQ ID NO: 2076912 - RNA, 21 nt, Human
cagccucuuaaagcugccugu

SEQ ID NO: 2076913 - RNA, 14 nt, Human
cagccggggaagac

SEQ ID NO: 2076914 - RNA, 17 nt, Human
cagccggggaagacuug

SEQ ID NO: 2076915 - RNA, 15 nt, Human
cagccggggccugcc

SEQ ID NO: 2076916 - RNA, 11 nt, Human
cagccucuuaa

SEQ ID NO: 2076917 - RNA, 16 nt, Human
cagccgcagccucccu

SEQ ID NO: 2076918 - RNA, 19 nt, Human
cagccgcagccucccucug

SEQ ID NO: 2076919 - RNA, 14 nt, Human
cagccgcuucugac

SEQ ID NO: 2076920 - RNA, 18 nt, Human
cagccgcuucugacugcu

SEQ ID NO: 2076921 - RNA, 14 nt, Human
cagccggcacccac

SEQ ID NO: 2076922 - RNA, 23 nt, Human
cagccccugccccucaugccaac

SEQ ID NO: 2076923 - RNA, 21 nt, Human
cagccgaguggauagaugccc

SEQ ID NO: 2076924 - RNA, 21 nt, Human
cagcccuuagcagggaaacag

SEQ ID NO: 2076925 - RNA, 16 nt, Human
cagcccuuagcaggga

SEQ ID NO: 2076926 - RNA, 15 nt, Human
cagcccuuagcaggg

SEQ ID NO: 2076927 - RNA, 17 nt, Human
cagcggggacagcuccu

SEQ ID NO: 2076928 - RNA, 16 nt, Human
cagcggggacagcucc

SEQ ID NO: 2076929 - RNA, 15 nt, Human
cagcggggacagcuc

SEQ ID NO: 2076930 - RNA, 15 nt, Human
cagcguacucaucau

SEQ ID NO: 2076931 - RNA, 15 nt, Human
cagcgguuuggggag

SEQ ID NO: 2076932 - RNA, 17 nt, Human
cagcguagccucuccgg

SEQ ID NO: 2076933 - RNA, 12 nt, Human
caggagcucuuc

SEQ ID NO: 2076934 - RNA, 15 nt, Human
caggagcucuucagg

SEQ ID NO: 2076935 - RNA, 18 nt, Human
caggagcucuucaggccu

SEQ ID NO: 2076936 - RNA, 19 nt, Human
caggagcucuucaggccuc

SEQ ID NO: 2076937 - RNA, 20 nt, Human
caggagcucuucaggccucc

SEQ ID NO: 2076938 - RNA, 23 nt, Human
caggagcugggcagaaggccaag

SEQ ID NO: 2076939 - RNA, 15 nt, Human
caggagcugggcaga

SEQ ID NO: 2076940 - RNA, 12 nt, Human
caggagcugggc

SEQ ID NO: 2076941 - RNA, 22 nt, Human
caggagcucuucaggccucccu

SEQ ID NO: 2076942 - RNA, 23 nt, Human
caggagcucuucaggccucccuc

SEQ ID NO: 2076943 - RNA, 14 nt, Human
caggagcugggauc

SEQ ID NO: 2076944 - RNA, 22 nt, Human
caggagcugggauccuaagggc

SEQ ID NO: 2076945 - RNA, 15 nt, Human
caggacccucgcugg

SEQ ID NO: 2076946 - RNA, 17 nt, Human
caggacccucgcuggcc

SEQ ID NO: 2076947 - RNA, 18 nt, Human
caggacccucgcuggccc

SEQ ID NO: 2076948 - RNA, 19 nt, Human
caggacccucgcuggcccc

SEQ ID NO: 2076949 - RNA, 20 nt, Human
caggacccucgcuggccccc

SEQ ID NO: 2076950 - RNA, 21 nt, Human
caggacccucgcuggccccca

SEQ ID NO: 2076951 - RNA, 22 nt, Human
caggacccucgcuggcccccac

SEQ ID NO: 2076952 - RNA, 14 nt, Human
caggaacagaagga

SEQ ID NO: 2076953 - RNA, 13 nt, Human
caggaacagaagg

SEQ ID NO: 2076954 - RNA, 12 nt, Human
caggagggaggu

SEQ ID NO: 2076955 - RNA, 19 nt, Human
caggagggagguuugugag

SEQ ID NO: 2076956 - RNA, 23 nt, Human
caggagggagguuugugagagcg

SEQ ID NO: 2076957 - RNA, 16 nt, Human
caggagggcccuaccu

SEQ ID NO: 2076958 - RNA, 12 nt, Human
caggagggcccu

SEQ ID NO: 2076959 - RNA, 13 nt, Human
caggaggggagug

SEQ ID NO: 2076960 - RNA, 22 nt, Human
caggaggggagugaggcaggug

SEQ ID NO: 2076961 - RNA, 20 nt, Human
caggagguggaggcugcagu

SEQ ID NO: 2076962 - RNA, 12 nt, Human
caggagggaggg

SEQ ID NO: 2076963 - RNA, 23 nt, Human
caggcacccaccaucaugucugg

SEQ ID NO: 2076964 - RNA, 22 nt, Human
caggcacccaccaucaugucug

SEQ ID NO: 2076965 - RNA, 18 nt, Human
caggcacccaccaucaug

SEQ ID NO: 2076966 - RNA, 15 nt, Human
caggagguggagguu

SEQ ID NO: 2076967 - RNA, 19 nt, Human
caggagguggagguugcag

SEQ ID NO: 2076968 - RNA, 11 nt, Human
caggagggagg

SEQ ID NO: 2076969 - RNA, 20 nt, Human
caggagguggagguugcagu

SEQ ID NO: 2076970 - RNA, 13 nt, Human
caggcagaucugu

SEQ ID NO: 2076971 - RNA, 15 nt, Human
caggcagaucugugc

SEQ ID NO: 2076972 - RNA, 16 nt, Human
caggcagaucugugcc

SEQ ID NO: 2076973 - RNA, 17 nt, Human
caggcagaucugugccc

SEQ ID NO: 2076974 - RNA, 18 nt, Human
caggcagaucugugcccc

SEQ ID NO: 2076975 - RNA, 19 nt, Human
caggcagaucugugcccca

SEQ ID NO: 2076976 - RNA, 21 nt, Human
caggcagaucugugccccaug

SEQ ID NO: 2076977 - RNA, 22 nt, Human
caggcagaucugugccccaugc

SEQ ID NO: 2076978 - RNA, 21 nt, Human
caggccagagggagugacaga

SEQ ID NO: 2076979 - RNA, 19 nt, Human
caggccagagggagugaca

SEQ ID NO: 2076980 - RNA, 13 nt, Human
caggcagcauuua

SEQ ID NO: 2076981 - RNA, 15 nt, Human
caggcagcacagaga

SEQ ID NO: 2076982 - RNA, 23 nt, Human
caggccagagggagugacagagg

SEQ ID NO: 2076983 - RNA, 19 nt, Human
caggcugggcuucaguggc

SEQ ID NO: 2076984 - RNA, 17 nt, Human
caggcugggcuucagug

SEQ ID NO: 2076985 - RNA, 13 nt, Human
cagggaggcacca

SEQ ID NO: 2076986 - RNA, 22 nt, Human
cagggaggcaccauucaggaac

SEQ ID NO: 2076987 - RNA, 24 nt, Human
cagggaggcaccauucaggaaccu

SEQ ID NO: 2076988 - RNA, 23 nt, Human
cagggaggagguggcagcccugu

SEQ ID NO: 2076989 - RNA, 16 nt, Human
caggcugggcuucagu

SEQ ID NO: 2076990 - RNA, 15 nt, Human
caggcuggcgugcag

SEQ ID NO: 2076991 - RNA, 17 nt, Human
caggcgccccuuccccc

SEQ ID NO: 2076992 - RNA, 13 nt, Human
caggccuccagcu

SEQ ID NO: 2076993 - RNA, 14 nt, Human
caggccuccagcuc

SEQ ID NO: 2076994 - RNA, 15 nt, Human
caggccuccagcuca

SEQ ID NO: 2076995 - RNA, 16 nt, Human
caggccuccagcucag

SEQ ID NO: 2076996 - RNA, 17 nt, Human
caggccuccagcucagc

SEQ ID NO: 2076997 - RNA, 19 nt, Human
caggccuccagcucagcag

SEQ ID NO: 2076998 - RNA, 12 nt, Human
caggccucccuc

SEQ ID NO: 2076999 - RNA, 20 nt, Human
caggcgauccaccugucuca

SEQ ID NO: 2077000 - RNA, 15 nt, Human
caggcgccccuuccc

SEQ ID NO: 2077001 - RNA, 20 nt, Human
caggccugccuguucccauu

SEQ ID NO: 2077002 - RNA, 18 nt, Human
caggccugccagacggca

SEQ ID NO: 2077003 - RNA, 12 nt, Human
caggccugccag

SEQ ID NO: 2077004 - RNA, 14 nt, Human
caggccugccagac

SEQ ID NO: 2077005 - RNA, 22 nt, Human
caggccucccucucucuucugc

SEQ ID NO: 2077006 - RNA, 23 nt, Human
caggccucccucucucuucugcu

SEQ ID NO: 2077007 - RNA, 13 nt, Human
caggccucccucu

SEQ ID NO: 2077008 - RNA, 14 nt, Human
caggccucccucuc

SEQ ID NO: 2077009 - RNA, 15 nt, Human
caggccucccucucu

SEQ ID NO: 2077010 - RNA, 16 nt, Human
caggccucccucucuc

SEQ ID NO: 2077011 - RNA, 17 nt, Human
caggccucccucucucu

SEQ ID NO: 2077012 - RNA, 18 nt, Human
caggccucccucucucuu

SEQ ID NO: 2077013 - RNA, 19 nt, Human
caggccucccucucucuuc

SEQ ID NO: 2077014 - RNA, 18 nt, Human
cagggaggugaccccagg

SEQ ID NO: 2077015 - RNA, 22 nt, Human
cagggaguccgaaagggacuug

SEQ ID NO: 2077016 - RNA, 17 nt, Human
cagggagguggcugggu

SEQ ID NO: 2077017 - RNA, 14 nt, Human
cagggagguggcug

SEQ ID NO: 2077018 - RNA, 20 nt, Human
caggugauccacccaccuca

SEQ ID NO: 2077019 - RNA, 15 nt, Human
caggugcacagacgu

SEQ ID NO: 2077020 - RNA, 23 nt, Human
caggugcacagacgucccuccac

SEQ ID NO: 2077021 - RNA, 14 nt, Human
caggguuggccccu

SEQ ID NO: 2077022 - RNA, 12 nt, Human
caggguuggccc

SEQ ID NO: 2077023 - RNA, 17 nt, Human
caggugauccacccacc

SEQ ID NO: 2077024 - RNA, 16 nt, Human
caggugauccacccac

SEQ ID NO: 2077025 - RNA, 14 nt, Human
cagguugguggggg

SEQ ID NO: 2077026 - RNA, 14 nt, Human
caggugcgaaagga

SEQ ID NO: 2077027 - RNA, 12 nt, Human
caggugcagugg

SEQ ID NO: 2077028 - RNA, 13 nt, Human
caggugcaguggc

SEQ ID NO: 2077029 - RNA, 15 nt, Human
caggugcaguggcuc

SEQ ID NO: 2077030 - RNA, 20 nt, Human
cagggugggauggaggagaa

SEQ ID NO: 2077031 - RNA, 13 nt, Human
cagggucuucccu

SEQ ID NO: 2077032 - RNA, 17 nt, Human
cagggucuucccuaccu

SEQ ID NO: 2077033 - RNA, 21 nt, Human
cagggucuucccuaccucagg

SEQ ID NO: 2077034 - RNA, 15 nt, Human
caggguucuccucuc

SEQ ID NO: 2077035 - RNA, 22 nt, Human
caggguucccccagcccugugg

SEQ ID NO: 2077036 - RNA, 17 nt, Human
caggguucuccucuccc

SEQ ID NO: 2077037 - RNA, 20 nt, Human
caggguucuccucuccccuc

SEQ ID NO: 2077038 - RNA, 21 nt, Human
caggguucuccucuccccucu

SEQ ID NO: 2077039 - RNA, 18 nt, Human
caggguucaaaaugucug

SEQ ID NO: 2077040 - RNA, 15 nt, Human
caggguucccccagc

SEQ ID NO: 2077041 - RNA, 17 nt, Human
caggguucccccagccc

SEQ ID NO: 2077042 - RNA, 18 nt, Human
caggguucccccagcccu

SEQ ID NO: 2077043 - RNA, 20 nt, Human
caggguucccccagcccugu

SEQ ID NO: 2077044 - RNA, 21 nt, Human
caggguucccccagcccugug

SEQ ID NO: 2077045 - RNA, 18 nt, Human
cagggucucacucugucg

SEQ ID NO: 2077046 - RNA, 17 nt, Human
cagggucucacucuguc

SEQ ID NO: 2077047 - RNA, 21 nt, Human
cagggucucacucugucgccc

SEQ ID NO: 2077048 - RNA, 22 nt, Human
cagggucucacucugucgccca

SEQ ID NO: 2077049 - RNA, 15 nt, Human
cagucaaaacagaga

SEQ ID NO: 2077050 - RNA, 19 nt, Human
cagucaaaacagagaugug

SEQ ID NO: 2077051 - RNA, 22 nt, Human
caguauuuuuguuguguucugu

SEQ ID NO: 2077052 - RNA, 16 nt, Human
cagguuuaagcuguua

SEQ ID NO: 2077053 - RNA, 18 nt, Human
cagguuuaagcuguuacu

SEQ ID NO: 2077054 - RNA, 20 nt, Human
caggguguugucagcaucuu

SEQ ID NO: 2077055 - RNA, 15 nt, Human
cagucaaggaguggc

SEQ ID NO: 2077056 - RNA, 14 nt, Human
cagugccauugucu

SEQ ID NO: 2077057 - RNA, 15 nt, Human
cagugccauugucuu

SEQ ID NO: 2077058 - RNA, 16 nt, Human
cagugccauugucuuu

SEQ ID NO: 2077059 - RNA, 17 nt, Human
cagugccauugucuuua

SEQ ID NO: 2077060 - RNA, 18 nt, Human
cagugccauugucuuuau

SEQ ID NO: 2077061 - RNA, 19 nt, Human
cagugccauugucuuuaua

SEQ ID NO: 2077062 - RNA, 21 nt, Human
cagugccauugucuuuauaug

SEQ ID NO: 2077063 - RNA, 22 nt, Human
cagugccauugucuuuauauga

SEQ ID NO: 2077064 - RNA, 15 nt, Human
cagugccaagcacag

SEQ ID NO: 2077065 - RNA, 23 nt, Human
cagugccaagcacagugccugca

SEQ ID NO: 2077066 - RNA, 19 nt, Human
cagugccaagcacagugcc

SEQ ID NO: 2077067 - RNA, 16 nt, Human
cagugggacagggcau

SEQ ID NO: 2077068 - RNA, 19 nt, Human
cagugggacagggcauggc

SEQ ID NO: 2077069 - RNA, 12 nt, Human
cagugcccacag

SEQ ID NO: 2077070 - RNA, 11 nt, Human
cagugggagcu

SEQ ID NO: 2077071 - RNA, 18 nt, Human
cagugggagccagggcug

SEQ ID NO: 2077072 - RNA, 17 nt, Human
cagugggagccagggcu

SEQ ID NO: 2077073 - RNA, 13 nt, Human
cagugggagccag

SEQ ID NO: 2077074 - RNA, 14 nt, Human
cagugggagaaaac

SEQ ID NO: 2077075 - RNA, 20 nt, Human
cagucugauucccaagcucu

SEQ ID NO: 2077076 - RNA, 19 nt, Human
cagucugauucccaagcuc

SEQ ID NO: 2077077 - RNA, 22 nt, Human
cagugcaaugguauaaauuuca

SEQ ID NO: 2077078 - RNA, 15 nt, Human
cagugcacccacucu

SEQ ID NO: 2077079 - RNA, 16 nt, Human
cagugcagcccgugug

SEQ ID NO: 2077080 - RNA, 22 nt, Human
cagugcagcccguguggccccu

SEQ ID NO: 2077081 - RNA, 17 nt, Human
cagugcaccugucauau

SEQ ID NO: 2077082 - RNA, 20 nt, Human
cagugcagcaaccagagcac

SEQ ID NO: 2077083 - RNA, 22 nt, Human
cagugcagcaaccagagcacug

SEQ ID NO: 2077084 - RNA, 23 nt, Human
cagugcagcaaccagagcacugu

SEQ ID NO: 2077085 - RNA, 18 nt, Human
cagucucaggagcauggg

SEQ ID NO: 2077086 - RNA, 19 nt, Human
cagucucaggagcaugggg

SEQ ID NO: 2077087 - RNA, 17 nt, Human
cagucucacccagacuc

SEQ ID NO: 2077088 - RNA, 13 nt, Human
cagucucaggagc

SEQ ID NO: 2077089 - RNA, 14 nt, Human
cagucucaggagca

SEQ ID NO: 2077090 - RNA, 22 nt, Human
cagucugaugagaacucugagc

SEQ ID NO: 2077091 - RNA, 14 nt, Human
auugcuugcacaaa

SEQ ID NO: 2077092 - RNA, 16 nt, Human
auugcuuguuggauuu

SEQ ID NO: 2077093 - RNA, 15 nt, Human
auugcuugauacuuu

SEQ ID NO: 2077094 - RNA, 16 nt, Human
auugcuuaaaauagca

SEQ ID NO: 2077095 - RNA, 17 nt, Human
auugcuuaaaauagcaa

SEQ ID NO: 2077096 - RNA, 15 nt, Human
auugcuuugaaacua

SEQ ID NO: 2077097 - RNA, 13 nt, Human
auugcuuucugaa

SEQ ID NO: 2077098 - RNA, 15 nt, Human
auugcuuucugaaau

SEQ ID NO: 2077099 - RNA, 16 nt, Human
auugcuuucugaaauu

SEQ ID NO: 2077100 - RNA, 17 nt, Human
auugcuuucugaaauua

SEQ ID NO: 2077101 - RNA, 13 nt, Human
auugcuuuacugg

SEQ ID NO: 2077102 - RNA, 14 nt, Human
auugcuuuccacug

SEQ ID NO: 2077103 - RNA, 11 nt, Human
auugcuuucug

SEQ ID NO: 2077104 - RNA, 19 nt, Human
auugcuguguccaacucca

SEQ ID NO: 2077105 - RNA, 20 nt, Human
auugcuguguccaacuccag

SEQ ID NO: 2077106 - RNA, 21 nt, Human
auugcuguguccaacuccagu

SEQ ID NO: 2077107 - RNA, 22 nt, Human
auugcuguguccaacuccagua

SEQ ID NO: 2077108 - RNA, 23 nt, Human
auugcuguguccaacuccaguac

SEQ ID NO: 2077109 - RNA, 10 nt, Human
auuguaacuc

SEQ ID NO: 2077110 - RNA, 13 nt, Human
auuguaagauaaa

SEQ ID NO: 2077111 - RNA, 14 nt, Human
auuguaagauaaaa

SEQ ID NO: 2077112 - RNA, 16 nt, Human
auuguaagauaaaaaa

SEQ ID NO: 2077113 - RNA, 16 nt, Human
auuguguguuauuuaa

SEQ ID NO: 2077114 - RNA, 18 nt, Human
auuguguguuauuuaaau

SEQ ID NO: 2077115 - RNA, 22 nt, Human
auuguuaagucuaaauauuucc

SEQ ID NO: 2077116 - RNA, 21 nt, Human
auuguuaagucuaaauauuuc

SEQ ID NO: 2077117 - RNA, 14 nt, Human
auuguuaaaggcua

SEQ ID NO: 2077118 - RNA, 23 nt, Human
auuguuaagucuaaauauuuccu

SEQ ID NO: 2077119 - RNA, 13 nt, Human
auuguuaaaauaa

SEQ ID NO: 2077120 - RNA, 15 nt, Human
auuguuaaaauaacu

SEQ ID NO: 2077121 - RNA, 15 nt, Human
auuuaugaguuuuug

SEQ ID NO: 2077122 - RNA, 18 nt, Human
auuuaugaguuuuugaua

SEQ ID NO: 2077123 - RNA, 19 nt, Human
auuuaugaguuuuugauag

SEQ ID NO: 2077124 - RNA, 12 nt, Human
auuuauggagga

SEQ ID NO: 2077125 - RNA, 13 nt, Human
auuuaugaaaaga

SEQ ID NO: 2077126 - RNA, 20 nt, Human
auuuaucuguguuuuugaaa

SEQ ID NO: 2077127 - RNA, 19 nt, Human
auuuaucuugucucugggc

SEQ ID NO: 2077128 - RNA, 19 nt, Human
auuuaucugagucaacucc

SEQ ID NO: 2077129 - RNA, 20 nt, Human
auuuaucugggauuaugguu

SEQ ID NO: 2077130 - RNA, 16 nt, Human
auuuaucugugcaaau

SEQ ID NO: 2077131 - RNA, 22 nt, Human
auuuauauguauccaguacauu

SEQ ID NO: 2077132 - RNA, 20 nt, Human
auuuauauauuuauaacuca

SEQ ID NO: 2077133 - RNA, 17 nt, Human
auuuauaagcagauuua

SEQ ID NO: 2077134 - RNA, 14 nt, Human
auuuauaagcagau

SEQ ID NO: 2077135 - RNA, 22 nt, Human
auuuauaagcagauuuaacaau

SEQ ID NO: 2077136 - RNA, 22 nt, Human
auuuauaacucaucauaaaaua

SEQ ID NO: 2077137 - RNA, 23 nt, Human
auuuauaacucaucauaaaauaa

SEQ ID NO: 2077138 - RNA, 15 nt, Human
auuuauaacucauca

SEQ ID NO: 2077139 - RNA, 16 nt, Human
auuuauaacucaucau

SEQ ID NO: 2077140 - RNA, 17 nt, Human
auuuauaacucaucaua

SEQ ID NO: 2077141 - RNA, 18 nt, Human
auuuauaacucaucauaa

SEQ ID NO: 2077142 - RNA, 19 nt, Human
auuuauaacucaucauaaa

SEQ ID NO: 2077143 - RNA, 20 nt, Human
auuuauaacucaucauaaaa

SEQ ID NO: 2077144 - RNA, 21 nt, Human
auuuauaacucaucauaaaau

SEQ ID NO: 2077145 - RNA, 16 nt, Human
auuuaaugaaagacug

SEQ ID NO: 2077146 - RNA, 15 nt, Human
auuuaaugaaagacu

SEQ ID NO: 2077147 - RNA, 20 nt, Human
auuuaaugaaagacuguaca

SEQ ID NO: 2077148 - RNA, 21 nt, Human
auuuaaugaaagacuguacaa

SEQ ID NO: 2077149 - RNA, 11 nt, Human
auuuaauaaag

SEQ ID NO: 2077150 - RNA, 13 nt, Human
auuuaauaacaua

SEQ ID NO: 2077151 - RNA, 13 nt, Human
auuucugugggag

SEQ ID NO: 2077152 - RNA, 16 nt, Human
auuucugugggagaau

SEQ ID NO: 2077153 - RNA, 12 nt, Human
auuucuauuuau

SEQ ID NO: 2077154 - RNA, 13 nt, Human
auuucuaucccaa

SEQ ID NO: 2077155 - RNA, 16 nt, Human
auuucuauuuauuuac

SEQ ID NO: 2077156 - RNA, 13 nt, Human
auuucuauuuauu

SEQ ID NO: 2077157 - RNA, 17 nt, Human
auuucuauuuauuuacu

SEQ ID NO: 2077158 - RNA, 12 nt, Human
auuucuauuuuu

SEQ ID NO: 2077159 - RNA, 13 nt, Human
auucaauaagcau

SEQ ID NO: 2077160 - RNA, 18 nt, Human
auuaugcuguauuuucuu

SEQ ID NO: 2077161 - RNA, 16 nt, Human
auuauggaagauuuua

SEQ ID NO: 2077162 - RNA, 17 nt, Human
auuauggaagauuuuaa

SEQ ID NO: 2077163 - RNA, 20 nt, Human
auuauggaagauuuuaaauu

SEQ ID NO: 2077164 - RNA, 16 nt, Human
auucaaccacuguaaa

SEQ ID NO: 2077165 - RNA, 22 nt, Human
auucaaccacuguaaaaugaaa

SEQ ID NO: 2077166 - RNA, 19 nt, Human
auucaaccacuguaaaaug

SEQ ID NO: 2077167 - RNA, 15 nt, Human
auuagguuuuguaca

SEQ ID NO: 2077168 - RNA, 16 nt, Human
auuaguaaaugcuuau

SEQ ID NO: 2077169 - RNA, 21 nt, Human
auuagguuuuguacaauugaa

SEQ ID NO: 2077170 - RNA, 14 nt, Human
auuaguaaagaaau

SEQ ID NO: 2077171 - RNA, 18 nt, Human
auuaaauuaggaauaaau

SEQ ID NO: 2077172 - RNA, 16 nt, Human
auuaggauuucaugau

SEQ ID NO: 2077173 - RNA, 14 nt, Human
auuaggauuucaug

SEQ ID NO: 2077174 - RNA, 13 nt, Human
auuaaauuaggaa

SEQ ID NO: 2077175 - RNA, 22 nt, Human
auucuucuguacgucugacagg

SEQ ID NO: 2077176 - RNA, 20 nt, Human
auucuucugcuucagccucc

SEQ ID NO: 2077177 - RNA, 19 nt, Human
auucuucugcuucagccuc

SEQ ID NO: 2077178 - RNA, 21 nt, Human
auuccuuggcaugccuuccag

SEQ ID NO: 2077179 - RNA, 21 nt, Human
auucuccuuuuuaccccucua

SEQ ID NO: 2077180 - RNA, 11 nt, Human
auuccuuuccc

SEQ ID NO: 2077181 - RNA, 13 nt, Human
auuccuugauaau

SEQ ID NO: 2077182 - RNA, 20 nt, Human
auuccuugauaauguugugg

SEQ ID NO: 2077183 - RNA, 20 nt, Human
auuccuuggcaugccuucca

SEQ ID NO: 2077184 - RNA, 12 nt, Human
auuccuugugaa

SEQ ID NO: 2077185 - RNA, 15 nt, Human
auuccugcauuugug

SEQ ID NO: 2077186 - RNA, 19 nt, Human
auuccugcagccuggaggc

SEQ ID NO: 2077187 - RNA, 18 nt, Human
auuccugcauuugugaaa

SEQ ID NO: 2077188 - RNA, 14 nt, Human
auuccucagggaca

SEQ ID NO: 2077189 - RNA, 15 nt, Human
auuccugccugucuc

SEQ ID NO: 2077190 - RNA, 17 nt, Human
auuccugccugucuccu

SEQ ID NO: 2077191 - RNA, 10 nt, Human
auuccugggc

SEQ ID NO: 2077192 - RNA, 15 nt, Human
auuccuggagcccga

SEQ ID NO: 2077193 - RNA, 21 nt, Human
auuccuggagcccgaggcacc

SEQ ID NO: 2077194 - RNA, 23 nt, Human
auuccuggagcccgaggcaccag

SEQ ID NO: 2077195 - RNA, 20 nt, Human
auuccuuagcuuagaccuca

SEQ ID NO: 2077196 - RNA, 21 nt, Human
auuccuuagcuuagaccucag

SEQ ID NO: 2077197 - RNA, 24 nt, Human
auuccuuagcuuagaccucagccu

SEQ ID NO: 2077198 - RNA, 22 nt, Human
auuccuuagcuuagaccucagc

SEQ ID NO: 2077199 - RNA, 23 nt, Human
auuccuuagcuuagaccucagcc

SEQ ID NO: 2077200 - RNA, 22 nt, Human
caaaugagaaaaugucuuuauu

SEQ ID NO: 2077201 - RNA, 20 nt, Human
caaaugagaucuaagccuuu

SEQ ID NO: 2077202 - RNA, 18 nt, Human
caaaugcugcgcccuucc

SEQ ID NO: 2077203 - RNA, 19 nt, Human
caaaugcugcgcccuuccc

SEQ ID NO: 2077204 - RNA, 20 nt, Human
caaaugcugcgcccuucccc

SEQ ID NO: 2077205 - RNA, 21 nt, Human
caaaugcugcgcccuucccca

SEQ ID NO: 2077206 - RNA, 19 nt, Human
caacaaauuagguuuugua

SEQ ID NO: 2077207 - RNA, 21 nt, Human
caacaaauuagguuuuguaca

SEQ ID NO: 2077208 - RNA, 18 nt, Human
caaaugcaucaauccugu

SEQ ID NO: 2077209 - RNA, 19 nt, Human
caacaaagccaacagucaa

SEQ ID NO: 2077210 - RNA, 22 nt, Human
caaaugaccagcagauucaaau

SEQ ID NO: 2077211 - RNA, 13 nt, Human
caaaggguggaau

SEQ ID NO: 2077212 - RNA, 23 nt, Human
caaagggugaagcuauuuaucug

SEQ ID NO: 2077213 - RNA, 22 nt, Human
caaaguagaagucuuagaugua

SEQ ID NO: 2077214 - RNA, 19 nt, Human
caaaguaucaggacgagaa

SEQ ID NO: 2077215 - RNA, 19 nt, Human
caaagggugaagcuauuua

SEQ ID NO: 2077216 - RNA, 20 nt, Human
caaagggugaagcuauuuau

SEQ ID NO: 2077217 - RNA, 21 nt, Human
caaagggugaagcuauuuauc

SEQ ID NO: 2077218 - RNA, 11 nt, Human
caacacacaga

SEQ ID NO: 2077219 - RNA, 18 nt, Human
caacacaauguuauucgu

SEQ ID NO: 2077220 - RNA, 14 nt, Human
caacacacacacuc

SEQ ID NO: 2077221 - RNA, 14 nt, Human
caacacaagguggg

SEQ ID NO: 2077222 - RNA, 16 nt, Human
caacacaaggugggca

SEQ ID NO: 2077223 - RNA, 21 nt, Human
caacacaaggugggcagggag

SEQ ID NO: 2077224 - RNA, 21 nt, Human
caacaacauguauaauauuuu

SEQ ID NO: 2077225 - RNA, 22 nt, Human
caacaacauguauaauauuuuu

SEQ ID NO: 2077226 - RNA, 16 nt, Human
caacccccauuucuau

SEQ ID NO: 2077227 - RNA, 16 nt, Human
caaccccccaccugcc

SEQ ID NO: 2077228 - RNA, 17 nt, Human
caaccccccaccugcca

SEQ ID NO: 2077229 - RNA, 20 nt, Human
caaccagauugucagcuccu

SEQ ID NO: 2077230 - RNA, 19 nt, Human
caaccagauugucagcucc

SEQ ID NO: 2077231 - RNA, 21 nt, Human
caaccagaccauugucucaga

SEQ ID NO: 2077232 - RNA, 13 nt, Human
caaccagagcacu

SEQ ID NO: 2077233 - RNA, 15 nt, Human
caaccagagcacugu

SEQ ID NO: 2077234 - RNA, 16 nt, Human
caaccagagcacugua

SEQ ID NO: 2077235 - RNA, 18 nt, Human
caaccagagcacuguaua

SEQ ID NO: 2077236 - RNA, 20 nt, Human
caaccagagcacuguauacc

SEQ ID NO: 2077237 - RNA, 22 nt, Human
caaccauauggauauuagucau

SEQ ID NO: 2077238 - RNA, 18 nt, Human
caaccaucaaaguggcaa

SEQ ID NO: 2077239 - RNA, 12 nt, Human
caaccccugugg

SEQ ID NO: 2077240 - RNA, 14 nt, Human
caaccccuguggag

SEQ ID NO: 2077241 - RNA, 16 nt, Human
caaccccuguggagcc

SEQ ID NO: 2077242 - RNA, 22 nt, Human
caacuaacaagaaacucacccc

SEQ ID NO: 2077243 - RNA, 20 nt, Human
caagaugccaucuguguccu

SEQ ID NO: 2077244 - RNA, 15 nt, Human
caagaugucagacug

SEQ ID NO: 2077245 - RNA, 16 nt, Human
caagaugucagacugg

SEQ ID NO: 2077246 - RNA, 17 nt, Human
caagaugucagacuggc

SEQ ID NO: 2077247 - RNA, 14 nt, Human
caagaccagccugg

SEQ ID NO: 2077248 - RNA, 15 nt, Human
caagaccagccuggc

SEQ ID NO: 2077249 - RNA, 22 nt, Human
caaccccccaucacaaacuuaa

SEQ ID NO: 2077250 - RNA, 23 nt, Human
caacucagucccuaaaaacacag

SEQ ID NO: 2077251 - RNA, 14 nt, Human
caacuccuggaagc

SEQ ID NO: 2077252 - RNA, 17 nt, Human
caacuccuggaagcugu

SEQ ID NO: 2077253 - RNA, 21 nt, Human
caacuccuggaagcugugucc

SEQ ID NO: 2077254 - RNA, 22 nt, Human
caagaauugaagcaggacuaaa

SEQ ID NO: 2077255 - RNA, 19 nt, Human
caagaauucuccaaaacaa

SEQ ID NO: 2077256 - RNA, 21 nt, Human
caagaauucuccaaaacaauu

SEQ ID NO: 2077257 - RNA, 14 nt, Human
caaacauuucaaag

SEQ ID NO: 2077258 - RNA, 15 nt, Human
caaacauuucaaagu

SEQ ID NO: 2077259 - RNA, 21 nt, Human
caaaccccgaccaccugccca

SEQ ID NO: 2077260 - RNA, 18 nt, Human
caaaccccgaccaccugc

SEQ ID NO: 2077261 - RNA, 13 nt, Human
caaacccaugagg

SEQ ID NO: 2077262 - RNA, 13 nt, Human
caaaaggaagucu

SEQ ID NO: 2077263 - RNA, 20 nt, Human
caaacaugugguuaaugcca

SEQ ID NO: 2077264 - RNA, 14 nt, Human
auuuuuauauagcu

SEQ ID NO: 2077265 - RNA, 14 nt, Human
auuuuuauauuuaa

SEQ ID NO: 2077266 - RNA, 16 nt, Human
auuuuuuugagacaga

SEQ ID NO: 2077267 - RNA, 19 nt, Human
caaaagcugggcagguugg

SEQ ID NO: 2077268 - RNA, 19 nt, Human
caaaagaaucagaaacagg

SEQ ID NO: 2077269 - RNA, 14 nt, Human
caaaagaaguaaca

SEQ ID NO: 2077270 - RNA, 17 nt, Human
caaaagaaguaacaaga

SEQ ID NO: 2077271 - RNA, 19 nt, Human
caaaagaaguaacaagagu

SEQ ID NO: 2077272 - RNA, 22 nt, Human
caaaagaaguaacaagagugau

SEQ ID NO: 2077273 - RNA, 15 nt, Human
caaaagaaucagaaa

SEQ ID NO: 2077274 - RNA, 20 nt, Human
caaagauaaucucucagcuu

SEQ ID NO: 2077275 - RNA, 16 nt, Human
caaagauaaucucuca

SEQ ID NO: 2077276 - RNA, 14 nt, Human
auuuuuagacagag

SEQ ID NO: 2077277 - RNA, 18 nt, Human
auuuuuaauauguaagga

SEQ ID NO: 2077278 - RNA, 12 nt, Human
auuuuuauacag

SEQ ID NO: 2077279 - RNA, 13 nt, Human
auuuuuauacagu

SEQ ID NO: 2077280 - RNA, 16 nt, Human
auuuuuauacaguagu

SEQ ID NO: 2077281 - RNA, 20 nt, Human
auuuuuagaugguuacacug

SEQ ID NO: 2077282 - RNA, 22 nt, Human
auuuuuagaugguuacacuguu

SEQ ID NO: 2077283 - RNA, 23 nt, Human
auuuuuagaugguuacacuguua

SEQ ID NO: 2077284 - RNA, 19 nt, Human
auuuucugguaggaauagc

SEQ ID NO: 2077285 - RNA, 18 nt, Human
auuuuauguaaaauuuug

SEQ ID NO: 2077286 - RNA, 12 nt, Human
auuuuauguaug

SEQ ID NO: 2077287 - RNA, 14 nt, Human
auuuuauguauguu

SEQ ID NO: 2077288 - RNA, 16 nt, Human
auuuuauguauguuua

SEQ ID NO: 2077289 - RNA, 22 nt, Human
auuuuauguauguuuacacugu

SEQ ID NO: 2077290 - RNA, 23 nt, Human
auuuuauguauguuuacacuguc

SEQ ID NO: 2077291 - RNA, 15 nt, Human
auuuuagcugcagaa

SEQ ID NO: 2077292 - RNA, 16 nt, Human
auuuuagcugcagaac

SEQ ID NO: 2077293 - RNA, 14 nt, Human
auuuuauauaauaa

SEQ ID NO: 2077294 - RNA, 17 nt, Human
auuuuauauaauaaagu

SEQ ID NO: 2077295 - RNA, 19 nt, Human
auuuuauauaauaaaguau

SEQ ID NO: 2077296 - RNA, 22 nt, Human
auuuuauauaauaaaguauucc

SEQ ID NO: 2077297 - RNA, 17 nt, Human
auuuuaggcacccaucc

SEQ ID NO: 2077298 - RNA, 20 nt, Human
auuuugaauaaauaaaugua

SEQ ID NO: 2077299 - RNA, 18 nt, Human
auuuucuucaugcaauga

SEQ ID NO: 2077300 - RNA, 14 nt, Human
auuuucuucaguug

SEQ ID NO: 2077301 - RNA, 17 nt, Human
auuuucuucaguuggug

SEQ ID NO: 2077302 - RNA, 14 nt, Human
auuuucuucaugca

SEQ ID NO: 2077303 - RNA, 12 nt, Human
auuuugaagcua

SEQ ID NO: 2077304 - RNA, 13 nt, Human
auuuugaagcuaa

SEQ ID NO: 2077305 - RNA, 14 nt, Human
auuuugaagcuaau

SEQ ID NO: 2077306 - RNA, 15 nt, Human
auuuugaagcuaauu

SEQ ID NO: 2077307 - RNA, 18 nt, Human
auuuugaagcuaauuauu

SEQ ID NO: 2077308 - RNA, 21 nt, Human
auuuugaagcuaauuauuuua

SEQ ID NO: 2077309 - RNA, 23 nt, Human
auuuugaagcuaauuauuuuaau

SEQ ID NO: 2077310 - RNA, 21 nt, Human
auuuucuucaugcaaugacau

SEQ ID NO: 2077311 - RNA, 20 nt, Human
cagaaagguuuucuucuuuu

SEQ ID NO: 2077312 - RNA, 18 nt, Human
cagaaaguaauuucuucu

SEQ ID NO: 2077313 - RNA, 20 nt, Human
cagaaaguaauuucuucuca

SEQ ID NO: 2077314 - RNA, 22 nt, Human
cagaaaguaauuucuucucaaa

SEQ ID NO: 2077315 - RNA, 22 nt, Human
cagaaaguggccaugccacccu

SEQ ID NO: 2077316 - RNA, 23 nt, Human
cagaaaguggccaugccacccug

SEQ ID NO: 2077317 - RNA, 20 nt, Human
cagaaauaaaguuggugaca

SEQ ID NO: 2077318 - RNA, 22 nt, Human
cagaaagggagcagagaaggcc

SEQ ID NO: 2077319 - RNA, 16 nt, Human
cagaaaggauauuuaa

SEQ ID NO: 2077320 - RNA, 20 nt, Human
cagaaaggauauuuaagaaa

SEQ ID NO: 2077321 - RNA, 22 nt, Human
cagaaaggauauuuaagaaaau

SEQ ID NO: 2077322 - RNA, 12 nt, Human
cagaaaggagac

SEQ ID NO: 2077323 - RNA, 19 nt, Human
cagaaguuucucagcuccc

SEQ ID NO: 2077324 - RNA, 15 nt, Human
cagaaguuucucagc

SEQ ID NO: 2077325 - RNA, 19 nt, Human
cagaaaucuagaagacugu

SEQ ID NO: 2077326 - RNA, 22 nt, Human
cagaaauaccaaaauuauuuca

SEQ ID NO: 2077327 - RNA, 23 nt, Human
cagaaauaccaaaauuauuucag

SEQ ID NO: 2077328 - RNA, 15 nt, Human
cagaaauaugugguu

SEQ ID NO: 2077329 - RNA, 12 nt, Human
cagaacagccgc

SEQ ID NO: 2077330 - RNA, 17 nt, Human
cagaacagccgcuccug

SEQ ID NO: 2077331 - RNA, 20 nt, Human
cagaacagccgcuccugucu

SEQ ID NO: 2077332 - RNA, 23 nt, Human
cagaaauguacaacuuuuuaccu

SEQ ID NO: 2077333 - RNA, 13 nt, Human
cacugcagccucg

SEQ ID NO: 2077334 - RNA, 14 nt, Human
cacugcagccucga

SEQ ID NO: 2077335 - RNA, 22 nt, Human
cacugcagccucgaacuccugg

SEQ ID NO: 2077336 - RNA, 17 nt, Human
cacugccaugccagcuu

SEQ ID NO: 2077337 - RNA, 23 nt, Human
cacugcagccucaaccuccuggg

SEQ ID NO: 2077338 - RNA, 22 nt, Human
cacugcagccucaaccuccugg

SEQ ID NO: 2077339 - RNA, 21 nt, Human
cacugcagccucaaccuccug

SEQ ID NO: 2077340 - RNA, 20 nt, Human
cacugcagccucaaccuccu

SEQ ID NO: 2077341 - RNA, 14 nt, Human
cacugcagccucaa

SEQ ID NO: 2077342 - RNA, 19 nt, Human
cacugcagccucaaccucc

SEQ ID NO: 2077343 - RNA, 13 nt, Human
cacugggcuucua

SEQ ID NO: 2077344 - RNA, 20 nt, Human
cacugggguccuggggccuc

SEQ ID NO: 2077345 - RNA, 15 nt, Human
cacugggugggguga

SEQ ID NO: 2077346 - RNA, 18 nt, Human
cacuggguggggugagga

SEQ ID NO: 2077347 - RNA, 19 nt, Human
cacuggguggggugaggac

SEQ ID NO: 2077348 - RNA, 21 nt, Human
cacuggguggggugaggacca

SEQ ID NO: 2077349 - RNA, 23 nt, Human
cacuggguggggugaggaccacu

SEQ ID NO: 2077350 - RNA, 15 nt, Human
cacuggguugacuuu

SEQ ID NO: 2077351 - RNA, 23 nt, Human
cacuguugcccaggcuggcgugc

SEQ ID NO: 2077352 - RNA, 19 nt, Human
cacuguugcccaggcuggc

SEQ ID NO: 2077353 - RNA, 18 nt, Human
cacuguugcccaggcugg

SEQ ID NO: 2077354 - RNA, 14 nt, Human
cacuuaaaaaaugu

SEQ ID NO: 2077355 - RNA, 16 nt, Human
cacuuaaaaaaugucc

SEQ ID NO: 2077356 - RNA, 13 nt, Human
cacuugugugugg

SEQ ID NO: 2077357 - RNA, 13 nt, Human
cacuuaagacugu

SEQ ID NO: 2077358 - RNA, 13 nt, Human
cacuuaacagaug

SEQ ID NO: 2077359 - RNA, 15 nt, Human
cacuuaaauaucaau

SEQ ID NO: 2077360 - RNA, 23 nt, Human
cacuuaaauaucaaucauuuucc

SEQ ID NO: 2077361 - RNA, 21 nt, Human
cacuuaagacuguguauucua

SEQ ID NO: 2077362 - RNA, 23 nt, Human
cacuugugugugggcugugagug

SEQ ID NO: 2077363 - RNA, 21 nt, Human
cacuugugugugggcugugag

SEQ ID NO: 2077364 - RNA, 22 nt, Human
cacuugugugugggcugugagu

SEQ ID NO: 2077365 - RNA, 14 nt, Human
cacuuguguguggg

SEQ ID NO: 2077366 - RNA, 15 nt, Human
cacuugugugugggc

SEQ ID NO: 2077367 - RNA, 17 nt, Human
cacuugugugugggcug

SEQ ID NO: 2077368 - RNA, 19 nt, Human
cacuugugugugggcugug

SEQ ID NO: 2077369 - RNA, 18 nt, Human
cacuuguguuaugaagca

SEQ ID NO: 2077370 - RNA, 12 nt, Human
caccuacugagu

SEQ ID NO: 2077371 - RNA, 12 nt, Human
caccucagccuc

SEQ ID NO: 2077372 - RNA, 12 nt, Human
caccucagagcc

SEQ ID NO: 2077373 - RNA, 13 nt, Human
caccucagagccc

SEQ ID NO: 2077374 - RNA, 15 nt, Human
caccucagagccccg

SEQ ID NO: 2077375 - RNA, 16 nt, Human
caccucagagccccgc

SEQ ID NO: 2077376 - RNA, 13 nt, Human
caccuagaucaga

SEQ ID NO: 2077377 - RNA, 17 nt, Human
caccuagaaacuuguua

SEQ ID NO: 2077378 - RNA, 16 nt, Human
caccuaggccacuccu

SEQ ID NO: 2077379 - RNA, 17 nt, Human
caccuaggccacuccuc

SEQ ID NO: 2077380 - RNA, 18 nt, Human
caccuaggccacuccucc

SEQ ID NO: 2077381 - RNA, 19 nt, Human
caccuaggccacuccucca

SEQ ID NO: 2077382 - RNA, 14 nt, Human
caccuuucccaucu

SEQ ID NO: 2077383 - RNA, 20 nt, Human
caccuugggaugaugccuca

SEQ ID NO: 2077384 - RNA, 19 nt, Human
caccuugggaugaugccuc

SEQ ID NO: 2077385 - RNA, 15 nt, Human
caccuuucccuaaag

SEQ ID NO: 2077386 - RNA, 20 nt, Human
caccuuucccuaaagacccu

SEQ ID NO: 2077387 - RNA, 11 nt, Human
caccuuuuaaa

SEQ ID NO: 2077388 - RNA, 13 nt, Human
caccuuuuaaauc

SEQ ID NO: 2077389 - RNA, 15 nt, Human
caccuuuuaaauccu

SEQ ID NO: 2077390 - RNA, 23 nt, Human
caccuuuuaaauccuguugaaaa

SEQ ID NO: 2077391 - RNA, 18 nt, Human
caccuuuuaacucaccuc

SEQ ID NO: 2077392 - RNA, 16 nt, Human
caccuuggcugcaggg

SEQ ID NO: 2077393 - RNA, 15 nt, Human
caccuuggcugcagg

SEQ ID NO: 2077394 - RNA, 21 nt, Human
caccugcccccugguggacag

SEQ ID NO: 2077395 - RNA, 13 nt, Human
caccugcccccuu

SEQ ID NO: 2077396 - RNA, 18 nt, Human
caccuuggcugcagggag

SEQ ID NO: 2077397 - RNA, 13 nt, Human
caccugcccaacc

SEQ ID NO: 2077398 - RNA, 19 nt, Human
caccugcccaaccugcucu

SEQ ID NO: 2077399 - RNA, 18 nt, Human
caccugcccaaccugcuc

SEQ ID NO: 2077400 - RNA, 14 nt, Human
caccugcccccugg

SEQ ID NO: 2077401 - RNA, 15 nt, Human
caccugcccccuggu

SEQ ID NO: 2077402 - RNA, 11 nt, Human
caccucagccu

SEQ ID NO: 2077403 - RNA, 13 nt, Human
caccugcccagau

SEQ ID NO: 2077404 - RNA, 18 nt, Human
caccugcccaucacaggg

SEQ ID NO: 2077405 - RNA, 22 nt, Human
caccugcccaucacaggguugg

SEQ ID NO: 2077406 - RNA, 22 nt, Human
cacucuuauugcccacgcugga

SEQ ID NO: 2077407 - RNA, 21 nt, Human
cacucuuauugcccacgcugg

SEQ ID NO: 2077408 - RNA, 20 nt, Human
cacucuuauugcccacgcug

SEQ ID NO: 2077409 - RNA, 12 nt, Human
cacucuguuccu

SEQ ID NO: 2077410 - RNA, 16 nt, Human
cacucuuaagcuuccg

SEQ ID NO: 2077411 - RNA, 21 nt, Human
cacuacauuauaaaugucucu

SEQ ID NO: 2077412 - RNA, 21 nt, Human
cacuacaugcagcccaugccc

SEQ ID NO: 2077413 - RNA, 23 nt, Human
cacuacaugcagcccaugcccac

SEQ ID NO: 2077414 - RNA, 20 nt, Human
cacuacacuccagccugagc

SEQ ID NO: 2077415 - RNA, 21 nt, Human
cacuacacuccagccugagca

SEQ ID NO: 2077416 - RNA, 15 nt, Human
cacuacaugcagccc

SEQ ID NO: 2077417 - RNA, 22 nt, Human
cacuacccaucgguguccauuu

SEQ ID NO: 2077418 - RNA, 12 nt, Human
cacuccagccug

SEQ ID NO: 2077419 - RNA, 13 nt, Human
cacuccagccuga

SEQ ID NO: 2077420 - RNA, 13 nt, Human
cacuccagccugg

SEQ ID NO: 2077421 - RNA, 14 nt, Human
cacuccagccuggg

SEQ ID NO: 2077422 - RNA, 14 nt, Human
cacuccagccugag

SEQ ID NO: 2077423 - RNA, 15 nt, Human
cacuccagccugagc

SEQ ID NO: 2077424 - RNA, 21 nt, Human
cacuccagccugagcaacaga

SEQ ID NO: 2077425 - RNA, 20 nt, Human
cacucugucgcccagucugg

SEQ ID NO: 2077426 - RNA, 23 nt, Human
cacuccagccugggcgacagagc

SEQ ID NO: 2077427 - RNA, 21 nt, Human
cacuccagccugggcgacaga

SEQ ID NO: 2077428 - RNA, 15 nt, Human
cacuccagccugggc

SEQ ID NO: 2077429 - RNA, 16 nt, Human
cacuccagccugggcg

SEQ ID NO: 2077430 - RNA, 13 nt, Human
cacggccaggcca

SEQ ID NO: 2077431 - RNA, 12 nt, Human
cacggccaggcc

SEQ ID NO: 2077432 - RNA, 17 nt, Human
cacggccaggccagagg

SEQ ID NO: 2077433 - RNA, 14 nt, Human
cacggccaugacca

SEQ ID NO: 2077434 - RNA, 14 nt, Human
cacggcucacugca

SEQ ID NO: 2077435 - RNA, 15 nt, Human
cacggcucacugcag

SEQ ID NO: 2077436 - RNA, 22 nt, Human
cacggccagcugcaucuacuca

SEQ ID NO: 2077437 - RNA, 16 nt, Human
cacuacacuccagccu

SEQ ID NO: 2077438 - RNA, 17 nt, Human
cacuacacuccagccug

SEQ ID NO: 2077439 - RNA, 18 nt, Human
cacuacacuccagccuga

SEQ ID NO: 2077440 - RNA, 19 nt, Human
cacuacacuccagccugag

SEQ ID NO: 2077441 - RNA, 21 nt, Human
cacggcaggacaacgaggaag

SEQ ID NO: 2077442 - RNA, 22 nt, Human
cacggcaggacaacgaggaagc

SEQ ID NO: 2077443 - RNA, 23 nt, Human
cacggcaggacaacgaggaagcc

SEQ ID NO: 2077444 - RNA, 12 nt, Human
caagauuucaga

SEQ ID NO: 2077445 - RNA, 21 nt, Human
caagauugcuuaaaauagcaa

SEQ ID NO: 2077446 - RNA, 16 nt, Human
caagauugcuuaaaau

SEQ ID NO: 2077447 - RNA, 18 nt, Human
caagauugcuuaaaauag

SEQ ID NO: 2077448 - RNA, 19 nt, Human
caagauguccuccuuguuc

SEQ ID NO: 2077449 - RNA, 21 nt, Human
caagauguccuccuuguucua

SEQ ID NO: 2077450 - RNA, 13 nt, Human
caagauugcuuaa

SEQ ID NO: 2077451 - RNA, 17 nt, Human
caagauuuuccacaaga

SEQ ID NO: 2077452 - RNA, 18 nt, Human
caagauuuuccacaagau

SEQ ID NO: 2077453 - RNA, 13 nt, Human
caaggcaaggggu

SEQ ID NO: 2077454 - RNA, 18 nt, Human
caaggcaaggggugccug

SEQ ID NO: 2077455 - RNA, 20 nt, Human
caaggcaaggggugccuggg

SEQ ID NO: 2077456 - RNA, 21 nt, Human
caaggcaaggggugccuggga

SEQ ID NO: 2077457 - RNA, 14 nt, Human
caaggccagagugg

SEQ ID NO: 2077458 - RNA, 19 nt, Human
caaggccgcuguucaccca

SEQ ID NO: 2077459 - RNA, 20 nt, Human
caaggccgcuguucacccac

SEQ ID NO: 2077460 - RNA, 22 nt, Human
caaggccgcuguucacccacag

SEQ ID NO: 2077461 - RNA, 20 nt, Human
caaguuuucauaagcacacu

SEQ ID NO: 2077462 - RNA, 17 nt, Human
caaguuuccaagcaaau

SEQ ID NO: 2077463 - RNA, 18 nt, Human
caaguuuccaagcaaaug

SEQ ID NO: 2077464 - RNA, 22 nt, Human
caaguuuccaagcaaauguuac

SEQ ID NO: 2077465 - RNA, 16 nt, Human
caaguuguuucauuga

SEQ ID NO: 2077466 - RNA, 14 nt, Human
caaggccugucccu

SEQ ID NO: 2077467 - RNA, 16 nt, Human
caaggccugucccugg

SEQ ID NO: 2077468 - RNA, 17 nt, Human
caaggccugucccuggc

SEQ ID NO: 2077469 - RNA, 18 nt, Human
caaggccugucccuggcc

SEQ ID NO: 2077470 - RNA, 15 nt, Human
caaggcucugagcaa

SEQ ID NO: 2077471 - RNA, 19 nt, Human
caaggcuagaucaugaaga

SEQ ID NO: 2077472 - RNA, 19 nt, Human
caaggcgggagcaucucuu

SEQ ID NO: 2077473 - RNA, 16 nt, Human
caagucaugugcauuu

SEQ ID NO: 2077474 - RNA, 13 nt, Human
caagucaugugca

SEQ ID NO: 2077475 - RNA, 20 nt, Human
caagucagcuuugccuucca

SEQ ID NO: 2077476 - RNA, 19 nt, Human
caagucagcuuugccuucc

SEQ ID NO: 2077477 - RNA, 16 nt, Human
caaggcgugaggaugg

SEQ ID NO: 2077478 - RNA, 18 nt, Human
caaggcugaccaagagag

SEQ ID NO: 2077479 - RNA, 19 nt, Human
caaggcugaccaagagaga

SEQ ID NO: 2077480 - RNA, 13 nt, Human
caauaaaaucaug

SEQ ID NO: 2077481 - RNA, 20 nt, Human
caauaaaaucuugaaaaugc

SEQ ID NO: 2077482 - RNA, 14 nt, Human
caauaaaaucaugu

SEQ ID NO: 2077483 - RNA, 15 nt, Human
caauaaaaucaugua

SEQ ID NO: 2077484 - RNA, 20 nt, Human
caauaaaaucauguacauuu

SEQ ID NO: 2077485 - RNA, 15 nt, Human
caauaaaaugugauu

SEQ ID NO: 2077486 - RNA, 16 nt, Human
caauaaaaugugauuu

SEQ ID NO: 2077487 - RNA, 20 nt, Human
caauaaaaugugauuuuucu

SEQ ID NO: 2077488 - RNA, 21 nt, Human
caauaaaaugugauuuuucug

SEQ ID NO: 2077489 - RNA, 22 nt, Human
caauaaaaugugauuuuucuga

SEQ ID NO: 2077490 - RNA, 22 nt, Human
caaucccaccaacccucagagc

SEQ ID NO: 2077491 - RNA, 17 nt, Human
caaucccaccaacccuc

SEQ ID NO: 2077492 - RNA, 16 nt, Human
caaucccaccaacccu

SEQ ID NO: 2077493 - RNA, 21 nt, Human
caauccauguuaguuuuuacu

SEQ ID NO: 2077494 - RNA, 23 nt, Human
caauccauguuaguuuuuacuuu

SEQ ID NO: 2077495 - RNA, 17 nt, Human
caauccagcgguucuca

SEQ ID NO: 2077496 - RNA, 17 nt, Human
caaucaugaaauaugca

SEQ ID NO: 2077497 - RNA, 16 nt, Human
caauggcagccuuggc

SEQ ID NO: 2077498 - RNA, 15 nt, Human
caauggccuaaacuu

SEQ ID NO: 2077499 - RNA, 21 nt, Human
caaugcuggcuguuggcuggg

SEQ ID NO: 2077500 - RNA, 20 nt, Human
caaugcuggcuguuggcugg

SEQ ID NO: 2077501 - RNA, 13 nt, Human
caaugcuggcugu

SEQ ID NO: 2077502 - RNA, 17 nt, Human
caauccuaacacauuau

SEQ ID NO: 2077503 - RNA, 22 nt, Human
caauccuaacacauuaucggga

SEQ ID NO: 2077504 - RNA, 23 nt, Human
caaucccaccaacccucagagcc

SEQ ID NO: 2077505 - RNA, 22 nt, Human
caauccauguuaguuuuuacuu

SEQ ID NO: 2077506 - RNA, 15 nt, Human
caauccccucauuca

SEQ ID NO: 2077507 - RNA, 21 nt, Human
caauccccucauucaggaaaa

SEQ ID NO: 2077508 - RNA, 22 nt, Human
caauccccucauucaggaaaac

SEQ ID NO: 2077509 - RNA, 18 nt, Human
caauggcuuacuccagga

SEQ ID NO: 2077510 - RNA, 21 nt, Human
caauugaauuaaauuaggaau

SEQ ID NO: 2077511 - RNA, 17 nt, Human
caauuuccaagagcuga

SEQ ID NO: 2077512 - RNA, 14 nt, Human
caauugcugcaucu

SEQ ID NO: 2077513 - RNA, 18 nt, Human
caauugcugcaucuuagu

SEQ ID NO: 2077514 - RNA, 20 nt, Human
caauugcuuacucauuaaaa

SEQ ID NO: 2077515 - RNA, 14 nt, Human
cacaagauucccag

SEQ ID NO: 2077516 - RNA, 19 nt, Human
cacagaagacuucccagcu

SEQ ID NO: 2077517 - RNA, 20 nt, Human
cacagaagacuucccagcuu

SEQ ID NO: 2077518 - RNA, 14 nt, Human
cacagcucuguccu

SEQ ID NO: 2077519 - RNA, 11 nt, Human
cacagcucugu

SEQ ID NO: 2077520 - RNA, 19 nt, Human
cacagcucuguccugggag

SEQ ID NO: 2077521 - RNA, 18 nt, Human
cacagcucuguccuggga

SEQ ID NO: 2077522 - RNA, 16 nt, Human
cacagcucuguccugg

SEQ ID NO: 2077523 - RNA, 15 nt, Human
cacagcucuguccug

SEQ ID NO: 2077524 - RNA, 15 nt, Human
cacagcucuucucca

SEQ ID NO: 2077525 - RNA, 14 nt, Human
cacagcucuucucc

SEQ ID NO: 2077526 - RNA, 17 nt, Human
cacagcucuucuccagg

SEQ ID NO: 2077527 - RNA, 19 nt, Human
cacacuuguuccagcucuu

SEQ ID NO: 2077528 - RNA, 20 nt, Human
cacacuuguuccagcucuuu

SEQ ID NO: 2077529 - RNA, 17 nt, Human
cacacuuuuuaagaaau

SEQ ID NO: 2077530 - RNA, 14 nt, Human
cacagaaaacuaga

SEQ ID NO: 2077531 - RNA, 15 nt, Human
cacagaaaacuagaa

SEQ ID NO: 2077532 - RNA, 13 nt, Human
cacagaacccuug

SEQ ID NO: 2077533 - RNA, 18 nt, Human
cacagaaagacugagcuc

SEQ ID NO: 2077534 - RNA, 22 nt, Human
cacagaaagacugagcucaagg

SEQ ID NO: 2077535 - RNA, 11 nt, Human
cacagaaagag

SEQ ID NO: 2077536 - RNA, 13 nt, Human
cacagaaagagag

SEQ ID NO: 2077537 - RNA, 14 nt, Human
cacagaaagagagc

SEQ ID NO: 2077538 - RNA, 15 nt, Human
cacagaaagagagca

SEQ ID NO: 2077539 - RNA, 18 nt, Human
cacagaaagagagcacug

SEQ ID NO: 2077540 - RNA, 15 nt, Human
cacagaaagacugag

SEQ ID NO: 2077541 - RNA, 16 nt, Human
cacagaaaccaauuuu

SEQ ID NO: 2077542 - RNA, 13 nt, Human
caccagggaagau

SEQ ID NO: 2077543 - RNA, 22 nt, Human
cacccaugaagacaggacagug

SEQ ID NO: 2077544 - RNA, 16 nt, Human
cacccaggagccccga

SEQ ID NO: 2077545 - RNA, 18 nt, Human
cacccaccucagccuccc

SEQ ID NO: 2077546 - RNA, 23 nt, Human
cacccagcccauucucucuccug

SEQ ID NO: 2077547 - RNA, 16 nt, Human
caccagccccagugcc

SEQ ID NO: 2077548 - RNA, 15 nt, Human
caccaggcugugggc

SEQ ID NO: 2077549 - RNA, 16 nt, Human
caccaggcugugggcc

SEQ ID NO: 2077550 - RNA, 17 nt, Human
caccaggcugugggccu

SEQ ID NO: 2077551 - RNA, 13 nt, Human
caccagccccagu

SEQ ID NO: 2077552 - RNA, 17 nt, Human
cacccaccucagccucc

SEQ ID NO: 2077553 - RNA, 16 nt, Human
caccagggaugguacu

SEQ ID NO: 2077554 - RNA, 18 nt, Human
caccaggcugugggccuc

SEQ ID NO: 2077555 - RNA, 20 nt, Human
caccaggcuugccugcaggc

SEQ ID NO: 2077556 - RNA, 22 nt, Human
caccccacccccuucagugccc

SEQ ID NO: 2077557 - RNA, 13 nt, Human
caccccacccccu

SEQ ID NO: 2077558 - RNA, 11 nt, Human
caccccacacu

SEQ ID NO: 2077559 - RNA, 12 nt, Human
caccccacacuu

SEQ ID NO: 2077560 - RNA, 13 nt, Human
cacaucugcauuu

SEQ ID NO: 2077561 - RNA, 21 nt, Human
cacaucugcauuuucacccca

SEQ ID NO: 2077562 - RNA, 22 nt, Human
cacaucuccuccauacucagga

SEQ ID NO: 2077563 - RNA, 12 nt, Human
cacaucuucccu

SEQ ID NO: 2077564 - RNA, 17 nt, Human
caccaacaucccauugc

SEQ ID NO: 2077565 - RNA, 22 nt, Human
caccaacaucccauugcccugg

SEQ ID NO: 2077566 - RNA, 19 nt, Human
caccaacccaucagaagga

SEQ ID NO: 2077567 - RNA, 14 nt, Human
cacaucuuccacag

SEQ ID NO: 2077568 - RNA, 13 nt, Human
caccaacccucag

SEQ ID NO: 2077569 - RNA, 23 nt, Human
caccaacaucccauugcccuggu

SEQ ID NO: 2077570 - RNA, 15 nt, Human
ggaagagaaaaaaua

SEQ ID NO: 2077571 - RNA, 13 nt, Human
ggaagagaaacca

SEQ ID NO: 2077572 - RNA, 12 nt, Human
ggaagagaaaca

SEQ ID NO: 2077573 - RNA, 13 nt, Human
ggaagagaaacag

SEQ ID NO: 2077574 - RNA, 14 nt, Human
ggaagagaaacagg

SEQ ID NO: 2077575 - RNA, 13 nt, Human
ggaagagaaaaaa

SEQ ID NO: 2077576 - RNA, 22 nt, Human
ggaagacaaugugaaaagaaaa

SEQ ID NO: 2077577 - RNA, 21 nt, Human
ggaacuugagcgugaaucugu

SEQ ID NO: 2077578 - RNA, 22 nt, Human
ggaagacauggggaggaaggac

SEQ ID NO: 2077579 - RNA, 11 nt, Human
ggaacagaagg

SEQ ID NO: 2077580 - RNA, 12 nt, Human
ggaacagaagga

SEQ ID NO: 2077581 - RNA, 13 nt, Human
ggaacagaaggau

SEQ ID NO: 2077582 - RNA, 19 nt, Human
ggaacagaaggaugaauga

SEQ ID NO: 2077583 - RNA, 17 nt, Human
ggaacagacaggagaaa

SEQ ID NO: 2077584 - RNA, 13 nt, Human
ggaacagacagga

SEQ ID NO: 2077585 - RNA, 15 nt, Human
ggaacagacaggaga

SEQ ID NO: 2077586 - RNA, 16 nt, Human
ggaacagacaggagaa

SEQ ID NO: 2077587 - RNA, 18 nt, Human
ggaacagacaacagaagu

SEQ ID NO: 2077588 - RNA, 20 nt, Human
ggaacagacaacagaaguca

SEQ ID NO: 2077589 - RNA, 21 nt, Human
ggaacagacaacagaagucau

SEQ ID NO: 2077590 - RNA, 21 nt, Human
ggaagcgugaaggccgagaag

SEQ ID NO: 2077591 - RNA, 22 nt, Human
ggaagcgugaaggccgagaagc

SEQ ID NO: 2077592 - RNA, 11 nt, Human
ggaagcccucc

SEQ ID NO: 2077593 - RNA, 12 nt, Human
ggaagcccuccu

SEQ ID NO: 2077594 - RNA, 15 nt, Human
ggaagcccuccuucc

SEQ ID NO: 2077595 - RNA, 16 nt, Human
ggaagcccuccuucca

SEQ ID NO: 2077596 - RNA, 17 nt, Human
ggaagcccuccuuccac

SEQ ID NO: 2077597 - RNA, 12 nt, Human
ggaagcccugga

SEQ ID NO: 2077598 - RNA, 11 nt, Human
ggaagcccugg

SEQ ID NO: 2077599 - RNA, 15 nt, Human
ggaagcccuggauuu

SEQ ID NO: 2077600 - RNA, 23 nt, Human
ggaagcccuggauuucagaaaga

SEQ ID NO: 2077601 - RNA, 19 nt, Human
ggaaggaaagaaagaagga

SEQ ID NO: 2077602 - RNA, 17 nt, Human
ggaaggaccuauguuug

SEQ ID NO: 2077603 - RNA, 19 nt, Human
ggaaggaccuauguuugcu

SEQ ID NO: 2077604 - RNA, 15 nt, Human
ggaaggagacucacc

SEQ ID NO: 2077605 - RNA, 20 nt, Human
ggaaggagacucaccucugc

SEQ ID NO: 2077606 - RNA, 12 nt, Human
ggaaggagagaa

SEQ ID NO: 2077607 - RNA, 17 nt, Human
ggaaguuuguguucugu

SEQ ID NO: 2077608 - RNA, 11 nt, Human
ggaaguuuuca

SEQ ID NO: 2077609 - RNA, 21 nt, Human
ggaaggagacucaccucugcc

SEQ ID NO: 2077610 - RNA, 22 nt, Human
ggaaggagacucaccucugccu

SEQ ID NO: 2077611 - RNA, 13 nt, Human
ggaaggagagccu

SEQ ID NO: 2077612 - RNA, 13 nt, Human
ggaagcugcuccg

SEQ ID NO: 2077613 - RNA, 15 nt, Human
ggaagcugcuccgug

SEQ ID NO: 2077614 - RNA, 17 nt, Human
ggaagcuguguccuugc

SEQ ID NO: 2077615 - RNA, 18 nt, Human
ggaagcuggccgaggguc

SEQ ID NO: 2077616 - RNA, 13 nt, Human
ggaagcuccuggu

SEQ ID NO: 2077617 - RNA, 18 nt, Human
ggaagcucugaagucaca

SEQ ID NO: 2077618 - RNA, 21 nt, Human
ggaagcuguguccuugcaccu

SEQ ID NO: 2077619 - RNA, 23 nt, Human
ggaagcuguguccuugcaccugc

SEQ ID NO: 2077620 - RNA, 19 nt, Human
ggaagcuucuuaaaugaga

SEQ ID NO: 2077621 - RNA, 22 nt, Human
ggaagcuuucucugcuucagcu

SEQ ID NO: 2077622 - RNA, 11 nt, Human
ggaagcuccgc

SEQ ID NO: 2077623 - RNA, 20 nt, Human
ggaagcuccaguccugcucu

SEQ ID NO: 2077624 - RNA, 18 nt, Human
ggaauaacauguaauuaa

SEQ ID NO: 2077625 - RNA, 20 nt, Human
ggaauaaggccuuaauaugu

SEQ ID NO: 2077626 - RNA, 21 nt, Human
ggaaguuuuguggaggagcuc

SEQ ID NO: 2077627 - RNA, 18 nt, Human
ggaaguuuugcauuuaug

SEQ ID NO: 2077628 - RNA, 23 nt, Human
ggaaucagacuucacacugcaag

SEQ ID NO: 2077629 - RNA, 15 nt, Human
ggaauaauagaagaa

SEQ ID NO: 2077630 - RNA, 21 nt, Human
ggaaucagacuucacacugca

SEQ ID NO: 2077631 - RNA, 16 nt, Human
ggaauccagacccggc

SEQ ID NO: 2077632 - RNA, 15 nt, Human
ggaaucuagaagaaa

SEQ ID NO: 2077633 - RNA, 16 nt, Human
ggaaucuagaagaaau

SEQ ID NO: 2077634 - RNA, 17 nt, Human
ggaaucuagaagaaaug

SEQ ID NO: 2077635 - RNA, 18 nt, Human
ggaaucuagaagaaauga

SEQ ID NO: 2077636 - RNA, 19 nt, Human
ggaaucuagaagaaaugaa

SEQ ID NO: 2077637 - RNA, 19 nt, Human
ggaaucgaggaaccagagc

SEQ ID NO: 2077638 - RNA, 20 nt, Human
ggaaucgaggaaccagagcc

SEQ ID NO: 2077639 - RNA, 21 nt, Human
ggaaucgaggaaccagagcca

SEQ ID NO: 2077640 - RNA, 14 nt, Human
ggaauccuguccuc

SEQ ID NO: 2077641 - RNA, 19 nt, Human
ggaauccuguccucagcuu

SEQ ID NO: 2077642 - RNA, 15 nt, Human
ggacaacgaggaagc

SEQ ID NO: 2077643 - RNA, 17 nt, Human
ggacaacgaggaagccc

SEQ ID NO: 2077644 - RNA, 18 nt, Human
ggaaugaagauaccauca

SEQ ID NO: 2077645 - RNA, 16 nt, Human
ggacaacgaggaagcc

SEQ ID NO: 2077646 - RNA, 17 nt, Human
ggacacuaaccacgcug

SEQ ID NO: 2077647 - RNA, 22 nt, Human
ggacacggggcaguggcaaccu

SEQ ID NO: 2077648 - RNA, 19 nt, Human
ggacagcuccuucuguccu

SEQ ID NO: 2077649 - RNA, 22 nt, Human
ggacacuaaccacgcuggaccu

SEQ ID NO: 2077650 - RNA, 20 nt, Human
ggacagcuccuucuguccua

SEQ ID NO: 2077651 - RNA, 18 nt, Human
ggacacagcucuucucca

SEQ ID NO: 2077652 - RNA, 15 nt, Human
ggacacagcucuucu

SEQ ID NO: 2077653 - RNA, 21 nt, Human
ggacacagcucuucuccaggc

SEQ ID NO: 2077654 - RNA, 18 nt, Human
ggacaccuguacuggaga

SEQ ID NO: 2077655 - RNA, 19 nt, Human
ggacaccuguacuggagag

SEQ ID NO: 2077656 - RNA, 21 nt, Human
ggacaccuguacuggagagca

SEQ ID NO: 2077657 - RNA, 22 nt, Human
ggacaaggcuagaucaugaaga

SEQ ID NO: 2077658 - RNA, 14 nt, Human
ggacacagcucuuc

SEQ ID NO: 2077659 - RNA, 21 nt, Human
ggacaaucaugaaauaugcau

SEQ ID NO: 2077660 - RNA, 19 nt, Human
ggacaaucaugaaauaugc

SEQ ID NO: 2077661 - RNA, 23 nt, Human
ggacaggcauguucucugaggac

SEQ ID NO: 2077662 - RNA, 13 nt, Human
ggacaggcagaaa

SEQ ID NO: 2077663 - RNA, 15 nt, Human
ggacaggcagaaaga

SEQ ID NO: 2077664 - RNA, 16 nt, Human
ggacaggcagaaagag

SEQ ID NO: 2077665 - RNA, 17 nt, Human
ggacaggcagaaagagu

SEQ ID NO: 2077666 - RNA, 13 nt, Human
ggacaggcaggug

SEQ ID NO: 2077667 - RNA, 15 nt, Human
ggacccucgcuggcc

SEQ ID NO: 2077668 - RNA, 17 nt, Human
ggacccucgcuggcccc

SEQ ID NO: 2077669 - RNA, 18 nt, Human
ggacccucgcuggccccc

SEQ ID NO: 2077670 - RNA, 20 nt, Human
ggacccucgcuggcccccac

SEQ ID NO: 2077671 - RNA, 21 nt, Human
ggacccucgcuggcccccacu

SEQ ID NO: 2077672 - RNA, 18 nt, Human
ggacguccugccaccugg

SEQ ID NO: 2077673 - RNA, 22 nt, Human
ggacguccugccaccuggggca

SEQ ID NO: 2077674 - RNA, 18 nt, Human
ggacggcauuccugcuua

SEQ ID NO: 2077675 - RNA, 21 nt, Human
ggacggccugaugcucccucc

SEQ ID NO: 2077676 - RNA, 22 nt, Human
ggacggccugaugcucccuccc

SEQ ID NO: 2077677 - RNA, 16 nt, Human
ggaccgaguagaggca

SEQ ID NO: 2077678 - RNA, 17 nt, Human
ggaccgaguagaggcau

SEQ ID NO: 2077679 - RNA, 15 nt, Human
ggaccgccaaagaau

SEQ ID NO: 2077680 - RNA, 22 nt, Human
ggacccuuuccuuccuucccug

SEQ ID NO: 2077681 - RNA, 21 nt, Human
ggacccuucccuugagcccuc

SEQ ID NO: 2077682 - RNA, 12 nt, Human
ggacccuuuccu

SEQ ID NO: 2077683 - RNA, 16 nt, Human
ggacccuuuccuuccu

SEQ ID NO: 2077684 - RNA, 17 nt, Human
ggacccuuuccuuccuu

SEQ ID NO: 2077685 - RNA, 21 nt, Human
ggacccuuuccuuccuucccu

SEQ ID NO: 2077686 - RNA, 23 nt, Human
ggacccuuuccuuccuucccugg

SEQ ID NO: 2077687 - RNA, 14 nt, Human
ggacuacaggugug

SEQ ID NO: 2077688 - RNA, 15 nt, Human
ggacucaaugcacug

SEQ ID NO: 2077689 - RNA, 16 nt, Human
ggacucaaguuucuuc

SEQ ID NO: 2077690 - RNA, 14 nt, Human
ggacuauuauaauu

SEQ ID NO: 2077691 - RNA, 18 nt, Human
ggacucaaugcacugaca

SEQ ID NO: 2077692 - RNA, 16 nt, Human
ggacucaaugcacuga

SEQ ID NO: 2077693 - RNA, 17 nt, Human
ggacucaggaugcccag

SEQ ID NO: 2077694 - RNA, 18 nt, Human
ggacucaggaugcccagg

SEQ ID NO: 2077695 - RNA, 19 nt, Human
ggacucaggaugcccaggg

SEQ ID NO: 2077696 - RNA, 20 nt, Human
ggacucaggaugcccagggc

SEQ ID NO: 2077697 - RNA, 24 nt, Human
ggacucauuucauuccuaacacag

SEQ ID NO: 2077698 - RNA, 22 nt, Human
ggacuccagaucugcaccgccg

SEQ ID NO: 2077699 - RNA, 10 nt, Human
ggacuccagc

SEQ ID NO: 2077700 - RNA, 21 nt, Human
ggacuuucuuuucgccguggc

SEQ ID NO: 2077701 - RNA, 16 nt, Human
ggacuuuccacccccu

SEQ ID NO: 2077702 - RNA, 17 nt, Human
ggacuuuccacccccuc

SEQ ID NO: 2077703 - RNA, 20 nt, Human
ggacuuuccacccccucccu

SEQ ID NO: 2077704 - RNA, 21 nt, Human
ggacuuuccacccccucccug

SEQ ID NO: 2077705 - RNA, 20 nt, Human
ggacuuuauagaucagccag

SEQ ID NO: 2077706 - RNA, 14 nt, Human
ggacuuggaagcuc

SEQ ID NO: 2077707 - RNA, 20 nt, Human
ggacucccuccucaccucug

SEQ ID NO: 2077708 - RNA, 22 nt, Human
ggacucccuccucaccucugga

SEQ ID NO: 2077709 - RNA, 23 nt, Human
ggacuugaaagcauccaugugug

SEQ ID NO: 2077710 - RNA, 15 nt, Human
ggagaaacagagaca

SEQ ID NO: 2077711 - RNA, 23 nt, Human
ggacuuucuuuucgccguggcug

SEQ ID NO: 2077712 - RNA, 16 nt, Human
ggagaaacagagacag

SEQ ID NO: 2077713 - RNA, 19 nt, Human
ggagaaacccuugaaaaga

SEQ ID NO: 2077714 - RNA, 9 nt, Human
ggagacuca

SEQ ID NO: 2077715 - RNA, 13 nt, Human
ggagacucaccuc

SEQ ID NO: 2077716 - RNA, 16 nt, Human
ggagacucaccucugc

SEQ ID NO: 2077717 - RNA, 17 nt, Human
ggagacucaccucugcc

SEQ ID NO: 2077718 - RNA, 18 nt, Human
ggagacucaccucugccu

SEQ ID NO: 2077719 - RNA, 19 nt, Human
ggagacucaccucugccuc

SEQ ID NO: 2077720 - RNA, 21 nt, Human
ggagacucaccucugccucaa

SEQ ID NO: 2077721 - RNA, 18 nt, Human
ggagacuccaugagaagc

SEQ ID NO: 2077722 - RNA, 21 nt, Human
ggagacuccaugagaagccgu

SEQ ID NO: 2077723 - RNA, 13 nt, Human
ggagacucugugg

SEQ ID NO: 2077724 - RNA, 16 nt, Human
ggagacucuguggggc

SEQ ID NO: 2077725 - RNA, 13 nt, Human
gcuggaggcaggg

SEQ ID NO: 2077726 - RNA, 14 nt, Human
gcuggaggcagggc

SEQ ID NO: 2077727 - RNA, 15 nt, Human
gcuggaggcagggcc

SEQ ID NO: 2077728 - RNA, 12 nt, Human
gcuggaggcagg

SEQ ID NO: 2077729 - RNA, 16 nt, Human
gcuggaggcagggccu

SEQ ID NO: 2077730 - RNA, 21 nt, Human
gcuggaggcagggccuugccc

SEQ ID NO: 2077731 - RNA, 22 nt, Human
gcuggagugcagugagccgaga

SEQ ID NO: 2077732 - RNA, 17 nt, Human
gcuggagugcagugagc

SEQ ID NO: 2077733 - RNA, 18 nt, Human
gcuggagugcagugagcc

SEQ ID NO: 2077734 - RNA, 20 nt, Human
gcuggcgugcaguggugcga

SEQ ID NO: 2077735 - RNA, 15 nt, Human
gcugcuggcuugcag

SEQ ID NO: 2077736 - RNA, 11 nt, Human
gcugcuggcuu

SEQ ID NO: 2077737 - RNA, 12 nt, Human
gcugcuggagga

SEQ ID NO: 2077738 - RNA, 14 nt, Human
gcugcuggaggaaa

SEQ ID NO: 2077739 - RNA, 22 nt, Human
gcugcuggaggaaaacugagac

SEQ ID NO: 2077740 - RNA, 14 nt, Human
gcugcugcugcugc

SEQ ID NO: 2077741 - RNA, 20 nt, Human
gcucugcccucccuccuucc

SEQ ID NO: 2077742 - RNA, 13 nt, Human
gcucugcccugcc

SEQ ID NO: 2077743 - RNA, 15 nt, Human
gcucugcccugcccu

SEQ ID NO: 2077744 - RNA, 23 nt, Human
gcuggguggcaccagcagccugg

SEQ ID NO: 2077745 - RNA, 21 nt, Human
gcuggguggcaccagcagccu

SEQ ID NO: 2077746 - RNA, 22 nt, Human
gcuggguggcaccagcagccug

SEQ ID NO: 2077747 - RNA, 16 nt, Human
gcuggcucccagggcc

SEQ ID NO: 2077748 - RNA, 17 nt, Human
gcuggcucccagggcca

SEQ ID NO: 2077749 - RNA, 19 nt, Human
gcuggcucccagggccaug

SEQ ID NO: 2077750 - RNA, 20 nt, Human
gcuggcggcuacucagcagc

SEQ ID NO: 2077751 - RNA, 16 nt, Human
gcuggcggcuacucag

SEQ ID NO: 2077752 - RNA, 17 nt, Human
gcuggcuguuggcuggg

SEQ ID NO: 2077753 - RNA, 16 nt, Human
gcuggcuguuggcugg

SEQ ID NO: 2077754 - RNA, 15 nt, Human
gcuggcuguuggcug

SEQ ID NO: 2077755 - RNA, 11 nt, Human
gcuggcugggg

SEQ ID NO: 2077756 - RNA, 21 nt, Human
gcuggcugggggccucacucc

SEQ ID NO: 2077757 - RNA, 15 nt, Human
gcuggcugggcaugg

SEQ ID NO: 2077758 - RNA, 16 nt, Human
gcuggcugggcaugga

SEQ ID NO: 2077759 - RNA, 15 nt, Human
gcuuugacugagcag

SEQ ID NO: 2077760 - RNA, 22 nt, Human
gcuuugacugagcagacuggug

SEQ ID NO: 2077761 - RNA, 22 nt, Human
gcuuccucauaguaugguggcu

SEQ ID NO: 2077762 - RNA, 19 nt, Human
gcuucuucccuuaaaauuu

SEQ ID NO: 2077763 - RNA, 20 nt, Human
gcuucuucccuuaaaauuua

SEQ ID NO: 2077764 - RNA, 19 nt, Human
gcuucuucagaucagugcu

SEQ ID NO: 2077765 - RNA, 16 nt, Human
gcuucuucagaucagu

SEQ ID NO: 2077766 - RNA, 17 nt, Human
gcuucuaccaacuggaa

SEQ ID NO: 2077767 - RNA, 18 nt, Human
gcuucuaccaacuggaag

SEQ ID NO: 2077768 - RNA, 19 nt, Human
gcuucuaccaacuggaagc

SEQ ID NO: 2077769 - RNA, 20 nt, Human
gcuucuaccaacuggaagca

SEQ ID NO: 2077770 - RNA, 22 nt, Human
gcuucuaccaacuggaagcaca

SEQ ID NO: 2077771 - RNA, 18 nt, Human
gcuuccugacaaucaacu

SEQ ID NO: 2077772 - RNA, 22 nt, Human
gcuuguaacuccaccaacccau

SEQ ID NO: 2077773 - RNA, 14 nt, Human
gcuuguaacaagaa

SEQ ID NO: 2077774 - RNA, 15 nt, Human
gcuuguaacaagaaa

SEQ ID NO: 2077775 - RNA, 16 nt, Human
gcuuguaacaagaaaa

SEQ ID NO: 2077776 - RNA, 17 nt, Human
gcuuguaacaagaaaac

SEQ ID NO: 2077777 - RNA, 18 nt, Human
gcuuguaacaagaaaaca

SEQ ID NO: 2077778 - RNA, 20 nt, Human
gcuuguaaauagcucaggug

SEQ ID NO: 2077779 - RNA, 14 nt, Human
gcuugagcucagga

SEQ ID NO: 2077780 - RNA, 12 nt, Human
gcuugagcccag

SEQ ID NO: 2077781 - RNA, 16 nt, Human
gcuugagcccaggagu

SEQ ID NO: 2077782 - RNA, 14 nt, Human
gcuugagcccagga

SEQ ID NO: 2077783 - RNA, 15 nt, Human
gcuugagcccaggag

SEQ ID NO: 2077784 - RNA, 13 nt, Human
gcuugucagagcu

SEQ ID NO: 2077785 - RNA, 14 nt, Human
gcuugucagagcug

SEQ ID NO: 2077786 - RNA, 21 nt, Human
gcuuguccaacccgaggcccg

SEQ ID NO: 2077787 - RNA, 15 nt, Human
gcuugucagagcugg

SEQ ID NO: 2077788 - RNA, 16 nt, Human
gcuugucagagcuggg

SEQ ID NO: 2077789 - RNA, 17 nt, Human
gcuugucagagcuggga

SEQ ID NO: 2077790 - RNA, 18 nt, Human
gcuugucagagcugggag

SEQ ID NO: 2077791 - RNA, 15 nt, Human
gcuuguaacuccacc

SEQ ID NO: 2077792 - RNA, 16 nt, Human
gcuuguaacuccacca

SEQ ID NO: 2077793 - RNA, 17 nt, Human
gcuuucuugcugguugu

SEQ ID NO: 2077794 - RNA, 12 nt, Human
gcuuucuugcug

SEQ ID NO: 2077795 - RNA, 13 nt, Human
gcuuucuugcugg

SEQ ID NO: 2077796 - RNA, 14 nt, Human
gcuuucuugcuggu

SEQ ID NO: 2077797 - RNA, 18 nt, Human
gcuugucauuaccagacg

SEQ ID NO: 2077798 - RNA, 15 nt, Human
gcuuguccagcgccu

SEQ ID NO: 2077799 - RNA, 16 nt, Human
gcuuguccagcgccua

SEQ ID NO: 2077800 - RNA, 16 nt, Human
gcuuguccccuccuca

SEQ ID NO: 2077801 - RNA, 19 nt, Human
gcuuguccccuccucacuc

SEQ ID NO: 2077802 - RNA, 22 nt, Human
gcuuguccccuccucacucccu

SEQ ID NO: 2077803 - RNA, 15 nt, Human
gcuugucccugccca

SEQ ID NO: 2077804 - RNA, 16 nt, Human
gcuugucccugcccag

SEQ ID NO: 2077805 - RNA, 21 nt, Human
gcuucagccugaggcugagac

SEQ ID NO: 2077806 - RNA, 23 nt, Human
gcuucagccugaggcugagacug

SEQ ID NO: 2077807 - RNA, 12 nt, Human
gcuucagccuga

SEQ ID NO: 2077808 - RNA, 14 nt, Human
gcuucagccugagg

SEQ ID NO: 2077809 - RNA, 15 nt, Human
gcuucagccugaggc

SEQ ID NO: 2077810 - RNA, 20 nt, Human
gcuucagccugaggcugaga

SEQ ID NO: 2077811 - RNA, 17 nt, Human
gcuucagccuccccacc

SEQ ID NO: 2077812 - RNA, 19 nt, Human
gcuucagccaggagcuggg

SEQ ID NO: 2077813 - RNA, 12 nt, Human
gcuucagccucc

SEQ ID NO: 2077814 - RNA, 19 nt, Human
gcuucacggaagagccuug

SEQ ID NO: 2077815 - RNA, 15 nt, Human
gcuucagccaggagc

SEQ ID NO: 2077816 - RNA, 17 nt, Human
gcuuauuuccucauuuu

SEQ ID NO: 2077817 - RNA, 18 nt, Human
gcuucacggaagagccuu

SEQ ID NO: 2077818 - RNA, 19 nt, Human
gcuuauuaaugcuaagggc

SEQ ID NO: 2077819 - RNA, 20 nt, Human
gcuuauuaaugcuaagggca

SEQ ID NO: 2077820 - RNA, 15 nt, Human
gcuuauuaaugcuaa

SEQ ID NO: 2077821 - RNA, 16 nt, Human
gcuuauuaaugcuaag

SEQ ID NO: 2077822 - RNA, 16 nt, Human
gcuuauuuaauaaaga

SEQ ID NO: 2077823 - RNA, 18 nt, Human
gcuuauuuaauuaaaaaa

SEQ ID NO: 2077824 - RNA, 16 nt, Human
gcuuauucucaaagca

SEQ ID NO: 2077825 - RNA, 18 nt, Human
gcuuauucucaaagcagg

SEQ ID NO: 2077826 - RNA, 13 nt, Human
gcuuauuguucca

SEQ ID NO: 2077827 - RNA, 14 nt, Human
gcuuauuguuccaa

SEQ ID NO: 2077828 - RNA, 15 nt, Human
gcuuauuguuccaag

SEQ ID NO: 2077829 - RNA, 17 nt, Human
gcuuauuguuccaagac

SEQ ID NO: 2077830 - RNA, 20 nt, Human
gcuuauuguuccaagacauu

SEQ ID NO: 2077831 - RNA, 21 nt, Human
gcuuauuguuccaagacauug

SEQ ID NO: 2077832 - RNA, 22 nt, Human
gcuuauuguuccaagacauugu

SEQ ID NO: 2077833 - RNA, 11 nt, Human
gcuuauuuaau

SEQ ID NO: 2077834 - RNA, 14 nt, Human
gcuuauuuaauaaa

SEQ ID NO: 2077835 - RNA, 17 nt, Human
gcuucacggaagagccu

SEQ ID NO: 2077836 - RNA, 15 nt, Human
gcuucacggaagagc

SEQ ID NO: 2077837 - RNA, 21 nt, Human
gcucgucggggggacagcucc

SEQ ID NO: 2077838 - RNA, 12 nt, Human
gcuccugggaag

SEQ ID NO: 2077839 - RNA, 22 nt, Human
gcuccugggaaggcuacucacc

SEQ ID NO: 2077840 - RNA, 12 nt, Human
gcucgguggacc

SEQ ID NO: 2077841 - RNA, 14 nt, Human
gcucgguggaccca

SEQ ID NO: 2077842 - RNA, 17 nt, Human
gcucgguggacccaggg

SEQ ID NO: 2077843 - RNA, 18 nt, Human
gcucgguggacccaggga

SEQ ID NO: 2077844 - RNA, 18 nt, Human
gcucugaggacugcacca

SEQ ID NO: 2077845 - RNA, 17 nt, Human
gcucugaucauccacug

SEQ ID NO: 2077846 - RNA, 23 nt, Human
gcucugaucauccacugugccau

SEQ ID NO: 2077847 - RNA, 23 nt, Human
gcucugcaagaauugaagcagga

SEQ ID NO: 2077848 - RNA, 21 nt, Human
gcucugauauuccaugaaugu

SEQ ID NO: 2077849 - RNA, 13 nt, Human
gcucugccccagc

SEQ ID NO: 2077850 - RNA, 15 nt, Human
gcucugccccagcuc

SEQ ID NO: 2077851 - RNA, 20 nt, Human
gcucugccccagcucuggcu

SEQ ID NO: 2077852 - RNA, 18 nt, Human
gcucugccccagcucugg

SEQ ID NO: 2077853 - RNA, 19 nt, Human
gcucugccccagcucuggc

SEQ ID NO: 2077854 - RNA, 21 nt, Human
gcuccacacccucucccagga

SEQ ID NO: 2077855 - RNA, 22 nt, Human
gcuccacacccucucccaggac

SEQ ID NO: 2077856 - RNA, 23 nt, Human
gcuccacacccucucccaggacc

SEQ ID NO: 2077857 - RNA, 19 nt, Human
gcuccaccuugcagcucuc

SEQ ID NO: 2077858 - RNA, 22 nt, Human
gcuccacccuuggccugucuca

SEQ ID NO: 2077859 - RNA, 23 nt, Human
gcuccacccuuggccugucucau

SEQ ID NO: 2077860 - RNA, 21 nt, Human
gcuccacucugacuggcacag

SEQ ID NO: 2077861 - RNA, 13 nt, Human
gcuccaccccacu

SEQ ID NO: 2077862 - RNA, 15 nt, Human
gcuccaccccacuca

SEQ ID NO: 2077863 - RNA, 16 nt, Human
gcuccaccccacucac

SEQ ID NO: 2077864 - RNA, 19 nt, Human
gcuccaccccacucacaga

SEQ ID NO: 2077865 - RNA, 20 nt, Human
gcuccaccccacucacagag

SEQ ID NO: 2077866 - RNA, 19 nt, Human
gcuccaccaagaaagcagg

SEQ ID NO: 2077867 - RNA, 12 nt, Human
gcuccaccacau

SEQ ID NO: 2077868 - RNA, 15 nt, Human
gcuccaccacauccu

SEQ ID NO: 2077869 - RNA, 11 nt, Human
gcuccacccuu

SEQ ID NO: 2077870 - RNA, 13 nt, Human
gcuccacccuugg

SEQ ID NO: 2077871 - RNA, 14 nt, Human
gcuccacccuuggc

SEQ ID NO: 2077872 - RNA, 15 nt, Human
gcuccacccuuggcc

SEQ ID NO: 2077873 - RNA, 16 nt, Human
gcuccacccuuggccu

SEQ ID NO: 2077874 - RNA, 17 nt, Human
gcuccacccuuggccug

SEQ ID NO: 2077875 - RNA, 19 nt, Human
gcuccacccuuggccuguc

SEQ ID NO: 2077876 - RNA, 18 nt, Human
gcuccccuuucgcccaca

SEQ ID NO: 2077877 - RNA, 20 nt, Human
gcucccgggacucacuggca

SEQ ID NO: 2077878 - RNA, 24 nt, Human
gcucccgggacucacuggcagccc

SEQ ID NO: 2077879 - RNA, 19 nt, Human
gcuccccucuauuuagcau

SEQ ID NO: 2077880 - RNA, 21 nt, Human
gcuccccucuauuuagcauga

SEQ ID NO: 2077881 - RNA, 22 nt, Human
gcuccugaggggcaucugcccc

SEQ ID NO: 2077882 - RNA, 23 nt, Human
gcuccugaggggcaucugccccu

SEQ ID NO: 2077883 - RNA, 15 nt, Human
gcucccuaccaccuc

SEQ ID NO: 2077884 - RNA, 18 nt, Human
gcuccugaggggcaucug

SEQ ID NO: 2077885 - RNA, 21 nt, Human
gcuccugaggggcaucugccc

SEQ ID NO: 2077886 - RNA, 18 nt, Human
gcuccuggaaaggcucag

SEQ ID NO: 2077887 - RNA, 23 nt, Human
gcuccuggaaaggcucagucuca

SEQ ID NO: 2077888 - RNA, 21 nt, Human
gcuccuggaaaggcucagucu

SEQ ID NO: 2077889 - RNA, 22 nt, Human
gcuccuggaaaggcucagucuc

SEQ ID NO: 2077890 - RNA, 14 nt, Human
gcuccuggcccacu

SEQ ID NO: 2077891 - RNA, 15 nt, Human
gcuccuggcccacug

SEQ ID NO: 2077892 - RNA, 20 nt, Human
gcuccuggcccacugcaucg

SEQ ID NO: 2077893 - RNA, 17 nt, Human
gcuccuggacucauugc

SEQ ID NO: 2077894 - RNA, 19 nt, Human
gcuccuggacucauugcuu

SEQ ID NO: 2077895 - RNA, 18 nt, Human
gcuccuggcccacugcau

SEQ ID NO: 2077896 - RNA, 19 nt, Human
gcuccuggcccacugcauc

SEQ ID NO: 2077897 - RNA, 20 nt, Human
gcucccccauccuccccuuc

SEQ ID NO: 2077898 - RNA, 17 nt, Human
gcucccccauccucccc

SEQ ID NO: 2077899 - RNA, 18 nt, Human
gcucccccauccuccccu

SEQ ID NO: 2077900 - RNA, 14 nt, Human
gcucccccauccuc

SEQ ID NO: 2077901 - RNA, 16 nt, Human
gcucccccauccuccc

SEQ ID NO: 2077902 - RNA, 20 nt, Human
gcucccccacccccucccca

SEQ ID NO: 2077903 - RNA, 22 nt, Human
gcucccccacccccuccccagg

SEQ ID NO: 2077904 - RNA, 13 nt, Human
gcuccccagugaa

SEQ ID NO: 2077905 - RNA, 14 nt, Human
gcucccccaccccc

SEQ ID NO: 2077906 - RNA, 15 nt, Human
gcucccccacccccu

SEQ ID NO: 2077907 - RNA, 22 nt, Human
gcucccacaggcccuuccucuc

SEQ ID NO: 2077908 - RNA, 18 nt, Human
gcucccaccccacccccu

SEQ ID NO: 2077909 - RNA, 21 nt, Human
gcucccaccccacccccuuca

SEQ ID NO: 2077910 - RNA, 18 nt, Human
gcuccagcucaccagccc

SEQ ID NO: 2077911 - RNA, 21 nt, Human
gcucccacaggcccuuccucu

SEQ ID NO: 2077912 - RNA, 20 nt, Human
gcucccacaggcccuuccuc

SEQ ID NO: 2077913 - RNA, 17 nt, Human
gcucccacaggcccuuc

SEQ ID NO: 2077914 - RNA, 16 nt, Human
gcucccacaggcccuu

SEQ ID NO: 2077915 - RNA, 21 nt, Human
gcuccagcucaccagccccag

SEQ ID NO: 2077916 - RNA, 20 nt, Human
gcuccagcucaccagcccca

SEQ ID NO: 2077917 - RNA, 16 nt, Human
gcuaggccuggccaga

SEQ ID NO: 2077918 - RNA, 14 nt, Human
gcuagucagagaga

SEQ ID NO: 2077919 - RNA, 18 nt, Human
gcuagucagagagagugu

SEQ ID NO: 2077920 - RNA, 23 nt, Human
gcuaggccuggccagaugcacca

SEQ ID NO: 2077921 - RNA, 17 nt, Human
gcuaggccuggccagau

SEQ ID NO: 2077922 - RNA, 13 nt, Human
gcuaugcuugaau

SEQ ID NO: 2077923 - RNA, 17 nt, Human
gcuaugaucgcgccacu

SEQ ID NO: 2077924 - RNA, 18 nt, Human
gcuauggauggcuucuaa

SEQ ID NO: 2077925 - RNA, 15 nt, Human
gcuagucuuucacag

SEQ ID NO: 2077926 - RNA, 22 nt, Human
gcuauggauuuucuaaggaaga

SEQ ID NO: 2077927 - RNA, 13 nt, Human
gcuaugggagccc

SEQ ID NO: 2077928 - RNA, 14 nt, Human
gcuaugggagcccc

SEQ ID NO: 2077929 - RNA, 19 nt, Human
gcuauucaguaauaacucu

SEQ ID NO: 2077930 - RNA, 17 nt, Human
gcuaugggagccccagg

SEQ ID NO: 2077931 - RNA, 20 nt, Human
gcuauucaguaauaacucua

SEQ ID NO: 2077932 - RNA, 22 nt, Human
gcuauugauauaaauaaaacau

SEQ ID NO: 2077933 - RNA, 16 nt, Human
gcuauugacaagucau

SEQ ID NO: 2077934 - RNA, 21 nt, Human
gcuauucaguugguaagcuuc

SEQ ID NO: 2077935 - RNA, 16 nt, Human
gcuauuuuacugucuu

SEQ ID NO: 2077936 - RNA, 17 nt, Human
gcuauuuuacugucuua

SEQ ID NO: 2077937 - RNA, 18 nt, Human
gcuauuuuacugucuuaa

SEQ ID NO: 2077938 - RNA, 22 nt, Human
gcuauuuuuauuuguuugugca

SEQ ID NO: 2077939 - RNA, 15 nt, Human
gcuauuuuuauggaa

SEQ ID NO: 2077940 - RNA, 15 nt, Human
gcucaaaaaaugagc

SEQ ID NO: 2077941 - RNA, 14 nt, Human
gcucacugcagccu

SEQ ID NO: 2077942 - RNA, 13 nt, Human
gcucacugcagcc

SEQ ID NO: 2077943 - RNA, 12 nt, Human
gcucacugcagc

SEQ ID NO: 2077944 - RNA, 11 nt, Human
gcucacugcag

SEQ ID NO: 2077945 - RNA, 16 nt, Human
gcucacugcagccuca

SEQ ID NO: 2077946 - RNA, 15 nt, Human
gcucacugcagccuc

SEQ ID NO: 2077947 - RNA, 17 nt, Human
gcucacugcagccucaa

SEQ ID NO: 2077948 - RNA, 17 nt, Human
gcucaggugucccugca

SEQ ID NO: 2077949 - RNA, 16 nt, Human
gcucaggugucccugc

SEQ ID NO: 2077950 - RNA, 14 nt, Human
gcucaggugucccu

SEQ ID NO: 2077951 - RNA, 24 nt, Human
gcucaggcgauccaccugucucag

SEQ ID NO: 2077952 - RNA, 20 nt, Human
gcucaggccuauaaccccag

SEQ ID NO: 2077953 - RNA, 19 nt, Human
gcucaggcgauccaccugu

SEQ ID NO: 2077954 - RNA, 22 nt, Human
gcucaggcgauccaccugucuc

SEQ ID NO: 2077955 - RNA, 17 nt, Human
gcucacugcagccucga

SEQ ID NO: 2077956 - RNA, 15 nt, Human
gcucagacccccacu

SEQ ID NO: 2077957 - RNA, 19 nt, Human
gcucagacccccacucuca

SEQ ID NO: 2077958 - RNA, 23 nt, Human
gcucagacccccacucucauucc

SEQ ID NO: 2077959 - RNA, 18 nt, Human
gcuacucuguuccuucac

SEQ ID NO: 2077960 - RNA, 18 nt, Human
gcuacugaugagaauuua

SEQ ID NO: 2077961 - RNA, 17 nt, Human
gcuacucuguuccuuca

SEQ ID NO: 2077962 - RNA, 14 nt, Human
gcuacuccggaggc

SEQ ID NO: 2077963 - RNA, 20 nt, Human
gcgggaggauguucugggac

SEQ ID NO: 2077964 - RNA, 22 nt, Human
gcgggaggauguucugggacac

SEQ ID NO: 2077965 - RNA, 21 nt, Human
gcgggaggauguucugggaca

SEQ ID NO: 2077966 - RNA, 20 nt, Human
gcgugcacacaccagagccc

SEQ ID NO: 2077967 - RNA, 23 nt, Human
gcgugcacacaccagagcccacc

SEQ ID NO: 2077968 - RNA, 19 nt, Human
gcgugcacacaccagagcc

SEQ ID NO: 2077969 - RNA, 15 nt, Human
gcgggaugguccugg

SEQ ID NO: 2077970 - RNA, 15 nt, Human
gcgugguuccuuucu

SEQ ID NO: 2077971 - RNA, 19 nt, Human
gcgugucgugggugugugu

SEQ ID NO: 2077972 - RNA, 18 nt, Human
gcgugugcgugcaugugc

SEQ ID NO: 2077973 - RNA, 19 nt, Human
gcguuugcccaaaucugcc

SEQ ID NO: 2077974 - RNA, 20 nt, Human
gcguuugcccaaaucugccu

SEQ ID NO: 2077975 - RNA, 11 nt, Human
gcguguggcuc

SEQ ID NO: 2077976 - RNA, 13 nt, Human
gcguguggcucac

SEQ ID NO: 2077977 - RNA, 14 nt, Human
gcguguggcucacg

SEQ ID NO: 2077978 - RNA, 19 nt, Human
gcguguggcucacgugugu

SEQ ID NO: 2077979 - RNA, 21 nt, Human
gcguguggcucacguguguga

SEQ ID NO: 2077980 - RNA, 17 nt, Human
gcguguguccaugugug

SEQ ID NO: 2077981 - RNA, 18 nt, Human
gcguguguccaugugugu

SEQ ID NO: 2077982 - RNA, 23 nt, Human
gcguguguccaugugugugcaag

SEQ ID NO: 2077983 - RNA, 22 nt, Human
gcuaaucagcauucucacuccu

SEQ ID NO: 2077984 - RNA, 17 nt, Human
gcuaaucagcauucuca

SEQ ID NO: 2077985 - RNA, 16 nt, Human
gcuaaucagcauucuc

SEQ ID NO: 2077986 - RNA, 14 nt, Human
gcuaaucagcauuc

SEQ ID NO: 2077987 - RNA, 23 nt, Human
gcuaauaaaauaucauucagcaa

SEQ ID NO: 2077988 - RNA, 18 nt, Human
gcuaauaaaauaucauuc

SEQ ID NO: 2077989 - RNA, 19 nt, Human
gcuaauaaaauaucauuca

SEQ ID NO: 2077990 - RNA, 20 nt, Human
gcuaauaaaauaucauucag

SEQ ID NO: 2077991 - RNA, 21 nt, Human
gcuaauaaaauaucauucagc

SEQ ID NO: 2077992 - RNA, 20 nt, Human
gcuaauaucaauagaaggau

SEQ ID NO: 2077993 - RNA, 17 nt, Human
gcuaauaaaauaucauu

SEQ ID NO: 2077994 - RNA, 14 nt, Human
gcuaauaaaauauc

SEQ ID NO: 2077995 - RNA, 23 nt, Human
gcuaagugauccucccaccucag

SEQ ID NO: 2077996 - RNA, 13 nt, Human
gcuaaugggacac

SEQ ID NO: 2077997 - RNA, 15 nt, Human
gcuaaugggacacua

SEQ ID NO: 2077998 - RNA, 21 nt, Human
gcuaaugaagggaaaggauau

SEQ ID NO: 2077999 - RNA, 14 nt, Human
gcuaauuauuuuaa

SEQ ID NO: 2078000 - RNA, 15 nt, Human
gcuaauuauuuuaau

SEQ ID NO: 2078001 - RNA, 17 nt, Human
gcuaauuauuuuaauua

SEQ ID NO: 2078002 - RNA, 23 nt, Human
gcuaauuauuuuaauuagguuaa

SEQ ID NO: 2078003 - RNA, 11 nt, Human
gcuacucagca

SEQ ID NO: 2078004 - RNA, 21 nt, Human
gcuacucagaagccugaggcu

SEQ ID NO: 2078005 - RNA, 12 nt, Human
gcuacucagcag

SEQ ID NO: 2078006 - RNA, 16 nt, Human
gcuacucagcagcccu

SEQ ID NO: 2078007 - RNA, 17 nt, Human
gcuacucagcagcccuc

SEQ ID NO: 2078008 - RNA, 18 nt, Human
gcuacucagcagcccucc

SEQ ID NO: 2078009 - RNA, 19 nt, Human
gcuacucagcagcccuccu

SEQ ID NO: 2078010 - RNA, 21 nt, Human
gcuacucagcagcccuccuca

SEQ ID NO: 2078011 - RNA, 22 nt, Human
gcuacucagcagcccuccucac

SEQ ID NO: 2078012 - RNA, 24 nt, Human
gcuacucagcagcccuccucaccc

SEQ ID NO: 2078013 - RNA, 14 nt, Human
gcuacucaggaggc

SEQ ID NO: 2078014 - RNA, 15 nt, Human
gcuacucaggaggcu

SEQ ID NO: 2078015 - RNA, 16 nt, Human
gcuacucaggaggcug

SEQ ID NO: 2078016 - RNA, 23 nt, Human
gcuacucaggaggcugaggcaga

SEQ ID NO: 2078017 - RNA, 15 nt, Human
gcuacucagaagccu

SEQ ID NO: 2078018 - RNA, 16 nt, Human
gcuacucagaagccug

SEQ ID NO: 2078019 - RNA, 17 nt, Human
gcuacucagaagccuga

SEQ ID NO: 2078020 - RNA, 18 nt, Human
gcuacucagaagccugag

SEQ ID NO: 2078021 - RNA, 19 nt, Human
gcuacucagaagccugagg

SEQ ID NO: 2078022 - RNA, 18 nt, Human
gccugccccucccagaac

SEQ ID NO: 2078023 - RNA, 23 nt, Human
gccugccccaaacaaauaugcaa

SEQ ID NO: 2078024 - RNA, 17 nt, Human
gccugccccaaacaaau

SEQ ID NO: 2078025 - RNA, 14 nt, Human
gccugccccuccca

SEQ ID NO: 2078026 - RNA, 15 nt, Human
gccugccccucccag

SEQ ID NO: 2078027 - RNA, 16 nt, Human
gccugccccucccaga

SEQ ID NO: 2078028 - RNA, 15 nt, Human
gccugcccaggcccc

SEQ ID NO: 2078029 - RNA, 22 nt, Human
gccugcccaggccccugccacc

SEQ ID NO: 2078030 - RNA, 17 nt, Human
gccucccaaagugcugg

SEQ ID NO: 2078031 - RNA, 14 nt, Human
gccuccauggugcc

SEQ ID NO: 2078032 - RNA, 16 nt, Human
gccuccauggugccuc

SEQ ID NO: 2078033 - RNA, 17 nt, Human
gccuccauggugccucu

SEQ ID NO: 2078034 - RNA, 18 nt, Human
gccuccauggugccucug

SEQ ID NO: 2078035 - RNA, 19 nt, Human
gccuccauggugccucugg

SEQ ID NO: 2078036 - RNA, 17 nt, Human
gccuccauuccuggagc

SEQ ID NO: 2078037 - RNA, 18 nt, Human
gccuccauuccuggagcc

SEQ ID NO: 2078038 - RNA, 21 nt, Human
gccuccauuccuggagcccga

SEQ ID NO: 2078039 - RNA, 23 nt, Human
gccuccauuccuggagcccgagg

SEQ ID NO: 2078040 - RNA, 16 nt, Human
gccuccauucugacca

SEQ ID NO: 2078041 - RNA, 16 nt, Human
gccucccaaagugcug

SEQ ID NO: 2078042 - RNA, 23 nt, Human
gccuccugugugugcgccuacag

SEQ ID NO: 2078043 - RNA, 19 nt, Human
gccuccugugugugcgccu

SEQ ID NO: 2078044 - RNA, 17 nt, Human
gccucgaacuggcugca

SEQ ID NO: 2078045 - RNA, 17 nt, Human
gccuccauucugaccau

SEQ ID NO: 2078046 - RNA, 17 nt, Human
gccuccauuuaguucuu

SEQ ID NO: 2078047 - RNA, 22 nt, Human
gccucgaacuggcugcaaaggg

SEQ ID NO: 2078048 - RNA, 20 nt, Human
gccucgaacuggcugcaaag

SEQ ID NO: 2078049 - RNA, 20 nt, Human
gccucuuaaagcugccugua

SEQ ID NO: 2078050 - RNA, 19 nt, Human
gccucuuaaauaaaccuuu

SEQ ID NO: 2078051 - RNA, 22 nt, Human
gccucuuaaagcugccuguagu

SEQ ID NO: 2078052 - RNA, 23 nt, Human
gccucuuaaagcugccuguaguu

SEQ ID NO: 2078053 - RNA, 14 nt, Human
gccugcccaggccc

SEQ ID NO: 2078054 - RNA, 13 nt, Human
gccugcccaggcc

SEQ ID NO: 2078055 - RNA, 14 nt, Human
gccucuuggguuca

SEQ ID NO: 2078056 - RNA, 21 nt, Human
gcgauguuucaggaggcugga

SEQ ID NO: 2078057 - RNA, 23 nt, Human
gcgauguuucaggaggcuggagg

SEQ ID NO: 2078058 - RNA, 16 nt, Human
gcgauucccauugaaa

SEQ ID NO: 2078059 - RNA, 22 nt, Human
gcgaucuggguucacugcaacc

SEQ ID NO: 2078060 - RNA, 19 nt, Human
gcgaugaauuuggagacuc

SEQ ID NO: 2078061 - RNA, 17 nt, Human
gcgcacaaggcugacca

SEQ ID NO: 2078062 - RNA, 18 nt, Human
gcgcacaaggcugaccaa

SEQ ID NO: 2078063 - RNA, 12 nt, Human
gcgcaccugccc

SEQ ID NO: 2078064 - RNA, 17 nt, Human
gcgcaccugcccccugg

SEQ ID NO: 2078065 - RNA, 18 nt, Human
gcgcaccugcccccuggu

SEQ ID NO: 2078066 - RNA, 19 nt, Human
gcgcaccugcccccuggug

SEQ ID NO: 2078067 - RNA, 15 nt, Human
gcgagcccugguggc

SEQ ID NO: 2078068 - RNA, 17 nt, Human
gcgagcccugguggcag

SEQ ID NO: 2078069 - RNA, 21 nt, Human
gcgauccaccugucucagccu

SEQ ID NO: 2078070 - RNA, 21 nt, Human
gcgagcuaugaucgcgccacu

SEQ ID NO: 2078071 - RNA, 12 nt, Human
gccuugcccaga

SEQ ID NO: 2078072 - RNA, 14 nt, Human
gccuugcccagaga

SEQ ID NO: 2078073 - RNA, 15 nt, Human
gccuugcccagagau

SEQ ID NO: 2078074 - RNA, 16 nt, Human
gccuugcccagagaug

SEQ ID NO: 2078075 - RNA, 22 nt, Human
gccuugcccagagaugccucca

SEQ ID NO: 2078076 - RNA, 19 nt, Human
gccuugcuaccucaagggg

SEQ ID NO: 2078077 - RNA, 20 nt, Human
gccuugcccagagaugccuc

SEQ ID NO: 2078078 - RNA, 22 nt, Human
gccuugcccggauucugggagg

SEQ ID NO: 2078079 - RNA, 14 nt, Human
gccuguugcccuuu

SEQ ID NO: 2078080 - RNA, 19 nt, Human
gccuggcgacagagcgaga

SEQ ID NO: 2078081 - RNA, 21 nt, Human
gccuggcgaaaccccaucucu

SEQ ID NO: 2078082 - RNA, 16 nt, Human
gccugugccucuggga

SEQ ID NO: 2078083 - RNA, 17 nt, Human
gccugugccucugggac

SEQ ID NO: 2078084 - RNA, 18 nt, Human
gccugugccucugggacu

SEQ ID NO: 2078085 - RNA, 16 nt, Human
gccuguggcggugccu

SEQ ID NO: 2078086 - RNA, 18 nt, Human
gccuguggcggugccugg

SEQ ID NO: 2078087 - RNA, 19 nt, Human
gccuguggcggugccuggg

SEQ ID NO: 2078088 - RNA, 19 nt, Human
gccuguucccauucuugca

SEQ ID NO: 2078089 - RNA, 23 nt, Human
gccuguucccauucuugcauggc

SEQ ID NO: 2078090 - RNA, 21 nt, Human
gcccugcagaggggaaaccag

SEQ ID NO: 2078091 - RNA, 15 nt, Human
gcccugcccuagcuc

SEQ ID NO: 2078092 - RNA, 16 nt, Human
gcccugcccuagcucc

SEQ ID NO: 2078093 - RNA, 17 nt, Human
gcccugcccuagcucca

SEQ ID NO: 2078094 - RNA, 18 nt, Human
gcccugcccuagcuccac

SEQ ID NO: 2078095 - RNA, 15 nt, Human
gccgcaucuucucca

SEQ ID NO: 2078096 - RNA, 17 nt, Human
gccgcaucuucuccauc

SEQ ID NO: 2078097 - RNA, 18 nt, Human
gccgcaucuucuccaucu

SEQ ID NO: 2078098 - RNA, 20 nt, Human
gccgcaucuucuccaucugg

SEQ ID NO: 2078099 - RNA, 14 nt, Human
gccgcauucccuga

SEQ ID NO: 2078100 - RNA, 15 nt, Human
gccgcauucccugag

SEQ ID NO: 2078101 - RNA, 11 nt, Human
gccgcccugua

SEQ ID NO: 2078102 - RNA, 17 nt, Human
gccgcccuguacccucu

SEQ ID NO: 2078103 - RNA, 19 nt, Human
gccgccccagccucugagc

SEQ ID NO: 2078104 - RNA, 22 nt, Human
gcccuuagcagggaaacagcua

SEQ ID NO: 2078105 - RNA, 17 nt, Human
gccgcagccucccucug

SEQ ID NO: 2078106 - RNA, 18 nt, Human
gccgcagccucccucuga

SEQ ID NO: 2078107 - RNA, 20 nt, Human
gcccuuagcagggaaacagc

SEQ ID NO: 2078108 - RNA, 19 nt, Human
gcccuuagcagggaaacag

SEQ ID NO: 2078109 - RNA, 15 nt, Human
gcccugcccuucagc

SEQ ID NO: 2078110 - RNA, 20 nt, Human
gcccugcccuucagcauccu

SEQ ID NO: 2078111 - RNA, 20 nt, Human
gccuaggugacagagugaga

SEQ ID NO: 2078112 - RNA, 17 nt, Human
gccuagggccuggucca

SEQ ID NO: 2078113 - RNA, 17 nt, Human
gccuaggggucagggac

SEQ ID NO: 2078114 - RNA, 15 nt, Human
gccuagucagccaca

SEQ ID NO: 2078115 - RNA, 18 nt, Human
gccuagucagccacaugg

SEQ ID NO: 2078116 - RNA, 19 nt, Human
gccuagucagccacauggg

SEQ ID NO: 2078117 - RNA, 22 nt, Human
gccuagucagccacaugggaaa

SEQ ID NO: 2078118 - RNA, 22 nt, Human
gccuaggggucagggaccaagg

SEQ ID NO: 2078119 - RNA, 18 nt, Human
gccuaguggggucucccu

SEQ ID NO: 2078120 - RNA, 19 nt, Human
gccuaguggggucucccuc

SEQ ID NO: 2078121 - RNA, 22 nt, Human
gccuaguggggucucccucucc

SEQ ID NO: 2078122 - RNA, 23 nt, Human
gccuaguggggucucccucuccu

SEQ ID NO: 2078123 - RNA, 17 nt, Human
gccuaguucauccaauc

SEQ ID NO: 2078124 - RNA, 21 nt, Human
gccuaguucauccaauccuca

SEQ ID NO: 2078125 - RNA, 13 nt, Human
gccgccucaaugu

SEQ ID NO: 2078126 - RNA, 15 nt, Human
gccuagccgaccuca

SEQ ID NO: 2078127 - RNA, 16 nt, Human
gccuagccgaccucag

SEQ ID NO: 2078128 - RNA, 17 nt, Human
gccuagccgaccucagc

SEQ ID NO: 2078129 - RNA, 18 nt, Human
gccuagccgaccucagcc

SEQ ID NO: 2078130 - RNA, 19 nt, Human
gccuagccgaccucagccu

SEQ ID NO: 2078131 - RNA, 20 nt, Human
gccuagccgaccucagccuu

SEQ ID NO: 2078132 - RNA, 15 nt, Human
gccuaggugacagag

SEQ ID NO: 2078133 - RNA, 14 nt, Human
gccuaggugacaga

SEQ ID NO: 2078134 - RNA, 13 nt, Human
gccuaggugacag

SEQ ID NO: 2078135 - RNA, 17 nt, Human
gccuaggaauucccagc

SEQ ID NO: 2078136 - RNA, 20 nt, Human
gcccucaccccugcccuggg

SEQ ID NO: 2078137 - RNA, 16 nt, Human
gccccugccacccugg

SEQ ID NO: 2078138 - RNA, 17 nt, Human
gccccugccacccuggg

SEQ ID NO: 2078139 - RNA, 13 nt, Human
gcccccacuggcu

SEQ ID NO: 2078140 - RNA, 15 nt, Human
gcccccacuggcugu

SEQ ID NO: 2078141 - RNA, 18 nt, Human
gcccccacuggcuguggg

SEQ ID NO: 2078142 - RNA, 19 nt, Human
gcccccacuggcugugggc

SEQ ID NO: 2078143 - RNA, 21 nt, Human
gcccccacuggcugugggcuc

SEQ ID NO: 2078144 - RNA, 13 nt, Human
gccccccacccca

SEQ ID NO: 2078145 - RNA, 14 nt, Human
gccccccaccccag

SEQ ID NO: 2078146 - RNA, 15 nt, Human
gccccugcucuggug

SEQ ID NO: 2078147 - RNA, 13 nt, Human
gccccugcugccu

SEQ ID NO: 2078148 - RNA, 15 nt, Human
gccccugcugccucc

SEQ ID NO: 2078149 - RNA, 12 nt, Human
gccccugccccg

SEQ ID NO: 2078150 - RNA, 18 nt, Human
gcccggggcagcugccag

SEQ ID NO: 2078151 - RNA, 14 nt, Human
gcccggggcagcug

SEQ ID NO: 2078152 - RNA, 17 nt, Human
gcccggggcagcugcca

SEQ ID NO: 2078153 - RNA, 22 nt, Human
gcccggggcagcugccagagaa

SEQ ID NO: 2078154 - RNA, 19 nt, Human
gccccugcugccuccccaa

SEQ ID NO: 2078155 - RNA, 16 nt, Human
gccccugcugccuccc

SEQ ID NO: 2078156 - RNA, 17 nt, Human
gccccugcugccucccc

SEQ ID NO: 2078157 - RNA, 20 nt, Human
gccccugcugccuccccaac

SEQ ID NO: 2078158 - RNA, 21 nt, Human
gcccuaagauugaaaaggaag

SEQ ID NO: 2078159 - RNA, 18 nt, Human
gcccgucauguuccucaa

SEQ ID NO: 2078160 - RNA, 19 nt, Human
gcccucaccccugcccugg

SEQ ID NO: 2078161 - RNA, 13 nt, Human
gcccucaccccug

SEQ ID NO: 2078162 - RNA, 23 nt, Human
gcccucaagacccuuuuggguuu

SEQ ID NO: 2078163 - RNA, 19 nt, Human
gcccucaaaaugacagcca

SEQ ID NO: 2078164 - RNA, 15 nt, Human
gcccucaaucccagc

SEQ ID NO: 2078165 - RNA, 19 nt, Human
ggccagugugaucccaagu

SEQ ID NO: 2078166 - RNA, 20 nt, Human
ggccagugugacaaggauug

SEQ ID NO: 2078167 - RNA, 22 nt, Human
ggccaguccugccuggccaggc

SEQ ID NO: 2078168 - RNA, 18 nt, Human
ggccaguccugccuggcc

SEQ ID NO: 2078169 - RNA, 19 nt, Human
ggccaguccugccuggcca

SEQ ID NO: 2078170 - RNA, 20 nt, Human
ggccaguccugccuggccag

SEQ ID NO: 2078171 - RNA, 21 nt, Human
ggccaguccugccuggccagg

SEQ ID NO: 2078172 - RNA, 16 nt, Human
ggccaguccugccugg

SEQ ID NO: 2078173 - RNA, 21 nt, Human
ggcauacgccuguaguccuag

SEQ ID NO: 2078174 - RNA, 14 nt, Human
ggccccugcugguu

SEQ ID NO: 2078175 - RNA, 13 nt, Human
ggccccugcuggu

SEQ ID NO: 2078176 - RNA, 23 nt, Human
ggccccugcugguucaggguugg

SEQ ID NO: 2078177 - RNA, 13 nt, Human
ggcccggcuccag

SEQ ID NO: 2078178 - RNA, 15 nt, Human
ggcccggcuccaggc

SEQ ID NO: 2078179 - RNA, 22 nt, Human
ggcccggggcuggcggcuacuc

SEQ ID NO: 2078180 - RNA, 23 nt, Human
ggcccggcgcgguggcucacgcc

SEQ ID NO: 2078181 - RNA, 13 nt, Human
ggcccggggcugg

SEQ ID NO: 2078182 - RNA, 19 nt, Human
ggcccggggcuggcggcua

SEQ ID NO: 2078183 - RNA, 14 nt, Human
ggccccugccuugg

SEQ ID NO: 2078184 - RNA, 21 nt, Human
ggcccuugcaguucagcacca

SEQ ID NO: 2078185 - RNA, 15 nt, Human
ggccucacuccagga

SEQ ID NO: 2078186 - RNA, 18 nt, Human
ggccucacuccaggaagg

SEQ ID NO: 2078187 - RNA, 10 nt, Human
ggccucagaa

SEQ ID NO: 2078188 - RNA, 23 nt, Human
ggccucaagugauucuccugccu

SEQ ID NO: 2078189 - RNA, 23 nt, Human
ggcacucagaagacacugauggg

SEQ ID NO: 2078190 - RNA, 17 nt, Human
ggcacugagauauuuau

SEQ ID NO: 2078191 - RNA, 12 nt, Human
ggcacauagaga

SEQ ID NO: 2078192 - RNA, 13 nt, Human
ggcagacagcagc

SEQ ID NO: 2078193 - RNA, 14 nt, Human
ggcagacagcagcu

SEQ ID NO: 2078194 - RNA, 15 nt, Human
ggcagacagcagcuc

SEQ ID NO: 2078195 - RNA, 16 nt, Human
ggcagacagcagcuca

SEQ ID NO: 2078196 - RNA, 17 nt, Human
ggcagacagcagcucag

SEQ ID NO: 2078197 - RNA, 18 nt, Human
ggcagacagcagcucagg

SEQ ID NO: 2078198 - RNA, 19 nt, Human
ggcagacagcagcucaggc

SEQ ID NO: 2078199 - RNA, 24 nt, Human
ggcacuguacuaggcgugagaagc

SEQ ID NO: 2078200 - RNA, 15 nt, Human
ggcacugguggcccg

SEQ ID NO: 2078201 - RNA, 20 nt, Human
ggcagacagcagcucaggca

SEQ ID NO: 2078202 - RNA, 21 nt, Human
ggcagcaggccuguugcuuuu

SEQ ID NO: 2078203 - RNA, 23 nt, Human
ggcagccccauucugccugccca

SEQ ID NO: 2078204 - RNA, 18 nt, Human
ggagagaaggggaggagg

SEQ ID NO: 2078205 - RNA, 20 nt, Human
ggagagaaggggaggagggc

SEQ ID NO: 2078206 - RNA, 21 nt, Human
ggagagaaggggaggagggcg

SEQ ID NO: 2078207 - RNA, 20 nt, Human
ggagacucuguggggccuug

SEQ ID NO: 2078208 - RNA, 12 nt, Human
ggagagaaaaaa

SEQ ID NO: 2078209 - RNA, 13 nt, Human
ggagagaaaaaag

SEQ ID NO: 2078210 - RNA, 15 nt, Human
ggagagaaaaaagaa

SEQ ID NO: 2078211 - RNA, 15 nt, Human
ggcagggcugacucu

SEQ ID NO: 2078212 - RNA, 14 nt, Human
ggcagggcucugau

SEQ ID NO: 2078213 - RNA, 13 nt, Human
ggcagggcucuga

SEQ ID NO: 2078214 - RNA, 16 nt, Human
ggcagggccuugccca

SEQ ID NO: 2078215 - RNA, 18 nt, Human
ggcagggccuugcccaga

SEQ ID NO: 2078216 - RNA, 19 nt, Human
ggcagggccuugcccagag

SEQ ID NO: 2078217 - RNA, 20 nt, Human
ggcagggccuugcccagaga

SEQ ID NO: 2078218 - RNA, 21 nt, Human
ggcagggccuugcccagagau

SEQ ID NO: 2078219 - RNA, 13 nt, Human
ggcacuguggccu

SEQ ID NO: 2078220 - RNA, 13 nt, Human
ggcagcccuguag

SEQ ID NO: 2078221 - RNA, 15 nt, Human
ggcagcccuguaggg

SEQ ID NO: 2078222 - RNA, 17 nt, Human
ggcaguuagagaugccu

SEQ ID NO: 2078223 - RNA, 20 nt, Human
ggcaguuagagaugccuccc

SEQ ID NO: 2078224 - RNA, 21 nt, Human
ggcaguucugggugcucccua

SEQ ID NO: 2078225 - RNA, 14 nt, Human
ggcaguuggccaga

SEQ ID NO: 2078226 - RNA, 15 nt, Human
ggcaguucugggugc

SEQ ID NO: 2078227 - RNA, 18 nt, Human
ggcucagcggggacagcu

SEQ ID NO: 2078228 - RNA, 13 nt, Human
ggcucagccuggu

SEQ ID NO: 2078229 - RNA, 20 nt, Human
ggcucagccuggugggccuc

SEQ ID NO: 2078230 - RNA, 13 nt, Human
ggcucagcucugg

SEQ ID NO: 2078231 - RNA, 14 nt, Human
ggcucagcucuggc

SEQ ID NO: 2078232 - RNA, 18 nt, Human
ggcucagcucuggcucac

SEQ ID NO: 2078233 - RNA, 21 nt, Human
ggcucagcucuggcucacaga

SEQ ID NO: 2078234 - RNA, 20 nt, Human
ggcucagcggggacagcucc

SEQ ID NO: 2078235 - RNA, 19 nt, Human
ggcucagcggggacagcuc

SEQ ID NO: 2078236 - RNA, 14 nt, Human
ggcucagucucagg

SEQ ID NO: 2078237 - RNA, 15 nt, Human
ggcucagucucagga

SEQ ID NO: 2078238 - RNA, 17 nt, Human
ggcucagucucaggagc

SEQ ID NO: 2078239 - RNA, 20 nt, Human
ggcucauagggaagaccugc

SEQ ID NO: 2078240 - RNA, 17 nt, Human
ggcucauauuccugcag

SEQ ID NO: 2078241 - RNA, 20 nt, Human
ggcucauauuccugcagccu

SEQ ID NO: 2078242 - RNA, 21 nt, Human
ggcucauauuccugcagccug

SEQ ID NO: 2078243 - RNA, 22 nt, Human
ggcucauauuccugcagccugg

SEQ ID NO: 2078244 - RNA, 15 nt, Human
ggcugcucagggcug

SEQ ID NO: 2078245 - RNA, 15 nt, Human
ggcugcuacccagaa

SEQ ID NO: 2078246 - RNA, 16 nt, Human
ggcugcuacccagaaa

SEQ ID NO: 2078247 - RNA, 15 nt, Human
ggcugcucugccugu

SEQ ID NO: 2078248 - RNA, 16 nt, Human
ggcugcucugccugug

SEQ ID NO: 2078249 - RNA, 15 nt, Human
ggcugcuccuccagg

SEQ ID NO: 2078250 - RNA, 18 nt, Human
ggcugcuccuccagggcc

SEQ ID NO: 2078251 - RNA, 19 nt, Human
ggcugcuccuccagggcca

SEQ ID NO: 2078252 - RNA, 23 nt, Human
ggcugcuccuccagggccacgug

SEQ ID NO: 2078253 - RNA, 12 nt, Human
ggcugcuccucc

SEQ ID NO: 2078254 - RNA, 13 nt, Human
ggcugcuccucca

SEQ ID NO: 2078255 - RNA, 12 nt, Human
ggcuccuggacu

SEQ ID NO: 2078256 - RNA, 13 nt, Human
ggcuccuggaaag

SEQ ID NO: 2078257 - RNA, 15 nt, Human
ggcucugugcaggga

SEQ ID NO: 2078258 - RNA, 18 nt, Human
ggcucuguggcuugcuag

SEQ ID NO: 2078259 - RNA, 13 nt, Human
ggcucuucuccuu

SEQ ID NO: 2078260 - RNA, 12 nt, Human
ggcucuucuccu

SEQ ID NO: 2078261 - RNA, 23 nt, Human
ggcucuucuccuuucacaaccuu

SEQ ID NO: 2078262 - RNA, 15 nt, Human
ggcucuucuccuuuc

SEQ ID NO: 2078263 - RNA, 14 nt, Human
ggcucuucuccuuu

SEQ ID NO: 2078264 - RNA, 24 nt, Human
ggcugacacguccaccccagugca

SEQ ID NO: 2078265 - RNA, 16 nt, Human
ggcucuucuccuuuca

SEQ ID NO: 2078266 - RNA, 22 nt, Human
ggcugcccuggugcugccacac

SEQ ID NO: 2078267 - RNA, 17 nt, Human
ggcugccaaggccagag

SEQ ID NO: 2078268 - RNA, 14 nt, Human
ggcugccuggagcc

SEQ ID NO: 2078269 - RNA, 15 nt, Human
ggcugccuggagccc

SEQ ID NO: 2078270 - RNA, 18 nt, Human
ggcugccuggagccccac

SEQ ID NO: 2078271 - RNA, 16 nt, Human
ggcugccuggccccca

SEQ ID NO: 2078272 - RNA, 16 nt, Human
ggcugccuuagaaccu

SEQ ID NO: 2078273 - RNA, 22 nt, Human
ggcugcggaaugaaccacaucu

SEQ ID NO: 2078274 - RNA, 19 nt, Human
ggcugcccuggugcugcca

SEQ ID NO: 2078275 - RNA, 16 nt, Human
ggcugcccuggugcug

SEQ ID NO: 2078276 - RNA, 15 nt, Human
ggcugcccuggugcu

SEQ ID NO: 2078277 - RNA, 14 nt, Human
ggcugcccuggugc

SEQ ID NO: 2078278 - RNA, 13 nt, Human
ggcugcccuggug

SEQ ID NO: 2078279 - RNA, 15 nt, Human
ggcugccaaggccag

SEQ ID NO: 2078280 - RNA, 15 nt, Human
gggaggucgaggcag

SEQ ID NO: 2078281 - RNA, 17 nt, Human
gggaggguuggggaggg

SEQ ID NO: 2078282 - RNA, 18 nt, Human
gggaggucaaggcugcag

SEQ ID NO: 2078283 - RNA, 21 nt, Human
gggaggggguuacaaacugca

SEQ ID NO: 2078284 - RNA, 22 nt, Human
gggagggguaaaauuccuuagc

SEQ ID NO: 2078285 - RNA, 13 nt, Human
gggaggcuucccc

SEQ ID NO: 2078286 - RNA, 14 nt, Human
gggaggcugaggcg

SEQ ID NO: 2078287 - RNA, 22 nt, Human
gggagaggccaugauucgccca

SEQ ID NO: 2078288 - RNA, 11 nt, Human
gggagcagugu

SEQ ID NO: 2078289 - RNA, 19 nt, Human
gggagcagugucuuccaua

SEQ ID NO: 2078290 - RNA, 20 nt, Human
gggagcagugucuuccauaa

SEQ ID NO: 2078291 - RNA, 10 nt, Human
gggaggcuga

SEQ ID NO: 2078292 - RNA, 12 nt, Human
gggagccagggc

SEQ ID NO: 2078293 - RNA, 23 nt, Human
gggacuuggaagcuccgcuuucu

SEQ ID NO: 2078294 - RNA, 18 nt, Human
gggacuuggaagcuccgc

SEQ ID NO: 2078295 - RNA, 17 nt, Human
gggacuuggaagcuccg

SEQ ID NO: 2078296 - RNA, 15 nt, Human
gggacuuggaagcuc

SEQ ID NO: 2078297 - RNA, 14 nt, Human
aaaaggaagacuag

SEQ ID NO: 2078298 - RNA, 15 nt, Human
aaaaggaagacuaga

SEQ ID NO: 2078299 - RNA, 15 nt, Human
gggagaaaagacaug

SEQ ID NO: 2078300 - RNA, 10 nt, Human
gggagaaaac

SEQ ID NO: 2078301 - RNA, 14 nt, Human
gggagaaccucagg

SEQ ID NO: 2078302 - RNA, 16 nt, Human
gggagaaccucaggcu

SEQ ID NO: 2078303 - RNA, 15 nt, Human
gggagaaccucaggc

SEQ ID NO: 2078304 - RNA, 14 nt, Human
aaaagccaucaugu

SEQ ID NO: 2078305 - RNA, 20 nt, Human
aaaagccaucauguaaauua

SEQ ID NO: 2078306 - RNA, 13 nt, Human
aaaagccauguuu

SEQ ID NO: 2078307 - RNA, 14 nt, Human
aaaagccauguuua

SEQ ID NO: 2078308 - RNA, 15 nt, Human
aaaagccauguuuaa

SEQ ID NO: 2078309 - RNA, 17 nt, Human
aaaagccauguuuaaga

SEQ ID NO: 2078310 - RNA, 20 nt, Human
aaaagccauguuuaagauuu

SEQ ID NO: 2078311 - RNA, 21 nt, Human
aaaagccauguuuaagauuua

SEQ ID NO: 2078312 - RNA, 15 nt, Human
aaaagcuuuuaugag

SEQ ID NO: 2078313 - RNA, 21 nt, Human
aaaagccucaacuagucauuu

SEQ ID NO: 2078314 - RNA, 13 nt, Human
aaaaggaagacua

SEQ ID NO: 2078315 - RNA, 13 nt, Human
aaaaccauugcuu

SEQ ID NO: 2078316 - RNA, 14 nt, Human
aaaaccauugcuuc

SEQ ID NO: 2078317 - RNA, 16 nt, Human
aaaaccauugcuucac

SEQ ID NO: 2078318 - RNA, 12 nt, Human
aaaacccagaga

SEQ ID NO: 2078319 - RNA, 13 nt, Human
aaaaccuuucaaa

SEQ ID NO: 2078320 - RNA, 13 nt, Human
aaaacgcauggag

SEQ ID NO: 2078321 - RNA, 14 nt, Human
aaaacgcauggagu

SEQ ID NO: 2078322 - RNA, 18 nt, Human
aaaacgcauggagugugu

SEQ ID NO: 2078323 - RNA, 20 nt, Human
aaaaccuuucaaauuucaca

SEQ ID NO: 2078324 - RNA, 18 nt, Human
aaaacgguuaaaacuguc

SEQ ID NO: 2078325 - RNA, 17 nt, Human
aaaacgcauggagugug

SEQ ID NO: 2078326 - RNA, 16 nt, Human
aaaacgguuaaaacug

SEQ ID NO: 2078327 - RNA, 21 nt, Human
aaaacuuaaccgcaucagaag

SEQ ID NO: 2078328 - RNA, 15 nt, Human
aaaacugacagagga

SEQ ID NO: 2078329 - RNA, 16 nt, Human
aaaacugacuccuuag

SEQ ID NO: 2078330 - RNA, 14 nt, Human
aaaagauguauccu

SEQ ID NO: 2078331 - RNA, 16 nt, Human
aaaacauccagauaca

SEQ ID NO: 2078332 - RNA, 21 nt, Human
aaaacauccagauacacccaa

SEQ ID NO: 2078333 - RNA, 12 nt, Human
aaaacccaagug

SEQ ID NO: 2078334 - RNA, 17 nt, Human
aaaaccacuagaacucu

SEQ ID NO: 2078335 - RNA, 19 nt, Human
aaaaccacagcccugucag

SEQ ID NO: 2078336 - RNA, 20 nt, Human
aaaaccacagcccugucagu

SEQ ID NO: 2078337 - RNA, 16 nt, Human
aaaaccacuagaacuc

SEQ ID NO: 2078338 - RNA, 22 nt, Human
gggacaugaaauaaaugcccca

SEQ ID NO: 2078339 - RNA, 13 nt, Human
gggacauguggaa

SEQ ID NO: 2078340 - RNA, 14 nt, Human
gggaccagccaaga

SEQ ID NO: 2078341 - RNA, 11 nt, Human
aaaaaugguaa

SEQ ID NO: 2078342 - RNA, 15 nt, Human
aaaaaugguaaaauu

SEQ ID NO: 2078343 - RNA, 16 nt, Human
aaaaaugguaaaauug

SEQ ID NO: 2078344 - RNA, 19 nt, Human
aaaaaugguaaaauugcau

SEQ ID NO: 2078345 - RNA, 19 nt, Human
gggaagaaaagagcuuucu

SEQ ID NO: 2078346 - RNA, 17 nt, Human
gggacagagacaccugc

SEQ ID NO: 2078347 - RNA, 12 nt, Human
gggaagagaaac

SEQ ID NO: 2078348 - RNA, 14 nt, Human
gggaagagaaacag

SEQ ID NO: 2078349 - RNA, 13 nt, Human
gggacagcuccuu

SEQ ID NO: 2078350 - RNA, 12 nt, Human
gggacagcuccu

SEQ ID NO: 2078351 - RNA, 13 nt, Human
gggacagagcaga

SEQ ID NO: 2078352 - RNA, 18 nt, Human
gggacagagacaccugca

SEQ ID NO: 2078353 - RNA, 20 nt, Human
gggacagagacaccugcacc

SEQ ID NO: 2078354 - RNA, 15 nt, Human
ggcugggggccucac

SEQ ID NO: 2078355 - RNA, 15 nt, Human
gggacagcuccuucu

SEQ ID NO: 2078356 - RNA, 18 nt, Human
gggaagaagcucucuccu

SEQ ID NO: 2078357 - RNA, 18 nt, Human
gggaacgugacugcccca

SEQ ID NO: 2078358 - RNA, 14 nt, Human
gggaacgugacugc

SEQ ID NO: 2078359 - RNA, 17 nt, Human
gggaacgugacugcccc

SEQ ID NO: 2078360 - RNA, 15 nt, Human
gggaacucccaagaa

SEQ ID NO: 2078361 - RNA, 22 nt, Human
gggaacucccaagaacagcagg

SEQ ID NO: 2078362 - RNA, 13 nt, Human
gggaacuccugga

SEQ ID NO: 2078363 - RNA, 12 nt, Human
gggaacaguguu

SEQ ID NO: 2078364 - RNA, 15 nt, Human
ggcuucuguuucuag

SEQ ID NO: 2078365 - RNA, 20 nt, Human
ggcuucuguuucuaguugag

SEQ ID NO: 2078366 - RNA, 20 nt, Human
ggcuucuucagaucagugcu

SEQ ID NO: 2078367 - RNA, 20 nt, Human
gggaacaguguuucccauaa

SEQ ID NO: 2078368 - RNA, 18 nt, Human
ggcuucuggagcccuugg

SEQ ID NO: 2078369 - RNA, 20 nt, Human
ggcuucuggagcccuugggu

SEQ ID NO: 2078370 - RNA, 13 nt, Human
ggcuucuggagcc

SEQ ID NO: 2078371 - RNA, 16 nt, Human
ggcuucuggagcccuu

SEQ ID NO: 2078372 - RNA, 22 nt, Human
ggcuucccgcucagcccucccu

SEQ ID NO: 2078373 - RNA, 15 nt, Human
ggcuguagaaggaga

SEQ ID NO: 2078374 - RNA, 21 nt, Human
ggcuuccucaguuccugcccu

SEQ ID NO: 2078375 - RNA, 11 nt, Human
ggcuucugaug

SEQ ID NO: 2078376 - RNA, 16 nt, Human
ggcuucugaugaaucu

SEQ ID NO: 2078377 - RNA, 18 nt, Human
ggcuucugaugaaucuug

SEQ ID NO: 2078378 - RNA, 19 nt, Human
ggcuucugaugaaucuugc

SEQ ID NO: 2078379 - RNA, 21 nt, Human
aaaaauaaauuugguucuaau

SEQ ID NO: 2078380 - RNA, 19 nt, Human
aaaaauaaccccaaaauga

SEQ ID NO: 2078381 - RNA, 22 nt, Human
aaaaauaaccccaaaaugaaga

SEQ ID NO: 2078382 - RNA, 19 nt, Human
ggcugggggccucagugcc

SEQ ID NO: 2078383 - RNA, 17 nt, Human
ggcugggggccucagug

SEQ ID NO: 2078384 - RNA, 16 nt, Human
ggcugggggccucagu

SEQ ID NO: 2078385 - RNA, 15 nt, Human
ggcugggggccucag

SEQ ID NO: 2078386 - RNA, 11 nt, Human
aaaaauaaggu

SEQ ID NO: 2078387 - RNA, 12 nt, Human
aaaaauaauaaa

SEQ ID NO: 2078388 - RNA, 17 nt, Human
aaaaauaauaaauugca

SEQ ID NO: 2078389 - RNA, 16 nt, Human
aaaaauaauaauaaug

SEQ ID NO: 2078390 - RNA, 19 nt, Human
ggcuggguggcaccagcag

SEQ ID NO: 2078391 - RNA, 14 nt, Human
ggcugggugcccac

SEQ ID NO: 2078392 - RNA, 15 nt, Human
ggcugggugcccaca

SEQ ID NO: 2078393 - RNA, 16 nt, Human
ggcugggugcccacag

SEQ ID NO: 2078394 - RNA, 17 nt, Human
ggcugggugcccacagc

SEQ ID NO: 2078395 - RNA, 21 nt, Human
ggcugggugcccacagcccgc

SEQ ID NO: 2078396 - RNA, 22 nt, Human
ggcugggugcccacagcccgca

SEQ ID NO: 2078397 - RNA, 18 nt, Human
ggcuguaucccaugagcc

SEQ ID NO: 2078398 - RNA, 20 nt, Human
ggcuucaguggcagcugcuu

SEQ ID NO: 2078399 - RNA, 19 nt, Human
ggcuucaguggcagcugcu

SEQ ID NO: 2078400 - RNA, 17 nt, Human
ggcuucaguggcagcug

SEQ ID NO: 2078401 - RNA, 18 nt, Human
ggcuucaguggcagcugc

SEQ ID NO: 2078402 - RNA, 18 nt, Human
ggcuucccgcucagcccu

SEQ ID NO: 2078403 - RNA, 17 nt, Human
ggcuucccgcucagccc

SEQ ID NO: 2078404 - RNA, 16 nt, Human
ggcuucccgcucagcc

SEQ ID NO: 2078405 - RNA, 15 nt, Human
ggcuucccgcucagc

SEQ ID NO: 2078406 - RNA, 21 nt, Human
ggcuucccgcucagcccuccc

SEQ ID NO: 2078407 - RNA, 19 nt, Human
ggcuucccgcucagcccuc

SEQ ID NO: 2078408 - RNA, 16 nt, Human
ggcuuccucauaguau

SEQ ID NO: 2078409 - RNA, 14 nt, Human
ggcuucccgcucag

SEQ ID NO: 2078410 - RNA, 9 nt, Human
aaagacaga

SEQ ID NO: 2078411 - RNA, 19 nt, Human
aaagacccuaaaucugagg

SEQ ID NO: 2078412 - RNA, 20 nt, Human
aaagacccuaaaucugagga

SEQ ID NO: 2078413 - RNA, 19 nt, Human
aaagacauucugacaucuu

SEQ ID NO: 2078414 - RNA, 15 nt, Human
aaagacaugaauaug

SEQ ID NO: 2078415 - RNA, 14 nt, Human
aaagacaucaagca

SEQ ID NO: 2078416 - RNA, 14 nt, Human
aaagacagagcugg

SEQ ID NO: 2078417 - RNA, 13 nt, Human
aaagacagaagcc

SEQ ID NO: 2078418 - RNA, 19 nt, Human
aaagacugaccaauauugu

SEQ ID NO: 2078419 - RNA, 19 nt, Human
aaagacgauuugucaguua

SEQ ID NO: 2078420 - RNA, 23 nt, Human
aaacuuuauuuuauauaauaaag

SEQ ID NO: 2078421 - RNA, 15 nt, Human
aaacuuuuagaaacu

SEQ ID NO: 2078422 - RNA, 13 nt, Human
aaacuuuuauaaa

SEQ ID NO: 2078423 - RNA, 14 nt, Human
aaacuuuuauaaau

SEQ ID NO: 2078424 - RNA, 16 nt, Human
aaacuuuuauaaauua

SEQ ID NO: 2078425 - RNA, 17 nt, Human
aaacuuuuauaaauuaa

SEQ ID NO: 2078426 - RNA, 18 nt, Human
aaacuuuuauaaauuaaa

SEQ ID NO: 2078427 - RNA, 19 nt, Human
aaacuuuuauaaauuaaau

SEQ ID NO: 2078428 - RNA, 21 nt, Human
aaacuuuuauaaauuaaauau

SEQ ID NO: 2078429 - RNA, 11 nt, Human
aaacuuguaaa

SEQ ID NO: 2078430 - RNA, 12 nt, Human
aaacuuguaaau

SEQ ID NO: 2078431 - RNA, 22 nt, Human
aaacuuccagugcaacacugaa

SEQ ID NO: 2078432 - RNA, 21 nt, Human
aaacuuccagugcaacacuga

SEQ ID NO: 2078433 - RNA, 16 nt, Human
aaacuuccaagaccug

SEQ ID NO: 2078434 - RNA, 12 nt, Human
ggguggggcugc

SEQ ID NO: 2078435 - RNA, 19 nt, Human
aaacuuccagugcaacacu

SEQ ID NO: 2078436 - RNA, 14 nt, Human
ggguggggcugcuc

SEQ ID NO: 2078437 - RNA, 22 nt, Human
aaagauggcugugccucugccu

SEQ ID NO: 2078438 - RNA, 21 nt, Human
aaagauggcugugccucugcc

SEQ ID NO: 2078439 - RNA, 16 nt, Human
aaagauggaugugcuu

SEQ ID NO: 2078440 - RNA, 23 nt, Human
aaagauggcugugccucugccug

SEQ ID NO: 2078441 - RNA, 12 nt, Human
aaagauggccuu

SEQ ID NO: 2078442 - RNA, 14 nt, Human
aaagcaaggaucuu

SEQ ID NO: 2078443 - RNA, 17 nt, Human
aaagcaaggaucuuuca

SEQ ID NO: 2078444 - RNA, 15 nt, Human
aaagcaauaaaugaa

SEQ ID NO: 2078445 - RNA, 17 nt, Human
aaagcaauaaaugaaug

SEQ ID NO: 2078446 - RNA, 13 nt, Human
gguccugucuccc

SEQ ID NO: 2078447 - RNA, 17 nt, Human
gguccugucuccccucu

SEQ ID NO: 2078448 - RNA, 21 nt, Human
gguccugucuccccucugcug

SEQ ID NO: 2078449 - RNA, 23 nt, Human
gguccugucuccccucugcuggc

SEQ ID NO: 2078450 - RNA, 10 nt, Human
gguccuucaa

SEQ ID NO: 2078451 - RNA, 21 nt, Human
gguccuucaaguuagcucagg

SEQ ID NO: 2078452 - RNA, 21 nt, Human
gguccuuugggaaaggagaag

SEQ ID NO: 2078453 - RNA, 15 nt, Human
gguccuuccaggccc

SEQ ID NO: 2078454 - RNA, 16 nt, Human
gguccuuccaggcccc

SEQ ID NO: 2078455 - RNA, 15 nt, Human
gguccuucccucucc

SEQ ID NO: 2078456 - RNA, 19 nt, Human
gguccuucccucuccccaa

SEQ ID NO: 2078457 - RNA, 14 nt, Human
aaagacuguacaaa

SEQ ID NO: 2078458 - RNA, 14 nt, Human
aaagagauacagag

SEQ ID NO: 2078459 - RNA, 21 nt, Human
aaagagauaccaagaugccau

SEQ ID NO: 2078460 - RNA, 20 nt, Human
aaagagaguuaaucaacuga

SEQ ID NO: 2078461 - RNA, 16 nt, Human
aaagacugagcucaag

SEQ ID NO: 2078462 - RNA, 13 nt, Human
aaagacuguacaa

SEQ ID NO: 2078463 - RNA, 19 nt, Human
aaagaugcuucucacugcc

SEQ ID NO: 2078464 - RNA, 17 nt, Human
aaagaugcuucucacug

SEQ ID NO: 2078465 - RNA, 14 nt, Human
aaagaugcuucuca

SEQ ID NO: 2078466 - RNA, 15 nt, Human
aaagagcaagucugg

SEQ ID NO: 2078467 - RNA, 23 nt, Human
aaagagcaagucuggaucuggga

SEQ ID NO: 2078468 - RNA, 11 nt, Human
aaagagcugcc

SEQ ID NO: 2078469 - RNA, 12 nt, Human
aaagagcugccu

SEQ ID NO: 2078470 - RNA, 13 nt, Human
aaagagcugccua

SEQ ID NO: 2078471 - RNA, 22 nt, Human
aaagagcuuucuucccgaaccc

SEQ ID NO: 2078472 - RNA, 15 nt, Human
ggugcagcagugagg

SEQ ID NO: 2078473 - RNA, 16 nt, Human
ggugcaacccuuaccc

SEQ ID NO: 2078474 - RNA, 15 nt, Human
ggugcaagagggagc

SEQ ID NO: 2078475 - RNA, 16 nt, Human
ggugcagagugcccag

SEQ ID NO: 2078476 - RNA, 17 nt, Human
ggugcagagugcccaga

SEQ ID NO: 2078477 - RNA, 19 nt, Human
ggugcagagugcccagaac

SEQ ID NO: 2078478 - RNA, 22 nt, Human
ggugcauacacccccaccuccu

SEQ ID NO: 2078479 - RNA, 21 nt, Human
ggugcuuguucccucucccug

SEQ ID NO: 2078480 - RNA, 18 nt, Human
ggugcaugccgcugcauc

SEQ ID NO: 2078481 - RNA, 19 nt, Human
ggugcauuacagagaggag

SEQ ID NO: 2078482 - RNA, 15 nt, Human
gguggaacaagcaca

SEQ ID NO: 2078483 - RNA, 13 nt, Human
gguggaagcccuc

SEQ ID NO: 2078484 - RNA, 18 nt, Human
gguggaagcccuccuucc

SEQ ID NO: 2078485 - RNA, 19 nt, Human
gguggaagcccuccuucca

SEQ ID NO: 2078486 - RNA, 20 nt, Human
gguggaagcccuccuuccac

SEQ ID NO: 2078487 - RNA, 13 nt, Human
gguggaugccugg

SEQ ID NO: 2078488 - RNA, 15 nt, Human
gguggaguugaaaga

SEQ ID NO: 2078489 - RNA, 20 nt, Human
gguggagguugcagugagcu

SEQ ID NO: 2078490 - RNA, 15 nt, Human
gguggaucacagagg

SEQ ID NO: 2078491 - RNA, 16 nt, Human
gguggaucaccugagg

SEQ ID NO: 2078492 - RNA, 13 nt, Human
gguggacacacaa

SEQ ID NO: 2078493 - RNA, 13 nt, Human
gguggaggagagc

SEQ ID NO: 2078494 - RNA, 18 nt, Human
gguggaggagagccuggu

SEQ ID NO: 2078495 - RNA, 12 nt, Human
ggucgcccagga

SEQ ID NO: 2078496 - RNA, 13 nt, Human
ggucgcccaggag

SEQ ID NO: 2078497 - RNA, 13 nt, Human
ggucgaggcagga

SEQ ID NO: 2078498 - RNA, 20 nt, Human
ggucgaccccaaagccccuu

SEQ ID NO: 2078499 - RNA, 16 nt, Human
ggugaaagaaaucaug

SEQ ID NO: 2078500 - RNA, 17 nt, Human
ggugaaagaaaucaugu

SEQ ID NO: 2078501 - RNA, 19 nt, Human
ggugaaagaaaucauguua

SEQ ID NO: 2078502 - RNA, 13 nt, Human
ggugaaagggagc

SEQ ID NO: 2078503 - RNA, 14 nt, Human
ggucgcccaggaga

SEQ ID NO: 2078504 - RNA, 24 nt, Human
ggugauccacccaccucagccucc

SEQ ID NO: 2078505 - RNA, 23 nt, Human
ggugauccacccaccucagccuc

SEQ ID NO: 2078506 - RNA, 18 nt, Human
ggugauccacccaccuca

SEQ ID NO: 2078507 - RNA, 14 nt, Human
ggugaaagggagcu

SEQ ID NO: 2078508 - RNA, 18 nt, Human
ggugcaaaguucccuacu

SEQ ID NO: 2078509 - RNA, 19 nt, Human
ggugaucaauuaaauguag

SEQ ID NO: 2078510 - RNA, 12 nt, Human
ggugcaaauccu

SEQ ID NO: 2078511 - RNA, 15 nt, Human
aaagcugaaaacugc

SEQ ID NO: 2078512 - RNA, 12 nt, Human
aaagcaccugcc

SEQ ID NO: 2078513 - RNA, 17 nt, Human
gguggaucacagaggcu

SEQ ID NO: 2078514 - RNA, 22 nt, Human
gguccugcuauuucccaagcug

SEQ ID NO: 2078515 - RNA, 13 nt, Human
aaagcaccugccg

SEQ ID NO: 2078516 - RNA, 21 nt, Human
aaagcacuccucccugaugua

SEQ ID NO: 2078517 - RNA, 22 nt, Human
aaagcacuccucccugauguac

SEQ ID NO: 2078518 - RNA, 15 nt, Human
aaagcuuguuaagau

SEQ ID NO: 2078519 - RNA, 14 nt, Human
aaagcuuuccugga

SEQ ID NO: 2078520 - RNA, 15 nt, Human
aaagcuuuccuggag

SEQ ID NO: 2078521 - RNA, 14 nt, Human
aaagcuuuuaugag

SEQ ID NO: 2078522 - RNA, 23 nt, Human
aaagcuuuuaugagcucauguag

SEQ ID NO: 2078523 - RNA, 21 nt, Human
aaagcuuugcuuaugguaaua

SEQ ID NO: 2078524 - RNA, 12 nt, Human
aaagcugaaaac

SEQ ID NO: 2078525 - RNA, 15 nt, Human
aaagcugccuguagu

SEQ ID NO: 2078526 - RNA, 16 nt, Human
aaagcugccuguaguu

SEQ ID NO: 2078527 - RNA, 17 nt, Human
aaagcugccuguaguua

SEQ ID NO: 2078528 - RNA, 21 nt, Human
aaagcugccuguaguuaggaa

SEQ ID NO: 2078529 - RNA, 23 nt, Human
aaagcugccuguaguuaggaaau

SEQ ID NO: 2078530 - RNA, 13 nt, Human
aaagcugcugaca

SEQ ID NO: 2078531 - RNA, 19 nt, Human
aaagcuggugggugaaaga

SEQ ID NO: 2078532 - RNA, 22 nt, Human
aaagcuggugggugaaagaaau

SEQ ID NO: 2078533 - RNA, 23 nt, Human
aaagcuggugggugaaagaaauc

SEQ ID NO: 2078534 - RNA, 15 nt, Human
aaagcugcuaaaucu

SEQ ID NO: 2078535 - RNA, 16 nt, Human
aaagcugcuaaaucuc

SEQ ID NO: 2078536 - RNA, 17 nt, Human
aaagcugcuaaaucucc

SEQ ID NO: 2078537 - RNA, 18 nt, Human
aaagcugcuaaaucuccu

SEQ ID NO: 2078538 - RNA, 22 nt, Human
aaagcugcuaaaucuccuauuu

SEQ ID NO: 2078539 - RNA, 22 nt, Human
aaagggacuuggaagcuccgcu

SEQ ID NO: 2078540 - RNA, 17 nt, Human
aaagggagagagagagg

SEQ ID NO: 2078541 - RNA, 23 nt, Human
aaagggagcacuggguugacuuu

SEQ ID NO: 2078542 - RNA, 22 nt, Human
aaagggagcagagaaggccagg

SEQ ID NO: 2078543 - RNA, 18 nt, Human
aaagggagcuaucaggaa

SEQ ID NO: 2078544 - RNA, 10 nt, Human
aaagggugaa

SEQ ID NO: 2078545 - RNA, 14 nt, Human
aaagggugaagcua

SEQ ID NO: 2078546 - RNA, 19 nt, Human
aaagggugaagcuauuuau

SEQ ID NO: 2078547 - RNA, 21 nt, Human
aaagggugaagcuauuuaucu

SEQ ID NO: 2078548 - RNA, 18 nt, Human
aaagggugcugcuucccu

SEQ ID NO: 2078549 - RNA, 13 nt, Human
aaaggaagcuuuc

SEQ ID NO: 2078550 - RNA, 22 nt, Human
aaaggaagcuuucucugcuuca

SEQ ID NO: 2078551 - RNA, 21 nt, Human
aaaggagagucuugcagugau

SEQ ID NO: 2078552 - RNA, 21 nt, Human
aaaggagagcuagcagcaggg

SEQ ID NO: 2078553 - RNA, 17 nt, Human
aaaggagagcuagcagc

SEQ ID NO: 2078554 - RNA, 17 nt, Human
aaaggaaaucucacccc

SEQ ID NO: 2078555 - RNA, 12 nt, Human
aaaggaagacua

SEQ ID NO: 2078556 - RNA, 13 nt, Human
aaaggaagacuag

SEQ ID NO: 2078557 - RNA, 23 nt, Human
aaaggaaaucucaccccauccca

SEQ ID NO: 2078558 - RNA, 16 nt, Human
gggucccagccacccc

SEQ ID NO: 2078559 - RNA, 23 nt, Human
ggggggcccgccuggcagaacug

SEQ ID NO: 2078560 - RNA, 18 nt, Human
gggggucaggaggcaggg

SEQ ID NO: 2078561 - RNA, 22 nt, Human
gggggcuauagcuacaggaagc

SEQ ID NO: 2078562 - RNA, 18 nt, Human
gggggccugaccuccccc

SEQ ID NO: 2078563 - RNA, 19 nt, Human
ggguccaggggaugggagg

SEQ ID NO: 2078564 - RNA, 16 nt, Human
aaaccaaucaagauaa

SEQ ID NO: 2078565 - RNA, 20 nt, Human
aaaccuuuuggaaaaucugc

SEQ ID NO: 2078566 - RNA, 15 nt, Human
aaacgggcucagcaa

SEQ ID NO: 2078567 - RNA, 19 nt, Human
aaaccuuucaaauuucaca

SEQ ID NO: 2078568 - RNA, 11 nt, Human
aaaccuuucaa

SEQ ID NO: 2078569 - RNA, 17 nt, Human
aaaccuuucaaauuuca

SEQ ID NO: 2078570 - RNA, 22 nt, Human
aaacauuaguucuauuucuauc

SEQ ID NO: 2078571 - RNA, 16 nt, Human
aaaccaagccguggcu

SEQ ID NO: 2078572 - RNA, 16 nt, Human
aaacauugaaguaaug

SEQ ID NO: 2078573 - RNA, 23 nt, Human
aaaccaagucaagugaaaaagga

SEQ ID NO: 2078574 - RNA, 22 nt, Human
aaaccucacccgaggcugccca

SEQ ID NO: 2078575 - RNA, 15 nt, Human
aaacuguccucuuuc

SEQ ID NO: 2078576 - RNA, 18 nt, Human
aaacuguccucuuucaga

SEQ ID NO: 2078577 - RNA, 20 nt, Human
aaacuguccucuuucagaaa

SEQ ID NO: 2078578 - RNA, 21 nt, Human
aaacuguccucuuucagaaaa

SEQ ID NO: 2078579 - RNA, 12 nt, Human
aaacugucccuu

SEQ ID NO: 2078580 - RNA, 14 nt, Human
aaacuggaaguuau

SEQ ID NO: 2078581 - RNA, 15 nt, Human
aaacuggaaguuauu

SEQ ID NO: 2078582 - RNA, 14 nt, Human
aaacuguguaacug

SEQ ID NO: 2078583 - RNA, 17 nt, Human
aaacuguguaacugccc

SEQ ID NO: 2078584 - RNA, 20 nt, Human
aaacuguguaacugcccaaa

SEQ ID NO: 2078585 - RNA, 19 nt, Human
aaacugcucuaagcacacg

SEQ ID NO: 2078586 - RNA, 20 nt, Human
aaacuauuggaaaguacucc

SEQ ID NO: 2078587 - RNA, 19 nt, Human
ggguggcaccagcagccug

SEQ ID NO: 2078588 - RNA, 19 nt, Human
aaacuguguggacugugau

SEQ ID NO: 2078589 - RNA, 20 nt, Human
aaacuguguggacugugaug

SEQ ID NO: 2078590 - RNA, 17 nt, Human
aaacuaggaaauuuuuu

SEQ ID NO: 2078591 - RNA, 15 nt, Human
aaacgguuaaaacug

SEQ ID NO: 2078592 - RNA, 17 nt, Human
aaacgguuaaaacuguc

SEQ ID NO: 2078593 - RNA, 16 nt, Human
aaacucaccauguaaa

SEQ ID NO: 2078594 - RNA, 18 nt, Human
aaacucaccauguaaaag

SEQ ID NO: 2078595 - RNA, 16 nt, Human
aaacucaccugcuggc

SEQ ID NO: 2078596 - RNA, 18 nt, Human
aaacucaccugcuggccc

SEQ ID NO: 2078597 - RNA, 19 nt, Human
aaacucaccugcuggcccc

SEQ ID NO: 2078598 - RNA, 20 nt, Human
aaacucaccugcuggccccu

SEQ ID NO: 2078599 - RNA, 22 nt, Human
aaacucaccugcuggccccuca

SEQ ID NO: 2078600 - RNA, 11 nt, Human
aaacuauuuau

SEQ ID NO: 2078601 - RNA, 13 nt, Human
aaacuauuuaucu

SEQ ID NO: 2078602 - RNA, 22 nt, Human
aaacuauuuaucuguguuuuug

SEQ ID NO: 2078603 - RNA, 15 nt, Human
aaacucauuuccuau

SEQ ID NO: 2078604 - RNA, 22 nt, Human
aaacucauuuccuauguaacug

SEQ ID NO: 2078605 - RNA, 13 nt, Human
gggaugagaaagg

SEQ ID NO: 2078606 - RNA, 17 nt, Human
gggaugacuagaggcag

SEQ ID NO: 2078607 - RNA, 23 nt, Human
gggaugacuagaggcagggaggg

SEQ ID NO: 2078608 - RNA, 17 nt, Human
gggaugccaucuguggg

SEQ ID NO: 2078609 - RNA, 17 nt, Human
aaaauguuuuguaagaa

SEQ ID NO: 2078610 - RNA, 20 nt, Human
aaaauguuuuguaagaaacc

SEQ ID NO: 2078611 - RNA, 21 nt, Human
aaaauguuuuguaagaaacca

SEQ ID NO: 2078612 - RNA, 14 nt, Human
aaaauuuaagcauu

SEQ ID NO: 2078613 - RNA, 15 nt, Human
aaaauuuaagcauug

SEQ ID NO: 2078614 - RNA, 16 nt, Human
aaaauuuaagcauugu

SEQ ID NO: 2078615 - RNA, 21 nt, Human
aaaauuuaagcauuguuugcu

SEQ ID NO: 2078616 - RNA, 23 nt, Human
aaaauuuaagcauuguuugcuua

SEQ ID NO: 2078617 - RNA, 21 nt, Human
aaaauuuuauaaaauuaagca

SEQ ID NO: 2078618 - RNA, 13 nt, Human
aaaauuucacauu

SEQ ID NO: 2078619 - RNA, 13 nt, Human
aaaauuuauaugu

SEQ ID NO: 2078620 - RNA, 19 nt, Human
aaaauuuagaaauauaauu

SEQ ID NO: 2078621 - RNA, 14 nt, Human
aaaauuuuauagcu

SEQ ID NO: 2078622 - RNA, 16 nt, Human
aaaauuuugccuaaua

SEQ ID NO: 2078623 - RNA, 22 nt, Human
aaaauuuugcuccccagugaag

SEQ ID NO: 2078624 - RNA, 23 nt, Human
aaaauuuugcuccccagugaagg

SEQ ID NO: 2078625 - RNA, 10 nt, Human
aaaauuuaua

SEQ ID NO: 2078626 - RNA, 13 nt, Human
aaaauuuuauucc

SEQ ID NO: 2078627 - RNA, 13 nt, Human
aaaauuuuguaau

SEQ ID NO: 2078628 - RNA, 15 nt, Human
aaaauuuuguaauuu

SEQ ID NO: 2078629 - RNA, 17 nt, Human
aaaauuuuguaauuuuc

SEQ ID NO: 2078630 - RNA, 18 nt, Human
aaaauuuuguaauuuucu

SEQ ID NO: 2078631 - RNA, 19 nt, Human
aaaauuuuguaauuuucuu

SEQ ID NO: 2078632 - RNA, 19 nt, Human
aaacacaaacgggcucagc

SEQ ID NO: 2078633 - RNA, 12 nt, Human
aaacaauuuauu

SEQ ID NO: 2078634 - RNA, 13 nt, Human
aaacaauuuauuu

SEQ ID NO: 2078635 - RNA, 16 nt, Human
aaacaauuuauuuuau

SEQ ID NO: 2078636 - RNA, 17 nt, Human
aaacaauuuauuuuauu

SEQ ID NO: 2078637 - RNA, 16 nt, Human
aaacaauauuguuucu

SEQ ID NO: 2078638 - RNA, 17 nt, Human
aaacaauauuguuucua

SEQ ID NO: 2078639 - RNA, 16 nt, Human
aaacaauauuuauugu

SEQ ID NO: 2078640 - RNA, 17 nt, Human
aaacaauauuuauugua

SEQ ID NO: 2078641 - RNA, 18 nt, Human
aaacaauauuuauuguau

SEQ ID NO: 2078642 - RNA, 22 nt, Human
aaacaauauuuauuguauuuua

SEQ ID NO: 2078643 - RNA, 17 nt, Human
aaacaaauaugcaaaag

SEQ ID NO: 2078644 - RNA, 14 nt, Human
aaacaaauaugcaa

SEQ ID NO: 2078645 - RNA, 13 nt, Human
aaacaaauaugca

SEQ ID NO: 2078646 - RNA, 11 nt, Human
aaacaaagugg

SEQ ID NO: 2078647 - RNA, 17 nt, Human
aaacaaaguggaaggaa

SEQ ID NO: 2078648 - RNA, 12 nt, Human
aaacaaauaugc

SEQ ID NO: 2078649 - RNA, 16 nt, Human
aaacaauaaaugugca

SEQ ID NO: 2078650 - RNA, 12 nt, Human
aaacaacaaaaa

SEQ ID NO: 2078651 - RNA, 14 nt, Human
aaacaacaaaaaau

SEQ ID NO: 2078652 - RNA, 14 nt, Human
aaacaauauuguuu

SEQ ID NO: 2078653 - RNA, 15 nt, Human
aaacaauauuguuuc

SEQ ID NO: 2078654 - RNA, 14 nt, Human
aaacacauagauuc

SEQ ID NO: 2078655 - RNA, 18 nt, Human
aaacacauagauucaccu

SEQ ID NO: 2078656 - RNA, 19 nt, Human
aaacacauagauucaccug

SEQ ID NO: 2078657 - RNA, 22 nt, Human
aaacacauagauucaccuguaa

SEQ ID NO: 2078658 - RNA, 12 nt, Human
aaacacagagag

SEQ ID NO: 2078659 - RNA, 14 nt, Human
aaacacaucuuccc

SEQ ID NO: 2078660 - RNA, 16 nt, Human
aaacacaucuucccua

SEQ ID NO: 2078661 - RNA, 21 nt, Human
aaacaggguguugucagcauc

SEQ ID NO: 2078662 - RNA, 23 nt, Human
aaacaggguguugucagcaucuu

SEQ ID NO: 2078663 - RNA, 13 nt, Human
ggggaagcccugg

SEQ ID NO: 2078664 - RNA, 14 nt, Human
ggggaagcccugga

SEQ ID NO: 2078665 - RNA, 22 nt, Human
ggggaauguuugccucugccuc

SEQ ID NO: 2078666 - RNA, 18 nt, Human
ggggaauguuugccucug

SEQ ID NO: 2078667 - RNA, 15 nt, Human
ggggaauucaucucu

SEQ ID NO: 2078668 - RNA, 21 nt, Human
ggggaauauuuuauucaaggu

SEQ ID NO: 2078669 - RNA, 17 nt, Human
aaacaggucaauacagu

SEQ ID NO: 2078670 - RNA, 22 nt, Human
aaacaugggguuggcugggccc

SEQ ID NO: 2078671 - RNA, 21 nt, Human
aaacaugguagaauuggagag

SEQ ID NO: 2078672 - RNA, 16 nt, Human
aaacauguuagaagca

SEQ ID NO: 2078673 - RNA, 17 nt, Human
aaacauguuagaagcaa

SEQ ID NO: 2078674 - RNA, 16 nt, Human
ggggacucagcccuga

SEQ ID NO: 2078675 - RNA, 14 nt, Human
ggggacugucuuuc

SEQ ID NO: 2078676 - RNA, 11 nt, Human
ggggagaaagu

SEQ ID NO: 2078677 - RNA, 14 nt, Human
ggggacucagcccu

SEQ ID NO: 2078678 - RNA, 15 nt, Human
ggggacucagcccug

SEQ ID NO: 2078679 - RNA, 21 nt, Human
ggggacgcugguagagaugga

SEQ ID NO: 2078680 - RNA, 23 nt, Human
ggggacgcugguagagauggagg

SEQ ID NO: 2078681 - RNA, 13 nt, Human
ggggacucagccc

SEQ ID NO: 2078682 - RNA, 18 nt, Human
gggggccucagugccacu

SEQ ID NO: 2078683 - RNA, 17 nt, Human
gggggccucagugccac

SEQ ID NO: 2078684 - RNA, 15 nt, Human
gggggccucagugcc

SEQ ID NO: 2078685 - RNA, 12 nt, Human
gggggccucagu

SEQ ID NO: 2078686 - RNA, 15 nt, Human
ggggccucagugcca

SEQ ID NO: 2078687 - RNA, 12 nt, Human
ggggccucaggu

SEQ ID NO: 2078688 - RNA, 14 nt, Human
gggggccaggugca

SEQ ID NO: 2078689 - RNA, 14 nt, Human
gggggccaugagcu

SEQ ID NO: 2078690 - RNA, 15 nt, Human
gggggccaugagcuc

SEQ ID NO: 2078691 - RNA, 21 nt, Human
gggggccaugaggccucagug

SEQ ID NO: 2078692 - RNA, 17 nt, Human
gggggccucagggcagc

SEQ ID NO: 2078693 - RNA, 21 nt, Human
gggggccucagggcagccugc

SEQ ID NO: 2078694 - RNA, 15 nt, Human
guaauccaccugccu

SEQ ID NO: 2078695 - RNA, 12 nt, Human
guaaucccagca

SEQ ID NO: 2078696 - RNA, 20 nt, Human
guaaucccagcacuuuggga

SEQ ID NO: 2078697 - RNA, 13 nt, Human
guaaucccagcag

SEQ ID NO: 2078698 - RNA, 15 nt, Human
guaaucccagcacuu

SEQ ID NO: 2078699 - RNA, 14 nt, Human
guaaucccagcacu

SEQ ID NO: 2078700 - RNA, 22 nt, Human
guaaucauuucuugggcccucc

SEQ ID NO: 2078701 - RNA, 23 nt, Human
guaaucauuucuugggcccuccu

SEQ ID NO: 2078702 - RNA, 20 nt, Human
guaauuuauaguuuauacag

SEQ ID NO: 2078703 - RNA, 23 nt, Human
guaauuuauaguuuauacaguuu

SEQ ID NO: 2078704 - RNA, 11 nt, Human
guaauuuauuu

SEQ ID NO: 2078705 - RNA, 17 nt, Human
guaaucccagcuacuca

SEQ ID NO: 2078706 - RNA, 18 nt, Human
guaaucccagcuacucag

SEQ ID NO: 2078707 - RNA, 21 nt, Human
guaaucccagcuacucaggag

SEQ ID NO: 2078708 - RNA, 19 nt, Human
guaacucuaauucccauuu

SEQ ID NO: 2078709 - RNA, 22 nt, Human
guaacugcauugagaacugcau

SEQ ID NO: 2078710 - RNA, 18 nt, Human
guaacugcauugagaacu

SEQ ID NO: 2078711 - RNA, 19 nt, Human
guaacugcauugagaacug

SEQ ID NO: 2078712 - RNA, 22 nt, Human
guaaagaaauuuaaaagacacu

SEQ ID NO: 2078713 - RNA, 21 nt, Human
guaaagaaauuuaaaagacac

SEQ ID NO: 2078714 - RNA, 23 nt, Human
guaacucuaauucccauuuugca

SEQ ID NO: 2078715 - RNA, 12 nt, Human
guaacuccacca

SEQ ID NO: 2078716 - RNA, 17 nt, Human
guaacuccaccaaccca

SEQ ID NO: 2078717 - RNA, 13 nt, Human
guaacugacaacu

SEQ ID NO: 2078718 - RNA, 12 nt, Human
guaauaaaguau

SEQ ID NO: 2078719 - RNA, 14 nt, Human
guaauaaaguauau

SEQ ID NO: 2078720 - RNA, 15 nt, Human
guaauaaaguauaua

SEQ ID NO: 2078721 - RNA, 17 nt, Human
guaauaaaguauauaau

SEQ ID NO: 2078722 - RNA, 12 nt, Human
guaauaaagugu

SEQ ID NO: 2078723 - RNA, 16 nt, Human
guaauaaaguguuuuc

SEQ ID NO: 2078724 - RNA, 17 nt, Human
guaauaaaguguuuuca

SEQ ID NO: 2078725 - RNA, 18 nt, Human
guaauaaaguguuuucag

SEQ ID NO: 2078726 - RNA, 19 nt, Human
guaauaaaguguuuucaga

SEQ ID NO: 2078727 - RNA, 20 nt, Human
guaauaaaguguuuucagag

SEQ ID NO: 2078728 - RNA, 14 nt, Human
guacacugaauauu

SEQ ID NO: 2078729 - RNA, 15 nt, Human
guacacugaauauuu

SEQ ID NO: 2078730 - RNA, 19 nt, Human
guacacguaaaucuguuca

SEQ ID NO: 2078731 - RNA, 23 nt, Human
guaauuuuggguggggagaagag

SEQ ID NO: 2078732 - RNA, 13 nt, Human
guaauuuucuuga

SEQ ID NO: 2078733 - RNA, 18 nt, Human
guaauuuucuugaugacu

SEQ ID NO: 2078734 - RNA, 15 nt, Human
guaauuuguguaaua

SEQ ID NO: 2078735 - RNA, 16 nt, Human
guaauuuguguaauaa

SEQ ID NO: 2078736 - RNA, 20 nt, Human
guaauuuguguaauaaagug

SEQ ID NO: 2078737 - RNA, 21 nt, Human
guaauuuguguaauaaagugu

SEQ ID NO: 2078738 - RNA, 22 nt, Human
guaauuuguguaauaaaguguu

SEQ ID NO: 2078739 - RNA, 12 nt, Human
aaauacaaacaa

SEQ ID NO: 2078740 - RNA, 16 nt, Human
aaauacaaguucuauu

SEQ ID NO: 2078741 - RNA, 17 nt, Human
aaauacaaguucuauuu

SEQ ID NO: 2078742 - RNA, 12 nt, Human
aaauacaauaaa

SEQ ID NO: 2078743 - RNA, 13 nt, Human
aaauacaauaaac

SEQ ID NO: 2078744 - RNA, 14 nt, Human
aaauacaauaaacu

SEQ ID NO: 2078745 - RNA, 15 nt, Human
aaauacaauaaacua

SEQ ID NO: 2078746 - RNA, 22 nt, Human
aaauacaauaaacuauuggaaa

SEQ ID NO: 2078747 - RNA, 14 nt, Human
aaauacaugcaucu

SEQ ID NO: 2078748 - RNA, 17 nt, Human
aaauacagauagauaua

SEQ ID NO: 2078749 - RNA, 19 nt, Human
aaauacaacuuaaauaaua

SEQ ID NO: 2078750 - RNA, 18 nt, Human
aaauacacauagcaugua

SEQ ID NO: 2078751 - RNA, 16 nt, Human
aaauacaguauucugu

SEQ ID NO: 2078752 - RNA, 23 nt, Human
aaauaccaaaauuauuucagaaa

SEQ ID NO: 2078753 - RNA, 21 nt, Human
aaauaccaaaauuauuucaga

SEQ ID NO: 2078754 - RNA, 15 nt, Human
aaauauacacacagc

SEQ ID NO: 2078755 - RNA, 19 nt, Human
aaauauaauuguuuuuuau

SEQ ID NO: 2078756 - RNA, 21 nt, Human
aaauauaauuguuuuuuaucu

SEQ ID NO: 2078757 - RNA, 14 nt, Human
aaauacucuaauuc

SEQ ID NO: 2078758 - RNA, 15 nt, Human
aaauacucuaauucu

SEQ ID NO: 2078759 - RNA, 16 nt, Human
aaauacucuaauucua

SEQ ID NO: 2078760 - RNA, 17 nt, Human
aaauacucuaauucuaa

SEQ ID NO: 2078761 - RNA, 18 nt, Human
aaauacucuaauucuaac

SEQ ID NO: 2078762 - RNA, 19 nt, Human
aaauacucuaauucuaacc

SEQ ID NO: 2078763 - RNA, 22 nt, Human
aaauacucuaauucuaaccaga

SEQ ID NO: 2078764 - RNA, 16 nt, Human
aaaguacauguuaaac

SEQ ID NO: 2078765 - RNA, 18 nt, Human
aaaggucccaaggcaagg

SEQ ID NO: 2078766 - RNA, 19 nt, Human
aaaguacuucuccacccug

SEQ ID NO: 2078767 - RNA, 14 nt, Human
aaagguauaauuuu

SEQ ID NO: 2078768 - RNA, 16 nt, Human
aaagguauaauuuuau

SEQ ID NO: 2078769 - RNA, 21 nt, Human
aaaguacuucuccacccugcu

SEQ ID NO: 2078770 - RNA, 20 nt, Human
aaaguacuucuccacccugc

SEQ ID NO: 2078771 - RNA, 23 nt, Human
aaaguacuucuccacccugcucu

SEQ ID NO: 2078772 - RNA, 13 nt, Human
aaaguauauauag

SEQ ID NO: 2078773 - RNA, 17 nt, Human
aaaguauauauagaauc

SEQ ID NO: 2078774 - RNA, 18 nt, Human
aaaguauauauagaaucu

SEQ ID NO: 2078775 - RNA, 14 nt, Human
aaaguauauauuua

SEQ ID NO: 2078776 - RNA, 15 nt, Human
aaaguauauauuuau

SEQ ID NO: 2078777 - RNA, 23 nt, Human
aaaguauauauuuauuuaagcuu

SEQ ID NO: 2078778 - RNA, 14 nt, Human
aaaguauauguuag

SEQ ID NO: 2078779 - RNA, 12 nt, Human
aaaguucugugu

SEQ ID NO: 2078780 - RNA, 13 nt, Human
aaaguucugugua

SEQ ID NO: 2078781 - RNA, 16 nt, Human
aaaguucuguguauuu

SEQ ID NO: 2078782 - RNA, 18 nt, Human
aaaguucuguguauuuaa

SEQ ID NO: 2078783 - RNA, 20 nt, Human
aaaguucuguguauuuaauu

SEQ ID NO: 2078784 - RNA, 21 nt, Human
aaaguucuguguauuuaauug

SEQ ID NO: 2078785 - RNA, 12 nt, Human
aaaguugaaauu

SEQ ID NO: 2078786 - RNA, 21 nt, Human
aaaguuauuaauauuuuaauu

SEQ ID NO: 2078787 - RNA, 20 nt, Human
aaaguuacuuugucagaggc

SEQ ID NO: 2078788 - RNA, 14 nt, Human
aaaguaucauggaa

SEQ ID NO: 2078789 - RNA, 19 nt, Human
aaaguaucauggaaauauu

SEQ ID NO: 2078790 - RNA, 22 nt, Human
aaaguaucauggaaauauuaug

SEQ ID NO: 2078791 - RNA, 14 nt, Human
aaaguauuccaccu

SEQ ID NO: 2078792 - RNA, 16 nt, Human
aaaguauuccaccuua

SEQ ID NO: 2078793 - RNA, 18 nt, Human
aaaguauuccaccuuaaa

SEQ ID NO: 2078794 - RNA, 20 nt, Human
aaaguauuccaccuuaaauu

SEQ ID NO: 2078795 - RNA, 21 nt, Human
aaaguauuccaccuuaaauua

SEQ ID NO: 2078796 - RNA, 16 nt, Human
aaaguuggugacagau

SEQ ID NO: 2078797 - RNA, 12 nt, Human
aaaguuuaaaau

SEQ ID NO: 2078798 - RNA, 13 nt, Human
aaaguuuaaaaug

SEQ ID NO: 2078799 - RNA, 14 nt, Human
aaaguuuaaaaugu

SEQ ID NO: 2078800 - RNA, 16 nt, Human
aaaguuuaaaauguau

SEQ ID NO: 2078801 - RNA, 15 nt, Human
aaauaacuucaagca

SEQ ID NO: 2078802 - RNA, 18 nt, Human
aaauaacuucaagcaaac

SEQ ID NO: 2078803 - RNA, 17 nt, Human
aaauaacuaguguugcu

SEQ ID NO: 2078804 - RNA, 18 nt, Human
aaauaaccccauucuuug

SEQ ID NO: 2078805 - RNA, 21 nt, Human
aaauaacacacauauaaacau

SEQ ID NO: 2078806 - RNA, 15 nt, Human
aaauaacacagagag

SEQ ID NO: 2078807 - RNA, 23 nt, Human
aaauaacacagagagacagacuu

SEQ ID NO: 2078808 - RNA, 21 nt, Human
aaauaaccaacccuucccuga

SEQ ID NO: 2078809 - RNA, 14 nt, Human
aaauaaaaauaaau

SEQ ID NO: 2078810 - RNA, 13 nt, Human
aaauaacacacau

SEQ ID NO: 2078811 - RNA, 21 nt, Human
guaaacauuaguucuauuucu

SEQ ID NO: 2078812 - RNA, 22 nt, Human
guaaacagugccugcugaauga

SEQ ID NO: 2078813 - RNA, 23 nt, Human
guaaacauaauucuuguauauua

SEQ ID NO: 2078814 - RNA, 13 nt, Human
guaaacagugccu

SEQ ID NO: 2078815 - RNA, 14 nt, Human
guaaacagugccug

SEQ ID NO: 2078816 - RNA, 15 nt, Human
guaaacagugccugc

SEQ ID NO: 2078817 - RNA, 17 nt, Human
guaaacagugccugcug

SEQ ID NO: 2078818 - RNA, 18 nt, Human
guaaacagugccugcuga

SEQ ID NO: 2078819 - RNA, 20 nt, Human
guaaacagugccugcugaau

SEQ ID NO: 2078820 - RNA, 17 nt, Human
aaauaauugauuucaag

SEQ ID NO: 2078821 - RNA, 14 nt, Human
aaauaauuuuauga

SEQ ID NO: 2078822 - RNA, 15 nt, Human
aaauaauuuuaugaa

SEQ ID NO: 2078823 - RNA, 22 nt, Human
aaauaauuuuaugaacugcaug

SEQ ID NO: 2078824 - RNA, 23 nt, Human
aaauaauuuuaugaacugcaugu

SEQ ID NO: 2078825 - RNA, 12 nt, Human
aaauaauaaauu

SEQ ID NO: 2078826 - RNA, 16 nt, Human
aaauaauaaauugcau

SEQ ID NO: 2078827 - RNA, 15 nt, Human
aaauaauaauaaugu

SEQ ID NO: 2078828 - RNA, 17 nt, Human
aaauaauaaagaugcuc

SEQ ID NO: 2078829 - RNA, 19 nt, Human
aaauaauaaagaugcucuu

SEQ ID NO: 2078830 - RNA, 13 nt, Human
aaauaauaugcau

SEQ ID NO: 2078831 - RNA, 12 nt, Human
aaauaauaugca

SEQ ID NO: 2078832 - RNA, 14 nt, Human
aaauaauaugcauu

SEQ ID NO: 2078833 - RNA, 12 nt, Human
aaauaauaaauc

SEQ ID NO: 2078834 - RNA, 15 nt, Human
aaauaaucggcccac

SEQ ID NO: 2078835 - RNA, 16 nt, Human
aaauaacuucaagcaa

SEQ ID NO: 2078836 - RNA, 12 nt, Human
aaauaagagaga

SEQ ID NO: 2078837 - RNA, 12 nt, Human
aaauaagagauu

SEQ ID NO: 2078838 - RNA, 14 nt, Human
aaauaagagauuug

SEQ ID NO: 2078839 - RNA, 14 nt, Human
guacucauuaaaaa

SEQ ID NO: 2078840 - RNA, 17 nt, Human
guacucaggaggcugag

SEQ ID NO: 2078841 - RNA, 23 nt, Human
guacucaggaggcugaggggagg

SEQ ID NO: 2078842 - RNA, 15 nt, Human
guacuauguaucaau

SEQ ID NO: 2078843 - RNA, 17 nt, Human
guacuauguaucaauga

SEQ ID NO: 2078844 - RNA, 14 nt, Human
guacuccucccagg

SEQ ID NO: 2078845 - RNA, 15 nt, Human
guacuccugcaaaau

SEQ ID NO: 2078846 - RNA, 20 nt, Human
guacucaucaucaacccuaa

SEQ ID NO: 2078847 - RNA, 16 nt, Human
guacuccugcaaaauu

SEQ ID NO: 2078848 - RNA, 21 nt, Human
guacuccugcaaaauuuuaua

SEQ ID NO: 2078849 - RNA, 12 nt, Human
guacucuggccu

SEQ ID NO: 2078850 - RNA, 13 nt, Human
guacucuggccuc

SEQ ID NO: 2078851 - RNA, 14 nt, Human
guacucuggccucu

SEQ ID NO: 2078852 - RNA, 15 nt, Human
guacucuggccucug

SEQ ID NO: 2078853 - RNA, 14 nt, Human
guacccacugcucu

SEQ ID NO: 2078854 - RNA, 13 nt, Human
guacccacugcuc

SEQ ID NO: 2078855 - RNA, 16 nt, Human
guacuaguuacacauc

SEQ ID NO: 2078856 - RNA, 13 nt, Human
guacuauaucugu

SEQ ID NO: 2078857 - RNA, 14 nt, Human
guacuauaucuguu

SEQ ID NO: 2078858 - RNA, 16 nt, Human
guacuauaucuguuuu

SEQ ID NO: 2078859 - RNA, 17 nt, Human
guacuauaucuguuuua

SEQ ID NO: 2078860 - RNA, 21 nt, Human
guacuauaucuguuuuacugc

SEQ ID NO: 2078861 - RNA, 17 nt, Human
guacuaguuacacaucu

SEQ ID NO: 2078862 - RNA, 13 nt, Human
guacuauguauca

SEQ ID NO: 2078863 - RNA, 14 nt, Human
guacccaccugagc

SEQ ID NO: 2078864 - RNA, 15 nt, Human
guacccaccugagcu

SEQ ID NO: 2078865 - RNA, 16 nt, Human
guacccaccugagcuu

SEQ ID NO: 2078866 - RNA, 17 nt, Human
guacccaccugagcuuu

SEQ ID NO: 2078867 - RNA, 15 nt, Human
guacuacuagauguc

SEQ ID NO: 2078868 - RNA, 20 nt, Human
guacuacuagaugucuuuag

SEQ ID NO: 2078869 - RNA, 22 nt, Human
guacuagggggaagugacaagg

SEQ ID NO: 2078870 - RNA, 21 nt, Human
guacuacuagaugucuuuagg

SEQ ID NO: 2078871 - RNA, 23 nt, Human
guacuguguacagaauucugcua

SEQ ID NO: 2078872 - RNA, 19 nt, Human
guacuuaaaugaaagcaug

SEQ ID NO: 2078873 - RNA, 15 nt, Human
guacuuaauaaauuc

SEQ ID NO: 2078874 - RNA, 17 nt, Human
guacuuaaaugaaagca

SEQ ID NO: 2078875 - RNA, 16 nt, Human
guacuuagcagcuauc

SEQ ID NO: 2078876 - RNA, 19 nt, Human
guacuuagcagcuaucucu

SEQ ID NO: 2078877 - RNA, 13 nt, Human
guacugcagccuc

SEQ ID NO: 2078878 - RNA, 14 nt, Human
guacuguaguuuuu

SEQ ID NO: 2078879 - RNA, 19 nt, Human
guacuggcugauggaguaa

SEQ ID NO: 2078880 - RNA, 14 nt, Human
guacuggcauggua

SEQ ID NO: 2078881 - RNA, 16 nt, Human
guacuggcaugguacg

SEQ ID NO: 2078882 - RNA, 12 nt, Human
guagaagauggc

SEQ ID NO: 2078883 - RNA, 21 nt, Human
guagaagucuuagauguauau

SEQ ID NO: 2078884 - RNA, 15 nt, Human
guagaaggagacaga

SEQ ID NO: 2078885 - RNA, 17 nt, Human
guagaaggguuauauuu

SEQ ID NO: 2078886 - RNA, 13 nt, Human
guagaaggagaca

SEQ ID NO: 2078887 - RNA, 14 nt, Human
guagaaucugugua

SEQ ID NO: 2078888 - RNA, 19 nt, Human
guagaaggguuauauuuua

SEQ ID NO: 2078889 - RNA, 20 nt, Human
guagaaauaucugaaaaugu

SEQ ID NO: 2078890 - RNA, 16 nt, Human
guagaaauaauaugca

SEQ ID NO: 2078891 - RNA, 21 nt, Human
guagaaauaucugaaaaugua

SEQ ID NO: 2078892 - RNA, 23 nt, Human
guagaaauaucugaaaauguaug

SEQ ID NO: 2078893 - RNA, 18 nt, Human
guagaacguaaccacgga

SEQ ID NO: 2078894 - RNA, 19 nt, Human
guagaacguaaccacggaa

SEQ ID NO: 2078895 - RNA, 22 nt, Human
guagaacacaaggucauuugcu

SEQ ID NO: 2078896 - RNA, 23 nt, Human
guagaaauuuuacaauaggugcu

SEQ ID NO: 2078897 - RNA, 17 nt, Human
guagaaauaauaugcau

SEQ ID NO: 2078898 - RNA, 20 nt, Human
guagaaaucccccuuucucu

SEQ ID NO: 2078899 - RNA, 14 nt, Human
guagaaaugaugau

SEQ ID NO: 2078900 - RNA, 11 nt, Human
guagagccagg

SEQ ID NO: 2078901 - RNA, 13 nt, Human
guagagaaacacu

SEQ ID NO: 2078902 - RNA, 15 nt, Human
guagagauggaggag

SEQ ID NO: 2078903 - RNA, 10 nt, Human
guagagccag

SEQ ID NO: 2078904 - RNA, 13 nt, Human
guagagacagggu

SEQ ID NO: 2078905 - RNA, 19 nt, Human
guagccgagagccugcucc

SEQ ID NO: 2078906 - RNA, 15 nt, Human
guagcccuggccaga

SEQ ID NO: 2078907 - RNA, 17 nt, Human
guagcccuggccagagg

SEQ ID NO: 2078908 - RNA, 16 nt, Human
guagagauggaggagg

SEQ ID NO: 2078909 - RNA, 17 nt, Human
guagagauggaggagga

SEQ ID NO: 2078910 - RNA, 21 nt, Human
guagaccugugagaaaacguu

SEQ ID NO: 2078911 - RNA, 18 nt, Human
guagagccagggucucac

SEQ ID NO: 2078912 - RNA, 15 nt, Human
guagagccagggucu

SEQ ID NO: 2078913 - RNA, 12 nt, Human
guagagacaggg

SEQ ID NO: 2078914 - RNA, 11 nt, Human
guagagacagg

SEQ ID NO: 2078915 - RNA, 23 nt, Human
guagacgugcacgcacacugucu

SEQ ID NO: 2078916 - RNA, 20 nt, Human
guagacgugcacgcacacug

SEQ ID NO: 2078917 - RNA, 20 nt, Human
guagaccuagggaggaccuu

SEQ ID NO: 2078918 - RNA, 17 nt, Human
guagaccuagggaggac

SEQ ID NO: 2078919 - RNA, 14 nt, Human
guagaccccuggcu

SEQ ID NO: 2078920 - RNA, 15 nt, Human
guagaccccuggcug

SEQ ID NO: 2078921 - RNA, 16 nt, Human
guagaccccuggcugg

SEQ ID NO: 2078922 - RNA, 17 nt, Human
guagaccccuggcuggu

SEQ ID NO: 2078923 - RNA, 16 nt, Human
guagaccuagggagga

SEQ ID NO: 2078924 - RNA, 18 nt, Human
guagacaguauauaacua

SEQ ID NO: 2078925 - RNA, 19 nt, Human
guagacacaggauagauaa

SEQ ID NO: 2078926 - RNA, 17 nt, Human
guacauucaauguuuau

SEQ ID NO: 2078927 - RNA, 18 nt, Human
guacauucaauguuuaug

SEQ ID NO: 2078928 - RNA, 16 nt, Human
guacauuuaauugaga

SEQ ID NO: 2078929 - RNA, 17 nt, Human
guacauuuaauugagaa

SEQ ID NO: 2078930 - RNA, 23 nt, Human
guacauuuaauugagaagcguau

SEQ ID NO: 2078931 - RNA, 19 nt, Human
guacauggaauaacaugua

SEQ ID NO: 2078932 - RNA, 15 nt, Human
aaauccagaaagaaa

SEQ ID NO: 2078933 - RNA, 14 nt, Human
aaauccagaaagaa

SEQ ID NO: 2078934 - RNA, 14 nt, Human
guacaucuggccuu

SEQ ID NO: 2078935 - RNA, 17 nt, Human
guacauuucugaaauga

SEQ ID NO: 2078936 - RNA, 13 nt, Human
guacauuucugaa

SEQ ID NO: 2078937 - RNA, 14 nt, Human
guaccacucaggcc

SEQ ID NO: 2078938 - RNA, 12 nt, Human
guacccacugcu

SEQ ID NO: 2078939 - RNA, 20 nt, Human
guaccauagcgcugcucuua

SEQ ID NO: 2078940 - RNA, 20 nt, Human
guaccaugaaacaaagcugc

SEQ ID NO: 2078941 - RNA, 22 nt, Human
aaaucauaggaaaguauuuuuu

SEQ ID NO: 2078942 - RNA, 23 nt, Human
aaaucauaaacugugugcagacu

SEQ ID NO: 2078943 - RNA, 14 nt, Human
aaaucauaaacugu

SEQ ID NO: 2078944 - RNA, 16 nt, Human
aaaucauaaacugugu

SEQ ID NO: 2078945 - RNA, 19 nt, Human
aaaucagccguguaaccau

SEQ ID NO: 2078946 - RNA, 12 nt, Human
aaaucagccugc

SEQ ID NO: 2078947 - RNA, 16 nt, Human
aaaucagcugcuacua

SEQ ID NO: 2078948 - RNA, 18 nt, Human
aaaucagccugcuccagc

SEQ ID NO: 2078949 - RNA, 15 nt, Human
aaauauuaucuuugu

SEQ ID NO: 2078950 - RNA, 18 nt, Human
aaauauuaucuuuguaau

SEQ ID NO: 2078951 - RNA, 22 nt, Human
aaauauuaucuuuguaauuauu

SEQ ID NO: 2078952 - RNA, 20 nt, Human
aaauauuauaacuuaaaaaa

SEQ ID NO: 2078953 - RNA, 15 nt, Human
aaauauuccugcauu

SEQ ID NO: 2078954 - RNA, 18 nt, Human
aaaucacuaacauuauau

SEQ ID NO: 2078955 - RNA, 15 nt, Human
aaaucacuuccauag

SEQ ID NO: 2078956 - RNA, 16 nt, Human
aaaucacuuccauagu

SEQ ID NO: 2078957 - RNA, 20 nt, Human
aaauauuauuuuaugaaagg

SEQ ID NO: 2078958 - RNA, 12 nt, Human
aaauauuaugca

SEQ ID NO: 2078959 - RNA, 17 nt, Human
aaauauuaugcaaauuc

SEQ ID NO: 2078960 - RNA, 19 nt, Human
aaauauuaugcaaauuccc

SEQ ID NO: 2078961 - RNA, 22 nt, Human
aaauauuaugcaaauucccaga

SEQ ID NO: 2078962 - RNA, 23 nt, Human
aaauauuauuguggaaaugaaua

SEQ ID NO: 2078963 - RNA, 19 nt, Human
gagguggagguugcaguga

SEQ ID NO: 2078964 - RNA, 20 nt, Human
gagguggagguugcagugag

SEQ ID NO: 2078965 - RNA, 19 nt, Human
gagguggaggcugcaguga

SEQ ID NO: 2078966 - RNA, 20 nt, Human
gagguggaucacagaggcuu

SEQ ID NO: 2078967 - RNA, 15 nt, Human
gagguggcagcccug

SEQ ID NO: 2078968 - RNA, 16 nt, Human
gagguggcagcccugu

SEQ ID NO: 2078969 - RNA, 18 nt, Human
gagguggcagcccuguag

SEQ ID NO: 2078970 - RNA, 12 nt, Human
gagucacugccu

SEQ ID NO: 2078971 - RNA, 14 nt, Human
gagguggcuggguu

SEQ ID NO: 2078972 - RNA, 20 nt, Human
gagguggcucuggaaugaca

SEQ ID NO: 2078973 - RNA, 13 nt, Human
gagguggcugccu

SEQ ID NO: 2078974 - RNA, 14 nt, Human
gagguggcugccug

SEQ ID NO: 2078975 - RNA, 13 nt, Human
gagugagacccug

SEQ ID NO: 2078976 - RNA, 14 nt, Human
gagugcccagaacu

SEQ ID NO: 2078977 - RNA, 14 nt, Human
gagugccccaccug

SEQ ID NO: 2078978 - RNA, 15 nt, Human
gagugccccaccugc

SEQ ID NO: 2078979 - RNA, 19 nt, Human
gagugccccaccugccacu

SEQ ID NO: 2078980 - RNA, 18 nt, Human
gagugcagugagccgaga

SEQ ID NO: 2078981 - RNA, 13 nt, Human
gagugcagugagc

SEQ ID NO: 2078982 - RNA, 18 nt, Human
gagugagacucugucuca

SEQ ID NO: 2078983 - RNA, 14 nt, Human
gagugagacucugu

SEQ ID NO: 2078984 - RNA, 20 nt, Human
gaguccaacguggggcagca

SEQ ID NO: 2078985 - RNA, 22 nt, Human
gaguccaacguggggcagcaca

SEQ ID NO: 2078986 - RNA, 15 nt, Human
gagucacugccucuc

SEQ ID NO: 2078987 - RNA, 21 nt, Human
gagucacugccucucccuggc

SEQ ID NO: 2078988 - RNA, 23 nt, Human
gagucacugccucucccuggccc

SEQ ID NO: 2078989 - RNA, 19 nt, Human
gagucaugaucucccugcc

SEQ ID NO: 2078990 - RNA, 20 nt, Human
gagucaugaucucccugccg

SEQ ID NO: 2078991 - RNA, 16 nt, Human
gagucaugaucucccu

SEQ ID NO: 2078992 - RNA, 13 nt, Human
gagucaucuccau

SEQ ID NO: 2078993 - RNA, 18 nt, Human
gagucaugaucucccugc

SEQ ID NO: 2078994 - RNA, 18 nt, Human
gaggggaauaauagaaga

SEQ ID NO: 2078995 - RNA, 19 nt, Human
gaggggaauaauagaagaa

SEQ ID NO: 2078996 - RNA, 13 nt, Human
gaggccagcccca

SEQ ID NO: 2078997 - RNA, 14 nt, Human
gaggccagccccac

SEQ ID NO: 2078998 - RNA, 12 nt, Human
gaggccagccug

SEQ ID NO: 2078999 - RNA, 22 nt, Human
gaggccagccccacccaggagg

SEQ ID NO: 2079000 - RNA, 13 nt, Human
gaggccagccugg

SEQ ID NO: 2079001 - RNA, 14 nt, Human
gaggccagccuggc

SEQ ID NO: 2079002 - RNA, 16 nt, Human
gaggccagccccaccc

SEQ ID NO: 2079003 - RNA, 18 nt, Human
gaggccagccccacccag

SEQ ID NO: 2079004 - RNA, 20 nt, Human
gaggccagccccacccagga

SEQ ID NO: 2079005 - RNA, 21 nt, Human
gaggccagccccacccaggag

SEQ ID NO: 2079006 - RNA, 20 nt, Human
gaggcucuaaccacacagcc

SEQ ID NO: 2079007 - RNA, 22 nt, Human
gaggcucuaauugaauuuucaa

SEQ ID NO: 2079008 - RNA, 16 nt, Human
gaggcugcagcgagcu

SEQ ID NO: 2079009 - RNA, 14 nt, Human
gaggcugcagucag

SEQ ID NO: 2079010 - RNA, 14 nt, Human
gaggcugccucucc

SEQ ID NO: 2079011 - RNA, 20 nt, Human
gagggcgugacucacccaag

SEQ ID NO: 2079012 - RNA, 12 nt, Human
gaggggaacaga

SEQ ID NO: 2079013 - RNA, 19 nt, Human
gagcugccuguucagcucc

SEQ ID NO: 2079014 - RNA, 16 nt, Human
gagcugccuguucagc

SEQ ID NO: 2079015 - RNA, 15 nt, Human
gagcugccuguucag

SEQ ID NO: 2079016 - RNA, 13 nt, Human
gagcggaaagcag

SEQ ID NO: 2079017 - RNA, 14 nt, Human
gagcggaaagcagc

SEQ ID NO: 2079018 - RNA, 15 nt, Human
gagcggaaagcagcu

SEQ ID NO: 2079019 - RNA, 16 nt, Human
gagcggaaagcagcuc

SEQ ID NO: 2079020 - RNA, 17 nt, Human
gagcggaaagcagcuca

SEQ ID NO: 2079021 - RNA, 18 nt, Human
gagcuggugcauuacaga

SEQ ID NO: 2079022 - RNA, 15 nt, Human
gagcuggugcccgga

SEQ ID NO: 2079023 - RNA, 16 nt, Human
gagcuggugcccggag

SEQ ID NO: 2079024 - RNA, 17 nt, Human
gagcuggugcccggaga

SEQ ID NO: 2079025 - RNA, 21 nt, Human
gagcuggugcccggagauugg

SEQ ID NO: 2079026 - RNA, 18 nt, Human
gagcugguugggaagaca

SEQ ID NO: 2079027 - RNA, 14 nt, Human
gagcuggugucuga

SEQ ID NO: 2079028 - RNA, 16 nt, Human
gagcccuacuuccagg

SEQ ID NO: 2079029 - RNA, 16 nt, Human
gagcccgaggcaccag

SEQ ID NO: 2079030 - RNA, 17 nt, Human
gagcccgcacccccacc

SEQ ID NO: 2079031 - RNA, 19 nt, Human
gagcccgcacccccacccu

SEQ ID NO: 2079032 - RNA, 20 nt, Human
gagcccgcacccccacccuu

SEQ ID NO: 2079033 - RNA, 23 nt, Human
gagcccgcacccccacccuuugg

SEQ ID NO: 2079034 - RNA, 17 nt, Human
gagcccggaugcuucuc

SEQ ID NO: 2079035 - RNA, 20 nt, Human
gagcgccugccccucccaga

SEQ ID NO: 2079036 - RNA, 15 nt, Human
gagcgcuacccacuu

SEQ ID NO: 2079037 - RNA, 16 nt, Human
gagcgccugccccucc

SEQ ID NO: 2079038 - RNA, 18 nt, Human
gagcgccugccccuccca

SEQ ID NO: 2079039 - RNA, 22 nt, Human
gagcgccugccccucccagaac

SEQ ID NO: 2079040 - RNA, 13 nt, Human
gagcgccugcccc

SEQ ID NO: 2079041 - RNA, 15 nt, Human
gagcgccugccccuc

SEQ ID NO: 2079042 - RNA, 16 nt, Human
gagcgagcgcuaccca

SEQ ID NO: 2079043 - RNA, 21 nt, Human
gagcgagacuugguuucaaaa

SEQ ID NO: 2079044 - RNA, 15 nt, Human
gagaagcuacuuugu

SEQ ID NO: 2079045 - RNA, 21 nt, Human
gagaagcguauguuuuuuauu

SEQ ID NO: 2079046 - RNA, 11 nt, Human
gagcagugucu

SEQ ID NO: 2079047 - RNA, 17 nt, Human
gagcagugucuuccaua

SEQ ID NO: 2079048 - RNA, 12 nt, Human
gagcagugucuu

SEQ ID NO: 2079049 - RNA, 23 nt, Human
gacuuuucuguccgagcuuugaa

SEQ ID NO: 2079050 - RNA, 19 nt, Human
gacuuuucgaccaauucaa

SEQ ID NO: 2079051 - RNA, 22 nt, Human
gacuuuucgaccaauucaaccc

SEQ ID NO: 2079052 - RNA, 17 nt, Human
gacuuuucguuaacauu

SEQ ID NO: 2079053 - RNA, 18 nt, Human
gacuuuucguuaacauug

SEQ ID NO: 2079054 - RNA, 19 nt, Human
gacuuuucguuaacauuga

SEQ ID NO: 2079055 - RNA, 21 nt, Human
gacuuuucuguccgagcuuug

SEQ ID NO: 2079056 - RNA, 16 nt, Human
gacuguuuucucuuga

SEQ ID NO: 2079057 - RNA, 18 nt, Human
gacuguuuucucuugaga

SEQ ID NO: 2079058 - RNA, 14 nt, Human
gacuguuuuuuccu

SEQ ID NO: 2079059 - RNA, 19 nt, Human
gacuguuuuuuccugagcu

SEQ ID NO: 2079060 - RNA, 20 nt, Human
gacuguuuuuuccugagcuu

SEQ ID NO: 2079061 - RNA, 12 nt, Human
gacucacccaag

SEQ ID NO: 2079062 - RNA, 21 nt, Human
gacuguuuuuuccugagcuug

SEQ ID NO: 2079063 - RNA, 21 nt, Human
gacugucucaagagggcacug

SEQ ID NO: 2079064 - RNA, 16 nt, Human
gacuguacacacuuua

SEQ ID NO: 2079065 - RNA, 18 nt, Human
gacuguacacacuuuauu

SEQ ID NO: 2079066 - RNA, 23 nt, Human
gacuguacacacuuuauuuacuu

SEQ ID NO: 2079067 - RNA, 23 nt, Human
gacugucucaagagggcacuggu

SEQ ID NO: 2079068 - RNA, 22 nt, Human
gacugucucaagagggcacugg

SEQ ID NO: 2079069 - RNA, 22 nt, Human
gacuguguauucuaguuuuguc

SEQ ID NO: 2079070 - RNA, 17 nt, Human
gacuguacuccucccag

SEQ ID NO: 2079071 - RNA, 16 nt, Human
gacuguacuccuccca

SEQ ID NO: 2079072 - RNA, 22 nt, Human
gacuguacaaaguagaagucuu

SEQ ID NO: 2079073 - RNA, 17 nt, Human
gacucaaugcacugaca

SEQ ID NO: 2079074 - RNA, 14 nt, Human
gacucaaugcacug

SEQ ID NO: 2079075 - RNA, 17 nt, Human
gacucaaguccuuaccu

SEQ ID NO: 2079076 - RNA, 16 nt, Human
gacucaagugucucag

SEQ ID NO: 2079077 - RNA, 15 nt, Human
gacucaauaaaauca

SEQ ID NO: 2079078 - RNA, 17 nt, Human
gacucaauaaaaucaug

SEQ ID NO: 2079079 - RNA, 17 nt, Human
gagaagcggcuggcagc

SEQ ID NO: 2079080 - RNA, 12 nt, Human
gacuagugcuga

SEQ ID NO: 2079081 - RNA, 13 nt, Human
gacuagugcugaa

SEQ ID NO: 2079082 - RNA, 14 nt, Human
gacuagugcugaag

SEQ ID NO: 2079083 - RNA, 15 nt, Human
gacuagugcugaagc

SEQ ID NO: 2079084 - RNA, 16 nt, Human
gacuagugcugaagcu

SEQ ID NO: 2079085 - RNA, 17 nt, Human
gacuagugcugaagcuu

SEQ ID NO: 2079086 - RNA, 18 nt, Human
gacuagugcugaagcuua

SEQ ID NO: 2079087 - RNA, 23 nt, Human
gacuagugcugaagcuuauuaau

SEQ ID NO: 2079088 - RNA, 19 nt, Human
gacuagugcugaagcuuau

SEQ ID NO: 2079089 - RNA, 18 nt, Human
gacuauauuguacacacc

SEQ ID NO: 2079090 - RNA, 22 nt, Human
gacucaacauguuacugaccag

SEQ ID NO: 2079091 - RNA, 20 nt, Human
gacgcugguagagauggagg

SEQ ID NO: 2079092 - RNA, 21 nt, Human
gacgcugguagagauggagga

SEQ ID NO: 2079093 - RNA, 11 nt, Human
gacccucccuu

SEQ ID NO: 2079094 - RNA, 19 nt, Human
gacccuccuccucccccag

SEQ ID NO: 2079095 - RNA, 22 nt, Human
gacccuccuccucccccagagg

SEQ ID NO: 2079096 - RNA, 14 nt, Human
gacccucgcuggcc

SEQ ID NO: 2079097 - RNA, 15 nt, Human
gacccucgcuggccc

SEQ ID NO: 2079098 - RNA, 16 nt, Human
gacccucgcuggcccc

SEQ ID NO: 2079099 - RNA, 18 nt, Human
gacccucgcuggccccca

SEQ ID NO: 2079100 - RNA, 19 nt, Human
gacccucgcuggcccccac

SEQ ID NO: 2079101 - RNA, 20 nt, Human
gacccucgcuggcccccacu

SEQ ID NO: 2079102 - RNA, 21 nt, Human
gacccucgcuggcccccacug

SEQ ID NO: 2079103 - RNA, 15 nt, Human
gacccucguggccuu

SEQ ID NO: 2079104 - RNA, 18 nt, Human
gacccucguggccuuccc

SEQ ID NO: 2079105 - RNA, 18 nt, Human
gacgcugguagagaugga

SEQ ID NO: 2079106 - RNA, 16 nt, Human
gacacuauucacuaaa

SEQ ID NO: 2079107 - RNA, 19 nt, Human
gacacuuuuuugaguggau

SEQ ID NO: 2079108 - RNA, 18 nt, Human
gacagccucccccugucc

SEQ ID NO: 2079109 - RNA, 16 nt, Human
gacagccucccacccc

SEQ ID NO: 2079110 - RNA, 11 nt, Human
gacagccuccc

SEQ ID NO: 2079111 - RNA, 15 nt, Human
gacagcuccuucugu

SEQ ID NO: 2079112 - RNA, 14 nt, Human
gacagcuccuucug

SEQ ID NO: 2079113 - RNA, 12 nt, Human
gacagccuggca

SEQ ID NO: 2079114 - RNA, 11 nt, Human
gacagccuggc

SEQ ID NO: 2079115 - RNA, 13 nt, Human
gacagcuccuucu

SEQ ID NO: 2079116 - RNA, 20 nt, Human
gacagccucccccugucccc

SEQ ID NO: 2079117 - RNA, 16 nt, Human
gaagcaugaaaaagca

SEQ ID NO: 2079118 - RNA, 16 nt, Human
gaagcauguaggagaa

SEQ ID NO: 2079119 - RNA, 17 nt, Human
gaagcauguaggagaau

SEQ ID NO: 2079120 - RNA, 17 nt, Human
gaagcagugccuuccau

SEQ ID NO: 2079121 - RNA, 18 nt, Human
gaagcagugccuuccaua

SEQ ID NO: 2079122 - RNA, 19 nt, Human
gaagcagugccuuccauaa

SEQ ID NO: 2079123 - RNA, 16 nt, Human
gaagcagugagccgca

SEQ ID NO: 2079124 - RNA, 11 nt, Human
gaagcauccag

SEQ ID NO: 2079125 - RNA, 14 nt, Human
gaagcauccaggca

SEQ ID NO: 2079126 - RNA, 13 nt, Human
gaagcaugaaaaa

SEQ ID NO: 2079127 - RNA, 16 nt, Human
gaccaggacaggacca

SEQ ID NO: 2079128 - RNA, 14 nt, Human
gaccaggacucccu

SEQ ID NO: 2079129 - RNA, 16 nt, Human
gaccaggacucccucc

SEQ ID NO: 2079130 - RNA, 17 nt, Human
gaccaggacucccuccu

SEQ ID NO: 2079131 - RNA, 19 nt, Human
gaccaggacucccuccuca

SEQ ID NO: 2079132 - RNA, 21 nt, Human
gaccaggacucccuccucacc

SEQ ID NO: 2079133 - RNA, 23 nt, Human
gaccaggacucccuccucaccuc

SEQ ID NO: 2079134 - RNA, 15 nt, Human
gaccaguggugccuu

SEQ ID NO: 2079135 - RNA, 15 nt, Human
gaccaguugcacuug

SEQ ID NO: 2079136 - RNA, 22 nt, Human
gaccaguggugccuuggaggga

SEQ ID NO: 2079137 - RNA, 13 nt, Human
gaccccuggcuuu

SEQ ID NO: 2079138 - RNA, 22 nt, Human
gaccccuggcuuuucacugcug

SEQ ID NO: 2079139 - RNA, 21 nt, Human
gaccccuggcuuuucacugcu

SEQ ID NO: 2079140 - RNA, 13 nt, Human
gaccccugucucc

SEQ ID NO: 2079141 - RNA, 12 nt, Human
gaccccugucuu

SEQ ID NO: 2079142 - RNA, 13 nt, Human
gacccggcugcgu

SEQ ID NO: 2079143 - RNA, 12 nt, Human
gacccggcugcg

SEQ ID NO: 2079144 - RNA, 16 nt, Human
gacccuauugcugcuu

SEQ ID NO: 2079145 - RNA, 17 nt, Human
gacccuacuuccugcac

SEQ ID NO: 2079146 - RNA, 21 nt, Human
gacccuacuuccugcacugac

SEQ ID NO: 2079147 - RNA, 16 nt, Human
gacccuaccccaccac

SEQ ID NO: 2079148 - RNA, 14 nt, Human
gacccuacaggaga

SEQ ID NO: 2079149 - RNA, 15 nt, Human
gacccuacaggagag

SEQ ID NO: 2079150 - RNA, 11 nt, Human
gacccuacccc

SEQ ID NO: 2079151 - RNA, 14 nt, Human
gacccuaccccacc

SEQ ID NO: 2079152 - RNA, 12 nt, Human
gaccccuggcug

SEQ ID NO: 2079153 - RNA, 22 nt, Human
gacccggagcuaacacuggccc

SEQ ID NO: 2079154 - RNA, 21 nt, Human
gacccggagcuaacacuggcc

SEQ ID NO: 2079155 - RNA, 15 nt, Human
gacccuaaaucugag

SEQ ID NO: 2079156 - RNA, 17 nt, Human
gacccuaaaucugagga

SEQ ID NO: 2079157 - RNA, 17 nt, Human
gacaggguuucaccaug

SEQ ID NO: 2079158 - RNA, 13 nt, Human
gacaggguccugc

SEQ ID NO: 2079159 - RNA, 14 nt, Human
gacaggguccugcu

SEQ ID NO: 2079160 - RNA, 15 nt, Human
gacaggguccugcua

SEQ ID NO: 2079161 - RNA, 15 nt, Human
gacaguaacuugguu

SEQ ID NO: 2079162 - RNA, 17 nt, Human
gacaguaacuugguuau

SEQ ID NO: 2079163 - RNA, 21 nt, Human
gacaguaacuugguuauacau

SEQ ID NO: 2079164 - RNA, 14 nt, Human
gacaguauauaacu

SEQ ID NO: 2079165 - RNA, 13 nt, Human
gccaagccaggga

SEQ ID NO: 2079166 - RNA, 23 nt, Human
gccaaggaggguggaucaccuga

SEQ ID NO: 2079167 - RNA, 22 nt, Human
gccaagcaccuagccucgcucu

SEQ ID NO: 2079168 - RNA, 12 nt, Human
gccaagcagcca

SEQ ID NO: 2079169 - RNA, 20 nt, Human
gccaagcacagugccugcau

SEQ ID NO: 2079170 - RNA, 17 nt, Human
gccaaggacugccgacc

SEQ ID NO: 2079171 - RNA, 14 nt, Human
gccaaggacugccg

SEQ ID NO: 2079172 - RNA, 15 nt, Human
gccaagccccauccu

SEQ ID NO: 2079173 - RNA, 21 nt, Human
gccaagccccauccugccgcc

SEQ ID NO: 2079174 - RNA, 14 nt, Human
gccaagcagccaag

SEQ ID NO: 2079175 - RNA, 16 nt, Human
gccaagcuccuuggga

SEQ ID NO: 2079176 - RNA, 17 nt, Human
gccaagcuccuugggag

SEQ ID NO: 2079177 - RNA, 19 nt, Human
gccaagcuccuugggaggc

SEQ ID NO: 2079178 - RNA, 21 nt, Human
gcauccuggcacccggccccu

SEQ ID NO: 2079179 - RNA, 17 nt, Human
gcauccuggcacccggc

SEQ ID NO: 2079180 - RNA, 18 nt, Human
gcauggcagcaggccugu

SEQ ID NO: 2079181 - RNA, 20 nt, Human
gcauggcagcaggccuguug

SEQ ID NO: 2079182 - RNA, 13 nt, Human
gcauggccaggug

SEQ ID NO: 2079183 - RNA, 17 nt, Human
gcauggccagcagcuug

SEQ ID NO: 2079184 - RNA, 17 nt, Human
gcauggccagguggcca

SEQ ID NO: 2079185 - RNA, 14 nt, Human
gcauggccaggugg

SEQ ID NO: 2079186 - RNA, 23 nt, Human
gcauccuggcacccggccccugc

SEQ ID NO: 2079187 - RNA, 22 nt, Human
gcauccuggcacccggccccug

SEQ ID NO: 2079188 - RNA, 20 nt, Human
gcauccuuuucugcagaggg

SEQ ID NO: 2079189 - RNA, 14 nt, Human
gcauccuggcaccc

SEQ ID NO: 2079190 - RNA, 22 nt, Human
gcauccuuaaguaucagaaagc

SEQ ID NO: 2079191 - RNA, 22 nt, Human
gcauguacccuaaggucauuac

SEQ ID NO: 2079192 - RNA, 22 nt, Human
gcauggggauaaaggagaaggc

SEQ ID NO: 2079193 - RNA, 23 nt, Human
gcauggggauaaaggagaaggca

SEQ ID NO: 2079194 - RNA, 14 nt, Human
gcauguaggagaau

SEQ ID NO: 2079195 - RNA, 15 nt, Human
gcauguaggagaauc

SEQ ID NO: 2079196 - RNA, 17 nt, Human
gcauugguucccuuugc

SEQ ID NO: 2079197 - RNA, 23 nt, Human
gcaugucccuaccgagucucuuc

SEQ ID NO: 2079198 - RNA, 16 nt, Human
gcaugucuuuuuuucu

SEQ ID NO: 2079199 - RNA, 19 nt, Human
gcaugucuuuuuuucuguu

SEQ ID NO: 2079200 - RNA, 20 nt, Human
gccaacagucaaaacagaga

SEQ ID NO: 2079201 - RNA, 23 nt, Human
gccaaccccgcccuaggccuggc

SEQ ID NO: 2079202 - RNA, 14 nt, Human
gccaaccccugugg

SEQ ID NO: 2079203 - RNA, 15 nt, Human
gcauuguugaggugg

SEQ ID NO: 2079204 - RNA, 19 nt, Human
gcauuguggcugucagcag

SEQ ID NO: 2079205 - RNA, 16 nt, Human
gcauuguggcugucag

SEQ ID NO: 2079206 - RNA, 23 nt, Human
gcauuguugagguggucugaaug

SEQ ID NO: 2079207 - RNA, 16 nt, Human
gcauuguugagguggu

SEQ ID NO: 2079208 - RNA, 17 nt, Human
gcauuguuugcuuauug

SEQ ID NO: 2079209 - RNA, 18 nt, Human
gcauuguuugcuuauugu

SEQ ID NO: 2079210 - RNA, 20 nt, Human
gcauuguuugcuuauuguuc

SEQ ID NO: 2079211 - RNA, 21 nt, Human
gcauuguuugcuuauuguucc

SEQ ID NO: 2079212 - RNA, 22 nt, Human
gcauuguuugcuuauuguucca

SEQ ID NO: 2079213 - RNA, 23 nt, Human
gcauuguuugcuuauuguuccaa

SEQ ID NO: 2079214 - RNA, 19 nt, Human
gcauuuauggucaacacuu

SEQ ID NO: 2079215 - RNA, 23 nt, Human
gccaacgacaaagccaaacucug

SEQ ID NO: 2079216 - RNA, 14 nt, Human
gccaacgacaaagc

SEQ ID NO: 2079217 - RNA, 15 nt, Human
gccaaccccugugga

SEQ ID NO: 2079218 - RNA, 18 nt, Human
gcauuuccugcuggucaa

SEQ ID NO: 2079219 - RNA, 13 nt, Human
gccaagaacugaa

SEQ ID NO: 2079220 - RNA, 18 nt, Human
gccaagaacugaaaacau

SEQ ID NO: 2079221 - RNA, 16 nt, Human
gccaagagcagaggca

SEQ ID NO: 2079222 - RNA, 20 nt, Human
gccaagagcagaggcagcga

SEQ ID NO: 2079223 - RNA, 16 nt, Human
gcacucuuaagcuucc

SEQ ID NO: 2079224 - RNA, 21 nt, Human
gcacugaaggcuuucagggcc

SEQ ID NO: 2079225 - RNA, 22 nt, Human
gcacugaaggcuuucagggccu

SEQ ID NO: 2079226 - RNA, 20 nt, Human
gcacuuugggaggccgaggc

SEQ ID NO: 2079227 - RNA, 16 nt, Human
gcacuuugggaggcug

SEQ ID NO: 2079228 - RNA, 21 nt, Human
gcacuuugggaggcugaggug

SEQ ID NO: 2079229 - RNA, 20 nt, Human
gcacuuugggaggcugaggc

SEQ ID NO: 2079230 - RNA, 21 nt, Human
gcacuuugggaggcugaggcg

SEQ ID NO: 2079231 - RNA, 20 nt, Human
gcagcugcuuuugucuaugg

SEQ ID NO: 2079232 - RNA, 13 nt, Human
gcagcugcuuuug

SEQ ID NO: 2079233 - RNA, 23 nt, Human
gcagcugcgguccacccaggagc

SEQ ID NO: 2079234 - RNA, 22 nt, Human
gcagcugcgguccacccaggag

SEQ ID NO: 2079235 - RNA, 17 nt, Human
gcagcuguuagagucca

SEQ ID NO: 2079236 - RNA, 17 nt, Human
gcagcugggagaagggg

SEQ ID NO: 2079237 - RNA, 12 nt, Human
gcagcugggcug

SEQ ID NO: 2079238 - RNA, 14 nt, Human
gcagcuguuagagu

SEQ ID NO: 2079239 - RNA, 16 nt, Human
gcagcuugaggguugg

SEQ ID NO: 2079240 - RNA, 21 nt, Human
gcagcuugaggguugggcugg

SEQ ID NO: 2079241 - RNA, 19 nt, Human
gcagcuugaggguugggcu

SEQ ID NO: 2079242 - RNA, 22 nt, Human
gcagggaaaggcucugaaagcc

SEQ ID NO: 2079243 - RNA, 22 nt, Human
gcagggaaacagcuaaugggac

SEQ ID NO: 2079244 - RNA, 16 nt, Human
gcaggcuggcaccgcc

SEQ ID NO: 2079245 - RNA, 18 nt, Human
gcaggcuggcaccgccuu

SEQ ID NO: 2079246 - RNA, 19 nt, Human
gcaggcuggcaccgccuuc

SEQ ID NO: 2079247 - RNA, 21 nt, Human
gcauacacccccaccuccugc

SEQ ID NO: 2079248 - RNA, 17 nt, Human
gcauacauuuauaaugu

SEQ ID NO: 2079249 - RNA, 22 nt, Human
gcaggugucauauauggggggc

SEQ ID NO: 2079250 - RNA, 20 nt, Human
gcagggaaggggaggcagcc

SEQ ID NO: 2079251 - RNA, 21 nt, Human
gcagggaaguguaagaaacac

SEQ ID NO: 2079252 - RNA, 21 nt, Human
gcagggaaggggaggcagccg

SEQ ID NO: 2079253 - RNA, 13 nt, Human
gcauacaaucuga

SEQ ID NO: 2079254 - RNA, 15 nt, Human
gcauaaaauuggauu

SEQ ID NO: 2079255 - RNA, 15 nt, Human
gcauaaaaauuagcc

SEQ ID NO: 2079256 - RNA, 23 nt, Human
gaugcuucucacugccaugccag

SEQ ID NO: 2079257 - RNA, 16 nt, Human
gaugcugugcuaugaa

SEQ ID NO: 2079258 - RNA, 21 nt, Human
gaugcugucuucguacuggga

SEQ ID NO: 2079259 - RNA, 23 nt, Human
gaugaugacgacgacaacgauga

SEQ ID NO: 2079260 - RNA, 23 nt, Human
gaugaugauaaugaugaugacga

SEQ ID NO: 2079261 - RNA, 14 nt, Human
gaugaugcugccag

SEQ ID NO: 2079262 - RNA, 22 nt, Human
gaugaugcuuguaacaagaaaa

SEQ ID NO: 2079263 - RNA, 23 nt, Human
gauggaggaaaaccaagccgugg

SEQ ID NO: 2079264 - RNA, 13 nt, Human
gauggaggagaag

SEQ ID NO: 2079265 - RNA, 14 nt, Human
gauggaggagaaga

SEQ ID NO: 2079266 - RNA, 12 nt, Human
gauggaggagga

SEQ ID NO: 2079267 - RNA, 11 nt, Human
gauggaggagg

SEQ ID NO: 2079268 - RNA, 21 nt, Human
gauggaggggugguccugacu

SEQ ID NO: 2079269 - RNA, 22 nt, Human
gauggaggggugguccugacuc

SEQ ID NO: 2079270 - RNA, 19 nt, Human
gauggagguucucucggag

SEQ ID NO: 2079271 - RNA, 18 nt, Human
gaugcuuguaacaagaaa

SEQ ID NO: 2079272 - RNA, 20 nt, Human
gaugcuuguaacaagaaaac

SEQ ID NO: 2079273 - RNA, 21 nt, Human
gaugcuuguaacaagaaaaca

SEQ ID NO: 2079274 - RNA, 17 nt, Human
gauguacaguugggaaa

SEQ ID NO: 2079275 - RNA, 23 nt, Human
gauguacaguugggaaaauaugu

SEQ ID NO: 2079276 - RNA, 15 nt, Human
gauguacauuuccaa

SEQ ID NO: 2079277 - RNA, 19 nt, Human
gauguaccaugaaacaaag

SEQ ID NO: 2079278 - RNA, 22 nt, Human
gauguacauuuccaaauucaca

SEQ ID NO: 2079279 - RNA, 19 nt, Human
gaugcuucaugugaacgug

SEQ ID NO: 2079280 - RNA, 13 nt, Human
gauguaagagcuu

SEQ ID NO: 2079281 - RNA, 23 nt, Human
gauguaaauaaccccauucuuug

SEQ ID NO: 2079282 - RNA, 13 nt, Human
gauguaaaugaag

SEQ ID NO: 2079283 - RNA, 17 nt, Human
gaugucccaacuuguaa

SEQ ID NO: 2079284 - RNA, 19 nt, Human
gaugucaucccauugucuu

SEQ ID NO: 2079285 - RNA, 21 nt, Human
gaugucaucccauugucuucu

SEQ ID NO: 2079286 - RNA, 17 nt, Human
gauguccacagaugccu

SEQ ID NO: 2079287 - RNA, 20 nt, Human
gauguccacagaugccucca

SEQ ID NO: 2079288 - RNA, 18 nt, Human
gaugucccaacuuguaaa

SEQ ID NO: 2079289 - RNA, 20 nt, Human
gaugucccuuucuuggccag

SEQ ID NO: 2079290 - RNA, 21 nt, Human
gaugucccuuucuuggccagu

SEQ ID NO: 2079291 - RNA, 18 nt, Human
gaucuggguucacugcaa

SEQ ID NO: 2079292 - RNA, 17 nt, Human
gaucugggaacucccaa

SEQ ID NO: 2079293 - RNA, 19 nt, Human
gaucugggaacucccaaga

SEQ ID NO: 2079294 - RNA, 17 nt, Human
gaucugggacccuuucc

SEQ ID NO: 2079295 - RNA, 20 nt, Human
gaucuggguucacugcaacc

SEQ ID NO: 2079296 - RNA, 18 nt, Human
gaucuggggcucugggau

SEQ ID NO: 2079297 - RNA, 23 nt, Human
gaucugggacccuuuccuuccuu

SEQ ID NO: 2079298 - RNA, 17 nt, Human
gaucuggggcucuggga

SEQ ID NO: 2079299 - RNA, 22 nt, Human
gaucugggacccuuuccuuccu

SEQ ID NO: 2079300 - RNA, 19 nt, Human
gauucuccugccucagccu

SEQ ID NO: 2079301 - RNA, 21 nt, Human
gauucuccugccucagccucc

SEQ ID NO: 2079302 - RNA, 20 nt, Human
gauucuccugccucagccuc

SEQ ID NO: 2079303 - RNA, 19 nt, Human
gauucuguguguuuucaua

SEQ ID NO: 2079304 - RNA, 22 nt, Human
gauucuguguguuuucauaaua

SEQ ID NO: 2079305 - RNA, 21 nt, Human
gauucuucugcuucagccucc

SEQ ID NO: 2079306 - RNA, 19 nt, Human
gauucuuuccauuaugauu

SEQ ID NO: 2079307 - RNA, 22 nt, Human
gauuuaagggauggaaaaggaa

SEQ ID NO: 2079308 - RNA, 21 nt, Human
gauuucagaaagagcaagucu

SEQ ID NO: 2079309 - RNA, 11 nt, Human
gcaaaaauuuu

SEQ ID NO: 2079310 - RNA, 14 nt, Human
gcaaaaauuuuugg

SEQ ID NO: 2079311 - RNA, 20 nt, Human
gauuucaggauacucuguca

SEQ ID NO: 2079312 - RNA, 22 nt, Human
gauuucaggauacucugucaga

SEQ ID NO: 2079313 - RNA, 16 nt, Human
gauuucagucuuuucc

SEQ ID NO: 2079314 - RNA, 17 nt, Human
gauuucagucuuuuccu

SEQ ID NO: 2079315 - RNA, 12 nt, Human
gaugucuuuguu

SEQ ID NO: 2079316 - RNA, 16 nt, Human
gaugucuuuguuaaga

SEQ ID NO: 2079317 - RNA, 16 nt, Human
gaugucuuauuuuuag

SEQ ID NO: 2079318 - RNA, 18 nt, Human
gaugucuuauuuuuagau

SEQ ID NO: 2079319 - RNA, 20 nt, Human
gaugucuuauuuuuagaugg

SEQ ID NO: 2079320 - RNA, 14 nt, Human
gaugucuaauaguu

SEQ ID NO: 2079321 - RNA, 21 nt, Human
gaugugcauuuuugugaaaug

SEQ ID NO: 2079322 - RNA, 23 nt, Human
gaugugcauuuuugugaaaugaa

SEQ ID NO: 2079323 - RNA, 16 nt, Human
gaugugcaaaaauuuu

SEQ ID NO: 2079324 - RNA, 22 nt, Human
gaugugcaaaaauuuuuggauu

SEQ ID NO: 2079325 - RNA, 19 nt, Human
gcacacaccagagcccacc

SEQ ID NO: 2079326 - RNA, 18 nt, Human
gcacacaccagagcccac

SEQ ID NO: 2079327 - RNA, 17 nt, Human
gcacacaccagagccca

SEQ ID NO: 2079328 - RNA, 16 nt, Human
gcacacaccagagccc

SEQ ID NO: 2079329 - RNA, 15 nt, Human
gcacacaccagagcc

SEQ ID NO: 2079330 - RNA, 14 nt, Human
gcacacaccagagc

SEQ ID NO: 2079331 - RNA, 12 nt, Human
gcacacaccaga

SEQ ID NO: 2079332 - RNA, 14 nt, Human
gcaauagagacugu

SEQ ID NO: 2079333 - RNA, 15 nt, Human
gcaauagagacugua

SEQ ID NO: 2079334 - RNA, 17 nt, Human
gcaauagagacuguaga

SEQ ID NO: 2079335 - RNA, 18 nt, Human
gcaaccuccgccucuugg

SEQ ID NO: 2079336 - RNA, 21 nt, Human
gcaacccuuaccccuuagccu

SEQ ID NO: 2079337 - RNA, 12 nt, Human
gcaacccuccua

SEQ ID NO: 2079338 - RNA, 23 nt, Human
gcaacccuccuaucaccuccccu

SEQ ID NO: 2079339 - RNA, 18 nt, Human
gcaacccccagccugcua

SEQ ID NO: 2079340 - RNA, 17 nt, Human
gcaacccccagccugcu

SEQ ID NO: 2079341 - RNA, 16 nt, Human
gcaaaagaugcuucuc

SEQ ID NO: 2079342 - RNA, 17 nt, Human
gcaaaacaugcuaccug

SEQ ID NO: 2079343 - RNA, 21 nt, Human
gcaaaaccacuagaacucucc

SEQ ID NO: 2079344 - RNA, 15 nt, Human
gcaaaaccauugcuu

SEQ ID NO: 2079345 - RNA, 16 nt, Human
gcaaaaccauugcuuc

SEQ ID NO: 2079346 - RNA, 17 nt, Human
gcaaaaccauugcuuca

SEQ ID NO: 2079347 - RNA, 18 nt, Human
gcaaaaccauugcuucac

SEQ ID NO: 2079348 - RNA, 16 nt, Human
gcaaaacccacagaag

SEQ ID NO: 2079349 - RNA, 20 nt, Human
gcaaaacgcauggagugugu

SEQ ID NO: 2079350 - RNA, 14 nt, Human
gcaaaagaaguaac

SEQ ID NO: 2079351 - RNA, 15 nt, Human
gcaaaagaugcuucu

SEQ ID NO: 2079352 - RNA, 22 nt, Human
gcacuauagccuaggugacaga

SEQ ID NO: 2079353 - RNA, 16 nt, Human
gcacuccagccugggc

SEQ ID NO: 2079354 - RNA, 17 nt, Human
gcacuccagccugggca

SEQ ID NO: 2079355 - RNA, 21 nt, Human
gcacuccagccugggcgacag

SEQ ID NO: 2079356 - RNA, 17 nt, Human
gcacuccagccugggug

SEQ ID NO: 2079357 - RNA, 21 nt, Human
gcacucgugugcaacagacaa

SEQ ID NO: 2079358 - RNA, 14 nt, Human
gcacucuagccgga

SEQ ID NO: 2079359 - RNA, 18 nt, Human
gcacucuagccggaguga

SEQ ID NO: 2079360 - RNA, 23 nt, Human
gcacucugaguuuaccauuugua

SEQ ID NO: 2079361 - RNA, 12 nt, Human
gcaccuccugcc

SEQ ID NO: 2079362 - RNA, 23 nt, Human
gcaccuccccccacugcaggccc

SEQ ID NO: 2079363 - RNA, 19 nt, Human
gcaccuccccccacugcag

SEQ ID NO: 2079364 - RNA, 21 nt, Human
gcaccuccccccacugcaggc

SEQ ID NO: 2079365 - RNA, 17 nt, Human
gcaccucccauccuaau

SEQ ID NO: 2079366 - RNA, 13 nt, Human
gcaccucccccca

SEQ ID NO: 2079367 - RNA, 17 nt, Human
gcaccuccccccacugc

SEQ ID NO: 2079368 - RNA, 18 nt, Human
gcaccuccccccacugca

SEQ ID NO: 2079369 - RNA, 18 nt, Human
gcaccuacaguguacagu

SEQ ID NO: 2079370 - RNA, 19 nt, Human
gcaccuacaguguacaguc

SEQ ID NO: 2079371 - RNA, 21 nt, Human
gcaccuacaguguacagucuu

SEQ ID NO: 2079372 - RNA, 12 nt, Human
gcaccucccagc

SEQ ID NO: 2079373 - RNA, 14 nt, Human
gcaccucccagccc

SEQ ID NO: 2079374 - RNA, 17 nt, Human
gcaccucccagccccug

SEQ ID NO: 2079375 - RNA, 11 nt, Human
gcaccucccau

SEQ ID NO: 2079376 - RNA, 14 nt, Human
gcaccucccauccu

SEQ ID NO: 2079377 - RNA, 19 nt, Human
gcacacagcugcagagaca

SEQ ID NO: 2079378 - RNA, 20 nt, Human
gcacacaccagagcccaccu

SEQ ID NO: 2079379 - RNA, 21 nt, Human
gcacacaccuguagucccagc

SEQ ID NO: 2079380 - RNA, 13 nt, Human
gcacacaccugua

SEQ ID NO: 2079381 - RNA, 21 nt, Human
gcacacagcuuuuaguaccca

SEQ ID NO: 2079382 - RNA, 23 nt, Human
gcacacagcuuuuaguacccacc

SEQ ID NO: 2079383 - RNA, 16 nt, Human
gaaaaaaaugacuaaa

SEQ ID NO: 2079384 - RNA, 16 nt, Human
gaaaaaaauuggcauu

SEQ ID NO: 2079385 - RNA, 12 nt, Human
gaaaaaagcuuu

SEQ ID NO: 2079386 - RNA, 23 nt, Human
gaaaaaagaaauucccuggacca

SEQ ID NO: 2079387 - RNA, 21 nt, Human
gaaaaaagaaguguccgagaa

SEQ ID NO: 2079388 - RNA, 13 nt, Human
gaaaaaagaaugu

SEQ ID NO: 2079389 - RNA, 17 nt, Human
gaaaaaauaacacacau

SEQ ID NO: 2079390 - RNA, 23 nt, Human
gaaaagaaaaaugagccuggcaa

SEQ ID NO: 2079391 - RNA, 21 nt, Human
gaaaaaauaauugauuucaag

SEQ ID NO: 2079392 - RNA, 14 nt, Human
gaaaagcaccugcc

SEQ ID NO: 2079393 - RNA, 18 nt, Human
gaaaagauguugugucuu

SEQ ID NO: 2079394 - RNA, 19 nt, Human
gaaaagaauacagaaagau

SEQ ID NO: 2079395 - RNA, 22 nt, Human
gaaaagaaaccccaaacucagg

SEQ ID NO: 2079396 - RNA, 16 nt, Human
gaaaagaauacagaaa

SEQ ID NO: 2079397 - RNA, 18 nt, Human
gaaaagaauacagaaaga

SEQ ID NO: 2079398 - RNA, 22 nt, Human
gaaaagauacgacuuuauuuuc

SEQ ID NO: 2079399 - RNA, 16 nt, Human
gaaaagauacgacuuu

SEQ ID NO: 2079400 - RNA, 19 nt, Human
gaaaagauacgacuuuauu

SEQ ID NO: 2079401 - RNA, 20 nt, Human
gaaaagauacgacuuuauuu

SEQ ID NO: 2079402 - RNA, 18 nt, Human
gaaacaaaguggaaggaa

SEQ ID NO: 2079403 - RNA, 19 nt, Human
gaaacaaaguggaaggaaa

SEQ ID NO: 2079404 - RNA, 20 nt, Human
gaaacaaaguggaaggaaag

SEQ ID NO: 2079405 - RNA, 21 nt, Human
gaaacaaaguggaaggaaaga

SEQ ID NO: 2079406 - RNA, 23 nt, Human
gaaacaaaguggaaggaaagaug

SEQ ID NO: 2079407 - RNA, 16 nt, Human
gaaacuggaaguuauu

SEQ ID NO: 2079408 - RNA, 18 nt, Human
gaaacuguagucucagga

SEQ ID NO: 2079409 - RNA, 16 nt, Human
gaaagaaaauaugcau

SEQ ID NO: 2079410 - RNA, 17 nt, Human
gaaagaaaauaugcauc

SEQ ID NO: 2079411 - RNA, 21 nt, Human
gaaagaaacccgacagaggga

SEQ ID NO: 2079412 - RNA, 22 nt, Human
gaaagaaacccgacagagggaa

SEQ ID NO: 2079413 - RNA, 15 nt, Human
gaaagaaagaaggaa

SEQ ID NO: 2079414 - RNA, 13 nt, Human
gaaagggcccaga

SEQ ID NO: 2079415 - RNA, 20 nt, Human
gaaagggauuuucagcccuc

SEQ ID NO: 2079416 - RNA, 12 nt, Human
gaaagggauuuu

SEQ ID NO: 2079417 - RNA, 11 nt, Human
gaaagaaauca

SEQ ID NO: 2079418 - RNA, 14 nt, Human
gaaagaaaucaugu

SEQ ID NO: 2079419 - RNA, 15 nt, Human
gaaagaaaucauguu

SEQ ID NO: 2079420 - RNA, 16 nt, Human
gaaagaaaucauguua

SEQ ID NO: 2079421 - RNA, 17 nt, Human
gaaagaaaucauguuau

SEQ ID NO: 2079422 - RNA, 21 nt, Human
gaacacccgacuccucaaaag

SEQ ID NO: 2079423 - RNA, 14 nt, Human
gaacacccucgaag

SEQ ID NO: 2079424 - RNA, 13 nt, Human
gaacacuauuuuc

SEQ ID NO: 2079425 - RNA, 16 nt, Human
gaacacuauuuucaga

SEQ ID NO: 2079426 - RNA, 17 nt, Human
gaacacuauuuucagaa

SEQ ID NO: 2079427 - RNA, 18 nt, Human
gaacacuauuuucagaau

SEQ ID NO: 2079428 - RNA, 19 nt, Human
gaacacuauuuucagaauc

SEQ ID NO: 2079429 - RNA, 21 nt, Human
gaacacuauuuucagaaucug

SEQ ID NO: 2079430 - RNA, 18 nt, Human
gaacaccaagacuugaag

SEQ ID NO: 2079431 - RNA, 22 nt, Human
gaacaccacgcuugacaggaca

SEQ ID NO: 2079432 - RNA, 22 nt, Human
gaacacaaagcggggggagggu

SEQ ID NO: 2079433 - RNA, 14 nt, Human
gaacacacuccauc

SEQ ID NO: 2079434 - RNA, 20 nt, Human
gaaaggggcaggagcucaga

SEQ ID NO: 2079435 - RNA, 15 nt, Human
gaacacaguauuuuc

SEQ ID NO: 2079436 - RNA, 21 nt, Human
gaacaaguuguuucauugacu

SEQ ID NO: 2079437 - RNA, 19 nt, Human
gaacaaguuguuucauuga

SEQ ID NO: 2079438 - RNA, 13 nt, Human
gaacaagugaaca

SEQ ID NO: 2079439 - RNA, 17 nt, Human
gaacaagugaacacauu

SEQ ID NO: 2079440 - RNA, 16 nt, Human
gaaagggcccagagag

SEQ ID NO: 2079441 - RNA, 15 nt, Human
gaaagggcccagaga

SEQ ID NO: 2079442 - RNA, 12 nt, Human
gaaaucucaccc

SEQ ID NO: 2079443 - RNA, 19 nt, Human
gaaaugaaaacauguaaua

SEQ ID NO: 2079444 - RNA, 19 nt, Human
gaaaucucacuuuucucca

SEQ ID NO: 2079445 - RNA, 16 nt, Human
gaaaugaaaacaugua

SEQ ID NO: 2079446 - RNA, 13 nt, Human
gaaaugaaagaaa

SEQ ID NO: 2079447 - RNA, 22 nt, Human
gaaccaccacacccagcccacu

SEQ ID NO: 2079448 - RNA, 21 nt, Human
gaaccaccacacccagcccac

SEQ ID NO: 2079449 - RNA, 20 nt, Human
gaaccaccacacccagccca

SEQ ID NO: 2079450 - RNA, 18 nt, Human
gaaccaccacacccagcc

SEQ ID NO: 2079451 - RNA, 14 nt, Human
gaacccaggaggca

SEQ ID NO: 2079452 - RNA, 16 nt, Human
gaacccaggaggugga

SEQ ID NO: 2079453 - RNA, 17 nt, Human
gaaccccaaggagggag

SEQ ID NO: 2079454 - RNA, 15 nt, Human
gaacccaccugcuga

SEQ ID NO: 2079455 - RNA, 19 nt, Human
gaacccaccugcugagaga

SEQ ID NO: 2079456 - RNA, 13 nt, Human
gaacccacacugc

SEQ ID NO: 2079457 - RNA, 14 nt, Human
gaacccacacugca

SEQ ID NO: 2079458 - RNA, 12 nt, Human
gaacccaccugc

SEQ ID NO: 2079459 - RNA, 13 nt, Human
gaacccaccugcu

SEQ ID NO: 2079460 - RNA, 14 nt, Human
gaacccaccugcug

SEQ ID NO: 2079461 - RNA, 20 nt, Human
gaaccaucauuauaaacgug

SEQ ID NO: 2079462 - RNA, 19 nt, Human
gaaccaguuucagguguuu

SEQ ID NO: 2079463 - RNA, 12 nt, Human
gaaccagagcca

SEQ ID NO: 2079464 - RNA, 19 nt, Human
gaaccagagccauggacuc

SEQ ID NO: 2079465 - RNA, 23 nt, Human
gaaccagagccauggacucuaca

SEQ ID NO: 2079466 - RNA, 19 nt, Human
gaaccacuacaugcagccc

SEQ ID NO: 2079467 - RNA, 23 nt, Human
gaaccaccacacccagcccacuu

SEQ ID NO: 2079468 - RNA, 18 nt, Human
gaacucugggcugccaug

SEQ ID NO: 2079469 - RNA, 14 nt, Human
gaacuccuggccuc

SEQ ID NO: 2079470 - RNA, 15 nt, Human
gaacuccuggccuca

SEQ ID NO: 2079471 - RNA, 20 nt, Human
gaacuccuggaaauaucagu

SEQ ID NO: 2079472 - RNA, 13 nt, Human
gaacuccuggccu

SEQ ID NO: 2079473 - RNA, 21 nt, Human
gaacugagcuccucugggcag

SEQ ID NO: 2079474 - RNA, 18 nt, Human
gaacucuuucuggccugc

SEQ ID NO: 2079475 - RNA, 22 nt, Human
gaacucuuucuggccugccuuc

SEQ ID NO: 2079476 - RNA, 13 nt, Human
gaacugaaaacau

SEQ ID NO: 2079477 - RNA, 15 nt, Human
gaacugaaaacauaa

SEQ ID NO: 2079478 - RNA, 16 nt, Human
gaacugaaaacauaaa

SEQ ID NO: 2079479 - RNA, 18 nt, Human
gaacugaaaacauaaaaa

SEQ ID NO: 2079480 - RNA, 19 nt, Human
gaacugaaaacauaaaaag

SEQ ID NO: 2079481 - RNA, 16 nt, Human
gaagacucauucuucu

SEQ ID NO: 2079482 - RNA, 18 nt, Human
gaagacucauucuucugu

SEQ ID NO: 2079483 - RNA, 17 nt, Human
gaagacucauucuucug

SEQ ID NO: 2079484 - RNA, 14 nt, Human
gaagcacagcuuca

SEQ ID NO: 2079485 - RNA, 13 nt, Human
gaagcacagcuuc

SEQ ID NO: 2079486 - RNA, 16 nt, Human
gaacugaugacacuga

SEQ ID NO: 2079487 - RNA, 18 nt, Human
gaagcacagaaaacuaga

SEQ ID NO: 2079488 - RNA, 16 nt, Human
gaagcaccauaacuuu

SEQ ID NO: 2079489 - RNA, 19 nt, Human
gaagcacgugguaaaacac

SEQ ID NO: 2079490 - RNA, 16 nt, Human
gaagcaccccaugcca

SEQ ID NO: 2079491 - RNA, 21 nt, Human
gaagcaccccaugccaaagcu

SEQ ID NO: 2079492 - RNA, 23 nt, Human
gaagcacuuugggauucuuucca

SEQ ID NO: 2079493 - RNA, 23 nt, Human
gaagcagaugcaaagaggcaaga

SEQ ID NO: 2079494 - RNA, 15 nt, Human
gaagcagugagccgc

SEQ ID NO: 2079495 - RNA, 23 nt, Human
gaagcagguugaggggcuccugg

SEQ ID NO: 2079496 - RNA, 19 nt, Human
gaagcagguugaggggcuc

SEQ ID NO: 2079497 - RNA, 22 nt, Human
gaagcagguugaggggcuccug

SEQ ID NO: 2079498 - RNA, 18 nt, Human
gaagcagguugaggggcu

SEQ ID NO: 2079499 - RNA, 22 nt, Human
gaagacauggggaggaaggaca

SEQ ID NO: 2079500 - RNA, 18 nt, Human
gaagacaugaaccaagug

SEQ ID NO: 2079501 - RNA, 15 nt, Human
gaagacaggacagug

SEQ ID NO: 2079502 - RNA, 22 nt, Human
gaagaccugcugagggaccagc

SEQ ID NO: 2079503 - RNA, 16 nt, Human
gaagacacugaugggc

SEQ ID NO: 2079504 - RNA, 14 nt, Human
gaacugcauggacc

SEQ ID NO: 2079505 - RNA, 15 nt, Human
gaacugcauggaccu

SEQ ID NO: 2079506 - RNA, 22 nt, Human
gaacugcauggaccuaacauuc

SEQ ID NO: 2079507 - RNA, 23 nt, Human
gaacugcauggaccuaacauucg

SEQ ID NO: 2079508 - RNA, 17 nt, Human
gaacugcauguauaaau

SEQ ID NO: 2079509 - RNA, 20 nt, Human
gaacugcauguauaaaugaa

SEQ ID NO: 2079510 - RNA, 15 nt, Human
gaacugcauauguuu

SEQ ID NO: 2079511 - RNA, 21 nt, Human
gaacugcauauguuucgcuga

SEQ ID NO: 2079512 - RNA, 21 nt, Human
gaagacacugaugggcaaccc

SEQ ID NO: 2079513 - RNA, 21 nt, Human
gaagacacugaaauauacaca

SEQ ID NO: 2079514 - RNA, 20 nt, Human
cuucuucagaagacacugca

SEQ ID NO: 2079515 - RNA, 14 nt, Human
cuucuuacaugcau

SEQ ID NO: 2079516 - RNA, 20 nt, Human
cuucuuauucucacuccacc

SEQ ID NO: 2079517 - RNA, 22 nt, Human
cuucuuauucucacuccaccac

SEQ ID NO: 2079518 - RNA, 13 nt, Human
cuucuuacaugca

SEQ ID NO: 2079519 - RNA, 19 nt, Human
cuucucuuuaacucaggac

SEQ ID NO: 2079520 - RNA, 20 nt, Human
cuucucuuuaacucaggacu

SEQ ID NO: 2079521 - RNA, 21 nt, Human
cuucucuuuaacucaggacuc

SEQ ID NO: 2079522 - RNA, 20 nt, Human
cuucuuaauauaacugccuu

SEQ ID NO: 2079523 - RNA, 16 nt, Human
cuucuuaaaugagaag

SEQ ID NO: 2079524 - RNA, 21 nt, Human
cuucuuaaaugagaaggaauu

SEQ ID NO: 2079525 - RNA, 21 nt, Human
cuucuuaaccccaguaagcca

SEQ ID NO: 2079526 - RNA, 18 nt, Human
cuucuuaauauaacugcc

SEQ ID NO: 2079527 - RNA, 14 nt, Human
cuucugaccacacu

SEQ ID NO: 2079528 - RNA, 15 nt, Human
cuucugaccacacuu

SEQ ID NO: 2079529 - RNA, 17 nt, Human
cuucugaccacacuucc

SEQ ID NO: 2079530 - RNA, 18 nt, Human
cuucugaccacacuuccu

SEQ ID NO: 2079531 - RNA, 19 nt, Human
cuucugaccacacuuccug

SEQ ID NO: 2079532 - RNA, 23 nt, Human
cuucugaccacacuuccugucca

SEQ ID NO: 2079533 - RNA, 22 nt, Human
cuuccucuuuccaucuacccuc

SEQ ID NO: 2079534 - RNA, 21 nt, Human
cuuccucuuuccaucuacccu

SEQ ID NO: 2079535 - RNA, 15 nt, Human
cuuccucuccacugc

SEQ ID NO: 2079536 - RNA, 14 nt, Human
cuuccucuccacug

SEQ ID NO: 2079537 - RNA, 13 nt, Human
cuuccucuccacu

SEQ ID NO: 2079538 - RNA, 21 nt, Human
cuuccucucauccuuuucucc

SEQ ID NO: 2079539 - RNA, 22 nt, Human
cuuccucucauccuuuucuccu

SEQ ID NO: 2079540 - RNA, 13 nt, Human
cuucuaaaugcau

SEQ ID NO: 2079541 - RNA, 15 nt, Human
cuucuaaaugcauau

SEQ ID NO: 2079542 - RNA, 21 nt, Human
cuucucugugaacgauuuaga

SEQ ID NO: 2079543 - RNA, 22 nt, Human
cuucucugugaacgauuuagaa

SEQ ID NO: 2079544 - RNA, 12 nt, Human
cuucucuuaauu

SEQ ID NO: 2079545 - RNA, 14 nt, Human
cuucucuuaauuua

SEQ ID NO: 2079546 - RNA, 15 nt, Human
cuucucuuaauuuaa

SEQ ID NO: 2079547 - RNA, 16 nt, Human
cuucucuuaauuuaau

SEQ ID NO: 2079548 - RNA, 21 nt, Human
cuucuagugauuucuggggcc

SEQ ID NO: 2079549 - RNA, 23 nt, Human
cuuggccugucucauccccaggg

SEQ ID NO: 2079550 - RNA, 17 nt, Human
cuuggccugucucaucc

SEQ ID NO: 2079551 - RNA, 22 nt, Human
cuuggccugucucauccccagg

SEQ ID NO: 2079552 - RNA, 23 nt, Human
cuugcuagcuaugugaccuugag

SEQ ID NO: 2079553 - RNA, 20 nt, Human
cuugcuagcuaugugaccuu

SEQ ID NO: 2079554 - RNA, 11 nt, Human
cuuggccucag

SEQ ID NO: 2079555 - RNA, 12 nt, Human
cuuggccucaga

SEQ ID NO: 2079556 - RNA, 23 nt, Human
cuuggccucagaauucacaaaau

SEQ ID NO: 2079557 - RNA, 16 nt, Human
cuugcuaccucaaggg

SEQ ID NO: 2079558 - RNA, 21 nt, Human
cuugauuuguuuuagaaugau

SEQ ID NO: 2079559 - RNA, 23 nt, Human
cuugaaggaucuguuuuuaaaaa

SEQ ID NO: 2079560 - RNA, 19 nt, Human
cuugaccagcagaucccag

SEQ ID NO: 2079561 - RNA, 20 nt, Human
cuugaccagcagaucccagc

SEQ ID NO: 2079562 - RNA, 21 nt, Human
cuugaccagcagaucccagcu

SEQ ID NO: 2079563 - RNA, 22 nt, Human
cuugaccagcagaucccagcuc

SEQ ID NO: 2079564 - RNA, 18 nt, Human
cuugauguguuaucucuu

SEQ ID NO: 2079565 - RNA, 18 nt, Human
cuugauucacaaugaaau

SEQ ID NO: 2079566 - RNA, 20 nt, Human
cuugaauugcauuuuuuaaa

SEQ ID NO: 2079567 - RNA, 19 nt, Human
cuugacauaauuucacuga

SEQ ID NO: 2079568 - RNA, 12 nt, Human
cuugaccaagca

SEQ ID NO: 2079569 - RNA, 15 nt, Human
cuugaccaagcagga

SEQ ID NO: 2079570 - RNA, 17 nt, Human
cuugaccaagcaggaag

SEQ ID NO: 2079571 - RNA, 18 nt, Human
cuugaccaagcaggaagc

SEQ ID NO: 2079572 - RNA, 19 nt, Human
cuugaccaagcaggaagcu

SEQ ID NO: 2079573 - RNA, 20 nt, Human
cuugaccaagcaggaagcuc

SEQ ID NO: 2079574 - RNA, 23 nt, Human
cuugaccaagcaggaagcucaga

SEQ ID NO: 2079575 - RNA, 11 nt, Human
cuugaccagca

SEQ ID NO: 2079576 - RNA, 14 nt, Human
cuugaauucauaga

SEQ ID NO: 2079577 - RNA, 17 nt, Human
cuugaagucacccggcc

SEQ ID NO: 2079578 - RNA, 20 nt, Human
cuugaagucacccggccccc

SEQ ID NO: 2079579 - RNA, 17 nt, Human
cuuucuaaugugugaau

SEQ ID NO: 2079580 - RNA, 16 nt, Human
cuuucuacccagcgag

SEQ ID NO: 2079581 - RNA, 15 nt, Human
cuuucuacccagcga

SEQ ID NO: 2079582 - RNA, 18 nt, Human
cuuucucaauaagccuca

SEQ ID NO: 2079583 - RNA, 16 nt, Human
cuuugacugagcagac

SEQ ID NO: 2079584 - RNA, 13 nt, Human
cuuucucccaggc

SEQ ID NO: 2079585 - RNA, 20 nt, Human
cuuucucagccucugaauau

SEQ ID NO: 2079586 - RNA, 22 nt, Human
cuuucucagccgcuucugacug

SEQ ID NO: 2079587 - RNA, 21 nt, Human
cuuucucagccgcuucugacu

SEQ ID NO: 2079588 - RNA, 11 nt, Human
cuuuuauaaau

SEQ ID NO: 2079589 - RNA, 13 nt, Human
cuuuuauaaauua

SEQ ID NO: 2079590 - RNA, 14 nt, Human
cuuuuauaaauuaa

SEQ ID NO: 2079591 - RNA, 15 nt, Human
cuuuuauaaauuaaa

SEQ ID NO: 2079592 - RNA, 16 nt, Human
cuuuuauaaauuaaau

SEQ ID NO: 2079593 - RNA, 18 nt, Human
cuuuuauaaauuaaauau

SEQ ID NO: 2079594 - RNA, 20 nt, Human
cuuuuauaaauuaaauauau

SEQ ID NO: 2079595 - RNA, 24 nt, Human
cuuuuauaaauuaaauauauguau

SEQ ID NO: 2079596 - RNA, 22 nt, Human
cuuuuauaacuaguccuuuacu

SEQ ID NO: 2079597 - RNA, 14 nt, Human
cuuuguaugauauu

SEQ ID NO: 2079598 - RNA, 15 nt, Human
cuuuguaugauauuc

SEQ ID NO: 2079599 - RNA, 20 nt, Human
cuuuguaugauauuccauag

SEQ ID NO: 2079600 - RNA, 14 nt, Human
cuuugauuuagauu

SEQ ID NO: 2079601 - RNA, 19 nt, Human
cuuugauuuagauugagua

SEQ ID NO: 2079602 - RNA, 19 nt, Human
cuuugagauagaagaacug

SEQ ID NO: 2079603 - RNA, 20 nt, Human
cuuugagauagaagaacugc

SEQ ID NO: 2079604 - RNA, 18 nt, Human
cuuugagauagaagaacu

SEQ ID NO: 2079605 - RNA, 17 nt, Human
cuuugagacugggucuc

SEQ ID NO: 2079606 - RNA, 20 nt, Human
cuuuguaauuauuuuuaaua

SEQ ID NO: 2079607 - RNA, 21 nt, Human
cuuuguaaugucaccaccuuc

SEQ ID NO: 2079608 - RNA, 22 nt, Human
cuuuguaaugucaccaccuucc

SEQ ID NO: 2079609 - RNA, 13 nt, Human
cuuuguaauggga

SEQ ID NO: 2079610 - RNA, 17 nt, Human
cuuuguaaugucaccac

SEQ ID NO: 2079611 - RNA, 12 nt, Human
cuuuguaugcac

SEQ ID NO: 2079612 - RNA, 14 nt, Human
cuuuaauugugaau

SEQ ID NO: 2079613 - RNA, 22 nt, Human
cuuuaauugugaauugauaaua

SEQ ID NO: 2079614 - RNA, 23 nt, Human
cuuuaauuguuaagauaugaugu

SEQ ID NO: 2079615 - RNA, 23 nt, Human
cuuuaaugucacaggcaggucca

SEQ ID NO: 2079616 - RNA, 20 nt, Human
cuugugcugaucgugcuaaa

SEQ ID NO: 2079617 - RNA, 14 nt, Human
cuuuacccucaucu

SEQ ID NO: 2079618 - RNA, 15 nt, Human
cuuuacccucaucug

SEQ ID NO: 2079619 - RNA, 17 nt, Human
cuuuacccucaucuguc

SEQ ID NO: 2079620 - RNA, 20 nt, Human
cuuuacccucaucugucugg

SEQ ID NO: 2079621 - RNA, 17 nt, Human
cuuuacauaugcuuuaa

SEQ ID NO: 2079622 - RNA, 20 nt, Human
cuuuacaugggguuuucaau

SEQ ID NO: 2079623 - RNA, 15 nt, Human
cuuggguaggcggga

SEQ ID NO: 2079624 - RNA, 17 nt, Human
cuugggucccagggaag

SEQ ID NO: 2079625 - RNA, 23 nt, Human
cuugggucccccacgugacagug

SEQ ID NO: 2079626 - RNA, 23 nt, Human
cuuggguucaagugauucuccug

SEQ ID NO: 2079627 - RNA, 17 nt, Human
cuuggguuuuuguuacc

SEQ ID NO: 2079628 - RNA, 22 nt, Human
cuuggguguaacaggucuccuc

SEQ ID NO: 2079629 - RNA, 21 nt, Human
cuuggguguaacaggucuccu

SEQ ID NO: 2079630 - RNA, 14 nt, Human
cuuggucacauaca

SEQ ID NO: 2079631 - RNA, 15 nt, Human
cuugguaagaagccg

SEQ ID NO: 2079632 - RNA, 23 nt, Human
cuugguacuacuagaugucuuua

SEQ ID NO: 2079633 - RNA, 18 nt, Human
cuugguacuugcugcuau

SEQ ID NO: 2079634 - RNA, 19 nt, Human
cuugguacuugcugcuauu

SEQ ID NO: 2079635 - RNA, 20 nt, Human
cuugguacuugcugcuauuu

SEQ ID NO: 2079636 - RNA, 15 nt, Human
cuuggucuuauuuau

SEQ ID NO: 2079637 - RNA, 17 nt, Human
cuugugaauauguacau

SEQ ID NO: 2079638 - RNA, 14 nt, Human
cuugugacuagugc

SEQ ID NO: 2079639 - RNA, 15 nt, Human
cuugugacuagugcu

SEQ ID NO: 2079640 - RNA, 16 nt, Human
cuugugacuagugcug

SEQ ID NO: 2079641 - RNA, 17 nt, Human
cuugugacuagugcuga

SEQ ID NO: 2079642 - RNA, 18 nt, Human
cuugugacuagugcugaa

SEQ ID NO: 2079643 - RNA, 19 nt, Human
cuugugacuagugcugaag

SEQ ID NO: 2079644 - RNA, 12 nt, Human
cuugugacauau

SEQ ID NO: 2079645 - RNA, 21 nt, Human
cuugugacauauuaugucuuc

SEQ ID NO: 2079646 - RNA, 20 nt, Human
cuugguguccuuucccucca

SEQ ID NO: 2079647 - RNA, 21 nt, Human
cuugguguccuuucccuccac

SEQ ID NO: 2079648 - RNA, 19 nt, Human
cuugguggcucacgccugu

SEQ ID NO: 2079649 - RNA, 15 nt, Human
cuugguguccaccug

SEQ ID NO: 2079650 - RNA, 16 nt, Human
cuugguguccaccugg

SEQ ID NO: 2079651 - RNA, 17 nt, Human
cuugguguccaccuggc

SEQ ID NO: 2079652 - RNA, 19 nt, Human
cuugguguccaccuggccc

SEQ ID NO: 2079653 - RNA, 14 nt, Human
cuugguguccuuuc

SEQ ID NO: 2079654 - RNA, 20 nt, Human
cugggcaccuggggaguggg

SEQ ID NO: 2079655 - RNA, 16 nt, Human
cugggcaccuggggag

SEQ ID NO: 2079656 - RNA, 17 nt, Human
cugggcaccuggggagu

SEQ ID NO: 2079657 - RNA, 19 nt, Human
cugggcaccuggggagugg

SEQ ID NO: 2079658 - RNA, 14 nt, Human
cugggcauugcuuu

SEQ ID NO: 2079659 - RNA, 16 nt, Human
cugggcauugcuuucc

SEQ ID NO: 2079660 - RNA, 17 nt, Human
cugggcauugcuuucca

SEQ ID NO: 2079661 - RNA, 21 nt, Human
cugggccaaguuccucuagug

SEQ ID NO: 2079662 - RNA, 19 nt, Human
cugggccaagccagggaug

SEQ ID NO: 2079663 - RNA, 15 nt, Human
cugggccaaguuccu

SEQ ID NO: 2079664 - RNA, 18 nt, Human
cugggccaaguuccucua

SEQ ID NO: 2079665 - RNA, 20 nt, Human
cugggccaaguuccucuagu

SEQ ID NO: 2079666 - RNA, 14 nt, Human
cuggggagaaagua

SEQ ID NO: 2079667 - RNA, 20 nt, Human
cuggggagugggacagaguc

SEQ ID NO: 2079668 - RNA, 17 nt, Human
cuggggagugggacaga

SEQ ID NO: 2079669 - RNA, 18 nt, Human
cuggggauacuggcaaag

SEQ ID NO: 2079670 - RNA, 20 nt, Human
cuggguucacugcaaccucc

SEQ ID NO: 2079671 - RNA, 18 nt, Human
cuggguucacugcaaccu

SEQ ID NO: 2079672 - RNA, 17 nt, Human
cuggguuccaauccugg

SEQ ID NO: 2079673 - RNA, 15 nt, Human
cuggguucacugcaa

SEQ ID NO: 2079674 - RNA, 13 nt, Human
cuggguggggcug

SEQ ID NO: 2079675 - RNA, 17 nt, Human
cuggguggggcugcucc

SEQ ID NO: 2079676 - RNA, 18 nt, Human
cuggguggggcugcuccu

SEQ ID NO: 2079677 - RNA, 20 nt, Human
cuggguggggcugcuccucc

SEQ ID NO: 2079678 - RNA, 21 nt, Human
cuggguggggcugcuccucca

SEQ ID NO: 2079679 - RNA, 22 nt, Human
cuggguggggcugcuccuccag

SEQ ID NO: 2079680 - RNA, 16 nt, Human
cuggguggggugagga

SEQ ID NO: 2079681 - RNA, 21 nt, Human
cuggguggggugaggaccacu

SEQ ID NO: 2079682 - RNA, 15 nt, Human
cuggggcagucaccu

SEQ ID NO: 2079683 - RNA, 23 nt, Human
cuggggcaggaggggagugaggc

SEQ ID NO: 2079684 - RNA, 19 nt, Human
cuggggcuaggcuggagcc

SEQ ID NO: 2079685 - RNA, 14 nt, Human
cuggggcucuggga

SEQ ID NO: 2079686 - RNA, 15 nt, Human
cuggggcucugggau

SEQ ID NO: 2079687 - RNA, 14 nt, Human
cuggggcucugugc

SEQ ID NO: 2079688 - RNA, 17 nt, Human
cuggggcucugugcagg

SEQ ID NO: 2079689 - RNA, 19 nt, Human
cuggggcucugugcaggga

SEQ ID NO: 2079690 - RNA, 16 nt, Human
cuggggcugaucucag

SEQ ID NO: 2079691 - RNA, 17 nt, Human
cuggggcugaucucagg

SEQ ID NO: 2079692 - RNA, 20 nt, Human
cuggggcugaucucagggaa

SEQ ID NO: 2079693 - RNA, 21 nt, Human
cuggggcugaucucagggaag

SEQ ID NO: 2079694 - RNA, 22 nt, Human
cuggggcugaucucagggaagc

SEQ ID NO: 2079695 - RNA, 23 nt, Human
cuggggcugaucucagggaagcc

SEQ ID NO: 2079696 - RNA, 15 nt, Human
cuggcagcagagugu

SEQ ID NO: 2079697 - RNA, 11 nt, Human
cuggcagccca

SEQ ID NO: 2079698 - RNA, 22 nt, Human
cuggcagccgugccuucagcuc

SEQ ID NO: 2079699 - RNA, 21 nt, Human
cuggcagccgugccuucagcu

SEQ ID NO: 2079700 - RNA, 13 nt, Human
cuggcagccccag

SEQ ID NO: 2079701 - RNA, 15 nt, Human
cuggcagccccagca

SEQ ID NO: 2079702 - RNA, 16 nt, Human
cuggcagccccagcac

SEQ ID NO: 2079703 - RNA, 18 nt, Human
cuggcagccccagcacca

SEQ ID NO: 2079704 - RNA, 20 nt, Human
cuggcagccgugccuucagc

SEQ ID NO: 2079705 - RNA, 19 nt, Human
cuggcagccgugccuucag

SEQ ID NO: 2079706 - RNA, 13 nt, Human
cugggacuggcca

SEQ ID NO: 2079707 - RNA, 14 nt, Human
cugggacuggccag

SEQ ID NO: 2079708 - RNA, 23 nt, Human
cugggaauguauuauucugcagc

SEQ ID NO: 2079709 - RNA, 13 nt, Human
cugggaauguauu

SEQ ID NO: 2079710 - RNA, 18 nt, Human
cugggaauguauuauucu

SEQ ID NO: 2079711 - RNA, 19 nt, Human
cugggaauguauuauucug

SEQ ID NO: 2079712 - RNA, 22 nt, Human
cugggaauguauuauucugcag

SEQ ID NO: 2079713 - RNA, 11 nt, Human
cugggacacag

SEQ ID NO: 2079714 - RNA, 14 nt, Human
cuggccgggcacag

SEQ ID NO: 2079715 - RNA, 15 nt, Human
cuggccgggcacagc

SEQ ID NO: 2079716 - RNA, 16 nt, Human
cuggccgggcacagcu

SEQ ID NO: 2079717 - RNA, 17 nt, Human
cuggccgggcacagcug

SEQ ID NO: 2079718 - RNA, 20 nt, Human
cuggccgggcacagcugugg

SEQ ID NO: 2079719 - RNA, 12 nt, Human
cuggcccugccu

SEQ ID NO: 2079720 - RNA, 12 nt, Human
cuggcccucuuc

SEQ ID NO: 2079721 - RNA, 13 nt, Human
cuggcccucuucu

SEQ ID NO: 2079722 - RNA, 15 nt, Human
cuggcccucuucuua

SEQ ID NO: 2079723 - RNA, 16 nt, Human
cuggcccucuucuuac

SEQ ID NO: 2079724 - RNA, 21 nt, Human
cuggcccgucauguuccucaa

SEQ ID NO: 2079725 - RNA, 18 nt, Human
cuggcccgucauguuccu

SEQ ID NO: 2079726 - RNA, 14 nt, Human
cugcuucaaauauu

SEQ ID NO: 2079727 - RNA, 19 nt, Human
cugcuucaaauauuucccu

SEQ ID NO: 2079728 - RNA, 20 nt, Human
cugcuuuugucuaugggacu

SEQ ID NO: 2079729 - RNA, 13 nt, Human
cuggauauuuuca

SEQ ID NO: 2079730 - RNA, 15 nt, Human
cuggauauuuucaaa

SEQ ID NO: 2079731 - RNA, 16 nt, Human
cuggauauuuucaaau

SEQ ID NO: 2079732 - RNA, 21 nt, Human
cuggauauuuucaaauuguau

SEQ ID NO: 2079733 - RNA, 22 nt, Human
cuggauauuuucaaauuguauc

SEQ ID NO: 2079734 - RNA, 13 nt, Human
cuggauaaaauga

SEQ ID NO: 2079735 - RNA, 19 nt, Human
cuggauaguccgucucugc

SEQ ID NO: 2079736 - RNA, 18 nt, Human
cuggauaguccgucucug

SEQ ID NO: 2079737 - RNA, 13 nt, Human
cuggauaauuuug

SEQ ID NO: 2079738 - RNA, 15 nt, Human
cuggauaauuuugca

SEQ ID NO: 2079739 - RNA, 21 nt, Human
cuggauaauuuugcauaaaau

SEQ ID NO: 2079740 - RNA, 20 nt, Human
cuggacuugagcuuggcagc

SEQ ID NO: 2079741 - RNA, 22 nt, Human
cuggacugaagccugcaggagu

SEQ ID NO: 2079742 - RNA, 18 nt, Human
cuggacuugagcuuggca

SEQ ID NO: 2079743 - RNA, 16 nt, Human
cuggacugaagccugc

SEQ ID NO: 2079744 - RNA, 19 nt, Human
cuggacugaagccugcagg

SEQ ID NO: 2079745 - RNA, 21 nt, Human
cugcuuuugucuaugggacuc

SEQ ID NO: 2079746 - RNA, 19 nt, Human
cugcuuuuuaaagaaugcu

SEQ ID NO: 2079747 - RNA, 12 nt, Human
cuggaagagagg

SEQ ID NO: 2079748 - RNA, 16 nt, Human
cuggaagagcagcccu

SEQ ID NO: 2079749 - RNA, 13 nt, Human
cuggaagagagga

SEQ ID NO: 2079750 - RNA, 12 nt, Human
cuggaagcacag

SEQ ID NO: 2079751 - RNA, 15 nt, Human
cuggaagcacagaaa

SEQ ID NO: 2079752 - RNA, 19 nt, Human
cuggaagcacagaaaacua

SEQ ID NO: 2079753 - RNA, 22 nt, Human
cuggaagcacagaaaacuagaa

SEQ ID NO: 2079754 - RNA, 23 nt, Human
cuggacugaagccugcaggaguu

SEQ ID NO: 2079755 - RNA, 14 nt, Human
cuggaagcacagcu

SEQ ID NO: 2079756 - RNA, 19 nt, Human
cugcugaccuccacagcuu

SEQ ID NO: 2079757 - RNA, 18 nt, Human
cugcugacuguuuucucu

SEQ ID NO: 2079758 - RNA, 21 nt, Human
cugcugacuguuuucucuuga

SEQ ID NO: 2079759 - RNA, 12 nt, Human
cugcucaucauu

SEQ ID NO: 2079760 - RNA, 16 nt, Human
cugcugaccuccacag

SEQ ID NO: 2079761 - RNA, 18 nt, Human
cugcugaccuccacagcu

SEQ ID NO: 2079762 - RNA, 15 nt, Human
cugccuguaguuagg

SEQ ID NO: 2079763 - RNA, 16 nt, Human
cugccuguaguuagga

SEQ ID NO: 2079764 - RNA, 23 nt, Human
cugcuaggugggccagccccucc

SEQ ID NO: 2079765 - RNA, 15 nt, Human
cugcuaggugggcca

SEQ ID NO: 2079766 - RNA, 16 nt, Human
cugcuaggugggccag

SEQ ID NO: 2079767 - RNA, 20 nt, Human
cugcuaggugggccagcccc

SEQ ID NO: 2079768 - RNA, 21 nt, Human
cugcuaggugggccagccccu

SEQ ID NO: 2079769 - RNA, 22 nt, Human
cugcuaggugggccagccccuc

SEQ ID NO: 2079770 - RNA, 15 nt, Human
cugaugaaucuugcg

SEQ ID NO: 2079771 - RNA, 20 nt, Human
cugaucugaugcaagcaaga

SEQ ID NO: 2079772 - RNA, 19 nt, Human
cugccuguucagcuccagc

SEQ ID NO: 2079773 - RNA, 18 nt, Human
cugccuguucagcuccag

SEQ ID NO: 2079774 - RNA, 17 nt, Human
cugccuguucagcucca

SEQ ID NO: 2079775 - RNA, 16 nt, Human
cugccucucccuggcc

SEQ ID NO: 2079776 - RNA, 15 nt, Human
cugccuggucuccug

SEQ ID NO: 2079777 - RNA, 16 nt, Human
cugccuggucuccugc

SEQ ID NO: 2079778 - RNA, 17 nt, Human
cugccuggucuccugcc

SEQ ID NO: 2079779 - RNA, 19 nt, Human
cugccuggucuccugcccc

SEQ ID NO: 2079780 - RNA, 21 nt, Human
cugccuggucuccugccccca

SEQ ID NO: 2079781 - RNA, 22 nt, Human
cugccuggucuccugcccccac

SEQ ID NO: 2079782 - RNA, 13 nt, Human
cugccuguaguua

SEQ ID NO: 2079783 - RNA, 19 nt, Human
cugccuguaacuugagagu

SEQ ID NO: 2079784 - RNA, 24 nt, Human
cugccuccucuucaacugaccagc

SEQ ID NO: 2079785 - RNA, 15 nt, Human
cugccuccucuucaa

SEQ ID NO: 2079786 - RNA, 14 nt, Human
cugccuccucuuca

SEQ ID NO: 2079787 - RNA, 13 nt, Human
cugccuccucuuc

SEQ ID NO: 2079788 - RNA, 23 nt, Human
cugccucucccaucacuucccua

SEQ ID NO: 2079789 - RNA, 15 nt, Human
cugccucccugucca

SEQ ID NO: 2079790 - RNA, 17 nt, Human
cugccucccuguccacc

SEQ ID NO: 2079791 - RNA, 15 nt, Human
cugccucucccauca

SEQ ID NO: 2079792 - RNA, 22 nt, Human
cugccucucccaucacuucccu

SEQ ID NO: 2079793 - RNA, 16 nt, Human
cuuaggggcugcugac

SEQ ID NO: 2079794 - RNA, 15 nt, Human
cuuaggaagaauuuu

SEQ ID NO: 2079795 - RNA, 17 nt, Human
cuuaggaagagaaacca

SEQ ID NO: 2079796 - RNA, 22 nt, Human
cuuaggaagagaaaccagggag

SEQ ID NO: 2079797 - RNA, 14 nt, Human
cuuaggcagggaag

SEQ ID NO: 2079798 - RNA, 15 nt, Human
cuuaggcagggaagu

SEQ ID NO: 2079799 - RNA, 17 nt, Human
cuuaggcaugcacagcu

SEQ ID NO: 2079800 - RNA, 20 nt, Human
cuuacacaagacuuucccca

SEQ ID NO: 2079801 - RNA, 11 nt, Human
cuuagccuccc

SEQ ID NO: 2079802 - RNA, 14 nt, Human
cuuagccucccuga

SEQ ID NO: 2079803 - RNA, 15 nt, Human
cuuagccucccugaa

SEQ ID NO: 2079804 - RNA, 15 nt, Human
cuuaccauaugugcu

SEQ ID NO: 2079805 - RNA, 13 nt, Human
cuuaccauuaaag

SEQ ID NO: 2079806 - RNA, 23 nt, Human
cuuacccaucugcaccccccugg

SEQ ID NO: 2079807 - RNA, 14 nt, Human
cuuagcagugauuu

SEQ ID NO: 2079808 - RNA, 22 nt, Human
cuuagcagugauuuuuauccaa

SEQ ID NO: 2079809 - RNA, 14 nt, Human
cuuagcaugcacaa

SEQ ID NO: 2079810 - RNA, 18 nt, Human
cuuagcauguguugaaaa

SEQ ID NO: 2079811 - RNA, 14 nt, Human
cuuagcuuaucaau

SEQ ID NO: 2079812 - RNA, 16 nt, Human
cuuagcuuaucaauuu

SEQ ID NO: 2079813 - RNA, 23 nt, Human
cuuagcuuagaccucagccugug

SEQ ID NO: 2079814 - RNA, 21 nt, Human
cuuagcuuagaccucagccug

SEQ ID NO: 2079815 - RNA, 22 nt, Human
cuuagcuuagaccucagccugu

SEQ ID NO: 2079816 - RNA, 14 nt, Human
cuuagcuuagaccu

SEQ ID NO: 2079817 - RNA, 15 nt, Human
cuuagcuuagaccuc

SEQ ID NO: 2079818 - RNA, 16 nt, Human
cuuagcuuagaccuca

SEQ ID NO: 2079819 - RNA, 17 nt, Human
cuuagcuuagaccucag

SEQ ID NO: 2079820 - RNA, 18 nt, Human
cuuagcuuagaccucagc

SEQ ID NO: 2079821 - RNA, 19 nt, Human
cuuagcuuagaccucagcc

SEQ ID NO: 2079822 - RNA, 20 nt, Human
cuuagcuuagaccucagccu

SEQ ID NO: 2079823 - RNA, 15 nt, Human
cuuagcugccaagcc

SEQ ID NO: 2079824 - RNA, 14 nt, Human
cuuagcugccaagu

SEQ ID NO: 2079825 - RNA, 17 nt, Human
cuuagcugccaaguaaa

SEQ ID NO: 2079826 - RNA, 17 nt, Human
cuguuauuucuauuuuu

SEQ ID NO: 2079827 - RNA, 12 nt, Human
cuguucaaggaa

SEQ ID NO: 2079828 - RNA, 17 nt, Human
cuguucaauguuuaaug

SEQ ID NO: 2079829 - RNA, 16 nt, Human
cuguuauuucuauuuu

SEQ ID NO: 2079830 - RNA, 22 nt, Human
cuguuggcugggggccucagug

SEQ ID NO: 2079831 - RNA, 19 nt, Human
cuguuggcugggggccuca

SEQ ID NO: 2079832 - RNA, 14 nt, Human
cuguuggcuggggg

SEQ ID NO: 2079833 - RNA, 14 nt, Human
cuguugucauugcu

SEQ ID NO: 2079834 - RNA, 9 nt, Human
cuguuguuu

SEQ ID NO: 2079835 - RNA, 16 nt, Human
cuuacaagccagcugg

SEQ ID NO: 2079836 - RNA, 17 nt, Human
cuuacaagccagcugga

SEQ ID NO: 2079837 - RNA, 22 nt, Human
cuuacauuagcaguuugcuuug

SEQ ID NO: 2079838 - RNA, 21 nt, Human
cuuacauuagcaguuugcuuu

SEQ ID NO: 2079839 - RNA, 20 nt, Human
cuuacauuuuacuuuuuccu

SEQ ID NO: 2079840 - RNA, 15 nt, Human
cuuaccaaaggauag

SEQ ID NO: 2079841 - RNA, 15 nt, Human
cuuacauugugaaac

SEQ ID NO: 2079842 - RNA, 22 nt, Human
cuuaaauaaaagaaaugcacaa

SEQ ID NO: 2079843 - RNA, 23 nt, Human
cuuaaauaaaagaaaugcacaau

SEQ ID NO: 2079844 - RNA, 21 nt, Human
cuuaaauaauaaacaguggaa

SEQ ID NO: 2079845 - RNA, 20 nt, Human
cuuacaaaguguauuuuaua

SEQ ID NO: 2079846 - RNA, 14 nt, Human
cuuaaaacaacacu

SEQ ID NO: 2079847 - RNA, 21 nt, Human
cugugacccucaauucauauu

SEQ ID NO: 2079848 - RNA, 14 nt, Human
cugugcgcugacaa

SEQ ID NO: 2079849 - RNA, 21 nt, Human
cugugccuuugaguuuccuca

SEQ ID NO: 2079850 - RNA, 13 nt, Human
cugugccuggagc

SEQ ID NO: 2079851 - RNA, 14 nt, Human
cugugccuggagcu

SEQ ID NO: 2079852 - RNA, 17 nt, Human
cugugccuggagcuccu

SEQ ID NO: 2079853 - RNA, 18 nt, Human
cugugccuggagcuccug

SEQ ID NO: 2079854 - RNA, 19 nt, Human
cugugccuggagcuccugg

SEQ ID NO: 2079855 - RNA, 20 nt, Human
cugugccuggagcuccuggg

SEQ ID NO: 2079856 - RNA, 16 nt, Human
cugugaccugccccgc

SEQ ID NO: 2079857 - RNA, 22 nt, Human
cugugaccugccccgcccagcu

SEQ ID NO: 2079858 - RNA, 15 nt, Human
cugugucccucucuc

SEQ ID NO: 2079859 - RNA, 16 nt, Human
cugugucccucucucu

SEQ ID NO: 2079860 - RNA, 19 nt, Human
cugugucccucucucugga

SEQ ID NO: 2079861 - RNA, 20 nt, Human
cugugucccucucucuggaa

SEQ ID NO: 2079862 - RNA, 20 nt, Human
cuguguccugguuagcagag

SEQ ID NO: 2079863 - RNA, 14 nt, Human
cuguguccuugcac

SEQ ID NO: 2079864 - RNA, 16 nt, Human
cuguguccuugcaccu

SEQ ID NO: 2079865 - RNA, 18 nt, Human
cuguguccuugcaccugc

SEQ ID NO: 2079866 - RNA, 19 nt, Human
cuguguccuugcaccugca

SEQ ID NO: 2079867 - RNA, 16 nt, Human
cugugucguagccaag

SEQ ID NO: 2079868 - RNA, 22 nt, Human
cuguguccuugcaccugcaucc

SEQ ID NO: 2079869 - RNA, 14 nt, Human
cugugucacuacgu

SEQ ID NO: 2079870 - RNA, 17 nt, Human
cugugucagcauagaag

SEQ ID NO: 2079871 - RNA, 19 nt, Human
cugugucagcauagaagua

SEQ ID NO: 2079872 - RNA, 23 nt, Human
cugucggagcccugucuccucuc

SEQ ID NO: 2079873 - RNA, 17 nt, Human
cugucggagcccugucu

SEQ ID NO: 2079874 - RNA, 16 nt, Human
cugucgcccagucugg

SEQ ID NO: 2079875 - RNA, 13 nt, Human
cugucgcccagug

SEQ ID NO: 2079876 - RNA, 15 nt, Human
cugucgcccagucug

SEQ ID NO: 2079877 - RNA, 20 nt, Human
cuguagguucaugcccaagc

SEQ ID NO: 2079878 - RNA, 14 nt, Human
cuguagucccagcu

SEQ ID NO: 2079879 - RNA, 19 nt, Human
cugucauaagaaugaauaa

SEQ ID NO: 2079880 - RNA, 16 nt, Human
cugucauaucuucaca

SEQ ID NO: 2079881 - RNA, 18 nt, Human
cugucauaucuucacaau

SEQ ID NO: 2079882 - RNA, 22 nt, Human
cugucauaugcucugauuuauc

SEQ ID NO: 2079883 - RNA, 21 nt, Human
cuguccugggagugagcuggu

SEQ ID NO: 2079884 - RNA, 18 nt, Human
cugucaucuaccuuuucu

SEQ ID NO: 2079885 - RNA, 21 nt, Human
cugucaucuaccuuuucucuu

SEQ ID NO: 2079886 - RNA, 12 nt, Human
cuguccuccucg

SEQ ID NO: 2079887 - RNA, 23 nt, Human
cuguccuccucggaucaccgaga

SEQ ID NO: 2079888 - RNA, 16 nt, Human
cuguccucuuucagaa

SEQ ID NO: 2079889 - RNA, 19 nt, Human
cuguccucuuucagaaaac

SEQ ID NO: 2079890 - RNA, 20 nt, Human
cuguccucuuucagaaaaca

SEQ ID NO: 2079891 - RNA, 21 nt, Human
cuguccucuuucagaaaacag

SEQ ID NO: 2079892 - RNA, 20 nt, Human
cugguugguguugcagaagg

SEQ ID NO: 2079893 - RNA, 21 nt, Human
cugguugguguugcagaaggu

SEQ ID NO: 2079894 - RNA, 13 nt, Human
cugguugucauuu

SEQ ID NO: 2079895 - RNA, 14 nt, Human
cugguugucauuuu

SEQ ID NO: 2079896 - RNA, 14 nt, Human
cuggucuuguaaga

SEQ ID NO: 2079897 - RNA, 15 nt, Human
cuggucuuguaagag

SEQ ID NO: 2079898 - RNA, 14 nt, Human
cuggucuugagaug

SEQ ID NO: 2079899 - RNA, 15 nt, Human
cuggucuugagaugu

SEQ ID NO: 2079900 - RNA, 14 nt, Human
cuggugacaccagc

SEQ ID NO: 2079901 - RNA, 17 nt, Human
cuggugacaccagccuu

SEQ ID NO: 2079902 - RNA, 15 nt, Human
cuggugacaccagcc

SEQ ID NO: 2079903 - RNA, 16 nt, Human
cuggugacaccagccu

SEQ ID NO: 2079904 - RNA, 15 nt, Human
cugguugucauuuuu

SEQ ID NO: 2079905 - RNA, 18 nt, Human
cugguuucacuggcccaa

SEQ ID NO: 2079906 - RNA, 13 nt, Human
cugguuucacugg

SEQ ID NO: 2079907 - RNA, 17 nt, Human
cugguuucacuggccca

SEQ ID NO: 2079908 - RNA, 12 nt, Human
cuguaaagaauu

SEQ ID NO: 2079909 - RNA, 19 nt, Human
cuguagaaaagggaacuga

SEQ ID NO: 2079910 - RNA, 15 nt, Human
cuguacuucaaguua

SEQ ID NO: 2079911 - RNA, 13 nt, Human
cuguagaguggga

SEQ ID NO: 2079912 - RNA, 18 nt, Human
cuguacuuaauaaauuca

SEQ ID NO: 2079913 - RNA, 22 nt, Human
cuguagaccuagggaggaccuu

SEQ ID NO: 2079914 - RNA, 22 nt, Human
cuguagagcagggcaaguaaca

SEQ ID NO: 2079915 - RNA, 18 nt, Human
cuguaguaaacuauuuau

SEQ ID NO: 2079916 - RNA, 19 nt, Human
cuguaguaaacuauuuauc

SEQ ID NO: 2079917 - RNA, 20 nt, Human
cuguaguaaacuauuuaucu

SEQ ID NO: 2079918 - RNA, 12 nt, Human
cuguagucccag

SEQ ID NO: 2079919 - RNA, 18 nt, Human
cuguaguacuccuuaaga

SEQ ID NO: 2079920 - RNA, 21 nt, Human
cuguaguacuccuuaagaaca

SEQ ID NO: 2079921 - RNA, 23 nt, Human
cuguaguacuccuuaagaacaca

SEQ ID NO: 2079922 - RNA, 13 nt, Human
cuguacuuaauaa

SEQ ID NO: 2079923 - RNA, 16 nt, Human
cuguacuuaauaaauu

SEQ ID NO: 2079924 - RNA, 13 nt, Human
cuguacuggagag

SEQ ID NO: 2079925 - RNA, 15 nt, Human
cuguacuggagagca

SEQ ID NO: 2079926 - RNA, 17 nt, Human
cuguacuggagagcaac

SEQ ID NO: 2079927 - RNA, 18 nt, Human
cuguacuggagagcaaca

SEQ ID NO: 2079928 - RNA, 15 nt, Human
aacugaacauuccag

SEQ ID NO: 2079929 - RNA, 16 nt, Human
aacugaacaaaaaaau

SEQ ID NO: 2079930 - RNA, 16 nt, Human
aacucuguggcauuau

SEQ ID NO: 2079931 - RNA, 21 nt, Human
aacucugggcugcuacccaga

SEQ ID NO: 2079932 - RNA, 22 nt, Human
aacucugggcugcuacccagaa

SEQ ID NO: 2079933 - RNA, 14 nt, Human
aacucugccagcca

SEQ ID NO: 2079934 - RNA, 22 nt, Human
aacucugauguaaaugaaguaa

SEQ ID NO: 2079935 - RNA, 15 nt, Human
gugagucgaggacag

SEQ ID NO: 2079936 - RNA, 20 nt, Human
gugagguggguuuucuuccc

SEQ ID NO: 2079937 - RNA, 14 nt, Human
gugaguaagagcug

SEQ ID NO: 2079938 - RNA, 15 nt, Human
gugaguaagagcugg

SEQ ID NO: 2079939 - RNA, 16 nt, Human
gugaguaagagcuggu

SEQ ID NO: 2079940 - RNA, 16 nt, Human
gugagaggggaacaga

SEQ ID NO: 2079941 - RNA, 13 nt, Human
gugagagcugggu

SEQ ID NO: 2079942 - RNA, 23 nt, Human
gugagagggcaugcgcacaaggc

SEQ ID NO: 2079943 - RNA, 13 nt, Human
gugagagugagcu

SEQ ID NO: 2079944 - RNA, 21 nt, Human
gugagcacuaaggugugcucu

SEQ ID NO: 2079945 - RNA, 17 nt, Human
gugagcagacugguggg

SEQ ID NO: 2079946 - RNA, 16 nt, Human
gugagguugggcagcu

SEQ ID NO: 2079947 - RNA, 12 nt, Human
gugaccccaggu

SEQ ID NO: 2079948 - RNA, 15 nt, Human
gugacccagucagag

SEQ ID NO: 2079949 - RNA, 15 nt, Human
gugagaacuacucag

SEQ ID NO: 2079950 - RNA, 11 nt, Human
gugagaagaau

SEQ ID NO: 2079951 - RNA, 14 nt, Human
gugagaagaauauu

SEQ ID NO: 2079952 - RNA, 15 nt, Human
gugagaagaauauug

SEQ ID NO: 2079953 - RNA, 12 nt, Human
gugagagcuggg

SEQ ID NO: 2079954 - RNA, 18 nt, Human
gugaccauguuuuguuua

SEQ ID NO: 2079955 - RNA, 15 nt, Human
gugaccauuuauaau

SEQ ID NO: 2079956 - RNA, 17 nt, Human
gugaccaaugaugguca

SEQ ID NO: 2079957 - RNA, 14 nt, Human
gugaccaaggagga

SEQ ID NO: 2079958 - RNA, 19 nt, Human
gugaccaaguuauaaauca

SEQ ID NO: 2079959 - RNA, 19 nt, Human
gugacagaggcagccccau

SEQ ID NO: 2079960 - RNA, 18 nt, Human
gugacagaggcagcccca

SEQ ID NO: 2079961 - RNA, 16 nt, Human
gugacagaggcagccc

SEQ ID NO: 2079962 - RNA, 16 nt, Human
gugacaugcgggcugg

SEQ ID NO: 2079963 - RNA, 20 nt, Human
gugacaugcgggcugggcag

SEQ ID NO: 2079964 - RNA, 21 nt, Human
gugacaugcgggcugggcagc

SEQ ID NO: 2079965 - RNA, 22 nt, Human
gugacaugcgggcugggcagcu

SEQ ID NO: 2079966 - RNA, 17 nt, Human
gugaaguauacuguauu

SEQ ID NO: 2079967 - RNA, 19 nt, Human
gugaaguauacuguauuuu

SEQ ID NO: 2079968 - RNA, 13 nt, Human
gugaagauguuug

SEQ ID NO: 2079969 - RNA, 15 nt, Human
gugaagauguuugca

SEQ ID NO: 2079970 - RNA, 18 nt, Human
gugaagauguuugcaaua

SEQ ID NO: 2079971 - RNA, 15 nt, Human
gugaagcauccaggc

SEQ ID NO: 2079972 - RNA, 16 nt, Human
gugaagcauccaggca

SEQ ID NO: 2079973 - RNA, 17 nt, Human
gugaagcauccaggcac

SEQ ID NO: 2079974 - RNA, 20 nt, Human
gugaaggccgagaagcaaga

SEQ ID NO: 2079975 - RNA, 18 nt, Human
gugaagacugggugagga

SEQ ID NO: 2079976 - RNA, 19 nt, Human
gugaagagggagaagcaug

SEQ ID NO: 2079977 - RNA, 17 nt, Human
aacuagaauuucauuua

SEQ ID NO: 2079978 - RNA, 17 nt, Human
aacuagaacugaauuuu

SEQ ID NO: 2079979 - RNA, 16 nt, Human
aacuagaaaucugcca

SEQ ID NO: 2079980 - RNA, 17 nt, Human
aacuagaauuuauucaa

SEQ ID NO: 2079981 - RNA, 22 nt, Human
aacuagaauuuauucaauuccu

SEQ ID NO: 2079982 - RNA, 19 nt, Human
aacuagaauuuauucaauu

SEQ ID NO: 2079983 - RNA, 16 nt, Human
aacuacuguguuccug

SEQ ID NO: 2079984 - RNA, 17 nt, Human
aacuacuguguuccugg

SEQ ID NO: 2079985 - RNA, 14 nt, Human
aacuaauaaaagca

SEQ ID NO: 2079986 - RNA, 15 nt, Human
aacuaauaaaagcau

SEQ ID NO: 2079987 - RNA, 13 nt, Human
aacguuggacuuu

SEQ ID NO: 2079988 - RNA, 18 nt, Human
aaccuuucaaauuucaca

SEQ ID NO: 2079989 - RNA, 14 nt, Human
aaccuuucaaauuu

SEQ ID NO: 2079990 - RNA, 19 nt, Human
aaccuugucucuaugccag

SEQ ID NO: 2079991 - RNA, 23 nt, Human
aaccuugucucuaugccagcuca

SEQ ID NO: 2079992 - RNA, 18 nt, Human
aacgugggaguucagcug

SEQ ID NO: 2079993 - RNA, 23 nt, Human
aacgugggaguucagcugcuucu

SEQ ID NO: 2079994 - RNA, 22 nt, Human
aacguggggcagcacagagagg

SEQ ID NO: 2079995 - RNA, 17 nt, Human
aacguggggcagcacag

SEQ ID NO: 2079996 - RNA, 18 nt, Human
aacguggggcagcacaga

SEQ ID NO: 2079997 - RNA, 18 nt, Human
aacguuaagaauuguuaa

SEQ ID NO: 2079998 - RNA, 16 nt, Human
gucuucauccuuagca

SEQ ID NO: 2079999 - RNA, 21 nt, Human
gucuucauccuuagcaacagc

SEQ ID NO: 2080000 - RNA, 22 nt, Human
gucuucagagauaggccugugg

SEQ ID NO: 2080001 - RNA, 16 nt, Human
gucuuccaccuggaag

SEQ ID NO: 2080002 - RNA, 13 nt, Human
gucuuccauaaug

SEQ ID NO: 2080003 - RNA, 15 nt, Human
gucuuccauaaugua

SEQ ID NO: 2080004 - RNA, 16 nt, Human
gucuucaguaagccgu

SEQ ID NO: 2080005 - RNA, 18 nt, Human
gucuucagggggccaggu

SEQ ID NO: 2080006 - RNA, 17 nt, Human
gucuuccauaauguaua

SEQ ID NO: 2080007 - RNA, 15 nt, Human
gucuucccuaccuca

SEQ ID NO: 2080008 - RNA, 21 nt, Human
gucuuuguaaugucaccaccu

SEQ ID NO: 2080009 - RNA, 19 nt, Human
gucuuuguuaagacugcug

SEQ ID NO: 2080010 - RNA, 22 nt, Human
gucuuuguaaugucaccaccuu

SEQ ID NO: 2080011 - RNA, 21 nt, Human
aaccuguugauagcaagugaa

SEQ ID NO: 2080012 - RNA, 16 nt, Human
aaccuuacuuacagca

SEQ ID NO: 2080013 - RNA, 17 nt, Human
aaccugauguuaaaauu

SEQ ID NO: 2080014 - RNA, 18 nt, Human
aaccugauguuaaaauuc

SEQ ID NO: 2080015 - RNA, 24 nt, Human
gucuuuuaggacccuucccuugag

SEQ ID NO: 2080016 - RNA, 19 nt, Human
aaccauccccuccguggca

SEQ ID NO: 2080017 - RNA, 22 nt, Human
aaccaucccugaugucugucug

SEQ ID NO: 2080018 - RNA, 23 nt, Human
gucucuuuaaugucacaggcagg

SEQ ID NO: 2080019 - RNA, 22 nt, Human
gucucuuuaaugucacaggcag

SEQ ID NO: 2080020 - RNA, 16 nt, Human
gucugaagucacugca

SEQ ID NO: 2080021 - RNA, 20 nt, Human
gucucuuuaaugucacaggc

SEQ ID NO: 2080022 - RNA, 19 nt, Human
gucucuuuaaugucacagg

SEQ ID NO: 2080023 - RNA, 18 nt, Human
gucucuuuaaugucacag

SEQ ID NO: 2080024 - RNA, 17 nt, Human
gucucuuuaaucuucag

SEQ ID NO: 2080025 - RNA, 22 nt, Human
gucuggaucugggacccuuucc

SEQ ID NO: 2080026 - RNA, 14 nt, Human
gucugggggucagg

SEQ ID NO: 2080027 - RNA, 16 nt, Human
gucugggguucagccc

SEQ ID NO: 2080028 - RNA, 17 nt, Human
gucugggguucagcccc

SEQ ID NO: 2080029 - RNA, 18 nt, Human
gucugggguucagccccu

SEQ ID NO: 2080030 - RNA, 20 nt, Human
gucugggguucagccccucc

SEQ ID NO: 2080031 - RNA, 23 nt, Human
gucugggguucagccccuccucu

SEQ ID NO: 2080032 - RNA, 23 nt, Human
gucuucagccuagccgaccucag

SEQ ID NO: 2080033 - RNA, 13 nt, Human
gucuucagccuag

SEQ ID NO: 2080034 - RNA, 15 nt, Human
gucuucagccuagcc

SEQ ID NO: 2080035 - RNA, 13 nt, Human
gucugguuucuag

SEQ ID NO: 2080036 - RNA, 17 nt, Human
gucuucacagcucugug

SEQ ID NO: 2080037 - RNA, 15 nt, Human
gucuucacggcagga

SEQ ID NO: 2080038 - RNA, 12 nt, Human
gucuucagccua

SEQ ID NO: 2080039 - RNA, 16 nt, Human
gucuucacagcucugu

SEQ ID NO: 2080040 - RNA, 14 nt, Human
gucugguuucuaga

SEQ ID NO: 2080041 - RNA, 23 nt, Human
gucugacaggcaaugcuggcugu

SEQ ID NO: 2080042 - RNA, 22 nt, Human
gucugacaggcaaugcuggcug

SEQ ID NO: 2080043 - RNA, 19 nt, Human
gucugaagucacugcacag

SEQ ID NO: 2080044 - RNA, 17 nt, Human
gucugaagucacugcac

SEQ ID NO: 2080045 - RNA, 21 nt, Human
gucugacaggcaaugcuggcu

SEQ ID NO: 2080046 - RNA, 18 nt, Human
gucuggagaauaauucuu

SEQ ID NO: 2080047 - RNA, 21 nt, Human
gucuggagaauaauucuuuga

SEQ ID NO: 2080048 - RNA, 10 nt, Human
gucuggaggg

SEQ ID NO: 2080049 - RNA, 11 nt, Human
gucuggagggg

SEQ ID NO: 2080050 - RNA, 23 nt, Human
gucuggaggggagcucugucugu

SEQ ID NO: 2080051 - RNA, 18 nt, Human
gucucuuuaaucuucagu

SEQ ID NO: 2080052 - RNA, 19 nt, Human
gucuggacauucagaacac

SEQ ID NO: 2080053 - RNA, 14 nt, Human
gucuggagaagcag

SEQ ID NO: 2080054 - RNA, 17 nt, Human
gucuggagaagcaguga

SEQ ID NO: 2080055 - RNA, 19 nt, Human
gucuggagaagcagugagc

SEQ ID NO: 2080056 - RNA, 16 nt, Human
gucucaaacuccugac

SEQ ID NO: 2080057 - RNA, 19 nt, Human
gucucaaaaaaagaaaaag

SEQ ID NO: 2080058 - RNA, 22 nt, Human
gucucaaacucuugaccucagg

SEQ ID NO: 2080059 - RNA, 15 nt, Human
gucuaugggacucaa

SEQ ID NO: 2080060 - RNA, 14 nt, Human
gucuaugggacuca

SEQ ID NO: 2080061 - RNA, 20 nt, Human
gucucaaaccuccaaaagcc

SEQ ID NO: 2080062 - RNA, 20 nt, Human
gucucaaacuccugggcuca

SEQ ID NO: 2080063 - RNA, 16 nt, Human
gucucaaacuccuggg

SEQ ID NO: 2080064 - RNA, 17 nt, Human
gucucaagagggcacug

SEQ ID NO: 2080065 - RNA, 15 nt, Human
gucucaagagggcac

SEQ ID NO: 2080066 - RNA, 22 nt, Human
gucucaagagggcacugguggc

SEQ ID NO: 2080067 - RNA, 20 nt, Human
gucucaagagggcacuggug

SEQ ID NO: 2080068 - RNA, 15 nt, Human
gucucaggucccugc

SEQ ID NO: 2080069 - RNA, 19 nt, Human
gucucacaguguugcccag

SEQ ID NO: 2080070 - RNA, 23 nt, Human
gucucacaguguugcccaggcug

SEQ ID NO: 2080071 - RNA, 16 nt, Human
gucucaggucccugca

SEQ ID NO: 2080072 - RNA, 15 nt, Human
gucuccagaccccca

SEQ ID NO: 2080073 - RNA, 16 nt, Human
gucucaguccaccuga

SEQ ID NO: 2080074 - RNA, 16 nt, Human
aaccaaauauuccaga

SEQ ID NO: 2080075 - RNA, 19 nt, Human
aaccaacccuucccugaaa

SEQ ID NO: 2080076 - RNA, 20 nt, Human
aaccaacccuucccugaaaa

SEQ ID NO: 2080077 - RNA, 12 nt, Human
aaccaaaugcau

SEQ ID NO: 2080078 - RNA, 15 nt, Human
aaccaaaugcaucaa

SEQ ID NO: 2080079 - RNA, 17 nt, Human
aaccaaaugcaucaauc

SEQ ID NO: 2080080 - RNA, 18 nt, Human
aaccaaaugcaucaaucc

SEQ ID NO: 2080081 - RNA, 23 nt, Human
aaccaaaugcaucaauccugugu

SEQ ID NO: 2080082 - RNA, 16 nt, Human
aaccaacuuuucuauu

SEQ ID NO: 2080083 - RNA, 16 nt, Human
aaccacagcccuguca

SEQ ID NO: 2080084 - RNA, 12 nt, Human
aaccacagcccu

SEQ ID NO: 2080085 - RNA, 13 nt, Human
aaccacagcccug

SEQ ID NO: 2080086 - RNA, 14 nt, Human
aaccacagcccugu

SEQ ID NO: 2080087 - RNA, 15 nt, Human
aaccacagcccuguc

SEQ ID NO: 2080088 - RNA, 13 nt, Human
aaccacaucuugc

SEQ ID NO: 2080089 - RNA, 16 nt, Human
aacauuuugucauaua

SEQ ID NO: 2080090 - RNA, 13 nt, Human
aacauuuucacac

SEQ ID NO: 2080091 - RNA, 13 nt, Human
gucuccauguuug

SEQ ID NO: 2080092 - RNA, 17 nt, Human
gucuccagacccccacc

SEQ ID NO: 2080093 - RNA, 20 nt, Human
gucuccagacccccaccccu

SEQ ID NO: 2080094 - RNA, 11 nt, Human
gucuccagccc

SEQ ID NO: 2080095 - RNA, 23 nt, Human
gucgcccagucuggaaugcagug

SEQ ID NO: 2080096 - RNA, 14 nt, Human
gucgaggacaggga

SEQ ID NO: 2080097 - RNA, 22 nt, Human
guccuuuuguaccaugguguga

SEQ ID NO: 2080098 - RNA, 17 nt, Human
guccuuuuguaccaugg

SEQ ID NO: 2080099 - RNA, 14 nt, Human
gucgcccagucugg

SEQ ID NO: 2080100 - RNA, 13 nt, Human
gucgcccagucug

SEQ ID NO: 2080101 - RNA, 12 nt, Human
gucgcccaggag

SEQ ID NO: 2080102 - RNA, 13 nt, Human
gucgcccaggaga

SEQ ID NO: 2080103 - RNA, 21 nt, Human
aacauuacucugaaauuguaa

SEQ ID NO: 2080104 - RNA, 15 nt, Human
aacauuauauugcaa

SEQ ID NO: 2080105 - RNA, 23 nt, Human
aacauuaaaacaauauuguuucu

SEQ ID NO: 2080106 - RNA, 21 nt, Human
aacauuaaaacaauauuguuu

SEQ ID NO: 2080107 - RNA, 21 nt, Human
guccugcuauuucccaagcug

SEQ ID NO: 2080108 - RNA, 18 nt, Human
guccuuggggacaucuca

SEQ ID NO: 2080109 - RNA, 22 nt, Human
guccugcucucuacccagccca

SEQ ID NO: 2080110 - RNA, 23 nt, Human
guccugcucucuacccagcccau

SEQ ID NO: 2080111 - RNA, 12 nt, Human
guccuugcacac

SEQ ID NO: 2080112 - RNA, 22 nt, Human
guccuugcacacuccccugcac

SEQ ID NO: 2080113 - RNA, 14 nt, Human
guccuugcaccugc

SEQ ID NO: 2080114 - RNA, 15 nt, Human
guccuugcaccugca

SEQ ID NO: 2080115 - RNA, 16 nt, Human
guccuugcaccugcau

SEQ ID NO: 2080116 - RNA, 17 nt, Human
guccuugcaccugcauc

SEQ ID NO: 2080117 - RNA, 18 nt, Human
guccuugcaccugcaucc

SEQ ID NO: 2080118 - RNA, 21 nt, Human
guagccucgccgucugugaau

SEQ ID NO: 2080119 - RNA, 15 nt, Human
guagccuugcccgga

SEQ ID NO: 2080120 - RNA, 23 nt, Human
guagccuugcccggauucuggga

SEQ ID NO: 2080121 - RNA, 22 nt, Human
guagcucuaggagggcuggcaa

SEQ ID NO: 2080122 - RNA, 14 nt, Human
guagcuagaggaac

SEQ ID NO: 2080123 - RNA, 15 nt, Human
guagcuagaggaacc

SEQ ID NO: 2080124 - RNA, 17 nt, Human
guagcuagaggaaccaa

SEQ ID NO: 2080125 - RNA, 23 nt, Human
guagcuccucaacucaccuaaug

SEQ ID NO: 2080126 - RNA, 14 nt, Human
guccaugugugugc

SEQ ID NO: 2080127 - RNA, 13 nt, Human
guccaugugugug

SEQ ID NO: 2080128 - RNA, 18 nt, Human
gucccaccuuggcugcag

SEQ ID NO: 2080129 - RNA, 17 nt, Human
gucccaccuuggcugca

SEQ ID NO: 2080130 - RNA, 19 nt, Human
gucccaccuuggcugcagg

SEQ ID NO: 2080131 - RNA, 21 nt, Human
guccgaaagggacuuggaagc

SEQ ID NO: 2080132 - RNA, 22 nt, Human
guccgaaagggacuuggaagcu

SEQ ID NO: 2080133 - RNA, 16 nt, Human
gucccgauuguaacuc

SEQ ID NO: 2080134 - RNA, 14 nt, Human
guccguuuacucca

SEQ ID NO: 2080135 - RNA, 22 nt, Human
gucccuuucuuggccaguuauc

SEQ ID NO: 2080136 - RNA, 12 nt, Human
aacaggucuccu

SEQ ID NO: 2080137 - RNA, 13 nt, Human
aacaggucuccuc

SEQ ID NO: 2080138 - RNA, 15 nt, Human
aacaggucuccucuu

SEQ ID NO: 2080139 - RNA, 17 nt, Human
aacaggucuccucuuaa

SEQ ID NO: 2080140 - RNA, 18 nt, Human
aacaggucuccucuuaaa

SEQ ID NO: 2080141 - RNA, 19 nt, Human
aacaggucuccucuuaaaa

SEQ ID NO: 2080142 - RNA, 14 nt, Human
aacagguggagaaa

SEQ ID NO: 2080143 - RNA, 20 nt, Human
aacaggucuccucuuaaaaa

SEQ ID NO: 2080144 - RNA, 17 nt, Human
aacagucuucaggcaaa

SEQ ID NO: 2080145 - RNA, 23 nt, Human
aacagaugcaaugugcuacugau

SEQ ID NO: 2080146 - RNA, 21 nt, Human
aacagaugcaaugugcuacug

SEQ ID NO: 2080147 - RNA, 22 nt, Human
aacagaugcaaugugcuacuga

SEQ ID NO: 2080148 - RNA, 19 nt, Human
aacagagugagacccuguc

SEQ ID NO: 2080149 - RNA, 17 nt, Human
aacagaggccauggcag

SEQ ID NO: 2080150 - RNA, 21 nt, Human
aacagaggccauggcagaaua

SEQ ID NO: 2080151 - RNA, 13 nt, Human
aacagagauguga

SEQ ID NO: 2080152 - RNA, 19 nt, Human
aacagagacaggcccaaga

SEQ ID NO: 2080153 - RNA, 15 nt, Human
aacagagaaggcagg

SEQ ID NO: 2080154 - RNA, 16 nt, Human
aacagagaaggcagga

SEQ ID NO: 2080155 - RNA, 18 nt, Human
guccuaagucccugcccc

SEQ ID NO: 2080156 - RNA, 17 nt, Human
guccuacaguggcuguc

SEQ ID NO: 2080157 - RNA, 18 nt, Human
aacagacuggccugagga

SEQ ID NO: 2080158 - RNA, 23 nt, Human
aacagacuggccugaggagcagc

SEQ ID NO: 2080159 - RNA, 13 nt, Human
aacagagaaggca

SEQ ID NO: 2080160 - RNA, 20 nt, Human
aacagacuggaagcacagcu

SEQ ID NO: 2080161 - RNA, 13 nt, Human
guccuacccaccc

SEQ ID NO: 2080162 - RNA, 14 nt, Human
aacaucaacaucuu

SEQ ID NO: 2080163 - RNA, 17 nt, Human
aacauaugcaaacauaa

SEQ ID NO: 2080164 - RNA, 17 nt, Human
aacauaugaaaauacaa

SEQ ID NO: 2080165 - RNA, 22 nt, Human
aacauguuuuucuucucccuca

SEQ ID NO: 2080166 - RNA, 17 nt, Human
aacauguuacugaccag

SEQ ID NO: 2080167 - RNA, 13 nt, Human
aacauauuuguua

SEQ ID NO: 2080168 - RNA, 20 nt, Human
aacauauuuguuaaauauuu

SEQ ID NO: 2080169 - RNA, 22 nt, Human
aacauauuuguuaaauauuuac

SEQ ID NO: 2080170 - RNA, 16 nt, Human
aacauguuacugacca

SEQ ID NO: 2080171 - RNA, 12 nt, Human
aacauguuggua

SEQ ID NO: 2080172 - RNA, 14 nt, Human
aacauguugguauu

SEQ ID NO: 2080173 - RNA, 15 nt, Human
aacauguugguauuu

SEQ ID NO: 2080174 - RNA, 16 nt, Human
aacauguugguauuua

SEQ ID NO: 2080175 - RNA, 18 nt, Human
aacauguugguauuuauc

SEQ ID NO: 2080176 - RNA, 19 nt, Human
aacauguugguauuuaucu

SEQ ID NO: 2080177 - RNA, 21 nt, Human
aacauguugguauuuaucuau

SEQ ID NO: 2080178 - RNA, 18 nt, Human
aacagucuuacugcaggc

SEQ ID NO: 2080179 - RNA, 14 nt, Human
aacauaacaaauaa

SEQ ID NO: 2080180 - RNA, 21 nt, Human
aacauaaccauuacagggagc

SEQ ID NO: 2080181 - RNA, 16 nt, Human
aagcaagauuucagau

SEQ ID NO: 2080182 - RNA, 17 nt, Human
aagcaaaucagaaacuu

SEQ ID NO: 2080183 - RNA, 14 nt, Human
aagcaaacacauua

SEQ ID NO: 2080184 - RNA, 13 nt, Human
aagcaaacacauu

SEQ ID NO: 2080185 - RNA, 12 nt, Human
aagcaaacacau

SEQ ID NO: 2080186 - RNA, 22 nt, Human
aagcaaaauuauagaaguuuag

SEQ ID NO: 2080187 - RNA, 16 nt, Human
aagaugucagacuggc

SEQ ID NO: 2080188 - RNA, 14 nt, Human
aagaugacuuccca

SEQ ID NO: 2080189 - RNA, 15 nt, Human
aagaugacuucccaa

SEQ ID NO: 2080190 - RNA, 17 nt, Human
aagaugagagaacugga

SEQ ID NO: 2080191 - RNA, 18 nt, Human
aagaugagagaacuggag

SEQ ID NO: 2080192 - RNA, 15 nt, Human
aagaugcaaggacca

SEQ ID NO: 2080193 - RNA, 20 nt, Human
aagaugcaaggaccaggacu

SEQ ID NO: 2080194 - RNA, 18 nt, Human
gugguuauggagagggug

SEQ ID NO: 2080195 - RNA, 23 nt, Human
gugguuaaugccauggacagaag

SEQ ID NO: 2080196 - RNA, 15 nt, Human
aagaucacuuugcuc

SEQ ID NO: 2080197 - RNA, 18 nt, Human
aagaucacuuugcucuga

SEQ ID NO: 2080198 - RNA, 21 nt, Human
aagauccugucuuuaaggaaa

SEQ ID NO: 2080199 - RNA, 14 nt, Human
gugguuauuuuuau

SEQ ID NO: 2080200 - RNA, 19 nt, Human
gugguuauuuuuauacagu

SEQ ID NO: 2080201 - RNA, 17 nt, Human
guguguguauguuugca

SEQ ID NO: 2080202 - RNA, 12 nt, Human
guguguguaugu

SEQ ID NO: 2080203 - RNA, 14 nt, Human
gugugugugugugu

SEQ ID NO: 2080204 - RNA, 13 nt, Human
gugugugugugug

SEQ ID NO: 2080205 - RNA, 18 nt, Human
gugugguugcucacagcu

SEQ ID NO: 2080206 - RNA, 15 nt, Human
gugugguuuagugua

SEQ ID NO: 2080207 - RNA, 17 nt, Human
gugugguuuaguguaaa

SEQ ID NO: 2080208 - RNA, 18 nt, Human
gugugguuuaguguaaaa

SEQ ID NO: 2080209 - RNA, 22 nt, Human
gugugguuuaguguaaaaauga

SEQ ID NO: 2080210 - RNA, 14 nt, Human
guguucuguuguuu

SEQ ID NO: 2080211 - RNA, 17 nt, Human
guguucuguuuguuaaa

SEQ ID NO: 2080212 - RNA, 14 nt, Human
guguguuauuuaaa

SEQ ID NO: 2080213 - RNA, 18 nt, Human
guguguucugauuagaaa

SEQ ID NO: 2080214 - RNA, 20 nt, Human
gugucccaaaaagaaaggag

SEQ ID NO: 2080215 - RNA, 19 nt, Human
gugucuugcaauggcagcc

SEQ ID NO: 2080216 - RNA, 14 nt, Human
guguccaugugugu

SEQ ID NO: 2080217 - RNA, 15 nt, Human
guguccaugugugug

SEQ ID NO: 2080218 - RNA, 16 nt, Human
guguccaugugugugc

SEQ ID NO: 2080219 - RNA, 13 nt, Human
guguccaucccag

SEQ ID NO: 2080220 - RNA, 19 nt, Human
guguccaucccagcggcug

SEQ ID NO: 2080221 - RNA, 16 nt, Human
aagcaaggaucuuuca

SEQ ID NO: 2080222 - RNA, 19 nt, Human
aagcaaggaucuuucaccc

SEQ ID NO: 2080223 - RNA, 21 nt, Human
gugucuugcaauggcagccuu

SEQ ID NO: 2080224 - RNA, 15 nt, Human
gugucuuguguuuuu

SEQ ID NO: 2080225 - RNA, 17 nt, Human
gugugaguaagagcugg

SEQ ID NO: 2080226 - RNA, 18 nt, Human
gugugagucaccaagccc

SEQ ID NO: 2080227 - RNA, 13 nt, Human
gugugagucacca

SEQ ID NO: 2080228 - RNA, 14 nt, Human
gugggucaaggaau

SEQ ID NO: 2080229 - RNA, 20 nt, Human
guggguagaucacgagauca

SEQ ID NO: 2080230 - RNA, 22 nt, Human
gugguggaaacuuuucuuaaaa

SEQ ID NO: 2080231 - RNA, 18 nt, Human
gugguggcccacgccugu

SEQ ID NO: 2080232 - RNA, 18 nt, Human
gugguggcucacgccugu

SEQ ID NO: 2080233 - RNA, 22 nt, Human
gugguggcagugcagcaaccag

SEQ ID NO: 2080234 - RNA, 23 nt, Human
gugguggcauacgccuguagucc

SEQ ID NO: 2080235 - RNA, 21 nt, Human
guggcuucccgcucagcccuc

SEQ ID NO: 2080236 - RNA, 13 nt, Human
guggcuucugaug

SEQ ID NO: 2080237 - RNA, 17 nt, Human
guggcuuucagagccuc

SEQ ID NO: 2080238 - RNA, 17 nt, Human
guggcccgacagccugg

SEQ ID NO: 2080239 - RNA, 21 nt, Human
guggccucaacccucccucag

SEQ ID NO: 2080240 - RNA, 13 nt, Human
guggccucagaau

SEQ ID NO: 2080241 - RNA, 11 nt, Human
guggccucaga

SEQ ID NO: 2080242 - RNA, 12 nt, Human
guggccucagaa

SEQ ID NO: 2080243 - RNA, 14 nt, Human
gugggauggaggag

SEQ ID NO: 2080244 - RNA, 16 nt, Human
gugggauggaggagaa

SEQ ID NO: 2080245 - RNA, 17 nt, Human
gugggauggaggagaag

SEQ ID NO: 2080246 - RNA, 12 nt, Human
gugggagcugag

SEQ ID NO: 2080247 - RNA, 19 nt, Human
gugggagcagcgguuuggg

SEQ ID NO: 2080248 - RNA, 13 nt, Human
gugggagagccca

SEQ ID NO: 2080249 - RNA, 14 nt, Human
gugggagagcccag

SEQ ID NO: 2080250 - RNA, 13 nt, Human
gugggagaggucu

SEQ ID NO: 2080251 - RNA, 15 nt, Human
gugggagagcccagc

SEQ ID NO: 2080252 - RNA, 17 nt, Human
gugggaacgugacugcc

SEQ ID NO: 2080253 - RNA, 16 nt, Human
guggcccgacagccug

SEQ ID NO: 2080254 - RNA, 14 nt, Human
aagagcuauacagu

SEQ ID NO: 2080255 - RNA, 15 nt, Human
aagagcuauacaguu

SEQ ID NO: 2080256 - RNA, 16 nt, Human
aagagcuagcgcugcc

SEQ ID NO: 2080257 - RNA, 19 nt, Human
aagagcuagcgcugccgca

SEQ ID NO: 2080258 - RNA, 20 nt, Human
aagagcuagcgcugccgcac

SEQ ID NO: 2080259 - RNA, 11 nt, Human
aagagcugagg

SEQ ID NO: 2080260 - RNA, 18 nt, Human
aagagcugaggcaauucu

SEQ ID NO: 2080261 - RNA, 18 nt, Human
aagagaugggcuuguuuu

SEQ ID NO: 2080262 - RNA, 20 nt, Human
aagagaugggcuuguuuucu

SEQ ID NO: 2080263 - RNA, 15 nt, Human
aagagauuccugagc

SEQ ID NO: 2080264 - RNA, 16 nt, Human
aagacuguacaaagua

SEQ ID NO: 2080265 - RNA, 17 nt, Human
aagagaugggcuuguuu

SEQ ID NO: 2080266 - RNA, 14 nt, Human
aagaccccugucuu

SEQ ID NO: 2080267 - RNA, 16 nt, Human
aagagauugugguuuc

SEQ ID NO: 2080268 - RNA, 19 nt, Human
aagagauugugguuucauu

SEQ ID NO: 2080269 - RNA, 12 nt, Human
aagaccagucca

SEQ ID NO: 2080270 - RNA, 17 nt, Human
aagacucauucuucugu

SEQ ID NO: 2080271 - RNA, 14 nt, Human
aagacucaguguuc

SEQ ID NO: 2080272 - RNA, 14 nt, Human
aacuuggaaauagu

SEQ ID NO: 2080273 - RNA, 23 nt, Human
aacuuggaaaaauccagaaagaa

SEQ ID NO: 2080274 - RNA, 17 nt, Human
gugccuggguggggcug

SEQ ID NO: 2080275 - RNA, 18 nt, Human
gugccuggguggggcugc

SEQ ID NO: 2080276 - RNA, 15 nt, Human
aacuuggagccccag

SEQ ID NO: 2080277 - RNA, 15 nt, Human
aacuuguaaaugugg

SEQ ID NO: 2080278 - RNA, 15 nt, Human
aacuuguaaaugcug

SEQ ID NO: 2080279 - RNA, 18 nt, Human
aacuuguaaaugcuguca

SEQ ID NO: 2080280 - RNA, 15 nt, Human
aacuugguuauacau

SEQ ID NO: 2080281 - RNA, 21 nt, Human
aacuugguuauacaugacacu

SEQ ID NO: 2080282 - RNA, 14 nt, Human
gugccugcaccagg

SEQ ID NO: 2080283 - RNA, 15 nt, Human
gugccugcaccagga

SEQ ID NO: 2080284 - RNA, 17 nt, Human
gugccugcaccaggaga

SEQ ID NO: 2080285 - RNA, 18 nt, Human
gugccugcaccaggagac

SEQ ID NO: 2080286 - RNA, 19 nt, Human
gugccugcaccaggagaca

SEQ ID NO: 2080287 - RNA, 21 nt, Human
gugccugcaccaggagacaga

SEQ ID NO: 2080288 - RNA, 11 nt, Human
gugccugcagc

SEQ ID NO: 2080289 - RNA, 12 nt, Human
gugccuggagcu

SEQ ID NO: 2080290 - RNA, 17 nt, Human
gugccuggagcuccugg

SEQ ID NO: 2080291 - RNA, 18 nt, Human
gugccuggagcuccuggg

SEQ ID NO: 2080292 - RNA, 19 nt, Human
gugccuggagcuccuggga

SEQ ID NO: 2080293 - RNA, 23 nt, Human
gugccugggaaccuuccugucuu

SEQ ID NO: 2080294 - RNA, 15 nt, Human
gugccugggaaugua

SEQ ID NO: 2080295 - RNA, 16 nt, Human
gugccugggaauguau

SEQ ID NO: 2080296 - RNA, 17 nt, Human
gugccugggaauguauu

SEQ ID NO: 2080297 - RNA, 14 nt, Human
gugccucugggacu

SEQ ID NO: 2080298 - RNA, 15 nt, Human
gugccucugggacug

SEQ ID NO: 2080299 - RNA, 12 nt, Human
gugccugagagu

SEQ ID NO: 2080300 - RNA, 17 nt, Human
gugcacacaccagagcc

SEQ ID NO: 2080301 - RNA, 18 nt, Human
gugcacguacacacacau

SEQ ID NO: 2080302 - RNA, 15 nt, Human
gugcacggccagcug

SEQ ID NO: 2080303 - RNA, 15 nt, Human
gugcacguggagagc

SEQ ID NO: 2080304 - RNA, 16 nt, Human
gugcacguggagagcu

SEQ ID NO: 2080305 - RNA, 18 nt, Human
gugcacguggagagcugg

SEQ ID NO: 2080306 - RNA, 14 nt, Human
gugcacacaccaga

SEQ ID NO: 2080307 - RNA, 12 nt, Human
gugcacacacca

SEQ ID NO: 2080308 - RNA, 15 nt, Human
aacugcauggaccua

SEQ ID NO: 2080309 - RNA, 21 nt, Human
aacugcauggaccuaacauuc

SEQ ID NO: 2080310 - RNA, 14 nt, Human
aacugcauguauaa

SEQ ID NO: 2080311 - RNA, 18 nt, Human
aacugcauguauaaauga

SEQ ID NO: 2080312 - RNA, 19 nt, Human
aacugcauguauaaaugaa

SEQ ID NO: 2080313 - RNA, 21 nt, Human
gugcacguggagagcuggugc

SEQ ID NO: 2080314 - RNA, 14 nt, Human
gugccaagcacagu

SEQ ID NO: 2080315 - RNA, 16 nt, Human
gugccaagcacagugc

SEQ ID NO: 2080316 - RNA, 17 nt, Human
gugccaagcacagugcc

SEQ ID NO: 2080317 - RNA, 18 nt, Human
gugccaagcacagugccu

SEQ ID NO: 2080318 - RNA, 19 nt, Human
gugccaagcacagugccug

SEQ ID NO: 2080319 - RNA, 15 nt, Human
aagaaaaguuuugua

SEQ ID NO: 2080320 - RNA, 16 nt, Human
aagaaaaguuuuguaa

SEQ ID NO: 2080321 - RNA, 21 nt, Human
aagaaaaguuuuguaaauuuc

SEQ ID NO: 2080322 - RNA, 22 nt, Human
aagaaaaguuuuguaaauuucu

SEQ ID NO: 2080323 - RNA, 16 nt, Human
aagaaaagugggccag

SEQ ID NO: 2080324 - RNA, 16 nt, Human
aagaaaauacaauaaa

SEQ ID NO: 2080325 - RNA, 17 nt, Human
aagaaaauacaauaaac

SEQ ID NO: 2080326 - RNA, 18 nt, Human
aagaaaauacaauaaacu

SEQ ID NO: 2080327 - RNA, 12 nt, Human
aagaaaaaucag

SEQ ID NO: 2080328 - RNA, 16 nt, Human
aagaaaagagcuuucu

SEQ ID NO: 2080329 - RNA, 12 nt, Human
aagaaaagaauc

SEQ ID NO: 2080330 - RNA, 20 nt, Human
aagaaaagaaucccuguuca

SEQ ID NO: 2080331 - RNA, 22 nt, Human
aagaaaagguucuuacugcuug

SEQ ID NO: 2080332 - RNA, 22 nt, Human
aagaaaaguagguuuacauuca

SEQ ID NO: 2080333 - RNA, 15 nt, Human
aagaaaagugggcca

SEQ ID NO: 2080334 - RNA, 20 nt, Human
aacuugucuuuuucuggacu

SEQ ID NO: 2080335 - RNA, 17 nt, Human
aacuuguauuaaagaca

SEQ ID NO: 2080336 - RNA, 23 nt, Human
aagaaaguuuccccaccagugaa

SEQ ID NO: 2080337 - RNA, 14 nt, Human
aagaagcucucucc

SEQ ID NO: 2080338 - RNA, 15 nt, Human
aagaagcucucuccu

SEQ ID NO: 2080339 - RNA, 12 nt, Human
aagaaggcuggg

SEQ ID NO: 2080340 - RNA, 17 nt, Human
aagaagccgggaacaga

SEQ ID NO: 2080341 - RNA, 13 nt, Human
aagaaaguuuccc

SEQ ID NO: 2080342 - RNA, 15 nt, Human
aagaaaguuucccca

SEQ ID NO: 2080343 - RNA, 18 nt, Human
aagaaaggggcaggagcu

SEQ ID NO: 2080344 - RNA, 21 nt, Human
aagaaaggggcaggagcucag

SEQ ID NO: 2080345 - RNA, 14 nt, Human
aagaaaauaaaauu

SEQ ID NO: 2080346 - RNA, 15 nt, Human
aagaaaauaaaauua

SEQ ID NO: 2080347 - RNA, 22 nt, Human
aagaaaauaaaauuaagaaugu

SEQ ID NO: 2080348 - RNA, 13 nt, Human
aagaaaauaugca

SEQ ID NO: 2080349 - RNA, 23 nt, Human
aagaaaaucagauggagcaugaa

SEQ ID NO: 2080350 - RNA, 13 nt, Human
guggacuggaagg

SEQ ID NO: 2080351 - RNA, 21 nt, Human
guggacuagaccuccagcugu

SEQ ID NO: 2080352 - RNA, 22 nt, Human
guggcaaagccuucauugccuu

SEQ ID NO: 2080353 - RNA, 15 nt, Human
guggcaagaccaaaa

SEQ ID NO: 2080354 - RNA, 22 nt, Human
guggcacacaccuguaguccca

SEQ ID NO: 2080355 - RNA, 14 nt, Human
guggcagcugcggu

SEQ ID NO: 2080356 - RNA, 23 nt, Human
guggcacauuuuuuuuuuuaauu

SEQ ID NO: 2080357 - RNA, 17 nt, Human
guggcagaaguguuuca

SEQ ID NO: 2080358 - RNA, 20 nt, Human
guggcagauaaucagccucu

SEQ ID NO: 2080359 - RNA, 21 nt, Human
guggcagauaaucagccucuu

SEQ ID NO: 2080360 - RNA, 23 nt, Human
guggcagauaaucagccucuuaa

SEQ ID NO: 2080361 - RNA, 13 nt, Human
guggcaccagcag

SEQ ID NO: 2080362 - RNA, 14 nt, Human
guggcaccagcagc

SEQ ID NO: 2080363 - RNA, 20 nt, Human
aagaauuuucagaccccagc

SEQ ID NO: 2080364 - RNA, 13 nt, Human
aagaauuuuuaaa

SEQ ID NO: 2080365 - RNA, 22 nt, Human
aagaauuuucagaccccagcgg

SEQ ID NO: 2080366 - RNA, 12 nt, Human
aagaccagccug

SEQ ID NO: 2080367 - RNA, 13 nt, Human
aagaccagccugg

SEQ ID NO: 2080368 - RNA, 14 nt, Human
aagaccagccuggc

SEQ ID NO: 2080369 - RNA, 16 nt, Human
aagaauugaacccagg

SEQ ID NO: 2080370 - RNA, 18 nt, Human
aagaauugaacccaggag

SEQ ID NO: 2080371 - RNA, 20 nt, Human
aagaauuucuugguaagaag

SEQ ID NO: 2080372 - RNA, 22 nt, Human
aagaauuucuugguaagaagcc

SEQ ID NO: 2080373 - RNA, 23 nt, Human
aagaauuucuugguaagaagccg

SEQ ID NO: 2080374 - RNA, 17 nt, Human
aagaauuccuacaauau

SEQ ID NO: 2080375 - RNA, 23 nt, Human
aagaauuccuacaauauauauuc

SEQ ID NO: 2080376 - RNA, 19 nt, Human
aagaauucuccaaaacaau

SEQ ID NO: 2080377 - RNA, 20 nt, Human
aagaauucuccaaaacaauu

SEQ ID NO: 2080378 - RNA, 17 nt, Human
guggcagcugcggucca

SEQ ID NO: 2080379 - RNA, 18 nt, Human
guggcagauuuuacaaaa

SEQ ID NO: 2080380 - RNA, 19 nt, Human
guggcagauuuuacaaaag

SEQ ID NO: 2080381 - RNA, 22 nt, Human
guggcagauuuuacaaaagaug

SEQ ID NO: 2080382 - RNA, 15 nt, Human
aagaauauuguuccu

SEQ ID NO: 2080383 - RNA, 21 nt, Human
aagaauauuguuccuaaguuc

SEQ ID NO: 2080384 - RNA, 22 nt, Human
aagaauauuguuccuaaguucu

SEQ ID NO: 2080385 - RNA, 23 nt, Human
aagaagguuucagaaagaagugg

SEQ ID NO: 2080386 - RNA, 17 nt, Human
aagaaggguccuucccu

SEQ ID NO: 2080387 - RNA, 21 nt, Human
aagaaggguccuucccucucc

SEQ ID NO: 2080388 - RNA, 24 nt, Human
aagaaggguccuucccucucccca

SEQ ID NO: 2080389 - RNA, 15 nt, Human
aagaaguaggcauga

SEQ ID NO: 2080390 - RNA, 16 nt, Human
gugcugcuucccucug

SEQ ID NO: 2080391 - RNA, 13 nt, Human
gugcugcuucccu

SEQ ID NO: 2080392 - RNA, 24 nt, Human
guggacacagcucuucuccaggcu

SEQ ID NO: 2080393 - RNA, 17 nt, Human
guggacacagcucuucu

SEQ ID NO: 2080394 - RNA, 15 nt, Human
guggacacagcucuu

SEQ ID NO: 2080395 - RNA, 14 nt, Human
guggacacagcucu

SEQ ID NO: 2080396 - RNA, 21 nt, Human
guggacaccaggagucccugg

SEQ ID NO: 2080397 - RNA, 22 nt, Human
guggacaccaggagucccuggu

SEQ ID NO: 2080398 - RNA, 15 nt, Human
guggacaccaggagu

SEQ ID NO: 2080399 - RNA, 15 nt, Human
gugcugugaccauuu

SEQ ID NO: 2080400 - RNA, 18 nt, Human
gugcugugaccauuuaua

SEQ ID NO: 2080401 - RNA, 19 nt, Human
gugcuguggccugggcaag

SEQ ID NO: 2080402 - RNA, 16 nt, Human
gugcuguggccugggc

SEQ ID NO: 2080403 - RNA, 17 nt, Human
gugcuguggccugggca

SEQ ID NO: 2080404 - RNA, 11 nt, Human
gugcuguggcc

SEQ ID NO: 2080405 - RNA, 11 nt, Human
guggaaggaaa

SEQ ID NO: 2080406 - RNA, 12 nt, Human
guggaaggaaag

SEQ ID NO: 2080407 - RNA, 18 nt, Human
guggaagcccuccuucca

SEQ ID NO: 2080408 - RNA, 16 nt, Human
guggaagcccuccuuc

SEQ ID NO: 2080409 - RNA, 17 nt, Human
guggaagcccuccuucc

SEQ ID NO: 2080410 - RNA, 13 nt, Human
guggaagcccucc

SEQ ID NO: 2080411 - RNA, 14 nt, Human
guggaagcccuccu

SEQ ID NO: 2080412 - RNA, 19 nt, Human
uaaauuuuuuuuguuucau

SEQ ID NO: 2080413 - RNA, 14 nt, Human
uaaauuuucuucag

SEQ ID NO: 2080414 - RNA, 15 nt, Human
uaaauuuucuucagu

SEQ ID NO: 2080415 - RNA, 16 nt, Human
uaaauuuucuucaguu

SEQ ID NO: 2080416 - RNA, 18 nt, Human
uaaauuuucuucaguugg

SEQ ID NO: 2080417 - RNA, 15 nt, Human
uaaauuuuaauuuau

SEQ ID NO: 2080418 - RNA, 18 nt, Human
uaacaaaaacuacacaua

SEQ ID NO: 2080419 - RNA, 12 nt, Human
uaacaaauuaug

SEQ ID NO: 2080420 - RNA, 18 nt, Human
uaacaagaaacucacccc

SEQ ID NO: 2080421 - RNA, 13 nt, Human
uaacaagaaagga

SEQ ID NO: 2080422 - RNA, 14 nt, Human
uaacaagaaaggag

SEQ ID NO: 2080423 - RNA, 15 nt, Human
uaacaagaaaggaga

SEQ ID NO: 2080424 - RNA, 17 nt, Human
uaacaagaaaggagagu

SEQ ID NO: 2080425 - RNA, 13 nt, Human
uaacaagagugau

SEQ ID NO: 2080426 - RNA, 14 nt, Human
uaacaagagugauu

SEQ ID NO: 2080427 - RNA, 19 nt, Human
uaacaagagugauucuugc

SEQ ID NO: 2080428 - RNA, 20 nt, Human
uaacaagagugauucuugcu

SEQ ID NO: 2080429 - RNA, 16 nt, Human
uaacaagaucuuucag

SEQ ID NO: 2080430 - RNA, 17 nt, Human
uaacaagaucuuucagg

SEQ ID NO: 2080431 - RNA, 18 nt, Human
uaacaagaucuuucagga

SEQ ID NO: 2080432 - RNA, 14 nt, Human
uaacaagaaacuca

SEQ ID NO: 2080433 - RNA, 15 nt, Human
uaacaagaaaacaua

SEQ ID NO: 2080434 - RNA, 15 nt, Human
uaacaaccaaagacu

SEQ ID NO: 2080435 - RNA, 22 nt, Human
uaacaacuaugauuuggaaaau

SEQ ID NO: 2080436 - RNA, 21 nt, Human
uaacaacuaugauuuggaaaa

SEQ ID NO: 2080437 - RNA, 16 nt, Human
uaacaacuaugauuug

SEQ ID NO: 2080438 - RNA, 13 nt, Human
uaacaagccaccc

SEQ ID NO: 2080439 - RNA, 17 nt, Human
uaaaugaggggccucag

SEQ ID NO: 2080440 - RNA, 22 nt, Human
uaaauuaccaguaaaguguaac

SEQ ID NO: 2080441 - RNA, 14 nt, Human
uaaauuaggaauaa

SEQ ID NO: 2080442 - RNA, 17 nt, Human
uaaauuaggaauaaaua

SEQ ID NO: 2080443 - RNA, 18 nt, Human
uaaauuaguauuuauuua

SEQ ID NO: 2080444 - RNA, 14 nt, Human
uaaaugauguugaa

SEQ ID NO: 2080445 - RNA, 17 nt, Human
uaaauuauaacuuaaaa

SEQ ID NO: 2080446 - RNA, 21 nt, Human
uaaauuaggaauaaauaaaaa

SEQ ID NO: 2080447 - RNA, 22 nt, Human
uaaauuaggaauaaauaaaaau

SEQ ID NO: 2080448 - RNA, 18 nt, Human
uaaauaaccccauucuuu

SEQ ID NO: 2080449 - RNA, 19 nt, Human
uaaauaaccccauucuuug

SEQ ID NO: 2080450 - RNA, 21 nt, Human
uaaauaaccccauucuuugcu

SEQ ID NO: 2080451 - RNA, 18 nt, Human
uaaauaaaugucauuaaa

SEQ ID NO: 2080452 - RNA, 22 nt, Human
uaaauaaauguaucuuauucac

SEQ ID NO: 2080453 - RNA, 16 nt, Human
uaaauaaaugucauua

SEQ ID NO: 2080454 - RNA, 23 nt, Human
aauacacauagcauguaauggua

SEQ ID NO: 2080455 - RNA, 14 nt, Human
aauacaauaaguua

SEQ ID NO: 2080456 - RNA, 11 nt, Human
aauacaauaaa

SEQ ID NO: 2080457 - RNA, 12 nt, Human
aauacaauaaac

SEQ ID NO: 2080458 - RNA, 13 nt, Human
aauacaauaaacu

SEQ ID NO: 2080459 - RNA, 18 nt, Human
aauaauuauccagaguuu

SEQ ID NO: 2080460 - RNA, 16 nt, Human
aauacaaguucuauuu

SEQ ID NO: 2080461 - RNA, 20 nt, Human
aauacaaguucuauuuaagu

SEQ ID NO: 2080462 - RNA, 23 nt, Human
aauacaaguucuauuuaagugua

SEQ ID NO: 2080463 - RNA, 19 nt, Human
uaaauccuuuuucuuuaua

SEQ ID NO: 2080464 - RNA, 11 nt, Human
uaaauccuguu

SEQ ID NO: 2080465 - RNA, 14 nt, Human
uaaauccuguugaa

SEQ ID NO: 2080466 - RNA, 15 nt, Human
uaaauccuguugaaa

SEQ ID NO: 2080467 - RNA, 16 nt, Human
uaaauccuguugaaaa

SEQ ID NO: 2080468 - RNA, 17 nt, Human
uaaauccuguugaaaag

SEQ ID NO: 2080469 - RNA, 18 nt, Human
uaaauccuguugaaaagc

SEQ ID NO: 2080470 - RNA, 23 nt, Human
uaaauccuguugaaaagccaugu

SEQ ID NO: 2080471 - RNA, 23 nt, Human
uaaaucccauucauaacuuucau

SEQ ID NO: 2080472 - RNA, 15 nt, Human
uaaaucccauucaua

SEQ ID NO: 2080473 - RNA, 17 nt, Human
uaaauccuuuuucuuua

SEQ ID NO: 2080474 - RNA, 20 nt, Human
uaaauaguaaaaauaaaauu

SEQ ID NO: 2080475 - RNA, 19 nt, Human
uaaauaguaaaaauaaaau

SEQ ID NO: 2080476 - RNA, 19 nt, Human
uaaauagcuauauccaugu

SEQ ID NO: 2080477 - RNA, 20 nt, Human
uaaauagcuauauccaugua

SEQ ID NO: 2080478 - RNA, 22 nt, Human
uaaauagcuauauccauguacu

SEQ ID NO: 2080479 - RNA, 15 nt, Human
uaaauagcuauaucc

SEQ ID NO: 2080480 - RNA, 16 nt, Human
uaaauagcuauaucca

SEQ ID NO: 2080481 - RNA, 17 nt, Human
uaaauagcuauauccau

SEQ ID NO: 2080482 - RNA, 18 nt, Human
uaaauagcuauauccaug

SEQ ID NO: 2080483 - RNA, 14 nt, Human
uaaauagcuauauc

SEQ ID NO: 2080484 - RNA, 18 nt, Human
uaaauacacaacacacac

SEQ ID NO: 2080485 - RNA, 19 nt, Human
uaaauacacauagcaugua

SEQ ID NO: 2080486 - RNA, 19 nt, Human
uaaauacaaguucuauuua

SEQ ID NO: 2080487 - RNA, 16 nt, Human
aauaaaaucuugaaaa

SEQ ID NO: 2080488 - RNA, 18 nt, Human
aauaaaauaucauucagc

SEQ ID NO: 2080489 - RNA, 19 nt, Human
aauaaaauaucauucagca

SEQ ID NO: 2080490 - RNA, 20 nt, Human
aauaaaauaucauucagcaa

SEQ ID NO: 2080491 - RNA, 12 nt, Human
aauaaaauauca

SEQ ID NO: 2080492 - RNA, 12 nt, Human
aauaaaauauaa

SEQ ID NO: 2080493 - RNA, 14 nt, Human
aauaaaauauaauu

SEQ ID NO: 2080494 - RNA, 15 nt, Human
aauaaaauauaauug

SEQ ID NO: 2080495 - RNA, 21 nt, Human
aauaaaauauaauuguuuuuu

SEQ ID NO: 2080496 - RNA, 12 nt, Human
aauaaaauaacc

SEQ ID NO: 2080497 - RNA, 14 nt, Human
aauaaaauaucauu

SEQ ID NO: 2080498 - RNA, 15 nt, Human
aauaaaauaucauuc

SEQ ID NO: 2080499 - RNA, 16 nt, Human
aauaaaauaucauuca

SEQ ID NO: 2080500 - RNA, 17 nt, Human
aauaaaauaucauucag

SEQ ID NO: 2080501 - RNA, 21 nt, Human
aauaaaauaucauucagcaac

SEQ ID NO: 2080502 - RNA, 14 nt, Human
aauaaaguauauaa

SEQ ID NO: 2080503 - RNA, 15 nt, Human
aauaaaguauauaau

SEQ ID NO: 2080504 - RNA, 15 nt, Human
aauaaaguauauaua

SEQ ID NO: 2080505 - RNA, 14 nt, Human
aauaaaguaauuau

SEQ ID NO: 2080506 - RNA, 11 nt, Human
aauaaaaucau

SEQ ID NO: 2080507 - RNA, 18 nt, Human
aauaaaaucauguacauu

SEQ ID NO: 2080508 - RNA, 13 nt, Human
aauaaaaggucua

SEQ ID NO: 2080509 - RNA, 16 nt, Human
aauaaaaauaaauuug

SEQ ID NO: 2080510 - RNA, 22 nt, Human
aauaaaaaccaagaagaugucu

SEQ ID NO: 2080511 - RNA, 14 nt, Human
aauaaaaaccaaga

SEQ ID NO: 2080512 - RNA, 19 nt, Human
aauaaaaacugacuccuua

SEQ ID NO: 2080513 - RNA, 21 nt, Human
aauaaaaacugacuccuuaga

SEQ ID NO: 2080514 - RNA, 18 nt, Human
aauaaaagcagcaucugc

SEQ ID NO: 2080515 - RNA, 21 nt, Human
aauaaaagcagcaucugcuaa

SEQ ID NO: 2080516 - RNA, 19 nt, Human
aauaaaagaaaugcacaau

SEQ ID NO: 2080517 - RNA, 17 nt, Human
aauaaaaauuaaggcaa

SEQ ID NO: 2080518 - RNA, 19 nt, Human
aauaaaaauuaaggcaacu

SEQ ID NO: 2080519 - RNA, 13 nt, Human
aauaaaaauggau

SEQ ID NO: 2080520 - RNA, 13 nt, Human
uaaaguguauuau

SEQ ID NO: 2080521 - RNA, 18 nt, Human
uaaaguguauuauaacag

SEQ ID NO: 2080522 - RNA, 13 nt, Human
uaaaguguaacau

SEQ ID NO: 2080523 - RNA, 16 nt, Human
uaaaguguaacauaug

SEQ ID NO: 2080524 - RNA, 15 nt, Human
aauaaaaaagucucu

SEQ ID NO: 2080525 - RNA, 16 nt, Human
uaaaguguaaauccuu

SEQ ID NO: 2080526 - RNA, 22 nt, Human
uaaaguguaaauccuuuuucuu

SEQ ID NO: 2080527 - RNA, 15 nt, Human
uaaagucuugcugug

SEQ ID NO: 2080528 - RNA, 19 nt, Human
uaaagucuugcuguggucu

SEQ ID NO: 2080529 - RNA, 16 nt, Human
uaaagugauaauuucu

SEQ ID NO: 2080530 - RNA, 21 nt, Human
uaaagggaaaggauucaugug

SEQ ID NO: 2080531 - RNA, 17 nt, Human
uaaagucagguccaauu

SEQ ID NO: 2080532 - RNA, 18 nt, Human
uaaagucagguccaauuu

SEQ ID NO: 2080533 - RNA, 18 nt, Human
aauaaauuugguucuaau

SEQ ID NO: 2080534 - RNA, 21 nt, Human
aauaaauuugguucuaauaga

SEQ ID NO: 2080535 - RNA, 14 nt, Human
aauaaauucagaua

SEQ ID NO: 2080536 - RNA, 16 nt, Human
aauaacacagagagac

SEQ ID NO: 2080537 - RNA, 23 nt, Human
aauaacacagagagacagacuug

SEQ ID NO: 2080538 - RNA, 9 nt, Human
aauaaagua

SEQ ID NO: 2080539 - RNA, 12 nt, Human
aauaacauguaa

SEQ ID NO: 2080540 - RNA, 19 nt, Human
aauaacauguaauuaagua

SEQ ID NO: 2080541 - RNA, 22 nt, Human
aauaacauguaauuaaguacua

SEQ ID NO: 2080542 - RNA, 12 nt, Human
aauaaauuauuu

SEQ ID NO: 2080543 - RNA, 15 nt, Human
aauaaauaucuguac

SEQ ID NO: 2080544 - RNA, 21 nt, Human
aauaaauuaaauaaaauaacc

SEQ ID NO: 2080545 - RNA, 16 nt, Human
aauaaauacauucuug

SEQ ID NO: 2080546 - RNA, 19 nt, Human
aauaaauagcuauauccau

SEQ ID NO: 2080547 - RNA, 21 nt, Human
aauaaauagcuauauccaugu

SEQ ID NO: 2080548 - RNA, 14 nt, Human
aauaaauaaaugca

SEQ ID NO: 2080549 - RNA, 12 nt, Human
aauaaauaaaug

SEQ ID NO: 2080550 - RNA, 13 nt, Human
aauaagcuaaaga

SEQ ID NO: 2080551 - RNA, 17 nt, Human
aauaagcaucaaacucu

SEQ ID NO: 2080552 - RNA, 14 nt, Human
aauaagcuaaagag

SEQ ID NO: 2080553 - RNA, 19 nt, Human
aauaacuacuguguuccug

SEQ ID NO: 2080554 - RNA, 17 nt, Human
aauaacuacuguguucc

SEQ ID NO: 2080555 - RNA, 18 nt, Human
aauaacuacuguguuccu

SEQ ID NO: 2080556 - RNA, 13 nt, Human
aauaacuacugug

SEQ ID NO: 2080557 - RNA, 14 nt, Human
aauaacuacugugu

SEQ ID NO: 2080558 - RNA, 15 nt, Human
aauaacuacuguguu

SEQ ID NO: 2080559 - RNA, 16 nt, Human
aauaacuacuguguuc

SEQ ID NO: 2080560 - RNA, 19 nt, Human
aauaacuccucauuguaaa

SEQ ID NO: 2080561 - RNA, 19 nt, Human
aauaacuaguguugcuugg

SEQ ID NO: 2080562 - RNA, 16 nt, Human
aauaacauaacaaaua

SEQ ID NO: 2080563 - RNA, 17 nt, Human
aauaacauaacaaauaa

SEQ ID NO: 2080564 - RNA, 20 nt, Human
aauaacauaauuuguacaua

SEQ ID NO: 2080565 - RNA, 15 nt, Human
aauaacuaaaaggua

SEQ ID NO: 2080566 - RNA, 17 nt, Human
aauaaggccuuaauaug

SEQ ID NO: 2080567 - RNA, 19 nt, Human
uaaacccaguaguggugac

SEQ ID NO: 2080568 - RNA, 20 nt, Human
uaaaccccaccuuuauuccu

SEQ ID NO: 2080569 - RNA, 16 nt, Human
uaaaccgccaaggcug

SEQ ID NO: 2080570 - RNA, 18 nt, Human
uaaaccgccaaggcuggg

SEQ ID NO: 2080571 - RNA, 15 nt, Human
uaaacguuucaguaa

SEQ ID NO: 2080572 - RNA, 22 nt, Human
uaaacguuucaguaauaaaaca

SEQ ID NO: 2080573 - RNA, 23 nt, Human
uaaacuaaugaguuucuuuuaua

SEQ ID NO: 2080574 - RNA, 22 nt, Human
uaaacgugaugaucagcuguuu

SEQ ID NO: 2080575 - RNA, 17 nt, Human
uaaacgugaugaucagc

SEQ ID NO: 2080576 - RNA, 16 nt, Human
uaaacugcauuagaaa

SEQ ID NO: 2080577 - RNA, 17 nt, Human
uaaacucauuucuagca

SEQ ID NO: 2080578 - RNA, 12 nt, Human
uaaacucauuuc

SEQ ID NO: 2080579 - RNA, 14 nt, Human
uaaacuaggaaaau

SEQ ID NO: 2080580 - RNA, 17 nt, Human
uaaacuaggaaaauugg

SEQ ID NO: 2080581 - RNA, 17 nt, Human
uaaacuauuggaaagua

SEQ ID NO: 2080582 - RNA, 10 nt, Human
uaaagacaga

SEQ ID NO: 2080583 - RNA, 15 nt, Human
uaaagacagaggcag

SEQ ID NO: 2080584 - RNA, 9 nt, Human
uaaagacag

SEQ ID NO: 2080585 - RNA, 22 nt, Human
uaaagacaaagacaaauucugu

SEQ ID NO: 2080586 - RNA, 15 nt, Human
uaaagacaccuacug

SEQ ID NO: 2080587 - RNA, 19 nt, Human
uaaagacaaagacaaauuc

SEQ ID NO: 2080588 - RNA, 20 nt, Human
uaaagacaaagacaaauucu

SEQ ID NO: 2080589 - RNA, 21 nt, Human
uaaagacccuaaaucugagga

SEQ ID NO: 2080590 - RNA, 17 nt, Human
uaaagacgauuugucag

SEQ ID NO: 2080591 - RNA, 13 nt, Human
uaaagagaaaauu

SEQ ID NO: 2080592 - RNA, 14 nt, Human
uaaagagaaaauug

SEQ ID NO: 2080593 - RNA, 15 nt, Human
uaaagagaaaauuga

SEQ ID NO: 2080594 - RNA, 16 nt, Human
uaaagagaaaauugaa

SEQ ID NO: 2080595 - RNA, 17 nt, Human
uaaagagaaaauugaau

SEQ ID NO: 2080596 - RNA, 19 nt, Human
uaaagagaaaauugaauuu

SEQ ID NO: 2080597 - RNA, 20 nt, Human
uaaagagaaaauugaauuua

SEQ ID NO: 2080598 - RNA, 23 nt, Human
uaaagagaaaauugaauuuaaca

SEQ ID NO: 2080599 - RNA, 11 nt, Human
uaaagagaaac

SEQ ID NO: 2080600 - RNA, 12 nt, Human
uaaagagaaacu

SEQ ID NO: 2080601 - RNA, 13 nt, Human
uaaagagaaacuu

SEQ ID NO: 2080602 - RNA, 14 nt, Human
uaaagagaaacuuu

SEQ ID NO: 2080603 - RNA, 15 nt, Human
uaaagagaaacuuug

SEQ ID NO: 2080604 - RNA, 19 nt, Human
uaaagagaaacuuugugcu

SEQ ID NO: 2080605 - RNA, 20 nt, Human
uaaagagaaacuuugugcua

SEQ ID NO: 2080606 - RNA, 14 nt, Human
uaaagacaaaaaac

SEQ ID NO: 2080607 - RNA, 11 nt, Human
uaaagacaaag

SEQ ID NO: 2080608 - RNA, 15 nt, Human
uaaagacaaagacaa

SEQ ID NO: 2080609 - RNA, 15 nt, Human
uaaagaaucauuauu

SEQ ID NO: 2080610 - RNA, 17 nt, Human
uaaagaaucauuauuua

SEQ ID NO: 2080611 - RNA, 15 nt, Human
uaaagaauaauaugc

SEQ ID NO: 2080612 - RNA, 14 nt, Human
uaaagaagguuuca

SEQ ID NO: 2080613 - RNA, 13 nt, Human
uaaagauggaaaa

SEQ ID NO: 2080614 - RNA, 22 nt, Human
uaaagaugcaaggaccaggacu

SEQ ID NO: 2080615 - RNA, 20 nt, Human
uaaagaguuguguuguucuu

SEQ ID NO: 2080616 - RNA, 21 nt, Human
uaaagaguuguguuguucuuu

SEQ ID NO: 2080617 - RNA, 21 nt, Human
uaaagaugcaaggaccaggac

SEQ ID NO: 2080618 - RNA, 12 nt, Human
uaaagaguucuu

SEQ ID NO: 2080619 - RNA, 13 nt, Human
uaaagauauuauu

SEQ ID NO: 2080620 - RNA, 14 nt, Human
uaaagauauuauuc

SEQ ID NO: 2080621 - RNA, 15 nt, Human
uaaagauauuauuca

SEQ ID NO: 2080622 - RNA, 16 nt, Human
uaaagauauuauucac

SEQ ID NO: 2080623 - RNA, 18 nt, Human
uaaagaguuaguuugagu

SEQ ID NO: 2080624 - RNA, 20 nt, Human
uaaagaggcugaaagaggcc

SEQ ID NO: 2080625 - RNA, 12 nt, Human
uaaagagagaau

SEQ ID NO: 2080626 - RNA, 17 nt, Human
uaaagaggcugaaagag

SEQ ID NO: 2080627 - RNA, 14 nt, Human
uaaagauuucuuga

SEQ ID NO: 2080628 - RNA, 20 nt, Human
uaaaggcuauacuugucuug

SEQ ID NO: 2080629 - RNA, 17 nt, Human
aaguuacacauuuuuca

SEQ ID NO: 2080630 - RNA, 23 nt, Human
aaguuacauugcuggucuuguaa

SEQ ID NO: 2080631 - RNA, 18 nt, Human
aaguuaaacauugaagua

SEQ ID NO: 2080632 - RNA, 14 nt, Human
aaguuaaauuuuau

SEQ ID NO: 2080633 - RNA, 17 nt, Human
aaguuaaagugaauaac

SEQ ID NO: 2080634 - RNA, 12 nt, Human
aaguuaaauaaa

SEQ ID NO: 2080635 - RNA, 14 nt, Human
aaguuaaauaaauc

SEQ ID NO: 2080636 - RNA, 16 nt, Human
aaguuacuauccuggc

SEQ ID NO: 2080637 - RNA, 18 nt, Human
aaguuacuauccuggcuu

SEQ ID NO: 2080638 - RNA, 12 nt, Human
aaguuacuuugu

SEQ ID NO: 2080639 - RNA, 15 nt, Human
aaguuacuuauucua

SEQ ID NO: 2080640 - RNA, 16 nt, Human
aaguuacuuauucuag

SEQ ID NO: 2080641 - RNA, 19 nt, Human
aaguuacuuugucagaggc

SEQ ID NO: 2080642 - RNA, 17 nt, Human
aaguuauuaauuucuuc

SEQ ID NO: 2080643 - RNA, 19 nt, Human
aaguuauuaauauuuuaau

SEQ ID NO: 2080644 - RNA, 18 nt, Human
aaguuauuaauuucuuca

SEQ ID NO: 2080645 - RNA, 20 nt, Human
guuuuuuuuuccuguccuuc

SEQ ID NO: 2080646 - RNA, 19 nt, Human
guuuuuuuuuccuguccuu

SEQ ID NO: 2080647 - RNA, 17 nt, Human
aaguguuguaaauauuu

SEQ ID NO: 2080648 - RNA, 23 nt, Human
aaguguuggcuaaugaagggaaa

SEQ ID NO: 2080649 - RNA, 18 nt, Human
aaguguuguaaauauuua

SEQ ID NO: 2080650 - RNA, 20 nt, Human
aaguguuguaaauauuuaug

SEQ ID NO: 2080651 - RNA, 22 nt, Human
aaguguuguaaauauuuaugua

SEQ ID NO: 2080652 - RNA, 13 nt, Human
aaguguuuucaga

SEQ ID NO: 2080653 - RNA, 14 nt, Human
aaguguuuucagag

SEQ ID NO: 2080654 - RNA, 15 nt, Human
aaguguuuucagagc

SEQ ID NO: 2080655 - RNA, 17 nt, Human
aaguuaaaaaaaauaau

SEQ ID NO: 2080656 - RNA, 18 nt, Human
aaguuaaaaaaaauaaua

SEQ ID NO: 2080657 - RNA, 20 nt, Human
aaguuaaaaaaaauaauaaa

SEQ ID NO: 2080658 - RNA, 21 nt, Human
aaguuaaaaaaaauaauaaau

SEQ ID NO: 2080659 - RNA, 23 nt, Human
aaguguuucauaaauuugagagu

SEQ ID NO: 2080660 - RNA, 20 nt, Human
aaguguuuccuucauuucug

SEQ ID NO: 2080661 - RNA, 21 nt, Human
aaguguuuccuucauuucuga

SEQ ID NO: 2080662 - RNA, 14 nt, Human
aaguuuaauugacu

SEQ ID NO: 2080663 - RNA, 12 nt, Human
aaguucuauuua

SEQ ID NO: 2080664 - RNA, 15 nt, Human
aaguucuauuuaagu

SEQ ID NO: 2080665 - RNA, 17 nt, Human
aaguucuauuuaagugu

SEQ ID NO: 2080666 - RNA, 15 nt, Human
aaguucugaguguuu

SEQ ID NO: 2080667 - RNA, 18 nt, Human
aaguuuacaaucaaagga

SEQ ID NO: 2080668 - RNA, 19 nt, Human
aaguuuacaaucaaaggaa

SEQ ID NO: 2080669 - RNA, 17 nt, Human
aaguuuagauuuuaauc

SEQ ID NO: 2080670 - RNA, 14 nt, Human
aaguucauaggguc

SEQ ID NO: 2080671 - RNA, 14 nt, Human
aaguuauugacaaa

SEQ ID NO: 2080672 - RNA, 18 nt, Human
aaguuauugacaaacucu

SEQ ID NO: 2080673 - RNA, 22 nt, Human
uaaacaaacuguguaacugccc

SEQ ID NO: 2080674 - RNA, 18 nt, Human
uaaacaaacuguguaacu

SEQ ID NO: 2080675 - RNA, 19 nt, Human
uaaacaaacuguguaacug

SEQ ID NO: 2080676 - RNA, 19 nt, Human
uaaaauuaaagcugaaaac

SEQ ID NO: 2080677 - RNA, 12 nt, Human
uaaaauuaaaga

SEQ ID NO: 2080678 - RNA, 13 nt, Human
uaaaauuaaagaa

SEQ ID NO: 2080679 - RNA, 14 nt, Human
uaaaauuaaagaaa

SEQ ID NO: 2080680 - RNA, 14 nt, Human
uaaaauuaaagcua

SEQ ID NO: 2080681 - RNA, 10 nt, Human
uaaaauuaag

SEQ ID NO: 2080682 - RNA, 14 nt, Human
uaaaauuaagaaug

SEQ ID NO: 2080683 - RNA, 15 nt, Human
uaaaauuaagaaugu

SEQ ID NO: 2080684 - RNA, 18 nt, Human
uaaaauuaagaauguucu

SEQ ID NO: 2080685 - RNA, 18 nt, Human
uaaaauuaaagcugaaaa

SEQ ID NO: 2080686 - RNA, 16 nt, Human
uaaaauuaaagcugaa

SEQ ID NO: 2080687 - RNA, 16 nt, Human
uaaaauuuugccuaau

SEQ ID NO: 2080688 - RNA, 19 nt, Human
uaaaauuuugccuaauaca

SEQ ID NO: 2080689 - RNA, 17 nt, Human
uaaaauuuuaucucuua

SEQ ID NO: 2080690 - RNA, 15 nt, Human
aaguuuugcauuuau

SEQ ID NO: 2080691 - RNA, 15 nt, Human
aaguuuguguucugu

SEQ ID NO: 2080692 - RNA, 19 nt, Human
aaguuuguguucuguuugu

SEQ ID NO: 2080693 - RNA, 21 nt, Human
aaguuuguguucuguuuguua

SEQ ID NO: 2080694 - RNA, 22 nt, Human
aaguuuguguucuguuuguuaa

SEQ ID NO: 2080695 - RNA, 23 nt, Human
aaguuuucagaaccucuucccca

SEQ ID NO: 2080696 - RNA, 11 nt, Human
aaguuuucagg

SEQ ID NO: 2080697 - RNA, 23 nt, Human
aaguuuauaagaggaugaaguga

SEQ ID NO: 2080698 - RNA, 15 nt, Human
aaguuuauacaguac

SEQ ID NO: 2080699 - RNA, 18 nt, Human
aaguuuauacaguacagu

SEQ ID NO: 2080700 - RNA, 20 nt, Human
aaguuucacugacuuagaac

SEQ ID NO: 2080701 - RNA, 12 nt, Human
aaguuucauuua

SEQ ID NO: 2080702 - RNA, 13 nt, Human
aaguuucauuuau

SEQ ID NO: 2080703 - RNA, 13 nt, Human
aaguuuccaagca

SEQ ID NO: 2080704 - RNA, 15 nt, Human
aaguuuccaagcaaa

SEQ ID NO: 2080705 - RNA, 16 nt, Human
aaguuuccaagcaaau

SEQ ID NO: 2080706 - RNA, 19 nt, Human
aaguuuccaagcaaauguu

SEQ ID NO: 2080707 - RNA, 20 nt, Human
aaguuuccaagcaaauguua

SEQ ID NO: 2080708 - RNA, 20 nt, Human
aaguucauaacagugccauu

SEQ ID NO: 2080709 - RNA, 16 nt, Human
aaguuucaguugauuu

SEQ ID NO: 2080710 - RNA, 14 nt, Human
aaguuugcacugua

SEQ ID NO: 2080711 - RNA, 21 nt, Human
aaguuugcacuguaugcugga

SEQ ID NO: 2080712 - RNA, 19 nt, Human
guuugcacuguaugcugga

SEQ ID NO: 2080713 - RNA, 20 nt, Human
guuugcacuguaugcuggac

SEQ ID NO: 2080714 - RNA, 22 nt, Human
guuugcagaaaagcaccugccg

SEQ ID NO: 2080715 - RNA, 19 nt, Human
guuugcagaaaagcaccug

SEQ ID NO: 2080716 - RNA, 22 nt, Human
guuugcacuguaugcuggacgg

SEQ ID NO: 2080717 - RNA, 21 nt, Human
guuugcagaaaagcaccugcc

SEQ ID NO: 2080718 - RNA, 21 nt, Human
guuugcagaagggggucucuu

SEQ ID NO: 2080719 - RNA, 20 nt, Human
guuugcagagcuugaacaca

SEQ ID NO: 2080720 - RNA, 14 nt, Human
guuugccugagggc

SEQ ID NO: 2080721 - RNA, 17 nt, Human
guuugccucugccucug

SEQ ID NO: 2080722 - RNA, 14 nt, Human
guuucucagcuccc

SEQ ID NO: 2080723 - RNA, 23 nt, Human
guuucuagguaauuuuuacagaa

SEQ ID NO: 2080724 - RNA, 15 nt, Human
guuucuagggaaaug

SEQ ID NO: 2080725 - RNA, 18 nt, Human
guuucuagggaaaugaaa

SEQ ID NO: 2080726 - RNA, 14 nt, Human
guuucucccccugg

SEQ ID NO: 2080727 - RNA, 15 nt, Human
guuucucccccuggg

SEQ ID NO: 2080728 - RNA, 17 nt, Human
guuucucccccugggcu

SEQ ID NO: 2080729 - RNA, 22 nt, Human
guuucucccccugggcucugcc

SEQ ID NO: 2080730 - RNA, 23 nt, Human
guuucucccccugggcucugccc

SEQ ID NO: 2080731 - RNA, 12 nt, Human
guuucucugcug

SEQ ID NO: 2080732 - RNA, 13 nt, Human
guuucucugcugu

SEQ ID NO: 2080733 - RNA, 17 nt, Human
guuugcucaccuggggu

SEQ ID NO: 2080734 - RNA, 15 nt, Human
guuugcucagaacac

SEQ ID NO: 2080735 - RNA, 18 nt, Human
guuugcucagaacacauu

SEQ ID NO: 2080736 - RNA, 16 nt, Human
guuuggcgggccaagg

SEQ ID NO: 2080737 - RNA, 18 nt, Human
guuuggcgggccaaggac

SEQ ID NO: 2080738 - RNA, 21 nt, Human
guuuggcgggccaaggacugc

SEQ ID NO: 2080739 - RNA, 16 nt, Human
guuuuaagaggcaggg

SEQ ID NO: 2080740 - RNA, 16 nt, Human
guuuuaaggaagaaaa

SEQ ID NO: 2080741 - RNA, 18 nt, Human
guuuuaaggaagaaaaau

SEQ ID NO: 2080742 - RNA, 19 nt, Human
guuuuaaggaagaaaaauc

SEQ ID NO: 2080743 - RNA, 14 nt, Human
guuuuaagaggcag

SEQ ID NO: 2080744 - RNA, 14 nt, Human
guuuuacugcuuuu

SEQ ID NO: 2080745 - RNA, 15 nt, Human
guuuuacugcagcuu

SEQ ID NO: 2080746 - RNA, 13 nt, Human
guuuuagaaaaca

SEQ ID NO: 2080747 - RNA, 16 nt, Human
guuuuacugcagcuuu

SEQ ID NO: 2080748 - RNA, 18 nt, Human
guuuuacugcagcuuugu

SEQ ID NO: 2080749 - RNA, 18 nt, Human
guuuuauacuguacuuaa

SEQ ID NO: 2080750 - RNA, 23 nt, Human
guuuuauacuguacuuaauaaau

SEQ ID NO: 2080751 - RNA, 19 nt, Human
aaggcugagaggagagaga

SEQ ID NO: 2080752 - RNA, 19 nt, Human
aaggcugaccaagagagaa

SEQ ID NO: 2080753 - RNA, 14 nt, Human
guuguaaauauuua

SEQ ID NO: 2080754 - RNA, 20 nt, Human
guuguaaauauuuauguaaa

SEQ ID NO: 2080755 - RNA, 13 nt, Human
aagggcccagaga

SEQ ID NO: 2080756 - RNA, 15 nt, Human
aagggcccagagagg

SEQ ID NO: 2080757 - RNA, 23 nt, Human
aaggcugaggaaaggccagcugg

SEQ ID NO: 2080758 - RNA, 17 nt, Human
aaggcugaggaaaggcc

SEQ ID NO: 2080759 - RNA, 19 nt, Human
aaggcugaggaaaggccag

SEQ ID NO: 2080760 - RNA, 20 nt, Human
aaggcugaggaaaggccagc

SEQ ID NO: 2080761 - RNA, 19 nt, Human
aaggguaucaggugcugcc

SEQ ID NO: 2080762 - RNA, 17 nt, Human
aaggguaucaggugcug

SEQ ID NO: 2080763 - RNA, 19 nt, Human
aaggggaggaccucugggc

SEQ ID NO: 2080764 - RNA, 13 nt, Human
aaggggaggaggg

SEQ ID NO: 2080765 - RNA, 22 nt, Human
aaggggauguauccaugggggc

SEQ ID NO: 2080766 - RNA, 15 nt, Human
aaggggaggagggcg

SEQ ID NO: 2080767 - RNA, 14 nt, Human
aaggggaggcagcc

SEQ ID NO: 2080768 - RNA, 16 nt, Human
aaggggaggcagccgg

SEQ ID NO: 2080769 - RNA, 16 nt, Human
aagggcccagauucua

SEQ ID NO: 2080770 - RNA, 16 nt, Human
aaggcuggcugggcau

SEQ ID NO: 2080771 - RNA, 15 nt, Human
aaguaaauagcaaca

SEQ ID NO: 2080772 - RNA, 21 nt, Human
guuucuagcaugaagacagag

SEQ ID NO: 2080773 - RNA, 19 nt, Human
guuucuagagccugcugga

SEQ ID NO: 2080774 - RNA, 12 nt, Human
aaguaaaacuug

SEQ ID NO: 2080775 - RNA, 20 nt, Human
aaggguuuguggcugggggc

SEQ ID NO: 2080776 - RNA, 17 nt, Human
aaguaaacuaaugaguu

SEQ ID NO: 2080777 - RNA, 13 nt, Human
aaguaaacugccc

SEQ ID NO: 2080778 - RNA, 16 nt, Human
aagggugcugcuuccc

SEQ ID NO: 2080779 - RNA, 19 nt, Human
aagggugcugcuucccucu

SEQ ID NO: 2080780 - RNA, 19 nt, Human
aaggguccuucccucuccc

SEQ ID NO: 2080781 - RNA, 14 nt, Human
aaggguuauauuuu

SEQ ID NO: 2080782 - RNA, 23 nt, Human
aagggugcugcuucccucugccu

SEQ ID NO: 2080783 - RNA, 20 nt, Human
aagggugcugcuucccucug

SEQ ID NO: 2080784 - RNA, 18 nt, Human
aaggggcagucuggaggg

SEQ ID NO: 2080785 - RNA, 19 nt, Human
aaggggcagucuggagggg

SEQ ID NO: 2080786 - RNA, 20 nt, Human
aaggggcagucuggaggggc

SEQ ID NO: 2080787 - RNA, 14 nt, Human
aaggcuggggcuau

SEQ ID NO: 2080788 - RNA, 17 nt, Human
aaggguuuguggcuggg

SEQ ID NO: 2080789 - RNA, 12 nt, Human
guuuuuugaaaa

SEQ ID NO: 2080790 - RNA, 14 nt, Human
guuuuuuccugagc

SEQ ID NO: 2080791 - RNA, 21 nt, Human
guuuuuuccugagcuuggcca

SEQ ID NO: 2080792 - RNA, 21 nt, Human
guuuuuuaaagucuugcugug

SEQ ID NO: 2080793 - RNA, 19 nt, Human
guuuuuuaucuuuucuaca

SEQ ID NO: 2080794 - RNA, 22 nt, Human
guuuuuuaucuuuucuacagca

SEQ ID NO: 2080795 - RNA, 23 nt, Human
guuuuuuaucuuuucuacagcaa

SEQ ID NO: 2080796 - RNA, 19 nt, Human
guuuuuuuguauaguaaag

SEQ ID NO: 2080797 - RNA, 18 nt, Human
guuuuuuuuaaauaaaag

SEQ ID NO: 2080798 - RNA, 20 nt, Human
guuuuuuuuaaauaaaagca

SEQ ID NO: 2080799 - RNA, 17 nt, Human
guuuuucugccagggag

SEQ ID NO: 2080800 - RNA, 14 nt, Human
guuuuucugccagg

SEQ ID NO: 2080801 - RNA, 13 nt, Human
guuuuugggaugu

SEQ ID NO: 2080802 - RNA, 17 nt, Human
guuuuugggaugucuua

SEQ ID NO: 2080803 - RNA, 19 nt, Human
guuuuugggugcaagaggg

SEQ ID NO: 2080804 - RNA, 15 nt, Human
guuuuuguuaacuuu

SEQ ID NO: 2080805 - RNA, 19 nt, Human
guuuuuguuaacuuugggu

SEQ ID NO: 2080806 - RNA, 16 nt, Human
guuuuugucuuaaaaa

SEQ ID NO: 2080807 - RNA, 18 nt, Human
aagucuuagauguauaua

SEQ ID NO: 2080808 - RNA, 19 nt, Human
aagucuuagauguauauau

SEQ ID NO: 2080809 - RNA, 14 nt, Human
aagugaauaaaaau

SEQ ID NO: 2080810 - RNA, 15 nt, Human
aagugaauaaaaauu

SEQ ID NO: 2080811 - RNA, 16 nt, Human
aagugaauaaaaauua

SEQ ID NO: 2080812 - RNA, 17 nt, Human
aagucuuagauguauau

SEQ ID NO: 2080813 - RNA, 14 nt, Human
aagucaugaacaca

SEQ ID NO: 2080814 - RNA, 15 nt, Human
aagucaugaagccca

SEQ ID NO: 2080815 - RNA, 17 nt, Human
aagucaugaagcccaag

SEQ ID NO: 2080816 - RNA, 23 nt, Human
aagucaugaagcccaagugaaau

SEQ ID NO: 2080817 - RNA, 11 nt, Human
aagucaugagc

SEQ ID NO: 2080818 - RNA, 15 nt, Human
aagugaccaaggagg

SEQ ID NO: 2080819 - RNA, 16 nt, Human
aagugacaaggcccca

SEQ ID NO: 2080820 - RNA, 18 nt, Human
aagugacaaggccccaga

SEQ ID NO: 2080821 - RNA, 19 nt, Human
aagugacaaggccccagag

SEQ ID NO: 2080822 - RNA, 20 nt, Human
aagugacaaggccccagaga

SEQ ID NO: 2080823 - RNA, 21 nt, Human
aagugacaaggccccagagac

SEQ ID NO: 2080824 - RNA, 14 nt, Human
aagugaauuuuucu

SEQ ID NO: 2080825 - RNA, 17 nt, Human
aagugaauuuuucucua

SEQ ID NO: 2080826 - RNA, 19 nt, Human
aagugaauuuuucucuaac

SEQ ID NO: 2080827 - RNA, 14 nt, Human
aagugaauuugaau

SEQ ID NO: 2080828 - RNA, 16 nt, Human
aagugaauuugaauga

SEQ ID NO: 2080829 - RNA, 17 nt, Human
aagugaauuugaaugaa

SEQ ID NO: 2080830 - RNA, 19 nt, Human
aagugaauuugaaugaaaa

SEQ ID NO: 2080831 - RNA, 20 nt, Human
aagugaauuugaaugaaaaa

SEQ ID NO: 2080832 - RNA, 23 nt, Human
aagugaauuugaaugaaaaauuu

SEQ ID NO: 2080833 - RNA, 16 nt, Human
aagugacuguaucugu

SEQ ID NO: 2080834 - RNA, 17 nt, Human
aagugacuguaucugug

SEQ ID NO: 2080835 - RNA, 18 nt, Human
aagugacuguaucugugu

SEQ ID NO: 2080836 - RNA, 15 nt, Human
aagugagaagauggu

SEQ ID NO: 2080837 - RNA, 18 nt, Human
guuuuucuaggccugggg

SEQ ID NO: 2080838 - RNA, 18 nt, Human
aaguauucuuauuuaaug

SEQ ID NO: 2080839 - RNA, 19 nt, Human
aaguauucuuauuuaauga

SEQ ID NO: 2080840 - RNA, 14 nt, Human
aaguauucugccuu

SEQ ID NO: 2080841 - RNA, 18 nt, Human
aaguauucugccuuugca

SEQ ID NO: 2080842 - RNA, 20 nt, Human
aaguauucugccuuugcaga

SEQ ID NO: 2080843 - RNA, 22 nt, Human
aaguauucugccuuugcagaaa

SEQ ID NO: 2080844 - RNA, 22 nt, Human
aagucaaccaauguagaaagcu

SEQ ID NO: 2080845 - RNA, 16 nt, Human
aagucaaccaauguag

SEQ ID NO: 2080846 - RNA, 24 nt, Human
aagucacacaguauuacuucugcu

SEQ ID NO: 2080847 - RNA, 21 nt, Human
aagucaagugaaaaaggagga

SEQ ID NO: 2080848 - RNA, 16 nt, Human
aagucacccggccccc

SEQ ID NO: 2080849 - RNA, 21 nt, Human
aagucacccggcccccaugca

SEQ ID NO: 2080850 - RNA, 16 nt, Human
aagucacucaauuguu

SEQ ID NO: 2080851 - RNA, 21 nt, Human
aagucacucaauuguuuuugu

SEQ ID NO: 2080852 - RNA, 18 nt, Human
aagucaccggagcuuuca

SEQ ID NO: 2080853 - RNA, 14 nt, Human
aagucaccggagcu

SEQ ID NO: 2080854 - RNA, 12 nt, Human
aagucacugcac

SEQ ID NO: 2080855 - RNA, 14 nt, Human
aagucacugcacag

SEQ ID NO: 2080856 - RNA, 20 nt, Human
aagucagugcccaacuguua

SEQ ID NO: 2080857 - RNA, 21 nt, Human
aagucagugcccaacuguuau

SEQ ID NO: 2080858 - RNA, 18 nt, Human
aagucagugggaacguga

SEQ ID NO: 2080859 - RNA, 13 nt, Human
aagucacaaagga

SEQ ID NO: 2080860 - RNA, 15 nt, Human
aagucacaaaggaau

SEQ ID NO: 2080861 - RNA, 18 nt, Human
aagucacaaaggaaugga

SEQ ID NO: 2080862 - RNA, 13 nt, Human
aagucacacagug

SEQ ID NO: 2080863 - RNA, 16 nt, Human
aagucacaucacagga

SEQ ID NO: 2080864 - RNA, 17 nt, Human
aagucacaucacaggac

SEQ ID NO: 2080865 - RNA, 19 nt, Human
aagucacaucacaggacac

SEQ ID NO: 2080866 - RNA, 12 nt, Human
aaguauucaaga

SEQ ID NO: 2080867 - RNA, 15 nt, Human
aaguauuccaccuua

SEQ ID NO: 2080868 - RNA, 16 nt, Human
aaguauuccaccuuaa

SEQ ID NO: 2080869 - RNA, 17 nt, Human
aaguauuccaccuuaaa

SEQ ID NO: 2080870 - RNA, 18 nt, Human
aaguauuccaccuuaaau

SEQ ID NO: 2080871 - RNA, 19 nt, Human
aaguauuccaccuuaaauu

SEQ ID NO: 2080872 - RNA, 20 nt, Human
aaguauuccaccuuaaauua

SEQ ID NO: 2080873 - RNA, 21 nt, Human
aaguauuccaccuuaaauuaa

SEQ ID NO: 2080874 - RNA, 22 nt, Human
aaguauuccuuuccugaucacu

SEQ ID NO: 2080875 - RNA, 16 nt, Human
aaguauguuuuagcau

SEQ ID NO: 2080876 - RNA, 23 nt, Human
aaguacuucuccacccugcucuc

SEQ ID NO: 2080877 - RNA, 22 nt, Human
aaguacuucuccacccugcucu

SEQ ID NO: 2080878 - RNA, 21 nt, Human
aaguacuucuccacccugcuc

SEQ ID NO: 2080879 - RNA, 17 nt, Human
aaguacugcuguaaaua

SEQ ID NO: 2080880 - RNA, 20 nt, Human
aaguacugcuguaaauaaau

SEQ ID NO: 2080881 - RNA, 23 nt, Human
aaguacugcuguaaauaaaugcu

SEQ ID NO: 2080882 - RNA, 14 nt, Human
guuucucccaguuc

SEQ ID NO: 2080883 - RNA, 16 nt, Human
aaguacuauguaucaa

SEQ ID NO: 2080884 - RNA, 15 nt, Human
aaguacuauguauca

SEQ ID NO: 2080885 - RNA, 23 nt, Human
guuggcugggggccucagugcca

SEQ ID NO: 2080886 - RNA, 22 nt, Human
guugcucagcaaggggcucugc

SEQ ID NO: 2080887 - RNA, 18 nt, Human
guugcuccgccucugcug

SEQ ID NO: 2080888 - RNA, 20 nt, Human
guugcuccgccucugcuggc

SEQ ID NO: 2080889 - RNA, 22 nt, Human
guugcuccgccucugcuggcac

SEQ ID NO: 2080890 - RNA, 18 nt, Human
guugcucaaaaaaugagc

SEQ ID NO: 2080891 - RNA, 22 nt, Human
guugcuaagaagcgagcacuga

SEQ ID NO: 2080892 - RNA, 17 nt, Human
guugcccaggcuggcgu

SEQ ID NO: 2080893 - RNA, 16 nt, Human
guugcccaggcuggcg

SEQ ID NO: 2080894 - RNA, 21 nt, Human
aaggccuuauucuacauuuca

SEQ ID NO: 2080895 - RNA, 21 nt, Human
aaggcuaccuuauuguacguu

SEQ ID NO: 2080896 - RNA, 16 nt, Human
aaggcuaaaacuuaac

SEQ ID NO: 2080897 - RNA, 15 nt, Human
guugcccaggcuggc

SEQ ID NO: 2080898 - RNA, 13 nt, Human
guuggcuucuguu

SEQ ID NO: 2080899 - RNA, 23 nt, Human
guuggcuucuguuucuaguugag

SEQ ID NO: 2080900 - RNA, 14 nt, Human
guugggaagacaug

SEQ ID NO: 2080901 - RNA, 11 nt, Human
guuggcugggu

SEQ ID NO: 2080902 - RNA, 12 nt, Human
guuggcugggua

SEQ ID NO: 2080903 - RNA, 17 nt, Human
guugggcuggugucacc

SEQ ID NO: 2080904 - RNA, 23 nt, Human
guuggggugguuuuugagccaug

SEQ ID NO: 2080905 - RNA, 14 nt, Human
guuggggaggggcg

SEQ ID NO: 2080906 - RNA, 14 nt, Human
guugcccaggcugg

SEQ ID NO: 2080907 - RNA, 18 nt, Human
aaggcgggagcaucucuu

SEQ ID NO: 2080908 - RNA, 16 nt, Human
aaggccucuuccuugc

SEQ ID NO: 2080909 - RNA, 16 nt, Human
aaggccugucccuggc

SEQ ID NO: 2080910 - RNA, 23 nt, Human
aaggccugucccuggccaucucu

SEQ ID NO: 2080911 - RNA, 15 nt, Human
aaggccuuaauaugu

SEQ ID NO: 2080912 - RNA, 16 nt, Human
aaggaggaaggagccu

SEQ ID NO: 2080913 - RNA, 15 nt, Human
aaggccccagagacu

SEQ ID NO: 2080914 - RNA, 17 nt, Human
aaggagacucaccucug

SEQ ID NO: 2080915 - RNA, 20 nt, Human
aaggagacucaccucugccu

SEQ ID NO: 2080916 - RNA, 22 nt, Human
aaggagacucaccucugccuca

SEQ ID NO: 2080917 - RNA, 23 nt, Human
aaggagacucaccucugccucaa

SEQ ID NO: 2080918 - RNA, 16 nt, Human
aaggagacucaccucu

SEQ ID NO: 2080919 - RNA, 14 nt, Human
aaggagagccugcu

SEQ ID NO: 2080920 - RNA, 18 nt, Human
aaggagagaaggggagga

SEQ ID NO: 2080921 - RNA, 21 nt, Human
guugagcuucauauaccagca

SEQ ID NO: 2080922 - RNA, 13 nt, Human
aaggagagccugc

SEQ ID NO: 2080923 - RNA, 20 nt, Human
aaggaaggagacucaccucu

SEQ ID NO: 2080924 - RNA, 22 nt, Human
aaggaaggagacucaccucugc

SEQ ID NO: 2080925 - RNA, 19 nt, Human
aaggaagcuuucucugcuu

SEQ ID NO: 2080926 - RNA, 22 nt, Human
aaggaagcuuucucugcuucag

SEQ ID NO: 2080927 - RNA, 11 nt, Human
aaggaaggaaa

SEQ ID NO: 2080928 - RNA, 12 nt, Human
aaggaaggaaag

SEQ ID NO: 2080929 - RNA, 13 nt, Human
aaggaaggaaaga

SEQ ID NO: 2080930 - RNA, 16 nt, Human
aaggaaggaaagaaag

SEQ ID NO: 2080931 - RNA, 23 nt, Human
aaggaggauggcauauaauacaa

SEQ ID NO: 2080932 - RNA, 20 nt, Human
aaggaggaagagaaaaaaua

SEQ ID NO: 2080933 - RNA, 15 nt, Human
aaggaggagagggaa

SEQ ID NO: 2080934 - RNA, 17 nt, Human
aaggaggagagggaaaa

SEQ ID NO: 2080935 - RNA, 22 nt, Human
aaggaucagaacagcagagguu

SEQ ID NO: 2080936 - RNA, 20 nt, Human
aaggauagugcgauguuuca

SEQ ID NO: 2080937 - RNA, 17 nt, Human
aaggauauuuaagaaaa

SEQ ID NO: 2080938 - RNA, 18 nt, Human
aaggauauuuaagaaaau

SEQ ID NO: 2080939 - RNA, 19 nt, Human
aaggauauuuaagaaaaua

SEQ ID NO: 2080940 - RNA, 23 nt, Human
aaggauauuuaagaaaauacaau

SEQ ID NO: 2080941 - RNA, 15 nt, Human
aaggaucuguuuuua

SEQ ID NO: 2080942 - RNA, 12 nt, Human
aaggaucuuuca

SEQ ID NO: 2080943 - RNA, 22 nt, Human
aaggaucuuucacccacagaaa

SEQ ID NO: 2080944 - RNA, 23 nt, Human
aaggaucuuucacccacagaaag

SEQ ID NO: 2080945 - RNA, 21 nt, Human
aaggaucuguuuuuaaaaauc

SEQ ID NO: 2080946 - RNA, 23 nt, Human
aaggaucuguuuuuaaaaaucau

SEQ ID NO: 2080947 - RNA, 17 nt, Human
guuccccuguucacucu

SEQ ID NO: 2080948 - RNA, 15 nt, Human
guuccccuguucacu

SEQ ID NO: 2080949 - RNA, 12 nt, Human
aagcuuuuauga

SEQ ID NO: 2080950 - RNA, 13 nt, Human
aagcuuuuaugag

SEQ ID NO: 2080951 - RNA, 17 nt, Human
aagcuuuuuuauuuuuu

SEQ ID NO: 2080952 - RNA, 22 nt, Human
aagcuuuuuuauuuuuuauaca

SEQ ID NO: 2080953 - RNA, 13 nt, Human
aagcucugcuccu

SEQ ID NO: 2080954 - RNA, 18 nt, Human
aagcuguuacugucuuca

SEQ ID NO: 2080955 - RNA, 13 nt, Human
aagcuuuccugga

SEQ ID NO: 2080956 - RNA, 11 nt, Human
aagcuuucucu

SEQ ID NO: 2080957 - RNA, 17 nt, Human
aagcuuucucugcuuca

SEQ ID NO: 2080958 - RNA, 19 nt, Human
aagcuuucucugcuucagc

SEQ ID NO: 2080959 - RNA, 23 nt, Human
aagcuuucucugcuucagcuugc

SEQ ID NO: 2080960 - RNA, 16 nt, Human
aagcuuugauuuagau

SEQ ID NO: 2080961 - RNA, 22 nt, Human
aagcuuugauuuagauugagua

SEQ ID NO: 2080962 - RNA, 23 nt, Human
aagcuuugcuuaugguaauaaaa

SEQ ID NO: 2080963 - RNA, 23 nt, Human
aagcuguuuccauagggugacac

SEQ ID NO: 2080964 - RNA, 15 nt, Human
aagcuguuuccauag

SEQ ID NO: 2080965 - RNA, 15 nt, Human
guguuuaguugcaga

SEQ ID NO: 2080966 - RNA, 23 nt, Human
guguuuaacggcacuguggccuu

SEQ ID NO: 2080967 - RNA, 22 nt, Human
guguuuauccuaucucuccaac

SEQ ID NO: 2080968 - RNA, 20 nt, Human
aagcuccaucuccacuccag

SEQ ID NO: 2080969 - RNA, 12 nt, Human
aagcucugaagu

SEQ ID NO: 2080970 - RNA, 16 nt, Human
aagcucugaagucaca

SEQ ID NO: 2080971 - RNA, 22 nt, Human
aagcucugaagucacaucacag

SEQ ID NO: 2080972 - RNA, 15 nt, Human
guugagccaggccug

SEQ ID NO: 2080973 - RNA, 23 nt, Human
guugagccaggccugggucugug

SEQ ID NO: 2080974 - RNA, 15 nt, Human
guugacacggccaug

SEQ ID NO: 2080975 - RNA, 20 nt, Human
guugacacggccaugaccac

SEQ ID NO: 2080976 - RNA, 13 nt, Human
guugagcuguuuu

SEQ ID NO: 2080977 - RNA, 20 nt, Human
guugauauuucgaaagcugc

SEQ ID NO: 2080978 - RNA, 20 nt, Human
guugaucacuggcaaugaaa

SEQ ID NO: 2080979 - RNA, 15 nt, Human
guucuguuuguuaaa

SEQ ID NO: 2080980 - RNA, 17 nt, Human
guucuguuuguuaaaac

SEQ ID NO: 2080981 - RNA, 22 nt, Human
guucuguuuguuaaaacuggca

SEQ ID NO: 2080982 - RNA, 16 nt, Human
guucuguuuugccuga

SEQ ID NO: 2080983 - RNA, 12 nt, Human
guucuguuuugu

SEQ ID NO: 2080984 - RNA, 13 nt, Human
guucuguuuuguu

SEQ ID NO: 2080985 - RNA, 13 nt, Human
guucuguguauuu

SEQ ID NO: 2080986 - RNA, 19 nt, Human
guucuguguauuuaauugu

SEQ ID NO: 2080987 - RNA, 23 nt, Human
guucuguguauuuaauuguaaac

SEQ ID NO: 2080988 - RNA, 18 nt, Human
guuccccuguucacucua

SEQ ID NO: 2080989 - RNA, 14 nt, Human
guucuauuuaagug

SEQ ID NO: 2080990 - RNA, 23 nt, Human
guucuauuuaaguguacuaauua

SEQ ID NO: 2080991 - RNA, 17 nt, Human
guucuauuucuauccca

SEQ ID NO: 2080992 - RNA, 18 nt, Human
guucuauuucuaucccaa

SEQ ID NO: 2080993 - RNA, 22 nt, Human
guucucaaacgguacacagacu

SEQ ID NO: 2080994 - RNA, 16 nt, Human
guucucugaggacacu

SEQ ID NO: 2080995 - RNA, 17 nt, Human
guucugucucauaugau

SEQ ID NO: 2080996 - RNA, 13 nt, Human
uacagucuuguau

SEQ ID NO: 2080997 - RNA, 12 nt, Human
uacagucuugua

SEQ ID NO: 2080998 - RNA, 13 nt, Human
uacagugguucua

SEQ ID NO: 2080999 - RNA, 18 nt, Human
uacaguaucucagggccu

SEQ ID NO: 2081000 - RNA, 13 nt, Human
uacaguauucugu

SEQ ID NO: 2081001 - RNA, 14 nt, Human
aauguauuuuuccu

SEQ ID NO: 2081002 - RNA, 13 nt, Human
aaugucacaggca

SEQ ID NO: 2081003 - RNA, 14 nt, Human
aaugucacaggcag

SEQ ID NO: 2081004 - RNA, 18 nt, Human
aauguaucaggaaauaua

SEQ ID NO: 2081005 - RNA, 16 nt, Human
aauguaucuuauucac

SEQ ID NO: 2081006 - RNA, 13 nt, Human
aauguaucuuauu

SEQ ID NO: 2081007 - RNA, 18 nt, Human
aauguaucuuauucacau

SEQ ID NO: 2081008 - RNA, 17 nt, Human
aauguaucuuauucaca

SEQ ID NO: 2081009 - RNA, 14 nt, Human
aauguagcugguuu

SEQ ID NO: 2081010 - RNA, 17 nt, Human
aauguagcugguuuccu

SEQ ID NO: 2081011 - RNA, 20 nt, Human
aauguagguaugaauaaguu

SEQ ID NO: 2081012 - RNA, 21 nt, Human
aauguagcugguuuccucauu

SEQ ID NO: 2081013 - RNA, 13 nt, Human
uacauacugcugu

SEQ ID NO: 2081014 - RNA, 12 nt, Human
uacauacugcug

SEQ ID NO: 2081015 - RNA, 14 nt, Human
aauguacccaguau

SEQ ID NO: 2081016 - RNA, 17 nt, Human
aauguacaucuggccuu

SEQ ID NO: 2081017 - RNA, 18 nt, Human
aauguaauuuguguaaua

SEQ ID NO: 2081018 - RNA, 23 nt, Human
aauguaauuuguguaauaaagug

SEQ ID NO: 2081019 - RNA, 13 nt, Human
aauguacaaaaua

SEQ ID NO: 2081020 - RNA, 15 nt, Human
aauguacaaaauaaa

SEQ ID NO: 2081021 - RNA, 17 nt, Human
aauguacaaaauaaagu

SEQ ID NO: 2081022 - RNA, 21 nt, Human
uacaccucguuagggaagaga

SEQ ID NO: 2081023 - RNA, 22 nt, Human
uacaccucguuagggaagagaa

SEQ ID NO: 2081024 - RNA, 24 nt, Human
uacaccucguuagggaagagaaac

SEQ ID NO: 2081025 - RNA, 14 nt, Human
uacagacuucucca

SEQ ID NO: 2081026 - RNA, 15 nt, Human
uacagacuucuccag

SEQ ID NO: 2081027 - RNA, 16 nt, Human
uacagacguaugcuua

SEQ ID NO: 2081028 - RNA, 17 nt, Human
uacagacguaugcuuau

SEQ ID NO: 2081029 - RNA, 18 nt, Human
uacagacguaugcuuauu

SEQ ID NO: 2081030 - RNA, 12 nt, Human
uacagcaaauuu

SEQ ID NO: 2081031 - RNA, 14 nt, Human
uacagcaaauuuau

SEQ ID NO: 2081032 - RNA, 15 nt, Human
uacagcaaauuuaua

SEQ ID NO: 2081033 - RNA, 16 nt, Human
uacagcaaauuuauaa

SEQ ID NO: 2081034 - RNA, 12 nt, Human
uacaauauuuaa

SEQ ID NO: 2081035 - RNA, 14 nt, Human
uacaauauuuaaaa

SEQ ID NO: 2081036 - RNA, 16 nt, Human
uacaauauuuaaaauu

SEQ ID NO: 2081037 - RNA, 14 nt, Human
uacaauauuuuaag

SEQ ID NO: 2081038 - RNA, 15 nt, Human
uacaauauuuuaagc

SEQ ID NO: 2081039 - RNA, 16 nt, Human
uacaauauuuuaagca

SEQ ID NO: 2081040 - RNA, 17 nt, Human
uacaauauuuuaagcau

SEQ ID NO: 2081041 - RNA, 18 nt, Human
uacaauauuuuaagcauu

SEQ ID NO: 2081042 - RNA, 20 nt, Human
uacaauauuuuaagcauuac

SEQ ID NO: 2081043 - RNA, 21 nt, Human
uacaauauuuuaagcauuacu

SEQ ID NO: 2081044 - RNA, 20 nt, Human
uacaaucaaaggaaaauagu

SEQ ID NO: 2081045 - RNA, 13 nt, Human
uacaauaacauaa

SEQ ID NO: 2081046 - RNA, 21 nt, Human
uacaauaaaacuuugcugcca

SEQ ID NO: 2081047 - RNA, 11 nt, Human
uacaauaaacu

SEQ ID NO: 2081048 - RNA, 12 nt, Human
uacaauaaacua

SEQ ID NO: 2081049 - RNA, 13 nt, Human
uacaauaaacuau

SEQ ID NO: 2081050 - RNA, 19 nt, Human
uacaauaaacuauuggaaa

SEQ ID NO: 2081051 - RNA, 18 nt, Human
uacaaguucuauuuaagu

SEQ ID NO: 2081052 - RNA, 15 nt, Human
uacaauauauauucu

SEQ ID NO: 2081053 - RNA, 14 nt, Human
aaugguuugaauau

SEQ ID NO: 2081054 - RNA, 23 nt, Human
uacaaugaaaaggacuuuauaga

SEQ ID NO: 2081055 - RNA, 13 nt, Human
uacaaucuauuua

SEQ ID NO: 2081056 - RNA, 16 nt, Human
uacaaucuauuuauug

SEQ ID NO: 2081057 - RNA, 17 nt, Human
uacaaucuauuuauugg

SEQ ID NO: 2081058 - RNA, 13 nt, Human
aauguaagcucua

SEQ ID NO: 2081059 - RNA, 15 nt, Human
aauguaagcucuacu

SEQ ID NO: 2081060 - RNA, 17 nt, Human
aaugguuugaauauaaa

SEQ ID NO: 2081061 - RNA, 23 nt, Human
aaugguuugaauauaaacacuau

SEQ ID NO: 2081062 - RNA, 17 nt, Human
uaccccuuacuuagcau

SEQ ID NO: 2081063 - RNA, 18 nt, Human
uaccccuuacuuagcaug

SEQ ID NO: 2081064 - RNA, 19 nt, Human
uaccccuuagccucccuga

SEQ ID NO: 2081065 - RNA, 15 nt, Human
uacccucccaccccc

SEQ ID NO: 2081066 - RNA, 13 nt, Human
uacccucccaccc

SEQ ID NO: 2081067 - RNA, 14 nt, Human
uacccucccacccc

SEQ ID NO: 2081068 - RNA, 20 nt, Human
uacccuggcacuauaaugua

SEQ ID NO: 2081069 - RNA, 22 nt, Human
uacccuggcacuauaauguaag

SEQ ID NO: 2081070 - RNA, 18 nt, Human
uacccuccuuuuuuuccc

SEQ ID NO: 2081071 - RNA, 16 nt, Human
uacccccuaagagcca

SEQ ID NO: 2081072 - RNA, 16 nt, Human
uaccccagcucugcuu

SEQ ID NO: 2081073 - RNA, 18 nt, Human
uaccccagcucugcuugc

SEQ ID NO: 2081074 - RNA, 22 nt, Human
uaccccaccacgauguggcccu

SEQ ID NO: 2081075 - RNA, 17 nt, Human
uaccauccccuguagag

SEQ ID NO: 2081076 - RNA, 15 nt, Human
uaccauaauguauuu

SEQ ID NO: 2081077 - RNA, 15 nt, Human
uaccaugaaacaaag

SEQ ID NO: 2081078 - RNA, 13 nt, Human
uaccaucucccuc

SEQ ID NO: 2081079 - RNA, 21 nt, Human
uaccagacgguucaccagccu

SEQ ID NO: 2081080 - RNA, 17 nt, Human
uacauggguagcuucug

SEQ ID NO: 2081081 - RNA, 23 nt, Human
uaccagacgguucaccagccucu

SEQ ID NO: 2081082 - RNA, 22 nt, Human
uaccagacgguucaccagccuc

SEQ ID NO: 2081083 - RNA, 23 nt, Human
uacauuguuugucugucuucaua

SEQ ID NO: 2081084 - RNA, 19 nt, Human
uacauuuauaauguuugcu

SEQ ID NO: 2081085 - RNA, 18 nt, Human
uaccacugaagauagaag

SEQ ID NO: 2081086 - RNA, 19 nt, Human
uaccacugaagauagaaga

SEQ ID NO: 2081087 - RNA, 21 nt, Human
uaccacugaagauagaagaaa

SEQ ID NO: 2081088 - RNA, 16 nt, Human
uacauuuaauugagaa

SEQ ID NO: 2081089 - RNA, 17 nt, Human
uacauuuaauugagaag

SEQ ID NO: 2081090 - RNA, 13 nt, Human
aauuaaguacuau

SEQ ID NO: 2081091 - RNA, 19 nt, Human
aauuaagaggauacacacg

SEQ ID NO: 2081092 - RNA, 21 nt, Human
aauuaaggcaacugaacaaaa

SEQ ID NO: 2081093 - RNA, 22 nt, Human
aauuaaggcaacugaacaaaaa

SEQ ID NO: 2081094 - RNA, 19 nt, Human
uacauguaaaacauuaucu

SEQ ID NO: 2081095 - RNA, 16 nt, Human
uacaugguugugaccu

SEQ ID NO: 2081096 - RNA, 12 nt, Human
aauuaaguaaac

SEQ ID NO: 2081097 - RNA, 13 nt, Human
uacauuaaagcag

SEQ ID NO: 2081098 - RNA, 15 nt, Human
uacauuaaagcaguc

SEQ ID NO: 2081099 - RNA, 20 nt, Human
uacauuagcaguuugcuuug

SEQ ID NO: 2081100 - RNA, 19 nt, Human
uacauuagcaguuugcuuu

SEQ ID NO: 2081101 - RNA, 22 nt, Human
uacauuaauuauuauugcuguu

SEQ ID NO: 2081102 - RNA, 23 nt, Human
uacauuaauuauuauugcuguug

SEQ ID NO: 2081103 - RNA, 16 nt, Human
uacauugugaaacuuc

SEQ ID NO: 2081104 - RNA, 19 nt, Human
uacauuguuugucugucuu

SEQ ID NO: 2081105 - RNA, 12 nt, Human
aauuaacacugc

SEQ ID NO: 2081106 - RNA, 14 nt, Human
aauuaacauauaau

SEQ ID NO: 2081107 - RNA, 15 nt, Human
aauuaacauauaaua

SEQ ID NO: 2081108 - RNA, 16 nt, Human
aauuaacauauaauau

SEQ ID NO: 2081109 - RNA, 17 nt, Human
aauuaacauauaauaua

SEQ ID NO: 2081110 - RNA, 18 nt, Human
aauuaacauauaauauau

SEQ ID NO: 2081111 - RNA, 19 nt, Human
aauuaacauauaauauaug

SEQ ID NO: 2081112 - RNA, 20 nt, Human
aauuaacauauaauauaugu

SEQ ID NO: 2081113 - RNA, 21 nt, Human
aauuaacauauaauauauguu

SEQ ID NO: 2081114 - RNA, 14 nt, Human
aaugucaaggugcu

SEQ ID NO: 2081115 - RNA, 16 nt, Human
aaugucaaggugcugu

SEQ ID NO: 2081116 - RNA, 17 nt, Human
aaugugaacuagcugga

SEQ ID NO: 2081117 - RNA, 19 nt, Human
aaugugaacuagcuggaau

SEQ ID NO: 2081118 - RNA, 20 nt, Human
aaugugaacuagcuggaauu

SEQ ID NO: 2081119 - RNA, 23 nt, Human
aaugugaaucagacccuacccca

SEQ ID NO: 2081120 - RNA, 18 nt, Human
uacaagccagcuggagaa

SEQ ID NO: 2081121 - RNA, 21 nt, Human
uacaagccauucuaaggaaau

SEQ ID NO: 2081122 - RNA, 16 nt, Human
uaauuuuuuucaauau

SEQ ID NO: 2081123 - RNA, 17 nt, Human
uaauuuuuuuauguuuu

SEQ ID NO: 2081124 - RNA, 21 nt, Human
uaauuuuuuuauguuuuguuu

SEQ ID NO: 2081125 - RNA, 20 nt, Human
uacaauaaaaucuugaaaau

SEQ ID NO: 2081126 - RNA, 21 nt, Human
uacaagcgugagccacugcac

SEQ ID NO: 2081127 - RNA, 20 nt, Human
uacaagcgugagccacugca

SEQ ID NO: 2081128 - RNA, 19 nt, Human
uacaagcgugagccacugc

SEQ ID NO: 2081129 - RNA, 18 nt, Human
uacaagcgugagccacug

SEQ ID NO: 2081130 - RNA, 16 nt, Human
uacaagcgugagccac

SEQ ID NO: 2081131 - RNA, 22 nt, Human
uaauuuuuguguuuuuaauaaa

SEQ ID NO: 2081132 - RNA, 13 nt, Human
uaauuuuuuacua

SEQ ID NO: 2081133 - RNA, 19 nt, Human
uaauuuuuuagagagcugu

SEQ ID NO: 2081134 - RNA, 17 nt, Human
uaauuugccaaaauaau

SEQ ID NO: 2081135 - RNA, 19 nt, Human
uaauuugccaaaauaaugu

SEQ ID NO: 2081136 - RNA, 22 nt, Human
uaauuugccaaaauaaugucuu

SEQ ID NO: 2081137 - RNA, 23 nt, Human
uaauuugccaaaauaaugucuug

SEQ ID NO: 2081138 - RNA, 14 nt, Human
uaauuugauguuua

SEQ ID NO: 2081139 - RNA, 15 nt, Human
uaauuugacuagaaa

SEQ ID NO: 2081140 - RNA, 15 nt, Human
uaauuucuucucaaa

SEQ ID NO: 2081141 - RNA, 22 nt, Human
uaauuugauaguauugugcaua

SEQ ID NO: 2081142 - RNA, 16 nt, Human
uaauuugaugaaagcu

SEQ ID NO: 2081143 - RNA, 17 nt, Human
uaauuugaugaaagcug

SEQ ID NO: 2081144 - RNA, 18 nt, Human
uaauuugaugaaagcuga

SEQ ID NO: 2081145 - RNA, 19 nt, Human
uaauuugaugaaagcugau

SEQ ID NO: 2081146 - RNA, 20 nt, Human
uaauuugaugaaagcugauu

SEQ ID NO: 2081147 - RNA, 24 nt, Human
uaauuugaugaaagcugauuacug

SEQ ID NO: 2081148 - RNA, 16 nt, Human
uaauuugacuagaaaa

SEQ ID NO: 2081149 - RNA, 14 nt, Human
uaauuuaaugcaug

SEQ ID NO: 2081150 - RNA, 14 nt, Human
uaauucauguuucu

SEQ ID NO: 2081151 - RNA, 21 nt, Human
uaauuuaaugcauguuaggaa

SEQ ID NO: 2081152 - RNA, 23 nt, Human
uaauuaguuccucauuagcauuu

SEQ ID NO: 2081153 - RNA, 21 nt, Human
uaauuaucgggaacaguguuu

SEQ ID NO: 2081154 - RNA, 23 nt, Human
uaauuaucgggaacaguguuucc

SEQ ID NO: 2081155 - RNA, 21 nt, Human
uaauuaugacaguuauacugu

SEQ ID NO: 2081156 - RNA, 13 nt, Human
uaauuaugacagu

SEQ ID NO: 2081157 - RNA, 23 nt, Human
uaauuauaccgcuaucauuccaa

SEQ ID NO: 2081158 - RNA, 17 nt, Human
uaauuaucggaagcagu

SEQ ID NO: 2081159 - RNA, 18 nt, Human
uaauuaucggaagcagug

SEQ ID NO: 2081160 - RNA, 19 nt, Human
uaauuaucggaagcagugc

SEQ ID NO: 2081161 - RNA, 21 nt, Human
uaauuaucggaagcagugccu

SEQ ID NO: 2081162 - RNA, 18 nt, Human
uaauuaucgggaacagug

SEQ ID NO: 2081163 - RNA, 19 nt, Human
uaauuaucgggaacagugu

SEQ ID NO: 2081164 - RNA, 20 nt, Human
uaauuaucgggaacaguguu

SEQ ID NO: 2081165 - RNA, 21 nt, Human
aaugcaagauuuuccacaaga

SEQ ID NO: 2081166 - RNA, 14 nt, Human
aaugcaauauguau

SEQ ID NO: 2081167 - RNA, 14 nt, Human
aaugcaaauucuca

SEQ ID NO: 2081168 - RNA, 16 nt, Human
aaugcaaauucucaag

SEQ ID NO: 2081169 - RNA, 15 nt, Human
aaugcaacaacaugu

SEQ ID NO: 2081170 - RNA, 18 nt, Human
aaugcaacaacauguaua

SEQ ID NO: 2081171 - RNA, 16 nt, Human
aaugaccucaagaugu

SEQ ID NO: 2081172 - RNA, 21 nt, Human
aaucuuuuuuagcauaaaauu

SEQ ID NO: 2081173 - RNA, 14 nt, Human
aaugaaaaauucuc

SEQ ID NO: 2081174 - RNA, 17 nt, Human
aaugaaaaauucucagu

SEQ ID NO: 2081175 - RNA, 17 nt, Human
aaugaaaaauuuaagca

SEQ ID NO: 2081176 - RNA, 18 nt, Human
aaugaaaaauuuaagcau

SEQ ID NO: 2081177 - RNA, 14 nt, Human
aaugaaugaaacau

SEQ ID NO: 2081178 - RNA, 17 nt, Human
uaaugugccuaguucuu

SEQ ID NO: 2081179 - RNA, 10 nt, Human
uaaugugaac

SEQ ID NO: 2081180 - RNA, 11 nt, Human
uaaugugaacu

SEQ ID NO: 2081181 - RNA, 13 nt, Human
uaaugugaacuag

SEQ ID NO: 2081182 - RNA, 19 nt, Human
uaaugugaacuagcuggaa

SEQ ID NO: 2081183 - RNA, 13 nt, Human
aaucuugaaaaug

SEQ ID NO: 2081184 - RNA, 15 nt, Human
aaucuugcuuucuuu

SEQ ID NO: 2081185 - RNA, 18 nt, Human
aaucuugcuuucuuuguu

SEQ ID NO: 2081186 - RNA, 15 nt, Human
uaaugucacaggcag

SEQ ID NO: 2081187 - RNA, 17 nt, Human
uaaugucacaggcaggu

SEQ ID NO: 2081188 - RNA, 16 nt, Human
uaaugucacaggcagg

SEQ ID NO: 2081189 - RNA, 23 nt, Human
uaaugaaauaaaucauguuaauc

SEQ ID NO: 2081190 - RNA, 22 nt, Human
uaaugaagggaaaggauauuuu

SEQ ID NO: 2081191 - RNA, 16 nt, Human
uaauguaagcucuacu

SEQ ID NO: 2081192 - RNA, 17 nt, Human
uaauguaagcucuacug

SEQ ID NO: 2081193 - RNA, 18 nt, Human
uaaucaguguagccccaa

SEQ ID NO: 2081194 - RNA, 22 nt, Human
uaaucaguguagccccaagaag

SEQ ID NO: 2081195 - RNA, 14 nt, Human
uaaucagccucuua

SEQ ID NO: 2081196 - RNA, 15 nt, Human
uaaucagccucuuaa

SEQ ID NO: 2081197 - RNA, 16 nt, Human
uaauauucauuguaua

SEQ ID NO: 2081198 - RNA, 12 nt, Human
uaaucagccucu

SEQ ID NO: 2081199 - RNA, 13 nt, Human
uaaucagccucuu

SEQ ID NO: 2081200 - RNA, 21 nt, Human
uaauauugauaugcuuauaca

SEQ ID NO: 2081201 - RNA, 14 nt, Human
uaauauugagaaag

SEQ ID NO: 2081202 - RNA, 19 nt, Human
uaauauugagaaagaaacu

SEQ ID NO: 2081203 - RNA, 21 nt, Human
uaauagaauauaauuaucgga

SEQ ID NO: 2081204 - RNA, 14 nt, Human
uaauauucuuucaa

SEQ ID NO: 2081205 - RNA, 17 nt, Human
uaauauucuuucaauaa

SEQ ID NO: 2081206 - RNA, 20 nt, Human
uaauauucuuucaauaacga

SEQ ID NO: 2081207 - RNA, 14 nt, Human
uaaucuugcuuucu

SEQ ID NO: 2081208 - RNA, 15 nt, Human
uaaucuugcuuucuu

SEQ ID NO: 2081209 - RNA, 12 nt, Human
uaaucauuucuu

SEQ ID NO: 2081210 - RNA, 19 nt, Human
uaaucauuucuugggcccu

SEQ ID NO: 2081211 - RNA, 22 nt, Human
uaaucauuucuugggcccuccu

SEQ ID NO: 2081212 - RNA, 13 nt, Human
uaauacauuaaag

SEQ ID NO: 2081213 - RNA, 16 nt, Human
uaauacauuaaagcag

SEQ ID NO: 2081214 - RNA, 17 nt, Human
uaauacauuaaagcagu

SEQ ID NO: 2081215 - RNA, 18 nt, Human
uaauacauuaaagcaguc

SEQ ID NO: 2081216 - RNA, 20 nt, Human
uaauacagccaaagauaauc

SEQ ID NO: 2081217 - RNA, 12 nt, Human
uaauagaagaac

SEQ ID NO: 2081218 - RNA, 21 nt, Human
uaauagaagaacauccaagga

SEQ ID NO: 2081219 - RNA, 20 nt, Human
aauacaguaucucagggccu

SEQ ID NO: 2081220 - RNA, 15 nt, Human
aauacaguauucugu

SEQ ID NO: 2081221 - RNA, 16 nt, Human
aauacaguauucugua

SEQ ID NO: 2081222 - RNA, 18 nt, Human
aauacaguacaggcagca

SEQ ID NO: 2081223 - RNA, 21 nt, Human
aauacaguacaggcagcacag

SEQ ID NO: 2081224 - RNA, 15 nt, Human
aauacaguacaggca

SEQ ID NO: 2081225 - RNA, 16 nt, Human
aauacaguacaggcag

SEQ ID NO: 2081226 - RNA, 17 nt, Human
aauacaguacaggcagc

SEQ ID NO: 2081227 - RNA, 12 nt, Human
aauacaguguua

SEQ ID NO: 2081228 - RNA, 13 nt, Human
acaagccagcugg

SEQ ID NO: 2081229 - RNA, 15 nt, Human
acaagccagcuggag

SEQ ID NO: 2081230 - RNA, 14 nt, Human
acaagccccaggca

SEQ ID NO: 2081231 - RNA, 15 nt, Human
acaagccccaggcag

SEQ ID NO: 2081232 - RNA, 12 nt, Human
acaagccacccc

SEQ ID NO: 2081233 - RNA, 13 nt, Human
acaagcugcaccc

SEQ ID NO: 2081234 - RNA, 18 nt, Human
acaagcgugagccacugc

SEQ ID NO: 2081235 - RNA, 21 nt, Human
acaagcgugagccacugcacc

SEQ ID NO: 2081236 - RNA, 20 nt, Human
acaagcgugagccacugcac

SEQ ID NO: 2081237 - RNA, 13 nt, Human
acaagagcccagc

SEQ ID NO: 2081238 - RNA, 20 nt, Human
acaagagcccagcagggccu

SEQ ID NO: 2081239 - RNA, 19 nt, Human
acaagagcagccuguggca

SEQ ID NO: 2081240 - RNA, 20 nt, Human
acaagagcagccuguggcau

SEQ ID NO: 2081241 - RNA, 14 nt, Human
acaagagcagccug

SEQ ID NO: 2081242 - RNA, 15 nt, Human
acaagagcagccugu

SEQ ID NO: 2081243 - RNA, 16 nt, Human
acaagagcagccugug

SEQ ID NO: 2081244 - RNA, 18 nt, Human
acaagagcagccuguggc

SEQ ID NO: 2081245 - RNA, 23 nt, Human
acaagaaggguuuuccacccugg

SEQ ID NO: 2081246 - RNA, 12 nt, Human
acaacacucaca

SEQ ID NO: 2081247 - RNA, 14 nt, Human
acaacacacacacu

SEQ ID NO: 2081248 - RNA, 14 nt, Human
acaacaaaaauuug

SEQ ID NO: 2081249 - RNA, 15 nt, Human
acaacaaaaauuuga

SEQ ID NO: 2081250 - RNA, 15 nt, Human
acaacaaccugguca

SEQ ID NO: 2081251 - RNA, 12 nt, Human
uagcauuaacua

SEQ ID NO: 2081252 - RNA, 20 nt, Human
uagcauguugagccaggccu

SEQ ID NO: 2081253 - RNA, 16 nt, Human
uagcauuaacuaaucu

SEQ ID NO: 2081254 - RNA, 22 nt, Human
uagcauuuaguccaaugucuuu

SEQ ID NO: 2081255 - RNA, 22 nt, Human
acaaauguguaucggaugcuuu

SEQ ID NO: 2081256 - RNA, 22 nt, Human
acaaauuauguuacaucuguuu

SEQ ID NO: 2081257 - RNA, 15 nt, Human
acaaauuaucuuaaa

SEQ ID NO: 2081258 - RNA, 20 nt, Human
acaaauuagguuuuguacaa

SEQ ID NO: 2081259 - RNA, 13 nt, Human
uagaucagaacag

SEQ ID NO: 2081260 - RNA, 21 nt, Human
uagcauguguuugguucuggg

SEQ ID NO: 2081261 - RNA, 22 nt, Human
uagcauguguuugguucugggg

SEQ ID NO: 2081262 - RNA, 14 nt, Human
uagaucaugaagaa

SEQ ID NO: 2081263 - RNA, 22 nt, Human
uagauuuuagacccuauugcug

SEQ ID NO: 2081264 - RNA, 17 nt, Human
uagaucacgagaucaag

SEQ ID NO: 2081265 - RNA, 17 nt, Human
uagaucacauaacagaa

SEQ ID NO: 2081266 - RNA, 20 nt, Human
uagaucacauaacagaaugc

SEQ ID NO: 2081267 - RNA, 16 nt, Human
uagaucacgagaucaa

SEQ ID NO: 2081268 - RNA, 22 nt, Human
uagaggaaaaaaaugacuaaaa

SEQ ID NO: 2081269 - RNA, 15 nt, Human
uagaggaagcagcca

SEQ ID NO: 2081270 - RNA, 15 nt, Human
uagagcuucuggcac

SEQ ID NO: 2081271 - RNA, 17 nt, Human
uagaggaaaaaaaugac

SEQ ID NO: 2081272 - RNA, 18 nt, Human
uagaggaaaaaaaugacu

SEQ ID NO: 2081273 - RNA, 14 nt, Human
uagagcagggcaag

SEQ ID NO: 2081274 - RNA, 19 nt, Human
uagagcagaugaccccucc

SEQ ID NO: 2081275 - RNA, 16 nt, Human
acaaaaagcauaaaaa

SEQ ID NO: 2081276 - RNA, 12 nt, Human
acaaaaagacac

SEQ ID NO: 2081277 - RNA, 16 nt, Human
acaaaaagacacuuga

SEQ ID NO: 2081278 - RNA, 18 nt, Human
uagaagauggcacuuaua

SEQ ID NO: 2081279 - RNA, 14 nt, Human
uagaagauguuugc

SEQ ID NO: 2081280 - RNA, 15 nt, Human
uagaagauguuugcu

SEQ ID NO: 2081281 - RNA, 15 nt, Human
uagaagucacacagu

SEQ ID NO: 2081282 - RNA, 13 nt, Human
uagaacugaauuu

SEQ ID NO: 2081283 - RNA, 17 nt, Human
uagaacugaauuuuguc

SEQ ID NO: 2081284 - RNA, 23 nt, Human
uagaacucuccaucuuauuuuca

SEQ ID NO: 2081285 - RNA, 22 nt, Human
uagaacugaauuuugucuuuau

SEQ ID NO: 2081286 - RNA, 16 nt, Human
uagaacuugacccccu

SEQ ID NO: 2081287 - RNA, 21 nt, Human
uagaaccucgagguuucucaa

SEQ ID NO: 2081288 - RNA, 22 nt, Human
uagaacucaguuuuaacuagaa

SEQ ID NO: 2081289 - RNA, 19 nt, Human
uagaacucaguuuuaacua

SEQ ID NO: 2081290 - RNA, 18 nt, Human
uacuucaaguuaaaguga

SEQ ID NO: 2081291 - RNA, 23 nt, Human
uacuucaaguuaaagugaauaac

SEQ ID NO: 2081292 - RNA, 21 nt, Human
uacuucaaguuaaagugaaua

SEQ ID NO: 2081293 - RNA, 21 nt, Human
uagacagagucucacuguugc

SEQ ID NO: 2081294 - RNA, 22 nt, Human
uagacaaguccagccuggcaag

SEQ ID NO: 2081295 - RNA, 23 nt, Human
uagaauuuauucaauuccucugg

SEQ ID NO: 2081296 - RNA, 15 nt, Human
uagacaaaucuaagg

SEQ ID NO: 2081297 - RNA, 15 nt, Human
uagacaacccugcaa

SEQ ID NO: 2081298 - RNA, 22 nt, Human
uagaauuuauucaauuccucug

SEQ ID NO: 2081299 - RNA, 20 nt, Human
uagaauuuauucaauuccuc

SEQ ID NO: 2081300 - RNA, 15 nt, Human
uagaauuuauucaau

SEQ ID NO: 2081301 - RNA, 20 nt, Human
uagaagucuuagauguauau

SEQ ID NO: 2081302 - RNA, 18 nt, Human
uagaagucuuagauguau

SEQ ID NO: 2081303 - RNA, 19 nt, Human
uagaagucuuagauguaua

SEQ ID NO: 2081304 - RNA, 16 nt, Human
uagaagucacacagua

SEQ ID NO: 2081305 - RNA, 16 nt, Human
uagaagucuuagaugu

SEQ ID NO: 2081306 - RNA, 17 nt, Human
uagaagucuuagaugua

SEQ ID NO: 2081307 - RNA, 17 nt, Human
aauuuuuuugagacaga

SEQ ID NO: 2081308 - RNA, 21 nt, Human
aauuuuuuucaucuucucugg

SEQ ID NO: 2081309 - RNA, 15 nt, Human
acaaaaacagccuca

SEQ ID NO: 2081310 - RNA, 21 nt, Human
acaaaaacagccucacagaag

SEQ ID NO: 2081311 - RNA, 19 nt, Human
acaaaaaaaguugaaggcc

SEQ ID NO: 2081312 - RNA, 13 nt, Human
acaaaaaacaaua

SEQ ID NO: 2081313 - RNA, 19 nt, Human
aauuuuucagaugcuucug

SEQ ID NO: 2081314 - RNA, 20 nt, Human
aauuuuucauugauaugaaa

SEQ ID NO: 2081315 - RNA, 23 nt, Human
aauuuuucauugauaugaaaaau

SEQ ID NO: 2081316 - RNA, 22 nt, Human
aauuuuucucuaacucagaaac

SEQ ID NO: 2081317 - RNA, 20 nt, Human
aauuuuucucuaacucagaa

SEQ ID NO: 2081318 - RNA, 15 nt, Human
aauuuuuuaaaaagc

SEQ ID NO: 2081319 - RNA, 17 nt, Human
aauuuuuuauucuugug

SEQ ID NO: 2081320 - RNA, 18 nt, Human
aauuuuuuauucuuguga

SEQ ID NO: 2081321 - RNA, 21 nt, Human
aauuuuuuauucuugugaaua

SEQ ID NO: 2081322 - RNA, 23 nt, Human
aauuuuuuauucuugugaauaug

SEQ ID NO: 2081323 - RNA, 15 nt, Human
aauuuuuuucaauau

SEQ ID NO: 2081324 - RNA, 19 nt, Human
aauuuuuuucaauauuuau

SEQ ID NO: 2081325 - RNA, 18 nt, Human
aauuuuuuuauguuuugu

SEQ ID NO: 2081326 - RNA, 23 nt, Human
aauuuuuuuauguuuuguuucug

SEQ ID NO: 2081327 - RNA, 20 nt, Human
aauuuguacauauguaaaau

SEQ ID NO: 2081328 - RNA, 17 nt, Human
aauuuguaggguuucua

SEQ ID NO: 2081329 - RNA, 14 nt, Human
aauuuguauaaaau

SEQ ID NO: 2081330 - RNA, 15 nt, Human
aauuuguauaaaaug

SEQ ID NO: 2081331 - RNA, 14 nt, Human
aauuugucauuuug

SEQ ID NO: 2081332 - RNA, 16 nt, Human
aauuugucauuuugaa

SEQ ID NO: 2081333 - RNA, 17 nt, Human
aauuugucauuuugaag

SEQ ID NO: 2081334 - RNA, 18 nt, Human
aauuugucauuuugaagc

SEQ ID NO: 2081335 - RNA, 19 nt, Human
aauuugucauuuugaagcu

SEQ ID NO: 2081336 - RNA, 20 nt, Human
aauuugucauuuugaagcua

SEQ ID NO: 2081337 - RNA, 22 nt, Human
aauuugucauuuugaagcuaau

SEQ ID NO: 2081338 - RNA, 14 nt, Human
aauuuuaacacaca

SEQ ID NO: 2081339 - RNA, 12 nt, Human
aauuuuaaauua

SEQ ID NO: 2081340 - RNA, 16 nt, Human
aauuuuaagauuccuu

SEQ ID NO: 2081341 - RNA, 17 nt, Human
aauuuuaagauuccuuu

SEQ ID NO: 2081342 - RNA, 18 nt, Human
aauuuuaagauuccuuuu

SEQ ID NO: 2081343 - RNA, 19 nt, Human
aauuuuaagauuccuuuuc

SEQ ID NO: 2081344 - RNA, 18 nt, Human
aauuuuaaauaaaaguga

SEQ ID NO: 2081345 - RNA, 22 nt, Human
aauuuuaaauaaaagugaucaa

SEQ ID NO: 2081346 - RNA, 17 nt, Human
aauuuuaaauaaaagug

SEQ ID NO: 2081347 - RNA, 19 nt, Human
aauuuuaagugcuuuguaa

SEQ ID NO: 2081348 - RNA, 16 nt, Human
aauuuuuauuaugcau

SEQ ID NO: 2081349 - RNA, 17 nt, Human
aauuuuuauuaugcaua

SEQ ID NO: 2081350 - RNA, 19 nt, Human
aauuuuuauuaugcauaac

SEQ ID NO: 2081351 - RNA, 15 nt, Human
aauuuuucagaugcu

SEQ ID NO: 2081352 - RNA, 17 nt, Human
aauuuuuauuaaauuau

SEQ ID NO: 2081353 - RNA, 18 nt, Human
aauuuuuauuaaauuaug

SEQ ID NO: 2081354 - RNA, 16 nt, Human
aauuucucuacugucu

SEQ ID NO: 2081355 - RNA, 14 nt, Human
aauuucucuacaga

SEQ ID NO: 2081356 - RNA, 23 nt, Human
aauuucucuacagaugucccauu

SEQ ID NO: 2081357 - RNA, 14 nt, Human
aauuugaaauuuag

SEQ ID NO: 2081358 - RNA, 13 nt, Human
aauuugaaccaaa

SEQ ID NO: 2081359 - RNA, 16 nt, Human
aauuugaaccaaaaca

SEQ ID NO: 2081360 - RNA, 17 nt, Human
aauuugaaccaaaacau

SEQ ID NO: 2081361 - RNA, 23 nt, Human
aauuugaaccaaaacauuccguu

SEQ ID NO: 2081362 - RNA, 12 nt, Human
aauuugaaugaa

SEQ ID NO: 2081363 - RNA, 13 nt, Human
aauuugaaugaaa

SEQ ID NO: 2081364 - RNA, 14 nt, Human
aauuugaaugaaaa

SEQ ID NO: 2081365 - RNA, 15 nt, Human
aauuugaaugaaaaa

SEQ ID NO: 2081366 - RNA, 16 nt, Human
aauuugaaugaaaaau

SEQ ID NO: 2081367 - RNA, 21 nt, Human
aauuugauaguauugugcaua

SEQ ID NO: 2081368 - RNA, 20 nt, Human
aauuugauacauaugugaau

SEQ ID NO: 2081369 - RNA, 21 nt, Human
aauuugauacauaugugaaua

SEQ ID NO: 2081370 - RNA, 24 nt, Human
aauuugaguaaucugaucguucuu

SEQ ID NO: 2081371 - RNA, 20 nt, Human
aauuugaguuggaucaucua

SEQ ID NO: 2081372 - RNA, 16 nt, Human
aauuugaugaaagcug

SEQ ID NO: 2081373 - RNA, 17 nt, Human
aauuugaugaaagcuga

SEQ ID NO: 2081374 - RNA, 18 nt, Human
aauuugaucguuccaguu

SEQ ID NO: 2081375 - RNA, 16 nt, Human
aauuuaugaguuuuug

SEQ ID NO: 2081376 - RNA, 19 nt, Human
aauuuaugaguuuuugaua

SEQ ID NO: 2081377 - RNA, 20 nt, Human
aauuuaugaguuuuugauag

SEQ ID NO: 2081378 - RNA, 22 nt, Human
aauuucuaaaaaacagaggcca

SEQ ID NO: 2081379 - RNA, 17 nt, Human
aauuuagaaauauaauu

SEQ ID NO: 2081380 - RNA, 20 nt, Human
aauuuaucuugucucugggc

SEQ ID NO: 2081381 - RNA, 19 nt, Human
aauuuaucuugucucuggg

SEQ ID NO: 2081382 - RNA, 18 nt, Human
aauuuaucuugucucugg

SEQ ID NO: 2081383 - RNA, 19 nt, Human
aauugcuuaccaaaggaua

SEQ ID NO: 2081384 - RNA, 14 nt, Human
uacuguaaagaauu

SEQ ID NO: 2081385 - RNA, 14 nt, Human
aauugcucaaguuc

SEQ ID NO: 2081386 - RNA, 21 nt, Human
aauugcucaugcauaguccca

SEQ ID NO: 2081387 - RNA, 12 nt, Human
aauugcuccuug

SEQ ID NO: 2081388 - RNA, 22 nt, Human
aauuguuuggggaugagaaagg

SEQ ID NO: 2081389 - RNA, 20 nt, Human
aauuguuuaaguguuguaaa

SEQ ID NO: 2081390 - RNA, 15 nt, Human
aauuguuuaaguguu

SEQ ID NO: 2081391 - RNA, 20 nt, Human
aauuguuucaaaauaaaaac

SEQ ID NO: 2081392 - RNA, 13 nt, Human
aauugugugguca

SEQ ID NO: 2081393 - RNA, 21 nt, Human
aauuguguggucaguggcucu

SEQ ID NO: 2081394 - RNA, 12 nt, Human
aauuuaaaacaa

SEQ ID NO: 2081395 - RNA, 13 nt, Human
aauuuaaaacaaa

SEQ ID NO: 2081396 - RNA, 15 nt, Human
aauuuaaaacaaaca

SEQ ID NO: 2081397 - RNA, 16 nt, Human
aauuuaaaacaaacaa

SEQ ID NO: 2081398 - RNA, 14 nt, Human
aauuguuuuuuauc

SEQ ID NO: 2081399 - RNA, 17 nt, Human
aauuguuuuuuaucuuu

SEQ ID NO: 2081400 - RNA, 18 nt, Human
aauuguuuuuuaucuuuu

SEQ ID NO: 2081401 - RNA, 19 nt, Human
aauuguuuuuuaucuuuuc

SEQ ID NO: 2081402 - RNA, 22 nt, Human
aauuguuuuuuaucuuuucuac

SEQ ID NO: 2081403 - RNA, 14 nt, Human
aauuuaaaaaaaua

SEQ ID NO: 2081404 - RNA, 17 nt, Human
aauuuaaaaaaauacag

SEQ ID NO: 2081405 - RNA, 12 nt, Human
aauuuaaagcaa

SEQ ID NO: 2081406 - RNA, 12 nt, Human
aauuuaaaggcu

SEQ ID NO: 2081407 - RNA, 19 nt, Human
aauuuacauacucugcuua

SEQ ID NO: 2081408 - RNA, 19 nt, Human
aauuuaauucauguuucuu

SEQ ID NO: 2081409 - RNA, 23 nt, Human
aauuuaauucauguuucuuaaau

SEQ ID NO: 2081410 - RNA, 14 nt, Human
aauuuaaugcaugu

SEQ ID NO: 2081411 - RNA, 14 nt, Human
aauuuaauauagcu

SEQ ID NO: 2081412 - RNA, 21 nt, Human
aauuuaauuagggguugcuaa

SEQ ID NO: 2081413 - RNA, 18 nt, Human
aauuuaauucauguuucu

SEQ ID NO: 2081414 - RNA, 23 nt, Human
uacugacacuuugccagaaagca

SEQ ID NO: 2081415 - RNA, 17 nt, Human
uacugaagguaaaauug

SEQ ID NO: 2081416 - RNA, 19 nt, Human
uacuggugcagucauuaug

SEQ ID NO: 2081417 - RNA, 14 nt, Human
uacucuuguaagau

SEQ ID NO: 2081418 - RNA, 19 nt, Human
uacucuuguaagauuuuga

SEQ ID NO: 2081419 - RNA, 20 nt, Human
uacucuuguaagauuuugaa

SEQ ID NO: 2081420 - RNA, 21 nt, Human
uacucuuguaagauuuugaaa

SEQ ID NO: 2081421 - RNA, 23 nt, Human
uacucuuguaagauuuugaaaac

SEQ ID NO: 2081422 - RNA, 21 nt, Human
uacucugugucagguggggca

SEQ ID NO: 2081423 - RNA, 14 nt, Human
uacucuguuccuuc

SEQ ID NO: 2081424 - RNA, 19 nt, Human
uacucuguuccuucacauc

SEQ ID NO: 2081425 - RNA, 18 nt, Human
uacucuuaggaagagaaa

SEQ ID NO: 2081426 - RNA, 21 nt, Human
uacucuuaggaagagaaacca

SEQ ID NO: 2081427 - RNA, 14 nt, Human
uacguuaccaggca

SEQ ID NO: 2081428 - RNA, 18 nt, Human
uacgucaaacaugaagug

SEQ ID NO: 2081429 - RNA, 14 nt, Human
uacgucugacaggc

SEQ ID NO: 2081430 - RNA, 18 nt, Human
aauucuuuuuuaaauuuu

SEQ ID NO: 2081431 - RNA, 16 nt, Human
uacguaguguagauuu

SEQ ID NO: 2081432 - RNA, 13 nt, Human
uacguaugagacg

SEQ ID NO: 2081433 - RNA, 17 nt, Human
uacuagucuguguggga

SEQ ID NO: 2081434 - RNA, 19 nt, Human
uacuagucugugugggacu

SEQ ID NO: 2081435 - RNA, 23 nt, Human
uacuagucugugugggacuguac

SEQ ID NO: 2081436 - RNA, 14 nt, Human
uacuaguuacacau

SEQ ID NO: 2081437 - RNA, 19 nt, Human
uacuaguuacacaucuuca

SEQ ID NO: 2081438 - RNA, 22 nt, Human
uacuaguucagacacuuuggaa

SEQ ID NO: 2081439 - RNA, 16 nt, Human
uacuauguaucaauga

SEQ ID NO: 2081440 - RNA, 17 nt, Human
uacuauuaagcaguaaa

SEQ ID NO: 2081441 - RNA, 20 nt, Human
uacuauuaagcaguaaaaac

SEQ ID NO: 2081442 - RNA, 22 nt, Human
uacuauuaagcaguaaaaacug

SEQ ID NO: 2081443 - RNA, 19 nt, Human
uacucaagaggcugaggca

SEQ ID NO: 2081444 - RNA, 15 nt, Human
uacucaagaggcuga

SEQ ID NO: 2081445 - RNA, 18 nt, Human
aauucuucagguggaaaa

SEQ ID NO: 2081446 - RNA, 19 nt, Human
uaccauagcgcugcucuua

SEQ ID NO: 2081447 - RNA, 15 nt, Human
aauucuuacauguuu

SEQ ID NO: 2081448 - RNA, 16 nt, Human
aauucuuaaguauguu

SEQ ID NO: 2081449 - RNA, 13 nt, Human
aauucuuacaugu

SEQ ID NO: 2081450 - RNA, 17 nt, Human
aauucuuacaaacaugu

SEQ ID NO: 2081451 - RNA, 22 nt, Human
aauucuucaccuaagucucugu

SEQ ID NO: 2081452 - RNA, 23 nt, Human
aauucuucaccuaagucucugug

SEQ ID NO: 2081453 - RNA, 14 nt, Human
uacccuuaagcuag

SEQ ID NO: 2081454 - RNA, 20 nt, Human
uacccuuggcucaauccucu

SEQ ID NO: 2081455 - RNA, 18 nt, Human
uacccuucugugcccagc

SEQ ID NO: 2081456 - RNA, 19 nt, Human
uacccuucugugcccagcu

SEQ ID NO: 2081457 - RNA, 20 nt, Human
uacccuucugugcccagcuc

SEQ ID NO: 2081458 - RNA, 21 nt, Human
uacccuucugugcccagcuca

SEQ ID NO: 2081459 - RNA, 14 nt, Human
uacccuucuuucca

SEQ ID NO: 2081460 - RNA, 21 nt, Human
uacccuucuuuccauuucucu

SEQ ID NO: 2081461 - RNA, 22 nt, Human
uacccuucuuuccauuucucuc

SEQ ID NO: 2081462 - RNA, 22 nt, Human
aauugaacuuaaauaaauguca

SEQ ID NO: 2081463 - RNA, 12 nt, Human
aauugaaggaaa

SEQ ID NO: 2081464 - RNA, 13 nt, Human
aauugaaggaaag

SEQ ID NO: 2081465 - RNA, 14 nt, Human
aauugaaggaaaga

SEQ ID NO: 2081466 - RNA, 16 nt, Human
aauugaaggaaagauu

SEQ ID NO: 2081467 - RNA, 12 nt, Human
aauugaaauaua

SEQ ID NO: 2081468 - RNA, 22 nt, Human
aauugaaaggcauucucugaag

SEQ ID NO: 2081469 - RNA, 17 nt, Human
aauugaaaggcauucuc

SEQ ID NO: 2081470 - RNA, 21 nt, Human
aauugaaaggcauucucugaa

SEQ ID NO: 2081471 - RNA, 21 nt, Human
aauugaacuuaaauaaauguc

SEQ ID NO: 2081472 - RNA, 15 nt, Human
aauucuuguauauua

SEQ ID NO: 2081473 - RNA, 16 nt, Human
aauucuuguauauuau

SEQ ID NO: 2081474 - RNA, 20 nt, Human
aauucuuguauauuauggaa

SEQ ID NO: 2081475 - RNA, 13 nt, Human
aauucuuggaaua

SEQ ID NO: 2081476 - RNA, 15 nt, Human
aauucuuggaauacu

SEQ ID NO: 2081477 - RNA, 14 nt, Human
aauucuuguauauu

SEQ ID NO: 2081478 - RNA, 15 nt, Human
acagucuuguauuaa

SEQ ID NO: 2081479 - RNA, 18 nt, Human
acagucuuguauuaaguu

SEQ ID NO: 2081480 - RNA, 22 nt, Human
acagucuuguauuaaguuguua

SEQ ID NO: 2081481 - RNA, 14 nt, Human
acagucuuguauua

SEQ ID NO: 2081482 - RNA, 20 nt, Human
acagucucuuuaaucuucag

SEQ ID NO: 2081483 - RNA, 14 nt, Human
acagucucuuuaau

SEQ ID NO: 2081484 - RNA, 19 nt, Human
acagucucuuuaaucuuca

SEQ ID NO: 2081485 - RNA, 23 nt, Human
acaguccugggagaaccucaggc

SEQ ID NO: 2081486 - RNA, 21 nt, Human
acaguccugggagaaccucag

SEQ ID NO: 2081487 - RNA, 22 nt, Human
acaguccugggagaaccucagg

SEQ ID NO: 2081488 - RNA, 16 nt, Human
acaguuaacuuucaga

SEQ ID NO: 2081489 - RNA, 21 nt, Human
acaguuaaaugagaacaugaa

SEQ ID NO: 2081490 - RNA, 13 nt, Human
acaguuaacuuuc

SEQ ID NO: 2081491 - RNA, 14 nt, Human
acaguuaacuuuca

SEQ ID NO: 2081492 - RNA, 23 nt, Human
acaguguuucccauaauuuucuu

SEQ ID NO: 2081493 - RNA, 19 nt, Human
acaguguuucgacagcuga

SEQ ID NO: 2081494 - RNA, 9 nt, Human
acaguguuu

SEQ ID NO: 2081495 - RNA, 15 nt, Human
acaguguuucccaua

SEQ ID NO: 2081496 - RNA, 16 nt, Human
acaguguuucccauaa

SEQ ID NO: 2081497 - RNA, 18 nt, Human
acaguguuucccauaauu

SEQ ID NO: 2081498 - RNA, 22 nt, Human
acaguguuucccauaauuuucu

SEQ ID NO: 2081499 - RNA, 16 nt, Human
acaguguuauuuucuu

SEQ ID NO: 2081500 - RNA, 20 nt, Human
acaguguuauuuucuuugaa

SEQ ID NO: 2081501 - RNA, 22 nt, Human
acaguguuauuuucuuugaaau

SEQ ID NO: 2081502 - RNA, 17 nt, Human
acagugaaggcuguccu

SEQ ID NO: 2081503 - RNA, 15 nt, Human
acagugugguaguua

SEQ ID NO: 2081504 - RNA, 20 nt, Human
acagugugguaguuaauaaa

SEQ ID NO: 2081505 - RNA, 16 nt, Human
acagggcagagccggg

SEQ ID NO: 2081506 - RNA, 22 nt, Human
acagggcacaccgggcacucag

SEQ ID NO: 2081507 - RNA, 17 nt, Human
acaggcugggcuucagu

SEQ ID NO: 2081508 - RNA, 14 nt, Human
acaggcugggcuuc

SEQ ID NO: 2081509 - RNA, 21 nt, Human
acaggcugggcuucaguggca

SEQ ID NO: 2081510 - RNA, 22 nt, Human
acaguaugguaacuuugcaaau

SEQ ID NO: 2081511 - RNA, 23 nt, Human
acaguaugguaacuuugcaaaug

SEQ ID NO: 2081512 - RNA, 14 nt, Human
acaguaacuugguu

SEQ ID NO: 2081513 - RNA, 15 nt, Human
acaguaacuugguua

SEQ ID NO: 2081514 - RNA, 17 nt, Human
acaguaacuugguuaua

SEQ ID NO: 2081515 - RNA, 20 nt, Human
acaguaacuugguuauacau

SEQ ID NO: 2081516 - RNA, 19 nt, Human
acaguauuacuucugcuac

SEQ ID NO: 2081517 - RNA, 17 nt, Human
acaguauuacuucugcu

SEQ ID NO: 2081518 - RNA, 16 nt, Human
acaguauuacuucugc

SEQ ID NO: 2081519 - RNA, 15 nt, Human
acaguauuacuucug

SEQ ID NO: 2081520 - RNA, 16 nt, Human
acagucaaaacagaga

SEQ ID NO: 2081521 - RNA, 17 nt, Human
acagucaaaacagagau

SEQ ID NO: 2081522 - RNA, 17 nt, Human
acagucaaggaguggcu

SEQ ID NO: 2081523 - RNA, 18 nt, Human
acagucaaggaguggcuu

SEQ ID NO: 2081524 - RNA, 14 nt, Human
acaguauucuguac

SEQ ID NO: 2081525 - RNA, 17 nt, Human
acaguauucuguaccau

SEQ ID NO: 2081526 - RNA, 14 nt, Human
acaguauuuuccca

SEQ ID NO: 2081527 - RNA, 12 nt, Human
acaguccuggga

SEQ ID NO: 2081528 - RNA, 18 nt, Human
acagucaaaacagagaug

SEQ ID NO: 2081529 - RNA, 12 nt, Human
uauuaaaaaugg

SEQ ID NO: 2081530 - RNA, 14 nt, Human
uauuaaaaauggua

SEQ ID NO: 2081531 - RNA, 15 nt, Human
uauuaaaaaugguaa

SEQ ID NO: 2081532 - RNA, 20 nt, Human
uauuaaaaaugguaaaauug

SEQ ID NO: 2081533 - RNA, 23 nt, Human
uauuaaaaauuggcuaguugaau

SEQ ID NO: 2081534 - RNA, 12 nt, Human
uauuaaagacag

SEQ ID NO: 2081535 - RNA, 13 nt, Human
uauuacauaaaua

SEQ ID NO: 2081536 - RNA, 14 nt, Human
uauuacauaaauaa

SEQ ID NO: 2081537 - RNA, 18 nt, Human
uauuacauccuuguggca

SEQ ID NO: 2081538 - RNA, 23 nt, Human
uauuacauccuuguggcacauuu

SEQ ID NO: 2081539 - RNA, 12 nt, Human
uauuacaucuuu

SEQ ID NO: 2081540 - RNA, 17 nt, Human
uauuacaucuuucacau

SEQ ID NO: 2081541 - RNA, 19 nt, Human
uauguuuuaagaggcaggg

SEQ ID NO: 2081542 - RNA, 17 nt, Human
uauguuuuaagaggcag

SEQ ID NO: 2081543 - RNA, 14 nt, Human
uauguuuuagcaug

SEQ ID NO: 2081544 - RNA, 16 nt, Human
uauguuuuagcaugug

SEQ ID NO: 2081545 - RNA, 18 nt, Human
uauguuuuagcauguguu

SEQ ID NO: 2081546 - RNA, 12 nt, Human
uaugugugugua

SEQ ID NO: 2081547 - RNA, 13 nt, Human
uauguguguguau

SEQ ID NO: 2081548 - RNA, 19 nt, Human
uauguguguguaugcuacu

SEQ ID NO: 2081549 - RNA, 19 nt, Human
uauguguguguauguuugc

SEQ ID NO: 2081550 - RNA, 12 nt, Human
uauguguguaua

SEQ ID NO: 2081551 - RNA, 19 nt, Human
uauguguguauauguaugu

SEQ ID NO: 2081552 - RNA, 12 nt, Human
uauguguguaug

SEQ ID NO: 2081553 - RNA, 21 nt, Human
uauguguguaugggugugugu

SEQ ID NO: 2081554 - RNA, 14 nt, Human
acagcucccucugc

SEQ ID NO: 2081555 - RNA, 17 nt, Human
acagcucccucugccug

SEQ ID NO: 2081556 - RNA, 18 nt, Human
acagcucccaccccaccc

SEQ ID NO: 2081557 - RNA, 22 nt, Human
acagcucccaccccacccccuu

SEQ ID NO: 2081558 - RNA, 16 nt, Human
acagcucccucugccu

SEQ ID NO: 2081559 - RNA, 21 nt, Human
uauucacgugcagcagcaaca

SEQ ID NO: 2081560 - RNA, 23 nt, Human
uauucacgugcagcagcaacaca

SEQ ID NO: 2081561 - RNA, 21 nt, Human
uauucacugaaguucuccuga

SEQ ID NO: 2081562 - RNA, 17 nt, Human
uauucaagaaagccagu

SEQ ID NO: 2081563 - RNA, 19 nt, Human
uauucaagaaagccagucu

SEQ ID NO: 2081564 - RNA, 20 nt, Human
uauucaagaaagccagucuu

SEQ ID NO: 2081565 - RNA, 22 nt, Human
uauucaagaaagccagucuuaa

SEQ ID NO: 2081566 - RNA, 23 nt, Human
uauucaagaaagccagucuuaac

SEQ ID NO: 2081567 - RNA, 10 nt, Human
uauucaaggu

SEQ ID NO: 2081568 - RNA, 11 nt, Human
uauucaaggua

SEQ ID NO: 2081569 - RNA, 19 nt, Human
uauucaagguaaaauucua

SEQ ID NO: 2081570 - RNA, 20 nt, Human
uauucaagguaaaauucuaa

SEQ ID NO: 2081571 - RNA, 21 nt, Human
uauucaagguaaaauucuaaa

SEQ ID NO: 2081572 - RNA, 16 nt, Human
uauuagacuuuagaaa

SEQ ID NO: 2081573 - RNA, 12 nt, Human
uauuagagaaga

SEQ ID NO: 2081574 - RNA, 19 nt, Human
uauuaccucugauaccuca

SEQ ID NO: 2081575 - RNA, 14 nt, Human
uauuaccucugaua

SEQ ID NO: 2081576 - RNA, 13 nt, Human
uauuaaagggggg

SEQ ID NO: 2081577 - RNA, 20 nt, Human
uauuaccacugaagauagaa

SEQ ID NO: 2081578 - RNA, 13 nt, Human
uauuaccucugau

SEQ ID NO: 2081579 - RNA, 11 nt, Human
uauuaccucug

SEQ ID NO: 2081580 - RNA, 21 nt, Human
uauuagccagguaaugugaau

SEQ ID NO: 2081581 - RNA, 15 nt, Human
uauuagccacaaaau

SEQ ID NO: 2081582 - RNA, 23 nt, Human
uauuagccacaaaauugggaaag

SEQ ID NO: 2081583 - RNA, 11 nt, Human
uauuguacagu

SEQ ID NO: 2081584 - RNA, 12 nt, Human
uauuguaagaua

SEQ ID NO: 2081585 - RNA, 12 nt, Human
uauuguacaguu

SEQ ID NO: 2081586 - RNA, 13 nt, Human
uauuguacaguuu

SEQ ID NO: 2081587 - RNA, 14 nt, Human
uauuguacaguuuu

SEQ ID NO: 2081588 - RNA, 15 nt, Human
uauuguacaguuuuu

SEQ ID NO: 2081589 - RNA, 17 nt, Human
uauuguacaguuuuuau

SEQ ID NO: 2081590 - RNA, 14 nt, Human
uauuguaccucucu

SEQ ID NO: 2081591 - RNA, 13 nt, Human
uauuguaccucuc

SEQ ID NO: 2081592 - RNA, 11 nt, Human
uauuguaccuc

SEQ ID NO: 2081593 - RNA, 16 nt, Human
uauuguacguuuaaag

SEQ ID NO: 2081594 - RNA, 20 nt, Human
uauuuaagauaguuuugcca

SEQ ID NO: 2081595 - RNA, 16 nt, Human
uauuuaagcuuauguc

SEQ ID NO: 2081596 - RNA, 14 nt, Human
uauuuaaggagaug

SEQ ID NO: 2081597 - RNA, 22 nt, Human
uauuuaaggagauguaagagcu

SEQ ID NO: 2081598 - RNA, 23 nt, Human
uauuuaaggagauguaagagcuu

SEQ ID NO: 2081599 - RNA, 15 nt, Human
uauuuaaguauucaa

SEQ ID NO: 2081600 - RNA, 16 nt, Human
uauuuaaguauucaag

SEQ ID NO: 2081601 - RNA, 18 nt, Human
uauuuaaguauucaagaa

SEQ ID NO: 2081602 - RNA, 21 nt, Human
uauuuaaguauucaagaaagc

SEQ ID NO: 2081603 - RNA, 15 nt, Human
uauuuaaugaaagac

SEQ ID NO: 2081604 - RNA, 21 nt, Human
uauuuaaugaaagacuguaca

SEQ ID NO: 2081605 - RNA, 16 nt, Human
uauugucagauauuuu

SEQ ID NO: 2081606 - RNA, 15 nt, Human
uauugugaaguacau

SEQ ID NO: 2081607 - RNA, 17 nt, Human
uauugugaaguacauau

SEQ ID NO: 2081608 - RNA, 19 nt, Human
uauugugaaguacauauua

SEQ ID NO: 2081609 - RNA, 13 nt, Human
uauuuaagaaaau

SEQ ID NO: 2081610 - RNA, 14 nt, Human
uauuuaagaaaaua

SEQ ID NO: 2081611 - RNA, 19 nt, Human
uauuuaagaaaauacaaua

SEQ ID NO: 2081612 - RNA, 20 nt, Human
uauuuaagaaaauacaauaa

SEQ ID NO: 2081613 - RNA, 21 nt, Human
uauuuaagaaaauacaauaaa

SEQ ID NO: 2081614 - RNA, 22 nt, Human
uauuuaagaaaauacaauaaac

SEQ ID NO: 2081615 - RNA, 17 nt, Human
uauuuagauuguuaaaa

SEQ ID NO: 2081616 - RNA, 19 nt, Human
uauuuagauuguuaaaaua

SEQ ID NO: 2081617 - RNA, 18 nt, Human
uauuuacuucuuauacau

SEQ ID NO: 2081618 - RNA, 22 nt, Human
uauuuacugagcuucucuguga

SEQ ID NO: 2081619 - RNA, 21 nt, Human
uauuuacugagcuucucugug

SEQ ID NO: 2081620 - RNA, 23 nt, Human
uauuuacugagcuucucugugaa

SEQ ID NO: 2081621 - RNA, 19 nt, Human
uauuuacuucguuuugguu

SEQ ID NO: 2081622 - RNA, 19 nt, Human
uauuuacugagcuucucug

SEQ ID NO: 2081623 - RNA, 16 nt, Human
uauuuacugagcuucu

SEQ ID NO: 2081624 - RNA, 14 nt, Human
uauuuacugagcuu

SEQ ID NO: 2081625 - RNA, 17 nt, Human
uauuuacauaugaaauu

SEQ ID NO: 2081626 - RNA, 21 nt, Human
uauuuacauaugaaauuuaau

SEQ ID NO: 2081627 - RNA, 14 nt, Human
uauuuacauaugaa

SEQ ID NO: 2081628 - RNA, 16 nt, Human
uauuuacauaugaaau

SEQ ID NO: 2081629 - RNA, 23 nt, Human
uauuuaauuuuuuugagacagag

SEQ ID NO: 2081630 - RNA, 13 nt, Human
uauuuaauuguaa

SEQ ID NO: 2081631 - RNA, 14 nt, Human
uauuuaauuguaaa

SEQ ID NO: 2081632 - RNA, 15 nt, Human
uauuuaauuguaaac

SEQ ID NO: 2081633 - RNA, 16 nt, Human
uauuuaauuguaaacu

SEQ ID NO: 2081634 - RNA, 17 nt, Human
uauuuaauuguaaacug

SEQ ID NO: 2081635 - RNA, 18 nt, Human
uauuuaauuguaaacugu

SEQ ID NO: 2081636 - RNA, 20 nt, Human
uauuuaauuguaaacuguac

SEQ ID NO: 2081637 - RNA, 15 nt, Human
uauuuaauguuaugu

SEQ ID NO: 2081638 - RNA, 21 nt, Human
uauuuagcaugacaagcccca

SEQ ID NO: 2081639 - RNA, 11 nt, Human
uauuuagcaug

SEQ ID NO: 2081640 - RNA, 22 nt, Human
uauuuagauuguuaaaauaacu

SEQ ID NO: 2081641 - RNA, 13 nt, Human
uauuuauuuaaau

SEQ ID NO: 2081642 - RNA, 17 nt, Human
uauuuagggaacugcuu

SEQ ID NO: 2081643 - RNA, 18 nt, Human
uauuuagggaacugcuug

SEQ ID NO: 2081644 - RNA, 17 nt, Human
uauuuaggcagauugaa

SEQ ID NO: 2081645 - RNA, 13 nt, Human
uauuuauuuacug

SEQ ID NO: 2081646 - RNA, 17 nt, Human
uauuuauuuacugagcu

SEQ ID NO: 2081647 - RNA, 13 nt, Human
uauuuauuuaugg

SEQ ID NO: 2081648 - RNA, 14 nt, Human
uauuuauuuaugga

SEQ ID NO: 2081649 - RNA, 14 nt, Human
uauuuauuuaaauu

SEQ ID NO: 2081650 - RNA, 16 nt, Human
uauuuauuuaagcuua

SEQ ID NO: 2081651 - RNA, 14 nt, Human
uauuucaaaaauuu

SEQ ID NO: 2081652 - RNA, 15 nt, Human
uauuucaaaaauuug

SEQ ID NO: 2081653 - RNA, 16 nt, Human
uauuucaaaaauuugg

SEQ ID NO: 2081654 - RNA, 17 nt, Human
uauuucaaaaauuugga

SEQ ID NO: 2081655 - RNA, 20 nt, Human
uauuucaaaaauuuggaauu

SEQ ID NO: 2081656 - RNA, 21 nt, Human
uauuucaaaaauuuggaauuc

SEQ ID NO: 2081657 - RNA, 22 nt, Human
uauuucaaaaauuuggaauucu

SEQ ID NO: 2081658 - RNA, 20 nt, Human
uauuucaaaauauacauuca

SEQ ID NO: 2081659 - RNA, 17 nt, Human
uauuuauuuuccucccc

SEQ ID NO: 2081660 - RNA, 18 nt, Human
uauuuauuuuccucccca

SEQ ID NO: 2081661 - RNA, 22 nt, Human
uauuucaauuuccaagagcuga

SEQ ID NO: 2081662 - RNA, 17 nt, Human
uauucuggcugauaaaa

SEQ ID NO: 2081663 - RNA, 21 nt, Human
uauucuggcugauaaaagaua

SEQ ID NO: 2081664 - RNA, 12 nt, Human
uauucucuuugg

SEQ ID NO: 2081665 - RNA, 13 nt, Human
uauucucuuuggu

SEQ ID NO: 2081666 - RNA, 20 nt, Human
uauucugccuuugcagaaac

SEQ ID NO: 2081667 - RNA, 15 nt, Human
uauucuuauuuaaug

SEQ ID NO: 2081668 - RNA, 16 nt, Human
uauucuguuggccagu

SEQ ID NO: 2081669 - RNA, 13 nt, Human
acaguuccuucag

SEQ ID NO: 2081670 - RNA, 18 nt, Human
acaguuccucgcccuggg

SEQ ID NO: 2081671 - RNA, 19 nt, Human
acaguuccucgcccugggu

SEQ ID NO: 2081672 - RNA, 20 nt, Human
acaguucaauucucauuugu

SEQ ID NO: 2081673 - RNA, 22 nt, Human
acaguuaggguugaguuacuuc

SEQ ID NO: 2081674 - RNA, 12 nt, Human
acaguuccucgc

SEQ ID NO: 2081675 - RNA, 14 nt, Human
acaguuccucgccc

SEQ ID NO: 2081676 - RNA, 15 nt, Human
acaguuccucgcccu

SEQ ID NO: 2081677 - RNA, 16 nt, Human
acaguuccucgcccug

SEQ ID NO: 2081678 - RNA, 13 nt, Human
uauuguaaauaca

SEQ ID NO: 2081679 - RNA, 16 nt, Human
uauuguaaauacaagu

SEQ ID NO: 2081680 - RNA, 13 nt, Human
uauugguccagcu

SEQ ID NO: 2081681 - RNA, 22 nt, Human
uauugguccagcuugcucuuca

SEQ ID NO: 2081682 - RNA, 18 nt, Human
uauuggguucauuauugg

SEQ ID NO: 2081683 - RNA, 20 nt, Human
uauuggguucauuauuggaa

SEQ ID NO: 2081684 - RNA, 14 nt, Human
uauuggguucauua

SEQ ID NO: 2081685 - RNA, 16 nt, Human
uauuggguucauuauu

SEQ ID NO: 2081686 - RNA, 14 nt, Human
uauugagacaaaaa

SEQ ID NO: 2081687 - RNA, 15 nt, Human
uauugagacaaaaau

SEQ ID NO: 2081688 - RNA, 17 nt, Human
uauugagacaaaaauua

SEQ ID NO: 2081689 - RNA, 18 nt, Human
uauugagaauuuuaaauu

SEQ ID NO: 2081690 - RNA, 15 nt, Human
uauugaaaaaaauug

SEQ ID NO: 2081691 - RNA, 13 nt, Human
uauugaaaaaaau

SEQ ID NO: 2081692 - RNA, 18 nt, Human
uauugaacuuggaaagaa

SEQ ID NO: 2081693 - RNA, 12 nt, Human
uauucuugugaa

SEQ ID NO: 2081694 - RNA, 14 nt, Human
uauucuugugaaua

SEQ ID NO: 2081695 - RNA, 15 nt, Human
uauucuugugaauau

SEQ ID NO: 2081696 - RNA, 22 nt, Human
uauucuugugaauauguacaua

SEQ ID NO: 2081697 - RNA, 17 nt, Human
uauugacaucagcauca

SEQ ID NO: 2081698 - RNA, 18 nt, Human
uauugacaucagcaucac

SEQ ID NO: 2081699 - RNA, 13 nt, Human
uauugacaauaau

SEQ ID NO: 2081700 - RNA, 17 nt, Human
uauugacaauaauuuca

SEQ ID NO: 2081701 - RNA, 18 nt, Human
uauugacaauaauuucag

SEQ ID NO: 2081702 - RNA, 14 nt, Human
uauugacaaacucu

SEQ ID NO: 2081703 - RNA, 15 nt, Human
uauugacaaacucuc

SEQ ID NO: 2081704 - RNA, 16 nt, Human
acaccgggccuggaga

SEQ ID NO: 2081705 - RNA, 18 nt, Human
acaccguucauucaggca

SEQ ID NO: 2081706 - RNA, 21 nt, Human
acaccuacucuaucagagaaa

SEQ ID NO: 2081707 - RNA, 14 nt, Human
acaccuagaucaga

SEQ ID NO: 2081708 - RNA, 15 nt, Human
acaccuagcaucuca

SEQ ID NO: 2081709 - RNA, 18 nt, Human
acaccaggcugugggccu

SEQ ID NO: 2081710 - RNA, 21 nt, Human
acacccagcccacuucugcca

SEQ ID NO: 2081711 - RNA, 20 nt, Human
acacccagcccacuucugcc

SEQ ID NO: 2081712 - RNA, 19 nt, Human
acacccagcccacuucugc

SEQ ID NO: 2081713 - RNA, 21 nt, Human
acaccaggcuugccugcaggc

SEQ ID NO: 2081714 - RNA, 12 nt, Human
acaccaggcugu

SEQ ID NO: 2081715 - RNA, 14 nt, Human
acaccaggcugugg

SEQ ID NO: 2081716 - RNA, 13 nt, Human
acacaucuuccac

SEQ ID NO: 2081717 - RNA, 13 nt, Human
acacaucuucccu

SEQ ID NO: 2081718 - RNA, 14 nt, Human
acacaucuucccua

SEQ ID NO: 2081719 - RNA, 15 nt, Human
acacaucuucccuag

SEQ ID NO: 2081720 - RNA, 19 nt, Human
acaccaggagucccuggua

SEQ ID NO: 2081721 - RNA, 17 nt, Human
acaccaggagucccugg

SEQ ID NO: 2081722 - RNA, 20 nt, Human
acaccagccuuucucccagg

SEQ ID NO: 2081723 - RNA, 23 nt, Human
uaguuuucauacacagccugggc

SEQ ID NO: 2081724 - RNA, 15 nt, Human
acacaucuucaacag

SEQ ID NO: 2081725 - RNA, 14 nt, Human
acacaucuccucca

SEQ ID NO: 2081726 - RNA, 12 nt, Human
acacaucuccuc

SEQ ID NO: 2081727 - RNA, 20 nt, Human
acaagcuuuuuuacacaaau

SEQ ID NO: 2081728 - RNA, 11 nt, Human
acaagcugccu

SEQ ID NO: 2081729 - RNA, 13 nt, Human
acaagcugccucc

SEQ ID NO: 2081730 - RNA, 16 nt, Human
acaagcugccucccug

SEQ ID NO: 2081731 - RNA, 17 nt, Human
acaagcuaggugcuaau

SEQ ID NO: 2081732 - RNA, 22 nt, Human
acaagcuaggugcuaauuaaua

SEQ ID NO: 2081733 - RNA, 19 nt, Human
acaagcugcacccucaggc

SEQ ID NO: 2081734 - RNA, 21 nt, Human
acaagcugcacccucaggcag

SEQ ID NO: 2081735 - RNA, 22 nt, Human
acaagcugcacccucaggcagg

SEQ ID NO: 2081736 - RNA, 23 nt, Human
acaagcugcacccucaggcaggu

SEQ ID NO: 2081737 - RNA, 18 nt, Human
uaguccaaugucuuuuua

SEQ ID NO: 2081738 - RNA, 13 nt, Human
uagucauuuugcu

SEQ ID NO: 2081739 - RNA, 22 nt, Human
uaguccaaugucuuuuuaagcu

SEQ ID NO: 2081740 - RNA, 14 nt, Human
uagucauagaagaa

SEQ ID NO: 2081741 - RNA, 15 nt, Human
uagucauagaagaac

SEQ ID NO: 2081742 - RNA, 17 nt, Human
uagucugugugcugugg

SEQ ID NO: 2081743 - RNA, 22 nt, Human
uagucugugugggacuguacac

SEQ ID NO: 2081744 - RNA, 12 nt, Human
uagucugguuuc

SEQ ID NO: 2081745 - RNA, 13 nt, Human
uagucugguuucu

SEQ ID NO: 2081746 - RNA, 18 nt, Human
uagucugugugaagguga

SEQ ID NO: 2081747 - RNA, 15 nt, Human
uaguucuauuucuau

SEQ ID NO: 2081748 - RNA, 20 nt, Human
uaguucuauuucuaucccaa

SEQ ID NO: 2081749 - RNA, 13 nt, Human
uagugagaagaau

SEQ ID NO: 2081750 - RNA, 15 nt, Human
uagugagaagaauau

SEQ ID NO: 2081751 - RNA, 16 nt, Human
uagugagaagaauauu

SEQ ID NO: 2081752 - RNA, 18 nt, Human
uagugagaagaauauugu

SEQ ID NO: 2081753 - RNA, 19 nt, Human
uagugagaagaauauuguu

SEQ ID NO: 2081754 - RNA, 15 nt, Human
uagugagaccccugu

SEQ ID NO: 2081755 - RNA, 18 nt, Human
uagugagaccccugucuc

SEQ ID NO: 2081756 - RNA, 17 nt, Human
uagugaucugaacagaa

SEQ ID NO: 2081757 - RNA, 18 nt, Human
uagugaucugaacagaaa

SEQ ID NO: 2081758 - RNA, 20 nt, Human
uaguuccucauuagcauuuu

SEQ ID NO: 2081759 - RNA, 23 nt, Human
uaguucccugaaaacccagagag

SEQ ID NO: 2081760 - RNA, 16 nt, Human
uaguuaggaaauaaaa

SEQ ID NO: 2081761 - RNA, 18 nt, Human
uaguuaggaaauaaaacc

SEQ ID NO: 2081762 - RNA, 21 nt, Human
uaguuaggaaauaaaaccuuu

SEQ ID NO: 2081763 - RNA, 22 nt, Human
uaguuaggaaauaaaaccuuuc

SEQ ID NO: 2081764 - RNA, 23 nt, Human
uaguuaggaaauaaaaccuuuca

SEQ ID NO: 2081765 - RNA, 15 nt, Human
uaguuaguagcaugu

SEQ ID NO: 2081766 - RNA, 16 nt, Human
uaguuaguagcauguu

SEQ ID NO: 2081767 - RNA, 20 nt, Human
uauagccuaggugacagagu

SEQ ID NO: 2081768 - RNA, 13 nt, Human
uauagcaauccau

SEQ ID NO: 2081769 - RNA, 16 nt, Human
uauagcuacaggaagc

SEQ ID NO: 2081770 - RNA, 22 nt, Human
uauagcuacaggaagcacccca

SEQ ID NO: 2081771 - RNA, 12 nt, Human
uauagcuauuuu

SEQ ID NO: 2081772 - RNA, 13 nt, Human
uauagcuauuuuu

SEQ ID NO: 2081773 - RNA, 12 nt, Human
uauauauacaua

SEQ ID NO: 2081774 - RNA, 13 nt, Human
uauauauacauaa

SEQ ID NO: 2081775 - RNA, 19 nt, Human
uauauauacauaacagggu

SEQ ID NO: 2081776 - RNA, 12 nt, Human
uauauauagaau

SEQ ID NO: 2081777 - RNA, 13 nt, Human
uauauauagaauc

SEQ ID NO: 2081778 - RNA, 14 nt, Human
uauauccauguacu

SEQ ID NO: 2081779 - RNA, 15 nt, Human
uauauccauguacug

SEQ ID NO: 2081780 - RNA, 16 nt, Human
uauauccauguacugu

SEQ ID NO: 2081781 - RNA, 17 nt, Human
uauauccauguacugua

SEQ ID NO: 2081782 - RNA, 18 nt, Human
uauauccauguacuguag

SEQ ID NO: 2081783 - RNA, 19 nt, Human
uauauccauguacuguagu

SEQ ID NO: 2081784 - RNA, 14 nt, Human
acacuccaucagcu

SEQ ID NO: 2081785 - RNA, 16 nt, Human
uauacaguuuuaaaga

SEQ ID NO: 2081786 - RNA, 19 nt, Human
uauacaguuuuaaagaauc

SEQ ID NO: 2081787 - RNA, 22 nt, Human
uauacaguuuuccuaaauguau

SEQ ID NO: 2081788 - RNA, 14 nt, Human
uauacauuugauaa

SEQ ID NO: 2081789 - RNA, 17 nt, Human
uauaccagcaauauauc

SEQ ID NO: 2081790 - RNA, 21 nt, Human
uauacacuuacacuuuaugca

SEQ ID NO: 2081791 - RNA, 16 nt, Human
uauacaguacaguggu

SEQ ID NO: 2081792 - RNA, 22 nt, Human
uauacaguagugagaagaauau

SEQ ID NO: 2081793 - RNA, 23 nt, Human
uauacaguagugagaagaauauu

SEQ ID NO: 2081794 - RNA, 12 nt, Human
uauacacacagc

SEQ ID NO: 2081795 - RNA, 19 nt, Human
uauacacacacaaagagag

SEQ ID NO: 2081796 - RNA, 20 nt, Human
uauacacacacaaagagagu

SEQ ID NO: 2081797 - RNA, 13 nt, Human
uauacaagauaag

SEQ ID NO: 2081798 - RNA, 17 nt, Human
uauacaagauaagcuuc

SEQ ID NO: 2081799 - RNA, 19 nt, Human
uauacaagauaagcuucca

SEQ ID NO: 2081800 - RNA, 20 nt, Human
uauacaagauaagcuuccag

SEQ ID NO: 2081801 - RNA, 15 nt, Human
uauacaauaacauaa

SEQ ID NO: 2081802 - RNA, 10 nt, Human
acaccucaga

SEQ ID NO: 2081803 - RNA, 12 nt, Human
acaccucagagc

SEQ ID NO: 2081804 - RNA, 18 nt, Human
acaccucagagccccgca

SEQ ID NO: 2081805 - RNA, 18 nt, Human
acaccucaguucccuugg

SEQ ID NO: 2081806 - RNA, 21 nt, Human
acaccucaguucccuuggccu

SEQ ID NO: 2081807 - RNA, 15 nt, Human
acaccuauuuuagac

SEQ ID NO: 2081808 - RNA, 22 nt, Human
acaccuauuuuagacaaaucua

SEQ ID NO: 2081809 - RNA, 17 nt, Human
acaccuacccuccuuuu

SEQ ID NO: 2081810 - RNA, 22 nt, Human
acaccucaguucccuuggccuc

SEQ ID NO: 2081811 - RNA, 23 nt, Human
acaccucaguucccuuggccuca

SEQ ID NO: 2081812 - RNA, 19 nt, Human
uauaaccaacuuuucuauu

SEQ ID NO: 2081813 - RNA, 15 nt, Human
uauaaccaauguuua

SEQ ID NO: 2081814 - RNA, 16 nt, Human
uauaaccaauguuuaa

SEQ ID NO: 2081815 - RNA, 17 nt, Human
uauaaccaauguuuaaa

SEQ ID NO: 2081816 - RNA, 21 nt, Human
uauaaccaauguuuaaaaaag

SEQ ID NO: 2081817 - RNA, 20 nt, Human
acaccucccacccccuguau

SEQ ID NO: 2081818 - RNA, 16 nt, Human
uauaagcauggagaac

SEQ ID NO: 2081819 - RNA, 18 nt, Human
uauaauuuuaagauuccu

SEQ ID NO: 2081820 - RNA, 20 nt, Human
uauaauuuuaagauuccuuu

SEQ ID NO: 2081821 - RNA, 17 nt, Human
uauaauuuuaugaaugu

SEQ ID NO: 2081822 - RNA, 22 nt, Human
uauaauuuuaugaaugucuuug

SEQ ID NO: 2081823 - RNA, 21 nt, Human
uauaacagugugguaguuaau

SEQ ID NO: 2081824 - RNA, 21 nt, Human
acagacagagaaggcagcagg

SEQ ID NO: 2081825 - RNA, 14 nt, Human
uauauugcaaugaa

SEQ ID NO: 2081826 - RNA, 14 nt, Human
uauauugagacaaa

SEQ ID NO: 2081827 - RNA, 19 nt, Human
uauauugagacaaaaauua

SEQ ID NO: 2081828 - RNA, 15 nt, Human
uaucaaguggcaugu

SEQ ID NO: 2081829 - RNA, 17 nt, Human
uaucaaguggcaugugc

SEQ ID NO: 2081830 - RNA, 18 nt, Human
uaucaaguggcaugugcu

SEQ ID NO: 2081831 - RNA, 13 nt, Human
uaucacauuauuu

SEQ ID NO: 2081832 - RNA, 18 nt, Human
uaucacugaagcuuuuua

SEQ ID NO: 2081833 - RNA, 18 nt, Human
uaucacugacacaaaaag

SEQ ID NO: 2081834 - RNA, 19 nt, Human
uaucaauaaauagaccauu

SEQ ID NO: 2081835 - RNA, 16 nt, Human
uaucacacaaagcaga

SEQ ID NO: 2081836 - RNA, 13 nt, Human
uaucaaucauuuu

SEQ ID NO: 2081837 - RNA, 14 nt, Human
uaucaaucauuuuc

SEQ ID NO: 2081838 - RNA, 13 nt, Human
uaucacacuucug

SEQ ID NO: 2081839 - RNA, 17 nt, Human
uaucacacuucugugag

SEQ ID NO: 2081840 - RNA, 23 nt, Human
acagacacaggcccggcuccagg

SEQ ID NO: 2081841 - RNA, 16 nt, Human
acacuccaucagcuua

SEQ ID NO: 2081842 - RNA, 15 nt, Human
acacuccccugcacu

SEQ ID NO: 2081843 - RNA, 17 nt, Human
acacuccccugcacugg

SEQ ID NO: 2081844 - RNA, 16 nt, Human
acagacagacacacac

SEQ ID NO: 2081845 - RNA, 16 nt, Human
acagacuauugacauc

SEQ ID NO: 2081846 - RNA, 19 nt, Human
acagacuauugacaucagc

SEQ ID NO: 2081847 - RNA, 14 nt, Human
acagacuggaagca

SEQ ID NO: 2081848 - RNA, 13 nt, Human
uauauucucuuug

SEQ ID NO: 2081849 - RNA, 14 nt, Human
uauauucucuuugg

SEQ ID NO: 2081850 - RNA, 22 nt, Human
uauauucucuuugguguacaaa

SEQ ID NO: 2081851 - RNA, 20 nt, Human
uaucuagugcagcugauuuu

SEQ ID NO: 2081852 - RNA, 23 nt, Human
uaucuagugcagcugauuuuaac

SEQ ID NO: 2081853 - RNA, 14 nt, Human
uaucuagugcagcu

SEQ ID NO: 2081854 - RNA, 19 nt, Human
uaucuagugcagcugauuu

SEQ ID NO: 2081855 - RNA, 10 nt, Human
uaucagaauu

SEQ ID NO: 2081856 - RNA, 17 nt, Human
uauccaugggggcaggg

SEQ ID NO: 2081857 - RNA, 18 nt, Human
uauccaugggggcagggc

SEQ ID NO: 2081858 - RNA, 19 nt, Human
uauccaugggggcagggca

SEQ ID NO: 2081859 - RNA, 20 nt, Human
uauccaugggggcagggcau

SEQ ID NO: 2081860 - RNA, 13 nt, Human
uauccauguacug

SEQ ID NO: 2081861 - RNA, 14 nt, Human
uauccauguacugu

SEQ ID NO: 2081862 - RNA, 15 nt, Human
uauccauguacugua

SEQ ID NO: 2081863 - RNA, 16 nt, Human
uauccauguacuguag

SEQ ID NO: 2081864 - RNA, 22 nt, Human
uauccauguacuguaguuuuuc

SEQ ID NO: 2081865 - RNA, 18 nt, Human
uauccauguacuguaguu

SEQ ID NO: 2081866 - RNA, 21 nt, Human
acagagugagacucugucuca

SEQ ID NO: 2081867 - RNA, 21 nt, Human
acagagcgagagucugucuca

SEQ ID NO: 2081868 - RNA, 18 nt, Human
acagaguggucuuucugg

SEQ ID NO: 2081869 - RNA, 19 nt, Human
acagaguggucuuucugga

SEQ ID NO: 2081870 - RNA, 21 nt, Human
acagaguggucuuucuggaga

SEQ ID NO: 2081871 - RNA, 24 nt, Human
acagaguggucuuucuggagaggu

SEQ ID NO: 2081872 - RNA, 21 nt, Human
acagagccucgggacaucaaa

SEQ ID NO: 2081873 - RNA, 18 nt, Human
acagagaggagaaacaca

SEQ ID NO: 2081874 - RNA, 21 nt, Human
acagagagggggccaccuccc

SEQ ID NO: 2081875 - RNA, 14 nt, Human
acagagaggagaaa

SEQ ID NO: 2081876 - RNA, 16 nt, Human
acagagaggagaaaca

SEQ ID NO: 2081877 - RNA, 20 nt, Human
acagagaggagaaacacauc

SEQ ID NO: 2081878 - RNA, 20 nt, Human
acagagagacagacuugaga

SEQ ID NO: 2081879 - RNA, 23 nt, Human
acagagagacagacuugagaacu

SEQ ID NO: 2081880 - RNA, 15 nt, Human
acagagaggacgugg

SEQ ID NO: 2081881 - RNA, 16 nt, Human
acagagacaccugcac

SEQ ID NO: 2081882 - RNA, 17 nt, Human
acagagacaccugcacc

SEQ ID NO: 2081883 - RNA, 21 nt, Human
acagagacaccugcaccuccc

SEQ ID NO: 2081884 - RNA, 15 nt, Human
acagagacaggccca

SEQ ID NO: 2081885 - RNA, 21 nt, Human
acagagacaggcccaagagau

SEQ ID NO: 2081886 - RNA, 23 nt, Human
acagagacaggcccaagagauga

SEQ ID NO: 2081887 - RNA, 18 nt, Human
acagacuggagacaaugc

SEQ ID NO: 2081888 - RNA, 20 nt, Human
acagacuggccugaggagca

SEQ ID NO: 2081889 - RNA, 18 nt, Human
uaucuccucgcaagcugg

SEQ ID NO: 2081890 - RNA, 17 nt, Human
acagacuucuccagacc

SEQ ID NO: 2081891 - RNA, 14 nt, Human
acagacuugagaac

SEQ ID NO: 2081892 - RNA, 15 nt, Human
acagacuugagaacu

SEQ ID NO: 2081893 - RNA, 16 nt, Human
acagacuugagaacuu

SEQ ID NO: 2081894 - RNA, 17 nt, Human
acagacuugagaacuug

SEQ ID NO: 2081895 - RNA, 18 nt, Human
acagacuugagaacuuga

SEQ ID NO: 2081896 - RNA, 15 nt, Human
acagacuucuccaga

SEQ ID NO: 2081897 - RNA, 16 nt, Human
acagacuucuccagac

SEQ ID NO: 2081898 - RNA, 19 nt, Human
acagcccaaagaaggaaaa

SEQ ID NO: 2081899 - RNA, 15 nt, Human
acagcccacugagaa

SEQ ID NO: 2081900 - RNA, 13 nt, Human
acagcccaggccu

SEQ ID NO: 2081901 - RNA, 15 nt, Human
acagcccaggccucc

SEQ ID NO: 2081902 - RNA, 20 nt, Human
acagcccaggccuccagcuc

SEQ ID NO: 2081903 - RNA, 21 nt, Human
acagcccaggccuccagcuca

SEQ ID NO: 2081904 - RNA, 15 nt, Human
acagccucccacccc

SEQ ID NO: 2081905 - RNA, 16 nt, Human
acagccucccaccccc

SEQ ID NO: 2081906 - RNA, 18 nt, Human
acagaguuuucacucuua

SEQ ID NO: 2081907 - RNA, 13 nt, Human
acagauaagcaag

SEQ ID NO: 2081908 - RNA, 20 nt, Human
acagaguuuucacucuuauu

SEQ ID NO: 2081909 - RNA, 18 nt, Human
acagcagccccugcacaa

SEQ ID NO: 2081910 - RNA, 15 nt, Human
acagauaagcaagag

SEQ ID NO: 2081911 - RNA, 18 nt, Human
acagauaagcaagagaga

SEQ ID NO: 2081912 - RNA, 19 nt, Human
acagauaagcaagagagau

SEQ ID NO: 2081913 - RNA, 14 nt, Human
acagcagcucaggc

SEQ ID NO: 2081914 - RNA, 20 nt, Human
acagauaagcaagagagaug

SEQ ID NO: 2081915 - RNA, 16 nt, Human
acagcagccucugaag

SEQ ID NO: 2081916 - RNA, 17 nt, Human
acagcagccucugaagu

SEQ ID NO: 2081917 - RNA, 18 nt, Human
acagcagccucugaaguu

SEQ ID NO: 2081918 - RNA, 15 nt, Human
acagcaggcccaccu

SEQ ID NO: 2081919 - RNA, 19 nt, Human
acagcaggcccaccuaccu

SEQ ID NO: 2081920 - RNA, 20 nt, Human
acagcaggcccaccuaccuu

SEQ ID NO: 2081921 - RNA, 15 nt, Human
acagcagcucaggca

SEQ ID NO: 2081922 - RNA, 16 nt, Human
acagcagcucaggcac

SEQ ID NO: 2081923 - RNA, 17 nt, Human
acagcagcucaggcaca

SEQ ID NO: 2081924 - RNA, 14 nt, Human
uaugaucacggcuc

SEQ ID NO: 2081925 - RNA, 21 nt, Human
uaugaguuuuugauagcuuua

SEQ ID NO: 2081926 - RNA, 22 nt, Human
uaugaguuuuugauagcuuuau

SEQ ID NO: 2081927 - RNA, 23 nt, Human
uaugaguuuuugauagcuuuauu

SEQ ID NO: 2081928 - RNA, 18 nt, Human
uaugaguuguuuucagac

SEQ ID NO: 2081929 - RNA, 22 nt, Human
uaugaguuguuuucagacucag

SEQ ID NO: 2081930 - RNA, 15 nt, Human
uaugagggaaaauga

SEQ ID NO: 2081931 - RNA, 19 nt, Human
uaugaggucuaggaacaua

SEQ ID NO: 2081932 - RNA, 15 nt, Human
uaugaggucuaggaa

SEQ ID NO: 2081933 - RNA, 15 nt, Human
uaugauaaaaaauuu

SEQ ID NO: 2081934 - RNA, 16 nt, Human
uaugauaaaaaauuuu

SEQ ID NO: 2081935 - RNA, 19 nt, Human
uaugauaaaaaauuuugua

SEQ ID NO: 2081936 - RNA, 20 nt, Human
uaugauaaaaaauuuuguaa

SEQ ID NO: 2081937 - RNA, 21 nt, Human
uaugauaaaaaauuuuguaau

SEQ ID NO: 2081938 - RNA, 23 nt, Human
uaugauaaaaaauuuuguaauuu

SEQ ID NO: 2081939 - RNA, 23 nt, Human
uaugaucacggcucacugcagcc

SEQ ID NO: 2081940 - RNA, 21 nt, Human
uaugaucacggcucacugcag

SEQ ID NO: 2081941 - RNA, 18 nt, Human
uaugaggagugaacauuu

SEQ ID NO: 2081942 - RNA, 14 nt, Human
uaugaggaugcaga

SEQ ID NO: 2081943 - RNA, 22 nt, Human
uaugaggcaaccacaggcagca

SEQ ID NO: 2081944 - RNA, 20 nt, Human
uaucuuggacugacauuuag

SEQ ID NO: 2081945 - RNA, 16 nt, Human
uaugagcuuuauguaa

SEQ ID NO: 2081946 - RNA, 17 nt, Human
uaucuuggacugacauu

SEQ ID NO: 2081947 - RNA, 19 nt, Human
uaugcucugcauguuacau

SEQ ID NO: 2081948 - RNA, 12 nt, Human
uauggccucagc

SEQ ID NO: 2081949 - RNA, 19 nt, Human
uauggccucagcugccuca

SEQ ID NO: 2081950 - RNA, 23 nt, Human
uauggccucagcugccucacuuc

SEQ ID NO: 2081951 - RNA, 15 nt, Human
uaugaucccagcacu

SEQ ID NO: 2081952 - RNA, 15 nt, Human
uaugaucgcgccacu

SEQ ID NO: 2081953 - RNA, 14 nt, Human
uaugcucugcaugu

SEQ ID NO: 2081954 - RNA, 18 nt, Human
uaugcucugcauguuaca

SEQ ID NO: 2081955 - RNA, 18 nt, Human
uaugaugugggucaagga

SEQ ID NO: 2081956 - RNA, 20 nt, Human
acagcuaaucagcauucuca

SEQ ID NO: 2081957 - RNA, 22 nt, Human
acagccuguggcggugccuggg

SEQ ID NO: 2081958 - RNA, 13 nt, Human
acagcucaggcug

SEQ ID NO: 2081959 - RNA, 13 nt, Human
acagcucccaccc

SEQ ID NO: 2081960 - RNA, 14 nt, Human
acagcucccacccc

SEQ ID NO: 2081961 - RNA, 15 nt, Human
acagcucccacccca

SEQ ID NO: 2081962 - RNA, 16 nt, Human
acagcucccaccccac

SEQ ID NO: 2081963 - RNA, 22 nt, Human
uauggggagaaaagacaugaau

SEQ ID NO: 2081964 - RNA, 20 nt, Human
acagccuguggcggugccug

SEQ ID NO: 2081965 - RNA, 21 nt, Human
acagccuguggcggugccugg

SEQ ID NO: 2081966 - RNA, 15 nt, Human
acagccuggcacagg

SEQ ID NO: 2081967 - RNA, 14 nt, Human
acagccuggcacag

SEQ ID NO: 2081968 - RNA, 16 nt, Human
uaugggagccccaggg

SEQ ID NO: 2081969 - RNA, 15 nt, Human
uaugggagccccagg

SEQ ID NO: 2081970 - RNA, 15 nt, Human
acuccugaccucaag

SEQ ID NO: 2081971 - RNA, 13 nt, Human
acuccugcaaaau

SEQ ID NO: 2081972 - RNA, 15 nt, Human
acuccugcaaaauuu

SEQ ID NO: 2081973 - RNA, 15 nt, Human
acuccaguacuggag

SEQ ID NO: 2081974 - RNA, 17 nt, Human
acuccaguacuggagcu

SEQ ID NO: 2081975 - RNA, 14 nt, Human
acuccuaccuggua

SEQ ID NO: 2081976 - RNA, 14 nt, Human
acuccuaccucagc

SEQ ID NO: 2081977 - RNA, 15 nt, Human
acuccuaccucagcc

SEQ ID NO: 2081978 - RNA, 16 nt, Human
acuccuaccucagccu

SEQ ID NO: 2081979 - RNA, 17 nt, Human
acuccuaccucagccua

SEQ ID NO: 2081980 - RNA, 20 nt, Human
acuccagcuggguuggaaaa

SEQ ID NO: 2081981 - RNA, 20 nt, Human
acuccagccugggcgacaga

SEQ ID NO: 2081982 - RNA, 21 nt, Human
acuccagccugggcaacacag

SEQ ID NO: 2081983 - RNA, 19 nt, Human
acuccaggaaggggcugga

SEQ ID NO: 2081984 - RNA, 20 nt, Human
acuccaggaaggggcuggac

SEQ ID NO: 2081985 - RNA, 18 nt, Human
acuccagccugggcaaca

SEQ ID NO: 2081986 - RNA, 23 nt, Human
acuccagccugggcaacagagca

SEQ ID NO: 2081987 - RNA, 15 nt, Human
acuccagccugggcg

SEQ ID NO: 2081988 - RNA, 18 nt, Human
acuccagccugggcgaca

SEQ ID NO: 2081989 - RNA, 14 nt, Human
acuccaacucuucc

SEQ ID NO: 2081990 - RNA, 21 nt, Human
ucccucagucuggcccuuccu

SEQ ID NO: 2081991 - RNA, 23 nt, Human
ucccucauuccaccuucccaugc

SEQ ID NO: 2081992 - RNA, 9 nt, Human
acucaucau

SEQ ID NO: 2081993 - RNA, 12 nt, Human
acucaucauaaa

SEQ ID NO: 2081994 - RNA, 13 nt, Human
acucaucauaaaa

SEQ ID NO: 2081995 - RNA, 14 nt, Human
acucaucauaaaau

SEQ ID NO: 2081996 - RNA, 15 nt, Human
acucaucauaaaaua

SEQ ID NO: 2081997 - RNA, 15 nt, Human
acucaugaucuugug

SEQ ID NO: 2081998 - RNA, 21 nt, Human
acucaugaucuugugacauau

SEQ ID NO: 2081999 - RNA, 16 nt, Human
acucaucauaaaauaa

SEQ ID NO: 2082000 - RNA, 17 nt, Human
acucaucauaaaauaaa

SEQ ID NO: 2082001 - RNA, 19 nt, Human
acucauugcuucacaaccc

SEQ ID NO: 2082002 - RNA, 23 nt, Human
acucauugcuucacaacccaucu

SEQ ID NO: 2082003 - RNA, 16 nt, Human
acucauuuccuaugua

SEQ ID NO: 2082004 - RNA, 15 nt, Human
acucauggguaauaa

SEQ ID NO: 2082005 - RNA, 22 nt, Human
acucauggugaggcuuaacaau

SEQ ID NO: 2082006 - RNA, 20 nt, Human
uccuagcacuuugggaggcc

SEQ ID NO: 2082007 - RNA, 14 nt, Human
uccuaggcauuugc

SEQ ID NO: 2082008 - RNA, 14 nt, Human
uccuagauaaaaag

SEQ ID NO: 2082009 - RNA, 15 nt, Human
uccuagauaaaaaga

SEQ ID NO: 2082010 - RNA, 16 nt, Human
uccuagauaaaaagau

SEQ ID NO: 2082011 - RNA, 17 nt, Human
uccuagauaaaaagaug

SEQ ID NO: 2082012 - RNA, 19 nt, Human
uccguuuccagguguuuau

SEQ ID NO: 2082013 - RNA, 15 nt, Human
uccuaaaacaaauag

SEQ ID NO: 2082014 - RNA, 13 nt, Human
uccuaaaaguuca

SEQ ID NO: 2082015 - RNA, 14 nt, Human
uccguauuucagac

SEQ ID NO: 2082016 - RNA, 15 nt, Human
uccguauuucagacu

SEQ ID NO: 2082017 - RNA, 11 nt, Human
ucccuuugcuc

SEQ ID NO: 2082018 - RNA, 12 nt, Human
ucccuuugcucc

SEQ ID NO: 2082019 - RNA, 13 nt, Human
ucccuuugcucca

SEQ ID NO: 2082020 - RNA, 14 nt, Human
ucccuuugcuccac

SEQ ID NO: 2082021 - RNA, 15 nt, Human
ucccuuugcuccacc

SEQ ID NO: 2082022 - RNA, 16 nt, Human
ucccuuugcuccaccc

SEQ ID NO: 2082023 - RNA, 19 nt, Human
ucccuuugcuccaccccac

SEQ ID NO: 2082024 - RNA, 20 nt, Human
ucccuuugcuccaccccacu

SEQ ID NO: 2082025 - RNA, 22 nt, Human
ucccuuugcuccaccccacuca

SEQ ID NO: 2082026 - RNA, 22 nt, Human
uccgucuaagucaugagcugag

SEQ ID NO: 2082027 - RNA, 20 nt, Human
ucccuuuagcacguuuaaag

SEQ ID NO: 2082028 - RNA, 20 nt, Human
uccgucuaagucaugagcug

SEQ ID NO: 2082029 - RNA, 15 nt, Human
uccgugagcagugug

SEQ ID NO: 2082030 - RNA, 23 nt, Human
uccgugagcagugugucuccugc

SEQ ID NO: 2082031 - RNA, 20 nt, Human
uccgugagugaaccaucauu

SEQ ID NO: 2082032 - RNA, 18 nt, Human
acuccugcaaaauuuuau

SEQ ID NO: 2082033 - RNA, 14 nt, Human
ucccugucaccaag

SEQ ID NO: 2082034 - RNA, 15 nt, Human
ucccugucaccaagc

SEQ ID NO: 2082035 - RNA, 22 nt, Human
ucccugucaccaagcucacagu

SEQ ID NO: 2082036 - RNA, 14 nt, Human
ucccuguugaagcu

SEQ ID NO: 2082037 - RNA, 18 nt, Human
ucccuguuggucgguggg

SEQ ID NO: 2082038 - RNA, 22 nt, Human
ucccuguuucuuccacagugcc

SEQ ID NO: 2082039 - RNA, 15 nt, Human
ucccuugugugugug

SEQ ID NO: 2082040 - RNA, 16 nt, Human
ucccuugugcgugggu

SEQ ID NO: 2082041 - RNA, 13 nt, Human
ucccuugugugug

SEQ ID NO: 2082042 - RNA, 21 nt, Human
ucccuuucacaaaauuuuauu

SEQ ID NO: 2082043 - RNA, 22 nt, Human
ucccuuuccaaaugcccagcuu

SEQ ID NO: 2082044 - RNA, 21 nt, Human
ucccuucaaccauuccccaug

SEQ ID NO: 2082045 - RNA, 12 nt, Human
ucccuguucauu

SEQ ID NO: 2082046 - RNA, 11 nt, Human
ucccuucaacc

SEQ ID NO: 2082047 - RNA, 11 nt, Human
uccucagacug

SEQ ID NO: 2082048 - RNA, 15 nt, Human
uccucagacugcuca

SEQ ID NO: 2082049 - RNA, 22 nt, Human
uccucacuggguggggugagga

SEQ ID NO: 2082050 - RNA, 20 nt, Human
uccucaccccgucugggguu

SEQ ID NO: 2082051 - RNA, 17 nt, Human
uccucacucccuuccca

SEQ ID NO: 2082052 - RNA, 19 nt, Human
uccucacucccuucccaua

SEQ ID NO: 2082053 - RNA, 21 nt, Human
uccucacucccuucccauaag

SEQ ID NO: 2082054 - RNA, 13 nt, Human
uccucacugggug

SEQ ID NO: 2082055 - RNA, 14 nt, Human
uccucacugggugg

SEQ ID NO: 2082056 - RNA, 15 nt, Human
uccucacuggguggg

SEQ ID NO: 2082057 - RNA, 19 nt, Human
acucuuauugcccacgcug

SEQ ID NO: 2082058 - RNA, 16 nt, Human
acucuuauugcccacg

SEQ ID NO: 2082059 - RNA, 20 nt, Human
uccucacaucuuucacacuu

SEQ ID NO: 2082060 - RNA, 23 nt, Human
uccucaacucaccuaauguuuau

SEQ ID NO: 2082061 - RNA, 19 nt, Human
uccucccucccucuuuccc

SEQ ID NO: 2082062 - RNA, 19 nt, Human
uccucucauccuuuucucc

SEQ ID NO: 2082063 - RNA, 20 nt, Human
uccucucauccuuuucuccu

SEQ ID NO: 2082064 - RNA, 15 nt, Human
uccucccugauguac

SEQ ID NO: 2082065 - RNA, 17 nt, Human
uccucccugauguacag

SEQ ID NO: 2082066 - RNA, 17 nt, Human
uccucccucccucuuuc

SEQ ID NO: 2082067 - RNA, 15 nt, Human
uccucccucccucuu

SEQ ID NO: 2082068 - RNA, 16 nt, Human
uccucuccacugccuu

SEQ ID NO: 2082069 - RNA, 15 nt, Human
uccucuccacugccu

SEQ ID NO: 2082070 - RNA, 12 nt, Human
uccucuccccag

SEQ ID NO: 2082071 - RNA, 14 nt, Human
uccucuccacugcc

SEQ ID NO: 2082072 - RNA, 13 nt, Human
uccucuccacugc

SEQ ID NO: 2082073 - RNA, 12 nt, Human
uccucuccacug

SEQ ID NO: 2082074 - RNA, 13 nt, Human
uccuccccuuccc

SEQ ID NO: 2082075 - RNA, 14 nt, Human
uccuccccuucccu

SEQ ID NO: 2082076 - RNA, 15 nt, Human
uccuccccuucccug

SEQ ID NO: 2082077 - RNA, 17 nt, Human
uccuccccuucccugca

SEQ ID NO: 2082078 - RNA, 18 nt, Human
uccuccccuucccugcaa

SEQ ID NO: 2082079 - RNA, 18 nt, Human
uccucaguuccugcagca

SEQ ID NO: 2082080 - RNA, 23 nt, Human
acucugcuuugacugagcagacu

SEQ ID NO: 2082081 - RNA, 20 nt, Human
acucugcuuugacugagcag

SEQ ID NO: 2082082 - RNA, 22 nt, Human
acucugcuuugacugagcagac

SEQ ID NO: 2082083 - RNA, 14 nt, Human
acucugcuuugacu

SEQ ID NO: 2082084 - RNA, 18 nt, Human
acucugauguaaaugaag

SEQ ID NO: 2082085 - RNA, 19 nt, Human
acucugauguaaaugaagu

SEQ ID NO: 2082086 - RNA, 20 nt, Human
acucugaagggcaucaugca

SEQ ID NO: 2082087 - RNA, 21 nt, Human
acucugaagggcaucaugcau

SEQ ID NO: 2082088 - RNA, 16 nt, Human
acucucauuccccagg

SEQ ID NO: 2082089 - RNA, 17 nt, Human
acucucauuccccaggu

SEQ ID NO: 2082090 - RNA, 21 nt, Human
acucucauuccccagguggcu

SEQ ID NO: 2082091 - RNA, 14 nt, Human
acucuccaaccugg

SEQ ID NO: 2082092 - RNA, 17 nt, Human
acucuccaaccuggaca

SEQ ID NO: 2082093 - RNA, 20 nt, Human
acucgcuucccccauagcca

SEQ ID NO: 2082094 - RNA, 14 nt, Human
acucuccccacacu

SEQ ID NO: 2082095 - RNA, 15 nt, Human
acucuccccacacua

SEQ ID NO: 2082096 - RNA, 13 nt, Human
acucuccaucuua

SEQ ID NO: 2082097 - RNA, 19 nt, Human
acucuccaaccuggacaac

SEQ ID NO: 2082098 - RNA, 10 nt, Human
acucucccca

SEQ ID NO: 2082099 - RNA, 11 nt, Human
acucuccccac

SEQ ID NO: 2082100 - RNA, 12 nt, Human
acucuccccaca

SEQ ID NO: 2082101 - RNA, 12 nt, Human
acucgcuucccc

SEQ ID NO: 2082102 - RNA, 15 nt, Human
acucgcuucccccau

SEQ ID NO: 2082103 - RNA, 16 nt, Human
acucgcuucucuguga

SEQ ID NO: 2082104 - RNA, 19 nt, Human
uccuaggcauuugcugaau

SEQ ID NO: 2082105 - RNA, 13 nt, Human
uccuaggccacac

SEQ ID NO: 2082106 - RNA, 20 nt, Human
uccuagggaaaaguucauag

SEQ ID NO: 2082107 - RNA, 17 nt, Human
acucaagacuuccagag

SEQ ID NO: 2082108 - RNA, 13 nt, Human
uccccucauucag

SEQ ID NO: 2082109 - RNA, 16 nt, Human
uccccuccaagguaug

SEQ ID NO: 2082110 - RNA, 20 nt, Human
uccccuccgccaggcgagau

SEQ ID NO: 2082111 - RNA, 17 nt, Human
uccccuccgccaggcga

SEQ ID NO: 2082112 - RNA, 13 nt, Human
uccccuugcccag

SEQ ID NO: 2082113 - RNA, 15 nt, Human
uccccuugcccaggg

SEQ ID NO: 2082114 - RNA, 16 nt, Human
uccccuugcccagggc

SEQ ID NO: 2082115 - RNA, 17 nt, Human
uccccuugcccagggcu

SEQ ID NO: 2082116 - RNA, 16 nt, Human
ucccgaauagcuggga

SEQ ID NO: 2082117 - RNA, 15 nt, Human
ucccgaauagcuggg

SEQ ID NO: 2082118 - RNA, 14 nt, Human
uccccuugagcuga

SEQ ID NO: 2082119 - RNA, 15 nt, Human
uccccuugagcugag

SEQ ID NO: 2082120 - RNA, 16 nt, Human
uccccuugagcugaga

SEQ ID NO: 2082121 - RNA, 14 nt, Human
uccccuccucacuc

SEQ ID NO: 2082122 - RNA, 18 nt, Human
ucccuauuagagaagaga

SEQ ID NO: 2082123 - RNA, 20 nt, Human
ucccucaaagcacacgucau

SEQ ID NO: 2082124 - RNA, 18 nt, Human
ucccucaaagcuuccauu

SEQ ID NO: 2082125 - RNA, 20 nt, Human
ucccucaaagcuuccauucc

SEQ ID NO: 2082126 - RNA, 22 nt, Human
ucccucaaagcuuccauuccac

SEQ ID NO: 2082127 - RNA, 16 nt, Human
ucccucaaccccacca

SEQ ID NO: 2082128 - RNA, 20 nt, Human
ucccgcucagcccucccugc

SEQ ID NO: 2082129 - RNA, 16 nt, Human
ucccgcucagcccucc

SEQ ID NO: 2082130 - RNA, 15 nt, Human
ucccgcucagcccuc

SEQ ID NO: 2082131 - RNA, 14 nt, Human
ucccgcucagcccu

SEQ ID NO: 2082132 - RNA, 13 nt, Human
ucccgcucagccc

SEQ ID NO: 2082133 - RNA, 19 nt, Human
ucccgccucuucuucuuca

SEQ ID NO: 2082134 - RNA, 21 nt, Human
ucccgccucuucuucuucaga

SEQ ID NO: 2082135 - RNA, 18 nt, Human
ucccgaauagcugggacu

SEQ ID NO: 2082136 - RNA, 20 nt, Human
ucccgaguagcugggacuac

SEQ ID NO: 2082137 - RNA, 15 nt, Human
ucccgauuguaacuc

SEQ ID NO: 2082138 - RNA, 23 nt, Human
ucccgaaccccaaggagggagau

SEQ ID NO: 2082139 - RNA, 19 nt, Human
ucccgauucacccugucca

SEQ ID NO: 2082140 - RNA, 17 nt, Human
acuauagccuaggugac

SEQ ID NO: 2082141 - RNA, 15 nt, Human
acuauauuguacaca

SEQ ID NO: 2082142 - RNA, 18 nt, Human
acuauauuaucaugcaaa

SEQ ID NO: 2082143 - RNA, 14 nt, Human
acuauaucuguuuu

SEQ ID NO: 2082144 - RNA, 16 nt, Human
acuauaucuguuuuac

SEQ ID NO: 2082145 - RNA, 19 nt, Human
acuauaucuguuuuacugc

SEQ ID NO: 2082146 - RNA, 23 nt, Human
acuauaucuguuuuacugcuuuu

SEQ ID NO: 2082147 - RNA, 13 nt, Human
acuauauguaugg

SEQ ID NO: 2082148 - RNA, 11 nt, Human
uccccaggccc

SEQ ID NO: 2082149 - RNA, 13 nt, Human
uccccaggcccca

SEQ ID NO: 2082150 - RNA, 19 nt, Human
uccccaggccccaggaagc

SEQ ID NO: 2082151 - RNA, 20 nt, Human
uccccaggccccaggaagcc

SEQ ID NO: 2082152 - RNA, 21 nt, Human
uccccaggccccaggaagccg

SEQ ID NO: 2082153 - RNA, 19 nt, Human
uccccaggccguggcugcc

SEQ ID NO: 2082154 - RNA, 21 nt, Human
uccccaggccguggcugccca

SEQ ID NO: 2082155 - RNA, 23 nt, Human
uccccaggccguggcugcccaca

SEQ ID NO: 2082156 - RNA, 10 nt, Human
uccccacacu

SEQ ID NO: 2082157 - RNA, 18 nt, Human
uccccaccuucaauuccu

SEQ ID NO: 2082158 - RNA, 20 nt, Human
uccccaccuucaauuccugg

SEQ ID NO: 2082159 - RNA, 22 nt, Human
uccccaccuucaauuccugggc

SEQ ID NO: 2082160 - RNA, 23 nt, Human
uccccaccuucaauuccugggcc

SEQ ID NO: 2082161 - RNA, 20 nt, Human
uccccaccuucuucagccac

SEQ ID NO: 2082162 - RNA, 22 nt, Human
acuaucaugucaaacgugaaaa

SEQ ID NO: 2082163 - RNA, 18 nt, Human
acuauguugcccaggcag

SEQ ID NO: 2082164 - RNA, 17 nt, Human
acuauguugcccaggca

SEQ ID NO: 2082165 - RNA, 23 nt, Human
acucaacauguuacugaccagca

SEQ ID NO: 2082166 - RNA, 17 nt, Human
acucaacauguuacuga

SEQ ID NO: 2082167 - RNA, 20 nt, Human
acucaacauguuacugacca

SEQ ID NO: 2082168 - RNA, 21 nt, Human
acucaacauguuacugaccag

SEQ ID NO: 2082169 - RNA, 22 nt, Human
acucaacauguuacugaccagc

SEQ ID NO: 2082170 - RNA, 13 nt, Human
acuauccuggcuu

SEQ ID NO: 2082171 - RNA, 14 nt, Human
acuauuaagcagua

SEQ ID NO: 2082172 - RNA, 20 nt, Human
acuauuaagcaguaaaaacu

SEQ ID NO: 2082173 - RNA, 22 nt, Human
acuauuaagcaguaaaaacugu

SEQ ID NO: 2082174 - RNA, 21 nt, Human
acuauuauaauuuaaugcaug

SEQ ID NO: 2082175 - RNA, 17 nt, Human
acuauuauaauuuaaug

SEQ ID NO: 2082176 - RNA, 23 nt, Human
acuauguugcccaggcaggucuu

SEQ ID NO: 2082177 - RNA, 20 nt, Human
acuauguugcccaggcaggu

SEQ ID NO: 2082178 - RNA, 19 nt, Human
acuauguugcccaggcagg

SEQ ID NO: 2082179 - RNA, 19 nt, Human
uccccaacccugccccugc

SEQ ID NO: 2082180 - RNA, 16 nt, Human
uccccaacccugcccc

SEQ ID NO: 2082181 - RNA, 17 nt, Human
uccccaacccugccccu

SEQ ID NO: 2082182 - RNA, 18 nt, Human
uccccaacccugccccug

SEQ ID NO: 2082183 - RNA, 20 nt, Human
uccccaacccugccccugcc

SEQ ID NO: 2082184 - RNA, 20 nt, Human
ucccauuuuggaaguuuuca

SEQ ID NO: 2082185 - RNA, 16 nt, Human
uccccaaaaaccucac

SEQ ID NO: 2082186 - RNA, 22 nt, Human
uccccaaaaaccucacccgagg

SEQ ID NO: 2082187 - RNA, 15 nt, Human
ucccauaagcuauag

SEQ ID NO: 2082188 - RNA, 22 nt, Human
ucccauaauuuucuucaugcaa

SEQ ID NO: 2082189 - RNA, 17 nt, Human
ucccaguucucuaggga

SEQ ID NO: 2082190 - RNA, 20 nt, Human
ucccaguucaggagucccaa

SEQ ID NO: 2082191 - RNA, 23 nt, Human
ucccaguucaggagucccaagga

SEQ ID NO: 2082192 - RNA, 19 nt, Human
ucccagugccgagaaggaa

SEQ ID NO: 2082193 - RNA, 22 nt, Human
ucccagugccgagaaggaagcc

SEQ ID NO: 2082194 - RNA, 15 nt, Human
ucccagugacacuuc

SEQ ID NO: 2082195 - RNA, 19 nt, Human
ucccagugacacuucagag

SEQ ID NO: 2082196 - RNA, 22 nt, Human
ucccagugacacuucagagagc

SEQ ID NO: 2082197 - RNA, 20 nt, Human
ucccagugacacuucagaga

SEQ ID NO: 2082198 - RNA, 14 nt, Human
ucccaguggccuca

SEQ ID NO: 2082199 - RNA, 18 nt, Human
ucccaguggccucaaccc

SEQ ID NO: 2082200 - RNA, 19 nt, Human
ucccaguggccucaacccu

SEQ ID NO: 2082201 - RNA, 20 nt, Human
ucccaguggccucaacccuc

SEQ ID NO: 2082202 - RNA, 22 nt, Human
ucccaguggccucaacccuccc

SEQ ID NO: 2082203 - RNA, 15 nt, Human
ucccaguucaggagu

SEQ ID NO: 2082204 - RNA, 17 nt, Human
acuacaucgcccuccac

SEQ ID NO: 2082205 - RNA, 19 nt, Human
acuacaucgcccuccacau

SEQ ID NO: 2082206 - RNA, 20 nt, Human
acuacaugcagcccaugccc

SEQ ID NO: 2082207 - RNA, 18 nt, Human
ucccaggggaccacaccu

SEQ ID NO: 2082208 - RNA, 23 nt, Human
acuacaggugugagucaccaagc

SEQ ID NO: 2082209 - RNA, 23 nt, Human
acuaaccagggaagcugucccuc

SEQ ID NO: 2082210 - RNA, 14 nt, Human
acuaaaucuguaag

SEQ ID NO: 2082211 - RNA, 18 nt, Human
acuaaaucuguaagcucu

SEQ ID NO: 2082212 - RNA, 19 nt, Human
acuaaaucuguaagcucuu

SEQ ID NO: 2082213 - RNA, 13 nt, Human
acuaaccacgcug

SEQ ID NO: 2082214 - RNA, 12 nt, Human
acuaaaagaucg

SEQ ID NO: 2082215 - RNA, 22 nt, Human
acuaaaguuagaaaguugauuu

SEQ ID NO: 2082216 - RNA, 13 nt, Human
acuaaagccaagg

SEQ ID NO: 2082217 - RNA, 20 nt, Human
acuaaagcaguggacaccag

SEQ ID NO: 2082218 - RNA, 23 nt, Human
acuaaacugguuuguugcagcca

SEQ ID NO: 2082219 - RNA, 14 nt, Human
uccagcucaccagc

SEQ ID NO: 2082220 - RNA, 15 nt, Human
uccagcucaccagcc

SEQ ID NO: 2082221 - RNA, 21 nt, Human
uccagcuauuuuuauuuguuu

SEQ ID NO: 2082222 - RNA, 13 nt, Human
uccagccugggug

SEQ ID NO: 2082223 - RNA, 17 nt, Human
uccagccugggcgacag

SEQ ID NO: 2082224 - RNA, 20 nt, Human
uccagccugggcgacagagc

SEQ ID NO: 2082225 - RNA, 24 nt, Human
uccagccugggugacagagcaagu

SEQ ID NO: 2082226 - RNA, 12 nt, Human
uccagccugggu

SEQ ID NO: 2082227 - RNA, 20 nt, Human
acguuuuuaauauaaagccu

SEQ ID NO: 2082228 - RNA, 12 nt, Human
acuaaaaauaca

SEQ ID NO: 2082229 - RNA, 17 nt, Human
acuaaaaauacaaacaa

SEQ ID NO: 2082230 - RNA, 13 nt, Human
acuaaaaauauua

SEQ ID NO: 2082231 - RNA, 15 nt, Human
acguuuccugagaag

SEQ ID NO: 2082232 - RNA, 14 nt, Human
acguuuuauugugu

SEQ ID NO: 2082233 - RNA, 15 nt, Human
acguuuuauuguguu

SEQ ID NO: 2082234 - RNA, 16 nt, Human
acguuuuauuguguuu

SEQ ID NO: 2082235 - RNA, 18 nt, Human
acguuuuauuguguuuuu

SEQ ID NO: 2082236 - RNA, 20 nt, Human
acguuuuguuugaaaaagca

SEQ ID NO: 2082237 - RNA, 17 nt, Human
acguuucaguaauaaaa

SEQ ID NO: 2082238 - RNA, 19 nt, Human
acguuucaguaauaaaaca

SEQ ID NO: 2082239 - RNA, 23 nt, Human
acuguagaaaagggaacugaaca

SEQ ID NO: 2082240 - RNA, 15 nt, Human
acuguagaaaugaug

SEQ ID NO: 2082241 - RNA, 14 nt, Human
acuguacuccuccc

SEQ ID NO: 2082242 - RNA, 13 nt, Human
acuguacuccucc

SEQ ID NO: 2082243 - RNA, 17 nt, Human
acuguacuagucugugu

SEQ ID NO: 2082244 - RNA, 21 nt, Human
acuguacagauugcugcuucu

SEQ ID NO: 2082245 - RNA, 22 nt, Human
acuguacagauugcugcuucug

SEQ ID NO: 2082246 - RNA, 14 nt, Human
acuguacaaaguag

SEQ ID NO: 2082247 - RNA, 15 nt, Human
acuguacaaaguaga

SEQ ID NO: 2082248 - RNA, 13 nt, Human
acuguacaaagua

SEQ ID NO: 2082249 - RNA, 13 nt, Human
ucgcuccuguguc

SEQ ID NO: 2082250 - RNA, 12 nt, Human
ucgcuccugugu

SEQ ID NO: 2082251 - RNA, 17 nt, Human
uccuucccucaaagcuu

SEQ ID NO: 2082252 - RNA, 19 nt, Human
acuggguacuuguggacac

SEQ ID NO: 2082253 - RNA, 23 nt, Human
acuggguacuuguggacacagcu

SEQ ID NO: 2082254 - RNA, 20 nt, Human
acuggguacuuguggacaca

SEQ ID NO: 2082255 - RNA, 15 nt, Human
ucgaacuggcugcaa

SEQ ID NO: 2082256 - RNA, 23 nt, Human
ucgaagcgcgccacucgcuuccc

SEQ ID NO: 2082257 - RNA, 14 nt, Human
ucgaagcucagccc

SEQ ID NO: 2082258 - RNA, 15 nt, Human
ucgaagcucagccca

SEQ ID NO: 2082259 - RNA, 16 nt, Human
ucgaagcucagcccac

SEQ ID NO: 2082260 - RNA, 13 nt, Human
ucgaacuggcugc

SEQ ID NO: 2082261 - RNA, 14 nt, Human
ucgaacuggcugca

SEQ ID NO: 2082262 - RNA, 21 nt, Human
uccuuuccaguggccuggcuc

SEQ ID NO: 2082263 - RNA, 22 nt, Human
uccuuuccaguggccuggcucc

SEQ ID NO: 2082264 - RNA, 18 nt, Human
uccuuucauccccaccuu

SEQ ID NO: 2082265 - RNA, 12 nt, Human
uccuuucccuuu

SEQ ID NO: 2082266 - RNA, 13 nt, Human
uccuuucccuuua

SEQ ID NO: 2082267 - RNA, 13 nt, Human
uccuuucccucca

SEQ ID NO: 2082268 - RNA, 14 nt, Human
uccuuucccuccac

SEQ ID NO: 2082269 - RNA, 23 nt, Human
uccuuucagggaauuucaggaac

SEQ ID NO: 2082270 - RNA, 21 nt, Human
uccuuucagggaauuucagga

SEQ ID NO: 2082271 - RNA, 22 nt, Human
uccuuucagggaauuucaggaa

SEQ ID NO: 2082272 - RNA, 15 nt, Human
uccuuucaccacaug

SEQ ID NO: 2082273 - RNA, 20 nt, Human
uccuuucacaaccuucugug

SEQ ID NO: 2082274 - RNA, 19 nt, Human
uccuuucaaugguuugcaa

SEQ ID NO: 2082275 - RNA, 19 nt, Human
uccuuucacaaccuucugu

SEQ ID NO: 2082276 - RNA, 18 nt, Human
uccuuucacaaccuucug

SEQ ID NO: 2082277 - RNA, 16 nt, Human
uccuuucacaaccuuc

SEQ ID NO: 2082278 - RNA, 17 nt, Human
uccuuccugucuuccug

SEQ ID NO: 2082279 - RNA, 19 nt, Human
uccuuccugucuuccugca

SEQ ID NO: 2082280 - RNA, 12 nt, Human
uccuuccugucu

SEQ ID NO: 2082281 - RNA, 13 nt, Human
uccuuccugucuu

SEQ ID NO: 2082282 - RNA, 14 nt, Human
uccuuccugucuuc

SEQ ID NO: 2082283 - RNA, 17 nt, Human
ucgaggacagggaggug

SEQ ID NO: 2082284 - RNA, 14 nt, Human
ucgaggacagggag

SEQ ID NO: 2082285 - RNA, 18 nt, Human
ucgaggcccagcgaccuc

SEQ ID NO: 2082286 - RNA, 22 nt, Human
ucgagcaguccugccucagccu

SEQ ID NO: 2082287 - RNA, 16 nt, Human
ucgacugugaccugug

SEQ ID NO: 2082288 - RNA, 17 nt, Human
ucgacugugaccugugg

SEQ ID NO: 2082289 - RNA, 17 nt, Human
ucgaccaauucaacccu

SEQ ID NO: 2082290 - RNA, 14 nt, Human
ucgaccccaaagcc

SEQ ID NO: 2082291 - RNA, 19 nt, Human
ucgaccccaaagccccuug

SEQ ID NO: 2082292 - RNA, 13 nt, Human
ucgaggacaggga

SEQ ID NO: 2082293 - RNA, 17 nt, Human
ucgagcaguccugccuc

SEQ ID NO: 2082294 - RNA, 21 nt, Human
ucgagcaguccugccucagcc

SEQ ID NO: 2082295 - RNA, 21 nt, Human
acuggcaaacuucagacugaa

SEQ ID NO: 2082296 - RNA, 14 nt, Human
acuggcagcaucuu

SEQ ID NO: 2082297 - RNA, 16 nt, Human
acuggcaguuuuccau

SEQ ID NO: 2082298 - RNA, 22 nt, Human
acuggcaguuuuccauugguuu

SEQ ID NO: 2082299 - RNA, 18 nt, Human
acuggcuagaguccucac

SEQ ID NO: 2082300 - RNA, 21 nt, Human
acuggcuagaguccucacucc

SEQ ID NO: 2082301 - RNA, 14 nt, Human
acuggccugaggag

SEQ ID NO: 2082302 - RNA, 16 nt, Human
acuggccugaggagca

SEQ ID NO: 2082303 - RNA, 17 nt, Human
acuggccugaggagcag

SEQ ID NO: 2082304 - RNA, 19 nt, Human
acuggccugaggagcagca

SEQ ID NO: 2082305 - RNA, 20 nt, Human
acuggcaucugacacaaaaa

SEQ ID NO: 2082306 - RNA, 21 nt, Human
acuggcaucugacacaaaaaa

SEQ ID NO: 2082307 - RNA, 14 nt, Human
acuggcagccccag

SEQ ID NO: 2082308 - RNA, 16 nt, Human
acuggcagccccagca

SEQ ID NO: 2082309 - RNA, 22 nt, Human
acuggcugcaaaggguaucagg

SEQ ID NO: 2082310 - RNA, 22 nt, Human
acuggcucauauuccugcagcc

SEQ ID NO: 2082311 - RNA, 16 nt, Human
acuggcuggcugcagu

SEQ ID NO: 2082312 - RNA, 17 nt, Human
acuggcuggcugcagug

SEQ ID NO: 2082313 - RNA, 18 nt, Human
uccuucagcuuccauuuc

SEQ ID NO: 2082314 - RNA, 12 nt, Human
uccuucagugca

SEQ ID NO: 2082315 - RNA, 12 nt, Human
uccuucccuggc

SEQ ID NO: 2082316 - RNA, 14 nt, Human
uccuucccuggcuu

SEQ ID NO: 2082317 - RNA, 15 nt, Human
uccuucccuggcuug

SEQ ID NO: 2082318 - RNA, 22 nt, Human
uccuucauuucugauauagaau

SEQ ID NO: 2082319 - RNA, 14 nt, Human
uccuuccaacagga

SEQ ID NO: 2082320 - RNA, 20 nt, Human
uccuuccaacaggagcuggg

SEQ ID NO: 2082321 - RNA, 21 nt, Human
uccuuccaacaggagcuggga

SEQ ID NO: 2082322 - RNA, 14 nt, Human
uccuuccaacugcu

SEQ ID NO: 2082323 - RNA, 18 nt, Human
uccuuccaacugcugccc

SEQ ID NO: 2082324 - RNA, 20 nt, Human
uccuuccaacugcugcccca

SEQ ID NO: 2082325 - RNA, 13 nt, Human
uccuucccagcug

SEQ ID NO: 2082326 - RNA, 14 nt, Human
uccuucccagcugc

SEQ ID NO: 2082327 - RNA, 16 nt, Human
uccuucccagcugccc

SEQ ID NO: 2082328 - RNA, 18 nt, Human
uccuucccagcugccccu

SEQ ID NO: 2082329 - RNA, 21 nt, Human
uccuucccagcugccccuccc

SEQ ID NO: 2082330 - RNA, 17 nt, Human
uccuuccccuuucccca

SEQ ID NO: 2082331 - RNA, 12 nt, Human
uccuucccucuc

SEQ ID NO: 2082332 - RNA, 21 nt, Human
uccuuccucacaccaggcuug

SEQ ID NO: 2082333 - RNA, 16 nt, Human
uccuuccucacaccag

SEQ ID NO: 2082334 - RNA, 16 nt, Human
acugcuucuaccaacu

SEQ ID NO: 2082335 - RNA, 20 nt, Human
acugcuucuaccaacuggaa

SEQ ID NO: 2082336 - RNA, 13 nt, Human
acugcuggcugcc

SEQ ID NO: 2082337 - RNA, 13 nt, Human
acuggcaaacuuc

SEQ ID NO: 2082338 - RNA, 16 nt, Human
acuggcaaacuucaga

SEQ ID NO: 2082339 - RNA, 20 nt, Human
acuggcaaacuucagacuga

SEQ ID NO: 2082340 - RNA, 12 nt, Human
acugcugcccca

SEQ ID NO: 2082341 - RNA, 19 nt, Human
acugcugccccaaaggaag

SEQ ID NO: 2082342 - RNA, 22 nt, Human
acugcugccccaaaggaagcuu

SEQ ID NO: 2082343 - RNA, 13 nt, Human
acugcugcugccu

SEQ ID NO: 2082344 - RNA, 12 nt, Human
acugcuggcugc

SEQ ID NO: 2082345 - RNA, 18 nt, Human
acugcugcccagccucca

SEQ ID NO: 2082346 - RNA, 16 nt, Human
acugcugcccagccuc

SEQ ID NO: 2082347 - RNA, 21 nt, Human
acugcugcccagccuccaagc

SEQ ID NO: 2082348 - RNA, 19 nt, Human
acugcucaucauuccuuga

SEQ ID NO: 2082349 - RNA, 23 nt, Human
acugcucaucauuccuugagaaa

SEQ ID NO: 2082350 - RNA, 22 nt, Human
acugcuaggugggccagccccu

SEQ ID NO: 2082351 - RNA, 23 nt, Human
acugcuaggugggccagccccuc

SEQ ID NO: 2082352 - RNA, 16 nt, Human
acugcuaggugggcca

SEQ ID NO: 2082353 - RNA, 17 nt, Human
acugcuaggugggccag

SEQ ID NO: 2082354 - RNA, 20 nt, Human
acugcuaggugggccagccc

SEQ ID NO: 2082355 - RNA, 21 nt, Human
acugcuaggugggccagcccc

SEQ ID NO: 2082356 - RNA, 20 nt, Human
acugcgggaugguccugggg

SEQ ID NO: 2082357 - RNA, 21 nt, Human
acugcgggaugguccuggggc

SEQ ID NO: 2082358 - RNA, 22 nt, Human
acugcgggaugguccuggggcu

SEQ ID NO: 2082359 - RNA, 20 nt, Human
acugcauaccaaccugggca

SEQ ID NO: 2082360 - RNA, 16 nt, Human
acugcauaccaaccug

SEQ ID NO: 2082361 - RNA, 14 nt, Human
acugcauacaaucu

SEQ ID NO: 2082362 - RNA, 18 nt, Human
acugccuuggcuucaggg

SEQ ID NO: 2082363 - RNA, 19 nt, Human
acugcgggaugguccuggg

SEQ ID NO: 2082364 - RNA, 19 nt, Human
uccuguucuuaagacguga

SEQ ID NO: 2082365 - RNA, 14 nt, Human
uccuguucagcauu

SEQ ID NO: 2082366 - RNA, 15 nt, Human
uccuguucagcauuc

SEQ ID NO: 2082367 - RNA, 16 nt, Human
uccuguucagcauucu

SEQ ID NO: 2082368 - RNA, 18 nt, Human
uccuguucagcauucuua

SEQ ID NO: 2082369 - RNA, 17 nt, Human
uccuguugaaaagccau

SEQ ID NO: 2082370 - RNA, 18 nt, Human
uccuguugaaaagccaug

SEQ ID NO: 2082371 - RNA, 22 nt, Human
uccuguugaaaagccauguuua

SEQ ID NO: 2082372 - RNA, 19 nt, Human
uccuguguuucuagggaaa

SEQ ID NO: 2082373 - RNA, 23 nt, Human
uccuguuagcuguuauuucuauu

SEQ ID NO: 2082374 - RNA, 19 nt, Human
uccuguuguuguuaaugaa

SEQ ID NO: 2082375 - RNA, 20 nt, Human
uccuguuguuauggaaacug

SEQ ID NO: 2082376 - RNA, 21 nt, Human
uccuguuguuguuaaugaaaa

SEQ ID NO: 2082377 - RNA, 24 nt, Human
uccugugucuugcaauggcagccu

SEQ ID NO: 2082378 - RNA, 23 nt, Human
uccugugucuugcaauggcagcc

SEQ ID NO: 2082379 - RNA, 23 nt, Human
uccuguguaaucauuucuugggc

SEQ ID NO: 2082380 - RNA, 13 nt, Human
uccugucuguuca

SEQ ID NO: 2082381 - RNA, 18 nt, Human
uccugugugguuuagugu

SEQ ID NO: 2082382 - RNA, 21 nt, Human
uccugugugguuuaguguaaa

SEQ ID NO: 2082383 - RNA, 14 nt, Human
uccugugugugcgc

SEQ ID NO: 2082384 - RNA, 13 nt, Human
uccugugugugcg

SEQ ID NO: 2082385 - RNA, 18 nt, Human
uccugugugugcgccuac

SEQ ID NO: 2082386 - RNA, 12 nt, Human
uccuguguuucu

SEQ ID NO: 2082387 - RNA, 16 nt, Human
acugcagggacugcca

SEQ ID NO: 2082388 - RNA, 18 nt, Human
acugcagggacugccagu

SEQ ID NO: 2082389 - RNA, 17 nt, Human
acugcagggacugccag

SEQ ID NO: 2082390 - RNA, 23 nt, Human
acugcaggccccgcuuguccagc

SEQ ID NO: 2082391 - RNA, 23 nt, Human
acugcagccucaaccuccugggc

SEQ ID NO: 2082392 - RNA, 15 nt, Human
acugcaggccccgcu

SEQ ID NO: 2082393 - RNA, 21 nt, Human
acugcaggccccgcuugucca

SEQ ID NO: 2082394 - RNA, 21 nt, Human
acugcagccucgaacuccugg

SEQ ID NO: 2082395 - RNA, 22 nt, Human
acugcagccucgaacuccuggg

SEQ ID NO: 2082396 - RNA, 23 nt, Human
acugcagccucgaacuccugggc

SEQ ID NO: 2082397 - RNA, 12 nt, Human
acugcaggcccc

SEQ ID NO: 2082398 - RNA, 22 nt, Human
acugcagccucaaccuccuggg

SEQ ID NO: 2082399 - RNA, 21 nt, Human
acugcagccucaaccuccugg

SEQ ID NO: 2082400 - RNA, 13 nt, Human
uccuuaagaacac

SEQ ID NO: 2082401 - RNA, 16 nt, Human
uccuuaagaacacaaa

SEQ ID NO: 2082402 - RNA, 19 nt, Human
acugcagccucaaccuccu

SEQ ID NO: 2082403 - RNA, 17 nt, Human
uccuuaaacugugugga

SEQ ID NO: 2082404 - RNA, 23 nt, Human
uccuuaaacuguguggacuguga

SEQ ID NO: 2082405 - RNA, 14 nt, Human
uccuuaaacugugu

SEQ ID NO: 2082406 - RNA, 15 nt, Human
uccuuaaacugugug

SEQ ID NO: 2082407 - RNA, 16 nt, Human
uccuuaaacugugugg

SEQ ID NO: 2082408 - RNA, 13 nt, Human
uccuguuuuuguu

SEQ ID NO: 2082409 - RNA, 14 nt, Human
uccuguuuuuguua

SEQ ID NO: 2082410 - RNA, 19 nt, Human
uccuguuuuuguuaacuuu

SEQ ID NO: 2082411 - RNA, 21 nt, Human
uccuggguggucugcaggcag

SEQ ID NO: 2082412 - RNA, 22 nt, Human
uccuggguggucugcaggcagg

SEQ ID NO: 2082413 - RNA, 15 nt, Human
uccuggguggucugc

SEQ ID NO: 2082414 - RNA, 19 nt, Human
uccuggguggucugcaggc

SEQ ID NO: 2082415 - RNA, 17 nt, Human
uccuggggugcccucca

SEQ ID NO: 2082416 - RNA, 19 nt, Human
uccuggggugcccuccacu

SEQ ID NO: 2082417 - RNA, 22 nt, Human
uccuggggugcccuccacugcc

SEQ ID NO: 2082418 - RNA, 15 nt, Human
uccugucuuccugca

SEQ ID NO: 2082419 - RNA, 22 nt, Human
uccugguauggguuucucccag

SEQ ID NO: 2082420 - RNA, 17 nt, Human
uccugucuuuaaggaaa

SEQ ID NO: 2082421 - RNA, 18 nt, Human
uccugucuuuaaggaaaa

SEQ ID NO: 2082422 - RNA, 19 nt, Human
uccugucuuuaaggaaaaa

SEQ ID NO: 2082423 - RNA, 18 nt, Human
uccuguguaaucauuucu

SEQ ID NO: 2082424 - RNA, 22 nt, Human
uccuguguaaucauuucuuggg

SEQ ID NO: 2082425 - RNA, 18 nt, Human
uccuguggagaugacuug

SEQ ID NO: 2082426 - RNA, 18 nt, Human
uccugugacuucagcucu

SEQ ID NO: 2082427 - RNA, 20 nt, Human
uccugugcaugggugaaggg

SEQ ID NO: 2082428 - RNA, 15 nt, Human
uccugugcaugggug

SEQ ID NO: 2082429 - RNA, 16 nt, Human
uccugugcauggguga

SEQ ID NO: 2082430 - RNA, 18 nt, Human
uccugugcaugggugaag

SEQ ID NO: 2082431 - RNA, 14 nt, Human
uccugggccccucc

SEQ ID NO: 2082432 - RNA, 15 nt, Human
uccugggccccuccc

SEQ ID NO: 2082433 - RNA, 16 nt, Human
uccugggccccucccu

SEQ ID NO: 2082434 - RNA, 17 nt, Human
uccugggccccucccua

SEQ ID NO: 2082435 - RNA, 18 nt, Human
uccugggccccucccuac

SEQ ID NO: 2082436 - RNA, 19 nt, Human
uccugggccccucccuacc

SEQ ID NO: 2082437 - RNA, 20 nt, Human
uccugggccccucccuaccu

SEQ ID NO: 2082438 - RNA, 21 nt, Human
uccugggccccucccuaccuc

SEQ ID NO: 2082439 - RNA, 22 nt, Human
uccugggccccucccuaccuca

SEQ ID NO: 2082440 - RNA, 23 nt, Human
uccugggccccucccuaccucaa

SEQ ID NO: 2082441 - RNA, 23 nt, Human
uccuggggguucuuucuuccucu

SEQ ID NO: 2082442 - RNA, 22 nt, Human
uccuggggguucuuucuuccuc

SEQ ID NO: 2082443 - RNA, 21 nt, Human
uccuggggguucuuucuuccu

SEQ ID NO: 2082444 - RNA, 19 nt, Human
uccuggggcucugugcagg

SEQ ID NO: 2082445 - RNA, 11 nt, Human
uccugggggcc

SEQ ID NO: 2082446 - RNA, 13 nt, Human
uccugggggccug

SEQ ID NO: 2082447 - RNA, 17 nt, Human
uccugggggccugaccu

SEQ ID NO: 2082448 - RNA, 18 nt, Human
uccugggggccugaccuc

SEQ ID NO: 2082449 - RNA, 19 nt, Human
uccugggggccugaccucc

SEQ ID NO: 2082450 - RNA, 21 nt, Human
uccuggggccucggagccuca

SEQ ID NO: 2082451 - RNA, 22 nt, Human
uccuggggccucggagccucau

SEQ ID NO: 2082452 - RNA, 15 nt, Human
uccuggggccucuug

SEQ ID NO: 2082453 - RNA, 15 nt, Human
uccuggggcucugug

SEQ ID NO: 2082454 - RNA, 16 nt, Human
uccuggggcucugugc

SEQ ID NO: 2082455 - RNA, 18 nt, Human
uccuggggcucugugcag

SEQ ID NO: 2082456 - RNA, 13 nt, Human
uccuggggccucg

SEQ ID NO: 2082457 - RNA, 16 nt, Human
uccugggcucaagcaa

SEQ ID NO: 2082458 - RNA, 12 nt, Human
uccugggcucag

SEQ ID NO: 2082459 - RNA, 13 nt, Human
uccugggcucagg

SEQ ID NO: 2082460 - RNA, 19 nt, Human
uccugaguagcuggauuac

SEQ ID NO: 2082461 - RNA, 21 nt, Human
uccugaggggcaucugccccu

SEQ ID NO: 2082462 - RNA, 22 nt, Human
uccugaggggcaucugccccuc

SEQ ID NO: 2082463 - RNA, 18 nt, Human
acugcacagugcaucuca

SEQ ID NO: 2082464 - RNA, 16 nt, Human
acugcacagugcaucu

SEQ ID NO: 2082465 - RNA, 20 nt, Human
uccugauuauuuaucacaua

SEQ ID NO: 2082466 - RNA, 17 nt, Human
uccugcaaaauuuuaua

SEQ ID NO: 2082467 - RNA, 19 nt, Human
uccugcaaaauuuuauagc

SEQ ID NO: 2082468 - RNA, 21 nt, Human
uccugcacugacccacagccu

SEQ ID NO: 2082469 - RNA, 15 nt, Human
uccugcagcagagcc

SEQ ID NO: 2082470 - RNA, 16 nt, Human
uccugcagcagagccu

SEQ ID NO: 2082471 - RNA, 15 nt, Human
uccugcucucuaccc

SEQ ID NO: 2082472 - RNA, 17 nt, Human
uccugcucucuacccag

SEQ ID NO: 2082473 - RNA, 18 nt, Human
uccugcucucuacccagc

SEQ ID NO: 2082474 - RNA, 19 nt, Human
uccugcucucuacccagcc

SEQ ID NO: 2082475 - RNA, 21 nt, Human
uccugcucucuacccagccca

SEQ ID NO: 2082476 - RNA, 22 nt, Human
uccugcucucuacccagcccau

SEQ ID NO: 2082477 - RNA, 24 nt, Human
uccugcucucuacccagcccaucu

SEQ ID NO: 2082478 - RNA, 14 nt, Human
uccugcuacucugu

SEQ ID NO: 2082479 - RNA, 18 nt, Human
uccugcuaaguuaauguu

SEQ ID NO: 2082480 - RNA, 18 nt, Human
uccugcuacucuguuccu

SEQ ID NO: 2082481 - RNA, 13 nt, Human
uccugcuagaaau

SEQ ID NO: 2082482 - RNA, 14 nt, Human
uccugcuagaaaug

SEQ ID NO: 2082483 - RNA, 15 nt, Human
uccugcuagaaaugg

SEQ ID NO: 2082484 - RNA, 19 nt, Human
uccugcuauuucccaagcu

SEQ ID NO: 2082485 - RNA, 22 nt, Human
uccugcuauuucccaagcugga

SEQ ID NO: 2082486 - RNA, 20 nt, Human
uccugccucgaacuggcugc

SEQ ID NO: 2082487 - RNA, 17 nt, Human
uccugccucagccuccg

SEQ ID NO: 2082488 - RNA, 21 nt, Human
uccugccucgaacuggcugca

SEQ ID NO: 2082489 - RNA, 22 nt, Human
uccugcauucacccagacagcu

SEQ ID NO: 2082490 - RNA, 11 nt, Human
uccugcaugca

SEQ ID NO: 2082491 - RNA, 16 nt, Human
uccugcauucacccag

SEQ ID NO: 2082492 - RNA, 19 nt, Human
uccugccucagccucccaa

SEQ ID NO: 2082493 - RNA, 20 nt, Human
acugagggaccaacugggcc

SEQ ID NO: 2082494 - RNA, 21 nt, Human
acugagggaccaacugggccc

SEQ ID NO: 2082495 - RNA, 22 nt, Human
acugagggaccaacugggccca

SEQ ID NO: 2082496 - RNA, 15 nt, Human
acugaggcagggaag

SEQ ID NO: 2082497 - RNA, 23 nt, Human
acugaggcagacagcagcucagg

SEQ ID NO: 2082498 - RNA, 12 nt, Human
acugaggcaggg

SEQ ID NO: 2082499 - RNA, 14 nt, Human
acugaggcagggaa

SEQ ID NO: 2082500 - RNA, 13 nt, Human
acugaggcagaca

SEQ ID NO: 2082501 - RNA, 15 nt, Human
acugaggcagacagc

SEQ ID NO: 2082502 - RNA, 19 nt, Human
acugaggcagacagcagcu

SEQ ID NO: 2082503 - RNA, 22 nt, Human
acugaggcagacagcagcucag

SEQ ID NO: 2082504 - RNA, 15 nt, Human
acugaggaccagcca

SEQ ID NO: 2082505 - RNA, 15 nt, Human
acugaggcacgagca

SEQ ID NO: 2082506 - RNA, 15 nt, Human
uccucuccccagcaa

SEQ ID NO: 2082507 - RNA, 16 nt, Human
acugagcuucucugug

SEQ ID NO: 2082508 - RNA, 16 nt, Human
acugagcuccucuggg

SEQ ID NO: 2082509 - RNA, 19 nt, Human
acugagcuccucugggcag

SEQ ID NO: 2082510 - RNA, 13 nt, Human
acugagcuccucu

SEQ ID NO: 2082511 - RNA, 14 nt, Human
acugagcuccucug

SEQ ID NO: 2082512 - RNA, 21 nt, Human
acugagcuccucugggcagga

SEQ ID NO: 2082513 - RNA, 18 nt, Human
acugaggaaugaugaagc

SEQ ID NO: 2082514 - RNA, 18 nt, Human
acugagcuucucugugaa

SEQ ID NO: 2082515 - RNA, 17 nt, Human
acugagcuucucuguga

SEQ ID NO: 2082516 - RNA, 18 nt, Human
acugaggggucuccagga

SEQ ID NO: 2082517 - RNA, 21 nt, Human
acugaggggucuccaggagga

SEQ ID NO: 2082518 - RNA, 21 nt, Human
acugaguuaaauuauacugga

SEQ ID NO: 2082519 - RNA, 11 nt, Human
acugcaacagg

SEQ ID NO: 2082520 - RNA, 12 nt, Human
acugcaacagga

SEQ ID NO: 2082521 - RNA, 15 nt, Human
acugcaacaggaacu

SEQ ID NO: 2082522 - RNA, 14 nt, Human
acugcaaccuccgc

SEQ ID NO: 2082523 - RNA, 13 nt, Human
acugcaaccuccg

SEQ ID NO: 2082524 - RNA, 21 nt, Human
acugcaauagagacuguagau

SEQ ID NO: 2082525 - RNA, 22 nt, Human
acugcaauagagacuguagauu

SEQ ID NO: 2082526 - RNA, 22 nt, Human
acugcaaccuccgccucuuggg

SEQ ID NO: 2082527 - RNA, 16 nt, Human
acugcaaccuccgccu

SEQ ID NO: 2082528 - RNA, 16 nt, Human
uccacaguggaaccag

SEQ ID NO: 2082529 - RNA, 20 nt, Human
uccacaguggaaccagccca

SEQ ID NO: 2082530 - RNA, 16 nt, Human
uccaccaacccaucag

SEQ ID NO: 2082531 - RNA, 18 nt, Human
uccaccaacccaucagaa

SEQ ID NO: 2082532 - RNA, 15 nt, Human
uccacaggucucaga

SEQ ID NO: 2082533 - RNA, 17 nt, Human
uccaccaagaaagcagg

SEQ ID NO: 2082534 - RNA, 16 nt, Human
uccaccagccugcacu

SEQ ID NO: 2082535 - RNA, 14 nt, Human
uccaccagccugca

SEQ ID NO: 2082536 - RNA, 15 nt, Human
uccaccagccugcac

SEQ ID NO: 2082537 - RNA, 13 nt, Human
uccaccacccaaa

SEQ ID NO: 2082538 - RNA, 17 nt, Human
uccaccacccaaaaguc

SEQ ID NO: 2082539 - RNA, 14 nt, Human
uccacagugacucc

SEQ ID NO: 2082540 - RNA, 23 nt, Human
uccaauaaaugugaaauucuguc

SEQ ID NO: 2082541 - RNA, 16 nt, Human
uccaauaggaaugcua

SEQ ID NO: 2082542 - RNA, 19 nt, Human
uccaauaggaaugcuaaca

SEQ ID NO: 2082543 - RNA, 11 nt, Human
uccaagcuggu

SEQ ID NO: 2082544 - RNA, 16 nt, Human
uccaaguuggacuggg

SEQ ID NO: 2082545 - RNA, 13 nt, Human
uccaagugugugu

SEQ ID NO: 2082546 - RNA, 14 nt, Human
uccaagugugugug

SEQ ID NO: 2082547 - RNA, 18 nt, Human
uccaagugugugugcgug

SEQ ID NO: 2082548 - RNA, 19 nt, Human
uccaacguggggcagcaca

SEQ ID NO: 2082549 - RNA, 16 nt, Human
uccaacguggcccaga

SEQ ID NO: 2082550 - RNA, 14 nt, Human
uccaacguggccca

SEQ ID NO: 2082551 - RNA, 17 nt, Human
uccaacguggggcagca

SEQ ID NO: 2082552 - RNA, 18 nt, Human
uccaacguggggcagcac

SEQ ID NO: 2082553 - RNA, 19 nt, Human
uccaacagcucaagucuuc

SEQ ID NO: 2082554 - RNA, 14 nt, Human
uccaacaggagcug

SEQ ID NO: 2082555 - RNA, 16 nt, Human
uccaacaggagcuggg

SEQ ID NO: 2082556 - RNA, 17 nt, Human
uccaacaggagcuggga

SEQ ID NO: 2082557 - RNA, 18 nt, Human
uccaagcuccaucuccac

SEQ ID NO: 2082558 - RNA, 18 nt, Human
ucauuuuacccuuggcuc

SEQ ID NO: 2082559 - RNA, 16 nt, Human
ucauuuguuauucuua

SEQ ID NO: 2082560 - RNA, 19 nt, Human
ucauuuguuauucuuaaga

SEQ ID NO: 2082561 - RNA, 16 nt, Human
ucauuugugugcucau

SEQ ID NO: 2082562 - RNA, 21 nt, Human
ucauuugagcagggcucagcg

SEQ ID NO: 2082563 - RNA, 20 nt, Human
ucauuugcuaacuagcuugg

SEQ ID NO: 2082564 - RNA, 16 nt, Human
ucauuugaugcuaaau

SEQ ID NO: 2082565 - RNA, 15 nt, Human
ucauuuuccccccac

SEQ ID NO: 2082566 - RNA, 19 nt, Human
ucauuuuccccccacucuc

SEQ ID NO: 2082567 - RNA, 18 nt, Human
accuggaagcccucucug

SEQ ID NO: 2082568 - RNA, 15 nt, Human
accugcuuucaagac

SEQ ID NO: 2082569 - RNA, 19 nt, Human
ucauuugagcagggcucag

SEQ ID NO: 2082570 - RNA, 16 nt, Human
accugcugagagaccc

SEQ ID NO: 2082571 - RNA, 19 nt, Human
accugcugagagacccaag

SEQ ID NO: 2082572 - RNA, 18 nt, Human
accugaauagcucccaga

SEQ ID NO: 2082573 - RNA, 23 nt, Human
accugaauagcucccagauuuca

SEQ ID NO: 2082574 - RNA, 19 nt, Human
accugcucuccucuugcca

SEQ ID NO: 2082575 - RNA, 22 nt, Human
accugcugagagacccaaggag

SEQ ID NO: 2082576 - RNA, 17 nt, Human
accugcucuccucuugc

SEQ ID NO: 2082577 - RNA, 18 nt, Human
accugcucuccucuugcc

SEQ ID NO: 2082578 - RNA, 23 nt, Human
accuggucacaggacucugccuc

SEQ ID NO: 2082579 - RNA, 22 nt, Human
accuggucacaggacucugccu

SEQ ID NO: 2082580 - RNA, 13 nt, Human
accuggugcugga

SEQ ID NO: 2082581 - RNA, 14 nt, Human
accuggugcuggau

SEQ ID NO: 2082582 - RNA, 10 nt, Human
accuggugcu

SEQ ID NO: 2082583 - RNA, 11 nt, Human
accuggugcug

SEQ ID NO: 2082584 - RNA, 22 nt, Human
accuggugcuggauauuuucaa

SEQ ID NO: 2082585 - RNA, 15 nt, Human
accugguggccucug

SEQ ID NO: 2082586 - RNA, 22 nt, Human
accugguuccggaauccugucc

SEQ ID NO: 2082587 - RNA, 16 nt, Human
accuuacuuacagcau

SEQ ID NO: 2082588 - RNA, 16 nt, Human
accuuaggcagggaag

SEQ ID NO: 2082589 - RNA, 13 nt, Human
accuuaggcaggg

SEQ ID NO: 2082590 - RNA, 15 nt, Human
accuuaggcagggaa

SEQ ID NO: 2082591 - RNA, 17 nt, Human
accuucuccccauucug

SEQ ID NO: 2082592 - RNA, 12 nt, Human
accuucccagcu

SEQ ID NO: 2082593 - RNA, 13 nt, Human
accuucccagcuc

SEQ ID NO: 2082594 - RNA, 14 nt, Human
accuucuccaaaug

SEQ ID NO: 2082595 - RNA, 11 nt, Human
accuucccagc

SEQ ID NO: 2082596 - RNA, 13 nt, Human
accuuaucugugc

SEQ ID NO: 2082597 - RNA, 22 nt, Human
accuuaucugugcgugaaacac

SEQ ID NO: 2082598 - RNA, 11 nt, Human
accuuaucugu

SEQ ID NO: 2082599 - RNA, 19 nt, Human
accuuccauggcucuuuuu

SEQ ID NO: 2082600 - RNA, 14 nt, Human
accuugacagggca

SEQ ID NO: 2082601 - RNA, 15 nt, Human
accuugacagggcac

SEQ ID NO: 2082602 - RNA, 16 nt, Human
accuucuguggcucac

SEQ ID NO: 2082603 - RNA, 19 nt, Human
accuucuucagccaccucu

SEQ ID NO: 2082604 - RNA, 20 nt, Human
accuucuucagccaccucuc

SEQ ID NO: 2082605 - RNA, 15 nt, Human
accuucuguggcuca

SEQ ID NO: 2082606 - RNA, 13 nt, Human
accuucuguggcu

SEQ ID NO: 2082607 - RNA, 12 nt, Human
accuucuguggc

SEQ ID NO: 2082608 - RNA, 18 nt, Human
uccagaccccuggcuuuu

SEQ ID NO: 2082609 - RNA, 17 nt, Human
uccagaccccuggcuuu

SEQ ID NO: 2082610 - RNA, 16 nt, Human
uccagaccccuggcuu

SEQ ID NO: 2082611 - RNA, 15 nt, Human
uccagaccccuggcu

SEQ ID NO: 2082612 - RNA, 23 nt, Human
uccagaccccuggcuuuucacug

SEQ ID NO: 2082613 - RNA, 13 nt, Human
uccagccugagca

SEQ ID NO: 2082614 - RNA, 12 nt, Human
uccagccugggc

SEQ ID NO: 2082615 - RNA, 13 nt, Human
uccagccugggca

SEQ ID NO: 2082616 - RNA, 20 nt, Human
uccagccugggcaacagagc

SEQ ID NO: 2082617 - RNA, 19 nt, Human
uccagccugggcagccagg

SEQ ID NO: 2082618 - RNA, 22 nt, Human
uccagccugggcagccaggcug

SEQ ID NO: 2082619 - RNA, 23 nt, Human
uccagccugggcagccaggcugc

SEQ ID NO: 2082620 - RNA, 11 nt, Human
accuuugucac

SEQ ID NO: 2082621 - RNA, 23 nt, Human
accuuuggguugcaaucugggga

SEQ ID NO: 2082622 - RNA, 13 nt, Human
uccacuacugcua

SEQ ID NO: 2082623 - RNA, 17 nt, Human
uccacguucaccccucc

SEQ ID NO: 2082624 - RNA, 18 nt, Human
uccacguacugcagccuc

SEQ ID NO: 2082625 - RNA, 17 nt, Human
uccacguacugcagccu

SEQ ID NO: 2082626 - RNA, 15 nt, Human
uccacguacugcagc

SEQ ID NO: 2082627 - RNA, 22 nt, Human
uccagaaguuugagaucagccu

SEQ ID NO: 2082628 - RNA, 13 nt, Human
accuagccuuaga

SEQ ID NO: 2082629 - RNA, 13 nt, Human
accuagaucagaa

SEQ ID NO: 2082630 - RNA, 22 nt, Human
accuaugguauaaugguugacu

SEQ ID NO: 2082631 - RNA, 15 nt, Human
accuauagucccagc

SEQ ID NO: 2082632 - RNA, 16 nt, Human
accuauagucccagcu

SEQ ID NO: 2082633 - RNA, 22 nt, Human
accuauagucccagcuacucag

SEQ ID NO: 2082634 - RNA, 18 nt, Human
accguuggggauugggga

SEQ ID NO: 2082635 - RNA, 18 nt, Human
accuaaccccuuuccugc

SEQ ID NO: 2082636 - RNA, 18 nt, Human
accuaagucucugugaau

SEQ ID NO: 2082637 - RNA, 14 nt, Human
accuaagucucugu

SEQ ID NO: 2082638 - RNA, 15 nt, Human
accuaagucucugug

SEQ ID NO: 2082639 - RNA, 16 nt, Human
accuaagucucuguga

SEQ ID NO: 2082640 - RNA, 20 nt, Human
accuaaguuucaguugauuu

SEQ ID NO: 2082641 - RNA, 16 nt, Human
accuccuccacaccag

SEQ ID NO: 2082642 - RNA, 22 nt, Human
accuccccccacugcaggcccc

SEQ ID NO: 2082643 - RNA, 12 nt, Human
accucccccucc

SEQ ID NO: 2082644 - RNA, 23 nt, Human
accuccuacgucaaacaugaagu

SEQ ID NO: 2082645 - RNA, 13 nt, Human
accuccccccacu

SEQ ID NO: 2082646 - RNA, 14 nt, Human
accuccccccacug

SEQ ID NO: 2082647 - RNA, 15 nt, Human
accuccccccacugc

SEQ ID NO: 2082648 - RNA, 16 nt, Human
accuccccccacugca

SEQ ID NO: 2082649 - RNA, 17 nt, Human
accuccccccacugcag

SEQ ID NO: 2082650 - RNA, 18 nt, Human
accuccccccacugcagg

SEQ ID NO: 2082651 - RNA, 20 nt, Human
accuccgccucuuggguuca

SEQ ID NO: 2082652 - RNA, 13 nt, Human
accuccccagccu

SEQ ID NO: 2082653 - RNA, 13 nt, Human
accuccccaggcc

SEQ ID NO: 2082654 - RNA, 14 nt, Human
accuccccaggccg

SEQ ID NO: 2082655 - RNA, 19 nt, Human
accuccccaggccguggcu

SEQ ID NO: 2082656 - RNA, 20 nt, Human
accuccccaggccguggcug

SEQ ID NO: 2082657 - RNA, 17 nt, Human
accucaccaagcugcug

SEQ ID NO: 2082658 - RNA, 21 nt, Human
accucacugggguccuggggc

SEQ ID NO: 2082659 - RNA, 23 nt, Human
accucacugggguccuggggccu

SEQ ID NO: 2082660 - RNA, 10 nt, Human
accucaaggg

SEQ ID NO: 2082661 - RNA, 15 nt, Human
accucaagggggacu

SEQ ID NO: 2082662 - RNA, 20 nt, Human
accucaagggggacugucuu

SEQ ID NO: 2082663 - RNA, 21 nt, Human
accucaagggggacugucuuu

SEQ ID NO: 2082664 - RNA, 13 nt, Human
accucagccuaga

SEQ ID NO: 2082665 - RNA, 15 nt, Human
accucagccuagacc

SEQ ID NO: 2082666 - RNA, 15 nt, Human
accucagcaaccugu

SEQ ID NO: 2082667 - RNA, 14 nt, Human
accucagccaugag

SEQ ID NO: 2082668 - RNA, 22 nt, Human
accucagccaugaggaguugcu

SEQ ID NO: 2082669 - RNA, 23 nt, Human
accucagccaugaggaguugcug

SEQ ID NO: 2082670 - RNA, 10 nt, Human
accucagccu

SEQ ID NO: 2082671 - RNA, 15 nt, Human
accucagagccccgc

SEQ ID NO: 2082672 - RNA, 16 nt, Human
accucagagccccgca

SEQ ID NO: 2082673 - RNA, 20 nt, Human
accucagaguccaggcccca

SEQ ID NO: 2082674 - RNA, 17 nt, Human
accucagaguccaggcc

SEQ ID NO: 2082675 - RNA, 19 nt, Human
accucagaguccaggcccc

SEQ ID NO: 2082676 - RNA, 17 nt, Human
ucauauuccugcagccu

SEQ ID NO: 2082677 - RNA, 23 nt, Human
acccuuuuggcccccgagcuggg

SEQ ID NO: 2082678 - RNA, 14 nt, Human
acccuuuuggcccc

SEQ ID NO: 2082679 - RNA, 23 nt, Human
acccuuuggggggggcccgccug

SEQ ID NO: 2082680 - RNA, 12 nt, Human
acccuuuggggg

SEQ ID NO: 2082681 - RNA, 18 nt, Human
accgagucucuucuccac

SEQ ID NO: 2082682 - RNA, 17 nt, Human
accgagaguagccgaga

SEQ ID NO: 2082683 - RNA, 23 nt, Human
accgagaguagccgagagccugc

SEQ ID NO: 2082684 - RNA, 20 nt, Human
ucauauuuacuucuuauaca

SEQ ID NO: 2082685 - RNA, 21 nt, Human
ucauauuuacuucuuauacau

SEQ ID NO: 2082686 - RNA, 22 nt, Human
ucauauuuacuucuuauacauu

SEQ ID NO: 2082687 - RNA, 16 nt, Human
ucauauuuacuucuua

SEQ ID NO: 2082688 - RNA, 17 nt, Human
accgccaaggcuggggg

SEQ ID NO: 2082689 - RNA, 12 nt, Human
accgcaggaagc

SEQ ID NO: 2082690 - RNA, 13 nt, Human
accgcaggaagcu

SEQ ID NO: 2082691 - RNA, 14 nt, Human
accgcaggaagcug

SEQ ID NO: 2082692 - RNA, 16 nt, Human
accgcaggaagcugcu

SEQ ID NO: 2082693 - RNA, 19 nt, Human
accgcaggaagcugcuccg

SEQ ID NO: 2082694 - RNA, 24 nt, Human
accgagucucuucuccacuggaug

SEQ ID NO: 2082695 - RNA, 21 nt, Human
accgagucucuucuccacugg

SEQ ID NO: 2082696 - RNA, 20 nt, Human
accgagucucuucuccacug

SEQ ID NO: 2082697 - RNA, 13 nt, Human
accgaugcuccag

SEQ ID NO: 2082698 - RNA, 15 nt, Human
accgaugcuccagcc

SEQ ID NO: 2082699 - RNA, 23 nt, Human
accgaugcuccagccaaccccug

SEQ ID NO: 2082700 - RNA, 12 nt, Human
accgccuucucu

SEQ ID NO: 2082701 - RNA, 15 nt, Human
accgcuccccagccc

SEQ ID NO: 2082702 - RNA, 17 nt, Human
accgcuccccagcccag

SEQ ID NO: 2082703 - RNA, 18 nt, Human
accgcuccccagcccagg

SEQ ID NO: 2082704 - RNA, 19 nt, Human
accgcuccccagcccaggg

SEQ ID NO: 2082705 - RNA, 20 nt, Human
accgcuccccagcccagggu

SEQ ID NO: 2082706 - RNA, 18 nt, Human
accgccggccagcuggga

SEQ ID NO: 2082707 - RNA, 23 nt, Human
accggagcuuucaaagaaggaau

SEQ ID NO: 2082708 - RNA, 21 nt, Human
accgcugccuaaguggcugcu

SEQ ID NO: 2082709 - RNA, 14 nt, Human
accggaagcuccug

SEQ ID NO: 2082710 - RNA, 15 nt, Human
accggaagcuccugg

SEQ ID NO: 2082711 - RNA, 16 nt, Human
accggaagcuccuggu

SEQ ID NO: 2082712 - RNA, 17 nt, Human
accggaagcuccuggua

SEQ ID NO: 2082713 - RNA, 19 nt, Human
accgcugccuaaguggcug

SEQ ID NO: 2082714 - RNA, 20 nt, Human
accgcugccuaaguggcugc

SEQ ID NO: 2082715 - RNA, 18 nt, Human
accucuauaauugccacu

SEQ ID NO: 2082716 - RNA, 20 nt, Human
accucuauaauugccacuga

SEQ ID NO: 2082717 - RNA, 14 nt, Human
accucggcuccugg

SEQ ID NO: 2082718 - RNA, 15 nt, Human
accucggcuccugga

SEQ ID NO: 2082719 - RNA, 12 nt, Human
accucugcacaa

SEQ ID NO: 2082720 - RNA, 15 nt, Human
accucugauaccuca

SEQ ID NO: 2082721 - RNA, 13 nt, Human
accucugauaccu

SEQ ID NO: 2082722 - RNA, 23 nt, Human
accucucuuauagaauauuuauu

SEQ ID NO: 2082723 - RNA, 22 nt, Human
accucucuuauagaauauuuau

SEQ ID NO: 2082724 - RNA, 14 nt, Human
accucucuuuuuca

SEQ ID NO: 2082725 - RNA, 15 nt, Human
accucugaagucucu

SEQ ID NO: 2082726 - RNA, 20 nt, Human
accucuccuuuggccauucc

SEQ ID NO: 2082727 - RNA, 17 nt, Human
accucggugccuuccuc

SEQ ID NO: 2082728 - RNA, 19 nt, Human
ucauugggcuguuuucuca

SEQ ID NO: 2082729 - RNA, 23 nt, Human
ucauugggcuguuuucucaacaa

SEQ ID NO: 2082730 - RNA, 16 nt, Human
ucauuguaaacaaacu

SEQ ID NO: 2082731 - RNA, 16 nt, Human
ucauuguaauguuacu

SEQ ID NO: 2082732 - RNA, 17 nt, Human
ucauuguaauguuacug

SEQ ID NO: 2082733 - RNA, 11 nt, Human
ucauugcuuua

SEQ ID NO: 2082734 - RNA, 12 nt, Human
ucauugcuuuac

SEQ ID NO: 2082735 - RNA, 15 nt, Human
ucauugcuuuacugg

SEQ ID NO: 2082736 - RNA, 19 nt, Human
ucauugauaugaaaaauau

SEQ ID NO: 2082737 - RNA, 16 nt, Human
ucauugcuuaugacau

SEQ ID NO: 2082738 - RNA, 21 nt, Human
ucauugcuucacaacccaucu

SEQ ID NO: 2082739 - RNA, 17 nt, Human
ucauugauaugaaaaau

SEQ ID NO: 2082740 - RNA, 18 nt, Human
ucauugauaugaaaaaua

SEQ ID NO: 2082741 - RNA, 13 nt, Human
ucauugauaugaa

SEQ ID NO: 2082742 - RNA, 15 nt, Human
ucauugauaugaaaa

SEQ ID NO: 2082743 - RNA, 16 nt, Human
ucauugauaugaaaaa

SEQ ID NO: 2082744 - RNA, 20 nt, Human
ucauugacuaucaaacugaa

SEQ ID NO: 2082745 - RNA, 21 nt, Human
ucauugacuaucaaacugaag

SEQ ID NO: 2082746 - RNA, 13 nt, Human
ucauguuccucaa

SEQ ID NO: 2082747 - RNA, 18 nt, Human
ucauguuaauccuagcug

SEQ ID NO: 2082748 - RNA, 21 nt, Human
ucauguuaauccuagcugugu

SEQ ID NO: 2082749 - RNA, 22 nt, Human
ucauguuaauccuagcugugug

SEQ ID NO: 2082750 - RNA, 13 nt, Human
ucaugucuggcua

SEQ ID NO: 2082751 - RNA, 23 nt, Human
ucauuccuugagaaaaacaauga

SEQ ID NO: 2082752 - RNA, 21 nt, Human
ucauuaaaauaaauaaaugca

SEQ ID NO: 2082753 - RNA, 15 nt, Human
ucauuaaagcauuua

SEQ ID NO: 2082754 - RNA, 23 nt, Human
ucauccacugugccaugugccag

SEQ ID NO: 2082755 - RNA, 21 nt, Human
ucauccacugugccaugugcc

SEQ ID NO: 2082756 - RNA, 19 nt, Human
ucauccacugugccaugug

SEQ ID NO: 2082757 - RNA, 22 nt, Human
accucacaugcauacauacaca

SEQ ID NO: 2082758 - RNA, 12 nt, Human
ucaugcauuguu

SEQ ID NO: 2082759 - RNA, 16 nt, Human
ucaugagcugagcagg

SEQ ID NO: 2082760 - RNA, 18 nt, Human
ucaugccaaccccgcccu

SEQ ID NO: 2082761 - RNA, 19 nt, Human
ucaugccaccauggccagc

SEQ ID NO: 2082762 - RNA, 22 nt, Human
ucaugccaccauggccagccaa

SEQ ID NO: 2082763 - RNA, 17 nt, Human
ucaugcccaagcccuga

SEQ ID NO: 2082764 - RNA, 12 nt, Human
accccuuuccug

SEQ ID NO: 2082765 - RNA, 20 nt, Human
accccuucgcuccugugucu

SEQ ID NO: 2082766 - RNA, 21 nt, Human
acccgacagagggaagaaaag

SEQ ID NO: 2082767 - RNA, 16 nt, Human
acccgacagagggaag

SEQ ID NO: 2082768 - RNA, 13 nt, Human
acccgaggaaacu

SEQ ID NO: 2082769 - RNA, 14 nt, Human
acccgaggcccgca

SEQ ID NO: 2082770 - RNA, 14 nt, Human
acccgaggcugccc

SEQ ID NO: 2082771 - RNA, 15 nt, Human
acccgaggcugccca

SEQ ID NO: 2082772 - RNA, 17 nt, Human
acccgaggcugcccacu

SEQ ID NO: 2082773 - RNA, 24 nt, Human
acccgaggcugcccacuaugguca

SEQ ID NO: 2082774 - RNA, 13 nt, Human
acccucccagcuc

SEQ ID NO: 2082775 - RNA, 15 nt, Human
acccucccagcucug

SEQ ID NO: 2082776 - RNA, 16 nt, Human
acccucccagcucuga

SEQ ID NO: 2082777 - RNA, 14 nt, Human
acccucccaccccc

SEQ ID NO: 2082778 - RNA, 20 nt, Human
acccucccacccccuucucu

SEQ ID NO: 2082779 - RNA, 23 nt, Human
acccucccacccccuucucugcu

SEQ ID NO: 2082780 - RNA, 12 nt, Human
acccucccaccc

SEQ ID NO: 2082781 - RNA, 13 nt, Human
acccucccacccc

SEQ ID NO: 2082782 - RNA, 21 nt, Human
acccuccuaucaccuccccuc

SEQ ID NO: 2082783 - RNA, 15 nt, Human
acccuccgccuucac

SEQ ID NO: 2082784 - RNA, 22 nt, Human
acccuccgccuucacuccggug

SEQ ID NO: 2082785 - RNA, 17 nt, Human
acccuccuaucaccucc

SEQ ID NO: 2082786 - RNA, 14 nt, Human
acccucuuagaaaa

SEQ ID NO: 2082787 - RNA, 15 nt, Human
acccugccccugccc

SEQ ID NO: 2082788 - RNA, 18 nt, Human
acccugccccugccccgu

SEQ ID NO: 2082789 - RNA, 12 nt, Human
acccuuugcccc

SEQ ID NO: 2082790 - RNA, 20 nt, Human
acccuucccuugagcccucu

SEQ ID NO: 2082791 - RNA, 19 nt, Human
acccuucccuugagcccuc

SEQ ID NO: 2082792 - RNA, 22 nt, Human
acccuuccccuccuucucccuu

SEQ ID NO: 2082793 - RNA, 18 nt, Human
ucagcggggacagcuccu

SEQ ID NO: 2082794 - RNA, 13 nt, Human
ucaggaaccugga

SEQ ID NO: 2082795 - RNA, 15 nt, Human
ucaggaaccuggacc

SEQ ID NO: 2082796 - RNA, 16 nt, Human
ucaggaaccuggacca

SEQ ID NO: 2082797 - RNA, 17 nt, Human
ucaggaaccuggaccaa

SEQ ID NO: 2082798 - RNA, 22 nt, Human
ucaggaaccuggaccaaagcug

SEQ ID NO: 2082799 - RNA, 23 nt, Human
ucaggaaccuggaccaaagcuga

SEQ ID NO: 2082800 - RNA, 14 nt, Human
ucagccuggugggc

SEQ ID NO: 2082801 - RNA, 17 nt, Human
ucagcggggacagcucc

SEQ ID NO: 2082802 - RNA, 16 nt, Human
ucagcggggacagcuc

SEQ ID NO: 2082803 - RNA, 15 nt, Human
ucagcggggacagcu

SEQ ID NO: 2082804 - RNA, 23 nt, Human
accccuuccccacugccugccca

SEQ ID NO: 2082805 - RNA, 21 nt, Human
accccuuccccacugccugcc

SEQ ID NO: 2082806 - RNA, 22 nt, Human
accccuuccccacugccugccc

SEQ ID NO: 2082807 - RNA, 16 nt, Human
ucaggcaugccugugu

SEQ ID NO: 2082808 - RNA, 17 nt, Human
ucaggcaugccugugug

SEQ ID NO: 2082809 - RNA, 14 nt, Human
ucaggcaugccugu

SEQ ID NO: 2082810 - RNA, 15 nt, Human
ucaggcaugccugug

SEQ ID NO: 2082811 - RNA, 19 nt, Human
ucaggcauaggccugggug

SEQ ID NO: 2082812 - RNA, 20 nt, Human
ucaggcauaggccugggugc

SEQ ID NO: 2082813 - RNA, 22 nt, Human
ucaggcauaggccugggugcug

SEQ ID NO: 2082814 - RNA, 19 nt, Human
accccuucgcuccuguguc

SEQ ID NO: 2082815 - RNA, 16 nt, Human
ucagguaacaggcaga

SEQ ID NO: 2082816 - RNA, 15 nt, Human
ucagguaacaggcag

SEQ ID NO: 2082817 - RNA, 13 nt, Human
ucagguaacaggc

SEQ ID NO: 2082818 - RNA, 15 nt, Human
ucagggucauagcau

SEQ ID NO: 2082819 - RNA, 16 nt, Human
ucaggccaggugcagu

SEQ ID NO: 2082820 - RNA, 17 nt, Human
ucaggccaggugcagug

SEQ ID NO: 2082821 - RNA, 18 nt, Human
ucaggccaggugcagugg

SEQ ID NO: 2082822 - RNA, 19 nt, Human
ucaggccaggugcaguggc

SEQ ID NO: 2082823 - RNA, 15 nt, Human
ucaggccauggcucc

SEQ ID NO: 2082824 - RNA, 14 nt, Human
ucagaugcccagag

SEQ ID NO: 2082825 - RNA, 21 nt, Human
ucagaugcccagagggcccag

SEQ ID NO: 2082826 - RNA, 18 nt, Human
ucagaugcacaugagcug

SEQ ID NO: 2082827 - RNA, 15 nt, Human
ucagaugacuagaaa

SEQ ID NO: 2082828 - RNA, 15 nt, Human
ucagaugggaagaca

SEQ ID NO: 2082829 - RNA, 18 nt, Human
ucagaugggaagacauga

SEQ ID NO: 2082830 - RNA, 13 nt, Human
ucagaagacacug

SEQ ID NO: 2082831 - RNA, 15 nt, Human
ucagaaccucuuccc

SEQ ID NO: 2082832 - RNA, 16 nt, Human
ucagaaccucuucccc

SEQ ID NO: 2082833 - RNA, 17 nt, Human
ucagaaccucuucccca

SEQ ID NO: 2082834 - RNA, 18 nt, Human
ucagaaccucuuccccag

SEQ ID NO: 2082835 - RNA, 20 nt, Human
ucagaaccucuuccccagaa

SEQ ID NO: 2082836 - RNA, 13 nt, Human
acccagucccugg

SEQ ID NO: 2082837 - RNA, 15 nt, Human
acccagucccugggg

SEQ ID NO: 2082838 - RNA, 18 nt, Human
ucagcccugggccccacc

SEQ ID NO: 2082839 - RNA, 19 nt, Human
ucagcccugggccccacca

SEQ ID NO: 2082840 - RNA, 14 nt, Human
ucagcccugcccuu

SEQ ID NO: 2082841 - RNA, 23 nt, Human
ucagcccugcccuucagcauccu

SEQ ID NO: 2082842 - RNA, 12 nt, Human
ucagcccugggc

SEQ ID NO: 2082843 - RNA, 18 nt, Human
ucagcccucccugccccu

SEQ ID NO: 2082844 - RNA, 14 nt, Human
ucagccccuccucu

SEQ ID NO: 2082845 - RNA, 15 nt, Human
ucagccccuccucug

SEQ ID NO: 2082846 - RNA, 16 nt, Human
ucagccccuccucugc

SEQ ID NO: 2082847 - RNA, 17 nt, Human
ucagccccuccucugcc

SEQ ID NO: 2082848 - RNA, 12 nt, Human
ucagccccuccu

SEQ ID NO: 2082849 - RNA, 13 nt, Human
ucagccccuccuc

SEQ ID NO: 2082850 - RNA, 19 nt, Human
ucagcccucccugccccuc

SEQ ID NO: 2082851 - RNA, 19 nt, Human
ucagccccuccucugccac

SEQ ID NO: 2082852 - RNA, 13 nt, Human
ucagcccugaggu

SEQ ID NO: 2082853 - RNA, 18 nt, Human
ucagccccuccucugcca

SEQ ID NO: 2082854 - RNA, 23 nt, Human
ucagcccugaggugaaagggagc

SEQ ID NO: 2082855 - RNA, 17 nt, Human
ucagcccaccccccuca

SEQ ID NO: 2082856 - RNA, 18 nt, Human
ucagcccaccccccucau

SEQ ID NO: 2082857 - RNA, 12 nt, Human
ucagccccagcc

SEQ ID NO: 2082858 - RNA, 14 nt, Human
ucagccccagccca

SEQ ID NO: 2082859 - RNA, 15 nt, Human
ucagccccagcccag

SEQ ID NO: 2082860 - RNA, 16 nt, Human
ucagccccagcccagc

SEQ ID NO: 2082861 - RNA, 17 nt, Human
ucagccccagcccagcc

SEQ ID NO: 2082862 - RNA, 22 nt, Human
ucagccccagcccagcccagcu

SEQ ID NO: 2082863 - RNA, 15 nt, Human
acccccagccugcua

SEQ ID NO: 2082864 - RNA, 14 nt, Human
acccccagccugcu

SEQ ID NO: 2082865 - RNA, 13 nt, Human
accccauucuuug

SEQ ID NO: 2082866 - RNA, 23 nt, Human
accccauucuuugcuugaacaca

SEQ ID NO: 2082867 - RNA, 23 nt, Human
accccaugucaccggauccuggg

SEQ ID NO: 2082868 - RNA, 16 nt, Human
accccaugccaaagcu

SEQ ID NO: 2082869 - RNA, 14 nt, Human
acccagucccuggg

SEQ ID NO: 2082870 - RNA, 17 nt, Human
acccccaucucucccuc

SEQ ID NO: 2082871 - RNA, 18 nt, Human
acccccauuucuauuuau

SEQ ID NO: 2082872 - RNA, 17 nt, Human
acccccauuucuauuua

SEQ ID NO: 2082873 - RNA, 19 nt, Human
accccccagaaccuguccu

SEQ ID NO: 2082874 - RNA, 16 nt, Human
acccccucauuguuua

SEQ ID NO: 2082875 - RNA, 20 nt, Human
accccccagaaccuguccuu

SEQ ID NO: 2082876 - RNA, 18 nt, Human
accccccagaaccugucc

SEQ ID NO: 2082877 - RNA, 12 nt, Human
accccccaccug

SEQ ID NO: 2082878 - RNA, 13 nt, Human
accccccaccugc

SEQ ID NO: 2082879 - RNA, 15 nt, Human
accccuggcuuuuca

SEQ ID NO: 2082880 - RNA, 11 nt, Human
accccuggcug

SEQ ID NO: 2082881 - RNA, 13 nt, Human
accccuggcuggu

SEQ ID NO: 2082882 - RNA, 16 nt, Human
accccuuacuuagcau

SEQ ID NO: 2082883 - RNA, 14 nt, Human
accccuuagccucc

SEQ ID NO: 2082884 - RNA, 15 nt, Human
accccuuagccuccc

SEQ ID NO: 2082885 - RNA, 16 nt, Human
accccuuagccucccu

SEQ ID NO: 2082886 - RNA, 17 nt, Human
accccuuagccucccug

SEQ ID NO: 2082887 - RNA, 18 nt, Human
accccuuagccucccuga

SEQ ID NO: 2082888 - RNA, 14 nt, Human
accccuuccccacu

SEQ ID NO: 2082889 - RNA, 15 nt, Human
accccuuccccacug

SEQ ID NO: 2082890 - RNA, 16 nt, Human
accccuuccccacugc

SEQ ID NO: 2082891 - RNA, 18 nt, Human
accccuuccccacugccu

SEQ ID NO: 2082892 - RNA, 20 nt, Human
accccuuccccacugccugc

SEQ ID NO: 2082893 - RNA, 10 nt, Human
ucagccuggg

SEQ ID NO: 2082894 - RNA, 12 nt, Human
ucagccugggca

SEQ ID NO: 2082895 - RNA, 17 nt, Human
accccuccuuccuugac

SEQ ID NO: 2082896 - RNA, 20 nt, Human
accccuccuuccuugaccag

SEQ ID NO: 2082897 - RNA, 12 nt, Human
accccuccuucc

SEQ ID NO: 2082898 - RNA, 16 nt, Human
accccuccuuccuuga

SEQ ID NO: 2082899 - RNA, 12 nt, Human
accccuggcuuu

SEQ ID NO: 2082900 - RNA, 13 nt, Human
acccccuccccag

SEQ ID NO: 2082901 - RNA, 14 nt, Human
acccccuccccagg

SEQ ID NO: 2082902 - RNA, 12 nt, Human
acccccucccca

SEQ ID NO: 2082903 - RNA, 16 nt, Human
acccccuccccagggg

SEQ ID NO: 2082904 - RNA, 14 nt, Human
acccccucccuggc

SEQ ID NO: 2082905 - RNA, 15 nt, Human
acccccucccuggcc

SEQ ID NO: 2082906 - RNA, 16 nt, Human
acccccucccuggccu

SEQ ID NO: 2082907 - RNA, 23 nt, Human
acccaaaagucaaaaggugccug

SEQ ID NO: 2082908 - RNA, 14 nt, Human
acccaaaccuggag

SEQ ID NO: 2082909 - RNA, 15 nt, Human
acccaaaccuggaga

SEQ ID NO: 2082910 - RNA, 16 nt, Human
acccaaaccuggagau

SEQ ID NO: 2082911 - RNA, 23 nt, Human
acccaaccacaucccacucacaa

SEQ ID NO: 2082912 - RNA, 14 nt, Human
acccagcccaucuu

SEQ ID NO: 2082913 - RNA, 12 nt, Human
ucagaacacauu

SEQ ID NO: 2082914 - RNA, 15 nt, Human
ucagaacacauucuu

SEQ ID NO: 2082915 - RNA, 19 nt, Human
ucagaacaccaagacuuga

SEQ ID NO: 2082916 - RNA, 11 nt, Human
acccagcccau

SEQ ID NO: 2082917 - RNA, 18 nt, Human
acccagcccacuucugcc

SEQ ID NO: 2082918 - RNA, 21 nt, Human
acccagacagcucccucugcc

SEQ ID NO: 2082919 - RNA, 22 nt, Human
acccagacagcucccucugccu

SEQ ID NO: 2082920 - RNA, 15 nt, Human
acccagacagcuccc

SEQ ID NO: 2082921 - RNA, 17 nt, Human
acccagcccacuucugc

SEQ ID NO: 2082922 - RNA, 16 nt, Human
acccagcccacuucug

SEQ ID NO: 2082923 - RNA, 23 nt, Human
accauuuugggguacccacugcu

SEQ ID NO: 2082924 - RNA, 22 nt, Human
accauuuugggguacccacugc

SEQ ID NO: 2082925 - RNA, 11 nt, Human
accauuuauaa

SEQ ID NO: 2082926 - RNA, 12 nt, Human
accauuuauaau

SEQ ID NO: 2082927 - RNA, 12 nt, Human
accauuccccau

SEQ ID NO: 2082928 - RNA, 15 nt, Human
accauuccccauggg

SEQ ID NO: 2082929 - RNA, 23 nt, Human
accaugauuaaccacuucagcug

SEQ ID NO: 2082930 - RNA, 22 nt, Human
accaugauuaaccacuucagcu

SEQ ID NO: 2082931 - RNA, 23 nt, Human
accaugacaacccugugguuucc

SEQ ID NO: 2082932 - RNA, 21 nt, Human
accaguugcacuuggccucug

SEQ ID NO: 2082933 - RNA, 21 nt, Human
accaguguagccuugcccgga

SEQ ID NO: 2082934 - RNA, 17 nt, Human
accaguuaugugaauga

SEQ ID NO: 2082935 - RNA, 13 nt, Human
accaguguagccu

SEQ ID NO: 2082936 - RNA, 16 nt, Human
accaguguagccuugc

SEQ ID NO: 2082937 - RNA, 18 nt, Human
ucacuguugcccaggcug

SEQ ID NO: 2082938 - RNA, 17 nt, Human
ucacuguugcccaggcu

SEQ ID NO: 2082939 - RNA, 19 nt, Human
ucacuguugcccaggcugg

SEQ ID NO: 2082940 - RNA, 20 nt, Human
accagggagccccuuugaug

SEQ ID NO: 2082941 - RNA, 21 nt, Human
accagggaugaugcaacaucc

SEQ ID NO: 2082942 - RNA, 18 nt, Human
accagggcaccaagccca

SEQ ID NO: 2082943 - RNA, 22 nt, Human
accagggcgaacgacaauagcu

SEQ ID NO: 2082944 - RNA, 23 nt, Human
accagggcgaacgacaauagcuu

SEQ ID NO: 2082945 - RNA, 24 nt, Human
ucacugcacagugcaucucagccc

SEQ ID NO: 2082946 - RNA, 22 nt, Human
ucacugcacagugcaucucagc

SEQ ID NO: 2082947 - RNA, 20 nt, Human
ucacugcacagugcaucuca

SEQ ID NO: 2082948 - RNA, 19 nt, Human
ucacugacacaaaaaguag

SEQ ID NO: 2082949 - RNA, 12 nt, Human
ucacugcagccu

SEQ ID NO: 2082950 - RNA, 13 nt, Human
ucacugcagccuc

SEQ ID NO: 2082951 - RNA, 16 nt, Human
ucacuguugcccaggc

SEQ ID NO: 2082952 - RNA, 14 nt, Human
ucaccugggcaccu

SEQ ID NO: 2082953 - RNA, 17 nt, Human
ucaccugcuggccccuc

SEQ ID NO: 2082954 - RNA, 19 nt, Human
ucaccugcuggccccucac

SEQ ID NO: 2082955 - RNA, 20 nt, Human
ucaccugcuggccccucacc

SEQ ID NO: 2082956 - RNA, 21 nt, Human
ucaccugcuggccccucaccu

SEQ ID NO: 2082957 - RNA, 15 nt, Human
ucaccugaggucggg

SEQ ID NO: 2082958 - RNA, 17 nt, Human
ucaccugaggucgggag

SEQ ID NO: 2082959 - RNA, 11 nt, Human
ucaccugcugg

SEQ ID NO: 2082960 - RNA, 15 nt, Human
ucaccugcuggcccc

SEQ ID NO: 2082961 - RNA, 16 nt, Human
ucaccugcuggccccu

SEQ ID NO: 2082962 - RNA, 17 nt, Human
ucaccugggcaccuggg

SEQ ID NO: 2082963 - RNA, 23 nt, Human
ucacugaaugcuucugacuucau

SEQ ID NO: 2082964 - RNA, 11 nt, Human
accacaguguc

SEQ ID NO: 2082965 - RNA, 19 nt, Human
accacagcaggugucauau

SEQ ID NO: 2082966 - RNA, 12 nt, Human
accacagugucu

SEQ ID NO: 2082967 - RNA, 13 nt, Human
accacagugucug

SEQ ID NO: 2082968 - RNA, 14 nt, Human
accacauccuccgu

SEQ ID NO: 2082969 - RNA, 20 nt, Human
accacauccuccguccagcc

SEQ ID NO: 2082970 - RNA, 14 nt, Human
accacaucuugcuc

SEQ ID NO: 2082971 - RNA, 14 nt, Human
uauuucaggauucu

SEQ ID NO: 2082972 - RNA, 21 nt, Human
accacacuuccuguccagaga

SEQ ID NO: 2082973 - RNA, 22 nt, Human
accacacuuccuguccagagag

SEQ ID NO: 2082974 - RNA, 13 nt, Human
accacacuuccug

SEQ ID NO: 2082975 - RNA, 16 nt, Human
accacacuuccugucc

SEQ ID NO: 2082976 - RNA, 17 nt, Human
accacacuuccugucca

SEQ ID NO: 2082977 - RNA, 24 nt, Human
accacaucuugcucugcugacaga

SEQ ID NO: 2082978 - RNA, 21 nt, Human
accacaucuugcucugcugac

SEQ ID NO: 2082979 - RNA, 20 nt, Human
accacaucuugcucugcuga

SEQ ID NO: 2082980 - RNA, 16 nt, Human
accacaucuugcucug

SEQ ID NO: 2082981 - RNA, 21 nt, Human
accacauccuccguccagccg

SEQ ID NO: 2082982 - RNA, 22 nt, Human
accacauccuccguccagccgc

SEQ ID NO: 2082983 - RNA, 15 nt, Human
accacuucagcugac

SEQ ID NO: 2082984 - RNA, 18 nt, Human
accacuuaaaaaaugucc

SEQ ID NO: 2082985 - RNA, 13 nt, Human
accacuucagcug

SEQ ID NO: 2082986 - RNA, 14 nt, Human
accacuucagcuga

SEQ ID NO: 2082987 - RNA, 21 nt, Human
accacugaagauagaagaaaa

SEQ ID NO: 2082988 - RNA, 17 nt, Human
accagacaccuugacag

SEQ ID NO: 2082989 - RNA, 23 nt, Human
accagacaccuugacagggcaca

SEQ ID NO: 2082990 - RNA, 22 nt, Human
accagacaccuugacagggcac

SEQ ID NO: 2082991 - RNA, 22 nt, Human
accagagcccaccuuggcucaa

SEQ ID NO: 2082992 - RNA, 19 nt, Human
accagagcccaccuuggcu

SEQ ID NO: 2082993 - RNA, 13 nt, Human
accagagcacugu

SEQ ID NO: 2082994 - RNA, 14 nt, Human
accagagcacugua

SEQ ID NO: 2082995 - RNA, 15 nt, Human
accagagcacuguau

SEQ ID NO: 2082996 - RNA, 16 nt, Human
accagagcacuguaua

SEQ ID NO: 2082997 - RNA, 17 nt, Human
accagagcacuguauac

SEQ ID NO: 2082998 - RNA, 20 nt, Human
accagagcacuguauacccc

SEQ ID NO: 2082999 - RNA, 20 nt, Human
accagagauaauaugagaau

SEQ ID NO: 2083000 - RNA, 13 nt, Human
accagagccaugg

SEQ ID NO: 2083001 - RNA, 14 nt, Human
accagagccaugga

SEQ ID NO: 2083002 - RNA, 17 nt, Human
accagagccauggacuc

SEQ ID NO: 2083003 - RNA, 23 nt, Human
accagagccauggacucuacacu

SEQ ID NO: 2083004 - RNA, 20 nt, Human
accagccuggucaacauggu

SEQ ID NO: 2083005 - RNA, 14 nt, Human
accagccugggcag

SEQ ID NO: 2083006 - RNA, 16 nt, Human
accagccuuucuccca

SEQ ID NO: 2083007 - RNA, 17 nt, Human
accagccuuucucccag

SEQ ID NO: 2083008 - RNA, 20 nt, Human
accagccuggccaacauggu

SEQ ID NO: 2083009 - RNA, 15 nt, Human
accagccuggccaac

SEQ ID NO: 2083010 - RNA, 20 nt, Human
accagccugaccaacauggu

SEQ ID NO: 2083011 - RNA, 13 nt, Human
accagccugggca

SEQ ID NO: 2083012 - RNA, 12 nt, Human
accagccuggcc

SEQ ID NO: 2083013 - RNA, 11 nt, Human
accagccuggc

SEQ ID NO: 2083014 - RNA, 20 nt, Human
accagagccccacacggagg

SEQ ID NO: 2083015 - RNA, 14 nt, Human
accagagccccaca

SEQ ID NO: 2083016 - RNA, 17 nt, Human
accagagccccacacgg

SEQ ID NO: 2083017 - RNA, 14 nt, Human
accagagcucugga

SEQ ID NO: 2083018 - RNA, 15 nt, Human
accagagcucuggag

SEQ ID NO: 2083019 - RNA, 17 nt, Human
accagagcucuggagcc

SEQ ID NO: 2083020 - RNA, 18 nt, Human
accagagcucuggagcca

SEQ ID NO: 2083021 - RNA, 23 nt, Human
accagagcucuggagccaccugu

SEQ ID NO: 2083022 - RNA, 19 nt, Human
accagccuuucucccaggc

SEQ ID NO: 2083023 - RNA, 22 nt, Human
accagccuuucucccaggccag

SEQ ID NO: 2083024 - RNA, 17 nt, Human
accaggacucccuccuc

SEQ ID NO: 2083025 - RNA, 18 nt, Human
accaggacucccuccuca

SEQ ID NO: 2083026 - RNA, 21 nt, Human
accaggacucccuccucaccu

SEQ ID NO: 2083027 - RNA, 14 nt, Human
accaggagaaccac

SEQ ID NO: 2083028 - RNA, 18 nt, Human
accaggagaaccacuaca

SEQ ID NO: 2083029 - RNA, 19 nt, Human
accaggagaaccacuacau

SEQ ID NO: 2083030 - RNA, 20 nt, Human
accaggagaaccacuacaug

SEQ ID NO: 2083031 - RNA, 11 nt, Human
accaggagaca

SEQ ID NO: 2083032 - RNA, 12 nt, Human
accaggagacag

SEQ ID NO: 2083033 - RNA, 17 nt, Human
accaggagucccuggua

SEQ ID NO: 2083034 - RNA, 22 nt, Human
accaggagucccugguaauaag

SEQ ID NO: 2083035 - RNA, 20 nt, Human
accaggcacgaacccaccug

SEQ ID NO: 2083036 - RNA, 21 nt, Human
accaggcacgaacccaccugc

SEQ ID NO: 2083037 - RNA, 22 nt, Human
accaggcacgaacccaccugcu

SEQ ID NO: 2083038 - RNA, 23 nt, Human
accaggcacgaacccaccugcug

SEQ ID NO: 2083039 - RNA, 19 nt, Human
accaggcaacuugggaacu

SEQ ID NO: 2083040 - RNA, 23 nt, Human
ucaccugaagacucauucuucug

SEQ ID NO: 2083041 - RNA, 21 nt, Human
ucaccugagcccggaugcuuc

SEQ ID NO: 2083042 - RNA, 22 nt, Human
ucaccugagcccggaugcuucu

SEQ ID NO: 2083043 - RNA, 23 nt, Human
ucaccugagcccggaugcuucuc

SEQ ID NO: 2083044 - RNA, 19 nt, Human
ucaccugaagacucauucu

SEQ ID NO: 2083045 - RNA, 19 nt, Human
accaggccgccccagccuc

SEQ ID NO: 2083046 - RNA, 16 nt, Human
accaggccgccccagc

SEQ ID NO: 2083047 - RNA, 13 nt, Human
ucaccuccccucc

SEQ ID NO: 2083048 - RNA, 14 nt, Human
ucaccuccccuccu

SEQ ID NO: 2083049 - RNA, 15 nt, Human
ucaccuccccuccuu

SEQ ID NO: 2083050 - RNA, 17 nt, Human
ucaccuccccuccuugc

SEQ ID NO: 2083051 - RNA, 20 nt, Human
ugacuuauuuauauaaauuu

SEQ ID NO: 2083052 - RNA, 17 nt, Human
ugacuuauuuauauaaa

SEQ ID NO: 2083053 - RNA, 21 nt, Human
ugacuuauuuauauaaauuuu

SEQ ID NO: 2083054 - RNA, 17 nt, Human
ugacuguggccaugguc

SEQ ID NO: 2083055 - RNA, 19 nt, Human
ugacuguaucuguguagac

SEQ ID NO: 2083056 - RNA, 13 nt, Human
ugacucauccucu

SEQ ID NO: 2083057 - RNA, 16 nt, Human
ugacuguaucugugua

SEQ ID NO: 2083058 - RNA, 17 nt, Human
ugacuguaucuguguag

SEQ ID NO: 2083059 - RNA, 18 nt, Human
ugacuguaucuguguaga

SEQ ID NO: 2083060 - RNA, 14 nt, Human
ugaccugaggaagc

SEQ ID NO: 2083061 - RNA, 15 nt, Human
ugaccugaggaagcg

SEQ ID NO: 2083062 - RNA, 18 nt, Human
ugacucacuuaucccaag

SEQ ID NO: 2083063 - RNA, 16 nt, Human
ugacucagaugucucu

SEQ ID NO: 2083064 - RNA, 20 nt, Human
ugacuucgacugugaccugu

SEQ ID NO: 2083065 - RNA, 22 nt, Human
ugacuuccccgcauuccaggcu

SEQ ID NO: 2083066 - RNA, 23 nt, Human
ugacuuccccgcauuccaggcuc

SEQ ID NO: 2083067 - RNA, 14 nt, Human
ugacuuccacaccu

SEQ ID NO: 2083068 - RNA, 17 nt, Human
ugacuugacagaacacu

SEQ ID NO: 2083069 - RNA, 19 nt, Human
ugacuugacagaacacugu

SEQ ID NO: 2083070 - RNA, 11 nt, Human
agauucaauuu

SEQ ID NO: 2083071 - RNA, 17 nt, Human
agauucaauuuucuuua

SEQ ID NO: 2083072 - RNA, 12 nt, Human
ugacuuucaggu

SEQ ID NO: 2083073 - RNA, 16 nt, Human
agauuauauugagaca

SEQ ID NO: 2083074 - RNA, 21 nt, Human
agauuauauugagacaaaaau

SEQ ID NO: 2083075 - RNA, 21 nt, Human
agcaaaaccaaauauuccaga

SEQ ID NO: 2083076 - RNA, 23 nt, Human
agauuuuccacaagauucccaga

SEQ ID NO: 2083077 - RNA, 20 nt, Human
agcaacagagugagacccug

SEQ ID NO: 2083078 - RNA, 22 nt, Human
agcaacagagugagacccuguc

SEQ ID NO: 2083079 - RNA, 23 nt, Human
agcaacagagugagacccugucu

SEQ ID NO: 2083080 - RNA, 13 nt, Human
agcaacacaaugu

SEQ ID NO: 2083081 - RNA, 21 nt, Human
agcaacacaauguuauucguu

SEQ ID NO: 2083082 - RNA, 15 nt, Human
agcaacaugcuucau

SEQ ID NO: 2083083 - RNA, 20 nt, Human
agcaacaugcuucaugaaaa

SEQ ID NO: 2083084 - RNA, 21 nt, Human
agcaacaucuagcaaauguua

SEQ ID NO: 2083085 - RNA, 16 nt, Human
agcaaccagagcacug

SEQ ID NO: 2083086 - RNA, 17 nt, Human
agcaaccagagcacugu

SEQ ID NO: 2083087 - RNA, 18 nt, Human
agcaaccagagcacugua

SEQ ID NO: 2083088 - RNA, 14 nt, Human
agauucaccuguaa

SEQ ID NO: 2083089 - RNA, 15 nt, Human
agauucaccuguaaa

SEQ ID NO: 2083090 - RNA, 16 nt, Human
agauucaccuguaaaa

SEQ ID NO: 2083091 - RNA, 17 nt, Human
agauucaccuguaaaac

SEQ ID NO: 2083092 - RNA, 19 nt, Human
agauucaccuguaaaacuu

SEQ ID NO: 2083093 - RNA, 20 nt, Human
agauucaccuguaaaacuuu

SEQ ID NO: 2083094 - RNA, 21 nt, Human
agauucaccuguaaaacuuua

SEQ ID NO: 2083095 - RNA, 21 nt, Human
agauuuacccagaaugucaga

SEQ ID NO: 2083096 - RNA, 18 nt, Human
agauuuagugaaagcuag

SEQ ID NO: 2083097 - RNA, 20 nt, Human
agauuugaagacaaaaauac

SEQ ID NO: 2083098 - RNA, 16 nt, Human
agauuuggagcacucu

SEQ ID NO: 2083099 - RNA, 14 nt, Human
agauuugcccauuu

SEQ ID NO: 2083100 - RNA, 16 nt, Human
agauuugcccauuuac

SEQ ID NO: 2083101 - RNA, 17 nt, Human
agauuugcccauuuaca

SEQ ID NO: 2083102 - RNA, 20 nt, Human
agauuugcccauuuacacuu

SEQ ID NO: 2083103 - RNA, 22 nt, Human
agauuugcccauuuacacuuuu

SEQ ID NO: 2083104 - RNA, 20 nt, Human
agauuuggugaauuugaauc

SEQ ID NO: 2083105 - RNA, 21 nt, Human
agauuuggugaauuugaaucu

SEQ ID NO: 2083106 - RNA, 21 nt, Human
agauuuguacuacaguucuuu

SEQ ID NO: 2083107 - RNA, 13 nt, Human
agauuuaauuugc

SEQ ID NO: 2083108 - RNA, 16 nt, Human
agauuuaauuugccaa

SEQ ID NO: 2083109 - RNA, 17 nt, Human
agauuuaauuugccaaa

SEQ ID NO: 2083110 - RNA, 21 nt, Human
agauuuaauuugccaaaauaa

SEQ ID NO: 2083111 - RNA, 15 nt, Human
agauuuauuuuguua

SEQ ID NO: 2083112 - RNA, 17 nt, Human
ugaccaacaguuccuuc

SEQ ID NO: 2083113 - RNA, 16 nt, Human
ugaccaacauggagaa

SEQ ID NO: 2083114 - RNA, 17 nt, Human
ugaccaacauggagaaa

SEQ ID NO: 2083115 - RNA, 18 nt, Human
ugaccaacauggagaaac

SEQ ID NO: 2083116 - RNA, 20 nt, Human
ugaccaacauggagaaaccc

SEQ ID NO: 2083117 - RNA, 15 nt, Human
ugaccacacuuccug

SEQ ID NO: 2083118 - RNA, 18 nt, Human
ugaccacacuuccugucc

SEQ ID NO: 2083119 - RNA, 20 nt, Human
ugaccacacuuccuguccag

SEQ ID NO: 2083120 - RNA, 23 nt, Human
ugaccacacuuccuguccagaga

SEQ ID NO: 2083121 - RNA, 14 nt, Human
agauccacacacag

SEQ ID NO: 2083122 - RNA, 15 nt, Human
agauccacacacaga

SEQ ID NO: 2083123 - RNA, 16 nt, Human
agauccacacacagag

SEQ ID NO: 2083124 - RNA, 17 nt, Human
agauccacacacagagg

SEQ ID NO: 2083125 - RNA, 18 nt, Human
agauccacacacagagga

SEQ ID NO: 2083126 - RNA, 14 nt, Human
agaucgucaggacc

SEQ ID NO: 2083127 - RNA, 21 nt, Human
agaucgugccguuacucucca

SEQ ID NO: 2083128 - RNA, 22 nt, Human
agaucgugccguuacucuccaa

SEQ ID NO: 2083129 - RNA, 21 nt, Human
agauccugucuuuaaggaaaa

SEQ ID NO: 2083130 - RNA, 20 nt, Human
agauccuuuaaauccuucca

SEQ ID NO: 2083131 - RNA, 14 nt, Human
agaucgcaguuugc

SEQ ID NO: 2083132 - RNA, 15 nt, Human
agaucgcaguuugcc

SEQ ID NO: 2083133 - RNA, 14 nt, Human
agaucggggccaga

SEQ ID NO: 2083134 - RNA, 15 nt, Human
agaucggggccagag

SEQ ID NO: 2083135 - RNA, 17 nt, Human
agaucggggccagaggc

SEQ ID NO: 2083136 - RNA, 18 nt, Human
agaucggggccagaggca

SEQ ID NO: 2083137 - RNA, 19 nt, Human
agaucggggccagaggcag

SEQ ID NO: 2083138 - RNA, 18 nt, Human
ugacauuguagagcuucu

SEQ ID NO: 2083139 - RNA, 20 nt, Human
ugacagugccugggaaugua

SEQ ID NO: 2083140 - RNA, 17 nt, Human
ugacagugccugggaau

SEQ ID NO: 2083141 - RNA, 12 nt, Human
ugacagugaggu

SEQ ID NO: 2083142 - RNA, 19 nt, Human
ugacagugagguccugggg

SEQ ID NO: 2083143 - RNA, 20 nt, Human
ugacagugagguccuggggg

SEQ ID NO: 2083144 - RNA, 14 nt, Human
ugacagugccuggg

SEQ ID NO: 2083145 - RNA, 14 nt, Human
agaucacuuugcuc

SEQ ID NO: 2083146 - RNA, 15 nt, Human
agaucacuuugcucu

SEQ ID NO: 2083147 - RNA, 13 nt, Human
ugaauuuaacaau

SEQ ID NO: 2083148 - RNA, 14 nt, Human
ugaauuuaacaaug

SEQ ID NO: 2083149 - RNA, 16 nt, Human
ugaauuuaacaaugcg

SEQ ID NO: 2083150 - RNA, 18 nt, Human
ugaauuuaacaaugcgaa

SEQ ID NO: 2083151 - RNA, 23 nt, Human
ugaauuuaacaaugcgaauggua

SEQ ID NO: 2083152 - RNA, 17 nt, Human
ugacaguaacuugguua

SEQ ID NO: 2083153 - RNA, 21 nt, Human
ugacaguaacuugguuauaca

SEQ ID NO: 2083154 - RNA, 22 nt, Human
ugacaguaacuugguuauacau

SEQ ID NO: 2083155 - RNA, 14 nt, Human
ugaccccccucagg

SEQ ID NO: 2083156 - RNA, 15 nt, Human
ugaccccccucagga

SEQ ID NO: 2083157 - RNA, 22 nt, Human
ugacccccaaccaaguggcucc

SEQ ID NO: 2083158 - RNA, 13 nt, Human
ugaccucugccug

SEQ ID NO: 2083159 - RNA, 14 nt, Human
ugaccucugccuga

SEQ ID NO: 2083160 - RNA, 17 nt, Human
agaugugucuucaauuu

SEQ ID NO: 2083161 - RNA, 16 nt, Human
ugacccagucccuggg

SEQ ID NO: 2083162 - RNA, 20 nt, Human
ugacccagucccugggggaa

SEQ ID NO: 2083163 - RNA, 12 nt, Human
ugacccaguccc

SEQ ID NO: 2083164 - RNA, 14 nt, Human
ugacccagucccug

SEQ ID NO: 2083165 - RNA, 15 nt, Human
ugacccagucccugg

SEQ ID NO: 2083166 - RNA, 12 nt, Human
ugacccaggcug

SEQ ID NO: 2083167 - RNA, 16 nt, Human
ugacccaggcugccug

SEQ ID NO: 2083168 - RNA, 19 nt, Human
ugacccaggcugccugagc

SEQ ID NO: 2083169 - RNA, 22 nt, Human
agaugucccuuucuuggccagu

SEQ ID NO: 2083170 - RNA, 20 nt, Human
agaugucccuuucuuggcca

SEQ ID NO: 2083171 - RNA, 21 nt, Human
agaugucccuuucuuggccag

SEQ ID NO: 2083172 - RNA, 16 nt, Human
agaugucaucccauug

SEQ ID NO: 2083173 - RNA, 18 nt, Human
agaugucagacuggcugg

SEQ ID NO: 2083174 - RNA, 22 nt, Human
agaugucucuggcgugugggua

SEQ ID NO: 2083175 - RNA, 18 nt, Human
agaugucuaauaguuauu

SEQ ID NO: 2083176 - RNA, 11 nt, Human
agauggauucu

SEQ ID NO: 2083177 - RNA, 15 nt, Human
agauggauucucaga

SEQ ID NO: 2083178 - RNA, 16 nt, Human
agauggauucucagau

SEQ ID NO: 2083179 - RNA, 17 nt, Human
agauggauucucagaua

SEQ ID NO: 2083180 - RNA, 15 nt, Human
agaugucagacuggc

SEQ ID NO: 2083181 - RNA, 16 nt, Human
agauggcaaaugacca

SEQ ID NO: 2083182 - RNA, 18 nt, Human
agauggauugguguaaaa

SEQ ID NO: 2083183 - RNA, 15 nt, Human
agauggauuugccug

SEQ ID NO: 2083184 - RNA, 20 nt, Human
agauggauuugccugugcca

SEQ ID NO: 2083185 - RNA, 18 nt, Human
agauggauucucagauau

SEQ ID NO: 2083186 - RNA, 20 nt, Human
agauggauucucagauauuu

SEQ ID NO: 2083187 - RNA, 18 nt, Human
agaugcuucucacugcca

SEQ ID NO: 2083188 - RNA, 16 nt, Human
agaugcuucucacugc

SEQ ID NO: 2083189 - RNA, 12 nt, Human
agaugcuucugg

SEQ ID NO: 2083190 - RNA, 15 nt, Human
agaugcuucugggag

SEQ ID NO: 2083191 - RNA, 16 nt, Human
agaugcuucugggaga

SEQ ID NO: 2083192 - RNA, 20 nt, Human
agaugcaaagaggcaagagg

SEQ ID NO: 2083193 - RNA, 18 nt, Human
agaugcaaagaggcaaga

SEQ ID NO: 2083194 - RNA, 20 nt, Human
agaugcucagguacagagaa

SEQ ID NO: 2083195 - RNA, 21 nt, Human
agaugcucagguacagagaag

SEQ ID NO: 2083196 - RNA, 14 nt, Human
agaugcaaagaggc

SEQ ID NO: 2083197 - RNA, 15 nt, Human
agaugcaaagaggca

SEQ ID NO: 2083198 - RNA, 16 nt, Human
agaugcaaagaggcaa

SEQ ID NO: 2083199 - RNA, 17 nt, Human
agaugcaaagaggcaag

SEQ ID NO: 2083200 - RNA, 17 nt, Human
ugaagccgccaggaccg

SEQ ID NO: 2083201 - RNA, 16 nt, Human
ugaagcuuauuaaugc

SEQ ID NO: 2083202 - RNA, 14 nt, Human
ugaagcugcaguga

SEQ ID NO: 2083203 - RNA, 17 nt, Human
ugaagcuuauuaaugcu

SEQ ID NO: 2083204 - RNA, 18 nt, Human
ugaagcuuauuaaugcua

SEQ ID NO: 2083205 - RNA, 19 nt, Human
ugaagcuuauuaaugcuaa

SEQ ID NO: 2083206 - RNA, 20 nt, Human
ugaagcuuauuaaugcuaag

SEQ ID NO: 2083207 - RNA, 23 nt, Human
ugaagcuuauuaaugcuaagggc

SEQ ID NO: 2083208 - RNA, 22 nt, Human
ugaagcuuauuaaugcuaaggg

SEQ ID NO: 2083209 - RNA, 19 nt, Human
ugaagccacugaagcuggg

SEQ ID NO: 2083210 - RNA, 15 nt, Human
ugaagcauccaggca

SEQ ID NO: 2083211 - RNA, 16 nt, Human
ugaagcccaagugaaa

SEQ ID NO: 2083212 - RNA, 19 nt, Human
ugaagcccaauaaaccucu

SEQ ID NO: 2083213 - RNA, 15 nt, Human
ugaagcccaauaaac

SEQ ID NO: 2083214 - RNA, 20 nt, Human
ugaagccacugaagcuggga

SEQ ID NO: 2083215 - RNA, 20 nt, Human
ugaagaugucaucccauugu

SEQ ID NO: 2083216 - RNA, 16 nt, Human
ugaagaugucuaauag

SEQ ID NO: 2083217 - RNA, 13 nt, Human
ugaagauguuugc

SEQ ID NO: 2083218 - RNA, 15 nt, Human
ugaagauguuugcaa

SEQ ID NO: 2083219 - RNA, 17 nt, Human
ugaagauguuugcaaua

SEQ ID NO: 2083220 - RNA, 19 nt, Human
ugaagauuauuuuuuauga

SEQ ID NO: 2083221 - RNA, 19 nt, Human
ugaagcagaugcaaagagg

SEQ ID NO: 2083222 - RNA, 22 nt, Human
ugaagcagaugcaaagaggcaa

SEQ ID NO: 2083223 - RNA, 23 nt, Human
ugaagcagaugcaaagaggcaag

SEQ ID NO: 2083224 - RNA, 14 nt, Human
agaggugagggaag

SEQ ID NO: 2083225 - RNA, 19 nt, Human
agaggucuuuuuuaaaagg

SEQ ID NO: 2083226 - RNA, 21 nt, Human
agagggacagcccacugagaa

SEQ ID NO: 2083227 - RNA, 17 nt, Human
agagggaagagugcauu

SEQ ID NO: 2083228 - RNA, 24 nt, Human
agaggcaccacuaaaagaucgcag

SEQ ID NO: 2083229 - RNA, 15 nt, Human
agaggcagaacccug

SEQ ID NO: 2083230 - RNA, 16 nt, Human
agaggcagaacccugg

SEQ ID NO: 2083231 - RNA, 19 nt, Human
agaggcagaacccugguga

SEQ ID NO: 2083232 - RNA, 13 nt, Human
agagggaaaaugu

SEQ ID NO: 2083233 - RNA, 20 nt, Human
agagggaaacgugcccucug

SEQ ID NO: 2083234 - RNA, 14 nt, Human
agagggaagaaaag

SEQ ID NO: 2083235 - RNA, 15 nt, Human
agagggaagaaaaga

SEQ ID NO: 2083236 - RNA, 23 nt, Human
agagggaagaaaagagcuuucuu

SEQ ID NO: 2083237 - RNA, 15 nt, Human
agagcuucuggcacu

SEQ ID NO: 2083238 - RNA, 16 nt, Human
agagcuggugcccgga

SEQ ID NO: 2083239 - RNA, 15 nt, Human
agagcuggugcccgg

SEQ ID NO: 2083240 - RNA, 19 nt, Human
agagcugggugucaagagg

SEQ ID NO: 2083241 - RNA, 13 nt, Human
agagcuggugccc

SEQ ID NO: 2083242 - RNA, 21 nt, Human
agagcugguaguuaguagcau

SEQ ID NO: 2083243 - RNA, 23 nt, Human
agagcugguaguuaguagcaugu

SEQ ID NO: 2083244 - RNA, 13 nt, Human
agagcugggaggg

SEQ ID NO: 2083245 - RNA, 11 nt, Human
agagcugggug

SEQ ID NO: 2083246 - RNA, 12 nt, Human
agagcuggguga

SEQ ID NO: 2083247 - RNA, 16 nt, Human
agagcugggugagugg

SEQ ID NO: 2083248 - RNA, 16 nt, Human
ugaagacaaaaauacu

SEQ ID NO: 2083249 - RNA, 17 nt, Human
ugaagacaaaaauacuc

SEQ ID NO: 2083250 - RNA, 18 nt, Human
ugaagacaaaaauacucu

SEQ ID NO: 2083251 - RNA, 20 nt, Human
ugaagacaaaaauacucuaa

SEQ ID NO: 2083252 - RNA, 21 nt, Human
ugaagacaaaaauacucuaau

SEQ ID NO: 2083253 - RNA, 22 nt, Human
ugaagacaaaaauacucuaauu

SEQ ID NO: 2083254 - RNA, 18 nt, Human
agaggcaacugcauuggc

SEQ ID NO: 2083255 - RNA, 17 nt, Human
agagaauggaaaacaga

SEQ ID NO: 2083256 - RNA, 18 nt, Human
ucuuugguccucuugcca

SEQ ID NO: 2083257 - RNA, 21 nt, Human
ucuuuguaaguaaacugcccu

SEQ ID NO: 2083258 - RNA, 22 nt, Human
ucuuuguaaguaaacugcccug

SEQ ID NO: 2083259 - RNA, 23 nt, Human
ucuuuguaaucguuaugugugua

SEQ ID NO: 2083260 - RNA, 11 nt, Human
ugaagaagaga

SEQ ID NO: 2083261 - RNA, 18 nt, Human
agauaauucuagcuuuga

SEQ ID NO: 2083262 - RNA, 15 nt, Human
agauaaucucucagc

SEQ ID NO: 2083263 - RNA, 18 nt, Human
agagucucacuccccucc

SEQ ID NO: 2083264 - RNA, 19 nt, Human
agauaaucuuagcugccaa

SEQ ID NO: 2083265 - RNA, 13 nt, Human
agauaaucccugu

SEQ ID NO: 2083266 - RNA, 15 nt, Human
agauaaucagccucu

SEQ ID NO: 2083267 - RNA, 16 nt, Human
agauaaucagccucuu

SEQ ID NO: 2083268 - RNA, 17 nt, Human
agauaaucagccucuua

SEQ ID NO: 2083269 - RNA, 12 nt, Human
agauaaaaagau

SEQ ID NO: 2083270 - RNA, 14 nt, Human
agauaaaaagaugg

SEQ ID NO: 2083271 - RNA, 21 nt, Human
agauaaaaagauggccuuugc

SEQ ID NO: 2083272 - RNA, 21 nt, Human
agagugagagggcaugcgcac

SEQ ID NO: 2083273 - RNA, 19 nt, Human
agagugagacucugucuca

SEQ ID NO: 2083274 - RNA, 15 nt, Human
agagugagacccugu

SEQ ID NO: 2083275 - RNA, 14 nt, Human
agagugagagggca

SEQ ID NO: 2083276 - RNA, 19 nt, Human
agauaaacucagaaauuua

SEQ ID NO: 2083277 - RNA, 13 nt, Human
agauaaacucaga

SEQ ID NO: 2083278 - RNA, 14 nt, Human
agauaaagauuucu

SEQ ID NO: 2083279 - RNA, 17 nt, Human
agauaaagauuucuuga

SEQ ID NO: 2083280 - RNA, 18 nt, Human
agauacauuuguauguug

SEQ ID NO: 2083281 - RNA, 23 nt, Human
agauacauuuguauguugugaag

SEQ ID NO: 2083282 - RNA, 21 nt, Human
agauacaugguugugaccuga

SEQ ID NO: 2083283 - RNA, 17 nt, Human
agauacaucacagucac

SEQ ID NO: 2083284 - RNA, 19 nt, Human
agauacaggaaaagcugcu

SEQ ID NO: 2083285 - RNA, 18 nt, Human
agauaccagguugaaaga

SEQ ID NO: 2083286 - RNA, 19 nt, Human
agauaccagguugaaagac

SEQ ID NO: 2083287 - RNA, 14 nt, Human
agauaccaucagca

SEQ ID NO: 2083288 - RNA, 15 nt, Human
agauaccaucagcaa

SEQ ID NO: 2083289 - RNA, 20 nt, Human
agauaccaucagcaaagaau

SEQ ID NO: 2083290 - RNA, 22 nt, Human
agauaccaucagcaaagaauuu

SEQ ID NO: 2083291 - RNA, 14 nt, Human
agauacgacuuuau

SEQ ID NO: 2083292 - RNA, 19 nt, Human
agaucaaccccuucgcucc

SEQ ID NO: 2083293 - RNA, 14 nt, Human
agaucaaccccuuc

SEQ ID NO: 2083294 - RNA, 16 nt, Human
agauacgacuuuauuu

SEQ ID NO: 2083295 - RNA, 18 nt, Human
agauauuuuuucagaaau

SEQ ID NO: 2083296 - RNA, 18 nt, Human
agaucacguuccuucccc

SEQ ID NO: 2083297 - RNA, 15 nt, Human
agaucaagagaucaa

SEQ ID NO: 2083298 - RNA, 19 nt, Human
agauauuuuuucagaaaua

SEQ ID NO: 2083299 - RNA, 21 nt, Human
agauauuuuuucagaaauaug

SEQ ID NO: 2083300 - RNA, 22 nt, Human
agauauuuuuucagaaauaugu

SEQ ID NO: 2083301 - RNA, 22 nt, Human
agauaaugugaacuagcuggaa

SEQ ID NO: 2083302 - RNA, 21 nt, Human
agaucaaccccuucgcuccug

SEQ ID NO: 2083303 - RNA, 22 nt, Human
agagucucacuguugcccaggc

SEQ ID NO: 2083304 - RNA, 20 nt, Human
agagucucacuguugcccag

SEQ ID NO: 2083305 - RNA, 16 nt, Human
agagugagacucuguc

SEQ ID NO: 2083306 - RNA, 15 nt, Human
agagugagacucugu

SEQ ID NO: 2083307 - RNA, 22 nt, Human
agagucggaacggagaaaggug

SEQ ID NO: 2083308 - RNA, 20 nt, Human
ugaaugccacgcgguacaaa

SEQ ID NO: 2083309 - RNA, 23 nt, Human
ugaaugcccacaggcaaaugcau

SEQ ID NO: 2083310 - RNA, 12 nt, Human
ugaauggccugc

SEQ ID NO: 2083311 - RNA, 15 nt, Human
ugaauggccugccuu

SEQ ID NO: 2083312 - RNA, 17 nt, Human
ugaauggccugccuuga

SEQ ID NO: 2083313 - RNA, 21 nt, Human
ugaauggccugccuugaagcc

SEQ ID NO: 2083314 - RNA, 16 nt, Human
ugaaugcauaaaaugu

SEQ ID NO: 2083315 - RNA, 15 nt, Human
ugaaugcauaaaaug

SEQ ID NO: 2083316 - RNA, 18 nt, Human
ugaauauauuauaaucuu

SEQ ID NO: 2083317 - RNA, 14 nt, Human
ugaaggugucagaa

SEQ ID NO: 2083318 - RNA, 15 nt, Human
ugaaggugucagaau

SEQ ID NO: 2083319 - RNA, 19 nt, Human
ugaaggucuugauuuguuu

SEQ ID NO: 2083320 - RNA, 13 nt, Human
ugaagguuucuga

SEQ ID NO: 2083321 - RNA, 16 nt, Human
ugaagguuucugaaaa

SEQ ID NO: 2083322 - RNA, 15 nt, Human
ugaauauaaacacua

SEQ ID NO: 2083323 - RNA, 14 nt, Human
ugaauauaaacacu

SEQ ID NO: 2083324 - RNA, 16 nt, Human
ugaauauaaacacuau

SEQ ID NO: 2083325 - RNA, 22 nt, Human
ugaauauaccccuuaguguuug

SEQ ID NO: 2083326 - RNA, 22 nt, Human
ugagggucagagaggagucaga

SEQ ID NO: 2083327 - RNA, 14 nt, Human
ugaggggcuccugg

SEQ ID NO: 2083328 - RNA, 15 nt, Human
ugaggggcuccugga

SEQ ID NO: 2083329 - RNA, 20 nt, Human
ugaggggucuccaggaggag

SEQ ID NO: 2083330 - RNA, 20 nt, Human
ugagggguauaucugggcug

SEQ ID NO: 2083331 - RNA, 17 nt, Human
ugaggggcaacgaagaa

SEQ ID NO: 2083332 - RNA, 18 nt, Human
ugagggccaagaaagagu

SEQ ID NO: 2083333 - RNA, 17 nt, Human
ugagggcgaggggaggg

SEQ ID NO: 2083334 - RNA, 21 nt, Human
ugaggggaggaucacuggagc

SEQ ID NO: 2083335 - RNA, 22 nt, Human
ugaggggaggaucacuggagcc

SEQ ID NO: 2083336 - RNA, 16 nt, Human
ugaggggcccgagcag

SEQ ID NO: 2083337 - RNA, 22 nt, Human
ugaggggcaucugccccucccc

SEQ ID NO: 2083338 - RNA, 21 nt, Human
ugaggggaggaaacucaccug

SEQ ID NO: 2083339 - RNA, 17 nt, Human
ugaggggcaucugcccc

SEQ ID NO: 2083340 - RNA, 15 nt, Human
ugaggccucagugga

SEQ ID NO: 2083341 - RNA, 19 nt, Human
ugaggccucaguggacuuu

SEQ ID NO: 2083342 - RNA, 17 nt, Human
ugagggaucacagggcc

SEQ ID NO: 2083343 - RNA, 18 nt, Human
ugagggaucacagggccc

SEQ ID NO: 2083344 - RNA, 14 nt, Human
ugagggauaagcaa

SEQ ID NO: 2083345 - RNA, 16 nt, Human
ugagggauaagcaaaa

SEQ ID NO: 2083346 - RNA, 17 nt, Human
ugagggauaagcaaaag

SEQ ID NO: 2083347 - RNA, 17 nt, Human
agcagaggaaggagagg

SEQ ID NO: 2083348 - RNA, 13 nt, Human
agcagaggcagcg

SEQ ID NO: 2083349 - RNA, 17 nt, Human
agcagaggcuggccuca

SEQ ID NO: 2083350 - RNA, 19 nt, Human
agcagaggcuggccucaga

SEQ ID NO: 2083351 - RNA, 18 nt, Human
agcagagggacuuuguau

SEQ ID NO: 2083352 - RNA, 16 nt, Human
agcagaucccagcuca

SEQ ID NO: 2083353 - RNA, 17 nt, Human
agcagaugaccccuccc

SEQ ID NO: 2083354 - RNA, 13 nt, Human
agcagaugcaaag

SEQ ID NO: 2083355 - RNA, 14 nt, Human
agcagaugcaaaga

SEQ ID NO: 2083356 - RNA, 17 nt, Human
agcagaugcaaagaggc

SEQ ID NO: 2083357 - RNA, 18 nt, Human
agcagaugcaaagaggca

SEQ ID NO: 2083358 - RNA, 19 nt, Human
agcagaugcaaagaggcaa

SEQ ID NO: 2083359 - RNA, 20 nt, Human
agcagaugcaaagaggcaag

SEQ ID NO: 2083360 - RNA, 21 nt, Human
agcagaugcaaagaggcaaga

SEQ ID NO: 2083361 - RNA, 22 nt, Human
agcagauuuuaauuuugaauaa

SEQ ID NO: 2083362 - RNA, 21 nt, Human
agcagauuuuaauuuugaaua

SEQ ID NO: 2083363 - RNA, 13 nt, Human
agcagauuuuaau

SEQ ID NO: 2083364 - RNA, 18 nt, Human
agcagauuuaacaauucc

SEQ ID NO: 2083365 - RNA, 20 nt, Human
agcagauuggagaaacccuu

SEQ ID NO: 2083366 - RNA, 20 nt, Human
ugaggguugggcugguguca

SEQ ID NO: 2083367 - RNA, 12 nt, Human
ugagggucuucu

SEQ ID NO: 2083368 - RNA, 19 nt, Human
ugagggucuucuuacaugc

SEQ ID NO: 2083369 - RNA, 21 nt, Human
ugagggugcuuguucccucuc

SEQ ID NO: 2083370 - RNA, 13 nt, Human
ugaggucagagcc

SEQ ID NO: 2083371 - RNA, 16 nt, Human
ugaggucagagccugc

SEQ ID NO: 2083372 - RNA, 14 nt, Human
ugaggucagagccu

SEQ ID NO: 2083373 - RNA, 17 nt, Human
ugaggucagagccugca

SEQ ID NO: 2083374 - RNA, 20 nt, Human
ugaggucaaguaagaagaca

SEQ ID NO: 2083375 - RNA, 14 nt, Human
agcagagcaggggc

SEQ ID NO: 2083376 - RNA, 15 nt, Human
agcagagcaggggca

SEQ ID NO: 2083377 - RNA, 19 nt, Human
ugagcuuggccagaagggg

SEQ ID NO: 2083378 - RNA, 21 nt, Human
ugagcuuggccagaagggggc

SEQ ID NO: 2083379 - RNA, 22 nt, Human
ugagcuuuauguaauaauguga

SEQ ID NO: 2083380 - RNA, 19 nt, Human
ugaggaaaggccagcuggc

SEQ ID NO: 2083381 - RNA, 15 nt, Human
ugagcuuuggacaca

SEQ ID NO: 2083382 - RNA, 17 nt, Human
ugagcuuuggacacaca

SEQ ID NO: 2083383 - RNA, 21 nt, Human
ugagcuuuggacacacacagc

SEQ ID NO: 2083384 - RNA, 22 nt, Human
ugagcuuuggacacacacagcu

SEQ ID NO: 2083385 - RNA, 23 nt, Human
ugagcuuuggacacacacagcuu

SEQ ID NO: 2083386 - RNA, 19 nt, Human
ugagcuuuggacgcacaca

SEQ ID NO: 2083387 - RNA, 21 nt, Human
ugagcuuuggacgcacacagc

SEQ ID NO: 2083388 - RNA, 22 nt, Human
ugagcuuuggacgcacacagcu

SEQ ID NO: 2083389 - RNA, 23 nt, Human
ugagcuuuggacgcacacagcuu

SEQ ID NO: 2083390 - RNA, 15 nt, Human
ugaggaaaggccagc

SEQ ID NO: 2083391 - RNA, 16 nt, Human
ugaggaaaggccagcu

SEQ ID NO: 2083392 - RNA, 18 nt, Human
ugaggaaaggccagcugg

SEQ ID NO: 2083393 - RNA, 17 nt, Human
ugaggaagcgugaaggc

SEQ ID NO: 2083394 - RNA, 16 nt, Human
ugaggaagcuccaguc

SEQ ID NO: 2083395 - RNA, 19 nt, Human
ugaggaagcuccaguccug

SEQ ID NO: 2083396 - RNA, 20 nt, Human
ugaggaagcuccaguccugc

SEQ ID NO: 2083397 - RNA, 23 nt, Human
ugaggaagcuccaguccugcucu

SEQ ID NO: 2083398 - RNA, 22 nt, Human
ugaggaagcgugaaggccgaga

SEQ ID NO: 2083399 - RNA, 16 nt, Human
ugaggaaugaugaagc

SEQ ID NO: 2083400 - RNA, 19 nt, Human
ugaggaaucaacagggcag

SEQ ID NO: 2083401 - RNA, 20 nt, Human
ugaggaaucaacagggcagc

SEQ ID NO: 2083402 - RNA, 22 nt, Human
ugaggaauccagacccggcugc

SEQ ID NO: 2083403 - RNA, 21 nt, Human
ugaggaauccagacccggcug

SEQ ID NO: 2083404 - RNA, 21 nt, Human
ugaggacacuaaccacgcugg

SEQ ID NO: 2083405 - RNA, 22 nt, Human
ugaggccaaacguuuugaacua

SEQ ID NO: 2083406 - RNA, 12 nt, Human
ugaggccaggag

SEQ ID NO: 2083407 - RNA, 13 nt, Human
ugaggccaggagu

SEQ ID NO: 2083408 - RNA, 13 nt, Human
ugaggcccaggga

SEQ ID NO: 2083409 - RNA, 14 nt, Human
ugaggcccagggag

SEQ ID NO: 2083410 - RNA, 17 nt, Human
ugaggcccagggagagg

SEQ ID NO: 2083411 - RNA, 20 nt, Human
ugaggcccagggagaggcca

SEQ ID NO: 2083412 - RNA, 23 nt, Human
ugaggcccagggagaggccauga

SEQ ID NO: 2083413 - RNA, 19 nt, Human
agcagaaucaaaaugaccu

SEQ ID NO: 2083414 - RNA, 21 nt, Human
agcagagaaugaaagggccca

SEQ ID NO: 2083415 - RNA, 23 nt, Human
agcagagaaugaaagggcccaga

SEQ ID NO: 2083416 - RNA, 22 nt, Human
agcagagaaugaaagggcccag

SEQ ID NO: 2083417 - RNA, 14 nt, Human
agcagagaauucuc

SEQ ID NO: 2083418 - RNA, 21 nt, Human
agcagagaauucucuuaucca

SEQ ID NO: 2083419 - RNA, 15 nt, Human
agcagagacacuaac

SEQ ID NO: 2083420 - RNA, 14 nt, Human
agcagacuggugag

SEQ ID NO: 2083421 - RNA, 19 nt, Human
agcagacuggugagcagac

SEQ ID NO: 2083422 - RNA, 16 nt, Human
agcagagaaggccagg

SEQ ID NO: 2083423 - RNA, 10 nt, Human
ugagccuggc

SEQ ID NO: 2083424 - RNA, 14 nt, Human
ugagccugggaggu

SEQ ID NO: 2083425 - RNA, 11 nt, Human
ugagccuggca

SEQ ID NO: 2083426 - RNA, 16 nt, Human
ugagccuggcaagaau

SEQ ID NO: 2083427 - RNA, 19 nt, Human
ugagccugggaggucaagg

SEQ ID NO: 2083428 - RNA, 22 nt, Human
ugagccugggaggucaaggcug

SEQ ID NO: 2083429 - RNA, 13 nt, Human
ugagccuucaguc

SEQ ID NO: 2083430 - RNA, 14 nt, Human
ugagccuucagucu

SEQ ID NO: 2083431 - RNA, 23 nt, Human
agcacuuggagccaaggguucag

SEQ ID NO: 2083432 - RNA, 23 nt, Human
agcaccacccuagucccuucccc

SEQ ID NO: 2083433 - RNA, 14 nt, Human
agcaccaggcacga

SEQ ID NO: 2083434 - RNA, 13 nt, Human
agcaccagggaag

SEQ ID NO: 2083435 - RNA, 23 nt, Human
agcaccaggcacgaacccaccug

SEQ ID NO: 2083436 - RNA, 22 nt, Human
agcacuuugggaggccaaggug

SEQ ID NO: 2083437 - RNA, 14 nt, Human
agcacuuugggagg

SEQ ID NO: 2083438 - RNA, 15 nt, Human
agcacuuugggaggc

SEQ ID NO: 2083439 - RNA, 12 nt, Human
agcacuuuggga

SEQ ID NO: 2083440 - RNA, 16 nt, Human
agcacuuucauugcca

SEQ ID NO: 2083441 - RNA, 19 nt, Human
agcacuuucauugccagug

SEQ ID NO: 2083442 - RNA, 22 nt, Human
agcacuuucauugccagugucu

SEQ ID NO: 2083443 - RNA, 23 nt, Human
agcacuuugggaggccaaggugg

SEQ ID NO: 2083444 - RNA, 16 nt, Human
agcacuuugggaggcu

SEQ ID NO: 2083445 - RNA, 20 nt, Human
agcacuuugggaggccaagg

SEQ ID NO: 2083446 - RNA, 21 nt, Human
agcacuuugggaggcugaggc

SEQ ID NO: 2083447 - RNA, 22 nt, Human
agcacuuugggaggcugaggcg

SEQ ID NO: 2083448 - RNA, 22 nt, Human
agcacuuugggaggcugaggug

SEQ ID NO: 2083449 - RNA, 15 nt, Human
agcagaaaucuagaa

SEQ ID NO: 2083450 - RNA, 20 nt, Human
agcagaacaguuaagcagcc

SEQ ID NO: 2083451 - RNA, 14 nt, Human
agcagaagcucucg

SEQ ID NO: 2083452 - RNA, 14 nt, Human
ugagcaccucccag

SEQ ID NO: 2083453 - RNA, 15 nt, Human
ugagcaccucccagc

SEQ ID NO: 2083454 - RNA, 16 nt, Human
ugagcaccucccagcc

SEQ ID NO: 2083455 - RNA, 20 nt, Human
ugagcaccucccagccccug

SEQ ID NO: 2083456 - RNA, 16 nt, Human
ugagcaccaggggaug

SEQ ID NO: 2083457 - RNA, 13 nt, Human
ugagcaccagggg

SEQ ID NO: 2083458 - RNA, 14 nt, Human
ugagcaccagggga

SEQ ID NO: 2083459 - RNA, 23 nt, Human
ugagcacuaaggugugcucugau

SEQ ID NO: 2083460 - RNA, 22 nt, Human
ugagcacuaaggugugcucuga

SEQ ID NO: 2083461 - RNA, 21 nt, Human
ugagcacuaaggugugcucug

SEQ ID NO: 2083462 - RNA, 20 nt, Human
ugagcacuaaggugugcucu

SEQ ID NO: 2083463 - RNA, 22 nt, Human
agcaacccuccuaucaccuccc

SEQ ID NO: 2083464 - RNA, 19 nt, Human
ugagcaaauguggcuccug

SEQ ID NO: 2083465 - RNA, 18 nt, Human
ugagcaaauguggcuccu

SEQ ID NO: 2083466 - RNA, 16 nt, Human
ugagcaaauguggcuc

SEQ ID NO: 2083467 - RNA, 15 nt, Human
ugagcaaauguggcu

SEQ ID NO: 2083468 - RNA, 23 nt, Human
ugagccacugcaccgggccacag

SEQ ID NO: 2083469 - RNA, 18 nt, Human
ugagccacugcaccgggc

SEQ ID NO: 2083470 - RNA, 21 nt, Human
ugagccacugcaccgggccac

SEQ ID NO: 2083471 - RNA, 19 nt, Human
ugagcaagacccugucucu

SEQ ID NO: 2083472 - RNA, 21 nt, Human
ugagcagacuggugagcagac

SEQ ID NO: 2083473 - RNA, 17 nt, Human
ugagcagacuggugagc

SEQ ID NO: 2083474 - RNA, 19 nt, Human
ugagcagacuggugagcag

SEQ ID NO: 2083475 - RNA, 16 nt, Human
ugagcagacuggugag

SEQ ID NO: 2083476 - RNA, 21 nt, Human
agcacagcucaggaacuagac

SEQ ID NO: 2083477 - RNA, 16 nt, Human
agcacagcuucauuuc

SEQ ID NO: 2083478 - RNA, 14 nt, Human
agcacagugccugc

SEQ ID NO: 2083479 - RNA, 15 nt, Human
agcacagugccugca

SEQ ID NO: 2083480 - RNA, 14 nt, Human
agcacauccaggca

SEQ ID NO: 2083481 - RNA, 22 nt, Human
agcacauccaggcaauggccua

SEQ ID NO: 2083482 - RNA, 15 nt, Human
agcacaucugcauuu

SEQ ID NO: 2083483 - RNA, 16 nt, Human
agcacaucugcauuuu

SEQ ID NO: 2083484 - RNA, 22 nt, Human
agcaccaaaagcuuaccaaggg

SEQ ID NO: 2083485 - RNA, 23 nt, Human
agcacaucugcauuuucacccca

SEQ ID NO: 2083486 - RNA, 15 nt, Human
agcaccaccaggucu

SEQ ID NO: 2083487 - RNA, 16 nt, Human
agcaccaccaggucuc

SEQ ID NO: 2083488 - RNA, 20 nt, Human
agcaccaccaggucucccgg

SEQ ID NO: 2083489 - RNA, 12 nt, Human
agcaccacccua

SEQ ID NO: 2083490 - RNA, 13 nt, Human
agcaagugagagc

SEQ ID NO: 2083491 - RNA, 20 nt, Human
agcaagugagacccugucuc

SEQ ID NO: 2083492 - RNA, 18 nt, Human
ugagccaggccugggucu

SEQ ID NO: 2083493 - RNA, 14 nt, Human
ugagccaggccugg

SEQ ID NO: 2083494 - RNA, 12 nt, Human
ugagccaccacg

SEQ ID NO: 2083495 - RNA, 14 nt, Human
ugagccagacaaau

SEQ ID NO: 2083496 - RNA, 20 nt, Human
ugagccagacaaauggagga

SEQ ID NO: 2083497 - RNA, 14 nt, Human
agcaagugagagcu

SEQ ID NO: 2083498 - RNA, 18 nt, Human
agcaagugagagcugggu

SEQ ID NO: 2083499 - RNA, 16 nt, Human
agcaaguuacagugau

SEQ ID NO: 2083500 - RNA, 22 nt, Human
agcaagugagagcuggguguca

SEQ ID NO: 2083501 - RNA, 21 nt, Human
agcacagcagccccugcacaa

SEQ ID NO: 2083502 - RNA, 19 nt, Human
agaccuaacgagaaauaga

SEQ ID NO: 2083503 - RNA, 12 nt, Human
agacccugucuc

SEQ ID NO: 2083504 - RNA, 13 nt, Human
agacccugucucu

SEQ ID NO: 2083505 - RNA, 16 nt, Human
agacauggggaggaag

SEQ ID NO: 2083506 - RNA, 18 nt, Human
agacauggggaggaagga

SEQ ID NO: 2083507 - RNA, 19 nt, Human
agacauggggaggaaggac

SEQ ID NO: 2083508 - RNA, 17 nt, Human
agacauguggugggaca

SEQ ID NO: 2083509 - RNA, 13 nt, Human
ucuuccuauccca

SEQ ID NO: 2083510 - RNA, 14 nt, Human
ucuuccuaucccau

SEQ ID NO: 2083511 - RNA, 15 nt, Human
ucuuccuaucccauc

SEQ ID NO: 2083512 - RNA, 16 nt, Human
ucuuccuaucccaucc

SEQ ID NO: 2083513 - RNA, 17 nt, Human
ucuuccuaucccauccc

SEQ ID NO: 2083514 - RNA, 18 nt, Human
ucuuccuaucccauccca

SEQ ID NO: 2083515 - RNA, 21 nt, Human
ucuuccggagauguagcaaaa

SEQ ID NO: 2083516 - RNA, 18 nt, Human
ucuuccggagauguagca

SEQ ID NO: 2083517 - RNA, 19 nt, Human
ucuuccggagauguagcaa

SEQ ID NO: 2083518 - RNA, 14 nt, Human
agacccucguggcc

SEQ ID NO: 2083519 - RNA, 16 nt, Human
ucuugcaauggcagcc

SEQ ID NO: 2083520 - RNA, 13 nt, Human
ucuugcaauggca

SEQ ID NO: 2083521 - RNA, 17 nt, Human
ucuugcaauggcagccu

SEQ ID NO: 2083522 - RNA, 14 nt, Human
ucuugcuuucuuug

SEQ ID NO: 2083523 - RNA, 16 nt, Human
ucuuggaaagaaacaa

SEQ ID NO: 2083524 - RNA, 20 nt, Human
ucuugauuuguuuuagaaug

SEQ ID NO: 2083525 - RNA, 21 nt, Human
ucuugauuuguuuuagaauga

SEQ ID NO: 2083526 - RNA, 16 nt, Human
ucuugaugacuggaau

SEQ ID NO: 2083527 - RNA, 18 nt, Human
ucuugaugacuggaauuu

SEQ ID NO: 2083528 - RNA, 19 nt, Human
ucuugaugacuggaauuuu

SEQ ID NO: 2083529 - RNA, 20 nt, Human
ucuugaugacuggaauuuuu

SEQ ID NO: 2083530 - RNA, 18 nt, Human
agacucauucuucuguac

SEQ ID NO: 2083531 - RNA, 17 nt, Human
agacucauucuucugua

SEQ ID NO: 2083532 - RNA, 19 nt, Human
agacuaucuaaauguugaa

SEQ ID NO: 2083533 - RNA, 17 nt, Human
agacuaucuaaauguug

SEQ ID NO: 2083534 - RNA, 18 nt, Human
agacuaucuaaauguuga

SEQ ID NO: 2083535 - RNA, 16 nt, Human
agaccugagcucccca

SEQ ID NO: 2083536 - RNA, 14 nt, Human
agaccugacucagg

SEQ ID NO: 2083537 - RNA, 18 nt, Human
agaccugacucaggcauc

SEQ ID NO: 2083538 - RNA, 15 nt, Human
agacuaucuaaaugu

SEQ ID NO: 2083539 - RNA, 15 nt, Human
ucuuuacuucaugga

SEQ ID NO: 2083540 - RNA, 18 nt, Human
ucuuuaaagucaggucca

SEQ ID NO: 2083541 - RNA, 17 nt, Human
agacucuacagaggcca

SEQ ID NO: 2083542 - RNA, 19 nt, Human
agacucuacagaggccaug

SEQ ID NO: 2083543 - RNA, 15 nt, Human
agagaaucauacuua

SEQ ID NO: 2083544 - RNA, 22 nt, Human
agagaaugaaauugcugaaaga

SEQ ID NO: 2083545 - RNA, 23 nt, Human
agagaaucccuagucuucaagca

SEQ ID NO: 2083546 - RNA, 15 nt, Human
agagaauggaaaaca

SEQ ID NO: 2083547 - RNA, 18 nt, Human
agagaaugaaagggccca

SEQ ID NO: 2083548 - RNA, 17 nt, Human
agacuugaaagaaaggg

SEQ ID NO: 2083549 - RNA, 14 nt, Human
agacuugaaauacu

SEQ ID NO: 2083550 - RNA, 15 nt, Human
agacuugagaacuug

SEQ ID NO: 2083551 - RNA, 12 nt, Human
agacuugcugaa

SEQ ID NO: 2083552 - RNA, 20 nt, Human
agacuugcugaaucggaauc

SEQ ID NO: 2083553 - RNA, 21 nt, Human
agacuucacacugcaagagcc

SEQ ID NO: 2083554 - RNA, 15 nt, Human
agacuucacacugca

SEQ ID NO: 2083555 - RNA, 21 nt, Human
agacuggauaguccgucucug

SEQ ID NO: 2083556 - RNA, 11 nt, Human
agacuguggcu

SEQ ID NO: 2083557 - RNA, 14 nt, Human
agacuguggcugcu

SEQ ID NO: 2083558 - RNA, 20 nt, Human
agacuguggcugcuagcacu

SEQ ID NO: 2083559 - RNA, 19 nt, Human
agacaggguuucaccaugu

SEQ ID NO: 2083560 - RNA, 15 nt, Human
agacaggguccugcu

SEQ ID NO: 2083561 - RNA, 16 nt, Human
agacaggguccugcua

SEQ ID NO: 2083562 - RNA, 17 nt, Human
agacaggguccugcuau

SEQ ID NO: 2083563 - RNA, 18 nt, Human
agacaggcccaagagaug

SEQ ID NO: 2083564 - RNA, 22 nt, Human
agacaggcccaagagaugaaga

SEQ ID NO: 2083565 - RNA, 23 nt, Human
agacaggcccaagagaugaagag

SEQ ID NO: 2083566 - RNA, 21 nt, Human
agacaggguuuugccauguug

SEQ ID NO: 2083567 - RNA, 14 nt, Human
agacaggaaaggga

SEQ ID NO: 2083568 - RNA, 15 nt, Human
agacaggcccaagag

SEQ ID NO: 2083569 - RNA, 16 nt, Human
agacaggcccaagaga

SEQ ID NO: 2083570 - RNA, 18 nt, Human
agacaggaaagggaaggc

SEQ ID NO: 2083571 - RNA, 21 nt, Human
agacaggacagugcuucagcc

SEQ ID NO: 2083572 - RNA, 23 nt, Human
agacaggcaagcaccuccugccu

SEQ ID NO: 2083573 - RNA, 18 nt, Human
ucuuaauauaacugccuu

SEQ ID NO: 2083574 - RNA, 19 nt, Human
ucuuaauauaacugccuua

SEQ ID NO: 2083575 - RNA, 15 nt, Human
ucuuaauauaacugc

SEQ ID NO: 2083576 - RNA, 17 nt, Human
agacaguauauuuauag

SEQ ID NO: 2083577 - RNA, 18 nt, Human
agacaguauauuuauagu

SEQ ID NO: 2083578 - RNA, 23 nt, Human
ucuuaaggauugugauauuuuua

SEQ ID NO: 2083579 - RNA, 18 nt, Human
agacaguauauaacuaac

SEQ ID NO: 2083580 - RNA, 15 nt, Human
agacaguauauuuau

SEQ ID NO: 2083581 - RNA, 13 nt, Human
agacaguaaguau

SEQ ID NO: 2083582 - RNA, 17 nt, Human
agacaguaaguaucuuc

SEQ ID NO: 2083583 - RNA, 22 nt, Human
agacaguaaguaucuucguucu

SEQ ID NO: 2083584 - RNA, 21 nt, Human
agacacugaaauauacacaca

SEQ ID NO: 2083585 - RNA, 20 nt, Human
agacacugaaauauacacac

SEQ ID NO: 2083586 - RNA, 22 nt, Human
agacacugaaauauacacacag

SEQ ID NO: 2083587 - RNA, 13 nt, Human
agacacugaaaua

SEQ ID NO: 2083588 - RNA, 15 nt, Human
agacagacuugagaa

SEQ ID NO: 2083589 - RNA, 16 nt, Human
agacagacacacacac

SEQ ID NO: 2083590 - RNA, 15 nt, Human
agacagacacacaca

SEQ ID NO: 2083591 - RNA, 14 nt, Human
agacagacacacac

SEQ ID NO: 2083592 - RNA, 22 nt, Human
agacagcuucucauccugcagg

SEQ ID NO: 2083593 - RNA, 23 nt, Human
agacagcuucucauccugcaggc

SEQ ID NO: 2083594 - RNA, 18 nt, Human
agacaggaaaauccucug

SEQ ID NO: 2083595 - RNA, 19 nt, Human
agacaggaaaauccucugg

SEQ ID NO: 2083596 - RNA, 20 nt, Human
agacaggaaaauccucuggc

SEQ ID NO: 2083597 - RNA, 21 nt, Human
agacaggaaaauccucuggcu

SEQ ID NO: 2083598 - RNA, 17 nt, Human
agacaccguucauucag

SEQ ID NO: 2083599 - RNA, 22 nt, Human
agacacuaacgacuucagggca

SEQ ID NO: 2083600 - RNA, 18 nt, Human
agacacccuaauguggca

SEQ ID NO: 2083601 - RNA, 13 nt, Human
ucuuaauuaagua

SEQ ID NO: 2083602 - RNA, 14 nt, Human
ucuuaauuaaguaa

SEQ ID NO: 2083603 - RNA, 18 nt, Human
ucuuaauuaaguaaacua

SEQ ID NO: 2083604 - RNA, 19 nt, Human
ucuuaauuaaguaaacuaa

SEQ ID NO: 2083605 - RNA, 20 nt, Human
ucuuaauuaaguaaacuaau

SEQ ID NO: 2083606 - RNA, 21 nt, Human
ucuuaauuaaguaaacuaaug

SEQ ID NO: 2083607 - RNA, 19 nt, Human
ucuuagaaguggaccagga

SEQ ID NO: 2083608 - RNA, 21 nt, Human
ucuuagaaguggaccaggaca

SEQ ID NO: 2083609 - RNA, 18 nt, Human
ucuuagacuugaaauacu

SEQ ID NO: 2083610 - RNA, 23 nt, Human
ucuuagacuugaaauacuacuua

SEQ ID NO: 2083611 - RNA, 22 nt, Human
ucuuauugcccacgcuggagug

SEQ ID NO: 2083612 - RNA, 18 nt, Human
ucuuauugcccacgcugg

SEQ ID NO: 2083613 - RNA, 14 nt, Human
ucuuauugcccacg

SEQ ID NO: 2083614 - RNA, 14 nt, Human
ucuuagauaucuuu

SEQ ID NO: 2083615 - RNA, 17 nt, Human
ucuuagauaucuuuuua

SEQ ID NO: 2083616 - RNA, 21 nt, Human
ucuuagauaucuuuuuauuga

SEQ ID NO: 2083617 - RNA, 23 nt, Human
ucuuagauaucuuuuuauugaug

SEQ ID NO: 2083618 - RNA, 24 nt, Human
ucuuagauaucuuuuuauugaugu

SEQ ID NO: 2083619 - RNA, 20 nt, Human
ucuucccuagaggguuccug

SEQ ID NO: 2083620 - RNA, 20 nt, Human
ucuucccuagggcugggugu

SEQ ID NO: 2083621 - RNA, 13 nt, Human
ucuucccuaccuc

SEQ ID NO: 2083622 - RNA, 14 nt, Human
ucuucccuaccuca

SEQ ID NO: 2083623 - RNA, 21 nt, Human
ucuucccuaccucaggcagga

SEQ ID NO: 2083624 - RNA, 19 nt, Human
ucuucccuuuuacauacug

SEQ ID NO: 2083625 - RNA, 21 nt, Human
ucuucccuuuuacauacugcu

SEQ ID NO: 2083626 - RNA, 22 nt, Human
ucuucccuuuuacauacugcug

SEQ ID NO: 2083627 - RNA, 13 nt, Human
ucuucccuuaaaa

SEQ ID NO: 2083628 - RNA, 15 nt, Human
ucuuccggagaugua

SEQ ID NO: 2083629 - RNA, 16 nt, Human
ucuuccggagauguag

SEQ ID NO: 2083630 - RNA, 12 nt, Human
ucuuccauaaug

SEQ ID NO: 2083631 - RNA, 16 nt, Human
ucuuccauaauguaua

SEQ ID NO: 2083632 - RNA, 14 nt, Human
ucuuauuuaacuua

SEQ ID NO: 2083633 - RNA, 11 nt, Human
ucuucaacaga

SEQ ID NO: 2083634 - RNA, 19 nt, Human
ucuucaacaucaauguuca

SEQ ID NO: 2083635 - RNA, 20 nt, Human
ucuucaacaucaauguucau

SEQ ID NO: 2083636 - RNA, 14 nt, Human
ucuucacggcagga

SEQ ID NO: 2083637 - RNA, 19 nt, Human
ucuucaccuaagucucugu

SEQ ID NO: 2083638 - RNA, 23 nt, Human
ucuucaccuaagucucugugaau

SEQ ID NO: 2083639 - RNA, 13 nt, Human
ucuucagaagaca

SEQ ID NO: 2083640 - RNA, 18 nt, Human
ucuucagaagacacugca

SEQ ID NO: 2083641 - RNA, 14 nt, Human
ucuucacucgcccc

SEQ ID NO: 2083642 - RNA, 24 nt, Human
ucuucaacaucaauguucauugua

SEQ ID NO: 2083643 - RNA, 21 nt, Human
ucuucaacaucaauguucauu

SEQ ID NO: 2083644 - RNA, 23 nt, Human
ucuucaacaucaauguucauugu

SEQ ID NO: 2083645 - RNA, 22 nt, Human
ucuucacaauggugcucauuuc

SEQ ID NO: 2083646 - RNA, 18 nt, Human
ucuucacagcucuguguu

SEQ ID NO: 2083647 - RNA, 20 nt, Human
ucuguuggccagugugacaa

SEQ ID NO: 2083648 - RNA, 19 nt, Human
ucuguuggccagugugaca

SEQ ID NO: 2083649 - RNA, 18 nt, Human
ucuguuggccagugugac

SEQ ID NO: 2083650 - RNA, 13 nt, Human
ucuguuccuggcu

SEQ ID NO: 2083651 - RNA, 22 nt, Human
ucuguuccuggcucagccucaa

SEQ ID NO: 2083652 - RNA, 23 nt, Human
ucuguuccuggcucagccucaaa

SEQ ID NO: 2083653 - RNA, 13 nt, Human
ucuguuccuucac

SEQ ID NO: 2083654 - RNA, 15 nt, Human
ucuguuccuucacau

SEQ ID NO: 2083655 - RNA, 21 nt, Human
ucuguucauuuguuauucuua

SEQ ID NO: 2083656 - RNA, 24 nt, Human
ucuguccaggcacugcugcccagc

SEQ ID NO: 2083657 - RNA, 16 nt, Human
ucugugcgugaaacac

SEQ ID NO: 2083658 - RNA, 22 nt, Human
ucugugcgugaaacacaccagg

SEQ ID NO: 2083659 - RNA, 14 nt, Human
ucugugccuggagc

SEQ ID NO: 2083660 - RNA, 15 nt, Human
ucugugccuggagcu

SEQ ID NO: 2083661 - RNA, 20 nt, Human
ucugugccuggagcuccugg

SEQ ID NO: 2083662 - RNA, 21 nt, Human
ucugugccuggagcuccuggg

SEQ ID NO: 2083663 - RNA, 22 nt, Human
ucugugccccaugccuguccag

SEQ ID NO: 2083664 - RNA, 21 nt, Human
agaauuuauucaauuccucug

SEQ ID NO: 2083665 - RNA, 14 nt, Human
agaauuucaauuug

SEQ ID NO: 2083666 - RNA, 16 nt, Human
agaauuucaauuuguu

SEQ ID NO: 2083667 - RNA, 20 nt, Human
agaauuucaauuuguucagu

SEQ ID NO: 2083668 - RNA, 13 nt, Human
agaauuucuuggu

SEQ ID NO: 2083669 - RNA, 21 nt, Human
agaauuucuugguaagaagcc

SEQ ID NO: 2083670 - RNA, 22 nt, Human
agaauuucuugguaagaagccg

SEQ ID NO: 2083671 - RNA, 14 nt, Human
agaauuuauucaau

SEQ ID NO: 2083672 - RNA, 13 nt, Human
agaauuuauucaa

SEQ ID NO: 2083673 - RNA, 21 nt, Human
agaauuuaucacacuucugug

SEQ ID NO: 2083674 - RNA, 12 nt, Human
ucuguuucuagu

SEQ ID NO: 2083675 - RNA, 13 nt, Human
ucuguuucuaguu

SEQ ID NO: 2083676 - RNA, 22 nt, Human
ucuguuucuauucucuccucag

SEQ ID NO: 2083677 - RNA, 12 nt, Human
ucuguuuguuaa

SEQ ID NO: 2083678 - RNA, 13 nt, Human
ucuguuuguuaaa

SEQ ID NO: 2083679 - RNA, 14 nt, Human
ucuguuuguuaaaa

SEQ ID NO: 2083680 - RNA, 21 nt, Human
ucuguuuguuaaaacuggcau

SEQ ID NO: 2083681 - RNA, 15 nt, Human
agaauuguaucauuu

SEQ ID NO: 2083682 - RNA, 21 nt, Human
agaauuggagaguaaaaacug

SEQ ID NO: 2083683 - RNA, 13 nt, Human
ucuguuuuacugc

SEQ ID NO: 2083684 - RNA, 20 nt, Human
agaauugcaauuuuaacaca

SEQ ID NO: 2083685 - RNA, 22 nt, Human
agaauugcugauucuugaguuu

SEQ ID NO: 2083686 - RNA, 17 nt, Human
ucuggucuccucuuugu

SEQ ID NO: 2083687 - RNA, 16 nt, Human
ucuguagagcagggca

SEQ ID NO: 2083688 - RNA, 23 nt, Human
ucuguagcuccucaacucaccua

SEQ ID NO: 2083689 - RNA, 13 nt, Human
ucuguagcuccuc

SEQ ID NO: 2083690 - RNA, 14 nt, Human
ucuguagcuccuca

SEQ ID NO: 2083691 - RNA, 14 nt, Human
ucuguauacugugg

SEQ ID NO: 2083692 - RNA, 19 nt, Human
ucuguaguacuccuuaaga

SEQ ID NO: 2083693 - RNA, 23 nt, Human
ucuguaguacuccuuaagaacac

SEQ ID NO: 2083694 - RNA, 15 nt, Human
ucuguauauacaaua

SEQ ID NO: 2083695 - RNA, 15 nt, Human
ucugucauuugagca

SEQ ID NO: 2083696 - RNA, 23 nt, Human
ucuguccaaaggaggcuggcagg

SEQ ID NO: 2083697 - RNA, 19 nt, Human
ucuguccaaaggaggcugg

SEQ ID NO: 2083698 - RNA, 22 nt, Human
ucuguccaaaggaggcuggcag

SEQ ID NO: 2083699 - RNA, 18 nt, Human
ucugucauaucuucacaa

SEQ ID NO: 2083700 - RNA, 21 nt, Human
ucugucaucuaccuuuucucu

SEQ ID NO: 2083701 - RNA, 15 nt, Human
ucuguccaaaggagg

SEQ ID NO: 2083702 - RNA, 16 nt, Human
ucuguccaaaggaggc

SEQ ID NO: 2083703 - RNA, 17 nt, Human
ucuguccaaaggaggcu

SEQ ID NO: 2083704 - RNA, 23 nt, Human
ucugucauuugagcagggcucag

SEQ ID NO: 2083705 - RNA, 20 nt, Human
ucugucauuugagcagggcu

SEQ ID NO: 2083706 - RNA, 16 nt, Human
ucuggguucacugcaa

SEQ ID NO: 2083707 - RNA, 14 nt, Human
ucuggguucacugc

SEQ ID NO: 2083708 - RNA, 18 nt, Human
ucugggugcucccuacca

SEQ ID NO: 2083709 - RNA, 16 nt, Human
ucuggggcucugggau

SEQ ID NO: 2083710 - RNA, 16 nt, Human
ucugggugguugcccu

SEQ ID NO: 2083711 - RNA, 19 nt, Human
ucugggugguugcccuuca

SEQ ID NO: 2083712 - RNA, 13 nt, Human
ucuggucccuugc

SEQ ID NO: 2083713 - RNA, 14 nt, Human
ucuggucccuugca

SEQ ID NO: 2083714 - RNA, 11 nt, Human
agaaggaaugu

SEQ ID NO: 2083715 - RNA, 14 nt, Human
agaaggaaugucuu

SEQ ID NO: 2083716 - RNA, 17 nt, Human
agaaggaagugaagagg

SEQ ID NO: 2083717 - RNA, 15 nt, Human
ucuggggcucuggga

SEQ ID NO: 2083718 - RNA, 13 nt, Human
ucuggggccccuu

SEQ ID NO: 2083719 - RNA, 18 nt, Human
ucuggggauacuggcaaa

SEQ ID NO: 2083720 - RNA, 22 nt, Human
agaaggaaggagacucaccucu

SEQ ID NO: 2083721 - RNA, 9 nt, Human
agaaggaag

SEQ ID NO: 2083722 - RNA, 14 nt, Human
agaaggaagacuuu

SEQ ID NO: 2083723 - RNA, 18 nt, Human
agaagcuuccauuccaag

SEQ ID NO: 2083724 - RNA, 16 nt, Human
agaaggaaaaggcagg

SEQ ID NO: 2083725 - RNA, 21 nt, Human
agaacucaugacggaagaguu

SEQ ID NO: 2083726 - RNA, 17 nt, Human
agaacucaguuuuaacu

SEQ ID NO: 2083727 - RNA, 15 nt, Human
agaaccucuucccca

SEQ ID NO: 2083728 - RNA, 22 nt, Human
agaaccucacgcaccucccauc

SEQ ID NO: 2083729 - RNA, 22 nt, Human
agaacguauugguccagcuugc

SEQ ID NO: 2083730 - RNA, 13 nt, Human
agaaccucuuccc

SEQ ID NO: 2083731 - RNA, 14 nt, Human
agaaccucuucccc

SEQ ID NO: 2083732 - RNA, 18 nt, Human
agaaccucacgcaccucc

SEQ ID NO: 2083733 - RNA, 21 nt, Human
agaaccucacgcaccucccau

SEQ ID NO: 2083734 - RNA, 12 nt, Human
agaaccucaggc

SEQ ID NO: 2083735 - RNA, 19 nt, Human
agaaccucaggcuuccuug

SEQ ID NO: 2083736 - RNA, 21 nt, Human
agaaccucaggcuuccuuggc

SEQ ID NO: 2083737 - RNA, 13 nt, Human
agaacugaaaaca

SEQ ID NO: 2083738 - RNA, 14 nt, Human
agaacugaaaacau

SEQ ID NO: 2083739 - RNA, 15 nt, Human
agaacugaaaacaua

SEQ ID NO: 2083740 - RNA, 16 nt, Human
agaacugaaaacauaa

SEQ ID NO: 2083741 - RNA, 17 nt, Human
agaacugaaaacauaaa

SEQ ID NO: 2083742 - RNA, 19 nt, Human
agaacugaaaacauaaaaa

SEQ ID NO: 2083743 - RNA, 21 nt, Human
agaacugaaaacauaaaaagu

SEQ ID NO: 2083744 - RNA, 20 nt, Human
agaacucugggcugccaugu

SEQ ID NO: 2083745 - RNA, 20 nt, Human
agaacucugggcugcuaccc

SEQ ID NO: 2083746 - RNA, 14 nt, Human
agaagaaaaaagaa

SEQ ID NO: 2083747 - RNA, 17 nt, Human
agaagaaaaaagaaugu

SEQ ID NO: 2083748 - RNA, 19 nt, Human
agaagaaaagguucuuacu

SEQ ID NO: 2083749 - RNA, 14 nt, Human
agaacucugggcug

SEQ ID NO: 2083750 - RNA, 23 nt, Human
agaacucuccaucuuauuuucau

SEQ ID NO: 2083751 - RNA, 15 nt, Human
ucugcagaaacagaa

SEQ ID NO: 2083752 - RNA, 15 nt, Human
ucugcacuuaaauau

SEQ ID NO: 2083753 - RNA, 16 nt, Human
ucugcacuuaaauauc

SEQ ID NO: 2083754 - RNA, 15 nt, Human
agaaauuggcuggau

SEQ ID NO: 2083755 - RNA, 14 nt, Human
agaaauuggcugga

SEQ ID NO: 2083756 - RNA, 15 nt, Human
agaaaugucuggaga

SEQ ID NO: 2083757 - RNA, 17 nt, Human
agaaaugucuggagaau

SEQ ID NO: 2083758 - RNA, 19 nt, Human
agaaaugucuggagaauaa

SEQ ID NO: 2083759 - RNA, 12 nt, Human
ucugcagagcag

SEQ ID NO: 2083760 - RNA, 18 nt, Human
agaaauuuaaaagacacu

SEQ ID NO: 2083761 - RNA, 22 nt, Human
agaaauuuuacaauaggugcuu

SEQ ID NO: 2083762 - RNA, 17 nt, Human
agaaauuuaauucaugu

SEQ ID NO: 2083763 - RNA, 21 nt, Human
agaaauuuaauucauguuucu

SEQ ID NO: 2083764 - RNA, 22 nt, Human
agaaauuuaauucauguuucuu

SEQ ID NO: 2083765 - RNA, 17 nt, Human
agaaauuuuucagaugc

SEQ ID NO: 2083766 - RNA, 18 nt, Human
agaaauuuuucagaugcu

SEQ ID NO: 2083767 - RNA, 21 nt, Human
agaaauuuuucagaugcuucu

SEQ ID NO: 2083768 - RNA, 22 nt, Human
agaaauuuuucagaugcuucug

SEQ ID NO: 2083769 - RNA, 23 nt, Human
agaaauuuuucagaugcuucugg

SEQ ID NO: 2083770 - RNA, 23 nt, Human
ucugacuuccccgcauuccaggc

SEQ ID NO: 2083771 - RNA, 14 nt, Human
ucugaccugcaggc

SEQ ID NO: 2083772 - RNA, 15 nt, Human
ucugaccugcaggcc

SEQ ID NO: 2083773 - RNA, 19 nt, Human
ucugacccugcuucaaaua

SEQ ID NO: 2083774 - RNA, 15 nt, Human
agaaagacagagcug

SEQ ID NO: 2083775 - RNA, 18 nt, Human
agaaagaaggaagugaag

SEQ ID NO: 2083776 - RNA, 12 nt, Human
ucugaccucagc

SEQ ID NO: 2083777 - RNA, 13 nt, Human
ucugaccucagca

SEQ ID NO: 2083778 - RNA, 14 nt, Human
ucugaccucagcau

SEQ ID NO: 2083779 - RNA, 12 nt, Human
ucugaccugcag

SEQ ID NO: 2083780 - RNA, 21 nt, Human
ucugacccuagcucuuuccuu

SEQ ID NO: 2083781 - RNA, 14 nt, Human
ucugacccucucca

SEQ ID NO: 2083782 - RNA, 21 nt, Human
ucugaccgaaacagcgcuggg

SEQ ID NO: 2083783 - RNA, 22 nt, Human
ucugauauuccaugaauguauc

SEQ ID NO: 2083784 - RNA, 21 nt, Human
ucugauucccaagcucugcuc

SEQ ID NO: 2083785 - RNA, 20 nt, Human
ucugauucccaagcucugcu

SEQ ID NO: 2083786 - RNA, 19 nt, Human
ucugauucccaagcucugc

SEQ ID NO: 2083787 - RNA, 17 nt, Human
ucugauauuccaugaau

SEQ ID NO: 2083788 - RNA, 19 nt, Human
ucugauauuccaugaaugu

SEQ ID NO: 2083789 - RNA, 20 nt, Human
ucugauauuccaugaaugua

SEQ ID NO: 2083790 - RNA, 13 nt, Human
agaagaaggaaau

SEQ ID NO: 2083791 - RNA, 14 nt, Human
agaagaaggaaaug

SEQ ID NO: 2083792 - RNA, 17 nt, Human
agaagaaggaaaugaau

SEQ ID NO: 2083793 - RNA, 18 nt, Human
agaagaaggaaaugaauu

SEQ ID NO: 2083794 - RNA, 21 nt, Human
agaagaaggaaaugaauuucu

SEQ ID NO: 2083795 - RNA, 13 nt, Human
agaagaaggcagc

SEQ ID NO: 2083796 - RNA, 14 nt, Human
agaagaaggcagca

SEQ ID NO: 2083797 - RNA, 21 nt, Human
agaagaaggcagcagguggca

SEQ ID NO: 2083798 - RNA, 13 nt, Human
ucugccccucccc

SEQ ID NO: 2083799 - RNA, 14 nt, Human
ucugccccuccccc

SEQ ID NO: 2083800 - RNA, 15 nt, Human
ucugccccuccccca

SEQ ID NO: 2083801 - RNA, 16 nt, Human
ucugccccucccccaa

SEQ ID NO: 2083802 - RNA, 18 nt, Human
ucugccccucccccaacc

SEQ ID NO: 2083803 - RNA, 22 nt, Human
ucugccccucccccaaccccca

SEQ ID NO: 2083804 - RNA, 17 nt, Human
ucugccggcccuggggc

SEQ ID NO: 2083805 - RNA, 15 nt, Human
ucugccggcccuggg

SEQ ID NO: 2083806 - RNA, 16 nt, Human
ucugccggcccugggg

SEQ ID NO: 2083807 - RNA, 13 nt, Human
ucugccuuugcag

SEQ ID NO: 2083808 - RNA, 16 nt, Human
ucugccuuugcagaaa

SEQ ID NO: 2083809 - RNA, 19 nt, Human
ucugccuuugcagaaacag

SEQ ID NO: 2083810 - RNA, 20 nt, Human
ucugccuuugcagaaacaga

SEQ ID NO: 2083811 - RNA, 22 nt, Human
ucugcuaacuuggagccccagu

SEQ ID NO: 2083812 - RNA, 22 nt, Human
ucugcuaagcucaaggcgugag

SEQ ID NO: 2083813 - RNA, 16 nt, Human
ucugcucacauaucug

SEQ ID NO: 2083814 - RNA, 17 nt, Human
ucugcuaccucacuggg

SEQ ID NO: 2083815 - RNA, 14 nt, Human
ucugcuaccucacu

SEQ ID NO: 2083816 - RNA, 14 nt, Human
ucugcuaauaaaac

SEQ ID NO: 2083817 - RNA, 17 nt, Human
ucugcucacauaucugu

SEQ ID NO: 2083818 - RNA, 13 nt, Human
ucugcuaugcuug

SEQ ID NO: 2083819 - RNA, 14 nt, Human
ucugcuaugcuuga

SEQ ID NO: 2083820 - RNA, 15 nt, Human
ucugcuaugcuugaa

SEQ ID NO: 2083821 - RNA, 18 nt, Human
ucugcugucagucugcuu

SEQ ID NO: 2083822 - RNA, 16 nt, Human
ucugcuuauccuucca

SEQ ID NO: 2083823 - RNA, 23 nt, Human
ucugcuuuuuaaagaaugcucuu

SEQ ID NO: 2083824 - RNA, 15 nt, Human
ucugcuucugcaccu

SEQ ID NO: 2083825 - RNA, 15 nt, Human
ucuggaaaauaaaag

SEQ ID NO: 2083826 - RNA, 14 nt, Human
ucuggaaaggagga

SEQ ID NO: 2083827 - RNA, 15 nt, Human
ucuggaaaggaggaa

SEQ ID NO: 2083828 - RNA, 16 nt, Human
ucuggaaaggaggaag

SEQ ID NO: 2083829 - RNA, 14 nt, Human
ucuggaucugggac

SEQ ID NO: 2083830 - RNA, 23 nt, Human
ucuggauaauuuugcauaaaauu

SEQ ID NO: 2083831 - RNA, 15 nt, Human
agaagcggcuggcag

SEQ ID NO: 2083832 - RNA, 16 nt, Human
agaagcggcuggcagc

SEQ ID NO: 2083833 - RNA, 23 nt, Human
agaagcgggacgagacccuacag

SEQ ID NO: 2083834 - RNA, 14 nt, Human
agaagccuugguac

SEQ ID NO: 2083835 - RNA, 14 nt, Human
agaagcgagcacug

SEQ ID NO: 2083836 - RNA, 20 nt, Human
agaagcugagcaccagggga

SEQ ID NO: 2083837 - RNA, 19 nt, Human
ucuggccaggauggagggg

SEQ ID NO: 2083838 - RNA, 19 nt, Human
ucuggcccucaccccugcc

SEQ ID NO: 2083839 - RNA, 23 nt, Human
ucuggcccucaccccugcccugg

SEQ ID NO: 2083840 - RNA, 13 nt, Human
ucuggcccugccu

SEQ ID NO: 2083841 - RNA, 14 nt, Human
ucuggcccugccuu

SEQ ID NO: 2083842 - RNA, 15 nt, Human
ucuggcccugccuuc

SEQ ID NO: 2083843 - RNA, 16 nt, Human
ucuggcccugccuucu

SEQ ID NO: 2083844 - RNA, 15 nt, Human
agaaagaagaugaau

SEQ ID NO: 2083845 - RNA, 12 nt, Human
agaaagaagccc

SEQ ID NO: 2083846 - RNA, 12 nt, Human
agaaagaaggaa

SEQ ID NO: 2083847 - RNA, 13 nt, Human
agaaagaaggaag

SEQ ID NO: 2083848 - RNA, 14 nt, Human
agaaagaaggaagu

SEQ ID NO: 2083849 - RNA, 20 nt, Human
agaaagaaacccgacagagg

SEQ ID NO: 2083850 - RNA, 22 nt, Human
agaaagaaacccgacagaggga

SEQ ID NO: 2083851 - RNA, 21 nt, Human
agaaacccgacagagggaaga

SEQ ID NO: 2083852 - RNA, 14 nt, Human
agaaacccugucuc

SEQ ID NO: 2083853 - RNA, 16 nt, Human
agaaaccguccucuuu

SEQ ID NO: 2083854 - RNA, 20 nt, Human
agaaaccuacagaauacuag

SEQ ID NO: 2083855 - RNA, 21 nt, Human
agaaaccaguuaugugaauga

SEQ ID NO: 2083856 - RNA, 13 nt, Human
agaaacccugucu

SEQ ID NO: 2083857 - RNA, 16 nt, Human
agaaacccgacagagg

SEQ ID NO: 2083858 - RNA, 18 nt, Human
agaaacccgacagaggga

SEQ ID NO: 2083859 - RNA, 22 nt, Human
agaaaacuugaauucauagaaa

SEQ ID NO: 2083860 - RNA, 18 nt, Human
agaaaccaaucaagauaa

SEQ ID NO: 2083861 - RNA, 20 nt, Human
agaaaacgguuaaaacuguc

SEQ ID NO: 2083862 - RNA, 18 nt, Human
agaaaacuagaauuucau

SEQ ID NO: 2083863 - RNA, 19 nt, Human
agaaaacuagaauuucauu

SEQ ID NO: 2083864 - RNA, 16 nt, Human
agaaaacccuuuucua

SEQ ID NO: 2083865 - RNA, 22 nt, Human
ucucuuuaaugucacaggcagg

SEQ ID NO: 2083866 - RNA, 10 nt, Human
ucucugccau

SEQ ID NO: 2083867 - RNA, 15 nt, Human
ucucuuuacauuuug

SEQ ID NO: 2083868 - RNA, 23 nt, Human
ucucuuucuccuuagucuucuca

SEQ ID NO: 2083869 - RNA, 13 nt, Human
ucucuugagccug

SEQ ID NO: 2083870 - RNA, 14 nt, Human
ucucuugagccugg

SEQ ID NO: 2083871 - RNA, 15 nt, Human
ucucuugagccuggg

SEQ ID NO: 2083872 - RNA, 12 nt, Human
agaaaaaucagu

SEQ ID NO: 2083873 - RNA, 17 nt, Human
agaaaaaugagccuggc

SEQ ID NO: 2083874 - RNA, 17 nt, Human
agaaaacacuuguaagu

SEQ ID NO: 2083875 - RNA, 13 nt, Human
agaaaacagaaaa

SEQ ID NO: 2083876 - RNA, 14 nt, Human
agaaaacagaaaaa

SEQ ID NO: 2083877 - RNA, 15 nt, Human
agaaaacagaaaaaa

SEQ ID NO: 2083878 - RNA, 19 nt, Human
agaaaacagaaaaaaaaca

SEQ ID NO: 2083879 - RNA, 16 nt, Human
agaaaacagaaaacaa

SEQ ID NO: 2083880 - RNA, 15 nt, Human
agaaaacaucacuga

SEQ ID NO: 2083881 - RNA, 20 nt, Human
agaaaacaggaaaaaaacuu

SEQ ID NO: 2083882 - RNA, 22 nt, Human
agaaaacaggaaaaaaacuuuu

SEQ ID NO: 2083883 - RNA, 23 nt, Human
agaaaacaggaaaaaaacuuuua

SEQ ID NO: 2083884 - RNA, 12 nt, Human
agaaaacagaaa

SEQ ID NO: 2083885 - RNA, 12 nt, Human
ucucugcccauu

SEQ ID NO: 2083886 - RNA, 14 nt, Human
ucucugcccauucc

SEQ ID NO: 2083887 - RNA, 15 nt, Human
ucucugcccauuccc

SEQ ID NO: 2083888 - RNA, 19 nt, Human
ucucugcccauuccccagc

SEQ ID NO: 2083889 - RNA, 18 nt, Human
ucucugccugugagccag

SEQ ID NO: 2083890 - RNA, 19 nt, Human
ucucugccugugagccagu

SEQ ID NO: 2083891 - RNA, 21 nt, Human
ucucugccugugagccagucu

SEQ ID NO: 2083892 - RNA, 11 nt, Human
ucucugcucca

SEQ ID NO: 2083893 - RNA, 12 nt, Human
ucucugcuccac

SEQ ID NO: 2083894 - RNA, 13 nt, Human
ucucugcuccacc

SEQ ID NO: 2083895 - RNA, 14 nt, Human
ucucugcuccacca

SEQ ID NO: 2083896 - RNA, 15 nt, Human
ucucugcuccaccac

SEQ ID NO: 2083897 - RNA, 17 nt, Human
ucucugcuccaccacau

SEQ ID NO: 2083898 - RNA, 19 nt, Human
ucucugcuccaccacaucc

SEQ ID NO: 2083899 - RNA, 16 nt, Human
ucucuucugcuccacc

SEQ ID NO: 2083900 - RNA, 17 nt, Human
ucucuucugcuccaccc

SEQ ID NO: 2083901 - RNA, 13 nt, Human
ucucuucugcucc

SEQ ID NO: 2083902 - RNA, 14 nt, Human
ucucuucugcucca

SEQ ID NO: 2083903 - RNA, 19 nt, Human
ucucuucugcuccacccuu

SEQ ID NO: 2083904 - RNA, 14 nt, Human
ucucuugagagggu

SEQ ID NO: 2083905 - RNA, 19 nt, Human
ucuccuuccccuuucccca

SEQ ID NO: 2083906 - RNA, 11 nt, Human
ucuccuuccaa

SEQ ID NO: 2083907 - RNA, 15 nt, Human
ucuccuuccaacugc

SEQ ID NO: 2083908 - RNA, 16 nt, Human
ucuccuuccaacugcu

SEQ ID NO: 2083909 - RNA, 21 nt, Human
ucuccuuccaacugcugcccc

SEQ ID NO: 2083910 - RNA, 22 nt, Human
ucuccuuccaacugcugcccca

SEQ ID NO: 2083911 - RNA, 14 nt, Human
ucucuccuguccaa

SEQ ID NO: 2083912 - RNA, 13 nt, Human
ucucuccugucca

SEQ ID NO: 2083913 - RNA, 14 nt, Human
ucucuccuguacuu

SEQ ID NO: 2083914 - RNA, 15 nt, Human
acuuuuuuuuaaguu

SEQ ID NO: 2083915 - RNA, 21 nt, Human
acuuuuuugaaauaauaaauc

SEQ ID NO: 2083916 - RNA, 22 nt, Human
acuuuuuugaguggaugauguu

SEQ ID NO: 2083917 - RNA, 23 nt, Human
acuuuuuugcuauccagcuauuu

SEQ ID NO: 2083918 - RNA, 14 nt, Human
acuuuuugguggau

SEQ ID NO: 2083919 - RNA, 17 nt, Human
acuuuuugguggaugua

SEQ ID NO: 2083920 - RNA, 19 nt, Human
acuuuuugguggauguaaa

SEQ ID NO: 2083921 - RNA, 21 nt, Human
acuuuuugguggauguaaaua

SEQ ID NO: 2083922 - RNA, 11 nt, Human
acuuuuuccag

SEQ ID NO: 2083923 - RNA, 19 nt, Human
acuuugggaggcugaggug

SEQ ID NO: 2083924 - RNA, 14 nt, Human
acuuuuggaaucua

SEQ ID NO: 2083925 - RNA, 21 nt, Human
acuuuuggaaucuagaagaaa

SEQ ID NO: 2083926 - RNA, 23 nt, Human
acuuuuggaaucuagaagaaaug

SEQ ID NO: 2083927 - RNA, 19 nt, Human
acuuugguacauggccagu

SEQ ID NO: 2083928 - RNA, 19 nt, Human
acuuugggaggcugaggcg

SEQ ID NO: 2083929 - RNA, 19 nt, Human
acuuugggauucuuuccau

SEQ ID NO: 2083930 - RNA, 19 nt, Human
acuuugaggguguauauuu

SEQ ID NO: 2083931 - RNA, 17 nt, Human
acuuugggaggcugagg

SEQ ID NO: 2083932 - RNA, 17 nt, Human
acuuugggaggccaagg

SEQ ID NO: 2083933 - RNA, 16 nt, Human
acuuugggaggccaag

SEQ ID NO: 2083934 - RNA, 12 nt, Human
acuuugggaggc

SEQ ID NO: 2083935 - RNA, 14 nt, Human
acuuugggaggcca

SEQ ID NO: 2083936 - RNA, 17 nt, Human
acuuguuuuaugcucag

SEQ ID NO: 2083937 - RNA, 20 nt, Human
acuugugugugggcugugag

SEQ ID NO: 2083938 - RNA, 21 nt, Human
acuugugugugggcugugagu

SEQ ID NO: 2083939 - RNA, 22 nt, Human
acuugugugugggcugugagug

SEQ ID NO: 2083940 - RNA, 23 nt, Human
acuugugugugggcugugagugu

SEQ ID NO: 2083941 - RNA, 15 nt, Human
ucuccucucucugua

SEQ ID NO: 2083942 - RNA, 16 nt, Human
acuguagauugcuucu

SEQ ID NO: 2083943 - RNA, 17 nt, Human
acuguagauugcuucug

SEQ ID NO: 2083944 - RNA, 18 nt, Human
acuguagauugcuucugu

SEQ ID NO: 2083945 - RNA, 20 nt, Human
acuguagauugcuucuguag

SEQ ID NO: 2083946 - RNA, 21 nt, Human
acuguagauugcuucuguagu

SEQ ID NO: 2083947 - RNA, 22 nt, Human
acuguagauugcuucuguagua

SEQ ID NO: 2083948 - RNA, 22 nt, Human
acuguagccucgccgucuguga

SEQ ID NO: 2083949 - RNA, 13 nt, Human
acuguagucucag

SEQ ID NO: 2083950 - RNA, 15 nt, Human
acuguagucucagga

SEQ ID NO: 2083951 - RNA, 16 nt, Human
acuguagucucaggac

SEQ ID NO: 2083952 - RNA, 18 nt, Human
acuguaguuuuucuucaa

SEQ ID NO: 2083953 - RNA, 20 nt, Human
acuguaguuuuucuucaaca

SEQ ID NO: 2083954 - RNA, 21 nt, Human
acuguauaccccgugaagcau

SEQ ID NO: 2083955 - RNA, 21 nt, Human
acuguaguuuuucuucaacau

SEQ ID NO: 2083956 - RNA, 12 nt, Human
ucucccacacug

SEQ ID NO: 2083957 - RNA, 13 nt, Human
ucucccaggccag

SEQ ID NO: 2083958 - RNA, 14 nt, Human
ucucccaggccagg

SEQ ID NO: 2083959 - RNA, 18 nt, Human
ucucccaggccaggcucc

SEQ ID NO: 2083960 - RNA, 23 nt, Human
ucucccaggccaggcuccuuccu

SEQ ID NO: 2083961 - RNA, 22 nt, Human
ucucccagggcuacucacucaa

SEQ ID NO: 2083962 - RNA, 12 nt, Human
ugcaguuuuccu

SEQ ID NO: 2083963 - RNA, 15 nt, Human
ugcagugagccaaga

SEQ ID NO: 2083964 - RNA, 22 nt, Human
ugcagugacgugcaccuguacu

SEQ ID NO: 2083965 - RNA, 11 nt, Human
ugcauaaaaug

SEQ ID NO: 2083966 - RNA, 17 nt, Human
ugcauaaaauuggauua

SEQ ID NO: 2083967 - RNA, 17 nt, Human
ugcauaaagucagugcc

SEQ ID NO: 2083968 - RNA, 23 nt, Human
ugcauaauaagcuaaagaggcug

SEQ ID NO: 2083969 - RNA, 24 nt, Human
ugcauaauaagcuaaagaggcuga

SEQ ID NO: 2083970 - RNA, 19 nt, Human
ugcauaauaagcuaaagag

SEQ ID NO: 2083971 - RNA, 22 nt, Human
ugcauaauaagcuaaagaggcu

SEQ ID NO: 2083972 - RNA, 13 nt, Human
ugcagugaauugu

SEQ ID NO: 2083973 - RNA, 18 nt, Human
ugcagugacgugcaccug

SEQ ID NO: 2083974 - RNA, 19 nt, Human
ugcagugacgugcaccugu

SEQ ID NO: 2083975 - RNA, 14 nt, Human
ugcagugagccgag

SEQ ID NO: 2083976 - RNA, 19 nt, Human
ugcagccucaaccuccugg

SEQ ID NO: 2083977 - RNA, 18 nt, Human
ugcagccucaaccuccug

SEQ ID NO: 2083978 - RNA, 14 nt, Human
ugcagcugauuuua

SEQ ID NO: 2083979 - RNA, 15 nt, Human
ugcagcugauuuuaa

SEQ ID NO: 2083980 - RNA, 16 nt, Human
ugcagcugauuuuaac

SEQ ID NO: 2083981 - RNA, 18 nt, Human
ugcagcugauuuuaacaa

SEQ ID NO: 2083982 - RNA, 19 nt, Human
ugcagcugauuuuaacaau

SEQ ID NO: 2083983 - RNA, 20 nt, Human
ugcagcugauuuuaacaaua

SEQ ID NO: 2083984 - RNA, 22 nt, Human
ugcagcugauuuuaacaauaac

SEQ ID NO: 2083985 - RNA, 22 nt, Human
ugcagcuuccuuuugagggaca

SEQ ID NO: 2083986 - RNA, 16 nt, Human
agccuacagaugaacu

SEQ ID NO: 2083987 - RNA, 14 nt, Human
agccucaaaugcag

SEQ ID NO: 2083988 - RNA, 15 nt, Human
agccucagcauccug

SEQ ID NO: 2083989 - RNA, 14 nt, Human
agccucagcauccu

SEQ ID NO: 2083990 - RNA, 13 nt, Human
agccucagcaucc

SEQ ID NO: 2083991 - RNA, 18 nt, Human
agccucaaccuccugggc

SEQ ID NO: 2083992 - RNA, 17 nt, Human
agccucaaccuccuggg

SEQ ID NO: 2083993 - RNA, 23 nt, Human
ugcaugcugcuuuaauugugaau

SEQ ID NO: 2083994 - RNA, 23 nt, Human
agccugcaguuauuaacacuaac

SEQ ID NO: 2083995 - RNA, 16 nt, Human
agccugccucuucucu

SEQ ID NO: 2083996 - RNA, 19 nt, Human
agccugccucuucucuacu

SEQ ID NO: 2083997 - RNA, 17 nt, Human
ugcacguauuuuaauag

SEQ ID NO: 2083998 - RNA, 22 nt, Human
ugcacguaguagggucaggcca

SEQ ID NO: 2083999 - RNA, 12 nt, Human
ugcacguggaga

SEQ ID NO: 2084000 - RNA, 16 nt, Human
ugcacguggagagcug

SEQ ID NO: 2084001 - RNA, 17 nt, Human
ugcacguggagagcugg

SEQ ID NO: 2084002 - RNA, 18 nt, Human
ugcacguggagagcuggu

SEQ ID NO: 2084003 - RNA, 20 nt, Human
ugcacguggagagcuggugc

SEQ ID NO: 2084004 - RNA, 19 nt, Human
ugcacguaguagggucagg

SEQ ID NO: 2084005 - RNA, 14 nt, Human
ugcaccacugcacu

SEQ ID NO: 2084006 - RNA, 22 nt, Human
ugcacuauagccuaggugacag

SEQ ID NO: 2084007 - RNA, 19 nt, Human
ugcacuccagccugggcga

SEQ ID NO: 2084008 - RNA, 21 nt, Human
ugcacguggagagcuggugcc

SEQ ID NO: 2084009 - RNA, 16 nt, Human
agcagcaacacaaugu

SEQ ID NO: 2084010 - RNA, 13 nt, Human
ugcacaaugucuu

SEQ ID NO: 2084011 - RNA, 14 nt, Human
ugcacaaugucuug

SEQ ID NO: 2084012 - RNA, 15 nt, Human
ugcacacaccagagc

SEQ ID NO: 2084013 - RNA, 14 nt, Human
ugcacaagcugcac

SEQ ID NO: 2084014 - RNA, 20 nt, Human
ugcagacucuacagaggcca

SEQ ID NO: 2084015 - RNA, 19 nt, Human
ugcagacucuacagaggcc

SEQ ID NO: 2084016 - RNA, 16 nt, Human
ugcagaaaagcaccug

SEQ ID NO: 2084017 - RNA, 14 nt, Human
ugcagaaacagauu

SEQ ID NO: 2084018 - RNA, 17 nt, Human
ugcagaaacagauuugg

SEQ ID NO: 2084019 - RNA, 21 nt, Human
ugcagaaaagcaccugccgac

SEQ ID NO: 2084020 - RNA, 22 nt, Human
ugcagaaaagcaccugccgacc

SEQ ID NO: 2084021 - RNA, 17 nt, Human
ugcagaaaagcaccugc

SEQ ID NO: 2084022 - RNA, 18 nt, Human
ugcagaaaagcaccugcc

SEQ ID NO: 2084023 - RNA, 19 nt, Human
ugcagaaaagcaccugccg

SEQ ID NO: 2084024 - RNA, 20 nt, Human
ugcagaaaagcaccugccga

SEQ ID NO: 2084025 - RNA, 14 nt, Human
agcccuucauuugg

SEQ ID NO: 2084026 - RNA, 13 nt, Human
agcccuucauuug

SEQ ID NO: 2084027 - RNA, 19 nt, Human
ugcagagaugcgguggcua

SEQ ID NO: 2084028 - RNA, 23 nt, Human
agcccuuccaugucgccucugca

SEQ ID NO: 2084029 - RNA, 22 nt, Human
agcccuuccaugucgccucugc

SEQ ID NO: 2084030 - RNA, 19 nt, Human
agcccuuccaugucgccuc

SEQ ID NO: 2084031 - RNA, 22 nt, Human
ugcagacucuacagaggccaug

SEQ ID NO: 2084032 - RNA, 13 nt, Human
ugcagacuggagg

SEQ ID NO: 2084033 - RNA, 17 nt, Human
ugcagacuggaggggac

SEQ ID NO: 2084034 - RNA, 14 nt, Human
ugcagacuggaggg

SEQ ID NO: 2084035 - RNA, 16 nt, Human
ugcagacuggagggga

SEQ ID NO: 2084036 - RNA, 24 nt, Human
ugcagagacagagaggacgugggc

SEQ ID NO: 2084037 - RNA, 17 nt, Human
ugcagagacaggaccug

SEQ ID NO: 2084038 - RNA, 20 nt, Human
ugcagagacaggaccugacu

SEQ ID NO: 2084039 - RNA, 15 nt, Human
agccucaaccuccug

SEQ ID NO: 2084040 - RNA, 15 nt, Human
agccuauuguaaaua

SEQ ID NO: 2084041 - RNA, 22 nt, Human
agccuaguucauccaauccuca

SEQ ID NO: 2084042 - RNA, 11 nt, Human
agccuauggca

SEQ ID NO: 2084043 - RNA, 17 nt, Human
agccuaggugacagagu

SEQ ID NO: 2084044 - RNA, 15 nt, Human
agccuaggugacaga

SEQ ID NO: 2084045 - RNA, 14 nt, Human
agccuaguucaucc

SEQ ID NO: 2084046 - RNA, 15 nt, Human
agccuaguucaucca

SEQ ID NO: 2084047 - RNA, 17 nt, Human
agccuaguucauccaau

SEQ ID NO: 2084048 - RNA, 20 nt, Human
agccuaguucauccaauccu

SEQ ID NO: 2084049 - RNA, 23 nt, Human
agccuaguucauccaauccucac

SEQ ID NO: 2084050 - RNA, 20 nt, Human
agccuaggggucagggacca

SEQ ID NO: 2084051 - RNA, 23 nt, Human
agccuaggggucagggaccaagg

SEQ ID NO: 2084052 - RNA, 20 nt, Human
agcccuugagcuccccaaaa

SEQ ID NO: 2084053 - RNA, 16 nt, Human
agcccuugaagauauc

SEQ ID NO: 2084054 - RNA, 19 nt, Human
agcccuugaagucacccgg

SEQ ID NO: 2084055 - RNA, 17 nt, Human
agcccuugagcucccca

SEQ ID NO: 2084056 - RNA, 18 nt, Human
agccuaagaugaagagga

SEQ ID NO: 2084057 - RNA, 23 nt, Human
agccuaaucccugggcauugcuu

SEQ ID NO: 2084058 - RNA, 14 nt, Human
agccuaggggucag

SEQ ID NO: 2084059 - RNA, 14 nt, Human
agccuacaggccuc

SEQ ID NO: 2084060 - RNA, 22 nt, Human
agccuaccggcaauuuccggcc

SEQ ID NO: 2084061 - RNA, 13 nt, Human
agccuacaggccu

SEQ ID NO: 2084062 - RNA, 15 nt, Human
agccuaaucccuggg

SEQ ID NO: 2084063 - RNA, 22 nt, Human
agccuaaucccugggcauugcu

SEQ ID NO: 2084064 - RNA, 16 nt, Human
ugccccgugcagacug

SEQ ID NO: 2084065 - RNA, 18 nt, Human
ugccccgugcagacugga

SEQ ID NO: 2084066 - RNA, 20 nt, Human
ugccccgucaccaucucagg

SEQ ID NO: 2084067 - RNA, 21 nt, Human
ugccccgucaccaucucaggc

SEQ ID NO: 2084068 - RNA, 22 nt, Human
ugcccccugguggacaguccug

SEQ ID NO: 2084069 - RNA, 12 nt, Human
ugcccccuucuc

SEQ ID NO: 2084070 - RNA, 13 nt, Human
ugcccccuucucc

SEQ ID NO: 2084071 - RNA, 15 nt, Human
ugcccccuucuccca

SEQ ID NO: 2084072 - RNA, 16 nt, Human
ugcccccuucucccac

SEQ ID NO: 2084073 - RNA, 17 nt, Human
ugcccccuucucccaca

SEQ ID NO: 2084074 - RNA, 18 nt, Human
ugcccccuucucccacac

SEQ ID NO: 2084075 - RNA, 19 nt, Human
ugcccccuucucccacacu

SEQ ID NO: 2084076 - RNA, 20 nt, Human
ugcccccuucucccacacug

SEQ ID NO: 2084077 - RNA, 22 nt, Human
ugcccccuucucccacacugcu

SEQ ID NO: 2084078 - RNA, 17 nt, Human
ugccccgucaccaucuc

SEQ ID NO: 2084079 - RNA, 18 nt, Human
ugccccgucaccaucuca

SEQ ID NO: 2084080 - RNA, 19 nt, Human
ugccccgucaccaucucag

SEQ ID NO: 2084081 - RNA, 21 nt, Human
ugccccgugcagacuggaggg

SEQ ID NO: 2084082 - RNA, 23 nt, Human
ugcccuagagcacacuguagcau

SEQ ID NO: 2084083 - RNA, 16 nt, Human
ugcccuagaugagccc

SEQ ID NO: 2084084 - RNA, 13 nt, Human
ugcccuagcucca

SEQ ID NO: 2084085 - RNA, 14 nt, Human
ugcccuagcuccac

SEQ ID NO: 2084086 - RNA, 14 nt, Human
ugcccuaggcuccg

SEQ ID NO: 2084087 - RNA, 16 nt, Human
ugcccucaaucccagc

SEQ ID NO: 2084088 - RNA, 18 nt, Human
ugcccuaggcuccgucag

SEQ ID NO: 2084089 - RNA, 14 nt, Human
ugccccccacccca

SEQ ID NO: 2084090 - RNA, 15 nt, Human
ugccccccaccccag

SEQ ID NO: 2084091 - RNA, 16 nt, Human
ugccccccaccccagc

SEQ ID NO: 2084092 - RNA, 17 nt, Human
ugccccccaccccagcc

SEQ ID NO: 2084093 - RNA, 12 nt, Human
ugccccccaccc

SEQ ID NO: 2084094 - RNA, 13 nt, Human
ugccccccacccc

SEQ ID NO: 2084095 - RNA, 18 nt, Human
ugccccccaccccagccu

SEQ ID NO: 2084096 - RNA, 20 nt, Human
ugccccccaccccagccuaa

SEQ ID NO: 2084097 - RNA, 12 nt, Human
ugcccccuggug

SEQ ID NO: 2084098 - RNA, 13 nt, Human
ugcccccuggugg

SEQ ID NO: 2084099 - RNA, 21 nt, Human
ugcccccugguggacaguccu

SEQ ID NO: 2084100 - RNA, 11 nt, Human
ugcccaggccc

SEQ ID NO: 2084101 - RNA, 20 nt, Human
ugcccaggcaggucuugaac

SEQ ID NO: 2084102 - RNA, 17 nt, Human
ugcccaggcaggucuug

SEQ ID NO: 2084103 - RNA, 16 nt, Human
ugcccaggcaggucuu

SEQ ID NO: 2084104 - RNA, 16 nt, Human
ugcccacacaccccaa

SEQ ID NO: 2084105 - RNA, 16 nt, Human
ugcccaagcccugaga

SEQ ID NO: 2084106 - RNA, 18 nt, Human
ugcccaagcccugagagu

SEQ ID NO: 2084107 - RNA, 14 nt, Human
ugcccaacuguuau

SEQ ID NO: 2084108 - RNA, 15 nt, Human
ugcccaggcaggucu

SEQ ID NO: 2084109 - RNA, 14 nt, Human
ugcccacaggauca

SEQ ID NO: 2084110 - RNA, 22 nt, Human
ugcccaggccccugccacccug

SEQ ID NO: 2084111 - RNA, 20 nt, Human
ugcccaggccccugccaccc

SEQ ID NO: 2084112 - RNA, 14 nt, Human
ugcccaggccccug

SEQ ID NO: 2084113 - RNA, 12 nt, Human
ugcccaggcccc

SEQ ID NO: 2084114 - RNA, 17 nt, Human
ugcccaggccugccugu

SEQ ID NO: 2084115 - RNA, 15 nt, Human
ugcccaggccugccu

SEQ ID NO: 2084116 - RNA, 11 nt, Human
ugcccacagcc

SEQ ID NO: 2084117 - RNA, 12 nt, Human
ugcccacagccc

SEQ ID NO: 2084118 - RNA, 21 nt, Human
ugcccacagcccgcaugcagc

SEQ ID NO: 2084119 - RNA, 22 nt, Human
agcuaugggagccccagggucu

SEQ ID NO: 2084120 - RNA, 18 nt, Human
agcuaugggagccccagg

SEQ ID NO: 2084121 - RNA, 19 nt, Human
agcuaugggagccccaggg

SEQ ID NO: 2084122 - RNA, 17 nt, Human
agcuaugggagccccag

SEQ ID NO: 2084123 - RNA, 14 nt, Human
agcuauauccaugu

SEQ ID NO: 2084124 - RNA, 15 nt, Human
agcuauauccaugua

SEQ ID NO: 2084125 - RNA, 19 nt, Human
agcuauagacccgaggaaa

SEQ ID NO: 2084126 - RNA, 17 nt, Human
agcuauagacccgagga

SEQ ID NO: 2084127 - RNA, 18 nt, Human
agcuauagacccgaggaa

SEQ ID NO: 2084128 - RNA, 23 nt, Human
agcuauugauauaaauaaaacau

SEQ ID NO: 2084129 - RNA, 17 nt, Human
agcuauugauauaaaua

SEQ ID NO: 2084130 - RNA, 12 nt, Human
agcuaguuuucu

SEQ ID NO: 2084131 - RNA, 13 nt, Human
agcuauacaguuu

SEQ ID NO: 2084132 - RNA, 19 nt, Human
agcuauacaguuuuccuaa

SEQ ID NO: 2084133 - RNA, 14 nt, Human
agcuacuugggagg

SEQ ID NO: 2084134 - RNA, 21 nt, Human
agcuacucagaagccugaggc

SEQ ID NO: 2084135 - RNA, 22 nt, Human
agcuacucaagaggcugaggca

SEQ ID NO: 2084136 - RNA, 13 nt, Human
agcuacucaggag

SEQ ID NO: 2084137 - RNA, 15 nt, Human
agcuacucaggaggc

SEQ ID NO: 2084138 - RNA, 17 nt, Human
agcuacucaggaggcug

SEQ ID NO: 2084139 - RNA, 18 nt, Human
agcuacucaggaggcuga

SEQ ID NO: 2084140 - RNA, 18 nt, Human
agcuacuccggaggcuga

SEQ ID NO: 2084141 - RNA, 19 nt, Human
agcuacuccggaggcugag

SEQ ID NO: 2084142 - RNA, 19 nt, Human
ugccauguuggccaggcug

SEQ ID NO: 2084143 - RNA, 18 nt, Human
ugccauguuggccaggcu

SEQ ID NO: 2084144 - RNA, 17 nt, Human
ugccauguuggccaggc

SEQ ID NO: 2084145 - RNA, 22 nt, Human
agcuauuuuuauuuguuugugc

SEQ ID NO: 2084146 - RNA, 10 nt, Human
agcuauuuuu

SEQ ID NO: 2084147 - RNA, 21 nt, Human
ugccauguuggccaggcuggu

SEQ ID NO: 2084148 - RNA, 20 nt, Human
ugccauguuggccaggcugg

SEQ ID NO: 2084149 - RNA, 18 nt, Human
ugccauguuuugccaccc

SEQ ID NO: 2084150 - RNA, 21 nt, Human
ugccauguuuugccacccccu

SEQ ID NO: 2084151 - RNA, 24 nt, Human
ugcccaaccugcucuccucuugcc

SEQ ID NO: 2084152 - RNA, 23 nt, Human
ugcccaaccugcucuccucuugc

SEQ ID NO: 2084153 - RNA, 13 nt, Human
ugcccaaccucag

SEQ ID NO: 2084154 - RNA, 14 nt, Human
ugcccaaccucagc

SEQ ID NO: 2084155 - RNA, 15 nt, Human
ugcccaaccucagca

SEQ ID NO: 2084156 - RNA, 17 nt, Human
ugcccaaccucagcaac

SEQ ID NO: 2084157 - RNA, 18 nt, Human
ugcccaaccucagcaacc

SEQ ID NO: 2084158 - RNA, 19 nt, Human
ugcccaaccucagcaaccu

SEQ ID NO: 2084159 - RNA, 22 nt, Human
ugcccaaccugcucuccucuug

SEQ ID NO: 2084160 - RNA, 18 nt, Human
ugcccaaccugcucuccu

SEQ ID NO: 2084161 - RNA, 15 nt, Human
ugccauauucuguug

SEQ ID NO: 2084162 - RNA, 17 nt, Human
ugccauauucuguuggc

SEQ ID NO: 2084163 - RNA, 16 nt, Human
ugccauauucuguugg

SEQ ID NO: 2084164 - RNA, 17 nt, Human
ugccagucccccugccc

SEQ ID NO: 2084165 - RNA, 20 nt, Human
ugccacuucacuccagccug

SEQ ID NO: 2084166 - RNA, 19 nt, Human
ugccagucccccugcccca

SEQ ID NO: 2084167 - RNA, 12 nt, Human
ugccacacuuca

SEQ ID NO: 2084168 - RNA, 23 nt, Human
ugccacugccucuuccucccuca

SEQ ID NO: 2084169 - RNA, 23 nt, Human
agcgugucuguauuuauguguga

SEQ ID NO: 2084170 - RNA, 21 nt, Human
agcuacucaagaggcugaggc

SEQ ID NO: 2084171 - RNA, 14 nt, Human
agcuacucagaagc

SEQ ID NO: 2084172 - RNA, 15 nt, Human
agcuacucagaagcc

SEQ ID NO: 2084173 - RNA, 18 nt, Human
agcuacucagaagccuga

SEQ ID NO: 2084174 - RNA, 19 nt, Human
agcuacucagaagccugag

SEQ ID NO: 2084175 - RNA, 20 nt, Human
agcuacucagaagccugagg

SEQ ID NO: 2084176 - RNA, 17 nt, Human
agcgugagccacugcac

SEQ ID NO: 2084177 - RNA, 16 nt, Human
agcgugagccacugca

SEQ ID NO: 2084178 - RNA, 21 nt, Human
ugccauauucuguuggccagu

SEQ ID NO: 2084179 - RNA, 20 nt, Human
ugccauauucuguuggccag

SEQ ID NO: 2084180 - RNA, 15 nt, Human
agcggggacagcucc

SEQ ID NO: 2084181 - RNA, 17 nt, Human
agcggggacagcuccuu

SEQ ID NO: 2084182 - RNA, 16 nt, Human
agcggggacagcuccu

SEQ ID NO: 2084183 - RNA, 15 nt, Human
agcgugagccacugc

SEQ ID NO: 2084184 - RNA, 13 nt, Human
agcgggcgccugu

SEQ ID NO: 2084185 - RNA, 13 nt, Human
agcgugagccacu

SEQ ID NO: 2084186 - RNA, 14 nt, Human
ugcauuuccugaca

SEQ ID NO: 2084187 - RNA, 13 nt, Human
ugcauuuccugac

SEQ ID NO: 2084188 - RNA, 21 nt, Human
agcggcugagucaugaucucc

SEQ ID NO: 2084189 - RNA, 13 nt, Human
ugccacacagagu

SEQ ID NO: 2084190 - RNA, 20 nt, Human
ugccacacagaguggucuuu

SEQ ID NO: 2084191 - RNA, 23 nt, Human
ugccacacagaguggucuuucug

SEQ ID NO: 2084192 - RNA, 16 nt, Human
ugccacacgucugacc

SEQ ID NO: 2084193 - RNA, 13 nt, Human
ugcauuugagguc

SEQ ID NO: 2084194 - RNA, 22 nt, Human
agcgcccaguuggguggaugcc

SEQ ID NO: 2084195 - RNA, 14 nt, Human
agcgcccaguuggg

SEQ ID NO: 2084196 - RNA, 14 nt, Human
agccugcuccagcu

SEQ ID NO: 2084197 - RNA, 18 nt, Human
agccugcggccugcugga

SEQ ID NO: 2084198 - RNA, 15 nt, Human
agccugcguggcuga

SEQ ID NO: 2084199 - RNA, 16 nt, Human
agccugcguggcugac

SEQ ID NO: 2084200 - RNA, 17 nt, Human
agccugcguggcugacc

SEQ ID NO: 2084201 - RNA, 18 nt, Human
agccugcguggcugaccc

SEQ ID NO: 2084202 - RNA, 19 nt, Human
agccugcguggcugacccc

SEQ ID NO: 2084203 - RNA, 21 nt, Human
agccugcguggcugacccccc

SEQ ID NO: 2084204 - RNA, 23 nt, Human
agccugcguggcugaccccccuc

SEQ ID NO: 2084205 - RNA, 11 nt, Human
agccugccugg

SEQ ID NO: 2084206 - RNA, 14 nt, Human
agccugccuggagu

SEQ ID NO: 2084207 - RNA, 22 nt, Human
agcgcgccacucgcuuccccca

SEQ ID NO: 2084208 - RNA, 12 nt, Human
agcgcgccacuc

SEQ ID NO: 2084209 - RNA, 19 nt, Human
agcgcgccacucgcuuccc

SEQ ID NO: 2084210 - RNA, 20 nt, Human
agcgcgccacucgcuucccc

SEQ ID NO: 2084211 - RNA, 20 nt, Human
agcgcuagaggaagcagcca

SEQ ID NO: 2084212 - RNA, 19 nt, Human
agcgcuagaggaagcagcc

SEQ ID NO: 2084213 - RNA, 17 nt, Human
agcgcugccgcacccca

SEQ ID NO: 2084214 - RNA, 18 nt, Human
agcgcugccgcaccccag

SEQ ID NO: 2084215 - RNA, 19 nt, Human
agcgcugccgcaccccaga

SEQ ID NO: 2084216 - RNA, 16 nt, Human
agcggcugagucauga

SEQ ID NO: 2084217 - RNA, 19 nt, Human
agcggcugagucaugaucu

SEQ ID NO: 2084218 - RNA, 17 nt, Human
agcuggagaaauauggu

SEQ ID NO: 2084219 - RNA, 16 nt, Human
agcuggaccucaccaa

SEQ ID NO: 2084220 - RNA, 15 nt, Human
agcuggaccucacca

SEQ ID NO: 2084221 - RNA, 15 nt, Human
agcuggaccaguggu

SEQ ID NO: 2084222 - RNA, 18 nt, Human
agcuggaauuuuuuauuc

SEQ ID NO: 2084223 - RNA, 21 nt, Human
agcuggaauuuuuuauucuug

SEQ ID NO: 2084224 - RNA, 23 nt, Human
agcuggaauuuuuuauucuugug

SEQ ID NO: 2084225 - RNA, 21 nt, Human
agcugccuggaagagcagccc

SEQ ID NO: 2084226 - RNA, 20 nt, Human
agcugccuggaagagcagcc

SEQ ID NO: 2084227 - RNA, 18 nt, Human
agcugccucccuguccac

SEQ ID NO: 2084228 - RNA, 20 nt, Human
agcugccucucgguggccag

SEQ ID NO: 2084229 - RNA, 22 nt, Human
ugccucugacacacagcucugu

SEQ ID NO: 2084230 - RNA, 13 nt, Human
agcugggagaagg

SEQ ID NO: 2084231 - RNA, 12 nt, Human
agcugggaggaa

SEQ ID NO: 2084232 - RNA, 13 nt, Human
agcugggaggaaa

SEQ ID NO: 2084233 - RNA, 14 nt, Human
agcugggaggaaaa

SEQ ID NO: 2084234 - RNA, 15 nt, Human
agcugggaggaaaag

SEQ ID NO: 2084235 - RNA, 18 nt, Human
agcugggaggaaaagaaa

SEQ ID NO: 2084236 - RNA, 19 nt, Human
agcugggacuacaggugug

SEQ ID NO: 2084237 - RNA, 17 nt, Human
agcugggacuacaggug

SEQ ID NO: 2084238 - RNA, 14 nt, Human
agcugggaucugac

SEQ ID NO: 2084239 - RNA, 16 nt, Human
agcugggaucugacug

SEQ ID NO: 2084240 - RNA, 19 nt, Human
agcugggaucugacugcac

SEQ ID NO: 2084241 - RNA, 21 nt, Human
agcugggaucugacugcacgu

SEQ ID NO: 2084242 - RNA, 14 nt, Human
agcugggcagguug

SEQ ID NO: 2084243 - RNA, 17 nt, Human
agcugggauguuucugu

SEQ ID NO: 2084244 - RNA, 16 nt, Human
agcugggcagaaggcc

SEQ ID NO: 2084245 - RNA, 18 nt, Human
agcugggcagaaggccaa

SEQ ID NO: 2084246 - RNA, 19 nt, Human
ugcgaaaggaugaaaguga

SEQ ID NO: 2084247 - RNA, 16 nt, Human
ugcgaaggggcccugg

SEQ ID NO: 2084248 - RNA, 21 nt, Human
ugcgaaggggcccugguccuu

SEQ ID NO: 2084249 - RNA, 18 nt, Human
ugcgaaggggcccugguc

SEQ ID NO: 2084250 - RNA, 22 nt, Human
ugcgaaugguagucuaaccaaa

SEQ ID NO: 2084251 - RNA, 23 nt, Human
ugcgaaugguagucuaaccaaau

SEQ ID NO: 2084252 - RNA, 22 nt, Human
ugcgaaugguuccauucucucu

SEQ ID NO: 2084253 - RNA, 18 nt, Human
ugcggacagccacggcca

SEQ ID NO: 2084254 - RNA, 15 nt, Human
ugcgacggagagaaa

SEQ ID NO: 2084255 - RNA, 16 nt, Human
ugcgacggagagaaaa

SEQ ID NO: 2084256 - RNA, 19 nt, Human
ugcgacggagagaaaaaag

SEQ ID NO: 2084257 - RNA, 13 nt, Human
ugcgaaaggauga

SEQ ID NO: 2084258 - RNA, 17 nt, Human
ugccuguucagcuccag

SEQ ID NO: 2084259 - RNA, 19 nt, Human
ugccuuaccuccugcccag

SEQ ID NO: 2084260 - RNA, 20 nt, Human
ugccuuaccuccugcccagg

SEQ ID NO: 2084261 - RNA, 21 nt, Human
ugccuuaccuccugcccagga

SEQ ID NO: 2084262 - RNA, 16 nt, Human
ugccuguucagcucca

SEQ ID NO: 2084263 - RNA, 15 nt, Human
ugccuguucagcucc

SEQ ID NO: 2084264 - RNA, 21 nt, Human
ugccugugugacaucaguggc

SEQ ID NO: 2084265 - RNA, 17 nt, Human
ugccuuagaaccuuucu

SEQ ID NO: 2084266 - RNA, 14 nt, Human
ugccuuagaaccuu

SEQ ID NO: 2084267 - RNA, 15 nt, Human
ugccuuacuuuguau

SEQ ID NO: 2084268 - RNA, 17 nt, Human
ugccuuacuuuguauga

SEQ ID NO: 2084269 - RNA, 18 nt, Human
ugccuuacuuuguaugau

SEQ ID NO: 2084270 - RNA, 19 nt, Human
ugccuuacuuuguaugaua

SEQ ID NO: 2084271 - RNA, 21 nt, Human
ugccuuagaaccuuucuuaca

SEQ ID NO: 2084272 - RNA, 15 nt, Human
agcugugacccucaa

SEQ ID NO: 2084273 - RNA, 23 nt, Human
ugccuuaccuccugcccaggaga

SEQ ID NO: 2084274 - RNA, 20 nt, Human
agcuggggaagcuucuuaaa

SEQ ID NO: 2084275 - RNA, 20 nt, Human
agcugggggccaugagcucc

SEQ ID NO: 2084276 - RNA, 16 nt, Human
agcugggggccaugag

SEQ ID NO: 2084277 - RNA, 18 nt, Human
agcugggggccaugagcu

SEQ ID NO: 2084278 - RNA, 16 nt, Human
agcugccaagccccau

SEQ ID NO: 2084279 - RNA, 15 nt, Human
agcugccaaguaaau

SEQ ID NO: 2084280 - RNA, 22 nt, Human
agcugccaaguaaauagcaaca

SEQ ID NO: 2084281 - RNA, 12 nt, Human
agcugccagaga

SEQ ID NO: 2084282 - RNA, 13 nt, Human
agcugccagagaa

SEQ ID NO: 2084283 - RNA, 19 nt, Human
ugcccuuggaggccagcca

SEQ ID NO: 2084284 - RNA, 16 nt, Human
ugcccuugucccacuc

SEQ ID NO: 2084285 - RNA, 17 nt, Human
ugcccuugucccacuca

SEQ ID NO: 2084286 - RNA, 14 nt, Human
agcugccagagaag

SEQ ID NO: 2084287 - RNA, 17 nt, Human
ugcccuuggaggccagc

SEQ ID NO: 2084288 - RNA, 22 nt, Human
agcugcaccugccagccuggcu

SEQ ID NO: 2084289 - RNA, 18 nt, Human
agcugcaccugccagccu

SEQ ID NO: 2084290 - RNA, 21 nt, Human
agcugcaccugccagccuggc

SEQ ID NO: 2084291 - RNA, 15 nt, Human
agcugcaucuacuca

SEQ ID NO: 2084292 - RNA, 19 nt, Human
agcugauuuuaacaauaac

SEQ ID NO: 2084293 - RNA, 16 nt, Human
agcugcaccugccagc

SEQ ID NO: 2084294 - RNA, 15 nt, Human
agcugauuuuaacaa

SEQ ID NO: 2084295 - RNA, 16 nt, Human
agcugauuuuaacaau

SEQ ID NO: 2084296 - RNA, 13 nt, Human
ugccgaaacugga

SEQ ID NO: 2084297 - RNA, 15 nt, Human
ugccgaaacuggaag

SEQ ID NO: 2084298 - RNA, 16 nt, Human
ugccgaaacuggaagu

SEQ ID NO: 2084299 - RNA, 18 nt, Human
ugccgaaacuggaaguua

SEQ ID NO: 2084300 - RNA, 17 nt, Human
ugccgccucccagccug

SEQ ID NO: 2084301 - RNA, 18 nt, Human
ugccgccucccagccugg

SEQ ID NO: 2084302 - RNA, 14 nt, Human
ugccggcccugggg

SEQ ID NO: 2084303 - RNA, 15 nt, Human
ugccggcccuggggc

SEQ ID NO: 2084304 - RNA, 16 nt, Human
ugccggcucuggcucu

SEQ ID NO: 2084305 - RNA, 20 nt, Human
ugccucaucuauaacaugca

SEQ ID NO: 2084306 - RNA, 21 nt, Human
ugccucugacacacagcucug

SEQ ID NO: 2084307 - RNA, 20 nt, Human
ugccucugacacacagcucu

SEQ ID NO: 2084308 - RNA, 20 nt, Human
ugccuccaccgcugccuaag

SEQ ID NO: 2084309 - RNA, 14 nt, Human
ugccuccauggugc

SEQ ID NO: 2084310 - RNA, 15 nt, Human
ugccuccauggugcc

SEQ ID NO: 2084311 - RNA, 16 nt, Human
ugccuccauggugccu

SEQ ID NO: 2084312 - RNA, 18 nt, Human
ugccuccauggugccucu

SEQ ID NO: 2084313 - RNA, 20 nt, Human
ugccuccauggugccucugg

SEQ ID NO: 2084314 - RNA, 22 nt, Human
ugccuccauggugccucuggag

SEQ ID NO: 2084315 - RNA, 18 nt, Human
ugccuccaccccccagaa

SEQ ID NO: 2084316 - RNA, 11 nt, Human
ugccuccaccg

SEQ ID NO: 2084317 - RNA, 13 nt, Human
ugccuccaccgcu

SEQ ID NO: 2084318 - RNA, 16 nt, Human
ugccuccaccgcugcc

SEQ ID NO: 2084319 - RNA, 17 nt, Human
ugccuccaccgcugccu

SEQ ID NO: 2084320 - RNA, 18 nt, Human
ugccuccaccgcugccua

SEQ ID NO: 2084321 - RNA, 12 nt, Human
agcucuguccug

SEQ ID NO: 2084322 - RNA, 17 nt, Human
agcucuucuccaggcug

SEQ ID NO: 2084323 - RNA, 21 nt, Human
agcucuggugacaccagccuu

SEQ ID NO: 2084324 - RNA, 13 nt, Human
agcucugcuugcc

SEQ ID NO: 2084325 - RNA, 15 nt, Human
agcucugcuugccga

SEQ ID NO: 2084326 - RNA, 21 nt, Human
agcucugcuugccgaaacugg

SEQ ID NO: 2084327 - RNA, 22 nt, Human
agcucugcuugccgaaacugga

SEQ ID NO: 2084328 - RNA, 23 nt, Human
agcucugcuugccgaaacuggaa

SEQ ID NO: 2084329 - RNA, 17 nt, Human
agcucuggugacaccag

SEQ ID NO: 2084330 - RNA, 19 nt, Human
agcucuggugacaccagcc

SEQ ID NO: 2084331 - RNA, 20 nt, Human
agcucuggugacaccagccu

SEQ ID NO: 2084332 - RNA, 18 nt, Human
agcucuucuccaggcugu

SEQ ID NO: 2084333 - RNA, 14 nt, Human
agcucuucuccauc

SEQ ID NO: 2084334 - RNA, 20 nt, Human
agcucuucugccggcccugg

SEQ ID NO: 2084335 - RNA, 21 nt, Human
agcucuucugccggcccuggg

SEQ ID NO: 2084336 - RNA, 22 nt, Human
agcucuucugccggcccugggg

SEQ ID NO: 2084337 - RNA, 23 nt, Human
agcucuucugccggcccuggggc

SEQ ID NO: 2084338 - RNA, 19 nt, Human
agcucuugaagacacugaa

SEQ ID NO: 2084339 - RNA, 13 nt, Human
agcugcacccuca

SEQ ID NO: 2084340 - RNA, 17 nt, Human
agcugcacccucaggca

SEQ ID NO: 2084341 - RNA, 16 nt, Human
agcugauuacugucaa

SEQ ID NO: 2084342 - RNA, 18 nt, Human
agcugauuacugucaaua

SEQ ID NO: 2084343 - RNA, 19 nt, Human
agcugauuacugucaauaa

SEQ ID NO: 2084344 - RNA, 20 nt, Human
agcugauuacugucaauaaa

SEQ ID NO: 2084345 - RNA, 21 nt, Human
agcugauuacugucaauaaac

SEQ ID NO: 2084346 - RNA, 22 nt, Human
agcugauuacugucaauaaaca

SEQ ID NO: 2084347 - RNA, 14 nt, Human
agcugauuuuaaca

SEQ ID NO: 2084348 - RNA, 18 nt, Human
agcugcacccucaggcag

SEQ ID NO: 2084349 - RNA, 19 nt, Human
agcugcacccucaggcagg

SEQ ID NO: 2084350 - RNA, 20 nt, Human
agcugcacccucaggcaggu

SEQ ID NO: 2084351 - RNA, 22 nt, Human
agcugcacccucaggcaggugg

SEQ ID NO: 2084352 - RNA, 12 nt, Human
agcucugcuccu

SEQ ID NO: 2084353 - RNA, 22 nt, Human
agcucugcuccucuccccagca

SEQ ID NO: 2084354 - RNA, 16 nt, Human
agcucucuccucccuu

SEQ ID NO: 2084355 - RNA, 19 nt, Human
agcucucccucuggcccug

SEQ ID NO: 2084356 - RNA, 20 nt, Human
agcucucccucuggcccugc

SEQ ID NO: 2084357 - RNA, 22 nt, Human
agcucucccucuggcccugccu

SEQ ID NO: 2084358 - RNA, 23 nt, Human
agcucucccucuggcccugccuu

SEQ ID NO: 2084359 - RNA, 11 nt, Human
agcucucccuc

SEQ ID NO: 2084360 - RNA, 13 nt, Human
agcucucccucug

SEQ ID NO: 2084361 - RNA, 14 nt, Human
agcucucccucugg

SEQ ID NO: 2084362 - RNA, 15 nt, Human
agcucucccucuggc

SEQ ID NO: 2084363 - RNA, 16 nt, Human
agcucucccucuggcc

SEQ ID NO: 2084364 - RNA, 17 nt, Human
agcucucccucuggccc

SEQ ID NO: 2084365 - RNA, 18 nt, Human
agcucucccucuggcccu

SEQ ID NO: 2084366 - RNA, 14 nt, Human
ugcccuccacugcc

SEQ ID NO: 2084367 - RNA, 15 nt, Human
ugcccuccacugccc

SEQ ID NO: 2084368 - RNA, 16 nt, Human
ugcccuccacugcccu

SEQ ID NO: 2084369 - RNA, 17 nt, Human
ugcccuccacugcccuc

SEQ ID NO: 2084370 - RNA, 18 nt, Human
ugcccuccacugcccucu

SEQ ID NO: 2084371 - RNA, 19 nt, Human
ugcccuccacugcccucug

SEQ ID NO: 2084372 - RNA, 21 nt, Human
ugcccuccacugcccucuguu

SEQ ID NO: 2084373 - RNA, 12 nt, Human
agcucucagcca

SEQ ID NO: 2084374 - RNA, 13 nt, Human
agcucucagccaa

SEQ ID NO: 2084375 - RNA, 18 nt, Human
ugcccuccacagccgcag

SEQ ID NO: 2084376 - RNA, 21 nt, Human
ugcccuccacagccgcagccu

SEQ ID NO: 2084377 - RNA, 16 nt, Human
aggaaacucaccugcu

SEQ ID NO: 2084378 - RNA, 17 nt, Human
aggaaacucaccugcug

SEQ ID NO: 2084379 - RNA, 20 nt, Human
aggaaacucaccugcuggcc

SEQ ID NO: 2084380 - RNA, 21 nt, Human
aggaaacucaccugcuggccc

SEQ ID NO: 2084381 - RNA, 22 nt, Human
aggaaacucaccugcuggcccc

SEQ ID NO: 2084382 - RNA, 23 nt, Human
aggaaacucaccugcuggccccu

SEQ ID NO: 2084383 - RNA, 17 nt, Human
aggaaagaaagaaggaa

SEQ ID NO: 2084384 - RNA, 21 nt, Human
ugcuauaacuauguugauaaa

SEQ ID NO: 2084385 - RNA, 15 nt, Human
aggaaagauuuguac

SEQ ID NO: 2084386 - RNA, 14 nt, Human
aggaaaauccucug

SEQ ID NO: 2084387 - RNA, 16 nt, Human
aggaaaauaguaaugu

SEQ ID NO: 2084388 - RNA, 12 nt, Human
agcuuugaaaau

SEQ ID NO: 2084389 - RNA, 16 nt, Human
agcuuugaaaauucag

SEQ ID NO: 2084390 - RNA, 18 nt, Human
agcuuugaaaauucagug

SEQ ID NO: 2084391 - RNA, 19 nt, Human
agcuuugaaaauucagugg

SEQ ID NO: 2084392 - RNA, 21 nt, Human
agcuuguaaauagcucaggug

SEQ ID NO: 2084393 - RNA, 20 nt, Human
agcuuguaaauagcucaggu

SEQ ID NO: 2084394 - RNA, 16 nt, Human
agcuuggcuguagaag

SEQ ID NO: 2084395 - RNA, 23 nt, Human
agcuuggcuguagaaggagacag

SEQ ID NO: 2084396 - RNA, 19 nt, Human
agcuuguaaauagcucagg

SEQ ID NO: 2084397 - RNA, 20 nt, Human
agcuuucuguccuuuuggca

SEQ ID NO: 2084398 - RNA, 22 nt, Human
agcuuucuguccuuuuggcacu

SEQ ID NO: 2084399 - RNA, 22 nt, Human
agcuuuccuuuuucccaauaaa

SEQ ID NO: 2084400 - RNA, 23 nt, Human
agcuuuccuuuuucccaauaaau

SEQ ID NO: 2084401 - RNA, 13 nt, Human
agcuuucucugcu

SEQ ID NO: 2084402 - RNA, 15 nt, Human
agcuuucucugcuuc

SEQ ID NO: 2084403 - RNA, 16 nt, Human
agcuuucucugcuuca

SEQ ID NO: 2084404 - RNA, 18 nt, Human
agcuuucucugcuucagc

SEQ ID NO: 2084405 - RNA, 19 nt, Human
agcuuucucugcuucagcu

SEQ ID NO: 2084406 - RNA, 21 nt, Human
agcuuucucugcuucagcuug

SEQ ID NO: 2084407 - RNA, 14 nt, Human
agcuuauuaaugcu

SEQ ID NO: 2084408 - RNA, 15 nt, Human
agcuuauuaaugcua

SEQ ID NO: 2084409 - RNA, 16 nt, Human
agcuuauuaaugcuaa

SEQ ID NO: 2084410 - RNA, 17 nt, Human
agcuuauuaaugcuaag

SEQ ID NO: 2084411 - RNA, 18 nt, Human
agcuuauuaaugcuaagg

SEQ ID NO: 2084412 - RNA, 19 nt, Human
agcuuaucaugcugucuuu

SEQ ID NO: 2084413 - RNA, 23 nt, Human
agcuuggaaacuggaugagguca

SEQ ID NO: 2084414 - RNA, 17 nt, Human
agcuuggaaaggaccag

SEQ ID NO: 2084415 - RNA, 14 nt, Human
agcuuggccagaag

SEQ ID NO: 2084416 - RNA, 19 nt, Human
agcuuauuaaugcuaaggg

SEQ ID NO: 2084417 - RNA, 21 nt, Human
agcuuauuaaugcuaagggca

SEQ ID NO: 2084418 - RNA, 22 nt, Human
agcuuauuaaugcuaagggcag

SEQ ID NO: 2084419 - RNA, 20 nt, Human
agcuugcugcccuaggcucc

SEQ ID NO: 2084420 - RNA, 19 nt, Human
agcuugcuucauugggcug

SEQ ID NO: 2084421 - RNA, 20 nt, Human
agcuugcuucauugggcugu

SEQ ID NO: 2084422 - RNA, 21 nt, Human
ugcggacagccacggccaggc

SEQ ID NO: 2084423 - RNA, 20 nt, Human
ugcggacagccacggccagg

SEQ ID NO: 2084424 - RNA, 14 nt, Human
ugcuaccucacugg

SEQ ID NO: 2084425 - RNA, 15 nt, Human
ugcuaccucacuggg

SEQ ID NO: 2084426 - RNA, 16 nt, Human
ugcuaccucacugggg

SEQ ID NO: 2084427 - RNA, 22 nt, Human
ugcuaccucacugggguccugg

SEQ ID NO: 2084428 - RNA, 14 nt, Human
agcuguuuccauag

SEQ ID NO: 2084429 - RNA, 13 nt, Human
agcuguuugucau

SEQ ID NO: 2084430 - RNA, 15 nt, Human
agcuguuuucccuga

SEQ ID NO: 2084431 - RNA, 18 nt, Human
ugcuaccugaucccacuc

SEQ ID NO: 2084432 - RNA, 19 nt, Human
ugcuaccugaucccacucc

SEQ ID NO: 2084433 - RNA, 23 nt, Human
ugcuaccugaucccacuccuagg

SEQ ID NO: 2084434 - RNA, 20 nt, Human
agcuuaaaggggcuagagug

SEQ ID NO: 2084435 - RNA, 17 nt, Human
agcuuagccaauguggg

SEQ ID NO: 2084436 - RNA, 18 nt, Human
agcuguuuucccugaccu

SEQ ID NO: 2084437 - RNA, 12 nt, Human
agcuuaaaaaaa

SEQ ID NO: 2084438 - RNA, 14 nt, Human
agcuuaaaaaaaac

SEQ ID NO: 2084439 - RNA, 12 nt, Human
agcuuaucucag

SEQ ID NO: 2084440 - RNA, 13 nt, Human
agcuuaucaauuu

SEQ ID NO: 2084441 - RNA, 15 nt, Human
agcuuaucaauuugu

SEQ ID NO: 2084442 - RNA, 16 nt, Human
agcuuaucaauuuguc

SEQ ID NO: 2084443 - RNA, 17 nt, Human
agcuuaucaauuuguca

SEQ ID NO: 2084444 - RNA, 22 nt, Human
agcuuaucaauuugucauuuug

SEQ ID NO: 2084445 - RNA, 23 nt, Human
agcuuaucaauuugucauuuuga

SEQ ID NO: 2084446 - RNA, 15 nt, Human
agcuuaucaugcugu

SEQ ID NO: 2084447 - RNA, 14 nt, Human
agcuuaucucaggg

SEQ ID NO: 2084448 - RNA, 15 nt, Human
agcuuaucucagggg

SEQ ID NO: 2084449 - RNA, 17 nt, Human
ugcugacuguuuucucu

SEQ ID NO: 2084450 - RNA, 22 nt, Human
ugcucugucuucuuugcccaca

SEQ ID NO: 2084451 - RNA, 17 nt, Human
ugcucuggacaggcaug

SEQ ID NO: 2084452 - RNA, 11 nt, Human
ugcucugccca

SEQ ID NO: 2084453 - RNA, 12 nt, Human
ugcucugcccag

SEQ ID NO: 2084454 - RNA, 13 nt, Human
ugcucugcccaga

SEQ ID NO: 2084455 - RNA, 14 nt, Human
ugcucugcccagag

SEQ ID NO: 2084456 - RNA, 15 nt, Human
ugcucugcccagagc

SEQ ID NO: 2084457 - RNA, 17 nt, Human
ugcucugcccagagcug

SEQ ID NO: 2084458 - RNA, 20 nt, Human
ugcucugcccagagcugggu

SEQ ID NO: 2084459 - RNA, 22 nt, Human
ugcucugcccagagcuggguga

SEQ ID NO: 2084460 - RNA, 15 nt, Human
ugcucugcauguuac

SEQ ID NO: 2084461 - RNA, 18 nt, Human
ugcucugcauguuacaua

SEQ ID NO: 2084462 - RNA, 20 nt, Human
ugcuauccugccaaaaucau

SEQ ID NO: 2084463 - RNA, 19 nt, Human
ugcucugaucauccacugu

SEQ ID NO: 2084464 - RNA, 19 nt, Human
ugcuauccagcuauuuuua

SEQ ID NO: 2084465 - RNA, 23 nt, Human
ugcuauauuugugauauaggaau

SEQ ID NO: 2084466 - RNA, 20 nt, Human
ugcuaucaaaauaaauugaa

SEQ ID NO: 2084467 - RNA, 21 nt, Human
ugcuaucaaaauaaauugaaa

SEQ ID NO: 2084468 - RNA, 14 nt, Human
ugcucugauuuauc

SEQ ID NO: 2084469 - RNA, 22 nt, Human
ugcucugaucauccacugugcc

SEQ ID NO: 2084470 - RNA, 22 nt, Human
aggaaagcaauaaaugaauggg

SEQ ID NO: 2084471 - RNA, 18 nt, Human
aggaaagcaauaaaugaa

SEQ ID NO: 2084472 - RNA, 19 nt, Human
aggaaagcaauaaaugaau

SEQ ID NO: 2084473 - RNA, 16 nt, Human
aggaaagcaauaaaug

SEQ ID NO: 2084474 - RNA, 21 nt, Human
ugcugacuguuuucucuugag

SEQ ID NO: 2084475 - RNA, 24 nt, Human
ugcugacuguuuucucuugagagg

SEQ ID NO: 2084476 - RNA, 17 nt, Human
ugcugagggaccagcca

SEQ ID NO: 2084477 - RNA, 19 nt, Human
ugcugagggaccagccaag

SEQ ID NO: 2084478 - RNA, 20 nt, Human
ugcugagggaccagccaaga

SEQ ID NO: 2084479 - RNA, 14 nt, Human
ugcugagggaccag

SEQ ID NO: 2084480 - RNA, 16 nt, Human
ugcugagggaccagcc

SEQ ID NO: 2084481 - RNA, 19 nt, Human
aggaaagccccagcacuaa

SEQ ID NO: 2084482 - RNA, 20 nt, Human
aggaaagccccagcacuaac

SEQ ID NO: 2084483 - RNA, 13 nt, Human
aggaaaggccagc

SEQ ID NO: 2084484 - RNA, 14 nt, Human
aggaaaggccagcu

SEQ ID NO: 2084485 - RNA, 15 nt, Human
aggaaaggccagcug

SEQ ID NO: 2084486 - RNA, 16 nt, Human
aggaaaggccagcugg

SEQ ID NO: 2084487 - RNA, 22 nt, Human
aggaaaggccagcuggcagcag

SEQ ID NO: 2084488 - RNA, 23 nt, Human
aggaauccagacccggcugcgug

SEQ ID NO: 2084489 - RNA, 23 nt, Human
aggaagagcaggcacauggagga

SEQ ID NO: 2084490 - RNA, 19 nt, Human
aggaagcuccaguccugcu

SEQ ID NO: 2084491 - RNA, 20 nt, Human
aggaagcuccaguccugcuc

SEQ ID NO: 2084492 - RNA, 21 nt, Human
aggaagcuccaguccugcucu

SEQ ID NO: 2084493 - RNA, 22 nt, Human
aggaagcuccaguccugcucuc

SEQ ID NO: 2084494 - RNA, 17 nt, Human
aggaagcugcuccgugc

SEQ ID NO: 2084495 - RNA, 19 nt, Human
aggaaucgaggaaccagag

SEQ ID NO: 2084496 - RNA, 20 nt, Human
aggaaucgaggaaccagagc

SEQ ID NO: 2084497 - RNA, 13 nt, Human
aggaaugaagaua

SEQ ID NO: 2084498 - RNA, 19 nt, Human
aggaaugaagauaccauca

SEQ ID NO: 2084499 - RNA, 12 nt, Human
aggaagagcagg

SEQ ID NO: 2084500 - RNA, 17 nt, Human
aggaagagcaggcacau

SEQ ID NO: 2084501 - RNA, 20 nt, Human
aggaagagcaggcacaugga

SEQ ID NO: 2084502 - RNA, 14 nt, Human
aggaagagaaaaaa

SEQ ID NO: 2084503 - RNA, 14 nt, Human
aggaagagaaacca

SEQ ID NO: 2084504 - RNA, 21 nt, Human
aggaaaggccagcuggcagca

SEQ ID NO: 2084505 - RNA, 17 nt, Human
aggaaaggccagcuggc

SEQ ID NO: 2084506 - RNA, 18 nt, Human
aggaaaggccagcuggca

SEQ ID NO: 2084507 - RNA, 15 nt, Human
ugcugccauccaggu

SEQ ID NO: 2084508 - RNA, 14 nt, Human
ugcugccauccagg

SEQ ID NO: 2084509 - RNA, 13 nt, Human
ugcugccauccag

SEQ ID NO: 2084510 - RNA, 12 nt, Human
ugcugccaucca

SEQ ID NO: 2084511 - RNA, 16 nt, Human
ugcugcccagccucca

SEQ ID NO: 2084512 - RNA, 14 nt, Human
ugcugcccagccuc

SEQ ID NO: 2084513 - RNA, 22 nt, Human
ugcugccauccagguucagcuu

SEQ ID NO: 2084514 - RNA, 21 nt, Human
ugcugccauccagguucagcu

SEQ ID NO: 2084515 - RNA, 19 nt, Human
ugcugccacacuucaggcu

SEQ ID NO: 2084516 - RNA, 16 nt, Human
ugcugccacacuucag

SEQ ID NO: 2084517 - RNA, 15 nt, Human
ugcugccacacuuca

SEQ ID NO: 2084518 - RNA, 22 nt, Human
ugcugccacacuucaggcucuu

SEQ ID NO: 2084519 - RNA, 11 nt, Human
ugcugccaucc

SEQ ID NO: 2084520 - RNA, 16 nt, Human
aggacaaagucuccag

SEQ ID NO: 2084521 - RNA, 17 nt, Human
aggacaaagucuccagc

SEQ ID NO: 2084522 - RNA, 18 nt, Human
aggacaaagucuccagcc

SEQ ID NO: 2084523 - RNA, 17 nt, Human
uggaaguaguggagccc

SEQ ID NO: 2084524 - RNA, 16 nt, Human
uggaagcuguguccuu

SEQ ID NO: 2084525 - RNA, 14 nt, Human
uggaaguaguggag

SEQ ID NO: 2084526 - RNA, 13 nt, Human
uggaagcuccgcu

SEQ ID NO: 2084527 - RNA, 17 nt, Human
ugcugcccgucuucagc

SEQ ID NO: 2084528 - RNA, 20 nt, Human
ugcugcccgucuucagccua

SEQ ID NO: 2084529 - RNA, 21 nt, Human
ugcugcccgucuucagccuag

SEQ ID NO: 2084530 - RNA, 17 nt, Human
ugcugccccaugaagcc

SEQ ID NO: 2084531 - RNA, 18 nt, Human
ugcugccccaugaagcca

SEQ ID NO: 2084532 - RNA, 20 nt, Human
ugcugccccaugaagccaca

SEQ ID NO: 2084533 - RNA, 24 nt, Human
ugcugccccaugaagccacagccc

SEQ ID NO: 2084534 - RNA, 13 nt, Human
ugcugcccuccau

SEQ ID NO: 2084535 - RNA, 22 nt, Human
ugcugcccgucuucagccuagc

SEQ ID NO: 2084536 - RNA, 14 nt, Human
ugcugcccuaggcu

SEQ ID NO: 2084537 - RNA, 14 nt, Human
aggauauuuaagaa

SEQ ID NO: 2084538 - RNA, 16 nt, Human
aggauauuuaagaaaa

SEQ ID NO: 2084539 - RNA, 17 nt, Human
aggauauuuaagaaaau

SEQ ID NO: 2084540 - RNA, 18 nt, Human
aggauauuuaagaaaaua

SEQ ID NO: 2084541 - RNA, 19 nt, Human
aggauauuuaagaaaauac

SEQ ID NO: 2084542 - RNA, 15 nt, Human
aggaucaagaaagug

SEQ ID NO: 2084543 - RNA, 24 nt, Human
aggaguuugaggcugcagcgagcu

SEQ ID NO: 2084544 - RNA, 14 nt, Human
aggaucacuggagc

SEQ ID NO: 2084545 - RNA, 15 nt, Human
aggaucacuggagcc

SEQ ID NO: 2084546 - RNA, 16 nt, Human
aggaucacuggagccc

SEQ ID NO: 2084547 - RNA, 18 nt, Human
aggaucacuggagcccag

SEQ ID NO: 2084548 - RNA, 19 nt, Human
aggaucacuggagcccagg

SEQ ID NO: 2084549 - RNA, 20 nt, Human
aggaucacuggagcccagga

SEQ ID NO: 2084550 - RNA, 22 nt, Human
aggaucacuggagcccaggagu

SEQ ID NO: 2084551 - RNA, 19 nt, Human
aggaucacuugagcccagg

SEQ ID NO: 2084552 - RNA, 12 nt, Human
aggaucagaaag

SEQ ID NO: 2084553 - RNA, 13 nt, Human
aggaucagaaagu

SEQ ID NO: 2084554 - RNA, 14 nt, Human
aggaucagaaagua

SEQ ID NO: 2084555 - RNA, 18 nt, Human
aggaucagaaaguaauuu

SEQ ID NO: 2084556 - RNA, 21 nt, Human
aggaguuugagaccaaccugg

SEQ ID NO: 2084557 - RNA, 16 nt, Human
aggaguuugagaccag

SEQ ID NO: 2084558 - RNA, 19 nt, Human
aggaguuugagaccagccu

SEQ ID NO: 2084559 - RNA, 19 nt, Human
aggaguuugaggcugcagc

SEQ ID NO: 2084560 - RNA, 20 nt, Human
aggaguuugaggcugcagcg

SEQ ID NO: 2084561 - RNA, 15 nt, Human
uggaagcuguguccu

SEQ ID NO: 2084562 - RNA, 18 nt, Human
uggaagugagggucagag

SEQ ID NO: 2084563 - RNA, 19 nt, Human
uggaagugagggucagaga

SEQ ID NO: 2084564 - RNA, 21 nt, Human
uggaagugagggucagagagg

SEQ ID NO: 2084565 - RNA, 22 nt, Human
aggauugcuacuguccuaccca

SEQ ID NO: 2084566 - RNA, 21 nt, Human
aggauugcuugagcccaggag

SEQ ID NO: 2084567 - RNA, 22 nt, Human
aggauugcuugagcccaggagu

SEQ ID NO: 2084568 - RNA, 17 nt, Human
aggauugcuugagccca

SEQ ID NO: 2084569 - RNA, 18 nt, Human
aggauugcuugagcccag

SEQ ID NO: 2084570 - RNA, 19 nt, Human
aggauugcuugagcccagg

SEQ ID NO: 2084571 - RNA, 20 nt, Human
aggauugcuugagcccagga

SEQ ID NO: 2084572 - RNA, 12 nt, Human
aggauuucaagc

SEQ ID NO: 2084573 - RNA, 14 nt, Human
aggauuucaagccu

SEQ ID NO: 2084574 - RNA, 15 nt, Human
aggauuucaagccug

SEQ ID NO: 2084575 - RNA, 16 nt, Human
aggauuucaagccugc

SEQ ID NO: 2084576 - RNA, 16 nt, Human
aggauugugauauuuu

SEQ ID NO: 2084577 - RNA, 12 nt, Human
aggaucagucug

SEQ ID NO: 2084578 - RNA, 12 nt, Human
aggaucucuuga

SEQ ID NO: 2084579 - RNA, 20 nt, Human
uggacaccaggagucccugg

SEQ ID NO: 2084580 - RNA, 21 nt, Human
uggacaccaggagucccuggu

SEQ ID NO: 2084581 - RNA, 19 nt, Human
uggacaaacccuucuuuua

SEQ ID NO: 2084582 - RNA, 14 nt, Human
uggaauuuuuuauu

SEQ ID NO: 2084583 - RNA, 15 nt, Human
uggaauuuuuuauuc

SEQ ID NO: 2084584 - RNA, 16 nt, Human
uggaauuuuuuauucu

SEQ ID NO: 2084585 - RNA, 20 nt, Human
uggaauuuuuuauucuugug

SEQ ID NO: 2084586 - RNA, 21 nt, Human
uggaauuuuuuauucuuguga

SEQ ID NO: 2084587 - RNA, 23 nt, Human
uggaauuuuucauugauaugaaa

SEQ ID NO: 2084588 - RNA, 18 nt, Human
uggaauuuuuauuaugca

SEQ ID NO: 2084589 - RNA, 19 nt, Human
uggaauuuuuauuaugcau

SEQ ID NO: 2084590 - RNA, 20 nt, Human
uggaauuuuuauuaugcaua

SEQ ID NO: 2084591 - RNA, 23 nt, Human
uggaauuuuuauuaugcauaacu

SEQ ID NO: 2084592 - RNA, 24 nt, Human
uggaauuuuuauuaugcauaacug

SEQ ID NO: 2084593 - RNA, 12 nt, Human
uggaauuuuuca

SEQ ID NO: 2084594 - RNA, 14 nt, Human
aggcaagcaccucc

SEQ ID NO: 2084595 - RNA, 19 nt, Human
aggcaacugcauuggcuuu

SEQ ID NO: 2084596 - RNA, 16 nt, Human
aggcaacuugggaacu

SEQ ID NO: 2084597 - RNA, 12 nt, Human
aggcaagagaau

SEQ ID NO: 2084598 - RNA, 23 nt, Human
uggagcuucucuuuaacucagga

SEQ ID NO: 2084599 - RNA, 14 nt, Human
aggcacaauauggg

SEQ ID NO: 2084600 - RNA, 22 nt, Human
aggcaaugucaggaacagaagg

SEQ ID NO: 2084601 - RNA, 23 nt, Human
aggcaaugucaggaacagaagga

SEQ ID NO: 2084602 - RNA, 17 nt, Human
aggcacagugaaggcug

SEQ ID NO: 2084603 - RNA, 16 nt, Human
aggcacaugucagcaa

SEQ ID NO: 2084604 - RNA, 13 nt, Human
aggcacauggagg

SEQ ID NO: 2084605 - RNA, 14 nt, Human
aggcacauggagga

SEQ ID NO: 2084606 - RNA, 17 nt, Human
aggcacauggaggagcu

SEQ ID NO: 2084607 - RNA, 16 nt, Human
aggcaaugcuggcugu

SEQ ID NO: 2084608 - RNA, 19 nt, Human
aggcaauggccuaaacuuc

SEQ ID NO: 2084609 - RNA, 17 nt, Human
aggcaaugucaggaaca

SEQ ID NO: 2084610 - RNA, 19 nt, Human
aggcaaugucaggaacaga

SEQ ID NO: 2084611 - RNA, 23 nt, Human
uggaggaaaaccaagccguggcu

SEQ ID NO: 2084612 - RNA, 21 nt, Human
uggaggaaaaccaagccgugg

SEQ ID NO: 2084613 - RNA, 15 nt, Human
aggcaaugcuggcug

SEQ ID NO: 2084614 - RNA, 18 nt, Human
uggagcuggcgucugucu

SEQ ID NO: 2084615 - RNA, 14 nt, Human
uggagccagggagc

SEQ ID NO: 2084616 - RNA, 23 nt, Human
uggagccagggagcggccgccug

SEQ ID NO: 2084617 - RNA, 13 nt, Human
uggagaagcagug

SEQ ID NO: 2084618 - RNA, 18 nt, Human
uggacuuuucguuaacau

SEQ ID NO: 2084619 - RNA, 19 nt, Human
uggacuuuucguuaacauu

SEQ ID NO: 2084620 - RNA, 20 nt, Human
uggacuuuucguuaacauug

SEQ ID NO: 2084621 - RNA, 21 nt, Human
uggacuuuucguuaacauuga

SEQ ID NO: 2084622 - RNA, 22 nt, Human
uggacuuuucguuaacauugac

SEQ ID NO: 2084623 - RNA, 22 nt, Human
aggcagccccauucugccugcc

SEQ ID NO: 2084624 - RNA, 14 nt, Human
aggcaccagugucc

SEQ ID NO: 2084625 - RNA, 20 nt, Human
aggcaccaguguccuccccu

SEQ ID NO: 2084626 - RNA, 12 nt, Human
aggcaccauuca

SEQ ID NO: 2084627 - RNA, 17 nt, Human
aggcaccauucaggaac

SEQ ID NO: 2084628 - RNA, 19 nt, Human
aggcaccauucaggaaccu

SEQ ID NO: 2084629 - RNA, 21 nt, Human
aggcagccccauucugccugc

SEQ ID NO: 2084630 - RNA, 20 nt, Human
aggcagccccauucugccug

SEQ ID NO: 2084631 - RNA, 19 nt, Human
aggcagccccauucugccu

SEQ ID NO: 2084632 - RNA, 15 nt, Human
aggcacccaccauca

SEQ ID NO: 2084633 - RNA, 12 nt, Human
aggcagggaagu

SEQ ID NO: 2084634 - RNA, 21 nt, Human
aggcagggaaguguaagaaac

SEQ ID NO: 2084635 - RNA, 13 nt, Human
aggcagggaaguc

SEQ ID NO: 2084636 - RNA, 19 nt, Human
aggcagggaaguccccagg

SEQ ID NO: 2084637 - RNA, 23 nt, Human
aggcagggaaguccccaggcccc

SEQ ID NO: 2084638 - RNA, 12 nt, Human
aggcagggaggg

SEQ ID NO: 2084639 - RNA, 13 nt, Human
aggcagggagggg

SEQ ID NO: 2084640 - RNA, 14 nt, Human
aggcagggagggga

SEQ ID NO: 2084641 - RNA, 16 nt, Human
aggcagggaggggacu

SEQ ID NO: 2084642 - RNA, 12 nt, Human
aggcaggauggc

SEQ ID NO: 2084643 - RNA, 21 nt, Human
aggcagggucucacucugucg

SEQ ID NO: 2084644 - RNA, 20 nt, Human
aggcagggucucacucuguc

SEQ ID NO: 2084645 - RNA, 18 nt, Human
aggcagggucucacucug

SEQ ID NO: 2084646 - RNA, 19 nt, Human
aggcagggucucacucugu

SEQ ID NO: 2084647 - RNA, 14 nt, Human
aggcagguccaggg

SEQ ID NO: 2084648 - RNA, 22 nt, Human
aggcaggguuuuaucucugucu

SEQ ID NO: 2084649 - RNA, 23 nt, Human
aggcaggguuuuaucucugucua

SEQ ID NO: 2084650 - RNA, 22 nt, Human
aggcagggucucacucugucgc

SEQ ID NO: 2084651 - RNA, 19 nt, Human
aggcagggccuugcccaga

SEQ ID NO: 2084652 - RNA, 20 nt, Human
aggcagggccuugcccagag

SEQ ID NO: 2084653 - RNA, 18 nt, Human
aggcaguuagagaugccu

SEQ ID NO: 2084654 - RNA, 21 nt, Human
aggcaguuagagaugccuccc

SEQ ID NO: 2084655 - RNA, 19 nt, Human
aggcagugaugcuggaugc

SEQ ID NO: 2084656 - RNA, 16 nt, Human
aggcaguggggcuggg

SEQ ID NO: 2084657 - RNA, 21 nt, Human
aggcaggucuugaacuccugg

SEQ ID NO: 2084658 - RNA, 16 nt, Human
aggcucagucucagga

SEQ ID NO: 2084659 - RNA, 17 nt, Human
aggcucagucucaggag

SEQ ID NO: 2084660 - RNA, 18 nt, Human
aggcucagucucaggagc

SEQ ID NO: 2084661 - RNA, 20 nt, Human
aggcucauagggaagaccug

SEQ ID NO: 2084662 - RNA, 21 nt, Human
aggcucauagggaagaccugc

SEQ ID NO: 2084663 - RNA, 22 nt, Human
aggcucauagggaagaccugcu

SEQ ID NO: 2084664 - RNA, 19 nt, Human
aggcucagucucaggagca

SEQ ID NO: 2084665 - RNA, 23 nt, Human
aggcucagucucaggagcauggg

SEQ ID NO: 2084666 - RNA, 13 nt, Human
aggcucaggccau

SEQ ID NO: 2084667 - RNA, 13 nt, Human
uggccuguucugu

SEQ ID NO: 2084668 - RNA, 13 nt, Human
aggccuucuugug

SEQ ID NO: 2084669 - RNA, 14 nt, Human
aggccuucuuguga

SEQ ID NO: 2084670 - RNA, 18 nt, Human
aggccuucuugugaucuu

SEQ ID NO: 2084671 - RNA, 21 nt, Human
aggccuucuugugaucuugcu

SEQ ID NO: 2084672 - RNA, 18 nt, Human
aggccuucucugaaggac

SEQ ID NO: 2084673 - RNA, 17 nt, Human
aggccuucucugaagga

SEQ ID NO: 2084674 - RNA, 14 nt, Human
aggcgccccuuccc

SEQ ID NO: 2084675 - RNA, 21 nt, Human
aggcgcagugcuucucuacag

SEQ ID NO: 2084676 - RNA, 23 nt, Human
aggcgauccaccugucucagccu

SEQ ID NO: 2084677 - RNA, 15 nt, Human
uggcaucccaguggc

SEQ ID NO: 2084678 - RNA, 19 nt, Human
uggcaucccaguggccuca

SEQ ID NO: 2084679 - RNA, 16 nt, Human
uggcaugggggccuca

SEQ ID NO: 2084680 - RNA, 17 nt, Human
uggcaugggggccucag

SEQ ID NO: 2084681 - RNA, 19 nt, Human
uggcaugggggccucaggg

SEQ ID NO: 2084682 - RNA, 20 nt, Human
uggcaugggggccucagggc

SEQ ID NO: 2084683 - RNA, 13 nt, Human
uggcauuaaaacu

SEQ ID NO: 2084684 - RNA, 15 nt, Human
uggcauuaaaacuua

SEQ ID NO: 2084685 - RNA, 20 nt, Human
uggcaugugcugugaccauu

SEQ ID NO: 2084686 - RNA, 22 nt, Human
uggcaugugcugugaccauuua

SEQ ID NO: 2084687 - RNA, 19 nt, Human
uggcccacgcacuucggga

SEQ ID NO: 2084688 - RNA, 20 nt, Human
uggcccacgccuguaauccc

SEQ ID NO: 2084689 - RNA, 13 nt, Human
uggcccacugcau

SEQ ID NO: 2084690 - RNA, 14 nt, Human
uggcccacugcauc

SEQ ID NO: 2084691 - RNA, 12 nt, Human
uggcccucuggu

SEQ ID NO: 2084692 - RNA, 15 nt, Human
uggcccucugguaga

SEQ ID NO: 2084693 - RNA, 13 nt, Human
uggcccucuucuu

SEQ ID NO: 2084694 - RNA, 14 nt, Human
uggcccucuucuua

SEQ ID NO: 2084695 - RNA, 16 nt, Human
uggcccucuucuuacu

SEQ ID NO: 2084696 - RNA, 16 nt, Human
uggcccucaccccugc

SEQ ID NO: 2084697 - RNA, 18 nt, Human
uggcccucaccccugccc

SEQ ID NO: 2084698 - RNA, 20 nt, Human
uggcccucaccccugcccug

SEQ ID NO: 2084699 - RNA, 14 nt, Human
uggcccucaguuuc

SEQ ID NO: 2084700 - RNA, 22 nt, Human
uggcccagccaaacccugucug

SEQ ID NO: 2084701 - RNA, 18 nt, Human
uggccgaggguccuggcu

SEQ ID NO: 2084702 - RNA, 23 nt, Human
uggcccuugcaguucagcaccac

SEQ ID NO: 2084703 - RNA, 22 nt, Human
uggcccuugcaguucagcacca

SEQ ID NO: 2084704 - RNA, 19 nt, Human
uggccgaggguccuggcuc

SEQ ID NO: 2084705 - RNA, 20 nt, Human
uggccgaggguccuggcucc

SEQ ID NO: 2084706 - RNA, 24 nt, Human
uggccugucucauccccagggguc

SEQ ID NO: 2084707 - RNA, 14 nt, Human
uggccugucucauc

SEQ ID NO: 2084708 - RNA, 16 nt, Human
uggccugucucauccc

SEQ ID NO: 2084709 - RNA, 18 nt, Human
uggccugucucaucccca

SEQ ID NO: 2084710 - RNA, 20 nt, Human
uggccugucucauccccagg

SEQ ID NO: 2084711 - RNA, 12 nt, Human
uggccugucuca

SEQ ID NO: 2084712 - RNA, 11 nt, Human
uggccugggca

SEQ ID NO: 2084713 - RNA, 15 nt, Human
uggccucugucauau

SEQ ID NO: 2084714 - RNA, 12 nt, Human
uggccugaggag

SEQ ID NO: 2084715 - RNA, 15 nt, Human
uggccugaggagcag

SEQ ID NO: 2084716 - RNA, 14 nt, Human
uggccugcacuaau

SEQ ID NO: 2084717 - RNA, 16 nt, Human
uggccugcacuaauuu

SEQ ID NO: 2084718 - RNA, 20 nt, Human
uggccugcugggcucuccac

SEQ ID NO: 2084719 - RNA, 18 nt, Human
uggccugccuugaagcca

SEQ ID NO: 2084720 - RNA, 21 nt, Human
uggccugcugggcucuccacc

SEQ ID NO: 2084721 - RNA, 22 nt, Human
uggccugcugggcucuccaccu

SEQ ID NO: 2084722 - RNA, 18 nt, Human
aggccaugggccuccugu

SEQ ID NO: 2084723 - RNA, 21 nt, Human
uggcagccgugccuucagcuc

SEQ ID NO: 2084724 - RNA, 20 nt, Human
uggcagccgugccuucagcu

SEQ ID NO: 2084725 - RNA, 19 nt, Human
uggcagccgugccuucagc

SEQ ID NO: 2084726 - RNA, 18 nt, Human
uggcagccgugccuucag

SEQ ID NO: 2084727 - RNA, 17 nt, Human
uggcagccgugccuuca

SEQ ID NO: 2084728 - RNA, 14 nt, Human
uggcagcagagugu

SEQ ID NO: 2084729 - RNA, 20 nt, Human
uggcagcagaguguggccuu

SEQ ID NO: 2084730 - RNA, 19 nt, Human
uggcagcaggccuguugcu

SEQ ID NO: 2084731 - RNA, 20 nt, Human
uggcagcaggccuguugcuu

SEQ ID NO: 2084732 - RNA, 22 nt, Human
uggcagcaggccuguugcuuuu

SEQ ID NO: 2084733 - RNA, 22 nt, Human
uggcagauuuagugaaagcuag

SEQ ID NO: 2084734 - RNA, 13 nt, Human
uggcagauuuuac

SEQ ID NO: 2084735 - RNA, 15 nt, Human
uggcagauuuuacaa

SEQ ID NO: 2084736 - RNA, 16 nt, Human
uggcagauuuuacaaa

SEQ ID NO: 2084737 - RNA, 17 nt, Human
uggcagauuuuacaaaa

SEQ ID NO: 2084738 - RNA, 20 nt, Human
uggcagauuuuacaaaagau

SEQ ID NO: 2084739 - RNA, 22 nt, Human
uggcagauuuuacaaaagaugu

SEQ ID NO: 2084740 - RNA, 16 nt, Human
uggcaccagcagccug

SEQ ID NO: 2084741 - RNA, 17 nt, Human
uggcaccagcagccugg

SEQ ID NO: 2084742 - RNA, 15 nt, Human
uggcacagggcagug

SEQ ID NO: 2084743 - RNA, 16 nt, Human
uggcacagggcagugg

SEQ ID NO: 2084744 - RNA, 20 nt, Human
uggcacagcccaaagaagga

SEQ ID NO: 2084745 - RNA, 18 nt, Human
uggcacagcccaaagaag

SEQ ID NO: 2084746 - RNA, 20 nt, Human
aggcauaggccugggugcug

SEQ ID NO: 2084747 - RNA, 17 nt, Human
aggcauaggccugggug

SEQ ID NO: 2084748 - RNA, 18 nt, Human
aggcauaggccugggugc

SEQ ID NO: 2084749 - RNA, 19 nt, Human
aggcauaggccugggugcu

SEQ ID NO: 2084750 - RNA, 20 nt, Human
aggcauccuuccucacacca

SEQ ID NO: 2084751 - RNA, 22 nt, Human
uggcacacaccuguagucccag

SEQ ID NO: 2084752 - RNA, 23 nt, Human
aggcaucccaggggaccacaccu

SEQ ID NO: 2084753 - RNA, 14 nt, Human
uggcacagaaacac

SEQ ID NO: 2084754 - RNA, 18 nt, Human
aggcauccuuccucacac

SEQ ID NO: 2084755 - RNA, 13 nt, Human
aggcaucccaggg

SEQ ID NO: 2084756 - RNA, 16 nt, Human
aggcaucccaggggac

SEQ ID NO: 2084757 - RNA, 17 nt, Human
aggcaucccaggggacc

SEQ ID NO: 2084758 - RNA, 18 nt, Human
aggcaucccaggggacca

SEQ ID NO: 2084759 - RNA, 21 nt, Human
aggccccugccacccugggga

SEQ ID NO: 2084760 - RNA, 18 nt, Human
aggccccugccacccugg

SEQ ID NO: 2084761 - RNA, 17 nt, Human
aggccccugccacccug

SEQ ID NO: 2084762 - RNA, 15 nt, Human
aggccccugccaccc

SEQ ID NO: 2084763 - RNA, 13 nt, Human
aggccccugccac

SEQ ID NO: 2084764 - RNA, 16 nt, Human
aggcccggcuccaggc

SEQ ID NO: 2084765 - RNA, 15 nt, Human
aggcccggcuccagg

SEQ ID NO: 2084766 - RNA, 14 nt, Human
aggcccggcuccag

SEQ ID NO: 2084767 - RNA, 17 nt, Human
aggcccggcuccaggcu

SEQ ID NO: 2084768 - RNA, 12 nt, Human
aggccguggcug

SEQ ID NO: 2084769 - RNA, 20 nt, Human
aggccgggugcucagggcug

SEQ ID NO: 2084770 - RNA, 20 nt, Human
aggccguggcugcccacaca

SEQ ID NO: 2084771 - RNA, 17 nt, Human
aggccuagucagccaca

SEQ ID NO: 2084772 - RNA, 20 nt, Human
aggccuagucagccacaugg

SEQ ID NO: 2084773 - RNA, 16 nt, Human
aggccuauaaccccag

SEQ ID NO: 2084774 - RNA, 12 nt, Human
aggccuggccag

SEQ ID NO: 2084775 - RNA, 21 nt, Human
aggccuggcauggcaccuguc

SEQ ID NO: 2084776 - RNA, 13 nt, Human
aggccuggccaga

SEQ ID NO: 2084777 - RNA, 15 nt, Human
uggcaucacagggca

SEQ ID NO: 2084778 - RNA, 18 nt, Human
uggcaucacagggcagag

SEQ ID NO: 2084779 - RNA, 20 nt, Human
uggcaucacagggcagagcc

SEQ ID NO: 2084780 - RNA, 23 nt, Human
uggcaucaccuuaggcagggaag

SEQ ID NO: 2084781 - RNA, 21 nt, Human
uggcucacugcaacuucugcc

SEQ ID NO: 2084782 - RNA, 13 nt, Human
uggcucacugcag

SEQ ID NO: 2084783 - RNA, 15 nt, Human
uggcucacugcagcc

SEQ ID NO: 2084784 - RNA, 16 nt, Human
uggcucacugcagccu

SEQ ID NO: 2084785 - RNA, 17 nt, Human
uggcucacugcagccuc

SEQ ID NO: 2084786 - RNA, 18 nt, Human
uggcucacugcagccucg

SEQ ID NO: 2084787 - RNA, 19 nt, Human
uggcucacgccuguaaucc

SEQ ID NO: 2084788 - RNA, 16 nt, Human
uggcucacgccuguaa

SEQ ID NO: 2084789 - RNA, 16 nt, Human
uggcucacguguguga

SEQ ID NO: 2084790 - RNA, 13 nt, Human
uggcucacgccug

SEQ ID NO: 2084791 - RNA, 14 nt, Human
uggcucacagacug

SEQ ID NO: 2084792 - RNA, 17 nt, Human
uggcucacagacuggag

SEQ ID NO: 2084793 - RNA, 18 nt, Human
uggcucacagacuggaga

SEQ ID NO: 2084794 - RNA, 16 nt, Human
uggcucacaccuguaa

SEQ ID NO: 2084795 - RNA, 16 nt, Human
uggcucaauccucuaa

SEQ ID NO: 2084796 - RNA, 19 nt, Human
uggcucacaccuguaaucc

SEQ ID NO: 2084797 - RNA, 22 nt, Human
uggcucuuuuacccaauaagau

SEQ ID NO: 2084798 - RNA, 15 nt, Human
uggcugacccagucc

SEQ ID NO: 2084799 - RNA, 16 nt, Human
uggcugacccaguccc

SEQ ID NO: 2084800 - RNA, 17 nt, Human
uggcugacccagucccu

SEQ ID NO: 2084801 - RNA, 19 nt, Human
uggcugacccagucccugg

SEQ ID NO: 2084802 - RNA, 20 nt, Human
uggcugacccagucccuggg

SEQ ID NO: 2084803 - RNA, 21 nt, Human
uggcugacccagucccugggg

SEQ ID NO: 2084804 - RNA, 15 nt, Human
uggcugaccccccuc

SEQ ID NO: 2084805 - RNA, 16 nt, Human
uggcugaccccccuca

SEQ ID NO: 2084806 - RNA, 16 nt, Human
uggcugacuuugcucu

SEQ ID NO: 2084807 - RNA, 17 nt, Human
uggcuaauguacugcau

SEQ ID NO: 2084808 - RNA, 19 nt, Human
uggcuaauguacugcauau

SEQ ID NO: 2084809 - RNA, 17 nt, Human
uggcuaagcuuaaaaaa

SEQ ID NO: 2084810 - RNA, 20 nt, Human
uggcuaagcuuaaaaaaaac

SEQ ID NO: 2084811 - RNA, 14 nt, Human
uggcuaaggcacca

SEQ ID NO: 2084812 - RNA, 17 nt, Human
uggcuaaggcaccagcc

SEQ ID NO: 2084813 - RNA, 15 nt, Human
uggcuaagagugucc

SEQ ID NO: 2084814 - RNA, 19 nt, Human
uggcuagaggccagcccca

SEQ ID NO: 2084815 - RNA, 23 nt, Human
uggcuagaggccagccccaccca

SEQ ID NO: 2084816 - RNA, 21 nt, Human
uggcuagaggccagccccacc

SEQ ID NO: 2084817 - RNA, 22 nt, Human
uggcuagaggccagccccaccc

SEQ ID NO: 2084818 - RNA, 23 nt, Human
ugggaaaaaugcccuuaaaucau

SEQ ID NO: 2084819 - RNA, 22 nt, Human
uggcuucaaauauuaugcaggg

SEQ ID NO: 2084820 - RNA, 17 nt, Human
uggcuucacggaagagc

SEQ ID NO: 2084821 - RNA, 20 nt, Human
uggcuucacggaagagccuu

SEQ ID NO: 2084822 - RNA, 15 nt, Human
ugggaaauggcuuga

SEQ ID NO: 2084823 - RNA, 17 nt, Human
uggcugugccucugccu

SEQ ID NO: 2084824 - RNA, 16 nt, Human
uggcugugccucugcc

SEQ ID NO: 2084825 - RNA, 15 nt, Human
uggcugugccucugc

SEQ ID NO: 2084826 - RNA, 14 nt, Human
uggcugugccucug

SEQ ID NO: 2084827 - RNA, 23 nt, Human
uggcugcaaaggguaucaggugc

SEQ ID NO: 2084828 - RNA, 23 nt, Human
uggcuguuggcugggggccucag

SEQ ID NO: 2084829 - RNA, 14 nt, Human
uggcuucacggaag

SEQ ID NO: 2084830 - RNA, 18 nt, Human
uggcuguuggcugggggc

SEQ ID NO: 2084831 - RNA, 16 nt, Human
uggcuguuggcugggg

SEQ ID NO: 2084832 - RNA, 14 nt, Human
uggcuguggcaggc

SEQ ID NO: 2084833 - RNA, 13 nt, Human
uggcugugggcuc

SEQ ID NO: 2084834 - RNA, 14 nt, Human
uggcugugggcucc

SEQ ID NO: 2084835 - RNA, 15 nt, Human
uggcugugggcuccc

SEQ ID NO: 2084836 - RNA, 19 nt, Human
uggcugugccucugccugu

SEQ ID NO: 2084837 - RNA, 18 nt, Human
uggcugugccucugccug

SEQ ID NO: 2084838 - RNA, 22 nt, Human
uggcugugccucugccugucuc

SEQ ID NO: 2084839 - RNA, 14 nt, Human
aggcugggcuucag

SEQ ID NO: 2084840 - RNA, 12 nt, Human
aggcugggccaa

SEQ ID NO: 2084841 - RNA, 13 nt, Human
aggcugggccaag

SEQ ID NO: 2084842 - RNA, 20 nt, Human
aggcugggccaagccaggga

SEQ ID NO: 2084843 - RNA, 18 nt, Human
aggcugggcguaguggcu

SEQ ID NO: 2084844 - RNA, 13 nt, Human
aggcugggcccag

SEQ ID NO: 2084845 - RNA, 14 nt, Human
aggcugggcccaga

SEQ ID NO: 2084846 - RNA, 15 nt, Human
aggcugggcccagag

SEQ ID NO: 2084847 - RNA, 16 nt, Human
aggcugggcccagagg

SEQ ID NO: 2084848 - RNA, 17 nt, Human
aggcugggcccagaggc

SEQ ID NO: 2084849 - RNA, 18 nt, Human
aggcugggcccagaggca

SEQ ID NO: 2084850 - RNA, 20 nt, Human
aggcugggcccagaggcaca

SEQ ID NO: 2084851 - RNA, 21 nt, Human
aggcugggcccagaggcacag

SEQ ID NO: 2084852 - RNA, 22 nt, Human
aggcugggcccagaggcacagc

SEQ ID NO: 2084853 - RNA, 23 nt, Human
aggcugggcuucaguggcagcug

SEQ ID NO: 2084854 - RNA, 22 nt, Human
aggcugggcuucaguggcagcu

SEQ ID NO: 2084855 - RNA, 17 nt, Human
aggcugggggaagaagc

SEQ ID NO: 2084856 - RNA, 21 nt, Human
aggcugggcuucaguggcagc

SEQ ID NO: 2084857 - RNA, 20 nt, Human
aggcugggcuucaguggcag

SEQ ID NO: 2084858 - RNA, 19 nt, Human
aggcugggcuucaguggca

SEQ ID NO: 2084859 - RNA, 18 nt, Human
aggcugggcuucaguggc

SEQ ID NO: 2084860 - RNA, 22 nt, Human
aggcugggggaagaagcucucu

SEQ ID NO: 2084861 - RNA, 14 nt, Human
aggcuuucagggcc

SEQ ID NO: 2084862 - RNA, 13 nt, Human
aggcuuuacuuag

SEQ ID NO: 2084863 - RNA, 19 nt, Human
aggcuuuacuuagcuuauc

SEQ ID NO: 2084864 - RNA, 21 nt, Human
aggcuuuacuuagcuuaucaa

SEQ ID NO: 2084865 - RNA, 18 nt, Human
aggcuugucagagcuggg

SEQ ID NO: 2084866 - RNA, 16 nt, Human
aggcuugucagagcug

SEQ ID NO: 2084867 - RNA, 17 nt, Human
aggcuugucagagcugg

SEQ ID NO: 2084868 - RNA, 20 nt, Human
aggcuugucagagcugggag

SEQ ID NO: 2084869 - RNA, 16 nt, Human
agggaaacuauugucc

SEQ ID NO: 2084870 - RNA, 15 nt, Human
agggaaacgugcccu

SEQ ID NO: 2084871 - RNA, 20 nt, Human
aggcuucagcauauuuauag

SEQ ID NO: 2084872 - RNA, 18 nt, Human
aggcuucaauuuauugca

SEQ ID NO: 2084873 - RNA, 22 nt, Human
aggcuucaauuuauugcacaaa

SEQ ID NO: 2084874 - RNA, 23 nt, Human
aggcuuccacguacugcagccuc

SEQ ID NO: 2084875 - RNA, 11 nt, Human
aggcugggugc

SEQ ID NO: 2084876 - RNA, 14 nt, Human
aggcugggugccca

SEQ ID NO: 2084877 - RNA, 15 nt, Human
aggcugggugcccac

SEQ ID NO: 2084878 - RNA, 16 nt, Human
aggcugggugcccaca

SEQ ID NO: 2084879 - RNA, 17 nt, Human
aggcugggugcccacag

SEQ ID NO: 2084880 - RNA, 18 nt, Human
aggcugggugcccacagc

SEQ ID NO: 2084881 - RNA, 19 nt, Human
aggcugggugcccacagcc

SEQ ID NO: 2084882 - RNA, 13 nt, Human
aggcuuccuuggc

SEQ ID NO: 2084883 - RNA, 15 nt, Human
aggcuugucagagcu

SEQ ID NO: 2084884 - RNA, 17 nt, Human
aggcuugccugcaggca

SEQ ID NO: 2084885 - RNA, 15 nt, Human
aggcuugccugcagg

SEQ ID NO: 2084886 - RNA, 16 nt, Human
aggcuugccugcaggc

SEQ ID NO: 2084887 - RNA, 16 nt, Human
aggcuucuucagauca

SEQ ID NO: 2084888 - RNA, 22 nt, Human
aggcuucuucagaucagugcuu

SEQ ID NO: 2084889 - RNA, 23 nt, Human
aggcuucuucagaucagugcuug

SEQ ID NO: 2084890 - RNA, 18 nt, Human
aggcuugcauaauaagcu

SEQ ID NO: 2084891 - RNA, 21 nt, Human
ugggcaacccccagccugcua

SEQ ID NO: 2084892 - RNA, 16 nt, Human
ugggcaacagagcaag

SEQ ID NO: 2084893 - RNA, 14 nt, Human
ugggcaaacaggca

SEQ ID NO: 2084894 - RNA, 15 nt, Human
ugggcaaacaggcag

SEQ ID NO: 2084895 - RNA, 16 nt, Human
ugggcaaacaggcagu

SEQ ID NO: 2084896 - RNA, 12 nt, Human
ugggcaacagag

SEQ ID NO: 2084897 - RNA, 14 nt, Human
ugggcaacagagca

SEQ ID NO: 2084898 - RNA, 12 nt, Human
ugggagggccca

SEQ ID NO: 2084899 - RNA, 16 nt, Human
ugggcaauauagcaag

SEQ ID NO: 2084900 - RNA, 15 nt, Human
ugggcaauauagcaa

SEQ ID NO: 2084901 - RNA, 17 nt, Human
ugggcaauauaaccaau

SEQ ID NO: 2084902 - RNA, 18 nt, Human
ugggcaauauaaccaaug

SEQ ID NO: 2084903 - RNA, 22 nt, Human
ugggcaauauaaccaauguuua

SEQ ID NO: 2084904 - RNA, 11 nt, Human
ugggaggcuga

SEQ ID NO: 2084905 - RNA, 13 nt, Human
ugggaggcugagg

SEQ ID NO: 2084906 - RNA, 14 nt, Human
ugggaggcugaggc

SEQ ID NO: 2084907 - RNA, 15 nt, Human
ugggaggcugaggcg

SEQ ID NO: 2084908 - RNA, 14 nt, Human
ugggaggcuucccc

SEQ ID NO: 2084909 - RNA, 18 nt, Human
ugggagggauagaggggg

SEQ ID NO: 2084910 - RNA, 22 nt, Human
ugggaggauugcuugagcucag

SEQ ID NO: 2084911 - RNA, 20 nt, Human
ugggaggauucuaugaggca

SEQ ID NO: 2084912 - RNA, 18 nt, Human
ugggaggauugcuugagc

SEQ ID NO: 2084913 - RNA, 21 nt, Human
ugggaggauugcuugagcuca

SEQ ID NO: 2084914 - RNA, 18 nt, Human
ugggacuacaggcaccca

SEQ ID NO: 2084915 - RNA, 17 nt, Human
agggagcggaaagcagc

SEQ ID NO: 2084916 - RNA, 18 nt, Human
agggagcggaaagcagcu

SEQ ID NO: 2084917 - RNA, 16 nt, Human
agggagcgagggagaa

SEQ ID NO: 2084918 - RNA, 14 nt, Human
agggagcggaaagc

SEQ ID NO: 2084919 - RNA, 17 nt, Human
agggagccccuuugaug

SEQ ID NO: 2084920 - RNA, 16 nt, Human
ugggacuacaggugug

SEQ ID NO: 2084921 - RNA, 17 nt, Human
agggagcguagaaucug

SEQ ID NO: 2084922 - RNA, 17 nt, Human
ugggacuagccuggcuu

SEQ ID NO: 2084923 - RNA, 19 nt, Human
ugggacuagccuggcuugg

SEQ ID NO: 2084924 - RNA, 18 nt, Human
ugggacucaaugcacuga

SEQ ID NO: 2084925 - RNA, 12 nt, Human
ugggacugggag

SEQ ID NO: 2084926 - RNA, 13 nt, Human
ugggacugggagg

SEQ ID NO: 2084927 - RNA, 15 nt, Human
ugggacugggagggc

SEQ ID NO: 2084928 - RNA, 16 nt, Human
ugggacugggagggcc

SEQ ID NO: 2084929 - RNA, 18 nt, Human
ugggacugggagggccca

SEQ ID NO: 2084930 - RNA, 14 nt, Human
ugggacuguacaca

SEQ ID NO: 2084931 - RNA, 15 nt, Human
ugggacuguacacac

SEQ ID NO: 2084932 - RNA, 17 nt, Human
ugggacuguacacacuu

SEQ ID NO: 2084933 - RNA, 18 nt, Human
ugggacuguacacacuuu

SEQ ID NO: 2084934 - RNA, 21 nt, Human
ugggacuguacacacuuuauu

SEQ ID NO: 2084935 - RNA, 22 nt, Human
ugggacuguacacacuuuauuu

SEQ ID NO: 2084936 - RNA, 13 nt, Human
agggagagagaga

SEQ ID NO: 2084937 - RNA, 20 nt, Human
agggagcagagaaggccagg

SEQ ID NO: 2084938 - RNA, 23 nt, Human
agggagcagagaaggccaggggc

SEQ ID NO: 2084939 - RNA, 20 nt, Human
agggacuuggaagcuccgcu

SEQ ID NO: 2084940 - RNA, 21 nt, Human
agggagaagacuauauuguac

SEQ ID NO: 2084941 - RNA, 18 nt, Human
agggagaagggauggagg

SEQ ID NO: 2084942 - RNA, 18 nt, Human
agggaaaggauauuuucu

SEQ ID NO: 2084943 - RNA, 22 nt, Human
agggaaaggcucugaaagccag

SEQ ID NO: 2084944 - RNA, 15 nt, Human
agggaaauaucauuu

SEQ ID NO: 2084945 - RNA, 14 nt, Human
agggaaaugaaaga

SEQ ID NO: 2084946 - RNA, 15 nt, Human
agggacuuggaagcu

SEQ ID NO: 2084947 - RNA, 19 nt, Human
agggacuuggaagcuccgc

SEQ ID NO: 2084948 - RNA, 18 nt, Human
agggacuuggaagcuccg

SEQ ID NO: 2084949 - RNA, 14 nt, Human
ugggcucccuuccu

SEQ ID NO: 2084950 - RNA, 15 nt, Human
ugggcucccuuccuc

SEQ ID NO: 2084951 - RNA, 19 nt, Human
ugggcucccuuccucccaa

SEQ ID NO: 2084952 - RNA, 17 nt, Human
ugggcucccuugugcgu

SEQ ID NO: 2084953 - RNA, 16 nt, Human
ugggcucaagcagucu

SEQ ID NO: 2084954 - RNA, 23 nt, Human
ugggcucuccaccucagccuugg

SEQ ID NO: 2084955 - RNA, 21 nt, Human
ugggcucuccaccucagccuu

SEQ ID NO: 2084956 - RNA, 14 nt, Human
ugggcucuccaccu

SEQ ID NO: 2084957 - RNA, 15 nt, Human
ugggcucuccaccuc

SEQ ID NO: 2084958 - RNA, 16 nt, Human
ugggcucuccaccuca

SEQ ID NO: 2084959 - RNA, 17 nt, Human
ugggcucuccaccucag

SEQ ID NO: 2084960 - RNA, 18 nt, Human
ugggcucuccaccucagc

SEQ ID NO: 2084961 - RNA, 19 nt, Human
ugggcucuccaccucagcc

SEQ ID NO: 2084962 - RNA, 20 nt, Human
ugggcucuccaccucagccu

SEQ ID NO: 2084963 - RNA, 21 nt, Human
ugggcucaagcaauccuccug

SEQ ID NO: 2084964 - RNA, 23 nt, Human
ugggcucaagcaauccuccugag

SEQ ID NO: 2084965 - RNA, 11 nt, Human
agggcugggug

SEQ ID NO: 2084966 - RNA, 12 nt, Human
agggcugggugu

SEQ ID NO: 2084967 - RNA, 16 nt, Human
agggcuggucucugcu

SEQ ID NO: 2084968 - RNA, 14 nt, Human
agggcccagagagg

SEQ ID NO: 2084969 - RNA, 16 nt, Human
agggccaagucccacc

SEQ ID NO: 2084970 - RNA, 14 nt, Human
agggcccaggcagg

SEQ ID NO: 2084971 - RNA, 15 nt, Human
agggcccaggcaggc

SEQ ID NO: 2084972 - RNA, 14 nt, Human
agggccccagcacu

SEQ ID NO: 2084973 - RNA, 18 nt, Human
agggccccagcacuaaag

SEQ ID NO: 2084974 - RNA, 18 nt, Human
agggccccagaaggcagg

SEQ ID NO: 2084975 - RNA, 12 nt, Human
agggccccagca

SEQ ID NO: 2084976 - RNA, 17 nt, Human
agggcccaggcaggcca

SEQ ID NO: 2084977 - RNA, 21 nt, Human
agggcugacacguccacccca

SEQ ID NO: 2084978 - RNA, 13 nt, Human
agggcugccacca

SEQ ID NO: 2084979 - RNA, 13 nt, Human
agggcaguggagg

SEQ ID NO: 2084980 - RNA, 14 nt, Human
agggcaguggaggu

SEQ ID NO: 2084981 - RNA, 17 nt, Human
agggcagaggcuggagg

SEQ ID NO: 2084982 - RNA, 20 nt, Human
agggcagaggcuggaggcag

SEQ ID NO: 2084983 - RNA, 22 nt, Human
agggcagaggcuggaggcaggg

SEQ ID NO: 2084984 - RNA, 14 nt, Human
agggcagaggcugg

SEQ ID NO: 2084985 - RNA, 15 nt, Human
agggcagaggcugga

SEQ ID NO: 2084986 - RNA, 17 nt, Human
agggcacugguggcccg

SEQ ID NO: 2084987 - RNA, 14 nt, Human
agggauacacugaa

SEQ ID NO: 2084988 - RNA, 15 nt, Human
agggcagagccggga

SEQ ID NO: 2084989 - RNA, 17 nt, Human
agggcauggccaggugg

SEQ ID NO: 2084990 - RNA, 16 nt, Human
agggcauucaaauggg

SEQ ID NO: 2084991 - RNA, 17 nt, Human
agggcaucaugcaucuu

SEQ ID NO: 2084992 - RNA, 13 nt, Human
agggcccagagag

SEQ ID NO: 2084993 - RNA, 12 nt, Human
agggcccagaga

SEQ ID NO: 2084994 - RNA, 16 nt, Human
agggauacccagugau

SEQ ID NO: 2084995 - RNA, 20 nt, Human
agggagugacagaggcagcc

SEQ ID NO: 2084996 - RNA, 13 nt, Human
agggagguuugug

SEQ ID NO: 2084997 - RNA, 17 nt, Human
agggagguuugugagag

SEQ ID NO: 2084998 - RNA, 18 nt, Human
agggagguuugugagagc

SEQ ID NO: 2084999 - RNA, 23 nt, Human
agggaguccgaaagggacuugga

SEQ ID NO: 2085000 - RNA, 20 nt, Human
agggaguccgaaagggacuu

SEQ ID NO: 2085001 - RNA, 15 nt, Human
ugggccaagccaggg

SEQ ID NO: 2085002 - RNA, 19 nt, Human
ugggccaagccagggaugg

SEQ ID NO: 2085003 - RNA, 20 nt, Human
ugggccaagucaaagacauu

SEQ ID NO: 2085004 - RNA, 14 nt, Human
ugggaggcugaggu

SEQ ID NO: 2085005 - RNA, 17 nt, Human
ugggcauugauggggaa

SEQ ID NO: 2085006 - RNA, 18 nt, Human
ugggcauugauggggaag

SEQ ID NO: 2085007 - RNA, 23 nt, Human
ugggcauugauggggaaggaggc

SEQ ID NO: 2085008 - RNA, 12 nt, Human
ugggcauugcuu

SEQ ID NO: 2085009 - RNA, 13 nt, Human
ugggcauugcuuu

SEQ ID NO: 2085010 - RNA, 16 nt, Human
ugggcauuugugaggc

SEQ ID NO: 2085011 - RNA, 14 nt, Human
ugggcauugcuuuc

SEQ ID NO: 2085012 - RNA, 15 nt, Human
ugggcauugcuuucc

SEQ ID NO: 2085013 - RNA, 20 nt, Human
ugggcauugcuuuccacuga

SEQ ID NO: 2085014 - RNA, 15 nt, Human
ugggcauuugugagg

SEQ ID NO: 2085015 - RNA, 19 nt, Human
agguuucucaaagaaauuu

SEQ ID NO: 2085016 - RNA, 14 nt, Human
agguuucugaaaau

SEQ ID NO: 2085017 - RNA, 16 nt, Human
agguuucucaaagaaa

SEQ ID NO: 2085018 - RNA, 20 nt, Human
agguuggcaaaaaggcagga

SEQ ID NO: 2085019 - RNA, 15 nt, Human
agguuucugaaaauu

SEQ ID NO: 2085020 - RNA, 23 nt, Human
agguuucugaaaauuaacacugc

SEQ ID NO: 2085021 - RNA, 15 nt, Human
uguaauugaauaaag

SEQ ID NO: 2085022 - RNA, 19 nt, Human
uguaauuaaguacuaugua

SEQ ID NO: 2085023 - RNA, 21 nt, Human
uguaauuaaguacuauguauc

SEQ ID NO: 2085024 - RNA, 18 nt, Human
uguaauuaaguacuaugu

SEQ ID NO: 2085025 - RNA, 12 nt, Human
uguacaguuuuu

SEQ ID NO: 2085026 - RNA, 14 nt, Human
uguaauuuucuuga

SEQ ID NO: 2085027 - RNA, 15 nt, Human
uguaauuuucuugau

SEQ ID NO: 2085028 - RNA, 17 nt, Human
uguaauuuucuugauga

SEQ ID NO: 2085029 - RNA, 13 nt, Human
uguacaaaauaaa

SEQ ID NO: 2085030 - RNA, 14 nt, Human
uguacaucuggccu

SEQ ID NO: 2085031 - RNA, 22 nt, Human
uguacaaaagggacaugaaaua

SEQ ID NO: 2085032 - RNA, 14 nt, Human
agguugaagcacca

SEQ ID NO: 2085033 - RNA, 14 nt, Human
agguugcagugagc

SEQ ID NO: 2085034 - RNA, 21 nt, Human
agguugacaauaaaugugcuu

SEQ ID NO: 2085035 - RNA, 19 nt, Human
agguugcagugagccaaga

SEQ ID NO: 2085036 - RNA, 18 nt, Human
agguugcagugagccaag

SEQ ID NO: 2085037 - RNA, 17 nt, Human
agguugcagugagcuga

SEQ ID NO: 2085038 - RNA, 18 nt, Human
agguugcagugagcugag

SEQ ID NO: 2085039 - RNA, 12 nt, Human
aggugugcucug

SEQ ID NO: 2085040 - RNA, 16 nt, Human
agguguccccagccca

SEQ ID NO: 2085041 - RNA, 17 nt, Human
agguguccccagcccac

SEQ ID NO: 2085042 - RNA, 19 nt, Human
agguguccccagcccacug

SEQ ID NO: 2085043 - RNA, 19 nt, Human
agguucuucccuuuuacau

SEQ ID NO: 2085044 - RNA, 12 nt, Human
agguugaaagac

SEQ ID NO: 2085045 - RNA, 23 nt, Human
agguucuucccuuuuacauacug

SEQ ID NO: 2085046 - RNA, 22 nt, Human
aggugugagucaccaagcccag

SEQ ID NO: 2085047 - RNA, 21 nt, Human
aggugugagucaccaagccca

SEQ ID NO: 2085048 - RNA, 20 nt, Human
aggugucccugcacuugcag

SEQ ID NO: 2085049 - RNA, 16 nt, Human
aggugucccugcacuu

SEQ ID NO: 2085050 - RNA, 15 nt, Human
aggugucauuuccau

SEQ ID NO: 2085051 - RNA, 17 nt, Human
aggugucauuuccauua

SEQ ID NO: 2085052 - RNA, 18 nt, Human
aggugggcugagcccugg

SEQ ID NO: 2085053 - RNA, 19 nt, Human
aggugggcugagcccuggc

SEQ ID NO: 2085054 - RNA, 20 nt, Human
aggugggcugagcccuggca

SEQ ID NO: 2085055 - RNA, 23 nt, Human
ugggcucugccccagcucuggcu

SEQ ID NO: 2085056 - RNA, 20 nt, Human
ugggcucugccccagcucug

SEQ ID NO: 2085057 - RNA, 21 nt, Human
ugggcucugccccagcucugg

SEQ ID NO: 2085058 - RNA, 12 nt, Human
ugggcucugccc

SEQ ID NO: 2085059 - RNA, 15 nt, Human
ugggcucugccccag

SEQ ID NO: 2085060 - RNA, 17 nt, Human
ugggcucugccccagcu

SEQ ID NO: 2085061 - RNA, 19 nt, Human
ugggcucugccccagcucu

SEQ ID NO: 2085062 - RNA, 18 nt, Human
aggugccugugaggcagg

SEQ ID NO: 2085063 - RNA, 15 nt, Human
ugggcugcccuggug

SEQ ID NO: 2085064 - RNA, 19 nt, Human
aggugccugugaggcaggg

SEQ ID NO: 2085065 - RNA, 20 nt, Human
aggugccugugaggcagggg

SEQ ID NO: 2085066 - RNA, 22 nt, Human
aggugccugugaggcaggggcg

SEQ ID NO: 2085067 - RNA, 23 nt, Human
aggugccuucuuauucucacucc

SEQ ID NO: 2085068 - RNA, 14 nt, Human
ugggcugcccuggu

SEQ ID NO: 2085069 - RNA, 13 nt, Human
ugggcugcccugg

SEQ ID NO: 2085070 - RNA, 16 nt, Human
ugggcugccaugugaa

SEQ ID NO: 2085071 - RNA, 12 nt, Human
aggugggaggau

SEQ ID NO: 2085072 - RNA, 13 nt, Human
aggugggagcuug

SEQ ID NO: 2085073 - RNA, 15 nt, Human
aggugggcugagccc

SEQ ID NO: 2085074 - RNA, 16 nt, Human
aggugggcugagcccu

SEQ ID NO: 2085075 - RNA, 17 nt, Human
aggugggcugagcccug

SEQ ID NO: 2085076 - RNA, 15 nt, Human
aggugggccuugcua

SEQ ID NO: 2085077 - RNA, 19 nt, Human
aggugggccuugcuaccuc

SEQ ID NO: 2085078 - RNA, 21 nt, Human
aggugggccuugcuaccucaa

SEQ ID NO: 2085079 - RNA, 22 nt, Human
aggugggccuugcuaccucaag

SEQ ID NO: 2085080 - RNA, 12 nt, Human
agguggcugccu

SEQ ID NO: 2085081 - RNA, 13 nt, Human
agguggcugccug

SEQ ID NO: 2085082 - RNA, 17 nt, Human
agguggcugccuggagc

SEQ ID NO: 2085083 - RNA, 18 nt, Human
agguggcugccuggagcc

SEQ ID NO: 2085084 - RNA, 23 nt, Human
agguggcugacccagucccuggg

SEQ ID NO: 2085085 - RNA, 21 nt, Human
aggugccugugaggcaggggc

SEQ ID NO: 2085086 - RNA, 13 nt, Human
aggugccuucuua

SEQ ID NO: 2085087 - RNA, 22 nt, Human
aggugccuucuuauucucacuc

SEQ ID NO: 2085088 - RNA, 23 nt, Human
aggugcuaaauggucgcccagga

SEQ ID NO: 2085089 - RNA, 22 nt, Human
uguagugaaucacguaaagcua

SEQ ID NO: 2085090 - RNA, 14 nt, Human
uguagucucaggac

SEQ ID NO: 2085091 - RNA, 23 nt, Human
uguaguccuagccacucaggagg

SEQ ID NO: 2085092 - RNA, 14 nt, Human
uguagucccagcua

SEQ ID NO: 2085093 - RNA, 17 nt, Human
uguagucccagcuacuc

SEQ ID NO: 2085094 - RNA, 16 nt, Human
uguaggguuauaauaa

SEQ ID NO: 2085095 - RNA, 18 nt, Human
uguaggguaaggugccuu

SEQ ID NO: 2085096 - RNA, 17 nt, Human
uguaggguuauaauaau

SEQ ID NO: 2085097 - RNA, 15 nt, Human
uguagguaucauuuu

SEQ ID NO: 2085098 - RNA, 13 nt, Human
uguaggguuucua

SEQ ID NO: 2085099 - RNA, 19 nt, Human
aguacaggcagcacagaga

SEQ ID NO: 2085100 - RNA, 15 nt, Human
aguaccacucaggcc

SEQ ID NO: 2085101 - RNA, 15 nt, Human
aguaccaucugaaua

SEQ ID NO: 2085102 - RNA, 20 nt, Human
aguagcaguagaugcaugua

SEQ ID NO: 2085103 - RNA, 14 nt, Human
aguagcaugagaga

SEQ ID NO: 2085104 - RNA, 23 nt, Human
aguagcaugagagaauuguauca

SEQ ID NO: 2085105 - RNA, 19 nt, Human
aguagcauguugagccagg

SEQ ID NO: 2085106 - RNA, 20 nt, Human
aguagcauguugagccaggc

SEQ ID NO: 2085107 - RNA, 18 nt, Human
uguauauauuuccuauau

SEQ ID NO: 2085108 - RNA, 17 nt, Human
uguauauauauuaagag

SEQ ID NO: 2085109 - RNA, 13 nt, Human
uguauauauacau

SEQ ID NO: 2085110 - RNA, 14 nt, Human
uguauauauacaua

SEQ ID NO: 2085111 - RNA, 17 nt, Human
uguauauauacauaaca

SEQ ID NO: 2085112 - RNA, 22 nt, Human
uguauauauuuccuauauuguu

SEQ ID NO: 2085113 - RNA, 19 nt, Human
aguaaucugaucguucuuu

SEQ ID NO: 2085114 - RNA, 15 nt, Human
uguauauacaauaac

SEQ ID NO: 2085115 - RNA, 16 nt, Human
uguauauacaauaaca

SEQ ID NO: 2085116 - RNA, 18 nt, Human
uguauauacaauaacaua

SEQ ID NO: 2085117 - RNA, 17 nt, Human
uguauauacaauaacau

SEQ ID NO: 2085118 - RNA, 20 nt, Human
aguaaguaccacucaggcca

SEQ ID NO: 2085119 - RNA, 15 nt, Human
aguaaguaucuucgu

SEQ ID NO: 2085120 - RNA, 23 nt, Human
aguaaguaucuucguucuuguua

SEQ ID NO: 2085121 - RNA, 16 nt, Human
aguaauaaacuguguu

SEQ ID NO: 2085122 - RNA, 13 nt, Human
aguaauaaaacau

SEQ ID NO: 2085123 - RNA, 15 nt, Human
aguaauaaaacaucu

SEQ ID NO: 2085124 - RNA, 16 nt, Human
aguaauaaaacaucuu

SEQ ID NO: 2085125 - RNA, 17 nt, Human
aguaauaaaacaucuuu

SEQ ID NO: 2085126 - RNA, 17 nt, Human
aguaauaaacuguguuu

SEQ ID NO: 2085127 - RNA, 21 nt, Human
uguacauggaauaacauguaa

SEQ ID NO: 2085128 - RNA, 21 nt, Human
agguuuuuuuguauaguaaag

SEQ ID NO: 2085129 - RNA, 22 nt, Human
agguuuuuuuguauaguaaagu

SEQ ID NO: 2085130 - RNA, 19 nt, Human
aguaaaaaacaacuucuuu

SEQ ID NO: 2085131 - RNA, 16 nt, Human
aguaauugugaaaaag

SEQ ID NO: 2085132 - RNA, 15 nt, Human
aguaauugugaaaaa

SEQ ID NO: 2085133 - RNA, 12 nt, Human
aguaauugugaa

SEQ ID NO: 2085134 - RNA, 13 nt, Human
aguaauuuauugu

SEQ ID NO: 2085135 - RNA, 23 nt, Human
aguaauuuauuguuuuuccuugu

SEQ ID NO: 2085136 - RNA, 22 nt, Human
aguaauuuauuguuuuuccuug

SEQ ID NO: 2085137 - RNA, 14 nt, Human
aguacaggcagcac

SEQ ID NO: 2085138 - RNA, 17 nt, Human
aguacaggcagcacaga

SEQ ID NO: 2085139 - RNA, 18 nt, Human
aguacaggcagcacagag

SEQ ID NO: 2085140 - RNA, 12 nt, Human
aguaaugaauuu

SEQ ID NO: 2085141 - RNA, 21 nt, Human
aguaaugaauuuuuaugauau

SEQ ID NO: 2085142 - RNA, 22 nt, Human
aguaaugaauuuuuaugauauu

SEQ ID NO: 2085143 - RNA, 22 nt, Human
agucagccuucccccucccagg

SEQ ID NO: 2085144 - RNA, 23 nt, Human
agucagccuucccccucccaggg

SEQ ID NO: 2085145 - RNA, 19 nt, Human
agucagcuuugccuuccac

SEQ ID NO: 2085146 - RNA, 22 nt, Human
agucagcuuugccuuccacgcu

SEQ ID NO: 2085147 - RNA, 22 nt, Human
agucagugggaacgugacugcc

SEQ ID NO: 2085148 - RNA, 14 nt, Human
agucagcagaacug

SEQ ID NO: 2085149 - RNA, 13 nt, Human
ugucgccucugca

SEQ ID NO: 2085150 - RNA, 14 nt, Human
ugucgccucugcau

SEQ ID NO: 2085151 - RNA, 15 nt, Human
ugucccuggccaucu

SEQ ID NO: 2085152 - RNA, 16 nt, Human
ugucccuggccaucuc

SEQ ID NO: 2085153 - RNA, 17 nt, Human
ugucccuggccaucucu

SEQ ID NO: 2085154 - RNA, 22 nt, Human
ugucccuggccaucucugaacu

SEQ ID NO: 2085155 - RNA, 22 nt, Human
ugucccuaauuuaacccagcuc

SEQ ID NO: 2085156 - RNA, 12 nt, Human
ugucccuacacc

SEQ ID NO: 2085157 - RNA, 13 nt, Human
ugucccugucacc

SEQ ID NO: 2085158 - RNA, 16 nt, Human
ugucccugucaccaag

SEQ ID NO: 2085159 - RNA, 21 nt, Human
ugucccugucaccaagcucac

SEQ ID NO: 2085160 - RNA, 16 nt, Human
agucccaccuuggcug

SEQ ID NO: 2085161 - RNA, 15 nt, Human
agucccaccuuggcu

SEQ ID NO: 2085162 - RNA, 14 nt, Human
agucccaaggaaag

SEQ ID NO: 2085163 - RNA, 17 nt, Human
agucccaaggaaagccc

SEQ ID NO: 2085164 - RNA, 17 nt, Human
agucauaccaacuuuag

SEQ ID NO: 2085165 - RNA, 14 nt, Human
agucaguuugcagu

SEQ ID NO: 2085166 - RNA, 16 nt, Human
agucaguugaaauucu

SEQ ID NO: 2085167 - RNA, 14 nt, Human
agucauagaagaac

SEQ ID NO: 2085168 - RNA, 16 nt, Human
agucauagaagaacua

SEQ ID NO: 2085169 - RNA, 18 nt, Human
agucccagcuacucagga

SEQ ID NO: 2085170 - RNA, 19 nt, Human
agucccagcuacucaggag

SEQ ID NO: 2085171 - RNA, 11 nt, Human
agucccagcua

SEQ ID NO: 2085172 - RNA, 22 nt, Human
agucccagcuacucagaagccu

SEQ ID NO: 2085173 - RNA, 20 nt, Human
agucccaccgguugcuucug

SEQ ID NO: 2085174 - RNA, 23 nt, Human
agucccaccgguugcuucuggga

SEQ ID NO: 2085175 - RNA, 20 nt, Human
agucccaaggaaagccccag

SEQ ID NO: 2085176 - RNA, 21 nt, Human
agucccaaggaaagccccagc

SEQ ID NO: 2085177 - RNA, 19 nt, Human
agucccaccuuggcugcag

SEQ ID NO: 2085178 - RNA, 18 nt, Human
agucccaccuuggcugca

SEQ ID NO: 2085179 - RNA, 12 nt, Human
agucggauuaga

SEQ ID NO: 2085180 - RNA, 20 nt, Human
agucggaacggagaaaggug

SEQ ID NO: 2085181 - RNA, 13 nt, Human
agucgcugaggaa

SEQ ID NO: 2085182 - RNA, 15 nt, Human
agucgcugaggaaaa

SEQ ID NO: 2085183 - RNA, 16 nt, Human
agucgcugaggaaaaa

SEQ ID NO: 2085184 - RNA, 19 nt, Human
agucgcaucucagugcagg

SEQ ID NO: 2085185 - RNA, 16 nt, Human
agucccccugccccag

SEQ ID NO: 2085186 - RNA, 22 nt, Human
aguccuacuuuacauaugcuuu

SEQ ID NO: 2085187 - RNA, 17 nt, Human
aguccuagccacucagg

SEQ ID NO: 2085188 - RNA, 15 nt, Human
aguccucacucccag

SEQ ID NO: 2085189 - RNA, 16 nt, Human
aguccucacucccagu

SEQ ID NO: 2085190 - RNA, 17 nt, Human
aguccucacucccaguc

SEQ ID NO: 2085191 - RNA, 18 nt, Human
aguccucacucccagucc

SEQ ID NO: 2085192 - RNA, 17 nt, Human
agucuaaauauuuccuu

SEQ ID NO: 2085193 - RNA, 23 nt, Human
agucuaaauauuuccuuaaacug

SEQ ID NO: 2085194 - RNA, 16 nt, Human
agucuaaauauuuccu

SEQ ID NO: 2085195 - RNA, 12 nt, Human
agucuaaccaaa

SEQ ID NO: 2085196 - RNA, 13 nt, Human
agucuaaccaaau

SEQ ID NO: 2085197 - RNA, 14 nt, Human
agucuaaccaaaug

SEQ ID NO: 2085198 - RNA, 16 nt, Human
agucuaaccaaaugca

SEQ ID NO: 2085199 - RNA, 17 nt, Human
agucuaaccaaaugcau

SEQ ID NO: 2085200 - RNA, 20 nt, Human
agucuaaccaaaugcaucaa

SEQ ID NO: 2085201 - RNA, 14 nt, Human
agucuacgcucucc

SEQ ID NO: 2085202 - RNA, 15 nt, Human
agucuacgcucuccu

SEQ ID NO: 2085203 - RNA, 17 nt, Human
agucuacgcucuccuuu

SEQ ID NO: 2085204 - RNA, 20 nt, Human
agucuacgcucuccuuucuu

SEQ ID NO: 2085205 - RNA, 18 nt, Human
agucuaggagcugggagg

SEQ ID NO: 2085206 - RNA, 22 nt, Human
agucuaggagcugggaggaaaa

SEQ ID NO: 2085207 - RNA, 20 nt, Human
agucuaggagcugggaggaa

SEQ ID NO: 2085208 - RNA, 17 nt, Human
agucuaguuccugauga

SEQ ID NO: 2085209 - RNA, 22 nt, Human
agucuaguuccugaugacccag

SEQ ID NO: 2085210 - RNA, 14 nt, Human
agucuauuagccac

SEQ ID NO: 2085211 - RNA, 23 nt, Human
agucucacuguugcccaggcugg

SEQ ID NO: 2085212 - RNA, 13 nt, Human
ugucucaucccca

SEQ ID NO: 2085213 - RNA, 16 nt, Human
ugucucauccccaggg

SEQ ID NO: 2085214 - RNA, 23 nt, Human
ugucucauccccaggggucccag

SEQ ID NO: 2085215 - RNA, 19 nt, Human
aguauucuuauuuaaugaa

SEQ ID NO: 2085216 - RNA, 12 nt, Human
aguauucugccu

SEQ ID NO: 2085217 - RNA, 13 nt, Human
aguauucugccuu

SEQ ID NO: 2085218 - RNA, 22 nt, Human
aguauucugccuuugcagaaac

SEQ ID NO: 2085219 - RNA, 23 nt, Human
aguauucugccuuugcagaaaca

SEQ ID NO: 2085220 - RNA, 12 nt, Human
aguauuuauaua

SEQ ID NO: 2085221 - RNA, 13 nt, Human
aguauuuauauau

SEQ ID NO: 2085222 - RNA, 14 nt, Human
aguauuuauauauu

SEQ ID NO: 2085223 - RNA, 15 nt, Human
aguauuuauauauuu

SEQ ID NO: 2085224 - RNA, 16 nt, Human
aguauuuauauauuua

SEQ ID NO: 2085225 - RNA, 17 nt, Human
aguauuuauauauuuau

SEQ ID NO: 2085226 - RNA, 19 nt, Human
aguauuuauauauuuauaa

SEQ ID NO: 2085227 - RNA, 20 nt, Human
aguauuuauauauuuauaac

SEQ ID NO: 2085228 - RNA, 23 nt, Human
aguauuuauauauuuauaacuca

SEQ ID NO: 2085229 - RNA, 20 nt, Human
aguauuuauuuaauguuaug

SEQ ID NO: 2085230 - RNA, 15 nt, Human
aguauuuauuuaaug

SEQ ID NO: 2085231 - RNA, 14 nt, Human
aguauuuucccaau

SEQ ID NO: 2085232 - RNA, 15 nt, Human
agucaccaagcccag

SEQ ID NO: 2085233 - RNA, 13 nt, Human
agucaccaggaau

SEQ ID NO: 2085234 - RNA, 16 nt, Human
agucacccaugaagac

SEQ ID NO: 2085235 - RNA, 17 nt, Human
agucacccaugaagaca

SEQ ID NO: 2085236 - RNA, 20 nt, Human
agucacccaugaagacagga

SEQ ID NO: 2085237 - RNA, 19 nt, Human
agucaccaggaauguuaaa

SEQ ID NO: 2085238 - RNA, 12 nt, Human
ugucagagcugg

SEQ ID NO: 2085239 - RNA, 13 nt, Human
ugucagagcuggg

SEQ ID NO: 2085240 - RNA, 14 nt, Human
ugucagagcuggga

SEQ ID NO: 2085241 - RNA, 15 nt, Human
ugucagagcugggag

SEQ ID NO: 2085242 - RNA, 20 nt, Human
ugucagaggcacaaaagggu

SEQ ID NO: 2085243 - RNA, 15 nt, Human
ugucagauaugauau

SEQ ID NO: 2085244 - RNA, 20 nt, Human
ugucagauauuuuuucagaa

SEQ ID NO: 2085245 - RNA, 21 nt, Human
ugucagauauuuuuucagaaa

SEQ ID NO: 2085246 - RNA, 23 nt, Human
ugucagauauuuuuucagaaaua

SEQ ID NO: 2085247 - RNA, 19 nt, Human
uguauauugucagauauuu

SEQ ID NO: 2085248 - RNA, 18 nt, Human
uguauauuuaaaagaaag

SEQ ID NO: 2085249 - RNA, 21 nt, Human
uguauauuauggaagauuuua

SEQ ID NO: 2085250 - RNA, 23 nt, Human
uguauauuauggaagauuuuaaa

SEQ ID NO: 2085251 - RNA, 16 nt, Human
aguauguuuuagcaug

SEQ ID NO: 2085252 - RNA, 18 nt, Human
aguauguuuuagcaugug

SEQ ID NO: 2085253 - RNA, 19 nt, Human
aguauguuuuagcaugugu

SEQ ID NO: 2085254 - RNA, 20 nt, Human
aguauguuuuagcauguguu

SEQ ID NO: 2085255 - RNA, 12 nt, Human
aguauacaagau

SEQ ID NO: 2085256 - RNA, 14 nt, Human
aguauacaagauaa

SEQ ID NO: 2085257 - RNA, 15 nt, Human
aguauacaagauaag

SEQ ID NO: 2085258 - RNA, 18 nt, Human
aguauacaagauaagcuu

SEQ ID NO: 2085259 - RNA, 14 nt, Human
aguauuccaccuua

SEQ ID NO: 2085260 - RNA, 21 nt, Human
aguauuccaccuuaaauuaaa

SEQ ID NO: 2085261 - RNA, 22 nt, Human
aguauuccaccuuaaauuaaac

SEQ ID NO: 2085262 - RNA, 23 nt, Human
aguauuccaccuuaaauuaaaca

SEQ ID NO: 2085263 - RNA, 23 nt, Human
aguauucaagaaagccagucuua

SEQ ID NO: 2085264 - RNA, 19 nt, Human
aguauuccauugugugagu

SEQ ID NO: 2085265 - RNA, 20 nt, Human
aguauuccauugugugagug

SEQ ID NO: 2085266 - RNA, 22 nt, Human
aguauuccauugugugagugua

SEQ ID NO: 2085267 - RNA, 15 nt, Human
aguauuaaagggggg

SEQ ID NO: 2085268 - RNA, 20 nt, Human
aguauuaaaggggggagggg

SEQ ID NO: 2085269 - RNA, 23 nt, Human
ugucccugcacuugcagacucua

SEQ ID NO: 2085270 - RNA, 22 nt, Human
ugucccugcacuugcagacucu

SEQ ID NO: 2085271 - RNA, 20 nt, Human
ugucccugcacuugcagacu

SEQ ID NO: 2085272 - RNA, 17 nt, Human
ugucccgauuguaacuc

SEQ ID NO: 2085273 - RNA, 16 nt, Human
ugucccgauuguaacu

SEQ ID NO: 2085274 - RNA, 21 nt, Human
uguccccuccucacucccuuc

SEQ ID NO: 2085275 - RNA, 14 nt, Human
uguccagcgccuag

SEQ ID NO: 2085276 - RNA, 14 nt, Human
uguccagccugggc

SEQ ID NO: 2085277 - RNA, 19 nt, Human
uguccagccugggcagcca

SEQ ID NO: 2085278 - RNA, 22 nt, Human
uguccagccugggcagccaggc

SEQ ID NO: 2085279 - RNA, 23 nt, Human
uguccagccugggcagccaggcu

SEQ ID NO: 2085280 - RNA, 12 nt, Human
uguccagccugg

SEQ ID NO: 2085281 - RNA, 20 nt, Human
uguccagccccguagacgug

SEQ ID NO: 2085282 - RNA, 12 nt, Human
uguccagagaca

SEQ ID NO: 2085283 - RNA, 13 nt, Human
uguccagagacaa

SEQ ID NO: 2085284 - RNA, 11 nt, Human
uguccagagag

SEQ ID NO: 2085285 - RNA, 23 nt, Human
uguccagagagagaagugccccu

SEQ ID NO: 2085286 - RNA, 18 nt, Human
uguccaagugugugugcg

SEQ ID NO: 2085287 - RNA, 17 nt, Human
uguccaagugugugugc

SEQ ID NO: 2085288 - RNA, 22 nt, Human
ugucauuugagcagggcucagc

SEQ ID NO: 2085289 - RNA, 21 nt, Human
ugucauuugagcagggcucag

SEQ ID NO: 2085290 - RNA, 20 nt, Human
ugucauuugagcagggcuca

SEQ ID NO: 2085291 - RNA, 20 nt, Human
ugucagguggggcagcuuga

SEQ ID NO: 2085292 - RNA, 18 nt, Human
ugucagguggggcagcuu

SEQ ID NO: 2085293 - RNA, 17 nt, Human
ugucagguggggcagcu

SEQ ID NO: 2085294 - RNA, 11 nt, Human
ugucagauucc

SEQ ID NO: 2085295 - RNA, 14 nt, Human
ugucagauuccuuu

SEQ ID NO: 2085296 - RNA, 15 nt, Human
ugucagauuccuuuc

SEQ ID NO: 2085297 - RNA, 17 nt, Human
ugucagauuccuuuccc

SEQ ID NO: 2085298 - RNA, 21 nt, Human
uguccaaccuaaccccuuucc

SEQ ID NO: 2085299 - RNA, 13 nt, Human
uguccaacuccag

SEQ ID NO: 2085300 - RNA, 14 nt, Human
uguccaacuccagu

SEQ ID NO: 2085301 - RNA, 15 nt, Human
uguccaacuccagua

SEQ ID NO: 2085302 - RNA, 23 nt, Human
uguccaacuccaguacuggagcu

SEQ ID NO: 2085303 - RNA, 15 nt, Human
uguccaaccuaaccc

SEQ ID NO: 2085304 - RNA, 22 nt, Human
uguccaaccuaaccccuuuccu

SEQ ID NO: 2085305 - RNA, 18 nt, Human
uguccaacccgaggcccg

SEQ ID NO: 2085306 - RNA, 19 nt, Human
uguccaaaggaggcuggca

SEQ ID NO: 2085307 - RNA, 13 nt, Human
ugucagcaggaag

SEQ ID NO: 2085308 - RNA, 17 nt, Human
uguccaaacugccuaag

SEQ ID NO: 2085309 - RNA, 15 nt, Human
uguccaaacugccua

SEQ ID NO: 2085310 - RNA, 22 nt, Human
uguccaaacugccuaagcccuc

SEQ ID NO: 2085311 - RNA, 13 nt, Human
uguuaauaaaagu

SEQ ID NO: 2085312 - RNA, 18 nt, Human
uguuaauaaaaguacaug

SEQ ID NO: 2085313 - RNA, 15 nt, Human
uguuaagugguuuca

SEQ ID NO: 2085314 - RNA, 20 nt, Human
uguuaagcgugucuguauuu

SEQ ID NO: 2085315 - RNA, 22 nt, Human
uguuaaguugauggugaugaaa

SEQ ID NO: 2085316 - RNA, 19 nt, Human
uguuaauaaaaguacaugu

SEQ ID NO: 2085317 - RNA, 14 nt, Human
uguuaauauucuuu

SEQ ID NO: 2085318 - RNA, 17 nt, Human
uguuaauauucuuucaa

SEQ ID NO: 2085319 - RNA, 18 nt, Human
uguuaauauucuuucaau

SEQ ID NO: 2085320 - RNA, 19 nt, Human
uguuacauaagauaaaugu

SEQ ID NO: 2085321 - RNA, 22 nt, Human
uguuaacuuaauaguauuuaug

SEQ ID NO: 2085322 - RNA, 14 nt, Human
uguuaacuuagcuu

SEQ ID NO: 2085323 - RNA, 15 nt, Human
aguggggacagagca

SEQ ID NO: 2085324 - RNA, 18 nt, Human
aguggggagacaccucag

SEQ ID NO: 2085325 - RNA, 19 nt, Human
aguggggagacaccucaga

SEQ ID NO: 2085326 - RNA, 20 nt, Human
aguggggagacaccucagag

SEQ ID NO: 2085327 - RNA, 18 nt, Human
aguggggucucccucucc

SEQ ID NO: 2085328 - RNA, 19 nt, Human
aguggggucucccucuccu

SEQ ID NO: 2085329 - RNA, 20 nt, Human
aguggggucucccucuccug

SEQ ID NO: 2085330 - RNA, 22 nt, Human
aguggggucucccucuccugcc

SEQ ID NO: 2085331 - RNA, 23 nt, Human
aguggggucucccucuccugccu

SEQ ID NO: 2085332 - RNA, 14 nt, Human
aguggauugcauuu

SEQ ID NO: 2085333 - RNA, 13 nt, Human
aguggaugauguu

SEQ ID NO: 2085334 - RNA, 15 nt, Human
aguggaugauguuuc

SEQ ID NO: 2085335 - RNA, 20 nt, Human
aguggaugauguuucgugaa

SEQ ID NO: 2085336 - RNA, 21 nt, Human
aguggcaagaccaaaaugaca

SEQ ID NO: 2085337 - RNA, 23 nt, Human
aguggcaagaccaaaaugacaau

SEQ ID NO: 2085338 - RNA, 19 nt, Human
aguggaccuugagaccaca

SEQ ID NO: 2085339 - RNA, 18 nt, Human
aguggaccuugagaccac

SEQ ID NO: 2085340 - RNA, 23 nt, Human
uguuacaggcaccgagaauguug

SEQ ID NO: 2085341 - RNA, 21 nt, Human
uguuacaggcaccgagaaugu

SEQ ID NO: 2085342 - RNA, 16 nt, Human
ugugucucuuuucucu

SEQ ID NO: 2085343 - RNA, 19 nt, Human
ugugucugcgucuguguug

SEQ ID NO: 2085344 - RNA, 14 nt, Human
ugugucucuuuucu

SEQ ID NO: 2085345 - RNA, 20 nt, Human
ugugucuugcaauggcagcc

SEQ ID NO: 2085346 - RNA, 17 nt, Human
ugugucuucaauuugua

SEQ ID NO: 2085347 - RNA, 22 nt, Human
uguguguugaucccaagacaau

SEQ ID NO: 2085348 - RNA, 14 nt, Human
uguguguugucuga

SEQ ID NO: 2085349 - RNA, 15 nt, Human
ugugucccucucucu

SEQ ID NO: 2085350 - RNA, 16 nt, Human
ugugucccucucucug

SEQ ID NO: 2085351 - RNA, 17 nt, Human
ugugucccucucucugg

SEQ ID NO: 2085352 - RNA, 14 nt, Human
uguguccuugcacc

SEQ ID NO: 2085353 - RNA, 18 nt, Human
uguguccuugcaccugca

SEQ ID NO: 2085354 - RNA, 19 nt, Human
uguguccuugcaccugcau

SEQ ID NO: 2085355 - RNA, 20 nt, Human
uguguccuugcaccugcauc

SEQ ID NO: 2085356 - RNA, 15 nt, Human
uguguccaacuccag

SEQ ID NO: 2085357 - RNA, 19 nt, Human
uguguccaagugugugugc

SEQ ID NO: 2085358 - RNA, 18 nt, Human
uguguccaugugugugca

SEQ ID NO: 2085359 - RNA, 15 nt, Human
uguguccaucccagc

SEQ ID NO: 2085360 - RNA, 16 nt, Human
uguguccaucccagcg

SEQ ID NO: 2085361 - RNA, 14 nt, Human
uguguccaugugug

SEQ ID NO: 2085362 - RNA, 16 nt, Human
uguguccaugugugug

SEQ ID NO: 2085363 - RNA, 17 nt, Human
uguguccaugugugugc

SEQ ID NO: 2085364 - RNA, 20 nt, Human
ugugucagguggggcagcuu

SEQ ID NO: 2085365 - RNA, 20 nt, Human
ugugguuuucuuuugccaug

SEQ ID NO: 2085366 - RNA, 21 nt, Human
uguguaaaguguaaauccuuu

SEQ ID NO: 2085367 - RNA, 12 nt, Human
ugugguuuguug

SEQ ID NO: 2085368 - RNA, 18 nt, Human
ugugguuuccaaggagcu

SEQ ID NO: 2085369 - RNA, 17 nt, Human
ugugguaguuaauaaaa

SEQ ID NO: 2085370 - RNA, 21 nt, Human
ugugguuuucuuuugccauga

SEQ ID NO: 2085371 - RNA, 19 nt, Human
ugugguuuucuuuugccau

SEQ ID NO: 2085372 - RNA, 22 nt, Human
agugccccugcugccuccccaa

SEQ ID NO: 2085373 - RNA, 20 nt, Human
agugccccugcugccucccc

SEQ ID NO: 2085374 - RNA, 21 nt, Human
agugccccugcugccucccca

SEQ ID NO: 2085375 - RNA, 16 nt, Human
agugcccuccacagcc

SEQ ID NO: 2085376 - RNA, 17 nt, Human
agugcccuccacagccg

SEQ ID NO: 2085377 - RNA, 21 nt, Human
agugcccuccacagccgcagc

SEQ ID NO: 2085378 - RNA, 11 nt, Human
agugccccugc

SEQ ID NO: 2085379 - RNA, 15 nt, Human
agugcccaacuguua

SEQ ID NO: 2085380 - RNA, 12 nt, Human
agugccccugcu

SEQ ID NO: 2085381 - RNA, 13 nt, Human
agugccccugcug

SEQ ID NO: 2085382 - RNA, 14 nt, Human
agugccccugcugc

SEQ ID NO: 2085383 - RNA, 19 nt, Human
agugccccugcugccuccc

SEQ ID NO: 2085384 - RNA, 20 nt, Human
agugccagucuugugucugc

SEQ ID NO: 2085385 - RNA, 14 nt, Human
agugccauugucuu

SEQ ID NO: 2085386 - RNA, 15 nt, Human
agugccauugucuuu

SEQ ID NO: 2085387 - RNA, 16 nt, Human
agugccauugucuuua

SEQ ID NO: 2085388 - RNA, 17 nt, Human
agugccauugucuuuau

SEQ ID NO: 2085389 - RNA, 18 nt, Human
agugccauugucuuuaua

SEQ ID NO: 2085390 - RNA, 21 nt, Human
agugccauugucuuuauauga

SEQ ID NO: 2085391 - RNA, 14 nt, Human
agugcccaacuguu

SEQ ID NO: 2085392 - RNA, 22 nt, Human
ugugguagggacuuaaaaaacu

SEQ ID NO: 2085393 - RNA, 14 nt, Human
agugguauagaaau

SEQ ID NO: 2085394 - RNA, 15 nt, Human
agugguauagaaaug

SEQ ID NO: 2085395 - RNA, 16 nt, Human
agugguauagaaaugc

SEQ ID NO: 2085396 - RNA, 18 nt, Human
agugguauagaaaugcug

SEQ ID NO: 2085397 - RNA, 12 nt, Human
agugugagaauc

SEQ ID NO: 2085398 - RNA, 22 nt, Human
aguggucgcuuacuuugaguga

SEQ ID NO: 2085399 - RNA, 20 nt, Human
agugugccugaagucccaga

SEQ ID NO: 2085400 - RNA, 12 nt, Human
agugugaguaag

SEQ ID NO: 2085401 - RNA, 15 nt, Human
agugugggaagggag

SEQ ID NO: 2085402 - RNA, 17 nt, Human
agugugggaagggagag

SEQ ID NO: 2085403 - RNA, 14 nt, Human
agugugggaaugcg

SEQ ID NO: 2085404 - RNA, 14 nt, Human
aguguggcuccccu

SEQ ID NO: 2085405 - RNA, 16 nt, Human
aguguggcuccccucu

SEQ ID NO: 2085406 - RNA, 17 nt, Human
aguguggcuccccucua

SEQ ID NO: 2085407 - RNA, 21 nt, Human
aguguggcuccccucuauuua

SEQ ID NO: 2085408 - RNA, 21 nt, Human
agugugccugaagucccagau

SEQ ID NO: 2085409 - RNA, 16 nt, Human
agugugaguaagagcu

SEQ ID NO: 2085410 - RNA, 17 nt, Human
agugugaguaagagcug

SEQ ID NO: 2085411 - RNA, 18 nt, Human
agugugaguaagagcugg

SEQ ID NO: 2085412 - RNA, 19 nt, Human
agugugaguaagagcuggu

SEQ ID NO: 2085413 - RNA, 20 nt, Human
uguuccaagacauugucaau

SEQ ID NO: 2085414 - RNA, 19 nt, Human
uguuccacaaguuaaauaa

SEQ ID NO: 2085415 - RNA, 11 nt, Human
uguuccaagac

SEQ ID NO: 2085416 - RNA, 14 nt, Human
uguuccaagacauu

SEQ ID NO: 2085417 - RNA, 15 nt, Human
uguuccaagacauug

SEQ ID NO: 2085418 - RNA, 18 nt, Human
uguuccaagacauuguca

SEQ ID NO: 2085419 - RNA, 19 nt, Human
uguuccaagacauugucaa

SEQ ID NO: 2085420 - RNA, 21 nt, Human
uguuccaagacauugucaaua

SEQ ID NO: 2085421 - RNA, 19 nt, Human
uguucguucuuguucuguu

SEQ ID NO: 2085422 - RNA, 14 nt, Human
uguuccuggcaaua

SEQ ID NO: 2085423 - RNA, 21 nt, Human
uguuccuggcaauaguguguu

SEQ ID NO: 2085424 - RNA, 18 nt, Human
uguuccuucacauccugu

SEQ ID NO: 2085425 - RNA, 18 nt, Human
uguucauuuguuauucuu

SEQ ID NO: 2085426 - RNA, 19 nt, Human
uguucauuuguuauucuua

SEQ ID NO: 2085427 - RNA, 20 nt, Human
uguucauuuguuauucuuaa

SEQ ID NO: 2085428 - RNA, 11 nt, Human
aguguguaaag

SEQ ID NO: 2085429 - RNA, 16 nt, Human
aguguguaugugcgug

SEQ ID NO: 2085430 - RNA, 19 nt, Human
aguguguaugugcgugugu

SEQ ID NO: 2085431 - RNA, 20 nt, Human
aguguguaugugcgugugug

SEQ ID NO: 2085432 - RNA, 14 nt, Human
uguuaucuuggugu

SEQ ID NO: 2085433 - RNA, 12 nt, Human
agugugugugcg

SEQ ID NO: 2085434 - RNA, 18 nt, Human
aguguucccuuuccuacu

SEQ ID NO: 2085435 - RNA, 14 nt, Human
aguuagcucaggag

SEQ ID NO: 2085436 - RNA, 16 nt, Human
aguuagcucaggaggc

SEQ ID NO: 2085437 - RNA, 19 nt, Human
aguuagaggccagccuggc

SEQ ID NO: 2085438 - RNA, 14 nt, Human
aguuagagaugccu

SEQ ID NO: 2085439 - RNA, 18 nt, Human
aguuagagaugccucccu

SEQ ID NO: 2085440 - RNA, 23 nt, Human
aguuacuaucaugucaaacguga

SEQ ID NO: 2085441 - RNA, 15 nt, Human
aguuacuauccuggc

SEQ ID NO: 2085442 - RNA, 16 nt, Human
aguuacuauccuggcu

SEQ ID NO: 2085443 - RNA, 17 nt, Human
aguuacuauccuggcuu

SEQ ID NO: 2085444 - RNA, 12 nt, Human
aguuacucagcc

SEQ ID NO: 2085445 - RNA, 13 nt, Human
aguuacucagccc

SEQ ID NO: 2085446 - RNA, 14 nt, Human
aguuacucagcccu

SEQ ID NO: 2085447 - RNA, 19 nt, Human
aguuacucagcccugggcc

SEQ ID NO: 2085448 - RNA, 23 nt, Human
aguuacucagcccugggccccac

SEQ ID NO: 2085449 - RNA, 15 nt, Human
aguuacucagcccug

SEQ ID NO: 2085450 - RNA, 16 nt, Human
aguuacucagcccugg

SEQ ID NO: 2085451 - RNA, 17 nt, Human
aguuacucagcccuggg

SEQ ID NO: 2085452 - RNA, 18 nt, Human
aguuacucagcccugggc

SEQ ID NO: 2085453 - RNA, 13 nt, Human
aguguuguuugua

SEQ ID NO: 2085454 - RNA, 14 nt, Human
aguguuguuuguaa

SEQ ID NO: 2085455 - RNA, 15 nt, Human
uguugcccuuucugu

SEQ ID NO: 2085456 - RNA, 21 nt, Human
uguugcccuuucuguaccauu

SEQ ID NO: 2085457 - RNA, 22 nt, Human
agugugugcacaugugugcgug

SEQ ID NO: 2085458 - RNA, 14 nt, Human
agugugugcaugug

SEQ ID NO: 2085459 - RNA, 16 nt, Human
agugugugcaugugug

SEQ ID NO: 2085460 - RNA, 17 nt, Human
agugugugcaugugugc

SEQ ID NO: 2085461 - RNA, 23 nt, Human
agugugugcaugugugugcucag

SEQ ID NO: 2085462 - RNA, 21 nt, Human
aguguguggcuuucagagccu

SEQ ID NO: 2085463 - RNA, 17 nt, Human
agugugugcaugugugu

SEQ ID NO: 2085464 - RNA, 18 nt, Human
agugugugcaugugugug

SEQ ID NO: 2085465 - RNA, 20 nt, Human
uguugcccaggcuggcgugc

SEQ ID NO: 2085466 - RNA, 23 nt, Human
uguugcccaggcuggcgugcagu

SEQ ID NO: 2085467 - RNA, 12 nt, Human
uguugccagaga

SEQ ID NO: 2085468 - RNA, 19 nt, Human
agucucgcucuguugccca

SEQ ID NO: 2085469 - RNA, 19 nt, Human
agucucuucuccacuggau

SEQ ID NO: 2085470 - RNA, 16 nt, Human
agucucuagguucuga

SEQ ID NO: 2085471 - RNA, 14 nt, Human
agucuccuuccccu

SEQ ID NO: 2085472 - RNA, 21 nt, Human
agucucuucuccacuggaugg

SEQ ID NO: 2085473 - RNA, 15 nt, Human
agucucuuuaaucuu

SEQ ID NO: 2085474 - RNA, 17 nt, Human
agucucuuuaaucuuca

SEQ ID NO: 2085475 - RNA, 21 nt, Human
agucucuuuaaucuucaguuu

SEQ ID NO: 2085476 - RNA, 23 nt, Human
agucucuuuaaucuucaguuuua

SEQ ID NO: 2085477 - RNA, 22 nt, Human
agucucuuuaaucuucaguuuu

SEQ ID NO: 2085478 - RNA, 21 nt, Human
agucugaagcagaugcaaaga

SEQ ID NO: 2085479 - RNA, 14 nt, Human
agucugaagcagau

SEQ ID NO: 2085480 - RNA, 13 nt, Human
agucuuagaugua

SEQ ID NO: 2085481 - RNA, 14 nt, Human
agucuuagauguau

SEQ ID NO: 2085482 - RNA, 16 nt, Human
agucuuagauguauau

SEQ ID NO: 2085483 - RNA, 23 nt, Human
agucuuagauguauauauuuccu

SEQ ID NO: 2085484 - RNA, 14 nt, Human
ugugagaaaacguu

SEQ ID NO: 2085485 - RNA, 19 nt, Human
ugugacuucagcucuguuu

SEQ ID NO: 2085486 - RNA, 18 nt, Human
ugugacuucagcucuguu

SEQ ID NO: 2085487 - RNA, 20 nt, Human
ugugacugauguuaggcugg

SEQ ID NO: 2085488 - RNA, 23 nt, Human
ugugacugauguuaggcugggcc

SEQ ID NO: 2085489 - RNA, 16 nt, Human
ugucuccuaccucugc

SEQ ID NO: 2085490 - RNA, 22 nt, Human
ugucuccagacccccaccccuu

SEQ ID NO: 2085491 - RNA, 23 nt, Human
ugucuccagacccccaccccuuc

SEQ ID NO: 2085492 - RNA, 21 nt, Human
ugucucccagggccuuaaaag

SEQ ID NO: 2085493 - RNA, 12 nt, Human
ugucuccccucu

SEQ ID NO: 2085494 - RNA, 14 nt, Human
ugucuccccucugc

SEQ ID NO: 2085495 - RNA, 20 nt, Human
ugucucccuauaaugcugga

SEQ ID NO: 2085496 - RNA, 23 nt, Human
ugucucccuauaaugcuggagcg

SEQ ID NO: 2085497 - RNA, 11 nt, Human
ugucuccagac

SEQ ID NO: 2085498 - RNA, 12 nt, Human
ugucuccagacc

SEQ ID NO: 2085499 - RNA, 14 nt, Human
ugucuccagacccc

SEQ ID NO: 2085500 - RNA, 16 nt, Human
ugucuccagaccccca

SEQ ID NO: 2085501 - RNA, 17 nt, Human
ugucuccagacccccac

SEQ ID NO: 2085502 - RNA, 19 nt, Human
ugucuccagacccccaccc

SEQ ID NO: 2085503 - RNA, 20 nt, Human
ugucuccagacccccacccc

SEQ ID NO: 2085504 - RNA, 14 nt, Human
ugugagaaucaaaa

SEQ ID NO: 2085505 - RNA, 13 nt, Human
ugugagaccccca

SEQ ID NO: 2085506 - RNA, 14 nt, Human
ugugagacccccac

SEQ ID NO: 2085507 - RNA, 13 nt, Human
ugugagagaaagu

SEQ ID NO: 2085508 - RNA, 15 nt, Human
ugugagacccccaca

SEQ ID NO: 2085509 - RNA, 16 nt, Human
ugugagacccccacac

SEQ ID NO: 2085510 - RNA, 18 nt, Human
ugugagacccccacaccu

SEQ ID NO: 2085511 - RNA, 19 nt, Human
ugugagacccccacaccuc

SEQ ID NO: 2085512 - RNA, 22 nt, Human
ugugaugaugaaaugaggucag

SEQ ID NO: 2085513 - RNA, 15 nt, Human
ugugaugccacacag

SEQ ID NO: 2085514 - RNA, 17 nt, Human
ugugaugccacacagag

SEQ ID NO: 2085515 - RNA, 14 nt, Human
ugugaugaggggag

SEQ ID NO: 2085516 - RNA, 23 nt, Human
agugagcugagaucgugccguua

SEQ ID NO: 2085517 - RNA, 19 nt, Human
agugagccgcaucuucucc

SEQ ID NO: 2085518 - RNA, 24 nt, Human
agugagccgcaucuucuccaucug

SEQ ID NO: 2085519 - RNA, 20 nt, Human
agugagccgcaucuucucca

SEQ ID NO: 2085520 - RNA, 22 nt, Human
agugagccgcaucuucuccauc

SEQ ID NO: 2085521 - RNA, 12 nt, Human
agugagcugguu

SEQ ID NO: 2085522 - RNA, 15 nt, Human
agugacuguaucugu

SEQ ID NO: 2085523 - RNA, 16 nt, Human
agugacuguaucugug

SEQ ID NO: 2085524 - RNA, 17 nt, Human
agugacuguaucugugu

SEQ ID NO: 2085525 - RNA, 18 nt, Human
agugacuguaucugugua

SEQ ID NO: 2085526 - RNA, 20 nt, Human
agugacuguaucuguguaga

SEQ ID NO: 2085527 - RNA, 20 nt, Human
agugacuguggccauggucc

SEQ ID NO: 2085528 - RNA, 22 nt, Human
agugagagggcaugcgcacaag

SEQ ID NO: 2085529 - RNA, 14 nt, Human
agugagagggcaug

SEQ ID NO: 2085530 - RNA, 13 nt, Human
agugagagggcau

SEQ ID NO: 2085531 - RNA, 12 nt, Human
agugagaagaau

SEQ ID NO: 2085532 - RNA, 14 nt, Human
agugagaagaauau

SEQ ID NO: 2085533 - RNA, 17 nt, Human
agugagaagaauauugu

SEQ ID NO: 2085534 - RNA, 19 nt, Human
agugagaagaauauuguuc

SEQ ID NO: 2085535 - RNA, 23 nt, Human
agugagaagaauauuguuccuaa

SEQ ID NO: 2085536 - RNA, 22 nt, Human
agugagcacuaaggugugcucu

SEQ ID NO: 2085537 - RNA, 14 nt, Human
agugagcacuaagg

SEQ ID NO: 2085538 - RNA, 17 nt, Human
agucuugugacuagugc

SEQ ID NO: 2085539 - RNA, 20 nt, Human
agucuugugacuagugcuga

SEQ ID NO: 2085540 - RNA, 21 nt, Human
agucuugugacuagugcugaa

SEQ ID NO: 2085541 - RNA, 23 nt, Human
agucuugugacuagugcugaagc

SEQ ID NO: 2085542 - RNA, 22 nt, Human
agucuugugacuagugcugaag

SEQ ID NO: 2085543 - RNA, 21 nt, Human
agugacugauggcuaauguac

SEQ ID NO: 2085544 - RNA, 13 nt, Human
agugaaccaucau

SEQ ID NO: 2085545 - RNA, 21 nt, Human
agugaaccaucauuauaaacg

SEQ ID NO: 2085546 - RNA, 18 nt, Human
agugacucauccucuuga

SEQ ID NO: 2085547 - RNA, 23 nt, Human
agugacucauccucuugaagaug

SEQ ID NO: 2085548 - RNA, 20 nt, Human
agucuuucacaguaccaucu

SEQ ID NO: 2085549 - RNA, 18 nt, Human
agugaacacauuguguca

SEQ ID NO: 2085550 - RNA, 18 nt, Human
agugaacauuuggguaaa

SEQ ID NO: 2085551 - RNA, 16 nt, Human
agugaacuugggccac

SEQ ID NO: 2085552 - RNA, 17 nt, Human
ugugccuauagucccag

SEQ ID NO: 2085553 - RNA, 20 nt, Human
ugugccuauagucccagcua

SEQ ID NO: 2085554 - RNA, 22 nt, Human
ugugcucaugcauugcuugugu

SEQ ID NO: 2085555 - RNA, 17 nt, Human
ugugcuccccuuugccu

SEQ ID NO: 2085556 - RNA, 20 nt, Human
ugugcugcccgucuucagcc

SEQ ID NO: 2085557 - RNA, 18 nt, Human
agugagcaaaccugcccc

SEQ ID NO: 2085558 - RNA, 23 nt, Human
agugagcugguuuuuagcggaga

SEQ ID NO: 2085559 - RNA, 14 nt, Human
uguggaugauaaaa

SEQ ID NO: 2085560 - RNA, 17 nt, Human
ugugcugugguuccugg

SEQ ID NO: 2085561 - RNA, 12 nt, Human
ugugcugugacu

SEQ ID NO: 2085562 - RNA, 21 nt, Human
agugcagcccguguggccccu

SEQ ID NO: 2085563 - RNA, 23 nt, Human
agugcaguggugcgaucauggcu

SEQ ID NO: 2085564 - RNA, 15 nt, Human
agugcagcaaccaga

SEQ ID NO: 2085565 - RNA, 18 nt, Human
agugcagcaaccagagca

SEQ ID NO: 2085566 - RNA, 19 nt, Human
agugcagcaaccagagcac

SEQ ID NO: 2085567 - RNA, 20 nt, Human
agugcagcaaccagagcacu

SEQ ID NO: 2085568 - RNA, 21 nt, Human
agugcagcaaccagagcacug

SEQ ID NO: 2085569 - RNA, 22 nt, Human
agugcagcaaccagagcacugu

SEQ ID NO: 2085570 - RNA, 17 nt, Human
agugcagugagccgaga

SEQ ID NO: 2085571 - RNA, 15 nt, Human
agugcauuuucccag

SEQ ID NO: 2085572 - RNA, 17 nt, Human
agugcauuuucccagau

SEQ ID NO: 2085573 - RNA, 17 nt, Human
agugagcuguaggugug

SEQ ID NO: 2085574 - RNA, 21 nt, Human
agugagcuuggaaaggaccag

SEQ ID NO: 2085575 - RNA, 13 nt, Human
agugaggcccagg

SEQ ID NO: 2085576 - RNA, 15 nt, Human
agugaggcccaggga

SEQ ID NO: 2085577 - RNA, 23 nt, Human
agugauuuuuauccaaucuuguu

SEQ ID NO: 2085578 - RNA, 21 nt, Human
agugcaaagauuugcuuuaau

SEQ ID NO: 2085579 - RNA, 17 nt, Human
agugcaacacugaagcu

SEQ ID NO: 2085580 - RNA, 18 nt, Human
agugcaaauuugauacau

SEQ ID NO: 2085581 - RNA, 15 nt, Human
agugcaacaguagca

SEQ ID NO: 2085582 - RNA, 19 nt, Human
agugauaauuucuggaauu

SEQ ID NO: 2085583 - RNA, 23 nt, Human
agugauacaacuucaagugcaug

SEQ ID NO: 2085584 - RNA, 17 nt, Human
agugauacaacuucaag

SEQ ID NO: 2085585 - RNA, 13 nt, Human
auagaaaugcugg

SEQ ID NO: 2085586 - RNA, 16 nt, Human
auacuguacuuaauaa

SEQ ID NO: 2085587 - RNA, 17 nt, Human
auacuguacuuaauaaa

SEQ ID NO: 2085588 - RNA, 19 nt, Human
auagaaaugcugguuuuuc

SEQ ID NO: 2085589 - RNA, 22 nt, Human
auagaaaugcugguuuuucagu

SEQ ID NO: 2085590 - RNA, 21 nt, Human
auagaacucaguuuuaacuag

SEQ ID NO: 2085591 - RNA, 14 nt, Human
auagaaguuuagau

SEQ ID NO: 2085592 - RNA, 19 nt, Human
auagaagaacugcaaaggu

SEQ ID NO: 2085593 - RNA, 20 nt, Human
auagaagaauacaaacauau

SEQ ID NO: 2085594 - RNA, 13 nt, Human
auagaagaaaaaa

SEQ ID NO: 2085595 - RNA, 14 nt, Human
auagaagaaaaaag

SEQ ID NO: 2085596 - RNA, 17 nt, Human
auagaagaaaaaagaau

SEQ ID NO: 2085597 - RNA, 19 nt, Human
auagaagaaaaaagaaugu

SEQ ID NO: 2085598 - RNA, 23 nt, Human
auagaagaaaaaagaaugucaga

SEQ ID NO: 2085599 - RNA, 15 nt, Human
auagaagaacugcaa

SEQ ID NO: 2085600 - RNA, 15 nt, Human
auagaacucugggcu

SEQ ID NO: 2085601 - RNA, 14 nt, Human
auagaagauguuug

SEQ ID NO: 2085602 - RNA, 12 nt, Human
auagaaggaaac

SEQ ID NO: 2085603 - RNA, 14 nt, Human
auagaaggaaacua

SEQ ID NO: 2085604 - RNA, 17 nt, Human
auagaaggaaacuagcu

SEQ ID NO: 2085605 - RNA, 18 nt, Human
auagaaggaaacuagcuu

SEQ ID NO: 2085606 - RNA, 10 nt, Human
auagaaggag

SEQ ID NO: 2085607 - RNA, 15 nt, Human
auagaaggaggagag

SEQ ID NO: 2085608 - RNA, 16 nt, Human
auagaaggaggagagg

SEQ ID NO: 2085609 - RNA, 19 nt, Human
auagaaggauguacauuuc

SEQ ID NO: 2085610 - RNA, 19 nt, Human
auagaauauaauuaucgga

SEQ ID NO: 2085611 - RNA, 18 nt, Human
auagaaugguaucaauaa

SEQ ID NO: 2085612 - RNA, 22 nt, Human
auagaauauuuauuaccucuga

SEQ ID NO: 2085613 - RNA, 19 nt, Human
auagaauauuuauuaccuc

SEQ ID NO: 2085614 - RNA, 13 nt, Human
auagaauauuuau

SEQ ID NO: 2085615 - RNA, 12 nt, Human
auagaauauuua

SEQ ID NO: 2085616 - RNA, 20 nt, Human
auagacaguauauuuauagu

SEQ ID NO: 2085617 - RNA, 18 nt, Human
auagaauugcaauuuuaa

SEQ ID NO: 2085618 - RNA, 20 nt, Human
auagaauugcaauuuuaaca

SEQ ID NO: 2085619 - RNA, 13 nt, Human
auagaauuuuuaa

SEQ ID NO: 2085620 - RNA, 17 nt, Human
auagaauuuuuaauguu

SEQ ID NO: 2085621 - RNA, 19 nt, Human
auagaauuuuuaauguuuu

SEQ ID NO: 2085622 - RNA, 14 nt, Human
auagaugcccugcu

SEQ ID NO: 2085623 - RNA, 22 nt, Human
auagauguagauaaacucagaa

SEQ ID NO: 2085624 - RNA, 19 nt, Human
auagaugucccuuucuugg

SEQ ID NO: 2085625 - RNA, 22 nt, Human
auagaugucccuuucuuggcca

SEQ ID NO: 2085626 - RNA, 23 nt, Human
auagaugucccuuucuuggccag

SEQ ID NO: 2085627 - RNA, 15 nt, Human
auagauaacucuuug

SEQ ID NO: 2085628 - RNA, 17 nt, Human
auagauaacucuuugga

SEQ ID NO: 2085629 - RNA, 15 nt, Human
auagaucacauaaca

SEQ ID NO: 2085630 - RNA, 17 nt, Human
auagaucacauaacaga

SEQ ID NO: 2085631 - RNA, 19 nt, Human
auagaucacauaacagaau

SEQ ID NO: 2085632 - RNA, 21 nt, Human
auagaucacauaacagaaugc

SEQ ID NO: 2085633 - RNA, 14 nt, Human
auagauuucugauu

SEQ ID NO: 2085634 - RNA, 15 nt, Human
auagauuucugauuu

SEQ ID NO: 2085635 - RNA, 16 nt, Human
auagauuucugauuuu

SEQ ID NO: 2085636 - RNA, 19 nt, Human
auagauuucugauuuuaug

SEQ ID NO: 2085637 - RNA, 21 nt, Human
auagauuucugauuuuaugua

SEQ ID NO: 2085638 - RNA, 23 nt, Human
auagauuggagccaccaugccca

SEQ ID NO: 2085639 - RNA, 13 nt, Human
auagauucaccug

SEQ ID NO: 2085640 - RNA, 15 nt, Human
auagauucaccugua

SEQ ID NO: 2085641 - RNA, 18 nt, Human
auagauucaccuguaaaa

SEQ ID NO: 2085642 - RNA, 19 nt, Human
auagauucaccuguaaaac

SEQ ID NO: 2085643 - RNA, 21 nt, Human
auagauucaccuguaaaacuu

SEQ ID NO: 2085644 - RNA, 22 nt, Human
auagauucaccuguaaaacuuu

SEQ ID NO: 2085645 - RNA, 23 nt, Human
auagauucaccuguaaaacuuua

SEQ ID NO: 2085646 - RNA, 15 nt, Human
auagauuagauuaua

SEQ ID NO: 2085647 - RNA, 23 nt, Human
auagauuagauuauauugagaca

SEQ ID NO: 2085648 - RNA, 14 nt, Human
auagaguauaugca

SEQ ID NO: 2085649 - RNA, 15 nt, Human
auagaguauaugcac

SEQ ID NO: 2085650 - RNA, 15 nt, Human
auagaggugagggaa

SEQ ID NO: 2085651 - RNA, 22 nt, Human
auagaggugagggaagccugaa

SEQ ID NO: 2085652 - RNA, 16 nt, Human
auagacauuuguaaau

SEQ ID NO: 2085653 - RNA, 15 nt, Human
auagacuagagaaac

SEQ ID NO: 2085654 - RNA, 17 nt, Human
auagacuagagaaaccg

SEQ ID NO: 2085655 - RNA, 14 nt, Human
auagagagagacca

SEQ ID NO: 2085656 - RNA, 14 nt, Human
auagagacuguaga

SEQ ID NO: 2085657 - RNA, 23 nt, Human
auagagacuguagauugcuucug

SEQ ID NO: 2085658 - RNA, 19 nt, Human
uuauuaugcauaacugaca

SEQ ID NO: 2085659 - RNA, 20 nt, Human
uuauuaugcauaacugacaa

SEQ ID NO: 2085660 - RNA, 15 nt, Human
uuauguuacaucugu

SEQ ID NO: 2085661 - RNA, 18 nt, Human
uuauguuauugaaaaaaa

SEQ ID NO: 2085662 - RNA, 16 nt, Human
uuauucaguuaagaaa

SEQ ID NO: 2085663 - RNA, 17 nt, Human
uuauucaguuaagaaaa

SEQ ID NO: 2085664 - RNA, 18 nt, Human
uuauucaguuaagaaaaa

SEQ ID NO: 2085665 - RNA, 12 nt, Human
uuauucauugug

SEQ ID NO: 2085666 - RNA, 19 nt, Human
uuauucaccauguaaaaca

SEQ ID NO: 2085667 - RNA, 20 nt, Human
uuauucaccauguaaaacaa

SEQ ID NO: 2085668 - RNA, 21 nt, Human
uuauucacugaaguucuccug

SEQ ID NO: 2085669 - RNA, 19 nt, Human
uuauucaauuccucuggga

SEQ ID NO: 2085670 - RNA, 18 nt, Human
uuauucaauuccucuggg

SEQ ID NO: 2085671 - RNA, 16 nt, Human
uuauuauuuucaccug

SEQ ID NO: 2085672 - RNA, 11 nt, Human
uuauucaaggu

SEQ ID NO: 2085673 - RNA, 15 nt, Human
uuauucaagguaaaa

SEQ ID NO: 2085674 - RNA, 22 nt, Human
uuauuccuauauaguuuauuga

SEQ ID NO: 2085675 - RNA, 16 nt, Human
uuauucccuguacaau

SEQ ID NO: 2085676 - RNA, 19 nt, Human
uuauucccuuucacaaaau

SEQ ID NO: 2085677 - RNA, 20 nt, Human
uuauuccuauauaguuuauu

SEQ ID NO: 2085678 - RNA, 22 nt, Human
auacucuuaggaagagaaacca

SEQ ID NO: 2085679 - RNA, 21 nt, Human
auacucuuaggaagagaaacc

SEQ ID NO: 2085680 - RNA, 16 nt, Human
auacucugcuuagaau

SEQ ID NO: 2085681 - RNA, 19 nt, Human
auacucuuaggaagagaaa

SEQ ID NO: 2085682 - RNA, 15 nt, Human
auacucugucagaug

SEQ ID NO: 2085683 - RNA, 16 nt, Human
auacucugucagaugg

SEQ ID NO: 2085684 - RNA, 12 nt, Human
auacucugucag

SEQ ID NO: 2085685 - RNA, 13 nt, Human
auacucugucaga

SEQ ID NO: 2085686 - RNA, 14 nt, Human
auacucugucagau

SEQ ID NO: 2085687 - RNA, 13 nt, Human
auacucuaauucu

SEQ ID NO: 2085688 - RNA, 14 nt, Human
auacucuaauucua

SEQ ID NO: 2085689 - RNA, 15 nt, Human
auacucuaauucuaa

SEQ ID NO: 2085690 - RNA, 16 nt, Human
auacucuaauucuaac

SEQ ID NO: 2085691 - RNA, 18 nt, Human
auacucuaauucuaacca

SEQ ID NO: 2085692 - RNA, 22 nt, Human
auacuccaaccauauggauauu

SEQ ID NO: 2085693 - RNA, 22 nt, Human
auacugagggaccaacugggcc

SEQ ID NO: 2085694 - RNA, 14 nt, Human
auacugagggacca

SEQ ID NO: 2085695 - RNA, 22 nt, Human
auacugcccggggcagcugcca

SEQ ID NO: 2085696 - RNA, 14 nt, Human
auacucugucuccc

SEQ ID NO: 2085697 - RNA, 13 nt, Human
auacuggaaguuu

SEQ ID NO: 2085698 - RNA, 19 nt, Human
auacuggaaguuuugcauu

SEQ ID NO: 2085699 - RNA, 20 nt, Human
auacuggaaguuuugcauuu

SEQ ID NO: 2085700 - RNA, 14 nt, Human
auacuggaaguuuu

SEQ ID NO: 2085701 - RNA, 16 nt, Human
auacuggaaguuuugc

SEQ ID NO: 2085702 - RNA, 17 nt, Human
auacuggaaguuuugca

SEQ ID NO: 2085703 - RNA, 18 nt, Human
auacuggaaguuuugcau

SEQ ID NO: 2085704 - RNA, 21 nt, Human
auacuggugcagucauuauga

SEQ ID NO: 2085705 - RNA, 13 nt, Human
auacgauaaauaa

SEQ ID NO: 2085706 - RNA, 17 nt, Human
auacgacuuuauuuucu

SEQ ID NO: 2085707 - RNA, 20 nt, Human
auacgccagaacugcuuuau

SEQ ID NO: 2085708 - RNA, 21 nt, Human
auacgccuguaguccuagcca

SEQ ID NO: 2085709 - RNA, 13 nt, Human
auacgacuuuauu

SEQ ID NO: 2085710 - RNA, 14 nt, Human
auacaugguuguga

SEQ ID NO: 2085711 - RNA, 20 nt, Human
auacaugguugugaccugag

SEQ ID NO: 2085712 - RNA, 12 nt, Human
auacauuaaagc

SEQ ID NO: 2085713 - RNA, 13 nt, Human
auacauuaaagca

SEQ ID NO: 2085714 - RNA, 14 nt, Human
auacauuaaagcag

SEQ ID NO: 2085715 - RNA, 15 nt, Human
auacauuaaagcagu

SEQ ID NO: 2085716 - RNA, 16 nt, Human
auacauuaaagcaguc

SEQ ID NO: 2085717 - RNA, 19 nt, Human
uuauauuuuacuacugugg

SEQ ID NO: 2085718 - RNA, 17 nt, Human
uuauauuuuuaauaaaa

SEQ ID NO: 2085719 - RNA, 19 nt, Human
uuauauuuuuaauaaaagu

SEQ ID NO: 2085720 - RNA, 15 nt, Human
uuauauuuuuauaga

SEQ ID NO: 2085721 - RNA, 12 nt, Human
uuauauuuucaa

SEQ ID NO: 2085722 - RNA, 19 nt, Human
uuaucaauuacaacaguga

SEQ ID NO: 2085723 - RNA, 14 nt, Human
uuaucaauuuguca

SEQ ID NO: 2085724 - RNA, 15 nt, Human
uuaucaauuugucau

SEQ ID NO: 2085725 - RNA, 20 nt, Human
uuaucaauuugucauuuuga

SEQ ID NO: 2085726 - RNA, 21 nt, Human
uuaucaauuugucauuuugaa

SEQ ID NO: 2085727 - RNA, 23 nt, Human
uuaucaauuugucauuuugaagc

SEQ ID NO: 2085728 - RNA, 19 nt, Human
uuaucacacaaagcagaau

SEQ ID NO: 2085729 - RNA, 13 nt, Human
uuaucacacaaag

SEQ ID NO: 2085730 - RNA, 18 nt, Human
uuaucacauuauuugcau

SEQ ID NO: 2085731 - RNA, 13 nt, Human
auacuaaaaauca

SEQ ID NO: 2085732 - RNA, 18 nt, Human
auacuaaaaaucaugaga

SEQ ID NO: 2085733 - RNA, 21 nt, Human
uuaguagaaauuuuacaauag

SEQ ID NO: 2085734 - RNA, 16 nt, Human
auacagaggcaacugc

SEQ ID NO: 2085735 - RNA, 17 nt, Human
auacagaggcaacugca

SEQ ID NO: 2085736 - RNA, 14 nt, Human
auacaauaacauaa

SEQ ID NO: 2085737 - RNA, 22 nt, Human
auacaagccauucuaaggaaau

SEQ ID NO: 2085738 - RNA, 10 nt, Human
auacaauaaa

SEQ ID NO: 2085739 - RNA, 12 nt, Human
auacaauaaacu

SEQ ID NO: 2085740 - RNA, 20 nt, Human
auacaauaaacuauuggaaa

SEQ ID NO: 2085741 - RNA, 21 nt, Human
auacaauaaacuauuggaaag

SEQ ID NO: 2085742 - RNA, 17 nt, Human
auacaaguucuauuuaa

SEQ ID NO: 2085743 - RNA, 12 nt, Human
auacaagauaag

SEQ ID NO: 2085744 - RNA, 15 nt, Human
auacaagauaagcuu

SEQ ID NO: 2085745 - RNA, 18 nt, Human
auacaagauaagcuucca

SEQ ID NO: 2085746 - RNA, 16 nt, Human
auacaacuuaaauaau

SEQ ID NO: 2085747 - RNA, 14 nt, Human
auacaguguuauuu

SEQ ID NO: 2085748 - RNA, 15 nt, Human
auacaguguuauuuu

SEQ ID NO: 2085749 - RNA, 13 nt, Human
auacauacacaua

SEQ ID NO: 2085750 - RNA, 16 nt, Human
auacauacacauauau

SEQ ID NO: 2085751 - RNA, 17 nt, Human
auacauacacauauaua

SEQ ID NO: 2085752 - RNA, 12 nt, Human
auacauaacagg

SEQ ID NO: 2085753 - RNA, 22 nt, Human
auacauaacaggguaaauuauu

SEQ ID NO: 2085754 - RNA, 23 nt, Human
auacaguguuauuuucuuugaaa

SEQ ID NO: 2085755 - RNA, 14 nt, Human
auacauggauaaca

SEQ ID NO: 2085756 - RNA, 24 nt, Human
auacauggguagcuucugaccuca

SEQ ID NO: 2085757 - RNA, 23 nt, Human
auacaggaaaagcugcugacagu

SEQ ID NO: 2085758 - RNA, 23 nt, Human
auacagauagauauaugcucugc

SEQ ID NO: 2085759 - RNA, 14 nt, Human
uuauccaaucuugu

SEQ ID NO: 2085760 - RNA, 17 nt, Human
uuauccaaucuuguuuc

SEQ ID NO: 2085761 - RNA, 22 nt, Human
uuauccaagguguaacucuaau

SEQ ID NO: 2085762 - RNA, 22 nt, Human
uuaucccacggaaaaugccaau

SEQ ID NO: 2085763 - RNA, 15 nt, Human
uuaugaacugcaugu

SEQ ID NO: 2085764 - RNA, 22 nt, Human
uuaugaacugcauguauaaaug

SEQ ID NO: 2085765 - RNA, 23 nt, Human
uuaugaacugcauguauaaauga

SEQ ID NO: 2085766 - RNA, 18 nt, Human
uuaugaagaaaaaauaca

SEQ ID NO: 2085767 - RNA, 23 nt, Human
uuaugaagaaaaaauacauuuua

SEQ ID NO: 2085768 - RNA, 18 nt, Human
uuaugaaagguuuacauu

SEQ ID NO: 2085769 - RNA, 17 nt, Human
uuaugaauauuuauaac

SEQ ID NO: 2085770 - RNA, 19 nt, Human
uuaugaauauuuauaacag

SEQ ID NO: 2085771 - RNA, 22 nt, Human
uuaugaauauuuauaacagcau

SEQ ID NO: 2085772 - RNA, 14 nt, Human
uuaugaaugaaaaa

SEQ ID NO: 2085773 - RNA, 14 nt, Human
uuaugacaguuaua

SEQ ID NO: 2085774 - RNA, 18 nt, Human
uuaugauauuuuuuuaag

SEQ ID NO: 2085775 - RNA, 21 nt, Human
uuaugauauuuuuuuaagucu

SEQ ID NO: 2085776 - RNA, 13 nt, Human
uuaugauaaaaaa

SEQ ID NO: 2085777 - RNA, 19 nt, Human
uuaugauaaaaaauuuugu

SEQ ID NO: 2085778 - RNA, 21 nt, Human
uuaugauaaaaaauuuuguaa

SEQ ID NO: 2085779 - RNA, 13 nt, Human
uuaugaguuuuug

SEQ ID NO: 2085780 - RNA, 15 nt, Human
uuaugaguuuuugau

SEQ ID NO: 2085781 - RNA, 21 nt, Human
uuaugaguuuuugauagcuuu

SEQ ID NO: 2085782 - RNA, 23 nt, Human
uuaugaguuuuugauagcuuuau

SEQ ID NO: 2085783 - RNA, 18 nt, Human
uuaugagcucauguagca

SEQ ID NO: 2085784 - RNA, 18 nt, Human
uuaugaggagugaacauu

SEQ ID NO: 2085785 - RNA, 20 nt, Human
uuaugaugugggucaaggaa

SEQ ID NO: 2085786 - RNA, 21 nt, Human
uuaugaugugggucaaggaau

SEQ ID NO: 2085787 - RNA, 11 nt, Human
uuaugguuuug

SEQ ID NO: 2085788 - RNA, 17 nt, Human
uuaugguuuugugaugu

SEQ ID NO: 2085789 - RNA, 18 nt, Human
uuaugucuaaaauccugc

SEQ ID NO: 2085790 - RNA, 19 nt, Human
uuauguauguuuacacugu

SEQ ID NO: 2085791 - RNA, 19 nt, Human
uuaugucugcugaauaaua

SEQ ID NO: 2085792 - RNA, 21 nt, Human
uuaugucugcugaauaauaaa

SEQ ID NO: 2085793 - RNA, 16 nt, Human
uuauguaauaauguga

SEQ ID NO: 2085794 - RNA, 17 nt, Human
uuauguaauaaugugaa

SEQ ID NO: 2085795 - RNA, 15 nt, Human
uuauguagaugugca

SEQ ID NO: 2085796 - RNA, 21 nt, Human
uuauguaauaaugugaaucau

SEQ ID NO: 2085797 - RNA, 21 nt, Human
uuauguauauuuaaaagaaag

SEQ ID NO: 2085798 - RNA, 16 nt, Human
uuauguagaugugcau

SEQ ID NO: 2085799 - RNA, 23 nt, Human
uuaugugaaugaucucucugaau

SEQ ID NO: 2085800 - RNA, 13 nt, Human
uuaugugagagaa

SEQ ID NO: 2085801 - RNA, 18 nt, Human
uuauguguaugugccauu

SEQ ID NO: 2085802 - RNA, 19 nt, Human
uuaugugugaggagcugcu

SEQ ID NO: 2085803 - RNA, 18 nt, Human
uuaugugccguguuauug

SEQ ID NO: 2085804 - RNA, 19 nt, Human
uuauguguaugugccauuu

SEQ ID NO: 2085805 - RNA, 12 nt, Human
uuauguguguau

SEQ ID NO: 2085806 - RNA, 18 nt, Human
uuauguguguauauguau

SEQ ID NO: 2085807 - RNA, 22 nt, Human
uuauguguguauauguaugugu

SEQ ID NO: 2085808 - RNA, 20 nt, Human
aguuuuuauugcuuguugga

SEQ ID NO: 2085809 - RNA, 18 nt, Human
aguuuuguuuuaaaauua

SEQ ID NO: 2085810 - RNA, 21 nt, Human
aguuuguuuauuacuuauuug

SEQ ID NO: 2085811 - RNA, 16 nt, Human
aguuuuugauagcuuu

SEQ ID NO: 2085812 - RNA, 16 nt, Human
aguuuuuguaauuuau

SEQ ID NO: 2085813 - RNA, 17 nt, Human
aguuuuuucucuugggc

SEQ ID NO: 2085814 - RNA, 18 nt, Human
aguuuuuucucuugggcu

SEQ ID NO: 2085815 - RNA, 21 nt, Human
aguuuuaguugcagaaacauu

SEQ ID NO: 2085816 - RNA, 15 nt, Human
aguuuuaguugcaga

SEQ ID NO: 2085817 - RNA, 21 nt, Human
uuaagaaaaaauaacacacau

SEQ ID NO: 2085818 - RNA, 20 nt, Human
uuaagaaaaaauaacacaca

SEQ ID NO: 2085819 - RNA, 14 nt, Human
uuaagaaaaaaaua

SEQ ID NO: 2085820 - RNA, 15 nt, Human
uuaagaaaaaaauaa

SEQ ID NO: 2085821 - RNA, 16 nt, Human
uuaagaaaaaaauaau

SEQ ID NO: 2085822 - RNA, 17 nt, Human
uuaagaaaaaaauaauu

SEQ ID NO: 2085823 - RNA, 23 nt, Human
uuaagaaaaaaauaauuuuauga

SEQ ID NO: 2085824 - RNA, 19 nt, Human
uuaagaccaccucaaauuu

SEQ ID NO: 2085825 - RNA, 14 nt, Human
uuaagaccagccug

SEQ ID NO: 2085826 - RNA, 15 nt, Human
uuaagaccagccugg

SEQ ID NO: 2085827 - RNA, 16 nt, Human
uuaauaaaaguacaug

SEQ ID NO: 2085828 - RNA, 16 nt, Human
uuaauaaaacacuauu

SEQ ID NO: 2085829 - RNA, 18 nt, Human
uuaauaaaacacuauuuu

SEQ ID NO: 2085830 - RNA, 11 nt, Human
uuaauaaaaag

SEQ ID NO: 2085831 - RNA, 14 nt, Human
uuaauaaaaaggca

SEQ ID NO: 2085832 - RNA, 15 nt, Human
uuaauaaaaaggcac

SEQ ID NO: 2085833 - RNA, 17 nt, Human
uuaauccacacaucagu

SEQ ID NO: 2085834 - RNA, 21 nt, Human
uuaauccuagcugugugcagu

SEQ ID NO: 2085835 - RNA, 18 nt, Human
uuaauuugaugaaagcug

SEQ ID NO: 2085836 - RNA, 20 nt, Human
uuaauuuaugaguuuuugau

SEQ ID NO: 2085837 - RNA, 15 nt, Human
uuaauuuaugaguuu

SEQ ID NO: 2085838 - RNA, 18 nt, Human
uuaauuuaugaguuuuug

SEQ ID NO: 2085839 - RNA, 22 nt, Human
uuaaucuucaguuuuaucuuua

SEQ ID NO: 2085840 - RNA, 15 nt, Human
uuaaucuucaguuuu

SEQ ID NO: 2085841 - RNA, 17 nt, Human
uuaaucuucaguuuuau

SEQ ID NO: 2085842 - RNA, 13 nt, Human
uuaauuuucagua

SEQ ID NO: 2085843 - RNA, 23 nt, Human
uuaauuuuguaaaggugaaaaaa

SEQ ID NO: 2085844 - RNA, 13 nt, Human
uuaauuugccaaa

SEQ ID NO: 2085845 - RNA, 18 nt, Human
uuaauuugccaaaauaau

SEQ ID NO: 2085846 - RNA, 20 nt, Human
uuaauuugccaaaauaaugu

SEQ ID NO: 2085847 - RNA, 14 nt, Human
aguuuagaggaaaa

SEQ ID NO: 2085848 - RNA, 16 nt, Human
aguuuacuauuuuacu

SEQ ID NO: 2085849 - RNA, 14 nt, Human
aguuuacuauuuua

SEQ ID NO: 2085850 - RNA, 15 nt, Human
aguuuacuauuuuac

SEQ ID NO: 2085851 - RNA, 13 nt, Human
aguuuaccauuug

SEQ ID NO: 2085852 - RNA, 14 nt, Human
aguuuaccauuugu

SEQ ID NO: 2085853 - RNA, 16 nt, Human
aguuuaccauuuguaa

SEQ ID NO: 2085854 - RNA, 17 nt, Human
aguuuaccauuuguaau

SEQ ID NO: 2085855 - RNA, 18 nt, Human
aguuuaccauuuguaaua

SEQ ID NO: 2085856 - RNA, 19 nt, Human
aguuuaccauuuguaauaa

SEQ ID NO: 2085857 - RNA, 21 nt, Human
aguuuaccauuuguaauaaag

SEQ ID NO: 2085858 - RNA, 22 nt, Human
aguuuaccauuuguaauaaagu

SEQ ID NO: 2085859 - RNA, 21 nt, Human
aguuuagaggaaaaaaaugac

SEQ ID NO: 2085860 - RNA, 19 nt, Human
aguuuagaggaaaaaaaug

SEQ ID NO: 2085861 - RNA, 12 nt, Human
uuaaaaaaguuu

SEQ ID NO: 2085862 - RNA, 15 nt, Human
uuaaaaaaguuuaaa

SEQ ID NO: 2085863 - RNA, 18 nt, Human
uuaaaaaaguuuaaaaug

SEQ ID NO: 2085864 - RNA, 20 nt, Human
uuaaaaaaguuuaaaaugua

SEQ ID NO: 2085865 - RNA, 13 nt, Human
aguuaggaaauaa

SEQ ID NO: 2085866 - RNA, 14 nt, Human
aguuaggaaauaaa

SEQ ID NO: 2085867 - RNA, 12 nt, Human
aguuaggaaaua

SEQ ID NO: 2085868 - RNA, 19 nt, Human
aguuagcucaggaggcuug

SEQ ID NO: 2085869 - RNA, 22 nt, Human
aguuagcucaggaggcuuggaa

SEQ ID NO: 2085870 - RNA, 15 nt, Human
aguuaggaaauaaaa

SEQ ID NO: 2085871 - RNA, 12 nt, Human
uuaaaaaauguc

SEQ ID NO: 2085872 - RNA, 11 nt, Human
uuaaaaucuua

SEQ ID NO: 2085873 - RNA, 14 nt, Human
uuaaaaucuuaaac

SEQ ID NO: 2085874 - RNA, 12 nt, Human
uuaaaaauggua

SEQ ID NO: 2085875 - RNA, 13 nt, Human
uuaaaaaugguaa

SEQ ID NO: 2085876 - RNA, 14 nt, Human
uuaaaaaugguaaa

SEQ ID NO: 2085877 - RNA, 22 nt, Human
uuaaaaaugguaaaauugcaug

SEQ ID NO: 2085878 - RNA, 22 nt, Human
uuaaaauguauaaguugaggca

SEQ ID NO: 2085879 - RNA, 22 nt, Human
aguuuauugacaauaauuucag

SEQ ID NO: 2085880 - RNA, 13 nt, Human
aguuucucagcuc

SEQ ID NO: 2085881 - RNA, 14 nt, Human
aguuucucuuuuca

SEQ ID NO: 2085882 - RNA, 16 nt, Human
aguuuuaauccagaau

SEQ ID NO: 2085883 - RNA, 18 nt, Human
aguuuuaacuagaauuua

SEQ ID NO: 2085884 - RNA, 19 nt, Human
uuaacacugcuuguguuuu

SEQ ID NO: 2085885 - RNA, 12 nt, Human
uuaaauuuuucc

SEQ ID NO: 2085886 - RNA, 11 nt, Human
uuaaauaaaag

SEQ ID NO: 2085887 - RNA, 13 nt, Human
uuaaaguucugug

SEQ ID NO: 2085888 - RNA, 15 nt, Human
uuaaaguucugugua

SEQ ID NO: 2085889 - RNA, 18 nt, Human
uuaaaguucuguguauuu

SEQ ID NO: 2085890 - RNA, 19 nt, Human
uuaaaguucuguguauuua

SEQ ID NO: 2085891 - RNA, 15 nt, Human
uuaaauuuucuucag

SEQ ID NO: 2085892 - RNA, 16 nt, Human
uuaaauuuucuucagu

SEQ ID NO: 2085893 - RNA, 17 nt, Human
uuaaauuuucuucaguu

SEQ ID NO: 2085894 - RNA, 11 nt, Human
uuaaaguucug

SEQ ID NO: 2085895 - RNA, 20 nt, Human
uuacagggaugagccaccgc

SEQ ID NO: 2085896 - RNA, 14 nt, Human
uuacaggugugaac

SEQ ID NO: 2085897 - RNA, 18 nt, Human
uuacagguggacacacaa

SEQ ID NO: 2085898 - RNA, 18 nt, Human
uuacagggagcugggaca

SEQ ID NO: 2085899 - RNA, 15 nt, Human
auaacuauguugaua

SEQ ID NO: 2085900 - RNA, 19 nt, Human
auaacuaguguugcuugga

SEQ ID NO: 2085901 - RNA, 18 nt, Human
auaaauugcuccuugaca

SEQ ID NO: 2085902 - RNA, 15 nt, Human
auaacucaucauaaa

SEQ ID NO: 2085903 - RNA, 16 nt, Human
auaacucaucauaaaa

SEQ ID NO: 2085904 - RNA, 17 nt, Human
auaacucaucauaaaau

SEQ ID NO: 2085905 - RNA, 15 nt, Human
auaacuccucauugu

SEQ ID NO: 2085906 - RNA, 17 nt, Human
auaacuccucauuguaa

SEQ ID NO: 2085907 - RNA, 18 nt, Human
auaacucaucauaaaaua

SEQ ID NO: 2085908 - RNA, 19 nt, Human
auaacucaucauaaaauaa

SEQ ID NO: 2085909 - RNA, 14 nt, Human
uuacauaaauaaau

SEQ ID NO: 2085910 - RNA, 22 nt, Human
uuaccagccuccguauuucaga

SEQ ID NO: 2085911 - RNA, 20 nt, Human
uuaccagccuccguauuuca

SEQ ID NO: 2085912 - RNA, 21 nt, Human
uuaccagccuccguauuucag

SEQ ID NO: 2085913 - RNA, 23 nt, Human
uuaccagccuccguauuucagac

SEQ ID NO: 2085914 - RNA, 17 nt, Human
auaaaugcaauauguau

SEQ ID NO: 2085915 - RNA, 18 nt, Human
auaaaugcaauauguauu

SEQ ID NO: 2085916 - RNA, 20 nt, Human
auaaaugcaauauguauuaa

SEQ ID NO: 2085917 - RNA, 22 nt, Human
auaaaugcaauauguauuaaua

SEQ ID NO: 2085918 - RNA, 16 nt, Human
auaaauugcuccuuga

SEQ ID NO: 2085919 - RNA, 13 nt, Human
auaaauugcuccu

SEQ ID NO: 2085920 - RNA, 13 nt, Human
auaaauugaaaua

SEQ ID NO: 2085921 - RNA, 14 nt, Human
auaaauugaaauau

SEQ ID NO: 2085922 - RNA, 22 nt, Human
auaaauugaaauauaaugcaaa

SEQ ID NO: 2085923 - RNA, 12 nt, Human
auaaauugcaug

SEQ ID NO: 2085924 - RNA, 19 nt, Human
auaaauugcaugcugcuuu

SEQ ID NO: 2085925 - RNA, 20 nt, Human
auaaauugcaugcugcuuua

SEQ ID NO: 2085926 - RNA, 16 nt, Human
auaaauucuauaggaa

SEQ ID NO: 2085927 - RNA, 21 nt, Human
auaaauucuauaggaacauau

SEQ ID NO: 2085928 - RNA, 15 nt, Human
uuacaaacauguggu

SEQ ID NO: 2085929 - RNA, 12 nt, Human
uuacaaacaugu

SEQ ID NO: 2085930 - RNA, 12 nt, Human
uuacaaacugca

SEQ ID NO: 2085931 - RNA, 13 nt, Human
uuacaaacugcaa

SEQ ID NO: 2085932 - RNA, 14 nt, Human
uuacaaacugcaau

SEQ ID NO: 2085933 - RNA, 15 nt, Human
uuacaaacugcaaua

SEQ ID NO: 2085934 - RNA, 21 nt, Human
uuacaaacugcaauagagacu

SEQ ID NO: 2085935 - RNA, 22 nt, Human
uuacaaacugcaauagagacug

SEQ ID NO: 2085936 - RNA, 23 nt, Human
uuacaaacugcaauagagacugu

SEQ ID NO: 2085937 - RNA, 18 nt, Human
auaacuuuuuuuuaaguu

SEQ ID NO: 2085938 - RNA, 14 nt, Human
auaagauucauauu

SEQ ID NO: 2085939 - RNA, 16 nt, Human
uuagaagucacacagu

SEQ ID NO: 2085940 - RNA, 13 nt, Human
uuagaaguguuaa

SEQ ID NO: 2085941 - RNA, 11 nt, Human
uuacugucuua

SEQ ID NO: 2085942 - RNA, 12 nt, Human
uuacugucuuaa

SEQ ID NO: 2085943 - RNA, 13 nt, Human
uuacugucuuaau

SEQ ID NO: 2085944 - RNA, 15 nt, Human
uuacugucuuaauua

SEQ ID NO: 2085945 - RNA, 18 nt, Human
uuacugucuuaauuaagu

SEQ ID NO: 2085946 - RNA, 19 nt, Human
uuacugucuuaauuaagua

SEQ ID NO: 2085947 - RNA, 13 nt, Human
uuacugucaauaa

SEQ ID NO: 2085948 - RNA, 14 nt, Human
uuacugucaauaaa

SEQ ID NO: 2085949 - RNA, 15 nt, Human
uuacugucaauaaac

SEQ ID NO: 2085950 - RNA, 17 nt, Human
uuacugucaauaaacag

SEQ ID NO: 2085951 - RNA, 18 nt, Human
uuacugucaauaaacagc

SEQ ID NO: 2085952 - RNA, 20 nt, Human
uuacugucaauaaacagcuu

SEQ ID NO: 2085953 - RNA, 16 nt, Human
uuagaauguuuuccuu

SEQ ID NO: 2085954 - RNA, 21 nt, Human
uuagaaucagccuugaaacau

SEQ ID NO: 2085955 - RNA, 11 nt, Human
uuacuccccuu

SEQ ID NO: 2085956 - RNA, 20 nt, Human
uuacuccccuugagcugaga

SEQ ID NO: 2085957 - RNA, 15 nt, Human
uuacugcagcuuugu

SEQ ID NO: 2085958 - RNA, 21 nt, Human
uuacugccaaagggaaauauc

SEQ ID NO: 2085959 - RNA, 16 nt, Human
uuaccaguaaagugua

SEQ ID NO: 2085960 - RNA, 20 nt, Human
uuaccaguaaaguguaacau

SEQ ID NO: 2085961 - RNA, 22 nt, Human
uuaccaguaaaguguaacauau

SEQ ID NO: 2085962 - RNA, 15 nt, Human
uuaccauaugugcuu

SEQ ID NO: 2085963 - RNA, 13 nt, Human
uuacucagcccug

SEQ ID NO: 2085964 - RNA, 14 nt, Human
uuacucagcccugg

SEQ ID NO: 2085965 - RNA, 22 nt, Human
uuacucagcccugggccccacc

SEQ ID NO: 2085966 - RNA, 17 nt, Human
uuacucaugaucuugug

SEQ ID NO: 2085967 - RNA, 20 nt, Human
uuacucauuaaaaauaauag

SEQ ID NO: 2085968 - RNA, 17 nt, Human
uuacucauuaucgccuu

SEQ ID NO: 2085969 - RNA, 22 nt, Human
uuacugcuuuuaacuucugaua

SEQ ID NO: 2085970 - RNA, 18 nt, Human
uuaguuuuugugaaguuu

SEQ ID NO: 2085971 - RNA, 14 nt, Human
uuaguagagacagg

SEQ ID NO: 2085972 - RNA, 21 nt, Human
uuaguuuuugugaaguuuaau

SEQ ID NO: 2085973 - RNA, 19 nt, Human
uuauaaaaaaaaugaaaug

SEQ ID NO: 2085974 - RNA, 22 nt, Human
uuauaaaaaaaaugaaauguuu

SEQ ID NO: 2085975 - RNA, 13 nt, Human
uuaguagagacag

SEQ ID NO: 2085976 - RNA, 14 nt, Human
uuaguacccaccug

SEQ ID NO: 2085977 - RNA, 15 nt, Human
uuaguacccaccuga

SEQ ID NO: 2085978 - RNA, 18 nt, Human
uuaguacccaccugagcu

SEQ ID NO: 2085979 - RNA, 15 nt, Human
uuaguacuauaucug

SEQ ID NO: 2085980 - RNA, 18 nt, Human
uuaguacuauaucuguuu

SEQ ID NO: 2085981 - RNA, 19 nt, Human
uuaguacuauaucuguuuu

SEQ ID NO: 2085982 - RNA, 20 nt, Human
uuaguacuauaucuguuuua

SEQ ID NO: 2085983 - RNA, 16 nt, Human
uuauaaaauuaagcaa

SEQ ID NO: 2085984 - RNA, 10 nt, Human
uuauaaaauu

SEQ ID NO: 2085985 - RNA, 14 nt, Human
uuauaaaauuaaag

SEQ ID NO: 2085986 - RNA, 17 nt, Human
uuauaaaauuaaagaaa

SEQ ID NO: 2085987 - RNA, 20 nt, Human
uuauaaaauuaaagaaaaua

SEQ ID NO: 2085988 - RNA, 22 nt, Human
uuauaaaauuaaagaaaauaaa

SEQ ID NO: 2085989 - RNA, 12 nt, Human
uuagggaggggu

SEQ ID NO: 2085990 - RNA, 19 nt, Human
uuaggugugggggaagcac

SEQ ID NO: 2085991 - RNA, 13 nt, Human
uuaggucaagaag

SEQ ID NO: 2085992 - RNA, 14 nt, Human
uuagguuaggacuu

SEQ ID NO: 2085993 - RNA, 13 nt, Human
uuagguuaacuau

SEQ ID NO: 2085994 - RNA, 18 nt, Human
uuagguuaacuauguaca

SEQ ID NO: 2085995 - RNA, 19 nt, Human
uuagguuaacuauguacaa

SEQ ID NO: 2085996 - RNA, 18 nt, Human
uuagguuggcaaaaaggc

SEQ ID NO: 2085997 - RNA, 22 nt, Human
auaauauauguuuuaaauauag

SEQ ID NO: 2085998 - RNA, 21 nt, Human
auaagauucauauuuacuucu

SEQ ID NO: 2085999 - RNA, 16 nt, Human
auaagcaucaaacucu

SEQ ID NO: 2086000 - RNA, 17 nt, Human
auaagcaucaaacucuu

SEQ ID NO: 2086001 - RNA, 23 nt, Human
auaagcauggagaacagugauuu

SEQ ID NO: 2086002 - RNA, 22 nt, Human
auaaucuggacuccucugucca

SEQ ID NO: 2086003 - RNA, 20 nt, Human
auaauauuuuuaauuaaaua

SEQ ID NO: 2086004 - RNA, 12 nt, Human
auaauaugagaa

SEQ ID NO: 2086005 - RNA, 15 nt, Human
auaauaugagaauca

SEQ ID NO: 2086006 - RNA, 12 nt, Human
auaauaugcaca

SEQ ID NO: 2086007 - RNA, 20 nt, Human
auaauaugcacacagugcuu

SEQ ID NO: 2086008 - RNA, 21 nt, Human
auaauaugcugccaaauuuug

SEQ ID NO: 2086009 - RNA, 14 nt, Human
auaauauuuuuaau

SEQ ID NO: 2086010 - RNA, 18 nt, Human
auaauuauguuauugaaa

SEQ ID NO: 2086011 - RNA, 20 nt, Human
auaauuauguuauugaaaaa

SEQ ID NO: 2086012 - RNA, 22 nt, Human
auaauuauguuauugaaaaaaa

SEQ ID NO: 2086013 - RNA, 23 nt, Human
auaauuauguuauugaaaaaaau

SEQ ID NO: 2086014 - RNA, 19 nt, Human
auaauuaugacaguuauac

SEQ ID NO: 2086015 - RNA, 20 nt, Human
auaauuaugacaguuauacu

SEQ ID NO: 2086016 - RNA, 18 nt, Human
auaauuaugacaguuaua

SEQ ID NO: 2086017 - RNA, 19 nt, Human
auaauuuguacauauguaa

SEQ ID NO: 2086018 - RNA, 22 nt, Human
auaauuuguacauauguaaaau

SEQ ID NO: 2086019 - RNA, 21 nt, Human
auaauuucccaauuaggaagu

SEQ ID NO: 2086020 - RNA, 11 nt, Human
auaauuuccca

SEQ ID NO: 2086021 - RNA, 18 nt, Human
auaauuucccaauuagga

SEQ ID NO: 2086022 - RNA, 22 nt, Human
auaauuucccaauuaggaagug

SEQ ID NO: 2086023 - RNA, 13 nt, Human
aucuuucugcaga

SEQ ID NO: 2086024 - RNA, 11 nt, Human
aucuuucuucu

SEQ ID NO: 2086025 - RNA, 19 nt, Human
aucuuucuucuauuuuauu

SEQ ID NO: 2086026 - RNA, 22 nt, Human
aucuuucuucuauuuuauuccc

SEQ ID NO: 2086027 - RNA, 18 nt, Human
augaaagggcccagagag

SEQ ID NO: 2086028 - RNA, 12 nt, Human
aucuuuucuaca

SEQ ID NO: 2086029 - RNA, 13 nt, Human
aucuuuucuacag

SEQ ID NO: 2086030 - RNA, 14 nt, Human
aucuuuucuacagc

SEQ ID NO: 2086031 - RNA, 15 nt, Human
aucuuuucuacagca

SEQ ID NO: 2086032 - RNA, 17 nt, Human
aucuuuucuacagcaaa

SEQ ID NO: 2086033 - RNA, 20 nt, Human
aucuuuucuacagcaaauuu

SEQ ID NO: 2086034 - RNA, 22 nt, Human
aucuuuucuacagcaaauuuau

SEQ ID NO: 2086035 - RNA, 11 nt, Human
aucuuuugaac

SEQ ID NO: 2086036 - RNA, 17 nt, Human
aucuuugcagacaggca

SEQ ID NO: 2086037 - RNA, 12 nt, Human
uuggccucagaa

SEQ ID NO: 2086038 - RNA, 19 nt, Human
uuggcccccgagcuggggg

SEQ ID NO: 2086039 - RNA, 23 nt, Human
uuggcuauuagagaucaaccccu

SEQ ID NO: 2086040 - RNA, 13 nt, Human
uuggcucaauccu

SEQ ID NO: 2086041 - RNA, 14 nt, Human
uuggcucaauccuc

SEQ ID NO: 2086042 - RNA, 18 nt, Human
uuggccccugcccggcug

SEQ ID NO: 2086043 - RNA, 20 nt, Human
uuggagugaguguggcuccc

SEQ ID NO: 2086044 - RNA, 22 nt, Human
uuggagugaguguggcuccccu

SEQ ID NO: 2086045 - RNA, 15 nt, Human
uuggcccccgagcug

SEQ ID NO: 2086046 - RNA, 16 nt, Human
uuggcccccgagcugg

SEQ ID NO: 2086047 - RNA, 16 nt, Human
uuggagggugucccaa

SEQ ID NO: 2086048 - RNA, 18 nt, Human
uugcuugagcccaggagu

SEQ ID NO: 2086049 - RNA, 16 nt, Human
uugcuugagcccagga

SEQ ID NO: 2086050 - RNA, 17 nt, Human
uugcuugagcccaggag

SEQ ID NO: 2086051 - RNA, 22 nt, Human
uugcuugaaagaaaauaugcau

SEQ ID NO: 2086052 - RNA, 14 nt, Human
uugcuugagcccag

SEQ ID NO: 2086053 - RNA, 12 nt, Human
uugcuugaaaga

SEQ ID NO: 2086054 - RNA, 15 nt, Human
uugcuugaaagaaaa

SEQ ID NO: 2086055 - RNA, 13 nt, Human
uugcuugaacaca

SEQ ID NO: 2086056 - RNA, 15 nt, Human
uugcuugaacacagu

SEQ ID NO: 2086057 - RNA, 16 nt, Human
uugcuugaacacagua

SEQ ID NO: 2086058 - RNA, 17 nt, Human
uugcuugaacacaguau

SEQ ID NO: 2086059 - RNA, 18 nt, Human
uugcuugaacacaguauu

SEQ ID NO: 2086060 - RNA, 19 nt, Human
uugcuugaacacaguauuu

SEQ ID NO: 2086061 - RNA, 21 nt, Human
uugcuugaacacaguauuuuc

SEQ ID NO: 2086062 - RNA, 22 nt, Human
uuggagggcccacuuguauccu

SEQ ID NO: 2086063 - RNA, 17 nt, Human
uuggaggccuuucaucc

SEQ ID NO: 2086064 - RNA, 22 nt, Human
uuggagggugggagagcccagc

SEQ ID NO: 2086065 - RNA, 23 nt, Human
uuggagggugggagagcccagcc

SEQ ID NO: 2086066 - RNA, 18 nt, Human
uuggagaguaaaaacuga

SEQ ID NO: 2086067 - RNA, 20 nt, Human
uuggagaguaaaaacugaau

SEQ ID NO: 2086068 - RNA, 13 nt, Human
uuggagaguaaaa

SEQ ID NO: 2086069 - RNA, 17 nt, Human
uuggagaguaaaaacug

SEQ ID NO: 2086070 - RNA, 20 nt, Human
uuggagacucuguggggccu

SEQ ID NO: 2086071 - RNA, 13 nt, Human
uuggagacucugu

SEQ ID NO: 2086072 - RNA, 15 nt, Human
uuggagacucugugg

SEQ ID NO: 2086073 - RNA, 13 nt, Human
uuggggaggggcg

SEQ ID NO: 2086074 - RNA, 16 nt, Human
uuggugcaacccuuac

SEQ ID NO: 2086075 - RNA, 21 nt, Human
uuggugcaacccuuaccccuu

SEQ ID NO: 2086076 - RNA, 12 nt, Human
augaauauuuau

SEQ ID NO: 2086077 - RNA, 15 nt, Human
augaauauuuauaac

SEQ ID NO: 2086078 - RNA, 18 nt, Human
augaauauuuauaacagc

SEQ ID NO: 2086079 - RNA, 23 nt, Human
augaauggacucaaacugccuug

SEQ ID NO: 2086080 - RNA, 21 nt, Human
augaaugggcugagcugccug

SEQ ID NO: 2086081 - RNA, 21 nt, Human
augaaugguauggaacucucu

SEQ ID NO: 2086082 - RNA, 13 nt, Human
augaauguaucag

SEQ ID NO: 2086083 - RNA, 18 nt, Human
augaagagugagagggca

SEQ ID NO: 2086084 - RNA, 19 nt, Human
augaagagugagagggcau

SEQ ID NO: 2086085 - RNA, 18 nt, Human
augaagauaccaucagca

SEQ ID NO: 2086086 - RNA, 21 nt, Human
augaagauaccaucagcaaag

SEQ ID NO: 2086087 - RNA, 16 nt, Human
augaagacaggacagu

SEQ ID NO: 2086088 - RNA, 21 nt, Human
augaagacaggacagugcuuc

SEQ ID NO: 2086089 - RNA, 21 nt, Human
augaaagguuuacauugucaa

SEQ ID NO: 2086090 - RNA, 13 nt, Human
aucuuuugagaac

SEQ ID NO: 2086091 - RNA, 16 nt, Human
augaaaugguuaagaa

SEQ ID NO: 2086092 - RNA, 19 nt, Human
augaaagggcccagagagg

SEQ ID NO: 2086093 - RNA, 16 nt, Human
augaaagguuuacauu

SEQ ID NO: 2086094 - RNA, 20 nt, Human
augaaauugucuagcagagc

SEQ ID NO: 2086095 - RNA, 22 nt, Human
augaaauugucuagcagagcag

SEQ ID NO: 2086096 - RNA, 12 nt, Human
augaaauguuuu

SEQ ID NO: 2086097 - RNA, 23 nt, Human
augaaauugucuagcagagcagg

SEQ ID NO: 2086098 - RNA, 17 nt, Human
augaaauuuaauauagc

SEQ ID NO: 2086099 - RNA, 20 nt, Human
aucugcuagggaauaucaau

SEQ ID NO: 2086100 - RNA, 14 nt, Human
aucugcuaauaaaa

SEQ ID NO: 2086101 - RNA, 17 nt, Human
aucugccccucccccaa

SEQ ID NO: 2086102 - RNA, 13 nt, Human
uugccaaaauaau

SEQ ID NO: 2086103 - RNA, 15 nt, Human
uugccaaaauaaugu

SEQ ID NO: 2086104 - RNA, 19 nt, Human
uugccaaaauaaugucuug

SEQ ID NO: 2086105 - RNA, 22 nt, Human
uugccaaaauaaugucuuguua

SEQ ID NO: 2086106 - RNA, 23 nt, Human
uugccaaaauaaugucuuguuaa

SEQ ID NO: 2086107 - RNA, 11 nt, Human
aucugccccuc

SEQ ID NO: 2086108 - RNA, 12 nt, Human
aucugccccucc

SEQ ID NO: 2086109 - RNA, 15 nt, Human
aucugccccuccccc

SEQ ID NO: 2086110 - RNA, 16 nt, Human
aucugccccuccccca

SEQ ID NO: 2086111 - RNA, 18 nt, Human
uugcauuuuuuaaaacaa

SEQ ID NO: 2086112 - RNA, 15 nt, Human
uugcauuuaugguca

SEQ ID NO: 2086113 - RNA, 15 nt, Human
uugcauuuggucaag

SEQ ID NO: 2086114 - RNA, 14 nt, Human
aucuguauauacaa

SEQ ID NO: 2086115 - RNA, 20 nt, Human
aucuguauauacaauaacau

SEQ ID NO: 2086116 - RNA, 13 nt, Human
aucugcuaugcuu

SEQ ID NO: 2086117 - RNA, 16 nt, Human
aucugcuaugcuugaa

SEQ ID NO: 2086118 - RNA, 14 nt, Human
aucugucuggaggg

SEQ ID NO: 2086119 - RNA, 15 nt, Human
aucugucuggagggg

SEQ ID NO: 2086120 - RNA, 22 nt, Human
aucugucuggaggggagcucug

SEQ ID NO: 2086121 - RNA, 21 nt, Human
aucuguauauacaauaacaua

SEQ ID NO: 2086122 - RNA, 18 nt, Human
aucuguccaaaggaggcu

SEQ ID NO: 2086123 - RNA, 19 nt, Human
aucuguccaaaggaggcug

SEQ ID NO: 2086124 - RNA, 21 nt, Human
aucuguccaaaggaggcuggc

SEQ ID NO: 2086125 - RNA, 23 nt, Human
aucuguccaaaggaggcuggcag

SEQ ID NO: 2086126 - RNA, 17 nt, Human
aucuugaugucuuuguu

SEQ ID NO: 2086127 - RNA, 19 nt, Human
aucuugcccgcucaggcug

SEQ ID NO: 2086128 - RNA, 17 nt, Human
aucuugccggucauuuu

SEQ ID NO: 2086129 - RNA, 22 nt, Human
aucuugguacuacuagaugucu

SEQ ID NO: 2086130 - RNA, 16 nt, Human
aucuugcucuaucuca

SEQ ID NO: 2086131 - RNA, 20 nt, Human
aucuugcucuaucucacagc

SEQ ID NO: 2086132 - RNA, 21 nt, Human
aucuugcucuaucucacagca

SEQ ID NO: 2086133 - RNA, 23 nt, Human
aucuugcucuaucucacagcaca

SEQ ID NO: 2086134 - RNA, 15 nt, Human
aucuugguguguuaa

SEQ ID NO: 2086135 - RNA, 18 nt, Human
aucuugguguguuaagag

SEQ ID NO: 2086136 - RNA, 19 nt, Human
aucuugguguguuaagagu

SEQ ID NO: 2086137 - RNA, 13 nt, Human
aucuugcucugcu

SEQ ID NO: 2086138 - RNA, 20 nt, Human
aucuuggucagauuugaacu

SEQ ID NO: 2086139 - RNA, 14 nt, Human
aucuguuuuaaauu

SEQ ID NO: 2086140 - RNA, 14 nt, Human
aucuguuuuacugc

SEQ ID NO: 2086141 - RNA, 17 nt, Human
aucuguuuuacugcuuu

SEQ ID NO: 2086142 - RNA, 18 nt, Human
aucuguuuuacugcuuuu

SEQ ID NO: 2086143 - RNA, 22 nt, Human
aucuguuuuaaauuuauuucaa

SEQ ID NO: 2086144 - RNA, 18 nt, Human
aucuguuuuuaaaaauca

SEQ ID NO: 2086145 - RNA, 19 nt, Human
aucuguuuuuaaaaaucau

SEQ ID NO: 2086146 - RNA, 20 nt, Human
aucuguuuuuaaaaaucaua

SEQ ID NO: 2086147 - RNA, 16 nt, Human
aucuuaguauuugcau

SEQ ID NO: 2086148 - RNA, 18 nt, Human
aucuuagugccugagagu

SEQ ID NO: 2086149 - RNA, 21 nt, Human
aucuuagugccugagaguauu

SEQ ID NO: 2086150 - RNA, 15 nt, Human
uugcucacagcugua

SEQ ID NO: 2086151 - RNA, 21 nt, Human
uugcucaaguucauugaugac

SEQ ID NO: 2086152 - RNA, 22 nt, Human
uugcucaaguucauugaugacc

SEQ ID NO: 2086153 - RNA, 18 nt, Human
uugcucaaaaaaugagcu

SEQ ID NO: 2086154 - RNA, 13 nt, Human
uugcucaccuggg

SEQ ID NO: 2086155 - RNA, 15 nt, Human
uugcucaccuggggu

SEQ ID NO: 2086156 - RNA, 23 nt, Human
uugcucuaucucacagcacacuc

SEQ ID NO: 2086157 - RNA, 21 nt, Human
uugcucuccccugcccugcug

SEQ ID NO: 2086158 - RNA, 12 nt, Human
uugcuccuugac

SEQ ID NO: 2086159 - RNA, 21 nt, Human
uugcuucuucccuuaaaauuu

SEQ ID NO: 2086160 - RNA, 23 nt, Human
uugcuucuucccuuaaaauuuau

SEQ ID NO: 2086161 - RNA, 14 nt, Human
uugcuucuguagua

SEQ ID NO: 2086162 - RNA, 21 nt, Human
uugcuucuguaguacuccuua

SEQ ID NO: 2086163 - RNA, 17 nt, Human
uugcucaaaaaaugagc

SEQ ID NO: 2086164 - RNA, 15 nt, Human
aucuugucucugggc

SEQ ID NO: 2086165 - RNA, 14 nt, Human
aucuugucucuggg

SEQ ID NO: 2086166 - RNA, 17 nt, Human
aucuuguccccaacacc

SEQ ID NO: 2086167 - RNA, 14 nt, Human
aucuuguccccaac

SEQ ID NO: 2086168 - RNA, 14 nt, Human
aucguucucugccu

SEQ ID NO: 2086169 - RNA, 14 nt, Human
aucguuaugugugu

SEQ ID NO: 2086170 - RNA, 15 nt, Human
aucguuaugugugua

SEQ ID NO: 2086171 - RNA, 16 nt, Human
aucguuauguguguau

SEQ ID NO: 2086172 - RNA, 18 nt, Human
aucguuauguguguauau

SEQ ID NO: 2086173 - RNA, 16 nt, Human
aucguucuuucuagcu

SEQ ID NO: 2086174 - RNA, 21 nt, Human
aucguuauguguguauaugua

SEQ ID NO: 2086175 - RNA, 15 nt, Human
aucguuccaguuccc

SEQ ID NO: 2086176 - RNA, 23 nt, Human
uugaagccaagucagcuuugccu

SEQ ID NO: 2086177 - RNA, 13 nt, Human
uugaagccacuga

SEQ ID NO: 2086178 - RNA, 17 nt, Human
uugaagccacugaagcu

SEQ ID NO: 2086179 - RNA, 21 nt, Human
uugaagccacugaagcuggga

SEQ ID NO: 2086180 - RNA, 14 nt, Human
auccucgcucccgg

SEQ ID NO: 2086181 - RNA, 16 nt, Human
auccucgcucccggga

SEQ ID NO: 2086182 - RNA, 10 nt, Human
auccucuggc

SEQ ID NO: 2086183 - RNA, 19 nt, Human
auccucugguucuucauuu

SEQ ID NO: 2086184 - RNA, 19 nt, Human
aucgugccguuacucucca

SEQ ID NO: 2086185 - RNA, 14 nt, Human
auccucuggcuggc

SEQ ID NO: 2086186 - RNA, 23 nt, Human
aucgugccguuacucuccaaccu

SEQ ID NO: 2086187 - RNA, 12 nt, Human
aucgugcuaaau

SEQ ID NO: 2086188 - RNA, 15 nt, Human
aucgugcuaaauuuu

SEQ ID NO: 2086189 - RNA, 17 nt, Human
aucgugcuaaauuuuca

SEQ ID NO: 2086190 - RNA, 16 nt, Human
aucgugcuaaauuuuc

SEQ ID NO: 2086191 - RNA, 22 nt, Human
aucguuaguaucuaacauguau

SEQ ID NO: 2086192 - RNA, 19 nt, Human
uugaauaaaguugaagcua

SEQ ID NO: 2086193 - RNA, 21 nt, Human
uugaauaaagccugcuuuuua

SEQ ID NO: 2086194 - RNA, 14 nt, Human
uugaagcuaagauu

SEQ ID NO: 2086195 - RNA, 15 nt, Human
uugaagcuaauuauu

SEQ ID NO: 2086196 - RNA, 16 nt, Human
uugaagcuaauuauuu

SEQ ID NO: 2086197 - RNA, 17 nt, Human
uugaagcuaauuauuuu

SEQ ID NO: 2086198 - RNA, 19 nt, Human
uugaagcuaauuauuuuaa

SEQ ID NO: 2086199 - RNA, 13 nt, Human
uugaagcucuggu

SEQ ID NO: 2086200 - RNA, 23 nt, Human
uugaagcucuggugacaccagcc

SEQ ID NO: 2086201 - RNA, 13 nt, Human
uugaaucacagua

SEQ ID NO: 2086202 - RNA, 12 nt, Human
uugaauaaauaa

SEQ ID NO: 2086203 - RNA, 17 nt, Human
uugaauccaugcuuggg

SEQ ID NO: 2086204 - RNA, 19 nt, Human
uugaauccaugcuugggug

SEQ ID NO: 2086205 - RNA, 22 nt, Human
uugaauauuugucgauauuucc

SEQ ID NO: 2086206 - RNA, 21 nt, Human
uugaaucuauugggauuuucu

SEQ ID NO: 2086207 - RNA, 14 nt, Human
uugacagaacacug

SEQ ID NO: 2086208 - RNA, 15 nt, Human
uugacagaacacugu

SEQ ID NO: 2086209 - RNA, 16 nt, Human
uugacagaacacuguc

SEQ ID NO: 2086210 - RNA, 17 nt, Human
uugacagaacacugucu

SEQ ID NO: 2086211 - RNA, 18 nt, Human
aucuaauauguaacaagc

SEQ ID NO: 2086212 - RNA, 22 nt, Human
uugaguuuccucaggcugcugg

SEQ ID NO: 2086213 - RNA, 19 nt, Human
uugaguuuccucaggcugc

SEQ ID NO: 2086214 - RNA, 16 nt, Human
uugaguucagguagcu

SEQ ID NO: 2086215 - RNA, 20 nt, Human
uugaguugauucagcucugc

SEQ ID NO: 2086216 - RNA, 20 nt, Human
uugaguagagagcaagggaa

SEQ ID NO: 2086217 - RNA, 15 nt, Human
uugagucccuuccag

SEQ ID NO: 2086218 - RNA, 14 nt, Human
uugagaccucagcc

SEQ ID NO: 2086219 - RNA, 15 nt, Human
uugagaccucagcca

SEQ ID NO: 2086220 - RNA, 14 nt, Human
uugagacuaguuuu

SEQ ID NO: 2086221 - RNA, 15 nt, Human
uugagaucagccugg

SEQ ID NO: 2086222 - RNA, 16 nt, Human
uugagaucagccuggg

SEQ ID NO: 2086223 - RNA, 17 nt, Human
uugagaccucagccaug

SEQ ID NO: 2086224 - RNA, 16 nt, Human
uugagacuucaagcuu

SEQ ID NO: 2086225 - RNA, 12 nt, Human
uugagacuuuuu

SEQ ID NO: 2086226 - RNA, 15 nt, Human
uugagacuuuuuggu

SEQ ID NO: 2086227 - RNA, 16 nt, Human
uugagacuuuuuggug

SEQ ID NO: 2086228 - RNA, 23 nt, Human
uugagacuuuuugguggauguaa

SEQ ID NO: 2086229 - RNA, 12 nt, Human
uugagacagagu

SEQ ID NO: 2086230 - RNA, 13 nt, Human
uugacuuucaggu

SEQ ID NO: 2086231 - RNA, 14 nt, Human
uugacuuucaggua

SEQ ID NO: 2086232 - RNA, 15 nt, Human
uugacuuucagguac

SEQ ID NO: 2086233 - RNA, 21 nt, Human
uugacuuucagguacuaaaua

SEQ ID NO: 2086234 - RNA, 13 nt, Human
uugagacauucca

SEQ ID NO: 2086235 - RNA, 13 nt, Human
uugagaccagccu

SEQ ID NO: 2086236 - RNA, 15 nt, Human
uugagaccagccugg

SEQ ID NO: 2086237 - RNA, 19 nt, Human
uugacuugacagaacacug

SEQ ID NO: 2086238 - RNA, 20 nt, Human
uugacuugacagaacacugu

SEQ ID NO: 2086239 - RNA, 21 nt, Human
uugacuugacagaacacuguc

SEQ ID NO: 2086240 - RNA, 16 nt, Human
uugacuugauuagugc

SEQ ID NO: 2086241 - RNA, 12 nt, Human
uugacuuucagg

SEQ ID NO: 2086242 - RNA, 21 nt, Human
uugcaaguauguuuuagcaug

SEQ ID NO: 2086243 - RNA, 22 nt, Human
uugcaaguauguuuuagcaugu

SEQ ID NO: 2086244 - RNA, 14 nt, Human
uugcauauauacau

SEQ ID NO: 2086245 - RNA, 14 nt, Human
uugcauauguauga

SEQ ID NO: 2086246 - RNA, 13 nt, Human
uugcaucagaaau

SEQ ID NO: 2086247 - RNA, 14 nt, Human
uugcaucagaaaug

SEQ ID NO: 2086248 - RNA, 15 nt, Human
uugcaucagaaaugu

SEQ ID NO: 2086249 - RNA, 22 nt, Human
uugcaucagaaaugucuggaga

SEQ ID NO: 2086250 - RNA, 14 nt, Human
uugcauugaauaua

SEQ ID NO: 2086251 - RNA, 17 nt, Human
uugcauugaauauauua

SEQ ID NO: 2086252 - RNA, 19 nt, Human
uugcaauggcagccuuggc

SEQ ID NO: 2086253 - RNA, 17 nt, Human
uugcaauggcagccuug

SEQ ID NO: 2086254 - RNA, 16 nt, Human
aucucauucaguauua

SEQ ID NO: 2086255 - RNA, 22 nt, Human
uugcaagggccagaucuguuaa

SEQ ID NO: 2086256 - RNA, 16 nt, Human
uugcaauggcagccuu

SEQ ID NO: 2086257 - RNA, 14 nt, Human
uugcaccacugcac

SEQ ID NO: 2086258 - RNA, 15 nt, Human
uugcaccacugcacu

SEQ ID NO: 2086259 - RNA, 16 nt, Human
uugcaccacugcacuc

SEQ ID NO: 2086260 - RNA, 18 nt, Human
uugcaccacugcacucca

SEQ ID NO: 2086261 - RNA, 16 nt, Human
uugauuauuagccagg

SEQ ID NO: 2086262 - RNA, 14 nt, Human
uugcaaggccgcug

SEQ ID NO: 2086263 - RNA, 17 nt, Human
uugcaaggccgcuguuc

SEQ ID NO: 2086264 - RNA, 23 nt, Human
uugcaaggccgcuguucacccac

SEQ ID NO: 2086265 - RNA, 12 nt, Human
uugcaaggaagc

SEQ ID NO: 2086266 - RNA, 13 nt, Human
uugcaaggaagcc

SEQ ID NO: 2086267 - RNA, 22 nt, Human
uugauguuuguggccucagaau

SEQ ID NO: 2086268 - RNA, 15 nt, Human
aucugaauguaauuu

SEQ ID NO: 2086269 - RNA, 17 nt, Human
aucugaauguaauuugu

SEQ ID NO: 2086270 - RNA, 18 nt, Human
aucugaauguaauuugug

SEQ ID NO: 2086271 - RNA, 13 nt, Human
aucugacacaaaa

SEQ ID NO: 2086272 - RNA, 23 nt, Human
aucugaaaauguauguguaagua

SEQ ID NO: 2086273 - RNA, 12 nt, Human
aucugaaaaugu

SEQ ID NO: 2086274 - RNA, 12 nt, Human
aucuagaagaaa

SEQ ID NO: 2086275 - RNA, 14 nt, Human
aucuagaagaaaug

SEQ ID NO: 2086276 - RNA, 15 nt, Human
aucuagaagaaauga

SEQ ID NO: 2086277 - RNA, 16 nt, Human
aucuagaagaaaugaa

SEQ ID NO: 2086278 - RNA, 17 nt, Human
aucuagaagaaaugaaa

SEQ ID NO: 2086279 - RNA, 18 nt, Human
aucuagaagaaaugaaau

SEQ ID NO: 2086280 - RNA, 20 nt, Human
aucuagaagaaaugaaauuu

SEQ ID NO: 2086281 - RNA, 21 nt, Human
aucuagaagaaaugaaauuuu

SEQ ID NO: 2086282 - RNA, 22 nt, Human
aucuagaagaaaugaaauuuua

SEQ ID NO: 2086283 - RNA, 12 nt, Human
aucuagaagacu

SEQ ID NO: 2086284 - RNA, 16 nt, Human
aucucagggccugguc

SEQ ID NO: 2086285 - RNA, 13 nt, Human
aucuccaaagcuu

SEQ ID NO: 2086286 - RNA, 22 nt, Human
aucuccaaagcuuuccuggaga

SEQ ID NO: 2086287 - RNA, 16 nt, Human
aucugaaaauguaugu

SEQ ID NO: 2086288 - RNA, 19 nt, Human
aucugaaaauguaugugua

SEQ ID NO: 2086289 - RNA, 20 nt, Human
aucugaaaauguauguguaa

SEQ ID NO: 2086290 - RNA, 22 nt, Human
aucugaaaauguauguguaagu

SEQ ID NO: 2086291 - RNA, 18 nt, Human
aucucuugagccugggag

SEQ ID NO: 2086292 - RNA, 14 nt, Human
aucugaaaauguau

SEQ ID NO: 2086293 - RNA, 15 nt, Human
aucucuugagccugg

SEQ ID NO: 2086294 - RNA, 23 nt, Human
uucccguggaacguuuuuccugu

SEQ ID NO: 2086295 - RNA, 15 nt, Human
uucccuauuagagaa

SEQ ID NO: 2086296 - RNA, 20 nt, Human
uucccucaccuuucccaucu

SEQ ID NO: 2086297 - RNA, 22 nt, Human
uucccucaaagcuuccauucca

SEQ ID NO: 2086298 - RNA, 23 nt, Human
uucccucaaagcuuccauuccac

SEQ ID NO: 2086299 - RNA, 22 nt, Human
uucccgcucagcccucccugcc

SEQ ID NO: 2086300 - RNA, 21 nt, Human
uucccgcucagcccucccugc

SEQ ID NO: 2086301 - RNA, 18 nt, Human
uucccgcucagcccuccc

SEQ ID NO: 2086302 - RNA, 16 nt, Human
uucccgcucagcccuc

SEQ ID NO: 2086303 - RNA, 20 nt, Human
uuccuacaagagcagccugu

SEQ ID NO: 2086304 - RNA, 22 nt, Human
uuccuacaagagcagccugugg

SEQ ID NO: 2086305 - RNA, 23 nt, Human
uuccuacaagagcagccuguggc

SEQ ID NO: 2086306 - RNA, 16 nt, Human
uuccuacaaagauguu

SEQ ID NO: 2086307 - RNA, 14 nt, Human
uuccuacaauauau

SEQ ID NO: 2086308 - RNA, 13 nt, Human
uuccguuuacauu

SEQ ID NO: 2086309 - RNA, 14 nt, Human
uuccugaaccgaug

SEQ ID NO: 2086310 - RNA, 13 nt, Human
uuccucuuuccau

SEQ ID NO: 2086311 - RNA, 17 nt, Human
uuccucuuuccaucuac

SEQ ID NO: 2086312 - RNA, 22 nt, Human
uuccucuuuccaucuacccucc

SEQ ID NO: 2086313 - RNA, 20 nt, Human
aucaauccagcgguucucaa

SEQ ID NO: 2086314 - RNA, 15 nt, Human
aucaagcuaauaaaa

SEQ ID NO: 2086315 - RNA, 13 nt, Human
aucaagcuaauaa

SEQ ID NO: 2086316 - RNA, 15 nt, Human
aucaccuuaggcagg

SEQ ID NO: 2086317 - RNA, 14 nt, Human
aucaaugaguaaca

SEQ ID NO: 2086318 - RNA, 23 nt, Human
aucaauccugugugguuuagugu

SEQ ID NO: 2086319 - RNA, 15 nt, Human
aucacggcucacugc

SEQ ID NO: 2086320 - RNA, 14 nt, Human
aucacgccacugca

SEQ ID NO: 2086321 - RNA, 13 nt, Human
aucacgccacugc

SEQ ID NO: 2086322 - RNA, 20 nt, Human
aucacgaggucaggaguuca

SEQ ID NO: 2086323 - RNA, 20 nt, Human
aucaccuuaggcagggaagu

SEQ ID NO: 2086324 - RNA, 16 nt, Human
aucaccuuaggcaggg

SEQ ID NO: 2086325 - RNA, 17 nt, Human
aucaccuuaggcaggga

SEQ ID NO: 2086326 - RNA, 18 nt, Human
aucaccuuaggcagggaa

SEQ ID NO: 2086327 - RNA, 19 nt, Human
aucacggcucacugcagcc

SEQ ID NO: 2086328 - RNA, 18 nt, Human
aucacggcucacugcagc

SEQ ID NO: 2086329 - RNA, 11 nt, Human
uuccugugucu

SEQ ID NO: 2086330 - RNA, 23 nt, Human
uuccuguccuucucucaccuccu

SEQ ID NO: 2086331 - RNA, 24 nt, Human
uuccuguccuucucucaccuccua

SEQ ID NO: 2086332 - RNA, 18 nt, Human
uuccuguccgcccucuuc

SEQ ID NO: 2086333 - RNA, 14 nt, Human
uuccugucuuccug

SEQ ID NO: 2086334 - RNA, 21 nt, Human
aucaaauuuguaggguuucua

SEQ ID NO: 2086335 - RNA, 22 nt, Human
aucaaauuucacgucgucuucu

SEQ ID NO: 2086336 - RNA, 16 nt, Human
aucaagcacagaagga

SEQ ID NO: 2086337 - RNA, 12 nt, Human
aucaacagggca

SEQ ID NO: 2086338 - RNA, 18 nt, Human
auauuuuuucagaaauau

SEQ ID NO: 2086339 - RNA, 16 nt, Human
auauuuuuauuuuauu

SEQ ID NO: 2086340 - RNA, 20 nt, Human
auauuuuuuaauuugaugaa

SEQ ID NO: 2086341 - RNA, 18 nt, Human
aucaaauucuacaacuuu

SEQ ID NO: 2086342 - RNA, 20 nt, Human
aucaaauuucacgucgucuu

SEQ ID NO: 2086343 - RNA, 21 nt, Human
uucggcauugguucccuuugc

SEQ ID NO: 2086344 - RNA, 14 nt, Human
uucuaaaugaagug

SEQ ID NO: 2086345 - RNA, 13 nt, Human
uucuaaaugcaua

SEQ ID NO: 2086346 - RNA, 23 nt, Human
uucuaaaugcauauccugagcca

SEQ ID NO: 2086347 - RNA, 12 nt, Human
uucgcugcaacc

SEQ ID NO: 2086348 - RNA, 16 nt, Human
aucacuggcaaugaaa

SEQ ID NO: 2086349 - RNA, 16 nt, Human
aucacuggagcccagg

SEQ ID NO: 2086350 - RNA, 17 nt, Human
aucacuggagcccagga

SEQ ID NO: 2086351 - RNA, 19 nt, Human
uucgcuccugugucuugca

SEQ ID NO: 2086352 - RNA, 15 nt, Human
uucgcuccugugucu

SEQ ID NO: 2086353 - RNA, 16 nt, Human
aucacugcucacacug

SEQ ID NO: 2086354 - RNA, 10 nt, Human
aucacuggag

SEQ ID NO: 2086355 - RNA, 17 nt, Human
aucacuggagcaccagg

SEQ ID NO: 2086356 - RNA, 19 nt, Human
aucacuggagcaccaggca

SEQ ID NO: 2086357 - RNA, 23 nt, Human
aucacuggagcaccaggcacgaa

SEQ ID NO: 2086358 - RNA, 12 nt, Human
aucacuggagcc

SEQ ID NO: 2086359 - RNA, 13 nt, Human
aucacuggagccc

SEQ ID NO: 2086360 - RNA, 14 nt, Human
aucacuggagccca

SEQ ID NO: 2086361 - RNA, 15 nt, Human
aucacuggagcccag

SEQ ID NO: 2086362 - RNA, 21 nt, Human
uucuagcuguugagcuguuuu

SEQ ID NO: 2086363 - RNA, 20 nt, Human
uucuagcuguugagcuguuu

SEQ ID NO: 2086364 - RNA, 12 nt, Human
uucuagcuguug

SEQ ID NO: 2086365 - RNA, 22 nt, Human
uucuagcuaauggaaaaugauu

SEQ ID NO: 2086366 - RNA, 19 nt, Human
uucuagcaugaagacagag

SEQ ID NO: 2086367 - RNA, 20 nt, Human
uucuaaaugcauauccugag

SEQ ID NO: 2086368 - RNA, 21 nt, Human
aucagggcaaucccaacacau

SEQ ID NO: 2086369 - RNA, 16 nt, Human
aucaggccugccagac

SEQ ID NO: 2086370 - RNA, 15 nt, Human
aucaggcuauguaug

SEQ ID NO: 2086371 - RNA, 12 nt, Human
aucagaauucuc

SEQ ID NO: 2086372 - RNA, 13 nt, Human
aucagcaaagaau

SEQ ID NO: 2086373 - RNA, 18 nt, Human
uucucacuccuaccuggu

SEQ ID NO: 2086374 - RNA, 16 nt, Human
uucucacuccuaccug

SEQ ID NO: 2086375 - RNA, 14 nt, Human
uucucacuccacca

SEQ ID NO: 2086376 - RNA, 15 nt, Human
uucucacuccaccac

SEQ ID NO: 2086377 - RNA, 16 nt, Human
uucucacuccaccacc

SEQ ID NO: 2086378 - RNA, 22 nt, Human
uucucacagugggagccagggc

SEQ ID NO: 2086379 - RNA, 21 nt, Human
uucucacagugggagccaggg

SEQ ID NO: 2086380 - RNA, 19 nt, Human
uucucacagugggagccag

SEQ ID NO: 2086381 - RNA, 18 nt, Human
aucagaaguuucucagcu

SEQ ID NO: 2086382 - RNA, 11 nt, Human
aucagaauucu

SEQ ID NO: 2086383 - RNA, 19 nt, Human
aucacuugaggucaggagu

SEQ ID NO: 2086384 - RNA, 20 nt, Human
uucucaggcucugcccugcc

SEQ ID NO: 2086385 - RNA, 21 nt, Human
uucuuaagacgugauuuugcu

SEQ ID NO: 2086386 - RNA, 23 nt, Human
uucuuaagacgugauuuugcugu

SEQ ID NO: 2086387 - RNA, 22 nt, Human
uucuuaaguauguuauuuucug

SEQ ID NO: 2086388 - RNA, 22 nt, Human
uucuuaagaccaccucaaauuu

SEQ ID NO: 2086389 - RNA, 20 nt, Human
uucuuaaggauugugauauu

SEQ ID NO: 2086390 - RNA, 22 nt, Human
uucuuaaggauugugauauuuu

SEQ ID NO: 2086391 - RNA, 13 nt, Human
uucuucucccuca

SEQ ID NO: 2086392 - RNA, 15 nt, Human
uucuucugcuucagc

SEQ ID NO: 2086393 - RNA, 13 nt, Human
uucuucugcuuca

SEQ ID NO: 2086394 - RNA, 14 nt, Human
uucuucucccucag

SEQ ID NO: 2086395 - RNA, 18 nt, Human
uucuuaagacauguauca

SEQ ID NO: 2086396 - RNA, 13 nt, Human
aucccaugagccu

SEQ ID NO: 2086397 - RNA, 11 nt, Human
aucccauccca

SEQ ID NO: 2086398 - RNA, 13 nt, Human
aucccaucccauc

SEQ ID NO: 2086399 - RNA, 14 nt, Human
aucccaucccaucc

SEQ ID NO: 2086400 - RNA, 15 nt, Human
aucccaucccauccc

SEQ ID NO: 2086401 - RNA, 16 nt, Human
aucccaucccauccca

SEQ ID NO: 2086402 - RNA, 18 nt, Human
aucccaucccaucccauc

SEQ ID NO: 2086403 - RNA, 19 nt, Human
aucccaucccaucccaucc

SEQ ID NO: 2086404 - RNA, 15 nt, Human
aucccaucccgcucu

SEQ ID NO: 2086405 - RNA, 20 nt, Human
aucccaucccgcucuuuucc

SEQ ID NO: 2086406 - RNA, 17 nt, Human
uucuucuuuuugcuuca

SEQ ID NO: 2086407 - RNA, 21 nt, Human
uucuucuuuuugcuucaaaaa

SEQ ID NO: 2086408 - RNA, 15 nt, Human
uucuugaaagcugug

SEQ ID NO: 2086409 - RNA, 14 nt, Human
uucuugaaagcugu

SEQ ID NO: 2086410 - RNA, 13 nt, Human
uucuugaaagcug

SEQ ID NO: 2086411 - RNA, 16 nt, Human
uucuuugcuugaacac

SEQ ID NO: 2086412 - RNA, 17 nt, Human
uucuuugcuugaacaca

SEQ ID NO: 2086413 - RNA, 21 nt, Human
uucuuugcuugaacacaguau

SEQ ID NO: 2086414 - RNA, 22 nt, Human
uucuuugcuugaacacaguauu

SEQ ID NO: 2086415 - RNA, 22 nt, Human
uucuucuuccaacguggcccag

SEQ ID NO: 2086416 - RNA, 13 nt, Human
uucuucuucagaa

SEQ ID NO: 2086417 - RNA, 15 nt, Human
uucuucuucagaaga

SEQ ID NO: 2086418 - RNA, 20 nt, Human
uucuucugcuucagccuccc

SEQ ID NO: 2086419 - RNA, 19 nt, Human
uucuuuuuuaaauuuucuu

SEQ ID NO: 2086420 - RNA, 23 nt, Human
uucuuuuuuaaauuuucuucagu

SEQ ID NO: 2086421 - RNA, 17 nt, Human
uugaaagagaaccaguu

SEQ ID NO: 2086422 - RNA, 20 nt, Human
uugaaagagaaccaguuuca

SEQ ID NO: 2086423 - RNA, 14 nt, Human
uugaaagaguccua

SEQ ID NO: 2086424 - RNA, 14 nt, Human
uugaaagaguuaag

SEQ ID NO: 2086425 - RNA, 19 nt, Human
uugaaagaguuaagaaugu

SEQ ID NO: 2086426 - RNA, 14 nt, Human
uucuuuuuuuguga

SEQ ID NO: 2086427 - RNA, 13 nt, Human
uugaaagaccuuc

SEQ ID NO: 2086428 - RNA, 14 nt, Human
uucuuuggugccuu

SEQ ID NO: 2086429 - RNA, 15 nt, Human
uucuuuggugccuuu

SEQ ID NO: 2086430 - RNA, 18 nt, Human
uucuuuggugccuuuccu

SEQ ID NO: 2086431 - RNA, 19 nt, Human
uucuuuggugccuuuccug

SEQ ID NO: 2086432 - RNA, 21 nt, Human
uucuuuggugccuuuccuguu

SEQ ID NO: 2086433 - RNA, 22 nt, Human
uucuuuggugccuuuccuguuc

SEQ ID NO: 2086434 - RNA, 22 nt, Human
uucuuugguggagauaaagauu

SEQ ID NO: 2086435 - RNA, 22 nt, Human
auccuaccacaaugcagugccu

SEQ ID NO: 2086436 - RNA, 21 nt, Human
auccuaccacaaugcagugcc

SEQ ID NO: 2086437 - RNA, 14 nt, Human
auccuaccaaccuc

SEQ ID NO: 2086438 - RNA, 15 nt, Human
auccuaccaaccucu

SEQ ID NO: 2086439 - RNA, 13 nt, Human
auccuagcugugu

SEQ ID NO: 2086440 - RNA, 14 nt, Human
auccuagcugugug

SEQ ID NO: 2086441 - RNA, 15 nt, Human
auccuagcugugugc

SEQ ID NO: 2086442 - RNA, 19 nt, Human
auccuagcugugugcaguc

SEQ ID NO: 2086443 - RNA, 16 nt, Human
auccuaggcauuugcu

SEQ ID NO: 2086444 - RNA, 21 nt, Human
auccuaagcuauucaguaaua

SEQ ID NO: 2086445 - RNA, 14 nt, Human
auccuaaaacaaau

SEQ ID NO: 2086446 - RNA, 12 nt, Human
auccuaagcuau

SEQ ID NO: 2086447 - RNA, 16 nt, Human
auccguaguucccuga

SEQ ID NO: 2086448 - RNA, 14 nt, Human
auccggaggagaag

SEQ ID NO: 2086449 - RNA, 22 nt, Human
auccggaggagaagaaggaaau

SEQ ID NO: 2086450 - RNA, 15 nt, Human
auccggcagccugga

SEQ ID NO: 2086451 - RNA, 17 nt, Human
auccguaguucccugaa

SEQ ID NO: 2086452 - RNA, 22 nt, Human
auccgugagcagugugucuccu

SEQ ID NO: 2086453 - RNA, 13 nt, Human
auccgaggcaggg

SEQ ID NO: 2086454 - RNA, 19 nt, Human
uugaaauuguuuaaguguu

SEQ ID NO: 2086455 - RNA, 12 nt, Human
auccgaggcagg

SEQ ID NO: 2086456 - RNA, 22 nt, Human
uugaaagcuguggccagcuugu

SEQ ID NO: 2086457 - RNA, 19 nt, Human
uugaaaggcauucucugaa

SEQ ID NO: 2086458 - RNA, 20 nt, Human
uugaaaggcauucucugaag

SEQ ID NO: 2086459 - RNA, 21 nt, Human
uugaaaggcauucucugaaga

SEQ ID NO: 2086460 - RNA, 12 nt, Human
uugaaagcugug

SEQ ID NO: 2086461 - RNA, 16 nt, Human
uugaaagcauccaugu

SEQ ID NO: 2086462 - RNA, 18 nt, Human
aucaguagccagcaucug

SEQ ID NO: 2086463 - RNA, 13 nt, Human
aucagguggggag

SEQ ID NO: 2086464 - RNA, 15 nt, Human
uucuccuuagucuuc

SEQ ID NO: 2086465 - RNA, 15 nt, Human
uucuccugccugugc

SEQ ID NO: 2086466 - RNA, 21 nt, Human
uucuccugccugugcugugac

SEQ ID NO: 2086467 - RNA, 20 nt, Human
uucucuagggaaggccaccu

SEQ ID NO: 2086468 - RNA, 16 nt, Human
uucucuucauuuuccc

SEQ ID NO: 2086469 - RNA, 17 nt, Human
uucuccuugauaacagc

SEQ ID NO: 2086470 - RNA, 18 nt, Human
uucuccuugauaacagcu

SEQ ID NO: 2086471 - RNA, 23 nt, Human
uucuccuugauaacagcuaccau

SEQ ID NO: 2086472 - RNA, 20 nt, Human
uucuccuuagucuucucaua

SEQ ID NO: 2086473 - RNA, 22 nt, Human
uucuccuuccaacugcugcccc

SEQ ID NO: 2086474 - RNA, 17 nt, Human
uucugggaaauggcuug

SEQ ID NO: 2086475 - RNA, 23 nt, Human
uucugggaaauggcuugaagcca

SEQ ID NO: 2086476 - RNA, 12 nt, Human
uucugaacucgc

SEQ ID NO: 2086477 - RNA, 19 nt, Human
uucuggcugaacacuggca

SEQ ID NO: 2086478 - RNA, 18 nt, Human
uucugccugcccaggccc

SEQ ID NO: 2086479 - RNA, 17 nt, Human
uucugccugcccaggcc

SEQ ID NO: 2086480 - RNA, 21 nt, Human
uucugccugcccaggccccug

SEQ ID NO: 2086481 - RNA, 15 nt, Human
uucugccauauucug

SEQ ID NO: 2086482 - RNA, 20 nt, Human
uucugcccauccugucuguu

SEQ ID NO: 2086483 - RNA, 15 nt, Human
uucugcccugcccac

SEQ ID NO: 2086484 - RNA, 15 nt, Human
uucugccagggagcu

SEQ ID NO: 2086485 - RNA, 16 nt, Human
uucugccagggagcuu

SEQ ID NO: 2086486 - RNA, 19 nt, Human
uucugcccacauuggaccc

SEQ ID NO: 2086487 - RNA, 16 nt, Human
uucucuuggcuggcuu

SEQ ID NO: 2086488 - RNA, 15 nt, Human
uucucuugggcugag

SEQ ID NO: 2086489 - RNA, 21 nt, Human
uucuggggccccuuuuuacuc

SEQ ID NO: 2086490 - RNA, 15 nt, Human
uucuggggccccacc

SEQ ID NO: 2086491 - RNA, 14 nt, Human
uucuggggccccuu

SEQ ID NO: 2086492 - RNA, 23 nt, Human
uucuggggccccuuuuuacuccc

SEQ ID NO: 2086493 - RNA, 17 nt, Human
aucauuuuccccccacu

SEQ ID NO: 2086494 - RNA, 13 nt, Human
aucauuuuccccc

SEQ ID NO: 2086495 - RNA, 14 nt, Human
aucauuuucccccc

SEQ ID NO: 2086496 - RNA, 15 nt, Human
aucauuuucccccca

SEQ ID NO: 2086497 - RNA, 21 nt, Human
auccaagcuggucccacucag

SEQ ID NO: 2086498 - RNA, 18 nt, Human
auccaagcuggucccacu

SEQ ID NO: 2086499 - RNA, 16 nt, Human
auccacccaccucagc

SEQ ID NO: 2086500 - RNA, 15 nt, Human
auccacccaccucag

SEQ ID NO: 2086501 - RNA, 13 nt, Human
auccacccaccuc

SEQ ID NO: 2086502 - RNA, 13 nt, Human
auccaucaggcca

SEQ ID NO: 2086503 - RNA, 13 nt, Human
aucccagcucacg

SEQ ID NO: 2086504 - RNA, 22 nt, Human
aucccagcuacuugggaggcug

SEQ ID NO: 2086505 - RNA, 20 nt, Human
aucccagcuacucaggaggc

SEQ ID NO: 2086506 - RNA, 23 nt, Human
aucccagcuacucaagaggcuga

SEQ ID NO: 2086507 - RNA, 17 nt, Human
aucccagcuacucagga

SEQ ID NO: 2086508 - RNA, 18 nt, Human
aucccagcuacucaggag

SEQ ID NO: 2086509 - RNA, 23 nt, Human
aucccagcccuuugggaggcuga

SEQ ID NO: 2086510 - RNA, 18 nt, Human
aucccagcggcuggugca

SEQ ID NO: 2086511 - RNA, 23 nt, Human
aucccagcggcuggugcagggcc

SEQ ID NO: 2086512 - RNA, 20 nt, Human
aucccagcuacucaagaggc

SEQ ID NO: 2086513 - RNA, 19 nt, Human
auguaugaggaauuucugu

SEQ ID NO: 2086514 - RNA, 20 nt, Human
uuuggcaucuguuuaaagua

SEQ ID NO: 2086515 - RNA, 22 nt, Human
uuuggcaggggcagaaaacucu

SEQ ID NO: 2086516 - RNA, 15 nt, Human
auguauguguaagua

SEQ ID NO: 2086517 - RNA, 14 nt, Human
auguaugauuacau

SEQ ID NO: 2086518 - RNA, 15 nt, Human
auguauguguguaug

SEQ ID NO: 2086519 - RNA, 14 nt, Human
auguauguguguau

SEQ ID NO: 2086520 - RNA, 16 nt, Human
auguauguguaaguau

SEQ ID NO: 2086521 - RNA, 17 nt, Human
auguauguuuacacugu

SEQ ID NO: 2086522 - RNA, 19 nt, Human
auguauguuuacacuguca

SEQ ID NO: 2086523 - RNA, 20 nt, Human
auguauguuuacacugucaa

SEQ ID NO: 2086524 - RNA, 21 nt, Human
auguauguuuacacugucaaa

SEQ ID NO: 2086525 - RNA, 16 nt, Human
auguauuaauauucau

SEQ ID NO: 2086526 - RNA, 17 nt, Human
auguauuaauauucauu

SEQ ID NO: 2086527 - RNA, 13 nt, Human
auguauuauucug

SEQ ID NO: 2086528 - RNA, 14 nt, Human
auguauuauucugc

SEQ ID NO: 2086529 - RNA, 16 nt, Human
auguauuauucugcag

SEQ ID NO: 2086530 - RNA, 17 nt, Human
auguauuauucugcagc

SEQ ID NO: 2086531 - RNA, 19 nt, Human
augucucgugguaggacug

SEQ ID NO: 2086532 - RNA, 13 nt, Human
augucucucagaa

SEQ ID NO: 2086533 - RNA, 16 nt, Human
augucucucagaauuc

SEQ ID NO: 2086534 - RNA, 17 nt, Human
augucucucagaauucu

SEQ ID NO: 2086535 - RNA, 21 nt, Human
augucucucagaauucuucag

SEQ ID NO: 2086536 - RNA, 15 nt, Human
augucucgugguagg

SEQ ID NO: 2086537 - RNA, 16 nt, Human
augucucgugguagga

SEQ ID NO: 2086538 - RNA, 22 nt, Human
augucucaggucccugcagggc

SEQ ID NO: 2086539 - RNA, 17 nt, Human
augucucaggucccugc

SEQ ID NO: 2086540 - RNA, 14 nt, Human
augucgauuaaaau

SEQ ID NO: 2086541 - RNA, 14 nt, Human
augucgccucugca

SEQ ID NO: 2086542 - RNA, 13 nt, Human
augucgccucugc

SEQ ID NO: 2086543 - RNA, 21 nt, Human
uuugucuuguguuucuuuagu

SEQ ID NO: 2086544 - RNA, 19 nt, Human
uuugucuuuggugaacauu

SEQ ID NO: 2086545 - RNA, 22 nt, Human
uuugugaaaugauggugaaagu

SEQ ID NO: 2086546 - RNA, 18 nt, Human
uuuguaaucguuaugugu

SEQ ID NO: 2086547 - RNA, 21 nt, Human
uuuguaaucguuaugugugua

SEQ ID NO: 2086548 - RNA, 23 nt, Human
uuuguaaugucaccaccuuccca

SEQ ID NO: 2086549 - RNA, 15 nt, Human
augugauuuuucuga

SEQ ID NO: 2086550 - RNA, 16 nt, Human
augugcaaguguaugc

SEQ ID NO: 2086551 - RNA, 15 nt, Human
augugcaaaaauuuu

SEQ ID NO: 2086552 - RNA, 16 nt, Human
augugcaaaaauuuuu

SEQ ID NO: 2086553 - RNA, 17 nt, Human
augugcaaaaauuuuug

SEQ ID NO: 2086554 - RNA, 23 nt, Human
augugcaaaaauuuuuggauuga

SEQ ID NO: 2086555 - RNA, 14 nt, Human
augugauuuuucug

SEQ ID NO: 2086556 - RNA, 23 nt, Human
augugcacaugcacgugugugca

SEQ ID NO: 2086557 - RNA, 23 nt, Human
augucucuuuaaugucacaggca

SEQ ID NO: 2086558 - RNA, 20 nt, Human
auguauuauucugcagcaug

SEQ ID NO: 2086559 - RNA, 21 nt, Human
uuugacuagggauucaggcug

SEQ ID NO: 2086560 - RNA, 17 nt, Human
uuugacauguggaaagu

SEQ ID NO: 2086561 - RNA, 13 nt, Human
uuugcucuuucuu

SEQ ID NO: 2086562 - RNA, 10 nt, Human
uuugcugcca

SEQ ID NO: 2086563 - RNA, 22 nt, Human
uuugccuaauacauuaaagcag

SEQ ID NO: 2086564 - RNA, 12 nt, Human
uuugcuccaccc

SEQ ID NO: 2086565 - RNA, 19 nt, Human
uuugcuccaccccacucac

SEQ ID NO: 2086566 - RNA, 11 nt, Human
uuugccugugc

SEQ ID NO: 2086567 - RNA, 13 nt, Human
uuugccucugccu

SEQ ID NO: 2086568 - RNA, 14 nt, Human
uuugccugagggcg

SEQ ID NO: 2086569 - RNA, 12 nt, Human
uuugcaaggaag

SEQ ID NO: 2086570 - RNA, 14 nt, Human
uuugcaaggaagcc

SEQ ID NO: 2086571 - RNA, 21 nt, Human
uuugcaaggaagccacagcug

SEQ ID NO: 2086572 - RNA, 17 nt, Human
uuugauguuuguggccu

SEQ ID NO: 2086573 - RNA, 19 nt, Human
uuugauguuuguggccuca

SEQ ID NO: 2086574 - RNA, 18 nt, Human
auguaccaugaaacaaag

SEQ ID NO: 2086575 - RNA, 14 nt, Human
auguaccucuuuua

SEQ ID NO: 2086576 - RNA, 15 nt, Human
auguaccucuuuuag

SEQ ID NO: 2086577 - RNA, 21 nt, Human
auguaccucuuuuagucauuu

SEQ ID NO: 2086578 - RNA, 20 nt, Human
auguacuccucuuuacacug

SEQ ID NO: 2086579 - RNA, 17 nt, Human
auguacuccucuuuaca

SEQ ID NO: 2086580 - RNA, 16 nt, Human
auguacuguaguuuuu

SEQ ID NO: 2086581 - RNA, 19 nt, Human
auguacuguaguuuuucuu

SEQ ID NO: 2086582 - RNA, 12 nt, Human
auguagaaagcu

SEQ ID NO: 2086583 - RNA, 18 nt, Human
auguagauaaacucagaa

SEQ ID NO: 2086584 - RNA, 19 nt, Human
auguagauaaacucagaaa

SEQ ID NO: 2086585 - RNA, 22 nt, Human
auguagauauugugaaguacau

SEQ ID NO: 2086586 - RNA, 23 nt, Human
auguagauauugugaaguacaua

SEQ ID NO: 2086587 - RNA, 14 nt, Human
auguagcugguuuc

SEQ ID NO: 2086588 - RNA, 15 nt, Human
auguagcugguuucc

SEQ ID NO: 2086589 - RNA, 17 nt, Human
auguagaugugcauuuu

SEQ ID NO: 2086590 - RNA, 17 nt, Human
auguagcaaaacgcaug

SEQ ID NO: 2086591 - RNA, 20 nt, Human
auguagcaaaacgcauggag

SEQ ID NO: 2086592 - RNA, 18 nt, Human
auguagcaaucagauuuu

SEQ ID NO: 2086593 - RNA, 21 nt, Human
auguagcaaucagauuuuccu

SEQ ID NO: 2086594 - RNA, 19 nt, Human
auguaguauaaagaaaagu

SEQ ID NO: 2086595 - RNA, 13 nt, Human
uuugacaugugga

SEQ ID NO: 2086596 - RNA, 16 nt, Human
auguaguauaaagaaa

SEQ ID NO: 2086597 - RNA, 17 nt, Human
auguaguauaaagaaaa

SEQ ID NO: 2086598 - RNA, 18 nt, Human
auguaggguaaggugccu

SEQ ID NO: 2086599 - RNA, 16 nt, Human
auguagguaugaauaa

SEQ ID NO: 2086600 - RNA, 17 nt, Human
auguagguaugaauaag

SEQ ID NO: 2086601 - RNA, 17 nt, Human
auguaaaagacuuuuuu

SEQ ID NO: 2086602 - RNA, 21 nt, Human
auguaaaagagucaucuggua

SEQ ID NO: 2086603 - RNA, 14 nt, Human
auguaaaauuuugc

SEQ ID NO: 2086604 - RNA, 19 nt, Human
auguaaaauuuugccuaau

SEQ ID NO: 2086605 - RNA, 13 nt, Human
auguaaagacaaa

SEQ ID NO: 2086606 - RNA, 19 nt, Human
auguaaagacaaaaaacua

SEQ ID NO: 2086607 - RNA, 15 nt, Human
auguaaacagugccu

SEQ ID NO: 2086608 - RNA, 16 nt, Human
auguaaacagugccug

SEQ ID NO: 2086609 - RNA, 17 nt, Human
auguaaacagugccugc

SEQ ID NO: 2086610 - RNA, 20 nt, Human
auguaaacagugccugcuga

SEQ ID NO: 2086611 - RNA, 22 nt, Human
auguaaacagugccugcugaau

SEQ ID NO: 2086612 - RNA, 23 nt, Human
auguaaacauaauucuuguauau

SEQ ID NO: 2086613 - RNA, 20 nt, Human
auguacauuuccaaauucac

SEQ ID NO: 2086614 - RNA, 19 nt, Human
auguacauuucugaaauga

SEQ ID NO: 2086615 - RNA, 15 nt, Human
auguaaauuaccagu

SEQ ID NO: 2086616 - RNA, 20 nt, Human
auguaaauuaccaguaaagu

SEQ ID NO: 2086617 - RNA, 23 nt, Human
auguaaauuaccaguaaagugua

SEQ ID NO: 2086618 - RNA, 12 nt, Human
auguaaaugaag

SEQ ID NO: 2086619 - RNA, 13 nt, Human
auguaaaugaagu

SEQ ID NO: 2086620 - RNA, 21 nt, Human
auguaaauaaaggauuucuag

SEQ ID NO: 2086621 - RNA, 21 nt, Human
auguaaauaaccccauucuuu

SEQ ID NO: 2086622 - RNA, 22 nt, Human
auguaaauaaccccauucuuug

SEQ ID NO: 2086623 - RNA, 23 nt, Human
auguaaauaaccccauucuuugc

SEQ ID NO: 2086624 - RNA, 21 nt, Human
augguuugaauauaaacacua

SEQ ID NO: 2086625 - RNA, 20 nt, Human
augguuccccuguucacucu

SEQ ID NO: 2086626 - RNA, 19 nt, Human
augguuccccuguucacuc

SEQ ID NO: 2086627 - RNA, 19 nt, Human
augguugagaaaugaauaa

SEQ ID NO: 2086628 - RNA, 16 nt, Human
augguugagaaaugaa

SEQ ID NO: 2086629 - RNA, 11 nt, Human
auguaaaacaa

SEQ ID NO: 2086630 - RNA, 12 nt, Human
auguaaaacaaa

SEQ ID NO: 2086631 - RNA, 13 nt, Human
auguaaaacaaaa

SEQ ID NO: 2086632 - RNA, 14 nt, Human
auguaaaacaaaaa

SEQ ID NO: 2086633 - RNA, 15 nt, Human
auguaaaacaaaaaa

SEQ ID NO: 2086634 - RNA, 20 nt, Human
auguaaaacaaaaaacaaua

SEQ ID NO: 2086635 - RNA, 16 nt, Human
augguuuucaaaauaa

SEQ ID NO: 2086636 - RNA, 14 nt, Human
augguuuucaaaau

SEQ ID NO: 2086637 - RNA, 15 nt, Human
augguuuucaaaaua

SEQ ID NO: 2086638 - RNA, 22 nt, Human
augguuugaauauaaacacuau

SEQ ID NO: 2086639 - RNA, 16 nt, Human
augguuugcaaggaag

SEQ ID NO: 2086640 - RNA, 17 nt, Human
augguuugcaaggaagc

SEQ ID NO: 2086641 - RNA, 18 nt, Human
augguuugcaaggaagcc

SEQ ID NO: 2086642 - RNA, 17 nt, Human
augguggcuggguugga

SEQ ID NO: 2086643 - RNA, 16 nt, Human
augguggcgcgcaccu

SEQ ID NO: 2086644 - RNA, 15 nt, Human
augguggcuggguug

SEQ ID NO: 2086645 - RNA, 13 nt, Human
augguggcugggu

SEQ ID NO: 2086646 - RNA, 12 nt, Human
augguggcuggg

SEQ ID NO: 2086647 - RNA, 16 nt, Human
auggugcucauuucau

SEQ ID NO: 2086648 - RNA, 13 nt, Human
augguuaacuaau

SEQ ID NO: 2086649 - RNA, 16 nt, Human
augguguuuucaugua

SEQ ID NO: 2086650 - RNA, 21 nt, Human
augguguuuucauguaaauaa

SEQ ID NO: 2086651 - RNA, 13 nt, Human
augguuacacugu

SEQ ID NO: 2086652 - RNA, 15 nt, Human
augguuacacuguua

SEQ ID NO: 2086653 - RNA, 16 nt, Human
augguuacacuguuag

SEQ ID NO: 2086654 - RNA, 17 nt, Human
augguuacacuguuaga

SEQ ID NO: 2086655 - RNA, 23 nt, Human
augguuacacuguuagaacacua

SEQ ID NO: 2086656 - RNA, 19 nt, Human
auggugguuguuucuucca

SEQ ID NO: 2086657 - RNA, 15 nt, Human
augggggguauauuu

SEQ ID NO: 2086658 - RNA, 18 nt, Human
auggugugaaagucagau

SEQ ID NO: 2086659 - RNA, 22 nt, Human
auggugugaaagucagaugccc

SEQ ID NO: 2086660 - RNA, 14 nt, Human
auggugaugaaaug

SEQ ID NO: 2086661 - RNA, 22 nt, Human
augggugaagggagagccagcu

SEQ ID NO: 2086662 - RNA, 17 nt, Human
auggugaugaaauguaa

SEQ ID NO: 2086663 - RNA, 16 nt, Human
auggugaugaaaugua

SEQ ID NO: 2086664 - RNA, 15 nt, Human
auggugagcagcgga

SEQ ID NO: 2086665 - RNA, 20 nt, Human
auggugaggcuuaacaaugu

SEQ ID NO: 2086666 - RNA, 12 nt, Human
auggugccucug

SEQ ID NO: 2086667 - RNA, 13 nt, Human
auggugccucugg

SEQ ID NO: 2086668 - RNA, 14 nt, Human
auggugccucugga

SEQ ID NO: 2086669 - RNA, 15 nt, Human
auggugccucuggag

SEQ ID NO: 2086670 - RNA, 14 nt, Human
uuucugcagaaaca

SEQ ID NO: 2086671 - RNA, 23 nt, Human
augggauucagugcuucuuaaag

SEQ ID NO: 2086672 - RNA, 13 nt, Human
uuucucccccugg

SEQ ID NO: 2086673 - RNA, 14 nt, Human
uuucucccccuggg

SEQ ID NO: 2086674 - RNA, 15 nt, Human
uuucucccccugggc

SEQ ID NO: 2086675 - RNA, 23 nt, Human
uuucuguccuuuuggcacugaga

SEQ ID NO: 2086676 - RNA, 15 nt, Human
uuucugguagauaga

SEQ ID NO: 2086677 - RNA, 17 nt, Human
uuucugguagauagaaa

SEQ ID NO: 2086678 - RNA, 13 nt, Human
uuucuguaccauu

SEQ ID NO: 2086679 - RNA, 19 nt, Human
uuucugguagauagaaaua

SEQ ID NO: 2086680 - RNA, 22 nt, Human
uuucugguucuuguguuggcug

SEQ ID NO: 2086681 - RNA, 17 nt, Human
auggguagagaaacacu

SEQ ID NO: 2086682 - RNA, 14 nt, Human
auggguagcuucug

SEQ ID NO: 2086683 - RNA, 15 nt, Human
auggguagcuucuga

SEQ ID NO: 2086684 - RNA, 23 nt, Human
auggguagcuucugaccucagca

SEQ ID NO: 2086685 - RNA, 16 nt, Human
auggguaucaaacagc

SEQ ID NO: 2086686 - RNA, 19 nt, Human
auggggugggguagggcug

SEQ ID NO: 2086687 - RNA, 18 nt, Human
augggguuggcugggccc

SEQ ID NO: 2086688 - RNA, 21 nt, Human
augggguuggcugggcccaga

SEQ ID NO: 2086689 - RNA, 16 nt, Human
auggggggccaacacc

SEQ ID NO: 2086690 - RNA, 22 nt, Human
auggggggccaacaccagggau

SEQ ID NO: 2086691 - RNA, 17 nt, Human
augggggcacugaggac

SEQ ID NO: 2086692 - RNA, 16 nt, Human
augggggccucagggc

SEQ ID NO: 2086693 - RNA, 19 nt, Human
augggggagucugaagcag

SEQ ID NO: 2086694 - RNA, 20 nt, Human
augggggagucugaagcaga

SEQ ID NO: 2086695 - RNA, 14 nt, Human
augggggaugcuuc

SEQ ID NO: 2086696 - RNA, 16 nt, Human
augggggaugcuucau

SEQ ID NO: 2086697 - RNA, 21 nt, Human
augggggagucugaagcagau

SEQ ID NO: 2086698 - RNA, 14 nt, Human
uuugaaaacuacau

SEQ ID NO: 2086699 - RNA, 18 nt, Human
uuugaaaacuacauuuua

SEQ ID NO: 2086700 - RNA, 23 nt, Human
uuugaaaacuacauuuuaacaug

SEQ ID NO: 2086701 - RNA, 16 nt, Human
uuucuuuggugccuuu

SEQ ID NO: 2086702 - RNA, 17 nt, Human
uuucuuuggugccuuuc

SEQ ID NO: 2086703 - RNA, 19 nt, Human
uuucuuuggugccuuuccu

SEQ ID NO: 2086704 - RNA, 21 nt, Human
uuucuuuggugccuuuccugu

SEQ ID NO: 2086705 - RNA, 17 nt, Human
uuucuuuuuauuuuuua

SEQ ID NO: 2086706 - RNA, 12 nt, Human
auggggaugcag

SEQ ID NO: 2086707 - RNA, 12 nt, Human
auggggccacag

SEQ ID NO: 2086708 - RNA, 13 nt, Human
auggggccacagc

SEQ ID NO: 2086709 - RNA, 17 nt, Human
auggggccacagccaga

SEQ ID NO: 2086710 - RNA, 20 nt, Human
uuugaaaaagcagacagaag

SEQ ID NO: 2086711 - RNA, 18 nt, Human
augggccuccugugugug

SEQ ID NO: 2086712 - RNA, 16 nt, Human
auggcagcaggccugu

SEQ ID NO: 2086713 - RNA, 19 nt, Human
auggcagcaggccuguugc

SEQ ID NO: 2086714 - RNA, 18 nt, Human
auggagacugucucaaga

SEQ ID NO: 2086715 - RNA, 20 nt, Human
auggagacuccaugagaagc

SEQ ID NO: 2086716 - RNA, 15 nt, Human
auggcagugucuuuc

SEQ ID NO: 2086717 - RNA, 23 nt, Human
auggcuccccuuuuucuuccuca

SEQ ID NO: 2086718 - RNA, 23 nt, Human
auggcuccagucugcugcccucc

SEQ ID NO: 2086719 - RNA, 13 nt, Human
auggcuccagucu

SEQ ID NO: 2086720 - RNA, 20 nt, Human
auggcuccagucugcugccc

SEQ ID NO: 2086721 - RNA, 22 nt, Human
auggcuccagucugcugcccuc

SEQ ID NO: 2086722 - RNA, 23 nt, Human
auggcuccgaacacccucgaagc

SEQ ID NO: 2086723 - RNA, 14 nt, Human
augggacugggagg

SEQ ID NO: 2086724 - RNA, 15 nt, Human
augggacugggaggg

SEQ ID NO: 2086725 - RNA, 16 nt, Human
augggacugggagggc

SEQ ID NO: 2086726 - RNA, 17 nt, Human
augggacugggagggcc

SEQ ID NO: 2086727 - RNA, 18 nt, Human
auggcuaauguacugcau

SEQ ID NO: 2086728 - RNA, 21 nt, Human
auggcuaagcuuaaaaaaaac

SEQ ID NO: 2086729 - RNA, 15 nt, Human
auggcuaaggcacca

SEQ ID NO: 2086730 - RNA, 17 nt, Human
auggcuaaggcaccagc

SEQ ID NO: 2086731 - RNA, 18 nt, Human
auggcuaaggcaccagcc

SEQ ID NO: 2086732 - RNA, 16 nt, Human
auggcucacugcagcc

SEQ ID NO: 2086733 - RNA, 19 nt, Human
auggcucacugcagccucg

SEQ ID NO: 2086734 - RNA, 20 nt, Human
auggcucacugcagccucga

SEQ ID NO: 2086735 - RNA, 20 nt, Human
auggcguagagggugcugcc

SEQ ID NO: 2086736 - RNA, 21 nt, Human
auggcguagagggugcugccc

SEQ ID NO: 2086737 - RNA, 20 nt, Human
auggcgugucccucucggaa

SEQ ID NO: 2086738 - RNA, 13 nt, Human
auggcccucuggu

SEQ ID NO: 2086739 - RNA, 14 nt, Human
auggagaaacccug

SEQ ID NO: 2086740 - RNA, 14 nt, Human
auggacucuacacu

SEQ ID NO: 2086741 - RNA, 16 nt, Human
auggacucuacacugu

SEQ ID NO: 2086742 - RNA, 18 nt, Human
auggacucuacacuguga

SEQ ID NO: 2086743 - RNA, 16 nt, Human
uuucaaauugagagaa

SEQ ID NO: 2086744 - RNA, 14 nt, Human
uuucaaauuguauc

SEQ ID NO: 2086745 - RNA, 17 nt, Human
uuucaaagggagagaga

SEQ ID NO: 2086746 - RNA, 15 nt, Human
uuucaaaguacauaa

SEQ ID NO: 2086747 - RNA, 14 nt, Human
uuucaaagaaggaa

SEQ ID NO: 2086748 - RNA, 14 nt, Human
uuucaaauuucaca

SEQ ID NO: 2086749 - RNA, 14 nt, Human
uuuccaucauaauu

SEQ ID NO: 2086750 - RNA, 16 nt, Human
uuuccaucauaauucu

SEQ ID NO: 2086751 - RNA, 23 nt, Human
uuuccaucauuaaauuuuuccuu

SEQ ID NO: 2086752 - RNA, 18 nt, Human
uuuccccggucccuugag

SEQ ID NO: 2086753 - RNA, 20 nt, Human
uuuccccugcccccagaccu

SEQ ID NO: 2086754 - RNA, 23 nt, Human
uuuccccccacucuccccacacu

SEQ ID NO: 2086755 - RNA, 16 nt, Human
uuuccaugaaaacguu

SEQ ID NO: 2086756 - RNA, 17 nt, Human
uuuccaugaaaaugcaa

SEQ ID NO: 2086757 - RNA, 23 nt, Human
uuuccaugcacccucauacacag

SEQ ID NO: 2086758 - RNA, 19 nt, Human
uuuccaugacugcauuuua

SEQ ID NO: 2086759 - RNA, 20 nt, Human
uuuccaugacugcauuuuac

SEQ ID NO: 2086760 - RNA, 14 nt, Human
uuuauauuuaaaug

SEQ ID NO: 2086761 - RNA, 16 nt, Human
uuuauauuagaagugu

SEQ ID NO: 2086762 - RNA, 19 nt, Human
augcuaacaguucacuugc

SEQ ID NO: 2086763 - RNA, 22 nt, Human
augcuaacaguucacuugcagu

SEQ ID NO: 2086764 - RNA, 23 nt, Human
augcuaacaguucacuugcagug

SEQ ID NO: 2086765 - RNA, 21 nt, Human
augcuaaauguaagaaucauu

SEQ ID NO: 2086766 - RNA, 20 nt, Human
augcuaagggcaggcccaaa

SEQ ID NO: 2086767 - RNA, 13 nt, Human
uuuauauuuucaa

SEQ ID NO: 2086768 - RNA, 14 nt, Human
uuuauauuuucaau

SEQ ID NO: 2086769 - RNA, 19 nt, Human
uuuauauuuucaauucaaa

SEQ ID NO: 2086770 - RNA, 22 nt, Human
uuuauauuuucaauucaaaaau

SEQ ID NO: 2086771 - RNA, 23 nt, Human
uuuauauuuucaauucaaaaaug

SEQ ID NO: 2086772 - RNA, 12 nt, Human
uuuauauuuuua

SEQ ID NO: 2086773 - RNA, 15 nt, Human
uuuaucacacuucug

SEQ ID NO: 2086774 - RNA, 17 nt, Human
uuuaucacacuucugug

SEQ ID NO: 2086775 - RNA, 18 nt, Human
uuuaucacacuucuguga

SEQ ID NO: 2086776 - RNA, 22 nt, Human
uuuauuaagauggauucucaga

SEQ ID NO: 2086777 - RNA, 12 nt, Human
augcuccagcca

SEQ ID NO: 2086778 - RNA, 17 nt, Human
augcuccagccaacccc

SEQ ID NO: 2086779 - RNA, 18 nt, Human
augcuccagccaaccccu

SEQ ID NO: 2086780 - RNA, 19 nt, Human
augcuccagccaaccccug

SEQ ID NO: 2086781 - RNA, 20 nt, Human
augcuccagccaaccccugu

SEQ ID NO: 2086782 - RNA, 21 nt, Human
augcuccagccaaccccugug

SEQ ID NO: 2086783 - RNA, 15 nt, Human
uuucaaaaauuugga

SEQ ID NO: 2086784 - RNA, 22 nt, Human
uuucaaaaauuuggaauucugu

SEQ ID NO: 2086785 - RNA, 20 nt, Human
uuucaaaacucauuuccuau

SEQ ID NO: 2086786 - RNA, 15 nt, Human
uuuauuuuguuaaaa

SEQ ID NO: 2086787 - RNA, 20 nt, Human
uuuauuuuguuaaaaucucu

SEQ ID NO: 2086788 - RNA, 20 nt, Human
uuucaaaauaaaaaccaaga

SEQ ID NO: 2086789 - RNA, 18 nt, Human
augcugugcuaugaauuu

SEQ ID NO: 2086790 - RNA, 17 nt, Human
augcugugcuaugaauu

SEQ ID NO: 2086791 - RNA, 12 nt, Human
augcugcuuuaa

SEQ ID NO: 2086792 - RNA, 19 nt, Human
augcugcuuuaauugugaa

SEQ ID NO: 2086793 - RNA, 20 nt, Human
augcugcuuuaauugugaau

SEQ ID NO: 2086794 - RNA, 21 nt, Human
augcugcuuuaauugugaauu

SEQ ID NO: 2086795 - RNA, 16 nt, Human
augcucccuccccugc

SEQ ID NO: 2086796 - RNA, 14 nt, Human
augcucccuccccu

SEQ ID NO: 2086797 - RNA, 23 nt, Human
augcucccccauccuccccuucc

SEQ ID NO: 2086798 - RNA, 21 nt, Human
augcucccccauccuccccuu

SEQ ID NO: 2086799 - RNA, 22 nt, Human
augcucccccauccuccccuuc

SEQ ID NO: 2086800 - RNA, 15 nt, Human
augcucccccauccu

SEQ ID NO: 2086801 - RNA, 18 nt, Human
augcucccccauccuccc

SEQ ID NO: 2086802 - RNA, 20 nt, Human
augcucccccauccuccccu

SEQ ID NO: 2086803 - RNA, 13 nt, Human
augcuucucacug

SEQ ID NO: 2086804 - RNA, 18 nt, Human
auggaaccgcaggaagcu

SEQ ID NO: 2086805 - RNA, 19 nt, Human
auggaaccgcaggaagcug

SEQ ID NO: 2086806 - RNA, 20 nt, Human
auggaaccgcaggaagcugc

SEQ ID NO: 2086807 - RNA, 15 nt, Human
augcuuccugacaau

SEQ ID NO: 2086808 - RNA, 16 nt, Human
augcuuccugacaauc

SEQ ID NO: 2086809 - RNA, 20 nt, Human
augcuuccugacaaucaacu

SEQ ID NO: 2086810 - RNA, 22 nt, Human
augcuuccugacaaucaacucu

SEQ ID NO: 2086811 - RNA, 17 nt, Human
augcuauggucagguua

SEQ ID NO: 2086812 - RNA, 22 nt, Human
augcuucaugaaaauccuacca

SEQ ID NO: 2086813 - RNA, 12 nt, Human
augcuucaugug

SEQ ID NO: 2086814 - RNA, 11 nt, Human
uuuaaaacaaa

SEQ ID NO: 2086815 - RNA, 15 nt, Human
uuuaaaacaagaaag

SEQ ID NO: 2086816 - RNA, 12 nt, Human
uuuaaaaaucau

SEQ ID NO: 2086817 - RNA, 13 nt, Human
uuuaaaaaucaua

SEQ ID NO: 2086818 - RNA, 15 nt, Human
uuuaaaaaucauaaa

SEQ ID NO: 2086819 - RNA, 16 nt, Human
uuuaaaaaucauaaac

SEQ ID NO: 2086820 - RNA, 19 nt, Human
uuuaaaaaucauaaacugu

SEQ ID NO: 2086821 - RNA, 24 nt, Human
augcaccugaauguuagauaguua

SEQ ID NO: 2086822 - RNA, 18 nt, Human
uuguuuucuucuguaugu

SEQ ID NO: 2086823 - RNA, 20 nt, Human
uuguuuucuucuguauguua

SEQ ID NO: 2086824 - RNA, 23 nt, Human
uuguuuugauguuuguggccuca

SEQ ID NO: 2086825 - RNA, 16 nt, Human
uuuaaaguagauuaga

SEQ ID NO: 2086826 - RNA, 16 nt, Human
uuuaaaggggcagaaa

SEQ ID NO: 2086827 - RNA, 22 nt, Human
uuuaaaggggcagaaaaacucu

SEQ ID NO: 2086828 - RNA, 15 nt, Human
uuuaaagucuugcug

SEQ ID NO: 2086829 - RNA, 17 nt, Human
uuuaaaguguauuauaa

SEQ ID NO: 2086830 - RNA, 12 nt, Human
uuuaaaguucug

SEQ ID NO: 2086831 - RNA, 13 nt, Human
uuuaaaguucugu

SEQ ID NO: 2086832 - RNA, 15 nt, Human
uuuaaaguucugugu

SEQ ID NO: 2086833 - RNA, 21 nt, Human
uuuaaaguucuguguauuuaa

SEQ ID NO: 2086834 - RNA, 19 nt, Human
uuuaaauaaaagugaucaa

SEQ ID NO: 2086835 - RNA, 17 nt, Human
uuuaaagagaauguaga

SEQ ID NO: 2086836 - RNA, 13 nt, Human
uuuaaagaaugcu

SEQ ID NO: 2086837 - RNA, 17 nt, Human
uuuaaagaaucauuauu

SEQ ID NO: 2086838 - RNA, 18 nt, Human
uuuaaagaaucauuauuu

SEQ ID NO: 2086839 - RNA, 23 nt, Human
uuuaaagaaucauuauuuauuaa

SEQ ID NO: 2086840 - RNA, 22 nt, Human
augcaccagcccuuagcaggga

SEQ ID NO: 2086841 - RNA, 18 nt, Human
augcaaggaaggaaagaa

SEQ ID NO: 2086842 - RNA, 20 nt, Human
augcaaggaaggaaagaaag

SEQ ID NO: 2086843 - RNA, 14 nt, Human
augcaaggaccagg

SEQ ID NO: 2086844 - RNA, 15 nt, Human
augcaaggaccagga

SEQ ID NO: 2086845 - RNA, 20 nt, Human
augcacccucauacacagaa

SEQ ID NO: 2086846 - RNA, 22 nt, Human
augcaaggaccaggacucccuc

SEQ ID NO: 2086847 - RNA, 13 nt, Human
augcaaggaagga

SEQ ID NO: 2086848 - RNA, 14 nt, Human
augcaaggaaggaa

SEQ ID NO: 2086849 - RNA, 15 nt, Human
augcaaggaaggaaa

SEQ ID NO: 2086850 - RNA, 16 nt, Human
augcaaggaaggaaag

SEQ ID NO: 2086851 - RNA, 20 nt, Human
augauucuuuguuacaggca

SEQ ID NO: 2086852 - RNA, 23 nt, Human
augauucuaauuuuuaagcaaaa

SEQ ID NO: 2086853 - RNA, 23 nt, Human
augauucgcccaaagccagacag

SEQ ID NO: 2086854 - RNA, 13 nt, Human
augauauguaaac

SEQ ID NO: 2086855 - RNA, 21 nt, Human
augauauguaaacauaauucu

SEQ ID NO: 2086856 - RNA, 18 nt, Human
augauauuaaaaauuggc

SEQ ID NO: 2086857 - RNA, 14 nt, Human
augauauuccauag

SEQ ID NO: 2086858 - RNA, 16 nt, Human
augauauuccauagua

SEQ ID NO: 2086859 - RNA, 22 nt, Human
augauauguaaacauaauucuu

SEQ ID NO: 2086860 - RNA, 22 nt, Human
augauacccugaauuuggccug

SEQ ID NO: 2086861 - RNA, 21 nt, Human
augauccaugaguuugcccug

SEQ ID NO: 2086862 - RNA, 22 nt, Human
augauccaugaguuugcccugg

SEQ ID NO: 2086863 - RNA, 16 nt, Human
augauuaauucaccuu

SEQ ID NO: 2086864 - RNA, 15 nt, Human
augaucucccugccg

SEQ ID NO: 2086865 - RNA, 14 nt, Human
augaucucucugaa

SEQ ID NO: 2086866 - RNA, 19 nt, Human
augauuacucuuugagaua

SEQ ID NO: 2086867 - RNA, 12 nt, Human
augaucucccug

SEQ ID NO: 2086868 - RNA, 14 nt, Human
augaucucccugcc

SEQ ID NO: 2086869 - RNA, 14 nt, Human
uuggugccuuuccu

SEQ ID NO: 2086870 - RNA, 16 nt, Human
uuggugccuuuccugu

SEQ ID NO: 2086871 - RNA, 17 nt, Human
uuggugccuuuccuguu

SEQ ID NO: 2086872 - RNA, 18 nt, Human
uuggugccuuuccuguuc

SEQ ID NO: 2086873 - RNA, 21 nt, Human
uuggugccuuuccuguucagc

SEQ ID NO: 2086874 - RNA, 20 nt, Human
uuggugcgggcacaauaaau

SEQ ID NO: 2086875 - RNA, 13 nt, Human
uuguguucaccuu

SEQ ID NO: 2086876 - RNA, 16 nt, Human
uugguggagauaaaga

SEQ ID NO: 2086877 - RNA, 16 nt, Human
uuguuccaagacauug

SEQ ID NO: 2086878 - RNA, 17 nt, Human
uuguuccaagacauugu

SEQ ID NO: 2086879 - RNA, 21 nt, Human
uuguuccacaaguuaaauaaa

SEQ ID NO: 2086880 - RNA, 12 nt, Human
uuguuccagcuc

SEQ ID NO: 2086881 - RNA, 21 nt, Human
uuguuccaagacauugucaau

SEQ ID NO: 2086882 - RNA, 22 nt, Human
uuguuccaagacauugucaaua

SEQ ID NO: 2086883 - RNA, 11 nt, Human
uuguucccagu

SEQ ID NO: 2086884 - RNA, 14 nt, Human
uuguucuuuaaagu

SEQ ID NO: 2086885 - RNA, 12 nt, Human
uuguucuuuucc

SEQ ID NO: 2086886 - RNA, 15 nt, Human
augcccuuaaaucau

SEQ ID NO: 2086887 - RNA, 22 nt, Human
augcccuuucuugaauugcauu

SEQ ID NO: 2086888 - RNA, 14 nt, Human
augcccuggaucca

SEQ ID NO: 2086889 - RNA, 23 nt, Human
augcccugcucugaacacgaagc

SEQ ID NO: 2086890 - RNA, 22 nt, Human
augcccugcuagaugagaauuc

SEQ ID NO: 2086891 - RNA, 19 nt, Human
augccacccuguuuucagc

SEQ ID NO: 2086892 - RNA, 21 nt, Human
augcguacguuuccugagaag

SEQ ID NO: 2086893 - RNA, 23 nt, Human
augcuaaagguuguauugcauau

SEQ ID NO: 2086894 - RNA, 19 nt, Human
augcgggcugggcagcugu

SEQ ID NO: 2086895 - RNA, 23 nt, Human
augccauuugcacuuacacaaga

SEQ ID NO: 2086896 - RNA, 20 nt, Human
augccuccaccccccagaac

SEQ ID NO: 2086897 - RNA, 12 nt, Human
augccuccaccg

SEQ ID NO: 2086898 - RNA, 13 nt, Human
augccuccaccgc

SEQ ID NO: 2086899 - RNA, 17 nt, Human
augccuccaccgcugcc

SEQ ID NO: 2086900 - RNA, 21 nt, Human
augccuccaccgcugccuaag

SEQ ID NO: 2086901 - RNA, 14 nt, Human
augccucccugacc

SEQ ID NO: 2086902 - RNA, 18 nt, Human
augccucccugacccugc

SEQ ID NO: 2086903 - RNA, 22 nt, Human
augccucccugacccugcagag

SEQ ID NO: 2086904 - RNA, 17 nt, Human
augcgggcugggcagcu

SEQ ID NO: 2086905 - RNA, 18 nt, Human
augcgggcugggcagcug

SEQ ID NO: 2086906 - RNA, 17 nt, Human
augcccaagcccugaga

SEQ ID NO: 2086907 - RNA, 18 nt, Human
augccauggacagaagaa

SEQ ID NO: 2086908 - RNA, 19 nt, Human
augccauggacagaagaag

SEQ ID NO: 2086909 - RNA, 12 nt, Human
augccauuuguu

SEQ ID NO: 2086910 - RNA, 14 nt, Human
augccauuuguuua

SEQ ID NO: 2086911 - RNA, 15 nt, Human
augccauuuguuuau

SEQ ID NO: 2086912 - RNA, 16 nt, Human
augccauuuguuuauu

SEQ ID NO: 2086913 - RNA, 15 nt, Human
augccacacagagug

SEQ ID NO: 2086914 - RNA, 16 nt, Human
augccacacagagugg

SEQ ID NO: 2086915 - RNA, 18 nt, Human
augccacacagagugguc

SEQ ID NO: 2086916 - RNA, 17 nt, Human
augccauggacagaaga

SEQ ID NO: 2086917 - RNA, 23 nt, Human
augcagugguaugaucacggcuc

SEQ ID NO: 2086918 - RNA, 13 nt, Human
augcagugcuucc

SEQ ID NO: 2086919 - RNA, 22 nt, Human
augcauuuuaaaguuaaacauu

SEQ ID NO: 2086920 - RNA, 12 nt, Human
augcauuuugca

SEQ ID NO: 2086921 - RNA, 13 nt, Human
augcauuuugcag

SEQ ID NO: 2086922 - RNA, 18 nt, Human
augcauuuugcagcagug

SEQ ID NO: 2086923 - RNA, 19 nt, Human
augcauuuugcagcaguga

SEQ ID NO: 2086924 - RNA, 18 nt, Human
augccaaagcuagggugg

SEQ ID NO: 2086925 - RNA, 13 nt, Human
uuuaauuauuguu

SEQ ID NO: 2086926 - RNA, 18 nt, Human
uuuaauuguuaagauaug

SEQ ID NO: 2086927 - RNA, 19 nt, Human
uuuaauuagguuaacuaug

SEQ ID NO: 2086928 - RNA, 21 nt, Human
uuuaauuagggguugcuaaga

SEQ ID NO: 2086929 - RNA, 13 nt, Human
uuuaauuaaauaa

SEQ ID NO: 2086930 - RNA, 16 nt, Human
uuuaaguauucaagaa

SEQ ID NO: 2086931 - RNA, 13 nt, Human
uuuaaguauuuau

SEQ ID NO: 2086932 - RNA, 14 nt, Human
uuuaaguauuuaua

SEQ ID NO: 2086933 - RNA, 15 nt, Human
uuuaaguauuuauau

SEQ ID NO: 2086934 - RNA, 20 nt, Human
uuuaaguauuuauauauuua

SEQ ID NO: 2086935 - RNA, 16 nt, Human
uuuaagguuuuuacug

SEQ ID NO: 2086936 - RNA, 12 nt, Human
uuuaaguauuua

SEQ ID NO: 2086937 - RNA, 19 nt, Human
uuuaauuuauuuauuaaga

SEQ ID NO: 2086938 - RNA, 20 nt, Human
uuuaauuuauuuauuaagau

SEQ ID NO: 2086939 - RNA, 19 nt, Human
uuuaauuuuuuugagacag

SEQ ID NO: 2086940 - RNA, 16 nt, Human
uuuaauuuauuuauua

SEQ ID NO: 2086941 - RNA, 16 nt, Human
uuuaauuuaugaguuu

SEQ ID NO: 2086942 - RNA, 13 nt, Human
uuuacaaaagaug

SEQ ID NO: 2086943 - RNA, 12 nt, Human
uuuacaagaaaa

SEQ ID NO: 2086944 - RNA, 12 nt, Human
augcagaugcca

SEQ ID NO: 2086945 - RNA, 14 nt, Human
augcagaugccaga

SEQ ID NO: 2086946 - RNA, 15 nt, Human
augcagaugccagag

SEQ ID NO: 2086947 - RNA, 16 nt, Human
augcagaugccagagc

SEQ ID NO: 2086948 - RNA, 11 nt, Human
uuuacaaaaga

SEQ ID NO: 2086949 - RNA, 13 nt, Human
uuuacaaaaagac

SEQ ID NO: 2086950 - RNA, 15 nt, Human
augcagcccaugccc

SEQ ID NO: 2086951 - RNA, 21 nt, Human
augcagcccaugcccaccugc

SEQ ID NO: 2086952 - RNA, 23 nt, Human
augcagcccaugcccaccugccc

SEQ ID NO: 2086953 - RNA, 17 nt, Human
augcagcaucuaaguaa

SEQ ID NO: 2086954 - RNA, 11 nt, Human
augcagcagcu

SEQ ID NO: 2086955 - RNA, 13 nt, Human
augcagcagcuug

SEQ ID NO: 2086956 - RNA, 19 nt, Human
augcagcagcuugcugcac

SEQ ID NO: 2086957 - RNA, 22 nt, Human
augcagcccaugcccaccugcc

SEQ ID NO: 2086958 - RNA, 20 nt, Human
augcagcgaaccaauauuug

SEQ ID NO: 2086959 - RNA, 22 nt, Human
augcagcgaaccaauauuugua

SEQ ID NO: 2086960 - RNA, 19 nt, Human
auuaucuaaaaucugcuag

SEQ ID NO: 2086961 - RNA, 13 nt, Human
auuaucaagcuaa

SEQ ID NO: 2086962 - RNA, 14 nt, Human
auuaucaagcuaau

SEQ ID NO: 2086963 - RNA, 14 nt, Human
auuauguuauugaa

SEQ ID NO: 2086964 - RNA, 16 nt, Human
auuauguuauugaaaa

SEQ ID NO: 2086965 - RNA, 18 nt, Human
auuauguuauugaaaaaa

SEQ ID NO: 2086966 - RNA, 19 nt, Human
auuauguuauugaaaaaaa

SEQ ID NO: 2086967 - RNA, 22 nt, Human
auuauguuauugaaaaaaauug

SEQ ID NO: 2086968 - RNA, 22 nt, Human
auuauuagccagguaaugugaa

SEQ ID NO: 2086969 - RNA, 21 nt, Human
auuauuaguaagaaaacauca

SEQ ID NO: 2086970 - RNA, 11 nt, Human
auuauuucaga

SEQ ID NO: 2086971 - RNA, 19 nt, Human
auuccagagcguguaguga

SEQ ID NO: 2086972 - RNA, 19 nt, Human
auuccagagaguggcuccu

SEQ ID NO: 2086973 - RNA, 21 nt, Human
auuccagagaguggcuccucc

SEQ ID NO: 2086974 - RNA, 23 nt, Human
auucccauuuugcaaaauuucca

SEQ ID NO: 2086975 - RNA, 18 nt, Human
auucccauuuugcaaaau

SEQ ID NO: 2086976 - RNA, 20 nt, Human
auucccauuuugcaaaauuu

SEQ ID NO: 2086977 - RNA, 14 nt, Human
auucccauugaaaa

SEQ ID NO: 2086978 - RNA, 18 nt, Human
auucccauugaaaaugua

SEQ ID NO: 2086979 - RNA, 22 nt, Human
auucccauugaaaauguaagua

SEQ ID NO: 2086980 - RNA, 15 nt, Human
auucccauuuugcaa

SEQ ID NO: 2086981 - RNA, 14 nt, Human
auucccagcugucu

SEQ ID NO: 2086982 - RNA, 16 nt, Human
auucccagcugucugu

SEQ ID NO: 2086983 - RNA, 17 nt, Human
auucccagcugucugug

SEQ ID NO: 2086984 - RNA, 18 nt, Human
auucccagauuugaagac

SEQ ID NO: 2086985 - RNA, 12 nt, Human
auucccagccca

SEQ ID NO: 2086986 - RNA, 16 nt, Human
auucccagagacagga

SEQ ID NO: 2086987 - RNA, 19 nt, Human
auucccagagacaggaaaa

SEQ ID NO: 2086988 - RNA, 23 nt, Human
auucccagagacaggaaaauccu

SEQ ID NO: 2086989 - RNA, 21 nt, Human
auuccccuaucucuagaauuu

SEQ ID NO: 2086990 - RNA, 12 nt, Human
auucuaaccaga

SEQ ID NO: 2086991 - RNA, 17 nt, Human
auucuaaccagagcaag

SEQ ID NO: 2086992 - RNA, 19 nt, Human
auucuaaccagagcaagcu

SEQ ID NO: 2086993 - RNA, 20 nt, Human
auucuaaccagagcaagcuu

SEQ ID NO: 2086994 - RNA, 21 nt, Human
auucccuaucuuuuaguuuua

SEQ ID NO: 2086995 - RNA, 19 nt, Human
auucuaacuuuuuugcuau

SEQ ID NO: 2086996 - RNA, 19 nt, Human
auucagaacaccaagacuu

SEQ ID NO: 2086997 - RNA, 15 nt, Human
auucaccauguaaaa

SEQ ID NO: 2086998 - RNA, 18 nt, Human
auucaccauguaaaacaa

SEQ ID NO: 2086999 - RNA, 11 nt, Human
auucagcugcc

SEQ ID NO: 2087000 - RNA, 12 nt, Human
auucagcugccc

SEQ ID NO: 2087001 - RNA, 13 nt, Human
auucagcugcccc

SEQ ID NO: 2087002 - RNA, 22 nt, Human
auucaggaaaacugacagagga

SEQ ID NO: 2087003 - RNA, 18 nt, Human
auucaggaaccuggacca

SEQ ID NO: 2087004 - RNA, 19 nt, Human
auucaggaaccuggaccaa

SEQ ID NO: 2087005 - RNA, 16 nt, Human
auucuaguuuugucaa

SEQ ID NO: 2087006 - RNA, 21 nt, Human
auuauacauggguagcuucug

SEQ ID NO: 2087007 - RNA, 15 nt, Human
auuauacuaagaaaa

SEQ ID NO: 2087008 - RNA, 17 nt, Human
auuauacuaagaaaaga

SEQ ID NO: 2087009 - RNA, 19 nt, Human
auuauacuaagaaaagaua

SEQ ID NO: 2087010 - RNA, 18 nt, Human
auuauauuguuaaucaau

SEQ ID NO: 2087011 - RNA, 14 nt, Human
auuauauugagaca

SEQ ID NO: 2087012 - RNA, 17 nt, Human
auuauauugagacaaaa

SEQ ID NO: 2087013 - RNA, 21 nt, Human
auuauauugagacaaaaauua

SEQ ID NO: 2087014 - RNA, 14 nt, Human
auuauauugcaaug

SEQ ID NO: 2087015 - RNA, 15 nt, Human
auuauauugcaauga

SEQ ID NO: 2087016 - RNA, 11 nt, Human
uuuguggaaaa

SEQ ID NO: 2087017 - RNA, 20 nt, Human
uuuguggcagaaguguuuca

SEQ ID NO: 2087018 - RNA, 22 nt, Human
uuuguggcagaaguguuucaug

SEQ ID NO: 2087019 - RNA, 12 nt, Human
uuuguggccuca

SEQ ID NO: 2087020 - RNA, 14 nt, Human
uuuguggccucaga

SEQ ID NO: 2087021 - RNA, 15 nt, Human
uuuguggccucagaa

SEQ ID NO: 2087022 - RNA, 20 nt, Human
auuaguuguguacucuggcc

SEQ ID NO: 2087023 - RNA, 17 nt, Human
auuaguucuauuucuau

SEQ ID NO: 2087024 - RNA, 17 nt, Human
auuauaauuuaaugcau

SEQ ID NO: 2087025 - RNA, 23 nt, Human
auuauaauuuuuuucaauauuua

SEQ ID NO: 2087026 - RNA, 22 nt, Human
auuauaauuuuuuucaauauuu

SEQ ID NO: 2087027 - RNA, 13 nt, Human
auucuaaucuaac

SEQ ID NO: 2087028 - RNA, 15 nt, Human
auucuagcuuugagc

SEQ ID NO: 2087029 - RNA, 13 nt, Human
auucuaggcaucc

SEQ ID NO: 2087030 - RNA, 16 nt, Human
auucuaggcaucccag

SEQ ID NO: 2087031 - RNA, 20 nt, Human
auucuaggcaucccagggga

SEQ ID NO: 2087032 - RNA, 17 nt, Human
auucucauuugucacac

SEQ ID NO: 2087033 - RNA, 19 nt, Human
auucugccugcccaggccc

SEQ ID NO: 2087034 - RNA, 18 nt, Human
auucugccugcccaggcc

SEQ ID NO: 2087035 - RNA, 17 nt, Human
auucugccugcccaggc

SEQ ID NO: 2087036 - RNA, 16 nt, Human
auucugccugcccagg

SEQ ID NO: 2087037 - RNA, 15 nt, Human
auucugccugcccag

SEQ ID NO: 2087038 - RNA, 14 nt, Human
auucugccugccca

SEQ ID NO: 2087039 - RNA, 13 nt, Human
auucugccugccc

SEQ ID NO: 2087040 - RNA, 11 nt, Human
auucugccugc

SEQ ID NO: 2087041 - RNA, 14 nt, Human
auucuguuggccag

SEQ ID NO: 2087042 - RNA, 21 nt, Human
auucuguuggccagugugaca

SEQ ID NO: 2087043 - RNA, 19 nt, Human
auucuguuggccaguguga

SEQ ID NO: 2087044 - RNA, 14 nt, Human
auucuguaaaaugu

SEQ ID NO: 2087045 - RNA, 20 nt, Human
auucuguaaaaugucuguua

SEQ ID NO: 2087046 - RNA, 19 nt, Human
auucugcuaccucacuggg

SEQ ID NO: 2087047 - RNA, 15 nt, Human
auucugcuaccucac

SEQ ID NO: 2087048 - RNA, 22 nt, Human
auucugcucacauaucugucau

SEQ ID NO: 2087049 - RNA, 21 nt, Human
auucugcucacauaucuguca

SEQ ID NO: 2087050 - RNA, 20 nt, Human
auucugcucacauaucuguc

SEQ ID NO: 2087051 - RNA, 19 nt, Human
auucugcucacauaucugu

SEQ ID NO: 2087052 - RNA, 21 nt, Human
auucugccugcccaggccccu

SEQ ID NO: 2087053 - RNA, 20 nt, Human
auucugccugcccaggcccc

SEQ ID NO: 2087054 - RNA, 18 nt, Human
auucugcucacauaucug

SEQ ID NO: 2087055 - RNA, 20 nt, Human
auucugccuuugcagaaaca

SEQ ID NO: 2087056 - RNA, 21 nt, Human
auucugccuuugcagaaacag

SEQ ID NO: 2087057 - RNA, 22 nt, Human
auucugccuuugcagaaacaga

SEQ ID NO: 2087058 - RNA, 22 nt, Human
auucugccgugugcccucgggc

SEQ ID NO: 2087059 - RNA, 19 nt, Human
auugaacuuaaauaaaugu

SEQ ID NO: 2087060 - RNA, 18 nt, Human
auugaagagagagcugag

SEQ ID NO: 2087061 - RNA, 15 nt, Human
auugacaagucauuu

SEQ ID NO: 2087062 - RNA, 17 nt, Human
auugacaauaauuucag

SEQ ID NO: 2087063 - RNA, 18 nt, Human
auugacaauaauuucagg

SEQ ID NO: 2087064 - RNA, 20 nt, Human
auugacaauaauuucagguu

SEQ ID NO: 2087065 - RNA, 18 nt, Human
auugacuaucaaacugaa

SEQ ID NO: 2087066 - RNA, 21 nt, Human
auugacuaucaaacugaagcc

SEQ ID NO: 2087067 - RNA, 14 nt, Human
auugaaaaaaauug

SEQ ID NO: 2087068 - RNA, 16 nt, Human
auugaaaaaaauuggc

SEQ ID NO: 2087069 - RNA, 19 nt, Human
auugaaaaaaauuggcauu

SEQ ID NO: 2087070 - RNA, 22 nt, Human
auugaaaaaaauuggcauuaaa

SEQ ID NO: 2087071 - RNA, 17 nt, Human
auucuuuuuuaaauuuu

SEQ ID NO: 2087072 - RNA, 19 nt, Human
auucuuuuuuaaauuuucu

SEQ ID NO: 2087073 - RNA, 16 nt, Human
auugaaaugacuaaaa

SEQ ID NO: 2087074 - RNA, 17 nt, Human
auucuuacaaacaugug

SEQ ID NO: 2087075 - RNA, 16 nt, Human
auucuuacaaacaugu

SEQ ID NO: 2087076 - RNA, 21 nt, Human
auucuuacaaacaugugguua

SEQ ID NO: 2087077 - RNA, 12 nt, Human
auugaaggaaag

SEQ ID NO: 2087078 - RNA, 13 nt, Human
auugaaggaaaga

SEQ ID NO: 2087079 - RNA, 15 nt, Human
auugaaggaaagauu

SEQ ID NO: 2087080 - RNA, 14 nt, Human
auuuuugucuugug

SEQ ID NO: 2087081 - RNA, 22 nt, Human
auuuuuguuggagccacucugu

SEQ ID NO: 2087082 - RNA, 17 nt, Human
auuuuuguuucuuccaa

SEQ ID NO: 2087083 - RNA, 20 nt, Human
auuuuugugaaaugaaaaca

SEQ ID NO: 2087084 - RNA, 19 nt, Human
auuuuuguagagccagggu

SEQ ID NO: 2087085 - RNA, 20 nt, Human
auuuuuuaaaguuacuuugu

SEQ ID NO: 2087086 - RNA, 11 nt, Human
auuuuuuaagu

SEQ ID NO: 2087087 - RNA, 15 nt, Human
auuuuuuaaaaagca

SEQ ID NO: 2087088 - RNA, 16 nt, Human
auuuuuuaaaaagcaa

SEQ ID NO: 2087089 - RNA, 18 nt, Human
auuuuuuaaaaagcaaaa

SEQ ID NO: 2087090 - RNA, 15 nt, Human
auuuuuuaaaacaag

SEQ ID NO: 2087091 - RNA, 17 nt, Human
auuuuuuaaaacaagaa

SEQ ID NO: 2087092 - RNA, 22 nt, Human
auuuuuguuucuuccaaagcac

SEQ ID NO: 2087093 - RNA, 13 nt, Human
auuuuuguuuguu

SEQ ID NO: 2087094 - RNA, 14 nt, Human
auuuuuguuuguuu

SEQ ID NO: 2087095 - RNA, 17 nt, Human
auuuuuguuuguuuugu

SEQ ID NO: 2087096 - RNA, 15 nt, Human
auuuuuuaauaaccc

SEQ ID NO: 2087097 - RNA, 15 nt, Human
auuuuuuauucuugu

SEQ ID NO: 2087098 - RNA, 16 nt, Human
auuuuuuauucuugug

SEQ ID NO: 2087099 - RNA, 17 nt, Human
auuuuuuauucuuguga

SEQ ID NO: 2087100 - RNA, 13 nt, Human
auuuuuucagaaa

SEQ ID NO: 2087101 - RNA, 22 nt, Human
auuuuuucagaaauaugugguu

SEQ ID NO: 2087102 - RNA, 12 nt, Human
auuuuuuaauua

SEQ ID NO: 2087103 - RNA, 14 nt, Human
auuuuuuaauuauu

SEQ ID NO: 2087104 - RNA, 20 nt, Human
auuuuuuaaguauuuauaua

SEQ ID NO: 2087105 - RNA, 22 nt, Human
auuuuuuaaguauuuauauauu

SEQ ID NO: 2087106 - RNA, 16 nt, Human
auuuuuuaaguauuua

SEQ ID NO: 2087107 - RNA, 17 nt, Human
auuuuuuaaguauuuau

SEQ ID NO: 2087108 - RNA, 18 nt, Human
auuuuuuaaguauuuaua

SEQ ID NO: 2087109 - RNA, 19 nt, Human
auuuuuuaaguauuuauau

SEQ ID NO: 2087110 - RNA, 19 nt, Human
auuuuuuacagcugccugc

SEQ ID NO: 2087111 - RNA, 13 nt, Human
auuuuuuauacag

SEQ ID NO: 2087112 - RNA, 15 nt, Human
auuuuuuaauuauug

SEQ ID NO: 2087113 - RNA, 16 nt, Human
auuuuuuaauuauugu

SEQ ID NO: 2087114 - RNA, 21 nt, Human
auuuuuuaauuugaugaaagc

SEQ ID NO: 2087115 - RNA, 22 nt, Human
auuuuuuaauuugaugaaagcu

SEQ ID NO: 2087116 - RNA, 15 nt, Human
auuuuuuuaaaauca

SEQ ID NO: 2087117 - RNA, 18 nt, Human
auuuuuuuaaaaucacua

SEQ ID NO: 2087118 - RNA, 22 nt, Human
auuuuuuuaaaaucacuaacau

SEQ ID NO: 2087119 - RNA, 16 nt, Human
auuuuucagauauaaa

SEQ ID NO: 2087120 - RNA, 15 nt, Human
auuuuucacuucaaa

SEQ ID NO: 2087121 - RNA, 14 nt, Human
auuuuucagaugcu

SEQ ID NO: 2087122 - RNA, 15 nt, Human
auuuuucagaugcuu

SEQ ID NO: 2087123 - RNA, 18 nt, Human
auuuuucagaugcuucug

SEQ ID NO: 2087124 - RNA, 19 nt, Human
auuuuucauugauaugaaa

SEQ ID NO: 2087125 - RNA, 22 nt, Human
auuuuucauugauaugaaaaau

SEQ ID NO: 2087126 - RNA, 21 nt, Human
auuuuguuuuugucuuaaaaa

SEQ ID NO: 2087127 - RNA, 14 nt, Human
auuuuguuuuuaaa

SEQ ID NO: 2087128 - RNA, 15 nt, Human
auuuuuggauugaca

SEQ ID NO: 2087129 - RNA, 17 nt, Human
auuuuuggauugacagu

SEQ ID NO: 2087130 - RNA, 18 nt, Human
auuuuuggauugacagua

SEQ ID NO: 2087131 - RNA, 19 nt, Human
auuuuuggauugacaguaa

SEQ ID NO: 2087132 - RNA, 21 nt, Human
auuuuuggauugacaguaacu

SEQ ID NO: 2087133 - RNA, 22 nt, Human
auuuuuggauugacaguaacuu

SEQ ID NO: 2087134 - RNA, 11 nt, Human
auuuuucuucc

SEQ ID NO: 2087135 - RNA, 14 nt, Human
auuuuugaaaaggc

SEQ ID NO: 2087136 - RNA, 12 nt, Human
auuuugucuuua

SEQ ID NO: 2087137 - RNA, 23 nt, Human
auuuugucauauaagauucauau

SEQ ID NO: 2087138 - RNA, 20 nt, Human
auuuuguggcuuucuuucuu

SEQ ID NO: 2087139 - RNA, 19 nt, Human
auuuugugcccccauguaa

SEQ ID NO: 2087140 - RNA, 18 nt, Human
auuuuguauauuuguauu

SEQ ID NO: 2087141 - RNA, 12 nt, Human
auuuuguaauuu

SEQ ID NO: 2087142 - RNA, 15 nt, Human
auuuuguaauuuucu

SEQ ID NO: 2087143 - RNA, 16 nt, Human
auuuuguaauuuucuu

SEQ ID NO: 2087144 - RNA, 18 nt, Human
auuuuguaauuuucuuga

SEQ ID NO: 2087145 - RNA, 20 nt, Human
auuuuguaauuuucuugaug

SEQ ID NO: 2087146 - RNA, 20 nt, Human
auuuuguacaaauuuguuau

SEQ ID NO: 2087147 - RNA, 16 nt, Human
auuuuguaucuugaug

SEQ ID NO: 2087148 - RNA, 13 nt, Human
auuuuguaaaggu

SEQ ID NO: 2087149 - RNA, 17 nt, Human
auuuuguaaaggugaaa

SEQ ID NO: 2087150 - RNA, 20 nt, Human
auuuuggaaguuuucaggac

SEQ ID NO: 2087151 - RNA, 20 nt, Human
auuuugcuguagaagauggc

SEQ ID NO: 2087152 - RNA, 14 nt, Human
auuuuggaaaauaa

SEQ ID NO: 2087153 - RNA, 19 nt, Human
auuuuggaaaauaaauuau

SEQ ID NO: 2087154 - RNA, 20 nt, Human
auuuuggaaaauaaauuauu

SEQ ID NO: 2087155 - RNA, 16 nt, Human
auuuuccugccaggca

SEQ ID NO: 2087156 - RNA, 19 nt, Human
auuuucccuauuagagaag

SEQ ID NO: 2087157 - RNA, 15 nt, Human
auuuuaacuuuauca

SEQ ID NO: 2087158 - RNA, 17 nt, Human
auuuuaacuuuaucaca

SEQ ID NO: 2087159 - RNA, 19 nt, Human
auuuuaacuuuaucacauu

SEQ ID NO: 2087160 - RNA, 22 nt, Human
auuuuccccccacucuccccac

SEQ ID NO: 2087161 - RNA, 20 nt, Human
auuuuccccccacucucccc

SEQ ID NO: 2087162 - RNA, 21 nt, Human
auuuuccccccacucucccca

SEQ ID NO: 2087163 - RNA, 14 nt, Human
auuuuccccccacu

SEQ ID NO: 2087164 - RNA, 15 nt, Human
auuuuccccccacuc

SEQ ID NO: 2087165 - RNA, 15 nt, Human
auuuuccaugaaaau

SEQ ID NO: 2087166 - RNA, 21 nt, Human
auuuuccauuuuuauuucaaa

SEQ ID NO: 2087167 - RNA, 20 nt, Human
auuuucccaauagcacuuuc

SEQ ID NO: 2087168 - RNA, 22 nt, Human
auuuucccaauagcacuuucau

SEQ ID NO: 2087169 - RNA, 19 nt, Human
auuuugauccaagcugguc

SEQ ID NO: 2087170 - RNA, 14 nt, Human
auuuugcaaaauuu

SEQ ID NO: 2087171 - RNA, 15 nt, Human
auuuugcaaaauuuc

SEQ ID NO: 2087172 - RNA, 18 nt, Human
auuuugcaaaauuuccag

SEQ ID NO: 2087173 - RNA, 19 nt, Human
auuuugcaaaauuuccagu

SEQ ID NO: 2087174 - RNA, 18 nt, Human
auuuugccagugggaacu

SEQ ID NO: 2087175 - RNA, 16 nt, Human
auuuugcauuugaaua

SEQ ID NO: 2087176 - RNA, 12 nt, Human
auuuugcagcag

SEQ ID NO: 2087177 - RNA, 14 nt, Human
auuuugcagcagug

SEQ ID NO: 2087178 - RNA, 15 nt, Human
auuuugcagcaguga

SEQ ID NO: 2087179 - RNA, 16 nt, Human
auuuugcagcagugag

SEQ ID NO: 2087180 - RNA, 22 nt, Human
auuuugcccuuccauagccuaa

SEQ ID NO: 2087181 - RNA, 12 nt, Human
auuuugcauaaa

SEQ ID NO: 2087182 - RNA, 22 nt, Human
auuuugccuaauacauuaaagc

SEQ ID NO: 2087183 - RNA, 23 nt, Human
auuuugccuaauacauuaaagca

SEQ ID NO: 2087184 - RNA, 20 nt, Human
auuuugcuaaaugugaauga

SEQ ID NO: 2087185 - RNA, 14 nt, Human
auuguacaguuuuu

SEQ ID NO: 2087186 - RNA, 15 nt, Human
auuguacaguuuuua

SEQ ID NO: 2087187 - RNA, 21 nt, Human
auuguacaguuuuuauugcuu

SEQ ID NO: 2087188 - RNA, 12 nt, Human
auuguaccucuc

SEQ ID NO: 2087189 - RNA, 19 nt, Human
auuguaccucucuuauaga

SEQ ID NO: 2087190 - RNA, 18 nt, Human
auuguaccucucuuauag

SEQ ID NO: 2087191 - RNA, 14 nt, Human
auugucagauauuu

SEQ ID NO: 2087192 - RNA, 23 nt, Human
auugucagauauuuuuucagaaa

SEQ ID NO: 2087193 - RNA, 13 nt, Human
auugucagcuacu

SEQ ID NO: 2087194 - RNA, 17 nt, Human
auuguggcugucagcag

SEQ ID NO: 2087195 - RNA, 18 nt, Human
auuguggcugucagcagg

SEQ ID NO: 2087196 - RNA, 19 nt, Human
auuguggcugucagcagga

SEQ ID NO: 2087197 - RNA, 14 nt, Human
auugucucagagca

SEQ ID NO: 2087198 - RNA, 19 nt, Human
auugucagcuacuaaugau

SEQ ID NO: 2087199 - RNA, 12 nt, Human
auugucucagag

SEQ ID NO: 2087200 - RNA, 16 nt, Human
auuuaaagacaaagac

SEQ ID NO: 2087201 - RNA, 21 nt, Human
auuguuuggggaugagaaagg

SEQ ID NO: 2087202 - RNA, 20 nt, Human
auuguuugucugucuucaua

SEQ ID NO: 2087203 - RNA, 16 nt, Human
auuggauuugucuuug

SEQ ID NO: 2087204 - RNA, 18 nt, Human
auugauuucccuucuucu

SEQ ID NO: 2087205 - RNA, 19 nt, Human
auuggcaaagaugugggga

SEQ ID NO: 2087206 - RNA, 21 nt, Human
auugguuuuaauugaaggaaa

SEQ ID NO: 2087207 - RNA, 22 nt, Human
auugguuuuaauugaaggaaag

SEQ ID NO: 2087208 - RNA, 16 nt, Human
auugguucccuuugcu

SEQ ID NO: 2087209 - RNA, 17 nt, Human
auugguucccuuugcuc

SEQ ID NO: 2087210 - RNA, 18 nt, Human
auugguucccuuugcucc

SEQ ID NO: 2087211 - RNA, 14 nt, Human
auugguccagcuug

SEQ ID NO: 2087212 - RNA, 15 nt, Human
auugguccagcuugc

SEQ ID NO: 2087213 - RNA, 17 nt, Human
auugguccagcuugcuc

SEQ ID NO: 2087214 - RNA, 18 nt, Human
auugguaaagaauggaag

SEQ ID NO: 2087215 - RNA, 13 nt, Human
auuggguucauua

SEQ ID NO: 2087216 - RNA, 18 nt, Human
auuggguggguaaauuca

SEQ ID NO: 2087217 - RNA, 13 nt, Human
auugggaaaucuu

SEQ ID NO: 2087218 - RNA, 22 nt, Human
auuggaggaccaaaaaaauaag

SEQ ID NO: 2087219 - RNA, 23 nt, Human
auuggagggugggagagcccagc

SEQ ID NO: 2087220 - RNA, 22 nt, Human
auuggagggugggagagcccag

SEQ ID NO: 2087221 - RNA, 19 nt, Human
auuggacauuaagcaucac

SEQ ID NO: 2087222 - RNA, 22 nt, Human
auuggacauuaagcaucacaaa

SEQ ID NO: 2087223 - RNA, 14 nt, Human
auuggaauuaaccu

SEQ ID NO: 2087224 - RNA, 12 nt, Human
auuggaauuaac

SEQ ID NO: 2087225 - RNA, 15 nt, Human
auuggaauuaaccug

SEQ ID NO: 2087226 - RNA, 16 nt, Human
auuggaauuaaccugg

SEQ ID NO: 2087227 - RNA, 19 nt, Human
auuggaauuaaccuggugc

SEQ ID NO: 2087228 - RNA, 20 nt, Human
auuggaauuaaccuggugcu

SEQ ID NO: 2087229 - RNA, 13 nt, Human
auugauuucaaga

SEQ ID NO: 2087230 - RNA, 16 nt, Human
auugauuucaagaccu

SEQ ID NO: 2087231 - RNA, 13 nt, Human
auugauugcugug

SEQ ID NO: 2087232 - RNA, 15 nt, Human
auugauugcuguguc

SEQ ID NO: 2087233 - RNA, 23 nt, Human
auugauugcuguguccaacucca

SEQ ID NO: 2087234 - RNA, 16 nt, Human
auugacuucgacugug

SEQ ID NO: 2087235 - RNA, 16 nt, Human
auuuccacucaggucu

SEQ ID NO: 2087236 - RNA, 16 nt, Human
auuuccaagagcugag

SEQ ID NO: 2087237 - RNA, 15 nt, Human
auuuccaagagcuga

SEQ ID NO: 2087238 - RNA, 17 nt, Human
auuuccaaauucacaag

SEQ ID NO: 2087239 - RNA, 14 nt, Human
auuucccaagcugg

SEQ ID NO: 2087240 - RNA, 17 nt, Human
auuucccaauuaggaag

SEQ ID NO: 2087241 - RNA, 18 nt, Human
auuucccaauuaggaagu

SEQ ID NO: 2087242 - RNA, 15 nt, Human
auuucccaggguuaa

SEQ ID NO: 2087243 - RNA, 16 nt, Human
auuuccaaagagaaaa

SEQ ID NO: 2087244 - RNA, 14 nt, Human
auuuauuucaaaaa

SEQ ID NO: 2087245 - RNA, 12 nt, Human
auuuauuuaaau

SEQ ID NO: 2087246 - RNA, 14 nt, Human
auuuauuuaaauuu

SEQ ID NO: 2087247 - RNA, 13 nt, Human
auuucuucucaaa

SEQ ID NO: 2087248 - RNA, 15 nt, Human
auuugucaacaaagu

SEQ ID NO: 2087249 - RNA, 13 nt, Human
auuugucaacaaa

SEQ ID NO: 2087250 - RNA, 14 nt, Human
auuugucaaugaca

SEQ ID NO: 2087251 - RNA, 17 nt, Human
auuugucaaugacaguu

SEQ ID NO: 2087252 - RNA, 16 nt, Human
auuuggccugcacuaa

SEQ ID NO: 2087253 - RNA, 19 nt, Human
auuuggccugcacuaauuu

SEQ ID NO: 2087254 - RNA, 14 nt, Human
auuugucauuuuga

SEQ ID NO: 2087255 - RNA, 15 nt, Human
auuugucauuuugaa

SEQ ID NO: 2087256 - RNA, 16 nt, Human
auuugucauuuugaag

SEQ ID NO: 2087257 - RNA, 21 nt, Human
auuugucauuuugaagcuaau

SEQ ID NO: 2087258 - RNA, 18 nt, Human
auuugucgauauuuccau

SEQ ID NO: 2087259 - RNA, 23 nt, Human
auuugugaaaugauggugaaagu

SEQ ID NO: 2087260 - RNA, 22 nt, Human
auuuuaaaaauacagauagaua

SEQ ID NO: 2087261 - RNA, 14 nt, Human
auuuuaacaauaac

SEQ ID NO: 2087262 - RNA, 15 nt, Human
auuuuaacaauaacu

SEQ ID NO: 2087263 - RNA, 16 nt, Human
auuuuaacaauaacua

SEQ ID NO: 2087264 - RNA, 22 nt, Human
auuuuaacaauaacuacugugu

SEQ ID NO: 2087265 - RNA, 14 nt, Human
auuuuaacacacau

SEQ ID NO: 2087266 - RNA, 15 nt, Human
auuuuaacacacaua

SEQ ID NO: 2087267 - RNA, 17 nt, Human
auuuuaacacacauaaa

SEQ ID NO: 2087268 - RNA, 18 nt, Human
auuuuaacacacauaaag

SEQ ID NO: 2087269 - RNA, 20 nt, Human
auuuuaacacacauaaagga

SEQ ID NO: 2087270 - RNA, 21 nt, Human
auuuuaacacacauaaaggau

SEQ ID NO: 2087271 - RNA, 22 nt, Human
auuuuaacacacauaaaggaua

SEQ ID NO: 2087272 - RNA, 13 nt, Human
auuuuaacaugga

SEQ ID NO: 2087273 - RNA, 21 nt, Human
auuuuaacauggaacucuagg

SEQ ID NO: 2087274 - RNA, 14 nt, Human
caaugacacagucu

SEQ ID NO: 2087275 - RNA, 19 nt, Human
caauccuggcucuguggcu

SEQ ID NO: 2087276 - RNA, 19 nt, Human
caaugacacagucuuggcu

SEQ ID NO: 2087277 - RNA, 21 nt, Human
caaugacacagucuuggcuca

SEQ ID NO: 2087278 - RNA, 16 nt, Human
caaugaacggccuugc

SEQ ID NO: 2087279 - RNA, 20 nt, Human
caaugaaggaaauaaaaaag

SEQ ID NO: 2087280 - RNA, 19 nt, Human
caaugaggucugaaaugga

SEQ ID NO: 2087281 - RNA, 15 nt, Human
caaugacaucuucaa

SEQ ID NO: 2087282 - RNA, 19 nt, Human
caaugacaucuucaaagcu

SEQ ID NO: 2087283 - RNA, 16 nt, Human
caaugcagugccuuuc

SEQ ID NO: 2087284 - RNA, 14 nt, Human
caaugcagaugcca

SEQ ID NO: 2087285 - RNA, 16 nt, Human
caaugcagaugccaga

SEQ ID NO: 2087286 - RNA, 17 nt, Human
caaugcagaugccagag

SEQ ID NO: 2087287 - RNA, 18 nt, Human
caaugcagaugccagagc

SEQ ID NO: 2087288 - RNA, 19 nt, Human
caaugcagaugccagagca

SEQ ID NO: 2087289 - RNA, 19 nt, Human
caaugaugaugauaaugau

SEQ ID NO: 2087290 - RNA, 23 nt, Human
caauaggcaaaggggggaaggga

SEQ ID NO: 2087291 - RNA, 11 nt, Human
caagugugugu

SEQ ID NO: 2087292 - RNA, 18 nt, Human
caaguuaaagugaauaac

SEQ ID NO: 2087293 - RNA, 16 nt, Human
caauaggaaugcuaac

SEQ ID NO: 2087294 - RNA, 18 nt, Human
caauaggaaugcuaacag

SEQ ID NO: 2087295 - RNA, 20 nt, Human
caagugugugcaugugugcg

SEQ ID NO: 2087296 - RNA, 17 nt, Human
caagugugugugcgugu

SEQ ID NO: 2087297 - RNA, 22 nt, Human
caagugugguagggacuuaaaa

SEQ ID NO: 2087298 - RNA, 23 nt, Human
caagugugguagggacuuaaaaa

SEQ ID NO: 2087299 - RNA, 23 nt, Human
caaguguguaugugcgugugugc

SEQ ID NO: 2087300 - RNA, 11 nt, Human
caagugugugc

SEQ ID NO: 2087301 - RNA, 14 nt, Human
caagugugugcaca

SEQ ID NO: 2087302 - RNA, 19 nt, Human
caagugugugcacaugugu

SEQ ID NO: 2087303 - RNA, 20 nt, Human
caagugugugcacaugugug

SEQ ID NO: 2087304 - RNA, 21 nt, Human
caagugugugcacaugugugc

SEQ ID NO: 2087305 - RNA, 22 nt, Human
caagugugugcacaugugugcg

SEQ ID NO: 2087306 - RNA, 16 nt, Human
caagugugugcaugug

SEQ ID NO: 2087307 - RNA, 17 nt, Human
caagugugugcaugugu

SEQ ID NO: 2087308 - RNA, 16 nt, Human
caauauguauuaauau

SEQ ID NO: 2087309 - RNA, 22 nt, Human
caauauguauuaauauucauug

SEQ ID NO: 2087310 - RNA, 12 nt, Human
caauccuggcuc

SEQ ID NO: 2087311 - RNA, 19 nt, Human
caaugaaaugcucuccuuu

SEQ ID NO: 2087312 - RNA, 21 nt, Human
caaugaaaugcucuccuuucc

SEQ ID NO: 2087313 - RNA, 14 nt, Human
caauccucacuggg

SEQ ID NO: 2087314 - RNA, 16 nt, Human
caauccucacugggug

SEQ ID NO: 2087315 - RNA, 17 nt, Human
caauccucacugggugg

SEQ ID NO: 2087316 - RNA, 13 nt, Human
caauccuccugag

SEQ ID NO: 2087317 - RNA, 13 nt, Human
caauccucuaagc

SEQ ID NO: 2087318 - RNA, 18 nt, Human
caauccucacuggguggg

SEQ ID NO: 2087319 - RNA, 18 nt, Human
cacaaaaguuucucuuuu

SEQ ID NO: 2087320 - RNA, 16 nt, Human
cacaaaaguuucucuu

SEQ ID NO: 2087321 - RNA, 12 nt, Human
cacaaaaaugaa

SEQ ID NO: 2087322 - RNA, 22 nt, Human
cacaaaaaaaguugaaggccuu

SEQ ID NO: 2087323 - RNA, 14 nt, Human
cacaaaagccucuc

SEQ ID NO: 2087324 - RNA, 12 nt, Human
cacaaagagagu

SEQ ID NO: 2087325 - RNA, 22 nt, Human
cacaaagagaguuaaucaacug

SEQ ID NO: 2087326 - RNA, 20 nt, Human
cacaacccaucuaccccugg

SEQ ID NO: 2087327 - RNA, 21 nt, Human
cacaacccaucuaccccugga

SEQ ID NO: 2087328 - RNA, 23 nt, Human
cacaaccuucuguggcucacaga

SEQ ID NO: 2087329 - RNA, 19 nt, Human
cacaaccuucuguggcuca

SEQ ID NO: 2087330 - RNA, 18 nt, Human
cacaaccuucuguggcuc

SEQ ID NO: 2087331 - RNA, 17 nt, Human
cacaaccuucuguggcu

SEQ ID NO: 2087332 - RNA, 11 nt, Human
cacaacaaaaa

SEQ ID NO: 2087333 - RNA, 12 nt, Human
cacaacaaaaau

SEQ ID NO: 2087334 - RNA, 17 nt, Human
cacaacaaaaauuugaa

SEQ ID NO: 2087335 - RNA, 22 nt, Human
cacaacaaaaauuugaaccaaa

SEQ ID NO: 2087336 - RNA, 16 nt, Human
cacaacacacacacuc

SEQ ID NO: 2087337 - RNA, 15 nt, Human
cacaaauuaucuuaa

SEQ ID NO: 2087338 - RNA, 12 nt, Human
caauuaaaugua

SEQ ID NO: 2087339 - RNA, 13 nt, Human
caauuaaauguag

SEQ ID NO: 2087340 - RNA, 14 nt, Human
caauuaaauguagg

SEQ ID NO: 2087341 - RNA, 19 nt, Human
caaugucuugguacuugcu

SEQ ID NO: 2087342 - RNA, 23 nt, Human
caaugucuugguacuugcugcua

SEQ ID NO: 2087343 - RNA, 21 nt, Human
caaugucaggaacagaaggau

SEQ ID NO: 2087344 - RNA, 20 nt, Human
caauuuuaacacacauaaag

SEQ ID NO: 2087345 - RNA, 22 nt, Human
caauuuuaacacacauaaagga

SEQ ID NO: 2087346 - RNA, 21 nt, Human
caauucagugcuguacuugau

SEQ ID NO: 2087347 - RNA, 18 nt, Human
caauucauccucacucag

SEQ ID NO: 2087348 - RNA, 14 nt, Human
caauucaacccuuu

SEQ ID NO: 2087349 - RNA, 20 nt, Human
caauucauauuuaugaaucu

SEQ ID NO: 2087350 - RNA, 15 nt, Human
caauuccaaaggaau

SEQ ID NO: 2087351 - RNA, 17 nt, Human
caauucaacccuuugcc

SEQ ID NO: 2087352 - RNA, 22 nt, Human
caauuaaauguagguaugaaua

SEQ ID NO: 2087353 - RNA, 19 nt, Human
caaugugaaaagaaaaaug

SEQ ID NO: 2087354 - RNA, 18 nt, Human
cacacccucucccaggac

SEQ ID NO: 2087355 - RNA, 14 nt, Human
cacacccuguuuua

SEQ ID NO: 2087356 - RNA, 17 nt, Human
cacacccucucccagga

SEQ ID NO: 2087357 - RNA, 17 nt, Human
cacaccgggcacucaga

SEQ ID NO: 2087358 - RNA, 22 nt, Human
cacaccuguaaucccagcacuu

SEQ ID NO: 2087359 - RNA, 12 nt, Human
cacaccuggccc

SEQ ID NO: 2087360 - RNA, 13 nt, Human
cacaccuggcccu

SEQ ID NO: 2087361 - RNA, 14 nt, Human
cacaccuggcccug

SEQ ID NO: 2087362 - RNA, 17 nt, Human
cacaccuggcccugggg

SEQ ID NO: 2087363 - RNA, 19 nt, Human
cacaccuggcccuggggcc

SEQ ID NO: 2087364 - RNA, 16 nt, Human
cacaccuguaguccca

SEQ ID NO: 2087365 - RNA, 19 nt, Human
cacaccuguagucccagcu

SEQ ID NO: 2087366 - RNA, 14 nt, Human
cacacgcacacaca

SEQ ID NO: 2087367 - RNA, 20 nt, Human
cacaccuguagucccagcua

SEQ ID NO: 2087368 - RNA, 15 nt, Human
cacacgcacacacac

SEQ ID NO: 2087369 - RNA, 16 nt, Human
cacacgcacacacaca

SEQ ID NO: 2087370 - RNA, 13 nt, Human
cacaccagagccc

SEQ ID NO: 2087371 - RNA, 12 nt, Human
cacaccagagcc

SEQ ID NO: 2087372 - RNA, 15 nt, Human
cacaccagagcccac

SEQ ID NO: 2087373 - RNA, 21 nt, Human
cacaccaggcugugggccuca

SEQ ID NO: 2087374 - RNA, 13 nt, Human
cacacccagccca

SEQ ID NO: 2087375 - RNA, 21 nt, Human
cacaccaggcuugccugcagg

SEQ ID NO: 2087376 - RNA, 22 nt, Human
cacaccaggcuugccugcaggc

SEQ ID NO: 2087377 - RNA, 22 nt, Human
cacaccaggcugugggccucaa

SEQ ID NO: 2087378 - RNA, 14 nt, Human
cacacaccagagcc

SEQ ID NO: 2087379 - RNA, 13 nt, Human
cacacacaggcaa

SEQ ID NO: 2087380 - RNA, 21 nt, Human
cacacacaggcaacugaggca

SEQ ID NO: 2087381 - RNA, 17 nt, Human
cacaacccuguuuuaua

SEQ ID NO: 2087382 - RNA, 12 nt, Human
cacacacagcuu

SEQ ID NO: 2087383 - RNA, 12 nt, Human
cacacacaggag

SEQ ID NO: 2087384 - RNA, 12 nt, Human
cacacagcucug

SEQ ID NO: 2087385 - RNA, 19 nt, Human
cacacagaggcugccucuc

SEQ ID NO: 2087386 - RNA, 12 nt, Human
cacacagaggaa

SEQ ID NO: 2087387 - RNA, 18 nt, Human
cacacagaggaagagcag

SEQ ID NO: 2087388 - RNA, 22 nt, Human
cacacagaggaagagcaggcac

SEQ ID NO: 2087389 - RNA, 19 nt, Human
cacagacgccuuacuggca

SEQ ID NO: 2087390 - RNA, 23 nt, Human
cacagacuauugacaucagcauc

SEQ ID NO: 2087391 - RNA, 16 nt, Human
cacagacgucccucca

SEQ ID NO: 2087392 - RNA, 23 nt, Human
cacagagaacuagugguggcucu

SEQ ID NO: 2087393 - RNA, 20 nt, Human
cacagacuggagacaaugca

SEQ ID NO: 2087394 - RNA, 14 nt, Human
cacagagacacagg

SEQ ID NO: 2087395 - RNA, 18 nt, Human
cacagagacacagggcau

SEQ ID NO: 2087396 - RNA, 14 nt, Human
cacagagacccccg

SEQ ID NO: 2087397 - RNA, 10 nt, Human
cacagagaga

SEQ ID NO: 2087398 - RNA, 12 nt, Human
cacagagagaaa

SEQ ID NO: 2087399 - RNA, 18 nt, Human
cacagagagacagacuug

SEQ ID NO: 2087400 - RNA, 20 nt, Human
cacagagagacagacuugag

SEQ ID NO: 2087401 - RNA, 22 nt, Human
cacagagagacagacuugagaa

SEQ ID NO: 2087402 - RNA, 22 nt, Human
cacagagacccccggaacaagc

SEQ ID NO: 2087403 - RNA, 23 nt, Human
cacagagacccccggaacaagcc

SEQ ID NO: 2087404 - RNA, 22 nt, Human
cacagagagggggccaccuccc

SEQ ID NO: 2087405 - RNA, 13 nt, Human
cacacuugugugu

SEQ ID NO: 2087406 - RNA, 19 nt, Human
cacacuugugugugggcug

SEQ ID NO: 2087407 - RNA, 21 nt, Human
cacacuugugugugggcugug

SEQ ID NO: 2087408 - RNA, 23 nt, Human
cacacuugugugugggcugugag

SEQ ID NO: 2087409 - RNA, 15 nt, Human
cacacuuguuccagc

SEQ ID NO: 2087410 - RNA, 10 nt, Human
cacacuuguc

SEQ ID NO: 2087411 - RNA, 22 nt, Human
cacacuugguuggguccucaca

SEQ ID NO: 2087412 - RNA, 16 nt, Human
cacacuuguuccagcu

SEQ ID NO: 2087413 - RNA, 17 nt, Human
cacacuuguuccagcuc

SEQ ID NO: 2087414 - RNA, 18 nt, Human
cacacuuguuccagcucu

SEQ ID NO: 2087415 - RNA, 15 nt, Human
cacacuucugugaga

SEQ ID NO: 2087416 - RNA, 22 nt, Human
cacacuucugugagacccccac

SEQ ID NO: 2087417 - RNA, 16 nt, Human
cacacuuccaccagcc

SEQ ID NO: 2087418 - RNA, 18 nt, Human
cacacuuccaccagccug

SEQ ID NO: 2087419 - RNA, 19 nt, Human
cacacuuccaccagccugc

SEQ ID NO: 2087420 - RNA, 23 nt, Human
cacacuuccuguccagagagaga

SEQ ID NO: 2087421 - RNA, 19 nt, Human
cacacuuccuguccagaga

SEQ ID NO: 2087422 - RNA, 20 nt, Human
cacacuuccuguccagagag

SEQ ID NO: 2087423 - RNA, 13 nt, Human
cacacuuccuguc

SEQ ID NO: 2087424 - RNA, 14 nt, Human
cacacuuccugucc

SEQ ID NO: 2087425 - RNA, 15 nt, Human
cacacuuccugucca

SEQ ID NO: 2087426 - RNA, 16 nt, Human
cacacuuccuguccag

SEQ ID NO: 2087427 - RNA, 17 nt, Human
cacacuucaggcucuuc

SEQ ID NO: 2087428 - RNA, 14 nt, Human
cacacuucaggcuc

SEQ ID NO: 2087429 - RNA, 22 nt, Human
cacacuucaggcucuucuccuu

SEQ ID NO: 2087430 - RNA, 21 nt, Human
cacacuucaggcucuucuccu

SEQ ID NO: 2087431 - RNA, 20 nt, Human
cacacuucaggcucuucucc

SEQ ID NO: 2087432 - RNA, 18 nt, Human
cacacuucaggcucuucu

SEQ ID NO: 2087433 - RNA, 23 nt, Human
cacacugcuaggugggccagccc

SEQ ID NO: 2087434 - RNA, 23 nt, Human
cacacuguagcauuacagugggu

SEQ ID NO: 2087435 - RNA, 13 nt, Human
cacacugaggcag

SEQ ID NO: 2087436 - RNA, 14 nt, Human
cacacugaggcagg

SEQ ID NO: 2087437 - RNA, 17 nt, Human
cacacucagcacccccu

SEQ ID NO: 2087438 - RNA, 20 nt, Human
cacacucagcacccccuucu

SEQ ID NO: 2087439 - RNA, 22 nt, Human
cacacucagcacccccuucucu

SEQ ID NO: 2087440 - RNA, 15 nt, Human
cacacugaggcaggg

SEQ ID NO: 2087441 - RNA, 16 nt, Human
cacacugaggcaggga

SEQ ID NO: 2087442 - RNA, 17 nt, Human
cacacugaggcagggaa

SEQ ID NO: 2087443 - RNA, 18 nt, Human
cacacugaggcagggaag

SEQ ID NO: 2087444 - RNA, 21 nt, Human
cacacugcaagagccuuggug

SEQ ID NO: 2087445 - RNA, 19 nt, Human
cacacugcaagagccuugg

SEQ ID NO: 2087446 - RNA, 20 nt, Human
cacacugcaagagccuuggu

SEQ ID NO: 2087447 - RNA, 14 nt, Human
cacacugcaacagg

SEQ ID NO: 2087448 - RNA, 17 nt, Human
cacacugcaacaggaac

SEQ ID NO: 2087449 - RNA, 16 nt, Human
cacacugcaagagccu

SEQ ID NO: 2087450 - RNA, 17 nt, Human
cacacugcaagagccuu

SEQ ID NO: 2087451 - RNA, 18 nt, Human
cacacugcaagagccuug

SEQ ID NO: 2087452 - RNA, 17 nt, Human
cacacuagccucuccag

SEQ ID NO: 2087453 - RNA, 18 nt, Human
cacacuagccucuccagg

SEQ ID NO: 2087454 - RNA, 19 nt, Human
cacacuagccucuccagga

SEQ ID NO: 2087455 - RNA, 16 nt, Human
cacauguguccauccc

SEQ ID NO: 2087456 - RNA, 19 nt, Human
cacauguguccaucccagc

SEQ ID NO: 2087457 - RNA, 11 nt, Human
cacaugugugc

SEQ ID NO: 2087458 - RNA, 17 nt, Human
cacaugugcacaugcac

SEQ ID NO: 2087459 - RNA, 15 nt, Human
cacaugugcacaugc

SEQ ID NO: 2087460 - RNA, 14 nt, Human
cacaugugcacaug

SEQ ID NO: 2087461 - RNA, 15 nt, Human
cacauuauuugcaug

SEQ ID NO: 2087462 - RNA, 16 nt, Human
cacauucaauaagcau

SEQ ID NO: 2087463 - RNA, 13 nt, Human
cacauuauuugca

SEQ ID NO: 2087464 - RNA, 14 nt, Human
cacauuauuugcau

SEQ ID NO: 2087465 - RNA, 23 nt, Human
cacauuaucgggagcagugucuu

SEQ ID NO: 2087466 - RNA, 22 nt, Human
cacauuaucgggagcagugucu

SEQ ID NO: 2087467 - RNA, 19 nt, Human
cacauuaauauuugcugac

SEQ ID NO: 2087468 - RNA, 23 nt, Human
cacauuaagccuuccacacucac

SEQ ID NO: 2087469 - RNA, 18 nt, Human
cacauuaauauuugcuga

SEQ ID NO: 2087470 - RNA, 19 nt, Human
cacauuaggcauugagacu

SEQ ID NO: 2087471 - RNA, 16 nt, Human
cacauuaucgggagca

SEQ ID NO: 2087472 - RNA, 17 nt, Human
cacauuaucgggagcag

SEQ ID NO: 2087473 - RNA, 20 nt, Human
cacauuaucgggagcagugu

SEQ ID NO: 2087474 - RNA, 21 nt, Human
cacaugcuugaugguuuaugu

SEQ ID NO: 2087475 - RNA, 18 nt, Human
cacauggcuauguuuuag

SEQ ID NO: 2087476 - RNA, 18 nt, Human
cacaugggugaacacuca

SEQ ID NO: 2087477 - RNA, 14 nt, Human
cacauaucugucau

SEQ ID NO: 2087478 - RNA, 12 nt, Human
cacauaucuguc

SEQ ID NO: 2087479 - RNA, 20 nt, Human
caccacuaggacucugaggc

SEQ ID NO: 2087480 - RNA, 15 nt, Human
caccacguccagcug

SEQ ID NO: 2087481 - RNA, 23 nt, Human
caccacccgcuuucuugcugguu

SEQ ID NO: 2087482 - RNA, 22 nt, Human
caccacccuagucccuuccccu

SEQ ID NO: 2087483 - RNA, 22 nt, Human
caccaccuaggccacuccucca

SEQ ID NO: 2087484 - RNA, 23 nt, Human
caccaccuaggccacuccuccaa

SEQ ID NO: 2087485 - RNA, 12 nt, Human
caccaccucucc

SEQ ID NO: 2087486 - RNA, 13 nt, Human
caccaccaggucu

SEQ ID NO: 2087487 - RNA, 14 nt, Human
caccaccaggucuc

SEQ ID NO: 2087488 - RNA, 15 nt, Human
caccaccaggucucc

SEQ ID NO: 2087489 - RNA, 11 nt, Human
caccacccaaa

SEQ ID NO: 2087490 - RNA, 14 nt, Human
caccaccccagcug

SEQ ID NO: 2087491 - RNA, 21 nt, Human
caccaccccagcugcuccccu

SEQ ID NO: 2087492 - RNA, 18 nt, Human
caccacaugugcacaugc

SEQ ID NO: 2087493 - RNA, 15 nt, Human
caccacaugugcaca

SEQ ID NO: 2087494 - RNA, 19 nt, Human
caccacaugugcacaugca

SEQ ID NO: 2087495 - RNA, 15 nt, Human
caccaagcccaguua

SEQ ID NO: 2087496 - RNA, 21 nt, Human
cacauugccagugacaugaga

SEQ ID NO: 2087497 - RNA, 20 nt, Human
cacauugugucacaucauga

SEQ ID NO: 2087498 - RNA, 17 nt, Human
caccacacccagcccac

SEQ ID NO: 2087499 - RNA, 20 nt, Human
caccaagcucacaguuccuc

SEQ ID NO: 2087500 - RNA, 13 nt, Human
caccacagcaggu

SEQ ID NO: 2087501 - RNA, 18 nt, Human
caccacauccuccgucca

SEQ ID NO: 2087502 - RNA, 21 nt, Human
caccacauccuccguccagcc

SEQ ID NO: 2087503 - RNA, 15 nt, Human
caccacacccagccc

SEQ ID NO: 2087504 - RNA, 13 nt, Human
caccacacccagc

SEQ ID NO: 2087505 - RNA, 14 nt, Human
caccaagcucacag

SEQ ID NO: 2087506 - RNA, 15 nt, Human
caccaagcucacagu

SEQ ID NO: 2087507 - RNA, 19 nt, Human
caccaagcucacaguuccu

SEQ ID NO: 2087508 - RNA, 16 nt, Human
caccaccccagcugcu

SEQ ID NO: 2087509 - RNA, 16 nt, Human
cacagcagccccugca

SEQ ID NO: 2087510 - RNA, 20 nt, Human
cacagauggauuugccugug

SEQ ID NO: 2087511 - RNA, 23 nt, Human
cacagauggauuugccugugcca

SEQ ID NO: 2087512 - RNA, 22 nt, Human
cacagaguggucuuucuggaga

SEQ ID NO: 2087513 - RNA, 13 nt, Human
cacagcaugugua

SEQ ID NO: 2087514 - RNA, 18 nt, Human
cacagcagccucugaagu

SEQ ID NO: 2087515 - RNA, 14 nt, Human
cacagccgcagccu

SEQ ID NO: 2087516 - RNA, 23 nt, Human
cacagccgcagccucccucugac

SEQ ID NO: 2087517 - RNA, 21 nt, Human
cacagccgcagccucccucug

SEQ ID NO: 2087518 - RNA, 22 nt, Human
cacagccgcagccucccucuga

SEQ ID NO: 2087519 - RNA, 18 nt, Human
cacagccggggccugccu

SEQ ID NO: 2087520 - RNA, 19 nt, Human
cacagccggggccugccua

SEQ ID NO: 2087521 - RNA, 20 nt, Human
cacagccggggccugccuag

SEQ ID NO: 2087522 - RNA, 22 nt, Human
cacagccggggccugccuagca

SEQ ID NO: 2087523 - RNA, 16 nt, Human
cacaggaucagucuga

SEQ ID NO: 2087524 - RNA, 15 nt, Human
cacaggaucagucug

SEQ ID NO: 2087525 - RNA, 12 nt, Human
cacaggaucagu

SEQ ID NO: 2087526 - RNA, 19 nt, Human
cacaggcccggcuccaggc

SEQ ID NO: 2087527 - RNA, 18 nt, Human
cacaggcccggcuccagg

SEQ ID NO: 2087528 - RNA, 17 nt, Human
cacaggcccggcuccag

SEQ ID NO: 2087529 - RNA, 16 nt, Human
cacaggcccggcucca

SEQ ID NO: 2087530 - RNA, 10 nt, Human
cacaggcagg

SEQ ID NO: 2087531 - RNA, 22 nt, Human
cacaggcaacugaggcagacag

SEQ ID NO: 2087532 - RNA, 23 nt, Human
cacaggcaacugaggcagacagc

SEQ ID NO: 2087533 - RNA, 14 nt, Human
cacaggcagcauuu

SEQ ID NO: 2087534 - RNA, 14 nt, Human
cacaggauagauaa

SEQ ID NO: 2087535 - RNA, 15 nt, Human
cacaggcagcauuua

SEQ ID NO: 2087536 - RNA, 14 nt, Human
cacauaaaggauaa

SEQ ID NO: 2087537 - RNA, 18 nt, Human
cacauaaaggauaaacuu

SEQ ID NO: 2087538 - RNA, 13 nt, Human
cacauaacagaau

SEQ ID NO: 2087539 - RNA, 21 nt, Human
cacauauaaacaucacacaca

SEQ ID NO: 2087540 - RNA, 21 nt, Human
cacauagugaugguuccccug

SEQ ID NO: 2087541 - RNA, 17 nt, Human
cacauacacacacacgc

SEQ ID NO: 2087542 - RNA, 23 nt, Human
cacaggcccggcuccaggcuccu

SEQ ID NO: 2087543 - RNA, 20 nt, Human
cacaggcccggcuccaggcu

SEQ ID NO: 2087544 - RNA, 15 nt, Human
cacaggcccuuccuc

SEQ ID NO: 2087545 - RNA, 18 nt, Human
cacagugagucgaggaca

SEQ ID NO: 2087546 - RNA, 20 nt, Human
cacagugagucgaggacagg

SEQ ID NO: 2087547 - RNA, 19 nt, Human
cacagugagucgaggacag

SEQ ID NO: 2087548 - RNA, 16 nt, Human
caagugauucuccugc

SEQ ID NO: 2087549 - RNA, 17 nt, Human
caagugauucuccugcc

SEQ ID NO: 2087550 - RNA, 19 nt, Human
caagugaaaaaggaggaag

SEQ ID NO: 2087551 - RNA, 14 nt, Human
caaggaucuuucac

SEQ ID NO: 2087552 - RNA, 14 nt, Human
caagucugugccug

SEQ ID NO: 2087553 - RNA, 16 nt, Human
caagucugugccugga

SEQ ID NO: 2087554 - RNA, 17 nt, Human
caagucugugccuggag

SEQ ID NO: 2087555 - RNA, 18 nt, Human
caagucugugccuggagc

SEQ ID NO: 2087556 - RNA, 19 nt, Human
caagucugugccuggagcu

SEQ ID NO: 2087557 - RNA, 23 nt, Human
caagucugugccuggagcuccug

SEQ ID NO: 2087558 - RNA, 14 nt, Human
caagucuucccuga

SEQ ID NO: 2087559 - RNA, 15 nt, Human
caagucuucccugau

SEQ ID NO: 2087560 - RNA, 23 nt, Human
caagucucugcuggcccagccaa

SEQ ID NO: 2087561 - RNA, 13 nt, Human
caagucuggaucu

SEQ ID NO: 2087562 - RNA, 18 nt, Human
caagucuggaucugggac

SEQ ID NO: 2087563 - RNA, 19 nt, Human
caagucuggaucugggacc

SEQ ID NO: 2087564 - RNA, 14 nt, Human
caagucuccuuccc

SEQ ID NO: 2087565 - RNA, 17 nt, Human
caagucuccuuccccuu

SEQ ID NO: 2087566 - RNA, 18 nt, Human
caagucucugcuggccca

SEQ ID NO: 2087567 - RNA, 19 nt, Human
caagucucugcuggcccag

SEQ ID NO: 2087568 - RNA, 22 nt, Human
caagucucugcuggcccagcca

SEQ ID NO: 2087569 - RNA, 22 nt, Human
caagugauucuccugccucagc

SEQ ID NO: 2087570 - RNA, 21 nt, Human
caagugauucuccugccucag

SEQ ID NO: 2087571 - RNA, 14 nt, Human
caagugauucuccu

SEQ ID NO: 2087572 - RNA, 17 nt, Human
caagugcaugcucucug

SEQ ID NO: 2087573 - RNA, 13 nt, Human
caagugcaggcug

SEQ ID NO: 2087574 - RNA, 22 nt, Human
caagugugguagagugugccug

SEQ ID NO: 2087575 - RNA, 14 nt, Human
caagugggggcaga

SEQ ID NO: 2087576 - RNA, 20 nt, Human
caagugggggcagagggcag

SEQ ID NO: 2087577 - RNA, 14 nt, Human
caagugcaggcugg

SEQ ID NO: 2087578 - RNA, 20 nt, Human
caagugcaggcuggcaccgc

SEQ ID NO: 2087579 - RNA, 13 nt, Human
caagugggggcag

SEQ ID NO: 2087580 - RNA, 23 nt, Human
caaggugaagaugggaacgcaga

SEQ ID NO: 2087581 - RNA, 15 nt, Human
caaggugcaaaucaa

SEQ ID NO: 2087582 - RNA, 19 nt, Human
caagggcugcuucaaacuc

SEQ ID NO: 2087583 - RNA, 14 nt, Human
caagggcuguaggu

SEQ ID NO: 2087584 - RNA, 21 nt, Human
caagggcuuacacguggagga

SEQ ID NO: 2087585 - RNA, 22 nt, Human
caagggcuuacacguggaggaa

SEQ ID NO: 2087586 - RNA, 15 nt, Human
caaggauugcuacug

SEQ ID NO: 2087587 - RNA, 17 nt, Human
caaggugcuguugucau

SEQ ID NO: 2087588 - RNA, 23 nt, Human
caaggugcuguugucauugcuuu

SEQ ID NO: 2087589 - RNA, 13 nt, Human
caagguggagugg

SEQ ID NO: 2087590 - RNA, 14 nt, Human
caagguggagugga

SEQ ID NO: 2087591 - RNA, 15 nt, Human
caagguggaguggau

SEQ ID NO: 2087592 - RNA, 18 nt, Human
caagguggaguggaugcc

SEQ ID NO: 2087593 - RNA, 21 nt, Human
caagguggaguggaugccuca

SEQ ID NO: 2087594 - RNA, 12 nt, Human
caaggugggagg

SEQ ID NO: 2087595 - RNA, 23 nt, Human
caaggugggaggauugcuugagc

SEQ ID NO: 2087596 - RNA, 21 nt, Human
caaggugggcagggaggcacc

SEQ ID NO: 2087597 - RNA, 22 nt, Human
caaggugggccuugcuaccuca

SEQ ID NO: 2087598 - RNA, 12 nt, Human
caaggugggcug

SEQ ID NO: 2087599 - RNA, 16 nt, Human
caaggugggcugagcc

SEQ ID NO: 2087600 - RNA, 17 nt, Human
caaggugggcugagccc

SEQ ID NO: 2087601 - RNA, 18 nt, Human
caaguccugccucuuaaa

SEQ ID NO: 2087602 - RNA, 15 nt, Human
caaguccuuaccucu

SEQ ID NO: 2087603 - RNA, 18 nt, Human
caaguccuuaccucuucc

SEQ ID NO: 2087604 - RNA, 23 nt, Human
caaguccuuaccucuuccggaga

SEQ ID NO: 2087605 - RNA, 22 nt, Human
caaguccuuaccucuuccggag

SEQ ID NO: 2087606 - RNA, 18 nt, Human
caaggugggcugagcccu

SEQ ID NO: 2087607 - RNA, 19 nt, Human
caaggugggcugagcccug

SEQ ID NO: 2087608 - RNA, 20 nt, Human
caaggugggcugagcccugg

SEQ ID NO: 2087609 - RNA, 21 nt, Human
caaggugggcugagcccuggc

SEQ ID NO: 2087610 - RNA, 23 nt, Human
caaggugggcugagcccuggcag

SEQ ID NO: 2087611 - RNA, 24 nt, Human
caaggugggcugagcccuggcagg

SEQ ID NO: 2087612 - RNA, 19 nt, Human
caagccaagcagccaagcu

SEQ ID NO: 2087613 - RNA, 21 nt, Human
caagccaagcagccaagcucc

SEQ ID NO: 2087614 - RNA, 12 nt, Human
caagaaaggaga

SEQ ID NO: 2087615 - RNA, 13 nt, Human
caagaaaggagag

SEQ ID NO: 2087616 - RNA, 14 nt, Human
caagaaaggagagu

SEQ ID NO: 2087617 - RNA, 21 nt, Human
caagaaaggagagucuugcag

SEQ ID NO: 2087618 - RNA, 15 nt, Human
caagaaagaaacccg

SEQ ID NO: 2087619 - RNA, 12 nt, Human
caagaaaacaua

SEQ ID NO: 2087620 - RNA, 15 nt, Human
caagaaacucacccc

SEQ ID NO: 2087621 - RNA, 17 nt, Human
caagaaacucaccccca

SEQ ID NO: 2087622 - RNA, 18 nt, Human
caagcaccuccugccucg

SEQ ID NO: 2087623 - RNA, 22 nt, Human
caagaaagaaacccgacagagg

SEQ ID NO: 2087624 - RNA, 15 nt, Human
caagaaagccagucu

SEQ ID NO: 2087625 - RNA, 16 nt, Human
caagaaagccagucuu

SEQ ID NO: 2087626 - RNA, 19 nt, Human
caagaaagccagucuuaac

SEQ ID NO: 2087627 - RNA, 16 nt, Human
caagccguggcuuccc

SEQ ID NO: 2087628 - RNA, 15 nt, Human
caagccguggcuucc

SEQ ID NO: 2087629 - RNA, 14 nt, Human
caagccguggcuuc

SEQ ID NO: 2087630 - RNA, 14 nt, Human
caagcccugagagu

SEQ ID NO: 2087631 - RNA, 16 nt, Human
caagcgugagccacug

SEQ ID NO: 2087632 - RNA, 16 nt, Human
caaggaagccacagcu

SEQ ID NO: 2087633 - RNA, 20 nt, Human
caaggaaagccccagcacua

SEQ ID NO: 2087634 - RNA, 18 nt, Human
caaggaccaacaagggca

SEQ ID NO: 2087635 - RNA, 20 nt, Human
caaggaccaacaagggcagu

SEQ ID NO: 2087636 - RNA, 21 nt, Human
caaggaccaacaagggcagug

SEQ ID NO: 2087637 - RNA, 23 nt, Human
caaggaccaacaagggcagugga

SEQ ID NO: 2087638 - RNA, 13 nt, Human
caaggaccaggac

SEQ ID NO: 2087639 - RNA, 14 nt, Human
caaggaccaggacu

SEQ ID NO: 2087640 - RNA, 15 nt, Human
caaggaccaggacuc

SEQ ID NO: 2087641 - RNA, 16 nt, Human
caaggaccaggacucc

SEQ ID NO: 2087642 - RNA, 18 nt, Human
caaggaccaggacucccu

SEQ ID NO: 2087643 - RNA, 20 nt, Human
caaggaccaggacucccucc

SEQ ID NO: 2087644 - RNA, 21 nt, Human
caaggaccaggacucccuccu

SEQ ID NO: 2087645 - RNA, 18 nt, Human
caagcgugagccacugca

SEQ ID NO: 2087646 - RNA, 17 nt, Human
caagcgugagccacugc

SEQ ID NO: 2087647 - RNA, 17 nt, Human
caaggaaagccccagca

SEQ ID NO: 2087648 - RNA, 13 nt, Human
caaggaccccuca

SEQ ID NO: 2087649 - RNA, 14 nt, Human
caaggaccccucac

SEQ ID NO: 2087650 - RNA, 15 nt, Human
caaggaccccucacc

SEQ ID NO: 2087651 - RNA, 17 nt, Human
caaggaccccucaccuu

SEQ ID NO: 2087652 - RNA, 20 nt, Human
caaggaccccucaccuugca

SEQ ID NO: 2087653 - RNA, 16 nt, Human
caaggggaaaaucuca

SEQ ID NO: 2087654 - RNA, 14 nt, Human
caaauuuaaaacaa

SEQ ID NO: 2087655 - RNA, 15 nt, Human
caaauuuaaaacaaa

SEQ ID NO: 2087656 - RNA, 16 nt, Human
caaauucgcaaacuuu

SEQ ID NO: 2087657 - RNA, 20 nt, Human
caaauucuacaacuuuuccu

SEQ ID NO: 2087658 - RNA, 24 nt, Human
caacaggcugggcuucaguggcag

SEQ ID NO: 2087659 - RNA, 23 nt, Human
caacaggcugggcuucaguggca

SEQ ID NO: 2087660 - RNA, 15 nt, Human
caacaucccauugcc

SEQ ID NO: 2087661 - RNA, 17 nt, Human
caacaucccauugcccu

SEQ ID NO: 2087662 - RNA, 22 nt, Human
caacaucuuggucagauuugaa

SEQ ID NO: 2087663 - RNA, 18 nt, Human
caacagucaaaacagaga

SEQ ID NO: 2087664 - RNA, 20 nt, Human
caacaguagcauaggacccu

SEQ ID NO: 2087665 - RNA, 14 nt, Human
caacagucaaaaca

SEQ ID NO: 2087666 - RNA, 18 nt, Human
caacaucaauguucauug

SEQ ID NO: 2087667 - RNA, 22 nt, Human
caacaucaauguucauuguaau

SEQ ID NO: 2087668 - RNA, 15 nt, Human
caacaucaauguuca

SEQ ID NO: 2087669 - RNA, 16 nt, Human
caacaucaauguucau

SEQ ID NO: 2087670 - RNA, 17 nt, Human
caacaucaauguucauu

SEQ ID NO: 2087671 - RNA, 19 nt, Human
caaccccuucgcuccugug

SEQ ID NO: 2087672 - RNA, 18 nt, Human
caaccccuucgcuccugu

SEQ ID NO: 2087673 - RNA, 18 nt, Human
caacccucagagccaccc

SEQ ID NO: 2087674 - RNA, 21 nt, Human
caacccucagagccaccccua

SEQ ID NO: 2087675 - RNA, 21 nt, Human
caaccccuucgcuccuguguc

SEQ ID NO: 2087676 - RNA, 20 nt, Human
caaccaagucaugugcauuu

SEQ ID NO: 2087677 - RNA, 18 nt, Human
caaccaagucaugugcau

SEQ ID NO: 2087678 - RNA, 16 nt, Human
caaccaauguagaaag

SEQ ID NO: 2087679 - RNA, 23 nt, Human
caacauggagaaacccugucucu

SEQ ID NO: 2087680 - RNA, 22 nt, Human
caacauggagaaacccugucuc

SEQ ID NO: 2087681 - RNA, 23 nt, Human
caacaugccugccccaaacaaau

SEQ ID NO: 2087682 - RNA, 20 nt, Human
caacaugccugcuuuagaau

SEQ ID NO: 2087683 - RNA, 22 nt, Human
caacaugcuucaugaaaauccu

SEQ ID NO: 2087684 - RNA, 13 nt, Human
caacauggagaaa

SEQ ID NO: 2087685 - RNA, 18 nt, Human
caacauggugaaaccccg

SEQ ID NO: 2087686 - RNA, 21 nt, Human
caacauggugaaaccccaucu

SEQ ID NO: 2087687 - RNA, 13 nt, Human
caacauguauaau

SEQ ID NO: 2087688 - RNA, 13 nt, Human
caacaucuagcaa

SEQ ID NO: 2087689 - RNA, 18 nt, Human
caacaucccauugcccug

SEQ ID NO: 2087690 - RNA, 19 nt, Human
caacaucccauugcccugg

SEQ ID NO: 2087691 - RNA, 20 nt, Human
caacaucccauugcccuggu

SEQ ID NO: 2087692 - RNA, 15 nt, Human
caacauuaaacacaa

SEQ ID NO: 2087693 - RNA, 20 nt, Human
caacauuaaaacaauauugu

SEQ ID NO: 2087694 - RNA, 17 nt, Human
caacauguauaauauuu

SEQ ID NO: 2087695 - RNA, 18 nt, Human
caacauguauaauauuuu

SEQ ID NO: 2087696 - RNA, 19 nt, Human
caacauguauaauauuuuu

SEQ ID NO: 2087697 - RNA, 23 nt, Human
caacauguauaauauuuuuaauu

SEQ ID NO: 2087698 - RNA, 17 nt, Human
caacauguuacugacca

SEQ ID NO: 2087699 - RNA, 18 nt, Human
caacauguuacugaccag

SEQ ID NO: 2087700 - RNA, 20 nt, Human
caacauguuacugaccagca

SEQ ID NO: 2087701 - RNA, 15 nt, Human
caacuuucucuugua

SEQ ID NO: 2087702 - RNA, 16 nt, Human
caacuucaagugcaug

SEQ ID NO: 2087703 - RNA, 17 nt, Human
caacuucaagugcaugc

SEQ ID NO: 2087704 - RNA, 18 nt, Human
caacuucaagugcaugcu

SEQ ID NO: 2087705 - RNA, 22 nt, Human
caacuucaagugcaugcucucu

SEQ ID NO: 2087706 - RNA, 19 nt, Human
caacuuuagcagaaucaaa

SEQ ID NO: 2087707 - RNA, 14 nt, Human
caacuucuaauugc

SEQ ID NO: 2087708 - RNA, 23 nt, Human
caacuucccaguucaggaguccc

SEQ ID NO: 2087709 - RNA, 21 nt, Human
caacucuucccccucucccag

SEQ ID NO: 2087710 - RNA, 16 nt, Human
caacugcauuggcuuu

SEQ ID NO: 2087711 - RNA, 19 nt, Human
caacuguugauugcaggaa

SEQ ID NO: 2087712 - RNA, 15 nt, Human
caacuuaaaaagucu

SEQ ID NO: 2087713 - RNA, 19 nt, Human
caacuuaaaaagucugcau

SEQ ID NO: 2087714 - RNA, 14 nt, Human
caacuggaagcaca

SEQ ID NO: 2087715 - RNA, 19 nt, Human
caacuggacauugucugcg

SEQ ID NO: 2087716 - RNA, 17 nt, Human
caacugcugaugcucau

SEQ ID NO: 2087717 - RNA, 20 nt, Human
caacugcugaugcucauggu

SEQ ID NO: 2087718 - RNA, 21 nt, Human
caacugcugaugcucaugguc

SEQ ID NO: 2087719 - RNA, 13 nt, Human
caacugcugcccc

SEQ ID NO: 2087720 - RNA, 14 nt, Human
caacugcugcccca

SEQ ID NO: 2087721 - RNA, 21 nt, Human
caacugcugccccaaaggaag

SEQ ID NO: 2087722 - RNA, 17 nt, Human
caacccucccucagccc

SEQ ID NO: 2087723 - RNA, 18 nt, Human
caacccucccucagcccc

SEQ ID NO: 2087724 - RNA, 14 nt, Human
caaccaccgcuccc

SEQ ID NO: 2087725 - RNA, 14 nt, Human
caacccucccucag

SEQ ID NO: 2087726 - RNA, 22 nt, Human
caacccuuaccccuuagccucc

SEQ ID NO: 2087727 - RNA, 19 nt, Human
caacccuguuuuauacugu

SEQ ID NO: 2087728 - RNA, 17 nt, Human
caacccuguuuuauacu

SEQ ID NO: 2087729 - RNA, 15 nt, Human
caacccuuaccccuu

SEQ ID NO: 2087730 - RNA, 19 nt, Human
caacccuuaccccuuagcc

SEQ ID NO: 2087731 - RNA, 20 nt, Human
caacccuuaccccuuagccu

SEQ ID NO: 2087732 - RNA, 15 nt, Human
caacgcagcccugcu

SEQ ID NO: 2087733 - RNA, 13 nt, Human
caacgcagcccug

SEQ ID NO: 2087734 - RNA, 15 nt, Human
caacgaggaagcccu

SEQ ID NO: 2087735 - RNA, 12 nt, Human
caacgcagcccu

SEQ ID NO: 2087736 - RNA, 18 nt, Human
caacgcagcccugcuuug

SEQ ID NO: 2087737 - RNA, 21 nt, Human
caaccugaccaacauggagaa

SEQ ID NO: 2087738 - RNA, 12 nt, Human
caacgaggaagc

SEQ ID NO: 2087739 - RNA, 13 nt, Human
caacgaggaagcc

SEQ ID NO: 2087740 - RNA, 20 nt, Human
caaccugaccaacauggaga

SEQ ID NO: 2087741 - RNA, 23 nt, Human
caaccugaccaacauggagaaac

SEQ ID NO: 2087742 - RNA, 15 nt, Human
caaccugaccaacau

SEQ ID NO: 2087743 - RNA, 20 nt, Human
caaauaguuuauaaauguga

SEQ ID NO: 2087744 - RNA, 20 nt, Human
caaauaauuuuucacuucaa

SEQ ID NO: 2087745 - RNA, 15 nt, Human
caaauacuuauucau

SEQ ID NO: 2087746 - RNA, 17 nt, Human
caaauacuuauucauug

SEQ ID NO: 2087747 - RNA, 18 nt, Human
caaauacuuauucauugu

SEQ ID NO: 2087748 - RNA, 21 nt, Human
caaauacuuauucauuguggu

SEQ ID NO: 2087749 - RNA, 12 nt, Human
caaauagaaaac

SEQ ID NO: 2087750 - RNA, 13 nt, Human
caaauagaaaaca

SEQ ID NO: 2087751 - RNA, 14 nt, Human
caaauagaaaacag

SEQ ID NO: 2087752 - RNA, 17 nt, Human
caaauagaaaacaggaa

SEQ ID NO: 2087753 - RNA, 14 nt, Human
caaauaauaagcaa

SEQ ID NO: 2087754 - RNA, 22 nt, Human
caaaggauagugcgauguuuca

SEQ ID NO: 2087755 - RNA, 17 nt, Human
caaaguuggggcaggcu

SEQ ID NO: 2087756 - RNA, 22 nt, Human
caaauucugcuugcuugcuuuu

SEQ ID NO: 2087757 - RNA, 20 nt, Human
caaauucccagauuugaaga

SEQ ID NO: 2087758 - RNA, 21 nt, Human
caaauucccagauuugaagac

SEQ ID NO: 2087759 - RNA, 18 nt, Human
caaauucccuccucccuu

SEQ ID NO: 2087760 - RNA, 14 nt, Human
caaauguggcuccu

SEQ ID NO: 2087761 - RNA, 20 nt, Human
caaauguguaucggaugcuu

SEQ ID NO: 2087762 - RNA, 17 nt, Human
caaaugugaccuguguc

SEQ ID NO: 2087763 - RNA, 17 nt, Human
caaauguggcauuugug

SEQ ID NO: 2087764 - RNA, 19 nt, Human
caaauguggcauuugugau

SEQ ID NO: 2087765 - RNA, 14 nt, Human
caaaugugaccugu

SEQ ID NO: 2087766 - RNA, 13 nt, Human
caaaucagcugcu

SEQ ID NO: 2087767 - RNA, 16 nt, Human
caaaucagcugcuacu

SEQ ID NO: 2087768 - RNA, 13 nt, Human
auuuuuuuaaguc

SEQ ID NO: 2087769 - RNA, 15 nt, Human
auuuuuuuaagucuu

SEQ ID NO: 2087770 - RNA, 15 nt, Human
auuuuuuucaauauu

SEQ ID NO: 2087771 - RNA, 12 nt, Human
caaaaaacaaua

SEQ ID NO: 2087772 - RNA, 18 nt, Human
caaaaaacaauauuuauu

SEQ ID NO: 2087773 - RNA, 22 nt, Human
caaaaaacaauauuuauuguau

SEQ ID NO: 2087774 - RNA, 23 nt, Human
caaaaaacaauauuuauuguauu

SEQ ID NO: 2087775 - RNA, 14 nt, Human
caaaaaaauuaaau

SEQ ID NO: 2087776 - RNA, 23 nt, Human
caaacuuccagugcaacacugaa

SEQ ID NO: 2087777 - RNA, 12 nt, Human
caaaaaaugagc

SEQ ID NO: 2087778 - RNA, 15 nt, Human
caaagaggcaagagg

SEQ ID NO: 2087779 - RNA, 20 nt, Human
caaagaggcaagaggcugga

SEQ ID NO: 2087780 - RNA, 15 nt, Human
caaacuucagacuga

SEQ ID NO: 2087781 - RNA, 13 nt, Human
caaagaaacccaa

SEQ ID NO: 2087782 - RNA, 13 nt, Human
caaagaggcaaga

SEQ ID NO: 2087783 - RNA, 14 nt, Human
caaagaggcaagag

SEQ ID NO: 2087784 - RNA, 16 nt, Human
caaagcugcuaaaucu

SEQ ID NO: 2087785 - RNA, 17 nt, Human
caaagcugcuaaaucuc

SEQ ID NO: 2087786 - RNA, 23 nt, Human
caaagcugcuaaaucuccuauuu

SEQ ID NO: 2087787 - RNA, 18 nt, Human
caaagcuaggccuggcca

SEQ ID NO: 2087788 - RNA, 17 nt, Human
caaagcuaggccuggcc

SEQ ID NO: 2087789 - RNA, 16 nt, Human
caaagcuaggccuggc

SEQ ID NO: 2087790 - RNA, 15 nt, Human
caaagcuaggccugg

SEQ ID NO: 2087791 - RNA, 21 nt, Human
caaagccaaagcuaggccugg

SEQ ID NO: 2087792 - RNA, 17 nt, Human
caaagcauugagcaaag

SEQ ID NO: 2087793 - RNA, 17 nt, Human
caaagccaaacucugcc

SEQ ID NO: 2087794 - RNA, 18 nt, Human
caaagccaaacucugcca

SEQ ID NO: 2087795 - RNA, 22 nt, Human
caaagccaaacucugccagcca

SEQ ID NO: 2087796 - RNA, 20 nt, Human
caaagccaaagcuaggccug

SEQ ID NO: 2087797 - RNA, 14 nt, Human
caaagcuugaagau

SEQ ID NO: 2087798 - RNA, 19 nt, Human
caaagcuugaagaucguua

SEQ ID NO: 2087799 - RNA, 15 nt, Human
caaagcuuccauucc

SEQ ID NO: 2087800 - RNA, 16 nt, Human
caaagcuuccauucca

SEQ ID NO: 2087801 - RNA, 20 nt, Human
caaagcuuccauuccacauc

SEQ ID NO: 2087802 - RNA, 16 nt, Human
caaagcuuguuaagau

SEQ ID NO: 2087803 - RNA, 17 nt, Human
caaaggaggcuggcagg

SEQ ID NO: 2087804 - RNA, 16 nt, Human
caaaggaguagaaaga

SEQ ID NO: 2087805 - RNA, 20 nt, Human
caaaggagggucaggaagga

SEQ ID NO: 2087806 - RNA, 19 nt, Human
caaaggaaaaaguaucaug

SEQ ID NO: 2087807 - RNA, 22 nt, Human
caaaggaaaauaguaauguuuu

SEQ ID NO: 2087808 - RNA, 15 nt, Human
caaagcuuuccugga

SEQ ID NO: 2087809 - RNA, 16 nt, Human
caaagcuuuccuggag

SEQ ID NO: 2087810 - RNA, 17 nt, Human
caaagcuuuccuggaga

SEQ ID NO: 2087811 - RNA, 16 nt, Human
caacuucuaauugcca

SEQ ID NO: 2087812 - RNA, 17 nt, Human
caacuucuacuucugcc

SEQ ID NO: 2087813 - RNA, 15 nt, Human
caccccuaaagagau

SEQ ID NO: 2087814 - RNA, 15 nt, Human
cacccacagaaagag

SEQ ID NO: 2087815 - RNA, 17 nt, Human
cacccacagaaagagag

SEQ ID NO: 2087816 - RNA, 13 nt, Human
cacccacagggcu

SEQ ID NO: 2087817 - RNA, 15 nt, Human
cacccaccagggcga

SEQ ID NO: 2087818 - RNA, 16 nt, Human
caccacuucuuuuaua

SEQ ID NO: 2087819 - RNA, 20 nt, Human
cacccacaagugccacugcc

SEQ ID NO: 2087820 - RNA, 13 nt, Human
caccacugcacuc

SEQ ID NO: 2087821 - RNA, 18 nt, Human
caccacugcacuccagcc

SEQ ID NO: 2087822 - RNA, 22 nt, Human
cacccaccaucaugucuggcua

SEQ ID NO: 2087823 - RNA, 20 nt, Human
cacccaccaucaugucuggc

SEQ ID NO: 2087824 - RNA, 22 nt, Human
cacccaccaguugaauuucauc

SEQ ID NO: 2087825 - RNA, 14 nt, Human
cacccacccagcac

SEQ ID NO: 2087826 - RNA, 16 nt, Human
cacccaccucagccuc

SEQ ID NO: 2087827 - RNA, 14 nt, Human
cacccaccucagcc

SEQ ID NO: 2087828 - RNA, 13 nt, Human
cacccaccucagc

SEQ ID NO: 2087829 - RNA, 12 nt, Human
cacccaccucag

SEQ ID NO: 2087830 - RNA, 22 nt, Human
caccccauagugaccggcugcu

SEQ ID NO: 2087831 - RNA, 12 nt, Human
caccccaugcca

SEQ ID NO: 2087832 - RNA, 15 nt, Human
caccccaugccaaag

SEQ ID NO: 2087833 - RNA, 17 nt, Human
caccccaugccaaagcu

SEQ ID NO: 2087834 - RNA, 17 nt, Human
caccccagugcacccac

SEQ ID NO: 2087835 - RNA, 18 nt, Human
caccccagugcacccacu

SEQ ID NO: 2087836 - RNA, 20 nt, Human
caccccagugcacccacucu

SEQ ID NO: 2087837 - RNA, 12 nt, Human
caccccauccca

SEQ ID NO: 2087838 - RNA, 15 nt, Human
caccccaucccacac

SEQ ID NO: 2087839 - RNA, 21 nt, Human
caccccaucccacacccugga

SEQ ID NO: 2087840 - RNA, 22 nt, Human
caccccagcugcuccccucccu

SEQ ID NO: 2087841 - RNA, 11 nt, Human
caccccagccu

SEQ ID NO: 2087842 - RNA, 19 nt, Human
caccccagccuaagaugaa

SEQ ID NO: 2087843 - RNA, 13 nt, Human
caccccagcugcu

SEQ ID NO: 2087844 - RNA, 16 nt, Human
caccccagcugcuccc

SEQ ID NO: 2087845 - RNA, 18 nt, Human
caccccagcugcuccccu

SEQ ID NO: 2087846 - RNA, 19 nt, Human
caccccagcugcuccccuc

SEQ ID NO: 2087847 - RNA, 20 nt, Human
caccccagcugcuccccucc

SEQ ID NO: 2087848 - RNA, 12 nt, Human
cacccccaaggg

SEQ ID NO: 2087849 - RNA, 19 nt, Human
cacccccaaggggcagucu

SEQ ID NO: 2087850 - RNA, 11 nt, Human
cacccccaccc

SEQ ID NO: 2087851 - RNA, 13 nt, Human
caccccccagaac

SEQ ID NO: 2087852 - RNA, 18 nt, Human
caccccccagaaccuguc

SEQ ID NO: 2087853 - RNA, 19 nt, Human
caccccccagaaccugucc

SEQ ID NO: 2087854 - RNA, 20 nt, Human
caccccccagaaccuguccu

SEQ ID NO: 2087855 - RNA, 21 nt, Human
caccccccagaaccuguccuu

SEQ ID NO: 2087856 - RNA, 13 nt, Human
caccccccugggc

SEQ ID NO: 2087857 - RNA, 12 nt, Human
caccccccucau

SEQ ID NO: 2087858 - RNA, 16 nt, Human
cacccccgccucccuc

SEQ ID NO: 2087859 - RNA, 17 nt, Human
cacccccaucucucccu

SEQ ID NO: 2087860 - RNA, 13 nt, Human
cacccccaucucu

SEQ ID NO: 2087861 - RNA, 18 nt, Human
cacccccuccccagggga

SEQ ID NO: 2087862 - RNA, 13 nt, Human
cacccccucccug

SEQ ID NO: 2087863 - RNA, 14 nt, Human
cacccccuccccag

SEQ ID NO: 2087864 - RNA, 15 nt, Human
cacccccuccccagg

SEQ ID NO: 2087865 - RNA, 16 nt, Human
cacccccuccccaggg

SEQ ID NO: 2087866 - RNA, 17 nt, Human
cacccccuccccagggg

SEQ ID NO: 2087867 - RNA, 11 nt, Human
cacccccuccc

SEQ ID NO: 2087868 - RNA, 14 nt, Human
cacccccucccugg

SEQ ID NO: 2087869 - RNA, 16 nt, Human
cacccccucccuggcc

SEQ ID NO: 2087870 - RNA, 23 nt, Human
cacccccucccuggccuguucug

SEQ ID NO: 2087871 - RNA, 16 nt, Human
cacccccuucagugcc

SEQ ID NO: 2087872 - RNA, 13 nt, Human
cacccccuucucu

SEQ ID NO: 2087873 - RNA, 17 nt, Human
cacccccuucagugccc

SEQ ID NO: 2087874 - RNA, 20 nt, Human
cacccccuucagugcccacc

SEQ ID NO: 2087875 - RNA, 21 nt, Human
cacccccuucagugcccacca

SEQ ID NO: 2087876 - RNA, 22 nt, Human
cacccccuucucugcccauucc

SEQ ID NO: 2087877 - RNA, 23 nt, Human
cacccccuucucugcccauuccc

SEQ ID NO: 2087878 - RNA, 16 nt, Human
cacccccuucucugcu

SEQ ID NO: 2087879 - RNA, 17 nt, Human
cacccccuucucugcuc

SEQ ID NO: 2087880 - RNA, 18 nt, Human
cacccccuucucugcucc

SEQ ID NO: 2087881 - RNA, 22 nt, Human
cacccccuucucugcuccacca

SEQ ID NO: 2087882 - RNA, 14 nt, Human
caccccuaaagaga

SEQ ID NO: 2087883 - RNA, 23 nt, Human
caccccgucugggguucagcccc

SEQ ID NO: 2087884 - RNA, 15 nt, Human
caccccgggcucucu

SEQ ID NO: 2087885 - RNA, 18 nt, Human
caccccgggcucucugcu

SEQ ID NO: 2087886 - RNA, 22 nt, Human
caccccgucugggguucagccc

SEQ ID NO: 2087887 - RNA, 14 nt, Human
ccaggcuggucuca

SEQ ID NO: 2087888 - RNA, 16 nt, Human
ccaggccccugccacc

SEQ ID NO: 2087889 - RNA, 15 nt, Human
ccaggccccugccac

SEQ ID NO: 2087890 - RNA, 14 nt, Human
ccaggccccugcca

SEQ ID NO: 2087891 - RNA, 12 nt, Human
ccaggccagagg

SEQ ID NO: 2087892 - RNA, 17 nt, Human
ccagcucuagacaaccc

SEQ ID NO: 2087893 - RNA, 18 nt, Human
ccagcucuagacaacccu

SEQ ID NO: 2087894 - RNA, 22 nt, Human
ccagcucuagacaacccugcaa

SEQ ID NO: 2087895 - RNA, 19 nt, Human
ccagcucuagacaacccug

SEQ ID NO: 2087896 - RNA, 21 nt, Human
ccagcucuagacaacccugca

SEQ ID NO: 2087897 - RNA, 15 nt, Human
ccaggaggcugaggu

SEQ ID NO: 2087898 - RNA, 16 nt, Human
ccaggaggcugaggug

SEQ ID NO: 2087899 - RNA, 23 nt, Human
ccagugcccacaggaucagucug

SEQ ID NO: 2087900 - RNA, 15 nt, Human
ccagggcccugagcu

SEQ ID NO: 2087901 - RNA, 18 nt, Human
ccagggcccugagcucgg

SEQ ID NO: 2087902 - RNA, 17 nt, Human
ccagggauggggccaca

SEQ ID NO: 2087903 - RNA, 18 nt, Human
ccagggauggggccacag

SEQ ID NO: 2087904 - RNA, 19 nt, Human
ccagggauggggccacagc

SEQ ID NO: 2087905 - RNA, 20 nt, Human
ccagggauggggccacagcc

SEQ ID NO: 2087906 - RNA, 21 nt, Human
ccagggauggggccacagcca

SEQ ID NO: 2087907 - RNA, 22 nt, Human
ccagggauggggccacagccag

SEQ ID NO: 2087908 - RNA, 22 nt, Human
ccagggauuuguccuuggggac

SEQ ID NO: 2087909 - RNA, 15 nt, Human
ccagggcaccaagcc

SEQ ID NO: 2087910 - RNA, 19 nt, Human
ccagggcaccaagcccaca

SEQ ID NO: 2087911 - RNA, 22 nt, Human
ccagggcaccaagcccacaggu

SEQ ID NO: 2087912 - RNA, 22 nt, Human
ccagggagcuugaaaguuuuca

SEQ ID NO: 2087913 - RNA, 18 nt, Human
ccagggagcggaaagcag

SEQ ID NO: 2087914 - RNA, 19 nt, Human
ccagggagcggaaagcagc

SEQ ID NO: 2087915 - RNA, 20 nt, Human
ccagggagcggaaagcagcu

SEQ ID NO: 2087916 - RNA, 23 nt, Human
ccagggagcggaaagcagcucaa

SEQ ID NO: 2087917 - RNA, 23 nt, Human
ccagggaugccaucugugggcac

SEQ ID NO: 2087918 - RNA, 14 nt, Human
ccagggucuucccu

SEQ ID NO: 2087919 - RNA, 23 nt, Human
ccagggucuucccuaccucaggc

SEQ ID NO: 2087920 - RNA, 14 nt, Human
ccagggcccugcag

SEQ ID NO: 2087921 - RNA, 15 nt, Human
ccagggcccugcaga

SEQ ID NO: 2087922 - RNA, 14 nt, Human
ccagguagaacaca

SEQ ID NO: 2087923 - RNA, 19 nt, Human
ccaggugcacagacguccc

SEQ ID NO: 2087924 - RNA, 13 nt, Human
ccaggugcacaga

SEQ ID NO: 2087925 - RNA, 16 nt, Human
ccaggugcacagacgu

SEQ ID NO: 2087926 - RNA, 21 nt, Human
ccagguggccacuccagaccc

SEQ ID NO: 2087927 - RNA, 16 nt, Human
ccagguggccacucca

SEQ ID NO: 2087928 - RNA, 22 nt, Human
ccaggugcaguggcucacgccu

SEQ ID NO: 2087929 - RNA, 14 nt, Human
ccaggugcaguggc

SEQ ID NO: 2087930 - RNA, 16 nt, Human
ccagguggcugaccca

SEQ ID NO: 2087931 - RNA, 17 nt, Human
ccagguggcugacccag

SEQ ID NO: 2087932 - RNA, 19 nt, Human
ccagguggcugacccaguc

SEQ ID NO: 2087933 - RNA, 20 nt, Human
ccagguggcugacccagucc

SEQ ID NO: 2087934 - RNA, 21 nt, Human
ccagguggcugacccaguccc

SEQ ID NO: 2087935 - RNA, 22 nt, Human
ccagguggcugacccagucccu

SEQ ID NO: 2087936 - RNA, 23 nt, Human
ccagguggcugacccagucccug

SEQ ID NO: 2087937 - RNA, 16 nt, Human
ccagguuucuaugugu

SEQ ID NO: 2087938 - RNA, 13 nt, Human
ccagguuuaagcu

SEQ ID NO: 2087939 - RNA, 24 nt, Human
ccaguaaaguguaacauaugcaaa

SEQ ID NO: 2087940 - RNA, 17 nt, Human
ccagugaccugaggaag

SEQ ID NO: 2087941 - RNA, 18 nt, Human
ccagugaccugaggaagc

SEQ ID NO: 2087942 - RNA, 19 nt, Human
ccagugaccugaggaagcg

SEQ ID NO: 2087943 - RNA, 16 nt, Human
ccagugaccaaccuuu

SEQ ID NO: 2087944 - RNA, 17 nt, Human
ccagugaccccugaccu

SEQ ID NO: 2087945 - RNA, 15 nt, Human
ccagugaccugagga

SEQ ID NO: 2087946 - RNA, 11 nt, Human
ccagugacacu

SEQ ID NO: 2087947 - RNA, 24 nt, Human
ccagugacacuucagagagcuggu

SEQ ID NO: 2087948 - RNA, 16 nt, Human
ccagugacacuucaga

SEQ ID NO: 2087949 - RNA, 19 nt, Human
ccagugacacuucagagag

SEQ ID NO: 2087950 - RNA, 20 nt, Human
ccagugacacuucagagagc

SEQ ID NO: 2087951 - RNA, 23 nt, Human
ccagugacacuucagagagcugg

SEQ ID NO: 2087952 - RNA, 24 nt, Human
ccaguggccucaacccucccucag

SEQ ID NO: 2087953 - RNA, 14 nt, Human
ccaguggccuggcu

SEQ ID NO: 2087954 - RNA, 15 nt, Human
ccaguggccuggcuc

SEQ ID NO: 2087955 - RNA, 16 nt, Human
ccaguggccuggcucc

SEQ ID NO: 2087956 - RNA, 16 nt, Human
ccaguggccucaaccc

SEQ ID NO: 2087957 - RNA, 17 nt, Human
ccaguggccucaacccu

SEQ ID NO: 2087958 - RNA, 23 nt, Human
ccaguggccucaacccucccuca

SEQ ID NO: 2087959 - RNA, 14 nt, Human
ccagugcacccacu

SEQ ID NO: 2087960 - RNA, 14 nt, Human
ccagugcaacacug

SEQ ID NO: 2087961 - RNA, 21 nt, Human
ccagugaugcuaaagguugua

SEQ ID NO: 2087962 - RNA, 19 nt, Human
ccagugauucgagcuauau

SEQ ID NO: 2087963 - RNA, 23 nt, Human
ccagugugacaaggauugcuacu

SEQ ID NO: 2087964 - RNA, 14 nt, Human
ccagugugacaagg

SEQ ID NO: 2087965 - RNA, 12 nt, Human
ccagugucuuuc

SEQ ID NO: 2087966 - RNA, 13 nt, Human
ccagugucuuucu

SEQ ID NO: 2087967 - RNA, 14 nt, Human
ccagugucuuucuu

SEQ ID NO: 2087968 - RNA, 15 nt, Human
ccagugucuuucuuu

SEQ ID NO: 2087969 - RNA, 16 nt, Human
ccagugucuuucuuug

SEQ ID NO: 2087970 - RNA, 15 nt, Human
ccagugugaucccaa

SEQ ID NO: 2087971 - RNA, 22 nt, Human
ccagugugaucccaagugccag

SEQ ID NO: 2087972 - RNA, 22 nt, Human
ccagugugggaaugcggcaaga

SEQ ID NO: 2087973 - RNA, 12 nt, Human
ccauaugugcuu

SEQ ID NO: 2087974 - RNA, 14 nt, Human
ccauauguuacacu

SEQ ID NO: 2087975 - RNA, 12 nt, Human
ccauaugcuguu

SEQ ID NO: 2087976 - RNA, 13 nt, Human
ccauauggauauu

SEQ ID NO: 2087977 - RNA, 13 nt, Human
ccaucaugucugg

SEQ ID NO: 2087978 - RNA, 12 nt, Human
ccaucaugucug

SEQ ID NO: 2087979 - RNA, 17 nt, Human
ccaucucucccuccccu

SEQ ID NO: 2087980 - RNA, 23 nt, Human
ccaucucucccuccccugccauu

SEQ ID NO: 2087981 - RNA, 20 nt, Human
ccaucuaugucccuugcugu

SEQ ID NO: 2087982 - RNA, 22 nt, Human
ccaucuaugucccuugcuguga

SEQ ID NO: 2087983 - RNA, 18 nt, Human
cccacaugaggacaugau

SEQ ID NO: 2087984 - RNA, 17 nt, Human
cccaccgguugcuucug

SEQ ID NO: 2087985 - RNA, 18 nt, Human
cccaccgguugcuucugg

SEQ ID NO: 2087986 - RNA, 19 nt, Human
cccaccgguugcuucuggg

SEQ ID NO: 2087987 - RNA, 20 nt, Human
cccaccgguugcuucuggga

SEQ ID NO: 2087988 - RNA, 23 nt, Human
cccaccgguugcuucugggaagg

SEQ ID NO: 2087989 - RNA, 22 nt, Human
cccaccguaaagugagcaugcu

SEQ ID NO: 2087990 - RNA, 15 nt, Human
cccaccucagccucc

SEQ ID NO: 2087991 - RNA, 14 nt, Human
cccaccucagccuc

SEQ ID NO: 2087992 - RNA, 12 nt, Human
cccaccucagcc

SEQ ID NO: 2087993 - RNA, 14 nt, Human
cccaccuaccuuca

SEQ ID NO: 2087994 - RNA, 20 nt, Human
cccaccuaccuucaaagcug

SEQ ID NO: 2087995 - RNA, 21 nt, Human
cccaccucaaaugggucuggg

SEQ ID NO: 2087996 - RNA, 21 nt, Human
cccaccucagccucccaaagu

SEQ ID NO: 2087997 - RNA, 12 nt, Human
cccaccuuggcu

SEQ ID NO: 2087998 - RNA, 22 nt, Human
cccaccugucaaacaaagccag

SEQ ID NO: 2087999 - RNA, 23 nt, Human
cccaccugucaaacaaagccaga

SEQ ID NO: 2088000 - RNA, 19 nt, Human
cccaccuucaauuccuggg

SEQ ID NO: 2088001 - RNA, 20 nt, Human
cccaccuucaauuccugggc

SEQ ID NO: 2088002 - RNA, 21 nt, Human
cccaccuucaauuccugggcc

SEQ ID NO: 2088003 - RNA, 20 nt, Human
cccaccugguggccucugcc

SEQ ID NO: 2088004 - RNA, 15 nt, Human
cccaccuuggcugca

SEQ ID NO: 2088005 - RNA, 14 nt, Human
cccaccuuggcugc

SEQ ID NO: 2088006 - RNA, 22 nt, Human
cccaccuuggcucaaguccucu

SEQ ID NO: 2088007 - RNA, 15 nt, Human
cccaccuuggcucaa

SEQ ID NO: 2088008 - RNA, 22 nt, Human
cccaccuucaauuccugggccc

SEQ ID NO: 2088009 - RNA, 22 nt, Human
cccacgcccucauuacggcucc

SEQ ID NO: 2088010 - RNA, 14 nt, Human
cccacgcuggagug

SEQ ID NO: 2088011 - RNA, 22 nt, Human
cccacggaaaaugccaaucucu

SEQ ID NO: 2088012 - RNA, 18 nt, Human
cccacaggcccuuccucu

SEQ ID NO: 2088013 - RNA, 16 nt, Human
cccacaggcccuuccu

SEQ ID NO: 2088014 - RNA, 22 nt, Human
cccacagguguccccagcccac

SEQ ID NO: 2088015 - RNA, 19 nt, Human
cccacauagugaugguucc

SEQ ID NO: 2088016 - RNA, 14 nt, Human
cccacagcccgcau

SEQ ID NO: 2088017 - RNA, 14 nt, Human
cccacagccucugc

SEQ ID NO: 2088018 - RNA, 17 nt, Human
cccacagccucugccug

SEQ ID NO: 2088019 - RNA, 18 nt, Human
cccacagccucugccugu

SEQ ID NO: 2088020 - RNA, 13 nt, Human
cccacaggaucag

SEQ ID NO: 2088021 - RNA, 17 nt, Human
cccacaggaucagucug

SEQ ID NO: 2088022 - RNA, 17 nt, Human
cccaagggguuucuguu

SEQ ID NO: 2088023 - RNA, 15 nt, Human
cccaaggggcagucu

SEQ ID NO: 2088024 - RNA, 21 nt, Human
cccaaggggcagucuggaggg

SEQ ID NO: 2088025 - RNA, 21 nt, Human
cccaaguccaggucgggcuca

SEQ ID NO: 2088026 - RNA, 13 nt, Human
cccacagaaagag

SEQ ID NO: 2088027 - RNA, 16 nt, Human
cccacagaaagagagc

SEQ ID NO: 2088028 - RNA, 23 nt, Human
cccacagaaagacugagcucaag

SEQ ID NO: 2088029 - RNA, 19 nt, Human
cccacacuuguuccagcuc

SEQ ID NO: 2088030 - RNA, 12 nt, Human
cccacagaaaga

SEQ ID NO: 2088031 - RNA, 21 nt, Human
cccacagaaagacugagcuca

SEQ ID NO: 2088032 - RNA, 17 nt, Human
cccacacuuguuccagc

SEQ ID NO: 2088033 - RNA, 15 nt, Human
cccaagugccagucu

SEQ ID NO: 2088034 - RNA, 18 nt, Human
cccaagugccagucuugu

SEQ ID NO: 2088035 - RNA, 14 nt, Human
cccaagugggggca

SEQ ID NO: 2088036 - RNA, 19 nt, Human
cccaagugggggcagaggg

SEQ ID NO: 2088037 - RNA, 14 nt, Human
ccauuuucugguuc

SEQ ID NO: 2088038 - RNA, 14 nt, Human
ccauuuugcaaaau

SEQ ID NO: 2088039 - RNA, 17 nt, Human
ccauuuugcaaaauuuc

SEQ ID NO: 2088040 - RNA, 21 nt, Human
ccauuuugcaaaauuuccagu

SEQ ID NO: 2088041 - RNA, 16 nt, Human
ccauuuugcccuucca

SEQ ID NO: 2088042 - RNA, 19 nt, Human
ccauuuugcccuuccauag

SEQ ID NO: 2088043 - RNA, 12 nt, Human
cccaacccccac

SEQ ID NO: 2088044 - RNA, 13 nt, Human
cccaacccccacc

SEQ ID NO: 2088045 - RNA, 14 nt, Human
cccaacccccaccc

SEQ ID NO: 2088046 - RNA, 18 nt, Human
ccaucucugaacuucagc

SEQ ID NO: 2088047 - RNA, 19 nt, Human
ccaucucugaacuucagcu

SEQ ID NO: 2088048 - RNA, 20 nt, Human
ccaucucucuacuccuaccu

SEQ ID NO: 2088049 - RNA, 22 nt, Human
ccaucugugggcacgcuguggg

SEQ ID NO: 2088050 - RNA, 11 nt, Human
ccaugugugag

SEQ ID NO: 2088051 - RNA, 17 nt, Human
ccaugugugagugugug

SEQ ID NO: 2088052 - RNA, 18 nt, Human
ccaugugugagugugugc

SEQ ID NO: 2088053 - RNA, 15 nt, Human
ccauguguggacuca

SEQ ID NO: 2088054 - RNA, 10 nt, Human
ccaugugugu

SEQ ID NO: 2088055 - RNA, 12 nt, Human
ccaugugugugc

SEQ ID NO: 2088056 - RNA, 21 nt, Human
ccaucuugcccgcucaggcug

SEQ ID NO: 2088057 - RNA, 13 nt, Human
ccaucuugccucc

SEQ ID NO: 2088058 - RNA, 19 nt, Human
ccaucuugcccgcucaggc

SEQ ID NO: 2088059 - RNA, 15 nt, Human
ccaucuguguccugg

SEQ ID NO: 2088060 - RNA, 15 nt, Human
ccauuaaaguucuca

SEQ ID NO: 2088061 - RNA, 23 nt, Human
ccauuaaccagggcaccaagccc

SEQ ID NO: 2088062 - RNA, 14 nt, Human
ccauuaccauggag

SEQ ID NO: 2088063 - RNA, 18 nt, Human
ccauguuuuguuuacggu

SEQ ID NO: 2088064 - RNA, 18 nt, Human
ccauguuaguuuuuacuu

SEQ ID NO: 2088065 - RNA, 19 nt, Human
ccaugugugugcaagugug

SEQ ID NO: 2088066 - RNA, 20 nt, Human
ccauucugccuccauucuga

SEQ ID NO: 2088067 - RNA, 15 nt, Human
ccauuucucucucca

SEQ ID NO: 2088068 - RNA, 15 nt, Human
ccauucugccugccc

SEQ ID NO: 2088069 - RNA, 17 nt, Human
ccauucugaccauuuca

SEQ ID NO: 2088070 - RNA, 12 nt, Human
ccauuuguuuau

SEQ ID NO: 2088071 - RNA, 13 nt, Human
ccauuuguuuauu

SEQ ID NO: 2088072 - RNA, 17 nt, Human
ccauuaugaagaagaga

SEQ ID NO: 2088073 - RNA, 16 nt, Human
ccauuagagucagccu

SEQ ID NO: 2088074 - RNA, 18 nt, Human
ccauucucaagcccugca

SEQ ID NO: 2088075 - RNA, 17 nt, Human
ccauucucaagcccugc

SEQ ID NO: 2088076 - RNA, 14 nt, Human
ccauucucucuccu

SEQ ID NO: 2088077 - RNA, 16 nt, Human
ccauucucucuccugu

SEQ ID NO: 2088078 - RNA, 19 nt, Human
ccauucucucuccugucca

SEQ ID NO: 2088079 - RNA, 20 nt, Human
ccauucucucuccuguccaa

SEQ ID NO: 2088080 - RNA, 16 nt, Human
ccauucugaccauuuc

SEQ ID NO: 2088081 - RNA, 23 nt, Human
cccaagugggggcagagggcaga

SEQ ID NO: 2088082 - RNA, 20 nt, Human
ccagagccucaaaugagaaa

SEQ ID NO: 2088083 - RNA, 23 nt, Human
ccagagccucaaaugagaaaaug

SEQ ID NO: 2088084 - RNA, 14 nt, Human
ccagagccccacac

SEQ ID NO: 2088085 - RNA, 18 nt, Human
ccagagccccacacggag

SEQ ID NO: 2088086 - RNA, 19 nt, Human
ccagagccccacacggagg

SEQ ID NO: 2088087 - RNA, 14 nt, Human
ccagagcccaccuu

SEQ ID NO: 2088088 - RNA, 21 nt, Human
ccagagccauggacucuacac

SEQ ID NO: 2088089 - RNA, 13 nt, Human
ccagagccaugga

SEQ ID NO: 2088090 - RNA, 15 nt, Human
ccagagccauggacu

SEQ ID NO: 2088091 - RNA, 16 nt, Human
ccagauugcaacaggc

SEQ ID NO: 2088092 - RNA, 14 nt, Human
ccagauugcaacag

SEQ ID NO: 2088093 - RNA, 22 nt, Human
ccagauugcaacaggcugggcu

SEQ ID NO: 2088094 - RNA, 18 nt, Human
ccagauugcaacaggcug

SEQ ID NO: 2088095 - RNA, 23 nt, Human
ccagauugcaacaggcugggcuu

SEQ ID NO: 2088096 - RNA, 14 nt, Human
ccagcacccagcaa

SEQ ID NO: 2088097 - RNA, 13 nt, Human
ccagcacccccac

SEQ ID NO: 2088098 - RNA, 15 nt, Human
ccagcacccccacgc

SEQ ID NO: 2088099 - RNA, 16 nt, Human
ccagcacccccacgcc

SEQ ID NO: 2088100 - RNA, 18 nt, Human
ccagcacccccacgcccu

SEQ ID NO: 2088101 - RNA, 20 nt, Human
ccagcacccccacgcccuca

SEQ ID NO: 2088102 - RNA, 18 nt, Human
ccagcacccagcaacucc

SEQ ID NO: 2088103 - RNA, 17 nt, Human
ccagcacuaaagcagug

SEQ ID NO: 2088104 - RNA, 19 nt, Human
ccagcaagugagagcuggg

SEQ ID NO: 2088105 - RNA, 18 nt, Human
ccagcaagugagagcugg

SEQ ID NO: 2088106 - RNA, 17 nt, Human
ccagcaagugagagcug

SEQ ID NO: 2088107 - RNA, 17 nt, Human
ccagcaccaccaggucu

SEQ ID NO: 2088108 - RNA, 18 nt, Human
ccagcaccaccaggucuc

SEQ ID NO: 2088109 - RNA, 19 nt, Human
ccagcaccaccaggucucc

SEQ ID NO: 2088110 - RNA, 23 nt, Human
ccagcaccaccaggucucccggg

SEQ ID NO: 2088111 - RNA, 17 nt, Human
ccagcaacccuccuauc

SEQ ID NO: 2088112 - RNA, 15 nt, Human
ccagcaacccuccua

SEQ ID NO: 2088113 - RNA, 18 nt, Human
ccagcaacccuccuauca

SEQ ID NO: 2088114 - RNA, 24 nt, Human
ccagauuuuuuacagcugccugca

SEQ ID NO: 2088115 - RNA, 23 nt, Human
ccagauuugaagacaaaaauacu

SEQ ID NO: 2088116 - RNA, 12 nt, Human
ccagcccacugg

SEQ ID NO: 2088117 - RNA, 20 nt, Human
ccagccgccauugccaccag

SEQ ID NO: 2088118 - RNA, 23 nt, Human
ccagccgccauugccaccaggag

SEQ ID NO: 2088119 - RNA, 22 nt, Human
ccagcccauucucucuccuguc

SEQ ID NO: 2088120 - RNA, 17 nt, Human
ccagcccauucucucuc

SEQ ID NO: 2088121 - RNA, 19 nt, Human
ccagcccauucucucuccu

SEQ ID NO: 2088122 - RNA, 21 nt, Human
ccagcccauucucucuccugu

SEQ ID NO: 2088123 - RNA, 18 nt, Human
ccagcccagcccagcugg

SEQ ID NO: 2088124 - RNA, 12 nt, Human
ccagcccagggu

SEQ ID NO: 2088125 - RNA, 18 nt, Human
ccagcccaucuugccucc

SEQ ID NO: 2088126 - RNA, 19 nt, Human
ccagcccaucuugccucca

SEQ ID NO: 2088127 - RNA, 22 nt, Human
ccagcccaucuugccuccaugg

SEQ ID NO: 2088128 - RNA, 18 nt, Human
ccagcccaggguuccccc

SEQ ID NO: 2088129 - RNA, 21 nt, Human
ccagcccaggguucccccagc

SEQ ID NO: 2088130 - RNA, 17 nt, Human
ccagcccacuucugcca

SEQ ID NO: 2088131 - RNA, 16 nt, Human
ccagcccacuucugcc

SEQ ID NO: 2088132 - RNA, 12 nt, Human
ccagcccagccc

SEQ ID NO: 2088133 - RNA, 14 nt, Human
ccagcccagcccag

SEQ ID NO: 2088134 - RNA, 12 nt, Human
ccagcccagcug

SEQ ID NO: 2088135 - RNA, 14 nt, Human
ccagcccagcugcu

SEQ ID NO: 2088136 - RNA, 16 nt, Human
ccagcccagcugcucu

SEQ ID NO: 2088137 - RNA, 17 nt, Human
ccagcccagcugcucug

SEQ ID NO: 2088138 - RNA, 18 nt, Human
ccagcccagcugcucugc

SEQ ID NO: 2088139 - RNA, 19 nt, Human
ccagcccagcugcucugcc

SEQ ID NO: 2088140 - RNA, 22 nt, Human
ccagcccagcugcucugcccag

SEQ ID NO: 2088141 - RNA, 23 nt, Human
ccagcccagcugcucugcccaga

SEQ ID NO: 2088142 - RNA, 13 nt, Human
ccagcccagcugg

SEQ ID NO: 2088143 - RNA, 15 nt, Human
ccagcccagcccagc

SEQ ID NO: 2088144 - RNA, 16 nt, Human
ccagcccagcccagcu

SEQ ID NO: 2088145 - RNA, 21 nt, Human
ccagccauuaccauggagaca

SEQ ID NO: 2088146 - RNA, 19 nt, Human
ccagccauuaccauggaga

SEQ ID NO: 2088147 - RNA, 13 nt, Human
ccagcgagcccug

SEQ ID NO: 2088148 - RNA, 20 nt, Human
ccagccuuugaucagguggg

SEQ ID NO: 2088149 - RNA, 15 nt, Human
ccagccuuucuccca

SEQ ID NO: 2088150 - RNA, 18 nt, Human
ccagccuuucucccaggc

SEQ ID NO: 2088151 - RNA, 19 nt, Human
ccagccuuucucccaggcc

SEQ ID NO: 2088152 - RNA, 20 nt, Human
ccagccuuucucccaggcca

SEQ ID NO: 2088153 - RNA, 21 nt, Human
ccagccuuucucccaggccag

SEQ ID NO: 2088154 - RNA, 16 nt, Human
ccagccugggcgacag

SEQ ID NO: 2088155 - RNA, 21 nt, Human
ccagccuggcuucuggagccc

SEQ ID NO: 2088156 - RNA, 19 nt, Human
ccagccuggcuucuggagc

SEQ ID NO: 2088157 - RNA, 20 nt, Human
ccagccuggcuucuggagcc

SEQ ID NO: 2088158 - RNA, 13 nt, Human
ccagccuggcuuc

SEQ ID NO: 2088159 - RNA, 15 nt, Human
ccagccuggcuucug

SEQ ID NO: 2088160 - RNA, 17 nt, Human
ccagccuggcuucugga

SEQ ID NO: 2088161 - RNA, 18 nt, Human
ccagccuggcuucuggag

SEQ ID NO: 2088162 - RNA, 19 nt, Human
ccagccugggcaacagagc

SEQ ID NO: 2088163 - RNA, 16 nt, Human
ccagccugggcagcca

SEQ ID NO: 2088164 - RNA, 18 nt, Human
ccagccugggcagccagg

SEQ ID NO: 2088165 - RNA, 22 nt, Human
ccagccugggcagccaggcugc

SEQ ID NO: 2088166 - RNA, 23 nt, Human
ccagccugggcagccaggcugcc

SEQ ID NO: 2088167 - RNA, 13 nt, Human
ccagccuggguga

SEQ ID NO: 2088168 - RNA, 19 nt, Human
ccagccugggcgacagagc

SEQ ID NO: 2088169 - RNA, 17 nt, Human
ccagccuaagaugaaga

SEQ ID NO: 2088170 - RNA, 16 nt, Human
ccacuuaaaaaauguc

SEQ ID NO: 2088171 - RNA, 14 nt, Human
ccacuguuuauuca

SEQ ID NO: 2088172 - RNA, 16 nt, Human
ccacugugccaugugc

SEQ ID NO: 2088173 - RNA, 15 nt, Human
ccacugugccaugug

SEQ ID NO: 2088174 - RNA, 19 nt, Human
ccacugugccaugugccag

SEQ ID NO: 2088175 - RNA, 14 nt, Human
ccagaaccccgagc

SEQ ID NO: 2088176 - RNA, 14 nt, Human
ccagaaccuguccu

SEQ ID NO: 2088177 - RNA, 15 nt, Human
ccagaaaaccccagc

SEQ ID NO: 2088178 - RNA, 16 nt, Human
ccagaaaaccccagca

SEQ ID NO: 2088179 - RNA, 12 nt, Human
ccagaacuggac

SEQ ID NO: 2088180 - RNA, 15 nt, Human
ccagaaccuguccuu

SEQ ID NO: 2088181 - RNA, 22 nt, Human
ccacugcuuuuggucuguguga

SEQ ID NO: 2088182 - RNA, 21 nt, Human
ccacugccuucgauacaccgg

SEQ ID NO: 2088183 - RNA, 20 nt, Human
ccacugcuuuuggucugugu

SEQ ID NO: 2088184 - RNA, 15 nt, Human
ccacugcucugguua

SEQ ID NO: 2088185 - RNA, 13 nt, Human
ccacugcucuggu

SEQ ID NO: 2088186 - RNA, 12 nt, Human
ccacugcucugg

SEQ ID NO: 2088187 - RNA, 11 nt, Human
ccacugcucug

SEQ ID NO: 2088188 - RNA, 14 nt, Human
ccacugugaagaga

SEQ ID NO: 2088189 - RNA, 15 nt, Human
ccacugugaagagaa

SEQ ID NO: 2088190 - RNA, 23 nt, Human
ccacugucacuguuucucugcug

SEQ ID NO: 2088191 - RNA, 24 nt, Human
ccacugucacuguuucucugcugu

SEQ ID NO: 2088192 - RNA, 14 nt, Human
ccacuguaaaauga

SEQ ID NO: 2088193 - RNA, 19 nt, Human
ccacugucacuguuucucu

SEQ ID NO: 2088194 - RNA, 22 nt, Human
ccacugucacuguuucucugcu

SEQ ID NO: 2088195 - RNA, 16 nt, Human
ccacugccucuuccuc

SEQ ID NO: 2088196 - RNA, 20 nt, Human
ccacugccucuggaauugcu

SEQ ID NO: 2088197 - RNA, 11 nt, Human
ccacugccugc

SEQ ID NO: 2088198 - RNA, 12 nt, Human
ccacugccugcc

SEQ ID NO: 2088199 - RNA, 17 nt, Human
ccacugccugcccaccc

SEQ ID NO: 2088200 - RNA, 23 nt, Human
ccacugccugcccacccguggag

SEQ ID NO: 2088201 - RNA, 13 nt, Human
ccacugccugccc

SEQ ID NO: 2088202 - RNA, 14 nt, Human
ccacugccugccca

SEQ ID NO: 2088203 - RNA, 15 nt, Human
ccacugccugcccac

SEQ ID NO: 2088204 - RNA, 16 nt, Human
ccacugccugcccacc

SEQ ID NO: 2088205 - RNA, 13 nt, Human
ccacugccucuuc

SEQ ID NO: 2088206 - RNA, 19 nt, Human
ccacugcauaccaaccugg

SEQ ID NO: 2088207 - RNA, 23 nt, Human
ccacugccacacgucugacccuc

SEQ ID NO: 2088208 - RNA, 14 nt, Human
ccaccuucccaugc

SEQ ID NO: 2088209 - RNA, 18 nt, Human
ccacugcauaccaaccug

SEQ ID NO: 2088210 - RNA, 21 nt, Human
ccaccuucccagcucucccuc

SEQ ID NO: 2088211 - RNA, 11 nt, Human
ccaccuuccca

SEQ ID NO: 2088212 - RNA, 12 nt, Human
ccaccuucccag

SEQ ID NO: 2088213 - RNA, 13 nt, Human
ccaccuucccagc

SEQ ID NO: 2088214 - RNA, 14 nt, Human
ccaccuucccagcu

SEQ ID NO: 2088215 - RNA, 15 nt, Human
ccaccuucccagcuc

SEQ ID NO: 2088216 - RNA, 16 nt, Human
ccaccuucccagcucu

SEQ ID NO: 2088217 - RNA, 19 nt, Human
ccaccuucccagcucuccc

SEQ ID NO: 2088218 - RNA, 21 nt, Human
ccacugcaucguuucaucuuc

SEQ ID NO: 2088219 - RNA, 23 nt, Human
ccacugcaucguuucaucuucca

SEQ ID NO: 2088220 - RNA, 15 nt, Human
ccagaagggggccau

SEQ ID NO: 2088221 - RNA, 12 nt, Human
ccagaaggcagg

SEQ ID NO: 2088222 - RNA, 20 nt, Human
ccagaagcugagcaccaggg

SEQ ID NO: 2088223 - RNA, 15 nt, Human
ccagaagccucuggc

SEQ ID NO: 2088224 - RNA, 16 nt, Human
ccagaagccucuggcu

SEQ ID NO: 2088225 - RNA, 19 nt, Human
ccagaagccucuggcuaga

SEQ ID NO: 2088226 - RNA, 20 nt, Human
ccagaagccucuggcuagag

SEQ ID NO: 2088227 - RNA, 18 nt, Human
ccagaccccuggcuuuuc

SEQ ID NO: 2088228 - RNA, 24 nt, Human
ccagaccccuggcuuuucacugcu

SEQ ID NO: 2088229 - RNA, 20 nt, Human
ccagaaacaccuagaucaga

SEQ ID NO: 2088230 - RNA, 13 nt, Human
ccagaccagagcu

SEQ ID NO: 2088231 - RNA, 14 nt, Human
ccagaccagagcuc

SEQ ID NO: 2088232 - RNA, 16 nt, Human
ccagaccagagcucug

SEQ ID NO: 2088233 - RNA, 17 nt, Human
ccagaccagagcucugg

SEQ ID NO: 2088234 - RNA, 19 nt, Human
ccagacauguggugggaca

SEQ ID NO: 2088235 - RNA, 23 nt, Human
ccagacauguggugggacaggga

SEQ ID NO: 2088236 - RNA, 13 nt, Human
ccagacagcuccc

SEQ ID NO: 2088237 - RNA, 20 nt, Human
ccagacagcucccucugccu

SEQ ID NO: 2088238 - RNA, 15 nt, Human
ccagacccggcugcg

SEQ ID NO: 2088239 - RNA, 14 nt, Human
ccagacccggcugc

SEQ ID NO: 2088240 - RNA, 16 nt, Human
ccagagaguggcuccu

SEQ ID NO: 2088241 - RNA, 15 nt, Human
ccagagaguggcucc

SEQ ID NO: 2088242 - RNA, 14 nt, Human
ccagagaguggcuc

SEQ ID NO: 2088243 - RNA, 22 nt, Human
ccagagaguggcuccucccggu

SEQ ID NO: 2088244 - RNA, 18 nt, Human
ccagagaguggcuccucc

SEQ ID NO: 2088245 - RNA, 12 nt, Human
ccacccugcucu

SEQ ID NO: 2088246 - RNA, 11 nt, Human
ccacccugcuc

SEQ ID NO: 2088247 - RNA, 15 nt, Human
ccaccucucuuuuuc

SEQ ID NO: 2088248 - RNA, 14 nt, Human
ccaccuggggcagu

SEQ ID NO: 2088249 - RNA, 20 nt, Human
ccaccuggggcagucaccug

SEQ ID NO: 2088250 - RNA, 15 nt, Human
ccaccuggggcaguc

SEQ ID NO: 2088251 - RNA, 16 nt, Human
ccaccuggggcaguca

SEQ ID NO: 2088252 - RNA, 14 nt, Human
ccaccuuaaauuaa

SEQ ID NO: 2088253 - RNA, 15 nt, Human
ccaccuuaaauuaaa

SEQ ID NO: 2088254 - RNA, 16 nt, Human
ccaccuuaaauuaaac

SEQ ID NO: 2088255 - RNA, 18 nt, Human
ccaccuuaaauuaaacaa

SEQ ID NO: 2088256 - RNA, 20 nt, Human
ccaccuuaaauuaaacaauu

SEQ ID NO: 2088257 - RNA, 22 nt, Human
ccaccuuaaauuaaacaauuua

SEQ ID NO: 2088258 - RNA, 17 nt, Human
ccaccuucaauuccugg

SEQ ID NO: 2088259 - RNA, 18 nt, Human
ccaccuucaauuccuggg

SEQ ID NO: 2088260 - RNA, 19 nt, Human
ccaccuucaauuccugggc

SEQ ID NO: 2088261 - RNA, 20 nt, Human
ccaccuucaauuccugggcc

SEQ ID NO: 2088262 - RNA, 21 nt, Human
ccaccuggccccaugucucuc

SEQ ID NO: 2088263 - RNA, 22 nt, Human
ccaccuggccccaugucucuca

SEQ ID NO: 2088264 - RNA, 12 nt, Human
ccaccuggcccc

SEQ ID NO: 2088265 - RNA, 14 nt, Human
ccaccuggaagccc

SEQ ID NO: 2088266 - RNA, 20 nt, Human
ccaccuggaagcccucucug

SEQ ID NO: 2088267 - RNA, 22 nt, Human
ccaccugcugagagacccaagg

SEQ ID NO: 2088268 - RNA, 23 nt, Human
ccaccugcugagagacccaagga

SEQ ID NO: 2088269 - RNA, 15 nt, Human
ccaccugcugagaga

SEQ ID NO: 2088270 - RNA, 14 nt, Human
ccacccuccuuuca

SEQ ID NO: 2088271 - RNA, 15 nt, Human
ccaccccuccuuccu

SEQ ID NO: 2088272 - RNA, 16 nt, Human
ccaccccuccuuccuu

SEQ ID NO: 2088273 - RNA, 13 nt, Human
ccaccccuucccc

SEQ ID NO: 2088274 - RNA, 15 nt, Human
ccaccccuuccccac

SEQ ID NO: 2088275 - RNA, 16 nt, Human
ccaccccuuccccacu

SEQ ID NO: 2088276 - RNA, 22 nt, Human
ccaccccccagaaccuguccuu

SEQ ID NO: 2088277 - RNA, 21 nt, Human
ccaccccccagaaccuguccu

SEQ ID NO: 2088278 - RNA, 13 nt, Human
ccaccccccucau

SEQ ID NO: 2088279 - RNA, 16 nt, Human
ccacccccuccccagg

SEQ ID NO: 2088280 - RNA, 17 nt, Human
ccacccccuccccaggg

SEQ ID NO: 2088281 - RNA, 18 nt, Human
ccacccccuccccagggg

SEQ ID NO: 2088282 - RNA, 19 nt, Human
ccacccccuccccagggga

SEQ ID NO: 2088283 - RNA, 22 nt, Human
ccacccccucccuggccuguuc

SEQ ID NO: 2088284 - RNA, 12 nt, Human
ccacccccuuca

SEQ ID NO: 2088285 - RNA, 17 nt, Human
ccacccccuucagugcc

SEQ ID NO: 2088286 - RNA, 18 nt, Human
ccacccccuucagugccc

SEQ ID NO: 2088287 - RNA, 20 nt, Human
ccacccccuucagugcccac

SEQ ID NO: 2088288 - RNA, 22 nt, Human
ccacccccuucagugcccacca

SEQ ID NO: 2088289 - RNA, 13 nt, Human
ccacccccuucuc

SEQ ID NO: 2088290 - RNA, 18 nt, Human
ccacccccuucucugcuc

SEQ ID NO: 2088291 - RNA, 19 nt, Human
ccacccccuucucugcucc

SEQ ID NO: 2088292 - RNA, 13 nt, Human
ccaccuuggcuca

SEQ ID NO: 2088293 - RNA, 16 nt, Human
ccuacaguguacaguc

SEQ ID NO: 2088294 - RNA, 20 nt, Human
ccuacaguguacagucuugu

SEQ ID NO: 2088295 - RNA, 21 nt, Human
ccuacaguugaaaaacagcug

SEQ ID NO: 2088296 - RNA, 17 nt, Human
ccuaccgagucucuucu

SEQ ID NO: 2088297 - RNA, 16 nt, Human
ccuaccgagucucuuc

SEQ ID NO: 2088298 - RNA, 15 nt, Human
ccuacaguggcuguc

SEQ ID NO: 2088299 - RNA, 17 nt, Human
ccuaacauucgaucuca

SEQ ID NO: 2088300 - RNA, 20 nt, Human
ccuaccgagucucuucucca

SEQ ID NO: 2088301 - RNA, 19 nt, Human
ccuaccgagucucuucucc

SEQ ID NO: 2088302 - RNA, 21 nt, Human
ccuaccgagucucuucuccac

SEQ ID NO: 2088303 - RNA, 20 nt, Human
ccuacgucaaacaugaagug

SEQ ID NO: 2088304 - RNA, 20 nt, Human
ccuacuacaucgcccuccac

SEQ ID NO: 2088305 - RNA, 17 nt, Human
ccuacuagggaccuggg

SEQ ID NO: 2088306 - RNA, 20 nt, Human
ccuacuagggaccuggggaa

SEQ ID NO: 2088307 - RNA, 21 nt, Human
ccuacgucaaacaugaagugu

SEQ ID NO: 2088308 - RNA, 17 nt, Human
ccuacuacaucgcccuc

SEQ ID NO: 2088309 - RNA, 18 nt, Human
ccuacuacaucgcccucc

SEQ ID NO: 2088310 - RNA, 14 nt, Human
ccuagucagccaca

SEQ ID NO: 2088311 - RNA, 16 nt, Human
ccuagucagccacaug

SEQ ID NO: 2088312 - RNA, 18 nt, Human
ccuaggugacagagugag

SEQ ID NO: 2088313 - RNA, 13 nt, Human
ccuaggccuggca

SEQ ID NO: 2088314 - RNA, 23 nt, Human
ccuaggcauuugcugaauacaga

SEQ ID NO: 2088315 - RNA, 23 nt, Human
ccuaggccacaccaucuccuuuc

SEQ ID NO: 2088316 - RNA, 13 nt, Human
ccuacugaaugcu

SEQ ID NO: 2088317 - RNA, 14 nt, Human
ccuaggccacuccu

SEQ ID NO: 2088318 - RNA, 15 nt, Human
ccuaggccacuccuc

SEQ ID NO: 2088319 - RNA, 16 nt, Human
ccuaggccacuccucc

SEQ ID NO: 2088320 - RNA, 17 nt, Human
ccuaggccacuccucca

SEQ ID NO: 2088321 - RNA, 18 nt, Human
ccuaggccacuccuccaa

SEQ ID NO: 2088322 - RNA, 19 nt, Human
ccuaggccacuccuccaaa

SEQ ID NO: 2088323 - RNA, 20 nt, Human
ccuaggccacuccuccaaag

SEQ ID NO: 2088324 - RNA, 15 nt, Human
ccuacaguguacagu

SEQ ID NO: 2088325 - RNA, 18 nt, Human
ccuacaggagugagcacu

SEQ ID NO: 2088326 - RNA, 23 nt, Human
ccguuggaaacauaaccauuaca

SEQ ID NO: 2088327 - RNA, 20 nt, Human
ccguuggggauuggggaaga

SEQ ID NO: 2088328 - RNA, 15 nt, Human
ccuaaccccuuuccu

SEQ ID NO: 2088329 - RNA, 12 nt, Human
ccuaaccccuuu

SEQ ID NO: 2088330 - RNA, 11 nt, Human
ccguggcuucc

SEQ ID NO: 2088331 - RNA, 14 nt, Human
ccguggcugcggca

SEQ ID NO: 2088332 - RNA, 23 nt, Human
ccgugauguaggguaaggugccu

SEQ ID NO: 2088333 - RNA, 13 nt, Human
ccgugcagacugg

SEQ ID NO: 2088334 - RNA, 14 nt, Human
ccgugcagacugga

SEQ ID NO: 2088335 - RNA, 17 nt, Human
ccgugcagacuggaggg

SEQ ID NO: 2088336 - RNA, 19 nt, Human
ccgugcagacuggagggga

SEQ ID NO: 2088337 - RNA, 14 nt, Human
ccguggcuucccgc

SEQ ID NO: 2088338 - RNA, 23 nt, Human
ccgacggugggcauuugugaggc

SEQ ID NO: 2088339 - RNA, 23 nt, Human
ccgaccucguccucccccugcca

SEQ ID NO: 2088340 - RNA, 21 nt, Human
ccgagauugcaccacugcacu

SEQ ID NO: 2088341 - RNA, 11 nt, Human
ccgagcugggg

SEQ ID NO: 2088342 - RNA, 16 nt, Human
ccgagcugggggccau

SEQ ID NO: 2088343 - RNA, 18 nt, Human
ccgagcugggggccauga

SEQ ID NO: 2088344 - RNA, 19 nt, Human
ccgagcugggggccaugag

SEQ ID NO: 2088345 - RNA, 21 nt, Human
ccgagcugggggccaugagcu

SEQ ID NO: 2088346 - RNA, 15 nt, Human
ccgagauugcaccac

SEQ ID NO: 2088347 - RNA, 19 nt, Human
ccgagauugcaccacugca

SEQ ID NO: 2088348 - RNA, 21 nt, Human
ccgagaucacgccacugcacu

SEQ ID NO: 2088349 - RNA, 16 nt, Human
ccgagaguagccgaga

SEQ ID NO: 2088350 - RNA, 20 nt, Human
ccgagaguagccgagagccu

SEQ ID NO: 2088351 - RNA, 21 nt, Human
ccgagaguagccgagagccug

SEQ ID NO: 2088352 - RNA, 22 nt, Human
ccgagaguagccgagagccugc

SEQ ID NO: 2088353 - RNA, 14 nt, Human
ccgagagccugcuc

SEQ ID NO: 2088354 - RNA, 15 nt, Human
ccgagagccugcucc

SEQ ID NO: 2088355 - RNA, 20 nt, Human
ccgagagccugcucccccac

SEQ ID NO: 2088356 - RNA, 19 nt, Human
ccgagcuuugaaaauucag

SEQ ID NO: 2088357 - RNA, 14 nt, Human
ccgaggaaacucag

SEQ ID NO: 2088358 - RNA, 16 nt, Human
ccgagcuggugcauua

SEQ ID NO: 2088359 - RNA, 17 nt, Human
ccgagcuggugcauuac

SEQ ID NO: 2088360 - RNA, 20 nt, Human
ccgagcuggugcauuacaga

SEQ ID NO: 2088361 - RNA, 19 nt, Human
ccgaggguccuggcuccug

SEQ ID NO: 2088362 - RNA, 21 nt, Human
ccgaggguccuggcuccugag

SEQ ID NO: 2088363 - RNA, 23 nt, Human
ccgaggguccuggcuccugaggg

SEQ ID NO: 2088364 - RNA, 16 nt, Human
ccgagguggcugccug

SEQ ID NO: 2088365 - RNA, 21 nt, Human
ccgagguggcugccuggagcc

SEQ ID NO: 2088366 - RNA, 18 nt, Human
ccgagucucuucuccacu

SEQ ID NO: 2088367 - RNA, 16 nt, Human
ccgagucucuucucca

SEQ ID NO: 2088368 - RNA, 14 nt, Human
ccgagucucuucuc

SEQ ID NO: 2088369 - RNA, 16 nt, Human
ccgaguagcugggacu

SEQ ID NO: 2088370 - RNA, 14 nt, Human
ccgaguagcuggga

SEQ ID NO: 2088371 - RNA, 18 nt, Human
ccgccggccagcugggau

SEQ ID NO: 2088372 - RNA, 14 nt, Human
ccgccucccagccu

SEQ ID NO: 2088373 - RNA, 20 nt, Human
ccgagucucuucuccacugg

SEQ ID NO: 2088374 - RNA, 19 nt, Human
ccgagucucuucuccacug

SEQ ID NO: 2088375 - RNA, 13 nt, Human
ccgggccacagag

SEQ ID NO: 2088376 - RNA, 22 nt, Human
ccgggcaugguggcgcaagccu

SEQ ID NO: 2088377 - RNA, 16 nt, Human
ccggcucuggcucucc

SEQ ID NO: 2088378 - RNA, 22 nt, Human
ccgggcacucagaagacacuga

SEQ ID NO: 2088379 - RNA, 21 nt, Human
ccggcuccaggcuccuuuagc

SEQ ID NO: 2088380 - RNA, 16 nt, Human
ccggcuccaggcuccu

SEQ ID NO: 2088381 - RNA, 23 nt, Human
ccggcucgagcaguccugccuca

SEQ ID NO: 2088382 - RNA, 19 nt, Human
ccggggcuggcggcuacuc

SEQ ID NO: 2088383 - RNA, 14 nt, Human
ccggaggggccugg

SEQ ID NO: 2088384 - RNA, 15 nt, Human
ccggagcuuucaaag

SEQ ID NO: 2088385 - RNA, 21 nt, Human
ccggagcuuucaaagaaggaa

SEQ ID NO: 2088386 - RNA, 16 nt, Human
ccggaggggccuggca

SEQ ID NO: 2088387 - RNA, 15 nt, Human
ccggaggggccuggc

SEQ ID NO: 2088388 - RNA, 16 nt, Human
ccggagcuaacacugg

SEQ ID NO: 2088389 - RNA, 17 nt, Human
ccggagcuaacacuggc

SEQ ID NO: 2088390 - RNA, 19 nt, Human
ccggagcuaacacuggccc

SEQ ID NO: 2088391 - RNA, 20 nt, Human
ccggagcuaacacuggcccc

SEQ ID NO: 2088392 - RNA, 22 nt, Human
ccggagcuaacacuggccccua

SEQ ID NO: 2088393 - RNA, 12 nt, Human
ccgcuggcuggg

SEQ ID NO: 2088394 - RNA, 15 nt, Human
ccgcuggcugggggc

SEQ ID NO: 2088395 - RNA, 18 nt, Human
ccgcuggcugggggccuc

SEQ ID NO: 2088396 - RNA, 22 nt, Human
ccgcuggcugggggccucacuc

SEQ ID NO: 2088397 - RNA, 20 nt, Human
ccgcugccuaaguggcugcu

SEQ ID NO: 2088398 - RNA, 19 nt, Human
ccgcugccuaaguggcugc

SEQ ID NO: 2088399 - RNA, 14 nt, Human
ccgccucugcuggc

SEQ ID NO: 2088400 - RNA, 11 nt, Human
ccgccucugcu

SEQ ID NO: 2088401 - RNA, 23 nt, Human
ccgccucaaugugguugcaaggc

SEQ ID NO: 2088402 - RNA, 15 nt, Human
ccgccucccagccug

SEQ ID NO: 2088403 - RNA, 21 nt, Human
ccgccucccuccccugcccuc

SEQ ID NO: 2088404 - RNA, 12 nt, Human
ccgccuggcaga

SEQ ID NO: 2088405 - RNA, 16 nt, Human
ccgccuggcagaacug

SEQ ID NO: 2088406 - RNA, 21 nt, Human
ccgccuggcagaacugagcuc

SEQ ID NO: 2088407 - RNA, 12 nt, Human
ccgcuccccagc

SEQ ID NO: 2088408 - RNA, 13 nt, Human
ccgcuccccagcc

SEQ ID NO: 2088409 - RNA, 14 nt, Human
ccgcuccccagccc

SEQ ID NO: 2088410 - RNA, 15 nt, Human
ccgcuccccagccca

SEQ ID NO: 2088411 - RNA, 14 nt, Human
ccgcuccugucugc

SEQ ID NO: 2088412 - RNA, 15 nt, Human
ccgcuccugucugcc

SEQ ID NO: 2088413 - RNA, 17 nt, Human
ccgcuccugucugccag

SEQ ID NO: 2088414 - RNA, 16 nt, Human
ccgcuccccagcccag

SEQ ID NO: 2088415 - RNA, 14 nt, Human
cccuguuuuauacu

SEQ ID NO: 2088416 - RNA, 13 nt, Human
cccuuaaaauuua

SEQ ID NO: 2088417 - RNA, 21 nt, Human
cccuguccaaacugccuaagc

SEQ ID NO: 2088418 - RNA, 22 nt, Human
cccugucagugcagcccgugug

SEQ ID NO: 2088419 - RNA, 14 nt, Human
cccugucagugcag

SEQ ID NO: 2088420 - RNA, 14 nt, Human
cccuguccaaacug

SEQ ID NO: 2088421 - RNA, 17 nt, Human
cccugucagugcagccc

SEQ ID NO: 2088422 - RNA, 21 nt, Human
cccugucagugcagcccgugu

SEQ ID NO: 2088423 - RNA, 23 nt, Human
cccuguauucccaccccuggacu

SEQ ID NO: 2088424 - RNA, 19 nt, Human
cccugucaccaagcucaca

SEQ ID NO: 2088425 - RNA, 14 nt, Human
cccugucaccaagc

SEQ ID NO: 2088426 - RNA, 15 nt, Human
cccuggugcugccac

SEQ ID NO: 2088427 - RNA, 13 nt, Human
cccugggcugaga

SEQ ID NO: 2088428 - RNA, 14 nt, Human
cccugguggcagug

SEQ ID NO: 2088429 - RNA, 21 nt, Human
cccuguagagugggagcugag

SEQ ID NO: 2088430 - RNA, 13 nt, Human
cccugguggcagu

SEQ ID NO: 2088431 - RNA, 14 nt, Human
cccuggugcugcca

SEQ ID NO: 2088432 - RNA, 13 nt, Human
cccuggugcugcc

SEQ ID NO: 2088433 - RNA, 14 nt, Human
cccuggugaggaag

SEQ ID NO: 2088434 - RNA, 21 nt, Human
cccuggugaggaagcuccagu

SEQ ID NO: 2088435 - RNA, 14 nt, Human
cccuuacuuagcau

SEQ ID NO: 2088436 - RNA, 14 nt, Human
cccuuagcagggaa

SEQ ID NO: 2088437 - RNA, 17 nt, Human
cccuuagccucccugaa

SEQ ID NO: 2088438 - RNA, 14 nt, Human
cccuuagccucccu

SEQ ID NO: 2088439 - RNA, 23 nt, Human
cccuuagcagggaaacagcuaau

SEQ ID NO: 2088440 - RNA, 20 nt, Human
cccuuccaugucgccucugc

SEQ ID NO: 2088441 - RNA, 17 nt, Human
cccuucacuucugacca

SEQ ID NO: 2088442 - RNA, 14 nt, Human
cccuuccaggccau

SEQ ID NO: 2088443 - RNA, 17 nt, Human
cccuuccaggccaucag

SEQ ID NO: 2088444 - RNA, 23 nt, Human
cccuuccaggccaucagaggccu

SEQ ID NO: 2088445 - RNA, 14 nt, Human
cccuucaaccauuc

SEQ ID NO: 2088446 - RNA, 18 nt, Human
cccuucaaccauucccca

SEQ ID NO: 2088447 - RNA, 19 nt, Human
cccuucacaccauaacuag

SEQ ID NO: 2088448 - RNA, 16 nt, Human
cccuucacaguguuuc

SEQ ID NO: 2088449 - RNA, 22 nt, Human
cccuucacuucugaccacacuu

SEQ ID NO: 2088450 - RNA, 23 nt, Human
cccuugcccagggcucagccugg

SEQ ID NO: 2088451 - RNA, 21 nt, Human
cccuugcccagggcucagccu

SEQ ID NO: 2088452 - RNA, 22 nt, Human
cccuugcccagggcucagccug

SEQ ID NO: 2088453 - RNA, 14 nt, Human
cccuugcccagggc

SEQ ID NO: 2088454 - RNA, 15 nt, Human
cccuugcccagggcu

SEQ ID NO: 2088455 - RNA, 19 nt, Human
cccuugcccagggcucagc

SEQ ID NO: 2088456 - RNA, 20 nt, Human
cccuugcccagggcucagcc

SEQ ID NO: 2088457 - RNA, 12 nt, Human
cccuugcccagg

SEQ ID NO: 2088458 - RNA, 15 nt, Human
cccuugccagacaug

SEQ ID NO: 2088459 - RNA, 20 nt, Human
cccuugagcuccccaaaaac

SEQ ID NO: 2088460 - RNA, 13 nt, Human
cccuugccagaca

SEQ ID NO: 2088461 - RNA, 18 nt, Human
cccuugcucuccccugcc

SEQ ID NO: 2088462 - RNA, 19 nt, Human
cccuugcucuccccugccc

SEQ ID NO: 2088463 - RNA, 19 nt, Human
cccuugagaccucagccau

SEQ ID NO: 2088464 - RNA, 18 nt, Human
cccuugagcuccccaaaa

SEQ ID NO: 2088465 - RNA, 17 nt, Human
cccuugagcccucuaug

SEQ ID NO: 2088466 - RNA, 17 nt, Human
cccuugagaccucagcc

SEQ ID NO: 2088467 - RNA, 18 nt, Human
cccuugagaccucagcca

SEQ ID NO: 2088468 - RNA, 22 nt, Human
cccuugagaaaccuuauuguac

SEQ ID NO: 2088469 - RNA, 14 nt, Human
cccuugagaaaccu

SEQ ID NO: 2088470 - RNA, 17 nt, Human
cccuucccuugagcccu

SEQ ID NO: 2088471 - RNA, 13 nt, Human
cccuugagaccuc

SEQ ID NO: 2088472 - RNA, 14 nt, Human
cccuugagaccuca

SEQ ID NO: 2088473 - RNA, 15 nt, Human
cccuugagaccucag

SEQ ID NO: 2088474 - RNA, 16 nt, Human
cccuugagaccucagc

SEQ ID NO: 2088475 - RNA, 20 nt, Human
cccuugagaccucagccaug

SEQ ID NO: 2088476 - RNA, 22 nt, Human
cccuuccccucccuggcuccca

SEQ ID NO: 2088477 - RNA, 13 nt, Human
cccuuccccuccu

SEQ ID NO: 2088478 - RNA, 15 nt, Human
cccuucccugcaaac

SEQ ID NO: 2088479 - RNA, 13 nt, Human
cccuucccugcaa

SEQ ID NO: 2088480 - RNA, 12 nt, Human
cccuuccccucc

SEQ ID NO: 2088481 - RNA, 14 nt, Human
cccuuccccucccu

SEQ ID NO: 2088482 - RNA, 15 nt, Human
cccuuccccucccug

SEQ ID NO: 2088483 - RNA, 16 nt, Human
cccuuccccucccugg

SEQ ID NO: 2088484 - RNA, 17 nt, Human
cccuuccccucccuggc

SEQ ID NO: 2088485 - RNA, 19 nt, Human
cccuuccccucccuggcuc

SEQ ID NO: 2088486 - RNA, 16 nt, Human
cccuggugcugccaca

SEQ ID NO: 2088487 - RNA, 19 nt, Human
cccugcugccgccucccag

SEQ ID NO: 2088488 - RNA, 14 nt, Human
cccugcugccuccc

SEQ ID NO: 2088489 - RNA, 16 nt, Human
cccugcugccucccca

SEQ ID NO: 2088490 - RNA, 20 nt, Human
cccugcugccgccucccagc

SEQ ID NO: 2088491 - RNA, 22 nt, Human
cccugcugccgccucccagccu

SEQ ID NO: 2088492 - RNA, 23 nt, Human
cccugcugccgccucccagccug

SEQ ID NO: 2088493 - RNA, 11 nt, Human
cccugcugccu

SEQ ID NO: 2088494 - RNA, 12 nt, Human
cccugcugccuc

SEQ ID NO: 2088495 - RNA, 21 nt, Human
cccugcucuccgaccagacac

SEQ ID NO: 2088496 - RNA, 22 nt, Human
cccugcucuccgaccagacacc

SEQ ID NO: 2088497 - RNA, 17 nt, Human
cccugcgaaggggcccu

SEQ ID NO: 2088498 - RNA, 21 nt, Human
cccugcgaaggggcccugguc

SEQ ID NO: 2088499 - RNA, 19 nt, Human
cccugcgaaggggcccugg

SEQ ID NO: 2088500 - RNA, 20 nt, Human
cccugcgaaggggcccuggu

SEQ ID NO: 2088501 - RNA, 22 nt, Human
cccugcuagaugagaauucagc

SEQ ID NO: 2088502 - RNA, 17 nt, Human
cccugcucccacagaac

SEQ ID NO: 2088503 - RNA, 14 nt, Human
cccugaaaacccag

SEQ ID NO: 2088504 - RNA, 15 nt, Human
cccugaaaacccaga

SEQ ID NO: 2088505 - RNA, 13 nt, Human
cccugccgccuca

SEQ ID NO: 2088506 - RNA, 19 nt, Human
cccugcccuucagcauccu

SEQ ID NO: 2088507 - RNA, 15 nt, Human
cccugccucaccucu

SEQ ID NO: 2088508 - RNA, 14 nt, Human
cccugccgccucaa

SEQ ID NO: 2088509 - RNA, 13 nt, Human
cccucucccagga

SEQ ID NO: 2088510 - RNA, 19 nt, Human
cccucuaaugcucacgcuc

SEQ ID NO: 2088511 - RNA, 22 nt, Human
cccucucaggcaugccugugug

SEQ ID NO: 2088512 - RNA, 15 nt, Human
cccucguggccuucc

SEQ ID NO: 2088513 - RNA, 16 nt, Human
cccucguggccuuccc

SEQ ID NO: 2088514 - RNA, 11 nt, Human
cccucuccugc

SEQ ID NO: 2088515 - RNA, 11 nt, Human
cccucucccug

SEQ ID NO: 2088516 - RNA, 12 nt, Human
cccucuuucccu

SEQ ID NO: 2088517 - RNA, 22 nt, Human
cccucuugccccccaccccagc

SEQ ID NO: 2088518 - RNA, 16 nt, Human
cccucuugccccccac

SEQ ID NO: 2088519 - RNA, 17 nt, Human
cccucuuucccucccuu

SEQ ID NO: 2088520 - RNA, 20 nt, Human
cccucuuucccucccuuccu

SEQ ID NO: 2088521 - RNA, 18 nt, Human
cccucuuauguaccucuu

SEQ ID NO: 2088522 - RNA, 20 nt, Human
cccucuuauguaccucuuuu

SEQ ID NO: 2088523 - RNA, 17 nt, Human
cccucuguucaguaaca

SEQ ID NO: 2088524 - RNA, 23 nt, Human
cccucuguucaguaacagggccu

SEQ ID NO: 2088525 - RNA, 12 nt, Human
cccucugccggc

SEQ ID NO: 2088526 - RNA, 14 nt, Human
cccucugccggcuc

SEQ ID NO: 2088527 - RNA, 21 nt, Human
cccucugccugaaccuuccau

SEQ ID NO: 2088528 - RNA, 13 nt, Human
cccucugccuguc

SEQ ID NO: 2088529 - RNA, 15 nt, Human
cccgcucagcccucc

SEQ ID NO: 2088530 - RNA, 13 nt, Human
cccgcucagcccu

SEQ ID NO: 2088531 - RNA, 12 nt, Human
cccgcucagccc

SEQ ID NO: 2088532 - RNA, 14 nt, Human
cccgcucagcccuc

SEQ ID NO: 2088533 - RNA, 12 nt, Human
cccucccaccac

SEQ ID NO: 2088534 - RNA, 14 nt, Human
cccucccaccacag

SEQ ID NO: 2088535 - RNA, 17 nt, Human
cccucccaccacagcag

SEQ ID NO: 2088536 - RNA, 12 nt, Human
cccucccacccc

SEQ ID NO: 2088537 - RNA, 13 nt, Human
cccucccaccccc

SEQ ID NO: 2088538 - RNA, 13 nt, Human
cccuccccugcca

SEQ ID NO: 2088539 - RNA, 13 nt, Human
cccucccagcucu

SEQ ID NO: 2088540 - RNA, 14 nt, Human
cccucccagcucug

SEQ ID NO: 2088541 - RNA, 15 nt, Human
cccucccagcucuga

SEQ ID NO: 2088542 - RNA, 13 nt, Human
cccuccccugccc

SEQ ID NO: 2088543 - RNA, 14 nt, Human
cccuccccugcccu

SEQ ID NO: 2088544 - RNA, 16 nt, Human
cccuccccugcccuag

SEQ ID NO: 2088545 - RNA, 16 nt, Human
cccucccuggcuccca

SEQ ID NO: 2088546 - RNA, 19 nt, Human
cccucccuggcucccauga

SEQ ID NO: 2088547 - RNA, 15 nt, Human
cccucccuggccugu

SEQ ID NO: 2088548 - RNA, 17 nt, Human
cccucccuggccuguuc

SEQ ID NO: 2088549 - RNA, 14 nt, Human
cccucccuggcucc

SEQ ID NO: 2088550 - RNA, 14 nt, Human
cccucccugccccu

SEQ ID NO: 2088551 - RNA, 16 nt, Human
cccucccucagccccu

SEQ ID NO: 2088552 - RNA, 12 nt, Human
cccucccugcca

SEQ ID NO: 2088553 - RNA, 12 nt, Human
cccucccuaccu

SEQ ID NO: 2088554 - RNA, 13 nt, Human
cccucccuaccuc

SEQ ID NO: 2088555 - RNA, 14 nt, Human
cccucccuaccuca

SEQ ID NO: 2088556 - RNA, 15 nt, Human
cccucccuaccucaa

SEQ ID NO: 2088557 - RNA, 20 nt, Human
cccucccuaccucaaccugu

SEQ ID NO: 2088558 - RNA, 13 nt, Human
cccucccucagcc

SEQ ID NO: 2088559 - RNA, 23 nt, Human
cccucccucuuucccucccuucc

SEQ ID NO: 2088560 - RNA, 15 nt, Human
ccccuguucacucua

SEQ ID NO: 2088561 - RNA, 13 nt, Human
ccccuuccccacu

SEQ ID NO: 2088562 - RNA, 15 nt, Human
ccccuuccccacugc

SEQ ID NO: 2088563 - RNA, 19 nt, Human
ccccuuccccacugccugc

SEQ ID NO: 2088564 - RNA, 21 nt, Human
ccccuuccccacugccugccc

SEQ ID NO: 2088565 - RNA, 14 nt, Human
cccgacagccuggc

SEQ ID NO: 2088566 - RNA, 22 nt, Human
cccgaauagcugggacuacagg

SEQ ID NO: 2088567 - RNA, 20 nt, Human
ccccuggcuuuucacugcug

SEQ ID NO: 2088568 - RNA, 18 nt, Human
ccccuggcuuuucacugc

SEQ ID NO: 2088569 - RNA, 23 nt, Human
ccccugguggacaguccugggag

SEQ ID NO: 2088570 - RNA, 21 nt, Human
ccccugguggacaguccuggg

SEQ ID NO: 2088571 - RNA, 22 nt, Human
ccccugguggacaguccuggga

SEQ ID NO: 2088572 - RNA, 15 nt, Human
ccccugguggacagu

SEQ ID NO: 2088573 - RNA, 19 nt, Human
ccccugguggacaguccug

SEQ ID NO: 2088574 - RNA, 20 nt, Human
ccccugguggacaguccugg

SEQ ID NO: 2088575 - RNA, 12 nt, Human
cccgacuccuca

SEQ ID NO: 2088576 - RNA, 14 nt, Human
cccgacuccucaaa

SEQ ID NO: 2088577 - RNA, 18 nt, Human
cccgacagccuggcacag

SEQ ID NO: 2088578 - RNA, 15 nt, Human
cccgacagccuggca

SEQ ID NO: 2088579 - RNA, 20 nt, Human
cccgacauggacccggagcu

SEQ ID NO: 2088580 - RNA, 12 nt, Human
cccgacagaggg

SEQ ID NO: 2088581 - RNA, 15 nt, Human
cccgacagagggaag

SEQ ID NO: 2088582 - RNA, 23 nt, Human
cccgacauggacccggagcuaac

SEQ ID NO: 2088583 - RNA, 11 nt, Human
cccgagcuggg

SEQ ID NO: 2088584 - RNA, 20 nt, Human
cccgagcugggggccaugag

SEQ ID NO: 2088585 - RNA, 22 nt, Human
cccgagcugggggccaugagcu

SEQ ID NO: 2088586 - RNA, 23 nt, Human
cccgagcugggggccaugagcuc

SEQ ID NO: 2088587 - RNA, 12 nt, Human
cccgagcuggug

SEQ ID NO: 2088588 - RNA, 14 nt, Human
cccgagcuggugca

SEQ ID NO: 2088589 - RNA, 22 nt, Human
cccgagcuggugcauuacagag

SEQ ID NO: 2088590 - RNA, 16 nt, Human
cccgcaugcagcagcu

SEQ ID NO: 2088591 - RNA, 19 nt, Human
cccgcaugcagcagcuugc

SEQ ID NO: 2088592 - RNA, 20 nt, Human
cccgcaugcagcagcuugcu

SEQ ID NO: 2088593 - RNA, 22 nt, Human
cccgcaugcagcagcuugcugc

SEQ ID NO: 2088594 - RNA, 15 nt, Human
cccgcauuccaggcu

SEQ ID NO: 2088595 - RNA, 16 nt, Human
cccgcauuccaggcuc

SEQ ID NO: 2088596 - RNA, 13 nt, Human
cccgcccagcugc

SEQ ID NO: 2088597 - RNA, 22 nt, Human
cccgcagguaccccagcucugc

SEQ ID NO: 2088598 - RNA, 14 nt, Human
ccccuggaugaagu

SEQ ID NO: 2088599 - RNA, 23 nt, Human
ccccugccccuucuacacucucc

SEQ ID NO: 2088600 - RNA, 20 nt, Human
ccccugcugguucaggguug

SEQ ID NO: 2088601 - RNA, 15 nt, Human
ccccugcugguucag

SEQ ID NO: 2088602 - RNA, 13 nt, Human
ccccugcugguuc

SEQ ID NO: 2088603 - RNA, 11 nt, Human
ccccugcuggu

SEQ ID NO: 2088604 - RNA, 12 nt, Human
ccccugcugccu

SEQ ID NO: 2088605 - RNA, 13 nt, Human
ccccugcugccuc

SEQ ID NO: 2088606 - RNA, 14 nt, Human
ccccugcugccucc

SEQ ID NO: 2088607 - RNA, 18 nt, Human
ccccugcugccuccccaa

SEQ ID NO: 2088608 - RNA, 20 nt, Human
ccccugcugccuccccaacc

SEQ ID NO: 2088609 - RNA, 19 nt, Human
ccccucuaaugcucacgcu

SEQ ID NO: 2088610 - RNA, 14 nt, Human
ccccugccccguca

SEQ ID NO: 2088611 - RNA, 15 nt, Human
ccccugccccgucac

SEQ ID NO: 2088612 - RNA, 22 nt, Human
ccccugccccgucaccaucuca

SEQ ID NO: 2088613 - RNA, 19 nt, Human
ccccugcccggcugcggaa

SEQ ID NO: 2088614 - RNA, 17 nt, Human
ccccugcccggcugcgg

SEQ ID NO: 2088615 - RNA, 13 nt, Human
ccccugcccugcu

SEQ ID NO: 2088616 - RNA, 13 nt, Human
ccccugcccuggg

SEQ ID NO: 2088617 - RNA, 14 nt, Human
ccccugcccugcug

SEQ ID NO: 2088618 - RNA, 15 nt, Human
ccccugcccugcugc

SEQ ID NO: 2088619 - RNA, 13 nt, Human
ccccugcccuggu

SEQ ID NO: 2088620 - RNA, 17 nt, Human
ccccugcccugguccag

SEQ ID NO: 2088621 - RNA, 13 nt, Human
ccccuccucugcc

SEQ ID NO: 2088622 - RNA, 11 nt, Human
ccccuccucug

SEQ ID NO: 2088623 - RNA, 12 nt, Human
ccccucucuccu

SEQ ID NO: 2088624 - RNA, 17 nt, Human
ccccucucccaguuguc

SEQ ID NO: 2088625 - RNA, 20 nt, Human
ccccuccuuccuugaccagc

SEQ ID NO: 2088626 - RNA, 15 nt, Human
ccccuccuugccucc

SEQ ID NO: 2088627 - RNA, 18 nt, Human
ccccuccuugccuccugu

SEQ ID NO: 2088628 - RNA, 20 nt, Human
ccccuccuugccuccugugu

SEQ ID NO: 2088629 - RNA, 14 nt, Human
ccccuccucugcca

SEQ ID NO: 2088630 - RNA, 16 nt, Human
ccccuccuucccagcu

SEQ ID NO: 2088631 - RNA, 17 nt, Human
ccccuccuucccagcug

SEQ ID NO: 2088632 - RNA, 20 nt, Human
ccccuccuucccagcugccc

SEQ ID NO: 2088633 - RNA, 15 nt, Human
ccccuccuuccuuga

SEQ ID NO: 2088634 - RNA, 17 nt, Human
ccccuccuuccuugacc

SEQ ID NO: 2088635 - RNA, 12 nt, Human
ccccuccuucuc

SEQ ID NO: 2088636 - RNA, 12 nt, Human
ccccuccaugug

SEQ ID NO: 2088637 - RNA, 11 nt, Human
ccccucccacc

SEQ ID NO: 2088638 - RNA, 12 nt, Human
ccccucccaggg

SEQ ID NO: 2088639 - RNA, 16 nt, Human
ccccucccaccacagc

SEQ ID NO: 2088640 - RNA, 12 nt, Human
ccccucccacca

SEQ ID NO: 2088641 - RNA, 11 nt, Human
ccccucccaga

SEQ ID NO: 2088642 - RNA, 12 nt, Human
ccccucccagaa

SEQ ID NO: 2088643 - RNA, 13 nt, Human
ccccucccagaac

SEQ ID NO: 2088644 - RNA, 17 nt, Human
ccccucccuaccucaac

SEQ ID NO: 2088645 - RNA, 12 nt, Human
ccccucccuggc

SEQ ID NO: 2088646 - RNA, 15 nt, Human
ccccucccuggccug

SEQ ID NO: 2088647 - RNA, 16 nt, Human
ccccucccuggccugu

SEQ ID NO: 2088648 - RNA, 17 nt, Human
ccccucccuggccuguu

SEQ ID NO: 2088649 - RNA, 13 nt, Human
ccccucccuggcu

SEQ ID NO: 2088650 - RNA, 14 nt, Human
ccccucccuggcuc

SEQ ID NO: 2088651 - RNA, 15 nt, Human
ccccucccuggcucc

SEQ ID NO: 2088652 - RNA, 15 nt, Human
ccccucccuucaacc

SEQ ID NO: 2088653 - RNA, 22 nt, Human
ccccucccuggcucccaugacc

SEQ ID NO: 2088654 - RNA, 14 nt, Human
ccccucaggacccu

SEQ ID NO: 2088655 - RNA, 18 nt, Human
ccccucaggacccucgcu

SEQ ID NO: 2088656 - RNA, 19 nt, Human
ccccucaggacccucgcug

SEQ ID NO: 2088657 - RNA, 22 nt, Human
ccccucaggacccucgcuggcc

SEQ ID NO: 2088658 - RNA, 15 nt, Human
ccccucaccugggca

SEQ ID NO: 2088659 - RNA, 13 nt, Human
ccccucaccuugc

SEQ ID NO: 2088660 - RNA, 14 nt, Human
ccccucaccuugca

SEQ ID NO: 2088661 - RNA, 15 nt, Human
ccccucaccuugcaa

SEQ ID NO: 2088662 - RNA, 23 nt, Human
ccccuccaaucccaccaacccuc

SEQ ID NO: 2088663 - RNA, 14 nt, Human
cccccucccuggcc

SEQ ID NO: 2088664 - RNA, 14 nt, Human
cccccugccagugc

SEQ ID NO: 2088665 - RNA, 12 nt, Human
cccccagccugc

SEQ ID NO: 2088666 - RNA, 16 nt, Human
cccccagcaacccucc

SEQ ID NO: 2088667 - RNA, 13 nt, Human
cccccuccccagg

SEQ ID NO: 2088668 - RNA, 13 nt, Human
cccccucccaggg

SEQ ID NO: 2088669 - RNA, 18 nt, Human
cccccucaggacccucgc

SEQ ID NO: 2088670 - RNA, 19 nt, Human
cccccucaggacccucgcu

SEQ ID NO: 2088671 - RNA, 20 nt, Human
cccccucaggacccucgcug

SEQ ID NO: 2088672 - RNA, 22 nt, Human
cccccucaggacccucgcuggc

SEQ ID NO: 2088673 - RNA, 24 nt, Human
cccccggguuuggcgggccaagga

SEQ ID NO: 2088674 - RNA, 16 nt, Human
ccccucaacaccucug

SEQ ID NO: 2088675 - RNA, 23 nt, Human
ccccucaaggacaaagucuccag

SEQ ID NO: 2088676 - RNA, 21 nt, Human
ccccuauccacccagcccauu

SEQ ID NO: 2088677 - RNA, 15 nt, Human
ccccucaacaccucu

SEQ ID NO: 2088678 - RNA, 14 nt, Human
ccccuauccaccca

SEQ ID NO: 2088679 - RNA, 16 nt, Human
ccccuauccacccagc

SEQ ID NO: 2088680 - RNA, 17 nt, Human
ccccuauccacccagcc

SEQ ID NO: 2088681 - RNA, 19 nt, Human
ccccuauccacccagccca

SEQ ID NO: 2088682 - RNA, 20 nt, Human
ccccuauccacccagcccau

SEQ ID NO: 2088683 - RNA, 15 nt, Human
ccccggucccuugag

SEQ ID NO: 2088684 - RNA, 16 nt, Human
ccccggucccuugaga

SEQ ID NO: 2088685 - RNA, 24 nt, Human
ccccggucccuugagaccucagcc

SEQ ID NO: 2088686 - RNA, 21 nt, Human
cccccugguggacaguccugg

SEQ ID NO: 2088687 - RNA, 23 nt, Human
cccccugguggacaguccuggga

SEQ ID NO: 2088688 - RNA, 13 nt, Human
cccccugggcucu

SEQ ID NO: 2088689 - RNA, 16 nt, Human
cccccugccagugccu

SEQ ID NO: 2088690 - RNA, 19 nt, Human
cccccugguggacaguccu

SEQ ID NO: 2088691 - RNA, 20 nt, Human
cccccugguggacaguccug

SEQ ID NO: 2088692 - RNA, 15 nt, Human
ccccgggcucucugc

SEQ ID NO: 2088693 - RNA, 16 nt, Human
ccccgggcucucugcu

SEQ ID NO: 2088694 - RNA, 17 nt, Human
ccccgggcucucugcug

SEQ ID NO: 2088695 - RNA, 18 nt, Human
ccccgggcucucugcugu

SEQ ID NO: 2088696 - RNA, 18 nt, Human
ccccggguuuggcgggcc

SEQ ID NO: 2088697 - RNA, 19 nt, Human
ccccggguuuggcgggcca

SEQ ID NO: 2088698 - RNA, 23 nt, Human
ccccggguuuggcgggccaagga

SEQ ID NO: 2088699 - RNA, 22 nt, Human
ccccauaauuuuuuuuuuccuu

SEQ ID NO: 2088700 - RNA, 15 nt, Human
ccccauacucugucu

SEQ ID NO: 2088701 - RNA, 12 nt, Human
ccccauagccac

SEQ ID NO: 2088702 - RNA, 14 nt, Human
ccccauagccaccc

SEQ ID NO: 2088703 - RNA, 18 nt, Human
ccccaucacaaacuuaaa

SEQ ID NO: 2088704 - RNA, 16 nt, Human
ccccagugcacccacu

SEQ ID NO: 2088705 - RNA, 23 nt, Human
ccccaguuugcagaaaagcaccu

SEQ ID NO: 2088706 - RNA, 20 nt, Human
ccccagugcccacaggauca

SEQ ID NO: 2088707 - RNA, 16 nt, Human
ccccagugcccacagg

SEQ ID NO: 2088708 - RNA, 15 nt, Human
ccccagugcccacag

SEQ ID NO: 2088709 - RNA, 14 nt, Human
ccccagugcccaca

SEQ ID NO: 2088710 - RNA, 16 nt, Human
ccccaguaagccacug

SEQ ID NO: 2088711 - RNA, 18 nt, Human
ccccaguaagccacugcc

SEQ ID NO: 2088712 - RNA, 15 nt, Human
ccccagaccugagcu

SEQ ID NO: 2088713 - RNA, 19 nt, Human
ccccagaccugagcucccc

SEQ ID NO: 2088714 - RNA, 12 nt, Human
ccccaggcccca

SEQ ID NO: 2088715 - RNA, 18 nt, Human
ccccaggccccaggaagc

SEQ ID NO: 2088716 - RNA, 19 nt, Human
ccccaggccccaggaagcc

SEQ ID NO: 2088717 - RNA, 15 nt, Human
cccccagaaccuguc

SEQ ID NO: 2088718 - RNA, 22 nt, Human
cccccagaaccuguccuugcac

SEQ ID NO: 2088719 - RNA, 14 nt, Human
cccccacugcaggc

SEQ ID NO: 2088720 - RNA, 21 nt, Human
cccccacucucauuccccagg

SEQ ID NO: 2088721 - RNA, 13 nt, Human
cccccacuggcug

SEQ ID NO: 2088722 - RNA, 14 nt, Human
cccccacuggcugu

SEQ ID NO: 2088723 - RNA, 15 nt, Human
cccccacuggcugug

SEQ ID NO: 2088724 - RNA, 21 nt, Human
cccccacuggcugugggcucc

SEQ ID NO: 2088725 - RNA, 12 nt, Human
cccccacccccu

SEQ ID NO: 2088726 - RNA, 15 nt, Human
cccccaccccuuccc

SEQ ID NO: 2088727 - RNA, 17 nt, Human
cccccaccccuucccca

SEQ ID NO: 2088728 - RNA, 12 nt, Human
cccccacccuuu

SEQ ID NO: 2088729 - RNA, 16 nt, Human
ccccaucccacacccu

SEQ ID NO: 2088730 - RNA, 13 nt, Human
ccccauccucccc

SEQ ID NO: 2088731 - RNA, 17 nt, Human
ccccauccuccccuucc

SEQ ID NO: 2088732 - RNA, 15 nt, Human
cccccaccacuagga

SEQ ID NO: 2088733 - RNA, 18 nt, Human
ccccauccuccccuuccc

SEQ ID NO: 2088734 - RNA, 19 nt, Human
ccccauccuccccuucccu

SEQ ID NO: 2088735 - RNA, 17 nt, Human
cccccacaccucaguuc

SEQ ID NO: 2088736 - RNA, 14 nt, Human
cccccacaccuggc

SEQ ID NO: 2088737 - RNA, 16 nt, Human
cccccacaccuggccc

SEQ ID NO: 2088738 - RNA, 18 nt, Human
cccccacaccuggcccug

SEQ ID NO: 2088739 - RNA, 14 nt, Human
cccaugagccucag

SEQ ID NO: 2088740 - RNA, 19 nt, Human
cccaugaccauacugaggg

SEQ ID NO: 2088741 - RNA, 22 nt, Human
cccaugagccucagcauccugg

SEQ ID NO: 2088742 - RNA, 21 nt, Human
cccaugccaaagcuagggugg

SEQ ID NO: 2088743 - RNA, 14 nt, Human
cccaugcccaccug

SEQ ID NO: 2088744 - RNA, 15 nt, Human
cccaugcccaccugc

SEQ ID NO: 2088745 - RNA, 18 nt, Human
cccaugcccaccugccca

SEQ ID NO: 2088746 - RNA, 23 nt, Human
cccaucucucccuccccugccau

SEQ ID NO: 2088747 - RNA, 13 nt, Human
cccaucucucccu

SEQ ID NO: 2088748 - RNA, 18 nt, Human
cccaucucucccuccccu

SEQ ID NO: 2088749 - RNA, 21 nt, Human
cccaucucucccuccccugcc

SEQ ID NO: 2088750 - RNA, 21 nt, Human
cccaucugcaccccccugggc

SEQ ID NO: 2088751 - RNA, 22 nt, Human
cccaucugcaccccccugggcu

SEQ ID NO: 2088752 - RNA, 19 nt, Human
cccaucucuacaaaaagca

SEQ ID NO: 2088753 - RNA, 14 nt, Human
cccaguugggugga

SEQ ID NO: 2088754 - RNA, 16 nt, Human
cccaguucucuaggga

SEQ ID NO: 2088755 - RNA, 23 nt, Human
cccaguucucuagggaaggccac

SEQ ID NO: 2088756 - RNA, 13 nt, Human
cccagagaagcca

SEQ ID NO: 2088757 - RNA, 13 nt, Human
cccagagacagga

SEQ ID NO: 2088758 - RNA, 14 nt, Human
cccagagacaggaa

SEQ ID NO: 2088759 - RNA, 15 nt, Human
cccagagacaggaaa

SEQ ID NO: 2088760 - RNA, 16 nt, Human
cccagagacaggaaaa

SEQ ID NO: 2088761 - RNA, 17 nt, Human
cccagagacaggaaaau

SEQ ID NO: 2088762 - RNA, 16 nt, Human
ccccagaaggcaggga

SEQ ID NO: 2088763 - RNA, 21 nt, Human
ccccagaaccuguccuugcac

SEQ ID NO: 2088764 - RNA, 15 nt, Human
ccccagaaccugucc

SEQ ID NO: 2088765 - RNA, 20 nt, Human
ccccagaaccuguccuugca

SEQ ID NO: 2088766 - RNA, 15 nt, Human
ccccacucucauucc

SEQ ID NO: 2088767 - RNA, 20 nt, Human
ccccacucucauuccccagg

SEQ ID NO: 2088768 - RNA, 12 nt, Human
ccccacucuccc

SEQ ID NO: 2088769 - RNA, 15 nt, Human
ccccacucuccccac

SEQ ID NO: 2088770 - RNA, 18 nt, Human
ccccacucuccccacacu

SEQ ID NO: 2088771 - RNA, 23 nt, Human
ccccacucccuggcucucagaag

SEQ ID NO: 2088772 - RNA, 14 nt, Human
ccccacuccccacc

SEQ ID NO: 2088773 - RNA, 13 nt, Human
ccccacucacaga

SEQ ID NO: 2088774 - RNA, 21 nt, Human
ccccacucacagagacacagg

SEQ ID NO: 2088775 - RNA, 19 nt, Human
ccccacgugacagugccug

SEQ ID NO: 2088776 - RNA, 14 nt, Human
ccccacccuuuggg

SEQ ID NO: 2088777 - RNA, 22 nt, Human
ccccaauauccucgcucccggg

SEQ ID NO: 2088778 - RNA, 13 nt, Human
ccccaccuccugc

SEQ ID NO: 2088779 - RNA, 13 nt, Human
ccccaccugccac

SEQ ID NO: 2088780 - RNA, 14 nt, Human
ccccaccugccacu

SEQ ID NO: 2088781 - RNA, 17 nt, Human
ccccaccugccacuagg

SEQ ID NO: 2088782 - RNA, 22 nt, Human
ccccaccugccacuaggcuggg

SEQ ID NO: 2088783 - RNA, 11 nt, Human
ccccaccugcc

SEQ ID NO: 2088784 - RNA, 12 nt, Human
ccccaccugcca

SEQ ID NO: 2088785 - RNA, 14 nt, Human
ccccacgcccucau

SEQ ID NO: 2088786 - RNA, 21 nt, Human
ccccaccuucaauuccugggc

SEQ ID NO: 2088787 - RNA, 14 nt, Human
ccccaccccacacu

SEQ ID NO: 2088788 - RNA, 12 nt, Human
ccccacccagga

SEQ ID NO: 2088789 - RNA, 13 nt, Human
ccccacccaggag

SEQ ID NO: 2088790 - RNA, 13 nt, Human
ccccaccccagcc

SEQ ID NO: 2088791 - RNA, 16 nt, Human
ccccaccccacacuug

SEQ ID NO: 2088792 - RNA, 14 nt, Human
cccauuccccagcc

SEQ ID NO: 2088793 - RNA, 18 nt, Human
ccccaaggggcagucugg

SEQ ID NO: 2088794 - RNA, 22 nt, Human
ccccaaggggcagucuggaggg

SEQ ID NO: 2088795 - RNA, 14 nt, Human
ccccaaggggcagu

SEQ ID NO: 2088796 - RNA, 15 nt, Human
ccccaaggggcaguc

SEQ ID NO: 2088797 - RNA, 16 nt, Human
ccccaaggggcagucu

SEQ ID NO: 2088798 - RNA, 14 nt, Human
ccccacaccucagu

SEQ ID NO: 2088799 - RNA, 16 nt, Human
ccccacaccucaguuc

SEQ ID NO: 2088800 - RNA, 14 nt, Human
ccccacaccuggcc

SEQ ID NO: 2088801 - RNA, 16 nt, Human
ccccacaccuggcccu

SEQ ID NO: 2088802 - RNA, 17 nt, Human
ccccacaccuggcccug

SEQ ID NO: 2088803 - RNA, 13 nt, Human
cccaugccugucc

SEQ ID NO: 2088804 - RNA, 22 nt, Human
cuccaaguccacaguggaacca

SEQ ID NO: 2088805 - RNA, 15 nt, Human
cuccaaggugggguc

SEQ ID NO: 2088806 - RNA, 13 nt, Human
cuccaccacccaa

SEQ ID NO: 2088807 - RNA, 14 nt, Human
cuccaccacccaaa

SEQ ID NO: 2088808 - RNA, 12 nt, Human
cuccaccaccca

SEQ ID NO: 2088809 - RNA, 16 nt, Human
cuccaccacccaaaag

SEQ ID NO: 2088810 - RNA, 12 nt, Human
cuccaccccacu

SEQ ID NO: 2088811 - RNA, 14 nt, Human
cuccaccccacuca

SEQ ID NO: 2088812 - RNA, 15 nt, Human
cuccaccccacucac

SEQ ID NO: 2088813 - RNA, 18 nt, Human
cuccaccccacucacaga

SEQ ID NO: 2088814 - RNA, 20 nt, Human
cuccaccccacucacagaga

SEQ ID NO: 2088815 - RNA, 17 nt, Human
cuccacccuuggccugu

SEQ ID NO: 2088816 - RNA, 21 nt, Human
cuccacccuuggccugucuca

SEQ ID NO: 2088817 - RNA, 14 nt, Human
cuccacccuuggcc

SEQ ID NO: 2088818 - RNA, 15 nt, Human
cuccacccuuggccu

SEQ ID NO: 2088819 - RNA, 16 nt, Human
cuccacccuuggccug

SEQ ID NO: 2088820 - RNA, 13 nt, Human
cuccacuggaugg

SEQ ID NO: 2088821 - RNA, 16 nt, Human
cuccacugccuucgau

SEQ ID NO: 2088822 - RNA, 15 nt, Human
cuccacugccuucga

SEQ ID NO: 2088823 - RNA, 14 nt, Human
cuccacugccuucg

SEQ ID NO: 2088824 - RNA, 13 nt, Human
cuccacugccuuc

SEQ ID NO: 2088825 - RNA, 12 nt, Human
cuccacuccuuc

SEQ ID NO: 2088826 - RNA, 14 nt, Human
cuccacuccuuccu

SEQ ID NO: 2088827 - RNA, 15 nt, Human
cuccacuccuuccug

SEQ ID NO: 2088828 - RNA, 19 nt, Human
cuccacuccuuccugccac

SEQ ID NO: 2088829 - RNA, 13 nt, Human
cuccaccucagcc

SEQ ID NO: 2088830 - RNA, 14 nt, Human
cuccaccucagccu

SEQ ID NO: 2088831 - RNA, 14 nt, Human
cuccaccgcugccu

SEQ ID NO: 2088832 - RNA, 15 nt, Human
cuccaccgcugccua

SEQ ID NO: 2088833 - RNA, 16 nt, Human
cuccaccgcugccuaa

SEQ ID NO: 2088834 - RNA, 19 nt, Human
cuccaccgcugccuaagug

SEQ ID NO: 2088835 - RNA, 12 nt, Human
cuccaccucagc

SEQ ID NO: 2088836 - RNA, 21 nt, Human
cuccagauagcucauuucauu

SEQ ID NO: 2088837 - RNA, 14 nt, Human
cuccacuggaugga

SEQ ID NO: 2088838 - RNA, 21 nt, Human
cuccagaccccuggcuuuuca

SEQ ID NO: 2088839 - RNA, 22 nt, Human
cuccacuccuuccugccaccug

SEQ ID NO: 2088840 - RNA, 21 nt, Human
cuccagagaguaucugaggca

SEQ ID NO: 2088841 - RNA, 18 nt, Human
cuccagcucaccagcccc

SEQ ID NO: 2088842 - RNA, 16 nt, Human
cuccagcucaccagcc

SEQ ID NO: 2088843 - RNA, 15 nt, Human
cuccagcucaccagc

SEQ ID NO: 2088844 - RNA, 13 nt, Human
cuccagaucugca

SEQ ID NO: 2088845 - RNA, 14 nt, Human
cuccagaucugcac

SEQ ID NO: 2088846 - RNA, 13 nt, Human
cuccagcccacgu

SEQ ID NO: 2088847 - RNA, 13 nt, Human
cucaguuugucag

SEQ ID NO: 2088848 - RNA, 13 nt, Human
cucaguuucccua

SEQ ID NO: 2088849 - RNA, 16 nt, Human
cucaguuucccuaucu

SEQ ID NO: 2088850 - RNA, 12 nt, Human
cucaguuucccu

SEQ ID NO: 2088851 - RNA, 22 nt, Human
cucaguucccuuggccucagaa

SEQ ID NO: 2088852 - RNA, 21 nt, Human
cucaguuccugcagcagagcc

SEQ ID NO: 2088853 - RNA, 12 nt, Human
cucauucuucug

SEQ ID NO: 2088854 - RNA, 21 nt, Human
cucauuugucacacacuuugg

SEQ ID NO: 2088855 - RNA, 22 nt, Human
cuccaaaccuccuguuagcugu

SEQ ID NO: 2088856 - RNA, 18 nt, Human
cucauuuuaggcaaauau

SEQ ID NO: 2088857 - RNA, 23 nt, Human
cucauuuuuauaaugucccuuca

SEQ ID NO: 2088858 - RNA, 19 nt, Human
cucccaggcgccccuuccc

SEQ ID NO: 2088859 - RNA, 17 nt, Human
cucccaggcgccccuuc

SEQ ID NO: 2088860 - RNA, 15 nt, Human
cucccacacugcuag

SEQ ID NO: 2088861 - RNA, 13 nt, Human
cucccaauucauc

SEQ ID NO: 2088862 - RNA, 14 nt, Human
cucccacacugcua

SEQ ID NO: 2088863 - RNA, 22 nt, Human
cucccaggcgccccuucccccu

SEQ ID NO: 2088864 - RNA, 20 nt, Human
cucccaggcgccccuucccc

SEQ ID NO: 2088865 - RNA, 12 nt, Human
cucccagggcca

SEQ ID NO: 2088866 - RNA, 16 nt, Human
cucccagggccagggc

SEQ ID NO: 2088867 - RNA, 22 nt, Human
cucccaaaaguaucgggggcug

SEQ ID NO: 2088868 - RNA, 19 nt, Human
cucccagggccagggcccu

SEQ ID NO: 2088869 - RNA, 16 nt, Human
cucccaucacuucccu

SEQ ID NO: 2088870 - RNA, 19 nt, Human
cuccccaccaccccagcug

SEQ ID NO: 2088871 - RNA, 20 nt, Human
cuccccaccaccccagcugc

SEQ ID NO: 2088872 - RNA, 21 nt, Human
cuccccaccuucaauuccugg

SEQ ID NO: 2088873 - RNA, 23 nt, Human
cuccccaccuucaauuccugggc

SEQ ID NO: 2088874 - RNA, 14 nt, Human
cucccaaagagcug

SEQ ID NO: 2088875 - RNA, 17 nt, Human
cucccaaagagcugccu

SEQ ID NO: 2088876 - RNA, 21 nt, Human
cucccaaagagcugccuaaga

SEQ ID NO: 2088877 - RNA, 15 nt, Human
cuccauuuaguucuu

SEQ ID NO: 2088878 - RNA, 23 nt, Human
cucccaaagugcugggauuacag

SEQ ID NO: 2088879 - RNA, 16 nt, Human
cucccaaagugcuggg

SEQ ID NO: 2088880 - RNA, 15 nt, Human
cucccacaaaggaga

SEQ ID NO: 2088881 - RNA, 17 nt, Human
cuccaugcugccuccag

SEQ ID NO: 2088882 - RNA, 16 nt, Human
cuccaugcugccucca

SEQ ID NO: 2088883 - RNA, 15 nt, Human
cuccaugcugccucc

SEQ ID NO: 2088884 - RNA, 14 nt, Human
cuccaugcugccuc

SEQ ID NO: 2088885 - RNA, 13 nt, Human
cuccaugcugccu

SEQ ID NO: 2088886 - RNA, 20 nt, Human
cuccagcugcucugucuucu

SEQ ID NO: 2088887 - RNA, 16 nt, Human
cuccccuccuuuccca

SEQ ID NO: 2088888 - RNA, 15 nt, Human
cucccucaaagcaca

SEQ ID NO: 2088889 - RNA, 14 nt, Human
cucccucaacccca

SEQ ID NO: 2088890 - RNA, 23 nt, Human
cucccgaauagcugggacuacag

SEQ ID NO: 2088891 - RNA, 20 nt, Human
cucccgaauagcugggacua

SEQ ID NO: 2088892 - RNA, 21 nt, Human
cucccuucaaccauuccccau

SEQ ID NO: 2088893 - RNA, 12 nt, Human
cucccuggcccu

SEQ ID NO: 2088894 - RNA, 23 nt, Human
cucccuucaaccauuccccaugg

SEQ ID NO: 2088895 - RNA, 22 nt, Human
cucccuucaaccauuccccaug

SEQ ID NO: 2088896 - RNA, 18 nt, Human
cucccucagucuggcccu

SEQ ID NO: 2088897 - RNA, 12 nt, Human
cucccucagccc

SEQ ID NO: 2088898 - RNA, 13 nt, Human
cucccucagcccc

SEQ ID NO: 2088899 - RNA, 14 nt, Human
cucccucagccccu

SEQ ID NO: 2088900 - RNA, 15 nt, Human
cucccucagccccuc

SEQ ID NO: 2088901 - RNA, 16 nt, Human
cucccucagccccucu

SEQ ID NO: 2088902 - RNA, 18 nt, Human
cucccucagccccucuug

SEQ ID NO: 2088903 - RNA, 15 nt, Human
cuccccagcccaggg

SEQ ID NO: 2088904 - RNA, 16 nt, Human
cuccccagcccagggu

SEQ ID NO: 2088905 - RNA, 22 nt, Human
cuccccagcccaggguuccccc

SEQ ID NO: 2088906 - RNA, 19 nt, Human
cuccccuccuugccuccug

SEQ ID NO: 2088907 - RNA, 20 nt, Human
cuccccuccuugccuccugu

SEQ ID NO: 2088908 - RNA, 13 nt, Human
cuccccagcccag

SEQ ID NO: 2088909 - RNA, 22 nt, Human
cuccccuccuugccuccugugu

SEQ ID NO: 2088910 - RNA, 10 nt, Human
cuccccucua

SEQ ID NO: 2088911 - RNA, 21 nt, Human
cuccccucuauuuagcaugac

SEQ ID NO: 2088912 - RNA, 13 nt, Human
cuccccucugcug

SEQ ID NO: 2088913 - RNA, 14 nt, Human
cuccccucugcugg

SEQ ID NO: 2088914 - RNA, 15 nt, Human
cuccccucugcuggc

SEQ ID NO: 2088915 - RNA, 16 nt, Human
cuccccucugcuggcc

SEQ ID NO: 2088916 - RNA, 18 nt, Human
cuccccucuuauguaccu

SEQ ID NO: 2088917 - RNA, 21 nt, Human
cuccccugcacuggaguccag

SEQ ID NO: 2088918 - RNA, 15 nt, Human
cuccccugcacugga

SEQ ID NO: 2088919 - RNA, 12 nt, Human
cucagcugccuc

SEQ ID NO: 2088920 - RNA, 14 nt, Human
cucagcugccucac

SEQ ID NO: 2088921 - RNA, 16 nt, Human
cucagcugccucacuu

SEQ ID NO: 2088922 - RNA, 18 nt, Human
cucagcugccucacuucc

SEQ ID NO: 2088923 - RNA, 12 nt, Human
cucagcucuggc

SEQ ID NO: 2088924 - RNA, 13 nt, Human
cucagcucuggcu

SEQ ID NO: 2088925 - RNA, 14 nt, Human
cucagcucuggcuc

SEQ ID NO: 2088926 - RNA, 15 nt, Human
cucagcucuggcuca

SEQ ID NO: 2088927 - RNA, 17 nt, Human
cucagcucuggcucaca

SEQ ID NO: 2088928 - RNA, 18 nt, Human
cucagcucuggcucacag

SEQ ID NO: 2088929 - RNA, 19 nt, Human
cucagcucuggcucacaga

SEQ ID NO: 2088930 - RNA, 14 nt, Human
cucagcuuucuaag

SEQ ID NO: 2088931 - RNA, 17 nt, Human
cucagcuuuuugucuuu

SEQ ID NO: 2088932 - RNA, 21 nt, Human
cucagcuuuuugucuuuucug

SEQ ID NO: 2088933 - RNA, 15 nt, Human
cucaggaacuagacu

SEQ ID NO: 2088934 - RNA, 14 nt, Human
cucaggacuccagc

SEQ ID NO: 2088935 - RNA, 15 nt, Human
cucaggacuccagcc

SEQ ID NO: 2088936 - RNA, 16 nt, Human
cucaggacuccagccc

SEQ ID NO: 2088937 - RNA, 17 nt, Human
cucaggacuccagccca

SEQ ID NO: 2088938 - RNA, 15 nt, Human
cucaggacuccucuc

SEQ ID NO: 2088939 - RNA, 16 nt, Human
cucaggacuccucucc

SEQ ID NO: 2088940 - RNA, 13 nt, Human
cucaggacccucg

SEQ ID NO: 2088941 - RNA, 14 nt, Human
cucaggacccucgc

SEQ ID NO: 2088942 - RNA, 15 nt, Human
cucaggacccucgcu

SEQ ID NO: 2088943 - RNA, 17 nt, Human
cucaggacccucgcugg

SEQ ID NO: 2088944 - RNA, 19 nt, Human
cucaggacccucgcuggcc

SEQ ID NO: 2088945 - RNA, 20 nt, Human
cucaggacccucgcuggccc

SEQ ID NO: 2088946 - RNA, 21 nt, Human
cucaggacccucgcuggcccc

SEQ ID NO: 2088947 - RNA, 22 nt, Human
cucaggacccucgcuggccccc

SEQ ID NO: 2088948 - RNA, 12 nt, Human
cucaggaccuag

SEQ ID NO: 2088949 - RNA, 15 nt, Human
cucaggcagguggga

SEQ ID NO: 2088950 - RNA, 14 nt, Human
cucaggaggcugag

SEQ ID NO: 2088951 - RNA, 15 nt, Human
cucaggaggcugagg

SEQ ID NO: 2088952 - RNA, 17 nt, Human
cucaggaggcugaggca

SEQ ID NO: 2088953 - RNA, 18 nt, Human
cucaggcaggugggaugg

SEQ ID NO: 2088954 - RNA, 18 nt, Human
cucaggaggcugaggcag

SEQ ID NO: 2088955 - RNA, 13 nt, Human
cucaggaggcuga

SEQ ID NO: 2088956 - RNA, 19 nt, Human
cucaggaggcugaggcaga

SEQ ID NO: 2088957 - RNA, 16 nt, Human
cucaggcauaggccug

SEQ ID NO: 2088958 - RNA, 17 nt, Human
cucaggcauaggccugg

SEQ ID NO: 2088959 - RNA, 20 nt, Human
cucaggcauaggccugggug

SEQ ID NO: 2088960 - RNA, 21 nt, Human
cucaggcauaggccugggugc

SEQ ID NO: 2088961 - RNA, 18 nt, Human
cucagggccccagcacua

SEQ ID NO: 2088962 - RNA, 14 nt, Human
cucagggccccagc

SEQ ID NO: 2088963 - RNA, 16 nt, Human
cucagggccccagcac

SEQ ID NO: 2088964 - RNA, 18 nt, Human
cucaggcaugccugugug

SEQ ID NO: 2088965 - RNA, 22 nt, Human
cucaggcauaggccugggugcu

SEQ ID NO: 2088966 - RNA, 23 nt, Human
cucaggcauaggccugggugcug

SEQ ID NO: 2088967 - RNA, 17 nt, Human
cucaggcaucauuccac

SEQ ID NO: 2088968 - RNA, 18 nt, Human
cucaggcaucauuccacc

SEQ ID NO: 2088969 - RNA, 15 nt, Human
cucaggcaugccugu

SEQ ID NO: 2088970 - RNA, 16 nt, Human
cucaggcaugccugug

SEQ ID NO: 2088971 - RNA, 17 nt, Human
cucaggcaugccugugu

SEQ ID NO: 2088972 - RNA, 15 nt, Human
cucagggcagccugc

SEQ ID NO: 2088973 - RNA, 16 nt, Human
cucagggcagccugcc

SEQ ID NO: 2088974 - RNA, 19 nt, Human
cucagggcagccugccugg

SEQ ID NO: 2088975 - RNA, 20 nt, Human
cucagggcagccugccugga

SEQ ID NO: 2088976 - RNA, 12 nt, Human
cucagggcccca

SEQ ID NO: 2088977 - RNA, 13 nt, Human
cucagggccccag

SEQ ID NO: 2088978 - RNA, 23 nt, Human
cucaggugauccacccaccucag

SEQ ID NO: 2088979 - RNA, 22 nt, Human
cucaggugauccacccaccuca

SEQ ID NO: 2088980 - RNA, 20 nt, Human
cucaguucccuuggccucag

SEQ ID NO: 2088981 - RNA, 21 nt, Human
cucaguucccuuggccucaga

SEQ ID NO: 2088982 - RNA, 14 nt, Human
cucagggccugguc

SEQ ID NO: 2088983 - RNA, 15 nt, Human
cucagcucccaaggc

SEQ ID NO: 2088984 - RNA, 19 nt, Human
cucagcucccaaggcucug

SEQ ID NO: 2088985 - RNA, 23 nt, Human
cucagcggggacagcuccuucug

SEQ ID NO: 2088986 - RNA, 23 nt, Human
cucagcguuuuuuuguuuuuaau

SEQ ID NO: 2088987 - RNA, 21 nt, Human
cucagcggggacagcuccuuc

SEQ ID NO: 2088988 - RNA, 20 nt, Human
cucagcggggacagcuccuu

SEQ ID NO: 2088989 - RNA, 19 nt, Human
cucagcggggacagcuccu

SEQ ID NO: 2088990 - RNA, 18 nt, Human
cucagcggggacagcucc

SEQ ID NO: 2088991 - RNA, 16 nt, Human
cucagcggggacagcu

SEQ ID NO: 2088992 - RNA, 15 nt, Human
cucagcggggacagc

SEQ ID NO: 2088993 - RNA, 14 nt, Human
cucagcggggacag

SEQ ID NO: 2088994 - RNA, 11 nt, Human
cucagcccuga

SEQ ID NO: 2088995 - RNA, 22 nt, Human
cucagcauccuggcacccggcc

SEQ ID NO: 2088996 - RNA, 21 nt, Human
cucagcauccuggcacccggc

SEQ ID NO: 2088997 - RNA, 13 nt, Human
cucagcauccugg

SEQ ID NO: 2088998 - RNA, 14 nt, Human
cucagauuuuuccu

SEQ ID NO: 2088999 - RNA, 19 nt, Human
cucagcaaaagaugcuucu

SEQ ID NO: 2089000 - RNA, 20 nt, Human
cucagcaaaagaugcuucuc

SEQ ID NO: 2089001 - RNA, 21 nt, Human
cucagcaaaagaugcuucuca

SEQ ID NO: 2089002 - RNA, 21 nt, Human
cucagcccucccugccccucc

SEQ ID NO: 2089003 - RNA, 20 nt, Human
cucagcccucccugccccuc

SEQ ID NO: 2089004 - RNA, 19 nt, Human
cucagcccucccugccccu

SEQ ID NO: 2089005 - RNA, 14 nt, Human
cucagcccucccug

SEQ ID NO: 2089006 - RNA, 11 nt, Human
cucagccccuc

SEQ ID NO: 2089007 - RNA, 13 nt, Human
cucagccccucuu

SEQ ID NO: 2089008 - RNA, 16 nt, Human
cucagccccucuugcc

SEQ ID NO: 2089009 - RNA, 18 nt, Human
cucagccccucuugcccc

SEQ ID NO: 2089010 - RNA, 19 nt, Human
cucagccccucuugccccc

SEQ ID NO: 2089011 - RNA, 20 nt, Human
cucagccaaccuuacuuaca

SEQ ID NO: 2089012 - RNA, 22 nt, Human
cucagccaaccuuacuuacagc

SEQ ID NO: 2089013 - RNA, 15 nt, Human
cucagcauccuggca

SEQ ID NO: 2089014 - RNA, 11 nt, Human
cucagccccag

SEQ ID NO: 2089015 - RNA, 15 nt, Human
cucagccccagccca

SEQ ID NO: 2089016 - RNA, 16 nt, Human
cucagccccagcccag

SEQ ID NO: 2089017 - RNA, 18 nt, Human
cucagccccagcccagcc

SEQ ID NO: 2089018 - RNA, 23 nt, Human
cucagccccagcccagcccagcu

SEQ ID NO: 2089019 - RNA, 11 nt, Human
cucagcccacc

SEQ ID NO: 2089020 - RNA, 16 nt, Human
cucagcccaccccccu

SEQ ID NO: 2089021 - RNA, 17 nt, Human
cucagcccaccccccuc

SEQ ID NO: 2089022 - RNA, 19 nt, Human
cucagcccaccccccucau

SEQ ID NO: 2089023 - RNA, 19 nt, Human
cucacuguugcccaggcug

SEQ ID NO: 2089024 - RNA, 18 nt, Human
cucacuguugcccaggcu

SEQ ID NO: 2089025 - RNA, 17 nt, Human
cucacuguugcccaggc

SEQ ID NO: 2089026 - RNA, 16 nt, Human
cucacuguugcccagg

SEQ ID NO: 2089027 - RNA, 15 nt, Human
cucagagccaccccu

SEQ ID NO: 2089028 - RNA, 21 nt, Human
cucacuguugaauuuucucua

SEQ ID NO: 2089029 - RNA, 15 nt, Human
cucacuguugaauuu

SEQ ID NO: 2089030 - RNA, 21 nt, Human
cucagaugcacaugagcuggc

SEQ ID NO: 2089031 - RNA, 16 nt, Human
cucagauggaaccgca

SEQ ID NO: 2089032 - RNA, 20 nt, Human
cucagauggaaccgcaggaa

SEQ ID NO: 2089033 - RNA, 23 nt, Human
cucagauggaaccgcaggaagcu

SEQ ID NO: 2089034 - RNA, 21 nt, Human
cucagauggaaccgcaggaag

SEQ ID NO: 2089035 - RNA, 22 nt, Human
cucagauggaaccgcaggaagc

SEQ ID NO: 2089036 - RNA, 14 nt, Human
cucagagccccgca

SEQ ID NO: 2089037 - RNA, 18 nt, Human
cucagaggguuguucucc

SEQ ID NO: 2089038 - RNA, 21 nt, Human
cucagaggguuguucuccuag

SEQ ID NO: 2089039 - RNA, 19 nt, Human
cucagagguagggcugcca

SEQ ID NO: 2089040 - RNA, 14 nt, Human
cucagaguccaggc

SEQ ID NO: 2089041 - RNA, 23 nt, Human
cucacagacuggagacaaugcag

SEQ ID NO: 2089042 - RNA, 16 nt, Human
cucacagagacacagg

SEQ ID NO: 2089043 - RNA, 16 nt, Human
cucacugcagccucaa

SEQ ID NO: 2089044 - RNA, 15 nt, Human
cucacugcagccuca

SEQ ID NO: 2089045 - RNA, 14 nt, Human
cucacugcagccuc

SEQ ID NO: 2089046 - RNA, 17 nt, Human
cucacagcacacucagc

SEQ ID NO: 2089047 - RNA, 15 nt, Human
cucacugcagccucg

SEQ ID NO: 2089048 - RNA, 16 nt, Human
cucacugcagccucga

SEQ ID NO: 2089049 - RNA, 22 nt, Human
cucacugggguccuggggccuc

SEQ ID NO: 2089050 - RNA, 12 nt, Human
cucacugggugg

SEQ ID NO: 2089051 - RNA, 13 nt, Human
cucacuggguggg

SEQ ID NO: 2089052 - RNA, 15 nt, Human
cucacuguugcccag

SEQ ID NO: 2089053 - RNA, 14 nt, Human
cucacuguugccca

SEQ ID NO: 2089054 - RNA, 17 nt, Human
cucacugggguccuggg

SEQ ID NO: 2089055 - RNA, 20 nt, Human
cucacugggguccuggggcc

SEQ ID NO: 2089056 - RNA, 13 nt, Human
cucacuggcagcc

SEQ ID NO: 2089057 - RNA, 18 nt, Human
cucacuggcagccccagc

SEQ ID NO: 2089058 - RNA, 19 nt, Human
cucacuggcagccccagca

SEQ ID NO: 2089059 - RNA, 20 nt, Human
cucacuggcagccccagcac

SEQ ID NO: 2089060 - RNA, 16 nt, Human
cuacuuuuccuucccu

SEQ ID NO: 2089061 - RNA, 21 nt, Human
cuacuuuuccuucccucaaag

SEQ ID NO: 2089062 - RNA, 22 nt, Human
cuacuuagcaugucccuaccga

SEQ ID NO: 2089063 - RNA, 19 nt, Human
cuacuuaccauaugugcuu

SEQ ID NO: 2089064 - RNA, 17 nt, Human
cuacuuagcaugucccu

SEQ ID NO: 2089065 - RNA, 20 nt, Human
cuacuguccuacccacccuc

SEQ ID NO: 2089066 - RNA, 13 nt, Human
cuacuuacacauc

SEQ ID NO: 2089067 - RNA, 10 nt, Human
cuagagaaac

SEQ ID NO: 2089068 - RNA, 23 nt, Human
cuagaaagugaauaaaaauuaag

SEQ ID NO: 2089069 - RNA, 22 nt, Human
cuagaggcuugcauaauaagcu

SEQ ID NO: 2089070 - RNA, 13 nt, Human
cuagauaaaaaga

SEQ ID NO: 2089071 - RNA, 15 nt, Human
cuagauaaaaagaug

SEQ ID NO: 2089072 - RNA, 16 nt, Human
cuagauaaaaagaugg

SEQ ID NO: 2089073 - RNA, 23 nt, Human
cuagauaaaaagauggccuuugc

SEQ ID NO: 2089074 - RNA, 17 nt, Human
cuagagauauggcagcg

SEQ ID NO: 2089075 - RNA, 19 nt, Human
cuagagagggaauucucuu

SEQ ID NO: 2089076 - RNA, 23 nt, Human
cuagaggccagccccacccagga

SEQ ID NO: 2089077 - RNA, 22 nt, Human
cuagaggccagccccacccagg

SEQ ID NO: 2089078 - RNA, 23 nt, Human
cuaccucaggcaggaagggcagg

SEQ ID NO: 2089079 - RNA, 14 nt, Human
cuaccucaggcagg

SEQ ID NO: 2089080 - RNA, 20 nt, Human
cuaccucaggcaggaagggc

SEQ ID NO: 2089081 - RNA, 15 nt, Human
cuaccucaaccugua

SEQ ID NO: 2089082 - RNA, 18 nt, Human
cuaccucaaccuguaaau

SEQ ID NO: 2089083 - RNA, 21 nt, Human
cuaccucaaccuguaaauuau

SEQ ID NO: 2089084 - RNA, 17 nt, Human
cuaccucacuggggucc

SEQ ID NO: 2089085 - RNA, 11 nt, Human
cuaccucagcc

SEQ ID NO: 2089086 - RNA, 12 nt, Human
cuaccucagccu

SEQ ID NO: 2089087 - RNA, 14 nt, Human
cuaccucagccuag

SEQ ID NO: 2089088 - RNA, 15 nt, Human
cuaccucagccuaga

SEQ ID NO: 2089089 - RNA, 13 nt, Human
cuaccucaggcag

SEQ ID NO: 2089090 - RNA, 22 nt, Human
cuaccgagucucuucuccacug

SEQ ID NO: 2089091 - RNA, 21 nt, Human
cuaccgagucucuucuccacu

SEQ ID NO: 2089092 - RNA, 23 nt, Human
cuaccgagucucuucuccacugg

SEQ ID NO: 2089093 - RNA, 19 nt, Human
cuaccgagucucuucucca

SEQ ID NO: 2089094 - RNA, 17 nt, Human
cuaccgagucucuucuc

SEQ ID NO: 2089095 - RNA, 23 nt, Human
cuacuccggaggcugaggcagga

SEQ ID NO: 2089096 - RNA, 15 nt, Human
cuacuccuaccucag

SEQ ID NO: 2089097 - RNA, 16 nt, Human
cuacuccuaccucagc

SEQ ID NO: 2089098 - RNA, 17 nt, Human
cuacuccuaccucagcc

SEQ ID NO: 2089099 - RNA, 18 nt, Human
cuacuccuaccucagccu

SEQ ID NO: 2089100 - RNA, 21 nt, Human
cuacuccuaccucagccuaga

SEQ ID NO: 2089101 - RNA, 19 nt, Human
cuacuguccuacccacccu

SEQ ID NO: 2089102 - RNA, 12 nt, Human
cuacugcuucua

SEQ ID NO: 2089103 - RNA, 22 nt, Human
cuacugcuucuaccaacuggaa

SEQ ID NO: 2089104 - RNA, 13 nt, Human
cuacucuguguca

SEQ ID NO: 2089105 - RNA, 12 nt, Human
cuacucuguguc

SEQ ID NO: 2089106 - RNA, 16 nt, Human
cuacugauuguuucau

SEQ ID NO: 2089107 - RNA, 17 nt, Human
cuacugauuguuucauu

SEQ ID NO: 2089108 - RNA, 22 nt, Human
cuacucucaggaucaagaaagu

SEQ ID NO: 2089109 - RNA, 22 nt, Human
cuagcuaauggaaaaugauuuu

SEQ ID NO: 2089110 - RNA, 16 nt, Human
cuagcgcugccgcacc

SEQ ID NO: 2089111 - RNA, 12 nt, Human
cuagcgcugccg

SEQ ID NO: 2089112 - RNA, 22 nt, Human
cuagcgcugccgcaccccagag

SEQ ID NO: 2089113 - RNA, 23 nt, Human
cuagccuuagaagucacacagua

SEQ ID NO: 2089114 - RNA, 22 nt, Human
cuagccuuagaagucacacagu

SEQ ID NO: 2089115 - RNA, 15 nt, Human
cuagaucagaacagg

SEQ ID NO: 2089116 - RNA, 19 nt, Human
cuagccuugaggaguguga

SEQ ID NO: 2089117 - RNA, 21 nt, Human
cuagccuuagaagucacacag

SEQ ID NO: 2089118 - RNA, 22 nt, Human
cuagccugugccucugggacug

SEQ ID NO: 2089119 - RNA, 21 nt, Human
cuagccugugccucugggacu

SEQ ID NO: 2089120 - RNA, 19 nt, Human
cuagccugugccucuggga

SEQ ID NO: 2089121 - RNA, 20 nt, Human
cuagagguuuuaugauauuu

SEQ ID NO: 2089122 - RNA, 15 nt, Human
cuagcuaugugaccu

SEQ ID NO: 2089123 - RNA, 19 nt, Human
cuagcuagaagugggccag

SEQ ID NO: 2089124 - RNA, 23 nt, Human
cuagcuagaagugggccaggaca

SEQ ID NO: 2089125 - RNA, 22 nt, Human
cuagcuccacacccucucccag

SEQ ID NO: 2089126 - RNA, 19 nt, Human
cuagcuggaauuuuuuauu

SEQ ID NO: 2089127 - RNA, 21 nt, Human
cuagcuggaauuuuuuauucu

SEQ ID NO: 2089128 - RNA, 22 nt, Human
cuagcuggaauuuuuuauucuu

SEQ ID NO: 2089129 - RNA, 23 nt, Human
cuagcuggaauuuuuuauucuug

SEQ ID NO: 2089130 - RNA, 24 nt, Human
cuagcuggaauuuuuuauucuugu

SEQ ID NO: 2089131 - RNA, 20 nt, Human
cuagcuugggaggcuucccc

SEQ ID NO: 2089132 - RNA, 18 nt, Human
cuagcuguugagcuguuu

SEQ ID NO: 2089133 - RNA, 12 nt, Human
cuagcugugugc

SEQ ID NO: 2089134 - RNA, 20 nt, Human
cuagcuuacaugagaacaga

SEQ ID NO: 2089135 - RNA, 17 nt, Human
cuauugacaagucauuu

SEQ ID NO: 2089136 - RNA, 21 nt, Human
cuauugauauaaauaaaacau

SEQ ID NO: 2089137 - RNA, 16 nt, Human
cuauugacaagucauu

SEQ ID NO: 2089138 - RNA, 22 nt, Human
cuauugacaucagcaucaccua

SEQ ID NO: 2089139 - RNA, 23 nt, Human
cuauucaguaauaacucuacccu

SEQ ID NO: 2089140 - RNA, 14 nt, Human
cuauucucuccuca

SEQ ID NO: 2089141 - RNA, 16 nt, Human
cuauucucuccucaga

SEQ ID NO: 2089142 - RNA, 18 nt, Human
cuauucucuccucagacu

SEQ ID NO: 2089143 - RNA, 19 nt, Human
cuauucucuccucagacug

SEQ ID NO: 2089144 - RNA, 15 nt, Human
cuauguaacugcauu

SEQ ID NO: 2089145 - RNA, 15 nt, Human
cuauggggauggucc

SEQ ID NO: 2089146 - RNA, 18 nt, Human
cuauggggaugguccacu

SEQ ID NO: 2089147 - RNA, 21 nt, Human
cuauguaacugcauugagaac

SEQ ID NO: 2089148 - RNA, 15 nt, Human
cuauguacaauauuu

SEQ ID NO: 2089149 - RNA, 16 nt, Human
cuauguacaauauuuu

SEQ ID NO: 2089150 - RNA, 18 nt, Human
cuauguacaauauuuuaa

SEQ ID NO: 2089151 - RNA, 19 nt, Human
cuauguacaauauuuuaag

SEQ ID NO: 2089152 - RNA, 21 nt, Human
cuauguacaauauuuuaagca

SEQ ID NO: 2089153 - RNA, 22 nt, Human
cuauguacaauauuuuaagcau

SEQ ID NO: 2089154 - RNA, 19 nt, Human
cuaugggagccccaggguc

SEQ ID NO: 2089155 - RNA, 16 nt, Human
cuauggggacauucca

SEQ ID NO: 2089156 - RNA, 17 nt, Human
cuauggggagaaaagac

SEQ ID NO: 2089157 - RNA, 21 nt, Human
cuauggggagaaaagacauga

SEQ ID NO: 2089158 - RNA, 20 nt, Human
cuaugcucauaacuguguca

SEQ ID NO: 2089159 - RNA, 13 nt, Human
cuauguaucaaug

SEQ ID NO: 2089160 - RNA, 15 nt, Human
cuauuauaauuuaau

SEQ ID NO: 2089161 - RNA, 16 nt, Human
cuauguaucaaugagu

SEQ ID NO: 2089162 - RNA, 16 nt, Human
cuauuauaauuuaaug

SEQ ID NO: 2089163 - RNA, 17 nt, Human
cuauuauaauuuaaugc

SEQ ID NO: 2089164 - RNA, 21 nt, Human
cuauuauaauuuaaugcaugu

SEQ ID NO: 2089165 - RNA, 17 nt, Human
cuauucaguaauaacuc

SEQ ID NO: 2089166 - RNA, 15 nt, Human
cuaugauuuggaaaa

SEQ ID NO: 2089167 - RNA, 19 nt, Human
cuaugauuuggaaaauaaa

SEQ ID NO: 2089168 - RNA, 19 nt, Human
cuaugcauuuuaaaguuaa

SEQ ID NO: 2089169 - RNA, 19 nt, Human
cuaugccagcucaguccca

SEQ ID NO: 2089170 - RNA, 20 nt, Human
cuaugccagcucagucccau

SEQ ID NO: 2089171 - RNA, 13 nt, Human
cuauacugccucu

SEQ ID NO: 2089172 - RNA, 13 nt, Human
cuauagucccagc

SEQ ID NO: 2089173 - RNA, 14 nt, Human
cuauagucccagcu

SEQ ID NO: 2089174 - RNA, 15 nt, Human
cuauagucccagcua

SEQ ID NO: 2089175 - RNA, 19 nt, Human
cuauauaguaccuuugcuc

SEQ ID NO: 2089176 - RNA, 20 nt, Human
cuauauaguaccuuugcucu

SEQ ID NO: 2089177 - RNA, 20 nt, Human
cuauaauucccuaucuuuua

SEQ ID NO: 2089178 - RNA, 22 nt, Human
cuauaauucccuaucuuuuagu

SEQ ID NO: 2089179 - RNA, 16 nt, Human
cuauaauugccacuga

SEQ ID NO: 2089180 - RNA, 19 nt, Human
cuauaccccuuacuuagca

SEQ ID NO: 2089181 - RNA, 20 nt, Human
cuauaccccuuacuuagcau

SEQ ID NO: 2089182 - RNA, 21 nt, Human
cuauagccuaggugacagagu

SEQ ID NO: 2089183 - RNA, 20 nt, Human
cuauagccuaggugacagag

SEQ ID NO: 2089184 - RNA, 18 nt, Human
cuauagccuaggugacag

SEQ ID NO: 2089185 - RNA, 19 nt, Human
cuauagccuaggugacaga

SEQ ID NO: 2089186 - RNA, 18 nt, Human
cucaacccucccucagcc

SEQ ID NO: 2089187 - RNA, 19 nt, Human
cucaacccucccucagccc

SEQ ID NO: 2089188 - RNA, 21 nt, Human
cucaacccucccucagccccu

SEQ ID NO: 2089189 - RNA, 22 nt, Human
cucaacccucccucagccccuc

SEQ ID NO: 2089190 - RNA, 15 nt, Human
cucaaccauccccuc

SEQ ID NO: 2089191 - RNA, 20 nt, Human
cucaaccauccccuccgugg

SEQ ID NO: 2089192 - RNA, 18 nt, Human
cucaaccccaccacuucu

SEQ ID NO: 2089193 - RNA, 22 nt, Human
cucaacccccauuucuauuuau

SEQ ID NO: 2089194 - RNA, 19 nt, Human
cucaacccccauuucuauu

SEQ ID NO: 2089195 - RNA, 16 nt, Human
cucaacccucccucag

SEQ ID NO: 2089196 - RNA, 16 nt, Human
cucaacauguuacuga

SEQ ID NO: 2089197 - RNA, 20 nt, Human
cucaacauguuacugaccag

SEQ ID NO: 2089198 - RNA, 23 nt, Human
cuauuucugagaagguccuuaau

SEQ ID NO: 2089199 - RNA, 13 nt, Human
cuauuucugagaa

SEQ ID NO: 2089200 - RNA, 18 nt, Human
cuauuucaaaaauuugga

SEQ ID NO: 2089201 - RNA, 19 nt, Human
cuauuucaaaaauuuggaa

SEQ ID NO: 2089202 - RNA, 18 nt, Human
cuauuuauuuacugagcu

SEQ ID NO: 2089203 - RNA, 15 nt, Human
cuauuuauuuacuga

SEQ ID NO: 2089204 - RNA, 14 nt, Human
cuauuuauuuacug

SEQ ID NO: 2089205 - RNA, 17 nt, Human
cucaagcaauccuccug

SEQ ID NO: 2089206 - RNA, 18 nt, Human
cucaagcaauccuccuga

SEQ ID NO: 2089207 - RNA, 20 nt, Human
cucaagcaauccuccugagu

SEQ ID NO: 2089208 - RNA, 21 nt, Human
cucaagcaauccuccugagug

SEQ ID NO: 2089209 - RNA, 22 nt, Human
cucaagcaauccuccugaguga

SEQ ID NO: 2089210 - RNA, 17 nt, Human
cucaacucaccuaaugu

SEQ ID NO: 2089211 - RNA, 13 nt, Human
cucaagcccugca

SEQ ID NO: 2089212 - RNA, 12 nt, Human
cucaagcccugc

SEQ ID NO: 2089213 - RNA, 15 nt, Human
cucaaggcgugagga

SEQ ID NO: 2089214 - RNA, 16 nt, Human
cucaaggcgugaggau

SEQ ID NO: 2089215 - RNA, 14 nt, Human
cucaagcagucuac

SEQ ID NO: 2089216 - RNA, 23 nt, Human
cucaagcagucuacccaccucag

SEQ ID NO: 2089217 - RNA, 16 nt, Human
cucaagccaagcagcc

SEQ ID NO: 2089218 - RNA, 18 nt, Human
cucaagccaagcagccaa

SEQ ID NO: 2089219 - RNA, 21 nt, Human
cucaagccaagcagccaagcu

SEQ ID NO: 2089220 - RNA, 22 nt, Human
cucaagccaagcagccaagcuc

SEQ ID NO: 2089221 - RNA, 14 nt, Human
cucaaguccucuuu

SEQ ID NO: 2089222 - RNA, 18 nt, Human
cucaagggggacugucuu

SEQ ID NO: 2089223 - RNA, 19 nt, Human
cucaaggugggccuugcua

SEQ ID NO: 2089224 - RNA, 23 nt, Human
cucacacggacacucaaaagcug

SEQ ID NO: 2089225 - RNA, 21 nt, Human
cucacaccgcgucuggugaca

SEQ ID NO: 2089226 - RNA, 17 nt, Human
cucacagaacccuugga

SEQ ID NO: 2089227 - RNA, 13 nt, Human
cucacagaagaau

SEQ ID NO: 2089228 - RNA, 10 nt, Human
cucacacucc

SEQ ID NO: 2089229 - RNA, 11 nt, Human
cuauugguaaa

SEQ ID NO: 2089230 - RNA, 15 nt, Human
cuauuggguucauua

SEQ ID NO: 2089231 - RNA, 16 nt, Human
cuauuggguucauuau

SEQ ID NO: 2089232 - RNA, 23 nt, Human
cuauuggguucauuauuggaauu

SEQ ID NO: 2089233 - RNA, 13 nt, Human
cuauuuaaauucu

SEQ ID NO: 2089234 - RNA, 14 nt, Human
cuauuuaaauucuu

SEQ ID NO: 2089235 - RNA, 15 nt, Human
cuauuuaaauucuuu

SEQ ID NO: 2089236 - RNA, 22 nt, Human
cuauuuaacuggcuucagccuc

SEQ ID NO: 2089237 - RNA, 16 nt, Human
cuauugcugcuugagg

SEQ ID NO: 2089238 - RNA, 17 nt, Human
cuauugcagcugggaga

SEQ ID NO: 2089239 - RNA, 16 nt, Human
cuaacaaccaaagacu

SEQ ID NO: 2089240 - RNA, 13 nt, Human
cuaaaugaagugc

SEQ ID NO: 2089241 - RNA, 15 nt, Human
cuaacaggggcuggu

SEQ ID NO: 2089242 - RNA, 19 nt, Human
cuaacaggggcuggugggc

SEQ ID NO: 2089243 - RNA, 20 nt, Human
cuaacaggggcuggugggca

SEQ ID NO: 2089244 - RNA, 17 nt, Human
cuaacaguucacuugca

SEQ ID NO: 2089245 - RNA, 19 nt, Human
cuaacaguucacuugcagu

SEQ ID NO: 2089246 - RNA, 17 nt, Human
cuaacacuggccccuag

SEQ ID NO: 2089247 - RNA, 18 nt, Human
cuaacagauaagcaagag

SEQ ID NO: 2089248 - RNA, 17 nt, Human
cuaacagauaagcaaga

SEQ ID NO: 2089249 - RNA, 14 nt, Human
cuaaccacacagcc

SEQ ID NO: 2089250 - RNA, 15 nt, Human
cuaaccacacagccu

SEQ ID NO: 2089251 - RNA, 13 nt, Human
cuaaccaaaugca

SEQ ID NO: 2089252 - RNA, 14 nt, Human
cuaaccaaaugcau

SEQ ID NO: 2089253 - RNA, 14 nt, Human
cuaaccacgcugga

SEQ ID NO: 2089254 - RNA, 12 nt, Human
cuaaccacgcug

SEQ ID NO: 2089255 - RNA, 13 nt, Human
cuaaccccuuucc

SEQ ID NO: 2089256 - RNA, 14 nt, Human
cuaaccccuuuccu

SEQ ID NO: 2089257 - RNA, 16 nt, Human
cuaaccccuuuccugc

SEQ ID NO: 2089258 - RNA, 12 nt, Human
cuaaccuccuuu

SEQ ID NO: 2089259 - RNA, 13 nt, Human
cuaaccuccuuua

SEQ ID NO: 2089260 - RNA, 14 nt, Human
cuaaccuaagcaaa

SEQ ID NO: 2089261 - RNA, 22 nt, Human
cuaaccuaagcaaaaccacuga

SEQ ID NO: 2089262 - RNA, 19 nt, Human
cuaaccucuuuucugcauc

SEQ ID NO: 2089263 - RNA, 11 nt, Human
cuaagagccau

SEQ ID NO: 2089264 - RNA, 20 nt, Human
cuaagagccauuuaggggcc

SEQ ID NO: 2089265 - RNA, 16 nt, Human
cuaagagcuagcgcug

SEQ ID NO: 2089266 - RNA, 18 nt, Human
cuaagagcuagcgcugcc

SEQ ID NO: 2089267 - RNA, 19 nt, Human
cuaagagcuagcgcugccg

SEQ ID NO: 2089268 - RNA, 20 nt, Human
cuaagagcuagcgcugccgc

SEQ ID NO: 2089269 - RNA, 12 nt, Human
cuaagagugucc

SEQ ID NO: 2089270 - RNA, 18 nt, Human
cuaagaguguccuaggag

SEQ ID NO: 2089271 - RNA, 15 nt, Human
cuaaauaaaauauaa

SEQ ID NO: 2089272 - RNA, 17 nt, Human
cuaaauaaaauauaauu

SEQ ID NO: 2089273 - RNA, 18 nt, Human
cuaaauaaaauauaauug

SEQ ID NO: 2089274 - RNA, 19 nt, Human
cuaaauaaaauauaauugu

SEQ ID NO: 2089275 - RNA, 20 nt, Human
cuaaauaaaauauaauuguu

SEQ ID NO: 2089276 - RNA, 20 nt, Human
cuaaauaaacacauagauuc

SEQ ID NO: 2089277 - RNA, 22 nt, Human
cuaaauaaacacauagauucac

SEQ ID NO: 2089278 - RNA, 22 nt, Human
cuaaaugaaaaucgugacaaca

SEQ ID NO: 2089279 - RNA, 16 nt, Human
cuaaaucuccuauuuu

SEQ ID NO: 2089280 - RNA, 17 nt, Human
cuaaaucuccuauuuuu

SEQ ID NO: 2089281 - RNA, 18 nt, Human
cuaaaucuguaagcucuu

SEQ ID NO: 2089282 - RNA, 22 nt, Human
cuaaaucuguaagcucuuugaa

SEQ ID NO: 2089283 - RNA, 19 nt, Human
cuaaaauagccacuuaccu

SEQ ID NO: 2089284 - RNA, 13 nt, Human
cuaaaauagccac

SEQ ID NO: 2089285 - RNA, 13 nt, Human
cuaaaaauacaaa

SEQ ID NO: 2089286 - RNA, 20 nt, Human
cgggaggcagagguugcagu

SEQ ID NO: 2089287 - RNA, 20 nt, Human
cguuugcccaaaucugccua

SEQ ID NO: 2089288 - RNA, 9 nt, Human
cguuuguuu

SEQ ID NO: 2089289 - RNA, 12 nt, Human
cguuuguuuguu

SEQ ID NO: 2089290 - RNA, 13 nt, Human
cguuuguuuguuu

SEQ ID NO: 2089291 - RNA, 21 nt, Human
cgggacgagacccuacaggag

SEQ ID NO: 2089292 - RNA, 22 nt, Human
cgggaggcagagguugcagugu

SEQ ID NO: 2089293 - RNA, 21 nt, Human
cgggaggauguucugggacac

SEQ ID NO: 2089294 - RNA, 23 nt, Human
cgggaggauguucugggacacag

SEQ ID NO: 2089295 - RNA, 12 nt, Human
cuaaaaguucau

SEQ ID NO: 2089296 - RNA, 18 nt, Human
cuaaaaguucauaacagu

SEQ ID NO: 2089297 - RNA, 22 nt, Human
cuaaaaguucauaacagugcca

SEQ ID NO: 2089298 - RNA, 23 nt, Human
cuaaaaguucauaacagugccau

SEQ ID NO: 2089299 - RNA, 18 nt, Human
cuaaaaauaguggccaga

SEQ ID NO: 2089300 - RNA, 12 nt, Human
cguuuuauugug

SEQ ID NO: 2089301 - RNA, 15 nt, Human
cguuuguuuguuuug

SEQ ID NO: 2089302 - RNA, 16 nt, Human
cguuuguuuguuuugu

SEQ ID NO: 2089303 - RNA, 17 nt, Human
cguuuguuuguuuuguu

SEQ ID NO: 2089304 - RNA, 14 nt, Human
cguuuuauuguguu

SEQ ID NO: 2089305 - RNA, 18 nt, Human
cguuuuauuguguuuuua

SEQ ID NO: 2089306 - RNA, 11 nt, Human
cuaaaaaacag

SEQ ID NO: 2089307 - RNA, 17 nt, Human
cuaaaaaacagaggcca

SEQ ID NO: 2089308 - RNA, 17 nt, Human
cuaauauacaggguagc

SEQ ID NO: 2089309 - RNA, 20 nt, Human
cuaauagaacucaguuuuaa

SEQ ID NO: 2089310 - RNA, 13 nt, Human
cuaauagaacuca

SEQ ID NO: 2089311 - RNA, 16 nt, Human
cuaauacauuaaagca

SEQ ID NO: 2089312 - RNA, 17 nt, Human
cuaauacauuaaagcag

SEQ ID NO: 2089313 - RNA, 18 nt, Human
cuaauacauuaaagcagu

SEQ ID NO: 2089314 - RNA, 19 nt, Human
cuaauacauuaaagcaguc

SEQ ID NO: 2089315 - RNA, 12 nt, Human
cuaauacaccag

SEQ ID NO: 2089316 - RNA, 23 nt, Human
cuaaggaagaucacuuugcucug

SEQ ID NO: 2089317 - RNA, 16 nt, Human
cuaaggacauuuccca

SEQ ID NO: 2089318 - RNA, 17 nt, Human
cuaaggacauuucccag

SEQ ID NO: 2089319 - RNA, 19 nt, Human
cuaaggacauuucccaggg

SEQ ID NO: 2089320 - RNA, 19 nt, Human
cuaaggccgaagaaggguc

SEQ ID NO: 2089321 - RNA, 17 nt, Human
cuaagauguucacugug

SEQ ID NO: 2089322 - RNA, 22 nt, Human
cuaagcucaaggcgugaggaug

SEQ ID NO: 2089323 - RNA, 15 nt, Human
cuaagcuuaaaaaaa

SEQ ID NO: 2089324 - RNA, 17 nt, Human
cuaagcuuaaaaaaaac

SEQ ID NO: 2089325 - RNA, 22 nt, Human
cuaagcuauucaguaauaacuc

SEQ ID NO: 2089326 - RNA, 14 nt, Human
cuaaucaugaaacu

SEQ ID NO: 2089327 - RNA, 13 nt, Human
cuaauccaaccca

SEQ ID NO: 2089328 - RNA, 16 nt, Human
cuaaucauccaaugcu

SEQ ID NO: 2089329 - RNA, 15 nt, Human
cuaauccaacccaug

SEQ ID NO: 2089330 - RNA, 21 nt, Human
cuaaucagcauucucacuccu

SEQ ID NO: 2089331 - RNA, 20 nt, Human
cuaaucagcauucucacucc

SEQ ID NO: 2089332 - RNA, 18 nt, Human
cuaauauguaacaagcca

SEQ ID NO: 2089333 - RNA, 19 nt, Human
cuaauggguauuuaaacaa

SEQ ID NO: 2089334 - RNA, 14 nt, Human
cuaauuagagcaga

SEQ ID NO: 2089335 - RNA, 13 nt, Human
cuaauuauuuuaa

SEQ ID NO: 2089336 - RNA, 16 nt, Human
cuaauuauuuuaauua

SEQ ID NO: 2089337 - RNA, 22 nt, Human
cuaauuauuuuaauuagguuaa

SEQ ID NO: 2089338 - RNA, 13 nt, Human
cuaaugggacacu

SEQ ID NO: 2089339 - RNA, 12 nt, Human
cuaaugggacac

SEQ ID NO: 2089340 - RNA, 17 nt, Human
cuaauggaaaaugauuu

SEQ ID NO: 2089341 - RNA, 21 nt, Human
cuaauggaaaaugauuuuacu

SEQ ID NO: 2089342 - RNA, 14 nt, Human
cuacacuccagccu

SEQ ID NO: 2089343 - RNA, 22 nt, Human
cuacaccccuccccugcccuag

SEQ ID NO: 2089344 - RNA, 17 nt, Human
cuaauucccauuuugca

SEQ ID NO: 2089345 - RNA, 18 nt, Human
cuaauucccauuuugcaa

SEQ ID NO: 2089346 - RNA, 19 nt, Human
cuaauucccauuuugcaaa

SEQ ID NO: 2089347 - RNA, 20 nt, Human
cuaauucccauuuugcaaaa

SEQ ID NO: 2089348 - RNA, 21 nt, Human
cuaauucccauuuugcaaaau

SEQ ID NO: 2089349 - RNA, 21 nt, Human
cuacacauauguauuccugau

SEQ ID NO: 2089350 - RNA, 11 nt, Human
cuaauucuaac

SEQ ID NO: 2089351 - RNA, 13 nt, Human
cuaccacaguguc

SEQ ID NO: 2089352 - RNA, 14 nt, Human
cuaccacagugucu

SEQ ID NO: 2089353 - RNA, 15 nt, Human
cuaccacagugucug

SEQ ID NO: 2089354 - RNA, 18 nt, Human
cuaccauccccuguagag

SEQ ID NO: 2089355 - RNA, 11 nt, Human
cuaccaccucc

SEQ ID NO: 2089356 - RNA, 14 nt, Human
cuaccaccucccca

SEQ ID NO: 2089357 - RNA, 15 nt, Human
cuaccaccuccccag

SEQ ID NO: 2089358 - RNA, 16 nt, Human
cuaccaccuccccagc

SEQ ID NO: 2089359 - RNA, 17 nt, Human
cuaccaccuccccagcc

SEQ ID NO: 2089360 - RNA, 11 nt, Human
cuaccaucucc

SEQ ID NO: 2089361 - RNA, 13 nt, Human
cuaccaucucccu

SEQ ID NO: 2089362 - RNA, 16 nt, Human
cuacaugugggagcuu

SEQ ID NO: 2089363 - RNA, 22 nt, Human
cuacauuauaaaugucucuuua

SEQ ID NO: 2089364 - RNA, 17 nt, Human
cuacaugugggagcuuu

SEQ ID NO: 2089365 - RNA, 12 nt, Human
cuaccaacugga

SEQ ID NO: 2089366 - RNA, 14 nt, Human
cuaccaacuggaag

SEQ ID NO: 2089367 - RNA, 15 nt, Human
cuaccaacuggaagc

SEQ ID NO: 2089368 - RNA, 16 nt, Human
cuaccaacuggaagca

SEQ ID NO: 2089369 - RNA, 18 nt, Human
cuaccaacuggaagcaca

SEQ ID NO: 2089370 - RNA, 23 nt, Human
cuacauuucaccuacuuuguaag

SEQ ID NO: 2089371 - RNA, 11 nt, Human
cuacauuuuaa

SEQ ID NO: 2089372 - RNA, 12 nt, Human
cuacauuuuaac

SEQ ID NO: 2089373 - RNA, 13 nt, Human
cuacauuuuaaca

SEQ ID NO: 2089374 - RNA, 14 nt, Human
cuacauuuuaacau

SEQ ID NO: 2089375 - RNA, 15 nt, Human
cuacauuuuaacaug

SEQ ID NO: 2089376 - RNA, 17 nt, Human
cuacccagcgagcccug

SEQ ID NO: 2089377 - RNA, 15 nt, Human
cuacccagcgagccc

SEQ ID NO: 2089378 - RNA, 13 nt, Human
cuacccacccucc

SEQ ID NO: 2089379 - RNA, 18 nt, Human
cuacccagcgagcccugg

SEQ ID NO: 2089380 - RNA, 23 nt, Human
cuacccaucgguguccauuuaua

SEQ ID NO: 2089381 - RNA, 12 nt, Human
cuacccagccca

SEQ ID NO: 2089382 - RNA, 13 nt, Human
cuacccagcccau

SEQ ID NO: 2089383 - RNA, 15 nt, Human
cuacccagcccaucu

SEQ ID NO: 2089384 - RNA, 13 nt, Human
cuaccccaccacg

SEQ ID NO: 2089385 - RNA, 14 nt, Human
cuaccccaccacga

SEQ ID NO: 2089386 - RNA, 17 nt, Human
cuacccucuuagaaaaa

SEQ ID NO: 2089387 - RNA, 12 nt, Human
cuacccucccac

SEQ ID NO: 2089388 - RNA, 17 nt, Human
cuacccccuaagagcca

SEQ ID NO: 2089389 - RNA, 13 nt, Human
cuacccucccacc

SEQ ID NO: 2089390 - RNA, 14 nt, Human
cuacccucccaccc

SEQ ID NO: 2089391 - RNA, 16 nt, Human
cuacccucccaccccc

SEQ ID NO: 2089392 - RNA, 19 nt, Human
cuacccucccacccccuuc

SEQ ID NO: 2089393 - RNA, 14 nt, Human
cuacccucccccag

SEQ ID NO: 2089394 - RNA, 20 nt, Human
cuacagaggccaugggccuc

SEQ ID NO: 2089395 - RNA, 18 nt, Human
cuacagaggccaugggcc

SEQ ID NO: 2089396 - RNA, 22 nt, Human
cuacagaggccaugggccuccu

SEQ ID NO: 2089397 - RNA, 22 nt, Human
cuacacuguauuacauaaauaa

SEQ ID NO: 2089398 - RNA, 20 nt, Human
cuacacugugaacuugggga

SEQ ID NO: 2089399 - RNA, 16 nt, Human
cuacacuccagccuga

SEQ ID NO: 2089400 - RNA, 17 nt, Human
cuacagaggccaugggc

SEQ ID NO: 2089401 - RNA, 19 nt, Human
cuacagcuaaucagcauuc

SEQ ID NO: 2089402 - RNA, 18 nt, Human
cuacagcuaaucagcauu

SEQ ID NO: 2089403 - RNA, 13 nt, Human
cuacagauguccc

SEQ ID NO: 2089404 - RNA, 13 nt, Human
cuacagcaaauuu

SEQ ID NO: 2089405 - RNA, 15 nt, Human
cuacagcaaauuuau

SEQ ID NO: 2089406 - RNA, 16 nt, Human
cuacagcaaauuuaua

SEQ ID NO: 2089407 - RNA, 20 nt, Human
cuacagcaaauuuauaauuu

SEQ ID NO: 2089408 - RNA, 22 nt, Human
cuacagcaaauuuauaauuuua

SEQ ID NO: 2089409 - RNA, 22 nt, Human
cuacagcuaaucagcauucuca

SEQ ID NO: 2089410 - RNA, 21 nt, Human
cuacagcuaaucagcauucuc

SEQ ID NO: 2089411 - RNA, 18 nt, Human
cuacauggaguauauguc

SEQ ID NO: 2089412 - RNA, 20 nt, Human
cuacauggaguauaugucaa

SEQ ID NO: 2089413 - RNA, 16 nt, Human
cuacaggugugaguca

SEQ ID NO: 2089414 - RNA, 14 nt, Human
cuacaggugugagu

SEQ ID NO: 2089415 - RNA, 16 nt, Human
cuacaggagugagcac

SEQ ID NO: 2089416 - RNA, 15 nt, Human
cuacaggagugagca

SEQ ID NO: 2089417 - RNA, 14 nt, Human
cuacaggagugagc

SEQ ID NO: 2089418 - RNA, 18 nt, Human
cuacaggaagcaccccau

SEQ ID NO: 2089419 - RNA, 20 nt, Human
cuacaggaagcaccccaugc

SEQ ID NO: 2089420 - RNA, 22 nt, Human
cuacaggaagcaccccaugcca

SEQ ID NO: 2089421 - RNA, 18 nt, Human
cuacaggagagggaagag

SEQ ID NO: 2089422 - RNA, 17 nt, Human
cuacaggcacccaccau

SEQ ID NO: 2089423 - RNA, 15 nt, Human
cuacaggcacccacc

SEQ ID NO: 2089424 - RNA, 22 nt, Human
cuacagggcgagacucugucuc

SEQ ID NO: 2089425 - RNA, 20 nt, Human
cuacaggccucacacacaau

SEQ ID NO: 2089426 - RNA, 16 nt, Human
cuacaggccucacaca

SEQ ID NO: 2089427 - RNA, 12 nt, Human
cuacaggccuca

SEQ ID NO: 2089428 - RNA, 21 nt, Human
cuacaggagagggaagagugc

SEQ ID NO: 2089429 - RNA, 13 nt, Human
ccugccucagccu

SEQ ID NO: 2089430 - RNA, 14 nt, Human
ccugccucagccuc

SEQ ID NO: 2089431 - RNA, 12 nt, Human
ccugccucagcc

SEQ ID NO: 2089432 - RNA, 22 nt, Human
ccugccuguucccauucuugca

SEQ ID NO: 2089433 - RNA, 12 nt, Human
ccugccugugcu

SEQ ID NO: 2089434 - RNA, 21 nt, Human
ccugccgcccgagguggcugc

SEQ ID NO: 2089435 - RNA, 14 nt, Human
ccugccgccucaau

SEQ ID NO: 2089436 - RNA, 13 nt, Human
ccugccugucucc

SEQ ID NO: 2089437 - RNA, 14 nt, Human
ccugccugucuccu

SEQ ID NO: 2089438 - RNA, 15 nt, Human
ccugccugucuccuu

SEQ ID NO: 2089439 - RNA, 16 nt, Human
ccugccgacacgcucc

SEQ ID NO: 2089440 - RNA, 20 nt, Human
ccugccgacacgcucccucc

SEQ ID NO: 2089441 - RNA, 21 nt, Human
ccugccgacacgcucccuccc

SEQ ID NO: 2089442 - RNA, 18 nt, Human
ccugccgaccucguccuc

SEQ ID NO: 2089443 - RNA, 16 nt, Human
ccugcccuucagcauc

SEQ ID NO: 2089444 - RNA, 17 nt, Human
ccugcccuucagcaucc

SEQ ID NO: 2089445 - RNA, 15 nt, Human
ccugcccuuguccca

SEQ ID NO: 2089446 - RNA, 16 nt, Human
ccugcccuugucccac

SEQ ID NO: 2089447 - RNA, 19 nt, Human
ccugcccuugucccacuca

SEQ ID NO: 2089448 - RNA, 13 nt, Human
ccugcccugcugc

SEQ ID NO: 2089449 - RNA, 20 nt, Human
ccugcccugcugccgccucc

SEQ ID NO: 2089450 - RNA, 12 nt, Human
ccugcccugguc

SEQ ID NO: 2089451 - RNA, 15 nt, Human
ccugcccugguccag

SEQ ID NO: 2089452 - RNA, 19 nt, Human
ccugccccuucuacacucu

SEQ ID NO: 2089453 - RNA, 20 nt, Human
ccugccccuucuacacucuc

SEQ ID NO: 2089454 - RNA, 21 nt, Human
ccugccccuucuacacucucc

SEQ ID NO: 2089455 - RNA, 22 nt, Human
ccugccccuucuacacucuccu

SEQ ID NO: 2089456 - RNA, 23 nt, Human
ccugccccuucuacacucuccug

SEQ ID NO: 2089457 - RNA, 16 nt, Human
ccugcccggcugcgga

SEQ ID NO: 2089458 - RNA, 14 nt, Human
ccugcccggcugcg

SEQ ID NO: 2089459 - RNA, 18 nt, Human
ccugcccuagagcacacu

SEQ ID NO: 2089460 - RNA, 14 nt, Human
ccugcccuagcucc

SEQ ID NO: 2089461 - RNA, 19 nt, Human
ccugcccuagagcacacug

SEQ ID NO: 2089462 - RNA, 22 nt, Human
ccugcccuagagcacacuguag

SEQ ID NO: 2089463 - RNA, 24 nt, Human
ccugcccuagagcacacuguagca

SEQ ID NO: 2089464 - RNA, 16 nt, Human
ccugcccuagcuccac

SEQ ID NO: 2089465 - RNA, 14 nt, Human
ccugccccucccuu

SEQ ID NO: 2089466 - RNA, 12 nt, Human
ccugcccccuuc

SEQ ID NO: 2089467 - RNA, 13 nt, Human
ccugcccccuucu

SEQ ID NO: 2089468 - RNA, 16 nt, Human
ccugcccccuucuccc

SEQ ID NO: 2089469 - RNA, 13 nt, Human
ccugcccccuggu

SEQ ID NO: 2089470 - RNA, 14 nt, Human
ccugcccccuggug

SEQ ID NO: 2089471 - RNA, 15 nt, Human
ccugcccccuggugg

SEQ ID NO: 2089472 - RNA, 16 nt, Human
ccugcccccuggugga

SEQ ID NO: 2089473 - RNA, 18 nt, Human
ccugccccucccuucaac

SEQ ID NO: 2089474 - RNA, 16 nt, Human
ccugccccucccuuca

SEQ ID NO: 2089475 - RNA, 15 nt, Human
ccugccccucccuuc

SEQ ID NO: 2089476 - RNA, 11 nt, Human
ccugccccugc

SEQ ID NO: 2089477 - RNA, 17 nt, Human
ccugccccugccccguc

SEQ ID NO: 2089478 - RNA, 15 nt, Human
ccugccaggcauggu

SEQ ID NO: 2089479 - RNA, 13 nt, Human
ccugccagugccu

SEQ ID NO: 2089480 - RNA, 14 nt, Human
ccugccagugccuu

SEQ ID NO: 2089481 - RNA, 17 nt, Human
ccugccagugccuuacc

SEQ ID NO: 2089482 - RNA, 18 nt, Human
ccugccagugccuuaccu

SEQ ID NO: 2089483 - RNA, 20 nt, Human
ccugccagugccuuaccucc

SEQ ID NO: 2089484 - RNA, 21 nt, Human
ccugccagugccuuaccuccu

SEQ ID NO: 2089485 - RNA, 22 nt, Human
ccugccagugccuuaccuccug

SEQ ID NO: 2089486 - RNA, 12 nt, Human
ccugcccccugg

SEQ ID NO: 2089487 - RNA, 23 nt, Human
ccugccagugccuuaccuccugc

SEQ ID NO: 2089488 - RNA, 12 nt, Human
ccugccaggcau

SEQ ID NO: 2089489 - RNA, 17 nt, Human
ccugccacuaggcuggg

SEQ ID NO: 2089490 - RNA, 19 nt, Human
ccugccacuaggcugggug

SEQ ID NO: 2089491 - RNA, 20 nt, Human
ccugccacuaggcugggugc

SEQ ID NO: 2089492 - RNA, 16 nt, Human
ccugccaccuggggca

SEQ ID NO: 2089493 - RNA, 13 nt, Human
ccugccaccuggg

SEQ ID NO: 2089494 - RNA, 12 nt, Human
ccugcaccagga

SEQ ID NO: 2089495 - RNA, 14 nt, Human
ccugcaccaggaga

SEQ ID NO: 2089496 - RNA, 17 nt, Human
ccugcaccaggagacag

SEQ ID NO: 2089497 - RNA, 14 nt, Human
ccugcaccuccccc

SEQ ID NO: 2089498 - RNA, 17 nt, Human
ccugcaccuccccccac

SEQ ID NO: 2089499 - RNA, 18 nt, Human
ccugcaccuccccccacu

SEQ ID NO: 2089500 - RNA, 19 nt, Human
ccugcaccuccccccacug

SEQ ID NO: 2089501 - RNA, 20 nt, Human
ccugcaccuccccccacugc

SEQ ID NO: 2089502 - RNA, 15 nt, Human
ccugcacuggagucc

SEQ ID NO: 2089503 - RNA, 17 nt, Human
ccugcacuggaguccag

SEQ ID NO: 2089504 - RNA, 20 nt, Human
ccugcacuggaguccagucu

SEQ ID NO: 2089505 - RNA, 23 nt, Human
ccugcacuggaguccagucucuu

SEQ ID NO: 2089506 - RNA, 23 nt, Human
ccugcacaaagcccuuccauguc

SEQ ID NO: 2089507 - RNA, 20 nt, Human
ccugcacaaagcccuuccau

SEQ ID NO: 2089508 - RNA, 22 nt, Human
ccugcacaaagcccuuccaugu

SEQ ID NO: 2089509 - RNA, 14 nt, Human
ccugaucccacucc

SEQ ID NO: 2089510 - RNA, 18 nt, Human
ccugaucccacuccuagg

SEQ ID NO: 2089511 - RNA, 19 nt, Human
ccugaucccacuccuagga

SEQ ID NO: 2089512 - RNA, 22 nt, Human
ccugccacccuggggagaaagu

SEQ ID NO: 2089513 - RNA, 16 nt, Human
ccugccacccugggga

SEQ ID NO: 2089514 - RNA, 16 nt, Human
ccugccaccugcugcu

SEQ ID NO: 2089515 - RNA, 14 nt, Human
ccugccacccuggg

SEQ ID NO: 2089516 - RNA, 13 nt, Human
ccugccacccugg

SEQ ID NO: 2089517 - RNA, 12 nt, Human
ccugccacccug

SEQ ID NO: 2089518 - RNA, 23 nt, Human
ccugcauuugugaaaugauggug

SEQ ID NO: 2089519 - RNA, 21 nt, Human
ccugaggcugagacugcggga

SEQ ID NO: 2089520 - RNA, 17 nt, Human
ccugagcugccauccag

SEQ ID NO: 2089521 - RNA, 15 nt, Human
ccugaggcuggacuc

SEQ ID NO: 2089522 - RNA, 18 nt, Human
ccugaggcuggacuccag

SEQ ID NO: 2089523 - RNA, 19 nt, Human
ccugaggcuggacuccaga

SEQ ID NO: 2089524 - RNA, 20 nt, Human
ccugaucaagucaccggagc

SEQ ID NO: 2089525 - RNA, 15 nt, Human
ccugagcuccccacc

SEQ ID NO: 2089526 - RNA, 12 nt, Human
ccugagcucccc

SEQ ID NO: 2089527 - RNA, 15 nt, Human
ccugagcucggugga

SEQ ID NO: 2089528 - RNA, 16 nt, Human
ccugagcucgguggac

SEQ ID NO: 2089529 - RNA, 18 nt, Human
ccugagcucgguggaccc

SEQ ID NO: 2089530 - RNA, 19 nt, Human
ccugagcucgguggaccca

SEQ ID NO: 2089531 - RNA, 20 nt, Human
ccugagcucgguggacccag

SEQ ID NO: 2089532 - RNA, 21 nt, Human
ccugagcucgguggacccagg

SEQ ID NO: 2089533 - RNA, 22 nt, Human
ccugagcucgguggacccaggg

SEQ ID NO: 2089534 - RNA, 19 nt, Human
ccugaagucacacagugag

SEQ ID NO: 2089535 - RNA, 20 nt, Human
ccugaagucacacagugagu

SEQ ID NO: 2089536 - RNA, 19 nt, Human
ccugaaguaagcaaagacu

SEQ ID NO: 2089537 - RNA, 22 nt, Human
ccugaauagcucccagauuuca

SEQ ID NO: 2089538 - RNA, 18 nt, Human
ccugaaacuuacacacaa

SEQ ID NO: 2089539 - RNA, 13 nt, Human
ccugaaagcccug

SEQ ID NO: 2089540 - RNA, 14 nt, Human
ccugaaagcccuga

SEQ ID NO: 2089541 - RNA, 18 nt, Human
ccugaaauagugguucuu

SEQ ID NO: 2089542 - RNA, 18 nt, Human
ccugaaagcccugagcuu

SEQ ID NO: 2089543 - RNA, 16 nt, Human
ccucuuccuugcugug

SEQ ID NO: 2089544 - RNA, 13 nt, Human
ccucuuccccaga

SEQ ID NO: 2089545 - RNA, 14 nt, Human
ccucuuccccagaa

SEQ ID NO: 2089546 - RNA, 22 nt, Human
ccucuuccccagaaaggagacu

SEQ ID NO: 2089547 - RNA, 21 nt, Human
ccugaaaagauguugugucuu

SEQ ID NO: 2089548 - RNA, 13 nt, Human
ccugaaaacccag

SEQ ID NO: 2089549 - RNA, 16 nt, Human
ccugaaaacccagaga

SEQ ID NO: 2089550 - RNA, 17 nt, Human
ccugaaaacccagagag

SEQ ID NO: 2089551 - RNA, 23 nt, Human
ccugaaaauguuuuucugccagg

SEQ ID NO: 2089552 - RNA, 21 nt, Human
ccugaaaauguuuuucugcca

SEQ ID NO: 2089553 - RNA, 22 nt, Human
ccugaaaauguuuuucugccag

SEQ ID NO: 2089554 - RNA, 18 nt, Human
ccuaucuuuuaguuuuag

SEQ ID NO: 2089555 - RNA, 21 nt, Human
ccuagucccuuccccucccug

SEQ ID NO: 2089556 - RNA, 16 nt, Human
ccuagucccuuccccu

SEQ ID NO: 2089557 - RNA, 19 nt, Human
ccuagucccuuccccuccc

SEQ ID NO: 2089558 - RNA, 14 nt, Human
ccuaguagucauuu

SEQ ID NO: 2089559 - RNA, 14 nt, Human
ccuagucccuuccc

SEQ ID NO: 2089560 - RNA, 15 nt, Human
ccuagucccuucccc

SEQ ID NO: 2089561 - RNA, 11 nt, Human
ccucuucccca

SEQ ID NO: 2089562 - RNA, 12 nt, Human
ccucuuccccac

SEQ ID NO: 2089563 - RNA, 13 nt, Human
ccuaugaucccag

SEQ ID NO: 2089564 - RNA, 14 nt, Human
ccuaugaucccagc

SEQ ID NO: 2089565 - RNA, 15 nt, Human
ccuaugaucccagca

SEQ ID NO: 2089566 - RNA, 13 nt, Human
ccuggccaucucu

SEQ ID NO: 2089567 - RNA, 14 nt, Human
ccuggccaucucug

SEQ ID NO: 2089568 - RNA, 13 nt, Human
ccuggccaggagc

SEQ ID NO: 2089569 - RNA, 13 nt, Human
ccuggcccacugc

SEQ ID NO: 2089570 - RNA, 14 nt, Human
ccuggcccacugca

SEQ ID NO: 2089571 - RNA, 20 nt, Human
ccuggccagaugcaccagcc

SEQ ID NO: 2089572 - RNA, 23 nt, Human
ccuggccagaugcaccagcccuu

SEQ ID NO: 2089573 - RNA, 21 nt, Human
ccuggccagaugcaccagccc

SEQ ID NO: 2089574 - RNA, 15 nt, Human
ccuggcauggcaccu

SEQ ID NO: 2089575 - RNA, 17 nt, Human
ccuggcauggcaccugu

SEQ ID NO: 2089576 - RNA, 18 nt, Human
ccuggcauggcaccuguc

SEQ ID NO: 2089577 - RNA, 14 nt, Human
ccuggccaacaugg

SEQ ID NO: 2089578 - RNA, 21 nt, Human
ccuggcacccggccccugcug

SEQ ID NO: 2089579 - RNA, 20 nt, Human
ccuggcacccggccccugcu

SEQ ID NO: 2089580 - RNA, 13 nt, Human
ccuggagaacuag

SEQ ID NO: 2089581 - RNA, 12 nt, Human
ccuggagaacua

SEQ ID NO: 2089582 - RNA, 16 nt, Human
ccuggagaacuagaga

SEQ ID NO: 2089583 - RNA, 19 nt, Human
ccuggcacccggccccugc

SEQ ID NO: 2089584 - RNA, 16 nt, Human
ccugcuacucuguucc

SEQ ID NO: 2089585 - RNA, 13 nt, Human
ccugcuacucugu

SEQ ID NO: 2089586 - RNA, 13 nt, Human
ccugcuagaaaug

SEQ ID NO: 2089587 - RNA, 14 nt, Human
ccugcuagaaaugg

SEQ ID NO: 2089588 - RNA, 23 nt, Human
ccugcuagaugagaauucagcug

SEQ ID NO: 2089589 - RNA, 21 nt, Human
ccugcuaauuccccagauugc

SEQ ID NO: 2089590 - RNA, 20 nt, Human
ccugggaaccuuccugucuu

SEQ ID NO: 2089591 - RNA, 14 nt, Human
ccugggaauguauu

SEQ ID NO: 2089592 - RNA, 21 nt, Human
ccugggaaggcuacucaccuu

SEQ ID NO: 2089593 - RNA, 22 nt, Human
ccugggaaggcuacucaccuug

SEQ ID NO: 2089594 - RNA, 16 nt, Human
ccuggcuuuucacugc

SEQ ID NO: 2089595 - RNA, 15 nt, Human
ccuggcuuugcccaa

SEQ ID NO: 2089596 - RNA, 16 nt, Human
ccuggcuuugcccaac

SEQ ID NO: 2089597 - RNA, 17 nt, Human
ccuggcuuugcccaacc

SEQ ID NO: 2089598 - RNA, 18 nt, Human
ccuggcuuugcccaaccu

SEQ ID NO: 2089599 - RNA, 20 nt, Human
ccuggcuuugcccaaccuca

SEQ ID NO: 2089600 - RNA, 21 nt, Human
ccuggcuuugcccaaccucag

SEQ ID NO: 2089601 - RNA, 22 nt, Human
ccuggcuuugcccaaccucagc

SEQ ID NO: 2089602 - RNA, 23 nt, Human
ccuggcuuugcccaaccucagca

SEQ ID NO: 2089603 - RNA, 17 nt, Human
ccuggcuuuucacugcu

SEQ ID NO: 2089604 - RNA, 18 nt, Human
ccuggcuuguaacuccac

SEQ ID NO: 2089605 - RNA, 20 nt, Human
ccuggcuuguaacuccacca

SEQ ID NO: 2089606 - RNA, 22 nt, Human
ccuggcuuguaacuccaccaac

SEQ ID NO: 2089607 - RNA, 20 nt, Human
ccuggcuucuggagcccuug

SEQ ID NO: 2089608 - RNA, 21 nt, Human
ccuggcuucuggagcccuugg

SEQ ID NO: 2089609 - RNA, 22 nt, Human
ccuggcuucuggagcccuuggg

SEQ ID NO: 2089610 - RNA, 23 nt, Human
ccuggcuucuggagcccuugggu

SEQ ID NO: 2089611 - RNA, 12 nt, Human
ccuggcuccgcu

SEQ ID NO: 2089612 - RNA, 18 nt, Human
ccuggcuccgcugugugg

SEQ ID NO: 2089613 - RNA, 19 nt, Human
ccuggcuccgcugugugga

SEQ ID NO: 2089614 - RNA, 15 nt, Human
ccuggcuccugaggg

SEQ ID NO: 2089615 - RNA, 23 nt, Human
ccuggcuccugaggggcaucugc

SEQ ID NO: 2089616 - RNA, 21 nt, Human
ccuggcucccaugaccauacu

SEQ ID NO: 2089617 - RNA, 14 nt, Human
ccuggcucccauga

SEQ ID NO: 2089618 - RNA, 15 nt, Human
ccuggcucccaugac

SEQ ID NO: 2089619 - RNA, 22 nt, Human
ccuggcucccaugaccauacug

SEQ ID NO: 2089620 - RNA, 12 nt, Human
ccuggccccaug

SEQ ID NO: 2089621 - RNA, 16 nt, Human
ccuggcccacugcauc

SEQ ID NO: 2089622 - RNA, 18 nt, Human
ccugggagugagcugguu

SEQ ID NO: 2089623 - RNA, 23 nt, Human
ccugggagguggagguugcagug

SEQ ID NO: 2089624 - RNA, 17 nt, Human
ccugggcagccaggcug

SEQ ID NO: 2089625 - RNA, 18 nt, Human
ccugggcagccaggcugc

SEQ ID NO: 2089626 - RNA, 19 nt, Human
ccugggcagccaggcugcc

SEQ ID NO: 2089627 - RNA, 16 nt, Human
ccugggagugagcugg

SEQ ID NO: 2089628 - RNA, 22 nt, Human
ccugggaggucaaggcugcagu

SEQ ID NO: 2089629 - RNA, 19 nt, Human
ccugggaggaaauuugaau

SEQ ID NO: 2089630 - RNA, 18 nt, Human
ccugggagaaccucaggc

SEQ ID NO: 2089631 - RNA, 19 nt, Human
ccugggagaaccucaggcu

SEQ ID NO: 2089632 - RNA, 17 nt, Human
ccugggagaaccucagg

SEQ ID NO: 2089633 - RNA, 17 nt, Human
ccugggacugcugcuuc

SEQ ID NO: 2089634 - RNA, 23 nt, Human
ccugggcagccaggcugccaagg

SEQ ID NO: 2089635 - RNA, 15 nt, Human
ccuggggugcccucc

SEQ ID NO: 2089636 - RNA, 16 nt, Human
ccuggggugcccucca

SEQ ID NO: 2089637 - RNA, 22 nt, Human
ccuggggugcccuccacugccc

SEQ ID NO: 2089638 - RNA, 20 nt, Human
ccuggggugugggaggcccg

SEQ ID NO: 2089639 - RNA, 13 nt, Human
ccuguagcccuaa

SEQ ID NO: 2089640 - RNA, 15 nt, Human
ccuguagagugggag

SEQ ID NO: 2089641 - RNA, 16 nt, Human
ccuguagagugggagc

SEQ ID NO: 2089642 - RNA, 22 nt, Human
ccuguagaccuagggaggaccu

SEQ ID NO: 2089643 - RNA, 23 nt, Human
ccuguagaccuagggaggaccuu

SEQ ID NO: 2089644 - RNA, 14 nt, Human
ccugguggcagugg

SEQ ID NO: 2089645 - RNA, 13 nt, Human
ccugguggcagug

SEQ ID NO: 2089646 - RNA, 15 nt, Human
ccugguggcaguggg

SEQ ID NO: 2089647 - RNA, 16 nt, Human
ccuggucuugagaugu

SEQ ID NO: 2089648 - RNA, 12 nt, Human
ccuguacuuuuu

SEQ ID NO: 2089649 - RNA, 13 nt, Human
ccuguagaccuag

SEQ ID NO: 2089650 - RNA, 18 nt, Human
ccuguagaccuagggagg

SEQ ID NO: 2089651 - RNA, 12 nt, Human
ccugucccaccu

SEQ ID NO: 2089652 - RNA, 13 nt, Human
ccugucccaccuc

SEQ ID NO: 2089653 - RNA, 14 nt, Human
ccugucccaccuca

SEQ ID NO: 2089654 - RNA, 17 nt, Human
ccuguccaaacugccua

SEQ ID NO: 2089655 - RNA, 14 nt, Human
ccugucagugcagc

SEQ ID NO: 2089656 - RNA, 16 nt, Human
ccugucagugcagccc

SEQ ID NO: 2089657 - RNA, 19 nt, Human
ccugucagugcagcccgug

SEQ ID NO: 2089658 - RNA, 18 nt, Human
ccugguggcagcugcggu

SEQ ID NO: 2089659 - RNA, 17 nt, Human
ccugguggcagcugcgg

SEQ ID NO: 2089660 - RNA, 16 nt, Human
ccugguggcagcugcg

SEQ ID NO: 2089661 - RNA, 15 nt, Human
ccugguggcagcugc

SEQ ID NO: 2089662 - RNA, 14 nt, Human
ccugguggcagcug

SEQ ID NO: 2089663 - RNA, 19 nt, Human
ccugguccuuccaggcccc

SEQ ID NO: 2089664 - RNA, 13 nt, Human
ccuggucuccugc

SEQ ID NO: 2089665 - RNA, 16 nt, Human
ccuggucuccugcccc

SEQ ID NO: 2089666 - RNA, 18 nt, Human
ccuggucuccugccccca

SEQ ID NO: 2089667 - RNA, 19 nt, Human
ccuggucuccugcccccac

SEQ ID NO: 2089668 - RNA, 22 nt, Human
ccuggucuccugcccccacacc

SEQ ID NO: 2089669 - RNA, 18 nt, Human
ccuggguuccaauccugg

SEQ ID NO: 2089670 - RNA, 20 nt, Human
ccuggguuccaauccuggcu

SEQ ID NO: 2089671 - RNA, 16 nt, Human
ccuggucccugggagg

SEQ ID NO: 2089672 - RNA, 15 nt, Human
ccugguccuuccagg

SEQ ID NO: 2089673 - RNA, 18 nt, Human
ccugguccuuccaggccc

SEQ ID NO: 2089674 - RNA, 21 nt, Human
ccuggguggucugcaggcagg

SEQ ID NO: 2089675 - RNA, 14 nt, Human
ccuggguggucugc

SEQ ID NO: 2089676 - RNA, 18 nt, Human
ccuggguggucugcaggc

SEQ ID NO: 2089677 - RNA, 19 nt, Human
ccuggguggucugcaggca

SEQ ID NO: 2089678 - RNA, 20 nt, Human
ccuggguggucugcaggcag

SEQ ID NO: 2089679 - RNA, 22 nt, Human
ccuggguggucugcaggcaggg

SEQ ID NO: 2089680 - RNA, 19 nt, Human
ccuggguggggcugcuccu

SEQ ID NO: 2089681 - RNA, 20 nt, Human
ccuggguggggcugcuccuc

SEQ ID NO: 2089682 - RNA, 21 nt, Human
ccuggguggggcugcuccucc

SEQ ID NO: 2089683 - RNA, 22 nt, Human
ccuggguggggcugcuccucca

SEQ ID NO: 2089684 - RNA, 23 nt, Human
ccuggguggggcugcuccuccag

SEQ ID NO: 2089685 - RNA, 13 nt, Human
ccuggguucccuu

SEQ ID NO: 2089686 - RNA, 14 nt, Human
cgaugcuccagcca

SEQ ID NO: 2089687 - RNA, 18 nt, Human
cgaugcuccagccaaccc

SEQ ID NO: 2089688 - RNA, 20 nt, Human
cgaugcuccagccaaccccu

SEQ ID NO: 2089689 - RNA, 22 nt, Human
cgaugcuccagccaaccccugu

SEQ ID NO: 2089690 - RNA, 23 nt, Human
cgaugcuccagccaaccccugug

SEQ ID NO: 2089691 - RNA, 21 nt, Human
cgaugggcccaauucuuacaa

SEQ ID NO: 2089692 - RNA, 18 nt, Human
cgaugggggaugcuucau

SEQ ID NO: 2089693 - RNA, 19 nt, Human
cgaugggggaugcuucaug

SEQ ID NO: 2089694 - RNA, 21 nt, Human
cgaugggggaugcuucaugug

SEQ ID NO: 2089695 - RNA, 12 nt, Human
cgcaccucccau

SEQ ID NO: 2089696 - RNA, 16 nt, Human
cgcaccucccauccua

SEQ ID NO: 2089697 - RNA, 18 nt, Human
cgcacgugggucuucagg

SEQ ID NO: 2089698 - RNA, 18 nt, Human
cgcaccucccauccuaau

SEQ ID NO: 2089699 - RNA, 16 nt, Human
cgcaccugcccccugg

SEQ ID NO: 2089700 - RNA, 17 nt, Human
cgcaccugcccccuggu

SEQ ID NO: 2089701 - RNA, 23 nt, Human
cgcacuucgggaggucgaggcag

SEQ ID NO: 2089702 - RNA, 14 nt, Human
cgcagaugauccau

SEQ ID NO: 2089703 - RNA, 16 nt, Human
cgaggacagggaggug

SEQ ID NO: 2089704 - RNA, 14 nt, Human
cgaggcagggucag

SEQ ID NO: 2089705 - RNA, 22 nt, Human
cgaggcagggucaggagagggg

SEQ ID NO: 2089706 - RNA, 13 nt, Human
cgaggcccgcaug

SEQ ID NO: 2089707 - RNA, 23 nt, Human
cgaugaauuuggagacucugugg

SEQ ID NO: 2089708 - RNA, 20 nt, Human
cgaugaugcuuguaacaaga

SEQ ID NO: 2089709 - RNA, 21 nt, Human
cgaugaugcuuguaacaagaa

SEQ ID NO: 2089710 - RNA, 22 nt, Human
cgaugaugcuuguaacaagaaa

SEQ ID NO: 2089711 - RNA, 21 nt, Human
cgagagccugcucccccaccc

SEQ ID NO: 2089712 - RNA, 19 nt, Human
cgagcccugguggcagugg

SEQ ID NO: 2089713 - RNA, 21 nt, Human
cgagagacuuguggccuggga

SEQ ID NO: 2089714 - RNA, 15 nt, Human
cgagacucugucuca

SEQ ID NO: 2089715 - RNA, 13 nt, Human
cgagagccugcuc

SEQ ID NO: 2089716 - RNA, 14 nt, Human
cgagagccugcucc

SEQ ID NO: 2089717 - RNA, 15 nt, Human
cgagagccugcuccc

SEQ ID NO: 2089718 - RNA, 19 nt, Human
cgagagccugcucccccac

SEQ ID NO: 2089719 - RNA, 20 nt, Human
cgagagccugcucccccacc

SEQ ID NO: 2089720 - RNA, 18 nt, Human
cgagcccugguggcagug

SEQ ID NO: 2089721 - RNA, 14 nt, Human
cgaggacagggagg

SEQ ID NO: 2089722 - RNA, 14 nt, Human
cgcuguucacccac

SEQ ID NO: 2089723 - RNA, 13 nt, Human
cgcuucccccaua

SEQ ID NO: 2089724 - RNA, 16 nt, Human
cgcuucccccauagcc

SEQ ID NO: 2089725 - RNA, 14 nt, Human
cgcugugggcaggu

SEQ ID NO: 2089726 - RNA, 18 nt, Human
cgcuucccccauagccac

SEQ ID NO: 2089727 - RNA, 20 nt, Human
cgcuucccccauagccaccc

SEQ ID NO: 2089728 - RNA, 14 nt, Human
cgcuucugccugca

SEQ ID NO: 2089729 - RNA, 12 nt, Human
cgcuucugacug

SEQ ID NO: 2089730 - RNA, 20 nt, Human
cgcugucuccagacccccac

SEQ ID NO: 2089731 - RNA, 22 nt, Human
cgcugucuccagacccccaccc

SEQ ID NO: 2089732 - RNA, 14 nt, Human
cgcuccugucugcc

SEQ ID NO: 2089733 - RNA, 19 nt, Human
cgcucccaacacaaggugg

SEQ ID NO: 2089734 - RNA, 13 nt, Human
cgcucccgggacu

SEQ ID NO: 2089735 - RNA, 17 nt, Human
cggaauaguuggcuagg

SEQ ID NO: 2089736 - RNA, 16 nt, Human
cggaauaguuggcuag

SEQ ID NO: 2089737 - RNA, 15 nt, Human
cggaauccuguccuc

SEQ ID NO: 2089738 - RNA, 20 nt, Human
cggacagccacggccaggcc

SEQ ID NO: 2089739 - RNA, 14 nt, Human
cgcuuucuacccag

SEQ ID NO: 2089740 - RNA, 16 nt, Human
cgcuuucuacccagcg

SEQ ID NO: 2089741 - RNA, 22 nt, Human
cgcuuucuagcuguugagcugu

SEQ ID NO: 2089742 - RNA, 16 nt, Human
cgcuuucuagcuguug

SEQ ID NO: 2089743 - RNA, 12 nt, Human
cgcuucucugug

SEQ ID NO: 2089744 - RNA, 22 nt, Human
cggacagccacggccaggccag

SEQ ID NO: 2089745 - RNA, 21 nt, Human
cggacagccacggccaggcca

SEQ ID NO: 2089746 - RNA, 18 nt, Human
cggaauccuguccucagc

SEQ ID NO: 2089747 - RNA, 17 nt, Human
cggaauccuguccucag

SEQ ID NO: 2089748 - RNA, 12 nt, Human
cgccuuguucuu

SEQ ID NO: 2089749 - RNA, 19 nt, Human
cgcgguggcucacgccugu

SEQ ID NO: 2089750 - RNA, 17 nt, Human
cgcgguacaaaggaaaa

SEQ ID NO: 2089751 - RNA, 17 nt, Human
cgcccgagguggcugcc

SEQ ID NO: 2089752 - RNA, 13 nt, Human
cgccccuuccccc

SEQ ID NO: 2089753 - RNA, 21 nt, Human
cgcccagucuggaaugcagug

SEQ ID NO: 2089754 - RNA, 19 nt, Human
cgcccagucuggaaugcag

SEQ ID NO: 2089755 - RNA, 13 nt, Human
cgcccagucugga

SEQ ID NO: 2089756 - RNA, 17 nt, Human
cgcccaaagccagacag

SEQ ID NO: 2089757 - RNA, 24 nt, Human
cgcagcccugcuuugggcugcccu

SEQ ID NO: 2089758 - RNA, 15 nt, Human
cgcagcccugcuuug

SEQ ID NO: 2089759 - RNA, 13 nt, Human
cgcagcccugcuu

SEQ ID NO: 2089760 - RNA, 19 nt, Human
cgccauugcacuccagccu

SEQ ID NO: 2089761 - RNA, 18 nt, Human
cgccauugccaccaggag

SEQ ID NO: 2089762 - RNA, 16 nt, Human
cgccauugccaccagg

SEQ ID NO: 2089763 - RNA, 17 nt, Human
cgccauugccaccagga

SEQ ID NO: 2089764 - RNA, 12 nt, Human
cgcaggaagcug

SEQ ID NO: 2089765 - RNA, 18 nt, Human
cgccauucucaagcccug

SEQ ID NO: 2089766 - RNA, 15 nt, Human
cgccauugcacucca

SEQ ID NO: 2089767 - RNA, 14 nt, Human
cgccauugccacca

SEQ ID NO: 2089768 - RNA, 16 nt, Human
cgcagccucccucuga

SEQ ID NO: 2089769 - RNA, 20 nt, Human
cggccaggccagagggagug

SEQ ID NO: 2089770 - RNA, 12 nt, Human
cggccaggccag

SEQ ID NO: 2089771 - RNA, 17 nt, Human
cgcuuucuacacuguau

SEQ ID NO: 2089772 - RNA, 21 nt, Human
cggccagcugggaucugacug

SEQ ID NO: 2089773 - RNA, 11 nt, Human
cggccaggcca

SEQ ID NO: 2089774 - RNA, 15 nt, Human
cggagugacagagua

SEQ ID NO: 2089775 - RNA, 23 nt, Human
cggaguucggaaaccguccugug

SEQ ID NO: 2089776 - RNA, 18 nt, Human
cggaucaccgagaguagc

SEQ ID NO: 2089777 - RNA, 23 nt, Human
cggaucaccgagaguagccgaga

SEQ ID NO: 2089778 - RNA, 14 nt, Human
cggcuggcagccca

SEQ ID NO: 2089779 - RNA, 15 nt, Human
cggccugaugcuccc

SEQ ID NO: 2089780 - RNA, 16 nt, Human
cggccugaugcucccu

SEQ ID NO: 2089781 - RNA, 11 nt, Human
cggcccugggg

SEQ ID NO: 2089782 - RNA, 12 nt, Human
cggcccuggggc

SEQ ID NO: 2089783 - RNA, 16 nt, Human
cggccgcauucccuga

SEQ ID NO: 2089784 - RNA, 13 nt, Human
cggccgcauuccc

SEQ ID NO: 2089785 - RNA, 15 nt, Human
cggccgcauucccug

SEQ ID NO: 2089786 - RNA, 18 nt, Human
cggccgcauucccugagu

SEQ ID NO: 2089787 - RNA, 17 nt, Human
cggccugaugcucccuc

SEQ ID NO: 2089788 - RNA, 23 nt, Human
cggcuggcagcccaccccucaac

SEQ ID NO: 2089789 - RNA, 20 nt, Human
cgggaacaguguuucccaua

SEQ ID NO: 2089790 - RNA, 13 nt, Human
cgggaacaguguu

SEQ ID NO: 2089791 - RNA, 22 nt, Human
cgggaacaguguuucccauaau

SEQ ID NO: 2089792 - RNA, 15 nt, Human
cgggaacagacaaca

SEQ ID NO: 2089793 - RNA, 12 nt, Human
cgggaaggaggg

SEQ ID NO: 2089794 - RNA, 14 nt, Human
cgggaaggaggguu

SEQ ID NO: 2089795 - RNA, 23 nt, Human
cgggaaggaggguuagggagggg

SEQ ID NO: 2089796 - RNA, 16 nt, Human
cgggaagccacccucc

SEQ ID NO: 2089797 - RNA, 23 nt, Human
cgggaagccacccucccagcucu

SEQ ID NO: 2089798 - RNA, 12 nt, Human
cgggaagcggag

SEQ ID NO: 2089799 - RNA, 13 nt, Human
ccuuguauuuaaa

SEQ ID NO: 2089800 - RNA, 14 nt, Human
ccuuguauuuaaau

SEQ ID NO: 2089801 - RNA, 18 nt, Human
ccuugguucaucaguguu

SEQ ID NO: 2089802 - RNA, 17 nt, Human
ccuugguucccuugugu

SEQ ID NO: 2089803 - RNA, 18 nt, Human
ccuugggcugcuccucau

SEQ ID NO: 2089804 - RNA, 15 nt, Human
ccuugguguccaccu

SEQ ID NO: 2089805 - RNA, 16 nt, Human
ccuugguguccaccug

SEQ ID NO: 2089806 - RNA, 17 nt, Human
ccuugguguccaccugg

SEQ ID NO: 2089807 - RNA, 18 nt, Human
ccuugguguccaccuggc

SEQ ID NO: 2089808 - RNA, 19 nt, Human
ccuugguguccaccuggcc

SEQ ID NO: 2089809 - RNA, 20 nt, Human
ccuugguguccaccuggccc

SEQ ID NO: 2089810 - RNA, 21 nt, Human
ccuugguguccaccuggcccc

SEQ ID NO: 2089811 - RNA, 16 nt, Human
ccuuggcugcagggag

SEQ ID NO: 2089812 - RNA, 22 nt, Human
ccuuggccugucucauccccag

SEQ ID NO: 2089813 - RNA, 23 nt, Human
ccuuggccugucucauccccagg

SEQ ID NO: 2089814 - RNA, 14 nt, Human
ccuuggcugcaggg

SEQ ID NO: 2089815 - RNA, 20 nt, Human
ccuuggcuucaggggagucc

SEQ ID NO: 2089816 - RNA, 14 nt, Human
ccuugggcugcucc

SEQ ID NO: 2089817 - RNA, 15 nt, Human
ccuugggcugcuccu

SEQ ID NO: 2089818 - RNA, 17 nt, Human
ccuugggcugcuccuca

SEQ ID NO: 2089819 - RNA, 22 nt, Human
ccuuggcucaaguccucuuuuc

SEQ ID NO: 2089820 - RNA, 15 nt, Human
ccuuggccugucuca

SEQ ID NO: 2089821 - RNA, 19 nt, Human
ccuuggccugucucauccc

SEQ ID NO: 2089822 - RNA, 14 nt, Human
ccuuggccucagaa

SEQ ID NO: 2089823 - RNA, 11 nt, Human
ccuuggccuca

SEQ ID NO: 2089824 - RNA, 13 nt, Human
ccuuggccucaga

SEQ ID NO: 2089825 - RNA, 12 nt, Human
ccuuggaggcca

SEQ ID NO: 2089826 - RNA, 16 nt, Human
ccuuggaggccagcca

SEQ ID NO: 2089827 - RNA, 18 nt, Human
ccuuggaggcugucuucu

SEQ ID NO: 2089828 - RNA, 18 nt, Human
ccuuggauaaugcuguug

SEQ ID NO: 2089829 - RNA, 22 nt, Human
ccuuggauaaugcuguugccuc

SEQ ID NO: 2089830 - RNA, 23 nt, Human
ccuuggauaaugcuguugccuca

SEQ ID NO: 2089831 - RNA, 12 nt, Human
ccuugagcugag

SEQ ID NO: 2089832 - RNA, 14 nt, Human
ccuugagcugagau

SEQ ID NO: 2089833 - RNA, 21 nt, Human
ccuugacagggcacaccgggc

SEQ ID NO: 2089834 - RNA, 18 nt, Human
ccuugacagggcacaccg

SEQ ID NO: 2089835 - RNA, 23 nt, Human
ccuugacauuguagagcuucugg

SEQ ID NO: 2089836 - RNA, 12 nt, Human
ccuugaccagca

SEQ ID NO: 2089837 - RNA, 20 nt, Human
ccuugaccagcagaucccag

SEQ ID NO: 2089838 - RNA, 21 nt, Human
ccuugaccagcagaucccagc

SEQ ID NO: 2089839 - RNA, 19 nt, Human
ccuugagaaaccuuauugu

SEQ ID NO: 2089840 - RNA, 14 nt, Human
ccuugagaaaccuu

SEQ ID NO: 2089841 - RNA, 23 nt, Human
ccuugaccagcagaucccagcuc

SEQ ID NO: 2089842 - RNA, 11 nt, Human
ccuugagacca

SEQ ID NO: 2089843 - RNA, 16 nt, Human
ccuugagaccacaggg

SEQ ID NO: 2089844 - RNA, 14 nt, Human
ccuugagaccucag

SEQ ID NO: 2089845 - RNA, 16 nt, Human
ccuugagaccucagcc

SEQ ID NO: 2089846 - RNA, 17 nt, Human
ccuugagaccucagcca

SEQ ID NO: 2089847 - RNA, 18 nt, Human
ccuugagaccucagccau

SEQ ID NO: 2089848 - RNA, 19 nt, Human
ccuugagaccucagccaug

SEQ ID NO: 2089849 - RNA, 17 nt, Human
ccuugagcuccccaaaa

SEQ ID NO: 2089850 - RNA, 20 nt, Human
ccugugccucugggacugga

SEQ ID NO: 2089851 - RNA, 15 nt, Human
ccuguccgcccucuu

SEQ ID NO: 2089852 - RNA, 19 nt, Human
ccuguccgcccucuucccc

SEQ ID NO: 2089853 - RNA, 22 nt, Human
ccuguccgcccucuuccccucu

SEQ ID NO: 2089854 - RNA, 22 nt, Human
ccugucccucucaggcaugccu

SEQ ID NO: 2089855 - RNA, 14 nt, Human
ccugucccuggcca

SEQ ID NO: 2089856 - RNA, 15 nt, Human
ccugucccuggccau

SEQ ID NO: 2089857 - RNA, 17 nt, Human
ccugucccuggccaucu

SEQ ID NO: 2089858 - RNA, 19 nt, Human
ccugucccuggccaucucu

SEQ ID NO: 2089859 - RNA, 23 nt, Human
ccugucccuucucuuaauuuaau

SEQ ID NO: 2089860 - RNA, 15 nt, Human
ccugucccucucagg

SEQ ID NO: 2089861 - RNA, 16 nt, Human
ccugucccucucaggc

SEQ ID NO: 2089862 - RNA, 21 nt, Human
ccugugcugcccgucuucagc

SEQ ID NO: 2089863 - RNA, 15 nt, Human
ccuguggagcccgca

SEQ ID NO: 2089864 - RNA, 18 nt, Human
ccuguggagcccgcaccc

SEQ ID NO: 2089865 - RNA, 17 nt, Human
ccuguggagcccgcacc

SEQ ID NO: 2089866 - RNA, 20 nt, Human
ccuguggaugauaaaacaca

SEQ ID NO: 2089867 - RNA, 15 nt, Human
ccuguggcggugccu

SEQ ID NO: 2089868 - RNA, 16 nt, Human
ccuguggcggugccug

SEQ ID NO: 2089869 - RNA, 17 nt, Human
ccuguggcggugccugg

SEQ ID NO: 2089870 - RNA, 18 nt, Human
ccuguggcggugccuggg

SEQ ID NO: 2089871 - RNA, 19 nt, Human
ccuguggcggugccugggu

SEQ ID NO: 2089872 - RNA, 20 nt, Human
ccuguggcggugccugggug

SEQ ID NO: 2089873 - RNA, 16 nt, Human
ccuuccagcacccugc

SEQ ID NO: 2089874 - RNA, 17 nt, Human
ccuuccagcacccugca

SEQ ID NO: 2089875 - RNA, 15 nt, Human
ccuucauuucugaua

SEQ ID NO: 2089876 - RNA, 19 nt, Human
ccuucauuucugauauaga

SEQ ID NO: 2089877 - RNA, 22 nt, Human
ccuucauuucugauauagaauu

SEQ ID NO: 2089878 - RNA, 20 nt, Human
ccuucauugccuuaacugga

SEQ ID NO: 2089879 - RNA, 23 nt, Human
ccuucauugccuuaacuggagcc

SEQ ID NO: 2089880 - RNA, 20 nt, Human
ccugugguuuccaaggagcu

SEQ ID NO: 2089881 - RNA, 21 nt, Human
ccugugguuuccaaggagcug

SEQ ID NO: 2089882 - RNA, 19 nt, Human
ccuguggggauuucuccca

SEQ ID NO: 2089883 - RNA, 20 nt, Human
ccuguggggauuucucccag

SEQ ID NO: 2089884 - RNA, 22 nt, Human
ccuguggggauuucucccagcu

SEQ ID NO: 2089885 - RNA, 21 nt, Human
ccuguguaaucauuucuuggg

SEQ ID NO: 2089886 - RNA, 14 nt, Human
ccuuccuucccugg

SEQ ID NO: 2089887 - RNA, 19 nt, Human
ccuuccugucuuccugcau

SEQ ID NO: 2089888 - RNA, 12 nt, Human
ccuuccuguccg

SEQ ID NO: 2089889 - RNA, 16 nt, Human
ccuuccuguccgcccu

SEQ ID NO: 2089890 - RNA, 12 nt, Human
ccuuccugucuu

SEQ ID NO: 2089891 - RNA, 13 nt, Human
ccuuccugucuuc

SEQ ID NO: 2089892 - RNA, 17 nt, Human
ccuuccugucuuccugc

SEQ ID NO: 2089893 - RNA, 18 nt, Human
ccuuccaugucgccucug

SEQ ID NO: 2089894 - RNA, 17 nt, Human
ccuuccaucucgccacc

SEQ ID NO: 2089895 - RNA, 12 nt, Human
ccuuccaucccu

SEQ ID NO: 2089896 - RNA, 19 nt, Human
ccuuccaucccuacccccu

SEQ ID NO: 2089897 - RNA, 11 nt, Human
ccuuccauaau

SEQ ID NO: 2089898 - RNA, 12 nt, Human
ccuuccauaauu

SEQ ID NO: 2089899 - RNA, 15 nt, Human
ccuuccauaauuaug

SEQ ID NO: 2089900 - RNA, 23 nt, Human
ccuuccauagccuaaucccuggg

SEQ ID NO: 2089901 - RNA, 13 nt, Human
ccuuccaggccau

SEQ ID NO: 2089902 - RNA, 15 nt, Human
ccuuccaggccauca

SEQ ID NO: 2089903 - RNA, 13 nt, Human
ccuuccaggcccc

SEQ ID NO: 2089904 - RNA, 22 nt, Human
ccuucuaaucugcuaugcuuga

SEQ ID NO: 2089905 - RNA, 14 nt, Human
ccuucuacacucuc

SEQ ID NO: 2089906 - RNA, 17 nt, Human
ccuucguuaacugugua

SEQ ID NO: 2089907 - RNA, 15 nt, Human
ccuucuccaaaugag

SEQ ID NO: 2089908 - RNA, 14 nt, Human
ccuucucccacacu

SEQ ID NO: 2089909 - RNA, 16 nt, Human
ccuucucccacacugc

SEQ ID NO: 2089910 - RNA, 18 nt, Human
cgaaucagcuauuuacug

SEQ ID NO: 2089911 - RNA, 21 nt, Human
cgaaucacgaggucaggaguu

SEQ ID NO: 2089912 - RNA, 18 nt, Human
cgagacuugguuucaaaa

SEQ ID NO: 2089913 - RNA, 16 nt, Human
cgaaugguagucuaac

SEQ ID NO: 2089914 - RNA, 22 nt, Human
cgaaugguagucuaaccaaaug

SEQ ID NO: 2089915 - RNA, 15 nt, Human
cgaauagcugggacu

SEQ ID NO: 2089916 - RNA, 13 nt, Human
cgaaggggcccug

SEQ ID NO: 2089917 - RNA, 19 nt, Human
cgaagggggcaucuggccu

SEQ ID NO: 2089918 - RNA, 12 nt, Human
cgaaggccucug

SEQ ID NO: 2089919 - RNA, 23 nt, Human
cgaaggaaaagggcuuucucaau

SEQ ID NO: 2089920 - RNA, 18 nt, Human
cgaagcucagcccacccc

SEQ ID NO: 2089921 - RNA, 13 nt, Human
cgaagcucagccc

SEQ ID NO: 2089922 - RNA, 23 nt, Human
cgaagcgcgccacucgcuucccc

SEQ ID NO: 2089923 - RNA, 15 nt, Human
cgaagcucagcccac

SEQ ID NO: 2089924 - RNA, 16 nt, Human
cgaagcucagcccacc

SEQ ID NO: 2089925 - RNA, 17 nt, Human
cgaagcucagcccaccc

SEQ ID NO: 2089926 - RNA, 16 nt, Human
cgaauagcugggacua

SEQ ID NO: 2089927 - RNA, 21 nt, Human
cgaacauguuuuucuucuccc

SEQ ID NO: 2089928 - RNA, 23 nt, Human
cgaacauguuuuucuucucccuc

SEQ ID NO: 2089929 - RNA, 22 nt, Human
cgaacacccucgaagcgcgcca

SEQ ID NO: 2089930 - RNA, 18 nt, Human
cgaacacccucgaagcgc

SEQ ID NO: 2089931 - RNA, 21 nt, Human
cgaacacccucgaagcgcgcc

SEQ ID NO: 2089932 - RNA, 20 nt, Human
cgaacauggaacucauuccu

SEQ ID NO: 2089933 - RNA, 22 nt, Human
cgaacauggaacucauuccugc

SEQ ID NO: 2089934 - RNA, 11 nt, Human
cgaagcgcgcc

SEQ ID NO: 2089935 - RNA, 16 nt, Human
cgaagcgcgccacucg

SEQ ID NO: 2089936 - RNA, 23 nt, Human
cgaaagggacuuggaagcuccgc

SEQ ID NO: 2089937 - RNA, 19 nt, Human
ccuuuguuuuuuuuuccug

SEQ ID NO: 2089938 - RNA, 23 nt, Human
ccuuuguuuugauguuuguggcc

SEQ ID NO: 2089939 - RNA, 14 nt, Human
ccuuuguugcucag

SEQ ID NO: 2089940 - RNA, 19 nt, Human
ccuuuguuuuuaugaagaa

SEQ ID NO: 2089941 - RNA, 20 nt, Human
ccuuuguuuuuaugaagaaa

SEQ ID NO: 2089942 - RNA, 21 nt, Human
ccuuuuaaauccuguugaaaa

SEQ ID NO: 2089943 - RNA, 22 nt, Human
ccuuuuaaauccuguugaaaag

SEQ ID NO: 2089944 - RNA, 23 nt, Human
ccuuugucaucuuucuucuauuu

SEQ ID NO: 2089945 - RNA, 19 nt, Human
ccuuugggaggcugaggcg

SEQ ID NO: 2089946 - RNA, 18 nt, Human
ccuuuggggggggcccgc

SEQ ID NO: 2089947 - RNA, 16 nt, Human
ccuuguauuuaaauau

SEQ ID NO: 2089948 - RNA, 21 nt, Human
ccuuguauuuaaauauuaaau

SEQ ID NO: 2089949 - RNA, 15 nt, Human
ccuuguggcacauuu

SEQ ID NO: 2089950 - RNA, 22 nt, Human
ccuuugguccuaagucccugcc

SEQ ID NO: 2089951 - RNA, 18 nt, Human
ccuuugucaucuuucuuc

SEQ ID NO: 2089952 - RNA, 19 nt, Human
gaaaaguuuuguaaauuuc

SEQ ID NO: 2089953 - RNA, 12 nt, Human
gaaaaguucaua

SEQ ID NO: 2089954 - RNA, 14 nt, Human
gaaaauccucuggc

SEQ ID NO: 2089955 - RNA, 15 nt, Human
gaaaauccucuggcu

SEQ ID NO: 2089956 - RNA, 13 nt, Human
gaaaauccuacca

SEQ ID NO: 2089957 - RNA, 14 nt, Human
gaaaauccuaccaa

SEQ ID NO: 2089958 - RNA, 13 nt, Human
gaaaauccucugg

SEQ ID NO: 2089959 - RNA, 11 nt, Human
gaaaaucauau

SEQ ID NO: 2089960 - RNA, 20 nt, Human
gaaaaucagccugcuccagc

SEQ ID NO: 2089961 - RNA, 22 nt, Human
gaaaaucagccugcuccagcug

SEQ ID NO: 2089962 - RNA, 20 nt, Human
gaaaaggaagacuagaggcu

SEQ ID NO: 2089963 - RNA, 13 nt, Human
gaaaaggaagacu

SEQ ID NO: 2089964 - RNA, 15 nt, Human
gaaaaggaagacuag

SEQ ID NO: 2089965 - RNA, 19 nt, Human
gaaaacguuuuauuguguu

SEQ ID NO: 2089966 - RNA, 20 nt, Human
gaaaacguuuuauuguguuu

SEQ ID NO: 2089967 - RNA, 14 nt, Human
gaaaacuacauuuu

SEQ ID NO: 2089968 - RNA, 16 nt, Human
gaaaacuacauuuuaa

SEQ ID NO: 2089969 - RNA, 17 nt, Human
gaaaacuacauuuuaac

SEQ ID NO: 2089970 - RNA, 18 nt, Human
gaaaacuacauuuuaaca

SEQ ID NO: 2089971 - RNA, 19 nt, Human
gaaaacuacauuuuaacau

SEQ ID NO: 2089972 - RNA, 20 nt, Human
gaaaacuacauuuuaacaug

SEQ ID NO: 2089973 - RNA, 11 nt, Human
gaaaaggcagg

SEQ ID NO: 2089974 - RNA, 17 nt, Human
gaaaacguuuuguuuga

SEQ ID NO: 2089975 - RNA, 18 nt, Human
gaaaagggaacaggaaaa

SEQ ID NO: 2089976 - RNA, 18 nt, Human
gaaaaguggcaagaccaa

SEQ ID NO: 2089977 - RNA, 19 nt, Human
gaaaaguggcaagaccaaa

SEQ ID NO: 2089978 - RNA, 12 nt, Human
gaaaacauaaaa

SEQ ID NO: 2089979 - RNA, 22 nt, Human
gaaaacauaaaaaguuaaaaaa

SEQ ID NO: 2089980 - RNA, 19 nt, Human
gaaaacaucacugaaaugc

SEQ ID NO: 2089981 - RNA, 14 nt, Human
gaaaacguuuuauu

SEQ ID NO: 2089982 - RNA, 16 nt, Human
gaaaacguuuuauugu

SEQ ID NO: 2089983 - RNA, 18 nt, Human
gaaaacguuuuauugugu

SEQ ID NO: 2089984 - RNA, 19 nt, Human
gaaaagcugcugacagugu

SEQ ID NO: 2089985 - RNA, 11 nt, Human
gaaaacagaaa

SEQ ID NO: 2089986 - RNA, 14 nt, Human
gaaaacagaaaaaa

SEQ ID NO: 2089987 - RNA, 19 nt, Human
gaaaacaggaaaaaaacuu

SEQ ID NO: 2089988 - RNA, 21 nt, Human
gaaaacaggaaaaaaacuuuu

SEQ ID NO: 2089989 - RNA, 23 nt, Human
gaaaacaggaaaaaaacuuuuau

SEQ ID NO: 2089990 - RNA, 17 nt, Human
gaaaacagacucagguu

SEQ ID NO: 2089991 - RNA, 19 nt, Human
cuuuuuauugaugugcaaa

SEQ ID NO: 2089992 - RNA, 18 nt, Human
cuuuuucuuuauaaacuu

SEQ ID NO: 2089993 - RNA, 15 nt, Human
cuuuuugguggaugu

SEQ ID NO: 2089994 - RNA, 16 nt, Human
cuuuuugguggaugua

SEQ ID NO: 2089995 - RNA, 17 nt, Human
cuuuuugguggauguaa

SEQ ID NO: 2089996 - RNA, 19 nt, Human
cuuuuugguggauguaaau

SEQ ID NO: 2089997 - RNA, 15 nt, Human
gaaaaaggacaggca

SEQ ID NO: 2089998 - RNA, 18 nt, Human
gaaaaaggacaggcagaa

SEQ ID NO: 2089999 - RNA, 21 nt, Human
gaaaaaggacaggcagaaaga

SEQ ID NO: 2090000 - RNA, 18 nt, Human
gaaaaaggagcuuaccuc

SEQ ID NO: 2090001 - RNA, 21 nt, Human
gaaaaaggagcuuaccuccca

SEQ ID NO: 2090002 - RNA, 12 nt, Human
gaaaaaggagga

SEQ ID NO: 2090003 - RNA, 15 nt, Human
gaaaaaggaggaaga

SEQ ID NO: 2090004 - RNA, 13 nt, Human
cuuuuucuuccuc

SEQ ID NO: 2090005 - RNA, 14 nt, Human
cuuuuucuuccuca

SEQ ID NO: 2090006 - RNA, 12 nt, Human
cuuuuucuuuau

SEQ ID NO: 2090007 - RNA, 16 nt, Human
cuuuuucuuuauaaac

SEQ ID NO: 2090008 - RNA, 22 nt, Human
cuuuuucuggacugaagccugc

SEQ ID NO: 2090009 - RNA, 18 nt, Human
cuuuguuaagacugcuga

SEQ ID NO: 2090010 - RNA, 22 nt, Human
cuuuguuauuuuuguuucuucc

SEQ ID NO: 2090011 - RNA, 20 nt, Human
cuuuguuauuuuuguuucuu

SEQ ID NO: 2090012 - RNA, 22 nt, Human
cuuuuguucagggcugugaucg

SEQ ID NO: 2090013 - RNA, 15 nt, Human
cuuuguuacaggcac

SEQ ID NO: 2090014 - RNA, 20 nt, Human
gaaacuagcuuacaugagaa

SEQ ID NO: 2090015 - RNA, 24 nt, Human
gaaacuagcuuacaugagaacaga

SEQ ID NO: 2090016 - RNA, 22 nt, Human
gaaacuagacuugaggaaacca

SEQ ID NO: 2090017 - RNA, 15 nt, Human
gaaacgugcccucug

SEQ ID NO: 2090018 - RNA, 12 nt, Human
gaaacuaacaga

SEQ ID NO: 2090019 - RNA, 19 nt, Human
gaaaccuuauuguaccucu

SEQ ID NO: 2090020 - RNA, 17 nt, Human
gaaaccuuauuguaccu

SEQ ID NO: 2090021 - RNA, 20 nt, Human
gaaaccuuauuguaccucuc

SEQ ID NO: 2090022 - RNA, 15 nt, Human
gaaacuaacagauaa

SEQ ID NO: 2090023 - RNA, 17 nt, Human
gaaacccuugaaaagac

SEQ ID NO: 2090024 - RNA, 17 nt, Human
gaaaccguccucuuuuu

SEQ ID NO: 2090025 - RNA, 17 nt, Human
gaaaccuacagaauacu

SEQ ID NO: 2090026 - RNA, 16 nt, Human
gaaacccgacagaggg

SEQ ID NO: 2090027 - RNA, 17 nt, Human
gaaaccccaucucuacu

SEQ ID NO: 2090028 - RNA, 21 nt, Human
gaaaccauuaugaagaagaga

SEQ ID NO: 2090029 - RNA, 19 nt, Human
gaaaccaguguagccuugc

SEQ ID NO: 2090030 - RNA, 18 nt, Human
gaaaccaaucaagauaaa

SEQ ID NO: 2090031 - RNA, 21 nt, Human
gaaaccaaucaagauaaagga

SEQ ID NO: 2090032 - RNA, 23 nt, Human
gaaaccaaucaagauaaaggaca

SEQ ID NO: 2090033 - RNA, 21 nt, Human
gaaacacacugaggcagggaa

SEQ ID NO: 2090034 - RNA, 23 nt, Human
gaaacacacugaggcagggaagu

SEQ ID NO: 2090035 - RNA, 14 nt, Human
gaaacacaauauuu

SEQ ID NO: 2090036 - RNA, 15 nt, Human
gaaacacaauauuuu

SEQ ID NO: 2090037 - RNA, 16 nt, Human
gaaacacaccaggcug

SEQ ID NO: 2090038 - RNA, 17 nt, Human
gaaacacaccaggcugu

SEQ ID NO: 2090039 - RNA, 23 nt, Human
gaaacacaccaggcugugggccu

SEQ ID NO: 2090040 - RNA, 16 nt, Human
gaaacacacugaggca

SEQ ID NO: 2090041 - RNA, 19 nt, Human
gaaacacacugaggcaggg

SEQ ID NO: 2090042 - RNA, 20 nt, Human
gaaacacacugaggcaggga

SEQ ID NO: 2090043 - RNA, 18 nt, Human
gaaaaugcaacaacaugu

SEQ ID NO: 2090044 - RNA, 20 nt, Human
gaaaaugcaacaacauguau

SEQ ID NO: 2090045 - RNA, 23 nt, Human
gaaaaugaguuuuuauggggcug

SEQ ID NO: 2090046 - RNA, 12 nt, Human
gaaagcugauua

SEQ ID NO: 2090047 - RNA, 22 nt, Human
gaaagcugauuacugucaauaa

SEQ ID NO: 2090048 - RNA, 23 nt, Human
gaaagcugauuacugucaauaaa

SEQ ID NO: 2090049 - RNA, 16 nt, Human
gaaagcuagagauaug

SEQ ID NO: 2090050 - RNA, 13 nt, Human
gaaagcuagagau

SEQ ID NO: 2090051 - RNA, 15 nt, Human
gaaagccucugcugc

SEQ ID NO: 2090052 - RNA, 16 nt, Human
gaaagccucugcugcc

SEQ ID NO: 2090053 - RNA, 17 nt, Human
gaaagcccugagcuuuc

SEQ ID NO: 2090054 - RNA, 14 nt, Human
gaaagccccagcac

SEQ ID NO: 2090055 - RNA, 18 nt, Human
gaaagccccagcacuaac

SEQ ID NO: 2090056 - RNA, 21 nt, Human
gaaagcccugagcuuucugcu

SEQ ID NO: 2090057 - RNA, 22 nt, Human
gaaagcccugagcuuucugcua

SEQ ID NO: 2090058 - RNA, 20 nt, Human
gaaagcagcucaaaggcaca

SEQ ID NO: 2090059 - RNA, 16 nt, Human
gaaagcaucaccucag

SEQ ID NO: 2090060 - RNA, 17 nt, Human
gaaagcaucaccucagg

SEQ ID NO: 2090061 - RNA, 18 nt, Human
gaaagcaucaccucaggc

SEQ ID NO: 2090062 - RNA, 19 nt, Human
gaaagcaucaccucaggcc

SEQ ID NO: 2090063 - RNA, 15 nt, Human
gaaagcauccaugug

SEQ ID NO: 2090064 - RNA, 17 nt, Human
gaaagcauccaugugug

SEQ ID NO: 2090065 - RNA, 22 nt, Human
gaaacuccgucuuagaagugga

SEQ ID NO: 2090066 - RNA, 18 nt, Human
gaaacuccgucuuagaag

SEQ ID NO: 2090067 - RNA, 17 nt, Human
gaaagacuguacaaagu

SEQ ID NO: 2090068 - RNA, 14 nt, Human
gaaagcagaggcug

SEQ ID NO: 2090069 - RNA, 18 nt, Human
gaaagcagaggcuggccu

SEQ ID NO: 2090070 - RNA, 19 nt, Human
gaaagcagaggcuggccuc

SEQ ID NO: 2090071 - RNA, 19 nt, Human
gaaagcagcucaaaggcac

SEQ ID NO: 2090072 - RNA, 19 nt, Human
cuuuaucacauuauuugca

SEQ ID NO: 2090073 - RNA, 22 nt, Human
cuuuaugaaugaaaaaacaguc

SEQ ID NO: 2090074 - RNA, 15 nt, Human
cuuuaugcacaaaau

SEQ ID NO: 2090075 - RNA, 18 nt, Human
cuuuaugcagcuuccuuu

SEQ ID NO: 2090076 - RNA, 15 nt, Human
cuuuagcgcccaguu

SEQ ID NO: 2090077 - RNA, 14 nt, Human
cuuuagcgcccagu

SEQ ID NO: 2090078 - RNA, 13 nt, Human
cuuuauaauucua

SEQ ID NO: 2090079 - RNA, 19 nt, Human
cuuuauaauucuacuuuga

SEQ ID NO: 2090080 - RNA, 22 nt, Human
cuuguucucucuaugguaaaga

SEQ ID NO: 2090081 - RNA, 19 nt, Human
cuuuauaugaacauagacu

SEQ ID NO: 2090082 - RNA, 15 nt, Human
cuuuauagaucagcc

SEQ ID NO: 2090083 - RNA, 13 nt, Human
cuuuagcacguuu

SEQ ID NO: 2090084 - RNA, 17 nt, Human
cuuuagcacguuuaaag

SEQ ID NO: 2090085 - RNA, 19 nt, Human
cuuuagcacguuuaaaguu

SEQ ID NO: 2090086 - RNA, 20 nt, Human
cuuuagcacguuuaaaguuc

SEQ ID NO: 2090087 - RNA, 21 nt, Human
cuuuagcacguuuaaaguucu

SEQ ID NO: 2090088 - RNA, 23 nt, Human
cuuuagcacguuuaaaguucugu

SEQ ID NO: 2090089 - RNA, 18 nt, Human
cuuuagcagaaucaaaau

SEQ ID NO: 2090090 - RNA, 14 nt, Human
cuuuacguagugua

SEQ ID NO: 2090091 - RNA, 12 nt, Human
cuuuacuguuug

SEQ ID NO: 2090092 - RNA, 20 nt, Human
cuuguucaaaauauguucuu

SEQ ID NO: 2090093 - RNA, 15 nt, Human
cuuguuauuuauaac

SEQ ID NO: 2090094 - RNA, 13 nt, Human
cuuguuauuuaua

SEQ ID NO: 2090095 - RNA, 13 nt, Human
cuuguuccagcuc

SEQ ID NO: 2090096 - RNA, 14 nt, Human
cuuguucccucucc

SEQ ID NO: 2090097 - RNA, 16 nt, Human
cuuguuccagcucuuu

SEQ ID NO: 2090098 - RNA, 21 nt, Human
cuuguuccccacugacagccu

SEQ ID NO: 2090099 - RNA, 13 nt, Human
cuuguucuacuca

SEQ ID NO: 2090100 - RNA, 22 nt, Human
cuuguucuacucauauauaucu

SEQ ID NO: 2090101 - RNA, 20 nt, Human
cuuguccaacccgaggcccg

SEQ ID NO: 2090102 - RNA, 14 nt, Human
cuuguccagcgccu

SEQ ID NO: 2090103 - RNA, 18 nt, Human
cuuguccagcgccuagug

SEQ ID NO: 2090104 - RNA, 14 nt, Human
cuugucacaauaaa

SEQ ID NO: 2090105 - RNA, 15 nt, Human
cuugucacaauaaau

SEQ ID NO: 2090106 - RNA, 16 nt, Human
cuugucacaauaaaug

SEQ ID NO: 2090107 - RNA, 17 nt, Human
cuugucacaauaaaugu

SEQ ID NO: 2090108 - RNA, 16 nt, Human
cuugucccacucaagc

SEQ ID NO: 2090109 - RNA, 18 nt, Human
cuugucccacucaagcca

SEQ ID NO: 2090110 - RNA, 19 nt, Human
cuugucccacucaagccaa

SEQ ID NO: 2090111 - RNA, 21 nt, Human
cuugucccacucaagccaagc

SEQ ID NO: 2090112 - RNA, 18 nt, Human
cuuguaaauagcucaggu

SEQ ID NO: 2090113 - RNA, 17 nt, Human
cuuguaaauagcucagg

SEQ ID NO: 2090114 - RNA, 23 nt, Human
cuuggggggcugaggugggagga

SEQ ID NO: 2090115 - RNA, 16 nt, Human
cuuguaaauagcucag

SEQ ID NO: 2090116 - RNA, 14 nt, Human
cuuucugggccaag

SEQ ID NO: 2090117 - RNA, 11 nt, Human
cuuucuuccuc

SEQ ID NO: 2090118 - RNA, 17 nt, Human
cuuucuguaccauuuau

SEQ ID NO: 2090119 - RNA, 12 nt, Human
cuuucucugcuu

SEQ ID NO: 2090120 - RNA, 14 nt, Human
cuuucucugcuuca

SEQ ID NO: 2090121 - RNA, 16 nt, Human
cuuucucugcuucagc

SEQ ID NO: 2090122 - RNA, 17 nt, Human
cuuucucugcuucagcu

SEQ ID NO: 2090123 - RNA, 21 nt, Human
cuuucucugcuucagcuugcu

SEQ ID NO: 2090124 - RNA, 15 nt, Human
cuuucuggccugccu

SEQ ID NO: 2090125 - RNA, 17 nt, Human
cuuucuggccugccuuc

SEQ ID NO: 2090126 - RNA, 15 nt, Human
cuuuccaucuacccu

SEQ ID NO: 2090127 - RNA, 16 nt, Human
cuuuauguaauaaugu

SEQ ID NO: 2090128 - RNA, 13 nt, Human
cuuuaugguuucu

SEQ ID NO: 2090129 - RNA, 14 nt, Human
cuuuccauuucucu

SEQ ID NO: 2090130 - RNA, 15 nt, Human
cuuuccauuucucuc

SEQ ID NO: 2090131 - RNA, 17 nt, Human
cuuucccuaaagacccu

SEQ ID NO: 2090132 - RNA, 19 nt, Human
cuuucccugcuuaaugaaa

SEQ ID NO: 2090133 - RNA, 13 nt, Human
cuuucccuccacu

SEQ ID NO: 2090134 - RNA, 11 nt, Human
cuuucccuccc

SEQ ID NO: 2090135 - RNA, 13 nt, Human
cuuucccucccuu

SEQ ID NO: 2090136 - RNA, 14 nt, Human
cuuucccucccuuc

SEQ ID NO: 2090137 - RNA, 16 nt, Human
cuuucccucccuuccu

SEQ ID NO: 2090138 - RNA, 19 nt, Human
cuuuggcuauuagagauca

SEQ ID NO: 2090139 - RNA, 18 nt, Human
cuuugcuccaccccacuc

SEQ ID NO: 2090140 - RNA, 15 nt, Human
cuuugcggacgggcu

SEQ ID NO: 2090141 - RNA, 21 nt, Human
cuuugcuauggggacauucca

SEQ ID NO: 2090142 - RNA, 23 nt, Human
cuuugccuugggcugcuccucau

SEQ ID NO: 2090143 - RNA, 12 nt, Human
cuuugccuuugc

SEQ ID NO: 2090144 - RNA, 18 nt, Human
cuuugucaucuuucuucu

SEQ ID NO: 2090145 - RNA, 16 nt, Human
cuuugucaaaaggaag

SEQ ID NO: 2090146 - RNA, 20 nt, Human
cuuugugcuacaugacgaca

SEQ ID NO: 2090147 - RNA, 19 nt, Human
cuuugugagagugagcugu

SEQ ID NO: 2090148 - RNA, 14 nt, Human
cuuugucccacagc

SEQ ID NO: 2090149 - RNA, 15 nt, Human
cuuugucccacagcu

SEQ ID NO: 2090150 - RNA, 16 nt, Human
cuuugucccacagcuu

SEQ ID NO: 2090151 - RNA, 14 nt, Human
cuuugucccauuuc

SEQ ID NO: 2090152 - RNA, 20 nt, Human
cuuugcagacaggcaagcac

SEQ ID NO: 2090153 - RNA, 13 nt, Human
cuuugcaggcuca

SEQ ID NO: 2090154 - RNA, 16 nt, Human
cuuugcagacaggcaa

SEQ ID NO: 2090155 - RNA, 13 nt, Human
cuuugccuccccg

SEQ ID NO: 2090156 - RNA, 22 nt, Human
cuuugccuuccacgcugucucc

SEQ ID NO: 2090157 - RNA, 23 nt, Human
cuuugccuuccacgcugucucca

SEQ ID NO: 2090158 - RNA, 13 nt, Human
cuuugccuugggc

SEQ ID NO: 2090159 - RNA, 16 nt, Human
cuuugccuugggcugc

SEQ ID NO: 2090160 - RNA, 18 nt, Human
cuuugccuugggcugcuc

SEQ ID NO: 2090161 - RNA, 19 nt, Human
cuuugccuugggcugcucc

SEQ ID NO: 2090162 - RNA, 22 nt, Human
cuuugccuugggcugcuccuca

SEQ ID NO: 2090163 - RNA, 15 nt, Human
cuuucuuccucugcu

SEQ ID NO: 2090164 - RNA, 14 nt, Human
cuuucuuccucugc

SEQ ID NO: 2090165 - RNA, 13 nt, Human
cuuucuuccucug

SEQ ID NO: 2090166 - RNA, 12 nt, Human
cuuucuuccucu

SEQ ID NO: 2090167 - RNA, 20 nt, Human
cuucuccuuagaaguggaag

SEQ ID NO: 2090168 - RNA, 13 nt, Human
cuucucugaagga

SEQ ID NO: 2090169 - RNA, 14 nt, Human
cuucucuccagugc

SEQ ID NO: 2090170 - RNA, 18 nt, Human
cuucucucucuaaaauga

SEQ ID NO: 2090171 - RNA, 13 nt, Human
cuucuccaggcug

SEQ ID NO: 2090172 - RNA, 17 nt, Human
cuucuccacuggaugga

SEQ ID NO: 2090173 - RNA, 23 nt, Human
cuucuccagacaaaccagaagca

SEQ ID NO: 2090174 - RNA, 17 nt, Human
cuucuccagacaaacca

SEQ ID NO: 2090175 - RNA, 12 nt, Human
cuucuccaggcu

SEQ ID NO: 2090176 - RNA, 15 nt, Human
cuuccuguccagaga

SEQ ID NO: 2090177 - RNA, 16 nt, Human
cuuccuguccagagag

SEQ ID NO: 2090178 - RNA, 15 nt, Human
cuuccucccucauuc

SEQ ID NO: 2090179 - RNA, 15 nt, Human
cuucuccacuggaug

SEQ ID NO: 2090180 - RNA, 14 nt, Human
cuucuccacuggau

SEQ ID NO: 2090181 - RNA, 13 nt, Human
cuucuccacugga

SEQ ID NO: 2090182 - RNA, 17 nt, Human
cuuccuguccagagaga

SEQ ID NO: 2090183 - RNA, 19 nt, Human
cuuccuguccagagagaga

SEQ ID NO: 2090184 - RNA, 15 nt, Human
cuucugcuccacccu

SEQ ID NO: 2090185 - RNA, 17 nt, Human
cuucugcuccacccuug

SEQ ID NO: 2090186 - RNA, 12 nt, Human
cuucugccugca

SEQ ID NO: 2090187 - RNA, 15 nt, Human
cuucugcccuugcca

SEQ ID NO: 2090188 - RNA, 17 nt, Human
cuucugccggcccuggg

SEQ ID NO: 2090189 - RNA, 18 nt, Human
cuucugccggcccugggg

SEQ ID NO: 2090190 - RNA, 19 nt, Human
cuucugccggcccuggggc

SEQ ID NO: 2090191 - RNA, 18 nt, Human
cuucugcccucccuggag

SEQ ID NO: 2090192 - RNA, 13 nt, Human
cuucugcuucagc

SEQ ID NO: 2090193 - RNA, 19 nt, Human
cuucugcuccacccuuggc

SEQ ID NO: 2090194 - RNA, 21 nt, Human
cuucugcuccacccuuggccu

SEQ ID NO: 2090195 - RNA, 23 nt, Human
cuucugcuccacccuuggccugu

SEQ ID NO: 2090196 - RNA, 15 nt, Human
cuucugcuggauaaa

SEQ ID NO: 2090197 - RNA, 17 nt, Human
cuucugcuggauaaaau

SEQ ID NO: 2090198 - RNA, 19 nt, Human
cuucugcuggauaaaauga

SEQ ID NO: 2090199 - RNA, 21 nt, Human
cuucuguccuacucuguguca

SEQ ID NO: 2090200 - RNA, 19 nt, Human
cuucuguccuacucugugu

SEQ ID NO: 2090201 - RNA, 18 nt, Human
cuucuguccuacucugug

SEQ ID NO: 2090202 - RNA, 17 nt, Human
cuucuguccuacucugu

SEQ ID NO: 2090203 - RNA, 16 nt, Human
cuucuguccuacucug

SEQ ID NO: 2090204 - RNA, 20 nt, Human
cuucuguacgucugacaggc

SEQ ID NO: 2090205 - RNA, 18 nt, Human
cuucuguacgucugacag

SEQ ID NO: 2090206 - RNA, 15 nt, Human
cuucuguacgucuga

SEQ ID NO: 2090207 - RNA, 14 nt, Human
cuucuguacgucug

SEQ ID NO: 2090208 - RNA, 21 nt, Human
cuucuguacgucugacaggca

SEQ ID NO: 2090209 - RNA, 15 nt, Human
cuucuguaguacucc

SEQ ID NO: 2090210 - RNA, 18 nt, Human
cuucuguaguacuccuua

SEQ ID NO: 2090211 - RNA, 21 nt, Human
cuucuguaguacuccuuaaga

SEQ ID NO: 2090212 - RNA, 22 nt, Human
cuucugcccauccugucuguuc

SEQ ID NO: 2090213 - RNA, 16 nt, Human
cuucugucaucuaccu

SEQ ID NO: 2090214 - RNA, 18 nt, Human
cuucuguauacuguggag

SEQ ID NO: 2090215 - RNA, 14 nt, Human
cuucuuggcuuugu

SEQ ID NO: 2090216 - RNA, 13 nt, Human
cuucuuguucccc

SEQ ID NO: 2090217 - RNA, 20 nt, Human
cuucuuggucuuauuuauua

SEQ ID NO: 2090218 - RNA, 13 nt, Human
cuucuugcuucuc

SEQ ID NO: 2090219 - RNA, 16 nt, Human
cuucuuggucuuauuu

SEQ ID NO: 2090220 - RNA, 19 nt, Human
cuucugugagacccccaca

SEQ ID NO: 2090221 - RNA, 22 nt, Human
cuucugugagacccccacaccu

SEQ ID NO: 2090222 - RNA, 20 nt, Human
cuucugugagacccccacac

SEQ ID NO: 2090223 - RNA, 21 nt, Human
cuucugugagacccccacacc

SEQ ID NO: 2090224 - RNA, 12 nt, Human
cuucugugccca

SEQ ID NO: 2090225 - RNA, 13 nt, Human
cuucugugcccag

SEQ ID NO: 2090226 - RNA, 14 nt, Human
cuucugugcccagc

SEQ ID NO: 2090227 - RNA, 15 nt, Human
cuucugugcccagcu

SEQ ID NO: 2090228 - RNA, 16 nt, Human
cuucugugcccagcuc

SEQ ID NO: 2090229 - RNA, 17 nt, Human
cuucugugcccagcuca

SEQ ID NO: 2090230 - RNA, 18 nt, Human
cuucugugcccagcucag

SEQ ID NO: 2090231 - RNA, 13 nt, Human
cuucuguggcuca

SEQ ID NO: 2090232 - RNA, 22 nt, Human
cuucuguggcucacagaacccu

SEQ ID NO: 2090233 - RNA, 15 nt, Human
cuucuguggcucaca

SEQ ID NO: 2090234 - RNA, 17 nt, Human
cuucuuuuuuugugaug

SEQ ID NO: 2090235 - RNA, 15 nt, Human
cuucuugugaucuug

SEQ ID NO: 2090236 - RNA, 19 nt, Human
cuucuugugaucuugcucu

SEQ ID NO: 2090237 - RNA, 23 nt, Human
cuucuugugaucuugcucuaucu

SEQ ID NO: 2090238 - RNA, 16 nt, Human
cuucuuuuuuuucauu

SEQ ID NO: 2090239 - RNA, 22 nt, Human
cuucuuuauaauucuacuuuga

SEQ ID NO: 2090240 - RNA, 17 nt, Human
cuugaaagaaaggggca

SEQ ID NO: 2090241 - RNA, 23 nt, Human
cuugaaagaaaggggcaggagcu

SEQ ID NO: 2090242 - RNA, 13 nt, Human
cuugaaagaaaau

SEQ ID NO: 2090243 - RNA, 13 nt, Human
cuugaaagcugug

SEQ ID NO: 2090244 - RNA, 17 nt, Human
cuugaaagcauccaugu

SEQ ID NO: 2090245 - RNA, 18 nt, Human
cuugaaagcauccaugug

SEQ ID NO: 2090246 - RNA, 21 nt, Human
cuugaaagaagaaaagguucu

SEQ ID NO: 2090247 - RNA, 19 nt, Human
cuugaaagaagaaaagguu

SEQ ID NO: 2090248 - RNA, 16 nt, Human
cuugaaagcauccaug

SEQ ID NO: 2090249 - RNA, 17 nt, Human
cuugaaagucaugaaca

SEQ ID NO: 2090250 - RNA, 20 nt, Human
cuugaaagucaugaacacau

SEQ ID NO: 2090251 - RNA, 20 nt, Human
cuugaaagcauccaugugug

SEQ ID NO: 2090252 - RNA, 15 nt, Human
cuugaacacaguauu

SEQ ID NO: 2090253 - RNA, 16 nt, Human
cuugaacacaguauuu

SEQ ID NO: 2090254 - RNA, 17 nt, Human
cuugaacacaguauuuu

SEQ ID NO: 2090255 - RNA, 20 nt, Human
cuugaacacaguauuuuccc

SEQ ID NO: 2090256 - RNA, 15 nt, Human
cuugaacaccacgcu

SEQ ID NO: 2090257 - RNA, 13 nt, Human
cuugaacacuggg

SEQ ID NO: 2090258 - RNA, 15 nt, Human
cuugaacacuggggg

SEQ ID NO: 2090259 - RNA, 16 nt, Human
cuugaacacuggggga

SEQ ID NO: 2090260 - RNA, 13 nt, Human
cuugaacuccugg

SEQ ID NO: 2090261 - RNA, 15 nt, Human
cuugaacccaggaga

SEQ ID NO: 2090262 - RNA, 13 nt, Human
cuugaccucaggu

SEQ ID NO: 2090263 - RNA, 20 nt, Human
cuugaggguugggcuggugu

SEQ ID NO: 2090264 - RNA, 19 nt, Human
cuugaggguugggcuggug

SEQ ID NO: 2090265 - RNA, 21 nt, Human
cuugaggguugggcugguguc

SEQ ID NO: 2090266 - RNA, 21 nt, Human
cuugagcuuggcagcugaacu

SEQ ID NO: 2090267 - RNA, 12 nt, Human
cuugagcuuggc

SEQ ID NO: 2090268 - RNA, 20 nt, Human
cuugagcuuggcagcugaac

SEQ ID NO: 2090269 - RNA, 14 nt, Human
cuugagcuccccaa

SEQ ID NO: 2090270 - RNA, 10 nt, Human
cuugagcuga

SEQ ID NO: 2090271 - RNA, 16 nt, Human
cuugagcugagaugga

SEQ ID NO: 2090272 - RNA, 13 nt, Human
cuugagcugagau

SEQ ID NO: 2090273 - RNA, 15 nt, Human
cuugaacccaggagg

SEQ ID NO: 2090274 - RNA, 17 nt, Human
cuugacuugauuagugc

SEQ ID NO: 2090275 - RNA, 16 nt, Human
cuugacuauuggagga

SEQ ID NO: 2090276 - RNA, 16 nt, Human
cuugagccugggaggu

SEQ ID NO: 2090277 - RNA, 20 nt, Human
cuucaccuaagucucuguga

SEQ ID NO: 2090278 - RNA, 22 nt, Human
cuucaggcucuucuccuuucac

SEQ ID NO: 2090279 - RNA, 19 nt, Human
cuucaggcucuucuccuuu

SEQ ID NO: 2090280 - RNA, 15 nt, Human
cuucacccuggagcc

SEQ ID NO: 2090281 - RNA, 18 nt, Human
cuucaccuaagucucugu

SEQ ID NO: 2090282 - RNA, 19 nt, Human
cuucaccuaagucucugug

SEQ ID NO: 2090283 - RNA, 16 nt, Human
cuucagggcagggcuc

SEQ ID NO: 2090284 - RNA, 17 nt, Human
cuucagggcagggcucu

SEQ ID NO: 2090285 - RNA, 20 nt, Human
cuucagggcagggcucugau

SEQ ID NO: 2090286 - RNA, 19 nt, Human
cuucagggcacugcugcug

SEQ ID NO: 2090287 - RNA, 16 nt, Human
cuucaguaagccguga

SEQ ID NO: 2090288 - RNA, 23 nt, Human
cuucaguaagccgugauuuucau

SEQ ID NO: 2090289 - RNA, 16 nt, Human
cuucaguggcagcugc

SEQ ID NO: 2090290 - RNA, 15 nt, Human
cuucaguggcagcug

SEQ ID NO: 2090291 - RNA, 14 nt, Human
cuucaguggcagcu

SEQ ID NO: 2090292 - RNA, 13 nt, Human
cuucaguggcagc

SEQ ID NO: 2090293 - RNA, 18 nt, Human
cuucagggcagggcucug

SEQ ID NO: 2090294 - RNA, 19 nt, Human
cuucagggcagggcucuga

SEQ ID NO: 2090295 - RNA, 17 nt, Human
cuucaguggcagcugcu

SEQ ID NO: 2090296 - RNA, 20 nt, Human
cuucauucaacccaccugcg

SEQ ID NO: 2090297 - RNA, 21 nt, Human
cuucauucuugaaagcugugg

SEQ ID NO: 2090298 - RNA, 20 nt, Human
cuucauucuugaaagcugug

SEQ ID NO: 2090299 - RNA, 21 nt, Human
cuucauucaagucagcucuuc

SEQ ID NO: 2090300 - RNA, 19 nt, Human
cuucauugccuuaacugga

SEQ ID NO: 2090301 - RNA, 17 nt, Human
cuuccacgcugucucca

SEQ ID NO: 2090302 - RNA, 13 nt, Human
cuuccaccuggaa

SEQ ID NO: 2090303 - RNA, 16 nt, Human
cuuccacgcugucucc

SEQ ID NO: 2090304 - RNA, 18 nt, Human
cuuccacgcugucuccag

SEQ ID NO: 2090305 - RNA, 20 nt, Human
cuuccacgcugucuccagac

SEQ ID NO: 2090306 - RNA, 21 nt, Human
cuuccacgcugucuccagacc

SEQ ID NO: 2090307 - RNA, 22 nt, Human
cuuccacgcugucuccagaccc

SEQ ID NO: 2090308 - RNA, 21 nt, Human
cuuccaccagccugcacuacu

SEQ ID NO: 2090309 - RNA, 17 nt, Human
cuuccaccagccugcac

SEQ ID NO: 2090310 - RNA, 20 nt, Human
cuuccacguacugcagccuc

SEQ ID NO: 2090311 - RNA, 19 nt, Human
cuuccacguacugcagccu

SEQ ID NO: 2090312 - RNA, 18 nt, Human
cuuccccgcauuccaggc

SEQ ID NO: 2090313 - RNA, 15 nt, Human
cuucccuugagcccu

SEQ ID NO: 2090314 - RNA, 13 nt, Human
cuuccucccucau

SEQ ID NO: 2090315 - RNA, 16 nt, Human
cuucccuuaaaauuua

SEQ ID NO: 2090316 - RNA, 20 nt, Human
cuucccuuaaaauuuauaug

SEQ ID NO: 2090317 - RNA, 16 nt, Human
cuucccuugagcccuc

SEQ ID NO: 2090318 - RNA, 16 nt, Human
cuuccccuugcccagg

SEQ ID NO: 2090319 - RNA, 19 nt, Human
cuucccgcucagcccuccc

SEQ ID NO: 2090320 - RNA, 18 nt, Human
cuucccgcucagcccucc

SEQ ID NO: 2090321 - RNA, 23 nt, Human
cuucccgcucagcccucccugcc

SEQ ID NO: 2090322 - RNA, 17 nt, Human
cuucccuacaguugaaa

SEQ ID NO: 2090323 - RNA, 16 nt, Human
cuucccccucucccag

SEQ ID NO: 2090324 - RNA, 17 nt, Human
cuucccccucucccagu

SEQ ID NO: 2090325 - RNA, 18 nt, Human
cuucccccucucccaguu

SEQ ID NO: 2090326 - RNA, 12 nt, Human
cuuccccucacu

SEQ ID NO: 2090327 - RNA, 14 nt, Human
cuuccccucccugg

SEQ ID NO: 2090328 - RNA, 16 nt, Human
cuuccccucccuggcu

SEQ ID NO: 2090329 - RNA, 18 nt, Human
cuuccccucccuggcucc

SEQ ID NO: 2090330 - RNA, 20 nt, Human
cuuccccucccuggcuccca

SEQ ID NO: 2090331 - RNA, 19 nt, Human
cuuccccucuaaugcucac

SEQ ID NO: 2090332 - RNA, 21 nt, Human
cuuccccucuaaugcucacgc

SEQ ID NO: 2090333 - RNA, 20 nt, Human
cuuccccucucuccuccugc

SEQ ID NO: 2090334 - RNA, 21 nt, Human
cuuccaggggagguucaguga

SEQ ID NO: 2090335 - RNA, 22 nt, Human
cuucccaguucaggagucccaa

SEQ ID NO: 2090336 - RNA, 23 nt, Human
cuucccaguucaggagucccaag

SEQ ID NO: 2090337 - RNA, 11 nt, Human
cuucccaucac

SEQ ID NO: 2090338 - RNA, 16 nt, Human
cuucccaucacuggag

SEQ ID NO: 2090339 - RNA, 17 nt, Human
cuucccaucacuggagc

SEQ ID NO: 2090340 - RNA, 18 nt, Human
cuucccaucacuggagca

SEQ ID NO: 2090341 - RNA, 14 nt, Human
cuuccaggccauca

SEQ ID NO: 2090342 - RNA, 16 nt, Human
cuuccaggccaucaga

SEQ ID NO: 2090343 - RNA, 20 nt, Human
cuuccaggccaucagaggcc

SEQ ID NO: 2090344 - RNA, 16 nt, Human
cuuccaggcccccacc

SEQ ID NO: 2090345 - RNA, 19 nt, Human
cuuccacggacucaaguuu

SEQ ID NO: 2090346 - RNA, 21 nt, Human
cuuccaggcugcauagaagga

SEQ ID NO: 2090347 - RNA, 19 nt, Human
cuuccaggcccccaccacu

SEQ ID NO: 2090348 - RNA, 12 nt, Human
cuucaauaaagu

SEQ ID NO: 2090349 - RNA, 20 nt, Human
cuucaaguuagcucaggagg

SEQ ID NO: 2090350 - RNA, 14 nt, Human
cuucaauaaaguau

SEQ ID NO: 2090351 - RNA, 16 nt, Human
cuucaaguuagcucag

SEQ ID NO: 2090352 - RNA, 17 nt, Human
cuucaaguuagcucagg

SEQ ID NO: 2090353 - RNA, 18 nt, Human
cuucaaguuagcucagga

SEQ ID NO: 2090354 - RNA, 19 nt, Human
cuucaaguuagcucaggag

SEQ ID NO: 2090355 - RNA, 15 nt, Human
cuucaauuccugggc

SEQ ID NO: 2090356 - RNA, 16 nt, Human
cuucaauuccugggcc

SEQ ID NO: 2090357 - RNA, 21 nt, Human
cuucacacacaggcaacugag

SEQ ID NO: 2090358 - RNA, 22 nt, Human
cuucacacacaggcaacugagg

SEQ ID NO: 2090359 - RNA, 19 nt, Human
cuucacaccuacccuccuu

SEQ ID NO: 2090360 - RNA, 12 nt, Human
cuucacacugca

SEQ ID NO: 2090361 - RNA, 13 nt, Human
cuucacacugcaa

SEQ ID NO: 2090362 - RNA, 15 nt, Human
cuucacacugcaaga

SEQ ID NO: 2090363 - RNA, 18 nt, Human
cuucacacugcaagagcc

SEQ ID NO: 2090364 - RNA, 20 nt, Human
cuucacacugcaagagccuu

SEQ ID NO: 2090365 - RNA, 21 nt, Human
cuucacacugcaagagccuug

SEQ ID NO: 2090366 - RNA, 16 nt, Human
cuucacagcucugugu

SEQ ID NO: 2090367 - RNA, 16 nt, Human
cuucaaccauucccca

SEQ ID NO: 2090368 - RNA, 22 nt, Human
cuucaacaucaauguucauugu

SEQ ID NO: 2090369 - RNA, 20 nt, Human
cuucaaccauuccccauggg

SEQ ID NO: 2090370 - RNA, 14 nt, Human
cuucaagucugugc

SEQ ID NO: 2090371 - RNA, 15 nt, Human
cuucaagucugugcc

SEQ ID NO: 2090372 - RNA, 16 nt, Human
cuucaagucugugccu

SEQ ID NO: 2090373 - RNA, 17 nt, Human
cuucaagucugugccug

SEQ ID NO: 2090374 - RNA, 18 nt, Human
cuucaagucugugccugg

SEQ ID NO: 2090375 - RNA, 22 nt, Human
cuucaagucugugccuggagcu

SEQ ID NO: 2090376 - RNA, 23 nt, Human
cuucaagucugugccuggagcuc

SEQ ID NO: 2090377 - RNA, 22 nt, Human
cuucaagugcaugcucucugca

SEQ ID NO: 2090378 - RNA, 16 nt, Human
cuucaagggcugcuuc

SEQ ID NO: 2090379 - RNA, 17 nt, Human
cuucaagggcugcuuca

SEQ ID NO: 2090380 - RNA, 18 nt, Human
cuucaaguuaaagugaau

SEQ ID NO: 2090381 - RNA, 23 nt, Human
cuuaucuaaucaugaaacucccu

SEQ ID NO: 2090382 - RNA, 17 nt, Human
cuuauuuaaugaaagac

SEQ ID NO: 2090383 - RNA, 15 nt, Human
cuuaucgaaacucau

SEQ ID NO: 2090384 - RNA, 21 nt, Human
cuuauccuuccacggacucaa

SEQ ID NO: 2090385 - RNA, 13 nt, Human
cuuauuuauuauu

SEQ ID NO: 2090386 - RNA, 18 nt, Human
cuuauuuaaugaaagacu

SEQ ID NO: 2090387 - RNA, 23 nt, Human
cuuauuuuaaaauuuuaucucuu

SEQ ID NO: 2090388 - RNA, 15 nt, Human
cuuauuuccucauuu

SEQ ID NO: 2090389 - RNA, 16 nt, Human
cuucaacaucaauguu

SEQ ID NO: 2090390 - RNA, 18 nt, Human
cuucaacaucaauguuca

SEQ ID NO: 2090391 - RNA, 19 nt, Human
cuucaacaucaauguucau

SEQ ID NO: 2090392 - RNA, 20 nt, Human
cuucaacaucaauguucauu

SEQ ID NO: 2090393 - RNA, 19 nt, Human
cuucaaauauuaugcaggg

SEQ ID NO: 2090394 - RNA, 11 nt, Human
cuucaaagcug

SEQ ID NO: 2090395 - RNA, 16 nt, Human
cuucaaagcuugaaga

SEQ ID NO: 2090396 - RNA, 18 nt, Human
cuucaaagcuugaagauc

SEQ ID NO: 2090397 - RNA, 20 nt, Human
cuguucugggugcagcugag

SEQ ID NO: 2090398 - RNA, 19 nt, Human
cuuagauguauauauuucc

SEQ ID NO: 2090399 - RNA, 13 nt, Human
cuuagauguauau

SEQ ID NO: 2090400 - RNA, 22 nt, Human
cuuagugcggacaaguuuuaau

SEQ ID NO: 2090401 - RNA, 21 nt, Human
cuuagucuucucauagcauua

SEQ ID NO: 2090402 - RNA, 20 nt, Human
cuuagugcggacaaguuuua

SEQ ID NO: 2090403 - RNA, 19 nt, Human
cuuagugcggacaaguuuu

SEQ ID NO: 2090404 - RNA, 17 nt, Human
cuuagugaaauuacuuc

SEQ ID NO: 2090405 - RNA, 15 nt, Human
cuuagucuucucaua

SEQ ID NO: 2090406 - RNA, 16 nt, Human
cuuagucuucucauag

SEQ ID NO: 2090407 - RNA, 20 nt, Human
cuuagucuucucauagcauu

SEQ ID NO: 2090408 - RNA, 15 nt, Human
cuuaucaauuuguca

SEQ ID NO: 2090409 - RNA, 16 nt, Human
cuuaucaauuugucau

SEQ ID NO: 2090410 - RNA, 21 nt, Human
cuuaucaauuugucauuuuga

SEQ ID NO: 2090411 - RNA, 22 nt, Human
cuuaucaauuugucauuuugaa

SEQ ID NO: 2090412 - RNA, 19 nt, Human
cuuauauaguuuacuauuu

SEQ ID NO: 2090413 - RNA, 21 nt, Human
cuuauccuaaaacaaauaguu

SEQ ID NO: 2090414 - RNA, 20 nt, Human
cuuaucaugcugucuuuaca

SEQ ID NO: 2090415 - RNA, 18 nt, Human
cuuaucacugacacaaaa

SEQ ID NO: 2090416 - RNA, 23 nt, Human
cuuaguucaaguccugccucuua

SEQ ID NO: 2090417 - RNA, 16 nt, Human
cuuauagaauauuuau

SEQ ID NO: 2090418 - RNA, 15 nt, Human
cuuauagaauauuua

SEQ ID NO: 2090419 - RNA, 14 nt, Human
cuuauagaauauuu

SEQ ID NO: 2090420 - RNA, 13 nt, Human
cuuauagaauauu

SEQ ID NO: 2090421 - RNA, 18 nt, Human
cuuauauaguuuacuauu

SEQ ID NO: 2090422 - RNA, 20 nt, Human
cuuauauaguuuacuauuuu

SEQ ID NO: 2090423 - RNA, 20 nt, Human
cuuauagaauauuuauuacc

SEQ ID NO: 2090424 - RNA, 16 nt, Human
cuguggccaaguucuu

SEQ ID NO: 2090425 - RNA, 18 nt, Human
cuguggcaggccagcugu

SEQ ID NO: 2090426 - RNA, 17 nt, Human
cuguggcaucuuugccu

SEQ ID NO: 2090427 - RNA, 23 nt, Human
cuguggcaggccagcugugguuu

SEQ ID NO: 2090428 - RNA, 15 nt, Human
cuguggcaguaaaga

SEQ ID NO: 2090429 - RNA, 20 nt, Human
cuguggcaguaaagagaaac

SEQ ID NO: 2090430 - RNA, 21 nt, Human
cuguggcaguaaagagaaacu

SEQ ID NO: 2090431 - RNA, 23 nt, Human
cuguggcaguaaagagaaacuuu

SEQ ID NO: 2090432 - RNA, 17 nt, Human
cuguggaugauaaaaca

SEQ ID NO: 2090433 - RNA, 19 nt, Human
cuguggaaaaauauuuaag

SEQ ID NO: 2090434 - RNA, 18 nt, Human
cuguggccaaguucuuag

SEQ ID NO: 2090435 - RNA, 22 nt, Human
cuguggccagcuuguuauuuau

SEQ ID NO: 2090436 - RNA, 19 nt, Human
cuguggcaggccagcugug

SEQ ID NO: 2090437 - RNA, 23 nt, Human
cuguggccagcuuguuauuuaua

SEQ ID NO: 2090438 - RNA, 13 nt, Human
cuguggccaaagg

SEQ ID NO: 2090439 - RNA, 13 nt, Human
cuguggccugggc

SEQ ID NO: 2090440 - RNA, 14 nt, Human
cuguggccugggca

SEQ ID NO: 2090441 - RNA, 16 nt, Human
cuguggccugggcaag

SEQ ID NO: 2090442 - RNA, 15 nt, Human
cuguggccuuggucu

SEQ ID NO: 2090443 - RNA, 13 nt, Human
cuguggccuuguu

SEQ ID NO: 2090444 - RNA, 14 nt, Human
cuguggcggugccu

SEQ ID NO: 2090445 - RNA, 15 nt, Human
cuguggcggugccug

SEQ ID NO: 2090446 - RNA, 17 nt, Human
cuguggcugcuagcacu

SEQ ID NO: 2090447 - RNA, 14 nt, Human
cugugggccucaag

SEQ ID NO: 2090448 - RNA, 20 nt, Human
cugugggccucaaggacuug

SEQ ID NO: 2090449 - RNA, 18 nt, Human
cuguggcggugccugggu

SEQ ID NO: 2090450 - RNA, 11 nt, Human
cugugccucug

SEQ ID NO: 2090451 - RNA, 14 nt, Human
cugugccucuggga

SEQ ID NO: 2090452 - RNA, 16 nt, Human
cugugccucugggacu

SEQ ID NO: 2090453 - RNA, 17 nt, Human
cugugccucugggacug

SEQ ID NO: 2090454 - RNA, 18 nt, Human
cugugccucugggacugg

SEQ ID NO: 2090455 - RNA, 14 nt, Human
cuguggaaaaauau

SEQ ID NO: 2090456 - RNA, 18 nt, Human
cuguggaaaaauauuuaa

SEQ ID NO: 2090457 - RNA, 18 nt, Human
cugugccaugugccaggu

SEQ ID NO: 2090458 - RNA, 16 nt, Human
cugugccaugugccag

SEQ ID NO: 2090459 - RNA, 13 nt, Human
cugugccacccac

SEQ ID NO: 2090460 - RNA, 18 nt, Human
cugugccacccaccaggg

SEQ ID NO: 2090461 - RNA, 14 nt, Human
cugugcauggguga

SEQ ID NO: 2090462 - RNA, 17 nt, Human
cugugcaugggugaagg

SEQ ID NO: 2090463 - RNA, 20 nt, Human
cugugcaugggugaagggag

SEQ ID NO: 2090464 - RNA, 22 nt, Human
cugugcaugggugaagggagag

SEQ ID NO: 2090465 - RNA, 23 nt, Human
cugugcaguggcccccacagaaa

SEQ ID NO: 2090466 - RNA, 17 nt, Human
cugugaguuuaaagcaa

SEQ ID NO: 2090467 - RNA, 21 nt, Human
cugugaguguaagugugagua

SEQ ID NO: 2090468 - RNA, 19 nt, Human
cugugaguguaagugugag

SEQ ID NO: 2090469 - RNA, 20 nt, Human
cugugaguguaagugugagu

SEQ ID NO: 2090470 - RNA, 14 nt, Human
cugugaucaagcaa

SEQ ID NO: 2090471 - RNA, 17 nt, Human
cugucuccucucucugu

SEQ ID NO: 2090472 - RNA, 22 nt, Human
cugugaggugcagagugcccag

SEQ ID NO: 2090473 - RNA, 14 nt, Human
cugugaguguaagu

SEQ ID NO: 2090474 - RNA, 18 nt, Human
cugucuccauguuugaug

SEQ ID NO: 2090475 - RNA, 19 nt, Human
cugucuccagacccccacc

SEQ ID NO: 2090476 - RNA, 22 nt, Human
cugucuccagacccccaccccu

SEQ ID NO: 2090477 - RNA, 23 nt, Human
cugugaggugcagagugcccaga

SEQ ID NO: 2090478 - RNA, 13 nt, Human
cugucucaaaaaa

SEQ ID NO: 2090479 - RNA, 19 nt, Human
cugucuccuaccucugcuc

SEQ ID NO: 2090480 - RNA, 15 nt, Human
cugucuccccucugc

SEQ ID NO: 2090481 - RNA, 16 nt, Human
cugucuccccucugcu

SEQ ID NO: 2090482 - RNA, 18 nt, Human
cugucuccccucugcugg

SEQ ID NO: 2090483 - RNA, 20 nt, Human
cugucucccuauaaugcugg

SEQ ID NO: 2090484 - RNA, 23 nt, Human
cugucucaagagggcacuggugg

SEQ ID NO: 2090485 - RNA, 12 nt, Human
cugucucagccu

SEQ ID NO: 2090486 - RNA, 16 nt, Human
cugucucaguuucacu

SEQ ID NO: 2090487 - RNA, 13 nt, Human
cugucuccagacc

SEQ ID NO: 2090488 - RNA, 15 nt, Human
cugucuccagacccc

SEQ ID NO: 2090489 - RNA, 16 nt, Human
cugucuccagaccccc

SEQ ID NO: 2090490 - RNA, 18 nt, Human
cugucuccagacccccac

SEQ ID NO: 2090491 - RNA, 14 nt, Human
cugucucagccucc

SEQ ID NO: 2090492 - RNA, 15 nt, Human
cugucucagccuccc

SEQ ID NO: 2090493 - RNA, 16 nt, Human
cugucucagccuccca

SEQ ID NO: 2090494 - RNA, 17 nt, Human
cugucucagccucccag

SEQ ID NO: 2090495 - RNA, 13 nt, Human
cugugugcugugg

SEQ ID NO: 2090496 - RNA, 21 nt, Human
cugugugcugugguuccuggg

SEQ ID NO: 2090497 - RNA, 18 nt, Human
cuguguggacugugaugc

SEQ ID NO: 2090498 - RNA, 16 nt, Human
cuguguggacugugau

SEQ ID NO: 2090499 - RNA, 13 nt, Human
cugugggcucccu

SEQ ID NO: 2090500 - RNA, 14 nt, Human
cugugggcucccuu

SEQ ID NO: 2090501 - RNA, 15 nt, Human
cugugggcucccuuc

SEQ ID NO: 2090502 - RNA, 18 nt, Human
cugugggcucccuuccuc

SEQ ID NO: 2090503 - RNA, 19 nt, Human
cugugggccucaaggacuu

SEQ ID NO: 2090504 - RNA, 19 nt, Human
cuguggggccuugguuccc

SEQ ID NO: 2090505 - RNA, 20 nt, Human
cuguggggauuucucccagc

SEQ ID NO: 2090506 - RNA, 21 nt, Human
cuguggggauuucucccagcu

SEQ ID NO: 2090507 - RNA, 17 nt, Human
cuguggggauuucuccc

SEQ ID NO: 2090508 - RNA, 18 nt, Human
cuguggggauuucuccca

SEQ ID NO: 2090509 - RNA, 19 nt, Human
cuguggggauuucucccag

SEQ ID NO: 2090510 - RNA, 23 nt, Human
cugugucuugcaauggcagccuu

SEQ ID NO: 2090511 - RNA, 22 nt, Human
cugugucuugcaauggcagccu

SEQ ID NO: 2090512 - RNA, 21 nt, Human
cugugucuugcaauggcagcc

SEQ ID NO: 2090513 - RNA, 20 nt, Human
cugugugugcgccuacagga

SEQ ID NO: 2090514 - RNA, 17 nt, Human
cugugugggacuguaca

SEQ ID NO: 2090515 - RNA, 19 nt, Human
cugugugggacuguacaca

SEQ ID NO: 2090516 - RNA, 21 nt, Human
cugugugggacuguacacacu

SEQ ID NO: 2090517 - RNA, 22 nt, Human
cugugugggacuguacacacuu

SEQ ID NO: 2090518 - RNA, 20 nt, Human
cugugugguuuaguguaaaa

SEQ ID NO: 2090519 - RNA, 23 nt, Human
cugugugguuuaguguaaaaaug

SEQ ID NO: 2090520 - RNA, 18 nt, Human
cugugugugcgccuacag

SEQ ID NO: 2090521 - RNA, 11 nt, Human
cugugugguug

SEQ ID NO: 2090522 - RNA, 21 nt, Human
cuguuccuggcucagccucaa

SEQ ID NO: 2090523 - RNA, 15 nt, Human
cuguuccuucacauc

SEQ ID NO: 2090524 - RNA, 18 nt, Human
cuguuccuucacauccug

SEQ ID NO: 2090525 - RNA, 21 nt, Human
cuguuccuucacauccugugu

SEQ ID NO: 2090526 - RNA, 18 nt, Human
cuguucccauucuugcau

SEQ ID NO: 2090527 - RNA, 18 nt, Human
cuguucccaaauuuucua

SEQ ID NO: 2090528 - RNA, 14 nt, Human
cuguucauuuguua

SEQ ID NO: 2090529 - RNA, 19 nt, Human
cuguucauuuguuauucuu

SEQ ID NO: 2090530 - RNA, 12 nt, Human
cuguucauugua

SEQ ID NO: 2090531 - RNA, 13 nt, Human
cuguucauuguaa

SEQ ID NO: 2090532 - RNA, 14 nt, Human
cuguucauuguaag

SEQ ID NO: 2090533 - RNA, 13 nt, Human
cuguuacugucuu

SEQ ID NO: 2090534 - RNA, 16 nt, Human
cuguucaguaacaggg

SEQ ID NO: 2090535 - RNA, 18 nt, Human
cuguucagcugguugagg

SEQ ID NO: 2090536 - RNA, 19 nt, Human
cuguucagcugguugaggu

SEQ ID NO: 2090537 - RNA, 21 nt, Human
cuguucagcugguugagguuu

SEQ ID NO: 2090538 - RNA, 21 nt, Human
cuguacaauauuuaaaauuua

SEQ ID NO: 2090539 - RNA, 15 nt, Human
cuguacacacuuuau

SEQ ID NO: 2090540 - RNA, 16 nt, Human
cuguacacacuuuauu

SEQ ID NO: 2090541 - RNA, 20 nt, Human
cuguacacacuuuauuuacu

SEQ ID NO: 2090542 - RNA, 14 nt, Human
cuguacaauauuua

SEQ ID NO: 2090543 - RNA, 15 nt, Human
cuguacaauauuuaa

SEQ ID NO: 2090544 - RNA, 16 nt, Human
cuguacaauauuuaaa

SEQ ID NO: 2090545 - RNA, 17 nt, Human
cuguacaauauuuaaaa

SEQ ID NO: 2090546 - RNA, 18 nt, Human
cuguacaauauuuaaaau

SEQ ID NO: 2090547 - RNA, 19 nt, Human
cuguacacugaauauuuau

SEQ ID NO: 2090548 - RNA, 13 nt, Human
cuguaguuaggaa

SEQ ID NO: 2090549 - RNA, 14 nt, Human
cuguaguuaggaaa

SEQ ID NO: 2090550 - RNA, 15 nt, Human
cuguaguuaggaaau

SEQ ID NO: 2090551 - RNA, 23 nt, Human
cuguaguccuagccacucaggag

SEQ ID NO: 2090552 - RNA, 14 nt, Human
cuguagucucagga

SEQ ID NO: 2090553 - RNA, 15 nt, Human
cuguagucucaggac

SEQ ID NO: 2090554 - RNA, 20 nt, Human
cuguagucucaggaccuagg

SEQ ID NO: 2090555 - RNA, 15 nt, Human
cuguagucccagcua

SEQ ID NO: 2090556 - RNA, 18 nt, Human
cuguagucccagcuacuc

SEQ ID NO: 2090557 - RNA, 22 nt, Human
cuguagucccagcuacucagga

SEQ ID NO: 2090558 - RNA, 23 nt, Human
cuguagucccagcuacucaggag

SEQ ID NO: 2090559 - RNA, 22 nt, Human
cuguagucccagcuacucggga

SEQ ID NO: 2090560 - RNA, 20 nt, Human
cuguaguccuagccacucag

SEQ ID NO: 2090561 - RNA, 22 nt, Human
cuguaguccuagccacucagga

SEQ ID NO: 2090562 - RNA, 19 nt, Human
cuguaucaacccagaaaca

SEQ ID NO: 2090563 - RNA, 21 nt, Human
cuguauaccccgugaagcauc

SEQ ID NO: 2090564 - RNA, 17 nt, Human
cuguaguuaggaaauaa

SEQ ID NO: 2090565 - RNA, 18 nt, Human
cuguaguuaggaaauaaa

SEQ ID NO: 2090566 - RNA, 23 nt, Human
cuguaucccaugagccucagcau

SEQ ID NO: 2090567 - RNA, 17 nt, Human
cuguaucggagacagug

SEQ ID NO: 2090568 - RNA, 18 nt, Human
cuguaucggagacaguga

SEQ ID NO: 2090569 - RNA, 13 nt, Human
cuguaucugugua

SEQ ID NO: 2090570 - RNA, 14 nt, Human
cuguaucuguguag

SEQ ID NO: 2090571 - RNA, 18 nt, Human
cuguaucuguguagacua

SEQ ID NO: 2090572 - RNA, 18 nt, Human
cuguaucuuguuuuucca

SEQ ID NO: 2090573 - RNA, 18 nt, Human
cugucaaacaaagccaga

SEQ ID NO: 2090574 - RNA, 19 nt, Human
cugucaaacaaagccagaa

SEQ ID NO: 2090575 - RNA, 22 nt, Human
cugucaaacaaagccagaagcu

SEQ ID NO: 2090576 - RNA, 23 nt, Human
cuguccaggcacugcugcccagc

SEQ ID NO: 2090577 - RNA, 18 nt, Human
cuguccagccugggcagc

SEQ ID NO: 2090578 - RNA, 18 nt, Human
cuguccagagagagaagu

SEQ ID NO: 2090579 - RNA, 13 nt, Human
cuguccagccugg

SEQ ID NO: 2090580 - RNA, 15 nt, Human
cuguccagccugggc

SEQ ID NO: 2090581 - RNA, 17 nt, Human
cuguccagccugggcag

SEQ ID NO: 2090582 - RNA, 15 nt, Human
cugucaaagaaucaa

SEQ ID NO: 2090583 - RNA, 12 nt, Human
cugucaauaaac

SEQ ID NO: 2090584 - RNA, 13 nt, Human
cugucaauaaaca

SEQ ID NO: 2090585 - RNA, 18 nt, Human
cuguccagggcccugagc

SEQ ID NO: 2090586 - RNA, 19 nt, Human
cuguccagggcccugagcu

SEQ ID NO: 2090587 - RNA, 20 nt, Human
cuguccagggcccugagcuc

SEQ ID NO: 2090588 - RNA, 22 nt, Human
cuguccagggcccugagcucgg

SEQ ID NO: 2090589 - RNA, 23 nt, Human
cuguccagggcccugagcucggu

SEQ ID NO: 2090590 - RNA, 16 nt, Human
cugucccucucaggca

SEQ ID NO: 2090591 - RNA, 14 nt, Human
cugucccuggccau

SEQ ID NO: 2090592 - RNA, 16 nt, Human
cugucccuggccaucu

SEQ ID NO: 2090593 - RNA, 17 nt, Human
cugucccuggccaucuc

SEQ ID NO: 2090594 - RNA, 18 nt, Human
cugucccuggccaucucu

SEQ ID NO: 2090595 - RNA, 12 nt, Human
cugucccuguca

SEQ ID NO: 2090596 - RNA, 15 nt, Human
cugucccucucaggc

SEQ ID NO: 2090597 - RNA, 14 nt, Human
cuguccgagcuuug

SEQ ID NO: 2090598 - RNA, 15 nt, Human
cugucccugucacca

SEQ ID NO: 2090599 - RNA, 17 nt, Human
cuguccgcccucuuccc

SEQ ID NO: 2090600 - RNA, 15 nt, Human
cuguccgagcuuuga

SEQ ID NO: 2090601 - RNA, 14 nt, Human
cuguccuacccacc

SEQ ID NO: 2090602 - RNA, 17 nt, Human
cugucccugucaccaag

SEQ ID NO: 2090603 - RNA, 18 nt, Human
cuguccguuuacuccaag

SEQ ID NO: 2090604 - RNA, 17 nt, Human
cuguccucagcuucuua

SEQ ID NO: 2090605 - RNA, 15 nt, Human
cuguccucagcuucu

SEQ ID NO: 2090606 - RNA, 23 nt, Human
cugucucaaaaaaacacaaaagu

SEQ ID NO: 2090607 - RNA, 16 nt, Human
cugucucaaaaaaaga

SEQ ID NO: 2090608 - RNA, 22 nt, Human
cugucucaagagggcacuggug

SEQ ID NO: 2090609 - RNA, 18 nt, Human
cugucucaaaaaaagaaa

SEQ ID NO: 2090610 - RNA, 21 nt, Human
cugucuaggucaguacccacc

SEQ ID NO: 2090611 - RNA, 22 nt, Human
cugucuaggucaguacccaccu

SEQ ID NO: 2090612 - RNA, 23 nt, Human
cugucuaggucaguacccaccug

SEQ ID NO: 2090613 - RNA, 13 nt, Human
cugucuaccaucu

SEQ ID NO: 2090614 - RNA, 14 nt, Human
cugucuaccaucuc

SEQ ID NO: 2090615 - RNA, 15 nt, Human
cugucuaccaucucc

SEQ ID NO: 2090616 - RNA, 17 nt, Human
cugucuaccaucucccu

SEQ ID NO: 2090617 - RNA, 20 nt, Human
cuguaauccuagcacuuugg

SEQ ID NO: 2090618 - RNA, 13 nt, Human
cuguacaaaguag

SEQ ID NO: 2090619 - RNA, 15 nt, Human
cuguacaaaguagaa

SEQ ID NO: 2090620 - RNA, 20 nt, Human
cuguacaaaagggacaugaa

SEQ ID NO: 2090621 - RNA, 22 nt, Human
cuguacaaaagggacaugaaau

SEQ ID NO: 2090622 - RNA, 18 nt, Human
cugguuccggaauccugu

SEQ ID NO: 2090623 - RNA, 23 nt, Human
cuggugggaucugugcccagaga

SEQ ID NO: 2090624 - RNA, 17 nt, Human
cugguuccggaauccug

SEQ ID NO: 2090625 - RNA, 12 nt, Human
cuggugcugcug

SEQ ID NO: 2090626 - RNA, 14 nt, Human
cugguggccucugc

SEQ ID NO: 2090627 - RNA, 15 nt, Human
cugguggccucugcc

SEQ ID NO: 2090628 - RNA, 18 nt, Human
cugguuccugcuagaaau

SEQ ID NO: 2090629 - RNA, 20 nt, Human
cugguuccugcuagaaaugg

SEQ ID NO: 2090630 - RNA, 23 nt, Human
cugguggcccgacagccuggcac

SEQ ID NO: 2090631 - RNA, 22 nt, Human
cugguggcccgacagccuggca

SEQ ID NO: 2090632 - RNA, 21 nt, Human
cugguggcccgacagccuggc

SEQ ID NO: 2090633 - RNA, 20 nt, Human
cugguggcccgacagccugg

SEQ ID NO: 2090634 - RNA, 14 nt, Human
cugguggcagcugc

SEQ ID NO: 2090635 - RNA, 13 nt, Human
cugguggcagcug

SEQ ID NO: 2090636 - RNA, 22 nt, Human
cuggugcugccacacuucaggc

SEQ ID NO: 2090637 - RNA, 20 nt, Human
cuggugcugccacacuucag

SEQ ID NO: 2090638 - RNA, 13 nt, Human
cuggugcugccac

SEQ ID NO: 2090639 - RNA, 12 nt, Human
cuggugcugcca

SEQ ID NO: 2090640 - RNA, 18 nt, Human
cuggucacaggacucugc

SEQ ID NO: 2090641 - RNA, 15 nt, Human
cuggucccugggagg

SEQ ID NO: 2090642 - RNA, 19 nt, Human
cuggucaacuugagcaugu

SEQ ID NO: 2090643 - RNA, 20 nt, Human
cuggucaacuugagcauguu

SEQ ID NO: 2090644 - RNA, 12 nt, Human
cugguauuuccu

SEQ ID NO: 2090645 - RNA, 17 nt, Human
cuggucccuugcagcua

SEQ ID NO: 2090646 - RNA, 21 nt, Human
cuggucccuugcagcuaguuu

SEQ ID NO: 2090647 - RNA, 16 nt, Human
cugggggaagcccugg

SEQ ID NO: 2090648 - RNA, 20 nt, Human
cugggggcagccugcguggc

SEQ ID NO: 2090649 - RNA, 23 nt, Human
cugggggcagccugcguggcuga

SEQ ID NO: 2090650 - RNA, 12 nt, Human
cugggggcagga

SEQ ID NO: 2090651 - RNA, 14 nt, Human
cugggggcaggagg

SEQ ID NO: 2090652 - RNA, 19 nt, Human
cugggggcaggagggcccu

SEQ ID NO: 2090653 - RNA, 15 nt, Human
cugggggaagaagcu

SEQ ID NO: 2090654 - RNA, 17 nt, Human
cugggggaagcccugga

SEQ ID NO: 2090655 - RNA, 14 nt, Human
cugggggaagcccu

SEQ ID NO: 2090656 - RNA, 14 nt, Human
cugggggccaugag

SEQ ID NO: 2090657 - RNA, 16 nt, Human
cugggggccaugagcu

SEQ ID NO: 2090658 - RNA, 17 nt, Human
cugggggccaugagcuc

SEQ ID NO: 2090659 - RNA, 18 nt, Human
cugggggccaugagcucc

SEQ ID NO: 2090660 - RNA, 13 nt, Human
cugggggaagaag

SEQ ID NO: 2090661 - RNA, 24 nt, Human
cugggcuucaguggcagcugcuuu

SEQ ID NO: 2090662 - RNA, 13 nt, Human
cuggcugcaguga

SEQ ID NO: 2090663 - RNA, 12 nt, Human
cuggcugcccag

SEQ ID NO: 2090664 - RNA, 13 nt, Human
cuggcugcccaga

SEQ ID NO: 2090665 - RNA, 18 nt, Human
cuggcugcccagaccccu

SEQ ID NO: 2090666 - RNA, 22 nt, Human
cuggguaacuagggaagauaau

SEQ ID NO: 2090667 - RNA, 20 nt, Human
cuggguaacuagggaagaua

SEQ ID NO: 2090668 - RNA, 16 nt, Human
cuggguacgagggaug

SEQ ID NO: 2090669 - RNA, 14 nt, Human
cuggggugcccucc

SEQ ID NO: 2090670 - RNA, 19 nt, Human
cuggggugcccuccacugc

SEQ ID NO: 2090671 - RNA, 21 nt, Human
cuggggugcccuccacugccc

SEQ ID NO: 2090672 - RNA, 23 nt, Human
cuggggugcccuccacugcccuc

SEQ ID NO: 2090673 - RNA, 19 nt, Human
cugggguccuggggccucg

SEQ ID NO: 2090674 - RNA, 15 nt, Human
cugggguccuggggc

SEQ ID NO: 2090675 - RNA, 18 nt, Human
cugggguccuggggccuc

SEQ ID NO: 2090676 - RNA, 19 nt, Human
cuggcaguggaacuaagaa

SEQ ID NO: 2090677 - RNA, 15 nt, Human
cuggcaguuuuccau

SEQ ID NO: 2090678 - RNA, 14 nt, Human
cuggccagaugcac

SEQ ID NO: 2090679 - RNA, 13 nt, Human
cuggccagaggcu

SEQ ID NO: 2090680 - RNA, 15 nt, Human
cuggcccacugcauc

SEQ ID NO: 2090681 - RNA, 17 nt, Human
cuggccaguuggaacca

SEQ ID NO: 2090682 - RNA, 12 nt, Human
cuggccaucucu

SEQ ID NO: 2090683 - RNA, 13 nt, Human
cuggccaucucug

SEQ ID NO: 2090684 - RNA, 22 nt, Human
cuggccaucucugaacuucagc

SEQ ID NO: 2090685 - RNA, 13 nt, Human
cuggcccagccaa

SEQ ID NO: 2090686 - RNA, 17 nt, Human
cuggcccagccaaaccc

SEQ ID NO: 2090687 - RNA, 20 nt, Human
cuggcccagccaaacccugu

SEQ ID NO: 2090688 - RNA, 23 nt, Human
cuggcccagccaaacccugucug

SEQ ID NO: 2090689 - RNA, 21 nt, Human
cuggcacuuggagacuuguau

SEQ ID NO: 2090690 - RNA, 23 nt, Human
cuggcagaaagcaaaugugaccu

SEQ ID NO: 2090691 - RNA, 21 nt, Human
cuggcagaaagcaaaugugac

SEQ ID NO: 2090692 - RNA, 13 nt, Human
cuggcagaacuga

SEQ ID NO: 2090693 - RNA, 16 nt, Human
cuggcagaacugagcu

SEQ ID NO: 2090694 - RNA, 17 nt, Human
cuggcagaacugagcuc

SEQ ID NO: 2090695 - RNA, 18 nt, Human
cuggcagaacugagcucc

SEQ ID NO: 2090696 - RNA, 19 nt, Human
cuggcagaacugagcuccu

SEQ ID NO: 2090697 - RNA, 20 nt, Human
cuggcagaacugagcuccuc

SEQ ID NO: 2090698 - RNA, 21 nt, Human
cuggcagaacugagcuccucu

SEQ ID NO: 2090699 - RNA, 23 nt, Human
cuggacuccagaucugcaccgcc

SEQ ID NO: 2090700 - RNA, 14 nt, Human
cuggcacuuggaga

SEQ ID NO: 2090701 - RNA, 21 nt, Human
cuggcacuggaugcagaaaca

SEQ ID NO: 2090702 - RNA, 22 nt, Human
cuggcacccggccccugcuggu

SEQ ID NO: 2090703 - RNA, 17 nt, Human
cuggcacauuuccccag

SEQ ID NO: 2090704 - RNA, 19 nt, Human
cuggcacauuuccccagac

SEQ ID NO: 2090705 - RNA, 22 nt, Human
cuggcacauuuccccagaccug

SEQ ID NO: 2090706 - RNA, 23 nt, Human
cuggcacauuuccccagaccuga

SEQ ID NO: 2090707 - RNA, 20 nt, Human
cuggagugcagugagccgag

SEQ ID NO: 2090708 - RNA, 19 nt, Human
cuggcacccggccccugcu

SEQ ID NO: 2090709 - RNA, 21 nt, Human
cuggcacccggccccugcugg

SEQ ID NO: 2090710 - RNA, 20 nt, Human
cuggcacccggccccugcug

SEQ ID NO: 2090711 - RNA, 15 nt, Human
cuggcgugcaguggu

SEQ ID NO: 2090712 - RNA, 14 nt, Human
cuggcgugcagugg

SEQ ID NO: 2090713 - RNA, 13 nt, Human
cuggcgucugucu

SEQ ID NO: 2090714 - RNA, 14 nt, Human
cuggcgucugucuu

SEQ ID NO: 2090715 - RNA, 19 nt, Human
cuggccuugaaaccaccuu

SEQ ID NO: 2090716 - RNA, 16 nt, Human
cuggcggcuacucagc

SEQ ID NO: 2090717 - RNA, 17 nt, Human
cuggcggcuacucagca

SEQ ID NO: 2090718 - RNA, 18 nt, Human
cuggcggcuacucagcag

SEQ ID NO: 2090719 - RNA, 20 nt, Human
cuggcggcuacucagcagcc

SEQ ID NO: 2090720 - RNA, 22 nt, Human
cuggcggcuacucagcagcccu

SEQ ID NO: 2090721 - RNA, 23 nt, Human
cuggcggcuacucagcagcccuc

SEQ ID NO: 2090722 - RNA, 13 nt, Human
cuggcgugugggu

SEQ ID NO: 2090723 - RNA, 15 nt, Human
cuggcgucugucuuc

SEQ ID NO: 2090724 - RNA, 22 nt, Human
cuggcgucugucuucaagggcu

SEQ ID NO: 2090725 - RNA, 23 nt, Human
cuggcgucugucuucaagggcuu

SEQ ID NO: 2090726 - RNA, 16 nt, Human
cuggcuaacuggaagc

SEQ ID NO: 2090727 - RNA, 20 nt, Human
cuggcuagaggccagcccca

SEQ ID NO: 2090728 - RNA, 21 nt, Human
cuggcuagaggccagccccac

SEQ ID NO: 2090729 - RNA, 22 nt, Human
cuggcuagaggccagccccacc

SEQ ID NO: 2090730 - RNA, 23 nt, Human
cuggcuagaggccagccccaccc

SEQ ID NO: 2090731 - RNA, 17 nt, Human
cuggcuaacuggaagca

SEQ ID NO: 2090732 - RNA, 21 nt, Human
cuggcugaggauuucaagccu

SEQ ID NO: 2090733 - RNA, 22 nt, Human
cuggcugaggauuucaagccug

SEQ ID NO: 2090734 - RNA, 22 nt, Human
cugcuucccucugccugucccu

SEQ ID NO: 2090735 - RNA, 23 nt, Human
cugcuucccucugccugucccuc

SEQ ID NO: 2090736 - RNA, 14 nt, Human
cugcuucccucugc

SEQ ID NO: 2090737 - RNA, 18 nt, Human
cugcuucccucugccugu

SEQ ID NO: 2090738 - RNA, 20 nt, Human
cugcuucccucugccugucc

SEQ ID NO: 2090739 - RNA, 21 nt, Human
cugcuucccucugccuguccc

SEQ ID NO: 2090740 - RNA, 13 nt, Human
cuggaauuuuuau

SEQ ID NO: 2090741 - RNA, 20 nt, Human
cuggaauuuuuauuaugcau

SEQ ID NO: 2090742 - RNA, 15 nt, Human
cuggaauuuuuuauu

SEQ ID NO: 2090743 - RNA, 17 nt, Human
cuggaauuuuuuauucu

SEQ ID NO: 2090744 - RNA, 18 nt, Human
cuggaauuuuuuauucuu

SEQ ID NO: 2090745 - RNA, 20 nt, Human
cuggaauuuuuuauucuugu

SEQ ID NO: 2090746 - RNA, 21 nt, Human
cuggaauuuuuuauucuugug

SEQ ID NO: 2090747 - RNA, 13 nt, Human
cuggacaggucug

SEQ ID NO: 2090748 - RNA, 14 nt, Human
cuggacaggucugg

SEQ ID NO: 2090749 - RNA, 15 nt, Human
cuggacaggucuggg

SEQ ID NO: 2090750 - RNA, 16 nt, Human
cuggacaggucuggga

SEQ ID NO: 2090751 - RNA, 18 nt, Human
cuggacaggucugggaga

SEQ ID NO: 2090752 - RNA, 17 nt, Human
cuggacaggcauguucu

SEQ ID NO: 2090753 - RNA, 14 nt, Human
cuggacaggcaugu

SEQ ID NO: 2090754 - RNA, 23 nt, Human
cuggacaggcauguucucugagg

SEQ ID NO: 2090755 - RNA, 21 nt, Human
cuggaccuugaacuggguacu

SEQ ID NO: 2090756 - RNA, 20 nt, Human
cuggaccuugaacuggguac

SEQ ID NO: 2090757 - RNA, 17 nt, Human
cuggaccuugaacuggg

SEQ ID NO: 2090758 - RNA, 17 nt, Human
cuggacuccucugucca

SEQ ID NO: 2090759 - RNA, 14 nt, Human
cuggacuccucugu

SEQ ID NO: 2090760 - RNA, 19 nt, Human
cuggacuccucuguccagg

SEQ ID NO: 2090761 - RNA, 18 nt, Human
cuggacuccucuguccag

SEQ ID NO: 2090762 - RNA, 15 nt, Human
cuggagaucaccagu

SEQ ID NO: 2090763 - RNA, 15 nt, Human
cuggacccuguggau

SEQ ID NO: 2090764 - RNA, 16 nt, Human
cuggaccuugaacugg

SEQ ID NO: 2090765 - RNA, 13 nt, Human
cuggaccucacca

SEQ ID NO: 2090766 - RNA, 17 nt, Human
cuggagugcagugagcc

SEQ ID NO: 2090767 - RNA, 16 nt, Human
cuggagugcagugagc

SEQ ID NO: 2090768 - RNA, 15 nt, Human
cuggagugcagugag

SEQ ID NO: 2090769 - RNA, 14 nt, Human
cuggagugcaguga

SEQ ID NO: 2090770 - RNA, 15 nt, Human
cuggagucaaaacac

SEQ ID NO: 2090771 - RNA, 15 nt, Human
cuggaguccagucuc

SEQ ID NO: 2090772 - RNA, 14 nt, Human
cuggagucccugug

SEQ ID NO: 2090773 - RNA, 16 nt, Human
cuggaguccagucucu

SEQ ID NO: 2090774 - RNA, 16 nt, Human
cuggaggggagcucug

SEQ ID NO: 2090775 - RNA, 21 nt, Human
cuggaggggagcucugucugu

SEQ ID NO: 2090776 - RNA, 14 nt, Human
cuggaggggcaugg

SEQ ID NO: 2090777 - RNA, 22 nt, Human
cuggaggggcauggccagcagc

SEQ ID NO: 2090778 - RNA, 23 nt, Human
cuggaggggcauggccagcagcu

SEQ ID NO: 2090779 - RNA, 12 nt, Human
cuggaggcaggg

SEQ ID NO: 2090780 - RNA, 11 nt, Human
cuggagcuggc

SEQ ID NO: 2090781 - RNA, 13 nt, Human
cuggaggcagggc

SEQ ID NO: 2090782 - RNA, 14 nt, Human
cuggaggcagggcc

SEQ ID NO: 2090783 - RNA, 15 nt, Human
cuggaggcagggccu

SEQ ID NO: 2090784 - RNA, 15 nt, Human
cuggaggggacgcug

SEQ ID NO: 2090785 - RNA, 16 nt, Human
cuggaggggacgcugg

SEQ ID NO: 2090786 - RNA, 21 nt, Human
cuggaggggacgcugguagag

SEQ ID NO: 2090787 - RNA, 23 nt, Human
cuggaggcagggccuugcccaga

SEQ ID NO: 2090788 - RNA, 16 nt, Human
cuggaggcagggccuu

SEQ ID NO: 2090789 - RNA, 19 nt, Human
cuggaggcagggccuugcc

SEQ ID NO: 2090790 - RNA, 20 nt, Human
cuggaggcagggccuugccc

SEQ ID NO: 2090791 - RNA, 22 nt, Human
cuggaggcagggccuugcccag

SEQ ID NO: 2090792 - RNA, 15 nt, Human
cuggagauggggaga

SEQ ID NO: 2090793 - RNA, 18 nt, Human
cuggagauggggagaaac

SEQ ID NO: 2090794 - RNA, 12 nt, Human
cuggagcccagg

SEQ ID NO: 2090795 - RNA, 13 nt, Human
cuggagcccagga

SEQ ID NO: 2090796 - RNA, 13 nt, Human
cuggagccccauc

SEQ ID NO: 2090797 - RNA, 14 nt, Human
cuggagcccaggga

SEQ ID NO: 2090798 - RNA, 12 nt, Human
cuggagccccac

SEQ ID NO: 2090799 - RNA, 16 nt, Human
cuggagccccacugcc

SEQ ID NO: 2090800 - RNA, 23 nt, Human
cuggagccccacugcccuucuca

SEQ ID NO: 2090801 - RNA, 13 nt, Human
cuggagcccaggg

SEQ ID NO: 2090802 - RNA, 15 nt, Human
cuggagcccaggagu

SEQ ID NO: 2090803 - RNA, 15 nt, Human
cuggagcccuugggu

SEQ ID NO: 2090804 - RNA, 23 nt, Human
cuggagccuccacugccucugga

SEQ ID NO: 2090805 - RNA, 17 nt, Human
cuggagcccgaggcacc

SEQ ID NO: 2090806 - RNA, 20 nt, Human
cuggagcccgaggcaccagu

SEQ ID NO: 2090807 - RNA, 15 nt, Human
cugccgaccagagcc

SEQ ID NO: 2090808 - RNA, 16 nt, Human
cugccgaccagagccc

SEQ ID NO: 2090809 - RNA, 16 nt, Human
cugccgaccgaggcug

SEQ ID NO: 2090810 - RNA, 21 nt, Human
cugccgaccgaggcuggagcu

SEQ ID NO: 2090811 - RNA, 22 nt, Human
cugccgaccgaggcuggagcug

SEQ ID NO: 2090812 - RNA, 20 nt, Human
cugccgacacgcucccuccc

SEQ ID NO: 2090813 - RNA, 13 nt, Human
cugccgaccagag

SEQ ID NO: 2090814 - RNA, 23 nt, Human
cugcccuugucccacucaagcca

SEQ ID NO: 2090815 - RNA, 15 nt, Human
cugcccuugucccac

SEQ ID NO: 2090816 - RNA, 17 nt, Human
cugcccuugucccacuc

SEQ ID NO: 2090817 - RNA, 18 nt, Human
cugcccuugucccacuca

SEQ ID NO: 2090818 - RNA, 23 nt, Human
cugccgaccgaggcuggagcugg

SEQ ID NO: 2090819 - RNA, 15 nt, Human
cugccgaccucgucc

SEQ ID NO: 2090820 - RNA, 17 nt, Human
cugccgaccucguccuc

SEQ ID NO: 2090821 - RNA, 19 nt, Human
cugccgaccucguccuccc

SEQ ID NO: 2090822 - RNA, 14 nt, Human
cugccggcucuggc

SEQ ID NO: 2090823 - RNA, 17 nt, Human
cugccggcucuggcucu

SEQ ID NO: 2090824 - RNA, 23 nt, Human
cugccgguucuuaaauccauccu

SEQ ID NO: 2090825 - RNA, 11 nt, Human
cugcccugcug

SEQ ID NO: 2090826 - RNA, 21 nt, Human
cugcccugcugccgccuccca

SEQ ID NO: 2090827 - RNA, 22 nt, Human
cugcccugcugccgccucccag

SEQ ID NO: 2090828 - RNA, 21 nt, Human
cugcccuucagcauccucagu

SEQ ID NO: 2090829 - RNA, 18 nt, Human
cugcccuaggcuccguca

SEQ ID NO: 2090830 - RNA, 13 nt, Human
cucccuggccugu

SEQ ID NO: 2090831 - RNA, 19 nt, Human
cugcccuagagcacacugu

SEQ ID NO: 2090832 - RNA, 21 nt, Human
cugcccuagagcacacuguag

SEQ ID NO: 2090833 - RNA, 15 nt, Human
cugcccuagcuccac

SEQ ID NO: 2090834 - RNA, 16 nt, Human
cugcccuagcuccaca

SEQ ID NO: 2090835 - RNA, 22 nt, Human
cugcccuagcuccacacccucu

SEQ ID NO: 2090836 - RNA, 12 nt, Human
cugcccuaggcu

SEQ ID NO: 2090837 - RNA, 22 nt, Human
cugccuccccaacccugccccu

SEQ ID NO: 2090838 - RNA, 14 nt, Human
cugccucugccugc

SEQ ID NO: 2090839 - RNA, 17 nt, Human
cugccucugccugcauu

SEQ ID NO: 2090840 - RNA, 20 nt, Human
cugccucugccugcauucug

SEQ ID NO: 2090841 - RNA, 15 nt, Human
cugccucuucucuac

SEQ ID NO: 2090842 - RNA, 17 nt, Human
cugccugcccaggcccc

SEQ ID NO: 2090843 - RNA, 16 nt, Human
cugccugcccaggccc

SEQ ID NO: 2090844 - RNA, 15 nt, Human
cugccugaagucaca

SEQ ID NO: 2090845 - RNA, 20 nt, Human
cugccugcccaggccccugc

SEQ ID NO: 2090846 - RNA, 18 nt, Human
cugccucugccugcauuc

SEQ ID NO: 2090847 - RNA, 17 nt, Human
cugccugaaccuuccau

SEQ ID NO: 2090848 - RNA, 12 nt, Human
cugccuggccag

SEQ ID NO: 2090849 - RNA, 13 nt, Human
cugccuggccagg

SEQ ID NO: 2090850 - RNA, 15 nt, Human
cugccuggccaggca

SEQ ID NO: 2090851 - RNA, 21 nt, Human
cugccuggccaggcagaucug

SEQ ID NO: 2090852 - RNA, 16 nt, Human
cugccuggccaggcag

SEQ ID NO: 2090853 - RNA, 17 nt, Human
cugccuggccaggcaga

SEQ ID NO: 2090854 - RNA, 14 nt, Human
cugccuggccccca

SEQ ID NO: 2090855 - RNA, 16 nt, Human
cugccuggcccccagc

SEQ ID NO: 2090856 - RNA, 20 nt, Human
cugccuggcccccagcugug

SEQ ID NO: 2090857 - RNA, 23 nt, Human
cugccuuggacuguguuuuuccu

SEQ ID NO: 2090858 - RNA, 15 nt, Human
cugccuaagaggcaa

SEQ ID NO: 2090859 - RNA, 18 nt, Human
cugccuccauucugacca

SEQ ID NO: 2090860 - RNA, 12 nt, Human
cugccuccccaa

SEQ ID NO: 2090861 - RNA, 14 nt, Human
cugccuccccaacc

SEQ ID NO: 2090862 - RNA, 15 nt, Human
cugccuccccaaccc

SEQ ID NO: 2090863 - RNA, 16 nt, Human
cugccuccccaacccu

SEQ ID NO: 2090864 - RNA, 18 nt, Human
cugccuccccaacccugc

SEQ ID NO: 2090865 - RNA, 19 nt, Human
cugccuccccaacccugcc

SEQ ID NO: 2090866 - RNA, 23 nt, Human
cugccucugacacacagcucugu

SEQ ID NO: 2090867 - RNA, 22 nt, Human
cugccucugacacacagcucug

SEQ ID NO: 2090868 - RNA, 15 nt, Human
cugccucugacacac

SEQ ID NO: 2090869 - RNA, 14 nt, Human
cugccgugugcccu

SEQ ID NO: 2090870 - RNA, 13 nt, Human
cugccuaagcccu

SEQ ID NO: 2090871 - RNA, 20 nt, Human
cugccuuuagucgcugagga

SEQ ID NO: 2090872 - RNA, 19 nt, Human
cugcuccagcuguucagcu

SEQ ID NO: 2090873 - RNA, 20 nt, Human
cugcuccagcuguucagcug

SEQ ID NO: 2090874 - RNA, 20 nt, Human
cugcucuccucuugccacug

SEQ ID NO: 2090875 - RNA, 14 nt, Human
cugcucuccucuug

SEQ ID NO: 2090876 - RNA, 19 nt, Human
cugcucuccgaccagacac

SEQ ID NO: 2090877 - RNA, 12 nt, Human
cugcuccuccag

SEQ ID NO: 2090878 - RNA, 11 nt, Human
cugcuccucca

SEQ ID NO: 2090879 - RNA, 13 nt, Human
cugcuccucaugg

SEQ ID NO: 2090880 - RNA, 14 nt, Human
cugcuccucauggu

SEQ ID NO: 2090881 - RNA, 13 nt, Human
cugcuccuccagg

SEQ ID NO: 2090882 - RNA, 14 nt, Human
cugcuccuccaggg

SEQ ID NO: 2090883 - RNA, 16 nt, Human
cugcuccuccagggcc

SEQ ID NO: 2090884 - RNA, 17 nt, Human
cugcuccuccagggcca

SEQ ID NO: 2090885 - RNA, 22 nt, Human
cugcuccuccagggccacgugc

SEQ ID NO: 2090886 - RNA, 24 nt, Human
cugcuccuccagggccacgugcca

SEQ ID NO: 2090887 - RNA, 22 nt, Human
cugcugccauggcgugucccuc

SEQ ID NO: 2090888 - RNA, 16 nt, Human
cugcugcauggggugg

SEQ ID NO: 2090889 - RNA, 12 nt, Human
cugcugcccucc

SEQ ID NO: 2090890 - RNA, 17 nt, Human
cugcugcccuccauccc

SEQ ID NO: 2090891 - RNA, 13 nt, Human
cugcugcccucca

SEQ ID NO: 2090892 - RNA, 14 nt, Human
cugcugcccuccau

SEQ ID NO: 2090893 - RNA, 22 nt, Human
cugcugcccagccuccaagcuc

SEQ ID NO: 2090894 - RNA, 16 nt, Human
cugcugccccaaagga

SEQ ID NO: 2090895 - RNA, 18 nt, Human
cugcugccccaaaggaag

SEQ ID NO: 2090896 - RNA, 19 nt, Human
cugcugccccaaaggaagc

SEQ ID NO: 2090897 - RNA, 15 nt, Human
cugcugcccagccuc

SEQ ID NO: 2090898 - RNA, 12 nt, Human
cugcugcccagc

SEQ ID NO: 2090899 - RNA, 18 nt, Human
cugcugaaggaauaaauu

SEQ ID NO: 2090900 - RNA, 17 nt, Human
cugcugaaggaauaaau

SEQ ID NO: 2090901 - RNA, 21 nt, Human
cugcucuccucuugccacugc

SEQ ID NO: 2090902 - RNA, 23 nt, Human
cugcugguucaggguuggccccu

SEQ ID NO: 2090903 - RNA, 15 nt, Human
cugcugguucagggu

SEQ ID NO: 2090904 - RNA, 13 nt, Human
cugcugguucagg

SEQ ID NO: 2090905 - RNA, 16 nt, Human
cugcugggcucuccac

SEQ ID NO: 2090906 - RNA, 17 nt, Human
cugcugggcucuccacc

SEQ ID NO: 2090907 - RNA, 18 nt, Human
cugcugggcucuccaccu

SEQ ID NO: 2090908 - RNA, 19 nt, Human
cugcugggcucuccaccuc

SEQ ID NO: 2090909 - RNA, 21 nt, Human
cugcugggcucuccaccucag

SEQ ID NO: 2090910 - RNA, 22 nt, Human
cugcugggcucuccaccucagc

SEQ ID NO: 2090911 - RNA, 23 nt, Human
cugcugggcucuccaccucagcc

SEQ ID NO: 2090912 - RNA, 21 nt, Human
cugcugcuaaucuucagggca

SEQ ID NO: 2090913 - RNA, 14 nt, Human
cugcugccgccucc

SEQ ID NO: 2090914 - RNA, 17 nt, Human
cugcugccgccucccag

SEQ ID NO: 2090915 - RNA, 19 nt, Human
cugcugccgccucccagcc

SEQ ID NO: 2090916 - RNA, 20 nt, Human
cugcugccgccucccagccu

SEQ ID NO: 2090917 - RNA, 16 nt, Human
cugcuggccgggcaca

SEQ ID NO: 2090918 - RNA, 17 nt, Human
cugcuggccgggcacag

SEQ ID NO: 2090919 - RNA, 18 nt, Human
cugcuggccgggcacagc

SEQ ID NO: 2090920 - RNA, 19 nt, Human
cugcuggccgggcacagcu

SEQ ID NO: 2090921 - RNA, 20 nt, Human
cugcuggccgggcacagcug

SEQ ID NO: 2090922 - RNA, 21 nt, Human
cugcuggccgggcacagcugu

SEQ ID NO: 2090923 - RNA, 11 nt, Human
cugcuggcccc

SEQ ID NO: 2090924 - RNA, 14 nt, Human
cugcuggccccuca

SEQ ID NO: 2090925 - RNA, 15 nt, Human
cugcuggccccucac

SEQ ID NO: 2090926 - RNA, 16 nt, Human
cugcuggccccucacc

SEQ ID NO: 2090927 - RNA, 17 nt, Human
cugcuggccccucaccu

SEQ ID NO: 2090928 - RNA, 23 nt, Human
cugcuggccccucaccugggcac

SEQ ID NO: 2090929 - RNA, 15 nt, Human
cugcuggcccagcca

SEQ ID NO: 2090930 - RNA, 16 nt, Human
cugcuggcccagccaa

SEQ ID NO: 2090931 - RNA, 22 nt, Human
cugcuggcccagccaaacccug

SEQ ID NO: 2090932 - RNA, 13 nt, Human
cugcugcuucuua

SEQ ID NO: 2090933 - RNA, 19 nt, Human
cugcuggaucucccagggc

SEQ ID NO: 2090934 - RNA, 20 nt, Human
cugcuggaucucccagggcu

SEQ ID NO: 2090935 - RNA, 21 nt, Human
cugcuggcacauuuccccaga

SEQ ID NO: 2090936 - RNA, 11 nt, Human
cugcuggagga

SEQ ID NO: 2090937 - RNA, 21 nt, Human
gagccagcagccuggcucucc

SEQ ID NO: 2090938 - RNA, 14 nt, Human
gagccaaagagaau

SEQ ID NO: 2090939 - RNA, 12 nt, Human
gagccagcccuc

SEQ ID NO: 2090940 - RNA, 13 nt, Human
gagccagcccucc

SEQ ID NO: 2090941 - RNA, 14 nt, Human
gagccagcccuccc

SEQ ID NO: 2090942 - RNA, 14 nt, Human
gagccagggucuca

SEQ ID NO: 2090943 - RNA, 19 nt, Human
gagccagggucucacuaug

SEQ ID NO: 2090944 - RNA, 15 nt, Human
gagccagcccucccu

SEQ ID NO: 2090945 - RNA, 16 nt, Human
gagccagcccucccug

SEQ ID NO: 2090946 - RNA, 19 nt, Human
gagccagucuaguuccuga

SEQ ID NO: 2090947 - RNA, 23 nt, Human
gagcccaggaguucgaggcugca

SEQ ID NO: 2090948 - RNA, 18 nt, Human
gagcccugguggcagugg

SEQ ID NO: 2090949 - RNA, 20 nt, Human
gagcccagcccuguucuggg

SEQ ID NO: 2090950 - RNA, 11 nt, Human
gagcccaggag

SEQ ID NO: 2090951 - RNA, 12 nt, Human
gagcccaggagu

SEQ ID NO: 2090952 - RNA, 22 nt, Human
gagcccagccauuaccauggag

SEQ ID NO: 2090953 - RNA, 17 nt, Human
gagcccagcccuguucu

SEQ ID NO: 2090954 - RNA, 18 nt, Human
gagcccagcccuguucug

SEQ ID NO: 2090955 - RNA, 18 nt, Human
gagcagcggacuucaaaa

SEQ ID NO: 2090956 - RNA, 18 nt, Human
gagcagcgguuuggggag

SEQ ID NO: 2090957 - RNA, 16 nt, Human
gagcagagaauucucu

SEQ ID NO: 2090958 - RNA, 23 nt, Human
gagcagacuggugagcagacugg

SEQ ID NO: 2090959 - RNA, 15 nt, Human
gagcagacugguggg

SEQ ID NO: 2090960 - RNA, 12 nt, Human
gagcagagaagg

SEQ ID NO: 2090961 - RNA, 17 nt, Human
gagcagagaaggccagg

SEQ ID NO: 2090962 - RNA, 12 nt, Human
gagcagagacac

SEQ ID NO: 2090963 - RNA, 13 nt, Human
gagcagagacacu

SEQ ID NO: 2090964 - RNA, 21 nt, Human
gagcagagacacuaacgacuu

SEQ ID NO: 2090965 - RNA, 24 nt, Human
gagcagagacaugacucagccugu

SEQ ID NO: 2090966 - RNA, 19 nt, Human
gagccaauuuaaagaaaac

SEQ ID NO: 2090967 - RNA, 19 nt, Human
gagccaaggguucagagac

SEQ ID NO: 2090968 - RNA, 23 nt, Human
gagccaaggguucagagacucag

SEQ ID NO: 2090969 - RNA, 22 nt, Human
gagccaauggaguagaccccug

SEQ ID NO: 2090970 - RNA, 19 nt, Human
gagcauuguggcugucagc

SEQ ID NO: 2090971 - RNA, 17 nt, Human
gagcauuuagggcaagg

SEQ ID NO: 2090972 - RNA, 20 nt, Human
gagccaacagaagcuuccau

SEQ ID NO: 2090973 - RNA, 15 nt, Human
gagcacuaaggugug

SEQ ID NO: 2090974 - RNA, 21 nt, Human
gagcacuaaggugugcucuga

SEQ ID NO: 2090975 - RNA, 18 nt, Human
gagcagacuggugagcag

SEQ ID NO: 2090976 - RNA, 19 nt, Human
gagcagacuggugagcaga

SEQ ID NO: 2090977 - RNA, 20 nt, Human
gagcagacuggugagcagac

SEQ ID NO: 2090978 - RNA, 21 nt, Human
gagcacucugaguuuaccauu

SEQ ID NO: 2090979 - RNA, 18 nt, Human
gagcacaaaagccucuca

SEQ ID NO: 2090980 - RNA, 20 nt, Human
gagcaagcauuuauguuuau

SEQ ID NO: 2090981 - RNA, 13 nt, Human
gagcaagcuuuuu

SEQ ID NO: 2090982 - RNA, 17 nt, Human
gagcaagcuuuuuuauu

SEQ ID NO: 2090983 - RNA, 14 nt, Human
gagcaagacucugu

SEQ ID NO: 2090984 - RNA, 12 nt, Human
gagcaagacucu

SEQ ID NO: 2090985 - RNA, 18 nt, Human
gagcaagacccugucucu

SEQ ID NO: 2090986 - RNA, 20 nt, Human
gagcaacagagugagacccu

SEQ ID NO: 2090987 - RNA, 23 nt, Human
gagaucaaccccuucgcuccugu

SEQ ID NO: 2090988 - RNA, 16 nt, Human
gagauagaagaacugc

SEQ ID NO: 2090989 - RNA, 19 nt, Human
gagaucacgccacugcacu

SEQ ID NO: 2090990 - RNA, 20 nt, Human
gagaucacgccacugcacuc

SEQ ID NO: 2090991 - RNA, 18 nt, Human
gagaucacgccacugcac

SEQ ID NO: 2090992 - RNA, 21 nt, Human
gagaucaccaguguguggcuu

SEQ ID NO: 2090993 - RNA, 16 nt, Human
gagaucacgccacugc

SEQ ID NO: 2090994 - RNA, 21 nt, Human
gagaugacugaguccucguag

SEQ ID NO: 2090995 - RNA, 22 nt, Human
gagcaaaggggucccauagagg

SEQ ID NO: 2090996 - RNA, 20 nt, Human
gagcaaagugaagacacugg

SEQ ID NO: 2090997 - RNA, 20 nt, Human
gagaugaagcaaacacauua

SEQ ID NO: 2090998 - RNA, 16 nt, Human
gagaugaauuaaauuu

SEQ ID NO: 2090999 - RNA, 13 nt, Human
gagaugacugagu

SEQ ID NO: 2091000 - RNA, 16 nt, Human
gagaugacugaguccu

SEQ ID NO: 2091001 - RNA, 18 nt, Human
gagaugaagcaaacacau

SEQ ID NO: 2091002 - RNA, 15 nt, Human
gagaugaagcaaaca

SEQ ID NO: 2091003 - RNA, 12 nt, Human
gagaucaugaga

SEQ ID NO: 2091004 - RNA, 14 nt, Human
gagaucaugagaaa

SEQ ID NO: 2091005 - RNA, 17 nt, Human
gagaucccgccucuucu

SEQ ID NO: 2091006 - RNA, 18 nt, Human
gagauccagggcaaggcc

SEQ ID NO: 2091007 - RNA, 22 nt, Human
gagacaggguuuugccauguug

SEQ ID NO: 2091008 - RNA, 14 nt, Human
gagacaggguccug

SEQ ID NO: 2091009 - RNA, 17 nt, Human
gagacagugaucuccau

SEQ ID NO: 2091010 - RNA, 15 nt, Human
gagaauggaaaacag

SEQ ID NO: 2091011 - RNA, 19 nt, Human
gagaauggcuuuggucucu

SEQ ID NO: 2091012 - RNA, 20 nt, Human
gagaauggcgugaacccggg

SEQ ID NO: 2091013 - RNA, 16 nt, Human
gagaauguuauaguga

SEQ ID NO: 2091014 - RNA, 17 nt, Human
gagaauguuauagugaa

SEQ ID NO: 2091015 - RNA, 15 nt, Human
gagaauucagcugcc

SEQ ID NO: 2091016 - RNA, 16 nt, Human
gagaauucagcugccc

SEQ ID NO: 2091017 - RNA, 21 nt, Human
gagaauguagauauugugaag

SEQ ID NO: 2091018 - RNA, 19 nt, Human
gagacaggaaaauccucug

SEQ ID NO: 2091019 - RNA, 20 nt, Human
gagacaggaaaauccucugg

SEQ ID NO: 2091020 - RNA, 21 nt, Human
gagacaggaaaauccucuggc

SEQ ID NO: 2091021 - RNA, 16 nt, Human
gagacaggaccugacu

SEQ ID NO: 2091022 - RNA, 13 nt, Human
gagacuguagauu

SEQ ID NO: 2091023 - RNA, 23 nt, Human
gagacuguagauugcuucuguag

SEQ ID NO: 2091024 - RNA, 11 nt, Human
gagagaaagaa

SEQ ID NO: 2091025 - RNA, 22 nt, Human
gagagaaagugugagcaaacua

SEQ ID NO: 2091026 - RNA, 21 nt, Human
gagacugggaagauaggcucu

SEQ ID NO: 2091027 - RNA, 13 nt, Human
gagacugggaaga

SEQ ID NO: 2091028 - RNA, 13 nt, Human
gagacucugucuc

SEQ ID NO: 2091029 - RNA, 13 nt, Human
gagaguggcuccu

SEQ ID NO: 2091030 - RNA, 18 nt, Human
gagaguagccgagagccu

SEQ ID NO: 2091031 - RNA, 20 nt, Human
gagaguagccgagagccugc

SEQ ID NO: 2091032 - RNA, 21 nt, Human
gagaguagccgagagccugcu

SEQ ID NO: 2091033 - RNA, 22 nt, Human
gagaguagccgagagccugcuc

SEQ ID NO: 2091034 - RNA, 22 nt, Human
gagaguuaaucaacugaaagug

SEQ ID NO: 2091035 - RNA, 21 nt, Human
gagagugucuucacggcagga

SEQ ID NO: 2091036 - RNA, 20 nt, Human
gagagugugaaauagacauu

SEQ ID NO: 2091037 - RNA, 21 nt, Human
gagaguggcuccucccggugc

SEQ ID NO: 2091038 - RNA, 16 nt, Human
gagaguggcuccuccc

SEQ ID NO: 2091039 - RNA, 20 nt, Human
gagagagcugagugagcuga

SEQ ID NO: 2091040 - RNA, 18 nt, Human
gagagggggccaccuccc

SEQ ID NO: 2091041 - RNA, 13 nt, Human
gagagggucugga

SEQ ID NO: 2091042 - RNA, 18 nt, Human
gagagggucuggagaagc

SEQ ID NO: 2091043 - RNA, 19 nt, Human
gagaggggaacagacugga

SEQ ID NO: 2091044 - RNA, 22 nt, Human
gagagccugcucccccaccccc

SEQ ID NO: 2091045 - RNA, 21 nt, Human
gagaggggaauaauagaagaa

SEQ ID NO: 2091046 - RNA, 13 nt, Human
gagaggggcacag

SEQ ID NO: 2091047 - RNA, 16 nt, Human
gagagcccuucauuug

SEQ ID NO: 2091048 - RNA, 14 nt, Human
gagagccugcuccc

SEQ ID NO: 2091049 - RNA, 17 nt, Human
gagagccugcuccccca

SEQ ID NO: 2091050 - RNA, 21 nt, Human
gagagccugcucccccacccc

SEQ ID NO: 2091051 - RNA, 15 nt, Human
gagagaucaugagaa

SEQ ID NO: 2091052 - RNA, 13 nt, Human
gagagaucugcug

SEQ ID NO: 2091053 - RNA, 16 nt, Human
gagagaucugcuguca

SEQ ID NO: 2091054 - RNA, 22 nt, Human
gagagcaagggaagugguucuu

SEQ ID NO: 2091055 - RNA, 14 nt, Human
gagagacccaagga

SEQ ID NO: 2091056 - RNA, 15 nt, Human
gagagacccaaggag

SEQ ID NO: 2091057 - RNA, 19 nt, Human
gagagacccaaggaggaaa

SEQ ID NO: 2091058 - RNA, 20 nt, Human
gagagacccaaggaggaaaa

SEQ ID NO: 2091059 - RNA, 23 nt, Human
gagagagaagugccccugcugcc

SEQ ID NO: 2091060 - RNA, 13 nt, Human
gagagagagaggu

SEQ ID NO: 2091061 - RNA, 22 nt, Human
gacugaguccucguagccaucu

SEQ ID NO: 2091062 - RNA, 13 nt, Human
gacugcccggcag

SEQ ID NO: 2091063 - RNA, 17 nt, Human
gacugcaugguaauuua

SEQ ID NO: 2091064 - RNA, 18 nt, Human
gacugcaugguaauuuau

SEQ ID NO: 2091065 - RNA, 19 nt, Human
gacugcaugguaauuuaua

SEQ ID NO: 2091066 - RNA, 15 nt, Human
gacugcccggcaggg

SEQ ID NO: 2091067 - RNA, 17 nt, Human
gacugccccgugcagac

SEQ ID NO: 2091068 - RNA, 19 nt, Human
gacugccccgugcagacug

SEQ ID NO: 2091069 - RNA, 20 nt, Human
gacugccccgugcagacugg

SEQ ID NO: 2091070 - RNA, 21 nt, Human
gacugccccgugcagacugga

SEQ ID NO: 2091071 - RNA, 23 nt, Human
gacugccccgugcagacuggagg

SEQ ID NO: 2091072 - RNA, 16 nt, Human
gacugccgaccgaggc

SEQ ID NO: 2091073 - RNA, 19 nt, Human
gacugccgaccgaggcugg

SEQ ID NO: 2091074 - RNA, 20 nt, Human
gacugccgaccgaggcugga

SEQ ID NO: 2091075 - RNA, 22 nt, Human
gacucuccccucuuauguaccu

SEQ ID NO: 2091076 - RNA, 12 nt, Human
gacucucuguga

SEQ ID NO: 2091077 - RNA, 13 nt, Human
gacucucugugac

SEQ ID NO: 2091078 - RNA, 17 nt, Human
gacucuaggugcccuug

SEQ ID NO: 2091079 - RNA, 19 nt, Human
gacucuaggugcccuugga

SEQ ID NO: 2091080 - RNA, 19 nt, Human
gacucuaccucauaucagu

SEQ ID NO: 2091081 - RNA, 23 nt, Human
gacucuaccucauaucaguuugc

SEQ ID NO: 2091082 - RNA, 21 nt, Human
gacucauugcuucacaaccca

SEQ ID NO: 2091083 - RNA, 15 nt, Human
gacugggagggccca

SEQ ID NO: 2091084 - RNA, 18 nt, Human
gacuggaagcacagcuuc

SEQ ID NO: 2091085 - RNA, 14 nt, Human
gacuggaauuuuua

SEQ ID NO: 2091086 - RNA, 15 nt, Human
gacuggaauuuuuau

SEQ ID NO: 2091087 - RNA, 22 nt, Human
gacuggaauuuuuauuaugcau

SEQ ID NO: 2091088 - RNA, 22 nt, Human
gacuggauacugcccggggcag

SEQ ID NO: 2091089 - RNA, 15 nt, Human
gacuggagucccugu

SEQ ID NO: 2091090 - RNA, 15 nt, Human
gacuggauacugccc

SEQ ID NO: 2091091 - RNA, 16 nt, Human
gacuggauaguccguc

SEQ ID NO: 2091092 - RNA, 16 nt, Human
gacuggagacaaugca

SEQ ID NO: 2091093 - RNA, 23 nt, Human
gacuggagacaaugcagaugcca

SEQ ID NO: 2091094 - RNA, 20 nt, Human
gacuggaggaccacacucaa

SEQ ID NO: 2091095 - RNA, 19 nt, Human
gacugcugggacuggccag

SEQ ID NO: 2091096 - RNA, 23 nt, Human
gacugccgaccgaggcuggagcu

SEQ ID NO: 2091097 - RNA, 12 nt, Human
gacugcugggac

SEQ ID NO: 2091098 - RNA, 14 nt, Human
gacugcugggacug

SEQ ID NO: 2091099 - RNA, 16 nt, Human
gacuggaagcacagcu

SEQ ID NO: 2091100 - RNA, 15 nt, Human
gacuggaagcacagc

SEQ ID NO: 2091101 - RNA, 14 nt, Human
gacuggaagcacag

SEQ ID NO: 2091102 - RNA, 11 nt, Human
gacuccucugu

SEQ ID NO: 2091103 - RNA, 14 nt, Human
gacuccucugucca

SEQ ID NO: 2091104 - RNA, 16 nt, Human
gacuccugugcaacuu

SEQ ID NO: 2091105 - RNA, 14 nt, Human
gacuccuguggaga

SEQ ID NO: 2091106 - RNA, 22 nt, Human
gacuccuguggagaugacuugg

SEQ ID NO: 2091107 - RNA, 13 nt, Human
gaccuauguuugc

SEQ ID NO: 2091108 - RNA, 14 nt, Human
gaccuauguuugcu

SEQ ID NO: 2091109 - RNA, 22 nt, Human
gaccuauguuugcucagaacac

SEQ ID NO: 2091110 - RNA, 13 nt, Human
gacuacaggugug

SEQ ID NO: 2091111 - RNA, 23 nt, Human
gaccuagggauguucuggcccuc

SEQ ID NO: 2091112 - RNA, 21 nt, Human
gaccuagggaggaccuuaucu

SEQ ID NO: 2091113 - RNA, 20 nt, Human
gaccuagggauguucuggcc

SEQ ID NO: 2091114 - RNA, 21 nt, Human
gaccuagggauguucuggccc

SEQ ID NO: 2091115 - RNA, 22 nt, Human
gaccuagggauguucuggcccu

SEQ ID NO: 2091116 - RNA, 13 nt, Human
gaccuacucucau

SEQ ID NO: 2091117 - RNA, 17 nt, Human
gaccuagggaggaccuu

SEQ ID NO: 2091118 - RNA, 21 nt, Human
gacuacaggugugagucacca

SEQ ID NO: 2091119 - RNA, 18 nt, Human
gacuacaggugugaguca

SEQ ID NO: 2091120 - RNA, 13 nt, Human
gaccucaaccugu

SEQ ID NO: 2091121 - RNA, 15 nt, Human
gacuagaggcaggga

SEQ ID NO: 2091122 - RNA, 12 nt, Human
gacuagagaaac

SEQ ID NO: 2091123 - RNA, 22 nt, Human
gacuagagaaaccguccucuuu

SEQ ID NO: 2091124 - RNA, 16 nt, Human
gacuagaggcagggag

SEQ ID NO: 2091125 - RNA, 17 nt, Human
gacuagaggcagggagg

SEQ ID NO: 2091126 - RNA, 20 nt, Human
gacuagaggcagggagggga

SEQ ID NO: 2091127 - RNA, 22 nt, Human
gacuagaggcagggaggggacu

SEQ ID NO: 2091128 - RNA, 15 nt, Human
gacucauucuucugu

SEQ ID NO: 2091129 - RNA, 14 nt, Human
gacucauucuucug

SEQ ID NO: 2091130 - RNA, 15 nt, Human
gacucagcccugagg

SEQ ID NO: 2091131 - RNA, 16 nt, Human
gacucagcccugaggu

SEQ ID NO: 2091132 - RNA, 23 nt, Human
gaccuauaaaucauuaagacaac

SEQ ID NO: 2091133 - RNA, 16 nt, Human
gacuagaggcuugcau

SEQ ID NO: 2091134 - RNA, 16 nt, Human
gacucagacuccauuu

SEQ ID NO: 2091135 - RNA, 11 nt, Human
gacucagcccu

SEQ ID NO: 2091136 - RNA, 13 nt, Human
gacucagcccuga

SEQ ID NO: 2091137 - RNA, 17 nt, Human
gacucagacaggaaagg

SEQ ID NO: 2091138 - RNA, 23 nt, Human
gacucagacaggaaagggaaggc

SEQ ID NO: 2091139 - RNA, 14 nt, Human
gacuuggucugauu

SEQ ID NO: 2091140 - RNA, 23 nt, Human
gacuugguguccuuucccuccac

SEQ ID NO: 2091141 - RNA, 19 nt, Human
gacuugagaaacaaauaau

SEQ ID NO: 2091142 - RNA, 23 nt, Human
gacuugagaaacaaauaauuugu

SEQ ID NO: 2091143 - RNA, 13 nt, Human
gacuuggaagcuc

SEQ ID NO: 2091144 - RNA, 21 nt, Human
gacuucuuucaaauugagaga

SEQ ID NO: 2091145 - RNA, 22 nt, Human
gacuucuuucaaauugagagaa

SEQ ID NO: 2091146 - RNA, 16 nt, Human
gacuugaaagaaaggg

SEQ ID NO: 2091147 - RNA, 13 nt, Human
gacuugaaagcau

SEQ ID NO: 2091148 - RNA, 14 nt, Human
gacuugaaagcauc

SEQ ID NO: 2091149 - RNA, 16 nt, Human
gacuugaaagcaucca

SEQ ID NO: 2091150 - RNA, 16 nt, Human
gacuugacagaacacu

SEQ ID NO: 2091151 - RNA, 18 nt, Human
gacuugacagaacacugu

SEQ ID NO: 2091152 - RNA, 17 nt, Human
gacuugaaagcauccau

SEQ ID NO: 2091153 - RNA, 19 nt, Human
gacuugaaagcauccaugu

SEQ ID NO: 2091154 - RNA, 21 nt, Human
gacuugaaagcauccaugugu

SEQ ID NO: 2091155 - RNA, 18 nt, Human
gacuucgacugugaccug

SEQ ID NO: 2091156 - RNA, 13 nt, Human
gacuuaaagcaga

SEQ ID NO: 2091157 - RNA, 19 nt, Human
gacuuaaaauauuccugca

SEQ ID NO: 2091158 - RNA, 20 nt, Human
gacuuaacugcauuuuuaga

SEQ ID NO: 2091159 - RNA, 13 nt, Human
gagaaaagacaug

SEQ ID NO: 2091160 - RNA, 16 nt, Human
gagaaagguugaagca

SEQ ID NO: 2091161 - RNA, 22 nt, Human
gagaaaguacuucuccacccug

SEQ ID NO: 2091162 - RNA, 18 nt, Human
gagaaccuaaguuucagu

SEQ ID NO: 2091163 - RNA, 22 nt, Human
gagaaccucacgcaccucccau

SEQ ID NO: 2091164 - RNA, 14 nt, Human
gagaaccucaggcu

SEQ ID NO: 2091165 - RNA, 20 nt, Human
gagaagaauuuucagacccc

SEQ ID NO: 2091166 - RNA, 19 nt, Human
gagaacugcauauguuucg

SEQ ID NO: 2091167 - RNA, 23 nt, Human
gagaacugcauauguuucgcuga

SEQ ID NO: 2091168 - RNA, 20 nt, Human
gagaacuagugguggcucug

SEQ ID NO: 2091169 - RNA, 22 nt, Human
gagaacuagugguggcucugag

SEQ ID NO: 2091170 - RNA, 15 nt, Human
gagaacuccuagggu

SEQ ID NO: 2091171 - RNA, 18 nt, Human
gagaacugcauauguuuc

SEQ ID NO: 2091172 - RNA, 21 nt, Human
gagaagaauuuucagacccca

SEQ ID NO: 2091173 - RNA, 19 nt, Human
gagaagagagaaauagccu

SEQ ID NO: 2091174 - RNA, 16 nt, Human
gagaagcagaggaagg

SEQ ID NO: 2091175 - RNA, 14 nt, Human
gagaagcagugagc

SEQ ID NO: 2091176 - RNA, 18 nt, Human
gagaagcagugagccgca

SEQ ID NO: 2091177 - RNA, 18 nt, Human
gagaagcauauagaggca

SEQ ID NO: 2091178 - RNA, 19 nt, Human
gagaagcauauagaggcaa

SEQ ID NO: 2091179 - RNA, 21 nt, Human
gagaagcaucggagggaauug

SEQ ID NO: 2091180 - RNA, 18 nt, Human
gagaagccaaaagauugg

SEQ ID NO: 2091181 - RNA, 13 nt, Human
gagaagcaugaaa

SEQ ID NO: 2091182 - RNA, 16 nt, Human
gaccagaaaucaaaaa

SEQ ID NO: 2091183 - RNA, 21 nt, Human
gaccagaaaucaaaaagggaa

SEQ ID NO: 2091184 - RNA, 16 nt, Human
gaccagaagccaaaga

SEQ ID NO: 2091185 - RNA, 21 nt, Human
gaccacgcuuucuagcuguug

SEQ ID NO: 2091186 - RNA, 14 nt, Human
gaccacgcuuucua

SEQ ID NO: 2091187 - RNA, 14 nt, Human
gaccaccugcccaa

SEQ ID NO: 2091188 - RNA, 13 nt, Human
gaccaccugccca

SEQ ID NO: 2091189 - RNA, 22 nt, Human
gaccagccuggccaacauggua

SEQ ID NO: 2091190 - RNA, 13 nt, Human
gaccagccuggcc

SEQ ID NO: 2091191 - RNA, 12 nt, Human
gaccagccuggc

SEQ ID NO: 2091192 - RNA, 11 nt, Human
gaccagccugg

SEQ ID NO: 2091193 - RNA, 18 nt, Human
gaccaccucaaauuuaaa

SEQ ID NO: 2091194 - RNA, 11 nt, Human
gaccagagcuc

SEQ ID NO: 2091195 - RNA, 14 nt, Human
gaccagagcucugg

SEQ ID NO: 2091196 - RNA, 15 nt, Human
gaccagagcucugga

SEQ ID NO: 2091197 - RNA, 17 nt, Human
gaccagagcucuggagc

SEQ ID NO: 2091198 - RNA, 16 nt, Human
gaccauugucucagag

SEQ ID NO: 2091199 - RNA, 13 nt, Human
gaccauuuauaau

SEQ ID NO: 2091200 - RNA, 21 nt, Human
gaccauuuauaauguuaguag

SEQ ID NO: 2091201 - RNA, 15 nt, Human
gaccauuucaggggu

SEQ ID NO: 2091202 - RNA, 19 nt, Human
gaccagaagggaaacaguc

SEQ ID NO: 2091203 - RNA, 21 nt, Human
gaccagagccccacacggagg

SEQ ID NO: 2091204 - RNA, 20 nt, Human
gaccagccuccaugcugccu

SEQ ID NO: 2091205 - RNA, 22 nt, Human
gaccagccuccaugcugccucc

SEQ ID NO: 2091206 - RNA, 21 nt, Human
gaccagccuccaugcugccuc

SEQ ID NO: 2091207 - RNA, 21 nt, Human
gaccccuccaugugggcuagu

SEQ ID NO: 2091208 - RNA, 18 nt, Human
gaccccuccaugugggcu

SEQ ID NO: 2091209 - RNA, 14 nt, Human
gaccccuccaugug

SEQ ID NO: 2091210 - RNA, 15 nt, Human
gacccugcagagaug

SEQ ID NO: 2091211 - RNA, 20 nt, Human
gacccccagcaacccuccua

SEQ ID NO: 2091212 - RNA, 19 nt, Human
gaccccuccccuaaugccu

SEQ ID NO: 2091213 - RNA, 12 nt, Human
gacccccaacca

SEQ ID NO: 2091214 - RNA, 13 nt, Human
gacccaaggagga

SEQ ID NO: 2091215 - RNA, 21 nt, Human
gacccccaaccaaguggcucc

SEQ ID NO: 2091216 - RNA, 13 nt, Human
gacccccacaccu

SEQ ID NO: 2091217 - RNA, 15 nt, Human
gacccccacaccuca

SEQ ID NO: 2091218 - RNA, 14 nt, Human
gacccaaggaggaa

SEQ ID NO: 2091219 - RNA, 12 nt, Human
gacccccacccc

SEQ ID NO: 2091220 - RNA, 13 nt, Human
gacccccaccccu

SEQ ID NO: 2091221 - RNA, 14 nt, Human
gacccccaccccuu

SEQ ID NO: 2091222 - RNA, 15 nt, Human
gacccccaccccuuc

SEQ ID NO: 2091223 - RNA, 16 nt, Human
gacccccaccccuucc

SEQ ID NO: 2091224 - RNA, 17 nt, Human
gacccccaccccuuccc

SEQ ID NO: 2091225 - RNA, 18 nt, Human
gacccccaccccuucccc

SEQ ID NO: 2091226 - RNA, 19 nt, Human
gacccccaccccuucccca

SEQ ID NO: 2091227 - RNA, 21 nt, Human
gacccccaccccuuccccacu

SEQ ID NO: 2091228 - RNA, 22 nt, Human
gacccccaccccuuccccacug

SEQ ID NO: 2091229 - RNA, 18 nt, Human
gacccccacucucauucc

SEQ ID NO: 2091230 - RNA, 19 nt, Human
gacccccacucucauuccc

SEQ ID NO: 2091231 - RNA, 23 nt, Human
gacccccacucucauuccccagg

SEQ ID NO: 2091232 - RNA, 12 nt, Human
gacccugucuca

SEQ ID NO: 2091233 - RNA, 20 nt, Human
gaccagccuggccaacaugg

SEQ ID NO: 2091234 - RNA, 22 nt, Human
gacccugcgaaggggcccuggu

SEQ ID NO: 2091235 - RNA, 14 nt, Human
gacccuuuccuucc

SEQ ID NO: 2091236 - RNA, 20 nt, Human
gacccuuuccuuccuucccu

SEQ ID NO: 2091237 - RNA, 21 nt, Human
gacccuuuccuuccuucccug

SEQ ID NO: 2091238 - RNA, 17 nt, Human
gaccgaggcuggagcug

SEQ ID NO: 2091239 - RNA, 22 nt, Human
gacccuuuccuuccuucccugg

SEQ ID NO: 2091240 - RNA, 23 nt, Human
gacccuuuccuuccuucccuggc

SEQ ID NO: 2091241 - RNA, 18 nt, Human
gacccuuuuggguuucug

SEQ ID NO: 2091242 - RNA, 14 nt, Human
gaccggaagcuccu

SEQ ID NO: 2091243 - RNA, 16 nt, Human
gaccggaagcuccugg

SEQ ID NO: 2091244 - RNA, 17 nt, Human
gaccggaagcuccuggu

SEQ ID NO: 2091245 - RNA, 16 nt, Human
gacagggaggugaccc

SEQ ID NO: 2091246 - RNA, 23 nt, Human
gacagggcacaccgggcacucag

SEQ ID NO: 2091247 - RNA, 13 nt, Human
gacagggacccac

SEQ ID NO: 2091248 - RNA, 19 nt, Human
gacagggacccacuucaca

SEQ ID NO: 2091249 - RNA, 24 nt, Human
gacagggcacaccgggcacucaga

SEQ ID NO: 2091250 - RNA, 20 nt, Human
gacaguggauugcauuucuu

SEQ ID NO: 2091251 - RNA, 20 nt, Human
gacagugcuucagccugagg

SEQ ID NO: 2091252 - RNA, 18 nt, Human
gacagugcuucagccuga

SEQ ID NO: 2091253 - RNA, 19 nt, Human
gacagugcuucagccugag

SEQ ID NO: 2091254 - RNA, 19 nt, Human
gacaggaaaauccucuggc

SEQ ID NO: 2091255 - RNA, 12 nt, Human
gacaggaaaggg

SEQ ID NO: 2091256 - RNA, 17 nt, Human
gacaggaaagggaaggc

SEQ ID NO: 2091257 - RNA, 16 nt, Human
gacaggacagcauggu

SEQ ID NO: 2091258 - RNA, 14 nt, Human
gacaggacagugcu

SEQ ID NO: 2091259 - RNA, 22 nt, Human
gacaggacagugcuucagccug

SEQ ID NO: 2091260 - RNA, 23 nt, Human
gacaggacagugcuucagccuga

SEQ ID NO: 2091261 - RNA, 13 nt, Human
gacaggaccugac

SEQ ID NO: 2091262 - RNA, 14 nt, Human
gacaugaucuucuu

SEQ ID NO: 2091263 - RNA, 21 nt, Human
gacaugauggagcgcaccugc

SEQ ID NO: 2091264 - RNA, 18 nt, Human
gacaugcgggcugggcag

SEQ ID NO: 2091265 - RNA, 20 nt, Human
gacaugcgggcugggcagcu

SEQ ID NO: 2091266 - RNA, 21 nt, Human
gacaugcgggcugggcagcug

SEQ ID NO: 2091267 - RNA, 22 nt, Human
gacaugcgggcugggcagcugu

SEQ ID NO: 2091268 - RNA, 14 nt, Human
gacaugcgggcugg

SEQ ID NO: 2091269 - RNA, 15 nt, Human
gacaugcgggcuggg

SEQ ID NO: 2091270 - RNA, 22 nt, Human
gacauacuccuuccaucaaaua

SEQ ID NO: 2091271 - RNA, 16 nt, Human
gacauccguugugcuu

SEQ ID NO: 2091272 - RNA, 23 nt, Human
gacauccauguuccgagaagaac

SEQ ID NO: 2091273 - RNA, 14 nt, Human
gacagagucucacu

SEQ ID NO: 2091274 - RNA, 17 nt, Human
gacagaggcagccccau

SEQ ID NO: 2091275 - RNA, 19 nt, Human
gacagagccccacccucag

SEQ ID NO: 2091276 - RNA, 16 nt, Human
gacagaggcagcccca

SEQ ID NO: 2091277 - RNA, 14 nt, Human
gacagaggcagccc

SEQ ID NO: 2091278 - RNA, 21 nt, Human
gacagagcaagugagacccug

SEQ ID NO: 2091279 - RNA, 18 nt, Human
gacagagaggacgugggc

SEQ ID NO: 2091280 - RNA, 19 nt, Human
gacagagaggacgugggcg

SEQ ID NO: 2091281 - RNA, 14 nt, Human
gacacccaaagggu

SEQ ID NO: 2091282 - RNA, 22 nt, Human
gacaccagccuuucucccaggc

SEQ ID NO: 2091283 - RNA, 19 nt, Human
gacaccaggagucccuggu

SEQ ID NO: 2091284 - RNA, 20 nt, Human
gacaccaggagucccuggua

SEQ ID NO: 2091285 - RNA, 19 nt, Human
gacagccacggccaggcca

SEQ ID NO: 2091286 - RNA, 18 nt, Human
gacagccacggccaggcc

SEQ ID NO: 2091287 - RNA, 17 nt, Human
gacagccacggccaggc

SEQ ID NO: 2091288 - RNA, 14 nt, Human
gacagccacggcca

SEQ ID NO: 2091289 - RNA, 22 nt, Human
gacagagugagacucugucuca

SEQ ID NO: 2091290 - RNA, 20 nt, Human
gacagagugagacucugucu

SEQ ID NO: 2091291 - RNA, 13 nt, Human
gacagauaacucu

SEQ ID NO: 2091292 - RNA, 21 nt, Human
gacagaguucacuauaaaugg

SEQ ID NO: 2091293 - RNA, 21 nt, Human
gacagccacggccaggccaga

SEQ ID NO: 2091294 - RNA, 20 nt, Human
gacagccacggccaggccag

SEQ ID NO: 2091295 - RNA, 17 nt, Human
gacagcccacugagaag

SEQ ID NO: 2091296 - RNA, 18 nt, Human
gacaggaaaauccucugg

SEQ ID NO: 2091297 - RNA, 17 nt, Human
gaauggccugccuugaa

SEQ ID NO: 2091298 - RNA, 21 nt, Human
gaauggccugccuugaagcca

SEQ ID NO: 2091299 - RNA, 14 nt, Human
gaauguacucuguu

SEQ ID NO: 2091300 - RNA, 13 nt, Human
gaauguaauuugu

SEQ ID NO: 2091301 - RNA, 14 nt, Human
gaauguaauuugug

SEQ ID NO: 2091302 - RNA, 20 nt, Human
gaauguaauuuguguaauaa

SEQ ID NO: 2091303 - RNA, 23 nt, Human
gaauguaauuuguguaauaaagu

SEQ ID NO: 2091304 - RNA, 20 nt, Human
gaauguagcugguuuccuca

SEQ ID NO: 2091305 - RNA, 15 nt, Human
gaauguagcugguuu

SEQ ID NO: 2091306 - RNA, 15 nt, Human
gaauguaucaggaaa

SEQ ID NO: 2091307 - RNA, 17 nt, Human
gaauguaucaggaaaua

SEQ ID NO: 2091308 - RNA, 16 nt, Human
gaauguaucaggaaau

SEQ ID NO: 2091309 - RNA, 14 nt, Human
gaaugucagauucc

SEQ ID NO: 2091310 - RNA, 15 nt, Human
gaaugucagauuccu

SEQ ID NO: 2091311 - RNA, 19 nt, Human
gaaugucagauuccuuucc

SEQ ID NO: 2091312 - RNA, 22 nt, Human
gaaugucuuuguuggaaaagaa

SEQ ID NO: 2091313 - RNA, 16 nt, Human
gaauguuaaagucagu

SEQ ID NO: 2091314 - RNA, 21 nt, Human
gaauugcauuuuuuaaaacaa

SEQ ID NO: 2091315 - RNA, 18 nt, Human
gaauugacuucgacugug

SEQ ID NO: 2091316 - RNA, 23 nt, Human
gaauugcauuuuuuaaaacaaga

SEQ ID NO: 2091317 - RNA, 22 nt, Human
gaauugaaucgcugcgauacug

SEQ ID NO: 2091318 - RNA, 14 nt, Human
gaauugcagaguac

SEQ ID NO: 2091319 - RNA, 14 nt, Human
gaauucuguucauu

SEQ ID NO: 2091320 - RNA, 19 nt, Human
gaauucuguucauuuguua

SEQ ID NO: 2091321 - RNA, 19 nt, Human
gaauucuuacauguuuucu

SEQ ID NO: 2091322 - RNA, 22 nt, Human
gaauucuuacauguuuucuuug

SEQ ID NO: 2091323 - RNA, 11 nt, Human
gaauguucuga

SEQ ID NO: 2091324 - RNA, 15 nt, Human
gaauguucugacauu

SEQ ID NO: 2091325 - RNA, 16 nt, Human
gaauguucugacauua

SEQ ID NO: 2091326 - RNA, 17 nt, Human
gaauguucugacauuaa

SEQ ID NO: 2091327 - RNA, 19 nt, Human
gaauguucugacauuaaca

SEQ ID NO: 2091328 - RNA, 20 nt, Human
gaauguucugacauuaacag

SEQ ID NO: 2091329 - RNA, 17 nt, Human
gaauguuacauuguuug

SEQ ID NO: 2091330 - RNA, 20 nt, Human
gaauguuacauuguuugucu

SEQ ID NO: 2091331 - RNA, 18 nt, Human
gaauucuuacauguuuuc

SEQ ID NO: 2091332 - RNA, 20 nt, Human
gaauccagacccggcugcgu

SEQ ID NO: 2091333 - RNA, 18 nt, Human
gaauccagacccggcugc

SEQ ID NO: 2091334 - RNA, 13 nt, Human
gaauccaugcuug

SEQ ID NO: 2091335 - RNA, 14 nt, Human
gaauccaugcuugg

SEQ ID NO: 2091336 - RNA, 12 nt, Human
gaaucauugcuu

SEQ ID NO: 2091337 - RNA, 14 nt, Human
gaaucuagaagaaa

SEQ ID NO: 2091338 - RNA, 15 nt, Human
gaaucuagaagaaau

SEQ ID NO: 2091339 - RNA, 16 nt, Human
gaaucuagaagaaaug

SEQ ID NO: 2091340 - RNA, 17 nt, Human
gaaucuagaagaaauga

SEQ ID NO: 2091341 - RNA, 18 nt, Human
gaaucuagaagaaaugaa

SEQ ID NO: 2091342 - RNA, 19 nt, Human
gaaucuagaagaaaugaaa

SEQ ID NO: 2091343 - RNA, 20 nt, Human
gaaucuagaagaaaugaaau

SEQ ID NO: 2091344 - RNA, 21 nt, Human
gaaucuagaagaaaugaaauu

SEQ ID NO: 2091345 - RNA, 15 nt, Human
gaaucggaaucucug

SEQ ID NO: 2091346 - RNA, 14 nt, Human
gaaucgaggaacca

SEQ ID NO: 2091347 - RNA, 16 nt, Human
gaaucgaggaaccaga

SEQ ID NO: 2091348 - RNA, 21 nt, Human
gaaucgaugggggaugcuuca

SEQ ID NO: 2091349 - RNA, 22 nt, Human
gaaucgaugggggaugcuucau

SEQ ID NO: 2091350 - RNA, 18 nt, Human
gaaucgaggaaccagagc

SEQ ID NO: 2091351 - RNA, 19 nt, Human
gaaucgaggaaccagagcc

SEQ ID NO: 2091352 - RNA, 21 nt, Human
gaaaggcucagucucaggagc

SEQ ID NO: 2091353 - RNA, 22 nt, Human
gaaaggcucagucucaggagca

SEQ ID NO: 2091354 - RNA, 14 nt, Human
gaaaggcucagucu

SEQ ID NO: 2091355 - RNA, 18 nt, Human
gaaaggcucagucucagg

SEQ ID NO: 2091356 - RNA, 19 nt, Human
gaaaggcucagucucagga

SEQ ID NO: 2091357 - RNA, 19 nt, Human
gaaaggccagcuggcagca

SEQ ID NO: 2091358 - RNA, 21 nt, Human
gaaaggccagcuggcagcaga

SEQ ID NO: 2091359 - RNA, 22 nt, Human
gaaaggccagcuggcagcagag

SEQ ID NO: 2091360 - RNA, 17 nt, Human
gaaaggcauucucugaa

SEQ ID NO: 2091361 - RNA, 12 nt, Human
gaaaggccagcu

SEQ ID NO: 2091362 - RNA, 14 nt, Human
gaaaggccagcugg

SEQ ID NO: 2091363 - RNA, 16 nt, Human
gaaaggccagcuggca

SEQ ID NO: 2091364 - RNA, 13 nt, Human
gaaucauuauuua

SEQ ID NO: 2091365 - RNA, 16 nt, Human
gaaucauuauuuauua

SEQ ID NO: 2091366 - RNA, 17 nt, Human
gaaucauuauuuauuaa

SEQ ID NO: 2091367 - RNA, 21 nt, Human
gaaucauuauuuauuaaauuu

SEQ ID NO: 2091368 - RNA, 15 nt, Human
gaaucagugcaaaga

SEQ ID NO: 2091369 - RNA, 19 nt, Human
gaaucauacuuagcaaagu

SEQ ID NO: 2091370 - RNA, 20 nt, Human
gaaugaaagucuugugacua

SEQ ID NO: 2091371 - RNA, 21 nt, Human
gaaugaaagucuugugacuag

SEQ ID NO: 2091372 - RNA, 16 nt, Human
gaaugaaauugcugaa

SEQ ID NO: 2091373 - RNA, 23 nt, Human
gaaugaaagucuugugacuagug

SEQ ID NO: 2091374 - RNA, 13 nt, Human
gaaugaacaaccu

SEQ ID NO: 2091375 - RNA, 18 nt, Human
gaaugaacaaccucggcu

SEQ ID NO: 2091376 - RNA, 13 nt, Human
gaaucugaaugua

SEQ ID NO: 2091377 - RNA, 14 nt, Human
gaaucugaauguaa

SEQ ID NO: 2091378 - RNA, 21 nt, Human
gaaugaaagggcccagagagg

SEQ ID NO: 2091379 - RNA, 15 nt, Human
gaaugcuguauaugu

SEQ ID NO: 2091380 - RNA, 20 nt, Human
gaaugcacacuagccucucc

SEQ ID NO: 2091381 - RNA, 22 nt, Human
gaaugcacacuagccucuccag

SEQ ID NO: 2091382 - RNA, 22 nt, Human
gaauggcacagcccaaagaagg

SEQ ID NO: 2091383 - RNA, 13 nt, Human
gaaugcuuggaau

SEQ ID NO: 2091384 - RNA, 14 nt, Human
gaaugcuuggaaua

SEQ ID NO: 2091385 - RNA, 19 nt, Human
gaaugcuuggaauaucugc

SEQ ID NO: 2091386 - RNA, 17 nt, Human
gaauggcacagcccaaa

SEQ ID NO: 2091387 - RNA, 18 nt, Human
gaaugcuucugacuucau

SEQ ID NO: 2091388 - RNA, 21 nt, Human
gaaugcuucugacuucauaga

SEQ ID NO: 2091389 - RNA, 13 nt, Human
gacaagaagcaaa

SEQ ID NO: 2091390 - RNA, 19 nt, Human
gacaagaagcaaauuuuuu

SEQ ID NO: 2091391 - RNA, 21 nt, Human
gacaaggauugcuacuguccu

SEQ ID NO: 2091392 - RNA, 19 nt, Human
gacaaggauugcuacuguc

SEQ ID NO: 2091393 - RNA, 18 nt, Human
gacaaggauugcuacugu

SEQ ID NO: 2091394 - RNA, 16 nt, Human
gacaaugcagaugcca

SEQ ID NO: 2091395 - RNA, 19 nt, Human
gacaaugcagaugccagag

SEQ ID NO: 2091396 - RNA, 20 nt, Human
gacaaugcagaugccagagc

SEQ ID NO: 2091397 - RNA, 12 nt, Human
gacaaugugaaa

SEQ ID NO: 2091398 - RNA, 18 nt, Human
gacaaugugaaaagaaaa

SEQ ID NO: 2091399 - RNA, 16 nt, Human
gacacaaaaaguagau

SEQ ID NO: 2091400 - RNA, 21 nt, Human
gacaauuccuagauaaaaaga

SEQ ID NO: 2091401 - RNA, 23 nt, Human
gacaauuccuagauaaaaagaug

SEQ ID NO: 2091402 - RNA, 19 nt, Human
gacaaugugaaaagaaaaa

SEQ ID NO: 2091403 - RNA, 20 nt, Human
gacaaugugaaaagaaaaau

SEQ ID NO: 2091404 - RNA, 19 nt, Human
gacacaggcccggcuccag

SEQ ID NO: 2091405 - RNA, 21 nt, Human
gacacaggcccggcuccaggc

SEQ ID NO: 2091406 - RNA, 20 nt, Human
gacacaggcccggcuccagg

SEQ ID NO: 2091407 - RNA, 23 nt, Human
gacacaaacaaacaagcuaggug

SEQ ID NO: 2091408 - RNA, 20 nt, Human
gacaccagccuuucucccag

SEQ ID NO: 2091409 - RNA, 18 nt, Human
gacaaccaccgcucccca

SEQ ID NO: 2091410 - RNA, 19 nt, Human
gacaaccaccgcuccccag

SEQ ID NO: 2091411 - RNA, 22 nt, Human
gacaaccaccgcuccccagccc

SEQ ID NO: 2091412 - RNA, 17 nt, Human
gacaaccaccgcucccc

SEQ ID NO: 2091413 - RNA, 12 nt, Human
gacaacauuaaa

SEQ ID NO: 2091414 - RNA, 12 nt, Human
gacaaccaugac

SEQ ID NO: 2091415 - RNA, 23 nt, Human
gacaaccaccgcuccccagccca

SEQ ID NO: 2091416 - RNA, 13 nt, Human
gacaacccugcaa

SEQ ID NO: 2091417 - RNA, 20 nt, Human
gacaacccugcaaaggacug

SEQ ID NO: 2091418 - RNA, 18 nt, Human
gacaaccgaugcuccagc

SEQ ID NO: 2091419 - RNA, 19 nt, Human
gacaaccgaugcuccagcc

SEQ ID NO: 2091420 - RNA, 20 nt, Human
gacaaccgaugcuccagcca

SEQ ID NO: 2091421 - RNA, 14 nt, Human
gacaacgaggaagc

SEQ ID NO: 2091422 - RNA, 21 nt, Human
gacaaccgaugcuccagccaa

SEQ ID NO: 2091423 - RNA, 15 nt, Human
gacaacgaggaagcc

SEQ ID NO: 2091424 - RNA, 16 nt, Human
gacaacgaggaagccc

SEQ ID NO: 2091425 - RNA, 21 nt, Human
gacaacuucuaauugccaugu

SEQ ID NO: 2091426 - RNA, 20 nt, Human
gacaaauucuguuucuugag

SEQ ID NO: 2091427 - RNA, 16 nt, Human
gacaaauucuguuucu

SEQ ID NO: 2091428 - RNA, 17 nt, Human
gacaaauucuguuucuu

SEQ ID NO: 2091429 - RNA, 22 nt, Human
gacaaauguguaucggaugcuu

SEQ ID NO: 2091430 - RNA, 12 nt, Human
gacaaauucugu

SEQ ID NO: 2091431 - RNA, 14 nt, Human
gacaaauucuguuu

SEQ ID NO: 2091432 - RNA, 15 nt, Human
gacaaauucuguuuc

SEQ ID NO: 2091433 - RNA, 21 nt, Human
gacaaaugcugcgcccuuccc

SEQ ID NO: 2091434 - RNA, 22 nt, Human
gacaaaugcugcgcccuucccc

SEQ ID NO: 2091435 - RNA, 12 nt, Human
gacaaaucuaag

SEQ ID NO: 2091436 - RNA, 12 nt, Human
gacaaaucaagu

SEQ ID NO: 2091437 - RNA, 13 nt, Human
gacaaaucaaguu

SEQ ID NO: 2091438 - RNA, 14 nt, Human
gacaaaucaaguuu

SEQ ID NO: 2091439 - RNA, 15 nt, Human
gacaaaucaaguuuc

SEQ ID NO: 2091440 - RNA, 18 nt, Human
gacaaaucaaguuuccaa

SEQ ID NO: 2091441 - RNA, 19 nt, Human
gacaaaucaaguuuccaag

SEQ ID NO: 2091442 - RNA, 20 nt, Human
gacaaaucaaguuuccaagc

SEQ ID NO: 2091443 - RNA, 23 nt, Human
gacaaaucaaguuuccaagcaaa

SEQ ID NO: 2091444 - RNA, 21 nt, Human
gacaacaaauuagguuuugua

SEQ ID NO: 2091445 - RNA, 15 nt, Human
gacaaauuuaaaaca

SEQ ID NO: 2091446 - RNA, 17 nt, Human
gacaaauuuaaaacaaa

SEQ ID NO: 2091447 - RNA, 20 nt, Human
gacaaauuuaaaacaaacaa

SEQ ID NO: 2091448 - RNA, 23 nt, Human
gacaacaaauuagguuuuguaca

SEQ ID NO: 2091449 - RNA, 12 nt, Human
gacaacagaagu

SEQ ID NO: 2091450 - RNA, 14 nt, Human
gacaacagaaguca

SEQ ID NO: 2091451 - RNA, 17 nt, Human
gacaacagaagucauga

SEQ ID NO: 2091452 - RNA, 22 nt, Human
gacaacagaagucaugaagccc

SEQ ID NO: 2091453 - RNA, 22 nt, Human
gaauuggaccauccuauuuaac

SEQ ID NO: 2091454 - RNA, 24 nt, Human
gaauugcuuguuugcuucaacugu

SEQ ID NO: 2091455 - RNA, 17 nt, Human
gaauugcuugaaccugg

SEQ ID NO: 2091456 - RNA, 12 nt, Human
gaauuucuaaaa

SEQ ID NO: 2091457 - RNA, 16 nt, Human
gaauugcaauuuuaac

SEQ ID NO: 2091458 - RNA, 17 nt, Human
gaauuucuaaaaaacag

SEQ ID NO: 2091459 - RNA, 13 nt, Human
gaauuucucuaca

SEQ ID NO: 2091460 - RNA, 19 nt, Human
gaauuugaaugaaaaauuu

SEQ ID NO: 2091461 - RNA, 23 nt, Human
gaauuugaucguuccaguuccca

SEQ ID NO: 2091462 - RNA, 19 nt, Human
gaauuuggagacucugugg

SEQ ID NO: 2091463 - RNA, 19 nt, Human
gaauuuggccugcacuaau

SEQ ID NO: 2091464 - RNA, 19 nt, Human
gaauuugaagcugcaguga

SEQ ID NO: 2091465 - RNA, 14 nt, Human
gaauuugaaucuca

SEQ ID NO: 2091466 - RNA, 16 nt, Human
gaauuugaaucucaau

SEQ ID NO: 2091467 - RNA, 14 nt, Human
gaauuugaaugaaa

SEQ ID NO: 2091468 - RNA, 16 nt, Human
gaauuugaaugaaaaa

SEQ ID NO: 2091469 - RNA, 17 nt, Human
gaauuugaaugaaaaau

SEQ ID NO: 2091470 - RNA, 12 nt, Human
gaauuucuuggu

SEQ ID NO: 2091471 - RNA, 21 nt, Human
gaauuucuugguaagaagccg

SEQ ID NO: 2091472 - RNA, 18 nt, Human
gauuacagggaugagcca

SEQ ID NO: 2091473 - RNA, 20 nt, Human
gauuacagggaugagccacc

SEQ ID NO: 2091474 - RNA, 22 nt, Human
gauucacaaugaaaugcucucc

SEQ ID NO: 2091475 - RNA, 17 nt, Human
gauucaauuuucuuuaa

SEQ ID NO: 2091476 - RNA, 18 nt, Human
gauucacaaugaaaugcu

SEQ ID NO: 2091477 - RNA, 11 nt, Human
gauucucagau

SEQ ID NO: 2091478 - RNA, 14 nt, Human
gauucuccugccuc

SEQ ID NO: 2091479 - RNA, 15 nt, Human
gauugcaacaggcug

SEQ ID NO: 2091480 - RNA, 22 nt, Human
gauugcauuagaaauagacagu

SEQ ID NO: 2091481 - RNA, 12 nt, Human
gauuuaaaucag

SEQ ID NO: 2091482 - RNA, 20 nt, Human
gauuggggaagacuguggcu

SEQ ID NO: 2091483 - RNA, 22 nt, Human
gauugcguggaauugugcugag

SEQ ID NO: 2091484 - RNA, 16 nt, Human
gauugcgcaaaacuga

SEQ ID NO: 2091485 - RNA, 20 nt, Human
gauugguuuuaauugaagga

SEQ ID NO: 2091486 - RNA, 21 nt, Human
gauugguuuuaauugaaggaa

SEQ ID NO: 2091487 - RNA, 23 nt, Human
gauugguuuuaauugaaggaaag

SEQ ID NO: 2091488 - RNA, 16 nt, Human
gauuuugcuguagaag

SEQ ID NO: 2091489 - RNA, 21 nt, Human
gcaaacaugggguuggcuggg

SEQ ID NO: 2091490 - RNA, 12 nt, Human
gauuuugaaaac

SEQ ID NO: 2091491 - RNA, 13 nt, Human
gauuuugaaaacu

SEQ ID NO: 2091492 - RNA, 16 nt, Human
gauuuugaaaacuaca

SEQ ID NO: 2091493 - RNA, 21 nt, Human
gauuuugaaaacuacauuuua

SEQ ID NO: 2091494 - RNA, 19 nt, Human
gauuuugauccaagcuggu

SEQ ID NO: 2091495 - RNA, 21 nt, Human
gauuuugaaauuuuuauuaaa

SEQ ID NO: 2091496 - RNA, 17 nt, Human
gauuugaaggucuugau

SEQ ID NO: 2091497 - RNA, 19 nt, Human
gauuuuacaauugaaauga

SEQ ID NO: 2091498 - RNA, 15 nt, Human
gauuuuaauuuugaa

SEQ ID NO: 2091499 - RNA, 16 nt, Human
gauuuuacaaaagaug

SEQ ID NO: 2091500 - RNA, 17 nt, Human
gauuuuacaaaagaugu

SEQ ID NO: 2091501 - RNA, 18 nt, Human
gauuuuacaauugaaaug

SEQ ID NO: 2091502 - RNA, 18 nt, Human
gauuuuacauguggccca

SEQ ID NO: 2091503 - RNA, 13 nt, Human
gauuuuaauuuug

SEQ ID NO: 2091504 - RNA, 17 nt, Human
gcaaaggaguagaaaga

SEQ ID NO: 2091505 - RNA, 23 nt, Human
gcaaaggacuguuuuuuccugag

SEQ ID NO: 2091506 - RNA, 20 nt, Human
gcaaaggacuguuuuuuccu

SEQ ID NO: 2091507 - RNA, 15 nt, Human
gcaaauguggcuccu

SEQ ID NO: 2091508 - RNA, 16 nt, Human
gcaaagggccaggaag

SEQ ID NO: 2091509 - RNA, 16 nt, Human
gcaaaugugaccugug

SEQ ID NO: 2091510 - RNA, 18 nt, Human
gcaaagggagcacugggu

SEQ ID NO: 2091511 - RNA, 20 nt, Human
gcaaagggagcacuggguug

SEQ ID NO: 2091512 - RNA, 12 nt, Human
gcaaauguuaca

SEQ ID NO: 2091513 - RNA, 15 nt, Human
gcaaauguuacauag

SEQ ID NO: 2091514 - RNA, 21 nt, Human
gcaaauguuacauaguguagg

SEQ ID NO: 2091515 - RNA, 12 nt, Human
gcaaauucucaa

SEQ ID NO: 2091516 - RNA, 13 nt, Human
gcaaauuuauaau

SEQ ID NO: 2091517 - RNA, 16 nt, Human
gcaaauuuauaauuuu

SEQ ID NO: 2091518 - RNA, 21 nt, Human
gcaaauuuauaauuuuaagau

SEQ ID NO: 2091519 - RNA, 12 nt, Human
gcaacacacaga

SEQ ID NO: 2091520 - RNA, 18 nt, Human
gauuacaggcaugugcca

SEQ ID NO: 2091521 - RNA, 23 nt, Human
gauuacaagcgugagccacugca

SEQ ID NO: 2091522 - RNA, 15 nt, Human
gauuaaacugaguga

SEQ ID NO: 2091523 - RNA, 22 nt, Human
gauuacaagcgugagccacugc

SEQ ID NO: 2091524 - RNA, 23 nt, Human
gauguugaaugcccacaggcaaa

SEQ ID NO: 2091525 - RNA, 18 nt, Human
gauguucacuguggcauu

SEQ ID NO: 2091526 - RNA, 23 nt, Human
gauguuuacagguggacacacaa

SEQ ID NO: 2091527 - RNA, 21 nt, Human
gaugguuccccuguucacucu

SEQ ID NO: 2091528 - RNA, 18 nt, Human
gaugguuccccuguucac

SEQ ID NO: 2091529 - RNA, 13 nt, Human
gaugguuccccug

SEQ ID NO: 2091530 - RNA, 15 nt, Human
gaugguuacacuguu

SEQ ID NO: 2091531 - RNA, 17 nt, Human
gaugguuacacuguuag

SEQ ID NO: 2091532 - RNA, 18 nt, Human
gaugguuacacuguuaga

SEQ ID NO: 2091533 - RNA, 23 nt, Human
gaugguuacacuguuagaacacu

SEQ ID NO: 2091534 - RNA, 12 nt, Human
gauguggcccug

SEQ ID NO: 2091535 - RNA, 13 nt, Human
gauguggcccugg

SEQ ID NO: 2091536 - RNA, 14 nt, Human
gauguggcccuggc

SEQ ID NO: 2091537 - RNA, 21 nt, Human
gauguggcccuggccugcugg

SEQ ID NO: 2091538 - RNA, 20 nt, Human
gauguggcccuggccugcug

SEQ ID NO: 2091539 - RNA, 17 nt, Human
gaugugggucaaggaau

SEQ ID NO: 2091540 - RNA, 16 nt, Human
gauguuaggcugggcc

SEQ ID NO: 2091541 - RNA, 14 nt, Human
gauguuaaccagaa

SEQ ID NO: 2091542 - RNA, 13 nt, Human
gaugguccugggg

SEQ ID NO: 2091543 - RNA, 15 nt, Human
gaugguccuggggcu

SEQ ID NO: 2091544 - RNA, 21 nt, Human
gaugguccuggggcucugugc

SEQ ID NO: 2091545 - RNA, 24 nt, Human
gaugguccuggggcucugugcagg

SEQ ID NO: 2091546 - RNA, 22 nt, Human
gaugggucugguuugcagagcu

SEQ ID NO: 2091547 - RNA, 18 nt, Human
gauggguuugacaagguu

SEQ ID NO: 2091548 - RNA, 23 nt, Human
gaugggucugguuugcagagcuu

SEQ ID NO: 2091549 - RNA, 19 nt, Human
gaugcugaaagagaaaaga

SEQ ID NO: 2091550 - RNA, 22 nt, Human
gauggggugggguggagaacuc

SEQ ID NO: 2091551 - RNA, 21 nt, Human
gaugggcaacccccagccugc

SEQ ID NO: 2091552 - RNA, 20 nt, Human
gaugggcaacccccagccug

SEQ ID NO: 2091553 - RNA, 22 nt, Human
gauggccgggcgcgguggcuca

SEQ ID NO: 2091554 - RNA, 14 nt, Human
gauggcccucuggu

SEQ ID NO: 2091555 - RNA, 15 nt, Human
gauggcccucuggua

SEQ ID NO: 2091556 - RNA, 21 nt, Human
gaugcugaaacaggagagaaa

SEQ ID NO: 2091557 - RNA, 11 nt, Human
gaucagaacag

SEQ ID NO: 2091558 - RNA, 15 nt, Human
gaucagaacagcaga

SEQ ID NO: 2091559 - RNA, 18 nt, Human
gaugccaucugugggcac

SEQ ID NO: 2091560 - RNA, 15 nt, Human
gaugcccacugagga

SEQ ID NO: 2091561 - RNA, 21 nt, Human
gaugccaucuguguccugguu

SEQ ID NO: 2091562 - RNA, 16 nt, Human
gaugccaucugugucc

SEQ ID NO: 2091563 - RNA, 17 nt, Human
gaugccaucuguguccu

SEQ ID NO: 2091564 - RNA, 18 nt, Human
gaugccaucuguguccug

SEQ ID NO: 2091565 - RNA, 20 nt, Human
gaugccaucuguguccuggu

SEQ ID NO: 2091566 - RNA, 17 nt, Human
gaugcccacugaggaau

SEQ ID NO: 2091567 - RNA, 18 nt, Human
gaugcccagagggcccag

SEQ ID NO: 2091568 - RNA, 19 nt, Human
gaugcccagagggcccagg

SEQ ID NO: 2091569 - RNA, 20 nt, Human
gaugcccagagggcccaggc

SEQ ID NO: 2091570 - RNA, 20 nt, Human
gaugcccagggccacucugc

SEQ ID NO: 2091571 - RNA, 21 nt, Human
gaugcccagggccacucugcc

SEQ ID NO: 2091572 - RNA, 22 nt, Human
gaugcccagggccacucugccu

SEQ ID NO: 2091573 - RNA, 22 nt, Human
gaugcccagagggcccaggcag

SEQ ID NO: 2091574 - RNA, 23 nt, Human
gaugcccagagggcccaggcagg

SEQ ID NO: 2091575 - RNA, 20 nt, Human
gaugcugacuguacuccucc

SEQ ID NO: 2091576 - RNA, 17 nt, Human
gaugcugacuguacucc

SEQ ID NO: 2091577 - RNA, 20 nt, Human
gaugcugaaacaggagagaa

SEQ ID NO: 2091578 - RNA, 12 nt, Human
gaugccccagag

SEQ ID NO: 2091579 - RNA, 16 nt, Human
gaugccccagagcugu

SEQ ID NO: 2091580 - RNA, 20 nt, Human
gcacaccgggcacucagaag

SEQ ID NO: 2091581 - RNA, 17 nt, Human
gcacacgucauguuucu

SEQ ID NO: 2091582 - RNA, 21 nt, Human
gcacacucagcacccccuucu

SEQ ID NO: 2091583 - RNA, 23 nt, Human
gcacacucagcacccccuucucu

SEQ ID NO: 2091584 - RNA, 15 nt, Human
gcacacuccccugca

SEQ ID NO: 2091585 - RNA, 21 nt, Human
gcacacuccccugcacuggag

SEQ ID NO: 2091586 - RNA, 13 nt, Human
gcacagaaaacua

SEQ ID NO: 2091587 - RNA, 15 nt, Human
gcacagaaaacuaga

SEQ ID NO: 2091588 - RNA, 16 nt, Human
gcacagaaaacuagaa

SEQ ID NO: 2091589 - RNA, 13 nt, Human
gcacacugucugc

SEQ ID NO: 2091590 - RNA, 20 nt, Human
gcacacuccccugcacugga

SEQ ID NO: 2091591 - RNA, 12 nt, Human
gcacacuguagc

SEQ ID NO: 2091592 - RNA, 20 nt, Human
gcacagaaacacaauauuuu

SEQ ID NO: 2091593 - RNA, 12 nt, Human
gcacagaaggag

SEQ ID NO: 2091594 - RNA, 19 nt, Human
gcacagagagggggccacc

SEQ ID NO: 2091595 - RNA, 23 nt, Human
gcacagagagggggccaccuccc

SEQ ID NO: 2091596 - RNA, 18 nt, Human
gcacagacgucccuccac

SEQ ID NO: 2091597 - RNA, 15 nt, Human
gcacagagagggggc

SEQ ID NO: 2091598 - RNA, 17 nt, Human
gcacagagagggggcca

SEQ ID NO: 2091599 - RNA, 21 nt, Human
gcacaaaauauaaagcaucua

SEQ ID NO: 2091600 - RNA, 21 nt, Human
gcaauuuuaacacacauaaag

SEQ ID NO: 2091601 - RNA, 23 nt, Human
gcaauuuuaacacacauaaagga

SEQ ID NO: 2091602 - RNA, 18 nt, Human
gcaauuuugcauuugaau

SEQ ID NO: 2091603 - RNA, 18 nt, Human
gcaauugaauuaaauuag

SEQ ID NO: 2091604 - RNA, 17 nt, Human
gcaauuccgcauuuaau

SEQ ID NO: 2091605 - RNA, 14 nt, Human
gcaauugggauggc

SEQ ID NO: 2091606 - RNA, 19 nt, Human
gcaauuuauacaauaucau

SEQ ID NO: 2091607 - RNA, 16 nt, Human
gcaauuuauacaauau

SEQ ID NO: 2091608 - RNA, 14 nt, Human
gcaaugugauaaaa

SEQ ID NO: 2091609 - RNA, 20 nt, Human
gcaaugucaggaacagaagg

SEQ ID NO: 2091610 - RNA, 22 nt, Human
gcaaugucaggaacagaaggau

SEQ ID NO: 2091611 - RNA, 14 nt, Human
gcaaugugcuacug

SEQ ID NO: 2091612 - RNA, 14 nt, Human
gcaauguuaucuug

SEQ ID NO: 2091613 - RNA, 15 nt, Human
gcaauuccgcauuua

SEQ ID NO: 2091614 - RNA, 15 nt, Human
gcaauggcagccuug

SEQ ID NO: 2091615 - RNA, 13 nt, Human
gcaacacacagac

SEQ ID NO: 2091616 - RNA, 14 nt, Human
gcaacgaagaaaaa

SEQ ID NO: 2091617 - RNA, 23 nt, Human
gcaacgaagaaaaaaaauaacac

SEQ ID NO: 2091618 - RNA, 18 nt, Human
gcaacggggaggccaagu

SEQ ID NO: 2091619 - RNA, 14 nt, Human
gcaacucaucuuag

SEQ ID NO: 2091620 - RNA, 19 nt, Human
gcaccugucgcccagugcc

SEQ ID NO: 2091621 - RNA, 13 nt, Human
gcacccccacccu

SEQ ID NO: 2091622 - RNA, 14 nt, Human
gcacccccacccuu

SEQ ID NO: 2091623 - RNA, 15 nt, Human
gcacccccacccuuu

SEQ ID NO: 2091624 - RNA, 18 nt, Human
gcacccccacccuuuggg

SEQ ID NO: 2091625 - RNA, 15 nt, Human
gcacccccacgcccu

SEQ ID NO: 2091626 - RNA, 12 nt, Human
gcaccauaacuu

SEQ ID NO: 2091627 - RNA, 21 nt, Human
gcaccuguaaucccagcuacu

SEQ ID NO: 2091628 - RNA, 17 nt, Human
gcaccuggggaguggga

SEQ ID NO: 2091629 - RNA, 15 nt, Human
gcaccuggggagugg

SEQ ID NO: 2091630 - RNA, 19 nt, Human
gcaccuguacucaggaggc

SEQ ID NO: 2091631 - RNA, 21 nt, Human
gcaccuguacucaggaggcug

SEQ ID NO: 2091632 - RNA, 13 nt, Human
gcaccccccuggg

SEQ ID NO: 2091633 - RNA, 14 nt, Human
gcaccccccugggc

SEQ ID NO: 2091634 - RNA, 21 nt, Human
gcaccccccugggcugagaga

SEQ ID NO: 2091635 - RNA, 12 nt, Human
gcaccaggagac

SEQ ID NO: 2091636 - RNA, 13 nt, Human
gcaccaggagaca

SEQ ID NO: 2091637 - RNA, 20 nt, Human
gcaccaggcacgaacccacc

SEQ ID NO: 2091638 - RNA, 22 nt, Human
gcacauuuuuuuuuuuaauuuu

SEQ ID NO: 2091639 - RNA, 19 nt, Human
gcacauuuccccagaccug

SEQ ID NO: 2091640 - RNA, 22 nt, Human
gcacauuuccccagaccugagc

SEQ ID NO: 2091641 - RNA, 16 nt, Human
gcacauuuccccagac

SEQ ID NO: 2091642 - RNA, 13 nt, Human
gcaccagggaaga

SEQ ID NO: 2091643 - RNA, 19 nt, Human
gcaccaguguccuccccuc

SEQ ID NO: 2091644 - RNA, 20 nt, Human
gcaccaguguccuccccuca

SEQ ID NO: 2091645 - RNA, 21 nt, Human
gcaccaggcacgaacccaccu

SEQ ID NO: 2091646 - RNA, 23 nt, Human
gcaccaggcacgaacccaccugc

SEQ ID NO: 2091647 - RNA, 13 nt, Human
gcacagugcaucu

SEQ ID NO: 2091648 - RNA, 18 nt, Human
gcacagugcaucucagcc

SEQ ID NO: 2091649 - RNA, 15 nt, Human
gcacagugcaucuca

SEQ ID NO: 2091650 - RNA, 13 nt, Human
gcacagauggauu

SEQ ID NO: 2091651 - RNA, 15 nt, Human
gcacagauggauuug

SEQ ID NO: 2091652 - RNA, 24 nt, Human
gcacagauggauuugccugugcca

SEQ ID NO: 2091653 - RNA, 18 nt, Human
gcacagauggauuugccu

SEQ ID NO: 2091654 - RNA, 19 nt, Human
gcacagauggauuugccug

SEQ ID NO: 2091655 - RNA, 22 nt, Human
gcacagauggauuugccugugc

SEQ ID NO: 2091656 - RNA, 13 nt, Human
gcagacagcagcu

SEQ ID NO: 2091657 - RNA, 14 nt, Human
gcagacagcagcuc

SEQ ID NO: 2091658 - RNA, 16 nt, Human
gcagacagcagcucag

SEQ ID NO: 2091659 - RNA, 17 nt, Human
gcagacagcagcucagg

SEQ ID NO: 2091660 - RNA, 18 nt, Human
gcagacagcagcucaggc

SEQ ID NO: 2091661 - RNA, 19 nt, Human
gcagacagcagcucaggca

SEQ ID NO: 2091662 - RNA, 20 nt, Human
gcagacagcagcucaggcac

SEQ ID NO: 2091663 - RNA, 14 nt, Human
gcagacaggcaagc

SEQ ID NO: 2091664 - RNA, 13 nt, Human
gcagacaggcaag

SEQ ID NO: 2091665 - RNA, 12 nt, Human
gcagacaggcaa

SEQ ID NO: 2091666 - RNA, 21 nt, Human
gcagacagcagcucaggcaca

SEQ ID NO: 2091667 - RNA, 23 nt, Human
gcagaagggggucucuucuucca

SEQ ID NO: 2091668 - RNA, 13 nt, Human
gcacuguggccuu

SEQ ID NO: 2091669 - RNA, 14 nt, Human
gcacuguggccuug

SEQ ID NO: 2091670 - RNA, 20 nt, Human
gcacugucucaguuucacuu

SEQ ID NO: 2091671 - RNA, 19 nt, Human
gcacugucucaguuucacu

SEQ ID NO: 2091672 - RNA, 20 nt, Human
gcacugcugcccagccucca

SEQ ID NO: 2091673 - RNA, 18 nt, Human
gcacugcugcccagccuc

SEQ ID NO: 2091674 - RNA, 15 nt, Human
gcacugcugcccagc

SEQ ID NO: 2091675 - RNA, 14 nt, Human
gcacugcugcccag

SEQ ID NO: 2091676 - RNA, 15 nt, Human
gcacugagauauuua

SEQ ID NO: 2091677 - RNA, 21 nt, Human
gcacugagauauuuauuguuu

SEQ ID NO: 2091678 - RNA, 19 nt, Human
gcacugguggcccgacagc

SEQ ID NO: 2091679 - RNA, 14 nt, Human
gcacugguggcccg

SEQ ID NO: 2091680 - RNA, 18 nt, Human
gcacuggguugacuuuca

SEQ ID NO: 2091681 - RNA, 14 nt, Human
gcacuggaguccag

SEQ ID NO: 2091682 - RNA, 17 nt, Human
gcacuggaguccagucu

SEQ ID NO: 2091683 - RNA, 18 nt, Human
gcacuggaguccagucuc

SEQ ID NO: 2091684 - RNA, 20 nt, Human
gagguuucucaaagaaauuu

SEQ ID NO: 2091685 - RNA, 16 nt, Human
gagguuucaaaccucc

SEQ ID NO: 2091686 - RNA, 19 nt, Human
gagguugcagugagcugag

SEQ ID NO: 2091687 - RNA, 17 nt, Human
gagguugggguguacua

SEQ ID NO: 2091688 - RNA, 19 nt, Human
gagguuuaggucaagaaga

SEQ ID NO: 2091689 - RNA, 19 nt, Human
gagguugcagugagccaag

SEQ ID NO: 2091690 - RNA, 13 nt, Human
gagguugcagugu

SEQ ID NO: 2091691 - RNA, 19 nt, Human
gagguugcagggagccgag

SEQ ID NO: 2091692 - RNA, 13 nt, Human
gagguugcaguga

SEQ ID NO: 2091693 - RNA, 15 nt, Human
gagguugcagugagc

SEQ ID NO: 2091694 - RNA, 13 nt, Human
gagguugcaggga

SEQ ID NO: 2091695 - RNA, 20 nt, Human
gaggucagagccugcaguua

SEQ ID NO: 2091696 - RNA, 17 nt, Human
gaggucagagccugcag

SEQ ID NO: 2091697 - RNA, 16 nt, Human
gagguaguuaagggau

SEQ ID NO: 2091698 - RNA, 19 nt, Human
gagguggucugaauguucu

SEQ ID NO: 2091699 - RNA, 13 nt, Human
gagguggucugaa

SEQ ID NO: 2091700 - RNA, 16 nt, Human
gagguggucugaaugu

SEQ ID NO: 2091701 - RNA, 17 nt, Human
gagguggucugaauguu

SEQ ID NO: 2091702 - RNA, 20 nt, Human
gagguggucugaauguucug

SEQ ID NO: 2091703 - RNA, 22 nt, Human
gaguagcugggacuacaggcac

SEQ ID NO: 2091704 - RNA, 17 nt, Human
gaguagaccccuggcug

SEQ ID NO: 2091705 - RNA, 18 nt, Human
gaguagaccccuggcugg

SEQ ID NO: 2091706 - RNA, 23 nt, Human
gaguagccccaacccaaaccugg

SEQ ID NO: 2091707 - RNA, 17 nt, Human
gaguagccgagagccug

SEQ ID NO: 2091708 - RNA, 19 nt, Human
gaguagcugggacuacagg

SEQ ID NO: 2091709 - RNA, 22 nt, Human
gaguagaaagacagagcuggga

SEQ ID NO: 2091710 - RNA, 17 nt, Human
gaguagaaagacagagc

SEQ ID NO: 2091711 - RNA, 20 nt, Human
gaguagaaagacagagcugg

SEQ ID NO: 2091712 - RNA, 14 nt, Human
gaguaauuuauugu

SEQ ID NO: 2091713 - RNA, 16 nt, Human
gaguaauuuauuguuu

SEQ ID NO: 2091714 - RNA, 20 nt, Human
gaguaaucugaucguucuuu

SEQ ID NO: 2091715 - RNA, 12 nt, Human
gaguaagagcug

SEQ ID NO: 2091716 - RNA, 14 nt, Human
gaguaagcugcuuu

SEQ ID NO: 2091717 - RNA, 15 nt, Human
gaguaagcugcuuuu

SEQ ID NO: 2091718 - RNA, 19 nt, Human
gaguccgaaagggacuugg

SEQ ID NO: 2091719 - RNA, 14 nt, Human
gagucccuuccagg

SEQ ID NO: 2091720 - RNA, 22 nt, Human
gagucccuuccaggccaucaga

SEQ ID NO: 2091721 - RNA, 16 nt, Human
gaguccucacucccag

SEQ ID NO: 2091722 - RNA, 17 nt, Human
gaguccucacucccagu

SEQ ID NO: 2091723 - RNA, 14 nt, Human
gagucgaggacagg

SEQ ID NO: 2091724 - RNA, 16 nt, Human
gagucgaggacaggga

SEQ ID NO: 2091725 - RNA, 15 nt, Human
gagucgaggacaggg

SEQ ID NO: 2091726 - RNA, 21 nt, Human
gaguccuacaguggcugucac

SEQ ID NO: 2091727 - RNA, 18 nt, Human
gaguagccgagagccugc

SEQ ID NO: 2091728 - RNA, 21 nt, Human
gaguaguugauguugcauuuu

SEQ ID NO: 2091729 - RNA, 14 nt, Human
gaguauaugcacuu

SEQ ID NO: 2091730 - RNA, 12 nt, Human
gaguauaugcac

SEQ ID NO: 2091731 - RNA, 20 nt, Human
gaguaguugauguugcauuu

SEQ ID NO: 2091732 - RNA, 23 nt, Human
gaguaucuccucgcaagcugggu

SEQ ID NO: 2091733 - RNA, 16 nt, Human
gaguaucugggaacug

SEQ ID NO: 2091734 - RNA, 11 nt, Human
gaguauauguc

SEQ ID NO: 2091735 - RNA, 16 nt, Human
gagugacagaggcagc

SEQ ID NO: 2091736 - RNA, 15 nt, Human
gagugacagaggcag

SEQ ID NO: 2091737 - RNA, 14 nt, Human
gagugacagaggca

SEQ ID NO: 2091738 - RNA, 15 nt, Human
gagugaaccaucauu

SEQ ID NO: 2091739 - RNA, 23 nt, Human
gagucuuuguaaguaaacugccc

SEQ ID NO: 2091740 - RNA, 16 nt, Human
gagucuugcagugauu

SEQ ID NO: 2091741 - RNA, 23 nt, Human
gagucugaagcagaugcaaagag

SEQ ID NO: 2091742 - RNA, 12 nt, Human
gagucugucuca

SEQ ID NO: 2091743 - RNA, 15 nt, Human
gaguggguugauuuc

SEQ ID NO: 2091744 - RNA, 13 nt, Human
gagugggugaaua

SEQ ID NO: 2091745 - RNA, 17 nt, Human
gagugacagaggcagcc

SEQ ID NO: 2091746 - RNA, 11 nt, Human
gaguguaguga

SEQ ID NO: 2091747 - RNA, 23 nt, Human
gaguguccuaggaguauccucau

SEQ ID NO: 2091748 - RNA, 17 nt, Human
gaguguaagugugagua

SEQ ID NO: 2091749 - RNA, 20 nt, Human
gaguguaagugugaguaaga

SEQ ID NO: 2091750 - RNA, 21 nt, Human
gaguggucuuucuggagaggu

SEQ ID NO: 2091751 - RNA, 14 nt, Human
gaguggucuuucug

SEQ ID NO: 2091752 - RNA, 14 nt, Human
gaguguaacaagaa

SEQ ID NO: 2091753 - RNA, 18 nt, Human
gaguguaacaagaaagga

SEQ ID NO: 2091754 - RNA, 21 nt, Human
gaguguaacaagaaaggagag

SEQ ID NO: 2091755 - RNA, 14 nt, Human
gaguguaaguguga

SEQ ID NO: 2091756 - RNA, 22 nt, Human
gaguuaaauagaguauaugcac

SEQ ID NO: 2091757 - RNA, 17 nt, Human
gaguuaaaaagggcagg

SEQ ID NO: 2091758 - RNA, 20 nt, Human
gagugugccugaagucccag

SEQ ID NO: 2091759 - RNA, 12 nt, Human
gagugugggaag

SEQ ID NO: 2091760 - RNA, 18 nt, Human
gagugugggaagggagag

SEQ ID NO: 2091761 - RNA, 16 nt, Human
gaguguggcuccccuc

SEQ ID NO: 2091762 - RNA, 17 nt, Human
gaguguggcuccccucu

SEQ ID NO: 2091763 - RNA, 23 nt, Human
gaguugacuugacagaacacugu

SEQ ID NO: 2091764 - RNA, 18 nt, Human
gauaaaucagugguuauu

SEQ ID NO: 2091765 - RNA, 20 nt, Human
gaguucauacccuguuacca

SEQ ID NO: 2091766 - RNA, 17 nt, Human
gauaagaaugcugguuu

SEQ ID NO: 2091767 - RNA, 20 nt, Human
gauacaggaaaagcugcuga

SEQ ID NO: 2091768 - RNA, 11 nt, Human
gauaacucucc

SEQ ID NO: 2091769 - RNA, 13 nt, Human
gauaacucuuugg

SEQ ID NO: 2091770 - RNA, 14 nt, Human
gauaacucuuugga

SEQ ID NO: 2091771 - RNA, 15 nt, Human
gauaacucuuuggau

SEQ ID NO: 2091772 - RNA, 23 nt, Human
gauacaggaaaagcugcugacag

SEQ ID NO: 2091773 - RNA, 21 nt, Human
gauacaggaaaagcugcugac

SEQ ID NO: 2091774 - RNA, 22 nt, Human
gauaagaaugcugguuuuccua

SEQ ID NO: 2091775 - RNA, 20 nt, Human
gauagcaagugaauuuuucu

SEQ ID NO: 2091776 - RNA, 20 nt, Human
gauagcuuuauuuuuuaagu

SEQ ID NO: 2091777 - RNA, 14 nt, Human
gauagcguuggaau

SEQ ID NO: 2091778 - RNA, 15 nt, Human
gauagcguuggaauu

SEQ ID NO: 2091779 - RNA, 22 nt, Human
gauagcguuggaauuaaaacaa

SEQ ID NO: 2091780 - RNA, 23 nt, Human
gauagcguuggaauuaaaacaau

SEQ ID NO: 2091781 - RNA, 16 nt, Human
gaucacggcucacugc

SEQ ID NO: 2091782 - RNA, 15 nt, Human
gaucacggcucacug

SEQ ID NO: 2091783 - RNA, 13 nt, Human
gaucacagaggcu

SEQ ID NO: 2091784 - RNA, 18 nt, Human
gaucacuggagcccagga

SEQ ID NO: 2091785 - RNA, 15 nt, Human
gaucacuuugcucug

SEQ ID NO: 2091786 - RNA, 11 nt, Human
gaucagaaagu

SEQ ID NO: 2091787 - RNA, 12 nt, Human
gaucagaaagua

SEQ ID NO: 2091788 - RNA, 20 nt, Human
gaucagaaaguaauuucuuc

SEQ ID NO: 2091789 - RNA, 18 nt, Human
gaucacggcucacugcag

SEQ ID NO: 2091790 - RNA, 15 nt, Human
gauaucuugaaauga

SEQ ID NO: 2091791 - RNA, 15 nt, Human
gauaucuuuuuauug

SEQ ID NO: 2091792 - RNA, 16 nt, Human
gauaucuuuuuauuga

SEQ ID NO: 2091793 - RNA, 22 nt, Human
gauaucuuuuuauugaugugca

SEQ ID NO: 2091794 - RNA, 14 nt, Human
gauaugaaaaauau

SEQ ID NO: 2091795 - RNA, 17 nt, Human
gauaucuugaaaugaaa

SEQ ID NO: 2091796 - RNA, 15 nt, Human
gauaugaaaaauaug

SEQ ID NO: 2091797 - RNA, 21 nt, Human
gauaugaguuguuuucagacu

SEQ ID NO: 2091798 - RNA, 15 nt, Human
gagggagcuuagcca

SEQ ID NO: 2091799 - RNA, 13 nt, Human
gagggaggaaucg

SEQ ID NO: 2091800 - RNA, 12 nt, Human
gagggagaugga

SEQ ID NO: 2091801 - RNA, 14 nt, Human
gagggagaagcaug

SEQ ID NO: 2091802 - RNA, 20 nt, Human
gaggcugucuucucaggcuc

SEQ ID NO: 2091803 - RNA, 21 nt, Human
gaggcugucuucucaggcucu

SEQ ID NO: 2091804 - RNA, 22 nt, Human
gaggcugucuucucaggcucug

SEQ ID NO: 2091805 - RNA, 13 nt, Human
gagggagaaggga

SEQ ID NO: 2091806 - RNA, 18 nt, Human
gagggagugacagaggca

SEQ ID NO: 2091807 - RNA, 22 nt, Human
gagggagugacagaggcagccc

SEQ ID NO: 2091808 - RNA, 21 nt, Human
gagggagugacagaggcagcc

SEQ ID NO: 2091809 - RNA, 13 nt, Human
gagggagggggcu

SEQ ID NO: 2091810 - RNA, 16 nt, Human
gagggauaagcaaaag

SEQ ID NO: 2091811 - RNA, 14 nt, Human
gagggaucacaggg

SEQ ID NO: 2091812 - RNA, 15 nt, Human
gagggaucacagggc

SEQ ID NO: 2091813 - RNA, 23 nt, Human
gagggaucacagggccccagaag

SEQ ID NO: 2091814 - RNA, 18 nt, Human
gagggaugaggugcuggg

SEQ ID NO: 2091815 - RNA, 15 nt, Human
gagggaugcugccug

SEQ ID NO: 2091816 - RNA, 17 nt, Human
gagggaugcugccugag

SEQ ID NO: 2091817 - RNA, 18 nt, Human
gaggggucuccaggagga

SEQ ID NO: 2091818 - RNA, 14 nt, Human
gaggggugcucugc

SEQ ID NO: 2091819 - RNA, 21 nt, Human
gagggggcuauagcuacagga

SEQ ID NO: 2091820 - RNA, 22 nt, Human
gagggggccaccuccccaggcc

SEQ ID NO: 2091821 - RNA, 14 nt, Human
gagggggagggggu

SEQ ID NO: 2091822 - RNA, 18 nt, Human
gagggggccaccucccca

SEQ ID NO: 2091823 - RNA, 20 nt, Human
gagggggccaccuccccagg

SEQ ID NO: 2091824 - RNA, 15 nt, Human
gaggggguuacaaac

SEQ ID NO: 2091825 - RNA, 19 nt, Human
gaggggguuacaaacugca

SEQ ID NO: 2091826 - RNA, 20 nt, Human
gaggggguuacaaacugcaa

SEQ ID NO: 2091827 - RNA, 18 nt, Human
gagggcaugcgcacaagg

SEQ ID NO: 2091828 - RNA, 22 nt, Human
gagggcaugcgcacaaggcuga

SEQ ID NO: 2091829 - RNA, 17 nt, Human
gaggggcuuucuggaga

SEQ ID NO: 2091830 - RNA, 20 nt, Human
gagggaugcugccugaguca

SEQ ID NO: 2091831 - RNA, 22 nt, Human
gagggaugaggugcugggaggg

SEQ ID NO: 2091832 - RNA, 15 nt, Human
gagggauguggagca

SEQ ID NO: 2091833 - RNA, 14 nt, Human
gagggucugaggaa

SEQ ID NO: 2091834 - RNA, 13 nt, Human
gagggucugagga

SEQ ID NO: 2091835 - RNA, 24 nt, Human
gagggucuggagaagcagugagcc

SEQ ID NO: 2091836 - RNA, 17 nt, Human
gaggguccuggcuccug

SEQ ID NO: 2091837 - RNA, 15 nt, Human
gagggucuggagaag

SEQ ID NO: 2091838 - RNA, 21 nt, Human
gaggguccuggcuccugaggg

SEQ ID NO: 2091839 - RNA, 13 nt, Human
gagggucagagag

SEQ ID NO: 2091840 - RNA, 13 nt, Human
gagggucaggaag

SEQ ID NO: 2091841 - RNA, 15 nt, Human
gagggucaggaagga

SEQ ID NO: 2091842 - RNA, 15 nt, Human
gagggucagagagga

SEQ ID NO: 2091843 - RNA, 15 nt, Human
gaggguccuggcucc

SEQ ID NO: 2091844 - RNA, 16 nt, Human
gagggucaggaaggau

SEQ ID NO: 2091845 - RNA, 22 nt, Human
gagggugucccaaaaagaaagg

SEQ ID NO: 2091846 - RNA, 21 nt, Human
gaggguggugaccucugccug

SEQ ID NO: 2091847 - RNA, 14 nt, Human
gaggguggugaccu

SEQ ID NO: 2091848 - RNA, 12 nt, Human
gaggguggaaua

SEQ ID NO: 2091849 - RNA, 13 nt, Human
gaggguggcaggu

SEQ ID NO: 2091850 - RNA, 18 nt, Human
gagggugggagagcccag

SEQ ID NO: 2091851 - RNA, 19 nt, Human
gagggugggagagcccagc

SEQ ID NO: 2091852 - RNA, 13 nt, Human
gagggugcugccc

SEQ ID NO: 2091853 - RNA, 13 nt, Human
gaggucagagccu

SEQ ID NO: 2091854 - RNA, 12 nt, Human
gaggucagagcc

SEQ ID NO: 2091855 - RNA, 23 nt, Human
gaggucaacagagaaggcaggaa

SEQ ID NO: 2091856 - RNA, 15 nt, Human
gaggucaagcccagg

SEQ ID NO: 2091857 - RNA, 16 nt, Human
gaggucaagcccagga

SEQ ID NO: 2091858 - RNA, 17 nt, Human
gaggucaagcccaggag

SEQ ID NO: 2091859 - RNA, 19 nt, Human
gaggucaagcccaggagga

SEQ ID NO: 2091860 - RNA, 20 nt, Human
gaggucaagcccaggaggac

SEQ ID NO: 2091861 - RNA, 24 nt, Human
gaggucaagcccaggaggacugcc

SEQ ID NO: 2091862 - RNA, 16 nt, Human
gaggucaaguaagaag

SEQ ID NO: 2091863 - RNA, 17 nt, Human
gaggucaaggcugcagu

SEQ ID NO: 2091864 - RNA, 15 nt, Human
gaggucaacagagaa

SEQ ID NO: 2091865 - RNA, 16 nt, Human
gaggucaacagagaag

SEQ ID NO: 2091866 - RNA, 22 nt, Human
gaggucaacagagaaggcagga

SEQ ID NO: 2091867 - RNA, 21 nt, Human
gagguagguggaucaccugag

SEQ ID NO: 2091868 - RNA, 13 nt, Human
gagguaugagguc

SEQ ID NO: 2091869 - RNA, 12 nt, Human
gaggguuccugu

SEQ ID NO: 2091870 - RNA, 14 nt, Human
gaggguuggggagg

SEQ ID NO: 2091871 - RNA, 17 nt, Human
gaggguuggggaggggc

SEQ ID NO: 2091872 - RNA, 17 nt, Human
gaggguuguucuccuag

SEQ ID NO: 2091873 - RNA, 18 nt, Human
gaggguuguucuccuaga

SEQ ID NO: 2091874 - RNA, 15 nt, Human
gaggguugggcuggu

SEQ ID NO: 2091875 - RNA, 14 nt, Human
gaggguugggcugg

SEQ ID NO: 2091876 - RNA, 15 nt, Human
gaggguuagggaggg

SEQ ID NO: 2091877 - RNA, 19 nt, Human
gaggccuucucugaaggac

SEQ ID NO: 2091878 - RNA, 18 nt, Human
gaggccuucucugaagga

SEQ ID NO: 2091879 - RNA, 16 nt, Human
gaggccuucucugaag

SEQ ID NO: 2091880 - RNA, 21 nt, Human
gaggccucaguggacuuucca

SEQ ID NO: 2091881 - RNA, 13 nt, Human
gaggccucugggc

SEQ ID NO: 2091882 - RNA, 21 nt, Human
gaggccuagucagccacaugg

SEQ ID NO: 2091883 - RNA, 16 nt, Human
gaggccucaguggacu

SEQ ID NO: 2091884 - RNA, 15 nt, Human
gaggcuggccucaga

SEQ ID NO: 2091885 - RNA, 12 nt, Human
gaggcuggcagg

SEQ ID NO: 2091886 - RNA, 13 nt, Human
gaggcuggcaggu

SEQ ID NO: 2091887 - RNA, 16 nt, Human
gaggcuggaggcaggg

SEQ ID NO: 2091888 - RNA, 17 nt, Human
gaggcuggaggcagggc

SEQ ID NO: 2091889 - RNA, 18 nt, Human
gaggcuggaggcagggcc

SEQ ID NO: 2091890 - RNA, 19 nt, Human
gaggcuggaggcagggccu

SEQ ID NO: 2091891 - RNA, 19 nt, Human
gaggcuggacuccagaucu

SEQ ID NO: 2091892 - RNA, 20 nt, Human
gaggcuggacuccagaucug

SEQ ID NO: 2091893 - RNA, 21 nt, Human
gaggcuggacuccagaucugc

SEQ ID NO: 2091894 - RNA, 23 nt, Human
gaggcuggacuccagaucugcac

SEQ ID NO: 2091895 - RNA, 15 nt, Human
gaggcuggagcuggc

SEQ ID NO: 2091896 - RNA, 15 nt, Human
gaggcuggaggcagg

SEQ ID NO: 2091897 - RNA, 15 nt, Human
gaggcuggaggaagg

SEQ ID NO: 2091898 - RNA, 14 nt, Human
gaggcuggaggcag

SEQ ID NO: 2091899 - RNA, 20 nt, Human
gaggccaugauucgcccaaa

SEQ ID NO: 2091900 - RNA, 23 nt, Human
gaggccaugauucgcccaaagcc

SEQ ID NO: 2091901 - RNA, 14 nt, Human
gaggccccacuggg

SEQ ID NO: 2091902 - RNA, 13 nt, Human
gaggcccagggag

SEQ ID NO: 2091903 - RNA, 12 nt, Human
gaggcccaggga

SEQ ID NO: 2091904 - RNA, 22 nt, Human
gaggcagggccuugcccagaga

SEQ ID NO: 2091905 - RNA, 20 nt, Human
gaggcagggccuugcccaga

SEQ ID NO: 2091906 - RNA, 21 nt, Human
gaggcagggccuugcccagag

SEQ ID NO: 2091907 - RNA, 16 nt, Human
gaggcagggaggggac

SEQ ID NO: 2091908 - RNA, 15 nt, Human
gaggcagggccuugc

SEQ ID NO: 2091909 - RNA, 17 nt, Human
gaggcagggccuugccc

SEQ ID NO: 2091910 - RNA, 18 nt, Human
gaggcagggccuugccca

SEQ ID NO: 2091911 - RNA, 17 nt, Human
gaggccaugggccuccu

SEQ ID NO: 2091912 - RNA, 14 nt, Human
gaggccaugggccu

SEQ ID NO: 2091913 - RNA, 23 nt, Human
gaggccaugggccuccugugugu

SEQ ID NO: 2091914 - RNA, 21 nt, Human
gaggccaugggccuccugugu

SEQ ID NO: 2091915 - RNA, 20 nt, Human
gaggccaugggccuccugug

SEQ ID NO: 2091916 - RNA, 18 nt, Human
gaggccaugggccuccug

SEQ ID NO: 2091917 - RNA, 18 nt, Human
gaggcagccccauucugc

SEQ ID NO: 2091918 - RNA, 19 nt, Human
gaggcagccccauucugcc

SEQ ID NO: 2091919 - RNA, 9 nt, Human
gaggcaggg

SEQ ID NO: 2091920 - RNA, 20 nt, Human
gaggcagccccauucugccu

SEQ ID NO: 2091921 - RNA, 21 nt, Human
gaggcagccccauucugccug

SEQ ID NO: 2091922 - RNA, 22 nt, Human
gaggcagggaaguccccaggcc

SEQ ID NO: 2091923 - RNA, 14 nt, Human
gaggcagggaaguc

SEQ ID NO: 2091924 - RNA, 15 nt, Human
gaggcagggagggga

SEQ ID NO: 2091925 - RNA, 17 nt, Human
gaggcagggaggggacu

SEQ ID NO: 2091926 - RNA, 12 nt, Human
gagcccugucuc

SEQ ID NO: 2091927 - RNA, 13 nt, Human
gaggaucucuuga

SEQ ID NO: 2091928 - RNA, 22 nt, Human
gaggaucucuugagccugggag

SEQ ID NO: 2091929 - RNA, 20 nt, Human
gaggaucacuggagcccagg

SEQ ID NO: 2091930 - RNA, 14 nt, Human
gaggaucagaaagu

SEQ ID NO: 2091931 - RNA, 16 nt, Human
gaggaucagaaaguaa

SEQ ID NO: 2091932 - RNA, 16 nt, Human
gaggaucucuugagcc

SEQ ID NO: 2091933 - RNA, 19 nt, Human
gaggaucucuugagccugg

SEQ ID NO: 2091934 - RNA, 20 nt, Human
gaggauuuaagggauggaaa

SEQ ID NO: 2091935 - RNA, 22 nt, Human
gaggauuuaagggauggaaaag

SEQ ID NO: 2091936 - RNA, 20 nt, Human
gaggauugcuugagcucagg

SEQ ID NO: 2091937 - RNA, 21 nt, Human
gaggaugcagagucagcagaa

SEQ ID NO: 2091938 - RNA, 12 nt, Human
gaggauggagag

SEQ ID NO: 2091939 - RNA, 13 nt, Human
gaggauggagaga

SEQ ID NO: 2091940 - RNA, 14 nt, Human
gaggauggagagag

SEQ ID NO: 2091941 - RNA, 15 nt, Human
gaggauggagagagg

SEQ ID NO: 2091942 - RNA, 19 nt, Human
gaggcaaugucaggaacag

SEQ ID NO: 2091943 - RNA, 13 nt, Human
gaggcaagagaau

SEQ ID NO: 2091944 - RNA, 23 nt, Human
gaggcaaaaggcaguggggcugg

SEQ ID NO: 2091945 - RNA, 15 nt, Human
gaggauuucaagccu

SEQ ID NO: 2091946 - RNA, 17 nt, Human
gaggauuucaagccugc

SEQ ID NO: 2091947 - RNA, 22 nt, Human
gaggcagacuucccugaaugua

SEQ ID NO: 2091948 - RNA, 20 nt, Human
gaggcagacagcagcucagg

SEQ ID NO: 2091949 - RNA, 21 nt, Human
gaggcagacagcagcucaggc

SEQ ID NO: 2091950 - RNA, 22 nt, Human
gaggcagacagcagcucaggca

SEQ ID NO: 2091951 - RNA, 20 nt, Human
ggagugcaaugacacagucu

SEQ ID NO: 2091952 - RNA, 14 nt, Human
ggagugcagugagc

SEQ ID NO: 2091953 - RNA, 12 nt, Human
ggagugcaguga

SEQ ID NO: 2091954 - RNA, 21 nt, Human
ggauacgcaucagacagaugg

SEQ ID NO: 2091955 - RNA, 18 nt, Human
ggauacucugucagaugg

SEQ ID NO: 2091956 - RNA, 12 nt, Human
ggauagaggggu

SEQ ID NO: 2091957 - RNA, 17 nt, Human
ggauagauaacucuuug

SEQ ID NO: 2091958 - RNA, 19 nt, Human
ggauagauaacucuuugga

SEQ ID NO: 2091959 - RNA, 20 nt, Human
ggauagauaacucuuuggau

SEQ ID NO: 2091960 - RNA, 15 nt, Human
ggauagaugcccugc

SEQ ID NO: 2091961 - RNA, 15 nt, Human
ggauacuggcaaagc

SEQ ID NO: 2091962 - RNA, 16 nt, Human
ggauacugcccggggc

SEQ ID NO: 2091963 - RNA, 17 nt, Human
ggauagucaccuuuuaa

SEQ ID NO: 2091964 - RNA, 18 nt, Human
ggauagucaccuuuuaaa

SEQ ID NO: 2091965 - RNA, 18 nt, Human
ggauaguugcuccgccuc

SEQ ID NO: 2091966 - RNA, 13 nt, Human
ggauauguggaga

SEQ ID NO: 2091967 - RNA, 21 nt, Human
ggauauuagucauagaagaac

SEQ ID NO: 2091968 - RNA, 16 nt, Human
ggauauuuaagaaaau

SEQ ID NO: 2091969 - RNA, 22 nt, Human
ggauauuuaagaaaauacaaua

SEQ ID NO: 2091970 - RNA, 14 nt, Human
ggauaugaguagcc

SEQ ID NO: 2091971 - RNA, 13 nt, Human
ggauauuuucaaa

SEQ ID NO: 2091972 - RNA, 22 nt, Human
ggaucaaaccccgaccaccugc

SEQ ID NO: 2091973 - RNA, 19 nt, Human
ggauuacaagcgugagcca

SEQ ID NO: 2091974 - RNA, 16 nt, Human
ggauggagagagggga

SEQ ID NO: 2091975 - RNA, 21 nt, Human
ggaugcuccucccuucucuac

SEQ ID NO: 2091976 - RNA, 19 nt, Human
ggauggaaaaggaagacua

SEQ ID NO: 2091977 - RNA, 14 nt, Human
ggaugcugccugag

SEQ ID NO: 2091978 - RNA, 11 nt, Human
ggaugcuucau

SEQ ID NO: 2091979 - RNA, 22 nt, Human
ggaugcuucaugugaacguggg

SEQ ID NO: 2091980 - RNA, 21 nt, Human
ggaugcuugccuagggccugg

SEQ ID NO: 2091981 - RNA, 15 nt, Human
ggaugauuguacaga

SEQ ID NO: 2091982 - RNA, 16 nt, Human
ggaugcagagucagca

SEQ ID NO: 2091983 - RNA, 13 nt, Human
ggaugcagcauua

SEQ ID NO: 2091984 - RNA, 18 nt, Human
ggaugcagagucagcaga

SEQ ID NO: 2091985 - RNA, 14 nt, Human
ggcaccgagaaugu

SEQ ID NO: 2091986 - RNA, 22 nt, Human
ggcacccggccccugcugguuc

SEQ ID NO: 2091987 - RNA, 23 nt, Human
ggcacccaccaucaugucuggcu

SEQ ID NO: 2091988 - RNA, 18 nt, Human
ggcaaugucaggaacaga

SEQ ID NO: 2091989 - RNA, 16 nt, Human
ggcacccacccagcac

SEQ ID NO: 2091990 - RNA, 23 nt, Human
ggcaaugcuggcuguuggcuggg

SEQ ID NO: 2091991 - RNA, 15 nt, Human
ggcaaugcuggcugu

SEQ ID NO: 2091992 - RNA, 14 nt, Human
ggcaaugcuggcug

SEQ ID NO: 2091993 - RNA, 18 nt, Human
ggcaacccccagccugcu

SEQ ID NO: 2091994 - RNA, 18 nt, Human
ggcaauaguguguucuga

SEQ ID NO: 2091995 - RNA, 16 nt, Human
ggcaauauaaccaaug

SEQ ID NO: 2091996 - RNA, 21 nt, Human
ggcaauauaaccaauguuuaa

SEQ ID NO: 2091997 - RNA, 22 nt, Human
ggcaauauaaccaauguuuaaa

SEQ ID NO: 2091998 - RNA, 21 nt, Human
ggcaauauagcaagaucccau

SEQ ID NO: 2091999 - RNA, 23 nt, Human
ggauuacaagcgugagccacugc

SEQ ID NO: 2092000 - RNA, 16 nt, Human
ggauucuuccucccuc

SEQ ID NO: 2092001 - RNA, 17 nt, Human
ggcaacccccagccugc

SEQ ID NO: 2092002 - RNA, 16 nt, Human
ggcaacccccagccug

SEQ ID NO: 2092003 - RNA, 18 nt, Human
ggauuggggaagacugug

SEQ ID NO: 2092004 - RNA, 19 nt, Human
ggauuggggaagacugugg

SEQ ID NO: 2092005 - RNA, 17 nt, Human
ggauugcuacuguccua

SEQ ID NO: 2092006 - RNA, 16 nt, Human
ggauugcuaugaauga

SEQ ID NO: 2092007 - RNA, 17 nt, Human
ggauugcuugagcccag

SEQ ID NO: 2092008 - RNA, 12 nt, Human
ggauuggggaag

SEQ ID NO: 2092009 - RNA, 11 nt, Human
ggccacgugcc

SEQ ID NO: 2092010 - RNA, 12 nt, Human
ggccacgugcca

SEQ ID NO: 2092011 - RNA, 17 nt, Human
ggccacuccagaccccu

SEQ ID NO: 2092012 - RNA, 12 nt, Human
ggccacuccucc

SEQ ID NO: 2092013 - RNA, 18 nt, Human
ggccacgugccaggcccg

SEQ ID NO: 2092014 - RNA, 23 nt, Human
ggccacgugggcaaacaggcagu

SEQ ID NO: 2092015 - RNA, 16 nt, Human
ggccacgugccaggcc

SEQ ID NO: 2092016 - RNA, 17 nt, Human
ggccacgugccaggccc

SEQ ID NO: 2092017 - RNA, 13 nt, Human
ggccacuccucca

SEQ ID NO: 2092018 - RNA, 15 nt, Human
ggccacucugccucu

SEQ ID NO: 2092019 - RNA, 13 nt, Human
ggcauuccugcuu

SEQ ID NO: 2092020 - RNA, 18 nt, Human
ggccagcugugguuuucu

SEQ ID NO: 2092021 - RNA, 11 nt, Human
ggccaggcucc

SEQ ID NO: 2092022 - RNA, 16 nt, Human
ggccaugggccuccug

SEQ ID NO: 2092023 - RNA, 16 nt, Human
ggccaggcuccuuccu

SEQ ID NO: 2092024 - RNA, 20 nt, Human
ggccagcugcaucuacucag

SEQ ID NO: 2092025 - RNA, 23 nt, Human
ggccagcugcaucuacucaggcc

SEQ ID NO: 2092026 - RNA, 18 nt, Human
ggccagcuggcagcagag

SEQ ID NO: 2092027 - RNA, 20 nt, Human
ggccagcugggaucugacug

SEQ ID NO: 2092028 - RNA, 23 nt, Human
ggccagcugggaucugacugcac

SEQ ID NO: 2092029 - RNA, 14 nt, Human
ggccagcuggcagc

SEQ ID NO: 2092030 - RNA, 16 nt, Human
ggccagcuggcagcag

SEQ ID NO: 2092031 - RNA, 17 nt, Human
ggccagcuggcagcaga

SEQ ID NO: 2092032 - RNA, 17 nt, Human
ggcagcuugaggguugg

SEQ ID NO: 2092033 - RNA, 22 nt, Human
ggcagcugcuuuugucuauggg

SEQ ID NO: 2092034 - RNA, 21 nt, Human
ggcagcugaacuauuggaggg

SEQ ID NO: 2092035 - RNA, 21 nt, Human
ggcagcguacucaucaucaac

SEQ ID NO: 2092036 - RNA, 15 nt, Human
ggcacgggcccguga

SEQ ID NO: 2092037 - RNA, 17 nt, Human
ggcacgaacccaccugc

SEQ ID NO: 2092038 - RNA, 18 nt, Human
ggcacgaacccaccugcu

SEQ ID NO: 2092039 - RNA, 19 nt, Human
ggcacgaacccaccugcug

SEQ ID NO: 2092040 - RNA, 20 nt, Human
ggcacgaacccaccugcuga

SEQ ID NO: 2092041 - RNA, 20 nt, Human
ggcacgagcaaagugaagac

SEQ ID NO: 2092042 - RNA, 13 nt, Human
ggcacgcuguggg

SEQ ID NO: 2092043 - RNA, 18 nt, Human
ggcacgcugugggcaggu

SEQ ID NO: 2092044 - RNA, 17 nt, Human
ggcaccuggggaguggg

SEQ ID NO: 2092045 - RNA, 16 nt, Human
ggcacccauccuagag

SEQ ID NO: 2092046 - RNA, 16 nt, Human
ggcaccugucgcccag

SEQ ID NO: 2092047 - RNA, 14 nt, Human
ggcaccuggggagu

SEQ ID NO: 2092048 - RNA, 15 nt, Human
ggcaccgagaauguu

SEQ ID NO: 2092049 - RNA, 21 nt, Human
ggcagugggacagggcauggc

SEQ ID NO: 2092050 - RNA, 22 nt, Human
ggcaucuuugccuugggcugcu

SEQ ID NO: 2092051 - RNA, 23 nt, Human
ggcaucuuugccuugggcugcuc

SEQ ID NO: 2092052 - RNA, 16 nt, Human
ggcagugggagcugcc

SEQ ID NO: 2092053 - RNA, 14 nt, Human
ggcagugggagcug

SEQ ID NO: 2092054 - RNA, 13 nt, Human
ggcagugggagcu

SEQ ID NO: 2092055 - RNA, 20 nt, Human
ggcagggucucacucugucg

SEQ ID NO: 2092056 - RNA, 19 nt, Human
ggcagggucucacucuguc

SEQ ID NO: 2092057 - RNA, 23 nt, Human
ggcagggugggauggaggagaag

SEQ ID NO: 2092058 - RNA, 16 nt, Human
ggcagggugggaugga

SEQ ID NO: 2092059 - RNA, 21 nt, Human
ggcagggugggauggaggaga

SEQ ID NO: 2092060 - RNA, 20 nt, Human
ggcaggguuuuaucucuguc

SEQ ID NO: 2092061 - RNA, 18 nt, Human
ggcauggccagguggcca

SEQ ID NO: 2092062 - RNA, 17 nt, Human
ggcauggccagguggcc

SEQ ID NO: 2092063 - RNA, 16 nt, Human
ggcauggcuccagucu

SEQ ID NO: 2092064 - RNA, 22 nt, Human
ggcaugcuggcucccagggcca

SEQ ID NO: 2092065 - RNA, 12 nt, Human
ggcaugcugggg

SEQ ID NO: 2092066 - RNA, 16 nt, Human
ggcaugccugugugac

SEQ ID NO: 2092067 - RNA, 19 nt, Human
ggcaugcgcacaaggcuga

SEQ ID NO: 2092068 - RNA, 16 nt, Human
ggcaugcuggggcaag

SEQ ID NO: 2092069 - RNA, 13 nt, Human
ggcaugcuggggc

SEQ ID NO: 2092070 - RNA, 14 nt, Human
ggcaugcuggggca

SEQ ID NO: 2092071 - RNA, 20 nt, Human
ggcaucuuugcuauggggac

SEQ ID NO: 2092072 - RNA, 13 nt, Human
ggcaugccugugu

SEQ ID NO: 2092073 - RNA, 14 nt, Human
ggcaugccugugug

SEQ ID NO: 2092074 - RNA, 19 nt, Human
ggcucccacaggcccuucc

SEQ ID NO: 2092075 - RNA, 18 nt, Human
ggcucccacaggcccuuc

SEQ ID NO: 2092076 - RNA, 17 nt, Human
ggcucccacaggcccuu

SEQ ID NO: 2092077 - RNA, 24 nt, Human
ggcuccagucugcugcccuccauc

SEQ ID NO: 2092078 - RNA, 15 nt, Human
ggcuccagucugcug

SEQ ID NO: 2092079 - RNA, 18 nt, Human
ggcuccagucugcugccc

SEQ ID NO: 2092080 - RNA, 22 nt, Human
ggcuccagucugcugcccucca

SEQ ID NO: 2092081 - RNA, 16 nt, Human
ggcuccaggcuccuuu

SEQ ID NO: 2092082 - RNA, 11 nt, Human
ggcuccaggcu

SEQ ID NO: 2092083 - RNA, 15 nt, Human
ggcuccaggcuccuu

SEQ ID NO: 2092084 - RNA, 21 nt, Human
ggcucaaguccucuuuucuga

SEQ ID NO: 2092085 - RNA, 15 nt, Human
ggcucaaguccucuu

SEQ ID NO: 2092086 - RNA, 16 nt, Human
ggcucacaccuguaau

SEQ ID NO: 2092087 - RNA, 15 nt, Human
ggcuaguugggcuuc

SEQ ID NO: 2092088 - RNA, 16 nt, Human
ggcuaguugggcuucc

SEQ ID NO: 2092089 - RNA, 19 nt, Human
ggcuauagcuacaggaagc

SEQ ID NO: 2092090 - RNA, 20 nt, Human
ggcuauagcuacaggaagca

SEQ ID NO: 2092091 - RNA, 19 nt, Human
ggcuaugggggcacugagg

SEQ ID NO: 2092092 - RNA, 19 nt, Human
ggcuauuccauaauuccau

SEQ ID NO: 2092093 - RNA, 15 nt, Human
ggcuauuuaccaggg

SEQ ID NO: 2092094 - RNA, 14 nt, Human
ggcucaagcagucu

SEQ ID NO: 2092095 - RNA, 23 nt, Human
ggcucaagcagucuacccaccuc

SEQ ID NO: 2092096 - RNA, 22 nt, Human
ggcuauggauuuucuaaggaag

SEQ ID NO: 2092097 - RNA, 19 nt, Human
ggcuauguauggaauacag

SEQ ID NO: 2092098 - RNA, 13 nt, Human
ggcuauucacaac

SEQ ID NO: 2092099 - RNA, 16 nt, Human
ggcuaggaccccucca

SEQ ID NO: 2092100 - RNA, 15 nt, Human
ggcuagaucaugaag

SEQ ID NO: 2092101 - RNA, 20 nt, Human
ggcuagaguccucacuccca

SEQ ID NO: 2092102 - RNA, 22 nt, Human
ggcuaggaccccuccauguggg

SEQ ID NO: 2092103 - RNA, 13 nt, Human
ggcuagaguccuc

SEQ ID NO: 2092104 - RNA, 14 nt, Human
ggcuagaguccuca

SEQ ID NO: 2092105 - RNA, 18 nt, Human
ggcuagaguccucacucc

SEQ ID NO: 2092106 - RNA, 19 nt, Human
ggcuagaguccucacuccc

SEQ ID NO: 2092107 - RNA, 12 nt, Human
ggccuggcuccg

SEQ ID NO: 2092108 - RNA, 13 nt, Human
ggccuggcuccgc

SEQ ID NO: 2092109 - RNA, 14 nt, Human
ggccuggcuccgcu

SEQ ID NO: 2092110 - RNA, 18 nt, Human
ggccuggcuccgcugugu

SEQ ID NO: 2092111 - RNA, 19 nt, Human
ggccucuugggucccccac

SEQ ID NO: 2092112 - RNA, 17 nt, Human
ggccugucucaucccca

SEQ ID NO: 2092113 - RNA, 18 nt, Human
ggccugucucauccccag

SEQ ID NO: 2092114 - RNA, 19 nt, Human
ggccugucucauccccagg

SEQ ID NO: 2092115 - RNA, 20 nt, Human
ggccugucucauccccaggg

SEQ ID NO: 2092116 - RNA, 14 nt, Human
ggccugucccuggc

SEQ ID NO: 2092117 - RNA, 17 nt, Human
ggccugucccuggccau

SEQ ID NO: 2092118 - RNA, 21 nt, Human
ggccugucccuggccaucucu

SEQ ID NO: 2092119 - RNA, 23 nt, Human
ggccugucucauccccagggguc

SEQ ID NO: 2092120 - RNA, 22 nt, Human
ggcgcgcaccuguaaucccagc

SEQ ID NO: 2092121 - RNA, 20 nt, Human
ggcggagcuugcagugagcc

SEQ ID NO: 2092122 - RNA, 21 nt, Human
ggcggagcuugcagugagccg

SEQ ID NO: 2092123 - RNA, 20 nt, Human
ggcggcuacucagcagcccu

SEQ ID NO: 2092124 - RNA, 21 nt, Human
ggcggcuacucagcagcccuc

SEQ ID NO: 2092125 - RNA, 22 nt, Human
ggcggcuacucagcagcccucc

SEQ ID NO: 2092126 - RNA, 23 nt, Human
ggcggcuacucagcagcccuccu

SEQ ID NO: 2092127 - RNA, 19 nt, Human
ggccucaacccucccucag

SEQ ID NO: 2092128 - RNA, 21 nt, Human
ggccucaacccucccucagcc

SEQ ID NO: 2092129 - RNA, 15 nt, Human
ggccucaacccuccc

SEQ ID NO: 2092130 - RNA, 22 nt, Human
ggccucaaaguuggggcaggcu

SEQ ID NO: 2092131 - RNA, 16 nt, Human
ggccucaacccucccu

SEQ ID NO: 2092132 - RNA, 17 nt, Human
ggccucaacccucccuc

SEQ ID NO: 2092133 - RNA, 18 nt, Human
ggccucaacccucccuca

SEQ ID NO: 2092134 - RNA, 13 nt, Human
ggccucggagccu

SEQ ID NO: 2092135 - RNA, 15 nt, Human
ggccucggagccuca

SEQ ID NO: 2092136 - RNA, 19 nt, Human
ggccucggagccucauccg

SEQ ID NO: 2092137 - RNA, 22 nt, Human
ggccucggagccucauccgagg

SEQ ID NO: 2092138 - RNA, 15 nt, Human
ggccuagucagccac

SEQ ID NO: 2092139 - RNA, 20 nt, Human
ggccucgguguggagaagcg

SEQ ID NO: 2092140 - RNA, 20 nt, Human
ggccgucuucacucgccccc

SEQ ID NO: 2092141 - RNA, 12 nt, Human
ggccgucaggac

SEQ ID NO: 2092142 - RNA, 19 nt, Human
ggccgucaggacccaccau

SEQ ID NO: 2092143 - RNA, 15 nt, Human
ggccggugugggcug

SEQ ID NO: 2092144 - RNA, 14 nt, Human
ggcccuggggccug

SEQ ID NO: 2092145 - RNA, 11 nt, Human
ggcccuggggc

SEQ ID NO: 2092146 - RNA, 15 nt, Human
ggcccuggggccugu

SEQ ID NO: 2092147 - RNA, 12 nt, Human
ggcccugguccu

SEQ ID NO: 2092148 - RNA, 12 nt, Human
ggcccuggggcc

SEQ ID NO: 2092149 - RNA, 15 nt, Human
ggcccugguccuucc

SEQ ID NO: 2092150 - RNA, 17 nt, Human
ggcccugguccuuccag

SEQ ID NO: 2092151 - RNA, 19 nt, Human
ggcccaagagaugaagagu

SEQ ID NO: 2092152 - RNA, 14 nt, Human
ggcccaacauuaaa

SEQ ID NO: 2092153 - RNA, 23 nt, Human
ggcccaacacaauucuucuucca

SEQ ID NO: 2092154 - RNA, 21 nt, Human
ggcccaaauuaucaagcuaau

SEQ ID NO: 2092155 - RNA, 23 nt, Human
ggcccaaauuaucaagcuaauaa

SEQ ID NO: 2092156 - RNA, 22 nt, Human
ggcccacgccuguaaucccagc

SEQ ID NO: 2092157 - RNA, 12 nt, Human
ggcccagagagg

SEQ ID NO: 2092158 - RNA, 15 nt, Human
ggcccagagaagcca

SEQ ID NO: 2092159 - RNA, 11 nt, Human
ggcccagagag

SEQ ID NO: 2092160 - RNA, 19 nt, Human
ggcccucugguagacacag

SEQ ID NO: 2092161 - RNA, 14 nt, Human
ggcccugccuucuu

SEQ ID NO: 2092162 - RNA, 10 nt, Human
ggcccugccu

SEQ ID NO: 2092163 - RNA, 12 nt, Human
ggcccuggccug

SEQ ID NO: 2092164 - RNA, 13 nt, Human
ggcccuggcuccc

SEQ ID NO: 2092165 - RNA, 14 nt, Human
ggcccuggccugcu

SEQ ID NO: 2092166 - RNA, 15 nt, Human
ggcccuggccugcug

SEQ ID NO: 2092167 - RNA, 16 nt, Human
ggcccuggccugcugg

SEQ ID NO: 2092168 - RNA, 17 nt, Human
ggcccuggccugcuggg

SEQ ID NO: 2092169 - RNA, 22 nt, Human
ggcccuggcucccacaggcccu

SEQ ID NO: 2092170 - RNA, 22 nt, Human
ggcccuggccugcugggcucuc

SEQ ID NO: 2092171 - RNA, 14 nt, Human
ggcccugagcucgg

SEQ ID NO: 2092172 - RNA, 19 nt, Human
ggcccugagcucgguggac

SEQ ID NO: 2092173 - RNA, 21 nt, Human
ggcccugagcucgguggaccc

SEQ ID NO: 2092174 - RNA, 16 nt, Human
gcuugaggguugggcu

SEQ ID NO: 2092175 - RNA, 12 nt, Human
gcuucugccugc

SEQ ID NO: 2092176 - RNA, 13 nt, Human
gcuucugccugca

SEQ ID NO: 2092177 - RNA, 14 nt, Human
gcuucugcaccuua

SEQ ID NO: 2092178 - RNA, 16 nt, Human
gcuucugccacauaaa

SEQ ID NO: 2092179 - RNA, 22 nt, Human
gcuucucugugaacgauuuaga

SEQ ID NO: 2092180 - RNA, 19 nt, Human
gcuucucugugacugaugu

SEQ ID NO: 2092181 - RNA, 17 nt, Human
gcuucucuuuaacucag

SEQ ID NO: 2092182 - RNA, 19 nt, Human
gcuucucuuuaacucagga

SEQ ID NO: 2092183 - RNA, 21 nt, Human
gcuucucuuuaacucaggacu

SEQ ID NO: 2092184 - RNA, 23 nt, Human
gcuucucuuuaacucaggacucc

SEQ ID NO: 2092185 - RNA, 15 nt, Human
gcuucugaccucagc

SEQ ID NO: 2092186 - RNA, 16 nt, Human
gcuucugaccucagca

SEQ ID NO: 2092187 - RNA, 15 nt, Human
gcuucugaugaaucu

SEQ ID NO: 2092188 - RNA, 17 nt, Human
gcuucugaugaaucuug

SEQ ID NO: 2092189 - RNA, 18 nt, Human
gcuucugaugaaucuugc

SEQ ID NO: 2092190 - RNA, 20 nt, Human
gcuucugaugaaucuugcgu

SEQ ID NO: 2092191 - RNA, 14 nt, Human
gcuuccaggaaaaa

SEQ ID NO: 2092192 - RNA, 17 nt, Human
gcuucauuuccuguguc

SEQ ID NO: 2092193 - RNA, 22 nt, Human
gcuucucauccugcaggcagcu

SEQ ID NO: 2092194 - RNA, 16 nt, Human
gcuucauuuccugugu

SEQ ID NO: 2092195 - RNA, 13 nt, Human
gcuucauuuccug

SEQ ID NO: 2092196 - RNA, 18 nt, Human
gcuucaguggcagcugcu

SEQ ID NO: 2092197 - RNA, 17 nt, Human
gcuucaguggcagcugc

SEQ ID NO: 2092198 - RNA, 16 nt, Human
gcuuaugaauauuuau

SEQ ID NO: 2092199 - RNA, 21 nt, Human
gcuuaugaauauuuauaacag

SEQ ID NO: 2092200 - RNA, 16 nt, Human
gcuucaguggcagcug

SEQ ID NO: 2092201 - RNA, 12 nt, Human
gcuuauacacuu

SEQ ID NO: 2092202 - RNA, 20 nt, Human
gcuuauacacuuacacuuua

SEQ ID NO: 2092203 - RNA, 19 nt, Human
gcuuaucucaggggugugc

SEQ ID NO: 2092204 - RNA, 17 nt, Human
gcuguccuuacccaucu

SEQ ID NO: 2092205 - RNA, 22 nt, Human
gcuguccuuacccaucugcacc

SEQ ID NO: 2092206 - RNA, 13 nt, Human
gcugucuccagac

SEQ ID NO: 2092207 - RNA, 14 nt, Human
gcugucuccagacc

SEQ ID NO: 2092208 - RNA, 15 nt, Human
gcugucuccagaccc

SEQ ID NO: 2092209 - RNA, 22 nt, Human
gcugucuccagacccccacccc

SEQ ID NO: 2092210 - RNA, 13 nt, Human
gcugugguuccug

SEQ ID NO: 2092211 - RNA, 15 nt, Human
gcugugguuccuggg

SEQ ID NO: 2092212 - RNA, 18 nt, Human
gcuguggguacagagagg

SEQ ID NO: 2092213 - RNA, 13 nt, Human
gcuguggucucuu

SEQ ID NO: 2092214 - RNA, 16 nt, Human
gcuguggucucuuugu

SEQ ID NO: 2092215 - RNA, 12 nt, Human
gcugugggcucc

SEQ ID NO: 2092216 - RNA, 13 nt, Human
gcugugggcuccc

SEQ ID NO: 2092217 - RNA, 14 nt, Human
gcugugggcucccu

SEQ ID NO: 2092218 - RNA, 15 nt, Human
gcugugggcucccuu

SEQ ID NO: 2092219 - RNA, 16 nt, Human
gcugugggcucccuuc

SEQ ID NO: 2092220 - RNA, 18 nt, Human
gcugugggcucccuuccu

SEQ ID NO: 2092221 - RNA, 23 nt, Human
gcugugggcaggugggagcuuga

SEQ ID NO: 2092222 - RNA, 18 nt, Human
gcugugggccucaaggac

SEQ ID NO: 2092223 - RNA, 19 nt, Human
gcugugggccucaaggacu

SEQ ID NO: 2092224 - RNA, 14 nt, Human
gcuguucagcuggu

SEQ ID NO: 2092225 - RNA, 13 nt, Human
gcuguucagcugg

SEQ ID NO: 2092226 - RNA, 13 nt, Human
gcuguugccucau

SEQ ID NO: 2092227 - RNA, 15 nt, Human
gcuguugccucaucu

SEQ ID NO: 2092228 - RNA, 18 nt, Human
gcuguugagcuguuuucc

SEQ ID NO: 2092229 - RNA, 16 nt, Human
gcuguugagcuguuuu

SEQ ID NO: 2092230 - RNA, 15 nt, Human
gcuguugagcuguuu

SEQ ID NO: 2092231 - RNA, 12 nt, Human
gcuguugagcug

SEQ ID NO: 2092232 - RNA, 19 nt, Human
gcuuagaccucagccugug

SEQ ID NO: 2092233 - RNA, 23 nt, Human
gcuuagaccucagccugugcugc

SEQ ID NO: 2092234 - RNA, 13 nt, Human
ggaaccagagcca

SEQ ID NO: 2092235 - RNA, 12 nt, Human
ggaaccagagcc

SEQ ID NO: 2092236 - RNA, 19 nt, Human
ggaaccagagccauggacu

SEQ ID NO: 2092237 - RNA, 23 nt, Human
ggaacaguguuucccauaauuuu

SEQ ID NO: 2092238 - RNA, 18 nt, Human
ggaacaguguuucccaua

SEQ ID NO: 2092239 - RNA, 14 nt, Human
ggaaauaaaaaagu

SEQ ID NO: 2092240 - RNA, 15 nt, Human
ggaaauaaaaaaguc

SEQ ID NO: 2092241 - RNA, 19 nt, Human
ggaaauaaaaaagucucua

SEQ ID NO: 2092242 - RNA, 22 nt, Human
ggaaauaaaaaagucucuauuu

SEQ ID NO: 2092243 - RNA, 15 nt, Human
ggaaauaaaaccuuu

SEQ ID NO: 2092244 - RNA, 16 nt, Human
ggaaauaaaaccuuuc

SEQ ID NO: 2092245 - RNA, 18 nt, Human
ggaaauaaaaccuuucaa

SEQ ID NO: 2092246 - RNA, 19 nt, Human
ggaaauaaaaccuuucaaa

SEQ ID NO: 2092247 - RNA, 20 nt, Human
ggaaauaaaaccuuucaaau

SEQ ID NO: 2092248 - RNA, 22 nt, Human
ggaaauaaaaccuuucaaauuu

SEQ ID NO: 2092249 - RNA, 20 nt, Human
ggaaauaauaaagaugcucu

SEQ ID NO: 2092250 - RNA, 14 nt, Human
ggaaauauauaugu

SEQ ID NO: 2092251 - RNA, 16 nt, Human
ggaaauaucaguuacu

SEQ ID NO: 2092252 - RNA, 14 nt, Human
ggaaauauuaugca

SEQ ID NO: 2092253 - RNA, 22 nt, Human
ggaaauaucaguuacucagccc

SEQ ID NO: 2092254 - RNA, 23 nt, Human
ggaacagcuaugggagccccagg

SEQ ID NO: 2092255 - RNA, 23 nt, Human
ggaaaaucagccugcuccagcug

SEQ ID NO: 2092256 - RNA, 23 nt, Human
ggaaaaauggauccccagugaaa

SEQ ID NO: 2092257 - RNA, 21 nt, Human
ggaaaauguuuuguaagaaac

SEQ ID NO: 2092258 - RNA, 15 nt, Human
ggaaaaugccaaucu

SEQ ID NO: 2092259 - RNA, 17 nt, Human
ggaaaaugccaaucucu

SEQ ID NO: 2092260 - RNA, 19 nt, Human
ggaaaaucagccugcucca

SEQ ID NO: 2092261 - RNA, 20 nt, Human
ggaaaggcucagucucagga

SEQ ID NO: 2092262 - RNA, 23 nt, Human
ggaaagggauuuucagcccucag

SEQ ID NO: 2092263 - RNA, 23 nt, Human
ggaaaggcucagucucaggagca

SEQ ID NO: 2092264 - RNA, 15 nt, Human
ggaaaggcucugaaa

SEQ ID NO: 2092265 - RNA, 20 nt, Human
ggaaaggcucugaaagccag

SEQ ID NO: 2092266 - RNA, 15 nt, Human
gcuuuguaugcacuu

SEQ ID NO: 2092267 - RNA, 12 nt, Human
gcuuugucccac

SEQ ID NO: 2092268 - RNA, 15 nt, Human
gcuuugucccacagc

SEQ ID NO: 2092269 - RNA, 16 nt, Human
gcuuugucccacagcu

SEQ ID NO: 2092270 - RNA, 19 nt, Human
gcuuugucccacagcuugg

SEQ ID NO: 2092271 - RNA, 13 nt, Human
gcuuucagagccu

SEQ ID NO: 2092272 - RNA, 23 nt, Human
gcuuuauuuuuuaaguauuuaua

SEQ ID NO: 2092273 - RNA, 20 nt, Human
gcuuucaagaccccugucuu

SEQ ID NO: 2092274 - RNA, 19 nt, Human
gcuuuauuuuuuaaguauu

SEQ ID NO: 2092275 - RNA, 21 nt, Human
gcuuuauuuuuuaaguauuua

SEQ ID NO: 2092276 - RNA, 20 nt, Human
gcuugaggguugggcuggug

SEQ ID NO: 2092277 - RNA, 18 nt, Human
gcuugaggguugggcugg

SEQ ID NO: 2092278 - RNA, 18 nt, Human
gcuuuagaauguuuuccu

SEQ ID NO: 2092279 - RNA, 20 nt, Human
gcuuuagaauguuuuccuuc

SEQ ID NO: 2092280 - RNA, 16 nt, Human
gcuuuacuguuuguua

SEQ ID NO: 2092281 - RNA, 15 nt, Human
gcuuuacuuagcuua

SEQ ID NO: 2092282 - RNA, 16 nt, Human
gcuuuacuuagcuuau

SEQ ID NO: 2092283 - RNA, 18 nt, Human
gcuuuacuuagcuuauca

SEQ ID NO: 2092284 - RNA, 21 nt, Human
gcuuuacuuagcuuaucaauu

SEQ ID NO: 2092285 - RNA, 18 nt, Human
gcuuuucacugcuggcug

SEQ ID NO: 2092286 - RNA, 14 nt, Human
gcuuuucacugcug

SEQ ID NO: 2092287 - RNA, 13 nt, Human
gcuuuucacugcu

SEQ ID NO: 2092288 - RNA, 21 nt, Human
gcuuuguuuguugucagcuga

SEQ ID NO: 2092289 - RNA, 23 nt, Human
gcuuuucacugcuggcugccuua

SEQ ID NO: 2092290 - RNA, 22 nt, Human
gcuuuucacugcuggcugccuu

SEQ ID NO: 2092291 - RNA, 13 nt, Human
ggaaaaauauuua

SEQ ID NO: 2092292 - RNA, 14 nt, Human
ggaaaaauauuuaa

SEQ ID NO: 2092293 - RNA, 15 nt, Human
ggaaaaauauuuaag

SEQ ID NO: 2092294 - RNA, 15 nt, Human
ggaaaaauccagaaa

SEQ ID NO: 2092295 - RNA, 20 nt, Human
ggaaaagcugcugacagugu

SEQ ID NO: 2092296 - RNA, 18 nt, Human
ggaaaagcugcugacagu

SEQ ID NO: 2092297 - RNA, 20 nt, Human
ggaaaaggcagggagcgagg

SEQ ID NO: 2092298 - RNA, 14 nt, Human
ggaaaagcugcuga

SEQ ID NO: 2092299 - RNA, 18 nt, Human
ggaaaacagacucagguu

SEQ ID NO: 2092300 - RNA, 21 nt, Human
ggaaaaccaagccguggcuuc

SEQ ID NO: 2092301 - RNA, 23 nt, Human
ggagauauuuauggggggagaac

SEQ ID NO: 2092302 - RNA, 17 nt, Human
ggagaucggggccagag

SEQ ID NO: 2092303 - RNA, 18 nt, Human
ggagaucggggccagagg

SEQ ID NO: 2092304 - RNA, 19 nt, Human
ggagaucggggccagaggc

SEQ ID NO: 2092305 - RNA, 19 nt, Human
ggagaugaagcaaacacau

SEQ ID NO: 2092306 - RNA, 22 nt, Human
ggagauauuuauggggggagaa

SEQ ID NO: 2092307 - RNA, 23 nt, Human
ggagagggucuggagaagcagug

SEQ ID NO: 2092308 - RNA, 16 nt, Human
ggagaggcagagugcc

SEQ ID NO: 2092309 - RNA, 13 nt, Human
ggagaggccauga

SEQ ID NO: 2092310 - RNA, 11 nt, Human
ggagaggucuu

SEQ ID NO: 2092311 - RNA, 18 nt, Human
ggagaggucuuuuuuaaa

SEQ ID NO: 2092312 - RNA, 23 nt, Human
ggagaggucuuuuuuaaaaggaa

SEQ ID NO: 2092313 - RNA, 21 nt, Human
ggagagguuauaggucacucc

SEQ ID NO: 2092314 - RNA, 17 nt, Human
ggagagucuugcaguga

SEQ ID NO: 2092315 - RNA, 21 nt, Human
ggagaguccccugaaggucug

SEQ ID NO: 2092316 - RNA, 16 nt, Human
ggagagguugucugug

SEQ ID NO: 2092317 - RNA, 23 nt, Human
ggagagguuauaggucacuccug

SEQ ID NO: 2092318 - RNA, 20 nt, Human
ggagaaucgcuugaacccag

SEQ ID NO: 2092319 - RNA, 21 nt, Human
ggagacacauccagcaauugu

SEQ ID NO: 2092320 - RNA, 14 nt, Human
ggagacaccucaga

SEQ ID NO: 2092321 - RNA, 19 nt, Human
ggagacaaugcagaugcca

SEQ ID NO: 2092322 - RNA, 22 nt, Human
ggagacaaugcagaugccagag

SEQ ID NO: 2092323 - RNA, 23 nt, Human
ggagacaaugcagaugccagagc

SEQ ID NO: 2092324 - RNA, 23 nt, Human
ggacuggcuagaguccucacucc

SEQ ID NO: 2092325 - RNA, 15 nt, Human
ggacuggcuguccuu

SEQ ID NO: 2092326 - RNA, 21 nt, Human
ggacuggcuuugucccacagc

SEQ ID NO: 2092327 - RNA, 17 nt, Human
ggacuggagucccugug

SEQ ID NO: 2092328 - RNA, 19 nt, Human
ggacuggcuagaguccuca

SEQ ID NO: 2092329 - RNA, 20 nt, Human
ggacuggcuagaguccucac

SEQ ID NO: 2092330 - RNA, 22 nt, Human
ggacuggcuagaguccucacuc

SEQ ID NO: 2092331 - RNA, 17 nt, Human
ggagaagcggcuggcag

SEQ ID NO: 2092332 - RNA, 18 nt, Human
ggagaagcggcuggcagc

SEQ ID NO: 2092333 - RNA, 20 nt, Human
ggacauugcggacagccacg

SEQ ID NO: 2092334 - RNA, 16 nt, Human
ggacauguucccuucu

SEQ ID NO: 2092335 - RNA, 21 nt, Human
ggacauguucccuucuccuuc

SEQ ID NO: 2092336 - RNA, 20 nt, Human
ggacauuccaauuugcacuu

SEQ ID NO: 2092337 - RNA, 17 nt, Human
ggacagcauggugcaug

SEQ ID NO: 2092338 - RNA, 19 nt, Human
ggacagcauggugcaugcc

SEQ ID NO: 2092339 - RNA, 17 nt, Human
ggaccaaggagaugaag

SEQ ID NO: 2092340 - RNA, 15 nt, Human
ggaccaaggaccccu

SEQ ID NO: 2092341 - RNA, 13 nt, Human
ggaccaaagcuga

SEQ ID NO: 2092342 - RNA, 18 nt, Human
ggaccaacaagggcagug

SEQ ID NO: 2092343 - RNA, 22 nt, Human
ggaccaacaagggcaguggagg

SEQ ID NO: 2092344 - RNA, 21 nt, Human
ggacagccacggccaggccag

SEQ ID NO: 2092345 - RNA, 20 nt, Human
ggacagccacggccaggcca

SEQ ID NO: 2092346 - RNA, 19 nt, Human
ggacagccacggccaggcc

SEQ ID NO: 2092347 - RNA, 15 nt, Human
ggacagccacggcca

SEQ ID NO: 2092348 - RNA, 17 nt, Human
ggacacucaaaagcugg

SEQ ID NO: 2092349 - RNA, 22 nt, Human
ggacacucaaaagcugggcagg

SEQ ID NO: 2092350 - RNA, 13 nt, Human
ggacagaucauag

SEQ ID NO: 2092351 - RNA, 23 nt, Human
ggacagaucauagauuucugauu

SEQ ID NO: 2092352 - RNA, 15 nt, Human
ggacagcaaaaccau

SEQ ID NO: 2092353 - RNA, 20 nt, Human
ggacagcaaaaccauugcuu

SEQ ID NO: 2092354 - RNA, 21 nt, Human
ggacagcaaaaccauugcuuc

SEQ ID NO: 2092355 - RNA, 22 nt, Human
ggacagcaaaaccauugcuuca

SEQ ID NO: 2092356 - RNA, 17 nt, Human
ggaccuugaacugggua

SEQ ID NO: 2092357 - RNA, 15 nt, Human
ggaccuugaacuggg

SEQ ID NO: 2092358 - RNA, 14 nt, Human
ggaccuccugagcg

SEQ ID NO: 2092359 - RNA, 21 nt, Human
ggaccacaccucccugaacca

SEQ ID NO: 2092360 - RNA, 13 nt, Human
ggaccacaccucc

SEQ ID NO: 2092361 - RNA, 22 nt, Human
ggaccacaaaaaugaaagcaug

SEQ ID NO: 2092362 - RNA, 19 nt, Human
ggaccagaagccaaagacu

SEQ ID NO: 2092363 - RNA, 19 nt, Human
ggaccucaggugagaagca

SEQ ID NO: 2092364 - RNA, 23 nt, Human
ggaccucaggugagaagcagagg

SEQ ID NO: 2092365 - RNA, 13 nt, Human
ggaccuccugagc

SEQ ID NO: 2092366 - RNA, 18 nt, Human
ggaagguuuguauauugu

SEQ ID NO: 2092367 - RNA, 21 nt, Human
ggaaggggcccgugggaguca

SEQ ID NO: 2092368 - RNA, 18 nt, Human
ggaaggggcccgugggag

SEQ ID NO: 2092369 - RNA, 17 nt, Human
ggaaggggcuggacugg

SEQ ID NO: 2092370 - RNA, 20 nt, Human
ggaaggggcuggacuggcug

SEQ ID NO: 2092371 - RNA, 18 nt, Human
ggaaggguuuguggcugg

SEQ ID NO: 2092372 - RNA, 16 nt, Human
ggaaguguaacagcug

SEQ ID NO: 2092373 - RNA, 17 nt, Human
ggaaguguaacagcuga

SEQ ID NO: 2092374 - RNA, 18 nt, Human
ggaagugacaaggcccca

SEQ ID NO: 2092375 - RNA, 19 nt, Human
ggaagugacaaggccccag

SEQ ID NO: 2092376 - RNA, 22 nt, Human
ggaagugacaaggccccagaga

SEQ ID NO: 2092377 - RNA, 21 nt, Human
ggaagugacaaggccccagag

SEQ ID NO: 2092378 - RNA, 21 nt, Human
ggaagugagggucagagagga

SEQ ID NO: 2092379 - RNA, 18 nt, Human
ggaaguccccaggcccca

SEQ ID NO: 2092380 - RNA, 21 nt, Human
ggaaguccccaggccccagga

SEQ ID NO: 2092381 - RNA, 23 nt, Human
ggaaguccccaggccccaggaag

SEQ ID NO: 2092382 - RNA, 14 nt, Human
ggaagucuaggagc

SEQ ID NO: 2092383 - RNA, 23 nt, Human
ggaagugaagagggagaagggau

SEQ ID NO: 2092384 - RNA, 17 nt, Human
ggaagucuaggagcugg

SEQ ID NO: 2092385 - RNA, 17 nt, Human
ggaagugacaaggcccc

SEQ ID NO: 2092386 - RNA, 13 nt, Human
ggaacgcagauga

SEQ ID NO: 2092387 - RNA, 13 nt, Human
ggaaccuggacca

SEQ ID NO: 2092388 - RNA, 18 nt, Human
ggaaccuggaccaaagcu

SEQ ID NO: 2092389 - RNA, 19 nt, Human
ggaaccuggaccaaagcug

SEQ ID NO: 2092390 - RNA, 14 nt, Human
ggaaggccaccugc

SEQ ID NO: 2092391 - RNA, 17 nt, Human
ggaaggccaccugcagg

SEQ ID NO: 2092392 - RNA, 18 nt, Human
ggaaggccaccugcaggu

SEQ ID NO: 2092393 - RNA, 23 nt, Human
ggaaggccaccugcaggucacug

SEQ ID NO: 2092394 - RNA, 19 nt, Human
ggaaggcaugccuggacaa

SEQ ID NO: 2092395 - RNA, 17 nt, Human
ggaaggcugagaggaga

SEQ ID NO: 2092396 - RNA, 14 nt, Human
ggaaggcuggcugg

SEQ ID NO: 2092397 - RNA, 17 nt, Human
ggaaggcuggcugggca

SEQ ID NO: 2092398 - RNA, 21 nt, Human
ggaagggcaggaaggagagcc

SEQ ID NO: 2092399 - RNA, 16 nt, Human
ggaagggacuaggagc

SEQ ID NO: 2092400 - RNA, 14 nt, Human
ggaagggcaaaacc

SEQ ID NO: 2092401 - RNA, 12 nt, Human
ggaagggcagga

SEQ ID NO: 2092402 - RNA, 15 nt, Human
ggaagggcaggaagg

SEQ ID NO: 2092403 - RNA, 15 nt, Human
ggacaaacccuucuu

SEQ ID NO: 2092404 - RNA, 17 nt, Human
ggacaaauuuaaaacaa

SEQ ID NO: 2092405 - RNA, 15 nt, Human
ggacaaagucuccag

SEQ ID NO: 2092406 - RNA, 16 nt, Human
ggacaaagucuccagc

SEQ ID NO: 2092407 - RNA, 17 nt, Human
ggacaaagucuccagcc

SEQ ID NO: 2092408 - RNA, 18 nt, Human
ggacaaagucuccagccc

SEQ ID NO: 2092409 - RNA, 19 nt, Human
ggacaaagucuccagccca

SEQ ID NO: 2092410 - RNA, 20 nt, Human
ggacaaagucuccagcccac

SEQ ID NO: 2092411 - RNA, 21 nt, Human
ggacaaagucuccagcccacg

SEQ ID NO: 2092412 - RNA, 24 nt, Human
ggacaaagucuccagcccacguuc

SEQ ID NO: 2092413 - RNA, 15 nt, Human
ggaauuuuuuauucu

SEQ ID NO: 2092414 - RNA, 17 nt, Human
ggaauuuuuuauucuug

SEQ ID NO: 2092415 - RNA, 20 nt, Human
ggaauuuuuuauucuuguga

SEQ ID NO: 2092416 - RNA, 21 nt, Human
ggaauugguggcagauuuuac

SEQ ID NO: 2092417 - RNA, 23 nt, Human
ggaauugguggcagauuuuacaa

SEQ ID NO: 2092418 - RNA, 20 nt, Human
ggaauugcuuaccaaaggau

SEQ ID NO: 2092419 - RNA, 19 nt, Human
ggaauguuugccucugccu

SEQ ID NO: 2092420 - RNA, 16 nt, Human
ggaauguuaaagucag

SEQ ID NO: 2092421 - RNA, 13 nt, Human
ggaauuaaaacaa

SEQ ID NO: 2092422 - RNA, 14 nt, Human
ggaauuaaaacaau

SEQ ID NO: 2092423 - RNA, 17 nt, Human
ggaauuaaaacaauguc

SEQ ID NO: 2092424 - RNA, 14 nt, Human
ggaauuaaccuggu

SEQ ID NO: 2092425 - RNA, 16 nt, Human
ggaauuaaccuggugc

SEQ ID NO: 2092426 - RNA, 17 nt, Human
ggaauuaaccuggugcu

SEQ ID NO: 2092427 - RNA, 19 nt, Human
ggaauuacauguaaaacau

SEQ ID NO: 2092428 - RNA, 20 nt, Human
ggaauuaaccuggugcugga

SEQ ID NO: 2092429 - RNA, 20 nt, Human
ggaauucaucucucuuuaau

SEQ ID NO: 2092430 - RNA, 13 nt, Human
ggaauucucuugg

SEQ ID NO: 2092431 - RNA, 22 nt, Human
ggaauucucuuggcuggcuucc

SEQ ID NO: 2092432 - RNA, 20 nt, Human
ggaauugacuucgacuguga

SEQ ID NO: 2092433 - RNA, 12 nt, Human
ggaaugcagugg

SEQ ID NO: 2092434 - RNA, 19 nt, Human
ggaaguguaacagcugagg

SEQ ID NO: 2092435 - RNA, 21 nt, Human
ggaaguguaacagcugagguc

SEQ ID NO: 2092436 - RNA, 14 nt, Human
ggaaugcggcaaga

SEQ ID NO: 2092437 - RNA, 16 nt, Human
ggaaugcggcaagaag

SEQ ID NO: 2092438 - RNA, 22 nt, Human
ggaaugcggccgcauucccuga

SEQ ID NO: 2092439 - RNA, 23 nt, Human
ggaaugcggccgcauucccugag

SEQ ID NO: 2092440 - RNA, 13 nt, Human
ggaaugcuccccc

SEQ ID NO: 2092441 - RNA, 23 nt, Human
ggaaugcucccccauccuccccu

SEQ ID NO: 2092442 - RNA, 23 nt, Human
ggaaugcauuauuuauugcugug

SEQ ID NO: 2092443 - RNA, 14 nt, Human
ggaaugucuuuggu

SEQ ID NO: 2092444 - RNA, 15 nt, Human
ggaauggcacagccc

SEQ ID NO: 2092445 - RNA, 15 nt, Human
ggaaugcuuggaaua

SEQ ID NO: 2092446 - RNA, 16 nt, Human
gccucagccuccugag

SEQ ID NO: 2092447 - RNA, 18 nt, Human
gccucagccuccugagua

SEQ ID NO: 2092448 - RNA, 23 nt, Human
gccucagccucccaaagugcugg

SEQ ID NO: 2092449 - RNA, 23 nt, Human
gccucagaauugaucauuuuccc

SEQ ID NO: 2092450 - RNA, 22 nt, Human
gccucaacccucccucagcccc

SEQ ID NO: 2092451 - RNA, 23 nt, Human
gccucaacccucccucagccccu

SEQ ID NO: 2092452 - RNA, 18 nt, Human
gccucacuugaauguguc

SEQ ID NO: 2092453 - RNA, 20 nt, Human
gccucacuugaaugugucac

SEQ ID NO: 2092454 - RNA, 16 nt, Human
gccucacuugaaugug

SEQ ID NO: 2092455 - RNA, 16 nt, Human
gccucacuccaggaag

SEQ ID NO: 2092456 - RNA, 14 nt, Human
gccucagugccacu

SEQ ID NO: 2092457 - RNA, 12 nt, Human
gccucagugcca

SEQ ID NO: 2092458 - RNA, 20 nt, Human
gccucagcugccucacuucc

SEQ ID NO: 2092459 - RNA, 16 nt, Human
gccucagcugccucac

SEQ ID NO: 2092460 - RNA, 19 nt, Human
gccucagcugccucacuuc

SEQ ID NO: 2092461 - RNA, 14 nt, Human
gccucagcugccuc

SEQ ID NO: 2092462 - RNA, 15 nt, Human
gccucagcugccuca

SEQ ID NO: 2092463 - RNA, 18 nt, Human
gccucagggcagccugcc

SEQ ID NO: 2092464 - RNA, 21 nt, Human
gccucagggcagccugccugg

SEQ ID NO: 2092465 - RNA, 22 nt, Human
gccucagggcagccugccugga

SEQ ID NO: 2092466 - RNA, 23 nt, Human
gccucagggcagccugccuggag

SEQ ID NO: 2092467 - RNA, 21 nt, Human
gccucaagugauucuccugcc

SEQ ID NO: 2092468 - RNA, 20 nt, Human
gccucaagugauucuccugc

SEQ ID NO: 2092469 - RNA, 19 nt, Human
gccucaagugauucuccug

SEQ ID NO: 2092470 - RNA, 17 nt, Human
gccucaaccuccugggc

SEQ ID NO: 2092471 - RNA, 18 nt, Human
gccucaacccucccucag

SEQ ID NO: 2092472 - RNA, 19 nt, Human
gccucaacccucccucagc

SEQ ID NO: 2092473 - RNA, 21 nt, Human
gccucaacccucccucagccc

SEQ ID NO: 2092474 - RNA, 16 nt, Human
gccucaaccuccuggg

SEQ ID NO: 2092475 - RNA, 14 nt, Human
gccucaaccuccug

SEQ ID NO: 2092476 - RNA, 13 nt, Human
gccuauaguccca

SEQ ID NO: 2092477 - RNA, 16 nt, Human
gccgaggguccuggcu

SEQ ID NO: 2092478 - RNA, 16 nt, Human
gccuaaguggcugcug

SEQ ID NO: 2092479 - RNA, 17 nt, Human
gccuaaguggcugcuga

SEQ ID NO: 2092480 - RNA, 16 nt, Human
gccuaauacauuaaag

SEQ ID NO: 2092481 - RNA, 17 nt, Human
gccuaauacauuaaagc

SEQ ID NO: 2092482 - RNA, 18 nt, Human
gccuaauacauuaaagca

SEQ ID NO: 2092483 - RNA, 19 nt, Human
gccuaauacauuaaagcag

SEQ ID NO: 2092484 - RNA, 20 nt, Human
gccuaauacauuaaagcagu

SEQ ID NO: 2092485 - RNA, 21 nt, Human
gccuaauacauuaaagcaguc

SEQ ID NO: 2092486 - RNA, 21 nt, Human
gccucccacgacugcccggca

SEQ ID NO: 2092487 - RNA, 17 nt, Human
gccucccacccccaucu

SEQ ID NO: 2092488 - RNA, 14 nt, Human
gccucccacgacug

SEQ ID NO: 2092489 - RNA, 21 nt, Human
gccucccgaauagcugggacu

SEQ ID NO: 2092490 - RNA, 15 nt, Human
gccucagugccacua

SEQ ID NO: 2092491 - RNA, 11 nt, Human
gccucagugga

SEQ ID NO: 2092492 - RNA, 21 nt, Human
gccucaguggacuuuccaccc

SEQ ID NO: 2092493 - RNA, 22 nt, Human
gccucaguggacuuuccacccc

SEQ ID NO: 2092494 - RNA, 16 nt, Human
gccucauccgaggcag

SEQ ID NO: 2092495 - RNA, 17 nt, Human
gccucauccgaggcagg

SEQ ID NO: 2092496 - RNA, 12 nt, Human
gccucccacccc

SEQ ID NO: 2092497 - RNA, 22 nt, Human
gccucauccgaggcagggucag

SEQ ID NO: 2092498 - RNA, 18 nt, Human
gccucauccgaggcaggg

SEQ ID NO: 2092499 - RNA, 19 nt, Human
gccucauccgaggcagggu

SEQ ID NO: 2092500 - RNA, 15 nt, Human
gccucccgaguagcu

SEQ ID NO: 2092501 - RNA, 23 nt, Human
gccucccgaauagcugggacuac

SEQ ID NO: 2092502 - RNA, 17 nt, Human
gccucccgaguagcugg

SEQ ID NO: 2092503 - RNA, 14 nt, Human
gccucggagccuca

SEQ ID NO: 2092504 - RNA, 15 nt, Human
gccucggagccucau

SEQ ID NO: 2092505 - RNA, 17 nt, Human
gccucggagccucaucc

SEQ ID NO: 2092506 - RNA, 23 nt, Human
gccucggagccucauccgaggca

SEQ ID NO: 2092507 - RNA, 14 nt, Human
gccucucccuggcc

SEQ ID NO: 2092508 - RNA, 15 nt, Human
gccucucccuggccc

SEQ ID NO: 2092509 - RNA, 16 nt, Human
gccucucccuggcccu

SEQ ID NO: 2092510 - RNA, 17 nt, Human
gccuggcauggcaccug

SEQ ID NO: 2092511 - RNA, 22 nt, Human
gccuggaggccgggugcucagg

SEQ ID NO: 2092512 - RNA, 15 nt, Human
gccuggccagaugca

SEQ ID NO: 2092513 - RNA, 14 nt, Human
gccuggccagaugc

SEQ ID NO: 2092514 - RNA, 23 nt, Human
gccuggccaggcagaucugugcc

SEQ ID NO: 2092515 - RNA, 15 nt, Human
gccuggccaggcaga

SEQ ID NO: 2092516 - RNA, 17 nt, Human
gccuggccaggcagauc

SEQ ID NO: 2092517 - RNA, 14 nt, Human
gccuggccaggagc

SEQ ID NO: 2092518 - RNA, 15 nt, Human
gccuggccaggagcu

SEQ ID NO: 2092519 - RNA, 19 nt, Human
gccuggccaggagcucuuc

SEQ ID NO: 2092520 - RNA, 14 nt, Human
gccuggccaggcag

SEQ ID NO: 2092521 - RNA, 20 nt, Human
gccugggugacagagcaaga

SEQ ID NO: 2092522 - RNA, 12 nt, Human
gccugggugcug

SEQ ID NO: 2092523 - RNA, 14 nt, Human
gccugggugcuggc

SEQ ID NO: 2092524 - RNA, 14 nt, Human
gccugggucugugu

SEQ ID NO: 2092525 - RNA, 16 nt, Human
gccugggucugugucu

SEQ ID NO: 2092526 - RNA, 19 nt, Human
gccugggucugugucucuu

SEQ ID NO: 2092527 - RNA, 23 nt, Human
gccugggucugugucucuuuucu

SEQ ID NO: 2092528 - RNA, 23 nt, Human
gccugggugacaaagugagacuc

SEQ ID NO: 2092529 - RNA, 18 nt, Human
gccuggguggggcugcuc

SEQ ID NO: 2092530 - RNA, 19 nt, Human
gccuggguggggcugcucc

SEQ ID NO: 2092531 - RNA, 20 nt, Human
gccuggguggggcugcuccu

SEQ ID NO: 2092532 - RNA, 22 nt, Human
gccuggguggggcugcuccucc

SEQ ID NO: 2092533 - RNA, 15 nt, Human
gccugggugcuggcu

SEQ ID NO: 2092534 - RNA, 17 nt, Human
gccugggugcuggcugc

SEQ ID NO: 2092535 - RNA, 20 nt, Human
gccugggugcuggcugccca

SEQ ID NO: 2092536 - RNA, 21 nt, Human
gccugggugcuggcugcccag

SEQ ID NO: 2092537 - RNA, 15 nt, Human
gccuggguggggcug

SEQ ID NO: 2092538 - RNA, 16 nt, Human
gccuggguggggcugc

SEQ ID NO: 2092539 - RNA, 14 nt, Human
gccuguaguuagga

SEQ ID NO: 2092540 - RNA, 16 nt, Human
gccuguaguuaggaaa

SEQ ID NO: 2092541 - RNA, 17 nt, Human
gccuguaguuaggaaau

SEQ ID NO: 2092542 - RNA, 18 nt, Human
gccuguaguuaggaaaua

SEQ ID NO: 2092543 - RNA, 19 nt, Human
gccuguaguuaggaaauaa

SEQ ID NO: 2092544 - RNA, 22 nt, Human
gccuguaguuaggaaauaaaac

SEQ ID NO: 2092545 - RNA, 23 nt, Human
gccuguaguuaggaaauaaaacc

SEQ ID NO: 2092546 - RNA, 15 nt, Human
gccugcuccagcugu

SEQ ID NO: 2092547 - RNA, 12 nt, Human
gccugcaccagg

SEQ ID NO: 2092548 - RNA, 13 nt, Human
gccugcaccagga

SEQ ID NO: 2092549 - RNA, 14 nt, Human
gccugcaccaggag

SEQ ID NO: 2092550 - RNA, 15 nt, Human
gccugcaccaggaga

SEQ ID NO: 2092551 - RNA, 16 nt, Human
gccugcaccaggagac

SEQ ID NO: 2092552 - RNA, 21 nt, Human
gccugcaccaggagacagaca

SEQ ID NO: 2092553 - RNA, 20 nt, Human
gccugaugcucccuccccug

SEQ ID NO: 2092554 - RNA, 22 nt, Human
gccugcuuuagaauguuuuccu

SEQ ID NO: 2092555 - RNA, 16 nt, Human
gccugcuccagcuguu

SEQ ID NO: 2092556 - RNA, 18 nt, Human
gccugcuccagcuguuca

SEQ ID NO: 2092557 - RNA, 13 nt, Human
gccucugccuguc

SEQ ID NO: 2092558 - RNA, 19 nt, Human
gccucucgguggccagcag

SEQ ID NO: 2092559 - RNA, 13 nt, Human
gccucugccugug

SEQ ID NO: 2092560 - RNA, 16 nt, Human
gccucugccugugcac

SEQ ID NO: 2092561 - RNA, 11 nt, Human
gccucugcugc

SEQ ID NO: 2092562 - RNA, 18 nt, Human
gccugaaguuggagugag

SEQ ID NO: 2092563 - RNA, 22 nt, Human
gccugaagucacacagugaguc

SEQ ID NO: 2092564 - RNA, 12 nt, Human
gccucugccugu

SEQ ID NO: 2092565 - RNA, 14 nt, Human
gccugaugcucccu

SEQ ID NO: 2092566 - RNA, 16 nt, Human
gccugaugcucccucc

SEQ ID NO: 2092567 - RNA, 17 nt, Human
gccugaugcucccuccc

SEQ ID NO: 2092568 - RNA, 19 nt, Human
gccugaugcucccuccccu

SEQ ID NO: 2092569 - RNA, 21 nt, Human
gcccuuugggaggcugaggcg

SEQ ID NO: 2092570 - RNA, 16 nt, Human
gccgagaucacgccac

SEQ ID NO: 2092571 - RNA, 17 nt, Human
gcccuuugggaggcuga

SEQ ID NO: 2092572 - RNA, 16 nt, Human
gcccuuucuguaccau

SEQ ID NO: 2092573 - RNA, 22 nt, Human
gcccuuucuguaccauuuauuu

SEQ ID NO: 2092574 - RNA, 19 nt, Human
gccgagaucacgccacugc

SEQ ID NO: 2092575 - RNA, 18 nt, Human
gccgagaucacgccacug

SEQ ID NO: 2092576 - RNA, 18 nt, Human
gccgagauugcaccacug

SEQ ID NO: 2092577 - RNA, 17 nt, Human
gccgagauugcaccacu

SEQ ID NO: 2092578 - RNA, 20 nt, Human
gcccuuccucuccacugccu

SEQ ID NO: 2092579 - RNA, 19 nt, Human
gcccuuccucuccacugcc

SEQ ID NO: 2092580 - RNA, 18 nt, Human
gcccuuccucuccacugc

SEQ ID NO: 2092581 - RNA, 16 nt, Human
gcccuuccucuccacu

SEQ ID NO: 2092582 - RNA, 17 nt, Human
gcccuuccucuccacug

SEQ ID NO: 2092583 - RNA, 21 nt, Human
gcccuuccucuccacugccuu

SEQ ID NO: 2092584 - RNA, 16 nt, Human
gcccugguuucacugg

SEQ ID NO: 2092585 - RNA, 18 nt, Human
gcccugguuucacuggcc

SEQ ID NO: 2092586 - RNA, 20 nt, Human
gcccugguuucacuggccca

SEQ ID NO: 2092587 - RNA, 22 nt, Human
gcccugguuucacuggcccaag

SEQ ID NO: 2092588 - RNA, 14 nt, Human
gcccugucagugca

SEQ ID NO: 2092589 - RNA, 15 nt, Human
gcccugucagugcag

SEQ ID NO: 2092590 - RNA, 21 nt, Human
gcccuguaucaacccagaaac

SEQ ID NO: 2092591 - RNA, 22 nt, Human
gcccuguaucaacccagaaaca

SEQ ID NO: 2092592 - RNA, 23 nt, Human
gcccugguggcagugggagcugc

SEQ ID NO: 2092593 - RNA, 22 nt, Human
gcccugguggcagugggagcug

SEQ ID NO: 2092594 - RNA, 21 nt, Human
gcccugguggcagugggagcu

SEQ ID NO: 2092595 - RNA, 20 nt, Human
gcccugguggcagugggagc

SEQ ID NO: 2092596 - RNA, 19 nt, Human
gcccugguggcagugggag

SEQ ID NO: 2092597 - RNA, 18 nt, Human
gcccugguggcaguggga

SEQ ID NO: 2092598 - RNA, 17 nt, Human
gcccugguggcaguggg

SEQ ID NO: 2092599 - RNA, 14 nt, Human
gcccugguggcagu

SEQ ID NO: 2092600 - RNA, 16 nt, Human
gcccuggccagaggcu

SEQ ID NO: 2092601 - RNA, 13 nt, Human
gcccuggccagag

SEQ ID NO: 2092602 - RNA, 14 nt, Human
gcccuggccagagg

SEQ ID NO: 2092603 - RNA, 15 nt, Human
gcccuggccagaggc

SEQ ID NO: 2092604 - RNA, 19 nt, Human
gcccuggcaggaugacccu

SEQ ID NO: 2092605 - RNA, 12 nt, Human
gcccuggcagga

SEQ ID NO: 2092606 - RNA, 20 nt, Human
gcccuggcucccacaggccc

SEQ ID NO: 2092607 - RNA, 19 nt, Human
gcccuggcucccacaggcc

SEQ ID NO: 2092608 - RNA, 15 nt, Human
gcccuggcucccaca

SEQ ID NO: 2092609 - RNA, 17 nt, Human
gcccuggccugcugggc

SEQ ID NO: 2092610 - RNA, 15 nt, Human
gcccuggccugcugg

SEQ ID NO: 2092611 - RNA, 16 nt, Human
gcccuggccugcuggg

SEQ ID NO: 2092612 - RNA, 12 nt, Human
gcccuggccugc

SEQ ID NO: 2092613 - RNA, 13 nt, Human
gcccuggccugcu

SEQ ID NO: 2092614 - RNA, 14 nt, Human
gcccuggccugcug

SEQ ID NO: 2092615 - RNA, 21 nt, Human
gcccuggugcugccacacuuc

SEQ ID NO: 2092616 - RNA, 17 nt, Human
gcccuggugcugccaca

SEQ ID NO: 2092617 - RNA, 16 nt, Human
gcccuggugcugccac

SEQ ID NO: 2092618 - RNA, 15 nt, Human
gcccuggugcugcca

SEQ ID NO: 2092619 - RNA, 16 nt, Human
gcccugguccagggaa

SEQ ID NO: 2092620 - RNA, 17 nt, Human
gcccugguccagggaag

SEQ ID NO: 2092621 - RNA, 18 nt, Human
gcccugguccagggaagc

SEQ ID NO: 2092622 - RNA, 20 nt, Human
gcccugguccagggaagcug

SEQ ID NO: 2092623 - RNA, 23 nt, Human
gcccugguccagggaagcuggcc

SEQ ID NO: 2092624 - RNA, 15 nt, Human
gcccugguccuucca

SEQ ID NO: 2092625 - RNA, 18 nt, Human
gcccugguccuuccaggc

SEQ ID NO: 2092626 - RNA, 13 nt, Human
gcccuggggccug

SEQ ID NO: 2092627 - RNA, 14 nt, Human
gcccuggggccugu

SEQ ID NO: 2092628 - RNA, 15 nt, Human
gcccuggggccugua

SEQ ID NO: 2092629 - RNA, 17 nt, Human
gcccuggggccuguaca

SEQ ID NO: 2092630 - RNA, 15 nt, Human
gcccuggggcugauc

SEQ ID NO: 2092631 - RNA, 19 nt, Human
gcccuggggcugaucucag

SEQ ID NO: 2092632 - RNA, 20 nt, Human
gcccuggggcugaucucagg

SEQ ID NO: 2092633 - RNA, 21 nt, Human
gcccuggggcugaucucaggg

SEQ ID NO: 2092634 - RNA, 21 nt, Human
gcccugggucuaagggguugg

SEQ ID NO: 2092635 - RNA, 13 nt, Human
gcccugguccagg

SEQ ID NO: 2092636 - RNA, 14 nt, Human
gcccugguccaggg

SEQ ID NO: 2092637 - RNA, 20 nt, Human
gcccugggccccaccaccua

SEQ ID NO: 2092638 - RNA, 22 nt, Human
gcccugggccccaccaccuagg

SEQ ID NO: 2092639 - RNA, 15 nt, Human
gcccugggccccacc

SEQ ID NO: 2092640 - RNA, 18 nt, Human
gcccugggccccaccacc

SEQ ID NO: 2092641 - RNA, 19 nt, Human
gcccugggccccaccaccu

SEQ ID NO: 2092642 - RNA, 14 nt, Human
gcagaaguguuuca

SEQ ID NO: 2092643 - RNA, 16 nt, Human
gcccugagcuuucugc

SEQ ID NO: 2092644 - RNA, 18 nt, Human
gcccggcuccaggcuccu

SEQ ID NO: 2092645 - RNA, 17 nt, Human
gcccggcuccaggcucc

SEQ ID NO: 2092646 - RNA, 17 nt, Human
gcccucgugguggaaac

SEQ ID NO: 2092647 - RNA, 23 nt, Human
gcccucgugguggaaacuuuucu

SEQ ID NO: 2092648 - RNA, 18 nt, Human
gcccucgggcgagucacu

SEQ ID NO: 2092649 - RNA, 19 nt, Human
gcccugcuuugggcugccc

SEQ ID NO: 2092650 - RNA, 21 nt, Human
gcccugcuuugggcugcccug

SEQ ID NO: 2092651 - RNA, 20 nt, Human
gcccugcuuugggcugcccu

SEQ ID NO: 2092652 - RNA, 19 nt, Human
gcccugauugcgcaaaacu

SEQ ID NO: 2092653 - RNA, 21 nt, Human
gcccugaggugaaagggagcu

SEQ ID NO: 2092654 - RNA, 22 nt, Human
gcccugaggugaaagggagcua

SEQ ID NO: 2092655 - RNA, 23 nt, Human
gcccugcuuugggcugcccuggu

SEQ ID NO: 2092656 - RNA, 22 nt, Human
gcccugcuuugggcugcccugg

SEQ ID NO: 2092657 - RNA, 18 nt, Human
gcccuggauuucagaaag

SEQ ID NO: 2092658 - RNA, 19 nt, Human
gcccgcaugcggcccagga

SEQ ID NO: 2092659 - RNA, 17 nt, Human
gcccgcaugcggcccag

SEQ ID NO: 2092660 - RNA, 13 nt, Human
gcccgagcuggug

SEQ ID NO: 2092661 - RNA, 14 nt, Human
gcccgagcuggugc

SEQ ID NO: 2092662 - RNA, 15 nt, Human
gcccgagcuggugca

SEQ ID NO: 2092663 - RNA, 19 nt, Human
gcccgcaugcagcagcuug

SEQ ID NO: 2092664 - RNA, 22 nt, Human
gcccgcaugcagcagcuugcug

SEQ ID NO: 2092665 - RNA, 12 nt, Human
gcccgagcuggu

SEQ ID NO: 2092666 - RNA, 19 nt, Human
gcccgacagccuggcacag

SEQ ID NO: 2092667 - RNA, 17 nt, Human
gcccgacagccuggcac

SEQ ID NO: 2092668 - RNA, 16 nt, Human
gcccgacagccuggca

SEQ ID NO: 2092669 - RNA, 12 nt, Human
gccccuuccccc

SEQ ID NO: 2092670 - RNA, 20 nt, Human
gccccuucacuucugaccac

SEQ ID NO: 2092671 - RNA, 21 nt, Human
gccccuucacuucugaccaca

SEQ ID NO: 2092672 - RNA, 23 nt, Human
gccccuucacuucugaccacacu

SEQ ID NO: 2092673 - RNA, 16 nt, Human
gcccggcuccaggcuc

SEQ ID NO: 2092674 - RNA, 21 nt, Human
gcccggcgcgguggcucacgc

SEQ ID NO: 2092675 - RNA, 14 nt, Human
gcccggaugcuucu

SEQ ID NO: 2092676 - RNA, 14 nt, Human
gcccgccuggcaga

SEQ ID NO: 2092677 - RNA, 18 nt, Human
gcccgccuggcagaacug

SEQ ID NO: 2092678 - RNA, 17 nt, Human
gcccggauucugggagg

SEQ ID NO: 2092679 - RNA, 15 nt, Human
gcccggauucuggga

SEQ ID NO: 2092680 - RNA, 16 nt, Human
gcccggauucugggag

SEQ ID NO: 2092681 - RNA, 13 nt, Human
gcccgccuggcag

SEQ ID NO: 2092682 - RNA, 15 nt, Human
gccccugccacccug

SEQ ID NO: 2092683 - RNA, 14 nt, Human
gccccugccacccu

SEQ ID NO: 2092684 - RNA, 23 nt, Human
gccccuccucugccaccuccccu

SEQ ID NO: 2092685 - RNA, 22 nt, Human
gccccuccucugccaccucccc

SEQ ID NO: 2092686 - RNA, 13 nt, Human
gccccugccaccc

SEQ ID NO: 2092687 - RNA, 14 nt, Human
gccccucucuccau

SEQ ID NO: 2092688 - RNA, 18 nt, Human
gcagacucaguuugucag

SEQ ID NO: 2092689 - RNA, 12 nt, Human
gccccuccucug

SEQ ID NO: 2092690 - RNA, 13 nt, Human
gccccuccucugc

SEQ ID NO: 2092691 - RNA, 14 nt, Human
gccccuccucugcc

SEQ ID NO: 2092692 - RNA, 15 nt, Human
gccccuccucugcca

SEQ ID NO: 2092693 - RNA, 16 nt, Human
gccccuccucugccac

SEQ ID NO: 2092694 - RNA, 17 nt, Human
gccccuccucugccacc

SEQ ID NO: 2092695 - RNA, 18 nt, Human
gccccuccucugccaccu

SEQ ID NO: 2092696 - RNA, 20 nt, Human
gccccuccucugccaccucc

SEQ ID NO: 2092697 - RNA, 21 nt, Human
gccccuccucugccaccuccc

SEQ ID NO: 2092698 - RNA, 15 nt, Human
gccccucccuucaac

SEQ ID NO: 2092699 - RNA, 14 nt, Human
gccccucccuucaa

SEQ ID NO: 2092700 - RNA, 12 nt, Human
gccccucccuuc

SEQ ID NO: 2092701 - RNA, 15 nt, Human
gcagacucuacagag

SEQ ID NO: 2092702 - RNA, 17 nt, Human
gcagacucaguuuguca

SEQ ID NO: 2092703 - RNA, 20 nt, Human
gcagacucaauaaaaucaug

SEQ ID NO: 2092704 - RNA, 22 nt, Human
gcugccaaggccagaguggccu

SEQ ID NO: 2092705 - RNA, 23 nt, Human
gcugccaaggccagaguggccug

SEQ ID NO: 2092706 - RNA, 13 nt, Human
gcugcauagaagg

SEQ ID NO: 2092707 - RNA, 14 nt, Human
gcugcauagaagga

SEQ ID NO: 2092708 - RNA, 15 nt, Human
gcugcauagaaggag

SEQ ID NO: 2092709 - RNA, 18 nt, Human
gcugcauagaaggaggag

SEQ ID NO: 2092710 - RNA, 16 nt, Human
gcugcauccgugagca

SEQ ID NO: 2092711 - RNA, 21 nt, Human
gcugcauccgugagcagugug

SEQ ID NO: 2092712 - RNA, 15 nt, Human
gcugcaucuacucag

SEQ ID NO: 2092713 - RNA, 22 nt, Human
gcugcauggggugggguagggc

SEQ ID NO: 2092714 - RNA, 21 nt, Human
gcugcauugccugcggucaag

SEQ ID NO: 2092715 - RNA, 15 nt, Human
gcugaugcucauggu

SEQ ID NO: 2092716 - RNA, 13 nt, Human
gcugauaaaagau

SEQ ID NO: 2092717 - RNA, 21 nt, Human
gcugauaaaagauacauuugu

SEQ ID NO: 2092718 - RNA, 22 nt, Human
gcugagugggggaucacagccu

SEQ ID NO: 2092719 - RNA, 23 nt, Human
gcugagugggggaucacagccuc

SEQ ID NO: 2092720 - RNA, 13 nt, Human
gcugaguuggugu

SEQ ID NO: 2092721 - RNA, 21 nt, Human
gcugacuguacuccucccagg

SEQ ID NO: 2092722 - RNA, 18 nt, Human
gcugacugauguugaggg

SEQ ID NO: 2092723 - RNA, 12 nt, Human
gcugagugagcu

SEQ ID NO: 2092724 - RNA, 15 nt, Human
gcugagugagcugaa

SEQ ID NO: 2092725 - RNA, 12 nt, Human
gcucuucuccag

SEQ ID NO: 2092726 - RNA, 15 nt, Human
gcucuggaagagagg

SEQ ID NO: 2092727 - RNA, 16 nt, Human
gcucuucuccaggcug

SEQ ID NO: 2092728 - RNA, 14 nt, Human
gcucuucuccaggc

SEQ ID NO: 2092729 - RNA, 21 nt, Human
gcucuucuccuuucacaaccu

SEQ ID NO: 2092730 - RNA, 17 nt, Human
gcucuucuccuuucaca

SEQ ID NO: 2092731 - RNA, 13 nt, Human
gcucuucuccuuu

SEQ ID NO: 2092732 - RNA, 23 nt, Human
gcucuucuccuuucacaaccuuc

SEQ ID NO: 2092733 - RNA, 21 nt, Human
gcugacagacacaggcccggc

SEQ ID NO: 2092734 - RNA, 21 nt, Human
gcucuuuaugaaugaaaaaac

SEQ ID NO: 2092735 - RNA, 15 nt, Human
gcugacuagaagggc

SEQ ID NO: 2092736 - RNA, 23 nt, Human
gcugacuagaagggccaguccug

SEQ ID NO: 2092737 - RNA, 14 nt, Human
gcugaccuccacag

SEQ ID NO: 2092738 - RNA, 15 nt, Human
gcugaccuccacagc

SEQ ID NO: 2092739 - RNA, 16 nt, Human
gcugaccuccacagcu

SEQ ID NO: 2092740 - RNA, 17 nt, Human
gcugaccuccacagcuu

SEQ ID NO: 2092741 - RNA, 18 nt, Human
gcugaccucccagugacc

SEQ ID NO: 2092742 - RNA, 19 nt, Human
gcugacuguacuccuccca

SEQ ID NO: 2092743 - RNA, 18 nt, Human
gcugacuguacuccuccc

SEQ ID NO: 2092744 - RNA, 23 nt, Human
gcugacucuaggugcccuuggag

SEQ ID NO: 2092745 - RNA, 20 nt, Human
gcugacugauguugagggaa

SEQ ID NO: 2092746 - RNA, 13 nt, Human
gcugaccccccuc

SEQ ID NO: 2092747 - RNA, 19 nt, Human
gcugaccccccucaggacc

SEQ ID NO: 2092748 - RNA, 21 nt, Human
gcugaccccccucaggacccu

SEQ ID NO: 2092749 - RNA, 17 nt, Human
gcugacccagucccugg

SEQ ID NO: 2092750 - RNA, 19 nt, Human
gcugacccagucccugggg

SEQ ID NO: 2092751 - RNA, 13 nt, Human
gcugacccagucc

SEQ ID NO: 2092752 - RNA, 15 nt, Human
gcugacccagucccu

SEQ ID NO: 2092753 - RNA, 16 nt, Human
gcugacccagucccug

SEQ ID NO: 2092754 - RNA, 22 nt, Human
gcugacccagccccuugagaaa

SEQ ID NO: 2092755 - RNA, 20 nt, Human
gcucgagcaguccugccuca

SEQ ID NO: 2092756 - RNA, 21 nt, Human
gcucgagcaguccugccucag

SEQ ID NO: 2092757 - RNA, 13 nt, Human
gcucuccaccuca

SEQ ID NO: 2092758 - RNA, 14 nt, Human
gcucuccaccucag

SEQ ID NO: 2092759 - RNA, 15 nt, Human
gcucuccaccucagc

SEQ ID NO: 2092760 - RNA, 16 nt, Human
gcucuccaccucagcc

SEQ ID NO: 2092761 - RNA, 17 nt, Human
gcucuccaccucagccu

SEQ ID NO: 2092762 - RNA, 18 nt, Human
gcucuccaccucagccuu

SEQ ID NO: 2092763 - RNA, 19 nt, Human
gcucuccaccucagccuug

SEQ ID NO: 2092764 - RNA, 16 nt, Human
gcucuccccugcccug

SEQ ID NO: 2092765 - RNA, 21 nt, Human
gcucuccaccucagccuugga

SEQ ID NO: 2092766 - RNA, 20 nt, Human
gcucuccaccucagccuugg

SEQ ID NO: 2092767 - RNA, 21 nt, Human
gcuccuugggaggccccacug

SEQ ID NO: 2092768 - RNA, 22 nt, Human
gcuccuugggaggccccacugg

SEQ ID NO: 2092769 - RNA, 14 nt, Human
gcuccuugggaggc

SEQ ID NO: 2092770 - RNA, 17 nt, Human
gcucgagcaguccugcc

SEQ ID NO: 2092771 - RNA, 21 nt, Human
gcuccuucuguccuacucugu

SEQ ID NO: 2092772 - RNA, 13 nt, Human
gcuccuugggagg

SEQ ID NO: 2092773 - RNA, 15 nt, Human
gcuccuucuguccua

SEQ ID NO: 2092774 - RNA, 17 nt, Human
gcucuccgaccagacac

SEQ ID NO: 2092775 - RNA, 13 nt, Human
gcucuccgaccag

SEQ ID NO: 2092776 - RNA, 19 nt, Human
gcucuccccugcccugcug

SEQ ID NO: 2092777 - RNA, 11 nt, Human
gcucucccucu

SEQ ID NO: 2092778 - RNA, 14 nt, Human
gcucucccucuggc

SEQ ID NO: 2092779 - RNA, 15 nt, Human
gcucucccucuggcc

SEQ ID NO: 2092780 - RNA, 17 nt, Human
gcucucccucuggcccu

SEQ ID NO: 2092781 - RNA, 18 nt, Human
gcucucccucuggcccug

SEQ ID NO: 2092782 - RNA, 19 nt, Human
gcucucccucuggcccugc

SEQ ID NO: 2092783 - RNA, 20 nt, Human
gcucucccucuggcccugcc

SEQ ID NO: 2092784 - RNA, 21 nt, Human
gcucucccucuggcccugccu

SEQ ID NO: 2092785 - RNA, 23 nt, Human
gcucucccucuggcccugccuuc

SEQ ID NO: 2092786 - RNA, 15 nt, Human
gcucuccucuugcca

SEQ ID NO: 2092787 - RNA, 22 nt, Human
gcucuccucuugccacugccuc

SEQ ID NO: 2092788 - RNA, 19 nt, Human
gcucuccucuugccacugc

SEQ ID NO: 2092789 - RNA, 19 nt, Human
gcucuccgaccagacaccu

SEQ ID NO: 2092790 - RNA, 17 nt, Human
gcucucugcagccagcc

SEQ ID NO: 2092791 - RNA, 18 nt, Human
gcucucugcagccagccc

SEQ ID NO: 2092792 - RNA, 19 nt, Human
gcucucugcagccagccca

SEQ ID NO: 2092793 - RNA, 20 nt, Human
gcucucugcagccagcccag

SEQ ID NO: 2092794 - RNA, 21 nt, Human
gcucucugcagccagcccagc

SEQ ID NO: 2092795 - RNA, 22 nt, Human
gcucucugcagccagcccagcc

SEQ ID NO: 2092796 - RNA, 13 nt, Human
gcucucuacccag

SEQ ID NO: 2092797 - RNA, 17 nt, Human
gcucucuacccagccca

SEQ ID NO: 2092798 - RNA, 20 nt, Human
gcucucuacccagcccaucu

SEQ ID NO: 2092799 - RNA, 21 nt, Human
gcucucuacccagcccaucuu

SEQ ID NO: 2092800 - RNA, 13 nt, Human
gcucucugcagcc

SEQ ID NO: 2092801 - RNA, 14 nt, Human
gcucucugcagcca

SEQ ID NO: 2092802 - RNA, 15 nt, Human
gcucucugcagccag

SEQ ID NO: 2092803 - RNA, 16 nt, Human
gcucuccuuucuuucu

SEQ ID NO: 2092804 - RNA, 11 nt, Human
gcucucugcug

SEQ ID NO: 2092805 - RNA, 13 nt, Human
gcucucugcugua

SEQ ID NO: 2092806 - RNA, 13 nt, Human
gcucugccugugg

SEQ ID NO: 2092807 - RNA, 14 nt, Human
gcucugcuccucuc

SEQ ID NO: 2092808 - RNA, 13 nt, Human
gcucugcuccucu

SEQ ID NO: 2092809 - RNA, 23 nt, Human
gcucugcugacagacacaggccc

SEQ ID NO: 2092810 - RNA, 20 nt, Human
gcucugcugacagacacagg

SEQ ID NO: 2092811 - RNA, 19 nt, Human
gcucugcugacagacacag

SEQ ID NO: 2092812 - RNA, 18 nt, Human
gcucugcugacagacaca

SEQ ID NO: 2092813 - RNA, 14 nt, Human
gcucugcugacaga

SEQ ID NO: 2092814 - RNA, 13 nt, Human
gcucugcugacag

SEQ ID NO: 2092815 - RNA, 21 nt, Human
gcucugcuccucuccccagca

SEQ ID NO: 2092816 - RNA, 19 nt, Human
gcucugcuccucuccccag

SEQ ID NO: 2092817 - RNA, 22 nt, Human
gcucuggacaggcauguucucu

SEQ ID NO: 2092818 - RNA, 21 nt, Human
gcucuggacaggcauguucuc

SEQ ID NO: 2092819 - RNA, 16 nt, Human
gcucuggacaggcaug

SEQ ID NO: 2092820 - RNA, 15 nt, Human
gcucuggacaggcau

SEQ ID NO: 2092821 - RNA, 14 nt, Human
gcucuggacaggca

SEQ ID NO: 2092822 - RNA, 13 nt, Human
gcucugcuugccg

SEQ ID NO: 2092823 - RNA, 19 nt, Human
gcucugcuugccgaaacug

SEQ ID NO: 2092824 - RNA, 20 nt, Human
gcucugcuugccgaaacugg

SEQ ID NO: 2092825 - RNA, 14 nt, Human
gcucuggaagagag

SEQ ID NO: 2092826 - RNA, 13 nt, Human
gcucccucugccu

SEQ ID NO: 2092827 - RNA, 23 nt, Human
gcucccucugccugaaccuucca

SEQ ID NO: 2092828 - RNA, 23 nt, Human
gcucccuccccugcccuggucca

SEQ ID NO: 2092829 - RNA, 19 nt, Human
gcucccuccccugcccugg

SEQ ID NO: 2092830 - RNA, 20 nt, Human
gcucccuccccugcccuggu

SEQ ID NO: 2092831 - RNA, 13 nt, Human
gcucccucccccu

SEQ ID NO: 2092832 - RNA, 18 nt, Human
gcucccucccccugcccc

SEQ ID NO: 2092833 - RNA, 22 nt, Human
gcucccucccccugccccuucu

SEQ ID NO: 2092834 - RNA, 17 nt, Human
gcucccuccccugcccu

SEQ ID NO: 2092835 - RNA, 16 nt, Human
gcucccuaccaccucc

SEQ ID NO: 2092836 - RNA, 20 nt, Human
gcucccuaccaccuccccag

SEQ ID NO: 2092837 - RNA, 14 nt, Human
gcuccaucuccacu

SEQ ID NO: 2092838 - RNA, 21 nt, Human
gcuccagcugcucugucuucu

SEQ ID NO: 2092839 - RNA, 24 nt, Human
gcuccaggcuccuuuagcgcccag

SEQ ID NO: 2092840 - RNA, 20 nt, Human
gcuccagcuguucagcuggu

SEQ ID NO: 2092841 - RNA, 23 nt, Human
gcuccaggcuccuuuagcgccca

SEQ ID NO: 2092842 - RNA, 16 nt, Human
gcuccaggcuccuuua

SEQ ID NO: 2092843 - RNA, 13 nt, Human
gcuccaggcuccu

SEQ ID NO: 2092844 - RNA, 11 nt, Human
gcuccagcugu

SEQ ID NO: 2092845 - RNA, 16 nt, Human
gcuccacacccucucc

SEQ ID NO: 2092846 - RNA, 19 nt, Human
gcuccacacccucucccag

SEQ ID NO: 2092847 - RNA, 20 nt, Human
gcuccagcugcucugucuuc

SEQ ID NO: 2092848 - RNA, 18 nt, Human
gcucaggugucccugcac

SEQ ID NO: 2092849 - RNA, 19 nt, Human
gcucagccuggugggccuc

SEQ ID NO: 2092850 - RNA, 20 nt, Human
gcucagccuggugggccucc

SEQ ID NO: 2092851 - RNA, 22 nt, Human
gcucagcggggacagcuccuuc

SEQ ID NO: 2092852 - RNA, 21 nt, Human
gcucagcggggacagcuccuu

SEQ ID NO: 2092853 - RNA, 20 nt, Human
gcucagcggggacagcuccu

SEQ ID NO: 2092854 - RNA, 15 nt, Human
gcucagcggggacag

SEQ ID NO: 2092855 - RNA, 14 nt, Human
gcucagccuggugg

SEQ ID NO: 2092856 - RNA, 15 nt, Human
gcucagccugguggg

SEQ ID NO: 2092857 - RNA, 17 nt, Human
gcucagccuggugggcc

SEQ ID NO: 2092858 - RNA, 18 nt, Human
gcucagccuggugggccu

SEQ ID NO: 2092859 - RNA, 19 nt, Human
gcucaggugucccugcacu

SEQ ID NO: 2092860 - RNA, 12 nt, Human
gcucagucccau

SEQ ID NO: 2092861 - RNA, 21 nt, Human
gcucagucucaggagcauggg

SEQ ID NO: 2092862 - RNA, 23 nt, Human
gcucagucccaucagagagcgag

SEQ ID NO: 2092863 - RNA, 14 nt, Human
gcucagucucagga

SEQ ID NO: 2092864 - RNA, 17 nt, Human
gcucagucucaggagca

SEQ ID NO: 2092865 - RNA, 20 nt, Human
gcucagucucaggagcaugg

SEQ ID NO: 2092866 - RNA, 23 nt, Human
gcucagucuucccuagggcuggg

SEQ ID NO: 2092867 - RNA, 16 nt, Human
gcucauauuccugcag

SEQ ID NO: 2092868 - RNA, 19 nt, Human
gcucaccagccccagugcc

SEQ ID NO: 2092869 - RNA, 18 nt, Human
gcucaccagccccagugc

SEQ ID NO: 2092870 - RNA, 23 nt, Human
gcucaccagccccagugcccaca

SEQ ID NO: 2092871 - RNA, 20 nt, Human
gcucaccagccccagugccc

SEQ ID NO: 2092872 - RNA, 17 nt, Human
gcucagcaaaagaugcu

SEQ ID NO: 2092873 - RNA, 20 nt, Human
gcucagcaaaagaugcuucu

SEQ ID NO: 2092874 - RNA, 22 nt, Human
gcucagcaaaagaugcuucuca

SEQ ID NO: 2092875 - RNA, 23 nt, Human
gcucagcaaaagaugcuucucac

SEQ ID NO: 2092876 - RNA, 23 nt, Human
gcucagaggguuguucuccuaga

SEQ ID NO: 2092877 - RNA, 18 nt, Human
gcucagaugaagagaaau

SEQ ID NO: 2092878 - RNA, 19 nt, Human
gcucagcaaggggcucugc

SEQ ID NO: 2092879 - RNA, 17 nt, Human
gcucagcagugacugug

SEQ ID NO: 2092880 - RNA, 11 nt, Human
gcucagccugg

SEQ ID NO: 2092881 - RNA, 19 nt, Human
gccugugccacccaccagg

SEQ ID NO: 2092882 - RNA, 12 nt, Human
gccugugcagug

SEQ ID NO: 2092883 - RNA, 15 nt, Human
gccugugagccaguc

SEQ ID NO: 2092884 - RNA, 16 nt, Human
gccugugagccagucu

SEQ ID NO: 2092885 - RNA, 14 nt, Human
gccugugaggcagg

SEQ ID NO: 2092886 - RNA, 18 nt, Human
gccugugaggcaggggcg

SEQ ID NO: 2092887 - RNA, 17 nt, Human
gccugugaggugcagag

SEQ ID NO: 2092888 - RNA, 23 nt, Human
gccugugaggugcagagugccca

SEQ ID NO: 2092889 - RNA, 24 nt, Human
gccugugaggugcagagugcccag

SEQ ID NO: 2092890 - RNA, 16 nt, Human
gcgguccacccaggag

SEQ ID NO: 2092891 - RNA, 13 nt, Human
gcggggacagcuc

SEQ ID NO: 2092892 - RNA, 12 nt, Human
gcggggacagcu

SEQ ID NO: 2092893 - RNA, 19 nt, Human
gcgguccacccaggagccc

SEQ ID NO: 2092894 - RNA, 18 nt, Human
gcgguccacccaggagcc

SEQ ID NO: 2092895 - RNA, 14 nt, Human
gcgggcugggcagc

SEQ ID NO: 2092896 - RNA, 16 nt, Human
gcgggcugggcagcug

SEQ ID NO: 2092897 - RNA, 13 nt, Human
gcuaaaugugaau

SEQ ID NO: 2092898 - RNA, 19 nt, Human
gcuaaauggucgcccagga

SEQ ID NO: 2092899 - RNA, 23 nt, Human
gcuaaauggucgcccaggagaca

SEQ ID NO: 2092900 - RNA, 16 nt, Human
gcuaaaugugaaugau

SEQ ID NO: 2092901 - RNA, 16 nt, Human
gcuaaaucuccuauuu

SEQ ID NO: 2092902 - RNA, 18 nt, Human
gcuaaauguaagaaucau

SEQ ID NO: 2092903 - RNA, 15 nt, Human
gcuaacacuggcccc

SEQ ID NO: 2092904 - RNA, 16 nt, Human
gcuaacacuggccccu

SEQ ID NO: 2092905 - RNA, 17 nt, Human
gcuaacacuggccccua

SEQ ID NO: 2092906 - RNA, 23 nt, Human
gcgugagccacugcaccgggcca

SEQ ID NO: 2092907 - RNA, 16 nt, Human
gcgugaaggccgagaa

SEQ ID NO: 2092908 - RNA, 12 nt, Human
gcgugaaucugu

SEQ ID NO: 2092909 - RNA, 16 nt, Human
gcgugacucacccaag

SEQ ID NO: 2092910 - RNA, 13 nt, Human
gcgugacucaccc

SEQ ID NO: 2092911 - RNA, 14 nt, Human
gcgugacucaccca

SEQ ID NO: 2092912 - RNA, 18 nt, Human
gcgugaggaugggaagga

SEQ ID NO: 2092913 - RNA, 18 nt, Human
gcgugagccacugcaccg

SEQ ID NO: 2092914 - RNA, 11 nt, Human
gcgugaaacac

SEQ ID NO: 2092915 - RNA, 12 nt, Human
gcgugaaacaca

SEQ ID NO: 2092916 - RNA, 19 nt, Human
gcgugaaacacaccaggcu

SEQ ID NO: 2092917 - RNA, 20 nt, Human
gcgugaaacacaccaggcug

SEQ ID NO: 2092918 - RNA, 23 nt, Human
gcgugaaacacaccaggcugugg

SEQ ID NO: 2092919 - RNA, 23 nt, Human
gcgugaacccgggaggcggagcu

SEQ ID NO: 2092920 - RNA, 13 nt, Human
gcgugaaggccga

SEQ ID NO: 2092921 - RNA, 15 nt, Human
gcgugaaggccgaga

SEQ ID NO: 2092922 - RNA, 14 nt, Human
gcuagcgcugccgc

SEQ ID NO: 2092923 - RNA, 15 nt, Human
gcuagcgcugccgca

SEQ ID NO: 2092924 - RNA, 20 nt, Human
gcuagcgcugccgcacccca

SEQ ID NO: 2092925 - RNA, 21 nt, Human
gcuagcgcugccgcaccccag

SEQ ID NO: 2092926 - RNA, 22 nt, Human
gcuagcgcugccgcaccccaga

SEQ ID NO: 2092927 - RNA, 23 nt, Human
gcuagcgcugccgcaccccagag

SEQ ID NO: 2092928 - RNA, 18 nt, Human
gcuagaguccucacuccc

SEQ ID NO: 2092929 - RNA, 17 nt, Human
gcuacucacucaaguuc

SEQ ID NO: 2092930 - RNA, 20 nt, Human
gcuacucacucaaguucaag

SEQ ID NO: 2092931 - RNA, 22 nt, Human
gcuacucacucaaguucaagga

SEQ ID NO: 2092932 - RNA, 23 nt, Human
gcuacucacucaaguucaaggac

SEQ ID NO: 2092933 - RNA, 14 nt, Human
gcuacucagaagcc

SEQ ID NO: 2092934 - RNA, 13 nt, Human
gcuagaguccuca

SEQ ID NO: 2092935 - RNA, 16 nt, Human
gcuagaguccucacuc

SEQ ID NO: 2092936 - RNA, 23 nt, Human
gcuaucucucagugaacugugag

SEQ ID NO: 2092937 - RNA, 12 nt, Human
gcuaugaauuuu

SEQ ID NO: 2092938 - RNA, 19 nt, Human
gcuaagaguguccuaggag

SEQ ID NO: 2092939 - RNA, 19 nt, Human
gcuaacaguucacuugcag

SEQ ID NO: 2092940 - RNA, 20 nt, Human
gcuaaggacauuucccaggg

SEQ ID NO: 2092941 - RNA, 18 nt, Human
gcuaagcuuaaaaaaaac

SEQ ID NO: 2092942 - RNA, 16 nt, Human
gcuaaggacaggcagg

SEQ ID NO: 2092943 - RNA, 17 nt, Human
gcuaaggacauuuccca

SEQ ID NO: 2092944 - RNA, 14 nt, Human
gcuacuaaugaugu

SEQ ID NO: 2092945 - RNA, 16 nt, Human
gcuacuaaugauguuu

SEQ ID NO: 2092946 - RNA, 18 nt, Human
gcuacuaaugauguuuuc

SEQ ID NO: 2092947 - RNA, 16 nt, Human
gcuacucaagaggcug

SEQ ID NO: 2092948 - RNA, 17 nt, Human
gcuacucaagaggcuga

SEQ ID NO: 2092949 - RNA, 20 nt, Human
gcuacucaagaggcugaggc

SEQ ID NO: 2092950 - RNA, 21 nt, Human
gcuacucaagaggcugaggca

SEQ ID NO: 2092951 - RNA, 20 nt, Human
guagaaaagggaacugaaca

SEQ ID NO: 2092952 - RNA, 18 nt, Human
guagaaagacagagcugg

SEQ ID NO: 2092953 - RNA, 21 nt, Human
guagaaagacagagcugggau

SEQ ID NO: 2092954 - RNA, 22 nt, Human
guacuuuuggaaucuagaagaa

SEQ ID NO: 2092955 - RNA, 23 nt, Human
guagagcccuguaucaacccaga

SEQ ID NO: 2092956 - RNA, 16 nt, Human
guagagggugcugccc

SEQ ID NO: 2092957 - RNA, 21 nt, Human
guacuuguggacacagcucuu

SEQ ID NO: 2092958 - RNA, 19 nt, Human
guacuucuccacccugcuc

SEQ ID NO: 2092959 - RNA, 18 nt, Human
guacuucuccacccugcu

SEQ ID NO: 2092960 - RNA, 17 nt, Human
guacuucuccacccugc

SEQ ID NO: 2092961 - RNA, 16 nt, Human
guacuucuccacccug

SEQ ID NO: 2092962 - RNA, 21 nt, Human
guacuucuccacccugcucuc

SEQ ID NO: 2092963 - RNA, 20 nt, Human
guacuucuccacccugcucu

SEQ ID NO: 2092964 - RNA, 20 nt, Human
guacuuguggacacagcucu

SEQ ID NO: 2092965 - RNA, 16 nt, Human
guacuuguggacacag

SEQ ID NO: 2092966 - RNA, 18 nt, Human
guacuugcugcuauuuua

SEQ ID NO: 2092967 - RNA, 21 nt, Human
guacuugcugcuauuuuacug

SEQ ID NO: 2092968 - RNA, 16 nt, Human
guacccacugcucugg

SEQ ID NO: 2092969 - RNA, 14 nt, Human
guacauaggcagca

SEQ ID NO: 2092970 - RNA, 17 nt, Human
guaccccagcucugcuu

SEQ ID NO: 2092971 - RNA, 18 nt, Human
guaccccagcucugcuug

SEQ ID NO: 2092972 - RNA, 19 nt, Human
guaccccagcucugcuugc

SEQ ID NO: 2092973 - RNA, 19 nt, Human
guaccuucagauccuaccc

SEQ ID NO: 2092974 - RNA, 14 nt, Human
guaccuugaacacu

SEQ ID NO: 2092975 - RNA, 18 nt, Human
guaccuugaacacugggg

SEQ ID NO: 2092976 - RNA, 23 nt, Human
guaccuugaacacugggggaggg

SEQ ID NO: 2092977 - RNA, 15 nt, Human
guaccugauguaccu

SEQ ID NO: 2092978 - RNA, 23 nt, Human
guaccuuugcucuugcagagaag

SEQ ID NO: 2092979 - RNA, 13 nt, Human
guaccuuugucac

SEQ ID NO: 2092980 - RNA, 15 nt, Human
guacgucugacaggc

SEQ ID NO: 2092981 - RNA, 14 nt, Human
guacgucugacagg

SEQ ID NO: 2092982 - RNA, 17 nt, Human
guacgucugacaggcaa

SEQ ID NO: 2092983 - RNA, 15 nt, Human
guacuucuccacccu

SEQ ID NO: 2092984 - RNA, 14 nt, Human
guacuucuccaccc

SEQ ID NO: 2092985 - RNA, 14 nt, Human
guacuuccacugau

SEQ ID NO: 2092986 - RNA, 15 nt, Human
guacuacaauuuaaa

SEQ ID NO: 2092987 - RNA, 12 nt, Human
guacuacaauuu

SEQ ID NO: 2092988 - RNA, 15 nt, Human
guacguggagaggga

SEQ ID NO: 2092989 - RNA, 15 nt, Human
guacuaaggaaucuu

SEQ ID NO: 2092990 - RNA, 23 nt, Human
guacuaaggaaucuuucugcuuu

SEQ ID NO: 2092991 - RNA, 12 nt, Human
guacaguuuuua

SEQ ID NO: 2092992 - RNA, 13 nt, Human
guacaguuuuuau

SEQ ID NO: 2092993 - RNA, 22 nt, Human
guacauaaaggugguaugugug

SEQ ID NO: 2092994 - RNA, 23 nt, Human
guacauaaaggugguaugugugu

SEQ ID NO: 2092995 - RNA, 18 nt, Human
guacauauguaaaauaaa

SEQ ID NO: 2092996 - RNA, 15 nt, Human
guacccacugcucug

SEQ ID NO: 2092997 - RNA, 21 nt, Human
guacagugguucuacaaucua

SEQ ID NO: 2092998 - RNA, 16 nt, Human
guacagucuuguauua

SEQ ID NO: 2092999 - RNA, 13 nt, Human
guacagucuugua

SEQ ID NO: 2093000 - RNA, 14 nt, Human
guacagucuuguau

SEQ ID NO: 2093001 - RNA, 15 nt, Human
guacagguaagguga

SEQ ID NO: 2093002 - RNA, 15 nt, Human
guacaggcagcacag

SEQ ID NO: 2093003 - RNA, 17 nt, Human
guacaggcagcacagag

SEQ ID NO: 2093004 - RNA, 20 nt, Human
guacaguugggaaaauaugu

SEQ ID NO: 2093005 - RNA, 21 nt, Human
guacaguugggaaaauauguc

SEQ ID NO: 2093006 - RNA, 16 nt, Human
guacaguguguaaagu

SEQ ID NO: 2093007 - RNA, 17 nt, Human
guacagaaucauugcuu

SEQ ID NO: 2093008 - RNA, 18 nt, Human
guacagaaucauugcuua

SEQ ID NO: 2093009 - RNA, 21 nt, Human
guacagaaucauugcuuauga

SEQ ID NO: 2093010 - RNA, 20 nt, Human
guacagaauucugcuaccuc

SEQ ID NO: 2093011 - RNA, 17 nt, Human
guacagacguaugcuua

SEQ ID NO: 2093012 - RNA, 14 nt, Human
guaauugugaaaaa

SEQ ID NO: 2093013 - RNA, 13 nt, Human
guacagagaagga

SEQ ID NO: 2093014 - RNA, 14 nt, Human
guacagagaaggaa

SEQ ID NO: 2093015 - RNA, 17 nt, Human
guacagauugcugcuuc

SEQ ID NO: 2093016 - RNA, 19 nt, Human
guacagauugcugcuucug

SEQ ID NO: 2093017 - RNA, 20 nt, Human
guacagauugcugcuucugc

SEQ ID NO: 2093018 - RNA, 12 nt, Human
guacaggcagca

SEQ ID NO: 2093019 - RNA, 21 nt, Human
guaauuaucgggaacaguguu

SEQ ID NO: 2093020 - RNA, 13 nt, Human
guaauugugaaaa

SEQ ID NO: 2093021 - RNA, 16 nt, Human
guaauugaauaaaguu

SEQ ID NO: 2093022 - RNA, 15 nt, Human
guaauugaacuuauc

SEQ ID NO: 2093023 - RNA, 20 nt, Human
guaauuaucgggaacagugu

SEQ ID NO: 2093024 - RNA, 22 nt, Human
guaauuaucgggaacaguguuu

SEQ ID NO: 2093025 - RNA, 21 nt, Human
guaauuaaguacuauguauca

SEQ ID NO: 2093026 - RNA, 22 nt, Human
guaauguuacugaucaugcauu

SEQ ID NO: 2093027 - RNA, 23 nt, Human
guaauguuacugaucaugcauug

SEQ ID NO: 2093028 - RNA, 14 nt, Human
guaauuaaguacua

SEQ ID NO: 2093029 - RNA, 17 nt, Human
guaauuaaguacuaugu

SEQ ID NO: 2093030 - RNA, 20 nt, Human
guaauuaaguacuauguauc

SEQ ID NO: 2093031 - RNA, 12 nt, Human
guaaugucacca

SEQ ID NO: 2093032 - RNA, 19 nt, Human
guaaugucaccaccuuccc

SEQ ID NO: 2093033 - RNA, 20 nt, Human
guaaugucaccaccuuccca

SEQ ID NO: 2093034 - RNA, 22 nt, Human
guaaugucaccaccuucccagc

SEQ ID NO: 2093035 - RNA, 13 nt, Human
guaauguuacuga

SEQ ID NO: 2093036 - RNA, 14 nt, Human
guaauguuacugau

SEQ ID NO: 2093037 - RNA, 17 nt, Human
guaauguuacugaucau

SEQ ID NO: 2093038 - RNA, 20 nt, Human
guaauguuacugaucaugca

SEQ ID NO: 2093039 - RNA, 21 nt, Human
guaauguuacugaucaugcau

SEQ ID NO: 2093040 - RNA, 14 nt, Human
guaaugugaauaaa

SEQ ID NO: 2093041 - RNA, 16 nt, Human
guaaugugaauaaauu

SEQ ID NO: 2093042 - RNA, 18 nt, Human
guaaugaugucguuugaa

SEQ ID NO: 2093043 - RNA, 21 nt, Human
guaaugaauuuuuaugauauu

SEQ ID NO: 2093044 - RNA, 18 nt, Human
guaaucguuaugugugua

SEQ ID NO: 2093045 - RNA, 16 nt, Human
guaaucguuaugugug

SEQ ID NO: 2093046 - RNA, 17 nt, Human
guaaucugaucguucuu

SEQ ID NO: 2093047 - RNA, 21 nt, Human
guaaucugaucguucuuucua

SEQ ID NO: 2093048 - RNA, 24 nt, Human
guaaucugaucguucuuucuagcu

SEQ ID NO: 2093049 - RNA, 15 nt, Human
guaaaagacuuuuuu

SEQ ID NO: 2093050 - RNA, 17 nt, Human
guaaaagauaacaagau

SEQ ID NO: 2093051 - RNA, 13 nt, Human
guaaaacugaggc

SEQ ID NO: 2093052 - RNA, 15 nt, Human
guaaaacugaggcac

SEQ ID NO: 2093053 - RNA, 15 nt, Human
guaaaacuuuauuuu

SEQ ID NO: 2093054 - RNA, 18 nt, Human
guaaaacuuuauuuuaua

SEQ ID NO: 2093055 - RNA, 23 nt, Human
guaaaaacagcauugcuuucuga

SEQ ID NO: 2093056 - RNA, 19 nt, Human
guaaaaacagcauugcuuu

SEQ ID NO: 2093057 - RNA, 21 nt, Human
guaaaaacagcauugcuuucu

SEQ ID NO: 2093058 - RNA, 13 nt, Human
guaaaaauaaaau

SEQ ID NO: 2093059 - RNA, 12 nt, Human
guaaaacaaaaa

SEQ ID NO: 2093060 - RNA, 12 nt, Human
guaaaaaugaga

SEQ ID NO: 2093061 - RNA, 13 nt, Human
guaaaaaugagaa

SEQ ID NO: 2093062 - RNA, 16 nt, Human
guaaaaaugagaacau

SEQ ID NO: 2093063 - RNA, 14 nt, Human
guaaaaauaaaauu

SEQ ID NO: 2093064 - RNA, 12 nt, Human
guaaaaauacaa

SEQ ID NO: 2093065 - RNA, 15 nt, Human
gguuuuguagguacu

SEQ ID NO: 2093066 - RNA, 18 nt, Human
guaaaaacagcauugcuu

SEQ ID NO: 2093067 - RNA, 23 nt, Human
gguuuugccauguuggccaggcu

SEQ ID NO: 2093068 - RNA, 11 nt, Human
gguuuuguaca

SEQ ID NO: 2093069 - RNA, 13 nt, Human
gguuuuguacaau

SEQ ID NO: 2093070 - RNA, 14 nt, Human
gguuuucuucccau

SEQ ID NO: 2093071 - RNA, 23 nt, Human
gguuuacucuguggccaaaggag

SEQ ID NO: 2093072 - RNA, 19 nt, Human
gguuuucgaagcucagccc

SEQ ID NO: 2093073 - RNA, 19 nt, Human
gguuuacauucaucucauu

SEQ ID NO: 2093074 - RNA, 22 nt, Human
gguuuacauucaucucauucca

SEQ ID NO: 2093075 - RNA, 20 nt, Human
gguggcccgacagccuggca

SEQ ID NO: 2093076 - RNA, 19 nt, Human
gguggcccgacagccuggc

SEQ ID NO: 2093077 - RNA, 18 nt, Human
gguggcccgacagccugg

SEQ ID NO: 2093078 - RNA, 17 nt, Human
gguggcccgacagccug

SEQ ID NO: 2093079 - RNA, 16 nt, Human
gguggcccgacagccu

SEQ ID NO: 2093080 - RNA, 19 nt, Human
gguggcccacgccuguaau

SEQ ID NO: 2093081 - RNA, 21 nt, Human
gguucaagcgauucuucugcu

SEQ ID NO: 2093082 - RNA, 18 nt, Human
gguucuuucuuccucugc

SEQ ID NO: 2093083 - RNA, 21 nt, Human
gguucagccccuccucugcca

SEQ ID NO: 2093084 - RNA, 22 nt, Human
gguucagccccuccucugccac

SEQ ID NO: 2093085 - RNA, 14 nt, Human
gguugaagcaccaa

SEQ ID NO: 2093086 - RNA, 17 nt, Human
gguucuuucuuccucug

SEQ ID NO: 2093087 - RNA, 12 nt, Human
gguucagcuugu

SEQ ID NO: 2093088 - RNA, 16 nt, Human
gguucagagacucagg

SEQ ID NO: 2093089 - RNA, 14 nt, Human
gguucagccccucc

SEQ ID NO: 2093090 - RNA, 16 nt, Human
gguucagccccuccuc

SEQ ID NO: 2093091 - RNA, 17 nt, Human
gguucagccccuccucu

SEQ ID NO: 2093092 - RNA, 18 nt, Human
gguucagccccuccucug

SEQ ID NO: 2093093 - RNA, 19 nt, Human
gguucagccccuccucugc

SEQ ID NO: 2093094 - RNA, 20 nt, Human
gguucagccccuccucugcc

SEQ ID NO: 2093095 - RNA, 23 nt, Human
gguucaagcgauucuucugcuuc

SEQ ID NO: 2093096 - RNA, 22 nt, Human
gguucaagcgauucuucugcuu

SEQ ID NO: 2093097 - RNA, 20 nt, Human
gguucacugcaaccuccgcc

SEQ ID NO: 2093098 - RNA, 14 nt, Human
gguggccccugccu

SEQ ID NO: 2093099 - RNA, 13 nt, Human
gguuggugggggc

SEQ ID NO: 2093100 - RNA, 15 nt, Human
gguugucacucaaca

SEQ ID NO: 2093101 - RNA, 13 nt, Human
gguuuaagcuguu

SEQ ID NO: 2093102 - RNA, 18 nt, Human
gguuggcaaaaaggcagg

SEQ ID NO: 2093103 - RNA, 15 nt, Human
gguugcuucugggaa

SEQ ID NO: 2093104 - RNA, 22 nt, Human
gguuggaagugagggucagaga

SEQ ID NO: 2093105 - RNA, 14 nt, Human
gguugggcuggugu

SEQ ID NO: 2093106 - RNA, 17 nt, Human
gguugggcccagaucug

SEQ ID NO: 2093107 - RNA, 18 nt, Human
gguugcagugagccaaga

SEQ ID NO: 2093108 - RNA, 17 nt, Human
gguugcagugagcugag

SEQ ID NO: 2093109 - RNA, 14 nt, Human
gguugcaucagaaa

SEQ ID NO: 2093110 - RNA, 21 nt, Human
gguugcguccugacggcgccc

SEQ ID NO: 2093111 - RNA, 16 nt, Human
gguugcucacagcugu

SEQ ID NO: 2093112 - RNA, 19 nt, Human
guaagaucguucucugccu

SEQ ID NO: 2093113 - RNA, 14 nt, Human
guaagagcuggugu

SEQ ID NO: 2093114 - RNA, 16 nt, Human
guaagagcuggugucu

SEQ ID NO: 2093115 - RNA, 17 nt, Human
guaagagcuuuacaaaa

SEQ ID NO: 2093116 - RNA, 13 nt, Human
guaagagaauguu

SEQ ID NO: 2093117 - RNA, 15 nt, Human
guaagagaauguuau

SEQ ID NO: 2093118 - RNA, 19 nt, Human
guaagaccggaagcuccug

SEQ ID NO: 2093119 - RNA, 21 nt, Human
guaagaccggaagcuccuggu

SEQ ID NO: 2093120 - RNA, 15 nt, Human
guaagaagacaugaa

SEQ ID NO: 2093121 - RNA, 13 nt, Human
guaagaagagacu

SEQ ID NO: 2093122 - RNA, 11 nt, Human
guaagaagccg

SEQ ID NO: 2093123 - RNA, 15 nt, Human
guaagaagagacugg

SEQ ID NO: 2093124 - RNA, 13 nt, Human
guaagaaucauug

SEQ ID NO: 2093125 - RNA, 20 nt, Human
guaagaaagugaagcaaauc

SEQ ID NO: 2093126 - RNA, 20 nt, Human
guaagaaacacacugaggca

SEQ ID NO: 2093127 - RNA, 16 nt, Human
guaacuugguuauaca

SEQ ID NO: 2093128 - RNA, 17 nt, Human
guaacuugguuauacau

SEQ ID NO: 2093129 - RNA, 18 nt, Human
guaacuugguuauacaug

SEQ ID NO: 2093130 - RNA, 23 nt, Human
guaacuugguuauacaugacacu

SEQ ID NO: 2093131 - RNA, 14 nt, Human
guaacuugucuuaa

SEQ ID NO: 2093132 - RNA, 19 nt, Human
guaacuuuuguaaauacac

SEQ ID NO: 2093133 - RNA, 13 nt, Human
guaagauuuugaa

SEQ ID NO: 2093134 - RNA, 14 nt, Human
guaagauuuugaaa

SEQ ID NO: 2093135 - RNA, 16 nt, Human
guaagauuuugaaaac

SEQ ID NO: 2093136 - RNA, 17 nt, Human
guaagauuuugaaaacu

SEQ ID NO: 2093137 - RNA, 11 nt, Human
guaagcucuuu

SEQ ID NO: 2093138 - RNA, 20 nt, Human
guaagcucuuugaaacaacu

SEQ ID NO: 2093139 - RNA, 17 nt, Human
guaagcuuccaggaaaa

SEQ ID NO: 2093140 - RNA, 14 nt, Human
guaaggaaugcuug

SEQ ID NO: 2093141 - RNA, 15 nt, Human
guaaggaaugcuugg

SEQ ID NO: 2093142 - RNA, 14 nt, Human
guaaggugagggaa

SEQ ID NO: 2093143 - RNA, 12 nt, Human
guaaggugccuu

SEQ ID NO: 2093144 - RNA, 17 nt, Human
guaaguaaacugcccug

SEQ ID NO: 2093145 - RNA, 15 nt, Human
guaaguaaaugucug

SEQ ID NO: 2093146 - RNA, 17 nt, Human
guaaguaaaugucugug

SEQ ID NO: 2093147 - RNA, 13 nt, Human
guaaguaauuauc

SEQ ID NO: 2093148 - RNA, 23 nt, Human
guaaguaauuaucgggaacagug

SEQ ID NO: 2093149 - RNA, 16 nt, Human
guaagugagagagaca

SEQ ID NO: 2093150 - RNA, 18 nt, Human
guaaguaccacucaggcc

SEQ ID NO: 2093151 - RNA, 22 nt, Human
guaaguauucuuauuuaaugaa

SEQ ID NO: 2093152 - RNA, 15 nt, Human
guaaauccuuuuucu

SEQ ID NO: 2093153 - RNA, 16 nt, Human
guaaauccuuuuucuu

SEQ ID NO: 2093154 - RNA, 22 nt, Human
guaaauccuuuuucuuuauaaa

SEQ ID NO: 2093155 - RNA, 22 nt, Human
guaaaugaaguaacuugucuua

SEQ ID NO: 2093156 - RNA, 23 nt, Human
guaaaugaaguaacuugucuuaa

SEQ ID NO: 2093157 - RNA, 21 nt, Human
guaaaugucuguggccuuguu

SEQ ID NO: 2093158 - RNA, 22 nt, Human
guaaaugucuguggccuuguuc

SEQ ID NO: 2093159 - RNA, 17 nt, Human
guaaauguuuagguuuu

SEQ ID NO: 2093160 - RNA, 14 nt, Human
guaaaauaaaauua

SEQ ID NO: 2093161 - RNA, 17 nt, Human
guaaagugauaauuucu

SEQ ID NO: 2093162 - RNA, 18 nt, Human
guaaagugauaauuucug

SEQ ID NO: 2093163 - RNA, 23 nt, Human
guaaagugauaauuucuggaauu

SEQ ID NO: 2093164 - RNA, 15 nt, Human
guaaaguguaacaua

SEQ ID NO: 2093165 - RNA, 17 nt, Human
guaaaguguaacauaug

SEQ ID NO: 2093166 - RNA, 19 nt, Human
guaaaguguaacauaugca

SEQ ID NO: 2093167 - RNA, 20 nt, Human
guaaaguguaacauaugcaa

SEQ ID NO: 2093168 - RNA, 11 nt, Human
guaaauaagag

SEQ ID NO: 2093169 - RNA, 13 nt, Human
guaaauaagagau

SEQ ID NO: 2093170 - RNA, 16 nt, Human
guaaauaagagauuug

SEQ ID NO: 2093171 - RNA, 18 nt, Human
guaaauacaaguucuauu

SEQ ID NO: 2093172 - RNA, 20 nt, Human
guaaauacaaguucuauuua

SEQ ID NO: 2093173 - RNA, 20 nt, Human
guaaauaaccccauucuuug

SEQ ID NO: 2093174 - RNA, 21 nt, Human
guaaauaaccccauucuuugc

SEQ ID NO: 2093175 - RNA, 12 nt, Human
guaaauauuuau

SEQ ID NO: 2093176 - RNA, 11 nt, Human
guaaauauuua

SEQ ID NO: 2093177 - RNA, 19 nt, Human
guaaauacacaacacacac

SEQ ID NO: 2093178 - RNA, 18 nt, Human
guaaauagcaacaugcuu

SEQ ID NO: 2093179 - RNA, 14 nt, Human
ggugaacauugcaa

SEQ ID NO: 2093180 - RNA, 19 nt, Human
ggucugaggaauccagacc

SEQ ID NO: 2093181 - RNA, 19 nt, Human
ggugaagaugggaacgcag

SEQ ID NO: 2093182 - RNA, 17 nt, Human
ggugaagcuauuuaucu

SEQ ID NO: 2093183 - RNA, 18 nt, Human
ggugaagcuauuuaucug

SEQ ID NO: 2093184 - RNA, 16 nt, Human
ggugaagggagagcca

SEQ ID NO: 2093185 - RNA, 18 nt, Human
ggugaagggagagccagc

SEQ ID NO: 2093186 - RNA, 19 nt, Human
ggucuccucuuuguuuugu

SEQ ID NO: 2093187 - RNA, 15 nt, Human
ggucuccugccccca

SEQ ID NO: 2093188 - RNA, 16 nt, Human
ggucugacccacugcu

SEQ ID NO: 2093189 - RNA, 15 nt, Human
ggucugacccacugc

SEQ ID NO: 2093190 - RNA, 16 nt, Human
ggucucacucugucgc

SEQ ID NO: 2093191 - RNA, 12 nt, Human
ggucucacucug

SEQ ID NO: 2093192 - RNA, 19 nt, Human
ggucucccucuccugccua

SEQ ID NO: 2093193 - RNA, 17 nt, Human
ggucucccucuccugcc

SEQ ID NO: 2093194 - RNA, 18 nt, Human
ggucucccucuccugccu

SEQ ID NO: 2093195 - RNA, 21 nt, Human
ggucucacuauguugcccagg

SEQ ID NO: 2093196 - RNA, 22 nt, Human
ggucucccucuccugccuacuc

SEQ ID NO: 2093197 - RNA, 22 nt, Human
ggucucacuauguugcccaggc

SEQ ID NO: 2093198 - RNA, 23 nt, Human
gguccuagaaauuccccacccug

SEQ ID NO: 2093199 - RNA, 19 nt, Human
gguccuaagucccugcccc

SEQ ID NO: 2093200 - RNA, 23 nt, Human
ggucccuugcagcuaguuuucua

SEQ ID NO: 2093201 - RNA, 17 nt, Human
gguccgguguccuuuuc

SEQ ID NO: 2093202 - RNA, 13 nt, Human
ggucccugggagg

SEQ ID NO: 2093203 - RNA, 23 nt, Human
ggucccugggaggaaauuugaau

SEQ ID NO: 2093204 - RNA, 21 nt, Human
ggucccuucuuacucacacac

SEQ ID NO: 2093205 - RNA, 19 nt, Human
ggucccuugagaccucagc

SEQ ID NO: 2093206 - RNA, 20 nt, Human
ggucccuugagaccucagcc

SEQ ID NO: 2093207 - RNA, 21 nt, Human
ggucccuugagaccucagcca

SEQ ID NO: 2093208 - RNA, 17 nt, Human
ggugaggggcuggcacu

SEQ ID NO: 2093209 - RNA, 15 nt, Human
ggugaggcaauaaaa

SEQ ID NO: 2093210 - RNA, 16 nt, Human
ggugaccucugccuga

SEQ ID NO: 2093211 - RNA, 14 nt, Human
ggugaccucugccu

SEQ ID NO: 2093212 - RNA, 13 nt, Human
ggugacaccagcc

SEQ ID NO: 2093213 - RNA, 16 nt, Human
ggugacaccagccuuu

SEQ ID NO: 2093214 - RNA, 23 nt, Human
ggugaguggggagacaccucaga

SEQ ID NO: 2093215 - RNA, 22 nt, Human
ggugccccccuugccagacaug

SEQ ID NO: 2093216 - RNA, 13 nt, Human
ggugcccuccacu

SEQ ID NO: 2093217 - RNA, 16 nt, Human
ggugcccuccacugcc

SEQ ID NO: 2093218 - RNA, 17 nt, Human
ggugcccuuggaggcca

SEQ ID NO: 2093219 - RNA, 18 nt, Human
ggugcccuuggaggccag

SEQ ID NO: 2093220 - RNA, 22 nt, Human
ggugcccuuggaggccagccag

SEQ ID NO: 2093221 - RNA, 13 nt, Human
gguggcagcugcg

SEQ ID NO: 2093222 - RNA, 12 nt, Human
gguggcagcugc

SEQ ID NO: 2093223 - RNA, 11 nt, Human
gguggcagcug

SEQ ID NO: 2093224 - RNA, 23 nt, Human
gguggcagcugcgguccacccag

SEQ ID NO: 2093225 - RNA, 15 nt, Human
gguggcagcugcggu

SEQ ID NO: 2093226 - RNA, 16 nt, Human
gguggcagugggagcu

SEQ ID NO: 2093227 - RNA, 21 nt, Human
gguggcagugcagcaaccaga

SEQ ID NO: 2093228 - RNA, 16 nt, Human
ggugcucagggcugac

SEQ ID NO: 2093229 - RNA, 15 nt, Human
ggugcgaucuggguu

SEQ ID NO: 2093230 - RNA, 20 nt, Human
ggugcuaaauggucgcccag

SEQ ID NO: 2093231 - RNA, 17 nt, Human
ggugcuaauuaauaaag

SEQ ID NO: 2093232 - RNA, 15 nt, Human
ggugcucagggcuga

SEQ ID NO: 2093233 - RNA, 23 nt, Human
ggugcuaaauggucgcccaggag

SEQ ID NO: 2093234 - RNA, 21 nt, Human
ggugcuaaauggucgcccagg

SEQ ID NO: 2093235 - RNA, 22 nt, Human
ggugcuaaauggucgcccagga

SEQ ID NO: 2093236 - RNA, 20 nt, Human
ggguuucaccauguuggcca

SEQ ID NO: 2093237 - RNA, 17 nt, Human
gguacccacugcucugg

SEQ ID NO: 2093238 - RNA, 13 nt, Human
ggguuggcugggu

SEQ ID NO: 2093239 - RNA, 14 nt, Human
ggguuggcugggua

SEQ ID NO: 2093240 - RNA, 12 nt, Human
ggguugggccca

SEQ ID NO: 2093241 - RNA, 14 nt, Human
ggguugggcccaga

SEQ ID NO: 2093242 - RNA, 22 nt, Human
ggguugggcccagaucuggucc

SEQ ID NO: 2093243 - RNA, 15 nt, Human
ggguugggcuggugu

SEQ ID NO: 2093244 - RNA, 18 nt, Human
gguaccuugaacacuggg

SEQ ID NO: 2093245 - RNA, 12 nt, Human
gguaccuugaac

SEQ ID NO: 2093246 - RNA, 21 nt, Human
gguacuuguggacacagcucu

SEQ ID NO: 2093247 - RNA, 22 nt, Human
gguacuuguggacacagcucuu

SEQ ID NO: 2093248 - RNA, 14 nt, Human
ggguucuuucuucc

SEQ ID NO: 2093249 - RNA, 20 nt, Human
ggguuggcugggcccagaag

SEQ ID NO: 2093250 - RNA, 19 nt, Human
ggguuggccccugcccggc

SEQ ID NO: 2093251 - RNA, 16 nt, Human
ggguuggccccugccc

SEQ ID NO: 2093252 - RNA, 16 nt, Human
ggguucuccucucccc

SEQ ID NO: 2093253 - RNA, 18 nt, Human
ggguucuccucuccccuc

SEQ ID NO: 2093254 - RNA, 14 nt, Human
ggguucccccagcc

SEQ ID NO: 2093255 - RNA, 18 nt, Human
ggguucccuuuccuucca

SEQ ID NO: 2093256 - RNA, 21 nt, Human
ggguucccuuuccuuccaucc

SEQ ID NO: 2093257 - RNA, 15 nt, Human
ggguucucacagugg

SEQ ID NO: 2093258 - RNA, 14 nt, Human
ggguuccucuuccc

SEQ ID NO: 2093259 - RNA, 20 nt, Human
ggguggagaacuccuagggu

SEQ ID NO: 2093260 - RNA, 14 nt, Human
ggguggaggagagc

SEQ ID NO: 2093261 - RNA, 15 nt, Human
ggguggaggagagcc

SEQ ID NO: 2093262 - RNA, 19 nt, Human
ggguggaggagagccuggu

SEQ ID NO: 2093263 - RNA, 15 nt, Human
ggguucccccagccc

SEQ ID NO: 2093264 - RNA, 22 nt, Human
ggguagcagguaccacugauuu

SEQ ID NO: 2093265 - RNA, 21 nt, Human
ggguagccacuggacugacga

SEQ ID NO: 2093266 - RNA, 15 nt, Human
ggguagcuagaggaa

SEQ ID NO: 2093267 - RNA, 16 nt, Human
ggguagcuagaggaac

SEQ ID NO: 2093268 - RNA, 16 nt, Human
ggucagagccugcagu

SEQ ID NO: 2093269 - RNA, 15 nt, Human
ggucagagccugcag

SEQ ID NO: 2093270 - RNA, 14 nt, Human
ggucagagccugca

SEQ ID NO: 2093271 - RNA, 13 nt, Human
ggucagagccugc

SEQ ID NO: 2093272 - RNA, 12 nt, Human
ggucagagccug

SEQ ID NO: 2093273 - RNA, 20 nt, Human
ggucaaguaagaagacauga

SEQ ID NO: 2093274 - RNA, 22 nt, Human
ggucacaaauccuaaaagaagc

SEQ ID NO: 2093275 - RNA, 17 nt, Human
ggucaauccugugggug

SEQ ID NO: 2093276 - RNA, 18 nt, Human
ggucaaguuauuaauuuc

SEQ ID NO: 2093277 - RNA, 20 nt, Human
ggucaauacaguacaggcag

SEQ ID NO: 2093278 - RNA, 17 nt, Human
gguagagauggaggagg

SEQ ID NO: 2093279 - RNA, 20 nt, Human
ggucaagauuuugaaugcuu

SEQ ID NO: 2093280 - RNA, 13 nt, Human
ggucaagcccagg

SEQ ID NO: 2093281 - RNA, 15 nt, Human
ggucaagcccaggag

SEQ ID NO: 2093282 - RNA, 19 nt, Human
ggucaagcccaggaggacu

SEQ ID NO: 2093283 - RNA, 17 nt, Human
ggucaagcccaggagga

SEQ ID NO: 2093284 - RNA, 11 nt, Human
ggucaaggccu

SEQ ID NO: 2093285 - RNA, 18 nt, Human
ggucaaggccugucccug

SEQ ID NO: 2093286 - RNA, 20 nt, Human
gguagaaagagauacagagg

SEQ ID NO: 2093287 - RNA, 23 nt, Human
ggucaacuugagcauguuacuga

SEQ ID NO: 2093288 - RNA, 14 nt, Human
ggucccaggcagag

SEQ ID NO: 2093289 - RNA, 15 nt, Human
ggucccagccacccc

SEQ ID NO: 2093290 - RNA, 14 nt, Human
ggucccacucaguc

SEQ ID NO: 2093291 - RNA, 12 nt, Human
ggucccacucag

SEQ ID NO: 2093292 - RNA, 14 nt, Human
ggucccagccaccc

SEQ ID NO: 2093293 - RNA, 22 nt, Human
ggucccacucaguccauagcag

SEQ ID NO: 2093294 - RNA, 14 nt, Human
ggucagagggccca

SEQ ID NO: 2093295 - RNA, 19 nt, Human
ggucagaguaagcugcuuu

SEQ ID NO: 2093296 - RNA, 19 nt, Human
ggucacugaaacuucaagc

SEQ ID NO: 2093297 - RNA, 14 nt, Human
ggggcugccagggg

SEQ ID NO: 2093298 - RNA, 14 nt, Human
ggggcagucaccug

SEQ ID NO: 2093299 - RNA, 21 nt, Human
ggggcagggaaggggaggcag

SEQ ID NO: 2093300 - RNA, 11 nt, Human
ggggcagucug

SEQ ID NO: 2093301 - RNA, 20 nt, Human
ggggcugcuccuccagggcc

SEQ ID NO: 2093302 - RNA, 21 nt, Human
ggggcugcugaccuccacagc

SEQ ID NO: 2093303 - RNA, 14 nt, Human
ggggcugcuccucc

SEQ ID NO: 2093304 - RNA, 15 nt, Human
ggggcugcuccucca

SEQ ID NO: 2093305 - RNA, 16 nt, Human
ggggcugcuccuccag

SEQ ID NO: 2093306 - RNA, 19 nt, Human
ggggcagcugccagagaag

SEQ ID NO: 2093307 - RNA, 16 nt, Human
ggggcaggagcucaga

SEQ ID NO: 2093308 - RNA, 16 nt, Human
ggggcaggagggcccu

SEQ ID NO: 2093309 - RNA, 10 nt, Human
ggggcaggca

SEQ ID NO: 2093310 - RNA, 11 nt, Human
ggggcaggcag

SEQ ID NO: 2093311 - RNA, 12 nt, Human
ggggcaggcagu

SEQ ID NO: 2093312 - RNA, 17 nt, Human
ggggcuggcacugacug

SEQ ID NO: 2093313 - RNA, 15 nt, Human
ggggcuuucuggaga

SEQ ID NO: 2093314 - RNA, 19 nt, Human
ggggcuggcggcuacucag

SEQ ID NO: 2093315 - RNA, 12 nt, Human
ggggcuggggca

SEQ ID NO: 2093316 - RNA, 15 nt, Human
ggggcuggggcagga

SEQ ID NO: 2093317 - RNA, 16 nt, Human
ggggcuggggcaggag

SEQ ID NO: 2093318 - RNA, 17 nt, Human
ggggcuggggcaggagg

SEQ ID NO: 2093319 - RNA, 18 nt, Human
ggggcuggggcaggaggg

SEQ ID NO: 2093320 - RNA, 23 nt, Human
ggguacuuguggacacagcucuu

SEQ ID NO: 2093321 - RNA, 22 nt, Human
ggguacuuguggacacagcucu

SEQ ID NO: 2093322 - RNA, 19 nt, Human
ggguacuuguggacacagc

SEQ ID NO: 2093323 - RNA, 15 nt, Human
ggguacccacugcuc

SEQ ID NO: 2093324 - RNA, 13 nt, Human
ggguacccacugc

SEQ ID NO: 2093325 - RNA, 23 nt, Human
ggguaccuugaacacugggggag

SEQ ID NO: 2093326 - RNA, 18 nt, Human
ggguacccacugcucugg

SEQ ID NO: 2093327 - RNA, 23 nt, Human
gggguucagccccuccucugcca

SEQ ID NO: 2093328 - RNA, 17 nt, Human
gggguucagccccuccu

SEQ ID NO: 2093329 - RNA, 22 nt, Human
gggguucagccccuccucugcc

SEQ ID NO: 2093330 - RNA, 22 nt, Human
gggguucuuucuuccucugcug

SEQ ID NO: 2093331 - RNA, 20 nt, Human
gggguucuuucuuccucugc

SEQ ID NO: 2093332 - RNA, 21 nt, Human
ggggugcccuccacugcccuc

SEQ ID NO: 2093333 - RNA, 16 nt, Human
gggguuauuuucuggu

SEQ ID NO: 2093334 - RNA, 16 nt, Human
gggguucagccccucc

SEQ ID NO: 2093335 - RNA, 22 nt, Human
ggggucuuugugagagugagcu

SEQ ID NO: 2093336 - RNA, 13 nt, Human
ggggugaggacca

SEQ ID NO: 2093337 - RNA, 15 nt, Human
ggggugcagcaguga

SEQ ID NO: 2093338 - RNA, 16 nt, Human
ggggcagagggcagag

SEQ ID NO: 2093339 - RNA, 17 nt, Human
ggggcagccugcguggc

SEQ ID NO: 2093340 - RNA, 14 nt, Human
ggggcagcugccag

SEQ ID NO: 2093341 - RNA, 18 nt, Human
ggggcagagggcagaggc

SEQ ID NO: 2093342 - RNA, 22 nt, Human
ggggcagagggcagaggcugga

SEQ ID NO: 2093343 - RNA, 21 nt, Human
ggggcagccaaacccaugagg

SEQ ID NO: 2093344 - RNA, 17 nt, Human
ggggaucacagccucug

SEQ ID NO: 2093345 - RNA, 21 nt, Human
ggggaugacuagaggcaggga

SEQ ID NO: 2093346 - RNA, 13 nt, Human
ggggaugcuucau

SEQ ID NO: 2093347 - RNA, 20 nt, Human
ggggagugggacagagucug

SEQ ID NO: 2093348 - RNA, 19 nt, Human
ggggagaacuuacauugug

SEQ ID NO: 2093349 - RNA, 16 nt, Human
ggggagacaccucaga

SEQ ID NO: 2093350 - RNA, 17 nt, Human
ggggagacaccucagag

SEQ ID NO: 2093351 - RNA, 19 nt, Human
ggggagaucggggccagag

SEQ ID NO: 2093352 - RNA, 14 nt, Human
ggggagcagagaca

SEQ ID NO: 2093353 - RNA, 17 nt, Human
ggggagucugaagcaga

SEQ ID NO: 2093354 - RNA, 19 nt, Human
ggggagugggacagagucu

SEQ ID NO: 2093355 - RNA, 16 nt, Human
ggggagucugaagcag

SEQ ID NO: 2093356 - RNA, 12 nt, Human
ggggaggagggc

SEQ ID NO: 2093357 - RNA, 18 nt, Human
ggggaggaaacucaccug

SEQ ID NO: 2093358 - RNA, 16 nt, Human
ggggaggaccucuggg

SEQ ID NO: 2093359 - RNA, 18 nt, Human
gggcuucaguggcagcug

SEQ ID NO: 2093360 - RNA, 17 nt, Human
gggcuucaguggcagcu

SEQ ID NO: 2093361 - RNA, 16 nt, Human
gggcuucaguggcagc

SEQ ID NO: 2093362 - RNA, 15 nt, Human
gggcuucaguggcag

SEQ ID NO: 2093363 - RNA, 20 nt, Human
gggcuucaguggcagcugcu

SEQ ID NO: 2093364 - RNA, 19 nt, Human
gggcuucaguggcagcugc

SEQ ID NO: 2093365 - RNA, 23 nt, Human
gggcuuccauuugugugugugca

SEQ ID NO: 2093366 - RNA, 19 nt, Human
gggcuugcaaguauguuuu

SEQ ID NO: 2093367 - RNA, 10 nt, Human
gggccuggca

SEQ ID NO: 2093368 - RNA, 22 nt, Human
gggccuggcagccgugccuuca

SEQ ID NO: 2093369 - RNA, 18 nt, Human
gggccuggucguuuucaa

SEQ ID NO: 2093370 - RNA, 19 nt, Human
gggccuggucccugggagg

SEQ ID NO: 2093371 - RNA, 12 nt, Human
gggcccuccuga

SEQ ID NO: 2093372 - RNA, 23 nt, Human
gggcccuccugaaacuuacacac

SEQ ID NO: 2093373 - RNA, 21 nt, Human
ggcucccacaggcccuuccuc

SEQ ID NO: 2093374 - RNA, 20 nt, Human
ggcucccacaggcccuuccu

SEQ ID NO: 2093375 - RNA, 16 nt, Human
gggcgcgguggcucac

SEQ ID NO: 2093376 - RNA, 16 nt, Human
gggccuuaaaagccau

SEQ ID NO: 2093377 - RNA, 18 nt, Human
gggcgagucacugccucu

SEQ ID NO: 2093378 - RNA, 20 nt, Human
gggcgagacucugucucaaa

SEQ ID NO: 2093379 - RNA, 12 nt, Human
gggccuugccca

SEQ ID NO: 2093380 - RNA, 12 nt, Human
gggccuguugcc

SEQ ID NO: 2093381 - RNA, 14 nt, Human
gggccuguugcccu

SEQ ID NO: 2093382 - RNA, 14 nt, Human
gggccuugcccaga

SEQ ID NO: 2093383 - RNA, 15 nt, Human
gggccuugcccagag

SEQ ID NO: 2093384 - RNA, 17 nt, Human
gggccuugcccagagau

SEQ ID NO: 2093385 - RNA, 22 nt, Human
gggccuugcccagagaugccuc

SEQ ID NO: 2093386 - RNA, 23 nt, Human
gggccuugcuaccucaaggggga

SEQ ID NO: 2093387 - RNA, 20 nt, Human
gggccuguacaaaagggaca

SEQ ID NO: 2093388 - RNA, 23 nt, Human
gggccuguacaaaagggacauga

SEQ ID NO: 2093389 - RNA, 16 nt, Human
gggcugaggugggagg

SEQ ID NO: 2093390 - RNA, 14 nt, Human
gggcugaucucagg

SEQ ID NO: 2093391 - RNA, 16 nt, Human
gggcugaucucaggga

SEQ ID NO: 2093392 - RNA, 18 nt, Human
gggcugaucucagggaag

SEQ ID NO: 2093393 - RNA, 14 nt, Human
gggcuucaguggca

SEQ ID NO: 2093394 - RNA, 12 nt, Human
gggcugugaucg

SEQ ID NO: 2093395 - RNA, 10 nt, Human
gggcugagac

SEQ ID NO: 2093396 - RNA, 20 nt, Human
gggcugacuagaagggccag

SEQ ID NO: 2093397 - RNA, 18 nt, Human
gggcugaacggggagaaa

SEQ ID NO: 2093398 - RNA, 20 nt, Human
gggcucugccccagcucugg

SEQ ID NO: 2093399 - RNA, 21 nt, Human
gggcucugccccagcucuggc

SEQ ID NO: 2093400 - RNA, 16 nt, Human
gggcucugcccucccu

SEQ ID NO: 2093401 - RNA, 21 nt, Human
gggcucugcccucccuccuuc

SEQ ID NO: 2093402 - RNA, 22 nt, Human
gggcucugcccucccuccuucc

SEQ ID NO: 2093403 - RNA, 11 nt, Human
gggcugagggg

SEQ ID NO: 2093404 - RNA, 12 nt, Human
gggcugaggggc

SEQ ID NO: 2093405 - RNA, 18 nt, Human
gggcugaggggcaacgaa

SEQ ID NO: 2093406 - RNA, 16 nt, Human
gggcugagcugccugu

SEQ ID NO: 2093407 - RNA, 18 nt, Human
gggcugagcccuggcagg

SEQ ID NO: 2093408 - RNA, 16 nt, Human
gggcugagcccuggca

SEQ ID NO: 2093409 - RNA, 17 nt, Human
gggcugagcccuggcag

SEQ ID NO: 2093410 - RNA, 18 nt, Human
gggcugagagaaccucac

SEQ ID NO: 2093411 - RNA, 13 nt, Human
gggcugagcccug

SEQ ID NO: 2093412 - RNA, 15 nt, Human
gggcugagcccuggc

SEQ ID NO: 2093413 - RNA, 11 nt, Human
gggcucugccc

SEQ ID NO: 2093414 - RNA, 12 nt, Human
gggcucugcccc

SEQ ID NO: 2093415 - RNA, 19 nt, Human
gggcucugccccagcucug

SEQ ID NO: 2093416 - RNA, 19 nt, Human
gggcucucugcuguacaua

SEQ ID NO: 2093417 - RNA, 13 nt, Human
gggcucuccaccu

SEQ ID NO: 2093418 - RNA, 14 nt, Human
gggcucuccaccuc

SEQ ID NO: 2093419 - RNA, 17 nt, Human
gggcucuccaccucagc

SEQ ID NO: 2093420 - RNA, 18 nt, Human
gggcucuccaccucagcc

SEQ ID NO: 2093421 - RNA, 19 nt, Human
gggcucuccaccucagccu

SEQ ID NO: 2093422 - RNA, 21 nt, Human
gggcucuccaccucagccuug

SEQ ID NO: 2093423 - RNA, 13 nt, Human
gggcucccuuccu

SEQ ID NO: 2093424 - RNA, 11 nt, Human
gggcuccugga

SEQ ID NO: 2093425 - RNA, 12 nt, Human
gggcuccuggaa

SEQ ID NO: 2093426 - RNA, 20 nt, Human
gggcuccuggaaaggcucag

SEQ ID NO: 2093427 - RNA, 23 nt, Human
gggcuccuggaaaggcucagucu

SEQ ID NO: 2093428 - RNA, 22 nt, Human
gucauaacuagaacugaauuuu

SEQ ID NO: 2093429 - RNA, 14 nt, Human
gucagcuacuaaug

SEQ ID NO: 2093430 - RNA, 13 nt, Human
gucagccacaugg

SEQ ID NO: 2093431 - RNA, 16 nt, Human
gucauaccaacuuuag

SEQ ID NO: 2093432 - RNA, 16 nt, Human
gucauaccaggccgcc

SEQ ID NO: 2093433 - RNA, 17 nt, Human
gucauaacuagaacuga

SEQ ID NO: 2093434 - RNA, 22 nt, Human
gucagccuucccccucccaggg

SEQ ID NO: 2093435 - RNA, 23 nt, Human
gucaccugcccagaucccagaag

SEQ ID NO: 2093436 - RNA, 14 nt, Human
gucaccuuuuaaau

SEQ ID NO: 2093437 - RNA, 17 nt, Human
gucaccuuuuaaauccu

SEQ ID NO: 2093438 - RNA, 19 nt, Human
gucaccuuuuaaauccugu

SEQ ID NO: 2093439 - RNA, 21 nt, Human
gucaccuuuuaaauccuguug

SEQ ID NO: 2093440 - RNA, 16 nt, Human
gucacgcagccaccag

SEQ ID NO: 2093441 - RNA, 21 nt, Human
gucagcaaguccuaagccugu

SEQ ID NO: 2093442 - RNA, 13 nt, Human
gucagcaggaagc

SEQ ID NO: 2093443 - RNA, 15 nt, Human
gucagccaaauguaa

SEQ ID NO: 2093444 - RNA, 15 nt, Human
gucaugauggcacca

SEQ ID NO: 2093445 - RNA, 20 nt, Human
gucaugaucucccugccgcc

SEQ ID NO: 2093446 - RNA, 22 nt, Human
gucaugaucucccugccgccuc

SEQ ID NO: 2093447 - RNA, 16 nt, Human
gucaugaucucccugc

SEQ ID NO: 2093448 - RNA, 17 nt, Human
gucaugaucucccugcc

SEQ ID NO: 2093449 - RNA, 18 nt, Human
gucaugaucucccugccg

SEQ ID NO: 2093450 - RNA, 19 nt, Human
gucaugaucucccugccgc

SEQ ID NO: 2093451 - RNA, 18 nt, Human
gucaucuugaccaagcag

SEQ ID NO: 2093452 - RNA, 16 nt, Human
gucaucugguagauuu

SEQ ID NO: 2093453 - RNA, 20 nt, Human
gucaucuugaccaagcagga

SEQ ID NO: 2093454 - RNA, 22 nt, Human
gucaucuugaccaagcaggaag

SEQ ID NO: 2093455 - RNA, 18 nt, Human
gucaucuuuuucucuaaa

SEQ ID NO: 2093456 - RNA, 22 nt, Human
gucaucuuuuucucuaaaauag

SEQ ID NO: 2093457 - RNA, 14 nt, Human
gucaugaagcccaa

SEQ ID NO: 2093458 - RNA, 18 nt, Human
gucaugagcugagcaggg

SEQ ID NO: 2093459 - RNA, 16 nt, Human
gucaugagcugagcag

SEQ ID NO: 2093460 - RNA, 14 nt, Human
gucaugaucucccu

SEQ ID NO: 2093461 - RNA, 15 nt, Human
gucaugaucucccug

SEQ ID NO: 2093462 - RNA, 14 nt, Human
gucaucccauuguc

SEQ ID NO: 2093463 - RNA, 19 nt, Human
gucaucguaggugauuuga

SEQ ID NO: 2093464 - RNA, 18 nt, Human
gucaucuaccuuuucucu

SEQ ID NO: 2093465 - RNA, 16 nt, Human
gucaucucagcuggau

SEQ ID NO: 2093466 - RNA, 17 nt, Human
gucaucuccaucagcug

SEQ ID NO: 2093467 - RNA, 19 nt, Human
gucaucuccaucagcugua

SEQ ID NO: 2093468 - RNA, 13 nt, Human
gucauaucuucac

SEQ ID NO: 2093469 - RNA, 21 nt, Human
gucauauaagauucauauuua

SEQ ID NO: 2093470 - RNA, 13 nt, Human
gucauagaagaac

SEQ ID NO: 2093471 - RNA, 14 nt, Human
guccagcuugcucu

SEQ ID NO: 2093472 - RNA, 16 nt, Human
guccagcuugcucuuc

SEQ ID NO: 2093473 - RNA, 17 nt, Human
guccagcuugcucuuca

SEQ ID NO: 2093474 - RNA, 16 nt, Human
guccacccaggagccc

SEQ ID NO: 2093475 - RNA, 15 nt, Human
guccacccaggagcc

SEQ ID NO: 2093476 - RNA, 14 nt, Human
guccacccaggagc

SEQ ID NO: 2093477 - RNA, 21 nt, Human
gucaugguuucuuggagggcc

SEQ ID NO: 2093478 - RNA, 16 nt, Human
gucccacucaagccaa

SEQ ID NO: 2093479 - RNA, 18 nt, Human
gucccacucaagccaagc

SEQ ID NO: 2093480 - RNA, 21 nt, Human
gucccacucaagccaagcagc

SEQ ID NO: 2093481 - RNA, 22 nt, Human
gucccacucaagccaagcagcc

SEQ ID NO: 2093482 - RNA, 15 nt, Human
gucccacucagucca

SEQ ID NO: 2093483 - RNA, 14 nt, Human
gucccacucagucc

SEQ ID NO: 2093484 - RNA, 14 nt, Human
guccagggcccuga

SEQ ID NO: 2093485 - RNA, 15 nt, Human
guccagggcccugag

SEQ ID NO: 2093486 - RNA, 16 nt, Human
guccagggcccugagc

SEQ ID NO: 2093487 - RNA, 17 nt, Human
guccagggcccugagcu

SEQ ID NO: 2093488 - RNA, 12 nt, Human
gucccacucaag

SEQ ID NO: 2093489 - RNA, 17 nt, Human
guccaggccccaaaacc

SEQ ID NO: 2093490 - RNA, 20 nt, Human
guccagggaagcuggccgag

SEQ ID NO: 2093491 - RNA, 13 nt, Human
guccagggaagcu

SEQ ID NO: 2093492 - RNA, 15 nt, Human
guccagggaagcugg

SEQ ID NO: 2093493 - RNA, 14 nt, Human
gucccagccacccc

SEQ ID NO: 2093494 - RNA, 15 nt, Human
gucccagccaccccg

SEQ ID NO: 2093495 - RNA, 16 nt, Human
gucccagccaccccgg

SEQ ID NO: 2093496 - RNA, 18 nt, Human
gucccagccaccccgggc

SEQ ID NO: 2093497 - RNA, 21 nt, Human
gucccagccaccccgggcucu

SEQ ID NO: 2093498 - RNA, 14 nt, Human
gucccagcuacucg

SEQ ID NO: 2093499 - RNA, 23 nt, Human
gucccagccaccccgggcucucu

SEQ ID NO: 2093500 - RNA, 22 nt, Human
gucccagcuacucagaagccug

SEQ ID NO: 2093501 - RNA, 17 nt, Human
gucccagauacuugggg

SEQ ID NO: 2093502 - RNA, 19 nt, Human
gucaagugaaaaaggagga

SEQ ID NO: 2093503 - RNA, 16 nt, Human
gucaagugaaaaagga

SEQ ID NO: 2093504 - RNA, 18 nt, Human
gucaagugaaaaaggagg

SEQ ID NO: 2093505 - RNA, 17 nt, Human
gucaacuugagcauguu

SEQ ID NO: 2093506 - RNA, 17 nt, Human
gucaagaagaagaugga

SEQ ID NO: 2093507 - RNA, 14 nt, Human
gucaagcccaggag

SEQ ID NO: 2093508 - RNA, 14 nt, Human
gucaagauuuugaa

SEQ ID NO: 2093509 - RNA, 12 nt, Human
gucaaggccugu

SEQ ID NO: 2093510 - RNA, 21 nt, Human
gucaaggccugucccuggcca

SEQ ID NO: 2093511 - RNA, 11 nt, Human
gucaaggccag

SEQ ID NO: 2093512 - RNA, 12 nt, Human
gucaaggccagc

SEQ ID NO: 2093513 - RNA, 13 nt, Human
gucaaggccagca

SEQ ID NO: 2093514 - RNA, 14 nt, Human
gucaagcugcuugg

SEQ ID NO: 2093515 - RNA, 15 nt, Human
gucaaggaguggcuu

SEQ ID NO: 2093516 - RNA, 19 nt, Human
gucaagagggucugaggaa

SEQ ID NO: 2093517 - RNA, 18 nt, Human
gucaagagggucugagga

SEQ ID NO: 2093518 - RNA, 20 nt, Human
gucaacuugagcauguuacu

SEQ ID NO: 2093519 - RNA, 13 nt, Human
gucaacuuuaugc

SEQ ID NO: 2093520 - RNA, 14 nt, Human
guauuuguuaaugg

SEQ ID NO: 2093521 - RNA, 23 nt, Human
gucaccggauccuggguggucug

SEQ ID NO: 2093522 - RNA, 20 nt, Human
gucaccugaagacucauucu

SEQ ID NO: 2093523 - RNA, 16 nt, Human
gucaccaucucaggcc

SEQ ID NO: 2093524 - RNA, 17 nt, Human
gucaccaucucaggcca

SEQ ID NO: 2093525 - RNA, 20 nt, Human
gucaccaucucaggccaccu

SEQ ID NO: 2093526 - RNA, 21 nt, Human
gucaccaucucaggccaccug

SEQ ID NO: 2093527 - RNA, 16 nt, Human
gucaccggauccuggg

SEQ ID NO: 2093528 - RNA, 17 nt, Human
gucaccggauccugggu

SEQ ID NO: 2093529 - RNA, 19 nt, Human
gucaccggauccugggugg

SEQ ID NO: 2093530 - RNA, 11 nt, Human
gucaaguuauu

SEQ ID NO: 2093531 - RNA, 20 nt, Human
gucaaguuauuaauuucuuc

SEQ ID NO: 2093532 - RNA, 18 nt, Human
gucaaguuauuaauuucu

SEQ ID NO: 2093533 - RNA, 15 nt, Human
guauuugagacauuc

SEQ ID NO: 2093534 - RNA, 17 nt, Human
guauuugagacauucca

SEQ ID NO: 2093535 - RNA, 15 nt, Human
guauuugaaucagcc

SEQ ID NO: 2093536 - RNA, 16 nt, Human
guauuucagaugcuuu

SEQ ID NO: 2093537 - RNA, 16 nt, Human
guauuuccagugcaau

SEQ ID NO: 2093538 - RNA, 11 nt, Human
guauuucagac

SEQ ID NO: 2093539 - RNA, 23 nt, Human
guauuuauuuuccuccccagcag

SEQ ID NO: 2093540 - RNA, 17 nt, Human
guauuuauuuuccuccc

SEQ ID NO: 2093541 - RNA, 18 nt, Human
guauuuauuuuccucccc

SEQ ID NO: 2093542 - RNA, 19 nt, Human
guauuuauuuuccucccca

SEQ ID NO: 2093543 - RNA, 20 nt, Human
guauuuauuuuccuccccag

SEQ ID NO: 2093544 - RNA, 22 nt, Human
guauuuauuuuccuccccagca

SEQ ID NO: 2093545 - RNA, 22 nt, Human
guauucgugcagcauaugagga

SEQ ID NO: 2093546 - RNA, 14 nt, Human
guauuccaccuuaa

SEQ ID NO: 2093547 - RNA, 15 nt, Human
guauuccaccuuaaa

SEQ ID NO: 2093548 - RNA, 19 nt, Human
guauuccaccuuaaauuaa

SEQ ID NO: 2093549 - RNA, 20 nt, Human
guauuccaccuuaaauuaaa

SEQ ID NO: 2093550 - RNA, 22 nt, Human
guauuccaccuuaaauuaaaca

SEQ ID NO: 2093551 - RNA, 15 nt, Human
guauuccaguuuguu

SEQ ID NO: 2093552 - RNA, 18 nt, Human
guauuccaguuuguuuau

SEQ ID NO: 2093553 - RNA, 22 nt, Human
guauucagugagggucuucuua

SEQ ID NO: 2093554 - RNA, 20 nt, Human
guauuccuuuuguguacagu

SEQ ID NO: 2093555 - RNA, 23 nt, Human
guauuccuuuuguguacagugug

SEQ ID NO: 2093556 - RNA, 19 nt, Human
guauucccauuagaccaag

SEQ ID NO: 2093557 - RNA, 19 nt, Human
guauuauaggccaaacugg

SEQ ID NO: 2093558 - RNA, 15 nt, Human
guauuauucugcagc

SEQ ID NO: 2093559 - RNA, 13 nt, Human
guauucaagaaag

SEQ ID NO: 2093560 - RNA, 14 nt, Human
guauucaagaaagc

SEQ ID NO: 2093561 - RNA, 17 nt, Human
guauucaagaaagccag

SEQ ID NO: 2093562 - RNA, 18 nt, Human
guauucaagaaagccagu

SEQ ID NO: 2093563 - RNA, 16 nt, Human
guauuauucugcagca

SEQ ID NO: 2093564 - RNA, 15 nt, Human
guauuacuucugcua

SEQ ID NO: 2093565 - RNA, 14 nt, Human
guauuacuucugcu

SEQ ID NO: 2093566 - RNA, 13 nt, Human
guauuacuucugc

SEQ ID NO: 2093567 - RNA, 15 nt, Human
guauuacauaaauaa

SEQ ID NO: 2093568 - RNA, 15 nt, Human
guagagugggagcug

SEQ ID NO: 2093569 - RNA, 23 nt, Human
guagagucaucuccaucagcugu

SEQ ID NO: 2093570 - RNA, 15 nt, Human
guagagucaucucca

SEQ ID NO: 2093571 - RNA, 13 nt, Human
guagagugggagc

SEQ ID NO: 2093572 - RNA, 13 nt, Human
gucucgugguagg

SEQ ID NO: 2093573 - RNA, 17 nt, Human
gucucuaugccagcuca

SEQ ID NO: 2093574 - RNA, 23 nt, Human
gucucuaugccagcucaguccca

SEQ ID NO: 2093575 - RNA, 23 nt, Human
gucucggguggcuagucagagag

SEQ ID NO: 2093576 - RNA, 16 nt, Human
gucucgcuuuguugcc

SEQ ID NO: 2093577 - RNA, 17 nt, Human
gucucgcuuuguugccc

SEQ ID NO: 2093578 - RNA, 19 nt, Human
gucucgcuuuguugcccag

SEQ ID NO: 2093579 - RNA, 23 nt, Human
gucucgcuuuguugcccaggcug

SEQ ID NO: 2093580 - RNA, 11 nt, Human
gucucuauuua

SEQ ID NO: 2093581 - RNA, 13 nt, Human
gucucuauuuaaa

SEQ ID NO: 2093582 - RNA, 14 nt, Human
gucucuauuuaaau

SEQ ID NO: 2093583 - RNA, 17 nt, Human
gucucuauuuaaauucu

SEQ ID NO: 2093584 - RNA, 19 nt, Human
gucucuauuuaaauucuuu

SEQ ID NO: 2093585 - RNA, 20 nt, Human
gucucuauuuaaauucuuuu

SEQ ID NO: 2093586 - RNA, 21 nt, Human
gucucuauuuaaauucuuuuu

SEQ ID NO: 2093587 - RNA, 12 nt, Human
gucucucagaau

SEQ ID NO: 2093588 - RNA, 17 nt, Human
gucucuuaaaaaaauaa

SEQ ID NO: 2093589 - RNA, 23 nt, Human
gucucucuauuaccacugaagau

SEQ ID NO: 2093590 - RNA, 19 nt, Human
gucugaggaauccagaccc

SEQ ID NO: 2093591 - RNA, 18 nt, Human
gucugaggaauccagacc

SEQ ID NO: 2093592 - RNA, 14 nt, Human
gucugacccucucc

SEQ ID NO: 2093593 - RNA, 17 nt, Human
gucucuucuccacugga

SEQ ID NO: 2093594 - RNA, 15 nt, Human
gucugacccacugcu

SEQ ID NO: 2093595 - RNA, 14 nt, Human
gucucuucuccacu

SEQ ID NO: 2093596 - RNA, 11 nt, Human
gucucuucaga

SEQ ID NO: 2093597 - RNA, 16 nt, Human
gucucuucuccacugg

SEQ ID NO: 2093598 - RNA, 15 nt, Human
gucucuucuccacug

SEQ ID NO: 2093599 - RNA, 14 nt, Human
gucugacccacugc

SEQ ID NO: 2093600 - RNA, 13 nt, Human
gucugacccacug

SEQ ID NO: 2093601 - RNA, 18 nt, Human
gucugagccaaagagaau

SEQ ID NO: 2093602 - RNA, 21 nt, Human
gucugaggaauccagacccgg

SEQ ID NO: 2093603 - RNA, 19 nt, Human
gucugauucccaagcucug

SEQ ID NO: 2093604 - RNA, 18 nt, Human
gucugauucccaagcucu

SEQ ID NO: 2093605 - RNA, 17 nt, Human
gucugauucccaagcuc

SEQ ID NO: 2093606 - RNA, 21 nt, Human
gucugauucccaagcucugcu

SEQ ID NO: 2093607 - RNA, 20 nt, Human
gucugauucccaagcucugc

SEQ ID NO: 2093608 - RNA, 20 nt, Human
gucugauugguuuuaauuga

SEQ ID NO: 2093609 - RNA, 22 nt, Human
gucugauuucaggauacucugu

SEQ ID NO: 2093610 - RNA, 13 nt, Human
gucugcaggcagg

SEQ ID NO: 2093611 - RNA, 12 nt, Human
gucugcaggcag

SEQ ID NO: 2093612 - RNA, 15 nt, Human
gucugcauuuucuga

SEQ ID NO: 2093613 - RNA, 20 nt, Human
gucugcauuuucugaaacua

SEQ ID NO: 2093614 - RNA, 21 nt, Human
gucugcauuuucugaaacuaa

SEQ ID NO: 2093615 - RNA, 14 nt, Human
gucugcacuuaaau

SEQ ID NO: 2093616 - RNA, 16 nt, Human
gucucagaaucuuucc

SEQ ID NO: 2093617 - RNA, 17 nt, Human
gucucagaaucuuuccu

SEQ ID NO: 2093618 - RNA, 20 nt, Human
gucucagaaucuuuccuucc

SEQ ID NO: 2093619 - RNA, 23 nt, Human
gucucacuguugcccaggcuggc

SEQ ID NO: 2093620 - RNA, 22 nt, Human
gucucacuguugcccaggcugg

SEQ ID NO: 2093621 - RNA, 21 nt, Human
gucucacuguugcccaggcug

SEQ ID NO: 2093622 - RNA, 20 nt, Human
gucucacuguugcccaggcu

SEQ ID NO: 2093623 - RNA, 19 nt, Human
gucucacuguugcccaggc

SEQ ID NO: 2093624 - RNA, 18 nt, Human
gucucacuguugcccagg

SEQ ID NO: 2093625 - RNA, 17 nt, Human
gucucacuguugcccag

SEQ ID NO: 2093626 - RNA, 16 nt, Human
gucucacuguugccca

SEQ ID NO: 2093627 - RNA, 23 nt, Human
gucucacuauguugcccaggcag

SEQ ID NO: 2093628 - RNA, 13 nt, Human
gucucacuguugc

SEQ ID NO: 2093629 - RNA, 21 nt, Human
gucucacuauguugcccaggc

SEQ ID NO: 2093630 - RNA, 20 nt, Human
gucucacuauguugcccagg

SEQ ID NO: 2093631 - RNA, 16 nt, Human
guccugucuccccucu

SEQ ID NO: 2093632 - RNA, 17 nt, Human
guccugucuccccucug

SEQ ID NO: 2093633 - RNA, 18 nt, Human
guccugucuccccucugc

SEQ ID NO: 2093634 - RNA, 20 nt, Human
guccuuaaugauccguucca

SEQ ID NO: 2093635 - RNA, 14 nt, Human
gucgugggugugug

SEQ ID NO: 2093636 - RNA, 12 nt, Human
gucuaaaaacac

SEQ ID NO: 2093637 - RNA, 16 nt, Human
gucuaaaauccugcuu

SEQ ID NO: 2093638 - RNA, 13 nt, Human
gucuaccaucucc

SEQ ID NO: 2093639 - RNA, 14 nt, Human
gucuaccaucuccc

SEQ ID NO: 2093640 - RNA, 15 nt, Human
guccucccccugcca

SEQ ID NO: 2093641 - RNA, 16 nt, Human
guccucccccugccag

SEQ ID NO: 2093642 - RNA, 17 nt, Human
guccucccccugccagu

SEQ ID NO: 2093643 - RNA, 19 nt, Human
guccucccccugccagugc

SEQ ID NO: 2093644 - RNA, 20 nt, Human
guccucccccugccagugcc

SEQ ID NO: 2093645 - RNA, 21 nt, Human
guccucccccugccagugccu

SEQ ID NO: 2093646 - RNA, 22 nt, Human
guccucccccugccagugccuu

SEQ ID NO: 2093647 - RNA, 15 nt, Human
guccuccccucaagg

SEQ ID NO: 2093648 - RNA, 16 nt, Human
guccuccccucaagga

SEQ ID NO: 2093649 - RNA, 16 nt, Human
guccugggagugagcu

SEQ ID NO: 2093650 - RNA, 15 nt, Human
guccugggagugagc

SEQ ID NO: 2093651 - RNA, 11 nt, Human
guccuggcucc

SEQ ID NO: 2093652 - RNA, 14 nt, Human
guccuggcuccuga

SEQ ID NO: 2093653 - RNA, 17 nt, Human
guccuggcuccugaggg

SEQ ID NO: 2093654 - RNA, 19 nt, Human
guccuggcuccugaggggc

SEQ ID NO: 2093655 - RNA, 19 nt, Human
guccugggagaaccucagg

SEQ ID NO: 2093656 - RNA, 20 nt, Human
guccugggagaaccucaggc

SEQ ID NO: 2093657 - RNA, 21 nt, Human
guccugggagaaccucaggcu

SEQ ID NO: 2093658 - RNA, 18 nt, Human
guccugucggagcccugu

SEQ ID NO: 2093659 - RNA, 21 nt, Human
guccugucggagcccugucuc

SEQ ID NO: 2093660 - RNA, 20 nt, Human
guccugucggagcccugucu

SEQ ID NO: 2093661 - RNA, 14 nt, Human
guccuggggccucg

SEQ ID NO: 2093662 - RNA, 11 nt, Human
guccugggggc

SEQ ID NO: 2093663 - RNA, 14 nt, Human
guccugggggccug

SEQ ID NO: 2093664 - RNA, 15 nt, Human
guccugggggccuga

SEQ ID NO: 2093665 - RNA, 17 nt, Human
guccugggggccugacc

SEQ ID NO: 2093666 - RNA, 18 nt, Human
guccugggggccugaccu

SEQ ID NO: 2093667 - RNA, 22 nt, Human
guccuggggccucggagccuca

SEQ ID NO: 2093668 - RNA, 15 nt, Human
guccuggggcucugu

SEQ ID NO: 2093669 - RNA, 16 nt, Human
guccuggggcucugug

SEQ ID NO: 2093670 - RNA, 17 nt, Human
guccuggggcucugugc

SEQ ID NO: 2093671 - RNA, 18 nt, Human
guccugggagugagcugg

SEQ ID NO: 2093672 - RNA, 17 nt, Human
guccugggagugagcug

SEQ ID NO: 2093673 - RNA, 19 nt, Human
guccugggagugagcuggu

SEQ ID NO: 2093674 - RNA, 12 nt, Human
gucccagugccg

SEQ ID NO: 2093675 - RNA, 15 nt, Human
gucccuggccaucuc

SEQ ID NO: 2093676 - RNA, 13 nt, Human
guccuacucugug

SEQ ID NO: 2093677 - RNA, 19 nt, Human
gucccugggggaagcccug

SEQ ID NO: 2093678 - RNA, 20 nt, Human
gucccugggggaagcccugg

SEQ ID NO: 2093679 - RNA, 21 nt, Human
gucccugggggaagcccugga

SEQ ID NO: 2093680 - RNA, 22 nt, Human
gucccugggggaagcccuggau

SEQ ID NO: 2093681 - RNA, 23 nt, Human
gucccugggggaagcccuggauu

SEQ ID NO: 2093682 - RNA, 23 nt, Human
guccuacucugugucaggugggg

SEQ ID NO: 2093683 - RNA, 15 nt, Human
guccuacucuguguc

SEQ ID NO: 2093684 - RNA, 21 nt, Human
guccuacuuuacauaugcuuu

SEQ ID NO: 2093685 - RNA, 15 nt, Human
gucccugguaauaag

SEQ ID NO: 2093686 - RNA, 23 nt, Human
guccuagaaauuccccacccuga

SEQ ID NO: 2093687 - RNA, 18 nt, Human
guccucacaucuuucaca

SEQ ID NO: 2093688 - RNA, 14 nt, Human
guccucacucccag

SEQ ID NO: 2093689 - RNA, 16 nt, Human
guccucacucccaguc

SEQ ID NO: 2093690 - RNA, 17 nt, Human
guccucacucccagucc

SEQ ID NO: 2093691 - RNA, 22 nt, Human
guccuaggccacaccaucuccu

SEQ ID NO: 2093692 - RNA, 23 nt, Human
guccuagcuugggaggcuucccc

SEQ ID NO: 2093693 - RNA, 12 nt, Human
guccuaggagua

SEQ ID NO: 2093694 - RNA, 19 nt, Human
guccuaggaguauccucau

SEQ ID NO: 2093695 - RNA, 18 nt, Human
guccuagccacucaggag

SEQ ID NO: 2093696 - RNA, 19 nt, Human
guccuagccacucaggagg

SEQ ID NO: 2093697 - RNA, 17 nt, Human
guccucagcuucuuaau

SEQ ID NO: 2093698 - RNA, 13 nt, Human
guccucagcuucu

SEQ ID NO: 2093699 - RNA, 18 nt, Human
guccucacucccagucca

SEQ ID NO: 2093700 - RNA, 13 nt, Human
guccuccagaagc

SEQ ID NO: 2093701 - RNA, 14 nt, Human
guccuccagaagcc

SEQ ID NO: 2093702 - RNA, 18 nt, Human
guccuccagaagccucug

SEQ ID NO: 2093703 - RNA, 19 nt, Human
guccuccagaagccucugg

SEQ ID NO: 2093704 - RNA, 20 nt, Human
guccuccagaagccucuggc

SEQ ID NO: 2093705 - RNA, 21 nt, Human
guccuccagaagccucuggcu

SEQ ID NO: 2093706 - RNA, 22 nt, Human
guccuccagaagccucuggcua

SEQ ID NO: 2093707 - RNA, 13 nt, Human
gugauucuccugc

SEQ ID NO: 2093708 - RNA, 23 nt, Human
gugauucuccugccucagccucc

SEQ ID NO: 2093709 - RNA, 16 nt, Human
gugauuuugcuguaga

SEQ ID NO: 2093710 - RNA, 22 nt, Human
gugauucuccugccucagccuc

SEQ ID NO: 2093711 - RNA, 20 nt, Human
gugauucuccugccucagcc

SEQ ID NO: 2093712 - RNA, 19 nt, Human
gugauucuccugccucagc

SEQ ID NO: 2093713 - RNA, 18 nt, Human
gugauucuccugccucag

SEQ ID NO: 2093714 - RNA, 17 nt, Human
gugauucuccugccuca

SEQ ID NO: 2093715 - RNA, 16 nt, Human
gugauucuccugccuc

SEQ ID NO: 2093716 - RNA, 18 nt, Human
gugauucgagcuauauuu

SEQ ID NO: 2093717 - RNA, 14 nt, Human
gugauucuccugcc

SEQ ID NO: 2093718 - RNA, 20 nt, Human
gugauccacccaccucagcc

SEQ ID NO: 2093719 - RNA, 18 nt, Human
gugauccacccaccucag

SEQ ID NO: 2093720 - RNA, 15 nt, Human
gugauccacccaccu

SEQ ID NO: 2093721 - RNA, 16 nt, Human
gugaggaccacuccug

SEQ ID NO: 2093722 - RNA, 16 nt, Human
gugaggaagcuccagu

SEQ ID NO: 2093723 - RNA, 14 nt, Human
gugaggagcugcug

SEQ ID NO: 2093724 - RNA, 11 nt, Human
gugaggagcug

SEQ ID NO: 2093725 - RNA, 12 nt, Human
gugaggcagggg

SEQ ID NO: 2093726 - RNA, 17 nt, Human
gugaggcaggggcggag

SEQ ID NO: 2093727 - RNA, 16 nt, Human
gugaggcaggugacag

SEQ ID NO: 2093728 - RNA, 18 nt, Human
gugauccucccaccucag

SEQ ID NO: 2093729 - RNA, 15 nt, Human
gugauccucccaccu

SEQ ID NO: 2093730 - RNA, 14 nt, Human
gugauccucccacc

SEQ ID NO: 2093731 - RNA, 22 nt, Human
gugauccucccaccucagccuc

SEQ ID NO: 2093732 - RNA, 20 nt, Human
gugauccucccaccucagcc

SEQ ID NO: 2093733 - RNA, 20 nt, Human
gugauucacagugugaaucu

SEQ ID NO: 2093734 - RNA, 23 nt, Human
gugauccucccaccucagccucc

SEQ ID NO: 2093735 - RNA, 23 nt, Human
gugcccaagaauagaugcugacu

SEQ ID NO: 2093736 - RNA, 21 nt, Human
gugcaugcucucugcagccag

SEQ ID NO: 2093737 - RNA, 15 nt, Human
gugcaugcucucugc

SEQ ID NO: 2093738 - RNA, 16 nt, Human
gugcaugcucucugca

SEQ ID NO: 2093739 - RNA, 18 nt, Human
gugcaugcucucugcagc

SEQ ID NO: 2093740 - RNA, 19 nt, Human
gugcaugcucucugcagcc

SEQ ID NO: 2093741 - RNA, 18 nt, Human
gugccagucuugugucug

SEQ ID NO: 2093742 - RNA, 20 nt, Human
gugcccacaggaucagucug

SEQ ID NO: 2093743 - RNA, 12 nt, Human
gugcccacagcc

SEQ ID NO: 2093744 - RNA, 14 nt, Human
gugcccacagcccg

SEQ ID NO: 2093745 - RNA, 19 nt, Human
gugcccacagcccgcaugc

SEQ ID NO: 2093746 - RNA, 22 nt, Human
gugcccacagcccgcaugcagc

SEQ ID NO: 2093747 - RNA, 20 nt, Human
gugcccagagaugggacugg

SEQ ID NO: 2093748 - RNA, 21 nt, Human
gugcccacauguguccauccc

SEQ ID NO: 2093749 - RNA, 23 nt, Human
gugcccacauguguccaucccag

SEQ ID NO: 2093750 - RNA, 23 nt, Human
gugcccaccaacaucccauugcc

SEQ ID NO: 2093751 - RNA, 22 nt, Human
gugcccagaacuggacucagga

SEQ ID NO: 2093752 - RNA, 12 nt, Human
gugcccagcuca

SEQ ID NO: 2093753 - RNA, 13 nt, Human
gugcccagcucag

SEQ ID NO: 2093754 - RNA, 16 nt, Human
gugcccaguuaaucuu

SEQ ID NO: 2093755 - RNA, 17 nt, Human
gugcccaguuaaucuug

SEQ ID NO: 2093756 - RNA, 16 nt, Human
gugccccaugccuguc

SEQ ID NO: 2093757 - RNA, 18 nt, Human
gugccccaugccugucca

SEQ ID NO: 2093758 - RNA, 13 nt, Human
gugccccaccugc

SEQ ID NO: 2093759 - RNA, 14 nt, Human
gugccccaccugcc

SEQ ID NO: 2093760 - RNA, 15 nt, Human
gugccccaccugcca

SEQ ID NO: 2093761 - RNA, 21 nt, Human
gugccccaugccuguccagcc

SEQ ID NO: 2093762 - RNA, 12 nt, Human
gugcccccagac

SEQ ID NO: 2093763 - RNA, 19 nt, Human
gugcauaaguuaacuucca

SEQ ID NO: 2093764 - RNA, 19 nt, Human
gugcaguggcccccacaga

SEQ ID NO: 2093765 - RNA, 22 nt, Human
gugcaaaguucccuacuuccug

SEQ ID NO: 2093766 - RNA, 22 nt, Human
gugauuuuuauccaaucuuguu

SEQ ID NO: 2093767 - RNA, 13 nt, Human
gugcaacagacaa

SEQ ID NO: 2093768 - RNA, 14 nt, Human
gugcaacagacaag

SEQ ID NO: 2093769 - RNA, 15 nt, Human
gugcaacagacaagu

SEQ ID NO: 2093770 - RNA, 23 nt, Human
gugcagggaggagguggcagccc

SEQ ID NO: 2093771 - RNA, 22 nt, Human
gugccagguuuuuggucugacc

SEQ ID NO: 2093772 - RNA, 20 nt, Human
gugccagguuuuuggucuga

SEQ ID NO: 2093773 - RNA, 18 nt, Human
gugcaugcagcaucuaag

SEQ ID NO: 2093774 - RNA, 13 nt, Human
gugcaugcucucu

SEQ ID NO: 2093775 - RNA, 18 nt, Human
gugcaucucagcccacau

SEQ ID NO: 2093776 - RNA, 14 nt, Human
gugcaucucagccc

SEQ ID NO: 2093777 - RNA, 22 nt, Human
gugcaugaagguuucugaaaau

SEQ ID NO: 2093778 - RNA, 15 nt, Human
gugcaucucagccca

SEQ ID NO: 2093779 - RNA, 16 nt, Human
gugaaucacguaaagc

SEQ ID NO: 2093780 - RNA, 18 nt, Human
gugaaucacguaaagcua

SEQ ID NO: 2093781 - RNA, 14 nt, Human
gugaaucagagcac

SEQ ID NO: 2093782 - RNA, 19 nt, Human
gugaauuaucccuuuucuu

SEQ ID NO: 2093783 - RNA, 14 nt, Human
gugaauuuuucucu

SEQ ID NO: 2093784 - RNA, 15 nt, Human
gugaauuuuucucua

SEQ ID NO: 2093785 - RNA, 15 nt, Human
gugaaucagacccua

SEQ ID NO: 2093786 - RNA, 17 nt, Human
gugaaaucaaaggugcu

SEQ ID NO: 2093787 - RNA, 22 nt, Human
gugaaauaccaaccugaagaca

SEQ ID NO: 2093788 - RNA, 17 nt, Human
gugaaauaccagugugg

SEQ ID NO: 2093789 - RNA, 17 nt, Human
gugaaauaguucaaagc

SEQ ID NO: 2093790 - RNA, 21 nt, Human
gugaaauaguucaaagccaag

SEQ ID NO: 2093791 - RNA, 21 nt, Human
gugaaagggagcuaucaggaa

SEQ ID NO: 2093792 - RNA, 21 nt, Human
gugaaagucagaugcccagag

SEQ ID NO: 2093793 - RNA, 21 nt, Human
gugaaacacaccaggcugugg

SEQ ID NO: 2093794 - RNA, 19 nt, Human
gugaaaauagguauacagu

SEQ ID NO: 2093795 - RNA, 16 nt, Human
gugaaacacaccaggc

SEQ ID NO: 2093796 - RNA, 17 nt, Human
gugaaacacaccaggcu

SEQ ID NO: 2093797 - RNA, 18 nt, Human
gugaaacacaccaggcug

SEQ ID NO: 2093798 - RNA, 20 nt, Human
gugaaacacaccaggcugug

SEQ ID NO: 2093799 - RNA, 23 nt, Human
gugaaacacaccaggcugugggc

SEQ ID NO: 2093800 - RNA, 14 nt, Human
gugaaaagaaaaau

SEQ ID NO: 2093801 - RNA, 23 nt, Human
gugaaaagaaaaaugagccuggc

SEQ ID NO: 2093802 - RNA, 14 nt, Human
gucugccagccagc

SEQ ID NO: 2093803 - RNA, 15 nt, Human
gucugccagccagca

SEQ ID NO: 2093804 - RNA, 21 nt, Human
gugaaaauagguauacagugg

SEQ ID NO: 2093805 - RNA, 16 nt, Human
gucugccagccagcag

SEQ ID NO: 2093806 - RNA, 20 nt, Human
gugaaagcaucacuugggau

SEQ ID NO: 2093807 - RNA, 19 nt, Human
gugaaacuaacagauaagc

SEQ ID NO: 2093808 - RNA, 13 nt, Human
gugaaagaaauca

SEQ ID NO: 2093809 - RNA, 14 nt, Human
gugaaagaaaucau

SEQ ID NO: 2093810 - RNA, 15 nt, Human
gugaaagaaaucaug

SEQ ID NO: 2093811 - RNA, 16 nt, Human
gugaaagaaaucaugu

SEQ ID NO: 2093812 - RNA, 17 nt, Human
gugaaagaaaucauguu

SEQ ID NO: 2093813 - RNA, 19 nt, Human
gugaaagaaaucauguuau

SEQ ID NO: 2093814 - RNA, 20 nt, Human
gugaaagaaaucauguuaug

SEQ ID NO: 2093815 - RNA, 21 nt, Human
gugaaagaaaucauguuauga

SEQ ID NO: 2093816 - RNA, 16 nt, Human
gugagcuccuaagcca

SEQ ID NO: 2093817 - RNA, 22 nt, Human
gugagcauuguggcugucagca

SEQ ID NO: 2093818 - RNA, 14 nt, Human
gugagccacugcac

SEQ ID NO: 2093819 - RNA, 12 nt, Human
gugagcagugug

SEQ ID NO: 2093820 - RNA, 21 nt, Human
gugagcagugugucuccugca

SEQ ID NO: 2093821 - RNA, 13 nt, Human
gugagccacugca

SEQ ID NO: 2093822 - RNA, 20 nt, Human
gugacugccccaacuccugg

SEQ ID NO: 2093823 - RNA, 21 nt, Human
gugacugccccaacuccugga

SEQ ID NO: 2093824 - RNA, 23 nt, Human
gugacugccccaacuccuggaag

SEQ ID NO: 2093825 - RNA, 23 nt, Human
gugacugagcaagacccugucuc

SEQ ID NO: 2093826 - RNA, 19 nt, Human
gugacugauguuaggcugg

SEQ ID NO: 2093827 - RNA, 21 nt, Human
gugacugauguuaggcugggc

SEQ ID NO: 2093828 - RNA, 16 nt, Human
gugacugccccaacuc

SEQ ID NO: 2093829 - RNA, 14 nt, Human
gugaccugaggaag

SEQ ID NO: 2093830 - RNA, 16 nt, Human
gugaccugaggaagcg

SEQ ID NO: 2093831 - RNA, 23 nt, Human
gugaccugaggauuuaagggaug

SEQ ID NO: 2093832 - RNA, 18 nt, Human
gugaccuccacagcuacc

SEQ ID NO: 2093833 - RNA, 16 nt, Human
gugacaacacuugugu

SEQ ID NO: 2093834 - RNA, 16 nt, Human
gugaauuuuucucuaa

SEQ ID NO: 2093835 - RNA, 20 nt, Human
gugacucgagucacacucaa

SEQ ID NO: 2093836 - RNA, 23 nt, Human
gugaccugccccgcccagcugca

SEQ ID NO: 2093837 - RNA, 23 nt, Human
gugaccuguggggauuucuccca

SEQ ID NO: 2093838 - RNA, 22 nt, Human
guggaacguuuuuccuguucuu

SEQ ID NO: 2093839 - RNA, 15 nt, Human
guggaaccaggaacc

SEQ ID NO: 2093840 - RNA, 16 nt, Human
guggacuuuccacccc

SEQ ID NO: 2093841 - RNA, 17 nt, Human
guggacuuuccaccccc

SEQ ID NO: 2093842 - RNA, 20 nt, Human
guggacuuuccacccccucc

SEQ ID NO: 2093843 - RNA, 22 nt, Human
guggacuuuccacccccucccu

SEQ ID NO: 2093844 - RNA, 21 nt, Human
guggagaaacuguagucucag

SEQ ID NO: 2093845 - RNA, 22 nt, Human
guggagaaauuccuugauucac

SEQ ID NO: 2093846 - RNA, 20 nt, Human
guggagaagcggcuggcagc

SEQ ID NO: 2093847 - RNA, 16 nt, Human
guggagaacuccuagg

SEQ ID NO: 2093848 - RNA, 23 nt, Human
guggagcccgcacccccacccuu

SEQ ID NO: 2093849 - RNA, 12 nt, Human
gugcuuuaagug

SEQ ID NO: 2093850 - RNA, 15 nt, Human
guggagccagggagc

SEQ ID NO: 2093851 - RNA, 22 nt, Human
guggagagggacagcccacuga

SEQ ID NO: 2093852 - RNA, 22 nt, Human
guggagagggaugaggugcugg

SEQ ID NO: 2093853 - RNA, 17 nt, Human
guggagagcuggugccc

SEQ ID NO: 2093854 - RNA, 21 nt, Human
guggagcacaaaagccucuca

SEQ ID NO: 2093855 - RNA, 23 nt, Human
guggagcagccaacaagcagggg

SEQ ID NO: 2093856 - RNA, 12 nt, Human
guggagagcugg

SEQ ID NO: 2093857 - RNA, 14 nt, Human
guggagagcuggug

SEQ ID NO: 2093858 - RNA, 16 nt, Human
guggagagcuggugcc

SEQ ID NO: 2093859 - RNA, 14 nt, Human
guggaugccucaga

SEQ ID NO: 2093860 - RNA, 15 nt, Human
guggaugauguuucg

SEQ ID NO: 2093861 - RNA, 18 nt, Human
guggaugccugguggcag

SEQ ID NO: 2093862 - RNA, 16 nt, Human
guggaugccugguggc

SEQ ID NO: 2093863 - RNA, 19 nt, Human
guggaguuggcauugcauu

SEQ ID NO: 2093864 - RNA, 14 nt, Human
guggauagaugccc

SEQ ID NO: 2093865 - RNA, 20 nt, Human
guggauagaugcccugcuag

SEQ ID NO: 2093866 - RNA, 21 nt, Human
guggauagaugcccugcuaga

SEQ ID NO: 2093867 - RNA, 13 nt, Human
guggaucacagag

SEQ ID NO: 2093868 - RNA, 13 nt, Human
guggaguggaugc

SEQ ID NO: 2093869 - RNA, 14 nt, Human
guggaucacagagg

SEQ ID NO: 2093870 - RNA, 15 nt, Human
guggaucacagaggc

SEQ ID NO: 2093871 - RNA, 13 nt, Human
guggaucaccuga

SEQ ID NO: 2093872 - RNA, 15 nt, Human
guggaucaccugagg

SEQ ID NO: 2093873 - RNA, 16 nt, Human
guggaucacagaggcu

SEQ ID NO: 2093874 - RNA, 13 nt, Human
guggaggugcugc

SEQ ID NO: 2093875 - RNA, 22 nt, Human
guggagguuaaggcugaggaaa

SEQ ID NO: 2093876 - RNA, 22 nt, Human
guggagguugcagugagccaag

SEQ ID NO: 2093877 - RNA, 23 nt, Human
guggagguugcagugagccaaga

SEQ ID NO: 2093878 - RNA, 19 nt, Human
guggagguugcagugagcu

SEQ ID NO: 2093879 - RNA, 21 nt, Human
guggagguuaaggcugaggaa

SEQ ID NO: 2093880 - RNA, 16 nt, Human
guggaggagcucagga

SEQ ID NO: 2093881 - RNA, 23 nt, Human
guggaggaaugcucccccauccu

SEQ ID NO: 2093882 - RNA, 16 nt, Human
guggaggaaugcuccc

SEQ ID NO: 2093883 - RNA, 17 nt, Human
guggaggaaugcucccc

SEQ ID NO: 2093884 - RNA, 16 nt, Human
guggaggagagccugg

SEQ ID NO: 2093885 - RNA, 17 nt, Human
guggaggagagccuggu

SEQ ID NO: 2093886 - RNA, 16 nt, Human
guggaggcugcaguga

SEQ ID NO: 2093887 - RNA, 20 nt, Human
guggaggagcucaggacacu

SEQ ID NO: 2093888 - RNA, 23 nt, Human
guggaggagcucaggacacuaau

SEQ ID NO: 2093889 - RNA, 14 nt, Human
guggccaaguucuu

SEQ ID NO: 2093890 - RNA, 18 nt, Human
guggcaucuuugccuugg

SEQ ID NO: 2093891 - RNA, 20 nt, Human
guggcaucuuugccuugggc

SEQ ID NO: 2093892 - RNA, 21 nt, Human
guggcaucuuugccuugggcu

SEQ ID NO: 2093893 - RNA, 16 nt, Human
guggcaucccaguggc

SEQ ID NO: 2093894 - RNA, 16 nt, Human
guggcaugugcuguga

SEQ ID NO: 2093895 - RNA, 22 nt, Human
guggcauguucaucguauaaca

SEQ ID NO: 2093896 - RNA, 21 nt, Human
guggcagugggagcugccugu

SEQ ID NO: 2093897 - RNA, 19 nt, Human
guggcagugggagcugccu

SEQ ID NO: 2093898 - RNA, 14 nt, Human
guggcaguaaagag

SEQ ID NO: 2093899 - RNA, 17 nt, Human
guggcaguaaagagaaa

SEQ ID NO: 2093900 - RNA, 20 nt, Human
guggcaguaaagagaaacuu

SEQ ID NO: 2093901 - RNA, 17 nt, Human
guggcagugcagcaacc

SEQ ID NO: 2093902 - RNA, 22 nt, Human
guggcagugcagcaaccagagc

SEQ ID NO: 2093903 - RNA, 14 nt, Human
guggcaucaccuua

SEQ ID NO: 2093904 - RNA, 20 nt, Human
guggcaucaccuuaggcagg

SEQ ID NO: 2093905 - RNA, 22 nt, Human
guggcaucaccuuaggcaggga

SEQ ID NO: 2093906 - RNA, 21 nt, Human
guggccacuccagaccccugg

SEQ ID NO: 2093907 - RNA, 15 nt, Human
guggccagaccagag

SEQ ID NO: 2093908 - RNA, 17 nt, Human
guggccagaccagagcu

SEQ ID NO: 2093909 - RNA, 18 nt, Human
guggccagaccagagcuc

SEQ ID NO: 2093910 - RNA, 21 nt, Human
guggccagaccagagcucugg

SEQ ID NO: 2093911 - RNA, 11 nt, Human
guggcagcugu

SEQ ID NO: 2093912 - RNA, 19 nt, Human
guggcagcugcuuuugucu

SEQ ID NO: 2093913 - RNA, 13 nt, Human
guggcagcugcuu

SEQ ID NO: 2093914 - RNA, 12 nt, Human
guggcagcugcu

SEQ ID NO: 2093915 - RNA, 23 nt, Human
guggcagcugcgguccacccagg

SEQ ID NO: 2093916 - RNA, 22 nt, Human
guggcagcugcgguccacccag

SEQ ID NO: 2093917 - RNA, 21 nt, Human
guggcagcugcgguccaccca

SEQ ID NO: 2093918 - RNA, 20 nt, Human
guggaugccugguggcagcu

SEQ ID NO: 2093919 - RNA, 19 nt, Human
guggcagcugcgguccacc

SEQ ID NO: 2093920 - RNA, 21 nt, Human
guggcaggugaccuucuggga

SEQ ID NO: 2093921 - RNA, 17 nt, Human
guggcagugggagcugc

SEQ ID NO: 2093922 - RNA, 16 nt, Human
guggcagugggagcug

SEQ ID NO: 2093923 - RNA, 15 nt, Human
guggcagugggagcu

SEQ ID NO: 2093924 - RNA, 23 nt, Human
gugcugaaugguuuucaaaauaa

SEQ ID NO: 2093925 - RNA, 14 nt, Human
gugcugaagcuuau

SEQ ID NO: 2093926 - RNA, 15 nt, Human
gugcugaagcuuauu

SEQ ID NO: 2093927 - RNA, 21 nt, Human
gugcugaagcuuauuaaugcu

SEQ ID NO: 2093928 - RNA, 19 nt, Human
gugcugaaugguuuucaaa

SEQ ID NO: 2093929 - RNA, 20 nt, Human
gugcugaaugguuuucaaaa

SEQ ID NO: 2093930 - RNA, 18 nt, Human
gugcucuggacaggcaug

SEQ ID NO: 2093931 - RNA, 17 nt, Human
gugcucuggacaggcau

SEQ ID NO: 2093932 - RNA, 22 nt, Human
gugcugaacaaaaaauaaaaau

SEQ ID NO: 2093933 - RNA, 11 nt, Human
gugccuuuccu

SEQ ID NO: 2093934 - RNA, 17 nt, Human
gugccuuuccuguucag

SEQ ID NO: 2093935 - RNA, 18 nt, Human
gugccuuuccuguucagc

SEQ ID NO: 2093936 - RNA, 20 nt, Human
gugccuuuccuguucagcau

SEQ ID NO: 2093937 - RNA, 21 nt, Human
gugccuuuccuguucagcauu

SEQ ID NO: 2093938 - RNA, 22 nt, Human
gugccuuuccuguucagcauuc

SEQ ID NO: 2093939 - RNA, 21 nt, Human
gugccuuugaguuuccucagg

SEQ ID NO: 2093940 - RNA, 16 nt, Human
gugcucuggacaggca

SEQ ID NO: 2093941 - RNA, 15 nt, Human
gugcucuggacaggc

SEQ ID NO: 2093942 - RNA, 22 nt, Human
gugccgagaaggaagccuccca

SEQ ID NO: 2093943 - RNA, 16 nt, Human
gugcccuuggaggcca

SEQ ID NO: 2093944 - RNA, 12 nt, Human
gugcccugcccc

SEQ ID NO: 2093945 - RNA, 19 nt, Human
gugcugccauccagguuca

SEQ ID NO: 2093946 - RNA, 18 nt, Human
gugcugccauccagguuc

SEQ ID NO: 2093947 - RNA, 20 nt, Human
gugcugaucgugcuaaauuu

SEQ ID NO: 2093948 - RNA, 12 nt, Human
gugcugccacac

SEQ ID NO: 2093949 - RNA, 15 nt, Human
gugcugccauccagg

SEQ ID NO: 2093950 - RNA, 23 nt, Human
gugcugaguugguguugacaugu

SEQ ID NO: 2093951 - RNA, 22 nt, Human
gugcugaucgugcuaaauuuuc

SEQ ID NO: 2093952 - RNA, 19 nt, Human
gugcuguugucauugcuuu

SEQ ID NO: 2093953 - RNA, 20 nt, Human
gugcuguugucauugcuuua

SEQ ID NO: 2093954 - RNA, 15 nt, Human
gugcugugguuccug

SEQ ID NO: 2093955 - RNA, 21 nt, Human
gugcugccacacuucaggcuc

SEQ ID NO: 2093956 - RNA, 18 nt, Human
gugcugcccgucuucagc

SEQ ID NO: 2093957 - RNA, 19 nt, Human
gugcugcccgucuucagcc

SEQ ID NO: 2093958 - RNA, 22 nt, Human
gugcugccauccagguucagcu

SEQ ID NO: 2093959 - RNA, 21 nt, Human
gugcugcccgucuucagccua

SEQ ID NO: 2093960 - RNA, 19 nt, Human
gugcuuauucucaaagcag

SEQ ID NO: 2093961 - RNA, 21 nt, Human
gugcuuauucucaaagcagga

SEQ ID NO: 2093962 - RNA, 13 nt, Human
gugcuucagccug

SEQ ID NO: 2093963 - RNA, 15 nt, Human
gugcuucagccugag

SEQ ID NO: 2093964 - RNA, 18 nt, Human
gugcuucagccugaggcu

SEQ ID NO: 2093965 - RNA, 18 nt, Human
guggaaaaauagccugcc

SEQ ID NO: 2093966 - RNA, 12 nt, Human
guggaaaaauau

SEQ ID NO: 2093967 - RNA, 13 nt, Human
guggaaaaauauu

SEQ ID NO: 2093968 - RNA, 14 nt, Human
guggaaaaauauuu

SEQ ID NO: 2093969 - RNA, 15 nt, Human
guggaaaaauauuua

SEQ ID NO: 2093970 - RNA, 23 nt, Human
gugcuuucuucucccaauucauc

SEQ ID NO: 2093971 - RNA, 14 nt, Human
guggaaagccucug

SEQ ID NO: 2093972 - RNA, 15 nt, Human
guggaaagccucugc

SEQ ID NO: 2093973 - RNA, 13 nt, Human
guggaaagggugc

SEQ ID NO: 2093974 - RNA, 23 nt, Human
guggaaagccucugcugccaugg

SEQ ID NO: 2093975 - RNA, 20 nt, Human
guggaaagggugcugcuucc

SEQ ID NO: 2093976 - RNA, 22 nt, Human
guggaaagggugcugcuucccu

SEQ ID NO: 2093977 - RNA, 16 nt, Human
guggaaagugaauuug

SEQ ID NO: 2093978 - RNA, 19 nt, Human
guggaaagugaauuugaau

SEQ ID NO: 2093979 - RNA, 20 nt, Human
gugcuuguucccucucccug

SEQ ID NO: 2093980 - RNA, 23 nt, Human
gugcuuguuugcucaccuggggu

SEQ ID NO: 2093981 - RNA, 21 nt, Human
gugcuuguuugcucaccuggg

SEQ ID NO: 2093982 - RNA, 22 nt, Human
gugcuuguuugcucaccugggg

SEQ ID NO: 2093983 - RNA, 22 nt, Human
gugcuuuccguggcacugcaua

SEQ ID NO: 2093984 - RNA, 12 nt, Human
uaugaauaacau

SEQ ID NO: 2093985 - RNA, 14 nt, Human
uaucuucugauuug

SEQ ID NO: 2093986 - RNA, 12 nt, Human
uaugaauacagg

SEQ ID NO: 2093987 - RNA, 16 nt, Human
uaugaauacagggcau

SEQ ID NO: 2093988 - RNA, 21 nt, Human
uaugaaucucuacgcaaaaaa

SEQ ID NO: 2093989 - RNA, 15 nt, Human
uaugacaguuauacu

SEQ ID NO: 2093990 - RNA, 16 nt, Human
uaugacagcugucccu

SEQ ID NO: 2093991 - RNA, 20 nt, Human
uaugacagcugucccuguca

SEQ ID NO: 2093992 - RNA, 19 nt, Human
uaucugugaaaugcuggca

SEQ ID NO: 2093993 - RNA, 17 nt, Human
uaucugugcgugaaaca

SEQ ID NO: 2093994 - RNA, 18 nt, Human
uaucugugcgugaaacac

SEQ ID NO: 2093995 - RNA, 20 nt, Human
uaucuguguuuuugaaauau

SEQ ID NO: 2093996 - RNA, 19 nt, Human
uaucugugcgugaaacaca

SEQ ID NO: 2093997 - RNA, 20 nt, Human
uaucugugcgugaaacacac

SEQ ID NO: 2093998 - RNA, 23 nt, Human
uaucugucauuugagcagggcuc

SEQ ID NO: 2093999 - RNA, 21 nt, Human
uaucugucauuugagcagggc

SEQ ID NO: 2094000 - RNA, 18 nt, Human
uaucugggaacugugccu

SEQ ID NO: 2094001 - RNA, 20 nt, Human
uaucugucauuugagcaggg

SEQ ID NO: 2094002 - RNA, 12 nt, Human
uaucuucacaau

SEQ ID NO: 2094003 - RNA, 15 nt, Human
uaucuucguucuugu

SEQ ID NO: 2094004 - RNA, 17 nt, Human
uaucuucguucuuguua

SEQ ID NO: 2094005 - RNA, 18 nt, Human
uaugaauaaagacaccua

SEQ ID NO: 2094006 - RNA, 17 nt, Human
uaucuguguuuuugaaa

SEQ ID NO: 2094007 - RNA, 14 nt, Human
uaucuuaaagcacu

SEQ ID NO: 2094008 - RNA, 15 nt, Human
uaucuuaaagcacuu

SEQ ID NO: 2094009 - RNA, 14 nt, Human
uaucuguuuuacug

SEQ ID NO: 2094010 - RNA, 15 nt, Human
uaucuguuuuacugc

SEQ ID NO: 2094011 - RNA, 18 nt, Human
uaucuguuuuacugcuuu

SEQ ID NO: 2094012 - RNA, 19 nt, Human
uaucuguuuuacugcuuuu

SEQ ID NO: 2094013 - RNA, 20 nt, Human
uaucuguuuuacugcuuuua

SEQ ID NO: 2094014 - RNA, 19 nt, Human
uaucuuacaaaguguauuu

SEQ ID NO: 2094015 - RNA, 15 nt, Human
uaucugcuguauguc

SEQ ID NO: 2094016 - RNA, 23 nt, Human
uaucugggauuaugguuuuguga

SEQ ID NO: 2094017 - RNA, 21 nt, Human
uaucugaggcacaugucagca

SEQ ID NO: 2094018 - RNA, 13 nt, Human
uaucuaaucauga

SEQ ID NO: 2094019 - RNA, 21 nt, Human
uaucuaauauguaacaagcca

SEQ ID NO: 2094020 - RNA, 12 nt, Human
uaucuaaccagu

SEQ ID NO: 2094021 - RNA, 15 nt, Human
uaucuaaccagugau

SEQ ID NO: 2094022 - RNA, 16 nt, Human
uaucuaaccagugauu

SEQ ID NO: 2094023 - RNA, 19 nt, Human
uaucuaaccagugauucga

SEQ ID NO: 2094024 - RNA, 13 nt, Human
uauccugagccau

SEQ ID NO: 2094025 - RNA, 17 nt, Human
uaucgggaacaguguuu

SEQ ID NO: 2094026 - RNA, 17 nt, Human
uaucgggagcagugucu

SEQ ID NO: 2094027 - RNA, 12 nt, Human
uaucgggggcug

SEQ ID NO: 2094028 - RNA, 16 nt, Human
uaucgggggcuggggc

SEQ ID NO: 2094029 - RNA, 14 nt, Human
uaucgggagcagug

SEQ ID NO: 2094030 - RNA, 15 nt, Human
uaucgggagcagugu

SEQ ID NO: 2094031 - RNA, 18 nt, Human
uaucgggagcagugucuu

SEQ ID NO: 2094032 - RNA, 16 nt, Human
uaucuaaauguugaaa

SEQ ID NO: 2094033 - RNA, 13 nt, Human
uauauuaaaaaug

SEQ ID NO: 2094034 - RNA, 14 nt, Human
uauauuaaaaaugg

SEQ ID NO: 2094035 - RNA, 15 nt, Human
uauauuaaaaauggu

SEQ ID NO: 2094036 - RNA, 16 nt, Human
uauauuaaaaauggua

SEQ ID NO: 2094037 - RNA, 17 nt, Human
uauauuaaaaaugguaa

SEQ ID NO: 2094038 - RNA, 19 nt, Human
uauauuaaaaaugguaaaa

SEQ ID NO: 2094039 - RNA, 22 nt, Human
uauauuaaaaaugguaaaauug

SEQ ID NO: 2094040 - RNA, 11 nt, Human
uauauguuuua

SEQ ID NO: 2094041 - RNA, 12 nt, Human
uauauguuuuaa

SEQ ID NO: 2094042 - RNA, 19 nt, Human
uauauguuuuaagaggcag

SEQ ID NO: 2094043 - RNA, 18 nt, Human
uauauguguuuuucacau

SEQ ID NO: 2094044 - RNA, 16 nt, Human
uauccucgcucccggg

SEQ ID NO: 2094045 - RNA, 12 nt, Human
uaugauuuuuaa

SEQ ID NO: 2094046 - RNA, 18 nt, Human
uaugauuuggaaaauaaa

SEQ ID NO: 2094047 - RNA, 17 nt, Human
uaugauuuggaaaauaa

SEQ ID NO: 2094048 - RNA, 15 nt, Human
uaugauuuggaaaau

SEQ ID NO: 2094049 - RNA, 23 nt, Human
uaugauuuuuaaagaaaaguuuu

SEQ ID NO: 2094050 - RNA, 17 nt, Human
uaugcaaggaaggaaag

SEQ ID NO: 2094051 - RNA, 20 nt, Human
uaugcaaggaaggaaagaaa

SEQ ID NO: 2094052 - RNA, 14 nt, Human
uaugcaaauuccca

SEQ ID NO: 2094053 - RNA, 15 nt, Human
uaugcaaauucccag

SEQ ID NO: 2094054 - RNA, 18 nt, Human
uaugcaaucaaaucugcu

SEQ ID NO: 2094055 - RNA, 21 nt, Human
uaugcaaacauaacaaaauca

SEQ ID NO: 2094056 - RNA, 18 nt, Human
uaugacuaaagagagaau

SEQ ID NO: 2094057 - RNA, 19 nt, Human
uaugacuaaagagagaaug

SEQ ID NO: 2094058 - RNA, 20 nt, Human
uaugacuaaagagagaaugu

SEQ ID NO: 2094059 - RNA, 21 nt, Human
uaugacuaaagagagaaugua

SEQ ID NO: 2094060 - RNA, 18 nt, Human
uaugaccuucuaggaagc

SEQ ID NO: 2094061 - RNA, 16 nt, Human
uaugaccuucuaggaa

SEQ ID NO: 2094062 - RNA, 16 nt, Human
uaugacggaagaacau

SEQ ID NO: 2094063 - RNA, 19 nt, Human
uaugacggaagaacauaga

SEQ ID NO: 2094064 - RNA, 20 nt, Human
uaugacggaagaacauagaa

SEQ ID NO: 2094065 - RNA, 12 nt, Human
uaugacuaaaga

SEQ ID NO: 2094066 - RNA, 13 nt, Human
uaugacuaaagag

SEQ ID NO: 2094067 - RNA, 14 nt, Human
uaugacuaaagaga

SEQ ID NO: 2094068 - RNA, 15 nt, Human
uaugacuaaagagag

SEQ ID NO: 2094069 - RNA, 16 nt, Human
uaugacuaaagagaga

SEQ ID NO: 2094070 - RNA, 17 nt, Human
uaugacuaaagagagaa

SEQ ID NO: 2094071 - RNA, 16 nt, Human
uaugacucccaaauuu

SEQ ID NO: 2094072 - RNA, 16 nt, Human
uaugagccagacaaau

SEQ ID NO: 2094073 - RNA, 15 nt, Human
uaugagaggcaauga

SEQ ID NO: 2094074 - RNA, 17 nt, Human
uaugagcucauguagca

SEQ ID NO: 2094075 - RNA, 17 nt, Human
uaugagccagacaaaug

SEQ ID NO: 2094076 - RNA, 19 nt, Human
uaugagccagacaaaugga

SEQ ID NO: 2094077 - RNA, 16 nt, Human
uaugauuaguaaagaa

SEQ ID NO: 2094078 - RNA, 21 nt, Human
uaugcacaccucccacccccu

SEQ ID NO: 2094079 - RNA, 22 nt, Human
uaugcaggggcaaacaccugcu

SEQ ID NO: 2094080 - RNA, 14 nt, Human
uaugcauaaaguca

SEQ ID NO: 2094081 - RNA, 15 nt, Human
uaugcauaaagucag

SEQ ID NO: 2094082 - RNA, 20 nt, Human
uaugcauaacugacaaauca

SEQ ID NO: 2094083 - RNA, 23 nt, Human
uaugcauaacugacaaaucaagu

SEQ ID NO: 2094084 - RNA, 22 nt, Human
uaugcuuauacacuuacacuuu

SEQ ID NO: 2094085 - RNA, 13 nt, Human
uaugcuuauuuua

SEQ ID NO: 2094086 - RNA, 16 nt, Human
uaugcaucuaauaaaa

SEQ ID NO: 2094087 - RNA, 17 nt, Human
uaugcaucuaauaaaaa

SEQ ID NO: 2094088 - RNA, 14 nt, Human
uaugcuuauuuuaa

SEQ ID NO: 2094089 - RNA, 17 nt, Human
uaugcuuauuuuaaaau

SEQ ID NO: 2094090 - RNA, 19 nt, Human
uaugcuuauuuuaaaauuu

SEQ ID NO: 2094091 - RNA, 20 nt, Human
uauggaauuuuucauugaua

SEQ ID NO: 2094092 - RNA, 23 nt, Human
uauggaauacaguguuauuuucu

SEQ ID NO: 2094093 - RNA, 22 nt, Human
uauggaauuacauguaaaacau

SEQ ID NO: 2094094 - RNA, 18 nt, Human
uauggaauuacauguaaa

SEQ ID NO: 2094095 - RNA, 14 nt, Human
uauggaauuacaug

SEQ ID NO: 2094096 - RNA, 14 nt, Human
uauggaauacagug

SEQ ID NO: 2094097 - RNA, 17 nt, Human
uauggaauacaguguua

SEQ ID NO: 2094098 - RNA, 24 nt, Human
uauggaauacaguguuauuuucuu

SEQ ID NO: 2094099 - RNA, 22 nt, Human
uauggaaggguuuguggcuggg

SEQ ID NO: 2094100 - RNA, 22 nt, Human
uauggaagcauauuguuauuau

SEQ ID NO: 2094101 - RNA, 19 nt, Human
uauggaaggguuuguggcu

SEQ ID NO: 2094102 - RNA, 17 nt, Human
uauggaacucucuccac

SEQ ID NO: 2094103 - RNA, 13 nt, Human
uauggaacucucu

SEQ ID NO: 2094104 - RNA, 21 nt, Human
uauggaaacuguugccagaga

SEQ ID NO: 2094105 - RNA, 23 nt, Human
uauauaaauuuuuuuuguuucau

SEQ ID NO: 2094106 - RNA, 15 nt, Human
uauaucuaucuuaua

SEQ ID NO: 2094107 - RNA, 21 nt, Human
uauaugcucugcauguuacau

SEQ ID NO: 2094108 - RNA, 13 nt, Human
uauaugugugugu

SEQ ID NO: 2094109 - RNA, 19 nt, Human
uauauguguguguauguuu

SEQ ID NO: 2094110 - RNA, 22 nt, Human
uauauguguguguauguuugca

SEQ ID NO: 2094111 - RNA, 18 nt, Human
uauacgauaaauaacuuu

SEQ ID NO: 2094112 - RNA, 15 nt, Human
uauacuaagaaaaga

SEQ ID NO: 2094113 - RNA, 19 nt, Human
uauacuaagauguucacug

SEQ ID NO: 2094114 - RNA, 16 nt, Human
uauacuggagaagucu

SEQ ID NO: 2094115 - RNA, 16 nt, Human
uauaguuuacuauuuu

SEQ ID NO: 2094116 - RNA, 19 nt, Human
uauaguuuauugacaauaa

SEQ ID NO: 2094117 - RNA, 17 nt, Human
uauaguuuacuauuuua

SEQ ID NO: 2094118 - RNA, 14 nt, Human
uauaaagagaaaau

SEQ ID NO: 2094119 - RNA, 15 nt, Human
uauaaagagaaaauu

SEQ ID NO: 2094120 - RNA, 17 nt, Human
uauaaagagaaaauuga

SEQ ID NO: 2094121 - RNA, 18 nt, Human
uauaaagagaaaauugaa

SEQ ID NO: 2094122 - RNA, 21 nt, Human
uauaaagagaaaauugaauuu

SEQ ID NO: 2094123 - RNA, 22 nt, Human
uauaaagagaaaauugaauuua

SEQ ID NO: 2094124 - RNA, 17 nt, Human
uauaaagauggcugacu

SEQ ID NO: 2094125 - RNA, 20 nt, Human
uauaaaugaaguuuauacag

SEQ ID NO: 2094126 - RNA, 21 nt, Human
uauaaaugaaguuuauacagu

SEQ ID NO: 2094127 - RNA, 24 nt, Human
uauaaaugaaguuuauacaguaca

SEQ ID NO: 2094128 - RNA, 15 nt, Human
uauaaagcaucuaaa

SEQ ID NO: 2094129 - RNA, 16 nt, Human
uauaaagcaucuaaac

SEQ ID NO: 2094130 - RNA, 17 nt, Human
uauaaagcaucuaaacu

SEQ ID NO: 2094131 - RNA, 19 nt, Human
uauaaagcaucuaaacuuu

SEQ ID NO: 2094132 - RNA, 14 nt, Human
uaguugcaauugaa

SEQ ID NO: 2094133 - RNA, 16 nt, Human
uaguugcaauugaauu

SEQ ID NO: 2094134 - RNA, 17 nt, Human
uaguugcagaaacauuu

SEQ ID NO: 2094135 - RNA, 19 nt, Human
uaguugcagaaacauuuug

SEQ ID NO: 2094136 - RNA, 23 nt, Human
uaguugcagacucaguuugucag

SEQ ID NO: 2094137 - RNA, 18 nt, Human
uaguugcagacucaguuu

SEQ ID NO: 2094138 - RNA, 13 nt, Human
uauaaacuuuaga

SEQ ID NO: 2094139 - RNA, 15 nt, Human
uauaaacuuuagagu

SEQ ID NO: 2094140 - RNA, 22 nt, Human
uauaaacuuuagaguagcauga

SEQ ID NO: 2094141 - RNA, 21 nt, Human
uauaaacuuuagaguagcaug

SEQ ID NO: 2094142 - RNA, 15 nt, Human
uauaaagaacaaggu

SEQ ID NO: 2094143 - RNA, 22 nt, Human
uauaaagaacaagguaguuuuu

SEQ ID NO: 2094144 - RNA, 13 nt, Human
uauaauaaaguau

SEQ ID NO: 2094145 - RNA, 22 nt, Human
uauaauauuuuuaauuaaauaa

SEQ ID NO: 2094146 - RNA, 13 nt, Human
uauaauauauguu

SEQ ID NO: 2094147 - RNA, 17 nt, Human
uauaauauauguuuuaa

SEQ ID NO: 2094148 - RNA, 11 nt, Human
uauaaauuaaa

SEQ ID NO: 2094149 - RNA, 12 nt, Human
uauaaauuaaau

SEQ ID NO: 2094150 - RNA, 13 nt, Human
uauaaauuaaaua

SEQ ID NO: 2094151 - RNA, 14 nt, Human
uauaaauuaaauau

SEQ ID NO: 2094152 - RNA, 19 nt, Human
uauaaauuaaauauaugua

SEQ ID NO: 2094153 - RNA, 20 nt, Human
uauaaauuaaauauauguau

SEQ ID NO: 2094154 - RNA, 22 nt, Human
uauaaauuaaauauauguaugu

SEQ ID NO: 2094155 - RNA, 23 nt, Human
uauaaauuaaauauauguaugua

SEQ ID NO: 2094156 - RNA, 16 nt, Human
uauaaaugguguuuuu

SEQ ID NO: 2094157 - RNA, 15 nt, Human
uauaauguuugcuau

SEQ ID NO: 2094158 - RNA, 16 nt, Human
uauaauguuaguagaa

SEQ ID NO: 2094159 - RNA, 20 nt, Human
uauaaucuuccauacuucuu

SEQ ID NO: 2094160 - RNA, 17 nt, Human
uauaaugucauuaaaca

SEQ ID NO: 2094161 - RNA, 20 nt, Human
uauaaugucauuaaacauga

SEQ ID NO: 2094162 - RNA, 18 nt, Human
uauaauuacauauuugca

SEQ ID NO: 2094163 - RNA, 19 nt, Human
uauaauuaucggaagcagu

SEQ ID NO: 2094164 - RNA, 17 nt, Human
uauaauuauguuauuga

SEQ ID NO: 2094165 - RNA, 22 nt, Human
uauaauuauguuauugaaaaaa

SEQ ID NO: 2094166 - RNA, 13 nt, Human
uaggacccuuccc

SEQ ID NO: 2094167 - RNA, 18 nt, Human
uaggccuggccagaugca

SEQ ID NO: 2094168 - RNA, 16 nt, Human
uaggccugggugcugg

SEQ ID NO: 2094169 - RNA, 19 nt, Human
uaggccugggugcuggcug

SEQ ID NO: 2094170 - RNA, 13 nt, Human
uaggccugggugc

SEQ ID NO: 2094171 - RNA, 15 nt, Human
uaggccuggccagau

SEQ ID NO: 2094172 - RNA, 21 nt, Human
uaggaauucccagcccaaagc

SEQ ID NO: 2094173 - RNA, 20 nt, Human
uaggacauaaauuagagguc

SEQ ID NO: 2094174 - RNA, 20 nt, Human
uaggacauguucccuucucc

SEQ ID NO: 2094175 - RNA, 23 nt, Human
uaggacauguucccuucuccuuc

SEQ ID NO: 2094176 - RNA, 23 nt, Human
uaggaauagcaugucacuaaagc

SEQ ID NO: 2094177 - RNA, 15 nt, Human
uaggaauagcauguc

SEQ ID NO: 2094178 - RNA, 16 nt, Human
guggcugcccacacac

SEQ ID NO: 2094179 - RNA, 15 nt, Human
guggcugaccccccu

SEQ ID NO: 2094180 - RNA, 16 nt, Human
guggcugaccccccuc

SEQ ID NO: 2094181 - RNA, 16 nt, Human
guggcucugagaaggg

SEQ ID NO: 2094182 - RNA, 14 nt, Human
guggcugacccagu

SEQ ID NO: 2094183 - RNA, 15 nt, Human
guggcugacccaguc

SEQ ID NO: 2094184 - RNA, 17 nt, Human
guggcugacccaguccc

SEQ ID NO: 2094185 - RNA, 19 nt, Human
guggcugacccagucccug

SEQ ID NO: 2094186 - RNA, 18 nt, Human
uaggucaguacccaccug

SEQ ID NO: 2094187 - RNA, 22 nt, Human
uaggucaguacccaccugagcu

SEQ ID NO: 2094188 - RNA, 23 nt, Human
uaggucaguacccaccugagcuu

SEQ ID NO: 2094189 - RNA, 14 nt, Human
uaggucagugaggc

SEQ ID NO: 2094190 - RNA, 20 nt, Human
uaggcucugcacagauggau

SEQ ID NO: 2094191 - RNA, 13 nt, Human
uagguacuuuugg

SEQ ID NO: 2094192 - RNA, 14 nt, Human
uagguauacagugg

SEQ ID NO: 2094193 - RNA, 16 nt, Human
uaggucaagaagaaga

SEQ ID NO: 2094194 - RNA, 15 nt, Human
uagguaugaauaagu

SEQ ID NO: 2094195 - RNA, 21 nt, Human
uaggucaaggccugucccugg

SEQ ID NO: 2094196 - RNA, 15 nt, Human
uaggucacuccuggg

SEQ ID NO: 2094197 - RNA, 18 nt, Human
uaggucaagaagaagaug

SEQ ID NO: 2094198 - RNA, 15 nt, Human
uaggcucugcacaga

SEQ ID NO: 2094199 - RNA, 18 nt, Human
uaggcucugcacagaugg

SEQ ID NO: 2094200 - RNA, 21 nt, Human
uaggcucugcacagauggauu

SEQ ID NO: 2094201 - RNA, 19 nt, Human
uagggaaaaaccagcgugu

SEQ ID NO: 2094202 - RNA, 20 nt, Human
uagggaaaaaccagcgugug

SEQ ID NO: 2094203 - RNA, 21 nt, Human
uagggaaaaaccagcguguga

SEQ ID NO: 2094204 - RNA, 11 nt, Human
uaggcucugca

SEQ ID NO: 2094205 - RNA, 22 nt, Human
uaggcuccgucaguaucaggcc

SEQ ID NO: 2094206 - RNA, 15 nt, Human
uaggcuauucacaac

SEQ ID NO: 2094207 - RNA, 13 nt, Human
uaggccuucuugu

SEQ ID NO: 2094208 - RNA, 14 nt, Human
uaggccuucuugug

SEQ ID NO: 2094209 - RNA, 16 nt, Human
uaggccuucuugugau

SEQ ID NO: 2094210 - RNA, 19 nt, Human
uaggccuucuugugaucuu

SEQ ID NO: 2094211 - RNA, 20 nt, Human
uaggccugggugcuggcugc

SEQ ID NO: 2094212 - RNA, 14 nt, Human
uaggcuauucacaa

SEQ ID NO: 2094213 - RNA, 12 nt, Human
uagugcagcuga

SEQ ID NO: 2094214 - RNA, 13 nt, Human
uagugcagcugau

SEQ ID NO: 2094215 - RNA, 14 nt, Human
uagugcagcugauu

SEQ ID NO: 2094216 - RNA, 15 nt, Human
uagugcagcugauuu

SEQ ID NO: 2094217 - RNA, 17 nt, Human
uagugcagcugauuuua

SEQ ID NO: 2094218 - RNA, 18 nt, Human
uagugcagcugauuuuaa

SEQ ID NO: 2094219 - RNA, 19 nt, Human
uagugcagcugauuuuaac

SEQ ID NO: 2094220 - RNA, 20 nt, Human
uagugcagcugauuuuaaca

SEQ ID NO: 2094221 - RNA, 22 nt, Human
uagugcagcugauuuuaacaau

SEQ ID NO: 2094222 - RNA, 22 nt, Human
uaguagggugagggauaagcaa

SEQ ID NO: 2094223 - RNA, 20 nt, Human
uaguguguucugauuagaaa

SEQ ID NO: 2094224 - RNA, 19 nt, Human
uaguguguucugauuagaa

SEQ ID NO: 2094225 - RNA, 15 nt, Human
uaguguguucugauu

SEQ ID NO: 2094226 - RNA, 17 nt, Human
uagugcggacaaguuuu

SEQ ID NO: 2094227 - RNA, 19 nt, Human
uagugcggacaaguuuuaa

SEQ ID NO: 2094228 - RNA, 21 nt, Human
uagugcgauguuucaggaggc

SEQ ID NO: 2094229 - RNA, 14 nt, Human
uagugcggacaagu

SEQ ID NO: 2094230 - RNA, 23 nt, Human
uagugcccuccacagccgcagcc

SEQ ID NO: 2094231 - RNA, 22 nt, Human
uagugccugagaguauuuaggc

SEQ ID NO: 2094232 - RNA, 17 nt, Human
uagugcccuccacagcc

SEQ ID NO: 2094233 - RNA, 14 nt, Human
uaguaucuaacaug

SEQ ID NO: 2094234 - RNA, 15 nt, Human
uaguaucuaacaugu

SEQ ID NO: 2094235 - RNA, 23 nt, Human
uaggugacagagugagacucugu

SEQ ID NO: 2094236 - RNA, 19 nt, Human
uaggugcccuuggaggcca

SEQ ID NO: 2094237 - RNA, 14 nt, Human
uaggugauuugaag

SEQ ID NO: 2094238 - RNA, 14 nt, Human
uaguauaaagaaaa

SEQ ID NO: 2094239 - RNA, 16 nt, Human
uaguauaaagaaaagu

SEQ ID NO: 2094240 - RNA, 16 nt, Human
uaggugcuaauuaaua

SEQ ID NO: 2094241 - RNA, 19 nt, Human
uaggugcuaauuaauaaag

SEQ ID NO: 2094242 - RNA, 13 nt, Human
uaguauauuaaaa

SEQ ID NO: 2094243 - RNA, 16 nt, Human
uaguauauuaaaaaug

SEQ ID NO: 2094244 - RNA, 17 nt, Human
uaguauauuaaaaaugg

SEQ ID NO: 2094245 - RNA, 18 nt, Human
uaguauauuaaaaauggu

SEQ ID NO: 2094246 - RNA, 12 nt, Human
uaguauauuuau

SEQ ID NO: 2094247 - RNA, 18 nt, Human
uaguauauuuauauaauu

SEQ ID NO: 2094248 - RNA, 19 nt, Human
uaguauauuuauauaauua

SEQ ID NO: 2094249 - RNA, 18 nt, Human
uauguugguagauucuaa

SEQ ID NO: 2094250 - RNA, 15 nt, Human
uauguuguauagauu

SEQ ID NO: 2094251 - RNA, 21 nt, Human
uauguugcccaggcaggucuu

SEQ ID NO: 2094252 - RNA, 22 nt, Human
uauguucuuaguggauguucug

SEQ ID NO: 2094253 - RNA, 14 nt, Human
uauguuauugaaaa

SEQ ID NO: 2094254 - RNA, 16 nt, Human
uauguucaaagucaaa

SEQ ID NO: 2094255 - RNA, 16 nt, Human
uauuaagaaagacuau

SEQ ID NO: 2094256 - RNA, 18 nt, Human
uauuaacaaauuauguua

SEQ ID NO: 2094257 - RNA, 16 nt, Human
uauuaacaaauuaugu

SEQ ID NO: 2094258 - RNA, 15 nt, Human
uauuaaauagaaggu

SEQ ID NO: 2094259 - RNA, 15 nt, Human
uauguugugaagaug

SEQ ID NO: 2094260 - RNA, 16 nt, Human
uauguugugaagaugu

SEQ ID NO: 2094261 - RNA, 20 nt, Human
uauguugugaagauguuugc

SEQ ID NO: 2094262 - RNA, 16 nt, Human
uauguuguguucuaau

SEQ ID NO: 2094263 - RNA, 19 nt, Human
uauguuaaccucaguguca

SEQ ID NO: 2094264 - RNA, 20 nt, Human
uauguuaaccucagugucau

SEQ ID NO: 2094265 - RNA, 22 nt, Human
uauguuaaccucagugucauuu

SEQ ID NO: 2094266 - RNA, 15 nt, Human
uauguguuuuucaca

SEQ ID NO: 2094267 - RNA, 16 nt, Human
uauguguuuuucacau

SEQ ID NO: 2094268 - RNA, 17 nt, Human
uauguguuuuucacauu

SEQ ID NO: 2094269 - RNA, 19 nt, Human
uauguuacaucuguuuuaa

SEQ ID NO: 2094270 - RNA, 22 nt, Human
uauguuacaucuguuuuaaauu

SEQ ID NO: 2094271 - RNA, 15 nt, Human
uauggaggauggaga

SEQ ID NO: 2094272 - RNA, 15 nt, Human
uauuaaguuguuaau

SEQ ID NO: 2094273 - RNA, 14 nt, Human
uauuaagcaguaaa

SEQ ID NO: 2094274 - RNA, 19 nt, Human
uauuaagcaguaaaaacug

SEQ ID NO: 2094275 - RNA, 20 nt, Human
uauuaagcaguaaaaacugu

SEQ ID NO: 2094276 - RNA, 14 nt, Human
uauuaaggaagaca

SEQ ID NO: 2094277 - RNA, 15 nt, Human
uauuauaacuuaaaa

SEQ ID NO: 2094278 - RNA, 12 nt, Human
uauuauaauuua

SEQ ID NO: 2094279 - RNA, 15 nt, Human
uauuauaauuuaaug

SEQ ID NO: 2094280 - RNA, 16 nt, Human
uauuauaacuuaaaaa

SEQ ID NO: 2094281 - RNA, 19 nt, Human
uauuauaauuuuuuucaau

SEQ ID NO: 2094282 - RNA, 15 nt, Human
uauuauacuaagaaa

SEQ ID NO: 2094283 - RNA, 18 nt, Human
uauuauacuaagaaaaga

SEQ ID NO: 2094284 - RNA, 19 nt, Human
uauuauacuaagaaaagau

SEQ ID NO: 2094285 - RNA, 16 nt, Human
uauuaucaugcaaaug

SEQ ID NO: 2094286 - RNA, 18 nt, Human
uauuaucaugcaaaugcu

SEQ ID NO: 2094287 - RNA, 22 nt, Human
uauuaucaugcaaaugcuguau

SEQ ID NO: 2094288 - RNA, 13 nt, Human
uauuauccauuca

SEQ ID NO: 2094289 - RNA, 13 nt, Human
uauuaucuuugua

SEQ ID NO: 2094290 - RNA, 13 nt, Human
uauuaugcaaauu

SEQ ID NO: 2094291 - RNA, 15 nt, Human
uauuaugcaaauucc

SEQ ID NO: 2094292 - RNA, 16 nt, Human
uauuaugcaaauuccc

SEQ ID NO: 2094293 - RNA, 18 nt, Human
uauuaugcaaauucccag

SEQ ID NO: 2094294 - RNA, 19 nt, Human
uauuaugcaaauucccaga

SEQ ID NO: 2094295 - RNA, 14 nt, Human
uauuaugcauaacu

SEQ ID NO: 2094296 - RNA, 20 nt, Human
uauuaugcauaacugacaaa

SEQ ID NO: 2094297 - RNA, 21 nt, Human
uauuauggaagauuuuaaauu

SEQ ID NO: 2094298 - RNA, 16 nt, Human
uauuauuucaauguga

SEQ ID NO: 2094299 - RNA, 15 nt, Human
uauuauuuucaccug

SEQ ID NO: 2094300 - RNA, 16 nt, Human
uauuauuuucaccugu

SEQ ID NO: 2094301 - RNA, 15 nt, Human
uauuauuguguguua

SEQ ID NO: 2094302 - RNA, 22 nt, Human
uauugcagcgauuaauaacagg

SEQ ID NO: 2094303 - RNA, 17 nt, Human
uauugcaaugaaggaaa

SEQ ID NO: 2094304 - RNA, 15 nt, Human
uauugcauaugcaua

SEQ ID NO: 2094305 - RNA, 20 nt, Human
uauugauaugcuuauacacu

SEQ ID NO: 2094306 - RNA, 21 nt, Human
uauucauugugguuauuuuua

SEQ ID NO: 2094307 - RNA, 15 nt, Human
uauugcuugcacaaa

SEQ ID NO: 2094308 - RNA, 19 nt, Human
uauugcuguguaacacugu

SEQ ID NO: 2094309 - RNA, 21 nt, Human
uauugcuugauacuuuugaca

SEQ ID NO: 2094310 - RNA, 15 nt, Human
uauugcccacgcugg

SEQ ID NO: 2094311 - RNA, 14 nt, Human
uauugcccacgcug

SEQ ID NO: 2094312 - RNA, 13 nt, Human
uauugcccacgcu

SEQ ID NO: 2094313 - RNA, 13 nt, Human
uauuguucccagu

SEQ ID NO: 2094314 - RNA, 17 nt, Human
uauuguucccagugaca

SEQ ID NO: 2094315 - RNA, 21 nt, Human
uauuguucccagugacacuuc

SEQ ID NO: 2094316 - RNA, 13 nt, Human
uauuguuccuaag

SEQ ID NO: 2094317 - RNA, 14 nt, Human
uauuguuccuaagu

SEQ ID NO: 2094318 - RNA, 18 nt, Human
uauuguuccuaaguucuu

SEQ ID NO: 2094319 - RNA, 21 nt, Human
uauuguuccuaaguucuuaga

SEQ ID NO: 2094320 - RNA, 17 nt, Human
uauuguguguuauuuaa

SEQ ID NO: 2094321 - RNA, 19 nt, Human
uauuguguguuauuuaaau

SEQ ID NO: 2094322 - RNA, 14 nt, Human
uauuuaugugugag

SEQ ID NO: 2094323 - RNA, 19 nt, Human
uauuuauuauuuucaccug

SEQ ID NO: 2094324 - RNA, 16 nt, Human
uauuucuaucccaaac

SEQ ID NO: 2094325 - RNA, 13 nt, Human
uauuucuuguuug

SEQ ID NO: 2094326 - RNA, 14 nt, Human
uauuucuuguuugu

SEQ ID NO: 2094327 - RNA, 11 nt, Human
uauuguuucua

SEQ ID NO: 2094328 - RNA, 18 nt, Human
uauuuaaauguaaagaca

SEQ ID NO: 2094329 - RNA, 22 nt, Human
uauuuaaauauuaaauauguua

SEQ ID NO: 2094330 - RNA, 13 nt, Human
uauuuaaauucuu

SEQ ID NO: 2094331 - RNA, 14 nt, Human
uauuuaaauucuuu

SEQ ID NO: 2094332 - RNA, 15 nt, Human
uauuuaaauucuuuu

SEQ ID NO: 2094333 - RNA, 16 nt, Human
uauuuaaauucuuuuu

SEQ ID NO: 2094334 - RNA, 17 nt, Human
uauuuauauauuuauaa

SEQ ID NO: 2094335 - RNA, 18 nt, Human
uauuuauauauuuauaac

SEQ ID NO: 2094336 - RNA, 19 nt, Human
uauuuauauauuuauaacu

SEQ ID NO: 2094337 - RNA, 12 nt, Human
uauuuaaagaca

SEQ ID NO: 2094338 - RNA, 13 nt, Human
uauuuaaagacaa

SEQ ID NO: 2094339 - RNA, 17 nt, Human
uauuuaaagacaaagac

SEQ ID NO: 2094340 - RNA, 18 nt, Human
uauuuaaagacaaagaca

SEQ ID NO: 2094341 - RNA, 22 nt, Human
uauuuaucuguguuuuugaaau

SEQ ID NO: 2094342 - RNA, 21 nt, Human
uauuuaucuguaguaaacuau

SEQ ID NO: 2094343 - RNA, 20 nt, Human
uauuuaucugugcaaauccu

SEQ ID NO: 2094344 - RNA, 17 nt, Human
uauuuaucuauuguaag

SEQ ID NO: 2094345 - RNA, 19 nt, Human
uauuuaucuauuguaagau

SEQ ID NO: 2094346 - RNA, 14 nt, Human
uauuuauauuucac

SEQ ID NO: 2094347 - RNA, 15 nt, Human
uauuuauauuucacu

SEQ ID NO: 2094348 - RNA, 16 nt, Human
uauuuauauuucacua

SEQ ID NO: 2094349 - RNA, 13 nt, Human
uauuuaucacaua

SEQ ID NO: 2094350 - RNA, 13 nt, Human
uauuuaucaguga

SEQ ID NO: 2094351 - RNA, 21 nt, Human
uauuuauauuuuuauuuuauu

SEQ ID NO: 2094352 - RNA, 15 nt, Human
uauuuaucagugaca

SEQ ID NO: 2094353 - RNA, 18 nt, Human
uauuuaucagugacagag

SEQ ID NO: 2094354 - RNA, 18 nt, Human
ucaaggacuugaaagcau

SEQ ID NO: 2094355 - RNA, 19 nt, Human
ucaaggacuugaaagcauc

SEQ ID NO: 2094356 - RNA, 22 nt, Human
ucaaggaccaacaagggcagug

SEQ ID NO: 2094357 - RNA, 23 nt, Human
ucaaggaccaacaagggcagugg

SEQ ID NO: 2094358 - RNA, 18 nt, Human
ucaaggacaaagucucca

SEQ ID NO: 2094359 - RNA, 19 nt, Human
ucaaggacaaagucuccag

SEQ ID NO: 2094360 - RNA, 20 nt, Human
ucaaggacaaagucuccagc

SEQ ID NO: 2094361 - RNA, 21 nt, Human
ucaaggacaaagucuccagcc

SEQ ID NO: 2094362 - RNA, 22 nt, Human
ucaaggacaaagucuccagccc

SEQ ID NO: 2094363 - RNA, 23 nt, Human
ucaaggacaaagucuccagccca

SEQ ID NO: 2094364 - RNA, 19 nt, Human
ucaagcgauucuucugcuu

SEQ ID NO: 2094365 - RNA, 18 nt, Human
ucaagcgauucuucugcu

SEQ ID NO: 2094366 - RNA, 21 nt, Human
ucaagcgauucuucugcuuca

SEQ ID NO: 2094367 - RNA, 13 nt, Human
ucaagcccaggag

SEQ ID NO: 2094368 - RNA, 16 nt, Human
ucaagcccaggaggac

SEQ ID NO: 2094369 - RNA, 19 nt, Human
ucaaccccuucgcuccugu

SEQ ID NO: 2094370 - RNA, 18 nt, Human
ucaaccccuucgcuccug

SEQ ID NO: 2094371 - RNA, 15 nt, Human
ucaaccuccugggcu

SEQ ID NO: 2094372 - RNA, 20 nt, Human
ucaaccccuucgcuccugug

SEQ ID NO: 2094373 - RNA, 16 nt, Human
ucaaccuccugggcua

SEQ ID NO: 2094374 - RNA, 18 nt, Human
ucaacugaccagccucca

SEQ ID NO: 2094375 - RNA, 23 nt, Human
ucaacugaaaagacucaguguuc

SEQ ID NO: 2094376 - RNA, 24 nt, Human
ucaacugaccagccuccaugcugc

SEQ ID NO: 2094377 - RNA, 22 nt, Human
ucaacugaaaguguuuccuuca

SEQ ID NO: 2094378 - RNA, 20 nt, Human
ucaagccaagcagccaagcu

SEQ ID NO: 2094379 - RNA, 16 nt, Human
ucaaacaucuggaaaa

SEQ ID NO: 2094380 - RNA, 22 nt, Human
ucaaacaugaaguguguuuccu

SEQ ID NO: 2094381 - RNA, 15 nt, Human
uauuugcauguuacc

SEQ ID NO: 2094382 - RNA, 20 nt, Human
ucaaaccccgaccaccugcc

SEQ ID NO: 2094383 - RNA, 19 nt, Human
ucaaaccccgaccaccugc

SEQ ID NO: 2094384 - RNA, 21 nt, Human
ucaaaccaguauacaagauaa

SEQ ID NO: 2094385 - RNA, 22 nt, Human
ucaaaccaguauacaagauaag

SEQ ID NO: 2094386 - RNA, 23 nt, Human
ucaaaccccgaccaccugcccaa

SEQ ID NO: 2094387 - RNA, 15 nt, Human
uauuugcauauguau

SEQ ID NO: 2094388 - RNA, 16 nt, Human
uauuugcauguuaccu

SEQ ID NO: 2094389 - RNA, 16 nt, Human
uauuugcacuguagcc

SEQ ID NO: 2094390 - RNA, 12 nt, Human
ucaaagagguuu

SEQ ID NO: 2094391 - RNA, 23 nt, Human
ucaaagagguuuuaaaaaaaucc

SEQ ID NO: 2094392 - RNA, 22 nt, Human
ucaaacuuccagugcaacacug

SEQ ID NO: 2094393 - RNA, 20 nt, Human
ucaaacugccuuggcuucag

SEQ ID NO: 2094394 - RNA, 17 nt, Human
ucaaacuguagaaauga

SEQ ID NO: 2094395 - RNA, 14 nt, Human
ucaaacuuccaguc

SEQ ID NO: 2094396 - RNA, 14 nt, Human
ucaaacuguagaaa

SEQ ID NO: 2094397 - RNA, 20 nt, Human
ucaaacuguagaaaugauga

SEQ ID NO: 2094398 - RNA, 13 nt, Human
ucaauuaaaugua

SEQ ID NO: 2094399 - RNA, 12 nt, Human
ucaauuaaaugu

SEQ ID NO: 2094400 - RNA, 14 nt, Human
ucaauuaaauguag

SEQ ID NO: 2094401 - RNA, 24 nt, Human
ucaauguucauuguaauguuacug

SEQ ID NO: 2094402 - RNA, 13 nt, Human
ucaauaaaaucau

SEQ ID NO: 2094403 - RNA, 22 nt, Human
ucaauguuuaugcaaggaagga

SEQ ID NO: 2094404 - RNA, 23 nt, Human
ucaauguuuaugcaaggaaggaa

SEQ ID NO: 2094405 - RNA, 14 nt, Human
ucaauaaaaucaug

SEQ ID NO: 2094406 - RNA, 16 nt, Human
ucaauaaaaucaugua

SEQ ID NO: 2094407 - RNA, 18 nt, Human
ucaauaaaaucauguaca

SEQ ID NO: 2094408 - RNA, 21 nt, Human
ucaauaaaaucauguacauuu

SEQ ID NO: 2094409 - RNA, 18 nt, Human
ucaauguucauuguaaug

SEQ ID NO: 2094410 - RNA, 21 nt, Human
ucaauguuuaugcaaggaagg

SEQ ID NO: 2094411 - RNA, 14 nt, Human
ucaauuccucuggg

SEQ ID NO: 2094412 - RNA, 16 nt, Human
ucaauucauauuuaug

SEQ ID NO: 2094413 - RNA, 18 nt, Human
ucaauucauauuuaugaa

SEQ ID NO: 2094414 - RNA, 15 nt, Human
ucaauucaaaaaugu

SEQ ID NO: 2094415 - RNA, 17 nt, Human
ucaauucaaaaauguac

SEQ ID NO: 2094416 - RNA, 16 nt, Human
ucacaagugaaaaaca

SEQ ID NO: 2094417 - RNA, 22 nt, Human
ucacaagugaaaaacauccaga

SEQ ID NO: 2094418 - RNA, 20 nt, Human
ucacacacaggcaacugagg

SEQ ID NO: 2094419 - RNA, 21 nt, Human
ucacacacaggcaacugaggc

SEQ ID NO: 2094420 - RNA, 22 nt, Human
ucacaaggcauucaaguguaca

SEQ ID NO: 2094421 - RNA, 17 nt, Human
ucacaagagcccagcag

SEQ ID NO: 2094422 - RNA, 12 nt, Human
ucacaagcugcc

SEQ ID NO: 2094423 - RNA, 13 nt, Human
ucacaagcugccu

SEQ ID NO: 2094424 - RNA, 14 nt, Human
ucacaagcugccuc

SEQ ID NO: 2094425 - RNA, 15 nt, Human
ucacaagcugccucc

SEQ ID NO: 2094426 - RNA, 16 nt, Human
ucacaagcugccuccc

SEQ ID NO: 2094427 - RNA, 20 nt, Human
ucacaagcugccucccuguc

SEQ ID NO: 2094428 - RNA, 22 nt, Human
ucacaagcugccucccugucca

SEQ ID NO: 2094429 - RNA, 23 nt, Human
ucacaagcugccucccuguccac

SEQ ID NO: 2094430 - RNA, 15 nt, Human
ucacacacuuuggcu

SEQ ID NO: 2094431 - RNA, 18 nt, Human
ucacaggacucugccucc

SEQ ID NO: 2094432 - RNA, 17 nt, Human
ucacaggacucugccuc

SEQ ID NO: 2094433 - RNA, 16 nt, Human
ucacaggacucugccu

SEQ ID NO: 2094434 - RNA, 23 nt, Human
ucacaccaggcuugccugcaggc

SEQ ID NO: 2094435 - RNA, 21 nt, Human
ucacaccaggcuugccugcag

SEQ ID NO: 2094436 - RNA, 22 nt, Human
ucacaccaggcuugccugcagg

SEQ ID NO: 2094437 - RNA, 23 nt, Human
ucacagggccccagaaggcaggg

SEQ ID NO: 2094438 - RNA, 23 nt, Human
ucacaggacucugccuccucuuc

SEQ ID NO: 2094439 - RNA, 19 nt, Human
ucacaggacucugccuccu

SEQ ID NO: 2094440 - RNA, 23 nt, Human
ucacagguagacaguauauaacu

SEQ ID NO: 2094441 - RNA, 24 nt, Human
ucacaggguugggcccagaucugg

SEQ ID NO: 2094442 - RNA, 19 nt, Human
ucacaggguugggcccaga

SEQ ID NO: 2094443 - RNA, 23 nt, Human
ucacaggguugggcccagaucug

SEQ ID NO: 2094444 - RNA, 14 nt, Human
ucacaggguugggc

SEQ ID NO: 2094445 - RNA, 16 nt, Human
ucacaggguugggccc

SEQ ID NO: 2094446 - RNA, 17 nt, Human
ucacaggguugggccca

SEQ ID NO: 2094447 - RNA, 19 nt, Human
ucacagucacaugcuugau

SEQ ID NO: 2094448 - RNA, 14 nt, Human
ucacauuuauucug

SEQ ID NO: 2094449 - RNA, 21 nt, Human
ucaccaaaucagcugcuacua

SEQ ID NO: 2094450 - RNA, 16 nt, Human
ucaccacaugugcaca

SEQ ID NO: 2094451 - RNA, 13 nt, Human
ucaccaagcccag

SEQ ID NO: 2094452 - RNA, 21 nt, Human
ucaccacuucaauagaucaaa

SEQ ID NO: 2094453 - RNA, 13 nt, Human
ucaccaccucucc

SEQ ID NO: 2094454 - RNA, 14 nt, Human
ucaccaccuuccca

SEQ ID NO: 2094455 - RNA, 15 nt, Human
ucaccaccuucccag

SEQ ID NO: 2094456 - RNA, 16 nt, Human
ucaccaccuucccagc

SEQ ID NO: 2094457 - RNA, 18 nt, Human
ucaccaccuucccagcuc

SEQ ID NO: 2094458 - RNA, 19 nt, Human
ucacccgaggcugcccacu

SEQ ID NO: 2094459 - RNA, 16 nt, Human
ucacccgaggcugccc

SEQ ID NO: 2094460 - RNA, 20 nt, Human
ucaccgagaguagccgagag

SEQ ID NO: 2094461 - RNA, 23 nt, Human
ucaccgagaguagccgagagccu

SEQ ID NO: 2094462 - RNA, 13 nt, Human
ucacccuguccaa

SEQ ID NO: 2094463 - RNA, 21 nt, Human
ucacccuguccaaacugccua

SEQ ID NO: 2094464 - RNA, 14 nt, Human
uccuuagaagugga

SEQ ID NO: 2094465 - RNA, 19 nt, Human
uccuuagagacaucaaaau

SEQ ID NO: 2094466 - RNA, 22 nt, Human
uccugucugccagccagcagcc

SEQ ID NO: 2094467 - RNA, 17 nt, Human
uccugucugccagccag

SEQ ID NO: 2094468 - RNA, 21 nt, Human
uccugucugccagccagcagc

SEQ ID NO: 2094469 - RNA, 15 nt, Human
uccuuagcaacagcc

SEQ ID NO: 2094470 - RNA, 16 nt, Human
uccuuagcaacagccg

SEQ ID NO: 2094471 - RNA, 13 nt, Human
uccuuagcugcca

SEQ ID NO: 2094472 - RNA, 14 nt, Human
uccuuagcugccaa

SEQ ID NO: 2094473 - RNA, 16 nt, Human
uccuuagcugccaagc

SEQ ID NO: 2094474 - RNA, 18 nt, Human
uccuuagcuuagaccuca

SEQ ID NO: 2094475 - RNA, 19 nt, Human
uccuuagcuuagaccucag

SEQ ID NO: 2094476 - RNA, 20 nt, Human
uccuuagcuuagaccucagc

SEQ ID NO: 2094477 - RNA, 21 nt, Human
uccuuagcuuagaccucagcc

SEQ ID NO: 2094478 - RNA, 22 nt, Human
uccuuagcuuagaccucagccu

SEQ ID NO: 2094479 - RNA, 19 nt, Human
ucggcccacagcucccacc

SEQ ID NO: 2094480 - RNA, 12 nt, Human
ucggcccacagc

SEQ ID NO: 2094481 - RNA, 16 nt, Human
ucggcccacagcuccc

SEQ ID NO: 2094482 - RNA, 23 nt, Human
ucggcccacagcucccaccccac

SEQ ID NO: 2094483 - RNA, 19 nt, Human
ucgugaaguauacuguauu

SEQ ID NO: 2094484 - RNA, 17 nt, Human
ucgugaaguauacugua

SEQ ID NO: 2094485 - RNA, 13 nt, Human
ucgugacaacacu

SEQ ID NO: 2094486 - RNA, 14 nt, Human
ucggagacagugau

SEQ ID NO: 2094487 - RNA, 15 nt, Human
ucggagacagugauc

SEQ ID NO: 2094488 - RNA, 21 nt, Human
ucggagacagugaucuccaua

SEQ ID NO: 2094489 - RNA, 20 nt, Human
ucggagggaauugaggucug

SEQ ID NO: 2094490 - RNA, 22 nt, Human
ucggagggaauugaggucugcu

SEQ ID NO: 2094491 - RNA, 17 nt, Human
ucggaguaucugggaac

SEQ ID NO: 2094492 - RNA, 19 nt, Human
ucggaguaucugggaacug

SEQ ID NO: 2094493 - RNA, 22 nt, Human
ucggcauugguucccuuugcuc

SEQ ID NO: 2094494 - RNA, 10 nt, Human
ucggauuaga

SEQ ID NO: 2094495 - RNA, 20 nt, Human
ucggaucuggggcucuggga

SEQ ID NO: 2094496 - RNA, 14 nt, Human
ucgugguaggacug

SEQ ID NO: 2094497 - RNA, 15 nt, Human
ucgugggugugugua

SEQ ID NO: 2094498 - RNA, 22 nt, Human
ucguggguguguguagccaagg

SEQ ID NO: 2094499 - RNA, 20 nt, Human
ucguggcagauaaucagccu

SEQ ID NO: 2094500 - RNA, 21 nt, Human
ucguggcagauaaucagccuc

SEQ ID NO: 2094501 - RNA, 15 nt, Human
ucgugguaggacugu

SEQ ID NO: 2094502 - RNA, 20 nt, Human
ucgugguaggacuguagaaa

SEQ ID NO: 2094503 - RNA, 22 nt, Human
ucguggugaucaauuaaaugua

SEQ ID NO: 2094504 - RNA, 18 nt, Human
ucuaaagguggugaggca

SEQ ID NO: 2094505 - RNA, 14 nt, Human
ucuaucagagaaaa

SEQ ID NO: 2094506 - RNA, 20 nt, Human
ucuagugcccuccacagccg

SEQ ID NO: 2094507 - RNA, 22 nt, Human
ucuagugcagcugauuuuaaca

SEQ ID NO: 2094508 - RNA, 23 nt, Human
ucuagugcagcugauuuuaacaa

SEQ ID NO: 2094509 - RNA, 14 nt, Human
ucuagugcccucca

SEQ ID NO: 2094510 - RNA, 16 nt, Human
ucuacagaggccaugg

SEQ ID NO: 2094511 - RNA, 15 nt, Human
ucuacagaggccaug

SEQ ID NO: 2094512 - RNA, 16 nt, Human
ucuacagacuucucca

SEQ ID NO: 2094513 - RNA, 17 nt, Human
ucuacagacuucuccag

SEQ ID NO: 2094514 - RNA, 18 nt, Human
ucuacagacuucuccaga

SEQ ID NO: 2094515 - RNA, 19 nt, Human
ucuacaaguauucugccuu

SEQ ID NO: 2094516 - RNA, 15 nt, Human
ucuacaaucuauuua

SEQ ID NO: 2094517 - RNA, 16 nt, Human
ucuaccuugaggucuu

SEQ ID NO: 2094518 - RNA, 17 nt, Human
ucuaccuugaggucuuu

SEQ ID NO: 2094519 - RNA, 14 nt, Human
ucuaccuuuucucu

SEQ ID NO: 2094520 - RNA, 15 nt, Human
ucuacgcucuccuuu

SEQ ID NO: 2094521 - RNA, 16 nt, Human
ucuacgcucuccuuuc

SEQ ID NO: 2094522 - RNA, 17 nt, Human
ucuacgcucuccuuucu

SEQ ID NO: 2094523 - RNA, 19 nt, Human
ucuacuuacacaucuucca

SEQ ID NO: 2094524 - RNA, 20 nt, Human
ucuacuuacacaucuuccac

SEQ ID NO: 2094525 - RNA, 19 nt, Human
ucuacuucugcccuugcca

SEQ ID NO: 2094526 - RNA, 13 nt, Human
ucuaugggacuca

SEQ ID NO: 2094527 - RNA, 12 nt, Human
ucuaugggacuc

SEQ ID NO: 2094528 - RNA, 19 nt, Human
ucuaugggacucaaugcac

SEQ ID NO: 2094529 - RNA, 16 nt, Human
ucucauacucaccuca

SEQ ID NO: 2094530 - RNA, 18 nt, Human
ucucauacucaccucacc

SEQ ID NO: 2094531 - RNA, 13 nt, Human
ucucauagcauua

SEQ ID NO: 2094532 - RNA, 20 nt, Human
ucucauagcauuaacuaauc

SEQ ID NO: 2094533 - RNA, 24 nt, Human
ucucauagcauuaacuaaucuauu

SEQ ID NO: 2094534 - RNA, 13 nt, Human
ucucauccugcag

SEQ ID NO: 2094535 - RNA, 15 nt, Human
ucucauccugcaggc

SEQ ID NO: 2094536 - RNA, 17 nt, Human
ucucaucugugauuccc

SEQ ID NO: 2094537 - RNA, 13 nt, Human
ucucaucugugau

SEQ ID NO: 2094538 - RNA, 16 nt, Human
ucucauccuuuucucc

SEQ ID NO: 2094539 - RNA, 18 nt, Human
ucucauccuuuucuccua

SEQ ID NO: 2094540 - RNA, 21 nt, Human
ucucauccuuuucuccuaucu

SEQ ID NO: 2094541 - RNA, 16 nt, Human
ucuccacccugcucuc

SEQ ID NO: 2094542 - RNA, 14 nt, Human
ucuccacccugcuc

SEQ ID NO: 2094543 - RNA, 17 nt, Human
ucuccacccugcucucc

SEQ ID NO: 2094544 - RNA, 13 nt, Human
ucuccacccugcu

SEQ ID NO: 2094545 - RNA, 13 nt, Human
ucuccacuccaga

SEQ ID NO: 2094546 - RNA, 17 nt, Human
ucuccaccucagccuug

SEQ ID NO: 2094547 - RNA, 18 nt, Human
ucuccaccucagccuugg

SEQ ID NO: 2094548 - RNA, 19 nt, Human
ucuccaccucagccuugga

SEQ ID NO: 2094549 - RNA, 11 nt, Human
ucuccaccuca

SEQ ID NO: 2094550 - RNA, 12 nt, Human
ucuccaccucag

SEQ ID NO: 2094551 - RNA, 13 nt, Human
ucuccaccucagc

SEQ ID NO: 2094552 - RNA, 14 nt, Human
ucuccaccucagcc

SEQ ID NO: 2094553 - RNA, 15 nt, Human
ucuccaccucagccu

SEQ ID NO: 2094554 - RNA, 16 nt, Human
ucuccaccucagccuu

SEQ ID NO: 2094555 - RNA, 20 nt, Human
ucucccccugggcucugccc

SEQ ID NO: 2094556 - RNA, 11 nt, Human
ucuccaggcug

SEQ ID NO: 2094557 - RNA, 22 nt, Human
ucuccccaugugccugcaccag

SEQ ID NO: 2094558 - RNA, 18 nt, Human
ucucccucagucuggccc

SEQ ID NO: 2094559 - RNA, 23 nt, Human
ucucccucagucuggcccuuccu

SEQ ID NO: 2094560 - RNA, 12 nt, Human
ucuccccucugc

SEQ ID NO: 2094561 - RNA, 13 nt, Human
ucuccccucugcu

SEQ ID NO: 2094562 - RNA, 16 nt, Human
ucuccccucugcuggc

SEQ ID NO: 2094563 - RNA, 12 nt, Human
ucuccccucuua

SEQ ID NO: 2094564 - RNA, 15 nt, Human
ucuccccucuuaugu

SEQ ID NO: 2094565 - RNA, 12 nt, Human
ucucccuccccu

SEQ ID NO: 2094566 - RNA, 18 nt, Human
ucucccuccccugccauu

SEQ ID NO: 2094567 - RNA, 12 nt, Human
ucucccugccgc

SEQ ID NO: 2094568 - RNA, 13 nt, Human
ucucccugccgcc

SEQ ID NO: 2094569 - RNA, 14 nt, Human
ucucccugccgccu

SEQ ID NO: 2094570 - RNA, 15 nt, Human
ucucccugccgccuc

SEQ ID NO: 2094571 - RNA, 13 nt, Human
ucuccagcccacg

SEQ ID NO: 2094572 - RNA, 14 nt, Human
ucuccagcccacgu

SEQ ID NO: 2094573 - RNA, 14 nt, Human
ucuccacugccuuc

SEQ ID NO: 2094574 - RNA, 15 nt, Human
ucuccagacccccac

SEQ ID NO: 2094575 - RNA, 19 nt, Human
ucuccagacccccaccccu

SEQ ID NO: 2094576 - RNA, 20 nt, Human
ucuccagacccccaccccuu

SEQ ID NO: 2094577 - RNA, 23 nt, Human
uccugagccagugucaggaggaa

SEQ ID NO: 2094578 - RNA, 12 nt, Human
uccugagcuugg

SEQ ID NO: 2094579 - RNA, 15 nt, Human
uccugagcuuggcca

SEQ ID NO: 2094580 - RNA, 16 nt, Human
uccugagcuuggccag

SEQ ID NO: 2094581 - RNA, 19 nt, Human
uccugagcuuggccagaag

SEQ ID NO: 2094582 - RNA, 20 nt, Human
uccugagcuuggccagaagg

SEQ ID NO: 2094583 - RNA, 22 nt, Human
uccugagcuuggccagaagggg

SEQ ID NO: 2094584 - RNA, 22 nt, Human
uccugacggcgcccccagugug

SEQ ID NO: 2094585 - RNA, 20 nt, Human
uccucuuaaaaaauaaaaac

SEQ ID NO: 2094586 - RNA, 19 nt, Human
uccugacucaacauguuac

SEQ ID NO: 2094587 - RNA, 23 nt, Human
uccucuguccagggcccugagcu

SEQ ID NO: 2094588 - RNA, 14 nt, Human
uccucuguccaggg

SEQ ID NO: 2094589 - RNA, 16 nt, Human
uccucuguccagggcc

SEQ ID NO: 2094590 - RNA, 15 nt, Human
uccuccucccccaga

SEQ ID NO: 2094591 - RNA, 16 nt, Human
uccugcauuugugaaa

SEQ ID NO: 2094592 - RNA, 11 nt, Human
uccugccaaaa

SEQ ID NO: 2094593 - RNA, 13 nt, Human
uccugccaccugc

SEQ ID NO: 2094594 - RNA, 13 nt, Human
uccugccaggcau

SEQ ID NO: 2094595 - RNA, 14 nt, Human
uccugccaggcaug

SEQ ID NO: 2094596 - RNA, 18 nt, Human
uccugccaccuggggcag

SEQ ID NO: 2094597 - RNA, 20 nt, Human
uccugccaccuggggcaguc

SEQ ID NO: 2094598 - RNA, 12 nt, Human
uccugcccagga

SEQ ID NO: 2094599 - RNA, 13 nt, Human
uccugcccaggag

SEQ ID NO: 2094600 - RNA, 14 nt, Human
uccugcccaggaga

SEQ ID NO: 2094601 - RNA, 16 nt, Human
uccugcccaggagagc

SEQ ID NO: 2094602 - RNA, 18 nt, Human
uccugcccaggagagcca

SEQ ID NO: 2094603 - RNA, 19 nt, Human
uccugcccaggagagccag

SEQ ID NO: 2094604 - RNA, 22 nt, Human
uccugcccaggagagccagccc

SEQ ID NO: 2094605 - RNA, 23 nt, Human
uccugcccaggagagccagcccu

SEQ ID NO: 2094606 - RNA, 15 nt, Human
uccugcccccacacc

SEQ ID NO: 2094607 - RNA, 16 nt, Human
uccugcccccacaccu

SEQ ID NO: 2094608 - RNA, 19 nt, Human
uccugcccccacaccuggc

SEQ ID NO: 2094609 - RNA, 20 nt, Human
uccugcccccacaccuggcc

SEQ ID NO: 2094610 - RNA, 21 nt, Human
uccugcccccacaccuggccc

SEQ ID NO: 2094611 - RNA, 22 nt, Human
uccugcccccacaccuggcccu

SEQ ID NO: 2094612 - RNA, 23 nt, Human
uccugcccccacaccuggcccug

SEQ ID NO: 2094613 - RNA, 13 nt, Human
uccugcccagugu

SEQ ID NO: 2094614 - RNA, 14 nt, Human
uccugcccaguguu

SEQ ID NO: 2094615 - RNA, 17 nt, Human
uccugcccaguguuguu

SEQ ID NO: 2094616 - RNA, 19 nt, Human
uccugcccaguguuguuug

SEQ ID NO: 2094617 - RNA, 22 nt, Human
uccugcccaguguuguuuguaa

SEQ ID NO: 2094618 - RNA, 23 nt, Human
uccuggcacccggccccugcugg

SEQ ID NO: 2094619 - RNA, 12 nt, Human
uccuggccucaa

SEQ ID NO: 2094620 - RNA, 11 nt, Human
uccuguagccc

SEQ ID NO: 2094621 - RNA, 13 nt, Human
uccuguagcccua

SEQ ID NO: 2094622 - RNA, 20 nt, Human
uccuguagaccuagggagga

SEQ ID NO: 2094623 - RNA, 23 nt, Human
uccuguagaccuagggaggaccu

SEQ ID NO: 2094624 - RNA, 12 nt, Human
uccugucugcca

SEQ ID NO: 2094625 - RNA, 13 nt, Human
uccugucugccag

SEQ ID NO: 2094626 - RNA, 14 nt, Human
uccugucugccagc

SEQ ID NO: 2094627 - RNA, 16 nt, Human
uccugucugccagcca

SEQ ID NO: 2094628 - RNA, 11 nt, Human
uccugucuccc

SEQ ID NO: 2094629 - RNA, 12 nt, Human
uccugucucccc

SEQ ID NO: 2094630 - RNA, 13 nt, Human
uccugucuccccu

SEQ ID NO: 2094631 - RNA, 14 nt, Human
uccugucuccccuc

SEQ ID NO: 2094632 - RNA, 16 nt, Human
uccugucuccccucug

SEQ ID NO: 2094633 - RNA, 17 nt, Human
uccugucuccccucugc

SEQ ID NO: 2094634 - RNA, 18 nt, Human
uccugucuccccucugcu

SEQ ID NO: 2094635 - RNA, 19 nt, Human
uccugucuccccucugcug

SEQ ID NO: 2094636 - RNA, 14 nt, Human
uccuggacucauug

SEQ ID NO: 2094637 - RNA, 19 nt, Human
uccuggacucauugcuuca

SEQ ID NO: 2094638 - RNA, 14 nt, Human
uccuggagagucuc

SEQ ID NO: 2094639 - RNA, 18 nt, Human
uccuggagagucucacuc

SEQ ID NO: 2094640 - RNA, 19 nt, Human
uccuggagagucucacucc

SEQ ID NO: 2094641 - RNA, 13 nt, Human
uccuggagcccga

SEQ ID NO: 2094642 - RNA, 15 nt, Human
uccuggagcccgagg

SEQ ID NO: 2094643 - RNA, 20 nt, Human
uccuggagcccgaggcacca

SEQ ID NO: 2094644 - RNA, 21 nt, Human
uccuggagcccgaggcaccag

SEQ ID NO: 2094645 - RNA, 22 nt, Human
uccugccgcccgagguggcugc

SEQ ID NO: 2094646 - RNA, 23 nt, Human
uccugccgcccgagguggcugcc

SEQ ID NO: 2094647 - RNA, 20 nt, Human
uccuacaagagcagccugug

SEQ ID NO: 2094648 - RNA, 22 nt, Human
uccuacaagagcagccuguggc

SEQ ID NO: 2094649 - RNA, 23 nt, Human
uccuacaagagcagccuguggca

SEQ ID NO: 2094650 - RNA, 21 nt, Human
uccuaaggcacccacaaauaa

SEQ ID NO: 2094651 - RNA, 19 nt, Human
uccuacaagagcagccugu

SEQ ID NO: 2094652 - RNA, 23 nt, Human
uccuauauuguuuucaguguaca

SEQ ID NO: 2094653 - RNA, 20 nt, Human
uccuaucaagccaguacgug

SEQ ID NO: 2094654 - RNA, 14 nt, Human
uccuaucaccuccc

SEQ ID NO: 2094655 - RNA, 16 nt, Human
uccuaucaccuccccu

SEQ ID NO: 2094656 - RNA, 17 nt, Human
uccuaucaccuccccuc

SEQ ID NO: 2094657 - RNA, 19 nt, Human
uccuaucaccuccccuccu

SEQ ID NO: 2094658 - RNA, 15 nt, Human
uccuacaauauauau

SEQ ID NO: 2094659 - RNA, 19 nt, Human
uccucauuguaaacaaacu

SEQ ID NO: 2094660 - RNA, 14 nt, Human
uccucauuccugaa

SEQ ID NO: 2094661 - RNA, 19 nt, Human
uccucauuugggguagcua

SEQ ID NO: 2094662 - RNA, 22 nt, Human
uccucauuuuuauaaugucccu

SEQ ID NO: 2094663 - RNA, 21 nt, Human
uccucauuugggguagcuaga

SEQ ID NO: 2094664 - RNA, 23 nt, Human
uccucauuugggguagcuagagg

SEQ ID NO: 2094665 - RNA, 23 nt, Human
uccuccaaaggaagucuaggagc

SEQ ID NO: 2094666 - RNA, 17 nt, Human
uccuaucagaaguuucu

SEQ ID NO: 2094667 - RNA, 18 nt, Human
uccucauuagcauuuugc

SEQ ID NO: 2094668 - RNA, 13 nt, Human
uccuccagggcca

SEQ ID NO: 2094669 - RNA, 19 nt, Human
uccuccagggccacgugcc

SEQ ID NO: 2094670 - RNA, 20 nt, Human
uccuccagggccacgugcca

SEQ ID NO: 2094671 - RNA, 23 nt, Human
uccuccagggccacgugccaggc

SEQ ID NO: 2094672 - RNA, 21 nt, Human
uccuccagggaugaucaacag

SEQ ID NO: 2094673 - RNA, 12 nt, Human
uccucccaccuc

SEQ ID NO: 2094674 - RNA, 16 nt, Human
uccuccauacucagga

SEQ ID NO: 2094675 - RNA, 22 nt, Human
uccucccaaaaguaucgggggc

SEQ ID NO: 2094676 - RNA, 17 nt, Human
uccgccuucacuccggu

SEQ ID NO: 2094677 - RNA, 16 nt, Human
uccgcuuucuacccag

SEQ ID NO: 2094678 - RNA, 20 nt, Human
uccgcuuucuacccagcgag

SEQ ID NO: 2094679 - RNA, 18 nt, Human
uccgcuuucuacccagcg

SEQ ID NO: 2094680 - RNA, 20 nt, Human
uccuaagcuauucaguaaua

SEQ ID NO: 2094681 - RNA, 21 nt, Human
uccuaagcuauucaguaauaa

SEQ ID NO: 2094682 - RNA, 14 nt, Human
uccgccucuugggu

SEQ ID NO: 2094683 - RNA, 17 nt, Human
uccgccucugcuggcac

SEQ ID NO: 2094684 - RNA, 15 nt, Human
ucccuuccucuuucc

SEQ ID NO: 2094685 - RNA, 16 nt, Human
ucccuuccucuuucca

SEQ ID NO: 2094686 - RNA, 17 nt, Human
ucccuucccccauaagc

SEQ ID NO: 2094687 - RNA, 12 nt, Human
ucccuuccccuc

SEQ ID NO: 2094688 - RNA, 21 nt, Human
ucccuuccccucccuggcucc

SEQ ID NO: 2094689 - RNA, 20 nt, Human
ucccuuccccucccuggcuc

SEQ ID NO: 2094690 - RNA, 22 nt, Human
ucccuucaaccauuccccaugg

SEQ ID NO: 2094691 - RNA, 20 nt, Human
ucccuucacaaacccagugu

SEQ ID NO: 2094692 - RNA, 23 nt, Human
ucccccugggcucugccccagcu

SEQ ID NO: 2094693 - RNA, 12 nt, Human
uccccccacugc

SEQ ID NO: 2094694 - RNA, 13 nt, Human
uccccccacugca

SEQ ID NO: 2094695 - RNA, 18 nt, Human
uccccccacugcaggccc

SEQ ID NO: 2094696 - RNA, 19 nt, Human
uccccccacugcaggcccc

SEQ ID NO: 2094697 - RNA, 23 nt, Human
uccccccacugcaggccccgcuu

SEQ ID NO: 2094698 - RNA, 12 nt, Human
ucccccugggcu

SEQ ID NO: 2094699 - RNA, 14 nt, Human
ucccccugggcucu

SEQ ID NO: 2094700 - RNA, 15 nt, Human
ucccccugggcucug

SEQ ID NO: 2094701 - RNA, 20 nt, Human
ucccccugggcucugcccca

SEQ ID NO: 2094702 - RNA, 22 nt, Human
ucccccugggcucugccccagc

SEQ ID NO: 2094703 - RNA, 23 nt, Human
ucauuguuuauuaacaaauuaug

SEQ ID NO: 2094704 - RNA, 16 nt, Human
ucauuguuuggcauug

SEQ ID NO: 2094705 - RNA, 20 nt, Human
ucauuguaauguuacugauc

SEQ ID NO: 2094706 - RNA, 19 nt, Human
ucauuguaauguuacugau

SEQ ID NO: 2094707 - RNA, 14 nt, Human
ucauuguauaaaaa

SEQ ID NO: 2094708 - RNA, 15 nt, Human
ucauuguauaaaaau

SEQ ID NO: 2094709 - RNA, 16 nt, Human
ucauuguauaaaaaua

SEQ ID NO: 2094710 - RNA, 17 nt, Human
ucauuguauaaaaauag

SEQ ID NO: 2094711 - RNA, 18 nt, Human
ucaugguccccauggcau

SEQ ID NO: 2094712 - RNA, 15 nt, Human
ucauggugaggcuua

SEQ ID NO: 2094713 - RNA, 22 nt, Human
ucauggugaggcuuaacaaugu

SEQ ID NO: 2094714 - RNA, 23 nt, Human
ucaugguggguucaggggacuca

SEQ ID NO: 2094715 - RNA, 13 nt, Human
uccaaagagaaaa

SEQ ID NO: 2094716 - RNA, 21 nt, Human
uccaaaccuccuguuagcugu

SEQ ID NO: 2094717 - RNA, 19 nt, Human
ucauuucaaauacaucuuu

SEQ ID NO: 2094718 - RNA, 15 nt, Human
ucauuuaucccucaa

SEQ ID NO: 2094719 - RNA, 14 nt, Human
ucauuuaugaaaag

SEQ ID NO: 2094720 - RNA, 15 nt, Human
ucauuuaugaaaaga

SEQ ID NO: 2094721 - RNA, 11 nt, Human
ucauuuaugau

SEQ ID NO: 2094722 - RNA, 17 nt, Human
ucauuuaugauacaaaa

SEQ ID NO: 2094723 - RNA, 14 nt, Human
ucaucauuccuuga

SEQ ID NO: 2094724 - RNA, 17 nt, Human
ucaucauuccuugagaa

SEQ ID NO: 2094725 - RNA, 14 nt, Human
ucaucauccuaagc

SEQ ID NO: 2094726 - RNA, 18 nt, Human
ucauagcagauuuuaauu

SEQ ID NO: 2094727 - RNA, 14 nt, Human
ucauagauuucuga

SEQ ID NO: 2094728 - RNA, 16 nt, Human
ucauagauuucugauu

SEQ ID NO: 2094729 - RNA, 19 nt, Human
ucauagauuucugauuuua

SEQ ID NO: 2094730 - RNA, 23 nt, Human
ucauagauuucugauuuuaugua

SEQ ID NO: 2094731 - RNA, 12 nt, Human
ucauagaagaac

SEQ ID NO: 2094732 - RNA, 20 nt, Human
ucaguguacauggaauaaca

SEQ ID NO: 2094733 - RNA, 15 nt, Human
ucaguguagccccaa

SEQ ID NO: 2094734 - RNA, 19 nt, Human
ucaguguagccccaagaag

SEQ ID NO: 2094735 - RNA, 15 nt, Human
ucagugcagcccgug

SEQ ID NO: 2094736 - RNA, 17 nt, Human
ucauccacugugccaug

SEQ ID NO: 2094737 - RNA, 14 nt, Human
ucauccacugugcc

SEQ ID NO: 2094738 - RNA, 18 nt, Human
ucauccacugugccaugu

SEQ ID NO: 2094739 - RNA, 20 nt, Human
ucaucucaggccucccucaa

SEQ ID NO: 2094740 - RNA, 13 nt, Human
ucaucuccaucag

SEQ ID NO: 2094741 - RNA, 16 nt, Human
ucaucuugaccaagca

SEQ ID NO: 2094742 - RNA, 19 nt, Human
ucaucuugaccaagcagga

SEQ ID NO: 2094743 - RNA, 16 nt, Human
ucaucuccaucagcug

SEQ ID NO: 2094744 - RNA, 17 nt, Human
ucaucuccaucagcugu

SEQ ID NO: 2094745 - RNA, 21 nt, Human
ucaucuugaccaagcaggaag

SEQ ID NO: 2094746 - RNA, 22 nt, Human
ucaucuugaccaagcaggaagc

SEQ ID NO: 2094747 - RNA, 22 nt, Human
ucaucuugguacuacuagaugu

SEQ ID NO: 2094748 - RNA, 23 nt, Human
ucaucuugaccaagcaggaagcu

SEQ ID NO: 2094749 - RNA, 22 nt, Human
ucauggguuauguguaugugcc

SEQ ID NO: 2094750 - RNA, 17 nt, Human
ucauggguuauguguau

SEQ ID NO: 2094751 - RNA, 17 nt, Human
ucaugggccccucugac

SEQ ID NO: 2094752 - RNA, 13 nt, Human
ucauggaaauauu

SEQ ID NO: 2094753 - RNA, 15 nt, Human
ucauggaaauauuau

SEQ ID NO: 2094754 - RNA, 19 nt, Human
ucauggaaauauuaugcaa

SEQ ID NO: 2094755 - RNA, 18 nt, Human
ucaggccuauaaccccag

SEQ ID NO: 2094756 - RNA, 22 nt, Human
ucaggccuauaaccccagcucc

SEQ ID NO: 2094757 - RNA, 15 nt, Human
ucaggcucuucuccu

SEQ ID NO: 2094758 - RNA, 21 nt, Human
ucaggcgauccaccugucuca

SEQ ID NO: 2094759 - RNA, 20 nt, Human
ucaggcgauccaccugucuc

SEQ ID NO: 2094760 - RNA, 17 nt, Human
ucaggccucccucucuc

SEQ ID NO: 2094761 - RNA, 18 nt, Human
ucaggccucccucucucu

SEQ ID NO: 2094762 - RNA, 20 nt, Human
ucaggaucaaaccccgacca

SEQ ID NO: 2094763 - RNA, 18 nt, Human
ucaggauacucugucaga

SEQ ID NO: 2094764 - RNA, 12 nt, Human
ucaggaguuccu

SEQ ID NO: 2094765 - RNA, 20 nt, Human
ucaggaguuagaggccagcc

SEQ ID NO: 2094766 - RNA, 22 nt, Human
ucaggaguuagaggccagccug

SEQ ID NO: 2094767 - RNA, 17 nt, Human
ucaggaguuagaggcca

SEQ ID NO: 2094768 - RNA, 19 nt, Human
ucaggaguuagaggccagc

SEQ ID NO: 2094769 - RNA, 20 nt, Human
ucaggauacucugucagaug

SEQ ID NO: 2094770 - RNA, 16 nt, Human
ucaggaucaagaaagu

SEQ ID NO: 2094771 - RNA, 17 nt, Human
ucaggaucaagaaagug

SEQ ID NO: 2094772 - RNA, 20 nt, Human
ucaggaugauacacuaugaa

SEQ ID NO: 2094773 - RNA, 16 nt, Human
ucaggaaggaugagca

SEQ ID NO: 2094774 - RNA, 17 nt, Human
ucaggaaggaugagcau

SEQ ID NO: 2094775 - RNA, 18 nt, Human
ucaggaaggaugagcauu

SEQ ID NO: 2094776 - RNA, 20 nt, Human
ucaggaaggaugagcauuua

SEQ ID NO: 2094777 - RNA, 12 nt, Human
ucaggacacuaa

SEQ ID NO: 2094778 - RNA, 13 nt, Human
ucaggacacuaau

SEQ ID NO: 2094779 - RNA, 13 nt, Human
ucagcuccagcug

SEQ ID NO: 2094780 - RNA, 19 nt, Human
ucaccuaagucucugugaa

SEQ ID NO: 2094781 - RNA, 14 nt, Human
ucaccuaauguuua

SEQ ID NO: 2094782 - RNA, 21 nt, Human
ucaccuaauguuuaugagcca

SEQ ID NO: 2094783 - RNA, 22 nt, Human
ucaccuaauguuuaugagccag

SEQ ID NO: 2094784 - RNA, 24 nt, Human
ucagcuccagcucaccagccccag

SEQ ID NO: 2094785 - RNA, 23 nt, Human
ucagcuccagcucaccagcccca

SEQ ID NO: 2094786 - RNA, 17 nt, Human
ucaccuaagucucugug

SEQ ID NO: 2094787 - RNA, 23 nt, Human
ucaccggagcuuucaaagaagga

SEQ ID NO: 2094788 - RNA, 15 nt, Human
ucaccggauccuggg

SEQ ID NO: 2094789 - RNA, 14 nt, Human
ucaccggagcuuuc

SEQ ID NO: 2094790 - RNA, 23 nt, Human
ucagcucugcaagaauugaagca

SEQ ID NO: 2094791 - RNA, 23 nt, Human
ucagcuguaagaagagacuggga

SEQ ID NO: 2094792 - RNA, 22 nt, Human
ucagcucuucuccauccuacca

SEQ ID NO: 2094793 - RNA, 14 nt, Human
ucagcucuggcuca

SEQ ID NO: 2094794 - RNA, 16 nt, Human
ucagcucuggcucaca

SEQ ID NO: 2094795 - RNA, 17 nt, Human
ucagcucuggcucacag

SEQ ID NO: 2094796 - RNA, 20 nt, Human
ucagcucuggcucacagacu

SEQ ID NO: 2094797 - RNA, 18 nt, Human
ucagcuuaggggcugcug

SEQ ID NO: 2094798 - RNA, 15 nt, Human
ucagcuguuugucau

SEQ ID NO: 2094799 - RNA, 16 nt, Human
ucagcuguuugucaua

SEQ ID NO: 2094800 - RNA, 20 nt, Human
ucagguggggcagcuugagg

SEQ ID NO: 2094801 - RNA, 14 nt, Human
ucagucucaggagc

SEQ ID NO: 2094802 - RNA, 15 nt, Human
ucaguccuuugauca

SEQ ID NO: 2094803 - RNA, 12 nt, Human
ucagucuuuucc

SEQ ID NO: 2094804 - RNA, 11 nt, Human
ucagugacaga

SEQ ID NO: 2094805 - RNA, 15 nt, Human
ucagugacagaguuc

SEQ ID NO: 2094806 - RNA, 19 nt, Human
ucagugacagaguucacua

SEQ ID NO: 2094807 - RNA, 14 nt, Human
ucagugaggcccag

SEQ ID NO: 2094808 - RNA, 17 nt, Human
ucagugaggcccaggga

SEQ ID NO: 2094809 - RNA, 18 nt, Human
ucagugaggcccagggag

SEQ ID NO: 2094810 - RNA, 19 nt, Human
ucagugauguaccaugaaa

SEQ ID NO: 2094811 - RNA, 14 nt, Human
ucagugcaaagauu

SEQ ID NO: 2094812 - RNA, 23 nt, Human
ucagugcagcccguguggccccu

SEQ ID NO: 2094813 - RNA, 23 nt, Human
ucagucugauucccaagcucugc

SEQ ID NO: 2094814 - RNA, 22 nt, Human
ucagucugauucccaagcucug

SEQ ID NO: 2094815 - RNA, 21 nt, Human
ucagucugauucccaagcucu

SEQ ID NO: 2094816 - RNA, 19 nt, Human
ucagguggggcagcuugag

SEQ ID NO: 2094817 - RNA, 18 nt, Human
ucagguggggcagcuuga

SEQ ID NO: 2094818 - RNA, 23 nt, Human
ucaggugauccacccaccucagc

SEQ ID NO: 2094819 - RNA, 18 nt, Human
ucaggucagggugaggau

SEQ ID NO: 2094820 - RNA, 12 nt, Human
ucaggucccugc

SEQ ID NO: 2094821 - RNA, 15 nt, Human
ucaggucagggugag

SEQ ID NO: 2094822 - RNA, 16 nt, Human
ucaggugauccaccca

SEQ ID NO: 2094823 - RNA, 23 nt, Human
ucaggugagaagcagaggaagga

SEQ ID NO: 2094824 - RNA, 14 nt, Human
ucagggaagcccag

SEQ ID NO: 2094825 - RNA, 15 nt, Human
ucagggaagcccagc

SEQ ID NO: 2094826 - RNA, 16 nt, Human
ucagggaagcccagcu

SEQ ID NO: 2094827 - RNA, 17 nt, Human
ucagggaagcccagcuc

SEQ ID NO: 2094828 - RNA, 19 nt, Human
ucagggaagcccagcucca

SEQ ID NO: 2094829 - RNA, 20 nt, Human
ucagggaagcccagcuccag

SEQ ID NO: 2094830 - RNA, 21 nt, Human
ucagggaagcccagcuccagg

SEQ ID NO: 2094831 - RNA, 15 nt, Human
ucaggcugcuggagg

SEQ ID NO: 2094832 - RNA, 16 nt, Human
ucaggcugcuggagga

SEQ ID NO: 2094833 - RNA, 17 nt, Human
ucaggcugcuggaggaa

SEQ ID NO: 2094834 - RNA, 19 nt, Human
ucaggcugcuggaggaaaa

SEQ ID NO: 2094835 - RNA, 21 nt, Human
ucaggcucuucuccuuucaca

SEQ ID NO: 2094836 - RNA, 16 nt, Human
ucaggcucuucuccuu

SEQ ID NO: 2094837 - RNA, 12 nt, Human
ucagggaccccu

SEQ ID NO: 2094838 - RNA, 14 nt, Human
ucagggaccccugc

SEQ ID NO: 2094839 - RNA, 17 nt, Human
ucagggaccccugcccu

SEQ ID NO: 2094840 - RNA, 16 nt, Human
ucaggucaggaguucg

SEQ ID NO: 2094841 - RNA, 16 nt, Human
ucagggaccccugccc

SEQ ID NO: 2094842 - RNA, 22 nt, Human
ucagggaauuucaggaacuaga

SEQ ID NO: 2094843 - RNA, 18 nt, Human
ucagggacagagacaccu

SEQ ID NO: 2094844 - RNA, 21 nt, Human
ucagggacagagacaccugca

SEQ ID NO: 2094845 - RNA, 23 nt, Human
ucagggacagagacaccugcacc

SEQ ID NO: 2094846 - RNA, 14 nt, Human
ucagggaccaagga

SEQ ID NO: 2094847 - RNA, 15 nt, Human
ucagggaccaaggac

SEQ ID NO: 2094848 - RNA, 20 nt, Human
ucagggaccaaggaccccuc

SEQ ID NO: 2094849 - RNA, 23 nt, Human
ucagggaccaaggaccccucacc

SEQ ID NO: 2094850 - RNA, 15 nt, Human
ucccaggccaggcuc

SEQ ID NO: 2094851 - RNA, 21 nt, Human
ucccaggccaggcuccuuccu

SEQ ID NO: 2094852 - RNA, 22 nt, Human
ucccagcugugcucuggacagg

SEQ ID NO: 2094853 - RNA, 21 nt, Human
ucccagcugugcucuggacag

SEQ ID NO: 2094854 - RNA, 23 nt, Human
ucccagcugugcucuggacaggc

SEQ ID NO: 2094855 - RNA, 19 nt, Human
ucccaugagccucagcauc

SEQ ID NO: 2094856 - RNA, 18 nt, Human
ucccaugagccucagcau

SEQ ID NO: 2094857 - RNA, 19 nt, Human
ucccaucuuaacucuuugc

SEQ ID NO: 2094858 - RNA, 21 nt, Human
ucccaucuuaacucuuugccu

SEQ ID NO: 2094859 - RNA, 16 nt, Human
ucccaggcgccccuuc

SEQ ID NO: 2094860 - RNA, 15 nt, Human
ucccaucuuccaagg

SEQ ID NO: 2094861 - RNA, 18 nt, Human
ucccaccuuggcugcagg

SEQ ID NO: 2094862 - RNA, 20 nt, Human
ucccagcugugcucuggaca

SEQ ID NO: 2094863 - RNA, 17 nt, Human
ucccaccuuggcugcag

SEQ ID NO: 2094864 - RNA, 16 nt, Human
ucccaccuuggcugca

SEQ ID NO: 2094865 - RNA, 13 nt, Human
ucccaccuuggcu

SEQ ID NO: 2094866 - RNA, 15 nt, Human
uccauuauuuauauu

SEQ ID NO: 2094867 - RNA, 14 nt, Human
uccauuccacaucc

SEQ ID NO: 2094868 - RNA, 17 nt, Human
uccauguguggacucaa

SEQ ID NO: 2094869 - RNA, 11 nt, Human
uccaugugugu

SEQ ID NO: 2094870 - RNA, 13 nt, Human
uccaugugugugc

SEQ ID NO: 2094871 - RNA, 14 nt, Human
uccaugugugugca

SEQ ID NO: 2094872 - RNA, 18 nt, Human
uccaugugugugcaagug

SEQ ID NO: 2094873 - RNA, 18 nt, Human
uccauguuaguuuuuacu

SEQ ID NO: 2094874 - RNA, 19 nt, Human
uccauguuaguuuuuacuu

SEQ ID NO: 2094875 - RNA, 16 nt, Human
uccaugugcccaguua

SEQ ID NO: 2094876 - RNA, 20 nt, Human
uccaugugggcuaguugggc

SEQ ID NO: 2094877 - RNA, 15 nt, Human
uccauuaugauucuu

SEQ ID NO: 2094878 - RNA, 11 nt, Human
uccauuauuua

SEQ ID NO: 2094879 - RNA, 12 nt, Human
uccauuauuuau

SEQ ID NO: 2094880 - RNA, 14 nt, Human
uccauuauuuauau

SEQ ID NO: 2094881 - RNA, 22 nt, Human
uccauuaacuuagcauguguug

SEQ ID NO: 2094882 - RNA, 20 nt, Human
uccauuaacuuagcaugugu

SEQ ID NO: 2094883 - RNA, 18 nt, Human
uccccagauugcaacagg

SEQ ID NO: 2094884 - RNA, 13 nt, Human
uccccagauugca

SEQ ID NO: 2094885 - RNA, 20 nt, Human
ucccaugagccucagcaucc

SEQ ID NO: 2094886 - RNA, 22 nt, Human
uccccagcaagugagagcuggg

SEQ ID NO: 2094887 - RNA, 10 nt, Human
uccccagcag

SEQ ID NO: 2094888 - RNA, 21 nt, Human
uccccagcaagugagagcugg

SEQ ID NO: 2094889 - RNA, 20 nt, Human
uccccagcaagugagagcug

SEQ ID NO: 2094890 - RNA, 23 nt, Human
uccccagauugcaacaggcuggg

SEQ ID NO: 2094891 - RNA, 22 nt, Human
uccccagauugcaacaggcugg

SEQ ID NO: 2094892 - RNA, 20 nt, Human
uccccagauugcaacaggcu

SEQ ID NO: 2094893 - RNA, 19 nt, Human
uccccagauugcaacaggc

SEQ ID NO: 2094894 - RNA, 12 nt, Human
uccccccacucu

SEQ ID NO: 2094895 - RNA, 21 nt, Human
uccccccacucuccccacacu

SEQ ID NO: 2094896 - RNA, 12 nt, Human
uccccagccucu

SEQ ID NO: 2094897 - RNA, 13 nt, Human
uccccagcccacu

SEQ ID NO: 2094898 - RNA, 14 nt, Human
uccccagcccacug

SEQ ID NO: 2094899 - RNA, 19 nt, Human
uccccagcccacuggauca

SEQ ID NO: 2094900 - RNA, 14 nt, Human
uccccagcccaggg

SEQ ID NO: 2094901 - RNA, 15 nt, Human
uccccagcccagggu

SEQ ID NO: 2094902 - RNA, 22 nt, Human
uccccagcccaggguuccccca

SEQ ID NO: 2094903 - RNA, 23 nt, Human
uccccagcccaggguucccccag

SEQ ID NO: 2094904 - RNA, 15 nt, Human
uccccagcccuaaga

SEQ ID NO: 2094905 - RNA, 15 nt, Human
uccccagcagguggg

SEQ ID NO: 2094906 - RNA, 19 nt, Human
uccccagcagguggggagg

SEQ ID NO: 2094907 - RNA, 12 nt, Human
uccccagcccag

SEQ ID NO: 2094908 - RNA, 13 nt, Human
uccaguucccacu

SEQ ID NO: 2094909 - RNA, 22 nt, Human
uccauaaucuggacuccucugu

SEQ ID NO: 2094910 - RNA, 16 nt, Human
uccauaaggaauguag

SEQ ID NO: 2094911 - RNA, 20 nt, Human
uccagguuuaagcuguuacu

SEQ ID NO: 2094912 - RNA, 14 nt, Human
uccaggucgggcuc

SEQ ID NO: 2094913 - RNA, 16 nt, Human
uccaggucgggcucag

SEQ ID NO: 2094914 - RNA, 18 nt, Human
uccaggucgggcucagcu

SEQ ID NO: 2094915 - RNA, 19 nt, Human
uccaggucgggcucagcuc

SEQ ID NO: 2094916 - RNA, 20 nt, Human
uccaggucgggcucagcucu

SEQ ID NO: 2094917 - RNA, 22 nt, Human
uccaggucgggcucagcucugg

SEQ ID NO: 2094918 - RNA, 15 nt, Human
uccaugcugccucca

SEQ ID NO: 2094919 - RNA, 14 nt, Human
uccaugcugccucc

SEQ ID NO: 2094920 - RNA, 17 nt, Human
uccaugcuauaaaaacu

SEQ ID NO: 2094921 - RNA, 12 nt, Human
uccaguuuguuu

SEQ ID NO: 2094922 - RNA, 14 nt, Human
uccaucaggccacu

SEQ ID NO: 2094923 - RNA, 22 nt, Human
uccaucagcuuaggggcugcug

SEQ ID NO: 2094924 - RNA, 21 nt, Human
uccauaaucuggacuccucug

SEQ ID NO: 2094925 - RNA, 13 nt, Human
uccauacucagga

SEQ ID NO: 2094926 - RNA, 15 nt, Human
uccagcaauugugug

SEQ ID NO: 2094927 - RNA, 11 nt, Human
uccagaaagaa

SEQ ID NO: 2094928 - RNA, 14 nt, Human
uccagaaaggauau

SEQ ID NO: 2094929 - RNA, 17 nt, Human
uccagaaaggauauuua

SEQ ID NO: 2094930 - RNA, 18 nt, Human
uccagaaaggauauuuaa

SEQ ID NO: 2094931 - RNA, 19 nt, Human
uccagaaaggauauuuaag

SEQ ID NO: 2094932 - RNA, 22 nt, Human
uccagaaaggauauuuaagaaa

SEQ ID NO: 2094933 - RNA, 23 nt, Human
uccagaaaggauauuuaagaaaa

SEQ ID NO: 2094934 - RNA, 18 nt, Human
uccagaaaaccccagcau

SEQ ID NO: 2094935 - RNA, 12 nt, Human
ucuuguguuucu

SEQ ID NO: 2094936 - RNA, 13 nt, Human
ucuuguguuggcu

SEQ ID NO: 2094937 - RNA, 14 nt, Human
ucuuguuuucaguu

SEQ ID NO: 2094938 - RNA, 21 nt, Human
ucuuguugcucaaaaaaugag

SEQ ID NO: 2094939 - RNA, 13 nt, Human
ucuuguuaauauu

SEQ ID NO: 2094940 - RNA, 17 nt, Human
ucuuguuaauauucuuu

SEQ ID NO: 2094941 - RNA, 20 nt, Human
ucuuguuaauauucuuucaa

SEQ ID NO: 2094942 - RNA, 21 nt, Human
ucuuguuaauauucuuucaau

SEQ ID NO: 2094943 - RNA, 13 nt, Human
ucuuguucuguuu

SEQ ID NO: 2094944 - RNA, 16 nt, Human
ucuuguucuguuuugu

SEQ ID NO: 2094945 - RNA, 22 nt, Human
ucuuguugcucaaaaaaugagc

SEQ ID NO: 2094946 - RNA, 22 nt, Human
ucuuguuuuuccacuacugcua

SEQ ID NO: 2094947 - RNA, 21 nt, Human
ucuuguuuuuccacuacugcu

SEQ ID NO: 2094948 - RNA, 13 nt, Human
ucuuguuuuucca

SEQ ID NO: 2094949 - RNA, 20 nt, Human
ucuuguuuuuccacuacugc

SEQ ID NO: 2094950 - RNA, 18 nt, Human
ucuuucaaauugagagaa

SEQ ID NO: 2094951 - RNA, 19 nt, Human
ucuuucaaauugagagaau

SEQ ID NO: 2094952 - RNA, 22 nt, Human
ucuuucaaauugagagaaugga

SEQ ID NO: 2094953 - RNA, 20 nt, Human
ucuuucaaagguagccauca

SEQ ID NO: 2094954 - RNA, 22 nt, Human
ucuuucaaagguagccaucaug

SEQ ID NO: 2094955 - RNA, 16 nt, Human
ucuuucaagugaaucu

SEQ ID NO: 2094956 - RNA, 19 nt, Human
ucuuucaagugaaucuaaa

SEQ ID NO: 2094957 - RNA, 20 nt, Human
ucuuucaagugaaucuaaaa

SEQ ID NO: 2094958 - RNA, 19 nt, Human
ucuuucacccacagaaaga

SEQ ID NO: 2094959 - RNA, 20 nt, Human
ucuuucacccacagaaagag

SEQ ID NO: 2094960 - RNA, 23 nt, Human
ucuuucacccacagaaagagagc

SEQ ID NO: 2094961 - RNA, 13 nt, Human
ucuugcagugauu

SEQ ID NO: 2094962 - RNA, 14 nt, Human
ucuugcagugauua

SEQ ID NO: 2094963 - RNA, 22 nt, Human
ucuugcugguugucauuuuugc

SEQ ID NO: 2094964 - RNA, 13 nt, Human
ucuugcugugguc

SEQ ID NO: 2094965 - RNA, 14 nt, Human
ucuugcuguggucu

SEQ ID NO: 2094966 - RNA, 16 nt, Human
ucuccucuugccacug

SEQ ID NO: 2094967 - RNA, 13 nt, Human
ucuccucuugcca

SEQ ID NO: 2094968 - RNA, 13 nt, Human
ucucccuggcccu

SEQ ID NO: 2094969 - RNA, 12 nt, Human
ucuccucuuaaa

SEQ ID NO: 2094970 - RNA, 14 nt, Human
ucuccucuuaaaaa

SEQ ID NO: 2094971 - RNA, 17 nt, Human
ucuccucuugccacugc

SEQ ID NO: 2094972 - RNA, 22 nt, Human
ucuccucuuaaaaaauaaaaac

SEQ ID NO: 2094973 - RNA, 23 nt, Human
ucuccucuuaaaaaauaaaaacu

SEQ ID NO: 2094974 - RNA, 23 nt, Human
ucuugcaauggcagccuuggcaa

SEQ ID NO: 2094975 - RNA, 18 nt, Human
ucuugcagagaagccuug

SEQ ID NO: 2094976 - RNA, 14 nt, Human
ucuuugaaacaacu

SEQ ID NO: 2094977 - RNA, 16 nt, Human
ucuuugaaacaacuuu

SEQ ID NO: 2094978 - RNA, 22 nt, Human
ucuuugaaagaaggaagacuuu

SEQ ID NO: 2094979 - RNA, 21 nt, Human
ucuuugaaauagucuguguga

SEQ ID NO: 2094980 - RNA, 22 nt, Human
ucuuugaaauagucugugugaa

SEQ ID NO: 2094981 - RNA, 20 nt, Human
ucuuugauaaagaaaagaau

SEQ ID NO: 2094982 - RNA, 20 nt, Human
ucuuugauacuuguucaaaa

SEQ ID NO: 2094983 - RNA, 17 nt, Human
ucuuuggacacucacac

SEQ ID NO: 2094984 - RNA, 18 nt, Human
ucuuuuaguuuuaguugc

SEQ ID NO: 2094985 - RNA, 22 nt, Human
ucuuuuauaacuaguccuuuac

SEQ ID NO: 2094986 - RNA, 18 nt, Human
ucuuuuagucauuuugcu

SEQ ID NO: 2094987 - RNA, 16 nt, Human
ucuuuuaguuuuaguu

SEQ ID NO: 2094988 - RNA, 22 nt, Human
ucuuuuauaaaaaaaaugaaau

SEQ ID NO: 2094989 - RNA, 24 nt, Human
ucuuuuauaaaaaaaaugaaaugu

SEQ ID NO: 2094990 - RNA, 19 nt, Human
ucuuuuauaacuaguccuu

SEQ ID NO: 2094991 - RNA, 18 nt, Human
ucuuucuuuggugccuuu

SEQ ID NO: 2094992 - RNA, 19 nt, Human
ucuuucuuuggugccuuuc

SEQ ID NO: 2094993 - RNA, 21 nt, Human
ucuuucuuuggugccuuuccu

SEQ ID NO: 2094994 - RNA, 19 nt, Human
ucuuuccauuaugauucuu

SEQ ID NO: 2094995 - RNA, 14 nt, Human
ucuuucagaaaaca

SEQ ID NO: 2094996 - RNA, 15 nt, Human
ucuuucagaaaacag

SEQ ID NO: 2094997 - RNA, 16 nt, Human
ucuuucagaaaacaga

SEQ ID NO: 2094998 - RNA, 20 nt, Human
ucuuucagaaaacagaaaaa

SEQ ID NO: 2094999 - RNA, 18 nt, Human
ugaacauugcaauagaaa

SEQ ID NO: 2095000 - RNA, 19 nt, Human
ugaacauuuggguaaauca

SEQ ID NO: 2095001 - RNA, 19 nt, Human
ugaaccacaucuugcucug

SEQ ID NO: 2095002 - RNA, 16 nt, Human
ugaacuccuggccuca

SEQ ID NO: 2095003 - RNA, 20 nt, Human
ugaaccaccacacccagccc

SEQ ID NO: 2095004 - RNA, 17 nt, Human
ugaaccaccacacccag

SEQ ID NO: 2095005 - RNA, 23 nt, Human
ugaaccacaucuugcucugcuga

SEQ ID NO: 2095006 - RNA, 19 nt, Human
ugaacaaguuguuucauug

SEQ ID NO: 2095007 - RNA, 20 nt, Human
ugaacaaguuguuucauuga

SEQ ID NO: 2095008 - RNA, 22 nt, Human
ugaacaaguuguuucauugacu

SEQ ID NO: 2095009 - RNA, 16 nt, Human
ugaacaagugaacaca

SEQ ID NO: 2095010 - RNA, 20 nt, Human
ugaaauuacuacaaaauuug

SEQ ID NO: 2095011 - RNA, 23 nt, Human
ugaaauuacuacaaaauuugaaa

SEQ ID NO: 2095012 - RNA, 23 nt, Human
ugaaauuagggcccaauuaauaa

SEQ ID NO: 2095013 - RNA, 22 nt, Human
ugaaauuaaccauagauguaga

SEQ ID NO: 2095014 - RNA, 18 nt, Human
ugaaauguuuuaaggcuu

SEQ ID NO: 2095015 - RNA, 18 nt, Human
ugaaauuaaccauagaug

SEQ ID NO: 2095016 - RNA, 16 nt, Human
ugaaauggagguccuu

SEQ ID NO: 2095017 - RNA, 19 nt, Human
ugaaacacaccaggcugug

SEQ ID NO: 2095018 - RNA, 22 nt, Human
ugaaacacaccaggcugugggc

SEQ ID NO: 2095019 - RNA, 14 nt, Human
ugaaacauuuuguc

SEQ ID NO: 2095020 - RNA, 19 nt, Human
ugaaacaacuuucucuugu

SEQ ID NO: 2095021 - RNA, 16 nt, Human
ugaaacacaccaggcu

SEQ ID NO: 2095022 - RNA, 17 nt, Human
ugaaacacaccaggcug

SEQ ID NO: 2095023 - RNA, 18 nt, Human
ugaaacacaccaggcugu

SEQ ID NO: 2095024 - RNA, 14 nt, Human
ugaaacaaagcugc

SEQ ID NO: 2095025 - RNA, 15 nt, Human
ugaaaagccauguuu

SEQ ID NO: 2095026 - RNA, 16 nt, Human
ugaaaagccauguuua

SEQ ID NO: 2095027 - RNA, 17 nt, Human
ugaaaagccauguuuaa

SEQ ID NO: 2095028 - RNA, 19 nt, Human
ugaaaagccauguuuaaga

SEQ ID NO: 2095029 - RNA, 20 nt, Human
ugaaaagccauguuuaagau

SEQ ID NO: 2095030 - RNA, 22 nt, Human
ugaaaagccauguuuaagauuu

SEQ ID NO: 2095031 - RNA, 23 nt, Human
ugaaaagccauguuuaagauuua

SEQ ID NO: 2095032 - RNA, 16 nt, Human
ugaaaagauguugugu

SEQ ID NO: 2095033 - RNA, 17 nt, Human
ugaaaggcauucucuga

SEQ ID NO: 2095034 - RNA, 19 nt, Human
ugaaaggcauucucugaag

SEQ ID NO: 2095035 - RNA, 13 nt, Human
ugaaagcuagaga

SEQ ID NO: 2095036 - RNA, 18 nt, Human
ugaaagcugauuacuguc

SEQ ID NO: 2095037 - RNA, 21 nt, Human
ugaaagcugauuacugucaau

SEQ ID NO: 2095038 - RNA, 22 nt, Human
ugaaagcugauuacugucaaua

SEQ ID NO: 2095039 - RNA, 13 nt, Human
ugaaagggcccag

SEQ ID NO: 2095040 - RNA, 19 nt, Human
ugaaagguuacccuguaac

SEQ ID NO: 2095041 - RNA, 20 nt, Human
ugaaagggagcuaucaggaa

SEQ ID NO: 2095042 - RNA, 22 nt, Human
ugaaagggagcuaucaggaaca

SEQ ID NO: 2095043 - RNA, 16 nt, Human
ugaaagaguuaagaau

SEQ ID NO: 2095044 - RNA, 19 nt, Human
ugaaagaguuaagaauguc

SEQ ID NO: 2095045 - RNA, 18 nt, Human
ugaaagauggcugugccu

SEQ ID NO: 2095046 - RNA, 23 nt, Human
ugaaagccagcugccgaccagag

SEQ ID NO: 2095047 - RNA, 15 nt, Human
ugaaagcauccaugu

SEQ ID NO: 2095048 - RNA, 17 nt, Human
ugaaagcauccaugugu

SEQ ID NO: 2095049 - RNA, 19 nt, Human
ugaaagauggcugugccuc

SEQ ID NO: 2095050 - RNA, 18 nt, Human
ugaaagcccugagcuuuc

SEQ ID NO: 2095051 - RNA, 14 nt, Human
ugaauccaugcuug

SEQ ID NO: 2095052 - RNA, 17 nt, Human
ugaauccaugcuugggu

SEQ ID NO: 2095053 - RNA, 11 nt, Human
ugaaugaaaaa

SEQ ID NO: 2095054 - RNA, 16 nt, Human
ugaaugaaaaauuuaa

SEQ ID NO: 2095055 - RNA, 17 nt, Human
ugaaugaaaaauuuaag

SEQ ID NO: 2095056 - RNA, 18 nt, Human
ugaaugaaaaauuuaagc

SEQ ID NO: 2095057 - RNA, 19 nt, Human
ugaaugaaaaauuuaagca

SEQ ID NO: 2095058 - RNA, 20 nt, Human
ugaaugaaaaauuuaagcau

SEQ ID NO: 2095059 - RNA, 21 nt, Human
ugaaugaaaaauuuaagcauu

SEQ ID NO: 2095060 - RNA, 22 nt, Human
ugaaugaaaaauuuaagcauug

SEQ ID NO: 2095061 - RNA, 15 nt, Human
ugaauaaagacaccu

SEQ ID NO: 2095062 - RNA, 14 nt, Human
ugaauaaagacacc

SEQ ID NO: 2095063 - RNA, 17 nt, Human
ugaaugaggucccaggc

SEQ ID NO: 2095064 - RNA, 18 nt, Human
ugaaugaggucccaggca

SEQ ID NO: 2095065 - RNA, 19 nt, Human
ugaaugaggucccaggcag

SEQ ID NO: 2095066 - RNA, 20 nt, Human
ugaaugaaagucuugugacu

SEQ ID NO: 2095067 - RNA, 23 nt, Human
ugaaugaaagucuugugacuagu

SEQ ID NO: 2095068 - RNA, 14 nt, Human
ugaaugaaauauca

SEQ ID NO: 2095069 - RNA, 21 nt, Human
ugaaugaaagucuugugacua

SEQ ID NO: 2095070 - RNA, 14 nt, Human
ugaaugaacaaccu

SEQ ID NO: 2095071 - RNA, 22 nt, Human
ugaaugaggucccaggcagaga

SEQ ID NO: 2095072 - RNA, 15 nt, Human
ugaaugaucucucug

SEQ ID NO: 2095073 - RNA, 18 nt, Human
ugaaugaucucucugaau

SEQ ID NO: 2095074 - RNA, 12 nt, Human
ugaauguucuga

SEQ ID NO: 2095075 - RNA, 21 nt, Human
ugaauguucugacauuaacag

SEQ ID NO: 2095076 - RNA, 14 nt, Human
ugaauguucugaca

SEQ ID NO: 2095077 - RNA, 15 nt, Human
ugaauguucugacau

SEQ ID NO: 2095078 - RNA, 16 nt, Human
ugaauguucugacauu

SEQ ID NO: 2095079 - RNA, 17 nt, Human
ugaauguucugacauua

SEQ ID NO: 2095080 - RNA, 18 nt, Human
ugaauguucugacauuaa

SEQ ID NO: 2095081 - RNA, 20 nt, Human
ugaauguucugacauuaaca

SEQ ID NO: 2095082 - RNA, 23 nt, Human
ugaauguucugacauuaacaguu

SEQ ID NO: 2095083 - RNA, 20 nt, Human
ugaauuaucccuuuucuuga

SEQ ID NO: 2095084 - RNA, 13 nt, Human
ugaauugauaaua

SEQ ID NO: 2095085 - RNA, 15 nt, Human
ugaauugauaauaaa

SEQ ID NO: 2095086 - RNA, 16 nt, Human
ugaauugauaauaaac

SEQ ID NO: 2095087 - RNA, 17 nt, Human
ugaauugauaauaaacu

SEQ ID NO: 2095088 - RNA, 13 nt, Human
ugaauucauagaa

SEQ ID NO: 2095089 - RNA, 14 nt, Human
ugaacuccugggcu

SEQ ID NO: 2095090 - RNA, 14 nt, Human
ugaaccaaaacauu

SEQ ID NO: 2095091 - RNA, 17 nt, Human
ugaaccaaaacauuccg

SEQ ID NO: 2095092 - RNA, 21 nt, Human
ugaaccaaaacauuccguuua

SEQ ID NO: 2095093 - RNA, 17 nt, Human
ugaacuccuggccucaa

SEQ ID NO: 2095094 - RNA, 20 nt, Human
ugaaggaauaaauugcuccu

SEQ ID NO: 2095095 - RNA, 15 nt, Human
ugaagauacaugucu

SEQ ID NO: 2095096 - RNA, 18 nt, Human
ugaagauaccaucagcaa

SEQ ID NO: 2095097 - RNA, 23 nt, Human
ugaagauaccaucagcaaagaau

SEQ ID NO: 2095098 - RNA, 20 nt, Human
ugaaggacauugcggacagc

SEQ ID NO: 2095099 - RNA, 19 nt, Human
ugaaggacauugcggacag

SEQ ID NO: 2095100 - RNA, 22 nt, Human
ugaaggacauugcggacagcca

SEQ ID NO: 2095101 - RNA, 16 nt, Human
ugaaggagagcccuuc

SEQ ID NO: 2095102 - RNA, 20 nt, Human
ugaagugauauggugagcag

SEQ ID NO: 2095103 - RNA, 18 nt, Human
ugaaguguguuuccuuca

SEQ ID NO: 2095104 - RNA, 22 nt, Human
ugaaguguguuuccuucagugc

SEQ ID NO: 2095105 - RNA, 16 nt, Human
ugaaguguguuuccuu

SEQ ID NO: 2095106 - RNA, 14 nt, Human
ugaaguuaacagag

SEQ ID NO: 2095107 - RNA, 14 nt, Human
ugaauaaaaauuaa

SEQ ID NO: 2095108 - RNA, 15 nt, Human
ugaauaaaaauuaag

SEQ ID NO: 2095109 - RNA, 17 nt, Human
ugaaguuaucuggcuuc

SEQ ID NO: 2095110 - RNA, 14 nt, Human
ugaaguucuccuga

SEQ ID NO: 2095111 - RNA, 14 nt, Human
ugaaguuggacagc

SEQ ID NO: 2095112 - RNA, 18 nt, Human
ugaaguuggacagcaaaa

SEQ ID NO: 2095113 - RNA, 15 nt, Human
ugaccagaagggaaa

SEQ ID NO: 2095114 - RNA, 19 nt, Human
ugaccagcaacuugucuuu

SEQ ID NO: 2095115 - RNA, 23 nt, Human
ugaccagccuccaugcugccucc

SEQ ID NO: 2095116 - RNA, 20 nt, Human
ugaccaguugcacuuggccu

SEQ ID NO: 2095117 - RNA, 16 nt, Human
ugaccauacugaggga

SEQ ID NO: 2095118 - RNA, 22 nt, Human
ugacccugcgaaggggcccugg

SEQ ID NO: 2095119 - RNA, 23 nt, Human
ugacccugcgaaggggcccuggu

SEQ ID NO: 2095120 - RNA, 19 nt, Human
ugaccgaaacagcgcuggg

SEQ ID NO: 2095121 - RNA, 16 nt, Human
ugacaugucccuacac

SEQ ID NO: 2095122 - RNA, 16 nt, Human
ugacauauuaugucuu

SEQ ID NO: 2095123 - RNA, 21 nt, Human
ugaccacgcuuucuagcuguu

SEQ ID NO: 2095124 - RNA, 22 nt, Human
ugaccacgcuuucuagcuguug

SEQ ID NO: 2095125 - RNA, 21 nt, Human
ugaauugcauuuuuuaaaaca

SEQ ID NO: 2095126 - RNA, 22 nt, Human
ugaauugcauuuuuuaaaacaa

SEQ ID NO: 2095127 - RNA, 14 nt, Human
ugacaacuucuaau

SEQ ID NO: 2095128 - RNA, 15 nt, Human
ugacaacuucuaauu

SEQ ID NO: 2095129 - RNA, 19 nt, Human
ugacaacuucuaauugcca

SEQ ID NO: 2095130 - RNA, 22 nt, Human
ugacaacuucuaauugccaugu

SEQ ID NO: 2095131 - RNA, 13 nt, Human
ugacaagccccag

SEQ ID NO: 2095132 - RNA, 15 nt, Human
ugacaagccccaggc

SEQ ID NO: 2095133 - RNA, 22 nt, Human
ugacaagcuccuggucuugaga

SEQ ID NO: 2095134 - RNA, 17 nt, Human
ugacaagccccaggcag

SEQ ID NO: 2095135 - RNA, 21 nt, Human
ugacaagccccaggcaggcug

SEQ ID NO: 2095136 - RNA, 18 nt, Human
ugacaaggauugcuacug

SEQ ID NO: 2095137 - RNA, 23 nt, Human
ugacaauuccuagauaaaaagau

SEQ ID NO: 2095138 - RNA, 16 nt, Human
ugacaauuuuguacaa

SEQ ID NO: 2095139 - RNA, 13 nt, Human
ugacaaugaugau

SEQ ID NO: 2095140 - RNA, 18 nt, Human
ugacaauuuuguacaaau

SEQ ID NO: 2095141 - RNA, 22 nt, Human
ugacaauuuuguacaaauuugu

SEQ ID NO: 2095142 - RNA, 14 nt, Human
ugacaauaaaugug

SEQ ID NO: 2095143 - RNA, 14 nt, Human
ugacaauaauuuca

SEQ ID NO: 2095144 - RNA, 18 nt, Human
ugacaaucaacucuaaua

SEQ ID NO: 2095145 - RNA, 17 nt, Human
ugacaauaauuucaggu

SEQ ID NO: 2095146 - RNA, 15 nt, Human
ugacaaucaacucua

SEQ ID NO: 2095147 - RNA, 20 nt, Human
ugacacuuugccagaaagca

SEQ ID NO: 2095148 - RNA, 17 nt, Human
ugacacaaaaaaaguug

SEQ ID NO: 2095149 - RNA, 13 nt, Human
ugacagaacacug

SEQ ID NO: 2095150 - RNA, 14 nt, Human
ugacagaacacugu

SEQ ID NO: 2095151 - RNA, 15 nt, Human
ugacagaacacuguc

SEQ ID NO: 2095152 - RNA, 16 nt, Human
ugacagaacacugucu

SEQ ID NO: 2095153 - RNA, 17 nt, Human
ugacagaacacugucuu

SEQ ID NO: 2095154 - RNA, 21 nt, Human
ugacagaacacugucuugaag

SEQ ID NO: 2095155 - RNA, 19 nt, Human
ugacagagugagacucugu

SEQ ID NO: 2095156 - RNA, 17 nt, Human
ugacauaacacuauaaa

SEQ ID NO: 2095157 - RNA, 21 nt, Human
ugacauaacacuauaaagguu

SEQ ID NO: 2095158 - RNA, 17 nt, Human
ugacagagugagacucu

SEQ ID NO: 2095159 - RNA, 14 nt, Human
ugacagagugagac

SEQ ID NO: 2095160 - RNA, 23 nt, Human
ugacagaggcagccccauucugc

SEQ ID NO: 2095161 - RNA, 18 nt, Human
ugacagaggcagccccau

SEQ ID NO: 2095162 - RNA, 17 nt, Human
ugacagaggcagcccca

SEQ ID NO: 2095163 - RNA, 16 nt, Human
ugacagaggcagcccc

SEQ ID NO: 2095164 - RNA, 15 nt, Human
ugacagaggcagccc

SEQ ID NO: 2095165 - RNA, 14 nt, Human
ugacagaggcagcc

SEQ ID NO: 2095166 - RNA, 23 nt, Human
ugacagacacaggcccggcucca

SEQ ID NO: 2095167 - RNA, 20 nt, Human
ugacagacacaggcccggcu

SEQ ID NO: 2095168 - RNA, 13 nt, Human
ugacagaggcagc

SEQ ID NO: 2095169 - RNA, 20 nt, Human
ugagacucagacaggaaagg

SEQ ID NO: 2095170 - RNA, 14 nt, Human
ugagacccccacac

SEQ ID NO: 2095171 - RNA, 15 nt, Human
ugagacccccacacc

SEQ ID NO: 2095172 - RNA, 16 nt, Human
ugagacccccacaccu

SEQ ID NO: 2095173 - RNA, 17 nt, Human
ugagacccccacaccuc

SEQ ID NO: 2095174 - RNA, 21 nt, Human
ugagacccauuccuauuucuu

SEQ ID NO: 2095175 - RNA, 13 nt, Human
ugagacccccaca

SEQ ID NO: 2095176 - RNA, 17 nt, Human
ugagaccagccugggca

SEQ ID NO: 2095177 - RNA, 21 nt, Human
ugaccucaggugauccaccca

SEQ ID NO: 2095178 - RNA, 20 nt, Human
ugaccucaggugauccaccc

SEQ ID NO: 2095179 - RNA, 21 nt, Human
ugagaacagaucuccaaagcu

SEQ ID NO: 2095180 - RNA, 22 nt, Human
ugagaacagaucuccaaagcuu

SEQ ID NO: 2095181 - RNA, 16 nt, Human
ugagaacauguuggua

SEQ ID NO: 2095182 - RNA, 24 nt, Human
ugagagugucuucacggcaggaca

SEQ ID NO: 2095183 - RNA, 22 nt, Human
ugagagugucuucacggcagga

SEQ ID NO: 2095184 - RNA, 15 nt, Human
ugagcagggcucagc

SEQ ID NO: 2095185 - RNA, 14 nt, Human
ugagcagggcucag

SEQ ID NO: 2095186 - RNA, 13 nt, Human
ugagcagggcuca

SEQ ID NO: 2095187 - RNA, 12 nt, Human
ugagcagggcuc

SEQ ID NO: 2095188 - RNA, 15 nt, Human
ugagaucaaaacggu

SEQ ID NO: 2095189 - RNA, 14 nt, Human
ugaccggaggcaaa

SEQ ID NO: 2095190 - RNA, 15 nt, Human
ugagauauuuauugu

SEQ ID NO: 2095191 - RNA, 14 nt, Human
ugagaucagccugg

SEQ ID NO: 2095192 - RNA, 15 nt, Human
ugagaucagccuggg

SEQ ID NO: 2095193 - RNA, 15 nt, Human
ugagcagugugucuc

SEQ ID NO: 2095194 - RNA, 17 nt, Human
ugagcagugugucuccu

SEQ ID NO: 2095195 - RNA, 18 nt, Human
ugagcagugugucuccug

SEQ ID NO: 2095196 - RNA, 17 nt, Human
ugagcagggcucagcgg

SEQ ID NO: 2095197 - RNA, 16 nt, Human
ugagcagggcucagcg

SEQ ID NO: 2095198 - RNA, 20 nt, Human
ugagauauuuauuguuuauu

SEQ ID NO: 2095199 - RNA, 19 nt, Human
ugagcagggcucagcgggg

SEQ ID NO: 2095200 - RNA, 21 nt, Human
ugagccucagcauccuggcac

SEQ ID NO: 2095201 - RNA, 18 nt, Human
ugagccucagcauccugg

SEQ ID NO: 2095202 - RNA, 22 nt, Human
ugagccucagcauccuggcacc

SEQ ID NO: 2095203 - RNA, 17 nt, Human
ugagccucagcauccug

SEQ ID NO: 2095204 - RNA, 21 nt, Human
ugagccgagaucacgccacug

SEQ ID NO: 2095205 - RNA, 19 nt, Human
ugagccgagaucacgccac

SEQ ID NO: 2095206 - RNA, 19 nt, Human
ugagcuccucugggcagga

SEQ ID NO: 2095207 - RNA, 14 nt, Human
ugagccugagcaga

SEQ ID NO: 2095208 - RNA, 18 nt, Human
ugagcuggaccucaccaa

SEQ ID NO: 2095209 - RNA, 14 nt, Human
ugagcucgguggac

SEQ ID NO: 2095210 - RNA, 20 nt, Human
ugagcucgguggacccaggg

SEQ ID NO: 2095211 - RNA, 21 nt, Human
ugagcucgguggacccaggga

SEQ ID NO: 2095212 - RNA, 20 nt, Human
ugagggaacagacaggagaa

SEQ ID NO: 2095213 - RNA, 22 nt, Human
ugagggaacagacaggagaaau

SEQ ID NO: 2095214 - RNA, 21 nt, Human
ugagggacaaauuuaaaacaa

SEQ ID NO: 2095215 - RNA, 22 nt, Human
ugagggacaaauuuaaaacaaa

SEQ ID NO: 2095216 - RNA, 23 nt, Human
ugagggacaaauuuaaaacaaac

SEQ ID NO: 2095217 - RNA, 13 nt, Human
ugagggaccagcc

SEQ ID NO: 2095218 - RNA, 18 nt, Human
ugagggaccagccaagag

SEQ ID NO: 2095219 - RNA, 12 nt, Human
ugaggugggagg

SEQ ID NO: 2095220 - RNA, 13 nt, Human
ugaggugggagga

SEQ ID NO: 2095221 - RNA, 23 nt, Human
ugaggucugcucggccgucuuca

SEQ ID NO: 2095222 - RNA, 17 nt, Human
ugaggucucuugaggga

SEQ ID NO: 2095223 - RNA, 18 nt, Human
ugaggucucuugagggag

SEQ ID NO: 2095224 - RNA, 15 nt, Human
ugaggucugaaaugg

SEQ ID NO: 2095225 - RNA, 15 nt, Human
ugaggucugcucggc

SEQ ID NO: 2095226 - RNA, 16 nt, Human
ugaggucugcucggcc

SEQ ID NO: 2095227 - RNA, 14 nt, Human
ugagggagcuuagc

SEQ ID NO: 2095228 - RNA, 17 nt, Human
ugaggucccaggcagag

SEQ ID NO: 2095229 - RNA, 19 nt, Human
ugaggucccaggcagagaa

SEQ ID NO: 2095230 - RNA, 16 nt, Human
ugagggagcuuagcca

SEQ ID NO: 2095231 - RNA, 15 nt, Human
ugaggucccaggcag

SEQ ID NO: 2095232 - RNA, 13 nt, Human
ugagguccugggg

SEQ ID NO: 2095233 - RNA, 15 nt, Human
ugagguccugggggc

SEQ ID NO: 2095234 - RNA, 16 nt, Human
ugagguccugggggcc

SEQ ID NO: 2095235 - RNA, 18 nt, Human
ugagguccugggggccug

SEQ ID NO: 2095236 - RNA, 21 nt, Human
ugagguccugggggccugacc

SEQ ID NO: 2095237 - RNA, 23 nt, Human
ugaggucuaggaacauacuucag

SEQ ID NO: 2095238 - RNA, 12 nt, Human
ugaggaggaagg

SEQ ID NO: 2095239 - RNA, 13 nt, Human
ugaggaggaagga

SEQ ID NO: 2095240 - RNA, 21 nt, Human
ugaggaggaaggagagaaggg

SEQ ID NO: 2095241 - RNA, 17 nt, Human
ugaggaggcagaaagca

SEQ ID NO: 2095242 - RNA, 23 nt, Human
ugaggaggcagaaagcagaggcu

SEQ ID NO: 2095243 - RNA, 24 nt, Human
ugaggaggcagaaagcagaggcug

SEQ ID NO: 2095244 - RNA, 18 nt, Human
ugaggaggaaggagagaa

SEQ ID NO: 2095245 - RNA, 18 nt, Human
ugaggcaggugacaguga

SEQ ID NO: 2095246 - RNA, 20 nt, Human
ugaggcaggugacagugagg

SEQ ID NO: 2095247 - RNA, 17 nt, Human
ugaggagcugcuggcuu

SEQ ID NO: 2095248 - RNA, 13 nt, Human
ugaggagcugcug

SEQ ID NO: 2095249 - RNA, 14 nt, Human
ugaggagcugcugg

SEQ ID NO: 2095250 - RNA, 15 nt, Human
ugaggagcugcuggc

SEQ ID NO: 2095251 - RNA, 16 nt, Human
ugaggagcugcuggcu

SEQ ID NO: 2095252 - RNA, 22 nt, Human
ugaggcauuugggugguaagag

SEQ ID NO: 2095253 - RNA, 14 nt, Human
ugaguuugcccugg

SEQ ID NO: 2095254 - RNA, 22 nt, Human
ugaguuugcccugguuucacug

SEQ ID NO: 2095255 - RNA, 14 nt, Human
ugaguuucuuuuau

SEQ ID NO: 2095256 - RNA, 23 nt, Human
ugaguugacuugacagaacacug

SEQ ID NO: 2095257 - RNA, 12 nt, Human
ugauaacagcua

SEQ ID NO: 2095258 - RNA, 15 nt, Human
ugauaacagcuacca

SEQ ID NO: 2095259 - RNA, 23 nt, Human
ugauaacagcuaccaugacaacc

SEQ ID NO: 2095260 - RNA, 18 nt, Human
ugaguuuuuucucuuggg

SEQ ID NO: 2095261 - RNA, 19 nt, Human
ugaguuuuuucucuugggc

SEQ ID NO: 2095262 - RNA, 14 nt, Human
ugauaaaaaauuuu

SEQ ID NO: 2095263 - RNA, 16 nt, Human
ugauaaaaaauuuugu

SEQ ID NO: 2095264 - RNA, 19 nt, Human
ugauaaaaaauuuuguaau

SEQ ID NO: 2095265 - RNA, 20 nt, Human
ugauaaaaaauuuuguaauu

SEQ ID NO: 2095266 - RNA, 22 nt, Human
ugauaaaaaauuuuguaauuuu

SEQ ID NO: 2095267 - RNA, 20 nt, Human
ugaguuuuguuuuaaaauua

SEQ ID NO: 2095268 - RNA, 18 nt, Human
ugaguuuuuauggggcug

SEQ ID NO: 2095269 - RNA, 13 nt, Human
ugaguuuuugaua

SEQ ID NO: 2095270 - RNA, 18 nt, Human
ugaguuuuugauagcuuu

SEQ ID NO: 2095271 - RNA, 19 nt, Human
ugaguuuuugauagcuuua

SEQ ID NO: 2095272 - RNA, 19 nt, Human
ugaguuuuuauggggcuga

SEQ ID NO: 2095273 - RNA, 17 nt, Human
ugaguuuuuucucuugg

SEQ ID NO: 2095274 - RNA, 18 nt, Human
ugaguuuuauugagaauu

SEQ ID NO: 2095275 - RNA, 15 nt, Human
ugagucucuucagaa

SEQ ID NO: 2095276 - RNA, 19 nt, Human
ugagucgaggacagggagg

SEQ ID NO: 2095277 - RNA, 14 nt, Human
ugagucucuucaga

SEQ ID NO: 2095278 - RNA, 21 nt, Human
ugaggugggaggaucucuuga

SEQ ID NO: 2095279 - RNA, 13 nt, Human
ugaguccagaagu

SEQ ID NO: 2095280 - RNA, 19 nt, Human
ugaguccagaaguuugaga

SEQ ID NO: 2095281 - RNA, 15 nt, Human
ugauccaagcugguc

SEQ ID NO: 2095282 - RNA, 14 nt, Human
ugauccaagcuggu

SEQ ID NO: 2095283 - RNA, 13 nt, Human
ugauccaagcugg

SEQ ID NO: 2095284 - RNA, 22 nt, Human
ugaucauuuuccccccacucuc

SEQ ID NO: 2095285 - RNA, 18 nt, Human
ugaucauuuuccccccac

SEQ ID NO: 2095286 - RNA, 19 nt, Human
ugaucauuuuccccccacu

SEQ ID NO: 2095287 - RNA, 20 nt, Human
ugaucauuuuccccccacuc

SEQ ID NO: 2095288 - RNA, 21 nt, Human
ugaucauuuuccccccacucu

SEQ ID NO: 2095289 - RNA, 16 nt, Human
ugaucauuuucccccc

SEQ ID NO: 2095290 - RNA, 17 nt, Human
ugaucauuuucccccca

SEQ ID NO: 2095291 - RNA, 13 nt, Human
ugaucaugcauug

SEQ ID NO: 2095292 - RNA, 14 nt, Human
ugaucaugcauugu

SEQ ID NO: 2095293 - RNA, 15 nt, Human
ugaucaugcauuguu

SEQ ID NO: 2095294 - RNA, 16 nt, Human
ugaucaugcauuguug

SEQ ID NO: 2095295 - RNA, 17 nt, Human
ugaucaugcauuguuga

SEQ ID NO: 2095296 - RNA, 23 nt, Human
ugaucaugcauuguugagguggu

SEQ ID NO: 2095297 - RNA, 17 nt, Human
ugaucagcuguuuguca

SEQ ID NO: 2095298 - RNA, 16 nt, Human
ugaucagcuguuuguc

SEQ ID NO: 2095299 - RNA, 23 nt, Human
ugauagcaagugaauuuuucucu

SEQ ID NO: 2095300 - RNA, 18 nt, Human
ugaucagcuguuugucau

SEQ ID NO: 2095301 - RNA, 12 nt, Human
ugaucucaggga

SEQ ID NO: 2095302 - RNA, 14 nt, Human
ugaucucagggaag

SEQ ID NO: 2095303 - RNA, 16 nt, Human
ugaucucagggaagcc

SEQ ID NO: 2095304 - RNA, 19 nt, Human
ugaucucagggaagcccag

SEQ ID NO: 2095305 - RNA, 21 nt, Human
ugaucucagggaagcccagcu

SEQ ID NO: 2095306 - RNA, 22 nt, Human
ugaucucagggaagcccagcuc

SEQ ID NO: 2095307 - RNA, 19 nt, Human
ugauccacccaccucagcc

SEQ ID NO: 2095308 - RNA, 18 nt, Human
ugauccacccaccucagc

SEQ ID NO: 2095309 - RNA, 17 nt, Human
ugauccacccaccucag

SEQ ID NO: 2095310 - RNA, 11 nt, Human
ugaucugggaa

SEQ ID NO: 2095311 - RNA, 16 nt, Human
ugaucugggaacuccc

SEQ ID NO: 2095312 - RNA, 18 nt, Human
ugaucugggaacucccaa

SEQ ID NO: 2095313 - RNA, 22 nt, Human
ugaucugggaacucccaagaac

SEQ ID NO: 2095314 - RNA, 16 nt, Human
ugaucuccauauguua

SEQ ID NO: 2095315 - RNA, 19 nt, Human
ugaucuccauauguuacac

SEQ ID NO: 2095316 - RNA, 21 nt, Human
ugaucuccauauguuacacua

SEQ ID NO: 2095317 - RNA, 13 nt, Human
ugaucucccugcc

SEQ ID NO: 2095318 - RNA, 18 nt, Human
ugaucuccguggcuuugg

SEQ ID NO: 2095319 - RNA, 15 nt, Human
ugaucuccguggcuu

SEQ ID NO: 2095320 - RNA, 14 nt, Human
ugaucucccugccg

SEQ ID NO: 2095321 - RNA, 15 nt, Human
ugaucucccugccgc

SEQ ID NO: 2095322 - RNA, 16 nt, Human
ugaucucccugccgcc

SEQ ID NO: 2095323 - RNA, 17 nt, Human
ugaucucccugccgccu

SEQ ID NO: 2095324 - RNA, 15 nt, Human
ugaucugugggcaca

SEQ ID NO: 2095325 - RNA, 13 nt, Human
ugaucuguauaua

SEQ ID NO: 2095326 - RNA, 15 nt, Human
ugaucuguauauaca

SEQ ID NO: 2095327 - RNA, 19 nt, Human
ugaucuguauauacaauaa

SEQ ID NO: 2095328 - RNA, 22 nt, Human
ugaucuguauauacaauaacau

SEQ ID NO: 2095329 - RNA, 18 nt, Human
ugaucuugcucuaucuca

SEQ ID NO: 2095330 - RNA, 20 nt, Human
ugaucuugcucuaucucaca

SEQ ID NO: 2095331 - RNA, 21 nt, Human
ugaucuuggcuuacugcagcc

SEQ ID NO: 2095332 - RNA, 14 nt, Human
ugaucuugugacau

SEQ ID NO: 2095333 - RNA, 15 nt, Human
ugaucuugugacaua

SEQ ID NO: 2095334 - RNA, 20 nt, Human
ugaucuucuuuauaauucua

SEQ ID NO: 2095335 - RNA, 11 nt, Human
ugaugcuaaau

SEQ ID NO: 2095336 - RNA, 16 nt, Human
ugaugcuaaauaggag

SEQ ID NO: 2095337 - RNA, 14 nt, Human
ugaugccucccugu

SEQ ID NO: 2095338 - RNA, 14 nt, Human
ugaugcacauuuca

SEQ ID NO: 2095339 - RNA, 17 nt, Human
ugaugcacauuucaugu

SEQ ID NO: 2095340 - RNA, 16 nt, Human
ugaucuuugcagacag

SEQ ID NO: 2095341 - RNA, 20 nt, Human
ugaugauuuagagugcuguc

SEQ ID NO: 2095342 - RNA, 18 nt, Human
ugaucuuugcagacaggc

SEQ ID NO: 2095343 - RNA, 14 nt, Human
ugaugguuccccug

SEQ ID NO: 2095344 - RNA, 20 nt, Human
ugaugcugugcuaugaauuu

SEQ ID NO: 2095345 - RNA, 18 nt, Human
ugaugucacaucuuggca

SEQ ID NO: 2095346 - RNA, 19 nt, Human
ugaugucccaacuuguaaa

SEQ ID NO: 2095347 - RNA, 18 nt, Human
ugaugugggucaaggaau

SEQ ID NO: 2095348 - RNA, 14 nt, Human
ugauguuaaaauuc

SEQ ID NO: 2095349 - RNA, 18 nt, Human
ugauguggcaacugcuga

SEQ ID NO: 2095350 - RNA, 16 nt, Human
ugauguguuaucucuu

SEQ ID NO: 2095351 - RNA, 18 nt, Human
ugauuagcaaguuacagu

SEQ ID NO: 2095352 - RNA, 16 nt, Human
ugauuaguaaagaaau

SEQ ID NO: 2095353 - RNA, 17 nt, Human
ugauuaguaaagaaaug

SEQ ID NO: 2095354 - RNA, 13 nt, Human
ugauuagcaaguu

SEQ ID NO: 2095355 - RNA, 14 nt, Human
ugauuacugucaau

SEQ ID NO: 2095356 - RNA, 15 nt, Human
ugauuacugucaaua

SEQ ID NO: 2095357 - RNA, 16 nt, Human
ugauuacugucaauaa

SEQ ID NO: 2095358 - RNA, 17 nt, Human
ugauuacugucaauaaa

SEQ ID NO: 2095359 - RNA, 18 nt, Human
ugauuacugucaauaaac

SEQ ID NO: 2095360 - RNA, 19 nt, Human
ugauuacugucaauaaaca

SEQ ID NO: 2095361 - RNA, 23 nt, Human
ugauuacugucaauaaacagcuu

SEQ ID NO: 2095362 - RNA, 13 nt, Human
ugauuacugucaa

SEQ ID NO: 2095363 - RNA, 16 nt, Human
ugauguuaaaauucca

SEQ ID NO: 2095364 - RNA, 17 nt, Human
ugauguuaaaauuccau

SEQ ID NO: 2095365 - RNA, 10 nt, Human
ugauguuaac

SEQ ID NO: 2095366 - RNA, 22 nt, Human
ugauguuaaccagaauaaaguu

SEQ ID NO: 2095367 - RNA, 17 nt, Human
ugauguuaggcugggcc

SEQ ID NO: 2095368 - RNA, 17 nt, Human
ugauguugagggaacag

SEQ ID NO: 2095369 - RNA, 14 nt, Human
ugauuacucuuuga

SEQ ID NO: 2095370 - RNA, 16 nt, Human
ugauuacucuuugaga

SEQ ID NO: 2095371 - RNA, 16 nt, Human
ugauuauuuaucacau

SEQ ID NO: 2095372 - RNA, 17 nt, Human
ugauuauuuaucacaua

SEQ ID NO: 2095373 - RNA, 15 nt, Human
ugauuaugacuguuu

SEQ ID NO: 2095374 - RNA, 12 nt, Human
ugauucacagug

SEQ ID NO: 2095375 - RNA, 21 nt, Human
ugauucuccugccucagccuc

SEQ ID NO: 2095376 - RNA, 19 nt, Human
ugauugcuguguccaacuc

SEQ ID NO: 2095377 - RNA, 22 nt, Human
ugauugcuguguccaacuccag

SEQ ID NO: 2095378 - RNA, 20 nt, Human
ugauucuugaguuuagugau

SEQ ID NO: 2095379 - RNA, 14 nt, Human
ugauucuuuguuac

SEQ ID NO: 2095380 - RNA, 19 nt, Human
ugauucuuuguuacaggca

SEQ ID NO: 2095381 - RNA, 15 nt, Human
ugauucuguguguuu

SEQ ID NO: 2095382 - RNA, 15 nt, Human
ugauucuugaguuua

SEQ ID NO: 2095383 - RNA, 13 nt, Human
ugauucugugugu

SEQ ID NO: 2095384 - RNA, 16 nt, Human
ugauuguuugcucuga

SEQ ID NO: 2095385 - RNA, 19 nt, Human
ugauuguuaauuuacagcu

SEQ ID NO: 2095386 - RNA, 16 nt, Human
ugauugguuuuaauug

SEQ ID NO: 2095387 - RNA, 17 nt, Human
ugauuggugcaacccuu

SEQ ID NO: 2095388 - RNA, 19 nt, Human
ugauuggugcaacccuuac

SEQ ID NO: 2095389 - RNA, 21 nt, Human
ugauuggugcaacccuuaccc

SEQ ID NO: 2095390 - RNA, 14 nt, Human
ugauugucagcuac

SEQ ID NO: 2095391 - RNA, 19 nt, Human
ugauuguacagaaucauug

SEQ ID NO: 2095392 - RNA, 23 nt, Human
ugauuguacagaaucauugcuua

SEQ ID NO: 2095393 - RNA, 20 nt, Human
ugauuggcaggaguuggaag

SEQ ID NO: 2095394 - RNA, 16 nt, Human
ugcugguuuuucaguu

SEQ ID NO: 2095395 - RNA, 18 nt, Human
ugcugguuuuucaguuuu

SEQ ID NO: 2095396 - RNA, 20 nt, Human
ugcuguaaauaaaugcuuua

SEQ ID NO: 2095397 - RNA, 20 nt, Human
ugcugguuuuccuaaaugca

SEQ ID NO: 2095398 - RNA, 17 nt, Human
ugcuguaaaaacugugg

SEQ ID NO: 2095399 - RNA, 12 nt, Human
ugcugguuuuuc

SEQ ID NO: 2095400 - RNA, 15 nt, Human
ugcugguuuuucagu

SEQ ID NO: 2095401 - RNA, 15 nt, Human
ugcugguuuuccuaa

SEQ ID NO: 2095402 - RNA, 22 nt, Human
ugcugguuuuccuaaaugcagu

SEQ ID NO: 2095403 - RNA, 14 nt, Human
ugcugguuuuccua

SEQ ID NO: 2095404 - RNA, 23 nt, Human
ugcugguugucauuuuugcagua

SEQ ID NO: 2095405 - RNA, 14 nt, Human
ugcuguggucucuu

SEQ ID NO: 2095406 - RNA, 17 nt, Human
ugcuguggucucuuugu

SEQ ID NO: 2095407 - RNA, 16 nt, Human
ugcugugguuccuggg

SEQ ID NO: 2095408 - RNA, 17 nt, Human
ugcugugguuccugggg

SEQ ID NO: 2095409 - RNA, 16 nt, Human
ugcuguguaacacugu

SEQ ID NO: 2095410 - RNA, 15 nt, Human
ugcuguguccaacuc

SEQ ID NO: 2095411 - RNA, 18 nt, Human
ugcuguguccaacuccag

SEQ ID NO: 2095412 - RNA, 19 nt, Human
ugcuguguccaacuccagu

SEQ ID NO: 2095413 - RNA, 20 nt, Human
ugcuguguccaacuccagua

SEQ ID NO: 2095414 - RNA, 17 nt, Human
ugcugggcuugucugua

SEQ ID NO: 2095415 - RNA, 23 nt, Human
ugcugggcucuccaccucagccu

SEQ ID NO: 2095416 - RNA, 14 nt, Human
ugcugggcucucca

SEQ ID NO: 2095417 - RNA, 15 nt, Human
ugcugggcucuccac

SEQ ID NO: 2095418 - RNA, 16 nt, Human
ugcugggcucuccacc

SEQ ID NO: 2095419 - RNA, 17 nt, Human
ugcugggcucuccaccu

SEQ ID NO: 2095420 - RNA, 18 nt, Human
ugcugggcucuccaccuc

SEQ ID NO: 2095421 - RNA, 20 nt, Human
ugcugggcucuccaccucag

SEQ ID NO: 2095422 - RNA, 22 nt, Human
ugcugggcucuccaccucagcc

SEQ ID NO: 2095423 - RNA, 23 nt, Human
ugcuggggcaagucccugacucu

SEQ ID NO: 2095424 - RNA, 18 nt, Human
ugcuggggcaagucccug

SEQ ID NO: 2095425 - RNA, 16 nt, Human
ugcuggucacugccau

SEQ ID NO: 2095426 - RNA, 18 nt, Human
ugcuggugagccaagcag

SEQ ID NO: 2095427 - RNA, 19 nt, Human
ugcugcuuuaauugugaau

SEQ ID NO: 2095428 - RNA, 16 nt, Human
ugcugggggccgcccu

SEQ ID NO: 2095429 - RNA, 15 nt, Human
ugcugcuucccucug

SEQ ID NO: 2095430 - RNA, 16 nt, Human
ugcugcuucccucugc

SEQ ID NO: 2095431 - RNA, 17 nt, Human
ugcugcuucccucugcc

SEQ ID NO: 2095432 - RNA, 20 nt, Human
ugcugcuucccucugccugu

SEQ ID NO: 2095433 - RNA, 12 nt, Human
ugcugcuugagg

SEQ ID NO: 2095434 - RNA, 12 nt, Human
ugcugcugcugc

SEQ ID NO: 2095435 - RNA, 20 nt, Human
ugcugggauuacagguguga

SEQ ID NO: 2095436 - RNA, 19 nt, Human
ugcugcuugaggcaacuca

SEQ ID NO: 2095437 - RNA, 21 nt, Human
ugcugcuucccucugccuguc

SEQ ID NO: 2095438 - RNA, 14 nt, Human
ugcugccugaguca

SEQ ID NO: 2095439 - RNA, 16 nt, Human
ugcugcuauuuuacug

SEQ ID NO: 2095440 - RNA, 18 nt, Human
ugcugcuauuuuacuguc

SEQ ID NO: 2095441 - RNA, 19 nt, Human
ugcugcuauuuuacugucu

SEQ ID NO: 2095442 - RNA, 21 nt, Human
ugcugcuauuuuacugucuua

SEQ ID NO: 2095443 - RNA, 22 nt, Human
ugcugcuauuuuacugucuuaa

SEQ ID NO: 2095444 - RNA, 17 nt, Human
ugcugcuccuuagcugc

SEQ ID NO: 2095445 - RNA, 18 nt, Human
ugcugcuccuuagcugcc

SEQ ID NO: 2095446 - RNA, 20 nt, Human
ugcugcuccuuagcugccaa

SEQ ID NO: 2095447 - RNA, 12 nt, Human
ugcucuccucuu

SEQ ID NO: 2095448 - RNA, 20 nt, Human
ugcucuccccugcccugcug

SEQ ID NO: 2095449 - RNA, 23 nt, Human
ugcucuccgaccagacaccuuga

SEQ ID NO: 2095450 - RNA, 17 nt, Human
ugcucuaucucacagca

SEQ ID NO: 2095451 - RNA, 20 nt, Human
ugcucuaucucacagcacac

SEQ ID NO: 2095452 - RNA, 16 nt, Human
ugcucuccccugcccu

SEQ ID NO: 2095453 - RNA, 17 nt, Human
ugcucuccccugcccug

SEQ ID NO: 2095454 - RNA, 18 nt, Human
ugcucuuguccuagcuug

SEQ ID NO: 2095455 - RNA, 19 nt, Human
ugcucuuguccuagcuugg

SEQ ID NO: 2095456 - RNA, 13 nt, Human
ugcucagaacaca

SEQ ID NO: 2095457 - RNA, 15 nt, Human
ugcucggccgucuuc

SEQ ID NO: 2095458 - RNA, 15 nt, Human
ugcucuaagcacacg

SEQ ID NO: 2095459 - RNA, 17 nt, Human
ugcucuaagcacacgga

SEQ ID NO: 2095460 - RNA, 18 nt, Human
ugcucuaagcacacggag

SEQ ID NO: 2095461 - RNA, 23 nt, Human
ugcucaccuggggugugggaggc

SEQ ID NO: 2095462 - RNA, 17 nt, Human
ugcucacauaucuguca

SEQ ID NO: 2095463 - RNA, 12 nt, Human
ugcucaccuggg

SEQ ID NO: 2095464 - RNA, 13 nt, Human
ugcucaccugggg

SEQ ID NO: 2095465 - RNA, 14 nt, Human
ugcucaccuggggu

SEQ ID NO: 2095466 - RNA, 22 nt, Human
ugcucaccuggggugugggagg

SEQ ID NO: 2095467 - RNA, 19 nt, Human
ugcguguguccaugugugu

SEQ ID NO: 2095468 - RNA, 17 nt, Human
ugcguguguccaugugu

SEQ ID NO: 2095469 - RNA, 13 nt, Human
ugcguuacuaauu

SEQ ID NO: 2095470 - RNA, 15 nt, Human
ugcggacaaguuuua

SEQ ID NO: 2095471 - RNA, 18 nt, Human
ugcgcguucugaaauauu

SEQ ID NO: 2095472 - RNA, 17 nt, Human
ugcgcuuuugcugguca

SEQ ID NO: 2095473 - RNA, 18 nt, Human
ugcgcuuuugcuggucac

SEQ ID NO: 2095474 - RNA, 17 nt, Human
ugcggacagccacggcc

SEQ ID NO: 2095475 - RNA, 13 nt, Human
ugcguuuuggaag

SEQ ID NO: 2095476 - RNA, 19 nt, Human
ugcguuagaaugaggagga

SEQ ID NO: 2095477 - RNA, 22 nt, Human
ugcuaagaagcgagcacugacc

SEQ ID NO: 2095478 - RNA, 17 nt, Human
ugcuaacuuggagcccc

SEQ ID NO: 2095479 - RNA, 19 nt, Human
ugcuaacuuggagccccag

SEQ ID NO: 2095480 - RNA, 22 nt, Human
ugcuaacuagcuuggaaacugg

SEQ ID NO: 2095481 - RNA, 20 nt, Human
ugcuaacuagcuuggaaacu

SEQ ID NO: 2095482 - RNA, 23 nt, Human
ugcuaaccacgucugucuucaca

SEQ ID NO: 2095483 - RNA, 15 nt, Human
ugcuacuuccugccu

SEQ ID NO: 2095484 - RNA, 22 nt, Human
ugcuacuuccugccuggucucc

SEQ ID NO: 2095485 - RNA, 22 nt, Human
ugcuacuguccuacccacccuc

SEQ ID NO: 2095486 - RNA, 21 nt, Human
ugcuacuguccuacccacccu

SEQ ID NO: 2095487 - RNA, 14 nt, Human
ugcuacuacaaaaa

SEQ ID NO: 2095488 - RNA, 15 nt, Human
ugcuacucuguuccu

SEQ ID NO: 2095489 - RNA, 16 nt, Human
ugcuacucuguuccuu

SEQ ID NO: 2095490 - RNA, 14 nt, Human
ugcuacugauuguu

SEQ ID NO: 2095491 - RNA, 20 nt, Human
ugcuacugauuguuucauug

SEQ ID NO: 2095492 - RNA, 11 nt, Human
ugccuugggcu

SEQ ID NO: 2095493 - RNA, 15 nt, Human
ugccuugggcugcuc

SEQ ID NO: 2095494 - RNA, 17 nt, Human
ugcgcugacaaccaccg

SEQ ID NO: 2095495 - RNA, 23 nt, Human
ugcgcugacaaccaccgcucccc

SEQ ID NO: 2095496 - RNA, 20 nt, Human
ugcgcucuagccugggcaac

SEQ ID NO: 2095497 - RNA, 13 nt, Human
ugccuuggcuuca

SEQ ID NO: 2095498 - RNA, 23 nt, Human
ugcgcgugcacguggagagcugg

SEQ ID NO: 2095499 - RNA, 17 nt, Human
ugcgccauugcacucca

SEQ ID NO: 2095500 - RNA, 23 nt, Human
ugcauauucuuauguaugugaaa

SEQ ID NO: 2095501 - RNA, 14 nt, Human
ugcaucaauccugu

SEQ ID NO: 2095502 - RNA, 15 nt, Human
ugcaucaauccugug

SEQ ID NO: 2095503 - RNA, 20 nt, Human
ugcaucaauccugugugguu

SEQ ID NO: 2095504 - RNA, 15 nt, Human
ugcauagucccagcu

SEQ ID NO: 2095505 - RNA, 16 nt, Human
ugcauagucccagcua

SEQ ID NO: 2095506 - RNA, 20 nt, Human
ugcauagucccagcuaccca

SEQ ID NO: 2095507 - RNA, 19 nt, Human
ugcauaguucccauguuaa

SEQ ID NO: 2095508 - RNA, 13 nt, Human
ugcauauguuucg

SEQ ID NO: 2095509 - RNA, 21 nt, Human
ugcauaguauuccauugugug

SEQ ID NO: 2095510 - RNA, 19 nt, Human
ugcaguuugagacaggaga

SEQ ID NO: 2095511 - RNA, 21 nt, Human
ugcaguggugcgaucuggguu

SEQ ID NO: 2095512 - RNA, 20 nt, Human
ugcaguggugcgaucugggu

SEQ ID NO: 2095513 - RNA, 24 nt, Human
ugcagggaggagguggcagcccug

SEQ ID NO: 2095514 - RNA, 15 nt, Human
ugcaguucagcacca

SEQ ID NO: 2095515 - RNA, 18 nt, Human
ugcaguucagcaccaccc

SEQ ID NO: 2095516 - RNA, 19 nt, Human
ugcaguucagcaccacccu

SEQ ID NO: 2095517 - RNA, 21 nt, Human
ugcaguuacacuaaaagguga

SEQ ID NO: 2095518 - RNA, 14 nt, Human
ugauuuaauaacau

SEQ ID NO: 2095519 - RNA, 20 nt, Human
ugauuuaauaacauaacaaa

SEQ ID NO: 2095520 - RNA, 13 nt, Human
ugcagggaguccg

SEQ ID NO: 2095521 - RNA, 14 nt, Human
ugcagggagccgag

SEQ ID NO: 2095522 - RNA, 18 nt, Human
ugcaggcuggcaccgccu

SEQ ID NO: 2095523 - RNA, 21 nt, Human
ugcaggcuggcaccgccuucu

SEQ ID NO: 2095524 - RNA, 22 nt, Human
ugcaggcuggcaccgccuucuc

SEQ ID NO: 2095525 - RNA, 23 nt, Human
ugcaggcuggcaccgccuucucu

SEQ ID NO: 2095526 - RNA, 17 nt, Human
ugccaccuccccuaucc

SEQ ID NO: 2095527 - RNA, 18 nt, Human
ugccaccuccccuaucca

SEQ ID NO: 2095528 - RNA, 21 nt, Human
ugccaccuccccuauccaccc

SEQ ID NO: 2095529 - RNA, 22 nt, Human
ugccaccuccccuauccaccca

SEQ ID NO: 2095530 - RNA, 10 nt, Human
ugccaccugc

SEQ ID NO: 2095531 - RNA, 16 nt, Human
ugccaccuggggcagu

SEQ ID NO: 2095532 - RNA, 17 nt, Human
ugccaccuggggcaguc

SEQ ID NO: 2095533 - RNA, 19 nt, Human
ugccaccuggggcagucac

SEQ ID NO: 2095534 - RNA, 13 nt, Human
ugccaccuccccu

SEQ ID NO: 2095535 - RNA, 20 nt, Human
ugccacccuggggagaaagu

SEQ ID NO: 2095536 - RNA, 23 nt, Human
ugccaaauuuuggccaaaguguu

SEQ ID NO: 2095537 - RNA, 14 nt, Human
ugccaggcauggug

SEQ ID NO: 2095538 - RNA, 22 nt, Human
ugccacgcgguacaaaggaaaa

SEQ ID NO: 2095539 - RNA, 16 nt, Human
ugcauuuggucaagau

SEQ ID NO: 2095540 - RNA, 19 nt, Human
ugccaaaaucauuuuaaug

SEQ ID NO: 2095541 - RNA, 14 nt, Human
ugccaaagggaaau

SEQ ID NO: 2095542 - RNA, 18 nt, Human
ugccaaagggaaauauca

SEQ ID NO: 2095543 - RNA, 20 nt, Human
ugccaaagcuaggguggccc

SEQ ID NO: 2095544 - RNA, 21 nt, Human
ugccaaagcuaggguggcccu

SEQ ID NO: 2095545 - RNA, 22 nt, Human
ugccaaagcuaggguggcccuu

SEQ ID NO: 2095546 - RNA, 17 nt, Human
ugcaugggugaagggag

SEQ ID NO: 2095547 - RNA, 23 nt, Human
ugcauggggugggguagggcuga

SEQ ID NO: 2095548 - RNA, 16 nt, Human
ugcaugggugaaggga

SEQ ID NO: 2095549 - RNA, 17 nt, Human
ugcauggguuuuguagg

SEQ ID NO: 2095550 - RNA, 18 nt, Human
ugcauggguuuuguaggu

SEQ ID NO: 2095551 - RNA, 19 nt, Human
ugcauggguuuuguaggua

SEQ ID NO: 2095552 - RNA, 23 nt, Human
ugcauggguuuuguagguacuuu

SEQ ID NO: 2095553 - RNA, 16 nt, Human
ugcaugguaauuuaua

SEQ ID NO: 2095554 - RNA, 18 nt, Human
ugcaugguaauuuauagu

SEQ ID NO: 2095555 - RNA, 19 nt, Human
ugcaugguaauuuauaguu

SEQ ID NO: 2095556 - RNA, 14 nt, Human
ugcaucagaaaugu

SEQ ID NO: 2095557 - RNA, 21 nt, Human
ugcaucagaaaugucuggaga

SEQ ID NO: 2095558 - RNA, 23 nt, Human
ugcaucagaaaugucuggagaau

SEQ ID NO: 2095559 - RNA, 20 nt, Human
ugccguugccaagaacugaa

SEQ ID NO: 2095560 - RNA, 14 nt, Human
ugccuauaguccca

SEQ ID NO: 2095561 - RNA, 17 nt, Human
ugccuauagucccagcu

SEQ ID NO: 2095562 - RNA, 18 nt, Human
ugccuauagucccagcua

SEQ ID NO: 2095563 - RNA, 20 nt, Human
ugccuaucaccucuuaugca

SEQ ID NO: 2095564 - RNA, 16 nt, Human
ugccuccucuucaacu

SEQ ID NO: 2095565 - RNA, 14 nt, Human
ugccuccucuucaa

SEQ ID NO: 2095566 - RNA, 13 nt, Human
ugccuccugugua

SEQ ID NO: 2095567 - RNA, 24 nt, Human
ugccucaaugugaaucagacccua

SEQ ID NO: 2095568 - RNA, 22 nt, Human
ugccucaaugugaaucagaccc

SEQ ID NO: 2095569 - RNA, 23 nt, Human
ugccucaaugugaaucagacccu

SEQ ID NO: 2095570 - RNA, 16 nt, Human
ugcccugggaugucca

SEQ ID NO: 2095571 - RNA, 17 nt, Human
ugcccuggugcugccac

SEQ ID NO: 2095572 - RNA, 21 nt, Human
ugcccugguccagggaagcug

SEQ ID NO: 2095573 - RNA, 16 nt, Human
ugcccuggugcugcca

SEQ ID NO: 2095574 - RNA, 14 nt, Human
ugcccuggugcugc

SEQ ID NO: 2095575 - RNA, 12 nt, Human
ugcccuggugcu

SEQ ID NO: 2095576 - RNA, 21 nt, Human
ugcccuggggcugaucucagg

SEQ ID NO: 2095577 - RNA, 22 nt, Human
ugcccuggggcugaucucaggg

SEQ ID NO: 2095578 - RNA, 23 nt, Human
ugcccuggggcugaucucaggga

SEQ ID NO: 2095579 - RNA, 18 nt, Human
ugcccugguccagggaag

SEQ ID NO: 2095580 - RNA, 16 nt, Human
ugccccucccuucaac

SEQ ID NO: 2095581 - RNA, 15 nt, Human
ugccccucccuucaa

SEQ ID NO: 2095582 - RNA, 13 nt, Human
ugccccagcucug

SEQ ID NO: 2095583 - RNA, 14 nt, Human
ugccccagcucugg

SEQ ID NO: 2095584 - RNA, 16 nt, Human
ugccccagcucuggcu

SEQ ID NO: 2095585 - RNA, 18 nt, Human
ugccccagcucuggcuuc

SEQ ID NO: 2095586 - RNA, 19 nt, Human
ugccccagcucuggcuucc

SEQ ID NO: 2095587 - RNA, 13 nt, Human
ugccccucucucc

SEQ ID NO: 2095588 - RNA, 15 nt, Human
ugccccucucuccau

SEQ ID NO: 2095589 - RNA, 20 nt, Human
ugcccgagcuggugcauuac

SEQ ID NO: 2095590 - RNA, 16 nt, Human
ugcccgagcuggugca

SEQ ID NO: 2095591 - RNA, 19 nt, Human
ugcccgagcuggugcauua

SEQ ID NO: 2095592 - RNA, 21 nt, Human
ugcccggagauuggacggccu

SEQ ID NO: 2095593 - RNA, 14 nt, Human
ugcccgagcuggug

SEQ ID NO: 2095594 - RNA, 13 nt, Human
ugcccgagcuggu

SEQ ID NO: 2095595 - RNA, 23 nt, Human
ugccccugcugccuccccaaccc

SEQ ID NO: 2095596 - RNA, 13 nt, Human
ugccccugcugcc

SEQ ID NO: 2095597 - RNA, 14 nt, Human
ugccccugcugccu

SEQ ID NO: 2095598 - RNA, 16 nt, Human
ugccccugcugccucc

SEQ ID NO: 2095599 - RNA, 17 nt, Human
ugccccugcugccuccc

SEQ ID NO: 2095600 - RNA, 14 nt, Human
ugcccggcugcgga

SEQ ID NO: 2095601 - RNA, 12 nt, Human
ugcccggcugcg

SEQ ID NO: 2095602 - RNA, 18 nt, Human
ugcccggauucugggagg

SEQ ID NO: 2095603 - RNA, 22 nt, Human
ugcccggauucugggaggaagc

SEQ ID NO: 2095604 - RNA, 23 nt, Human
ugcccggagauuggacggccuga

SEQ ID NO: 2095605 - RNA, 15 nt, Human
ugcccggauucuggg

SEQ ID NO: 2095606 - RNA, 16 nt, Human
ugcccggauucuggga

SEQ ID NO: 2095607 - RNA, 17 nt, Human
ugcccggauucugggag

SEQ ID NO: 2095608 - RNA, 12 nt, Human
ugccccaccugc

SEQ ID NO: 2095609 - RNA, 13 nt, Human
ugccccaccugcc

SEQ ID NO: 2095610 - RNA, 14 nt, Human
ugccccaccugcca

SEQ ID NO: 2095611 - RNA, 15 nt, Human
ugccccaccugccac

SEQ ID NO: 2095612 - RNA, 16 nt, Human
ugccccaccugccacu

SEQ ID NO: 2095613 - RNA, 17 nt, Human
ugccccaccugccacua

SEQ ID NO: 2095614 - RNA, 21 nt, Human
ugccccaccugccacuaggcu

SEQ ID NO: 2095615 - RNA, 19 nt, Human
ugccccaccuuuauuaaaa

SEQ ID NO: 2095616 - RNA, 16 nt, Human
ugccccaacuccugga

SEQ ID NO: 2095617 - RNA, 13 nt, Human
ugccccaacuccu

SEQ ID NO: 2095618 - RNA, 15 nt, Human
ugccccaacuccugg

SEQ ID NO: 2095619 - RNA, 21 nt, Human
ugccccaccuuuauuaaaauc

SEQ ID NO: 2095620 - RNA, 13 nt, Human
ugccccagagcug

SEQ ID NO: 2095621 - RNA, 14 nt, Human
ugccccagagcugu

SEQ ID NO: 2095622 - RNA, 15 nt, Human
ugccccagagcuguu

SEQ ID NO: 2095623 - RNA, 17 nt, Human
ugccccagagcuguuua

SEQ ID NO: 2095624 - RNA, 23 nt, Human
ugccccagagcuguuuauggccu

SEQ ID NO: 2095625 - RNA, 14 nt, Human
ugccccaaacaaau

SEQ ID NO: 2095626 - RNA, 16 nt, Human
ugcccauuccccagcc

SEQ ID NO: 2095627 - RNA, 18 nt, Human
ugcccauuccccagccuc

SEQ ID NO: 2095628 - RNA, 20 nt, Human
ugccccaaacaaauaugcaa

SEQ ID NO: 2095629 - RNA, 21 nt, Human
ugccccaaaggaagcuuucuc

SEQ ID NO: 2095630 - RNA, 22 nt, Human
ugccccaaaggaagcuuucucu

SEQ ID NO: 2095631 - RNA, 20 nt, Human
ugcccaggcuggcgugcagu

SEQ ID NO: 2095632 - RNA, 19 nt, Human
ugcccagagggcccaggca

SEQ ID NO: 2095633 - RNA, 19 nt, Human
ugcccaggcuggcgugcag

SEQ ID NO: 2095634 - RNA, 18 nt, Human
ugcccaggcuggcgugca

SEQ ID NO: 2095635 - RNA, 11 nt, Human
ugcccagagau

SEQ ID NO: 2095636 - RNA, 12 nt, Human
ugcccagagaug

SEQ ID NO: 2095637 - RNA, 16 nt, Human
ugcccagagaugccuc

SEQ ID NO: 2095638 - RNA, 17 nt, Human
ugcccagagaugccucc

SEQ ID NO: 2095639 - RNA, 18 nt, Human
ugcccagagaugccucca

SEQ ID NO: 2095640 - RNA, 19 nt, Human
ugcccagagaugccuccac

SEQ ID NO: 2095641 - RNA, 20 nt, Human
ugcccagagaugccuccacc

SEQ ID NO: 2095642 - RNA, 21 nt, Human
ugcccagagaugccuccaccg

SEQ ID NO: 2095643 - RNA, 22 nt, Human
ugcccagagaugccuccaccgc

SEQ ID NO: 2095644 - RNA, 15 nt, Human
ugcccagagauggga

SEQ ID NO: 2095645 - RNA, 11 nt, Human
ugcccagagcu

SEQ ID NO: 2095646 - RNA, 12 nt, Human
ugcccagagcug

SEQ ID NO: 2095647 - RNA, 13 nt, Human
ugcccagagcugg

SEQ ID NO: 2095648 - RNA, 14 nt, Human
ugcccagagcuggg

SEQ ID NO: 2095649 - RNA, 15 nt, Human
ugcccagagcugggu

SEQ ID NO: 2095650 - RNA, 17 nt, Human
ugcccagagcuggguga

SEQ ID NO: 2095651 - RNA, 18 nt, Human
ugcccagagggcccaggc

SEQ ID NO: 2095652 - RNA, 15 nt, Human
ugcccagaccacacg

SEQ ID NO: 2095653 - RNA, 16 nt, Human
ugcccagaauucccag

SEQ ID NO: 2095654 - RNA, 21 nt, Human
ugcccagaauucccagcuguc

SEQ ID NO: 2095655 - RNA, 22 nt, Human
ugcccagaauucccagcugucu

SEQ ID NO: 2095656 - RNA, 23 nt, Human
ugcccagaauucccagcugucug

SEQ ID NO: 2095657 - RNA, 18 nt, Human
ugcccagaccccucuggc

SEQ ID NO: 2095658 - RNA, 19 nt, Human
ugcccagaccccucuggcc

SEQ ID NO: 2095659 - RNA, 22 nt, Human
ugcccagaccccucuggccagg

SEQ ID NO: 2095660 - RNA, 11 nt, Human
ugccaggcccg

SEQ ID NO: 2095661 - RNA, 14 nt, Human
ugccaggcccgggg

SEQ ID NO: 2095662 - RNA, 13 nt, Human
uggccaggcuggu

SEQ ID NO: 2095663 - RNA, 16 nt, Human
uggcccccgagcuggg

SEQ ID NO: 2095664 - RNA, 17 nt, Human
uggcccccgagcugggg

SEQ ID NO: 2095665 - RNA, 14 nt, Human
uggcccccgagcug

SEQ ID NO: 2095666 - RNA, 15 nt, Human
uggcccccgagcugg

SEQ ID NO: 2095667 - RNA, 13 nt, Human
uggcccccacugg

SEQ ID NO: 2095668 - RNA, 14 nt, Human
uggcccccacuggc

SEQ ID NO: 2095669 - RNA, 15 nt, Human
uggcccccacuggcu

SEQ ID NO: 2095670 - RNA, 18 nt, Human
uggcccccacuggcugug

SEQ ID NO: 2095671 - RNA, 20 nt, Human
uggcccccacuggcuguggg

SEQ ID NO: 2095672 - RNA, 21 nt, Human
uggcccccacuggcugugggc

SEQ ID NO: 2095673 - RNA, 20 nt, Human
uggccccugcccggcugcgg

SEQ ID NO: 2095674 - RNA, 13 nt, Human
uggccccucaccu

SEQ ID NO: 2095675 - RNA, 13 nt, Human
uggccucaacccu

SEQ ID NO: 2095676 - RNA, 16 nt, Human
uggccccugcccggcu

SEQ ID NO: 2095677 - RNA, 15 nt, Human
uggccccugcccggc

SEQ ID NO: 2095678 - RNA, 14 nt, Human
uggccccugcccgg

SEQ ID NO: 2095679 - RNA, 19 nt, Human
uggcccccgagcugggggc

SEQ ID NO: 2095680 - RNA, 19 nt, Human
uggccccuagaaucagccu

SEQ ID NO: 2095681 - RNA, 18 nt, Human
uggccagaugcaccagcc

SEQ ID NO: 2095682 - RNA, 17 nt, Human
uggccagaugcaccagc

SEQ ID NO: 2095683 - RNA, 19 nt, Human
uggccagaugcaccagccc

SEQ ID NO: 2095684 - RNA, 16 nt, Human
uggcuccucccggugc

SEQ ID NO: 2095685 - RNA, 14 nt, Human
uggcuccucccggu

SEQ ID NO: 2095686 - RNA, 15 nt, Human
uggcucccagggcca

SEQ ID NO: 2095687 - RNA, 17 nt, Human
uggcucccagggccaug

SEQ ID NO: 2095688 - RNA, 14 nt, Human
uggcucccaugacc

SEQ ID NO: 2095689 - RNA, 19 nt, Human
uggcuccucccggugccca

SEQ ID NO: 2095690 - RNA, 18 nt, Human
uggcuccucccggugccc

SEQ ID NO: 2095691 - RNA, 14 nt, Human
uggcuccugagggg

SEQ ID NO: 2095692 - RNA, 20 nt, Human
uggcucccaugaccauacug

SEQ ID NO: 2095693 - RNA, 14 nt, Human
uggcugcugacuga

SEQ ID NO: 2095694 - RNA, 20 nt, Human
uggcuccugaggggcaucug

SEQ ID NO: 2095695 - RNA, 20 nt, Human
uggcucccacaggcccuucc

SEQ ID NO: 2095696 - RNA, 17 nt, Human
uggcucccacaggcccu

SEQ ID NO: 2095697 - RNA, 14 nt, Human
uggcucccacaggc

SEQ ID NO: 2095698 - RNA, 19 nt, Human
uggcguagagggugcugcc

SEQ ID NO: 2095699 - RNA, 20 nt, Human
uggcguagagggugcugccc

SEQ ID NO: 2095700 - RNA, 23 nt, Human
uggcguagagggugcugccccau

SEQ ID NO: 2095701 - RNA, 13 nt, Human
uggcggugccugg

SEQ ID NO: 2095702 - RNA, 13 nt, Human
uggcgggccaagg

SEQ ID NO: 2095703 - RNA, 17 nt, Human
uggcgggccaaggacug

SEQ ID NO: 2095704 - RNA, 15 nt, Human
uggcggcuacucagc

SEQ ID NO: 2095705 - RNA, 16 nt, Human
uggcggcuacucagca

SEQ ID NO: 2095706 - RNA, 17 nt, Human
uggcggcuacucagcag

SEQ ID NO: 2095707 - RNA, 21 nt, Human
uggcggcuacucagcagcccu

SEQ ID NO: 2095708 - RNA, 22 nt, Human
uggcggcuacucagcagcccuc

SEQ ID NO: 2095709 - RNA, 23 nt, Human
uggcggcuacucagcagcccucc

SEQ ID NO: 2095710 - RNA, 19 nt, Human
uggccucaacccucccuca

SEQ ID NO: 2095711 - RNA, 17 nt, Human
uggccucaacccucccu

SEQ ID NO: 2095712 - RNA, 18 nt, Human
uggccucaacccucccuc

SEQ ID NO: 2095713 - RNA, 13 nt, Human
uggccucagcugc

SEQ ID NO: 2095714 - RNA, 14 nt, Human
uggccucaacccuc

SEQ ID NO: 2095715 - RNA, 15 nt, Human
uggccucaacccucc

SEQ ID NO: 2095716 - RNA, 16 nt, Human
uggccucaacccuccc

SEQ ID NO: 2095717 - RNA, 20 nt, Human
uggccucaacccucccucag

SEQ ID NO: 2095718 - RNA, 19 nt, Human
uggccucagcugccucacu

SEQ ID NO: 2095719 - RNA, 14 nt, Human
uggccucagcugcc

SEQ ID NO: 2095720 - RNA, 16 nt, Human
uggccucagcugccuc

SEQ ID NO: 2095721 - RNA, 17 nt, Human
uggccucagcugccuca

SEQ ID NO: 2095722 - RNA, 18 nt, Human
uggccucagcugccucac

SEQ ID NO: 2095723 - RNA, 18 nt, Human
uggcgauucccauugaaa

SEQ ID NO: 2095724 - RNA, 14 nt, Human
uggcgcaagccugu

SEQ ID NO: 2095725 - RNA, 17 nt, Human
uggauuuuugucuugug

SEQ ID NO: 2095726 - RNA, 12 nt, Human
uggcaaaaaggc

SEQ ID NO: 2095727 - RNA, 16 nt, Human
uggcaaaaaggcagga

SEQ ID NO: 2095728 - RNA, 15 nt, Human
uggcaaagcagaaaa

SEQ ID NO: 2095729 - RNA, 21 nt, Human
uggcaaagccuucauugccuu

SEQ ID NO: 2095730 - RNA, 17 nt, Human
uggcaaacuucagacug

SEQ ID NO: 2095731 - RNA, 13 nt, Human
uggcaaagacaga

SEQ ID NO: 2095732 - RNA, 17 nt, Human
uggcaaagacagaagcc

SEQ ID NO: 2095733 - RNA, 17 nt, Human
uggcaaagaugugggga

SEQ ID NO: 2095734 - RNA, 15 nt, Human
uggcacuauaaugua

SEQ ID NO: 2095735 - RNA, 16 nt, Human
uggcacuauaauguaa

SEQ ID NO: 2095736 - RNA, 22 nt, Human
uggcagaauggggugcaugaag

SEQ ID NO: 2095737 - RNA, 14 nt, Human
uggcagaaguguuu

SEQ ID NO: 2095738 - RNA, 16 nt, Human
uggcagaaguguuuca

SEQ ID NO: 2095739 - RNA, 19 nt, Human
uggcagaauaaucuuuggg

SEQ ID NO: 2095740 - RNA, 20 nt, Human
uggcagaauaaucuuugggu

SEQ ID NO: 2095741 - RNA, 17 nt, Human
uggcaauaguguguucu

SEQ ID NO: 2095742 - RNA, 18 nt, Human
uggcaauaguguguucug

SEQ ID NO: 2095743 - RNA, 15 nt, Human
uggcaauaguguguu

SEQ ID NO: 2095744 - RNA, 16 nt, Human
uggcaauaguguguuc

SEQ ID NO: 2095745 - RNA, 17 nt, Human
uggcaaggguucaccug

SEQ ID NO: 2095746 - RNA, 14 nt, Human
uggagacugucuca

SEQ ID NO: 2095747 - RNA, 20 nt, Human
uggaggagcucaggacacua

SEQ ID NO: 2095748 - RNA, 22 nt, Human
uggaggagcucaggacacuaau

SEQ ID NO: 2095749 - RNA, 22 nt, Human
uggaggaaugcucccccauccu

SEQ ID NO: 2095750 - RNA, 21 nt, Human
uggaggaagggggguugcagu

SEQ ID NO: 2095751 - RNA, 15 nt, Human
uggaggaaugcuccc

SEQ ID NO: 2095752 - RNA, 16 nt, Human
uggaggaaugcucccc

SEQ ID NO: 2095753 - RNA, 17 nt, Human
uggaggaaugcuccccc

SEQ ID NO: 2095754 - RNA, 22 nt, Human
uggaggagcuugggggaugacu

SEQ ID NO: 2095755 - RNA, 12 nt, Human
uggaggaggagg

SEQ ID NO: 2095756 - RNA, 13 nt, Human
uggaggaggaggc

SEQ ID NO: 2095757 - RNA, 14 nt, Human
uggaggaggaggca

SEQ ID NO: 2095758 - RNA, 15 nt, Human
uggaggaggaggcaa

SEQ ID NO: 2095759 - RNA, 16 nt, Human
uggaggaggaggcaau

SEQ ID NO: 2095760 - RNA, 17 nt, Human
uggaggcacacagcugc

SEQ ID NO: 2095761 - RNA, 15 nt, Human
uggaggauggagaga

SEQ ID NO: 2095762 - RNA, 20 nt, Human
uggaggaccaaaaaaauaag

SEQ ID NO: 2095763 - RNA, 20 nt, Human
uggaggauggagagagggga

SEQ ID NO: 2095764 - RNA, 17 nt, Human
uggaguuuuaacuguaa

SEQ ID NO: 2095765 - RNA, 21 nt, Human
uggaucugggacccuuuccuu

SEQ ID NO: 2095766 - RNA, 20 nt, Human
uggaucugggacccuuuccu

SEQ ID NO: 2095767 - RNA, 19 nt, Human
uggaucugggacccuuucc

SEQ ID NO: 2095768 - RNA, 23 nt, Human
uggaucugggacccuuuccuucc

SEQ ID NO: 2095769 - RNA, 16 nt, Human
uggaucucccagggcu

SEQ ID NO: 2095770 - RNA, 14 nt, Human
ugcuguuuccuuuu

SEQ ID NO: 2095771 - RNA, 11 nt, Human
ugcuguuuccu

SEQ ID NO: 2095772 - RNA, 12 nt, Human
ugcuguuuccuu

SEQ ID NO: 2095773 - RNA, 22 nt, Human
ugcuguugucauugcuuuacug

SEQ ID NO: 2095774 - RNA, 23 nt, Human
ugcuguugucauugcuuuacugg

SEQ ID NO: 2095775 - RNA, 14 nt, Human
ugcuguugccucau

SEQ ID NO: 2095776 - RNA, 15 nt, Human
uggacaguccuggga

SEQ ID NO: 2095777 - RNA, 16 nt, Human
uggacaguccugggag

SEQ ID NO: 2095778 - RNA, 17 nt, Human
uggacaguccugggaga

SEQ ID NO: 2095779 - RNA, 13 nt, Human
uggaccaaagcug

SEQ ID NO: 2095780 - RNA, 14 nt, Human
uggaccaaagcuga

SEQ ID NO: 2095781 - RNA, 12 nt, Human
uggacaguccug

SEQ ID NO: 2095782 - RNA, 13 nt, Human
uggacaguccugg

SEQ ID NO: 2095783 - RNA, 14 nt, Human
uggacaguccuggg

SEQ ID NO: 2095784 - RNA, 13 nt, Human
uggacaggucugg

SEQ ID NO: 2095785 - RNA, 14 nt, Human
uggacaggucuggg

SEQ ID NO: 2095786 - RNA, 16 nt, Human
uggacaggucugggag

SEQ ID NO: 2095787 - RNA, 17 nt, Human
uggacaggucugggaga

SEQ ID NO: 2095788 - RNA, 20 nt, Human
uggacaggucugggagaggc

SEQ ID NO: 2095789 - RNA, 22 nt, Human
uggacaggucugggagaggcag

SEQ ID NO: 2095790 - RNA, 14 nt, Human
uggagacucugugg

SEQ ID NO: 2095791 - RNA, 19 nt, Human
uggagacucuguggggccu

SEQ ID NO: 2095792 - RNA, 13 nt, Human
uggagacaaugca

SEQ ID NO: 2095793 - RNA, 18 nt, Human
uggagacaaugcagaugc

SEQ ID NO: 2095794 - RNA, 20 nt, Human
uggagacaaugcagaugcca

SEQ ID NO: 2095795 - RNA, 16 nt, Human
uggagaauaauucuuu

SEQ ID NO: 2095796 - RNA, 18 nt, Human
uggagaauaauucuuuga

SEQ ID NO: 2095797 - RNA, 21 nt, Human
uggagaagcucccugaaguaa

SEQ ID NO: 2095798 - RNA, 22 nt, Human
uggagaagucuuagacuugaaa

SEQ ID NO: 2095799 - RNA, 13 nt, Human
uggacuccucugu

SEQ ID NO: 2095800 - RNA, 17 nt, Human
uggacugaagccugcag

SEQ ID NO: 2095801 - RNA, 19 nt, Human
uggacugaagccugcagga

SEQ ID NO: 2095802 - RNA, 18 nt, Human
uggacugaagccugcagg

SEQ ID NO: 2095803 - RNA, 13 nt, Human
uggacugacauuu

SEQ ID NO: 2095804 - RNA, 18 nt, Human
uggacucaggaugcccag

SEQ ID NO: 2095805 - RNA, 15 nt, Human
uggacuccagaucug

SEQ ID NO: 2095806 - RNA, 18 nt, Human
uggacuccagaucugcac

SEQ ID NO: 2095807 - RNA, 13 nt, Human
uggaccagaugcu

SEQ ID NO: 2095808 - RNA, 14 nt, Human
uggaccagaugcug

SEQ ID NO: 2095809 - RNA, 16 nt, Human
uggacucaggaugccc

SEQ ID NO: 2095810 - RNA, 13 nt, Human
uggucccugggag

SEQ ID NO: 2095811 - RNA, 14 nt, Human
uggucccugggagg

SEQ ID NO: 2095812 - RNA, 14 nt, Human
ugguccccaagacc

SEQ ID NO: 2095813 - RNA, 19 nt, Human
uggucccugggaggaaauu

SEQ ID NO: 2095814 - RNA, 15 nt, Human
ugguccgguguccuu

SEQ ID NO: 2095815 - RNA, 14 nt, Human
ugguccuaaguccc

SEQ ID NO: 2095816 - RNA, 18 nt, Human
ugguccuaagucccugcc

SEQ ID NO: 2095817 - RNA, 19 nt, Human
ugguccuaagucccugccc

SEQ ID NO: 2095818 - RNA, 20 nt, Human
ugguccuaagucccugcccc

SEQ ID NO: 2095819 - RNA, 21 nt, Human
ugguccuaagucccugccccc

SEQ ID NO: 2095820 - RNA, 14 nt, Human
ugguccucuugcca

SEQ ID NO: 2095821 - RNA, 15 nt, Human
ugguccucuugccau

SEQ ID NO: 2095822 - RNA, 12 nt, Human
ugguccugacuc

SEQ ID NO: 2095823 - RNA, 19 nt, Human
ugguccugacucaacaugu

SEQ ID NO: 2095824 - RNA, 19 nt, Human
uggucacaggacucugccu

SEQ ID NO: 2095825 - RNA, 18 nt, Human
uggucaacuugagcaugu

SEQ ID NO: 2095826 - RNA, 15 nt, Human
uggucaagauuuuga

SEQ ID NO: 2095827 - RNA, 18 nt, Human
uggucacaggacucugcc

SEQ ID NO: 2095828 - RNA, 14 nt, Human
uggucaacacuuaa

SEQ ID NO: 2095829 - RNA, 19 nt, Human
ugguauggaacucucucca

SEQ ID NO: 2095830 - RNA, 14 nt, Human
ugguauggguuucu

SEQ ID NO: 2095831 - RNA, 19 nt, Human
ugguauggguuucucccag

SEQ ID NO: 2095832 - RNA, 21 nt, Human
ugguaugugacaugcgggcug

SEQ ID NO: 2095833 - RNA, 21 nt, Human
uggguaucaccacuggagauc

SEQ ID NO: 2095834 - RNA, 13 nt, Human
ugggucaaggaau

SEQ ID NO: 2095835 - RNA, 22 nt, Human
uggguaucaccacuggagauca

SEQ ID NO: 2095836 - RNA, 19 nt, Human
uggguauccugcccagugu

SEQ ID NO: 2095837 - RNA, 20 nt, Human
uggguauccugcccaguguu

SEQ ID NO: 2095838 - RNA, 19 nt, Human
uggguauauucauuucaaa

SEQ ID NO: 2095839 - RNA, 17 nt, Human
uggguaucaaacagcuc

SEQ ID NO: 2095840 - RNA, 20 nt, Human
uggguaucaaacagcucagg

SEQ ID NO: 2095841 - RNA, 21 nt, Human
ugguauguguguguaugcuac

SEQ ID NO: 2095842 - RNA, 19 nt, Human
ugguauuugagacauucca

SEQ ID NO: 2095843 - RNA, 19 nt, Human
ugguauuuaucuauuguaa

SEQ ID NO: 2095844 - RNA, 20 nt, Human
ugguauuuaucuauuguaag

SEQ ID NO: 2095845 - RNA, 21 nt, Human
ugguauuuaucuauuguaaga

SEQ ID NO: 2095846 - RNA, 22 nt, Human
ugguauuuaucuauuguaagau

SEQ ID NO: 2095847 - RNA, 12 nt, Human
ugguaugugugu

SEQ ID NO: 2095848 - RNA, 15 nt, Human
ugguaugugugugua

SEQ ID NO: 2095849 - RNA, 17 nt, Human
ugguauguguguguaug

SEQ ID NO: 2095850 - RNA, 19 nt, Human
ugguauguguguguaugcu

SEQ ID NO: 2095851 - RNA, 22 nt, Human
uggugaccucugccugaaguca

SEQ ID NO: 2095852 - RNA, 17 nt, Human
uggugaccucugccuga

SEQ ID NO: 2095853 - RNA, 16 nt, Human
uggugaccucugccug

SEQ ID NO: 2095854 - RNA, 15 nt, Human
uggugaccucugccu

SEQ ID NO: 2095855 - RNA, 17 nt, Human
uggugacccagucagag

SEQ ID NO: 2095856 - RNA, 14 nt, Human
uggugaggaagcuc

SEQ ID NO: 2095857 - RNA, 16 nt, Human
uggugaggaagcucca

SEQ ID NO: 2095858 - RNA, 13 nt, Human
uggugaggagcac

SEQ ID NO: 2095859 - RNA, 17 nt, Human
uggugagguugggcagc

SEQ ID NO: 2095860 - RNA, 17 nt, Human
uggugaucaauuaaaug

SEQ ID NO: 2095861 - RNA, 18 nt, Human
uggugaucaauuaaaugu

SEQ ID NO: 2095862 - RNA, 22 nt, Human
uggugauuuagcaggaagcugu

SEQ ID NO: 2095863 - RNA, 16 nt, Human
uggugauuuagcagga

SEQ ID NO: 2095864 - RNA, 19 nt, Human
uggugaggcuuaacaaugu

SEQ ID NO: 2095865 - RNA, 17 nt, Human
uggugcagggccuccau

SEQ ID NO: 2095866 - RNA, 10 nt, Human
uggugcauua

SEQ ID NO: 2095867 - RNA, 13 nt, Human
uggugcauuacag

SEQ ID NO: 2095868 - RNA, 16 nt, Human
uggugcauuacagaga

SEQ ID NO: 2095869 - RNA, 19 nt, Human
uggugcauuacagagagga

SEQ ID NO: 2095870 - RNA, 14 nt, Human
uggugaccucugcc

SEQ ID NO: 2095871 - RNA, 13 nt, Human
uggugaccucugc

SEQ ID NO: 2095872 - RNA, 13 nt, Human
uggugaauuugaa

SEQ ID NO: 2095873 - RNA, 14 nt, Human
uggugaauuugaau

SEQ ID NO: 2095874 - RNA, 16 nt, Human
uggugacaccagccuu

SEQ ID NO: 2095875 - RNA, 18 nt, Human
uggugacaccagccuuuc

SEQ ID NO: 2095876 - RNA, 16 nt, Human
ugguccuggggcucug

SEQ ID NO: 2095877 - RNA, 19 nt, Human
ugguccuggggcucugugc

SEQ ID NO: 2095878 - RNA, 22 nt, Human
ugguccugacucaacauguuac

SEQ ID NO: 2095879 - RNA, 11 nt, Human
ugguccugggg

SEQ ID NO: 2095880 - RNA, 14 nt, Human
ugguccuggggcuc

SEQ ID NO: 2095881 - RNA, 13 nt, Human
uggucgcccagga

SEQ ID NO: 2095882 - RNA, 14 nt, Human
uggucgcccaggag

SEQ ID NO: 2095883 - RNA, 23 nt, Human
ugguccuuccaggcccccaccac

SEQ ID NO: 2095884 - RNA, 15 nt, Human
uggucgcccaggaga

SEQ ID NO: 2095885 - RNA, 14 nt, Human
ugggauguuucugu

SEQ ID NO: 2095886 - RNA, 17 nt, Human
ugggcagggaggcacca

SEQ ID NO: 2095887 - RNA, 21 nt, Human
ugggcagggaggcaccauuca

SEQ ID NO: 2095888 - RNA, 11 nt, Human
ugggcccuccu

SEQ ID NO: 2095889 - RNA, 15 nt, Human
ugggcaggugggagc

SEQ ID NO: 2095890 - RNA, 20 nt, Human
uggcugggggccucagugcc

SEQ ID NO: 2095891 - RNA, 17 nt, Human
uggcugggggccucagu

SEQ ID NO: 2095892 - RNA, 16 nt, Human
uggcugggggccucag

SEQ ID NO: 2095893 - RNA, 22 nt, Human
ugggauuacaagcgugagccac

SEQ ID NO: 2095894 - RNA, 19 nt, Human
ugggauguccacagaugcc

SEQ ID NO: 2095895 - RNA, 15 nt, Human
ugggaugucuuauuu

SEQ ID NO: 2095896 - RNA, 16 nt, Human
ugggaugucuuauuuu

SEQ ID NO: 2095897 - RNA, 18 nt, Human
uggguacuuguggacaca

SEQ ID NO: 2095898 - RNA, 17 nt, Human
uggguacuuguggacac

SEQ ID NO: 2095899 - RNA, 15 nt, Human
uggguauauucauuu

SEQ ID NO: 2095900 - RNA, 22 nt, Human
uggggguucuuucuuccucugc

SEQ ID NO: 2095901 - RNA, 20 nt, Human
uggggguucuuucuuccucu

SEQ ID NO: 2095902 - RNA, 18 nt, Human
uggguaaucgauggggga

SEQ ID NO: 2095903 - RNA, 15 nt, Human
uggguacagagaggu

SEQ ID NO: 2095904 - RNA, 19 nt, Human
uggggguucuuucuuccuc

SEQ ID NO: 2095905 - RNA, 15 nt, Human
uggggguucuuucuu

SEQ ID NO: 2095906 - RNA, 16 nt, Human
ugggggaagcccugga

SEQ ID NO: 2095907 - RNA, 19 nt, Human
ugggggagucugaagcaga

SEQ ID NO: 2095908 - RNA, 23 nt, Human
uggggaugagaaagguugaagca

SEQ ID NO: 2095909 - RNA, 15 nt, Human
uggggaugagaaagg

SEQ ID NO: 2095910 - RNA, 17 nt, Human
uggggauaaaggagaag

SEQ ID NO: 2095911 - RNA, 15 nt, Human
ugggggaagcccugg

SEQ ID NO: 2095912 - RNA, 19 nt, Human
ugggcuuccauuugugugu

SEQ ID NO: 2095913 - RNA, 23 nt, Human
ugggcuuccauuugugugugugc

SEQ ID NO: 2095914 - RNA, 11 nt, Human
uuaaagacaga

SEQ ID NO: 2095915 - RNA, 12 nt, Human
uuaaagacagag

SEQ ID NO: 2095916 - RNA, 21 nt, Human
uuaaagacaaagacaaauucu

SEQ ID NO: 2095917 - RNA, 17 nt, Human
uuaaagaaucauuauuu

SEQ ID NO: 2095918 - RNA, 12 nt, Human
uuaaauuaaaca

SEQ ID NO: 2095919 - RNA, 14 nt, Human
uuaaauuaaacaau

SEQ ID NO: 2095920 - RNA, 19 nt, Human
uuaaauuaaacaauuuauu

SEQ ID NO: 2095921 - RNA, 15 nt, Human
uuaacauuucuaacu

SEQ ID NO: 2095922 - RNA, 17 nt, Human
uuaaccacuucagcuga

SEQ ID NO: 2095923 - RNA, 22 nt, Human
uuaacauugaccaagaacugca

SEQ ID NO: 2095924 - RNA, 23 nt, Human
uuaacauugaccaagaacugcau

SEQ ID NO: 2095925 - RNA, 16 nt, Human
uuaaccagucugaagu

SEQ ID NO: 2095926 - RNA, 21 nt, Human
uuaaccagucugaaguuucau

SEQ ID NO: 2095927 - RNA, 22 nt, Human
uuaaccagucugaaguuucauu

SEQ ID NO: 2095928 - RNA, 13 nt, Human
uuaaccagaauaa

SEQ ID NO: 2095929 - RNA, 14 nt, Human
uuaacuagaauuua

SEQ ID NO: 2095930 - RNA, 12 nt, Human
uuaacuagaauu

SEQ ID NO: 2095931 - RNA, 23 nt, Human
uuaacuaaucuauuggguucauu

SEQ ID NO: 2095932 - RNA, 17 nt, Human
uuaaccuggugcuggau

SEQ ID NO: 2095933 - RNA, 15 nt, Human
uuaaccucaguguca

SEQ ID NO: 2095934 - RNA, 19 nt, Human
uuaaccucagugucauuua

SEQ ID NO: 2095935 - RNA, 15 nt, Human
uuaaccuaccuguaa

SEQ ID NO: 2095936 - RNA, 13 nt, Human
uuaaccuggugcu

SEQ ID NO: 2095937 - RNA, 18 nt, Human
uuaacuuagcuugaagga

SEQ ID NO: 2095938 - RNA, 18 nt, Human
uuaacuuaacauucugua

SEQ ID NO: 2095939 - RNA, 19 nt, Human
uuaacuguguauguacaua

SEQ ID NO: 2095940 - RNA, 22 nt, Human
uuaacuucagagggaaaguaaa

SEQ ID NO: 2095941 - RNA, 22 nt, Human
uuaacuuaaauuuuaauuuauu

SEQ ID NO: 2095942 - RNA, 11 nt, Human
uuaacucuuug

SEQ ID NO: 2095943 - RNA, 12 nt, Human
uuaacucuuugc

SEQ ID NO: 2095944 - RNA, 20 nt, Human
uuaacucuuugccuuugcca

SEQ ID NO: 2095945 - RNA, 12 nt, Human
uuaacucaauau

SEQ ID NO: 2095946 - RNA, 14 nt, Human
uuaacucaggacuc

SEQ ID NO: 2095947 - RNA, 17 nt, Human
uuaacucaggacuccag

SEQ ID NO: 2095948 - RNA, 18 nt, Human
uuaacucaggacuccagc

SEQ ID NO: 2095949 - RNA, 19 nt, Human
uuaacucaggacuccagcc

SEQ ID NO: 2095950 - RNA, 22 nt, Human
uuaacucaggacuccagcccau

SEQ ID NO: 2095951 - RNA, 21 nt, Human
uuaacuagaauuuauucaauu

SEQ ID NO: 2095952 - RNA, 14 nt, Human
uuaacuauguacaa

SEQ ID NO: 2095953 - RNA, 15 nt, Human
uuaacuauguacaau

SEQ ID NO: 2095954 - RNA, 18 nt, Human
uuaacuauguacaauauu

SEQ ID NO: 2095955 - RNA, 23 nt, Human
uuaacuauguacaauauuuuaag

SEQ ID NO: 2095956 - RNA, 16 nt, Human
uuaacuagaauuuauu

SEQ ID NO: 2095957 - RNA, 15 nt, Human
uuaacuagaauuuau

SEQ ID NO: 2095958 - RNA, 19 nt, Human
uuaacuauuuuauuuucua

SEQ ID NO: 2095959 - RNA, 11 nt, Human
uuaauguuuuu

SEQ ID NO: 2095960 - RNA, 18 nt, Human
uuaauguuuuuaaauaua

SEQ ID NO: 2095961 - RNA, 20 nt, Human
uuacaagcgugagccacugc

SEQ ID NO: 2095962 - RNA, 21 nt, Human
uuacaagcgugagccacugca

SEQ ID NO: 2095963 - RNA, 13 nt, Human
uuacaauugaaau

SEQ ID NO: 2095964 - RNA, 14 nt, Human
uuacaauugaaaug

SEQ ID NO: 2095965 - RNA, 15 nt, Human
uuacaauugaaauga

SEQ ID NO: 2095966 - RNA, 17 nt, Human
uuacaauugaaaugacu

SEQ ID NO: 2095967 - RNA, 20 nt, Human
uuaaugcauguuaggaaaau

SEQ ID NO: 2095968 - RNA, 18 nt, Human
uuaagcaguaaaaacugu

SEQ ID NO: 2095969 - RNA, 17 nt, Human
uuaagcuguuacugucu

SEQ ID NO: 2095970 - RNA, 14 nt, Human
uuaagcuguuucca

SEQ ID NO: 2095971 - RNA, 15 nt, Human
uuaauauaacugccu

SEQ ID NO: 2095972 - RNA, 20 nt, Human
uuaauauucuuucaauaacg

SEQ ID NO: 2095973 - RNA, 22 nt, Human
uuaauauucauuguauaaaaau

SEQ ID NO: 2095974 - RNA, 18 nt, Human
uuaauauugauaugcuua

SEQ ID NO: 2095975 - RNA, 22 nt, Human
uuaauauugauaugcuuauaca

SEQ ID NO: 2095976 - RNA, 17 nt, Human
uuaauauagcuauuuuu

SEQ ID NO: 2095977 - RNA, 15 nt, Human
uuaauauagcuauuu

SEQ ID NO: 2095978 - RNA, 23 nt, Human
uuaauauaacugccuuaaaacuu

SEQ ID NO: 2095979 - RNA, 20 nt, Human
uguuucauauugaugugugu

SEQ ID NO: 2095980 - RNA, 18 nt, Human
uguuucacgaaguuuguu

SEQ ID NO: 2095981 - RNA, 20 nt, Human
uguuuuaagaggcagggucu

SEQ ID NO: 2095982 - RNA, 16 nt, Human
uguuugucagauauga

SEQ ID NO: 2095983 - RNA, 19 nt, Human
uguuugucugucuucauag

SEQ ID NO: 2095984 - RNA, 17 nt, Human
uguuugucugucuucau

SEQ ID NO: 2095985 - RNA, 16 nt, Human
uguuugguucuggggc

SEQ ID NO: 2095986 - RNA, 20 nt, Human
uguuugguucuggggccccu

SEQ ID NO: 2095987 - RNA, 15 nt, Human
uguuuggguauccug

SEQ ID NO: 2095988 - RNA, 18 nt, Human
uguuuggguauccugccc

SEQ ID NO: 2095989 - RNA, 23 nt, Human
uguuuggguauccugcccagugu

SEQ ID NO: 2095990 - RNA, 13 nt, Human
uguuuguaaauaa

SEQ ID NO: 2095991 - RNA, 15 nt, Human
uguuuguaaauaaga

SEQ ID NO: 2095992 - RNA, 16 nt, Human
uguuuguaaauaagag

SEQ ID NO: 2095993 - RNA, 18 nt, Human
uguuuguaaauaagagau

SEQ ID NO: 2095994 - RNA, 19 nt, Human
uguuuguaaauaagagauu

SEQ ID NO: 2095995 - RNA, 21 nt, Human
uguuuguaaauaagagauuug

SEQ ID NO: 2095996 - RNA, 20 nt, Human
uguuucuagagccugcugga

SEQ ID NO: 2095997 - RNA, 23 nt, Human
uguuucuagagccugcuggaucu

SEQ ID NO: 2095998 - RNA, 15 nt, Human
uguuucuagggaaau

SEQ ID NO: 2095999 - RNA, 11 nt, Human
uguuuccuuuu

SEQ ID NO: 2096000 - RNA, 21 nt, Human
uguuucgcugauauauguguu

SEQ ID NO: 2096001 - RNA, 20 nt, Human
uguuucgugaaguauacugu

SEQ ID NO: 2096002 - RNA, 15 nt, Human
uguuucgugaaguau

SEQ ID NO: 2096003 - RNA, 19 nt, Human
uguuucgugaaguauacug

SEQ ID NO: 2096004 - RNA, 16 nt, Human
uguuuccuucauuucu

SEQ ID NO: 2096005 - RNA, 12 nt, Human
uguuuccuucag

SEQ ID NO: 2096006 - RNA, 15 nt, Human
uguuuccuucagugc

SEQ ID NO: 2096007 - RNA, 20 nt, Human
uuaaaagaaagccucagaga

SEQ ID NO: 2096008 - RNA, 19 nt, Human
uguuuuuuuuuuccacuua

SEQ ID NO: 2096009 - RNA, 18 nt, Human
uguuuuuuuuuuccacuu

SEQ ID NO: 2096010 - RNA, 17 nt, Human
uguuuuaaggaagaaaa

SEQ ID NO: 2096011 - RNA, 18 nt, Human
uguuuuaaggaagaaaaa

SEQ ID NO: 2096012 - RNA, 22 nt, Human
uguuuuaagaggcagggucuca

SEQ ID NO: 2096013 - RNA, 14 nt, Human
uguuuuguguuguu

SEQ ID NO: 2096014 - RNA, 17 nt, Human
uguuuuguucuuuaaag

SEQ ID NO: 2096015 - RNA, 16 nt, Human
uguuuuuaaaaaucau

SEQ ID NO: 2096016 - RNA, 13 nt, Human
uguuuuguuucug

SEQ ID NO: 2096017 - RNA, 13 nt, Human
uguuuuguuuuaa

SEQ ID NO: 2096018 - RNA, 12 nt, Human
uuaaaagccauc

SEQ ID NO: 2096019 - RNA, 19 nt, Human
uuaaaagccaucauguaaa

SEQ ID NO: 2096020 - RNA, 21 nt, Human
uuaaaagccaucauguaaauu

SEQ ID NO: 2096021 - RNA, 21 nt, Human
uuaaacuguguggacugugau

SEQ ID NO: 2096022 - RNA, 20 nt, Human
uuaaacuguguggacuguga

SEQ ID NO: 2096023 - RNA, 22 nt, Human
uuaaaauagcaacacucuauau

SEQ ID NO: 2096024 - RNA, 22 nt, Human
uuaggccaaaaaaauguaagau

SEQ ID NO: 2096025 - RNA, 18 nt, Human
uuaggcaugcacagcugu

SEQ ID NO: 2096026 - RNA, 15 nt, Human
uuaggcuauucacaa

SEQ ID NO: 2096027 - RNA, 16 nt, Human
uuaggcuauucacaac

SEQ ID NO: 2096028 - RNA, 12 nt, Human
uuaguagcaugu

SEQ ID NO: 2096029 - RNA, 13 nt, Human
uuaguagcauguu

SEQ ID NO: 2096030 - RNA, 17 nt, Human
uuaguagagacaggguu

SEQ ID NO: 2096031 - RNA, 12 nt, Human
uuaggcugggcc

SEQ ID NO: 2096032 - RNA, 14 nt, Human
uuaggcugggccca

SEQ ID NO: 2096033 - RNA, 16 nt, Human
uuaggcugggcccaga

SEQ ID NO: 2096034 - RNA, 17 nt, Human
uuaggcugggcccagag

SEQ ID NO: 2096035 - RNA, 13 nt, Human
uuaggcagcagcu

SEQ ID NO: 2096036 - RNA, 23 nt, Human
uuaggcagcagcuuuuaauacag

SEQ ID NO: 2096037 - RNA, 14 nt, Human
uuaggcagggaagu

SEQ ID NO: 2096038 - RNA, 15 nt, Human
uuaggcagauugaaa

SEQ ID NO: 2096039 - RNA, 21 nt, Human
uuaggaguucgagaccagccu

SEQ ID NO: 2096040 - RNA, 15 nt, Human
uuaggacuugcccuc

SEQ ID NO: 2096041 - RNA, 21 nt, Human
uuaggagagaagguagggguu

SEQ ID NO: 2096042 - RNA, 15 nt, Human
uuaggaagagaaacc

SEQ ID NO: 2096043 - RNA, 13 nt, Human
uuaggaaguguaa

SEQ ID NO: 2096044 - RNA, 19 nt, Human
uuaggaaguguaacagcug

SEQ ID NO: 2096045 - RNA, 20 nt, Human
uuaggaaguguaacagcuga

SEQ ID NO: 2096046 - RNA, 21 nt, Human
uuaggaaguguaacagcugag

SEQ ID NO: 2096047 - RNA, 15 nt, Human
uuaguaucuaacaug

SEQ ID NO: 2096048 - RNA, 19 nt, Human
uuaguauauuuauauaauu

SEQ ID NO: 2096049 - RNA, 20 nt, Human
uuaguauauuuauauaauua

SEQ ID NO: 2096050 - RNA, 17 nt, Human
uuaguaucuaacaugua

SEQ ID NO: 2096051 - RNA, 18 nt, Human
uuaguaucuaacauguau

SEQ ID NO: 2096052 - RNA, 23 nt, Human
uuaguaucuaacauguaucccaa

SEQ ID NO: 2096053 - RNA, 15 nt, Human
uuagucauuuugcuu

SEQ ID NO: 2096054 - RNA, 22 nt, Human
uuaguauuuauuuaauguuaug

SEQ ID NO: 2096055 - RNA, 13 nt, Human
uuaguauuugcau

SEQ ID NO: 2096056 - RNA, 16 nt, Human
uuaguauuugcauauu

SEQ ID NO: 2096057 - RNA, 14 nt, Human
uuagucauagaaga

SEQ ID NO: 2096058 - RNA, 15 nt, Human
uuagucauagaagaa

SEQ ID NO: 2096059 - RNA, 16 nt, Human
uuagucauagaagaac

SEQ ID NO: 2096060 - RNA, 21 nt, Human
uuaguguuuggguauauucau

SEQ ID NO: 2096061 - RNA, 16 nt, Human
uuagcugugugaaaua

SEQ ID NO: 2096062 - RNA, 16 nt, Human
uuagcuguuauuucua

SEQ ID NO: 2096063 - RNA, 17 nt, Human
uuagcuguuauuucuau

SEQ ID NO: 2096064 - RNA, 19 nt, Human
uuagcuguuauuucuauuu

SEQ ID NO: 2096065 - RNA, 21 nt, Human
uuagcuguuauuucuauuuuu

SEQ ID NO: 2096066 - RNA, 16 nt, Human
uuagcuuagaccucag

SEQ ID NO: 2096067 - RNA, 17 nt, Human
uuagcuuagaccucagc

SEQ ID NO: 2096068 - RNA, 18 nt, Human
uuagcuuagaccucagcc

SEQ ID NO: 2096069 - RNA, 21 nt, Human
uuagcuuagaccucagccugu

SEQ ID NO: 2096070 - RNA, 17 nt, Human
uuagcuuuacuguuugu

SEQ ID NO: 2096071 - RNA, 15 nt, Human
uuagcuuuacuguuu

SEQ ID NO: 2096072 - RNA, 16 nt, Human
uuagcuuuacuguuug

SEQ ID NO: 2096073 - RNA, 15 nt, Human
uuagcuuaucaauuu

SEQ ID NO: 2096074 - RNA, 17 nt, Human
uuagcuuaucaauuugu

SEQ ID NO: 2096075 - RNA, 19 nt, Human
uuagcuuaucaauuuguca

SEQ ID NO: 2096076 - RNA, 21 nt, Human
uuagcuugaaggaucuguuuu

SEQ ID NO: 2096077 - RNA, 17 nt, Human
uuagcuugcaccuuguc

SEQ ID NO: 2096078 - RNA, 11 nt, Human
uuaggaaauaa

SEQ ID NO: 2096079 - RNA, 12 nt, Human
uuaggaaauaaa

SEQ ID NO: 2096080 - RNA, 20 nt, Human
uuaggaaauaaaaccuuuca

SEQ ID NO: 2096081 - RNA, 21 nt, Human
uuaggaaauaaaaccuuucaa

SEQ ID NO: 2096082 - RNA, 15 nt, Human
uuaggaaauaaaacc

SEQ ID NO: 2096083 - RNA, 17 nt, Human
uuaggaaauaaaaccuu

SEQ ID NO: 2096084 - RNA, 18 nt, Human
uuaggaaauaaaaccuuu

SEQ ID NO: 2096085 - RNA, 19 nt, Human
uuaggaaauaaaaccuuuc

SEQ ID NO: 2096086 - RNA, 10 nt, Human
uuagcugugc

SEQ ID NO: 2096087 - RNA, 15 nt, Human
uuagcugugugaaau

SEQ ID NO: 2096088 - RNA, 12 nt, Human
uuagcucagccc

SEQ ID NO: 2096089 - RNA, 13 nt, Human
uuagcucagcccc

SEQ ID NO: 2096090 - RNA, 19 nt, Human
uuagcucagccccagccca

SEQ ID NO: 2096091 - RNA, 13 nt, Human
uuagcugcagaac

SEQ ID NO: 2096092 - RNA, 15 nt, Human
uuagcugccaagccc

SEQ ID NO: 2096093 - RNA, 17 nt, Human
uuagcugccaagcccca

SEQ ID NO: 2096094 - RNA, 22 nt, Human
uuagcugccaagccccauccug

SEQ ID NO: 2096095 - RNA, 16 nt, Human
uuagauaucuuuuuau

SEQ ID NO: 2096096 - RNA, 23 nt, Human
uuagauaucuuuuuauugaugug

SEQ ID NO: 2096097 - RNA, 21 nt, Human
uuagcguagcuaagugaaaag

SEQ ID NO: 2096098 - RNA, 17 nt, Human
uuagaggaaaaaaauga

SEQ ID NO: 2096099 - RNA, 18 nt, Human
uuagaggaaaaaaaugac

SEQ ID NO: 2096100 - RNA, 19 nt, Human
uuagaggaaaaaaaugacu

SEQ ID NO: 2096101 - RNA, 12 nt, Human
uuagaggccagc

SEQ ID NO: 2096102 - RNA, 15 nt, Human
uuagagauaagaguu

SEQ ID NO: 2096103 - RNA, 13 nt, Human
uuagagaugaauu

SEQ ID NO: 2096104 - RNA, 21 nt, Human
uuagagcagaugaccccuccc

SEQ ID NO: 2096105 - RNA, 14 nt, Human
uuagagucagccuu

SEQ ID NO: 2096106 - RNA, 11 nt, Human
uuacuuuguau

SEQ ID NO: 2096107 - RNA, 12 nt, Human
uuacuuuguaug

SEQ ID NO: 2096108 - RNA, 13 nt, Human
uuacuuuguauga

SEQ ID NO: 2096109 - RNA, 15 nt, Human
uuacuuuguaugaua

SEQ ID NO: 2096110 - RNA, 18 nt, Human
uuacuuucuguugccaca

SEQ ID NO: 2096111 - RNA, 11 nt, Human
uuacuuucugu

SEQ ID NO: 2096112 - RNA, 19 nt, Human
uuacuugcauugaauauau

SEQ ID NO: 2096113 - RNA, 18 nt, Human
uuacuuuaaaaggagcca

SEQ ID NO: 2096114 - RNA, 17 nt, Human
uuacuuuaaaaggagcc

SEQ ID NO: 2096115 - RNA, 14 nt, Human
uuacuuuguguuca

SEQ ID NO: 2096116 - RNA, 16 nt, Human
uuagaccucagccugu

SEQ ID NO: 2096117 - RNA, 14 nt, Human
uuagaccucagccu

SEQ ID NO: 2096118 - RNA, 15 nt, Human
uuagaccucagccug

SEQ ID NO: 2096119 - RNA, 11 nt, Human
uuagaccucag

SEQ ID NO: 2096120 - RNA, 12 nt, Human
uuagaccucagc

SEQ ID NO: 2096121 - RNA, 13 nt, Human
uuagaccucagcc

SEQ ID NO: 2096122 - RNA, 17 nt, Human
uuagacuugaaauacua

SEQ ID NO: 2096123 - RNA, 18 nt, Human
uuagacuuuagaaauaaa

SEQ ID NO: 2096124 - RNA, 20 nt, Human
uuagagacaggguccugcua

SEQ ID NO: 2096125 - RNA, 21 nt, Human
uuacuuaaaccgccaaggcug

SEQ ID NO: 2096126 - RNA, 18 nt, Human
uuacuuagguguggggga

SEQ ID NO: 2096127 - RNA, 18 nt, Human
uuacuuauuaucuucagg

SEQ ID NO: 2096128 - RNA, 14 nt, Human
uuacuuacagcaua

SEQ ID NO: 2096129 - RNA, 14 nt, Human
uuacuuagcaaugu

SEQ ID NO: 2096130 - RNA, 13 nt, Human
uuacuuagcaugc

SEQ ID NO: 2096131 - RNA, 15 nt, Human
uuacuuagcuuauca

SEQ ID NO: 2096132 - RNA, 19 nt, Human
uuacuuagcuuaucaauuu

SEQ ID NO: 2096133 - RNA, 21 nt, Human
uuacuuagcuuaucaauuugu

SEQ ID NO: 2096134 - RNA, 15 nt, Human
uuacuguuuguuaug

SEQ ID NO: 2096135 - RNA, 12 nt, Human
uuacuucugcua

SEQ ID NO: 2096136 - RNA, 23 nt, Human
uuacuucuuauacauuugauaaa

SEQ ID NO: 2096137 - RNA, 11 nt, Human
uuacuucugcu

SEQ ID NO: 2096138 - RNA, 15 nt, Human
uuacuuccuaucaag

SEQ ID NO: 2096139 - RNA, 14 nt, Human
uuacuacaaaauuu

SEQ ID NO: 2096140 - RNA, 20 nt, Human
uuacuacaaaauuugaaauu

SEQ ID NO: 2096141 - RNA, 15 nt, Human
uuacuacaguuguuu

SEQ ID NO: 2096142 - RNA, 13 nt, Human
uuacuacaguugu

SEQ ID NO: 2096143 - RNA, 18 nt, Human
uuacuacaugugggagcu

SEQ ID NO: 2096144 - RNA, 13 nt, Human
uuacuacugugga

SEQ ID NO: 2096145 - RNA, 19 nt, Human
uuacuaucaugucaaacgu

SEQ ID NO: 2096146 - RNA, 21 nt, Human
uuacuaucaugucaaacguga

SEQ ID NO: 2096147 - RNA, 22 nt, Human
uuacuauccuggcuuugcccaa

SEQ ID NO: 2096148 - RNA, 16 nt, Human
uuacuaugcacaauuu

SEQ ID NO: 2096149 - RNA, 19 nt, Human
uuacacaaauacuuauuca

SEQ ID NO: 2096150 - RNA, 15 nt, Human
uucuaaagauggaaa

SEQ ID NO: 2096151 - RNA, 11 nt, Human
uucguuuguuu

SEQ ID NO: 2096152 - RNA, 15 nt, Human
uucguuuguuuguuu

SEQ ID NO: 2096153 - RNA, 18 nt, Human
uucguuuguuuguuuugu

SEQ ID NO: 2096154 - RNA, 12 nt, Human
uucguuuugguu

SEQ ID NO: 2096155 - RNA, 22 nt, Human
uucguuuugguuaaguuggcuu

SEQ ID NO: 2096156 - RNA, 13 nt, Human
uucuaaaaaacag

SEQ ID NO: 2096157 - RNA, 19 nt, Human
uuccuggagagucucacuc

SEQ ID NO: 2096158 - RNA, 17 nt, Human
uucguucuuguuaguac

SEQ ID NO: 2096159 - RNA, 15 nt, Human
uucguucuuguucug

SEQ ID NO: 2096160 - RNA, 20 nt, Human
uucguucuuguucuguuuug

SEQ ID NO: 2096161 - RNA, 14 nt, Human
uucgggcccugccu

SEQ ID NO: 2096162 - RNA, 20 nt, Human
uucgggaggucgaggcagga

SEQ ID NO: 2096163 - RNA, 18 nt, Human
uuccuuggcaugccuucc

SEQ ID NO: 2096164 - RNA, 21 nt, Human
uuccuuggcaugccuuccagc

SEQ ID NO: 2096165 - RNA, 17 nt, Human
uuccuuggggcaggcag

SEQ ID NO: 2096166 - RNA, 18 nt, Human
uuccuuggggcaggcagu

SEQ ID NO: 2096167 - RNA, 14 nt, Human
uuccuuggggcagg

SEQ ID NO: 2096168 - RNA, 15 nt, Human
uuccuuggggcaggc

SEQ ID NO: 2096169 - RNA, 18 nt, Human
uuccuggcaauagugugu

SEQ ID NO: 2096170 - RNA, 20 nt, Human
uuccuggcaauaguguguuc

SEQ ID NO: 2096171 - RNA, 22 nt, Human
uuccuggcaauaguguguucug

SEQ ID NO: 2096172 - RNA, 23 nt, Human
uuccuggcaauaguguguucuga

SEQ ID NO: 2096173 - RNA, 20 nt, Human
uuccuugaguugauucagcu

SEQ ID NO: 2096174 - RNA, 17 nt, Human
uuccuugagaaaaacaa

SEQ ID NO: 2096175 - RNA, 13 nt, Human
uuccuugaccagc

SEQ ID NO: 2096176 - RNA, 15 nt, Human
uuccuugaccagcag

SEQ ID NO: 2096177 - RNA, 15 nt, Human
uuccuggcaauagug

SEQ ID NO: 2096178 - RNA, 13 nt, Human
uuccuggagcccg

SEQ ID NO: 2096179 - RNA, 14 nt, Human
uuccuggagcccga

SEQ ID NO: 2096180 - RNA, 20 nt, Human
uuccuggagcccgaggcacc

SEQ ID NO: 2096181 - RNA, 17 nt, Human
uuccugccaggcauggu

SEQ ID NO: 2096182 - RNA, 13 nt, Human
uuccugaugaccc

SEQ ID NO: 2096183 - RNA, 15 nt, Human
uuccugaugacccag

SEQ ID NO: 2096184 - RNA, 16 nt, Human
uuccugaugacccagg

SEQ ID NO: 2096185 - RNA, 17 nt, Human
uuccugaugacccaggc

SEQ ID NO: 2096186 - RNA, 18 nt, Human
uuccugaugacccaggcu

SEQ ID NO: 2096187 - RNA, 21 nt, Human
uuccugaugacccaggcugcc

SEQ ID NO: 2096188 - RNA, 14 nt, Human
uuccuccccagcag

SEQ ID NO: 2096189 - RNA, 18 nt, Human
uuccugcauuugugaaau

SEQ ID NO: 2096190 - RNA, 16 nt, Human
uuccugcauuugugaa

SEQ ID NO: 2096191 - RNA, 15 nt, Human
uuccugcauuuguga

SEQ ID NO: 2096192 - RNA, 11 nt, Human
uuccuccccag

SEQ ID NO: 2096193 - RNA, 12 nt, Human
uuccuccccagc

SEQ ID NO: 2096194 - RNA, 13 nt, Human
uuccuccccagca

SEQ ID NO: 2096195 - RNA, 21 nt, Human
uuccuccccauuagagucagc

SEQ ID NO: 2096196 - RNA, 23 nt, Human
uuccuccccauuagagucagccu

SEQ ID NO: 2096197 - RNA, 14 nt, Human
uuccuaucccaucc

SEQ ID NO: 2096198 - RNA, 15 nt, Human
uuccuaucccauccc

SEQ ID NO: 2096199 - RNA, 16 nt, Human
uuccuaucccauccca

SEQ ID NO: 2096200 - RNA, 17 nt, Human
uuccuaucccaucccau

SEQ ID NO: 2096201 - RNA, 18 nt, Human
uuccuaucccaucccauc

SEQ ID NO: 2096202 - RNA, 21 nt, Human
uuccuauauaguuuauugaca

SEQ ID NO: 2096203 - RNA, 22 nt, Human
uuccuauauaguuuauugacaa

SEQ ID NO: 2096204 - RNA, 19 nt, Human
uuccuauauaguuuauuga

SEQ ID NO: 2096205 - RNA, 16 nt, Human
uucccuuugcuccacc

SEQ ID NO: 2096206 - RNA, 17 nt, Human
uucccuuugcuccaccc

SEQ ID NO: 2096207 - RNA, 18 nt, Human
uucccuuugcuccacccc

SEQ ID NO: 2096208 - RNA, 20 nt, Human
uuccuauaauauaauaaaua

SEQ ID NO: 2096209 - RNA, 15 nt, Human
uucccuugagcccuc

SEQ ID NO: 2096210 - RNA, 14 nt, Human
uucccuugagcccu

SEQ ID NO: 2096211 - RNA, 14 nt, Human
uuccuauguaacug

SEQ ID NO: 2096212 - RNA, 15 nt, Human
uuccuauuucuuaua

SEQ ID NO: 2096213 - RNA, 16 nt, Human
uuccucauuccugaaa

SEQ ID NO: 2096214 - RNA, 13 nt, Human
uuccucauuagca

SEQ ID NO: 2096215 - RNA, 21 nt, Human
uuccucacaccaggcuugccu

SEQ ID NO: 2096216 - RNA, 19 nt, Human
uucccccuccaaucccacc

SEQ ID NO: 2096217 - RNA, 15 nt, Human
uucccuccugcuacu

SEQ ID NO: 2096218 - RNA, 14 nt, Human
uucccucucccugu

SEQ ID NO: 2096219 - RNA, 13 nt, Human
uucccucugccug

SEQ ID NO: 2096220 - RNA, 14 nt, Human
uucccucugccugu

SEQ ID NO: 2096221 - RNA, 17 nt, Human
uucccucugccuguccc

SEQ ID NO: 2096222 - RNA, 18 nt, Human
uucccucugccugucccu

SEQ ID NO: 2096223 - RNA, 20 nt, Human
uucccugaaaacccagagag

SEQ ID NO: 2096224 - RNA, 15 nt, Human
uucccugaauguauu

SEQ ID NO: 2096225 - RNA, 21 nt, Human
uucccucugccugucccucuc

SEQ ID NO: 2096226 - RNA, 17 nt, Human
uucccugaaaacccaga

SEQ ID NO: 2096227 - RNA, 19 nt, Human
uucccugaaaacccagaga

SEQ ID NO: 2096228 - RNA, 23 nt, Human
uucccugaaaaccucacaugcau

SEQ ID NO: 2096229 - RNA, 23 nt, Human
uucccuggcuuguaacuccacca

SEQ ID NO: 2096230 - RNA, 17 nt, Human
uucccuucuccuuccaa

SEQ ID NO: 2096231 - RNA, 20 nt, Human
uucccuucuccuuccaacug

SEQ ID NO: 2096232 - RNA, 17 nt, Human
uucccugcuuaaugaaa

SEQ ID NO: 2096233 - RNA, 16 nt, Human
uucccugagucaccag

SEQ ID NO: 2096234 - RNA, 18 nt, Human
uucccugagucaccagga

SEQ ID NO: 2096235 - RNA, 19 nt, Human
uucccugagucaccaggaa

SEQ ID NO: 2096236 - RNA, 10 nt, Human
uucccugcaa

SEQ ID NO: 2096237 - RNA, 11 nt, Human
uucccuggacc

SEQ ID NO: 2096238 - RNA, 12 nt, Human
uucccuggacca

SEQ ID NO: 2096239 - RNA, 19 nt, Human
uucccuggaccagaugcug

SEQ ID NO: 2096240 - RNA, 18 nt, Human
uuccacucaggucuguuu

SEQ ID NO: 2096241 - RNA, 15 nt, Human
uuccacuacugcuac

SEQ ID NO: 2096242 - RNA, 20 nt, Human
uuccagaugccuucuccaga

SEQ ID NO: 2096243 - RNA, 21 nt, Human
uuccagagaguggcuccuccc

SEQ ID NO: 2096244 - RNA, 20 nt, Human
uuccagagaguggcuccucc

SEQ ID NO: 2096245 - RNA, 19 nt, Human
uuccagagaguggcuccuc

SEQ ID NO: 2096246 - RNA, 18 nt, Human
uuccagagaguggcuccu

SEQ ID NO: 2096247 - RNA, 17 nt, Human
uuccagagaguggcucc

SEQ ID NO: 2096248 - RNA, 23 nt, Human
uuccaaauucacaaguuguguuu

SEQ ID NO: 2096249 - RNA, 15 nt, Human
uuccaaauucacaag

SEQ ID NO: 2096250 - RNA, 15 nt, Human
uuccaaauucugcuu

SEQ ID NO: 2096251 - RNA, 16 nt, Human
uucauuugaugcuaaa

SEQ ID NO: 2096252 - RNA, 13 nt, Human
uucauuucugaua

SEQ ID NO: 2096253 - RNA, 19 nt, Human
uucauuucugauauagaau

SEQ ID NO: 2096254 - RNA, 16 nt, Human
uucauuuccugugucu

SEQ ID NO: 2096255 - RNA, 15 nt, Human
uucauuuccuguguc

SEQ ID NO: 2096256 - RNA, 14 nt, Human
uucaugcaaugaca

SEQ ID NO: 2096257 - RNA, 20 nt, Human
uucaugcaaggggaaaaucu

SEQ ID NO: 2096258 - RNA, 15 nt, Human
uucaugcaaugacau

SEQ ID NO: 2096259 - RNA, 21 nt, Human
uucaugcaaugacaucuucaa

SEQ ID NO: 2096260 - RNA, 16 nt, Human
uucaggaaccuggacc

SEQ ID NO: 2096261 - RNA, 17 nt, Human
uucaggaaccuggacca

SEQ ID NO: 2096262 - RNA, 22 nt, Human
uucaggaaccuggaccaaagcu

SEQ ID NO: 2096263 - RNA, 23 nt, Human
uucaggaaccuggaccaaagcug

SEQ ID NO: 2096264 - RNA, 22 nt, Human
uucaucuuggucacauacaauu

SEQ ID NO: 2096265 - RNA, 17 nt, Human
uucaugaaaauccuacc

SEQ ID NO: 2096266 - RNA, 18 nt, Human
uucaugaaaauccuacca

SEQ ID NO: 2096267 - RNA, 15 nt, Human
uuccaugugcccagu

SEQ ID NO: 2096268 - RNA, 17 nt, Human
uuccaugugcccaguua

SEQ ID NO: 2096269 - RNA, 16 nt, Human
uuccaugugcccaguu

SEQ ID NO: 2096270 - RNA, 14 nt, Human
uuccauuaugauuc

SEQ ID NO: 2096271 - RNA, 15 nt, Human
uuccauuaugauucu

SEQ ID NO: 2096272 - RNA, 16 nt, Human
uuccauuaugauucuu

SEQ ID NO: 2096273 - RNA, 11 nt, Human
uucccauaauu

SEQ ID NO: 2096274 - RNA, 15 nt, Human
uucccauaauuuucu

SEQ ID NO: 2096275 - RNA, 16 nt, Human
uucccauaauuuucuu

SEQ ID NO: 2096276 - RNA, 18 nt, Human
uucccauaauuuucuuca

SEQ ID NO: 2096277 - RNA, 23 nt, Human
uucccaucacuggagcaccaggc

SEQ ID NO: 2096278 - RNA, 13 nt, Human
uucccauguuaaa

SEQ ID NO: 2096279 - RNA, 18 nt, Human
uucccauugaaaauguaa

SEQ ID NO: 2096280 - RNA, 14 nt, Human
uucccauucuugca

SEQ ID NO: 2096281 - RNA, 11 nt, Human
uucccucccuu

SEQ ID NO: 2096282 - RNA, 18 nt, Human
uuccccccacucucccca

SEQ ID NO: 2096283 - RNA, 19 nt, Human
uuccccccacucuccccac

SEQ ID NO: 2096284 - RNA, 21 nt, Human
uuccccccacucuccccacac

SEQ ID NO: 2096285 - RNA, 17 nt, Human
uucccucccuuccucuu

SEQ ID NO: 2096286 - RNA, 20 nt, Human
uucccucccuuccucuuucc

SEQ ID NO: 2096287 - RNA, 14 nt, Human
uucccccaaagugg

SEQ ID NO: 2096288 - RNA, 18 nt, Human
uucccccaccagcuaagg

SEQ ID NO: 2096289 - RNA, 13 nt, Human
uucccccagcccu

SEQ ID NO: 2096290 - RNA, 14 nt, Human
uucccccagcccug

SEQ ID NO: 2096291 - RNA, 15 nt, Human
uucccccagcccugu

SEQ ID NO: 2096292 - RNA, 20 nt, Human
uucccccagcccuguggaag

SEQ ID NO: 2096293 - RNA, 14 nt, Human
uucccccauagcca

SEQ ID NO: 2096294 - RNA, 12 nt, Human
uuccccccacuc

SEQ ID NO: 2096295 - RNA, 18 nt, Human
uucccccauagccacccc

SEQ ID NO: 2096296 - RNA, 15 nt, Human
uucccccauagccac

SEQ ID NO: 2096297 - RNA, 17 nt, Human
uucccccauagccaccc

SEQ ID NO: 2096298 - RNA, 11 nt, Human
uuccccauggg

SEQ ID NO: 2096299 - RNA, 16 nt, Human
uuccccauacucuguc

SEQ ID NO: 2096300 - RNA, 19 nt, Human
uuauugcagcgauuaauaa

SEQ ID NO: 2096301 - RNA, 12 nt, Human
uuauugcacaaa

SEQ ID NO: 2096302 - RNA, 15 nt, Human
uuauugcccacgcug

SEQ ID NO: 2096303 - RNA, 13 nt, Human
uuauugcauuaua

SEQ ID NO: 2096304 - RNA, 13 nt, Human
uuauugagaauuu

SEQ ID NO: 2096305 - RNA, 19 nt, Human
uuauugagaauuuuaaauu

SEQ ID NO: 2096306 - RNA, 14 nt, Human
uuauucuugugaau

SEQ ID NO: 2096307 - RNA, 11 nt, Human
uuauucugcuc

SEQ ID NO: 2096308 - RNA, 22 nt, Human
uuauugacaauaauuucagguu

SEQ ID NO: 2096309 - RNA, 14 nt, Human
uuauugacaauaau

SEQ ID NO: 2096310 - RNA, 18 nt, Human
uuauugacaauaauuuca

SEQ ID NO: 2096311 - RNA, 23 nt, Human
uuauuacagggcauucaaauggg

SEQ ID NO: 2096312 - RNA, 13 nt, Human
uuauucuagauua

SEQ ID NO: 2096313 - RNA, 14 nt, Human
uuauucucaaagca

SEQ ID NO: 2096314 - RNA, 15 nt, Human
uuauucucaaagcag

SEQ ID NO: 2096315 - RNA, 16 nt, Human
uuauucucaaagcagg

SEQ ID NO: 2096316 - RNA, 17 nt, Human
uuauucucacuccacca

SEQ ID NO: 2096317 - RNA, 12 nt, Human
uuauuaauuuga

SEQ ID NO: 2096318 - RNA, 15 nt, Human
uuauuaaugcuaagg

SEQ ID NO: 2096319 - RNA, 16 nt, Human
uuauuaaugcuaaggg

SEQ ID NO: 2096320 - RNA, 13 nt, Human
uuauuaaugcuaa

SEQ ID NO: 2096321 - RNA, 14 nt, Human
uuauuaaugcuaag

SEQ ID NO: 2096322 - RNA, 11 nt, Human
uuauggccuca

SEQ ID NO: 2096323 - RNA, 12 nt, Human
uuauggccucag

SEQ ID NO: 2096324 - RNA, 13 nt, Human
uuauggccucagc

SEQ ID NO: 2096325 - RNA, 15 nt, Human
uuauggccucagcug

SEQ ID NO: 2096326 - RNA, 18 nt, Human
uuauggccucagcugccu

SEQ ID NO: 2096327 - RNA, 12 nt, Human
uuauuaaaaucu

SEQ ID NO: 2096328 - RNA, 16 nt, Human
uuauuaaaaucuuaaa

SEQ ID NO: 2096329 - RNA, 14 nt, Human
uuaugcauagauaa

SEQ ID NO: 2096330 - RNA, 20 nt, Human
uuaugcagcuuccuuuugag

SEQ ID NO: 2096331 - RNA, 23 nt, Human
uuaugcaggggcaaacaccugcu

SEQ ID NO: 2096332 - RNA, 15 nt, Human
uuaucuuuguaauua

SEQ ID NO: 2096333 - RNA, 17 nt, Human
uuaucuuuucuacagca

SEQ ID NO: 2096334 - RNA, 12 nt, Human
uuaucuuuugag

SEQ ID NO: 2096335 - RNA, 17 nt, Human
uuaugcaaauucccaga

SEQ ID NO: 2096336 - RNA, 17 nt, Human
uuaugcaaggaaggaaa

SEQ ID NO: 2096337 - RNA, 18 nt, Human
uuaugcaaggaaggaaag

SEQ ID NO: 2096338 - RNA, 22 nt, Human
uuaugcaaggaaggaaagaaag

SEQ ID NO: 2096339 - RNA, 16 nt, Human
uuaucuuggacugaca

SEQ ID NO: 2096340 - RNA, 17 nt, Human
uuaucuuggacugacau

SEQ ID NO: 2096341 - RNA, 17 nt, Human
uuaucuugucucugggc

SEQ ID NO: 2096342 - RNA, 16 nt, Human
uuaucuugucucuggg

SEQ ID NO: 2096343 - RNA, 16 nt, Human
uuaugcuguauuuucu

SEQ ID NO: 2096344 - RNA, 21 nt, Human
uuaugcuguauuuucuuuuua

SEQ ID NO: 2096345 - RNA, 17 nt, Human
uuaugcauaacugacaa

SEQ ID NO: 2096346 - RNA, 18 nt, Human
uuaugccauuuguuuauu

SEQ ID NO: 2096347 - RNA, 15 nt, Human
uuaugccuuuuauuu

SEQ ID NO: 2096348 - RNA, 14 nt, Human
uuaugcucaggguc

SEQ ID NO: 2096349 - RNA, 13 nt, Human
uuaguugcuguau

SEQ ID NO: 2096350 - RNA, 15 nt, Human
uuaguugcuguaugu

SEQ ID NO: 2096351 - RNA, 20 nt, Human
uuaguuguaucucuuuugaa

SEQ ID NO: 2096352 - RNA, 17 nt, Human
uuaguuuacaaucagcc

SEQ ID NO: 2096353 - RNA, 16 nt, Human
uuaguuccucauuagc

SEQ ID NO: 2096354 - RNA, 14 nt, Human
uuaguuccuugagu

SEQ ID NO: 2096355 - RNA, 12 nt, Human
uuaguucuauuu

SEQ ID NO: 2096356 - RNA, 15 nt, Human
uuaguucuuuguuau

SEQ ID NO: 2096357 - RNA, 18 nt, Human
uuaucugugcgugaaaca

SEQ ID NO: 2096358 - RNA, 19 nt, Human
uuaucugugcgugaaacac

SEQ ID NO: 2096359 - RNA, 18 nt, Human
uuaucuguguuuuugaaa

SEQ ID NO: 2096360 - RNA, 14 nt, Human
uuaucuggcuucaa

SEQ ID NO: 2096361 - RNA, 23 nt, Human
uuaucugggauuaugguuuugug

SEQ ID NO: 2096362 - RNA, 18 nt, Human
uuaucugagucaacuccu

SEQ ID NO: 2096363 - RNA, 13 nt, Human
uucacuaaagcag

SEQ ID NO: 2096364 - RNA, 14 nt, Human
uucacuaaagcagu

SEQ ID NO: 2096365 - RNA, 22 nt, Human
uucacgugcagcagcaacacaa

SEQ ID NO: 2096366 - RNA, 23 nt, Human
uucacuacccaucgguguccauu

SEQ ID NO: 2096367 - RNA, 18 nt, Human
uucacggaagagccuugc

SEQ ID NO: 2096368 - RNA, 16 nt, Human
uucaccuugggaugau

SEQ ID NO: 2096369 - RNA, 22 nt, Human
uucaccuugggaugaugccuca

SEQ ID NO: 2096370 - RNA, 11 nt, Human
uucaccuguaa

SEQ ID NO: 2096371 - RNA, 13 nt, Human
uucaccuguaaaa

SEQ ID NO: 2096372 - RNA, 14 nt, Human
uucaccuguaaaac

SEQ ID NO: 2096373 - RNA, 16 nt, Human
uucaccuguaaaacuu

SEQ ID NO: 2096374 - RNA, 17 nt, Human
uucaccuguaaaacuuu

SEQ ID NO: 2096375 - RNA, 21 nt, Human
uucaccuguuuuuaagcuguu

SEQ ID NO: 2096376 - RNA, 19 nt, Human
uucaccuguuuuuaagcug

SEQ ID NO: 2096377 - RNA, 23 nt, Human
uucaccuguuuuuaagcuguuuc

SEQ ID NO: 2096378 - RNA, 22 nt, Human
uucaccuguuuuuaagcuguuu

SEQ ID NO: 2096379 - RNA, 14 nt, Human
uucaccuugaagaa

SEQ ID NO: 2096380 - RNA, 17 nt, Human
uucaauuuccaagagcu

SEQ ID NO: 2096381 - RNA, 19 nt, Human
uucaauuuccaagagcuga

SEQ ID NO: 2096382 - RNA, 17 nt, Human
uucaauuuauucaagaa

SEQ ID NO: 2096383 - RNA, 16 nt, Human
uucaauuuauugcaca

SEQ ID NO: 2096384 - RNA, 17 nt, Human
uucaauuuauugcacaa

SEQ ID NO: 2096385 - RNA, 18 nt, Human
uucaauuuauugcacaaa

SEQ ID NO: 2096386 - RNA, 20 nt, Human
uucaauuuauugcacaaaau

SEQ ID NO: 2096387 - RNA, 15 nt, Human
uucacaaaauuucca

SEQ ID NO: 2096388 - RNA, 12 nt, Human
uucaauuuguuc

SEQ ID NO: 2096389 - RNA, 19 nt, Human
uucaauuuguucagucuuu

SEQ ID NO: 2096390 - RNA, 19 nt, Human
uucaauuuauucaagaaaa

SEQ ID NO: 2096391 - RNA, 16 nt, Human
uucaauuuauucaaga

SEQ ID NO: 2096392 - RNA, 14 nt, Human
uucaacugaaaaga

SEQ ID NO: 2096393 - RNA, 13 nt, Human
uucagagagcugg

SEQ ID NO: 2096394 - RNA, 14 nt, Human
uucagagagcuggu

SEQ ID NO: 2096395 - RNA, 15 nt, Human
uucagagagcuggua

SEQ ID NO: 2096396 - RNA, 22 nt, Human
uucagagccuccuuucuggcuu

SEQ ID NO: 2096397 - RNA, 23 nt, Human
uucacuccggugugccugcagcc

SEQ ID NO: 2096398 - RNA, 24 nt, Human
uucacuccggugugccugcagccc

SEQ ID NO: 2096399 - RNA, 18 nt, Human
uucacuauaaaugguguu

SEQ ID NO: 2096400 - RNA, 20 nt, Human
uucacuauuuuuauuuauau

SEQ ID NO: 2096401 - RNA, 13 nt, Human
uucacuccagccu

SEQ ID NO: 2096402 - RNA, 21 nt, Human
uucacuccggugugccugcag

SEQ ID NO: 2096403 - RNA, 22 nt, Human
uucacuccggugugccugcagc

SEQ ID NO: 2096404 - RNA, 17 nt, Human
uuauuguaccucucuua

SEQ ID NO: 2096405 - RNA, 15 nt, Human
uuauuguaccucucu

SEQ ID NO: 2096406 - RNA, 21 nt, Human
uuauuguacguuuaaagugua

SEQ ID NO: 2096407 - RNA, 12 nt, Human
uuauugcuguug

SEQ ID NO: 2096408 - RNA, 22 nt, Human
uuauuggaauuaaccuggugcu

SEQ ID NO: 2096409 - RNA, 23 nt, Human
uuauugcuugauacuuuugacaa

SEQ ID NO: 2096410 - RNA, 13 nt, Human
uuauuggaauuaa

SEQ ID NO: 2096411 - RNA, 14 nt, Human
uuauuguaccucuc

SEQ ID NO: 2096412 - RNA, 12 nt, Human
uuauuguaccuc

SEQ ID NO: 2096413 - RNA, 16 nt, Human
uuauuggaauuaaccu

SEQ ID NO: 2096414 - RNA, 19 nt, Human
uucaacgcagcccugcuuu

SEQ ID NO: 2096415 - RNA, 16 nt, Human
uucaacgcagcccugc

SEQ ID NO: 2096416 - RNA, 20 nt, Human
uucaacgcagcccugcuuug

SEQ ID NO: 2096417 - RNA, 17 nt, Human
uucaacugaccagccuc

SEQ ID NO: 2096418 - RNA, 12 nt, Human
uuauuuuagcag

SEQ ID NO: 2096419 - RNA, 16 nt, Human
uuauuuuagcaguucu

SEQ ID NO: 2096420 - RNA, 20 nt, Human
uuauuuuagcaguucugcaa

SEQ ID NO: 2096421 - RNA, 21 nt, Human
uuauuuuagcaguucugcaaa

SEQ ID NO: 2096422 - RNA, 12 nt, Human
uuauuuuaaauu

SEQ ID NO: 2096423 - RNA, 14 nt, Human
uuauuuuaaauuau

SEQ ID NO: 2096424 - RNA, 21 nt, Human
uuauuuuaaauuauaaggacu

SEQ ID NO: 2096425 - RNA, 22 nt, Human
uuauuuuaaauuauaaggacug

SEQ ID NO: 2096426 - RNA, 23 nt, Human
uuauuuuaaauuauaaggacugc

SEQ ID NO: 2096427 - RNA, 16 nt, Human
uucaaagcuugaagau

SEQ ID NO: 2096428 - RNA, 11 nt, Human
uucaaagcuga

SEQ ID NO: 2096429 - RNA, 21 nt, Human
uuugaggguguauauuuucug

SEQ ID NO: 2096430 - RNA, 20 nt, Human
uuugaggucaaguaagaaga

SEQ ID NO: 2096431 - RNA, 23 nt, Human
uuugaggucaaguaagaagacau

SEQ ID NO: 2096432 - RNA, 15 nt, Human
uuugaggcugcagcg

SEQ ID NO: 2096433 - RNA, 23 nt, Human
uuugagggacaaauuuaaaacaa

SEQ ID NO: 2096434 - RNA, 16 nt, Human
uuugagaucagccugg

SEQ ID NO: 2096435 - RNA, 17 nt, Human
uuugagaucagccuggg

SEQ ID NO: 2096436 - RNA, 17 nt, Human
uuugaauauaaacacua

SEQ ID NO: 2096437 - RNA, 18 nt, Human
uuugaauauaaacacuau

SEQ ID NO: 2096438 - RNA, 19 nt, Human
uuugaauauaaacacuaua

SEQ ID NO: 2096439 - RNA, 20 nt, Human
uuucuuguuuaucagcaguu

SEQ ID NO: 2096440 - RNA, 14 nt, Human
uuugaaccaaaaca

SEQ ID NO: 2096441 - RNA, 16 nt, Human
uuugaaccaaaacauu

SEQ ID NO: 2096442 - RNA, 22 nt, Human
uuugaacaacuaggcuucagca

SEQ ID NO: 2096443 - RNA, 15 nt, Human
uuugaacuaauaaaa

SEQ ID NO: 2096444 - RNA, 16 nt, Human
uuugaagcuaauuauu

SEQ ID NO: 2096445 - RNA, 18 nt, Human
uuugaagcuaauuauuuu

SEQ ID NO: 2096446 - RNA, 19 nt, Human
uuugaagcuaauuauuuua

SEQ ID NO: 2096447 - RNA, 23 nt, Human
uuugaagcuaauuauuuuaauua

SEQ ID NO: 2096448 - RNA, 21 nt, Human
uuucuugcugguugucauuuu

SEQ ID NO: 2096449 - RNA, 11 nt, Human
uuucuugcugg

SEQ ID NO: 2096450 - RNA, 23 nt, Human
uuucugaucugaugcaagcaaga

SEQ ID NO: 2096451 - RNA, 14 nt, Human
uuucugauauagaa

SEQ ID NO: 2096452 - RNA, 15 nt, Human
uuucuuaaaugggcu

SEQ ID NO: 2096453 - RNA, 15 nt, Human
uuuggguuaaaaaaa

SEQ ID NO: 2096454 - RNA, 11 nt, Human
uuuggguuucu

SEQ ID NO: 2096455 - RNA, 16 nt, Human
uuuggguuucugcccu

SEQ ID NO: 2096456 - RNA, 14 nt, Human
uuugguucuggggc

SEQ ID NO: 2096457 - RNA, 13 nt, Human
uuugguucugggg

SEQ ID NO: 2096458 - RNA, 13 nt, Human
uuugguucuaaua

SEQ ID NO: 2096459 - RNA, 21 nt, Human
uuuguaaaggugaaaaaagcu

SEQ ID NO: 2096460 - RNA, 16 nt, Human
uuuguaugcacuuugu

SEQ ID NO: 2096461 - RNA, 22 nt, Human
uuuguaugccaagugagaagau

SEQ ID NO: 2096462 - RNA, 22 nt, Human
uuuguauguugugaagauguuu

SEQ ID NO: 2096463 - RNA, 14 nt, Human
uuuguaaauaagag

SEQ ID NO: 2096464 - RNA, 15 nt, Human
uuuguaaauaagaga

SEQ ID NO: 2096465 - RNA, 17 nt, Human
uuuguaaauaagagauu

SEQ ID NO: 2096466 - RNA, 22 nt, Human
uuuguaaauaagagauuuggag

SEQ ID NO: 2096467 - RNA, 16 nt, Human
uuugcuucucucucua

SEQ ID NO: 2096468 - RNA, 22 nt, Human
uuugcuucuucccuuaaaauuu

SEQ ID NO: 2096469 - RNA, 14 nt, Human
uuugcuugaacaca

SEQ ID NO: 2096470 - RNA, 16 nt, Human
uuugcuugaacacagu

SEQ ID NO: 2096471 - RNA, 17 nt, Human
uuugcuugaacacagua

SEQ ID NO: 2096472 - RNA, 19 nt, Human
uuugcuugaacacaguauu

SEQ ID NO: 2096473 - RNA, 16 nt, Human
uuuggacgcacacagc

SEQ ID NO: 2096474 - RNA, 17 nt, Human
uuuggacgcacacagcu

SEQ ID NO: 2096475 - RNA, 19 nt, Human
uuuggagacucuguggggc

SEQ ID NO: 2096476 - RNA, 18 nt, Human
uuugaucagguggggagu

SEQ ID NO: 2096477 - RNA, 17 nt, Human
uuugauauccaaagcug

SEQ ID NO: 2096478 - RNA, 23 nt, Human
uuugauauccaaagcugaauaca

SEQ ID NO: 2096479 - RNA, 21 nt, Human
uuugccagaacaguuuguaca

SEQ ID NO: 2096480 - RNA, 19 nt, Human
uuugccaaaauaaugucuu

SEQ ID NO: 2096481 - RNA, 23 nt, Human
uuugccaaaauaaugucuuguua

SEQ ID NO: 2096482 - RNA, 17 nt, Human
uuuccacucaggucugu

SEQ ID NO: 2096483 - RNA, 19 nt, Human
uuuccacgaugaaaaacuu

SEQ ID NO: 2096484 - RNA, 15 nt, Human
uuuccuaaaugcagu

SEQ ID NO: 2096485 - RNA, 17 nt, Human
uuuccuaaaugcaguga

SEQ ID NO: 2096486 - RNA, 13 nt, Human
uuuccuaaaugua

SEQ ID NO: 2096487 - RNA, 18 nt, Human
uuuccuaacaggauuaga

SEQ ID NO: 2096488 - RNA, 22 nt, Human
uuuccuaacaggauuagacagu

SEQ ID NO: 2096489 - RNA, 13 nt, Human
uuuccacuacugc

SEQ ID NO: 2096490 - RNA, 14 nt, Human
uuuccacuacugcu

SEQ ID NO: 2096491 - RNA, 15 nt, Human
uuuccacuacugcua

SEQ ID NO: 2096492 - RNA, 15 nt, Human
uuuccacccccuccc

SEQ ID NO: 2096493 - RNA, 22 nt, Human
uuuccacccccucccuggccug

SEQ ID NO: 2096494 - RNA, 18 nt, Human
uuucagguguuuaguugc

SEQ ID NO: 2096495 - RNA, 18 nt, Human
uuucagguuuuguaaaga

SEQ ID NO: 2096496 - RNA, 19 nt, Human
uuucagguuuuguaaagau

SEQ ID NO: 2096497 - RNA, 19 nt, Human
uuucauuuaugauacaaaa

SEQ ID NO: 2096498 - RNA, 18 nt, Human
uuucaguaauaaaacauc

SEQ ID NO: 2096499 - RNA, 20 nt, Human
uuucaguaauaaaacaucuu

SEQ ID NO: 2096500 - RNA, 17 nt, Human
uuucagugaaagcauca

SEQ ID NO: 2096501 - RNA, 13 nt, Human
uuucacaguuuuu

SEQ ID NO: 2096502 - RNA, 14 nt, Human
uuucacauagaugu

SEQ ID NO: 2096503 - RNA, 15 nt, Human
uuucacaguuuuucc

SEQ ID NO: 2096504 - RNA, 19 nt, Human
uuucacaguguguuuguga

SEQ ID NO: 2096505 - RNA, 14 nt, Human
uuucaauuuccaag

SEQ ID NO: 2096506 - RNA, 23 nt, Human
uuucacaccugaaaauguuagug

SEQ ID NO: 2096507 - RNA, 19 nt, Human
uuuaugagccagacaaaug

SEQ ID NO: 2096508 - RNA, 12 nt, Human
uuuaugagccag

SEQ ID NO: 2096509 - RNA, 17 nt, Human
uuuaugagccagacaaa

SEQ ID NO: 2096510 - RNA, 16 nt, Human
uuuaugagcucaugua

SEQ ID NO: 2096511 - RNA, 20 nt, Human
uuuaugagcucauguagcaa

SEQ ID NO: 2096512 - RNA, 23 nt, Human
uuuaugagcucauguagcaauca

SEQ ID NO: 2096513 - RNA, 20 nt, Human
uuuaugccuuuuauuucuua

SEQ ID NO: 2096514 - RNA, 16 nt, Human
uuucaauucaaaaaug

SEQ ID NO: 2096515 - RNA, 17 nt, Human
uuucaauucaaaaaugu

SEQ ID NO: 2096516 - RNA, 18 nt, Human
uuucaauucaaaaaugua

SEQ ID NO: 2096517 - RNA, 19 nt, Human
uuucaauucaaaaauguac

SEQ ID NO: 2096518 - RNA, 20 nt, Human
uuucaauucaaaaauguaca

SEQ ID NO: 2096519 - RNA, 23 nt, Human
uuuauggaggauggagagagggg

SEQ ID NO: 2096520 - RNA, 21 nt, Human
uuucaaugguuugcaaggaag

SEQ ID NO: 2096521 - RNA, 22 nt, Human
uuucucuacagaugucccauuu

SEQ ID NO: 2096522 - RNA, 16 nt, Human
uuucuaccuugagguc

SEQ ID NO: 2096523 - RNA, 22 nt, Human
uuucucuaacuucaaggcccau

SEQ ID NO: 2096524 - RNA, 18 nt, Human
uuucuacccagcgagccc

SEQ ID NO: 2096525 - RNA, 15 nt, Human
uuucuacccagcgag

SEQ ID NO: 2096526 - RNA, 22 nt, Human
uuucuacccagcgagcccuggu

SEQ ID NO: 2096527 - RNA, 19 nt, Human
uuucugaaaauuaacacug

SEQ ID NO: 2096528 - RNA, 20 nt, Human
uuucugaaaauuaacacugc

SEQ ID NO: 2096529 - RNA, 18 nt, Human
uuucugaaaauuccagaa

SEQ ID NO: 2096530 - RNA, 21 nt, Human
uuucugaaaauuccagaaagg

SEQ ID NO: 2096531 - RNA, 22 nt, Human
uuucugaaaauuccagaaagga

SEQ ID NO: 2096532 - RNA, 17 nt, Human
uuucugaaacuaaugaa

SEQ ID NO: 2096533 - RNA, 18 nt, Human
uuucugaaacuaaugaaa

SEQ ID NO: 2096534 - RNA, 19 nt, Human
uuucugaaacuaaugaaag

SEQ ID NO: 2096535 - RNA, 14 nt, Human
uuucucucuccagu

SEQ ID NO: 2096536 - RNA, 17 nt, Human
uuucagucuuuuccugu

SEQ ID NO: 2096537 - RNA, 15 nt, Human
uuucuaaugugugaa

SEQ ID NO: 2096538 - RNA, 13 nt, Human
uuucuaaauguuu

SEQ ID NO: 2096539 - RNA, 20 nt, Human
uuucuacacuguauuacaua

SEQ ID NO: 2096540 - RNA, 14 nt, Human
uuucuacagcaaau

SEQ ID NO: 2096541 - RNA, 15 nt, Human
uuucuacagcaaauu

SEQ ID NO: 2096542 - RNA, 17 nt, Human
uuucuacagcaaauuua

SEQ ID NO: 2096543 - RNA, 22 nt, Human
uuucuacagcaaauuuauaauu

SEQ ID NO: 2096544 - RNA, 22 nt, Human
uuuccucuuagucgagccaagu

SEQ ID NO: 2096545 - RNA, 24 nt, Human
uuuccuacucucaggaucaagaaa

SEQ ID NO: 2096546 - RNA, 19 nt, Human
uugucuuuggugaacauug

SEQ ID NO: 2096547 - RNA, 23 nt, Human
uugucuuuguaaugucaccaccu

SEQ ID NO: 2096548 - RNA, 22 nt, Human
uuguuauuacauccuuguggca

SEQ ID NO: 2096549 - RNA, 14 nt, Human
uuguuauuauauaa

SEQ ID NO: 2096550 - RNA, 23 nt, Human
uuguuauuauauaauuacauauu

SEQ ID NO: 2096551 - RNA, 13 nt, Human
uugucuuuauaug

SEQ ID NO: 2096552 - RNA, 14 nt, Human
uugucuuuauauga

SEQ ID NO: 2096553 - RNA, 16 nt, Human
uugucuuuauaugaac

SEQ ID NO: 2096554 - RNA, 19 nt, Human
uugucuuuauaugaacaua

SEQ ID NO: 2096555 - RNA, 14 nt, Human
uuguuauuuauaac

SEQ ID NO: 2096556 - RNA, 20 nt, Human
uuguucaaaauauguucuuu

SEQ ID NO: 2096557 - RNA, 21 nt, Human
uuuaaaacaagaaaguuuccc

SEQ ID NO: 2096558 - RNA, 20 nt, Human
uuuaaaacaagaaaguuucc

SEQ ID NO: 2096559 - RNA, 22 nt, Human
uuuaaaacaagaaaguuucccc

SEQ ID NO: 2096560 - RNA, 10 nt, Human
uuguuuguuu

SEQ ID NO: 2096561 - RNA, 21 nt, Human
uuguuuguuucucccccuggg

SEQ ID NO: 2096562 - RNA, 12 nt, Human
uuguuuguuuug

SEQ ID NO: 2096563 - RNA, 23 nt, Human
uuguuuguuuuguuuuuuaguuc

SEQ ID NO: 2096564 - RNA, 18 nt, Human
uuguuuuaaaauuaaagc

SEQ ID NO: 2096565 - RNA, 20 nt, Human
uuguuuuaaaauuaaagcua

SEQ ID NO: 2096566 - RNA, 16 nt, Human
uuguuuuaaggaagaa

SEQ ID NO: 2096567 - RNA, 13 nt, Human
uuguuuguaaaua

SEQ ID NO: 2096568 - RNA, 22 nt, Human
uuguuuguaaauaagagauuug

SEQ ID NO: 2096569 - RNA, 20 nt, Human
uuguuuggggaugagaaagg

SEQ ID NO: 2096570 - RNA, 16 nt, Human
uuguuuggguauccug

SEQ ID NO: 2096571 - RNA, 21 nt, Human
uuguuuggguauccugcccag

SEQ ID NO: 2096572 - RNA, 15 nt, Human
uuguuucuuccaaag

SEQ ID NO: 2096573 - RNA, 19 nt, Human
uuguuucuuccaaagcaca

SEQ ID NO: 2096574 - RNA, 11 nt, Human
uuguuucuucc

SEQ ID NO: 2096575 - RNA, 12 nt, Human
uuguuucuucca

SEQ ID NO: 2096576 - RNA, 13 nt, Human
uuguuucuuccaa

SEQ ID NO: 2096577 - RNA, 21 nt, Human
uuguuucugaaaauuccagaa

SEQ ID NO: 2096578 - RNA, 13 nt, Human
uuguuuaucagca

SEQ ID NO: 2096579 - RNA, 17 nt, Human
uuguuucucccccuggg

SEQ ID NO: 2096580 - RNA, 11 nt, Human
uuuaaaaugua

SEQ ID NO: 2096581 - RNA, 17 nt, Human
uuuaaaauuuuaucucu

SEQ ID NO: 2096582 - RNA, 12 nt, Human
uuuaaaauguau

SEQ ID NO: 2096583 - RNA, 18 nt, Human
uuuaaaauguauaaguug

SEQ ID NO: 2096584 - RNA, 20 nt, Human
uuuaaaauguauaaguugag

SEQ ID NO: 2096585 - RNA, 22 nt, Human
uuuaaacugaaugaacaaccuc

SEQ ID NO: 2096586 - RNA, 15 nt, Human
uuuaaacugauucau

SEQ ID NO: 2096587 - RNA, 18 nt, Human
uuuaaaccuauacucacu

SEQ ID NO: 2096588 - RNA, 18 nt, Human
uuuaacacacauaaagga

SEQ ID NO: 2096589 - RNA, 19 nt, Human
uuuaaaagacacacuuguc

SEQ ID NO: 2096590 - RNA, 14 nt, Human
uuuaaaagacacug

SEQ ID NO: 2096591 - RNA, 12 nt, Human
uuuaaaagacac

SEQ ID NO: 2096592 - RNA, 13 nt, Human
uuuaaaaucacua

SEQ ID NO: 2096593 - RNA, 14 nt, Human
uuuaaaaucacuaa

SEQ ID NO: 2096594 - RNA, 18 nt, Human
uuuaaaaucacuaacauu

SEQ ID NO: 2096595 - RNA, 19 nt, Human
uuuaaaaucacuaacauua

SEQ ID NO: 2096596 - RNA, 20 nt, Human
uuuaaaaucacuaacauuau

SEQ ID NO: 2096597 - RNA, 15 nt, Human
uuuaaaaguuauuaa

SEQ ID NO: 2096598 - RNA, 19 nt, Human
uuuaaaaguuauuaauauu

SEQ ID NO: 2096599 - RNA, 15 nt, Human
uuuacauacugcugu

SEQ ID NO: 2096600 - RNA, 13 nt, Human
uuuacagcugccu

SEQ ID NO: 2096601 - RNA, 20 nt, Human
uuuacagccucacuugaaug

SEQ ID NO: 2096602 - RNA, 23 nt, Human
uuuaccagccuccguauuucaga

SEQ ID NO: 2096603 - RNA, 14 nt, Human
uuuaccauuuguaa

SEQ ID NO: 2096604 - RNA, 16 nt, Human
uuuaccauuuguaaua

SEQ ID NO: 2096605 - RNA, 19 nt, Human
uuuaccauuuguaauaaag

SEQ ID NO: 2096606 - RNA, 20 nt, Human
uuuaccauuuguaauaaagu

SEQ ID NO: 2096607 - RNA, 23 nt, Human
uuuaccauuuguaauaaaguaua

SEQ ID NO: 2096608 - RNA, 15 nt, Human
uuuaauauagcuauu

SEQ ID NO: 2096609 - RNA, 16 nt, Human
uuuaauauagcuauuu

SEQ ID NO: 2096610 - RNA, 14 nt, Human
uuuaauauagcuau

SEQ ID NO: 2096611 - RNA, 13 nt, Human
uuuaaucaaauuu

SEQ ID NO: 2096612 - RNA, 17 nt, Human
uuuaaucaaauuuguag

SEQ ID NO: 2096613 - RNA, 15 nt, Human
uuuaauauugagaaa

SEQ ID NO: 2096614 - RNA, 22 nt, Human
uuuaauauugagaaagaaacua

SEQ ID NO: 2096615 - RNA, 13 nt, Human
uuuaauauguauu

SEQ ID NO: 2096616 - RNA, 14 nt, Human
uuuaauauguauuu

SEQ ID NO: 2096617 - RNA, 15 nt, Human
uuuaauauaaagccu

SEQ ID NO: 2096618 - RNA, 22 nt, Human
uuuacccagaaugucagauucc

SEQ ID NO: 2096619 - RNA, 23 nt, Human
uuuacccagaaugucagauuccu

SEQ ID NO: 2096620 - RNA, 19 nt, Human
uuuagacccuauugcugcu

SEQ ID NO: 2096621 - RNA, 15 nt, Human
uuuagaccauuuauc

SEQ ID NO: 2096622 - RNA, 21 nt, Human
uuuacccaauaagauacauca

SEQ ID NO: 2096623 - RNA, 22 nt, Human
uuuagacccuauugcugcuuga

SEQ ID NO: 2096624 - RNA, 15 nt, Human
uuuauacaggggaau

SEQ ID NO: 2096625 - RNA, 17 nt, Human
uuuauacaggggaauau

SEQ ID NO: 2096626 - RNA, 16 nt, Human
uuuauacaauaucauc

SEQ ID NO: 2096627 - RNA, 13 nt, Human
uuuauaaauuaaa

SEQ ID NO: 2096628 - RNA, 15 nt, Human
uuuauaaauuaaaua

SEQ ID NO: 2096629 - RNA, 16 nt, Human
uuuauaaauuaaauau

SEQ ID NO: 2096630 - RNA, 17 nt, Human
uuuauaaauuaaauaua

SEQ ID NO: 2096631 - RNA, 18 nt, Human
uuuauaaauuaaauauau

SEQ ID NO: 2096632 - RNA, 11 nt, Human
uuuaguucuuu

SEQ ID NO: 2096633 - RNA, 19 nt, Human
uuuaguugcagaaacauuu

SEQ ID NO: 2096634 - RNA, 20 nt, Human
uuuaguuguaucucuuuuga

SEQ ID NO: 2096635 - RNA, 19 nt, Human
uuuaguugcagacucaguu

SEQ ID NO: 2096636 - RNA, 17 nt, Human
uuuaguuguaucucuuu

SEQ ID NO: 2096637 - RNA, 18 nt, Human
uuuauacaguagugagaa

SEQ ID NO: 2096638 - RNA, 22 nt, Human
uuuauacaguagugagaagaau

SEQ ID NO: 2096639 - RNA, 19 nt, Human
uuuauacaguuuuaaagaa

SEQ ID NO: 2096640 - RNA, 17 nt, Human
uuuaucccacggaaaau

SEQ ID NO: 2096641 - RNA, 21 nt, Human
uuuauagaauaaugugggaag

SEQ ID NO: 2096642 - RNA, 15 nt, Human
uuuauccaaucuugu

SEQ ID NO: 2096643 - RNA, 16 nt, Human
uuuauacuguuuacug

SEQ ID NO: 2096644 - RNA, 14 nt, Human
uuuaucuugucucu

SEQ ID NO: 2096645 - RNA, 21 nt, Human
uuuaucuuggacugacauuua

SEQ ID NO: 2096646 - RNA, 16 nt, Human
uuuaucuguaguaaac

SEQ ID NO: 2096647 - RNA, 19 nt, Human
uuuaucuguaguaaacuau

SEQ ID NO: 2096648 - RNA, 20 nt, Human
uuuaugaaugaaaaaacagu

SEQ ID NO: 2096649 - RNA, 21 nt, Human
uuuaucuauuguaagauaaaa

SEQ ID NO: 2096650 - RNA, 16 nt, Human
uuuauccuaucucucc

SEQ ID NO: 2096651 - RNA, 17 nt, Human
uuuaucugggauuaugg

SEQ ID NO: 2096652 - RNA, 19 nt, Human
uugcagcgauuaauaacag

SEQ ID NO: 2096653 - RNA, 23 nt, Human
uugcagcucuccccuucucugua

SEQ ID NO: 2096654 - RNA, 18 nt, Human
uugcagcgauuaauaaca

SEQ ID NO: 2096655 - RNA, 14 nt, Human
uugcagcugggaga

SEQ ID NO: 2096656 - RNA, 17 nt, Human
uugcagcugggagaagg

SEQ ID NO: 2096657 - RNA, 18 nt, Human
uugcagcugggagaaggg

SEQ ID NO: 2096658 - RNA, 16 nt, Human
uugcaguucagcacca

SEQ ID NO: 2096659 - RNA, 18 nt, Human
uugcagauucauuuuucu

SEQ ID NO: 2096660 - RNA, 19 nt, Human
uugcagagacaggaccuga

SEQ ID NO: 2096661 - RNA, 23 nt, Human
uugcagcagugagucucuucaga

SEQ ID NO: 2096662 - RNA, 12 nt, Human
uugcagcaguga

SEQ ID NO: 2096663 - RNA, 14 nt, Human
uugcagcagugagu

SEQ ID NO: 2096664 - RNA, 23 nt, Human
uugcagacaggcaagcaccuccu

SEQ ID NO: 2096665 - RNA, 21 nt, Human
uugcagaaaagcaccugccga

SEQ ID NO: 2096666 - RNA, 19 nt, Human
uugcagacucaguuuguca

SEQ ID NO: 2096667 - RNA, 18 nt, Human
uugcagagaagccuuggu

SEQ ID NO: 2096668 - RNA, 14 nt, Human
uugcagagacagga

SEQ ID NO: 2096669 - RNA, 15 nt, Human
uugcagaaacauuuu

SEQ ID NO: 2096670 - RNA, 17 nt, Human
uugcagaaaagcaccug

SEQ ID NO: 2096671 - RNA, 18 nt, Human
uugcagaaaagcaccugc

SEQ ID NO: 2096672 - RNA, 19 nt, Human
uugcagaaaagcaccugcc

SEQ ID NO: 2096673 - RNA, 20 nt, Human
uugcagaaaagcaccugccg

SEQ ID NO: 2096674 - RNA, 16 nt, Human
uugcacuccagccugg

SEQ ID NO: 2096675 - RNA, 14 nt, Human
uugauuccaucucc

SEQ ID NO: 2096676 - RNA, 23 nt, Human
uugccauccccuauggaccagaa

SEQ ID NO: 2096677 - RNA, 23 nt, Human
uugccaugacaacuucuaauugc

SEQ ID NO: 2096678 - RNA, 19 nt, Human
uugccauguuggccaggcu

SEQ ID NO: 2096679 - RNA, 18 nt, Human
uugccauguuggccaggc

SEQ ID NO: 2096680 - RNA, 17 nt, Human
uugccauguuggccagg

SEQ ID NO: 2096681 - RNA, 16 nt, Human
uugccauguuggccag

SEQ ID NO: 2096682 - RNA, 17 nt, Human
uugccagaaagcauaaa

SEQ ID NO: 2096683 - RNA, 14 nt, Human
uugccagagaugga

SEQ ID NO: 2096684 - RNA, 20 nt, Human
uugccagaaagcauaaaauu

SEQ ID NO: 2096685 - RNA, 22 nt, Human
uugccagacauguggugggaca

SEQ ID NO: 2096686 - RNA, 14 nt, Human
uugcauaaaauugg

SEQ ID NO: 2096687 - RNA, 15 nt, Human
uugcauaauaagcua

SEQ ID NO: 2096688 - RNA, 20 nt, Human
uugcauaauaagcuaaagag

SEQ ID NO: 2096689 - RNA, 21 nt, Human
uugcauaauaagcuaaagagg

SEQ ID NO: 2096690 - RNA, 15 nt, Human
uugccagaaagcaua

SEQ ID NO: 2096691 - RNA, 13 nt, Human
uugaggaguguga

SEQ ID NO: 2096692 - RNA, 15 nt, Human
uugaggaguuuccua

SEQ ID NO: 2096693 - RNA, 13 nt, Human
uugaggccaggag

SEQ ID NO: 2096694 - RNA, 14 nt, Human
uugagcugagaugg

SEQ ID NO: 2096695 - RNA, 20 nt, Human
uugagcgugaaucuguaucu

SEQ ID NO: 2096696 - RNA, 15 nt, Human
uugaauucauagaaa

SEQ ID NO: 2096697 - RNA, 23 nt, Human
uugaauugcauuuuuuaaaacaa

SEQ ID NO: 2096698 - RNA, 23 nt, Human
uugagcucagacccccacucuca

SEQ ID NO: 2096699 - RNA, 14 nt, Human
uugagccugggagg

SEQ ID NO: 2096700 - RNA, 23 nt, Human
uugaauuaaauuaggaauaaaua

SEQ ID NO: 2096701 - RNA, 17 nt, Human
uugaauuaaauuaggaa

SEQ ID NO: 2096702 - RNA, 22 nt, Human
uugaauuaaauuaggaauaaau

SEQ ID NO: 2096703 - RNA, 16 nt, Human
uugaucuccguggcuu

SEQ ID NO: 2096704 - RNA, 18 nt, Human
uugaucauuuucccccca

SEQ ID NO: 2096705 - RNA, 19 nt, Human
uugaucauuuuccccccac

SEQ ID NO: 2096706 - RNA, 22 nt, Human
uugaucauuuuccccccacucu

SEQ ID NO: 2096707 - RNA, 16 nt, Human
uugauucagcucugca

SEQ ID NO: 2096708 - RNA, 22 nt, Human
uugauaugaaaaauaugauauu

SEQ ID NO: 2096709 - RNA, 22 nt, Human
uugauauuuucaacgcagcccu

SEQ ID NO: 2096710 - RNA, 14 nt, Human
uugaucaguauaau

SEQ ID NO: 2096711 - RNA, 14 nt, Human
uugaggcugcagcg

SEQ ID NO: 2096712 - RNA, 13 nt, Human
uugauaugaaaaa

SEQ ID NO: 2096713 - RNA, 16 nt, Human
uugauaugcuuauaca

SEQ ID NO: 2096714 - RNA, 16 nt, Human
uugauaugaaaaauau

SEQ ID NO: 2096715 - RNA, 21 nt, Human
uugauaugaaaaauaugauau

SEQ ID NO: 2096716 - RNA, 13 nt, Human
uucugugcagcca

SEQ ID NO: 2096717 - RNA, 19 nt, Human
uucugugagacccccacac

SEQ ID NO: 2096718 - RNA, 13 nt, Human
uucugugcccagc

SEQ ID NO: 2096719 - RNA, 14 nt, Human
uucugugcccagcu

SEQ ID NO: 2096720 - RNA, 14 nt, Human
uucuggccugccuu

SEQ ID NO: 2096721 - RNA, 20 nt, Human
uucuggccugccuucguuaa

SEQ ID NO: 2096722 - RNA, 17 nt, Human
uucuucagaucagugcu

SEQ ID NO: 2096723 - RNA, 23 nt, Human
uucuucagccaccucucuuuuuc

SEQ ID NO: 2096724 - RNA, 14 nt, Human
uucuucagccaccu

SEQ ID NO: 2096725 - RNA, 20 nt, Human
uucuucauucaauacaagug

SEQ ID NO: 2096726 - RNA, 21 nt, Human
uucuucauccggcagccugga

SEQ ID NO: 2096727 - RNA, 11 nt, Human
uucuucaguug

SEQ ID NO: 2096728 - RNA, 13 nt, Human
uucuucaguuggu

SEQ ID NO: 2096729 - RNA, 14 nt, Human
uucuucaugcaaug

SEQ ID NO: 2096730 - RNA, 15 nt, Human
uucuucaugcaauga

SEQ ID NO: 2096731 - RNA, 17 nt, Human
uucuucaugcaaugaca

SEQ ID NO: 2096732 - RNA, 18 nt, Human
uucuucaugcaaugacau

SEQ ID NO: 2096733 - RNA, 19 nt, Human
uucuugugaauauguacau

SEQ ID NO: 2096734 - RNA, 17 nt, Human
uucuugugaucuugcuc

SEQ ID NO: 2096735 - RNA, 14 nt, Human
uucuuuaaccaguc

SEQ ID NO: 2096736 - RNA, 16 nt, Human
uucuugucacaauaaa

SEQ ID NO: 2096737 - RNA, 19 nt, Human
uucuuauucucacuccacc

SEQ ID NO: 2096738 - RNA, 17 nt, Human
uucuuauguugcccagu

SEQ ID NO: 2096739 - RNA, 21 nt, Human
uucuuauguaugugaaaguua

SEQ ID NO: 2096740 - RNA, 13 nt, Human
uucuuagugucac

SEQ ID NO: 2096741 - RNA, 15 nt, Human
uucuuaguagauuuu

SEQ ID NO: 2096742 - RNA, 20 nt, Human
uucuuuccauuaugauucuu

SEQ ID NO: 2096743 - RNA, 14 nt, Human
uucuuuccauuaug

SEQ ID NO: 2096744 - RNA, 17 nt, Human
uucuuuccauuaugauu

SEQ ID NO: 2096745 - RNA, 21 nt, Human
uucuuucccugcuuaaugaaa

SEQ ID NO: 2096746 - RNA, 14 nt, Human
uugaaaauauuauc

SEQ ID NO: 2096747 - RNA, 23 nt, Human
uugaaaauauuaucuuuguaauu

SEQ ID NO: 2096748 - RNA, 19 nt, Human
uugaaaccaccuuuuauua

SEQ ID NO: 2096749 - RNA, 20 nt, Human
uugaaaauguaaguaaaugu

SEQ ID NO: 2096750 - RNA, 21 nt, Human
uugaaugaaaaauuuaagcau

SEQ ID NO: 2096751 - RNA, 22 nt, Human
uugaaugaaaaauuuaagcauu

SEQ ID NO: 2096752 - RNA, 23 nt, Human
uugaaugaaaaauuuaagcauug

SEQ ID NO: 2096753 - RNA, 20 nt, Human
uugaagaucguuaguaucua

SEQ ID NO: 2096754 - RNA, 18 nt, Human
uugaagaugcugaaacag

SEQ ID NO: 2096755 - RNA, 22 nt, Human
uugaagauaucuugaaaugaaa

SEQ ID NO: 2096756 - RNA, 17 nt, Human
uugcgaaugguuccauu

SEQ ID NO: 2096757 - RNA, 18 nt, Human
uugcgacggagagaaaaa

SEQ ID NO: 2096758 - RNA, 19 nt, Human
uugcgacggagagaaaaaa

SEQ ID NO: 2096759 - RNA, 20 nt, Human
uugcgacggagagaaaaaag

SEQ ID NO: 2096760 - RNA, 22 nt, Human
uugcgacggagagaaaaaagaa

SEQ ID NO: 2096761 - RNA, 17 nt, Human
uugccuuuguuuugaug

SEQ ID NO: 2096762 - RNA, 20 nt, Human
uugccuugggcugcuccuca

SEQ ID NO: 2096763 - RNA, 21 nt, Human
uugccuuccacgcugucucca

SEQ ID NO: 2096764 - RNA, 16 nt, Human
uugccuuaacuggagc

SEQ ID NO: 2096765 - RNA, 12 nt, Human
uugccugugcca

SEQ ID NO: 2096766 - RNA, 20 nt, Human
uugccaugacaacuucuaau

SEQ ID NO: 2096767 - RNA, 17 nt, Human
uugcccaaaucugccua

SEQ ID NO: 2096768 - RNA, 13 nt, Human
uugcccaaccuca

SEQ ID NO: 2096769 - RNA, 15 nt, Human
uugcccaaccucagc

SEQ ID NO: 2096770 - RNA, 16 nt, Human
uugcccaaccucagca

SEQ ID NO: 2096771 - RNA, 17 nt, Human
uugcccaaccucagcaa

SEQ ID NO: 2096772 - RNA, 19 nt, Human
uugcccaaccucagcaacc

SEQ ID NO: 2096773 - RNA, 21 nt, Human
uugccauguuggccaggcugg

SEQ ID NO: 2096774 - RNA, 20 nt, Human
uugccauguuggccaggcug

SEQ ID NO: 2096775 - RNA, 14 nt, Human
uugcugcuugaggc

SEQ ID NO: 2096776 - RNA, 16 nt, Human
uugcugcuugaggcaa

SEQ ID NO: 2096777 - RNA, 20 nt, Human
uugcugcuauuuuacugucu

SEQ ID NO: 2096778 - RNA, 23 nt, Human
uugcugcuauuuuacugucuuaa

SEQ ID NO: 2096779 - RNA, 19 nt, Human
uugcugcuccuuagcugcc

SEQ ID NO: 2096780 - RNA, 21 nt, Human
uugcugcuccuuagcugccaa

SEQ ID NO: 2096781 - RNA, 18 nt, Human
uugcugcuuuuccuuggg

SEQ ID NO: 2096782 - RNA, 23 nt, Human
uugcugcuuuuccuuggggcagg

SEQ ID NO: 2096783 - RNA, 16 nt, Human
uugcuggcaaagacag

SEQ ID NO: 2096784 - RNA, 21 nt, Human
uugcugucauaagaaugaaua

SEQ ID NO: 2096785 - RNA, 15 nt, Human
uugcuguccuaggcc

SEQ ID NO: 2096786 - RNA, 20 nt, Human
uugcugugagcaagaaguca

SEQ ID NO: 2096787 - RNA, 11 nt, Human
uugcuguccua

SEQ ID NO: 2096788 - RNA, 15 nt, Human
uuggaaucuagaaga

SEQ ID NO: 2096789 - RNA, 17 nt, Human
uuggaaucuagaagaaa

SEQ ID NO: 2096790 - RNA, 19 nt, Human
uuggaaucuagaagaaaug

SEQ ID NO: 2096791 - RNA, 21 nt, Human
uuggaaucuagaagaaaugaa

SEQ ID NO: 2096792 - RNA, 22 nt, Human
uuggaaucuagaagaaaugaaa

SEQ ID NO: 2096793 - RNA, 23 nt, Human
uuggaaucuagaagaaaugaaau

SEQ ID NO: 2096794 - RNA, 15 nt, Human
uuggaauuaaaacaa

SEQ ID NO: 2096795 - RNA, 16 nt, Human
uuggaauuaaaacaau

SEQ ID NO: 2096796 - RNA, 18 nt, Human
uuggaauuaaaacaaugu

SEQ ID NO: 2096797 - RNA, 17 nt, Human
uuggaauuaaccuggug

SEQ ID NO: 2096798 - RNA, 21 nt, Human
uuggaauucuguucauuuguu

SEQ ID NO: 2096799 - RNA, 19 nt, Human
uuggaauuaaccuggugcu

SEQ ID NO: 2096800 - RNA, 20 nt, Human
uuggaauuaaccuggugcug

SEQ ID NO: 2096801 - RNA, 18 nt, Human
uuggaauuaaccuggugc

SEQ ID NO: 2096802 - RNA, 13 nt, Human
uuggacagcaaaa

SEQ ID NO: 2096803 - RNA, 14 nt, Human
uuggacagcaaaac

SEQ ID NO: 2096804 - RNA, 18 nt, Human
uuggacagcaaaaccauu

SEQ ID NO: 2096805 - RNA, 22 nt, Human
uuggacagcaaaaccauugcuu

SEQ ID NO: 2096806 - RNA, 23 nt, Human
uuggacagcaaaaccauugcuuc

SEQ ID NO: 2096807 - RNA, 23 nt, Human
uuggacauguccaugaccagaag

SEQ ID NO: 2096808 - RNA, 18 nt, Human
uuggacauuaagcaucac

SEQ ID NO: 2096809 - RNA, 23 nt, Human
uuggacaaucaugaaauaugcau

SEQ ID NO: 2096810 - RNA, 15 nt, Human
uuggacacacacagc

SEQ ID NO: 2096811 - RNA, 16 nt, Human
uuggacacacacagcu

SEQ ID NO: 2096812 - RNA, 17 nt, Human
uuggacacacacagcuu

SEQ ID NO: 2096813 - RNA, 19 nt, Human
uugcuguguccaacuccag

SEQ ID NO: 2096814 - RNA, 20 nt, Human
uugcuguguccaacuccagu

SEQ ID NO: 2096815 - RNA, 17 nt, Human
uugcuguggucucuuug

SEQ ID NO: 2096816 - RNA, 20 nt, Human
uugcugugucauaccaggcc

SEQ ID NO: 2096817 - RNA, 13 nt, Human
uugcuguuuccuu

SEQ ID NO: 2096818 - RNA, 15 nt, Human
uugcuguuuccuuuu

SEQ ID NO: 2096819 - RNA, 17 nt, Human
uuggaagcucugaaguc

SEQ ID NO: 2096820 - RNA, 19 nt, Human
uuggaagcuccgcuuucua

SEQ ID NO: 2096821 - RNA, 15 nt, Human
uuggcacagaaacac

SEQ ID NO: 2096822 - RNA, 16 nt, Human
uuggcacagaaacaca

SEQ ID NO: 2096823 - RNA, 23 nt, Human
uuggcacagaaacacaauauuuu

SEQ ID NO: 2096824 - RNA, 22 nt, Human
uuggcacugagauauuuauugu

SEQ ID NO: 2096825 - RNA, 20 nt, Human
uuggcagccuacuagggacc

SEQ ID NO: 2096826 - RNA, 20 nt, Human
uugguacauggccaguguga

SEQ ID NO: 2096827 - RNA, 20 nt, Human
uuggucugacccacugcuuu

SEQ ID NO: 2096828 - RNA, 14 nt, Human
uugggcaauauaac

SEQ ID NO: 2096829 - RNA, 18 nt, Human
uugggaugaugccucaug

SEQ ID NO: 2096830 - RNA, 13 nt, Human
uugggaugucuua

SEQ ID NO: 2096831 - RNA, 17 nt, Human
uugggaugucuuauuuu

SEQ ID NO: 2096832 - RNA, 18 nt, Human
uugggaugucuuauuuuu

SEQ ID NO: 2096833 - RNA, 19 nt, Human
uugggaugucuuauuuuua

SEQ ID NO: 2096834 - RNA, 23 nt, Human
uugggaugucuuauuuuuagaug

SEQ ID NO: 2096835 - RNA, 13 nt, Human
uugggauuaauau

SEQ ID NO: 2096836 - RNA, 15 nt, Human
uugggaggcugaggc

SEQ ID NO: 2096837 - RNA, 16 nt, Human
uuggcuucuguuucua

SEQ ID NO: 2096838 - RNA, 18 nt, Human
uuggcuucuguuucuagu

SEQ ID NO: 2096839 - RNA, 17 nt, Human
uuggcuugugaucuggg

SEQ ID NO: 2096840 - RNA, 23 nt, Human
uuggcuucacggaagagccuugc

SEQ ID NO: 2096841 - RNA, 21 nt, Human
uuggcagggguggaggagagc

SEQ ID NO: 2096842 - RNA, 11 nt, Human
uuguaccucuc

SEQ ID NO: 2096843 - RNA, 14 nt, Human
uuguaaacuguacu

SEQ ID NO: 2096844 - RNA, 15 nt, Human
uuguaaacuguacua

SEQ ID NO: 2096845 - RNA, 16 nt, Human
uuguaaacguuucagu

SEQ ID NO: 2096846 - RNA, 18 nt, Human
uuguaaacguuucaguaa

SEQ ID NO: 2096847 - RNA, 23 nt, Human
uuguaaacaaacuguguaacugc

SEQ ID NO: 2096848 - RNA, 20 nt, Human
uuguaaacauuaguucuauu

SEQ ID NO: 2096849 - RNA, 22 nt, Human
uuguaaacauuaguucuauuuc

SEQ ID NO: 2096850 - RNA, 22 nt, Human
uuguaaacaaacuguguaacug

SEQ ID NO: 2096851 - RNA, 15 nt, Human
uugguaagcuuccag

SEQ ID NO: 2096852 - RNA, 22 nt, Human
uuguagaaggguuauauuuuac

SEQ ID NO: 2096853 - RNA, 22 nt, Human
uuguagaaguaggaagugaaaa

SEQ ID NO: 2096854 - RNA, 14 nt, Human
uuguauuuuaguau

SEQ ID NO: 2096855 - RNA, 20 nt, Human
uuguauuuuauuuuuuucuc

SEQ ID NO: 2096856 - RNA, 20 nt, Human
uuguaugauccuaaugaaug

SEQ ID NO: 2096857 - RNA, 22 nt, Human
uuguaugaaagauggcugugcc

SEQ ID NO: 2096858 - RNA, 22 nt, Human
uugucaaacuguagaaaugaug

SEQ ID NO: 2096859 - RNA, 14 nt, Human
uugucuaugggacu

SEQ ID NO: 2096860 - RNA, 19 nt, Human
uugucucuaugccagcuca

SEQ ID NO: 2096861 - RNA, 20 nt, Human
uugucaagucucugcuggcc

SEQ ID NO: 2096862 - RNA, 20 nt, Human
uugucuaugggacucaaugc

SEQ ID NO: 2096863 - RNA, 22 nt, Human
uugucuuaaaaaguggaaaaau

SEQ ID NO: 2096864 - RNA, 13 nt, Human
uugucuuaaauaa

SEQ ID NO: 2096865 - RNA, 17 nt, Human
uugucuuaaauaaaaga

SEQ ID NO: 2096866 - RNA, 18 nt, Human
uugucugaagucacugca

SEQ ID NO: 2096867 - RNA, 17 nt, Human
uugucugaagucacugc

SEQ ID NO: 2096868 - RNA, 12 nt, Human
uugucucugggc

SEQ ID NO: 2096869 - RNA, 22 nt, Human
uuugugguacgaccuuuagauu

SEQ ID NO: 2096870 - RNA, 12 nt, Human
uuuguggcuggg

SEQ ID NO: 2096871 - RNA, 15 nt, Human
uuuguguaauaaagu

SEQ ID NO: 2096872 - RNA, 16 nt, Human
uuuguguaauaaagug

SEQ ID NO: 2096873 - RNA, 17 nt, Human
uuuguguaauaaagugu

SEQ ID NO: 2096874 - RNA, 22 nt, Human
uuuguguaauaaaguguuuuca

SEQ ID NO: 2096875 - RNA, 14 nt, Human
uuuguguacagugu

SEQ ID NO: 2096876 - RNA, 16 nt, Human
auaugcaguuuuccuu

SEQ ID NO: 2096877 - RNA, 20 nt, Human
auaugcucugcauguuacau

SEQ ID NO: 2096878 - RNA, 18 nt, Human
auaugcugccaaauuuug

SEQ ID NO: 2096879 - RNA, 22 nt, Human
auaugcugccaaauuuuggcca

SEQ ID NO: 2096880 - RNA, 18 nt, Human
auauggauauuagucaua

SEQ ID NO: 2096881 - RNA, 22 nt, Human
auaucaguuacucagcccuggg

SEQ ID NO: 2096882 - RNA, 13 nt, Human
auaucaguuugcu

SEQ ID NO: 2096883 - RNA, 20 nt, Human
auaucaguuacucagcccug

SEQ ID NO: 2096884 - RNA, 21 nt, Human
auaucaguuacucagcccugg

SEQ ID NO: 2096885 - RNA, 23 nt, Human
auaucaguuacucagcccugggc

SEQ ID NO: 2096886 - RNA, 17 nt, Human
auaucaguuacucagcc

SEQ ID NO: 2096887 - RNA, 18 nt, Human
auaucaguuacucagccc

SEQ ID NO: 2096888 - RNA, 19 nt, Human
auaucaguuacucagcccu

SEQ ID NO: 2096889 - RNA, 16 nt, Human
auaugcucugcauguu

SEQ ID NO: 2096890 - RNA, 17 nt, Human
auaugcucugcauguua

SEQ ID NO: 2096891 - RNA, 22 nt, Human
auauucagugcuguggccuggg

SEQ ID NO: 2096892 - RNA, 14 nt, Human
auauucauuguaua

SEQ ID NO: 2096893 - RNA, 15 nt, Human
auauucauuguauaa

SEQ ID NO: 2096894 - RNA, 16 nt, Human
auauucauuguauaaa

SEQ ID NO: 2096895 - RNA, 23 nt, Human
auauucagugcuguggccugggc

SEQ ID NO: 2096896 - RNA, 17 nt, Human
auauuuauaacucauca

SEQ ID NO: 2096897 - RNA, 20 nt, Human
auauuuauaacucaucauaa

SEQ ID NO: 2096898 - RNA, 21 nt, Human
auauuuauaacucaucauaaa

SEQ ID NO: 2096899 - RNA, 22 nt, Human
auauuuauaacucaucauaaaa

SEQ ID NO: 2096900 - RNA, 23 nt, Human
auauuuauaacucaucauaaaau

SEQ ID NO: 2096901 - RNA, 21 nt, Human
auauucauuguauaaaaauag

SEQ ID NO: 2096902 - RNA, 15 nt, Human
auauuuauagucaca

SEQ ID NO: 2096903 - RNA, 14 nt, Human
auauuuauauaauu

SEQ ID NO: 2096904 - RNA, 20 nt, Human
auauuuauauaauuauguua

SEQ ID NO: 2096905 - RNA, 22 nt, Human
auauuuauauaauuauguuauu

SEQ ID NO: 2096906 - RNA, 14 nt, Human
auauuuauauuuca

SEQ ID NO: 2096907 - RNA, 15 nt, Human
auauuuauauuucac

SEQ ID NO: 2096908 - RNA, 19 nt, Human
auauuuauggggggagaac

SEQ ID NO: 2096909 - RNA, 14 nt, Human
auauuuauguagau

SEQ ID NO: 2096910 - RNA, 20 nt, Human
auauuuauguagaugugcau

SEQ ID NO: 2096911 - RNA, 14 nt, Human
auauauuuuucaca

SEQ ID NO: 2096912 - RNA, 15 nt, Human
auauauuuuucacag

SEQ ID NO: 2096913 - RNA, 21 nt, Human
auauauuuuucacaguuuuuc

SEQ ID NO: 2096914 - RNA, 17 nt, Human
auauauuuuuuaauuug

SEQ ID NO: 2096915 - RNA, 19 nt, Human
auauauuuuuuaauuugau

SEQ ID NO: 2096916 - RNA, 20 nt, Human
auauauuuuuuaauuugaug

SEQ ID NO: 2096917 - RNA, 23 nt, Human
auauauuuuuuaauuugaugaaa

SEQ ID NO: 2096918 - RNA, 12 nt, Human
auauaauaaagu

SEQ ID NO: 2096919 - RNA, 14 nt, Human
auauaauaaaguau

SEQ ID NO: 2096920 - RNA, 15 nt, Human
auauaauaaaguauu

SEQ ID NO: 2096921 - RNA, 17 nt, Human
auauaauaaaguauucc

SEQ ID NO: 2096922 - RNA, 20 nt, Human
auauaauaaaguauuccacc

SEQ ID NO: 2096923 - RNA, 15 nt, Human
auaguagcauacauu

SEQ ID NO: 2096924 - RNA, 16 nt, Human
auaguagcauacauuu

SEQ ID NO: 2096925 - RNA, 14 nt, Human
auaguacuggcaug

SEQ ID NO: 2096926 - RNA, 14 nt, Human
auaguaccuuugcu

SEQ ID NO: 2096927 - RNA, 15 nt, Human
auaguaccuuugcuc

SEQ ID NO: 2096928 - RNA, 18 nt, Human
auaguaccuuugcucuug

SEQ ID NO: 2096929 - RNA, 18 nt, Human
auaguacucuuuguagca

SEQ ID NO: 2096930 - RNA, 21 nt, Human
auauaauuuuuuuauguuuug

SEQ ID NO: 2096931 - RNA, 23 nt, Human
auauaauuuuuuuauguuuuguu

SEQ ID NO: 2096932 - RNA, 18 nt, Human
auauacaauaacauaauu

SEQ ID NO: 2096933 - RNA, 16 nt, Human
auauacaauaacauaa

SEQ ID NO: 2096934 - RNA, 14 nt, Human
auauacaauuauau

SEQ ID NO: 2096935 - RNA, 15 nt, Human
auauaauauauguuu

SEQ ID NO: 2096936 - RNA, 23 nt, Human
auauaauaugcacacagugcuuu

SEQ ID NO: 2096937 - RNA, 17 nt, Human
auagccuaggugacaga

SEQ ID NO: 2096938 - RNA, 15 nt, Human
auagccuaggugaca

SEQ ID NO: 2096939 - RNA, 14 nt, Human
auagccgggcaugg

SEQ ID NO: 2096940 - RNA, 18 nt, Human
auagccgggcaugguggc

SEQ ID NO: 2096941 - RNA, 14 nt, Human
auaguaaaaauaaa

SEQ ID NO: 2096942 - RNA, 18 nt, Human
auaguaaaagauaacaag

SEQ ID NO: 2096943 - RNA, 13 nt, Human
auaguaaaaauaa

SEQ ID NO: 2096944 - RNA, 12 nt, Human
auagccaaaaau

SEQ ID NO: 2096945 - RNA, 13 nt, Human
auauacacacagc

SEQ ID NO: 2096946 - RNA, 17 nt, Human
auauacacacacaaaga

SEQ ID NO: 2096947 - RNA, 18 nt, Human
auauacacacacaaagag

SEQ ID NO: 2096948 - RNA, 20 nt, Human
auauacacacacaaagagag

SEQ ID NO: 2096949 - RNA, 21 nt, Human
auauacacacacaaagagagu

SEQ ID NO: 2096950 - RNA, 15 nt, Human
auagcacuuucauug

SEQ ID NO: 2096951 - RNA, 18 nt, Human
auagcacuuucauugcca

SEQ ID NO: 2096952 - RNA, 15 nt, Human
auagcacugagcaaa

SEQ ID NO: 2096953 - RNA, 20 nt, Human
auagaaauaaauagcuauau

SEQ ID NO: 2096954 - RNA, 20 nt, Human
auagaaauauagccaaaaau

SEQ ID NO: 2096955 - RNA, 21 nt, Human
auagaaacucaccauguaaaa

SEQ ID NO: 2096956 - RNA, 22 nt, Human
auagaaagccaaaucaaaauau

SEQ ID NO: 2096957 - RNA, 13 nt, Human
auagcauuaacua

SEQ ID NO: 2096958 - RNA, 15 nt, Human
auagcauuaacuaau

SEQ ID NO: 2096959 - RNA, 21 nt, Human
auagcauuaacuaaucuauug

SEQ ID NO: 2096960 - RNA, 13 nt, Human
auagcauguaaug

SEQ ID NO: 2096961 - RNA, 22 nt, Human
auagcagauuuuaauuuugaau

SEQ ID NO: 2096962 - RNA, 14 nt, Human
auagcagauuuuaa

SEQ ID NO: 2096963 - RNA, 15 nt, Human
auacuuguuuucaaa

SEQ ID NO: 2096964 - RNA, 12 nt, Human
auacuuuacaug

SEQ ID NO: 2096965 - RNA, 17 nt, Human
auacuugucuuguucac

SEQ ID NO: 2096966 - RNA, 13 nt, Human
auacuugagacug

SEQ ID NO: 2096967 - RNA, 18 nt, Human
auaaagauuauauaaaga

SEQ ID NO: 2096968 - RNA, 20 nt, Human
auaaagauuauauaaagacc

SEQ ID NO: 2096969 - RNA, 20 nt, Human
auaaagauuucuugaguuuu

SEQ ID NO: 2096970 - RNA, 17 nt, Human
auaacaagaucuuucag

SEQ ID NO: 2096971 - RNA, 19 nt, Human
auaacaagaucuuucagga

SEQ ID NO: 2096972 - RNA, 20 nt, Human
auaaauuugguucuaauaga

SEQ ID NO: 2096973 - RNA, 20 nt, Human
auaacauguaauuaaguacu

SEQ ID NO: 2096974 - RNA, 11 nt, Human
auaacacacau

SEQ ID NO: 2096975 - RNA, 13 nt, Human
auaacacagagag

SEQ ID NO: 2096976 - RNA, 14 nt, Human
auaacacagagaga

SEQ ID NO: 2096977 - RNA, 22 nt, Human
auaacacagagagacagacuug

SEQ ID NO: 2096978 - RNA, 12 nt, Human
auaacauguaau

SEQ ID NO: 2096979 - RNA, 14 nt, Human
auaacacaauauga

SEQ ID NO: 2096980 - RNA, 13 nt, Human
auaacauguaauu

SEQ ID NO: 2096981 - RNA, 18 nt, Human
auaacauguaauuaagua

SEQ ID NO: 2096982 - RNA, 20 nt, Human
aguuugcacuguaugcugga

SEQ ID NO: 2096983 - RNA, 13 nt, Human
aguuugcagaaaa

SEQ ID NO: 2096984 - RNA, 11 nt, Human
auaaaaccuuu

SEQ ID NO: 2096985 - RNA, 13 nt, Human
auaaaaccuuuca

SEQ ID NO: 2096986 - RNA, 14 nt, Human
auaaaaccuuucaa

SEQ ID NO: 2096987 - RNA, 15 nt, Human
auaaaaccuuucaaa

SEQ ID NO: 2096988 - RNA, 20 nt, Human
auaaaaccuuucaaauuuca

SEQ ID NO: 2096989 - RNA, 21 nt, Human
auaaaaccuuucaaauuucac

SEQ ID NO: 2096990 - RNA, 22 nt, Human
auaaaaccuuucaaauuucaca

SEQ ID NO: 2096991 - RNA, 14 nt, Human
auaaagaugcucuu

SEQ ID NO: 2096992 - RNA, 15 nt, Human
auaaagaugcucuuu

SEQ ID NO: 2096993 - RNA, 18 nt, Human
auaaagauggcugacuuu

SEQ ID NO: 2096994 - RNA, 17 nt, Human
auaaaacuuugcugcca

SEQ ID NO: 2096995 - RNA, 20 nt, Human
auaaaacauuuucacacaau

SEQ ID NO: 2096996 - RNA, 18 nt, Human
auaaaacauuuucacaca

SEQ ID NO: 2096997 - RNA, 11 nt, Human
auaaaaaggca

SEQ ID NO: 2096998 - RNA, 12 nt, Human
auaaaaaggcac

SEQ ID NO: 2096999 - RNA, 21 nt, Human
auaaaaaggcaccuauaaaac

SEQ ID NO: 2097000 - RNA, 20 nt, Human
aguuugagaucagccugggc

SEQ ID NO: 2097001 - RNA, 18 nt, Human
aguuugagaucagccugg

SEQ ID NO: 2097002 - RNA, 19 nt, Human
aguuugagaucagccuggg

SEQ ID NO: 2097003 - RNA, 16 nt, Human
aguuucuucaaucuga

SEQ ID NO: 2097004 - RNA, 13 nt, Human
aguuucuuuggga

SEQ ID NO: 2097005 - RNA, 16 nt, Human
auacaaugacaaguau

SEQ ID NO: 2097006 - RNA, 15 nt, Human
auacaauaucaucca

SEQ ID NO: 2097007 - RNA, 22 nt, Human
auaauguuuaauauugagaaag

SEQ ID NO: 2097008 - RNA, 19 nt, Human
auaauguuuaauauugaga

SEQ ID NO: 2097009 - RNA, 13 nt, Human
auacacuuacacu

SEQ ID NO: 2097010 - RNA, 22 nt, Human
auacacuuacacuuuaugcaca

SEQ ID NO: 2097011 - RNA, 23 nt, Human
auacagaaagauggaugugcuuu

SEQ ID NO: 2097012 - RNA, 18 nt, Human
auacccauagcuuccaug

SEQ ID NO: 2097013 - RNA, 18 nt, Human
auaaugguugacuggguu

SEQ ID NO: 2097014 - RNA, 14 nt, Human
auaaugguugacug

SEQ ID NO: 2097015 - RNA, 21 nt, Human
auaauguugugguuuguugcc

SEQ ID NO: 2097016 - RNA, 20 nt, Human
auaagggagcguagaaucug

SEQ ID NO: 2097017 - RNA, 21 nt, Human
auaagggagcguagaaucugu

SEQ ID NO: 2097018 - RNA, 13 nt, Human
auaagguguauug

SEQ ID NO: 2097019 - RNA, 14 nt, Human
auaagguguauugc

SEQ ID NO: 2097020 - RNA, 18 nt, Human
auaaggccuuaauauguu

SEQ ID NO: 2097021 - RNA, 21 nt, Human
auaagccuccauuuaguucuu

SEQ ID NO: 2097022 - RNA, 15 nt, Human
aguaacaagagugau

SEQ ID NO: 2097023 - RNA, 18 nt, Human
aguaacaagagugauucu

SEQ ID NO: 2097024 - RNA, 21 nt, Human
aguaacaagagugauucuugc

SEQ ID NO: 2097025 - RNA, 22 nt, Human
aguaacaagagugauucuugcu

SEQ ID NO: 2097026 - RNA, 17 nt, Human
aguaacagggccuugcu

SEQ ID NO: 2097027 - RNA, 20 nt, Human
aguaagaaagugaagcaaau

SEQ ID NO: 2097028 - RNA, 21 nt, Human
aguaagaaagugaagcaaauc

SEQ ID NO: 2097029 - RNA, 19 nt, Human
aguaagagcuggugucuga

SEQ ID NO: 2097030 - RNA, 14 nt, Human
aguaagaagacaug

SEQ ID NO: 2097031 - RNA, 15 nt, Human
aguaagaagacauga

SEQ ID NO: 2097032 - RNA, 16 nt, Human
aguaagaagacaugaa

SEQ ID NO: 2097033 - RNA, 16 nt, Human
aguaagaccggaagcu

SEQ ID NO: 2097034 - RNA, 19 nt, Human
aguaagaccggaagcuccu

SEQ ID NO: 2097035 - RNA, 21 nt, Human
aguaagaccggaagcuccugg

SEQ ID NO: 2097036 - RNA, 22 nt, Human
aguaagaccggaagcuccuggu

SEQ ID NO: 2097037 - RNA, 12 nt, Human
aguaagagcugg

SEQ ID NO: 2097038 - RNA, 14 nt, Human
aguaagagcuggug

SEQ ID NO: 2097039 - RNA, 20 nt, Human
aguacuggcugauggaguaa

SEQ ID NO: 2097040 - RNA, 16 nt, Human
aguacuguguacagaa

SEQ ID NO: 2097041 - RNA, 12 nt, Human
aguacuauguau

SEQ ID NO: 2097042 - RNA, 14 nt, Human
aguacuauguauca

SEQ ID NO: 2097043 - RNA, 12 nt, Human
aguacuucuuuu

SEQ ID NO: 2097044 - RNA, 17 nt, Human
aguacuucuccacccug

SEQ ID NO: 2097045 - RNA, 14 nt, Human
aguacuauaucugu

SEQ ID NO: 2097046 - RNA, 16 nt, Human
aguacuauaucuguuu

SEQ ID NO: 2097047 - RNA, 22 nt, Human
aguacuauaucuguuuuacugc

SEQ ID NO: 2097048 - RNA, 22 nt, Human
aguaagcccuugaagauaucuu

SEQ ID NO: 2097049 - RNA, 19 nt, Human
aggucucagaaucuuuccu

SEQ ID NO: 2097050 - RNA, 23 nt, Human
aguaagauuuacccagaauguca

SEQ ID NO: 2097051 - RNA, 19 nt, Human
aguaucauggaaauauuau

SEQ ID NO: 2097052 - RNA, 18 nt, Human
aguaucgggggcuggggc

SEQ ID NO: 2097053 - RNA, 16 nt, Human
aguaucuaacauguau

SEQ ID NO: 2097054 - RNA, 21 nt, Human
aguauuuuuauauuuaaaugu

SEQ ID NO: 2097055 - RNA, 19 nt, Human
aguauuuuuauauuuaaau

SEQ ID NO: 2097056 - RNA, 22 nt, Human
agucacacaguauuacuucugc

SEQ ID NO: 2097057 - RNA, 13 nt, Human
agucacaaaggaa

SEQ ID NO: 2097058 - RNA, 14 nt, Human
agucacaaaggaau

SEQ ID NO: 2097059 - RNA, 15 nt, Human
agucacaaaggaaug

SEQ ID NO: 2097060 - RNA, 16 nt, Human
agucacaagagcccag

SEQ ID NO: 2097061 - RNA, 18 nt, Human
agucaauccccucauuca

SEQ ID NO: 2097062 - RNA, 18 nt, Human
agucaaaaggugccugug

SEQ ID NO: 2097063 - RNA, 21 nt, Human
agucaaaacagagaugugaua

SEQ ID NO: 2097064 - RNA, 15 nt, Human
agucaaaaggugccu

SEQ ID NO: 2097065 - RNA, 16 nt, Human
agucaaaaggugccug

SEQ ID NO: 2097066 - RNA, 17 nt, Human
agucaaaaggugccugu

SEQ ID NO: 2097067 - RNA, 19 nt, Human
agucaaaacacuuguaauu

SEQ ID NO: 2097068 - RNA, 14 nt, Human
agucaaaacagaga

SEQ ID NO: 2097069 - RNA, 18 nt, Human
agugaccugaggaagcgu

SEQ ID NO: 2097070 - RNA, 16 nt, Human
agugaccugaggaagc

SEQ ID NO: 2097071 - RNA, 17 nt, Human
agugaccugaggaagcg

SEQ ID NO: 2097072 - RNA, 14 nt, Human
agugaccugaggaa

SEQ ID NO: 2097073 - RNA, 15 nt, Human
agugaccugaggaag

SEQ ID NO: 2097074 - RNA, 14 nt, Human
agugacgugcaccu

SEQ ID NO: 2097075 - RNA, 15 nt, Human
agucugugugaaggu

SEQ ID NO: 2097076 - RNA, 11 nt, Human
agucugugugc

SEQ ID NO: 2097077 - RNA, 21 nt, Human
agucugugugcugugguuccu

SEQ ID NO: 2097078 - RNA, 23 nt, Human
agucugugugcugugguuccugg

SEQ ID NO: 2097079 - RNA, 17 nt, Human
agucugugugggacugu

SEQ ID NO: 2097080 - RNA, 18 nt, Human
agucugugugggacugua

SEQ ID NO: 2097081 - RNA, 19 nt, Human
agucugugugggacuguac

SEQ ID NO: 2097082 - RNA, 22 nt, Human
agucugugugggacuguacaca

SEQ ID NO: 2097083 - RNA, 19 nt, Human
agugaauuugaaugaaaaa

SEQ ID NO: 2097084 - RNA, 23 nt, Human
agugaauuuuucucuaacucaga

SEQ ID NO: 2097085 - RNA, 17 nt, Human
agugaauuuuucucuaa

SEQ ID NO: 2097086 - RNA, 20 nt, Human
agugaauuuuucucuaacuc

SEQ ID NO: 2097087 - RNA, 20 nt, Human
agugaauuugaaugaaaaau

SEQ ID NO: 2097088 - RNA, 15 nt, Human
agugaauuuuucucu

SEQ ID NO: 2097089 - RNA, 16 nt, Human
agugaauuuuucucua

SEQ ID NO: 2097090 - RNA, 21 nt, Human
agugaauugugaccaaguuau

SEQ ID NO: 2097091 - RNA, 13 nt, Human
agugaauuugaau

SEQ ID NO: 2097092 - RNA, 14 nt, Human
agugaauuugaaug

SEQ ID NO: 2097093 - RNA, 15 nt, Human
agugaauuugaauga

SEQ ID NO: 2097094 - RNA, 14 nt, Human
agucugugccugga

SEQ ID NO: 2097095 - RNA, 16 nt, Human
agucugugccuggagc

SEQ ID NO: 2097096 - RNA, 17 nt, Human
agucugugccuggagcu

SEQ ID NO: 2097097 - RNA, 21 nt, Human
agucugugccuggagcuccug

SEQ ID NO: 2097098 - RNA, 22 nt, Human
agucugugccuggagcuccugg

SEQ ID NO: 2097099 - RNA, 23 nt, Human
agucugugccuggagcuccuggg

SEQ ID NO: 2097100 - RNA, 23 nt, Human
agucugacuuccccgcauuccag

SEQ ID NO: 2097101 - RNA, 11 nt, Human
agucuguguga

SEQ ID NO: 2097102 - RNA, 12 nt, Human
agucugugugaa

SEQ ID NO: 2097103 - RNA, 15 nt, Human
aguccuuaccucuuc

SEQ ID NO: 2097104 - RNA, 17 nt, Human
aguccuuaccucuuccg

SEQ ID NO: 2097105 - RNA, 21 nt, Human
aguccuuaccucuuccggaga

SEQ ID NO: 2097106 - RNA, 23 nt, Human
aguccuuaccucuuccggagaug

SEQ ID NO: 2097107 - RNA, 17 nt, Human
agucugaaguuucauuu

SEQ ID NO: 2097108 - RNA, 18 nt, Human
agucugaaguuucauuua

SEQ ID NO: 2097109 - RNA, 15 nt, Human
aguccuugcaagaau

SEQ ID NO: 2097110 - RNA, 13 nt, Human
agucaugugcauu

SEQ ID NO: 2097111 - RNA, 16 nt, Human
aguccaaauguccucc

SEQ ID NO: 2097112 - RNA, 21 nt, Human
agucaugaucucccugccgcc

SEQ ID NO: 2097113 - RNA, 15 nt, Human
agucaugaucucccu

SEQ ID NO: 2097114 - RNA, 16 nt, Human
agucaugaucucccug

SEQ ID NO: 2097115 - RNA, 17 nt, Human
agucaugaucucccugc

SEQ ID NO: 2097116 - RNA, 18 nt, Human
agucaugaucucccugcc

SEQ ID NO: 2097117 - RNA, 19 nt, Human
agucaugaucucccugccg

SEQ ID NO: 2097118 - RNA, 20 nt, Human
agucaugaucucccugccgc

SEQ ID NO: 2097119 - RNA, 23 nt, Human
agucaugaucucccugccgccuc

SEQ ID NO: 2097120 - RNA, 19 nt, Human
agucaugcguuuaaucaca

SEQ ID NO: 2097121 - RNA, 19 nt, Human
aguccucuuuucugagagg

SEQ ID NO: 2097122 - RNA, 18 nt, Human
aguccaacguggggcagc

SEQ ID NO: 2097123 - RNA, 19 nt, Human
aguccaaauguccuccaga

SEQ ID NO: 2097124 - RNA, 23 nt, Human
aguccaaauguccuccagaagcc

SEQ ID NO: 2097125 - RNA, 19 nt, Human
aguccaacguggggcagca

SEQ ID NO: 2097126 - RNA, 20 nt, Human
aguccaacguggggcagcac

SEQ ID NO: 2097127 - RNA, 22 nt, Human
aguccaacguggggcagcacag

SEQ ID NO: 2097128 - RNA, 23 nt, Human
aguccaacguggggcagcacaga

SEQ ID NO: 2097129 - RNA, 22 nt, Human
aguccucuuuucugagaggacu

SEQ ID NO: 2097130 - RNA, 14 nt, Human
agucaugagcugag

SEQ ID NO: 2097131 - RNA, 16 nt, Human
agucaugagcugagca

SEQ ID NO: 2097132 - RNA, 22 nt, Human
agucaugagcugagcagggaga

SEQ ID NO: 2097133 - RNA, 21 nt, Human
agugggccaggacaggcccgg

SEQ ID NO: 2097134 - RNA, 14 nt, Human
agugggccagugug

SEQ ID NO: 2097135 - RNA, 22 nt, Human
agugggauaaaggcccagacuc

SEQ ID NO: 2097136 - RNA, 13 nt, Human
agugggccaggac

SEQ ID NO: 2097137 - RNA, 15 nt, Human
agugggccaggacag

SEQ ID NO: 2097138 - RNA, 16 nt, Human
agugggccaggacagg

SEQ ID NO: 2097139 - RNA, 19 nt, Human
agugggccaggacaggccc

SEQ ID NO: 2097140 - RNA, 20 nt, Human
agugggccaggacaggcccg

SEQ ID NO: 2097141 - RNA, 22 nt, Human
agugucucggagggauuccccu

SEQ ID NO: 2097142 - RNA, 14 nt, Human
agugucuaaaaaca

SEQ ID NO: 2097143 - RNA, 18 nt, Human
agugucucaguccaccug

SEQ ID NO: 2097144 - RNA, 14 nt, Human
agugucaggaggaa

SEQ ID NO: 2097145 - RNA, 19 nt, Human
agugucacuuaccuagauu

SEQ ID NO: 2097146 - RNA, 21 nt, Human
agugucacuuaccuagauuua

SEQ ID NO: 2097147 - RNA, 19 nt, Human
agugucauuuaugaaaaga

SEQ ID NO: 2097148 - RNA, 21 nt, Human
agugggacagggcauggccag

SEQ ID NO: 2097149 - RNA, 19 nt, Human
agugggacagggcauggcc

SEQ ID NO: 2097150 - RNA, 20 nt, Human
agugggaacgugacugcccc

SEQ ID NO: 2097151 - RNA, 20 nt, Human
agugggaaggacuuggcgcg

SEQ ID NO: 2097152 - RNA, 15 nt, Human
agugggacagagucu

SEQ ID NO: 2097153 - RNA, 17 nt, Human
agugggacagagucugg

SEQ ID NO: 2097154 - RNA, 12 nt, Human
agugggagaaaa

SEQ ID NO: 2097155 - RNA, 13 nt, Human
aguggccuggcuc

SEQ ID NO: 2097156 - RNA, 14 nt, Human
aguggccuggcucc

SEQ ID NO: 2097157 - RNA, 17 nt, Human
aguggccuggcuccgcu

SEQ ID NO: 2097158 - RNA, 23 nt, Human
aguggccuggcuccgcugugugg

SEQ ID NO: 2097159 - RNA, 22 nt, Human
aguggccuggccaggagcucuu

SEQ ID NO: 2097160 - RNA, 23 nt, Human
aguggccuggccaggagcucuuc

SEQ ID NO: 2097161 - RNA, 13 nt, Human
aguggccuggcca

SEQ ID NO: 2097162 - RNA, 14 nt, Human
aguggccuggccag

SEQ ID NO: 2097163 - RNA, 15 nt, Human
aguggccuggccagg

SEQ ID NO: 2097164 - RNA, 18 nt, Human
aguggccuggccaggagc

SEQ ID NO: 2097165 - RNA, 19 nt, Human
aguggccuggccaggagcu

SEQ ID NO: 2097166 - RNA, 20 nt, Human
aguggccuggccaggagcuc

SEQ ID NO: 2097167 - RNA, 19 nt, Human
agugucucaguccaccuga

SEQ ID NO: 2097168 - RNA, 22 nt, Human
agugucucaguccaccugagcu

SEQ ID NO: 2097169 - RNA, 22 nt, Human
agugucuguaucggagacagug

SEQ ID NO: 2097170 - RNA, 13 nt, Human
agugucugugugc

SEQ ID NO: 2097171 - RNA, 22 nt, Human
agugucugugugcaagugugug

SEQ ID NO: 2097172 - RNA, 24 nt, Human
agugauccucccaccucagccucc

SEQ ID NO: 2097173 - RNA, 18 nt, Human
agugauccucccaccuca

SEQ ID NO: 2097174 - RNA, 15 nt, Human
agugauccucccacc

SEQ ID NO: 2097175 - RNA, 14 nt, Human
agugauccucccac

SEQ ID NO: 2097176 - RNA, 17 nt, Human
agugauucuccugccuc

SEQ ID NO: 2097177 - RNA, 15 nt, Human
agugauucuccugcc

SEQ ID NO: 2097178 - RNA, 16 nt, Human
agugccuuaccuccug

SEQ ID NO: 2097179 - RNA, 17 nt, Human
agugccuuaccuccugc

SEQ ID NO: 2097180 - RNA, 18 nt, Human
agugccuuaccuccugcc

SEQ ID NO: 2097181 - RNA, 19 nt, Human
agugccuuaccuccugccc

SEQ ID NO: 2097182 - RNA, 20 nt, Human
agugccuuaccuccugccca

SEQ ID NO: 2097183 - RNA, 14 nt, Human
agugauucuccugc

SEQ ID NO: 2097184 - RNA, 21 nt, Human
agugaugcugugcuaugaauu

SEQ ID NO: 2097185 - RNA, 13 nt, Human
agugaucuccaua

SEQ ID NO: 2097186 - RNA, 14 nt, Human
agugaucuccauau

SEQ ID NO: 2097187 - RNA, 21 nt, Human
agugaucuccauauguuacac

SEQ ID NO: 2097188 - RNA, 23 nt, Human
agugccuuaccuccugcccagga

SEQ ID NO: 2097189 - RNA, 21 nt, Human
agugccuuaccuccugcccag

SEQ ID NO: 2097190 - RNA, 22 nt, Human
agugccuuaccuccugcccagg

SEQ ID NO: 2097191 - RNA, 22 nt, Human
aguggccucaacccucccucag

SEQ ID NO: 2097192 - RNA, 15 nt, Human
aguggccucaacccu

SEQ ID NO: 2097193 - RNA, 20 nt, Human
aguggccucaacccucccuc

SEQ ID NO: 2097194 - RNA, 21 nt, Human
aguggccucaacccucccuca

SEQ ID NO: 2097195 - RNA, 18 nt, Human
aguucagguaacaggcag

SEQ ID NO: 2097196 - RNA, 15 nt, Human
aguucagcaccaccc

SEQ ID NO: 2097197 - RNA, 17 nt, Human
aguucagcaccacccua

SEQ ID NO: 2097198 - RNA, 18 nt, Human
aguucagcaccacccuag

SEQ ID NO: 2097199 - RNA, 21 nt, Human
aguucaggagucccaaggaaa

SEQ ID NO: 2097200 - RNA, 19 nt, Human
aguucaggagucccaagga

SEQ ID NO: 2097201 - RNA, 20 nt, Human
aguucaggagucccaaggaa

SEQ ID NO: 2097202 - RNA, 15 nt, Human
aguucagcugcuucu

SEQ ID NO: 2097203 - RNA, 16 nt, Human
aguucagcugcuucuc

SEQ ID NO: 2097204 - RNA, 16 nt, Human
aguucaggagucccaa

SEQ ID NO: 2097205 - RNA, 16 nt, Human
aguugaggccaggagu

SEQ ID NO: 2097206 - RNA, 15 nt, Human
aguugaggaguuucc

SEQ ID NO: 2097207 - RNA, 16 nt, Human
aguugaggaguuuccu

SEQ ID NO: 2097208 - RNA, 17 nt, Human
aguugaggaguuuccua

SEQ ID NO: 2097209 - RNA, 18 nt, Human
aguugugcacauggcuua

SEQ ID NO: 2097210 - RNA, 19 nt, Human
aguugucccgauuguaacu

SEQ ID NO: 2097211 - RNA, 20 nt, Human
aguugucccgauuguaacuc

SEQ ID NO: 2097212 - RNA, 22 nt, Human
aguugacuugacagaacacugu

SEQ ID NO: 2097213 - RNA, 14 nt, Human
auguuugccucugc

SEQ ID NO: 2097214 - RNA, 18 nt, Human
auguuucuuaaaugggcu

SEQ ID NO: 2097215 - RNA, 17 nt, Human
auguuugccucugccuc

SEQ ID NO: 2097216 - RNA, 15 nt, Human
auguuugccucugcc

SEQ ID NO: 2097217 - RNA, 23 nt, Human
auguuucgugaaguauacuguau

SEQ ID NO: 2097218 - RNA, 22 nt, Human
auguuucgcugauauauguguu

SEQ ID NO: 2097219 - RNA, 20 nt, Human
auguuucgugaaguauacug

SEQ ID NO: 2097220 - RNA, 13 nt, Human
auguucucugagg

SEQ ID NO: 2097221 - RNA, 17 nt, Human
auguucucucuucucca

SEQ ID NO: 2097222 - RNA, 16 nt, Human
auguucucucuucucc

SEQ ID NO: 2097223 - RNA, 14 nt, Human
auguucugggacac

SEQ ID NO: 2097224 - RNA, 17 nt, Human
auguucucugaggacac

SEQ ID NO: 2097225 - RNA, 15 nt, Human
auguucugggacaca

SEQ ID NO: 2097226 - RNA, 21 nt, Human
auguucugugccuguaaacau

SEQ ID NO: 2097227 - RNA, 14 nt, Human
auguucccuucucc

SEQ ID NO: 2097228 - RNA, 18 nt, Human
auguguaucggaugcuuu

SEQ ID NO: 2097229 - RNA, 13 nt, Human
auguguaaguauu

SEQ ID NO: 2097230 - RNA, 13 nt, Human
augucacaggcag

SEQ ID NO: 2097231 - RNA, 21 nt, Human
auguacaaaauaaaguuacau

SEQ ID NO: 2097232 - RNA, 20 nt, Human
auguaacugcauugagaacu

SEQ ID NO: 2097233 - RNA, 23 nt, Human
auguaacugcauugagaacugca

SEQ ID NO: 2097234 - RNA, 13 nt, Human
augguccccaugg

SEQ ID NO: 2097235 - RNA, 15 nt, Human
augguccgguguccu

SEQ ID NO: 2097236 - RNA, 15 nt, Human
auguaauugaauaaa

SEQ ID NO: 2097237 - RNA, 17 nt, Human
auguaauuuguguaaua

SEQ ID NO: 2097238 - RNA, 18 nt, Human
auguaauuuguguaauaa

SEQ ID NO: 2097239 - RNA, 21 nt, Human
auguaauuuguguaauaaagu

SEQ ID NO: 2097240 - RNA, 19 nt, Human
augucacaggcagguccag

SEQ ID NO: 2097241 - RNA, 13 nt, Human
augucaccaccuu

SEQ ID NO: 2097242 - RNA, 15 nt, Human
augucaccaccuucc

SEQ ID NO: 2097243 - RNA, 16 nt, Human
augucaccaccuuccc

SEQ ID NO: 2097244 - RNA, 18 nt, Human
augucaccaccuucccag

SEQ ID NO: 2097245 - RNA, 19 nt, Human
augucaccaccuucccagc

SEQ ID NO: 2097246 - RNA, 20 nt, Human
augucaccaccuucccagcu

SEQ ID NO: 2097247 - RNA, 23 nt, Human
augucaccaccuucccagcucuc

SEQ ID NO: 2097248 - RNA, 19 nt, Human
augucaccggauccugggu

SEQ ID NO: 2097249 - RNA, 20 nt, Human
augucaccggauccugggug

SEQ ID NO: 2097250 - RNA, 19 nt, Human
augucuuuuuuucuguuaa

SEQ ID NO: 2097251 - RNA, 20 nt, Human
augucuuuuuaagcuuauuu

SEQ ID NO: 2097252 - RNA, 16 nt, Human
augucuuuuuaagcuu

SEQ ID NO: 2097253 - RNA, 18 nt, Human
augucuuuuuaagcuuau

SEQ ID NO: 2097254 - RNA, 23 nt, Human
augucuuuuuaagcuuauuuaau

SEQ ID NO: 2097255 - RNA, 19 nt, Human
auggguguguguuugugug

SEQ ID NO: 2097256 - RNA, 12 nt, Human
augggugugugu

SEQ ID NO: 2097257 - RNA, 13 nt, Human
auggguguguguu

SEQ ID NO: 2097258 - RNA, 19 nt, Human
auggguuuuguagguacuu

SEQ ID NO: 2097259 - RNA, 15 nt, Human
auggguuauguguau

SEQ ID NO: 2097260 - RNA, 14 nt, Human
auggguugcauuug

SEQ ID NO: 2097261 - RNA, 23 nt, Human
augguaaaaguuacuuauucuag

SEQ ID NO: 2097262 - RNA, 13 nt, Human
augguaaaauugc

SEQ ID NO: 2097263 - RNA, 14 nt, Human
augguaaaauugca

SEQ ID NO: 2097264 - RNA, 15 nt, Human
augguaaaauugcau

SEQ ID NO: 2097265 - RNA, 16 nt, Human
augguaaaauugcaug

SEQ ID NO: 2097266 - RNA, 17 nt, Human
augguaaaauugcaugg

SEQ ID NO: 2097267 - RNA, 16 nt, Human
augguagucuaaccaa

SEQ ID NO: 2097268 - RNA, 19 nt, Human
augguagucuaaccaaaug

SEQ ID NO: 2097269 - RNA, 21 nt, Human
augguagucuaaccaaaugca

SEQ ID NO: 2097270 - RNA, 22 nt, Human
augguagucuaaccaaaugcau

SEQ ID NO: 2097271 - RNA, 18 nt, Human
augguaaagauauuauuc

SEQ ID NO: 2097272 - RNA, 20 nt, Human
augguaauuuauaguuuaua

SEQ ID NO: 2097273 - RNA, 19 nt, Human
augguacuagggggaagug

SEQ ID NO: 2097274 - RNA, 19 nt, Human
augcugcgcccuuccccag

SEQ ID NO: 2097275 - RNA, 15 nt, Human
auggaggccuguccu

SEQ ID NO: 2097276 - RNA, 19 nt, Human
auggaggcacacagcugca

SEQ ID NO: 2097277 - RNA, 12 nt, Human
auggaggccugu

SEQ ID NO: 2097278 - RNA, 18 nt, Human
auggaggcuauguggagu

SEQ ID NO: 2097279 - RNA, 17 nt, Human
auggaguagaccccugg

SEQ ID NO: 2097280 - RNA, 18 nt, Human
auggaguagaccccuggc

SEQ ID NO: 2097281 - RNA, 21 nt, Human
auggaguagaccccuggcugg

SEQ ID NO: 2097282 - RNA, 22 nt, Human
auggaguagaccccuggcuggu

SEQ ID NO: 2097283 - RNA, 18 nt, Human
auggaggggugguccuga

SEQ ID NO: 2097284 - RNA, 20 nt, Human
auggaggggugguccugacu

SEQ ID NO: 2097285 - RNA, 22 nt, Human
auggaggggugguccugacuca

SEQ ID NO: 2097286 - RNA, 17 nt, Human
auggauccccagugaaa

SEQ ID NO: 2097287 - RNA, 22 nt, Human
auggauccccagugaaaacuag

SEQ ID NO: 2097288 - RNA, 16 nt, Human
auggauauuagucaua

SEQ ID NO: 2097289 - RNA, 23 nt, Human
auggauauuagucauagaagaac

SEQ ID NO: 2097290 - RNA, 17 nt, Human
auggcugugccucugcc

SEQ ID NO: 2097291 - RNA, 16 nt, Human
auggcugugccucugc

SEQ ID NO: 2097292 - RNA, 15 nt, Human
auggcugugccucug

SEQ ID NO: 2097293 - RNA, 15 nt, Human
augcugccuccagaa

SEQ ID NO: 2097294 - RNA, 12 nt, Human
augcugccucca

SEQ ID NO: 2097295 - RNA, 16 nt, Human
augcugcgcccuuccc

SEQ ID NO: 2097296 - RNA, 18 nt, Human
augcugcgcccuucccca

SEQ ID NO: 2097297 - RNA, 17 nt, Human
augcugccuaggcugac

SEQ ID NO: 2097298 - RNA, 19 nt, Human
augcugccuaggcugaccu

SEQ ID NO: 2097299 - RNA, 12 nt, Human
augcugccugag

SEQ ID NO: 2097300 - RNA, 13 nt, Human
augcugccugagu

SEQ ID NO: 2097301 - RNA, 21 nt, Human
augcugacuguacuccuccca

SEQ ID NO: 2097302 - RNA, 20 nt, Human
augcugacuguacuccuccc

SEQ ID NO: 2097303 - RNA, 19 nt, Human
augcugacuguacuccucc

SEQ ID NO: 2097304 - RNA, 18 nt, Human
augaugaaaugaggucag

SEQ ID NO: 2097305 - RNA, 15 nt, Human
augaucuuuucaagu

SEQ ID NO: 2097306 - RNA, 23 nt, Human
augaugaaaugaggucagagccu

SEQ ID NO: 2097307 - RNA, 17 nt, Human
augaugacgacgacaac

SEQ ID NO: 2097308 - RNA, 22 nt, Human
augaugacgacgacaacgauga

SEQ ID NO: 2097309 - RNA, 11 nt, Human
augaugcacau

SEQ ID NO: 2097310 - RNA, 16 nt, Human
augaugcacauuucau

SEQ ID NO: 2097311 - RNA, 20 nt, Human
augaugauguggaagaacuu

SEQ ID NO: 2097312 - RNA, 15 nt, Human
augaugauccuaggc

SEQ ID NO: 2097313 - RNA, 15 nt, Human
augcacaaugucuug

SEQ ID NO: 2097314 - RNA, 16 nt, Human
augcacaaugucuugg

SEQ ID NO: 2097315 - RNA, 17 nt, Human
augaucuuugcagacag

SEQ ID NO: 2097316 - RNA, 14 nt, Human
augaucuugugaca

SEQ ID NO: 2097317 - RNA, 15 nt, Human
augaucuugugacau

SEQ ID NO: 2097318 - RNA, 21 nt, Human
augaucuuugcagacaggcaa

SEQ ID NO: 2097319 - RNA, 19 nt, Human
augaucuuugcagacaggc

SEQ ID NO: 2097320 - RNA, 18 nt, Human
augaucuuugcagacagg

SEQ ID NO: 2097321 - RNA, 15 nt, Human
augccuuacuuugua

SEQ ID NO: 2097322 - RNA, 16 nt, Human
augccuuacuuuguau

SEQ ID NO: 2097323 - RNA, 18 nt, Human
augccuuacuuuguauga

SEQ ID NO: 2097324 - RNA, 23 nt, Human
augccuuacuuuguaugauauuc

SEQ ID NO: 2097325 - RNA, 18 nt, Human
augccuuccagcacccug

SEQ ID NO: 2097326 - RNA, 19 nt, Human
augccuuccagcacccugc

SEQ ID NO: 2097327 - RNA, 15 nt, Human
augccuucuccagac

SEQ ID NO: 2097328 - RNA, 15 nt, Human
augcacaaaguguau

SEQ ID NO: 2097329 - RNA, 16 nt, Human
augccugcggaguugu

SEQ ID NO: 2097330 - RNA, 19 nt, Human
augccugccccaaacaaau

SEQ ID NO: 2097331 - RNA, 17 nt, Human
augccuguccagccugg

SEQ ID NO: 2097332 - RNA, 18 nt, Human
augccuguccagccuggg

SEQ ID NO: 2097333 - RNA, 21 nt, Human
augcacacagugcuuuccgug

SEQ ID NO: 2097334 - RNA, 19 nt, Human
aucccgugcaaaacaugcu

SEQ ID NO: 2097335 - RNA, 20 nt, Human
aucccgugcaaaacaugcua

SEQ ID NO: 2097336 - RNA, 23 nt, Human
auccccaggggucccagccaccc

SEQ ID NO: 2097337 - RNA, 19 nt, Human
auccccaggggucccagcc

SEQ ID NO: 2097338 - RNA, 21 nt, Human
auccccaggggucccagccac

SEQ ID NO: 2097339 - RNA, 22 nt, Human
aucccuacccccuaagagccau

SEQ ID NO: 2097340 - RNA, 14 nt, Human
aucccuacccccua

SEQ ID NO: 2097341 - RNA, 21 nt, Human
aucccuacccccuaagagcca

SEQ ID NO: 2097342 - RNA, 19 nt, Human
aucccaugagccucagcau

SEQ ID NO: 2097343 - RNA, 22 nt, Human
auccagaguuuagaggaaaaaa

SEQ ID NO: 2097344 - RNA, 13 nt, Human
auccccacccuug

SEQ ID NO: 2097345 - RNA, 14 nt, Human
aucccauugcccug

SEQ ID NO: 2097346 - RNA, 16 nt, Human
auccacucuacccucc

SEQ ID NO: 2097347 - RNA, 13 nt, Human
auccaccugucuc

SEQ ID NO: 2097348 - RNA, 18 nt, Human
auccaccugucucagccu

SEQ ID NO: 2097349 - RNA, 21 nt, Human
auccaccugucucagccuccc

SEQ ID NO: 2097350 - RNA, 19 nt, Human
auccagacccggcugcgug

SEQ ID NO: 2097351 - RNA, 18 nt, Human
auccacucuacccuccca

SEQ ID NO: 2097352 - RNA, 19 nt, Human
auccacucuacccucccac

SEQ ID NO: 2097353 - RNA, 20 nt, Human
auccacucuacccucccacc

SEQ ID NO: 2097354 - RNA, 21 nt, Human
auccacucuacccucccaccc

SEQ ID NO: 2097355 - RNA, 14 nt, Human
auccucacugggug

SEQ ID NO: 2097356 - RNA, 14 nt, Human
auccucaguuccug

SEQ ID NO: 2097357 - RNA, 19 nt, Human
auccucaguuccugcagca

SEQ ID NO: 2097358 - RNA, 22 nt, Human
auccucaguuccugcagcagag

SEQ ID NO: 2097359 - RNA, 15 nt, Human
auccuuagcaacagc

SEQ ID NO: 2097360 - RNA, 15 nt, Human
auccucacugggugg

SEQ ID NO: 2097361 - RNA, 12 nt, Human
auccuuccacgg

SEQ ID NO: 2097362 - RNA, 20 nt, Human
auccuucaagaacucugggc

SEQ ID NO: 2097363 - RNA, 21 nt, Human
auccuuguuuugugacauuuu

SEQ ID NO: 2097364 - RNA, 17 nt, Human
auccuuuaaauccuucc

SEQ ID NO: 2097365 - RNA, 19 nt, Human
aucgcccuccacaucccug

SEQ ID NO: 2097366 - RNA, 23 nt, Human
aucgcgccacuacacuccagccu

SEQ ID NO: 2097367 - RNA, 21 nt, Human
aucgcuccaccuugcagcucu

SEQ ID NO: 2097368 - RNA, 17 nt, Human
aucgcuccaccuugcag

SEQ ID NO: 2097369 - RNA, 14 nt, Human
aucaugucuggcua

SEQ ID NO: 2097370 - RNA, 16 nt, Human
aucaugaaauaugcau

SEQ ID NO: 2097371 - RNA, 15 nt, Human
aucaugaaauaugca

SEQ ID NO: 2097372 - RNA, 18 nt, Human
aucaugaaauaugcaucu

SEQ ID NO: 2097373 - RNA, 14 nt, Human
aucaugaaauaugc

SEQ ID NO: 2097374 - RNA, 12 nt, Human
aucaccucaggc

SEQ ID NO: 2097375 - RNA, 21 nt, Human
aucaggaaauauauaugugug

SEQ ID NO: 2097376 - RNA, 20 nt, Human
aucaggaaauauauaugugu

SEQ ID NO: 2097377 - RNA, 15 nt, Human
aucaccuagaaacuu

SEQ ID NO: 2097378 - RNA, 20 nt, Human
aucaccgagaguagccgaga

SEQ ID NO: 2097379 - RNA, 13 nt, Human
aucaccagacagg

SEQ ID NO: 2097380 - RNA, 15 nt, Human
aucacauaacagaau

SEQ ID NO: 2097381 - RNA, 17 nt, Human
aucacauagugaaaguu

SEQ ID NO: 2097382 - RNA, 23 nt, Human
aucacaggguugggcccagaucu

SEQ ID NO: 2097383 - RNA, 21 nt, Human
aucacagggccccagaaggca

SEQ ID NO: 2097384 - RNA, 14 nt, Human
aucacacuucugug

SEQ ID NO: 2097385 - RNA, 16 nt, Human
aucacacuucugugag

SEQ ID NO: 2097386 - RNA, 18 nt, Human
aucacacuucugugagac

SEQ ID NO: 2097387 - RNA, 11 nt, Human
aucacacacac

SEQ ID NO: 2097388 - RNA, 13 nt, Human
aucacacaaagca

SEQ ID NO: 2097389 - RNA, 13 nt, Human
aucacagccucug

SEQ ID NO: 2097390 - RNA, 15 nt, Human
aucacagaggcuucu

SEQ ID NO: 2097391 - RNA, 12 nt, Human
aucacagggccc

SEQ ID NO: 2097392 - RNA, 16 nt, Human
aucacagggccccaga

SEQ ID NO: 2097393 - RNA, 14 nt, Human
aucacagaggcuuc

SEQ ID NO: 2097394 - RNA, 22 nt, Human
aucacagggccccagaaggcag

SEQ ID NO: 2097395 - RNA, 18 nt, Human
aucacaggguugggccca

SEQ ID NO: 2097396 - RNA, 19 nt, Human
aucacaggguugggcccag

SEQ ID NO: 2097397 - RNA, 20 nt, Human
aucacaggguugggcccaga

SEQ ID NO: 2097398 - RNA, 20 nt, Human
aucaaauagaaccacuauga

SEQ ID NO: 2097399 - RNA, 21 nt, Human
aucaaauagaaccacuaugaa

SEQ ID NO: 2097400 - RNA, 21 nt, Human
aucaaaggaaaauaguaaugu

SEQ ID NO: 2097401 - RNA, 20 nt, Human
aucaaagagguuuuaaaaaa

SEQ ID NO: 2097402 - RNA, 23 nt, Human
aucaaagagguuuuaaaaaaauc

SEQ ID NO: 2097403 - RNA, 14 nt, Human
aucaaacagcucag

SEQ ID NO: 2097404 - RNA, 21 nt, Human
auauuuccuuaaacugugugg

SEQ ID NO: 2097405 - RNA, 21 nt, Human
aucaaaaucuguagagcaggg

SEQ ID NO: 2097406 - RNA, 13 nt, Human
aucaaaaugaccu

SEQ ID NO: 2097407 - RNA, 23 nt, Human
aucaaaaugaccucaccauuuuu

SEQ ID NO: 2097408 - RNA, 16 nt, Human
aucaaaauaaauugaa

SEQ ID NO: 2097409 - RNA, 17 nt, Human
aucaaaauaaauugaaa

SEQ ID NO: 2097410 - RNA, 19 nt, Human
aucaaaauaaauugaaaua

SEQ ID NO: 2097411 - RNA, 15 nt, Human
aucugggugacugag

SEQ ID NO: 2097412 - RNA, 16 nt, Human
aucuggggcucuggga

SEQ ID NO: 2097413 - RNA, 13 nt, Human
aucuuauucacau

SEQ ID NO: 2097414 - RNA, 15 nt, Human
aucuucaaagcuuga

SEQ ID NO: 2097415 - RNA, 19 nt, Human
aucuucaaagcuugaagau

SEQ ID NO: 2097416 - RNA, 21 nt, Human
aucuucacaauggugcucauu

SEQ ID NO: 2097417 - RNA, 16 nt, Human
aucuuauuuucaugua

SEQ ID NO: 2097418 - RNA, 23 nt, Human
aucuuauuuucauguauaugugu

SEQ ID NO: 2097419 - RNA, 16 nt, Human
aucucugcuuuggaaa

SEQ ID NO: 2097420 - RNA, 22 nt, Human
aucuggacuccucuguccaggc

SEQ ID NO: 2097421 - RNA, 17 nt, Human
aucucucuuuaauauaa

SEQ ID NO: 2097422 - RNA, 16 nt, Human
aucucugaacuucagc

SEQ ID NO: 2097423 - RNA, 17 nt, Human
aucucugaacuucagcu

SEQ ID NO: 2097424 - RNA, 15 nt, Human
aucuucguucuuguu

SEQ ID NO: 2097425 - RNA, 18 nt, Human
aucuucguucuuguuagu

SEQ ID NO: 2097426 - RNA, 22 nt, Human
aucuucccuagaggguuccugu

SEQ ID NO: 2097427 - RNA, 21 nt, Human
aucuuccccaacgaaaagcac

SEQ ID NO: 2097428 - RNA, 21 nt, Human
aucuucccuagaggguuccug

SEQ ID NO: 2097429 - RNA, 20 nt, Human
aucuauauaguaccuuugcu

SEQ ID NO: 2097430 - RNA, 21 nt, Human
aucuauauaguaccuuugcuc

SEQ ID NO: 2097431 - RNA, 12 nt, Human
aucuauuguaag

SEQ ID NO: 2097432 - RNA, 13 nt, Human
aucuauuguaaga

SEQ ID NO: 2097433 - RNA, 14 nt, Human
aucuauuguaagau

SEQ ID NO: 2097434 - RNA, 15 nt, Human
aucuauuguaagaua

SEQ ID NO: 2097435 - RNA, 17 nt, Human
aucuauuguaagauaaa

SEQ ID NO: 2097436 - RNA, 19 nt, Human
aucuauuguaagauaaaaa

SEQ ID NO: 2097437 - RNA, 20 nt, Human
aucuauuguaagauaaaaaa

SEQ ID NO: 2097438 - RNA, 21 nt, Human
aucuauuguaagauaaaaaag

SEQ ID NO: 2097439 - RNA, 15 nt, Human
aucuauugggauuuu

SEQ ID NO: 2097440 - RNA, 17 nt, Human
aucuauugggauuuucu

SEQ ID NO: 2097441 - RNA, 16 nt, Human
aucuauuggguucauu

SEQ ID NO: 2097442 - RNA, 17 nt, Human
aucuauuggguucauua

SEQ ID NO: 2097443 - RNA, 19 nt, Human
aucuauuggguucauuauu

SEQ ID NO: 2097444 - RNA, 15 nt, Human
aucuauuucugagaa

SEQ ID NO: 2097445 - RNA, 22 nt, Human
aucuauuggguucauuauugga

SEQ ID NO: 2097446 - RNA, 13 nt, Human
aucuauuuauugg

SEQ ID NO: 2097447 - RNA, 14 nt, Human
aucuauuuauugga

SEQ ID NO: 2097448 - RNA, 12 nt, Human
aucuauuuguau

SEQ ID NO: 2097449 - RNA, 20 nt, Human
aucuauuuguauauauacau

SEQ ID NO: 2097450 - RNA, 22 nt, Human
aucuauuuguauauauacauaa

SEQ ID NO: 2097451 - RNA, 14 nt, Human
aucuauuucugaga

SEQ ID NO: 2097452 - RNA, 15 nt, Human
aucuccguggcuuug

SEQ ID NO: 2097453 - RNA, 20 nt, Human
aucuccugaggaucagaaag

SEQ ID NO: 2097454 - RNA, 21 nt, Human
aucuccugaggaucagaaagu

SEQ ID NO: 2097455 - RNA, 22 nt, Human
aucuccugaggaucagaaagua

SEQ ID NO: 2097456 - RNA, 13 nt, Human
aucuccuauuuuu

SEQ ID NO: 2097457 - RNA, 14 nt, Human
aucuccuauuuuuu

SEQ ID NO: 2097458 - RNA, 18 nt, Human
aucuccuauuuuuuuaaa

SEQ ID NO: 2097459 - RNA, 20 nt, Human
aucuccuauuuuuuuaaaau

SEQ ID NO: 2097460 - RNA, 22 nt, Human
aucuccuauuuuuuuaaaauca

SEQ ID NO: 2097461 - RNA, 13 nt, Human
aucuccucacuga

SEQ ID NO: 2097462 - RNA, 20 nt, Human
aucuccucgcaagcugggua

SEQ ID NO: 2097463 - RNA, 14 nt, Human
aucuccugugcaug

SEQ ID NO: 2097464 - RNA, 11 nt, Human
aucucucccuc

SEQ ID NO: 2097465 - RNA, 23 nt, Human
aucucucccuccccugccauuuu

SEQ ID NO: 2097466 - RNA, 14 nt, Human
aucucucccucccc

SEQ ID NO: 2097467 - RNA, 15 nt, Human
aucucucccuccccu

SEQ ID NO: 2097468 - RNA, 20 nt, Human
aucuaggugaggauugauua

SEQ ID NO: 2097469 - RNA, 18 nt, Human
aucuagguggaguugaaa

SEQ ID NO: 2097470 - RNA, 21 nt, Human
aucuagguggaguugaaagag

SEQ ID NO: 2097471 - RNA, 22 nt, Human
aucuagguggaguugaaagagu

SEQ ID NO: 2097472 - RNA, 21 nt, Human
aucuagugcagcugauuuuaa

SEQ ID NO: 2097473 - RNA, 18 nt, Human
aucuagugcagcugauuu

SEQ ID NO: 2097474 - RNA, 19 nt, Human
aucuagugcagcugauuuu

SEQ ID NO: 2097475 - RNA, 22 nt, Human
aucuagugcagcugauuuuaac

SEQ ID NO: 2097476 - RNA, 13 nt, Human
aucuagugcagcu

SEQ ID NO: 2097477 - RNA, 14 nt, Human
aucuagugcagcug

SEQ ID NO: 2097478 - RNA, 15 nt, Human
aucuagugcagcuga

SEQ ID NO: 2097479 - RNA, 17 nt, Human
aucuagugcagcugauu

SEQ ID NO: 2097480 - RNA, 12 nt, Human
augaaaauguca

SEQ ID NO: 2097481 - RNA, 13 nt, Human
augaaaaugucag

SEQ ID NO: 2097482 - RNA, 15 nt, Human
augaaaaugucagaa

SEQ ID NO: 2097483 - RNA, 19 nt, Human
augaaaaugucagaaacca

SEQ ID NO: 2097484 - RNA, 20 nt, Human
augaaaaugcaacaacaugu

SEQ ID NO: 2097485 - RNA, 15 nt, Human
augaaaauccuacca

SEQ ID NO: 2097486 - RNA, 17 nt, Human
augaaaauccuaccaac

SEQ ID NO: 2097487 - RNA, 19 nt, Human
augaaaauccuaccaaccu

SEQ ID NO: 2097488 - RNA, 20 nt, Human
augaaaauccuaccaaccuc

SEQ ID NO: 2097489 - RNA, 21 nt, Human
augaaaauccuaccaaccucu

SEQ ID NO: 2097490 - RNA, 19 nt, Human
augaaguguguuuccuuca

SEQ ID NO: 2097491 - RNA, 23 nt, Human
augaaguguguuuccuucagugc

SEQ ID NO: 2097492 - RNA, 14 nt, Human
augacuaaaaauau

SEQ ID NO: 2097493 - RNA, 16 nt, Human
augacuaaaaauauua

SEQ ID NO: 2097494 - RNA, 23 nt, Human
augacuaaaaauauuauaacuua

SEQ ID NO: 2097495 - RNA, 11 nt, Human
augacuaaaga

SEQ ID NO: 2097496 - RNA, 12 nt, Human
augacuaaagag

SEQ ID NO: 2097497 - RNA, 13 nt, Human
augacuaaagaga

SEQ ID NO: 2097498 - RNA, 14 nt, Human
augacuaaagagag

SEQ ID NO: 2097499 - RNA, 15 nt, Human
augacuaaagagaga

SEQ ID NO: 2097500 - RNA, 16 nt, Human
augacuaaagagagaa

SEQ ID NO: 2097501 - RNA, 17 nt, Human
augacuaaagagagaau

SEQ ID NO: 2097502 - RNA, 18 nt, Human
augacuaaagagagaaug

SEQ ID NO: 2097503 - RNA, 12 nt, Human
augacccaggcu

SEQ ID NO: 2097504 - RNA, 18 nt, Human
augacccaggcugccuga

SEQ ID NO: 2097505 - RNA, 16 nt, Human
augacggaagaacaua

SEQ ID NO: 2097506 - RNA, 19 nt, Human
augacggaagaacauagaa

SEQ ID NO: 2097507 - RNA, 21 nt, Human
augacggaagaacauagaacu

SEQ ID NO: 2097508 - RNA, 15 nt, Human
augaaguuguaggua

SEQ ID NO: 2097509 - RNA, 17 nt, Human
augaccauacugaggga

SEQ ID NO: 2097510 - RNA, 20 nt, Human
augaccagaagggaaacagu

SEQ ID NO: 2097511 - RNA, 14 nt, Human
augaaguuuauaca

SEQ ID NO: 2097512 - RNA, 15 nt, Human
augaaguuuauacag

SEQ ID NO: 2097513 - RNA, 16 nt, Human
augaaguuuauacagu

SEQ ID NO: 2097514 - RNA, 17 nt, Human
augaaguuuauacagua

SEQ ID NO: 2097515 - RNA, 21 nt, Human
augacuaaagagagaauguag

SEQ ID NO: 2097516 - RNA, 19 nt, Human
augacuaaagagagaaugu

SEQ ID NO: 2097517 - RNA, 20 nt, Human
augacuaaagagagaaugua

SEQ ID NO: 2097518 - RNA, 23 nt, Human
augacuaaagagagaauguagau

SEQ ID NO: 2097519 - RNA, 13 nt, Human
augacugcauuuu

SEQ ID NO: 2097520 - RNA, 12 nt, Human
augacuggaauu

SEQ ID NO: 2097521 - RNA, 13 nt, Human
augacuggaauuu

SEQ ID NO: 2097522 - RNA, 15 nt, Human
augacuggaauuuuu

SEQ ID NO: 2097523 - RNA, 17 nt, Human
augacuggaauuuuuau

SEQ ID NO: 2097524 - RNA, 22 nt, Human
augacuggaauuuuuauuaugc

SEQ ID NO: 2097525 - RNA, 15 nt, Human
augacuguuuuuuaa

SEQ ID NO: 2097526 - RNA, 15 nt, Human
augaggggcccgagc

SEQ ID NO: 2097527 - RNA, 16 nt, Human
augagggaucacaggg

SEQ ID NO: 2097528 - RNA, 22 nt, Human
augaaaaauuuaagcauuguuu

SEQ ID NO: 2097529 - RNA, 22 nt, Human
agacugaccaauauuguacagu

SEQ ID NO: 2097530 - RNA, 16 nt, Human
agacucuguggggccu

SEQ ID NO: 2097531 - RNA, 13 nt, Human
agacugagcucaa

SEQ ID NO: 2097532 - RNA, 19 nt, Human
agacugcugggacuggcca

SEQ ID NO: 2097533 - RNA, 20 nt, Human
agacugcugggacuggccag

SEQ ID NO: 2097534 - RNA, 22 nt, Human
agacugcugggacuggccaggu

SEQ ID NO: 2097535 - RNA, 13 nt, Human
agacucugucuca

SEQ ID NO: 2097536 - RNA, 18 nt, Human
agacucugucucaaaaaa

SEQ ID NO: 2097537 - RNA, 14 nt, Human
agacgccuuacugg

SEQ ID NO: 2097538 - RNA, 14 nt, Human
agagccucaaauga

SEQ ID NO: 2097539 - RNA, 17 nt, Human
agagccucaaaugagaa

SEQ ID NO: 2097540 - RNA, 15 nt, Human
agagcccuucauuug

SEQ ID NO: 2097541 - RNA, 13 nt, Human
agagccgggaagc

SEQ ID NO: 2097542 - RNA, 16 nt, Human
agagccgggaagcgau

SEQ ID NO: 2097543 - RNA, 17 nt, Human
agagccgugaugccucc

SEQ ID NO: 2097544 - RNA, 20 nt, Human
agagccuccuuucuggcuuu

SEQ ID NO: 2097545 - RNA, 20 nt, Human
agacuggauaguccgucucu

SEQ ID NO: 2097546 - RNA, 14 nt, Human
agagagacaagaag

SEQ ID NO: 2097547 - RNA, 19 nt, Human
agagagaagugccccugcu

SEQ ID NO: 2097548 - RNA, 15 nt, Human
agagagaagugcccc

SEQ ID NO: 2097549 - RNA, 16 nt, Human
agacuggauaguccgu

SEQ ID NO: 2097550 - RNA, 13 nt, Human
agacuggagggga

SEQ ID NO: 2097551 - RNA, 23 nt, Human
agacuggaggggacgcugguaga

SEQ ID NO: 2097552 - RNA, 15 nt, Human
agacuggauacugcc

SEQ ID NO: 2097553 - RNA, 16 nt, Human
agacuggauacugccc

SEQ ID NO: 2097554 - RNA, 16 nt, Human
agagagaccacuuuuc

SEQ ID NO: 2097555 - RNA, 13 nt, Human
agagagagaagug

SEQ ID NO: 2097556 - RNA, 11 nt, Human
agacuggaggg

SEQ ID NO: 2097557 - RNA, 13 nt, Human
agagccagggucu

SEQ ID NO: 2097558 - RNA, 14 nt, Human
agagagggggccac

SEQ ID NO: 2097559 - RNA, 16 nt, Human
agagagggggccaccu

SEQ ID NO: 2097560 - RNA, 19 nt, Human
agagagggggccaccuccc

SEQ ID NO: 2097561 - RNA, 22 nt, Human
agagaggggaauaauagaagaa

SEQ ID NO: 2097562 - RNA, 19 nt, Human
agagccauggacucuacac

SEQ ID NO: 2097563 - RNA, 13 nt, Human
agagcccaccuug

SEQ ID NO: 2097564 - RNA, 17 nt, Human
agagagggaauucucuu

SEQ ID NO: 2097565 - RNA, 18 nt, Human
agagagggaauucucuug

SEQ ID NO: 2097566 - RNA, 14 nt, Human
agagagaguguuug

SEQ ID NO: 2097567 - RNA, 23 nt, Human
agaggacuuuucuuuguggcuuc

SEQ ID NO: 2097568 - RNA, 14 nt, Human
agaggagucagaga

SEQ ID NO: 2097569 - RNA, 21 nt, Human
agaggagggcgugacucaccc

SEQ ID NO: 2097570 - RNA, 19 nt, Human
agaggagggcgugacucac

SEQ ID NO: 2097571 - RNA, 17 nt, Human
agaggagggaugcugcc

SEQ ID NO: 2097572 - RNA, 22 nt, Human
agaggacuuuucuuuguggcuu

SEQ ID NO: 2097573 - RNA, 21 nt, Human
agaggacuuuucuuuguggcu

SEQ ID NO: 2097574 - RNA, 14 nt, Human
agaggacuuuucuu

SEQ ID NO: 2097575 - RNA, 23 nt, Human
agaggaaucagacuucacacugc

SEQ ID NO: 2097576 - RNA, 14 nt, Human
agaggggggcugcc

SEQ ID NO: 2097577 - RNA, 12 nt, Human
agagggggccac

SEQ ID NO: 2097578 - RNA, 24 nt, Human
agaggaaucagacuucacacugca

SEQ ID NO: 2097579 - RNA, 11 nt, Human
agacagagucu

SEQ ID NO: 2097580 - RNA, 12 nt, Human
agacagagcugg

SEQ ID NO: 2097581 - RNA, 21 nt, Human
agacagagcugguugggaaga

SEQ ID NO: 2097582 - RNA, 20 nt, Human
agacagagucucacuguugc

SEQ ID NO: 2097583 - RNA, 19 nt, Human
agacagagucucacuguug

SEQ ID NO: 2097584 - RNA, 18 nt, Human
agacaaaugcugcgcccu

SEQ ID NO: 2097585 - RNA, 14 nt, Human
agacaaauggagga

SEQ ID NO: 2097586 - RNA, 18 nt, Human
agacaaauggaggaauau

SEQ ID NO: 2097587 - RNA, 16 nt, Human
agacaaaccagaagca

SEQ ID NO: 2097588 - RNA, 17 nt, Human
agacaaaccagaagcaa

SEQ ID NO: 2097589 - RNA, 15 nt, Human
agaccagccuggcca

SEQ ID NO: 2097590 - RNA, 13 nt, Human
agaccagccuggc

SEQ ID NO: 2097591 - RNA, 14 nt, Human
agaccagccuggcc

SEQ ID NO: 2097592 - RNA, 12 nt, Human
agaccagccugg

SEQ ID NO: 2097593 - RNA, 16 nt, Human
agacccaaggaggaaa

SEQ ID NO: 2097594 - RNA, 14 nt, Human
agacccaaggagga

SEQ ID NO: 2097595 - RNA, 17 nt, Human
agacgauuugucaguua

SEQ ID NO: 2097596 - RNA, 21 nt, Human
agacagagucucacuguugcc

SEQ ID NO: 2097597 - RNA, 14 nt, Human
agacagaugcccca

SEQ ID NO: 2097598 - RNA, 15 nt, Human
agacagaugccccag

SEQ ID NO: 2097599 - RNA, 16 nt, Human
agacagaugccccaga

SEQ ID NO: 2097600 - RNA, 19 nt, Human
agacagaugccccagagcu

SEQ ID NO: 2097601 - RNA, 12 nt, Human
agacagcagcuc

SEQ ID NO: 2097602 - RNA, 14 nt, Human
agacagcagcucag

SEQ ID NO: 2097603 - RNA, 16 nt, Human
agacagcagcucaggc

SEQ ID NO: 2097604 - RNA, 12 nt, Human
agaccagagcuc

SEQ ID NO: 2097605 - RNA, 14 nt, Human
agaccagagcucug

SEQ ID NO: 2097606 - RNA, 15 nt, Human
agaccagagcucugg

SEQ ID NO: 2097607 - RNA, 16 nt, Human
agaccagagcucugga

SEQ ID NO: 2097608 - RNA, 17 nt, Human
agaccagagcucuggag

SEQ ID NO: 2097609 - RNA, 18 nt, Human
agaccagagcucuggagc

SEQ ID NO: 2097610 - RNA, 19 nt, Human
agaccagagcucuggagcc

SEQ ID NO: 2097611 - RNA, 20 nt, Human
agaccagagcucuggagcca

SEQ ID NO: 2097612 - RNA, 21 nt, Human
acuuuccucuuagucgagcca

SEQ ID NO: 2097613 - RNA, 19 nt, Human
acuuuccccauacucuguc

SEQ ID NO: 2097614 - RNA, 21 nt, Human
acuuuccccauacucugucuc

SEQ ID NO: 2097615 - RNA, 22 nt, Human
acuuuccccauacucugucucc

SEQ ID NO: 2097616 - RNA, 22 nt, Human
acuuuccccgugggccauggca

SEQ ID NO: 2097617 - RNA, 21 nt, Human
agaagacacugaugggcaacc

SEQ ID NO: 2097618 - RNA, 12 nt, Human
agaagacaugaa

SEQ ID NO: 2097619 - RNA, 12 nt, Human
agaagacacugc

SEQ ID NO: 2097620 - RNA, 15 nt, Human
agaagacaugaacca

SEQ ID NO: 2097621 - RNA, 16 nt, Human
agaagacaugaaccaa

SEQ ID NO: 2097622 - RNA, 13 nt, Human
agaagacacugau

SEQ ID NO: 2097623 - RNA, 18 nt, Human
agaagagacucuuugcau

SEQ ID NO: 2097624 - RNA, 15 nt, Human
agaagagagaaauag

SEQ ID NO: 2097625 - RNA, 21 nt, Human
agaagagauugugguuucauu

SEQ ID NO: 2097626 - RNA, 22 nt, Human
agaagagaguccauauuucaau

SEQ ID NO: 2097627 - RNA, 18 nt, Human
agaagguuucagaaagaa

SEQ ID NO: 2097628 - RNA, 13 nt, Human
agaaguaacaaga

SEQ ID NO: 2097629 - RNA, 20 nt, Human
agaaguaacaagagugauuc

SEQ ID NO: 2097630 - RNA, 21 nt, Human
agaaguaacaagagugauucu

SEQ ID NO: 2097631 - RNA, 14 nt, Human
agaaguaacuuacu

SEQ ID NO: 2097632 - RNA, 21 nt, Human
agaaguaggcaugagggauca

SEQ ID NO: 2097633 - RNA, 17 nt, Human
agaaguaggcaugaggg

SEQ ID NO: 2097634 - RNA, 21 nt, Human
agaagguauuccuuuugugua

SEQ ID NO: 2097635 - RNA, 23 nt, Human
agaaggguuuuccacccuggaau

SEQ ID NO: 2097636 - RNA, 21 nt, Human
agaaggguuuuccacccugga

SEQ ID NO: 2097637 - RNA, 22 nt, Human
agaaggguuuuccacccuggaa

SEQ ID NO: 2097638 - RNA, 15 nt, Human
agaaggguccuuccc

SEQ ID NO: 2097639 - RNA, 18 nt, Human
agaaggguccuucccucu

SEQ ID NO: 2097640 - RNA, 20 nt, Human
agaaggguccuucccucucc

SEQ ID NO: 2097641 - RNA, 23 nt, Human
agaaggguccuucccucucccca

SEQ ID NO: 2097642 - RNA, 16 nt, Human
agaaggguuauauuuu

SEQ ID NO: 2097643 - RNA, 19 nt, Human
agaaggguuauauuuuacu

SEQ ID NO: 2097644 - RNA, 20 nt, Human
agaaggguuuuccacccugg

SEQ ID NO: 2097645 - RNA, 19 nt, Human
agaagguggggguuggcug

SEQ ID NO: 2097646 - RNA, 20 nt, Human
agaagguggggguuggcugg

SEQ ID NO: 2097647 - RNA, 22 nt, Human
agaagguggggguuggcugggu

SEQ ID NO: 2097648 - RNA, 23 nt, Human
agaagguggggguuggcugggua

SEQ ID NO: 2097649 - RNA, 14 nt, Human
agaagguccuuaau

SEQ ID NO: 2097650 - RNA, 20 nt, Human
agaagguccuuaaugauccg

SEQ ID NO: 2097651 - RNA, 21 nt, Human
agaagguccuuaaugauccgu

SEQ ID NO: 2097652 - RNA, 22 nt, Human
agaagagaugggcuuguuuucu

SEQ ID NO: 2097653 - RNA, 17 nt, Human
agaagaggcagauucaa

SEQ ID NO: 2097654 - RNA, 20 nt, Human
agaagagaugggcuuguuuu

SEQ ID NO: 2097655 - RNA, 17 nt, Human
agaagggggccaugagg

SEQ ID NO: 2097656 - RNA, 18 nt, Human
agaagggggucaaagcaa

SEQ ID NO: 2097657 - RNA, 19 nt, Human
agaagggggucaaagcaag

SEQ ID NO: 2097658 - RNA, 20 nt, Human
agaagggggucaaagcaagg

SEQ ID NO: 2097659 - RNA, 21 nt, Human
agaagggggucaaagcaagga

SEQ ID NO: 2097660 - RNA, 20 nt, Human
agaaugaaauugcugaaaga

SEQ ID NO: 2097661 - RNA, 18 nt, Human
agaaugaaagggcccaga

SEQ ID NO: 2097662 - RNA, 17 nt, Human
agaagucaugaagccca

SEQ ID NO: 2097663 - RNA, 14 nt, Human
agaagucaaaguaa

SEQ ID NO: 2097664 - RNA, 18 nt, Human
agaagucacucaauuguu

SEQ ID NO: 2097665 - RNA, 13 nt, Human
agaagucaugaag

SEQ ID NO: 2097666 - RNA, 14 nt, Human
agaaugagagugug

SEQ ID NO: 2097667 - RNA, 23 nt, Human
agaauggcuuuggucucuugcuu

SEQ ID NO: 2097668 - RNA, 18 nt, Human
agaauggcuuuggucucu

SEQ ID NO: 2097669 - RNA, 13 nt, Human
agaaugcugguuu

SEQ ID NO: 2097670 - RNA, 18 nt, Human
agaaugcugguuuuccua

SEQ ID NO: 2097671 - RNA, 14 nt, Human
agcaaaccugcccc

SEQ ID NO: 2097672 - RNA, 15 nt, Human
agcaaaccugcccca

SEQ ID NO: 2097673 - RNA, 19 nt, Human
agcaaacuaacuugacuuu

SEQ ID NO: 2097674 - RNA, 13 nt, Human
agcaaacacauua

SEQ ID NO: 2097675 - RNA, 16 nt, Human
agcaaaagaaguaaca

SEQ ID NO: 2097676 - RNA, 18 nt, Human
agcaaaagaugcuucuca

SEQ ID NO: 2097677 - RNA, 21 nt, Human
agauugcaacaggcugggcuu

SEQ ID NO: 2097678 - RNA, 20 nt, Human
agauugcaacaggcugggcu

SEQ ID NO: 2097679 - RNA, 23 nt, Human
agauugcaacaggcugggcuuca

SEQ ID NO: 2097680 - RNA, 16 nt, Human
agcaaaaccauugcuu

SEQ ID NO: 2097681 - RNA, 17 nt, Human
agcaaaaccauugcuuc

SEQ ID NO: 2097682 - RNA, 18 nt, Human
agcaaaaccauugcuuca

SEQ ID NO: 2097683 - RNA, 19 nt, Human
agcaaaaccauugcuucac

SEQ ID NO: 2097684 - RNA, 20 nt, Human
agcaaaaccauugcuucacu

SEQ ID NO: 2097685 - RNA, 22 nt, Human
agcaaaaccauugcuucacuac

SEQ ID NO: 2097686 - RNA, 17 nt, Human
agcaaaacuccaucuca

SEQ ID NO: 2097687 - RNA, 15 nt, Human
agauugaaaaggaag

SEQ ID NO: 2097688 - RNA, 16 nt, Human
agauugaaaaggaaga

SEQ ID NO: 2097689 - RNA, 16 nt, Human
agcaaauguggcuccu

SEQ ID NO: 2097690 - RNA, 15 nt, Human
agcaaaugugaccug

SEQ ID NO: 2097691 - RNA, 13 nt, Human
agcaaauguuaca

SEQ ID NO: 2097692 - RNA, 14 nt, Human
agcaaauguuacau

SEQ ID NO: 2097693 - RNA, 15 nt, Human
agcaaauguuacaua

SEQ ID NO: 2097694 - RNA, 19 nt, Human
agcaaauguuacauagugu

SEQ ID NO: 2097695 - RNA, 20 nt, Human
agcaaauguuacauagugua

SEQ ID NO: 2097696 - RNA, 17 nt, Human
agcaaauguuaugcaua

SEQ ID NO: 2097697 - RNA, 23 nt, Human
agcaaaggaguagaaagacagag

SEQ ID NO: 2097698 - RNA, 13 nt, Human
agaugauccauga

SEQ ID NO: 2097699 - RNA, 14 nt, Human
agaugguuacacug

SEQ ID NO: 2097700 - RNA, 16 nt, Human
agaugguuacacuguu

SEQ ID NO: 2097701 - RNA, 18 nt, Human
agaugguuacacuguuag

SEQ ID NO: 2097702 - RNA, 19 nt, Human
agaugguuacacuguuaga

SEQ ID NO: 2097703 - RNA, 19 nt, Human
agaugguauauuugguacu

SEQ ID NO: 2097704 - RNA, 13 nt, Human
agaugggugggga

SEQ ID NO: 2097705 - RNA, 21 nt, Human
agauguagcaaaacgcaugga

SEQ ID NO: 2097706 - RNA, 19 nt, Human
agauguagauaaacucaga

SEQ ID NO: 2097707 - RNA, 20 nt, Human
agauguaagagcuuuacaaa

SEQ ID NO: 2097708 - RNA, 18 nt, Human
agaugguuugagccugag

SEQ ID NO: 2097709 - RNA, 11 nt, Human
agaguggccug

SEQ ID NO: 2097710 - RNA, 12 nt, Human
agaguggccugg

SEQ ID NO: 2097711 - RNA, 21 nt, Human
agagugcuguccgguggagau

SEQ ID NO: 2097712 - RNA, 13 nt, Human
agagugccccacc

SEQ ID NO: 2097713 - RNA, 16 nt, Human
agagugccccaccugc

SEQ ID NO: 2097714 - RNA, 18 nt, Human
agagugccccaccugcca

SEQ ID NO: 2097715 - RNA, 19 nt, Human
agagugccccaccugccac

SEQ ID NO: 2097716 - RNA, 13 nt, Human
agagugcccagaa

SEQ ID NO: 2097717 - RNA, 12 nt, Human
agagugcccaga

SEQ ID NO: 2097718 - RNA, 18 nt, Human
agagugcauugugagggu

SEQ ID NO: 2097719 - RNA, 17 nt, Human
agagugauaauacaagu

SEQ ID NO: 2097720 - RNA, 14 nt, Human
agagugcaaaacau

SEQ ID NO: 2097721 - RNA, 13 nt, Human
agagugcaacagu

SEQ ID NO: 2097722 - RNA, 17 nt, Human
agagugcaacaguagca

SEQ ID NO: 2097723 - RNA, 22 nt, Human
agagugcaacaguagcauagga

SEQ ID NO: 2097724 - RNA, 19 nt, Human
agaugaagcaaacacauua

SEQ ID NO: 2097725 - RNA, 20 nt, Human
agaugaagagugagagggca

SEQ ID NO: 2097726 - RNA, 18 nt, Human
agaugaagcaaacacauu

SEQ ID NO: 2097727 - RNA, 17 nt, Human
agaugaagcaaacacau

SEQ ID NO: 2097728 - RNA, 21 nt, Human
agaugaacucuuucuggccug

SEQ ID NO: 2097729 - RNA, 17 nt, Human
agaugaagagugagagg

SEQ ID NO: 2097730 - RNA, 19 nt, Human
agaugaagagugagagggc

SEQ ID NO: 2097731 - RNA, 17 nt, Human
agcaauguuaucuuggu

SEQ ID NO: 2097732 - RNA, 14 nt, Human
agcaauccuccuga

SEQ ID NO: 2097733 - RNA, 17 nt, Human
agcaauccuccugagug

SEQ ID NO: 2097734 - RNA, 12 nt, Human
agcagccucuga

SEQ ID NO: 2097735 - RNA, 14 nt, Human
agcagccucugaag

SEQ ID NO: 2097736 - RNA, 15 nt, Human
agcagcuugcugcac

SEQ ID NO: 2097737 - RNA, 17 nt, Human
agcagcuugcugcaccc

SEQ ID NO: 2097738 - RNA, 14 nt, Human
agcacuuggagcca

SEQ ID NO: 2097739 - RNA, 17 nt, Human
agcacuuggagccaagg

SEQ ID NO: 2097740 - RNA, 16 nt, Human
agcagcccuccucacc

SEQ ID NO: 2097741 - RNA, 17 nt, Human
agcagcccuccucaccc

SEQ ID NO: 2097742 - RNA, 23 nt, Human
agcagcccuccucaccccgucug

SEQ ID NO: 2097743 - RNA, 18 nt, Human
agcagcccuccucacccc

SEQ ID NO: 2097744 - RNA, 14 nt, Human
agccaaacucugcc

SEQ ID NO: 2097745 - RNA, 15 nt, Human
agccaaacucugcca

SEQ ID NO: 2097746 - RNA, 17 nt, Human
agcauccuggcacccgg

SEQ ID NO: 2097747 - RNA, 14 nt, Human
agcauccuggcacc

SEQ ID NO: 2097748 - RNA, 18 nt, Human
agccaaagcuaggccugg

SEQ ID NO: 2097749 - RNA, 16 nt, Human
agccaaagcuaggccu

SEQ ID NO: 2097750 - RNA, 15 nt, Human
agccaaagauaaucu

SEQ ID NO: 2097751 - RNA, 19 nt, Human
agccaagauugcgccauug

SEQ ID NO: 2097752 - RNA, 13 nt, Human
agccaagcagcca

SEQ ID NO: 2097753 - RNA, 16 nt, Human
agccaagcagccaagc

SEQ ID NO: 2097754 - RNA, 15 nt, Human
agccaagcuccuugg

SEQ ID NO: 2097755 - RNA, 17 nt, Human
agccaagcuccuuggga

SEQ ID NO: 2097756 - RNA, 23 nt, Human
agccaagcuccuugggaggcccc

SEQ ID NO: 2097757 - RNA, 11 nt, Human
agccagcagcc

SEQ ID NO: 2097758 - RNA, 15 nt, Human
agccaaagagaaugc

SEQ ID NO: 2097759 - RNA, 13 nt, Human
agccagcagccag

SEQ ID NO: 2097760 - RNA, 22 nt, Human
agcccacguucucucugccugu

SEQ ID NO: 2097761 - RNA, 14 nt, Human
agcccaccuuggcu

SEQ ID NO: 2097762 - RNA, 16 nt, Human
agcccaccuuggcuca

SEQ ID NO: 2097763 - RNA, 15 nt, Human
agcccaccccucaac

SEQ ID NO: 2097764 - RNA, 13 nt, Human
agcccaccccccu

SEQ ID NO: 2097765 - RNA, 14 nt, Human
agcccaccccccuc

SEQ ID NO: 2097766 - RNA, 16 nt, Human
agcccaccccccucau

SEQ ID NO: 2097767 - RNA, 19 nt, Human
agcccacagguguccccag

SEQ ID NO: 2097768 - RNA, 22 nt, Human
agcccacagguguccccagccc

SEQ ID NO: 2097769 - RNA, 16 nt, Human
agcccaauaaaccucu

SEQ ID NO: 2097770 - RNA, 14 nt, Human
agccagcagccagc

SEQ ID NO: 2097771 - RNA, 16 nt, Human
agccagcagccagcuc

SEQ ID NO: 2097772 - RNA, 20 nt, Human
agcccaauauuauaauuuuu

SEQ ID NO: 2097773 - RNA, 16 nt, Human
agcccaauauuauaau

SEQ ID NO: 2097774 - RNA, 15 nt, Human
agcccaauauuauaa

SEQ ID NO: 2097775 - RNA, 20 nt, Human
agccagcagccagcucucag

SEQ ID NO: 2097776 - RNA, 20 nt, Human
agcacuuacagauaggccuu

SEQ ID NO: 2097777 - RNA, 13 nt, Human
agcauccuggcac

SEQ ID NO: 2097778 - RNA, 20 nt, Human
agccccaacccaaaccugga

SEQ ID NO: 2097779 - RNA, 21 nt, Human
agccccaacccaaaccuggag

SEQ ID NO: 2097780 - RNA, 22 nt, Human
agccccaacccaaaccuggaga

SEQ ID NO: 2097781 - RNA, 23 nt, Human
agccccaacccaaaccuggagau

SEQ ID NO: 2097782 - RNA, 16 nt, Human
agccccaagaaggcug

SEQ ID NO: 2097783 - RNA, 17 nt, Human
agccccaagaaggcugg

SEQ ID NO: 2097784 - RNA, 18 nt, Human
agccccaagaaggcuggg

SEQ ID NO: 2097785 - RNA, 15 nt, Human
agccccacacggagg

SEQ ID NO: 2097786 - RNA, 15 nt, Human
agccccauccugccg

SEQ ID NO: 2097787 - RNA, 18 nt, Human
agccccauccugccgccc

SEQ ID NO: 2097788 - RNA, 13 nt, Human
agcccucccugcc

SEQ ID NO: 2097789 - RNA, 12 nt, Human
agcccucccugc

SEQ ID NO: 2097790 - RNA, 19 nt, Human
agccccauucugccugccc

SEQ ID NO: 2097791 - RNA, 18 nt, Human
agccccauucugccugcc

SEQ ID NO: 2097792 - RNA, 17 nt, Human
agccccauucugccugc

SEQ ID NO: 2097793 - RNA, 20 nt, Human
agccccacccaggagggagg

SEQ ID NO: 2097794 - RNA, 12 nt, Human
agccccacccag

SEQ ID NO: 2097795 - RNA, 13 nt, Human
agccccacccagg

SEQ ID NO: 2097796 - RNA, 15 nt, Human
agccccacccaggag

SEQ ID NO: 2097797 - RNA, 16 nt, Human
agccccacccaggagg

SEQ ID NO: 2097798 - RNA, 22 nt, Human
aggcuggucucaaacuccugac

SEQ ID NO: 2097799 - RNA, 17 nt, Human
aggcugaggcagaagaa

SEQ ID NO: 2097800 - RNA, 21 nt, Human
aggcuguaucccaugagccuc

SEQ ID NO: 2097801 - RNA, 20 nt, Human
aggcuguaucccaugagccu

SEQ ID NO: 2097802 - RNA, 22 nt, Human
aggcuguaucccaugagccuca

SEQ ID NO: 2097803 - RNA, 14 nt, Human
agggaccagccaag

SEQ ID NO: 2097804 - RNA, 15 nt, Human
agggaccagccaaga

SEQ ID NO: 2097805 - RNA, 20 nt, Human
agggaccagccaagagggcu

SEQ ID NO: 2097806 - RNA, 15 nt, Human
agggaccccugcccu

SEQ ID NO: 2097807 - RNA, 23 nt, Human
agggaccccugcccuugucccac

SEQ ID NO: 2097808 - RNA, 23 nt, Human
agggacugccagucccccugccc

SEQ ID NO: 2097809 - RNA, 19 nt, Human
aggcugaccaagagagaaa

SEQ ID NO: 2097810 - RNA, 20 nt, Human
aggcugaccaagagagaaag

SEQ ID NO: 2097811 - RNA, 22 nt, Human
aggcugaccaagagagaaagaa

SEQ ID NO: 2097812 - RNA, 16 nt, Human
aggcuaccuuauugua

SEQ ID NO: 2097813 - RNA, 17 nt, Human
aggcugaggcaggagga

SEQ ID NO: 2097814 - RNA, 11 nt, Human
aggcugaggcg

SEQ ID NO: 2097815 - RNA, 21 nt, Human
aggcugaggcggguggaucac

SEQ ID NO: 2097816 - RNA, 22 nt, Human
aggcugaccuugaacuccuggg

SEQ ID NO: 2097817 - RNA, 15 nt, Human
aggcugaggcagaag

SEQ ID NO: 2097818 - RNA, 17 nt, Human
aggcugagacugcggga

SEQ ID NO: 2097819 - RNA, 16 nt, Human
aggcugagacugcggg

SEQ ID NO: 2097820 - RNA, 14 nt, Human
aggcugaggcagga

SEQ ID NO: 2097821 - RNA, 15 nt, Human
aggcugaggcaggag

SEQ ID NO: 2097822 - RNA, 18 nt, Human
aggcugaggcaggagaau

SEQ ID NO: 2097823 - RNA, 19 nt, Human
aggcugaggcaggagaaug

SEQ ID NO: 2097824 - RNA, 14 nt, Human
aggcuaagcugccg

SEQ ID NO: 2097825 - RNA, 19 nt, Human
aggcuaaggcaggaaaauu

SEQ ID NO: 2097826 - RNA, 14 nt, Human
aggcgggaaggagg

SEQ ID NO: 2097827 - RNA, 15 nt, Human
aggcgggaaggaggg

SEQ ID NO: 2097828 - RNA, 21 nt, Human
aggcggccuuuguugcucagc

SEQ ID NO: 2097829 - RNA, 14 nt, Human
aggccaggugcagu

SEQ ID NO: 2097830 - RNA, 15 nt, Human
aggccauggcagaau

SEQ ID NO: 2097831 - RNA, 19 nt, Human
aggccaugauucgcccaaa

SEQ ID NO: 2097832 - RNA, 21 nt, Human
aggccaugauucgcccaaagc

SEQ ID NO: 2097833 - RNA, 14 nt, Human
aggccagcuggcag

SEQ ID NO: 2097834 - RNA, 15 nt, Human
aggccagcuggcagc

SEQ ID NO: 2097835 - RNA, 16 nt, Human
aggccagcuggcagca

SEQ ID NO: 2097836 - RNA, 16 nt, Human
aggccagcugugguuu

SEQ ID NO: 2097837 - RNA, 20 nt, Human
aggccagcugugguuuucuu

SEQ ID NO: 2097838 - RNA, 21 nt, Human
aggccagcugugguuuucuuu

SEQ ID NO: 2097839 - RNA, 23 nt, Human
aggccagcugugguuuucuuuug

SEQ ID NO: 2097840 - RNA, 17 nt, Human
aggccagcuggcagcag

SEQ ID NO: 2097841 - RNA, 18 nt, Human
aggccagcuggcagcaga

SEQ ID NO: 2097842 - RNA, 19 nt, Human
aggccagcuggcagcagag

SEQ ID NO: 2097843 - RNA, 20 nt, Human
aggccagcuggcagcagagu

SEQ ID NO: 2097844 - RNA, 11 nt, Human
aggccaggagu

SEQ ID NO: 2097845 - RNA, 21 nt, Human
aggccaggaguuugagaccag

SEQ ID NO: 2097846 - RNA, 12 nt, Human
aggccauggcuc

SEQ ID NO: 2097847 - RNA, 22 nt, Human
aggcccuuccucuccacugccu

SEQ ID NO: 2097848 - RNA, 19 nt, Human
aggcccuuccucuccacug

SEQ ID NO: 2097849 - RNA, 14 nt, Human
aggccgccccagcc

SEQ ID NO: 2097850 - RNA, 19 nt, Human
aggccgccccagccucuga

SEQ ID NO: 2097851 - RNA, 18 nt, Human
aggccgccccagccucug

SEQ ID NO: 2097852 - RNA, 20 nt, Human
aggccgcuguucacccacag

SEQ ID NO: 2097853 - RNA, 17 nt, Human
aggccgcuguucaccca

SEQ ID NO: 2097854 - RNA, 19 nt, Human
aggcauguucucugaggac

SEQ ID NO: 2097855 - RNA, 18 nt, Human
aggcauguucucugagga

SEQ ID NO: 2097856 - RNA, 17 nt, Human
aggcauguucucugagg

SEQ ID NO: 2097857 - RNA, 17 nt, Human
aggcagauugaaaagga

SEQ ID NO: 2097858 - RNA, 16 nt, Human
aggcagauugaaaagg

SEQ ID NO: 2097859 - RNA, 16 nt, Human
aggcagauucaauuuu

SEQ ID NO: 2097860 - RNA, 15 nt, Human
aggcagauugaaaag

SEQ ID NO: 2097861 - RNA, 22 nt, Human
aggcagaucugugccccaugcc

SEQ ID NO: 2097862 - RNA, 23 nt, Human
aggcagaucugugccccaugccu

SEQ ID NO: 2097863 - RNA, 12 nt, Human
aggcagcauuua

SEQ ID NO: 2097864 - RNA, 15 nt, Human
aggcaugguggccca

SEQ ID NO: 2097865 - RNA, 22 nt, Human
aggcagagaaucauacuuagca

SEQ ID NO: 2097866 - RNA, 14 nt, Human
aggcagagaaucau

SEQ ID NO: 2097867 - RNA, 15 nt, Human
aggcagaucugugcc

SEQ ID NO: 2097868 - RNA, 16 nt, Human
aggcagaucugugccc

SEQ ID NO: 2097869 - RNA, 20 nt, Human
aggcagaucugugccccaug

SEQ ID NO: 2097870 - RNA, 21 nt, Human
aggcagaucugugccccaugc

SEQ ID NO: 2097871 - RNA, 22 nt, Human
aggcagacuucccugaauguau

SEQ ID NO: 2097872 - RNA, 19 nt, Human
aggcacucauggguaauaa

SEQ ID NO: 2097873 - RNA, 17 nt, Human
aggcacgaacccaccug

SEQ ID NO: 2097874 - RNA, 18 nt, Human
aggcacgaacccaccugc

SEQ ID NO: 2097875 - RNA, 19 nt, Human
aggcacgaacccaccugcu

SEQ ID NO: 2097876 - RNA, 20 nt, Human
aggcacgaacccaccugcug

SEQ ID NO: 2097877 - RNA, 21 nt, Human
aggcacgaacccaccugcuga

SEQ ID NO: 2097878 - RNA, 16 nt, Human
aggagagggaaaaugu

SEQ ID NO: 2097879 - RNA, 17 nt, Human
aggagagggaaaauguu

SEQ ID NO: 2097880 - RNA, 18 nt, Human
aggagagggaaaauguuu

SEQ ID NO: 2097881 - RNA, 19 nt, Human
aggagagggaaaauguuuu

SEQ ID NO: 2097882 - RNA, 14 nt, Human
aggcacgaacccac

SEQ ID NO: 2097883 - RNA, 20 nt, Human
agggucaacaucuuuuacau

SEQ ID NO: 2097884 - RNA, 12 nt, Human
aggggccuggca

SEQ ID NO: 2097885 - RNA, 13 nt, Human
aggggccuggcag

SEQ ID NO: 2097886 - RNA, 13 nt, Human
aggguauuccaga

SEQ ID NO: 2097887 - RNA, 22 nt, Human
aggguccugcuauuucccaagc

SEQ ID NO: 2097888 - RNA, 14 nt, Human
aggguccuggcucc

SEQ ID NO: 2097889 - RNA, 16 nt, Human
aggguccuggcuccug

SEQ ID NO: 2097890 - RNA, 22 nt, Human
aggggcccaaauucuuucagug

SEQ ID NO: 2097891 - RNA, 16 nt, Human
aggggcaucugccccu

SEQ ID NO: 2097892 - RNA, 20 nt, Human
aggggcagucuggaggggca

SEQ ID NO: 2097893 - RNA, 15 nt, Human
aggggcaucugcccc

SEQ ID NO: 2097894 - RNA, 17 nt, Human
aggggcagucuggaggg

SEQ ID NO: 2097895 - RNA, 18 nt, Human
aggggcagucuggagggg

SEQ ID NO: 2097896 - RNA, 14 nt, Human
aggggcaucugccc

SEQ ID NO: 2097897 - RNA, 15 nt, Human
aggggcagucuggag

SEQ ID NO: 2097898 - RNA, 16 nt, Human
aggggcagucuggagg

SEQ ID NO: 2097899 - RNA, 21 nt, Human
aggggcccgagcagaagcagg

SEQ ID NO: 2097900 - RNA, 21 nt, Human
agggccuggucccugggagga

SEQ ID NO: 2097901 - RNA, 17 nt, Human
agggccuggucccuggg

SEQ ID NO: 2097902 - RNA, 16 nt, Human
agggccuuaaaagcca

SEQ ID NO: 2097903 - RNA, 17 nt, Human
agggccuuaaaagccau

SEQ ID NO: 2097904 - RNA, 18 nt, Human
agggccuuaaaagccauc

SEQ ID NO: 2097905 - RNA, 23 nt, Human
agggccuuaaaagccaucaugua

SEQ ID NO: 2097906 - RNA, 12 nt, Human
agggccuugccc

SEQ ID NO: 2097907 - RNA, 14 nt, Human
agggccuugcccag

SEQ ID NO: 2097908 - RNA, 15 nt, Human
agggccuugcccaga

SEQ ID NO: 2097909 - RNA, 16 nt, Human
agggccuugcccagag

SEQ ID NO: 2097910 - RNA, 17 nt, Human
agggccuugcccagaga

SEQ ID NO: 2097911 - RNA, 23 nt, Human
agggcgaggggaggguggcaggu

SEQ ID NO: 2097912 - RNA, 19 nt, Human
agggcgagacucugucuca

SEQ ID NO: 2097913 - RNA, 13 nt, Human
agggcgaggggag

SEQ ID NO: 2097914 - RNA, 12 nt, Human
aggggcaggagc

SEQ ID NO: 2097915 - RNA, 14 nt, Human
aggggcaggagcuc

SEQ ID NO: 2097916 - RNA, 17 nt, Human
aggggcaggagcucaga

SEQ ID NO: 2097917 - RNA, 19 nt, Human
aggggcaggagcucagaug

SEQ ID NO: 2097918 - RNA, 20 nt, Human
aggggcaggagcucagauga

SEQ ID NO: 2097919 - RNA, 18 nt, Human
agggccuugcccagagau

SEQ ID NO: 2097920 - RNA, 19 nt, Human
agggccuugcccagagaug

SEQ ID NO: 2097921 - RNA, 12 nt, Human
agggccuugcua

SEQ ID NO: 2097922 - RNA, 23 nt, Human
agggccuugcccagagaugccuc

SEQ ID NO: 2097923 - RNA, 20 nt, Human
agggcgaacgacaauagcuu

SEQ ID NO: 2097924 - RNA, 18 nt, Human
agggaucagcccugcccu

SEQ ID NO: 2097925 - RNA, 18 nt, Human
agggauguucuggcccuc

SEQ ID NO: 2097926 - RNA, 13 nt, Human
agggaucacaggg

SEQ ID NO: 2097927 - RNA, 14 nt, Human
agggaucacagggc

SEQ ID NO: 2097928 - RNA, 15 nt, Human
agggaucacagggcc

SEQ ID NO: 2097929 - RNA, 17 nt, Human
agggaucacagggcccc

SEQ ID NO: 2097930 - RNA, 22 nt, Human
agggaucacagggccccagaag

SEQ ID NO: 2097931 - RNA, 22 nt, Human
agggauuuucagcccucagaau

SEQ ID NO: 2097932 - RNA, 17 nt, Human
agggauuuucagcccuc

SEQ ID NO: 2097933 - RNA, 17 nt, Human
agggauagcacugagca

SEQ ID NO: 2097934 - RNA, 19 nt, Human
agggauagucaccuuuuaa

SEQ ID NO: 2097935 - RNA, 20 nt, Human
agggauagucaccuuuuaaa

SEQ ID NO: 2097936 - RNA, 21 nt, Human
agggauagucaccuuuuaaau

SEQ ID NO: 2097937 - RNA, 22 nt, Human
agggauagucaccuuuuaaauc

SEQ ID NO: 2097938 - RNA, 13 nt, Human
agggauagagggg

SEQ ID NO: 2097939 - RNA, 16 nt, Human
agggauagaggggggc

SEQ ID NO: 2097940 - RNA, 22 nt, Human
agggauagcacugagcaaagca

SEQ ID NO: 2097941 - RNA, 13 nt, Human
agggacuuaaaaa

SEQ ID NO: 2097942 - RNA, 17 nt, Human
agggacuuaaaaaacuu

SEQ ID NO: 2097943 - RNA, 12 nt, Human
agggacuuaaaa

SEQ ID NO: 2097944 - RNA, 23 nt, Human
aggguuuugccauguuggccagg

SEQ ID NO: 2097945 - RNA, 15 nt, Human
aggguuuuccacccu

SEQ ID NO: 2097946 - RNA, 18 nt, Human
aggguuuuccacccugga

SEQ ID NO: 2097947 - RNA, 19 nt, Human
aggguuuuccacccuggaa

SEQ ID NO: 2097948 - RNA, 22 nt, Human
aggguuuugccauguuggccag

SEQ ID NO: 2097949 - RNA, 14 nt, Human
aggguuuguggcug

SEQ ID NO: 2097950 - RNA, 14 nt, Human
agguaacaggcaga

SEQ ID NO: 2097951 - RNA, 13 nt, Human
agguaacaggcag

SEQ ID NO: 2097952 - RNA, 16 nt, Human
agguaacaggcagaua

SEQ ID NO: 2097953 - RNA, 13 nt, Human
agguacucuccug

SEQ ID NO: 2097954 - RNA, 14 nt, Human
agguacucuccugg

SEQ ID NO: 2097955 - RNA, 15 nt, Human
agguacuaaauaccu

SEQ ID NO: 2097956 - RNA, 21 nt, Human
aggucuccccaugugccugca

SEQ ID NO: 2097957 - RNA, 13 nt, Human
aggucucccggga

SEQ ID NO: 2097958 - RNA, 16 nt, Human
aggucucccgggaagc

SEQ ID NO: 2097959 - RNA, 23 nt, Human
aggucucccgggaagccacccuc

SEQ ID NO: 2097960 - RNA, 11 nt, Human
aggucuccucu

SEQ ID NO: 2097961 - RNA, 12 nt, Human
aggucuccucuu

SEQ ID NO: 2097962 - RNA, 13 nt, Human
aggucuccucuua

SEQ ID NO: 2097963 - RNA, 14 nt, Human
aggucuccucuuaa

SEQ ID NO: 2097964 - RNA, 15 nt, Human
aggucuccucuuaaa

SEQ ID NO: 2097965 - RNA, 17 nt, Human
aggucuccucuuaaaaa

SEQ ID NO: 2097966 - RNA, 23 nt, Human
aggucuccucuuaaaaaauaaaa

SEQ ID NO: 2097967 - RNA, 16 nt, Human
aggucugggagaggca

SEQ ID NO: 2097968 - RNA, 18 nt, Human
aggucugggagaggcaga

SEQ ID NO: 2097969 - RNA, 19 nt, Human
aggucugggagaggcagag

SEQ ID NO: 2097970 - RNA, 21 nt, Human
aggucugggagaggcagagug

SEQ ID NO: 2097971 - RNA, 22 nt, Human
aggucugggagaggcagagugc

SEQ ID NO: 2097972 - RNA, 22 nt, Human
aggucuaggaacauacuucagc

SEQ ID NO: 2097973 - RNA, 13 nt, Human
aggucgggcucag

SEQ ID NO: 2097974 - RNA, 14 nt, Human
aggucgggcucagc

SEQ ID NO: 2097975 - RNA, 15 nt, Human
aggucgggcucagcu

SEQ ID NO: 2097976 - RNA, 18 nt, Human
aggucgggcucagcucug

SEQ ID NO: 2097977 - RNA, 17 nt, Human
aggguuuuaucucuguc

SEQ ID NO: 2097978 - RNA, 21 nt, Human
agguccucuacuuaaugagau

SEQ ID NO: 2097979 - RNA, 20 nt, Human
agggucucacuauguugccc

SEQ ID NO: 2097980 - RNA, 15 nt, Human
agggucuagggagag

SEQ ID NO: 2097981 - RNA, 16 nt, Human
agggucuagggagaga

SEQ ID NO: 2097982 - RNA, 19 nt, Human
agggucuagggagagaccc

SEQ ID NO: 2097983 - RNA, 23 nt, Human
agggucuagggagagacccuugu

SEQ ID NO: 2097984 - RNA, 16 nt, Human
aggaccuguggccaag

SEQ ID NO: 2097985 - RNA, 15 nt, Human
aggagaggagagggg

SEQ ID NO: 2097986 - RNA, 17 nt, Human
aggagagaaggggagga

SEQ ID NO: 2097987 - RNA, 21 nt, Human
aggagagaaggggaggagggc

SEQ ID NO: 2097988 - RNA, 18 nt, Human
aggagagagaucaugaga

SEQ ID NO: 2097989 - RNA, 20 nt, Human
aggagagagaucaugagaaa

SEQ ID NO: 2097990 - RNA, 20 nt, Human
aggacccggaggggccuggc

SEQ ID NO: 2097991 - RNA, 18 nt, Human
aggacccggaggggccug

SEQ ID NO: 2097992 - RNA, 13 nt, Human
aggaccaggacuc

SEQ ID NO: 2097993 - RNA, 16 nt, Human
aggaccaggacucccu

SEQ ID NO: 2097994 - RNA, 17 nt, Human
aggaccaggacucccuc

SEQ ID NO: 2097995 - RNA, 18 nt, Human
aggaccaggacucccucc

SEQ ID NO: 2097996 - RNA, 19 nt, Human
aggaccaggacucccuccu

SEQ ID NO: 2097997 - RNA, 21 nt, Human
aggaccaggacucccuccuca

SEQ ID NO: 2097998 - RNA, 22 nt, Human
aggacccggaggggccuggcag

SEQ ID NO: 2097999 - RNA, 21 nt, Human
aggacccggaggggccuggca

SEQ ID NO: 2098000 - RNA, 16 nt, Human
aggacccucgcuggcc

SEQ ID NO: 2098001 - RNA, 18 nt, Human
aggacccucgcuggcccc

SEQ ID NO: 2098002 - RNA, 19 nt, Human
aggacccucgcuggccccc

SEQ ID NO: 2098003 - RNA, 12 nt, Human
aggaccaggacu

SEQ ID NO: 2098004 - RNA, 22 nt, Human
aggaauaugacggaagaacaua

SEQ ID NO: 2098005 - RNA, 18 nt, Human
aggaauagcaugucacua

SEQ ID NO: 2098006 - RNA, 20 nt, Human
aggaauaugacggaagaaca

SEQ ID NO: 2098007 - RNA, 15 nt, Human
aggaaucaacagggc

SEQ ID NO: 2098008 - RNA, 17 nt, Human
aggaaucaacagggcag

SEQ ID NO: 2098009 - RNA, 15 nt, Human
aggaaucagacuuca

SEQ ID NO: 2098010 - RNA, 17 nt, Human
agcuguaagaagagacu

SEQ ID NO: 2098011 - RNA, 18 nt, Human
agcuguaagaagagacug

SEQ ID NO: 2098012 - RNA, 22 nt, Human
agcugguuuccucauuccugaa

SEQ ID NO: 2098013 - RNA, 20 nt, Human
agcuuauuuccucauuuuua

SEQ ID NO: 2098014 - RNA, 12 nt, Human
agcuuauuuaau

SEQ ID NO: 2098015 - RNA, 16 nt, Human
agcuucaagucugugc

SEQ ID NO: 2098016 - RNA, 17 nt, Human
agcuucaagucugugcc

SEQ ID NO: 2098017 - RNA, 19 nt, Human
agcuucaagucugugccug

SEQ ID NO: 2098018 - RNA, 21 nt, Human
agcuucaagucugugccugga

SEQ ID NO: 2098019 - RNA, 24 nt, Human
agcuucaagucugugccuggagcu

SEQ ID NO: 2098020 - RNA, 18 nt, Human
agcuucauuuccuguguc

SEQ ID NO: 2098021 - RNA, 15 nt, Human
agcuucaugccuuug

SEQ ID NO: 2098022 - RNA, 17 nt, Human
agcuucaugccuuugua

SEQ ID NO: 2098023 - RNA, 18 nt, Human
agcuucaugccuuuguaa

SEQ ID NO: 2098024 - RNA, 20 nt, Human
agcuucaugccuuuguaagu

SEQ ID NO: 2098025 - RNA, 21 nt, Human
agcuucaugccuuuguaaguu

SEQ ID NO: 2098026 - RNA, 22 nt, Human
agcuucaugccuuuguaaguua

SEQ ID NO: 2098027 - RNA, 12 nt, Human
agcuucuccaac

SEQ ID NO: 2098028 - RNA, 19 nt, Human
agcuucauuuccugugucu

SEQ ID NO: 2098029 - RNA, 13 nt, Human
agcuucucuguga

SEQ ID NO: 2098030 - RNA, 14 nt, Human
agcuucucugugaa

SEQ ID NO: 2098031 - RNA, 14 nt, Human
agcuucucuuuaac

SEQ ID NO: 2098032 - RNA, 16 nt, Human
agcuucucuuuaacuc

SEQ ID NO: 2098033 - RNA, 18 nt, Human
agcuucucuuuaacucag

SEQ ID NO: 2098034 - RNA, 19 nt, Human
agcuucucuuuaacucagg

SEQ ID NO: 2098035 - RNA, 22 nt, Human
agcuucucuuuaacucaggacu

SEQ ID NO: 2098036 - RNA, 23 nt, Human
agcuucucuuuaacucaggacuc

SEQ ID NO: 2098037 - RNA, 15 nt, Human
agcuucugaccucag

SEQ ID NO: 2098038 - RNA, 16 nt, Human
agcuucugaccucagc

SEQ ID NO: 2098039 - RNA, 17 nt, Human
agcuucugaccucagca

SEQ ID NO: 2098040 - RNA, 18 nt, Human
agcuucugaccucagcau

SEQ ID NO: 2098041 - RNA, 16 nt, Human
agcuuuuaaacccuau

SEQ ID NO: 2098042 - RNA, 23 nt, Human
agcuuuguuuguugucagcugaa

SEQ ID NO: 2098043 - RNA, 18 nt, Human
agcuucugaggcgcugcu

SEQ ID NO: 2098044 - RNA, 17 nt, Human
agcuucugccacauaaa

SEQ ID NO: 2098045 - RNA, 12 nt, Human
aggaaggggcug

SEQ ID NO: 2098046 - RNA, 14 nt, Human
aggaaggggcugga

SEQ ID NO: 2098047 - RNA, 16 nt, Human
aggaaggggcuggacu

SEQ ID NO: 2098048 - RNA, 17 nt, Human
aggaaggggcuggacug

SEQ ID NO: 2098049 - RNA, 23 nt, Human
aggaaggggcuggacuggcuguc

SEQ ID NO: 2098050 - RNA, 19 nt, Human
aggaagggggguugcagug

SEQ ID NO: 2098051 - RNA, 17 nt, Human
aggaagucuaggagcug

SEQ ID NO: 2098052 - RNA, 18 nt, Human
aggaagucuaggagcugg

SEQ ID NO: 2098053 - RNA, 17 nt, Human
aggaagugaaaauaggu

SEQ ID NO: 2098054 - RNA, 12 nt, Human
aggaagggcaaa

SEQ ID NO: 2098055 - RNA, 17 nt, Human
aggaagggcaggaagga

SEQ ID NO: 2098056 - RNA, 22 nt, Human
aggaaggcugagaggagagaga

SEQ ID NO: 2098057 - RNA, 15 nt, Human
aggaaggcugagagg

SEQ ID NO: 2098058 - RNA, 16 nt, Human
aggaaguguaacagcu

SEQ ID NO: 2098059 - RNA, 18 nt, Human
aggaaguguaacagcuga

SEQ ID NO: 2098060 - RNA, 17 nt, Human
aggaaguguaacagcug

SEQ ID NO: 2098061 - RNA, 19 nt, Human
aggaauaaauugcuccuug

SEQ ID NO: 2098062 - RNA, 13 nt, Human
aggaauaaauaaa

SEQ ID NO: 2098063 - RNA, 19 nt, Human
aggaauaaauaaaaaugga

SEQ ID NO: 2098064 - RNA, 20 nt, Human
aggaauaaauugcuccuuga

SEQ ID NO: 2098065 - RNA, 14 nt, Human
aggaauaaggccuu

SEQ ID NO: 2098066 - RNA, 21 nt, Human
aggaauaaauaaaaauggaua

SEQ ID NO: 2098067 - RNA, 13 nt, Human
aggaaccuggacc

SEQ ID NO: 2098068 - RNA, 19 nt, Human
aggaaccuccuccacacca

SEQ ID NO: 2098069 - RNA, 18 nt, Human
aggaacugggccuguugc

SEQ ID NO: 2098070 - RNA, 17 nt, Human
agcuuuuaguacccacc

SEQ ID NO: 2098071 - RNA, 18 nt, Human
agcuuuuaguacccaccu

SEQ ID NO: 2098072 - RNA, 19 nt, Human
agcuuuuaguacccaccug

SEQ ID NO: 2098073 - RNA, 23 nt, Human
agcuuuuaguacccaccugagcu

SEQ ID NO: 2098074 - RNA, 14 nt, Human
agccuggcuucugg

SEQ ID NO: 2098075 - RNA, 19 nt, Human
agcccucccugccccuccc

SEQ ID NO: 2098076 - RNA, 17 nt, Human
agcccucccugccccuc

SEQ ID NO: 2098077 - RNA, 16 nt, Human
agcccucccugccccu

SEQ ID NO: 2098078 - RNA, 15 nt, Human
agcccucccugcccc

SEQ ID NO: 2098079 - RNA, 23 nt, Human
agcccucccugccccucccuuca

SEQ ID NO: 2098080 - RNA, 22 nt, Human
agcccucccugccccucccuuc

SEQ ID NO: 2098081 - RNA, 14 nt, Human
agcccucccugucc

SEQ ID NO: 2098082 - RNA, 12 nt, Human
agccugggaggu

SEQ ID NO: 2098083 - RNA, 19 nt, Human
agccugggcagccaggcug

SEQ ID NO: 2098084 - RNA, 20 nt, Human
agccugggcagccaggcugc

SEQ ID NO: 2098085 - RNA, 21 nt, Human
agccuggcuucuggagcccuu

SEQ ID NO: 2098086 - RNA, 23 nt, Human
agccuggcuucuggagcccuugg

SEQ ID NO: 2098087 - RNA, 15 nt, Human
agccuggcuucugga

SEQ ID NO: 2098088 - RNA, 18 nt, Human
agccuggcuucuggagcc

SEQ ID NO: 2098089 - RNA, 19 nt, Human
agccuggcuucuggagccc

SEQ ID NO: 2098090 - RNA, 20 nt, Human
agccuggcuucuggagcccu

SEQ ID NO: 2098091 - RNA, 15 nt, Human
agccugggcgacaga

SEQ ID NO: 2098092 - RNA, 21 nt, Human
agccugggcagccaggcugcc

SEQ ID NO: 2098093 - RNA, 14 nt, Human
agccugggcgacag

SEQ ID NO: 2098094 - RNA, 18 nt, Human
agcgaggucaacagagaa

SEQ ID NO: 2098095 - RNA, 17 nt, Human
agcgaggcucuaaccac

SEQ ID NO: 2098096 - RNA, 24 nt, Human
agcgaggcugagccuacagaugaa

SEQ ID NO: 2098097 - RNA, 23 nt, Human
agcgaggucaacagagaaggcag

SEQ ID NO: 2098098 - RNA, 19 nt, Human
agcgaggucaacagagaag

SEQ ID NO: 2098099 - RNA, 22 nt, Human
agcgaggucaacagagaaggca

SEQ ID NO: 2098100 - RNA, 14 nt, Human
agcgaguuguggaa

SEQ ID NO: 2098101 - RNA, 21 nt, Human
agcgaguuguggaaagccucu

SEQ ID NO: 2098102 - RNA, 19 nt, Human
agcgaugaauuuggagacu

SEQ ID NO: 2098103 - RNA, 18 nt, Human
agcgaugaauuuggagac

SEQ ID NO: 2098104 - RNA, 19 nt, Human
agcgagcccugguggcagu

SEQ ID NO: 2098105 - RNA, 13 nt, Human
agcgagcccuggu

SEQ ID NO: 2098106 - RNA, 16 nt, Human
agcgagagucugucuc

SEQ ID NO: 2098107 - RNA, 16 nt, Human
agcuaaucagcauucu

SEQ ID NO: 2098108 - RNA, 16 nt, Human
agcuaauaauucuuca

SEQ ID NO: 2098109 - RNA, 22 nt, Human
agcuaauaauucuucaccuaag

SEQ ID NO: 2098110 - RNA, 21 nt, Human
agcuaaucagcauucucacuc

SEQ ID NO: 2098111 - RNA, 21 nt, Human
agcuaauaaaauaucauucag

SEQ ID NO: 2098112 - RNA, 23 nt, Human
agcuaauaaaauaucauucagca

SEQ ID NO: 2098113 - RNA, 17 nt, Human
agcuaauaaaauaucau

SEQ ID NO: 2098114 - RNA, 18 nt, Human
agcuaauaaaauaucauu

SEQ ID NO: 2098115 - RNA, 19 nt, Human
agcuaauaaaauaucauuc

SEQ ID NO: 2098116 - RNA, 20 nt, Human
agcuaauaaaauaucauuca

SEQ ID NO: 2098117 - RNA, 14 nt, Human
agcuaauaaaauau

SEQ ID NO: 2098118 - RNA, 15 nt, Human
agcuaauaaaauauc

SEQ ID NO: 2098119 - RNA, 16 nt, Human
agcuaauaaaauauca

SEQ ID NO: 2098120 - RNA, 22 nt, Human
agcguuugcccaaaucugccua

SEQ ID NO: 2098121 - RNA, 19 nt, Human
agcguuggaauuaaaacaa

SEQ ID NO: 2098122 - RNA, 20 nt, Human
agcguuggaauuaaaacaau

SEQ ID NO: 2098123 - RNA, 16 nt, Human
agcucaccagccccag

SEQ ID NO: 2098124 - RNA, 23 nt, Human
agcucaagucuucccugaucaag

SEQ ID NO: 2098125 - RNA, 18 nt, Human
agcucaagucuucccuga

SEQ ID NO: 2098126 - RNA, 12 nt, Human
agcuaauuauuu

SEQ ID NO: 2098127 - RNA, 15 nt, Human
agcuaauuauuuuaa

SEQ ID NO: 2098128 - RNA, 16 nt, Human
agcuaauuauuuuaau

SEQ ID NO: 2098129 - RNA, 18 nt, Human
agcuaauuauuuuaauua

SEQ ID NO: 2098130 - RNA, 21 nt, Human
agcuaauuauuuuaauuaggu

SEQ ID NO: 2098131 - RNA, 13 nt, Human
agcucaaaggcac

SEQ ID NO: 2098132 - RNA, 15 nt, Human
agcucaaaggcacag

SEQ ID NO: 2098133 - RNA, 16 nt, Human
agcucaaaggcacagu

SEQ ID NO: 2098134 - RNA, 20 nt, Human
agcucaccagccccagugcc

SEQ ID NO: 2098135 - RNA, 19 nt, Human
agcucaccagccccagugc

SEQ ID NO: 2098136 - RNA, 13 nt, Human
agcucacgucaca

SEQ ID NO: 2098137 - RNA, 16 nt, Human
agcucacgucacacuu

SEQ ID NO: 2098138 - RNA, 15 nt, Human
agcucagacccccac

SEQ ID NO: 2098139 - RNA, 16 nt, Human
agcucagacccccacu

SEQ ID NO: 2098140 - RNA, 17 nt, Human
agcucagacccccacuc

SEQ ID NO: 2098141 - RNA, 18 nt, Human
agcucagacccccacucu

SEQ ID NO: 2098142 - RNA, 20 nt, Human
agcucagacccccacucuca

SEQ ID NO: 2098143 - RNA, 24 nt, Human
agcugaacaguguuggcuuucaug

SEQ ID NO: 2098144 - RNA, 15 nt, Human
agcugaaccugggua

SEQ ID NO: 2098145 - RNA, 23 nt, Human
agcugaagagugaggauaugagu

SEQ ID NO: 2098146 - RNA, 15 nt, Human
agcugaauacauucu

SEQ ID NO: 2098147 - RNA, 18 nt, Human
agcugaauacauucugcu

SEQ ID NO: 2098148 - RNA, 14 nt, Human
agcugaagccgcca

SEQ ID NO: 2098149 - RNA, 19 nt, Human
agcugaagccgccaggacc

SEQ ID NO: 2098150 - RNA, 17 nt, Human
agcugaggcaauucuaa

SEQ ID NO: 2098151 - RNA, 18 nt, Human
agcugcgguccacccagg

SEQ ID NO: 2098152 - RNA, 17 nt, Human
agcugcgguccacccag

SEQ ID NO: 2098153 - RNA, 16 nt, Human
agcugcgguccaccca

SEQ ID NO: 2098154 - RNA, 13 nt, Human
agcugcgguccac

SEQ ID NO: 2098155 - RNA, 20 nt, Human
agcugcgguccacccaggag

SEQ ID NO: 2098156 - RNA, 19 nt, Human
agcugcgguccacccagga

SEQ ID NO: 2098157 - RNA, 12 nt, Human
agcugcugacag

SEQ ID NO: 2098158 - RNA, 17 nt, Human
agcuggucccacucagu

SEQ ID NO: 2098159 - RNA, 16 nt, Human
agcuggucccacucag

SEQ ID NO: 2098160 - RNA, 14 nt, Human
agcugcugacagug

SEQ ID NO: 2098161 - RNA, 13 nt, Human
agcugcugacagu

SEQ ID NO: 2098162 - RNA, 19 nt, Human
agcuggucccacucagucc

SEQ ID NO: 2098163 - RNA, 18 nt, Human
agcuggucccacucaguc

SEQ ID NO: 2098164 - RNA, 22 nt, Human
agcugguuuuuagcggagacgg

SEQ ID NO: 2098165 - RNA, 15 nt, Human
agcugguuuccucau

SEQ ID NO: 2098166 - RNA, 21 nt, Human
agcugguuuccucauuccuga

SEQ ID NO: 2098167 - RNA, 16 nt, Human
agcugguugagguuuc

SEQ ID NO: 2098168 - RNA, 22 nt, Human
agcucagcccaccccccucauu

SEQ ID NO: 2098169 - RNA, 13 nt, Human
agcucagccccag

SEQ ID NO: 2098170 - RNA, 15 nt, Human
agcucagccccagcc

SEQ ID NO: 2098171 - RNA, 17 nt, Human
agcucagccccagccca

SEQ ID NO: 2098172 - RNA, 18 nt, Human
agcucagccccagcccag

SEQ ID NO: 2098173 - RNA, 20 nt, Human
agcucagccccagcccagcc

SEQ ID NO: 2098174 - RNA, 16 nt, Human
agcucagcccaccccc

SEQ ID NO: 2098175 - RNA, 19 nt, Human
agcucagcccaccccccuc

SEQ ID NO: 2098176 - RNA, 20 nt, Human
agcucagcccaccccccuca

SEQ ID NO: 2098177 - RNA, 21 nt, Human
agcucagcccaccccccucau

SEQ ID NO: 2098178 - RNA, 11 nt, Human
agcucagccca

SEQ ID NO: 2098179 - RNA, 14 nt, Human
agcucagcccaccc

SEQ ID NO: 2098180 - RNA, 15 nt, Human
agcucagcccacccc

SEQ ID NO: 2098181 - RNA, 18 nt, Human
aaagcccaaagugguaua

SEQ ID NO: 2098182 - RNA, 16 nt, Human
aaagcccaaccuccug

SEQ ID NO: 2098183 - RNA, 17 nt, Human
aaaggcaguggggcugg

SEQ ID NO: 2098184 - RNA, 19 nt, Human
aaaggcaguggggcugggg

SEQ ID NO: 2098185 - RNA, 16 nt, Human
aaaggcauucucugaa

SEQ ID NO: 2098186 - RNA, 18 nt, Human
aaaggcauucucugaaga

SEQ ID NO: 2098187 - RNA, 20 nt, Human
aaaggcucugaaagccagcu

SEQ ID NO: 2098188 - RNA, 20 nt, Human
aaaggcuaugauugucuuug

SEQ ID NO: 2098189 - RNA, 19 nt, Human
aaaggcucagucucaggag

SEQ ID NO: 2098190 - RNA, 21 nt, Human
aaaggcucagucucaggagca

SEQ ID NO: 2098191 - RNA, 15 nt, Human
aaagccaaagcuagg

SEQ ID NO: 2098192 - RNA, 17 nt, Human
aaagccaaacucugcca

SEQ ID NO: 2098193 - RNA, 20 nt, Human
aaagccaaaucaaaauaugu

SEQ ID NO: 2098194 - RNA, 23 nt, Human
aaagccaacagucaaaacagaga

SEQ ID NO: 2098195 - RNA, 16 nt, Human
aaagcauuuacuuuga

SEQ ID NO: 2098196 - RNA, 17 nt, Human
aaagcauuuacuuugaa

SEQ ID NO: 2098197 - RNA, 11 nt, Human
aaauaaauuau

SEQ ID NO: 2098198 - RNA, 16 nt, Human
aaauaaauugaaauau

SEQ ID NO: 2098199 - RNA, 23 nt, Human
aaagugaucaauaaaaugugauu

SEQ ID NO: 2098200 - RNA, 21 nt, Human
aaagugauaauuucuggaauu

SEQ ID NO: 2098201 - RNA, 23 nt, Human
aaagugcagcuccguuuggcagu

SEQ ID NO: 2098202 - RNA, 20 nt, Human
aaagucaaaaggugccugug

SEQ ID NO: 2098203 - RNA, 18 nt, Human
aaagucaaaaggugccug

SEQ ID NO: 2098204 - RNA, 16 nt, Human
aaagucagguccaauu

SEQ ID NO: 2098205 - RNA, 13 nt, Human
aaaggcuguggua

SEQ ID NO: 2098206 - RNA, 19 nt, Human
aaauaaacacauagauuca

SEQ ID NO: 2098207 - RNA, 21 nt, Human
aaauaaacacauagauucacc

SEQ ID NO: 2098208 - RNA, 23 nt, Human
aaauaaacacauagauucaccug

SEQ ID NO: 2098209 - RNA, 15 nt, Human
aaauaaaaccuuuca

SEQ ID NO: 2098210 - RNA, 11 nt, Human
aaauaaaaccu

SEQ ID NO: 2098211 - RNA, 12 nt, Human
aaauaaaaccuu

SEQ ID NO: 2098212 - RNA, 13 nt, Human
aaauaaaaccuuu

SEQ ID NO: 2098213 - RNA, 14 nt, Human
aaauaaaaccuuuc

SEQ ID NO: 2098214 - RNA, 15 nt, Human
aaauaaaaauggaua

SEQ ID NO: 2098215 - RNA, 12 nt, Human
aaauaaaacauu

SEQ ID NO: 2098216 - RNA, 23 nt, Human
aaauaaaaauuauuauugauuuu

SEQ ID NO: 2098217 - RNA, 18 nt, Human
aaauaaaacauuuucaca

SEQ ID NO: 2098218 - RNA, 22 nt, Human
aaauaaaacauuuucacacaau

SEQ ID NO: 2098219 - RNA, 20 nt, Human
aaagaaaccccaaacucagg

SEQ ID NO: 2098220 - RNA, 20 nt, Human
aaagaaacccgacagaggga

SEQ ID NO: 2098221 - RNA, 23 nt, Human
aaagaaacccgacagagggaaga

SEQ ID NO: 2098222 - RNA, 19 nt, Human
aaagaagacaacauuaaaa

SEQ ID NO: 2098223 - RNA, 18 nt, Human
aaagaaaauucuuggaau

SEQ ID NO: 2098224 - RNA, 13 nt, Human
aaagaaaauaugc

SEQ ID NO: 2098225 - RNA, 14 nt, Human
aaagaaaauaugca

SEQ ID NO: 2098226 - RNA, 17 nt, Human
aaagaaaauaugcaucu

SEQ ID NO: 2098227 - RNA, 15 nt, Human
aaagaaaauaugcau

SEQ ID NO: 2098228 - RNA, 17 nt, Human
aaacucuugaccucagg

SEQ ID NO: 2098229 - RNA, 12 nt, Human
aaacccugucuc

SEQ ID NO: 2098230 - RNA, 16 nt, Human
aaacccuugaaaagac

SEQ ID NO: 2098231 - RNA, 15 nt, Human
aaaccguccucuuuu

SEQ ID NO: 2098232 - RNA, 19 nt, Human
aaaccguccuguguacaca

SEQ ID NO: 2098233 - RNA, 17 nt, Human
aaaccccaucucuacaa

SEQ ID NO: 2098234 - RNA, 20 nt, Human
aaaccccaccuuuauuccuu

SEQ ID NO: 2098235 - RNA, 13 nt, Human
aaaccccaucucu

SEQ ID NO: 2098236 - RNA, 20 nt, Human
aaagauaacaagaucuuuca

SEQ ID NO: 2098237 - RNA, 22 nt, Human
aaagauaacaagaucuuucagg

SEQ ID NO: 2098238 - RNA, 19 nt, Human
aaagauaaucucucagcuu

SEQ ID NO: 2098239 - RNA, 15 nt, Human
aaagauacauuugua

SEQ ID NO: 2098240 - RNA, 17 nt, Human
aaacagcuaaugggaca

SEQ ID NO: 2098241 - RNA, 14 nt, Human
aaacagcucaggcu

SEQ ID NO: 2098242 - RNA, 12 nt, Human
aaacaggagaga

SEQ ID NO: 2098243 - RNA, 18 nt, Human
aaacagcuucaugccuuu

SEQ ID NO: 2098244 - RNA, 20 nt, Human
aaacagcuucaugccuuugu

SEQ ID NO: 2098245 - RNA, 21 nt, Human
aaacagcuucaugccuuugua

SEQ ID NO: 2098246 - RNA, 22 nt, Human
aaacagcuucaugccuuuguaa

SEQ ID NO: 2098247 - RNA, 14 nt, Human
aaacaggaaaaaaa

SEQ ID NO: 2098248 - RNA, 15 nt, Human
aaacaggaaaaaaac

SEQ ID NO: 2098249 - RNA, 16 nt, Human
aaacaggaaaaaaacu

SEQ ID NO: 2098250 - RNA, 18 nt, Human
aaacaggaaaaaaacuuu

SEQ ID NO: 2098251 - RNA, 20 nt, Human
aaacaggaaaaaaacuuuua

SEQ ID NO: 2098252 - RNA, 11 nt, Human
aaacaggacca

SEQ ID NO: 2098253 - RNA, 11 nt, Human
aaacaggcagu

SEQ ID NO: 2098254 - RNA, 21 nt, Human
aaacaggcaguuggccagaga

SEQ ID NO: 2098255 - RNA, 12 nt, Human
aaaauuccagaa

SEQ ID NO: 2098256 - RNA, 16 nt, Human
aaaauuccagaaagga

SEQ ID NO: 2098257 - RNA, 20 nt, Human
aaaauuccagaaaggauauu

SEQ ID NO: 2098258 - RNA, 21 nt, Human
aaaauuccaucccaucaucuu

SEQ ID NO: 2098259 - RNA, 20 nt, Human
aaaauucucagucaguaauu

SEQ ID NO: 2098260 - RNA, 13 nt, Human
aaaauucuaaaua

SEQ ID NO: 2098261 - RNA, 20 nt, Human
aaaauucuaaauaaaauaua

SEQ ID NO: 2098262 - RNA, 21 nt, Human
aaacagcgcuggguccacccc

SEQ ID NO: 2098263 - RNA, 18 nt, Human
aaacagcauugcuuucug

SEQ ID NO: 2098264 - RNA, 22 nt, Human
aaacagccgucagccaaaugua

SEQ ID NO: 2098265 - RNA, 23 nt, Human
aaacagccgucagccaaauguaa

SEQ ID NO: 2098266 - RNA, 15 nt, Human
aaacagccucacaga

SEQ ID NO: 2098267 - RNA, 14 nt, Human
aaacagcauugcuu

SEQ ID NO: 2098268 - RNA, 16 nt, Human
aaacagcauugcuuuc

SEQ ID NO: 2098269 - RNA, 17 nt, Human
aaacagcauugcuuucu

SEQ ID NO: 2098270 - RNA, 21 nt, Human
aaacagcauugcuuucugaaa

SEQ ID NO: 2098271 - RNA, 13 nt, Human
aaaauucuuggaa

SEQ ID NO: 2098272 - RNA, 12 nt, Human
aaaauugaauuu

SEQ ID NO: 2098273 - RNA, 13 nt, Human
aaaauugaauuua

SEQ ID NO: 2098274 - RNA, 16 nt, Human
aaaauuauagaaguuu

SEQ ID NO: 2098275 - RNA, 14 nt, Human
aaaauuaucuauuu

SEQ ID NO: 2098276 - RNA, 15 nt, Human
aaaauuaucuauuug

SEQ ID NO: 2098277 - RNA, 17 nt, Human
aaaauuaucuauuugua

SEQ ID NO: 2098278 - RNA, 18 nt, Human
aaaauuaucuauuuguau

SEQ ID NO: 2098279 - RNA, 14 nt, Human
aaaauuauuucaga

SEQ ID NO: 2098280 - RNA, 19 nt, Human
aaaauuauuucagaaaugu

SEQ ID NO: 2098281 - RNA, 19 nt, Human
aaaauuaggauuucaugau

SEQ ID NO: 2098282 - RNA, 18 nt, Human
aaaauuagccgggcgugg

SEQ ID NO: 2098283 - RNA, 20 nt, Human
aaaauuagaaauuggcugga

SEQ ID NO: 2098284 - RNA, 14 nt, Human
aaaauuagaaauug

SEQ ID NO: 2098285 - RNA, 15 nt, Human
aaaauuagccaagug

SEQ ID NO: 2098286 - RNA, 17 nt, Human
aaaauuaaggcaacuga

SEQ ID NO: 2098287 - RNA, 21 nt, Human
aaaauuaaggcaacugaacaa

SEQ ID NO: 2098288 - RNA, 14 nt, Human
aaaauuaacacugc

SEQ ID NO: 2098289 - RNA, 14 nt, Human
aaaauccaugaaca

SEQ ID NO: 2098290 - RNA, 14 nt, Human
aaaauuaagaaugu

SEQ ID NO: 2098291 - RNA, 15 nt, Human
aaaauuaaagaaaau

SEQ ID NO: 2098292 - RNA, 16 nt, Human
aaaauuaaagaaaaua

SEQ ID NO: 2098293 - RNA, 11 nt, Human
aaaauuaaagc

SEQ ID NO: 2098294 - RNA, 11 nt, Human
aaaaucacuaa

SEQ ID NO: 2098295 - RNA, 16 nt, Human
aaaaucacuaacauua

SEQ ID NO: 2098296 - RNA, 21 nt, Human
aaaauaaaaagcgggcacggg

SEQ ID NO: 2098297 - RNA, 16 nt, Human
aaaaguuugccagaag

SEQ ID NO: 2098298 - RNA, 17 nt, Human
aaaaguuugccagaagu

SEQ ID NO: 2098299 - RNA, 11 nt, Human
aaaauaaaaac

SEQ ID NO: 2098300 - RNA, 16 nt, Human
aacgagucaauccccu

SEQ ID NO: 2098301 - RNA, 12 nt, Human
aacgaggaagcc

SEQ ID NO: 2098302 - RNA, 14 nt, Human
aacgacaauagcuu

SEQ ID NO: 2098303 - RNA, 13 nt, Human
aacgaaagcuggg

SEQ ID NO: 2098304 - RNA, 21 nt, Human
aacgaaagcugggcaacaugc

SEQ ID NO: 2098305 - RNA, 15 nt, Human
aacgaaacugcucua

SEQ ID NO: 2098306 - RNA, 12 nt, Human
aacgaaaagcac

SEQ ID NO: 2098307 - RNA, 12 nt, Human
aacgaagaaaaa

SEQ ID NO: 2098308 - RNA, 13 nt, Human
aacgaagaaaaaa

SEQ ID NO: 2098309 - RNA, 14 nt, Human
aacgaagaaaaaaa

SEQ ID NO: 2098310 - RNA, 12 nt, Human
aacgaaguuggg

SEQ ID NO: 2098311 - RNA, 11 nt, Human
aacgaaugaag

SEQ ID NO: 2098312 - RNA, 23 nt, Human
aacgacaaagccaaacucugcca

SEQ ID NO: 2098313 - RNA, 22 nt, Human
aacgguacacagacuauugaca

SEQ ID NO: 2098314 - RNA, 17 nt, Human
aacguaaccacggaaaa

SEQ ID NO: 2098315 - RNA, 17 nt, Human
aacgggcugcccugcca

SEQ ID NO: 2098316 - RNA, 15 nt, Human
aacgggguccuucaa

SEQ ID NO: 2098317 - RNA, 12 nt, Human
aacggggagaaa

SEQ ID NO: 2098318 - RNA, 17 nt, Human
aacgguaaauuucugug

SEQ ID NO: 2098319 - RNA, 13 nt, Human
aacgguuaaaacu

SEQ ID NO: 2098320 - RNA, 14 nt, Human
aacgguuaaaacug

SEQ ID NO: 2098321 - RNA, 21 nt, Human
aacgccugcuugucccugccc

SEQ ID NO: 2098322 - RNA, 17 nt, Human
aacucaaacucuuaaaa

SEQ ID NO: 2098323 - RNA, 14 nt, Human
aacucaaacacaga

SEQ ID NO: 2098324 - RNA, 16 nt, Human
aacucaaacacagaga

SEQ ID NO: 2098325 - RNA, 22 nt, Human
aacucacccccaaggggcaguc

SEQ ID NO: 2098326 - RNA, 17 nt, Human
aacucaccuaauguuua

SEQ ID NO: 2098327 - RNA, 22 nt, Human
aacugaauggaagguuuguaua

SEQ ID NO: 2098328 - RNA, 13 nt, Human
aacugaaggagaa

SEQ ID NO: 2098329 - RNA, 15 nt, Human
aacugaaggagaagg

SEQ ID NO: 2098330 - RNA, 14 nt, Human
aacucaucauaaaa

SEQ ID NO: 2098331 - RNA, 15 nt, Human
aacucaucauaaaau

SEQ ID NO: 2098332 - RNA, 13 nt, Human
aacugaagccaga

SEQ ID NO: 2098333 - RNA, 16 nt, Human
aacucaucauaaaaua

SEQ ID NO: 2098334 - RNA, 17 nt, Human
aacucaucauaaaauaa

SEQ ID NO: 2098335 - RNA, 18 nt, Human
aacucaucauaaaauaaa

SEQ ID NO: 2098336 - RNA, 22 nt, Human
aacugagcuccucugggcagga

SEQ ID NO: 2098337 - RNA, 14 nt, Human
aacugagcuccucu

SEQ ID NO: 2098338 - RNA, 18 nt, Human
aacugagcuccucugggc

SEQ ID NO: 2098339 - RNA, 18 nt, Human
aacagcucaagucuuccc

SEQ ID NO: 2098340 - RNA, 22 nt, Human
aacagcuaugggagccccaggg

SEQ ID NO: 2098341 - RNA, 16 nt, Human
aacaggaaaaaaacuu

SEQ ID NO: 2098342 - RNA, 17 nt, Human
aacaggaaaaaaacuuu

SEQ ID NO: 2098343 - RNA, 22 nt, Human
aacaggaaaaaaacuuuuauaa

SEQ ID NO: 2098344 - RNA, 11 nt, Human
aacaggaaaag

SEQ ID NO: 2098345 - RNA, 12 nt, Human
aacaggaaaaga

SEQ ID NO: 2098346 - RNA, 14 nt, Human
aacaggaaaagaaa

SEQ ID NO: 2098347 - RNA, 22 nt, Human
aacaggaaaggcucgaaauaca

SEQ ID NO: 2098348 - RNA, 15 nt, Human
aacagcuaccaugac

SEQ ID NO: 2098349 - RNA, 18 nt, Human
aacagcuaugggagcccc

SEQ ID NO: 2098350 - RNA, 19 nt, Human
aacagcuaugggagcccca

SEQ ID NO: 2098351 - RNA, 19 nt, Human
aacaggagcugggauccua

SEQ ID NO: 2098352 - RNA, 21 nt, Human
aacaggagcugggauccuaag

SEQ ID NO: 2098353 - RNA, 20 nt, Human
aacaggaccacaaaaaugaa

SEQ ID NO: 2098354 - RNA, 22 nt, Human
aacauccuaucaacaacaaggu

SEQ ID NO: 2098355 - RNA, 19 nt, Human
aacauccuucaagaacucu

SEQ ID NO: 2098356 - RNA, 19 nt, Human
aacaggauuagacagucaa

SEQ ID NO: 2098357 - RNA, 16 nt, Human
aacaggauuagacagu

SEQ ID NO: 2098358 - RNA, 18 nt, Human
aacagauuuggugaauuu

SEQ ID NO: 2098359 - RNA, 22 nt, Human
aacagauuuggugaauuugaau

SEQ ID NO: 2098360 - RNA, 16 nt, Human
aacagcuaaugggaca

SEQ ID NO: 2098361 - RNA, 13 nt, Human
aacagcgcugggu

SEQ ID NO: 2098362 - RNA, 14 nt, Human
aacacuauauggca

SEQ ID NO: 2098363 - RNA, 18 nt, Human
aacacuauauggcagugu

SEQ ID NO: 2098364 - RNA, 20 nt, Human
aacacuauauggcagugucu

SEQ ID NO: 2098365 - RNA, 21 nt, Human
aacacuauauggcagugucuu

SEQ ID NO: 2098366 - RNA, 15 nt, Human
aacacuauaaagguu

SEQ ID NO: 2098367 - RNA, 22 nt, Human
aaccauaggcugcucugccugu

SEQ ID NO: 2098368 - RNA, 22 nt, Human
aaccauacaaaaauuccuuuuc

SEQ ID NO: 2098369 - RNA, 16 nt, Human
aacccuguuuuauacu

SEQ ID NO: 2098370 - RNA, 23 nt, Human
aacccuguuuuauacuguacuua

SEQ ID NO: 2098371 - RNA, 20 nt, Human
aacccuguuuuauacuguac

SEQ ID NO: 2098372 - RNA, 22 nt, Human
aacccuguuuuauacuguacuu

SEQ ID NO: 2098373 - RNA, 21 nt, Human
aacccuuaccccuuagccucc

SEQ ID NO: 2098374 - RNA, 23 nt, Human
aacccuuaccccuuagccucccu

SEQ ID NO: 2098375 - RNA, 14 nt, Human
aaccaguuauguga

SEQ ID NO: 2098376 - RNA, 18 nt, Human
aaccaguuucagguguuu

SEQ ID NO: 2098377 - RNA, 18 nt, Human
aaccagggaagcuguccc

SEQ ID NO: 2098378 - RNA, 19 nt, Human
aaccagggaagcugucccu

SEQ ID NO: 2098379 - RNA, 21 nt, Human
aaccagggagccccuuugaug

SEQ ID NO: 2098380 - RNA, 17 nt, Human
aaccagggcaccaagcc

SEQ ID NO: 2098381 - RNA, 22 nt, Human
aaccagggcaccaagcccacag

SEQ ID NO: 2098382 - RNA, 16 nt, Human
aaccaguauacaagau

SEQ ID NO: 2098383 - RNA, 17 nt, Human
aaccaguauacaagaua

SEQ ID NO: 2098384 - RNA, 18 nt, Human
aaccaguauacaagauaa

SEQ ID NO: 2098385 - RNA, 19 nt, Human
aaccaguauacaagauaag

SEQ ID NO: 2098386 - RNA, 17 nt, Human
aacaucuagcaaauguu

SEQ ID NO: 2098387 - RNA, 16 nt, Human
aacaucugaaagccac

SEQ ID NO: 2098388 - RNA, 16 nt, Human
aacaugcuucaugaaa

SEQ ID NO: 2098389 - RNA, 22 nt, Human
aacauggaacucauuccugccu

SEQ ID NO: 2098390 - RNA, 17 nt, Human
aacaugcuaccugaucc

SEQ ID NO: 2098391 - RNA, 13 nt, Human
aaccgaugcucca

SEQ ID NO: 2098392 - RNA, 21 nt, Human
aaccgcaggaagcugcuccgu

SEQ ID NO: 2098393 - RNA, 13 nt, Human
aaccgcaggaagc

SEQ ID NO: 2098394 - RNA, 14 nt, Human
aaccgcaggaagcu

SEQ ID NO: 2098395 - RNA, 15 nt, Human
aaccgcaggaagcug

SEQ ID NO: 2098396 - RNA, 15 nt, Human
aaccgaugcuccagc

SEQ ID NO: 2098397 - RNA, 17 nt, Human
aaccgaugcuccagcca

SEQ ID NO: 2098398 - RNA, 21 nt, Human
aaccgaugcuccagccaaccc

SEQ ID NO: 2098399 - RNA, 17 nt, Human
aacacauagauucaccu

SEQ ID NO: 2098400 - RNA, 18 nt, Human
aacacauagauucaccug

SEQ ID NO: 2098401 - RNA, 20 nt, Human
aacacauagauucaccugua

SEQ ID NO: 2098402 - RNA, 22 nt, Human
aacacauagauucaccuguaaa

SEQ ID NO: 2098403 - RNA, 16 nt, Human
aacaccuagaucagaa

SEQ ID NO: 2098404 - RNA, 18 nt, Human
aacaccuagaucagaaca

SEQ ID NO: 2098405 - RNA, 18 nt, Human
aacacccucgaagcgcgc

SEQ ID NO: 2098406 - RNA, 19 nt, Human
aacaccucugcacaagcug

SEQ ID NO: 2098407 - RNA, 17 nt, Human
aacaaaguggaaggaaa

SEQ ID NO: 2098408 - RNA, 18 nt, Human
aacaaaguggaaggaaag

SEQ ID NO: 2098409 - RNA, 19 nt, Human
aacaaaguggaaggaaaga

SEQ ID NO: 2098410 - RNA, 13 nt, Human
aacaaauaugcaa

SEQ ID NO: 2098411 - RNA, 12 nt, Human
aacaaauaugca

SEQ ID NO: 2098412 - RNA, 20 nt, Human
aacaaauuagguuuuguaca

SEQ ID NO: 2098413 - RNA, 19 nt, Human
aacaaauuagguuuuguac

SEQ ID NO: 2098414 - RNA, 12 nt, Human
aacacaguauuu

SEQ ID NO: 2098415 - RNA, 13 nt, Human
aacacaguauuuu

SEQ ID NO: 2098416 - RNA, 14 nt, Human
aacacaguauuuuc

SEQ ID NO: 2098417 - RNA, 21 nt, Human
aacacauacaggaagguagaa

SEQ ID NO: 2098418 - RNA, 21 nt, Human
aacaaauuagguuuuguacaa

SEQ ID NO: 2098419 - RNA, 12 nt, Human
aaauuaaacaau

SEQ ID NO: 2098420 - RNA, 13 nt, Human
aaauuaaacaauu

SEQ ID NO: 2098421 - RNA, 20 nt, Human
aaauuaaccauagauguaga

SEQ ID NO: 2098422 - RNA, 13 nt, Human
aaauugagagaau

SEQ ID NO: 2098423 - RNA, 17 nt, Human
aaauugagagaauggaa

SEQ ID NO: 2098424 - RNA, 21 nt, Human
aacaaacccucguuucugauu

SEQ ID NO: 2098425 - RNA, 23 nt, Human
aaauugagcuggaccucaccaag

SEQ ID NO: 2098426 - RNA, 15 nt, Human
aaauguucuuugggg

SEQ ID NO: 2098427 - RNA, 18 nt, Human
aaaucugcuuuuuaaaga

SEQ ID NO: 2098428 - RNA, 13 nt, Human
aaaucuccuauuu

SEQ ID NO: 2098429 - RNA, 14 nt, Human
aaaucuccuauuuu

SEQ ID NO: 2098430 - RNA, 15 nt, Human
aaaucuccuauuuuu

SEQ ID NO: 2098431 - RNA, 17 nt, Human
aaaucucucucuguugu

SEQ ID NO: 2098432 - RNA, 19 nt, Human
aaaucucucucuguugugu

SEQ ID NO: 2098433 - RNA, 21 nt, Human
aaaucucucucuguuguguuc

SEQ ID NO: 2098434 - RNA, 17 nt, Human
aaaucugaccaaaacaa

SEQ ID NO: 2098435 - RNA, 17 nt, Human
aaaugcugcgcccuucc

SEQ ID NO: 2098436 - RNA, 19 nt, Human
aaauggaauucauucuggu

SEQ ID NO: 2098437 - RNA, 15 nt, Human
aaguucuuaguugcu

SEQ ID NO: 2098438 - RNA, 12 nt, Human
aaguucugugua

SEQ ID NO: 2098439 - RNA, 16 nt, Human
aaguucuguguauuua

SEQ ID NO: 2098440 - RNA, 17 nt, Human
aaguucuguguauuuaa

SEQ ID NO: 2098441 - RNA, 13 nt, Human
aaguucuuagaua

SEQ ID NO: 2098442 - RNA, 14 nt, Human
aaguucuuagauau

SEQ ID NO: 2098443 - RNA, 15 nt, Human
aaguucuuagauauc

SEQ ID NO: 2098444 - RNA, 17 nt, Human
aaguucuuagauaucuu

SEQ ID NO: 2098445 - RNA, 18 nt, Human
aaguucuuagauaucuuu

SEQ ID NO: 2098446 - RNA, 23 nt, Human
aaguucuuagauaucuuuuuauu

SEQ ID NO: 2098447 - RNA, 22 nt, Human
aaguucuuaguugcuguauguc

SEQ ID NO: 2098448 - RNA, 15 nt, Human
aaguggggacagagc

SEQ ID NO: 2098449 - RNA, 16 nt, Human
aagugggccaggacag

SEQ ID NO: 2098450 - RNA, 21 nt, Human
aagugggccaggacaggcccg

SEQ ID NO: 2098451 - RNA, 19 nt, Human
aagugggggcagagggcag

SEQ ID NO: 2098452 - RNA, 12 nt, Human
aaguauacugua

SEQ ID NO: 2098453 - RNA, 18 nt, Human
aaguauacuguauuuuua

SEQ ID NO: 2098454 - RNA, 18 nt, Human
aauaaagccuucaaacuc

SEQ ID NO: 2098455 - RNA, 15 nt, Human
aauaaagccugcuuu

SEQ ID NO: 2098456 - RNA, 19 nt, Human
aauaauaaagaugcucuuu

SEQ ID NO: 2098457 - RNA, 18 nt, Human
aauaauaaagaugcucuu

SEQ ID NO: 2098458 - RNA, 18 nt, Human
aauaaacacauagauuca

SEQ ID NO: 2098459 - RNA, 18 nt, Human
aaguugauggugaugaaa

SEQ ID NO: 2098460 - RNA, 16 nt, Human
aaguugcagugagcug

SEQ ID NO: 2098461 - RNA, 17 nt, Human
aauaauaugcauuguca

SEQ ID NO: 2098462 - RNA, 15 nt, Human
aauaauaugcauugu

SEQ ID NO: 2098463 - RNA, 13 nt, Human
aauaauaugcauu

SEQ ID NO: 2098464 - RNA, 12 nt, Human
aauaauaugcau

SEQ ID NO: 2098465 - RNA, 11 nt, Human
aauaauaugca

SEQ ID NO: 2098466 - RNA, 11 nt, Human
aauaauaaauc

SEQ ID NO: 2098467 - RNA, 13 nt, Human
aauaauaaauugc

SEQ ID NO: 2098468 - RNA, 14 nt, Human
aauaauaaauugca

SEQ ID NO: 2098469 - RNA, 21 nt, Human
aauaauaaauugcaugcugcu

SEQ ID NO: 2098470 - RNA, 11 nt, Human
aauaauaauua

SEQ ID NO: 2098471 - RNA, 21 nt, Human
aauaauaauuauccagaguuu

SEQ ID NO: 2098472 - RNA, 17 nt, Human
aauagaaauggggaacu

SEQ ID NO: 2098473 - RNA, 22 nt, Human
aauagaacauugauugcugugu

SEQ ID NO: 2098474 - RNA, 15 nt, Human
aauagaagaacaucc

SEQ ID NO: 2098475 - RNA, 16 nt, Human
aauagaaauccaauug

SEQ ID NO: 2098476 - RNA, 21 nt, Human
aauagaaacucaccauguaaa

SEQ ID NO: 2098477 - RNA, 13 nt, Human
aauagaaacucac

SEQ ID NO: 2098478 - RNA, 22 nt, Human
aauacuuauauuuuuaauaaaa

SEQ ID NO: 2098479 - RNA, 13 nt, Human
aauacuuauucau

SEQ ID NO: 2098480 - RNA, 17 nt, Human
aauacuuauucauugug

SEQ ID NO: 2098481 - RNA, 23 nt, Human
aauacuuauucauugugguuauu

SEQ ID NO: 2098482 - RNA, 20 nt, Human
aauacgccagaacugcuuua

SEQ ID NO: 2098483 - RNA, 15 nt, Human
aauauagcuauuuuu

SEQ ID NO: 2098484 - RNA, 13 nt, Human
aauauagcuauuu

SEQ ID NO: 2098485 - RNA, 16 nt, Human
aauauaaccaauguuu

SEQ ID NO: 2098486 - RNA, 17 nt, Human
aauauaaccaauguuua

SEQ ID NO: 2098487 - RNA, 18 nt, Human
aauauaaccaauguuuaa

SEQ ID NO: 2098488 - RNA, 21 nt, Human
aauauaaccaauguuuaaaaa

SEQ ID NO: 2098489 - RNA, 13 nt, Human
aauauaacugccu

SEQ ID NO: 2098490 - RNA, 13 nt, Human
aauauaaacacua

SEQ ID NO: 2098491 - RNA, 14 nt, Human
aauauaaacacuau

SEQ ID NO: 2098492 - RNA, 21 nt, Human
aauauaaagauggcugacuuu

SEQ ID NO: 2098493 - RNA, 16 nt, Human
aauauaaagcaucuaa

SEQ ID NO: 2098494 - RNA, 17 nt, Human
aauauaaagcaucuaaa

SEQ ID NO: 2098495 - RNA, 21 nt, Human
aauauaaagcaucuaaacuuu

SEQ ID NO: 2098496 - RNA, 14 nt, Human
aauaugcugccaaa

SEQ ID NO: 2098497 - RNA, 19 nt, Human
aauaugcugccaaauuuug

SEQ ID NO: 2098498 - RNA, 22 nt, Human
aauaugcugccaaauuuuggcc

SEQ ID NO: 2098499 - RNA, 20 nt, Human
aauauagaauuuuuaauguu

SEQ ID NO: 2098500 - RNA, 18 nt, Human
aauccaccugccucggcc

SEQ ID NO: 2098501 - RNA, 19 nt, Human
aauccaccugccucggccu

SEQ ID NO: 2098502 - RNA, 13 nt, Human
aauccacacauca

SEQ ID NO: 2098503 - RNA, 17 nt, Human
aauccaacccaugauga

SEQ ID NO: 2098504 - RNA, 13 nt, Human
aauccagaaagaa

SEQ ID NO: 2098505 - RNA, 17 nt, Human
aauccagaaagaaaaaa

SEQ ID NO: 2098506 - RNA, 22 nt, Human
aauccagaauugaccuuuugac

SEQ ID NO: 2098507 - RNA, 16 nt, Human
aaucauuuuccuuuuu

SEQ ID NO: 2098508 - RNA, 16 nt, Human
aaucuggacuccucug

SEQ ID NO: 2098509 - RNA, 15 nt, Human
aaucuggacuccucu

SEQ ID NO: 2098510 - RNA, 18 nt, Human
aaucuggacuccucuguc

SEQ ID NO: 2098511 - RNA, 17 nt, Human
aaucuggacuccucugu

SEQ ID NO: 2098512 - RNA, 20 nt, Human
aaucuggacuccucugucca

SEQ ID NO: 2098513 - RNA, 12 nt, Human
aaugaaauguuu

SEQ ID NO: 2098514 - RNA, 13 nt, Human
aaugaaauguuuu

SEQ ID NO: 2098515 - RNA, 14 nt, Human
aaugaaauguuuua

SEQ ID NO: 2098516 - RNA, 14 nt, Human
aaucuccuauuuuu

SEQ ID NO: 2098517 - RNA, 21 nt, Human
aaucuccuauuuuuuuaaaau

SEQ ID NO: 2098518 - RNA, 15 nt, Human
aaucuccucuuuuau

SEQ ID NO: 2098519 - RNA, 18 nt, Human
aaucuccucuuuuaucuu

SEQ ID NO: 2098520 - RNA, 15 nt, Human
aauccaugcuugggu

SEQ ID NO: 2098521 - RNA, 17 nt, Human
aauccauguuaguuuuu

SEQ ID NO: 2098522 - RNA, 15 nt, Human
aaugauagcuacugu

SEQ ID NO: 2098523 - RNA, 14 nt, Human
aaugauguugaaua

SEQ ID NO: 2098524 - RNA, 23 nt, Human
aaugaaauuacuacaaaauuuga

SEQ ID NO: 2098525 - RNA, 17 nt, Human
aaugaaauuacuacaaa

SEQ ID NO: 2098526 - RNA, 12 nt, Human
aaugaaauuuua

SEQ ID NO: 2098527 - RNA, 13 nt, Human
aaugaaauuuuac

SEQ ID NO: 2098528 - RNA, 14 nt, Human
aaugaaauuuuacc

SEQ ID NO: 2098529 - RNA, 16 nt, Human
aaugaaauuuuaccaa

SEQ ID NO: 2098530 - RNA, 22 nt, Human
aaugaaauuuuaccaaguuaua

SEQ ID NO: 2098531 - RNA, 18 nt, Human
aaugauacccugaauuug

SEQ ID NO: 2098532 - RNA, 19 nt, Human
aaucaaauuuguaggguuu

SEQ ID NO: 2098533 - RNA, 21 nt, Human
aaucauuucuugggcccuccu

SEQ ID NO: 2098534 - RNA, 22 nt, Human
aaucauuucuugggcccuccug

SEQ ID NO: 2098535 - RNA, 20 nt, Human
aaucauuuuacccuuggcuc

SEQ ID NO: 2098536 - RNA, 16 nt, Human
aaugcccuuaaaucau

SEQ ID NO: 2098537 - RNA, 15 nt, Human
aaugccuaagaagau

SEQ ID NO: 2098538 - RNA, 12 nt, Human
aaugccuccucc

SEQ ID NO: 2098539 - RNA, 14 nt, Human
aaugccuccucccu

SEQ ID NO: 2098540 - RNA, 15 nt, Human
aaugccuccucccug

SEQ ID NO: 2098541 - RNA, 21 nt, Human
aaugcuaaauguaagaaucau

SEQ ID NO: 2098542 - RNA, 20 nt, Human
aaugcuaacaguucacuugc

SEQ ID NO: 2098543 - RNA, 17 nt, Human
aaugcuaagggcaggcc

SEQ ID NO: 2098544 - RNA, 23 nt, Human
aaugcucuuuacuucauggacuu

SEQ ID NO: 2098545 - RNA, 13 nt, Human
aaugcucuccuuu

SEQ ID NO: 2098546 - RNA, 14 nt, Human
aaugcucuccuuuc

SEQ ID NO: 2098547 - RNA, 21 nt, Human
aaugcucccccauccuccccu

SEQ ID NO: 2098548 - RNA, 22 nt, Human
aaugcucccccauccuccccuu

SEQ ID NO: 2098549 - RNA, 11 nt, Human
aaugcuccccc

SEQ ID NO: 2098550 - RNA, 14 nt, Human
aaugcucccccauc

SEQ ID NO: 2098551 - RNA, 20 nt, Human
aaugcucccccauccucccc

SEQ ID NO: 2098552 - RNA, 13 nt, Human
aaugggacacuaa

SEQ ID NO: 2098553 - RNA, 18 nt, Human
aaugggacuggagucccu

SEQ ID NO: 2098554 - RNA, 15 nt, Human
aaugucacaggcagg

SEQ ID NO: 2098555 - RNA, 16 nt, Human
aaugguauggaacucu

SEQ ID NO: 2098556 - RNA, 14 nt, Human
aacuuacuuagugu

SEQ ID NO: 2098557 - RNA, 16 nt, Human
aacuuagcauguguug

SEQ ID NO: 2098558 - RNA, 23 nt, Human
aagacaggacagugcuucagccu

SEQ ID NO: 2098559 - RNA, 22 nt, Human
aagacagcuucucauccugcag

SEQ ID NO: 2098560 - RNA, 17 nt, Human
aacuguugccagagaug

SEQ ID NO: 2098561 - RNA, 18 nt, Human
aacuguugccagagaugg

SEQ ID NO: 2098562 - RNA, 21 nt, Human
aacuguucucuauuagacuuu

SEQ ID NO: 2098563 - RNA, 14 nt, Human
aacuguugauugca

SEQ ID NO: 2098564 - RNA, 15 nt, Human
aacuguugccagaga

SEQ ID NO: 2098565 - RNA, 13 nt, Human
aacuuacacacaa

SEQ ID NO: 2098566 - RNA, 23 nt, Human
aacuuacauugugaaacuucugu

SEQ ID NO: 2098567 - RNA, 19 nt, Human
aagacauggggaggaagga

SEQ ID NO: 2098568 - RNA, 13 nt, Human
aagacauugucaa

SEQ ID NO: 2098569 - RNA, 14 nt, Human
aagacauugucaau

SEQ ID NO: 2098570 - RNA, 18 nt, Human
aagagaagcuacuuuguu

SEQ ID NO: 2098571 - RNA, 21 nt, Human
aagagaacugaugacacugag

SEQ ID NO: 2098572 - RNA, 10 nt, Human
aagagaaugu

SEQ ID NO: 2098573 - RNA, 13 nt, Human
aagagaauguaga

SEQ ID NO: 2098574 - RNA, 13 nt, Human
aagagaauguuau

SEQ ID NO: 2098575 - RNA, 14 nt, Human
aagagaauguuaua

SEQ ID NO: 2098576 - RNA, 22 nt, Human
aagagaauguuauagugaauua

SEQ ID NO: 2098577 - RNA, 13 nt, Human
aagagaauguuga

SEQ ID NO: 2098578 - RNA, 20 nt, Human
aagagaauauuagcuuuacu

SEQ ID NO: 2098579 - RNA, 19 nt, Human
aagagaaugccauucucuu

SEQ ID NO: 2098580 - RNA, 14 nt, Human
aagagagaaagaag

SEQ ID NO: 2098581 - RNA, 21 nt, Human
aagagagaaagaaguaggcau

SEQ ID NO: 2098582 - RNA, 16 nt, Human
aagagagccuugguuc

SEQ ID NO: 2098583 - RNA, 22 nt, Human
aagagagccuugguucaucagu

SEQ ID NO: 2098584 - RNA, 15 nt, Human
aagagagauguuuug

SEQ ID NO: 2098585 - RNA, 12 nt, Human
aagagagaaugu

SEQ ID NO: 2098586 - RNA, 13 nt, Human
aagagagaaugua

SEQ ID NO: 2098587 - RNA, 14 nt, Human
aagagagagcugag

SEQ ID NO: 2098588 - RNA, 18 nt, Human
aagauuauuuuuuaugag

SEQ ID NO: 2098589 - RNA, 15 nt, Human
aagauucccagagac

SEQ ID NO: 2098590 - RNA, 18 nt, Human
aagauucccagagacagg

SEQ ID NO: 2098591 - RNA, 19 nt, Human
aagauucccagagacagga

SEQ ID NO: 2098592 - RNA, 20 nt, Human
aagauucauauuuacuucuu

SEQ ID NO: 2098593 - RNA, 12 nt, Human
aagauucccaga

SEQ ID NO: 2098594 - RNA, 13 nt, Human
aagauucccagag

SEQ ID NO: 2098595 - RNA, 14 nt, Human
aagauucccagaga

SEQ ID NO: 2098596 - RNA, 17 nt, Human
aagauucauccauuuau

SEQ ID NO: 2098597 - RNA, 12 nt, Human
aagauagaagaa

SEQ ID NO: 2098598 - RNA, 13 nt, Human
aagauagaagaaa

SEQ ID NO: 2098599 - RNA, 14 nt, Human
aagauagaagaaaa

SEQ ID NO: 2098600 - RNA, 21 nt, Human
aagauagaagaaaaaagaaug

SEQ ID NO: 2098601 - RNA, 22 nt, Human
aagauacuuggaccgaguagag

SEQ ID NO: 2098602 - RNA, 21 nt, Human
aagauuuuggaggagaaggac

SEQ ID NO: 2098603 - RNA, 11 nt, Human
aagauuuugaa

SEQ ID NO: 2098604 - RNA, 12 nt, Human
aagauuuugaaa

SEQ ID NO: 2098605 - RNA, 14 nt, Human
aagauuuugaaaac

SEQ ID NO: 2098606 - RNA, 15 nt, Human
aagauuuugaaaacu

SEQ ID NO: 2098607 - RNA, 20 nt, Human
aagauuuugaaaacuacauu

SEQ ID NO: 2098608 - RNA, 23 nt, Human
aagauuuugaaaacuacauuuua

SEQ ID NO: 2098609 - RNA, 15 nt, Human
aagauuuugaaugcu

SEQ ID NO: 2098610 - RNA, 17 nt, Human
aagauuuugaaugcuuc

SEQ ID NO: 2098611 - RNA, 21 nt, Human
aagauuuugaaugcuuccuga

SEQ ID NO: 2098612 - RNA, 19 nt, Human
aagauuuugaaauuuuuau

SEQ ID NO: 2098613 - RNA, 21 nt, Human
aagauugaaaaggaagaucag

SEQ ID NO: 2098614 - RNA, 18 nt, Human
aagcacuuugggauucuu

SEQ ID NO: 2098615 - RNA, 14 nt, Human
aagcagaugcaaag

SEQ ID NO: 2098616 - RNA, 16 nt, Human
aagcagaugcaaagag

SEQ ID NO: 2098617 - RNA, 18 nt, Human
aagcagaugcaaagaggc

SEQ ID NO: 2098618 - RNA, 21 nt, Human
aagcagaggaaggagaggaga

SEQ ID NO: 2098619 - RNA, 13 nt, Human
aagcagaggcugg

SEQ ID NO: 2098620 - RNA, 18 nt, Human
aagcagaggcuggccuca

SEQ ID NO: 2098621 - RNA, 20 nt, Human
aagcagaggcuggccucaga

SEQ ID NO: 2098622 - RNA, 13 nt, Human
aaggcagcaggcg

SEQ ID NO: 2098623 - RNA, 20 nt, Human
aaggaauucuaggcauccca

SEQ ID NO: 2098624 - RNA, 16 nt, Human
aaggacaaagucucca

SEQ ID NO: 2098625 - RNA, 17 nt, Human
aaggacaaagucuccag

SEQ ID NO: 2098626 - RNA, 21 nt, Human
aaggacaaagucuccagccca

SEQ ID NO: 2098627 - RNA, 22 nt, Human
aaggacccggaggggccuggca

SEQ ID NO: 2098628 - RNA, 13 nt, Human
aaggaccuccuga

SEQ ID NO: 2098629 - RNA, 16 nt, Human
aaggaccuauguuugc

SEQ ID NO: 2098630 - RNA, 17 nt, Human
aaggaccuauguuugcu

SEQ ID NO: 2098631 - RNA, 22 nt, Human
aaggaccuauguuugcucagaa

SEQ ID NO: 2098632 - RNA, 20 nt, Human
aaggacccuucagagguggc

SEQ ID NO: 2098633 - RNA, 21 nt, Human
aaggacggccuucaacugaaa

SEQ ID NO: 2098634 - RNA, 14 nt, Human
aagcugcugacagu

SEQ ID NO: 2098635 - RNA, 20 nt, Human
aagcgugagccacugcaccg

SEQ ID NO: 2098636 - RNA, 17 nt, Human
aagcgugagccacugca

SEQ ID NO: 2098637 - RNA, 21 nt, Human
aagcgugagccacugcaccgg

SEQ ID NO: 2098638 - RNA, 21 nt, Human
aaggaaucuccaguuuucagu

SEQ ID NO: 2098639 - RNA, 16 nt, Human
aaggaauuaucaauua

SEQ ID NO: 2098640 - RNA, 15 nt, Human
aaggaauucuaggca

SEQ ID NO: 2098641 - RNA, 17 nt, Human
aaggaaugcuuggaaua

SEQ ID NO: 2098642 - RNA, 16 nt, Human
aaggaauggaggcucu

SEQ ID NO: 2098643 - RNA, 21 nt, Human
aaggaauguagcugguuuccu

SEQ ID NO: 2098644 - RNA, 17 nt, Human
aaggaaucuccaguuuu

SEQ ID NO: 2098645 - RNA, 16 nt, Human
aaggaaugucuuuggu

SEQ ID NO: 2098646 - RNA, 16 nt, Human
aagcugcugacagugu

SEQ ID NO: 2098647 - RNA, 21 nt, Human
aagcugcuuuaaaaaaauaca

SEQ ID NO: 2098648 - RNA, 23 nt, Human
aagcugcuuggaccucgugcuuu

SEQ ID NO: 2098649 - RNA, 11 nt, Human
aagcugcuuuu

SEQ ID NO: 2098650 - RNA, 14 nt, Human
aagcugcuuuugac

SEQ ID NO: 2098651 - RNA, 17 nt, Human
aagcgauucuucugcuu

SEQ ID NO: 2098652 - RNA, 16 nt, Human
aagcgauucuucugcu

SEQ ID NO: 2098653 - RNA, 14 nt, Human
aagcgauucuucug

SEQ ID NO: 2098654 - RNA, 15 nt, Human
aagcgauucuucugc

SEQ ID NO: 2098655 - RNA, 17 nt, Human
aagccacugaagcuggg

SEQ ID NO: 2098656 - RNA, 13 nt, Human
aagccacugaagc

SEQ ID NO: 2098657 - RNA, 14 nt, Human
aagccacugaagcu

SEQ ID NO: 2098658 - RNA, 11 nt, Human
aagccacccuc

SEQ ID NO: 2098659 - RNA, 15 nt, Human
aagccacccucccag

SEQ ID NO: 2098660 - RNA, 16 nt, Human
aagccacccucccagc

SEQ ID NO: 2098661 - RNA, 18 nt, Human
aagccacccucccagcuc

SEQ ID NO: 2098662 - RNA, 19 nt, Human
aagccacccucccagcucu

SEQ ID NO: 2098663 - RNA, 21 nt, Human
aagccacccucccagcucuga

SEQ ID NO: 2098664 - RNA, 23 nt, Human
aagggauuuucagcccucagaau

SEQ ID NO: 2098665 - RNA, 21 nt, Human
aagggauuuucagcccucaga

SEQ ID NO: 2098666 - RNA, 22 nt, Human
aagggcaggcccaaauuaucaa

SEQ ID NO: 2098667 - RNA, 22 nt, Human
aagggcagggcaucuccugugc

SEQ ID NO: 2098668 - RNA, 14 nt, Human
aagggcaguggagg

SEQ ID NO: 2098669 - RNA, 15 nt, Human
aagggcaguggaggu

SEQ ID NO: 2098670 - RNA, 21 nt, Human
aagggcaggaaggagagccug

SEQ ID NO: 2098671 - RNA, 22 nt, Human
aagggcaggaaggagagccugc

SEQ ID NO: 2098672 - RNA, 21 nt, Human
aagggauggaaaaggaagacu

SEQ ID NO: 2098673 - RNA, 24 nt, Human
aagggauggaggucacacugguag

SEQ ID NO: 2098674 - RNA, 15 nt, Human
aagggauuuucagcc

SEQ ID NO: 2098675 - RNA, 20 nt, Human
aagggacuuggaagcuccgc

SEQ ID NO: 2098676 - RNA, 15 nt, Human
aagggauggaaaagg

SEQ ID NO: 2098677 - RNA, 20 nt, Human
aagggauggaaaaggaagac

SEQ ID NO: 2098678 - RNA, 20 nt, Human
aaggucucucuuuggacucu

SEQ ID NO: 2098679 - RNA, 17 nt, Human
aagguguaacucuaauu

SEQ ID NO: 2098680 - RNA, 20 nt, Human
aaggugguauguguguguau

SEQ ID NO: 2098681 - RNA, 18 nt, Human
aaggugucagaauaauaa

SEQ ID NO: 2098682 - RNA, 20 nt, Human
aaggugucuggacauucaga

SEQ ID NO: 2098683 - RNA, 20 nt, Human
aaggugggcugagcccuggc

SEQ ID NO: 2098684 - RNA, 21 nt, Human
aaggugggcugagcccuggca

SEQ ID NO: 2098685 - RNA, 16 nt, Human
aaggugguaugugugu

SEQ ID NO: 2098686 - RNA, 21 nt, Human
aagguggggucuuugugagag

SEQ ID NO: 2098687 - RNA, 17 nt, Human
aaggugguaugugugug

SEQ ID NO: 2098688 - RNA, 19 nt, Human
aagguggggguuggcuggg

SEQ ID NO: 2098689 - RNA, 20 nt, Human
aagguggggguuggcugggu

SEQ ID NO: 2098690 - RNA, 22 nt, Human
aagguggggguuggcuggguac

SEQ ID NO: 2098691 - RNA, 22 nt, Human
aagguguucauucacuugcauu

SEQ ID NO: 2098692 - RNA, 17 nt, Human
aagguucacuaaagcag

SEQ ID NO: 2098693 - RNA, 22 nt, Human
aagguuccaaucagaucuuuau

SEQ ID NO: 2098694 - RNA, 19 nt, Human
aaguagacuucauuuuucc

SEQ ID NO: 2098695 - RNA, 23 nt, Human
aaguagacuucauuuuuccuaac

SEQ ID NO: 2098696 - RNA, 12 nt, Human
acaguguacagu

SEQ ID NO: 2098697 - RNA, 13 nt, Human
acaguguacaguc

SEQ ID NO: 2098698 - RNA, 19 nt, Human
acagugguucuacaaucua

SEQ ID NO: 2098699 - RNA, 23 nt, Human
acagugguucuacaaucuauuua

SEQ ID NO: 2098700 - RNA, 14 nt, Human
acagugggugcccc

SEQ ID NO: 2098701 - RNA, 21 nt, Human
acagugggugccccccuugcc

SEQ ID NO: 2098702 - RNA, 23 nt, Human
acagugagucgaggacagggagg

SEQ ID NO: 2098703 - RNA, 22 nt, Human
acagugauuuuuuuuuagaaca

SEQ ID NO: 2098704 - RNA, 23 nt, Human
acagugauuuuuuuuuagaacag

SEQ ID NO: 2098705 - RNA, 18 nt, Human
acaguguacagucuugua

SEQ ID NO: 2098706 - RNA, 15 nt, Human
acaguguacagucuu

SEQ ID NO: 2098707 - RNA, 17 nt, Human
acaguguacagucuugu

SEQ ID NO: 2098708 - RNA, 23 nt, Human
acagugucuguaucggagacagu

SEQ ID NO: 2098709 - RNA, 24 nt, Human
acagugucuguaucggagacagug

SEQ ID NO: 2098710 - RNA, 22 nt, Human
acagggcuaagagcuagcgcug

SEQ ID NO: 2098711 - RNA, 14 nt, Human
acaggcaaugcugg

SEQ ID NO: 2098712 - RNA, 19 nt, Human
acaggucuccucuuaaaaa

SEQ ID NO: 2098713 - RNA, 16 nt, Human
acaggucugggagagg

SEQ ID NO: 2098714 - RNA, 19 nt, Human
acaggucugggagaggcag

SEQ ID NO: 2098715 - RNA, 16 nt, Human
acagguggacacacaa

SEQ ID NO: 2098716 - RNA, 18 nt, Human
acagguggacacacaagg

SEQ ID NO: 2098717 - RNA, 23 nt, Human
acaggugugagucaccaagccca

SEQ ID NO: 2098718 - RNA, 22 nt, Human
acaggugugagucaccaagccc

SEQ ID NO: 2098719 - RNA, 19 nt, Human
acaggugugaaccaccaca

SEQ ID NO: 2098720 - RNA, 17 nt, Human
acagguguccccagccc

SEQ ID NO: 2098721 - RNA, 22 nt, Human
acagguguccccagcccacugg

SEQ ID NO: 2098722 - RNA, 14 nt, Human
acagguguuuauac

SEQ ID NO: 2098723 - RNA, 22 nt, Human
acagugagucgaggacagggag

SEQ ID NO: 2098724 - RNA, 23 nt, Human
acagugagcuuggaaaggaccag

SEQ ID NO: 2098725 - RNA, 15 nt, Human
acagugagguccugg

SEQ ID NO: 2098726 - RNA, 16 nt, Human
acagugagguccuggg

SEQ ID NO: 2098727 - RNA, 18 nt, Human
acagugagguccuggggg

SEQ ID NO: 2098728 - RNA, 19 nt, Human
acagugagguccugggggc

SEQ ID NO: 2098729 - RNA, 20 nt, Human
acagugagguccugggggcc

SEQ ID NO: 2098730 - RNA, 22 nt, Human
acagugagguccugggggccug

SEQ ID NO: 2098731 - RNA, 14 nt, Human
acagcucuguccug

SEQ ID NO: 2098732 - RNA, 23 nt, Human
acagcuccuucuguccuacucug

SEQ ID NO: 2098733 - RNA, 18 nt, Human
acagcuccuucuguccua

SEQ ID NO: 2098734 - RNA, 16 nt, Human
acagcuccuucugucc

SEQ ID NO: 2098735 - RNA, 15 nt, Human
acagcuccuucuguc

SEQ ID NO: 2098736 - RNA, 17 nt, Human
acagcucuguccuggga

SEQ ID NO: 2098737 - RNA, 16 nt, Human
acagcucuguccuggg

SEQ ID NO: 2098738 - RNA, 13 nt, Human
acagcucuguccu

SEQ ID NO: 2098739 - RNA, 20 nt, Human
acagaggagggcgugacuca

SEQ ID NO: 2098740 - RNA, 22 nt, Human
acagcugaggucucuugaggga

SEQ ID NO: 2098741 - RNA, 16 nt, Human
acagcugaggucucuu

SEQ ID NO: 2098742 - RNA, 15 nt, Human
acagcugcagagaca

SEQ ID NO: 2098743 - RNA, 17 nt, Human
acagcugcagagacaga

SEQ ID NO: 2098744 - RNA, 21 nt, Human
acagcugcagagacagagagg

SEQ ID NO: 2098745 - RNA, 23 nt, Human
acaggcaagcaccuccugccucg

SEQ ID NO: 2098746 - RNA, 20 nt, Human
acaggcaagcaccuccugcc

SEQ ID NO: 2098747 - RNA, 12 nt, Human
acagcugccugc

SEQ ID NO: 2098748 - RNA, 16 nt, Human
acagcugccugcagua

SEQ ID NO: 2098749 - RNA, 15 nt, Human
acaucaguaauguau

SEQ ID NO: 2098750 - RNA, 20 nt, Human
acaucaguggcauggcucca

SEQ ID NO: 2098751 - RNA, 22 nt, Human
acaucaguggcauggcuccagu

SEQ ID NO: 2098752 - RNA, 23 nt, Human
acaucaguggcauggcuccaguc

SEQ ID NO: 2098753 - RNA, 16 nt, Human
acauacaauuauuuuu

SEQ ID NO: 2098754 - RNA, 22 nt, Human
acauacaauuauuuuuacaguu

SEQ ID NO: 2098755 - RNA, 16 nt, Human
acauaagauaaaugug

SEQ ID NO: 2098756 - RNA, 15 nt, Human
acaucaguuacucug

SEQ ID NO: 2098757 - RNA, 18 nt, Human
acaucaguuacucugaag

SEQ ID NO: 2098758 - RNA, 20 nt, Human
acaucaguuacucugaaggg

SEQ ID NO: 2098759 - RNA, 16 nt, Human
acauccggaggagaag

SEQ ID NO: 2098760 - RNA, 14 nt, Human
acauccuccgucca

SEQ ID NO: 2098761 - RNA, 17 nt, Human
acauccuccguccagcc

SEQ ID NO: 2098762 - RNA, 15 nt, Human
acaugcaaggcacug

SEQ ID NO: 2098763 - RNA, 20 nt, Human
acaugcaaggcacuguacua

SEQ ID NO: 2098764 - RNA, 14 nt, Human
accaugaaacaaag

SEQ ID NO: 2098765 - RNA, 15 nt, Human
accaugaaacaaagc

SEQ ID NO: 2098766 - RNA, 13 nt, Human
acccacagggcua

SEQ ID NO: 2098767 - RNA, 15 nt, Human
acccacacugcaaca

SEQ ID NO: 2098768 - RNA, 19 nt, Human
acccacacugcaacaggaa

SEQ ID NO: 2098769 - RNA, 13 nt, Human
acccacagaaaga

SEQ ID NO: 2098770 - RNA, 14 nt, Human
acccacagaaagag

SEQ ID NO: 2098771 - RNA, 16 nt, Human
acccacagaaagagag

SEQ ID NO: 2098772 - RNA, 12 nt, Human
acccacagccuc

SEQ ID NO: 2098773 - RNA, 13 nt, Human
acccacagccucu

SEQ ID NO: 2098774 - RNA, 19 nt, Human
acccacagccucugccugu

SEQ ID NO: 2098775 - RNA, 16 nt, Human
acccacccagcaccca

SEQ ID NO: 2098776 - RNA, 16 nt, Human
acccaccaguugaauu

SEQ ID NO: 2098777 - RNA, 15 nt, Human
acccacccuccuuuc

SEQ ID NO: 2098778 - RNA, 15 nt, Human
acccauagcuuccau

SEQ ID NO: 2098779 - RNA, 16 nt, Human
acccauagcuuccaug

SEQ ID NO: 2098780 - RNA, 14 nt, Human
acccauaggaaauc

SEQ ID NO: 2098781 - RNA, 19 nt, Human
acccaucagaaggagaagg

SEQ ID NO: 2098782 - RNA, 20 nt, Human
acccaugaugagcuccucuu

SEQ ID NO: 2098783 - RNA, 18 nt, Human
acccaucacgccugugca

SEQ ID NO: 2098784 - RNA, 14 nt, Human
acccaucagaagga

SEQ ID NO: 2098785 - RNA, 18 nt, Human
acccaucagaaggagaag

SEQ ID NO: 2098786 - RNA, 15 nt, Human
accauacugagggac

SEQ ID NO: 2098787 - RNA, 18 nt, Human
accauagcgcugcucuua

SEQ ID NO: 2098788 - RNA, 22 nt, Human
accauccacucuacccucccac

SEQ ID NO: 2098789 - RNA, 23 nt, Human
accauccacucuacccucccacc

SEQ ID NO: 2098790 - RNA, 15 nt, Human
acauuuauaauguuu

SEQ ID NO: 2098791 - RNA, 20 nt, Human
acauuuauaauguuugcuau

SEQ ID NO: 2098792 - RNA, 18 nt, Human
acauuuauaauguuugcu

SEQ ID NO: 2098793 - RNA, 12 nt, Human
acauuucuaacu

SEQ ID NO: 2098794 - RNA, 14 nt, Human
acauuucuaacucu

SEQ ID NO: 2098795 - RNA, 20 nt, Human
acauuucuaacucugaugua

SEQ ID NO: 2098796 - RNA, 22 nt, Human
acauuucuaacucugauguaaa

SEQ ID NO: 2098797 - RNA, 22 nt, Human
accaacuuuucuauuaaaagug

SEQ ID NO: 2098798 - RNA, 14 nt, Human
accaagaaagcagg

SEQ ID NO: 2098799 - RNA, 12 nt, Human
accaagaacugc

SEQ ID NO: 2098800 - RNA, 14 nt, Human
accaagaacugcau

SEQ ID NO: 2098801 - RNA, 15 nt, Human
accaagaacugcaug

SEQ ID NO: 2098802 - RNA, 11 nt, Human
accaagaagau

SEQ ID NO: 2098803 - RNA, 16 nt, Human
accaagaagaugucuu

SEQ ID NO: 2098804 - RNA, 21 nt, Human
accaacuuuucuauuaaaagu

SEQ ID NO: 2098805 - RNA, 17 nt, Human
accaaggagaugaagca

SEQ ID NO: 2098806 - RNA, 16 nt, Human
accaagaugccaucug

SEQ ID NO: 2098807 - RNA, 18 nt, Human
accaaggaccccucaccu

SEQ ID NO: 2098808 - RNA, 13 nt, Human
accaagagagaaa

SEQ ID NO: 2098809 - RNA, 15 nt, Human
accaagagagaaaga

SEQ ID NO: 2098810 - RNA, 20 nt, Human
accaagagagaaagaaguag

SEQ ID NO: 2098811 - RNA, 21 nt, Human
accaagaauucuccaaaacaa

SEQ ID NO: 2098812 - RNA, 22 nt, Human
accaagaauucuccaaaacaau

SEQ ID NO: 2098813 - RNA, 16 nt, Human
accaagacucugaaau

SEQ ID NO: 2098814 - RNA, 12 nt, Human
accaccugccca

SEQ ID NO: 2098815 - RNA, 13 nt, Human
accaccuucccag

SEQ ID NO: 2098816 - RNA, 14 nt, Human
accaccuucccagc

SEQ ID NO: 2098817 - RNA, 20 nt, Human
accaccuucccagcucuccc

SEQ ID NO: 2098818 - RNA, 21 nt, Human
accaccuucccagcucucccu

SEQ ID NO: 2098819 - RNA, 15 nt, Human
accaccuucccagcu

SEQ ID NO: 2098820 - RNA, 16 nt, Human
accaccuucccagcuc

SEQ ID NO: 2098821 - RNA, 17 nt, Human
accaccuucccagcucu

SEQ ID NO: 2098822 - RNA, 19 nt, Human
accaccuucccagcucucc

SEQ ID NO: 2098823 - RNA, 20 nt, Human
accacccuagucccuucccc

SEQ ID NO: 2098824 - RNA, 21 nt, Human
accacccuagucccuuccccu

SEQ ID NO: 2098825 - RNA, 20 nt, Human
accagccccagugcccacag

SEQ ID NO: 2098826 - RNA, 19 nt, Human
accagccccagugcccaca

SEQ ID NO: 2098827 - RNA, 18 nt, Human
accagccccagugcccac

SEQ ID NO: 2098828 - RNA, 19 nt, Human
accagcagaucccagcuca

SEQ ID NO: 2098829 - RNA, 21 nt, Human
accagcagaucccagcucacg

SEQ ID NO: 2098830 - RNA, 17 nt, Human
accacgauguggcccug

SEQ ID NO: 2098831 - RNA, 18 nt, Human
accacgauguggcccugg

SEQ ID NO: 2098832 - RNA, 19 nt, Human
accacgauguggcccuggc

SEQ ID NO: 2098833 - RNA, 15 nt, Human
accagcagaucccag

SEQ ID NO: 2098834 - RNA, 17 nt, Human
accagccccagugccca

SEQ ID NO: 2098835 - RNA, 16 nt, Human
accagccccagugccc

SEQ ID NO: 2098836 - RNA, 22 nt, Human
accaccuucccagcucucccuc

SEQ ID NO: 2098837 - RNA, 17 nt, Human
accaccuuuuauuacau

SEQ ID NO: 2098838 - RNA, 16 nt, Human
accacgauguggcccu

SEQ ID NO: 2098839 - RNA, 16 nt, Human
acacuguuagaacacu

SEQ ID NO: 2098840 - RNA, 17 nt, Human
acacuguuagaacacua

SEQ ID NO: 2098841 - RNA, 18 nt, Human
acacuguuagaacacuau

SEQ ID NO: 2098842 - RNA, 15 nt, Human
acacugggggagggg

SEQ ID NO: 2098843 - RNA, 16 nt, Human
acacugggggagggga

SEQ ID NO: 2098844 - RNA, 14 nt, Human
acagacacacacac

SEQ ID NO: 2098845 - RNA, 13 nt, Human
acagacacacaca

SEQ ID NO: 2098846 - RNA, 12 nt, Human
acagacacacac

SEQ ID NO: 2098847 - RNA, 16 nt, Human
acagaagucaugaagc

SEQ ID NO: 2098848 - RNA, 14 nt, Human
acagacaacagaag

SEQ ID NO: 2098849 - RNA, 21 nt, Human
acagacaagguagcccuggcc

SEQ ID NO: 2098850 - RNA, 22 nt, Human
acagacaagguagcccuggcca

SEQ ID NO: 2098851 - RNA, 13 nt, Human
acagaagcuucca

SEQ ID NO: 2098852 - RNA, 21 nt, Human
acagaagccucacugcaagca

SEQ ID NO: 2098853 - RNA, 23 nt, Human
acagaggccaugggccuccugug

SEQ ID NO: 2098854 - RNA, 21 nt, Human
acagaggccaugggccuccug

SEQ ID NO: 2098855 - RNA, 17 nt, Human
acagaggccaugggccu

SEQ ID NO: 2098856 - RNA, 17 nt, Human
acagaggccauggcaga

SEQ ID NO: 2098857 - RNA, 13 nt, Human
acagaggcagccc

SEQ ID NO: 2098858 - RNA, 18 nt, Human
acagaggaagagcaggca

SEQ ID NO: 2098859 - RNA, 17 nt, Human
acagaggaagagcaggc

SEQ ID NO: 2098860 - RNA, 14 nt, Human
acagacacacgcac

SEQ ID NO: 2098861 - RNA, 16 nt, Human
acacguacuuaaauga

SEQ ID NO: 2098862 - RNA, 17 nt, Human
acacggaggcaucugca

SEQ ID NO: 2098863 - RNA, 18 nt, Human
acacggaggcaucugcac

SEQ ID NO: 2098864 - RNA, 21 nt, Human
acacagcucuucuccaggcug

SEQ ID NO: 2098865 - RNA, 20 nt, Human
acacagcucuucuccaggcu

SEQ ID NO: 2098866 - RNA, 22 nt, Human
acacagcucuucuccaggcugu

SEQ ID NO: 2098867 - RNA, 19 nt, Human
acacaaaaguuucucuuuu

SEQ ID NO: 2098868 - RNA, 14 nt, Human
acacaaacaaacaa

SEQ ID NO: 2098869 - RNA, 22 nt, Human
acacaaacaaacaagcuaggug

SEQ ID NO: 2098870 - RNA, 19 nt, Human
acacagcucuucuccaggc

SEQ ID NO: 2098871 - RNA, 18 nt, Human
acaauuauaucaguccuc

SEQ ID NO: 2098872 - RNA, 18 nt, Human
acaauuauuuuuacaguu

SEQ ID NO: 2098873 - RNA, 21 nt, Human
acaauuauuuuuacaguucuc

SEQ ID NO: 2098874 - RNA, 14 nt, Human
acaauuccaaagga

SEQ ID NO: 2098875 - RNA, 18 nt, Human
acaauuccaaaggaaucu

SEQ ID NO: 2098876 - RNA, 19 nt, Human
acaauuccuagauaaaaag

SEQ ID NO: 2098877 - RNA, 22 nt, Human
acaauuccuagauaaaaagaug

SEQ ID NO: 2098878 - RNA, 23 nt, Human
acaauuccuagauaaaaagaugg

SEQ ID NO: 2098879 - RNA, 14 nt, Human
acaauuuaaagcaa

SEQ ID NO: 2098880 - RNA, 20 nt, Human
acaauuuaaagcaaaggagu

SEQ ID NO: 2098881 - RNA, 13 nt, Human
acaauuuaaagca

SEQ ID NO: 2098882 - RNA, 15 nt, Human
acaauucuacauugu

SEQ ID NO: 2098883 - RNA, 16 nt, Human
acaaggauugcuacug

SEQ ID NO: 2098884 - RNA, 16 nt, Human
aauuuugugcccccau

SEQ ID NO: 2098885 - RNA, 22 nt, Human
aauuuuggccaaaguguuaauc

SEQ ID NO: 2098886 - RNA, 20 nt, Human
aauuuucaguauaauuuaac

SEQ ID NO: 2098887 - RNA, 17 nt, Human
aauuuuggccaaagugu

SEQ ID NO: 2098888 - RNA, 18 nt, Human
aauuuugccuaauacauu

SEQ ID NO: 2098889 - RNA, 17 nt, Human
aauuuucagaccccagc

SEQ ID NO: 2098890 - RNA, 19 nt, Human
aauuuucaaguaauuguga

SEQ ID NO: 2098891 - RNA, 19 nt, Human
aauuuucaagcaucuccug

SEQ ID NO: 2098892 - RNA, 15 nt, Human
aauuuucaaguaauu

SEQ ID NO: 2098893 - RNA, 23 nt, Human
acaaccccccaucacaaacuuaa

SEQ ID NO: 2098894 - RNA, 14 nt, Human
acaacccugcaaag

SEQ ID NO: 2098895 - RNA, 19 nt, Human
acaacccugcaaaggacug

SEQ ID NO: 2098896 - RNA, 17 nt, Human
acaacccuguuuuauac

SEQ ID NO: 2098897 - RNA, 18 nt, Human
acaacccuguuuuauacu

SEQ ID NO: 2098898 - RNA, 19 nt, Human
acaaccgaugcuccagcca

SEQ ID NO: 2098899 - RNA, 20 nt, Human
acaaccgaugcuccagccaa

SEQ ID NO: 2098900 - RNA, 22 nt, Human
acaaccgaugcuccagccaacc

SEQ ID NO: 2098901 - RNA, 13 nt, Human
acaaccguuggaa

SEQ ID NO: 2098902 - RNA, 17 nt, Human
aauuuauuuauacuauu

SEQ ID NO: 2098903 - RNA, 20 nt, Human
aauuuauuuauacuauuuag

SEQ ID NO: 2098904 - RNA, 20 nt, Human
aauuuauuuuauuuuagcag

SEQ ID NO: 2098905 - RNA, 22 nt, Human
aauuuauuuuauuuuagcaguu

SEQ ID NO: 2098906 - RNA, 17 nt, Human
aauuuauuuauuaagau

SEQ ID NO: 2098907 - RNA, 16 nt, Human
aauuuauugcuugaua

SEQ ID NO: 2098908 - RNA, 16 nt, Human
aauuuauuuauuaaga

SEQ ID NO: 2098909 - RNA, 22 nt, Human
aauuuauuuauuaagauggauu

SEQ ID NO: 2098910 - RNA, 14 nt, Human
aauuuauugcacaa

SEQ ID NO: 2098911 - RNA, 15 nt, Human
aauuuauugcacaaa

SEQ ID NO: 2098912 - RNA, 16 nt, Human
aauuuauugcacaaaa

SEQ ID NO: 2098913 - RNA, 21 nt, Human
aauuuauucaauuccucuggg

SEQ ID NO: 2098914 - RNA, 12 nt, Human
aauuuauucaau

SEQ ID NO: 2098915 - RNA, 14 nt, Human
aauuuauucaagaa

SEQ ID NO: 2098916 - RNA, 13 nt, Human
aauuguccccagu

SEQ ID NO: 2098917 - RNA, 12 nt, Human
aauugugaaaaa

SEQ ID NO: 2098918 - RNA, 20 nt, Human
aauugugccgagaaaagcau

SEQ ID NO: 2098919 - RNA, 16 nt, Human
aauugugaauugauaa

SEQ ID NO: 2098920 - RNA, 18 nt, Human
aauugugaauugauaaua

SEQ ID NO: 2098921 - RNA, 20 nt, Human
aauugugaauugauaauaaa

SEQ ID NO: 2098922 - RNA, 21 nt, Human
aauugugaauugauaauaaac

SEQ ID NO: 2098923 - RNA, 19 nt, Human
aaugucacaggcaggucca

SEQ ID NO: 2098924 - RNA, 16 nt, Human
aaugucacaggcaggu

SEQ ID NO: 2098925 - RNA, 19 nt, Human
aaugucaccaccuucccag

SEQ ID NO: 2098926 - RNA, 20 nt, Human
aaugucaccaccuucccagc

SEQ ID NO: 2098927 - RNA, 23 nt, Human
aaugucaccaccuucccagcucu

SEQ ID NO: 2098928 - RNA, 15 nt, Human
aaugucaccaccuuc

SEQ ID NO: 2098929 - RNA, 16 nt, Human
aaugucaccaccuucc

SEQ ID NO: 2098930 - RNA, 18 nt, Human
aaugucaccaccuuccca

SEQ ID NO: 2098931 - RNA, 13 nt, Human
aauuguaaacugu

SEQ ID NO: 2098932 - RNA, 14 nt, Human
aauuguaaacugua

SEQ ID NO: 2098933 - RNA, 15 nt, Human
aauuguaaacuguac

SEQ ID NO: 2098934 - RNA, 17 nt, Human
aauuguaaacuguacua

SEQ ID NO: 2098935 - RNA, 17 nt, Human
aauuguaaaacugaggc

SEQ ID NO: 2098936 - RNA, 16 nt, Human
aauuguauuuuaguaa

SEQ ID NO: 2098937 - RNA, 13 nt, Human
aauuguaucuagu

SEQ ID NO: 2098938 - RNA, 20 nt, Human
aauuguaucuagugcagcug

SEQ ID NO: 2098939 - RNA, 23 nt, Human
aauuguaucuagugcagcugauu

SEQ ID NO: 2098940 - RNA, 18 nt, Human
aauuguaucauuugaaca

SEQ ID NO: 2098941 - RNA, 24 nt, Human
aauuguaucauuugaacaacuagg

SEQ ID NO: 2098942 - RNA, 18 nt, Human
aauuucgccguugaagag

SEQ ID NO: 2098943 - RNA, 21 nt, Human
aauuucgccguugaagaggaa

SEQ ID NO: 2098944 - RNA, 20 nt, Human
aauuucagguuuuguaaaga

SEQ ID NO: 2098945 - RNA, 22 nt, Human
aauuucagguuuuguaaagaug

SEQ ID NO: 2098946 - RNA, 14 nt, Human
aauuucaauuuguu

SEQ ID NO: 2098947 - RNA, 15 nt, Human
aauuucaauuuguuc

SEQ ID NO: 2098948 - RNA, 14 nt, Human
aauuucacauuaau

SEQ ID NO: 2098949 - RNA, 22 nt, Human
acugaccaauauuguacaguuu

SEQ ID NO: 2098950 - RNA, 20 nt, Human
acugaccaauauuguacagu

SEQ ID NO: 2098951 - RNA, 21 nt, Human
acugaccaauauuguacaguu

SEQ ID NO: 2098952 - RNA, 13 nt, Human
acugaccagccuc

SEQ ID NO: 2098953 - RNA, 20 nt, Human
acugaccagccuccaugcug

SEQ ID NO: 2098954 - RNA, 15 nt, Human
acugaccagccucca

SEQ ID NO: 2098955 - RNA, 21 nt, Human
acugaauauuuauauuucacu

SEQ ID NO: 2098956 - RNA, 22 nt, Human
acugaauauuuauauuucacua

SEQ ID NO: 2098957 - RNA, 15 nt, Human
acugaauauuuauau

SEQ ID NO: 2098958 - RNA, 18 nt, Human
acugaauauuuauauuuc

SEQ ID NO: 2098959 - RNA, 23 nt, Human
acugacauuguuggccaaagcca

SEQ ID NO: 2098960 - RNA, 22 nt, Human
acugacauuguuggccaaagcc

SEQ ID NO: 2098961 - RNA, 22 nt, Human
acugaugggcaacccccagccu

SEQ ID NO: 2098962 - RNA, 12 nt, Human
acugaugggcaa

SEQ ID NO: 2098963 - RNA, 23 nt, Human
acugaccauccacucuacccucc

SEQ ID NO: 2098964 - RNA, 14 nt, Human
acugauggaaacaa

SEQ ID NO: 2098965 - RNA, 18 nt, Human
acugauggaaacaaagug

SEQ ID NO: 2098966 - RNA, 19 nt, Human
acugauggaaacaaagugg

SEQ ID NO: 2098967 - RNA, 22 nt, Human
acugauggcuaauguacugcau

SEQ ID NO: 2098968 - RNA, 23 nt, Human
acugaccagccuccaugcugccu

SEQ ID NO: 2098969 - RNA, 16 nt, Human
acugaccauccacucu

SEQ ID NO: 2098970 - RNA, 22 nt, Human
acugaccauccacucuacccuc

SEQ ID NO: 2098971 - RNA, 20 nt, Human
acugauucauaauaaauauc

SEQ ID NO: 2098972 - RNA, 13 nt, Human
acugauuguuuca

SEQ ID NO: 2098973 - RNA, 15 nt, Human
acugcaaaggcgcag

SEQ ID NO: 2098974 - RNA, 20 nt, Human
acucuacuuagcaugucccu

SEQ ID NO: 2098975 - RNA, 22 nt, Human
acucuaauucccauuuugcaaa

SEQ ID NO: 2098976 - RNA, 21 nt, Human
acucuacuuagcaugucccua

SEQ ID NO: 2098977 - RNA, 19 nt, Human
acucugucucaaaaaaaca

SEQ ID NO: 2098978 - RNA, 19 nt, Human
acucugugucagguggggc

SEQ ID NO: 2098979 - RNA, 21 nt, Human
acucugugucagguggggcag

SEQ ID NO: 2098980 - RNA, 21 nt, Human
acugaaguuaacagagacaga

SEQ ID NO: 2098981 - RNA, 17 nt, Human
acugaaguuaacagaga

SEQ ID NO: 2098982 - RNA, 14 nt, Human
acucuaauagugcu

SEQ ID NO: 2098983 - RNA, 21 nt, Human
acucuaauagugcuuaaaaau

SEQ ID NO: 2098984 - RNA, 20 nt, Human
acucuaauucccauuuugca

SEQ ID NO: 2098985 - RNA, 21 nt, Human
acucuaauucccauuuugcaa

SEQ ID NO: 2098986 - RNA, 13 nt, Human
acucuaauucuaa

SEQ ID NO: 2098987 - RNA, 14 nt, Human
acucuaauucuaac

SEQ ID NO: 2098988 - RNA, 15 nt, Human
acucuaauucuaacc

SEQ ID NO: 2098989 - RNA, 16 nt, Human
acucuaauucuaacca

SEQ ID NO: 2098990 - RNA, 18 nt, Human
acuauuuuuauuuauauu

SEQ ID NO: 2098991 - RNA, 12 nt, Human
acuauuuucaga

SEQ ID NO: 2098992 - RNA, 13 nt, Human
acuauuuucagaa

SEQ ID NO: 2098993 - RNA, 14 nt, Human
acuauuuucagaau

SEQ ID NO: 2098994 - RNA, 16 nt, Human
acuauuuucagaaucu

SEQ ID NO: 2098995 - RNA, 17 nt, Human
acuauuuucagaaucug

SEQ ID NO: 2098996 - RNA, 19 nt, Human
acuauuuucagaaucugaa

SEQ ID NO: 2098997 - RNA, 17 nt, Human
acuauuuuauuuucuaa

SEQ ID NO: 2098998 - RNA, 11 nt, Human
acuauuuuauu

SEQ ID NO: 2098999 - RNA, 13 nt, Human
acuauuuuacuuc

SEQ ID NO: 2099000 - RNA, 19 nt, Human
acuauuugcuuauuuaaua

SEQ ID NO: 2099001 - RNA, 23 nt, Human
acuauuugcuuauuuaauaaaga

SEQ ID NO: 2099002 - RNA, 15 nt, Human
acugcuuuuggucug

SEQ ID NO: 2099003 - RNA, 11 nt, Human
acugcccucug

SEQ ID NO: 2099004 - RNA, 12 nt, Human
acugcccucugu

SEQ ID NO: 2099005 - RNA, 14 nt, Human
acugcccucuguuc

SEQ ID NO: 2099006 - RNA, 21 nt, Human
acugcccucuguucaguaaca

SEQ ID NO: 2099007 - RNA, 22 nt, Human
acugcccucuguucaguaacag

SEQ ID NO: 2099008 - RNA, 22 nt, Human
acugcccggcaggguccuagaa

SEQ ID NO: 2099009 - RNA, 22 nt, Human
acugcccgagcuggugcauuac

SEQ ID NO: 2099010 - RNA, 17 nt, Human
acugcccggggcagcug

SEQ ID NO: 2099011 - RNA, 20 nt, Human
acugcccggggcagcugcca

SEQ ID NO: 2099012 - RNA, 20 nt, Human
acugcuuuuggucuguguga

SEQ ID NO: 2099013 - RNA, 16 nt, Human
acugcuuuuggucugu

SEQ ID NO: 2099014 - RNA, 13 nt, Human
acuggaaguuuug

SEQ ID NO: 2099015 - RNA, 17 nt, Human
acuggaaguuuugcauu

SEQ ID NO: 2099016 - RNA, 21 nt, Human
acugcccggggcagcugccag

SEQ ID NO: 2099017 - RNA, 22 nt, Human
acugcccggggcagcugccaga

SEQ ID NO: 2099018 - RNA, 18 nt, Human
acugccagucccccugcc

SEQ ID NO: 2099019 - RNA, 19 nt, Human
acugccagucccccugccc

SEQ ID NO: 2099020 - RNA, 15 nt, Human
acugcccggcagggu

SEQ ID NO: 2099021 - RNA, 13 nt, Human
acuucugccucuu

SEQ ID NO: 2099022 - RNA, 19 nt, Human
acuucugugagacccccac

SEQ ID NO: 2099023 - RNA, 20 nt, Human
acuucugugagacccccaca

SEQ ID NO: 2099024 - RNA, 23 nt, Human
acuucugugagacccccacaccu

SEQ ID NO: 2099025 - RNA, 17 nt, Human
acuucuuauacauuuga

SEQ ID NO: 2099026 - RNA, 18 nt, Human
acuucuuauacauuugau

SEQ ID NO: 2099027 - RNA, 13 nt, Human
acuucagcucugu

SEQ ID NO: 2099028 - RNA, 20 nt, Human
acuucugccauauucuguug

SEQ ID NO: 2099029 - RNA, 22 nt, Human
acuucaagugcaugcucucugc

SEQ ID NO: 2099030 - RNA, 23 nt, Human
acuucaagugcaugcucucugca

SEQ ID NO: 2099031 - RNA, 16 nt, Human
acuucaaguuaaagug

SEQ ID NO: 2099032 - RNA, 16 nt, Human
acuucacacacaggca

SEQ ID NO: 2099033 - RNA, 18 nt, Human
acuucaagcaccagggaa

SEQ ID NO: 2099034 - RNA, 16 nt, Human
acuucagcuagagcuu

SEQ ID NO: 2099035 - RNA, 13 nt, Human
acuucaaggccca

SEQ ID NO: 2099036 - RNA, 19 nt, Human
acuuaaauaaaugucauua

SEQ ID NO: 2099037 - RNA, 20 nt, Human
acuuaaaauauuccugcauu

SEQ ID NO: 2099038 - RNA, 16 nt, Human
acuuaaaaaaugucca

SEQ ID NO: 2099039 - RNA, 15 nt, Human
acuuaaaaaaugucc

SEQ ID NO: 2099040 - RNA, 22 nt, Human
acuuaaaauauuccugcauuug

SEQ ID NO: 2099041 - RNA, 13 nt, Human
acuuaaaauauuu

SEQ ID NO: 2099042 - RNA, 17 nt, Human
acuuaaaggcuguggua

SEQ ID NO: 2099043 - RNA, 13 nt, Human
acuuaaaaagucu

SEQ ID NO: 2099044 - RNA, 20 nt, Human
acuuaaaaagucugcauuac

SEQ ID NO: 2099045 - RNA, 13 nt, Human
acuggaauuuuua

SEQ ID NO: 2099046 - RNA, 14 nt, Human
acuggaauuuuuau

SEQ ID NO: 2099047 - RNA, 18 nt, Human
acuggaauuuuuauuaug

SEQ ID NO: 2099048 - RNA, 19 nt, Human
acuggaauuuuuauuaugc

SEQ ID NO: 2099049 - RNA, 21 nt, Human
acuggaauuuuuauuaugcau

SEQ ID NO: 2099050 - RNA, 23 nt, Human
acuggaauuuuuauuaugcauaa

SEQ ID NO: 2099051 - RNA, 24 nt, Human
acuggaauuuuuauuaugcauaac

SEQ ID NO: 2099052 - RNA, 16 nt, Human
acuggaaguuuugcau

SEQ ID NO: 2099053 - RNA, 16 nt, Human
acuugggaggcugagg

SEQ ID NO: 2099054 - RNA, 22 nt, Human
acuuucaggccacauggcuaaa

SEQ ID NO: 2099055 - RNA, 20 nt, Human
acuuucacauagaugucccu

SEQ ID NO: 2099056 - RNA, 21 nt, Human
acuuucacauagaugucccuu

SEQ ID NO: 2099057 - RNA, 18 nt, Human
acuuucagguacuaaaua

SEQ ID NO: 2099058 - RNA, 21 nt, Human
acuuucagguacuaaauaccu

SEQ ID NO: 2099059 - RNA, 15 nt, Human
acuuucacauagaug

SEQ ID NO: 2099060 - RNA, 17 nt, Human
acuuucacauagauguc

SEQ ID NO: 2099061 - RNA, 17 nt, Human
acuauugcuugcacaaa

SEQ ID NO: 2099062 - RNA, 12 nt, Human
acuauugacauc

SEQ ID NO: 2099063 - RNA, 17 nt, Human
acuauugacaucagcau

SEQ ID NO: 2099064 - RNA, 18 nt, Human
acuauugaaguugcagau

SEQ ID NO: 2099065 - RNA, 14 nt, Human
acuauuggaaagua

SEQ ID NO: 2099066 - RNA, 16 nt, Human
acuauuggaaaguacu

SEQ ID NO: 2099067 - RNA, 13 nt, Human
acuauuggagggu

SEQ ID NO: 2099068 - RNA, 19 nt, Human
acuauuggagggugggaga

SEQ ID NO: 2099069 - RNA, 23 nt, Human
acuaguaccuucagauccuaccc

SEQ ID NO: 2099070 - RNA, 17 nt, Human
acuagggaagauaauau

SEQ ID NO: 2099071 - RNA, 13 nt, Human
acuagggaccugg

SEQ ID NO: 2099072 - RNA, 14 nt, Human
acuagggaccuggg

SEQ ID NO: 2099073 - RNA, 16 nt, Human
acuagggaccugggga

SEQ ID NO: 2099074 - RNA, 12 nt, Human
acuaggcugggu

SEQ ID NO: 2099075 - RNA, 13 nt, Human
acuaggcugggug

SEQ ID NO: 2099076 - RNA, 14 nt, Human
acuaggcugggugc

SEQ ID NO: 2099077 - RNA, 19 nt, Human
acuaggcugggugcccaca

SEQ ID NO: 2099078 - RNA, 20 nt, Human
acuaggcugggugcccacag

SEQ ID NO: 2099079 - RNA, 21 nt, Human
acuaggcugggugcccacagc

SEQ ID NO: 2099080 - RNA, 22 nt, Human
acuaggcugggugcccacagcc

SEQ ID NO: 2099081 - RNA, 23 nt, Human
acuaggcugggugcccacagccc

SEQ ID NO: 2099082 - RNA, 21 nt, Human
acuagggaagaaagcagaaca

SEQ ID NO: 2099083 - RNA, 14 nt, Human
acuaaucuuucugc

SEQ ID NO: 2099084 - RNA, 18 nt, Human
acuaaucuauuggguuca

SEQ ID NO: 2099085 - RNA, 20 nt, Human
acuaaucuauuggguucauu

SEQ ID NO: 2099086 - RNA, 22 nt, Human
acuaaucuauuggguucauuau

SEQ ID NO: 2099087 - RNA, 13 nt, Human
acuaaugauguuu

SEQ ID NO: 2099088 - RNA, 18 nt, Human
accuguggccaaguucuu

SEQ ID NO: 2099089 - RNA, 19 nt, Human
accuguggccaaguucuua

SEQ ID NO: 2099090 - RNA, 14 nt, Human
accugugaccagca

SEQ ID NO: 2099091 - RNA, 19 nt, Human
accugugaccagcacuguc

SEQ ID NO: 2099092 - RNA, 23 nt, Human
accugugaccagcacugucucag

SEQ ID NO: 2099093 - RNA, 19 nt, Human
accuguggggauuucuccc

SEQ ID NO: 2099094 - RNA, 20 nt, Human
accuguggggauuucuccca

SEQ ID NO: 2099095 - RNA, 21 nt, Human
accuguggggauuucucccag

SEQ ID NO: 2099096 - RNA, 22 nt, Human
accuguggggauuucucccagc

SEQ ID NO: 2099097 - RNA, 23 nt, Human
accuguggggauuucucccagcu

SEQ ID NO: 2099098 - RNA, 13 nt, Human
accugugucacua

SEQ ID NO: 2099099 - RNA, 19 nt, Human
acgcuggagugcagugagc

SEQ ID NO: 2099100 - RNA, 19 nt, Human
acgcagaugauccaugagu

SEQ ID NO: 2099101 - RNA, 15 nt, Human
acgcagaugauccau

SEQ ID NO: 2099102 - RNA, 17 nt, Human
acgcagaugauccauga

SEQ ID NO: 2099103 - RNA, 20 nt, Human
acgcacgugggucuucaggg

SEQ ID NO: 2099104 - RNA, 19 nt, Human
acgcacgugggucuucagg

SEQ ID NO: 2099105 - RNA, 15 nt, Human
acggaagagccuugc

SEQ ID NO: 2099106 - RNA, 16 nt, Human
acggaagagccuugcg

SEQ ID NO: 2099107 - RNA, 23 nt, Human
acgcugucccuaguaaaaauaca

SEQ ID NO: 2099108 - RNA, 21 nt, Human
acgcugguagagauggaggag

SEQ ID NO: 2099109 - RNA, 11 nt, Human
acgcugucucc

SEQ ID NO: 2099110 - RNA, 12 nt, Human
acgcugucucca

SEQ ID NO: 2099111 - RNA, 14 nt, Human
acgcugucuccaga

SEQ ID NO: 2099112 - RNA, 15 nt, Human
acgcugucuccagac

SEQ ID NO: 2099113 - RNA, 17 nt, Human
acgcugucuccagaccc

SEQ ID NO: 2099114 - RNA, 19 nt, Human
acgcugguagagauggagg

SEQ ID NO: 2099115 - RNA, 20 nt, Human
acgcugguagagauggagga

SEQ ID NO: 2099116 - RNA, 23 nt, Human
acgcugguagagauggaggagga

SEQ ID NO: 2099117 - RNA, 19 nt, Human
acggacacucaaaagcugg

SEQ ID NO: 2099118 - RNA, 15 nt, Human
acggaauaguuggcu

SEQ ID NO: 2099119 - RNA, 19 nt, Human
acgcugucuccagaccccc

SEQ ID NO: 2099120 - RNA, 23 nt, Human
acgucugacaggcaaugcuggcu

SEQ ID NO: 2099121 - RNA, 13 nt, Human
acgucugucuuca

SEQ ID NO: 2099122 - RNA, 16 nt, Human
acgucugacccucucc

SEQ ID NO: 2099123 - RNA, 22 nt, Human
acgucugacccucuccacccca

SEQ ID NO: 2099124 - RNA, 15 nt, Human
acgucugacaggcaa

SEQ ID NO: 2099125 - RNA, 14 nt, Human
acggagauguuuca

SEQ ID NO: 2099126 - RNA, 19 nt, Human
acggagagcgccugccccu

SEQ ID NO: 2099127 - RNA, 12 nt, Human
acggagagaaaa

SEQ ID NO: 2099128 - RNA, 13 nt, Human
acggagagaaaaa

SEQ ID NO: 2099129 - RNA, 14 nt, Human
acggagagaaaaaa

SEQ ID NO: 2099130 - RNA, 13 nt, Human
acggagagcgccu

SEQ ID NO: 2099131 - RNA, 21 nt, Human
acguggaggaaugcuccccca

SEQ ID NO: 2099132 - RNA, 15 nt, Human
acguggcccagagaa

SEQ ID NO: 2099133 - RNA, 19 nt, Human
acggaaggaccuauguuug

SEQ ID NO: 2099134 - RNA, 12 nt, Human
acguggagaggg

SEQ ID NO: 2099135 - RNA, 14 nt, Human
acgucugucuucac

SEQ ID NO: 2099136 - RNA, 15 nt, Human
acgucugucuucaca

SEQ ID NO: 2099137 - RNA, 19 nt, Human
acgucugucuucacagcuc

SEQ ID NO: 2099138 - RNA, 13 nt, Human
acguggagaggga

SEQ ID NO: 2099139 - RNA, 15 nt, Human
acguggagagggaug

SEQ ID NO: 2099140 - RNA, 14 nt, Human
acguggagagggau

SEQ ID NO: 2099141 - RNA, 19 nt, Human
acuaauauuuuaugugaga

SEQ ID NO: 2099142 - RNA, 15 nt, Human
acuaaccuggguucc

SEQ ID NO: 2099143 - RNA, 19 nt, Human
accucaggcuuccuuggca

SEQ ID NO: 2099144 - RNA, 18 nt, Human
accucaggugagaagcag

SEQ ID NO: 2099145 - RNA, 16 nt, Human
accucagugucauuua

SEQ ID NO: 2099146 - RNA, 21 nt, Human
accucagugucauuuaugaaa

SEQ ID NO: 2099147 - RNA, 16 nt, Human
accucaguucccuugg

SEQ ID NO: 2099148 - RNA, 17 nt, Human
accucaguucccuuggc

SEQ ID NO: 2099149 - RNA, 18 nt, Human
accucaguucccuuggcc

SEQ ID NO: 2099150 - RNA, 19 nt, Human
accucaguucccuuggccu

SEQ ID NO: 2099151 - RNA, 20 nt, Human
accucaguucccuuggccuc

SEQ ID NO: 2099152 - RNA, 21 nt, Human
accucaguucccuuggccuca

SEQ ID NO: 2099153 - RNA, 22 nt, Human
accucaguucccuuggccucag

SEQ ID NO: 2099154 - RNA, 23 nt, Human
accucaguucccuuggccucaga

SEQ ID NO: 2099155 - RNA, 19 nt, Human
accucagugucauuuauga

SEQ ID NO: 2099156 - RNA, 18 nt, Human
accucaggcuuccuuggc

SEQ ID NO: 2099157 - RNA, 19 nt, Human
accgggccacagagaaagu

SEQ ID NO: 2099158 - RNA, 15 nt, Human
accgggccacagaga

SEQ ID NO: 2099159 - RNA, 13 nt, Human
accgguacagaaa

SEQ ID NO: 2099160 - RNA, 15 nt, Human
accguccucuuuuuc

SEQ ID NO: 2099161 - RNA, 16 nt, Human
accgucgggggcugag

SEQ ID NO: 2099162 - RNA, 15 nt, Human
accgguugcuucugg

SEQ ID NO: 2099163 - RNA, 16 nt, Human
accgguugcuucuggg

SEQ ID NO: 2099164 - RNA, 18 nt, Human
accgguugcuucugggaa

SEQ ID NO: 2099165 - RNA, 20 nt, Human
accgggcacucagaagacac

SEQ ID NO: 2099166 - RNA, 14 nt, Human
accggcugcuuuuc

SEQ ID NO: 2099167 - RNA, 20 nt, Human
accggcugcuuuucccuaag

SEQ ID NO: 2099168 - RNA, 18 nt, Human
accggcaauuuccggcca

SEQ ID NO: 2099169 - RNA, 16 nt, Human
acccuguuuuauacug

SEQ ID NO: 2099170 - RNA, 18 nt, Human
acccuuaccccuuagccu

SEQ ID NO: 2099171 - RNA, 19 nt, Human
acccuuaccccuuagccuc

SEQ ID NO: 2099172 - RNA, 22 nt, Human
acccuuaccccuuagccucccu

SEQ ID NO: 2099173 - RNA, 20 nt, Human
accggaggcaaaaggcagug

SEQ ID NO: 2099174 - RNA, 13 nt, Human
accggauccuggg

SEQ ID NO: 2099175 - RNA, 14 nt, Human
accggauccugggu

SEQ ID NO: 2099176 - RNA, 16 nt, Human
accggauccugggugg

SEQ ID NO: 2099177 - RNA, 17 nt, Human
accggcaauuuccggcc

SEQ ID NO: 2099178 - RNA, 17 nt, Human
acccuguuaccauuuug

SEQ ID NO: 2099179 - RNA, 21 nt, Human
acccugugguuuccaaggagc

SEQ ID NO: 2099180 - RNA, 17 nt, Human
accccaaggagggagau

SEQ ID NO: 2099181 - RNA, 13 nt, Human
accugugaccagc

SEQ ID NO: 2099182 - RNA, 18 nt, Human
accugccauuugcacccu

SEQ ID NO: 2099183 - RNA, 19 nt, Human
accugccauuugcacccuc

SEQ ID NO: 2099184 - RNA, 15 nt, Human
accugccauuugcac

SEQ ID NO: 2099185 - RNA, 13 nt, Human
accucugccucaa

SEQ ID NO: 2099186 - RNA, 14 nt, Human
accucugccucaau

SEQ ID NO: 2099187 - RNA, 15 nt, Human
accucugccucaaug

SEQ ID NO: 2099188 - RNA, 12 nt, Human
accucugccuca

SEQ ID NO: 2099189 - RNA, 16 nt, Human
cucuugccacugccuc

SEQ ID NO: 2099190 - RNA, 20 nt, Human
cucuugccacugccucuucc

SEQ ID NO: 2099191 - RNA, 19 nt, Human
cucuugccacugccucuuc

SEQ ID NO: 2099192 - RNA, 18 nt, Human
cucuugccacugccucuu

SEQ ID NO: 2099193 - RNA, 17 nt, Human
cucuugccacugccucu

SEQ ID NO: 2099194 - RNA, 20 nt, Human
cugaaaacauaaaaaguuaa

SEQ ID NO: 2099195 - RNA, 14 nt, Human
cugaaaacccagag

SEQ ID NO: 2099196 - RNA, 15 nt, Human
cugaaaacccagaga

SEQ ID NO: 2099197 - RNA, 17 nt, Human
cugaaaacccagagagg

SEQ ID NO: 2099198 - RNA, 22 nt, Human
cucuugcuugugggacuagccu

SEQ ID NO: 2099199 - RNA, 17 nt, Human
cucuugcggucccuucu

SEQ ID NO: 2099200 - RNA, 22 nt, Human
cugaaggaauaaauugcuccuu

SEQ ID NO: 2099201 - RNA, 20 nt, Human
cugaagcuuauuaaugcuaa

SEQ ID NO: 2099202 - RNA, 21 nt, Human
cugaagcuuauuaaugcuaag

SEQ ID NO: 2099203 - RNA, 12 nt, Human
cugaagcuuauu

SEQ ID NO: 2099204 - RNA, 22 nt, Human
cugaaaauuccagaaaggauau

SEQ ID NO: 2099205 - RNA, 14 nt, Human
cugaagcuuauuaa

SEQ ID NO: 2099206 - RNA, 16 nt, Human
cugaagcuuauuaaug

SEQ ID NO: 2099207 - RNA, 17 nt, Human
cugaagcuuauuaaugc

SEQ ID NO: 2099208 - RNA, 18 nt, Human
cugaagcuuauuaaugcu

SEQ ID NO: 2099209 - RNA, 23 nt, Human
cugaagcuuauuaaugcuaaggg

SEQ ID NO: 2099210 - RNA, 16 nt, Human
cugaaaauguaugugu

SEQ ID NO: 2099211 - RNA, 18 nt, Human
cugaaaagacucaguguu

SEQ ID NO: 2099212 - RNA, 19 nt, Human
cugaaaagacucaguguuc

SEQ ID NO: 2099213 - RNA, 16 nt, Human
cugaaaauuaacacug

SEQ ID NO: 2099214 - RNA, 17 nt, Human
cugaaaauuaacacugc

SEQ ID NO: 2099215 - RNA, 13 nt, Human
cugaaaauguuag

SEQ ID NO: 2099216 - RNA, 22 nt, Human
cugaaaauguuuuucugccagg

SEQ ID NO: 2099217 - RNA, 21 nt, Human
cugaaggacauugcggacagc

SEQ ID NO: 2099218 - RNA, 20 nt, Human
cugaaggacauugcggacag

SEQ ID NO: 2099219 - RNA, 19 nt, Human
cugaaggacauugcggaca

SEQ ID NO: 2099220 - RNA, 19 nt, Human
cugaagguaaaauugaaag

SEQ ID NO: 2099221 - RNA, 21 nt, Human
cugaagggguucucacagugg

SEQ ID NO: 2099222 - RNA, 17 nt, Human
cugaagggguucucaca

SEQ ID NO: 2099223 - RNA, 15 nt, Human
cugaagguaaaauug

SEQ ID NO: 2099224 - RNA, 14 nt, Human
cugacagaaggacu

SEQ ID NO: 2099225 - RNA, 13 nt, Human
cugaaggcuuuca

SEQ ID NO: 2099226 - RNA, 18 nt, Human
cugaaggcuuucagggcc

SEQ ID NO: 2099227 - RNA, 20 nt, Human
cugaaggcuuucagggccuc

SEQ ID NO: 2099228 - RNA, 23 nt, Human
cugaaggcuuucagggccuccag

SEQ ID NO: 2099229 - RNA, 14 nt, Human
cugacagacacagg

SEQ ID NO: 2099230 - RNA, 12 nt, Human
cugacagacaca

SEQ ID NO: 2099231 - RNA, 17 nt, Human
cugaagguaaaauugaa

SEQ ID NO: 2099232 - RNA, 15 nt, Human
cugacagacacaggc

SEQ ID NO: 2099233 - RNA, 23 nt, Human
cugacccugcuucaaauauuucc

SEQ ID NO: 2099234 - RNA, 20 nt, Human
cugaccuugaacuccugggc

SEQ ID NO: 2099235 - RNA, 21 nt, Human
cugaccucccucuaauuuauc

SEQ ID NO: 2099236 - RNA, 11 nt, Human
cugaccucagc

SEQ ID NO: 2099237 - RNA, 12 nt, Human
cugaccucagca

SEQ ID NO: 2099238 - RNA, 13 nt, Human
cugaccuccacag

SEQ ID NO: 2099239 - RNA, 14 nt, Human
cugaccuccacagc

SEQ ID NO: 2099240 - RNA, 15 nt, Human
cugaccuccacagcu

SEQ ID NO: 2099241 - RNA, 18 nt, Human
cugaccgaaacagcgcug

SEQ ID NO: 2099242 - RNA, 20 nt, Human
cugaccgaaacagcgcuggg

SEQ ID NO: 2099243 - RNA, 20 nt, Human
cugaccucccucuaauuuau

SEQ ID NO: 2099244 - RNA, 18 nt, Human
cugaccucccucuaauuu

SEQ ID NO: 2099245 - RNA, 14 nt, Human
cugaccucccccuc

SEQ ID NO: 2099246 - RNA, 16 nt, Human
cugaccucccccuccu

SEQ ID NO: 2099247 - RNA, 17 nt, Human
cugaccucccccuccuu

SEQ ID NO: 2099248 - RNA, 18 nt, Human
cugaccucccccuccuuc

SEQ ID NO: 2099249 - RNA, 21 nt, Human
cugaccucccccuccuuccca

SEQ ID NO: 2099250 - RNA, 22 nt, Human
cugaccucccccuccuucccag

SEQ ID NO: 2099251 - RNA, 16 nt, Human
cugaccuccacagcuu

SEQ ID NO: 2099252 - RNA, 14 nt, Human
cucugcagccagcc

SEQ ID NO: 2099253 - RNA, 15 nt, Human
cucugcagccagccc

SEQ ID NO: 2099254 - RNA, 13 nt, Human
cucugcagccagc

SEQ ID NO: 2099255 - RNA, 19 nt, Human
cucugcuccaccacauccu

SEQ ID NO: 2099256 - RNA, 18 nt, Human
cucugcuccaccacaucc

SEQ ID NO: 2099257 - RNA, 15 nt, Human
cucugcuccaccaca

SEQ ID NO: 2099258 - RNA, 16 nt, Human
cucugcuccaccacau

SEQ ID NO: 2099259 - RNA, 12 nt, Human
cucugcuccacc

SEQ ID NO: 2099260 - RNA, 13 nt, Human
cucugcuccacca

SEQ ID NO: 2099261 - RNA, 14 nt, Human
cucugcuccaccac

SEQ ID NO: 2099262 - RNA, 22 nt, Human
cucuguauuugaaucagccuac

SEQ ID NO: 2099263 - RNA, 16 nt, Human
cucugguucuucauuu

SEQ ID NO: 2099264 - RNA, 19 nt, Human
cucugcugacagacacagg

SEQ ID NO: 2099265 - RNA, 18 nt, Human
cucugcugacagacacag

SEQ ID NO: 2099266 - RNA, 17 nt, Human
cucugcugacagacaca

SEQ ID NO: 2099267 - RNA, 15 nt, Human
cucugguuaucuaau

SEQ ID NO: 2099268 - RNA, 12 nt, Human
cuccgcugugug

SEQ ID NO: 2099269 - RNA, 18 nt, Human
cuccgcuguguggauggg

SEQ ID NO: 2099270 - RNA, 22 nt, Human
cuccguccagccgccauugcca

SEQ ID NO: 2099271 - RNA, 22 nt, Human
cuccgucuuagaaguggaccag

SEQ ID NO: 2099272 - RNA, 21 nt, Human
cucuccgaccagacaccuuga

SEQ ID NO: 2099273 - RNA, 13 nt, Human
cucuccucagacu

SEQ ID NO: 2099274 - RNA, 14 nt, Human
cucuccucagacug

SEQ ID NO: 2099275 - RNA, 15 nt, Human
cucuccucagacugc

SEQ ID NO: 2099276 - RNA, 18 nt, Human
cucuccucagacugcuca

SEQ ID NO: 2099277 - RNA, 11 nt, Human
cucucagccaa

SEQ ID NO: 2099278 - RNA, 23 nt, Human
cucucagccaacgaguaauuuau

SEQ ID NO: 2099279 - RNA, 15 nt, Human
cucugaaggacauug

SEQ ID NO: 2099280 - RNA, 13 nt, Human
cucugaagagugg

SEQ ID NO: 2099281 - RNA, 21 nt, Human
cucugaagaguggguuucaca

SEQ ID NO: 2099282 - RNA, 22 nt, Human
cucugaagaguggguuucacaa

SEQ ID NO: 2099283 - RNA, 23 nt, Human
cucugaagaguggguuucacaag

SEQ ID NO: 2099284 - RNA, 14 nt, Human
cucucacugugucc

SEQ ID NO: 2099285 - RNA, 15 nt, Human
cucucacuguguccc

SEQ ID NO: 2099286 - RNA, 17 nt, Human
cucucagaauucuucag

SEQ ID NO: 2099287 - RNA, 16 nt, Human
cucucagaagguauuc

SEQ ID NO: 2099288 - RNA, 17 nt, Human
cucucaaagcaaauaau

SEQ ID NO: 2099289 - RNA, 13 nt, Human
cucuauuuagcau

SEQ ID NO: 2099290 - RNA, 14 nt, Human
cucuauuuagcaug

SEQ ID NO: 2099291 - RNA, 10 nt, Human
cucuauuuaa

SEQ ID NO: 2099292 - RNA, 12 nt, Human
cucuauuuaaau

SEQ ID NO: 2099293 - RNA, 14 nt, Human
cucuauuuaaauuc

SEQ ID NO: 2099294 - RNA, 15 nt, Human
cucuauuuaaauucu

SEQ ID NO: 2099295 - RNA, 16 nt, Human
cucuauuuaaauucuu

SEQ ID NO: 2099296 - RNA, 17 nt, Human
cucuauuuaaauucuuu

SEQ ID NO: 2099297 - RNA, 18 nt, Human
cucuauuuaaauucuuuu

SEQ ID NO: 2099298 - RNA, 22 nt, Human
cucuauuaccacugaagauaga

SEQ ID NO: 2099299 - RNA, 23 nt, Human
cucuauuaccacugaagauagaa

SEQ ID NO: 2099300 - RNA, 23 nt, Human
cucuauuagacuuuagaaauaaa

SEQ ID NO: 2099301 - RNA, 24 nt, Human
cucuauuagacuuuagaaauaaau

SEQ ID NO: 2099302 - RNA, 15 nt, Human
cuccgccucugcugg

SEQ ID NO: 2099303 - RNA, 18 nt, Human
cuccgccuucacuccggu

SEQ ID NO: 2099304 - RNA, 19 nt, Human
cuccgccuucacuccggug

SEQ ID NO: 2099305 - RNA, 19 nt, Human
cuccgcuuucuacccagcg

SEQ ID NO: 2099306 - RNA, 21 nt, Human
cuccgccuucacuccggugug

SEQ ID NO: 2099307 - RNA, 16 nt, Human
cuccgccucugcuggc

SEQ ID NO: 2099308 - RNA, 15 nt, Human
cucccuccucugucc

SEQ ID NO: 2099309 - RNA, 12 nt, Human
cucccugaugua

SEQ ID NO: 2099310 - RNA, 15 nt, Human
cucccugauguacag

SEQ ID NO: 2099311 - RNA, 12 nt, Human
cucccuccucug

SEQ ID NO: 2099312 - RNA, 17 nt, Human
cucccuccucaccucug

SEQ ID NO: 2099313 - RNA, 18 nt, Human
cucccuccucaccucugg

SEQ ID NO: 2099314 - RNA, 19 nt, Human
cucccuccucaccucugga

SEQ ID NO: 2099315 - RNA, 21 nt, Human
cucccuccucaccucuggacu

SEQ ID NO: 2099316 - RNA, 15 nt, Human
cucccugacccugca

SEQ ID NO: 2099317 - RNA, 16 nt, Human
cucccugacccugcag

SEQ ID NO: 2099318 - RNA, 18 nt, Human
cucccugacccugcagag

SEQ ID NO: 2099319 - RNA, 21 nt, Human
cucccugacccugcagagaug

SEQ ID NO: 2099320 - RNA, 23 nt, Human
cucccccugggcucugccccagc

SEQ ID NO: 2099321 - RNA, 14 nt, Human
cuccccgcuucugc

SEQ ID NO: 2099322 - RNA, 14 nt, Human
cucccuccucaccu

SEQ ID NO: 2099323 - RNA, 15 nt, Human
cucccuccucaccuc

SEQ ID NO: 2099324 - RNA, 14 nt, Human
cuccccucccuccu

SEQ ID NO: 2099325 - RNA, 12 nt, Human
cuccagucugcu

SEQ ID NO: 2099326 - RNA, 14 nt, Human
cuccaguccugcuc

SEQ ID NO: 2099327 - RNA, 15 nt, Human
cuccaguccugcucu

SEQ ID NO: 2099328 - RNA, 16 nt, Human
cuccaguccugcucuc

SEQ ID NO: 2099329 - RNA, 17 nt, Human
cuccaguccugcucucu

SEQ ID NO: 2099330 - RNA, 20 nt, Human
cuccaguccugcucucuacc

SEQ ID NO: 2099331 - RNA, 22 nt, Human
cuccaguccugcucucuaccca

SEQ ID NO: 2099332 - RNA, 23 nt, Human
cuccaguccugcucucuacccag

SEQ ID NO: 2099333 - RNA, 16 nt, Human
cuccagucuuccaccu

SEQ ID NO: 2099334 - RNA, 19 nt, Human
cuccagucuuccaccugga

SEQ ID NO: 2099335 - RNA, 20 nt, Human
cuccagucuuccaccuggaa

SEQ ID NO: 2099336 - RNA, 15 nt, Human
cuccagucugcugcc

SEQ ID NO: 2099337 - RNA, 17 nt, Human
cuccagucugcugcccu

SEQ ID NO: 2099338 - RNA, 20 nt, Human
cuccagucugcugcccucca

SEQ ID NO: 2099339 - RNA, 21 nt, Human
cuccagucugcugcccuccau

SEQ ID NO: 2099340 - RNA, 13 nt, Human
cucccaccucagc

SEQ ID NO: 2099341 - RNA, 13 nt, Human
cucccccugccag

SEQ ID NO: 2099342 - RNA, 16 nt, Human
cucccccugccagugc

SEQ ID NO: 2099343 - RNA, 17 nt, Human
cucccccugccagugcc

SEQ ID NO: 2099344 - RNA, 18 nt, Human
cucccccugccagugccu

SEQ ID NO: 2099345 - RNA, 19 nt, Human
cucccccugccagugccuu

SEQ ID NO: 2099346 - RNA, 11 nt, Human
cucccccuggg

SEQ ID NO: 2099347 - RNA, 12 nt, Human
cucccccugggc

SEQ ID NO: 2099348 - RNA, 13 nt, Human
cucccccugggcu

SEQ ID NO: 2099349 - RNA, 12 nt, Human
cucccaccucag

SEQ ID NO: 2099350 - RNA, 22 nt, Human
cuccagguccucuacuuaauga

SEQ ID NO: 2099351 - RNA, 14 nt, Human
cuccagaagccucu

SEQ ID NO: 2099352 - RNA, 15 nt, Human
cuccagaagccucug

SEQ ID NO: 2099353 - RNA, 16 nt, Human
cuccagaagccucugg

SEQ ID NO: 2099354 - RNA, 17 nt, Human
cuccagaagccucuggc

SEQ ID NO: 2099355 - RNA, 18 nt, Human
cuccagaagccucuggcu

SEQ ID NO: 2099356 - RNA, 19 nt, Human
cuccagaagccucuggcua

SEQ ID NO: 2099357 - RNA, 20 nt, Human
cuccagaagccucuggcuag

SEQ ID NO: 2099358 - RNA, 21 nt, Human
cuccagaagccucuggcuaga

SEQ ID NO: 2099359 - RNA, 17 nt, Human
cuccagacccaccacac

SEQ ID NO: 2099360 - RNA, 12 nt, Human
cuccagaccccc

SEQ ID NO: 2099361 - RNA, 16 nt, Human
cuccagacccccaccc

SEQ ID NO: 2099362 - RNA, 18 nt, Human
cuccagacccccaccccu

SEQ ID NO: 2099363 - RNA, 21 nt, Human
cuccagacccccaccccuucc

SEQ ID NO: 2099364 - RNA, 22 nt, Human
cuccagacccccaccccuuccc

SEQ ID NO: 2099365 - RNA, 14 nt, Human
cuccagacccccag

SEQ ID NO: 2099366 - RNA, 16 nt, Human
cuccagacccccagca

SEQ ID NO: 2099367 - RNA, 14 nt, Human
cucagccuccugag

SEQ ID NO: 2099368 - RNA, 22 nt, Human
cucagccuccugaguagcugga

SEQ ID NO: 2099369 - RNA, 12 nt, Human
cucagccuggug

SEQ ID NO: 2099370 - RNA, 16 nt, Human
cucagccuggugggcc

SEQ ID NO: 2099371 - RNA, 18 nt, Human
cucagccuggugggccuc

SEQ ID NO: 2099372 - RNA, 19 nt, Human
cucagccuggugggccucc

SEQ ID NO: 2099373 - RNA, 20 nt, Human
cucagccuggugggccuccu

SEQ ID NO: 2099374 - RNA, 13 nt, Human
cucagccugugcu

SEQ ID NO: 2099375 - RNA, 14 nt, Human
cucagccugugcug

SEQ ID NO: 2099376 - RNA, 23 nt, Human
cucagccuuccccuugcccaggg

SEQ ID NO: 2099377 - RNA, 15 nt, Human
cucagccuccugugu

SEQ ID NO: 2099378 - RNA, 16 nt, Human
cucagccugugcugcc

SEQ ID NO: 2099379 - RNA, 18 nt, Human
cucagccugugcugcccg

SEQ ID NO: 2099380 - RNA, 22 nt, Human
cucagccuuccccuugcccagg

SEQ ID NO: 2099381 - RNA, 13 nt, Human
cucagcggggaca

SEQ ID NO: 2099382 - RNA, 16 nt, Human
cucaggccaccugccc

SEQ ID NO: 2099383 - RNA, 14 nt, Human
cucagcgaaugaau

SEQ ID NO: 2099384 - RNA, 11 nt, Human
cucagccuugg

SEQ ID NO: 2099385 - RNA, 15 nt, Human
cucagccuuggauaa

SEQ ID NO: 2099386 - RNA, 18 nt, Human
cucaggccaccugccccc

SEQ ID NO: 2099387 - RNA, 19 nt, Human
cucaggccaccugcccccu

SEQ ID NO: 2099388 - RNA, 22 nt, Human
cucaggccaccugcccccuucu

SEQ ID NO: 2099389 - RNA, 23 nt, Human
cucaggccaccugcccccuucuc

SEQ ID NO: 2099390 - RNA, 13 nt, Human
cucagccucccaa

SEQ ID NO: 2099391 - RNA, 19 nt, Human
cuauccacccagcccauuc

SEQ ID NO: 2099392 - RNA, 12 nt, Human
cuaucccauccc

SEQ ID NO: 2099393 - RNA, 13 nt, Human
cuaucccauccca

SEQ ID NO: 2099394 - RNA, 14 nt, Human
cuaucccaucccau

SEQ ID NO: 2099395 - RNA, 16 nt, Human
cuaucccaucccaucc

SEQ ID NO: 2099396 - RNA, 12 nt, Human
cuauccacccag

SEQ ID NO: 2099397 - RNA, 13 nt, Human
cuauccacccagc

SEQ ID NO: 2099398 - RNA, 14 nt, Human
cuauccacccagcc

SEQ ID NO: 2099399 - RNA, 15 nt, Human
cuauccacccagccc

SEQ ID NO: 2099400 - RNA, 16 nt, Human
cuauccacccagccca

SEQ ID NO: 2099401 - RNA, 16 nt, Human
cucagccucccaaagu

SEQ ID NO: 2099402 - RNA, 14 nt, Human
cucagccucccaaa

SEQ ID NO: 2099403 - RNA, 17 nt, Human
cuauccacccagcccau

SEQ ID NO: 2099404 - RNA, 21 nt, Human
cucagccucccaaagugcugg

SEQ ID NO: 2099405 - RNA, 23 nt, Human
cucagccucccgaauagcuggga

SEQ ID NO: 2099406 - RNA, 13 nt, Human
cucagccucccag

SEQ ID NO: 2099407 - RNA, 20 nt, Human
cucagccucccagagugcug

SEQ ID NO: 2099408 - RNA, 20 nt, Human
cucagccuccggaguagcug

SEQ ID NO: 2099409 - RNA, 13 nt, Human
cucagccucccga

SEQ ID NO: 2099410 - RNA, 22 nt, Human
cucagccucccaaagugcuggg

SEQ ID NO: 2099411 - RNA, 15 nt, Human
cucaggccaggugca

SEQ ID NO: 2099412 - RNA, 18 nt, Human
cucaggccaggugcagug

SEQ ID NO: 2099413 - RNA, 17 nt, Human
cucagucuggcccuucc

SEQ ID NO: 2099414 - RNA, 18 nt, Human
cucagucuggcccuuccu

SEQ ID NO: 2099415 - RNA, 13 nt, Human
cucagugccacua

SEQ ID NO: 2099416 - RNA, 22 nt, Human
cucaguggacuuuccacccccu

SEQ ID NO: 2099417 - RNA, 16 nt, Human
cucaguggacuuucca

SEQ ID NO: 2099418 - RNA, 19 nt, Human
cucaguggacuuuccaccc

SEQ ID NO: 2099419 - RNA, 20 nt, Human
cucaguggacuuuccacccc

SEQ ID NO: 2099420 - RNA, 14 nt, Human
cucagugucauuua

SEQ ID NO: 2099421 - RNA, 17 nt, Human
cucagugucauuuauga

SEQ ID NO: 2099422 - RNA, 18 nt, Human
cucagugucauuuaugaa

SEQ ID NO: 2099423 - RNA, 22 nt, Human
cucagugucauuuaugaaaaga

SEQ ID NO: 2099424 - RNA, 12 nt, Human
cuccaacaauaa

SEQ ID NO: 2099425 - RNA, 15 nt, Human
cuccaaaugagaucu

SEQ ID NO: 2099426 - RNA, 20 nt, Human
ccuucugaaaaaguauccug

SEQ ID NO: 2099427 - RNA, 21 nt, Human
ccuucugcuggauaaaaugag

SEQ ID NO: 2099428 - RNA, 20 nt, Human
ccuucugcuggauaaaauga

SEQ ID NO: 2099429 - RNA, 12 nt, Human
ccuucugggaaa

SEQ ID NO: 2099430 - RNA, 22 nt, Human
ccuucuguaaagguuuuuggaa

SEQ ID NO: 2099431 - RNA, 20 nt, Human
ccuuuuucuuuauaaacuuu

SEQ ID NO: 2099432 - RNA, 16 nt, Human
ccuuuuucuuuauaaa

SEQ ID NO: 2099433 - RNA, 17 nt, Human
ccuuuuucccaauaaau

SEQ ID NO: 2099434 - RNA, 13 nt, Human
ccuuuuuccuucc

SEQ ID NO: 2099435 - RNA, 15 nt, Human
ccuuuuggguuucug

SEQ ID NO: 2099436 - RNA, 21 nt, Human
ccuuuuggguuucugcccugc

SEQ ID NO: 2099437 - RNA, 12 nt, Human
ccuuuuggcacu

SEQ ID NO: 2099438 - RNA, 12 nt, Human
ccuuuuggcccc

SEQ ID NO: 2099439 - RNA, 19 nt, Human
ccuuuuggcccccgagcug

SEQ ID NO: 2099440 - RNA, 20 nt, Human
ccuuuuggcccccgagcugg

SEQ ID NO: 2099441 - RNA, 21 nt, Human
ccuuuuggcccccgagcuggg

SEQ ID NO: 2099442 - RNA, 23 nt, Human
ccuuuuggcccccgagcuggggg

SEQ ID NO: 2099443 - RNA, 19 nt, Human
ccuuuuguaccauggugug

SEQ ID NO: 2099444 - RNA, 14 nt, Human
cgaccaccugccca

SEQ ID NO: 2099445 - RNA, 12 nt, Human
cgaccaccugcc

SEQ ID NO: 2099446 - RNA, 23 nt, Human
cgaccagacaccuugacagggca

SEQ ID NO: 2099447 - RNA, 19 nt, Human
cgacauggacccggagcua

SEQ ID NO: 2099448 - RNA, 18 nt, Human
ccuuuagcacguuuaaag

SEQ ID NO: 2099449 - RNA, 20 nt, Human
ccuuuagcacguuuaaaguu

SEQ ID NO: 2099450 - RNA, 21 nt, Human
ccuuuagcacguuuaaaguuc

SEQ ID NO: 2099451 - RNA, 23 nt, Human
ccuuuagcacguuuaaaguucug

SEQ ID NO: 2099452 - RNA, 14 nt, Human
ccuugccuccugug

SEQ ID NO: 2099453 - RNA, 20 nt, Human
ccuuuagcgcccaguugggu

SEQ ID NO: 2099454 - RNA, 14 nt, Human
ccuuuagcgcccag

SEQ ID NO: 2099455 - RNA, 20 nt, Human
ccuuuccaguggccuggcuc

SEQ ID NO: 2099456 - RNA, 11 nt, Human
ccuuuccauaa

SEQ ID NO: 2099457 - RNA, 22 nt, Human
ccuuucccaacacuucagacug

SEQ ID NO: 2099458 - RNA, 14 nt, Human
ccuuucccuaaaga

SEQ ID NO: 2099459 - RNA, 12 nt, Human
ccuuuucuuguu

SEQ ID NO: 2099460 - RNA, 17 nt, Human
ccuuuucuuguuuauca

SEQ ID NO: 2099461 - RNA, 21 nt, Human
ccuuuucuuguuuaucagcag

SEQ ID NO: 2099462 - RNA, 15 nt, Human
ccuuuucuccuaucu

SEQ ID NO: 2099463 - RNA, 18 nt, Human
ccuuuucuccuaucuuca

SEQ ID NO: 2099464 - RNA, 13 nt, Human
ccuuuucucuuca

SEQ ID NO: 2099465 - RNA, 11 nt, Human
ccuugcccaga

SEQ ID NO: 2099466 - RNA, 12 nt, Human
ccuugcccagag

SEQ ID NO: 2099467 - RNA, 13 nt, Human
ccuugcccagaga

SEQ ID NO: 2099468 - RNA, 14 nt, Human
ccuugcccagagau

SEQ ID NO: 2099469 - RNA, 19 nt, Human
ccuugcccagagaugccuc

SEQ ID NO: 2099470 - RNA, 21 nt, Human
ccuugcccagagaugccucca

SEQ ID NO: 2099471 - RNA, 23 nt, Human
ccuugcccagagaugccuccacc

SEQ ID NO: 2099472 - RNA, 13 nt, Human
ccuugcccagggc

SEQ ID NO: 2099473 - RNA, 15 nt, Human
ccuugcccagggcuc

SEQ ID NO: 2099474 - RNA, 16 nt, Human
ccuugcccagggcuca

SEQ ID NO: 2099475 - RNA, 17 nt, Human
ccuugcccagggcucag

SEQ ID NO: 2099476 - RNA, 18 nt, Human
ccuugcccagggcucagc

SEQ ID NO: 2099477 - RNA, 20 nt, Human
ccuugcccagggcucagccu

SEQ ID NO: 2099478 - RNA, 12 nt, Human
ccuugccuccug

SEQ ID NO: 2099479 - RNA, 15 nt, Human
ccuugccuccugugu

SEQ ID NO: 2099480 - RNA, 15 nt, Human
cgaccagagccccac

SEQ ID NO: 2099481 - RNA, 12 nt, Human
cgaccucagccu

SEQ ID NO: 2099482 - RNA, 13 nt, Human
cgaccucagccuu

SEQ ID NO: 2099483 - RNA, 14 nt, Human
cgaccucagccuuc

SEQ ID NO: 2099484 - RNA, 15 nt, Human
cgaccucagccuucc

SEQ ID NO: 2099485 - RNA, 12 nt, Human
cgaccucggugg

SEQ ID NO: 2099486 - RNA, 14 nt, Human
cgaccucguccucc

SEQ ID NO: 2099487 - RNA, 16 nt, Human
cgaccucguccucccc

SEQ ID NO: 2099488 - RNA, 19 nt, Human
cgaccucguccucccccug

SEQ ID NO: 2099489 - RNA, 22 nt, Human
cgaccucguccucccccugcca

SEQ ID NO: 2099490 - RNA, 23 nt, Human
cgaccucguccucccccugccag

SEQ ID NO: 2099491 - RNA, 16 nt, Human
cgaguagcugggacua

SEQ ID NO: 2099492 - RNA, 15 nt, Human
cgaguagcugggacu

SEQ ID NO: 2099493 - RNA, 14 nt, Human
cgaguagcugggac

SEQ ID NO: 2099494 - RNA, 13 nt, Human
cgaguagcuggga

SEQ ID NO: 2099495 - RNA, 19 nt, Human
cgagugugugcaugugugu

SEQ ID NO: 2099496 - RNA, 11 nt, Human
cgagugugugc

SEQ ID NO: 2099497 - RNA, 18 nt, Human
cgagugugugcaugugug

SEQ ID NO: 2099498 - RNA, 13 nt, Human
cgagugggaagga

SEQ ID NO: 2099499 - RNA, 17 nt, Human
cgaguggauagaugccc

SEQ ID NO: 2099500 - RNA, 20 nt, Human
cgaguggauagaugcccugc

SEQ ID NO: 2099501 - RNA, 21 nt, Human
cgaguggauagaugcccugcu

SEQ ID NO: 2099502 - RNA, 22 nt, Human
cgaguggauagaugcccugcua

SEQ ID NO: 2099503 - RNA, 23 nt, Human
cgaguggauagaugcccugcuag

SEQ ID NO: 2099504 - RNA, 14 nt, Human
cgccuacaggagug

SEQ ID NO: 2099505 - RNA, 11 nt, Human
cgccucccagc

SEQ ID NO: 2099506 - RNA, 14 nt, Human
cgccucccagccug

SEQ ID NO: 2099507 - RNA, 13 nt, Human
cgccguggcugcg

SEQ ID NO: 2099508 - RNA, 22 nt, Human
cgaguuguggaaagccucugcu

SEQ ID NO: 2099509 - RNA, 23 nt, Human
cgccaaggcugggggaagaagcu

SEQ ID NO: 2099510 - RNA, 13 nt, Human
cgccaaggcuggg

SEQ ID NO: 2099511 - RNA, 16 nt, Human
cgccaaggcuggggga

SEQ ID NO: 2099512 - RNA, 12 nt, Human
cgccaaggcugg

SEQ ID NO: 2099513 - RNA, 15 nt, Human
cgccucccagccugg

SEQ ID NO: 2099514 - RNA, 20 nt, Human
cgccucccuccccugcccuc

SEQ ID NO: 2099515 - RNA, 18 nt, Human
cggcucacugcagccuca

SEQ ID NO: 2099516 - RNA, 19 nt, Human
cggcucacugcagccucaa

SEQ ID NO: 2099517 - RNA, 22 nt, Human
cggcuccucucuaaccuccuuu

SEQ ID NO: 2099518 - RNA, 23 nt, Human
cggcuccucucuaaccuccuuua

SEQ ID NO: 2099519 - RNA, 20 nt, Human
cggcucgagcaguccugccu

SEQ ID NO: 2099520 - RNA, 12 nt, Human
cggcuccuggac

SEQ ID NO: 2099521 - RNA, 17 nt, Human
cggcuccuggacucauu

SEQ ID NO: 2099522 - RNA, 21 nt, Human
cggcuccuggacucauugcuu

SEQ ID NO: 2099523 - RNA, 18 nt, Human
cggaguaucugggaacug

SEQ ID NO: 2099524 - RNA, 13 nt, Human
cggagguugcagg

SEQ ID NO: 2099525 - RNA, 19 nt, Human
cggagcuaacacuggcccc

SEQ ID NO: 2099526 - RNA, 17 nt, Human
cggagcuaacacuggcc

SEQ ID NO: 2099527 - RNA, 18 nt, Human
cggagcuaacacuggccc

SEQ ID NO: 2099528 - RNA, 22 nt, Human
cggagccucauccgaggcaggg

SEQ ID NO: 2099529 - RNA, 20 nt, Human
cggagccucauccgaggcag

SEQ ID NO: 2099530 - RNA, 21 nt, Human
cggagccucauccgaggcagg

SEQ ID NO: 2099531 - RNA, 18 nt, Human
cggaggggccuggcagcc

SEQ ID NO: 2099532 - RNA, 16 nt, Human
cggaggggccuggcag

SEQ ID NO: 2099533 - RNA, 14 nt, Human
cggagucccaccuu

SEQ ID NO: 2099534 - RNA, 17 nt, Human
cggccuuuguugcucag

SEQ ID NO: 2099535 - RNA, 20 nt, Human
cggcgcgguggcucacgccu

SEQ ID NO: 2099536 - RNA, 15 nt, Human
cggcgcccccagugu

SEQ ID NO: 2099537 - RNA, 17 nt, Human
cggcgcccccagugugc

SEQ ID NO: 2099538 - RNA, 13 nt, Human
cggcgcgguggcu

SEQ ID NO: 2099539 - RNA, 19 nt, Human
cggagauuggacggccuga

SEQ ID NO: 2099540 - RNA, 23 nt, Human
cuagaaaugauccccagcuguuu

SEQ ID NO: 2099541 - RNA, 13 nt, Human
cuagaaauuuuuc

SEQ ID NO: 2099542 - RNA, 23 nt, Human
cuagaaauuuuucagaugcuucu

SEQ ID NO: 2099543 - RNA, 19 nt, Human
cuagaaauuccccacccug

SEQ ID NO: 2099544 - RNA, 15 nt, Human
cuagaacugaauuuu

SEQ ID NO: 2099545 - RNA, 18 nt, Human
cuagaacucuccaucuua

SEQ ID NO: 2099546 - RNA, 12 nt, Human
cuagcagcaggg

SEQ ID NO: 2099547 - RNA, 13 nt, Human
cuagaagaaauga

SEQ ID NO: 2099548 - RNA, 14 nt, Human
cuagaagaaaugaa

SEQ ID NO: 2099549 - RNA, 15 nt, Human
cuagaagaaaugaaa

SEQ ID NO: 2099550 - RNA, 16 nt, Human
cuagaagaaaugaaau

SEQ ID NO: 2099551 - RNA, 17 nt, Human
cuagaagaaaugaaauu

SEQ ID NO: 2099552 - RNA, 18 nt, Human
cuagaagaaaugaaauuu

SEQ ID NO: 2099553 - RNA, 20 nt, Human
cuagaagaaaugaaauuuua

SEQ ID NO: 2099554 - RNA, 21 nt, Human
cuagaagaaaugaaauuuuac

SEQ ID NO: 2099555 - RNA, 22 nt, Human
cuagaagaaaugaaauuuuacc

SEQ ID NO: 2099556 - RNA, 22 nt, Human
cuagcagcagggagggcuucug

SEQ ID NO: 2099557 - RNA, 23 nt, Human
cuagcagcagggagggcuucugc

SEQ ID NO: 2099558 - RNA, 17 nt, Human
cuaccugaacacuuauu

SEQ ID NO: 2099559 - RNA, 22 nt, Human
cuaccugaacacuuauugcuuu

SEQ ID NO: 2099560 - RNA, 23 nt, Human
cuaccugaacacuuauugcuuug

SEQ ID NO: 2099561 - RNA, 22 nt, Human
cuauaaccccagcucccuagga

SEQ ID NO: 2099562 - RNA, 21 nt, Human
cuaguucuucaucccacucca

SEQ ID NO: 2099563 - RNA, 18 nt, Human
cuauaaaugguguuuuuu

SEQ ID NO: 2099564 - RNA, 16 nt, Human
cuauaaaugguguuuu

SEQ ID NO: 2099565 - RNA, 23 nt, Human
cuauaaaugguguuuuuuuaaua

SEQ ID NO: 2099566 - RNA, 15 nt, Human
cuaguugaggaguuu

SEQ ID NO: 2099567 - RNA, 18 nt, Human
cuauaaccccagcucccu

SEQ ID NO: 2099568 - RNA, 14 nt, Human
cuagggcugggugu

SEQ ID NO: 2099569 - RNA, 14 nt, Human
cuagggggaaguga

SEQ ID NO: 2099570 - RNA, 21 nt, Human
cuagggaaaaaccagcgugug

SEQ ID NO: 2099571 - RNA, 21 nt, Human
cuaggcuucagcauauuuaua

SEQ ID NO: 2099572 - RNA, 23 nt, Human
cuaggcuucagcauauuuauagc

SEQ ID NO: 2099573 - RNA, 20 nt, Human
cuagggauucaggcugcuug

SEQ ID NO: 2099574 - RNA, 17 nt, Human
cuagggauucaggcugc

SEQ ID NO: 2099575 - RNA, 18 nt, Human
cuagggauucaggcugcu

SEQ ID NO: 2099576 - RNA, 19 nt, Human
cuagggauguucuggcccu

SEQ ID NO: 2099577 - RNA, 15 nt, Human
cuagggauucaggcu

SEQ ID NO: 2099578 - RNA, 16 nt, Human
cuagggauucaggcug

SEQ ID NO: 2099579 - RNA, 19 nt, Human
cuagggaaaaaccagcgug

SEQ ID NO: 2099580 - RNA, 17 nt, Human
cuaggcuggagcccagg

SEQ ID NO: 2099581 - RNA, 20 nt, Human
cuaggcuggagcccagggag

SEQ ID NO: 2099582 - RNA, 12 nt, Human
cuaggcugggug

SEQ ID NO: 2099583 - RNA, 13 nt, Human
cuaggcugggugc

SEQ ID NO: 2099584 - RNA, 17 nt, Human
cuaggcugggugcccac

SEQ ID NO: 2099585 - RNA, 18 nt, Human
cuaggcugggugcccaca

SEQ ID NO: 2099586 - RNA, 19 nt, Human
cuaggcugggugcccacag

SEQ ID NO: 2099587 - RNA, 20 nt, Human
cuaggcugggugcccacagc

SEQ ID NO: 2099588 - RNA, 21 nt, Human
cuaggcugggugcccacagcc

SEQ ID NO: 2099589 - RNA, 22 nt, Human
cuaggcugggugcccacagccc

SEQ ID NO: 2099590 - RNA, 13 nt, Human
cuagccucuccag

SEQ ID NO: 2099591 - RNA, 13 nt, Human
cuagccgaccuca

SEQ ID NO: 2099592 - RNA, 14 nt, Human
cuagccgaccucag

SEQ ID NO: 2099593 - RNA, 15 nt, Human
cuagccgaccucagc

SEQ ID NO: 2099594 - RNA, 16 nt, Human
cuagccgaccucagcc

SEQ ID NO: 2099595 - RNA, 17 nt, Human
cuagccgaccucagccu

SEQ ID NO: 2099596 - RNA, 18 nt, Human
cuagccgaccucagccuu

SEQ ID NO: 2099597 - RNA, 19 nt, Human
cuagccgaccucagccuuc

SEQ ID NO: 2099598 - RNA, 20 nt, Human
cuagccgaccucagccuucc

SEQ ID NO: 2099599 - RNA, 20 nt, Human
cuacaguguacagucuugua

SEQ ID NO: 2099600 - RNA, 23 nt, Human
cuacaguuaggguugaguuacuu

SEQ ID NO: 2099601 - RNA, 13 nt, Human
cuacaguugaaaa

SEQ ID NO: 2099602 - RNA, 15 nt, Human
cuacaguguacaguc

SEQ ID NO: 2099603 - RNA, 14 nt, Human
cuacaguguacagu

SEQ ID NO: 2099604 - RNA, 16 nt, Human
cuacaguguacagucu

SEQ ID NO: 2099605 - RNA, 17 nt, Human
cuacaguguacagucuu

SEQ ID NO: 2099606 - RNA, 18 nt, Human
cuacaugacgacaaagcu

SEQ ID NO: 2099607 - RNA, 19 nt, Human
cuacaugacgacaaagcug

SEQ ID NO: 2099608 - RNA, 21 nt, Human
cuacaugacgacaaagcugcu

SEQ ID NO: 2099609 - RNA, 18 nt, Human
cuacauacaauuccaaac

SEQ ID NO: 2099610 - RNA, 22 nt, Human
cuaagugauccucccaccucag

SEQ ID NO: 2099611 - RNA, 20 nt, Human
cuaagugauccucccaccuc

SEQ ID NO: 2099612 - RNA, 14 nt, Human
cuaagugaaaaggu

SEQ ID NO: 2099613 - RNA, 17 nt, Human
cuaauuuaacccagcuc

SEQ ID NO: 2099614 - RNA, 19 nt, Human
cuaauuggccucuuuaaga

SEQ ID NO: 2099615 - RNA, 23 nt, Human
cuacaaaaaauuagaaauuggcu

SEQ ID NO: 2099616 - RNA, 17 nt, Human
cuaauuuuuaagcaaaa

SEQ ID NO: 2099617 - RNA, 17 nt, Human
cggcucuggccuccaag

SEQ ID NO: 2099618 - RNA, 20 nt, Human
cggcugagucaugaucuccc

SEQ ID NO: 2099619 - RNA, 17 nt, Human
cgugacagugccuggga

SEQ ID NO: 2099620 - RNA, 18 nt, Human
cgugacauccccacccuu

SEQ ID NO: 2099621 - RNA, 13 nt, Human
cgugacucaccca

SEQ ID NO: 2099622 - RNA, 16 nt, Human
cgugacagugccuggg

SEQ ID NO: 2099623 - RNA, 23 nt, Human
cgugacuguauuauacaugggua

SEQ ID NO: 2099624 - RNA, 12 nt, Human
cgugagaagcau

SEQ ID NO: 2099625 - RNA, 23 nt, Human
cgugagagugucuucacggcagg

SEQ ID NO: 2099626 - RNA, 20 nt, Human
cgugacugccccaacuccug

SEQ ID NO: 2099627 - RNA, 21 nt, Human
cgugacugccccaacuccugg

SEQ ID NO: 2099628 - RNA, 22 nt, Human
cgugacugccccaacuccugga

SEQ ID NO: 2099629 - RNA, 23 nt, Human
cgugacugccccaacuccuggaa

SEQ ID NO: 2099630 - RNA, 14 nt, Human
cgugacucacccaa

SEQ ID NO: 2099631 - RNA, 15 nt, Human
cgugacucacccaag

SEQ ID NO: 2099632 - RNA, 16 nt, Human
cgugacucacccaagc

SEQ ID NO: 2099633 - RNA, 17 nt, Human
cgugacucacccaagca

SEQ ID NO: 2099634 - RNA, 18 nt, Human
cgugacucacccaagcau

SEQ ID NO: 2099635 - RNA, 13 nt, Human
cgugacugcccca

SEQ ID NO: 2099636 - RNA, 16 nt, Human
cgugacugccccaacu

SEQ ID NO: 2099637 - RNA, 17 nt, Human
cgugacugccccaacuc

SEQ ID NO: 2099638 - RNA, 22 nt, Human
cgugggucuucagggggccagg

SEQ ID NO: 2099639 - RNA, 23 nt, Human
cguggguguguguagccaagguc

SEQ ID NO: 2099640 - RNA, 19 nt, Human
cgugagcagugugucuccu

SEQ ID NO: 2099641 - RNA, 20 nt, Human
cguggggcagcacagagagg

SEQ ID NO: 2099642 - RNA, 21 nt, Human
cguggugaucaauuaaaugua

SEQ ID NO: 2099643 - RNA, 14 nt, Human
cgugucuguauuua

SEQ ID NO: 2099644 - RNA, 15 nt, Human
cguggugauuuagca

SEQ ID NO: 2099645 - RNA, 22 nt, Human
cgugucuguauuuaugugugag

SEQ ID NO: 2099646 - RNA, 18 nt, Human
cgugugcacacacaccac

SEQ ID NO: 2099647 - RNA, 16 nt, Human
cgugugcgugcaugug

SEQ ID NO: 2099648 - RNA, 17 nt, Human
cuaaacuuuaauaugua

SEQ ID NO: 2099649 - RNA, 20 nt, Human
cuaacugugcucaagagguu

SEQ ID NO: 2099650 - RNA, 13 nt, Human
cuaacuuuugugu

SEQ ID NO: 2099651 - RNA, 17 nt, Human
cuaacuuuugugugaaa

SEQ ID NO: 2099652 - RNA, 22 nt, Human
cuaagaaaagauacgacuuuau

SEQ ID NO: 2099653 - RNA, 23 nt, Human
cuaagaaaagauacgacuuuauu

SEQ ID NO: 2099654 - RNA, 17 nt, Human
cuaaccuggguucccuu

SEQ ID NO: 2099655 - RNA, 18 nt, Human
cuaaagaggcugaaagag

SEQ ID NO: 2099656 - RNA, 20 nt, Human
ccugaguagcuggauuacag

SEQ ID NO: 2099657 - RNA, 15 nt, Human
ccugaguagcuggau

SEQ ID NO: 2099658 - RNA, 19 nt, Human
ccugaguagcuggauuaca

SEQ ID NO: 2099659 - RNA, 22 nt, Human
ccugcacuugcagacucuacag

SEQ ID NO: 2099660 - RNA, 13 nt, Human
ccugcagccugga

SEQ ID NO: 2099661 - RNA, 15 nt, Human
ccugcagccuggagg

SEQ ID NO: 2099662 - RNA, 16 nt, Human
ccugcagccuggaggc

SEQ ID NO: 2099663 - RNA, 12 nt, Human
ccugcagccugg

SEQ ID NO: 2099664 - RNA, 15 nt, Human
ccugagaucagaguc

SEQ ID NO: 2099665 - RNA, 17 nt, Human
ccugagaucagaguccu

SEQ ID NO: 2099666 - RNA, 21 nt, Human
ccugagacaaauggaggccug

SEQ ID NO: 2099667 - RNA, 20 nt, Human
ccugagacaaauggaggccu

SEQ ID NO: 2099668 - RNA, 19 nt, Human
ccugagacaaauggaggcc

SEQ ID NO: 2099669 - RNA, 15 nt, Human
ccugagacaaaugga

SEQ ID NO: 2099670 - RNA, 22 nt, Human
ccugagaagugucuaaaaacac

SEQ ID NO: 2099671 - RNA, 14 nt, Human
ccugaccugucuca

SEQ ID NO: 2099672 - RNA, 14 nt, Human
ccugaccucccccu

SEQ ID NO: 2099673 - RNA, 16 nt, Human
ccugaccucccccucc

SEQ ID NO: 2099674 - RNA, 17 nt, Human
ccugaccucccccuccu

SEQ ID NO: 2099675 - RNA, 19 nt, Human
ccugaccucccccuccuuc

SEQ ID NO: 2099676 - RNA, 13 nt, Human
ccugacucucugu

SEQ ID NO: 2099677 - RNA, 15 nt, Human
ccugacucucuguga

SEQ ID NO: 2099678 - RNA, 16 nt, Human
ccugacucucugugac

SEQ ID NO: 2099679 - RNA, 17 nt, Human
ccugacucucugugacc

SEQ ID NO: 2099680 - RNA, 18 nt, Human
ccugacucucugugaccu

SEQ ID NO: 2099681 - RNA, 13 nt, Human
ccucuuggguuca

SEQ ID NO: 2099682 - RNA, 12 nt, Human
ccucuuuaagag

SEQ ID NO: 2099683 - RNA, 13 nt, Human
ccugacccugcag

SEQ ID NO: 2099684 - RNA, 14 nt, Human
ccugacccugcaga

SEQ ID NO: 2099685 - RNA, 16 nt, Human
ccugaccucacuguga

SEQ ID NO: 2099686 - RNA, 16 nt, Human
ccugaccucccucuaa

SEQ ID NO: 2099687 - RNA, 22 nt, Human
ccucugccugaagucacacagu

SEQ ID NO: 2099688 - RNA, 17 nt, Human
ccucugccugcauucug

SEQ ID NO: 2099689 - RNA, 12 nt, Human
ccucugccuguc

SEQ ID NO: 2099690 - RNA, 14 nt, Human
ccucugccuguccc

SEQ ID NO: 2099691 - RNA, 15 nt, Human
ccucugccugucccu

SEQ ID NO: 2099692 - RNA, 16 nt, Human
ccucugccugucccuc

SEQ ID NO: 2099693 - RNA, 17 nt, Human
ccucugccugucccucu

SEQ ID NO: 2099694 - RNA, 18 nt, Human
ccucugccugucccucuc

SEQ ID NO: 2099695 - RNA, 14 nt, Human
ccucugcugccaug

SEQ ID NO: 2099696 - RNA, 21 nt, Human
ccucucucuucugcuccaccc

SEQ ID NO: 2099697 - RNA, 22 nt, Human
ccucucucuucugcuccacccu

SEQ ID NO: 2099698 - RNA, 15 nt, Human
ccucucucuggaaag

SEQ ID NO: 2099699 - RNA, 12 nt, Human
ccucucucuucu

SEQ ID NO: 2099700 - RNA, 16 nt, Human
ccucucucuucugcuc

SEQ ID NO: 2099701 - RNA, 18 nt, Human
ccucucucuucugcucca

SEQ ID NO: 2099702 - RNA, 19 nt, Human
ccucucucuucugcuccac

SEQ ID NO: 2099703 - RNA, 20 nt, Human
ccucucucuucugcuccacc

SEQ ID NO: 2099704 - RNA, 21 nt, Human
ccucugcuggcacauuucccc

SEQ ID NO: 2099705 - RNA, 19 nt, Human
ccucugcuggccgggcaca

SEQ ID NO: 2099706 - RNA, 21 nt, Human
ccucugcuggccgggcacagc

SEQ ID NO: 2099707 - RNA, 22 nt, Human
ccucugcuggccgggcacagcu

SEQ ID NO: 2099708 - RNA, 23 nt, Human
ccucugcuggccgggcacagcug

SEQ ID NO: 2099709 - RNA, 15 nt, Human
ccucugcugccaugg

SEQ ID NO: 2099710 - RNA, 18 nt, Human
ccuggcacagggcagugg

SEQ ID NO: 2099711 - RNA, 17 nt, Human
ccuggcacagggcagug

SEQ ID NO: 2099712 - RNA, 16 nt, Human
ccuggcacagggcagu

SEQ ID NO: 2099713 - RNA, 18 nt, Human
ccuggcacccggccccug

SEQ ID NO: 2099714 - RNA, 22 nt, Human
ccuggaugaaguuaucuggcuu

SEQ ID NO: 2099715 - RNA, 21 nt, Human
ccuggauccaucaggccacuu

SEQ ID NO: 2099716 - RNA, 16 nt, Human
ccuggaucuaccagca

SEQ ID NO: 2099717 - RNA, 22 nt, Human
ccuggaucuaccagcauaaaua

SEQ ID NO: 2099718 - RNA, 16 nt, Human
ccugcccaggccccug

SEQ ID NO: 2099719 - RNA, 15 nt, Human
ccugcccaggccccu

SEQ ID NO: 2099720 - RNA, 14 nt, Human
ccugcccaggcccc

SEQ ID NO: 2099721 - RNA, 14 nt, Human
ccugcuggccccuc

SEQ ID NO: 2099722 - RNA, 15 nt, Human
ccugcuggccccuca

SEQ ID NO: 2099723 - RNA, 16 nt, Human
ccugcuggccccucac

SEQ ID NO: 2099724 - RNA, 17 nt, Human
ccugcuggccccucacc

SEQ ID NO: 2099725 - RNA, 18 nt, Human
ccugcuggccccucaccu

SEQ ID NO: 2099726 - RNA, 21 nt, Human
ccugcuggccccucaccuggg

SEQ ID NO: 2099727 - RNA, 12 nt, Human
ccugcugggcuc

SEQ ID NO: 2099728 - RNA, 16 nt, Human
ccugcugggcucucca

SEQ ID NO: 2099729 - RNA, 17 nt, Human
ccugcugggcucuccac

SEQ ID NO: 2099730 - RNA, 18 nt, Human
ccugcugggcucuccacc

SEQ ID NO: 2099731 - RNA, 19 nt, Human
ccugcugggcucuccaccu

SEQ ID NO: 2099732 - RNA, 20 nt, Human
ccugcugggcucuccaccuc

SEQ ID NO: 2099733 - RNA, 12 nt, Human
ccugcccagugu

SEQ ID NO: 2099734 - RNA, 13 nt, Human
ccugcccaguguu

SEQ ID NO: 2099735 - RNA, 23 nt, Human
ccugcccaguguuguuuguaaau

SEQ ID NO: 2099736 - RNA, 11 nt, Human
ccugcccagug

SEQ ID NO: 2099737 - RNA, 21 nt, Human
ccugcugggcucuccaccuca

SEQ ID NO: 2099738 - RNA, 22 nt, Human
ccugcugggcucuccaccucag

SEQ ID NO: 2099739 - RNA, 24 nt, Human
ccugcugggcucuccaccucagcc

SEQ ID NO: 2099740 - RNA, 13 nt, Human
ccuggagcuccug

SEQ ID NO: 2099741 - RNA, 14 nt, Human
ccuggagcuccugg

SEQ ID NO: 2099742 - RNA, 15 nt, Human
ccuggagcuccuggg

SEQ ID NO: 2099743 - RNA, 16 nt, Human
ccuggagcuccuggga

SEQ ID NO: 2099744 - RNA, 18 nt, Human
ccuggagcuccugggaag

SEQ ID NO: 2099745 - RNA, 16 nt, Human
ccuggaggaaccgaaa

SEQ ID NO: 2099746 - RNA, 22 nt, Human
ccuggaggaaccgaaaggccaa

SEQ ID NO: 2099747 - RNA, 23 nt, Human
ccugcugggcucuccaccucagc

SEQ ID NO: 2099748 - RNA, 12 nt, Human
ccuggagcccga

SEQ ID NO: 2099749 - RNA, 14 nt, Human
ccuggagcccgagg

SEQ ID NO: 2099750 - RNA, 20 nt, Human
ccuggagcccgaggcaccag

SEQ ID NO: 2099751 - RNA, 16 nt, Human
ccuggaggauuucauc

SEQ ID NO: 2099752 - RNA, 14 nt, Human
ccuggcccuggggc

SEQ ID NO: 2099753 - RNA, 15 nt, Human
ccuggcccuggggcc

SEQ ID NO: 2099754 - RNA, 16 nt, Human
ccuggcccuggggccu

SEQ ID NO: 2099755 - RNA, 17 nt, Human
ccuggcccuggggccug

SEQ ID NO: 2099756 - RNA, 20 nt, Human
ccuggcccuggggccuguac

SEQ ID NO: 2099757 - RNA, 14 nt, Human
ccucagccuccuga

SEQ ID NO: 2099758 - RNA, 12 nt, Human
ccucagccuccg

SEQ ID NO: 2099759 - RNA, 22 nt, Human
ccucagccucccgaauagcugg

SEQ ID NO: 2099760 - RNA, 23 nt, Human
ccucagccucccaaagugcuggg

SEQ ID NO: 2099761 - RNA, 18 nt, Human
ccuccaaguccacagugg

SEQ ID NO: 2099762 - RNA, 21 nt, Human
ccuccaaguccacaguggaac

SEQ ID NO: 2099763 - RNA, 19 nt, Human
ccucauuacggcuccucuc

SEQ ID NO: 2099764 - RNA, 22 nt, Human
ccuccaaucccaccaacccuca

SEQ ID NO: 2099765 - RNA, 22 nt, Human
ccucccaaggggcccaaauucu

SEQ ID NO: 2099766 - RNA, 22 nt, Human
ccuccaagcuccaucuccacuc

SEQ ID NO: 2099767 - RNA, 21 nt, Human
ccuccaagcuccaucuccacu

SEQ ID NO: 2099768 - RNA, 18 nt, Human
ccucauuagcauuuugcu

SEQ ID NO: 2099769 - RNA, 12 nt, Human
ccucccagcucu

SEQ ID NO: 2099770 - RNA, 13 nt, Human
ccucccagcucug

SEQ ID NO: 2099771 - RNA, 14 nt, Human
ccucccagcucuga

SEQ ID NO: 2099772 - RNA, 20 nt, Human
ccucccaggcgccccuuccc

SEQ ID NO: 2099773 - RNA, 14 nt, Human
ccucccaggcgccc

SEQ ID NO: 2099774 - RNA, 12 nt, Human
ccucccaccaca

SEQ ID NO: 2099775 - RNA, 14 nt, Human
ccucccaccacagc

SEQ ID NO: 2099776 - RNA, 15 nt, Human
ccucccaccacagca

SEQ ID NO: 2099777 - RNA, 12 nt, Human
ccucccagccug

SEQ ID NO: 2099778 - RNA, 21 nt, Human
ccucaaggacaaagucuccag

SEQ ID NO: 2099779 - RNA, 22 nt, Human
ccucaaggacaaagucuccagc

SEQ ID NO: 2099780 - RNA, 23 nt, Human
ccucaaggacaaagucuccagcc

SEQ ID NO: 2099781 - RNA, 12 nt, Human
ccucaaggacuu

SEQ ID NO: 2099782 - RNA, 13 nt, Human
ccucaaggacuug

SEQ ID NO: 2099783 - RNA, 19 nt, Human
ccucaaggacuugaaagca

SEQ ID NO: 2099784 - RNA, 20 nt, Human
ccucaaggacuugaaagcau

SEQ ID NO: 2099785 - RNA, 21 nt, Human
ccucaaggacuugaaagcauc

SEQ ID NO: 2099786 - RNA, 22 nt, Human
ccucagccucccaaagugcugg

SEQ ID NO: 2099787 - RNA, 11 nt, Human
ccucagccucc

SEQ ID NO: 2099788 - RNA, 22 nt, Human
ccucaaggacuugaaagcaucc

SEQ ID NO: 2099789 - RNA, 23 nt, Human
ccucaaggacuugaaagcaucca

SEQ ID NO: 2099790 - RNA, 14 nt, Human
ccucagccuagacc

SEQ ID NO: 2099791 - RNA, 16 nt, Human
ccucagccuagacccu

SEQ ID NO: 2099792 - RNA, 19 nt, Human
ccucagccuagacccuccu

SEQ ID NO: 2099793 - RNA, 20 nt, Human
ccucagccuagacccuccuc

SEQ ID NO: 2099794 - RNA, 16 nt, Human
ccuauuucaaaaauuu

SEQ ID NO: 2099795 - RNA, 22 nt, Human
ccuauuucaaaaauuuggaauu

SEQ ID NO: 2099796 - RNA, 16 nt, Human
ccucaaccuccugggc

SEQ ID NO: 2099797 - RNA, 14 nt, Human
ccucaaccuguaaa

SEQ ID NO: 2099798 - RNA, 20 nt, Human
ccucaaccuguaaauuauuu

SEQ ID NO: 2099799 - RNA, 23 nt, Human
ccucaaccuguaaauuauuuuaa

SEQ ID NO: 2099800 - RNA, 13 nt, Human
ccucaaccuguga

SEQ ID NO: 2099801 - RNA, 21 nt, Human
ccucaacucaccuaauguuua

SEQ ID NO: 2099802 - RNA, 14 nt, Human
ccucaaccugugau

SEQ ID NO: 2099803 - RNA, 17 nt, Human
ccgucagccaaauguaa

SEQ ID NO: 2099804 - RNA, 20 nt, Human
ccgucaguaucaggccugcc

SEQ ID NO: 2099805 - RNA, 15 nt, Human
ccgucauguuccuca

SEQ ID NO: 2099806 - RNA, 16 nt, Human
ccgucauguuccucaa

SEQ ID NO: 2099807 - RNA, 17 nt, Human
ccgucauguuccucaaa

SEQ ID NO: 2099808 - RNA, 22 nt, Human
ccguccagccgccauugccacc

SEQ ID NO: 2099809 - RNA, 16 nt, Human
ccgucucaugaggggc

SEQ ID NO: 2099810 - RNA, 12 nt, Human
ccguauuucaga

SEQ ID NO: 2099811 - RNA, 22 nt, Human
ccguaguucccugaaaacccag

SEQ ID NO: 2099812 - RNA, 14 nt, Human
ccguaguucccuga

SEQ ID NO: 2099813 - RNA, 15 nt, Human
ccguaguucccugaa

SEQ ID NO: 2099814 - RNA, 16 nt, Human
ccguaguucccugaaa

SEQ ID NO: 2099815 - RNA, 24 nt, Human
ccguagacgugcacgcacacuguc

SEQ ID NO: 2099816 - RNA, 17 nt, Human
ccggcuaugggggcacu

SEQ ID NO: 2099817 - RNA, 23 nt, Human
ccggcuaugggggcacugaggac

SEQ ID NO: 2099818 - RNA, 22 nt, Human
ccggcuaugggggcacugagga

SEQ ID NO: 2099819 - RNA, 16 nt, Human
ccuaauacauuaaagc

SEQ ID NO: 2099820 - RNA, 18 nt, Human
ccuaauacauuaaagcag

SEQ ID NO: 2099821 - RNA, 20 nt, Human
ccuaauacauuaaagcaguc

SEQ ID NO: 2099822 - RNA, 17 nt, Human
ccuagauaaaaagaugg

SEQ ID NO: 2099823 - RNA, 21 nt, Human
ccuaagauuuauuuuguuaaa

SEQ ID NO: 2099824 - RNA, 14 nt, Human
ccuaaguggcugcu

SEQ ID NO: 2099825 - RNA, 15 nt, Human
ccuaaguggcugcug

SEQ ID NO: 2099826 - RNA, 16 nt, Human
ccuaaguggcugcuga

SEQ ID NO: 2099827 - RNA, 17 nt, Human
ccuaaguuaccuuucua

SEQ ID NO: 2099828 - RNA, 15 nt, Human
ccuaaguucuuagau

SEQ ID NO: 2099829 - RNA, 17 nt, Human
ccuaaguucuuagauau

SEQ ID NO: 2099830 - RNA, 18 nt, Human
ccuaaguucuuagauauc

SEQ ID NO: 2099831 - RNA, 20 nt, Human
ccuaaguuucaguugauuuu

SEQ ID NO: 2099832 - RNA, 16 nt, Human
ccuaagucccugcccc

SEQ ID NO: 2099833 - RNA, 18 nt, Human
ccuaagucccugcccccu

SEQ ID NO: 2099834 - RNA, 13 nt, Human
ccuaagucucugu

SEQ ID NO: 2099835 - RNA, 14 nt, Human
ccuaagucucugug

SEQ ID NO: 2099836 - RNA, 15 nt, Human
ccuaagucucuguga

SEQ ID NO: 2099837 - RNA, 17 nt, Human
ccgucugggguucagcc

SEQ ID NO: 2099838 - RNA, 19 nt, Human
ccgucugggguucagcccc

SEQ ID NO: 2099839 - RNA, 20 nt, Human
ccgucugggguucagccccu

SEQ ID NO: 2099840 - RNA, 21 nt, Human
ccgucugggguucagccccuc

SEQ ID NO: 2099841 - RNA, 22 nt, Human
ccgucugggguucagccccucc

SEQ ID NO: 2099842 - RNA, 23 nt, Human
ccgucugggguucagccccuccu

SEQ ID NO: 2099843 - RNA, 23 nt, Human
ccuaaggcacccacaaauaaaug

SEQ ID NO: 2099844 - RNA, 19 nt, Human
ccuaagggcucaccguggc

SEQ ID NO: 2099845 - RNA, 13 nt, Human
ccuaagccaaggg

SEQ ID NO: 2099846 - RNA, 21 nt, Human
ccuaagccaagggccucuugc

SEQ ID NO: 2099847 - RNA, 18 nt, Human
ccuagcacucacaugcug

SEQ ID NO: 2099848 - RNA, 17 nt, Human
ccuagauccacacacag

SEQ ID NO: 2099849 - RNA, 19 nt, Human
ccuagauccacacacagag

SEQ ID NO: 2099850 - RNA, 20 nt, Human
ccuagauccacacacagagg

SEQ ID NO: 2099851 - RNA, 12 nt, Human
ccuaggagacca

SEQ ID NO: 2099852 - RNA, 21 nt, Human
ccgccacauccccgcuggcug

SEQ ID NO: 2099853 - RNA, 15 nt, Human
ccgcauucccugagu

SEQ ID NO: 2099854 - RNA, 23 nt, Human
ccgcauucccugagucaccagga

SEQ ID NO: 2099855 - RNA, 12 nt, Human
ccgccaggcgag

SEQ ID NO: 2099856 - RNA, 19 nt, Human
ccgaccgaggcuggagcug

SEQ ID NO: 2099857 - RNA, 12 nt, Human
ccgaccucagcc

SEQ ID NO: 2099858 - RNA, 13 nt, Human
ccgaccucagccu

SEQ ID NO: 2099859 - RNA, 17 nt, Human
ccgccaaggcuggggga

SEQ ID NO: 2099860 - RNA, 14 nt, Human
ccgaccucagccuu

SEQ ID NO: 2099861 - RNA, 15 nt, Human
ccgaccucagccuuc

SEQ ID NO: 2099862 - RNA, 21 nt, Human
ccgaccgaggcuggagcuggc

SEQ ID NO: 2099863 - RNA, 13 nt, Human
ccgaccucguccu

SEQ ID NO: 2099864 - RNA, 19 nt, Human
ccgaccucguccucccccu

SEQ ID NO: 2099865 - RNA, 22 nt, Human
ccgaccucguccucccccugcc

SEQ ID NO: 2099866 - RNA, 18 nt, Human
ccgacaaccgaugcucca

SEQ ID NO: 2099867 - RNA, 20 nt, Human
ccgacaaccgaugcuccagc

SEQ ID NO: 2099868 - RNA, 15 nt, Human
ccgacaaccgaugcu

SEQ ID NO: 2099869 - RNA, 13 nt, Human
ccgacagagggaa

SEQ ID NO: 2099870 - RNA, 13 nt, Human
ccgaccagagccc

SEQ ID NO: 2099871 - RNA, 17 nt, Human
ccgacacgcucccuccc

SEQ ID NO: 2099872 - RNA, 14 nt, Human
cccuucugugccca

SEQ ID NO: 2099873 - RNA, 15 nt, Human
cccuucugugcccag

SEQ ID NO: 2099874 - RNA, 16 nt, Human
cccuucugugcccagc

SEQ ID NO: 2099875 - RNA, 17 nt, Human
cccuucugugcccagcu

SEQ ID NO: 2099876 - RNA, 18 nt, Human
cccuucugugcccagcuc

SEQ ID NO: 2099877 - RNA, 20 nt, Human
cccuucugugcccagcucag

SEQ ID NO: 2099878 - RNA, 12 nt, Human
cccuucuuucca

SEQ ID NO: 2099879 - RNA, 20 nt, Human
ccgaauagcugggacuacag

SEQ ID NO: 2099880 - RNA, 16 nt, Human
ccgccaugcuccuggc

SEQ ID NO: 2099881 - RNA, 21 nt, Human
ccgccauucucaagcccugca

SEQ ID NO: 2099882 - RNA, 14 nt, Human
ccgccauugccacc

SEQ ID NO: 2099883 - RNA, 20 nt, Human
ccgccauucucaagcccugc

SEQ ID NO: 2099884 - RNA, 15 nt, Human
ccgccauugccacca

SEQ ID NO: 2099885 - RNA, 16 nt, Human
ccgccauugccaccag

SEQ ID NO: 2099886 - RNA, 19 nt, Human
ccgccauugccaccaggag

SEQ ID NO: 2099887 - RNA, 14 nt, Human
ccgccccagccucu

SEQ ID NO: 2099888 - RNA, 13 nt, Human
ccgccccacauuc

SEQ ID NO: 2099889 - RNA, 15 nt, Human
ccgccccagccucug

SEQ ID NO: 2099890 - RNA, 18 nt, Human
cccuucgcuccugugucu

SEQ ID NO: 2099891 - RNA, 16 nt, Human
cccuucgcuccugugu

SEQ ID NO: 2099892 - RNA, 14 nt, Human
cccuucuacacucu

SEQ ID NO: 2099893 - RNA, 15 nt, Human
cccuucuacacucuc

SEQ ID NO: 2099894 - RNA, 17 nt, Human
cccuucuacacucuccu

SEQ ID NO: 2099895 - RNA, 18 nt, Human
cccuucuacacucuccug

SEQ ID NO: 2099896 - RNA, 23 nt, Human
cccuucuacacucuccugggccc

SEQ ID NO: 2099897 - RNA, 14 nt, Human
cccuucuacugcuu

SEQ ID NO: 2099898 - RNA, 16 nt, Human
cccuucuacugcuucu

SEQ ID NO: 2099899 - RNA, 18 nt, Human
cccuucuacugcuucuac

SEQ ID NO: 2099900 - RNA, 13 nt, Human
cccuucucuguau

SEQ ID NO: 2099901 - RNA, 22 nt, Human
cccuggcaggaugacccugcga

SEQ ID NO: 2099902 - RNA, 20 nt, Human
cccuggcaggaugacccugc

SEQ ID NO: 2099903 - RNA, 13 nt, Human
cccuggccagagg

SEQ ID NO: 2099904 - RNA, 14 nt, Human
cccuggccagaggc

SEQ ID NO: 2099905 - RNA, 15 nt, Human
cccuggccagaggcu

SEQ ID NO: 2099906 - RNA, 13 nt, Human
cccuggccaucuc

SEQ ID NO: 2099907 - RNA, 14 nt, Human
cccuggccaucucu

SEQ ID NO: 2099908 - RNA, 15 nt, Human
cccuggccaucucug

SEQ ID NO: 2099909 - RNA, 13 nt, Human
cccuggccugcug

SEQ ID NO: 2099910 - RNA, 14 nt, Human
cccuggccugcugg

SEQ ID NO: 2099911 - RNA, 21 nt, Human
cccuggccugcugggcucucc

SEQ ID NO: 2099912 - RNA, 22 nt, Human
cccuggccugcugggcucucca

SEQ ID NO: 2099913 - RNA, 15 nt, Human
cccuggccuguucug

SEQ ID NO: 2099914 - RNA, 19 nt, Human
cccuggccuguucuguuuu

SEQ ID NO: 2099915 - RNA, 20 nt, Human
cccuggcuuguaacuccacc

SEQ ID NO: 2099916 - RNA, 23 nt, Human
cccuggcuuguaacuccaccaac

SEQ ID NO: 2099917 - RNA, 13 nt, Human
cccuggcuuuuca

SEQ ID NO: 2099918 - RNA, 19 nt, Human
cccuggcucccacaggccc

SEQ ID NO: 2099919 - RNA, 17 nt, Human
cccuggcucccacaggc

SEQ ID NO: 2099920 - RNA, 19 nt, Human
cccuggcuuguaacuccac

SEQ ID NO: 2099921 - RNA, 11 nt, Human
cccuggcuggu

SEQ ID NO: 2099922 - RNA, 20 nt, Human
cccuggcugguaagggccaa

SEQ ID NO: 2099923 - RNA, 22 nt, Human
cccuggcugguaagggccaagu

SEQ ID NO: 2099924 - RNA, 13 nt, Human
cccucaccccugc

SEQ ID NO: 2099925 - RNA, 19 nt, Human
ccagcuuaaaggggcuaga

SEQ ID NO: 2099926 - RNA, 17 nt, Human
ccagcuguucagcuggu

SEQ ID NO: 2099927 - RNA, 21 nt, Human
ccagcuacuccggaggcugag

SEQ ID NO: 2099928 - RNA, 15 nt, Human
ccagcuacucaggag

SEQ ID NO: 2099929 - RNA, 17 nt, Human
ccagcuacucaggaggc

SEQ ID NO: 2099930 - RNA, 19 nt, Human
ccagcuacucaggaggcug

SEQ ID NO: 2099931 - RNA, 20 nt, Human
ccagcuacucaggaggcuga

SEQ ID NO: 2099932 - RNA, 22 nt, Human
ccagcucaccagccccagugcc

SEQ ID NO: 2099933 - RNA, 16 nt, Human
ccagcuguucagcugg

SEQ ID NO: 2099934 - RNA, 16 nt, Human
ccagcucaccagcccc

SEQ ID NO: 2099935 - RNA, 15 nt, Human
ccagcucaccagccc

SEQ ID NO: 2099936 - RNA, 16 nt, Human
ccagccccugccccuc

SEQ ID NO: 2099937 - RNA, 20 nt, Human
ccagcuacucaagaggcuga

SEQ ID NO: 2099938 - RNA, 14 nt, Human
ccagcuacucagaa

SEQ ID NO: 2099939 - RNA, 16 nt, Human
ccagcuacucagaagc

SEQ ID NO: 2099940 - RNA, 17 nt, Human
ccagcuacucagaagcc

SEQ ID NO: 2099941 - RNA, 20 nt, Human
ccagcuacucagaagccuga

SEQ ID NO: 2099942 - RNA, 21 nt, Human
ccagcuacucagaagccugag

SEQ ID NO: 2099943 - RNA, 23 nt, Human
ccagcuacucagaagccugaggc

SEQ ID NO: 2099944 - RNA, 13 nt, Human
ccagcuacucagg

SEQ ID NO: 2099945 - RNA, 14 nt, Human
ccagcuacucagga

SEQ ID NO: 2099946 - RNA, 14 nt, Human
ccaggaaccuccuc

SEQ ID NO: 2099947 - RNA, 15 nt, Human
ccagcagccagcucu

SEQ ID NO: 2099948 - RNA, 16 nt, Human
ccagcagccagcucuc

SEQ ID NO: 2099949 - RNA, 18 nt, Human
ccagcagccagcucucag

SEQ ID NO: 2099950 - RNA, 19 nt, Human
ccagcagccagcucucagc

SEQ ID NO: 2099951 - RNA, 20 nt, Human
ccagcagccagcucucagcc

SEQ ID NO: 2099952 - RNA, 21 nt, Human
ccagcagccagcucucagcca

SEQ ID NO: 2099953 - RNA, 16 nt, Human
ccaccuuggcucaagu

SEQ ID NO: 2099954 - RNA, 18 nt, Human
ccagaucccagaaggacc

SEQ ID NO: 2099955 - RNA, 13 nt, Human
ccagaucccagaa

SEQ ID NO: 2099956 - RNA, 16 nt, Human
ccagaucccagaagga

SEQ ID NO: 2099957 - RNA, 17 nt, Human
ccagaucccagaaggac

SEQ ID NO: 2099958 - RNA, 13 nt, Human
ccagaguggccug

SEQ ID NO: 2099959 - RNA, 14 nt, Human
ccagaguggccugg

SEQ ID NO: 2099960 - RNA, 15 nt, Human
ccagaguggccuggc

SEQ ID NO: 2099961 - RNA, 16 nt, Human
ccagaguggccuggcc

SEQ ID NO: 2099962 - RNA, 17 nt, Human
ccagaguggccuggcca

SEQ ID NO: 2099963 - RNA, 18 nt, Human
ccagagugugggaaggga

SEQ ID NO: 2099964 - RNA, 21 nt, Human
ccagagugugggaagggagag

SEQ ID NO: 2099965 - RNA, 23 nt, Human
ccagaguggccuggccaggagcu

SEQ ID NO: 2099966 - RNA, 18 nt, Human
ccagaguggccuggccag

SEQ ID NO: 2099967 - RNA, 19 nt, Human
ccagaguggccuggccagg

SEQ ID NO: 2099968 - RNA, 21 nt, Human
ccagaguggccuggccaggag

SEQ ID NO: 2099969 - RNA, 22 nt, Human
ccagaguggccuggccaggagc

SEQ ID NO: 2099970 - RNA, 15 nt, Human
ccagaugcaccagcc

SEQ ID NO: 2099971 - RNA, 17 nt, Human
ccagaugcaccagcccu

SEQ ID NO: 2099972 - RNA, 18 nt, Human
ccagaugcaccagcccuu

SEQ ID NO: 2099973 - RNA, 18 nt, Human
ccaggcuggcgugcagug

SEQ ID NO: 2099974 - RNA, 17 nt, Human
ccaggcuggcgugcagu

SEQ ID NO: 2099975 - RNA, 19 nt, Human
ccaggcuggcgugcagugg

SEQ ID NO: 2099976 - RNA, 16 nt, Human
ccaggcuggcgugcag

SEQ ID NO: 2099977 - RNA, 23 nt, Human
ccaggcuccuuccugucuuccug

SEQ ID NO: 2099978 - RNA, 15 nt, Human
ccaggcuccuuccug

SEQ ID NO: 2099979 - RNA, 22 nt, Human
ccaggcuccuuccugucuuccu

SEQ ID NO: 2099980 - RNA, 18 nt, Human
ccaggcagaucugugccc

SEQ ID NO: 2099981 - RNA, 20 nt, Human
ccaggcagaucugugcccca

SEQ ID NO: 2099982 - RNA, 14 nt, Human
ccaggcuccucccu

SEQ ID NO: 2099983 - RNA, 16 nt, Human
ccaggcuccucccucc

SEQ ID NO: 2099984 - RNA, 14 nt, Human
ccaggcuccuuccu

SEQ ID NO: 2099985 - RNA, 21 nt, Human
ccaggcuccuuuagcgcccag

SEQ ID NO: 2099986 - RNA, 20 nt, Human
ccaggcuccuuuagcgccca

SEQ ID NO: 2099987 - RNA, 19 nt, Human
ccaggggaaaaucagccug

SEQ ID NO: 2099988 - RNA, 20 nt, Human
ccaggggaaaaucagccugc

SEQ ID NO: 2099989 - RNA, 18 nt, Human
ccaggcacgaacccaccu

SEQ ID NO: 2099990 - RNA, 19 nt, Human
ccaggcacgaacccaccug

SEQ ID NO: 2099991 - RNA, 20 nt, Human
ccaggcacgaacccaccugc

SEQ ID NO: 2099992 - RNA, 16 nt, Human
ccaggcacccaaaccc

SEQ ID NO: 2099993 - RNA, 18 nt, Human
ccaggcacugcugcccag

SEQ ID NO: 2099994 - RNA, 16 nt, Human
ccaggcacugcugccc

SEQ ID NO: 2099995 - RNA, 21 nt, Human
ccaggcacgaacccaccugcu

SEQ ID NO: 2099996 - RNA, 22 nt, Human
ccaggcacgaacccaccugcug

SEQ ID NO: 2099997 - RNA, 23 nt, Human
ccaggcacgaacccaccugcuga

SEQ ID NO: 2099998 - RNA, 13 nt, Human
ccaggcagaucug

SEQ ID NO: 2099999 - RNA, 17 nt, Human
ccaggcagaucugugcc

SEQ ID NO: 2100000 - RNA, 22 nt, Human
ccaugucaccggauccugggug

SEQ ID NO: 2100001 - RNA, 23 nt, Human
ccaugucaccggauccugggugg

SEQ ID NO: 2100002 - RNA, 14 nt, Human
ccauggugccucug

SEQ ID NO: 2100003 - RNA, 16 nt, Human
ccauggugccucugga

SEQ ID NO: 2100004 - RNA, 14 nt, Human
ccauggucacagag

SEQ ID NO: 2100005 - RNA, 15 nt, Human
ccauggucacagaga

SEQ ID NO: 2100006 - RNA, 14 nt, Human
ccaugguugagaaa

SEQ ID NO: 2100007 - RNA, 14 nt, Human
ccauguaaaacaaa

SEQ ID NO: 2100008 - RNA, 16 nt, Human
ccauguaaaacaaaaa

SEQ ID NO: 2100009 - RNA, 17 nt, Human
ccauguaaaacaaaaaa

SEQ ID NO: 2100010 - RNA, 23 nt, Human
ccaugagccucagcauccuggca

SEQ ID NO: 2100011 - RNA, 21 nt, Human
ccaugagccucagcauccugg

SEQ ID NO: 2100012 - RNA, 17 nt, Human
ccaugagcuccagaccc

SEQ ID NO: 2100013 - RNA, 18 nt, Human
ccaugagcuccagacccc

SEQ ID NO: 2100014 - RNA, 19 nt, Human
ccaugagcuccagaccccc

SEQ ID NO: 2100015 - RNA, 23 nt, Human
ccaugagcuccagacccccagca

SEQ ID NO: 2100016 - RNA, 13 nt, Human
ccaugagcuccag

SEQ ID NO: 2100017 - RNA, 15 nt, Human
ccaugagcuccagac

SEQ ID NO: 2100018 - RNA, 16 nt, Human
ccaugagcuccagacc

SEQ ID NO: 2100019 - RNA, 21 nt, Human
ccaguuucagguguuuaguug

SEQ ID NO: 2100020 - RNA, 21 nt, Human
ccaguugucccgauuguaacu

SEQ ID NO: 2100021 - RNA, 22 nt, Human
ccaguugucccgauuguaacuc

SEQ ID NO: 2100022 - RNA, 18 nt, Human
ccaguuguauauuauucu

SEQ ID NO: 2100023 - RNA, 21 nt, Human
ccaguuccuuucaaugguuug

SEQ ID NO: 2100024 - RNA, 22 nt, Human
ccaguuccuuucaaugguuugc

SEQ ID NO: 2100025 - RNA, 23 nt, Human
ccaguuccuuucaaugguuugca

SEQ ID NO: 2100026 - RNA, 13 nt, Human
ccaguuugcagaa

SEQ ID NO: 2100027 - RNA, 23 nt, Human
ccaugaccagaagggaaacaguc

SEQ ID NO: 2100028 - RNA, 14 nt, Human
ccaugaccauacug

SEQ ID NO: 2100029 - RNA, 22 nt, Human
ccaugacaacuucuaauugcca

SEQ ID NO: 2100030 - RNA, 18 nt, Human
ccaugaauguaucaggaa

SEQ ID NO: 2100031 - RNA, 19 nt, Human
ccaugaauguaucaggaaa

SEQ ID NO: 2100032 - RNA, 20 nt, Human
ccaguuggguggaugccugg

SEQ ID NO: 2100033 - RNA, 19 nt, Human
ccaguuggguggaugccug

SEQ ID NO: 2100034 - RNA, 17 nt, Human
ccaguuggguggaugcc

SEQ ID NO: 2100035 - RNA, 20 nt, Human
ccaguuauuuuccgcccuca

SEQ ID NO: 2100036 - RNA, 17 nt, Human
ccaguuaugugaaugau

SEQ ID NO: 2100037 - RNA, 14 nt, Human
ccaguucaggaguc

SEQ ID NO: 2100038 - RNA, 18 nt, Human
ccaguucaggagucccaa

SEQ ID NO: 2100039 - RNA, 21 nt, Human
ccaguucaggagucccaagga

SEQ ID NO: 2100040 - RNA, 12 nt, Human
cccacccccauc

SEQ ID NO: 2100041 - RNA, 18 nt, Human
cccacccugaaagcccug

SEQ ID NO: 2100042 - RNA, 13 nt, Human
cccaccccccuca

SEQ ID NO: 2100043 - RNA, 14 nt, Human
cccaccccccucau

SEQ ID NO: 2100044 - RNA, 12 nt, Human
cccacucacaga

SEQ ID NO: 2100045 - RNA, 14 nt, Human
cccacucacagaga

SEQ ID NO: 2100046 - RNA, 16 nt, Human
cccacucaagccaagc

SEQ ID NO: 2100047 - RNA, 17 nt, Human
cccacucaagccaagca

SEQ ID NO: 2100048 - RNA, 19 nt, Human
cccacucaagccaagcagc

SEQ ID NO: 2100049 - RNA, 20 nt, Human
cccacucaagccaagcagcc

SEQ ID NO: 2100050 - RNA, 23 nt, Human
cccacucaagccaagcagccaag

SEQ ID NO: 2100051 - RNA, 17 nt, Human
cccacguucucucugcc

SEQ ID NO: 2100052 - RNA, 18 nt, Human
cccacguucucucugccu

SEQ ID NO: 2100053 - RNA, 23 nt, Human
cccacguucucucugccugugag

SEQ ID NO: 2100054 - RNA, 17 nt, Human
cccacuccccaccuuca

SEQ ID NO: 2100055 - RNA, 15 nt, Human
cccacugcaggcccc

SEQ ID NO: 2100056 - RNA, 23 nt, Human
cccacugcaggccccgcuugucc

SEQ ID NO: 2100057 - RNA, 19 nt, Human
cccacugcaggccccgcuu

SEQ ID NO: 2100058 - RNA, 13 nt, Human
cccacugccugcc

SEQ ID NO: 2100059 - RNA, 16 nt, Human
cccacugccugcccac

SEQ ID NO: 2100060 - RNA, 13 nt, Human
cccacugcucugg

SEQ ID NO: 2100061 - RNA, 12 nt, Human
cccacugcucug

SEQ ID NO: 2100062 - RNA, 19 nt, Human
cccacugcuuuuggucugu

SEQ ID NO: 2100063 - RNA, 22 nt, Human
cccacugcuuuuggucugugug

SEQ ID NO: 2100064 - RNA, 14 nt, Human
cccacugccugccc

SEQ ID NO: 2100065 - RNA, 15 nt, Human
cccacugccugccca

SEQ ID NO: 2100066 - RNA, 13 nt, Human
cccagcugcaccu

SEQ ID NO: 2100067 - RNA, 18 nt, Human
cccagcugcaccugccag

SEQ ID NO: 2100068 - RNA, 21 nt, Human
cccagcugcaccugccagccu

SEQ ID NO: 2100069 - RNA, 22 nt, Human
cccagcugcaccugccagccug

SEQ ID NO: 2100070 - RNA, 22 nt, Human
cccagcuuaaaggggcuagagu

SEQ ID NO: 2100071 - RNA, 12 nt, Human
cccagcugcacc

SEQ ID NO: 2100072 - RNA, 22 nt, Human
cccagccaccccgggcucucug

SEQ ID NO: 2100073 - RNA, 14 nt, Human
cccagccaccccgg

SEQ ID NO: 2100074 - RNA, 19 nt, Human
cccagccaccccgggcucu

SEQ ID NO: 2100075 - RNA, 18 nt, Human
cccauacucugucucccu

SEQ ID NO: 2100076 - RNA, 16 nt, Human
cccauagcuuccauga

SEQ ID NO: 2100077 - RNA, 13 nt, Human
cccauagcuucca

SEQ ID NO: 2100078 - RNA, 19 nt, Human
cccauagugaccggcugcu

SEQ ID NO: 2100079 - RNA, 22 nt, Human
cccagggccagggcccugcaga

SEQ ID NO: 2100080 - RNA, 15 nt, Human
cccagggcuacccuc

SEQ ID NO: 2100081 - RNA, 17 nt, Human
cccaggcuggcgugcag

SEQ ID NO: 2100082 - RNA, 21 nt, Human
cccagggccagggcccugcag

SEQ ID NO: 2100083 - RNA, 13 nt, Human
cccaggcuggcgu

SEQ ID NO: 2100084 - RNA, 23 nt, Human
cccagcugcaccugccagccugg

SEQ ID NO: 2100085 - RNA, 22 nt, Human
cccauccuccccuucccugcaa

SEQ ID NO: 2100086 - RNA, 14 nt, Human
cccauccuccccuu

SEQ ID NO: 2100087 - RNA, 15 nt, Human
cccauccuccccuuc

SEQ ID NO: 2100088 - RNA, 16 nt, Human
cccauccuccccuucc

SEQ ID NO: 2100089 - RNA, 18 nt, Human
cccauccuccccuucccu

SEQ ID NO: 2100090 - RNA, 12 nt, Human
cccauccucccc

SEQ ID NO: 2100091 - RNA, 13 nt, Human
cccauccuccccu

SEQ ID NO: 2100092 - RNA, 23 nt, Human
ccccgaggccuucucugaaggac

SEQ ID NO: 2100093 - RNA, 13 nt, Human
ccccgagcugggg

SEQ ID NO: 2100094 - RNA, 14 nt, Human
ccccgagcccuacu

SEQ ID NO: 2100095 - RNA, 12 nt, Human
ccccgagcuggg

SEQ ID NO: 2100096 - RNA, 14 nt, Human
ccccgcuucugccu

SEQ ID NO: 2100097 - RNA, 15 nt, Human
ccccgcuuguccagc

SEQ ID NO: 2100098 - RNA, 17 nt, Human
ccccgcuuguccagcgc

SEQ ID NO: 2100099 - RNA, 18 nt, Human
ccccgcuuguccagcgcc

SEQ ID NO: 2100100 - RNA, 19 nt, Human
ccccgcuuguccagcgccu

SEQ ID NO: 2100101 - RNA, 12 nt, Human
cccccaaagugg

SEQ ID NO: 2100102 - RNA, 22 nt, Human
ccccagcaagugagagcugggu

SEQ ID NO: 2100103 - RNA, 11 nt, Human
ccccagcacua

SEQ ID NO: 2100104 - RNA, 19 nt, Human
ccccagcacuaaagcagug

SEQ ID NO: 2100105 - RNA, 21 nt, Human
ccccagcaagugagagcuggg

SEQ ID NO: 2100106 - RNA, 12 nt, Human
ccccagagcugu

SEQ ID NO: 2100107 - RNA, 21 nt, Human
ccccagagcuguuuauggccu

SEQ ID NO: 2100108 - RNA, 22 nt, Human
ccccagagcuguuuauggccuc

SEQ ID NO: 2100109 - RNA, 23 nt, Human
ccccagagcuguuuauggccuca

SEQ ID NO: 2100110 - RNA, 10 nt, Human
ccccagagac

SEQ ID NO: 2100111 - RNA, 21 nt, Human
ccccagagacucagagggagg

SEQ ID NO: 2100112 - RNA, 11 nt, Human
ccccagagcug

SEQ ID NO: 2100113 - RNA, 20 nt, Human
ccccauuucuauuuauuuac

SEQ ID NO: 2100114 - RNA, 17 nt, Human
ccccauuucuauuuauu

SEQ ID NO: 2100115 - RNA, 13 nt, Human
ccccauuucuauu

SEQ ID NO: 2100116 - RNA, 14 nt, Human
ccccaucucuacua

SEQ ID NO: 2100117 - RNA, 19 nt, Human
ccccaucucucccuccccu

SEQ ID NO: 2100118 - RNA, 12 nt, Human
ccccaucucucc

SEQ ID NO: 2100119 - RNA, 16 nt, Human
ccccaucucucccucc

SEQ ID NO: 2100120 - RNA, 12 nt, Human
cccauugucuuc

SEQ ID NO: 2100121 - RNA, 15 nt, Human
ccccaaagaagaagu

SEQ ID NO: 2100122 - RNA, 19 nt, Human
ccccaaacgggcugcccug

SEQ ID NO: 2100123 - RNA, 17 nt, Human
cccuauugguaaagaau

SEQ ID NO: 2100124 - RNA, 18 nt, Human
cccuauuagagaagagau

SEQ ID NO: 2100125 - RNA, 23 nt, Human
cccgggaggcagagguugcagug

SEQ ID NO: 2100126 - RNA, 23 nt, Human
cccgggacucacuggcagcccca

SEQ ID NO: 2100127 - RNA, 24 nt, Human
cccgggacucacuggcagccccag

SEQ ID NO: 2100128 - RNA, 22 nt, Human
cccggcucgagcaguccugccu

SEQ ID NO: 2100129 - RNA, 16 nt, Human
cccggcuccaggcucc

SEQ ID NO: 2100130 - RNA, 15 nt, Human
cccggcuccaggcuc

SEQ ID NO: 2100131 - RNA, 14 nt, Human
cccggcuccaggcu

SEQ ID NO: 2100132 - RNA, 13 nt, Human
cccggcuccaggc

SEQ ID NO: 2100133 - RNA, 12 nt, Human
cccggcuccagg

SEQ ID NO: 2100134 - RNA, 11 nt, Human
cccggcuccag

SEQ ID NO: 2100135 - RNA, 17 nt, Human
ccccuuuuucuuccuca

SEQ ID NO: 2100136 - RNA, 14 nt, Human
cccgaauagcuggg

SEQ ID NO: 2100137 - RNA, 20 nt, Human
ccccuuugaugauuaauuca

SEQ ID NO: 2100138 - RNA, 18 nt, Human
ccccuuuuuacuccccuu

SEQ ID NO: 2100139 - RNA, 19 nt, Human
ccccuuuuuacuccccuug

SEQ ID NO: 2100140 - RNA, 23 nt, Human
ccccuugcccagggcucagccug

SEQ ID NO: 2100141 - RNA, 17 nt, Human
ccccuugcccagggcuc

SEQ ID NO: 2100142 - RNA, 20 nt, Human
ccccuugcccagggcucagc

SEQ ID NO: 2100143 - RNA, 21 nt, Human
ccccuugcccagggcucagcc

SEQ ID NO: 2100144 - RNA, 12 nt, Human
ccccucuugccc

SEQ ID NO: 2100145 - RNA, 22 nt, Human
ccccuugcucuccccugcccug

SEQ ID NO: 2100146 - RNA, 19 nt, Human
auuagcauuugucaacaaa

SEQ ID NO: 2100147 - RNA, 17 nt, Human
auuagcaguuugcuuug

SEQ ID NO: 2100148 - RNA, 14 nt, Human
auuagauuauauug

SEQ ID NO: 2100149 - RNA, 21 nt, Human
auuagauuauauugagacaaa

SEQ ID NO: 2100150 - RNA, 18 nt, Human
auuagccgggcauggugg

SEQ ID NO: 2100151 - RNA, 15 nt, Human
auuagccagguaaug

SEQ ID NO: 2100152 - RNA, 17 nt, Human
auuagccacaaaauugg

SEQ ID NO: 2100153 - RNA, 14 nt, Human
auuagcauuuaguc

SEQ ID NO: 2100154 - RNA, 16 nt, Human
auuacaggugugaacc

SEQ ID NO: 2100155 - RNA, 21 nt, Human
auuacagagaggagaaacaca

SEQ ID NO: 2100156 - RNA, 22 nt, Human
auuacagagaggagaaacacau

SEQ ID NO: 2100157 - RNA, 15 nt, Human
auuacaacagugaga

SEQ ID NO: 2100158 - RNA, 19 nt, Human
auuacagagaggagaaaca

SEQ ID NO: 2100159 - RNA, 14 nt, Human
auuaauuaaaugca

SEQ ID NO: 2100160 - RNA, 19 nt, Human
auuaauucaccuuccagug

SEQ ID NO: 2100161 - RNA, 18 nt, Human
auguuuguggccucagaa

SEQ ID NO: 2100162 - RNA, 14 nt, Human
auguuuguggccuc

SEQ ID NO: 2100163 - RNA, 15 nt, Human
auguuuguggccuca

SEQ ID NO: 2100164 - RNA, 16 nt, Human
auguuuguggccucag

SEQ ID NO: 2100165 - RNA, 17 nt, Human
auguuuguggccucaga

SEQ ID NO: 2100166 - RNA, 23 nt, Human
auguuuguccugaacacuuuugu

SEQ ID NO: 2100167 - RNA, 10 nt, Human
auguuugugg

SEQ ID NO: 2100168 - RNA, 13 nt, Human
auguuuguggccu

SEQ ID NO: 2100169 - RNA, 23 nt, Human
auguuugggagacugcugaguca

SEQ ID NO: 2100170 - RNA, 18 nt, Human
auguuugccucugccucu

SEQ ID NO: 2100171 - RNA, 15 nt, Human
auuagggguugcuaa

SEQ ID NO: 2100172 - RNA, 22 nt, Human
auuagggguugcuaagaagcga

SEQ ID NO: 2100173 - RNA, 16 nt, Human
auuagcugugugaaau

SEQ ID NO: 2100174 - RNA, 15 nt, Human
auuagcuuuacuguu

SEQ ID NO: 2100175 - RNA, 20 nt, Human
auuagcuuuacuguuuguua

SEQ ID NO: 2100176 - RNA, 15 nt, Human
auuaggaaaauaugg

SEQ ID NO: 2100177 - RNA, 20 nt, Human
auuaggaaguguaacagcug

SEQ ID NO: 2100178 - RNA, 22 nt, Human
auuaggaaguguaacagcugag

SEQ ID NO: 2100179 - RNA, 13 nt, Human
auuaggaauaaau

SEQ ID NO: 2100180 - RNA, 16 nt, Human
auuaggaauaaauaaa

SEQ ID NO: 2100181 - RNA, 21 nt, Human
auuaggaaguguaacagcuga

SEQ ID NO: 2100182 - RNA, 13 nt, Human
auuagguuaacua

SEQ ID NO: 2100183 - RNA, 15 nt, Human
auuagguuaacuaug

SEQ ID NO: 2100184 - RNA, 19 nt, Human
auuagguuaacuauguaca

SEQ ID NO: 2100185 - RNA, 20 nt, Human
auuagguuaacuauguacaa

SEQ ID NO: 2100186 - RNA, 18 nt, Human
auucaauuccucugggaa

SEQ ID NO: 2100187 - RNA, 17 nt, Human
auucaauuccucuggga

SEQ ID NO: 2100188 - RNA, 13 nt, Human
auucacaagcugc

SEQ ID NO: 2100189 - RNA, 14 nt, Human
auucacaagcugcc

SEQ ID NO: 2100190 - RNA, 15 nt, Human
auucacaagcugccu

SEQ ID NO: 2100191 - RNA, 16 nt, Human
auucacaagcugccuc

SEQ ID NO: 2100192 - RNA, 20 nt, Human
auucacaagcugccucccug

SEQ ID NO: 2100193 - RNA, 13 nt, Human
auucacaauagaa

SEQ ID NO: 2100194 - RNA, 14 nt, Human
auucacaauagaaa

SEQ ID NO: 2100195 - RNA, 22 nt, Human
auucacaaugaaaugcucuccu

SEQ ID NO: 2100196 - RNA, 23 nt, Human
auucaauguuuaugcaaggaagg

SEQ ID NO: 2100197 - RNA, 14 nt, Human
auucaaauaccaau

SEQ ID NO: 2100198 - RNA, 22 nt, Human
auucaauguuuaugcaaggaag

SEQ ID NO: 2100199 - RNA, 16 nt, Human
auucaauuccucuggg

SEQ ID NO: 2100200 - RNA, 14 nt, Human
auucaauuccucug

SEQ ID NO: 2100201 - RNA, 21 nt, Human
auuaugcaggggcaaacaccu

SEQ ID NO: 2100202 - RNA, 15 nt, Human
auuaugcauaacuga

SEQ ID NO: 2100203 - RNA, 17 nt, Human
auuaugcauaacugaca

SEQ ID NO: 2100204 - RNA, 14 nt, Human
auuaugcaaauucc

SEQ ID NO: 2100205 - RNA, 17 nt, Human
auuaugcaaauucccag

SEQ ID NO: 2100206 - RNA, 21 nt, Human
auuaugaugugggucaaggaa

SEQ ID NO: 2100207 - RNA, 16 nt, Human
auuaugacaguuauac

SEQ ID NO: 2100208 - RNA, 17 nt, Human
auuaugacaguuauacu

SEQ ID NO: 2100209 - RNA, 19 nt, Human
auuaugacaguuauacugu

SEQ ID NO: 2100210 - RNA, 14 nt, Human
auuaugacuguuuu

SEQ ID NO: 2100211 - RNA, 21 nt, Human
auuaugacuguuuuuuaaacu

SEQ ID NO: 2100212 - RNA, 20 nt, Human
auuaugagaggcaaugauug

SEQ ID NO: 2100213 - RNA, 12 nt, Human
auuaugacaguu

SEQ ID NO: 2100214 - RNA, 14 nt, Human
auuaugacaguuau

SEQ ID NO: 2100215 - RNA, 15 nt, Human
auuaugacaguuaua

SEQ ID NO: 2100216 - RNA, 22 nt, Human
auugcuacuguccuacccaccc

SEQ ID NO: 2100217 - RNA, 20 nt, Human
auugcuacuguccuacccac

SEQ ID NO: 2100218 - RNA, 17 nt, Human
auugauaugaaaaauau

SEQ ID NO: 2100219 - RNA, 15 nt, Human
auugcuacuuccugc

SEQ ID NO: 2100220 - RNA, 19 nt, Human
auugcuacuuccugccugg

SEQ ID NO: 2100221 - RNA, 23 nt, Human
auugcuacuuccugccuggucuc

SEQ ID NO: 2100222 - RNA, 17 nt, Human
auugauaugcuuauaca

SEQ ID NO: 2100223 - RNA, 19 nt, Human
auugauauaaauaaaacau

SEQ ID NO: 2100224 - RNA, 21 nt, Human
auugauauacacggaugacuu

SEQ ID NO: 2100225 - RNA, 18 nt, Human
auugauauaaauaaaaca

SEQ ID NO: 2100226 - RNA, 14 nt, Human
auugauaugaaaaa

SEQ ID NO: 2100227 - RNA, 15 nt, Human
auugauaugaaaaau

SEQ ID NO: 2100228 - RNA, 16 nt, Human
auugauaugaaaaaua

SEQ ID NO: 2100229 - RNA, 15 nt, Human
auugcuacuguccua

SEQ ID NO: 2100230 - RNA, 12 nt, Human
auugauaauaaa

SEQ ID NO: 2100231 - RNA, 13 nt, Human
auugauaauaaac

SEQ ID NO: 2100232 - RNA, 14 nt, Human
auucuucugcuuca

SEQ ID NO: 2100233 - RNA, 16 nt, Human
auucuugaaagcugug

SEQ ID NO: 2100234 - RNA, 22 nt, Human
auucuucuuccaacguggccca

SEQ ID NO: 2100235 - RNA, 13 nt, Human
auucuugaguuua

SEQ ID NO: 2100236 - RNA, 12 nt, Human
auucuucugcuu

SEQ ID NO: 2100237 - RNA, 11 nt, Human
auucuucugcu

SEQ ID NO: 2100238 - RNA, 12 nt, Human
auucucuuuggu

SEQ ID NO: 2100239 - RNA, 20 nt, Human
auucucuuugguguacaaaa

SEQ ID NO: 2100240 - RNA, 13 nt, Human
auuguaauguuac

SEQ ID NO: 2100241 - RNA, 15 nt, Human
auuguaauguuacug

SEQ ID NO: 2100242 - RNA, 17 nt, Human
auuguaauguuacugau

SEQ ID NO: 2100243 - RNA, 24 nt, Human
auuguaauguuacugaucaugcau

SEQ ID NO: 2100244 - RNA, 15 nt, Human
auuguaaauacaagu

SEQ ID NO: 2100245 - RNA, 16 nt, Human
auuguaaauacaaguu

SEQ ID NO: 2100246 - RNA, 23 nt, Human
auuguaaauacaaguucuauuua

SEQ ID NO: 2100247 - RNA, 18 nt, Human
auugcuugagcucaggag

SEQ ID NO: 2100248 - RNA, 23 nt, Human
auugcuugaaagaaaauaugcau

SEQ ID NO: 2100249 - RNA, 23 nt, Human
auuguaaacaaacuguguaacug

SEQ ID NO: 2100250 - RNA, 12 nt, Human
auuguaaacugu

SEQ ID NO: 2100251 - RNA, 13 nt, Human
auuguaaacugua

SEQ ID NO: 2100252 - RNA, 14 nt, Human
auuguaaacuguac

SEQ ID NO: 2100253 - RNA, 15 nt, Human
auuguaaacuguacu

SEQ ID NO: 2100254 - RNA, 17 nt, Human
auuguaaacuguacuag

SEQ ID NO: 2100255 - RNA, 12 nt, Human
auuguuccaaga

SEQ ID NO: 2100256 - RNA, 14 nt, Human
auuguuccaagaca

SEQ ID NO: 2100257 - RNA, 20 nt, Human
auuguguggucaguggcucu

SEQ ID NO: 2100258 - RNA, 12 nt, Human
auugcugcuuga

SEQ ID NO: 2100259 - RNA, 18 nt, Human
auugcugcuccuuagcug

SEQ ID NO: 2100260 - RNA, 20 nt, Human
auugcugcuccuuagcugcc

SEQ ID NO: 2100261 - RNA, 21 nt, Human
auugcugcuccuuagcugcca

SEQ ID NO: 2100262 - RNA, 22 nt, Human
auugcugcuccuuagcugccaa

SEQ ID NO: 2100263 - RNA, 19 nt, Human
auugcuggcaaagacagaa

SEQ ID NO: 2100264 - RNA, 20 nt, Human
auugcuggcaaagacagaag

SEQ ID NO: 2100265 - RNA, 13 nt, Human
auugcuucuguag

SEQ ID NO: 2100266 - RNA, 15 nt, Human
auugcuucuguagua

SEQ ID NO: 2100267 - RNA, 22 nt, Human
auugcuucuguaguacuccuua

SEQ ID NO: 2100268 - RNA, 20 nt, Human
auugcuucacaacccaucua

SEQ ID NO: 2100269 - RNA, 22 nt, Human
auugcuggcaaagacagaagcc

SEQ ID NO: 2100270 - RNA, 15 nt, Human
auugcuggucuugua

SEQ ID NO: 2100271 - RNA, 16 nt, Human
auugcuggucuuguaa

SEQ ID NO: 2100272 - RNA, 17 nt, Human
auugcuggucuuguaag

SEQ ID NO: 2100273 - RNA, 18 nt, Human
auugcuggucuuguaaga

SEQ ID NO: 2100274 - RNA, 19 nt, Human
auugcuggucuuguaagag

SEQ ID NO: 2100275 - RNA, 16 nt, Human
auugcuugaaagaaaa

SEQ ID NO: 2100276 - RNA, 17 nt, Human
auugcuugagcccagga

SEQ ID NO: 2100277 - RNA, 18 nt, Human
auugcuugagcccaggag

SEQ ID NO: 2100278 - RNA, 14 nt, Human
auugcuugagcuca

SEQ ID NO: 2100279 - RNA, 23 nt, Human
auugcucaaguucauugaugacc

SEQ ID NO: 2100280 - RNA, 12 nt, Human
auugcuccuuga

SEQ ID NO: 2100281 - RNA, 17 nt, Human
auugaguaagauuuacc

SEQ ID NO: 2100282 - RNA, 22 nt, Human
auuguugagguggucugaaugu

SEQ ID NO: 2100283 - RNA, 23 nt, Human
auuguugagguggucugaauguu

SEQ ID NO: 2100284 - RNA, 20 nt, Human
auuguugagguggucugaau

SEQ ID NO: 2100285 - RNA, 21 nt, Human
auuguugagguggucugaaug

SEQ ID NO: 2100286 - RNA, 15 nt, Human
auuguuccaagacau

SEQ ID NO: 2100287 - RNA, 16 nt, Human
auuguuccaagacauu

SEQ ID NO: 2100288 - RNA, 17 nt, Human
auuguuccaagacauug

SEQ ID NO: 2100289 - RNA, 18 nt, Human
auuguuccaagacauugu

SEQ ID NO: 2100290 - RNA, 21 nt, Human
auuguuccaagacauugucaa

SEQ ID NO: 2100291 - RNA, 20 nt, Human
auuguuccaagacauuguca

SEQ ID NO: 2100292 - RNA, 23 nt, Human
auuuguuuauuuuuauauagcuu

SEQ ID NO: 2100293 - RNA, 21 nt, Human
auuuuaugaaagguuuacauu

SEQ ID NO: 2100294 - RNA, 18 nt, Human
auuuguuuuagaaugaug

SEQ ID NO: 2100295 - RNA, 18 nt, Human
auuuuauagcucaguuua

SEQ ID NO: 2100296 - RNA, 19 nt, Human
auuuuauagcucaguuuau

SEQ ID NO: 2100297 - RNA, 22 nt, Human
auuuuauagcucaguuuaucca

SEQ ID NO: 2100298 - RNA, 16 nt, Human
auuuuaugaaugucuu

SEQ ID NO: 2100299 - RNA, 16 nt, Human
auuuguguaauaaagu

SEQ ID NO: 2100300 - RNA, 17 nt, Human
auuuguguaauaaagug

SEQ ID NO: 2100301 - RNA, 18 nt, Human
auuuguguaauaaagugu

SEQ ID NO: 2100302 - RNA, 20 nt, Human
auuuguguaauaaaguguuu

SEQ ID NO: 2100303 - RNA, 21 nt, Human
auuuguguaauaaaguguuuu

SEQ ID NO: 2100304 - RNA, 22 nt, Human
auuuguguaauaaaguguuuuc

SEQ ID NO: 2100305 - RNA, 17 nt, Human
auuugcuaucaaaauaa

SEQ ID NO: 2100306 - RNA, 18 nt, Human
auuugcuuauuuaauaaa

SEQ ID NO: 2100307 - RNA, 12 nt, Human
auuuggaaaaua

SEQ ID NO: 2100308 - RNA, 13 nt, Human
auuuggaaaauaa

SEQ ID NO: 2100309 - RNA, 20 nt, Human
auuuuaugccuuuuauuucu

SEQ ID NO: 2100310 - RNA, 21 nt, Human
auuuuaugccuuuuauuucuu

SEQ ID NO: 2100311 - RNA, 14 nt, Human
auuugccaaaauaa

SEQ ID NO: 2100312 - RNA, 17 nt, Human
auuugccaaaauaaugu

SEQ ID NO: 2100313 - RNA, 20 nt, Human
auuugccaaaauaaugucuu

SEQ ID NO: 2100314 - RNA, 18 nt, Human
auuugcgcacaacuuaaa

SEQ ID NO: 2100315 - RNA, 15 nt, Human
auuugccugugccac

SEQ ID NO: 2100316 - RNA, 15 nt, Human
auuugcccauuuaca

SEQ ID NO: 2100317 - RNA, 19 nt, Human
auuugcccauuuacacuuu

SEQ ID NO: 2100318 - RNA, 20 nt, Human
auuugcccauuuacacuuuu

SEQ ID NO: 2100319 - RNA, 21 nt, Human
auuugcccauuuacacuuuug

SEQ ID NO: 2100320 - RNA, 21 nt, Human
auuugccuguuucugcuugcu

SEQ ID NO: 2100321 - RNA, 15 nt, Human
auuugcgaaugguuc

SEQ ID NO: 2100322 - RNA, 23 nt, Human
auuugauucuguguguuuucaua

SEQ ID NO: 2100323 - RNA, 17 nt, Human
auuugcauauguaugac

SEQ ID NO: 2100324 - RNA, 15 nt, Human
auuugcauauguaug

SEQ ID NO: 2100325 - RNA, 17 nt, Human
caaagcacauugaaaga

SEQ ID NO: 2100326 - RNA, 18 nt, Human
caaagcacauugaaagag

SEQ ID NO: 2100327 - RNA, 22 nt, Human
caaagauguuugucagauauga

SEQ ID NO: 2100328 - RNA, 16 nt, Human
caaagauguuugucag

SEQ ID NO: 2100329 - RNA, 18 nt, Human
caaagauguuugucagau

SEQ ID NO: 2100330 - RNA, 13 nt, Human
caaagucuccagc

SEQ ID NO: 2100331 - RNA, 14 nt, Human
caaagucuccagcc

SEQ ID NO: 2100332 - RNA, 14 nt, Human
caaaguagaagucu

SEQ ID NO: 2100333 - RNA, 21 nt, Human
caaaguagaagucuuagaugu

SEQ ID NO: 2100334 - RNA, 18 nt, Human
caaaguaaaacuugcugc

SEQ ID NO: 2100335 - RNA, 16 nt, Human
caaaguaaaacuugcu

SEQ ID NO: 2100336 - RNA, 14 nt, Human
caaagguauaauuu

SEQ ID NO: 2100337 - RNA, 13 nt, Human
caacacguuacua

SEQ ID NO: 2100338 - RNA, 15 nt, Human
caaaugcuguauucu

SEQ ID NO: 2100339 - RNA, 14 nt, Human
caacaagagcgaaa

SEQ ID NO: 2100340 - RNA, 18 nt, Human
caacaagggcaguggagg

SEQ ID NO: 2100341 - RNA, 19 nt, Human
caacaagggcaguggaggu

SEQ ID NO: 2100342 - RNA, 20 nt, Human
caacaccucugcacaagcug

SEQ ID NO: 2100343 - RNA, 21 nt, Human
caaaagauguauccuuccaau

SEQ ID NO: 2100344 - RNA, 16 nt, Human
caaacagcucaggcug

SEQ ID NO: 2100345 - RNA, 13 nt, Human
caaacagccacac

SEQ ID NO: 2100346 - RNA, 13 nt, Human
caaacccaguguu

SEQ ID NO: 2100347 - RNA, 24 nt, Human
caaacccaguguuuuaggagcaug

SEQ ID NO: 2100348 - RNA, 15 nt, Human
caaaagggacaugaa

SEQ ID NO: 2100349 - RNA, 19 nt, Human
auuuuuuuuuuaaauuauu

SEQ ID NO: 2100350 - RNA, 16 nt, Human
caaaagaugcuucuca

SEQ ID NO: 2100351 - RNA, 18 nt, Human
caaaagaugcuucucacu

SEQ ID NO: 2100352 - RNA, 19 nt, Human
caaaaggcaguggggcugg

SEQ ID NO: 2100353 - RNA, 20 nt, Human
caaaaggcaguggggcuggg

SEQ ID NO: 2100354 - RNA, 21 nt, Human
caaaaggcaguggggcugggg

SEQ ID NO: 2100355 - RNA, 20 nt, Human
caccuacaguguacagucuu

SEQ ID NO: 2100356 - RNA, 13 nt, Human
caccucagccucc

SEQ ID NO: 2100357 - RNA, 18 nt, Human
caccucagccuccugugu

SEQ ID NO: 2100358 - RNA, 14 nt, Human
caccucagccuccc

SEQ ID NO: 2100359 - RNA, 13 nt, Human
caccuacagugua

SEQ ID NO: 2100360 - RNA, 14 nt, Human
caccuaauguuuau

SEQ ID NO: 2100361 - RNA, 20 nt, Human
caccuaauguuuaugagcca

SEQ ID NO: 2100362 - RNA, 21 nt, Human
caccuaauguuuaugagccag

SEQ ID NO: 2100363 - RNA, 16 nt, Human
caccuacaguguacag

SEQ ID NO: 2100364 - RNA, 17 nt, Human
caccuacaguguacagu

SEQ ID NO: 2100365 - RNA, 23 nt, Human
caccugccucggccucccaaagu

SEQ ID NO: 2100366 - RNA, 13 nt, Human
caccugccgaccu

SEQ ID NO: 2100367 - RNA, 23 nt, Human
caccugcccccuucucccacacu

SEQ ID NO: 2100368 - RNA, 21 nt, Human
caccugccgaccucguccucc

SEQ ID NO: 2100369 - RNA, 23 nt, Human
caccugccgaccucguccucccc

SEQ ID NO: 2100370 - RNA, 19 nt, Human
caccugcccccuucuccca

SEQ ID NO: 2100371 - RNA, 20 nt, Human
caccugcccccuucucccac

SEQ ID NO: 2100372 - RNA, 21 nt, Human
caccugcccccuucucccaca

SEQ ID NO: 2100373 - RNA, 22 nt, Human
caccugcccccuucucccacac

SEQ ID NO: 2100374 - RNA, 12 nt, Human
caccucagccuu

SEQ ID NO: 2100375 - RNA, 13 nt, Human
caccucagccuug

SEQ ID NO: 2100376 - RNA, 15 nt, Human
caccucaggccaggu

SEQ ID NO: 2100377 - RNA, 15 nt, Human
caccucagccuugga

SEQ ID NO: 2100378 - RNA, 23 nt, Human
caccucaggccaggugcaguggc

SEQ ID NO: 2100379 - RNA, 15 nt, Human
caccugcccccuucu

SEQ ID NO: 2100380 - RNA, 17 nt, Human
caccugcccccuucucc

SEQ ID NO: 2100381 - RNA, 14 nt, Human
cacccucccagcuc

SEQ ID NO: 2100382 - RNA, 15 nt, Human
cacccucccagcucu

SEQ ID NO: 2100383 - RNA, 16 nt, Human
cacccucccagcucug

SEQ ID NO: 2100384 - RNA, 14 nt, Human
cacccucaggcagg

SEQ ID NO: 2100385 - RNA, 16 nt, Human
cacccuggggagaaag

SEQ ID NO: 2100386 - RNA, 15 nt, Human
cacccuggggagaaa

SEQ ID NO: 2100387 - RNA, 17 nt, Human
cacccugaaagcccuga

SEQ ID NO: 2100388 - RNA, 15 nt, Human
cacccucucccagga

SEQ ID NO: 2100389 - RNA, 16 nt, Human
cacccucucccaggac

SEQ ID NO: 2100390 - RNA, 13 nt, Human
caccuuggcugca

SEQ ID NO: 2100391 - RNA, 15 nt, Human
caccuuggcucaagu

SEQ ID NO: 2100392 - RNA, 14 nt, Human
caccuuggcucaag

SEQ ID NO: 2100393 - RNA, 14 nt, Human
caccuuggcugcag

SEQ ID NO: 2100394 - RNA, 14 nt, Human
caccccacccuucc

SEQ ID NO: 2100395 - RNA, 14 nt, Human
caccccacucacag

SEQ ID NO: 2100396 - RNA, 17 nt, Human
caccccacucacagaga

SEQ ID NO: 2100397 - RNA, 20 nt, Human
cacuccaggaaggggcugga

SEQ ID NO: 2100398 - RNA, 14 nt, Human
cacuccccugcacu

SEQ ID NO: 2100399 - RNA, 17 nt, Human
cacuccccugcacugga

SEQ ID NO: 2100400 - RNA, 14 nt, Human
cacugaauauuuau

SEQ ID NO: 2100401 - RNA, 13 nt, Human
cacugaauauuua

SEQ ID NO: 2100402 - RNA, 23 nt, Human
cacugaauuaaugacagagccag

SEQ ID NO: 2100403 - RNA, 19 nt, Human
cacugacacaaaaaguaga

SEQ ID NO: 2100404 - RNA, 13 nt, Human
cacuaggcugggu

SEQ ID NO: 2100405 - RNA, 14 nt, Human
cacuaggcugggug

SEQ ID NO: 2100406 - RNA, 15 nt, Human
cacuaggcugggugc

SEQ ID NO: 2100407 - RNA, 18 nt, Human
cacuaggcugggugccca

SEQ ID NO: 2100408 - RNA, 21 nt, Human
cacuaggcugggugcccacag

SEQ ID NO: 2100409 - RNA, 22 nt, Human
cacuaggcugggugcccacagc

SEQ ID NO: 2100410 - RNA, 23 nt, Human
cacuaggcugggugcccacagcc

SEQ ID NO: 2100411 - RNA, 16 nt, Human
cacuccagccugggug

SEQ ID NO: 2100412 - RNA, 16 nt, Human
cacuccaaucugggug

SEQ ID NO: 2100413 - RNA, 24 nt, Human
cacuuagaaauugcauuuccugac

SEQ ID NO: 2100414 - RNA, 13 nt, Human
cacuuauugcuuu

SEQ ID NO: 2100415 - RNA, 14 nt, Human
cacuuauugcuuug

SEQ ID NO: 2100416 - RNA, 15 nt, Human
cacuuauugcuuuga

SEQ ID NO: 2100417 - RNA, 23 nt, Human
cacuuauguuacugguguccagc

SEQ ID NO: 2100418 - RNA, 19 nt, Human
cacuuguauccucugguuc

SEQ ID NO: 2100419 - RNA, 16 nt, Human
cacuuacacuuuaugc

SEQ ID NO: 2100420 - RNA, 18 nt, Human
cacuuacacuuuaugcac

SEQ ID NO: 2100421 - RNA, 18 nt, Human
cacuuaccuagauuuaca

SEQ ID NO: 2100422 - RNA, 19 nt, Human
cacuuacagauaggccuuc

SEQ ID NO: 2100423 - RNA, 21 nt, Human
cacuuacagauaggccuucuu

SEQ ID NO: 2100424 - RNA, 23 nt, Human
cacuuacagauaggccuucuugu

SEQ ID NO: 2100425 - RNA, 13 nt, Human
cacuuaccuucaa

SEQ ID NO: 2100426 - RNA, 14 nt, Human
cacuuaccuucaau

SEQ ID NO: 2100427 - RNA, 15 nt, Human
cacuuaccuucaaua

SEQ ID NO: 2100428 - RNA, 16 nt, Human
cacuuaccuucaauaa

SEQ ID NO: 2100429 - RNA, 17 nt, Human
cacuuaccuucaauaaa

SEQ ID NO: 2100430 - RNA, 18 nt, Human
cacuuaccuucaauaaag

SEQ ID NO: 2100431 - RNA, 19 nt, Human
cacuuaccuucaauaaagu

SEQ ID NO: 2100432 - RNA, 21 nt, Human
cacuuaccuucaauaaaguau

SEQ ID NO: 2100433 - RNA, 23 nt, Human
cacugguggcccgacagccuggc

SEQ ID NO: 2100434 - RNA, 15 nt, Human
cacugggguccuggg

SEQ ID NO: 2100435 - RNA, 18 nt, Human
cacugggguccuggggcc

SEQ ID NO: 2100436 - RNA, 19 nt, Human
cacugggguccuggggccu

SEQ ID NO: 2100437 - RNA, 23 nt, Human
cacuggugugagggccccugccu

SEQ ID NO: 2100438 - RNA, 13 nt, Human
cacuuguuccagc

SEQ ID NO: 2100439 - RNA, 15 nt, Human
cacuuguuccagcuc

SEQ ID NO: 2100440 - RNA, 18 nt, Human
cacuuguuccagcucuuu

SEQ ID NO: 2100441 - RNA, 16 nt, Human
cacuuguuccagcucu

SEQ ID NO: 2100442 - RNA, 17 nt, Human
cacuuguuccagcucuu

SEQ ID NO: 2100443 - RNA, 12 nt, Human
cacugcagccuc

SEQ ID NO: 2100444 - RNA, 20 nt, Human
cacugcacuccagccugggu

SEQ ID NO: 2100445 - RNA, 12 nt, Human
cacugcacucca

SEQ ID NO: 2100446 - RNA, 13 nt, Human
cacugcacucuag

SEQ ID NO: 2100447 - RNA, 18 nt, Human
cacugcacucuagccgga

SEQ ID NO: 2100448 - RNA, 17 nt, Human
cacugcacuccagccug

SEQ ID NO: 2100449 - RNA, 20 nt, Human
cacugcacuccagccugggc

SEQ ID NO: 2100450 - RNA, 15 nt, Human
cacugcacuccagcc

SEQ ID NO: 2100451 - RNA, 16 nt, Human
cacugcacuccagccu

SEQ ID NO: 2100452 - RNA, 18 nt, Human
cacugcacuccagccugg

SEQ ID NO: 2100453 - RNA, 19 nt, Human
cacugcacuccagccuggg

SEQ ID NO: 2100454 - RNA, 19 nt, Human
cacugcacuauagccuagg

SEQ ID NO: 2100455 - RNA, 11 nt, Human
cacugccacac

SEQ ID NO: 2100456 - RNA, 13 nt, Human
cacugcagccuca

SEQ ID NO: 2100457 - RNA, 13 nt, Human
cacugcaggcccc

SEQ ID NO: 2100458 - RNA, 16 nt, Human
cacugcauaccaaccu

SEQ ID NO: 2100459 - RNA, 16 nt, Human
cacugcaggccccgcu

SEQ ID NO: 2100460 - RNA, 22 nt, Human
cacuggcugucaguaugacauu

SEQ ID NO: 2100461 - RNA, 13 nt, Human
cacuggcuguggg

SEQ ID NO: 2100462 - RNA, 14 nt, Human
cacuggcugugggc

SEQ ID NO: 2100463 - RNA, 17 nt, Human
cacuggcugugggcucc

SEQ ID NO: 2100464 - RNA, 18 nt, Human
cacuggcugugggcuccc

SEQ ID NO: 2100465 - RNA, 20 nt, Human
cacuggcugugggcucccuu

SEQ ID NO: 2100466 - RNA, 21 nt, Human
cacuggcugugggcucccuuc

SEQ ID NO: 2100467 - RNA, 14 nt, Human
cacugggggagggg

SEQ ID NO: 2100468 - RNA, 15 nt, Human
cacugggggagggga

SEQ ID NO: 2100469 - RNA, 18 nt, Human
cacugggggaggggacau

SEQ ID NO: 2100470 - RNA, 21 nt, Human
cacugggggaggggacauuga

SEQ ID NO: 2100471 - RNA, 17 nt, Human
caaguccacaguggaac

SEQ ID NO: 2100472 - RNA, 17 nt, Human
caagucaugugcauuuc

SEQ ID NO: 2100473 - RNA, 12 nt, Human
caagucacaaag

SEQ ID NO: 2100474 - RNA, 14 nt, Human
caagucacaaagga

SEQ ID NO: 2100475 - RNA, 16 nt, Human
caagucacaaaggaau

SEQ ID NO: 2100476 - RNA, 19 nt, Human
caagucacaaaggaaugga

SEQ ID NO: 2100477 - RNA, 19 nt, Human
caagucaaccaauguagaa

SEQ ID NO: 2100478 - RNA, 12 nt, Human
caagucauuuua

SEQ ID NO: 2100479 - RNA, 17 nt, Human
caagucauuuuaacuuu

SEQ ID NO: 2100480 - RNA, 21 nt, Human
caaguaugaauaaagacaccu

SEQ ID NO: 2100481 - RNA, 19 nt, Human
caaguaugaauaaagacac

SEQ ID NO: 2100482 - RNA, 15 nt, Human
caaguaugugagugu

SEQ ID NO: 2100483 - RNA, 13 nt, Human
caagucaagugaa

SEQ ID NO: 2100484 - RNA, 17 nt, Human
caagucaagugaaaaag

SEQ ID NO: 2100485 - RNA, 16 nt, Human
caaguaugaauaaaga

SEQ ID NO: 2100486 - RNA, 17 nt, Human
caagcuaggugcuaauu

SEQ ID NO: 2100487 - RNA, 12 nt, Human
caagcucacagu

SEQ ID NO: 2100488 - RNA, 16 nt, Human
caagcucacaguuccu

SEQ ID NO: 2100489 - RNA, 19 nt, Human
caagcucacaguuccucgc

SEQ ID NO: 2100490 - RNA, 20 nt, Human
caagcucacaguuccucgcc

SEQ ID NO: 2100491 - RNA, 21 nt, Human
caagcucacaguuccucgccc

SEQ ID NO: 2100492 - RNA, 22 nt, Human
caagcucacaguuccucgcccu

SEQ ID NO: 2100493 - RNA, 23 nt, Human
caagcuaauaaaauaucauucag

SEQ ID NO: 2100494 - RNA, 22 nt, Human
caagcuaauaaaauaucauuca

SEQ ID NO: 2100495 - RNA, 22 nt, Human
caagcuccuugggaggccccac

SEQ ID NO: 2100496 - RNA, 13 nt, Human
caagcucugcucc

SEQ ID NO: 2100497 - RNA, 17 nt, Human
caagcuccuugggaggc

SEQ ID NO: 2100498 - RNA, 14 nt, Human
caagcucugcuccu

SEQ ID NO: 2100499 - RNA, 13 nt, Human
caagcugcacccu

SEQ ID NO: 2100500 - RNA, 14 nt, Human
caagcugcacccuc

SEQ ID NO: 2100501 - RNA, 18 nt, Human
caagcugcacccucaggc

SEQ ID NO: 2100502 - RNA, 20 nt, Human
caagcugcacccucaggcag

SEQ ID NO: 2100503 - RNA, 15 nt, Human
caaggcacuguacua

SEQ ID NO: 2100504 - RNA, 16 nt, Human
caaggcacuguacuag

SEQ ID NO: 2100505 - RNA, 23 nt, Human
caagucccugacucucugugacc

SEQ ID NO: 2100506 - RNA, 20 nt, Human
caagucccugacucucugug

SEQ ID NO: 2100507 - RNA, 21 nt, Human
caagucccugacucucuguga

SEQ ID NO: 2100508 - RNA, 20 nt, Human
caaguccaggucgggcucag

SEQ ID NO: 2100509 - RNA, 22 nt, Human
caagucccaccgguugcuucug

SEQ ID NO: 2100510 - RNA, 23 nt, Human
caagucccaccgguugcuucugg

SEQ ID NO: 2100511 - RNA, 18 nt, Human
caagucccugacucucug

SEQ ID NO: 2100512 - RNA, 12 nt, Human
caauaaaguauc

SEQ ID NO: 2100513 - RNA, 16 nt, Human
caauaaaguaucuaca

SEQ ID NO: 2100514 - RNA, 11 nt, Human
caauaaaguau

SEQ ID NO: 2100515 - RNA, 16 nt, Human
caagcuaauaaaauau

SEQ ID NO: 2100516 - RNA, 17 nt, Human
caagcuaauaaaauauc

SEQ ID NO: 2100517 - RNA, 19 nt, Human
caagcuaauaaaauaucau

SEQ ID NO: 2100518 - RNA, 21 nt, Human
caagcuaauaaaauaucauuc

SEQ ID NO: 2100519 - RNA, 23 nt, Human
cacacagugagucgaggacaggg

SEQ ID NO: 2100520 - RNA, 21 nt, Human
cacacagugagucgaggacag

SEQ ID NO: 2100521 - RNA, 15 nt, Human
cacacauacacacac

SEQ ID NO: 2100522 - RNA, 23 nt, Human
cacacauauaaacaucacacaca

SEQ ID NO: 2100523 - RNA, 21 nt, Human
cacacauauaaacaucacaca

SEQ ID NO: 2100524 - RNA, 13 nt, Human
cacacauaaagga

SEQ ID NO: 2100525 - RNA, 23 nt, Human
cacacaguauuacuucugcuaca

SEQ ID NO: 2100526 - RNA, 20 nt, Human
cacacaguauuacuucugcu

SEQ ID NO: 2100527 - RNA, 18 nt, Human
cacacagugagucgagga

SEQ ID NO: 2100528 - RNA, 16 nt, Human
cacacagcucuguccu

SEQ ID NO: 2100529 - RNA, 15 nt, Human
cacacagcugcagag

SEQ ID NO: 2100530 - RNA, 22 nt, Human
cacacagcuuuuaguacccacc

SEQ ID NO: 2100531 - RNA, 13 nt, Human
cacacaggcaacu

SEQ ID NO: 2100532 - RNA, 20 nt, Human
cacacaggcaacugaggcag

SEQ ID NO: 2100533 - RNA, 16 nt, Human
cacacaggcaacugag

SEQ ID NO: 2100534 - RNA, 19 nt, Human
cacacaggcaacugaggca

SEQ ID NO: 2100535 - RNA, 11 nt, Human
cacagccucug

SEQ ID NO: 2100536 - RNA, 13 nt, Human
cacagaaacacaa

SEQ ID NO: 2100537 - RNA, 21 nt, Human
cacagaaacacaauauuuugu

SEQ ID NO: 2100538 - RNA, 18 nt, Human
cacagaaacacaauauuu

SEQ ID NO: 2100539 - RNA, 15 nt, Human
cacagguguuuauac

SEQ ID NO: 2100540 - RNA, 19 nt, Human
cacagguucaugccaccau

SEQ ID NO: 2100541 - RNA, 21 nt, Human
cacaguauuacuucugcuaca

SEQ ID NO: 2100542 - RNA, 20 nt, Human
cacaguauuacuucugcuac

SEQ ID NO: 2100543 - RNA, 14 nt, Human
cacagccucugccu

SEQ ID NO: 2100544 - RNA, 14 nt, Human
cacaggugucccca

SEQ ID NO: 2100545 - RNA, 20 nt, Human
cacagguguccccagcccac

SEQ ID NO: 2100546 - RNA, 21 nt, Human
cacagguguccccagcccacu

SEQ ID NO: 2100547 - RNA, 18 nt, Human
cacagacauucugccagg

SEQ ID NO: 2100548 - RNA, 20 nt, Human
cacagacauucugccaggcc

SEQ ID NO: 2100549 - RNA, 23 nt, Human
cacaggcccuuccucuccacugc

SEQ ID NO: 2100550 - RNA, 22 nt, Human
cacaggcccuuccucuccacug

SEQ ID NO: 2100551 - RNA, 17 nt, Human
cacagcgagacuccguc

SEQ ID NO: 2100552 - RNA, 20 nt, Human
caauggagacugucucaaga

SEQ ID NO: 2100553 - RNA, 22 nt, Human
caauggaguagaccccuggcug

SEQ ID NO: 2100554 - RNA, 23 nt, Human
caauggaguagaccccuggcugg

SEQ ID NO: 2100555 - RNA, 12 nt, Human
caauggcagccu

SEQ ID NO: 2100556 - RNA, 11 nt, Human
caauggcagcc

SEQ ID NO: 2100557 - RNA, 13 nt, Human
caauuuaaagcaa

SEQ ID NO: 2100558 - RNA, 18 nt, Human
caauugaacuuaaauaaa

SEQ ID NO: 2100559 - RNA, 21 nt, Human
caauugaacuuaaauaaaugu

SEQ ID NO: 2100560 - RNA, 12 nt, Human
cacaagcugccu

SEQ ID NO: 2100561 - RNA, 14 nt, Human
cacaagcugccucc

SEQ ID NO: 2100562 - RNA, 15 nt, Human
cacaagcugccuccc

SEQ ID NO: 2100563 - RNA, 16 nt, Human
cacaagcugccucccu

SEQ ID NO: 2100564 - RNA, 22 nt, Human
cacaagcugccucccuguccac

SEQ ID NO: 2100565 - RNA, 21 nt, Human
cacaagagcccagcagggccu

SEQ ID NO: 2100566 - RNA, 17 nt, Human
cacaagcugcacccuca

SEQ ID NO: 2100567 - RNA, 23 nt, Human
cacaagcugcacccucaggcagg

SEQ ID NO: 2100568 - RNA, 20 nt, Human
cacaagagcccagcagggcc

SEQ ID NO: 2100569 - RNA, 20 nt, Human
cacacagcucuguccuggga

SEQ ID NO: 2100570 - RNA, 17 nt, Human
cacacagcucuguccug

SEQ ID NO: 2100571 - RNA, 19 nt, Human
ccaaagugguauagaaaug

SEQ ID NO: 2100572 - RNA, 18 nt, Human
ccaaauuaucaagcuaau

SEQ ID NO: 2100573 - RNA, 22 nt, Human
ccaaauuaucaagcuaauaaaa

SEQ ID NO: 2100574 - RNA, 13 nt, Human
ccaaaucugccua

SEQ ID NO: 2100575 - RNA, 20 nt, Human
ccaaaucugccuauugcagc

SEQ ID NO: 2100576 - RNA, 23 nt, Human
ccaaaucugccuauugcagcugg

SEQ ID NO: 2100577 - RNA, 11 nt, Human
ccaacuuguaa

SEQ ID NO: 2100578 - RNA, 23 nt, Human
ccaacuuguauuaaagacagagg

SEQ ID NO: 2100579 - RNA, 21 nt, Human
ccaacuucauuugaugcuaaa

SEQ ID NO: 2100580 - RNA, 13 nt, Human
ccaacuucccagu

SEQ ID NO: 2100581 - RNA, 19 nt, Human
ccaaauuaucaagcuaaua

SEQ ID NO: 2100582 - RNA, 15 nt, Human
ccaacguggggcagc

SEQ ID NO: 2100583 - RNA, 16 nt, Human
ccaacguggggcagca

SEQ ID NO: 2100584 - RNA, 20 nt, Human
ccaacguggggcagcacaga

SEQ ID NO: 2100585 - RNA, 19 nt, Human
ccaacuaacaagaaacuca

SEQ ID NO: 2100586 - RNA, 22 nt, Human
ccaaagugcugggauuacaggg

SEQ ID NO: 2100587 - RNA, 17 nt, Human
ccaagcuuccuuuguuu

SEQ ID NO: 2100588 - RNA, 20 nt, Human
ccaagcugugacccucaauu

SEQ ID NO: 2100589 - RNA, 20 nt, Human
ccaagcuggucccacucagu

SEQ ID NO: 2100590 - RNA, 23 nt, Human
ccaagcuuguccaacccgaggcc

SEQ ID NO: 2100591 - RNA, 20 nt, Human
ccaauguucucucuucucca

SEQ ID NO: 2100592 - RNA, 19 nt, Human
ccaauuaaguccuacuuua

SEQ ID NO: 2100593 - RNA, 17 nt, Human
ccaauuaggaaguguaa

SEQ ID NO: 2100594 - RNA, 23 nt, Human
ccaauuaggaaguguaacagcug

SEQ ID NO: 2100595 - RNA, 14 nt, Human
ccaauguuuaaaaa

SEQ ID NO: 2100596 - RNA, 16 nt, Human
ccaauguuuaaaaaag

SEQ ID NO: 2100597 - RNA, 15 nt, Human
ccaauuaaccagaaa

SEQ ID NO: 2100598 - RNA, 15 nt, Human
ccaccuuggcucaag

SEQ ID NO: 2100599 - RNA, 14 nt, Human
ccaccuuggcucaa

SEQ ID NO: 2100600 - RNA, 19 nt, Human
ccaccuaccuucaaagcug

SEQ ID NO: 2100601 - RNA, 20 nt, Human
ccaccuaccuucaaagcuga

SEQ ID NO: 2100602 - RNA, 23 nt, Human
ccaccgggcugggagcucugcag

SEQ ID NO: 2100603 - RNA, 17 nt, Human
ccaccgguugcuucugg

SEQ ID NO: 2100604 - RNA, 18 nt, Human
ccaccgguugcuucuggg

SEQ ID NO: 2100605 - RNA, 20 nt, Human
ccaccgguugcuucugggaa

SEQ ID NO: 2100606 - RNA, 21 nt, Human
ccaccgguugcuucugggaag

SEQ ID NO: 2100607 - RNA, 22 nt, Human
ccaccgggcugggagcucugca

SEQ ID NO: 2100608 - RNA, 13 nt, Human
ccacccugcucuc

SEQ ID NO: 2100609 - RNA, 18 nt, Human
ccaccaucaccagacagg

SEQ ID NO: 2100610 - RNA, 20 nt, Human
ccaccaggcugcucagggcu

SEQ ID NO: 2100611 - RNA, 11 nt, Human
ccacccuggaa

SEQ ID NO: 2100612 - RNA, 22 nt, Human
ccacacuucaggcucuucuccu

SEQ ID NO: 2100613 - RNA, 20 nt, Human
ccacacuuccuguccagaga

SEQ ID NO: 2100614 - RNA, 21 nt, Human
ccacacuuccuguccagagag

SEQ ID NO: 2100615 - RNA, 12 nt, Human
ccacacuuccug

SEQ ID NO: 2100616 - RNA, 13 nt, Human
ccacacuuccugu

SEQ ID NO: 2100617 - RNA, 16 nt, Human
ccacacuuccugucca

SEQ ID NO: 2100618 - RNA, 18 nt, Human
ccacacuuccuguccaga

SEQ ID NO: 2100619 - RNA, 12 nt, Human
ccacagaaagag

SEQ ID NO: 2100620 - RNA, 13 nt, Human
ccacagaaagaga

SEQ ID NO: 2100621 - RNA, 14 nt, Human
ccacagaaagagag

SEQ ID NO: 2100622 - RNA, 15 nt, Human
ccacagaaagagagc

SEQ ID NO: 2100623 - RNA, 20 nt, Human
ccacagaagacuucccagcu

SEQ ID NO: 2100624 - RNA, 21 nt, Human
ccacagaagacuucccagcuu

SEQ ID NO: 2100625 - RNA, 20 nt, Human
ccacacuuguuccagcucuu

SEQ ID NO: 2100626 - RNA, 21 nt, Human
ccacacuuguuccagcucuuu

SEQ ID NO: 2100627 - RNA, 19 nt, Human
ccaccaggagaaccacuac

SEQ ID NO: 2100628 - RNA, 13 nt, Human
ccaccaggagaac

SEQ ID NO: 2100629 - RNA, 14 nt, Human
ccaccaggagaacc

SEQ ID NO: 2100630 - RNA, 11 nt, Human
ccaccagccug

SEQ ID NO: 2100631 - RNA, 14 nt, Human
ccaccagccugcac

SEQ ID NO: 2100632 - RNA, 23 nt, Human
ccaccagacugacaaauguguau

SEQ ID NO: 2100633 - RNA, 19 nt, Human
cauuuauuuuuuacauuau

SEQ ID NO: 2100634 - RNA, 17 nt, Human
cauuuauuuuuuacauu

SEQ ID NO: 2100635 - RNA, 16 nt, Human
cauuuauucugcucac

SEQ ID NO: 2100636 - RNA, 11 nt, Human
cauugcuucac

SEQ ID NO: 2100637 - RNA, 15 nt, Human
cauugcuucacaacc

SEQ ID NO: 2100638 - RNA, 13 nt, Human
cauugcugcuccu

SEQ ID NO: 2100639 - RNA, 18 nt, Human
cauugcugcuccuuagcu

SEQ ID NO: 2100640 - RNA, 20 nt, Human
cauugcugcuccuuagcugc

SEQ ID NO: 2100641 - RNA, 22 nt, Human
cauugcugcuccuuagcugcca

SEQ ID NO: 2100642 - RNA, 23 nt, Human
cauugcugcuccuuagcugccaa

SEQ ID NO: 2100643 - RNA, 17 nt, Human
cauugcuggucuuguaa

SEQ ID NO: 2100644 - RNA, 19 nt, Human
cauugcuggucuuguaaga

SEQ ID NO: 2100645 - RNA, 20 nt, Human
cauugcuggucuuguaagag

SEQ ID NO: 2100646 - RNA, 20 nt, Human
ccaaaaaauucuacaacaca

SEQ ID NO: 2100647 - RNA, 22 nt, Human
ccaaaaaauucuacaacacaca

SEQ ID NO: 2100648 - RNA, 23 nt, Human
ccaaaaagaaucugcauuuagca

SEQ ID NO: 2100649 - RNA, 18 nt, Human
ccaaaacaaacaaacaga

SEQ ID NO: 2100650 - RNA, 22 nt, Human
ccaaaacauuccguuuacauuu

SEQ ID NO: 2100651 - RNA, 15 nt, Human
ccaaaaccacagccc

SEQ ID NO: 2100652 - RNA, 12 nt, Human
ccaaaacaaaca

SEQ ID NO: 2100653 - RNA, 20 nt, Human
cauuuuugaauacaggcaua

SEQ ID NO: 2100654 - RNA, 18 nt, Human
cauuuuugaauacaggca

SEQ ID NO: 2100655 - RNA, 17 nt, Human
cauuuccaaauucacaa

SEQ ID NO: 2100656 - RNA, 17 nt, Human
cauugccuuaacuggag

SEQ ID NO: 2100657 - RNA, 21 nt, Human
cauugcggacagccacggcca

SEQ ID NO: 2100658 - RNA, 17 nt, Human
cauugcggacagccacg

SEQ ID NO: 2100659 - RNA, 15 nt, Human
cauugcggacagcca

SEQ ID NO: 2100660 - RNA, 14 nt, Human
cauugcggacagcc

SEQ ID NO: 2100661 - RNA, 18 nt, Human
cauugcugggcuugucug

SEQ ID NO: 2100662 - RNA, 21 nt, Human
cauugcgcucuagccugggca

SEQ ID NO: 2100663 - RNA, 21 nt, Human
cauugccuuaacuggagcccc

SEQ ID NO: 2100664 - RNA, 14 nt, Human
cauugccugcgguc

SEQ ID NO: 2100665 - RNA, 16 nt, Human
cauucucacuccuacc

SEQ ID NO: 2100666 - RNA, 17 nt, Human
cauucucacuccuaccu

SEQ ID NO: 2100667 - RNA, 13 nt, Human
cauuaugauucuu

SEQ ID NO: 2100668 - RNA, 14 nt, Human
cauuaugauucuuu

SEQ ID NO: 2100669 - RNA, 22 nt, Human
cauuaugaugugggucaaggaa

SEQ ID NO: 2100670 - RNA, 23 nt, Human
cauuaugaugugggucaaggaau

SEQ ID NO: 2100671 - RNA, 18 nt, Human
cauuagcaguuugcuuug

SEQ ID NO: 2100672 - RNA, 15 nt, Human
cauguucucugagga

SEQ ID NO: 2100673 - RNA, 18 nt, Human
caugaccagaagggaaac

SEQ ID NO: 2100674 - RNA, 21 nt, Human
cauguuccucaaaagcacccu

SEQ ID NO: 2100675 - RNA, 16 nt, Human
cauguucccuucuccu

SEQ ID NO: 2100676 - RNA, 13 nt, Human
cauguuccucaaa

SEQ ID NO: 2100677 - RNA, 22 nt, Human
cauggcguagagggugcugccc

SEQ ID NO: 2100678 - RNA, 14 nt, Human
cauggcgugucccu

SEQ ID NO: 2100679 - RNA, 19 nt, Human
cauggcgugucccucucgg

SEQ ID NO: 2100680 - RNA, 17 nt, Human
cauggcuaagcuuaaaa

SEQ ID NO: 2100681 - RNA, 20 nt, Human
cauggcuaagcuuaaaaaaa

SEQ ID NO: 2100682 - RNA, 18 nt, Human
cauagccuaaucccuggg

SEQ ID NO: 2100683 - RNA, 19 nt, Human
cauagccuaaucccugggc

SEQ ID NO: 2100684 - RNA, 15 nt, Human
cauagccaccccaga

SEQ ID NO: 2100685 - RNA, 15 nt, Human
cauagcauuaacuaa

SEQ ID NO: 2100686 - RNA, 16 nt, Human
cauagcauuaacuaau

SEQ ID NO: 2100687 - RNA, 23 nt, Human
cauagcauuaacuaaucuauugg

SEQ ID NO: 2100688 - RNA, 11 nt, Human
cauagcauuaa

SEQ ID NO: 2100689 - RNA, 14 nt, Human
cauagauucaccug

SEQ ID NO: 2100690 - RNA, 15 nt, Human
cauagauucaccugu

SEQ ID NO: 2100691 - RNA, 16 nt, Human
cauagauucaccugua

SEQ ID NO: 2100692 - RNA, 17 nt, Human
cauagauucaccuguaa

SEQ ID NO: 2100693 - RNA, 18 nt, Human
cauagauucaccuguaaa

SEQ ID NO: 2100694 - RNA, 20 nt, Human
cauagauucaccuguaaaac

SEQ ID NO: 2100695 - RNA, 21 nt, Human
cauagauucaccuguaaaacu

SEQ ID NO: 2100696 - RNA, 22 nt, Human
cauagauucaccuguaaaacuu

SEQ ID NO: 2100697 - RNA, 23 nt, Human
cauagauucaccuguaaaacuuu

SEQ ID NO: 2100698 - RNA, 15 nt, Human
cauagauuucugauu

SEQ ID NO: 2100699 - RNA, 16 nt, Human
cauagauuucugauuu

SEQ ID NO: 2100700 - RNA, 17 nt, Human
cauagauuucugauuuu

SEQ ID NO: 2100701 - RNA, 19 nt, Human
cauagauuucugauuuuau

SEQ ID NO: 2100702 - RNA, 23 nt, Human
cauagaugucccuuucuuggcca

SEQ ID NO: 2100703 - RNA, 20 nt, Human
cauaauuuucuucaugcaau

SEQ ID NO: 2100704 - RNA, 14 nt, Human
cauaauuuucuuca

SEQ ID NO: 2100705 - RNA, 15 nt, Human
cauacaauuccaaac

SEQ ID NO: 2100706 - RNA, 15 nt, Human
cauaggccugggugc

SEQ ID NO: 2100707 - RNA, 17 nt, Human
cauaggccugggugcug

SEQ ID NO: 2100708 - RNA, 18 nt, Human
cauaggccugggugcugg

SEQ ID NO: 2100709 - RNA, 19 nt, Human
cauaggccugggugcuggc

SEQ ID NO: 2100710 - RNA, 17 nt, Human
cauagggucucuucagg

SEQ ID NO: 2100711 - RNA, 16 nt, Human
cauagcgcugcucuua

SEQ ID NO: 2100712 - RNA, 14 nt, Human
cauaggccugggug

SEQ ID NO: 2100713 - RNA, 15 nt, Human
cauagggucucuuca

SEQ ID NO: 2100714 - RNA, 15 nt, Human
caguuugauaacuag

SEQ ID NO: 2100715 - RNA, 20 nt, Human
caguuugauaacuagggaag

SEQ ID NO: 2100716 - RNA, 21 nt, Human
caguuugcagaaaagcaccug

SEQ ID NO: 2100717 - RNA, 22 nt, Human
caguuugcagaaaagcaccugc

SEQ ID NO: 2100718 - RNA, 23 nt, Human
caguuugcagaaaagcaccugcc

SEQ ID NO: 2100719 - RNA, 21 nt, Human
caguuugcuuuguaugcacuu

SEQ ID NO: 2100720 - RNA, 14 nt, Human
caguuugcuuugua

SEQ ID NO: 2100721 - RNA, 12 nt, Human
caguuugcuuug

SEQ ID NO: 2100722 - RNA, 21 nt, Human
caguuuguacagacguaugcu

SEQ ID NO: 2100723 - RNA, 19 nt, Human
cauaaucuggacuccucug

SEQ ID NO: 2100724 - RNA, 13 nt, Human
caguuugucagac

SEQ ID NO: 2100725 - RNA, 20 nt, Human
cauaaucuggacuccucugu

SEQ ID NO: 2100726 - RNA, 22 nt, Human
cauaaucuggacuccucugucc

SEQ ID NO: 2100727 - RNA, 21 nt, Human
cauaaucuggacuccucuguc

SEQ ID NO: 2100728 - RNA, 23 nt, Human
cauaaucuggacuccucugucca

SEQ ID NO: 2100729 - RNA, 20 nt, Human
cauccuuguggcacauuuuu

SEQ ID NO: 2100730 - RNA, 19 nt, Human
cauccuuuucugcagaggg

SEQ ID NO: 2100731 - RNA, 17 nt, Human
cauccuuuucuccuauc

SEQ ID NO: 2100732 - RNA, 18 nt, Human
cauccuuuucuccuaucu

SEQ ID NO: 2100733 - RNA, 17 nt, Human
cauccuuuucugcagag

SEQ ID NO: 2100734 - RNA, 15 nt, Human
caucugucuggaggg

SEQ ID NO: 2100735 - RNA, 16 nt, Human
caucugucuggagggg

SEQ ID NO: 2100736 - RNA, 23 nt, Human
caucugucuggaggggagcucug

SEQ ID NO: 2100737 - RNA, 13 nt, Human
caucuuaacucuu

SEQ ID NO: 2100738 - RNA, 15 nt, Human
caucuuaacucuuug

SEQ ID NO: 2100739 - RNA, 16 nt, Human
caucuuaacucuuugc

SEQ ID NO: 2100740 - RNA, 19 nt, Human
caucuuaacucuuugccuu

SEQ ID NO: 2100741 - RNA, 13 nt, Human
caucuuacugaag

SEQ ID NO: 2100742 - RNA, 21 nt, Human
caucuuagguuggcaaaaagg

SEQ ID NO: 2100743 - RNA, 22 nt, Human
caucuuagguuggcaaaaaggc

SEQ ID NO: 2100744 - RNA, 14 nt, Human
caucuuacugaagg

SEQ ID NO: 2100745 - RNA, 15 nt, Human
caucuuacugaaggu

SEQ ID NO: 2100746 - RNA, 19 nt, Human
caucuuaguauuugcauau

SEQ ID NO: 2100747 - RNA, 12 nt, Human
cauccccaccuu

SEQ ID NO: 2100748 - RNA, 16 nt, Human
caucccauugcccugg

SEQ ID NO: 2100749 - RNA, 16 nt, Human
cauccccacccuugga

SEQ ID NO: 2100750 - RNA, 13 nt, Human
caucccauugccc

SEQ ID NO: 2100751 - RNA, 15 nt, Human
caucccauugcccug

SEQ ID NO: 2100752 - RNA, 17 nt, Human
caucccauugcccuggu

SEQ ID NO: 2100753 - RNA, 11 nt, Human
cauccccaggg

SEQ ID NO: 2100754 - RNA, 12 nt, Human
cauccccagggg

SEQ ID NO: 2100755 - RNA, 18 nt, Human
cauccccaggggucccag

SEQ ID NO: 2100756 - RNA, 21 nt, Human
cauccccaggggucccagcca

SEQ ID NO: 2100757 - RNA, 12 nt, Human
caucccauugcc

SEQ ID NO: 2100758 - RNA, 14 nt, Human
caucccaucccauc

SEQ ID NO: 2100759 - RNA, 15 nt, Human
caucccaucccaucc

SEQ ID NO: 2100760 - RNA, 16 nt, Human
caucccaucccauccc

SEQ ID NO: 2100761 - RNA, 17 nt, Human
caucccaucccauccca

SEQ ID NO: 2100762 - RNA, 18 nt, Human
caucccaucccaucccgc

SEQ ID NO: 2100763 - RNA, 12 nt, Human
caucccaucccg

SEQ ID NO: 2100764 - RNA, 23 nt, Human
cauccuggcacccggccccugcu

SEQ ID NO: 2100765 - RNA, 14 nt, Human
caucagacagaugg

SEQ ID NO: 2100766 - RNA, 23 nt, Human
caucagaaggagaaggaaggaga

SEQ ID NO: 2100767 - RNA, 15 nt, Human
caucagaaggagaag

SEQ ID NO: 2100768 - RNA, 23 nt, Human
caucagcuguaagaagagacugg

SEQ ID NO: 2100769 - RNA, 23 nt, Human
caucagcuuaggggcugcugacc

SEQ ID NO: 2100770 - RNA, 17 nt, Human
caucagcuguaagaaga

SEQ ID NO: 2100771 - RNA, 19 nt, Human
caucagcuguaagaagaga

SEQ ID NO: 2100772 - RNA, 20 nt, Human
caucagaggccuagucagcc

SEQ ID NO: 2100773 - RNA, 16 nt, Human
caugcaaugacaucuu

SEQ ID NO: 2100774 - RNA, 21 nt, Human
caugauucgcccaaagccaga

SEQ ID NO: 2100775 - RNA, 12 nt, Human
caugcugccucc

SEQ ID NO: 2100776 - RNA, 14 nt, Human
caugcugccuccag

SEQ ID NO: 2100777 - RNA, 20 nt, Human
caugacaagccccaggcagg

SEQ ID NO: 2100778 - RNA, 18 nt, Human
caugaccauacugaggga

SEQ ID NO: 2100779 - RNA, 12 nt, Human
caugauuagcaa

SEQ ID NO: 2100780 - RNA, 17 nt, Human
caugaauguaucaggaa

SEQ ID NO: 2100781 - RNA, 18 nt, Human
caugaauguaucaggaaa

SEQ ID NO: 2100782 - RNA, 19 nt, Human
cagcauagcaagacacauc

SEQ ID NO: 2100783 - RNA, 13 nt, Human
cagcaccaccagg

SEQ ID NO: 2100784 - RNA, 15 nt, Human
cagcaccaccagguc

SEQ ID NO: 2100785 - RNA, 16 nt, Human
cagcaccaccaggucu

SEQ ID NO: 2100786 - RNA, 21 nt, Human
cagcaccaccaggucucccgg

SEQ ID NO: 2100787 - RNA, 22 nt, Human
cagcaccaccaggucucccggg

SEQ ID NO: 2100788 - RNA, 13 nt, Human
cagcaccacccua

SEQ ID NO: 2100789 - RNA, 21 nt, Human
cagcaccacccuagucccuuc

SEQ ID NO: 2100790 - RNA, 21 nt, Human
cagauugcaacaggcugggcu

SEQ ID NO: 2100791 - RNA, 15 nt, Human
cagauugcugcuucu

SEQ ID NO: 2100792 - RNA, 18 nt, Human
cagauuggagaaacccuu

SEQ ID NO: 2100793 - RNA, 21 nt, Human
cagauuugaagacaaaaauac

SEQ ID NO: 2100794 - RNA, 23 nt, Human
cagauuugaagacaaaaauacuc

SEQ ID NO: 2100795 - RNA, 12 nt, Human
cagccagcagcc

SEQ ID NO: 2100796 - RNA, 11 nt, Human
cagccagcagc

SEQ ID NO: 2100797 - RNA, 15 nt, Human
cagccagcagccagc

SEQ ID NO: 2100798 - RNA, 14 nt, Human
cagccagcagccag

SEQ ID NO: 2100799 - RNA, 24 nt, Human
cagccccauucugccugcccaggc

SEQ ID NO: 2100800 - RNA, 23 nt, Human
cagccccauucugccugcccagg

SEQ ID NO: 2100801 - RNA, 22 nt, Human
cagccccauucugccugcccag

SEQ ID NO: 2100802 - RNA, 20 nt, Human
cagccccauucugccugccc

SEQ ID NO: 2100803 - RNA, 19 nt, Human
cagccccauucugccugcc

SEQ ID NO: 2100804 - RNA, 22 nt, Human
cagccccucccaccacagcagg

SEQ ID NO: 2100805 - RNA, 13 nt, Human
cagccccucccac

SEQ ID NO: 2100806 - RNA, 14 nt, Human
cagccccucccacc

SEQ ID NO: 2100807 - RNA, 15 nt, Human
cagccccucccacca

SEQ ID NO: 2100808 - RNA, 21 nt, Human
cagccccucccaccacagcag

SEQ ID NO: 2100809 - RNA, 12 nt, Human
cagccccuccuc

SEQ ID NO: 2100810 - RNA, 13 nt, Human
cagccccuccucu

SEQ ID NO: 2100811 - RNA, 14 nt, Human
cagccccuccucug

SEQ ID NO: 2100812 - RNA, 15 nt, Human
cagccccuccucugc

SEQ ID NO: 2100813 - RNA, 16 nt, Human
cagccccuccucugcc

SEQ ID NO: 2100814 - RNA, 17 nt, Human
cagccccuccucugcca

SEQ ID NO: 2100815 - RNA, 19 nt, Human
cagccccuccucugccacc

SEQ ID NO: 2100816 - RNA, 20 nt, Human
cagccccuccucugccaccu

SEQ ID NO: 2100817 - RNA, 21 nt, Human
cagccccuccucugccaccuc

SEQ ID NO: 2100818 - RNA, 22 nt, Human
cagccccuccucugccaccucc

SEQ ID NO: 2100819 - RNA, 23 nt, Human
cagccccuccucugccaccuccc

SEQ ID NO: 2100820 - RNA, 11 nt, Human
cagccccucuu

SEQ ID NO: 2100821 - RNA, 13 nt, Human
cagccccugcaca

SEQ ID NO: 2100822 - RNA, 23 nt, Human
cagccccucuugccccccacccc

SEQ ID NO: 2100823 - RNA, 15 nt, Human
cagccccucuugccc

SEQ ID NO: 2100824 - RNA, 17 nt, Human
cagccccucuugccccc

SEQ ID NO: 2100825 - RNA, 21 nt, Human
cagccccucuugccccccacc

SEQ ID NO: 2100826 - RNA, 22 nt, Human
cagccccucuugccccccaccc

SEQ ID NO: 2100827 - RNA, 12 nt, Human
cagcccugucag

SEQ ID NO: 2100828 - RNA, 16 nt, Human
cagccccgcgccuccu

SEQ ID NO: 2100829 - RNA, 18 nt, Human
cagccccgcgccuccuuc

SEQ ID NO: 2100830 - RNA, 23 nt, Human
cagccgccauugccaccaggaga

SEQ ID NO: 2100831 - RNA, 21 nt, Human
cagccgccauugccaccagga

SEQ ID NO: 2100832 - RNA, 22 nt, Human
cagccgccauugccaccaggag

SEQ ID NO: 2100833 - RNA, 13 nt, Human
cagccgccacauc

SEQ ID NO: 2100834 - RNA, 14 nt, Human
cagccgccacaucc

SEQ ID NO: 2100835 - RNA, 23 nt, Human
cagccgccacauccccgcuggcu

SEQ ID NO: 2100836 - RNA, 17 nt, Human
cagccgccauugccacc

SEQ ID NO: 2100837 - RNA, 18 nt, Human
cagccgccauugccacca

SEQ ID NO: 2100838 - RNA, 19 nt, Human
cagccgccauugccaccag

SEQ ID NO: 2100839 - RNA, 12 nt, Human
cagccgcuccug

SEQ ID NO: 2100840 - RNA, 23 nt, Human
cagccgccaugcuccuggcccac

SEQ ID NO: 2100841 - RNA, 11 nt, Human
cagcccugugg

SEQ ID NO: 2100842 - RNA, 13 nt, Human
cagcccuguucug

SEQ ID NO: 2100843 - RNA, 13 nt, Human
cagcccuuagcag

SEQ ID NO: 2100844 - RNA, 16 nt, Human
cagcccugucagugca

SEQ ID NO: 2100845 - RNA, 18 nt, Human
cagcccugucagugcagc

SEQ ID NO: 2100846 - RNA, 20 nt, Human
cagcccugucagugcagccc

SEQ ID NO: 2100847 - RNA, 21 nt, Human
cagcccugucagugcagcccg

SEQ ID NO: 2100848 - RNA, 14 nt, Human
cagccucucuuccu

SEQ ID NO: 2100849 - RNA, 17 nt, Human
cagccucucuuccuauc

SEQ ID NO: 2100850 - RNA, 20 nt, Human
cagccucucuuccuauccca

SEQ ID NO: 2100851 - RNA, 21 nt, Human
cagccucucuuccuaucccau

SEQ ID NO: 2100852 - RNA, 22 nt, Human
cagccucucuuccuaucccauc

SEQ ID NO: 2100853 - RNA, 23 nt, Human
cagccucucuuccuaucccaucc

SEQ ID NO: 2100854 - RNA, 22 nt, Human
cagccucucuugguuuccuucc

SEQ ID NO: 2100855 - RNA, 12 nt, Human
cagccugaggcu

SEQ ID NO: 2100856 - RNA, 15 nt, Human
cagccugaggcugag

SEQ ID NO: 2100857 - RNA, 18 nt, Human
cagccugaggcugagacu

SEQ ID NO: 2100858 - RNA, 19 nt, Human
cagccugaggcugagacug

SEQ ID NO: 2100859 - RNA, 23 nt, Human
cagccucucuugguuuccuuccu

SEQ ID NO: 2100860 - RNA, 14 nt, Human
cagcggggacagcu

SEQ ID NO: 2100861 - RNA, 14 nt, Human
cagcggcuggugca

SEQ ID NO: 2100862 - RNA, 17 nt, Human
cagcggcuggugcaggg

SEQ ID NO: 2100863 - RNA, 18 nt, Human
cagcggcuggugcagggc

SEQ ID NO: 2100864 - RNA, 20 nt, Human
cagcggcuggugcagggccu

SEQ ID NO: 2100865 - RNA, 12 nt, Human
cagccugccugg

SEQ ID NO: 2100866 - RNA, 14 nt, Human
cagccugccuggag

SEQ ID NO: 2100867 - RNA, 12 nt, Human
cagagagagugu

SEQ ID NO: 2100868 - RNA, 19 nt, Human
cagagagccuggugcugcu

SEQ ID NO: 2100869 - RNA, 20 nt, Human
cagagagccuggugcugcug

SEQ ID NO: 2100870 - RNA, 12 nt, Human
cagagagcuggu

SEQ ID NO: 2100871 - RNA, 19 nt, Human
cagagagcugguaguuagu

SEQ ID NO: 2100872 - RNA, 13 nt, Human
cagagagcuggua

SEQ ID NO: 2100873 - RNA, 13 nt, Human
cagagaggaauca

SEQ ID NO: 2100874 - RNA, 15 nt, Human
cagagaggaaucaga

SEQ ID NO: 2100875 - RNA, 16 nt, Human
cagagaggacgugggc

SEQ ID NO: 2100876 - RNA, 17 nt, Human
cagagaggacgugggcg

SEQ ID NO: 2100877 - RNA, 24 nt, Human
cagagagagaagugccccugcugc

SEQ ID NO: 2100878 - RNA, 14 nt, Human
cagagccugcaguu

SEQ ID NO: 2100879 - RNA, 18 nt, Human
cagagaggacgugggcgg

SEQ ID NO: 2100880 - RNA, 21 nt, Human
cagagaggacgugggcggcag

SEQ ID NO: 2100881 - RNA, 13 nt, Human
cagagaggagaaa

SEQ ID NO: 2100882 - RNA, 16 nt, Human
cagagaggagaaacac

SEQ ID NO: 2100883 - RNA, 17 nt, Human
cagagaggagaaacaca

SEQ ID NO: 2100884 - RNA, 18 nt, Human
cagagaggagaaacacau

SEQ ID NO: 2100885 - RNA, 21 nt, Human
cagagaggagaaacacaucuu

SEQ ID NO: 2100886 - RNA, 22 nt, Human
cagagaggagaaacacaucuuc

SEQ ID NO: 2100887 - RNA, 17 nt, Human
cagagaggagucagaga

SEQ ID NO: 2100888 - RNA, 20 nt, Human
cagagaggagucagagagaa

SEQ ID NO: 2100889 - RNA, 20 nt, Human
cagagcgagagucugucuca

SEQ ID NO: 2100890 - RNA, 16 nt, Human
cagagcuggaccagug

SEQ ID NO: 2100891 - RNA, 9 nt, Human
cagagcugg

SEQ ID NO: 2100892 - RNA, 23 nt, Human
cagauacaggaaaagcugcugac

SEQ ID NO: 2100893 - RNA, 18 nt, Human
cagagguggcucuggaau

SEQ ID NO: 2100894 - RNA, 20 nt, Human
cagagguggcucuggaauga

SEQ ID NO: 2100895 - RNA, 23 nt, Human
cagagcuggaccaguggugccuu

SEQ ID NO: 2100896 - RNA, 10 nt, Human
cagagcuggg

SEQ ID NO: 2100897 - RNA, 13 nt, Human
cagagcugggagg

SEQ ID NO: 2100898 - RNA, 19 nt, Human
cagaucauuucaaaacuca

SEQ ID NO: 2100899 - RNA, 22 nt, Human
cagauacuggaaguuuugcauu

SEQ ID NO: 2100900 - RNA, 17 nt, Human
cagauacaugguuguga

SEQ ID NO: 2100901 - RNA, 18 nt, Human
cagauacuggaaguuuug

SEQ ID NO: 2100902 - RNA, 21 nt, Human
cagauacuggaaguuuugcau

SEQ ID NO: 2100903 - RNA, 13 nt, Human
caggaccucaggu

SEQ ID NO: 2100904 - RNA, 15 nt, Human
caggaccgccaaaga

SEQ ID NO: 2100905 - RNA, 20 nt, Human
caggaccucagaguccaggc

SEQ ID NO: 2100906 - RNA, 21 nt, Human
caggaccucagaguccaggcc

SEQ ID NO: 2100907 - RNA, 22 nt, Human
caggaccucagaguccaggccc

SEQ ID NO: 2100908 - RNA, 16 nt, Human
caggacagugcuucag

SEQ ID NO: 2100909 - RNA, 13 nt, Human
caggacaggcccg

SEQ ID NO: 2100910 - RNA, 12 nt, Human
caggacaggccc

SEQ ID NO: 2100911 - RNA, 13 nt, Human
caggacaggacca

SEQ ID NO: 2100912 - RNA, 12 nt, Human
caggacaggacc

SEQ ID NO: 2100913 - RNA, 15 nt, Human
caggacagcauggug

SEQ ID NO: 2100914 - RNA, 19 nt, Human
caggacagcauggugcaug

SEQ ID NO: 2100915 - RNA, 23 nt, Human
caggacagcauggugcaugccgc

SEQ ID NO: 2100916 - RNA, 22 nt, Human
caggacagugcuucagccugag

SEQ ID NO: 2100917 - RNA, 20 nt, Human
caggacagugcuucagccug

SEQ ID NO: 2100918 - RNA, 21 nt, Human
caggacagugcuucagccuga

SEQ ID NO: 2100919 - RNA, 15 nt, Human
caggacacggggcag

SEQ ID NO: 2100920 - RNA, 20 nt, Human
caggcaaugcuggcuguugg

SEQ ID NO: 2100921 - RNA, 19 nt, Human
caggcaaugcuggcuguug

SEQ ID NO: 2100922 - RNA, 17 nt, Human
caggcacugcugcccag

SEQ ID NO: 2100923 - RNA, 16 nt, Human
caggcacugcugccca

SEQ ID NO: 2100924 - RNA, 14 nt, Human
caggaggcaggguu

SEQ ID NO: 2100925 - RNA, 20 nt, Human
caggaggcagagguugcagu

SEQ ID NO: 2100926 - RNA, 21 nt, Human
caggcaaugcuggcuguuggc

SEQ ID NO: 2100927 - RNA, 13 nt, Human
caggccaccugcc

SEQ ID NO: 2100928 - RNA, 15 nt, Human
caggccaccugcccc

SEQ ID NO: 2100929 - RNA, 16 nt, Human
caggccaccugccccc

SEQ ID NO: 2100930 - RNA, 12 nt, Human
caggcagaaaga

SEQ ID NO: 2100931 - RNA, 13 nt, Human
caggcagaaagag

SEQ ID NO: 2100932 - RNA, 14 nt, Human
caggcagaaagagu

SEQ ID NO: 2100933 - RNA, 15 nt, Human
caggcagaaagaguu

SEQ ID NO: 2100934 - RNA, 23 nt, Human
caggcacugcugcccagccucca

SEQ ID NO: 2100935 - RNA, 22 nt, Human
caggccaccugcccccuucucc

SEQ ID NO: 2100936 - RNA, 23 nt, Human
caggccaccugcccccuucuccc

SEQ ID NO: 2100937 - RNA, 17 nt, Human
caggccaccugcccccu

SEQ ID NO: 2100938 - RNA, 18 nt, Human
caggccaccugcccccuu

SEQ ID NO: 2100939 - RNA, 19 nt, Human
caggccaccugcccccuuc

SEQ ID NO: 2100940 - RNA, 21 nt, Human
caggccaccugcccccuucuc

SEQ ID NO: 2100941 - RNA, 16 nt, Human
caggccacggcagccu

SEQ ID NO: 2100942 - RNA, 17 nt, Human
caggccacggcagccua

SEQ ID NO: 2100943 - RNA, 21 nt, Human
caggaaagggaaggccccaca

SEQ ID NO: 2100944 - RNA, 13 nt, Human
caggaaauauaua

SEQ ID NO: 2100945 - RNA, 15 nt, Human
caggaaauauauaug

SEQ ID NO: 2100946 - RNA, 16 nt, Human
caggaaauauauaugu

SEQ ID NO: 2100947 - RNA, 17 nt, Human
caggaaauauauaugug

SEQ ID NO: 2100948 - RNA, 23 nt, Human
caggaaauauauaugugugugua

SEQ ID NO: 2100949 - RNA, 19 nt, Human
cagcuguucagcugguuga

SEQ ID NO: 2100950 - RNA, 22 nt, Human
cagcuguuagaguccaacgugg

SEQ ID NO: 2100951 - RNA, 16 nt, Human
cagcuguucagcuggu

SEQ ID NO: 2100952 - RNA, 15 nt, Human
cagcuguucagcugg

SEQ ID NO: 2100953 - RNA, 23 nt, Human
cagcuguggugagguugggcagc

SEQ ID NO: 2100954 - RNA, 17 nt, Human
cagcuuaggggcugcug

SEQ ID NO: 2100955 - RNA, 20 nt, Human
caggaaaagcugcugacagu

SEQ ID NO: 2100956 - RNA, 19 nt, Human
caggaaaagcugcugacag

SEQ ID NO: 2100957 - RNA, 23 nt, Human
caggaaaauuguuugaacccagg

SEQ ID NO: 2100958 - RNA, 17 nt, Human
caggaaagggaaggccc

SEQ ID NO: 2100959 - RNA, 16 nt, Human
caggaaaauccucugg

SEQ ID NO: 2100960 - RNA, 17 nt, Human
caggaaaauccucuggc

SEQ ID NO: 2100961 - RNA, 16 nt, Human
cagggagggcuucugc

SEQ ID NO: 2100962 - RNA, 22 nt, Human
cagggaggagguggcagcccug

SEQ ID NO: 2100963 - RNA, 12 nt, Human
cagggaggggac

SEQ ID NO: 2100964 - RNA, 21 nt, Human
cagggaggggacuauuuauga

SEQ ID NO: 2100965 - RNA, 13 nt, Human
cagggaggggacu

SEQ ID NO: 2100966 - RNA, 19 nt, Human
cagggaggggacuauuuau

SEQ ID NO: 2100967 - RNA, 15 nt, Human
cagggcucagccugg

SEQ ID NO: 2100968 - RNA, 16 nt, Human
cagggcucagccuggu

SEQ ID NO: 2100969 - RNA, 15 nt, Human
cagggcucagcgggg

SEQ ID NO: 2100970 - RNA, 12 nt, Human
cagggcucagcg

SEQ ID NO: 2100971 - RNA, 20 nt, Human
cagggcucagcggggacagc

SEQ ID NO: 2100972 - RNA, 19 nt, Human
cagggcucagccugguggg

SEQ ID NO: 2100973 - RNA, 18 nt, Human
cagggaggagguggcagc

SEQ ID NO: 2100974 - RNA, 19 nt, Human
cagggaggagguggcagcc

SEQ ID NO: 2100975 - RNA, 20 nt, Human
cagggaggagguggcagccc

SEQ ID NO: 2100976 - RNA, 21 nt, Human
cagggaggagguggcagcccu

SEQ ID NO: 2100977 - RNA, 15 nt, Human
caggcugggcuucag

SEQ ID NO: 2100978 - RNA, 14 nt, Human
caggcugggcuuca

SEQ ID NO: 2100979 - RNA, 19 nt, Human
caggcuggcgugcaguggu

SEQ ID NO: 2100980 - RNA, 18 nt, Human
caggcuggcgugcagugg

SEQ ID NO: 2100981 - RNA, 17 nt, Human
caggcuggcgugcagug

SEQ ID NO: 2100982 - RNA, 14 nt, Human
caggccugggucug

SEQ ID NO: 2100983 - RNA, 20 nt, Human
cagguugaggggcuccugga

SEQ ID NO: 2100984 - RNA, 21 nt, Human
cagguugaggggcuccuggaa

SEQ ID NO: 2100985 - RNA, 22 nt, Human
cagguugaggggcuccuggaaa

SEQ ID NO: 2100986 - RNA, 23 nt, Human
cagguuuuuggucugacccacug

SEQ ID NO: 2100987 - RNA, 19 nt, Human
caggguuuaucuuuugaga

SEQ ID NO: 2100988 - RNA, 20 nt, Human
cagguucugguuagcucagc

SEQ ID NO: 2100989 - RNA, 21 nt, Human
cagguucugguuagcucagcc

SEQ ID NO: 2100990 - RNA, 22 nt, Human
cagguucugguuagcucagccc

SEQ ID NO: 2100991 - RNA, 23 nt, Human
cagguucugguuagcucagcccc

SEQ ID NO: 2100992 - RNA, 21 nt, Human
caggguuggccccugcccggc

SEQ ID NO: 2100993 - RNA, 17 nt, Human
caggguuggccccugcc

SEQ ID NO: 2100994 - RNA, 18 nt, Human
cagggugggauggaggag

SEQ ID NO: 2100995 - RNA, 13 nt, Human
caggguugggccc

SEQ ID NO: 2100996 - RNA, 14 nt, Human
caggguugggccca

SEQ ID NO: 2100997 - RNA, 15 nt, Human
caggguugggcccag

SEQ ID NO: 2100998 - RNA, 16 nt, Human
caggguugggcccaga

SEQ ID NO: 2100999 - RNA, 20 nt, Human
caggguugggcccagaucug

SEQ ID NO: 2101000 - RNA, 14 nt, Human
caggugcugccauc

SEQ ID NO: 2101001 - RNA, 13 nt, Human
caggugcugccau

SEQ ID NO: 2101002 - RNA, 17 nt, Human
cagggugggauggagga

SEQ ID NO: 2101003 - RNA, 21 nt, Human
caggguugggcccagaucugg

SEQ ID NO: 2101004 - RNA, 15 nt, Human
caguauucuagguag

SEQ ID NO: 2101005 - RNA, 21 nt, Human
caguauucuagguagugcccu

SEQ ID NO: 2101006 - RNA, 21 nt, Human
caguauuuucccaauagcacu

SEQ ID NO: 2101007 - RNA, 23 nt, Human
caguauuuucccaauagcacuuu

SEQ ID NO: 2101008 - RNA, 15 nt, Human
caguauuucagacug

SEQ ID NO: 2101009 - RNA, 23 nt, Human
cagggucucacucugucgcccag

SEQ ID NO: 2101010 - RNA, 16 nt, Human
caggguuggccccugc

SEQ ID NO: 2101011 - RNA, 15 nt, Human
caggguuggccccug

SEQ ID NO: 2101012 - RNA, 14 nt, Human
cagggugaggaugg

SEQ ID NO: 2101013 - RNA, 22 nt, Human
cagggucuucccuaccucaggc

SEQ ID NO: 2101014 - RNA, 21 nt, Human
cagggucucuaccauccccug

SEQ ID NO: 2101015 - RNA, 17 nt, Human
gccuccaagcuccaucu

SEQ ID NO: 2101016 - RNA, 22 nt, Human
gccuccaaaugccaacuugucc

SEQ ID NO: 2101017 - RNA, 17 nt, Human
gccuccaaaugccaacu

SEQ ID NO: 2101018 - RNA, 14 nt, Human
gccuccagcccucu

SEQ ID NO: 2101019 - RNA, 21 nt, Human
gccuccagcccucucacugug

SEQ ID NO: 2101020 - RNA, 12 nt, Human
gccuccagcuca

SEQ ID NO: 2101021 - RNA, 13 nt, Human
gccuccagcucag

SEQ ID NO: 2101022 - RNA, 15 nt, Human
gccuccagcucagca

SEQ ID NO: 2101023 - RNA, 16 nt, Human
gccuccagcucagcag

SEQ ID NO: 2101024 - RNA, 11 nt, Human
gccuccaugcu

SEQ ID NO: 2101025 - RNA, 20 nt, Human
gccuccuuccuugcuguccu

SEQ ID NO: 2101026 - RNA, 13 nt, Human
gccugcuccagcu

SEQ ID NO: 2101027 - RNA, 17 nt, Human
gccugcggccugcugga

SEQ ID NO: 2101028 - RNA, 20 nt, Human
gccugcguuuuggaagcucu

SEQ ID NO: 2101029 - RNA, 14 nt, Human
gccugcguggcuga

SEQ ID NO: 2101030 - RNA, 16 nt, Human
gccugcguggcugacc

SEQ ID NO: 2101031 - RNA, 17 nt, Human
gccugcguggcugaccc

SEQ ID NO: 2101032 - RNA, 22 nt, Human
gccugcguggcugaccccccuc

SEQ ID NO: 2101033 - RNA, 16 nt, Human
gccugcggucaaggcc

SEQ ID NO: 2101034 - RNA, 17 nt, Human
gccugcggucaaggcca

SEQ ID NO: 2101035 - RNA, 19 nt, Human
gccugcggucaaggccagc

SEQ ID NO: 2101036 - RNA, 23 nt, Human
gccugcuaauuccccagauugca

SEQ ID NO: 2101037 - RNA, 17 nt, Human
gccugcuaauuccccag

SEQ ID NO: 2101038 - RNA, 14 nt, Human
gcgauucuucugcu

SEQ ID NO: 2101039 - RNA, 17 nt, Human
gcgauucuucugcuuca

SEQ ID NO: 2101040 - RNA, 20 nt, Human
gcgagaaccuaaguuucagu

SEQ ID NO: 2101041 - RNA, 18 nt, Human
gcgagacuccgucucaaa

SEQ ID NO: 2101042 - RNA, 16 nt, Human
gcgagacucugucuca

SEQ ID NO: 2101043 - RNA, 23 nt, Human
gcgagauggggugggguggagaa

SEQ ID NO: 2101044 - RNA, 16 nt, Human
gcgagagucugucuca

SEQ ID NO: 2101045 - RNA, 14 nt, Human
gcgaggggagggug

SEQ ID NO: 2101046 - RNA, 13 nt, Human
gcgauucuucugc

SEQ ID NO: 2101047 - RNA, 20 nt, Human
gcgagugugugcaugugugu

SEQ ID NO: 2101048 - RNA, 17 nt, Human
gcgauccaccugucuca

SEQ ID NO: 2101049 - RNA, 16 nt, Human
gcgaggucaacagaga

SEQ ID NO: 2101050 - RNA, 17 nt, Human
gcgaggucaacagagaa

SEQ ID NO: 2101051 - RNA, 18 nt, Human
gcgaggucaacagagaag

SEQ ID NO: 2101052 - RNA, 19 nt, Human
gcgaggucaacagagaagg

SEQ ID NO: 2101053 - RNA, 22 nt, Human
gcgaggucaacagagaaggcag

SEQ ID NO: 2101054 - RNA, 23 nt, Human
gcgaggucaacagagaaggcagg

SEQ ID NO: 2101055 - RNA, 17 nt, Human
gcgaguuguggaaagcc

SEQ ID NO: 2101056 - RNA, 17 nt, Human
gcgaucauggcucacug

SEQ ID NO: 2101057 - RNA, 18 nt, Human
gcgaucauggcucacugc

SEQ ID NO: 2101058 - RNA, 20 nt, Human
gcgaucauggcucacugcag

SEQ ID NO: 2101059 - RNA, 21 nt, Human
gcgaucauggcucacugcagc

SEQ ID NO: 2101060 - RNA, 22 nt, Human
gcgaucauggcucacugcagcc

SEQ ID NO: 2101061 - RNA, 16 nt, Human
gcgauccaccugucuc

SEQ ID NO: 2101062 - RNA, 19 nt, Human
gcggccgcauucccugagu

SEQ ID NO: 2101063 - RNA, 16 nt, Human
gcggccgcauucccug

SEQ ID NO: 2101064 - RNA, 17 nt, Human
gcggccgcauucccuga

SEQ ID NO: 2101065 - RNA, 18 nt, Human
gcggccgcauucccugag

SEQ ID NO: 2101066 - RNA, 15 nt, Human
gcggccgcauucccu

SEQ ID NO: 2101067 - RNA, 14 nt, Human
gcgugcacacacca

SEQ ID NO: 2101068 - RNA, 18 nt, Human
gcgugcacacaccagagc

SEQ ID NO: 2101069 - RNA, 16 nt, Human
gcggagcuugcaguga

SEQ ID NO: 2101070 - RNA, 15 nt, Human
gcggagguugcaggg

SEQ ID NO: 2101071 - RNA, 16 nt, Human
gcggagguugcaggga

SEQ ID NO: 2101072 - RNA, 11 nt, Human
gcuagaaauga

SEQ ID NO: 2101073 - RNA, 12 nt, Human
gcuacuuuguuu

SEQ ID NO: 2101074 - RNA, 11 nt, Human
gcuagaaaugg

SEQ ID NO: 2101075 - RNA, 17 nt, Human
gcuacuuccugccuggu

SEQ ID NO: 2101076 - RNA, 20 nt, Human
gcuacuuccugccuggucuc

SEQ ID NO: 2101077 - RNA, 21 nt, Human
gcuacuuccugccuggucucc

SEQ ID NO: 2101078 - RNA, 13 nt, Human
gcuacuugggagg

SEQ ID NO: 2101079 - RNA, 20 nt, Human
gcuacuguccuacccacccu

SEQ ID NO: 2101080 - RNA, 19 nt, Human
gcuacuguccuacccaccc

SEQ ID NO: 2101081 - RNA, 16 nt, Human
gcuaauuuuucauuuu

SEQ ID NO: 2101082 - RNA, 14 nt, Human
gcguuggaauuaaa

SEQ ID NO: 2101083 - RNA, 17 nt, Human
gcguuggaauuaaaaca

SEQ ID NO: 2101084 - RNA, 19 nt, Human
gcguuggaauuaaaacaau

SEQ ID NO: 2101085 - RNA, 20 nt, Human
gcuacaaauacucuuaggaa

SEQ ID NO: 2101086 - RNA, 14 nt, Human
gccagcccagccca

SEQ ID NO: 2101087 - RNA, 13 nt, Human
gccagcccagccc

SEQ ID NO: 2101088 - RNA, 22 nt, Human
gccagccagugaccugaggaag

SEQ ID NO: 2101089 - RNA, 19 nt, Human
gccagccagugaccugagg

SEQ ID NO: 2101090 - RNA, 16 nt, Human
gccagccagcagccag

SEQ ID NO: 2101091 - RNA, 19 nt, Human
gccagccagcagccagcuc

SEQ ID NO: 2101092 - RNA, 17 nt, Human
gccagccccacccagga

SEQ ID NO: 2101093 - RNA, 13 nt, Human
gccagccccaccc

SEQ ID NO: 2101094 - RNA, 14 nt, Human
gccagccccaccca

SEQ ID NO: 2101095 - RNA, 15 nt, Human
gccagccccacccag

SEQ ID NO: 2101096 - RNA, 18 nt, Human
gccaggcccccaagccug

SEQ ID NO: 2101097 - RNA, 23 nt, Human
gccaggcccccaagccugcaguc

SEQ ID NO: 2101098 - RNA, 19 nt, Human
gccaggcccccaagccugc

SEQ ID NO: 2101099 - RNA, 16 nt, Human
gccaggcccggggcug

SEQ ID NO: 2101100 - RNA, 17 nt, Human
gccaggcccggggcugg

SEQ ID NO: 2101101 - RNA, 18 nt, Human
gccaggcccggggcuggc

SEQ ID NO: 2101102 - RNA, 22 nt, Human
gccaggccagagggagugacag

SEQ ID NO: 2101103 - RNA, 15 nt, Human
gccaggccagaggga

SEQ ID NO: 2101104 - RNA, 14 nt, Human
gccaggcagaucug

SEQ ID NO: 2101105 - RNA, 15 nt, Human
gccaggcagaucugu

SEQ ID NO: 2101106 - RNA, 21 nt, Human
gccaggcagaucugugcccca

SEQ ID NO: 2101107 - RNA, 23 nt, Human
gccaggcagaucugugccccaug

SEQ ID NO: 2101108 - RNA, 21 nt, Human
gccagugccuuaccuccugcc

SEQ ID NO: 2101109 - RNA, 20 nt, Human
gccagugccuuaccuccugc

SEQ ID NO: 2101110 - RNA, 22 nt, Human
gccagugccuuaccuccugccc

SEQ ID NO: 2101111 - RNA, 23 nt, Human
gccagugccuuaccuccugccca

SEQ ID NO: 2101112 - RNA, 13 nt, Human
gccagugugacaa

SEQ ID NO: 2101113 - RNA, 12 nt, Human
gccagugucuuu

SEQ ID NO: 2101114 - RNA, 13 nt, Human
gccagugucuuuc

SEQ ID NO: 2101115 - RNA, 14 nt, Human
gccagugucuuucu

SEQ ID NO: 2101116 - RNA, 15 nt, Human
gccagugucuuucuu

SEQ ID NO: 2101117 - RNA, 18 nt, Human
gccagugucuuucuuugg

SEQ ID NO: 2101118 - RNA, 17 nt, Human
gccagugugaucccaag

SEQ ID NO: 2101119 - RNA, 20 nt, Human
gccagugugaucccaagugc

SEQ ID NO: 2101120 - RNA, 14 nt, Human
gccaguuggaacca

SEQ ID NO: 2101121 - RNA, 22 nt, Human
gcccucaggucagggugaggau

SEQ ID NO: 2101122 - RNA, 23 nt, Human
gcccucaggucagggugaggaug

SEQ ID NO: 2101123 - RNA, 21 nt, Human
gcccuagagcacacuguagca

SEQ ID NO: 2101124 - RNA, 13 nt, Human
gcccuagcuccac

SEQ ID NO: 2101125 - RNA, 14 nt, Human
gcccuaggccuggc

SEQ ID NO: 2101126 - RNA, 12 nt, Human
gcccuaggcucc

SEQ ID NO: 2101127 - RNA, 17 nt, Human
gcccuaggcuccgucag

SEQ ID NO: 2101128 - RNA, 22 nt, Human
gcccauuccccagccucucuuc

SEQ ID NO: 2101129 - RNA, 14 nt, Human
gcccauucucucuc

SEQ ID NO: 2101130 - RNA, 15 nt, Human
gcccauucucucucc

SEQ ID NO: 2101131 - RNA, 17 nt, Human
gcccauucucucuccug

SEQ ID NO: 2101132 - RNA, 19 nt, Human
gcccauucucucuccuguc

SEQ ID NO: 2101133 - RNA, 21 nt, Human
gcccauucucucuccugucca

SEQ ID NO: 2101134 - RNA, 21 nt, Human
gcccauuuacacuuuugagac

SEQ ID NO: 2101135 - RNA, 20 nt, Human
gcccauucucucuccugucc

SEQ ID NO: 2101136 - RNA, 22 nt, Human
gcccauuucacaccugaaaaug

SEQ ID NO: 2101137 - RNA, 22 nt, Human
gccccaacuccuggaagcugug

SEQ ID NO: 2101138 - RNA, 17 nt, Human
gccccaagaaggcuggg

SEQ ID NO: 2101139 - RNA, 21 nt, Human
gccccaagaaggcuggggcua

SEQ ID NO: 2101140 - RNA, 19 nt, Human
gccccaagggguuucuguu

SEQ ID NO: 2101141 - RNA, 21 nt, Human
gccccaagggguuucuguuuc

SEQ ID NO: 2101142 - RNA, 22 nt, Human
gccccaagggguuucuguuucu

SEQ ID NO: 2101143 - RNA, 22 nt, Human
gccccugcugguucaggguugg

SEQ ID NO: 2101144 - RNA, 21 nt, Human
gccccugcugguucaggguug

SEQ ID NO: 2101145 - RNA, 15 nt, Human
gcccccgcucauggg

SEQ ID NO: 2101146 - RNA, 16 nt, Human
gcccccgcucaugggc

SEQ ID NO: 2101147 - RNA, 13 nt, Human
gcccccgccccgc

SEQ ID NO: 2101148 - RNA, 16 nt, Human
gcccccgccccgcccc

SEQ ID NO: 2101149 - RNA, 20 nt, Human
gccccacacggaggcaucug

SEQ ID NO: 2101150 - RNA, 18 nt, Human
gccccacccucagaugca

SEQ ID NO: 2101151 - RNA, 15 nt, Human
gccccacccucagau

SEQ ID NO: 2101152 - RNA, 11 nt, Human
gcccccgcccc

SEQ ID NO: 2101153 - RNA, 13 nt, Human
gcccccgagcugg

SEQ ID NO: 2101154 - RNA, 14 nt, Human
gcccccgagcuggg

SEQ ID NO: 2101155 - RNA, 22 nt, Human
gcccccgagcugggggccauga

SEQ ID NO: 2101156 - RNA, 18 nt, Human
gcccaggccccugccacc

SEQ ID NO: 2101157 - RNA, 17 nt, Human
gcccaggccccugccac

SEQ ID NO: 2101158 - RNA, 16 nt, Human
gccauguguuccaagg

SEQ ID NO: 2101159 - RNA, 15 nt, Human
gccauguguuccaag

SEQ ID NO: 2101160 - RNA, 21 nt, Human
gcccaggagagccagcccucc

SEQ ID NO: 2101161 - RNA, 19 nt, Human
gcccaggagagccagcccu

SEQ ID NO: 2101162 - RNA, 20 nt, Human
gcccaggagagccagcccuc

SEQ ID NO: 2101163 - RNA, 14 nt, Human
gccaugugccaggu

SEQ ID NO: 2101164 - RNA, 13 nt, Human
gcccaggccccug

SEQ ID NO: 2101165 - RNA, 15 nt, Human
gcccaggccccugcc

SEQ ID NO: 2101166 - RNA, 16 nt, Human
gcccaggcaggucuug

SEQ ID NO: 2101167 - RNA, 14 nt, Human
gcccaggcaggucu

SEQ ID NO: 2101168 - RNA, 22 nt, Human
gcccaggaguuugaggcugcag

SEQ ID NO: 2101169 - RNA, 12 nt, Human
gcccaggcaggu

SEQ ID NO: 2101170 - RNA, 13 nt, Human
gcccaggcagguc

SEQ ID NO: 2101171 - RNA, 16 nt, Human
gcuggagcccagggag

SEQ ID NO: 2101172 - RNA, 22 nt, Human
gcuggagcccagggagcggaaa

SEQ ID NO: 2101173 - RNA, 19 nt, Human
gcugcugaccuccacagcu

SEQ ID NO: 2101174 - RNA, 16 nt, Human
gcugcugacugauguu

SEQ ID NO: 2101175 - RNA, 12 nt, Human
gcugcugacagu

SEQ ID NO: 2101176 - RNA, 18 nt, Human
gcugcugaccuccacagc

SEQ ID NO: 2101177 - RNA, 17 nt, Human
gcugccauccagguuca

SEQ ID NO: 2101178 - RNA, 12 nt, Human
gcugcuccccuc

SEQ ID NO: 2101179 - RNA, 20 nt, Human
gcugcuccccucccuccucu

SEQ ID NO: 2101180 - RNA, 13 nt, Human
gcugcacccucag

SEQ ID NO: 2101181 - RNA, 15 nt, Human
gcugcacccucaggc

SEQ ID NO: 2101182 - RNA, 16 nt, Human
gcugcacccucaggca

SEQ ID NO: 2101183 - RNA, 18 nt, Human
gcugcagagacagagagg

SEQ ID NO: 2101184 - RNA, 13 nt, Human
gcugccauccagg

SEQ ID NO: 2101185 - RNA, 12 nt, Human
gcugccauccag

SEQ ID NO: 2101186 - RNA, 15 nt, Human
gcugcagcugggcug

SEQ ID NO: 2101187 - RNA, 23 nt, Human
gcugagucaugaucucccugccg

SEQ ID NO: 2101188 - RNA, 21 nt, Human
gcugagucaugaucucccugc

SEQ ID NO: 2101189 - RNA, 22 nt, Human
gcugagucaugaucucccugcc

SEQ ID NO: 2101190 - RNA, 15 nt, Human
gcugaggugggagga

SEQ ID NO: 2101191 - RNA, 19 nt, Human
gcugaggugggaggaucac

SEQ ID NO: 2101192 - RNA, 19 nt, Human
gcuccucuccccagcaagu

SEQ ID NO: 2101193 - RNA, 16 nt, Human
gcuccucuccccagca

SEQ ID NO: 2101194 - RNA, 19 nt, Human
gcucuacugaggugcuaug

SEQ ID NO: 2101195 - RNA, 16 nt, Human
gcucuagacaacccug

SEQ ID NO: 2101196 - RNA, 18 nt, Human
gcucuagacaacccugca

SEQ ID NO: 2101197 - RNA, 19 nt, Human
gcucuagacaacccugcaa

SEQ ID NO: 2101198 - RNA, 11 nt, Human
gcucucagaag

SEQ ID NO: 2101199 - RNA, 10 nt, Human
gcucucagcc

SEQ ID NO: 2101200 - RNA, 11 nt, Human
gcucucagcca

SEQ ID NO: 2101201 - RNA, 17 nt, Human
gcucucagccaacgagu

SEQ ID NO: 2101202 - RNA, 12 nt, Human
gcucucagaagg

SEQ ID NO: 2101203 - RNA, 18 nt, Human
gcucucaaguuaucaggg

SEQ ID NO: 2101204 - RNA, 21 nt, Human
gcuccucccucccucugccgg

SEQ ID NO: 2101205 - RNA, 21 nt, Human
gcucuagccugggcaacaaca

SEQ ID NO: 2101206 - RNA, 14 nt, Human
gcucuagccugggc

SEQ ID NO: 2101207 - RNA, 15 nt, Human
gcuccagacccccag

SEQ ID NO: 2101208 - RNA, 14 nt, Human
gcuccagaccccca

SEQ ID NO: 2101209 - RNA, 17 nt, Human
gcuccagacccccagca

SEQ ID NO: 2101210 - RNA, 23 nt, Human
gcuccagacccccagcaacccuc

SEQ ID NO: 2101211 - RNA, 17 nt, Human
gcuccagcucaccagcc

SEQ ID NO: 2101212 - RNA, 14 nt, Human
gcucccagggccau

SEQ ID NO: 2101213 - RNA, 22 nt, Human
gcucccagggccaugaacuuug

SEQ ID NO: 2101214 - RNA, 14 nt, Human
gcuccagccaaccc

SEQ ID NO: 2101215 - RNA, 16 nt, Human
gcuccagccaaccccu

SEQ ID NO: 2101216 - RNA, 17 nt, Human
gcuccagccaaccccug

SEQ ID NO: 2101217 - RNA, 18 nt, Human
gcuccagccaaccccugu

SEQ ID NO: 2101218 - RNA, 22 nt, Human
gcuccagccaaccccuguggag

SEQ ID NO: 2101219 - RNA, 23 nt, Human
gcuccagccaaccccuguggagc

SEQ ID NO: 2101220 - RNA, 14 nt, Human
gcuccagcucacca

SEQ ID NO: 2101221 - RNA, 13 nt, Human
gcuccagcucacc

SEQ ID NO: 2101222 - RNA, 15 nt, Human
gcuccucuccccagc

SEQ ID NO: 2101223 - RNA, 16 nt, Human
gcuccucccggugccc

SEQ ID NO: 2101224 - RNA, 19 nt, Human
gcuccucccggugcccaag

SEQ ID NO: 2101225 - RNA, 15 nt, Human
gcucugaaagccagc

SEQ ID NO: 2101226 - RNA, 23 nt, Human
gcucugaagucacaucacaggac

SEQ ID NO: 2101227 - RNA, 17 nt, Human
gcucugaaagccagcug

SEQ ID NO: 2101228 - RNA, 22 nt, Human
gcucugaagucacaucacagga

SEQ ID NO: 2101229 - RNA, 20 nt, Human
gcucugaucauccacugugc

SEQ ID NO: 2101230 - RNA, 22 nt, Human
gcucugaucauccacugugcca

SEQ ID NO: 2101231 - RNA, 21 nt, Human
gcucugaucauccacugugcc

SEQ ID NO: 2101232 - RNA, 12 nt, Human
gcucugcccaga

SEQ ID NO: 2101233 - RNA, 13 nt, Human
gcucugcccagag

SEQ ID NO: 2101234 - RNA, 14 nt, Human
gcucugcccagagc

SEQ ID NO: 2101235 - RNA, 15 nt, Human
gcucugcccagagcu

SEQ ID NO: 2101236 - RNA, 16 nt, Human
gcucugcccagagcug

SEQ ID NO: 2101237 - RNA, 17 nt, Human
gcucugcccagagcugg

SEQ ID NO: 2101238 - RNA, 18 nt, Human
gcucugcccagagcuggg

SEQ ID NO: 2101239 - RNA, 20 nt, Human
gcucugcccagagcugggug

SEQ ID NO: 2101240 - RNA, 21 nt, Human
gcucugcccagagcuggguga

SEQ ID NO: 2101241 - RNA, 14 nt, Human
gcucugugcaggga

SEQ ID NO: 2101242 - RNA, 19 nt, Human
gcucuggugacaccagccu

SEQ ID NO: 2101243 - RNA, 20 nt, Human
gcucuggugacaccagccuu

SEQ ID NO: 2101244 - RNA, 15 nt, Human
gcucuggagccaccu

SEQ ID NO: 2101245 - RNA, 16 nt, Human
gcucuggagccaccug

SEQ ID NO: 2101246 - RNA, 17 nt, Human
gcucuggagccaccugu

SEQ ID NO: 2101247 - RNA, 18 nt, Human
gcucuggagccaccuguc

SEQ ID NO: 2101248 - RNA, 20 nt, Human
gcucuggagccaccuguccc

SEQ ID NO: 2101249 - RNA, 22 nt, Human
gcucuggagccaccugucccac

SEQ ID NO: 2101250 - RNA, 23 nt, Human
gcucuggagccaccugucccacc

SEQ ID NO: 2101251 - RNA, 18 nt, Human
gcucuggugacaccagcc

SEQ ID NO: 2101252 - RNA, 15 nt, Human
gcucuuuucaaugaa

SEQ ID NO: 2101253 - RNA, 16 nt, Human
gcucuguguugccaug

SEQ ID NO: 2101254 - RNA, 12 nt, Human
gcugaacaucac

SEQ ID NO: 2101255 - RNA, 18 nt, Human
gcugaaacaggagagaaa

SEQ ID NO: 2101256 - RNA, 14 nt, Human
gcugaaagagaaaa

SEQ ID NO: 2101257 - RNA, 16 nt, Human
gcugaaacaggagaga

SEQ ID NO: 2101258 - RNA, 17 nt, Human
gcugaaacaggagagaa

SEQ ID NO: 2101259 - RNA, 15 nt, Human
gcugagcccuggcag

SEQ ID NO: 2101260 - RNA, 16 nt, Human
gcugagcccuggcagg

SEQ ID NO: 2101261 - RNA, 13 nt, Human
gcugacagacaca

SEQ ID NO: 2101262 - RNA, 19 nt, Human
gcugacacguccaccccag

SEQ ID NO: 2101263 - RNA, 13 nt, Human
gcugagcccuggc

SEQ ID NO: 2101264 - RNA, 14 nt, Human
gcugagcccuggca

SEQ ID NO: 2101265 - RNA, 18 nt, Human
gcugaagaauuauuuuuu

SEQ ID NO: 2101266 - RNA, 15 nt, Human
gcugaagagugagga

SEQ ID NO: 2101267 - RNA, 16 nt, Human
gcugaacggggagaaa

SEQ ID NO: 2101268 - RNA, 17 nt, Human
gcugaacggggagaaaa

SEQ ID NO: 2101269 - RNA, 17 nt, Human
gcugaauacagaggcaa

SEQ ID NO: 2101270 - RNA, 19 nt, Human
gcugacaaccaccgcuccc

SEQ ID NO: 2101271 - RNA, 21 nt, Human
gcugacaaccaccgcucccca

SEQ ID NO: 2101272 - RNA, 22 nt, Human
gcugacaaccaccgcuccccag

SEQ ID NO: 2101273 - RNA, 23 nt, Human
gcugacaaccaccgcuccccagc

SEQ ID NO: 2101274 - RNA, 14 nt, Human
gcuuuuccuugggg

SEQ ID NO: 2101275 - RNA, 20 nt, Human
gcuuuuccuuggggcaggca

SEQ ID NO: 2101276 - RNA, 21 nt, Human
gcuuuuccuuggggcaggcag

SEQ ID NO: 2101277 - RNA, 22 nt, Human
gcuuuuccuuggggcaggcagu

SEQ ID NO: 2101278 - RNA, 23 nt, Human
gcuuuuccuuggggcaggcagug

SEQ ID NO: 2101279 - RNA, 22 nt, Human
gcuuuuccuuuguuuuuaugaa

SEQ ID NO: 2101280 - RNA, 18 nt, Human
gcuuuugucuaugggacu

SEQ ID NO: 2101281 - RNA, 15 nt, Human
gcuuuuggucugugu

SEQ ID NO: 2101282 - RNA, 18 nt, Human
ggaaaauuuuaaaaauac

SEQ ID NO: 2101283 - RNA, 16 nt, Human
gcuuuuugucuuuucu

SEQ ID NO: 2101284 - RNA, 20 nt, Human
gcuuuuuuauuuuuuauaca

SEQ ID NO: 2101285 - RNA, 13 nt, Human
ggaaacaaagugg

SEQ ID NO: 2101286 - RNA, 22 nt, Human
ggaaacaaaguggaaggaaaga

SEQ ID NO: 2101287 - RNA, 17 nt, Human
ggaacugaacauuccag

SEQ ID NO: 2101288 - RNA, 14 nt, Human
ggaagacaauguga

SEQ ID NO: 2101289 - RNA, 16 nt, Human
ggaagacaaugugaaa

SEQ ID NO: 2101290 - RNA, 12 nt, Human
ggaagaaacaaa

SEQ ID NO: 2101291 - RNA, 14 nt, Human
ggaagaaaagagcu

SEQ ID NO: 2101292 - RNA, 13 nt, Human
ggaagaacauaga

SEQ ID NO: 2101293 - RNA, 14 nt, Human
ggaagaacauagaa

SEQ ID NO: 2101294 - RNA, 16 nt, Human
ggaagaacauagaacu

SEQ ID NO: 2101295 - RNA, 16 nt, Human
ggaaacuagcuuacau

SEQ ID NO: 2101296 - RNA, 15 nt, Human
ggaaacgugcccucu

SEQ ID NO: 2101297 - RNA, 14 nt, Human
ggaaacuaaaacuu

SEQ ID NO: 2101298 - RNA, 17 nt, Human
ggaaaugccuaagaaga

SEQ ID NO: 2101299 - RNA, 15 nt, Human
ggaaaugaaagaaag

SEQ ID NO: 2101300 - RNA, 17 nt, Human
ggaaaugaauuucucua

SEQ ID NO: 2101301 - RNA, 17 nt, Human
ggaaauuggaagagcac

SEQ ID NO: 2101302 - RNA, 17 nt, Human
ggaaaugucaacaagua

SEQ ID NO: 2101303 - RNA, 17 nt, Human
gcuuccaugagaacagc

SEQ ID NO: 2101304 - RNA, 17 nt, Human
gcuuccauuugugugug

SEQ ID NO: 2101305 - RNA, 12 nt, Human
gcuuccauucca

SEQ ID NO: 2101306 - RNA, 21 nt, Human
gcuucuuaauauaacugccuu

SEQ ID NO: 2101307 - RNA, 22 nt, Human
gcuucuuaauauaacugccuua

SEQ ID NO: 2101308 - RNA, 18 nt, Human
gcuucuuacuauuaagca

SEQ ID NO: 2101309 - RNA, 20 nt, Human
gcuucuuacuauuaagcagu

SEQ ID NO: 2101310 - RNA, 13 nt, Human
gcuugaaagaaaa

SEQ ID NO: 2101311 - RNA, 15 nt, Human
gcuugacaggacagc

SEQ ID NO: 2101312 - RNA, 16 nt, Human
gcuugacaggacagca

SEQ ID NO: 2101313 - RNA, 14 nt, Human
gcuugaagccaagu

SEQ ID NO: 2101314 - RNA, 22 nt, Human
gcuugaagaucguuaguaucua

SEQ ID NO: 2101315 - RNA, 13 nt, Human
gcuugaacccagg

SEQ ID NO: 2101316 - RNA, 11 nt, Human
gcuugaacaca

SEQ ID NO: 2101317 - RNA, 12 nt, Human
gcuugaacacag

SEQ ID NO: 2101318 - RNA, 16 nt, Human
gcuugaacacaguauu

SEQ ID NO: 2101319 - RNA, 17 nt, Human
gcuugaacacaguauuu

SEQ ID NO: 2101320 - RNA, 23 nt, Human
gcuugaacacaguauuuucccaa

SEQ ID NO: 2101321 - RNA, 21 nt, Human
gcuugaagaucguuaguaucu

SEQ ID NO: 2101322 - RNA, 20 nt, Human
gcuugaaagaaaauaugcau

SEQ ID NO: 2101323 - RNA, 16 nt, Human
gcuugaacccaggagg

SEQ ID NO: 2101324 - RNA, 23 nt, Human
gcuugaaccugggaggcagaggu

SEQ ID NO: 2101325 - RNA, 17 nt, Human
gcuuguaaauagcucag

SEQ ID NO: 2101326 - RNA, 19 nt, Human
gcuuguaaauagcucaggu

SEQ ID NO: 2101327 - RNA, 18 nt, Human
gcuuguaaauagcucagg

SEQ ID NO: 2101328 - RNA, 18 nt, Human
gcuuucucugcuucagcu

SEQ ID NO: 2101329 - RNA, 20 nt, Human
gcuuucucugcuucagcuug

SEQ ID NO: 2101330 - RNA, 13 nt, Human
gcuuucuggagag

SEQ ID NO: 2101331 - RNA, 16 nt, Human
gcugguuccugcuaga

SEQ ID NO: 2101332 - RNA, 19 nt, Human
gcugguuccugcuagaaau

SEQ ID NO: 2101333 - RNA, 23 nt, Human
gcugguucaggguuggccccugc

SEQ ID NO: 2101334 - RNA, 15 nt, Human
gcugguuuccucauu

SEQ ID NO: 2101335 - RNA, 24 nt, Human
gcugguugucauuuuugcaguaga

SEQ ID NO: 2101336 - RNA, 19 nt, Human
gcuguauuagucacagaga

SEQ ID NO: 2101337 - RNA, 13 nt, Human
gcuguauucuucu

SEQ ID NO: 2101338 - RNA, 13 nt, Human
gcuguagaaggag

SEQ ID NO: 2101339 - RNA, 12 nt, Human
gcugguuuuccu

SEQ ID NO: 2101340 - RNA, 14 nt, Human
gcugguuuuccuaa

SEQ ID NO: 2101341 - RNA, 23 nt, Human
gcugguuuuccuaaaugcaguga

SEQ ID NO: 2101342 - RNA, 19 nt, Human
gcuggagugcaguggugcg

SEQ ID NO: 2101343 - RNA, 20 nt, Human
gcuggagugcaguggugcga

SEQ ID NO: 2101344 - RNA, 12 nt, Human
gcuggagcggcu

SEQ ID NO: 2101345 - RNA, 15 nt, Human
gcuggauaaaaugag

SEQ ID NO: 2101346 - RNA, 14 nt, Human
gcuggauaaaauga

SEQ ID NO: 2101347 - RNA, 14 nt, Human
gcuggaucucccag

SEQ ID NO: 2101348 - RNA, 19 nt, Human
gcuggaucucccagggcua

SEQ ID NO: 2101349 - RNA, 20 nt, Human
gcuggaucucccagggcuac

SEQ ID NO: 2101350 - RNA, 15 nt, Human
gcuucaguggcagcu

SEQ ID NO: 2101351 - RNA, 14 nt, Human
gcuucaguggcagc

SEQ ID NO: 2101352 - RNA, 12 nt, Human
gcuuauuuuaaa

SEQ ID NO: 2101353 - RNA, 13 nt, Human
gcuuacaagccag

SEQ ID NO: 2101354 - RNA, 19 nt, Human
gcuuacaagccagcuggag

SEQ ID NO: 2101355 - RNA, 22 nt, Human
gcuuacaagccagcuggagaaa

SEQ ID NO: 2101356 - RNA, 15 nt, Human
gcuuaaaaaucauug

SEQ ID NO: 2101357 - RNA, 13 nt, Human
gcuuaaaaaaaac

SEQ ID NO: 2101358 - RNA, 18 nt, Human
gcuuaaugacacuagcua

SEQ ID NO: 2101359 - RNA, 21 nt, Human
gcuguuuguuugacaaagaaa

SEQ ID NO: 2101360 - RNA, 17 nt, Human
gcuguuuucccugaccu

SEQ ID NO: 2101361 - RNA, 12 nt, Human
gcugugccucug

SEQ ID NO: 2101362 - RNA, 20 nt, Human
gcuguuuguuugacaaagaa

SEQ ID NO: 2101363 - RNA, 12 nt, Human
gcuguuugucau

SEQ ID NO: 2101364 - RNA, 14 nt, Human
gcuguuggcugggg

SEQ ID NO: 2101365 - RNA, 13 nt, Human
gcuguuggcuggg

SEQ ID NO: 2101366 - RNA, 13 nt, Human
ggagcagugucuu

SEQ ID NO: 2101367 - RNA, 17 nt, Human
ggagcagugucuuccau

SEQ ID NO: 2101368 - RNA, 18 nt, Human
ggagcagugucuuccaua

SEQ ID NO: 2101369 - RNA, 16 nt, Human
ggagcaucucuugagg

SEQ ID NO: 2101370 - RNA, 20 nt, Human
ggagcaucucuugaggccag

SEQ ID NO: 2101371 - RNA, 21 nt, Human
ggagcaucucuugaggccagg

SEQ ID NO: 2101372 - RNA, 20 nt, Human
ggagguggagguugcaguga

SEQ ID NO: 2101373 - RNA, 15 nt, Human
ggagguggcagcccu

SEQ ID NO: 2101374 - RNA, 19 nt, Human
ggagguggagguugcagug

SEQ ID NO: 2101375 - RNA, 20 nt, Human
ggagguggaggcugcaguga

SEQ ID NO: 2101376 - RNA, 14 nt, Human
ggaggugaccccag

SEQ ID NO: 2101377 - RNA, 14 nt, Human
ggaggucgaggcag

SEQ ID NO: 2101378 - RNA, 22 nt, Human
ggaggucgaccccaaagccccu

SEQ ID NO: 2101379 - RNA, 20 nt, Human
ggaggucaaggcugcaguga

SEQ ID NO: 2101380 - RNA, 20 nt, Human
ggagguagagguugugguga

SEQ ID NO: 2101381 - RNA, 22 nt, Human
ggagguauucguaaggauggga

SEQ ID NO: 2101382 - RNA, 17 nt, Human
ggaggcccguccggcag

SEQ ID NO: 2101383 - RNA, 13 nt, Human
ggaggccucuggg

SEQ ID NO: 2101384 - RNA, 15 nt, Human
ggaggccucugggcc

SEQ ID NO: 2101385 - RNA, 18 nt, Human
ggaggccgggugcucagg

SEQ ID NO: 2101386 - RNA, 16 nt, Human
ggaggggguuacaaac

SEQ ID NO: 2101387 - RNA, 18 nt, Human
ggaggggguuugggggcu

SEQ ID NO: 2101388 - RNA, 17 nt, Human
ggaggggugguccugac

SEQ ID NO: 2101389 - RNA, 21 nt, Human
ggagcugccuguucagcucca

SEQ ID NO: 2101390 - RNA, 12 nt, Human
ggagcugccugu

SEQ ID NO: 2101391 - RNA, 22 nt, Human
ggagccccgaggccuucucuga

SEQ ID NO: 2101392 - RNA, 13 nt, Human
ggagcccccgccc

SEQ ID NO: 2101393 - RNA, 20 nt, Human
ggagcccccgccccgcccca

SEQ ID NO: 2101394 - RNA, 16 nt, Human
ggagccccgaggccuu

SEQ ID NO: 2101395 - RNA, 16 nt, Human
ggagccaauggagacu

SEQ ID NO: 2101396 - RNA, 23 nt, Human
ggagccaaggguucagagacuca

SEQ ID NO: 2101397 - RNA, 20 nt, Human
ggagccaacagaagcuucca

SEQ ID NO: 2101398 - RNA, 17 nt, Human
ggagccaaauguggcau

SEQ ID NO: 2101399 - RNA, 15 nt, Human
ggagccacucuguuc

SEQ ID NO: 2101400 - RNA, 13 nt, Human
ggagccaccuguc

SEQ ID NO: 2101401 - RNA, 16 nt, Human
ggagccaccuguccca

SEQ ID NO: 2101402 - RNA, 21 nt, Human
ggaggaaggcuuacacccaca

SEQ ID NO: 2101403 - RNA, 22 nt, Human
ggaggaaggagccuauggcauc

SEQ ID NO: 2101404 - RNA, 13 nt, Human
ggaggaaggagag

SEQ ID NO: 2101405 - RNA, 15 nt, Human
ggagcuuaccuccca

SEQ ID NO: 2101406 - RNA, 18 nt, Human
ggagcuuaccucccaccu

SEQ ID NO: 2101407 - RNA, 21 nt, Human
ggagcuuagccaaugugggag

SEQ ID NO: 2101408 - RNA, 21 nt, Human
ggagcugggacacuuaacaga

SEQ ID NO: 2101409 - RNA, 14 nt, Human
ggagcugggaggaa

SEQ ID NO: 2101410 - RNA, 15 nt, Human
ggagcugggaggaaa

SEQ ID NO: 2101411 - RNA, 17 nt, Human
ggagcuggcgucugucu

SEQ ID NO: 2101412 - RNA, 19 nt, Human
ggagcugggcagaaggcca

SEQ ID NO: 2101413 - RNA, 18 nt, Human
ggagcugggcagaaggcc

SEQ ID NO: 2101414 - RNA, 16 nt, Human
ggaggaccaaaaaaau

SEQ ID NO: 2101415 - RNA, 17 nt, Human
ggaggaccaaaaaaaua

SEQ ID NO: 2101416 - RNA, 18 nt, Human
ggaggccaagugcaggcu

SEQ ID NO: 2101417 - RNA, 20 nt, Human
ggaggccaaggugggaggau

SEQ ID NO: 2101418 - RNA, 19 nt, Human
ggaggaaucgaggaaccag

SEQ ID NO: 2101419 - RNA, 20 nt, Human
ggaggaaucgaggaaccaga

SEQ ID NO: 2101420 - RNA, 21 nt, Human
ggaggaaucgaggaaccagag

SEQ ID NO: 2101421 - RNA, 22 nt, Human
ggaggaaucgaggaaccagagc

SEQ ID NO: 2101422 - RNA, 23 nt, Human
ggaggaaucgaggaaccagagcc

SEQ ID NO: 2101423 - RNA, 15 nt, Human
ggaggaaugcucccc

SEQ ID NO: 2101424 - RNA, 16 nt, Human
ggaggaaugcuccccc

SEQ ID NO: 2101425 - RNA, 18 nt, Human
ggaggaaugcucccccau

SEQ ID NO: 2101426 - RNA, 17 nt, Human
ggaggaaugcuccccca

SEQ ID NO: 2101427 - RNA, 15 nt, Human
ggaggaauuucugag

SEQ ID NO: 2101428 - RNA, 21 nt, Human
ggaggaauuucugaguggcca

SEQ ID NO: 2101429 - RNA, 12 nt, Human
ggaggccagcca

SEQ ID NO: 2101430 - RNA, 13 nt, Human
ggaggccagccag

SEQ ID NO: 2101431 - RNA, 17 nt, Human
ggaggccccacugggga

SEQ ID NO: 2101432 - RNA, 16 nt, Human
ggaggccagccaguga

SEQ ID NO: 2101433 - RNA, 20 nt, Human
ggaggccaagugcaggcugg

SEQ ID NO: 2101434 - RNA, 13 nt, Human
ggauguucuggga

SEQ ID NO: 2101435 - RNA, 16 nt, Human
ggauguucugggacac

SEQ ID NO: 2101436 - RNA, 15 nt, Human
ggauguucugggaca

SEQ ID NO: 2101437 - RNA, 16 nt, Human
ggauguacauuuccaa

SEQ ID NO: 2101438 - RNA, 18 nt, Human
ggauguauaugucaucuc

SEQ ID NO: 2101439 - RNA, 22 nt, Human
ggauguauccaugggggcaggg

SEQ ID NO: 2101440 - RNA, 23 nt, Human
ggauguauccaugggggcagggc

SEQ ID NO: 2101441 - RNA, 18 nt, Human
ggauguccacagaugccu

SEQ ID NO: 2101442 - RNA, 18 nt, Human
ggaugucacucagaugga

SEQ ID NO: 2101443 - RNA, 17 nt, Human
ggauguccacagaugcc

SEQ ID NO: 2101444 - RNA, 13 nt, Human
ggaugucaccaau

SEQ ID NO: 2101445 - RNA, 11 nt, Human
ggcacaauaaa

SEQ ID NO: 2101446 - RNA, 12 nt, Human
ggcacaauaaau

SEQ ID NO: 2101447 - RNA, 13 nt, Human
ggcacacaccugu

SEQ ID NO: 2101448 - RNA, 21 nt, Human
ggcacacaccuguagucccag

SEQ ID NO: 2101449 - RNA, 21 nt, Human
ggcacagaaacacaauauuuu

SEQ ID NO: 2101450 - RNA, 12 nt, Human
ggcacagcugug

SEQ ID NO: 2101451 - RNA, 18 nt, Human
ggcacagcggggccccag

SEQ ID NO: 2101452 - RNA, 17 nt, Human
ggcacagccggggccug

SEQ ID NO: 2101453 - RNA, 20 nt, Human
ggcacagccggggccugccu

SEQ ID NO: 2101454 - RNA, 21 nt, Human
ggcacagccggggccugccua

SEQ ID NO: 2101455 - RNA, 23 nt, Human
ggcacagccggggccugccuagc

SEQ ID NO: 2101456 - RNA, 16 nt, Human
ggcacagggcaguggg

SEQ ID NO: 2101457 - RNA, 15 nt, Human
ggagugcagugagcc

SEQ ID NO: 2101458 - RNA, 14 nt, Human
ggauggaggagaag

SEQ ID NO: 2101459 - RNA, 19 nt, Human
ggauggaggggugguccug

SEQ ID NO: 2101460 - RNA, 21 nt, Human
ggauggaggggugguccugac

SEQ ID NO: 2101461 - RNA, 18 nt, Human
ggauggauuuccagccaa

SEQ ID NO: 2101462 - RNA, 12 nt, Human
ggaugggaagga

SEQ ID NO: 2101463 - RNA, 15 nt, Human
ggaugggaaggaggg

SEQ ID NO: 2101464 - RNA, 17 nt, Human
ggaugggaaggagggag

SEQ ID NO: 2101465 - RNA, 14 nt, Human
ggauggggccacag

SEQ ID NO: 2101466 - RNA, 15 nt, Human
ggauggggccacagc

SEQ ID NO: 2101467 - RNA, 21 nt, Human
ggaucugguagggggaaaaug

SEQ ID NO: 2101468 - RNA, 18 nt, Human
ggaucuggggcucuggga

SEQ ID NO: 2101469 - RNA, 19 nt, Human
ggaucugggacccuuuccu

SEQ ID NO: 2101470 - RNA, 15 nt, Human
ggaucugacugcacg

SEQ ID NO: 2101471 - RNA, 15 nt, Human
ggaucugugcccaga

SEQ ID NO: 2101472 - RNA, 16 nt, Human
ggaucugugcccagag

SEQ ID NO: 2101473 - RNA, 23 nt, Human
ggaucuguuguguacguggagag

SEQ ID NO: 2101474 - RNA, 23 nt, Human
ggaucugggacccuuuccuuccu

SEQ ID NO: 2101475 - RNA, 19 nt, Human
ggaguuuccuaaaaguuca

SEQ ID NO: 2101476 - RNA, 13 nt, Human
ggaguuugaggcu

SEQ ID NO: 2101477 - RNA, 21 nt, Human
ggaguuggaagugugugaucu

SEQ ID NO: 2101478 - RNA, 19 nt, Human
ggaguuuaagaccagccug

SEQ ID NO: 2101479 - RNA, 20 nt, Human
ggaguuuaagaccagccugg

SEQ ID NO: 2101480 - RNA, 19 nt, Human
ggaguuggcauugcauuua

SEQ ID NO: 2101481 - RNA, 22 nt, Human
ggaguugucaagucucugcugg

SEQ ID NO: 2101482 - RNA, 19 nt, Human
ggaguuugaggcugcagcg

SEQ ID NO: 2101483 - RNA, 20 nt, Human
ggaguuugaggcugcagcga

SEQ ID NO: 2101484 - RNA, 20 nt, Human
ggauaaugcuguugccucau

SEQ ID NO: 2101485 - RNA, 15 nt, Human
ggauaagccagcugc

SEQ ID NO: 2101486 - RNA, 14 nt, Human
ggauaaaaugaggu

SEQ ID NO: 2101487 - RNA, 19 nt, Human
ggauaaacuuuuagaaacu

SEQ ID NO: 2101488 - RNA, 20 nt, Human
ggauaaacuuuuagaaacuu

SEQ ID NO: 2101489 - RNA, 15 nt, Human
ggauaaaaugagguu

SEQ ID NO: 2101490 - RNA, 20 nt, Human
ggaguucgagaccagccugg

SEQ ID NO: 2101491 - RNA, 15 nt, Human
ggaguucgaggcugc

SEQ ID NO: 2101492 - RNA, 20 nt, Human
ggaguucgaggcugcaguca

SEQ ID NO: 2101493 - RNA, 21 nt, Human
ggaguucgaggcugcagucag

SEQ ID NO: 2101494 - RNA, 17 nt, Human
ggcagugggagcugccu

SEQ ID NO: 2101495 - RNA, 15 nt, Human
ggcaccagcagccug

SEQ ID NO: 2101496 - RNA, 16 nt, Human
ggcaccagcagccugg

SEQ ID NO: 2101497 - RNA, 21 nt, Human
ggcaucuuugccuugggcugc

SEQ ID NO: 2101498 - RNA, 16 nt, Human
ggcaucuuugccuugg

SEQ ID NO: 2101499 - RNA, 13 nt, Human
ggcaucuggccuu

SEQ ID NO: 2101500 - RNA, 17 nt, Human
ggcaucuuugccuuggg

SEQ ID NO: 2101501 - RNA, 19 nt, Human
ggcaucuuugccuugggcu

SEQ ID NO: 2101502 - RNA, 15 nt, Human
ggcaucugacacaaa

SEQ ID NO: 2101503 - RNA, 16 nt, Human
ggcaucugacacaaaa

SEQ ID NO: 2101504 - RNA, 17 nt, Human
ggcaucugacacaaaaa

SEQ ID NO: 2101505 - RNA, 20 nt, Human
ggcaucugacacaaaaaaag

SEQ ID NO: 2101506 - RNA, 15 nt, Human
ggcaucugcacccuc

SEQ ID NO: 2101507 - RNA, 14 nt, Human
ggcaucugccccuc

SEQ ID NO: 2101508 - RNA, 22 nt, Human
ggcaucugcacccucgaugaag

SEQ ID NO: 2101509 - RNA, 19 nt, Human
ggcaucugccccuccccca

SEQ ID NO: 2101510 - RNA, 16 nt, Human
ggcaucugccccuccc

SEQ ID NO: 2101511 - RNA, 18 nt, Human
ggcaucugccccuccccc

SEQ ID NO: 2101512 - RNA, 21 nt, Human
ggcaucccaguggccucaacc

SEQ ID NO: 2101513 - RNA, 15 nt, Human
ggcaucccaggggac

SEQ ID NO: 2101514 - RNA, 18 nt, Human
ggcaucccaguggccuca

SEQ ID NO: 2101515 - RNA, 20 nt, Human
ggcauccuuccucacaccag

SEQ ID NO: 2101516 - RNA, 16 nt, Human
ggcaucuccugugcau

SEQ ID NO: 2101517 - RNA, 17 nt, Human
ggcaucuccugugcaug

SEQ ID NO: 2101518 - RNA, 21 nt, Human
ggcaucuccugugcaugggug

SEQ ID NO: 2101519 - RNA, 13 nt, Human
ggcaucacagggc

SEQ ID NO: 2101520 - RNA, 14 nt, Human
ggcaucacagggca

SEQ ID NO: 2101521 - RNA, 16 nt, Human
ggcaucacagggcaga

SEQ ID NO: 2101522 - RNA, 17 nt, Human
ggcaucacagggcagag

SEQ ID NO: 2101523 - RNA, 17 nt, Human
ggcauaggccugggugc

SEQ ID NO: 2101524 - RNA, 14 nt, Human
ggcauaggccuggg

SEQ ID NO: 2101525 - RNA, 15 nt, Human
ggcauaggccugggu

SEQ ID NO: 2101526 - RNA, 16 nt, Human
ggcauaggccugggug

SEQ ID NO: 2101527 - RNA, 19 nt, Human
ggcagugggagcugccugu

SEQ ID NO: 2101528 - RNA, 18 nt, Human
ggcagugggagcugccug

SEQ ID NO: 2101529 - RNA, 13 nt, Human
ggcaguggggcug

SEQ ID NO: 2101530 - RNA, 15 nt, Human
ggcaguggggcuggg

SEQ ID NO: 2101531 - RNA, 18 nt, Human
ggcaguggggcugggggu

SEQ ID NO: 2101532 - RNA, 21 nt, Human
ggcauagcuccccgcuucugc

SEQ ID NO: 2101533 - RNA, 21 nt, Human
ggccaugauucgcccaaagcc

SEQ ID NO: 2101534 - RNA, 21 nt, Human
ggccaugaggccucaguggac

SEQ ID NO: 2101535 - RNA, 17 nt, Human
ggccaugagcuccagac

SEQ ID NO: 2101536 - RNA, 18 nt, Human
ggccaugagcuccagacc

SEQ ID NO: 2101537 - RNA, 21 nt, Human
ggccaugagcuccagaccccc

SEQ ID NO: 2101538 - RNA, 22 nt, Human
ggccaugagcuccagaccccca

SEQ ID NO: 2101539 - RNA, 14 nt, Human
ggccaucgguccug

SEQ ID NO: 2101540 - RNA, 17 nt, Human
ggccaucgguccugucu

SEQ ID NO: 2101541 - RNA, 22 nt, Human
ggccaucgguccugucuccccu

SEQ ID NO: 2101542 - RNA, 21 nt, Human
ggccaucucugaacuucagcu

SEQ ID NO: 2101543 - RNA, 15 nt, Human
ggccaugaacuuugu

SEQ ID NO: 2101544 - RNA, 17 nt, Human
ggccaugaacuuugucc

SEQ ID NO: 2101545 - RNA, 23 nt, Human
ggccaugaccacuuuccccgugg

SEQ ID NO: 2101546 - RNA, 16 nt, Human
ggccaugagcuccaga

SEQ ID NO: 2101547 - RNA, 16 nt, Human
ggccagugugacaagg

SEQ ID NO: 2101548 - RNA, 16 nt, Human
ggccaucccaaggucu

SEQ ID NO: 2101549 - RNA, 13 nt, Human
ggccagggcccug

SEQ ID NO: 2101550 - RNA, 16 nt, Human
ggccagggcccugcag

SEQ ID NO: 2101551 - RNA, 17 nt, Human
ggccagggcccugcaga

SEQ ID NO: 2101552 - RNA, 18 nt, Human
ggccagggcccugcagag

SEQ ID NO: 2101553 - RNA, 23 nt, Human
ggccagagagccuggugcugcug

SEQ ID NO: 2101554 - RNA, 17 nt, Human
ggccagaggcagaaccc

SEQ ID NO: 2101555 - RNA, 19 nt, Human
ggccagaggcagaacccug

SEQ ID NO: 2101556 - RNA, 12 nt, Human
ggccagcagcuu

SEQ ID NO: 2101557 - RNA, 13 nt, Human
ggccagcagcuug

SEQ ID NO: 2101558 - RNA, 14 nt, Human
ggccaggcuggucu

SEQ ID NO: 2101559 - RNA, 16 nt, Human
ggccagccccacccag

SEQ ID NO: 2101560 - RNA, 20 nt, Human
ggccagccccacccaggagg

SEQ ID NO: 2101561 - RNA, 21 nt, Human
ggccagccccacccaggaggg

SEQ ID NO: 2101562 - RNA, 13 nt, Human
ggccagccccacc

SEQ ID NO: 2101563 - RNA, 14 nt, Human
ggccagccccaccc

SEQ ID NO: 2101564 - RNA, 15 nt, Human
ggccagccccaccca

SEQ ID NO: 2101565 - RNA, 18 nt, Human
ggccaggcuggucucaaa

SEQ ID NO: 2101566 - RNA, 16 nt, Human
ggccaggcuggucuca

SEQ ID NO: 2101567 - RNA, 12 nt, Human
ggccccacuggg

SEQ ID NO: 2101568 - RNA, 19 nt, Human
ggccccagaaggcagggaa

SEQ ID NO: 2101569 - RNA, 11 nt, Human
ggccccagaga

SEQ ID NO: 2101570 - RNA, 12 nt, Human
ggccccagagac

SEQ ID NO: 2101571 - RNA, 13 nt, Human
ggccccagagacu

SEQ ID NO: 2101572 - RNA, 14 nt, Human
ggccccagagacuc

SEQ ID NO: 2101573 - RNA, 18 nt, Human
ggccccagagacucagag

SEQ ID NO: 2101574 - RNA, 23 nt, Human
ggccccagagacucagagggagg

SEQ ID NO: 2101575 - RNA, 24 nt, Human
ggcccauaucugugaaaugcuggc

SEQ ID NO: 2101576 - RNA, 15 nt, Human
ggccgcauucccuga

SEQ ID NO: 2101577 - RNA, 16 nt, Human
ggccgcauucccugag

SEQ ID NO: 2101578 - RNA, 17 nt, Human
ggccgcauucccugagu

SEQ ID NO: 2101579 - RNA, 18 nt, Human
ggccgccccagccucuga

SEQ ID NO: 2101580 - RNA, 17 nt, Human
ggcccuuccucuccacu

SEQ ID NO: 2101581 - RNA, 16 nt, Human
ggccgaggguccuggc

SEQ ID NO: 2101582 - RNA, 18 nt, Human
ggccgaggguccuggcuc

SEQ ID NO: 2101583 - RNA, 15 nt, Human
ggccgagaagcaaga

SEQ ID NO: 2101584 - RNA, 12 nt, Human
ggccgagaagca

SEQ ID NO: 2101585 - RNA, 15 nt, Human
ggcccuuccucucca

SEQ ID NO: 2101586 - RNA, 13 nt, Human
ggcccuuccucuc

SEQ ID NO: 2101587 - RNA, 19 nt, Human
ggccccuuuuuacuccccu

SEQ ID NO: 2101588 - RNA, 21 nt, Human
ggccccuucacuucugaccac

SEQ ID NO: 2101589 - RNA, 20 nt, Human
ggccccuucacuucugacca

SEQ ID NO: 2101590 - RNA, 22 nt, Human
ggccccuucacuucugaccaca

SEQ ID NO: 2101591 - RNA, 11 nt, Human
ggcucagccug

SEQ ID NO: 2101592 - RNA, 23 nt, Human
ggcucagcggggacagcuccuuc

SEQ ID NO: 2101593 - RNA, 22 nt, Human
ggcucagcggggacagcuccuu

SEQ ID NO: 2101594 - RNA, 21 nt, Human
ggcucagcggggacagcuccu

SEQ ID NO: 2101595 - RNA, 23 nt, Human
ggcucagcaaaagaugcuucuca

SEQ ID NO: 2101596 - RNA, 19 nt, Human
ggcguagagggugcugccc

SEQ ID NO: 2101597 - RNA, 18 nt, Human
ggcucacugcagccucga

SEQ ID NO: 2101598 - RNA, 19 nt, Human
ggcucagcaaaagaugcuu

SEQ ID NO: 2101599 - RNA, 10 nt, Human
ggcucagccu

SEQ ID NO: 2101600 - RNA, 12 nt, Human
ggcucagccugg

SEQ ID NO: 2101601 - RNA, 19 nt, Human
ggcgugcaguggugcgauc

SEQ ID NO: 2101602 - RNA, 16 nt, Human
ggcguggagccaggga

SEQ ID NO: 2101603 - RNA, 19 nt, Human
ggcguggagccagggagcg

SEQ ID NO: 2101604 - RNA, 14 nt, Human
ggcgugcaguggug

SEQ ID NO: 2101605 - RNA, 15 nt, Human
ggcgucugucuucaa

SEQ ID NO: 2101606 - RNA, 16 nt, Human
ggcucacugcagccuc

SEQ ID NO: 2101607 - RNA, 16 nt, Human
ggcgugguggcgggca

SEQ ID NO: 2101608 - RNA, 17 nt, Human
ggcucacugcagccuca

SEQ ID NO: 2101609 - RNA, 17 nt, Human
ggccugaggagcagcag

SEQ ID NO: 2101610 - RNA, 20 nt, Human
ggccuccagcccucucacug

SEQ ID NO: 2101611 - RNA, 22 nt, Human
ggccuccagcccucucacugug

SEQ ID NO: 2101612 - RNA, 12 nt, Human
ggccuccagcuc

SEQ ID NO: 2101613 - RNA, 13 nt, Human
ggccuccagcuca

SEQ ID NO: 2101614 - RNA, 14 nt, Human
ggccuccagcucag

SEQ ID NO: 2101615 - RNA, 15 nt, Human
ggccuccagcucagc

SEQ ID NO: 2101616 - RNA, 16 nt, Human
ggccuccagcucagca

SEQ ID NO: 2101617 - RNA, 23 nt, Human
ggccuccaaguccacaguggaac

SEQ ID NO: 2101618 - RNA, 16 nt, Human
ggccgcuguucaccca

SEQ ID NO: 2101619 - RNA, 19 nt, Human
ggccgcuguucacccacag

SEQ ID NO: 2101620 - RNA, 12 nt, Human
ggccuucucuga

SEQ ID NO: 2101621 - RNA, 11 nt, Human
ggccuguugcc

SEQ ID NO: 2101622 - RNA, 23 nt, Human
ggccuggccaggagcucuucagg

SEQ ID NO: 2101623 - RNA, 21 nt, Human
ggccuggccagaugcaccagc

SEQ ID NO: 2101624 - RNA, 14 nt, Human
ggccuggccaggag

SEQ ID NO: 2101625 - RNA, 15 nt, Human
ggccuggccaggagc

SEQ ID NO: 2101626 - RNA, 16 nt, Human
ggccuggccaggagcu

SEQ ID NO: 2101627 - RNA, 17 nt, Human
ggccuggccaggagcuc

SEQ ID NO: 2101628 - RNA, 18 nt, Human
ggccuggccaggagcucu

SEQ ID NO: 2101629 - RNA, 14 nt, Human
ggccugaugcuccc

SEQ ID NO: 2101630 - RNA, 20 nt, Human
ggccugcugggcucuccacc

SEQ ID NO: 2101631 - RNA, 21 nt, Human
ggccugcugggcucuccaccu

SEQ ID NO: 2101632 - RNA, 22 nt, Human
ggccugcugggcucuccaccuc

SEQ ID NO: 2101633 - RNA, 23 nt, Human
ggccugcugggcucuccaccuca

SEQ ID NO: 2101634 - RNA, 20 nt, Human
ggcgacagagcgagacuccg

SEQ ID NO: 2101635 - RNA, 23 nt, Human
ggcgacagagcgagagucugucu

SEQ ID NO: 2101636 - RNA, 18 nt, Human
ggcgacaguuuuccuucu

SEQ ID NO: 2101637 - RNA, 14 nt, Human
ggccuuuggcuuca

SEQ ID NO: 2101638 - RNA, 23 nt, Human
ggccuuugcuuaugaauauuuau

SEQ ID NO: 2101639 - RNA, 15 nt, Human
ggccuuguucucucu

SEQ ID NO: 2101640 - RNA, 13 nt, Human
ggccuuuggcuuc

SEQ ID NO: 2101641 - RNA, 16 nt, Human
ggccuucucugaagga

SEQ ID NO: 2101642 - RNA, 15 nt, Human
ggccuucucugaagg

SEQ ID NO: 2101643 - RNA, 15 nt, Human
ggccuguugcccuuu

SEQ ID NO: 2101644 - RNA, 22 nt, Human
ggccuucuuucuagagagggaa

SEQ ID NO: 2101645 - RNA, 13 nt, Human
ggccuugcccaga

SEQ ID NO: 2101646 - RNA, 14 nt, Human
ggccuugcccagag

SEQ ID NO: 2101647 - RNA, 15 nt, Human
ggccuugcccagaga

SEQ ID NO: 2101648 - RNA, 16 nt, Human
ggccuugcccagagau

SEQ ID NO: 2101649 - RNA, 22 nt, Human
gggaagauaggcucugcacaga

SEQ ID NO: 2101650 - RNA, 22 nt, Human
gggaagcaaaaacgaaagcugg

SEQ ID NO: 2101651 - RNA, 13 nt, Human
gggaagcccagcu

SEQ ID NO: 2101652 - RNA, 14 nt, Human
gggaagcccagcuc

SEQ ID NO: 2101653 - RNA, 19 nt, Human
gggaagcccagcuccaggg

SEQ ID NO: 2101654 - RNA, 12 nt, Human
gggaagcccugg

SEQ ID NO: 2101655 - RNA, 18 nt, Human
gggaaggacuuggcgcgc

SEQ ID NO: 2101656 - RNA, 20 nt, Human
gggaaggaggguuagggagg

SEQ ID NO: 2101657 - RNA, 20 nt, Human
gggaagcuucuuaaaugaga

SEQ ID NO: 2101658 - RNA, 17 nt, Human
gggaaggaggcuggcuu

SEQ ID NO: 2101659 - RNA, 22 nt, Human
gggaaggaagaggaagagugca

SEQ ID NO: 2101660 - RNA, 23 nt, Human
gggaagcggagguugcagggagc

SEQ ID NO: 2101661 - RNA, 16 nt, Human
gggacagcuccuucug

SEQ ID NO: 2101662 - RNA, 16 nt, Human
aaaaauauuauaacuu

SEQ ID NO: 2101663 - RNA, 11 nt, Human
aaaaauauuua

SEQ ID NO: 2101664 - RNA, 17 nt, Human
aaaaaucauaaacugug

SEQ ID NO: 2101665 - RNA, 16 nt, Human
aaaaauccagaaagaa

SEQ ID NO: 2101666 - RNA, 16 nt, Human
gggaccaacugggccc

SEQ ID NO: 2101667 - RNA, 13 nt, Human
gggaccaaggacc

SEQ ID NO: 2101668 - RNA, 17 nt, Human
gggaccaaggaccccuc

SEQ ID NO: 2101669 - RNA, 21 nt, Human
gggacagcuccuucuguccua

SEQ ID NO: 2101670 - RNA, 15 nt, Human
gggacagagucuggg

SEQ ID NO: 2101671 - RNA, 17 nt, Human
gggacagaucauagauu

SEQ ID NO: 2101672 - RNA, 15 nt, Human
aaaaauccuucuaau

SEQ ID NO: 2101673 - RNA, 16 nt, Human
aaaaauccuucuaauc

SEQ ID NO: 2101674 - RNA, 17 nt, Human
aaaaauccuucuaaucu

SEQ ID NO: 2101675 - RNA, 18 nt, Human
aaaaauccuucuaaucug

SEQ ID NO: 2101676 - RNA, 19 nt, Human
aaaaauccuucuaaucugc

SEQ ID NO: 2101677 - RNA, 20 nt, Human
aaaaauccuucuaaucugcu

SEQ ID NO: 2101678 - RNA, 18 nt, Human
aaaacagguggagaaauu

SEQ ID NO: 2101679 - RNA, 18 nt, Human
aaaacaggucaauacagu

SEQ ID NO: 2101680 - RNA, 14 nt, Human
aaaacaugguagaa

SEQ ID NO: 2101681 - RNA, 16 nt, Human
aaaacaugguagaauu

SEQ ID NO: 2101682 - RNA, 17 nt, Human
aaaacauaaaaaguuaa

SEQ ID NO: 2101683 - RNA, 20 nt, Human
aaaacaguccuucaaacuuc

SEQ ID NO: 2101684 - RNA, 21 nt, Human
aaaaccaauguucucucuucu

SEQ ID NO: 2101685 - RNA, 20 nt, Human
aaaacauuccguuuacauuu

SEQ ID NO: 2101686 - RNA, 21 nt, Human
aaaacauuccguuuacauuuu

SEQ ID NO: 2101687 - RNA, 22 nt, Human
aaaacauuccguuuacauuuua

SEQ ID NO: 2101688 - RNA, 20 nt, Human
aaaacauugaagagagagcu

SEQ ID NO: 2101689 - RNA, 22 nt, Human
aaaacauugaagagagagcuga

SEQ ID NO: 2101690 - RNA, 23 nt, Human
aaaacuagagcucuaagcccauu

SEQ ID NO: 2101691 - RNA, 19 nt, Human
aaaacuauauguaugguuu

SEQ ID NO: 2101692 - RNA, 13 nt, Human
aaaaccugacaaa

SEQ ID NO: 2101693 - RNA, 22 nt, Human
aaaaccucacccgaggcugccc

SEQ ID NO: 2101694 - RNA, 15 nt, Human
aaaacccagagagga

SEQ ID NO: 2101695 - RNA, 13 nt, Human
aaaacccagagag

SEQ ID NO: 2101696 - RNA, 22 nt, Human
aaaacugcugacuguuuucucu

SEQ ID NO: 2101697 - RNA, 23 nt, Human
aaaacugcugacuguuuucucuu

SEQ ID NO: 2101698 - RNA, 13 nt, Human
aaaagaugcuucu

SEQ ID NO: 2101699 - RNA, 22 nt, Human
gggcaacagagcaagauccugu

SEQ ID NO: 2101700 - RNA, 15 nt, Human
gggcagaggcuggag

SEQ ID NO: 2101701 - RNA, 14 nt, Human
gggcagaggcugga

SEQ ID NO: 2101702 - RNA, 15 nt, Human
gggcagagggcagag

SEQ ID NO: 2101703 - RNA, 20 nt, Human
gggcagagggcagaggcugg

SEQ ID NO: 2101704 - RNA, 16 nt, Human
gggcagaggcuggagg

SEQ ID NO: 2101705 - RNA, 21 nt, Human
gggcagaggcuggaggcaggg

SEQ ID NO: 2101706 - RNA, 23 nt, Human
gggcagaggcuggaggcagggcc

SEQ ID NO: 2101707 - RNA, 14 nt, Human
gggcagagggcaga

SEQ ID NO: 2101708 - RNA, 16 nt, Human
gggcagcugccagaga

SEQ ID NO: 2101709 - RNA, 18 nt, Human
gggcagcugccagagaag

SEQ ID NO: 2101710 - RNA, 12 nt, Human
gggcagcugcca

SEQ ID NO: 2101711 - RNA, 23 nt, Human
aaaagggcagggcaucuccugug

SEQ ID NO: 2101712 - RNA, 19 nt, Human
aaaagguaugcaaucaaau

SEQ ID NO: 2101713 - RNA, 23 nt, Human
aaaagguaaaacuuuuuauauuu

SEQ ID NO: 2101714 - RNA, 14 nt, Human
aaaagguaaaacuu

SEQ ID NO: 2101715 - RNA, 11 nt, Human
gggcaggcagu

SEQ ID NO: 2101716 - RNA, 20 nt, Human
gggcagggaaggggaggcag

SEQ ID NO: 2101717 - RNA, 18 nt, Human
gggcaacccccagccugc

SEQ ID NO: 2101718 - RNA, 16 nt, Human
gggcaacccccagccu

SEQ ID NO: 2101719 - RNA, 15 nt, Human
gggauuacaggugug

SEQ ID NO: 2101720 - RNA, 19 nt, Human
gggaggccaaggugggagg

SEQ ID NO: 2101721 - RNA, 11 nt, Human
gggaggcccca

SEQ ID NO: 2101722 - RNA, 16 nt, Human
gggaggccccacuggg

SEQ ID NO: 2101723 - RNA, 18 nt, Human
gggaggccccacugggga

SEQ ID NO: 2101724 - RNA, 20 nt, Human
gggaggcggagcuugcagug

SEQ ID NO: 2101725 - RNA, 15 nt, Human
gggagagggucugga

SEQ ID NO: 2101726 - RNA, 13 nt, Human
gggagcagagaca

SEQ ID NO: 2101727 - RNA, 19 nt, Human
gggagaucggggccagagg

SEQ ID NO: 2101728 - RNA, 20 nt, Human
gggagaucggggccagaggc

SEQ ID NO: 2101729 - RNA, 19 nt, Human
gggagauggaucaaucaaa

SEQ ID NO: 2101730 - RNA, 18 nt, Human
aaaagauggccuuugcuu

SEQ ID NO: 2101731 - RNA, 14 nt, Human
aaaagcaaaugaga

SEQ ID NO: 2101732 - RNA, 13 nt, Human
aaaagcauaaaug

SEQ ID NO: 2101733 - RNA, 15 nt, Human
aaaagcauaaaugca

SEQ ID NO: 2101734 - RNA, 14 nt, Human
aaaagcagcuacca

SEQ ID NO: 2101735 - RNA, 16 nt, Human
gggagaagggggucaa

SEQ ID NO: 2101736 - RNA, 15 nt, Human
gggagacaccucaga

SEQ ID NO: 2101737 - RNA, 17 nt, Human
gggagacaccucagagc

SEQ ID NO: 2101738 - RNA, 21 nt, Human
gggagacaccucagagccccg

SEQ ID NO: 2101739 - RNA, 17 nt, Human
gggaggucgaggcagga

SEQ ID NO: 2101740 - RNA, 18 nt, Human
gggaggucgaggcaggag

SEQ ID NO: 2101741 - RNA, 19 nt, Human
gggaggucgaggcaggagg

SEQ ID NO: 2101742 - RNA, 23 nt, Human
gggauguauccaugggggcaggg

SEQ ID NO: 2101743 - RNA, 11 nt, Human
gggaugucuua

SEQ ID NO: 2101744 - RNA, 13 nt, Human
gggauguucuggc

SEQ ID NO: 2101745 - RNA, 16 nt, Human
gggauguucuggcccu

SEQ ID NO: 2101746 - RNA, 18 nt, Human
gggauggaggagaagaau

SEQ ID NO: 2101747 - RNA, 12 nt, Human
gggaugggaggu

SEQ ID NO: 2101748 - RNA, 17 nt, Human
gggauggggccacagcc

SEQ ID NO: 2101749 - RNA, 15 nt, Human
gggaugguccugggg

SEQ ID NO: 2101750 - RNA, 16 nt, Human
gggaugguccuggggc

SEQ ID NO: 2101751 - RNA, 12 nt, Human
gggaugcuucau

SEQ ID NO: 2101752 - RNA, 15 nt, Human
gggauggaaaaggaa

SEQ ID NO: 2101753 - RNA, 14 nt, Human
gggauggaggagaa

SEQ ID NO: 2101754 - RNA, 15 nt, Human
gggauggaggagaag

SEQ ID NO: 2101755 - RNA, 15 nt, Human
gggaggucgagguag

SEQ ID NO: 2101756 - RNA, 13 nt, Human
aaaaugucuuuau

SEQ ID NO: 2101757 - RNA, 18 nt, Human
aaaaugucuguuaacuua

SEQ ID NO: 2101758 - RNA, 21 nt, Human
gggcuggugacccagucagag

SEQ ID NO: 2101759 - RNA, 12 nt, Human
aaaaugugauuu

SEQ ID NO: 2101760 - RNA, 13 nt, Human
aaaaugugauuuu

SEQ ID NO: 2101761 - RNA, 18 nt, Human
aaaaugugauuuuucuga

SEQ ID NO: 2101762 - RNA, 18 nt, Human
aaaauuugaaauuuagcu

SEQ ID NO: 2101763 - RNA, 14 nt, Human
aaaauuugaaccaa

SEQ ID NO: 2101764 - RNA, 15 nt, Human
aaaauuugaaccaaa

SEQ ID NO: 2101765 - RNA, 16 nt, Human
aaaauuugaaccaaaa

SEQ ID NO: 2101766 - RNA, 19 nt, Human
aaaauuugaaccaaaacau

SEQ ID NO: 2101767 - RNA, 20 nt, Human
aaaauuugaaccaaaacauu

SEQ ID NO: 2101768 - RNA, 22 nt, Human
aaaauuugaaccaaaacauucc

SEQ ID NO: 2101769 - RNA, 23 nt, Human
aaaauuugaaccaaaacauuccg

SEQ ID NO: 2101770 - RNA, 13 nt, Human
aaaauuuggaauu

SEQ ID NO: 2101771 - RNA, 14 nt, Human
aaaauuuggaauuc

SEQ ID NO: 2101772 - RNA, 17 nt, Human
aaaauuuccaguaccuu

SEQ ID NO: 2101773 - RNA, 23 nt, Human
aaaauuuccaguaccuuugucac

SEQ ID NO: 2101774 - RNA, 20 nt, Human
aaaauuucacauuaauauuu

SEQ ID NO: 2101775 - RNA, 18 nt, Human
gggcugccaugugaagag

SEQ ID NO: 2101776 - RNA, 10 nt, Human
gggcucagca

SEQ ID NO: 2101777 - RNA, 16 nt, Human
gggcucaagcagucua

SEQ ID NO: 2101778 - RNA, 18 nt, Human
gggcucagcaaaagaugc

SEQ ID NO: 2101779 - RNA, 15 nt, Human
gggcugcccuggugc

SEQ ID NO: 2101780 - RNA, 13 nt, Human
gggcugcccugcc

SEQ ID NO: 2101781 - RNA, 14 nt, Human
gggcugcccuggug

SEQ ID NO: 2101782 - RNA, 13 nt, Human
gggcugcccuggu

SEQ ID NO: 2101783 - RNA, 12 nt, Human
gggcugcccugc

SEQ ID NO: 2101784 - RNA, 18 nt, Human
gggcugggagcucugcag

SEQ ID NO: 2101785 - RNA, 16 nt, Human
gggcugggagcucugc

SEQ ID NO: 2101786 - RNA, 19 nt, Human
gggcuggcggcuacucagc

SEQ ID NO: 2101787 - RNA, 22 nt, Human
aaacaagaguuuucuuccuugu

SEQ ID NO: 2101788 - RNA, 20 nt, Human
aaacaaaaauucacaagcug

SEQ ID NO: 2101789 - RNA, 23 nt, Human
aaacaaaaauucacaagcugccu

SEQ ID NO: 2101790 - RNA, 13 nt, Human
aaacaaaaaacaa

SEQ ID NO: 2101791 - RNA, 14 nt, Human
aaacaaaaaacaau

SEQ ID NO: 2101792 - RNA, 18 nt, Human
aaacagugccugcugaau

SEQ ID NO: 2101793 - RNA, 14 nt, Human
aaacaguuaacuuu

SEQ ID NO: 2101794 - RNA, 18 nt, Human
aaacaguuaacuuucaga

SEQ ID NO: 2101795 - RNA, 23 nt, Human
aaacaguuaacuuucagaagaga

SEQ ID NO: 2101796 - RNA, 22 nt, Human
aaacaucacacacacagacaga

SEQ ID NO: 2101797 - RNA, 14 nt, Human
aaacaucacacaca

SEQ ID NO: 2101798 - RNA, 16 nt, Human
aaacaucaguuacucu

SEQ ID NO: 2101799 - RNA, 19 nt, Human
aaacaucaguuacucugaa

SEQ ID NO: 2101800 - RNA, 20 nt, Human
aaacaucaguuacucugaag

SEQ ID NO: 2101801 - RNA, 22 nt, Human
aaacaucaguuacucugaaggg

SEQ ID NO: 2101802 - RNA, 12 nt, Human
aaacaccugcug

SEQ ID NO: 2101803 - RNA, 12 nt, Human
aaacagugccug

SEQ ID NO: 2101804 - RNA, 20 nt, Human
ggggacagcuccuucugucc

SEQ ID NO: 2101805 - RNA, 14 nt, Human
ggggacagcuccuu

SEQ ID NO: 2101806 - RNA, 12 nt, Human
ggggacagcucc

SEQ ID NO: 2101807 - RNA, 12 nt, Human
aaacaugaagug

SEQ ID NO: 2101808 - RNA, 22 nt, Human
aaacauauuuguuaaauauuua

SEQ ID NO: 2101809 - RNA, 23 nt, Human
aaacaucaguuacucugaagggc

SEQ ID NO: 2101810 - RNA, 18 nt, Human
aaacauccuucaagaacu

SEQ ID NO: 2101811 - RNA, 20 nt, Human
aaacauccuucaagaacucu

SEQ ID NO: 2101812 - RNA, 16 nt, Human
ggggcaugcuggggca

SEQ ID NO: 2101813 - RNA, 20 nt, Human
ggggccacagccagaacccc

SEQ ID NO: 2101814 - RNA, 21 nt, Human
ggggccacagccagaaccccg

SEQ ID NO: 2101815 - RNA, 19 nt, Human
ggggccacuuuugacuagg

SEQ ID NO: 2101816 - RNA, 21 nt, Human
aaacaucuggaaaauaaaagg

SEQ ID NO: 2101817 - RNA, 21 nt, Human
ggggccugaccucccccuccu

SEQ ID NO: 2101818 - RNA, 19 nt, Human
gggcccugguccuuccagg

SEQ ID NO: 2101819 - RNA, 22 nt, Human
gggccuagauccacacacagag

SEQ ID NO: 2101820 - RNA, 20 nt, Human
gggccuagauccacacacag

SEQ ID NO: 2101821 - RNA, 23 nt, Human
gggccuagauccacacacagagg

SEQ ID NO: 2101822 - RNA, 19 nt, Human
gggccaugagcuccagacc

SEQ ID NO: 2101823 - RNA, 15 nt, Human
gggccaugaacuuug

SEQ ID NO: 2101824 - RNA, 18 nt, Human
gggccaugaacuuugucc

SEQ ID NO: 2101825 - RNA, 18 nt, Human
gggccaugagcuccagac

SEQ ID NO: 2101826 - RNA, 18 nt, Human
gggccugaccucccccuc

SEQ ID NO: 2101827 - RNA, 19 nt, Human
gggccugaccucccccucc

SEQ ID NO: 2101828 - RNA, 23 nt, Human
gggccugaccucccccuccuucc

SEQ ID NO: 2101829 - RNA, 23 nt, Human
gggccucuugcggucccuucuua

SEQ ID NO: 2101830 - RNA, 13 nt, Human
gggccuccugugu

SEQ ID NO: 2101831 - RNA, 19 nt, Human
gggccuccauuccuggagc

SEQ ID NO: 2101832 - RNA, 22 nt, Human
gggccuccauuccuggagcccg

SEQ ID NO: 2101833 - RNA, 23 nt, Human
gggccuccucuaacaggggcugg

SEQ ID NO: 2101834 - RNA, 21 nt, Human
gggccuccucuguccagggcc

SEQ ID NO: 2101835 - RNA, 15 nt, Human
gggccuccugugugu

SEQ ID NO: 2101836 - RNA, 23 nt, Human
gggcuaagagcuagcgcugccgc

SEQ ID NO: 2101837 - RNA, 20 nt, Human
gggcuaagagcuagcgcugc

SEQ ID NO: 2101838 - RNA, 15 nt, Human
gggcgggaggauguu

SEQ ID NO: 2101839 - RNA, 14 nt, Human
gggcggcagagagg

SEQ ID NO: 2101840 - RNA, 15 nt, Human
gggcggcaggaggga

SEQ ID NO: 2101841 - RNA, 18 nt, Human
gggccagggcccugcaga

SEQ ID NO: 2101842 - RNA, 15 nt, Human
gggccaguccugccu

SEQ ID NO: 2101843 - RNA, 22 nt, Human
gggccaguccugccuggccagg

SEQ ID NO: 2101844 - RNA, 18 nt, Human
gggccaguccugccuggc

SEQ ID NO: 2101845 - RNA, 19 nt, Human
gggccaguccugccuggcc

SEQ ID NO: 2101846 - RNA, 20 nt, Human
gggccaguccugccuggcca

SEQ ID NO: 2101847 - RNA, 21 nt, Human
gggccaguccugccuggccag

SEQ ID NO: 2101848 - RNA, 13 nt, Human
gggccagggcccu

SEQ ID NO: 2101849 - RNA, 14 nt, Human
gggccagggcccug

SEQ ID NO: 2101850 - RNA, 16 nt, Human
gggccagggcccugca

SEQ ID NO: 2101851 - RNA, 17 nt, Human
gggccagccccucccac

SEQ ID NO: 2101852 - RNA, 13 nt, Human
gggccagccccuc

SEQ ID NO: 2101853 - RNA, 12 nt, Human
gggccagccccu

SEQ ID NO: 2101854 - RNA, 15 nt, Human
gggccagccccuccc

SEQ ID NO: 2101855 - RNA, 16 nt, Human
gggccaggacaggccc

SEQ ID NO: 2101856 - RNA, 17 nt, Human
gggccaggacaggcccg

SEQ ID NO: 2101857 - RNA, 12 nt, Human
aaaaugaagauu

SEQ ID NO: 2101858 - RNA, 15 nt, Human
aaaaugaagauuauu

SEQ ID NO: 2101859 - RNA, 23 nt, Human
aaaaugaagauuauuuuuuauga

SEQ ID NO: 2101860 - RNA, 15 nt, Human
aaaaugaaauguuuu

SEQ ID NO: 2101861 - RNA, 16 nt, Human
aaaaugaaauguuuua

SEQ ID NO: 2101862 - RNA, 22 nt, Human
aaaaugaaagcaugucucaaua

SEQ ID NO: 2101863 - RNA, 9 nt, Human
aaaaugaaa

SEQ ID NO: 2101864 - RNA, 19 nt, Human
aaaaugaaagcaugucuca

SEQ ID NO: 2101865 - RNA, 14 nt, Human
aaaaugagccuggc

SEQ ID NO: 2101866 - RNA, 21 nt, Human
aaaaugagccuggcaagaaug

SEQ ID NO: 2101867 - RNA, 21 nt, Human
aaaaugaguuaccuacauuuu

SEQ ID NO: 2101868 - RNA, 18 nt, Human
aaaaugagguucaacugu

SEQ ID NO: 2101869 - RNA, 23 nt, Human
aaaaugaguuuuuauggggcuga

SEQ ID NO: 2101870 - RNA, 23 nt, Human
aaaaugagcucgcauuugucaau

SEQ ID NO: 2101871 - RNA, 18 nt, Human
aaaaucuuggcacagaaa

SEQ ID NO: 2101872 - RNA, 17 nt, Human
aaaaucuuggcacagaa

SEQ ID NO: 2101873 - RNA, 19 nt, Human
gggcagccugcguggcuga

SEQ ID NO: 2101874 - RNA, 13 nt, Human
aaaaguauauguu

SEQ ID NO: 2101875 - RNA, 14 nt, Human
aaaaguauauguua

SEQ ID NO: 2101876 - RNA, 20 nt, Human
aaaaguagguuuacauucau

SEQ ID NO: 2101877 - RNA, 21 nt, Human
aaaaguaucgggggcuggggc

SEQ ID NO: 2101878 - RNA, 22 nt, Human
aaaaguaucgggggcuggggca

SEQ ID NO: 2101879 - RNA, 15 nt, Human
aaaaguauauguuag

SEQ ID NO: 2101880 - RNA, 16 nt, Human
aaaaucuguggugguc

SEQ ID NO: 2101881 - RNA, 19 nt, Human
gguuucaccauguuggcca

SEQ ID NO: 2101882 - RNA, 16 nt, Human
gguuuaguguaaaaau

SEQ ID NO: 2101883 - RNA, 18 nt, Human
gguuuaguguaaaaauga

SEQ ID NO: 2101884 - RNA, 20 nt, Human
gguuuaguguaaaaaugaga

SEQ ID NO: 2101885 - RNA, 13 nt, Human
gguuucugaaaau

SEQ ID NO: 2101886 - RNA, 14 nt, Human
gguuucugcccugc

SEQ ID NO: 2101887 - RNA, 23 nt, Human
gguucucacagugggagccaggg

SEQ ID NO: 2101888 - RNA, 17 nt, Human
gguucuggggccccuuu

SEQ ID NO: 2101889 - RNA, 17 nt, Human
gguucuccucuccccuc

SEQ ID NO: 2101890 - RNA, 12 nt, Human
gguucuggggcc

SEQ ID NO: 2101891 - RNA, 17 nt, Human
gguucccuuuccuucca

SEQ ID NO: 2101892 - RNA, 22 nt, Human
gguucccuuuccuuccaucccu

SEQ ID NO: 2101893 - RNA, 16 nt, Human
gguuccaauccuggcu

SEQ ID NO: 2101894 - RNA, 23 nt, Human
gguucauuucaaauacaucuuug

SEQ ID NO: 2101895 - RNA, 14 nt, Human
gguucaucaguguu

SEQ ID NO: 2101896 - RNA, 15 nt, Human
gguucaucaguguua

SEQ ID NO: 2101897 - RNA, 19 nt, Human
gguucaucaguguuaaaaa

SEQ ID NO: 2101898 - RNA, 22 nt, Human
gguucaucaguguuaaaaaauu

SEQ ID NO: 2101899 - RNA, 16 nt, Human
gguucauuauuggaau

SEQ ID NO: 2101900 - RNA, 17 nt, Human
gguucauuauuggaauu

SEQ ID NO: 2101901 - RNA, 18 nt, Human
gguucauuauuggaauua

SEQ ID NO: 2101902 - RNA, 19 nt, Human
gguucauuauuggaauuaa

SEQ ID NO: 2101903 - RNA, 15 nt, Human
gguuccccuguucac

SEQ ID NO: 2101904 - RNA, 18 nt, Human
gguuccaauccuggcucu

SEQ ID NO: 2101905 - RNA, 21 nt, Human
gguucccccagcccuguggaa

SEQ ID NO: 2101906 - RNA, 21 nt, Human
gguucaggguuggccccugcc

SEQ ID NO: 2101907 - RNA, 18 nt, Human
gguucaggguuggccccu

SEQ ID NO: 2101908 - RNA, 22 nt, Human
gguucaggguuggccccugccc

SEQ ID NO: 2101909 - RNA, 13 nt, Human
ggugugcucugau

SEQ ID NO: 2101910 - RNA, 21 nt, Human
ggugugcggccuuuggcuuca

SEQ ID NO: 2101911 - RNA, 18 nt, Human
ggugugagucaccaagcc

SEQ ID NO: 2101912 - RNA, 15 nt, Human
ggugugccugcagcc

SEQ ID NO: 2101913 - RNA, 13 nt, Human
ggugugccugcag

SEQ ID NO: 2101914 - RNA, 14 nt, Human
ggugugccugcagc

SEQ ID NO: 2101915 - RNA, 20 nt, Human
ggugugaaagucagaugccc

SEQ ID NO: 2101916 - RNA, 18 nt, Human
ggugggcaccaagagcca

SEQ ID NO: 2101917 - RNA, 17 nt, Human
gguggggcagcuugagg

SEQ ID NO: 2101918 - RNA, 13 nt, Human
gguggggcagcuu

SEQ ID NO: 2101919 - RNA, 16 nt, Human
ggugggauggaggaga

SEQ ID NO: 2101920 - RNA, 17 nt, Human
ggugggauggaggagaa

SEQ ID NO: 2101921 - RNA, 16 nt, Human
ggugggcaccuauaau

SEQ ID NO: 2101922 - RNA, 20 nt, Human
ggugggcagaucacgagguc

SEQ ID NO: 2101923 - RNA, 16 nt, Human
ggugggccagccccuc

SEQ ID NO: 2101924 - RNA, 20 nt, Human
ggugggccagccccucccac

SEQ ID NO: 2101925 - RNA, 14 nt, Human
aaagcaugaauggu

SEQ ID NO: 2101926 - RNA, 19 nt, Human
ggugcuuauucucaaagca

SEQ ID NO: 2101927 - RNA, 20 nt, Human
ggugggaggauugcuugagc

SEQ ID NO: 2101928 - RNA, 22 nt, Human
aaaguuuccccaccagugaaug

SEQ ID NO: 2101929 - RNA, 13 nt, Human
aaaguuugccaga

SEQ ID NO: 2101930 - RNA, 15 nt, Human
aaaguuugccagaag

SEQ ID NO: 2101931 - RNA, 23 nt, Human
aaaguuucucuuuucaaaacauu

SEQ ID NO: 2101932 - RNA, 21 nt, Human
aaaguuucucuuuucaaaaca

SEQ ID NO: 2101933 - RNA, 23 nt, Human
aaaguucccuacuuccugugacu

SEQ ID NO: 2101934 - RNA, 17 nt, Human
gguuuggcgggccaagg

SEQ ID NO: 2101935 - RNA, 19 nt, Human
gguuuggcgggccaaggac

SEQ ID NO: 2101936 - RNA, 14 nt, Human
gguuuggcgggcca

SEQ ID NO: 2101937 - RNA, 16 nt, Human
gguuugccugagggcg

SEQ ID NO: 2101938 - RNA, 14 nt, Human
gguuugcaaggaag

SEQ ID NO: 2101939 - RNA, 12 nt, Human
gguucugggugg

SEQ ID NO: 2101940 - RNA, 15 nt, Human
gguuucugcccugcc

SEQ ID NO: 2101941 - RNA, 17 nt, Human
gguuucugcccugccca

SEQ ID NO: 2101942 - RNA, 18 nt, Human
gguuucugcccugcccac

SEQ ID NO: 2101943 - RNA, 15 nt, Human
gguuugaauauaaac

SEQ ID NO: 2101944 - RNA, 18 nt, Human
gguuugaauauaaacacu

SEQ ID NO: 2101945 - RNA, 21 nt, Human
aaaguucccuacuuccuguga

SEQ ID NO: 2101946 - RNA, 19 nt, Human
aaaguucauaacagugcca

SEQ ID NO: 2101947 - RNA, 22 nt, Human
aaaguucauaacagugccauug

SEQ ID NO: 2101948 - RNA, 22 nt, Human
aaaguucauagggucucuucag

SEQ ID NO: 2101949 - RNA, 18 nt, Human
aaagugugagcaaacuaa

SEQ ID NO: 2101950 - RNA, 20 nt, Human
aaaguguaaauccuuuuucu

SEQ ID NO: 2101951 - RNA, 17 nt, Human
aaaguguaacauaugca

SEQ ID NO: 2101952 - RNA, 11 nt, Human
aaaguguauua

SEQ ID NO: 2101953 - RNA, 14 nt, Human
aaaguguauuauaa

SEQ ID NO: 2101954 - RNA, 18 nt, Human
aaaguguauuauaacagu

SEQ ID NO: 2101955 - RNA, 13 nt, Human
aaauaaugucuug

SEQ ID NO: 2101956 - RNA, 15 nt, Human
aaauaaugucuuguu

SEQ ID NO: 2101957 - RNA, 16 nt, Human
aaauaaugucuuguua

SEQ ID NO: 2101958 - RNA, 21 nt, Human
aaauaaugucuuguuaauauu

SEQ ID NO: 2101959 - RNA, 13 nt, Human
aaauaaaaaaguc

SEQ ID NO: 2101960 - RNA, 18 nt, Human
aaauaaaaaagucucuau

SEQ ID NO: 2101961 - RNA, 14 nt, Human
aaauaagguguauu

SEQ ID NO: 2101962 - RNA, 16 nt, Human
aaauaagguguauugc

SEQ ID NO: 2101963 - RNA, 14 nt, Human
guaaagagaaacuu

SEQ ID NO: 2101964 - RNA, 15 nt, Human
guaaagagaaacuuu

SEQ ID NO: 2101965 - RNA, 19 nt, Human
guaaagagaaacuuugugc

SEQ ID NO: 2101966 - RNA, 20 nt, Human
guaaagagaaacuuugugcu

SEQ ID NO: 2101967 - RNA, 16 nt, Human
guaaagacuguagaag

SEQ ID NO: 2101968 - RNA, 14 nt, Human
guaaauuauucagu

SEQ ID NO: 2101969 - RNA, 15 nt, Human
guaaauuauucaguu

SEQ ID NO: 2101970 - RNA, 20 nt, Human
guaaauuauucaguuaagaa

SEQ ID NO: 2101971 - RNA, 22 nt, Human
guaaauuauucaguuaagaaaa

SEQ ID NO: 2101972 - RNA, 12 nt, Human
guaaauuauuuu

SEQ ID NO: 2101973 - RNA, 14 nt, Human
guaaauuauuuuaa

SEQ ID NO: 2101974 - RNA, 15 nt, Human
guaaauuauuuuaaa

SEQ ID NO: 2101975 - RNA, 17 nt, Human
guaaauuauuuuaaauu

SEQ ID NO: 2101976 - RNA, 18 nt, Human
guaaauuauuuuaaauua

SEQ ID NO: 2101977 - RNA, 21 nt, Human
guaaauuauuuuaaauuauaa

SEQ ID NO: 2101978 - RNA, 22 nt, Human
guaaauuauuuuaaauuauaag

SEQ ID NO: 2101979 - RNA, 23 nt, Human
guaaauuaccaguaaaguguaac

SEQ ID NO: 2101980 - RNA, 15 nt, Human
gguauggaacucucu

SEQ ID NO: 2101981 - RNA, 22 nt, Human
gguaugaucacggcucacugca

SEQ ID NO: 2101982 - RNA, 14 nt, Human
gguaugcaaucaaa

SEQ ID NO: 2101983 - RNA, 14 nt, Human
gguagcuuuucccu

SEQ ID NO: 2101984 - RNA, 19 nt, Human
gguagcuucugaccucagc

SEQ ID NO: 2101985 - RNA, 20 nt, Human
gguagcuucugaccucagca

SEQ ID NO: 2101986 - RNA, 21 nt, Human
gguaugaccuucuaggaagcu

SEQ ID NO: 2101987 - RNA, 19 nt, Human
gguagcugccccuggcucu

SEQ ID NO: 2101988 - RNA, 15 nt, Human
gguagcugccccugg

SEQ ID NO: 2101989 - RNA, 18 nt, Human
gguagcugccccuggcuc

SEQ ID NO: 2101990 - RNA, 17 nt, Human
gguccacccaggagccc

SEQ ID NO: 2101991 - RNA, 11 nt, Human
gguccagggaa

SEQ ID NO: 2101992 - RNA, 21 nt, Human
gguccagggaagcuggccgag

SEQ ID NO: 2101993 - RNA, 16 nt, Human
gguccacccaggagcc

SEQ ID NO: 2101994 - RNA, 15 nt, Human
gguccacccaggagc

SEQ ID NO: 2101995 - RNA, 13 nt, Human
gguccacccagga

SEQ ID NO: 2101996 - RNA, 12 nt, Human
gguccacccagg

SEQ ID NO: 2101997 - RNA, 18 nt, Human
aaagaaguggggacagag

SEQ ID NO: 2101998 - RNA, 19 nt, Human
aaagaaguguccgagaacu

SEQ ID NO: 2101999 - RNA, 21 nt, Human
aaagaaguguccgagaacuaa

SEQ ID NO: 2102000 - RNA, 17 nt, Human
aaagaauacagaaagau

SEQ ID NO: 2102001 - RNA, 15 nt, Human
aaagaauacagaaag

SEQ ID NO: 2102002 - RNA, 16 nt, Human
aaagacaaauucuguu

SEQ ID NO: 2102003 - RNA, 17 nt, Human
aaagacaaauucuguuu

SEQ ID NO: 2102004 - RNA, 19 nt, Human
aaagacaaauucuguuucu

SEQ ID NO: 2102005 - RNA, 22 nt, Human
aaagacaaauucuguuucuuga

SEQ ID NO: 2102006 - RNA, 15 nt, Human
aaagaaucauuauuu

SEQ ID NO: 2102007 - RNA, 18 nt, Human
aaagaaucauuauuuauu

SEQ ID NO: 2102008 - RNA, 19 nt, Human
aaagaaucauuauuuauua

SEQ ID NO: 2102009 - RNA, 23 nt, Human
aaagaaucauuauuuauuaaauu

SEQ ID NO: 2102010 - RNA, 16 nt, Human
aaagaaucccuguuca

SEQ ID NO: 2102011 - RNA, 21 nt, Human
aaagaaucccuguucauugua

SEQ ID NO: 2102012 - RNA, 22 nt, Human
aaagaaucccuguucauuguaa

SEQ ID NO: 2102013 - RNA, 19 nt, Human
aaagacaccuacugagugg

SEQ ID NO: 2102014 - RNA, 13 nt, Human
aaagacaccuacu

SEQ ID NO: 2102015 - RNA, 17 nt, Human
aaagacuaucuaaaugu

SEQ ID NO: 2102016 - RNA, 20 nt, Human
gguaacaggcagauacagga

SEQ ID NO: 2102017 - RNA, 14 nt, Human
gguaacaggcagau

SEQ ID NO: 2102018 - RNA, 19 nt, Human
gguaauaaguacuguguac

SEQ ID NO: 2102019 - RNA, 18 nt, Human
gguaacuagggaagauaa

SEQ ID NO: 2102020 - RNA, 13 nt, Human
gguaacaggcaga

SEQ ID NO: 2102021 - RNA, 19 nt, Human
ggguuucugcccugcccac

SEQ ID NO: 2102022 - RNA, 13 nt, Human
gggugugggaggc

SEQ ID NO: 2102023 - RNA, 16 nt, Human
gggugugggaggcccg

SEQ ID NO: 2102024 - RNA, 14 nt, Human
ggguuuuauauuuu

SEQ ID NO: 2102025 - RNA, 15 nt, Human
ggguuucugcccugc

SEQ ID NO: 2102026 - RNA, 20 nt, Human
ggguuuggcgggccaaggac

SEQ ID NO: 2102027 - RNA, 22 nt, Human
ggguuuggcgggccaaggacug

SEQ ID NO: 2102028 - RNA, 14 nt, Human
gguaccacugauuu

SEQ ID NO: 2102029 - RNA, 15 nt, Human
gguagcuagaggaac

SEQ ID NO: 2102030 - RNA, 20 nt, Human
gguagcccuggccagaggcu

SEQ ID NO: 2102031 - RNA, 17 nt, Human
gguagcuagaggaacca

SEQ ID NO: 2102032 - RNA, 15 nt, Human
gguagcccuggccag

SEQ ID NO: 2102033 - RNA, 18 nt, Human
gguagcccuggccagagg

SEQ ID NO: 2102034 - RNA, 15 nt, Human
gguacagagaaggaa

SEQ ID NO: 2102035 - RNA, 18 nt, Human
gguacagagaaggaaugu

SEQ ID NO: 2102036 - RNA, 12 nt, Human
gguacagagaag

SEQ ID NO: 2102037 - RNA, 17 nt, Human
ggguggaugccuggugg

SEQ ID NO: 2102038 - RNA, 15 nt, Human
ggguggcaccagcag

SEQ ID NO: 2102039 - RNA, 12 nt, Human
ggggccuggcag

SEQ ID NO: 2102040 - RNA, 11 nt, Human
ggggccuggca

SEQ ID NO: 2102041 - RNA, 13 nt, Human
ggguggaugccug

SEQ ID NO: 2102042 - RNA, 14 nt, Human
gggugggagagccc

SEQ ID NO: 2102043 - RNA, 19 nt, Human
gggugggagagcccagcca

SEQ ID NO: 2102044 - RNA, 23 nt, Human
ggguggauuuggguuggaaguga

SEQ ID NO: 2102045 - RNA, 17 nt, Human
gggugggauggaggaga

SEQ ID NO: 2102046 - RNA, 16 nt, Human
ggguggucugcaggca

SEQ ID NO: 2102047 - RNA, 21 nt, Human
gggugguaagagaauguuaua

SEQ ID NO: 2102048 - RNA, 13 nt, Human
gggugguccugac

SEQ ID NO: 2102049 - RNA, 12 nt, Human
ggguggugaccu

SEQ ID NO: 2102050 - RNA, 23 nt, Human
ggguggggacguccugccaccug

SEQ ID NO: 2102051 - RNA, 16 nt, Human
gggugggguagggcug

SEQ ID NO: 2102052 - RNA, 17 nt, Human
gggugggguagggcuga

SEQ ID NO: 2102053 - RNA, 16 nt, Human
aaagcaaaugugaccu

SEQ ID NO: 2102054 - RNA, 21 nt, Human
aaagcaaacuuaagaaacacu

SEQ ID NO: 2102055 - RNA, 23 nt, Human
aaagcaaacuuaagaaacacuga

SEQ ID NO: 2102056 - RNA, 13 nt, Human
aaagcaaaugaga

SEQ ID NO: 2102057 - RNA, 14 nt, Human
aaagauuucuugag

SEQ ID NO: 2102058 - RNA, 18 nt, Human
aaagacacagaacacaga

SEQ ID NO: 2102059 - RNA, 22 nt, Human
aaagauuuguacuacaguucuu

SEQ ID NO: 2102060 - RNA, 15 nt, Human
gguccugggggccug

SEQ ID NO: 2102061 - RNA, 16 nt, Human
gguccugggggccuga

SEQ ID NO: 2102062 - RNA, 21 nt, Human
gguccugggggccugaccucc

SEQ ID NO: 2102063 - RNA, 23 nt, Human
gguccuggggcucugugcaggga

SEQ ID NO: 2102064 - RNA, 12 nt, Human
gguccuggcucc

SEQ ID NO: 2102065 - RNA, 12 nt, Human
gguccuggggcc

SEQ ID NO: 2102066 - RNA, 16 nt, Human
gguccuggcuccugag

SEQ ID NO: 2102067 - RNA, 14 nt, Human
gguccuggcuccug

SEQ ID NO: 2102068 - RNA, 15 nt, Human
gguccuggcuccuga

SEQ ID NO: 2102069 - RNA, 14 nt, Human
gguccuggggccuc

SEQ ID NO: 2102070 - RNA, 12 nt, Human
gguccuggggcu

SEQ ID NO: 2102071 - RNA, 15 nt, Human
gguccuggggcucug

SEQ ID NO: 2102072 - RNA, 22 nt, Human
gguccuggggcucugugcaggg

SEQ ID NO: 2102073 - RNA, 14 nt, Human
ggucuagggagaga

SEQ ID NO: 2102074 - RNA, 14 nt, Human
ggucguuuuuuuca

SEQ ID NO: 2102075 - RNA, 13 nt, Human
ggucuaacuuuug

SEQ ID NO: 2102076 - RNA, 13 nt, Human
ggucugugucucu

SEQ ID NO: 2102077 - RNA, 18 nt, Human
ggucugugucucuuuucu

SEQ ID NO: 2102078 - RNA, 19 nt, Human
ggucugugucucuuuucuc

SEQ ID NO: 2102079 - RNA, 14 nt, Human
ggucgggcucagcu

SEQ ID NO: 2102080 - RNA, 22 nt, Human
ggucgcuuacuuugagugaucc

SEQ ID NO: 2102081 - RNA, 21 nt, Human
gguggaugccugguggcagcu

SEQ ID NO: 2102082 - RNA, 13 nt, Human
gguggauguaaau

SEQ ID NO: 2102083 - RNA, 22 nt, Human
ggugcuguugucauugcuuuac

SEQ ID NO: 2102084 - RNA, 14 nt, Human
gguggaugccuggu

SEQ ID NO: 2102085 - RNA, 18 nt, Human
aaagcagcucaaaggcac

SEQ ID NO: 2102086 - RNA, 19 nt, Human
aaagcagcucaaaggcaca

SEQ ID NO: 2102087 - RNA, 15 nt, Human
aaagcauaaaugcaa

SEQ ID NO: 2102088 - RNA, 16 nt, Human
aaagcaucacuuggga

SEQ ID NO: 2102089 - RNA, 18 nt, Human
aaagcaucaccucaggcc

SEQ ID NO: 2102090 - RNA, 16 nt, Human
aaagcaucaccucagg

SEQ ID NO: 2102091 - RNA, 17 nt, Human
aaagcaucaccucaggc

SEQ ID NO: 2102092 - RNA, 13 nt, Human
aaagcaugaaugg

SEQ ID NO: 2102093 - RNA, 13 nt, Human
aaagcauccaugu

SEQ ID NO: 2102094 - RNA, 22 nt, Human
ggucuucuuacaugcauuugag

SEQ ID NO: 2102095 - RNA, 20 nt, Human
ggucuucccuaccucaggca

SEQ ID NO: 2102096 - RNA, 22 nt, Human
ggucuucccuaccucaggcagg

SEQ ID NO: 2102097 - RNA, 19 nt, Human
ggucuucagggggccaggu

SEQ ID NO: 2102098 - RNA, 17 nt, Human
ggucuucccuaccucag

SEQ ID NO: 2102099 - RNA, 14 nt, Human
gaaugagaguguga

SEQ ID NO: 2102100 - RNA, 20 nt, Human
gaaguguccgagaacuaaag

SEQ ID NO: 2102101 - RNA, 17 nt, Human
gaaguguaacagcugag

SEQ ID NO: 2102102 - RNA, 18 nt, Human
gaaguguaacagcugagg

SEQ ID NO: 2102103 - RNA, 23 nt, Human
gaaguguaacagcugaggucucu

SEQ ID NO: 2102104 - RNA, 18 nt, Human
gaaaucccccuuucucua

SEQ ID NO: 2102105 - RNA, 11 nt, Human
gaaaucauguu

SEQ ID NO: 2102106 - RNA, 12 nt, Human
gaaaucauguua

SEQ ID NO: 2102107 - RNA, 14 nt, Human
gaaaucauguuaug

SEQ ID NO: 2102108 - RNA, 19 nt, Human
gaaaucauguuaugauaaa

SEQ ID NO: 2102109 - RNA, 21 nt, Human
gaaaucauguuaugauaaaaa

SEQ ID NO: 2102110 - RNA, 13 nt, Human
gaagcuaauuauu

SEQ ID NO: 2102111 - RNA, 17 nt, Human
gaagcuaauuauuuuaa

SEQ ID NO: 2102112 - RNA, 18 nt, Human
gaagcuaauuauuuuaau

SEQ ID NO: 2102113 - RNA, 21 nt, Human
gaagcuaauuauuuuaauuag

SEQ ID NO: 2102114 - RNA, 22 nt, Human
gaagcuaauuauuuuaauuagg

SEQ ID NO: 2102115 - RNA, 15 nt, Human
gaagcuacuuuguuu

SEQ ID NO: 2102116 - RNA, 19 nt, Human
gaagcuacuuuguuuuuaa

SEQ ID NO: 2102117 - RNA, 22 nt, Human
gaagcucagcccaccccccuca

SEQ ID NO: 2102118 - RNA, 21 nt, Human
gaagcucagcccaccccccuc

SEQ ID NO: 2102119 - RNA, 17 nt, Human
gaaggcuuucagggccu

SEQ ID NO: 2102120 - RNA, 23 nt, Human
gaaggcuuucagggccuccagcc

SEQ ID NO: 2102121 - RNA, 24 nt, Human
gaaggcuuucagggccuccagccc

SEQ ID NO: 2102122 - RNA, 15 nt, Human
gaagggaagaaaagg

SEQ ID NO: 2102123 - RNA, 22 nt, Human
gaagggcaggaaggagagccug

SEQ ID NO: 2102124 - RNA, 21 nt, Human
gaagggacuaggagcacugua

SEQ ID NO: 2102125 - RNA, 16 nt, Human
gaagggagagccagcu

SEQ ID NO: 2102126 - RNA, 17 nt, Human
gaagcuggccgaggguc

SEQ ID NO: 2102127 - RNA, 23 nt, Human
gaagcuggccgaggguccuggcu

SEQ ID NO: 2102128 - RNA, 13 nt, Human
gaagcugcuccgu

SEQ ID NO: 2102129 - RNA, 11 nt, Human
gaagcuccagu

SEQ ID NO: 2102130 - RNA, 19 nt, Human
gaagcuccaguccugcucu

SEQ ID NO: 2102131 - RNA, 20 nt, Human
gaagcuccaguccugcucuc

SEQ ID NO: 2102132 - RNA, 22 nt, Human
gaagcuguguccuugcaccugc

SEQ ID NO: 2102133 - RNA, 12 nt, Human
gaagcugugucc

SEQ ID NO: 2102134 - RNA, 17 nt, Human
gaagcuguguccuugca

SEQ ID NO: 2102135 - RNA, 20 nt, Human
gaagcuguguccuugcaccu

SEQ ID NO: 2102136 - RNA, 23 nt, Human
gaagggcaggaaggagagccugc

SEQ ID NO: 2102137 - RNA, 18 nt, Human
gaagggcaucaugcaucu

SEQ ID NO: 2102138 - RNA, 14 nt, Human
gaagugaacauuuc

SEQ ID NO: 2102139 - RNA, 18 nt, Human
gaagugacaaggccccag

SEQ ID NO: 2102140 - RNA, 21 nt, Human
gaagugacaaggccccagaga

SEQ ID NO: 2102141 - RNA, 23 nt, Human
gaagugacaaggccccagagacu

SEQ ID NO: 2102142 - RNA, 24 nt, Human
gaagugacaaggccccagagacuc

SEQ ID NO: 2102143 - RNA, 16 nt, Human
gaagugaccaaggagg

SEQ ID NO: 2102144 - RNA, 18 nt, Human
gaagugcaaauuugauac

SEQ ID NO: 2102145 - RNA, 13 nt, Human
gaagugccccugc

SEQ ID NO: 2102146 - RNA, 14 nt, Human
gaagugccccugcu

SEQ ID NO: 2102147 - RNA, 15 nt, Human
gaagugccccugcug

SEQ ID NO: 2102148 - RNA, 18 nt, Human
gaagugccccugcugccu

SEQ ID NO: 2102149 - RNA, 22 nt, Human
gaagugccccugcugccucccc

SEQ ID NO: 2102150 - RNA, 15 nt, Human
gaaguggggacagag

SEQ ID NO: 2102151 - RNA, 14 nt, Human
gaaguguaacagcu

SEQ ID NO: 2102152 - RNA, 15 nt, Human
gaaguguaacagcug

SEQ ID NO: 2102153 - RNA, 16 nt, Human
gaaguguaacagcuga

SEQ ID NO: 2102154 - RNA, 22 nt, Human
gaaguggaccaggacaggacca

SEQ ID NO: 2102155 - RNA, 16 nt, Human
gaagugggccaggaca

SEQ ID NO: 2102156 - RNA, 18 nt, Human
gaagugggccaggacagg

SEQ ID NO: 2102157 - RNA, 19 nt, Human
gaagugggccaggacaggc

SEQ ID NO: 2102158 - RNA, 21 nt, Human
gaagugggccaggacaggccc

SEQ ID NO: 2102159 - RNA, 23 nt, Human
gaagugccccugcugccucccca

SEQ ID NO: 2102160 - RNA, 16 nt, Human
gaaguggaccaggaca

SEQ ID NO: 2102161 - RNA, 18 nt, Human
gaaguggaccaggacagg

SEQ ID NO: 2102162 - RNA, 21 nt, Human
gacacacagcucuguccuggg

SEQ ID NO: 2102163 - RNA, 15 nt, Human
gacacacgcacacac

SEQ ID NO: 2102164 - RNA, 14 nt, Human
gacacacagcucug

SEQ ID NO: 2102165 - RNA, 17 nt, Human
gacaaaaauuaucuauu

SEQ ID NO: 2102166 - RNA, 19 nt, Human
gacacacagcucuguccug

SEQ ID NO: 2102167 - RNA, 18 nt, Human
gacacacagcucuguccu

SEQ ID NO: 2102168 - RNA, 17 nt, Human
gacacacagcucugucc

SEQ ID NO: 2102169 - RNA, 15 nt, Human
gacacacagcucugu

SEQ ID NO: 2102170 - RNA, 20 nt, Human
gaauuuugugcccccaugua

SEQ ID NO: 2102171 - RNA, 21 nt, Human
gaauuuugugcccccauguaa

SEQ ID NO: 2102172 - RNA, 22 nt, Human
gaauuuucuuuuuaauaaaaag

SEQ ID NO: 2102173 - RNA, 14 nt, Human
gaauuuuucucuaa

SEQ ID NO: 2102174 - RNA, 16 nt, Human
gaauuuuuauuaugca

SEQ ID NO: 2102175 - RNA, 17 nt, Human
gaauuuuuauuaugcau

SEQ ID NO: 2102176 - RNA, 19 nt, Human
gaauuuuuauuaugcauaa

SEQ ID NO: 2102177 - RNA, 16 nt, Human
gaauuuuucauugaua

SEQ ID NO: 2102178 - RNA, 13 nt, Human
gacaaaaauacuc

SEQ ID NO: 2102179 - RNA, 17 nt, Human
gacaaaaauacucuaau

SEQ ID NO: 2102180 - RNA, 21 nt, Human
gacaaaaauacucuaauucua

SEQ ID NO: 2102181 - RNA, 22 nt, Human
gaauuuuguuuggacuucuuuu

SEQ ID NO: 2102182 - RNA, 21 nt, Human
gaaugaggucccaggcagaga

SEQ ID NO: 2102183 - RNA, 22 nt, Human
gaaugaggucccaggcagagaa

SEQ ID NO: 2102184 - RNA, 18 nt, Human
gaauuaucccuuuucuug

SEQ ID NO: 2102185 - RNA, 16 nt, Human
gaaugaggucccaggc

SEQ ID NO: 2102186 - RNA, 17 nt, Human
gaaugaggucccaggca

SEQ ID NO: 2102187 - RNA, 18 nt, Human
gaaugaggucccaggcag

SEQ ID NO: 2102188 - RNA, 19 nt, Human
gaaugaggucccaggcaga

SEQ ID NO: 2102189 - RNA, 13 nt, Human
gaaugaggaggaa

SEQ ID NO: 2102190 - RNA, 14 nt, Human
gaaugaggaggaag

SEQ ID NO: 2102191 - RNA, 20 nt, Human
gaaugaggaggaaggagaga

SEQ ID NO: 2102192 - RNA, 14 nt, Human
gaaugaggucccag

SEQ ID NO: 2102193 - RNA, 15 nt, Human
gaaugaggucccagg

SEQ ID NO: 2102194 - RNA, 14 nt, Human
gaauuuucagaccc

SEQ ID NO: 2102195 - RNA, 23 nt, Human
gaauuuucagaccccagcggcug

SEQ ID NO: 2102196 - RNA, 17 nt, Human
gaauuuucaagcaucuc

SEQ ID NO: 2102197 - RNA, 20 nt, Human
gaauuuucaagcaucuccug

SEQ ID NO: 2102198 - RNA, 15 nt, Human
gaauuuuaagugcuu

SEQ ID NO: 2102199 - RNA, 21 nt, Human
gacauuaagcaucacaaauga

SEQ ID NO: 2102200 - RNA, 22 nt, Human
gacauuaagcaucacaaaugau

SEQ ID NO: 2102201 - RNA, 18 nt, Human
gacauuaacaguuuucca

SEQ ID NO: 2102202 - RNA, 19 nt, Human
gacauuaacaguuuuccau

SEQ ID NO: 2102203 - RNA, 22 nt, Human
gacauuaacaguuuuccaugaa

SEQ ID NO: 2102204 - RNA, 23 nt, Human
gacauuaacaguuuuccaugaaa

SEQ ID NO: 2102205 - RNA, 13 nt, Human
gacacugaugggc

SEQ ID NO: 2102206 - RNA, 23 nt, Human
gacacugaaauauacacacagca

SEQ ID NO: 2102207 - RNA, 12 nt, Human
gacacugaaaug

SEQ ID NO: 2102208 - RNA, 22 nt, Human
gacacugaaaugccuuacuuug

SEQ ID NO: 2102209 - RNA, 15 nt, Human
gacacugaugggcaa

SEQ ID NO: 2102210 - RNA, 12 nt, Human
gacagacacagg

SEQ ID NO: 2102211 - RNA, 19 nt, Human
gacacuguuuacaagaaaa

SEQ ID NO: 2102212 - RNA, 22 nt, Human
gacacuguuuacaagaaaaaau

SEQ ID NO: 2102213 - RNA, 13 nt, Human
gacauuaaauaau

SEQ ID NO: 2102214 - RNA, 12 nt, Human
gacauuaacagu

SEQ ID NO: 2102215 - RNA, 14 nt, Human
gacauuaacaguuu

SEQ ID NO: 2102216 - RNA, 17 nt, Human
gacauuaacaguuuucc

SEQ ID NO: 2102217 - RNA, 23 nt, Human
gacaguccugggagaaccucagg

SEQ ID NO: 2102218 - RNA, 15 nt, Human
gacaguccugggaga

SEQ ID NO: 2102219 - RNA, 18 nt, Human
gacaguccugggagaacc

SEQ ID NO: 2102220 - RNA, 16 nt, Human
gacagucaaggagugg

SEQ ID NO: 2102221 - RNA, 17 nt, Human
gacagucaaggaguggc

SEQ ID NO: 2102222 - RNA, 19 nt, Human
gacagucaaggaguggcuu

SEQ ID NO: 2102223 - RNA, 22 nt, Human
gacagucaaggaguggcuuacu

SEQ ID NO: 2102224 - RNA, 13 nt, Human
gacaguccuggga

SEQ ID NO: 2102225 - RNA, 14 nt, Human
gacaguccugggag

SEQ ID NO: 2102226 - RNA, 19 nt, Human
gacagccuggcacagggca

SEQ ID NO: 2102227 - RNA, 13 nt, Human
gacagccuggcac

SEQ ID NO: 2102228 - RNA, 15 nt, Human
gacagacacacacac

SEQ ID NO: 2102229 - RNA, 13 nt, Human
gacagacacacac

SEQ ID NO: 2102230 - RNA, 11 nt, Human
gacagcuccuu

SEQ ID NO: 2102231 - RNA, 20 nt, Human
gacagccuguggcggugccu

SEQ ID NO: 2102232 - RNA, 22 nt, Human
gacagccuguggcggugccugg

SEQ ID NO: 2102233 - RNA, 23 nt, Human
gacagccuguggcggugccuggg

SEQ ID NO: 2102234 - RNA, 22 nt, Human
gacaggguuuugccauguuggc

SEQ ID NO: 2102235 - RNA, 20 nt, Human
gacaggguuuugccauguug

SEQ ID NO: 2102236 - RNA, 16 nt, Human
gacagcucccucugcc

SEQ ID NO: 2102237 - RNA, 17 nt, Human
gacagcucccucugccu

SEQ ID NO: 2102238 - RNA, 18 nt, Human
gacagcucccucugccug

SEQ ID NO: 2102239 - RNA, 14 nt, Human
gacaggucugggag

SEQ ID NO: 2102240 - RNA, 16 nt, Human
gagaagcggcuggcag

SEQ ID NO: 2102241 - RNA, 13 nt, Human
gagaagcggcugg

SEQ ID NO: 2102242 - RNA, 15 nt, Human
gagaagcggcuggca

SEQ ID NO: 2102243 - RNA, 20 nt, Human
gagaaggacccggaggggcc

SEQ ID NO: 2102244 - RNA, 12 nt, Human
gagaaggaagcc

SEQ ID NO: 2102245 - RNA, 23 nt, Human
gagaaggacccggaggggccugg

SEQ ID NO: 2102246 - RNA, 22 nt, Human
gagaaggacccggaggggccug

SEQ ID NO: 2102247 - RNA, 16 nt, Human
gagaaggaaugucuuu

SEQ ID NO: 2102248 - RNA, 14 nt, Human
gagaaggaaggaga

SEQ ID NO: 2102249 - RNA, 21 nt, Human
gagaaggaaggagacucaccu

SEQ ID NO: 2102250 - RNA, 14 nt, Human
gagacccaaggagg

SEQ ID NO: 2102251 - RNA, 12 nt, Human
gagacccccaca

SEQ ID NO: 2102252 - RNA, 13 nt, Human
gagacccccacac

SEQ ID NO: 2102253 - RNA, 14 nt, Human
gagacccccacacc

SEQ ID NO: 2102254 - RNA, 15 nt, Human
gagaagugccccugc

SEQ ID NO: 2102255 - RNA, 20 nt, Human
gagaaucagaucauuucaaa

SEQ ID NO: 2102256 - RNA, 21 nt, Human
gagaaucauacuuagcaaagu

SEQ ID NO: 2102257 - RNA, 23 nt, Human
gagaagucuuagacuugaaauac

SEQ ID NO: 2102258 - RNA, 21 nt, Human
gagacccugucucaaaaaaag

SEQ ID NO: 2102259 - RNA, 13 nt, Human
gagaccccugucu

SEQ ID NO: 2102260 - RNA, 14 nt, Human
gagaccccugucuc

SEQ ID NO: 2102261 - RNA, 15 nt, Human
gagaccccugucucc

SEQ ID NO: 2102262 - RNA, 17 nt, Human
gagacccuacaggagag

SEQ ID NO: 2102263 - RNA, 19 nt, Human
gagacccucguggccuucc

SEQ ID NO: 2102264 - RNA, 15 nt, Human
gagacccccacaccu

SEQ ID NO: 2102265 - RNA, 23 nt, Human
gagacccccacaccucaguuccc

SEQ ID NO: 2102266 - RNA, 11 nt, Human
gagaccucagc

SEQ ID NO: 2102267 - RNA, 13 nt, Human
gagaccucagcca

SEQ ID NO: 2102268 - RNA, 14 nt, Human
gagaccucagccau

SEQ ID NO: 2102269 - RNA, 15 nt, Human
gagaccucagccaug

SEQ ID NO: 2102270 - RNA, 16 nt, Human
gagacuagauugccuu

SEQ ID NO: 2102271 - RNA, 21 nt, Human
gacuuuucuuuguggcuuccu

SEQ ID NO: 2102272 - RNA, 23 nt, Human
gacuuucucagccucugaauaug

SEQ ID NO: 2102273 - RNA, 11 nt, Human
gacuuuccucu

SEQ ID NO: 2102274 - RNA, 15 nt, Human
gacuuuccacccccu

SEQ ID NO: 2102275 - RNA, 16 nt, Human
gacuuuccacccccuc

SEQ ID NO: 2102276 - RNA, 17 nt, Human
gacuuuccacccccucc

SEQ ID NO: 2102277 - RNA, 18 nt, Human
gacuuuccacccccuccc

SEQ ID NO: 2102278 - RNA, 19 nt, Human
gacuuuccacccccucccu

SEQ ID NO: 2102279 - RNA, 17 nt, Human
gacuggugagcagacug

SEQ ID NO: 2102280 - RNA, 14 nt, Human
gacuggugagcaga

SEQ ID NO: 2102281 - RNA, 23 nt, Human
gacugggucucgcuuuguugccc

SEQ ID NO: 2102282 - RNA, 17 nt, Human
gacuagccuggcuuggg

SEQ ID NO: 2102283 - RNA, 14 nt, Human
gacuaggagcacug

SEQ ID NO: 2102284 - RNA, 17 nt, Human
gacuagggauucaggcu

SEQ ID NO: 2102285 - RNA, 18 nt, Human
gacuagggauucaggcug

SEQ ID NO: 2102286 - RNA, 19 nt, Human
gacuagggauucaggcugc

SEQ ID NO: 2102287 - RNA, 20 nt, Human
gacuagggauucaggcugcu

SEQ ID NO: 2102288 - RNA, 21 nt, Human
gacuagggauucaggcugcuu

SEQ ID NO: 2102289 - RNA, 22 nt, Human
gacuaucuaaauguugaaagau

SEQ ID NO: 2102290 - RNA, 18 nt, Human
gacuaucaaacugaagcc

SEQ ID NO: 2102291 - RNA, 22 nt, Human
gacuaucaaacugaagccagaa

SEQ ID NO: 2102292 - RNA, 16 nt, Human
gacuauugacaucagc

SEQ ID NO: 2102293 - RNA, 13 nt, Human
gacuauuuaugaa

SEQ ID NO: 2102294 - RNA, 14 nt, Human
gacuauucaguuuu

SEQ ID NO: 2102295 - RNA, 22 nt, Human
gacuauuugcuuauuuaauaaa

SEQ ID NO: 2102296 - RNA, 16 nt, Human
gacucugucucaaaaa

SEQ ID NO: 2102297 - RNA, 12 nt, Human
gacucugucuca

SEQ ID NO: 2102298 - RNA, 22 nt, Human
gacucugaggcucuuucugggc

SEQ ID NO: 2102299 - RNA, 19 nt, Human
gacucugaggcucuuucug

SEQ ID NO: 2102300 - RNA, 19 nt, Human
gacucucugugaccugccc

SEQ ID NO: 2102301 - RNA, 15 nt, Human
gacucucugugaccu

SEQ ID NO: 2102302 - RNA, 14 nt, Human
gacucucugugacc

SEQ ID NO: 2102303 - RNA, 18 nt, Human
gagcagggacagaucaua

SEQ ID NO: 2102304 - RNA, 20 nt, Human
gagcagggacagaucauaga

SEQ ID NO: 2102305 - RNA, 14 nt, Human
gagcagggcucagc

SEQ ID NO: 2102306 - RNA, 14 nt, Human
gagccccacugccc

SEQ ID NO: 2102307 - RNA, 15 nt, Human
gagccccacugcccu

SEQ ID NO: 2102308 - RNA, 19 nt, Human
gagccccacugcccuucuc

SEQ ID NO: 2102309 - RNA, 12 nt, Human
gagccccagggu

SEQ ID NO: 2102310 - RNA, 13 nt, Human
gagccccaggguc

SEQ ID NO: 2102311 - RNA, 14 nt, Human
gagccccagggucu

SEQ ID NO: 2102312 - RNA, 17 nt, Human
gagccccagugccaagc

SEQ ID NO: 2102313 - RNA, 12 nt, Human
gagccccagugc

SEQ ID NO: 2102314 - RNA, 14 nt, Human
gagccccagugcca

SEQ ID NO: 2102315 - RNA, 18 nt, Human
gagccccaucagcuccag

SEQ ID NO: 2102316 - RNA, 19 nt, Human
gagccccagggucuucccu

SEQ ID NO: 2102317 - RNA, 24 nt, Human
gagccccagggucuucccuaccuc

SEQ ID NO: 2102318 - RNA, 21 nt, Human
gagcauggggauaaaggagaa

SEQ ID NO: 2102319 - RNA, 22 nt, Human
gagcauggggauaaaggagaag

SEQ ID NO: 2102320 - RNA, 21 nt, Human
gagcagggcucagcggggaca

SEQ ID NO: 2102321 - RNA, 18 nt, Human
gagcagugucuuccauaa

SEQ ID NO: 2102322 - RNA, 19 nt, Human
gagcagugucuuccauaau

SEQ ID NO: 2102323 - RNA, 16 nt, Human
gagcagugugucuccu

SEQ ID NO: 2102324 - RNA, 18 nt, Human
gagcagugugucuccugc

SEQ ID NO: 2102325 - RNA, 19 nt, Human
gagcagugugucuccugca

SEQ ID NO: 2102326 - RNA, 23 nt, Human
gagcagugugucuccugcaugca

SEQ ID NO: 2102327 - RNA, 12 nt, Human
gagcuggggaag

SEQ ID NO: 2102328 - RNA, 19 nt, Human
gagcugggcagaaggccaa

SEQ ID NO: 2102329 - RNA, 21 nt, Human
gagcugggacacuuaacagau

SEQ ID NO: 2102330 - RNA, 14 nt, Human
gagcugggaggaaa

SEQ ID NO: 2102331 - RNA, 17 nt, Human
gagcugggcagaaggcc

SEQ ID NO: 2102332 - RNA, 16 nt, Human
gagcugggauccuaag

SEQ ID NO: 2102333 - RNA, 16 nt, Human
gagcugggaggaaaag

SEQ ID NO: 2102334 - RNA, 17 nt, Human
gagcugggaggaaaaga

SEQ ID NO: 2102335 - RNA, 18 nt, Human
gagcugggugucaagagg

SEQ ID NO: 2102336 - RNA, 18 nt, Human
gagcugggggccaugagc

SEQ ID NO: 2102337 - RNA, 17 nt, Human
gagcuggugcauuacag

SEQ ID NO: 2102338 - RNA, 14 nt, Human
gagcuggugcauua

SEQ ID NO: 2102339 - RNA, 16 nt, Human
gagcuggugcauuaca

SEQ ID NO: 2102340 - RNA, 19 nt, Human
gagcugggggccaugagcu

SEQ ID NO: 2102341 - RNA, 24 nt, Human
gagcugggggccaugagcuccaga

SEQ ID NO: 2102342 - RNA, 21 nt, Human
gagcugguaguuaguagcaug

SEQ ID NO: 2102343 - RNA, 11 nt, Human
gagcuggugca

SEQ ID NO: 2102344 - RNA, 22 nt, Human
gagcugccuguucagcuccagc

SEQ ID NO: 2102345 - RNA, 21 nt, Human
gagcugccuguucagcuccag

SEQ ID NO: 2102346 - RNA, 20 nt, Human
gagcugccuguucagcucca

SEQ ID NO: 2102347 - RNA, 17 nt, Human
gagcccccgccccgccc

SEQ ID NO: 2102348 - RNA, 21 nt, Human
gagcccccgccccgccccaca

SEQ ID NO: 2102349 - RNA, 22 nt, Human
gagcccccgccccgccccacau

SEQ ID NO: 2102350 - RNA, 13 nt, Human
gagcgaaacuccg

SEQ ID NO: 2102351 - RNA, 22 nt, Human
gagccuugguguccaccuggcc

SEQ ID NO: 2102352 - RNA, 18 nt, Human
gagccuugguucaucagu

SEQ ID NO: 2102353 - RNA, 19 nt, Human
gagccuugguguccaccug

SEQ ID NO: 2102354 - RNA, 20 nt, Human
gagccuugguguccaccugg

SEQ ID NO: 2102355 - RNA, 18 nt, Human
gagauuucuuguugcuca

SEQ ID NO: 2102356 - RNA, 15 nt, Human
gagauguaagagcuu

SEQ ID NO: 2102357 - RNA, 15 nt, Human
gagauguagcaaaac

SEQ ID NO: 2102358 - RNA, 21 nt, Human
gagauugcaccacugcacucc

SEQ ID NO: 2102359 - RNA, 18 nt, Human
gagauugcaccacugcac

SEQ ID NO: 2102360 - RNA, 14 nt, Human
gagauggggugggg

SEQ ID NO: 2102361 - RNA, 20 nt, Human
gagauggggaaagaauuccu

SEQ ID NO: 2102362 - RNA, 18 nt, Human
gagauggggagaaaccua

SEQ ID NO: 2102363 - RNA, 15 nt, Human
gagauggaggaggag

SEQ ID NO: 2102364 - RNA, 15 nt, Human
gagauggcccucugg

SEQ ID NO: 2102365 - RNA, 16 nt, Human
gagauggcccucuggu

SEQ ID NO: 2102366 - RNA, 17 nt, Human
gagauggcccucuggua

SEQ ID NO: 2102367 - RNA, 17 nt, Human
gagaugggacugggagg

SEQ ID NO: 2102368 - RNA, 18 nt, Human
gagaugggcuuguuuucu

SEQ ID NO: 2102369 - RNA, 19 nt, Human
gagaugggacugggagggc

SEQ ID NO: 2102370 - RNA, 19 nt, Human
gagaugccuccaccgcugc

SEQ ID NO: 2102371 - RNA, 14 nt, Human
gagaugccuccacc

SEQ ID NO: 2102372 - RNA, 15 nt, Human
gagaugccuccaccg

SEQ ID NO: 2102373 - RNA, 20 nt, Human
gagaugccuccaccgcugcc

SEQ ID NO: 2102374 - RNA, 20 nt, Human
gagauggaaguugcagugag

SEQ ID NO: 2102375 - RNA, 23 nt, Human
gagauggaacccuuuuggccccc

SEQ ID NO: 2102376 - RNA, 12 nt, Human
gagauggaggag

SEQ ID NO: 2102377 - RNA, 13 nt, Human
gagauggaggagg

SEQ ID NO: 2102378 - RNA, 14 nt, Human
gagauggaggagga

SEQ ID NO: 2102379 - RNA, 16 nt, Human
gagauggaggaggagg

SEQ ID NO: 2102380 - RNA, 23 nt, Human
gagauggaucaaucaaacccggc

SEQ ID NO: 2102381 - RNA, 13 nt, Human
gagaggcagagug

SEQ ID NO: 2102382 - RNA, 15 nt, Human
gagaggcagagugcc

SEQ ID NO: 2102383 - RNA, 16 nt, Human
gagaggcagagugccc

SEQ ID NO: 2102384 - RNA, 22 nt, Human
gagaggcagacuucccugaaug

SEQ ID NO: 2102385 - RNA, 15 nt, Human
gagacucaccucugc

SEQ ID NO: 2102386 - RNA, 16 nt, Human
gagacucaccucugcc

SEQ ID NO: 2102387 - RNA, 21 nt, Human
gagacuagauuuaugaauaca

SEQ ID NO: 2102388 - RNA, 17 nt, Human
gagacucaccucugccu

SEQ ID NO: 2102389 - RNA, 18 nt, Human
gagacucaccucugccuc

SEQ ID NO: 2102390 - RNA, 19 nt, Human
gagacucaccucugccuca

SEQ ID NO: 2102391 - RNA, 20 nt, Human
gagacucaccucugccucaa

SEQ ID NO: 2102392 - RNA, 23 nt, Human
gagacucaccucugccucaaugu

SEQ ID NO: 2102393 - RNA, 13 nt, Human
gagacucagacag

SEQ ID NO: 2102394 - RNA, 14 nt, Human
gagacucagacagg

SEQ ID NO: 2102395 - RNA, 18 nt, Human
gcauaauaagcuaaagag

SEQ ID NO: 2102396 - RNA, 22 nt, Human
gcagucaucuugaccaagcagg

SEQ ID NO: 2102397 - RNA, 23 nt, Human
gcagucaucuugaccaagcagga

SEQ ID NO: 2102398 - RNA, 17 nt, Human
gcaguccugccucagcc

SEQ ID NO: 2102399 - RNA, 18 nt, Human
gcaguccugccucagccu

SEQ ID NO: 2102400 - RNA, 21 nt, Human
gcaguuugccuggugcagugg

SEQ ID NO: 2102401 - RNA, 14 nt, Human
gcauaauaagcuaa

SEQ ID NO: 2102402 - RNA, 14 nt, Human
gcauaacugacaaa

SEQ ID NO: 2102403 - RNA, 15 nt, Human
gcauaacugacaaau

SEQ ID NO: 2102404 - RNA, 17 nt, Human
gcauaacugacaaauca

SEQ ID NO: 2102405 - RNA, 18 nt, Human
gcauaacugacaaaucaa

SEQ ID NO: 2102406 - RNA, 19 nt, Human
gcauaacugacaaaucaag

SEQ ID NO: 2102407 - RNA, 21 nt, Human
gcauaacugacaaaucaaguu

SEQ ID NO: 2102408 - RNA, 22 nt, Human
gcauaacugacaaaucaaguuu

SEQ ID NO: 2102409 - RNA, 14 nt, Human
gcaguuugggaggu

SEQ ID NO: 2102410 - RNA, 16 nt, Human
gcagguugaggggcuc

SEQ ID NO: 2102411 - RNA, 19 nt, Human
gcagguugaggggcuccug

SEQ ID NO: 2102412 - RNA, 20 nt, Human
gcagguugaggggcuccugg

SEQ ID NO: 2102413 - RNA, 21 nt, Human
gcagguugaggggcuccugga

SEQ ID NO: 2102414 - RNA, 22 nt, Human
gcagguugaggggcuccuggaa

SEQ ID NO: 2102415 - RNA, 13 nt, Human
gcagggaaacagc

SEQ ID NO: 2102416 - RNA, 19 nt, Human
gcagggaggcaccauucag

SEQ ID NO: 2102417 - RNA, 22 nt, Human
gcagggagccgagaucacgcca

SEQ ID NO: 2102418 - RNA, 14 nt, Human
gcaguaaaaacugu

SEQ ID NO: 2102419 - RNA, 14 nt, Human
gcaguaaagagaaa

SEQ ID NO: 2102420 - RNA, 15 nt, Human
gcaguaaagagaaac

SEQ ID NO: 2102421 - RNA, 16 nt, Human
gcaguaaagagaaacu

SEQ ID NO: 2102422 - RNA, 17 nt, Human
gcaguaaagagaaacuu

SEQ ID NO: 2102423 - RNA, 18 nt, Human
gcaguaaagagaaacuuu

SEQ ID NO: 2102424 - RNA, 21 nt, Human
gcaguagaaauaauaugcauu

SEQ ID NO: 2102425 - RNA, 20 nt, Human
gcaguagaaauaauaugcau

SEQ ID NO: 2102426 - RNA, 19 nt, Human
gcaguagaaauaauaugca

SEQ ID NO: 2102427 - RNA, 18 nt, Human
gcaguagagucaucucca

SEQ ID NO: 2102428 - RNA, 20 nt, Human
gcaguagagucaucuccauc

SEQ ID NO: 2102429 - RNA, 19 nt, Human
gcagcugcgguccacccag

SEQ ID NO: 2102430 - RNA, 17 nt, Human
gcagcugcgguccaccc

SEQ ID NO: 2102431 - RNA, 15 nt, Human
gcaggcuggcuggcc

SEQ ID NO: 2102432 - RNA, 20 nt, Human
gcagcccaugcccaccugcc

SEQ ID NO: 2102433 - RNA, 22 nt, Human
gcagccccagcaccaccagguc

SEQ ID NO: 2102434 - RNA, 23 nt, Human
gcagccccagcaccaccaggucu

SEQ ID NO: 2102435 - RNA, 13 nt, Human
gcagcccaugccc

SEQ ID NO: 2102436 - RNA, 15 nt, Human
gcagcccaugcccac

SEQ ID NO: 2102437 - RNA, 17 nt, Human
gcagcccaugcccaccu

SEQ ID NO: 2102438 - RNA, 18 nt, Human
gcagcccaugcccaccug

SEQ ID NO: 2102439 - RNA, 22 nt, Human
gcagcccaugcccaccugccca

SEQ ID NO: 2102440 - RNA, 13 nt, Human
gcaagugagagcu

SEQ ID NO: 2102441 - RNA, 17 nt, Human
gcaagucuggaucuggg

SEQ ID NO: 2102442 - RNA, 21 nt, Human
gcaaguccuaagccuguuagc

SEQ ID NO: 2102443 - RNA, 14 nt, Human
gcacaagcugcacc

SEQ ID NO: 2102444 - RNA, 20 nt, Human
gcaagugaauuuuucucuaa

SEQ ID NO: 2102445 - RNA, 20 nt, Human
gcaauaaccucaaagugacu

SEQ ID NO: 2102446 - RNA, 12 nt, Human
gcaauaaaugaa

SEQ ID NO: 2102447 - RNA, 12 nt, Human
gcacaaugucuu

SEQ ID NO: 2102448 - RNA, 14 nt, Human
gcacaaugucuugg

SEQ ID NO: 2102449 - RNA, 12 nt, Human
gcacacacacac

SEQ ID NO: 2102450 - RNA, 14 nt, Human
gcacacacacacac

SEQ ID NO: 2102451 - RNA, 16 nt, Human
gcacacacacacacag

SEQ ID NO: 2102452 - RNA, 17 nt, Human
gcacacacacacacagg

SEQ ID NO: 2102453 - RNA, 20 nt, Human
gcacacacacacacaggagg

SEQ ID NO: 2102454 - RNA, 19 nt, Human
gcacacacacacacaggag

SEQ ID NO: 2102455 - RNA, 21 nt, Human
gcacaugagcuggcgggauug

SEQ ID NO: 2102456 - RNA, 13 nt, Human
gcacaucugcauu

SEQ ID NO: 2102457 - RNA, 21 nt, Human
gcacaucugcauuuucacccc

SEQ ID NO: 2102458 - RNA, 19 nt, Human
gcacccucgaugaagccca

SEQ ID NO: 2102459 - RNA, 16 nt, Human
gcacccuccgccuuca

SEQ ID NO: 2102460 - RNA, 13 nt, Human
gcaccgccuucuc

SEQ ID NO: 2102461 - RNA, 14 nt, Human
gcaccgccuucucu

SEQ ID NO: 2102462 - RNA, 19 nt, Human
gcaccgccggccagcuggg

SEQ ID NO: 2102463 - RNA, 20 nt, Human
gcaccgccggccagcuggga

SEQ ID NO: 2102464 - RNA, 12 nt, Human
gcacugacauug

SEQ ID NO: 2102465 - RNA, 20 nt, Human
gcacugacccacagccucug

SEQ ID NO: 2102466 - RNA, 16 nt, Human
gcacugacugggcaua

SEQ ID NO: 2102467 - RNA, 18 nt, Human
gcacuuuaaaugaagcua

SEQ ID NO: 2102468 - RNA, 17 nt, Human
gcacugacugggcauag

SEQ ID NO: 2102469 - RNA, 13 nt, Human
gcacuuucauugc

SEQ ID NO: 2102470 - RNA, 21 nt, Human
gcacuuucauugccagugucu

SEQ ID NO: 2102471 - RNA, 22 nt, Human
gcacuuucauugccagugucuu

SEQ ID NO: 2102472 - RNA, 17 nt, Human
gcagaaagggagcagag

SEQ ID NO: 2102473 - RNA, 14 nt, Human
gcagagcaggggca

SEQ ID NO: 2102474 - RNA, 20 nt, Human
gcagagcaggggcaggguga

SEQ ID NO: 2102475 - RNA, 18 nt, Human
gcagaacagccgcuccug

SEQ ID NO: 2102476 - RNA, 21 nt, Human
gcagaacagccgcuccugucu

SEQ ID NO: 2102477 - RNA, 14 nt, Human
gcagaaaucuagaa

SEQ ID NO: 2102478 - RNA, 15 nt, Human
gcagaaaucuagaag

SEQ ID NO: 2102479 - RNA, 15 nt, Human
gauuauuuuuuauga

SEQ ID NO: 2102480 - RNA, 15 nt, Human
gauuaguaaagaaau

SEQ ID NO: 2102481 - RNA, 20 nt, Human
gauuauuagccagguaaugu

SEQ ID NO: 2102482 - RNA, 15 nt, Human
gauuaugguuuugug

SEQ ID NO: 2102483 - RNA, 16 nt, Human
gauuaugguuuuguga

SEQ ID NO: 2102484 - RNA, 17 nt, Human
gauuaugguuuugugau

SEQ ID NO: 2102485 - RNA, 19 nt, Human
gauuagcaaguuacaguga

SEQ ID NO: 2102486 - RNA, 15 nt, Human
gauuagaucuuuuaa

SEQ ID NO: 2102487 - RNA, 14 nt, Human
gauuacaugcaugu

SEQ ID NO: 2102488 - RNA, 22 nt, Human
gauuaccuaguagucauuucau

SEQ ID NO: 2102489 - RNA, 12 nt, Human
gauuacucuuug

SEQ ID NO: 2102490 - RNA, 21 nt, Human
gauuagaaaugaccaauauua

SEQ ID NO: 2102491 - RNA, 23 nt, Human
gauuacucuuugagauagaagaa

SEQ ID NO: 2102492 - RNA, 17 nt, Human
gauuacugucaauaaac

SEQ ID NO: 2102493 - RNA, 18 nt, Human
gauuacugucaauaaaca

SEQ ID NO: 2102494 - RNA, 20 nt, Human
gauuacaggugugaaccacc

SEQ ID NO: 2102495 - RNA, 15 nt, Human
gauauuuuuuuaagu

SEQ ID NO: 2102496 - RNA, 14 nt, Human
gaucuccuugcccu

SEQ ID NO: 2102497 - RNA, 17 nt, Human
gaucucuugagccuggg

SEQ ID NO: 2102498 - RNA, 12 nt, Human
gaucucuugagc

SEQ ID NO: 2102499 - RNA, 16 nt, Human
gaucucuugagccugg

SEQ ID NO: 2102500 - RNA, 12 nt, Human
gaucuccaaagc

SEQ ID NO: 2102501 - RNA, 13 nt, Human
gaucuccaaagcu

SEQ ID NO: 2102502 - RNA, 14 nt, Human
gaucuccaaagcuu

SEQ ID NO: 2102503 - RNA, 17 nt, Human
gaucuccauauguuaca

SEQ ID NO: 2102504 - RNA, 15 nt, Human
gaucucauucaguau

SEQ ID NO: 2102505 - RNA, 17 nt, Human
gaucucauucaguauua

SEQ ID NO: 2102506 - RNA, 20 nt, Human
gaucucauucaguauuaaag

SEQ ID NO: 2102507 - RNA, 21 nt, Human
gaucucauucaguauuaaagg

SEQ ID NO: 2102508 - RNA, 18 nt, Human
gaucucccugccgccuca

SEQ ID NO: 2102509 - RNA, 20 nt, Human
gaucucccugccgccucaau

SEQ ID NO: 2102510 - RNA, 12 nt, Human
gaucucccugcc

SEQ ID NO: 2102511 - RNA, 13 nt, Human
gaucucccagggc

SEQ ID NO: 2102512 - RNA, 15 nt, Human
gaucucccagggcua

SEQ ID NO: 2102513 - RNA, 13 nt, Human
gaucucccugccg

SEQ ID NO: 2102514 - RNA, 14 nt, Human
gaucucccugccgc

SEQ ID NO: 2102515 - RNA, 15 nt, Human
gaucucccugccgcc

SEQ ID NO: 2102516 - RNA, 22 nt, Human
gauccaugaguuugcccugguu

SEQ ID NO: 2102517 - RNA, 16 nt, Human
gauccauguagcagga

SEQ ID NO: 2102518 - RNA, 19 nt, Human
gauccauguagcaggacug

SEQ ID NO: 2102519 - RNA, 21 nt, Human
gauauuuuuucagaaauaugu

SEQ ID NO: 2102520 - RNA, 14 nt, Human
gaugaucuuugcag

SEQ ID NO: 2102521 - RNA, 20 nt, Human
gaugagcccagcccuguucu

SEQ ID NO: 2102522 - RNA, 21 nt, Human
gaugagcccagcccuguucug

SEQ ID NO: 2102523 - RNA, 12 nt, Human
gaugagcauuua

SEQ ID NO: 2102524 - RNA, 18 nt, Human
gaugagcauuuagggcaa

SEQ ID NO: 2102525 - RNA, 21 nt, Human
gaugagcauuuagggcaagga

SEQ ID NO: 2102526 - RNA, 22 nt, Human
gaugagcauuuagggcaaggag

SEQ ID NO: 2102527 - RNA, 21 nt, Human
gaugaucuuugcagacaggca

SEQ ID NO: 2102528 - RNA, 20 nt, Human
gaugaucuuugcagacaggc

SEQ ID NO: 2102529 - RNA, 21 nt, Human
gaugaugaaaugaggucagag

SEQ ID NO: 2102530 - RNA, 21 nt, Human
gagugcucaguagucagacug

SEQ ID NO: 2102531 - RNA, 13 nt, Human
gaguuugcccugg

SEQ ID NO: 2102532 - RNA, 21 nt, Human
gaguuuccucaggcugcugga

SEQ ID NO: 2102533 - RNA, 16 nt, Human
gaguuuccucaggcug

SEQ ID NO: 2102534 - RNA, 20 nt, Human
gaguuuccucaggcugcugg

SEQ ID NO: 2102535 - RNA, 23 nt, Human
gaguuuccucaggcugcuggagg

SEQ ID NO: 2102536 - RNA, 21 nt, Human
gaguuuagugaucugaacaga

SEQ ID NO: 2102537 - RNA, 15 nt, Human
gaguuuccucaggcu

SEQ ID NO: 2102538 - RNA, 20 nt, Human
gagugaggauaugaguagcc

SEQ ID NO: 2102539 - RNA, 15 nt, Human
gaguuuccuaaaagu

SEQ ID NO: 2102540 - RNA, 16 nt, Human
gaguuguggaaagccu

SEQ ID NO: 2102541 - RNA, 20 nt, Human
gaguuguggaaagccucugc

SEQ ID NO: 2102542 - RNA, 16 nt, Human
gaguuguguuguucuu

SEQ ID NO: 2102543 - RNA, 18 nt, Human
gaguuguguuguucuuuu

SEQ ID NO: 2102544 - RNA, 17 nt, Human
gaguuuaagaccagccu

SEQ ID NO: 2102545 - RNA, 19 nt, Human
gaguuuaagaccagccugg

SEQ ID NO: 2102546 - RNA, 14 nt, Human
gaguuuaccauuug

SEQ ID NO: 2102547 - RNA, 17 nt, Human
gaguuuaccauuuguaa

SEQ ID NO: 2102548 - RNA, 20 nt, Human
gaguuuaccauuuguaauaa

SEQ ID NO: 2102549 - RNA, 22 nt, Human
gaguuuaccauuuguaauaaag

SEQ ID NO: 2102550 - RNA, 23 nt, Human
gaguuuaccauuuguaauaaagu

SEQ ID NO: 2102551 - RNA, 18 nt, Human
gaggucucuugagggagc

SEQ ID NO: 2102552 - RNA, 14 nt, Human
gaggucugaaaugg

SEQ ID NO: 2102553 - RNA, 19 nt, Human
gaggucugcucggccgucu

SEQ ID NO: 2102554 - RNA, 23 nt, Human
gaggucugcucggccgucuucac

SEQ ID NO: 2102555 - RNA, 21 nt, Human
gaggugcagagugcccagaac

SEQ ID NO: 2102556 - RNA, 19 nt, Human
gaggugcagagugcccaga

SEQ ID NO: 2102557 - RNA, 18 nt, Human
gaggucuuuugacaugug

SEQ ID NO: 2102558 - RNA, 18 nt, Human
gaggugcagagugcccag

SEQ ID NO: 2102559 - RNA, 20 nt, Human
gaggugggaggaucuuuuga

SEQ ID NO: 2102560 - RNA, 20 nt, Human
gaggugcugcauugccugcg

SEQ ID NO: 2102561 - RNA, 16 nt, Human
gaggugcugggaggga

SEQ ID NO: 2102562 - RNA, 23 nt, Human
gaggugcuacugacuuucucagc

SEQ ID NO: 2102563 - RNA, 16 nt, Human
gaggugggauaucccu

SEQ ID NO: 2102564 - RNA, 12 nt, Human
gagucacacuca

SEQ ID NO: 2102565 - RNA, 20 nt, Human
gagucaauccccucauucag

SEQ ID NO: 2102566 - RNA, 19 nt, Human
gagucaauccccucauuca

SEQ ID NO: 2102567 - RNA, 11 nt, Human
gaggugggagg

SEQ ID NO: 2102568 - RNA, 12 nt, Human
gagugagcuggu

SEQ ID NO: 2102569 - RNA, 13 nt, Human
gagucccaccuug

SEQ ID NO: 2102570 - RNA, 13 nt, Human
gaguccagucucu

SEQ ID NO: 2102571 - RNA, 21 nt, Human
gagucccaccuuggcugcagg

SEQ ID NO: 2102572 - RNA, 24 nt, Human
gagugagcacuaaggugugcucug

SEQ ID NO: 2102573 - RNA, 12 nt, Human
gagugcagugag

SEQ ID NO: 2102574 - RNA, 11 nt, Human
gagugcaguga

SEQ ID NO: 2102575 - RNA, 17 nt, Human
gagugaggcaggugaca

SEQ ID NO: 2102576 - RNA, 14 nt, Human
gagucaccaagccc

SEQ ID NO: 2102577 - RNA, 13 nt, Human
gagucaccaagcc

SEQ ID NO: 2102578 - RNA, 15 nt, Human
gagucaccaagccca

SEQ ID NO: 2102579 - RNA, 13 nt, Human
gaguccaggcccc

SEQ ID NO: 2102580 - RNA, 14 nt, Human
gaguccaggcccca

SEQ ID NO: 2102581 - RNA, 20 nt, Human
gagucccaccuuggcugcag

SEQ ID NO: 2102582 - RNA, 16 nt, Human
gagucccaccuuggcu

SEQ ID NO: 2102583 - RNA, 17 nt, Human
gauacgacaacuugcac

SEQ ID NO: 2102584 - RNA, 13 nt, Human
gauacgacuuuau

SEQ ID NO: 2102585 - RNA, 16 nt, Human
gauacgcaucagacag

SEQ ID NO: 2102586 - RNA, 21 nt, Human
gauacgaguuuuggccgggug

SEQ ID NO: 2102587 - RNA, 22 nt, Human
gauacgaguuuuggccgggugc

SEQ ID NO: 2102588 - RNA, 20 nt, Human
gauacccauagcuuccauga

SEQ ID NO: 2102589 - RNA, 18 nt, Human
gauaugcaguuuuccuua

SEQ ID NO: 2102590 - RNA, 13 nt, Human
gauacucugucag

SEQ ID NO: 2102591 - RNA, 19 nt, Human
gauauguaaacauaauucu

SEQ ID NO: 2102592 - RNA, 19 nt, Human
gauauuccaugaauguauc

SEQ ID NO: 2102593 - RNA, 21 nt, Human
gauauuccaugaauguaucag

SEQ ID NO: 2102594 - RNA, 20 nt, Human
gauauuccccccacuuaaga

SEQ ID NO: 2102595 - RNA, 23 nt, Human
gauauuauucaccauguaaaaca

SEQ ID NO: 2102596 - RNA, 12 nt, Human
gauauuccauag

SEQ ID NO: 2102597 - RNA, 21 nt, Human
gauauuccauaguauauuaaa

SEQ ID NO: 2102598 - RNA, 16 nt, Human
gauauuccaugaaugu

SEQ ID NO: 2102599 - RNA, 18 nt, Human
gauauuccaugaauguau

SEQ ID NO: 2102600 - RNA, 19 nt, Human
gauauuaaauuuuuuaaaa

SEQ ID NO: 2102601 - RNA, 20 nt, Human
cuucuucggggaacuccugg

SEQ ID NO: 2102602 - RNA, 17 nt, Human
cuucuucggggaacucc

SEQ ID NO: 2102603 - RNA, 16 nt, Human
cuucugcaccuuaucu

SEQ ID NO: 2102604 - RNA, 17 nt, Human
cuucugcaccuuaucuu

SEQ ID NO: 2102605 - RNA, 18 nt, Human
cuucugcaccuuaucuua

SEQ ID NO: 2102606 - RNA, 18 nt, Human
cuucuucagaucagugcu

SEQ ID NO: 2102607 - RNA, 12 nt, Human
cuucuguuucua

SEQ ID NO: 2102608 - RNA, 13 nt, Human
cuucuguuucuag

SEQ ID NO: 2102609 - RNA, 14 nt, Human
cuucuguuucuagu

SEQ ID NO: 2102610 - RNA, 16 nt, Human
cuucuguuucuaguug

SEQ ID NO: 2102611 - RNA, 17 nt, Human
cuucuucagccaccucu

SEQ ID NO: 2102612 - RNA, 21 nt, Human
cuucuucagccaccucucuuu

SEQ ID NO: 2102613 - RNA, 15 nt, Human
cuucugaugaaucuu

SEQ ID NO: 2102614 - RNA, 17 nt, Human
cuucugaugaaucuugc

SEQ ID NO: 2102615 - RNA, 18 nt, Human
cuucugaugaaucuugcg

SEQ ID NO: 2102616 - RNA, 19 nt, Human
cuucugaugaaucuugcgu

SEQ ID NO: 2102617 - RNA, 21 nt, Human
cuucucaaaggguacuuccac

SEQ ID NO: 2102618 - RNA, 17 nt, Human
cuuccugccaccugcug

SEQ ID NO: 2102619 - RNA, 13 nt, Human
cuucuagaaccag

SEQ ID NO: 2102620 - RNA, 15 nt, Human
cuucuacugcuucua

SEQ ID NO: 2102621 - RNA, 22 nt, Human
cuucuacuuacacaucuuccac

SEQ ID NO: 2102622 - RNA, 13 nt, Human
cuucuacuucugc

SEQ ID NO: 2102623 - RNA, 21 nt, Human
cuucuacuucugcccuugcca

SEQ ID NO: 2102624 - RNA, 17 nt, Human
cuucuagaaccaggcaa

SEQ ID NO: 2102625 - RNA, 13 nt, Human
cuucuaggaagcu

SEQ ID NO: 2102626 - RNA, 13 nt, Human
cuucuauuuuauu

SEQ ID NO: 2102627 - RNA, 17 nt, Human
cuuccugcauucaccca

SEQ ID NO: 2102628 - RNA, 20 nt, Human
cuuccugcauucacccagac

SEQ ID NO: 2102629 - RNA, 21 nt, Human
cuuccugcauucacccagaca

SEQ ID NO: 2102630 - RNA, 22 nt, Human
cuuccugcauucacccagacag

SEQ ID NO: 2102631 - RNA, 13 nt, Human
cuugaagaucguu

SEQ ID NO: 2102632 - RNA, 20 nt, Human
cuugaagaucguuaguaucu

SEQ ID NO: 2102633 - RNA, 13 nt, Human
cuugaagccacug

SEQ ID NO: 2102634 - RNA, 16 nt, Human
cuugaagccacugaag

SEQ ID NO: 2102635 - RNA, 17 nt, Human
cuugaagccacugaagc

SEQ ID NO: 2102636 - RNA, 18 nt, Human
cuugaagccacugaagcu

SEQ ID NO: 2102637 - RNA, 15 nt, Human
cuugaucuguauaua

SEQ ID NO: 2102638 - RNA, 20 nt, Human
cuugaucuguauauacaaua

SEQ ID NO: 2102639 - RNA, 22 nt, Human
cuugaucuguauauacaauaac

SEQ ID NO: 2102640 - RNA, 16 nt, Human
cuugauaaagggccaa

SEQ ID NO: 2102641 - RNA, 13 nt, Human
cuugauaacagcu

SEQ ID NO: 2102642 - RNA, 14 nt, Human
cuugauaacagcua

SEQ ID NO: 2102643 - RNA, 17 nt, Human
cuugauaauguuguggu

SEQ ID NO: 2102644 - RNA, 21 nt, Human
cuugauaauguugugguuugu

SEQ ID NO: 2102645 - RNA, 20 nt, Human
cuugacagggcacaccgggc

SEQ ID NO: 2102646 - RNA, 13 nt, Human
cuugacagggcac

SEQ ID NO: 2102647 - RNA, 15 nt, Human
cuugacagggcacac

SEQ ID NO: 2102648 - RNA, 14 nt, Human
cuugacagggcaca

SEQ ID NO: 2102649 - RNA, 13 nt, Human
cuugaagccaagu

SEQ ID NO: 2102650 - RNA, 19 nt, Human
cuugaagccacugaagcug

SEQ ID NO: 2102651 - RNA, 21 nt, Human
cuugaagccacugaagcuggg

SEQ ID NO: 2102652 - RNA, 20 nt, Human
cuugaauuucuaaaaaacag

SEQ ID NO: 2102653 - RNA, 15 nt, Human
cuuggcagcugaacu

SEQ ID NO: 2102654 - RNA, 18 nt, Human
cuuggcaucacagggcag

SEQ ID NO: 2102655 - RNA, 14 nt, Human
cuuggcagccuacu

SEQ ID NO: 2102656 - RNA, 19 nt, Human
cuuggcaucacagggcaga

SEQ ID NO: 2102657 - RNA, 19 nt, Human
cuugcgcuuuugcugguca

SEQ ID NO: 2102658 - RNA, 18 nt, Human
cuugauacuuguuuucaa

SEQ ID NO: 2102659 - RNA, 13 nt, Human
cuugaugagugua

SEQ ID NO: 2102660 - RNA, 19 nt, Human
cuugaugaguguaacaaga

SEQ ID NO: 2102661 - RNA, 20 nt, Human
cuugaugaguguaacaagaa

SEQ ID NO: 2102662 - RNA, 21 nt, Human
cuugaugaguguaacaagaaa

SEQ ID NO: 2102663 - RNA, 22 nt, Human
cuugaugaguguaacaagaaag

SEQ ID NO: 2102664 - RNA, 23 nt, Human
cuugaugaguguaacaagaaagg

SEQ ID NO: 2102665 - RNA, 16 nt, Human
cuugaugacuggaauu

SEQ ID NO: 2102666 - RNA, 17 nt, Human
cuugaugacuggaauuu

SEQ ID NO: 2102667 - RNA, 20 nt, Human
cuugaugacuggaauuuuua

SEQ ID NO: 2102668 - RNA, 13 nt, Human
cuugccugcaggc

SEQ ID NO: 2102669 - RNA, 12 nt, Human
cuugccugcagg

SEQ ID NO: 2102670 - RNA, 15 nt, Human
cuuaugccauuuguu

SEQ ID NO: 2102671 - RNA, 17 nt, Human
cuuaugccauuuguuua

SEQ ID NO: 2102672 - RNA, 15 nt, Human
cuuauucucaaagca

SEQ ID NO: 2102673 - RNA, 15 nt, Human
cuuauuguaccucuc

SEQ ID NO: 2102674 - RNA, 14 nt, Human
cuuauuguaccucu

SEQ ID NO: 2102675 - RNA, 13 nt, Human
cuuauuguaccuc

SEQ ID NO: 2102676 - RNA, 18 nt, Human
cuuauuguaccucucuua

SEQ ID NO: 2102677 - RNA, 19 nt, Human
cuuauucauugugguuauu

SEQ ID NO: 2102678 - RNA, 20 nt, Human
cuuauugcuuugaaacuaga

SEQ ID NO: 2102679 - RNA, 15 nt, Human
cuucacggaagagcc

SEQ ID NO: 2102680 - RNA, 19 nt, Human
cuucacggaagagccuugc

SEQ ID NO: 2102681 - RNA, 21 nt, Human
cuuccauaaucuggacuccuc

SEQ ID NO: 2102682 - RNA, 11 nt, Human
cuuccauaauc

SEQ ID NO: 2102683 - RNA, 11 nt, Human
cuuccauaaug

SEQ ID NO: 2102684 - RNA, 23 nt, Human
cuuccauaauguauaaagaacaa

SEQ ID NO: 2102685 - RNA, 11 nt, Human
cuuccauaauu

SEQ ID NO: 2102686 - RNA, 12 nt, Human
cuuccauaguga

SEQ ID NO: 2102687 - RNA, 22 nt, Human
cuuccauagccuaaucccuggg

SEQ ID NO: 2102688 - RNA, 14 nt, Human
cuuccauaauuaug

SEQ ID NO: 2102689 - RNA, 14 nt, Human
cuuccauagccuaa

SEQ ID NO: 2102690 - RNA, 16 nt, Human
cuucaugaaaauccua

SEQ ID NO: 2102691 - RNA, 17 nt, Human
cuucaugaaaauccuac

SEQ ID NO: 2102692 - RNA, 18 nt, Human
cuucaugaaaauccuacc

SEQ ID NO: 2102693 - RNA, 19 nt, Human
cuucaugaaaauccuacca

SEQ ID NO: 2102694 - RNA, 12 nt, Human
cuucaugcaaug

SEQ ID NO: 2102695 - RNA, 13 nt, Human
cuucaugcaauga

SEQ ID NO: 2102696 - RNA, 22 nt, Human
cuucaugcaaugacaucuucaa

SEQ ID NO: 2102697 - RNA, 17 nt, Human
cuucaugcaaugacauc

SEQ ID NO: 2102698 - RNA, 12 nt, Human
cuucaucuuccc

SEQ ID NO: 2102699 - RNA, 18 nt, Human
cuucauagcagauuuuaa

SEQ ID NO: 2102700 - RNA, 17 nt, Human
cuucaguugguguguuu

SEQ ID NO: 2102701 - RNA, 19 nt, Human
cuucaguugguguguuuuu

SEQ ID NO: 2102702 - RNA, 20 nt, Human
cuucaguugguguguuuuug

SEQ ID NO: 2102703 - RNA, 22 nt, Human
cuucaguugguguguuuuuggg

SEQ ID NO: 2102704 - RNA, 16 nt, Human
cuucacggcaggacaa

SEQ ID NO: 2102705 - RNA, 17 nt, Human
cuucacggcaggacaac

SEQ ID NO: 2102706 - RNA, 20 nt, Human
cuucacuccagccuggguga

SEQ ID NO: 2102707 - RNA, 13 nt, Human
cuucacggcagga

SEQ ID NO: 2102708 - RNA, 17 nt, Human
cuucacucgcccccggg

SEQ ID NO: 2102709 - RNA, 24 nt, Human
cuucacuccggugugccugcagcc

SEQ ID NO: 2102710 - RNA, 14 nt, Human
cuucacuccggugu

SEQ ID NO: 2102711 - RNA, 19 nt, Human
cuucacuccggugugccug

SEQ ID NO: 2102712 - RNA, 22 nt, Human
cuucacuccggugugccugcag

SEQ ID NO: 2102713 - RNA, 23 nt, Human
cuucacuccggugugccugcagc

SEQ ID NO: 2102714 - RNA, 13 nt, Human
cuuuccuguucag

SEQ ID NO: 2102715 - RNA, 14 nt, Human
cuuuccuguucagc

SEQ ID NO: 2102716 - RNA, 16 nt, Human
cuuuccuguucagcau

SEQ ID NO: 2102717 - RNA, 17 nt, Human
cuuuccuguucagcauu

SEQ ID NO: 2102718 - RNA, 18 nt, Human
cuuuccuguucagcauuc

SEQ ID NO: 2102719 - RNA, 19 nt, Human
cuuuccuguucagcauucu

SEQ ID NO: 2102720 - RNA, 15 nt, Human
cuuuccuuccauccc

SEQ ID NO: 2102721 - RNA, 11 nt, Human
cuuuccuuccu

SEQ ID NO: 2102722 - RNA, 14 nt, Human
cuuuccuuccucuc

SEQ ID NO: 2102723 - RNA, 16 nt, Human
cuuuccuuccucucau

SEQ ID NO: 2102724 - RNA, 15 nt, Human
cuuuccuuccuuccc

SEQ ID NO: 2102725 - RNA, 16 nt, Human
cuuuccuuccuucccu

SEQ ID NO: 2102726 - RNA, 21 nt, Human
cuuuccuggagagucucacuc

SEQ ID NO: 2102727 - RNA, 20 nt, Human
cuuucagggaauuucaggaa

SEQ ID NO: 2102728 - RNA, 16 nt, Human
cuuucacaaccuucug

SEQ ID NO: 2102729 - RNA, 20 nt, Human
cuuucacaaaauuuuauucc

SEQ ID NO: 2102730 - RNA, 14 nt, Human
cuuucacaaccuuc

SEQ ID NO: 2102731 - RNA, 17 nt, Human
cuuucacaaaauuuuau

SEQ ID NO: 2102732 - RNA, 21 nt, Human
cuuucaaugguuugcaaggaa

SEQ ID NO: 2102733 - RNA, 22 nt, Human
cuuucaaugguuugcaaggaag

SEQ ID NO: 2102734 - RNA, 20 nt, Human
cuuucaaugguuugcaagga

SEQ ID NO: 2102735 - RNA, 22 nt, Human
cuuugauauuuucaacgcagcc

SEQ ID NO: 2102736 - RNA, 15 nt, Human
cuuugaucagguggg

SEQ ID NO: 2102737 - RNA, 21 nt, Human
cuuugaugauuaauucaccuu

SEQ ID NO: 2102738 - RNA, 17 nt, Human
cuuucuagcuaauggaa

SEQ ID NO: 2102739 - RNA, 17 nt, Human
cuuucuacccagcgagc

SEQ ID NO: 2102740 - RNA, 21 nt, Human
cuuugggcugcccuggugcug

SEQ ID NO: 2102741 - RNA, 20 nt, Human
cuuugggcugcccuggugcu

SEQ ID NO: 2102742 - RNA, 19 nt, Human
cuuugggcugcccuggugc

SEQ ID NO: 2102743 - RNA, 15 nt, Human
cuuugggcugcccug

SEQ ID NO: 2102744 - RNA, 18 nt, Human
cuuugaugucauauggaa

SEQ ID NO: 2102745 - RNA, 14 nt, Human
cuuugggcugcccu

SEQ ID NO: 2102746 - RNA, 21 nt, Human
cuuuguaaguaaacugcccug

SEQ ID NO: 2102747 - RNA, 22 nt, Human
cuuuguaaguaaacugcccugu

SEQ ID NO: 2102748 - RNA, 14 nt, Human
cuuuuaugagcuca

SEQ ID NO: 2102749 - RNA, 21 nt, Human
cuuuuaugagcucauguagca

SEQ ID NO: 2102750 - RNA, 22 nt, Human
cuuuuaugagcucauguagcaa

SEQ ID NO: 2102751 - RNA, 19 nt, Human
cuuuuaucacgauauuauu

SEQ ID NO: 2102752 - RNA, 17 nt, Human
cuuuuauccacuuaccu

SEQ ID NO: 2102753 - RNA, 21 nt, Human
cuuuuaguuuuaguugcagaa

SEQ ID NO: 2102754 - RNA, 22 nt, Human
cuuuuaguuuuaguugcagaaa

SEQ ID NO: 2102755 - RNA, 19 nt, Human
cuuuuaguuguaucucuuu

SEQ ID NO: 2102756 - RNA, 20 nt, Human
cuuuuaguuguaucucuuuu

SEQ ID NO: 2102757 - RNA, 21 nt, Human
cuuuuaguuguaucucuuuug

SEQ ID NO: 2102758 - RNA, 18 nt, Human
cuuuuaguuguaucucuu

SEQ ID NO: 2102759 - RNA, 18 nt, Human
cuuuuaguacccaccuga

SEQ ID NO: 2102760 - RNA, 20 nt, Human
cuuuuaguacccaccugagc

SEQ ID NO: 2102761 - RNA, 21 nt, Human
cuuuuaguacccaccugagcu

SEQ ID NO: 2102762 - RNA, 22 nt, Human
cuuuuaguacccaccugagcuu

SEQ ID NO: 2102763 - RNA, 13 nt, Human
cuuuuauaaaaaa

SEQ ID NO: 2102764 - RNA, 20 nt, Human
cuuuuauaaaaaaaaugaaa

SEQ ID NO: 2102765 - RNA, 21 nt, Human
cuuuuauaaaaaaaaugaaau

SEQ ID NO: 2102766 - RNA, 22 nt, Human
cuuuuauaaaaaaaaugaaaug

SEQ ID NO: 2102767 - RNA, 23 nt, Human
cuuuuauaaaaaaaaugaaaugu

SEQ ID NO: 2102768 - RNA, 19 nt, Human
cuuuguaaucguuaugugu

SEQ ID NO: 2102769 - RNA, 21 nt, Human
cuuuguaaucguuaugugugu

SEQ ID NO: 2102770 - RNA, 13 nt, Human
gaaacuuugugcu

SEQ ID NO: 2102771 - RNA, 11 nt, Human
gaaacuuuucu

SEQ ID NO: 2102772 - RNA, 21 nt, Human
gaaacuuuucuuaaaaaguua

SEQ ID NO: 2102773 - RNA, 20 nt, Human
gaaagacuaucuaaauguug

SEQ ID NO: 2102774 - RNA, 19 nt, Human
gaaaggcucugaaagccag

SEQ ID NO: 2102775 - RNA, 15 nt, Human
gaaaggcucugaaag

SEQ ID NO: 2102776 - RNA, 17 nt, Human
gaaaggcucugaaagcc

SEQ ID NO: 2102777 - RNA, 19 nt, Human
gaaagggugcugcuucccu

SEQ ID NO: 2102778 - RNA, 16 nt, Human
gaaagggugcugcuuc

SEQ ID NO: 2102779 - RNA, 22 nt, Human
gaaagggacuuggaagcuccgc

SEQ ID NO: 2102780 - RNA, 17 nt, Human
gaaagggagcagagaag

SEQ ID NO: 2102781 - RNA, 22 nt, Human
gaaagggagcuaucaggaacag

SEQ ID NO: 2102782 - RNA, 19 nt, Human
gaaagggacuuggaagcuc

SEQ ID NO: 2102783 - RNA, 18 nt, Human
gaaagguuacccuguaac

SEQ ID NO: 2102784 - RNA, 15 nt, Human
gaaaauuggacauua

SEQ ID NO: 2102785 - RNA, 19 nt, Human
gaaaauggaaguggcaaua

SEQ ID NO: 2102786 - RNA, 16 nt, Human
gaaaauguaaguaaau

SEQ ID NO: 2102787 - RNA, 20 nt, Human
gaaaauguaaguaaaugucu

SEQ ID NO: 2102788 - RNA, 13 nt, Human
gaaaauugaauuu

SEQ ID NO: 2102789 - RNA, 16 nt, Human
gaaaauugaauuuaac

SEQ ID NO: 2102790 - RNA, 17 nt, Human
gaaaauugaauuuaaca

SEQ ID NO: 2102791 - RNA, 18 nt, Human
gaaaauugaauuuaacaa

SEQ ID NO: 2102792 - RNA, 19 nt, Human
gaaaauugaauuuaacaau

SEQ ID NO: 2102793 - RNA, 20 nt, Human
gaaaauugaauuuaacaaug

SEQ ID NO: 2102794 - RNA, 22 nt, Human
gaaaauugaauuuaacaaugcg

SEQ ID NO: 2102795 - RNA, 14 nt, Human
gaaaauuccagaaa

SEQ ID NO: 2102796 - RNA, 18 nt, Human
gaaaauuccagaaaggau

SEQ ID NO: 2102797 - RNA, 20 nt, Human
gaaaauuccagaaaggauau

SEQ ID NO: 2102798 - RNA, 15 nt, Human
gaaaauguaugugua

SEQ ID NO: 2102799 - RNA, 21 nt, Human
gaaaaugucagaaaccaguua

SEQ ID NO: 2102800 - RNA, 22 nt, Human
gaaaaugucagaaaccaguuau

SEQ ID NO: 2102801 - RNA, 23 nt, Human
gaaaaugucagaaaccaguuaug

SEQ ID NO: 2102802 - RNA, 23 nt, Human
gaaaaugcuguauuagucacaga

SEQ ID NO: 2102803 - RNA, 18 nt, Human
gaaaagaaaaaugagccu

SEQ ID NO: 2102804 - RNA, 20 nt, Human
gaaaaaaaauaacacagaga

SEQ ID NO: 2102805 - RNA, 23 nt, Human
gaaaaacucugggaaauaagaga

SEQ ID NO: 2102806 - RNA, 20 nt, Human
gaaaaacuuccaugaggcca

SEQ ID NO: 2102807 - RNA, 20 nt, Human
cuuuugcccuucacaguguu

SEQ ID NO: 2102808 - RNA, 21 nt, Human
cuuuugcccuucacaguguuu

SEQ ID NO: 2102809 - RNA, 16 nt, Human
cuuuuggaaucuagaa

SEQ ID NO: 2102810 - RNA, 18 nt, Human
cuuuuggaaucuagaaga

SEQ ID NO: 2102811 - RNA, 20 nt, Human
cuuuuggaaucuagaagaaa

SEQ ID NO: 2102812 - RNA, 21 nt, Human
cuuuuggaaucuagaagaaau

SEQ ID NO: 2102813 - RNA, 22 nt, Human
cuuuuggaaucuagaagaaaug

SEQ ID NO: 2102814 - RNA, 23 nt, Human
cuuuuggaaucuagaagaaauga

SEQ ID NO: 2102815 - RNA, 18 nt, Human
cuuuugucuaugggacuc

SEQ ID NO: 2102816 - RNA, 20 nt, Human
cuuuuggcccccgagcuggg

SEQ ID NO: 2102817 - RNA, 13 nt, Human
cuuuuguaaaugu

SEQ ID NO: 2102818 - RNA, 15 nt, Human
cuuuuggcacugaga

SEQ ID NO: 2102819 - RNA, 13 nt, Human
cuuuuggcccccg

SEQ ID NO: 2102820 - RNA, 22 nt, Human
cuuuuuuuuuuuuuaaagacag

SEQ ID NO: 2102821 - RNA, 23 nt, Human
cuuuuuuuuuuuuuaaagacaga

SEQ ID NO: 2102822 - RNA, 19 nt, Human
gaaaaaaaaguuucagaga

SEQ ID NO: 2102823 - RNA, 22 nt, Human
gaaaaaaaaguuucagagaagu

SEQ ID NO: 2102824 - RNA, 14 nt, Human
gaaaaaaaacacac

SEQ ID NO: 2102825 - RNA, 18 nt, Human
gaaaaacaucugaaagcc

SEQ ID NO: 2102826 - RNA, 15 nt, Human
gaaaaacaauaagag

SEQ ID NO: 2102827 - RNA, 20 nt, Human
gaaaaaaaauguucuuuggg

SEQ ID NO: 2102828 - RNA, 13 nt, Human
gaaaaaaacuuuu

SEQ ID NO: 2102829 - RNA, 14 nt, Human
gaaaaaaacuuuua

SEQ ID NO: 2102830 - RNA, 17 nt, Human
gaaaaaaacuuuuauaa

SEQ ID NO: 2102831 - RNA, 23 nt, Human
gaaaaaaacuuuuauaaauuaaa

SEQ ID NO: 2102832 - RNA, 20 nt, Human
gaaaaaaaguuugccagaag

SEQ ID NO: 2102833 - RNA, 19 nt, Human
gaaaaaaauaauuuuauga

SEQ ID NO: 2102834 - RNA, 23 nt, Human
gaaaaaaauaauuuuaugaacug

SEQ ID NO: 2102835 - RNA, 18 nt, Human
gaaaaaaaguuugccaga

SEQ ID NO: 2102836 - RNA, 13 nt, Human
gaaaaaaaugacu

SEQ ID NO: 2102837 - RNA, 21 nt, Human
cuguaggaagguuaauguuca

SEQ ID NO: 2102838 - RNA, 19 nt, Human
cugucacgcagccaccagg

SEQ ID NO: 2102839 - RNA, 23 nt, Human
cugucaccaagcucacaguuccu

SEQ ID NO: 2102840 - RNA, 14 nt, Human
cugucaccaagcuc

SEQ ID NO: 2102841 - RNA, 13 nt, Human
cuguaaaacuuua

SEQ ID NO: 2102842 - RNA, 14 nt, Human
cuguaaaacuuuau

SEQ ID NO: 2102843 - RNA, 20 nt, Human
cuguaaaacuuuauuuuaua

SEQ ID NO: 2102844 - RNA, 16 nt, Human
cuguaaaaugaaauua

SEQ ID NO: 2102845 - RNA, 15 nt, Human
cuguaaaaugaaauu

SEQ ID NO: 2102846 - RNA, 16 nt, Human
cugucauuugagcagg

SEQ ID NO: 2102847 - RNA, 18 nt, Human
cugucauuugagcagggc

SEQ ID NO: 2102848 - RNA, 17 nt, Human
cugucauuugagcaggg

SEQ ID NO: 2102849 - RNA, 20 nt, Human
cugucauuugagcagggcuc

SEQ ID NO: 2102850 - RNA, 18 nt, Human
cuguccugaccugucuca

SEQ ID NO: 2102851 - RNA, 21 nt, Human
cugucagaugggaagacauga

SEQ ID NO: 2102852 - RNA, 22 nt, Human
cugucagaugggaagacaugaa

SEQ ID NO: 2102853 - RNA, 14 nt, Human
cugucacuguuucu

SEQ ID NO: 2102854 - RNA, 19 nt, Human
cugucacuguuucucugcu

SEQ ID NO: 2102855 - RNA, 20 nt, Human
cugucacuguuucucugcug

SEQ ID NO: 2102856 - RNA, 15 nt, Human
cugugaagagaacca

SEQ ID NO: 2102857 - RNA, 14 nt, Human
cugugaacuugggg

SEQ ID NO: 2102858 - RNA, 15 nt, Human
cugugaacuugggga

SEQ ID NO: 2102859 - RNA, 16 nt, Human
cugugaacuuggggaa

SEQ ID NO: 2102860 - RNA, 22 nt, Human
cugugaacuuggggaacaaggg

SEQ ID NO: 2102861 - RNA, 14 nt, Human
cugugcucuggaca

SEQ ID NO: 2102862 - RNA, 20 nt, Human
cugugagacccccacaccuc

SEQ ID NO: 2102863 - RNA, 23 nt, Human
cugugagacccccacaccucagu

SEQ ID NO: 2102864 - RNA, 16 nt, Human
cugugagacccccaca

SEQ ID NO: 2102865 - RNA, 17 nt, Human
cugugagacccccacac

SEQ ID NO: 2102866 - RNA, 18 nt, Human
cugugagacccccacacc

SEQ ID NO: 2102867 - RNA, 19 nt, Human
cugugagacccccacaccu

SEQ ID NO: 2102868 - RNA, 13 nt, Human
cugucgcccaguc

SEQ ID NO: 2102869 - RNA, 14 nt, Human
cuggugagccaagc

SEQ ID NO: 2102870 - RNA, 13 nt, Human
cuggugaggaagc

SEQ ID NO: 2102871 - RNA, 18 nt, Human
cuggugaggaagcuccag

SEQ ID NO: 2102872 - RNA, 19 nt, Human
cuggugaggaagcuccagu

SEQ ID NO: 2102873 - RNA, 14 nt, Human
cuggugaggagcac

SEQ ID NO: 2102874 - RNA, 16 nt, Human
cuggugagcagacugg

SEQ ID NO: 2102875 - RNA, 21 nt, Human
cuggguucccuuuccuuccau

SEQ ID NO: 2102876 - RNA, 16 nt, Human
cuggguucccuuuccu

SEQ ID NO: 2102877 - RNA, 20 nt, Human
cuggguucccuuuccuucca

SEQ ID NO: 2102878 - RNA, 14 nt, Human
cuggguucccuuuc

SEQ ID NO: 2102879 - RNA, 14 nt, Human
cuggguucacugca

SEQ ID NO: 2102880 - RNA, 23 nt, Human
cuggguggcaccagcagccugga

SEQ ID NO: 2102881 - RNA, 19 nt, Human
cuggggccucggagccuca

SEQ ID NO: 2102882 - RNA, 20 nt, Human
cuggggccucggagccucau

SEQ ID NO: 2102883 - RNA, 22 nt, Human
cuggguggcaccagcagccugg

SEQ ID NO: 2102884 - RNA, 13 nt, Human
cugggcagaaggc

SEQ ID NO: 2102885 - RNA, 17 nt, Human
cugggcagaaggccaag

SEQ ID NO: 2102886 - RNA, 16 nt, Human
cugggcagaaggccaa

SEQ ID NO: 2102887 - RNA, 14 nt, Human
cugggcagaaggcc

SEQ ID NO: 2102888 - RNA, 17 nt, Human
cuggggaaauaacagcu

SEQ ID NO: 2102889 - RNA, 12 nt, Human
cugggcagcugu

SEQ ID NO: 2102890 - RNA, 16 nt, Human
cuggggcaagucccug

SEQ ID NO: 2102891 - RNA, 13 nt, Human
cuggggccccacc

SEQ ID NO: 2102892 - RNA, 15 nt, Human
cuggggccccaccgu

SEQ ID NO: 2102893 - RNA, 12 nt, Human
cuggggccccuu

SEQ ID NO: 2102894 - RNA, 14 nt, Human
cuggggcaaguccc

SEQ ID NO: 2102895 - RNA, 21 nt, Human
cuggggcaagucccugacucu

SEQ ID NO: 2102896 - RNA, 19 nt, Human
cuggggaaauaacagcugu

SEQ ID NO: 2102897 - RNA, 22 nt, Human
cuggggaaauaacagcuguggc

SEQ ID NO: 2102898 - RNA, 13 nt, Human
cuggggaagcaaa

SEQ ID NO: 2102899 - RNA, 23 nt, Human
cugggacccuuuccuuccuuccc

SEQ ID NO: 2102900 - RNA, 15 nt, Human
cugggacccuuuccu

SEQ ID NO: 2102901 - RNA, 19 nt, Human
cugggacccuuuccuuccu

SEQ ID NO: 2102902 - RNA, 20 nt, Human
cugggacccuuuccuuccuu

SEQ ID NO: 2102903 - RNA, 13 nt, Human
cuggcucaucucu

SEQ ID NO: 2102904 - RNA, 21 nt, Human
cuggcucauauuccugcagcc

SEQ ID NO: 2102905 - RNA, 22 nt, Human
cuggcucauauuccugcagccu

SEQ ID NO: 2102906 - RNA, 23 nt, Human
cuggcucauauuccugcagccug

SEQ ID NO: 2102907 - RNA, 24 nt, Human
cuggcucauauuccugcagccugg

SEQ ID NO: 2102908 - RNA, 12 nt, Human
cuggccccucac

SEQ ID NO: 2102909 - RNA, 13 nt, Human
cuggccccucacc

SEQ ID NO: 2102910 - RNA, 15 nt, Human
cuggccccucaccug

SEQ ID NO: 2102911 - RNA, 22 nt, Human
cuggccccucaccugggcaccu

SEQ ID NO: 2102912 - RNA, 21 nt, Human
cuggcucagccucaaaugcag

SEQ ID NO: 2102913 - RNA, 19 nt, Human
cuggcucauauuccugcag

SEQ ID NO: 2102914 - RNA, 20 nt, Human
cuggcucauauuccugcagc

SEQ ID NO: 2102915 - RNA, 13 nt, Human
cugggacacaguu

SEQ ID NO: 2102916 - RNA, 12 nt, Human
cugggacacagu

SEQ ID NO: 2102917 - RNA, 14 nt, Human
cugggacccuuucc

SEQ ID NO: 2102918 - RNA, 19 nt, Human
cugggacacuuaacagaug

SEQ ID NO: 2102919 - RNA, 23 nt, Human
cugggacacuuaacagaugcaau

SEQ ID NO: 2102920 - RNA, 15 nt, Human
cuggcucccacaggc

SEQ ID NO: 2102921 - RNA, 17 nt, Human
cuggcagggugggaugg

SEQ ID NO: 2102922 - RNA, 18 nt, Human
cuggccccuagaaucagc

SEQ ID NO: 2102923 - RNA, 20 nt, Human
cuggccccuagaaucagccu

SEQ ID NO: 2102924 - RNA, 18 nt, Human
cuggcagggugggaugga

SEQ ID NO: 2102925 - RNA, 18 nt, Human
cuggcaggaugacccugc

SEQ ID NO: 2102926 - RNA, 20 nt, Human
cuggcaggaugacccugcga

SEQ ID NO: 2102927 - RNA, 13 nt, Human
cugcuucagccuc

SEQ ID NO: 2102928 - RNA, 16 nt, Human
cugcuucagccucccg

SEQ ID NO: 2102929 - RNA, 14 nt, Human
cugcuucagccucc

SEQ ID NO: 2102930 - RNA, 22 nt, Human
cugcuuuuuaaagaaugcucuu

SEQ ID NO: 2102931 - RNA, 16 nt, Human
cuggaaauauuaagaa

SEQ ID NO: 2102932 - RNA, 23 nt, Human
cuggaaauaucaguuacucagcc

SEQ ID NO: 2102933 - RNA, 15 nt, Human
cuggacuggcuagag

SEQ ID NO: 2102934 - RNA, 21 nt, Human
cuggacuggcuagaguccuca

SEQ ID NO: 2102935 - RNA, 21 nt, Human
cuggacugguggccccugccu

SEQ ID NO: 2102936 - RNA, 13 nt, Human
cuggacuggcugu

SEQ ID NO: 2102937 - RNA, 16 nt, Human
cuggacuggcuguccu

SEQ ID NO: 2102938 - RNA, 11 nt, Human
cugcugacagu

SEQ ID NO: 2102939 - RNA, 23 nt, Human
cugcugacagacacaggcccggc

SEQ ID NO: 2102940 - RNA, 21 nt, Human
cugcugacagacacaggcccg

SEQ ID NO: 2102941 - RNA, 20 nt, Human
cugcugacagacacaggccc

SEQ ID NO: 2102942 - RNA, 19 nt, Human
cugcugacagacacaggcc

SEQ ID NO: 2102943 - RNA, 18 nt, Human
cugcugacagacacaggc

SEQ ID NO: 2102944 - RNA, 15 nt, Human
cugcugacagacaca

SEQ ID NO: 2102945 - RNA, 12 nt, Human
cugcccugucua

SEQ ID NO: 2102946 - RNA, 18 nt, Human
cugccucgaacuggcugc

SEQ ID NO: 2102947 - RNA, 17 nt, Human
cugccucgaacuggcug

SEQ ID NO: 2102948 - RNA, 15 nt, Human
cugccucgaacuggc

SEQ ID NO: 2102949 - RNA, 22 nt, Human
cugccuggguuccaauccuggc

SEQ ID NO: 2102950 - RNA, 15 nt, Human
cugccuguucagcuc

SEQ ID NO: 2102951 - RNA, 14 nt, Human
cugccuguucagcu

SEQ ID NO: 2102952 - RNA, 13 nt, Human
cugccuguggagu

SEQ ID NO: 2102953 - RNA, 14 nt, Human
cugccugugcugug

SEQ ID NO: 2102954 - RNA, 16 nt, Human
cugcuaauuccccaga

SEQ ID NO: 2102955 - RNA, 16 nt, Human
cugcuaauaaaaccca

SEQ ID NO: 2102956 - RNA, 14 nt, Human
cugcuaaucuucag

SEQ ID NO: 2102957 - RNA, 18 nt, Human
cugcuaaucuucagggca

SEQ ID NO: 2102958 - RNA, 23 nt, Human
cugcuacaaauacucuuaggaag

SEQ ID NO: 2102959 - RNA, 17 nt, Human
cugcuaccucacugggg

SEQ ID NO: 2102960 - RNA, 15 nt, Human
cugcuaccucacugg

SEQ ID NO: 2102961 - RNA, 13 nt, Human
cugcuaccucacu

SEQ ID NO: 2102962 - RNA, 14 nt, Human
cugcuaccucacug

SEQ ID NO: 2102963 - RNA, 12 nt, Human
cugcuaccucac

SEQ ID NO: 2102964 - RNA, 17 nt, Human
cugcuacccagaaauca

SEQ ID NO: 2102965 - RNA, 13 nt, Human
cugcauguuacau

SEQ ID NO: 2102966 - RNA, 20 nt, Human
cugcauucacccagacagcu

SEQ ID NO: 2102967 - RNA, 21 nt, Human
cugcauucacccagacagcuc

SEQ ID NO: 2102968 - RNA, 22 nt, Human
cugcauucacccagacagcucc

SEQ ID NO: 2102969 - RNA, 15 nt, Human
cugcauuagaaauua

SEQ ID NO: 2102970 - RNA, 18 nt, Human
cugcauguauaaaugaag

SEQ ID NO: 2102971 - RNA, 15 nt, Human
cugcauuacauuccu

SEQ ID NO: 2102972 - RNA, 20 nt, Human
cugcauucaggaucaaaccc

SEQ ID NO: 2102973 - RNA, 19 nt, Human
cugcauucugccgugugcc

SEQ ID NO: 2102974 - RNA, 22 nt, Human
cugcauugccugcggucaaggc

SEQ ID NO: 2102975 - RNA, 23 nt, Human
cugcauugccugcggucaaggcc

SEQ ID NO: 2102976 - RNA, 17 nt, Human
cugcauugagaacugca

SEQ ID NO: 2102977 - RNA, 13 nt, Human
cugcauuuagcac

SEQ ID NO: 2102978 - RNA, 14 nt, Human
cugcauuuagcaca

SEQ ID NO: 2102979 - RNA, 15 nt, Human
cugcauuuagcacaa

SEQ ID NO: 2102980 - RNA, 17 nt, Human
cugcauuuagcacaaaa

SEQ ID NO: 2102981 - RNA, 18 nt, Human
cugcauuuagcacaaaaa

SEQ ID NO: 2102982 - RNA, 23 nt, Human
cugcauuuagcacaaaaaaaauu

SEQ ID NO: 2102983 - RNA, 13 nt, Human
cugcauuugugaa

SEQ ID NO: 2102984 - RNA, 22 nt, Human
cugcauuugugaaaugauggug

SEQ ID NO: 2102985 - RNA, 17 nt, Human
cugcauuugugaaauga

SEQ ID NO: 2102986 - RNA, 15 nt, Human
cugcauuugugaaau

SEQ ID NO: 2102987 - RNA, 14 nt, Human
cugcauuugugaaa

SEQ ID NO: 2102988 - RNA, 17 nt, Human
cugcauuuucaccccac

SEQ ID NO: 2102989 - RNA, 18 nt, Human
cugcauuuucaccccacc

SEQ ID NO: 2102990 - RNA, 20 nt, Human
cugcauuuucugaaacuaau

SEQ ID NO: 2102991 - RNA, 15 nt, Human
cugcauuuucugggu

SEQ ID NO: 2102992 - RNA, 17 nt, Human
cugcauuuucuggguuc

SEQ ID NO: 2102993 - RNA, 21 nt, Human
cugcauuuucuggguucuggg

SEQ ID NO: 2102994 - RNA, 20 nt, Human
cugccaaauuuuggccaaag

SEQ ID NO: 2102995 - RNA, 21 nt, Human
cugccaaagggaaauaucauu

SEQ ID NO: 2102996 - RNA, 18 nt, Human
cugcauuuuuagaccauu

SEQ ID NO: 2102997 - RNA, 18 nt, Human
cugccaaggccagagugg

SEQ ID NO: 2102998 - RNA, 21 nt, Human
cugccaaggccagaguggccu

SEQ ID NO: 2102999 - RNA, 22 nt, Human
cugccaaggccagaguggccug

SEQ ID NO: 2103000 - RNA, 14 nt, Human
cugccaagccccau

SEQ ID NO: 2103001 - RNA, 15 nt, Human
cugccaagccccauc

SEQ ID NO: 2103002 - RNA, 21 nt, Human
cugccaagccccauccugccg

SEQ ID NO: 2103003 - RNA, 15 nt, Human
cugccaaggccagag

SEQ ID NO: 2103004 - RNA, 23 nt, Human
cugccauauucuguuggccagug

SEQ ID NO: 2103005 - RNA, 22 nt, Human
cugccauauucuguuggccagu

SEQ ID NO: 2103006 - RNA, 21 nt, Human
cugccauauucuguuggccag

SEQ ID NO: 2103007 - RNA, 20 nt, Human
cugccauauucuguuggcca

SEQ ID NO: 2103008 - RNA, 23 nt, Human
cugccaaggccagaguggccugg

SEQ ID NO: 2103009 - RNA, 13 nt, Human
cugccaggccccc

SEQ ID NO: 2103010 - RNA, 22 nt, Human
cugccaggcccccaagccugca

SEQ ID NO: 2103011 - RNA, 12 nt, Human
cugccauccagg

SEQ ID NO: 2103012 - RNA, 18 nt, Human
cugccccagcucuggcuu

SEQ ID NO: 2103013 - RNA, 19 nt, Human
cugccccagcucuggcuuc

SEQ ID NO: 2103014 - RNA, 18 nt, Human
cugccaggcccccaagcc

SEQ ID NO: 2103015 - RNA, 21 nt, Human
cugccaggcccccaagccugc

SEQ ID NO: 2103016 - RNA, 16 nt, Human
cugccccagcucuggc

SEQ ID NO: 2103017 - RNA, 18 nt, Human
cugcccccuccccuucac

SEQ ID NO: 2103018 - RNA, 23 nt, Human
cugcccccuccccuucacaccau

SEQ ID NO: 2103019 - RNA, 19 nt, Human
cugccccagggcucccggc

SEQ ID NO: 2103020 - RNA, 12 nt, Human
cugccccauccc

SEQ ID NO: 2103021 - RNA, 15 nt, Human
cugccccucaugcca

SEQ ID NO: 2103022 - RNA, 13 nt, Human
cugccccucccag

SEQ ID NO: 2103023 - RNA, 14 nt, Human
cugccccucccaga

SEQ ID NO: 2103024 - RNA, 15 nt, Human
cugccccucccagaa

SEQ ID NO: 2103025 - RNA, 16 nt, Human
cugccccucccagaac

SEQ ID NO: 2103026 - RNA, 13 nt, Human
cugccccuccccc

SEQ ID NO: 2103027 - RNA, 14 nt, Human
cugccccuccccca

SEQ ID NO: 2103028 - RNA, 22 nt, Human
cugccccucccccaacccccac

SEQ ID NO: 2103029 - RNA, 13 nt, Human
cugccccucccug

SEQ ID NO: 2103030 - RNA, 16 nt, Human
cugccccucccugcca

SEQ ID NO: 2103031 - RNA, 22 nt, Human
cugccccucccugccagcaccc

SEQ ID NO: 2103032 - RNA, 19 nt, Human
cugcccuggugcugccaca

SEQ ID NO: 2103033 - RNA, 18 nt, Human
cugcccuggugcugccac

SEQ ID NO: 2103034 - RNA, 16 nt, Human
cugcccuggugcugcc

SEQ ID NO: 2103035 - RNA, 17 nt, Human
cugcccuggugcugcca

SEQ ID NO: 2103036 - RNA, 21 nt, Human
cugcccuggugcugccacacu

SEQ ID NO: 2103037 - RNA, 20 nt, Human
cugcccuggugcugccacac

SEQ ID NO: 2103038 - RNA, 18 nt, Human
cugaccuuugucaucuuu

SEQ ID NO: 2103039 - RNA, 21 nt, Human
cugaccuugaacuccugggcu

SEQ ID NO: 2103040 - RNA, 22 nt, Human
cugaccuugaacuccugggcuc

SEQ ID NO: 2103041 - RNA, 14 nt, Human
cugagacucagaca

SEQ ID NO: 2103042 - RNA, 17 nt, Human
cugagacucagacagga

SEQ ID NO: 2103043 - RNA, 20 nt, Human
cugagacucagacaggaaag

SEQ ID NO: 2103044 - RNA, 21 nt, Human
cugagacucagacaggaaagg

SEQ ID NO: 2103045 - RNA, 22 nt, Human
aacuucuccccugguagaaaga

SEQ ID NO: 2103046 - RNA, 23 nt, Human
aacuguacuagucugugugggac

SEQ ID NO: 2103047 - RNA, 20 nt, Human
aacuuccaagaccugacuca

SEQ ID NO: 2103048 - RNA, 19 nt, Human
aacuguagaaaugaugaug

SEQ ID NO: 2103049 - RNA, 20 nt, Human
aacuucagcuagagcuucaa

SEQ ID NO: 2103050 - RNA, 13 nt, Human
aacuuccaauuua

SEQ ID NO: 2103051 - RNA, 12 nt, Human
aacuucauuuga

SEQ ID NO: 2103052 - RNA, 14 nt, Human
aacuucauuugaug

SEQ ID NO: 2103053 - RNA, 18 nt, Human
aacuguacuuuuaaggca

SEQ ID NO: 2103054 - RNA, 14 nt, Human
aacuguagaaauga

SEQ ID NO: 2103055 - RNA, 15 nt, Human
aacuguagaaaugau

SEQ ID NO: 2103056 - RNA, 16 nt, Human
aacuguagaaaugaug

SEQ ID NO: 2103057 - RNA, 17 nt, Human
aacuguagaaaugauga

SEQ ID NO: 2103058 - RNA, 21 nt, Human
aacugguuuguugcagccaaa

SEQ ID NO: 2103059 - RNA, 13 nt, Human
gugaugccucccu

SEQ ID NO: 2103060 - RNA, 22 nt, Human
gugaugcuaaagguuguauugc

SEQ ID NO: 2103061 - RNA, 22 nt, Human
gugaugaagaaaagugggccag

SEQ ID NO: 2103062 - RNA, 22 nt, Human
gugaugaucagcuguuugucau

SEQ ID NO: 2103063 - RNA, 15 nt, Human
gugaugccacacaga

SEQ ID NO: 2103064 - RNA, 17 nt, Human
gugaugccacacagagu

SEQ ID NO: 2103065 - RNA, 19 nt, Human
gugaugccacacagagugg

SEQ ID NO: 2103066 - RNA, 13 nt, Human
gugcaugugugug

SEQ ID NO: 2103067 - RNA, 14 nt, Human
gugcaugugugugc

SEQ ID NO: 2103068 - RNA, 15 nt, Human
gugcaugugugugcu

SEQ ID NO: 2103069 - RNA, 18 nt, Human
gugcaugugugugcucag

SEQ ID NO: 2103070 - RNA, 14 nt, Human
gugcauuacagaga

SEQ ID NO: 2103071 - RNA, 16 nt, Human
gugcauuacagagagg

SEQ ID NO: 2103072 - RNA, 23 nt, Human
gugcauuacagagaggagaaaca

SEQ ID NO: 2103073 - RNA, 18 nt, Human
gugccacccaccagggcg

SEQ ID NO: 2103074 - RNA, 17 nt, Human
gugccacugcccgagcu

SEQ ID NO: 2103075 - RNA, 18 nt, Human
gugccacugcccgagcug

SEQ ID NO: 2103076 - RNA, 20 nt, Human
gugccuggguggggcugcuc

SEQ ID NO: 2103077 - RNA, 21 nt, Human
gugccuggguggggcugcucc

SEQ ID NO: 2103078 - RNA, 12 nt, Human
gugccucugccu

SEQ ID NO: 2103079 - RNA, 22 nt, Human
gugccuggguggggcugcuccu

SEQ ID NO: 2103080 - RNA, 23 nt, Human
gugccuggguggggcugcuccuc

SEQ ID NO: 2103081 - RNA, 15 nt, Human
gugccugugaggcag

SEQ ID NO: 2103082 - RNA, 16 nt, Human
gugccugugaggcagg

SEQ ID NO: 2103083 - RNA, 17 nt, Human
gugccugugaggcaggg

SEQ ID NO: 2103084 - RNA, 23 nt, Human
gugccacugcccgagcuggugca

SEQ ID NO: 2103085 - RNA, 19 nt, Human
gugccacugcccgagcugg

SEQ ID NO: 2103086 - RNA, 20 nt, Human
gugccacugcccgagcuggu

SEQ ID NO: 2103087 - RNA, 21 nt, Human
gugccacugcccgagcuggug

SEQ ID NO: 2103088 - RNA, 22 nt, Human
gugccacugcccgagcuggugc

SEQ ID NO: 2103089 - RNA, 13 nt, Human
gugcaugggugaa

SEQ ID NO: 2103090 - RNA, 18 nt, Human
gugcaugggugaagggag

SEQ ID NO: 2103091 - RNA, 21 nt, Human
gugcacacaccagagcccacc

SEQ ID NO: 2103092 - RNA, 20 nt, Human
gugcacagacgucccuccac

SEQ ID NO: 2103093 - RNA, 22 nt, Human
gugcacagacgucccuccacgu

SEQ ID NO: 2103094 - RNA, 22 nt, Human
gugcaauuguaggggugugugu

SEQ ID NO: 2103095 - RNA, 14 nt, Human
gugcaacccuuacc

SEQ ID NO: 2103096 - RNA, 23 nt, Human
gugcaacccuuaccccuuagccu

SEQ ID NO: 2103097 - RNA, 16 nt, Human
gugaugguuccccugu

SEQ ID NO: 2103098 - RNA, 14 nt, Human
gugaugguuccccu

SEQ ID NO: 2103099 - RNA, 22 nt, Human
gugcaaguguaugcacgugugc

SEQ ID NO: 2103100 - RNA, 17 nt, Human
gugcaagugucugugug

SEQ ID NO: 2103101 - RNA, 18 nt, Human
gugcaagugucugugugc

SEQ ID NO: 2103102 - RNA, 20 nt, Human
gugcaaguaugugagugugu

SEQ ID NO: 2103103 - RNA, 14 nt, Human
aacuggcccucuuc

SEQ ID NO: 2103104 - RNA, 15 nt, Human
aacuggcccucuucu

SEQ ID NO: 2103105 - RNA, 16 nt, Human
aacuggcccucuucuu

SEQ ID NO: 2103106 - RNA, 21 nt, Human
aacuggcccucuucuuacuug

SEQ ID NO: 2103107 - RNA, 21 nt, Human
aacuggguacuuguggacaca

SEQ ID NO: 2103108 - RNA, 16 nt, Human
aacuggguacuugugg

SEQ ID NO: 2103109 - RNA, 13 nt, Human
aacuggacucagg

SEQ ID NO: 2103110 - RNA, 15 nt, Human
aacuggacucaggau

SEQ ID NO: 2103111 - RNA, 11 nt, Human
aacuggcugca

SEQ ID NO: 2103112 - RNA, 20 nt, Human
aacuggcaucugacacaaaa

SEQ ID NO: 2103113 - RNA, 17 nt, Human
aacuggcaguuuuccau

SEQ ID NO: 2103114 - RNA, 12 nt, Human
aacuggagcccc

SEQ ID NO: 2103115 - RNA, 21 nt, Human
aacuggacucaggaugcccag

SEQ ID NO: 2103116 - RNA, 22 nt, Human
aacuggacucaggaugcccagg

SEQ ID NO: 2103117 - RNA, 20 nt, Human
aacugcuuuaucccacggaa

SEQ ID NO: 2103118 - RNA, 13 nt, Human
aacuggaagcaca

SEQ ID NO: 2103119 - RNA, 20 nt, Human
aacuggaagcauguaggaga

SEQ ID NO: 2103120 - RNA, 15 nt, Human
aacuggaaguuauuu

SEQ ID NO: 2103121 - RNA, 16 nt, Human
aacuggaaguuauuua

SEQ ID NO: 2103122 - RNA, 23 nt, Human
aacugcugacuguuuucucuuga

SEQ ID NO: 2103123 - RNA, 18 nt, Human
aacugcugaugcucaugg

SEQ ID NO: 2103124 - RNA, 19 nt, Human
aacugcugaugcucauggu

SEQ ID NO: 2103125 - RNA, 20 nt, Human
aacugcugaugcucaugguc

SEQ ID NO: 2103126 - RNA, 13 nt, Human
aacugcugcccca

SEQ ID NO: 2103127 - RNA, 22 nt, Human
aacugcugccccaaaggaagcu

SEQ ID NO: 2103128 - RNA, 20 nt, Human
aacugcugacuguuuucucu

SEQ ID NO: 2103129 - RNA, 21 nt, Human
aacugcugacuguuuucucuu

SEQ ID NO: 2103130 - RNA, 15 nt, Human
aacugcugacuguuu

SEQ ID NO: 2103131 - RNA, 16 nt, Human
aacugccuuggcuuca

SEQ ID NO: 2103132 - RNA, 17 nt, Human
aacugccuuggcuucag

SEQ ID NO: 2103133 - RNA, 15 nt, Human
aacugccucuuuccu

SEQ ID NO: 2103134 - RNA, 17 nt, Human
aacugccuuaaaacuuu

SEQ ID NO: 2103135 - RNA, 13 nt, Human
aacugcaauagag

SEQ ID NO: 2103136 - RNA, 16 nt, Human
aacugcaauagagacu

SEQ ID NO: 2103137 - RNA, 17 nt, Human
aacugcaauagagacug

SEQ ID NO: 2103138 - RNA, 18 nt, Human
aacugcaauagagacugu

SEQ ID NO: 2103139 - RNA, 22 nt, Human
aacugcaauagagacuguagau

SEQ ID NO: 2103140 - RNA, 23 nt, Human
aacugcaauagagacuguagauu

SEQ ID NO: 2103141 - RNA, 14 nt, Human
aacugaaaguguuu

SEQ ID NO: 2103142 - RNA, 16 nt, Human
aacugcaagucacaaa

SEQ ID NO: 2103143 - RNA, 17 nt, Human
aacugcaagucacaaag

SEQ ID NO: 2103144 - RNA, 18 nt, Human
aacugcaagucacaaagg

SEQ ID NO: 2103145 - RNA, 19 nt, Human
aacugcaagucacaaagga

SEQ ID NO: 2103146 - RNA, 23 nt, Human
aacugcaagucacaaaggaaugg

SEQ ID NO: 2103147 - RNA, 17 nt, Human
gugaacuugggccacug

SEQ ID NO: 2103148 - RNA, 19 nt, Human
gugaacuugggccacugug

SEQ ID NO: 2103149 - RNA, 20 nt, Human
gugaacuuggggaacaaggg

SEQ ID NO: 2103150 - RNA, 21 nt, Human
gugaacugugaggguaaaggc

SEQ ID NO: 2103151 - RNA, 22 nt, Human
gugagggcuugucauuaccaga

SEQ ID NO: 2103152 - RNA, 21 nt, Human
gugagggguauaucugggcug

SEQ ID NO: 2103153 - RNA, 17 nt, Human
gugagcaaaccugcccc

SEQ ID NO: 2103154 - RNA, 18 nt, Human
gugagcaaaccugcccca

SEQ ID NO: 2103155 - RNA, 21 nt, Human
gugagcaagaagucaaaguaa

SEQ ID NO: 2103156 - RNA, 15 nt, Human
gugaggcccagggag

SEQ ID NO: 2103157 - RNA, 22 nt, Human
gugagucgaggacagggaggug

SEQ ID NO: 2103158 - RNA, 21 nt, Human
gugaggugcagagugcccaga

SEQ ID NO: 2103159 - RNA, 12 nt, Human
gugagguccugg

SEQ ID NO: 2103160 - RNA, 13 nt, Human
gugagguccuggg

SEQ ID NO: 2103161 - RNA, 16 nt, Human
gugagguccugggggc

SEQ ID NO: 2103162 - RNA, 17 nt, Human
gugagguccugggggcc

SEQ ID NO: 2103163 - RNA, 19 nt, Human
gugagguccugggggccug

SEQ ID NO: 2103164 - RNA, 20 nt, Human
gugagguccugggggccuga

SEQ ID NO: 2103165 - RNA, 19 nt, Human
gugaggugcagagugccca

SEQ ID NO: 2103166 - RNA, 18 nt, Human
gugagggucagagaggag

SEQ ID NO: 2103167 - RNA, 21 nt, Human
aacucuucaaucucuugcacu

SEQ ID NO: 2103168 - RNA, 13 nt, Human
aacucugauguaa

SEQ ID NO: 2103169 - RNA, 20 nt, Human
aacucugauguaaaugaagu

SEQ ID NO: 2103170 - RNA, 21 nt, Human
aacucugauguaaaugaagua

SEQ ID NO: 2103171 - RNA, 19 nt, Human
aacugaaaacaagccauga

SEQ ID NO: 2103172 - RNA, 20 nt, Human
aacugaaaagacucaguguu

SEQ ID NO: 2103173 - RNA, 12 nt, Human
aacugaaaacau

SEQ ID NO: 2103174 - RNA, 15 nt, Human
aacugaaaacauaaa

SEQ ID NO: 2103175 - RNA, 18 nt, Human
aacugaaaacauaaaaag

SEQ ID NO: 2103176 - RNA, 19 nt, Human
aacugaaaacauaaaaagu

SEQ ID NO: 2103177 - RNA, 12 nt, Human
aacugaaaagac

SEQ ID NO: 2103178 - RNA, 21 nt, Human
aaccucgagguuucucaaaga

SEQ ID NO: 2103179 - RNA, 22 nt, Human
aaccucgagguuucucaaagaa

SEQ ID NO: 2103180 - RNA, 16 nt, Human
aaccucuuuucugcau

SEQ ID NO: 2103181 - RNA, 18 nt, Human
aaccucuuuucugcauca

SEQ ID NO: 2103182 - RNA, 21 nt, Human
aaccugaaaagauguuguguc

SEQ ID NO: 2103183 - RNA, 22 nt, Human
aaccugaaaagauguugugucu

SEQ ID NO: 2103184 - RNA, 19 nt, Human
aaccugacaaaaaaaaagu

SEQ ID NO: 2103185 - RNA, 16 nt, Human
aaccugagauggcccu

SEQ ID NO: 2103186 - RNA, 20 nt, Human
aaccugagauggcccucugg

SEQ ID NO: 2103187 - RNA, 21 nt, Human
aaccugagauggcccucuggu

SEQ ID NO: 2103188 - RNA, 13 nt, Human
aaccccuguggag

SEQ ID NO: 2103189 - RNA, 16 nt, Human
aacccgaggcccgcau

SEQ ID NO: 2103190 - RNA, 15 nt, Human
aacccgaggcccgca

SEQ ID NO: 2103191 - RNA, 16 nt, Human
aacccgacagagggaa

SEQ ID NO: 2103192 - RNA, 11 nt, Human
aaccccuuucc

SEQ ID NO: 2103193 - RNA, 17 nt, Human
aacccgacagagggaag

SEQ ID NO: 2103194 - RNA, 11 nt, Human
aacccacacug

SEQ ID NO: 2103195 - RNA, 20 nt, Human
aacccgacagagggaagaaa

SEQ ID NO: 2103196 - RNA, 14 nt, Human
aaccucauucccca

SEQ ID NO: 2103197 - RNA, 19 nt, Human
aaccuccuuuacccucauc

SEQ ID NO: 2103198 - RNA, 13 nt, Human
aaccucaguguca

SEQ ID NO: 2103199 - RNA, 18 nt, Human
aaccucagugucauuuau

SEQ ID NO: 2103200 - RNA, 19 nt, Human
aaccucagugucauuuaug

SEQ ID NO: 2103201 - RNA, 18 nt, Human
aaccucaggcuuccuugg

SEQ ID NO: 2103202 - RNA, 19 nt, Human
aacccccaccccacacuug

SEQ ID NO: 2103203 - RNA, 10 nt, Human
aacccccacc

SEQ ID NO: 2103204 - RNA, 11 nt, Human
aacccccaccc

SEQ ID NO: 2103205 - RNA, 12 nt, Human
aacccccacccc

SEQ ID NO: 2103206 - RNA, 13 nt, Human
aacccccacccca

SEQ ID NO: 2103207 - RNA, 15 nt, Human
aacccccaccccaca

SEQ ID NO: 2103208 - RNA, 17 nt, Human
aacccccaccccacacu

SEQ ID NO: 2103209 - RNA, 18 nt, Human
aacccccaccccacacuu

SEQ ID NO: 2103210 - RNA, 11 nt, Human
aacccagagag

SEQ ID NO: 2103211 - RNA, 12 nt, Human
aacccagagagg

SEQ ID NO: 2103212 - RNA, 13 nt, Human
aacccagaaacac

SEQ ID NO: 2103213 - RNA, 14 nt, Human
aacccagaaacacc

SEQ ID NO: 2103214 - RNA, 14 nt, Human
aacccaccugcuga

SEQ ID NO: 2103215 - RNA, 18 nt, Human
aaccaagccguggcuucc

SEQ ID NO: 2103216 - RNA, 18 nt, Human
gucuccuuugcaggcuca

SEQ ID NO: 2103217 - RNA, 16 nt, Human
aaccaagccguggcuu

SEQ ID NO: 2103218 - RNA, 16 nt, Human
aaccaagucaugugca

SEQ ID NO: 2103219 - RNA, 15 nt, Human
aaccaagucaaguga

SEQ ID NO: 2103220 - RNA, 19 nt, Human
aaccaccacacccagccca

SEQ ID NO: 2103221 - RNA, 14 nt, Human
gucucccucuccug

SEQ ID NO: 2103222 - RNA, 15 nt, Human
gucucccucuccugc

SEQ ID NO: 2103223 - RNA, 16 nt, Human
gucucccucuccugcc

SEQ ID NO: 2103224 - RNA, 17 nt, Human
gucucccucuccugccu

SEQ ID NO: 2103225 - RNA, 18 nt, Human
gucucccucuccugccua

SEQ ID NO: 2103226 - RNA, 19 nt, Human
gucucccucuccugccuac

SEQ ID NO: 2103227 - RNA, 20 nt, Human
gucucccucuccugccuacu

SEQ ID NO: 2103228 - RNA, 21 nt, Human
gucucccucuccugccuacuc

SEQ ID NO: 2103229 - RNA, 22 nt, Human
gucucccucuccugccuacuca

SEQ ID NO: 2103230 - RNA, 20 nt, Human
aacaguuaacuuucagaaga

SEQ ID NO: 2103231 - RNA, 14 nt, Human
aacaguuccuucag

SEQ ID NO: 2103232 - RNA, 23 nt, Human
aacaguguuucccauaauuuucu

SEQ ID NO: 2103233 - RNA, 13 nt, Human
aacaguuaacuuu

SEQ ID NO: 2103234 - RNA, 17 nt, Human
aacaguuaacuuucaga

SEQ ID NO: 2103235 - RNA, 18 nt, Human
aacaguuaacuuucagaa

SEQ ID NO: 2103236 - RNA, 19 nt, Human
aacaguuaagcagccgcca

SEQ ID NO: 2103237 - RNA, 21 nt, Human
aaccaccacacccagcccacu

SEQ ID NO: 2103238 - RNA, 20 nt, Human
aaccaagucaugugcauuuc

SEQ ID NO: 2103239 - RNA, 14 nt, Human
aaccauauggauau

SEQ ID NO: 2103240 - RNA, 16 nt, Human
aaccauauggauauua

SEQ ID NO: 2103241 - RNA, 16 nt, Human
aaccaucauuauaaac

SEQ ID NO: 2103242 - RNA, 12 nt, Human
aaccauugcuuc

SEQ ID NO: 2103243 - RNA, 13 nt, Human
aaccauugcuuca

SEQ ID NO: 2103244 - RNA, 14 nt, Human
aaccauugcuucac

SEQ ID NO: 2103245 - RNA, 15 nt, Human
aaccauugcuucacu

SEQ ID NO: 2103246 - RNA, 16 nt, Human
aaccauugcuucacua

SEQ ID NO: 2103247 - RNA, 23 nt, Human
aaccauugcuucacuacccaucg

SEQ ID NO: 2103248 - RNA, 13 nt, Human
aacccaauaguug

SEQ ID NO: 2103249 - RNA, 16 nt, Human
aacccaagugggggca

SEQ ID NO: 2103250 - RNA, 22 nt, Human
aacccaagguggguagaucacg

SEQ ID NO: 2103251 - RNA, 22 nt, Human
aacccaaauuacguguacuaca

SEQ ID NO: 2103252 - RNA, 16 nt, Human
gucuuuggugaacauu

SEQ ID NO: 2103253 - RNA, 17 nt, Human
gucuuuaggcagcagcu

SEQ ID NO: 2103254 - RNA, 19 nt, Human
gucuuuugacauguggaaa

SEQ ID NO: 2103255 - RNA, 23 nt, Human
gucuuuguaaguaaacugcccug

SEQ ID NO: 2103256 - RNA, 16 nt, Human
gucuuuguaaugucac

SEQ ID NO: 2103257 - RNA, 18 nt, Human
gucuuuguaaugucacca

SEQ ID NO: 2103258 - RNA, 19 nt, Human
gucuuuguaaugucaccac

SEQ ID NO: 2103259 - RNA, 20 nt, Human
gucuuuguaaugucaccacc

SEQ ID NO: 2103260 - RNA, 14 nt, Human
gucuuuugacaugu

SEQ ID NO: 2103261 - RNA, 16 nt, Human
gucuuuugacaugugg

SEQ ID NO: 2103262 - RNA, 15 nt, Human
aaccuguccuugcac

SEQ ID NO: 2103263 - RNA, 15 nt, Human
aaccuguacuucaag

SEQ ID NO: 2103264 - RNA, 19 nt, Human
gucuuucacaguaccaucu

SEQ ID NO: 2103265 - RNA, 11 nt, Human
aaccuguaaau

SEQ ID NO: 2103266 - RNA, 15 nt, Human
aaccuguaaauuauu

SEQ ID NO: 2103267 - RNA, 16 nt, Human
aaccuguaaauuauuu

SEQ ID NO: 2103268 - RNA, 17 nt, Human
aaccuguaaauuauuuu

SEQ ID NO: 2103269 - RNA, 20 nt, Human
aaccuguaaauuauuuuaaa

SEQ ID NO: 2103270 - RNA, 14 nt, Human
aaccuggugcugga

SEQ ID NO: 2103271 - RNA, 23 nt, Human
aaccuguacuucaaguuaaagug

SEQ ID NO: 2103272 - RNA, 15 nt, Human
gucuuuuuaagcuua

SEQ ID NO: 2103273 - RNA, 16 nt, Human
gucuuuuucuggacug

SEQ ID NO: 2103274 - RNA, 20 nt, Human
gucuuuuuaagcuuauuuaa

SEQ ID NO: 2103275 - RNA, 11 nt, Human
aaccuggugcu

SEQ ID NO: 2103276 - RNA, 20 nt, Human
gucuguaucggagacaguga

SEQ ID NO: 2103277 - RNA, 15 nt, Human
gucugucccaccagc

SEQ ID NO: 2103278 - RNA, 17 nt, Human
gucuguccguguuauuu

SEQ ID NO: 2103279 - RNA, 15 nt, Human
gucugucuucacagc

SEQ ID NO: 2103280 - RNA, 17 nt, Human
gucuuccugcauucacc

SEQ ID NO: 2103281 - RNA, 20 nt, Human
gucuuccugcauucacccag

SEQ ID NO: 2103282 - RNA, 19 nt, Human
gucuguauuuaugugugag

SEQ ID NO: 2103283 - RNA, 23 nt, Human
gucuguauuuaugugugaggagc

SEQ ID NO: 2103284 - RNA, 12 nt, Human
gucuguaaugac

SEQ ID NO: 2103285 - RNA, 18 nt, Human
gucuguaaugacaaauaa

SEQ ID NO: 2103286 - RNA, 14 nt, Human
gucuggcccuuccu

SEQ ID NO: 2103287 - RNA, 11 nt, Human
aaccuguccuu

SEQ ID NO: 2103288 - RNA, 17 nt, Human
aacuacucagggaauga

SEQ ID NO: 2103289 - RNA, 12 nt, Human
aacuacauuuua

SEQ ID NO: 2103290 - RNA, 13 nt, Human
aacuacauuuuaa

SEQ ID NO: 2103291 - RNA, 14 nt, Human
aacuacauuuuaac

SEQ ID NO: 2103292 - RNA, 15 nt, Human
aacuacauuuuaaca

SEQ ID NO: 2103293 - RNA, 16 nt, Human
aacuacauuuuaacau

SEQ ID NO: 2103294 - RNA, 20 nt, Human
aacuagacucccaagcugga

SEQ ID NO: 2103295 - RNA, 23 nt, Human
aacuagacucccaagcuggacua

SEQ ID NO: 2103296 - RNA, 13 nt, Human
aacuacuguguuc

SEQ ID NO: 2103297 - RNA, 14 nt, Human
aacuacuguguucc

SEQ ID NO: 2103298 - RNA, 20 nt, Human
aacuagagaugacugagucc

SEQ ID NO: 2103299 - RNA, 15 nt, Human
aacuacuguguuccu

SEQ ID NO: 2103300 - RNA, 18 nt, Human
aacuagagguuuuaugau

SEQ ID NO: 2103301 - RNA, 20 nt, Human
aacuagagguuuuaugauau

SEQ ID NO: 2103302 - RNA, 22 nt, Human
aacuagagguuuuaugauauuu

SEQ ID NO: 2103303 - RNA, 18 nt, Human
aacuaugauaugguaaaa

SEQ ID NO: 2103304 - RNA, 21 nt, Human
aacuaugauuuggaaaauaaa

SEQ ID NO: 2103305 - RNA, 16 nt, Human
aacuaugauuuggaaa

SEQ ID NO: 2103306 - RNA, 18 nt, Human
aacucgcuucucugugac

SEQ ID NO: 2103307 - RNA, 15 nt, Human
aacuccugggcucaa

SEQ ID NO: 2103308 - RNA, 19 nt, Human
aacucauuccugccugucu

SEQ ID NO: 2103309 - RNA, 21 nt, Human
aacucauuccugccugucucc

SEQ ID NO: 2103310 - RNA, 15 nt, Human
aacucauuccugccu

SEQ ID NO: 2103311 - RNA, 12 nt, Human
aacuccuggccu

SEQ ID NO: 2103312 - RNA, 12 nt, Human
aacucauuucua

SEQ ID NO: 2103313 - RNA, 22 nt, Human
aacucauuuccuauguaacugc

SEQ ID NO: 2103314 - RNA, 22 nt, Human
aacucauuccugccugucuccu

SEQ ID NO: 2103315 - RNA, 23 nt, Human
aacucauuccugccugucuccuu

SEQ ID NO: 2103316 - RNA, 23 nt, Human
gugaaccaccacacccagcccac

SEQ ID NO: 2103317 - RNA, 22 nt, Human
gugaaccaccacacccagccca

SEQ ID NO: 2103318 - RNA, 16 nt, Human
gugaacgauuuagaaa

SEQ ID NO: 2103319 - RNA, 14 nt, Human
gugaacgauuuaga

SEQ ID NO: 2103320 - RNA, 24 nt, Human
gugaacgugggaguucagcugcuu

SEQ ID NO: 2103321 - RNA, 23 nt, Human
aacucuauggguaucaaacagcu

SEQ ID NO: 2103322 - RNA, 22 nt, Human
guauauuuguauuuaaaugaaa

SEQ ID NO: 2103323 - RNA, 22 nt, Human
guauauuuauagucacaagagc

SEQ ID NO: 2103324 - RNA, 15 nt, Human
guauauuuauauaau

SEQ ID NO: 2103325 - RNA, 17 nt, Human
guauauuuauauaauua

SEQ ID NO: 2103326 - RNA, 19 nt, Human
guauauuuauauaauuaug

SEQ ID NO: 2103327 - RNA, 13 nt, Human
guauauuuauagu

SEQ ID NO: 2103328 - RNA, 17 nt, Human
guauauuuaaaagaaag

SEQ ID NO: 2103329 - RNA, 19 nt, Human
guaucaaacagcucaggcu

SEQ ID NO: 2103330 - RNA, 20 nt, Human
guaucaaacagcucaggcug

SEQ ID NO: 2103331 - RNA, 17 nt, Human
guauauuuuuguuuguu

SEQ ID NO: 2103332 - RNA, 22 nt, Human
guauauuuuuguuuguuuugug

SEQ ID NO: 2103333 - RNA, 18 nt, Human
guaucaggugcugccauc

SEQ ID NO: 2103334 - RNA, 16 nt, Human
guaucaggugcugcca

SEQ ID NO: 2103335 - RNA, 23 nt, Human
guauaaguccuugcaagaaucag

SEQ ID NO: 2103336 - RNA, 12 nt, Human
guauaauauuuu

SEQ ID NO: 2103337 - RNA, 15 nt, Human
guauaauauuuuuaa

SEQ ID NO: 2103338 - RNA, 19 nt, Human
guauaaugguugacugggu

SEQ ID NO: 2103339 - RNA, 21 nt, Human
guauaaugguugacuggguuu

SEQ ID NO: 2103340 - RNA, 23 nt, Human
guauaaugguugacuggguuucu

SEQ ID NO: 2103341 - RNA, 14 nt, Human
guaugguggcuggg

SEQ ID NO: 2103342 - RNA, 16 nt, Human
guaugguggcuggguu

SEQ ID NO: 2103343 - RNA, 15 nt, Human
guaugguggcugggu

SEQ ID NO: 2103344 - RNA, 21 nt, Human
guaucccaugagccucagcau

SEQ ID NO: 2103345 - RNA, 22 nt, Human
guaucaggugcugccauccagg

SEQ ID NO: 2103346 - RNA, 18 nt, Human
guaucaggccugccagac

SEQ ID NO: 2103347 - RNA, 22 nt, Human
guaucaggccugccagacggca

SEQ ID NO: 2103348 - RNA, 21 nt, Human
guauauuuuuuucuaagagaa

SEQ ID NO: 2103349 - RNA, 19 nt, Human
guaucccaugagccucagc

SEQ ID NO: 2103350 - RNA, 18 nt, Human
guauccaugggggcaggg

SEQ ID NO: 2103351 - RNA, 20 nt, Human
guauccaugggggcagggca

SEQ ID NO: 2103352 - RNA, 19 nt, Human
guaucccaacuccuauaau

SEQ ID NO: 2103353 - RNA, 17 nt, Human
guauccaguacauuuaa

SEQ ID NO: 2103354 - RNA, 18 nt, Human
guauccaguacauuuaau

SEQ ID NO: 2103355 - RNA, 16 nt, Human
guauccaugggggcag

SEQ ID NO: 2103356 - RNA, 16 nt, Human
guaucauggaaauauu

SEQ ID NO: 2103357 - RNA, 14 nt, Human
aaauguaagaucgu

SEQ ID NO: 2103358 - RNA, 22 nt, Human
aaauguaagaucguucucugcc

SEQ ID NO: 2103359 - RNA, 17 nt, Human
aaauguaagaaucauug

SEQ ID NO: 2103360 - RNA, 20 nt, Human
aaauguaagaaucauuguaa

SEQ ID NO: 2103361 - RNA, 13 nt, Human
guaguuaguagca

SEQ ID NO: 2103362 - RNA, 15 nt, Human
guaguuaggaaauaa

SEQ ID NO: 2103363 - RNA, 16 nt, Human
guaguuaggaaauaaa

SEQ ID NO: 2103364 - RNA, 20 nt, Human
guaguuaggaaauaaaaccu

SEQ ID NO: 2103365 - RNA, 22 nt, Human
guaguuaggaaauaaaaccuuu

SEQ ID NO: 2103366 - RNA, 11 nt, Human
guaguuaggaa

SEQ ID NO: 2103367 - RNA, 13 nt, Human
guaguuaggaaau

SEQ ID NO: 2103368 - RNA, 14 nt, Human
guaguuaggaaaua

SEQ ID NO: 2103369 - RNA, 17 nt, Human
guaguuuuucuucaaca

SEQ ID NO: 2103370 - RNA, 20 nt, Human
guaacaggucuccucuuaaa

SEQ ID NO: 2103371 - RNA, 21 nt, Human
guaacaggucuccucuuaaaa

SEQ ID NO: 2103372 - RNA, 14 nt, Human
guaaagauauuauu

SEQ ID NO: 2103373 - RNA, 14 nt, Human
guaacaggucuccu

SEQ ID NO: 2103374 - RNA, 16 nt, Human
guaacaggucuccucu

SEQ ID NO: 2103375 - RNA, 12 nt, Human
guaacaggcaga

SEQ ID NO: 2103376 - RNA, 22 nt, Human
guaacaggaaaauuuuaaaaau

SEQ ID NO: 2103377 - RNA, 16 nt, Human
aaauggucgcccagga

SEQ ID NO: 2103378 - RNA, 17 nt, Human
aaauggucgcccaggag

SEQ ID NO: 2103379 - RNA, 13 nt, Human
aaaugguaaaauu

SEQ ID NO: 2103380 - RNA, 18 nt, Human
aaaugguaaaauugcaug

SEQ ID NO: 2103381 - RNA, 19 nt, Human
aaaugguaaaauugcaugg

SEQ ID NO: 2103382 - RNA, 19 nt, Human
aaauggguagagaaacacu

SEQ ID NO: 2103383 - RNA, 18 nt, Human
aaaugguguuuucaugua

SEQ ID NO: 2103384 - RNA, 19 nt, Human
aaaugguguuuucauguaa

SEQ ID NO: 2103385 - RNA, 22 nt, Human
aaaugguguuuucauguaaaua

SEQ ID NO: 2103386 - RNA, 14 nt, Human
aaaugguguuuuuu

SEQ ID NO: 2103387 - RNA, 20 nt, Human
aaauggugguuguuucuucc

SEQ ID NO: 2103388 - RNA, 21 nt, Human
aaauggugguuguuucuucca

SEQ ID NO: 2103389 - RNA, 22 nt, Human
aaauggugguuguuucuuccaa

SEQ ID NO: 2103390 - RNA, 18 nt, Human
aaauggucgcccaggaga

SEQ ID NO: 2103391 - RNA, 23 nt, Human
aaauggugaaaauaaaauaaagc

SEQ ID NO: 2103392 - RNA, 19 nt, Human
aaauuauaacuuaaaauau

SEQ ID NO: 2103393 - RNA, 22 nt, Human
aaauuauaacuuaaaauauuuu

SEQ ID NO: 2103394 - RNA, 12 nt, Human
aaauuauaagga

SEQ ID NO: 2103395 - RNA, 15 nt, Human
aaauuauaaggacug

SEQ ID NO: 2103396 - RNA, 16 nt, Human
aaauuauaaggacugc

SEQ ID NO: 2103397 - RNA, 17 nt, Human
aaauuauaaggacugca

SEQ ID NO: 2103398 - RNA, 18 nt, Human
aaauuauaaggacugcau

SEQ ID NO: 2103399 - RNA, 20 nt, Human
aaauuauaaggacugcaugg

SEQ ID NO: 2103400 - RNA, 23 nt, Human
aaauuauaaggacugcaugguaa

SEQ ID NO: 2103401 - RNA, 13 nt, Human
aaauuauagaagu

SEQ ID NO: 2103402 - RNA, 16 nt, Human
aaauuauuaugacacc

SEQ ID NO: 2103403 - RNA, 14 nt, Human
aaauuauucaguua

SEQ ID NO: 2103404 - RNA, 16 nt, Human
aaauuauucaguuaag

SEQ ID NO: 2103405 - RNA, 20 nt, Human
aaauuauucaguuaagaaaa

SEQ ID NO: 2103406 - RNA, 21 nt, Human
aaauuauucaguuaagaaaaa

SEQ ID NO: 2103407 - RNA, 23 nt, Human
aaauuauucaguuaagaaaaaaa

SEQ ID NO: 2103408 - RNA, 17 nt, Human
aaauuagguuuuguaca

SEQ ID NO: 2103409 - RNA, 19 nt, Human
aaauuagguuuuguacaau

SEQ ID NO: 2103410 - RNA, 23 nt, Human
aaauuagguuuuguacaauugaa

SEQ ID NO: 2103411 - RNA, 16 nt, Human
aaauuauaacuuaaaa

SEQ ID NO: 2103412 - RNA, 17 nt, Human
aaauuauaacuuaaaau

SEQ ID NO: 2103413 - RNA, 22 nt, Human
aaauuaaggcaacugaacaaaa

SEQ ID NO: 2103414 - RNA, 23 nt, Human
aaauuaaggcaacugaacaaaaa

SEQ ID NO: 2103415 - RNA, 16 nt, Human
aaauguguuuaaaaca

SEQ ID NO: 2103416 - RNA, 13 nt, Human
aaaugugauuuuu

SEQ ID NO: 2103417 - RNA, 20 nt, Human
aaauguguaucggaugcuuu

SEQ ID NO: 2103418 - RNA, 13 nt, Human
aaauguguauuuu

SEQ ID NO: 2103419 - RNA, 13 nt, Human
aaauuaagaaugu

SEQ ID NO: 2103420 - RNA, 14 nt, Human
aaauuaagaauguu

SEQ ID NO: 2103421 - RNA, 16 nt, Human
aaauuaagaauguucu

SEQ ID NO: 2103422 - RNA, 24 nt, Human
aaaugucuaguuguaacaccauga

SEQ ID NO: 2103423 - RNA, 22 nt, Human
aaaugucuuuccuuuugcucuu

SEQ ID NO: 2103424 - RNA, 22 nt, Human
aaauguccuccagaagccucug

SEQ ID NO: 2103425 - RNA, 19 nt, Human
aaaugucuaguuguaacac

SEQ ID NO: 2103426 - RNA, 18 nt, Human
guauccacuguuuauuca

SEQ ID NO: 2103427 - RNA, 16 nt, Human
guaugcuuauuuuaaa

SEQ ID NO: 2103428 - RNA, 16 nt, Human
guaugguuuuguggau

SEQ ID NO: 2103429 - RNA, 11 nt, Human
guauguaaaaa

SEQ ID NO: 2103430 - RNA, 14 nt, Human
aaauguauucaaau

SEQ ID NO: 2103431 - RNA, 15 nt, Human
aaauguauucaaaua

SEQ ID NO: 2103432 - RNA, 18 nt, Human
guaugucaacuuuaugca

SEQ ID NO: 2103433 - RNA, 13 nt, Human
aaauuauuucaga

SEQ ID NO: 2103434 - RNA, 21 nt, Human
aaauuguuucaaaauaaaaac

SEQ ID NO: 2103435 - RNA, 22 nt, Human
aaauuguuuaaguguuguaaau

SEQ ID NO: 2103436 - RNA, 13 nt, Human
aaauucuguuucu

SEQ ID NO: 2103437 - RNA, 22 nt, Human
guauuuuguuuuugucuuaaaa

SEQ ID NO: 2103438 - RNA, 15 nt, Human
gucaaaaggugccug

SEQ ID NO: 2103439 - RNA, 16 nt, Human
gucaaaaggugccugu

SEQ ID NO: 2103440 - RNA, 14 nt, Human
gucaaaaggugccu

SEQ ID NO: 2103441 - RNA, 15 nt, Human
gucaaacaaagccag

SEQ ID NO: 2103442 - RNA, 14 nt, Human
gucaaaacacuugu

SEQ ID NO: 2103443 - RNA, 16 nt, Human
gucaaacaugaagugu

SEQ ID NO: 2103444 - RNA, 15 nt, Human
gucaaacaugaagug

SEQ ID NO: 2103445 - RNA, 16 nt, Human
gucaaacaaagccaga

SEQ ID NO: 2103446 - RNA, 17 nt, Human
gucaaacaaagccagaa

SEQ ID NO: 2103447 - RNA, 14 nt, Human
gucaaacgugaaaa

SEQ ID NO: 2103448 - RNA, 17 nt, Human
gucaaacgugaaaaugc

SEQ ID NO: 2103449 - RNA, 15 nt, Human
gucaaacgugaaaau

SEQ ID NO: 2103450 - RNA, 16 nt, Human
gucaaacuguagaaau

SEQ ID NO: 2103451 - RNA, 20 nt, Human
gucaaacuguagaaaugaug

SEQ ID NO: 2103452 - RNA, 21 nt, Human
gucaacaaguaugaauaaaga

SEQ ID NO: 2103453 - RNA, 22 nt, Human
gucaacacuuaaggguuuuaga

SEQ ID NO: 2103454 - RNA, 16 nt, Human
gucaaagcaaggaucu

SEQ ID NO: 2103455 - RNA, 13 nt, Human
gucaaaguaaaac

SEQ ID NO: 2103456 - RNA, 13 nt, Human
gucauaacuagaa

SEQ ID NO: 2103457 - RNA, 19 nt, Human
gucagucaugauggcacca

SEQ ID NO: 2103458 - RNA, 16 nt, Human
gucaguaucaggccug

SEQ ID NO: 2103459 - RNA, 23 nt, Human
gucaguaucaggccugccagacg

SEQ ID NO: 2103460 - RNA, 18 nt, Human
gucagggaccccugcccu

SEQ ID NO: 2103461 - RNA, 13 nt, Human
gucagggaccaag

SEQ ID NO: 2103462 - RNA, 14 nt, Human
gucagggaccaagg

SEQ ID NO: 2103463 - RNA, 16 nt, Human
gucagggaccaaggac

SEQ ID NO: 2103464 - RNA, 21 nt, Human
gucagggaccaaggaccccuc

SEQ ID NO: 2103465 - RNA, 14 nt, Human
gucagggaccccug

SEQ ID NO: 2103466 - RNA, 14 nt, Human
gucaguaugacauu

SEQ ID NO: 2103467 - RNA, 18 nt, Human
aaauuuguuauaaugaau

SEQ ID NO: 2103468 - RNA, 16 nt, Human
aaauuugguucuaaua

SEQ ID NO: 2103469 - RNA, 15 nt, Human
aaauuugguucuaau

SEQ ID NO: 2103470 - RNA, 12 nt, Human
aaauuuggaauu

SEQ ID NO: 2103471 - RNA, 17 nt, Human
aaauuuggaauucuguu

SEQ ID NO: 2103472 - RNA, 20 nt, Human
aaauuuggaauucuguucau

SEQ ID NO: 2103473 - RNA, 22 nt, Human
gucacacaguauuacuucugcu

SEQ ID NO: 2103474 - RNA, 12 nt, Human
gucacagagaac

SEQ ID NO: 2103475 - RNA, 19 nt, Human
gucacagagaacuaguggu

SEQ ID NO: 2103476 - RNA, 21 nt, Human
gucacacaguauuacuucugc

SEQ ID NO: 2103477 - RNA, 19 nt, Human
gucaacacuuaaggguuuu

SEQ ID NO: 2103478 - RNA, 18 nt, Human
gucaacagagaaggcagg

SEQ ID NO: 2103479 - RNA, 23 nt, Human
gucaacagagaaggcaggaaugu

SEQ ID NO: 2103480 - RNA, 19 nt, Human
gucaacagagaaggcagga

SEQ ID NO: 2103481 - RNA, 22 nt, Human
gucaacagagaaggcaggaaug

SEQ ID NO: 2103482 - RNA, 15 nt, Human
gucagacacaaacaa

SEQ ID NO: 2103483 - RNA, 20 nt, Human
gucagacacaaacaaacaag

SEQ ID NO: 2103484 - RNA, 20 nt, Human
gucagaauaauaagaggugc

SEQ ID NO: 2103485 - RNA, 16 nt, Human
gucaggccacggcagc

SEQ ID NO: 2103486 - RNA, 18 nt, Human
gucaggccacggcagccu

SEQ ID NO: 2103487 - RNA, 12 nt, Human
gucaggccacgg

SEQ ID NO: 2103488 - RNA, 14 nt, Human
gucaggccacggca

SEQ ID NO: 2103489 - RNA, 15 nt, Human
gucaggccacggcag

SEQ ID NO: 2103490 - RNA, 23 nt, Human
gucaggaguucgagaccagccug

SEQ ID NO: 2103491 - RNA, 23 nt, Human
gucaggaguuagaggccagccug

SEQ ID NO: 2103492 - RNA, 13 nt, Human
gucaggaguuccu

SEQ ID NO: 2103493 - RNA, 22 nt, Human
gucaggaguuagaggccagccu

SEQ ID NO: 2103494 - RNA, 19 nt, Human
gucaggaguuagaggccag

SEQ ID NO: 2103495 - RNA, 14 nt, Human
aacaagugaacaca

SEQ ID NO: 2103496 - RNA, 20 nt, Human
aacaagugaacacauugugu

SEQ ID NO: 2103497 - RNA, 21 nt, Human
aacaaugucaaggugcuguug

SEQ ID NO: 2103498 - RNA, 22 nt, Human
aacaaugucaaggugcuguugu

SEQ ID NO: 2103499 - RNA, 17 nt, Human
aacaauggaagauuugc

SEQ ID NO: 2103500 - RNA, 13 nt, Human
aacaagagugauu

SEQ ID NO: 2103501 - RNA, 17 nt, Human
aacaagaucuuucagga

SEQ ID NO: 2103502 - RNA, 19 nt, Human
aacaagagcgaaacuccgu

SEQ ID NO: 2103503 - RNA, 19 nt, Human
aacaagaucuuucaggaaa

SEQ ID NO: 2103504 - RNA, 14 nt, Human
aaauuuucuucagu

SEQ ID NO: 2103505 - RNA, 17 nt, Human
aaauuuucuucaguugg

SEQ ID NO: 2103506 - RNA, 18 nt, Human
aaauuuucuucaguuggu

SEQ ID NO: 2103507 - RNA, 18 nt, Human
aaauuuucacauaaaaua

SEQ ID NO: 2103508 - RNA, 21 nt, Human
aaauuuuauaaaauuaagcaa

SEQ ID NO: 2103509 - RNA, 14 nt, Human
aaauuuuaauuuau

SEQ ID NO: 2103510 - RNA, 14 nt, Human
aaauuuuaccaagu

SEQ ID NO: 2103511 - RNA, 22 nt, Human
aaauuuuaccaaguuauauaaa

SEQ ID NO: 2103512 - RNA, 12 nt, Human
aaauuuuauucc

SEQ ID NO: 2103513 - RNA, 13 nt, Human
aaauuuuauuccu

SEQ ID NO: 2103514 - RNA, 17 nt, Human
aaauuuuaucucuuauu

SEQ ID NO: 2103515 - RNA, 12 nt, Human
aaauuuuggcca

SEQ ID NO: 2103516 - RNA, 18 nt, Human
aaauuuuggccaaagugu

SEQ ID NO: 2103517 - RNA, 17 nt, Human
aaauuuugccuaauaca

SEQ ID NO: 2103518 - RNA, 23 nt, Human
aaauuuugccuaauacauuaaag

SEQ ID NO: 2103519 - RNA, 16 nt, Human
gucccaccuuggcugc

SEQ ID NO: 2103520 - RNA, 15 nt, Human
gucccaccuuggcug

SEQ ID NO: 2103521 - RNA, 14 nt, Human
gucccaccuuggcu

SEQ ID NO: 2103522 - RNA, 19 nt, Human
guccccaggccccaggaag

SEQ ID NO: 2103523 - RNA, 21 nt, Human
guccccaggccccaggaagcc

SEQ ID NO: 2103524 - RNA, 20 nt, Human
guccccaggccccaggaagc

SEQ ID NO: 2103525 - RNA, 18 nt, Human
guccccaguuugcagaaa

SEQ ID NO: 2103526 - RNA, 19 nt, Human
guccccaguuugcagaaaa

SEQ ID NO: 2103527 - RNA, 19 nt, Human
gucccaccgguugcuucug

SEQ ID NO: 2103528 - RNA, 20 nt, Human
gucccaccgguugcuucugg

SEQ ID NO: 2103529 - RNA, 21 nt, Human
gucccaccgguugcuucuggg

SEQ ID NO: 2103530 - RNA, 22 nt, Human
gucccaccgguugcuucuggga

SEQ ID NO: 2103531 - RNA, 23 nt, Human
gucccaccgguugcuucugggaa

SEQ ID NO: 2103532 - RNA, 23 nt, Human
gucccaccucaaaugggucuggg

SEQ ID NO: 2103533 - RNA, 18 nt, Human
guccaacguggggcagca

SEQ ID NO: 2103534 - RNA, 18 nt, Human
gucauuuugcuucauagc

SEQ ID NO: 2103535 - RNA, 12 nt, Human
guccaacuccag

SEQ ID NO: 2103536 - RNA, 13 nt, Human
guccaacuccagu

SEQ ID NO: 2103537 - RNA, 14 nt, Human
guccaacuccagua

SEQ ID NO: 2103538 - RNA, 20 nt, Human
guccaacguggggcagcaca

SEQ ID NO: 2103539 - RNA, 21 nt, Human
guccaacguggggcagcacag

SEQ ID NO: 2103540 - RNA, 12 nt, Human
gucauuuugaag

SEQ ID NO: 2103541 - RNA, 14 nt, Human
gucauuuugaagcu

SEQ ID NO: 2103542 - RNA, 17 nt, Human
gucauuuugaagcuaau

SEQ ID NO: 2103543 - RNA, 19 nt, Human
aacacagacauucugccag

SEQ ID NO: 2103544 - RNA, 20 nt, Human
aacacagacauucugccagg

SEQ ID NO: 2103545 - RNA, 18 nt, Human
aacacacugaggcaggga

SEQ ID NO: 2103546 - RNA, 19 nt, Human
aacacacugaggcagggaa

SEQ ID NO: 2103547 - RNA, 20 nt, Human
aacacacugaggcagggaag

SEQ ID NO: 2103548 - RNA, 21 nt, Human
aacacacugaggcagggaagu

SEQ ID NO: 2103549 - RNA, 11 nt, Human
aacagacaagu

SEQ ID NO: 2103550 - RNA, 17 nt, Human
aacagacaagugacugu

SEQ ID NO: 2103551 - RNA, 18 nt, Human
aacagauaagcaagagag

SEQ ID NO: 2103552 - RNA, 19 nt, Human
aacagauaagcaagagaga

SEQ ID NO: 2103553 - RNA, 18 nt, Human
aacagaucuccaaagcuu

SEQ ID NO: 2103554 - RNA, 20 nt, Human
aacagaucuccaaagcuuuc

SEQ ID NO: 2103555 - RNA, 23 nt, Human
aacagauacuggaaguuuugcau

SEQ ID NO: 2103556 - RNA, 16 nt, Human
aacagaagcuuccauu

SEQ ID NO: 2103557 - RNA, 14 nt, Human
aacagaagcuucca

SEQ ID NO: 2103558 - RNA, 13 nt, Human
aacagaaggauga

SEQ ID NO: 2103559 - RNA, 18 nt, Human
aacagacaaaaacagccu

SEQ ID NO: 2103560 - RNA, 21 nt, Human
aacagacaaaaacagccucac

SEQ ID NO: 2103561 - RNA, 16 nt, Human
aacagacaacagaagu

SEQ ID NO: 2103562 - RNA, 18 nt, Human
aacagacaacagaaguca

SEQ ID NO: 2103563 - RNA, 20 nt, Human
aacagugauuuuuuuuuaga

SEQ ID NO: 2103564 - RNA, 15 nt, Human
aacagggccuugcua

SEQ ID NO: 2103565 - RNA, 22 nt, Human
aacaggguguugucagcaucuu

SEQ ID NO: 2103566 - RNA, 18 nt, Human
aacagugccauugucuuu

SEQ ID NO: 2103567 - RNA, 19 nt, Human
aacagugccauugucuuua

SEQ ID NO: 2103568 - RNA, 20 nt, Human
aacagugccauugucuuuau

SEQ ID NO: 2103569 - RNA, 12 nt, Human
aacagugccugc

SEQ ID NO: 2103570 - RNA, 13 nt, Human
aacagugccugcu

SEQ ID NO: 2103571 - RNA, 14 nt, Human
aacagugccugcug

SEQ ID NO: 2103572 - RNA, 15 nt, Human
aacagugccugcuga

SEQ ID NO: 2103573 - RNA, 19 nt, Human
aacaguguuucccauaauu

SEQ ID NO: 2103574 - RNA, 21 nt, Human
aacaguguuucccauaauuuu

SEQ ID NO: 2103575 - RNA, 13 nt, Human
aacaggggcuggu

SEQ ID NO: 2103576 - RNA, 15 nt, Human
aacaggggcuggugg

SEQ ID NO: 2103577 - RNA, 15 nt, Human
aacaggguaaauuau

SEQ ID NO: 2103578 - RNA, 16 nt, Human
aacaggguaaauuauu

SEQ ID NO: 2103579 - RNA, 12 nt, Human
guccuacucugu

SEQ ID NO: 2103580 - RNA, 15 nt, Human
gucccuuucuuggcc

SEQ ID NO: 2103581 - RNA, 17 nt, Human
gucccuuucuuggccag

SEQ ID NO: 2103582 - RNA, 15 nt, Human
guccuacccacccuc

SEQ ID NO: 2103583 - RNA, 16 nt, Human
guccuacccacccucc

SEQ ID NO: 2103584 - RNA, 21 nt, Human
gucccuugagaccucagccau

SEQ ID NO: 2103585 - RNA, 19 nt, Human
gucccuugagaccucagcc

SEQ ID NO: 2103586 - RNA, 20 nt, Human
gucccuugagaccucagcca

SEQ ID NO: 2103587 - RNA, 13 nt, Human
gucccuugcagcu

SEQ ID NO: 2103588 - RNA, 17 nt, Human
gucccuugagaccucag

SEQ ID NO: 2103589 - RNA, 18 nt, Human
gucccuugagaccucagc

SEQ ID NO: 2103590 - RNA, 22 nt, Human
gucccuugagaccucagccaug

SEQ ID NO: 2103591 - RNA, 14 nt, Human
guuucucaaagaaa

SEQ ID NO: 2103592 - RNA, 23 nt, Human
guuucuauucucuccucagacug

SEQ ID NO: 2103593 - RNA, 19 nt, Human
guuucuauguguagggcgg

SEQ ID NO: 2103594 - RNA, 17 nt, Human
guuucucaaagaaauuu

SEQ ID NO: 2103595 - RNA, 18 nt, Human
guuucucaaagaaauuuc

SEQ ID NO: 2103596 - RNA, 15 nt, Human
guuucucugcuguug

SEQ ID NO: 2103597 - RNA, 21 nt, Human
guuucugaaaauuaacacugc

SEQ ID NO: 2103598 - RNA, 20 nt, Human
guuucugaaaauuaacacug

SEQ ID NO: 2103599 - RNA, 16 nt, Human
guuucugaaaauucca

SEQ ID NO: 2103600 - RNA, 19 nt, Human
guuucugaaaauuccagaa

SEQ ID NO: 2103601 - RNA, 21 nt, Human
aaguaagaaagugaagcaaau

SEQ ID NO: 2103602 - RNA, 13 nt, Human
aaggucaucaucg

SEQ ID NO: 2103603 - RNA, 13 nt, Human
aaguaagcaaaga

SEQ ID NO: 2103604 - RNA, 13 nt, Human
aaguaagaagaca

SEQ ID NO: 2103605 - RNA, 14 nt, Human
aaguaagaagacau

SEQ ID NO: 2103606 - RNA, 20 nt, Human
aaguaagaagacaugaacca

SEQ ID NO: 2103607 - RNA, 18 nt, Human
aaguaaguaccacucagg

SEQ ID NO: 2103608 - RNA, 15 nt, Human
aaguaagaagacaug

SEQ ID NO: 2103609 - RNA, 23 nt, Human
aaguaagcccuugaagauaucuu

SEQ ID NO: 2103610 - RNA, 20 nt, Human
aaguaaguaccacucaggcc

SEQ ID NO: 2103611 - RNA, 21 nt, Human
aaguaaguaccacucaggcca

SEQ ID NO: 2103612 - RNA, 23 nt, Human
aaggcucugagcaaauguggcuc

SEQ ID NO: 2103613 - RNA, 17 nt, Human
aaggcugaccaagagag

SEQ ID NO: 2103614 - RNA, 17 nt, Human
aaggcucugaaagccag

SEQ ID NO: 2103615 - RNA, 18 nt, Human
aaggcucugaaagccagc

SEQ ID NO: 2103616 - RNA, 22 nt, Human
aaggggcccaaauucuuucagu

SEQ ID NO: 2103617 - RNA, 15 nt, Human
aaggcugaccaagag

SEQ ID NO: 2103618 - RNA, 16 nt, Human
aaggcugaccaagaga

SEQ ID NO: 2103619 - RNA, 13 nt, Human
aaggggcccuggu

SEQ ID NO: 2103620 - RNA, 15 nt, Human
aaggggcccguggga

SEQ ID NO: 2103621 - RNA, 14 nt, Human
aaggggcccugguc

SEQ ID NO: 2103622 - RNA, 21 nt, Human
aaggggcccugguccuuccag

SEQ ID NO: 2103623 - RNA, 20 nt, Human
aagggucuagggagagaccc

SEQ ID NO: 2103624 - RNA, 22 nt, Human
aagggucuagggagagacccuu

SEQ ID NO: 2103625 - RNA, 16 nt, Human
aagggucuagggagag

SEQ ID NO: 2103626 - RNA, 17 nt, Human
aagggucuagggagaga

SEQ ID NO: 2103627 - RNA, 18 nt, Human
aagggucuagggagagac

SEQ ID NO: 2103628 - RNA, 18 nt, Human
aagguauuccuuuugugu

SEQ ID NO: 2103629 - RNA, 22 nt, Human
aagguauuccuuuuguguacag

SEQ ID NO: 2103630 - RNA, 20 nt, Human
aagguagaaauaucugaaaa

SEQ ID NO: 2103631 - RNA, 15 nt, Human
guuuacacugucaaa

SEQ ID NO: 2103632 - RNA, 18 nt, Human
guuuacacugucaaacau

SEQ ID NO: 2103633 - RNA, 17 nt, Human
guuuacagguggacaca

SEQ ID NO: 2103634 - RNA, 14 nt, Human
guuuauuuaucagu

SEQ ID NO: 2103635 - RNA, 16 nt, Human
guuuauuuaucaguga

SEQ ID NO: 2103636 - RNA, 19 nt, Human
guuuauuuaucagugacag

SEQ ID NO: 2103637 - RNA, 15 nt, Human
guugggcugguguca

SEQ ID NO: 2103638 - RNA, 15 nt, Human
guugggcccagaucu

SEQ ID NO: 2103639 - RNA, 16 nt, Human
guugggcccagaucug

SEQ ID NO: 2103640 - RNA, 17 nt, Human
guugggcccagaucugg

SEQ ID NO: 2103641 - RNA, 15 nt, Human
guuuaauauugagaa

SEQ ID NO: 2103642 - RNA, 17 nt, Human
guuuaauauugagaaag

SEQ ID NO: 2103643 - RNA, 19 nt, Human
guuuaauauugagaaagaa

SEQ ID NO: 2103644 - RNA, 13 nt, Human
guugggcuggugu

SEQ ID NO: 2103645 - RNA, 13 nt, Human
guugggcccagau

SEQ ID NO: 2103646 - RNA, 16 nt, Human
guugggagccugaaau

SEQ ID NO: 2103647 - RNA, 14 nt, Human
guugggaggauucu

SEQ ID NO: 2103648 - RNA, 13 nt, Human
guugcuucuggga

SEQ ID NO: 2103649 - RNA, 15 nt, Human
guuggaaaagaauac

SEQ ID NO: 2103650 - RNA, 20 nt, Human
guuggaaaagaauacagaaa

SEQ ID NO: 2103651 - RNA, 22 nt, Human
guuggaaaagaauacagaaaga

SEQ ID NO: 2103652 - RNA, 16 nt, Human
guugccuaauaaacau

SEQ ID NO: 2103653 - RNA, 15 nt, Human
guugcgacggagaga

SEQ ID NO: 2103654 - RNA, 16 nt, Human
guugcgacggagagaa

SEQ ID NO: 2103655 - RNA, 17 nt, Human
guugcgacggagagaaa

SEQ ID NO: 2103656 - RNA, 20 nt, Human
guugcgacggagagaaaaaa

SEQ ID NO: 2103657 - RNA, 13 nt, Human
guugcccaggcug

SEQ ID NO: 2103658 - RNA, 12 nt, Human
guugcccaggcu

SEQ ID NO: 2103659 - RNA, 23 nt, Human
guugcccaggcaggucuugaacu

SEQ ID NO: 2103660 - RNA, 14 nt, Human
aaggcauucucuga

SEQ ID NO: 2103661 - RNA, 17 nt, Human
aaggcauucucugaaga

SEQ ID NO: 2103662 - RNA, 14 nt, Human
aaggccagcuggca

SEQ ID NO: 2103663 - RNA, 17 nt, Human
aaggccagcuggcagca

SEQ ID NO: 2103664 - RNA, 19 nt, Human
aaggccagcuggcagcaga

SEQ ID NO: 2103665 - RNA, 18 nt, Human
aaggccaggggcuuuugc

SEQ ID NO: 2103666 - RNA, 22 nt, Human
aaggccgaagaaggguccuucc

SEQ ID NO: 2103667 - RNA, 14 nt, Human
aaggccgagaagca

SEQ ID NO: 2103668 - RNA, 17 nt, Human
aaggccgagaagcaaga

SEQ ID NO: 2103669 - RNA, 18 nt, Human
aaggccgagaagcaagaa

SEQ ID NO: 2103670 - RNA, 22 nt, Human
aaggccgcuguucacccacagg

SEQ ID NO: 2103671 - RNA, 19 nt, Human
aaggccagcaagguggagu

SEQ ID NO: 2103672 - RNA, 14 nt, Human
aaggccccagagac

SEQ ID NO: 2103673 - RNA, 21 nt, Human
aaggcaugccuggacaaaccc

SEQ ID NO: 2103674 - RNA, 23 nt, Human
aaggcaugccuggacaaacccuu

SEQ ID NO: 2103675 - RNA, 12 nt, Human
aaggcauucucu

SEQ ID NO: 2103676 - RNA, 21 nt, Human
aaggcaugauguuaaccagaa

SEQ ID NO: 2103677 - RNA, 22 nt, Human
aaggauaaacuuuuagaaacuu

SEQ ID NO: 2103678 - RNA, 14 nt, Human
aaggaagugaagag

SEQ ID NO: 2103679 - RNA, 22 nt, Human
aaggaaguuacuguuauagagg

SEQ ID NO: 2103680 - RNA, 11 nt, Human
aaggagagcua

SEQ ID NO: 2103681 - RNA, 15 nt, Human
aaggagaugaagcaa

SEQ ID NO: 2103682 - RNA, 15 nt, Human
aaggagagucuugca

SEQ ID NO: 2103683 - RNA, 21 nt, Human
aaggagagucuugcagugauu

SEQ ID NO: 2103684 - RNA, 22 nt, Human
aaggagagucuugcagugauua

SEQ ID NO: 2103685 - RNA, 15 nt, Human
aaggagauguaagag

SEQ ID NO: 2103686 - RNA, 18 nt, Human
aaggagauguaagagcuu

SEQ ID NO: 2103687 - RNA, 16 nt, Human
aaggagcugagaauag

SEQ ID NO: 2103688 - RNA, 17 nt, Human
aaggagcugagaauaga

SEQ ID NO: 2103689 - RNA, 22 nt, Human
aaggagcugagaauagaaggaa

SEQ ID NO: 2103690 - RNA, 23 nt, Human
aaggagcugagaauagaaggaaa

SEQ ID NO: 2103691 - RNA, 20 nt, Human
aaggaggggauagagagaga

SEQ ID NO: 2103692 - RNA, 15 nt, Human
aaggagggagaugga

SEQ ID NO: 2103693 - RNA, 17 nt, Human
aaggagggucaggaagg

SEQ ID NO: 2103694 - RNA, 21 nt, Human
aaggaggguggaucaccugag

SEQ ID NO: 2103695 - RNA, 18 nt, Human
aaggaggguuagggaggg

SEQ ID NO: 2103696 - RNA, 19 nt, Human
aaggaggguuagggagggg

SEQ ID NO: 2103697 - RNA, 13 nt, Human
aaggaguagaaaa

SEQ ID NO: 2103698 - RNA, 18 nt, Human
aaggaggaagagaaaaaa

SEQ ID NO: 2103699 - RNA, 21 nt, Human
aaggagcuuaccucccaccuu

SEQ ID NO: 2103700 - RNA, 11 nt, Human
aaggaggaaaa

SEQ ID NO: 2103701 - RNA, 14 nt, Human
aaggaggcuggcag

SEQ ID NO: 2103702 - RNA, 12 nt, Human
aaggaagaaaaa

SEQ ID NO: 2103703 - RNA, 13 nt, Human
aaggaagaaaaau

SEQ ID NO: 2103704 - RNA, 15 nt, Human
aaggaagaaaaauca

SEQ ID NO: 2103705 - RNA, 22 nt, Human
aaggaagccacagcugguggua

SEQ ID NO: 2103706 - RNA, 22 nt, Human
aaggaagaucacuuugcucuga

SEQ ID NO: 2103707 - RNA, 13 nt, Human
aaggaagacuaga

SEQ ID NO: 2103708 - RNA, 21 nt, Human
aaggaauaaauugcuccuuga

SEQ ID NO: 2103709 - RNA, 14 nt, Human
aaggaagucuagga

SEQ ID NO: 2103710 - RNA, 14 nt, Human
aagcuccaucucca

SEQ ID NO: 2103711 - RNA, 13 nt, Human
aaggaaagcaaua

SEQ ID NO: 2103712 - RNA, 16 nt, Human
aaggaaagcaauaaau

SEQ ID NO: 2103713 - RNA, 20 nt, Human
aaggaaagcaauaaaugaau

SEQ ID NO: 2103714 - RNA, 20 nt, Human
aaggaaauaaaaaagucucu

SEQ ID NO: 2103715 - RNA, 22 nt, Human
aaggaaauaaaaaagucucuau

SEQ ID NO: 2103716 - RNA, 18 nt, Human
aagcuccaguccugcucu

SEQ ID NO: 2103717 - RNA, 19 nt, Human
aagcuccaguccugcucuc

SEQ ID NO: 2103718 - RNA, 21 nt, Human
aagcuccaguccugcucucua

SEQ ID NO: 2103719 - RNA, 16 nt, Human
aaggaaaucucacccc

SEQ ID NO: 2103720 - RNA, 22 nt, Human
aaggaaaucucaccccauccca

SEQ ID NO: 2103721 - RNA, 19 nt, Human
guuuuuccuguucuuaaga

SEQ ID NO: 2103722 - RNA, 19 nt, Human
guuuuuccuuguauuuaaa

SEQ ID NO: 2103723 - RNA, 17 nt, Human
aagugagagagacaaga

SEQ ID NO: 2103724 - RNA, 14 nt, Human
guuuuucaguuuuc

SEQ ID NO: 2103725 - RNA, 15 nt, Human
guuuuuccacuacug

SEQ ID NO: 2103726 - RNA, 16 nt, Human
guuuuuccacuacugc

SEQ ID NO: 2103727 - RNA, 17 nt, Human
guuuuuccacuacugcu

SEQ ID NO: 2103728 - RNA, 18 nt, Human
guuuuuccacuacugcua

SEQ ID NO: 2103729 - RNA, 14 nt, Human
aagugagagcuggg

SEQ ID NO: 2103730 - RNA, 15 nt, Human
aagugagagcugggu

SEQ ID NO: 2103731 - RNA, 18 nt, Human
aagugagacuuugagggu

SEQ ID NO: 2103732 - RNA, 19 nt, Human
aagugaacacauuguguca

SEQ ID NO: 2103733 - RNA, 16 nt, Human
aagugaaaucaaaggu

SEQ ID NO: 2103734 - RNA, 21 nt, Human
aagugaaaaaggaggaagaga

SEQ ID NO: 2103735 - RNA, 12 nt, Human
aagucuucaggg

SEQ ID NO: 2103736 - RNA, 18 nt, Human
aagucauuuuaacuuuau

SEQ ID NO: 2103737 - RNA, 20 nt, Human
aagucauuuuaacuuuauca

SEQ ID NO: 2103738 - RNA, 22 nt, Human
aagucauuuuaacuuuaucaca

SEQ ID NO: 2103739 - RNA, 17 nt, Human
aagucuucaagggcugc

SEQ ID NO: 2103740 - RNA, 21 nt, Human
aagucuucaagggcugcuuca

SEQ ID NO: 2103741 - RNA, 22 nt, Human
aagucuucaagggcugcuucaa

SEQ ID NO: 2103742 - RNA, 13 nt, Human
aagucuugcugug

SEQ ID NO: 2103743 - RNA, 17 nt, Human
aagucuugcuguggucu

SEQ ID NO: 2103744 - RNA, 21 nt, Human
aagucuugcuguggucucuuu

SEQ ID NO: 2103745 - RNA, 18 nt, Human
aagucuucccugaucaag

SEQ ID NO: 2103746 - RNA, 22 nt, Human
aagucuucccugaucaagucac

SEQ ID NO: 2103747 - RNA, 14 nt, Human
aagucuugugacua

SEQ ID NO: 2103748 - RNA, 19 nt, Human
aagucuugugacuagugcu

SEQ ID NO: 2103749 - RNA, 20 nt, Human
aagucuugugacuagugcug

SEQ ID NO: 2103750 - RNA, 23 nt, Human
aagucuugugacuagugcugaag

SEQ ID NO: 2103751 - RNA, 21 nt, Human
aagucuugugacuagugcuga

SEQ ID NO: 2103752 - RNA, 22 nt, Human
aagucuugugacuagugcugaa

SEQ ID NO: 2103753 - RNA, 16 nt, Human
aagucauuuuaacuuu

SEQ ID NO: 2103754 - RNA, 15 nt, Human
aagucaugugcauuu

SEQ ID NO: 2103755 - RNA, 14 nt, Human
aagucaugugcauu

SEQ ID NO: 2103756 - RNA, 21 nt, Human
aagucaugcguuuaaucacau

SEQ ID NO: 2103757 - RNA, 20 nt, Human
aaguauuuauauauuuauaa

SEQ ID NO: 2103758 - RNA, 21 nt, Human
aaguauuuauauauuuauaac

SEQ ID NO: 2103759 - RNA, 22 nt, Human
aaguauuuauauauuuauaacu

SEQ ID NO: 2103760 - RNA, 23 nt, Human
aaguauuuauauauuuauaacuc

SEQ ID NO: 2103761 - RNA, 21 nt, Human
aaguaauccaccugccucggc

SEQ ID NO: 2103762 - RNA, 16 nt, Human
guuuuggggacucauu

SEQ ID NO: 2103763 - RNA, 16 nt, Human
guuuuggaagcucuga

SEQ ID NO: 2103764 - RNA, 16 nt, Human
guuuugcuguuuccuu

SEQ ID NO: 2103765 - RNA, 22 nt, Human
guuuugccauguuggccaggcu

SEQ ID NO: 2103766 - RNA, 21 nt, Human
guuuugccauguuggccaggc

SEQ ID NO: 2103767 - RNA, 20 nt, Human
guuuugccauguuggccagg

SEQ ID NO: 2103768 - RNA, 16 nt, Human
guuuugccauguuggc

SEQ ID NO: 2103769 - RNA, 19 nt, Human
guuucugauuaaugcuaaa

SEQ ID NO: 2103770 - RNA, 13 nt, Human
guuucugcccugc

SEQ ID NO: 2103771 - RNA, 21 nt, Human
guuucugcccacauuggaccc

SEQ ID NO: 2103772 - RNA, 12 nt, Human
aaguauuuauau

SEQ ID NO: 2103773 - RNA, 13 nt, Human
aaguauuuauaua

SEQ ID NO: 2103774 - RNA, 14 nt, Human
aaguauuuauauau

SEQ ID NO: 2103775 - RNA, 15 nt, Human
aaguauuuauauauu

SEQ ID NO: 2103776 - RNA, 16 nt, Human
aaguauuuauauauuu

SEQ ID NO: 2103777 - RNA, 17 nt, Human
aaguauuuauauauuua

SEQ ID NO: 2103778 - RNA, 18 nt, Human
aaguauuuauauauuuau

SEQ ID NO: 2103779 - RNA, 20 nt, Human
aaguacauauuaggaaaaua

SEQ ID NO: 2103780 - RNA, 17 nt, Human
aaguaccacucaggcca

SEQ ID NO: 2103781 - RNA, 21 nt, Human
aaguaaugaauuuuuaugaua

SEQ ID NO: 2103782 - RNA, 13 nt, Human
uaaaagacuuuuu

SEQ ID NO: 2103783 - RNA, 23 nt, Human
uaaaagacacuguuuacaagaaa

SEQ ID NO: 2103784 - RNA, 14 nt, Human
uaaaaguucauaac

SEQ ID NO: 2103785 - RNA, 21 nt, Human
uaaaaguucauaacagugcca

SEQ ID NO: 2103786 - RNA, 12 nt, Human
uaaaaguuacuu

SEQ ID NO: 2103787 - RNA, 17 nt, Human
uaaaaguuauuaauauu

SEQ ID NO: 2103788 - RNA, 18 nt, Human
uaaaauaucauucagcaa

SEQ ID NO: 2103789 - RNA, 22 nt, Human
uaaaauagaaauauagccaaaa

SEQ ID NO: 2103790 - RNA, 22 nt, Human
uaaaauauuccugcauuuguga

SEQ ID NO: 2103791 - RNA, 13 nt, Human
uaaaauauuccug

SEQ ID NO: 2103792 - RNA, 19 nt, Human
uaaaauaucauucagcaac

SEQ ID NO: 2103793 - RNA, 15 nt, Human
aagugauaauuucug

SEQ ID NO: 2103794 - RNA, 18 nt, Human
aagugagggucagagagg

SEQ ID NO: 2103795 - RNA, 15 nt, Human
aagugagcaaaccug

SEQ ID NO: 2103796 - RNA, 18 nt, Human
aagugagcaaaccugccc

SEQ ID NO: 2103797 - RNA, 19 nt, Human
aagugagcaaaccugcccc

SEQ ID NO: 2103798 - RNA, 18 nt, Human
aagugauucuccugccuc

SEQ ID NO: 2103799 - RNA, 17 nt, Human
aagugauucuccugccu

SEQ ID NO: 2103800 - RNA, 16 nt, Human
aagugauucuccugcc

SEQ ID NO: 2103801 - RNA, 15 nt, Human
aagugauucuccugc

SEQ ID NO: 2103802 - RNA, 19 nt, Human
aagugauucuccugccuca

SEQ ID NO: 2103803 - RNA, 20 nt, Human
aagugauucuccugccucag

SEQ ID NO: 2103804 - RNA, 22 nt, Human
aagugccccugcugccucccca

SEQ ID NO: 2103805 - RNA, 23 nt, Human
aagugccccugcugccuccccaa

SEQ ID NO: 2103806 - RNA, 22 nt, Human
aagugaucaauaaaaugugauu

SEQ ID NO: 2103807 - RNA, 14 nt, Human
aagugaucaauaaa

SEQ ID NO: 2103808 - RNA, 19 nt, Human
aagugccccugcugccucc

SEQ ID NO: 2103809 - RNA, 18 nt, Human
aagugccuacauuaucua

SEQ ID NO: 2103810 - RNA, 11 nt, Human
uaaaaaucaua

SEQ ID NO: 2103811 - RNA, 17 nt, Human
uaaaaaucauaaacugu

SEQ ID NO: 2103812 - RNA, 21 nt, Human
uaaaaaguuaaaaaaaauaau

SEQ ID NO: 2103813 - RNA, 17 nt, Human
uaaaaauaaauuugguu

SEQ ID NO: 2103814 - RNA, 18 nt, Human
guuuuugauagcuuuauu

SEQ ID NO: 2103815 - RNA, 15 nt, Human
uaaaaaguggaaaaa

SEQ ID NO: 2103816 - RNA, 12 nt, Human
guuuuucuucaa

SEQ ID NO: 2103817 - RNA, 22 nt, Human
guuuuucuucaacaucaauguu

SEQ ID NO: 2103818 - RNA, 23 nt, Human
guuuuucuucaacaucaauguuc

SEQ ID NO: 2103819 - RNA, 15 nt, Human
guuuuucuucucccu

SEQ ID NO: 2103820 - RNA, 20 nt, Human
uaaaacuugauguguuaucu

SEQ ID NO: 2103821 - RNA, 22 nt, Human
uaaaacuugauguguuaucucu

SEQ ID NO: 2103822 - RNA, 13 nt, Human
uaaaacuuuaauc

SEQ ID NO: 2103823 - RNA, 13 nt, Human
uaaaacuugcugc

SEQ ID NO: 2103824 - RNA, 13 nt, Human
uaaaacuuuauuu

SEQ ID NO: 2103825 - RNA, 17 nt, Human
uaaaacuuuauuuuaua

SEQ ID NO: 2103826 - RNA, 20 nt, Human
uaaaaaucauaaacugugug

SEQ ID NO: 2103827 - RNA, 15 nt, Human
uaaaaaucauaguac

SEQ ID NO: 2103828 - RNA, 17 nt, Human
uaaaaaucauugauugu

SEQ ID NO: 2103829 - RNA, 10 nt, Human
uaaaaccuuu

SEQ ID NO: 2103830 - RNA, 11 nt, Human
uaaaaccuuuc

SEQ ID NO: 2103831 - RNA, 13 nt, Human
uaaaaccuuucaa

SEQ ID NO: 2103832 - RNA, 19 nt, Human
uaaaaccccaucucuacua

SEQ ID NO: 2103833 - RNA, 14 nt, Human
uaaaaccuuucaaa

SEQ ID NO: 2103834 - RNA, 16 nt, Human
uaaaaccuuucaaauu

SEQ ID NO: 2103835 - RNA, 20 nt, Human
uaaaaccuuucaaauuucac

SEQ ID NO: 2103836 - RNA, 21 nt, Human
uaaaaccuuucaaauuucaca

SEQ ID NO: 2103837 - RNA, 16 nt, Human
aagaucguucucugcc

SEQ ID NO: 2103838 - RNA, 17 nt, Human
aagaucguucucugccu

SEQ ID NO: 2103839 - RNA, 14 nt, Human
aagaucguuaguau

SEQ ID NO: 2103840 - RNA, 23 nt, Human
aagauggcugugccucugccugu

SEQ ID NO: 2103841 - RNA, 21 nt, Human
aagaugggaacgcagaugauc

SEQ ID NO: 2103842 - RNA, 21 nt, Human
aagauggcugugccucugccu

SEQ ID NO: 2103843 - RNA, 20 nt, Human
aagauggcugugccucugcc

SEQ ID NO: 2103844 - RNA, 18 nt, Human
aagauggcugugccucug

SEQ ID NO: 2103845 - RNA, 19 nt, Human
aagaugcuucucacugcca

SEQ ID NO: 2103846 - RNA, 17 nt, Human
aagaugcuucucacugc

SEQ ID NO: 2103847 - RNA, 16 nt, Human
aagaugcuucucacug

SEQ ID NO: 2103848 - RNA, 14 nt, Human
aagaugaagaggau

SEQ ID NO: 2103849 - RNA, 17 nt, Human
aagaugaaaauggaagu

SEQ ID NO: 2103850 - RNA, 16 nt, Human
aagaggcugaaagagg

SEQ ID NO: 2103851 - RNA, 18 nt, Human
aagaggcugaaagaggcc

SEQ ID NO: 2103852 - RNA, 13 nt, Human
aagaggcugaggc

SEQ ID NO: 2103853 - RNA, 16 nt, Human
guggggguuggcuggg

SEQ ID NO: 2103854 - RNA, 19 nt, Human
guggggguuggcuggguac

SEQ ID NO: 2103855 - RNA, 14 nt, Human
guggggucucccuc

SEQ ID NO: 2103856 - RNA, 17 nt, Human
guggggucucccucucc

SEQ ID NO: 2103857 - RNA, 19 nt, Human
guggggucucccucuccug

SEQ ID NO: 2103858 - RNA, 21 nt, Human
guggggucucccucuccugcc

SEQ ID NO: 2103859 - RNA, 22 nt, Human
guggggucucccucuccugccu

SEQ ID NO: 2103860 - RNA, 15 nt, Human
aagaggggcugggcu

SEQ ID NO: 2103861 - RNA, 19 nt, Human
aagaggggaccagaagcca

SEQ ID NO: 2103862 - RNA, 14 nt, Human
aagaggcugaggca

SEQ ID NO: 2103863 - RNA, 19 nt, Human
guguauuuauuuuccuccc

SEQ ID NO: 2103864 - RNA, 21 nt, Human
guguauuuauuuuccucccca

SEQ ID NO: 2103865 - RNA, 19 nt, Human
guguauuuccagugcaauu

SEQ ID NO: 2103866 - RNA, 22 nt, Human
guguauuuauuuuccuccccag

SEQ ID NO: 2103867 - RNA, 17 nt, Human
guguauuuaauuguaaa

SEQ ID NO: 2103868 - RNA, 19 nt, Human
guguauuuaauuguaaacu

SEQ ID NO: 2103869 - RNA, 20 nt, Human
guguauuuaauuguaaacug

SEQ ID NO: 2103870 - RNA, 22 nt, Human
guguauuuaauuguaaacugua

SEQ ID NO: 2103871 - RNA, 14 nt, Human
aagaugggugggga

SEQ ID NO: 2103872 - RNA, 16 nt, Human
aagaugguauauuugg

SEQ ID NO: 2103873 - RNA, 20 nt, Human
gugucaagagggucugagga

SEQ ID NO: 2103874 - RNA, 18 nt, Human
guguauuuuauaaaauua

SEQ ID NO: 2103875 - RNA, 20 nt, Human
guguauuuuauaaaauuaaa

SEQ ID NO: 2103876 - RNA, 16 nt, Human
gugucagcauagaagu

SEQ ID NO: 2103877 - RNA, 15 nt, Human
gugugacaucagugg

SEQ ID NO: 2103878 - RNA, 20 nt, Human
gugugacaucaguggcaugg

SEQ ID NO: 2103879 - RNA, 22 nt, Human
gugugacaaggauugcuacugu

SEQ ID NO: 2103880 - RNA, 13 nt, Human
guguccaccuggc

SEQ ID NO: 2103881 - RNA, 14 nt, Human
guguccaacuccag

SEQ ID NO: 2103882 - RNA, 15 nt, Human
guguccaacuccagu

SEQ ID NO: 2103883 - RNA, 16 nt, Human
guguccaacuccagua

SEQ ID NO: 2103884 - RNA, 23 nt, Human
guguccaacuccaguacuggagc

SEQ ID NO: 2103885 - RNA, 17 nt, Human
guguccaagugugugug

SEQ ID NO: 2103886 - RNA, 23 nt, Human
gugucauauauggggggccaaca

SEQ ID NO: 2103887 - RNA, 18 nt, Human
gugucauaccaggccgcc

SEQ ID NO: 2103888 - RNA, 20 nt, Human
gugucagguggggcagcuug

SEQ ID NO: 2103889 - RNA, 18 nt, Human
gugucauuuaugaaaaga

SEQ ID NO: 2103890 - RNA, 23 nt, Human
gugucauuuggcuuuccagucau

SEQ ID NO: 2103891 - RNA, 16 nt, Human
gugugguagagugugc

SEQ ID NO: 2103892 - RNA, 17 nt, Human
guguggguaccuguauu

SEQ ID NO: 2103893 - RNA, 16 nt, Human
guguggguaccuguau

SEQ ID NO: 2103894 - RNA, 15 nt, Human
guguguauuguuccc

SEQ ID NO: 2103895 - RNA, 23 nt, Human
aagacgugauuuugcuguagaag

SEQ ID NO: 2103896 - RNA, 18 nt, Human
aagacgucccuuuuuucu

SEQ ID NO: 2103897 - RNA, 16 nt, Human
aagacgugauuuugcu

SEQ ID NO: 2103898 - RNA, 22 nt, Human
aagacgugauuuugcuguagaa

SEQ ID NO: 2103899 - RNA, 20 nt, Human
aagacuagaggcuugcauaa

SEQ ID NO: 2103900 - RNA, 16 nt, Human
aagacuuccagagccu

SEQ ID NO: 2103901 - RNA, 18 nt, Human
aagacuuccagagccuca

SEQ ID NO: 2103902 - RNA, 14 nt, Human
aagacuucccagcu

SEQ ID NO: 2103903 - RNA, 21 nt, Human
aagacuuuccccauacucugu

SEQ ID NO: 2103904 - RNA, 23 nt, Human
aagacuuuccccauacucugucu

SEQ ID NO: 2103905 - RNA, 19 nt, Human
aagagcagccuguggcauc

SEQ ID NO: 2103906 - RNA, 17 nt, Human
aagagcagccuguggca

SEQ ID NO: 2103907 - RNA, 18 nt, Human
aagagcagccuguggcau

SEQ ID NO: 2103908 - RNA, 13 nt, Human
aagagcagccugu

SEQ ID NO: 2103909 - RNA, 12 nt, Human
aagacuuguuuu

SEQ ID NO: 2103910 - RNA, 14 nt, Human
aagagcagccugug

SEQ ID NO: 2103911 - RNA, 16 nt, Human
aagagcagccuguggc

SEQ ID NO: 2103912 - RNA, 23 nt, Human
aagagcaggcacauggaggagcu

SEQ ID NO: 2103913 - RNA, 14 nt, Human
gugccuuaccuccu

SEQ ID NO: 2103914 - RNA, 15 nt, Human
gugccuuaccuccug

SEQ ID NO: 2103915 - RNA, 17 nt, Human
gugccuuaccuccugcc

SEQ ID NO: 2103916 - RNA, 18 nt, Human
gugccuuaccuccugccc

SEQ ID NO: 2103917 - RNA, 19 nt, Human
gugccuuaccuccugccca

SEQ ID NO: 2103918 - RNA, 20 nt, Human
gugccuuaccuccugcccag

SEQ ID NO: 2103919 - RNA, 21 nt, Human
gugccuuaccuccugcccagg

SEQ ID NO: 2103920 - RNA, 13 nt, Human
guggccuggcucc

SEQ ID NO: 2103921 - RNA, 19 nt, Human
guggccuggcuccgcugug

SEQ ID NO: 2103922 - RNA, 21 nt, Human
guggccuggccaggagcucuu

SEQ ID NO: 2103923 - RNA, 12 nt, Human
guggccugggca

SEQ ID NO: 2103924 - RNA, 14 nt, Human
guggccugggcaag

SEQ ID NO: 2103925 - RNA, 12 nt, Human
guggccuggcca

SEQ ID NO: 2103926 - RNA, 13 nt, Human
guggccuggccag

SEQ ID NO: 2103927 - RNA, 16 nt, Human
guggccuggccaggag

SEQ ID NO: 2103928 - RNA, 18 nt, Human
guggccuggccaggagcu

SEQ ID NO: 2103929 - RNA, 20 nt, Human
guggccuggccaggagcucu

SEQ ID NO: 2103930 - RNA, 20 nt, Human
guggccucaacccucccuca

SEQ ID NO: 2103931 - RNA, 19 nt, Human
guggccucaacccucccuc

SEQ ID NO: 2103932 - RNA, 20 nt, Human
guggccucugccccgucuca

SEQ ID NO: 2103933 - RNA, 24 nt, Human
guggccucugccccgucucaugag

SEQ ID NO: 2103934 - RNA, 9 nt, Human
aagagccau

SEQ ID NO: 2103935 - RNA, 16 nt, Human
aagaggaucggaggcu

SEQ ID NO: 2103936 - RNA, 14 nt, Human
aagagccaauggag

SEQ ID NO: 2103937 - RNA, 9 nt, Human
guggccuca

SEQ ID NO: 2103938 - RNA, 14 nt, Human
aagaggcaagaggc

SEQ ID NO: 2103939 - RNA, 11 nt, Human
guggcccuugc

SEQ ID NO: 2103940 - RNA, 14 nt, Human
gugggaagggagag

SEQ ID NO: 2103941 - RNA, 18 nt, Human
gugggagcugccuguuca

SEQ ID NO: 2103942 - RNA, 15 nt, Human
gugggagcugccugu

SEQ ID NO: 2103943 - RNA, 13 nt, Human
guggggccuuggu

SEQ ID NO: 2103944 - RNA, 15 nt, Human
guggggccuagaucc

SEQ ID NO: 2103945 - RNA, 12 nt, Human
guggggcugcuc

SEQ ID NO: 2103946 - RNA, 14 nt, Human
guggggcugcuccu

SEQ ID NO: 2103947 - RNA, 16 nt, Human
guggggcugcuccucc

SEQ ID NO: 2103948 - RNA, 17 nt, Human
guggggcugcuccucca

SEQ ID NO: 2103949 - RNA, 11 nt, Human
guggggcuggg

SEQ ID NO: 2103950 - RNA, 12 nt, Human
guggggcugggg

SEQ ID NO: 2103951 - RNA, 18 nt, Human
guggggcugcuccuccag

SEQ ID NO: 2103952 - RNA, 14 nt, Human
gugggagcugccug

SEQ ID NO: 2103953 - RNA, 21 nt, Human
gugggaagaaacaaacccguu

SEQ ID NO: 2103954 - RNA, 17 nt, Human
gugggaagcgucugucc

SEQ ID NO: 2103955 - RNA, 15 nt, Human
gugggaaggacuugg

SEQ ID NO: 2103956 - RNA, 20 nt, Human
gugggaaggacuuggcgcgc

SEQ ID NO: 2103957 - RNA, 23 nt, Human
gugggaaggacuuggcgcgcccu

SEQ ID NO: 2103958 - RNA, 13 nt, Human
gugggaagggaga

SEQ ID NO: 2103959 - RNA, 20 nt, Human
guggccuuccccagccucuu

SEQ ID NO: 2103960 - RNA, 20 nt, Human
guggcgacucuauagacucu

SEQ ID NO: 2103961 - RNA, 12 nt, Human
guggccuucccc

SEQ ID NO: 2103962 - RNA, 17 nt, Human
guggccuuccccagccu

SEQ ID NO: 2103963 - RNA, 15 nt, Human
guggccuuccccagc

SEQ ID NO: 2103964 - RNA, 19 nt, Human
guggccuuccccagccucu

SEQ ID NO: 2103965 - RNA, 14 nt, Human
guuaggaaauaaaa

SEQ ID NO: 2103966 - RNA, 15 nt, Human
guuagaaugaggagg

SEQ ID NO: 2103967 - RNA, 16 nt, Human
guuagaaugaggagga

SEQ ID NO: 2103968 - RNA, 13 nt, Human
guuagaacacuau

SEQ ID NO: 2103969 - RNA, 14 nt, Human
guuagaacacuauu

SEQ ID NO: 2103970 - RNA, 19 nt, Human
guuagaacacuauuuucag

SEQ ID NO: 2103971 - RNA, 20 nt, Human
guuagaacacuauuuucaga

SEQ ID NO: 2103972 - RNA, 21 nt, Human
guuagaacacuauuuucagaa

SEQ ID NO: 2103973 - RNA, 22 nt, Human
guuagaacacuauuuucagaau

SEQ ID NO: 2103974 - RNA, 15 nt, Human
guuagaaaugcaaau

SEQ ID NO: 2103975 - RNA, 14 nt, Human
guuagaaugaggag

SEQ ID NO: 2103976 - RNA, 16 nt, Human
guuaggaaauaaaacc

SEQ ID NO: 2103977 - RNA, 17 nt, Human
guuaggaaauaaaaccu

SEQ ID NO: 2103978 - RNA, 18 nt, Human
guuaggaaauaaaaccuu

SEQ ID NO: 2103979 - RNA, 19 nt, Human
guuaggaaauaaaaccuuu

SEQ ID NO: 2103980 - RNA, 21 nt, Human
guuaggaaauaaaaccuuuca

SEQ ID NO: 2103981 - RNA, 22 nt, Human
guuaggaaauaaaaccuuucaa

SEQ ID NO: 2103982 - RNA, 23 nt, Human
guuaggaaauaaaaccuuucaaa

SEQ ID NO: 2103983 - RNA, 15 nt, Human
guuaggaguucgaga

SEQ ID NO: 2103984 - RNA, 13 nt, Human
guuaggcugggcc

SEQ ID NO: 2103985 - RNA, 16 nt, Human
guuaggcugggcccag

SEQ ID NO: 2103986 - RNA, 18 nt, Human
guuaggcugggcccagag

SEQ ID NO: 2103987 - RNA, 14 nt, Human
guuaagcagccgcc

SEQ ID NO: 2103988 - RNA, 19 nt, Human
guuaagcagccgccacauc

SEQ ID NO: 2103989 - RNA, 15 nt, Human
guuaagauaugaugu

SEQ ID NO: 2103990 - RNA, 13 nt, Human
guuacuuccuauc

SEQ ID NO: 2103991 - RNA, 14 nt, Human
guucaaaaagucua

SEQ ID NO: 2103992 - RNA, 14 nt, Human
guucaaaaugucug

SEQ ID NO: 2103993 - RNA, 13 nt, Human
guucaaaaugucu

SEQ ID NO: 2103994 - RNA, 17 nt, Human
guucaagaccagccugg

SEQ ID NO: 2103995 - RNA, 18 nt, Human
guucaagaccagccuggc

SEQ ID NO: 2103996 - RNA, 18 nt, Human
guucaagcgauucuucug

SEQ ID NO: 2103997 - RNA, 16 nt, Human
guuauugacaaacucu

SEQ ID NO: 2103998 - RNA, 14 nt, Human
guuauuuuuauaca

SEQ ID NO: 2103999 - RNA, 15 nt, Human
guuauuuuuauacag

SEQ ID NO: 2104000 - RNA, 17 nt, Human
guuauuuuuauacagua

SEQ ID NO: 2104001 - RNA, 20 nt, Human
guuauuuuuauacaguagug

SEQ ID NO: 2104002 - RNA, 22 nt, Human
guuauuuuuguuucuuccaaag

SEQ ID NO: 2104003 - RNA, 23 nt, Human
guuauuuuuauuuauuuaaauuu

SEQ ID NO: 2104004 - RNA, 14 nt, Human
guuauugaaaaaaa

SEQ ID NO: 2104005 - RNA, 13 nt, Human
guuagggaauggc

SEQ ID NO: 2104006 - RNA, 14 nt, Human
guuagggaagagaa

SEQ ID NO: 2104007 - RNA, 15 nt, Human
guuagggaagagaaa

SEQ ID NO: 2104008 - RNA, 18 nt, Human
guuagggaagagaaacag

SEQ ID NO: 2104009 - RNA, 14 nt, Human
aagcuagagauaug

SEQ ID NO: 2104010 - RNA, 12 nt, Human
aagcuaggccug

SEQ ID NO: 2104011 - RNA, 15 nt, Human
aagccugaggcuggg

SEQ ID NO: 2104012 - RNA, 20 nt, Human
aagccuagaagagcuucuga

SEQ ID NO: 2104013 - RNA, 22 nt, Human
aagccucaacuagucauuuuuu

SEQ ID NO: 2104014 - RNA, 13 nt, Human
aagccucagagaa

SEQ ID NO: 2104015 - RNA, 18 nt, Human
aagccuauuguaaauaca

SEQ ID NO: 2104016 - RNA, 17 nt, Human
guucagccccuccucug

SEQ ID NO: 2104017 - RNA, 18 nt, Human
guucagccccuccucugc

SEQ ID NO: 2104018 - RNA, 19 nt, Human
guucagccccuccucugcc

SEQ ID NO: 2104019 - RNA, 20 nt, Human
guucagccccuccucugcca

SEQ ID NO: 2104020 - RNA, 21 nt, Human
guucagccccuccucugccac

SEQ ID NO: 2104021 - RNA, 22 nt, Human
guucagccccuccucugccacc

SEQ ID NO: 2104022 - RNA, 23 nt, Human
guucagccccuccucugccaccu

SEQ ID NO: 2104023 - RNA, 13 nt, Human
guucagcuccagc

SEQ ID NO: 2104024 - RNA, 15 nt, Human
guucagcuccagcuc

SEQ ID NO: 2104025 - RNA, 11 nt, Human
aagcucacagu

SEQ ID NO: 2104026 - RNA, 15 nt, Human
aagcucacaguuccu

SEQ ID NO: 2104027 - RNA, 15 nt, Human
aagcucagcccaccc

SEQ ID NO: 2104028 - RNA, 16 nt, Human
aagcucagcccacccc

SEQ ID NO: 2104029 - RNA, 21 nt, Human
aagcucagcccaccccccuca

SEQ ID NO: 2104030 - RNA, 17 nt, Human
aagcuauuuaucuguag

SEQ ID NO: 2104031 - RNA, 21 nt, Human
gugugugcgccuacaggagug

SEQ ID NO: 2104032 - RNA, 22 nt, Human
aagcagguugaggggcuccugg

SEQ ID NO: 2104033 - RNA, 16 nt, Human
aagcagucacuuuucc

SEQ ID NO: 2104034 - RNA, 17 nt, Human
aagcagucacuuuuccu

SEQ ID NO: 2104035 - RNA, 22 nt, Human
aagcaguagaaauaauaugcau

SEQ ID NO: 2104036 - RNA, 21 nt, Human
aagcaguagaaauaauaugca

SEQ ID NO: 2104037 - RNA, 14 nt, Human
aagcaguaaaaacu

SEQ ID NO: 2104038 - RNA, 22 nt, Human
aagcaguaaaaacuguucucua

SEQ ID NO: 2104039 - RNA, 20 nt, Human
aagcaguagaaauaauaugc

SEQ ID NO: 2104040 - RNA, 13 nt, Human
aagcaguaacuga

SEQ ID NO: 2104041 - RNA, 16 nt, Human
aagcagguuuuucucc

SEQ ID NO: 2104042 - RNA, 17 nt, Human
aagcaguggacaccagg

SEQ ID NO: 2104043 - RNA, 17 nt, Human
aagcagugccuuccaua

SEQ ID NO: 2104044 - RNA, 18 nt, Human
aagcagugccuuccauaa

SEQ ID NO: 2104045 - RNA, 20 nt, Human
aagcagugccuuccauaauu

SEQ ID NO: 2104046 - RNA, 22 nt, Human
aagcaucauuauuugcagagac

SEQ ID NO: 2104047 - RNA, 14 nt, Human
aagcauccaugugu

SEQ ID NO: 2104048 - RNA, 13 nt, Human
aagcauccaggca

SEQ ID NO: 2104049 - RNA, 12 nt, Human
aagcauccaugu

SEQ ID NO: 2104050 - RNA, 22 nt, Human
aagcauaaaugcaaacacacaa

SEQ ID NO: 2104051 - RNA, 15 nt, Human
aagcagugccuucca

SEQ ID NO: 2104052 - RNA, 18 nt, Human
aagcagucuacccaccuc

SEQ ID NO: 2104053 - RNA, 19 nt, Human
aagcagucuacccaccuca

SEQ ID NO: 2104054 - RNA, 12 nt, Human
aagcaucuaaac

SEQ ID NO: 2104055 - RNA, 13 nt, Human
aagcaucuaaacu

SEQ ID NO: 2104056 - RNA, 17 nt, Human
aagcaucuaaacuuuaa

SEQ ID NO: 2104057 - RNA, 20 nt, Human
aagcaucuaaacuuuaauau

SEQ ID NO: 2104058 - RNA, 18 nt, Human
aagcaucggagggaauug

SEQ ID NO: 2104059 - RNA, 17 nt, Human
aagcauccaugugugga

SEQ ID NO: 2104060 - RNA, 19 nt, Human
aagcauccauguguggacu

SEQ ID NO: 2104061 - RNA, 20 nt, Human
aagcauccauguguggacuc

SEQ ID NO: 2104062 - RNA, 21 nt, Human
aagcauccauguguggacuca

SEQ ID NO: 2104063 - RNA, 12 nt, Human
aagcaucuccug

SEQ ID NO: 2104064 - RNA, 16 nt, Human
aagcaucuccugagga

SEQ ID NO: 2104065 - RNA, 17 nt, Human
aagcaucuccugaggau

SEQ ID NO: 2104066 - RNA, 22 nt, Human
aagcauucaauuuauucaagaa

SEQ ID NO: 2104067 - RNA, 23 nt, Human
aagcauucaauuuauucaagaaa

SEQ ID NO: 2104068 - RNA, 16 nt, Human
aagcauuacucuugua

SEQ ID NO: 2104069 - RNA, 17 nt, Human
aagcauuacucuuguaa

SEQ ID NO: 2104070 - RNA, 18 nt, Human
aagcauuacucuuguaag

SEQ ID NO: 2104071 - RNA, 19 nt, Human
aagcauuacucuuguaaga

SEQ ID NO: 2104072 - RNA, 20 nt, Human
aagcauuacucuuguaagau

SEQ ID NO: 2104073 - RNA, 21 nt, Human
aagcauuacucuuguaagauu

SEQ ID NO: 2104074 - RNA, 22 nt, Human
aagcauuacucuuguaagauuu

SEQ ID NO: 2104075 - RNA, 23 nt, Human
aagcauuacucuuguaagauuuu

SEQ ID NO: 2104076 - RNA, 21 nt, Human
aagcauucaauuuauucaaga

SEQ ID NO: 2104077 - RNA, 16 nt, Human
aagcauuuacuuugug

SEQ ID NO: 2104078 - RNA, 22 nt, Human
aagcauuggguggguaaauuca

SEQ ID NO: 2104079 - RNA, 14 nt, Human
aagccaaacucugc

SEQ ID NO: 2104080 - RNA, 15 nt, Human
aagccaaacucugcc

SEQ ID NO: 2104081 - RNA, 16 nt, Human
aagccaaacucugcca

SEQ ID NO: 2104082 - RNA, 20 nt, Human
aagccaaacucugccagcca

SEQ ID NO: 2104083 - RNA, 22 nt, Human
aagccaaagcuaggccuggcca

SEQ ID NO: 2104084 - RNA, 16 nt, Human
aagccaacgacaaagc

SEQ ID NO: 2104085 - RNA, 17 nt, Human
aagccaacagucaaaac

SEQ ID NO: 2104086 - RNA, 12 nt, Human
aagccccaggca

SEQ ID NO: 2104087 - RNA, 14 nt, Human
aagccccaggcagg

SEQ ID NO: 2104088 - RNA, 17 nt, Human
aagccccaggcaggcug

SEQ ID NO: 2104089 - RNA, 21 nt, Human
aagccccaggcaggcugugcg

SEQ ID NO: 2104090 - RNA, 12 nt, Human
aagccccauccu

SEQ ID NO: 2104091 - RNA, 22 nt, Human
aagcccaucaauuauagaaagc

SEQ ID NO: 2104092 - RNA, 19 nt, Human
aagcccugagcuuucugcu

SEQ ID NO: 2104093 - RNA, 23 nt, Human
aagcccugauuguguauauucau

SEQ ID NO: 2104094 - RNA, 17 nt, Human
aagcccuaacucagcca

SEQ ID NO: 2104095 - RNA, 9 nt, Human
aagcccucc

SEQ ID NO: 2104096 - RNA, 11 nt, Human
aagcccuccuu

SEQ ID NO: 2104097 - RNA, 12 nt, Human
aagcccuccuuc

SEQ ID NO: 2104098 - RNA, 13 nt, Human
aagcccuccuucc

SEQ ID NO: 2104099 - RNA, 14 nt, Human
aagcccuccuucca

SEQ ID NO: 2104100 - RNA, 15 nt, Human
aagcccuccuuccac

SEQ ID NO: 2104101 - RNA, 21 nt, Human
aagccccuugcucuccccugc

SEQ ID NO: 2104102 - RNA, 20 nt, Human
aagcccuuccaugucgccuc

SEQ ID NO: 2104103 - RNA, 15 nt, Human
aagcccuuccauguc

SEQ ID NO: 2104104 - RNA, 23 nt, Human
aagcccuuccaugucgccucugc

SEQ ID NO: 2104105 - RNA, 15 nt, Human
aagccgccaggaccg

SEQ ID NO: 2104106 - RNA, 13 nt, Human
aagccgcugcugg

SEQ ID NO: 2104107 - RNA, 15 nt, Human
guuaagaaugucgau

SEQ ID NO: 2104108 - RNA, 13 nt, Human
aagccaagcagcc

SEQ ID NO: 2104109 - RNA, 14 nt, Human
aagccgggaacaga

SEQ ID NO: 2104110 - RNA, 18 nt, Human
aauagcgucauaacuaga

SEQ ID NO: 2104111 - RNA, 15 nt, Human
aauagcaugucacua

SEQ ID NO: 2104112 - RNA, 12 nt, Human
aauagcauguca

SEQ ID NO: 2104113 - RNA, 19 nt, Human
aauagcacuuucauugcca

SEQ ID NO: 2104114 - RNA, 20 nt, Human
aauagcacuuucauugccag

SEQ ID NO: 2104115 - RNA, 17 nt, Human
aauagcaacaugcuuca

SEQ ID NO: 2104116 - RNA, 14 nt, Human
aauagagacuguag

SEQ ID NO: 2104117 - RNA, 15 nt, Human
aauagagacuguaga

SEQ ID NO: 2104118 - RNA, 18 nt, Human
aauagagacuguagauug

SEQ ID NO: 2104119 - RNA, 18 nt, Human
aauagaguauaugcacuu

SEQ ID NO: 2104120 - RNA, 17 nt, Human
aauagaguauaugcacu

SEQ ID NO: 2104121 - RNA, 16 nt, Human
aauagaguauaugcac

SEQ ID NO: 2104122 - RNA, 15 nt, Human
aauagaguauaugca

SEQ ID NO: 2104123 - RNA, 12 nt, Human
aauacauucuug

SEQ ID NO: 2104124 - RNA, 21 nt, Human
aauacccaugucuacacagau

SEQ ID NO: 2104125 - RNA, 15 nt, Human
aauaccucuuugaaa

SEQ ID NO: 2104126 - RNA, 19 nt, Human
aauaccucuuugaaagaag

SEQ ID NO: 2104127 - RNA, 19 nt, Human
aauacagccaaagauaauc

SEQ ID NO: 2104128 - RNA, 24 nt, Human
aauacagccaaagauaaucucuca

SEQ ID NO: 2104129 - RNA, 13 nt, Human
aauacaugcaucu

SEQ ID NO: 2104130 - RNA, 15 nt, Human
aauacauucugcuuu

SEQ ID NO: 2104131 - RNA, 13 nt, Human
aauacauuaaagc

SEQ ID NO: 2104132 - RNA, 14 nt, Human
aauacauuaaagca

SEQ ID NO: 2104133 - RNA, 15 nt, Human
aauacauuaaagcag

SEQ ID NO: 2104134 - RNA, 16 nt, Human
aauacauuaaagcagu

SEQ ID NO: 2104135 - RNA, 17 nt, Human
aauacauuaaagcaguc

SEQ ID NO: 2104136 - RNA, 16 nt, Human
aauacagggcaugcau

SEQ ID NO: 2104137 - RNA, 23 nt, Human
aauacagggcaugcauuuugcag

SEQ ID NO: 2104138 - RNA, 12 nt, Human
aauacauuuuau

SEQ ID NO: 2104139 - RNA, 20 nt, Human
aauaccaaaauuauuucaga

SEQ ID NO: 2104140 - RNA, 17 nt, Human
aaguguauuauaacagu

SEQ ID NO: 2104141 - RNA, 13 nt, Human
uaaaugugguaaa

SEQ ID NO: 2104142 - RNA, 21 nt, Human
uaaaugaaguaacuugucuua

SEQ ID NO: 2104143 - RNA, 22 nt, Human
uaaaugaaguaacuugucuuaa

SEQ ID NO: 2104144 - RNA, 18 nt, Human
uaaaugaaguuuauacag

SEQ ID NO: 2104145 - RNA, 20 nt, Human
uaaaugaaguuuauacagua

SEQ ID NO: 2104146 - RNA, 23 nt, Human
uaaaugaaguuuauacaguacag

SEQ ID NO: 2104147 - RNA, 17 nt, Human
uaaauguuaccaaaaau

SEQ ID NO: 2104148 - RNA, 18 nt, Human
uaaaugaaaaucgugaca

SEQ ID NO: 2104149 - RNA, 19 nt, Human
aaguguauuuuauaaaauu

SEQ ID NO: 2104150 - RNA, 20 nt, Human
aaguguauuuuauaaaauua

SEQ ID NO: 2104151 - RNA, 21 nt, Human
aaguguauuuuauaaaauuaa

SEQ ID NO: 2104152 - RNA, 22 nt, Human
aaguguauuuuauaaaauuaaa

SEQ ID NO: 2104153 - RNA, 18 nt, Human
aaguguaugcacgugugc

SEQ ID NO: 2104154 - RNA, 20 nt, Human
uaacaaaaucacuuccauag

SEQ ID NO: 2104155 - RNA, 20 nt, Human
uaaauuauuaugacaccuuu

SEQ ID NO: 2104156 - RNA, 12 nt, Human
uaaauuauucag

SEQ ID NO: 2104157 - RNA, 14 nt, Human
uaaauuauucaguu

SEQ ID NO: 2104158 - RNA, 17 nt, Human
uaaauuauucaguuaag

SEQ ID NO: 2104159 - RNA, 21 nt, Human
uaaauuauucaguuaagaaaa

SEQ ID NO: 2104160 - RNA, 22 nt, Human
uaaauuauucaguuaagaaaaa

SEQ ID NO: 2104161 - RNA, 20 nt, Human
uaacaaacccucguuucuga

SEQ ID NO: 2104162 - RNA, 21 nt, Human
uaacaaacccucguuucugau

SEQ ID NO: 2104163 - RNA, 23 nt, Human
uaacaaacccucguuucugauua

SEQ ID NO: 2104164 - RNA, 13 nt, Human
uaaauuauaagga

SEQ ID NO: 2104165 - RNA, 15 nt, Human
uaaauuauaaggacu

SEQ ID NO: 2104166 - RNA, 16 nt, Human
uaaauuauaaggacug

SEQ ID NO: 2104167 - RNA, 17 nt, Human
uaaauuauaaggacugc

SEQ ID NO: 2104168 - RNA, 19 nt, Human
uaaauuauaaggacugcau

SEQ ID NO: 2104169 - RNA, 20 nt, Human
uaaauuauaaggacugcaug

SEQ ID NO: 2104170 - RNA, 21 nt, Human
uaaauuauaaggacugcaugg

SEQ ID NO: 2104171 - RNA, 16 nt, Human
uaaauuauacuggaga

SEQ ID NO: 2104172 - RNA, 22 nt, Human
uaaauuauaacuuaaaauauuu

SEQ ID NO: 2104173 - RNA, 16 nt, Human
uaacaauaacuacugu

SEQ ID NO: 2104174 - RNA, 17 nt, Human
uaacaauaacuacugug

SEQ ID NO: 2104175 - RNA, 18 nt, Human
uaacaauaacuacugugu

SEQ ID NO: 2104176 - RNA, 23 nt, Human
uaacaauaacuacuguguuccug

SEQ ID NO: 2104177 - RNA, 19 nt, Human
uaacaauaacuacuguguu

SEQ ID NO: 2104178 - RNA, 21 nt, Human
uaacaauaacuacuguguucc

SEQ ID NO: 2104179 - RNA, 13 nt, Human
aauacagaggcaa

SEQ ID NO: 2104180 - RNA, 19 nt, Human
aauacagaaauuagccggg

SEQ ID NO: 2104181 - RNA, 21 nt, Human
aauacaccagguagaacacaa

SEQ ID NO: 2104182 - RNA, 17 nt, Human
uaacaaugcgaauggua

SEQ ID NO: 2104183 - RNA, 16 nt, Human
aauacacgagguauga

SEQ ID NO: 2104184 - RNA, 21 nt, Human
aauagcuauauccauguacug

SEQ ID NO: 2104185 - RNA, 13 nt, Human
aauagucugugug

SEQ ID NO: 2104186 - RNA, 14 nt, Human
aauagucuguguga

SEQ ID NO: 2104187 - RNA, 15 nt, Human
aauagucugugugaa

SEQ ID NO: 2104188 - RNA, 21 nt, Human
aauaguguguucugauuagaa

SEQ ID NO: 2104189 - RNA, 20 nt, Human
aauagugcuuaaaaaucauu

SEQ ID NO: 2104190 - RNA, 16 nt, Human
aauaguggccagacca

SEQ ID NO: 2104191 - RNA, 22 nt, Human
aauaguguguucugauuagaaa

SEQ ID NO: 2104192 - RNA, 23 nt, Human
aauaguguguucugauuagaaau

SEQ ID NO: 2104193 - RNA, 15 nt, Human
aauagcuauauccau

SEQ ID NO: 2104194 - RNA, 17 nt, Human
aauagcuauauccaugu

SEQ ID NO: 2104195 - RNA, 18 nt, Human
aauagcuauauccaugua

SEQ ID NO: 2104196 - RNA, 20 nt, Human
aauagcuauauccauguacu

SEQ ID NO: 2104197 - RNA, 22 nt, Human
aauaguucaaagccaaguuuau

SEQ ID NO: 2104198 - RNA, 14 nt, Human
aauauauucucuuu

SEQ ID NO: 2104199 - RNA, 16 nt, Human
aauauauucucuuugg

SEQ ID NO: 2104200 - RNA, 17 nt, Human
aauauauucucuuuggu

SEQ ID NO: 2104201 - RNA, 21 nt, Human
aauaguucagguaacaggcag

SEQ ID NO: 2104202 - RNA, 19 nt, Human
uaacauguaauuaaguacu

SEQ ID NO: 2104203 - RNA, 15 nt, Human
uaacauguaucccaa

SEQ ID NO: 2104204 - RNA, 15 nt, Human
uaacagucuuacugc

SEQ ID NO: 2104205 - RNA, 15 nt, Human
aauauauuucagaua

SEQ ID NO: 2104206 - RNA, 15 nt, Human
uaacagggccuugcu

SEQ ID NO: 2104207 - RNA, 16 nt, Human
uaacagggccuugcua

SEQ ID NO: 2104208 - RNA, 17 nt, Human
uaacagggccuugcuaa

SEQ ID NO: 2104209 - RNA, 18 nt, Human
uaacagggccuugcuaau

SEQ ID NO: 2104210 - RNA, 14 nt, Human
uaacaggggcuggu

SEQ ID NO: 2104211 - RNA, 15 nt, Human
uaacaggguaaauua

SEQ ID NO: 2104212 - RNA, 18 nt, Human
uaacaggguaaauuauuc

SEQ ID NO: 2104213 - RNA, 19 nt, Human
uaacaggguaaauuauuca

SEQ ID NO: 2104214 - RNA, 20 nt, Human
uaacaggguaaauuauucag

SEQ ID NO: 2104215 - RNA, 13 nt, Human
uaacaggucuccu

SEQ ID NO: 2104216 - RNA, 14 nt, Human
uaacaggucuccuc

SEQ ID NO: 2104217 - RNA, 15 nt, Human
uaacaggucuccucu

SEQ ID NO: 2104218 - RNA, 16 nt, Human
uaacaggucuccucuu

SEQ ID NO: 2104219 - RNA, 18 nt, Human
uaacaggucuccucuuaa

SEQ ID NO: 2104220 - RNA, 19 nt, Human
uaacaggucuccucuuaaa

SEQ ID NO: 2104221 - RNA, 15 nt, Human
uaacguaaauacaca

SEQ ID NO: 2104222 - RNA, 15 nt, Human
uaacuuagcaugugu

SEQ ID NO: 2104223 - RNA, 20 nt, Human
uaacuucccugaaaaaucua

SEQ ID NO: 2104224 - RNA, 14 nt, Human
uaacuauguacaau

SEQ ID NO: 2104225 - RNA, 17 nt, Human
uaacuauguacaauauu

SEQ ID NO: 2104226 - RNA, 18 nt, Human
uaacuauguacaauauuu

SEQ ID NO: 2104227 - RNA, 22 nt, Human
uaacuauguacaauauuuuaag

SEQ ID NO: 2104228 - RNA, 15 nt, Human
uaacuagcuuggaaa

SEQ ID NO: 2104229 - RNA, 17 nt, Human
uaacuaguccuuuacua

SEQ ID NO: 2104230 - RNA, 17 nt, Human
uaacuaguguugcuugg

SEQ ID NO: 2104231 - RNA, 15 nt, Human
uaacuugguuauaca

SEQ ID NO: 2104232 - RNA, 16 nt, Human
uaacuugguuauacau

SEQ ID NO: 2104233 - RNA, 19 nt, Human
uaacuugguuauacaugac

SEQ ID NO: 2104234 - RNA, 20 nt, Human
uaacuugguuauacaugaca

SEQ ID NO: 2104235 - RNA, 22 nt, Human
uaacuugguuauacaugacacu

SEQ ID NO: 2104236 - RNA, 13 nt, Human
uaacuugucuuaa

SEQ ID NO: 2104237 - RNA, 14 nt, Human
uaacuugucuuaaa

SEQ ID NO: 2104238 - RNA, 17 nt, Human
uaacuugucuuaaauaa

SEQ ID NO: 2104239 - RNA, 21 nt, Human
uaacuucccugaaaaaucuaa

SEQ ID NO: 2104240 - RNA, 23 nt, Human
uaacuucugauagcguuggaauu

SEQ ID NO: 2104241 - RNA, 15 nt, Human
aaucacguaaagcua

SEQ ID NO: 2104242 - RNA, 21 nt, Human
aaucacguaaagcuagaaaug

SEQ ID NO: 2104243 - RNA, 20 nt, Human
aaucacguaaagcuagaaau

SEQ ID NO: 2104244 - RNA, 20 nt, Human
aauauuuauuauuuucaccu

SEQ ID NO: 2104245 - RNA, 19 nt, Human
aauauuuauuauuuucacc

SEQ ID NO: 2104246 - RNA, 14 nt, Human
aauauuuauuguau

SEQ ID NO: 2104247 - RNA, 15 nt, Human
uaagacuguguauuc

SEQ ID NO: 2104248 - RNA, 12 nt, Human
aauauuuauaac

SEQ ID NO: 2104249 - RNA, 17 nt, Human
aauauuuauaacagcau

SEQ ID NO: 2104250 - RNA, 14 nt, Human
aauauuuauauuuc

SEQ ID NO: 2104251 - RNA, 17 nt, Human
aauauuuauauuucacu

SEQ ID NO: 2104252 - RNA, 18 nt, Human
aauauuuauauuucacua

SEQ ID NO: 2104253 - RNA, 17 nt, Human
uaagacuaaaucuguaa

SEQ ID NO: 2104254 - RNA, 18 nt, Human
uaagacuaaaucuguaag

SEQ ID NO: 2104255 - RNA, 23 nt, Human
uaagacuaaaucuguaagcucuu

SEQ ID NO: 2104256 - RNA, 21 nt, Human
uaagacucugucucaaaaaua

SEQ ID NO: 2104257 - RNA, 15 nt, Human
aauauuuauguaaac

SEQ ID NO: 2104258 - RNA, 12 nt, Human
aauauuuauuau

SEQ ID NO: 2104259 - RNA, 18 nt, Human
aauauuuauuaccucuga

SEQ ID NO: 2104260 - RNA, 17 nt, Human
aauauuuauuaccucug

SEQ ID NO: 2104261 - RNA, 16 nt, Human
aauauuuauuaccucu

SEQ ID NO: 2104262 - RNA, 15 nt, Human
aauauuuauuaccuc

SEQ ID NO: 2104263 - RNA, 14 nt, Human
aauauuuauuaccu

SEQ ID NO: 2104264 - RNA, 13 nt, Human
aauauuuauuacc

SEQ ID NO: 2104265 - RNA, 12 nt, Human
aauauuuauuac

SEQ ID NO: 2104266 - RNA, 23 nt, Human
aaucagcuauuuacugccaaagg

SEQ ID NO: 2104267 - RNA, 19 nt, Human
aaucagccugcuccagcug

SEQ ID NO: 2104268 - RNA, 13 nt, Human
aaucagccugcuc

SEQ ID NO: 2104269 - RNA, 18 nt, Human
aaucagccugcuccagcu

SEQ ID NO: 2104270 - RNA, 15 nt, Human
aaucacuaacauuau

SEQ ID NO: 2104271 - RNA, 16 nt, Human
aaucacuaacauuaua

SEQ ID NO: 2104272 - RNA, 22 nt, Human
aaucacuaacauuauauugcaa

SEQ ID NO: 2104273 - RNA, 12 nt, Human
aaucagcauucu

SEQ ID NO: 2104274 - RNA, 19 nt, Human
aaucagcauucucacuccu

SEQ ID NO: 2104275 - RNA, 18 nt, Human
aaucagcauucucacucc

SEQ ID NO: 2104276 - RNA, 11 nt, Human
aaucagccugc

SEQ ID NO: 2104277 - RNA, 17 nt, Human
aaucagccuacaggccu

SEQ ID NO: 2104278 - RNA, 23 nt, Human
aaucagccuaggggucagggacc

SEQ ID NO: 2104279 - RNA, 12 nt, Human
aaucagccucuu

SEQ ID NO: 2104280 - RNA, 16 nt, Human
aaucagccucuuaaag

SEQ ID NO: 2104281 - RNA, 10 nt, Human
uaaggacugc

SEQ ID NO: 2104282 - RNA, 12 nt, Human
uaaggacugcau

SEQ ID NO: 2104283 - RNA, 13 nt, Human
uaaggacugcaug

SEQ ID NO: 2104284 - RNA, 14 nt, Human
uaaggacugcaugg

SEQ ID NO: 2104285 - RNA, 21 nt, Human
uaaggacugcaugguaauuua

SEQ ID NO: 2104286 - RNA, 20 nt, Human
uaaggaagaucacuuugcuc

SEQ ID NO: 2104287 - RNA, 14 nt, Human
uaaggacaggcagg

SEQ ID NO: 2104288 - RNA, 18 nt, Human
uaaggacauuucccaggg

SEQ ID NO: 2104289 - RNA, 19 nt, Human
uaaggaauguagcugguuu

SEQ ID NO: 2104290 - RNA, 13 nt, Human
uaaggaagaaaaa

SEQ ID NO: 2104291 - RNA, 14 nt, Human
uaaggaagaaaaau

SEQ ID NO: 2104292 - RNA, 16 nt, Human
uaaggaaagcaauaaa

SEQ ID NO: 2104293 - RNA, 18 nt, Human
uaaggaaagcaauaaaug

SEQ ID NO: 2104294 - RNA, 21 nt, Human
uaaggaaagcaauaaaugaau

SEQ ID NO: 2104295 - RNA, 13 nt, Human
uaaggaagacaau

SEQ ID NO: 2104296 - RNA, 14 nt, Human
uaagcucuuugaaa

SEQ ID NO: 2104297 - RNA, 17 nt, Human
uaagcucuuugaaacaa

SEQ ID NO: 2104298 - RNA, 21 nt, Human
uaagcucuuugaaacaacuuu

SEQ ID NO: 2104299 - RNA, 17 nt, Human
uaagauguucacugugg

SEQ ID NO: 2104300 - RNA, 20 nt, Human
uaagaugugucuucaauuug

SEQ ID NO: 2104301 - RNA, 16 nt, Human
aaucaguguagcccca

SEQ ID NO: 2104302 - RNA, 17 nt, Human
aaucaguguagccccaa

SEQ ID NO: 2104303 - RNA, 21 nt, Human
aaucaguguagccccaagaag

SEQ ID NO: 2104304 - RNA, 14 nt, Human
uaagauucauauuu

SEQ ID NO: 2104305 - RNA, 15 nt, Human
uaagcaguaaaaacu

SEQ ID NO: 2104306 - RNA, 21 nt, Human
uaagcagauuuaacaauucca

SEQ ID NO: 2104307 - RNA, 21 nt, Human
uaagcuauucaguaauaacuc

SEQ ID NO: 2104308 - RNA, 20 nt, Human
uaagcucaaggcgugaggau

SEQ ID NO: 2104309 - RNA, 21 nt, Human
uaaguuacacauuuuucagau

SEQ ID NO: 2104310 - RNA, 14 nt, Human
uaaguguuguaaau

SEQ ID NO: 2104311 - RNA, 19 nt, Human
uaaguuacuauccuggcuu

SEQ ID NO: 2104312 - RNA, 23 nt, Human
uaaguauuuauauauuuauaacu

SEQ ID NO: 2104313 - RNA, 19 nt, Human
uaaguauuucagaugcuuu

SEQ ID NO: 2104314 - RNA, 20 nt, Human
uaaguauuucagaugcuuua

SEQ ID NO: 2104315 - RNA, 21 nt, Human
uaaguauuucagaugcuuuag

SEQ ID NO: 2104316 - RNA, 21 nt, Human
uaagugugaguaagagcuggu

SEQ ID NO: 2104317 - RNA, 21 nt, Human
uaaguauucuuauuuaaugaa

SEQ ID NO: 2104318 - RNA, 18 nt, Human
uaaguaccacucaggcca

SEQ ID NO: 2104319 - RNA, 13 nt, Human
uaaguauuuauau

SEQ ID NO: 2104320 - RNA, 14 nt, Human
uaaguauuuauaua

SEQ ID NO: 2104321 - RNA, 15 nt, Human
uaaguauuuauauau

SEQ ID NO: 2104322 - RNA, 17 nt, Human
uaaguauuuauauauuu

SEQ ID NO: 2104323 - RNA, 18 nt, Human
uaaguauuuauauauuua

SEQ ID NO: 2104324 - RNA, 19 nt, Human
uaaguauuuauauauuuau

SEQ ID NO: 2104325 - RNA, 17 nt, Human
uaaguuucaguugauuu

SEQ ID NO: 2104326 - RNA, 14 nt, Human
uaauaaaaaggcac

SEQ ID NO: 2104327 - RNA, 16 nt, Human
uaaggagaugggccuu

SEQ ID NO: 2104328 - RNA, 19 nt, Human
uaaggagauguaagagcuu

SEQ ID NO: 2104329 - RNA, 19 nt, Human
uaaggaucagaacagcaga

SEQ ID NO: 2104330 - RNA, 17 nt, Human
uaaggauacuuuacaug

SEQ ID NO: 2104331 - RNA, 23 nt, Human
uaaguaauuaucgggaacagugu

SEQ ID NO: 2104332 - RNA, 21 nt, Human
uaaguaauuaucgggaacagu

SEQ ID NO: 2104333 - RNA, 17 nt, Human
uaaguaccacucaggcc

SEQ ID NO: 2104334 - RNA, 18 nt, Human
aaucccagcuacucagga

SEQ ID NO: 2104335 - RNA, 17 nt, Human
aaucccauuuaaaaaaa

SEQ ID NO: 2104336 - RNA, 17 nt, Human
aaucauaaacugugugc

SEQ ID NO: 2104337 - RNA, 18 nt, Human
aaucauaaacugugugca

SEQ ID NO: 2104338 - RNA, 13 nt, Human
uaauaaaaaggca

SEQ ID NO: 2104339 - RNA, 21 nt, Human
aaucaguugcgcguucugaaa

SEQ ID NO: 2104340 - RNA, 16 nt, Human
aaucccgauucacccu

SEQ ID NO: 2104341 - RNA, 12 nt, Human
aaucccuguuca

SEQ ID NO: 2104342 - RNA, 14 nt, Human
aaucccuguucauu

SEQ ID NO: 2104343 - RNA, 17 nt, Human
aaucccuguucauugua

SEQ ID NO: 2104344 - RNA, 17 nt, Human
aaucccugggcauugcu

SEQ ID NO: 2104345 - RNA, 19 nt, Human
aaucccugggcauugcuuu

SEQ ID NO: 2104346 - RNA, 21 nt, Human
aaucccugggcauugcuuucc

SEQ ID NO: 2104347 - RNA, 18 nt, Human
aaucccauucauaacuuu

SEQ ID NO: 2104348 - RNA, 20 nt, Human
aaucccauucauaacuuuca

SEQ ID NO: 2104349 - RNA, 14 nt, Human
aauccccucauuca

SEQ ID NO: 2104350 - RNA, 19 nt, Human
aauccccucauucaggaaa

SEQ ID NO: 2104351 - RNA, 13 nt, Human
aaucucaaauaac

SEQ ID NO: 2104352 - RNA, 16 nt, Human
aaucuauuuauuggac

SEQ ID NO: 2104353 - RNA, 22 nt, Human
aaucuauuuauuggacaugucc

SEQ ID NO: 2104354 - RNA, 23 nt, Human
aaucuauuuauuggacaugucca

SEQ ID NO: 2104355 - RNA, 18 nt, Human
aaucuauuggguucauua

SEQ ID NO: 2104356 - RNA, 19 nt, Human
aaucuauuggguucauuau

SEQ ID NO: 2104357 - RNA, 19 nt, Human
aaucuauugggauuuucua

SEQ ID NO: 2104358 - RNA, 21 nt, Human
aaucuauugggauuuucuaca

SEQ ID NO: 2104359 - RNA, 15 nt, Human
aaucuauuggguuca

SEQ ID NO: 2104360 - RNA, 16 nt, Human
aaucuauuggguucau

SEQ ID NO: 2104361 - RNA, 17 nt, Human
aaucuauuggguucauu

SEQ ID NO: 2104362 - RNA, 15 nt, Human
aauccuccugaguga

SEQ ID NO: 2104363 - RNA, 23 nt, Human
aauccuccugagugaucccauuu

SEQ ID NO: 2104364 - RNA, 11 nt, Human
aauccucuggc

SEQ ID NO: 2104365 - RNA, 22 nt, Human
aaucggaucuggggcucuggga

SEQ ID NO: 2104366 - RNA, 21 nt, Human
aaucggaucuggggcucuggg

SEQ ID NO: 2104367 - RNA, 22 nt, Human
aaucggcccacagcucccaccc

SEQ ID NO: 2104368 - RNA, 18 nt, Human
aaucggcccacagcuccc

SEQ ID NO: 2104369 - RNA, 23 nt, Human
aaucggaucuggggcucugggau

SEQ ID NO: 2104370 - RNA, 15 nt, Human
aaucguuaugugugu

SEQ ID NO: 2104371 - RNA, 16 nt, Human
aaucguuaugugugua

SEQ ID NO: 2104372 - RNA, 17 nt, Human
aaucguuauguguguau

SEQ ID NO: 2104373 - RNA, 18 nt, Human
aaucguuauguguguaua

SEQ ID NO: 2104374 - RNA, 14 nt, Human
aaucuaaaagcuuu

SEQ ID NO: 2104375 - RNA, 18 nt, Human
aaugcugguuuuucaguu

SEQ ID NO: 2104376 - RNA, 17 nt, Human
aaugcugucaacuauga

SEQ ID NO: 2104377 - RNA, 19 nt, Human
aaugcugguuuuccuaaau

SEQ ID NO: 2104378 - RNA, 21 nt, Human
aaugcugguuuuccuaaaugc

SEQ ID NO: 2104379 - RNA, 22 nt, Human
aaugcugguuuuccuaaaugca

SEQ ID NO: 2104380 - RNA, 23 nt, Human
aaugcugguuuuccuaaaugcag

SEQ ID NO: 2104381 - RNA, 17 nt, Human
aaugcuucugacuucau

SEQ ID NO: 2104382 - RNA, 21 nt, Human
aaugcuucugacuucauagau

SEQ ID NO: 2104383 - RNA, 12 nt, Human
aaugcuuggaau

SEQ ID NO: 2104384 - RNA, 19 nt, Human
aaugcuuggaauaucugcu

SEQ ID NO: 2104385 - RNA, 21 nt, Human
aaugcuuggaauaucugcugu

SEQ ID NO: 2104386 - RNA, 22 nt, Human
aaugcuuggaauaucugcugua

SEQ ID NO: 2104387 - RNA, 23 nt, Human
aaugcuuggaauaucugcuguau

SEQ ID NO: 2104388 - RNA, 15 nt, Human
aaugcugguuuuccu

SEQ ID NO: 2104389 - RNA, 18 nt, Human
aaugcugguuuuccuaaa

SEQ ID NO: 2104390 - RNA, 18 nt, Human
aaugcauguuaggaaaau

SEQ ID NO: 2104391 - RNA, 22 nt, Human
aaugcuggcuguuggcuggggg

SEQ ID NO: 2104392 - RNA, 21 nt, Human
aaugcuggcuguuggcugggg

SEQ ID NO: 2104393 - RNA, 23 nt, Human
aaugcauccauuccucagggaca

SEQ ID NO: 2104394 - RNA, 19 nt, Human
aaugcauccauuccucagg

SEQ ID NO: 2104395 - RNA, 15 nt, Human
aaugcaucaauccug

SEQ ID NO: 2104396 - RNA, 20 nt, Human
aaugcaucaauccugugugg

SEQ ID NO: 2104397 - RNA, 21 nt, Human
aaugcaucaauccuguguggu

SEQ ID NO: 2104398 - RNA, 18 nt, Human
uaauuuuuuugagacaga

SEQ ID NO: 2104399 - RNA, 22 nt, Human
uaauuuuuuucaauauuuauua

SEQ ID NO: 2104400 - RNA, 16 nt, Human
uaauuuaacccagcuc

SEQ ID NO: 2104401 - RNA, 22 nt, Human
uaauuuuuuuuuuccuuuuaaa

SEQ ID NO: 2104402 - RNA, 17 nt, Human
uaauuuuucacuucaaa

SEQ ID NO: 2104403 - RNA, 15 nt, Human
uacaauuauaucagu

SEQ ID NO: 2104404 - RNA, 19 nt, Human
uacaauuauaucaguccuc

SEQ ID NO: 2104405 - RNA, 18 nt, Human
uacaauucuacauuguca

SEQ ID NO: 2104406 - RNA, 13 nt, Human
uacaauugaaaug

SEQ ID NO: 2104407 - RNA, 14 nt, Human
uacaauugaaauga

SEQ ID NO: 2104408 - RNA, 16 nt, Human
uacaauugaaaugacu

SEQ ID NO: 2104409 - RNA, 19 nt, Human
aaugcauauccugagccau

SEQ ID NO: 2104410 - RNA, 18 nt, Human
uacaauuauuuuuacagu

SEQ ID NO: 2104411 - RNA, 22 nt, Human
uacaauuauuuuuacaguucuc

SEQ ID NO: 2104412 - RNA, 16 nt, Human
aauguaauugaauaaa

SEQ ID NO: 2104413 - RNA, 14 nt, Human
aauguaauuugugu

SEQ ID NO: 2104414 - RNA, 16 nt, Human
aauguaauuuguguaa

SEQ ID NO: 2104415 - RNA, 17 nt, Human
aauguaauuuguguaau

SEQ ID NO: 2104416 - RNA, 14 nt, Human
aauguaauugaaua

SEQ ID NO: 2104417 - RNA, 17 nt, Human
uacaccgggccuggaga

SEQ ID NO: 2104418 - RNA, 15 nt, Human
uacaccgggccugga

SEQ ID NO: 2104419 - RNA, 16 nt, Human
uacagagaggagaaac

SEQ ID NO: 2104420 - RNA, 17 nt, Human
uacagagaggagaaaca

SEQ ID NO: 2104421 - RNA, 18 nt, Human
uacagagaggagaaacac

SEQ ID NO: 2104422 - RNA, 20 nt, Human
uacagagaggagaaacacau

SEQ ID NO: 2104423 - RNA, 21 nt, Human
uacagagaggagaaacacauc

SEQ ID NO: 2104424 - RNA, 22 nt, Human
uacagagaggagaaacacaucu

SEQ ID NO: 2104425 - RNA, 13 nt, Human
uacagagaaggaa

SEQ ID NO: 2104426 - RNA, 14 nt, Human
uacagagaaggaau

SEQ ID NO: 2104427 - RNA, 23 nt, Human
uacagagaaggaaugucuuuggu

SEQ ID NO: 2104428 - RNA, 17 nt, Human
aauguaaguaaaugucu

SEQ ID NO: 2104429 - RNA, 19 nt, Human
aauguaaguaaaugucugu

SEQ ID NO: 2104430 - RNA, 22 nt, Human
aauguaaauaaaggauuucuag

SEQ ID NO: 2104431 - RNA, 16 nt, Human
aaugguuuucaaaaua

SEQ ID NO: 2104432 - RNA, 15 nt, Human
aauguaaagacaaaa

SEQ ID NO: 2104433 - RNA, 20 nt, Human
aauggauccccagugaaaac

SEQ ID NO: 2104434 - RNA, 22 nt, Human
aauggauccccagugaaaacua

SEQ ID NO: 2104435 - RNA, 14 nt, Human
aaugguuuucaaaa

SEQ ID NO: 2104436 - RNA, 17 nt, Human
aaugguuugcaaggaag

SEQ ID NO: 2104437 - RNA, 18 nt, Human
aaugguuugcaaggaagc

SEQ ID NO: 2104438 - RNA, 19 nt, Human
aaugguuugcaaggaagcc

SEQ ID NO: 2104439 - RNA, 19 nt, Human
aauggagucaguuugcagu

SEQ ID NO: 2104440 - RNA, 19 nt, Human
aauggaguagaccccuggc

SEQ ID NO: 2104441 - RNA, 21 nt, Human
aauggaguagaccccuggcug

SEQ ID NO: 2104442 - RNA, 23 nt, Human
aauggaguagaccccuggcuggu

SEQ ID NO: 2104443 - RNA, 20 nt, Human
aaugagaaaaugucuuuauu

SEQ ID NO: 2104444 - RNA, 17 nt, Human
aaugacuaaaaaacaaa

SEQ ID NO: 2104445 - RNA, 20 nt, Human
aaugacuaaaaaacaaagaa

SEQ ID NO: 2104446 - RNA, 17 nt, Human
aaugacuaaaaauauua

SEQ ID NO: 2104447 - RNA, 24 nt, Human
aaugacuaaaaauauuauaacuua

SEQ ID NO: 2104448 - RNA, 18 nt, Human
aaucuguaagcucuuuga

SEQ ID NO: 2104449 - RNA, 17 nt, Human
aaugagaacauguuggu

SEQ ID NO: 2104450 - RNA, 21 nt, Human
aaugagaacauguugguauuu

SEQ ID NO: 2104451 - RNA, 17 nt, Human
aaugagaaggaauuuga

SEQ ID NO: 2104452 - RNA, 11 nt, Human
aaugagccugg

SEQ ID NO: 2104453 - RNA, 17 nt, Human
aaugagaucccgccucu

SEQ ID NO: 2104454 - RNA, 21 nt, Human
aaugagauagaagauguuugc

SEQ ID NO: 2104455 - RNA, 16 nt, Human
aaugagauaguagcau

SEQ ID NO: 2104456 - RNA, 18 nt, Human
aaugaggucagagccugc

SEQ ID NO: 2104457 - RNA, 16 nt, Human
aaugaggucagagccu

SEQ ID NO: 2104458 - RNA, 15 nt, Human
aaugaggucccaggc

SEQ ID NO: 2104459 - RNA, 16 nt, Human
aaugaggucccaggca

SEQ ID NO: 2104460 - RNA, 14 nt, Human
aaugagggccaaga

SEQ ID NO: 2104461 - RNA, 16 nt, Human
aaugaggucugaaaug

SEQ ID NO: 2104462 - RNA, 18 nt, Human
aaugagggccaagaaaga

SEQ ID NO: 2104463 - RNA, 14 nt, Human
aaugagccuggcaa

SEQ ID NO: 2104464 - RNA, 12 nt, Human
aaugaggaggaa

SEQ ID NO: 2104465 - RNA, 18 nt, Human
aaugaggaggaaggagag

SEQ ID NO: 2104466 - RNA, 12 nt, Human
aaugagccuggc

SEQ ID NO: 2104467 - RNA, 13 nt, Human
aaugagccuggca

SEQ ID NO: 2104468 - RNA, 15 nt, Human
aaugaguuucuuuua

SEQ ID NO: 2104469 - RNA, 21 nt, Human
aaugaguuuuuauggggcuga

SEQ ID NO: 2104470 - RNA, 19 nt, Human
aaugaggucugaaauggag

SEQ ID NO: 2104471 - RNA, 19 nt, Human
aaugaguuaccuacauuuu

SEQ ID NO: 2104472 - RNA, 14 nt, Human
uaauuauguuauug

SEQ ID NO: 2104473 - RNA, 15 nt, Human
uaauuauguuauuga

SEQ ID NO: 2104474 - RNA, 19 nt, Human
uaauuauguuauugaaaaa

SEQ ID NO: 2104475 - RNA, 20 nt, Human
aaugcaaacacacaaaggua

SEQ ID NO: 2104476 - RNA, 14 nt, Human
aaugcacaaugucu

SEQ ID NO: 2104477 - RNA, 15 nt, Human
aaugcacaaugucuu

SEQ ID NO: 2104478 - RNA, 16 nt, Human
aaugcacaaugucuug

SEQ ID NO: 2104479 - RNA, 17 nt, Human
aaugcacaaugucuugg

SEQ ID NO: 2104480 - RNA, 19 nt, Human
aaugcacaaugucuuggua

SEQ ID NO: 2104481 - RNA, 13 nt, Human
aaugcacacuagc

SEQ ID NO: 2104482 - RNA, 17 nt, Human
aaugcacacuagccucu

SEQ ID NO: 2104483 - RNA, 20 nt, Human
aaugauuuccaaagagaaaa

SEQ ID NO: 2104484 - RNA, 18 nt, Human
aaugauuuccaaagagaa

SEQ ID NO: 2104485 - RNA, 21 nt, Human
aaugauuuuacuuagcaaugu

SEQ ID NO: 2104486 - RNA, 17 nt, Human
uaauucccauuuugcaa

SEQ ID NO: 2104487 - RNA, 18 nt, Human
uaauucccauuuugcaaa

SEQ ID NO: 2104488 - RNA, 19 nt, Human
uaauucccauuuugcaaaa

SEQ ID NO: 2104489 - RNA, 20 nt, Human
uaauucccauuuugcaaaau

SEQ ID NO: 2104490 - RNA, 21 nt, Human
uaauucccauuuugcaaaauu

SEQ ID NO: 2104491 - RNA, 23 nt, Human
uaauucccauuuugcaaaauuuc

SEQ ID NO: 2104492 - RNA, 15 nt, Human
uaauucccuaucuuu

SEQ ID NO: 2104493 - RNA, 20 nt, Human
uaauucccuaucuuuuaguu

SEQ ID NO: 2104494 - RNA, 21 nt, Human
uacauuucaccuacuuuguaa

SEQ ID NO: 2104495 - RNA, 20 nt, Human
uacauuccuugauaauguug

SEQ ID NO: 2104496 - RNA, 22 nt, Human
uacauuccuugauaauguugug

SEQ ID NO: 2104497 - RNA, 22 nt, Human
aauuaaguuagggaauggcaca

SEQ ID NO: 2104498 - RNA, 15 nt, Human
uacauucaauguuua

SEQ ID NO: 2104499 - RNA, 21 nt, Human
uacauuaucuaacugugcuca

SEQ ID NO: 2104500 - RNA, 24 nt, Human
uacauuaucuaacugugcucaaga

SEQ ID NO: 2104501 - RNA, 21 nt, Human
uacauuuccaaauucacaagu

SEQ ID NO: 2104502 - RNA, 14 nt, Human
uacauuucugaaau

SEQ ID NO: 2104503 - RNA, 16 nt, Human
uacauuucugaaauga

SEQ ID NO: 2104504 - RNA, 22 nt, Human
uaccagcuacuccggaggcuga

SEQ ID NO: 2104505 - RNA, 21 nt, Human
uaccagccuccguauuucaga

SEQ ID NO: 2104506 - RNA, 20 nt, Human
uaccaggccgccccagccuc

SEQ ID NO: 2104507 - RNA, 22 nt, Human
uaccaggccgccccagccucug

SEQ ID NO: 2104508 - RNA, 14 nt, Human
uaccagguguucua

SEQ ID NO: 2104509 - RNA, 14 nt, Human
uaccagguugaaag

SEQ ID NO: 2104510 - RNA, 15 nt, Human
uaccagguugaaaga

SEQ ID NO: 2104511 - RNA, 16 nt, Human
uaccagguugaaagac

SEQ ID NO: 2104512 - RNA, 16 nt, Human
uaccaguaaaguguaa

SEQ ID NO: 2104513 - RNA, 19 nt, Human
uaccaguaaaguguaacau

SEQ ID NO: 2104514 - RNA, 11 nt, Human
uaccagugugg

SEQ ID NO: 2104515 - RNA, 17 nt, Human
aauguuguauucaguga

SEQ ID NO: 2104516 - RNA, 16 nt, Human
aauguugugguuuguu

SEQ ID NO: 2104517 - RNA, 17 nt, Human
aauguugugguuuguug

SEQ ID NO: 2104518 - RNA, 17 nt, Human
aauguuuaaaaaaguuu

SEQ ID NO: 2104519 - RNA, 19 nt, Human
aauguuuaaaaaaguuuaa

SEQ ID NO: 2104520 - RNA, 16 nt, Human
aauuaaguacuaugua

SEQ ID NO: 2104521 - RNA, 17 nt, Human
aauuaaguacuauguau

SEQ ID NO: 2104522 - RNA, 22 nt, Human
aauguucauuguaauguuacug

SEQ ID NO: 2104523 - RNA, 24 nt, Human
aauguucauuguaauguuacugau

SEQ ID NO: 2104524 - RNA, 11 nt, Human
aauguucauug

SEQ ID NO: 2104525 - RNA, 12 nt, Human
aauguucauugu

SEQ ID NO: 2104526 - RNA, 17 nt, Human
aauguucauuguaaugu

SEQ ID NO: 2104527 - RNA, 21 nt, Human
aauguucauuguaauguuacu

SEQ ID NO: 2104528 - RNA, 22 nt, Human
uacagagaggucaagcccagga

SEQ ID NO: 2104529 - RNA, 16 nt, Human
uacagggagcugggac

SEQ ID NO: 2104530 - RNA, 21 nt, Human
uacagggcaugcauuuugcag

SEQ ID NO: 2104531 - RNA, 22 nt, Human
uacagggcgagacucugucuca

SEQ ID NO: 2104532 - RNA, 14 nt, Human
uacaggggaauauu

SEQ ID NO: 2104533 - RNA, 16 nt, Human
uacaggggaauauuuu

SEQ ID NO: 2104534 - RNA, 19 nt, Human
uacaggggaauauuuuauu

SEQ ID NO: 2104535 - RNA, 21 nt, Human
uacaggggaauauuuuauuca

SEQ ID NO: 2104536 - RNA, 22 nt, Human
uacaggggaauauuuuauucaa

SEQ ID NO: 2104537 - RNA, 21 nt, Human
aaugugcugaaugguuuucaa

SEQ ID NO: 2104538 - RNA, 19 nt, Human
uacaggguagauaaccugu

SEQ ID NO: 2104539 - RNA, 22 nt, Human
uacaggguagcagguaccacug

SEQ ID NO: 2104540 - RNA, 18 nt, Human
uacaggguagcagguacc

SEQ ID NO: 2104541 - RNA, 21 nt, Human
uacagguaaggugagggaaua

SEQ ID NO: 2104542 - RNA, 16 nt, Human
aauguuauagugaauu

SEQ ID NO: 2104543 - RNA, 22 nt, Human
aauguuauagugaauuaucccu

SEQ ID NO: 2104544 - RNA, 15 nt, Human
aauguuagauaguua

SEQ ID NO: 2104545 - RNA, 20 nt, Human
aauguuacugaucaugcauu

SEQ ID NO: 2104546 - RNA, 21 nt, Human
aauguuacugaucaugcauug

SEQ ID NO: 2104547 - RNA, 22 nt, Human
aauguuacugaucaugcauugu

SEQ ID NO: 2104548 - RNA, 16 nt, Human
aauguggcagcugucu

SEQ ID NO: 2104549 - RNA, 17 nt, Human
aauguggcagcugucuc

SEQ ID NO: 2104550 - RNA, 17 nt, Human
aauguggccuaaaaaug

SEQ ID NO: 2104551 - RNA, 20 nt, Human
aauguggccuaaaaaugcaa

SEQ ID NO: 2104552 - RNA, 15 nt, Human
aauguuacauuguuu

SEQ ID NO: 2104553 - RNA, 16 nt, Human
aauguuacauagugua

SEQ ID NO: 2104554 - RNA, 17 nt, Human
aauguuacauaguguag

SEQ ID NO: 2104555 - RNA, 20 nt, Human
aauguuacauaguguaggcu

SEQ ID NO: 2104556 - RNA, 13 nt, Human
aauguuacugauc

SEQ ID NO: 2104557 - RNA, 18 nt, Human
aauguuacugaucaugca

SEQ ID NO: 2104558 - RNA, 19 nt, Human
aauguuacugaucaugcau

SEQ ID NO: 2104559 - RNA, 22 nt, Human
aauguuauguuguguucuaaua

SEQ ID NO: 2104560 - RNA, 23 nt, Human
uacccucaggcauaggccugggu

SEQ ID NO: 2104561 - RNA, 21 nt, Human
uacccucaggcauaggccugg

SEQ ID NO: 2104562 - RNA, 23 nt, Human
uaccucuuuuagucauuuugcuu

SEQ ID NO: 2104563 - RNA, 19 nt, Human
uaccugaacacuuauugcu

SEQ ID NO: 2104564 - RNA, 21 nt, Human
uaccugaacacuuauugcuuu

SEQ ID NO: 2104565 - RNA, 17 nt, Human
aauuacauguaaaacau

SEQ ID NO: 2104566 - RNA, 15 nt, Human
uaccugaucccacuc

SEQ ID NO: 2104567 - RNA, 16 nt, Human
uaccucuuugaaagaa

SEQ ID NO: 2104568 - RNA, 20 nt, Human
uaccugugcguuacuaauug

SEQ ID NO: 2104569 - RNA, 14 nt, Human
aauuauguuauuga

SEQ ID NO: 2104570 - RNA, 16 nt, Human
aauuauguuauugaaa

SEQ ID NO: 2104571 - RNA, 17 nt, Human
aauuauguuauugaaaa

SEQ ID NO: 2104572 - RNA, 18 nt, Human
aauuauguuauugaaaaa

SEQ ID NO: 2104573 - RNA, 19 nt, Human
aauuauguuauugaaaaaa

SEQ ID NO: 2104574 - RNA, 10 nt, Human
aauuauuguu

SEQ ID NO: 2104575 - RNA, 19 nt, Human
aauuauuguuuauauuuuc

SEQ ID NO: 2104576 - RNA, 20 nt, Human
aauuauuguuuauauuuuca

SEQ ID NO: 2104577 - RNA, 22 nt, Human
aauuauuguuuauauuuucaau

SEQ ID NO: 2104578 - RNA, 22 nt, Human
aauuaugucugcugaauaauaa

SEQ ID NO: 2104579 - RNA, 12 nt, Human
aauuagagcaga

SEQ ID NO: 2104580 - RNA, 22 nt, Human
aauuagagcagaugaccccucc

SEQ ID NO: 2104581 - RNA, 18 nt, Human
aauuagaaauuggcugga

SEQ ID NO: 2104582 - RNA, 21 nt, Human
aauuaccacaccaucucccau

SEQ ID NO: 2104583 - RNA, 18 nt, Human
aauuaccaguaaagugua

SEQ ID NO: 2104584 - RNA, 20 nt, Human
aauuaccaguaaaguguaac

SEQ ID NO: 2104585 - RNA, 22 nt, Human
aauuaccaguaaaguguaacau

SEQ ID NO: 2104586 - RNA, 23 nt, Human
aauuaccaguaaaguguaacaua

SEQ ID NO: 2104587 - RNA, 12 nt, Human
aauuauuucaga

SEQ ID NO: 2104588 - RNA, 13 nt, Human
aauuauuucagaa

SEQ ID NO: 2104589 - RNA, 20 nt, Human
aauuauuuauuuauggagga

SEQ ID NO: 2104590 - RNA, 17 nt, Human
aauuauuucagaaaugu

SEQ ID NO: 2104591 - RNA, 15 nt, Human
aauuauuuuaaauua

SEQ ID NO: 2104592 - RNA, 17 nt, Human
aauuauuuuaaauuaua

SEQ ID NO: 2104593 - RNA, 18 nt, Human
aauuauuuuaaauuauaa

SEQ ID NO: 2104594 - RNA, 20 nt, Human
aauuauuuuaaauuauaagg

SEQ ID NO: 2104595 - RNA, 21 nt, Human
aauuauuuuaaauuauaagga

SEQ ID NO: 2104596 - RNA, 22 nt, Human
aauuauuuuaaauuauaaggac

SEQ ID NO: 2104597 - RNA, 16 nt, Human
aauucagugcuguacu

SEQ ID NO: 2104598 - RNA, 16 nt, Human
aauucauauuuaugaa

SEQ ID NO: 2104599 - RNA, 13 nt, Human
aauucagcugccc

SEQ ID NO: 2104600 - RNA, 20 nt, Human
aauucagauauauuuuucac

SEQ ID NO: 2104601 - RNA, 21 nt, Human
uaugucucgugguaggacugu

SEQ ID NO: 2104602 - RNA, 13 nt, Human
uauguccauaucu

SEQ ID NO: 2104603 - RNA, 15 nt, Human
uauguccauaucuaa

SEQ ID NO: 2104604 - RNA, 15 nt, Human
uaugucccuugcugu

SEQ ID NO: 2104605 - RNA, 22 nt, Human
acaggcccggcuccaggcuccu

SEQ ID NO: 2104606 - RNA, 21 nt, Human
acaggcccggcuccaggcucc

SEQ ID NO: 2104607 - RNA, 20 nt, Human
acaggcccggcuccaggcuc

SEQ ID NO: 2104608 - RNA, 18 nt, Human
acaggcccggcuccaggc

SEQ ID NO: 2104609 - RNA, 22 nt, Human
acaggcccuuccucuccacugc

SEQ ID NO: 2104610 - RNA, 15 nt, Human
acaggcccuuccucu

SEQ ID NO: 2104611 - RNA, 19 nt, Human
acaggccucacacacaaug

SEQ ID NO: 2104612 - RNA, 13 nt, Human
acaggcccuuccu

SEQ ID NO: 2104613 - RNA, 15 nt, Human
acaggacucugccuc

SEQ ID NO: 2104614 - RNA, 16 nt, Human
acaggacucugccucc

SEQ ID NO: 2104615 - RNA, 11 nt, Human
acaggagaaau

SEQ ID NO: 2104616 - RNA, 14 nt, Human
acaggagaccuggc

SEQ ID NO: 2104617 - RNA, 15 nt, Human
acaggagagaaaggg

SEQ ID NO: 2104618 - RNA, 18 nt, Human
acaggagagaaaggggau

SEQ ID NO: 2104619 - RNA, 19 nt, Human
acaggagagaaaggggaug

SEQ ID NO: 2104620 - RNA, 13 nt, Human
acaggagcuggga

SEQ ID NO: 2104621 - RNA, 15 nt, Human
acaggcagauacagg

SEQ ID NO: 2104622 - RNA, 20 nt, Human
acaggaaaauuuuaaaaaua

SEQ ID NO: 2104623 - RNA, 16 nt, Human
acaggaaaauccucug

SEQ ID NO: 2104624 - RNA, 17 nt, Human
acaggaaaauccucugg

SEQ ID NO: 2104625 - RNA, 18 nt, Human
acaggaaaauccucuggc

SEQ ID NO: 2104626 - RNA, 23 nt, Human
acaggaaaauccucuggcuggcu

SEQ ID NO: 2104627 - RNA, 16 nt, Human
acaggaaagggaaggc

SEQ ID NO: 2104628 - RNA, 19 nt, Human
acaggaaagggaaggcccc

SEQ ID NO: 2104629 - RNA, 22 nt, Human
acaggaaagggaaggccccaca

SEQ ID NO: 2104630 - RNA, 14 nt, Human
acaggagcugggau

SEQ ID NO: 2104631 - RNA, 13 nt, Human
acaggcagcacag

SEQ ID NO: 2104632 - RNA, 17 nt, Human
acaggcagcacagagac

SEQ ID NO: 2104633 - RNA, 14 nt, Human
acaggcagcauuua

SEQ ID NO: 2104634 - RNA, 17 nt, Human
acaggcccggcuccagg

SEQ ID NO: 2104635 - RNA, 16 nt, Human
acaggcccggcuccag

SEQ ID NO: 2104636 - RNA, 18 nt, Human
acaggcccaagagaugaa

SEQ ID NO: 2104637 - RNA, 22 nt, Human
acaggcccaagagaugaagagu

SEQ ID NO: 2104638 - RNA, 22 nt, Human
acaggcccggcgcgguggcuca

SEQ ID NO: 2104639 - RNA, 18 nt, Human
acagcuucagccaggagc

SEQ ID NO: 2104640 - RNA, 17 nt, Human
acagcuucagccaggag

SEQ ID NO: 2104641 - RNA, 15 nt, Human
acagcuucagccagg

SEQ ID NO: 2104642 - RNA, 21 nt, Human
acagcugugcuguaacacaag

SEQ ID NO: 2104643 - RNA, 23 nt, Human
acagcuguggugagguugggcag

SEQ ID NO: 2104644 - RNA, 14 nt, Human
acagcugucccugu

SEQ ID NO: 2104645 - RNA, 18 nt, Human
acagcugucccugucacc

SEQ ID NO: 2104646 - RNA, 15 nt, Human
acagcugucccuguc

SEQ ID NO: 2104647 - RNA, 16 nt, Human
acagcugucccuguca

SEQ ID NO: 2104648 - RNA, 19 nt, Human
acagcuaaugggacacuaa

SEQ ID NO: 2104649 - RNA, 17 nt, Human
acagcuaaugggacacu

SEQ ID NO: 2104650 - RNA, 16 nt, Human
acagcuaaugggacac

SEQ ID NO: 2104651 - RNA, 15 nt, Human
acagcuaaugggaca

SEQ ID NO: 2104652 - RNA, 20 nt, Human
acagcucaagucuucccuga

SEQ ID NO: 2104653 - RNA, 23 nt, Human
acagcucaagucuucccugauca

SEQ ID NO: 2104654 - RNA, 21 nt, Human
acagcucagcuuuuugucuuu

SEQ ID NO: 2104655 - RNA, 16 nt, Human
acagcuaugggagccc

SEQ ID NO: 2104656 - RNA, 17 nt, Human
acagcuaugggagcccc

SEQ ID NO: 2104657 - RNA, 21 nt, Human
acagcuaugggagccccaggg

SEQ ID NO: 2104658 - RNA, 13 nt, Human
acagcuacacaga

SEQ ID NO: 2104659 - RNA, 21 nt, Human
acagcuucauuuccugugucu

SEQ ID NO: 2104660 - RNA, 19 nt, Human
acagcuucauuuccugugu

SEQ ID NO: 2104661 - RNA, 17 nt, Human
acagcuucauuuccugu

SEQ ID NO: 2104662 - RNA, 22 nt, Human
acagcuucagccaggagcuggg

SEQ ID NO: 2104663 - RNA, 21 nt, Human
acagcuucagccaggagcugg

SEQ ID NO: 2104664 - RNA, 20 nt, Human
acagcuucucauccugcagg

SEQ ID NO: 2104665 - RNA, 17 nt, Human
acagcuucaugccuuug

SEQ ID NO: 2104666 - RNA, 19 nt, Human
acagcuucaugccuuugua

SEQ ID NO: 2104667 - RNA, 20 nt, Human
acagcuucaugccuuuguaa

SEQ ID NO: 2104668 - RNA, 22 nt, Human
acagcuuccccucucuccuccu

SEQ ID NO: 2104669 - RNA, 21 nt, Human
acaggaaaagcugcugacagu

SEQ ID NO: 2104670 - RNA, 20 nt, Human
acaggaaaagcugcugacag

SEQ ID NO: 2104671 - RNA, 19 nt, Human
acaggaaaagcugcugaca

SEQ ID NO: 2104672 - RNA, 18 nt, Human
acaggaaaagcugcugac

SEQ ID NO: 2104673 - RNA, 21 nt, Human
acagcuucucauccugcaggc

SEQ ID NO: 2104674 - RNA, 20 nt, Human
acagcuuccccucucuccuc

SEQ ID NO: 2104675 - RNA, 16 nt, Human
acagcuaccaugacaa

SEQ ID NO: 2104676 - RNA, 22 nt, Human
uaugauauuuuuuuaagucuuu

SEQ ID NO: 2104677 - RNA, 23 nt, Human
uaugggacucaaugcacugacau

SEQ ID NO: 2104678 - RNA, 16 nt, Human
uaugggacucaaugca

SEQ ID NO: 2104679 - RNA, 13 nt, Human
uauggcagugucu

SEQ ID NO: 2104680 - RNA, 16 nt, Human
uauggcagugucuuuc

SEQ ID NO: 2104681 - RNA, 22 nt, Human
acagcuaaucagcauucucacu

SEQ ID NO: 2104682 - RNA, 12 nt, Human
acagcgcugggu

SEQ ID NO: 2104683 - RNA, 20 nt, Human
uauggucaucuuuuucucua

SEQ ID NO: 2104684 - RNA, 14 nt, Human
uaugguauuugagu

SEQ ID NO: 2104685 - RNA, 22 nt, Human
uauggucaacacuuaaggguuu

SEQ ID NO: 2104686 - RNA, 13 nt, Human
uaugguauaaugg

SEQ ID NO: 2104687 - RNA, 20 nt, Human
uaugguauaaugguugacug

SEQ ID NO: 2104688 - RNA, 17 nt, Human
acagcgagacuccgucu

SEQ ID NO: 2104689 - RNA, 18 nt, Human
acagcgagacuccgucuc

SEQ ID NO: 2104690 - RNA, 14 nt, Human
uaugauauuccaua

SEQ ID NO: 2104691 - RNA, 16 nt, Human
uaugauauuccauagu

SEQ ID NO: 2104692 - RNA, 18 nt, Human
uaugauauuccauaguau

SEQ ID NO: 2104693 - RNA, 19 nt, Human
uaugauauuccauaguaua

SEQ ID NO: 2104694 - RNA, 20 nt, Human
uaugauauuccauaguauau

SEQ ID NO: 2104695 - RNA, 18 nt, Human
uaugauauugcauaugca

SEQ ID NO: 2104696 - RNA, 14 nt, Human
uauggcagcgaaag

SEQ ID NO: 2104697 - RNA, 18 nt, Human
uaugcucuacccuugugu

SEQ ID NO: 2104698 - RNA, 14 nt, Human
uaugccauuuguuu

SEQ ID NO: 2104699 - RNA, 23 nt, Human
uaugccauuuguuuauuuuuaua

SEQ ID NO: 2104700 - RNA, 22 nt, Human
uaugccauagcaagauugcuua

SEQ ID NO: 2104701 - RNA, 14 nt, Human
uaugccagcucagu

SEQ ID NO: 2104702 - RNA, 17 nt, Human
uaugccagcucaguccc

SEQ ID NO: 2104703 - RNA, 20 nt, Human
acagauuuggugaauuugaa

SEQ ID NO: 2104704 - RNA, 15 nt, Human
acagcaauuccucag

SEQ ID NO: 2104705 - RNA, 19 nt, Human
acagcaauuccucaggcua

SEQ ID NO: 2104706 - RNA, 17 nt, Human
acagcaauuccucaggc

SEQ ID NO: 2104707 - RNA, 15 nt, Human
acagcagagguucuu

SEQ ID NO: 2104708 - RNA, 17 nt, Human
acagcagccccugcaca

SEQ ID NO: 2104709 - RNA, 15 nt, Human
acagcccgcaugcag

SEQ ID NO: 2104710 - RNA, 20 nt, Human
acagcccgcaugcagcagcu

SEQ ID NO: 2104711 - RNA, 22 nt, Human
acagcccgcaugcagcagcuug

SEQ ID NO: 2104712 - RNA, 12 nt, Human
acagcccuguca

SEQ ID NO: 2104713 - RNA, 13 nt, Human
acagcccugucag

SEQ ID NO: 2104714 - RNA, 20 nt, Human
acagcccugucagugcagcc

SEQ ID NO: 2104715 - RNA, 21 nt, Human
acagcccugucagugcagccc

SEQ ID NO: 2104716 - RNA, 18 nt, Human
uaugaaaaauaugauauu

SEQ ID NO: 2104717 - RNA, 14 nt, Human
uaugaaaaauauga

SEQ ID NO: 2104718 - RNA, 16 nt, Human
acagaaagguuuucuu

SEQ ID NO: 2104719 - RNA, 10 nt, Human
acagaaaaca

SEQ ID NO: 2104720 - RNA, 11 nt, Human
acagaaaacaa

SEQ ID NO: 2104721 - RNA, 12 nt, Human
acagaaaacaac

SEQ ID NO: 2104722 - RNA, 14 nt, Human
acagaaaacaacaa

SEQ ID NO: 2104723 - RNA, 17 nt, Human
acagaaaacaacaaaaa

SEQ ID NO: 2104724 - RNA, 18 nt, Human
acagaaaacaacaaaaaa

SEQ ID NO: 2104725 - RNA, 19 nt, Human
acagaaaacaacaaaaaau

SEQ ID NO: 2104726 - RNA, 21 nt, Human
acagaaaacaacaaaaaauaa

SEQ ID NO: 2104727 - RNA, 20 nt, Human
acagaaaacgguuaaaacug

SEQ ID NO: 2104728 - RNA, 13 nt, Human
acagaaaacuaga

SEQ ID NO: 2104729 - RNA, 14 nt, Human
acagaaaacuagaa

SEQ ID NO: 2104730 - RNA, 17 nt, Human
acagaaaacuagaauuu

SEQ ID NO: 2104731 - RNA, 11 nt, Human
acagacaggag

SEQ ID NO: 2104732 - RNA, 13 nt, Human
acagacaggagaa

SEQ ID NO: 2104733 - RNA, 14 nt, Human
acagaaaaaaaaca

SEQ ID NO: 2104734 - RNA, 16 nt, Human
acagaaaaaaaacaca

SEQ ID NO: 2104735 - RNA, 18 nt, Human
acagaaaaaaaacacaca

SEQ ID NO: 2104736 - RNA, 21 nt, Human
acacuuguaauuuuguaucuu

SEQ ID NO: 2104737 - RNA, 18 nt, Human
acacuuuugagacuuuuu

SEQ ID NO: 2104738 - RNA, 17 nt, Human
acacuugguuggguccu

SEQ ID NO: 2104739 - RNA, 20 nt, Human
acacuugguuggguccucac

SEQ ID NO: 2104740 - RNA, 22 nt, Human
acacuugguuggguccucacau

SEQ ID NO: 2104741 - RNA, 19 nt, Human
uauauauguugauuucuug

SEQ ID NO: 2104742 - RNA, 19 nt, Human
acacuuccuguccagagag

SEQ ID NO: 2104743 - RNA, 14 nt, Human
acacuuccugucca

SEQ ID NO: 2104744 - RNA, 16 nt, Human
acacuuccuguccaga

SEQ ID NO: 2104745 - RNA, 13 nt, Human
acacuuccugucc

SEQ ID NO: 2104746 - RNA, 20 nt, Human
acacuucugugagaccccca

SEQ ID NO: 2104747 - RNA, 23 nt, Human
acacuucugugagacccccacac

SEQ ID NO: 2104748 - RNA, 22 nt, Human
acacuucuucuuggucuuauuu

SEQ ID NO: 2104749 - RNA, 15 nt, Human
acacuuccaccagcc

SEQ ID NO: 2104750 - RNA, 19 nt, Human
acacuucagagagcuggua

SEQ ID NO: 2104751 - RNA, 20 nt, Human
acacuucagagagcugguag

SEQ ID NO: 2104752 - RNA, 16 nt, Human
acacuuccaccagccu

SEQ ID NO: 2104753 - RNA, 17 nt, Human
acacuuccaccagccug

SEQ ID NO: 2104754 - RNA, 21 nt, Human
acacuuccaccagccugcacu

SEQ ID NO: 2104755 - RNA, 14 nt, Human
acacuuccauaauc

SEQ ID NO: 2104756 - RNA, 19 nt, Human
acacuuccaccagccugca

SEQ ID NO: 2104757 - RNA, 22 nt, Human
acacuucaggcucuucuccuuu

SEQ ID NO: 2104758 - RNA, 19 nt, Human
acacuucaggcucuucucc

SEQ ID NO: 2104759 - RNA, 15 nt, Human
acacuucaggcucuu

SEQ ID NO: 2104760 - RNA, 14 nt, Human
acacuuauugcuuu

SEQ ID NO: 2104761 - RNA, 20 nt, Human
acacuuauugcuuugaaacu

SEQ ID NO: 2104762 - RNA, 16 nt, Human
acacuucagagagcug

SEQ ID NO: 2104763 - RNA, 17 nt, Human
acacuucagagagcugg

SEQ ID NO: 2104764 - RNA, 18 nt, Human
acacuucagagagcuggu

SEQ ID NO: 2104765 - RNA, 20 nt, Human
acacuuaaggguuuuagaaa

SEQ ID NO: 2104766 - RNA, 13 nt, Human
acacuucagacug

SEQ ID NO: 2104767 - RNA, 13 nt, Human
acacuucagagag

SEQ ID NO: 2104768 - RNA, 18 nt, Human
acacuuacacuuuaugca

SEQ ID NO: 2104769 - RNA, 21 nt, Human
acacuuacacuuuaugcacaa

SEQ ID NO: 2104770 - RNA, 16 nt, Human
acacuuacacuuuaug

SEQ ID NO: 2104771 - RNA, 16 nt, Human
acacuuaacagaugca

SEQ ID NO: 2104772 - RNA, 19 nt, Human
uaucaauuaccacaccauc

SEQ ID NO: 2104773 - RNA, 14 nt, Human
uaucaauuugucau

SEQ ID NO: 2104774 - RNA, 16 nt, Human
uaucaauuugucauuu

SEQ ID NO: 2104775 - RNA, 19 nt, Human
uaucaauuugucauuuuga

SEQ ID NO: 2104776 - RNA, 20 nt, Human
uaucaauuugucauuuugaa

SEQ ID NO: 2104777 - RNA, 21 nt, Human
uaucaauuugucauuuugaag

SEQ ID NO: 2104778 - RNA, 14 nt, Human
uaucacacaaagca

SEQ ID NO: 2104779 - RNA, 13 nt, Human
uaucaccuccccu

SEQ ID NO: 2104780 - RNA, 20 nt, Human
acagacguaugcuuauuuua

SEQ ID NO: 2104781 - RNA, 15 nt, Human
acagacguaugcuua

SEQ ID NO: 2104782 - RNA, 15 nt, Human
acagacgucccucca

SEQ ID NO: 2104783 - RNA, 16 nt, Human
acagacgucccuccac

SEQ ID NO: 2104784 - RNA, 17 nt, Human
acagacauucugccagg

SEQ ID NO: 2104785 - RNA, 14 nt, Human
acagacaggagaaa

SEQ ID NO: 2104786 - RNA, 15 nt, Human
acagacaggagaaau

SEQ ID NO: 2104787 - RNA, 21 nt, Human
acagacaggagaaaugcaucc

SEQ ID NO: 2104788 - RNA, 17 nt, Human
uaucagaauucucagaa

SEQ ID NO: 2104789 - RNA, 20 nt, Human
uaucaccuccccuccuugcc

SEQ ID NO: 2104790 - RNA, 14 nt, Human
uaucaccuccccuc

SEQ ID NO: 2104791 - RNA, 15 nt, Human
uaucaccuccccucc

SEQ ID NO: 2104792 - RNA, 16 nt, Human
uaucaccuccccuccu

SEQ ID NO: 2104793 - RNA, 18 nt, Human
uaucagaguauccacugu

SEQ ID NO: 2104794 - RNA, 14 nt, Human
uauccaaucuuguu

SEQ ID NO: 2104795 - RNA, 12 nt, Human
uauccacccagc

SEQ ID NO: 2104796 - RNA, 19 nt, Human
uauccaacaucaacaucuu

SEQ ID NO: 2104797 - RNA, 12 nt, Human
uaucccauccca

SEQ ID NO: 2104798 - RNA, 16 nt, Human
uaucccaucccauccc

SEQ ID NO: 2104799 - RNA, 16 nt, Human
uaucccacggaaaaug

SEQ ID NO: 2104800 - RNA, 19 nt, Human
uaucccacggaaaaugcca

SEQ ID NO: 2104801 - RNA, 21 nt, Human
uaucccacggaaaaugccaau

SEQ ID NO: 2104802 - RNA, 13 nt, Human
uauccacccagcc

SEQ ID NO: 2104803 - RNA, 14 nt, Human
uauccacccagccc

SEQ ID NO: 2104804 - RNA, 15 nt, Human
uauccacccagccca

SEQ ID NO: 2104805 - RNA, 21 nt, Human
uaucuauauaguaccuuugcu

SEQ ID NO: 2104806 - RNA, 23 nt, Human
uaucuauauaguaccuuugcucu

SEQ ID NO: 2104807 - RNA, 23 nt, Human
uauagcaauccauguuaguuuuu

SEQ ID NO: 2104808 - RNA, 18 nt, Human
uauagccuaggugacaga

SEQ ID NO: 2104809 - RNA, 14 nt, Human
uauaggucacuccu

SEQ ID NO: 2104810 - RNA, 17 nt, Human
uauaggucacuccuggg

SEQ ID NO: 2104811 - RNA, 19 nt, Human
uauaggaacauaugaaaau

SEQ ID NO: 2104812 - RNA, 12 nt, Human
uauagcuugaaa

SEQ ID NO: 2104813 - RNA, 16 nt, Human
uauagcuugaaacaua

SEQ ID NO: 2104814 - RNA, 17 nt, Human
uauauaguaccuuugcu

SEQ ID NO: 2104815 - RNA, 18 nt, Human
uauauaguaccuuugcuc

SEQ ID NO: 2104816 - RNA, 14 nt, Human
uauauagcuugaaa

SEQ ID NO: 2104817 - RNA, 22 nt, Human
uauauaguuuauugacaauaau

SEQ ID NO: 2104818 - RNA, 17 nt, Human
uauauaguuuacuauuu

SEQ ID NO: 2104819 - RNA, 15 nt, Human
uauauaucuaucuua

SEQ ID NO: 2104820 - RNA, 14 nt, Human
uauauaugugugug

SEQ ID NO: 2104821 - RNA, 21 nt, Human
uauauauucuggcugauaaaa

SEQ ID NO: 2104822 - RNA, 13 nt, Human
uauauauuuauaa

SEQ ID NO: 2104823 - RNA, 14 nt, Human
uauauauuuuaauu

SEQ ID NO: 2104824 - RNA, 14 nt, Human
uauauauuuauaac

SEQ ID NO: 2104825 - RNA, 15 nt, Human
uauauauuuauaacu

SEQ ID NO: 2104826 - RNA, 11 nt, Human
uauaauuuaau

SEQ ID NO: 2104827 - RNA, 16 nt, Human
uauaauuuaaugcaug

SEQ ID NO: 2104828 - RNA, 22 nt, Human
uauacacuuacacuuuaugcac

SEQ ID NO: 2104829 - RNA, 22 nt, Human
uauaauuuaacuucagagggaa

SEQ ID NO: 2104830 - RNA, 15 nt, Human
uauaauuguuuuuua

SEQ ID NO: 2104831 - RNA, 18 nt, Human
uauaauuguuuuuuaucu

SEQ ID NO: 2104832 - RNA, 20 nt, Human
uauaauuguuuuuuaucuuu

SEQ ID NO: 2104833 - RNA, 22 nt, Human
uauaauuguuuuuuaucuuuuc

SEQ ID NO: 2104834 - RNA, 15 nt, Human
uauaauuuaacuuca

SEQ ID NO: 2104835 - RNA, 15 nt, Human
uauacaggggaauau

SEQ ID NO: 2104836 - RNA, 16 nt, Human
uauacaggggaauauu

SEQ ID NO: 2104837 - RNA, 19 nt, Human
uauacaggggaauauuuua

SEQ ID NO: 2104838 - RNA, 23 nt, Human
uauacaggggaauauuuuauuca

SEQ ID NO: 2104839 - RNA, 21 nt, Human
uauacauaacaggguaaauua

SEQ ID NO: 2104840 - RNA, 22 nt, Human
uauacauaacaggguaaauuau

SEQ ID NO: 2104841 - RNA, 23 nt, Human
uauacauaacaggguaaauuauu

SEQ ID NO: 2104842 - RNA, 18 nt, Human
uauagaucacauaacaga

SEQ ID NO: 2104843 - RNA, 22 nt, Human
uauagaucacauaacagaaugc

SEQ ID NO: 2104844 - RNA, 23 nt, Human
uauagaucacauaacagaaugca

SEQ ID NO: 2104845 - RNA, 13 nt, Human
uauagaucagcca

SEQ ID NO: 2104846 - RNA, 15 nt, Human
uauacaugacacuga

SEQ ID NO: 2104847 - RNA, 16 nt, Human
uauacaugacacugaa

SEQ ID NO: 2104848 - RNA, 17 nt, Human
uauacaugacacugaaa

SEQ ID NO: 2104849 - RNA, 20 nt, Human
uauacaugacacugaaaugc

SEQ ID NO: 2104850 - RNA, 22 nt, Human
uauacaugacacugaaaugccu

SEQ ID NO: 2104851 - RNA, 23 nt, Human
uauacaugacacugaaaugccuu

SEQ ID NO: 2104852 - RNA, 14 nt, Human
uagucaccuuuuaa

SEQ ID NO: 2104853 - RNA, 20 nt, Human
uagucaccuuuuaaauccug

SEQ ID NO: 2104854 - RNA, 21 nt, Human
uagucaccuuuuaaauccugu

SEQ ID NO: 2104855 - RNA, 22 nt, Human
uagucaccuuuuaaauccuguu

SEQ ID NO: 2104856 - RNA, 14 nt, Human
acacuaagggugua

SEQ ID NO: 2104857 - RNA, 21 nt, Human
acacucaaaagcugggcaggu

SEQ ID NO: 2104858 - RNA, 22 nt, Human
uauaacuuaaaaaaaugacaga

SEQ ID NO: 2104859 - RNA, 18 nt, Human
uauaacuuaaaauauuuu

SEQ ID NO: 2104860 - RNA, 20 nt, Human
uauaacugccuuaaaacuuu

SEQ ID NO: 2104861 - RNA, 18 nt, Human
uauaacuuaaaaaaauga

SEQ ID NO: 2104862 - RNA, 19 nt, Human
uauaacuuaaaaaaaugac

SEQ ID NO: 2104863 - RNA, 16 nt, Human
uauaacugaaggagaa

SEQ ID NO: 2104864 - RNA, 19 nt, Human
uauaacugccuuaaaacuu

SEQ ID NO: 2104865 - RNA, 16 nt, Human
uauaacucaucauaaa

SEQ ID NO: 2104866 - RNA, 17 nt, Human
uauaacucaucauaaaa

SEQ ID NO: 2104867 - RNA, 18 nt, Human
uauaacucaucauaaaau

SEQ ID NO: 2104868 - RNA, 19 nt, Human
uauaacucaucauaaaaua

SEQ ID NO: 2104869 - RNA, 20 nt, Human
uauaacucaucauaaaauaa

SEQ ID NO: 2104870 - RNA, 21 nt, Human
uauaacucaucauaaaauaaa

SEQ ID NO: 2104871 - RNA, 14 nt, Human
uaggcaggaccugu

SEQ ID NO: 2104872 - RNA, 15 nt, Human
uaggcaggaccugug

SEQ ID NO: 2104873 - RNA, 18 nt, Human
uaggcaguuagagaugcc

SEQ ID NO: 2104874 - RNA, 22 nt, Human
uaggcaguuagagaugccuccc

SEQ ID NO: 2104875 - RNA, 24 nt, Human
uaggcaguuagagaugccucccug

SEQ ID NO: 2104876 - RNA, 14 nt, Human
uaggcaucccaggg

SEQ ID NO: 2104877 - RNA, 16 nt, Human
uaggcaucccagggga

SEQ ID NO: 2104878 - RNA, 19 nt, Human
uaggcaucccaggggacca

SEQ ID NO: 2104879 - RNA, 21 nt, Human
uaggcaugagggaucacaggg

SEQ ID NO: 2104880 - RNA, 23 nt, Human
uaggaaaauuggacauuaagcau

SEQ ID NO: 2104881 - RNA, 14 nt, Human
uaggaaauaaaacc

SEQ ID NO: 2104882 - RNA, 16 nt, Human
uaggaaauaaaaccuu

SEQ ID NO: 2104883 - RNA, 17 nt, Human
uaggaaauaaaaccuuu

SEQ ID NO: 2104884 - RNA, 19 nt, Human
uaggaaauaaaaccuuuca

SEQ ID NO: 2104885 - RNA, 23 nt, Human
uaggaguucgagaccagccuggc

SEQ ID NO: 2104886 - RNA, 17 nt, Human
uaggaguucgagaccag

SEQ ID NO: 2104887 - RNA, 21 nt, Human
uaggaguucgagaccagccug

SEQ ID NO: 2104888 - RNA, 13 nt, Human
uagggaagagaaa

SEQ ID NO: 2104889 - RNA, 14 nt, Human
uagggaagagaaac

SEQ ID NO: 2104890 - RNA, 15 nt, Human
uagggaagagaaaca

SEQ ID NO: 2104891 - RNA, 17 nt, Human
uagggauagucaccuuu

SEQ ID NO: 2104892 - RNA, 20 nt, Human
uagggauagucaccuuuuaa

SEQ ID NO: 2104893 - RNA, 21 nt, Human
uagggauagucaccuuuuaaa

SEQ ID NO: 2104894 - RNA, 23 nt, Human
uagggauagucaccuuuuaaauc

SEQ ID NO: 2104895 - RNA, 16 nt, Human
uagggauucaggcugc

SEQ ID NO: 2104896 - RNA, 18 nt, Human
uagggauguucuggcccu

SEQ ID NO: 2104897 - RNA, 15 nt, Human
uagggauucaggcug

SEQ ID NO: 2104898 - RNA, 13 nt, Human
uagggaagauaau

SEQ ID NO: 2104899 - RNA, 16 nt, Human
uagggaaaaguucaua

SEQ ID NO: 2104900 - RNA, 13 nt, Human
uagggaaaugaaa

SEQ ID NO: 2104901 - RNA, 16 nt, Human
uagggaaaugaaagaa

SEQ ID NO: 2104902 - RNA, 21 nt, Human
uagggccuggucccugggagg

SEQ ID NO: 2104903 - RNA, 23 nt, Human
uagggcuacaaaaccugauguua

SEQ ID NO: 2104904 - RNA, 11 nt, Human
uagggcugggu

SEQ ID NO: 2104905 - RNA, 12 nt, Human
uagggcugggug

SEQ ID NO: 2104906 - RNA, 13 nt, Human
uagggguugcuaa

SEQ ID NO: 2104907 - RNA, 17 nt, Human
uagcgcccaguugggug

SEQ ID NO: 2104908 - RNA, 21 nt, Human
uagcgcugccgcaccccagag

SEQ ID NO: 2104909 - RNA, 22 nt, Human
uagcgcugccgcaccccagagu

SEQ ID NO: 2104910 - RNA, 21 nt, Human
uagcguuggaauuaaaacaau

SEQ ID NO: 2104911 - RNA, 23 nt, Human
uagcguuggaauuaaaacaaugu

SEQ ID NO: 2104912 - RNA, 14 nt, Human
uagcgcccaguugg

SEQ ID NO: 2104913 - RNA, 23 nt, Human
uagcgacauugcagucugcuucu

SEQ ID NO: 2104914 - RNA, 15 nt, Human
uagcgaggcucuaac

SEQ ID NO: 2104915 - RNA, 19 nt, Human
uagcgaggcucuaaccaca

SEQ ID NO: 2104916 - RNA, 21 nt, Human
uagccuuagaagucacacagu

SEQ ID NO: 2104917 - RNA, 14 nt, Human
uagccuguggcagu

SEQ ID NO: 2104918 - RNA, 23 nt, Human
uagccuguggcaguaaagagaaa

SEQ ID NO: 2104919 - RNA, 17 nt, Human
acaauauuuuguggcuu

SEQ ID NO: 2104920 - RNA, 16 nt, Human
acaauauuuaaaauuu

SEQ ID NO: 2104921 - RNA, 14 nt, Human
acaauauuuauugu

SEQ ID NO: 2104922 - RNA, 15 nt, Human
acaauauuuauugua

SEQ ID NO: 2104923 - RNA, 16 nt, Human
acaauauuuauuguau

SEQ ID NO: 2104924 - RNA, 19 nt, Human
acaauauuuauuguauuuu

SEQ ID NO: 2104925 - RNA, 14 nt, Human
acaauauuuuaagc

SEQ ID NO: 2104926 - RNA, 15 nt, Human
acaauauuuuaagca

SEQ ID NO: 2104927 - RNA, 16 nt, Human
acaauauuuuaagcau

SEQ ID NO: 2104928 - RNA, 17 nt, Human
acaauauuuuaagcauu

SEQ ID NO: 2104929 - RNA, 18 nt, Human
acaauauuuuaagcauua

SEQ ID NO: 2104930 - RNA, 23 nt, Human
acaauauuuuaagcauuacucuu

SEQ ID NO: 2104931 - RNA, 14 nt, Human
acaaucaaaggaaa

SEQ ID NO: 2104932 - RNA, 19 nt, Human
acaaucaaaggaaaauagu

SEQ ID NO: 2104933 - RNA, 23 nt, Human
acaaucaacucuaauagugcuua

SEQ ID NO: 2104934 - RNA, 20 nt, Human
uagccuuagaagucacacag

SEQ ID NO: 2104935 - RNA, 19 nt, Human
acaaucagccacauucuag

SEQ ID NO: 2104936 - RNA, 14 nt, Human
acaauauuguuucu

SEQ ID NO: 2104937 - RNA, 15 nt, Human
acaauauuguuucua

SEQ ID NO: 2104938 - RNA, 10 nt, Human
acaauauuua

SEQ ID NO: 2104939 - RNA, 13 nt, Human
acaauauuuaaaa

SEQ ID NO: 2104940 - RNA, 14 nt, Human
acaauauuuaaaau

SEQ ID NO: 2104941 - RNA, 18 nt, Human
acaauauuuaaaauuuau

SEQ ID NO: 2104942 - RNA, 17 nt, Human
uagcacuuauguuacug

SEQ ID NO: 2104943 - RNA, 19 nt, Human
acaaaucuaagggaaaaag

SEQ ID NO: 2104944 - RNA, 22 nt, Human
uagcuuuauuuuuuaaguauuu

SEQ ID NO: 2104945 - RNA, 19 nt, Human
uagcuuuauuuuuuaagua

SEQ ID NO: 2104946 - RNA, 20 nt, Human
uagcuuuauuuuuuaaguau

SEQ ID NO: 2104947 - RNA, 13 nt, Human
uagcuuuucccuu

SEQ ID NO: 2104948 - RNA, 14 nt, Human
uagcuuuacccuca

SEQ ID NO: 2104949 - RNA, 15 nt, Human
uagcuuuacccucag

SEQ ID NO: 2104950 - RNA, 19 nt, Human
uagcuuuacuguuuguuau

SEQ ID NO: 2104951 - RNA, 18 nt, Human
uagcuuuauuuuuuaagu

SEQ ID NO: 2104952 - RNA, 15 nt, Human
uagcuuggaaacugg

SEQ ID NO: 2104953 - RNA, 20 nt, Human
uagcuuggaaacuggaugag

SEQ ID NO: 2104954 - RNA, 16 nt, Human
uagcuugcaccuuguc

SEQ ID NO: 2104955 - RNA, 19 nt, Human
uagcuugggaggcuucccc

SEQ ID NO: 2104956 - RNA, 12 nt, Human
uagcuuccauga

SEQ ID NO: 2104957 - RNA, 19 nt, Human
uagcuugauaaagggccaa

SEQ ID NO: 2104958 - RNA, 19 nt, Human
uagcuugaaggaucuguuu

SEQ ID NO: 2104959 - RNA, 13 nt, Human
uagcuucugaccu

SEQ ID NO: 2104960 - RNA, 17 nt, Human
uagcuucugaccucagc

SEQ ID NO: 2104961 - RNA, 18 nt, Human
uagcuucugaccucagca

SEQ ID NO: 2104962 - RNA, 19 nt, Human
uagcuucugaccucagcau

SEQ ID NO: 2104963 - RNA, 24 nt, Human
acacaggcccggcuccaggcuccu

SEQ ID NO: 2104964 - RNA, 23 nt, Human
acacaggcccggcuccaggcucc

SEQ ID NO: 2104965 - RNA, 22 nt, Human
acacaggcccggcuccaggcuc

SEQ ID NO: 2104966 - RNA, 21 nt, Human
acacaggcccggcuccaggcu

SEQ ID NO: 2104967 - RNA, 20 nt, Human
acacaggcccggcuccaggc

SEQ ID NO: 2104968 - RNA, 19 nt, Human
acacaggcccggcuccagg

SEQ ID NO: 2104969 - RNA, 18 nt, Human
acacaggcccggcuccag

SEQ ID NO: 2104970 - RNA, 17 nt, Human
acacaggcccggcucca

SEQ ID NO: 2104971 - RNA, 16 nt, Human
acacaggcccggcucc

SEQ ID NO: 2104972 - RNA, 21 nt, Human
acacaggcaacugaggcagac

SEQ ID NO: 2104973 - RNA, 13 nt, Human
acacacagaggaa

SEQ ID NO: 2104974 - RNA, 22 nt, Human
acacacagaggaagagcaggca

SEQ ID NO: 2104975 - RNA, 13 nt, Human
acacacagacaca

SEQ ID NO: 2104976 - RNA, 23 nt, Human
uagguuuuaauaauuuuuuaauu

SEQ ID NO: 2104977 - RNA, 16 nt, Human
uaguaaaaauaaaauu

SEQ ID NO: 2104978 - RNA, 13 nt, Human
uaguaaaaauaaa

SEQ ID NO: 2104979 - RNA, 15 nt, Human
uagguuuuuuuguau

SEQ ID NO: 2104980 - RNA, 19 nt, Human
uagguuuuuuuguauagua

SEQ ID NO: 2104981 - RNA, 15 nt, Human
uaguaaaaauacaaa

SEQ ID NO: 2104982 - RNA, 22 nt, Human
uaguagagacaggguuuugcca

SEQ ID NO: 2104983 - RNA, 15 nt, Human
uaguagagacagggu

SEQ ID NO: 2104984 - RNA, 14 nt, Human
uaguagagacaggg

SEQ ID NO: 2104985 - RNA, 15 nt, Human
uaguaauguuuuaua

SEQ ID NO: 2104986 - RNA, 18 nt, Human
acacaaauuaucuuaaaa

SEQ ID NO: 2104987 - RNA, 15 nt, Human
acaaugcagaugcca

SEQ ID NO: 2104988 - RNA, 19 nt, Human
acaaugcagaugccagagc

SEQ ID NO: 2104989 - RNA, 20 nt, Human
acaaugcagaugccagagca

SEQ ID NO: 2104990 - RNA, 12 nt, Human
acacaacaaaaa

SEQ ID NO: 2104991 - RNA, 13 nt, Human
acacaacaaaaau

SEQ ID NO: 2104992 - RNA, 15 nt, Human
acacaacaaaaauuu

SEQ ID NO: 2104993 - RNA, 13 nt, Human
acacaacacacac

SEQ ID NO: 2104994 - RNA, 16 nt, Human
acaaugaugaugauaa

SEQ ID NO: 2104995 - RNA, 17 nt, Human
acaaugaugaugauaau

SEQ ID NO: 2104996 - RNA, 19 nt, Human
acaaugaugaugauaauga

SEQ ID NO: 2104997 - RNA, 21 nt, Human
acaaugaugaugauaaugaug

SEQ ID NO: 2104998 - RNA, 14 nt, Human
acacaauacaauaa

SEQ ID NO: 2104999 - RNA, 14 nt, Human
acacacacacacag

SEQ ID NO: 2105000 - RNA, 12 nt, Human
acacaauacaau

SEQ ID NO: 2105001 - RNA, 22 nt, Human
acacaagcuuuuuuacacaaau

SEQ ID NO: 2105002 - RNA, 14 nt, Human
acacaaguaaaacu

SEQ ID NO: 2105003 - RNA, 18 nt, Human
acacaaauacuuauucau

SEQ ID NO: 2105004 - RNA, 14 nt, Human
acacacacacagga

SEQ ID NO: 2105005 - RNA, 15 nt, Human
acacacacacacagg

SEQ ID NO: 2105006 - RNA, 13 nt, Human
acacacacacagg

SEQ ID NO: 2105007 - RNA, 12 nt, Human
uaggguggcccu

SEQ ID NO: 2105008 - RNA, 15 nt, Human
uaggguuauaauaau

SEQ ID NO: 2105009 - RNA, 17 nt, Human
uaggguuauaauaaugu

SEQ ID NO: 2105010 - RNA, 15 nt, Human
uagggucucuucagg

SEQ ID NO: 2105011 - RNA, 15 nt, Human
uaggguaaggugccu

SEQ ID NO: 2105012 - RNA, 18 nt, Human
uaggguaaggugccuucu

SEQ ID NO: 2105013 - RNA, 16 nt, Human
uacuuuguaugauauu

SEQ ID NO: 2105014 - RNA, 20 nt, Human
uacuuuguaugauauuccau

SEQ ID NO: 2105015 - RNA, 22 nt, Human
uacuuuguaugauauuccauag

SEQ ID NO: 2105016 - RNA, 22 nt, Human
uacuuuguaagugagagagaca

SEQ ID NO: 2105017 - RNA, 14 nt, Human
aauucauguuucuu

SEQ ID NO: 2105018 - RNA, 16 nt, Human
uacuuuuucauucuuu

SEQ ID NO: 2105019 - RNA, 15 nt, Human
uagaaaacaggaaaa

SEQ ID NO: 2105020 - RNA, 17 nt, Human
uagaaaacaggaaaaaa

SEQ ID NO: 2105021 - RNA, 22 nt, Human
uagaaaacaggaaaaaaacuuu

SEQ ID NO: 2105022 - RNA, 23 nt, Human
uagaaaacaggaaaaaaacuuuu

SEQ ID NO: 2105023 - RNA, 13 nt, Human
uagaaaaagcagu

SEQ ID NO: 2105024 - RNA, 23 nt, Human
uagaaaaaggagcuuaccuccca

SEQ ID NO: 2105025 - RNA, 13 nt, Human
uacuuuuccuucc

SEQ ID NO: 2105026 - RNA, 17 nt, Human
uacuuuuccuucccuca

SEQ ID NO: 2105027 - RNA, 11 nt, Human
uacuuuuggaa

SEQ ID NO: 2105028 - RNA, 13 nt, Human
uacuuuuggaauc

SEQ ID NO: 2105029 - RNA, 14 nt, Human
uacuuuuggaaucu

SEQ ID NO: 2105030 - RNA, 18 nt, Human
uacuuuuggaaucuagaa

SEQ ID NO: 2105031 - RNA, 20 nt, Human
uacuuuuggaaucuagaaga

SEQ ID NO: 2105032 - RNA, 22 nt, Human
uagaaaauuuaaaacauuacuc

SEQ ID NO: 2105033 - RNA, 17 nt, Human
uagaaaauuuaaaacau

SEQ ID NO: 2105034 - RNA, 19 nt, Human
uagaaacucaccauguaaa

SEQ ID NO: 2105035 - RNA, 12 nt, Human
uagaagaaauga

SEQ ID NO: 2105036 - RNA, 14 nt, Human
uagaagaaaugaaa

SEQ ID NO: 2105037 - RNA, 16 nt, Human
uagaagaaaugaaauu

SEQ ID NO: 2105038 - RNA, 17 nt, Human
uagaagaaaugaaauuu

SEQ ID NO: 2105039 - RNA, 19 nt, Human
uagaagaaaugaaauuuua

SEQ ID NO: 2105040 - RNA, 20 nt, Human
uagaagaaaugaaauuuuac

SEQ ID NO: 2105041 - RNA, 22 nt, Human
uagaagaaaugaaauuuuacca

SEQ ID NO: 2105042 - RNA, 23 nt, Human
uagaagaaaugaaauuuuaccaa

SEQ ID NO: 2105043 - RNA, 18 nt, Human
uagaagaacauccaagga

SEQ ID NO: 2105044 - RNA, 22 nt, Human
uagaagaacauccaaggagaaa

SEQ ID NO: 2105045 - RNA, 21 nt, Human
uagaagaauacaaacauauuu

SEQ ID NO: 2105046 - RNA, 15 nt, Human
uagaagaaaaaagaa

SEQ ID NO: 2105047 - RNA, 18 nt, Human
uagaagaaaaaagaaugu

SEQ ID NO: 2105048 - RNA, 12 nt, Human
uagaagaacugc

SEQ ID NO: 2105049 - RNA, 11 nt, Human
aauuuggaauu

SEQ ID NO: 2105050 - RNA, 15 nt, Human
aauuuggaauucugu

SEQ ID NO: 2105051 - RNA, 18 nt, Human
uagaccaagcuuguccaa

SEQ ID NO: 2105052 - RNA, 20 nt, Human
uagacacaggauagauaacu

SEQ ID NO: 2105053 - RNA, 14 nt, Human
uagaccaagcuugu

SEQ ID NO: 2105054 - RNA, 19 nt, Human
uagacauuuguaaauguaa

SEQ ID NO: 2105055 - RNA, 22 nt, Human
aauuuuaagugcuuuguaaugg

SEQ ID NO: 2105056 - RNA, 13 nt, Human
aauuuuaauuuau

SEQ ID NO: 2105057 - RNA, 15 nt, Human
aauuuuaauuuauuu

SEQ ID NO: 2105058 - RNA, 18 nt, Human
aauuugggggaaaauuua

SEQ ID NO: 2105059 - RNA, 18 nt, Human
aauuuggccugcacuaau

SEQ ID NO: 2105060 - RNA, 10 nt, Human
uagacagagu

SEQ ID NO: 2105061 - RNA, 11 nt, Human
uagaaggaaac

SEQ ID NO: 2105062 - RNA, 13 nt, Human
uagaaggaaacua

SEQ ID NO: 2105063 - RNA, 15 nt, Human
uagaaggagacagag

SEQ ID NO: 2105064 - RNA, 17 nt, Human
uagaaggagacagagcu

SEQ ID NO: 2105065 - RNA, 23 nt, Human
uagaaggagacagagcugguugg

SEQ ID NO: 2105066 - RNA, 17 nt, Human
uagaaggauguacauuu

SEQ ID NO: 2105067 - RNA, 21 nt, Human
uagaaggauguacauuuccaa

SEQ ID NO: 2105068 - RNA, 20 nt, Human
uagaaguaggaagugaaaau

SEQ ID NO: 2105069 - RNA, 16 nt, Human
uagaaggguuauauuu

SEQ ID NO: 2105070 - RNA, 19 nt, Human
uagaagggccaguccugcc

SEQ ID NO: 2105071 - RNA, 22 nt, Human
uagaagggccaguccugccugg

SEQ ID NO: 2105072 - RNA, 16 nt, Human
uagaauuuuaagugcu

SEQ ID NO: 2105073 - RNA, 18 nt, Human
uagaauuuuuaauguuuu

SEQ ID NO: 2105074 - RNA, 16 nt, Human
uagcacguuuaaaguu

SEQ ID NO: 2105075 - RNA, 18 nt, Human
uagcacguuuaaaguucu

SEQ ID NO: 2105076 - RNA, 19 nt, Human
uagcacguuuaaaguucug

SEQ ID NO: 2105077 - RNA, 20 nt, Human
uagcacguuuaaaguucugu

SEQ ID NO: 2105078 - RNA, 14 nt, Human
uagcacucacaugc

SEQ ID NO: 2105079 - RNA, 15 nt, Human
uagcacucacaugcu

SEQ ID NO: 2105080 - RNA, 17 nt, Human
uagcacucacaugcugg

SEQ ID NO: 2105081 - RNA, 18 nt, Human
uagcacucacaugcugga

SEQ ID NO: 2105082 - RNA, 13 nt, Human
uagcacugagcaa

SEQ ID NO: 2105083 - RNA, 15 nt, Human
uagcacuuucauugc

SEQ ID NO: 2105084 - RNA, 17 nt, Human
uagcacuuucauugcca

SEQ ID NO: 2105085 - RNA, 20 nt, Human
uagcacuuucauugccagug

SEQ ID NO: 2105086 - RNA, 23 nt, Human
uagcacuuucauugccagugucu

SEQ ID NO: 2105087 - RNA, 12 nt, Human
acaaaucaaguu

SEQ ID NO: 2105088 - RNA, 13 nt, Human
acaaaucaaguuu

SEQ ID NO: 2105089 - RNA, 15 nt, Human
acaaaucaaguuucc

SEQ ID NO: 2105090 - RNA, 17 nt, Human
acaaaucaaguuuccaa

SEQ ID NO: 2105091 - RNA, 19 nt, Human
acaaaucaaguuuccaagc

SEQ ID NO: 2105092 - RNA, 20 nt, Human
acaaaucaaguuuccaagca

SEQ ID NO: 2105093 - RNA, 22 nt, Human
acaaaucaaguuuccaagcaaa

SEQ ID NO: 2105094 - RNA, 19 nt, Human
uagccaccccagaaauggu

SEQ ID NO: 2105095 - RNA, 13 nt, Human
uagccacucagga

SEQ ID NO: 2105096 - RNA, 14 nt, Human
uagccacucaggag

SEQ ID NO: 2105097 - RNA, 16 nt, Human
uagccacuuaccuuca

SEQ ID NO: 2105098 - RNA, 17 nt, Human
uagccacuuaccuucaa

SEQ ID NO: 2105099 - RNA, 21 nt, Human
uagcaaaauucuuaaguaugu

SEQ ID NO: 2105100 - RNA, 18 nt, Human
uagcaaguuacagugaug

SEQ ID NO: 2105101 - RNA, 21 nt, Human
uagcaauccauguuaguuuuu

SEQ ID NO: 2105102 - RNA, 17 nt, Human
uagagggugcugcccca

SEQ ID NO: 2105103 - RNA, 13 nt, Human
uagcacaaaaaaa

SEQ ID NO: 2105104 - RNA, 13 nt, Human
uagaggguuccug

SEQ ID NO: 2105105 - RNA, 17 nt, Human
uagaggguuccuguaga

SEQ ID NO: 2105106 - RNA, 23 nt, Human
uagcaaaacgcauggagugugua

SEQ ID NO: 2105107 - RNA, 22 nt, Human
uagcaaaacgcauggagugugu

SEQ ID NO: 2105108 - RNA, 14 nt, Human
uagcaaaagaagua

SEQ ID NO: 2105109 - RNA, 17 nt, Human
uagcaaaagaaguaaca

SEQ ID NO: 2105110 - RNA, 14 nt, Human
uagagccagggucu

SEQ ID NO: 2105111 - RNA, 17 nt, Human
acaaauacucuuaggaa

SEQ ID NO: 2105112 - RNA, 15 nt, Human
acaaauacucuuagg

SEQ ID NO: 2105113 - RNA, 23 nt, Human
acaaauacucuuaggaagagaaa

SEQ ID NO: 2105114 - RNA, 15 nt, Human
acaaauacuuauuca

SEQ ID NO: 2105115 - RNA, 16 nt, Human
acaaauacuuauucau

SEQ ID NO: 2105116 - RNA, 17 nt, Human
acaaauacuuauucauu

SEQ ID NO: 2105117 - RNA, 18 nt, Human
acaaauacuuauucauug

SEQ ID NO: 2105118 - RNA, 21 nt, Human
acaaauacuuauucauugugg

SEQ ID NO: 2105119 - RNA, 17 nt, Human
acaaaaucacuuccaua

SEQ ID NO: 2105120 - RNA, 17 nt, Human
uagagccugcuggaucu

SEQ ID NO: 2105121 - RNA, 16 nt, Human
uagagcuagucuuuca

SEQ ID NO: 2105122 - RNA, 17 nt, Human
uagagcuagucuuucac

SEQ ID NO: 2105123 - RNA, 16 nt, Human
acaaauaauaagcaaa

SEQ ID NO: 2105124 - RNA, 22 nt, Human
acaaaauauaaagcaucuaaac

SEQ ID NO: 2105125 - RNA, 23 nt, Human
acaaaauauaaagcaucuaaacu

SEQ ID NO: 2105126 - RNA, 10 nt, Human
acaaaauaaa

SEQ ID NO: 2105127 - RNA, 19 nt, Human
acaaagguauaauuuuaug

SEQ ID NO: 2105128 - RNA, 14 nt, Human
aauuuuaccaaguu

SEQ ID NO: 2105129 - RNA, 17 nt, Human
aauuuuaccaaguuaua

SEQ ID NO: 2105130 - RNA, 23 nt, Human
aauuuuaccaaguuauauaaaga

SEQ ID NO: 2105131 - RNA, 14 nt, Human
acaaaaaacaauau

SEQ ID NO: 2105132 - RNA, 15 nt, Human
acaaaaaacaauauu

SEQ ID NO: 2105133 - RNA, 17 nt, Human
acaaaaaacaauauuua

SEQ ID NO: 2105134 - RNA, 18 nt, Human
acaaaaaacaauauuuau

SEQ ID NO: 2105135 - RNA, 14 nt, Human
acaaaaagcuuccc

SEQ ID NO: 2105136 - RNA, 15 nt, Human
acaaaaagcuucccc

SEQ ID NO: 2105137 - RNA, 11 nt, Human
acaaaaauuau

SEQ ID NO: 2105138 - RNA, 12 nt, Human
acaaaaauuauc

SEQ ID NO: 2105139 - RNA, 20 nt, Human
acaaaaauuaucuauuugua

SEQ ID NO: 2105140 - RNA, 17 nt, Human
acaaaaauucacaagcu

SEQ ID NO: 2105141 - RNA, 22 nt, Human
acaaaaagguaaaacuuuuuau

SEQ ID NO: 2105142 - RNA, 18 nt, Human
acaaaaauacucuaauuc

SEQ ID NO: 2105143 - RNA, 19 nt, Human
acaaaaauacucuaauucu

SEQ ID NO: 2105144 - RNA, 20 nt, Human
acaaaaauacucuaauucua

SEQ ID NO: 2105145 - RNA, 21 nt, Human
acaaaaauacucuaauucuaa

SEQ ID NO: 2105146 - RNA, 12 nt, Human
acaaaaauacuc

SEQ ID NO: 2105147 - RNA, 22 nt, Human
acaaaaaugaaagcaugucuca

SEQ ID NO: 2105148 - RNA, 16 nt, Human
acaaaagugcuuugga

SEQ ID NO: 2105149 - RNA, 21 nt, Human
acaaaaggguuuaaacugauu

SEQ ID NO: 2105150 - RNA, 16 nt, Human
acuagaacugaauuuu

SEQ ID NO: 2105151 - RNA, 13 nt, Human
acuagaacucucc

SEQ ID NO: 2105152 - RNA, 15 nt, Human
acuagaacucuccau

SEQ ID NO: 2105153 - RNA, 18 nt, Human
acuagaaagugaauaaaa

SEQ ID NO: 2105154 - RNA, 19 nt, Human
acuagaaagugaauaaaaa

SEQ ID NO: 2105155 - RNA, 22 nt, Human
acuagaaagugaauaaaaauua

SEQ ID NO: 2105156 - RNA, 15 nt, Human
acuagaaaucugcca

SEQ ID NO: 2105157 - RNA, 19 nt, Human
acuacuagaugucuuuagg

SEQ ID NO: 2105158 - RNA, 17 nt, Human
acuacuugggagcaccg

SEQ ID NO: 2105159 - RNA, 19 nt, Human
acuacuugauggucagaca

SEQ ID NO: 2105160 - RNA, 21 nt, Human
acuacuugauggucagacaca

SEQ ID NO: 2105161 - RNA, 18 nt, Human
acuacggaauaguuggcu

SEQ ID NO: 2105162 - RNA, 15 nt, Human
acuacgugacugugg

SEQ ID NO: 2105163 - RNA, 17 nt, Human
acuagaacugaauuuug

SEQ ID NO: 2105164 - RNA, 18 nt, Human
acuagaacugaauuuugu

SEQ ID NO: 2105165 - RNA, 19 nt, Human
acuagaacugaauuuuguc

SEQ ID NO: 2105166 - RNA, 23 nt, Human
acuagaacugaauuuugucuuua

SEQ ID NO: 2105167 - RNA, 15 nt, Human
acuagaauuuauuca

SEQ ID NO: 2105168 - RNA, 16 nt, Human
acuagaacucuccauc

SEQ ID NO: 2105169 - RNA, 14 nt, Human
acuagaagggccag

SEQ ID NO: 2105170 - RNA, 23 nt, Human
acuagaagggccaguccugccug

SEQ ID NO: 2105171 - RNA, 16 nt, Human
acuagagguuuuauga

SEQ ID NO: 2105172 - RNA, 19 nt, Human
acuagagguuuuaugauau

SEQ ID NO: 2105173 - RNA, 22 nt, Human
acuagaauuucauuuauuuugu

SEQ ID NO: 2105174 - RNA, 13 nt, Human
acguacacacaca

SEQ ID NO: 2105175 - RNA, 22 nt, Human
uccccacucccuggcucucaga

SEQ ID NO: 2105176 - RNA, 16 nt, Human
uccccacugacagccu

SEQ ID NO: 2105177 - RNA, 19 nt, Human
uccccacugacagccuccc

SEQ ID NO: 2105178 - RNA, 14 nt, Human
uccccacugccugc

SEQ ID NO: 2105179 - RNA, 18 nt, Human
uccccacugccugcccac

SEQ ID NO: 2105180 - RNA, 20 nt, Human
uccccacugccugcccaccc

SEQ ID NO: 2105181 - RNA, 22 nt, Human
uccccacugccugcccacccgu

SEQ ID NO: 2105182 - RNA, 20 nt, Human
ucccccacccccuccccagg

SEQ ID NO: 2105183 - RNA, 21 nt, Human
ucccccacccccuccccaggg

SEQ ID NO: 2105184 - RNA, 22 nt, Human
ucccccaccagcuaaggacauu

SEQ ID NO: 2105185 - RNA, 18 nt, Human
ucccccacccccucccca

SEQ ID NO: 2105186 - RNA, 19 nt, Human
ucccccacccccuccccag

SEQ ID NO: 2105187 - RNA, 22 nt, Human
ucccccaacccccaccccacac

SEQ ID NO: 2105188 - RNA, 14 nt, Human
uccccagugaaaac

SEQ ID NO: 2105189 - RNA, 15 nt, Human
uccccagugaaaacu

SEQ ID NO: 2105190 - RNA, 22 nt, Human
uccccagguggcugacccaguc

SEQ ID NO: 2105191 - RNA, 17 nt, Human
uccccaguuugcagaaa

SEQ ID NO: 2105192 - RNA, 15 nt, Human
uccccauacucuguc

SEQ ID NO: 2105193 - RNA, 16 nt, Human
uccccauacucugucu

SEQ ID NO: 2105194 - RNA, 17 nt, Human
uccccauacucugucuc

SEQ ID NO: 2105195 - RNA, 18 nt, Human
uccccauacucugucucc

SEQ ID NO: 2105196 - RNA, 19 nt, Human
uccccauacucugucuccc

SEQ ID NO: 2105197 - RNA, 20 nt, Human
acucacauuuauucugcuca

SEQ ID NO: 2105198 - RNA, 19 nt, Human
acucacauuuauucugcuc

SEQ ID NO: 2105199 - RNA, 20 nt, Human
acucacauggcuauguuuua

SEQ ID NO: 2105200 - RNA, 13 nt, Human
uccccgcuggcug

SEQ ID NO: 2105201 - RNA, 15 nt, Human
uccccgcuggcuggg

SEQ ID NO: 2105202 - RNA, 16 nt, Human
uccccgcuggcugggg

SEQ ID NO: 2105203 - RNA, 17 nt, Human
uccccgcuggcuggggg

SEQ ID NO: 2105204 - RNA, 18 nt, Human
uccccgcuucugccugca

SEQ ID NO: 2105205 - RNA, 22 nt, Human
acucacaugcuggacaggucug

SEQ ID NO: 2105206 - RNA, 14 nt, Human
acucaaugcacuga

SEQ ID NO: 2105207 - RNA, 23 nt, Human
acucaauauuuuccaugaaaaug

SEQ ID NO: 2105208 - RNA, 16 nt, Human
acucacauggcuaugu

SEQ ID NO: 2105209 - RNA, 19 nt, Human
acucacauggcuauguuuu

SEQ ID NO: 2105210 - RNA, 15 nt, Human
acucaaguucaagga

SEQ ID NO: 2105211 - RNA, 17 nt, Human
acucaaguucaaggacc

SEQ ID NO: 2105212 - RNA, 12 nt, Human
acucaauauuuu

SEQ ID NO: 2105213 - RNA, 15 nt, Human
acucaauaaaaucau

SEQ ID NO: 2105214 - RNA, 18 nt, Human
acucaauaaaaucaugua

SEQ ID NO: 2105215 - RNA, 15 nt, Human
acucaauauuuucca

SEQ ID NO: 2105216 - RNA, 18 nt, Human
acucaauauuuuccauga

SEQ ID NO: 2105217 - RNA, 21 nt, Human
acucaauauuuuccaugaaaa

SEQ ID NO: 2105218 - RNA, 22 nt, Human
acucaauauuuuccaugaaaau

SEQ ID NO: 2105219 - RNA, 14 nt, Human
uccccuaaccucau

SEQ ID NO: 2105220 - RNA, 22 nt, Human
uccccggucccuugagaccuca

SEQ ID NO: 2105221 - RNA, 17 nt, Human
uccccgugggccauggc

SEQ ID NO: 2105222 - RNA, 13 nt, Human
uccccggcucgag

SEQ ID NO: 2105223 - RNA, 21 nt, Human
uccccuccuugccuccugugu

SEQ ID NO: 2105224 - RNA, 12 nt, Human
uccccuccuugc

SEQ ID NO: 2105225 - RNA, 18 nt, Human
uccccuccuugccuccug

SEQ ID NO: 2105226 - RNA, 20 nt, Human
uccccuccuugccuccugug

SEQ ID NO: 2105227 - RNA, 14 nt, Human
uccccuccuucucc

SEQ ID NO: 2105228 - RNA, 18 nt, Human
uccccuccuucucccuuu

SEQ ID NO: 2105229 - RNA, 13 nt, Human
uccccucugcugg

SEQ ID NO: 2105230 - RNA, 14 nt, Human
uccccucugcuggc

SEQ ID NO: 2105231 - RNA, 15 nt, Human
uccccucugcuggcc

SEQ ID NO: 2105232 - RNA, 21 nt, Human
uccccucuuauguaccucuuu

SEQ ID NO: 2105233 - RNA, 13 nt, Human
acuauguugauaa

SEQ ID NO: 2105234 - RNA, 12 nt, Human
acuauguaucaa

SEQ ID NO: 2105235 - RNA, 15 nt, Human
acuauguacaauauu

SEQ ID NO: 2105236 - RNA, 16 nt, Human
acuauguacaauauuu

SEQ ID NO: 2105237 - RNA, 18 nt, Human
acuauguacaauauuuua

SEQ ID NO: 2105238 - RNA, 19 nt, Human
acuauguacaauauuuuaa

SEQ ID NO: 2105239 - RNA, 21 nt, Human
acuauguacaauauuuuaagc

SEQ ID NO: 2105240 - RNA, 22 nt, Human
acuauguacaauauuuuaagca

SEQ ID NO: 2105241 - RNA, 12 nt, Human
acuauaauguaa

SEQ ID NO: 2105242 - RNA, 13 nt, Human
acuauaauguaag

SEQ ID NO: 2105243 - RNA, 14 nt, Human
acuauaauguaagc

SEQ ID NO: 2105244 - RNA, 16 nt, Human
acuaugauuuggaaaa

SEQ ID NO: 2105245 - RNA, 16 nt, Human
acuaugcacaauuuaa

SEQ ID NO: 2105246 - RNA, 15 nt, Human
acuaugauuuggaaa

SEQ ID NO: 2105247 - RNA, 21 nt, Human
acuauaauguaagcucuacug

SEQ ID NO: 2105248 - RNA, 18 nt, Human
acucagaagacacugaug

SEQ ID NO: 2105249 - RNA, 13 nt, Human
acucagaagccug

SEQ ID NO: 2105250 - RNA, 14 nt, Human
acucagaagccuga

SEQ ID NO: 2105251 - RNA, 15 nt, Human
acucagaagccugag

SEQ ID NO: 2105252 - RNA, 16 nt, Human
acucagaagccugagg

SEQ ID NO: 2105253 - RNA, 17 nt, Human
acucagaagccugaggc

SEQ ID NO: 2105254 - RNA, 18 nt, Human
acucagaagccugaggcu

SEQ ID NO: 2105255 - RNA, 17 nt, Human
acucagaagacacugau

SEQ ID NO: 2105256 - RNA, 16 nt, Human
acucagaagacacuga

SEQ ID NO: 2105257 - RNA, 15 nt, Human
acucagaagacacug

SEQ ID NO: 2105258 - RNA, 14 nt, Human
acucagaagacacu

SEQ ID NO: 2105259 - RNA, 16 nt, Human
acucaccucugccuca

SEQ ID NO: 2105260 - RNA, 17 nt, Human
acucaccucugccucaa

SEQ ID NO: 2105261 - RNA, 21 nt, Human
acucagaaauuuaauucaugu

SEQ ID NO: 2105262 - RNA, 18 nt, Human
ucccucccccugccccuu

SEQ ID NO: 2105263 - RNA, 14 nt, Human
acucagagggagga

SEQ ID NO: 2105264 - RNA, 19 nt, Human
acucagacaggaaagggaa

SEQ ID NO: 2105265 - RNA, 12 nt, Human
acucaucuuagg

SEQ ID NO: 2105266 - RNA, 18 nt, Human
acucaucuuagugccuga

SEQ ID NO: 2105267 - RNA, 22 nt, Human
acucaucuuagugccugagagu

SEQ ID NO: 2105268 - RNA, 14 nt, Human
acuccaccacccaa

SEQ ID NO: 2105269 - RNA, 13 nt, Human
acuccaccaccca

SEQ ID NO: 2105270 - RNA, 21 nt, Human
acuccaaaccuccuguuagcu

SEQ ID NO: 2105271 - RNA, 15 nt, Human
acuccaccaacccau

SEQ ID NO: 2105272 - RNA, 20 nt, Human
acuccaccaacccaucagaa

SEQ ID NO: 2105273 - RNA, 18 nt, Human
ucccucagucuggcccuu

SEQ ID NO: 2105274 - RNA, 14 nt, Human
uccccugcacugga

SEQ ID NO: 2105275 - RNA, 20 nt, Human
ucccucagucuggcccuucc

SEQ ID NO: 2105276 - RNA, 14 nt, Human
ucccucagccccuc

SEQ ID NO: 2105277 - RNA, 15 nt, Human
ucccucagccccucu

SEQ ID NO: 2105278 - RNA, 16 nt, Human
ucccucagccccucuu

SEQ ID NO: 2105279 - RNA, 17 nt, Human
ucccucagccccucuug

SEQ ID NO: 2105280 - RNA, 11 nt, Human
ucccucuuucc

SEQ ID NO: 2105281 - RNA, 13 nt, Human
ucccucuuucccu

SEQ ID NO: 2105282 - RNA, 15 nt, Human
ucccuccccugcccu

SEQ ID NO: 2105283 - RNA, 16 nt, Human
ucccuccccugcccuc

SEQ ID NO: 2105284 - RNA, 17 nt, Human
ucccuccccugcccucg

SEQ ID NO: 2105285 - RNA, 16 nt, Human
ucccuccccugcccug

SEQ ID NO: 2105286 - RNA, 17 nt, Human
ucccuccccugcccugg

SEQ ID NO: 2105287 - RNA, 19 nt, Human
ucccuccccugcccugguc

SEQ ID NO: 2105288 - RNA, 13 nt, Human
ucccuccccugcc

SEQ ID NO: 2105289 - RNA, 16 nt, Human
ucccuccccugccauu

SEQ ID NO: 2105290 - RNA, 14 nt, Human
ucccuccccugccc

SEQ ID NO: 2105291 - RNA, 17 nt, Human
ucccugaccucccucua

SEQ ID NO: 2105292 - RNA, 16 nt, Human
ucccugaccucccucu

SEQ ID NO: 2105293 - RNA, 21 nt, Human
ucccugaccucccucuaauuu

SEQ ID NO: 2105294 - RNA, 14 nt, Human
ucccugacccugca

SEQ ID NO: 2105295 - RNA, 16 nt, Human
ucccugacccugcaga

SEQ ID NO: 2105296 - RNA, 18 nt, Human
acucacccccaaggggca

SEQ ID NO: 2105297 - RNA, 16 nt, Human
acucaccuaauguuua

SEQ ID NO: 2105298 - RNA, 17 nt, Human
acucaccuaauguuuau

SEQ ID NO: 2105299 - RNA, 16 nt, Human
acucaccucuaaaaca

SEQ ID NO: 2105300 - RNA, 20 nt, Human
acucaccuaauguuuaugag

SEQ ID NO: 2105301 - RNA, 23 nt, Human
acucaccuaauguuuaugagcca

SEQ ID NO: 2105302 - RNA, 11 nt, Human
acucaccucug

SEQ ID NO: 2105303 - RNA, 13 nt, Human
acucaccucugcc

SEQ ID NO: 2105304 - RNA, 14 nt, Human
acucaccucugccu

SEQ ID NO: 2105305 - RNA, 15 nt, Human
acucaccucugccuc

SEQ ID NO: 2105306 - RNA, 15 nt, Human
ucccugaaccauccc

SEQ ID NO: 2105307 - RNA, 15 nt, Human
ucccugaaaacccag

SEQ ID NO: 2105308 - RNA, 16 nt, Human
ucccugaaaacccaga

SEQ ID NO: 2105309 - RNA, 17 nt, Human
ucccugaaaacccagag

SEQ ID NO: 2105310 - RNA, 18 nt, Human
ucccugaaaacccagaga

SEQ ID NO: 2105311 - RNA, 19 nt, Human
ucccugaaaacccagagag

SEQ ID NO: 2105312 - RNA, 20 nt, Human
ucccugaaaacccagagagg

SEQ ID NO: 2105313 - RNA, 17 nt, Human
ucccugaaaauguuuuu

SEQ ID NO: 2105314 - RNA, 24 nt, Human
uccgugcuuguuugcucaccuggg

SEQ ID NO: 2105315 - RNA, 12 nt, Human
uccuaccucagc

SEQ ID NO: 2105316 - RNA, 13 nt, Human
uccuaccucagcc

SEQ ID NO: 2105317 - RNA, 18 nt, Human
uccggcaguucugggugc

SEQ ID NO: 2105318 - RNA, 20 nt, Human
uccuacgucaaacaugaagu

SEQ ID NO: 2105319 - RNA, 14 nt, Human
uccuaccucagccu

SEQ ID NO: 2105320 - RNA, 16 nt, Human
uccuaccucagccuag

SEQ ID NO: 2105321 - RNA, 17 nt, Human
uccuaccucagccuaga

SEQ ID NO: 2105322 - RNA, 12 nt, Human
uccuacucugug

SEQ ID NO: 2105323 - RNA, 21 nt, Human
uccuagccugugccucuggga

SEQ ID NO: 2105324 - RNA, 13 nt, Human
uccuagccacuca

SEQ ID NO: 2105325 - RNA, 17 nt, Human
uccuagccacucaggag

SEQ ID NO: 2105326 - RNA, 13 nt, Human
acuccuguacacu

SEQ ID NO: 2105327 - RNA, 15 nt, Human
acuccuguacacuga

SEQ ID NO: 2105328 - RNA, 16 nt, Human
acuccuguacacugaa

SEQ ID NO: 2105329 - RNA, 17 nt, Human
acuccuguacacugaau

SEQ ID NO: 2105330 - RNA, 18 nt, Human
acuccuguacacugaaua

SEQ ID NO: 2105331 - RNA, 18 nt, Human
acucgagucacacucaag

SEQ ID NO: 2105332 - RNA, 14 nt, Human
acuccuuucucauc

SEQ ID NO: 2105333 - RNA, 12 nt, Human
acuccuuagaga

SEQ ID NO: 2105334 - RNA, 11 nt, Human
acuccuuccug

SEQ ID NO: 2105335 - RNA, 21 nt, Human
acucuuauugcccacgcugga

SEQ ID NO: 2105336 - RNA, 19 nt, Human
acucuucuuaacuuaaauu

SEQ ID NO: 2105337 - RNA, 20 nt, Human
acucuucuuaacuuaaauuu

SEQ ID NO: 2105338 - RNA, 18 nt, Human
acucucaggaucaagaaa

SEQ ID NO: 2105339 - RNA, 19 nt, Human
acucucaggaucaagaaag

SEQ ID NO: 2105340 - RNA, 15 nt, Human
acucucagugcuucu

SEQ ID NO: 2105341 - RNA, 22 nt, Human
acucucagugcuucuuacuauu

SEQ ID NO: 2105342 - RNA, 22 nt, Human
acucucaggaucaagaaagugu

SEQ ID NO: 2105343 - RNA, 14 nt, Human
acucucauucccca

SEQ ID NO: 2105344 - RNA, 16 nt, Human
acucugccucugccug

SEQ ID NO: 2105345 - RNA, 15 nt, Human
acucucauuccccag

SEQ ID NO: 2105346 - RNA, 11 nt, Human
acucugccucu

SEQ ID NO: 2105347 - RNA, 12 nt, Human
acucugccucug

SEQ ID NO: 2105348 - RNA, 14 nt, Human
acucugccucugcc

SEQ ID NO: 2105349 - RNA, 16 nt, Human
acucgugugcaacaga

SEQ ID NO: 2105350 - RNA, 14 nt, Human
acucguauaugucu

SEQ ID NO: 2105351 - RNA, 23 nt, Human
acucguauaagcauggagaacag

SEQ ID NO: 2105352 - RNA, 16 nt, Human
uccucucuaaccuccu

SEQ ID NO: 2105353 - RNA, 17 nt, Human
uccucucuaaccuccuu

SEQ ID NO: 2105354 - RNA, 18 nt, Human
uccucucuaaccuccuuu

SEQ ID NO: 2105355 - RNA, 19 nt, Human
uccucucuaaccuccuuua

SEQ ID NO: 2105356 - RNA, 21 nt, Human
uccucucuaaccuccuuuacc

SEQ ID NO: 2105357 - RNA, 18 nt, Human
uccucuccacugccuucg

SEQ ID NO: 2105358 - RNA, 17 nt, Human
uccucuccacugccuuc

SEQ ID NO: 2105359 - RNA, 17 nt, Human
uccucuccccucuaagg

SEQ ID NO: 2105360 - RNA, 19 nt, Human
uccucuccccucuaaggcc

SEQ ID NO: 2105361 - RNA, 20 nt, Human
uccucuccgcaguuccuguc

SEQ ID NO: 2105362 - RNA, 21 nt, Human
uccucccaccucagccucccg

SEQ ID NO: 2105363 - RNA, 13 nt, Human
uccucccccugcc

SEQ ID NO: 2105364 - RNA, 16 nt, Human
uccuccccagcaggug

SEQ ID NO: 2105365 - RNA, 14 nt, Human
uccucccccugcca

SEQ ID NO: 2105366 - RNA, 15 nt, Human
uccucccccugccag

SEQ ID NO: 2105367 - RNA, 17 nt, Human
uccucccccugccagug

SEQ ID NO: 2105368 - RNA, 20 nt, Human
uccucccccugccagugccu

SEQ ID NO: 2105369 - RNA, 23 nt, Human
uccucccccugccagugccuuac

SEQ ID NO: 2105370 - RNA, 10 nt, Human
uccuccccag

SEQ ID NO: 2105371 - RNA, 13 nt, Human
uccuccccagcag

SEQ ID NO: 2105372 - RNA, 22 nt, Human
uccuccccauuagagucagccu

SEQ ID NO: 2105373 - RNA, 19 nt, Human
uccucccugggcagaaagu

SEQ ID NO: 2105374 - RNA, 14 nt, Human
uccuccccucaagg

SEQ ID NO: 2105375 - RNA, 24 nt, Human
uccucccccugccagugccuuacc

SEQ ID NO: 2105376 - RNA, 20 nt, Human
uccucccaccucagccuccc

SEQ ID NO: 2105377 - RNA, 18 nt, Human
uccucccaccucagccuc

SEQ ID NO: 2105378 - RNA, 16 nt, Human
uccucccaccucagcc

SEQ ID NO: 2105379 - RNA, 15 nt, Human
uccucccaccucagc

SEQ ID NO: 2105380 - RNA, 14 nt, Human
uccucccaccucag

SEQ ID NO: 2105381 - RNA, 13 nt, Human
uccucccaccuca

SEQ ID NO: 2105382 - RNA, 17 nt, Human
uccucuuucagaaaaca

SEQ ID NO: 2105383 - RNA, 18 nt, Human
uccucuuucagaaaacag

SEQ ID NO: 2105384 - RNA, 21 nt, Human
uccucuuucagaaaacagaaa

SEQ ID NO: 2105385 - RNA, 11 nt, Human
uccucuuuguu

SEQ ID NO: 2105386 - RNA, 15 nt, Human
uccucuuuguuuugu

SEQ ID NO: 2105387 - RNA, 21 nt, Human
uccucuuuuaucuuggacuga

SEQ ID NO: 2105388 - RNA, 13 nt, Human
uccucuuuuucca

SEQ ID NO: 2105389 - RNA, 21 nt, Human
uccucuuuuuccaucauaauu

SEQ ID NO: 2105390 - RNA, 12 nt, Human
uccucugccacc

SEQ ID NO: 2105391 - RNA, 14 nt, Human
uccucugccaccuc

SEQ ID NO: 2105392 - RNA, 15 nt, Human
uccucugccaccucc

SEQ ID NO: 2105393 - RNA, 18 nt, Human
uccucugccaccuccccu

SEQ ID NO: 2105394 - RNA, 22 nt, Human
uccucugccaccuccccuaucc

SEQ ID NO: 2105395 - RNA, 23 nt, Human
uccucugccaccuccccuaucca

SEQ ID NO: 2105396 - RNA, 19 nt, Human
uccucuugccacugccucu

SEQ ID NO: 2105397 - RNA, 12 nt, Human
uccucuugccau

SEQ ID NO: 2105398 - RNA, 14 nt, Human
uccucuugccaucu

SEQ ID NO: 2105399 - RNA, 15 nt, Human
uccugaccugucuca

SEQ ID NO: 2105400 - RNA, 20 nt, Human
uccugaccugucucaccaug

SEQ ID NO: 2105401 - RNA, 21 nt, Human
uccugacggcgcccccagugu

SEQ ID NO: 2105402 - RNA, 11 nt, Human
acucuuuggau

SEQ ID NO: 2105403 - RNA, 22 nt, Human
acucuuuggauagcaugucuuu

SEQ ID NO: 2105404 - RNA, 22 nt, Human
acucuuugagauagaagaacug

SEQ ID NO: 2105405 - RNA, 23 nt, Human
acucuuugagauagaagaacugc

SEQ ID NO: 2105406 - RNA, 12 nt, Human
acugaaaacaua

SEQ ID NO: 2105407 - RNA, 14 nt, Human
acugaaaacauaaa

SEQ ID NO: 2105408 - RNA, 17 nt, Human
acugaaaacauaaaaag

SEQ ID NO: 2105409 - RNA, 18 nt, Human
acugaaaacauaaaaagu

SEQ ID NO: 2105410 - RNA, 19 nt, Human
acugaaaacauaaaaaguu

SEQ ID NO: 2105411 - RNA, 16 nt, Human
acucuuugagauagaa

SEQ ID NO: 2105412 - RNA, 19 nt, Human
acucuuugagauagaagaa

SEQ ID NO: 2105413 - RNA, 19 nt, Human
acugaaaagacucaguguu

SEQ ID NO: 2105414 - RNA, 20 nt, Human
ucccaaagugcugggauuac

SEQ ID NO: 2105415 - RNA, 16 nt, Human
ucccaaagugcuggga

SEQ ID NO: 2105416 - RNA, 15 nt, Human
ucccaaagugcuggg

SEQ ID NO: 2105417 - RNA, 14 nt, Human
uccauuugugugug

SEQ ID NO: 2105418 - RNA, 22 nt, Human
ucccacaggcccuuccucucca

SEQ ID NO: 2105419 - RNA, 21 nt, Human
ucccacaggcccuuccucucc

SEQ ID NO: 2105420 - RNA, 17 nt, Human
ucccacaggcccuuccu

SEQ ID NO: 2105421 - RNA, 15 nt, Human
ucccacaggcccuuc

SEQ ID NO: 2105422 - RNA, 20 nt, Human
ucccaauuaggaaguguaac

SEQ ID NO: 2105423 - RNA, 14 nt, Human
ucccaauuaggaag

SEQ ID NO: 2105424 - RNA, 15 nt, Human
ucccaauuaggaagu

SEQ ID NO: 2105425 - RNA, 19 nt, Human
ucccaauuaggaaguguaa

SEQ ID NO: 2105426 - RNA, 20 nt, Human
ucccaauucauccucacuca

SEQ ID NO: 2105427 - RNA, 14 nt, Human
ucccacaaaggaga

SEQ ID NO: 2105428 - RNA, 17 nt, Human
ucccaccaggcugcuca

SEQ ID NO: 2105429 - RNA, 15 nt, Human
ucccaccacagcagg

SEQ ID NO: 2105430 - RNA, 17 nt, Human
ucccaccacagcaggug

SEQ ID NO: 2105431 - RNA, 19 nt, Human
ucccaccaacccucagagc

SEQ ID NO: 2105432 - RNA, 22 nt, Human
ucccaccaggcugcucagggcu

SEQ ID NO: 2105433 - RNA, 20 nt, Human
ucccacccccuucucugcuc

SEQ ID NO: 2105434 - RNA, 21 nt, Human
ucccacccccuucucugcucc

SEQ ID NO: 2105435 - RNA, 22 nt, Human
ucccacccccuucucugcucca

SEQ ID NO: 2105436 - RNA, 20 nt, Human
ucccacccccaucucucccu

SEQ ID NO: 2105437 - RNA, 17 nt, Human
ucccacccccuucucug

SEQ ID NO: 2105438 - RNA, 19 nt, Human
ucccacccccuucucugcu

SEQ ID NO: 2105439 - RNA, 18 nt, Human
ucccaccgguugcuucug

SEQ ID NO: 2105440 - RNA, 19 nt, Human
ucccaccgguugcuucugg

SEQ ID NO: 2105441 - RNA, 20 nt, Human
ucccaccgguugcuucuggg

SEQ ID NO: 2105442 - RNA, 21 nt, Human
ucccaccgguugcuucuggga

SEQ ID NO: 2105443 - RNA, 12 nt, Human
acggggagaaaa

SEQ ID NO: 2105444 - RNA, 23 nt, Human
acggggaggccaagugcaggcug

SEQ ID NO: 2105445 - RNA, 14 nt, Human
acggggaggccaag

SEQ ID NO: 2105446 - RNA, 14 nt, Human
acgggguccuucaa

SEQ ID NO: 2105447 - RNA, 17 nt, Human
uccaugacugcauuuua

SEQ ID NO: 2105448 - RNA, 18 nt, Human
uccaugaguuugcccugg

SEQ ID NO: 2105449 - RNA, 22 nt, Human
uccauugguuuaccugugaaau

SEQ ID NO: 2105450 - RNA, 14 nt, Human
uccauugugugagu

SEQ ID NO: 2105451 - RNA, 21 nt, Human
uccaugaauguaucaggaaau

SEQ ID NO: 2105452 - RNA, 15 nt, Human
uccaugaauguauca

SEQ ID NO: 2105453 - RNA, 16 nt, Human
uccaugaauguaucag

SEQ ID NO: 2105454 - RNA, 15 nt, Human
uccaugaaggcagag

SEQ ID NO: 2105455 - RNA, 12 nt, Human
uccaugaaugua

SEQ ID NO: 2105456 - RNA, 13 nt, Human
uccaugaauguau

SEQ ID NO: 2105457 - RNA, 14 nt, Human
uccaugaauguauc

SEQ ID NO: 2105458 - RNA, 12 nt, Human
uccaugaaaaug

SEQ ID NO: 2105459 - RNA, 21 nt, Human
uccaugaaaacguuuuauugu

SEQ ID NO: 2105460 - RNA, 22 nt, Human
uccaugaaaacguuuuauugug

SEQ ID NO: 2105461 - RNA, 11 nt, Human
uccaugaaaac

SEQ ID NO: 2105462 - RNA, 15 nt, Human
uccaugaaaacguuu

SEQ ID NO: 2105463 - RNA, 18 nt, Human
uccaugaaaacguuuuau

SEQ ID NO: 2105464 - RNA, 19 nt, Human
uccaugaaaacguuuuauu

SEQ ID NO: 2105465 - RNA, 15 nt, Human
uccaucuggcagggu

SEQ ID NO: 2105466 - RNA, 21 nt, Human
acggccuucaacugaaaagac

SEQ ID NO: 2105467 - RNA, 23 nt, Human
acggccuugcugggggccgcccu

SEQ ID NO: 2105468 - RNA, 20 nt, Human
acggccugaugcucccuccc

SEQ ID NO: 2105469 - RNA, 22 nt, Human
acggccugaugcucccuccccu

SEQ ID NO: 2105470 - RNA, 14 nt, Human
acggcucacugcag

SEQ ID NO: 2105471 - RNA, 15 nt, Human
acggccugaugcucc

SEQ ID NO: 2105472 - RNA, 18 nt, Human
acggccugaugcucccuc

SEQ ID NO: 2105473 - RNA, 19 nt, Human
acggccugaugcucccucc

SEQ ID NO: 2105474 - RNA, 20 nt, Human
uccagucugcugcccuccau

SEQ ID NO: 2105475 - RNA, 22 nt, Human
uccagucugcugcccuccaucc

SEQ ID NO: 2105476 - RNA, 13 nt, Human
uccagucuuccac

SEQ ID NO: 2105477 - RNA, 18 nt, Human
uccagucuuccaccugga

SEQ ID NO: 2105478 - RNA, 19 nt, Human
uccagucuuccaccuggaa

SEQ ID NO: 2105479 - RNA, 20 nt, Human
uccagucuuccaccuggaag

SEQ ID NO: 2105480 - RNA, 15 nt, Human
acggcucacugcagc

SEQ ID NO: 2105481 - RNA, 16 nt, Human
acggcgcccccagugu

SEQ ID NO: 2105482 - RNA, 17 nt, Human
acggcgcccccagugug

SEQ ID NO: 2105483 - RNA, 16 nt, Human
uccagucugcugcccu

SEQ ID NO: 2105484 - RNA, 18 nt, Human
uccagucugcugcccucc

SEQ ID NO: 2105485 - RNA, 19 nt, Human
uccagucugcugcccucca

SEQ ID NO: 2105486 - RNA, 22 nt, Human
uccaucccuacccccuaagagc

SEQ ID NO: 2105487 - RNA, 14 nt, Human
acgacuucagggca

SEQ ID NO: 2105488 - RNA, 22 nt, Human
acgacuucagggcagggcucug

SEQ ID NO: 2105489 - RNA, 14 nt, Human
acgaggcugggcca

SEQ ID NO: 2105490 - RNA, 17 nt, Human
acgaggcugggccaagc

SEQ ID NO: 2105491 - RNA, 19 nt, Human
acgagggauguggagcaca

SEQ ID NO: 2105492 - RNA, 22 nt, Human
acgacaaagccaaacucugcca

SEQ ID NO: 2105493 - RNA, 20 nt, Human
acgacaauagcuuuacccuc

SEQ ID NO: 2105494 - RNA, 15 nt, Human
acgacugcccggcag

SEQ ID NO: 2105495 - RNA, 17 nt, Human
acgagugggaaggacuu

SEQ ID NO: 2105496 - RNA, 16 nt, Human
acgaguaauuuauugu

SEQ ID NO: 2105497 - RNA, 17 nt, Human
acgagucaauccccuca

SEQ ID NO: 2105498 - RNA, 18 nt, Human
acgccaggggaaaaucag

SEQ ID NO: 2105499 - RNA, 14 nt, Human
acgagguaugaggu

SEQ ID NO: 2105500 - RNA, 20 nt, Human
acgaggucaagagaucgaga

SEQ ID NO: 2105501 - RNA, 23 nt, Human
acgccaggggaaaaucagccugc

SEQ ID NO: 2105502 - RNA, 19 nt, Human
uccaggcugcauagaagga

SEQ ID NO: 2105503 - RNA, 23 nt, Human
uccagggaagcuggccgaggguc

SEQ ID NO: 2105504 - RNA, 12 nt, Human
uccacgcugucu

SEQ ID NO: 2105505 - RNA, 15 nt, Human
uccacgcugucucca

SEQ ID NO: 2105506 - RNA, 16 nt, Human
uccacgcugucuccag

SEQ ID NO: 2105507 - RNA, 17 nt, Human
uccacgcugucuccaga

SEQ ID NO: 2105508 - RNA, 18 nt, Human
uccacgcugucuccagac

SEQ ID NO: 2105509 - RNA, 19 nt, Human
uccacgcugucuccagacc

SEQ ID NO: 2105510 - RNA, 20 nt, Human
uccacgcugucuccagaccc

SEQ ID NO: 2105511 - RNA, 21 nt, Human
uccacgcugucuccagacccc

SEQ ID NO: 2105512 - RNA, 22 nt, Human
uccacgcugucuccagaccccc

SEQ ID NO: 2105513 - RNA, 23 nt, Human
uccacgcugucuccagaccccca

SEQ ID NO: 2105514 - RNA, 13 nt, Human
uccacggacucaa

SEQ ID NO: 2105515 - RNA, 21 nt, Human
uccacggacucaaguuucuuc

SEQ ID NO: 2105516 - RNA, 12 nt, Human
acgacaaagcug

SEQ ID NO: 2105517 - RNA, 15 nt, Human
acgacaaagcugcua

SEQ ID NO: 2105518 - RNA, 21 nt, Human
acgacaaagcugcuaaaucuc

SEQ ID NO: 2105519 - RNA, 23 nt, Human
acgacaaagcugcuaaaucuccu

SEQ ID NO: 2105520 - RNA, 20 nt, Human
acgacaacgaugaugcuugu

SEQ ID NO: 2105521 - RNA, 16 nt, Human
acgaagggggcaucug

SEQ ID NO: 2105522 - RNA, 11 nt, Human
acgaagaaaaa

SEQ ID NO: 2105523 - RNA, 12 nt, Human
acgaagaaaaaa

SEQ ID NO: 2105524 - RNA, 17 nt, Human
acgaagggaaaugucuu

SEQ ID NO: 2105525 - RNA, 17 nt, Human
uccagggccacgugcca

SEQ ID NO: 2105526 - RNA, 20 nt, Human
uccagggaugccaucugugg

SEQ ID NO: 2105527 - RNA, 20 nt, Human
acgcgugcacacaccagagc

SEQ ID NO: 2105528 - RNA, 23 nt, Human
acgcgugcacacaccagagccca

SEQ ID NO: 2105529 - RNA, 14 nt, Human
acgcccauguguga

SEQ ID NO: 2105530 - RNA, 16 nt, Human
acgcccaugugugagu

SEQ ID NO: 2105531 - RNA, 21 nt, Human
acggagucccaccuuggcugc

SEQ ID NO: 2105532 - RNA, 13 nt, Human
acggcacccaccc

SEQ ID NO: 2105533 - RNA, 16 nt, Human
acggccaggccagagg

SEQ ID NO: 2105534 - RNA, 21 nt, Human
acggcaggacaacgaggaagc

SEQ ID NO: 2105535 - RNA, 13 nt, Human
acggccaggccag

SEQ ID NO: 2105536 - RNA, 14 nt, Human
acggcacuguggcc

SEQ ID NO: 2105537 - RNA, 15 nt, Human
acggcacuguggccu

SEQ ID NO: 2105538 - RNA, 16 nt, Human
acggcacuguggccuu

SEQ ID NO: 2105539 - RNA, 22 nt, Human
acggcaggacaacgaggaagcc

SEQ ID NO: 2105540 - RNA, 19 nt, Human
acggagucccaccuuggcu

SEQ ID NO: 2105541 - RNA, 18 nt, Human
accuucaauuccugggcc

SEQ ID NO: 2105542 - RNA, 15 nt, Human
accuucagauccuac

SEQ ID NO: 2105543 - RNA, 16 nt, Human
accuucagauccuacc

SEQ ID NO: 2105544 - RNA, 17 nt, Human
accuucagauccuaccc

SEQ ID NO: 2105545 - RNA, 18 nt, Human
accuucagauccuacccc

SEQ ID NO: 2105546 - RNA, 13 nt, Human
accuggggagugg

SEQ ID NO: 2105547 - RNA, 15 nt, Human
accuggggaguggga

SEQ ID NO: 2105548 - RNA, 19 nt, Human
accuggggcagucaccugc

SEQ ID NO: 2105549 - RNA, 24 nt, Human
accuggggagugggacagagucug

SEQ ID NO: 2105550 - RNA, 21 nt, Human
accuggguaacuagggaagau

SEQ ID NO: 2105551 - RNA, 18 nt, Human
accuggggugugggaggc

SEQ ID NO: 2105552 - RNA, 21 nt, Human
accuggggugugggaggcccg

SEQ ID NO: 2105553 - RNA, 17 nt, Human
accuucaauuccugggc

SEQ ID NO: 2105554 - RNA, 13 nt, Human
accuuccugucuu

SEQ ID NO: 2105555 - RNA, 17 nt, Human
accuucccaugcccugg

SEQ ID NO: 2105556 - RNA, 17 nt, Human
accuucccagcucuccc

SEQ ID NO: 2105557 - RNA, 18 nt, Human
accuucccagcucucccu

SEQ ID NO: 2105558 - RNA, 19 nt, Human
accuucccagcucucccuc

SEQ ID NO: 2105559 - RNA, 23 nt, Human
accuucugcccauccugucuguu

SEQ ID NO: 2105560 - RNA, 17 nt, Human
accuugcaacacacaga

SEQ ID NO: 2105561 - RNA, 19 nt, Human
accuugcaacacacagaca

SEQ ID NO: 2105562 - RNA, 16 nt, Human
accuugacagggcaca

SEQ ID NO: 2105563 - RNA, 17 nt, Human
accuugacuugauuagu

SEQ ID NO: 2105564 - RNA, 22 nt, Human
accuugaggucuuuugacaugu

SEQ ID NO: 2105565 - RNA, 15 nt, Human
accuugcaacacaca

SEQ ID NO: 2105566 - RNA, 16 nt, Human
accuugcaacacacag

SEQ ID NO: 2105567 - RNA, 11 nt, Human
accuugagguc

SEQ ID NO: 2105568 - RNA, 21 nt, Human
uccaaugucuuuuuaagcuua

SEQ ID NO: 2105569 - RNA, 16 nt, Human
uccacauagguuuaga

SEQ ID NO: 2105570 - RNA, 13 nt, Human
uccaaauucacaa

SEQ ID NO: 2105571 - RNA, 17 nt, Human
uccaaauguccuccaga

SEQ ID NO: 2105572 - RNA, 19 nt, Human
uccaaauguccuccagaag

SEQ ID NO: 2105573 - RNA, 20 nt, Human
uccaaauguccuccagaagc

SEQ ID NO: 2105574 - RNA, 22 nt, Human
uccaaauguccuccagaagccu

SEQ ID NO: 2105575 - RNA, 15 nt, Human
uccaaggagaaacag

SEQ ID NO: 2105576 - RNA, 16 nt, Human
uccaaggagaaacaga

SEQ ID NO: 2105577 - RNA, 19 nt, Human
uccaaggagaaacagagac

SEQ ID NO: 2105578 - RNA, 20 nt, Human
uccaaggagaaacagagaca

SEQ ID NO: 2105579 - RNA, 22 nt, Human
uccaaggagaaacagagacagg

SEQ ID NO: 2105580 - RNA, 15 nt, Human
uccaaggagcugaga

SEQ ID NO: 2105581 - RNA, 19 nt, Human
uccaaggagcugagaauag

SEQ ID NO: 2105582 - RNA, 21 nt, Human
uccaaggagcugagaauagaa

SEQ ID NO: 2105583 - RNA, 23 nt, Human
uccaaggagcugagaauagaagg

SEQ ID NO: 2105584 - RNA, 23 nt, Human
uccaaggagaaacagagacaggc

SEQ ID NO: 2105585 - RNA, 20 nt, Human
uccacccaggagccccgagg

SEQ ID NO: 2105586 - RNA, 24 nt, Human
uccaccauggcuaaggcaccagcc

SEQ ID NO: 2105587 - RNA, 12 nt, Human
uccaccccacuc

SEQ ID NO: 2105588 - RNA, 20 nt, Human
uccaccccagugcacccacu

SEQ ID NO: 2105589 - RNA, 23 nt, Human
uccaccccagugcacccacucug

SEQ ID NO: 2105590 - RNA, 18 nt, Human
uccacauccggaggagaa

SEQ ID NO: 2105591 - RNA, 17 nt, Human
uccacccaggagccccg

SEQ ID NO: 2105592 - RNA, 13 nt, Human
uccacccaccuca

SEQ ID NO: 2105593 - RNA, 12 nt, Human
uccacccaccuc

SEQ ID NO: 2105594 - RNA, 12 nt, Human
accuggcccugg

SEQ ID NO: 2105595 - RNA, 13 nt, Human
accuggcccuggg

SEQ ID NO: 2105596 - RNA, 15 nt, Human
accuggcccuggggc

SEQ ID NO: 2105597 - RNA, 16 nt, Human
accuggcccuggggcc

SEQ ID NO: 2105598 - RNA, 17 nt, Human
accuggcccuggggccu

SEQ ID NO: 2105599 - RNA, 18 nt, Human
accuggcccuggggccug

SEQ ID NO: 2105600 - RNA, 19 nt, Human
accuggcccuggggccugu

SEQ ID NO: 2105601 - RNA, 21 nt, Human
accuggcccuggggccuguac

SEQ ID NO: 2105602 - RNA, 23 nt, Human
accuggccccaugucucucagaa

SEQ ID NO: 2105603 - RNA, 21 nt, Human
accuggccccaugucucucag

SEQ ID NO: 2105604 - RNA, 14 nt, Human
accugggcaccugg

SEQ ID NO: 2105605 - RNA, 18 nt, Human
accugggcaccuggggag

SEQ ID NO: 2105606 - RNA, 19 nt, Human
accugggcaccuggggagu

SEQ ID NO: 2105607 - RNA, 13 nt, Human
accugggcaccug

SEQ ID NO: 2105608 - RNA, 12 nt, Human
accugcucuccu

SEQ ID NO: 2105609 - RNA, 18 nt, Human
accugcugagggaccagc

SEQ ID NO: 2105610 - RNA, 13 nt, Human
accugcuggcccc

SEQ ID NO: 2105611 - RNA, 19 nt, Human
accugcugagggaccagcc

SEQ ID NO: 2105612 - RNA, 20 nt, Human
accugcugagggaccagcca

SEQ ID NO: 2105613 - RNA, 23 nt, Human
accugcugagggaccagccaaga

SEQ ID NO: 2105614 - RNA, 15 nt, Human
accugaucccacucc

SEQ ID NO: 2105615 - RNA, 13 nt, Human
accugcugaugug

SEQ ID NO: 2105616 - RNA, 14 nt, Human
accugcuggccccu

SEQ ID NO: 2105617 - RNA, 15 nt, Human
accugcuggccccuc

SEQ ID NO: 2105618 - RNA, 16 nt, Human
accugcuggccccuca

SEQ ID NO: 2105619 - RNA, 17 nt, Human
accugcuggccccucac

SEQ ID NO: 2105620 - RNA, 19 nt, Human
accugcuggccccucaccu

SEQ ID NO: 2105621 - RNA, 21 nt, Human
accugcuggccccucaccugg

SEQ ID NO: 2105622 - RNA, 21 nt, Human
accugcgucucauacucaccu

SEQ ID NO: 2105623 - RNA, 17 nt, Human
ucauuuugcuucauagc

SEQ ID NO: 2105624 - RNA, 19 nt, Human
ucauuuuuaguagagacag

SEQ ID NO: 2105625 - RNA, 14 nt, Human
ucauuuuugaauac

SEQ ID NO: 2105626 - RNA, 14 nt, Human
ucauuugucacaca

SEQ ID NO: 2105627 - RNA, 16 nt, Human
accuggaccaaagcug

SEQ ID NO: 2105628 - RNA, 23 nt, Human
ucauuugggguagcuagaggaac

SEQ ID NO: 2105629 - RNA, 11 nt, Human
ucauuuugaag

SEQ ID NO: 2105630 - RNA, 16 nt, Human
ucauuuugaagcuaau

SEQ ID NO: 2105631 - RNA, 17 nt, Human
ucauuuugaagcuaauu

SEQ ID NO: 2105632 - RNA, 18 nt, Human
ucauuuugaagcuaauua

SEQ ID NO: 2105633 - RNA, 15 nt, Human
ucauuuucugcauuu

SEQ ID NO: 2105634 - RNA, 16 nt, Human
ucauuugucacacacu

SEQ ID NO: 2105635 - RNA, 21 nt, Human
accugauguuaaaauuccauc

SEQ ID NO: 2105636 - RNA, 19 nt, Human
accugauguaccugaugcu

SEQ ID NO: 2105637 - RNA, 19 nt, Human
accugcaccuccccccacu

SEQ ID NO: 2105638 - RNA, 17 nt, Human
accugcaccucccccca

SEQ ID NO: 2105639 - RNA, 18 nt, Human
accugcaccuccccccac

SEQ ID NO: 2105640 - RNA, 20 nt, Human
accugcaccuccccccacug

SEQ ID NO: 2105641 - RNA, 14 nt, Human
accugcaccucccc

SEQ ID NO: 2105642 - RNA, 15 nt, Human
accugcaccuccccc

SEQ ID NO: 2105643 - RNA, 16 nt, Human
accugcaccucccccc

SEQ ID NO: 2105644 - RNA, 18 nt, Human
accugaagacucauucuu

SEQ ID NO: 2105645 - RNA, 19 nt, Human
ucauaauaaauaucuguac

SEQ ID NO: 2105646 - RNA, 18 nt, Human
accugaacacuuauugcu

SEQ ID NO: 2105647 - RNA, 20 nt, Human
accugaacacuuauugcuuu

SEQ ID NO: 2105648 - RNA, 17 nt, Human
accugaccaacauggag

SEQ ID NO: 2105649 - RNA, 19 nt, Human
accugaccaacauggagaa

SEQ ID NO: 2105650 - RNA, 21 nt, Human
accugagcccggaugcuucuc

SEQ ID NO: 2105651 - RNA, 23 nt, Human
accugagcccggaugcuucucca

SEQ ID NO: 2105652 - RNA, 16 nt, Human
ucacagccacuuggga

SEQ ID NO: 2105653 - RNA, 15 nt, Human
ucacagagcagaguc

SEQ ID NO: 2105654 - RNA, 12 nt, Human
ucacagaggcuu

SEQ ID NO: 2105655 - RNA, 17 nt, Human
ucacagaggcuucuuca

SEQ ID NO: 2105656 - RNA, 11 nt, Human
ucacagaagaa

SEQ ID NO: 2105657 - RNA, 12 nt, Human
ucacagaagaau

SEQ ID NO: 2105658 - RNA, 14 nt, Human
ucacagacuggaga

SEQ ID NO: 2105659 - RNA, 16 nt, Human
ucacagacuggagaca

SEQ ID NO: 2105660 - RNA, 15 nt, Human
ucacagagacacagg

SEQ ID NO: 2105661 - RNA, 22 nt, Human
ucacagagacacagggcaucca

SEQ ID NO: 2105662 - RNA, 21 nt, Human
ucacagaacccuuggagccaa

SEQ ID NO: 2105663 - RNA, 19 nt, Human
ucacauuaauauuugcuga

SEQ ID NO: 2105664 - RNA, 20 nt, Human
ucacauuaauauuugcugac

SEQ ID NO: 2105665 - RNA, 17 nt, Human
ucaccagccccagugcc

SEQ ID NO: 2105666 - RNA, 15 nt, Human
ucacauuauuugcau

SEQ ID NO: 2105667 - RNA, 16 nt, Human
ucacauuauuugcaug

SEQ ID NO: 2105668 - RNA, 12 nt, Human
ucacaugcugga

SEQ ID NO: 2105669 - RNA, 13 nt, Human
ucacaugcuggac

SEQ ID NO: 2105670 - RNA, 14 nt, Human
ucacaugcuggaca

SEQ ID NO: 2105671 - RNA, 23 nt, Human
ucacaugcuggacaggucuggga

SEQ ID NO: 2105672 - RNA, 13 nt, Human
ucacaucacagga

SEQ ID NO: 2105673 - RNA, 19 nt, Human
ucacagcuucagccaggag

SEQ ID NO: 2105674 - RNA, 17 nt, Human
ucacagcuucagccagg

SEQ ID NO: 2105675 - RNA, 16 nt, Human
ucacagcuucagccag

SEQ ID NO: 2105676 - RNA, 15 nt, Human
ucacagcuucagcca

SEQ ID NO: 2105677 - RNA, 22 nt, Human
ucacagcuuauuuccucauuuu

SEQ ID NO: 2105678 - RNA, 14 nt, Human
accaaauuccuugg

SEQ ID NO: 2105679 - RNA, 13 nt, Human
accaacaagggca

SEQ ID NO: 2105680 - RNA, 16 nt, Human
accaacaagggcagug

SEQ ID NO: 2105681 - RNA, 22 nt, Human
accaacaucccauugcccuggu

SEQ ID NO: 2105682 - RNA, 15 nt, Human
accaacauggagaaa

SEQ ID NO: 2105683 - RNA, 16 nt, Human
accaacauggagaaac

SEQ ID NO: 2105684 - RNA, 23 nt, Human
accaacauggagaaacccugucu

SEQ ID NO: 2105685 - RNA, 24 nt, Human
accaacauggagaaacccugucuc

SEQ ID NO: 2105686 - RNA, 21 nt, Human
accaacaucccauugcccugg

SEQ ID NO: 2105687 - RNA, 16 nt, Human
accaacaguuccuuca

SEQ ID NO: 2105688 - RNA, 12 nt, Human
accaaaugcauc

SEQ ID NO: 2105689 - RNA, 16 nt, Human
accaaaugcaucaauc

SEQ ID NO: 2105690 - RNA, 16 nt, Human
accaaaucagcugcua

SEQ ID NO: 2105691 - RNA, 19 nt, Human
accaaaucagcugcuacua

SEQ ID NO: 2105692 - RNA, 15 nt, Human
accaacccucagagc

SEQ ID NO: 2105693 - RNA, 22 nt, Human
accaacccaucagaaggagaag

SEQ ID NO: 2105694 - RNA, 23 nt, Human
accacacccagcccacuucugcc

SEQ ID NO: 2105695 - RNA, 21 nt, Human
accacacccagcccacuucug

SEQ ID NO: 2105696 - RNA, 20 nt, Human
accacacccagcccacuucu

SEQ ID NO: 2105697 - RNA, 16 nt, Human
accacacccagcccac

SEQ ID NO: 2105698 - RNA, 15 nt, Human
accacacagccuaca

SEQ ID NO: 2105699 - RNA, 15 nt, Human
accacacccagccca

SEQ ID NO: 2105700 - RNA, 17 nt, Human
accacaaugcagugccu

SEQ ID NO: 2105701 - RNA, 17 nt, Human
accacacagaggcugcc

SEQ ID NO: 2105702 - RNA, 17 nt, Human
ucaagcaagauuucaga

SEQ ID NO: 2105703 - RNA, 14 nt, Human
ucaagcaauccucc

SEQ ID NO: 2105704 - RNA, 16 nt, Human
ucaagcaauccuccug

SEQ ID NO: 2105705 - RNA, 18 nt, Human
ucaagcaauccuccugag

SEQ ID NO: 2105706 - RNA, 19 nt, Human
ucaagcaauccuccugagu

SEQ ID NO: 2105707 - RNA, 14 nt, Human
ucaagcaccaggga

SEQ ID NO: 2105708 - RNA, 16 nt, Human
ucaagcagauuggaga

SEQ ID NO: 2105709 - RNA, 18 nt, Human
ucaagauuuugaaugcuu

SEQ ID NO: 2105710 - RNA, 19 nt, Human
ucaagauuuugaaugcuuc

SEQ ID NO: 2105711 - RNA, 13 nt, Human
ucaagauuuugaa

SEQ ID NO: 2105712 - RNA, 16 nt, Human
ucaagauuuugaaugc

SEQ ID NO: 2105713 - RNA, 17 nt, Human
ucaagcagauuggagaa

SEQ ID NO: 2105714 - RNA, 18 nt, Human
ucaaggcgugaggauggg

SEQ ID NO: 2105715 - RNA, 16 nt, Human
ucaaggugcuguuguc

SEQ ID NO: 2105716 - RNA, 21 nt, Human
ucaaggucguuuuuuucauuc

SEQ ID NO: 2105717 - RNA, 22 nt, Human
ucaaggccagcaagguggagug

SEQ ID NO: 2105718 - RNA, 15 nt, Human
ucaaggccugucccu

SEQ ID NO: 2105719 - RNA, 18 nt, Human
ucaaggccugucccuggc

SEQ ID NO: 2105720 - RNA, 12 nt, Human
ucaagaggcuga

SEQ ID NO: 2105721 - RNA, 14 nt, Human
acauuauuugcaug

SEQ ID NO: 2105722 - RNA, 13 nt, Human
acauuauuugcau

SEQ ID NO: 2105723 - RNA, 18 nt, Human
acauuaucgggagcagug

SEQ ID NO: 2105724 - RNA, 14 nt, Human
acauuauauugcaa

SEQ ID NO: 2105725 - RNA, 15 nt, Human
acauuauauugcaau

SEQ ID NO: 2105726 - RNA, 17 nt, Human
acauuauauugcaauga

SEQ ID NO: 2105727 - RNA, 18 nt, Human
acauuauauugcaaugaa

SEQ ID NO: 2105728 - RNA, 19 nt, Human
acauuauauugcaaugaag

SEQ ID NO: 2105729 - RNA, 19 nt, Human
acauuaucgggagcagugu

SEQ ID NO: 2105730 - RNA, 21 nt, Human
acauuaucgggagcagugucu

SEQ ID NO: 2105731 - RNA, 20 nt, Human
acauuaucuaacugugcuca

SEQ ID NO: 2105732 - RNA, 22 nt, Human
acauuaucgggagcagugucuu

SEQ ID NO: 2105733 - RNA, 21 nt, Human
ucaagagggcacugguggccc

SEQ ID NO: 2105734 - RNA, 20 nt, Human
ucaagagggcacugguggcc

SEQ ID NO: 2105735 - RNA, 17 nt, Human
ucaagagggucugagga

SEQ ID NO: 2105736 - RNA, 21 nt, Human
ucaagagguucucgacuggag

SEQ ID NO: 2105737 - RNA, 13 nt, Human
ucaagauaaagga

SEQ ID NO: 2105738 - RNA, 17 nt, Human
ucaagauaaaggacagu

SEQ ID NO: 2105739 - RNA, 19 nt, Human
ucaaguaauccaccugccu

SEQ ID NO: 2105740 - RNA, 16 nt, Human
ucaaguaagaagacau

SEQ ID NO: 2105741 - RNA, 18 nt, Human
ucaaguaagaagacauga

SEQ ID NO: 2105742 - RNA, 22 nt, Human
ucaaguaagaagacaugaacca

SEQ ID NO: 2105743 - RNA, 23 nt, Human
ucaaguaagaagacaugaaccaa

SEQ ID NO: 2105744 - RNA, 15 nt, Human
ucaaguaauugugaa

SEQ ID NO: 2105745 - RNA, 16 nt, Human
ucaaguaauugugaaa

SEQ ID NO: 2105746 - RNA, 16 nt, Human
ucaagugauucuccug

SEQ ID NO: 2105747 - RNA, 17 nt, Human
ucaagugauucuccugc

SEQ ID NO: 2105748 - RNA, 19 nt, Human
ucaauaguaaaagauaaca

SEQ ID NO: 2105749 - RNA, 15 nt, Human
ucaauauuuuccaug

SEQ ID NO: 2105750 - RNA, 16 nt, Human
ucaauauuuuccauga

SEQ ID NO: 2105751 - RNA, 17 nt, Human
ucaauauuuuccaugaa

SEQ ID NO: 2105752 - RNA, 18 nt, Human
ucaauauuuuccaugaaa

SEQ ID NO: 2105753 - RNA, 19 nt, Human
ucaauccagcgguucucaa

SEQ ID NO: 2105754 - RNA, 15 nt, Human
ucaauccccucauuc

SEQ ID NO: 2105755 - RNA, 17 nt, Human
ucaauccccucauucag

SEQ ID NO: 2105756 - RNA, 20 nt, Human
ucaauccccucauucaggaa

SEQ ID NO: 2105757 - RNA, 21 nt, Human
acauuuuucagauauaaaaga

SEQ ID NO: 2105758 - RNA, 18 nt, Human
acauuuuuuuuuuuaauu

SEQ ID NO: 2105759 - RNA, 20 nt, Human
acauuuuuuuuuuuaauuuu

SEQ ID NO: 2105760 - RNA, 21 nt, Human
acauuuuuuuuuuuaauuuug

SEQ ID NO: 2105761 - RNA, 18 nt, Human
acauuuuacuuuuuccug

SEQ ID NO: 2105762 - RNA, 12 nt, Human
acauuuuaacau

SEQ ID NO: 2105763 - RNA, 13 nt, Human
acauuuuaacaug

SEQ ID NO: 2105764 - RNA, 16 nt, Human
acauuuuagacaguaa

SEQ ID NO: 2105765 - RNA, 17 nt, Human
acauuuaaacuugucag

SEQ ID NO: 2105766 - RNA, 11 nt, Human
acauuuaauug

SEQ ID NO: 2105767 - RNA, 15 nt, Human
acauuuaauugagaa

SEQ ID NO: 2105768 - RNA, 19 nt, Human
acauuuuaaugcaccugaa

SEQ ID NO: 2105769 - RNA, 15 nt, Human
acauuuuaaugcacc

SEQ ID NO: 2105770 - RNA, 11 nt, Human
acauuuuaaca

SEQ ID NO: 2105771 - RNA, 22 nt, Human
acauugcggacagccacggcca

SEQ ID NO: 2105772 - RNA, 21 nt, Human
acauugcggacagccacggcc

SEQ ID NO: 2105773 - RNA, 22 nt, Human
ucaauccccucauucaggaaaa

SEQ ID NO: 2105774 - RNA, 14 nt, Human
ucaauccucuaagc

SEQ ID NO: 2105775 - RNA, 19 nt, Human
acauugcuggucuuguaag

SEQ ID NO: 2105776 - RNA, 20 nt, Human
acauugcuggucuuguaaga

SEQ ID NO: 2105777 - RNA, 21 nt, Human
acauugcuggucuuguaagag

SEQ ID NO: 2105778 - RNA, 17 nt, Human
acauugggaaaucuuau

SEQ ID NO: 2105779 - RNA, 14 nt, Human
acauggccagugug

SEQ ID NO: 2105780 - RNA, 15 nt, Human
acauggccaguguga

SEQ ID NO: 2105781 - RNA, 15 nt, Human
acauggaguauaugu

SEQ ID NO: 2105782 - RNA, 19 nt, Human
acauggaguauaugucaag

SEQ ID NO: 2105783 - RNA, 13 nt, Human
acaugagaacaga

SEQ ID NO: 2105784 - RNA, 21 nt, Human
acaugaggacaugauggagcg

SEQ ID NO: 2105785 - RNA, 12 nt, Human
acauggacccgg

SEQ ID NO: 2105786 - RNA, 13 nt, Human
acauggacccgga

SEQ ID NO: 2105787 - RNA, 16 nt, Human
acauggacccggagcu

SEQ ID NO: 2105788 - RNA, 22 nt, Human
acauggacccggagcuaacacu

SEQ ID NO: 2105789 - RNA, 19 nt, Human
acauggacccggagcuaac

SEQ ID NO: 2105790 - RNA, 20 nt, Human
acauggaauaacauguaauu

SEQ ID NO: 2105791 - RNA, 18 nt, Human
acauggaauaacauguaa

SEQ ID NO: 2105792 - RNA, 17 nt, Human
acauuaagccuuccaca

SEQ ID NO: 2105793 - RNA, 16 nt, Human
acauuaagcaucacaa

SEQ ID NO: 2105794 - RNA, 19 nt, Human
acauuaagcaucacaaaug

SEQ ID NO: 2105795 - RNA, 18 nt, Human
acaugguugugaccugag

SEQ ID NO: 2105796 - RNA, 20 nt, Human
acaugguugugaccugagga

SEQ ID NO: 2105797 - RNA, 17 nt, Human
acauguaauaaaaagua

SEQ ID NO: 2105798 - RNA, 19 nt, Human
acauguaauaaaaaguaua

SEQ ID NO: 2105799 - RNA, 14 nt, Human
acauguauaauauu

SEQ ID NO: 2105800 - RNA, 23 nt, Human
acauguaauaaaaaguauauguu

SEQ ID NO: 2105801 - RNA, 20 nt, Human
acauguaauaaaaaguauau

SEQ ID NO: 2105802 - RNA, 19 nt, Human
acauguauaauauuuuuaa

SEQ ID NO: 2105803 - RNA, 20 nt, Human
acauguauaauauuuuuaau

SEQ ID NO: 2105804 - RNA, 18 nt, Human
acaugacgacaaagcugc

SEQ ID NO: 2105805 - RNA, 19 nt, Human
acaugacgacaaagcugcu

SEQ ID NO: 2105806 - RNA, 14 nt, Human
acaugacacugaaa

SEQ ID NO: 2105807 - RNA, 15 nt, Human
acaugacacugaaau

SEQ ID NO: 2105808 - RNA, 17 nt, Human
acaugacacugaaaugc

SEQ ID NO: 2105809 - RNA, 19 nt, Human
acaugacacugaaaugccu

SEQ ID NO: 2105810 - RNA, 23 nt, Human
acaugacacugaaaugccuuacu

SEQ ID NO: 2105811 - RNA, 19 nt, Human
ucaaagguagccaucaugg

SEQ ID NO: 2105812 - RNA, 14 nt, Human
ucaaaguaaaacuu

SEQ ID NO: 2105813 - RNA, 19 nt, Human
ucaaaguaaaacuugcugc

SEQ ID NO: 2105814 - RNA, 10 nt, Human
ucaaagcaag

SEQ ID NO: 2105815 - RNA, 13 nt, Human
ucaaaaggugccu

SEQ ID NO: 2105816 - RNA, 23 nt, Human
ucaaaaggugccugugaggcagg

SEQ ID NO: 2105817 - RNA, 16 nt, Human
ucaaaagcugggcagg

SEQ ID NO: 2105818 - RNA, 20 nt, Human
uauuuguuaaugguuugaau

SEQ ID NO: 2105819 - RNA, 22 nt, Human
uauuuguuaaugguuugaauau

SEQ ID NO: 2105820 - RNA, 17 nt, Human
uauuuguuaaauauuua

SEQ ID NO: 2105821 - RNA, 16 nt, Human
acaucuugcucugcug

SEQ ID NO: 2105822 - RNA, 15 nt, Human
acaucuugcucugcu

SEQ ID NO: 2105823 - RNA, 19 nt, Human
uaugugguuuccacgauga

SEQ ID NO: 2105824 - RNA, 17 nt, Human
acaucuugcucugcuga

SEQ ID NO: 2105825 - RNA, 22 nt, Human
acaucuugcucugcugacagac

SEQ ID NO: 2105826 - RNA, 19 nt, Human
acaucuuggucagauuuga

SEQ ID NO: 2105827 - RNA, 13 nt, Human
acaucuuggcagg

SEQ ID NO: 2105828 - RNA, 14 nt, Human
acaucuuggcaggg

SEQ ID NO: 2105829 - RNA, 20 nt, Human
acaucuuucacacuuccacc

SEQ ID NO: 2105830 - RNA, 12 nt, Human
acaucuuucaca

SEQ ID NO: 2105831 - RNA, 14 nt, Human
acaucuuucacacu

SEQ ID NO: 2105832 - RNA, 15 nt, Human
acaucuuucacacuu

SEQ ID NO: 2105833 - RNA, 13 nt, Human
acaucuuucacau

SEQ ID NO: 2105834 - RNA, 15 nt, Human
acaucuuucacauug

SEQ ID NO: 2105835 - RNA, 17 nt, Human
uauuuuuguagagccag

SEQ ID NO: 2105836 - RNA, 20 nt, Human
uauuuuuguaauuuuaaaua

SEQ ID NO: 2105837 - RNA, 21 nt, Human
uauuuuguuuugugcagagau

SEQ ID NO: 2105838 - RNA, 17 nt, Human
uauuuuuauuuguuugu

SEQ ID NO: 2105839 - RNA, 13 nt, Human
uauuuuuauuugu

SEQ ID NO: 2105840 - RNA, 15 nt, Human
uauuuuucacaguuu

SEQ ID NO: 2105841 - RNA, 18 nt, Human
uauuuuaccacugcugug

SEQ ID NO: 2105842 - RNA, 16 nt, Human
uauuuuacuacugugg

SEQ ID NO: 2105843 - RNA, 15 nt, Human
uauuuuacugucuua

SEQ ID NO: 2105844 - RNA, 16 nt, Human
uauuuuacugucuuaa

SEQ ID NO: 2105845 - RNA, 17 nt, Human
uauuuuacugucuuaau

SEQ ID NO: 2105846 - RNA, 18 nt, Human
uauuuuacuucuagagau

SEQ ID NO: 2105847 - RNA, 18 nt, Human
uauuuuaaauuauaagga

SEQ ID NO: 2105848 - RNA, 20 nt, Human
uauuuuaaauuauaaggacu

SEQ ID NO: 2105849 - RNA, 21 nt, Human
uauuuuaaauuauaaggacug

SEQ ID NO: 2105850 - RNA, 22 nt, Human
uauuuuaaauuauaaggacugc

SEQ ID NO: 2105851 - RNA, 19 nt, Human
uauuuuaauuagguuaacu

SEQ ID NO: 2105852 - RNA, 19 nt, Human
uauuuuaauuuaugaguuu

SEQ ID NO: 2105853 - RNA, 12 nt, Human
uauuuuaagcau

SEQ ID NO: 2105854 - RNA, 13 nt, Human
uauuuuaagcauu

SEQ ID NO: 2105855 - RNA, 14 nt, Human
uauuuuaagcauua

SEQ ID NO: 2105856 - RNA, 19 nt, Human
uauuuuaagcauuacucuu

SEQ ID NO: 2105857 - RNA, 20 nt, Human
uauuuuaagcauuacucuug

SEQ ID NO: 2105858 - RNA, 22 nt, Human
uauuuuaagcauuacucuugua

SEQ ID NO: 2105859 - RNA, 15 nt, Human
ucauaacuagaacug

SEQ ID NO: 2105860 - RNA, 16 nt, Human
ucauaacugugucauu

SEQ ID NO: 2105861 - RNA, 17 nt, Human
ucauaacuuucauuaaa

SEQ ID NO: 2105862 - RNA, 13 nt, Human
ucauaagcacacu

SEQ ID NO: 2105863 - RNA, 13 nt, Human
ucauaacuagaac

SEQ ID NO: 2105864 - RNA, 16 nt, Human
ucauaaacugugugca

SEQ ID NO: 2105865 - RNA, 14 nt, Human
ucauaaacugugug

SEQ ID NO: 2105866 - RNA, 15 nt, Human
ucauaaacugugugc

SEQ ID NO: 2105867 - RNA, 13 nt, Human
ucauaaacugugu

SEQ ID NO: 2105868 - RNA, 23 nt, Human
ucaguuuauccaagguguaacuc

SEQ ID NO: 2105869 - RNA, 22 nt, Human
ucagugcuguggccugggcaag

SEQ ID NO: 2105870 - RNA, 21 nt, Human
ucauaaaauaaaguauauaua

SEQ ID NO: 2105871 - RNA, 19 nt, Human
ucaguuucaauucagugcu

SEQ ID NO: 2105872 - RNA, 19 nt, Human
ucaguuugcuagcagaaau

SEQ ID NO: 2105873 - RNA, 13 nt, Human
ucaguggcagcug

SEQ ID NO: 2105874 - RNA, 12 nt, Human
ucagugcugugg

SEQ ID NO: 2105875 - RNA, 14 nt, Human
ucagugcuguggcc

SEQ ID NO: 2105876 - RNA, 15 nt, Human
ucagugcuguggccu

SEQ ID NO: 2105877 - RNA, 16 nt, Human
ucaguggcagcugcuu

SEQ ID NO: 2105878 - RNA, 17 nt, Human
ucagugcuguggccugg

SEQ ID NO: 2105879 - RNA, 19 nt, Human
ucagugcuguggccugggc

SEQ ID NO: 2105880 - RNA, 15 nt, Human
ucaguggcagcugcu

SEQ ID NO: 2105881 - RNA, 14 nt, Human
ucaguggcagcugc

SEQ ID NO: 2105882 - RNA, 13 nt, Human
ucaguagucagac

SEQ ID NO: 2105883 - RNA, 21 nt, Human
ucaguauuaaaggggggaggg

SEQ ID NO: 2105884 - RNA, 22 nt, Human
ucaguauuaaaggggggagggg

SEQ ID NO: 2105885 - RNA, 18 nt, Human
ucagguucuuagugucac

SEQ ID NO: 2105886 - RNA, 17 nt, Human
accgaaacagcgcuggg

SEQ ID NO: 2105887 - RNA, 15 nt, Human
ucagguuauacuccu

SEQ ID NO: 2105888 - RNA, 12 nt, Human
accgaaacagcg

SEQ ID NO: 2105889 - RNA, 22 nt, Human
ucaggugucccugcacuugcag

SEQ ID NO: 2105890 - RNA, 15 nt, Human
ucaguaacagggccu

SEQ ID NO: 2105891 - RNA, 14 nt, Human
ucagguuuuguaaa

SEQ ID NO: 2105892 - RNA, 13 nt, Human
ucagguuuuguaa

SEQ ID NO: 2105893 - RNA, 22 nt, Human
ucagguugucugaagucacugc

SEQ ID NO: 2105894 - RNA, 17 nt, Human
ucagguuguaguaaaga

SEQ ID NO: 2105895 - RNA, 19 nt, Human
ucagguuguaguaaagaaa

SEQ ID NO: 2105896 - RNA, 20 nt, Human
ucagguuguaguaaagaaau

SEQ ID NO: 2105897 - RNA, 17 nt, Human
ucagguuugccugaggg

SEQ ID NO: 2105898 - RNA, 13 nt, Human
ucagguuuggggu

SEQ ID NO: 2105899 - RNA, 18 nt, Human
ucagguuugccugagggc

SEQ ID NO: 2105900 - RNA, 13 nt, Human
ucaguacccaccu

SEQ ID NO: 2105901 - RNA, 15 nt, Human
ucaguacccaccuga

SEQ ID NO: 2105902 - RNA, 18 nt, Human
ucaguacccaccugagcu

SEQ ID NO: 2105903 - RNA, 22 nt, Human
ucaguacccaccugagcuuugg

SEQ ID NO: 2105904 - RNA, 13 nt, Human
ucaguaauaacuc

SEQ ID NO: 2105905 - RNA, 12 nt, Human
ucaguaauaaaa

SEQ ID NO: 2105906 - RNA, 13 nt, Human
ucaguaauaaaac

SEQ ID NO: 2105907 - RNA, 15 nt, Human
ucaguaauaaaacau

SEQ ID NO: 2105908 - RNA, 19 nt, Human
ucaguaauaaacuguguuu

SEQ ID NO: 2105909 - RNA, 13 nt, Human
ucaguaagccgug

SEQ ID NO: 2105910 - RNA, 21 nt, Human
acccuuggaggcugucuucuc

SEQ ID NO: 2105911 - RNA, 11 nt, Human
acccuuggccu

SEQ ID NO: 2105912 - RNA, 12 nt, Human
acccuuggccug

SEQ ID NO: 2105913 - RNA, 17 nt, Human
acccuuggcucaauccu

SEQ ID NO: 2105914 - RNA, 13 nt, Human
acccuuggccugu

SEQ ID NO: 2105915 - RNA, 17 nt, Human
acccuuggccugucuca

SEQ ID NO: 2105916 - RNA, 18 nt, Human
ucaggugucccugcacuu

SEQ ID NO: 2105917 - RNA, 17 nt, Human
ucaggugucccugcacu

SEQ ID NO: 2105918 - RNA, 15 nt, Human
ucaggugucccugca

SEQ ID NO: 2105919 - RNA, 12 nt, Human
acccccagccug

SEQ ID NO: 2105920 - RNA, 21 nt, Human
acccccacucucauuccccag

SEQ ID NO: 2105921 - RNA, 22 nt, Human
acccccacucucauuccccagg

SEQ ID NO: 2105922 - RNA, 11 nt, Human
acccccagcaa

SEQ ID NO: 2105923 - RNA, 13 nt, Human
acccccagcaacc

SEQ ID NO: 2105924 - RNA, 16 nt, Human
acccccagcaacccuc

SEQ ID NO: 2105925 - RNA, 13 nt, Human
acccccagccugc

SEQ ID NO: 2105926 - RNA, 17 nt, Human
ucaggcaggugggaugg

SEQ ID NO: 2105927 - RNA, 13 nt, Human
ucaggcaggaagg

SEQ ID NO: 2105928 - RNA, 21 nt, Human
ucaggcaggaagggcaggaag

SEQ ID NO: 2105929 - RNA, 18 nt, Human
ucaggcaggugggaugga

SEQ ID NO: 2105930 - RNA, 15 nt, Human
ucaggcauaggccug

SEQ ID NO: 2105931 - RNA, 16 nt, Human
ucaggcauaggccugg

SEQ ID NO: 2105932 - RNA, 17 nt, Human
ucaggcauaggccuggg

SEQ ID NO: 2105933 - RNA, 18 nt, Human
ucaggcauaggccugggu

SEQ ID NO: 2105934 - RNA, 13 nt, Human
ucaggccacuuga

SEQ ID NO: 2105935 - RNA, 17 nt, Human
ucaggccacggcagccu

SEQ ID NO: 2105936 - RNA, 18 nt, Human
ucaggccaaccccaaaga

SEQ ID NO: 2105937 - RNA, 17 nt, Human
ucaggccaccugccccc

SEQ ID NO: 2105938 - RNA, 19 nt, Human
ucaggccaccugcccccuu

SEQ ID NO: 2105939 - RNA, 21 nt, Human
ucaggccaccugcccccuucu

SEQ ID NO: 2105940 - RNA, 14 nt, Human
ucaggccacggcag

SEQ ID NO: 2105941 - RNA, 16 nt, Human
ucaggccacggcagcc

SEQ ID NO: 2105942 - RNA, 19 nt, Human
ucaggguuggccccugccc

SEQ ID NO: 2105943 - RNA, 18 nt, Human
ucaggguuggccccugcc

SEQ ID NO: 2105944 - RNA, 23 nt, Human
ucaggguuggccccugcccggcu

SEQ ID NO: 2105945 - RNA, 23 nt, Human
ucaggggucgucaccaccucucc

SEQ ID NO: 2105946 - RNA, 17 nt, Human
ucagguacagagaagga

SEQ ID NO: 2105947 - RNA, 18 nt, Human
ucagguacagagaaggaa

SEQ ID NO: 2105948 - RNA, 19 nt, Human
ucagguacagagaaggaau

SEQ ID NO: 2105949 - RNA, 13 nt, Human
ucagguagcugcc

SEQ ID NO: 2105950 - RNA, 19 nt, Human
ucagguaguugcaauugaa

SEQ ID NO: 2105951 - RNA, 12 nt, Human
ucaggggugugc

SEQ ID NO: 2105952 - RNA, 19 nt, Human
ucaggggugugcggccuuu

SEQ ID NO: 2105953 - RNA, 23 nt, Human
ucaggggugugcggccuuuggcu

SEQ ID NO: 2105954 - RNA, 17 nt, Human
ucaggguuggccccugc

SEQ ID NO: 2105955 - RNA, 21 nt, Human
acccuccuuucaccacaugug

SEQ ID NO: 2105956 - RNA, 18 nt, Human
acccucccucagccccuc

SEQ ID NO: 2105957 - RNA, 19 nt, Human
acccucccucagccccucu

SEQ ID NO: 2105958 - RNA, 20 nt, Human
acccucccucagccccucuu

SEQ ID NO: 2105959 - RNA, 23 nt, Human
acccucccucagccccucuugcc

SEQ ID NO: 2105960 - RNA, 12 nt, Human
acccucccucag

SEQ ID NO: 2105961 - RNA, 14 nt, Human
acccucccucagcc

SEQ ID NO: 2105962 - RNA, 17 nt, Human
acccucccucagccccu

SEQ ID NO: 2105963 - RNA, 23 nt, Human
acccucccccaggaggucgaccc

SEQ ID NO: 2105964 - RNA, 15 nt, Human
acccggaggggccug

SEQ ID NO: 2105965 - RNA, 22 nt, Human
acccggagcuaacacuggcccc

SEQ ID NO: 2105966 - RNA, 23 nt, Human
acccggagcuaacacuggccccu

SEQ ID NO: 2105967 - RNA, 16 nt, Human
acccgcuuucuugcug

SEQ ID NO: 2105968 - RNA, 21 nt, Human
acccucgaagcgcgccacucg

SEQ ID NO: 2105969 - RNA, 16 nt, Human
acccucgaagcgcgcc

SEQ ID NO: 2105970 - RNA, 20 nt, Human
acccucgaagcgcgccacuc

SEQ ID NO: 2105971 - RNA, 17 nt, Human
acccugauuucuugcuu

SEQ ID NO: 2105972 - RNA, 18 nt, Human
acccugcaaaggacuguu

SEQ ID NO: 2105973 - RNA, 14 nt, Human
acccugccccugcc

SEQ ID NO: 2105974 - RNA, 12 nt, Human
acccugccccug

SEQ ID NO: 2105975 - RNA, 13 nt, Human
acccugccccugc

SEQ ID NO: 2105976 - RNA, 22 nt, Human
acccugcgaaggggcccugguc

SEQ ID NO: 2105977 - RNA, 19 nt, Human
acccugcgaaggggcccug

SEQ ID NO: 2105978 - RNA, 20 nt, Human
acccugcgaaggggcccugg

SEQ ID NO: 2105979 - RNA, 18 nt, Human
acccugcgaaggggcccu

SEQ ID NO: 2105980 - RNA, 17 nt, Human
ucacugcaacuucugcc

SEQ ID NO: 2105981 - RNA, 18 nt, Human
ucacugcaacuucugccu

SEQ ID NO: 2105982 - RNA, 15 nt, Human
ucacugcacagugca

SEQ ID NO: 2105983 - RNA, 18 nt, Human
ucacugcaagcuccgccu

SEQ ID NO: 2105984 - RNA, 14 nt, Human
ucacuguugcccag

SEQ ID NO: 2105985 - RNA, 18 nt, Human
ucacugcaaccuccgccu

SEQ ID NO: 2105986 - RNA, 17 nt, Human
ucacuuaaauguuacca

SEQ ID NO: 2105987 - RNA, 17 nt, Human
ucacuuaccuagauuua

SEQ ID NO: 2105988 - RNA, 15 nt, Human
ucacuguugcccagg

SEQ ID NO: 2105989 - RNA, 20 nt, Human
ucacuguuucucugcuguug

SEQ ID NO: 2105990 - RNA, 15 nt, Human
ucacuucacccugga

SEQ ID NO: 2105991 - RNA, 19 nt, Human
ucacuuaucccaagagaau

SEQ ID NO: 2105992 - RNA, 17 nt, Human
ucacuuccuacaagagc

SEQ ID NO: 2105993 - RNA, 13 nt, Human
ucacuucuaaaug

SEQ ID NO: 2105994 - RNA, 16 nt, Human
ucacuucuaaaugcau

SEQ ID NO: 2105995 - RNA, 17 nt, Human
ucacuucugaccacacu

SEQ ID NO: 2105996 - RNA, 21 nt, Human
ucacuauguugcccaggcagg

SEQ ID NO: 2105997 - RNA, 22 nt, Human
ucaccagccccagugcccacag

SEQ ID NO: 2105998 - RNA, 18 nt, Human
ucacuauuuuuauuuaua

SEQ ID NO: 2105999 - RNA, 17 nt, Human
ucacucaaguucaagga

SEQ ID NO: 2106000 - RNA, 20 nt, Human
ucacucaaguucaaggacca

SEQ ID NO: 2106001 - RNA, 21 nt, Human
ucacucaaguucaaggaccaa

SEQ ID NO: 2106002 - RNA, 14 nt, Human
ucacucaauuguuu

SEQ ID NO: 2106003 - RNA, 20 nt, Human
ucacuauuuuuauuuauauu

SEQ ID NO: 2106004 - RNA, 14 nt, Human
ucacucagauggaa

SEQ ID NO: 2106005 - RNA, 23 nt, Human
ucacugaaacuucaagcaccagg

SEQ ID NO: 2106006 - RNA, 14 nt, Human
ucacuccagccugg

SEQ ID NO: 2106007 - RNA, 16 nt, Human
ucacugaagcuuuuua

SEQ ID NO: 2106008 - RNA, 13 nt, Human
ucacuccaccacc

SEQ ID NO: 2106009 - RNA, 14 nt, Human
ucacuccaccaccc

SEQ ID NO: 2106010 - RNA, 15 nt, Human
ucacuccaccaccca

SEQ ID NO: 2106011 - RNA, 16 nt, Human
ucacuccaccacccaa

SEQ ID NO: 2106012 - RNA, 18 nt, Human
ucacuucugaccacacuu

SEQ ID NO: 2106013 - RNA, 15 nt, Human
accaggguuuaucuu

SEQ ID NO: 2106014 - RNA, 14 nt, Human
accagguugaaaga

SEQ ID NO: 2106015 - RNA, 20 nt, Human
accagguguucuacacucau

SEQ ID NO: 2106016 - RNA, 23 nt, Human
accagguguucuacacucaucuu

SEQ ID NO: 2106017 - RNA, 19 nt, Human
accagguguucuacacuca

SEQ ID NO: 2106018 - RNA, 15 nt, Human
accaguaaaguguaa

SEQ ID NO: 2106019 - RNA, 17 nt, Human
accaguaaaguguaaca

SEQ ID NO: 2106020 - RNA, 18 nt, Human
accaguaaaguguaacau

SEQ ID NO: 2106021 - RNA, 19 nt, Human
accaguaaaguguaacaua

SEQ ID NO: 2106022 - RNA, 16 nt, Human
accauggagacaagaa

SEQ ID NO: 2106023 - RNA, 21 nt, Human
accauggcuaaggcaccagcc

SEQ ID NO: 2106024 - RNA, 15 nt, Human
accauggccagccaa

SEQ ID NO: 2106025 - RNA, 13 nt, Human
accauuuucuggu

SEQ ID NO: 2106026 - RNA, 19 nt, Human
accauguuugagcucagac

SEQ ID NO: 2106027 - RNA, 20 nt, Human
acccacugcuuuuggucugu

SEQ ID NO: 2106028 - RNA, 21 nt, Human
accauuuugggguacccacug

SEQ ID NO: 2106029 - RNA, 12 nt, Human
accauguuugag

SEQ ID NO: 2106030 - RNA, 20 nt, Human
accauguuugagcucagacc

SEQ ID NO: 2106031 - RNA, 13 nt, Human
accccagcggcug

SEQ ID NO: 2106032 - RNA, 14 nt, Human
accccagcucccua

SEQ ID NO: 2106033 - RNA, 17 nt, Human
accccagcucccuagga

SEQ ID NO: 2106034 - RNA, 14 nt, Human
accccagcucugcu

SEQ ID NO: 2106035 - RNA, 23 nt, Human
accccagcucccuaggagaccaa

SEQ ID NO: 2106036 - RNA, 13 nt, Human
accccagguuucu

SEQ ID NO: 2106037 - RNA, 17 nt, Human
acccccaccccacacuu

SEQ ID NO: 2106038 - RNA, 16 nt, Human
acccccaccccacacu

SEQ ID NO: 2106039 - RNA, 13 nt, Human
acccccaccccuu

SEQ ID NO: 2106040 - RNA, 14 nt, Human
acccccaccccuuc

SEQ ID NO: 2106041 - RNA, 15 nt, Human
acccccaccccuucc

SEQ ID NO: 2106042 - RNA, 20 nt, Human
acccccaccccuuccccacu

SEQ ID NO: 2106043 - RNA, 11 nt, Human
acccccacccu

SEQ ID NO: 2106044 - RNA, 12 nt, Human
acccccacccuu

SEQ ID NO: 2106045 - RNA, 13 nt, Human
acccccacucuca

SEQ ID NO: 2106046 - RNA, 17 nt, Human
acccccacucucauucc

SEQ ID NO: 2106047 - RNA, 18 nt, Human
acccccacucucauuccc

SEQ ID NO: 2106048 - RNA, 17 nt, Human
acccagcgagcccuggu

SEQ ID NO: 2106049 - RNA, 16 nt, Human
acccagcgagcccugg

SEQ ID NO: 2106050 - RNA, 13 nt, Human
acccagcgagccc

SEQ ID NO: 2106051 - RNA, 13 nt, Human
ucagcccucagaa

SEQ ID NO: 2106052 - RNA, 15 nt, Human
acccaggagccccga

SEQ ID NO: 2106053 - RNA, 23 nt, Human
acccaggagauggaaguugcagu

SEQ ID NO: 2106054 - RNA, 13 nt, Human
acccaggagcccc

SEQ ID NO: 2106055 - RNA, 20 nt, Human
ucagccccuccucugccacc

SEQ ID NO: 2106056 - RNA, 21 nt, Human
ucagccccuccucugccaccu

SEQ ID NO: 2106057 - RNA, 22 nt, Human
ucagccccuccucugccaccuc

SEQ ID NO: 2106058 - RNA, 23 nt, Human
ucagccccuccucugccaccucc

SEQ ID NO: 2106059 - RNA, 11 nt, Human
ucagccccucu

SEQ ID NO: 2106060 - RNA, 12 nt, Human
ucagccccucuu

SEQ ID NO: 2106061 - RNA, 20 nt, Human
ucagccccucuugcccccca

SEQ ID NO: 2106062 - RNA, 21 nt, Human
ucagccccucuugccccccac

SEQ ID NO: 2106063 - RNA, 22 nt, Human
ucagccccucuugccccccacc

SEQ ID NO: 2106064 - RNA, 23 nt, Human
ucagccccucuugccccccaccc

SEQ ID NO: 2106065 - RNA, 12 nt, Human
ucagcccucaga

SEQ ID NO: 2106066 - RNA, 23 nt, Human
ucagauggaaccgcaggaagcug

SEQ ID NO: 2106067 - RNA, 15 nt, Human
ucagauuccuuuccc

SEQ ID NO: 2106068 - RNA, 19 nt, Human
ucagauuccuuucccuuua

SEQ ID NO: 2106069 - RNA, 21 nt, Human
ucagauggaaccgcaggaagc

SEQ ID NO: 2106070 - RNA, 22 nt, Human
ucagauggaaccgcaggaagcu

SEQ ID NO: 2106071 - RNA, 20 nt, Human
ucagauggaaccgcaggaag

SEQ ID NO: 2106072 - RNA, 13 nt, Human
ucagaugcuucug

SEQ ID NO: 2106073 - RNA, 14 nt, Human
ucagaugcuucugg

SEQ ID NO: 2106074 - RNA, 18 nt, Human
ucagaugcuucugggaga

SEQ ID NO: 2106075 - RNA, 22 nt, Human
ucagaugcccagagggcccagg

SEQ ID NO: 2106076 - RNA, 19 nt, Human
ucagagcaggugcuggcuc

SEQ ID NO: 2106077 - RNA, 16 nt, Human
ucagagauaggccugu

SEQ ID NO: 2106078 - RNA, 21 nt, Human
ucagagccaccccuaaagaga

SEQ ID NO: 2106079 - RNA, 19 nt, Human
ucagagagaauggcuuugg

SEQ ID NO: 2106080 - RNA, 14 nt, Human
ucagagagaguguu

SEQ ID NO: 2106081 - RNA, 17 nt, Human
ucagagaggagucagag

SEQ ID NO: 2106082 - RNA, 20 nt, Human
ucagagaggagucagagaga

SEQ ID NO: 2106083 - RNA, 22 nt, Human
ucagagagcgagcgcuacccac

SEQ ID NO: 2106084 - RNA, 13 nt, Human
ucagagagcuggu

SEQ ID NO: 2106085 - RNA, 14 nt, Human
ucagagagcuggua

SEQ ID NO: 2106086 - RNA, 16 nt, Human
ucagagagcugguagu

SEQ ID NO: 2106087 - RNA, 15 nt, Human
acccagcccacuucu

SEQ ID NO: 2106088 - RNA, 17 nt, Human
acccagcaacuccaacu

SEQ ID NO: 2106089 - RNA, 14 nt, Human
ucagagacucaggg

SEQ ID NO: 2106090 - RNA, 17 nt, Human
ucagagacucagggccc

SEQ ID NO: 2106091 - RNA, 19 nt, Human
ucagagacucagggcccca

SEQ ID NO: 2106092 - RNA, 20 nt, Human
ucagagacucagggccccag

SEQ ID NO: 2106093 - RNA, 23 nt, Human
ucagagacaggaagucuucaggg

SEQ ID NO: 2106094 - RNA, 20 nt, Human
ucagagacaggaagucuuca

SEQ ID NO: 2106095 - RNA, 20 nt, Human
ucagaauucucagaaucuca

SEQ ID NO: 2106096 - RNA, 10 nt, Human
ucagaauucu

SEQ ID NO: 2106097 - RNA, 12 nt, Human
ucagaauucuca

SEQ ID NO: 2106098 - RNA, 13 nt, Human
ucguucucugccu

SEQ ID NO: 2106099 - RNA, 14 nt, Human
ucggggccagaggc

SEQ ID NO: 2106100 - RNA, 15 nt, Human
ucguucuuguuagua

SEQ ID NO: 2106101 - RNA, 15 nt, Human
ucguucuuguucugu

SEQ ID NO: 2106102 - RNA, 17 nt, Human
ucguucuuguucuguuu

SEQ ID NO: 2106103 - RNA, 14 nt, Human
ucguucuuucuagc

SEQ ID NO: 2106104 - RNA, 19 nt, Human
ucguuaguaucuaacaugu

SEQ ID NO: 2106105 - RNA, 15 nt, Human
ucguuauguguguau

SEQ ID NO: 2106106 - RNA, 21 nt, Human
ucguauaacacaauaugaaua

SEQ ID NO: 2106107 - RNA, 16 nt, Human
ucggggcaugcugggg

SEQ ID NO: 2106108 - RNA, 17 nt, Human
ucggggcaugcuggggc

SEQ ID NO: 2106109 - RNA, 18 nt, Human
ucggggcaugcuggggca

SEQ ID NO: 2106110 - RNA, 19 nt, Human
ucggggagaggcugaggac

SEQ ID NO: 2106111 - RNA, 15 nt, Human
ucggggaacuccugg

SEQ ID NO: 2106112 - RNA, 16 nt, Human
ucggggaacuccugga

SEQ ID NO: 2106113 - RNA, 23 nt, Human
ucgggagcagugucuuccauaau

SEQ ID NO: 2106114 - RNA, 13 nt, Human
ucgggagcagugu

SEQ ID NO: 2106115 - RNA, 14 nt, Human
ucgggagcaguguc

SEQ ID NO: 2106116 - RNA, 15 nt, Human
ucgggagcagugucu

SEQ ID NO: 2106117 - RNA, 16 nt, Human
ucgggagcagugucuu

SEQ ID NO: 2106118 - RNA, 19 nt, Human
ucgggagcagugucuucca

SEQ ID NO: 2106119 - RNA, 22 nt, Human
ucgggagcagugucuuccauaa

SEQ ID NO: 2106120 - RNA, 21 nt, Human
acuguuaauaguucagguaac

SEQ ID NO: 2106121 - RNA, 17 nt, Human
acuguuaauaguucagg

SEQ ID NO: 2106122 - RNA, 15 nt, Human
acuguguuccuggca

SEQ ID NO: 2106123 - RNA, 12 nt, Human
acuguguuccug

SEQ ID NO: 2106124 - RNA, 14 nt, Human
acuguccucuuuca

SEQ ID NO: 2106125 - RNA, 18 nt, Human
acuguccucuuucagaaa

SEQ ID NO: 2106126 - RNA, 19 nt, Human
acuguccucuuucagaaaa

SEQ ID NO: 2106127 - RNA, 21 nt, Human
acuguccucuuucagaaaaca

SEQ ID NO: 2106128 - RNA, 22 nt, Human
acuguccucuuucagaaaacag

SEQ ID NO: 2106129 - RNA, 23 nt, Human
acuguccucuuucagaaaacaga

SEQ ID NO: 2106130 - RNA, 21 nt, Human
acuguggccaugguccccaag

SEQ ID NO: 2106131 - RNA, 15 nt, Human
acuguggcacacgcc

SEQ ID NO: 2106132 - RNA, 12 nt, Human
acuguggccuug

SEQ ID NO: 2106133 - RNA, 15 nt, Human
acuguggccuugguc

SEQ ID NO: 2106134 - RNA, 22 nt, Human
acuguggccuuggucuaacuuu

SEQ ID NO: 2106135 - RNA, 12 nt, Human
acuguggcugcu

SEQ ID NO: 2106136 - RNA, 19 nt, Human
acuguggcugcuagcacuu

SEQ ID NO: 2106137 - RNA, 15 nt, Human
ucuacauauucuuua

SEQ ID NO: 2106138 - RNA, 16 nt, Human
ucuacauauucuuuaa

SEQ ID NO: 2106139 - RNA, 13 nt, Human
ucuaccccuggau

SEQ ID NO: 2106140 - RNA, 23 nt, Human
ucuacauuucaccuacuuuguaa

SEQ ID NO: 2106141 - RNA, 21 nt, Human
ucuacccucuuagaaaaacca

SEQ ID NO: 2106142 - RNA, 18 nt, Human
ucuacccucccacccccu

SEQ ID NO: 2106143 - RNA, 15 nt, Human
ucuacccucccaccc

SEQ ID NO: 2106144 - RNA, 16 nt, Human
ucuacccucccacccc

SEQ ID NO: 2106145 - RNA, 18 nt, Human
ucuaaguguuucauaaau

SEQ ID NO: 2106146 - RNA, 21 nt, Human
ucuaagauucauccauuuauu

SEQ ID NO: 2106147 - RNA, 19 nt, Human
ucuaaacuuuaauauguau

SEQ ID NO: 2106148 - RNA, 17 nt, Human
ucuaagccuuuccauaa

SEQ ID NO: 2106149 - RNA, 21 nt, Human
ucgcucuguugcccaggcugg

SEQ ID NO: 2106150 - RNA, 19 nt, Human
ucgcugauauauguguuuu

SEQ ID NO: 2106151 - RNA, 22 nt, Human
ucgcugauauauguguuuuuca

SEQ ID NO: 2106152 - RNA, 23 nt, Human
ucgcugugucagcauagaaguaa

SEQ ID NO: 2106153 - RNA, 11 nt, Human
ucgcuggcccc

SEQ ID NO: 2106154 - RNA, 14 nt, Human
ucgcuggcccccac

SEQ ID NO: 2106155 - RNA, 15 nt, Human
ucgcuggcccccacu

SEQ ID NO: 2106156 - RNA, 17 nt, Human
ucgcuggcccccacugg

SEQ ID NO: 2106157 - RNA, 18 nt, Human
ucgcuggcccccacuggc

SEQ ID NO: 2106158 - RNA, 20 nt, Human
ucgcuggcccccacuggcug

SEQ ID NO: 2106159 - RNA, 21 nt, Human
ucgcuggcccccacuggcugu

SEQ ID NO: 2106160 - RNA, 21 nt, Human
acugggccuguugcccuuucu

SEQ ID NO: 2106161 - RNA, 15 nt, Human
acuggguacuugugg

SEQ ID NO: 2106162 - RNA, 18 nt, Human
acugggguccuggggccu

SEQ ID NO: 2106163 - RNA, 20 nt, Human
acugggguccuggggccucg

SEQ ID NO: 2106164 - RNA, 13 nt, Human
acugggggagggg

SEQ ID NO: 2106165 - RNA, 17 nt, Human
ucgccguugaagaggaa

SEQ ID NO: 2106166 - RNA, 14 nt, Human
ucgcuccugugucu

SEQ ID NO: 2106167 - RNA, 15 nt, Human
ucgccgucugugaau

SEQ ID NO: 2106168 - RNA, 14 nt, Human
ucgccguggcugcg

SEQ ID NO: 2106169 - RNA, 12 nt, Human
acugaagccugc

SEQ ID NO: 2106170 - RNA, 14 nt, Human
acugaagccugcag

SEQ ID NO: 2106171 - RNA, 15 nt, Human
acugaagccugcagg

SEQ ID NO: 2106172 - RNA, 16 nt, Human
acugaagccugcagga

SEQ ID NO: 2106173 - RNA, 19 nt, Human
acugaagccugcaggaguu

SEQ ID NO: 2106174 - RNA, 18 nt, Human
acugaagccagaaauaaa

SEQ ID NO: 2106175 - RNA, 16 nt, Human
acugaaauauacacac

SEQ ID NO: 2106176 - RNA, 15 nt, Human
acugaaauauacaca

SEQ ID NO: 2106177 - RNA, 13 nt, Human
acugaaagguuac

SEQ ID NO: 2106178 - RNA, 14 nt, Human
acugaaaguguuuc

SEQ ID NO: 2106179 - RNA, 17 nt, Human
acugaaaguguuuccuu

SEQ ID NO: 2106180 - RNA, 18 nt, Human
acugaaaugccuuacuuu

SEQ ID NO: 2106181 - RNA, 21 nt, Human
acugaaaugccuuacuuugua

SEQ ID NO: 2106182 - RNA, 22 nt, Human
acugaaaugccuuacuuuguau

SEQ ID NO: 2106183 - RNA, 23 nt, Human
acugaaaugccuuacuuuguaug

SEQ ID NO: 2106184 - RNA, 12 nt, Human
acugaacaaaaa

SEQ ID NO: 2106185 - RNA, 13 nt, Human
acugaacaaaaaa

SEQ ID NO: 2106186 - RNA, 14 nt, Human
acugaacaaaaaaa

SEQ ID NO: 2106187 - RNA, 17 nt, Human
acugaaauauacacaca

SEQ ID NO: 2106188 - RNA, 14 nt, Human
acugaagauagaag

SEQ ID NO: 2106189 - RNA, 16 nt, Human
acugaagauagaagaa

SEQ ID NO: 2106190 - RNA, 17 nt, Human
acugaagauagaagaaa

SEQ ID NO: 2106191 - RNA, 18 nt, Human
acugaagauagaagaaaa

SEQ ID NO: 2106192 - RNA, 19 nt, Human
acugaagauagaagaaaaa

SEQ ID NO: 2106193 - RNA, 21 nt, Human
acugaagauagaagaaaaaag

SEQ ID NO: 2106194 - RNA, 23 nt, Human
acugaagauagaagaaaaaagaa

SEQ ID NO: 2106195 - RNA, 13 nt, Human
acuguaucugugu

SEQ ID NO: 2106196 - RNA, 14 nt, Human
acuguaucugugua

SEQ ID NO: 2106197 - RNA, 15 nt, Human
acuguaucuguguag

SEQ ID NO: 2106198 - RNA, 20 nt, Human
acuguauuacauaaauaaau

SEQ ID NO: 2106199 - RNA, 13 nt, Human
acuguaugcugga

SEQ ID NO: 2106200 - RNA, 20 nt, Human
acuguauuuuuaccuuuuuc

SEQ ID NO: 2106201 - RNA, 16 nt, Human
acugucaaagaaucaa

SEQ ID NO: 2106202 - RNA, 20 nt, Human
acugucaaagaaucaaucca

SEQ ID NO: 2106203 - RNA, 12 nt, Human
acugucaauaaa

SEQ ID NO: 2106204 - RNA, 13 nt, Human
acugucaauaaac

SEQ ID NO: 2106205 - RNA, 14 nt, Human
acugucaauaaaca

SEQ ID NO: 2106206 - RNA, 15 nt, Human
acugucaauaaacag

SEQ ID NO: 2106207 - RNA, 17 nt, Human
acugucaauaaacagcu

SEQ ID NO: 2106208 - RNA, 18 nt, Human
acugucaauaaacagcuu

SEQ ID NO: 2106209 - RNA, 21 nt, Human
acugucaauaaacagcuucau

SEQ ID NO: 2106210 - RNA, 18 nt, Human
acuggguacuuguggaca

SEQ ID NO: 2106211 - RNA, 17 nt, Human
acuggguacuuguggac

SEQ ID NO: 2106212 - RNA, 16 nt, Human
acuguacaaaguagaa

SEQ ID NO: 2106213 - RNA, 22 nt, Human
acuguacaaaguagaagucuua

SEQ ID NO: 2106214 - RNA, 13 nt, Human
acuguacacacuu

SEQ ID NO: 2106215 - RNA, 14 nt, Human
acuguacacacuuu

SEQ ID NO: 2106216 - RNA, 15 nt, Human
acuguacacacuuua

SEQ ID NO: 2106217 - RNA, 17 nt, Human
acuguacacacuuuauu

SEQ ID NO: 2106218 - RNA, 22 nt, Human
acuguacacacuuuauuuacuu

SEQ ID NO: 2106219 - RNA, 23 nt, Human
acuguacacacuuuauuuacuuc

SEQ ID NO: 2106220 - RNA, 17 nt, Human
acuguacuuaauaaauu

SEQ ID NO: 2106221 - RNA, 18 nt, Human
acuguacuuaauaaauuc

SEQ ID NO: 2106222 - RNA, 15 nt, Human
acuguacuccuccca

SEQ ID NO: 2106223 - RNA, 20 nt, Human
acuguacuccucccaggcgc

SEQ ID NO: 2106224 - RNA, 23 nt, Human
acuuguccuuuuguaccauggug

SEQ ID NO: 2106225 - RNA, 18 nt, Human
acuuguauuaaagacaga

SEQ ID NO: 2106226 - RNA, 14 nt, Human
acuuguaugaaaga

SEQ ID NO: 2106227 - RNA, 14 nt, Human
acuuggagccccag

SEQ ID NO: 2106228 - RNA, 14 nt, Human
acuuggagccaagg

SEQ ID NO: 2106229 - RNA, 19 nt, Human
acuuggagccaaggguuca

SEQ ID NO: 2106230 - RNA, 22 nt, Human
acuuggaaaaauccagaaagaa

SEQ ID NO: 2106231 - RNA, 23 nt, Human
acuuggaccagcauccuuaagua

SEQ ID NO: 2106232 - RNA, 11 nt, Human
acuuggagcca

SEQ ID NO: 2106233 - RNA, 14 nt, Human
acuuggaagcuccg

SEQ ID NO: 2106234 - RNA, 21 nt, Human
acuuggaaaaauccagaaaga

SEQ ID NO: 2106235 - RNA, 19 nt, Human
acuugcauugaauauauua

SEQ ID NO: 2106236 - RNA, 11 nt, Human
acuugcauuuc

SEQ ID NO: 2106237 - RNA, 17 nt, Human
acuugauacuuguuuuc

SEQ ID NO: 2106238 - RNA, 17 nt, Human
acuugacagaacacugu

SEQ ID NO: 2106239 - RNA, 20 nt, Human
acuugaauucauagaaaaag

SEQ ID NO: 2106240 - RNA, 18 nt, Human
acuugacagaacacuguc

SEQ ID NO: 2106241 - RNA, 20 nt, Human
acuugacagaacacugucuu

SEQ ID NO: 2106242 - RNA, 19 nt, Human
acuugacccccuugagggu

SEQ ID NO: 2106243 - RNA, 17 nt, Human
acuugacuuuuaaggcu

SEQ ID NO: 2106244 - RNA, 19 nt, Human
acuugagaauuacccuuuu

SEQ ID NO: 2106245 - RNA, 17 nt, Human
acuugagaacuugacaa

SEQ ID NO: 2106246 - RNA, 23 nt, Human
acuugagaacuugacaaguugcg

SEQ ID NO: 2106247 - RNA, 15 nt, Human
acuucugaccacacu

SEQ ID NO: 2106248 - RNA, 13 nt, Human
acuugaaagcauc

SEQ ID NO: 2106249 - RNA, 19 nt, Human
acuucgggaaggugucugg

SEQ ID NO: 2106250 - RNA, 14 nt, Human
acuugaaagcaucc

SEQ ID NO: 2106251 - RNA, 18 nt, Human
acuugaaagcauccaugu

SEQ ID NO: 2106252 - RNA, 20 nt, Human
acuugaaagcauccaugugu

SEQ ID NO: 2106253 - RNA, 18 nt, Human
acuucuccacccugcucu

SEQ ID NO: 2106254 - RNA, 22 nt, Human
acuucuccagacccaccacacc

SEQ ID NO: 2106255 - RNA, 12 nt, Human
acuuccugucca

SEQ ID NO: 2106256 - RNA, 13 nt, Human
acuuccuguccag

SEQ ID NO: 2106257 - RNA, 14 nt, Human
acuuccuguccaga

SEQ ID NO: 2106258 - RNA, 14 nt, Human
acuuccugccuggu

SEQ ID NO: 2106259 - RNA, 16 nt, Human
acuuccugccuggucu

SEQ ID NO: 2106260 - RNA, 17 nt, Human
acuuccugccuggucuc

SEQ ID NO: 2106261 - RNA, 18 nt, Human
acuuccugccuggucucc

SEQ ID NO: 2106262 - RNA, 19 nt, Human
acuuccugccuggucuccu

SEQ ID NO: 2106263 - RNA, 21 nt, Human
acuuccugccuggucuccugc

SEQ ID NO: 2106264 - RNA, 22 nt, Human
acuuccugccuggucuccugcc

SEQ ID NO: 2106265 - RNA, 17 nt, Human
acuucgggaggucgagg

SEQ ID NO: 2106266 - RNA, 20 nt, Human
acuucgggaggucgaggcag

SEQ ID NO: 2106267 - RNA, 18 nt, Human
ucucacuccuaccuggua

SEQ ID NO: 2106268 - RNA, 17 nt, Human
ucucacuccuaccuggu

SEQ ID NO: 2106269 - RNA, 16 nt, Human
ucucacuccuaccugg

SEQ ID NO: 2106270 - RNA, 12 nt, Human
ucucacuccccu

SEQ ID NO: 2106271 - RNA, 13 nt, Human
ucucacuccccuc

SEQ ID NO: 2106272 - RNA, 15 nt, Human
ucucacuccccuccu

SEQ ID NO: 2106273 - RNA, 17 nt, Human
ucucacucccuucuccu

SEQ ID NO: 2106274 - RNA, 18 nt, Human
ucucacucccuucuccuu

SEQ ID NO: 2106275 - RNA, 20 nt, Human
ucucacucccuucuccuuga

SEQ ID NO: 2106276 - RNA, 13 nt, Human
ucucacuccacca

SEQ ID NO: 2106277 - RNA, 14 nt, Human
ucucacuccaccac

SEQ ID NO: 2106278 - RNA, 15 nt, Human
ucucacuccaccacc

SEQ ID NO: 2106279 - RNA, 13 nt, Human
ucucacuccuacc

SEQ ID NO: 2106280 - RNA, 18 nt, Human
ucucacuccaccacccaa

SEQ ID NO: 2106281 - RNA, 17 nt, Human
ucucacuccaccaccca

SEQ ID NO: 2106282 - RNA, 13 nt, Human
ucucaaaaaauaa

SEQ ID NO: 2106283 - RNA, 14 nt, Human
ucuauuuuuguaga

SEQ ID NO: 2106284 - RNA, 23 nt, Human
ucucacagugggagccagggcug

SEQ ID NO: 2106285 - RNA, 22 nt, Human
ucucacagugggagccagggcu

SEQ ID NO: 2106286 - RNA, 21 nt, Human
ucucacagugggagccagggc

SEQ ID NO: 2106287 - RNA, 19 nt, Human
ucucacagugggagccagg

SEQ ID NO: 2106288 - RNA, 12 nt, Human
ucucacaguggg

SEQ ID NO: 2106289 - RNA, 13 nt, Human
ucuauuuaaauuc

SEQ ID NO: 2106290 - RNA, 14 nt, Human
ucuauuuaaauucu

SEQ ID NO: 2106291 - RNA, 15 nt, Human
ucuauuuaaauucuu

SEQ ID NO: 2106292 - RNA, 17 nt, Human
ucuauuuaaauucuuuu

SEQ ID NO: 2106293 - RNA, 16 nt, Human
ucucaaaaaaagaaaa

SEQ ID NO: 2106294 - RNA, 13 nt, Human
ucuauuguaagau

SEQ ID NO: 2106295 - RNA, 19 nt, Human
ucuauuguaagauaaaaaa

SEQ ID NO: 2106296 - RNA, 22 nt, Human
ucuauuggguucauuauuggaa

SEQ ID NO: 2106297 - RNA, 16 nt, Human
ucuauuggguucauua

SEQ ID NO: 2106298 - RNA, 17 nt, Human
ucuauuggguucauuau

SEQ ID NO: 2106299 - RNA, 18 nt, Human
ucuauuggguucauuauu

SEQ ID NO: 2106300 - RNA, 21 nt, Human
ucuauauaguaccuuugcucu

SEQ ID NO: 2106301 - RNA, 13 nt, Human
ucuaguuuuguca

SEQ ID NO: 2106302 - RNA, 18 nt, Human
ucuauaggaacauaugaa

SEQ ID NO: 2106303 - RNA, 20 nt, Human
ucuauaggaacauaugaaaa

SEQ ID NO: 2106304 - RNA, 21 nt, Human
ucuauaggaacauaugaaaau

SEQ ID NO: 2106305 - RNA, 21 nt, Human
ucuaguuccugaugacccagg

SEQ ID NO: 2106306 - RNA, 11 nt, Human
ucuagcuguug

SEQ ID NO: 2106307 - RNA, 19 nt, Human
ucuagcuguugagcuguuu

SEQ ID NO: 2106308 - RNA, 18 nt, Human
ucuagcuguugagcuguu

SEQ ID NO: 2106309 - RNA, 15 nt, Human
ucuagcaaauguuau

SEQ ID NO: 2106310 - RNA, 16 nt, Human
ucuagcaaauguuaug

SEQ ID NO: 2106311 - RNA, 23 nt, Human
ucuagauuacccccucauuguuu

SEQ ID NO: 2106312 - RNA, 16 nt, Human
ucuagcuaauggaaaa

SEQ ID NO: 2106313 - RNA, 20 nt, Human
ucuagcuaauggaaaaugau

SEQ ID NO: 2106314 - RNA, 12 nt, Human
ucuagcaugaag

SEQ ID NO: 2106315 - RNA, 15 nt, Human
acuuccacugaugga

SEQ ID NO: 2106316 - RNA, 11 nt, Human
acuucccagcu

SEQ ID NO: 2106317 - RNA, 19 nt, Human
acuucccauuuuggaaguu

SEQ ID NO: 2106318 - RNA, 22 nt, Human
acuucccaguucaggaguccca

SEQ ID NO: 2106319 - RNA, 23 nt, Human
acuucccaguucaggagucccaa

SEQ ID NO: 2106320 - RNA, 24 nt, Human
acuucccaguucaggagucccaag

SEQ ID NO: 2106321 - RNA, 21 nt, Human
ucuagauuacccccucauugu

SEQ ID NO: 2106322 - RNA, 21 nt, Human
acuucauucuugaaagcugug

SEQ ID NO: 2106323 - RNA, 19 nt, Human
acuucauucuugaaagcug

SEQ ID NO: 2106324 - RNA, 15 nt, Human
acuucauucuugaaa

SEQ ID NO: 2106325 - RNA, 14 nt, Human
acuucauucuugaa

SEQ ID NO: 2106326 - RNA, 20 nt, Human
acuucaucuuccccaagugc

SEQ ID NO: 2106327 - RNA, 19 nt, Human
acuucagggcagggcucug

SEQ ID NO: 2106328 - RNA, 20 nt, Human
acuucagggcagggcucuga

SEQ ID NO: 2106329 - RNA, 21 nt, Human
acuucagggcagggcucugau

SEQ ID NO: 2106330 - RNA, 23 nt, Human
acuucagggcagggcucugauau

SEQ ID NO: 2106331 - RNA, 18 nt, Human
acuucaggcucuucuccu

SEQ ID NO: 2106332 - RNA, 17 nt, Human
acuucaggcucuucucc

SEQ ID NO: 2106333 - RNA, 20 nt, Human
acuucaggcucuucuccuuu

SEQ ID NO: 2106334 - RNA, 17 nt, Human
acuuaucuuacaaagug

SEQ ID NO: 2106335 - RNA, 18 nt, Human
acuuaucuuacaaagugu

SEQ ID NO: 2106336 - RNA, 20 nt, Human
acuuaucuuacaaaguguau

SEQ ID NO: 2106337 - RNA, 22 nt, Human
acuuaucuuacaaaguguauuu

SEQ ID NO: 2106338 - RNA, 17 nt, Human
acuuccauaaucuggac

SEQ ID NO: 2106339 - RNA, 20 nt, Human
acuuccagugcaacacugaa

SEQ ID NO: 2106340 - RNA, 17 nt, Human
acuuccaugaggccaaa

SEQ ID NO: 2106341 - RNA, 12 nt, Human
acuuccauagug

SEQ ID NO: 2106342 - RNA, 18 nt, Human
acuuccaauuuacauacu

SEQ ID NO: 2106343 - RNA, 22 nt, Human
acuuccaagaccugacucaggc

SEQ ID NO: 2106344 - RNA, 17 nt, Human
acuuccacugccauccu

SEQ ID NO: 2106345 - RNA, 14 nt, Human
acuuccaccagccu

SEQ ID NO: 2106346 - RNA, 15 nt, Human
acuuccaccagccug

SEQ ID NO: 2106347 - RNA, 16 nt, Human
acuuccaccagccugc

SEQ ID NO: 2106348 - RNA, 18 nt, Human
acuuccaccagccugcac

SEQ ID NO: 2106349 - RNA, 15 nt, Human
acuuagcaugcacaa

SEQ ID NO: 2106350 - RNA, 16 nt, Human
acuuagcaugcacaaa

SEQ ID NO: 2106351 - RNA, 17 nt, Human
acuuagcaugcacaaag

SEQ ID NO: 2106352 - RNA, 23 nt, Human
acuuagcaugcacaaaguguauu

SEQ ID NO: 2106353 - RNA, 19 nt, Human
acuuauauuuuuaauaaaa

SEQ ID NO: 2106354 - RNA, 16 nt, Human
acuucaggcucuucuc

SEQ ID NO: 2106355 - RNA, 19 nt, Human
acuuauccuaaaacaaaua

SEQ ID NO: 2106356 - RNA, 18 nt, Human
acuuauccuaaaacaaau

SEQ ID NO: 2106357 - RNA, 20 nt, Human
acuuagagguggggagcaga

SEQ ID NO: 2106358 - RNA, 23 nt, Human
acuuugaggguguauauuuucug

SEQ ID NO: 2106359 - RNA, 15 nt, Human
acuuugaagauguca

SEQ ID NO: 2106360 - RNA, 15 nt, Human
acuuugcucuuucuu

SEQ ID NO: 2106361 - RNA, 17 nt, Human
acuuugcucuuucuuga

SEQ ID NO: 2106362 - RNA, 14 nt, Human
acuuuguaugauau

SEQ ID NO: 2106363 - RNA, 15 nt, Human
acuuuguaugauauu

SEQ ID NO: 2106364 - RNA, 16 nt, Human
acuuuguaugauauuc

SEQ ID NO: 2106365 - RNA, 20 nt, Human
acuuuguaugauauuccaua

SEQ ID NO: 2106366 - RNA, 22 nt, Human
acuuuguaugauauuccauagu

SEQ ID NO: 2106367 - RNA, 12 nt, Human
acuuuagaaaua

SEQ ID NO: 2106368 - RNA, 14 nt, Human
acuuuagaaauaaa

SEQ ID NO: 2106369 - RNA, 15 nt, Human
acuuuagaaugagag

SEQ ID NO: 2106370 - RNA, 15 nt, Human
acuuuagaguagcau

SEQ ID NO: 2106371 - RNA, 19 nt, Human
acuuuagaguagcaugaga

SEQ ID NO: 2106372 - RNA, 21 nt, Human
acuuuagaguagcaugagaga

SEQ ID NO: 2106373 - RNA, 20 nt, Human
acuuuagcagaaucaaaaug

SEQ ID NO: 2106374 - RNA, 20 nt, Human
acuuucuuuucgccguggcu

SEQ ID NO: 2106375 - RNA, 21 nt, Human
acuuucuuuucgccguggcug

SEQ ID NO: 2106376 - RNA, 14 nt, Human
acuuguggacacag

SEQ ID NO: 2106377 - RNA, 12 nt, Human
acuugucuuaaa

SEQ ID NO: 2106378 - RNA, 19 nt, Human
acuugucuuaaauaaaaga

SEQ ID NO: 2106379 - RNA, 23 nt, Human
acuugucuuaaauaaaagaaaug

SEQ ID NO: 2106380 - RNA, 16 nt, Human
acuuuaaaaggagcca

SEQ ID NO: 2106381 - RNA, 18 nt, Human
acuuguuuucaaaccagu

SEQ ID NO: 2106382 - RNA, 22 nt, Human
acuugugcugaucgugcuaaau

SEQ ID NO: 2106383 - RNA, 15 nt, Human
acuuguggacacagc

SEQ ID NO: 2106384 - RNA, 15 nt, Human
ucuccuuagaagugg

SEQ ID NO: 2106385 - RNA, 21 nt, Human
ucuccuuagaaguggaaguag

SEQ ID NO: 2106386 - RNA, 14 nt, Human
ucuccuuagucuuc

SEQ ID NO: 2106387 - RNA, 14 nt, Human
ucuccuguccaacc

SEQ ID NO: 2106388 - RNA, 17 nt, Human
ucuccugugcaugggug

SEQ ID NO: 2106389 - RNA, 16 nt, Human
ucuccuguccaaccua

SEQ ID NO: 2106390 - RNA, 23 nt, Human
ucuccugugcaugggugaaggga

SEQ ID NO: 2106391 - RNA, 16 nt, Human
acuuuguguucaccuu

SEQ ID NO: 2106392 - RNA, 15 nt, Human
acuuugucagaggca

SEQ ID NO: 2106393 - RNA, 13 nt, Human
agaaaaaaaacac

SEQ ID NO: 2106394 - RNA, 17 nt, Human
agaaaaaaaauaacaca

SEQ ID NO: 2106395 - RNA, 19 nt, Human
agaaaaaaaauaacacaga

SEQ ID NO: 2106396 - RNA, 20 nt, Human
agaaaaaaaauaacacagag

SEQ ID NO: 2106397 - RNA, 17 nt, Human
agaaaaaaagauuuauu

SEQ ID NO: 2106398 - RNA, 14 nt, Human
acuuugugcuacau

SEQ ID NO: 2106399 - RNA, 13 nt, Human
agaaaaaaaccau

SEQ ID NO: 2106400 - RNA, 21 nt, Human
agaaaaaaaguuugccagaag

SEQ ID NO: 2106401 - RNA, 14 nt, Human
agaaaaaaauaauu

SEQ ID NO: 2106402 - RNA, 22 nt, Human
agaaaaaaauaauuuuaugaac

SEQ ID NO: 2106403 - RNA, 18 nt, Human
acuuuguguucaccuugu

SEQ ID NO: 2106404 - RNA, 17 nt, Human
ucucgcucuguugccca

SEQ ID NO: 2106405 - RNA, 17 nt, Human
ucucggaaggcuggcug

SEQ ID NO: 2106406 - RNA, 13 nt, Human
ucuccuugcccua

SEQ ID NO: 2106407 - RNA, 16 nt, Human
ucuccuugauaacagc

SEQ ID NO: 2106408 - RNA, 17 nt, Human
ucuccuugauaacagcu

SEQ ID NO: 2106409 - RNA, 18 nt, Human
ucuccuugauaacagcua

SEQ ID NO: 2106410 - RNA, 19 nt, Human
ucuccuugcccuagaugag

SEQ ID NO: 2106411 - RNA, 23 nt, Human
ucucgaacauggaacucauuccu

SEQ ID NO: 2106412 - RNA, 14 nt, Human
ucucuccauucccg

SEQ ID NO: 2106413 - RNA, 13 nt, Human
ucucuccagugca

SEQ ID NO: 2106414 - RNA, 19 nt, Human
ucucuccaucagaggacac

SEQ ID NO: 2106415 - RNA, 20 nt, Human
ucucuccaucagaggacacc

SEQ ID NO: 2106416 - RNA, 19 nt, Human
ucucggaguaucugggaac

SEQ ID NO: 2106417 - RNA, 20 nt, Human
agaaaugcugguuuuucagu

SEQ ID NO: 2106418 - RNA, 21 nt, Human
agaaaugcugguuuuucaguu

SEQ ID NO: 2106419 - RNA, 21 nt, Human
agaaaugggaaaugccuaaga

SEQ ID NO: 2106420 - RNA, 23 nt, Human
agaaaugggaaaugccuaagaag

SEQ ID NO: 2106421 - RNA, 18 nt, Human
agaaauagacaguauauu

SEQ ID NO: 2106422 - RNA, 20 nt, Human
agaaauagccugcgcuguuu

SEQ ID NO: 2106423 - RNA, 23 nt, Human
agaaauaccaaaauuauuucaga

SEQ ID NO: 2106424 - RNA, 18 nt, Human
agaaauaccaaaauuauu

SEQ ID NO: 2106425 - RNA, 14 nt, Human
agaaaucuagaaga

SEQ ID NO: 2106426 - RNA, 18 nt, Human
agaaaucucacuuuucuc

SEQ ID NO: 2106427 - RNA, 19 nt, Human
agaaauacaauucuacauu

SEQ ID NO: 2106428 - RNA, 14 nt, Human
agaaagcagaggcu

SEQ ID NO: 2106429 - RNA, 15 nt, Human
agaaagcagaggcug

SEQ ID NO: 2106430 - RNA, 16 nt, Human
agaaagcagaggcugg

SEQ ID NO: 2106431 - RNA, 23 nt, Human
agaaagcagaggcuggccucaga

SEQ ID NO: 2106432 - RNA, 14 nt, Human
agaaagcauaaaau

SEQ ID NO: 2106433 - RNA, 23 nt, Human
agaaagaguuugagaccugaaua

SEQ ID NO: 2106434 - RNA, 19 nt, Human
agaaagauggaugugcuuu

SEQ ID NO: 2106435 - RNA, 20 nt, Human
agaaagacuaucuaaauguu

SEQ ID NO: 2106436 - RNA, 22 nt, Human
agaaagacuaucuaaauguuga

SEQ ID NO: 2106437 - RNA, 18 nt, Human
agaaagacagagcuggga

SEQ ID NO: 2106438 - RNA, 12 nt, Human
agaaagacugag

SEQ ID NO: 2106439 - RNA, 23 nt, Human
agaaagagagagaauucuuucaa

SEQ ID NO: 2106440 - RNA, 11 nt, Human
agaaagagagc

SEQ ID NO: 2106441 - RNA, 14 nt, Human
ucucucccuccccu

SEQ ID NO: 2106442 - RNA, 19 nt, Human
agaaaaaauauuuucccua

SEQ ID NO: 2106443 - RNA, 21 nt, Human
ucucucccuccccugccauuu

SEQ ID NO: 2106444 - RNA, 16 nt, Human
ucucuugguuuccuuc

SEQ ID NO: 2106445 - RNA, 17 nt, Human
ucucuugguuuccuucc

SEQ ID NO: 2106446 - RNA, 18 nt, Human
ucucuugguuuccuuccu

SEQ ID NO: 2106447 - RNA, 17 nt, Human
agaaaaaauauuuuccu

SEQ ID NO: 2106448 - RNA, 23 nt, Human
agaaaaaauauuuuccugccagg

SEQ ID NO: 2106449 - RNA, 20 nt, Human
agaaaacaaaaaaaccucua

SEQ ID NO: 2106450 - RNA, 19 nt, Human
ucucuugguuuccuuccuu

SEQ ID NO: 2106451 - RNA, 13 nt, Human
agaaaaacaauaa

SEQ ID NO: 2106452 - RNA, 16 nt, Human
agaaaaacaauaagag

SEQ ID NO: 2106453 - RNA, 18 nt, Human
agaaaaaugagccuggca

SEQ ID NO: 2106454 - RNA, 14 nt, Human
agaaacacaauauu

SEQ ID NO: 2106455 - RNA, 15 nt, Human
agaaacacacugagg

SEQ ID NO: 2106456 - RNA, 17 nt, Human
agaaacacacugaggca

SEQ ID NO: 2106457 - RNA, 19 nt, Human
agaaacacacugaggcagg

SEQ ID NO: 2106458 - RNA, 20 nt, Human
agaaacacacugaggcaggg

SEQ ID NO: 2106459 - RNA, 15 nt, Human
agaaaagcaccugcc

SEQ ID NO: 2106460 - RNA, 16 nt, Human
agaaaagcaccugccg

SEQ ID NO: 2106461 - RNA, 18 nt, Human
agaaaagcaccugccgac

SEQ ID NO: 2106462 - RNA, 20 nt, Human
agaaaagauacgacuuuauu

SEQ ID NO: 2106463 - RNA, 22 nt, Human
agaaacacacugaggcagggaa

SEQ ID NO: 2106464 - RNA, 14 nt, Human
agaaacaucaguua

SEQ ID NO: 2106465 - RNA, 16 nt, Human
agaaacaucaguuacu

SEQ ID NO: 2106466 - RNA, 21 nt, Human
agaaacaucaguuacucugaa

SEQ ID NO: 2106467 - RNA, 23 nt, Human
agaaacaucaguuacucugaagg

SEQ ID NO: 2106468 - RNA, 14 nt, Human
agaaacuguagucu

SEQ ID NO: 2106469 - RNA, 20 nt, Human
agaaacuguagucucaggac

SEQ ID NO: 2106470 - RNA, 21 nt, Human
agaacugaauuuugucuuuau

SEQ ID NO: 2106471 - RNA, 14 nt, Human
agaacuccuagggu

SEQ ID NO: 2106472 - RNA, 12 nt, Human
agaacugagcuc

SEQ ID NO: 2106473 - RNA, 15 nt, Human
agaacugagcuccuc

SEQ ID NO: 2106474 - RNA, 16 nt, Human
agaacugagcuccucu

SEQ ID NO: 2106475 - RNA, 22 nt, Human
agaacugagcuccucugggcag

SEQ ID NO: 2106476 - RNA, 17 nt, Human
agaacugaugacacuga

SEQ ID NO: 2106477 - RNA, 15 nt, Human
agaacugcauauguu

SEQ ID NO: 2106478 - RNA, 19 nt, Human
agaacugcauauguuucgc

SEQ ID NO: 2106479 - RNA, 20 nt, Human
agaacugcauauguuucgcu

SEQ ID NO: 2106480 - RNA, 21 nt, Human
agaacugcauauguuucgcug

SEQ ID NO: 2106481 - RNA, 11 nt, Human
agaacuccuag

SEQ ID NO: 2106482 - RNA, 14 nt, Human
agaaccuguccuug

SEQ ID NO: 2106483 - RNA, 21 nt, Human
agaaccuguccuugcacacuc

SEQ ID NO: 2106484 - RNA, 22 nt, Human
agaacggacgagauaaugugaa

SEQ ID NO: 2106485 - RNA, 20 nt, Human
agaacuagagguuuuaugau

SEQ ID NO: 2106486 - RNA, 23 nt, Human
agaacuagagguuuuaugauauu

SEQ ID NO: 2106487 - RNA, 19 nt, Human
agaacuacucagggaauga

SEQ ID NO: 2106488 - RNA, 22 nt, Human
agaacuacucagggaaugaagg

SEQ ID NO: 2106489 - RNA, 22 nt, Human
agaacuagugguggcucugaga

SEQ ID NO: 2106490 - RNA, 14 nt, Human
ucugaaguuggaca

SEQ ID NO: 2106491 - RNA, 15 nt, Human
ucugaaguuggacag

SEQ ID NO: 2106492 - RNA, 16 nt, Human
ucugaaguuggacagc

SEQ ID NO: 2106493 - RNA, 16 nt, Human
ucugaaguuucauuua

SEQ ID NO: 2106494 - RNA, 17 nt, Human
ucugaaguuucauuuau

SEQ ID NO: 2106495 - RNA, 18 nt, Human
ucugaaguuucauuuaug

SEQ ID NO: 2106496 - RNA, 17 nt, Human
ucugaauaccucuuuga

SEQ ID NO: 2106497 - RNA, 19 nt, Human
ucugaauaccucuuugaaa

SEQ ID NO: 2106498 - RNA, 13 nt, Human
ucugaauccuaag

SEQ ID NO: 2106499 - RNA, 12 nt, Human
agaaccuguccu

SEQ ID NO: 2106500 - RNA, 13 nt, Human
agaaccuguccuu

SEQ ID NO: 2106501 - RNA, 17 nt, Human
agaaauuagcuguguga

SEQ ID NO: 2106502 - RNA, 15 nt, Human
agaaauuagccgggc

SEQ ID NO: 2106503 - RNA, 15 nt, Human
agaaauuagcugugu

SEQ ID NO: 2106504 - RNA, 14 nt, Human
agaaauuagccggg

SEQ ID NO: 2106505 - RNA, 14 nt, Human
ucugcccauucccc

SEQ ID NO: 2106506 - RNA, 16 nt, Human
ucugcccauuccccag

SEQ ID NO: 2106507 - RNA, 18 nt, Human
ucugcccauuccccagcc

SEQ ID NO: 2106508 - RNA, 19 nt, Human
ucugcccauuccccagccu

SEQ ID NO: 2106509 - RNA, 14 nt, Human
ucugccccagcucu

SEQ ID NO: 2106510 - RNA, 20 nt, Human
ucugccccagcucuggcuuc

SEQ ID NO: 2106511 - RNA, 16 nt, Human
ucugccccagcucugg

SEQ ID NO: 2106512 - RNA, 17 nt, Human
ucugccccagcucuggc

SEQ ID NO: 2106513 - RNA, 13 nt, Human
ucugcccagagcu

SEQ ID NO: 2106514 - RNA, 16 nt, Human
ucugcccagagcuggg

SEQ ID NO: 2106515 - RNA, 18 nt, Human
ucugcccagagcugggug

SEQ ID NO: 2106516 - RNA, 19 nt, Human
ucugcccagagcuggguga

SEQ ID NO: 2106517 - RNA, 15 nt, Human
agaagcaagaaagaa

SEQ ID NO: 2106518 - RNA, 16 nt, Human
agaagcagaggaagga

SEQ ID NO: 2106519 - RNA, 16 nt, Human
agaacugcauggaccu

SEQ ID NO: 2106520 - RNA, 17 nt, Human
agaacugcauggaccua

SEQ ID NO: 2106521 - RNA, 20 nt, Human
agaacugcauggaccuaaca

SEQ ID NO: 2106522 - RNA, 21 nt, Human
agaacuuuugguaagggaaaa

SEQ ID NO: 2106523 - RNA, 18 nt, Human
agaagcccaauauuauaa

SEQ ID NO: 2106524 - RNA, 13 nt, Human
agaagcagugagc

SEQ ID NO: 2106525 - RNA, 14 nt, Human
agaagcagugagcc

SEQ ID NO: 2106526 - RNA, 17 nt, Human
agaagcagugagccgca

SEQ ID NO: 2106527 - RNA, 23 nt, Human
agaagcagugagccgcaucuucu

SEQ ID NO: 2106528 - RNA, 13 nt, Human
agaagcaugaaaa

SEQ ID NO: 2106529 - RNA, 15 nt, Human
agaagcaugaaaaag

SEQ ID NO: 2106530 - RNA, 16 nt, Human
agaagcaugaaaaagc

SEQ ID NO: 2106531 - RNA, 23 nt, Human
agaagcucccugaaguaagcaaa

SEQ ID NO: 2106532 - RNA, 14 nt, Human
agaaggagacagag

SEQ ID NO: 2106533 - RNA, 17 nt, Human
agaaggagacagagcug

SEQ ID NO: 2106534 - RNA, 15 nt, Human
agaagcugagcacca

SEQ ID NO: 2106535 - RNA, 22 nt, Human
agaaggaauucuaggcauccca

SEQ ID NO: 2106536 - RNA, 15 nt, Human
agaaggaauuugagu

SEQ ID NO: 2106537 - RNA, 15 nt, Human
agaaggagaaggaag

SEQ ID NO: 2106538 - RNA, 17 nt, Human
agaagugaccaaggagg

SEQ ID NO: 2106539 - RNA, 18 nt, Human
agaagugaccaaggagga

SEQ ID NO: 2106540 - RNA, 17 nt, Human
agaaggauguacauuuc

SEQ ID NO: 2106541 - RNA, 20 nt, Human
agaaggagacagagcugguu

SEQ ID NO: 2106542 - RNA, 18 nt, Human
agaaggaggagagggaaa

SEQ ID NO: 2106543 - RNA, 19 nt, Human
agaaggaggagagggaaaa

SEQ ID NO: 2106544 - RNA, 22 nt, Human
agaaggaggagagggaaaaugu

SEQ ID NO: 2106545 - RNA, 23 nt, Human
agaaggaggagagggaaaauguu

SEQ ID NO: 2106546 - RNA, 14 nt, Human
agaaggaugaauga

SEQ ID NO: 2106547 - RNA, 21 nt, Human
agaaggaugaaugagguccca

SEQ ID NO: 2106548 - RNA, 16 nt, Human
agaaggauguacauuu

SEQ ID NO: 2106549 - RNA, 17 nt, Human
agaaguggaccaggaca

SEQ ID NO: 2106550 - RNA, 18 nt, Human
agaaguggaccaggacag

SEQ ID NO: 2106551 - RNA, 19 nt, Human
agaaguggaccaggacagg

SEQ ID NO: 2106552 - RNA, 13 nt, Human
agaagugccccug

SEQ ID NO: 2106553 - RNA, 14 nt, Human
agaagugccccugc

SEQ ID NO: 2106554 - RNA, 16 nt, Human
agaagugccccugcug

SEQ ID NO: 2106555 - RNA, 22 nt, Human
agaagugccccugcugccuccc

SEQ ID NO: 2106556 - RNA, 19 nt, Human
agaagugccccugcugccu

SEQ ID NO: 2106557 - RNA, 15 nt, Human
agaaguggaccagga

SEQ ID NO: 2106558 - RNA, 19 nt, Human
agaaguuucuuuaaagacg

SEQ ID NO: 2106559 - RNA, 16 nt, Human
agaaguuuagauuuua

SEQ ID NO: 2106560 - RNA, 15 nt, Human
agaaguuuagauuuu

SEQ ID NO: 2106561 - RNA, 22 nt, Human
agaaguuugagaucagccuggg

SEQ ID NO: 2106562 - RNA, 21 nt, Human
agaauaaugugggaagaaaca

SEQ ID NO: 2106563 - RNA, 22 nt, Human
agaauaaugugggaagaaacaa

SEQ ID NO: 2106564 - RNA, 15 nt, Human
agaauaaugaaugga

SEQ ID NO: 2106565 - RNA, 16 nt, Human
agaauaaucuuugggu

SEQ ID NO: 2106566 - RNA, 15 nt, Human
agaauacaaacauau

SEQ ID NO: 2106567 - RNA, 16 nt, Human
agaauacaaacauauu

SEQ ID NO: 2106568 - RNA, 12 nt, Human
agaauacagaaa

SEQ ID NO: 2106569 - RNA, 18 nt, Human
agaauacagaaagaugga

SEQ ID NO: 2106570 - RNA, 21 nt, Human
agaauacagaaagauggaugu

SEQ ID NO: 2106571 - RNA, 15 nt, Human
agaauaauucuuuga

SEQ ID NO: 2106572 - RNA, 14 nt, Human
agaauauaauuauc

SEQ ID NO: 2106573 - RNA, 15 nt, Human
agaauauaauuaucg

SEQ ID NO: 2106574 - RNA, 23 nt, Human
agaauauaauuaucggaagcagu

SEQ ID NO: 2106575 - RNA, 17 nt, Human
agaauauaauuaucgga

SEQ ID NO: 2106576 - RNA, 14 nt, Human
agaaucaaaacucu

SEQ ID NO: 2106577 - RNA, 21 nt, Human
agaauaaaguucugaguguuu

SEQ ID NO: 2106578 - RNA, 17 nt, Human
agaauaaaguucugagu

SEQ ID NO: 2106579 - RNA, 13 nt, Human
agaauaaucuuug

SEQ ID NO: 2106580 - RNA, 15 nt, Human
agaaguuugucaagu

SEQ ID NO: 2106581 - RNA, 15 nt, Human
ucuggccuuacaccu

SEQ ID NO: 2106582 - RNA, 14 nt, Human
agaagccgggaaca

SEQ ID NO: 2106583 - RNA, 16 nt, Human
agaagccgggaacaga

SEQ ID NO: 2106584 - RNA, 18 nt, Human
agaagccgggaacagaca

SEQ ID NO: 2106585 - RNA, 22 nt, Human
agaagccgggaacagacaacag

SEQ ID NO: 2106586 - RNA, 14 nt, Human
agaagccgugggug

SEQ ID NO: 2106587 - RNA, 17 nt, Human
agaagccugaggcuggg

SEQ ID NO: 2106588 - RNA, 12 nt, Human
agaagccugagg

SEQ ID NO: 2106589 - RNA, 14 nt, Human
agaagccugaggcu

SEQ ID NO: 2106590 - RNA, 16 nt, Human
agaagccucuggcuag

SEQ ID NO: 2106591 - RNA, 23 nt, Human
agaagccucuggcuagaggccag

SEQ ID NO: 2106592 - RNA, 14 nt, Human
agaagccuauugua

SEQ ID NO: 2106593 - RNA, 15 nt, Human
agaagccuauuguaa

SEQ ID NO: 2106594 - RNA, 22 nt, Human
agaagccuauuguaaauacaag

SEQ ID NO: 2106595 - RNA, 23 nt, Human
agaagccuauuguaaauacaagu

SEQ ID NO: 2106596 - RNA, 12 nt, Human
agaagccucugg

SEQ ID NO: 2106597 - RNA, 13 nt, Human
agaagccucuggc

SEQ ID NO: 2106598 - RNA, 14 nt, Human
agaagccucuggcu

SEQ ID NO: 2106599 - RNA, 19 nt, Human
ucuggcagggugggaugga

SEQ ID NO: 2106600 - RNA, 20 nt, Human
ucuggcagggugggauggag

SEQ ID NO: 2106601 - RNA, 14 nt, Human
ucugccugucuccc

SEQ ID NO: 2106602 - RNA, 12 nt, Human
ucugccugucuc

SEQ ID NO: 2106603 - RNA, 18 nt, Human
ucugcccuugccaacgga

SEQ ID NO: 2106604 - RNA, 13 nt, Human
ucugccugucccu

SEQ ID NO: 2106605 - RNA, 17 nt, Human
ucugccugucccucuca

SEQ ID NO: 2106606 - RNA, 18 nt, Human
ucugccugucccucucag

SEQ ID NO: 2106607 - RNA, 21 nt, Human
ucugccugucccucucaggca

SEQ ID NO: 2106608 - RNA, 11 nt, Human
ucugccuguga

SEQ ID NO: 2106609 - RNA, 14 nt, Human
ucugccugugagcc

SEQ ID NO: 2106610 - RNA, 17 nt, Human
ucugccugugagccagu

SEQ ID NO: 2106611 - RNA, 21 nt, Human
ucugcuuugacugagcagacu

SEQ ID NO: 2106612 - RNA, 22 nt, Human
ucugcuuugggguuuaucagaa

SEQ ID NO: 2106613 - RNA, 14 nt, Human
ucuggauuguggga

SEQ ID NO: 2106614 - RNA, 13 nt, Human
ucuggaagagagg

SEQ ID NO: 2106615 - RNA, 20 nt, Human
ucuggaagagaggaaugccu

SEQ ID NO: 2106616 - RNA, 22 nt, Human
ugaaaaaguauccugcuucuga

SEQ ID NO: 2106617 - RNA, 20 nt, Human
ugaaaaaggaggaagagaaa

SEQ ID NO: 2106618 - RNA, 22 nt, Human
ugaaaaaggaggaagagaaaaa

SEQ ID NO: 2106619 - RNA, 18 nt, Human
ugaaaaaucggcuuacca

SEQ ID NO: 2106620 - RNA, 13 nt, Human
ugaaaaauucuca

SEQ ID NO: 2106621 - RNA, 18 nt, Human
ugaaaaauuuaagcauug

SEQ ID NO: 2106622 - RNA, 19 nt, Human
ugaaaaauuuaagcauugu

SEQ ID NO: 2106623 - RNA, 20 nt, Human
ugaaaaauuuaagcauuguu

SEQ ID NO: 2106624 - RNA, 16 nt, Human
ugaaaaucgugacaac

SEQ ID NO: 2106625 - RNA, 12 nt, Human
ugaaaaggaaga

SEQ ID NO: 2106626 - RNA, 19 nt, Human
ugaaaaucgugacaacacu

SEQ ID NO: 2106627 - RNA, 17 nt, Human
ugaaaauguauguguaa

SEQ ID NO: 2106628 - RNA, 19 nt, Human
ugaaaauauuaucuuugua

SEQ ID NO: 2106629 - RNA, 20 nt, Human
ugaaaauauuaucuuuguaa

SEQ ID NO: 2106630 - RNA, 21 nt, Human
ugaaaaugucagaaaccaguu

SEQ ID NO: 2106631 - RNA, 14 nt, Human
ugaaaaugucagaa

SEQ ID NO: 2106632 - RNA, 15 nt, Human
ugaaaaugucagaaa

SEQ ID NO: 2106633 - RNA, 18 nt, Human
ugaaaaugucagaaacca

SEQ ID NO: 2106634 - RNA, 15 nt, Human
ugaaacuagacuuga

SEQ ID NO: 2106635 - RNA, 20 nt, Human
ugaaacuagacuugaggaaa

SEQ ID NO: 2106636 - RNA, 14 nt, Human
ugaaacuaaugaaa

SEQ ID NO: 2106637 - RNA, 16 nt, Human
ugaaacuuacacacaa

SEQ ID NO: 2106638 - RNA, 21 nt, Human
ucuuucugcagaaacagaaag

SEQ ID NO: 2106639 - RNA, 16 nt, Human
ucuuucugaugucaaa

SEQ ID NO: 2106640 - RNA, 23 nt, Human
agagacaggaaaauccucuggcu

SEQ ID NO: 2106641 - RNA, 16 nt, Human
ucuuuggugaacauug

SEQ ID NO: 2106642 - RNA, 20 nt, Human
agagacaggcccaagagaug

SEQ ID NO: 2106643 - RNA, 15 nt, Human
agagacaggcccaag

SEQ ID NO: 2106644 - RNA, 18 nt, Human
agagacaggcccaagaga

SEQ ID NO: 2106645 - RNA, 22 nt, Human
ucuuuggugaacauugcaauag

SEQ ID NO: 2106646 - RNA, 13 nt, Human
ucuuuggugccuu

SEQ ID NO: 2106647 - RNA, 15 nt, Human
ucuuuggugccuuuc

SEQ ID NO: 2106648 - RNA, 17 nt, Human
ucuuuggugccuuuccu

SEQ ID NO: 2106649 - RNA, 18 nt, Human
ucuuuggugccuuuccug

SEQ ID NO: 2106650 - RNA, 20 nt, Human
ucuuuggugccuuuccuguu

SEQ ID NO: 2106651 - RNA, 22 nt, Human
ucuuuggugccuuuccuguuca

SEQ ID NO: 2106652 - RNA, 23 nt, Human
ucuuuggugccuuuccuguucag

SEQ ID NO: 2106653 - RNA, 12 nt, Human
ugaaaaaaauug

SEQ ID NO: 2106654 - RNA, 20 nt, Human
ugaaaaaaauuggcauuaaa

SEQ ID NO: 2106655 - RNA, 21 nt, Human
ugaaaaaagaaauucccugga

SEQ ID NO: 2106656 - RNA, 17 nt, Human
ugaaaaaagcuuuuaug

SEQ ID NO: 2106657 - RNA, 19 nt, Human
ugaaaaaagcuuuuaugag

SEQ ID NO: 2106658 - RNA, 12 nt, Human
ugaaaaacuucc

SEQ ID NO: 2106659 - RNA, 16 nt, Human
ugaaaaaggaggaaga

SEQ ID NO: 2106660 - RNA, 13 nt, Human
ugaaaaagcagac

SEQ ID NO: 2106661 - RNA, 21 nt, Human
ugaaaaagcagcuaccaggug

SEQ ID NO: 2106662 - RNA, 12 nt, Human
ucuuuguuuugu

SEQ ID NO: 2106663 - RNA, 18 nt, Human
ucuuuguuggaaaagaau

SEQ ID NO: 2106664 - RNA, 18 nt, Human
ucuuuguuaagacugcug

SEQ ID NO: 2106665 - RNA, 15 nt, Human
ucuuuguuacaggca

SEQ ID NO: 2106666 - RNA, 14 nt, Human
ucuuuuacauucug

SEQ ID NO: 2106667 - RNA, 18 nt, Human
ucuuuuacucaugaucuu

SEQ ID NO: 2106668 - RNA, 14 nt, Human
ugaaaaaaaaguuu

SEQ ID NO: 2106669 - RNA, 16 nt, Human
ugaaaaaaaaguuuca

SEQ ID NO: 2106670 - RNA, 22 nt, Human
agagaucaaccccuucgcuccu

SEQ ID NO: 2106671 - RNA, 20 nt, Human
agagagaacaacuacuguga

SEQ ID NO: 2106672 - RNA, 20 nt, Human
agagauauguagaaggcaca

SEQ ID NO: 2106673 - RNA, 21 nt, Human
agagagaaagaaguaggcaug

SEQ ID NO: 2106674 - RNA, 23 nt, Human
agagaugggacugggagggccca

SEQ ID NO: 2106675 - RNA, 16 nt, Human
agagaugggacuggga

SEQ ID NO: 2106676 - RNA, 22 nt, Human
agagaugggacugggagggccc

SEQ ID NO: 2106677 - RNA, 18 nt, Human
agagauggaggaggaggc

SEQ ID NO: 2106678 - RNA, 15 nt, Human
agagaucaugagaaa

SEQ ID NO: 2106679 - RNA, 16 nt, Human
agagaucaugagaaau

SEQ ID NO: 2106680 - RNA, 15 nt, Human
agagcaaagggccag

SEQ ID NO: 2106681 - RNA, 16 nt, Human
agagcaaagggccagg

SEQ ID NO: 2106682 - RNA, 19 nt, Human
agagcaaagggccaggaag

SEQ ID NO: 2106683 - RNA, 13 nt, Human
ugaaagacuguac

SEQ ID NO: 2106684 - RNA, 15 nt, Human
ugaaagacuguacaa

SEQ ID NO: 2106685 - RNA, 19 nt, Human
ugaaagaccuucuccaaau

SEQ ID NO: 2106686 - RNA, 12 nt, Human
ugaaagaccuuc

SEQ ID NO: 2106687 - RNA, 17 nt, Human
ugaaagaccuucuccaa

SEQ ID NO: 2106688 - RNA, 13 nt, Human
ugaaagaagaaaa

SEQ ID NO: 2106689 - RNA, 21 nt, Human
ugaaagaaaggggcaggagcu

SEQ ID NO: 2106690 - RNA, 12 nt, Human
ugaaagaaauca

SEQ ID NO: 2106691 - RNA, 14 nt, Human
ugaaagaaaucaug

SEQ ID NO: 2106692 - RNA, 16 nt, Human
ugaaagaaaucauguu

SEQ ID NO: 2106693 - RNA, 17 nt, Human
ugaaagaaaucauguua

SEQ ID NO: 2106694 - RNA, 18 nt, Human
ugaaagaaaucauguuau

SEQ ID NO: 2106695 - RNA, 22 nt, Human
ugaaagaaaucauguuaugaua

SEQ ID NO: 2106696 - RNA, 18 nt, Human
ugaaacuucaagcaccag

SEQ ID NO: 2106697 - RNA, 16 nt, Human
agagacuccagcuggg

SEQ ID NO: 2106698 - RNA, 19 nt, Human
agagacucagggccccagc

SEQ ID NO: 2106699 - RNA, 20 nt, Human
agagacucagggccccagca

SEQ ID NO: 2106700 - RNA, 19 nt, Human
agagcagccuguggcaucu

SEQ ID NO: 2106701 - RNA, 12 nt, Human
agagcagccugu

SEQ ID NO: 2106702 - RNA, 16 nt, Human
agagcagccuguggca

SEQ ID NO: 2106703 - RNA, 17 nt, Human
agagcagccuguggcau

SEQ ID NO: 2106704 - RNA, 14 nt, Human
agagcaagacucug

SEQ ID NO: 2106705 - RNA, 23 nt, Human
agagcaguuugguuucuagcaug

SEQ ID NO: 2106706 - RNA, 21 nt, Human
agagcaguuugguuucuagca

SEQ ID NO: 2106707 - RNA, 13 nt, Human
agagccagcuccc

SEQ ID NO: 2106708 - RNA, 22 nt, Human
agagccagcccucccuguccuc

SEQ ID NO: 2106709 - RNA, 12 nt, Human
agagccagcccu

SEQ ID NO: 2106710 - RNA, 13 nt, Human
agagccagcccuc

SEQ ID NO: 2106711 - RNA, 14 nt, Human
agagccagcccucc

SEQ ID NO: 2106712 - RNA, 16 nt, Human
agagccagcccucccu

SEQ ID NO: 2106713 - RNA, 17 nt, Human
agagccagcccucccug

SEQ ID NO: 2106714 - RNA, 20 nt, Human
agagccagcccucccugucc

SEQ ID NO: 2106715 - RNA, 21 nt, Human
agagccagcccucccuguccu

SEQ ID NO: 2106716 - RNA, 13 nt, Human
agagcuauacagu

SEQ ID NO: 2106717 - RNA, 19 nt, Human
agagcuauacaguuuuccu

SEQ ID NO: 2106718 - RNA, 16 nt, Human
agagcuagcgcugccg

SEQ ID NO: 2106719 - RNA, 21 nt, Human
agagcuagcgcugccgcaccc

SEQ ID NO: 2106720 - RNA, 13 nt, Human
agagcuagcgcug

SEQ ID NO: 2106721 - RNA, 14 nt, Human
agagcuagcgcugc

SEQ ID NO: 2106722 - RNA, 23 nt, Human
agagcuccuccuugucuuggcag

SEQ ID NO: 2106723 - RNA, 14 nt, Human
agagcucuggagcc

SEQ ID NO: 2106724 - RNA, 18 nt, Human
agagcucuggagccaccu

SEQ ID NO: 2106725 - RNA, 19 nt, Human
agagcucuggagccaccug

SEQ ID NO: 2106726 - RNA, 20 nt, Human
agagcucuggagccaccugu

SEQ ID NO: 2106727 - RNA, 22 nt, Human
agagcucuggagccaccugucc

SEQ ID NO: 2106728 - RNA, 11 nt, Human
agagcugaggc

SEQ ID NO: 2106729 - RNA, 15 nt, Human
agagcugagugagcu

SEQ ID NO: 2106730 - RNA, 20 nt, Human
agagcuagcagcagggaggg

SEQ ID NO: 2106731 - RNA, 16 nt, Human
ucuuuaugauuuuuaa

SEQ ID NO: 2106732 - RNA, 12 nt, Human
ucuuuauaugaa

SEQ ID NO: 2106733 - RNA, 15 nt, Human
ucuuuauaugaacau

SEQ ID NO: 2106734 - RNA, 16 nt, Human
ucuuuauaugaacaua

SEQ ID NO: 2106735 - RNA, 17 nt, Human
ucuuuauuaaauguaga

SEQ ID NO: 2106736 - RNA, 21 nt, Human
ucuuuauuaaauguagaaagu

SEQ ID NO: 2106737 - RNA, 18 nt, Human
ucuuucuaaugugugaau

SEQ ID NO: 2106738 - RNA, 21 nt, Human
ucuuucuaacuccagugaagu

SEQ ID NO: 2106739 - RNA, 18 nt, Human
ucuuuccuguuguuguua

SEQ ID NO: 2106740 - RNA, 12 nt, Human
ucuuuccuuccu

SEQ ID NO: 2106741 - RNA, 14 nt, Human
ucuuuccuuccucu

SEQ ID NO: 2106742 - RNA, 16 nt, Human
ucuuuccuuccucuca

SEQ ID NO: 2106743 - RNA, 14 nt, Human
ucuuuaaucuucag

SEQ ID NO: 2106744 - RNA, 15 nt, Human
ucuuuaaucuucagu

SEQ ID NO: 2106745 - RNA, 21 nt, Human
ucuuuaaccagucugaaguuu

SEQ ID NO: 2106746 - RNA, 14 nt, Human
ucuuuaacucagga

SEQ ID NO: 2106747 - RNA, 16 nt, Human
ucuuuaacucaggacu

SEQ ID NO: 2106748 - RNA, 20 nt, Human
ucuuuaacucaggacuccag

SEQ ID NO: 2106749 - RNA, 21 nt, Human
ucuuuaacucaggacuccagc

SEQ ID NO: 2106750 - RNA, 23 nt, Human
ucuuuaacucaggacuccagccc

SEQ ID NO: 2106751 - RNA, 22 nt, Human
ucuugcaauggcagccuuggca

SEQ ID NO: 2106752 - RNA, 18 nt, Human
ucuugcaauggcagccuu

SEQ ID NO: 2106753 - RNA, 19 nt, Human
ucuugcaauggcagccuug

SEQ ID NO: 2106754 - RNA, 13 nt, Human
ucuugacuauugg

SEQ ID NO: 2106755 - RNA, 19 nt, Human
ucuugauuuguuuuagaau

SEQ ID NO: 2106756 - RNA, 19 nt, Human
ucuuggcuuacugcagccu

SEQ ID NO: 2106757 - RNA, 16 nt, Human
ucuuggcuggcuuccu

SEQ ID NO: 2106758 - RNA, 12 nt, Human
ucuuggcuuugu

SEQ ID NO: 2106759 - RNA, 13 nt, Human
ucuuggcuuuguu

SEQ ID NO: 2106760 - RNA, 18 nt, Human
ucuuggcuuuguuuuguu

SEQ ID NO: 2106761 - RNA, 16 nt, Human
ucuuggguaggcggga

SEQ ID NO: 2106762 - RNA, 14 nt, Human
ucuugguaagaagc

SEQ ID NO: 2106763 - RNA, 17 nt, Human
ucuuggucagauuugaa

SEQ ID NO: 2106764 - RNA, 11 nt, Human
ucuugggcccu

SEQ ID NO: 2106765 - RNA, 13 nt, Human
ucuugggcccucc

SEQ ID NO: 2106766 - RNA, 12 nt, Human
agaccccuggcu

SEQ ID NO: 2106767 - RNA, 13 nt, Human
agaccccuggcug

SEQ ID NO: 2106768 - RNA, 16 nt, Human
agaccuucuccaaaug

SEQ ID NO: 2106769 - RNA, 18 nt, Human
agaccuucuccaaaugag

SEQ ID NO: 2106770 - RNA, 19 nt, Human
agaccuucuccaaaugaga

SEQ ID NO: 2106771 - RNA, 16 nt, Human
ucuugagaugucuucu

SEQ ID NO: 2106772 - RNA, 13 nt, Human
ucuugagccuggg

SEQ ID NO: 2106773 - RNA, 16 nt, Human
ucuugagccugggagg

SEQ ID NO: 2106774 - RNA, 21 nt, Human
agacucagggccccagcacua

SEQ ID NO: 2106775 - RNA, 18 nt, Human
agacucagggccccagca

SEQ ID NO: 2106776 - RNA, 20 nt, Human
agacucagggccccagcacu

SEQ ID NO: 2106777 - RNA, 12 nt, Human
agacucagggcc

SEQ ID NO: 2106778 - RNA, 16 nt, Human
agacucagggccccag

SEQ ID NO: 2106779 - RNA, 17 nt, Human
agacucagggccccagc

SEQ ID NO: 2106780 - RNA, 17 nt, Human
agacucaccucugccuc

SEQ ID NO: 2106781 - RNA, 18 nt, Human
agacucaccucugccuca

SEQ ID NO: 2106782 - RNA, 15 nt, Human
agacucagacuccau

SEQ ID NO: 2106783 - RNA, 19 nt, Human
agacucaccucugccucaa

SEQ ID NO: 2106784 - RNA, 15 nt, Human
ucuugaggccaggag

SEQ ID NO: 2106785 - RNA, 16 nt, Human
ucuugaggccaggagu

SEQ ID NO: 2106786 - RNA, 14 nt, Human
ucuugagggagcuu

SEQ ID NO: 2106787 - RNA, 19 nt, Human
ucuucugcuucagccuccc

SEQ ID NO: 2106788 - RNA, 12 nt, Human
ucuucugcuuca

SEQ ID NO: 2106789 - RNA, 22 nt, Human
ucuucugcuccacccuuggccu

SEQ ID NO: 2106790 - RNA, 23 nt, Human
ucuucugcuccacccuuggccug

SEQ ID NO: 2106791 - RNA, 14 nt, Human
ucuucugcuccacc

SEQ ID NO: 2106792 - RNA, 15 nt, Human
ucuucugcuccaccc

SEQ ID NO: 2106793 - RNA, 16 nt, Human
ucuucugcuccacccu

SEQ ID NO: 2106794 - RNA, 17 nt, Human
ucuucugcuccacccuu

SEQ ID NO: 2106795 - RNA, 19 nt, Human
ucuucugcuccacccuugg

SEQ ID NO: 2106796 - RNA, 20 nt, Human
ucuucugcuccacccuuggc

SEQ ID NO: 2106797 - RNA, 19 nt, Human
ucuucuguauacuguggag

SEQ ID NO: 2106798 - RNA, 14 nt, Human
ucuucugucaucua

SEQ ID NO: 2106799 - RNA, 17 nt, Human
ucuucugucaucuaccu

SEQ ID NO: 2106800 - RNA, 15 nt, Human
ucuucuguacgucug

SEQ ID NO: 2106801 - RNA, 13 nt, Human
ucuucuuaacuua

SEQ ID NO: 2106802 - RNA, 17 nt, Human
agacaucaagcacagaa

SEQ ID NO: 2106803 - RNA, 20 nt, Human
agacaucaagcacagaagga

SEQ ID NO: 2106804 - RNA, 18 nt, Human
agacauaaccacugcuuc

SEQ ID NO: 2106805 - RNA, 14 nt, Human
agaccccucuggcc

SEQ ID NO: 2106806 - RNA, 19 nt, Human
agacccccggaacaagccu

SEQ ID NO: 2106807 - RNA, 17 nt, Human
agaccccucuggccagg

SEQ ID NO: 2106808 - RNA, 19 nt, Human
agaccccucuggccaggau

SEQ ID NO: 2106809 - RNA, 21 nt, Human
agaccccucuggccaggaugg

SEQ ID NO: 2106810 - RNA, 22 nt, Human
agaccccucuggccaggaugga

SEQ ID NO: 2106811 - RNA, 16 nt, Human
agacauugucaauaaa

SEQ ID NO: 2106812 - RNA, 13 nt, Human
agacauugucaau

SEQ ID NO: 2106813 - RNA, 19 nt, Human
agacauucugccaggcccc

SEQ ID NO: 2106814 - RNA, 14 nt, Human
agacauucugccag

SEQ ID NO: 2106815 - RNA, 15 nt, Human
agacauucugccagg

SEQ ID NO: 2106816 - RNA, 16 nt, Human
agacauuccaaaacga

SEQ ID NO: 2106817 - RNA, 17 nt, Human
agacauuccaaaacgaa

SEQ ID NO: 2106818 - RNA, 18 nt, Human
agacauuccaaaacgaag

SEQ ID NO: 2106819 - RNA, 14 nt, Human
agacauuaaauaau

SEQ ID NO: 2106820 - RNA, 13 nt, Human
ucuucaagggcug

SEQ ID NO: 2106821 - RNA, 17 nt, Human
ucuucaagggcugcuuc

SEQ ID NO: 2106822 - RNA, 18 nt, Human
ucuucaagggcugcuuca

SEQ ID NO: 2106823 - RNA, 18 nt, Human
ucuucaauuuguauaaaa

SEQ ID NO: 2106824 - RNA, 20 nt, Human
ucuucaauuuguauaaaaug

SEQ ID NO: 2106825 - RNA, 19 nt, Human
ucuucaacugaccagccuc

SEQ ID NO: 2106826 - RNA, 16 nt, Human
ucuucaacugaccagc

SEQ ID NO: 2106827 - RNA, 17 nt, Human
agaaucagaucauuuca

SEQ ID NO: 2106828 - RNA, 21 nt, Human
ucuucucuggcgacaguuuuc

SEQ ID NO: 2106829 - RNA, 14 nt, Human
ucuuccucugcuga

SEQ ID NO: 2106830 - RNA, 12 nt, Human
ucuuccucugcu

SEQ ID NO: 2106831 - RNA, 11 nt, Human
ucuuccucugc

SEQ ID NO: 2106832 - RNA, 15 nt, Human
ucuuccucccucccu

SEQ ID NO: 2106833 - RNA, 18 nt, Human
ucuucccgaaccccaagg

SEQ ID NO: 2106834 - RNA, 19 nt, Human
ucuucccgaaccccaagga

SEQ ID NO: 2106835 - RNA, 14 nt, Human
ucuuccucccuccc

SEQ ID NO: 2106836 - RNA, 19 nt, Human
ucuucccuacaguugaaaa

SEQ ID NO: 2106837 - RNA, 22 nt, Human
ucuucccuacaguugaaaaaca

SEQ ID NO: 2106838 - RNA, 14 nt, Human
ucuucccccucucc

SEQ ID NO: 2106839 - RNA, 16 nt, Human
ucuucccccucuccca

SEQ ID NO: 2106840 - RNA, 17 nt, Human
ucuucccccucucccag

SEQ ID NO: 2106841 - RNA, 18 nt, Human
ucuucccccucucccagu

SEQ ID NO: 2106842 - RNA, 21 nt, Human
ucuucccccucucccaguugu

SEQ ID NO: 2106843 - RNA, 24 nt, Human
ucuuccccucuaaugcucacgcuc

SEQ ID NO: 2106844 - RNA, 17 nt, Human
ucuucccgaaccccaag

SEQ ID NO: 2106845 - RNA, 16 nt, Human
ucuucccaucacugga

SEQ ID NO: 2106846 - RNA, 17 nt, Human
ucuucccaucacuggag

SEQ ID NO: 2106847 - RNA, 20 nt, Human
ucuuccccagaaaggagacu

SEQ ID NO: 2106848 - RNA, 20 nt, Human
ucuuccccaacgaaaagcac

SEQ ID NO: 2106849 - RNA, 14 nt, Human
ucuuccccacuccc

SEQ ID NO: 2106850 - RNA, 19 nt, Human
ucuuccccacuccccaccu

SEQ ID NO: 2106851 - RNA, 22 nt, Human
ugacacagucuuggcucacugc

SEQ ID NO: 2106852 - RNA, 23 nt, Human
ugacacagucuuggcucacugca

SEQ ID NO: 2106853 - RNA, 19 nt, Human
ugacacacagcucuguccu

SEQ ID NO: 2106854 - RNA, 18 nt, Human
ugacacacagcucugucc

SEQ ID NO: 2106855 - RNA, 16 nt, Human
ugacacacagcucugu

SEQ ID NO: 2106856 - RNA, 19 nt, Human
ugacaaagaaacccaagug

SEQ ID NO: 2106857 - RNA, 23 nt, Human
ugacaccagccuuucucccaggc

SEQ ID NO: 2106858 - RNA, 16 nt, Human
ugacacggccaugacc

SEQ ID NO: 2106859 - RNA, 17 nt, Human
ugacacguccaccccag

SEQ ID NO: 2106860 - RNA, 12 nt, Human
ugacaccagccu

SEQ ID NO: 2106861 - RNA, 13 nt, Human
ugacaccagccuu

SEQ ID NO: 2106862 - RNA, 15 nt, Human
ugacaccagccuuuc

SEQ ID NO: 2106863 - RNA, 16 nt, Human
ugacaccagccuuucu

SEQ ID NO: 2106864 - RNA, 22 nt, Human
ugacaccagccuuucucccagg

SEQ ID NO: 2106865 - RNA, 15 nt, Human
ugacaaagaaaccca

SEQ ID NO: 2106866 - RNA, 17 nt, Human
ugacaaagaaacccaag

SEQ ID NO: 2106867 - RNA, 13 nt, Human
ugacaaaauuuug

SEQ ID NO: 2106868 - RNA, 14 nt, Human
ugacaaaauuuugc

SEQ ID NO: 2106869 - RNA, 15 nt, Human
ugaauuuuucucuaa

SEQ ID NO: 2106870 - RNA, 13 nt, Human
ugaauuuuucucu

SEQ ID NO: 2106871 - RNA, 18 nt, Human
ugaauuuuguuuggacuu

SEQ ID NO: 2106872 - RNA, 19 nt, Human
ugaauuugaaugaaaaauu

SEQ ID NO: 2106873 - RNA, 21 nt, Human
ugaauuuggccugcacuaauu

SEQ ID NO: 2106874 - RNA, 14 nt, Human
agaucaaauuucac

SEQ ID NO: 2106875 - RNA, 23 nt, Human
agaucaaauuucacgucgucuuc

SEQ ID NO: 2106876 - RNA, 13 nt, Human
ugaauuugaauga

SEQ ID NO: 2106877 - RNA, 15 nt, Human
ugaauuugaaugaaa

SEQ ID NO: 2106878 - RNA, 16 nt, Human
ugaauuugaaugaaaa

SEQ ID NO: 2106879 - RNA, 17 nt, Human
ugaauuugaaugaaaaa

SEQ ID NO: 2106880 - RNA, 18 nt, Human
ugaauuugaaugaaaaau

SEQ ID NO: 2106881 - RNA, 14 nt, Human
ugaauuuggagacu

SEQ ID NO: 2106882 - RNA, 15 nt, Human
ugaauuuggagacuc

SEQ ID NO: 2106883 - RNA, 17 nt, Human
ugaauuuggagacucug

SEQ ID NO: 2106884 - RNA, 20 nt, Human
ugaauuuggagacucugugg

SEQ ID NO: 2106885 - RNA, 20 nt, Human
ugaauuuggccugcacuaau

SEQ ID NO: 2106886 - RNA, 22 nt, Human
agauaagcaagagagauguuuu

SEQ ID NO: 2106887 - RNA, 15 nt, Human
agauaauaugagaau

SEQ ID NO: 2106888 - RNA, 13 nt, Human
agauaagcaagag

SEQ ID NO: 2106889 - RNA, 16 nt, Human
agauaagcaagagaga

SEQ ID NO: 2106890 - RNA, 17 nt, Human
agauaagcaagagagau

SEQ ID NO: 2106891 - RNA, 20 nt, Human
agauaagcaagagagauguu

SEQ ID NO: 2106892 - RNA, 22 nt, Human
agauaagaaugcugguuuuccu

SEQ ID NO: 2106893 - RNA, 14 nt, Human
agauaacucuuugg

SEQ ID NO: 2106894 - RNA, 15 nt, Human
agauaacucuuugga

SEQ ID NO: 2106895 - RNA, 16 nt, Human
agauaacucuuuggau

SEQ ID NO: 2106896 - RNA, 22 nt, Human
agauaacucuuuggauagcaug

SEQ ID NO: 2106897 - RNA, 20 nt, Human
agaguuugagaccugaauag

SEQ ID NO: 2106898 - RNA, 14 nt, Human
agauaaucagccuc

SEQ ID NO: 2106899 - RNA, 17 nt, Human
agauaauaugagaauca

SEQ ID NO: 2106900 - RNA, 20 nt, Human
agauacaggaaaagcugcug

SEQ ID NO: 2106901 - RNA, 18 nt, Human
agauaauauuaaggaaga

SEQ ID NO: 2106902 - RNA, 22 nt, Human
agauaauauuaaggaagacaau

SEQ ID NO: 2106903 - RNA, 23 nt, Human
agauauuuauuguuuauuuauca

SEQ ID NO: 2106904 - RNA, 17 nt, Human
agauauuuauauuuuua

SEQ ID NO: 2106905 - RNA, 20 nt, Human
agauauuuauauuuuuauuu

SEQ ID NO: 2106906 - RNA, 23 nt, Human
agauauuuauauuuuuauuuuau

SEQ ID NO: 2106907 - RNA, 18 nt, Human
agaucaaaagguuaauaa

SEQ ID NO: 2106908 - RNA, 14 nt, Human
ugaagucacugcac

SEQ ID NO: 2106909 - RNA, 22 nt, Human
ugaagcucuggugacaccagcc

SEQ ID NO: 2106910 - RNA, 16 nt, Human
ugaaggucuugauuug

SEQ ID NO: 2106911 - RNA, 14 nt, Human
ugaagucacacagu

SEQ ID NO: 2106912 - RNA, 21 nt, Human
ugaagguaaaauugaaaggca

SEQ ID NO: 2106913 - RNA, 16 nt, Human
ugaauaaagacaccua

SEQ ID NO: 2106914 - RNA, 21 nt, Human
ugaagucacugcacagugcau

SEQ ID NO: 2106915 - RNA, 16 nt, Human
ugaagucacugcacag

SEQ ID NO: 2106916 - RNA, 15 nt, Human
ugaagucacugcaca

SEQ ID NO: 2106917 - RNA, 16 nt, Human
ugaauaaauaaaugua

SEQ ID NO: 2106918 - RNA, 19 nt, Human
ugaagucacccggccccca

SEQ ID NO: 2106919 - RNA, 17 nt, Human
ugaauaaaguugaagcu

SEQ ID NO: 2106920 - RNA, 18 nt, Human
ugaauaaagccugcuuuu

SEQ ID NO: 2106921 - RNA, 18 nt, Human
ugaagucacaucacagga

SEQ ID NO: 2106922 - RNA, 20 nt, Human
ugaauaaagccugcuuuuua

SEQ ID NO: 2106923 - RNA, 18 nt, Human
ugaauauguacauaggca

SEQ ID NO: 2106924 - RNA, 21 nt, Human
ugaauauggacucaguuuucu

SEQ ID NO: 2106925 - RNA, 19 nt, Human
ugaauaugauuaguaaaga

SEQ ID NO: 2106926 - RNA, 20 nt, Human
ugaauagcucccagauuuca

SEQ ID NO: 2106927 - RNA, 20 nt, Human
ugaauaugaacggugagcau

SEQ ID NO: 2106928 - RNA, 16 nt, Human
ugaauguauugaacuu

SEQ ID NO: 2106929 - RNA, 15 nt, Human
ugaauguaucaggaa

SEQ ID NO: 2106930 - RNA, 16 nt, Human
ugaauguaucaggaaa

SEQ ID NO: 2106931 - RNA, 14 nt, Human
ugaauguaauuugu

SEQ ID NO: 2106932 - RNA, 15 nt, Human
ugaauguaauuugug

SEQ ID NO: 2106933 - RNA, 18 nt, Human
ugaauguaauuuguguaa

SEQ ID NO: 2106934 - RNA, 20 nt, Human
ugaauguaauuuguguaaua

SEQ ID NO: 2106935 - RNA, 13 nt, Human
agaguauaugcac

SEQ ID NO: 2106936 - RNA, 22 nt, Human
agaguagccgagagccugcucc

SEQ ID NO: 2106937 - RNA, 23 nt, Human
agaguagccgagagccugcuccc

SEQ ID NO: 2106938 - RNA, 13 nt, Human
agaguagccgaga

SEQ ID NO: 2106939 - RNA, 17 nt, Human
agaguagccgagagccu

SEQ ID NO: 2106940 - RNA, 18 nt, Human
agaguagccgagagccug

SEQ ID NO: 2106941 - RNA, 19 nt, Human
agaguagccgagagccugc

SEQ ID NO: 2106942 - RNA, 16 nt, Human
agagguggggagcaga

SEQ ID NO: 2106943 - RNA, 15 nt, Human
ugaagcuaagauuua

SEQ ID NO: 2106944 - RNA, 19 nt, Human
ugaagcuauuuaucuguag

SEQ ID NO: 2106945 - RNA, 13 nt, Human
ugaagcuaauuau

SEQ ID NO: 2106946 - RNA, 14 nt, Human
ugaagcuaauuauu

SEQ ID NO: 2106947 - RNA, 18 nt, Human
ugaagcuaauuauuuuaa

SEQ ID NO: 2106948 - RNA, 19 nt, Human
ugaagcuaauuauuuuaau

SEQ ID NO: 2106949 - RNA, 20 nt, Human
ugaagcuaauuauuuuaauu

SEQ ID NO: 2106950 - RNA, 22 nt, Human
ugaagcuaauuauuuuaauuag

SEQ ID NO: 2106951 - RNA, 23 nt, Human
ugaagcuaauuauuuuaauuagg

SEQ ID NO: 2106952 - RNA, 19 nt, Human
ugaagccacagcccaggcc

SEQ ID NO: 2106953 - RNA, 20 nt, Human
ugaagccacagcccaggccu

SEQ ID NO: 2106954 - RNA, 22 nt, Human
ugaagccacagcccaggccucc

SEQ ID NO: 2106955 - RNA, 16 nt, Human
ugaagccacugaagcu

SEQ ID NO: 2106956 - RNA, 14 nt, Human
agaggcuucuucag

SEQ ID NO: 2106957 - RNA, 21 nt, Human
agaggcuucuucagaucagug

SEQ ID NO: 2106958 - RNA, 16 nt, Human
agagggagaagcauga

SEQ ID NO: 2106959 - RNA, 19 nt, Human
agagggagaagcaugaaaa

SEQ ID NO: 2106960 - RNA, 19 nt, Human
agagggagaagggauggag

SEQ ID NO: 2106961 - RNA, 22 nt, Human
agaggcuguucccaccaggcug

SEQ ID NO: 2106962 - RNA, 17 nt, Human
agaggcuggaggcaggg

SEQ ID NO: 2106963 - RNA, 19 nt, Human
agaggcuggaggcagggcc

SEQ ID NO: 2106964 - RNA, 20 nt, Human
agaggcuggaggcagggccu

SEQ ID NO: 2106965 - RNA, 22 nt, Human
agaggcuggaggcagggccuug

SEQ ID NO: 2106966 - RNA, 15 nt, Human
ugaaaguauaacuga

SEQ ID NO: 2106967 - RNA, 15 nt, Human
ugaaagucagaugcc

SEQ ID NO: 2106968 - RNA, 18 nt, Human
ugaaagucagaugcccag

SEQ ID NO: 2106969 - RNA, 15 nt, Human
ugaaagguuuacauu

SEQ ID NO: 2106970 - RNA, 17 nt, Human
ugaaagucaugaacaca

SEQ ID NO: 2106971 - RNA, 18 nt, Human
ugaaagucaugaacacau

SEQ ID NO: 2106972 - RNA, 19 nt, Human
ugaaagucaugaacacauc

SEQ ID NO: 2106973 - RNA, 14 nt, Human
agcaagauuucaga

SEQ ID NO: 2106974 - RNA, 19 nt, Human
ugagaacuacucagggaau

SEQ ID NO: 2106975 - RNA, 17 nt, Human
ugagaacugcauauguu

SEQ ID NO: 2106976 - RNA, 20 nt, Human
ugagaacugcauauguuucg

SEQ ID NO: 2106977 - RNA, 20 nt, Human
ugagaagcagaggaaggaga

SEQ ID NO: 2106978 - RNA, 13 nt, Human
ugagaagaauauu

SEQ ID NO: 2106979 - RNA, 14 nt, Human
ugagaagaauauug

SEQ ID NO: 2106980 - RNA, 21 nt, Human
ugagaagaauauuguuccuaa

SEQ ID NO: 2106981 - RNA, 22 nt, Human
ugagaagaauauuguuccuaag

SEQ ID NO: 2106982 - RNA, 16 nt, Human
ugagaagguccuuaau

SEQ ID NO: 2106983 - RNA, 22 nt, Human
ugagaagucaaacauuucaaag

SEQ ID NO: 2106984 - RNA, 15 nt, Human
ugagaacuugacaag

SEQ ID NO: 2106985 - RNA, 23 nt, Human
ugagaaggggaggaccucugggc

SEQ ID NO: 2106986 - RNA, 15 nt, Human
ugagaauagaaggaa

SEQ ID NO: 2106987 - RNA, 16 nt, Human
ugagaauagaaggaaa

SEQ ID NO: 2106988 - RNA, 17 nt, Human
ugagaauagaaggaaac

SEQ ID NO: 2106989 - RNA, 18 nt, Human
ugagaauagaaggaaacu

SEQ ID NO: 2106990 - RNA, 22 nt, Human
ugagaauagaaggaaacuagcu

SEQ ID NO: 2106991 - RNA, 23 nt, Human
ugagaauagaaggaaacuagcuu

SEQ ID NO: 2106992 - RNA, 16 nt, Human
ugagaaucaaaacucu

SEQ ID NO: 2106993 - RNA, 17 nt, Human
ugagaaucagaucauuu

SEQ ID NO: 2106994 - RNA, 12 nt, Human
agcaagacucug

SEQ ID NO: 2106995 - RNA, 15 nt, Human
agcaagagagauguu

SEQ ID NO: 2106996 - RNA, 12 nt, Human
agcaagagagau

SEQ ID NO: 2106997 - RNA, 21 nt, Human
agcaagauccugucuuuaagg

SEQ ID NO: 2106998 - RNA, 12 nt, Human
agcaagaaagaa

SEQ ID NO: 2106999 - RNA, 15 nt, Human
agcaagaaagaaacc

SEQ ID NO: 2107000 - RNA, 20 nt, Human
agcaacuugucuuuuucugg

SEQ ID NO: 2107001 - RNA, 21 nt, Human
agcaacuugucuuuuucugga

SEQ ID NO: 2107002 - RNA, 23 nt, Human
agcaacuugucuuuuucuggacu

SEQ ID NO: 2107003 - RNA, 15 nt, Human
agcaacuugucuuuu

SEQ ID NO: 2107004 - RNA, 19 nt, Human
agcaaaaacgaaagcuggg

SEQ ID NO: 2107005 - RNA, 16 nt, Human
agauuuuuaacgaaug

SEQ ID NO: 2107006 - RNA, 14 nt, Human
agauuuugaaugcu

SEQ ID NO: 2107007 - RNA, 21 nt, Human
agauuuugaaauuuuuauuaa

SEQ ID NO: 2107008 - RNA, 12 nt, Human
agauuuugaaaa

SEQ ID NO: 2107009 - RNA, 13 nt, Human
agauuuugaaaac

SEQ ID NO: 2107010 - RNA, 17 nt, Human
agauuuugaaaacuaca

SEQ ID NO: 2107011 - RNA, 21 nt, Human
agauuuugaaaacuacauuuu

SEQ ID NO: 2107012 - RNA, 23 nt, Human
agauuuugaaaacuacauuuuaa

SEQ ID NO: 2107013 - RNA, 19 nt, Human
agauuucuugaguuuuguu

SEQ ID NO: 2107014 - RNA, 19 nt, Human
agauuucugauuuuaugua

SEQ ID NO: 2107015 - RNA, 22 nt, Human
agauuucugauuuuauguaaaa

SEQ ID NO: 2107016 - RNA, 17 nt, Human
agauuugaacucuucaa

SEQ ID NO: 2107017 - RNA, 18 nt, Human
agauuccagagaguggcu

SEQ ID NO: 2107018 - RNA, 12 nt, Human
agauucauuuuu

SEQ ID NO: 2107019 - RNA, 15 nt, Human
agauucauccauuua

SEQ ID NO: 2107020 - RNA, 22 nt, Human
agauucauauuuacuucuuaua

SEQ ID NO: 2107021 - RNA, 14 nt, Human
agauugcuucugua

SEQ ID NO: 2107022 - RNA, 15 nt, Human
agauugcuucuguag

SEQ ID NO: 2107023 - RNA, 17 nt, Human
agauugcuucuguagua

SEQ ID NO: 2107024 - RNA, 23 nt, Human
agauuggagaaacccuugaaaag

SEQ ID NO: 2107025 - RNA, 15 nt, Human
agauugcuuaaaaua

SEQ ID NO: 2107026 - RNA, 16 nt, Human
agauugcuuaaaauag

SEQ ID NO: 2107027 - RNA, 16 nt, Human
agauucgcuuuccaug

SEQ ID NO: 2107028 - RNA, 14 nt, Human
agauugcugcuucu

SEQ ID NO: 2107029 - RNA, 15 nt, Human
agauugcugcuucug

SEQ ID NO: 2107030 - RNA, 14 nt, Human
agauuccuuucccu

SEQ ID NO: 2107031 - RNA, 16 nt, Human
agauuccuuucccuuu

SEQ ID NO: 2107032 - RNA, 20 nt, Human
agauuccuuucccuuuagca

SEQ ID NO: 2107033 - RNA, 14 nt, Human
agauuccuuuucuu

SEQ ID NO: 2107034 - RNA, 17 nt, Human
agauuccuuuucuuguu

SEQ ID NO: 2107035 - RNA, 17 nt, Human
agauucauuuuucuuuc

SEQ ID NO: 2107036 - RNA, 17 nt, Human
ugacuagaggcagggag

SEQ ID NO: 2107037 - RNA, 21 nt, Human
ugacuagaggcagggagggga

SEQ ID NO: 2107038 - RNA, 17 nt, Human
ugacuagggauucaggc

SEQ ID NO: 2107039 - RNA, 18 nt, Human
ugacuagggauucaggcu

SEQ ID NO: 2107040 - RNA, 19 nt, Human
ugacuagggauucaggcug

SEQ ID NO: 2107041 - RNA, 16 nt, Human
ugacuagaaagugaau

SEQ ID NO: 2107042 - RNA, 21 nt, Human
ugacuagaagggccaguccug

SEQ ID NO: 2107043 - RNA, 19 nt, Human
ugacuagacguucauuugu

SEQ ID NO: 2107044 - RNA, 17 nt, Human
ugaccuucuaggaagcu

SEQ ID NO: 2107045 - RNA, 13 nt, Human
ugaccuucuggga

SEQ ID NO: 2107046 - RNA, 14 nt, Human
ugaccuucugggaa

SEQ ID NO: 2107047 - RNA, 17 nt, Human
ugaccuugaacuccugg

SEQ ID NO: 2107048 - RNA, 18 nt, Human
ugaccuugaacuccuggg

SEQ ID NO: 2107049 - RNA, 19 nt, Human
ugaccuugaacuccugggc

SEQ ID NO: 2107050 - RNA, 20 nt, Human
ugaccuugaacuccugggcu

SEQ ID NO: 2107051 - RNA, 20 nt, Human
ugacucaagugucucagucc

SEQ ID NO: 2107052 - RNA, 23 nt, Human
ugacucaacauguuacugaccag

SEQ ID NO: 2107053 - RNA, 13 nt, Human
ugacuagugcuga

SEQ ID NO: 2107054 - RNA, 14 nt, Human
ugacucaacauguu

SEQ ID NO: 2107055 - RNA, 15 nt, Human
ugacucaacauguua

SEQ ID NO: 2107056 - RNA, 22 nt, Human
ugacucaacauguuacugacca

SEQ ID NO: 2107057 - RNA, 20 nt, Human
ugacuagggauucaggcugc

SEQ ID NO: 2107058 - RNA, 21 nt, Human
ugacuagggauucaggcugcu

SEQ ID NO: 2107059 - RNA, 23 nt, Human
ugacuagggauucaggcugcuug

SEQ ID NO: 2107060 - RNA, 22 nt, Human
ugacuccuuagagacaucaaaa

SEQ ID NO: 2107061 - RNA, 18 nt, Human
ugacucgagucacacuca

SEQ ID NO: 2107062 - RNA, 17 nt, Human
ugacucccaaagagcug

SEQ ID NO: 2107063 - RNA, 18 nt, Human
ugacucccaaagagcugc

SEQ ID NO: 2107064 - RNA, 20 nt, Human
ugacucccaaagagcugccu

SEQ ID NO: 2107065 - RNA, 22 nt, Human
ugacucccaaagagcugccuaa

SEQ ID NO: 2107066 - RNA, 14 nt, Human
ugacucacccaagc

SEQ ID NO: 2107067 - RNA, 15 nt, Human
ugacucacccaagca

SEQ ID NO: 2107068 - RNA, 11 nt, Human
ugacucaccca

SEQ ID NO: 2107069 - RNA, 12 nt, Human
ugacucacccaa

SEQ ID NO: 2107070 - RNA, 13 nt, Human
ugacucacccaag

SEQ ID NO: 2107071 - RNA, 18 nt, Human
ugaccugugaccagcacu

SEQ ID NO: 2107072 - RNA, 22 nt, Human
ugaccugugaccagcacugucu

SEQ ID NO: 2107073 - RNA, 13 nt, Human
ugaccugugacca

SEQ ID NO: 2107074 - RNA, 15 nt, Human
ugaccugugaccagc

SEQ ID NO: 2107075 - RNA, 19 nt, Human
ugaccuguggggauuucuc

SEQ ID NO: 2107076 - RNA, 21 nt, Human
ugaccuguggggauuucuccc

SEQ ID NO: 2107077 - RNA, 22 nt, Human
ugaccuguggggauuucuccca

SEQ ID NO: 2107078 - RNA, 23 nt, Human
ugaccuguggggauuucucccag

SEQ ID NO: 2107079 - RNA, 14 nt, Human
ugaccugugucacu

SEQ ID NO: 2107080 - RNA, 15 nt, Human
ugaccugugucacua

SEQ ID NO: 2107081 - RNA, 19 nt, Human
ugacccucaauucauauuu

SEQ ID NO: 2107082 - RNA, 18 nt, Human
ugacccuagcucuuuccu

SEQ ID NO: 2107083 - RNA, 11 nt, Human
ugaccugcagg

SEQ ID NO: 2107084 - RNA, 20 nt, Human
ugaccugcaggccaagagca

SEQ ID NO: 2107085 - RNA, 16 nt, Human
agauuaaacugaguga

SEQ ID NO: 2107086 - RNA, 24 nt, Human
agauguuugucagauaugauaugu

SEQ ID NO: 2107087 - RNA, 14 nt, Human
agauguuucacgaa

SEQ ID NO: 2107088 - RNA, 15 nt, Human
agauguuugucagau

SEQ ID NO: 2107089 - RNA, 17 nt, Human
agauguuugucagauau

SEQ ID NO: 2107090 - RNA, 19 nt, Human
agauguuugucagauauga

SEQ ID NO: 2107091 - RNA, 23 nt, Human
agauggaaguugcagugagcuga

SEQ ID NO: 2107092 - RNA, 22 nt, Human
agauggaaguugcagugagcug

SEQ ID NO: 2107093 - RNA, 20 nt, Human
agauggaaccgcaggaagcu

SEQ ID NO: 2107094 - RNA, 21 nt, Human
agauggaaccgcaggaagcug

SEQ ID NO: 2107095 - RNA, 13 nt, Human
agauggagucccu

SEQ ID NO: 2107096 - RNA, 16 nt, Human
agauggaggaggaggc

SEQ ID NO: 2107097 - RNA, 16 nt, Human
agaugccgcauuugga

SEQ ID NO: 2107098 - RNA, 21 nt, Human
agaugcccagagggcccaggc

SEQ ID NO: 2107099 - RNA, 22 nt, Human
agaugcccagagggcccaggca

SEQ ID NO: 2107100 - RNA, 12 nt, Human
agaugccccaga

SEQ ID NO: 2107101 - RNA, 17 nt, Human
agaugccccagagcugu

SEQ ID NO: 2107102 - RNA, 14 nt, Human
agaugcccugcuag

SEQ ID NO: 2107103 - RNA, 12 nt, Human
agaugccuccac

SEQ ID NO: 2107104 - RNA, 13 nt, Human
agaugccuccacc

SEQ ID NO: 2107105 - RNA, 21 nt, Human
agaugccuccaccccccagaa

SEQ ID NO: 2107106 - RNA, 22 nt, Human
agaugccuccaccccccagaac

SEQ ID NO: 2107107 - RNA, 14 nt, Human
agaugccuccaccg

SEQ ID NO: 2107108 - RNA, 15 nt, Human
agaugccuccaccgc

SEQ ID NO: 2107109 - RNA, 16 nt, Human
agaugccuccaccgcu

SEQ ID NO: 2107110 - RNA, 17 nt, Human
agaugccuccaccgcug

SEQ ID NO: 2107111 - RNA, 21 nt, Human
agaugccuccaccgcugccua

SEQ ID NO: 2107112 - RNA, 20 nt, Human
agaugcugacuguacuccuc

SEQ ID NO: 2107113 - RNA, 18 nt, Human
agaugcugaaacaggaga

SEQ ID NO: 2107114 - RNA, 13 nt, Human
agaugcucuuuua

SEQ ID NO: 2107115 - RNA, 23 nt, Human
agaugcugacuguacuccuccca

SEQ ID NO: 2107116 - RNA, 21 nt, Human
agaugcugaaacaggagagaa

SEQ ID NO: 2107117 - RNA, 22 nt, Human
agaugcugaaacaggagagaaa

SEQ ID NO: 2107118 - RNA, 22 nt, Human
agauggaacccuuuuggccccc

SEQ ID NO: 2107119 - RNA, 17 nt, Human
agauggaaccgcaggaa

SEQ ID NO: 2107120 - RNA, 18 nt, Human
agauggaaccgcaggaag

SEQ ID NO: 2107121 - RNA, 23 nt, Human
ugacacuucagagagcugguagu

SEQ ID NO: 2107122 - RNA, 24 nt, Human
ugacacuucagagagcugguaguu

SEQ ID NO: 2107123 - RNA, 17 nt, Human
ugacacuucagagagcu

SEQ ID NO: 2107124 - RNA, 18 nt, Human
ugacacuucagagagcug

SEQ ID NO: 2107125 - RNA, 19 nt, Human
ugacacuucagagagcugg

SEQ ID NO: 2107126 - RNA, 20 nt, Human
ugacacuucagagagcuggu

SEQ ID NO: 2107127 - RNA, 13 nt, Human
ugacacugaaaug

SEQ ID NO: 2107128 - RNA, 14 nt, Human
ugacacugaaaugc

SEQ ID NO: 2107129 - RNA, 16 nt, Human
ugacacugaaaugccu

SEQ ID NO: 2107130 - RNA, 17 nt, Human
ugacacugaaaugccuu

SEQ ID NO: 2107131 - RNA, 18 nt, Human
ugacacugaaaugccuua

SEQ ID NO: 2107132 - RNA, 22 nt, Human
ugacacugaaaugccuuacuuu

SEQ ID NO: 2107133 - RNA, 16 nt, Human
ugacacuucagagagc

SEQ ID NO: 2107134 - RNA, 16 nt, Human
agaugccaucuguguc

SEQ ID NO: 2107135 - RNA, 19 nt, Human
ugauauguugguagauucu

SEQ ID NO: 2107136 - RNA, 15 nt, Human
ugauauguaaacaua

SEQ ID NO: 2107137 - RNA, 21 nt, Human
ugauacuuuugacaacaaauu

SEQ ID NO: 2107138 - RNA, 15 nt, Human
ugauacuuuuaagag

SEQ ID NO: 2107139 - RNA, 15 nt, Human
ugauacuuuugacaa

SEQ ID NO: 2107140 - RNA, 14 nt, Human
ugauacuuguuuuc

SEQ ID NO: 2107141 - RNA, 22 nt, Human
ugauacuuguuuucaaaccagu

SEQ ID NO: 2107142 - RNA, 23 nt, Human
ugauauuuucaacgcagcccugc

SEQ ID NO: 2107143 - RNA, 22 nt, Human
ugauauuuucaacgcagcccug

SEQ ID NO: 2107144 - RNA, 21 nt, Human
ugauauuuucaacgcagcccu

SEQ ID NO: 2107145 - RNA, 19 nt, Human
ugauauuuucaacgcagcc

SEQ ID NO: 2107146 - RNA, 17 nt, Human
ugauauugcauaugcau

SEQ ID NO: 2107147 - RNA, 21 nt, Human
ugauauuccccccacuuaaga

SEQ ID NO: 2107148 - RNA, 21 nt, Human
ugauauguaaacauaauucuu

SEQ ID NO: 2107149 - RNA, 15 nt, Human
ugauauuccauagua

SEQ ID NO: 2107150 - RNA, 16 nt, Human
ugauauuccauaguau

SEQ ID NO: 2107151 - RNA, 19 nt, Human
ugauauuccauaguauauu

SEQ ID NO: 2107152 - RNA, 16 nt, Human
ugauauuccaugaaug

SEQ ID NO: 2107153 - RNA, 18 nt, Human
ugauauuccaugaaugua

SEQ ID NO: 2107154 - RNA, 19 nt, Human
ugauauuccaugaauguau

SEQ ID NO: 2107155 - RNA, 20 nt, Human
ugauauuccaugaauguauc

SEQ ID NO: 2107156 - RNA, 22 nt, Human
ugauauuccaugaauguaucag

SEQ ID NO: 2107157 - RNA, 15 nt, Human
agcaucacaaaugau

SEQ ID NO: 2107158 - RNA, 21 nt, Human
ugaucacggcucacugcagcc

SEQ ID NO: 2107159 - RNA, 20 nt, Human
ugaucacggcucacugcagc

SEQ ID NO: 2107160 - RNA, 18 nt, Human
ugaucaauaaaaugugau

SEQ ID NO: 2107161 - RNA, 13 nt, Human
agcaucaaacucu

SEQ ID NO: 2107162 - RNA, 14 nt, Human
agcaucaaacucuu

SEQ ID NO: 2107163 - RNA, 19 nt, Human
ugaucacggcucacugcag

SEQ ID NO: 2107164 - RNA, 13 nt, Human
ugaucaauaaaau

SEQ ID NO: 2107165 - RNA, 15 nt, Human
ugaucaauaaaaugu

SEQ ID NO: 2107166 - RNA, 16 nt, Human
ugaucaauaaaaugug

SEQ ID NO: 2107167 - RNA, 19 nt, Human
ugaucaauaaaaugugauu

SEQ ID NO: 2107168 - RNA, 15 nt, Human
ugauauuuuuuuaag

SEQ ID NO: 2107169 - RNA, 16 nt, Human
ugauauuuuuuuaagu

SEQ ID NO: 2107170 - RNA, 20 nt, Human
ugauauuuuuuuaagucuuu

SEQ ID NO: 2107171 - RNA, 18 nt, Human
agcauggcucaaagugca

SEQ ID NO: 2107172 - RNA, 15 nt, Human
agcauguaggagaau

SEQ ID NO: 2107173 - RNA, 16 nt, Human
agcaugucacuaaagc

SEQ ID NO: 2107174 - RNA, 11 nt, Human
agcauugcuuu

SEQ ID NO: 2107175 - RNA, 12 nt, Human
agcauugcuuuc

SEQ ID NO: 2107176 - RNA, 13 nt, Human
agcauugcuuucu

SEQ ID NO: 2107177 - RNA, 14 nt, Human
agcauugcuuucug

SEQ ID NO: 2107178 - RNA, 15 nt, Human
agcauugcuuucuga

SEQ ID NO: 2107179 - RNA, 16 nt, Human
agcauugcuuucugaa

SEQ ID NO: 2107180 - RNA, 17 nt, Human
agcauugcuuucugaaa

SEQ ID NO: 2107181 - RNA, 15 nt, Human
agcauuguuugcuua

SEQ ID NO: 2107182 - RNA, 17 nt, Human
agcauuguuugcuuauu

SEQ ID NO: 2107183 - RNA, 20 nt, Human
agcauuguggcugucagcag

SEQ ID NO: 2107184 - RNA, 21 nt, Human
agcauuguggcugucagcagg

SEQ ID NO: 2107185 - RNA, 17 nt, Human
agcauguggcauguuca

SEQ ID NO: 2107186 - RNA, 19 nt, Human
agcauguguauuuccagug

SEQ ID NO: 2107187 - RNA, 12 nt, Human
agcauguuacug

SEQ ID NO: 2107188 - RNA, 16 nt, Human
agcauguugagccagg

SEQ ID NO: 2107189 - RNA, 18 nt, Human
agcauguggcauguucau

SEQ ID NO: 2107190 - RNA, 16 nt, Human
agcauguguugaaaaa

SEQ ID NO: 2107191 - RNA, 22 nt, Human
agcauguguuugguucuggggc

SEQ ID NO: 2107192 - RNA, 19 nt, Human
agcauguugagccaggccu

SEQ ID NO: 2107193 - RNA, 20 nt, Human
agcauguugagccaggccug

SEQ ID NO: 2107194 - RNA, 21 nt, Human
agcauguugagccaggccugg

SEQ ID NO: 2107195 - RNA, 14 nt, Human
agcauuaacuaauc

SEQ ID NO: 2107196 - RNA, 18 nt, Human
agcauuaacuaaucuauu

SEQ ID NO: 2107197 - RNA, 13 nt, Human
ugaguagcuggau

SEQ ID NO: 2107198 - RNA, 20 nt, Human
ugaguagagagcaagggaag

SEQ ID NO: 2107199 - RNA, 13 nt, Human
ugaguaagagcug

SEQ ID NO: 2107200 - RNA, 12 nt, Human
agcauaugagga

SEQ ID NO: 2107201 - RNA, 16 nt, Human
agcauaugaggaugca

SEQ ID NO: 2107202 - RNA, 23 nt, Human
agcauaugaggaugcagagucag

SEQ ID NO: 2107203 - RNA, 20 nt, Human
ugaguaaaaaguuucuaaag

SEQ ID NO: 2107204 - RNA, 13 nt, Human
agcauaaaugcaa

SEQ ID NO: 2107205 - RNA, 14 nt, Human
agcauaaaugcaaa

SEQ ID NO: 2107206 - RNA, 12 nt, Human
ugagaauuaccc

SEQ ID NO: 2107207 - RNA, 16 nt, Human
ugagaauucagcugcc

SEQ ID NO: 2107208 - RNA, 17 nt, Human
ugagaauucagcugccc

SEQ ID NO: 2107209 - RNA, 18 nt, Human
ugagaauucagcugcccc

SEQ ID NO: 2107210 - RNA, 22 nt, Human
ugagaauucagcugcccccgcu

SEQ ID NO: 2107211 - RNA, 23 nt, Human
ugagaauucagcugcccccgcuc

SEQ ID NO: 2107212 - RNA, 20 nt, Human
ugagaaucagaucauuucaa

SEQ ID NO: 2107213 - RNA, 18 nt, Human
ugagacaaauggaggccu

SEQ ID NO: 2107214 - RNA, 12 nt, Human
ugagacaaaaau

SEQ ID NO: 2107215 - RNA, 14 nt, Human
ugagacaaaaauua

SEQ ID NO: 2107216 - RNA, 15 nt, Human
ugagacaaaaauuau

SEQ ID NO: 2107217 - RNA, 16 nt, Human
ugagacaaaaauuauc

SEQ ID NO: 2107218 - RNA, 18 nt, Human
ugagacaaaaauuaucua

SEQ ID NO: 2107219 - RNA, 13 nt, Human
ugagaauuuuaaa

SEQ ID NO: 2107220 - RNA, 15 nt, Human
ugagaauuuuaaauu

SEQ ID NO: 2107221 - RNA, 23 nt, Human
ugagaauuuuaaauuauaacuua

SEQ ID NO: 2107222 - RNA, 16 nt, Human
ugauaaggaucagaac

SEQ ID NO: 2107223 - RNA, 20 nt, Human
ugauaaggaucagaacagca

SEQ ID NO: 2107224 - RNA, 18 nt, Human
ugauaaugaugaugacga

SEQ ID NO: 2107225 - RNA, 21 nt, Human
ugauaauguugugguuuguug

SEQ ID NO: 2107226 - RNA, 17 nt, Human
ugaguucauacccuguu

SEQ ID NO: 2107227 - RNA, 16 nt, Human
ugaguucagguagcug

SEQ ID NO: 2107228 - RNA, 23 nt, Human
ugauacacuaugaagauguuuca

SEQ ID NO: 2107229 - RNA, 23 nt, Human
ugagugggggaucacagccucug

SEQ ID NO: 2107230 - RNA, 21 nt, Human
ugagugggugaauaauacagu

SEQ ID NO: 2107231 - RNA, 20 nt, Human
ugaguucaagggcuguaggu

SEQ ID NO: 2107232 - RNA, 15 nt, Human
ugaguucagguagcu

SEQ ID NO: 2107233 - RNA, 17 nt, Human
ugaguguaacaagaaag

SEQ ID NO: 2107234 - RNA, 19 nt, Human
ugaguguaacaagaaagga

SEQ ID NO: 2107235 - RNA, 14 nt, Human
ugaguguaagugug

SEQ ID NO: 2107236 - RNA, 15 nt, Human
ugaguguaaguguga

SEQ ID NO: 2107237 - RNA, 11 nt, Human
ugaguguacca

SEQ ID NO: 2107238 - RNA, 17 nt, Human
ugagucaccaagcccag

SEQ ID NO: 2107239 - RNA, 16 nt, Human
ugagucaccaagccca

SEQ ID NO: 2107240 - RNA, 17 nt, Human
ugaguauguggaaggca

SEQ ID NO: 2107241 - RNA, 15 nt, Human
ugaguaucuccucgc

SEQ ID NO: 2107242 - RNA, 21 nt, Human
ugaguaucuccucgcaagcug

SEQ ID NO: 2107243 - RNA, 14 nt, Human
ugagucaccaagcc

SEQ ID NO: 2107244 - RNA, 15 nt, Human
agccacggccaggcc

SEQ ID NO: 2107245 - RNA, 21 nt, Human
ugauccaugaguuugcccugg

SEQ ID NO: 2107246 - RNA, 15 nt, Human
ugaucgugcuaaauu

SEQ ID NO: 2107247 - RNA, 17 nt, Human
ugaugaagggaggaggu

SEQ ID NO: 2107248 - RNA, 16 nt, Human
ugaugagcuccucuuc

SEQ ID NO: 2107249 - RNA, 12 nt, Human
ugaugaaucuug

SEQ ID NO: 2107250 - RNA, 13 nt, Human
ugaugaaucuugc

SEQ ID NO: 2107251 - RNA, 14 nt, Human
agccacggccaggc

SEQ ID NO: 2107252 - RNA, 18 nt, Human
agccaccucucuuuuuca

SEQ ID NO: 2107253 - RNA, 13 nt, Human
agccaccuguccc

SEQ ID NO: 2107254 - RNA, 14 nt, Human
agccaccuguccca

SEQ ID NO: 2107255 - RNA, 15 nt, Human
agccaccugucccac

SEQ ID NO: 2107256 - RNA, 16 nt, Human
agccaccugucccacc

SEQ ID NO: 2107257 - RNA, 18 nt, Human
agccaccugucccaccuc

SEQ ID NO: 2107258 - RNA, 19 nt, Human
agccaccugucccaccuca

SEQ ID NO: 2107259 - RNA, 14 nt, Human
agccaccucucuuu

SEQ ID NO: 2107260 - RNA, 21 nt, Human
agccacaugggaaacuuccaa

SEQ ID NO: 2107261 - RNA, 14 nt, Human
agccacccucccag

SEQ ID NO: 2107262 - RNA, 17 nt, Human
agccacccucccagcuc

SEQ ID NO: 2107263 - RNA, 18 nt, Human
agccacccucccagcucu

SEQ ID NO: 2107264 - RNA, 19 nt, Human
agccacccucccagcucug

SEQ ID NO: 2107265 - RNA, 20 nt, Human
agccacccucccagcucuga

SEQ ID NO: 2107266 - RNA, 16 nt, Human
agccacugaagcuggg

SEQ ID NO: 2107267 - RNA, 13 nt, Human
agccacucuguuc

SEQ ID NO: 2107268 - RNA, 15 nt, Human
agccacucuguuccu

SEQ ID NO: 2107269 - RNA, 12 nt, Human
agccacugaagc

SEQ ID NO: 2107270 - RNA, 13 nt, Human
agccacugaagcu

SEQ ID NO: 2107271 - RNA, 21 nt, Human
ugauuaauucaccuuccagug

SEQ ID NO: 2107272 - RNA, 13 nt, Human
ugauuacacaguu

SEQ ID NO: 2107273 - RNA, 14 nt, Human
ugauuacacaguug

SEQ ID NO: 2107274 - RNA, 22 nt, Human
agccacugcaccgggccacaga

SEQ ID NO: 2107275 - RNA, 21 nt, Human
agccacugcaccgggccacag

SEQ ID NO: 2107276 - RNA, 13 nt, Human
agccacugcaccg

SEQ ID NO: 2107277 - RNA, 23 nt, Human
agccacuuaccuucaauaaagua

SEQ ID NO: 2107278 - RNA, 19 nt, Human
agccagaaauaaaguuggu

SEQ ID NO: 2107279 - RNA, 16 nt, Human
agccagaaccccgagc

SEQ ID NO: 2107280 - RNA, 20 nt, Human
agccagaaccccgagcccua

SEQ ID NO: 2107281 - RNA, 23 nt, Human
agccagaaauaaaguuggugaca

SEQ ID NO: 2107282 - RNA, 13 nt, Human
agccacuuaccuu

SEQ ID NO: 2107283 - RNA, 15 nt, Human
agccacuuaccuuca

SEQ ID NO: 2107284 - RNA, 16 nt, Human
agccacuuaccuucaa

SEQ ID NO: 2107285 - RNA, 17 nt, Human
agccacuuaccuucaau

SEQ ID NO: 2107286 - RNA, 18 nt, Human
agccacuuaccuucaaua

SEQ ID NO: 2107287 - RNA, 21 nt, Human
agccacuuaccuucaauaaag

SEQ ID NO: 2107288 - RNA, 22 nt, Human
agccacuuaccuucaauaaagu

SEQ ID NO: 2107289 - RNA, 16 nt, Human
ugauguuuguggccuc

SEQ ID NO: 2107290 - RNA, 13 nt, Human
ugauguuuguccu

SEQ ID NO: 2107291 - RNA, 11 nt, Human
ugauguuugug

SEQ ID NO: 2107292 - RNA, 17 nt, Human
ugauguuuguggccuca

SEQ ID NO: 2107293 - RNA, 18 nt, Human
ugauguuuguggccucag

SEQ ID NO: 2107294 - RNA, 19 nt, Human
ugauguuuguggccucaga

SEQ ID NO: 2107295 - RNA, 20 nt, Human
ugauguuuguggccucagaa

SEQ ID NO: 2107296 - RNA, 14 nt, Human
ugaugauaaugaug

SEQ ID NO: 2107297 - RNA, 21 nt, Human
ugaugaucagcuguuugucau

SEQ ID NO: 2107298 - RNA, 18 nt, Human
ugauguuuuccuauaaua

SEQ ID NO: 2107299 - RNA, 14 nt, Human
ugaugauccuaggc

SEQ ID NO: 2107300 - RNA, 17 nt, Human
ugaugaguguaacaaga

SEQ ID NO: 2107301 - RNA, 18 nt, Human
ugaugaguguaacaagaa

SEQ ID NO: 2107302 - RNA, 19 nt, Human
ugaugaguguaacaagaaa

SEQ ID NO: 2107303 - RNA, 21 nt, Human
ugaugaguguaacaagaaagg

SEQ ID NO: 2107304 - RNA, 22 nt, Human
ugaugaguguaacaagaaagga

SEQ ID NO: 2107305 - RNA, 20 nt, Human
ugaugauccuaggcauuugc

SEQ ID NO: 2107306 - RNA, 12 nt, Human
agccagaagcug

SEQ ID NO: 2107307 - RNA, 14 nt, Human
agccagaagcugag

SEQ ID NO: 2107308 - RNA, 20 nt, Human
agccagaagcugagcaccag

SEQ ID NO: 2107309 - RNA, 15 nt, Human
agccagaagcugagc

SEQ ID NO: 2107310 - RNA, 21 nt, Human
agccagacagcaacggggagg

SEQ ID NO: 2107311 - RNA, 20 nt, Human
agccagcugccgaccagagc

SEQ ID NO: 2107312 - RNA, 16 nt, Human
agccagcugccgacca

SEQ ID NO: 2107313 - RNA, 19 nt, Human
agccagcugcagcugggcu

SEQ ID NO: 2107314 - RNA, 20 nt, Human
agccagcugcagcugggcug

SEQ ID NO: 2107315 - RNA, 18 nt, Human
agccaggagcugggcaga

SEQ ID NO: 2107316 - RNA, 14 nt, Human
agccaggagcuggg

SEQ ID NO: 2107317 - RNA, 12 nt, Human
agccagucuuaa

SEQ ID NO: 2107318 - RNA, 15 nt, Human
agccagucuuaacau

SEQ ID NO: 2107319 - RNA, 17 nt, Human
agccagugaccugagga

SEQ ID NO: 2107320 - RNA, 18 nt, Human
agccagugaccugaggaa

SEQ ID NO: 2107321 - RNA, 19 nt, Human
agccagugaccugaggaag

SEQ ID NO: 2107322 - RNA, 21 nt, Human
agccagugaccugaggaagcg

SEQ ID NO: 2107323 - RNA, 22 nt, Human
agccaggccugggucugugucu

SEQ ID NO: 2107324 - RNA, 15 nt, Human
agccaggcucaggcc

SEQ ID NO: 2107325 - RNA, 12 nt, Human
agccagggucuc

SEQ ID NO: 2107326 - RNA, 12 nt, Human
agccaggccugg

SEQ ID NO: 2107327 - RNA, 22 nt, Human
agcccacuucugccauauucug

SEQ ID NO: 2107328 - RNA, 12 nt, Human
agcccagacaaa

SEQ ID NO: 2107329 - RNA, 14 nt, Human
agccauguuuaaga

SEQ ID NO: 2107330 - RNA, 15 nt, Human
agccauguuuaagau

SEQ ID NO: 2107331 - RNA, 16 nt, Human
agccauguuuaagauu

SEQ ID NO: 2107332 - RNA, 17 nt, Human
agccauguuuaagauuu

SEQ ID NO: 2107333 - RNA, 18 nt, Human
agccauguuuaagauuua

SEQ ID NO: 2107334 - RNA, 19 nt, Human
agccauguuuaagauuuaa

SEQ ID NO: 2107335 - RNA, 20 nt, Human
agccauguuuaagauuuaau

SEQ ID NO: 2107336 - RNA, 22 nt, Human
agccauguuuaagauuuaauuu

SEQ ID NO: 2107337 - RNA, 14 nt, Human
agcccagcccagcu

SEQ ID NO: 2107338 - RNA, 15 nt, Human
agcccagcccagcug

SEQ ID NO: 2107339 - RNA, 23 nt, Human
agcccagccauuaccauggagac

SEQ ID NO: 2107340 - RNA, 16 nt, Human
agcccagcccagcugc

SEQ ID NO: 2107341 - RNA, 17 nt, Human
agcccagcccagcugcu

SEQ ID NO: 2107342 - RNA, 18 nt, Human
agcccagcccagcugcuc

SEQ ID NO: 2107343 - RNA, 16 nt, Human
agcccagcccagcugg

SEQ ID NO: 2107344 - RNA, 13 nt, Human
agcccagcuccag

SEQ ID NO: 2107345 - RNA, 14 nt, Human
agcccagcuccagg

SEQ ID NO: 2107346 - RNA, 15 nt, Human
agcccagcuccaggg

SEQ ID NO: 2107347 - RNA, 16 nt, Human
agcccagcuccagggc

SEQ ID NO: 2107348 - RNA, 17 nt, Human
agcccagcuccagggcc

SEQ ID NO: 2107349 - RNA, 18 nt, Human
agcccagcuccagggcca

SEQ ID NO: 2107350 - RNA, 12 nt, Human
agcccagcugcu

SEQ ID NO: 2107351 - RNA, 14 nt, Human
agcccagcugcucu

SEQ ID NO: 2107352 - RNA, 15 nt, Human
agcccagcugcucug

SEQ ID NO: 2107353 - RNA, 16 nt, Human
agcccagcugcucugc

SEQ ID NO: 2107354 - RNA, 18 nt, Human
agcccagcugcucugccc

SEQ ID NO: 2107355 - RNA, 19 nt, Human
agcccagcugcucugccca

SEQ ID NO: 2107356 - RNA, 20 nt, Human
agcccagcugcucugcccag

SEQ ID NO: 2107357 - RNA, 21 nt, Human
agcccagcugcucugcccaga

SEQ ID NO: 2107358 - RNA, 22 nt, Human
agcccagcugcucugcccagag

SEQ ID NO: 2107359 - RNA, 23 nt, Human
agcccagcugcucugcccagagc

SEQ ID NO: 2107360 - RNA, 15 nt, Human
agcccagcccuguuc

SEQ ID NO: 2107361 - RNA, 16 nt, Human
agcccagcccuguucu

SEQ ID NO: 2107362 - RNA, 17 nt, Human
agcccagcccuguucug

SEQ ID NO: 2107363 - RNA, 13 nt, Human
ugauucagcucug

SEQ ID NO: 2107364 - RNA, 14 nt, Human
ugauucagcucugc

SEQ ID NO: 2107365 - RNA, 24 nt, Human
agcccaggaauuugaagcugcagu

SEQ ID NO: 2107366 - RNA, 18 nt, Human
ugauucccaagcucugcu

SEQ ID NO: 2107367 - RNA, 16 nt, Human
ugauucccaagcucug

SEQ ID NO: 2107368 - RNA, 15 nt, Human
ugauucccaagcucu

SEQ ID NO: 2107369 - RNA, 17 nt, Human
ugauucauaauaaauau

SEQ ID NO: 2107370 - RNA, 21 nt, Human
ugauucccaagcucugcuccu

SEQ ID NO: 2107371 - RNA, 19 nt, Human
ugauucccaagcucugcuc

SEQ ID NO: 2107372 - RNA, 13 nt, Human
ugauuccaucucc

SEQ ID NO: 2107373 - RNA, 16 nt, Human
ugauuccaucuccuug

SEQ ID NO: 2107374 - RNA, 12 nt, Human
agcuagaaauga

SEQ ID NO: 2107375 - RNA, 13 nt, Human
agcuacuuuguuu

SEQ ID NO: 2107376 - RNA, 15 nt, Human
agcuagaagugggcc

SEQ ID NO: 2107377 - RNA, 19 nt, Human
agcuagaagugggccagga

SEQ ID NO: 2107378 - RNA, 21 nt, Human
agcuagaagugggccaggaca

SEQ ID NO: 2107379 - RNA, 22 nt, Human
agcuagaagugggccaggacag

SEQ ID NO: 2107380 - RNA, 24 nt, Human
agcuagaagugggccaggacaggc

SEQ ID NO: 2107381 - RNA, 11 nt, Human
agcuagaaaug

SEQ ID NO: 2107382 - RNA, 16 nt, Human
agcuacuugggaggcu

SEQ ID NO: 2107383 - RNA, 13 nt, Human
agcuacuaaugau

SEQ ID NO: 2107384 - RNA, 16 nt, Human
agcuacuaaugauguu

SEQ ID NO: 2107385 - RNA, 18 nt, Human
agcuacuaaugauguuuu

SEQ ID NO: 2107386 - RNA, 17 nt, Human
agcuacuugggaggcug

SEQ ID NO: 2107387 - RNA, 20 nt, Human
agcuagcgcugccgcacccc

SEQ ID NO: 2107388 - RNA, 21 nt, Human
agcuagcgcugccgcacccca

SEQ ID NO: 2107389 - RNA, 19 nt, Human
agcuagcaaaagaaguaac

SEQ ID NO: 2107390 - RNA, 20 nt, Human
agcuagcaaaagaaguaaca

SEQ ID NO: 2107391 - RNA, 23 nt, Human
agcuagcaaaagaaguaacaaga

SEQ ID NO: 2107392 - RNA, 14 nt, Human
agcuagcgcugccg

SEQ ID NO: 2107393 - RNA, 16 nt, Human
agcuagcgcugccgca

SEQ ID NO: 2107394 - RNA, 18 nt, Human
agcuagcgcugccgcacc

SEQ ID NO: 2107395 - RNA, 20 nt, Human
agcuagaggaaccaaccccc

SEQ ID NO: 2107396 - RNA, 14 nt, Human
agcuagagcuucaa

SEQ ID NO: 2107397 - RNA, 15 nt, Human
agcuagagcuucaag

SEQ ID NO: 2107398 - RNA, 12 nt, Human
agcuagaggaac

SEQ ID NO: 2107399 - RNA, 16 nt, Human
agcuaccucaaacuuc

SEQ ID NO: 2107400 - RNA, 23 nt, Human
agcguagcuaagugaaaagguca

SEQ ID NO: 2107401 - RNA, 22 nt, Human
agcgugagccacugcaccgggc

SEQ ID NO: 2107402 - RNA, 15 nt, Human
agcgugcauaaguua

SEQ ID NO: 2107403 - RNA, 19 nt, Human
agcgugagccacugcaccg

SEQ ID NO: 2107404 - RNA, 19 nt, Human
agcgguuuggggagcagag

SEQ ID NO: 2107405 - RNA, 14 nt, Human
agcguagccucucc

SEQ ID NO: 2107406 - RNA, 18 nt, Human
agcguacucaucaucaac

SEQ ID NO: 2107407 - RNA, 22 nt, Human
agcgguuuggggagcagagaca

SEQ ID NO: 2107408 - RNA, 23 nt, Human
ugccacuuugguacauggccagu

SEQ ID NO: 2107409 - RNA, 23 nt, Human
ugccacacuucaggcucuucucc

SEQ ID NO: 2107410 - RNA, 22 nt, Human
ugccacacuucaggcucuucuc

SEQ ID NO: 2107411 - RNA, 12 nt, Human
ugccagacaugu

SEQ ID NO: 2107412 - RNA, 13 nt, Human
ugccagacaugug

SEQ ID NO: 2107413 - RNA, 14 nt, Human
ugccagaacaguuu

SEQ ID NO: 2107414 - RNA, 18 nt, Human
ugccagaacaguuuguac

SEQ ID NO: 2107415 - RNA, 19 nt, Human
ugccagaacaguuuguaca

SEQ ID NO: 2107416 - RNA, 20 nt, Human
ugccagaacaguuuguacag

SEQ ID NO: 2107417 - RNA, 21 nt, Human
ugccagacggcacccacccag

SEQ ID NO: 2107418 - RNA, 13 nt, Human
agcggggggaggg

SEQ ID NO: 2107419 - RNA, 14 nt, Human
agcggggggagggu

SEQ ID NO: 2107420 - RNA, 14 nt, Human
agcgguuuggggag

SEQ ID NO: 2107421 - RNA, 16 nt, Human
ugcccacaggaucagu

SEQ ID NO: 2107422 - RNA, 19 nt, Human
ugcccacaggaucagucug

SEQ ID NO: 2107423 - RNA, 20 nt, Human
ugcccacaggaucagucuga

SEQ ID NO: 2107424 - RNA, 23 nt, Human
ugcccaagaauagaugcugacug

SEQ ID NO: 2107425 - RNA, 22 nt, Human
ugcccaagaauagaugcugacu

SEQ ID NO: 2107426 - RNA, 21 nt, Human
ugcccaagaauagaugcugac

SEQ ID NO: 2107427 - RNA, 19 nt, Human
agcucaguuuauccaaggu

SEQ ID NO: 2107428 - RNA, 19 nt, Human
agcucauguagcaaucaga

SEQ ID NO: 2107429 - RNA, 21 nt, Human
agcucauuauaaugucauuaa

SEQ ID NO: 2107430 - RNA, 21 nt, Human
agcucaggugucccugcacuu

SEQ ID NO: 2107431 - RNA, 20 nt, Human
agcucaggugucccugcacu

SEQ ID NO: 2107432 - RNA, 22 nt, Human
agcucaggugucccugcacuug

SEQ ID NO: 2107433 - RNA, 18 nt, Human
agcucagucuucccuagg

SEQ ID NO: 2107434 - RNA, 21 nt, Human
agcucagucuucccuagggcu

SEQ ID NO: 2107435 - RNA, 22 nt, Human
agcucagucuucccuagggcug

SEQ ID NO: 2107436 - RNA, 23 nt, Human
agcucagucuucccuagggcugg

SEQ ID NO: 2107437 - RNA, 13 nt, Human
agcucagucccau

SEQ ID NO: 2107438 - RNA, 21 nt, Human
agcucagucccaucagagagc

SEQ ID NO: 2107439 - RNA, 18 nt, Human
agcucaggugucccugca

SEQ ID NO: 2107440 - RNA, 20 nt, Human
agcucagcuuuuugucuuuu

SEQ ID NO: 2107441 - RNA, 22 nt, Human
agcucagcuuuuugucuuuucu

SEQ ID NO: 2107442 - RNA, 15 nt, Human
agcuaggccuggcca

SEQ ID NO: 2107443 - RNA, 14 nt, Human
agcuaggccuggcc

SEQ ID NO: 2107444 - RNA, 16 nt, Human
agcuaggccuggccag

SEQ ID NO: 2107445 - RNA, 12 nt, Human
agcuaggccugg

SEQ ID NO: 2107446 - RNA, 22 nt, Human
agccuugguguccaccuggccc

SEQ ID NO: 2107447 - RNA, 19 nt, Human
agccuugguguccaccugg

SEQ ID NO: 2107448 - RNA, 21 nt, Human
agccuugguguccaccuggcc

SEQ ID NO: 2107449 - RNA, 16 nt, Human
agccuuccacacucac

SEQ ID NO: 2107450 - RNA, 16 nt, Human
agccuugguguccacc

SEQ ID NO: 2107451 - RNA, 17 nt, Human
agccuugguguccaccu

SEQ ID NO: 2107452 - RNA, 18 nt, Human
agccuugguguccaccug

SEQ ID NO: 2107453 - RNA, 18 nt, Human
agcggagacggaguccca

SEQ ID NO: 2107454 - RNA, 15 nt, Human
agcgccugccccucc

SEQ ID NO: 2107455 - RNA, 18 nt, Human
agcgccugccccucccag

SEQ ID NO: 2107456 - RNA, 23 nt, Human
agcgccuaguggggucucccucu

SEQ ID NO: 2107457 - RNA, 12 nt, Human
agcgccugcccc

SEQ ID NO: 2107458 - RNA, 19 nt, Human
agcgccugccccucccaga

SEQ ID NO: 2107459 - RNA, 20 nt, Human
agccuugguucaucaguguu

SEQ ID NO: 2107460 - RNA, 13 nt, Human
ugcauugaauaua

SEQ ID NO: 2107461 - RNA, 14 nt, Human
ugcauugaauauau

SEQ ID NO: 2107462 - RNA, 16 nt, Human
ugcauugaauauauua

SEQ ID NO: 2107463 - RNA, 23 nt, Human
agcggagguugcagggagccgag

SEQ ID NO: 2107464 - RNA, 15 nt, Human
ugcauugaauauauu

SEQ ID NO: 2107465 - RNA, 15 nt, Human
ugcauugagaacugc

SEQ ID NO: 2107466 - RNA, 17 nt, Human
ugcauugagaacugcau

SEQ ID NO: 2107467 - RNA, 23 nt, Human
ugcauugccugcggucaaggcca

SEQ ID NO: 2107468 - RNA, 16 nt, Human
ugccacacuucaggcu

SEQ ID NO: 2107469 - RNA, 15 nt, Human
ugccacacuucaggc

SEQ ID NO: 2107470 - RNA, 14 nt, Human
ugccacacuucagg

SEQ ID NO: 2107471 - RNA, 13 nt, Human
ugccacacuucag

SEQ ID NO: 2107472 - RNA, 14 nt, Human
agccuggugcugcu

SEQ ID NO: 2107473 - RNA, 15 nt, Human
agccuggugcugcug

SEQ ID NO: 2107474 - RNA, 16 nt, Human
agccuggugcugcugc

SEQ ID NO: 2107475 - RNA, 21 nt, Human
agccugugccucugggacugg

SEQ ID NO: 2107476 - RNA, 11 nt, Human
agccugguggg

SEQ ID NO: 2107477 - RNA, 14 nt, Human
agccuggugggccu

SEQ ID NO: 2107478 - RNA, 16 nt, Human
agccuggugggccucc

SEQ ID NO: 2107479 - RNA, 18 nt, Human
agccuggugggccuccuc

SEQ ID NO: 2107480 - RNA, 21 nt, Human
agccuggugggccuccucugu

SEQ ID NO: 2107481 - RNA, 22 nt, Human
agccuggugggccuccucuguc

SEQ ID NO: 2107482 - RNA, 11 nt, Human
agccuguggca

SEQ ID NO: 2107483 - RNA, 22 nt, Human
agccuguggcaguaaagagaaa

SEQ ID NO: 2107484 - RNA, 23 nt, Human
agccuguggcaguaaagagaaac

SEQ ID NO: 2107485 - RNA, 24 nt, Human
agccuguggcaguaaagagaaacu

SEQ ID NO: 2107486 - RNA, 14 nt, Human
agccuguggcaucu

SEQ ID NO: 2107487 - RNA, 22 nt, Human
agccuguggcaucuuugccuug

SEQ ID NO: 2107488 - RNA, 17 nt, Human
agccuguggcggugccu

SEQ ID NO: 2107489 - RNA, 21 nt, Human
agccuguggcaucuuugccuu

SEQ ID NO: 2107490 - RNA, 22 nt, Human
agccuguggcggugccugggug

SEQ ID NO: 2107491 - RNA, 18 nt, Human
agccuguggcggugccug

SEQ ID NO: 2107492 - RNA, 19 nt, Human
agccuguggcggugccugg

SEQ ID NO: 2107493 - RNA, 20 nt, Human
agccuguggcggugccuggg

SEQ ID NO: 2107494 - RNA, 23 nt, Human
agccuucagucuugaauuucuaa

SEQ ID NO: 2107495 - RNA, 18 nt, Human
ugcauaccaaccugggca

SEQ ID NO: 2107496 - RNA, 14 nt, Human
ugcauaccaaccug

SEQ ID NO: 2107497 - RNA, 12 nt, Human
ugcauaccaacc

SEQ ID NO: 2107498 - RNA, 16 nt, Human
ugcauacauacacaua

SEQ ID NO: 2107499 - RNA, 15 nt, Human
agccugcuccagcug

SEQ ID NO: 2107500 - RNA, 16 nt, Human
agccugcuccagcugu

SEQ ID NO: 2107501 - RNA, 17 nt, Human
agccugcuccagcuguu

SEQ ID NO: 2107502 - RNA, 22 nt, Human
agccugggugacagagcaagug

SEQ ID NO: 2107503 - RNA, 23 nt, Human
agccugcucccccacccccuccc

SEQ ID NO: 2107504 - RNA, 19 nt, Human
agccugcucccccaccccc

SEQ ID NO: 2107505 - RNA, 21 nt, Human
agccugcucccccacccccuc

SEQ ID NO: 2107506 - RNA, 11 nt, Human
agccugcuccc

SEQ ID NO: 2107507 - RNA, 14 nt, Human
agccugcuccccca

SEQ ID NO: 2107508 - RNA, 15 nt, Human
agccugcucccccac

SEQ ID NO: 2107509 - RNA, 17 nt, Human
agccugcucccccaccc

SEQ ID NO: 2107510 - RNA, 19 nt, Human
agccugcuccagcuguuca

SEQ ID NO: 2107511 - RNA, 22 nt, Human
agccugcuccagcuguucagcu

SEQ ID NO: 2107512 - RNA, 19 nt, Human
ugauucuccugccucagcc

SEQ ID NO: 2107513 - RNA, 15 nt, Human
ugauucuccugccuc

SEQ ID NO: 2107514 - RNA, 21 nt, Human
ugauucgcccaaagccagaca

SEQ ID NO: 2107515 - RNA, 22 nt, Human
ugauucgcccaaagccagacag

SEQ ID NO: 2107516 - RNA, 15 nt, Human
ugauucgagcuauau

SEQ ID NO: 2107517 - RNA, 16 nt, Human
ugauucgagcuauauu

SEQ ID NO: 2107518 - RNA, 23 nt, Human
ugauucgagcuauauuuaaguau

SEQ ID NO: 2107519 - RNA, 16 nt, Human
ugauucgcccaaagcc

SEQ ID NO: 2107520 - RNA, 20 nt, Human
ugauucuccugccucagccu

SEQ ID NO: 2107521 - RNA, 17 nt, Human
agcccaggguuccccca

SEQ ID NO: 2107522 - RNA, 23 nt, Human
agcccaggguucccccagcccug

SEQ ID NO: 2107523 - RNA, 18 nt, Human
agcccaggguucccccag

SEQ ID NO: 2107524 - RNA, 19 nt, Human
agcccaggguucccccagc

SEQ ID NO: 2107525 - RNA, 21 nt, Human
agcccaggguucccccagccc

SEQ ID NO: 2107526 - RNA, 22 nt, Human
agcccaggguucccccagcccu

SEQ ID NO: 2107527 - RNA, 13 nt, Human
agcccaucaauua

SEQ ID NO: 2107528 - RNA, 17 nt, Human
agcccaucuugccucca

SEQ ID NO: 2107529 - RNA, 19 nt, Human
agcccaucuugccuccaug

SEQ ID NO: 2107530 - RNA, 11 nt, Human
agcccaugccc

SEQ ID NO: 2107531 - RNA, 22 nt, Human
agcccaugcccaccugcccauc

SEQ ID NO: 2107532 - RNA, 16 nt, Human
agcccaugcccaccug

SEQ ID NO: 2107533 - RNA, 20 nt, Human
agcccaugcccaccugccca

SEQ ID NO: 2107534 - RNA, 20 nt, Human
agccccgcaaaacccacuga

SEQ ID NO: 2107535 - RNA, 13 nt, Human
agccccucccacc

SEQ ID NO: 2107536 - RNA, 14 nt, Human
agccccucccacca

SEQ ID NO: 2107537 - RNA, 18 nt, Human
agccccucccaccacagc

SEQ ID NO: 2107538 - RNA, 18 nt, Human
agccccugccccucaugc

SEQ ID NO: 2107539 - RNA, 19 nt, Human
agccccugccccucaugcc

SEQ ID NO: 2107540 - RNA, 16 nt, Human
agccccucccaccaca

SEQ ID NO: 2107541 - RNA, 17 nt, Human
agccccucccaccacag

SEQ ID NO: 2107542 - RNA, 16 nt, Human
agccccgaggccuucu

SEQ ID NO: 2107543 - RNA, 22 nt, Human
agccccgaggccuucucugaag

SEQ ID NO: 2107544 - RNA, 17 nt, Human
agccccgaggccuucuc

SEQ ID NO: 2107545 - RNA, 18 nt, Human
ugcacacucacuggcauc

SEQ ID NO: 2107546 - RNA, 18 nt, Human
ugcacacuccccugcacu

SEQ ID NO: 2107547 - RNA, 21 nt, Human
ugcacacuagccucuccagga

SEQ ID NO: 2107548 - RNA, 21 nt, Human
ugcacacuccccugcacugga

SEQ ID NO: 2107549 - RNA, 19 nt, Human
ugcacacuagccucuccag

SEQ ID NO: 2107550 - RNA, 23 nt, Human
ugcaccauugcgcucuagccugg

SEQ ID NO: 2107551 - RNA, 17 nt, Human
ugcacccacccaggagu

SEQ ID NO: 2107552 - RNA, 18 nt, Human
ugcacccacccaggagug

SEQ ID NO: 2107553 - RNA, 21 nt, Human
ugcacccacucugcuuugacu

SEQ ID NO: 2107554 - RNA, 14 nt, Human
ugcacacagugcuu

SEQ ID NO: 2107555 - RNA, 19 nt, Human
ugcacacauuaggcauuga

SEQ ID NO: 2107556 - RNA, 15 nt, Human
ugcacgugugugcac

SEQ ID NO: 2107557 - RNA, 14 nt, Human
ugcacgugugugca

SEQ ID NO: 2107558 - RNA, 16 nt, Human
ugcacccuccgccuuc

SEQ ID NO: 2107559 - RNA, 16 nt, Human
ugcacguggcuucuga

SEQ ID NO: 2107560 - RNA, 18 nt, Human
ugcacguggcuucugaug

SEQ ID NO: 2107561 - RNA, 12 nt, Human
ugcacgugugca

SEQ ID NO: 2107562 - RNA, 14 nt, Human
ugcacccuccgccu

SEQ ID NO: 2107563 - RNA, 16 nt, Human
ugcacccucaggcagg

SEQ ID NO: 2107564 - RNA, 17 nt, Human
ugcacccucaggcaggu

SEQ ID NO: 2107565 - RNA, 23 nt, Human
agcccugguggcagugggagcug

SEQ ID NO: 2107566 - RNA, 22 nt, Human
agcccugguggcagugggagcu

SEQ ID NO: 2107567 - RNA, 15 nt, Human
ugcacaagcugcacc

SEQ ID NO: 2107568 - RNA, 14 nt, Human
agcccugucagugc

SEQ ID NO: 2107569 - RNA, 16 nt, Human
agcccugucagugcag

SEQ ID NO: 2107570 - RNA, 22 nt, Human
ugcacacaccagagcccaccuu

SEQ ID NO: 2107571 - RNA, 18 nt, Human
ugcacaagcugcacccuc

SEQ ID NO: 2107572 - RNA, 21 nt, Human
ugcacaagcugcacccucagg

SEQ ID NO: 2107573 - RNA, 23 nt, Human
agccccuugcucuccccugcccu

SEQ ID NO: 2107574 - RNA, 23 nt, Human
agcccugcuuugggcugcccugg

SEQ ID NO: 2107575 - RNA, 22 nt, Human
agcccugcuuugggcugcccug

SEQ ID NO: 2107576 - RNA, 21 nt, Human
agcccugguggcagugggagc

SEQ ID NO: 2107577 - RNA, 21 nt, Human
agcccugcuuugggcugcccu

SEQ ID NO: 2107578 - RNA, 17 nt, Human
agccccuugagaaaccu

SEQ ID NO: 2107579 - RNA, 20 nt, Human
agccccuugcucuccccugc

SEQ ID NO: 2107580 - RNA, 12 nt, Human
agccucaucucu

SEQ ID NO: 2107581 - RNA, 19 nt, Human
agccucauccgaggcaggg

SEQ ID NO: 2107582 - RNA, 23 nt, Human
agccucagcauccuggcacccgg

SEQ ID NO: 2107583 - RNA, 22 nt, Human
agccucagcauccuggcacccg

SEQ ID NO: 2107584 - RNA, 16 nt, Human
agccucccaaagugcu

SEQ ID NO: 2107585 - RNA, 20 nt, Human
agccuccauuuaguucuuug

SEQ ID NO: 2107586 - RNA, 21 nt, Human
agccuccauuuaguucuuugu

SEQ ID NO: 2107587 - RNA, 20 nt, Human
agccucauccgaggcagggu

SEQ ID NO: 2107588 - RNA, 15 nt, Human
agccuccauuuaguu

SEQ ID NO: 2107589 - RNA, 17 nt, Human
agccuccauuuaguucu

SEQ ID NO: 2107590 - RNA, 20 nt, Human
agccuccaugcugccuccag

SEQ ID NO: 2107591 - RNA, 18 nt, Human
agccuccaugcugccucc

SEQ ID NO: 2107592 - RNA, 15 nt, Human
agccuagacccuccu

SEQ ID NO: 2107593 - RNA, 18 nt, Human
agccuagacccuccuccu

SEQ ID NO: 2107594 - RNA, 19 nt, Human
agccuacuagggaccuggg

SEQ ID NO: 2107595 - RNA, 21 nt, Human
agccuacuagggaccugggga

SEQ ID NO: 2107596 - RNA, 22 nt, Human
agccuacuagggaccuggggaa

SEQ ID NO: 2107597 - RNA, 17 nt, Human
agccuagaagagcuucu

SEQ ID NO: 2107598 - RNA, 19 nt, Human
agccuagaagagcuucuga

SEQ ID NO: 2107599 - RNA, 17 nt, Human
agccuagccgaccucag

SEQ ID NO: 2107600 - RNA, 18 nt, Human
agccuagccgaccucagc

SEQ ID NO: 2107601 - RNA, 19 nt, Human
agccuagccgaccucagcc

SEQ ID NO: 2107602 - RNA, 20 nt, Human
agccuagccgaccucagccu

SEQ ID NO: 2107603 - RNA, 21 nt, Human
agccuagccgaccucagccuu

SEQ ID NO: 2107604 - RNA, 16 nt, Human
agccucagcauccugg

SEQ ID NO: 2107605 - RNA, 21 nt, Human
agccucagcauccuggcaccc

SEQ ID NO: 2107606 - RNA, 20 nt, Human
agccucagcauccuggcacc

SEQ ID NO: 2107607 - RNA, 19 nt, Human
agccucagcauccuggcac

SEQ ID NO: 2107608 - RNA, 17 nt, Human
agccucagcauccuggc

SEQ ID NO: 2107609 - RNA, 16 nt, Human
agccgaccucagccuu

SEQ ID NO: 2107610 - RNA, 14 nt, Human
agccgaccucagcc

SEQ ID NO: 2107611 - RNA, 15 nt, Human
agccgaccucagccu

SEQ ID NO: 2107612 - RNA, 13 nt, Human
agccgagagccug

SEQ ID NO: 2107613 - RNA, 14 nt, Human
agccgagagccugc

SEQ ID NO: 2107614 - RNA, 12 nt, Human
agccgaccucag

SEQ ID NO: 2107615 - RNA, 13 nt, Human
agccgaccucagc

SEQ ID NO: 2107616 - RNA, 13 nt, Human
agccguggcuucc

SEQ ID NO: 2107617 - RNA, 15 nt, Human
agccgagagccugcu

SEQ ID NO: 2107618 - RNA, 16 nt, Human
agccgagagccugcuc

SEQ ID NO: 2107619 - RNA, 17 nt, Human
agccgagagccugcucc

SEQ ID NO: 2107620 - RNA, 18 nt, Human
agccgagagccugcuccc

SEQ ID NO: 2107621 - RNA, 21 nt, Human
agccguggcuucccgcucagc

SEQ ID NO: 2107622 - RNA, 14 nt, Human
agccguggcuuccc

SEQ ID NO: 2107623 - RNA, 23 nt, Human
agccguggcuucccgcucagccc

SEQ ID NO: 2107624 - RNA, 22 nt, Human
agccguggcuucccgcucagcc

SEQ ID NO: 2107625 - RNA, 21 nt, Human
agccgagagccugcuccccca

SEQ ID NO: 2107626 - RNA, 23 nt, Human
ugcacuauagccuaggugacaga

SEQ ID NO: 2107627 - RNA, 15 nt, Human
ugcaccauugcugcu

SEQ ID NO: 2107628 - RNA, 20 nt, Human
agccugaaauagugguucuu

SEQ ID NO: 2107629 - RNA, 22 nt, Human
agccugaaauagugguucuugg

SEQ ID NO: 2107630 - RNA, 23 nt, Human
ugcagcccaugcccaccugccca

SEQ ID NO: 2107631 - RNA, 14 nt, Human
ugcagcccaugccc

SEQ ID NO: 2107632 - RNA, 18 nt, Human
ugcagcccaugcccaccu

SEQ ID NO: 2107633 - RNA, 19 nt, Human
ugcagcccaugcccaccug

SEQ ID NO: 2107634 - RNA, 21 nt, Human
ugcagcccaugcccaccugcc

SEQ ID NO: 2107635 - RNA, 19 nt, Human
ugcagcccguguggccccu

SEQ ID NO: 2107636 - RNA, 21 nt, Human
ugcagcccguguggccccuuc

SEQ ID NO: 2107637 - RNA, 23 nt, Human
ugcagcccguguggccccuucac

SEQ ID NO: 2107638 - RNA, 21 nt, Human
ugcagccccgcgccuccuucc

SEQ ID NO: 2107639 - RNA, 23 nt, Human
ugcagccuuugccuccccggcuc

SEQ ID NO: 2107640 - RNA, 19 nt, Human
ugcagcgaaccaauauuug

SEQ ID NO: 2107641 - RNA, 14 nt, Human
ugcagccuggaggc

SEQ ID NO: 2107642 - RNA, 15 nt, Human
ugcagccuggaggcc

SEQ ID NO: 2107643 - RNA, 19 nt, Human
ugcagccucgaacuccugg

SEQ ID NO: 2107644 - RNA, 20 nt, Human
ugcagccucgaacuccuggg

SEQ ID NO: 2107645 - RNA, 21 nt, Human
ugcagccucgaacuccugggc

SEQ ID NO: 2107646 - RNA, 22 nt, Human
ugcagccucgaacuccugggcu

SEQ ID NO: 2107647 - RNA, 23 nt, Human
ugcagccucgaacuccugggcuc

SEQ ID NO: 2107648 - RNA, 15 nt, Human
ugcauaacugacaaa

SEQ ID NO: 2107649 - RNA, 22 nt, Human
ugcauaacugacaaaucaaguu

SEQ ID NO: 2107650 - RNA, 23 nt, Human
ugcauaacugacaaaucaaguuu

SEQ ID NO: 2107651 - RNA, 14 nt, Human
ugcauaaguuaacu

SEQ ID NO: 2107652 - RNA, 17 nt, Human
ugcauaaguuaacuucc

SEQ ID NO: 2107653 - RNA, 14 nt, Human
ugcagucugcuucu

SEQ ID NO: 2107654 - RNA, 15 nt, Human
ugcagucugcuucug

SEQ ID NO: 2107655 - RNA, 19 nt, Human
ugcagucugcuucugcacc

SEQ ID NO: 2107656 - RNA, 18 nt, Human
ugcaguacuuuaccuccu

SEQ ID NO: 2107657 - RNA, 16 nt, Human
ugcaguagagucaucu

SEQ ID NO: 2107658 - RNA, 19 nt, Human
ugcaguagagucaucucca

SEQ ID NO: 2107659 - RNA, 22 nt, Human
ugcaguagagucaucuccauca

SEQ ID NO: 2107660 - RNA, 13 nt, Human
uggauuggauuug

SEQ ID NO: 2107661 - RNA, 17 nt, Human
uggauugguguaaaagg

SEQ ID NO: 2107662 - RNA, 17 nt, Human
uggauuaauuaaaugca

SEQ ID NO: 2107663 - RNA, 17 nt, Human
uggauuagccuggagca

SEQ ID NO: 2107664 - RNA, 13 nt, Human
uggauggcuucua

SEQ ID NO: 2107665 - RNA, 21 nt, Human
uggagguugcagugagccaag

SEQ ID NO: 2107666 - RNA, 20 nt, Human
uggagguugcagugagcuga

SEQ ID NO: 2107667 - RNA, 18 nt, Human
uggaguagaccccuggcu

SEQ ID NO: 2107668 - RNA, 20 nt, Human
uggaguagaccccuggcugg

SEQ ID NO: 2107669 - RNA, 14 nt, Human
uggaguauauguca

SEQ ID NO: 2107670 - RNA, 24 nt, Human
uggagguuaaggcugaggaaaggc

SEQ ID NO: 2107671 - RNA, 20 nt, Human
uggagguuaaggcugaggaa

SEQ ID NO: 2107672 - RNA, 21 nt, Human
uggagguuaaggcugaggaaa

SEQ ID NO: 2107673 - RNA, 22 nt, Human
uggagguuaaggcugaggaaag

SEQ ID NO: 2107674 - RNA, 14 nt, Human
uggagguugcagug

SEQ ID NO: 2107675 - RNA, 17 nt, Human
aggcagccccauucugc

SEQ ID NO: 2107676 - RNA, 16 nt, Human
aggcagccccauucug

SEQ ID NO: 2107677 - RNA, 21 nt, Human
aggcaccuauaaaacagguca

SEQ ID NO: 2107678 - RNA, 14 nt, Human
aggccaagaggcug

SEQ ID NO: 2107679 - RNA, 14 nt, Human
aggccaagagcaga

SEQ ID NO: 2107680 - RNA, 17 nt, Human
aggccaagagcagaggc

SEQ ID NO: 2107681 - RNA, 18 nt, Human
aggccaagagcagaggca

SEQ ID NO: 2107682 - RNA, 20 nt, Human
aggccaagagcagaggcagc

SEQ ID NO: 2107683 - RNA, 16 nt, Human
aggccaaggugggagg

SEQ ID NO: 2107684 - RNA, 20 nt, Human
uggagggugggagagcccag

SEQ ID NO: 2107685 - RNA, 14 nt, Human
uggagguacacucu

SEQ ID NO: 2107686 - RNA, 19 nt, Human
uggaggggugguccugacu

SEQ ID NO: 2107687 - RNA, 20 nt, Human
uggaggggugguccugacuc

SEQ ID NO: 2107688 - RNA, 14 nt, Human
uggcaauucuuuga

SEQ ID NO: 2107689 - RNA, 18 nt, Human
uggcacagggcaguggga

SEQ ID NO: 2107690 - RNA, 23 nt, Human
uggcaauucuuugaccucaaccu

SEQ ID NO: 2107691 - RNA, 14 nt, Human
aggccagagggagu

SEQ ID NO: 2107692 - RNA, 17 nt, Human
uggcagccuuggcaaac

SEQ ID NO: 2107693 - RNA, 20 nt, Human
aggccagagggagugacaga

SEQ ID NO: 2107694 - RNA, 16 nt, Human
aggccagaguggccug

SEQ ID NO: 2107695 - RNA, 17 nt, Human
aggccagaguggccugg

SEQ ID NO: 2107696 - RNA, 13 nt, Human
aggccagccagug

SEQ ID NO: 2107697 - RNA, 22 nt, Human
aggccagccagugaccugagga

SEQ ID NO: 2107698 - RNA, 15 nt, Human
aggccagcaaggugg

SEQ ID NO: 2107699 - RNA, 17 nt, Human
aggccagcaagguggag

SEQ ID NO: 2107700 - RNA, 18 nt, Human
aggccagcaagguggagu

SEQ ID NO: 2107701 - RNA, 20 nt, Human
aggccagcaagguggagugg

SEQ ID NO: 2107702 - RNA, 22 nt, Human
aggccagcaagguggaguggau

SEQ ID NO: 2107703 - RNA, 24 nt, Human
aggccagcaagguggaguggaugc

SEQ ID NO: 2107704 - RNA, 19 nt, Human
aggccagaguggccuggcc

SEQ ID NO: 2107705 - RNA, 20 nt, Human
aggccagaguggccuggcca

SEQ ID NO: 2107706 - RNA, 21 nt, Human
aggccagaguggccuggccag

SEQ ID NO: 2107707 - RNA, 22 nt, Human
aggccagaguggccuggccagg

SEQ ID NO: 2107708 - RNA, 21 nt, Human
aggccagccccacccaggagg

SEQ ID NO: 2107709 - RNA, 17 nt, Human
aggccagccccacccag

SEQ ID NO: 2107710 - RNA, 18 nt, Human
aggccagccccacccagg

SEQ ID NO: 2107711 - RNA, 13 nt, Human
aggccagccccac

SEQ ID NO: 2107712 - RNA, 14 nt, Human
aggccagccccacc

SEQ ID NO: 2107713 - RNA, 15 nt, Human
aggccagccccaccc

SEQ ID NO: 2107714 - RNA, 16 nt, Human
aggccagccccaccca

SEQ ID NO: 2107715 - RNA, 21 nt, Human
aggccccaagggguuucuguu

SEQ ID NO: 2107716 - RNA, 21 nt, Human
aggccccaaaaccacagcccu

SEQ ID NO: 2107717 - RNA, 23 nt, Human
aggccccaaaaccacagcccugu

SEQ ID NO: 2107718 - RNA, 13 nt, Human
aggccccacuggg

SEQ ID NO: 2107719 - RNA, 15 nt, Human
aggccccacugggga

SEQ ID NO: 2107720 - RNA, 17 nt, Human
aggccccacuggggaaa

SEQ ID NO: 2107721 - RNA, 13 nt, Human
aggccccagagac

SEQ ID NO: 2107722 - RNA, 14 nt, Human
aggccccagagacu

SEQ ID NO: 2107723 - RNA, 20 nt, Human
aggccccagagacucagagg

SEQ ID NO: 2107724 - RNA, 22 nt, Human
aggccccagagacucagaggga

SEQ ID NO: 2107725 - RNA, 12 nt, Human
aggccccaggaa

SEQ ID NO: 2107726 - RNA, 18 nt, Human
aggcccaugguugagaaa

SEQ ID NO: 2107727 - RNA, 18 nt, Human
aggccccaaaaccacagc

SEQ ID NO: 2107728 - RNA, 22 nt, Human
uggcauacgccuguaguccuag

SEQ ID NO: 2107729 - RNA, 14 nt, Human
aggccccaggaagc

SEQ ID NO: 2107730 - RNA, 21 nt, Human
uggcaucuuugccuugggcug

SEQ ID NO: 2107731 - RNA, 23 nt, Human
uggcaucuuugccuugggcugcu

SEQ ID NO: 2107732 - RNA, 15 nt, Human
uggcauuucccuacu

SEQ ID NO: 2107733 - RNA, 15 nt, Human
uggcaucugacacaa

SEQ ID NO: 2107734 - RNA, 18 nt, Human
uggcaucugacacaaaaa

SEQ ID NO: 2107735 - RNA, 16 nt, Human
uggcaucuuugccuug

SEQ ID NO: 2107736 - RNA, 20 nt, Human
uggcaucuuugccuugggcu

SEQ ID NO: 2107737 - RNA, 12 nt, Human
aggccccugcca

SEQ ID NO: 2107738 - RNA, 22 nt, Human
aggccccgcuuguccagcgccu

SEQ ID NO: 2107739 - RNA, 20 nt, Human
aggccccgcuuguccagcgc

SEQ ID NO: 2107740 - RNA, 21 nt, Human
aggccccgcuuguccagcgcc

SEQ ID NO: 2107741 - RNA, 13 nt, Human
aggccccaggaag

SEQ ID NO: 2107742 - RNA, 15 nt, Human
aggccccgcuugucc

SEQ ID NO: 2107743 - RNA, 17 nt, Human
aggccccgcuuguccag

SEQ ID NO: 2107744 - RNA, 18 nt, Human
aggccccgcuuguccagc

SEQ ID NO: 2107745 - RNA, 19 nt, Human
uggccagguggccacucca

SEQ ID NO: 2107746 - RNA, 17 nt, Human
uggccagguggccacuc

SEQ ID NO: 2107747 - RNA, 16 nt, Human
uggccagguggccacu

SEQ ID NO: 2107748 - RNA, 23 nt, Human
uggccagugugacaaggauugcu

SEQ ID NO: 2107749 - RNA, 16 nt, Human
uggccagugugauccc

SEQ ID NO: 2107750 - RNA, 16 nt, Human
uggccaguuaucccuu

SEQ ID NO: 2107751 - RNA, 16 nt, Human
uggccaguuggaacca

SEQ ID NO: 2107752 - RNA, 11 nt, Human
uggccaucucu

SEQ ID NO: 2107753 - RNA, 23 nt, Human
uggccaaagccaaagcuaggccu

SEQ ID NO: 2107754 - RNA, 21 nt, Human
uggccaaagccaaagcuaggc

SEQ ID NO: 2107755 - RNA, 21 nt, Human
uggcauuugugaucaugagau

SEQ ID NO: 2107756 - RNA, 14 nt, Human
uggccaaaaagaau

SEQ ID NO: 2107757 - RNA, 22 nt, Human
uggccaaaaagaaucugcauuu

SEQ ID NO: 2107758 - RNA, 15 nt, Human
uggccagguggccac

SEQ ID NO: 2107759 - RNA, 11 nt, Human
uggccaggugg

SEQ ID NO: 2107760 - RNA, 14 nt, Human
uggccaaaguguua

SEQ ID NO: 2107761 - RNA, 18 nt, Human
uggccuuccccagccucu

SEQ ID NO: 2107762 - RNA, 18 nt, Human
uggccuguuucaacacag

SEQ ID NO: 2107763 - RNA, 18 nt, Human
uggccuuccauuuauaug

SEQ ID NO: 2107764 - RNA, 16 nt, Human
uggccuuccccagccu

SEQ ID NO: 2107765 - RNA, 17 nt, Human
uggccuuccccagccuc

SEQ ID NO: 2107766 - RNA, 17 nt, Human
uggccugggagagcugg

SEQ ID NO: 2107767 - RNA, 12 nt, Human
aggccuggggac

SEQ ID NO: 2107768 - RNA, 12 nt, Human
uggccuggcucc

SEQ ID NO: 2107769 - RNA, 14 nt, Human
uggccuggcuccgc

SEQ ID NO: 2107770 - RNA, 18 nt, Human
uggccuggcuccgcugug

SEQ ID NO: 2107771 - RNA, 13 nt, Human
uggccugggagag

SEQ ID NO: 2107772 - RNA, 16 nt, Human
uggccuaaaaaugcaa

SEQ ID NO: 2107773 - RNA, 16 nt, Human
uggcccugccuucuuc

SEQ ID NO: 2107774 - RNA, 11 nt, Human
uggcccugccu

SEQ ID NO: 2107775 - RNA, 12 nt, Human
uggcccugccuu

SEQ ID NO: 2107776 - RNA, 13 nt, Human
uggcccuggccug

SEQ ID NO: 2107777 - RNA, 14 nt, Human
uggcccuggccugc

SEQ ID NO: 2107778 - RNA, 15 nt, Human
uggcccuggccugcu

SEQ ID NO: 2107779 - RNA, 16 nt, Human
uggcccuggccugcug

SEQ ID NO: 2107780 - RNA, 17 nt, Human
uggcccuggccugcugg

SEQ ID NO: 2107781 - RNA, 18 nt, Human
uggcccuggccugcuggg

SEQ ID NO: 2107782 - RNA, 23 nt, Human
uggccgggcgcgguggcucacgc

SEQ ID NO: 2107783 - RNA, 12 nt, Human
uggcccuggggc

SEQ ID NO: 2107784 - RNA, 13 nt, Human
uggcccuggggcc

SEQ ID NO: 2107785 - RNA, 15 nt, Human
uggcccuggggccug

SEQ ID NO: 2107786 - RNA, 16 nt, Human
uggcccuggggccugu

SEQ ID NO: 2107787 - RNA, 20 nt, Human
uggccaugguccccaagacc

SEQ ID NO: 2107788 - RNA, 13 nt, Human
uggcccacgcacu

SEQ ID NO: 2107789 - RNA, 22 nt, Human
uggccaugccacccuguuuuca

SEQ ID NO: 2107790 - RNA, 18 nt, Human
aggagcugggauccuaag

SEQ ID NO: 2107791 - RNA, 20 nt, Human
aggagcugggcagaaggcca

SEQ ID NO: 2107792 - RNA, 21 nt, Human
aggagcugcuggcuugcagug

SEQ ID NO: 2107793 - RNA, 16 nt, Human
aggagcugggaggaaa

SEQ ID NO: 2107794 - RNA, 17 nt, Human
aggagcugggaggaaaa

SEQ ID NO: 2107795 - RNA, 19 nt, Human
aggagcugggggcagccug

SEQ ID NO: 2107796 - RNA, 17 nt, Human
aggagcuuaccucccac

SEQ ID NO: 2107797 - RNA, 18 nt, Human
aggagcuuaccucccacc

SEQ ID NO: 2107798 - RNA, 20 nt, Human
aggagcuuaccucccaccuu

SEQ ID NO: 2107799 - RNA, 13 nt, Human
aggagcugagaau

SEQ ID NO: 2107800 - RNA, 14 nt, Human
aggagcugagaaua

SEQ ID NO: 2107801 - RNA, 15 nt, Human
aggagcugagaauag

SEQ ID NO: 2107802 - RNA, 16 nt, Human
aggagcugagaauaga

SEQ ID NO: 2107803 - RNA, 17 nt, Human
aggagcugagaauagaa

SEQ ID NO: 2107804 - RNA, 18 nt, Human
aggagcugagaauagaag

SEQ ID NO: 2107805 - RNA, 22 nt, Human
aggagcugagaauagaaggaaa

SEQ ID NO: 2107806 - RNA, 23 nt, Human
aggagcugagaauagaaggaaac

SEQ ID NO: 2107807 - RNA, 17 nt, Human
aggagcucuucaggccu

SEQ ID NO: 2107808 - RNA, 19 nt, Human
aggagcucuucaggccucc

SEQ ID NO: 2107809 - RNA, 21 nt, Human
aggagcucuucaggccucccu

SEQ ID NO: 2107810 - RNA, 13 nt, Human
aggauacucuguc

SEQ ID NO: 2107811 - RNA, 16 nt, Human
aggauacucugucaga

SEQ ID NO: 2107812 - RNA, 16 nt, Human
aggauagauaacucuu

SEQ ID NO: 2107813 - RNA, 20 nt, Human
aggauagauaacucuuugga

SEQ ID NO: 2107814 - RNA, 17 nt, Human
uggaagggaagaaaagg

SEQ ID NO: 2107815 - RNA, 15 nt, Human
uggaagggacuagga

SEQ ID NO: 2107816 - RNA, 11 nt, Human
uggaagcacag

SEQ ID NO: 2107817 - RNA, 22 nt, Human
uggaagcacagaaaacuagaau

SEQ ID NO: 2107818 - RNA, 11 nt, Human
uggaaggaaag

SEQ ID NO: 2107819 - RNA, 14 nt, Human
uggaaggaaagaug

SEQ ID NO: 2107820 - RNA, 15 nt, Human
uggaaggaaagaugc

SEQ ID NO: 2107821 - RNA, 15 nt, Human
uggaaggguuugugg

SEQ ID NO: 2107822 - RNA, 17 nt, Human
uggaaggguuuguggcu

SEQ ID NO: 2107823 - RNA, 21 nt, Human
uggaagguuuguauauuguca

SEQ ID NO: 2107824 - RNA, 22 nt, Human
uggaagauuugcccauuuacac

SEQ ID NO: 2107825 - RNA, 23 nt, Human
uggaagauuugcccauuuacacu

SEQ ID NO: 2107826 - RNA, 14 nt, Human
uggaagauuuuaaa

SEQ ID NO: 2107827 - RNA, 16 nt, Human
uggaagauuuuaaauu

SEQ ID NO: 2107828 - RNA, 16 nt, Human
uggaagcacagcuuca

SEQ ID NO: 2107829 - RNA, 21 nt, Human
ugcuugaggcaacucaucuua

SEQ ID NO: 2107830 - RNA, 20 nt, Human
aggacauaaauuagaggucu

SEQ ID NO: 2107831 - RNA, 15 nt, Human
ugcuugaugguuuau

SEQ ID NO: 2107832 - RNA, 18 nt, Human
ugcuugaugguuuauguu

SEQ ID NO: 2107833 - RNA, 15 nt, Human
aggacagugcuucag

SEQ ID NO: 2107834 - RNA, 16 nt, Human
aggacagugcuucagc

SEQ ID NO: 2107835 - RNA, 17 nt, Human
aggacagugcuucagcc

SEQ ID NO: 2107836 - RNA, 18 nt, Human
aggacagugcuucagccu

SEQ ID NO: 2107837 - RNA, 19 nt, Human
aggacagugcuucagccug

SEQ ID NO: 2107838 - RNA, 20 nt, Human
aggacagugcuucagccuga

SEQ ID NO: 2107839 - RNA, 21 nt, Human
aggacagugcuucagccugag

SEQ ID NO: 2107840 - RNA, 22 nt, Human
aggacagugcuucagccugagg

SEQ ID NO: 2107841 - RNA, 18 nt, Human
ugcuuguaacaagaaaac

SEQ ID NO: 2107842 - RNA, 19 nt, Human
ugcuuguaacaagaaaaca

SEQ ID NO: 2107843 - RNA, 20 nt, Human
ugcuuguaacaagaaaacau

SEQ ID NO: 2107844 - RNA, 21 nt, Human
ugcuuguaacaagaaaacaua

SEQ ID NO: 2107845 - RNA, 23 nt, Human
ugcuuguaacaagaaaacauaag

SEQ ID NO: 2107846 - RNA, 21 nt, Human
ugcuuggaauaucugcuguau

SEQ ID NO: 2107847 - RNA, 19 nt, Human
ugcuuggaccucgugcuuu

SEQ ID NO: 2107848 - RNA, 20 nt, Human
ugcuuggaccucgugcuuua

SEQ ID NO: 2107849 - RNA, 21 nt, Human
ugcuuggaccucgugcuuuaa

SEQ ID NO: 2107850 - RNA, 17 nt, Human
ugcuuuuggucugugug

SEQ ID NO: 2107851 - RNA, 14 nt, Human
ugcuuuuggucugu

SEQ ID NO: 2107852 - RNA, 13 nt, Human
uggaaaggcucag

SEQ ID NO: 2107853 - RNA, 17 nt, Human
uggaaaggcucagucuc

SEQ ID NO: 2107854 - RNA, 20 nt, Human
uggaaaggcucagucucagg

SEQ ID NO: 2107855 - RNA, 21 nt, Human
uggaaaggcucagucucagga

SEQ ID NO: 2107856 - RNA, 23 nt, Human
uggaaaggcucagucucaggagc

SEQ ID NO: 2107857 - RNA, 23 nt, Human
uggaaagggugcugcuucccucu

SEQ ID NO: 2107858 - RNA, 17 nt, Human
ugcuugucccugcccag

SEQ ID NO: 2107859 - RNA, 15 nt, Human
aggcaccgagaaugu

SEQ ID NO: 2107860 - RNA, 16 nt, Human
aggcaccgagaauguu

SEQ ID NO: 2107861 - RNA, 18 nt, Human
aggcaccgagaauguugu

SEQ ID NO: 2107862 - RNA, 12 nt, Human
aggcacccaucc

SEQ ID NO: 2107863 - RNA, 21 nt, Human
aggcacccauccuagagaaaa

SEQ ID NO: 2107864 - RNA, 22 nt, Human
aggcacccauccuagagaaaac

SEQ ID NO: 2107865 - RNA, 17 nt, Human
aggcaccgcugaugggg

SEQ ID NO: 2107866 - RNA, 14 nt, Human
aggcaaucacauag

SEQ ID NO: 2107867 - RNA, 22 nt, Human
aggcacccaccaucaugucugg

SEQ ID NO: 2107868 - RNA, 21 nt, Human
aggcacccaccaucaugucug

SEQ ID NO: 2107869 - RNA, 20 nt, Human
aggcacccaccaucaugucu

SEQ ID NO: 2107870 - RNA, 14 nt, Human
aggcaaugcuggcu

SEQ ID NO: 2107871 - RNA, 21 nt, Human
uggagcgcaccugcccccugg

SEQ ID NO: 2107872 - RNA, 22 nt, Human
uggagcgcaccugcccccuggu

SEQ ID NO: 2107873 - RNA, 12 nt, Human
uggagcuccugg

SEQ ID NO: 2107874 - RNA, 13 nt, Human
uggagcuccuggg

SEQ ID NO: 2107875 - RNA, 14 nt, Human
uggagcuccuggga

SEQ ID NO: 2107876 - RNA, 17 nt, Human
uggagcuccugggaagg

SEQ ID NO: 2107877 - RNA, 18 nt, Human
uggagcuccugggaaggc

SEQ ID NO: 2107878 - RNA, 20 nt, Human
uggagcuccugggaaggcua

SEQ ID NO: 2107879 - RNA, 15 nt, Human
uggagcccuuggguu

SEQ ID NO: 2107880 - RNA, 22 nt, Human
uggagcccgcacccccacccuu

SEQ ID NO: 2107881 - RNA, 19 nt, Human
uggagcccgcacccccacc

SEQ ID NO: 2107882 - RNA, 14 nt, Human
uggagcgcaccugc

SEQ ID NO: 2107883 - RNA, 16 nt, Human
uggagcgcaccugccc

SEQ ID NO: 2107884 - RNA, 14 nt, Human
aggcaauaaaaauc

SEQ ID NO: 2107885 - RNA, 22 nt, Human
aggcaaugauuguuaauuuaca

SEQ ID NO: 2107886 - RNA, 17 nt, Human
aggcaauaaaaaucaua

SEQ ID NO: 2107887 - RNA, 18 nt, Human
aggcaaggggugccuggg

SEQ ID NO: 2107888 - RNA, 19 nt, Human
aggcaaggggugccuggga

SEQ ID NO: 2107889 - RNA, 13 nt, Human
uggagaagcggcu

SEQ ID NO: 2107890 - RNA, 22 nt, Human
uggagaagcggcuggcagccca

SEQ ID NO: 2107891 - RNA, 17 nt, Human
uggagaacuccuagggu

SEQ ID NO: 2107892 - RNA, 15 nt, Human
uggagcccagggagc

SEQ ID NO: 2107893 - RNA, 20 nt, Human
uggagcccagggagcggaaa

SEQ ID NO: 2107894 - RNA, 16 nt, Human
uggagccccacugccc

SEQ ID NO: 2107895 - RNA, 18 nt, Human
uggagccccacugcccuu

SEQ ID NO: 2107896 - RNA, 22 nt, Human
uggagccccacugcccuucuca

SEQ ID NO: 2107897 - RNA, 14 nt, Human
uggagccccaucag

SEQ ID NO: 2107898 - RNA, 17 nt, Human
uggagcccgaggcacca

SEQ ID NO: 2107899 - RNA, 18 nt, Human
uggagcccgaggcaccag

SEQ ID NO: 2107900 - RNA, 19 nt, Human
uggagcccgaggcaccagu

SEQ ID NO: 2107901 - RNA, 16 nt, Human
uggagcccgcaccccc

SEQ ID NO: 2107902 - RNA, 17 nt, Human
uggagcccgcaccccca

SEQ ID NO: 2107903 - RNA, 18 nt, Human
uggagcccgcacccccac

SEQ ID NO: 2107904 - RNA, 20 nt, Human
uggacuuuccacccccuccc

SEQ ID NO: 2107905 - RNA, 15 nt, Human
uggaauucuguucau

SEQ ID NO: 2107906 - RNA, 14 nt, Human
uggagaacuagaga

SEQ ID NO: 2107907 - RNA, 15 nt, Human
uggagaacuccuagg

SEQ ID NO: 2107908 - RNA, 17 nt, Human
uggacuugagcuuggca

SEQ ID NO: 2107909 - RNA, 16 nt, Human
uggacuuuccaccccc

SEQ ID NO: 2107910 - RNA, 18 nt, Human
uggacuuuccacccccuc

SEQ ID NO: 2107911 - RNA, 19 nt, Human
uggacuuuccacccccucc

SEQ ID NO: 2107912 - RNA, 23 nt, Human
uggacacagcucuucuccaggcu

SEQ ID NO: 2107913 - RNA, 18 nt, Human
uggacaccaggagucccu

SEQ ID NO: 2107914 - RNA, 14 nt, Human
uggacacacacagc

SEQ ID NO: 2107915 - RNA, 15 nt, Human
uggacacacacagcu

SEQ ID NO: 2107916 - RNA, 23 nt, Human
uggacccuguggaugauaaaaca

SEQ ID NO: 2107917 - RNA, 20 nt, Human
uggaccuugaacuggguacu

SEQ ID NO: 2107918 - RNA, 19 nt, Human
aggaucucuugagccuggg

SEQ ID NO: 2107919 - RNA, 17 nt, Human
aggaucucuugagccug

SEQ ID NO: 2107920 - RNA, 18 nt, Human
aggaucucuugagccugg

SEQ ID NO: 2107921 - RNA, 14 nt, Human
uggacacagcucuu

SEQ ID NO: 2107922 - RNA, 13 nt, Human
uggacacagcucu

SEQ ID NO: 2107923 - RNA, 22 nt, Human
uggacacagcucuucuccaggc

SEQ ID NO: 2107924 - RNA, 21 nt, Human
uggacacagcucuucuccagg

SEQ ID NO: 2107925 - RNA, 17 nt, Human
uggacacacaaggugca

SEQ ID NO: 2107926 - RNA, 16 nt, Human
uggacaaucaugaaau

SEQ ID NO: 2107927 - RNA, 13 nt, Human
ugcuucaaaaaca

SEQ ID NO: 2107928 - RNA, 21 nt, Human
ugcuucaaaaacauucuuaca

SEQ ID NO: 2107929 - RNA, 23 nt, Human
ugcuuauuguuccaagacauugu

SEQ ID NO: 2107930 - RNA, 17 nt, Human
ugcuuauuguuccaaga

SEQ ID NO: 2107931 - RNA, 21 nt, Human
ugcuuauuguuccaagacauu

SEQ ID NO: 2107932 - RNA, 14 nt, Human
ugcuuauuguucca

SEQ ID NO: 2107933 - RNA, 15 nt, Human
ugcuuauuguuccaa

SEQ ID NO: 2107934 - RNA, 16 nt, Human
ugcuuauuguuccaag

SEQ ID NO: 2107935 - RNA, 16 nt, Human
ugcuuacucauuaaaa

SEQ ID NO: 2107936 - RNA, 16 nt, Human
ugcuguggccugggca

SEQ ID NO: 2107937 - RNA, 12 nt, Human
ugcuguggccug

SEQ ID NO: 2107938 - RNA, 14 nt, Human
ugcuguggccuggg

SEQ ID NO: 2107939 - RNA, 15 nt, Human
ugcuguggccugggc

SEQ ID NO: 2107940 - RNA, 18 nt, Human
aggacaccuguacuggag

SEQ ID NO: 2107941 - RNA, 19 nt, Human
aggacaccuguacuggaga

SEQ ID NO: 2107942 - RNA, 20 nt, Human
aggacaccuguacuggagag

SEQ ID NO: 2107943 - RNA, 22 nt, Human
aggacaccuguacuggagagca

SEQ ID NO: 2107944 - RNA, 18 nt, Human
aggacacuaaccacgcug

SEQ ID NO: 2107945 - RNA, 16 nt, Human
ugcuucaugaaaaucc

SEQ ID NO: 2107946 - RNA, 17 nt, Human
ugcuucaugaaaauccu

SEQ ID NO: 2107947 - RNA, 18 nt, Human
ugcuucaugaaaauccua

SEQ ID NO: 2107948 - RNA, 20 nt, Human
ugcuucaugaaaauccuacc

SEQ ID NO: 2107949 - RNA, 21 nt, Human
ugcuucaugaaaauccuacca

SEQ ID NO: 2107950 - RNA, 14 nt, Human
ugcuucaacugucu

SEQ ID NO: 2107951 - RNA, 15 nt, Human
ugcuuauuuuaaaau
